United States Patent Application Publication US 2007/0042381 A1 - sequence listing, part 52

SEQ ID NO: 2343235 - RNA, 17 nt, Human
ccuuuuuauuugcaugu

SEQ ID NO: 2343236 - RNA, 18 nt, Human
ccuuuuuauuugcaugug

SEQ ID NO: 2343237 - RNA, 17 nt, Human
cgacugccaucuuggac

SEQ ID NO: 2343238 - RNA, 16 nt, Human
cgacugcacagcggcc

SEQ ID NO: 2343239 - RNA, 17 nt, Human
cgacugcccggcagggu

SEQ ID NO: 2343240 - RNA, 15 nt, Human
cgacuggguuuaugu

SEQ ID NO: 2343241 - RNA, 20 nt, Human
cgacugcacagcggccccug

SEQ ID NO: 2343242 - RNA, 18 nt, Human
cgacucuauagacucuag

SEQ ID NO: 2343243 - RNA, 20 nt, Human
cgacucuauagacucuagga

SEQ ID NO: 2343244 - RNA, 16 nt, Human
cgacuccguuggccac

SEQ ID NO: 2343245 - RNA, 19 nt, Human
cgacuccguuggccacucc

SEQ ID NO: 2343246 - RNA, 13 nt, Human
cgacucugaccuc

SEQ ID NO: 2343247 - RNA, 13 nt, Human
cgacucagccuca

SEQ ID NO: 2343248 - RNA, 11 nt, Human
cgacucaggau

SEQ ID NO: 2343249 - RNA, 14 nt, Human
cgacuaauuucaaa

SEQ ID NO: 2343250 - RNA, 15 nt, Human
cgaccgaggcuggag

SEQ ID NO: 2343251 - RNA, 19 nt, Human
cgaccgaggcuggagcugg

SEQ ID NO: 2343252 - RNA, 12 nt, Human
cgaccuuuaccu

SEQ ID NO: 2343253 - RNA, 22 nt, Human
cgacggugggcauuugugaggc

SEQ ID NO: 2343254 - RNA, 15 nt, Human
cgacgcgucuccugu

SEQ ID NO: 2343255 - RNA, 19 nt, Human
cgacccuugccgucuaccu

SEQ ID NO: 2343256 - RNA, 20 nt, Human
cgacccuugccgucuaccug

SEQ ID NO: 2343257 - RNA, 23 nt, Human
cgggcgccuguagucccagccac

SEQ ID NO: 2343258 - RNA, 19 nt, Human
cgggcgagucacugccucu

SEQ ID NO: 2343259 - RNA, 17 nt, Human
cgggcgagucacugccu

SEQ ID NO: 2343260 - RNA, 11 nt, Human
cgggcucagca

SEQ ID NO: 2343261 - RNA, 20 nt, Human
cgggccaaggacugccgacc

SEQ ID NO: 2343262 - RNA, 14 nt, Human
cgggccaaggacug

SEQ ID NO: 2343263 - RNA, 12 nt, Human
cgggccaaggac

SEQ ID NO: 2343264 - RNA, 21 nt, Human
cgggcaugguggcgcaagccu

SEQ ID NO: 2343265 - RNA, 17 nt, Human
cgggccacagagaaagu

SEQ ID NO: 2343266 - RNA, 16 nt, Human
cgggcgcggccagccc

SEQ ID NO: 2343267 - RNA, 21 nt, Human
cgggcggucagggguucgaga

SEQ ID NO: 2343268 - RNA, 15 nt, Human
cgggcucagcaaaag

SEQ ID NO: 2343269 - RNA, 14 nt, Human
cgggcucugccucc

SEQ ID NO: 2343270 - RNA, 16 nt, Human
cgggcucugccuccca

SEQ ID NO: 2343271 - RNA, 14 nt, Human
cggggacagcuccu

SEQ ID NO: 2343272 - RNA, 14 nt, Human
cggggacagaggcc

SEQ ID NO: 2343273 - RNA, 16 nt, Human
cggggacagaggccug

SEQ ID NO: 2343274 - RNA, 17 nt, Human
cggggacagaggccugc

SEQ ID NO: 2343275 - RNA, 18 nt, Human
cggggacagaggccugcc

SEQ ID NO: 2343276 - RNA, 14 nt, Human
cgggcugcccugcc

SEQ ID NO: 2343277 - RNA, 17 nt, Human
cgggcgugguggcgggc

SEQ ID NO: 2343278 - RNA, 13 nt, Human
cgggcugccuggg

SEQ ID NO: 2343279 - RNA, 17 nt, Human
cgggcucugccucccau

SEQ ID NO: 2343280 - RNA, 16 nt, Human
cggugugggcuguguc

SEQ ID NO: 2343281 - RNA, 21 nt, Human
cggggacagaggccugcccgg

SEQ ID NO: 2343282 - RNA, 20 nt, Human
cgguguggugcagugugaaa

SEQ ID NO: 2343283 - RNA, 18 nt, Human
cgguguggagaagcggcu

SEQ ID NO: 2343284 - RNA, 15 nt, Human
cggggacagcuccuu

SEQ ID NO: 2343285 - RNA, 13 nt, Human
cgguguggagaag

SEQ ID NO: 2343286 - RNA, 15 nt, Human
cggaggccccaaagg

SEQ ID NO: 2343287 - RNA, 16 nt, Human
cggaggccacaugagu

SEQ ID NO: 2343288 - RNA, 19 nt, Human
cggaggccacaugaguccc

SEQ ID NO: 2343289 - RNA, 21 nt, Human
cggaggccacaugagucccag

SEQ ID NO: 2343290 - RNA, 14 nt, Human
cggaggccccaaag

SEQ ID NO: 2343291 - RNA, 12 nt, Human
cggcuccaggcu

SEQ ID NO: 2343292 - RNA, 16 nt, Human
cggcucacugcagccu

SEQ ID NO: 2343293 - RNA, 17 nt, Human
cggcucacugcagccuc

SEQ ID NO: 2343294 - RNA, 18 nt, Human
cggagucccaccuuggcu

SEQ ID NO: 2343295 - RNA, 20 nt, Human
cggagucccaccuuggcugc

SEQ ID NO: 2343296 - RNA, 15 nt, Human
cggcucacugcagcc

SEQ ID NO: 2343297 - RNA, 14 nt, Human
cggcucacugcagc

SEQ ID NO: 2343298 - RNA, 13 nt, Human
cggcuccaggcuc

SEQ ID NO: 2343299 - RNA, 14 nt, Human
cggcuccaggcucc

SEQ ID NO: 2343300 - RNA, 15 nt, Human
cggcuccaggcuccu

SEQ ID NO: 2343301 - RNA, 16 nt, Human
cggcuccaggcuccuu

SEQ ID NO: 2343302 - RNA, 12 nt, Human
cgggccacagag

SEQ ID NO: 2343303 - RNA, 14 nt, Human
cgggccacagagaa

SEQ ID NO: 2343304 - RNA, 14 nt, Human
cggcucccuggagc

SEQ ID NO: 2343305 - RNA, 20 nt, Human
cggcuccccauguguccugg

SEQ ID NO: 2343306 - RNA, 15 nt, Human
cggcuccccaugugu

SEQ ID NO: 2343307 - RNA, 17 nt, Human
cggcuccccaugugucc

SEQ ID NO: 2343308 - RNA, 13 nt, Human
cggagcuggcccc

SEQ ID NO: 2343309 - RNA, 16 nt, Human
cggagcuggccccgcc

SEQ ID NO: 2343310 - RNA, 21 nt, Human
cggagcuggccccgccgccug

SEQ ID NO: 2343311 - RNA, 16 nt, Human
cggagucccaccuugg

SEQ ID NO: 2343312 - RNA, 20 nt, Human
cggagcuaacacuggccccu

SEQ ID NO: 2343313 - RNA, 21 nt, Human
cggagcuaacacuggccccua

SEQ ID NO: 2343314 - RNA, 19 nt, Human
cggagcuaacacuggcccc

SEQ ID NO: 2343315 - RNA, 20 nt, Human
cgccuguaaucccagcacuu

SEQ ID NO: 2343316 - RNA, 17 nt, Human
cgccuguaaucccagca

SEQ ID NO: 2343317 - RNA, 16 nt, Human
cgccuguaaucccagc

SEQ ID NO: 2343318 - RNA, 20 nt, Human
cgccuguaaucccagcuacu

SEQ ID NO: 2343319 - RNA, 18 nt, Human
cgccuguaaucccagcag

SEQ ID NO: 2343320 - RNA, 18 nt, Human
cgccuguaaucccagcac

SEQ ID NO: 2343321 - RNA, 17 nt, Human
cgccuguaaucccagcu

SEQ ID NO: 2343322 - RNA, 15 nt, Human
cgccuguagucccag

SEQ ID NO: 2343323 - RNA, 18 nt, Human
cgccuguagucccagcca

SEQ ID NO: 2343324 - RNA, 13 nt, Human
cgcugauauaugu

SEQ ID NO: 2343325 - RNA, 12 nt, Human
cgcugaugcugg

SEQ ID NO: 2343326 - RNA, 13 nt, Human
cgcugaugcuggg

SEQ ID NO: 2343327 - RNA, 14 nt, Human
cgcugaugcugggc

SEQ ID NO: 2343328 - RNA, 16 nt, Human
cgcugaugcugggcug

SEQ ID NO: 2343329 - RNA, 17 nt, Human
cgcugaugcugggcugg

SEQ ID NO: 2343330 - RNA, 19 nt, Human
cgcugcaaccuguugauag

SEQ ID NO: 2343331 - RNA, 16 nt, Human
cgcugauucucagggu

SEQ ID NO: 2343332 - RNA, 23 nt, Human
cgcugauucucagggucucugcu

SEQ ID NO: 2343333 - RNA, 14 nt, Human
cgcugauucucagg

SEQ ID NO: 2343334 - RNA, 19 nt, Human
cgcugaugcugggcugggu

SEQ ID NO: 2343335 - RNA, 21 nt, Human
cgcugaugcugggcugggugc

SEQ ID NO: 2343336 - RNA, 18 nt, Human
cgcugcccaggggagccc

SEQ ID NO: 2343337 - RNA, 20 nt, Human
cgcugccacccaccucccug

SEQ ID NO: 2343338 - RNA, 17 nt, Human
cgcugccacccaccucc

SEQ ID NO: 2343339 - RNA, 16 nt, Human
cgcugccacccaccuc

SEQ ID NO: 2343340 - RNA, 19 nt, Human
cgcugccagcucuguauca

SEQ ID NO: 2343341 - RNA, 15 nt, Human
cgcugccagcucugu

SEQ ID NO: 2343342 - RNA, 22 nt, Human
cgugaucaaagccacacucugg

SEQ ID NO: 2343343 - RNA, 18 nt, Human
cgugauccacccaccucg

SEQ ID NO: 2343344 - RNA, 13 nt, Human
cgugaucuuggcu

SEQ ID NO: 2343345 - RNA, 22 nt, Human
cgugaucucggcucacugcaac

SEQ ID NO: 2343346 - RNA, 18 nt, Human
cgugauuuugcuguagaa

SEQ ID NO: 2343347 - RNA, 20 nt, Human
cgugcaauuuguuugugcuu

SEQ ID NO: 2343348 - RNA, 23 nt, Human
cgugauguaggguaaggugccuu

SEQ ID NO: 2343349 - RNA, 17 nt, Human
cgugaugccucccuguu

SEQ ID NO: 2343350 - RNA, 14 nt, Human
cgugcacacaccag

SEQ ID NO: 2343351 - RNA, 20 nt, Human
cguguaaccauggacccaau

SEQ ID NO: 2343352 - RNA, 21 nt, Human
cguguggcaauagugggcccu

SEQ ID NO: 2343353 - RNA, 16 nt, Human
cgugugcgugcaugug

SEQ ID NO: 2343354 - RNA, 12 nt, Human
cguguaaaccaa

SEQ ID NO: 2343355 - RNA, 15 nt, Human
cguguaaaccaaagc

SEQ ID NO: 2343356 - RNA, 19 nt, Human
cgugguguuauuuaaagaa

SEQ ID NO: 2343357 - RNA, 18 nt, Human
cgugguguuauuuaaaga

SEQ ID NO: 2343358 - RNA, 21 nt, Human
cgugguggaagaggggacagg

SEQ ID NO: 2343359 - RNA, 17 nt, Human
cgugaguccuggcaugg

SEQ ID NO: 2343360 - RNA, 17 nt, Human
cgugaggccagagacac

SEQ ID NO: 2343361 - RNA, 16 nt, Human
cgugaguccuggcaug

SEQ ID NO: 2343362 - RNA, 16 nt, Human
cgguuuuacugcagcu

SEQ ID NO: 2343363 - RNA, 21 nt, Human
cgguuuggggagcagagacac

SEQ ID NO: 2343364 - RNA, 15 nt, Human
cgguuugaagccugg

SEQ ID NO: 2343365 - RNA, 11 nt, Human
cgguuucucca

SEQ ID NO: 2343366 - RNA, 23 nt, Human
cgguguuuaagacauuuuuggaa

SEQ ID NO: 2343367 - RNA, 18 nt, Human
cgguguggugcaguguga

SEQ ID NO: 2343368 - RNA, 14 nt, Human
cguaaaauuaagaa

SEQ ID NO: 2343369 - RNA, 17 nt, Human
ccagcuacaccuuucuc

SEQ ID NO: 2343370 - RNA, 12 nt, Human
ccagcucacccc

SEQ ID NO: 2343371 - RNA, 13 nt, Human
ccagcucaccccc

SEQ ID NO: 2343372 - RNA, 17 nt, Human
ccagcucaccccccaca

SEQ ID NO: 2343373 - RNA, 19 nt, Human
ccagcucaccccccacacu

SEQ ID NO: 2343374 - RNA, 23 nt, Human
ccagcucaccccccacacucacu

SEQ ID NO: 2343375 - RNA, 13 nt, Human
ccagcucagaggg

SEQ ID NO: 2343376 - RNA, 14 nt, Human
ccagcucacgucac

SEQ ID NO: 2343377 - RNA, 14 nt, Human
ccagcucaccccug

SEQ ID NO: 2343378 - RNA, 19 nt, Human
ccagcucaccccuggagga

SEQ ID NO: 2343379 - RNA, 15 nt, Human
ccagcucacgucaca

SEQ ID NO: 2343380 - RNA, 19 nt, Human
ccagcucaggacagaugcc

SEQ ID NO: 2343381 - RNA, 13 nt, Human
ccagcucaggaca

SEQ ID NO: 2343382 - RNA, 15 nt, Human
ccagcucagucccau

SEQ ID NO: 2343383 - RNA, 20 nt, Human
ccagcucaggacagaugcca

SEQ ID NO: 2343384 - RNA, 23 nt, Human
ccagcucaggacagaugccacac

SEQ ID NO: 2343385 - RNA, 23 nt, Human
ccagcuaaggacauuucccaggg

SEQ ID NO: 2343386 - RNA, 21 nt, Human
ccagcuaaggacauuucccag

SEQ ID NO: 2343387 - RNA, 19 nt, Human
ccagcuaagaaccuggaac

SEQ ID NO: 2343388 - RNA, 18 nt, Human
ccagcuaagaaccuggaa

SEQ ID NO: 2343389 - RNA, 17 nt, Human
ccagcuaagaaccugga

SEQ ID NO: 2343390 - RNA, 17 nt, Human
ccagcuaaucuguaggg

SEQ ID NO: 2343391 - RNA, 20 nt, Human
ccagcuaaucuguagggcug

SEQ ID NO: 2343392 - RNA, 21 nt, Human
ccagcuaaucuguagggcugg

SEQ ID NO: 2343393 - RNA, 22 nt, Human
ccagcuaaucuguagggcugga

SEQ ID NO: 2343394 - RNA, 23 nt, Human
ccagcuaaucuguagggcuggac

SEQ ID NO: 2343395 - RNA, 15 nt, Human
ccagcuaagaaccug

SEQ ID NO: 2343396 - RNA, 14 nt, Human
ccagcuaagaaccu

SEQ ID NO: 2343397 - RNA, 13 nt, Human
ccagcuaagaacc

SEQ ID NO: 2343398 - RNA, 22 nt, Human
ccagcguuugaggggcuggccu

SEQ ID NO: 2343399 - RNA, 17 nt, Human
ccagcguuugaggggcu

SEQ ID NO: 2343400 - RNA, 16 nt, Human
ccagccccuucucaga

SEQ ID NO: 2343401 - RNA, 21 nt, Human
ccagccccuucucagaaucua

SEQ ID NO: 2343402 - RNA, 19 nt, Human
ccagcguccuccucuguga

SEQ ID NO: 2343403 - RNA, 21 nt, Human
ccagcagaucccagcucacgu

SEQ ID NO: 2343404 - RNA, 19 nt, Human
ccagcagaucccagcucac

SEQ ID NO: 2343405 - RNA, 13 nt, Human
ccagccccuggcc

SEQ ID NO: 2343406 - RNA, 21 nt, Human
ccagccccuggaugcagccuc

SEQ ID NO: 2343407 - RNA, 10 nt, Human
ccagccccuu

SEQ ID NO: 2343408 - RNA, 23 nt, Human
ccagccccuggccccaggaccug

SEQ ID NO: 2343409 - RNA, 21 nt, Human
ccagccccuggccccaggacc

SEQ ID NO: 2343410 - RNA, 19 nt, Human
ccagccccuguauggcacu

SEQ ID NO: 2343411 - RNA, 12 nt, Human
ccagccccugua

SEQ ID NO: 2343412 - RNA, 14 nt, Human
ccagcagccuggac

SEQ ID NO: 2343413 - RNA, 15 nt, Human
ccagcagccuggacc

SEQ ID NO: 2343414 - RNA, 20 nt, Human
ccagcagccuggacccugug

SEQ ID NO: 2343415 - RNA, 19 nt, Human
ccagcagccuggacccugu

SEQ ID NO: 2343416 - RNA, 22 nt, Human
ccaggaacacccgacuccucaa

SEQ ID NO: 2343417 - RNA, 16 nt, Human
ccaggaaaugugcaca

SEQ ID NO: 2343418 - RNA, 21 nt, Human
ccaggaacaaucgauggccuu

SEQ ID NO: 2343419 - RNA, 22 nt, Human
ccagcucagucccaucagagag

SEQ ID NO: 2343420 - RNA, 16 nt, Human
ccagcuuaucucaggg

SEQ ID NO: 2343421 - RNA, 14 nt, Human
ccagcuucuccagg

SEQ ID NO: 2343422 - RNA, 15 nt, Human
ccagcuucuccaggc

SEQ ID NO: 2343423 - RNA, 16 nt, Human
ccagcuucuccaggcu

SEQ ID NO: 2343424 - RNA, 17 nt, Human
ccagcuucuccaggcuc

SEQ ID NO: 2343425 - RNA, 18 nt, Human
ccagcuucuccaggcucu

SEQ ID NO: 2343426 - RNA, 21 nt, Human
ccagcuucugguacucuccua

SEQ ID NO: 2343427 - RNA, 22 nt, Human
ccagcuucugguacucuccuag

SEQ ID NO: 2343428 - RNA, 23 nt, Human
ccagcuucugguacucuccuaga

SEQ ID NO: 2343429 - RNA, 18 nt, Human
ccagcuugaaaccuucac

SEQ ID NO: 2343430 - RNA, 21 nt, Human
ccaggaaaggcuccaggagca

SEQ ID NO: 2343431 - RNA, 22 nt, Human
ccaggaaaggcuccaggagcag

SEQ ID NO: 2343432 - RNA, 23 nt, Human
ccaggaaaggcuccaggagcagc

SEQ ID NO: 2343433 - RNA, 17 nt, Human
ccacucuccccacacua

SEQ ID NO: 2343434 - RNA, 20 nt, Human
ccacucucccccacccccuc

SEQ ID NO: 2343435 - RNA, 12 nt, Human
ccacucuccuug

SEQ ID NO: 2343436 - RNA, 21 nt, Human
ccacucuccuugcuacccaga

SEQ ID NO: 2343437 - RNA, 16 nt, Human
ccacucugccucugcc

SEQ ID NO: 2343438 - RNA, 14 nt, Human
ccacucugccucug

SEQ ID NO: 2343439 - RNA, 23 nt, Human
ccacucuccuugcuacccagaaa

SEQ ID NO: 2343440 - RNA, 21 nt, Human
ccacucugcucgccuuagcac

SEQ ID NO: 2343441 - RNA, 13 nt, Human
ccacucugcuucu

SEQ ID NO: 2343442 - RNA, 14 nt, Human
ccacucugcuucuc

SEQ ID NO: 2343443 - RNA, 17 nt, Human
ccacucugcuucucuga

SEQ ID NO: 2343444 - RNA, 19 nt, Human
ccacucugcuucucugacu

SEQ ID NO: 2343445 - RNA, 20 nt, Human
ccacucugcuucucugacuu

SEQ ID NO: 2343446 - RNA, 21 nt, Human
ccacucugcuuugacugagca

SEQ ID NO: 2343447 - RNA, 18 nt, Human
ccagcagaucccagcuca

SEQ ID NO: 2343448 - RNA, 17 nt, Human
ccagcagaucccagcuc

SEQ ID NO: 2343449 - RNA, 16 nt, Human
ccagcagaucccagcu

SEQ ID NO: 2343450 - RNA, 15 nt, Human
ccagcagaucccagc

SEQ ID NO: 2343451 - RNA, 23 nt, Human
ccagcagagcaccuuagacaguc

SEQ ID NO: 2343452 - RNA, 19 nt, Human
ccagcagagcaccuuagac

SEQ ID NO: 2343453 - RNA, 16 nt, Human
ccaggauugaagagca

SEQ ID NO: 2343454 - RNA, 17 nt, Human
ccaggauugaagagcau

SEQ ID NO: 2343455 - RNA, 18 nt, Human
ccaggauugaagagcauu

SEQ ID NO: 2343456 - RNA, 23 nt, Human
ccaggauuuuaacaaaagcaaga

SEQ ID NO: 2343457 - RNA, 17 nt, Human
ccaggcaacuugggaac

SEQ ID NO: 2343458 - RNA, 19 nt, Human
ccaggcaaaucaguuacua

SEQ ID NO: 2343459 - RNA, 20 nt, Human
ccaggauuuuaacaaaagca

SEQ ID NO: 2343460 - RNA, 12 nt, Human
ccaggcaaauca

SEQ ID NO: 2343461 - RNA, 13 nt, Human
ccaggcugggaga

SEQ ID NO: 2343462 - RNA, 14 nt, Human
ccaggcugggagag

SEQ ID NO: 2343463 - RNA, 21 nt, Human
ccaggaguguggccacguggg

SEQ ID NO: 2343464 - RNA, 20 nt, Human
ccaggaguucgaggcugcag

SEQ ID NO: 2343465 - RNA, 23 nt, Human
ccaggauggcccuucccacugga

SEQ ID NO: 2343466 - RNA, 22 nt, Human
ccaggauguacaaggacagccc

SEQ ID NO: 2343467 - RNA, 18 nt, Human
ccaggaggucgaccccaa

SEQ ID NO: 2343468 - RNA, 19 nt, Human
ccaggagggcacuggagcu

SEQ ID NO: 2343469 - RNA, 22 nt, Human
ccaggagguggcuauggccacc

SEQ ID NO: 2343470 - RNA, 16 nt, Human
ccaggagggcacugga

SEQ ID NO: 2343471 - RNA, 17 nt, Human
ccaggagggcacuggag

SEQ ID NO: 2343472 - RNA, 20 nt, Human
ccaggagggcacuggagcug

SEQ ID NO: 2343473 - RNA, 15 nt, Human
ccaggcacacacugu

SEQ ID NO: 2343474 - RNA, 16 nt, Human
ccaggcacacacugug

SEQ ID NO: 2343475 - RNA, 22 nt, Human
ccaggcugggagagccuuccag

SEQ ID NO: 2343476 - RNA, 20 nt, Human
ccaggggcugcuuccuccug

SEQ ID NO: 2343477 - RNA, 21 nt, Human
ccaggggcugcuuccuccugg

SEQ ID NO: 2343478 - RNA, 22 nt, Human
ccaggggcugcuuccuccugga

SEQ ID NO: 2343479 - RNA, 23 nt, Human
ccaggggcugcuuccuccuggaa

SEQ ID NO: 2343480 - RNA, 15 nt, Human
ccaggcugggagagc

SEQ ID NO: 2343481 - RNA, 17 nt, Human
ccaggcugggagagccu

SEQ ID NO: 2343482 - RNA, 18 nt, Human
ccaggcugggagagccuu

SEQ ID NO: 2343483 - RNA, 21 nt, Human
ccaggcugggagagccuucca

SEQ ID NO: 2343484 - RNA, 12 nt, Human
ccagucagccuc

SEQ ID NO: 2343485 - RNA, 13 nt, Human
ccagucagccucu

SEQ ID NO: 2343486 - RNA, 14 nt, Human
ccagucagccucuc

SEQ ID NO: 2343487 - RNA, 15 nt, Human
ccagucagccucucu

SEQ ID NO: 2343488 - RNA, 17 nt, Human
ccagucagccucucucc

SEQ ID NO: 2343489 - RNA, 18 nt, Human
ccagucagccucucuccc

SEQ ID NO: 2343490 - RNA, 19 nt, Human
ccagucagccucucuccca

SEQ ID NO: 2343491 - RNA, 20 nt, Human
ccagucagccucucucccag

SEQ ID NO: 2343492 - RNA, 22 nt, Human
ccagucagccucucucccaguc

SEQ ID NO: 2343493 - RNA, 23 nt, Human
ccagucagccucucucccagucu

SEQ ID NO: 2343494 - RNA, 14 nt, Human
ccagucccaggggc

SEQ ID NO: 2343495 - RNA, 15 nt, Human
ccaguccccaccccu

SEQ ID NO: 2343496 - RNA, 16 nt, Human
ccaguccccaccccug

SEQ ID NO: 2343497 - RNA, 17 nt, Human
ccaguccccaccccugc

SEQ ID NO: 2343498 - RNA, 18 nt, Human
ccaguccccaccccugcc

SEQ ID NO: 2343499 - RNA, 19 nt, Human
ccaguccccaccccugccc

SEQ ID NO: 2343500 - RNA, 21 nt, Human
ccaguccccaccccugccccc

SEQ ID NO: 2343501 - RNA, 22 nt, Human
ccaguccccaccccugccccca

SEQ ID NO: 2343502 - RNA, 14 nt, Human
ccagucccccugcc

SEQ ID NO: 2343503 - RNA, 17 nt, Human
ccaguccccccacccuc

SEQ ID NO: 2343504 - RNA, 15 nt, Human
ccagucccccaaccc

SEQ ID NO: 2343505 - RNA, 16 nt, Human
ccagucccccaacccc

SEQ ID NO: 2343506 - RNA, 20 nt, Human
ccagucccccaaccccagcc

SEQ ID NO: 2343507 - RNA, 21 nt, Human
ccagucccccaaccccagccg

SEQ ID NO: 2343508 - RNA, 23 nt, Human
ccagucccccaaccccagccgcu

SEQ ID NO: 2343509 - RNA, 15 nt, Human
ccaguccccccaccc

SEQ ID NO: 2343510 - RNA, 12 nt, Human
ccagucaccccg

SEQ ID NO: 2343511 - RNA, 13 nt, Human
ccagucaccccgg

SEQ ID NO: 2343512 - RNA, 20 nt, Human
ccagucaccccggccaccug

SEQ ID NO: 2343513 - RNA, 21 nt, Human
ccagucaccccggccaccugc

SEQ ID NO: 2343514 - RNA, 22 nt, Human
ccagggggccagucccugaggc

SEQ ID NO: 2343515 - RNA, 20 nt, Human
ccagggggacuagccccugu

SEQ ID NO: 2343516 - RNA, 23 nt, Human
ccagggggacuagccccugugga

SEQ ID NO: 2343517 - RNA, 14 nt, Human
ccaggggcuggcuu

SEQ ID NO: 2343518 - RNA, 21 nt, Human
ccaggggcuggcuucaggagg

SEQ ID NO: 2343519 - RNA, 19 nt, Human
ccaggggcuggcuucagga

SEQ ID NO: 2343520 - RNA, 17 nt, Human
ccagggggacuagcccc

SEQ ID NO: 2343521 - RNA, 18 nt, Human
ccagggggacuagccccu

SEQ ID NO: 2343522 - RNA, 19 nt, Human
ccagggggacuagccccug

SEQ ID NO: 2343523 - RNA, 14 nt, Human
ccagucaaccuggg

SEQ ID NO: 2343524 - RNA, 15 nt, Human
ccaggagggcacugg

SEQ ID NO: 2343525 - RNA, 22 nt, Human
ccauugaauucuugguugagga

SEQ ID NO: 2343526 - RNA, 13 nt, Human
ccauugaauucuu

SEQ ID NO: 2343527 - RNA, 22 nt, Human
ccauuuaaagcuuauuaaaacu

SEQ ID NO: 2343528 - RNA, 17 nt, Human
ccauugacauguacaga

SEQ ID NO: 2343529 - RNA, 15 nt, Human
ccauugacauguaca

SEQ ID NO: 2343530 - RNA, 16 nt, Human
ccauugacauguacag

SEQ ID NO: 2343531 - RNA, 19 nt, Human
ccauuuaaauuuuuuuccu

SEQ ID NO: 2343532 - RNA, 19 nt, Human
ccauuuaguucuuuguuau

SEQ ID NO: 2343533 - RNA, 14 nt, Human
ccauuuagccacca

SEQ ID NO: 2343534 - RNA, 18 nt, Human
ccauuuauacaaauuaga

SEQ ID NO: 2343535 - RNA, 14 nt, Human
ccauuuauccaccu

SEQ ID NO: 2343536 - RNA, 16 nt, Human
ccauuuauccaccucc

SEQ ID NO: 2343537 - RNA, 21 nt, Human
ccauuuagguuucugaguucc

SEQ ID NO: 2343538 - RNA, 16 nt, Human
ccauuuagguuucuga

SEQ ID NO: 2343539 - RNA, 21 nt, Human
ccauuucuaaaggccucuucc

SEQ ID NO: 2343540 - RNA, 19 nt, Human
ccauuucuaaaggccucuu

SEQ ID NO: 2343541 - RNA, 13 nt, Human
ccauuuccugaga

SEQ ID NO: 2343542 - RNA, 13 nt, Human
ccauuucuacucu

SEQ ID NO: 2343543 - RNA, 18 nt, Human
ccauuucuacucucccau

SEQ ID NO: 2343544 - RNA, 15 nt, Human
ccauucuuuuguaau

SEQ ID NO: 2343545 - RNA, 16 nt, Human
ccauucuuuuguaauu

SEQ ID NO: 2343546 - RNA, 18 nt, Human
ccauucuuuuguaauuua

SEQ ID NO: 2343547 - RNA, 22 nt, Human
ccauucuuuuguaauuuaaaug

SEQ ID NO: 2343548 - RNA, 17 nt, Human
ccauucuuucugauaac

SEQ ID NO: 2343549 - RNA, 13 nt, Human
ccauucuuucuga

SEQ ID NO: 2343550 - RNA, 12 nt, Human
ccauucuuucug

SEQ ID NO: 2343551 - RNA, 14 nt, Human
ccaugggccuccug

SEQ ID NO: 2343552 - RNA, 15 nt, Human
ccaugggccuccugu

SEQ ID NO: 2343553 - RNA, 19 nt, Human
ccauccuaccaaugcaugc

SEQ ID NO: 2343554 - RNA, 20 nt, Human
ccauccuaccaaugcaugca

SEQ ID NO: 2343555 - RNA, 23 nt, Human
ccauccuaaucauccaaugcuca

SEQ ID NO: 2343556 - RNA, 15 nt, Human
ccauccuaccaaugc

SEQ ID NO: 2343557 - RNA, 22 nt, Human
ccauccuaaucauccaaugcuc

SEQ ID NO: 2343558 - RNA, 21 nt, Human
ccauccuaaucauccaaugcu

SEQ ID NO: 2343559 - RNA, 15 nt, Human
ccauccgccagggcc

SEQ ID NO: 2343560 - RNA, 16 nt, Human
ccauccgccagggccc

SEQ ID NO: 2343561 - RNA, 19 nt, Human
ccauccggcccccagagcg

SEQ ID NO: 2343562 - RNA, 15 nt, Human
ccaucccugccuggu

SEQ ID NO: 2343563 - RNA, 16 nt, Human
ccaucccugccugguc

SEQ ID NO: 2343564 - RNA, 15 nt, Human
ccauccccuggacug

SEQ ID NO: 2343565 - RNA, 12 nt, Human
ccaucccugccu

SEQ ID NO: 2343566 - RNA, 13 nt, Human
ccaucccugccug

SEQ ID NO: 2343567 - RNA, 14 nt, Human
ccaucccugccugg

SEQ ID NO: 2343568 - RNA, 19 nt, Human
ccaucccuuuuugaagugu

SEQ ID NO: 2343569 - RNA, 17 nt, Human
ccaucccugccugguca

SEQ ID NO: 2343570 - RNA, 17 nt, Human
ccauccccgcagugugc

SEQ ID NO: 2343571 - RNA, 13 nt, Human
ccauccccuggac

SEQ ID NO: 2343572 - RNA, 14 nt, Human
ccauccccgcagug

SEQ ID NO: 2343573 - RNA, 19 nt, Human
ccaucccccugcccucgug

SEQ ID NO: 2343574 - RNA, 14 nt, Human
ccaucccccugccc

SEQ ID NO: 2343575 - RNA, 15 nt, Human
ccaucccccugcccu

SEQ ID NO: 2343576 - RNA, 22 nt, Human
ccauccccauccuccagcuucu

SEQ ID NO: 2343577 - RNA, 14 nt, Human
ccauccccccucac

SEQ ID NO: 2343578 - RNA, 19 nt, Human
ccauccccccucaccaggg

SEQ ID NO: 2343579 - RNA, 20 nt, Human
ccauccccccucaccagggg

SEQ ID NO: 2343580 - RNA, 21 nt, Human
ccauccccccucaccaggggc

SEQ ID NO: 2343581 - RNA, 22 nt, Human
ccauccccccucaccaggggca

SEQ ID NO: 2343582 - RNA, 12 nt, Human
ccaucccccugc

SEQ ID NO: 2343583 - RNA, 13 nt, Human
ccaucccccugcc

SEQ ID NO: 2343584 - RNA, 22 nt, Human
ccauccccuguagagugggagc

SEQ ID NO: 2343585 - RNA, 16 nt, Human
ccauccccuguagagu

SEQ ID NO: 2343586 - RNA, 14 nt, Human
ccaugagccucagc

SEQ ID NO: 2343587 - RNA, 18 nt, Human
ccaugagccucagcaucc

SEQ ID NO: 2343588 - RNA, 19 nt, Human
ccaugagccucagcauccu

SEQ ID NO: 2343589 - RNA, 13 nt, Human
ccaugaguccccu

SEQ ID NO: 2343590 - RNA, 13 nt, Human
ccaugggccuccu

SEQ ID NO: 2343591 - RNA, 16 nt, Human
ccaugaguccccuguu

SEQ ID NO: 2343592 - RNA, 14 nt, Human
ccaugaguccccug

SEQ ID NO: 2343593 - RNA, 15 nt, Human
ccaugaguccccugu

SEQ ID NO: 2343594 - RNA, 14 nt, Human
ccaguuugcagaaa

SEQ ID NO: 2343595 - RNA, 23 nt, Human
ccaguuugcagaaaagcaccugc

SEQ ID NO: 2343596 - RNA, 13 nt, Human
ccauaaaaagcug

SEQ ID NO: 2343597 - RNA, 14 nt, Human
ccauaaaaagcuga

SEQ ID NO: 2343598 - RNA, 12 nt, Human
ccauaaaacauu

SEQ ID NO: 2343599 - RNA, 19 nt, Human
ccauaaaacauuaagaaaa

SEQ ID NO: 2343600 - RNA, 20 nt, Human
ccauaaaacauuaagaaaau

SEQ ID NO: 2343601 - RNA, 22 nt, Human
ccauaaacacccaugaaucaaa

SEQ ID NO: 2343602 - RNA, 14 nt, Human
ccauaaacuucaug

SEQ ID NO: 2343603 - RNA, 16 nt, Human
ccauaaacuucauggu

SEQ ID NO: 2343604 - RNA, 19 nt, Human
ccauaaagaagauguuuaa

SEQ ID NO: 2343605 - RNA, 20 nt, Human
ccauaaagaagauguuuaac

SEQ ID NO: 2343606 - RNA, 13 nt, Human
ccauaaagaagca

SEQ ID NO: 2343607 - RNA, 13 nt, Human
ccauaacagccaa

SEQ ID NO: 2343608 - RNA, 15 nt, Human
ccauaacagccaaca

SEQ ID NO: 2343609 - RNA, 17 nt, Human
ccaucccacugcucccc

SEQ ID NO: 2343610 - RNA, 20 nt, Human
ccaucccacugcucccccaa

SEQ ID NO: 2343611 - RNA, 16 nt, Human
ccaucccacacccugg

SEQ ID NO: 2343612 - RNA, 21 nt, Human
ccaucccagagggugggcuuc

SEQ ID NO: 2343613 - RNA, 18 nt, Human
ccauccccauccuccagc

SEQ ID NO: 2343614 - RNA, 12 nt, Human
ccaucccagccc

SEQ ID NO: 2343615 - RNA, 14 nt, Human
ccaucccacacccu

SEQ ID NO: 2343616 - RNA, 12 nt, Human
ccaucccacacc

SEQ ID NO: 2343617 - RNA, 13 nt, Human
ccauacagcucua

SEQ ID NO: 2343618 - RNA, 23 nt, Human
ccaucccaaacccuucagugcca

SEQ ID NO: 2343619 - RNA, 20 nt, Human
ccauaauuuuuuuuuuccuu

SEQ ID NO: 2343620 - RNA, 16 nt, Human
ccauaaccgcugauuc

SEQ ID NO: 2343621 - RNA, 17 nt, Human
ccauaaccgcugauucu

SEQ ID NO: 2343622 - RNA, 22 nt, Human
ccauaaccgcugauucucaggg

SEQ ID NO: 2343623 - RNA, 13 nt, Human
ccauacauuugug

SEQ ID NO: 2343624 - RNA, 14 nt, Human
ccauacauuugugu

SEQ ID NO: 2343625 - RNA, 17 nt, Human
cccucaagaggaaguga

SEQ ID NO: 2343626 - RNA, 20 nt, Human
cccucaagccaauccccucc

SEQ ID NO: 2343627 - RNA, 16 nt, Human
cccucaaggccuccca

SEQ ID NO: 2343628 - RNA, 21 nt, Human
cccucaagccaauccccuccu

SEQ ID NO: 2343629 - RNA, 17 nt, Human
cccucaaggccucccac

SEQ ID NO: 2343630 - RNA, 19 nt, Human
cccucaauucccccuggcc

SEQ ID NO: 2343631 - RNA, 22 nt, Human
cccucaaggccucccacaguga

SEQ ID NO: 2343632 - RNA, 18 nt, Human
cccucaaggccucccaca

SEQ ID NO: 2343633 - RNA, 19 nt, Human
cccucaaggccucccacag

SEQ ID NO: 2343634 - RNA, 20 nt, Human
cccucaaggccucccacagu

SEQ ID NO: 2343635 - RNA, 21 nt, Human
cccucaaggccucccacagug

SEQ ID NO: 2343636 - RNA, 14 nt, Human
cccucacacuggga

SEQ ID NO: 2343637 - RNA, 13 nt, Human
cccucacacuggg

SEQ ID NO: 2343638 - RNA, 12 nt, Human
cccucacacugg

SEQ ID NO: 2343639 - RNA, 10 nt, Human
cccucacacu

SEQ ID NO: 2343640 - RNA, 12 nt, Human
cccucacagccu

SEQ ID NO: 2343641 - RNA, 13 nt, Human
cccucacagccuc

SEQ ID NO: 2343642 - RNA, 14 nt, Human
cccucacucuggcc

SEQ ID NO: 2343643 - RNA, 16 nt, Human
cccucacucuggccuc

SEQ ID NO: 2343644 - RNA, 18 nt, Human
cccucacugaaugccuca

SEQ ID NO: 2343645 - RNA, 14 nt, Human
cccucacuggauga

SEQ ID NO: 2343646 - RNA, 17 nt, Human
cccuauggaagcauauu

SEQ ID NO: 2343647 - RNA, 16 nt, Human
cccuauggaugugggg

SEQ ID NO: 2343648 - RNA, 13 nt, Human
cccuaugcugccu

SEQ ID NO: 2343649 - RNA, 21 nt, Human
cccuaucuuugccacccucau

SEQ ID NO: 2343650 - RNA, 18 nt, Human
cccuauggggauggucca

SEQ ID NO: 2343651 - RNA, 16 nt, Human
cccuauggggaugguc

SEQ ID NO: 2343652 - RNA, 20 nt, Human
cccucaacucuccuccagag

SEQ ID NO: 2343653 - RNA, 19 nt, Human
cccuaucuuugccacccuc

SEQ ID NO: 2343654 - RNA, 16 nt, Human
cccuaucuuugccacc

SEQ ID NO: 2343655 - RNA, 14 nt, Human
cccuaucuuugcca

SEQ ID NO: 2343656 - RNA, 17 nt, Human
cccuaucuaacccuccc

SEQ ID NO: 2343657 - RNA, 23 nt, Human
cccuaucuaacccucccauggca

SEQ ID NO: 2343658 - RNA, 12 nt, Human
cccggcugcgga

SEQ ID NO: 2343659 - RNA, 13 nt, Human
cccggcugcccuu

SEQ ID NO: 2343660 - RNA, 12 nt, Human
cccggcugcccu

SEQ ID NO: 2343661 - RNA, 23 nt, Human
cccggcugguuuuguaagaugcu

SEQ ID NO: 2343662 - RNA, 17 nt, Human
cccggcugguuuuguaa

SEQ ID NO: 2343663 - RNA, 22 nt, Human
cccuauccuacuuccccuuccu

SEQ ID NO: 2343664 - RNA, 12 nt, Human
cccgggaagggg

SEQ ID NO: 2343665 - RNA, 17 nt, Human
ccccuucugacccaugc

SEQ ID NO: 2343666 - RNA, 14 nt, Human
ccccuucugcucag

SEQ ID NO: 2343667 - RNA, 14 nt, Human
ccccuucucuccuc

SEQ ID NO: 2343668 - RNA, 15 nt, Human
ccccuucucuccucc

SEQ ID NO: 2343669 - RNA, 20 nt, Human
ccccuugccaccccacccuc

SEQ ID NO: 2343670 - RNA, 14 nt, Human
ccccuugccacccc

SEQ ID NO: 2343671 - RNA, 23 nt, Human
ccccuucugggcaucuguucugg

SEQ ID NO: 2343672 - RNA, 21 nt, Human
ccccuucugcucagcucuggg

SEQ ID NO: 2343673 - RNA, 14 nt, Human
ccccuucugggcau

SEQ ID NO: 2343674 - RNA, 22 nt, Human
ccccuucugggcaucuguucug

SEQ ID NO: 2343675 - RNA, 20 nt, Human
ccccuucugcucagcucugg

SEQ ID NO: 2343676 - RNA, 19 nt, Human
ccccuucugcucagcucug

SEQ ID NO: 2343677 - RNA, 15 nt, Human
cccucagagugcaag

SEQ ID NO: 2343678 - RNA, 13 nt, Human
cccucagagccac

SEQ ID NO: 2343679 - RNA, 14 nt, Human
cccucagcaccccu

SEQ ID NO: 2343680 - RNA, 15 nt, Human
cccucagcaccccuu

SEQ ID NO: 2343681 - RNA, 16 nt, Human
cccucagcaccccuuc

SEQ ID NO: 2343682 - RNA, 17 nt, Human
cccucagaaacacuggg

SEQ ID NO: 2343683 - RNA, 18 nt, Human
cccucagaacccuuggcu

SEQ ID NO: 2343684 - RNA, 17 nt, Human
cccucagaacccuuggc

SEQ ID NO: 2343685 - RNA, 20 nt, Human
cccucagaaacacuggggcu

SEQ ID NO: 2343686 - RNA, 23 nt, Human
cccucagaacccuuggcuugccc

SEQ ID NO: 2343687 - RNA, 22 nt, Human
cccucagaacccuuggcuugcc

SEQ ID NO: 2343688 - RNA, 21 nt, Human
cccucagaacccuuggcuugc

SEQ ID NO: 2343689 - RNA, 22 nt, Human
ccccaugccaaagcuagggugg

SEQ ID NO: 2343690 - RNA, 13 nt, Human
ccccaugccaaag

SEQ ID NO: 2343691 - RNA, 23 nt, Human
ccccauuccugggaaauauuccc

SEQ ID NO: 2343692 - RNA, 13 nt, Human
ccccaugcacugu

SEQ ID NO: 2343693 - RNA, 23 nt, Human
ccccaugcacugugaaggacccu

SEQ ID NO: 2343694 - RNA, 19 nt, Human
ccccaugcacugugaagga

SEQ ID NO: 2343695 - RNA, 12 nt, Human
ccccaucuugcu

SEQ ID NO: 2343696 - RNA, 14 nt, Human
ccccaucuugcuuc

SEQ ID NO: 2343697 - RNA, 14 nt, Human
ccccaucugugaau

SEQ ID NO: 2343698 - RNA, 13 nt, Human
ccccaucugugaa

SEQ ID NO: 2343699 - RNA, 15 nt, Human
ccccaugauguaagu

SEQ ID NO: 2343700 - RNA, 15 nt, Human
ccccauucugccugc

SEQ ID NO: 2343701 - RNA, 13 nt, Human
ccccauucugccu

SEQ ID NO: 2343702 - RNA, 14 nt, Human
ccccauucugccug

SEQ ID NO: 2343703 - RNA, 22 nt, Human
ccccugcacuggaguccagucu

SEQ ID NO: 2343704 - RNA, 12 nt, Human
ccccugauuaca

SEQ ID NO: 2343705 - RNA, 17 nt, Human
ccccugcaaagcccagc

SEQ ID NO: 2343706 - RNA, 16 nt, Human
ccccugcaaagcccag

SEQ ID NO: 2343707 - RNA, 18 nt, Human
ccccugcacuccagccug

SEQ ID NO: 2343708 - RNA, 15 nt, Human
ccccugaccugugag

SEQ ID NO: 2343709 - RNA, 21 nt, Human
ccccugagacaaauggaggcc

SEQ ID NO: 2343710 - RNA, 20 nt, Human
ccccugaccugugagcccag

SEQ ID NO: 2343711 - RNA, 18 nt, Human
ccccugagcaaugucugu

SEQ ID NO: 2343712 - RNA, 19 nt, Human
ccccugagcaaugucugug

SEQ ID NO: 2343713 - RNA, 21 nt, Human
ccccugagcaaugucugugcu

SEQ ID NO: 2343714 - RNA, 15 nt, Human
ccccugcaaagccca

SEQ ID NO: 2343715 - RNA, 13 nt, Human
ccccuucucccac

SEQ ID NO: 2343716 - RNA, 12 nt, Human
ccccuucuccca

SEQ ID NO: 2343717 - RNA, 16 nt, Human
ccccuucucccacacu

SEQ ID NO: 2343718 - RNA, 13 nt, Human
ccccuucucucau

SEQ ID NO: 2343719 - RNA, 16 nt, Human
ccccuucucucaucuc

SEQ ID NO: 2343720 - RNA, 19 nt, Human
ccccuuccuugcucugcac

SEQ ID NO: 2343721 - RNA, 20 nt, Human
ccccuuccuugcucugcacc

SEQ ID NO: 2343722 - RNA, 22 nt, Human
ccccuucuagguggcaaggcug

SEQ ID NO: 2343723 - RNA, 14 nt, Human
ccccuucucagaau

SEQ ID NO: 2343724 - RNA, 16 nt, Human
ccccuucucagaaucu

SEQ ID NO: 2343725 - RNA, 15 nt, Human
ccccuucucaucacu

SEQ ID NO: 2343726 - RNA, 19 nt, Human
ccccuucgcuccugugucu

SEQ ID NO: 2343727 - RNA, 21 nt, Human
ccccuucuacauuucuuagac

SEQ ID NO: 2343728 - RNA, 12 nt, Human
ccccuuccuguc

SEQ ID NO: 2343729 - RNA, 22 nt, Human
ccccuuccugucccaccucuuc

SEQ ID NO: 2343730 - RNA, 14 nt, Human
ccccuucgcuccug

SEQ ID NO: 2343731 - RNA, 15 nt, Human
ccccuucgcuccugu

SEQ ID NO: 2343732 - RNA, 17 nt, Human
ccccuucgcuccugugu

SEQ ID NO: 2343733 - RNA, 17 nt, Human
cccaggggaaaaugaag

SEQ ID NO: 2343734 - RNA, 13 nt, Human
cccaguuguauuu

SEQ ID NO: 2343735 - RNA, 18 nt, Human
cccagggcucagccuggu

SEQ ID NO: 2343736 - RNA, 17 nt, Human
cccagggcucagccugg

SEQ ID NO: 2343737 - RNA, 20 nt, Human
cccagggcucagccuggugg

SEQ ID NO: 2343738 - RNA, 14 nt, Human
cccagggcuccugc

SEQ ID NO: 2343739 - RNA, 15 nt, Human
cccagggcuccugca

SEQ ID NO: 2343740 - RNA, 22 nt, Human
cccaguuugcagaaaagcaccu

SEQ ID NO: 2343741 - RNA, 16 nt, Human
cccaguuugcagaaaa

SEQ ID NO: 2343742 - RNA, 15 nt, Human
cccaguuugcagaaa

SEQ ID NO: 2343743 - RNA, 20 nt, Human
cccaguuucugccucugagg

SEQ ID NO: 2343744 - RNA, 14 nt, Human
cccaguuucugccu

SEQ ID NO: 2343745 - RNA, 16 nt, Human
cccaguuucugccucu

SEQ ID NO: 2343746 - RNA, 17 nt, Human
cccaguuucugccucug

SEQ ID NO: 2343747 - RNA, 19 nt, Human
cccauaauuuucuucaugc

SEQ ID NO: 2343748 - RNA, 22 nt, Human
cccauaauuuuuuuuuuccuuu

SEQ ID NO: 2343749 - RNA, 23 nt, Human
cccauaauuuuuuuuuuccuuuu

SEQ ID NO: 2343750 - RNA, 23 nt, Human
cccaguuugcagaaaagcaccug

SEQ ID NO: 2343751 - RNA, 21 nt, Human
cccauuucuaaaggccucuuc

SEQ ID NO: 2343752 - RNA, 18 nt, Human
cccauuucuaaaggccuc

SEQ ID NO: 2343753 - RNA, 19 nt, Human
cccauuucccaucugcacc

SEQ ID NO: 2343754 - RNA, 14 nt, Human
cccauuucccaucu

SEQ ID NO: 2343755 - RNA, 15 nt, Human
cccauuucccaucug

SEQ ID NO: 2343756 - RNA, 16 nt, Human
cccauuucccaucugc

SEQ ID NO: 2343757 - RNA, 17 nt, Human
cccauuucccaucugca

SEQ ID NO: 2343758 - RNA, 15 nt, Human
cccauuucuauuuau

SEQ ID NO: 2343759 - RNA, 12 nt, Human
cccauuucuacu

SEQ ID NO: 2343760 - RNA, 22 nt, Human
cccauuucuacucuuaaguuuc

SEQ ID NO: 2343761 - RNA, 16 nt, Human
cccauuucuauuuauu

SEQ ID NO: 2343762 - RNA, 17 nt, Human
cccauuucuauuuauuu

SEQ ID NO: 2343763 - RNA, 19 nt, Human
cccauuuauccaccuccau

SEQ ID NO: 2343764 - RNA, 18 nt, Human
cccauuuauccaccucca

SEQ ID NO: 2343765 - RNA, 13 nt, Human
cccauuucagcug

SEQ ID NO: 2343766 - RNA, 12 nt, Human
cccauuucagcu

SEQ ID NO: 2343767 - RNA, 15 nt, Human
cccauuuauccaccu

SEQ ID NO: 2343768 - RNA, 20 nt, Human
cccauuuaaauuuuuuuccu

SEQ ID NO: 2343769 - RNA, 21 nt, Human
ccccagauugcaacaggcugg

SEQ ID NO: 2343770 - RNA, 22 nt, Human
ccccagauugcaacaggcuggg

SEQ ID NO: 2343771 - RNA, 23 nt, Human
ccccagauugcaacaggcugggc

SEQ ID NO: 2343772 - RNA, 17 nt, Human
ccccagcaagugagagc

SEQ ID NO: 2343773 - RNA, 19 nt, Human
ccccagcaagugagagcug

SEQ ID NO: 2343774 - RNA, 20 nt, Human
ccccagcaagugagagcugg

SEQ ID NO: 2343775 - RNA, 19 nt, Human
cccauuucuauuuauuuac

SEQ ID NO: 2343776 - RNA, 20 nt, Human
cccauuucuagaacaucccu

SEQ ID NO: 2343777 - RNA, 17 nt, Human
ccccauccucuguacag

SEQ ID NO: 2343778 - RNA, 12 nt, Human
ccccaucuguga

SEQ ID NO: 2343779 - RNA, 14 nt, Human
ccccaucugggucc

SEQ ID NO: 2343780 - RNA, 19 nt, Human
ccccaucuggguccuugca

SEQ ID NO: 2343781 - RNA, 22 nt, Human
ccccauccucuguacagagccc

SEQ ID NO: 2343782 - RNA, 19 nt, Human
ccccauccucuguacagag

SEQ ID NO: 2343783 - RNA, 21 nt, Human
ccccauccucuguacagagcc

SEQ ID NO: 2343784 - RNA, 20 nt, Human
cccauucugccugcccaggc

SEQ ID NO: 2343785 - RNA, 21 nt, Human
cccauucugccugcccaggcc

SEQ ID NO: 2343786 - RNA, 22 nt, Human
cccauucugccugcccaggccc

SEQ ID NO: 2343787 - RNA, 16 nt, Human
ccauuucucacugaga

SEQ ID NO: 2343788 - RNA, 12 nt, Human
ccauuucucaug

SEQ ID NO: 2343789 - RNA, 17 nt, Human
ccauuucuauuuauuua

SEQ ID NO: 2343790 - RNA, 13 nt, Human
ccauuucucacug

SEQ ID NO: 2343791 - RNA, 14 nt, Human
ccauuucucacuga

SEQ ID NO: 2343792 - RNA, 23 nt, Human
ccauuucuagaacaucccugcca

SEQ ID NO: 2343793 - RNA, 22 nt, Human
ccauuucuacucuuaaguuucu

SEQ ID NO: 2343794 - RNA, 12 nt, Human
ccauuucuauuu

SEQ ID NO: 2343795 - RNA, 13 nt, Human
ccauuucuauuua

SEQ ID NO: 2343796 - RNA, 14 nt, Human
ccauuucuauuuau

SEQ ID NO: 2343797 - RNA, 11 nt, Human
cccagcuguuu

SEQ ID NO: 2343798 - RNA, 19 nt, Human
cccaggaaaggcuccagga

SEQ ID NO: 2343799 - RNA, 21 nt, Human
cccagcugugcucuggacagg

SEQ ID NO: 2343800 - RNA, 23 nt, Human
cccagcugugcucuggacaggca

SEQ ID NO: 2343801 - RNA, 12 nt, Human
cccaggaagccg

SEQ ID NO: 2343802 - RNA, 15 nt, Human
cccaggaacugggcc

SEQ ID NO: 2343803 - RNA, 16 nt, Human
cccagcccacccuccu

SEQ ID NO: 2343804 - RNA, 18 nt, Human
cccagcccacccuccugu

SEQ ID NO: 2343805 - RNA, 19 nt, Human
cccagcugugagccuuggc

SEQ ID NO: 2343806 - RNA, 11 nt, Human
cccaggaacaa

SEQ ID NO: 2343807 - RNA, 23 nt, Human
cccaggaaaggcuccaggagcag

SEQ ID NO: 2343808 - RNA, 21 nt, Human
cccaggaaaggcuccaggagc

SEQ ID NO: 2343809 - RNA, 22 nt, Human
cccaggaaaggcuccaggagca

SEQ ID NO: 2343810 - RNA, 22 nt, Human
cccaggaaugccaaggagacau

SEQ ID NO: 2343811 - RNA, 19 nt, Human
cccaggacaccacacccag

SEQ ID NO: 2343812 - RNA, 20 nt, Human
cccaggacaccacacccagc

SEQ ID NO: 2343813 - RNA, 21 nt, Human
cccaggcuggcgugcaguggu

SEQ ID NO: 2343814 - RNA, 16 nt, Human
cccagggcucagccug

SEQ ID NO: 2343815 - RNA, 15 nt, Human
cccagggcucagccu

SEQ ID NO: 2343816 - RNA, 14 nt, Human
cccagggcucagcc

SEQ ID NO: 2343817 - RNA, 21 nt, Human
cccagggcuacccucccccag

SEQ ID NO: 2343818 - RNA, 20 nt, Human
cccaggcuuagucacugaga

SEQ ID NO: 2343819 - RNA, 13 nt, Human
cccaggcugggca

SEQ ID NO: 2343820 - RNA, 19 nt, Human
cccaggcugggcaaggagg

SEQ ID NO: 2343821 - RNA, 15 nt, Human
cccagggcuacccuc

SEQ ID NO: 2343822 - RNA, 16 nt, Human
cccaggcuggucucaa

SEQ ID NO: 2343823 - RNA, 12 nt, Human
cccaggcugggc

SEQ ID NO: 2343824 - RNA, 15 nt, Human
cccaggcuuagucac

SEQ ID NO: 2343825 - RNA, 15 nt, Human
cccagcacuuuggga

SEQ ID NO: 2343826 - RNA, 17 nt, Human
cccagcacuuugggagg

SEQ ID NO: 2343827 - RNA, 12 nt, Human
cccagcacuuug

SEQ ID NO: 2343828 - RNA, 20 nt, Human
cccagcacuuugggaggcca

SEQ ID NO: 2343829 - RNA, 22 nt, Human
cccagcacuuugggaggccaag

SEQ ID NO: 2343830 - RNA, 20 nt, Human
cccagcacuuugggaggccu

SEQ ID NO: 2343831 - RNA, 24 nt, Human
cccagcacugaggaagaacggggc

SEQ ID NO: 2343832 - RNA, 21 nt, Human
cccagcacugcuugaggaaaa

SEQ ID NO: 2343833 - RNA, 18 nt, Human
cccagcacuuguguuguc

SEQ ID NO: 2343834 - RNA, 16 nt, Human
cccagcacuuggagag

SEQ ID NO: 2343835 - RNA, 16 nt, Human
cccagcagguggggag

SEQ ID NO: 2343836 - RNA, 19 nt, Human
cccagcagggccucaaagu

SEQ ID NO: 2343837 - RNA, 22 nt, Human
cccagcagggucuuuucaucug

SEQ ID NO: 2343838 - RNA, 13 nt, Human
cccagcagggccu

SEQ ID NO: 2343839 - RNA, 18 nt, Human
cccagcagggccacuccc

SEQ ID NO: 2343840 - RNA, 21 nt, Human
cccagcacuuugggaggccua

SEQ ID NO: 2343841 - RNA, 17 nt, Human
cccagcagcccuaagga

SEQ ID NO: 2343842 - RNA, 22 nt, Human
cccagcagcccuaaggaucucu

SEQ ID NO: 2343843 - RNA, 14 nt, Human
cccagcccacuucu

SEQ ID NO: 2343844 - RNA, 18 nt, Human
cccagcugugagccuugg

SEQ ID NO: 2343845 - RNA, 13 nt, Human
cccagcccacccu

SEQ ID NO: 2343846 - RNA, 14 nt, Human
cccagcccacccuc

SEQ ID NO: 2343847 - RNA, 15 nt, Human
cccagcccacccucc

SEQ ID NO: 2343848 - RNA, 16 nt, Human
cccagcccaaagcugu

SEQ ID NO: 2343849 - RNA, 22 nt, Human
cccagccauuaccauggagaca

SEQ ID NO: 2343850 - RNA, 20 nt, Human
cccagccauuaccauggaga

SEQ ID NO: 2343851 - RNA, 19 nt, Human
cccagccauuaccauggag

SEQ ID NO: 2343852 - RNA, 15 nt, Human
cccagcaggugggga

SEQ ID NO: 2343853 - RNA, 12 nt, Human
cccagcccaagu

SEQ ID NO: 2343854 - RNA, 14 nt, Human
cccagcccaagucc

SEQ ID NO: 2343855 - RNA, 13 nt, Human
cccagcccaaguc

SEQ ID NO: 2343856 - RNA, 12 nt, Human
cccagcccaccc

SEQ ID NO: 2343857 - RNA, 15 nt, Human
cccagcacugaggaa

SEQ ID NO: 2343858 - RNA, 23 nt, Human
ccugccuccagggcuggacugag

SEQ ID NO: 2343859 - RNA, 20 nt, Human
ccugccuccagggcuggacu

SEQ ID NO: 2343860 - RNA, 21 nt, Human
ccugccuccagggcuggacug

SEQ ID NO: 2343861 - RNA, 20 nt, Human
ccugccuccaggaaccacac

SEQ ID NO: 2343862 - RNA, 15 nt, Human
ccugccuccaggaac

SEQ ID NO: 2343863 - RNA, 15 nt, Human
ccugccuccagggcu

SEQ ID NO: 2343864 - RNA, 16 nt, Human
ccugccuccagggcug

SEQ ID NO: 2343865 - RNA, 17 nt, Human
ccugccuccagggcugg

SEQ ID NO: 2343866 - RNA, 19 nt, Human
ccugccucgaacuggcugc

SEQ ID NO: 2343867 - RNA, 17 nt, Human
ccugccuccccugugca

SEQ ID NO: 2343868 - RNA, 15 nt, Human
ccugccuccccugug

SEQ ID NO: 2343869 - RNA, 16 nt, Human
ccugccucccuucaug

SEQ ID NO: 2343870 - RNA, 12 nt, Human
ccugccuccugc

SEQ ID NO: 2343871 - RNA, 21 nt, Human
ccugccucgaacuggcugcaa

SEQ ID NO: 2343872 - RNA, 23 nt, Human
ccugccucgaacuggcugcaaag

SEQ ID NO: 2343873 - RNA, 17 nt, Human
ccugcugcaguugccag

SEQ ID NO: 2343874 - RNA, 19 nt, Human
ccugcugcaguugccaguc

SEQ ID NO: 2343875 - RNA, 23 nt, Human
ccugcugccuccccaacccugcc

SEQ ID NO: 2343876 - RNA, 20 nt, Human
ccugcugccuccccaacccu

SEQ ID NO: 2343877 - RNA, 19 nt, Human
ccugcugccuccccaaccc

SEQ ID NO: 2343878 - RNA, 21 nt, Human
ccugcugccuccccaacccug

SEQ ID NO: 2343879 - RNA, 17 nt, Human
ccugcugccuccccaac

SEQ ID NO: 2343880 - RNA, 16 nt, Human
ccugcugccuccccaa

SEQ ID NO: 2343881 - RNA, 15 nt, Human
ccugcugccucccca

SEQ ID NO: 2343882 - RNA, 13 nt, Human
ccugcugccuccc

SEQ ID NO: 2343883 - RNA, 23 nt, Human
ccugcugccgccucccagccugg

SEQ ID NO: 2343884 - RNA, 21 nt, Human
ccugcugcaguugccagucac

SEQ ID NO: 2343885 - RNA, 13 nt, Human
ccugccuccugcc

SEQ ID NO: 2343886 - RNA, 20 nt, Human
ccugcugcaguugccaguca

SEQ ID NO: 2343887 - RNA, 18 nt, Human
ccugcugcugacccagcc

SEQ ID NO: 2343888 - RNA, 20 nt, Human
ccugcugcugacccagccug

SEQ ID NO: 2343889 - RNA, 13 nt, Human
ccugcccacccgu

SEQ ID NO: 2343890 - RNA, 12 nt, Human
ccugcccacccg

SEQ ID NO: 2343891 - RNA, 13 nt, Human
ccugcccaccugg

SEQ ID NO: 2343892 - RNA, 14 nt, Human
ccugcccaccuggc

SEQ ID NO: 2343893 - RNA, 20 nt, Human
ccugcccaccuggccucugc

SEQ ID NO: 2343894 - RNA, 12 nt, Human
ccugcccaccug

SEQ ID NO: 2343895 - RNA, 13 nt, Human
ccugcccaggccc

SEQ ID NO: 2343896 - RNA, 20 nt, Human
ccugccccaaucccuuuauu

SEQ ID NO: 2343897 - RNA, 24 nt, Human
ccugccccaacucuccccugaccu

SEQ ID NO: 2343898 - RNA, 12 nt, Human
ccugccccagcc

SEQ ID NO: 2343899 - RNA, 13 nt, Human
ccugccccagccc

SEQ ID NO: 2343900 - RNA, 14 nt, Human
ccugccccagccca

SEQ ID NO: 2343901 - RNA, 13 nt, Human
ccugcccaccugu

SEQ ID NO: 2343902 - RNA, 22 nt, Human
ccugcccacccguggagauggg

SEQ ID NO: 2343903 - RNA, 14 nt, Human
ccugcccaccuguc

SEQ ID NO: 2343904 - RNA, 23 nt, Human
ccugcccaggagagccagcccuc

SEQ ID NO: 2343905 - RNA, 22 nt, Human
ccugcccaggagagccagcccu

SEQ ID NO: 2343906 - RNA, 20 nt, Human
ccugcccaggagagccagcc

SEQ ID NO: 2343907 - RNA, 12 nt, Human
ccugcccaggag

SEQ ID NO: 2343908 - RNA, 18 nt, Human
ccugcccagaucccagaa

SEQ ID NO: 2343909 - RNA, 15 nt, Human
ccugcccccaaauaa

SEQ ID NO: 2343910 - RNA, 15 nt, Human
ccugcccccaaucca

SEQ ID NO: 2343911 - RNA, 14 nt, Human
ccugccuccaggaa

SEQ ID NO: 2343912 - RNA, 20 nt, Human
ccugccuccacccucugagc

SEQ ID NO: 2343913 - RNA, 12 nt, Human
ccugccuccagg

SEQ ID NO: 2343914 - RNA, 16 nt, Human
ccugcccccaauccau

SEQ ID NO: 2343915 - RNA, 18 nt, Human
ccugccuccacccucuga

SEQ ID NO: 2343916 - RNA, 19 nt, Human
ccugccuccacccucugag

SEQ ID NO: 2343917 - RNA, 17 nt, Human
ccugccccagggcuccc

SEQ ID NO: 2343918 - RNA, 16 nt, Human
ccugccccaggccuga

SEQ ID NO: 2343919 - RNA, 18 nt, Human
ccugccccaggccugaaa

SEQ ID NO: 2343920 - RNA, 14 nt, Human
ccugccccaggccu

SEQ ID NO: 2343921 - RNA, 15 nt, Human
ccugccccagcccaa

SEQ ID NO: 2343922 - RNA, 17 nt, Human
ccugccccagcccaagu

SEQ ID NO: 2343923 - RNA, 18 nt, Human
ccugccccagcccaaguc

SEQ ID NO: 2343924 - RNA, 19 nt, Human
ccugccccagcccaagucc

SEQ ID NO: 2343925 - RNA, 15 nt, Human
ccugcagccuccucc

SEQ ID NO: 2343926 - RNA, 18 nt, Human
ccugcagccuccuccuga

SEQ ID NO: 2343927 - RNA, 22 nt, Human
ccugcagccccgcgccuccuuc

SEQ ID NO: 2343928 - RNA, 19 nt, Human
ccugcagccuccuccugac

SEQ ID NO: 2343929 - RNA, 19 nt, Human
ccugaccaacauggagaaa

SEQ ID NO: 2343930 - RNA, 15 nt, Human
ccucuuucauccacu

SEQ ID NO: 2343931 - RNA, 13 nt, Human
ccucuuucaucca

SEQ ID NO: 2343932 - RNA, 12 nt, Human
ccugaccacccu

SEQ ID NO: 2343933 - RNA, 13 nt, Human
ccugaccacccuc

SEQ ID NO: 2343934 - RNA, 14 nt, Human
ccugaccacccucc

SEQ ID NO: 2343935 - RNA, 15 nt, Human
ccugaccacccuccc

SEQ ID NO: 2343936 - RNA, 20 nt, Human
ccugaccacgcuuucuagcu

SEQ ID NO: 2343937 - RNA, 23 nt, Human
ccugaccacccuccccucucuug

SEQ ID NO: 2343938 - RNA, 17 nt, Human
ccugaccacccuccccu

SEQ ID NO: 2343939 - RNA, 18 nt, Human
ccugaccacccuccccuc

SEQ ID NO: 2343940 - RNA, 20 nt, Human
ccugaccacccuccccucuc

SEQ ID NO: 2343941 - RNA, 21 nt, Human
ccugaccacccuccccucucu

SEQ ID NO: 2343942 - RNA, 13 nt, Human
ccucuuucccucc

SEQ ID NO: 2343943 - RNA, 20 nt, Human
ccugaccaacaguuccuuca

SEQ ID NO: 2343944 - RNA, 18 nt, Human
ccugagucacccaugaag

SEQ ID NO: 2343945 - RNA, 15 nt, Human
ccugagucacccaug

SEQ ID NO: 2343946 - RNA, 14 nt, Human
ccugagucaccagg

SEQ ID NO: 2343947 - RNA, 13 nt, Human
ccugagucaccag

SEQ ID NO: 2343948 - RNA, 18 nt, Human
ccugacccaggccgcagc

SEQ ID NO: 2343949 - RNA, 19 nt, Human
ccugacccaggccgcagcu

SEQ ID NO: 2343950 - RNA, 21 nt, Human
ccugaguagcugggauuacag

SEQ ID NO: 2343951 - RNA, 14 nt, Human
ccugacccaggccg

SEQ ID NO: 2343952 - RNA, 15 nt, Human
ccugacccaggccgc

SEQ ID NO: 2343953 - RNA, 16 nt, Human
ccugacccaggccgca

SEQ ID NO: 2343954 - RNA, 13 nt, Human
ccugacccaggcc

SEQ ID NO: 2343955 - RNA, 15 nt, Human
ccugagucaccagga

SEQ ID NO: 2343956 - RNA, 23 nt, Human
ccugaguccaagaggguccuuua

SEQ ID NO: 2343957 - RNA, 23 nt, Human
ccugagucacccuaccugugccu

SEQ ID NO: 2343958 - RNA, 19 nt, Human
ccugagucguacagaaagc

SEQ ID NO: 2343959 - RNA, 22 nt, Human
ccugagucguacagaaagcugc

SEQ ID NO: 2343960 - RNA, 21 nt, Human
ccugagucguacagaaagcug

SEQ ID NO: 2343961 - RNA, 16 nt, Human
ccugcacuugcagacu

SEQ ID NO: 2343962 - RNA, 17 nt, Human
ccugcacuugcagacuc

SEQ ID NO: 2343963 - RNA, 19 nt, Human
ccugcagaggggaaaccag

SEQ ID NO: 2343964 - RNA, 15 nt, Human
ccugagucuccugug

SEQ ID NO: 2343965 - RNA, 18 nt, Human
ccugcagaggucugugcu

SEQ ID NO: 2343966 - RNA, 14 nt, Human
ccugagucuccugu

SEQ ID NO: 2343967 - RNA, 19 nt, Human
ccugcagaggucugugcug

SEQ ID NO: 2343968 - RNA, 20 nt, Human
ccugcagaggucugugcuga

SEQ ID NO: 2343969 - RNA, 21 nt, Human
ccugcagaggucugugcugag

SEQ ID NO: 2343970 - RNA, 22 nt, Human
ccugcagaggucugugcugagg

SEQ ID NO: 2343971 - RNA, 18 nt, Human
ccugcacuugcagacucu

SEQ ID NO: 2343972 - RNA, 23 nt, Human
ccucuuucaagcagucgugccug

SEQ ID NO: 2343973 - RNA, 11 nt, Human
ccucuuucccu

SEQ ID NO: 2343974 - RNA, 15 nt, Human
ccugucugccagggc

SEQ ID NO: 2343975 - RNA, 23 nt, Human
ccugucugccagccagcagccag

SEQ ID NO: 2343976 - RNA, 21 nt, Human
ccugucugccagccagcagcc

SEQ ID NO: 2343977 - RNA, 20 nt, Human
ccugucuguagagggcccug

SEQ ID NO: 2343978 - RNA, 21 nt, Human
ccugucuguagagggcccugg

SEQ ID NO: 2343979 - RNA, 22 nt, Human
ccugucuguagagggcccuggu

SEQ ID NO: 2343980 - RNA, 23 nt, Human
ccugucuguagagggcccuggug

SEQ ID NO: 2343981 - RNA, 17 nt, Human
ccugucuguuacacugg

SEQ ID NO: 2343982 - RNA, 14 nt, Human
ccugucuucccagg

SEQ ID NO: 2343983 - RNA, 17 nt, Human
ccugucugucucuccau

SEQ ID NO: 2343984 - RNA, 18 nt, Human
ccugucugucucuccauc

SEQ ID NO: 2343985 - RNA, 19 nt, Human
ccugucugucucuccaucu

SEQ ID NO: 2343986 - RNA, 21 nt, Human
ccugucugucucuccaucugu

SEQ ID NO: 2343987 - RNA, 19 nt, Human
ccugucuuccugcauucac

SEQ ID NO: 2343988 - RNA, 15 nt, Human
ccugucuuccugcau

SEQ ID NO: 2343989 - RNA, 22 nt, Human
ccugucuuccugcauucaccca

SEQ ID NO: 2343990 - RNA, 15 nt, Human
ccugucuucccaggg

SEQ ID NO: 2343991 - RNA, 16 nt, Human
ccugucuucccagggu

SEQ ID NO: 2343992 - RNA, 18 nt, Human
ccugucuucccaggguag

SEQ ID NO: 2343993 - RNA, 17 nt, Human
ccugucuuuaaggaaaa

SEQ ID NO: 2343994 - RNA, 14 nt, Human
ccugucuuuaagga

SEQ ID NO: 2343995 - RNA, 22 nt, Human
ccugucuuugggagaaaacguc

SEQ ID NO: 2343996 - RNA, 16 nt, Human
ccugucucagccuccc

SEQ ID NO: 2343997 - RNA, 15 nt, Human
ccugucucagccucc

SEQ ID NO: 2343998 - RNA, 14 nt, Human
ccugucucagccuc

SEQ ID NO: 2343999 - RNA, 13 nt, Human
ccugucucagccu

SEQ ID NO: 2344000 - RNA, 17 nt, Human
ccugucucauccccagg

SEQ ID NO: 2344001 - RNA, 17 nt, Human
ccugucuagagagggag

SEQ ID NO: 2344002 - RNA, 13 nt, Human
ccugucucugccc

SEQ ID NO: 2344003 - RNA, 13 nt, Human
ccugucucuucca

SEQ ID NO: 2344004 - RNA, 14 nt, Human
ccugucucuuccau

SEQ ID NO: 2344005 - RNA, 20 nt, Human
ccugucugccagccagcagc

SEQ ID NO: 2344006 - RNA, 19 nt, Human
ccugucugccagccagcag

SEQ ID NO: 2344007 - RNA, 17 nt, Human
ccugucugccagccagc

SEQ ID NO: 2344008 - RNA, 16 nt, Human
ccugucugccagccag

SEQ ID NO: 2344009 - RNA, 15 nt, Human
ccugucugccagcca

SEQ ID NO: 2344010 - RNA, 14 nt, Human
ccugucugccagcc

SEQ ID NO: 2344011 - RNA, 21 nt, Human
ccugucugaaggacacuuccu

SEQ ID NO: 2344012 - RNA, 22 nt, Human
ccugucucuuccauaugaccuc

SEQ ID NO: 2344013 - RNA, 20 nt, Human
ccugucugaaggacacuucc

SEQ ID NO: 2344014 - RNA, 16 nt, Human
ccugucuagagaggga

SEQ ID NO: 2344015 - RNA, 14 nt, Human
ccugucuagagagg

SEQ ID NO: 2344016 - RNA, 22 nt, Human
ccugucuaaugaaaccuguguc

SEQ ID NO: 2344017 - RNA, 13 nt, Human
ccugucggccugg

SEQ ID NO: 2344018 - RNA, 17 nt, Human
ccugucggccugguguu

SEQ ID NO: 2344019 - RNA, 15 nt, Human
ccugucuaaugaaac

SEQ ID NO: 2344020 - RNA, 16 nt, Human
ccugugaccagcacug

SEQ ID NO: 2344021 - RNA, 19 nt, Human
ccugugaccagucugaccc

SEQ ID NO: 2344022 - RNA, 22 nt, Human
ccugugacauggugccugagag

SEQ ID NO: 2344023 - RNA, 23 nt, Human
ccugugacauggugccugagagg

SEQ ID NO: 2344024 - RNA, 17 nt, Human
ccugugaccagcacugu

SEQ ID NO: 2344025 - RNA, 19 nt, Human
ccugugaaauaguucaaag

SEQ ID NO: 2344026 - RNA, 22 nt, Human
ccugugaaagacucaaugagcu

SEQ ID NO: 2344027 - RNA, 17 nt, Human
ccugugaacugaacucu

SEQ ID NO: 2344028 - RNA, 16 nt, Human
ccugugaacugaacuc

SEQ ID NO: 2344029 - RNA, 18 nt, Human
ccugugaaguaaggaugu

SEQ ID NO: 2344030 - RNA, 16 nt, Human
ccugugaaugccacug

SEQ ID NO: 2344031 - RNA, 17 nt, Human
ccugugaaugccacugc

SEQ ID NO: 2344032 - RNA, 19 nt, Human
ccugugaaugccacugccu

SEQ ID NO: 2344033 - RNA, 21 nt, Human
ccugugaaugccacugccuuc

SEQ ID NO: 2344034 - RNA, 22 nt, Human
ccugugaaugccacugccuucg

SEQ ID NO: 2344035 - RNA, 17 nt, Human
ccugugacauggugccu

SEQ ID NO: 2344036 - RNA, 18 nt, Human
ccugugacauggugccug

SEQ ID NO: 2344037 - RNA, 19 nt, Human
ccugugacauggugccuga

SEQ ID NO: 2344038 - RNA, 21 nt, Human
ccugugacauggugccugaga

SEQ ID NO: 2344039 - RNA, 12 nt, Human
ccuguaauaaau

SEQ ID NO: 2344040 - RNA, 13 nt, Human
ccuguaauaaaua

SEQ ID NO: 2344041 - RNA, 14 nt, Human
ccuguaauaaauau

SEQ ID NO: 2344042 - RNA, 15 nt, Human
ccugguuuccugccc

SEQ ID NO: 2344043 - RNA, 18 nt, Human
ccugguuucacuggccca

SEQ ID NO: 2344044 - RNA, 17 nt, Human
ccugguuucacuggccc

SEQ ID NO: 2344045 - RNA, 15 nt, Human
ccugguucugaugau

SEQ ID NO: 2344046 - RNA, 21 nt, Human
ccugguucugaugaugugccu

SEQ ID NO: 2344047 - RNA, 14 nt, Human
ccugguuuccugcc

SEQ ID NO: 2344048 - RNA, 13 nt, Human
ccugguuuccugc

SEQ ID NO: 2344049 - RNA, 20 nt, Human
ccuggugggccuccucuguc

SEQ ID NO: 2344050 - RNA, 18 nt, Human
ccuggugggccuccucug

SEQ ID NO: 2344051 - RNA, 14 nt, Human
ccuggugggccucc

SEQ ID NO: 2344052 - RNA, 23 nt, Human
ccuggugggccaacaaagaacac

SEQ ID NO: 2344053 - RNA, 14 nt, Human
ccugguucucaucu

SEQ ID NO: 2344054 - RNA, 13 nt, Human
ccugguucucauc

SEQ ID NO: 2344055 - RNA, 15 nt, Human
ccugguucucaucuu

SEQ ID NO: 2344056 - RNA, 16 nt, Human
ccugguucucaucuuu

SEQ ID NO: 2344057 - RNA, 17 nt, Human
ccugguggccucugccc

SEQ ID NO: 2344058 - RNA, 14 nt, Human
ccuggugggccaac

SEQ ID NO: 2344059 - RNA, 16 nt, Human
ccugggggcucucaug

SEQ ID NO: 2344060 - RNA, 19 nt, Human
ccuguccugaccugucuca

SEQ ID NO: 2344061 - RNA, 14 nt, Human
ccuguaaucccagc

SEQ ID NO: 2344062 - RNA, 17 nt, Human
ccuguaaucccagcacu

SEQ ID NO: 2344063 - RNA, 16 nt, Human
ccuguaaucccagcac

SEQ ID NO: 2344064 - RNA, 17 nt, Human
ccuguccugccuaaggc

SEQ ID NO: 2344065 - RNA, 23 nt, Human
ccuguccugauggucagcucccu

SEQ ID NO: 2344066 - RNA, 13 nt, Human
ccuguccugaugg

SEQ ID NO: 2344067 - RNA, 22 nt, Human
ccuguccugauggucagcuccc

SEQ ID NO: 2344068 - RNA, 15 nt, Human
ccuguaaucccagca

SEQ ID NO: 2344069 - RNA, 13 nt, Human
ccuguaaucccag

SEQ ID NO: 2344070 - RNA, 22 nt, Human
ccuguaauaaauaugagugcca

SEQ ID NO: 2344071 - RNA, 20 nt, Human
ccuguaaucauauaauaaau

SEQ ID NO: 2344072 - RNA, 15 nt, Human
ccuguaauaaauaug

SEQ ID NO: 2344073 - RNA, 16 nt, Human
ccuguaauaaauauga

SEQ ID NO: 2344074 - RNA, 15 nt, Human
ccuguaaucacagcu

SEQ ID NO: 2344075 - RNA, 21 nt, Human
ccuguccuucucucaccuccu

SEQ ID NO: 2344076 - RNA, 12 nt, Human
ccuguccuugca

SEQ ID NO: 2344077 - RNA, 14 nt, Human
ccugucgagacacu

SEQ ID NO: 2344078 - RNA, 15 nt, Human
ccugucgagacacuu

SEQ ID NO: 2344079 - RNA, 17 nt, Human
ccugucgagacacuugc

SEQ ID NO: 2344080 - RNA, 19 nt, Human
ccuguccugccuaaggcug

SEQ ID NO: 2344081 - RNA, 15 nt, Human
ccuguccugggcugg

SEQ ID NO: 2344082 - RNA, 16 nt, Human
ccuguccugggcuggu

SEQ ID NO: 2344083 - RNA, 18 nt, Human
ccuguccugggcuggugg

SEQ ID NO: 2344084 - RNA, 18 nt, Human
ccugucgagacacuugcc

SEQ ID NO: 2344085 - RNA, 20 nt, Human
ccugucgagacacuugccuu

SEQ ID NO: 2344086 - RNA, 23 nt, Human
ccuggggcagucaccugcccaga

SEQ ID NO: 2344087 - RNA, 12 nt, Human
ccugggccugca

SEQ ID NO: 2344088 - RNA, 16 nt, Human
ccugggccgcugccac

SEQ ID NO: 2344089 - RNA, 17 nt, Human
ccugggccgcugccacg

SEQ ID NO: 2344090 - RNA, 13 nt, Human
ccugggccgcugc

SEQ ID NO: 2344091 - RNA, 18 nt, Human
ccugggcccucucugcuc

SEQ ID NO: 2344092 - RNA, 15 nt, Human
ccugggcccucucug

SEQ ID NO: 2344093 - RNA, 14 nt, Human
ccugggcccugggc

SEQ ID NO: 2344094 - RNA, 15 nt, Human
ccugggcccugggcu

SEQ ID NO: 2344095 - RNA, 16 nt, Human
ccugggcccugggcug

SEQ ID NO: 2344096 - RNA, 18 nt, Human
ccugggcccugggcugga

SEQ ID NO: 2344097 - RNA, 19 nt, Human
ccugggcccugggcuggaa

SEQ ID NO: 2344098 - RNA, 13 nt, Human
ccuggggccucuu

SEQ ID NO: 2344099 - RNA, 16 nt, Human
ccuggggccuggaccu

SEQ ID NO: 2344100 - RNA, 17 nt, Human
ccuggggccuggaccug

SEQ ID NO: 2344101 - RNA, 18 nt, Human
ccuggggccuggaccugc

SEQ ID NO: 2344102 - RNA, 19 nt, Human
ccuggggccuggaccugcc

SEQ ID NO: 2344103 - RNA, 21 nt, Human
ccuggggccuggaccugccuc

SEQ ID NO: 2344104 - RNA, 22 nt, Human
ccuggggccucggagccucauc

SEQ ID NO: 2344105 - RNA, 12 nt, Human
ccuggggccucg

SEQ ID NO: 2344106 - RNA, 17 nt, Human
ccuggggcuucuccuga

SEQ ID NO: 2344107 - RNA, 18 nt, Human
ccuggggcuucuccugac

SEQ ID NO: 2344108 - RNA, 21 nt, Human
ccuggggcuucuccugaccca

SEQ ID NO: 2344109 - RNA, 18 nt, Human
ccugggggaagcccugga

SEQ ID NO: 2344110 - RNA, 19 nt, Human
ccugggggcagggagagga

SEQ ID NO: 2344111 - RNA, 19 nt, Human
ccugggggaagcccuggau

SEQ ID NO: 2344112 - RNA, 17 nt, Human
ccugggggaagcccugg

SEQ ID NO: 2344113 - RNA, 16 nt, Human
ccugggggaagcccug

SEQ ID NO: 2344114 - RNA, 21 nt, Human
ccugguggcagugggagcugc

SEQ ID NO: 2344115 - RNA, 14 nt, Human
ccugggggcucuca

SEQ ID NO: 2344116 - RNA, 13 nt, Human
ccugggggcucuc

SEQ ID NO: 2344117 - RNA, 12 nt, Human
ccugggggcucu

SEQ ID NO: 2344118 - RNA, 21 nt, Human
ccugggccccaccaccuaggc

SEQ ID NO: 2344119 - RNA, 22 nt, Human
ccugggccccucaucugcucag

SEQ ID NO: 2344120 - RNA, 14 nt, Human
ccugggcccucucu

SEQ ID NO: 2344121 - RNA, 11 nt, Human
ccugggcccuc

SEQ ID NO: 2344122 - RNA, 23 nt, Human
ccugggccccaccaccuaggcca

SEQ ID NO: 2344123 - RNA, 14 nt, Human
ccuggccucugugc

SEQ ID NO: 2344124 - RNA, 20 nt, Human
ccugggccccaguuguauuu

SEQ ID NO: 2344125 - RNA, 22 nt, Human
ccuggccucugcacuccccugc

SEQ ID NO: 2344126 - RNA, 13 nt, Human
ccuggccucugug

SEQ ID NO: 2344127 - RNA, 22 nt, Human
ccuggccuagcauacguacaca

SEQ ID NO: 2344128 - RNA, 20 nt, Human
ccuggccucugcacuccccu

SEQ ID NO: 2344129 - RNA, 21 nt, Human
ccuggccucugcacuccccug

SEQ ID NO: 2344130 - RNA, 22 nt, Human
ccuggccggcaaccccaguucu

SEQ ID NO: 2344131 - RNA, 19 nt, Human
ccuggccggcaaccccagu

SEQ ID NO: 2344132 - RNA, 21 nt, Human
ccuggccggcaaccccaguuc

SEQ ID NO: 2344133 - RNA, 23 nt, Human
ccuggccggcaaccccaguucug

SEQ ID NO: 2344134 - RNA, 21 nt, Human
ccuggccgcccccugcccccc

SEQ ID NO: 2344135 - RNA, 22 nt, Human
ccuggccgcccccugcccccca

SEQ ID NO: 2344136 - RNA, 16 nt, Human
cccugucugccagggc

SEQ ID NO: 2344137 - RNA, 20 nt, Human
cccugucuguagagggcccu

SEQ ID NO: 2344138 - RNA, 21 nt, Human
cccugucuguagagggcccug

SEQ ID NO: 2344139 - RNA, 23 nt, Human
cccugucucuacuaaaaaugcaa

SEQ ID NO: 2344140 - RNA, 23 nt, Human
cccugucugaaggacacuuccug

SEQ ID NO: 2344141 - RNA, 20 nt, Human
cccugucuagagagggaggc

SEQ ID NO: 2344142 - RNA, 14 nt, Human
cccugucucuacua

SEQ ID NO: 2344143 - RNA, 17 nt, Human
cccugucuagagaggga

SEQ ID NO: 2344144 - RNA, 16 nt, Human
cccugucuagagaggg

SEQ ID NO: 2344145 - RNA, 17 nt, Human
cccugugauggggcccu

SEQ ID NO: 2344146 - RNA, 13 nt, Human
cccugucuugucc

SEQ ID NO: 2344147 - RNA, 22 nt, Human
cccugucuguagagggcccugg

SEQ ID NO: 2344148 - RNA, 23 nt, Human
cccugucuguagagggcccuggu

SEQ ID NO: 2344149 - RNA, 17 nt, Human
cccugugacauggugcc

SEQ ID NO: 2344150 - RNA, 18 nt, Human
cccugugacauggugccu

SEQ ID NO: 2344151 - RNA, 13 nt, Human
cccuucgcuccug

SEQ ID NO: 2344152 - RNA, 20 nt, Human
cccugugauggggcccugcc

SEQ ID NO: 2344153 - RNA, 18 nt, Human
cccugugauggggcccug

SEQ ID NO: 2344154 - RNA, 19 nt, Human
cccugugauggggcccugc

SEQ ID NO: 2344155 - RNA, 23 nt, Human
cccugucucaaaaaaagaaaaag

SEQ ID NO: 2344156 - RNA, 20 nt, Human
cccugucucaaaaaaagaaa

SEQ ID NO: 2344157 - RNA, 16 nt, Human
cccugucuaaugaaac

SEQ ID NO: 2344158 - RNA, 13 nt, Human
cccugucuaauga

SEQ ID NO: 2344159 - RNA, 12 nt, Human
cccugucuagag

SEQ ID NO: 2344160 - RNA, 16 nt, Human
ccgcauccuagucucu

SEQ ID NO: 2344161 - RNA, 17 nt, Human
ccgcaguuccugucccu

SEQ ID NO: 2344162 - RNA, 22 nt, Human
ccgcagugugcacuaaggggcc

SEQ ID NO: 2344163 - RNA, 23 nt, Human
ccgcagugugcacuaaggggccc

SEQ ID NO: 2344164 - RNA, 23 nt, Human
ccgcaggauuugggcucuuggaa

SEQ ID NO: 2344165 - RNA, 15 nt, Human
ccgcaggaagcugcu

SEQ ID NO: 2344166 - RNA, 14 nt, Human
ccgcaggaagcugc

SEQ ID NO: 2344167 - RNA, 13 nt, Human
ccgcaggaagcug

SEQ ID NO: 2344168 - RNA, 12 nt, Human
ccgcaggaagcu

SEQ ID NO: 2344169 - RNA, 19 nt, Human
ccgcaggaagcugcuccgu

SEQ ID NO: 2344170 - RNA, 19 nt, Human
ccgcagucgucgcacaguc

SEQ ID NO: 2344171 - RNA, 21 nt, Human
ccgcagucgucgcacagucuc

SEQ ID NO: 2344172 - RNA, 15 nt, Human
ccgcagugugcacua

SEQ ID NO: 2344173 - RNA, 22 nt, Human
ccgcagucgucgcacagucucu

SEQ ID NO: 2344174 - RNA, 13 nt, Human
ccgcauucccuga

SEQ ID NO: 2344175 - RNA, 14 nt, Human
ccgcauucccugag

SEQ ID NO: 2344176 - RNA, 16 nt, Human
ccgcaugcggcccagg

SEQ ID NO: 2344177 - RNA, 17 nt, Human
ccgcaugcggcccagga

SEQ ID NO: 2344178 - RNA, 12 nt, Human
ccgcaugccccc

SEQ ID NO: 2344179 - RNA, 13 nt, Human
ccgcaugcccccu

SEQ ID NO: 2344180 - RNA, 18 nt, Human
ccgcaugcccccucgugc

SEQ ID NO: 2344181 - RNA, 19 nt, Human
ccgcaugcccccucgugcc

SEQ ID NO: 2344182 - RNA, 21 nt, Human
ccgcaugcccccucgugccag

SEQ ID NO: 2344183 - RNA, 22 nt, Human
ccgcaugcccccucgugccagu

SEQ ID NO: 2344184 - RNA, 23 nt, Human
ccgcaugcccccucgugccaguc

SEQ ID NO: 2344185 - RNA, 22 nt, Human
ccgcaucuucuccaucuggcag

SEQ ID NO: 2344186 - RNA, 20 nt, Human
ccgcaucuucuccaucuggc

SEQ ID NO: 2344187 - RNA, 19 nt, Human
ccgcaucuucuccaucugg

SEQ ID NO: 2344188 - RNA, 16 nt, Human
ccgcaucuucuccauc

SEQ ID NO: 2344189 - RNA, 15 nt, Human
ccgcaucuucuccau

SEQ ID NO: 2344190 - RNA, 12 nt, Human
ccgcaucuucuc

SEQ ID NO: 2344191 - RNA, 21 nt, Human
ccgcauccuagucucuaucau

SEQ ID NO: 2344192 - RNA, 14 nt, Human
ccgcagccucccuc

SEQ ID NO: 2344193 - RNA, 14 nt, Human
ccgcagcucuugcc

SEQ ID NO: 2344194 - RNA, 17 nt, Human
ccgcagcucuugcccuu

SEQ ID NO: 2344195 - RNA, 18 nt, Human
ccgcagcucuugcccuuc

SEQ ID NO: 2344196 - RNA, 20 nt, Human
ccgcagcucuugcccuuccc

SEQ ID NO: 2344197 - RNA, 22 nt, Human
ccgcagcucuugcccuucccug

SEQ ID NO: 2344198 - RNA, 23 nt, Human
cccuucucugcuccaccacaucc

SEQ ID NO: 2344199 - RNA, 23 nt, Human
cccuucucuguagggaacucugg

SEQ ID NO: 2344200 - RNA, 20 nt, Human
cccuucucugcuccaccaca

SEQ ID NO: 2344201 - RNA, 17 nt, Human
cccuucucugcuccacc

SEQ ID NO: 2344202 - RNA, 16 nt, Human
cccuucucugcuccac

SEQ ID NO: 2344203 - RNA, 15 nt, Human
cccuucucugcucca

SEQ ID NO: 2344204 - RNA, 14 nt, Human
cccuucucugcucc

SEQ ID NO: 2344205 - RNA, 13 nt, Human
cccuucucugcuc

SEQ ID NO: 2344206 - RNA, 22 nt, Human
cccuucucuccagccccuggau

SEQ ID NO: 2344207 - RNA, 21 nt, Human
cccuuccuuuucccugcuucc

SEQ ID NO: 2344208 - RNA, 22 nt, Human
cccuuccuuuucccugcuucca

SEQ ID NO: 2344209 - RNA, 19 nt, Human
cccugugacauggugccug

SEQ ID NO: 2344210 - RNA, 20 nt, Human
cccugugacauggugccuga

SEQ ID NO: 2344211 - RNA, 21 nt, Human
cccugugacauggugccugag

SEQ ID NO: 2344212 - RNA, 19 nt, Human
cccuuccuuuucccugcuu

SEQ ID NO: 2344213 - RNA, 21 nt, Human
cccuucucuccagccccugga

SEQ ID NO: 2344214 - RNA, 14 nt, Human
cccuucgcuccugu

SEQ ID NO: 2344215 - RNA, 15 nt, Human
cccuucgcuccugug

SEQ ID NO: 2344216 - RNA, 13 nt, Human
ccggccccugcug

SEQ ID NO: 2344217 - RNA, 17 nt, Human
ccggcccccagagcgcc

SEQ ID NO: 2344218 - RNA, 18 nt, Human
ccggccccagccagaguu

SEQ ID NO: 2344219 - RNA, 13 nt, Human
ccggcccccuggu

SEQ ID NO: 2344220 - RNA, 15 nt, Human
ccggcccccuggucu

SEQ ID NO: 2344221 - RNA, 19 nt, Human
ccggcccccuggucucugg

SEQ ID NO: 2344222 - RNA, 20 nt, Human
ccggcccccuggucucuggu

SEQ ID NO: 2344223 - RNA, 16 nt, Human
ccggccccggccccag

SEQ ID NO: 2344224 - RNA, 17 nt, Human
ccggccccagccagagu

SEQ ID NO: 2344225 - RNA, 14 nt, Human
ccggccccugcugg

SEQ ID NO: 2344226 - RNA, 18 nt, Human
ccggccucucuggccucc

SEQ ID NO: 2344227 - RNA, 19 nt, Human
ccggccccggccccagcca

SEQ ID NO: 2344228 - RNA, 20 nt, Human
ccggccucucuggccuccca

SEQ ID NO: 2344229 - RNA, 21 nt, Human
ccggccucucuggccucccac

SEQ ID NO: 2344230 - RNA, 22 nt, Human
ccggccucucuggccucccacc

SEQ ID NO: 2344231 - RNA, 21 nt, Human
ccggccugaugacagagcgag

SEQ ID NO: 2344232 - RNA, 17 nt, Human
ccggcgagcccugugga

SEQ ID NO: 2344233 - RNA, 14 nt, Human
ccggcgcccucugu

SEQ ID NO: 2344234 - RNA, 15 nt, Human
ccggcgcccucuguc

SEQ ID NO: 2344235 - RNA, 17 nt, Human
ccggcgcccucuguccu

SEQ ID NO: 2344236 - RNA, 18 nt, Human
ccggcgcccucuguccug

SEQ ID NO: 2344237 - RNA, 19 nt, Human
ccggcgcccucuguccuga

SEQ ID NO: 2344238 - RNA, 21 nt, Human
ccggcgcccucuguccugacu

SEQ ID NO: 2344239 - RNA, 15 nt, Human
ccggcgagcccugug

SEQ ID NO: 2344240 - RNA, 20 nt, Human
ccggccugcucccagcagcc

SEQ ID NO: 2344241 - RNA, 16 nt, Human
ccggccugcucccagc

SEQ ID NO: 2344242 - RNA, 16 nt, Human
ccggcgugguggaaga

SEQ ID NO: 2344243 - RNA, 23 nt, Human
ccggcgucagccuccagccucug

SEQ ID NO: 2344244 - RNA, 19 nt, Human
ccggcgucagccuccagcc

SEQ ID NO: 2344245 - RNA, 20 nt, Human
ccggcgucagccuccagccu

SEQ ID NO: 2344246 - RNA, 21 nt, Human
ccggcgucagccuccagccuc

SEQ ID NO: 2344247 - RNA, 22 nt, Human
ccggcgucagccuccagccucu

SEQ ID NO: 2344248 - RNA, 21 nt, Human
ccggcgcuugccacuagggcu

SEQ ID NO: 2344249 - RNA, 19 nt, Human
ccggcggcccaagcccgac

SEQ ID NO: 2344250 - RNA, 16 nt, Human
ccggcgggcgggccgg

SEQ ID NO: 2344251 - RNA, 13 nt, Human
ccggcgucagccu

SEQ ID NO: 2344252 - RNA, 14 nt, Human
ccggcgucagccuc

SEQ ID NO: 2344253 - RNA, 15 nt, Human
ccggcgucagccucc

SEQ ID NO: 2344254 - RNA, 16 nt, Human
ccggcgucagccucca

SEQ ID NO: 2344255 - RNA, 17 nt, Human
ccggcgucagccuccag

SEQ ID NO: 2344256 - RNA, 19 nt, Human
ccucagcugccucacuucc

SEQ ID NO: 2344257 - RNA, 21 nt, Human
ccucagccuugccagagaucc

SEQ ID NO: 2344258 - RNA, 20 nt, Human
ccucagcugccucacuuccu

SEQ ID NO: 2344259 - RNA, 14 nt, Human
ccucagcugcuucu

SEQ ID NO: 2344260 - RNA, 20 nt, Human
ccucagccuugccagagauc

SEQ ID NO: 2344261 - RNA, 19 nt, Human
ccucagccuugccagagau

SEQ ID NO: 2344262 - RNA, 18 nt, Human
ccucagccuugccagaga

SEQ ID NO: 2344263 - RNA, 17 nt, Human
ccucagccuugccagag

SEQ ID NO: 2344264 - RNA, 13 nt, Human
ccucaggacugca

SEQ ID NO: 2344265 - RNA, 18 nt, Human
ccucaggacugcaacagg

SEQ ID NO: 2344266 - RNA, 16 nt, Human
ccucaggaaugggcug

SEQ ID NO: 2344267 - RNA, 17 nt, Human
ccucaggaaugggcugu

SEQ ID NO: 2344268 - RNA, 18 nt, Human
ccucaggacaaugucuga

SEQ ID NO: 2344269 - RNA, 23 nt, Human
ccucauggaauuggagcucgugg

SEQ ID NO: 2344270 - RNA, 15 nt, Human
ccucauggccccucu

SEQ ID NO: 2344271 - RNA, 16 nt, Human
ccucauggccccucug

SEQ ID NO: 2344272 - RNA, 16 nt, Human
ccucagccugugcugc

SEQ ID NO: 2344273 - RNA, 22 nt, Human
ccucagccuuccccuugcccag

SEQ ID NO: 2344274 - RNA, 12 nt, Human
ccucagccugug

SEQ ID NO: 2344275 - RNA, 11 nt, Human
ccucagccugu

SEQ ID NO: 2344276 - RNA, 22 nt, Human
ccucagccuggccagacacagg

SEQ ID NO: 2344277 - RNA, 14 nt, Human
ccucaaagucugca

SEQ ID NO: 2344278 - RNA, 19 nt, Human
ccucagccuggccagacac

SEQ ID NO: 2344279 - RNA, 16 nt, Human
ccucaaaggcccgcuc

SEQ ID NO: 2344280 - RNA, 21 nt, Human
ccucagccuggccagacacag

SEQ ID NO: 2344281 - RNA, 20 nt, Human
ccucagccuggccagacaca

SEQ ID NO: 2344282 - RNA, 16 nt, Human
ccucaaaagcacccuu

SEQ ID NO: 2344283 - RNA, 13 nt, Human
ccucaaacacugc

SEQ ID NO: 2344284 - RNA, 15 nt, Human
ccucaaacacugcag

SEQ ID NO: 2344285 - RNA, 17 nt, Human
ccucaaacacugcaggc

SEQ ID NO: 2344286 - RNA, 18 nt, Human
ccucaaacacugcaggca

SEQ ID NO: 2344287 - RNA, 21 nt, Human
ccucaaacacugcaggcauca

SEQ ID NO: 2344288 - RNA, 22 nt, Human
ccucaaacaguagguuggcagu

SEQ ID NO: 2344289 - RNA, 13 nt, Human
ccucaaaccuccu

SEQ ID NO: 2344290 - RNA, 15 nt, Human
ccucaaaccuccucu

SEQ ID NO: 2344291 - RNA, 16 nt, Human
ccucaaaccuccucuu

SEQ ID NO: 2344292 - RNA, 18 nt, Human
ccucaaaccuccucuucu

SEQ ID NO: 2344293 - RNA, 20 nt, Human
ccuauuuuuuuucuguuaua

SEQ ID NO: 2344294 - RNA, 20 nt, Human
ccucaaaaagauuuccccau

SEQ ID NO: 2344295 - RNA, 21 nt, Human
ccucccacccccuucucugcu

SEQ ID NO: 2344296 - RNA, 20 nt, Human
ccucccacccccuucucugc

SEQ ID NO: 2344297 - RNA, 12 nt, Human
ccucccacccga

SEQ ID NO: 2344298 - RNA, 19 nt, Human
ccucccacccgaugcugcu

SEQ ID NO: 2344299 - RNA, 21 nt, Human
ccucccacccgaugcugcuuu

SEQ ID NO: 2344300 - RNA, 14 nt, Human
ccucccauccccug

SEQ ID NO: 2344301 - RNA, 13 nt, Human
ccucccaucucac

SEQ ID NO: 2344302 - RNA, 16 nt, Human
ccucccaucucacaca

SEQ ID NO: 2344303 - RNA, 20 nt, Human
ccuccccaaaucaauacacu

SEQ ID NO: 2344304 - RNA, 17 nt, Human
ccucccauccccuggac

SEQ ID NO: 2344305 - RNA, 13 nt, Human
ccucccaucuggg

SEQ ID NO: 2344306 - RNA, 16 nt, Human
ccucccaucugggagu

SEQ ID NO: 2344307 - RNA, 21 nt, Human
ccucccaucugggaguccccu

SEQ ID NO: 2344308 - RNA, 21 nt, Human
ccuccccaacccugccccugc

SEQ ID NO: 2344309 - RNA, 16 nt, Human
ccuccccaacccugcc

SEQ ID NO: 2344310 - RNA, 15 nt, Human
ccucccauggcaccu

SEQ ID NO: 2344311 - RNA, 19 nt, Human
ccucaugguggguucaggg

SEQ ID NO: 2344312 - RNA, 21 nt, Human
ccucauguacauacccuggcc

SEQ ID NO: 2344313 - RNA, 18 nt, Human
ccucauggccccucugac

SEQ ID NO: 2344314 - RNA, 22 nt, Human
ccucauggccccucugaccugc

SEQ ID NO: 2344315 - RNA, 23 nt, Human
ccucauuuuugaauacaggcaua

SEQ ID NO: 2344316 - RNA, 19 nt, Human
ccuccaacaccaagcacag

SEQ ID NO: 2344317 - RNA, 16 nt, Human
ccuccaaaggcccccu

SEQ ID NO: 2344318 - RNA, 17 nt, Human
ccuccaaaggcccccua

SEQ ID NO: 2344319 - RNA, 19 nt, Human
ccuccaaaacuccugcccc

SEQ ID NO: 2344320 - RNA, 15 nt, Human
ccuccaaaagcacuu

SEQ ID NO: 2344321 - RNA, 13 nt, Human
ccucccacccccu

SEQ ID NO: 2344322 - RNA, 17 nt, Human
ccucccacccccaucuc

SEQ ID NO: 2344323 - RNA, 13 nt, Human
ccucccaccccca

SEQ ID NO: 2344324 - RNA, 16 nt, Human
ccucccacccaccgcc

SEQ ID NO: 2344325 - RNA, 12 nt, Human
ccucccaccccc

SEQ ID NO: 2344326 - RNA, 19 nt, Human
ccuccaaccuggggggcag

SEQ ID NO: 2344327 - RNA, 15 nt, Human
ccucccaccucagcc

SEQ ID NO: 2344328 - RNA, 17 nt, Human
ccucccaccucagccuc

SEQ ID NO: 2344329 - RNA, 22 nt, Human
ccaaucauuuuaauuauuauuc

SEQ ID NO: 2344330 - RNA, 15 nt, Human
ccaaugauggucacc

SEQ ID NO: 2344331 - RNA, 19 nt, Human
ccaaugaggucugaaaugg

SEQ ID NO: 2344332 - RNA, 14 nt, Human
ccaaugcacuuugu

SEQ ID NO: 2344333 - RNA, 18 nt, Human
ccaauauuucucagacau

SEQ ID NO: 2344334 - RNA, 14 nt, Human
ccaauauuuguaga

SEQ ID NO: 2344335 - RNA, 20 nt, Human
ccaauauuuucuuuaaugcu

SEQ ID NO: 2344336 - RNA, 17 nt, Human
ccaauauuuaccagacc

SEQ ID NO: 2344337 - RNA, 22 nt, Human
ccaauauuuucuuuaaugcuuu

SEQ ID NO: 2344338 - RNA, 12 nt, Human
ccaaucauuuua

SEQ ID NO: 2344339 - RNA, 14 nt, Human
ccaaucauuuuaau

SEQ ID NO: 2344340 - RNA, 12 nt, Human
ccaaugaaauga

SEQ ID NO: 2344341 - RNA, 22 nt, Human
ccaagcuccuugggaggcccca

SEQ ID NO: 2344342 - RNA, 18 nt, Human
ccaagcucuagugggaag

SEQ ID NO: 2344343 - RNA, 14 nt, Human
ccaagcucucugca

SEQ ID NO: 2344344 - RNA, 15 nt, Human
ccaagcucucugcau

SEQ ID NO: 2344345 - RNA, 18 nt, Human
ccaagcucugcuccucuc

SEQ ID NO: 2344346 - RNA, 23 nt, Human
ccaagcugccuccccucuccuuc

SEQ ID NO: 2344347 - RNA, 19 nt, Human
ccaagcuccuugggaggcc

SEQ ID NO: 2344348 - RNA, 17 nt, Human
ccaagcuccuugggagg

SEQ ID NO: 2344349 - RNA, 15 nt, Human
ccaagcuccuuggga

SEQ ID NO: 2344350 - RNA, 14 nt, Human
ccaagcuccuuggg

SEQ ID NO: 2344351 - RNA, 12 nt, Human
ccaagcucugcu

SEQ ID NO: 2344352 - RNA, 17 nt, Human
ccaagcucugcuccucu

SEQ ID NO: 2344353 - RNA, 13 nt, Human
ccaagcucugcuc

SEQ ID NO: 2344354 - RNA, 22 nt, Human
ccaaauguaauugaauaaaguu

SEQ ID NO: 2344355 - RNA, 18 nt, Human
ccaaauguaauugaauaa

SEQ ID NO: 2344356 - RNA, 23 nt, Human
ccaaauggaaaugggcagagcag

SEQ ID NO: 2344357 - RNA, 14 nt, Human
ccaacucaccccag

SEQ ID NO: 2344358 - RNA, 17 nt, Human
ccaaauguucaucaaug

SEQ ID NO: 2344359 - RNA, 17 nt, Human
ccaacugggcccaagac

SEQ ID NO: 2344360 - RNA, 18 nt, Human
ccaacuguguucauuaga

SEQ ID NO: 2344361 - RNA, 13 nt, Human
ccaacuguauaua

SEQ ID NO: 2344362 - RNA, 16 nt, Human
ccaacugggcccaaga

SEQ ID NO: 2344363 - RNA, 12 nt, Human
ccaacugcugcu

SEQ ID NO: 2344364 - RNA, 13 nt, Human
ccaacugcugcuu

SEQ ID NO: 2344365 - RNA, 14 nt, Human
ccaacugcugcuuu

SEQ ID NO: 2344366 - RNA, 22 nt, Human
ccaacuccuggaagcugugucc

SEQ ID NO: 2344367 - RNA, 19 nt, Human
ccaacuccuggaagcugug

SEQ ID NO: 2344368 - RNA, 15 nt, Human
ccaacuccuggaagc

SEQ ID NO: 2344369 - RNA, 21 nt, Human
ccaacucuagcuggggguggg

SEQ ID NO: 2344370 - RNA, 14 nt, Human
ccaacucuagcugg

SEQ ID NO: 2344371 - RNA, 12 nt, Human
ccaacucuccug

SEQ ID NO: 2344372 - RNA, 16 nt, Human
ccaacucaccccagcc

SEQ ID NO: 2344373 - RNA, 17 nt, Human
ccaacucaccccagccc

SEQ ID NO: 2344374 - RNA, 18 nt, Human
ccaacucaccccagcccc

SEQ ID NO: 2344375 - RNA, 17 nt, Human
ccaaugggagcucaugg

SEQ ID NO: 2344376 - RNA, 15 nt, Human
ccaauguaggagcug

SEQ ID NO: 2344377 - RNA, 20 nt, Human
ccaauggguuuuucccugua

SEQ ID NO: 2344378 - RNA, 19 nt, Human
ccaaugugaacagcggcug

SEQ ID NO: 2344379 - RNA, 12 nt, Human
ccaaugucuuga

SEQ ID NO: 2344380 - RNA, 20 nt, Human
ccaauguaggagcugccuug

SEQ ID NO: 2344381 - RNA, 17 nt, Human
ccaauguaggagcugcc

SEQ ID NO: 2344382 - RNA, 21 nt, Human
ccaauguauugauaagagggc

SEQ ID NO: 2344383 - RNA, 11 nt, Human
ccaaugucugc

SEQ ID NO: 2344384 - RNA, 18 nt, Human
ccaaugucugccacacaa

SEQ ID NO: 2344385 - RNA, 11 nt, Human
cauuugugagg

SEQ ID NO: 2344386 - RNA, 12 nt, Human
cauuugugaggc

SEQ ID NO: 2344387 - RNA, 15 nt, Human
cauuugugaggccca

SEQ ID NO: 2344388 - RNA, 19 nt, Human
cauuugugugugugcaagu

SEQ ID NO: 2344389 - RNA, 13 nt, Human
cauuugugugugu

SEQ ID NO: 2344390 - RNA, 15 nt, Human
cauuugugucaaugg

SEQ ID NO: 2344391 - RNA, 14 nt, Human
cauuugugucaaug

SEQ ID NO: 2344392 - RNA, 22 nt, Human
cauuugugugugugcaagugug

SEQ ID NO: 2344393 - RNA, 13 nt, Human
cauuuuuucaguc

SEQ ID NO: 2344394 - RNA, 18 nt, Human
cauuuuuuuccaggcugg

SEQ ID NO: 2344395 - RNA, 15 nt, Human
cauuuuuuuccaggc

SEQ ID NO: 2344396 - RNA, 17 nt, Human
cauuuuuuuccaggcug

SEQ ID NO: 2344397 - RNA, 17 nt, Human
cauuuuuuuaauuuauu

SEQ ID NO: 2344398 - RNA, 20 nt, Human
cauuuuuuuaauuuauuauu

SEQ ID NO: 2344399 - RNA, 19 nt, Human
cauuuguauaaaauaauuu

SEQ ID NO: 2344400 - RNA, 20 nt, Human
cauuuguauaaaauaauuuu

SEQ ID NO: 2344401 - RNA, 17 nt, Human
cauuuguauaaaauaau

SEQ ID NO: 2344402 - RNA, 22 nt, Human
cauuuuuuuuaagaaaaaggau

SEQ ID NO: 2344403 - RNA, 20 nt, Human
ccaaaacucuccucugcugc

SEQ ID NO: 2344404 - RNA, 16 nt, Human
ccaaaacugugcagag

SEQ ID NO: 2344405 - RNA, 11 nt, Human
ccaaaacugug

SEQ ID NO: 2344406 - RNA, 21 nt, Human
ccaaaacucuccucugcugcu

SEQ ID NO: 2344407 - RNA, 22 nt, Human
ccaaaagaagcccccagcuaag

SEQ ID NO: 2344408 - RNA, 16 nt, Human
ccaaaagauugcugaa

SEQ ID NO: 2344409 - RNA, 22 nt, Human
ccaaaagauugcugaaauuuua

SEQ ID NO: 2344410 - RNA, 19 nt, Human
ccaaaagauugcugaaauu

SEQ ID NO: 2344411 - RNA, 16 nt, Human
ccacuccuccaaagga

SEQ ID NO: 2344412 - RNA, 12 nt, Human
ccacuccuccaa

SEQ ID NO: 2344413 - RNA, 20 nt, Human
ccacuccgagaggugggcca

SEQ ID NO: 2344414 - RNA, 18 nt, Human
ccacucuacccucccacc

SEQ ID NO: 2344415 - RNA, 12 nt, Human
ccacuccucuga

SEQ ID NO: 2344416 - RNA, 14 nt, Human
ccacuccuccuagc

SEQ ID NO: 2344417 - RNA, 16 nt, Human
ccacuccgagaggugg

SEQ ID NO: 2344418 - RNA, 17 nt, Human
ccacuccgagagguggg

SEQ ID NO: 2344419 - RNA, 19 nt, Human
ccacuccgagaggugggcc

SEQ ID NO: 2344420 - RNA, 23 nt, Human
ccacuccgagaggugggccaguc

SEQ ID NO: 2344421 - RNA, 20 nt, Human
ccacucuacccucccacccc

SEQ ID NO: 2344422 - RNA, 19 nt, Human
ccacucuacccucccaccc

SEQ ID NO: 2344423 - RNA, 21 nt, Human
ccacucuacccucccaccccc

SEQ ID NO: 2344424 - RNA, 19 nt, Human
ccacucuagggcaguggag

SEQ ID NO: 2344425 - RNA, 23 nt, Human
ccacucuaggggucaggcuccau

SEQ ID NO: 2344426 - RNA, 21 nt, Human
ccacucuaggggucaggcucc

SEQ ID NO: 2344427 - RNA, 22 nt, Human
ccacucuaggggucaggcucca

SEQ ID NO: 2344428 - RNA, 16 nt, Human
ccacucuccccacacu

SEQ ID NO: 2344429 - RNA, 15 nt, Human
ccacucuccccacac

SEQ ID NO: 2344430 - RNA, 14 nt, Human
ccacucuccccaca

SEQ ID NO: 2344431 - RNA, 13 nt, Human
ccacucuccccac

SEQ ID NO: 2344432 - RNA, 12 nt, Human
ccacucucccca

SEQ ID NO: 2344433 - RNA, 19 nt, Human
ccacucucauuccccaggu

SEQ ID NO: 2344434 - RNA, 18 nt, Human
ccacucucauuccccagg

SEQ ID NO: 2344435 - RNA, 17 nt, Human
ccacucucauuccccag

SEQ ID NO: 2344436 - RNA, 16 nt, Human
ccacucucauucccca

SEQ ID NO: 2344437 - RNA, 14 nt, Human
ccacucucauuccc

SEQ ID NO: 2344438 - RNA, 17 nt, Human
ccacucccugcaaccug

SEQ ID NO: 2344439 - RNA, 14 nt, Human
ccaccaccccagcu

SEQ ID NO: 2344440 - RNA, 16 nt, Human
ccaccaccacuggcca

SEQ ID NO: 2344441 - RNA, 15 nt, Human
ccaccaccagaaagc

SEQ ID NO: 2344442 - RNA, 11 nt, Human
ccaccacccaa

SEQ ID NO: 2344443 - RNA, 21 nt, Human
ccaccacagccagcaccuggc

SEQ ID NO: 2344444 - RNA, 17 nt, Human
ccaccaccaauugccaa

SEQ ID NO: 2344445 - RNA, 14 nt, Human
ccaccaccacuggc

SEQ ID NO: 2344446 - RNA, 15 nt, Human
ccaccaccacuggcc

SEQ ID NO: 2344447 - RNA, 13 nt, Human
ccaccaucaagcc

SEQ ID NO: 2344448 - RNA, 14 nt, Human
ccaccaucaagcca

SEQ ID NO: 2344449 - RNA, 17 nt, Human
ccaccacaccgcagaag

SEQ ID NO: 2344450 - RNA, 21 nt, Human
ccaccacacugauccagcccu

SEQ ID NO: 2344451 - RNA, 14 nt, Human
ccaccacagccagc

SEQ ID NO: 2344452 - RNA, 15 nt, Human
ccaccacagccagca

SEQ ID NO: 2344453 - RNA, 18 nt, Human
ccaccacagccagcaccu

SEQ ID NO: 2344454 - RNA, 20 nt, Human
ccaccacagccagcaccugg

SEQ ID NO: 2344455 - RNA, 17 nt, Human
ccaccacacccagccca

SEQ ID NO: 2344456 - RNA, 19 nt, Human
ccacagcucccaccccacc

SEQ ID NO: 2344457 - RNA, 23 nt, Human
ccaccauauucagugcuguggcc

SEQ ID NO: 2344458 - RNA, 15 nt, Human
ccacccugggcccug

SEQ ID NO: 2344459 - RNA, 22 nt, Human
ccaccauauucagugcuguggc

SEQ ID NO: 2344460 - RNA, 18 nt, Human
ccaccauauucagugcug

SEQ ID NO: 2344461 - RNA, 15 nt, Human
ccaccaucaagccac

SEQ ID NO: 2344462 - RNA, 16 nt, Human
ccacccugggcccugg

SEQ ID NO: 2344463 - RNA, 17 nt, Human
ccacccugggcccuggg

SEQ ID NO: 2344464 - RNA, 20 nt, Human
ccacccugggcccugggcug

SEQ ID NO: 2344465 - RNA, 22 nt, Human
ccacccugggcccugggcugga

SEQ ID NO: 2344466 - RNA, 12 nt, Human
ccacccugggcu

SEQ ID NO: 2344467 - RNA, 13 nt, Human
ccacccugggcuc

SEQ ID NO: 2344468 - RNA, 15 nt, Human
ccacccugggcucug

SEQ ID NO: 2344469 - RNA, 16 nt, Human
ccacccugggcucugg

SEQ ID NO: 2344470 - RNA, 17 nt, Human
ccacccugggcucugug

SEQ ID NO: 2344471 - RNA, 18 nt, Human
ccacccugggcucugugg

SEQ ID NO: 2344472 - RNA, 20 nt, Human
ccacccugggcucugugggc

SEQ ID NO: 2344473 - RNA, 23 nt, Human
ccacccugggcucugugggcugc

SEQ ID NO: 2344474 - RNA, 14 nt, Human
ccacccuuccccuc

SEQ ID NO: 2344475 - RNA, 12 nt, Human
ccacccuugccc

SEQ ID NO: 2344476 - RNA, 13 nt, Human
ccacccuugccca

SEQ ID NO: 2344477 - RNA, 12 nt, Human
ccacccuguguu

SEQ ID NO: 2344478 - RNA, 21 nt, Human
ccacccugucccccagcucug

SEQ ID NO: 2344479 - RNA, 22 nt, Human
ccacccugucccccagcucugg

SEQ ID NO: 2344480 - RNA, 14 nt, Human
ccacccuguccccc

SEQ ID NO: 2344481 - RNA, 16 nt, Human
ccacccugucccccag

SEQ ID NO: 2344482 - RNA, 18 nt, Human
ccacccugucccccagcu

SEQ ID NO: 2344483 - RNA, 19 nt, Human
ccacccugucccccagcuc

SEQ ID NO: 2344484 - RNA, 15 nt, Human
ccacccuuggccugu

SEQ ID NO: 2344485 - RNA, 14 nt, Human
ccacccuuggccug

SEQ ID NO: 2344486 - RNA, 13 nt, Human
ccacccuuggccu

SEQ ID NO: 2344487 - RNA, 12 nt, Human
ccacccuuggcc

SEQ ID NO: 2344488 - RNA, 17 nt, Human
ccacccuuggccugucu

SEQ ID NO: 2344489 - RNA, 16 nt, Human
ccacccuuggccuguc

SEQ ID NO: 2344490 - RNA, 19 nt, Human
ccacccuuggccugucuca

SEQ ID NO: 2344491 - RNA, 20 nt, Human
ccacccuuggaggcugucuu

SEQ ID NO: 2344492 - RNA, 12 nt, Human
ccacagcaggug

SEQ ID NO: 2344493 - RNA, 20 nt, Human
ccacagcaucauuuugcauu

SEQ ID NO: 2344494 - RNA, 15 nt, Human
ccacagccagcaccu

SEQ ID NO: 2344495 - RNA, 14 nt, Human
ccacagcagcugaa

SEQ ID NO: 2344496 - RNA, 20 nt, Human
ccacagcaaggcaccugcag

SEQ ID NO: 2344497 - RNA, 23 nt, Human
ccacagcaguugaaaagacucca

SEQ ID NO: 2344498 - RNA, 18 nt, Human
ccacagcaguugaaaaga

SEQ ID NO: 2344499 - RNA, 17 nt, Human
ccacagcaguugaaaag

SEQ ID NO: 2344500 - RNA, 20 nt, Human
ccacagccuccccugccagg

SEQ ID NO: 2344501 - RNA, 19 nt, Human
ccacagccuccccugccag

SEQ ID NO: 2344502 - RNA, 16 nt, Human
ccacagccuccccugc

SEQ ID NO: 2344503 - RNA, 17 nt, Human
ccacagccagcaccugg

SEQ ID NO: 2344504 - RNA, 18 nt, Human
ccacagccagcaccuggc

SEQ ID NO: 2344505 - RNA, 19 nt, Human
ccacagccagcaccuggca

SEQ ID NO: 2344506 - RNA, 22 nt, Human
ccacagccagcaccuggcaucg

SEQ ID NO: 2344507 - RNA, 17 nt, Human
ccacagcucccacccca

SEQ ID NO: 2344508 - RNA, 16 nt, Human
ccacagcucccacccc

SEQ ID NO: 2344509 - RNA, 15 nt, Human
ccacagcucccaccc

SEQ ID NO: 2344510 - RNA, 13 nt, Human
ccacagcucccac

SEQ ID NO: 2344511 - RNA, 23 nt, Human
ccacagcgcuggccgggaccccg

SEQ ID NO: 2344512 - RNA, 18 nt, Human
ccacagaugccuccaccc

SEQ ID NO: 2344513 - RNA, 20 nt, Human
ccacagcaaccccaggcuga

SEQ ID NO: 2344514 - RNA, 19 nt, Human
ccacagcaaccccaggcug

SEQ ID NO: 2344515 - RNA, 17 nt, Human
ccacagcaaggcaccug

SEQ ID NO: 2344516 - RNA, 19 nt, Human
ccacagcaaggcaccugca

SEQ ID NO: 2344517 - RNA, 14 nt, Human
ccacagcacagcca

SEQ ID NO: 2344518 - RNA, 12 nt, Human
ccacagcaguug

SEQ ID NO: 2344519 - RNA, 14 nt, Human
ccacgcccuccccu

SEQ ID NO: 2344520 - RNA, 23 nt, Human
ccacgcccguccugccuguggcg

SEQ ID NO: 2344521 - RNA, 15 nt, Human
ccacgcccuccccuc

SEQ ID NO: 2344522 - RNA, 20 nt, Human
ccacgcccuccccuccccug

SEQ ID NO: 2344523 - RNA, 17 nt, Human
ccacgcccuccccuccc

SEQ ID NO: 2344524 - RNA, 19 nt, Human
ccacgcccguccugccugu

SEQ ID NO: 2344525 - RNA, 20 nt, Human
ccacgcccguccugccugug

SEQ ID NO: 2344526 - RNA, 21 nt, Human
ccacgcccguccugccugugg

SEQ ID NO: 2344527 - RNA, 22 nt, Human
ccacgcccguccugccuguggc

SEQ ID NO: 2344528 - RNA, 23 nt, Human
ccacccuuuggggggggcccgcc

SEQ ID NO: 2344529 - RNA, 22 nt, Human
ccaccgaaguggacuggccccu

SEQ ID NO: 2344530 - RNA, 15 nt, Human
ccacccuuugggggg

SEQ ID NO: 2344531 - RNA, 18 nt, Human
ccaccgaagccgccugug

SEQ ID NO: 2344532 - RNA, 13 nt, Human
ccaccgcagacag

SEQ ID NO: 2344533 - RNA, 22 nt, Human
ccaccgcagacaggaccaggga

SEQ ID NO: 2344534 - RNA, 19 nt, Human
ccaccgcagacaggaccag

SEQ ID NO: 2344535 - RNA, 23 nt, Human
ccaccgaaguggacuggccccug

SEQ ID NO: 2344536 - RNA, 13 nt, Human
ccaccgcaugccc

SEQ ID NO: 2344537 - RNA, 16 nt, Human
ccaccgcaugcccccu

SEQ ID NO: 2344538 - RNA, 17 nt, Human
ccaccgcaugcccccuc

SEQ ID NO: 2344539 - RNA, 21 nt, Human
ccaccuuugaagaaguaagga

SEQ ID NO: 2344540 - RNA, 20 nt, Human
ccaccuuuauuaaaaucuua

SEQ ID NO: 2344541 - RNA, 18 nt, Human
ccaccgccauggcuucca

SEQ ID NO: 2344542 - RNA, 23 nt, Human
ccaccuuucagauaacuguuauu

SEQ ID NO: 2344543 - RNA, 13 nt, Human
ccaccgcccagag

SEQ ID NO: 2344544 - RNA, 18 nt, Human
ccaccgcaugcccccucg

SEQ ID NO: 2344545 - RNA, 13 nt, Human
ccaccgccauggc

SEQ ID NO: 2344546 - RNA, 14 nt, Human
ccaccgccauggcu

SEQ ID NO: 2344547 - RNA, 17 nt, Human
ccaccgccauggcuucc

SEQ ID NO: 2344548 - RNA, 17 nt, Human
ccaccgcccagagaccc

SEQ ID NO: 2344549 - RNA, 13 nt, Human
ccaccgccuccua

SEQ ID NO: 2344550 - RNA, 16 nt, Human
ccacgcccccacuggu

SEQ ID NO: 2344551 - RNA, 17 nt, Human
ccacgcccccacuggug

SEQ ID NO: 2344552 - RNA, 14 nt, Human
ccacgacugucucc

SEQ ID NO: 2344553 - RNA, 23 nt, Human
ccacgaauuugcuggggaaucuc

SEQ ID NO: 2344554 - RNA, 15 nt, Human
ccacgaauuugcugg

SEQ ID NO: 2344555 - RNA, 19 nt, Human
ccacgaauuugcuggggaa

SEQ ID NO: 2344556 - RNA, 14 nt, Human
ccaccuuuucagcg

SEQ ID NO: 2344557 - RNA, 13 nt, Human
ccacgcccggcua

SEQ ID NO: 2344558 - RNA, 15 nt, Human
ccacgacugucucca

SEQ ID NO: 2344559 - RNA, 15 nt, Human
ccacgcccguccugc

SEQ ID NO: 2344560 - RNA, 17 nt, Human
ccacgcccguccugccu

SEQ ID NO: 2344561 - RNA, 18 nt, Human
ccacgcccguccugccug

SEQ ID NO: 2344562 - RNA, 18 nt, Human
ccacgcccccacugguga

SEQ ID NO: 2344563 - RNA, 19 nt, Human
ccacgcccccacuggugac

SEQ ID NO: 2344564 - RNA, 22 nt, Human
cauauguuucgcugauauaugu

SEQ ID NO: 2344565 - RNA, 15 nt, Human
cauauguugcucagu

SEQ ID NO: 2344566 - RNA, 16 nt, Human
cauauguugcucaguc

SEQ ID NO: 2344567 - RNA, 15 nt, Human
cauauggcccagugu

SEQ ID NO: 2344568 - RNA, 16 nt, Human
cauauggcccaguguc

SEQ ID NO: 2344569 - RNA, 20 nt, Human
cauauggcccagugucaagu

SEQ ID NO: 2344570 - RNA, 21 nt, Human
cauauuccugcagccuggagg

SEQ ID NO: 2344571 - RNA, 18 nt, Human
cauauuccugcagccugg

SEQ ID NO: 2344572 - RNA, 17 nt, Human
cauauuccugcagccug

SEQ ID NO: 2344573 - RNA, 17 nt, Human
cauauuccauauuuauu

SEQ ID NO: 2344574 - RNA, 23 nt, Human
cauauucauguaaacaaaauuua

SEQ ID NO: 2344575 - RNA, 16 nt, Human
cauauuccauauuuau

SEQ ID NO: 2344576 - RNA, 16 nt, Human
cauauuaccacagaca

SEQ ID NO: 2344577 - RNA, 17 nt, Human
cauauucuguuggccag

SEQ ID NO: 2344578 - RNA, 18 nt, Human
cauauucuguuggccagu

SEQ ID NO: 2344579 - RNA, 19 nt, Human
cagugguggcagggccuag

SEQ ID NO: 2344580 - RNA, 12 nt, Human
cagugguggcag

SEQ ID NO: 2344581 - RNA, 14 nt, Human
cagugguggcaggg

SEQ ID NO: 2344582 - RNA, 16 nt, Human
cagugguggcagggcc

SEQ ID NO: 2344583 - RNA, 23 nt, Human
cauaugcuguauauccuuucuaa

SEQ ID NO: 2344584 - RNA, 18 nt, Human
cauauggacucugcacau

SEQ ID NO: 2344585 - RNA, 18 nt, Human
cauauggauuuucuauug

SEQ ID NO: 2344586 - RNA, 20 nt, Human
cauauggauuuucuauuguu

SEQ ID NO: 2344587 - RNA, 23 nt, Human
cauauggauuuucuauuguuacu

SEQ ID NO: 2344588 - RNA, 15 nt, Human
cauauggacucugca

SEQ ID NO: 2344589 - RNA, 17 nt, Human
cauauggacucugcaca

SEQ ID NO: 2344590 - RNA, 20 nt, Human
cauauggacucugcacauga

SEQ ID NO: 2344591 - RNA, 22 nt, Human
caguggugguuuucuguucuuu

SEQ ID NO: 2344592 - RNA, 21 nt, Human
caguggugguuuucuguucuu

SEQ ID NO: 2344593 - RNA, 20 nt, Human
caguggugguuuucuguucu

SEQ ID NO: 2344594 - RNA, 19 nt, Human
caguggugguuuucuguuc

SEQ ID NO: 2344595 - RNA, 22 nt, Human
cauauuccugcagccuggaggc

SEQ ID NO: 2344596 - RNA, 13 nt, Human
cauauucugucug

SEQ ID NO: 2344597 - RNA, 19 nt, Human
caucacuggagcaccaggc

SEQ ID NO: 2344598 - RNA, 23 nt, Human
caucccgacauggacccggagcu

SEQ ID NO: 2344599 - RNA, 21 nt, Human
cauccccuguagagugggagc

SEQ ID NO: 2344600 - RNA, 20 nt, Human
caucacuugaauccuagggc

SEQ ID NO: 2344601 - RNA, 23 nt, Human
caucacuugaauccuagggccug

SEQ ID NO: 2344602 - RNA, 15 nt, Human
caucacuuguacaaa

SEQ ID NO: 2344603 - RNA, 14 nt, Human
caucacuuguacaa

SEQ ID NO: 2344604 - RNA, 14 nt, Human
caucacuucccuac

SEQ ID NO: 2344605 - RNA, 12 nt, Human
caucacuucccu

SEQ ID NO: 2344606 - RNA, 14 nt, Human
caucccguguucuc

SEQ ID NO: 2344607 - RNA, 16 nt, Human
caucccguguucuccu

SEQ ID NO: 2344608 - RNA, 21 nt, Human
caucccgggacgcagcaggag

SEQ ID NO: 2344609 - RNA, 17 nt, Human
caucccgagcaccucca

SEQ ID NO: 2344610 - RNA, 14 nt, Human
caucccuacccccu

SEQ ID NO: 2344611 - RNA, 18 nt, Human
caucccuaaugcugcaga

SEQ ID NO: 2344612 - RNA, 12 nt, Human
caucccuacccc

SEQ ID NO: 2344613 - RNA, 17 nt, Human
caucccguguucuccuu

SEQ ID NO: 2344614 - RNA, 21 nt, Human
caucccguguucuccuuuucc

SEQ ID NO: 2344615 - RNA, 15 nt, Human
cauccuggcacccgg

SEQ ID NO: 2344616 - RNA, 22 nt, Human
cauccugccuuagagccaggca

SEQ ID NO: 2344617 - RNA, 16 nt, Human
caucgccgggacucca

SEQ ID NO: 2344618 - RNA, 16 nt, Human
caucgcaccauucuga

SEQ ID NO: 2344619 - RNA, 23 nt, Human
cauccugccuuagagccaggcac

SEQ ID NO: 2344620 - RNA, 18 nt, Human
caucgcaccauucugacu

SEQ ID NO: 2344621 - RNA, 19 nt, Human
caucgcaccauucugacuc

SEQ ID NO: 2344622 - RNA, 22 nt, Human
cauccuggcacccggccccugc

SEQ ID NO: 2344623 - RNA, 21 nt, Human
caucguauaacacaauaugaa

SEQ ID NO: 2344624 - RNA, 21 nt, Human
caucggugaaacuaacagaua

SEQ ID NO: 2344625 - RNA, 13 nt, Human
caucgggcugagg

SEQ ID NO: 2344626 - RNA, 22 nt, Human
caucggugaaacuaacagauaa

SEQ ID NO: 2344627 - RNA, 14 nt, Human
caucugcugguccg

SEQ ID NO: 2344628 - RNA, 19 nt, Human
caucugcugguccguggga

SEQ ID NO: 2344629 - RNA, 16 nt, Human
caucugcucuccuucc

SEQ ID NO: 2344630 - RNA, 20 nt, Human
caucgugaaacccugucucu

SEQ ID NO: 2344631 - RNA, 18 nt, Human
caucugcucuccuuccug

SEQ ID NO: 2344632 - RNA, 20 nt, Human
caucugcucuccuuccugga

SEQ ID NO: 2344633 - RNA, 15 nt, Human
caucugugugaaaau

SEQ ID NO: 2344634 - RNA, 14 nt, Human
caucugugucuugu

SEQ ID NO: 2344635 - RNA, 13 nt, Human
caucugugucuug

SEQ ID NO: 2344636 - RNA, 11 nt, Human
caucugugucu

SEQ ID NO: 2344637 - RNA, 12 nt, Human
caucuguucugg

SEQ ID NO: 2344638 - RNA, 17 nt, Human
caucuguguuucaagug

SEQ ID NO: 2344639 - RNA, 12 nt, Human
caucuguuguuu

SEQ ID NO: 2344640 - RNA, 19 nt, Human
caucuguguuucaaguggg

SEQ ID NO: 2344641 - RNA, 20 nt, Human
caucuguuguuuuguuuuaa

SEQ ID NO: 2344642 - RNA, 11 nt, Human
caucuguuuuu

SEQ ID NO: 2344643 - RNA, 17 nt, Human
caucugugggcacgcug

SEQ ID NO: 2344644 - RNA, 15 nt, Human
caucugugcacgcag

SEQ ID NO: 2344645 - RNA, 21 nt, Human
caucugugcacugcccaugga

SEQ ID NO: 2344646 - RNA, 18 nt, Human
caucugugcacugcccau

SEQ ID NO: 2344647 - RNA, 17 nt, Human
caucugugcacugccca

SEQ ID NO: 2344648 - RNA, 15 nt, Human
caucugugauucccu

SEQ ID NO: 2344649 - RNA, 21 nt, Human
caucuggaaggggaucccacc

SEQ ID NO: 2344650 - RNA, 14 nt, Human
caucugugaauaag

SEQ ID NO: 2344651 - RNA, 20 nt, Human
caucugcuuacaauucccug

SEQ ID NO: 2344652 - RNA, 22 nt, Human
caucugcuuacaauucccugcu

SEQ ID NO: 2344653 - RNA, 17 nt, Human
caucuggaaccaucaga

SEQ ID NO: 2344654 - RNA, 12 nt, Human
caucuggaacca

SEQ ID NO: 2344655 - RNA, 19 nt, Human
caucuggaaccaucagaaa

SEQ ID NO: 2344656 - RNA, 21 nt, Human
caucuggaaucuggagaccag

SEQ ID NO: 2344657 - RNA, 16 nt, Human
caucuggaaucuggag

SEQ ID NO: 2344658 - RNA, 13 nt, Human
caugauguuuucc

SEQ ID NO: 2344659 - RNA, 17 nt, Human
caugauuuccuugaaug

SEQ ID NO: 2344660 - RNA, 16 nt, Human
caugauuuccuugaau

SEQ ID NO: 2344661 - RNA, 14 nt, Human
caugauuuccuuga

SEQ ID NO: 2344662 - RNA, 12 nt, Human
caugauuuccuu

SEQ ID NO: 2344663 - RNA, 23 nt, Human
caugcuacacacugcauguuugu

SEQ ID NO: 2344664 - RNA, 20 nt, Human
caugcuacacacugcauguu

SEQ ID NO: 2344665 - RNA, 14 nt, Human
caugcuacacacug

SEQ ID NO: 2344666 - RNA, 18 nt, Human
caugauuuccuugaaugu

SEQ ID NO: 2344667 - RNA, 24 nt, Human
caugauuuugaaaucaugaagaua

SEQ ID NO: 2344668 - RNA, 19 nt, Human
caugauguuaaccagaaua

SEQ ID NO: 2344669 - RNA, 20 nt, Human
caugauguggaguggggcag

SEQ ID NO: 2344670 - RNA, 22 nt, Human
caugauguuaaccagaauaaag

SEQ ID NO: 2344671 - RNA, 22 nt, Human
caugaugguuauuuucuuuucu

SEQ ID NO: 2344672 - RNA, 23 nt, Human
caugaugguuauuuucuuuucuu

SEQ ID NO: 2344673 - RNA, 20 nt, Human
caugauguagugccucuuuc

SEQ ID NO: 2344674 - RNA, 12 nt, Human
caugauguggag

SEQ ID NO: 2344675 - RNA, 14 nt, Human
caugauguuuagaa

SEQ ID NO: 2344676 - RNA, 20 nt, Human
caugauggcaacagaucugg

SEQ ID NO: 2344677 - RNA, 20 nt, Human
caugauggugcugaccucug

SEQ ID NO: 2344678 - RNA, 20 nt, Human
caugcugggaagacgccuga

SEQ ID NO: 2344679 - RNA, 22 nt, Human
caugcuggagccuguguaacag

SEQ ID NO: 2344680 - RNA, 23 nt, Human
caugcugggaagacgccugagcu

SEQ ID NO: 2344681 - RNA, 20 nt, Human
caugcuggggcaagucccug

SEQ ID NO: 2344682 - RNA, 13 nt, Human
caugcuggagccu

SEQ ID NO: 2344683 - RNA, 14 nt, Human
caugcuggagccug

SEQ ID NO: 2344684 - RNA, 15 nt, Human
caugcuggagccugu

SEQ ID NO: 2344685 - RNA, 16 nt, Human
caugcuggagccugug

SEQ ID NO: 2344686 - RNA, 17 nt, Human
caugcuggagccugugu

SEQ ID NO: 2344687 - RNA, 19 nt, Human
caugcuggagccuguguaa

SEQ ID NO: 2344688 - RNA, 22 nt, Human
caugcuggaggugacaucucuu

SEQ ID NO: 2344689 - RNA, 21 nt, Human
caugcugacuuucauuucuug

SEQ ID NO: 2344690 - RNA, 18 nt, Human
caugcugaagggaccuug

SEQ ID NO: 2344691 - RNA, 19 nt, Human
caugcugaagggaccuuga

SEQ ID NO: 2344692 - RNA, 12 nt, Human
caugcuggagcc

SEQ ID NO: 2344693 - RNA, 23 nt, Human
caugcucucugcagccagcccag

SEQ ID NO: 2344694 - RNA, 20 nt, Human
caugcucucugcagccagcc

SEQ ID NO: 2344695 - RNA, 19 nt, Human
caugcucucugcagccagc

SEQ ID NO: 2344696 - RNA, 16 nt, Human
caugcucucugcagcc

SEQ ID NO: 2344697 - RNA, 15 nt, Human
caugcucucugcagc

SEQ ID NO: 2344698 - RNA, 14 nt, Human
caugcucucugcag

SEQ ID NO: 2344699 - RNA, 21 nt, Human
caugcucucugcagccagccc

SEQ ID NO: 2344700 - RNA, 16 nt, Human
caugcucuuagaaaau

SEQ ID NO: 2344701 - RNA, 17 nt, Human
caugcucuuagaaaauu

SEQ ID NO: 2344702 - RNA, 15 nt, Human
caugcugaagccaaa

SEQ ID NO: 2344703 - RNA, 13 nt, Human
caugcugaaggga

SEQ ID NO: 2344704 - RNA, 16 nt, Human
caugcugaagccaaag

SEQ ID NO: 2344705 - RNA, 20 nt, Human
caugcugaagccaaagccaa

SEQ ID NO: 2344706 - RNA, 16 nt, Human
caugcuaucucugugu

SEQ ID NO: 2344707 - RNA, 13 nt, Human
caugcucucugca

SEQ ID NO: 2344708 - RNA, 14 nt, Human
caugcuaauuauau

SEQ ID NO: 2344709 - RNA, 15 nt, Human
cauggcuccagucug

SEQ ID NO: 2344710 - RNA, 14 nt, Human
cauggcuccagucu

SEQ ID NO: 2344711 - RNA, 13 nt, Human
cauggcuccaguc

SEQ ID NO: 2344712 - RNA, 17 nt, Human
cauggcuccagaaaugu

SEQ ID NO: 2344713 - RNA, 17 nt, Human
cauggcucccccuccac

SEQ ID NO: 2344714 - RNA, 22 nt, Human
cauggcuccagucugcugcccu

SEQ ID NO: 2344715 - RNA, 20 nt, Human
cauggcuccagucugcugcc

SEQ ID NO: 2344716 - RNA, 11 nt, Human
cauggcugaac

SEQ ID NO: 2344717 - RNA, 22 nt, Human
cauggcuauaaacaauuacaug

SEQ ID NO: 2344718 - RNA, 12 nt, Human
cauggcuaucug

SEQ ID NO: 2344719 - RNA, 15 nt, Human
cauggcuaagcuuua

SEQ ID NO: 2344720 - RNA, 18 nt, Human
caugcuggguucugcaca

SEQ ID NO: 2344721 - RNA, 16 nt, Human
caugcuggguucugca

SEQ ID NO: 2344722 - RNA, 17 nt, Human
caugcuggguucugcac

SEQ ID NO: 2344723 - RNA, 16 nt, Human
cauggcuaagcuuuau

SEQ ID NO: 2344724 - RNA, 14 nt, Human
caugggaaugaaug

SEQ ID NO: 2344725 - RNA, 15 nt, Human
caugggaaugaaugu

SEQ ID NO: 2344726 - RNA, 16 nt, Human
caugggaaugaauguc

SEQ ID NO: 2344727 - RNA, 17 nt, Human
caugggaaugaauguca

SEQ ID NO: 2344728 - RNA, 23 nt, Human
cauucuagguaggggcccacuuc

SEQ ID NO: 2344729 - RNA, 13 nt, Human
cauucuccaccug

SEQ ID NO: 2344730 - RNA, 14 nt, Human
cauucuccaccugc

SEQ ID NO: 2344731 - RNA, 16 nt, Human
cauucuccaccugcca

SEQ ID NO: 2344732 - RNA, 17 nt, Human
cauucuccacagcaacc

SEQ ID NO: 2344733 - RNA, 15 nt, Human
cauucuccacagcaa

SEQ ID NO: 2344734 - RNA, 18 nt, Human
cauucuccacagcaaccc

SEQ ID NO: 2344735 - RNA, 14 nt, Human
cauucuccacagca

SEQ ID NO: 2344736 - RNA, 15 nt, Human
cauucuacugaaaag

SEQ ID NO: 2344737 - RNA, 17 nt, Human
cauucuacacagagcag

SEQ ID NO: 2344738 - RNA, 19 nt, Human
cauucuacacagagcagga

SEQ ID NO: 2344739 - RNA, 22 nt, Human
cauucuacacagagcaggacug

SEQ ID NO: 2344740 - RNA, 16 nt, Human
cauucuacacagagca

SEQ ID NO: 2344741 - RNA, 14 nt, Human
cauucguucugugg

SEQ ID NO: 2344742 - RNA, 16 nt, Human
cauucgguguggugca

SEQ ID NO: 2344743 - RNA, 21 nt, Human
cauguuuacuuuucagggcau

SEQ ID NO: 2344744 - RNA, 19 nt, Human
cauguuuacuuuucagggc

SEQ ID NO: 2344745 - RNA, 13 nt, Human
cauuauaaacgug

SEQ ID NO: 2344746 - RNA, 18 nt, Human
cauuauaacugaaggaga

SEQ ID NO: 2344747 - RNA, 20 nt, Human
cauuauaacugaaggagaag

SEQ ID NO: 2344748 - RNA, 17 nt, Human
cauuauagaucccccag

SEQ ID NO: 2344749 - RNA, 13 nt, Human
cauguagaagcug

SEQ ID NO: 2344750 - RNA, 19 nt, Human
cauguagaagcugcaucuu

SEQ ID NO: 2344751 - RNA, 20 nt, Human
cauguagaaaauuuguuauu

SEQ ID NO: 2344752 - RNA, 20 nt, Human
cauguagcaggacugaauug

SEQ ID NO: 2344753 - RNA, 14 nt, Human
cauguagcaggacu

SEQ ID NO: 2344754 - RNA, 17 nt, Human
cauguagcccccuggcc

SEQ ID NO: 2344755 - RNA, 13 nt, Human
cauguagcccccu

SEQ ID NO: 2344756 - RNA, 22 nt, Human
cauguagcccccuggccucugu

SEQ ID NO: 2344757 - RNA, 21 nt, Human
cauguagcccccuggccucug

SEQ ID NO: 2344758 - RNA, 20 nt, Human
cauguagcccccuggccucu

SEQ ID NO: 2344759 - RNA, 18 nt, Human
cauguagcccccuggccu

SEQ ID NO: 2344760 - RNA, 18 nt, Human
cauguaggaaguaggaag

SEQ ID NO: 2344761 - RNA, 15 nt, Human
cauguagaagcugca

SEQ ID NO: 2344762 - RNA, 14 nt, Human
cauguagcugaguu

SEQ ID NO: 2344763 - RNA, 15 nt, Human
cauguagcugaguuu

SEQ ID NO: 2344764 - RNA, 14 nt, Human
cauguauugugucu

SEQ ID NO: 2344765 - RNA, 15 nt, Human
cauguauugugucuu

SEQ ID NO: 2344766 - RNA, 20 nt, Human
cauguauugugucuuuugca

SEQ ID NO: 2344767 - RNA, 21 nt, Human
cauguauugugucuuuugcau

SEQ ID NO: 2344768 - RNA, 23 nt, Human
cauguauugugucuuuugcauga

SEQ ID NO: 2344769 - RNA, 15 nt, Human
cauguauuuaucucu

SEQ ID NO: 2344770 - RNA, 23 nt, Human
cauguauuuaucucuauuuaaua

SEQ ID NO: 2344771 - RNA, 20 nt, Human
cauguauuuaucucuauuua

SEQ ID NO: 2344772 - RNA, 16 nt, Human
cauguuggccaggcug

SEQ ID NO: 2344773 - RNA, 20 nt, Human
cauguuauauauuuuuugua

SEQ ID NO: 2344774 - RNA, 22 nt, Human
cauguuggucaaaagcuggauu

SEQ ID NO: 2344775 - RNA, 15 nt, Human
cauguugggaaacuu

SEQ ID NO: 2344776 - RNA, 19 nt, Human
cauguugggaaacuuggcu

SEQ ID NO: 2344777 - RNA, 20 nt, Human
cauguugggaaacuuggcuc

SEQ ID NO: 2344778 - RNA, 21 nt, Human
cauguugggaaacuuggcucg

SEQ ID NO: 2344779 - RNA, 13 nt, Human
cauguuauauauu

SEQ ID NO: 2344780 - RNA, 14 nt, Human
cauguuauauauuu

SEQ ID NO: 2344781 - RNA, 22 nt, Human
cauguuauauauuuuuuguagg

SEQ ID NO: 2344782 - RNA, 14 nt, Human
cauguuggccaggc

SEQ ID NO: 2344783 - RNA, 15 nt, Human
cauguuggccaggcu

SEQ ID NO: 2344784 - RNA, 16 nt, Human
caugucccuaccgagu

SEQ ID NO: 2344785 - RNA, 22 nt, Human
caugucccuaccgagucucuuc

SEQ ID NO: 2344786 - RNA, 21 nt, Human
cauguccccaaaccugcaagg

SEQ ID NO: 2344787 - RNA, 14 nt, Human
caugucaaacguga

SEQ ID NO: 2344788 - RNA, 19 nt, Human
caugucaaacgugaaaaug

SEQ ID NO: 2344789 - RNA, 18 nt, Human
cauguauuuguuugcaua

SEQ ID NO: 2344790 - RNA, 17 nt, Human
caugucccuacaccccu

SEQ ID NO: 2344791 - RNA, 23 nt, Human
caugucccuaccgagucucuucu

SEQ ID NO: 2344792 - RNA, 15 nt, Human
cauguccuguaaagg

SEQ ID NO: 2344793 - RNA, 14 nt, Human
cauguccuguaaag

SEQ ID NO: 2344794 - RNA, 19 nt, Human
cauguuaggaaaauuucac

SEQ ID NO: 2344795 - RNA, 18 nt, Human
cauguuaggaaaauuuca

SEQ ID NO: 2344796 - RNA, 14 nt, Human
cauguuaggaaaau

SEQ ID NO: 2344797 - RNA, 17 nt, Human
cauguuacugaccagca

SEQ ID NO: 2344798 - RNA, 15 nt, Human
caggugcacaagcuc

SEQ ID NO: 2344799 - RNA, 22 nt, Human
caggugauccacccaccucagc

SEQ ID NO: 2344800 - RNA, 23 nt, Human
caggugauccacccaccucagcc

SEQ ID NO: 2344801 - RNA, 17 nt, Human
caggugcacaagcucca

SEQ ID NO: 2344802 - RNA, 18 nt, Human
caggugcacaagcuccaa

SEQ ID NO: 2344803 - RNA, 19 nt, Human
caggugcacaagcuccaag

SEQ ID NO: 2344804 - RNA, 20 nt, Human
caggugcacaagcuccaagc

SEQ ID NO: 2344805 - RNA, 21 nt, Human
caggugauccacccaccucag

SEQ ID NO: 2344806 - RNA, 19 nt, Human
cagguuguaguaaagaaau

SEQ ID NO: 2344807 - RNA, 13 nt, Human
cagguuuguuaca

SEQ ID NO: 2344808 - RNA, 14 nt, Human
cagguuuguuacau

SEQ ID NO: 2344809 - RNA, 19 nt, Human
cagguuuucugggugucca

SEQ ID NO: 2344810 - RNA, 16 nt, Human
cagguuuuccugaaga

SEQ ID NO: 2344811 - RNA, 14 nt, Human
cagguuuaagcugu

SEQ ID NO: 2344812 - RNA, 12 nt, Human
cagguuuuccug

SEQ ID NO: 2344813 - RNA, 15 nt, Human
cagguuuuguaaaga

SEQ ID NO: 2344814 - RNA, 13 nt, Human
cagguuuuucaau

SEQ ID NO: 2344815 - RNA, 12 nt, Human
cagguuuuucaa

SEQ ID NO: 2344816 - RNA, 20 nt, Human
caguaaaauugccauauugc

SEQ ID NO: 2344817 - RNA, 21 nt, Human
caguaaaauugccauauugca

SEQ ID NO: 2344818 - RNA, 14 nt, Human
cagguuuuucaauu

SEQ ID NO: 2344819 - RNA, 15 nt, Human
cagguuuuucaauua

SEQ ID NO: 2344820 - RNA, 16 nt, Human
cagguuuuucaauuaa

SEQ ID NO: 2344821 - RNA, 17 nt, Human
cagguuuuucaauuaaa

SEQ ID NO: 2344822 - RNA, 16 nt, Human
caguaaacagaggagu

SEQ ID NO: 2344823 - RNA, 10 nt, Human
caguaaacau

SEQ ID NO: 2344824 - RNA, 23 nt, Human
caguaaagaacaucccuccuggg

SEQ ID NO: 2344825 - RNA, 21 nt, Human
cagguuggugggggccucggu

SEQ ID NO: 2344826 - RNA, 12 nt, Human
caggugccucca

SEQ ID NO: 2344827 - RNA, 13 nt, Human
caggugccuccag

SEQ ID NO: 2344828 - RNA, 14 nt, Human
caggugccuccagg

SEQ ID NO: 2344829 - RNA, 15 nt, Human
caggugccuccaggu

SEQ ID NO: 2344830 - RNA, 16 nt, Human
caggugccuccaggug

SEQ ID NO: 2344831 - RNA, 17 nt, Human
caggugccuccaggugu

SEQ ID NO: 2344832 - RNA, 18 nt, Human
caggugccuccaggugug

SEQ ID NO: 2344833 - RNA, 19 nt, Human
caggugccuccaggugugc

SEQ ID NO: 2344834 - RNA, 22 nt, Human
cagguugucugaagucacugca

SEQ ID NO: 2344835 - RNA, 21 nt, Human
caggugccuccaggugugcac

SEQ ID NO: 2344836 - RNA, 12 nt, Human
caggugccugga

SEQ ID NO: 2344837 - RNA, 15 nt, Human
caggugccuggacau

SEQ ID NO: 2344838 - RNA, 13 nt, Human
caggugccuugga

SEQ ID NO: 2344839 - RNA, 18 nt, Human
cagguuguaguaaagaaa

SEQ ID NO: 2344840 - RNA, 14 nt, Human
caggugccuuggag

SEQ ID NO: 2344841 - RNA, 23 nt, Human
cagguugucugaagucacugcac

SEQ ID NO: 2344842 - RNA, 11 nt, Human
caggugccucc

SEQ ID NO: 2344843 - RNA, 23 nt, Human
caggugcccagcuauaccugugc

SEQ ID NO: 2344844 - RNA, 17 nt, Human
caggugcccaucccugg

SEQ ID NO: 2344845 - RNA, 20 nt, Human
caggugcccaucccuggaag

SEQ ID NO: 2344846 - RNA, 22 nt, Human
caggugcacaagcuccaagcuc

SEQ ID NO: 2344847 - RNA, 22 nt, Human
caggugcccagcuauaccugug

SEQ ID NO: 2344848 - RNA, 21 nt, Human
caggugcacaagcuccaagcu

SEQ ID NO: 2344849 - RNA, 19 nt, Human
caggugccaguuauggcua

SEQ ID NO: 2344850 - RNA, 17 nt, Human
caguaaauaaauuguuu

SEQ ID NO: 2344851 - RNA, 17 nt, Human
cagucaaggaguggcuu

SEQ ID NO: 2344852 - RNA, 15 nt, Human
cagucaauauuuuua

SEQ ID NO: 2344853 - RNA, 16 nt, Human
cagucacagccacccc

SEQ ID NO: 2344854 - RNA, 14 nt, Human
cagucacagccacc

SEQ ID NO: 2344855 - RNA, 13 nt, Human
cagucacagccac

SEQ ID NO: 2344856 - RNA, 12 nt, Human
cagucacagcca

SEQ ID NO: 2344857 - RNA, 15 nt, Human
caguaaagcacuugc

SEQ ID NO: 2344858 - RNA, 14 nt, Human
caguaaacuuuuaa

SEQ ID NO: 2344859 - RNA, 14 nt, Human
caguaaauaaauug

SEQ ID NO: 2344860 - RNA, 15 nt, Human
caguaaauaaauugu

SEQ ID NO: 2344861 - RNA, 16 nt, Human
caguaaauaaauuguu

SEQ ID NO: 2344862 - RNA, 17 nt, Human
cagucaccugcccagau

SEQ ID NO: 2344863 - RNA, 17 nt, Human
cagucaccccaggacuc

SEQ ID NO: 2344864 - RNA, 12 nt, Human
cagucaccccag

SEQ ID NO: 2344865 - RNA, 19 nt, Human
cagucaccucauggaauug

SEQ ID NO: 2344866 - RNA, 15 nt, Human
cagucacauuccaag

SEQ ID NO: 2344867 - RNA, 16 nt, Human
cagucaccucauggaa

SEQ ID NO: 2344868 - RNA, 18 nt, Human
cagucacguggaggagca

SEQ ID NO: 2344869 - RNA, 23 nt, Human
cagucacguggaggagcagugca

SEQ ID NO: 2344870 - RNA, 20 nt, Human
caguggugcgaucuggguuc

SEQ ID NO: 2344871 - RNA, 15 nt, Human
caguggggcagucau

SEQ ID NO: 2344872 - RNA, 20 nt, Human
caguggggaggggcuguggg

SEQ ID NO: 2344873 - RNA, 21 nt, Human
caguggugcgaucuggguuca

SEQ ID NO: 2344874 - RNA, 18 nt, Human
caguggugguuuucuguu

SEQ ID NO: 2344875 - RNA, 21 nt, Human
cagugggccuggccagcaggu

SEQ ID NO: 2344876 - RNA, 15 nt, Human
cagugggccuggcca

SEQ ID NO: 2344877 - RNA, 14 nt, Human
cagugggccuggcc

SEQ ID NO: 2344878 - RNA, 21 nt, Human
cagugggaggggcaggcugac

SEQ ID NO: 2344879 - RNA, 19 nt, Human
cagugggaggggcaggcug

SEQ ID NO: 2344880 - RNA, 20 nt, Human
cagugggaggggcaggcuga

SEQ ID NO: 2344881 - RNA, 13 nt, Human
cagugggaggcgc

SEQ ID NO: 2344882 - RNA, 11 nt, Human
cagugggaggg

SEQ ID NO: 2344883 - RNA, 12 nt, Human
cagugggagggg

SEQ ID NO: 2344884 - RNA, 14 nt, Human
cagugggaggggca

SEQ ID NO: 2344885 - RNA, 15 nt, Human
cagugggaggggcag

SEQ ID NO: 2344886 - RNA, 16 nt, Human
cagugggaggggcagg

SEQ ID NO: 2344887 - RNA, 17 nt, Human
cagugggaggggcaggc

SEQ ID NO: 2344888 - RNA, 18 nt, Human
cagugggaggggcaggcu

SEQ ID NO: 2344889 - RNA, 13 nt, Human
cagugcccacagg

SEQ ID NO: 2344890 - RNA, 15 nt, Human
cagugcccacaggau

SEQ ID NO: 2344891 - RNA, 16 nt, Human
cagugcaugcuguccc

SEQ ID NO: 2344892 - RNA, 17 nt, Human
cagugcaugcugucccu

SEQ ID NO: 2344893 - RNA, 17 nt, Human
cagugcccacaggauca

SEQ ID NO: 2344894 - RNA, 20 nt, Human
cagugggagcugccuguuca

SEQ ID NO: 2344895 - RNA, 23 nt, Human
cagugggagcugccuguucagcu

SEQ ID NO: 2344896 - RNA, 12 nt, Human
cagugggaggcg

SEQ ID NO: 2344897 - RNA, 14 nt, Human
cagugcauauuccu

SEQ ID NO: 2344898 - RNA, 18 nt, Human
cagugcauauuccuuucu

SEQ ID NO: 2344899 - RNA, 15 nt, Human
cagucugcugcccuc

SEQ ID NO: 2344900 - RNA, 14 nt, Human
cagucugcugcccu

SEQ ID NO: 2344901 - RNA, 12 nt, Human
cagucugacccu

SEQ ID NO: 2344902 - RNA, 13 nt, Human
cagucugcugccc

SEQ ID NO: 2344903 - RNA, 20 nt, Human
cagucugacuguuuccauca

SEQ ID NO: 2344904 - RNA, 22 nt, Human
cagucucuuuaaucuucaguuu

SEQ ID NO: 2344905 - RNA, 20 nt, Human
cagucucuuuaaucuucagu

SEQ ID NO: 2344906 - RNA, 19 nt, Human
cagucucuuuaaucuucag

SEQ ID NO: 2344907 - RNA, 15 nt, Human
cagucucuuuaaucu

SEQ ID NO: 2344908 - RNA, 15 nt, Human
cagucucugagggcu

SEQ ID NO: 2344909 - RNA, 16 nt, Human
cagucucugagggcuu

SEQ ID NO: 2344910 - RNA, 14 nt, Human
cagucucugagcag

SEQ ID NO: 2344911 - RNA, 12 nt, Human
cagucucugagc

SEQ ID NO: 2344912 - RNA, 20 nt, Human
cagucucugagggcuuccuu

SEQ ID NO: 2344913 - RNA, 15 nt, Human
cagugcaucucagcc

SEQ ID NO: 2344914 - RNA, 16 nt, Human
cagugcaucucagccc

SEQ ID NO: 2344915 - RNA, 17 nt, Human
cagugcaucucagccca

SEQ ID NO: 2344916 - RNA, 18 nt, Human
cagugcaucucagcccac

SEQ ID NO: 2344917 - RNA, 13 nt, Human
cagugcaugcugu

SEQ ID NO: 2344918 - RNA, 14 nt, Human
cagugcaugcuguc

SEQ ID NO: 2344919 - RNA, 22 nt, Human
cagucugcugcccuccaucccg

SEQ ID NO: 2344920 - RNA, 21 nt, Human
cagucugcugcccuccauccc

SEQ ID NO: 2344921 - RNA, 18 nt, Human
cagucugcugcccuccau

SEQ ID NO: 2344922 - RNA, 15 nt, Human
cagucuggaaugcag

SEQ ID NO: 2344923 - RNA, 17 nt, Human
cagucuggaaugcagug

SEQ ID NO: 2344924 - RNA, 12 nt, Human
cagugcaucuca

SEQ ID NO: 2344925 - RNA, 15 nt, Human
cagggagcugggaca

SEQ ID NO: 2344926 - RNA, 17 nt, Human
cagggaucuugcauucc

SEQ ID NO: 2344927 - RNA, 19 nt, Human
cagggaucuugcauuccca

SEQ ID NO: 2344928 - RNA, 12 nt, Human
cagggaugagca

SEQ ID NO: 2344929 - RNA, 23 nt, Human
cagggaugccaucugugggcacg

SEQ ID NO: 2344930 - RNA, 22 nt, Human
cagggaugagcauggagcuggc

SEQ ID NO: 2344931 - RNA, 23 nt, Human
cagggaugagcauggagcuggcc

SEQ ID NO: 2344932 - RNA, 16 nt, Human
cagggaugagcaugga

SEQ ID NO: 2344933 - RNA, 19 nt, Human
cagggaugagcauggagcu

SEQ ID NO: 2344934 - RNA, 20 nt, Human
cagggaugagcauggagcug

SEQ ID NO: 2344935 - RNA, 21 nt, Human
cagggaugagcauggagcugg

SEQ ID NO: 2344936 - RNA, 22 nt, Human
cagggagcggaaagcagcucaa

SEQ ID NO: 2344937 - RNA, 23 nt, Human
cagggagcggccggccagccccu

SEQ ID NO: 2344938 - RNA, 21 nt, Human
cagggagcggccggccagccc

SEQ ID NO: 2344939 - RNA, 19 nt, Human
cagggagcggaaagcagcu

SEQ ID NO: 2344940 - RNA, 18 nt, Human
cagggagcggaaagcagc

SEQ ID NO: 2344941 - RNA, 15 nt, Human
cagggagcggccggc

SEQ ID NO: 2344942 - RNA, 19 nt, Human
cagggagcggccggccagc

SEQ ID NO: 2344943 - RNA, 17 nt, Human
cagggagcggccggcca

SEQ ID NO: 2344944 - RNA, 20 nt, Human
cagggauggccguuggccac

SEQ ID NO: 2344945 - RNA, 16 nt, Human
cagggaugguguucaa

SEQ ID NO: 2344946 - RNA, 23 nt, Human
cagggaugcccuggagguggcug

SEQ ID NO: 2344947 - RNA, 19 nt, Human
cagggauggccguuggcca

SEQ ID NO: 2344948 - RNA, 22 nt, Human
cagggaugcccuggagguggcu

SEQ ID NO: 2344949 - RNA, 21 nt, Human
cagggaugcccuggagguggc

SEQ ID NO: 2344950 - RNA, 20 nt, Human
cagggaugcccuggaggugg

SEQ ID NO: 2344951 - RNA, 16 nt, Human
cagggaugcccuggag

SEQ ID NO: 2344952 - RNA, 14 nt, Human
cagggaugcccugg

SEQ ID NO: 2344953 - RNA, 13 nt, Human
cagggaugcccug

SEQ ID NO: 2344954 - RNA, 21 nt, Human
cagggcucagcggggacagcu

SEQ ID NO: 2344955 - RNA, 23 nt, Human
cagggcucagcggggacagcucc

SEQ ID NO: 2344956 - RNA, 19 nt, Human
caggggaaaaucagccugc

SEQ ID NO: 2344957 - RNA, 16 nt, Human
cagggcuggacugagg

SEQ ID NO: 2344958 - RNA, 17 nt, Human
cagggcuggacugaggc

SEQ ID NO: 2344959 - RNA, 20 nt, Human
caggggaaaaucagccugcu

SEQ ID NO: 2344960 - RNA, 18 nt, Human
cagggcuggacugaggcc

SEQ ID NO: 2344961 - RNA, 14 nt, Human
caggggaaaaugaa

SEQ ID NO: 2344962 - RNA, 23 nt, Human
caggggaaagaugagcuuuucua

SEQ ID NO: 2344963 - RNA, 16 nt, Human
caggggaaaaugaagg

SEQ ID NO: 2344964 - RNA, 18 nt, Human
caggggaaagaugagcuu

SEQ ID NO: 2344965 - RNA, 21 nt, Human
cagggcugacacguccacccc

SEQ ID NO: 2344966 - RNA, 18 nt, Human
cagggcugaggccucuca

SEQ ID NO: 2344967 - RNA, 14 nt, Human
cagggcuggacuga

SEQ ID NO: 2344968 - RNA, 15 nt, Human
cagggcuggacugag

SEQ ID NO: 2344969 - RNA, 14 nt, Human
cagggcugcuagac

SEQ ID NO: 2344970 - RNA, 18 nt, Human
cagggcugcuagacggag

SEQ ID NO: 2344971 - RNA, 16 nt, Human
cagggcugaggccucu

SEQ ID NO: 2344972 - RNA, 21 nt, Human
cagggcucugccccagaggcc

SEQ ID NO: 2344973 - RNA, 12 nt, Human
cagggcucagga

SEQ ID NO: 2344974 - RNA, 13 nt, Human
cagggcucaggau

SEQ ID NO: 2344975 - RNA, 20 nt, Human
cagggagcauuuuccuccau

SEQ ID NO: 2344976 - RNA, 12 nt, Human
cagggagccucc

SEQ ID NO: 2344977 - RNA, 13 nt, Human
cagggagccuccu

SEQ ID NO: 2344978 - RNA, 14 nt, Human
cagggagccuccug

SEQ ID NO: 2344979 - RNA, 17 nt, Human
cagggagcggaaagcag

SEQ ID NO: 2344980 - RNA, 16 nt, Human
cagggagcggaaagca

SEQ ID NO: 2344981 - RNA, 13 nt, Human
cagggagcggaaa

SEQ ID NO: 2344982 - RNA, 18 nt, Human
cagggagccuccugccca

SEQ ID NO: 2344983 - RNA, 22 nt, Human
cagggagccuuugguucuggcc

SEQ ID NO: 2344984 - RNA, 15 nt, Human
cagggagccuccugc

SEQ ID NO: 2344985 - RNA, 16 nt, Human
cagggagccuccugcc

SEQ ID NO: 2344986 - RNA, 21 nt, Human
caggcugggcuucaguggcag

SEQ ID NO: 2344987 - RNA, 22 nt, Human
caggcugggcuucaguggcagc

SEQ ID NO: 2344988 - RNA, 20 nt, Human
caggcugggcuucaguggca

SEQ ID NO: 2344989 - RNA, 15 nt, Human
caggcugggagagcc

SEQ ID NO: 2344990 - RNA, 12 nt, Human
caggcugggaga

SEQ ID NO: 2344991 - RNA, 14 nt, Human
caggcugggagagc

SEQ ID NO: 2344992 - RNA, 18 nt, Human
caggcuggcuccagaugc

SEQ ID NO: 2344993 - RNA, 17 nt, Human
caggcuggcuccagaug

SEQ ID NO: 2344994 - RNA, 20 nt, Human
caggcuggcuccagaugcag

SEQ ID NO: 2344995 - RNA, 16 nt, Human
caggcuggcuccagau

SEQ ID NO: 2344996 - RNA, 17 nt, Human
caggccacggcagccua

SEQ ID NO: 2344997 - RNA, 16 nt, Human
caggccagagggagug

SEQ ID NO: 2344998 - RNA, 20 nt, Human
caggccaggcccucugccca

SEQ ID NO: 2344999 - RNA, 19 nt, Human
caggccaggcccucugccc

SEQ ID NO: 2345000 - RNA, 17 nt, Human
caggccaggcccucugc

SEQ ID NO: 2345001 - RNA, 18 nt, Human
caggccaggcccucugcc

SEQ ID NO: 2345002 - RNA, 17 nt, Human
caggccagcugcuuggg

SEQ ID NO: 2345003 - RNA, 19 nt, Human
caggccagcugcuugggcu

SEQ ID NO: 2345004 - RNA, 21 nt, Human
caggccagcugcuugggcuuc

SEQ ID NO: 2345005 - RNA, 23 nt, Human
caggccagcugcuugggcuucau

SEQ ID NO: 2345006 - RNA, 15 nt, Human
caggccacuugauga

SEQ ID NO: 2345007 - RNA, 13 nt, Human
caggcagauccag

SEQ ID NO: 2345008 - RNA, 18 nt, Human
caggcagauacaggaaaa

SEQ ID NO: 2345009 - RNA, 13 nt, Human
caggccagaggga

SEQ ID NO: 2345010 - RNA, 15 nt, Human
caggccagagggagu

SEQ ID NO: 2345011 - RNA, 23 nt, Human
caggcagagaaucauacuuagca

SEQ ID NO: 2345012 - RNA, 15 nt, Human
caggcagagaaucau

SEQ ID NO: 2345013 - RNA, 14 nt, Human
caggcagagaauca

SEQ ID NO: 2345014 - RNA, 22 nt, Human
caggcagacacggaucugagaa

SEQ ID NO: 2345015 - RNA, 10 nt, Human
caggcagaca

SEQ ID NO: 2345016 - RNA, 11 nt, Human
caggcagacac

SEQ ID NO: 2345017 - RNA, 12 nt, Human
caggcagacacg

SEQ ID NO: 2345018 - RNA, 14 nt, Human
caggcagacacgga

SEQ ID NO: 2345019 - RNA, 16 nt, Human
caggcagacacggauc

SEQ ID NO: 2345020 - RNA, 19 nt, Human
caggcagacacggaucuga

SEQ ID NO: 2345021 - RNA, 14 nt, Human
caggcacaaaauga

SEQ ID NO: 2345022 - RNA, 14 nt, Human
caggcacacacugu

SEQ ID NO: 2345023 - RNA, 15 nt, Human
caggcacacacugug

SEQ ID NO: 2345024 - RNA, 23 nt, Human
caggcacacacugugcuuucuau

SEQ ID NO: 2345025 - RNA, 15 nt, Human
caggcacacuucuuc

SEQ ID NO: 2345026 - RNA, 19 nt, Human
caggcacacgccaccucgc

SEQ ID NO: 2345027 - RNA, 16 nt, Human
caggcacagcacaggg

SEQ ID NO: 2345028 - RNA, 14 nt, Human
caggcacagcacag

SEQ ID NO: 2345029 - RNA, 13 nt, Human
cagccagggcugc

SEQ ID NO: 2345030 - RNA, 12 nt, Human
cagccagggcug

SEQ ID NO: 2345031 - RNA, 23 nt, Human
cagccagggcugcuagacggagg

SEQ ID NO: 2345032 - RNA, 15 nt, Human
cagccagggcugcua

SEQ ID NO: 2345033 - RNA, 16 nt, Human
cagccagggcugcuag

SEQ ID NO: 2345034 - RNA, 13 nt, Human
cagccaggugccu

SEQ ID NO: 2345035 - RNA, 14 nt, Human
cagccaggugccuu

SEQ ID NO: 2345036 - RNA, 15 nt, Human
cagccagggccaggg

SEQ ID NO: 2345037 - RNA, 11 nt, Human
cagccagggcc

SEQ ID NO: 2345038 - RNA, 12 nt, Human
cagccagggcca

SEQ ID NO: 2345039 - RNA, 15 nt, Human
cagccaggugccuug

SEQ ID NO: 2345040 - RNA, 16 nt, Human
cagccaggugccuugg

SEQ ID NO: 2345041 - RNA, 20 nt, Human
cagcaucauggagguuugaa

SEQ ID NO: 2345042 - RNA, 13 nt, Human
cagcaucaggguu

SEQ ID NO: 2345043 - RNA, 23 nt, Human
cagcaucaggguuaagaagacuu

SEQ ID NO: 2345044 - RNA, 19 nt, Human
cagcaucauuuugcauuca

SEQ ID NO: 2345045 - RNA, 20 nt, Human
cagcaucauuuugcauucaa

SEQ ID NO: 2345046 - RNA, 19 nt, Human
cagcaucccuugaccaggc

SEQ ID NO: 2345047 - RNA, 22 nt, Human
cagcaucccuugaccaggccug

SEQ ID NO: 2345048 - RNA, 23 nt, Human
cagcaucccuugaccaggccugg

SEQ ID NO: 2345049 - RNA, 18 nt, Human
cagcaucccuugaccagg

SEQ ID NO: 2345050 - RNA, 22 nt, Human
cagcaucauuuugcauucaaau

SEQ ID NO: 2345051 - RNA, 23 nt, Human
cagcaucauuuugcauucaaauu

SEQ ID NO: 2345052 - RNA, 18 nt, Human
cagccagcucucagccaa

SEQ ID NO: 2345053 - RNA, 17 nt, Human
cagccagcucucagcca

SEQ ID NO: 2345054 - RNA, 21 nt, Human
cagccagcucucagccaacga

SEQ ID NO: 2345055 - RNA, 16 nt, Human
cagccagcucucagcc

SEQ ID NO: 2345056 - RNA, 15 nt, Human
cagccagcucucagc

SEQ ID NO: 2345057 - RNA, 12 nt, Human
cagccagcucuc

SEQ ID NO: 2345058 - RNA, 17 nt, Human
cagauugcaacaggcug

SEQ ID NO: 2345059 - RNA, 14 nt, Human
cagauugaaaagga

SEQ ID NO: 2345060 - RNA, 12 nt, Human
cagauugaaaag

SEQ ID NO: 2345061 - RNA, 22 nt, Human
cagauugaguuuucuucuguga

SEQ ID NO: 2345062 - RNA, 20 nt, Human
cagauucuuuccugaggcug

SEQ ID NO: 2345063 - RNA, 22 nt, Human
cagauucuuuccugaggcuggg

SEQ ID NO: 2345064 - RNA, 20 nt, Human
cagcacgauuucuguuuaga

SEQ ID NO: 2345065 - RNA, 19 nt, Human
cagcacgauuucuguuuag

SEQ ID NO: 2345066 - RNA, 18 nt, Human
cagcacgauuucuguuua

SEQ ID NO: 2345067 - RNA, 16 nt, Human
cagcacgauuucuguu

SEQ ID NO: 2345068 - RNA, 17 nt, Human
cagcauagaaguaacuu

SEQ ID NO: 2345069 - RNA, 22 nt, Human
cagcauaacaagguccaagaua

SEQ ID NO: 2345070 - RNA, 16 nt, Human
cagcauaccugcuggu

SEQ ID NO: 2345071 - RNA, 19 nt, Human
cagcauaccuuuauuguga

SEQ ID NO: 2345072 - RNA, 14 nt, Human
cagcauaaaggccu

SEQ ID NO: 2345073 - RNA, 15 nt, Human
cagcauaaaggccuu

SEQ ID NO: 2345074 - RNA, 18 nt, Human
cagcauaaaggccuuuuu

SEQ ID NO: 2345075 - RNA, 17 nt, Human
cagcaguuugggagguc

SEQ ID NO: 2345076 - RNA, 20 nt, Human
cagcaguuuucaagucaaau

SEQ ID NO: 2345077 - RNA, 13 nt, Human
cagcauaauacuu

SEQ ID NO: 2345078 - RNA, 21 nt, Human
cagcagugagucucuucagaa

SEQ ID NO: 2345079 - RNA, 19 nt, Human
cagcagugagucucuucag

SEQ ID NO: 2345080 - RNA, 17 nt, Human
cagcagugugaggccag

SEQ ID NO: 2345081 - RNA, 16 nt, Human
cagcagugcagccggg

SEQ ID NO: 2345082 - RNA, 16 nt, Human
cagcagugucaucaga

SEQ ID NO: 2345083 - RNA, 22 nt, Human
cagcagugugaggccagggcag

SEQ ID NO: 2345084 - RNA, 12 nt, Human
cagcaguguucc

SEQ ID NO: 2345085 - RNA, 13 nt, Human
cagcaguguuccc

SEQ ID NO: 2345086 - RNA, 20 nt, Human
cagcagugugaggccagggc

SEQ ID NO: 2345087 - RNA, 19 nt, Human
cagcagugugaggccaggg

SEQ ID NO: 2345088 - RNA, 23 nt, Human
cagcaguugaaugacaacagaag

SEQ ID NO: 2345089 - RNA, 22 nt, Human
cagcaguguuccccaucugggu

SEQ ID NO: 2345090 - RNA, 23 nt, Human
cagcaguguuccccaucuggguc

SEQ ID NO: 2345091 - RNA, 14 nt, Human
cagcaguguucccc

SEQ ID NO: 2345092 - RNA, 17 nt, Human
cagcaguguuccccauc

SEQ ID NO: 2345093 - RNA, 19 nt, Human
cagcaguguuccccaucug

SEQ ID NO: 2345094 - RNA, 21 nt, Human
cagcaguguuccccaucuggg

SEQ ID NO: 2345095 - RNA, 18 nt, Human
cagagguagggcugccac

SEQ ID NO: 2345096 - RNA, 20 nt, Human
cagagguaacagaacagcuu

SEQ ID NO: 2345097 - RNA, 22 nt, Human
cagagguaacagaacagcuuca

SEQ ID NO: 2345098 - RNA, 20 nt, Human
cagagguccacaacacacag

SEQ ID NO: 2345099 - RNA, 15 nt, Human
cagagguccacaaca

SEQ ID NO: 2345100 - RNA, 16 nt, Human
cagagguugcagugag

SEQ ID NO: 2345101 - RNA, 17 nt, Human
cagagguugcagugagc

SEQ ID NO: 2345102 - RNA, 17 nt, Human
cagagguugcagugugg

SEQ ID NO: 2345103 - RNA, 23 nt, Human
cagagguaacagaacagcuucag

SEQ ID NO: 2345104 - RNA, 20 nt, Human
cagauauuuuuucagaaaua

SEQ ID NO: 2345105 - RNA, 15 nt, Human
cagaucaagcuguga

SEQ ID NO: 2345106 - RNA, 21 nt, Human
cagaguaauccaagcaaaugu

SEQ ID NO: 2345107 - RNA, 13 nt, Human
cagaucacuacug

SEQ ID NO: 2345108 - RNA, 22 nt, Human
cagaucaccagcccggccugcu

SEQ ID NO: 2345109 - RNA, 23 nt, Human
cagaucaauggcgcagugccucu

SEQ ID NO: 2345110 - RNA, 21 nt, Human
cagaucaccagcccggccugc

SEQ ID NO: 2345111 - RNA, 16 nt, Human
cagaucacuacugcag

SEQ ID NO: 2345112 - RNA, 18 nt, Human
cagaucacagcuucagcc

SEQ ID NO: 2345113 - RNA, 22 nt, Human
cagaucacagcuucagccagga

SEQ ID NO: 2345114 - RNA, 18 nt, Human
cagaucaauggcgcagug

SEQ ID NO: 2345115 - RNA, 17 nt, Human
cagaucaagcugugaga

SEQ ID NO: 2345116 - RNA, 19 nt, Human
cagaucaagcugugagaca

SEQ ID NO: 2345117 - RNA, 23 nt, Human
cagagggguggguuccucuuccc

SEQ ID NO: 2345118 - RNA, 21 nt, Human
cagagggguaggcagagccuu

SEQ ID NO: 2345119 - RNA, 15 nt, Human
cagagggguaggcag

SEQ ID NO: 2345120 - RNA, 20 nt, Human
cagagggguaggcagagccu

SEQ ID NO: 2345121 - RNA, 16 nt, Human
cagaauccuggcccuc

SEQ ID NO: 2345122 - RNA, 21 nt, Human
cagaauccuggcccucugugu

SEQ ID NO: 2345123 - RNA, 21 nt, Human
cagaaucauaugauucugcuu

SEQ ID NO: 2345124 - RNA, 15 nt, Human
cagaauccuggcccu

SEQ ID NO: 2345125 - RNA, 18 nt, Human
cagagguaaaagugugag

SEQ ID NO: 2345126 - RNA, 20 nt, Human
cagagguaaaagugugagca

SEQ ID NO: 2345127 - RNA, 21 nt, Human
cagagguaaaagugugagcag

SEQ ID NO: 2345128 - RNA, 13 nt, Human
cagagguaacaga

SEQ ID NO: 2345129 - RNA, 14 nt, Human
cagagguaacagaa

SEQ ID NO: 2345130 - RNA, 15 nt, Human
cagagguaacagaac

SEQ ID NO: 2345131 - RNA, 16 nt, Human
cagagguaacagaaca

SEQ ID NO: 2345132 - RNA, 17 nt, Human
cagagguaacagaacag

SEQ ID NO: 2345133 - RNA, 18 nt, Human
cagagguaacagaacagc

SEQ ID NO: 2345134 - RNA, 19 nt, Human
cagagguaacagaacagcu

SEQ ID NO: 2345135 - RNA, 19 nt, Human
cagaauccaagugaacacu

SEQ ID NO: 2345136 - RNA, 23 nt, Human
cagaaucaaagcaaugcauuuug

SEQ ID NO: 2345137 - RNA, 16 nt, Human
cagaaucauaugauuc

SEQ ID NO: 2345138 - RNA, 19 nt, Human
cagaaucauaugauucugc

SEQ ID NO: 2345139 - RNA, 15 nt, Human
cagaauaucugggau

SEQ ID NO: 2345140 - RNA, 13 nt, Human
cagaaucaaagca

SEQ ID NO: 2345141 - RNA, 15 nt, Human
cagaaucaaagcaau

SEQ ID NO: 2345142 - RNA, 20 nt, Human
cagaaucaaagcaaugcauu

SEQ ID NO: 2345143 - RNA, 21 nt, Human
cagaaucaaagcaaugcauuu

SEQ ID NO: 2345144 - RNA, 22 nt, Human
cagaggggguggccucccaacu

SEQ ID NO: 2345145 - RNA, 23 nt, Human
cagaggggguggccucccaacuc

SEQ ID NO: 2345146 - RNA, 13 nt, Human
cagauccuggaaa

SEQ ID NO: 2345147 - RNA, 14 nt, Human
cagauccucuuggu

SEQ ID NO: 2345148 - RNA, 12 nt, Human
cagauccuggaa

SEQ ID NO: 2345149 - RNA, 15 nt, Human
cagaucauccagaag

SEQ ID NO: 2345150 - RNA, 16 nt, Human
cagaucaguguaccau

SEQ ID NO: 2345151 - RNA, 20 nt, Human
cagaucagcuccuaacccuu

SEQ ID NO: 2345152 - RNA, 16 nt, Human
cagauccucacaacca

SEQ ID NO: 2345153 - RNA, 13 nt, Human
cagauccucuugg

SEQ ID NO: 2345154 - RNA, 15 nt, Human
cagauccccaagccu

SEQ ID NO: 2345155 - RNA, 19 nt, Human
cagauccccaagccuggca

SEQ ID NO: 2345156 - RNA, 15 nt, Human
cagauucuuuccuga

SEQ ID NO: 2345157 - RNA, 17 nt, Human
cagauucuuuccugagg

SEQ ID NO: 2345158 - RNA, 18 nt, Human
cagauucuuuccugaggc

SEQ ID NO: 2345159 - RNA, 19 nt, Human
cagauucuuuccugaggcu

SEQ ID NO: 2345160 - RNA, 20 nt, Human
cagcugaggucucuugaggg

SEQ ID NO: 2345161 - RNA, 19 nt, Human
cagcugaggucucuugagg

SEQ ID NO: 2345162 - RNA, 22 nt, Human
cagcuccuccgugcuuccucag

SEQ ID NO: 2345163 - RNA, 22 nt, Human
cagcuccucccuuguucucuaa

SEQ ID NO: 2345164 - RNA, 19 nt, Human
cagcuccuccgugcuuccu

SEQ ID NO: 2345165 - RNA, 19 nt, Human
cagcugagggugagugggu

SEQ ID NO: 2345166 - RNA, 15 nt, Human
cagcugauacaaauu

SEQ ID NO: 2345167 - RNA, 23 nt, Human
cagcugauacaaauugcagacug

SEQ ID NO: 2345168 - RNA, 14 nt, Human
cagcugaugaguua

SEQ ID NO: 2345169 - RNA, 12 nt, Human
cagcugauuuua

SEQ ID NO: 2345170 - RNA, 20 nt, Human
cagcugauguuggaagagaa

SEQ ID NO: 2345171 - RNA, 20 nt, Human
cagcugaugaguuacagccu

SEQ ID NO: 2345172 - RNA, 18 nt, Human
cagcugauguuggaagag

SEQ ID NO: 2345173 - RNA, 17 nt, Human
cagcugauuuuaacaau

SEQ ID NO: 2345174 - RNA, 15 nt, Human
cagcugauuuuaaca

SEQ ID NO: 2345175 - RNA, 12 nt, Human
cagcugccugca

SEQ ID NO: 2345176 - RNA, 12 nt, Human
cagcugccuggg

SEQ ID NO: 2345177 - RNA, 13 nt, Human
cagcugccuggga

SEQ ID NO: 2345178 - RNA, 14 nt, Human
cagcugccugggau

SEQ ID NO: 2345179 - RNA, 21 nt, Human
cagcuguuuaugcauagauaa

SEQ ID NO: 2345180 - RNA, 20 nt, Human
cagcuguucugucccuugga

SEQ ID NO: 2345181 - RNA, 15 nt, Human
cagcuguuugucaua

SEQ ID NO: 2345182 - RNA, 20 nt, Human
cagcuguuuuaguuaaauuu

SEQ ID NO: 2345183 - RNA, 14 nt, Human
cagcuguuugucau

SEQ ID NO: 2345184 - RNA, 14 nt, Human
cagcuguuuaagau

SEQ ID NO: 2345185 - RNA, 21 nt, Human
cagcuguuuaaauguuuuucu

SEQ ID NO: 2345186 - RNA, 21 nt, Human
cagcuguuuuaguuaaauuuc

SEQ ID NO: 2345187 - RNA, 15 nt, Human
cagcuuaaaguaacc

SEQ ID NO: 2345188 - RNA, 18 nt, Human
cagcugauuuuaacaaua

SEQ ID NO: 2345189 - RNA, 19 nt, Human
cagcuguucagcugguuga

SEQ ID NO: 2345190 - RNA, 24 nt, Human
cagcugugcucuggacaggcaugu

SEQ ID NO: 2345191 - RNA, 19 nt, Human
cagcugugcucuggacagg

SEQ ID NO: 2345192 - RNA, 20 nt, Human
cagcugugcucuggacaggc

SEQ ID NO: 2345193 - RNA, 16 nt, Human
cagcucccucugccug

SEQ ID NO: 2345194 - RNA, 15 nt, Human
cagcucccucugccu

SEQ ID NO: 2345195 - RNA, 14 nt, Human
cagcucccucugcc

SEQ ID NO: 2345196 - RNA, 14 nt, Human
cagcucccuucucu

SEQ ID NO: 2345197 - RNA, 15 nt, Human
cagcucccuucucug

SEQ ID NO: 2345198 - RNA, 21 nt, Human
cagcuccggccuguccuccaa

SEQ ID NO: 2345199 - RNA, 16 nt, Human
cagcuccggccugucc

SEQ ID NO: 2345200 - RNA, 14 nt, Human
cagcuccucccaca

SEQ ID NO: 2345201 - RNA, 20 nt, Human
cagcuccucauccagggcuc

SEQ ID NO: 2345202 - RNA, 21 nt, Human
cagcuccucccuuguucucua

SEQ ID NO: 2345203 - RNA, 13 nt, Human
cagcuccuaaccc

SEQ ID NO: 2345204 - RNA, 19 nt, Human
cagcuccuaacccuuauca

SEQ ID NO: 2345205 - RNA, 15 nt, Human
cagcuccucauccag

SEQ ID NO: 2345206 - RNA, 19 nt, Human
cagcuccucauccagggcu

SEQ ID NO: 2345207 - RNA, 15 nt, Human
cagcucccuaggaga

SEQ ID NO: 2345208 - RNA, 18 nt, Human
cagcucccccuguccccu

SEQ ID NO: 2345209 - RNA, 19 nt, Human
cagcucccccuguccccuc

SEQ ID NO: 2345210 - RNA, 19 nt, Human
cagcucccuaggagaccaa

SEQ ID NO: 2345211 - RNA, 18 nt, Human
cagcucccuaggagacca

SEQ ID NO: 2345212 - RNA, 20 nt, Human
cagcucccuaggagaccaag

SEQ ID NO: 2345213 - RNA, 22 nt, Human
cagcuccccucggagaagagcu

SEQ ID NO: 2345214 - RNA, 21 nt, Human
cagcuccccucggagaagagc

SEQ ID NO: 2345215 - RNA, 23 nt, Human
cagcucccaccccacccccuuca

SEQ ID NO: 2345216 - RNA, 22 nt, Human
cagcucccaccccacccccuuc

SEQ ID NO: 2345217 - RNA, 23 nt, Human
cagcucccauaaccgcugauucu

SEQ ID NO: 2345218 - RNA, 14 nt, Human
cagcucccauuucu

SEQ ID NO: 2345219 - RNA, 17 nt, Human
cagcucccauuucuacu

SEQ ID NO: 2345220 - RNA, 19 nt, Human
cagcucccauuucuacucu

SEQ ID NO: 2345221 - RNA, 20 nt, Human
cagcucccauuucuacucuu

SEQ ID NO: 2345222 - RNA, 13 nt, Human
cagcuccccaaga

SEQ ID NO: 2345223 - RNA, 13 nt, Human
cagcuccccagag

SEQ ID NO: 2345224 - RNA, 15 nt, Human
cagcuccccagaguc

SEQ ID NO: 2345225 - RNA, 24 nt, Human
cagcuccccagaguccucuaugaa

SEQ ID NO: 2345226 - RNA, 22 nt, Human
cagcucccccgacggugggcau

SEQ ID NO: 2345227 - RNA, 12 nt, Human
cagcucccccgg

SEQ ID NO: 2345228 - RNA, 10 nt, Human
cagcuccccc

SEQ ID NO: 2345229 - RNA, 13 nt, Human
cagcucccccugu

SEQ ID NO: 2345230 - RNA, 14 nt, Human
cagcucccccuguc

SEQ ID NO: 2345231 - RNA, 15 nt, Human
cagcucccccugucc

SEQ ID NO: 2345232 - RNA, 16 nt, Human
cagcucccccuguccc

SEQ ID NO: 2345233 - RNA, 17 nt, Human
cagcucccccugucccc

SEQ ID NO: 2345234 - RNA, 20 nt, Human
cagcucccaccccacccccu

SEQ ID NO: 2345235 - RNA, 23 nt, Human
caggaaaacugacagaggagggc

SEQ ID NO: 2345236 - RNA, 17 nt, Human
caggaaaagccucugug

SEQ ID NO: 2345237 - RNA, 18 nt, Human
caggaaaagccucugugu

SEQ ID NO: 2345238 - RNA, 19 nt, Human
caggaaaagccucuguguc

SEQ ID NO: 2345239 - RNA, 18 nt, Human
caggaaaagcugcugaca

SEQ ID NO: 2345240 - RNA, 15 nt, Human
caggaaaagcugcug

SEQ ID NO: 2345241 - RNA, 16 nt, Human
caggaaaagcugcuga

SEQ ID NO: 2345242 - RNA, 20 nt, Human
cagcccuugagcuccccaaa

SEQ ID NO: 2345243 - RNA, 11 nt, Human
cagcccuugcu

SEQ ID NO: 2345244 - RNA, 12 nt, Human
cagcccuugcuu

SEQ ID NO: 2345245 - RNA, 13 nt, Human
cagcccuugcuug

SEQ ID NO: 2345246 - RNA, 14 nt, Human
cagcccuugcuugu

SEQ ID NO: 2345247 - RNA, 15 nt, Human
cagcccuugcuuguu

SEQ ID NO: 2345248 - RNA, 12 nt, Human
cagcccuuggcc

SEQ ID NO: 2345249 - RNA, 13 nt, Human
cagcccuuggcca

SEQ ID NO: 2345250 - RNA, 19 nt, Human
cagccgcuccugucugcca

SEQ ID NO: 2345251 - RNA, 18 nt, Human
cagccgcuccugucugcc

SEQ ID NO: 2345252 - RNA, 17 nt, Human
cagccgcuccugucugc

SEQ ID NO: 2345253 - RNA, 16 nt, Human
cagccgcuccugucug

SEQ ID NO: 2345254 - RNA, 14 nt, Human
cagccgcuccuguc

SEQ ID NO: 2345255 - RNA, 20 nt, Human
cagccgagauagccaaggcc

SEQ ID NO: 2345256 - RNA, 19 nt, Human
cagcccuuugggaggcuga

SEQ ID NO: 2345257 - RNA, 14 nt, Human
cagcccuuggccag

SEQ ID NO: 2345258 - RNA, 23 nt, Human
cagcccuuugggaggcugaggcg

SEQ ID NO: 2345259 - RNA, 20 nt, Human
cagcccuuugggaggcugag

SEQ ID NO: 2345260 - RNA, 19 nt, Human
cagccgagauagccaaggc

SEQ ID NO: 2345261 - RNA, 23 nt, Human
cagccgcuccugucugccagcca

SEQ ID NO: 2345262 - RNA, 22 nt, Human
cagccgcuccugucugccagcc

SEQ ID NO: 2345263 - RNA, 21 nt, Human
cagccgcuccugucugccagc

SEQ ID NO: 2345264 - RNA, 20 nt, Human
cagccgcuccugucugccag

SEQ ID NO: 2345265 - RNA, 19 nt, Human
cagccgcugagcgaggaga

SEQ ID NO: 2345266 - RNA, 23 nt, Human
cagccgcucggaggccccaaagg

SEQ ID NO: 2345267 - RNA, 19 nt, Human
cagccgcucggaggcccca

SEQ ID NO: 2345268 - RNA, 20 nt, Human
cagccgcucggaggccccaa

SEQ ID NO: 2345269 - RNA, 21 nt, Human
cagccgcucggaggccccaaa

SEQ ID NO: 2345270 - RNA, 13 nt, Human
cagccucugaccc

SEQ ID NO: 2345271 - RNA, 16 nt, Human
cagccgcugcccggcg

SEQ ID NO: 2345272 - RNA, 15 nt, Human
cagccgcugcccggc

SEQ ID NO: 2345273 - RNA, 20 nt, Human
cagccgcugagcgaggagau

SEQ ID NO: 2345274 - RNA, 12 nt, Human
cagccgcugccc

SEQ ID NO: 2345275 - RNA, 13 nt, Human
cagccgcugcccg

SEQ ID NO: 2345276 - RNA, 17 nt, Human
cagccucugaaaaccaa

SEQ ID NO: 2345277 - RNA, 18 nt, Human
cagccucugagccccugg

SEQ ID NO: 2345278 - RNA, 23 nt, Human
cagccucugacuuaagcugccuc

SEQ ID NO: 2345279 - RNA, 22 nt, Human
cagccucugaccccuccucacu

SEQ ID NO: 2345280 - RNA, 23 nt, Human
cagccucugaccccuccucacug

SEQ ID NO: 2345281 - RNA, 21 nt, Human
cagccucugagccccugggac

SEQ ID NO: 2345282 - RNA, 19 nt, Human
cagccucugagccccuggg

SEQ ID NO: 2345283 - RNA, 13 nt, Human
cagccucuggcau

SEQ ID NO: 2345284 - RNA, 14 nt, Human
cagccucugacccc

SEQ ID NO: 2345285 - RNA, 15 nt, Human
cagccucugaccccu

SEQ ID NO: 2345286 - RNA, 16 nt, Human
cagccucugaccccuc

SEQ ID NO: 2345287 - RNA, 17 nt, Human
cagccucugaccccucc

SEQ ID NO: 2345288 - RNA, 18 nt, Human
cagccucugaccccuccu

SEQ ID NO: 2345289 - RNA, 19 nt, Human
cagccucugaccccuccuc

SEQ ID NO: 2345290 - RNA, 20 nt, Human
cagccucugaccccuccuca

SEQ ID NO: 2345291 - RNA, 21 nt, Human
cagccucugaccccuccucac

SEQ ID NO: 2345292 - RNA, 19 nt, Human
cagccugcuaauuccccag

SEQ ID NO: 2345293 - RNA, 12 nt, Human
cagccugcucca

SEQ ID NO: 2345294 - RNA, 12 nt, Human
cagcgccaggcu

SEQ ID NO: 2345295 - RNA, 19 nt, Human
cagcgccaggcugaccaca

SEQ ID NO: 2345296 - RNA, 18 nt, Human
cagcgccaggcugaccac

SEQ ID NO: 2345297 - RNA, 22 nt, Human
cagcgccaggcugaccacagca

SEQ ID NO: 2345298 - RNA, 14 nt, Human
cagcgcccgcuggg

SEQ ID NO: 2345299 - RNA, 21 nt, Human
cagcgccaggcugaccacagc

SEQ ID NO: 2345300 - RNA, 20 nt, Human
cagcgccaggcugaccacag

SEQ ID NO: 2345301 - RNA, 23 nt, Human
cagcgccuaguggggucucccuc

SEQ ID NO: 2345302 - RNA, 22 nt, Human
cagcgccuaguggggucucccu

SEQ ID NO: 2345303 - RNA, 20 nt, Human
cagcgcccuuccucuccacc

SEQ ID NO: 2345304 - RNA, 16 nt, Human
cagcgcccuuccucuc

SEQ ID NO: 2345305 - RNA, 18 nt, Human
cagcgcccuuccucucca

SEQ ID NO: 2345306 - RNA, 16 nt, Human
cagcgcccgcugggcu

SEQ ID NO: 2345307 - RNA, 17 nt, Human
cagcgcccgcugggcug

SEQ ID NO: 2345308 - RNA, 19 nt, Human
cagcgcccgcugggcugag

SEQ ID NO: 2345309 - RNA, 12 nt, Human
cagcgcccuucc

SEQ ID NO: 2345310 - RNA, 13 nt, Human
cagcgcccuuccu

SEQ ID NO: 2345311 - RNA, 14 nt, Human
cagcgcccuuccuc

SEQ ID NO: 2345312 - RNA, 15 nt, Human
cagcgcccuuccucu

SEQ ID NO: 2345313 - RNA, 18 nt, Human
cagcggggacagcuccuu

SEQ ID NO: 2345314 - RNA, 19 nt, Human
cagcggggacagcuccuuc

SEQ ID NO: 2345315 - RNA, 18 nt, Human
cagcggggccccagggcu

SEQ ID NO: 2345316 - RNA, 13 nt, Human
cagcgccuuuccc

SEQ ID NO: 2345317 - RNA, 12 nt, Human
cagcgccuuucc

SEQ ID NO: 2345318 - RNA, 20 nt, Human
cagcggggccuggcgggaug

SEQ ID NO: 2345319 - RNA, 21 nt, Human
cagcggggacagcuccuucug

SEQ ID NO: 2345320 - RNA, 17 nt, Human
cacuuucagugaaagca

SEQ ID NO: 2345321 - RNA, 18 nt, Human
cacuuucagugaaagcau

SEQ ID NO: 2345322 - RNA, 19 nt, Human
cacuuucagugaaagcauc

SEQ ID NO: 2345323 - RNA, 15 nt, Human
cacuuuccuccuggc

SEQ ID NO: 2345324 - RNA, 17 nt, Human
cacuuucacauagaugu

SEQ ID NO: 2345325 - RNA, 22 nt, Human
cacuuuaugccggaugugcuuu

SEQ ID NO: 2345326 - RNA, 22 nt, Human
cacuugugccaacacucaagaa

SEQ ID NO: 2345327 - RNA, 21 nt, Human
cacuuuaugccggaugugcuu

SEQ ID NO: 2345328 - RNA, 21 nt, Human
cacuggggaaauaacagcugu

SEQ ID NO: 2345329 - RNA, 21 nt, Human
cacuggggagcccgucucagu

SEQ ID NO: 2345330 - RNA, 23 nt, Human
cacugggcuuggggaccagagcu

SEQ ID NO: 2345331 - RNA, 18 nt, Human
cacuggggauugggcccc

SEQ ID NO: 2345332 - RNA, 17 nt, Human
cacuggggauugggccc

SEQ ID NO: 2345333 - RNA, 16 nt, Human
cacuggggauugggcc

SEQ ID NO: 2345334 - RNA, 15 nt, Human
cacuggggauugggc

SEQ ID NO: 2345335 - RNA, 22 nt, Human
cacugggcuuggggaccagagc

SEQ ID NO: 2345336 - RNA, 20 nt, Human
cacugggcuuggggaccaga

SEQ ID NO: 2345337 - RNA, 14 nt, Human
cacuguugcccagg

SEQ ID NO: 2345338 - RNA, 22 nt, Human
cacugguggcccgacagccugg

SEQ ID NO: 2345339 - RNA, 13 nt, Human
cacugguggcccg

SEQ ID NO: 2345340 - RNA, 21 nt, Human
cacugguggcccgacagccug

SEQ ID NO: 2345341 - RNA, 15 nt, Human
cacuguugcccaggc

SEQ ID NO: 2345342 - RNA, 16 nt, Human
cacuguugcccaggcu

SEQ ID NO: 2345343 - RNA, 17 nt, Human
cacuggugacaugucuu

SEQ ID NO: 2345344 - RNA, 22 nt, Human
cacuggggagcccgucucagug

SEQ ID NO: 2345345 - RNA, 14 nt, Human
cacuggggcacuug

SEQ ID NO: 2345346 - RNA, 23 nt, Human
cacuggggauugggccccugcca

SEQ ID NO: 2345347 - RNA, 21 nt, Human
cacuugguuggguccucacau

SEQ ID NO: 2345348 - RNA, 20 nt, Human
cacuugguuggguccucaca

SEQ ID NO: 2345349 - RNA, 12 nt, Human
cacuuguacaaa

SEQ ID NO: 2345350 - RNA, 23 nt, Human
cacuuguccagcugagcgccagg

SEQ ID NO: 2345351 - RNA, 17 nt, Human
cacuuguacaaaauaaa

SEQ ID NO: 2345352 - RNA, 19 nt, Human
cacuugguuggguccucac

SEQ ID NO: 2345353 - RNA, 16 nt, Human
cacuugguuggguccu

SEQ ID NO: 2345354 - RNA, 20 nt, Human
cacuuggugauauguccuau

SEQ ID NO: 2345355 - RNA, 20 nt, Human
cacuuagaaauugcauuucc

SEQ ID NO: 2345356 - RNA, 20 nt, Human
cacuuggucugugagaugcu

SEQ ID NO: 2345357 - RNA, 17 nt, Human
cacuuggucugugagau

SEQ ID NO: 2345358 - RNA, 19 nt, Human
cacuugucccacuaucugg

SEQ ID NO: 2345359 - RNA, 20 nt, Human
cacuugucccacuaucuggg

SEQ ID NO: 2345360 - RNA, 22 nt, Human
cacuugucccacuaucugggug

SEQ ID NO: 2345361 - RNA, 20 nt, Human
cacuuguccccaaauccgaa

SEQ ID NO: 2345362 - RNA, 12 nt, Human
cacuugucccca

SEQ ID NO: 2345363 - RNA, 23 nt, Human
cacuuguccccaaauccgaaccu

SEQ ID NO: 2345364 - RNA, 17 nt, Human
cacuugugauuauuuau

SEQ ID NO: 2345365 - RNA, 22 nt, Human
cacuugugcacccucuauccca

SEQ ID NO: 2345366 - RNA, 18 nt, Human
cacuugugccaacacuca

SEQ ID NO: 2345367 - RNA, 24 nt, Human
cacuugugccaacacucaagaagc

SEQ ID NO: 2345368 - RNA, 17 nt, Human
cacuguugcccaggcug

SEQ ID NO: 2345369 - RNA, 18 nt, Human
cacuguuuacaagaaaaa

SEQ ID NO: 2345370 - RNA, 17 nt, Human
cacuguuuacaagaaaa

SEQ ID NO: 2345371 - RNA, 22 nt, Human
cacuggugacugcgaucuucag

SEQ ID NO: 2345372 - RNA, 11 nt, Human
cacuguuuaag

SEQ ID NO: 2345373 - RNA, 19 nt, Human
cacuguuucaaacuuuacu

SEQ ID NO: 2345374 - RNA, 18 nt, Human
cacuguuucucugcuguu

SEQ ID NO: 2345375 - RNA, 14 nt, Human
cacuguuucucugc

SEQ ID NO: 2345376 - RNA, 12 nt, Human
cacuguuucucu

SEQ ID NO: 2345377 - RNA, 22 nt, Human
cacuuaccuucaauaaaguauc

SEQ ID NO: 2345378 - RNA, 18 nt, Human
cacuuacuguuguccuau

SEQ ID NO: 2345379 - RNA, 21 nt, Human
cacuuacugguaggaccaagc

SEQ ID NO: 2345380 - RNA, 15 nt, Human
cacuuacugguagga

SEQ ID NO: 2345381 - RNA, 17 nt, Human
cacuuagaaauugcauu

SEQ ID NO: 2345382 - RNA, 19 nt, Human
cacuuagaaauugcauuuc

SEQ ID NO: 2345383 - RNA, 17 nt, Human
cacuuacuuacccucac

SEQ ID NO: 2345384 - RNA, 16 nt, Human
cacuuacuugcuuauu

SEQ ID NO: 2345385 - RNA, 15 nt, Human
cacuuacuguuucug

SEQ ID NO: 2345386 - RNA, 16 nt, Human
cacuuacuguuucugu

SEQ ID NO: 2345387 - RNA, 18 nt, Human
cacuuacuguuucuguca

SEQ ID NO: 2345388 - RNA, 20 nt, Human
cacuuacuguuucugucagg

SEQ ID NO: 2345389 - RNA, 23 nt, Human
cagaauacaguaagcugcucuau

SEQ ID NO: 2345390 - RNA, 23 nt, Human
cagaauaaugaauggacucaaac

SEQ ID NO: 2345391 - RNA, 14 nt, Human
cagaauaaugaaug

SEQ ID NO: 2345392 - RNA, 22 nt, Human
cagaauacuguuaaaggaaaaa

SEQ ID NO: 2345393 - RNA, 17 nt, Human
cagaauaaucuuugggu

SEQ ID NO: 2345394 - RNA, 21 nt, Human
cagaauaaguuauugcaguuu

SEQ ID NO: 2345395 - RNA, 23 nt, Human
cagaauaaguuauugcaguuuau

SEQ ID NO: 2345396 - RNA, 21 nt, Human
cagaauagcaaggugcucaca

SEQ ID NO: 2345397 - RNA, 15 nt, Human
cagaauagccacauu

SEQ ID NO: 2345398 - RNA, 22 nt, Human
cagaauagccacauuuggaaua

SEQ ID NO: 2345399 - RNA, 21 nt, Human
cagaauagccacauuuggaau

SEQ ID NO: 2345400 - RNA, 16 nt, Human
cagaauacuuuucucu

SEQ ID NO: 2345401 - RNA, 12 nt, Human
cagaauaucugg

SEQ ID NO: 2345402 - RNA, 22 nt, Human
cagaauauuagugaccucagcu

SEQ ID NO: 2345403 - RNA, 13 nt, Human
cagaauauugcuu

SEQ ID NO: 2345404 - RNA, 22 nt, Human
cagaauaaaguucugaguguuu

SEQ ID NO: 2345405 - RNA, 15 nt, Human
cagaauaaguuauug

SEQ ID NO: 2345406 - RNA, 20 nt, Human
cagaauaaagcaauuuuccu

SEQ ID NO: 2345407 - RNA, 21 nt, Human
cagaauaaagcaauuuuccuu

SEQ ID NO: 2345408 - RNA, 22 nt, Human
cagaauaaagcaauuuuccuug

SEQ ID NO: 2345409 - RNA, 23 nt, Human
cagaauaaagcaauuuuccuuga

SEQ ID NO: 2345410 - RNA, 17 nt, Human
cagaauaaguuauugca

SEQ ID NO: 2345411 - RNA, 18 nt, Human
cagaauaaguuauugcag

SEQ ID NO: 2345412 - RNA, 19 nt, Human
cagaauaaguuauugcagu

SEQ ID NO: 2345413 - RNA, 20 nt, Human
cagaauaaguuauugcaguu

SEQ ID NO: 2345414 - RNA, 19 nt, Human
cagaaguuugucaagucaa

SEQ ID NO: 2345415 - RNA, 11 nt, Human
cagaauaaagc

SEQ ID NO: 2345416 - RNA, 16 nt, Human
cagaaguuuggcaaua

SEQ ID NO: 2345417 - RNA, 21 nt, Human
cagaauaaacuggcagcucag

SEQ ID NO: 2345418 - RNA, 12 nt, Human
cagaauaaagca

SEQ ID NO: 2345419 - RNA, 13 nt, Human
cagaauaaagcaa

SEQ ID NO: 2345420 - RNA, 14 nt, Human
cagaauaaagcaau

SEQ ID NO: 2345421 - RNA, 15 nt, Human
cagaauaaagcaauu

SEQ ID NO: 2345422 - RNA, 16 nt, Human
cagaauaaagcaauuu

SEQ ID NO: 2345423 - RNA, 17 nt, Human
cagaauaaagcaauuuu

SEQ ID NO: 2345424 - RNA, 18 nt, Human
cagaauaaagcaauuuuc

SEQ ID NO: 2345425 - RNA, 19 nt, Human
cagaauaaagcaauuuucc

SEQ ID NO: 2345426 - RNA, 22 nt, Human
cagaaguuucugccgcagcccu

SEQ ID NO: 2345427 - RNA, 20 nt, Human
cagaaguuucugccgcagcc

SEQ ID NO: 2345428 - RNA, 21 nt, Human
cagaaguuucugccgcagccc

SEQ ID NO: 2345429 - RNA, 11 nt, Human
cagaacacugu

SEQ ID NO: 2345430 - RNA, 12 nt, Human
cagaacagcaga

SEQ ID NO: 2345431 - RNA, 21 nt, Human
cagaacacuaaccugaccgug

SEQ ID NO: 2345432 - RNA, 19 nt, Human
cagaagucaugaagcccaa

SEQ ID NO: 2345433 - RNA, 21 nt, Human
cagaacagcagagguucuuuu

SEQ ID NO: 2345434 - RNA, 13 nt, Human
cagaacacuaacc

SEQ ID NO: 2345435 - RNA, 15 nt, Human
cagaacacuaaccug

SEQ ID NO: 2345436 - RNA, 15 nt, Human
cagaacacauaauuc

SEQ ID NO: 2345437 - RNA, 23 nt, Human
cagaaauuuaauucauguuucuu

SEQ ID NO: 2345438 - RNA, 14 nt, Human
cagaaauuuuuauu

SEQ ID NO: 2345439 - RNA, 15 nt, Human
cagaaauuuuuauuu

SEQ ID NO: 2345440 - RNA, 22 nt, Human
cagaaauuuaauucauguuucu

SEQ ID NO: 2345441 - RNA, 18 nt, Human
cagaacacacuccaucag

SEQ ID NO: 2345442 - RNA, 21 nt, Human
cagaacaagguucccucugag

SEQ ID NO: 2345443 - RNA, 18 nt, Human
cagaaauuuuuauuuuuc

SEQ ID NO: 2345444 - RNA, 19 nt, Human
cagaaauuuuuauuuuucu

SEQ ID NO: 2345445 - RNA, 14 nt, Human
cagaacagcagagg

SEQ ID NO: 2345446 - RNA, 17 nt, Human
cagaagugagcuuugcu

SEQ ID NO: 2345447 - RNA, 18 nt, Human
cagaagugagcuuugcug

SEQ ID NO: 2345448 - RNA, 22 nt, Human
cagaagugagcuuugcugcuac

SEQ ID NO: 2345449 - RNA, 20 nt, Human
cagaagugagcuuugcugcu

SEQ ID NO: 2345450 - RNA, 21 nt, Human
cagaagugagcuuugcugcua

SEQ ID NO: 2345451 - RNA, 13 nt, Human
cagaaguggagcu

SEQ ID NO: 2345452 - RNA, 14 nt, Human
cagaaguggagcug

SEQ ID NO: 2345453 - RNA, 11 nt, Human
cagaaguguga

SEQ ID NO: 2345454 - RNA, 15 nt, Human
cagaaguggagcugg

SEQ ID NO: 2345455 - RNA, 16 nt, Human
cagaaguggagcuggg

SEQ ID NO: 2345456 - RNA, 13 nt, Human
cagaagugugauu

SEQ ID NO: 2345457 - RNA, 22 nt, Human
cagaagugugauugggaauaaa

SEQ ID NO: 2345458 - RNA, 16 nt, Human
cagaaauuagccgggc

SEQ ID NO: 2345459 - RNA, 23 nt, Human
cagaaauuagaaaccuuaauaug

SEQ ID NO: 2345460 - RNA, 11 nt, Human
cagaaauugga

SEQ ID NO: 2345461 - RNA, 20 nt, Human
cagaaauuggaacagaaugu

SEQ ID NO: 2345462 - RNA, 21 nt, Human
cagaaauuggaacagaauguu

SEQ ID NO: 2345463 - RNA, 17 nt, Human
cagaaauguguuaucac

SEQ ID NO: 2345464 - RNA, 15 nt, Human
cacuaauacaccagg

SEQ ID NO: 2345465 - RNA, 20 nt, Human
cacggcaggacaacgaggaa

SEQ ID NO: 2345466 - RNA, 22 nt, Human
cacuaaguuauaguauaucugg

SEQ ID NO: 2345467 - RNA, 17 nt, Human
cacuaauuugauguuua

SEQ ID NO: 2345468 - RNA, 23 nt, Human
cacuacggaauaguuggcuagga

SEQ ID NO: 2345469 - RNA, 17 nt, Human
cacuacucacagucucu

SEQ ID NO: 2345470 - RNA, 14 nt, Human
cacuacuccucugc

SEQ ID NO: 2345471 - RNA, 15 nt, Human
cacuacuccucugca

SEQ ID NO: 2345472 - RNA, 18 nt, Human
cacuacuccucugcagug

SEQ ID NO: 2345473 - RNA, 19 nt, Human
cacuacuccucugcagugc

SEQ ID NO: 2345474 - RNA, 18 nt, Human
cacuaccuccucagggau

SEQ ID NO: 2345475 - RNA, 20 nt, Human
cacuaccuccucagggaugg

SEQ ID NO: 2345476 - RNA, 16 nt, Human
cacuaccuccucaggg

SEQ ID NO: 2345477 - RNA, 17 nt, Human
cacuaccuccucaggga

SEQ ID NO: 2345478 - RNA, 14 nt, Human
cacggccaggccag

SEQ ID NO: 2345479 - RNA, 18 nt, Human
cacggaucugagaaucuu

SEQ ID NO: 2345480 - RNA, 15 nt, Human
cacggccaggccaga

SEQ ID NO: 2345481 - RNA, 16 nt, Human
cacggccaggccagag

SEQ ID NO: 2345482 - RNA, 23 nt, Human
cacggauccauguagcaggacug

SEQ ID NO: 2345483 - RNA, 20 nt, Human
cacggauccauguagcagga

SEQ ID NO: 2345484 - RNA, 13 nt, Human
cacggaucugaga

SEQ ID NO: 2345485 - RNA, 14 nt, Human
cacggaucugagaa

SEQ ID NO: 2345486 - RNA, 21 nt, Human
cacggaggcaucugcacccuc

SEQ ID NO: 2345487 - RNA, 23 nt, Human
cacggagucguggggugugcugg

SEQ ID NO: 2345488 - RNA, 20 nt, Human
cacggagggugacgggggug

SEQ ID NO: 2345489 - RNA, 19 nt, Human
cacggagcccagcccuccc

SEQ ID NO: 2345490 - RNA, 17 nt, Human
cacucuuccugcaagga

SEQ ID NO: 2345491 - RNA, 21 nt, Human
cacucuuccagaaucccaaga

SEQ ID NO: 2345492 - RNA, 14 nt, Human
cacucuuccugagu

SEQ ID NO: 2345493 - RNA, 14 nt, Human
cacucuuggagccu

SEQ ID NO: 2345494 - RNA, 16 nt, Human
cacucuuggagccugc

SEQ ID NO: 2345495 - RNA, 15 nt, Human
cacucuuggagccug

SEQ ID NO: 2345496 - RNA, 11 nt, Human
cacucuuccaa

SEQ ID NO: 2345497 - RNA, 11 nt, Human
cacucuuccag

SEQ ID NO: 2345498 - RNA, 17 nt, Human
cacucuugaaaaaugca

SEQ ID NO: 2345499 - RNA, 19 nt, Human
cacuccccgaagucuuuug

SEQ ID NO: 2345500 - RNA, 18 nt, Human
cacuccccgaagucuuuu

SEQ ID NO: 2345501 - RNA, 17 nt, Human
cacucuuauugcccacg

SEQ ID NO: 2345502 - RNA, 18 nt, Human
cacucuuauugcccacgc

SEQ ID NO: 2345503 - RNA, 19 nt, Human
cacucuuauugcccacgcu

SEQ ID NO: 2345504 - RNA, 18 nt, Human
cacuaggacucugaggcu

SEQ ID NO: 2345505 - RNA, 17 nt, Human
cacuaggacucugaggc

SEQ ID NO: 2345506 - RNA, 17 nt, Human
cacuaggcccccacuug

SEQ ID NO: 2345507 - RNA, 20 nt, Human
cacuaggcccccacuugccu

SEQ ID NO: 2345508 - RNA, 21 nt, Human
cacuagccucuccaggaaugc

SEQ ID NO: 2345509 - RNA, 17 nt, Human
cacuagccuuuggcucu

SEQ ID NO: 2345510 - RNA, 18 nt, Human
cacuagccuuuggcucug

SEQ ID NO: 2345511 - RNA, 20 nt, Human
cacuagccuuuggcucugga

SEQ ID NO: 2345512 - RNA, 16 nt, Human
cacuaggacucugagg

SEQ ID NO: 2345513 - RNA, 21 nt, Human
cacuagccuuuggcucuggag

SEQ ID NO: 2345514 - RNA, 22 nt, Human
cacuagccuuuggcucuggaga

SEQ ID NO: 2345515 - RNA, 17 nt, Human
cacuagccucuccagga

SEQ ID NO: 2345516 - RNA, 16 nt, Human
cacuagccucuccagg

SEQ ID NO: 2345517 - RNA, 14 nt, Human
cacuagccucucca

SEQ ID NO: 2345518 - RNA, 23 nt, Human
cacuagcccaaugaaaugaauua

SEQ ID NO: 2345519 - RNA, 12 nt, Human
cacuacugcagu

SEQ ID NO: 2345520 - RNA, 14 nt, Human
cacuacucugugcc

SEQ ID NO: 2345521 - RNA, 13 nt, Human
cacuacugacaug

SEQ ID NO: 2345522 - RNA, 20 nt, Human
cacuacuccucugcagugcc

SEQ ID NO: 2345523 - RNA, 13 nt, Human
cacuacucugugc

SEQ ID NO: 2345524 - RNA, 15 nt, Human
cacuacugacaugug

SEQ ID NO: 2345525 - RNA, 14 nt, Human
cacuccccaccuuc

SEQ ID NO: 2345526 - RNA, 13 nt, Human
cacucccaggcag

SEQ ID NO: 2345527 - RNA, 14 nt, Human
cacucccaggcagc

SEQ ID NO: 2345528 - RNA, 15 nt, Human
cacucccaggcagcc

SEQ ID NO: 2345529 - RNA, 13 nt, Human
cacucccagugcu

SEQ ID NO: 2345530 - RNA, 15 nt, Human
cacuccccaccuuca

SEQ ID NO: 2345531 - RNA, 15 nt, Human
cacucccacuucccu

SEQ ID NO: 2345532 - RNA, 14 nt, Human
cacucccacuuccc

SEQ ID NO: 2345533 - RNA, 13 nt, Human
cacucccacuucc

SEQ ID NO: 2345534 - RNA, 21 nt, Human
cacuaggcccccacuugccuc

SEQ ID NO: 2345535 - RNA, 22 nt, Human
cacuaggcccccacuugccucu

SEQ ID NO: 2345536 - RNA, 23 nt, Human
cacuaggcccccacuugccucuu

SEQ ID NO: 2345537 - RNA, 20 nt, Human
cacugaaaaaucuaagugau

SEQ ID NO: 2345538 - RNA, 23 nt, Human
cacugaaaaaucuaagugauaua

SEQ ID NO: 2345539 - RNA, 19 nt, Human
cacucuuggagccugcaga

SEQ ID NO: 2345540 - RNA, 17 nt, Human
cacucuuggagccugca

SEQ ID NO: 2345541 - RNA, 20 nt, Human
cacugaaauauacacacagc

SEQ ID NO: 2345542 - RNA, 16 nt, Human
cacugaaauauacaca

SEQ ID NO: 2345543 - RNA, 16 nt, Human
cacugaaaacaucugg

SEQ ID NO: 2345544 - RNA, 15 nt, Human
cacugaaaacaucug

SEQ ID NO: 2345545 - RNA, 18 nt, Human
cacugaaaacaucuggaa

SEQ ID NO: 2345546 - RNA, 20 nt, Human
cacugaacuuugcugagccu

SEQ ID NO: 2345547 - RNA, 11 nt, Human
cacugaagaag

SEQ ID NO: 2345548 - RNA, 19 nt, Human
cacugaagaaaccuucaga

SEQ ID NO: 2345549 - RNA, 21 nt, Human
caccucacagaaaugagauca

SEQ ID NO: 2345550 - RNA, 13 nt, Human
caccugccaggga

SEQ ID NO: 2345551 - RNA, 23 nt, Human
caccucaaaauaccaugccauuu

SEQ ID NO: 2345552 - RNA, 14 nt, Human
caccugccagggac

SEQ ID NO: 2345553 - RNA, 16 nt, Human
caccugccagggacag

SEQ ID NO: 2345554 - RNA, 13 nt, Human
caccuauuuccau

SEQ ID NO: 2345555 - RNA, 21 nt, Human
caccuaugugccaacuguugu

SEQ ID NO: 2345556 - RNA, 23 nt, Human
caccuaugucauuucauuuccua

SEQ ID NO: 2345557 - RNA, 20 nt, Human
caccuaugucauuucauuuc

SEQ ID NO: 2345558 - RNA, 12 nt, Human
caccuaugugcc

SEQ ID NO: 2345559 - RNA, 14 nt, Human
caccuaugugccaa

SEQ ID NO: 2345560 - RNA, 17 nt, Human
caccuaugugccaacug

SEQ ID NO: 2345561 - RNA, 20 nt, Human
caccuacuacaucgcccucc

SEQ ID NO: 2345562 - RNA, 21 nt, Human
caccuacuacaucgcccucca

SEQ ID NO: 2345563 - RNA, 19 nt, Human
caccuaugucauuucauuu

SEQ ID NO: 2345564 - RNA, 21 nt, Human
caccuaucucgugggagagcc

SEQ ID NO: 2345565 - RNA, 20 nt, Human
caccuaccaccacgcccggc

SEQ ID NO: 2345566 - RNA, 22 nt, Human
caccuaccaucagggacaggau

SEQ ID NO: 2345567 - RNA, 17 nt, Human
caccuaccaucagggac

SEQ ID NO: 2345568 - RNA, 18 nt, Human
caccuaccaucagggaca

SEQ ID NO: 2345569 - RNA, 19 nt, Human
caccuaagggacauguuuu

SEQ ID NO: 2345570 - RNA, 13 nt, Human
caccuaagggaca

SEQ ID NO: 2345571 - RNA, 18 nt, Human
caccuaagggacauguuu

SEQ ID NO: 2345572 - RNA, 23 nt, Human
caccuacaguguacagucuugua

SEQ ID NO: 2345573 - RNA, 19 nt, Human
caccuaaucaggcugaggu

SEQ ID NO: 2345574 - RNA, 21 nt, Human
caccuacaugagguacugaga

SEQ ID NO: 2345575 - RNA, 13 nt, Human
caccguucugugc

SEQ ID NO: 2345576 - RNA, 21 nt, Human
caccguuggggauuggggaag

SEQ ID NO: 2345577 - RNA, 18 nt, Human
caccguguaaaccaaagc

SEQ ID NO: 2345578 - RNA, 15 nt, Human
caccguucugugcac

SEQ ID NO: 2345579 - RNA, 14 nt, Human
caccguucugugca

SEQ ID NO: 2345580 - RNA, 17 nt, Human
caccuugcaacacacag

SEQ ID NO: 2345581 - RNA, 16 nt, Human
caccuugcaacacaca

SEQ ID NO: 2345582 - RNA, 17 nt, Human
caccugccauuugcacc

SEQ ID NO: 2345583 - RNA, 22 nt, Human
caccugccauuugcacccuccg

SEQ ID NO: 2345584 - RNA, 19 nt, Human
caccuugacagggcacacc

SEQ ID NO: 2345585 - RNA, 17 nt, Human
caccugccagggacaga

SEQ ID NO: 2345586 - RNA, 21 nt, Human
caccuugcaacacacagacac

SEQ ID NO: 2345587 - RNA, 18 nt, Human
caccuugcaacacacaga

SEQ ID NO: 2345588 - RNA, 11 nt, Human
caccucacccc

SEQ ID NO: 2345589 - RNA, 14 nt, Human
caccuugcggggau

SEQ ID NO: 2345590 - RNA, 16 nt, Human
caccuuggacauccuc

SEQ ID NO: 2345591 - RNA, 17 nt, Human
caccuuggacauccucc

SEQ ID NO: 2345592 - RNA, 18 nt, Human
caccuuggacauccuccu

SEQ ID NO: 2345593 - RNA, 21 nt, Human
caccuuggacauccuccuccc

SEQ ID NO: 2345594 - RNA, 13 nt, Human
caccuuggcucaa

SEQ ID NO: 2345595 - RNA, 17 nt, Human
caccuuggcaccagaca

SEQ ID NO: 2345596 - RNA, 22 nt, Human
caccuuggacauccuccuccca

SEQ ID NO: 2345597 - RNA, 18 nt, Human
caccuuggggcuugacuu

SEQ ID NO: 2345598 - RNA, 18 nt, Human
caccuuuauuaaaaucuu

SEQ ID NO: 2345599 - RNA, 17 nt, Human
caccuuuauuaaaaucu

SEQ ID NO: 2345600 - RNA, 15 nt, Human
caccuuugcaggcau

SEQ ID NO: 2345601 - RNA, 17 nt, Human
caccuuuguccccaccg

SEQ ID NO: 2345602 - RNA, 14 nt, Human
caccuuugucccca

SEQ ID NO: 2345603 - RNA, 15 nt, Human
caccuuuguccccac

SEQ ID NO: 2345604 - RNA, 15 nt, Human
caccuuuauuaaaau

SEQ ID NO: 2345605 - RNA, 14 nt, Human
caccuuuauuaaaa

SEQ ID NO: 2345606 - RNA, 12 nt, Human
caccuuuauuaa

SEQ ID NO: 2345607 - RNA, 14 nt, Human
caccuuuaaagugu

SEQ ID NO: 2345608 - RNA, 21 nt, Human
caccuuguuggagccugcagg

SEQ ID NO: 2345609 - RNA, 14 nt, Human
caccuuuauucugg

SEQ ID NO: 2345610 - RNA, 14 nt, Human
caccuuugaagaag

SEQ ID NO: 2345611 - RNA, 20 nt, Human
caccuuggggcuugacuuuu

SEQ ID NO: 2345612 - RNA, 14 nt, Human
caccuuguggcaag

SEQ ID NO: 2345613 - RNA, 15 nt, Human
caccuugugucugua

SEQ ID NO: 2345614 - RNA, 17 nt, Human
caccuugugucuguaca

SEQ ID NO: 2345615 - RNA, 21 nt, Human
caccuugugucuguacacgug

SEQ ID NO: 2345616 - RNA, 14 nt, Human
caccuuguuggagc

SEQ ID NO: 2345617 - RNA, 19 nt, Human
caccuuguuggagccugca

SEQ ID NO: 2345618 - RNA, 23 nt, Human
cacagguaugaccuucuaggaag

SEQ ID NO: 2345619 - RNA, 23 nt, Human
cacaggguugggcccagaucugg

SEQ ID NO: 2345620 - RNA, 22 nt, Human
cacaggguugggcccagaucug

SEQ ID NO: 2345621 - RNA, 18 nt, Human
cacaggguugggcccaga

SEQ ID NO: 2345622 - RNA, 16 nt, Human
cacaggguugggccca

SEQ ID NO: 2345623 - RNA, 14 nt, Human
cacaggguugggcc

SEQ ID NO: 2345624 - RNA, 21 nt, Human
cacaggguucaaaaugucugu

SEQ ID NO: 2345625 - RNA, 23 nt, Human
cacagggucugcucuuucucugc

SEQ ID NO: 2345626 - RNA, 13 nt, Human
cacagggcgagac

SEQ ID NO: 2345627 - RNA, 16 nt, Human
cacagggucugcucuu

SEQ ID NO: 2345628 - RNA, 17 nt, Human
cacagggucugcucuuu

SEQ ID NO: 2345629 - RNA, 19 nt, Human
cacagggucugcucuuucu

SEQ ID NO: 2345630 - RNA, 17 nt, Human
cacagggcagagccggg

SEQ ID NO: 2345631 - RNA, 14 nt, Human
cacagggcagagcc

SEQ ID NO: 2345632 - RNA, 13 nt, Human
cacagggcagagc

SEQ ID NO: 2345633 - RNA, 15 nt, Human
cacagggauccgacu

SEQ ID NO: 2345634 - RNA, 21 nt, Human
cacagggcagcugggcccaac

SEQ ID NO: 2345635 - RNA, 22 nt, Human
cacagggcagcugggcccaacc

SEQ ID NO: 2345636 - RNA, 16 nt, Human
cacagggcagcugggc

SEQ ID NO: 2345637 - RNA, 17 nt, Human
cacagggcagcugggcc

SEQ ID NO: 2345638 - RNA, 18 nt, Human
cacagggcagcugggccc

SEQ ID NO: 2345639 - RNA, 19 nt, Human
cacagggcagcugggccca

SEQ ID NO: 2345640 - RNA, 22 nt, Human
cacagggccccagaaggcaggg

SEQ ID NO: 2345641 - RNA, 19 nt, Human
cacagggccccagaaggca

SEQ ID NO: 2345642 - RNA, 14 nt, Human
cacagggccccaga

SEQ ID NO: 2345643 - RNA, 23 nt, Human
cacagggcaugccccggccaccu

SEQ ID NO: 2345644 - RNA, 20 nt, Human
cacagggcaugccccggcca

SEQ ID NO: 2345645 - RNA, 21 nt, Human
cacagggccuuuggcaggugc

SEQ ID NO: 2345646 - RNA, 15 nt, Human
cacagcuaccucuuc

SEQ ID NO: 2345647 - RNA, 20 nt, Human
cacagcuaacacacagcucc

SEQ ID NO: 2345648 - RNA, 21 nt, Human
cacagcuaacacacagcuccc

SEQ ID NO: 2345649 - RNA, 19 nt, Human
cacagcguccuguccacac

SEQ ID NO: 2345650 - RNA, 20 nt, Human
cacagcuaacaauugugaag

SEQ ID NO: 2345651 - RNA, 21 nt, Human
cacagcuaacaauugugaagu

SEQ ID NO: 2345652 - RNA, 22 nt, Human
cacagcuaacauggaaguacua

SEQ ID NO: 2345653 - RNA, 22 nt, Human
cacagcuaugaaggcuguacac

SEQ ID NO: 2345654 - RNA, 12 nt, Human
cacagcuaugaa

SEQ ID NO: 2345655 - RNA, 17 nt, Human
cacagcucccaccccac

SEQ ID NO: 2345656 - RNA, 16 nt, Human
cacagcucccacccca

SEQ ID NO: 2345657 - RNA, 15 nt, Human
cacagcucccacccc

SEQ ID NO: 2345658 - RNA, 14 nt, Human
cacagcucccaccc

SEQ ID NO: 2345659 - RNA, 22 nt, Human
cacagcucccaccccacccccu

SEQ ID NO: 2345660 - RNA, 19 nt, Human
cacagcucccaccccaccc

SEQ ID NO: 2345661 - RNA, 20 nt, Human
cacagcucuguccugggagu

SEQ ID NO: 2345662 - RNA, 23 nt, Human
cacagcucuguccugggagugag

SEQ ID NO: 2345663 - RNA, 10 nt, Human
cacagcucuu

SEQ ID NO: 2345664 - RNA, 14 nt, Human
cacagcucuguguu

SEQ ID NO: 2345665 - RNA, 20 nt, Human
cacagcggggccccagggcu

SEQ ID NO: 2345666 - RNA, 21 nt, Human
cacagcggagguguggagccg

SEQ ID NO: 2345667 - RNA, 14 nt, Human
cacagcggccccug

SEQ ID NO: 2345668 - RNA, 16 nt, Human
cacagcggccccugca

SEQ ID NO: 2345669 - RNA, 15 nt, Human
cacagcuaacaugga

SEQ ID NO: 2345670 - RNA, 16 nt, Human
cacagcuaacauggaa

SEQ ID NO: 2345671 - RNA, 19 nt, Human
cacagacccugcccugugg

SEQ ID NO: 2345672 - RNA, 20 nt, Human
cacagacccugcccuguggg

SEQ ID NO: 2345673 - RNA, 21 nt, Human
cacagacccugcccugugggc

SEQ ID NO: 2345674 - RNA, 19 nt, Human
cacagaaucauaugauucu

SEQ ID NO: 2345675 - RNA, 12 nt, Human
cacagacacaca

SEQ ID NO: 2345676 - RNA, 13 nt, Human
cacagacacacac

SEQ ID NO: 2345677 - RNA, 14 nt, Human
cacagacacacaca

SEQ ID NO: 2345678 - RNA, 17 nt, Human
cacagacacacacacgc

SEQ ID NO: 2345679 - RNA, 18 nt, Human
cacagacacacacacgca

SEQ ID NO: 2345680 - RNA, 20 nt, Human
cacagacacacacacgcacg

SEQ ID NO: 2345681 - RNA, 22 nt, Human
cacagacacacacacgcacgca

SEQ ID NO: 2345682 - RNA, 23 nt, Human
cacagaagccaggagcaaauguu

SEQ ID NO: 2345683 - RNA, 16 nt, Human
cacagaagccaggagc

SEQ ID NO: 2345684 - RNA, 18 nt, Human
cacagaagccaggagcaa

SEQ ID NO: 2345685 - RNA, 14 nt, Human
cacagaagccagga

SEQ ID NO: 2345686 - RNA, 16 nt, Human
cacaguauuacuucug

SEQ ID NO: 2345687 - RNA, 16 nt, Human
cacaguagucuugaug

SEQ ID NO: 2345688 - RNA, 14 nt, Human
cacaggucuuuccu

SEQ ID NO: 2345689 - RNA, 18 nt, Human
cacaguauuacuucugcu

SEQ ID NO: 2345690 - RNA, 19 nt, Human
cacaguauuacuucugcua

SEQ ID NO: 2345691 - RNA, 15 nt, Human
cacaggucuuuccua

SEQ ID NO: 2345692 - RNA, 13 nt, Human
cacaguagucuug

SEQ ID NO: 2345693 - RNA, 24 nt, Human
cacaucagcuccacuuucagugaa

SEQ ID NO: 2345694 - RNA, 12 nt, Human
cacaucccaggc

SEQ ID NO: 2345695 - RNA, 22 nt, Human
cacaucccaggcuucacccuga

SEQ ID NO: 2345696 - RNA, 22 nt, Human
cacaucagcacgauuucuguuu

SEQ ID NO: 2345697 - RNA, 19 nt, Human
cacauccuaugcaauauau

SEQ ID NO: 2345698 - RNA, 17 nt, Human
cacauccuguguuucua

SEQ ID NO: 2345699 - RNA, 18 nt, Human
cacauccuccguccagcc

SEQ ID NO: 2345700 - RNA, 14 nt, Human
cacauccuccgucc

SEQ ID NO: 2345701 - RNA, 22 nt, Human
cacauccuccacguucugcuca

SEQ ID NO: 2345702 - RNA, 15 nt, Human
cacauccuuucuaaa

SEQ ID NO: 2345703 - RNA, 14 nt, Human
cacaucuaagccug

SEQ ID NO: 2345704 - RNA, 13 nt, Human
cacaucuaagccu

SEQ ID NO: 2345705 - RNA, 17 nt, Human
cacaucuaaccucaucu

SEQ ID NO: 2345706 - RNA, 16 nt, Human
cacaucuugcucugcu

SEQ ID NO: 2345707 - RNA, 17 nt, Human
cacaucuugcucugcug

SEQ ID NO: 2345708 - RNA, 21 nt, Human
cacaucagcacgauuucuguu

SEQ ID NO: 2345709 - RNA, 20 nt, Human
cacaucagcacgauuucugu

SEQ ID NO: 2345710 - RNA, 14 nt, Human
cacauuuuucagau

SEQ ID NO: 2345711 - RNA, 22 nt, Human
cacauuuuguauaauuguaucg

SEQ ID NO: 2345712 - RNA, 12 nt, Human
cacauuuuguau

SEQ ID NO: 2345713 - RNA, 13 nt, Human
cacauuuuguaua

SEQ ID NO: 2345714 - RNA, 15 nt, Human
cacauuuuguauaau

SEQ ID NO: 2345715 - RNA, 16 nt, Human
cacauuuuguauaauu

SEQ ID NO: 2345716 - RNA, 21 nt, Human
cacauuuuguauaauuguauc

SEQ ID NO: 2345717 - RNA, 18 nt, Human
cacauuuuccuuuucaaa

SEQ ID NO: 2345718 - RNA, 15 nt, Human
cacauuuuauuuuau

SEQ ID NO: 2345719 - RNA, 17 nt, Human
cacauuugauucugugu

SEQ ID NO: 2345720 - RNA, 16 nt, Human
cacauuuggaauacuu

SEQ ID NO: 2345721 - RNA, 19 nt, Human
cacauuuggaauacuuuuu

SEQ ID NO: 2345722 - RNA, 17 nt, Human
cacauuuggaauacuuu

SEQ ID NO: 2345723 - RNA, 18 nt, Human
cacauuuccccagaccug

SEQ ID NO: 2345724 - RNA, 17 nt, Human
cacaucuaagccugaag

SEQ ID NO: 2345725 - RNA, 19 nt, Human
cacaucuugcucugcugac

SEQ ID NO: 2345726 - RNA, 18 nt, Human
cacaucuugcucugcuga

SEQ ID NO: 2345727 - RNA, 18 nt, Human
cacauuuuucagauauaa

SEQ ID NO: 2345728 - RNA, 17 nt, Human
caccaacauacucccau

SEQ ID NO: 2345729 - RNA, 20 nt, Human
caccaacauacucccaucug

SEQ ID NO: 2345730 - RNA, 21 nt, Human
caccaacauacucccaucugu

SEQ ID NO: 2345731 - RNA, 21 nt, Human
cacauuuuuuaaaugcaccug

SEQ ID NO: 2345732 - RNA, 17 nt, Human
cacauuuuuuaaaugca

SEQ ID NO: 2345733 - RNA, 14 nt, Human
cacauuuuucuuag

SEQ ID NO: 2345734 - RNA, 13 nt, Human
cacauuuuucuua

SEQ ID NO: 2345735 - RNA, 16 nt, Human
cacccagcccacuucu

SEQ ID NO: 2345736 - RNA, 17 nt, Human
cacccagcccacuucug

SEQ ID NO: 2345737 - RNA, 14 nt, Human
caccaggcugcuca

SEQ ID NO: 2345738 - RNA, 21 nt, Human
caccaggcugcucagggcugg

SEQ ID NO: 2345739 - RNA, 13 nt, Human
caccaggcuggcg

SEQ ID NO: 2345740 - RNA, 15 nt, Human
caccaggcuggcgca

SEQ ID NO: 2345741 - RNA, 16 nt, Human
caccaggcuggcgcag

SEQ ID NO: 2345742 - RNA, 17 nt, Human
caccaggcuggcgcagc

SEQ ID NO: 2345743 - RNA, 16 nt, Human
caccaggccguccucc

SEQ ID NO: 2345744 - RNA, 21 nt, Human
caccaggccguccucccgggc

SEQ ID NO: 2345745 - RNA, 13 nt, Human
caccagccaggcu

SEQ ID NO: 2345746 - RNA, 16 nt, Human
caccagcugccucuuc

SEQ ID NO: 2345747 - RNA, 17 nt, Human
caccagcugccucuucu

SEQ ID NO: 2345748 - RNA, 22 nt, Human
caccagcuguucugucccuugg

SEQ ID NO: 2345749 - RNA, 16 nt, Human
caccagcuucuccagg

SEQ ID NO: 2345750 - RNA, 17 nt, Human
caccagcuucuccaggc

SEQ ID NO: 2345751 - RNA, 12 nt, Human
caccagcugccu

SEQ ID NO: 2345752 - RNA, 17 nt, Human
caccagcuccucccuug

SEQ ID NO: 2345753 - RNA, 14 nt, Human
caccagcugccucu

SEQ ID NO: 2345754 - RNA, 15 nt, Human
caccagcugccucuu

SEQ ID NO: 2345755 - RNA, 22 nt, Human
caccaggccaccuccccagcau

SEQ ID NO: 2345756 - RNA, 15 nt, Human
caccaggccaccucc

SEQ ID NO: 2345757 - RNA, 19 nt, Human
caccaggccaccuccccag

SEQ ID NO: 2345758 - RNA, 17 nt, Human
caccaggaaccucuuca

SEQ ID NO: 2345759 - RNA, 19 nt, Human
caccagcuucuccaggcuc

SEQ ID NO: 2345760 - RNA, 13 nt, Human
caccaggccaccu

SEQ ID NO: 2345761 - RNA, 14 nt, Human
caccaggccaccuc

SEQ ID NO: 2345762 - RNA, 12 nt, Human
caccagcagccu

SEQ ID NO: 2345763 - RNA, 14 nt, Human
caccagcagccugg

SEQ ID NO: 2345764 - RNA, 14 nt, Human
caccaacaucccau

SEQ ID NO: 2345765 - RNA, 23 nt, Human
caccaacauacucccaucuguga

SEQ ID NO: 2345766 - RNA, 13 nt, Human
caccagccugcac

SEQ ID NO: 2345767 - RNA, 15 nt, Human
caccagcauuccuuu

SEQ ID NO: 2345768 - RNA, 22 nt, Human
caccagccuuucucccaggcca

SEQ ID NO: 2345769 - RNA, 20 nt, Human
caccagccuuucucccaggc

SEQ ID NO: 2345770 - RNA, 14 nt, Human
caccagccugcacu

SEQ ID NO: 2345771 - RNA, 14 nt, Human
caccagcauuccuu

SEQ ID NO: 2345772 - RNA, 19 nt, Human
caccagcguuugaggggcu

SEQ ID NO: 2345773 - RNA, 21 nt, Human
caccagcguuugaggggcugg

SEQ ID NO: 2345774 - RNA, 12 nt, Human
caccagcuccuc

SEQ ID NO: 2345775 - RNA, 15 nt, Human
caccagcuccucccu

SEQ ID NO: 2345776 - RNA, 15 nt, Human
caccagcagccugga

SEQ ID NO: 2345777 - RNA, 21 nt, Human
caccagcccuuagcagggaaa

SEQ ID NO: 2345778 - RNA, 11 nt, Human
cacccaggagg

SEQ ID NO: 2345779 - RNA, 15 nt, Human
cacccagcccauucu

SEQ ID NO: 2345780 - RNA, 24 nt, Human
cacccaggagccccgaggccuucu

SEQ ID NO: 2345781 - RNA, 13 nt, Human
cacccagcccauu

SEQ ID NO: 2345782 - RNA, 12 nt, Human
cacccagcccau

SEQ ID NO: 2345783 - RNA, 23 nt, Human
caccaggcuggcgcagccaaggc

SEQ ID NO: 2345784 - RNA, 18 nt, Human
caccaggcuggcgcagcc

SEQ ID NO: 2345785 - RNA, 19 nt, Human
caccaggcuggcgcagcca

SEQ ID NO: 2345786 - RNA, 20 nt, Human
caccaggcuggcgcagccaa

SEQ ID NO: 2345787 - RNA, 22 nt, Human
caccaggcuggcgcagccaagg

SEQ ID NO: 2345788 - RNA, 19 nt, Human
cacccagcccacuucugcc

SEQ ID NO: 2345789 - RNA, 20 nt, Human
cacccaggagccccgaggcc

SEQ ID NO: 2345790 - RNA, 23 nt, Human
cacccaggagccccgaggccuuc

SEQ ID NO: 2345791 - RNA, 12 nt, Human
caauuuaaagca

SEQ ID NO: 2345792 - RNA, 20 nt, Human
caauuuaaacccauuuuagu

SEQ ID NO: 2345793 - RNA, 22 nt, Human
caauuuaaacccauuuuaguca

SEQ ID NO: 2345794 - RNA, 16 nt, Human
cacaagacugcacauc

SEQ ID NO: 2345795 - RNA, 22 nt, Human
cacaagauucccagagacagga

SEQ ID NO: 2345796 - RNA, 22 nt, Human
cacaagcaaaaaaaaaaaaaag

SEQ ID NO: 2345797 - RNA, 19 nt, Human
cacaagauucccagagaca

SEQ ID NO: 2345798 - RNA, 18 nt, Human
cacaagauucccagagac

SEQ ID NO: 2345799 - RNA, 17 nt, Human
cacaagauucccagaga

SEQ ID NO: 2345800 - RNA, 16 nt, Human
cacaagauucccagag

SEQ ID NO: 2345801 - RNA, 15 nt, Human
cacaagauucccaga

SEQ ID NO: 2345802 - RNA, 22 nt, Human
caauuguuugggguugaaaauu

SEQ ID NO: 2345803 - RNA, 15 nt, Human
caauuuaaacccauu

SEQ ID NO: 2345804 - RNA, 16 nt, Human
caauuuaaacccauuu

SEQ ID NO: 2345805 - RNA, 18 nt, Human
caauuuaaacccauuuua

SEQ ID NO: 2345806 - RNA, 12 nt, Human
caauuuaaaaaa

SEQ ID NO: 2345807 - RNA, 14 nt, Human
cacaagacccuugu

SEQ ID NO: 2345808 - RNA, 16 nt, Human
cacaagacccuugugg

SEQ ID NO: 2345809 - RNA, 14 nt, Human
cacaagccuucggc

SEQ ID NO: 2345810 - RNA, 17 nt, Human
cacaagccacagaagcc

SEQ ID NO: 2345811 - RNA, 12 nt, Human
cacaagccacag

SEQ ID NO: 2345812 - RNA, 15 nt, Human
cacaagccacagaag

SEQ ID NO: 2345813 - RNA, 17 nt, Human
caauucuuacaaacaug

SEQ ID NO: 2345814 - RNA, 14 nt, Human
caauucuguuuuag

SEQ ID NO: 2345815 - RNA, 22 nt, Human
caauucuguuuuagguuaaaaa

SEQ ID NO: 2345816 - RNA, 18 nt, Human
caauucuuacaaacaugu

SEQ ID NO: 2345817 - RNA, 19 nt, Human
caauucuuacaaacaugug

SEQ ID NO: 2345818 - RNA, 17 nt, Human
caauucucuuuaguucu

SEQ ID NO: 2345819 - RNA, 19 nt, Human
caauucuccugccucagcc

SEQ ID NO: 2345820 - RNA, 14 nt, Human
caauuguugacagu

SEQ ID NO: 2345821 - RNA, 21 nt, Human
caauuguugacaguucugaag

SEQ ID NO: 2345822 - RNA, 23 nt, Human
caauuguugacaguucugaagaa

SEQ ID NO: 2345823 - RNA, 24 nt, Human
caauuguugacaguucugaagaau

SEQ ID NO: 2345824 - RNA, 17 nt, Human
caauucuucccuaucuu

SEQ ID NO: 2345825 - RNA, 21 nt, Human
caaugcuuugccccugagaca

SEQ ID NO: 2345826 - RNA, 22 nt, Human
caaugcugugcccuaaagugua

SEQ ID NO: 2345827 - RNA, 16 nt, Human
caauucuccugccuca

SEQ ID NO: 2345828 - RNA, 17 nt, Human
caauucuccugccucag

SEQ ID NO: 2345829 - RNA, 13 nt, Human
caauggaaacuga

SEQ ID NO: 2345830 - RNA, 15 nt, Human
caauggaaacugaau

SEQ ID NO: 2345831 - RNA, 16 nt, Human
caauggaaacugaaug

SEQ ID NO: 2345832 - RNA, 17 nt, Human
caauggaaacugaaugc

SEQ ID NO: 2345833 - RNA, 14 nt, Human
caauggaaccuccu

SEQ ID NO: 2345834 - RNA, 16 nt, Human
caauggaaccuccuuu

SEQ ID NO: 2345835 - RNA, 17 nt, Human
caauggaaccuccuuuc

SEQ ID NO: 2345836 - RNA, 19 nt, Human
caauauuuauuauuuucac

SEQ ID NO: 2345837 - RNA, 12 nt, Human
caauauuucaga

SEQ ID NO: 2345838 - RNA, 20 nt, Human
caauauuucagauaaucaca

SEQ ID NO: 2345839 - RNA, 21 nt, Human
caauauuucagauaaucacaa

SEQ ID NO: 2345840 - RNA, 22 nt, Human
caaugcuggcuguuggcugggg

SEQ ID NO: 2345841 - RNA, 23 nt, Human
caaugcuggcuguuggcuggggg

SEQ ID NO: 2345842 - RNA, 14 nt, Human
caaugcuguauuuu

SEQ ID NO: 2345843 - RNA, 23 nt, Human
caaugcuguauuuuaaaagaaug

SEQ ID NO: 2345844 - RNA, 16 nt, Human
caauaaaaauggcuca

SEQ ID NO: 2345845 - RNA, 14 nt, Human
caauaaaaaucaua

SEQ ID NO: 2345846 - RNA, 13 nt, Human
caauaaaaauguu

SEQ ID NO: 2345847 - RNA, 17 nt, Human
caauaaaaauggcucag

SEQ ID NO: 2345848 - RNA, 22 nt, Human
caauaaaaauggcucagaugcc

SEQ ID NO: 2345849 - RNA, 22 nt, Human
caauaaaauuuuuuuucauguu

SEQ ID NO: 2345850 - RNA, 19 nt, Human
caauaaacgauuuaauucu

SEQ ID NO: 2345851 - RNA, 21 nt, Human
caauaaacgauuuaauucucu

SEQ ID NO: 2345852 - RNA, 12 nt, Human
caauaaacgauu

SEQ ID NO: 2345853 - RNA, 16 nt, Human
caauaaacgauuuaau

SEQ ID NO: 2345854 - RNA, 17 nt, Human
caauaaacgauuuaauu

SEQ ID NO: 2345855 - RNA, 18 nt, Human
caauaaacgauuuaauuc

SEQ ID NO: 2345856 - RNA, 17 nt, Human
caauaaaccucuuuucu

SEQ ID NO: 2345857 - RNA, 19 nt, Human
caauaaaauuuuuuuucau

SEQ ID NO: 2345858 - RNA, 23 nt, Human
caauaaaccagguuuagacagua

SEQ ID NO: 2345859 - RNA, 18 nt, Human
caauaaaauuuuuuuuca

SEQ ID NO: 2345860 - RNA, 13 nt, Human
caauaaaccaggu

SEQ ID NO: 2345861 - RNA, 22 nt, Human
caauaaagaguuagaaugaaaa

SEQ ID NO: 2345862 - RNA, 13 nt, Human
caauaaagaagag

SEQ ID NO: 2345863 - RNA, 12 nt, Human
caauaaagagau

SEQ ID NO: 2345864 - RNA, 20 nt, Human
caaguuguggugcugacaaa

SEQ ID NO: 2345865 - RNA, 21 nt, Human
caaguuguggugcugacaaag

SEQ ID NO: 2345866 - RNA, 13 nt, Human
caaguuuugugua

SEQ ID NO: 2345867 - RNA, 15 nt, Human
caaguugcuaauaca

SEQ ID NO: 2345868 - RNA, 17 nt, Human
caaguugugcuuguuua

SEQ ID NO: 2345869 - RNA, 17 nt, Human
caaguuguggugcugac

SEQ ID NO: 2345870 - RNA, 13 nt, Human
caaguugugcuug

SEQ ID NO: 2345871 - RNA, 15 nt, Human
caaguugaauugagg

SEQ ID NO: 2345872 - RNA, 21 nt, Human
caaguucuagagaagaggcug

SEQ ID NO: 2345873 - RNA, 23 nt, Human
caaguucuagagaagaggcuggu

SEQ ID NO: 2345874 - RNA, 13 nt, Human
caaguucuagaga

SEQ ID NO: 2345875 - RNA, 16 nt, Human
caaguucuagagaaga

SEQ ID NO: 2345876 - RNA, 18 nt, Human
caaguucuagagaagagg

SEQ ID NO: 2345877 - RNA, 19 nt, Human
caaguucuagagaagaggc

SEQ ID NO: 2345878 - RNA, 17 nt, Human
caaguauguuuuagcau

SEQ ID NO: 2345879 - RNA, 22 nt, Human
caaguaugugggcagauuuuca

SEQ ID NO: 2345880 - RNA, 20 nt, Human
caaguauuagggguaauaua

SEQ ID NO: 2345881 - RNA, 23 nt, Human
caaguauuagggguaauauauug

SEQ ID NO: 2345882 - RNA, 20 nt, Human
caaguauuagaauaccacag

SEQ ID NO: 2345883 - RNA, 14 nt, Human
caaguauuagaaua

SEQ ID NO: 2345884 - RNA, 14 nt, Human
caaguacugcugua

SEQ ID NO: 2345885 - RNA, 13 nt, Human
caaguacugcugu

SEQ ID NO: 2345886 - RNA, 20 nt, Human
caaguacauggcuagcuuuu

SEQ ID NO: 2345887 - RNA, 16 nt, Human
caaguacugcuguaaa

SEQ ID NO: 2345888 - RNA, 23 nt, Human
caaguaauugugaaaaaguuaaa

SEQ ID NO: 2345889 - RNA, 11 nt, Human
caaguaauugu

SEQ ID NO: 2345890 - RNA, 23 nt, Human
caagauucccagagacaggaaaa

SEQ ID NO: 2345891 - RNA, 19 nt, Human
caagauucccagagacagg

SEQ ID NO: 2345892 - RNA, 18 nt, Human
caagauucccagagacag

SEQ ID NO: 2345893 - RNA, 17 nt, Human
caagauucccagagaca

SEQ ID NO: 2345894 - RNA, 16 nt, Human
caagauucccagagac

SEQ ID NO: 2345895 - RNA, 15 nt, Human
caagauucccagaga

SEQ ID NO: 2345896 - RNA, 14 nt, Human
caagauucccagag

SEQ ID NO: 2345897 - RNA, 13 nt, Human
caagauucccaga

SEQ ID NO: 2345898 - RNA, 18 nt, Human
caagauucacaccugacu

SEQ ID NO: 2345899 - RNA, 19 nt, Human
caagauucacaccugacuc

SEQ ID NO: 2345900 - RNA, 12 nt, Human
caagauuagaag

SEQ ID NO: 2345901 - RNA, 17 nt, Human
caagauucacaccugac

SEQ ID NO: 2345902 - RNA, 20 nt, Human
caagauuagaagcugaaaac

SEQ ID NO: 2345903 - RNA, 22 nt, Human
caaguaauccaccugccucggc

SEQ ID NO: 2345904 - RNA, 16 nt, Human
caaguaauucugcugu

SEQ ID NO: 2345905 - RNA, 23 nt, Human
caaguaauucugcugucucagcc

SEQ ID NO: 2345906 - RNA, 20 nt, Human
caacaauuucuacuuugaag

SEQ ID NO: 2345907 - RNA, 19 nt, Human
caacaauuucuacuuugaa

SEQ ID NO: 2345908 - RNA, 18 nt, Human
caacaauuucuacuuuga

SEQ ID NO: 2345909 - RNA, 13 nt, Human
caacaauuucuac

SEQ ID NO: 2345910 - RNA, 18 nt, Human
caacaauuuaugaauuga

SEQ ID NO: 2345911 - RNA, 17 nt, Human
caacaauuuaugaauug

SEQ ID NO: 2345912 - RNA, 16 nt, Human
caacaauuuaugaauu

SEQ ID NO: 2345913 - RNA, 14 nt, Human
caacaauuuaugaa

SEQ ID NO: 2345914 - RNA, 13 nt, Human
caaauuuuggcca

SEQ ID NO: 2345915 - RNA, 15 nt, Human
caaauuuuggccaaa

SEQ ID NO: 2345916 - RNA, 16 nt, Human
caacaaaaagcuuccc

SEQ ID NO: 2345917 - RNA, 17 nt, Human
caacaaaaagcuucccc

SEQ ID NO: 2345918 - RNA, 23 nt, Human
caacaaaccuguuucugcagcca

SEQ ID NO: 2345919 - RNA, 13 nt, Human
caaaucuauucag

SEQ ID NO: 2345920 - RNA, 14 nt, Human
caaaucuauucaga

SEQ ID NO: 2345921 - RNA, 19 nt, Human
caaaucguccagcgaccuu

SEQ ID NO: 2345922 - RNA, 21 nt, Human
caaaucguccagcgaccuucc

SEQ ID NO: 2345923 - RNA, 21 nt, Human
caaaucugcuuuuuaaagaau

SEQ ID NO: 2345924 - RNA, 16 nt, Human
caaaucuauucagaca

SEQ ID NO: 2345925 - RNA, 20 nt, Human
caaaucuauucagacaagca

SEQ ID NO: 2345926 - RNA, 22 nt, Human
caaaucuauucagacaagcaac

SEQ ID NO: 2345927 - RNA, 22 nt, Human
caaaugagggucuugguuccag

SEQ ID NO: 2345928 - RNA, 13 nt, Human
caaaugcagcuuu

SEQ ID NO: 2345929 - RNA, 19 nt, Human
caaaugcagggauugcugc

SEQ ID NO: 2345930 - RNA, 20 nt, Human
caaaugcagggauugcugcc

SEQ ID NO: 2345931 - RNA, 22 nt, Human
caaaugcagggauugcugccac

SEQ ID NO: 2345932 - RNA, 21 nt, Human
caaauuuugaugccaagaaag

SEQ ID NO: 2345933 - RNA, 23 nt, Human
caaaugcagggauugcugccacu

SEQ ID NO: 2345934 - RNA, 21 nt, Human
caaaguaaaacuugcugccug

SEQ ID NO: 2345935 - RNA, 14 nt, Human
caaagaugcagccg

SEQ ID NO: 2345936 - RNA, 13 nt, Human
caaagaugcagcc

SEQ ID NO: 2345937 - RNA, 21 nt, Human
caaagaucuguccucagccuu

SEQ ID NO: 2345938 - RNA, 20 nt, Human
caaagaucuguccucagccu

SEQ ID NO: 2345939 - RNA, 12 nt, Human
caaagaucacuu

SEQ ID NO: 2345940 - RNA, 15 nt, Human
caaagaucacuuguu

SEQ ID NO: 2345941 - RNA, 20 nt, Human
caaaguacacuguuucaaac

SEQ ID NO: 2345942 - RNA, 16 nt, Human
caaaguacacuguuuc

SEQ ID NO: 2345943 - RNA, 21 nt, Human
caaaguacacuguuucaaacu

SEQ ID NO: 2345944 - RNA, 17 nt, Human
caaaucagcugcuacua

SEQ ID NO: 2345945 - RNA, 16 nt, Human
caaagucaagccacau

SEQ ID NO: 2345946 - RNA, 22 nt, Human
caaaguauuuuuuuaucuuggg

SEQ ID NO: 2345947 - RNA, 23 nt, Human
caaaguauuuuuuuaucuuggga

SEQ ID NO: 2345948 - RNA, 22 nt, Human
caaauccagccugcugccugcu

SEQ ID NO: 2345949 - RNA, 13 nt, Human
caaaucagucagu

SEQ ID NO: 2345950 - RNA, 23 nt, Human
caaaucagucagugcaaauguca

SEQ ID NO: 2345951 - RNA, 14 nt, Human
caaaucaguuacua

SEQ ID NO: 2345952 - RNA, 20 nt, Human
caaaucaguuacuaagaaga

SEQ ID NO: 2345953 - RNA, 21 nt, Human
caaaucaguuacuaagaagaa

SEQ ID NO: 2345954 - RNA, 22 nt, Human
caaaucaguuacuaagaagaaa

SEQ ID NO: 2345955 - RNA, 13 nt, Human
caaaucauagcug

SEQ ID NO: 2345956 - RNA, 20 nt, Human
caaauccuugugggaaaaga

SEQ ID NO: 2345957 - RNA, 15 nt, Human
caacacgagcaggcu

SEQ ID NO: 2345958 - RNA, 20 nt, Human
caacaccuuguuucccucuc

SEQ ID NO: 2345959 - RNA, 22 nt, Human
caacaccucugcacaagcugca

SEQ ID NO: 2345960 - RNA, 17 nt, Human
caacacaagcuggaagc

SEQ ID NO: 2345961 - RNA, 17 nt, Human
caaccaccgcuccccag

SEQ ID NO: 2345962 - RNA, 19 nt, Human
caaccaccgcuccccagcc

SEQ ID NO: 2345963 - RNA, 21 nt, Human
caaccaccgcuccccagccca

SEQ ID NO: 2345964 - RNA, 20 nt, Human
caaccaccgcuccccagccc

SEQ ID NO: 2345965 - RNA, 16 nt, Human
caaccaccuuucagau

SEQ ID NO: 2345966 - RNA, 18 nt, Human
caaccacugcgaccacaa

SEQ ID NO: 2345967 - RNA, 23 nt, Human
caagaauuucuugguaagaagcc

SEQ ID NO: 2345968 - RNA, 22 nt, Human
caagaauuucuugguaagaagc

SEQ ID NO: 2345969 - RNA, 22 nt, Human
caagaauuugaucguuccaguu

SEQ ID NO: 2345970 - RNA, 13 nt, Human
caagacacaguga

SEQ ID NO: 2345971 - RNA, 21 nt, Human
caagacagaugccccagagcu

SEQ ID NO: 2345972 - RNA, 16 nt, Human
caagacagaugcccca

SEQ ID NO: 2345973 - RNA, 22 nt, Human
caagacagaugccccagagcug

SEQ ID NO: 2345974 - RNA, 18 nt, Human
caagacagaagcugaagu

SEQ ID NO: 2345975 - RNA, 13 nt, Human
caagacagaugcc

SEQ ID NO: 2345976 - RNA, 13 nt, Human
caagacacugugg

SEQ ID NO: 2345977 - RNA, 17 nt, Human
caagacagaagcugaag

SEQ ID NO: 2345978 - RNA, 15 nt, Human
caagacacaucccua

SEQ ID NO: 2345979 - RNA, 14 nt, Human
caagauuaaaugua

SEQ ID NO: 2345980 - RNA, 22 nt, Human
caagacccuuguggucccaccc

SEQ ID NO: 2345981 - RNA, 18 nt, Human
caagacccuugugguccc

SEQ ID NO: 2345982 - RNA, 19 nt, Human
caagacccuugugguccca

SEQ ID NO: 2345983 - RNA, 16 nt, Human
caacucaccccagccc

SEQ ID NO: 2345984 - RNA, 13 nt, Human
caacucaccccag

SEQ ID NO: 2345985 - RNA, 15 nt, Human
caacucaccccagcc

SEQ ID NO: 2345986 - RNA, 19 nt, Human
caagaagucaaaguaaaac

SEQ ID NO: 2345987 - RNA, 23 nt, Human
caagaaggguuuuccacccugga

SEQ ID NO: 2345988 - RNA, 14 nt, Human
caagaagugauuag

SEQ ID NO: 2345989 - RNA, 22 nt, Human
caacuaugauaugguaaaaguu

SEQ ID NO: 2345990 - RNA, 23 nt, Human
caagaagggcuagaaccuggagg

SEQ ID NO: 2345991 - RNA, 22 nt, Human
caagaaggguuuuccacccugg

SEQ ID NO: 2345992 - RNA, 15 nt, Human
caagaaguuuaagga

SEQ ID NO: 2345993 - RNA, 17 nt, Human
caagaauaaucacgcuu

SEQ ID NO: 2345994 - RNA, 18 nt, Human
caagaauaaucacgcuuu

SEQ ID NO: 2345995 - RNA, 19 nt, Human
caaccacuguaaaaugaaa

SEQ ID NO: 2345996 - RNA, 22 nt, Human
caaccauuccagacugcuucca

SEQ ID NO: 2345997 - RNA, 16 nt, Human
caaccauuccagacug

SEQ ID NO: 2345998 - RNA, 14 nt, Human
caaccauuccagac

SEQ ID NO: 2345999 - RNA, 13 nt, Human
caaccauuccaga

SEQ ID NO: 2346000 - RNA, 21 nt, Human
caaccacuguaaaaugaaauu

SEQ ID NO: 2346001 - RNA, 17 nt, Human
caaccacuguaaaauga

SEQ ID NO: 2346002 - RNA, 14 nt, Human
caaccacuguaaaa

SEQ ID NO: 2346003 - RNA, 23 nt, Human
caaccacuggucuguagggauuu

SEQ ID NO: 2346004 - RNA, 22 nt, Human
caaccaccgcuccccagcccag

SEQ ID NO: 2346005 - RNA, 21 nt, Human
caaccacuaagaauucaaacu

SEQ ID NO: 2346006 - RNA, 14 nt, Human
caaccacuggucug

SEQ ID NO: 2346007 - RNA, 22 nt, Human
caaccacuggucuguagggauu

SEQ ID NO: 2346008 - RNA, 14 nt, Human
caaccauuccccau

SEQ ID NO: 2346009 - RNA, 19 nt, Human
caacccaaauguucaucaa

SEQ ID NO: 2346010 - RNA, 15 nt, Human
caacccaaggacuga

SEQ ID NO: 2346011 - RNA, 11 nt, Human
caacccagccg

SEQ ID NO: 2346012 - RNA, 19 nt, Human
caacccaaggacugaggga

SEQ ID NO: 2346013 - RNA, 22 nt, Human
caacccaaggacugagggacuc

SEQ ID NO: 2346014 - RNA, 14 nt, Human
caacccagccgcug

SEQ ID NO: 2346015 - RNA, 16 nt, Human
caacccagccgcugcc

SEQ ID NO: 2346016 - RNA, 17 nt, Human
caacccagccgcugccc

SEQ ID NO: 2346017 - RNA, 18 nt, Human
caacccagccgcugcccg

SEQ ID NO: 2346018 - RNA, 22 nt, Human
caacccaugaugagcuccucuu

SEQ ID NO: 2346019 - RNA, 22 nt, Human
caacccaggagcauccaccucc

SEQ ID NO: 2346020 - RNA, 15 nt, Human
caacccauuagccau

SEQ ID NO: 2346021 - RNA, 12 nt, Human
caaccccagccg

SEQ ID NO: 2346022 - RNA, 15 nt, Human
caaccccaacuccag

SEQ ID NO: 2346023 - RNA, 15 nt, Human
caacccccagccugc

SEQ ID NO: 2346024 - RNA, 16 nt, Human
caacccccagccugcu

SEQ ID NO: 2346025 - RNA, 17 nt, Human
caacccccagccugcua

SEQ ID NO: 2346026 - RNA, 18 nt, Human
caacuaugauuuggaaaa

SEQ ID NO: 2346027 - RNA, 19 nt, Human
caacuaugauuuggaaaau

SEQ ID NO: 2346028 - RNA, 22 nt, Human
caacuaugauuuggaaaauaaa

SEQ ID NO: 2346029 - RNA, 20 nt, Human
caacuauuuuuccaaaauaa

SEQ ID NO: 2346030 - RNA, 17 nt, Human
caacuaugauuuggaaa

SEQ ID NO: 2346031 - RNA, 23 nt, Human
caaccccacacgcuccucccucu

SEQ ID NO: 2346032 - RNA, 14 nt, Human
caaccccagccgcu

SEQ ID NO: 2346033 - RNA, 21 nt, Human
caacuaucucauuuccaagca

SEQ ID NO: 2346034 - RNA, 21 nt, Human
auuuuuacuagaacacagaaa

SEQ ID NO: 2346035 - RNA, 17 nt, Human
auuuuuuuuuccuagcc

SEQ ID NO: 2346036 - RNA, 19 nt, Human
auuuuuaccguuucuuccc

SEQ ID NO: 2346037 - RNA, 19 nt, Human
caaaaaaaaaaaaaugcac

SEQ ID NO: 2346038 - RNA, 17 nt, Human
auuuuuuuuuccuucag

SEQ ID NO: 2346039 - RNA, 13 nt, Human
caaaaaaacacua

SEQ ID NO: 2346040 - RNA, 16 nt, Human
caaaaaaacacuaguu

SEQ ID NO: 2346041 - RNA, 22 nt, Human
caaaaaaaaaguuuuauuuuuc

SEQ ID NO: 2346042 - RNA, 16 nt, Human
caaaaaaaaaguuuua

SEQ ID NO: 2346043 - RNA, 17 nt, Human
caaaaaaaaaguuuuau

SEQ ID NO: 2346044 - RNA, 19 nt, Human
caaaaaaaaaguuuuauuu

SEQ ID NO: 2346045 - RNA, 20 nt, Human
caaaaaaaaaguuuuauuuu

SEQ ID NO: 2346046 - RNA, 12 nt, Human
caaaagcugcuc

SEQ ID NO: 2346047 - RNA, 22 nt, Human
caaaagcccauucauuccauuc

SEQ ID NO: 2346048 - RNA, 20 nt, Human
caaaagcccauucauuccau

SEQ ID NO: 2346049 - RNA, 13 nt, Human
caaaaaaauacug

SEQ ID NO: 2346050 - RNA, 15 nt, Human
caaaaaaauacugcc

SEQ ID NO: 2346051 - RNA, 23 nt, Human
caaaaaaauacugccagaugcug

SEQ ID NO: 2346052 - RNA, 18 nt, Human
caaaaaaauauauuuaau

SEQ ID NO: 2346053 - RNA, 19 nt, Human
auuuuuacaauaaauaauc

SEQ ID NO: 2346054 - RNA, 13 nt, Human
auuuuuacaauaa

SEQ ID NO: 2346055 - RNA, 14 nt, Human
auuuuuacaauaaa

SEQ ID NO: 2346056 - RNA, 16 nt, Human
auuuuuacauucugaa

SEQ ID NO: 2346057 - RNA, 13 nt, Human
auuuuuaagugcu

SEQ ID NO: 2346058 - RNA, 14 nt, Human
auuuuuaaggacuu

SEQ ID NO: 2346059 - RNA, 16 nt, Human
auuuuuaaucaugaaa

SEQ ID NO: 2346060 - RNA, 17 nt, Human
auuuuuaaucaugaaau

SEQ ID NO: 2346061 - RNA, 11 nt, Human
auuuuuaaugg

SEQ ID NO: 2346062 - RNA, 12 nt, Human
auuuuuaauggg

SEQ ID NO: 2346063 - RNA, 15 nt, Human
auuuuuaaugggggu

SEQ ID NO: 2346064 - RNA, 23 nt, Human
auuuuuaauggggguagcagcug

SEQ ID NO: 2346065 - RNA, 20 nt, Human
auuuuuaccuuuuuccuucc

SEQ ID NO: 2346066 - RNA, 17 nt, Human
auuuuuacauucugaau

SEQ ID NO: 2346067 - RNA, 12 nt, Human
auuuuuuuuucc

SEQ ID NO: 2346068 - RNA, 13 nt, Human
auuuuuuuuuccu

SEQ ID NO: 2346069 - RNA, 16 nt, Human
auuuuuuuuuccuuca

SEQ ID NO: 2346070 - RNA, 15 nt, Human
caaaccacacuggac

SEQ ID NO: 2346071 - RNA, 14 nt, Human
caaaagcugcucag

SEQ ID NO: 2346072 - RNA, 20 nt, Human
caaaagguucacuaaagcag

SEQ ID NO: 2346073 - RNA, 15 nt, Human
caaaagcugggcagg

SEQ ID NO: 2346074 - RNA, 13 nt, Human
caaaaguauuuuc

SEQ ID NO: 2346075 - RNA, 14 nt, Human
caaaaguauuuucc

SEQ ID NO: 2346076 - RNA, 15 nt, Human
caaaaguauuuuccu

SEQ ID NO: 2346077 - RNA, 16 nt, Human
caaaaguauuuuccug

SEQ ID NO: 2346078 - RNA, 17 nt, Human
caaaaguauuuuccugu

SEQ ID NO: 2346079 - RNA, 19 nt, Human
caaaaguauuuuccuguaa

SEQ ID NO: 2346080 - RNA, 14 nt, Human
caaaccacacugga

SEQ ID NO: 2346081 - RNA, 20 nt, Human
caaaaguggccucuuugucu

SEQ ID NO: 2346082 - RNA, 17 nt, Human
caaaccaaaucacugaa

SEQ ID NO: 2346083 - RNA, 20 nt, Human
caaaaguauuuuccuguaaa

SEQ ID NO: 2346084 - RNA, 19 nt, Human
caaaagucaaaaggugccu

SEQ ID NO: 2346085 - RNA, 18 nt, Human
caaaaguggccucuuugu

SEQ ID NO: 2346086 - RNA, 17 nt, Human
caaaaguggccucuuug

SEQ ID NO: 2346087 - RNA, 16 nt, Human
caaaaguggccucuuu

SEQ ID NO: 2346088 - RNA, 14 nt, Human
caaaaguggccucu

SEQ ID NO: 2346089 - RNA, 22 nt, Human
caaaccaccagaagcccagaau

SEQ ID NO: 2346090 - RNA, 20 nt, Human
caaaccaccagaagcccaga

SEQ ID NO: 2346091 - RNA, 16 nt, Human
caaaccaccagaagcc

SEQ ID NO: 2346092 - RNA, 15 nt, Human
caaaccaccagaagc

SEQ ID NO: 2346093 - RNA, 14 nt, Human
caaagaucaaaaua

SEQ ID NO: 2346094 - RNA, 15 nt, Human
caaagaucaaaauaa

SEQ ID NO: 2346095 - RNA, 16 nt, Human
caaagaucaaaauaaa

SEQ ID NO: 2346096 - RNA, 17 nt, Human
caaagaucaaaauaaaa

SEQ ID NO: 2346097 - RNA, 18 nt, Human
caaagaucaaaauaaaaa

SEQ ID NO: 2346098 - RNA, 20 nt, Human
caaagaucaaaauaaaaagu

SEQ ID NO: 2346099 - RNA, 23 nt, Human
auuuuauaaaucgcuuuugauaa

SEQ ID NO: 2346100 - RNA, 21 nt, Human
auuuuauaaaucgcuuuugau

SEQ ID NO: 2346101 - RNA, 20 nt, Human
auuuuauaaaucgcuuuuga

SEQ ID NO: 2346102 - RNA, 15 nt, Human
auuuuauacauuaac

SEQ ID NO: 2346103 - RNA, 23 nt, Human
auuuuauaugcuuacugauauau

SEQ ID NO: 2346104 - RNA, 12 nt, Human
auuuuauaauuu

SEQ ID NO: 2346105 - RNA, 15 nt, Human
auuuuauaugucaaa

SEQ ID NO: 2346106 - RNA, 16 nt, Human
auuuuauaugucaaag

SEQ ID NO: 2346107 - RNA, 18 nt, Human
auuuuauauuaaaauaag

SEQ ID NO: 2346108 - RNA, 20 nt, Human
auuuuauauuagaaguguua

SEQ ID NO: 2346109 - RNA, 19 nt, Human
auuuuauauuagaaguguu

SEQ ID NO: 2346110 - RNA, 16 nt, Human
auuuguuugaacugau

SEQ ID NO: 2346111 - RNA, 14 nt, Human
auuuguuugaacug

SEQ ID NO: 2346112 - RNA, 15 nt, Human
auuuuauaaaucgcu

SEQ ID NO: 2346113 - RNA, 17 nt, Human
auuuuauaaaucgcuuu

SEQ ID NO: 2346114 - RNA, 16 nt, Human
auuuuauaaaucgcuu

SEQ ID NO: 2346115 - RNA, 13 nt, Human
auuuguuugaacu

SEQ ID NO: 2346116 - RNA, 15 nt, Human
auuuuaucucuuauu

SEQ ID NO: 2346117 - RNA, 20 nt, Human
auuuuaucccucaccuguag

SEQ ID NO: 2346118 - RNA, 13 nt, Human
auuuuaucuguga

SEQ ID NO: 2346119 - RNA, 14 nt, Human
auuuuaucugugaa

SEQ ID NO: 2346120 - RNA, 15 nt, Human
auuuuaucugugaau

SEQ ID NO: 2346121 - RNA, 13 nt, Human
auuuuaucuuuga

SEQ ID NO: 2346122 - RNA, 15 nt, Human
auuuuaucuuugauu

SEQ ID NO: 2346123 - RNA, 20 nt, Human
auuuuaucuuugauucuccu

SEQ ID NO: 2346124 - RNA, 21 nt, Human
auuuuaucuuugauucuccuu

SEQ ID NO: 2346125 - RNA, 21 nt, Human
auuuucuuccaagcaaaggug

SEQ ID NO: 2346126 - RNA, 22 nt, Human
auuuuaucuuugauucuccuuc

SEQ ID NO: 2346127 - RNA, 23 nt, Human
auuuuaucuuugauucuccuuca

SEQ ID NO: 2346128 - RNA, 21 nt, Human
auuuucuucaugcaaugacau

SEQ ID NO: 2346129 - RNA, 13 nt, Human
auuuucuuuaaaa

SEQ ID NO: 2346130 - RNA, 19 nt, Human
auuuuaucuuucgcacagc

SEQ ID NO: 2346131 - RNA, 15 nt, Human
auuuucuuuaaugcu

SEQ ID NO: 2346132 - RNA, 12 nt, Human
auuuucuuuaau

SEQ ID NO: 2346133 - RNA, 15 nt, Human
auuuucuuuaaaaga

SEQ ID NO: 2346134 - RNA, 19 nt, Human
auuuucuuuaaaagaaugg

SEQ ID NO: 2346135 - RNA, 18 nt, Human
auuuugacacuauaucug

SEQ ID NO: 2346136 - RNA, 19 nt, Human
auuuugacacuauaucugu

SEQ ID NO: 2346137 - RNA, 13 nt, Human
auuuucuuuucuu

SEQ ID NO: 2346138 - RNA, 19 nt, Human
auuuucuuuuguaaauguu

SEQ ID NO: 2346139 - RNA, 18 nt, Human
auuuugaccuacucucau

SEQ ID NO: 2346140 - RNA, 17 nt, Human
auuuugaccuacucuca

SEQ ID NO: 2346141 - RNA, 22 nt, Human
auuuugagaaagucuuauuuau

SEQ ID NO: 2346142 - RNA, 17 nt, Human
auuuucuuuuguaaaug

SEQ ID NO: 2346143 - RNA, 16 nt, Human
auuuucuuuuguaaau

SEQ ID NO: 2346144 - RNA, 23 nt, Human
auuuucuuuguguagcuuugcuc

SEQ ID NO: 2346145 - RNA, 20 nt, Human
auuuucuuuucuuucaacuu

SEQ ID NO: 2346146 - RNA, 15 nt, Human
auuuucuuugaaauu

SEQ ID NO: 2346147 - RNA, 21 nt, Human
auuuucuuucucuacuuugag

SEQ ID NO: 2346148 - RNA, 16 nt, Human
auuuucuuucuguaac

SEQ ID NO: 2346149 - RNA, 19 nt, Human
auuuucuuuaaugcuuuua

SEQ ID NO: 2346150 - RNA, 18 nt, Human
auuuucuuuaaugcuuuu

SEQ ID NO: 2346151 - RNA, 14 nt, Human
auuuucuuucaaaa

SEQ ID NO: 2346152 - RNA, 18 nt, Human
auuuugauccaagcuggu

SEQ ID NO: 2346153 - RNA, 14 nt, Human
auuuugaggcuuuc

SEQ ID NO: 2346154 - RNA, 21 nt, Human
auuuugagcugaaaugcugca

SEQ ID NO: 2346155 - RNA, 21 nt, Human
auuuugaguaucucggaccuu

SEQ ID NO: 2346156 - RNA, 13 nt, Human
auuuugagugacu

SEQ ID NO: 2346157 - RNA, 14 nt, Human
auuuugagugacuc

SEQ ID NO: 2346158 - RNA, 23 nt, Human
auuuugagugacucgaggguugg

SEQ ID NO: 2346159 - RNA, 21 nt, Human
auuuuuaagcaaaauauuauu

SEQ ID NO: 2346160 - RNA, 20 nt, Human
auuuuuaagauaauaauaua

SEQ ID NO: 2346161 - RNA, 22 nt, Human
auuuuuaagauaauaauauaug

SEQ ID NO: 2346162 - RNA, 18 nt, Human
auuuuuaagauaauaaua

SEQ ID NO: 2346163 - RNA, 19 nt, Human
auuuuuaagauaauaauau

SEQ ID NO: 2346164 - RNA, 19 nt, Human
auuuuuaaauguaaaacau

SEQ ID NO: 2346165 - RNA, 17 nt, Human
auuuuuaaaguauauau

SEQ ID NO: 2346166 - RNA, 18 nt, Human
auuccucuuugcuuugcu

SEQ ID NO: 2346167 - RNA, 17 nt, Human
auuccucuuugcuuugc

SEQ ID NO: 2346168 - RNA, 16 nt, Human
auuccucuuugcuuug

SEQ ID NO: 2346169 - RNA, 15 nt, Human
auuccucuuugcuuu

SEQ ID NO: 2346170 - RNA, 14 nt, Human
auuccucuuugcuu

SEQ ID NO: 2346171 - RNA, 13 nt, Human
auuccucuuugcu

SEQ ID NO: 2346172 - RNA, 13 nt, Human
auuccugaaagaa

SEQ ID NO: 2346173 - RNA, 15 nt, Human
auuccugaagaacca

SEQ ID NO: 2346174 - RNA, 19 nt, Human
auuccugaaugaaauauca

SEQ ID NO: 2346175 - RNA, 17 nt, Human
auuccugaaugaaauau

SEQ ID NO: 2346176 - RNA, 11 nt, Human
auuccugaccc

SEQ ID NO: 2346177 - RNA, 12 nt, Human
auuccugaccca

SEQ ID NO: 2346178 - RNA, 19 nt, Human
auuccugaagaaccagucc

SEQ ID NO: 2346179 - RNA, 16 nt, Human
auuccugaagaaccag

SEQ ID NO: 2346180 - RNA, 21 nt, Human
auuccugacccaggccgcagc

SEQ ID NO: 2346181 - RNA, 22 nt, Human
auuccugacccaggccgcagcu

SEQ ID NO: 2346182 - RNA, 14 nt, Human
auuccugacccagg

SEQ ID NO: 2346183 - RNA, 15 nt, Human
auuccugacccaggc

SEQ ID NO: 2346184 - RNA, 16 nt, Human
auuccugacccaggcc

SEQ ID NO: 2346185 - RNA, 17 nt, Human
auuccugacccaggccg

SEQ ID NO: 2346186 - RNA, 13 nt, Human
auuccugcagccu

SEQ ID NO: 2346187 - RNA, 23 nt, Human
auuccugauaugauuuaaaacau

SEQ ID NO: 2346188 - RNA, 20 nt, Human
auuccugauaugauuuaaaa

SEQ ID NO: 2346189 - RNA, 22 nt, Human
auuccugauaugauuuaaaaca

SEQ ID NO: 2346190 - RNA, 16 nt, Human
auuccugauaugauuu

SEQ ID NO: 2346191 - RNA, 19 nt, Human
auuccugauaugauuuaaa

SEQ ID NO: 2346192 - RNA, 21 nt, Human
auuccugaugcuucuucagag

SEQ ID NO: 2346193 - RNA, 21 nt, Human
auucucuccuguaccucuuga

SEQ ID NO: 2346194 - RNA, 19 nt, Human
auucucuccuguaccucuu

SEQ ID NO: 2346195 - RNA, 15 nt, Human
auucucucuccuguc

SEQ ID NO: 2346196 - RNA, 12 nt, Human
auucucucuccu

SEQ ID NO: 2346197 - RNA, 15 nt, Human
auucucucuccugua

SEQ ID NO: 2346198 - RNA, 17 nt, Human
auucucucuccugucca

SEQ ID NO: 2346199 - RNA, 16 nt, Human
auucucucuccugucc

SEQ ID NO: 2346200 - RNA, 11 nt, Human
auucucugagc

SEQ ID NO: 2346201 - RNA, 10 nt, Human
auucucucuc

SEQ ID NO: 2346202 - RNA, 15 nt, Human
auuccugcagccugg

SEQ ID NO: 2346203 - RNA, 14 nt, Human
auuccugcagccug

SEQ ID NO: 2346204 - RNA, 16 nt, Human
auucucuccuguaccu

SEQ ID NO: 2346205 - RNA, 18 nt, Human
auucugacucgguuucuc

SEQ ID NO: 2346206 - RNA, 20 nt, Human
auucugacucgguuucucca

SEQ ID NO: 2346207 - RNA, 14 nt, Human
auucugagagcugu

SEQ ID NO: 2346208 - RNA, 13 nt, Human
auucugagagcug

SEQ ID NO: 2346209 - RNA, 15 nt, Human
auucugauuacacaa

SEQ ID NO: 2346210 - RNA, 13 nt, Human
auucugauuccac

SEQ ID NO: 2346211 - RNA, 14 nt, Human
auucugauuacaca

SEQ ID NO: 2346212 - RNA, 17 nt, Human
auucuugccaaauauaa

SEQ ID NO: 2346213 - RNA, 12 nt, Human
auucuuguauau

SEQ ID NO: 2346214 - RNA, 14 nt, Human
auucuugucaaaaa

SEQ ID NO: 2346215 - RNA, 19 nt, Human
auucuuugaccuguuggga

SEQ ID NO: 2346216 - RNA, 15 nt, Human
auucuuucugauaac

SEQ ID NO: 2346217 - RNA, 15 nt, Human
auucuuucuguauug

SEQ ID NO: 2346218 - RNA, 13 nt, Human
auucuuugauguu

SEQ ID NO: 2346219 - RNA, 14 nt, Human
auucuuugauguua

SEQ ID NO: 2346220 - RNA, 15 nt, Human
auucuuugauguuaa

SEQ ID NO: 2346221 - RNA, 21 nt, Human
auucuuggcccgcacagagcu

SEQ ID NO: 2346222 - RNA, 17 nt, Human
auucuugguuggcuggc

SEQ ID NO: 2346223 - RNA, 20 nt, Human
auucuugguuggcuggccuu

SEQ ID NO: 2346224 - RNA, 18 nt, Human
auucuugguugaggaaac

SEQ ID NO: 2346225 - RNA, 17 nt, Human
auucuugguugaggaaa

SEQ ID NO: 2346226 - RNA, 22 nt, Human
auucuuggcccgcacagagcug

SEQ ID NO: 2346227 - RNA, 17 nt, Human
auucuuuccugaggcug

SEQ ID NO: 2346228 - RNA, 22 nt, Human
auucuuuccugaggcugggcuc

SEQ ID NO: 2346229 - RNA, 15 nt, Human
auugaucaaauucau

SEQ ID NO: 2346230 - RNA, 17 nt, Human
auugaucaaauucauuu

SEQ ID NO: 2346231 - RNA, 18 nt, Human
auugaucauuuucccccc

SEQ ID NO: 2346232 - RNA, 16 nt, Human
auugauccagaaagaa

SEQ ID NO: 2346233 - RNA, 17 nt, Human
auugauccagaaagaaa

SEQ ID NO: 2346234 - RNA, 22 nt, Human
auugagagaauggaaaacagac

SEQ ID NO: 2346235 - RNA, 21 nt, Human
auugagaauuuuaaauuauaa

SEQ ID NO: 2346236 - RNA, 17 nt, Human
auugagaauuuuaaauu

SEQ ID NO: 2346237 - RNA, 20 nt, Human
auugagaguaacuuaaguua

SEQ ID NO: 2346238 - RNA, 14 nt, Human
auugagaguuuugu

SEQ ID NO: 2346239 - RNA, 19 nt, Human
auugagauuagagggaggu

SEQ ID NO: 2346240 - RNA, 16 nt, Human
auugagaguuuugucu

SEQ ID NO: 2346241 - RNA, 20 nt, Human
auugagaguuuugucuugaa

SEQ ID NO: 2346242 - RNA, 15 nt, Human
auugagcucucucau

SEQ ID NO: 2346243 - RNA, 13 nt, Human
auugagaauuuua

SEQ ID NO: 2346244 - RNA, 20 nt, Human
auugagaaguuuuguacaga

SEQ ID NO: 2346245 - RNA, 17 nt, Human
auugagaaggagagaaa

SEQ ID NO: 2346246 - RNA, 22 nt, Human
auugagaaagagcacuuaagag

SEQ ID NO: 2346247 - RNA, 14 nt, Human
auugagaaggagag

SEQ ID NO: 2346248 - RNA, 15 nt, Human
auugagaaggagaga

SEQ ID NO: 2346249 - RNA, 16 nt, Human
auugagaaggagagaa

SEQ ID NO: 2346250 - RNA, 18 nt, Human
auugagaacugcauaugu

SEQ ID NO: 2346251 - RNA, 14 nt, Human
auugagaacugcau

SEQ ID NO: 2346252 - RNA, 22 nt, Human
auugagaacugcauauguuucg

SEQ ID NO: 2346253 - RNA, 13 nt, Human
auugagaaggaga

SEQ ID NO: 2346254 - RNA, 16 nt, Human
auugagaaagaaacua

SEQ ID NO: 2346255 - RNA, 12 nt, Human
auugagaaagag

SEQ ID NO: 2346256 - RNA, 17 nt, Human
auugagaaagagcacuu

SEQ ID NO: 2346257 - RNA, 18 nt, Human
auugagaaagagcacuua

SEQ ID NO: 2346258 - RNA, 21 nt, Human
auugagaaagagcacuuaaga

SEQ ID NO: 2346259 - RNA, 17 nt, Human
auucaucucucuuuaau

SEQ ID NO: 2346260 - RNA, 17 nt, Human
auucaucccaacugucu

SEQ ID NO: 2346261 - RNA, 22 nt, Human
auucaucucucuuuaauauaaa

SEQ ID NO: 2346262 - RNA, 13 nt, Human
auucaugaacuuc

SEQ ID NO: 2346263 - RNA, 17 nt, Human
auucaugaacuucgcau

SEQ ID NO: 2346264 - RNA, 20 nt, Human
auucaucuguuuuucuuuuu

SEQ ID NO: 2346265 - RNA, 17 nt, Human
auucaucuuguguuuua

SEQ ID NO: 2346266 - RNA, 15 nt, Human
auucaucuuuuguau

SEQ ID NO: 2346267 - RNA, 18 nt, Human
auucauuuuaacaucuga

SEQ ID NO: 2346268 - RNA, 15 nt, Human
auucauuuccugccc

SEQ ID NO: 2346269 - RNA, 12 nt, Human
auucauuuccug

SEQ ID NO: 2346270 - RNA, 13 nt, Human
auucauuuccugc

SEQ ID NO: 2346271 - RNA, 14 nt, Human
auucauuuccugcc

SEQ ID NO: 2346272 - RNA, 22 nt, Human
auucauuucaaagggagagaga

SEQ ID NO: 2346273 - RNA, 21 nt, Human
auucaugcuacugccaaccug

SEQ ID NO: 2346274 - RNA, 14 nt, Human
auucaugccuggcu

SEQ ID NO: 2346275 - RNA, 13 nt, Human
auucaugccuggc

SEQ ID NO: 2346276 - RNA, 16 nt, Human
auucaugcuacugcca

SEQ ID NO: 2346277 - RNA, 12 nt, Human
auuccucuggga

SEQ ID NO: 2346278 - RNA, 20 nt, Human
auuccucuacuaacaaucag

SEQ ID NO: 2346279 - RNA, 13 nt, Human
auuccucugggaa

SEQ ID NO: 2346280 - RNA, 22 nt, Human
auuccucugggaauguuacauu

SEQ ID NO: 2346281 - RNA, 20 nt, Human
auuccaaagaguagaauugc

SEQ ID NO: 2346282 - RNA, 13 nt, Human
auucauuuuuaau

SEQ ID NO: 2346283 - RNA, 19 nt, Human
auucauuugaguuauuuua

SEQ ID NO: 2346284 - RNA, 21 nt, Human
auucauuuuaacaucugagaa

SEQ ID NO: 2346285 - RNA, 19 nt, Human
auucauauuuacuucuuau

SEQ ID NO: 2346286 - RNA, 18 nt, Human
auucauauuuacuucuua

SEQ ID NO: 2346287 - RNA, 20 nt, Human
auucauauuuacuucuuaua

SEQ ID NO: 2346288 - RNA, 16 nt, Human
auucauauuuucuuuc

SEQ ID NO: 2346289 - RNA, 16 nt, Human
auucaucccaacuguc

SEQ ID NO: 2346290 - RNA, 20 nt, Human
auucauauuuucuuucaaaa

SEQ ID NO: 2346291 - RNA, 19 nt, Human
auucaucaaauggaagaca

SEQ ID NO: 2346292 - RNA, 15 nt, Human
auuaaauuuaauuag

SEQ ID NO: 2346293 - RNA, 20 nt, Human
auuaaauuuugaguucuaca

SEQ ID NO: 2346294 - RNA, 15 nt, Human
auuauguguguuuua

SEQ ID NO: 2346295 - RNA, 20 nt, Human
auuauguguguuuuaaaaug

SEQ ID NO: 2346296 - RNA, 21 nt, Human
auuauguguguuuuaaaauga

SEQ ID NO: 2346297 - RNA, 18 nt, Human
auuaaauucuugcaaagu

SEQ ID NO: 2346298 - RNA, 14 nt, Human
auuaaauucuugca

SEQ ID NO: 2346299 - RNA, 20 nt, Human
auuaaauucuugcaaaguau

SEQ ID NO: 2346300 - RNA, 18 nt, Human
auuaaauuuugaguucua

SEQ ID NO: 2346301 - RNA, 19 nt, Human
auucaauuuauucaagaaa

SEQ ID NO: 2346302 - RNA, 22 nt, Human
auucaauuguaaauugaaucag

SEQ ID NO: 2346303 - RNA, 21 nt, Human
auucaauuguaaauugaauca

SEQ ID NO: 2346304 - RNA, 13 nt, Human
auucacaaacuuu

SEQ ID NO: 2346305 - RNA, 14 nt, Human
auucacaaacuuuu

SEQ ID NO: 2346306 - RNA, 22 nt, Human
auucacaaacuuuuauacucuu

SEQ ID NO: 2346307 - RNA, 18 nt, Human
auucacaagacccaaaag

SEQ ID NO: 2346308 - RNA, 11 nt, Human
auuauguuaaa

SEQ ID NO: 2346309 - RNA, 23 nt, Human
auucaacuaaaaaaaaaaaagua

SEQ ID NO: 2346310 - RNA, 14 nt, Human
auucaacucagacu

SEQ ID NO: 2346311 - RNA, 14 nt, Human
auucaacuaaaaaa

SEQ ID NO: 2346312 - RNA, 13 nt, Human
auucaacuaaaaa

SEQ ID NO: 2346313 - RNA, 15 nt, Human
auucaacccuggaga

SEQ ID NO: 2346314 - RNA, 16 nt, Human
auucaacccuggagag

SEQ ID NO: 2346315 - RNA, 19 nt, Human
auucaagaaaaguaagccc

SEQ ID NO: 2346316 - RNA, 22 nt, Human
auucaagaaaacaacuucaaua

SEQ ID NO: 2346317 - RNA, 17 nt, Human
auucacaaacuuuuaua

SEQ ID NO: 2346318 - RNA, 20 nt, Human
auuguaaaaccugucaauga

SEQ ID NO: 2346319 - RNA, 17 nt, Human
auuguaaaacugaggca

SEQ ID NO: 2346320 - RNA, 21 nt, Human
auuguaaaaccugucaaugau

SEQ ID NO: 2346321 - RNA, 18 nt, Human
auugaugggauuugguca

SEQ ID NO: 2346322 - RNA, 19 nt, Human
auugaucggagccuccucu

SEQ ID NO: 2346323 - RNA, 13 nt, Human
auuguaaaauggu

SEQ ID NO: 2346324 - RNA, 20 nt, Human
auugaucauuuuccccccac

SEQ ID NO: 2346325 - RNA, 19 nt, Human
auugaucauuuucccccca

SEQ ID NO: 2346326 - RNA, 21 nt, Human
auugaucauuuuccccccacu

SEQ ID NO: 2346327 - RNA, 23 nt, Human
auugaucggagccuccucucuca

SEQ ID NO: 2346328 - RNA, 22 nt, Human
auugauccagaaagaaaacuug

SEQ ID NO: 2346329 - RNA, 18 nt, Human
auugauccagaaagaaaa

SEQ ID NO: 2346330 - RNA, 19 nt, Human
auugauccagaaagaaaac

SEQ ID NO: 2346331 - RNA, 16 nt, Human
auuguaaggaaugauu

SEQ ID NO: 2346332 - RNA, 18 nt, Human
auuguaagcaugcacaaa

SEQ ID NO: 2346333 - RNA, 23 nt, Human
auuguaaauugaaucaguauaaa

SEQ ID NO: 2346334 - RNA, 17 nt, Human
auuguaaauugaaucag

SEQ ID NO: 2346335 - RNA, 16 nt, Human
auuguaaauugaauca

SEQ ID NO: 2346336 - RNA, 15 nt, Human
auuguaaggaaugau

SEQ ID NO: 2346337 - RNA, 17 nt, Human
auuguaaaugugcuuuu

SEQ ID NO: 2346338 - RNA, 15 nt, Human
auuguaaaauagcuu

SEQ ID NO: 2346339 - RNA, 19 nt, Human
auuguaaaauagcuuguau

SEQ ID NO: 2346340 - RNA, 21 nt, Human
auuguaaaauagcuuguauag

SEQ ID NO: 2346341 - RNA, 22 nt, Human
auuguaaaauagcuuguauagu

SEQ ID NO: 2346342 - RNA, 16 nt, Human
auuguaaauauguuuu

SEQ ID NO: 2346343 - RNA, 15 nt, Human
auuguaaaugugcuu

SEQ ID NO: 2346344 - RNA, 14 nt, Human
auuguaaaugugcu

SEQ ID NO: 2346345 - RNA, 19 nt, Human
auuguacacaccuuauauu

SEQ ID NO: 2346346 - RNA, 12 nt, Human
auuguacacuuu

SEQ ID NO: 2346347 - RNA, 14 nt, Human
auuguacacuuuuu

SEQ ID NO: 2346348 - RNA, 14 nt, Human
auuguacagcuguu

SEQ ID NO: 2346349 - RNA, 16 nt, Human
auuguacagcuguuua

SEQ ID NO: 2346350 - RNA, 17 nt, Human
auuguacagcuguuuaa

SEQ ID NO: 2346351 - RNA, 13 nt, Human
auuguacaguuuu

SEQ ID NO: 2346352 - RNA, 20 nt, Human
auuguacagcuguuuaagau

SEQ ID NO: 2346353 - RNA, 14 nt, Human
auuguacaguuugu

SEQ ID NO: 2346354 - RNA, 16 nt, Human
auuguacaguuuguuu

SEQ ID NO: 2346355 - RNA, 17 nt, Human
auuguacaguuuguuua

SEQ ID NO: 2346356 - RNA, 21 nt, Human
auuguaauaaugcuaaagaaa

SEQ ID NO: 2346357 - RNA, 22 nt, Human
auuguuccaagacauugucaau

SEQ ID NO: 2346358 - RNA, 21 nt, Human
auuguacaguuuguuuacaca

SEQ ID NO: 2346359 - RNA, 18 nt, Human
auuguacaguuuguuuac

SEQ ID NO: 2346360 - RNA, 19 nt, Human
auuguacaguuuguuuaca

SEQ ID NO: 2346361 - RNA, 19 nt, Human
auuguucccagugacacuu

SEQ ID NO: 2346362 - RNA, 16 nt, Human
auuguucccagugaca

SEQ ID NO: 2346363 - RNA, 24 nt, Human
auuguuccagcaguuuucaaguca

SEQ ID NO: 2346364 - RNA, 19 nt, Human
auuguucuuaguuugcagu

SEQ ID NO: 2346365 - RNA, 13 nt, Human
auuguuccuguca

SEQ ID NO: 2346366 - RNA, 21 nt, Human
auuguucccagugacacuuca

SEQ ID NO: 2346367 - RNA, 21 nt, Human
auuguuuaaguguuguaaaua

SEQ ID NO: 2346368 - RNA, 20 nt, Human
auuguuuaaagcaacugucu

SEQ ID NO: 2346369 - RNA, 22 nt, Human
auuguuuaaagcaacugucuau

SEQ ID NO: 2346370 - RNA, 16 nt, Human
auuguuuaaagcaacu

SEQ ID NO: 2346371 - RNA, 19 nt, Human
auuguuuaaaaucauuucu

SEQ ID NO: 2346372 - RNA, 18 nt, Human
auuguuuauuuaucagug

SEQ ID NO: 2346373 - RNA, 17 nt, Human
auuguuuauuuaucagu

SEQ ID NO: 2346374 - RNA, 15 nt, Human
auuguuuauuuauca

SEQ ID NO: 2346375 - RNA, 14 nt, Human
auuguuuauucuuu

SEQ ID NO: 2346376 - RNA, 21 nt, Human
auuguuuauuuaucagugaca

SEQ ID NO: 2346377 - RNA, 19 nt, Human
auuguuuauuuaucaguga

SEQ ID NO: 2346378 - RNA, 19 nt, Human
auuguuucaaaauaaaaac

SEQ ID NO: 2346379 - RNA, 17 nt, Human
auuuauacuguauauau

SEQ ID NO: 2346380 - RNA, 14 nt, Human
auuuauacaaauua

SEQ ID NO: 2346381 - RNA, 20 nt, Human
auuuauacucuuuuuucaug

SEQ ID NO: 2346382 - RNA, 14 nt, Human
auuuauacuauuua

SEQ ID NO: 2346383 - RNA, 12 nt, Human
auuuauaguuug

SEQ ID NO: 2346384 - RNA, 14 nt, Human
auuuauaguuugua

SEQ ID NO: 2346385 - RNA, 13 nt, Human
auuuauauuuuug

SEQ ID NO: 2346386 - RNA, 18 nt, Human
auuuauauuuuuauuuua

SEQ ID NO: 2346387 - RNA, 13 nt, Human
auuuauauuucac

SEQ ID NO: 2346388 - RNA, 19 nt, Human
auuuauauuuuuaaaauau

SEQ ID NO: 2346389 - RNA, 15 nt, Human
auuuaucagugacag

SEQ ID NO: 2346390 - RNA, 14 nt, Human
auuuaucagugaca

SEQ ID NO: 2346391 - RNA, 16 nt, Human
auuuaucacacuucug

SEQ ID NO: 2346392 - RNA, 12 nt, Human
auuuaucaaauc

SEQ ID NO: 2346393 - RNA, 13 nt, Human
auuuaucaaauca

SEQ ID NO: 2346394 - RNA, 14 nt, Human
auuuaucaaaucag

SEQ ID NO: 2346395 - RNA, 17 nt, Human
auuuaucaaaucaguca

SEQ ID NO: 2346396 - RNA, 17 nt, Human
auuuaucaaucaguaua

SEQ ID NO: 2346397 - RNA, 18 nt, Human
auuuaucaaucaguauaa

SEQ ID NO: 2346398 - RNA, 15 nt, Human
auuucaagaccuucu

SEQ ID NO: 2346399 - RNA, 15 nt, Human
auuucaagagauuua

SEQ ID NO: 2346400 - RNA, 17 nt, Human
auuuaucagugacagag

SEQ ID NO: 2346401 - RNA, 21 nt, Human
auuucaagacauuaaaucuau

SEQ ID NO: 2346402 - RNA, 18 nt, Human
auuuaucagugacagagu

SEQ ID NO: 2346403 - RNA, 19 nt, Human
auuucaagagauuuaauua

SEQ ID NO: 2346404 - RNA, 20 nt, Human
auuucaagagauuuaauuaa

SEQ ID NO: 2346405 - RNA, 15 nt, Human
auuucagauuuguga

SEQ ID NO: 2346406 - RNA, 18 nt, Human
auuucagauucccagagc

SEQ ID NO: 2346407 - RNA, 16 nt, Human
auuucaucuauuucug

SEQ ID NO: 2346408 - RNA, 15 nt, Human
auuucaucuauuucu

SEQ ID NO: 2346409 - RNA, 14 nt, Human
auuucaucuauuuc

SEQ ID NO: 2346410 - RNA, 13 nt, Human
auuucaucuauuu

SEQ ID NO: 2346411 - RNA, 20 nt, Human
auuucaucauauuauacaga

SEQ ID NO: 2346412 - RNA, 18 nt, Human
auuucaucauauuauaca

SEQ ID NO: 2346413 - RNA, 22 nt, Human
auuucagagaggccuuuuggaa

SEQ ID NO: 2346414 - RNA, 18 nt, Human
auuucagacucccauucc

SEQ ID NO: 2346415 - RNA, 14 nt, Human
auuucaauucucaa

SEQ ID NO: 2346416 - RNA, 15 nt, Human
auuucaauucucaaa

SEQ ID NO: 2346417 - RNA, 23 nt, Human
auuucagacucccauuccugaag

SEQ ID NO: 2346418 - RNA, 16 nt, Human
auuucagagaggccuu

SEQ ID NO: 2346419 - RNA, 16 nt, Human
auuucaaguuccaagu

SEQ ID NO: 2346420 - RNA, 11 nt, Human
auuucaaguuc

SEQ ID NO: 2346421 - RNA, 23 nt, Human
auuucaaguuccaaguugcuaau

SEQ ID NO: 2346422 - RNA, 22 nt, Human
auuucaaguuccaaguugcuaa

SEQ ID NO: 2346423 - RNA, 17 nt, Human
auuuaauauagcuauuu

SEQ ID NO: 2346424 - RNA, 16 nt, Human
auuuaauauagcuauu

SEQ ID NO: 2346425 - RNA, 14 nt, Human
auuuaauauagcua

SEQ ID NO: 2346426 - RNA, 19 nt, Human
auuuaauauagcuauuuuu

SEQ ID NO: 2346427 - RNA, 13 nt, Human
auuuaauauuuau

SEQ ID NO: 2346428 - RNA, 14 nt, Human
auuuauaauguuug

SEQ ID NO: 2346429 - RNA, 15 nt, Human
auuuaauuagugcua

SEQ ID NO: 2346430 - RNA, 16 nt, Human
auuuaauuagugcuaa

SEQ ID NO: 2346431 - RNA, 18 nt, Human
auuuaauuagugcuaagu

SEQ ID NO: 2346432 - RNA, 18 nt, Human
auuuauacaaauuagaaa

SEQ ID NO: 2346433 - RNA, 23 nt, Human
auuuauaaucacuuuuuuccaca

SEQ ID NO: 2346434 - RNA, 13 nt, Human
auuuaauuaaaaa

SEQ ID NO: 2346435 - RNA, 19 nt, Human
auuuaauuaaucaugaaug

SEQ ID NO: 2346436 - RNA, 14 nt, Human
auuuaauguuuuca

SEQ ID NO: 2346437 - RNA, 16 nt, Human
auuuaauguagccaug

SEQ ID NO: 2346438 - RNA, 21 nt, Human
auuuaauggccggcuggaaau

SEQ ID NO: 2346439 - RNA, 14 nt, Human
auuuaauguagcca

SEQ ID NO: 2346440 - RNA, 18 nt, Human
auuuaaucuuuuuuaugu

SEQ ID NO: 2346441 - RNA, 22 nt, Human
auuuaaugauaaguaaaugcua

SEQ ID NO: 2346442 - RNA, 14 nt, Human
auuuaaugaaagac

SEQ ID NO: 2346443 - RNA, 15 nt, Human
auuuaauauuuugca

SEQ ID NO: 2346444 - RNA, 19 nt, Human
auuucaucuauuucugaga

SEQ ID NO: 2346445 - RNA, 18 nt, Human
auuucaucuauuucugag

SEQ ID NO: 2346446 - RNA, 11 nt, Human
auuucaucugc

SEQ ID NO: 2346447 - RNA, 14 nt, Human
auuucaucuauuuu

SEQ ID NO: 2346448 - RNA, 14 nt, Human
auuucaucugcucu

SEQ ID NO: 2346449 - RNA, 15 nt, Human
auuucaucugcucuc

SEQ ID NO: 2346450 - RNA, 16 nt, Human
auuucaucugcucucc

SEQ ID NO: 2346451 - RNA, 17 nt, Human
auuucaucugcucuccu

SEQ ID NO: 2346452 - RNA, 15 nt, Human
auuucuaugaaauau

SEQ ID NO: 2346453 - RNA, 18 nt, Human
auuucuaugaaauauuau

SEQ ID NO: 2346454 - RNA, 18 nt, Human
auuucuauuuuuguagaa

SEQ ID NO: 2346455 - RNA, 19 nt, Human
auuucucaacaaagcacag

SEQ ID NO: 2346456 - RNA, 20 nt, Human
auuucaucuauuucugagaa

SEQ ID NO: 2346457 - RNA, 12 nt, Human
auuucuauuuuu

SEQ ID NO: 2346458 - RNA, 22 nt, Human
auuucucaacaaagcacagugu

SEQ ID NO: 2346459 - RNA, 20 nt, Human
auuucucaacaaagcacagu

SEQ ID NO: 2346460 - RNA, 14 nt, Human
auuucucacugaga

SEQ ID NO: 2346461 - RNA, 20 nt, Human
auuucuaugaaauauuaugu

SEQ ID NO: 2346462 - RNA, 11 nt, Human
auuucucccag

SEQ ID NO: 2346463 - RNA, 18 nt, Human
auuucucagacuuuggaa

SEQ ID NO: 2346464 - RNA, 20 nt, Human
auuucuccuccaugggagaa

SEQ ID NO: 2346465 - RNA, 15 nt, Human
auuucuccauacgca

SEQ ID NO: 2346466 - RNA, 21 nt, Human
auuucucagacuuuggaaaau

SEQ ID NO: 2346467 - RNA, 16 nt, Human
auuucucagacuuugg

SEQ ID NO: 2346468 - RNA, 14 nt, Human
auuucucauguuuu

SEQ ID NO: 2346469 - RNA, 16 nt, Human
auuuauaguuuguaca

SEQ ID NO: 2346470 - RNA, 23 nt, Human
auuucuguguugccaagcuccaa

SEQ ID NO: 2346471 - RNA, 15 nt, Human
auuucuguguugcca

SEQ ID NO: 2346472 - RNA, 15 nt, Human
auuucuccuuugaua

SEQ ID NO: 2346473 - RNA, 11 nt, Human
auuucuguguu

SEQ ID NO: 2346474 - RNA, 16 nt, Human
auuucuguuuagauaa

SEQ ID NO: 2346475 - RNA, 14 nt, Human
auuucuguuuagau

SEQ ID NO: 2346476 - RNA, 19 nt, Human
auuucuccucccuuccuuu

SEQ ID NO: 2346477 - RNA, 12 nt, Human
auuucuccccag

SEQ ID NO: 2346478 - RNA, 12 nt, Human
auuucuccuccc

SEQ ID NO: 2346479 - RNA, 14 nt, Human
auuucuccucccuu

SEQ ID NO: 2346480 - RNA, 17 nt, Human
auuucuccucccuuccu

SEQ ID NO: 2346481 - RNA, 12 nt, Human
auuucuguuuag

SEQ ID NO: 2346482 - RNA, 12 nt, Human
uuuugcaugaaa

SEQ ID NO: 2346483 - RNA, 16 nt, Human
uuuugcauggcacuug

SEQ ID NO: 2346484 - RNA, 19 nt, Human
uuuugcauggcacuugcau

SEQ ID NO: 2346485 - RNA, 18 nt, Human
uuuugcauuuaaaacaga

SEQ ID NO: 2346486 - RNA, 22 nt, Human
uuuugcauggcacuugcaucug

SEQ ID NO: 2346487 - RNA, 13 nt, Human
uuuugcauucaaa

SEQ ID NO: 2346488 - RNA, 18 nt, Human
uuuugcaucauuguuuua

SEQ ID NO: 2346489 - RNA, 22 nt, Human
uuuugcaguagagucaucucca

SEQ ID NO: 2346490 - RNA, 14 nt, Human
uuuugcagcaguga

SEQ ID NO: 2346491 - RNA, 21 nt, Human
uuuugcagcccagacaaaugu

SEQ ID NO: 2346492 - RNA, 13 nt, Human
uuuugcaggagca

SEQ ID NO: 2346493 - RNA, 16 nt, Human
uuuugcaccccuccca

SEQ ID NO: 2346494 - RNA, 17 nt, Human
uuuugcaccccucccau

SEQ ID NO: 2346495 - RNA, 12 nt, Human
uuuugcacuuuu

SEQ ID NO: 2346496 - RNA, 15 nt, Human
uuuugccucuuuucu

SEQ ID NO: 2346497 - RNA, 13 nt, Human
uuuugcccuuuga

SEQ ID NO: 2346498 - RNA, 18 nt, Human
uuuugcccuucacagugu

SEQ ID NO: 2346499 - RNA, 15 nt, Human
uuuugccauuaaacu

SEQ ID NO: 2346500 - RNA, 23 nt, Human
uuuugccauguuggccaggcugg

SEQ ID NO: 2346501 - RNA, 19 nt, Human
uuuugcauuugaauaaagc

SEQ ID NO: 2346502 - RNA, 13 nt, Human
uuuugcauuuaug

SEQ ID NO: 2346503 - RNA, 15 nt, Human
uuuugcauucaaauu

SEQ ID NO: 2346504 - RNA, 15 nt, Human
uuuugccaacauugc

SEQ ID NO: 2346505 - RNA, 16 nt, Human
uuuugaugaguuguga

SEQ ID NO: 2346506 - RNA, 15 nt, Human
uuuugauguuugugg

SEQ ID NO: 2346507 - RNA, 23 nt, Human
uuuugaugaacaaaauuuccuaa

SEQ ID NO: 2346508 - RNA, 15 nt, Human
uuuugauuauuguau

SEQ ID NO: 2346509 - RNA, 12 nt, Human
uuuugauuaugu

SEQ ID NO: 2346510 - RNA, 22 nt, Human
uuuugauguuuguggccucaga

SEQ ID NO: 2346511 - RNA, 20 nt, Human
uuuugauguuuguggccuca

SEQ ID NO: 2346512 - RNA, 15 nt, Human
uuuugauuuaugcau

SEQ ID NO: 2346513 - RNA, 20 nt, Human
uuuugauuuguacugaaaaa

SEQ ID NO: 2346514 - RNA, 20 nt, Human
uuuugauuuaauguuuucag

SEQ ID NO: 2346515 - RNA, 18 nt, Human
uuuugauuauuguauuua

SEQ ID NO: 2346516 - RNA, 12 nt, Human
uuuugauugaag

SEQ ID NO: 2346517 - RNA, 13 nt, Human
uuuugcaaaauuu

SEQ ID NO: 2346518 - RNA, 21 nt, Human
uuuugauuuguacugaaaaau

SEQ ID NO: 2346519 - RNA, 21 nt, Human
uuuugcaaccucgcuggacuc

SEQ ID NO: 2346520 - RNA, 17 nt, Human
uuuugcaaccucgcugg

SEQ ID NO: 2346521 - RNA, 22 nt, Human
uuuugcaagugaagguuuacaa

SEQ ID NO: 2346522 - RNA, 23 nt, Human
uuuugcaagugaagguuuacaau

SEQ ID NO: 2346523 - RNA, 10 nt, Human
uuuugcacag

SEQ ID NO: 2346524 - RNA, 17 nt, Human
uuuugcaauggcuauau

SEQ ID NO: 2346525 - RNA, 20 nt, Human
uuuugcacauguuuccucua

SEQ ID NO: 2346526 - RNA, 17 nt, Human
uuuugcaccccaugcug

SEQ ID NO: 2346527 - RNA, 18 nt, Human
uuuugcaccccaugcugu

SEQ ID NO: 2346528 - RNA, 19 nt, Human
uuuugcaccccaugcuguu

SEQ ID NO: 2346529 - RNA, 21 nt, Human
uuuugcaccccaugcuguuga

SEQ ID NO: 2346530 - RNA, 13 nt, Human
uuuugcaccccuc

SEQ ID NO: 2346531 - RNA, 17 nt, Human
uuuugagcaacuuucuu

SEQ ID NO: 2346532 - RNA, 15 nt, Human
uuuugaggagcccca

SEQ ID NO: 2346533 - RNA, 21 nt, Human
uuuugagcugaaaugcugcau

SEQ ID NO: 2346534 - RNA, 22 nt, Human
uuuugagcugaaaugcugcauu

SEQ ID NO: 2346535 - RNA, 17 nt, Human
uuuugagacagaaucuc

SEQ ID NO: 2346536 - RNA, 11 nt, Human
uuuugagaaag

SEQ ID NO: 2346537 - RNA, 16 nt, Human
uuuugagcaacuuucu

SEQ ID NO: 2346538 - RNA, 18 nt, Human
uuuugaguggaugauguu

SEQ ID NO: 2346539 - RNA, 14 nt, Human
uuuugaggcuuuca

SEQ ID NO: 2346540 - RNA, 17 nt, Human
uuuugagugccuuacac

SEQ ID NO: 2346541 - RNA, 17 nt, Human
uuuugauccaagcuggu

SEQ ID NO: 2346542 - RNA, 15 nt, Human
uuuugauagcuuuau

SEQ ID NO: 2346543 - RNA, 15 nt, Human
uuuugauagcaaagc

SEQ ID NO: 2346544 - RNA, 18 nt, Human
uuuugauaaaguaguaaa

SEQ ID NO: 2346545 - RNA, 22 nt, Human
uuuugauaaaguaguaaaaauu

SEQ ID NO: 2346546 - RNA, 14 nt, Human
uuuugaguucuaca

SEQ ID NO: 2346547 - RNA, 20 nt, Human
uuuugauaaaguuucucaga

SEQ ID NO: 2346548 - RNA, 23 nt, Human
uuuugauaaaguaguaaaaauua

SEQ ID NO: 2346549 - RNA, 19 nt, Human
uuuugauaaaguuucucag

SEQ ID NO: 2346550 - RNA, 21 nt, Human
uuuugauaaaguuucucagau

SEQ ID NO: 2346551 - RNA, 15 nt, Human
auuaaagcauuuacu

SEQ ID NO: 2346552 - RNA, 15 nt, Human
auuaaagacuccagu

SEQ ID NO: 2346553 - RNA, 13 nt, Human
auuaaagacagag

SEQ ID NO: 2346554 - RNA, 20 nt, Human
auuaaagcauuuacuuugaa

SEQ ID NO: 2346555 - RNA, 24 nt, Human
auuaagauggauucucagauauuu

SEQ ID NO: 2346556 - RNA, 20 nt, Human
auuaagccacuuaaaauguu

SEQ ID NO: 2346557 - RNA, 17 nt, Human
auuaagccacuuaaaau

SEQ ID NO: 2346558 - RNA, 16 nt, Human
auuaagauuuccaagu

SEQ ID NO: 2346559 - RNA, 17 nt, Human
auuaagauugaggccug

SEQ ID NO: 2346560 - RNA, 20 nt, Human
auuaagauugaggccugccc

SEQ ID NO: 2346561 - RNA, 13 nt, Human
auuaagauuucca

SEQ ID NO: 2346562 - RNA, 22 nt, Human
uuuuuacccauauccccucucc

SEQ ID NO: 2346563 - RNA, 16 nt, Human
uuuuuacuacaguugu

SEQ ID NO: 2346564 - RNA, 22 nt, Human
uuuuuaccuaccacagugucug

SEQ ID NO: 2346565 - RNA, 19 nt, Human
uuuuuaccguuucuucccu

SEQ ID NO: 2346566 - RNA, 20 nt, Human
uuuuuagaaagcauuugaau

SEQ ID NO: 2346567 - RNA, 13 nt, Human
uuuuuacugccac

SEQ ID NO: 2346568 - RNA, 14 nt, Human
uuuuuacugaacaa

SEQ ID NO: 2346569 - RNA, 12 nt, Human
uuuuuacugcca

SEQ ID NO: 2346570 - RNA, 22 nt, Human
uuuuuagacagagucucacugu

SEQ ID NO: 2346571 - RNA, 21 nt, Human
uuuuuagaucaaauacuuuaa

SEQ ID NO: 2346572 - RNA, 14 nt, Human
uuuuuagaucaaau

SEQ ID NO: 2346573 - RNA, 15 nt, Human
uuuuuagaucaaaua

SEQ ID NO: 2346574 - RNA, 11 nt, Human
uuuuuacuaau

SEQ ID NO: 2346575 - RNA, 18 nt, Human
uuuuuacccauauccccu

SEQ ID NO: 2346576 - RNA, 19 nt, Human
uuuuguuugguauuguauu

SEQ ID NO: 2346577 - RNA, 22 nt, Human
uuuuguuugguauuguauuuau

SEQ ID NO: 2346578 - RNA, 14 nt, Human
uuuuguuugguauu

SEQ ID NO: 2346579 - RNA, 23 nt, Human
uuuuuaucuccccuucacaugca

SEQ ID NO: 2346580 - RNA, 17 nt, Human
uuuuuaucuugggacug

SEQ ID NO: 2346581 - RNA, 17 nt, Human
uuuuuaucaugcauguc

SEQ ID NO: 2346582 - RNA, 13 nt, Human
uuuuuauacacau

SEQ ID NO: 2346583 - RNA, 12 nt, Human
uuuuuauggcuu

SEQ ID NO: 2346584 - RNA, 12 nt, Human
uuuuuaucaugu

SEQ ID NO: 2346585 - RNA, 20 nt, Human
uuuuuaucgucacugcuuaa

SEQ ID NO: 2346586 - RNA, 23 nt, Human
uuuuuauacauaaacaagaccac

SEQ ID NO: 2346587 - RNA, 19 nt, Human
uuuuuauauuugaaauauu

SEQ ID NO: 2346588 - RNA, 12 nt, Human
uuuuguuucaua

SEQ ID NO: 2346589 - RNA, 19 nt, Human
uuuuguuucauauugaugu

SEQ ID NO: 2346590 - RNA, 15 nt, Human
uuuuguuucuuccaa

SEQ ID NO: 2346591 - RNA, 13 nt, Human
uuuuguuugcuau

SEQ ID NO: 2346592 - RNA, 22 nt, Human
uuuuguuugcuaucuuaauuuu

SEQ ID NO: 2346593 - RNA, 21 nt, Human
uuuuguuccacaaguuaaaua

SEQ ID NO: 2346594 - RNA, 15 nt, Human
uuuuguuccacaagu

SEQ ID NO: 2346595 - RNA, 16 nt, Human
uuuugugauuuagaac

SEQ ID NO: 2346596 - RNA, 16 nt, Human
uuuuguucaaagccag

SEQ ID NO: 2346597 - RNA, 13 nt, Human
uuuugcuguagaa

SEQ ID NO: 2346598 - RNA, 14 nt, Human
uuuugcuguagaag

SEQ ID NO: 2346599 - RNA, 21 nt, Human
uuuugugaugucccaacuugu

SEQ ID NO: 2346600 - RNA, 13 nt, Human
uuuugcuguauau

SEQ ID NO: 2346601 - RNA, 10 nt, Human
uuuugcuguu

SEQ ID NO: 2346602 - RNA, 12 nt, Human
uuuugcuguaua

SEQ ID NO: 2346603 - RNA, 21 nt, Human
uuuugcuauuagacuguagga

SEQ ID NO: 2346604 - RNA, 17 nt, Human
uuuugcuauuguaaaua

SEQ ID NO: 2346605 - RNA, 13 nt, Human
uuuugccuucauu

SEQ ID NO: 2346606 - RNA, 17 nt, Human
uuuugccuucauuaccu

SEQ ID NO: 2346607 - RNA, 13 nt, Human
uuuugcuggaaua

SEQ ID NO: 2346608 - RNA, 20 nt, Human
uuuugugcauuaucuagaua

SEQ ID NO: 2346609 - RNA, 17 nt, Human
uuuugugcauuaucuag

SEQ ID NO: 2346610 - RNA, 18 nt, Human
uuuuguuaucagucaaua

SEQ ID NO: 2346611 - RNA, 19 nt, Human
uuuugugauuuagaacugu

SEQ ID NO: 2346612 - RNA, 15 nt, Human
uuuuuguguauuugu

SEQ ID NO: 2346613 - RNA, 14 nt, Human
uuuuuguacuguaa

SEQ ID NO: 2346614 - RNA, 22 nt, Human
uuuuuguguuuuguucuuuaaa

SEQ ID NO: 2346615 - RNA, 13 nt, Human
uuuuugucuuuuc

SEQ ID NO: 2346616 - RNA, 20 nt, Human
uuuuugugaaaaugucaaag

SEQ ID NO: 2346617 - RNA, 12 nt, Human
uuuuugucauca

SEQ ID NO: 2346618 - RNA, 21 nt, Human
auuaaguaaugauaacuggaa

SEQ ID NO: 2346619 - RNA, 23 nt, Human
auuaaguaaugauaacuggaaac

SEQ ID NO: 2346620 - RNA, 19 nt, Human
uuuuuguagagccaggguc

SEQ ID NO: 2346621 - RNA, 20 nt, Human
uuuuuguagagccagggucu

SEQ ID NO: 2346622 - RNA, 19 nt, Human
uuuuugugaaaagcuccau

SEQ ID NO: 2346623 - RNA, 23 nt, Human
uuuuuauugaaucuauuuaagua

SEQ ID NO: 2346624 - RNA, 13 nt, Human
uuuuuauucauaa

SEQ ID NO: 2346625 - RNA, 14 nt, Human
uuuuuauuauuugu

SEQ ID NO: 2346626 - RNA, 13 nt, Human
uuuuuauuauuug

SEQ ID NO: 2346627 - RNA, 13 nt, Human
uuuuuguaauuua

SEQ ID NO: 2346628 - RNA, 18 nt, Human
uuuuuguacaguuugcug

SEQ ID NO: 2346629 - RNA, 16 nt, Human
uuuuuguaccugguga

SEQ ID NO: 2346630 - RNA, 12 nt, Human
uuuuuguacugu

SEQ ID NO: 2346631 - RNA, 14 nt, Human
uuuuuaucuuuaua

SEQ ID NO: 2346632 - RNA, 22 nt, Human
uuuuuauggcuuuugugcauua

SEQ ID NO: 2346633 - RNA, 21 nt, Human
uuuuuauggcuuuugugcauu

SEQ ID NO: 2346634 - RNA, 20 nt, Human
uuuuuauggcuuuugugcau

SEQ ID NO: 2346635 - RNA, 16 nt, Human
auuaauaaucuuauua

SEQ ID NO: 2346636 - RNA, 13 nt, Human
auuaauaaucuua

SEQ ID NO: 2346637 - RNA, 12 nt, Human
auuaauaaucuu

SEQ ID NO: 2346638 - RNA, 15 nt, Human
auuaauaauaaauuc

SEQ ID NO: 2346639 - RNA, 15 nt, Human
auuacagugggugcc

SEQ ID NO: 2346640 - RNA, 13 nt, Human
auuaauagcuuuu

SEQ ID NO: 2346641 - RNA, 22 nt, Human
auuacaucuuucacauuggcua

SEQ ID NO: 2346642 - RNA, 18 nt, Human
auuacaucuuucacauug

SEQ ID NO: 2346643 - RNA, 16 nt, Human
auuacaucuuucacau

SEQ ID NO: 2346644 - RNA, 21 nt, Human
auuacauauuugcauauguau

SEQ ID NO: 2346645 - RNA, 15 nt, Human
auuacaucuuucaca

SEQ ID NO: 2346646 - RNA, 18 nt, Human
auuacauaaucuguacaa

SEQ ID NO: 2346647 - RNA, 21 nt, Human
auuacauaaucuguacaauga

SEQ ID NO: 2346648 - RNA, 14 nt, Human
auuaaguuguuaau

SEQ ID NO: 2346649 - RNA, 16 nt, Human
auuaaguacuauguau

SEQ ID NO: 2346650 - RNA, 14 nt, Human
auuaaguacuaugu

SEQ ID NO: 2346651 - RNA, 19 nt, Human
auuaaguuguuaauaaaag

SEQ ID NO: 2346652 - RNA, 20 nt, Human
auuaaguuguuaauaaaagu

SEQ ID NO: 2346653 - RNA, 13 nt, Human
auuaaguuguuaa

SEQ ID NO: 2346654 - RNA, 16 nt, Human
auuaauaaaaaaugga

SEQ ID NO: 2346655 - RNA, 22 nt, Human
auuaauaaaaaauggaaagaau

SEQ ID NO: 2346656 - RNA, 19 nt, Human
auuaauaaaaaauggaaag

SEQ ID NO: 2346657 - RNA, 15 nt, Human
auuacauuuccaaau

SEQ ID NO: 2346658 - RNA, 16 nt, Human
auuacauguaaaacau

SEQ ID NO: 2346659 - RNA, 19 nt, Human
auuacauguaaaacauuau

SEQ ID NO: 2346660 - RNA, 17 nt, Human
auuacauuuguauaaaa

SEQ ID NO: 2346661 - RNA, 18 nt, Human
auuacauuuguauaaaau

SEQ ID NO: 2346662 - RNA, 20 nt, Human
auuacauuuguauaaaauaa

SEQ ID NO: 2346663 - RNA, 17 nt, Human
auuacauuuccaaauga

SEQ ID NO: 2346664 - RNA, 20 nt, Human
auuaccaugagaagagggcc

SEQ ID NO: 2346665 - RNA, 18 nt, Human
auuacauuuccaaaugaa

SEQ ID NO: 2346666 - RNA, 12 nt, Human
auuaccagggac

SEQ ID NO: 2346667 - RNA, 15 nt, Human
auuaccauggagaca

SEQ ID NO: 2346668 - RNA, 13 nt, Human
auuaccauggaga

SEQ ID NO: 2346669 - RNA, 13 nt, Human
auuacccaagcaa

SEQ ID NO: 2346670 - RNA, 22 nt, Human
auuacccccucauuguuuauua

SEQ ID NO: 2346671 - RNA, 15 nt, Human
auuacccaagcaaaa

SEQ ID NO: 2346672 - RNA, 13 nt, Human
auuacccccuccu

SEQ ID NO: 2346673 - RNA, 19 nt, Human
auuacccccuccuucagac

SEQ ID NO: 2346674 - RNA, 18 nt, Human
auuacccccuccuucaga

SEQ ID NO: 2346675 - RNA, 16 nt, Human
auuaccgcguuguaaa

SEQ ID NO: 2346676 - RNA, 17 nt, Human
auuaccgcguuguaaaa

SEQ ID NO: 2346677 - RNA, 18 nt, Human
auuaccgcguuguaaaau

SEQ ID NO: 2346678 - RNA, 21 nt, Human
auuacccccuccuucagacac

SEQ ID NO: 2346679 - RNA, 20 nt, Human
auuacccccuccuucagaca

SEQ ID NO: 2346680 - RNA, 20 nt, Human
auuaccuuuuuugauaaagu

SEQ ID NO: 2346681 - RNA, 15 nt, Human
auuacuacaaaauuu

SEQ ID NO: 2346682 - RNA, 20 nt, Human
auuacuaaggaguaaucugu

SEQ ID NO: 2346683 - RNA, 20 nt, Human
auuacgugagccagguaaug

SEQ ID NO: 2346684 - RNA, 13 nt, Human
auuacgugagcca

SEQ ID NO: 2346685 - RNA, 14 nt, Human
auuacgugagccag

SEQ ID NO: 2346686 - RNA, 16 nt, Human
auuacgugagccaggu

SEQ ID NO: 2346687 - RNA, 21 nt, Human
auuacuacaaaauuugaaauu

SEQ ID NO: 2346688 - RNA, 20 nt, Human
auuacuacaaaauuugaaau

SEQ ID NO: 2346689 - RNA, 13 nt, Human
auuacuuagagga

SEQ ID NO: 2346690 - RNA, 18 nt, Human
auuacuaugacugcuccc

SEQ ID NO: 2346691 - RNA, 22 nt, Human
auuacuguuugucuucucccca

SEQ ID NO: 2346692 - RNA, 23 nt, Human
auuacuguuugucuucuccccag

SEQ ID NO: 2346693 - RNA, 15 nt, Human
auuacuuaucaucca

SEQ ID NO: 2346694 - RNA, 15 nt, Human
auuacuuauuuuuga

SEQ ID NO: 2346695 - RNA, 23 nt, Human
auuacuuaucauccacauuguuu

SEQ ID NO: 2346696 - RNA, 19 nt, Human
auuacuuauuuuugacagu

SEQ ID NO: 2346697 - RNA, 18 nt, Human
auuacuuauuuuugacag

SEQ ID NO: 2346698 - RNA, 17 nt, Human
auuacuuauuuuugaca

SEQ ID NO: 2346699 - RNA, 16 nt, Human
auuacuuauuuuugac

SEQ ID NO: 2346700 - RNA, 23 nt, Human
auuagucauucaauaaauuguaa

SEQ ID NO: 2346701 - RNA, 13 nt, Human
auuaguccuugcu

SEQ ID NO: 2346702 - RNA, 14 nt, Human
auuaguccuugcuu

SEQ ID NO: 2346703 - RNA, 23 nt, Human
auuaguauuuauuuaauguuaug

SEQ ID NO: 2346704 - RNA, 18 nt, Human
auuaguauuuauuuaaug

SEQ ID NO: 2346705 - RNA, 19 nt, Human
auuacuuaucauccacauu

SEQ ID NO: 2346706 - RNA, 15 nt, Human
auuagugcuaagugu

SEQ ID NO: 2346707 - RNA, 23 nt, Human
auuauagugauguaaucuugaau

SEQ ID NO: 2346708 - RNA, 13 nt, Human
auuagugcuaagu

SEQ ID NO: 2346709 - RNA, 13 nt, Human
auuauauauauau

SEQ ID NO: 2346710 - RNA, 20 nt, Human
auguucagauugcuuugauu

SEQ ID NO: 2346711 - RNA, 22 nt, Human
auguuagagguuuuaaagugau

SEQ ID NO: 2346712 - RNA, 23 nt, Human
auguucagaagguugcucuagau

SEQ ID NO: 2346713 - RNA, 16 nt, Human
auguuagggugcucug

SEQ ID NO: 2346714 - RNA, 19 nt, Human
auguuaggaaaauuucaca

SEQ ID NO: 2346715 - RNA, 22 nt, Human
auguucacuuuugacaaaggca

SEQ ID NO: 2346716 - RNA, 20 nt, Human
auguucacuuuugacaaagg

SEQ ID NO: 2346717 - RNA, 15 nt, Human
auguuagcaaagagu

SEQ ID NO: 2346718 - RNA, 16 nt, Human
auguuagagguuuuaa

SEQ ID NO: 2346719 - RNA, 21 nt, Human
auguuagagguuuuaaaguga

SEQ ID NO: 2346720 - RNA, 18 nt, Human
auguuaggaaaauuucac

SEQ ID NO: 2346721 - RNA, 21 nt, Human
auguuacugaucaugcauugu

SEQ ID NO: 2346722 - RNA, 20 nt, Human
auguuacugaucaugcauug

SEQ ID NO: 2346723 - RNA, 19 nt, Human
auguuacugaucaugcauu

SEQ ID NO: 2346724 - RNA, 18 nt, Human
auguuacugaucaugcau

SEQ ID NO: 2346725 - RNA, 22 nt, Human
auguuacugaucaugcauuguu

SEQ ID NO: 2346726 - RNA, 23 nt, Human
auguuagaggaucccucucugga

SEQ ID NO: 2346727 - RNA, 22 nt, Human
auguuaauucagcacugauuuc

SEQ ID NO: 2346728 - RNA, 23 nt, Human
auguuaauucagcacugauuuca

SEQ ID NO: 2346729 - RNA, 17 nt, Human
auguuacuacaugcacu

SEQ ID NO: 2346730 - RNA, 16 nt, Human
auguuacugaucaugc

SEQ ID NO: 2346731 - RNA, 13 nt, Human
auguuacugauca

SEQ ID NO: 2346732 - RNA, 14 nt, Human
auguuacugaccag

SEQ ID NO: 2346733 - RNA, 13 nt, Human
auguuacugacca

SEQ ID NO: 2346734 - RNA, 13 nt, Human
auguuaauuucau

SEQ ID NO: 2346735 - RNA, 15 nt, Human
auguuaaguuacuuc

SEQ ID NO: 2346736 - RNA, 23 nt, Human
auguuaaggaaacucuuaucuca

SEQ ID NO: 2346737 - RNA, 17 nt, Human
auguuaaguuacuucac

SEQ ID NO: 2346738 - RNA, 23 nt, Human
auguuaaguuacuucacuuuaau

SEQ ID NO: 2346739 - RNA, 20 nt, Human
auguuaagggaagaauucca

SEQ ID NO: 2346740 - RNA, 18 nt, Human
auguuaaggaaacucuua

SEQ ID NO: 2346741 - RNA, 19 nt, Human
auguuaaggaaacucuuau

SEQ ID NO: 2346742 - RNA, 14 nt, Human
auguguugaaaaaa

SEQ ID NO: 2346743 - RNA, 13 nt, Human
auguguugugaua

SEQ ID NO: 2346744 - RNA, 17 nt, Human
auguguuuacuuuaugu

SEQ ID NO: 2346745 - RNA, 14 nt, Human
auguguugugauag

SEQ ID NO: 2346746 - RNA, 15 nt, Human
auguuaaaauguauu

SEQ ID NO: 2346747 - RNA, 14 nt, Human
auguuaaaauguau

SEQ ID NO: 2346748 - RNA, 21 nt, Human
auguuaaacuagcauaucugc

SEQ ID NO: 2346749 - RNA, 23 nt, Human
auguuaaacuagcauaucugccu

SEQ ID NO: 2346750 - RNA, 13 nt, Human
auguuaagcucuu

SEQ ID NO: 2346751 - RNA, 15 nt, Human
auguuaagcucuuua

SEQ ID NO: 2346752 - RNA, 13 nt, Human
auguuaaggaaac

SEQ ID NO: 2346753 - RNA, 17 nt, Human
auguuaaggaaacucuu

SEQ ID NO: 2346754 - RNA, 24 nt, Human
auguuaaacuagcauaucugccuu

SEQ ID NO: 2346755 - RNA, 15 nt, Human
auguuaaacuagcau

SEQ ID NO: 2346756 - RNA, 19 nt, Human
auguuaaacuagcauaucu

SEQ ID NO: 2346757 - RNA, 20 nt, Human
auguugcccaggcaggucuu

SEQ ID NO: 2346758 - RNA, 20 nt, Human
auguugcccuguugcugccu

SEQ ID NO: 2346759 - RNA, 14 nt, Human
uuuuagaaaacagc

SEQ ID NO: 2346760 - RNA, 19 nt, Human
uuuuacuuuuauaauaaaa

SEQ ID NO: 2346761 - RNA, 15 nt, Human
uuuuacuuuuaaaug

SEQ ID NO: 2346762 - RNA, 12 nt, Human
uuuuacuuuuau

SEQ ID NO: 2346763 - RNA, 20 nt, Human
uuuuacuuuuaaacugugua

SEQ ID NO: 2346764 - RNA, 18 nt, Human
uuuuacuuuuaaacugug

SEQ ID NO: 2346765 - RNA, 17 nt, Human
uuuuacuuuuaaacugu

SEQ ID NO: 2346766 - RNA, 21 nt, Human
uuuuagcugaugaacuuauuc

SEQ ID NO: 2346767 - RNA, 22 nt, Human
uuuuagcugguggcaauaaaua

SEQ ID NO: 2346768 - RNA, 15 nt, Human
uuuuaggaaaugaau

SEQ ID NO: 2346769 - RNA, 14 nt, Human
uuuuagaaagcauu

SEQ ID NO: 2346770 - RNA, 16 nt, Human
uuuuagaaagcauuug

SEQ ID NO: 2346771 - RNA, 18 nt, Human
uuuuagaaagcauuugaa

SEQ ID NO: 2346772 - RNA, 19 nt, Human
uuuuagaaagcauuugaau

SEQ ID NO: 2346773 - RNA, 20 nt, Human
uuuuagaaagcauuugaaug

SEQ ID NO: 2346774 - RNA, 21 nt, Human
uuuuagaaagcauuugaaugc

SEQ ID NO: 2346775 - RNA, 22 nt, Human
uuuuagaaagcauuugaaugca

SEQ ID NO: 2346776 - RNA, 23 nt, Human
uuuuagaaagcauuugaaugcau

SEQ ID NO: 2346777 - RNA, 17 nt, Human
auguugcccaggcaggu

SEQ ID NO: 2346778 - RNA, 16 nt, Human
auguugcccaggcagg

SEQ ID NO: 2346779 - RNA, 22 nt, Human
auguugccaguuuaaucauugc

SEQ ID NO: 2346780 - RNA, 12 nt, Human
auguugcccagg

SEQ ID NO: 2346781 - RNA, 22 nt, Human
auguucaguguaauuucuuugc

SEQ ID NO: 2346782 - RNA, 18 nt, Human
auguucaguguaauuucu

SEQ ID NO: 2346783 - RNA, 21 nt, Human
auguucaguguaauuucuuug

SEQ ID NO: 2346784 - RNA, 15 nt, Human
auguugcauagaaua

SEQ ID NO: 2346785 - RNA, 17 nt, Human
auguugcauagaauaaa

SEQ ID NO: 2346786 - RNA, 18 nt, Human
auguugcauagaauaaaa

SEQ ID NO: 2346787 - RNA, 18 nt, Human
auguucaucaaugaauga

SEQ ID NO: 2346788 - RNA, 16 nt, Human
auguucagcacugucc

SEQ ID NO: 2346789 - RNA, 19 nt, Human
auguucagcacugucccuu

SEQ ID NO: 2346790 - RNA, 22 nt, Human
auguucagcacugucccuugcc

SEQ ID NO: 2346791 - RNA, 14 nt, Human
auguucaguguaau

SEQ ID NO: 2346792 - RNA, 16 nt, Human
auguucaguguaauuu

SEQ ID NO: 2346793 - RNA, 23 nt, Human
auguggcaauaaauuuuuuuuaa

SEQ ID NO: 2346794 - RNA, 18 nt, Human
auguggcaaggaaaaaca

SEQ ID NO: 2346795 - RNA, 18 nt, Human
auguggccccugaacaag

SEQ ID NO: 2346796 - RNA, 24 nt, Human
auguggaguucaucuugaauugua

SEQ ID NO: 2346797 - RNA, 20 nt, Human
augugcuacugauuguuuca

SEQ ID NO: 2346798 - RNA, 19 nt, Human
auguggagaaacuguaguc

SEQ ID NO: 2346799 - RNA, 16 nt, Human
auguggaguggggcag

SEQ ID NO: 2346800 - RNA, 20 nt, Human
auguggaguucaucuugaau

SEQ ID NO: 2346801 - RNA, 14 nt, Human
augugcuacugauu

SEQ ID NO: 2346802 - RNA, 15 nt, Human
auguggaauauaaag

SEQ ID NO: 2346803 - RNA, 17 nt, Human
auguggaauauaaagau

SEQ ID NO: 2346804 - RNA, 23 nt, Human
auguggaagugugggucugugug

SEQ ID NO: 2346805 - RNA, 22 nt, Human
auguggaagugugggucugugu

SEQ ID NO: 2346806 - RNA, 13 nt, Human
auguggaagugug

SEQ ID NO: 2346807 - RNA, 16 nt, Human
auguggaagugugggu

SEQ ID NO: 2346808 - RNA, 15 nt, Human
auguggaaguguggg

SEQ ID NO: 2346809 - RNA, 21 nt, Human
auguguguguauguuugcaca

SEQ ID NO: 2346810 - RNA, 15 nt, Human
auguguguguauguu

SEQ ID NO: 2346811 - RNA, 18 nt, Human
auguguguguguugugug

SEQ ID NO: 2346812 - RNA, 23 nt, Human
auguguguuuuaaaaugagaaau

SEQ ID NO: 2346813 - RNA, 13 nt, Human
auguguguguaug

SEQ ID NO: 2346814 - RNA, 12 nt, Human
auguguguguau

SEQ ID NO: 2346815 - RNA, 15 nt, Human
augugugugcucagg

SEQ ID NO: 2346816 - RNA, 22 nt, Human
augugugugguuuuuuuucuaa

SEQ ID NO: 2346817 - RNA, 10 nt, Human
augugugugu

SEQ ID NO: 2346818 - RNA, 21 nt, Human
auguguguguaugcuacuaca

SEQ ID NO: 2346819 - RNA, 19 nt, Human
auguguguguaugcuacua

SEQ ID NO: 2346820 - RNA, 16 nt, Human
auguguguguaugcua

SEQ ID NO: 2346821 - RNA, 15 nt, Human
auguguguguaugcu

SEQ ID NO: 2346822 - RNA, 12 nt, Human
augugugugugc

SEQ ID NO: 2346823 - RNA, 19 nt, Human
auguggccuaaaaaugcaa

SEQ ID NO: 2346824 - RNA, 19 nt, Human
auguggccuguggccugug

SEQ ID NO: 2346825 - RNA, 20 nt, Human
auguggcccuggccugcugg

SEQ ID NO: 2346826 - RNA, 19 nt, Human
auguggcccuggccugcug

SEQ ID NO: 2346827 - RNA, 16 nt, Human
auguggcccuggccug

SEQ ID NO: 2346828 - RNA, 15 nt, Human
auguggcccuggccu

SEQ ID NO: 2346829 - RNA, 14 nt, Human
auguggcccuggcc

SEQ ID NO: 2346830 - RNA, 13 nt, Human
auguggcccuggc

SEQ ID NO: 2346831 - RNA, 22 nt, Human
auguggccccugaacaagaauu

SEQ ID NO: 2346832 - RNA, 20 nt, Human
auguggccccugaacaagaa

SEQ ID NO: 2346833 - RNA, 22 nt, Human
auguggcuguaucuuguuuuuc

SEQ ID NO: 2346834 - RNA, 13 nt, Human
auguggcugcccc

SEQ ID NO: 2346835 - RNA, 19 nt, Human
augugugugcaagugugug

SEQ ID NO: 2346836 - RNA, 16 nt, Human
augugugugcaagugu

SEQ ID NO: 2346837 - RNA, 11 nt, Human
augugugugca

SEQ ID NO: 2346838 - RNA, 15 nt, Human
auguggcugcagcag

SEQ ID NO: 2346839 - RNA, 17 nt, Human
auguggcugcagcagcg

SEQ ID NO: 2346840 - RNA, 13 nt, Human
auguggcuggaag

SEQ ID NO: 2346841 - RNA, 14 nt, Human
auguggcuggaaga

SEQ ID NO: 2346842 - RNA, 20 nt, Human
auguggcuggaagauccugc

SEQ ID NO: 2346843 - RNA, 20 nt, Human
augugcgugugugcaagugu

SEQ ID NO: 2346844 - RNA, 18 nt, Human
augugcgugugugcaagu

SEQ ID NO: 2346845 - RNA, 15 nt, Human
augugcgugugugca

SEQ ID NO: 2346846 - RNA, 14 nt, Human
augugcgugugugc

SEQ ID NO: 2346847 - RNA, 19 nt, Human
augugcuaguaauuggaaa

SEQ ID NO: 2346848 - RNA, 21 nt, Human
augugccguguuauuguauua

SEQ ID NO: 2346849 - RNA, 15 nt, Human
augugccugauccag

SEQ ID NO: 2346850 - RNA, 20 nt, Human
augugccugauccagccucu

SEQ ID NO: 2346851 - RNA, 14 nt, Human
augugccugggugg

SEQ ID NO: 2346852 - RNA, 12 nt, Human
augugcccccag

SEQ ID NO: 2346853 - RNA, 14 nt, Human
augugcccccagac

SEQ ID NO: 2346854 - RNA, 18 nt, Human
augugccauuuuaaaaaa

SEQ ID NO: 2346855 - RNA, 22 nt, Human
augugccauuuuaaaaaaaaag

SEQ ID NO: 2346856 - RNA, 17 nt, Human
augugccgaaugugcag

SEQ ID NO: 2346857 - RNA, 18 nt, Human
augugccgaaugugcagg

SEQ ID NO: 2346858 - RNA, 22 nt, Human
augugccagguuuuuggucuga

SEQ ID NO: 2346859 - RNA, 16 nt, Human
uuuuaauaauguuuca

SEQ ID NO: 2346860 - RNA, 22 nt, Human
auggggcugaacggggagaaaa

SEQ ID NO: 2346861 - RNA, 12 nt, Human
auggggccucug

SEQ ID NO: 2346862 - RNA, 14 nt, Human
auggggccucuguu

SEQ ID NO: 2346863 - RNA, 17 nt, Human
auggggcucccgcccgu

SEQ ID NO: 2346864 - RNA, 20 nt, Human
auggggcccugccuccuuug

SEQ ID NO: 2346865 - RNA, 19 nt, Human
auggggcugaacggggaga

SEQ ID NO: 2346866 - RNA, 16 nt, Human
uuuuaaguuguuugca

SEQ ID NO: 2346867 - RNA, 18 nt, Human
uuuuaaguuguuugcaug

SEQ ID NO: 2346868 - RNA, 14 nt, Human
uuuuaauaaacacu

SEQ ID NO: 2346869 - RNA, 12 nt, Human
uuuuaauaaugu

SEQ ID NO: 2346870 - RNA, 14 nt, Human
uuuuaauaaacuuu

SEQ ID NO: 2346871 - RNA, 15 nt, Human
uuuuaauaaacuuuu

SEQ ID NO: 2346872 - RNA, 13 nt, Human
uuuuaauaauguu

SEQ ID NO: 2346873 - RNA, 14 nt, Human
uuuuaauaauguuu

SEQ ID NO: 2346874 - RNA, 18 nt, Human
auuaaaacugaagucuga

SEQ ID NO: 2346875 - RNA, 19 nt, Human
auuaaaacugaagucugaa

SEQ ID NO: 2346876 - RNA, 20 nt, Human
auuaaaacugaagucugaaa

SEQ ID NO: 2346877 - RNA, 23 nt, Human
auuaaaagaaaauaaaaaaaaga

SEQ ID NO: 2346878 - RNA, 21 nt, Human
auuaaaacugaagucugaaau

SEQ ID NO: 2346879 - RNA, 22 nt, Human
auuaaaacugaagucugaaauu

SEQ ID NO: 2346880 - RNA, 15 nt, Human
auuaaaacugaauug

SEQ ID NO: 2346881 - RNA, 14 nt, Human
auuaaacccuggau

SEQ ID NO: 2346882 - RNA, 14 nt, Human
auuaaaacugaauu

SEQ ID NO: 2346883 - RNA, 15 nt, Human
auuaaaagaauauuu

SEQ ID NO: 2346884 - RNA, 23 nt, Human
auuaaacucuucacaaaaucugu

SEQ ID NO: 2346885 - RNA, 20 nt, Human
auuaaacguaugcaugugaa

SEQ ID NO: 2346886 - RNA, 21 nt, Human
auuaaacguaugcaugugaag

SEQ ID NO: 2346887 - RNA, 22 nt, Human
auuaaacggauuauuuuuucag

SEQ ID NO: 2346888 - RNA, 23 nt, Human
auuaaacggauuauuuuuucaga

SEQ ID NO: 2346889 - RNA, 18 nt, Human
auuaaacguaugcaugug

SEQ ID NO: 2346890 - RNA, 19 nt, Human
auuaaacguaugcauguga

SEQ ID NO: 2346891 - RNA, 13 nt, Human
auuaaacggauua

SEQ ID NO: 2346892 - RNA, 14 nt, Human
auuaaacggauuau

SEQ ID NO: 2346893 - RNA, 15 nt, Human
auuaaacggauuauu

SEQ ID NO: 2346894 - RNA, 16 nt, Human
auuaaacggauuauuu

SEQ ID NO: 2346895 - RNA, 17 nt, Human
auuaaacggauuauuuu

SEQ ID NO: 2346896 - RNA, 19 nt, Human
auuaaacggauuauuuuuu

SEQ ID NO: 2346897 - RNA, 20 nt, Human
auuaaacggauuauuuuuuc

SEQ ID NO: 2346898 - RNA, 21 nt, Human
auuaaacggauuauuuuuuca

SEQ ID NO: 2346899 - RNA, 14 nt, Human
auguuuugugacua

SEQ ID NO: 2346900 - RNA, 17 nt, Human
auguuuugugacuauau

SEQ ID NO: 2346901 - RNA, 21 nt, Human
auguuuugugacuauauagag

SEQ ID NO: 2346902 - RNA, 19 nt, Human
auguuuugugacuauauag

SEQ ID NO: 2346903 - RNA, 18 nt, Human
auguuuugugggaacaga

SEQ ID NO: 2346904 - RNA, 19 nt, Human
auuaaaaaucucaaauuuc

SEQ ID NO: 2346905 - RNA, 15 nt, Human
auuaaaaaucucaaa

SEQ ID NO: 2346906 - RNA, 16 nt, Human
auguuuuuaaaaguuu

SEQ ID NO: 2346907 - RNA, 18 nt, Human
auguuuuuaaaaguuuca

SEQ ID NO: 2346908 - RNA, 20 nt, Human
auguuuuuaaaaguuucaau

SEQ ID NO: 2346909 - RNA, 23 nt, Human
auuaaaacacaacaucuuuuucu

SEQ ID NO: 2346910 - RNA, 22 nt, Human
auuaaaaaucucaaauuucuaa

SEQ ID NO: 2346911 - RNA, 20 nt, Human
auuaaaaaucucaaauuucu

SEQ ID NO: 2346912 - RNA, 20 nt, Human
uuuucugguagauagaaaua

SEQ ID NO: 2346913 - RNA, 19 nt, Human
uuuucugguagauagaaau

SEQ ID NO: 2346914 - RNA, 16 nt, Human
uuuucugguagauaga

SEQ ID NO: 2346915 - RNA, 22 nt, Human
uuuucuggguguccaaaggaag

SEQ ID NO: 2346916 - RNA, 12 nt, Human
uuuucuguauuu

SEQ ID NO: 2346917 - RNA, 12 nt, Human
auguuguuauuu

SEQ ID NO: 2346918 - RNA, 22 nt, Human
auguuguguuucuguucaccuu

SEQ ID NO: 2346919 - RNA, 18 nt, Human
uuuucugugccugaauau

SEQ ID NO: 2346920 - RNA, 17 nt, Human
uuuucugugccugaaua

SEQ ID NO: 2346921 - RNA, 15 nt, Human
uuuucugucucugcc

SEQ ID NO: 2346922 - RNA, 17 nt, Human
uuuucugucucugccuc

SEQ ID NO: 2346923 - RNA, 17 nt, Human
auguuuaguaaucauau

SEQ ID NO: 2346924 - RNA, 20 nt, Human
auguuguucauuauuggagg

SEQ ID NO: 2346925 - RNA, 13 nt, Human
auguuguuauuua

SEQ ID NO: 2346926 - RNA, 14 nt, Human
auguuguuauuuaa

SEQ ID NO: 2346927 - RNA, 15 nt, Human
auguuguuauuuaaa

SEQ ID NO: 2346928 - RNA, 17 nt, Human
auguuguuauuuaaaga

SEQ ID NO: 2346929 - RNA, 20 nt, Human
auguuuaugcaaggaaggaa

SEQ ID NO: 2346930 - RNA, 18 nt, Human
auguuuaugcaaggaagg

SEQ ID NO: 2346931 - RNA, 22 nt, Human
auguuuaugcaaggaaggaaag

SEQ ID NO: 2346932 - RNA, 15 nt, Human
auguuuucaggcuag

SEQ ID NO: 2346933 - RNA, 21 nt, Human
auguuuaugagccagacaaau

SEQ ID NO: 2346934 - RNA, 20 nt, Human
auguuuaugagccagacaaa

SEQ ID NO: 2346935 - RNA, 16 nt, Human
auguuuaugagccaga

SEQ ID NO: 2346936 - RNA, 15 nt, Human
auguuuaugagccag

SEQ ID NO: 2346937 - RNA, 14 nt, Human
auguuuaugagcca

SEQ ID NO: 2346938 - RNA, 19 nt, Human
auguuuauauaaaugcuuu

SEQ ID NO: 2346939 - RNA, 13 nt, Human
auguuuauauaaa

SEQ ID NO: 2346940 - RNA, 14 nt, Human
auguuuauauaaau

SEQ ID NO: 2346941 - RNA, 16 nt, Human
auguuuauauaaaugc

SEQ ID NO: 2346942 - RNA, 17 nt, Human
auguuuauauaaaugcu

SEQ ID NO: 2346943 - RNA, 21 nt, Human
auguuuauauaaaugcuuuua

SEQ ID NO: 2346944 - RNA, 23 nt, Human
auguuuugguaucuguucuuuaa

SEQ ID NO: 2346945 - RNA, 15 nt, Human
auguuuugguaucug

SEQ ID NO: 2346946 - RNA, 17 nt, Human
auguuuugguaucuguu

SEQ ID NO: 2346947 - RNA, 20 nt, Human
auguuuugguaucuguucuu

SEQ ID NO: 2346948 - RNA, 16 nt, Human
auguuuuccagcuccu

SEQ ID NO: 2346949 - RNA, 18 nt, Human
auguuuuccagcuccuca

SEQ ID NO: 2346950 - RNA, 22 nt, Human
auguuuugauaaaguaguaaaa

SEQ ID NO: 2346951 - RNA, 17 nt, Human
auguuuucaggcuagau

SEQ ID NO: 2346952 - RNA, 21 nt, Human
auguuuucaggcuagauguau

SEQ ID NO: 2346953 - RNA, 19 nt, Human
uuuucauauugugccaaua

SEQ ID NO: 2346954 - RNA, 21 nt, Human
uuuucaucuucucuggcgaca

SEQ ID NO: 2346955 - RNA, 14 nt, Human
uuuucaucugggaa

SEQ ID NO: 2346956 - RNA, 15 nt, Human
uuuucaucugggaaa

SEQ ID NO: 2346957 - RNA, 16 nt, Human
uuuucaucugggaaag

SEQ ID NO: 2346958 - RNA, 15 nt, Human
uuuucaucuguuguu

SEQ ID NO: 2346959 - RNA, 21 nt, Human
uuuucaugauuuugaaaucau

SEQ ID NO: 2346960 - RNA, 21 nt, Human
uuuucaugauuuugaaaccau

SEQ ID NO: 2346961 - RNA, 20 nt, Human
uuuucauuuaggugaggaag

SEQ ID NO: 2346962 - RNA, 17 nt, Human
uuuucuccacuuuguug

SEQ ID NO: 2346963 - RNA, 20 nt, Human
uuuuccaaaaguggccucuu

SEQ ID NO: 2346964 - RNA, 15 nt, Human
uuuuccaaaaaaaua

SEQ ID NO: 2346965 - RNA, 23 nt, Human
uuuuccaaaaguggccucuuugu

SEQ ID NO: 2346966 - RNA, 15 nt, Human
uuuuccaaaauaauu

SEQ ID NO: 2346967 - RNA, 18 nt, Human
uuuucauuuucugcaagc

SEQ ID NO: 2346968 - RNA, 22 nt, Human
uuuucauuuucugcaagccugc

SEQ ID NO: 2346969 - RNA, 21 nt, Human
uuuuccaaaaaaauacugcca

SEQ ID NO: 2346970 - RNA, 22 nt, Human
uuuucauggacacuuugaaaug

SEQ ID NO: 2346971 - RNA, 17 nt, Human
uuuucauugauaugaaa

SEQ ID NO: 2346972 - RNA, 16 nt, Human
uuuucauuuucugcaa

SEQ ID NO: 2346973 - RNA, 13 nt, Human
uuuucauuguaaa

SEQ ID NO: 2346974 - RNA, 13 nt, Human
uuuucauuugccu

SEQ ID NO: 2346975 - RNA, 15 nt, Human
uuuucauuugccuau

SEQ ID NO: 2346976 - RNA, 16 nt, Human
uuuucauuugccuauu

SEQ ID NO: 2346977 - RNA, 17 nt, Human
uuuucucuaacucagaa

SEQ ID NO: 2346978 - RNA, 19 nt, Human
uuuucuccucccaggaacu

SEQ ID NO: 2346979 - RNA, 14 nt, Human
uuuucuccucccag

SEQ ID NO: 2346980 - RNA, 13 nt, Human
uuuucuccuccca

SEQ ID NO: 2346981 - RNA, 14 nt, Human
uuuucucuaggaaa

SEQ ID NO: 2346982 - RNA, 17 nt, Human
uuuucugaauaacauuu

SEQ ID NO: 2346983 - RNA, 16 nt, Human
uuuucucuaggaaaua

SEQ ID NO: 2346984 - RNA, 21 nt, Human
uuuucuggagguugauaacuu

SEQ ID NO: 2346985 - RNA, 15 nt, Human
uuuucugagcgauua

SEQ ID NO: 2346986 - RNA, 18 nt, Human
uuuucuggaauguaauca

SEQ ID NO: 2346987 - RNA, 23 nt, Human
uuuucuggagguugauaacuuug

SEQ ID NO: 2346988 - RNA, 10 nt, Human
uuuucugagc

SEQ ID NO: 2346989 - RNA, 12 nt, Human
uuuucugagccc

SEQ ID NO: 2346990 - RNA, 16 nt, Human
uuuucugagcccgggc

SEQ ID NO: 2346991 - RNA, 22 nt, Human
uuuucugagcccgggcugccug

SEQ ID NO: 2346992 - RNA, 18 nt, Human
uuuucugagaaagacuau

SEQ ID NO: 2346993 - RNA, 15 nt, Human
uuuucugagaaagac

SEQ ID NO: 2346994 - RNA, 18 nt, Human
uuuuaggucucuuccccu

SEQ ID NO: 2346995 - RNA, 16 nt, Human
uuuuagguguugauuu

SEQ ID NO: 2346996 - RNA, 19 nt, Human
uuuuagguguugauuuucu

SEQ ID NO: 2346997 - RNA, 22 nt, Human
uuuuagguguugauuuucuguu

SEQ ID NO: 2346998 - RNA, 20 nt, Human
uuuuaggccaaaaaaaugua

SEQ ID NO: 2346999 - RNA, 18 nt, Human
uuuuaggcagggauuuga

SEQ ID NO: 2347000 - RNA, 19 nt, Human
uuuuaggcagggauuugag

SEQ ID NO: 2347001 - RNA, 14 nt, Human
uuuuauuaaugcac

SEQ ID NO: 2347002 - RNA, 19 nt, Human
uuuuauuaaugcacuuucu

SEQ ID NO: 2347003 - RNA, 13 nt, Human
uuuuauuaugcau

SEQ ID NO: 2347004 - RNA, 20 nt, Human
uuuuauuguuuaaagcaacu

SEQ ID NO: 2347005 - RNA, 12 nt, Human
uuuuauuguuuu

SEQ ID NO: 2347006 - RNA, 14 nt, Human
uuuuauuguuuuca

SEQ ID NO: 2347007 - RNA, 14 nt, Human
uuuucaguuuucag

SEQ ID NO: 2347008 - RNA, 12 nt, Human
uuuucaguuuuc

SEQ ID NO: 2347009 - RNA, 20 nt, Human
uuuucaguuucaauucagug

SEQ ID NO: 2347010 - RNA, 12 nt, Human
uuuucauaauaa

SEQ ID NO: 2347011 - RNA, 18 nt, Human
uuuucauacuuuuaccuu

SEQ ID NO: 2347012 - RNA, 21 nt, Human
uuuucauagauugagaaguuu

SEQ ID NO: 2347013 - RNA, 13 nt, Human
uuuucauauugug

SEQ ID NO: 2347014 - RNA, 14 nt, Human
uuuucauauugugc

SEQ ID NO: 2347015 - RNA, 16 nt, Human
uuuucauauugugcca

SEQ ID NO: 2347016 - RNA, 11 nt, Human
uuuuauuuuau

SEQ ID NO: 2347017 - RNA, 15 nt, Human
uuuuauuuauuuuau

SEQ ID NO: 2347018 - RNA, 15 nt, Human
uuuuauuugcaugug

SEQ ID NO: 2347019 - RNA, 15 nt, Human
uuuuauuugacaaaa

SEQ ID NO: 2347020 - RNA, 16 nt, Human
uuuuauuuuacuuuua

SEQ ID NO: 2347021 - RNA, 23 nt, Human
auuccaacaaaggguuuuaaugu

SEQ ID NO: 2347022 - RNA, 18 nt, Human
auuccaacaaaggguuuu

SEQ ID NO: 2347023 - RNA, 19 nt, Human
auuccaacaaaggguuuua

SEQ ID NO: 2347024 - RNA, 15 nt, Human
auuccaacaaagggu

SEQ ID NO: 2347025 - RNA, 20 nt, Human
auuccaacagcucaagucuu

SEQ ID NO: 2347026 - RNA, 14 nt, Human
auuccaacagcuca

SEQ ID NO: 2347027 - RNA, 14 nt, Human
auuccaacagugag

SEQ ID NO: 2347028 - RNA, 15 nt, Human
auuccaacagugagu

SEQ ID NO: 2347029 - RNA, 22 nt, Human
auuccaagacaugucuguucua

SEQ ID NO: 2347030 - RNA, 13 nt, Human
auuccaagacagu

SEQ ID NO: 2347031 - RNA, 17 nt, Human
auuccagccccucuggu

SEQ ID NO: 2347032 - RNA, 17 nt, Human
auuccaaccccaacucc

SEQ ID NO: 2347033 - RNA, 11 nt, Human
auuccaaccuu

SEQ ID NO: 2347034 - RNA, 15 nt, Human
auuccaaccccaacu

SEQ ID NO: 2347035 - RNA, 16 nt, Human
auuccaaccccaacuc

SEQ ID NO: 2347036 - RNA, 18 nt, Human
auuccaugaaucgcuucu

SEQ ID NO: 2347037 - RNA, 19 nt, Human
auuccaugaaucgcuucuc

SEQ ID NO: 2347038 - RNA, 12 nt, Human
auuccaugaauc

SEQ ID NO: 2347039 - RNA, 18 nt, Human
auuccauccauauacuuu

SEQ ID NO: 2347040 - RNA, 15 nt, Human
auuccaugaaucgcu

SEQ ID NO: 2347041 - RNA, 11 nt, Human
auuccauccuu

SEQ ID NO: 2347042 - RNA, 13 nt, Human
auuccauauuuau

SEQ ID NO: 2347043 - RNA, 14 nt, Human
auuccauccauaua

SEQ ID NO: 2347044 - RNA, 17 nt, Human
auuccauauucauguaa

SEQ ID NO: 2347045 - RNA, 18 nt, Human
auuccauauucauguaaa

SEQ ID NO: 2347046 - RNA, 17 nt, Human
auuccauauuuauucaa

SEQ ID NO: 2347047 - RNA, 14 nt, Human
auuccaagacagua

SEQ ID NO: 2347048 - RNA, 15 nt, Human
auuccagcuccuccg

SEQ ID NO: 2347049 - RNA, 16 nt, Human
auuccauauucaugua

SEQ ID NO: 2347050 - RNA, 22 nt, Human
auucccuaucuuuuaguuuuag

SEQ ID NO: 2347051 - RNA, 21 nt, Human
auucccuaucuuuuaguuuua

SEQ ID NO: 2347052 - RNA, 21 nt, Human
auuccaugaaucgcuucucuu

SEQ ID NO: 2347053 - RNA, 22 nt, Human
auucccaagcucuagugggaag

SEQ ID NO: 2347054 - RNA, 16 nt, Human
auucccaagcucugcu

SEQ ID NO: 2347055 - RNA, 14 nt, Human
auucccaagcucug

SEQ ID NO: 2347056 - RNA, 15 nt, Human
auucccaagcucugc

SEQ ID NO: 2347057 - RNA, 13 nt, Human
auucccugccugg

SEQ ID NO: 2347058 - RNA, 20 nt, Human
auucccugagucaccaggaa

SEQ ID NO: 2347059 - RNA, 19 nt, Human
auucccugagucaccagga

SEQ ID NO: 2347060 - RNA, 22 nt, Human
auucccucucucugacucucaa

SEQ ID NO: 2347061 - RNA, 19 nt, Human
auucccucucucugacucu

SEQ ID NO: 2347062 - RNA, 20 nt, Human
auucccucucucugacucuc

SEQ ID NO: 2347063 - RNA, 19 nt, Human
auucccuggccuuucauau

SEQ ID NO: 2347064 - RNA, 13 nt, Human
auucccuggccuu

SEQ ID NO: 2347065 - RNA, 14 nt, Human
auucccuccugcua

SEQ ID NO: 2347066 - RNA, 21 nt, Human
auucccuccugcuacucuguu

SEQ ID NO: 2347067 - RNA, 13 nt, Human
auucccucucucu

SEQ ID NO: 2347068 - RNA, 14 nt, Human
auucccucucucug

SEQ ID NO: 2347069 - RNA, 15 nt, Human
auucccucucucuga

SEQ ID NO: 2347070 - RNA, 16 nt, Human
auucccucucucugac

SEQ ID NO: 2347071 - RNA, 21 nt, Human
auucagauauauuuuucacag

SEQ ID NO: 2347072 - RNA, 18 nt, Human
auucagauauauuuuuca

SEQ ID NO: 2347073 - RNA, 20 nt, Human
auucagguauguugccuuua

SEQ ID NO: 2347074 - RNA, 20 nt, Human
auucaggaagcucagggccu

SEQ ID NO: 2347075 - RNA, 17 nt, Human
auucaggaagcucaggg

SEQ ID NO: 2347076 - RNA, 19 nt, Human
auucaggaagcucagggcc

SEQ ID NO: 2347077 - RNA, 18 nt, Human
auucaguccuaagaaaga

SEQ ID NO: 2347078 - RNA, 15 nt, Human
auucagugagggucu

SEQ ID NO: 2347079 - RNA, 23 nt, Human
auucagguauguugccuuuaugg

SEQ ID NO: 2347080 - RNA, 19 nt, Human
auucaguaauaacucuacc

SEQ ID NO: 2347081 - RNA, 15 nt, Human
auucaguaauaacuc

SEQ ID NO: 2347082 - RNA, 17 nt, Human
auucagaguugaugguu

SEQ ID NO: 2347083 - RNA, 14 nt, Human
auucaggaagcuca

SEQ ID NO: 2347084 - RNA, 13 nt, Human
auuauauagguug

SEQ ID NO: 2347085 - RNA, 20 nt, Human
auuauauagguugugcaaau

SEQ ID NO: 2347086 - RNA, 23 nt, Human
auuauauagguugugcaaauuaa

SEQ ID NO: 2347087 - RNA, 14 nt, Human
auucagacaggcaa

SEQ ID NO: 2347088 - RNA, 13 nt, Human
auucagacaggca

SEQ ID NO: 2347089 - RNA, 14 nt, Human
auucagagagcagc

SEQ ID NO: 2347090 - RNA, 20 nt, Human
auucucccagguaccagcug

SEQ ID NO: 2347091 - RNA, 21 nt, Human
auucucccagguaccagcugc

SEQ ID NO: 2347092 - RNA, 22 nt, Human
auucucccagguaccagcugcg

SEQ ID NO: 2347093 - RNA, 24 nt, Human
auucucccagguaccagcugcgcu

SEQ ID NO: 2347094 - RNA, 21 nt, Human
auucuccaccugccagggaca

SEQ ID NO: 2347095 - RNA, 11 nt, Human
auucuccugcc

SEQ ID NO: 2347096 - RNA, 12 nt, Human
auucuccugccu

SEQ ID NO: 2347097 - RNA, 14 nt, Human
auucuccugccuca

SEQ ID NO: 2347098 - RNA, 13 nt, Human
auucuccugccuc

SEQ ID NO: 2347099 - RNA, 18 nt, Human
auucuccugccucagccu

SEQ ID NO: 2347100 - RNA, 11 nt, Human
auucuccugga

SEQ ID NO: 2347101 - RNA, 22 nt, Human
auucuccugccuguagcaguga

SEQ ID NO: 2347102 - RNA, 13 nt, Human
auucuccuucagc

SEQ ID NO: 2347103 - RNA, 13 nt, Human
auucuccugugcu

SEQ ID NO: 2347104 - RNA, 14 nt, Human
auucuccugugcua

SEQ ID NO: 2347105 - RNA, 14 nt, Human
auucuccuucagcc

SEQ ID NO: 2347106 - RNA, 15 nt, Human
auucuccuucagccc

SEQ ID NO: 2347107 - RNA, 16 nt, Human
auucuccuuguguuac

SEQ ID NO: 2347108 - RNA, 16 nt, Human
auucuccuucagcccu

SEQ ID NO: 2347109 - RNA, 17 nt, Human
auucuccuucagcccuc

SEQ ID NO: 2347110 - RNA, 18 nt, Human
auucuccuucagcccuca

SEQ ID NO: 2347111 - RNA, 22 nt, Human
auucuccuucagcccucacccc

SEQ ID NO: 2347112 - RNA, 20 nt, Human
auucuccugccucagccucc

SEQ ID NO: 2347113 - RNA, 19 nt, Human
auucuccugccucagccuc

SEQ ID NO: 2347114 - RNA, 15 nt, Human
auucuccugccucag

SEQ ID NO: 2347115 - RNA, 17 nt, Human
auucuccugccucagcc

SEQ ID NO: 2347116 - RNA, 15 nt, Human
auucucaaacacagu

SEQ ID NO: 2347117 - RNA, 18 nt, Human
auucuauuuucauuuucu

SEQ ID NO: 2347118 - RNA, 21 nt, Human
auucuauuuucauuuucugca

SEQ ID NO: 2347119 - RNA, 15 nt, Human
auucucaagcccugc

SEQ ID NO: 2347120 - RNA, 15 nt, Human
auucuauuugcuggg

SEQ ID NO: 2347121 - RNA, 18 nt, Human
auucuauuugcugggcuu

SEQ ID NO: 2347122 - RNA, 22 nt, Human
auucuauuuauauguacaugag

SEQ ID NO: 2347123 - RNA, 16 nt, Human
auucucaagcccugca

SEQ ID NO: 2347124 - RNA, 21 nt, Human
auucucaaccuaccaccccuu

SEQ ID NO: 2347125 - RNA, 16 nt, Human
auucucagggucucug

SEQ ID NO: 2347126 - RNA, 17 nt, Human
auucucagggucucugc

SEQ ID NO: 2347127 - RNA, 18 nt, Human
auucucagggucucugcu

SEQ ID NO: 2347128 - RNA, 22 nt, Human
auucucagggucucugcugccg

SEQ ID NO: 2347129 - RNA, 21 nt, Human
auucucagggucucugcugcc

SEQ ID NO: 2347130 - RNA, 19 nt, Human
auucucagggucucugcug

SEQ ID NO: 2347131 - RNA, 20 nt, Human
auucucagggucucugcugc

SEQ ID NO: 2347132 - RNA, 15 nt, Human
auucucaugccucag

SEQ ID NO: 2347133 - RNA, 14 nt, Human
auucucaugccuca

SEQ ID NO: 2347134 - RNA, 19 nt, Human
auucuccaccugccaggga

SEQ ID NO: 2347135 - RNA, 20 nt, Human
auucuccaccugccagggac

SEQ ID NO: 2347136 - RNA, 15 nt, Human
auucuaaaugaaugu

SEQ ID NO: 2347137 - RNA, 17 nt, Human
auucuaaaugaauguuu

SEQ ID NO: 2347138 - RNA, 18 nt, Human
auucuaaaugaauguuua

SEQ ID NO: 2347139 - RNA, 17 nt, Human
auucuaguuuugucaaa

SEQ ID NO: 2347140 - RNA, 15 nt, Human
auucuauaaggccau

SEQ ID NO: 2347141 - RNA, 18 nt, Human
auucuauaaguuuuaugu

SEQ ID NO: 2347142 - RNA, 20 nt, Human
auucuauuuauauguacaug

SEQ ID NO: 2347143 - RNA, 14 nt, Human
auucuauuaacuuu

SEQ ID NO: 2347144 - RNA, 22 nt, Human
auucuauugcaguuauagaaaa

SEQ ID NO: 2347145 - RNA, 13 nt, Human
auucuauaugaau

SEQ ID NO: 2347146 - RNA, 14 nt, Human
auucuauaugaauu

SEQ ID NO: 2347147 - RNA, 15 nt, Human
auucuaucuauuccu

SEQ ID NO: 2347148 - RNA, 23 nt, Human
auucuauaugaauuuaaauauaa

SEQ ID NO: 2347149 - RNA, 15 nt, Human
auucuauaugaauuu

SEQ ID NO: 2347150 - RNA, 16 nt, Human
auucuauaugaauuua

SEQ ID NO: 2347151 - RNA, 17 nt, Human
auucuauaugaauuuaa

SEQ ID NO: 2347152 - RNA, 19 nt, Human
auucuauaugaauuuaaau

SEQ ID NO: 2347153 - RNA, 12 nt, Human
auugaaaucuuu

SEQ ID NO: 2347154 - RNA, 18 nt, Human
auuguauuuauuccauau

SEQ ID NO: 2347155 - RNA, 23 nt, Human
auugucauuccuguauucacccg

SEQ ID NO: 2347156 - RNA, 23 nt, Human
auuguauuuauucaauaaaguau

SEQ ID NO: 2347157 - RNA, 14 nt, Human
auuguauuuauucc

SEQ ID NO: 2347158 - RNA, 16 nt, Human
auuguauuuauucaau

SEQ ID NO: 2347159 - RNA, 18 nt, Human
auuguauuuauucaauaa

SEQ ID NO: 2347160 - RNA, 19 nt, Human
auuguauuuauucaauaaa

SEQ ID NO: 2347161 - RNA, 20 nt, Human
auuguauuuauucaauaaag

SEQ ID NO: 2347162 - RNA, 23 nt, Human
auuguauuaggugucauuuccau

SEQ ID NO: 2347163 - RNA, 11 nt, Human
auuguauuuau

SEQ ID NO: 2347164 - RNA, 14 nt, Human
auuguauuuauuca

SEQ ID NO: 2347165 - RNA, 13 nt, Human
auuguauucagag

SEQ ID NO: 2347166 - RNA, 17 nt, Human
auuggucuccucucagc

SEQ ID NO: 2347167 - RNA, 14 nt, Human
auuggucuccucuc

SEQ ID NO: 2347168 - RNA, 12 nt, Human
auugguguugac

SEQ ID NO: 2347169 - RNA, 13 nt, Human
auugucauuuaua

SEQ ID NO: 2347170 - RNA, 18 nt, Human
auuguccaauccuauguu

SEQ ID NO: 2347171 - RNA, 17 nt, Human
auuguccccgacccuug

SEQ ID NO: 2347172 - RNA, 19 nt, Human
auuguccccgacccuugcc

SEQ ID NO: 2347173 - RNA, 20 nt, Human
auuguccccgacccuugccg

SEQ ID NO: 2347174 - RNA, 17 nt, Human
auugugaccaaguuaua

SEQ ID NO: 2347175 - RNA, 21 nt, Human
auugugaucuaucaauaguca

SEQ ID NO: 2347176 - RNA, 21 nt, Human
auugugaugguucguucuguu

SEQ ID NO: 2347177 - RNA, 16 nt, Human
auugugagccaccacg

SEQ ID NO: 2347178 - RNA, 23 nt, Human
auugugaucagaccauaauguua

SEQ ID NO: 2347179 - RNA, 15 nt, Human
auugugaaguacaua

SEQ ID NO: 2347180 - RNA, 14 nt, Human
auugugaaguacau

SEQ ID NO: 2347181 - RNA, 16 nt, Human
auugugaacugacagg

SEQ ID NO: 2347182 - RNA, 15 nt, Human
auugugaccaaguua

SEQ ID NO: 2347183 - RNA, 16 nt, Human
auugugaccaaguuau

SEQ ID NO: 2347184 - RNA, 15 nt, Human
auugugauguguccu

SEQ ID NO: 2347185 - RNA, 18 nt, Human
auugugauucugccuuug

SEQ ID NO: 2347186 - RNA, 14 nt, Human
auugugaugugucc

SEQ ID NO: 2347187 - RNA, 13 nt, Human
auugugauguguc

SEQ ID NO: 2347188 - RNA, 19 nt, Human
auugugcacauacuugaga

SEQ ID NO: 2347189 - RNA, 16 nt, Human
auugugccaauaugua

SEQ ID NO: 2347190 - RNA, 17 nt, Human
auugugccaauauguau

SEQ ID NO: 2347191 - RNA, 19 nt, Human
auugugccaauauguauug

SEQ ID NO: 2347192 - RNA, 12 nt, Human
auuguggugcca

SEQ ID NO: 2347193 - RNA, 23 nt, Human
auugugauuugacuguuuuuacc

SEQ ID NO: 2347194 - RNA, 16 nt, Human
auugugauuugacugu

SEQ ID NO: 2347195 - RNA, 17 nt, Human
auugugauuugacuguu

SEQ ID NO: 2347196 - RNA, 18 nt, Human
auugugauuugacuguuu

SEQ ID NO: 2347197 - RNA, 19 nt, Human
auugugauuugacuguuuu

SEQ ID NO: 2347198 - RNA, 14 nt, Human
auugugauuucccg

SEQ ID NO: 2347199 - RNA, 16 nt, Human
auugugauuucccgug

SEQ ID NO: 2347200 - RNA, 23 nt, Human
auugugauuucccguggccccag

SEQ ID NO: 2347201 - RNA, 12 nt, Human
auugugauuuga

SEQ ID NO: 2347202 - RNA, 14 nt, Human
auugugauuugacu

SEQ ID NO: 2347203 - RNA, 14 nt, Human
auuguggugccaca

SEQ ID NO: 2347204 - RNA, 23 nt, Human
auuguguaacaauuuuaaugcua

SEQ ID NO: 2347205 - RNA, 14 nt, Human
auugugucucuugg

SEQ ID NO: 2347206 - RNA, 15 nt, Human
auuguguauauucau

SEQ ID NO: 2347207 - RNA, 18 nt, Human
auugugucucuugguccu

SEQ ID NO: 2347208 - RNA, 14 nt, Human
auuuaaaacagaca

SEQ ID NO: 2347209 - RNA, 17 nt, Human
auucuggauaaagccac

SEQ ID NO: 2347210 - RNA, 21 nt, Human
auucuggauaaagccacugaa

SEQ ID NO: 2347211 - RNA, 18 nt, Human
auucugcccaaaaauaug

SEQ ID NO: 2347212 - RNA, 19 nt, Human
auucugcccaaaaauaugg

SEQ ID NO: 2347213 - RNA, 14 nt, Human
auucugcugucuca

SEQ ID NO: 2347214 - RNA, 23 nt, Human
auucuggccuagucccuuccaca

SEQ ID NO: 2347215 - RNA, 21 nt, Human
auucuggauuuugucaagcag

SEQ ID NO: 2347216 - RNA, 22 nt, Human
auucuggauggauuugaagcaa

SEQ ID NO: 2347217 - RNA, 17 nt, Human
auucuggccuagucccu

SEQ ID NO: 2347218 - RNA, 16 nt, Human
auucugguuccagggu

SEQ ID NO: 2347219 - RNA, 23 nt, Human
auucugccaggcccccaagccug

SEQ ID NO: 2347220 - RNA, 16 nt, Human
auucugcccaaaaaua

SEQ ID NO: 2347221 - RNA, 14 nt, Human
auucugccaggccc

SEQ ID NO: 2347222 - RNA, 22 nt, Human
auucugcagcaugaccugugac

SEQ ID NO: 2347223 - RNA, 23 nt, Human
auucugcaguaaaucuuuuacaa

SEQ ID NO: 2347224 - RNA, 21 nt, Human
auucugcaguaaaucuuuuac

SEQ ID NO: 2347225 - RNA, 20 nt, Human
auucugcaguaaaucuuuua

SEQ ID NO: 2347226 - RNA, 18 nt, Human
auucugcaguaaaucuuu

SEQ ID NO: 2347227 - RNA, 17 nt, Human
auucugcaguaaaucuu

SEQ ID NO: 2347228 - RNA, 22 nt, Human
auucugcaagcacaucugcauu

SEQ ID NO: 2347229 - RNA, 19 nt, Human
auucugcaagcacaucugc

SEQ ID NO: 2347230 - RNA, 15 nt, Human
auucugcagcaugac

SEQ ID NO: 2347231 - RNA, 19 nt, Human
auucugauuuggaaaaaga

SEQ ID NO: 2347232 - RNA, 13 nt, Human
auucugcagcaug

SEQ ID NO: 2347233 - RNA, 23 nt, Human
auucuccuucagcccucaccccu

SEQ ID NO: 2347234 - RNA, 19 nt, Human
auucugucgccuuagcaug

SEQ ID NO: 2347235 - RNA, 20 nt, Human
auucugucgccuuagcaugu

SEQ ID NO: 2347236 - RNA, 21 nt, Human
auucugucgccuuagcauguu

SEQ ID NO: 2347237 - RNA, 18 nt, Human
auucugucgccuuagcau

SEQ ID NO: 2347238 - RNA, 19 nt, Human
auucugguuccaggguccc

SEQ ID NO: 2347239 - RNA, 21 nt, Human
auucuguguguuuucauaaua

SEQ ID NO: 2347240 - RNA, 17 nt, Human
auucuguguguuuucau

SEQ ID NO: 2347241 - RNA, 14 nt, Human
auucugucuugaag

SEQ ID NO: 2347242 - RNA, 17 nt, Human
auucuguggaacaagcc

SEQ ID NO: 2347243 - RNA, 24 nt, Human
auucugucucuggauuauauuaug

SEQ ID NO: 2347244 - RNA, 20 nt, Human
auucuuaaaauauauuucag

SEQ ID NO: 2347245 - RNA, 23 nt, Human
auucuuaaaauauauuucagaua

SEQ ID NO: 2347246 - RNA, 23 nt, Human
auucuguguguuuucauaauaaa

SEQ ID NO: 2347247 - RNA, 22 nt, Human
auucuguguguuuucauaauaa

SEQ ID NO: 2347248 - RNA, 12 nt, Human
auucuguuucuu

SEQ ID NO: 2347249 - RNA, 18 nt, Human
auucuguuuuagguuaaa

SEQ ID NO: 2347250 - RNA, 13 nt, Human
auucuuuuguaau

SEQ ID NO: 2347251 - RNA, 16 nt, Human
auucuuuuguaauuua

SEQ ID NO: 2347252 - RNA, 17 nt, Human
auucuuuuguaauuuaa

SEQ ID NO: 2347253 - RNA, 14 nt, Human
auucuuuuuaaagu

SEQ ID NO: 2347254 - RNA, 22 nt, Human
auucuuuuaaaagacaagacuu

SEQ ID NO: 2347255 - RNA, 18 nt, Human
auucuuuuaaaagacaag

SEQ ID NO: 2347256 - RNA, 22 nt, Human
auucuuugauguuaacacauuu

SEQ ID NO: 2347257 - RNA, 13 nt, Human
auucuuuuaaaag

SEQ ID NO: 2347258 - RNA, 21 nt, Human
auucuucucuuccuuuuauca

SEQ ID NO: 2347259 - RNA, 16 nt, Human
auucuuugauguuaac

SEQ ID NO: 2347260 - RNA, 17 nt, Human
auucuuugauguuaaca

SEQ ID NO: 2347261 - RNA, 18 nt, Human
auucuuugauguuaacac

SEQ ID NO: 2347262 - RNA, 19 nt, Human
auucuuugauguuaacaca

SEQ ID NO: 2347263 - RNA, 20 nt, Human
auucuuugauguuaacacau

SEQ ID NO: 2347264 - RNA, 21 nt, Human
auucuuugauguuaacacauu

SEQ ID NO: 2347265 - RNA, 13 nt, Human
auucuuccucccu

SEQ ID NO: 2347266 - RNA, 22 nt, Human
auucuuccucccucccucuuuc

SEQ ID NO: 2347267 - RNA, 13 nt, Human
auucuucuccacu

SEQ ID NO: 2347268 - RNA, 15 nt, Human
auucuucucuagcug

SEQ ID NO: 2347269 - RNA, 15 nt, Human
auucuucucuuccuu

SEQ ID NO: 2347270 - RNA, 22 nt, Human
auucuuauguagcaggaaauaa

SEQ ID NO: 2347271 - RNA, 20 nt, Human
auucuuauaaauaugaagcu

SEQ ID NO: 2347272 - RNA, 14 nt, Human
auucuuaugcuuau

SEQ ID NO: 2347273 - RNA, 13 nt, Human
auucuuauuuaau

SEQ ID NO: 2347274 - RNA, 12 nt, Human
auucuuauaaau

SEQ ID NO: 2347275 - RNA, 19 nt, Human
auucuuaaaguacuuguua

SEQ ID NO: 2347276 - RNA, 14 nt, Human
auucuuauaaauau

SEQ ID NO: 2347277 - RNA, 15 nt, Human
auucuuauaaauaug

SEQ ID NO: 2347278 - RNA, 16 nt, Human
auucuuauaaauauga

SEQ ID NO: 2347279 - RNA, 18 nt, Human
auucuuauaaauaugaag

SEQ ID NO: 2347280 - RNA, 17 nt, Human
auucuuacauguuuucu

SEQ ID NO: 2347281 - RNA, 15 nt, Human
auucuuacauguuuu

SEQ ID NO: 2347282 - RNA, 17 nt, Human
auucuuauuucaugaaa

SEQ ID NO: 2347283 - RNA, 18 nt, Human
auucuuauuuaaugaaag

SEQ ID NO: 2347284 - RNA, 14 nt, Human
auucuuauuuaaug

SEQ ID NO: 2347285 - RNA, 17 nt, Human
auugggcaagugauuga

SEQ ID NO: 2347286 - RNA, 21 nt, Human
auugggagcuugggaauggau

SEQ ID NO: 2347287 - RNA, 18 nt, Human
auugggcaagugauugaa

SEQ ID NO: 2347288 - RNA, 19 nt, Human
auuggggaagacuguggcu

SEQ ID NO: 2347289 - RNA, 22 nt, Human
auugggcagcgcccuuccucuc

SEQ ID NO: 2347290 - RNA, 16 nt, Human
auugggccccugccag

SEQ ID NO: 2347291 - RNA, 15 nt, Human
auugggccccugcca

SEQ ID NO: 2347292 - RNA, 14 nt, Human
auugggcagcgccc

SEQ ID NO: 2347293 - RNA, 19 nt, Human
auugggcagcgcccuuccu

SEQ ID NO: 2347294 - RNA, 20 nt, Human
auugggcagcgcccuuccuc

SEQ ID NO: 2347295 - RNA, 19 nt, Human
auugggggcuggugccagc

SEQ ID NO: 2347296 - RNA, 22 nt, Human
auugggggcuggugccagccuu

SEQ ID NO: 2347297 - RNA, 15 nt, Human
auuggggucccucua

SEQ ID NO: 2347298 - RNA, 20 nt, Human
auuggguggggggcuucaua

SEQ ID NO: 2347299 - RNA, 19 nt, Human
auuggguccugggucuuuc

SEQ ID NO: 2347300 - RNA, 22 nt, Human
auuggguggggggcuucauaca

SEQ ID NO: 2347301 - RNA, 18 nt, Human
auugggugggcaggaaaa

SEQ ID NO: 2347302 - RNA, 21 nt, Human
auuggguggggggcuucauac

SEQ ID NO: 2347303 - RNA, 21 nt, Human
auugacauugcuuuacuguca

SEQ ID NO: 2347304 - RNA, 18 nt, Human
auugacccacaagaaaug

SEQ ID NO: 2347305 - RNA, 14 nt, Human
auugacauguacag

SEQ ID NO: 2347306 - RNA, 18 nt, Human
auugaaaggcauucucug

SEQ ID NO: 2347307 - RNA, 18 nt, Human
auugaaagagaaccaguu

SEQ ID NO: 2347308 - RNA, 15 nt, Human
auugacauguacaga

SEQ ID NO: 2347309 - RNA, 23 nt, Human
auugacauguacagagaacuaac

SEQ ID NO: 2347310 - RNA, 17 nt, Human
auugacauguacagaga

SEQ ID NO: 2347311 - RNA, 15 nt, Human
auugaaagagaacca

SEQ ID NO: 2347312 - RNA, 21 nt, Human
auugaaaauaguaaaugcuuu

SEQ ID NO: 2347313 - RNA, 13 nt, Human
auugaaaaggaca

SEQ ID NO: 2347314 - RNA, 15 nt, Human
auugaaaaaucacca

SEQ ID NO: 2347315 - RNA, 18 nt, Human
auugaaaacuuuucucag

SEQ ID NO: 2347316 - RNA, 16 nt, Human
auucuuuuuaaaguau

SEQ ID NO: 2347317 - RNA, 16 nt, Human
auuuaguuuuuguucu

SEQ ID NO: 2347318 - RNA, 20 nt, Human
auuuaguuuuuguaauuuau

SEQ ID NO: 2347319 - RNA, 19 nt, Human
auuuaguuuuuguaauuua

SEQ ID NO: 2347320 - RNA, 22 nt, Human
auuuaguuugauuauucagugu

SEQ ID NO: 2347321 - RNA, 15 nt, Human
auuuaguuugauuau

SEQ ID NO: 2347322 - RNA, 17 nt, Human
auuuauaaaaauaaaaa

SEQ ID NO: 2347323 - RNA, 22 nt, Human
auuuauaaaaauaaaaaacacu

SEQ ID NO: 2347324 - RNA, 23 nt, Human
auuuauuaagauggauucucaga

SEQ ID NO: 2347325 - RNA, 22 nt, Human
auuuauuaagauggauucucag

SEQ ID NO: 2347326 - RNA, 21 nt, Human
auuuauuaagauggauucuca

SEQ ID NO: 2347327 - RNA, 16 nt, Human
auuuauuaagauggau

SEQ ID NO: 2347328 - RNA, 15 nt, Human
auuuauuaagaugga

SEQ ID NO: 2347329 - RNA, 19 nt, Human
auuuaguuuuuguucuuaa

SEQ ID NO: 2347330 - RNA, 18 nt, Human
auuuagcaaauaauuucc

SEQ ID NO: 2347331 - RNA, 13 nt, Human
auuuagcaaauaa

SEQ ID NO: 2347332 - RNA, 22 nt, Human
auuuagcaugacaagccccagg

SEQ ID NO: 2347333 - RNA, 23 nt, Human
auuuagcacauacuacacauuca

SEQ ID NO: 2347334 - RNA, 18 nt, Human
auuuagauuguuaaaaua

SEQ ID NO: 2347335 - RNA, 17 nt, Human
auuuagauugaaaacuu

SEQ ID NO: 2347336 - RNA, 22 nt, Human
auuuagagaugaauuaaauuua

SEQ ID NO: 2347337 - RNA, 23 nt, Human
auuuagagaugaauuaaauuuaa

SEQ ID NO: 2347338 - RNA, 17 nt, Human
auuuagagaugaauuaa

SEQ ID NO: 2347339 - RNA, 16 nt, Human
auuuagagaggaaaag

SEQ ID NO: 2347340 - RNA, 16 nt, Human
auuuagacaagagaug

SEQ ID NO: 2347341 - RNA, 20 nt, Human
auuuagagaacuguggccgu

SEQ ID NO: 2347342 - RNA, 13 nt, Human
auuuagauguaua

SEQ ID NO: 2347343 - RNA, 20 nt, Human
auuuagugaaagcuagagau

SEQ ID NO: 2347344 - RNA, 14 nt, Human
auuuagucauguga

SEQ ID NO: 2347345 - RNA, 15 nt, Human
auuuagugaacuacg

SEQ ID NO: 2347346 - RNA, 13 nt, Human
auuuaguguucau

SEQ ID NO: 2347347 - RNA, 20 nt, Human
auuuaguaucuuuuuauuca

SEQ ID NO: 2347348 - RNA, 16 nt, Human
auuuagucaugugacc

SEQ ID NO: 2347349 - RNA, 13 nt, Human
auuuaaaaaauaa

SEQ ID NO: 2347350 - RNA, 15 nt, Human
auuuaaaaaauaacu

SEQ ID NO: 2347351 - RNA, 16 nt, Human
auuuaaaaauaagaaa

SEQ ID NO: 2347352 - RNA, 14 nt, Human
auuuaaaaauauuu

SEQ ID NO: 2347353 - RNA, 18 nt, Human
auuuaaaaauauuuuugg

SEQ ID NO: 2347354 - RNA, 21 nt, Human
auuuacugagcuucucuguga

SEQ ID NO: 2347355 - RNA, 14 nt, Human
auuuaacagaaaug

SEQ ID NO: 2347356 - RNA, 12 nt, Human
auuuaacagaaa

SEQ ID NO: 2347357 - RNA, 19 nt, Human
auuuaaauuuuacccuuua

SEQ ID NO: 2347358 - RNA, 13 nt, Human
auuuaacaagauc

SEQ ID NO: 2347359 - RNA, 17 nt, Human
auuuaaauuuuuuuccu

SEQ ID NO: 2347360 - RNA, 21 nt, Human
auuuacugcuagucuuaagaa

SEQ ID NO: 2347361 - RNA, 17 nt, Human
auuuacuucuuauacau

SEQ ID NO: 2347362 - RNA, 16 nt, Human
auuuacuucuuauaca

SEQ ID NO: 2347363 - RNA, 14 nt, Human
auuuacuucuuaua

SEQ ID NO: 2347364 - RNA, 22 nt, Human
auuuagaaagaagcccaauauu

SEQ ID NO: 2347365 - RNA, 14 nt, Human
auuuagaacuguau

SEQ ID NO: 2347366 - RNA, 15 nt, Human
auuuagaaauauaau

SEQ ID NO: 2347367 - RNA, 14 nt, Human
auuuagacaagaga

SEQ ID NO: 2347368 - RNA, 20 nt, Human
auuuagacaagagaugggaa

SEQ ID NO: 2347369 - RNA, 14 nt, Human
auuuauucugcuca

SEQ ID NO: 2347370 - RNA, 23 nt, Human
auuucccuugaaauuuuaaacua

SEQ ID NO: 2347371 - RNA, 16 nt, Human
auuuccguuaaaauac

SEQ ID NO: 2347372 - RNA, 15 nt, Human
auuuccguuaaaaua

SEQ ID NO: 2347373 - RNA, 23 nt, Human
auuucuagaacaucccugccagc

SEQ ID NO: 2347374 - RNA, 21 nt, Human
auuucuagaacaucccugcca

SEQ ID NO: 2347375 - RNA, 18 nt, Human
auuucuacugugacugau

SEQ ID NO: 2347376 - RNA, 18 nt, Human
auuucuacuuugaaguca

SEQ ID NO: 2347377 - RNA, 16 nt, Human
auuucuacugugacug

SEQ ID NO: 2347378 - RNA, 17 nt, Human
auuucuacugugacuga

SEQ ID NO: 2347379 - RNA, 21 nt, Human
auuucuacucuuaaguuucuc

SEQ ID NO: 2347380 - RNA, 20 nt, Human
auuucuacucuuaaguuucu

SEQ ID NO: 2347381 - RNA, 15 nt, Human
auuucuacugugacu

SEQ ID NO: 2347382 - RNA, 18 nt, Human
auuucuaccauuucagag

SEQ ID NO: 2347383 - RNA, 15 nt, Human
auuucuacucuccca

SEQ ID NO: 2347384 - RNA, 21 nt, Human
auuucuacucucccauggcuu

SEQ ID NO: 2347385 - RNA, 17 nt, Human
auuucuaccauuucaga

SEQ ID NO: 2347386 - RNA, 11 nt, Human
auuugaaauuu

SEQ ID NO: 2347387 - RNA, 16 nt, Human
auuugaagaacaugug

SEQ ID NO: 2347388 - RNA, 15 nt, Human
auuugaaauuuagcu

SEQ ID NO: 2347389 - RNA, 17 nt, Human
auuugaaaauaauuguu

SEQ ID NO: 2347390 - RNA, 18 nt, Human
auuugaaaauaauuguuc

SEQ ID NO: 2347391 - RNA, 14 nt, Human
auuugaaauauuga

SEQ ID NO: 2347392 - RNA, 22 nt, Human
auuugaaaacauaaucugcaaa

SEQ ID NO: 2347393 - RNA, 21 nt, Human
auuucuuuuuuaaaugaagaa

SEQ ID NO: 2347394 - RNA, 14 nt, Human
auuugaaaauuuug

SEQ ID NO: 2347395 - RNA, 20 nt, Human
auuucuaggaagaauuuuaa

SEQ ID NO: 2347396 - RNA, 22 nt, Human
auuucuaggaagaauuuuaaaa

SEQ ID NO: 2347397 - RNA, 15 nt, Human
auuucuaggaagaau

SEQ ID NO: 2347398 - RNA, 16 nt, Human
auuucuaggaagaauu

SEQ ID NO: 2347399 - RNA, 17 nt, Human
auuucuaggaagaauuu

SEQ ID NO: 2347400 - RNA, 19 nt, Human
auuucuaggaagaauuuua

SEQ ID NO: 2347401 - RNA, 22 nt, Human
auuucuuuuuuaaaugaagaaa

SEQ ID NO: 2347402 - RNA, 18 nt, Human
auuucuuuuuuaaaugaa

SEQ ID NO: 2347403 - RNA, 13 nt, Human
auuucccaucugc

SEQ ID NO: 2347404 - RNA, 14 nt, Human
auuucccaucugca

SEQ ID NO: 2347405 - RNA, 15 nt, Human
auuucccaucugcac

SEQ ID NO: 2347406 - RNA, 17 nt, Human
auuuccagucuccacca

SEQ ID NO: 2347407 - RNA, 13 nt, Human
auuuccagucucc

SEQ ID NO: 2347408 - RNA, 22 nt, Human
auuuccauauaaauauuagaaa

SEQ ID NO: 2347409 - RNA, 15 nt, Human
auuuccccaacagug

SEQ ID NO: 2347410 - RNA, 16 nt, Human
auuuccccaacagugu

SEQ ID NO: 2347411 - RNA, 17 nt, Human
auuuccccaacagugug

SEQ ID NO: 2347412 - RNA, 18 nt, Human
auuuccccaacaguguga

SEQ ID NO: 2347413 - RNA, 19 nt, Human
auuuccccaacagugugaa

SEQ ID NO: 2347414 - RNA, 21 nt, Human
auuuccccaggggaaaaugaa

SEQ ID NO: 2347415 - RNA, 20 nt, Human
auuuccccaggggaaaauga

SEQ ID NO: 2347416 - RNA, 15 nt, Human
auuuccccagaccug

SEQ ID NO: 2347417 - RNA, 17 nt, Human
auuuccccaccccagcu

SEQ ID NO: 2347418 - RNA, 23 nt, Human
auuuccccagaccugagcucccc

SEQ ID NO: 2347419 - RNA, 21 nt, Human
auuucauuguaugauguguug

SEQ ID NO: 2347420 - RNA, 19 nt, Human
auuucauuuuuacccuuac

SEQ ID NO: 2347421 - RNA, 22 nt, Human
auuucauuugugccagaaugcu

SEQ ID NO: 2347422 - RNA, 17 nt, Human
auuuccagccaaagccu

SEQ ID NO: 2347423 - RNA, 10 nt, Human
auuuccagag

SEQ ID NO: 2347424 - RNA, 14 nt, Human
auuuccagccaggg

SEQ ID NO: 2347425 - RNA, 18 nt, Human
auuuccagccagggcugc

SEQ ID NO: 2347426 - RNA, 20 nt, Human
auuuccaguaccuuugucac

SEQ ID NO: 2347427 - RNA, 17 nt, Human
auuuccaguaccuuugu

SEQ ID NO: 2347428 - RNA, 13 nt, Human
auuuccaguaccu

SEQ ID NO: 2347429 - RNA, 17 nt, Human
auuuccagccagggcug

SEQ ID NO: 2347430 - RNA, 20 nt, Human
auuuccagugaaaucaguua

SEQ ID NO: 2347431 - RNA, 13 nt, Human
auuucaaaauaua

SEQ ID NO: 2347432 - RNA, 13 nt, Human
auuucaaaaugcu

SEQ ID NO: 2347433 - RNA, 21 nt, Human
auuucaaaaugcuuuuuauua

SEQ ID NO: 2347434 - RNA, 15 nt, Human
auuucaaaaugcuuu

SEQ ID NO: 2347435 - RNA, 14 nt, Human
auuucaaaaugcuu

SEQ ID NO: 2347436 - RNA, 19 nt, Human
auuuauuuuaauaauguuu

SEQ ID NO: 2347437 - RNA, 20 nt, Human
auuuauuuuaauaauguuuc

SEQ ID NO: 2347438 - RNA, 14 nt, Human
auuucauucuucuc

SEQ ID NO: 2347439 - RNA, 23 nt, Human
auuucaacaaguagcuaaagucu

SEQ ID NO: 2347440 - RNA, 16 nt, Human
auuucaaacggccuca

SEQ ID NO: 2347441 - RNA, 16 nt, Human
auuucaaaaugcuuuu

SEQ ID NO: 2347442 - RNA, 17 nt, Human
auuucaaauuggagcuu

SEQ ID NO: 2347443 - RNA, 18 nt, Human
auuucauuucaacuguuu

SEQ ID NO: 2347444 - RNA, 19 nt, Human
auuucauuguaugaugugu

SEQ ID NO: 2347445 - RNA, 20 nt, Human
auuucauuguaugauguguu

SEQ ID NO: 2347446 - RNA, 12 nt, Human
auuucauuguau

SEQ ID NO: 2347447 - RNA, 14 nt, Human
auuucauuguauga

SEQ ID NO: 2347448 - RNA, 15 nt, Human
auuucauuguaugau

SEQ ID NO: 2347449 - RNA, 17 nt, Human
auuucauuguaugaugu

SEQ ID NO: 2347450 - RNA, 12 nt, Human
auuucauuucuu

SEQ ID NO: 2347451 - RNA, 14 nt, Human
auuuauuauuuuca

SEQ ID NO: 2347452 - RNA, 19 nt, Human
auuuauuauuuauuuauua

SEQ ID NO: 2347453 - RNA, 14 nt, Human
auuuauucaagaaa

SEQ ID NO: 2347454 - RNA, 12 nt, Human
auuuauucaaga

SEQ ID NO: 2347455 - RNA, 21 nt, Human
auuuauuauuuucaccuguuu

SEQ ID NO: 2347456 - RNA, 13 nt, Human
auuuauuauuuau

SEQ ID NO: 2347457 - RNA, 11 nt, Human
auuuauuauuu

SEQ ID NO: 2347458 - RNA, 15 nt, Human
auuuauuaauugcuu

SEQ ID NO: 2347459 - RNA, 16 nt, Human
auuuauuauugaaauu

SEQ ID NO: 2347460 - RNA, 17 nt, Human
auuuauuauugaaauug

SEQ ID NO: 2347461 - RNA, 11 nt, Human
auuuauucaau

SEQ ID NO: 2347462 - RNA, 13 nt, Human
auuuauucaauaa

SEQ ID NO: 2347463 - RNA, 14 nt, Human
auuuauucaauaaa

SEQ ID NO: 2347464 - RNA, 15 nt, Human
auuuauucaauaaag

SEQ ID NO: 2347465 - RNA, 16 nt, Human
auuuauucaauaaagu

SEQ ID NO: 2347466 - RNA, 17 nt, Human
auuuauucaauaaagua

SEQ ID NO: 2347467 - RNA, 18 nt, Human
auuuauucaauaaaguau

SEQ ID NO: 2347468 - RNA, 21 nt, Human
auuuauucaauaaaguauuua

SEQ ID NO: 2347469 - RNA, 16 nt, Human
auuuauuuauuaagau

SEQ ID NO: 2347470 - RNA, 14 nt, Human
auuuauuuauuaag

SEQ ID NO: 2347471 - RNA, 13 nt, Human
auuuauuuauuau

SEQ ID NO: 2347472 - RNA, 24 nt, Human
auuuauuuacugagcuucucugug

SEQ ID NO: 2347473 - RNA, 17 nt, Human
auuuauuuacugcuagu

SEQ ID NO: 2347474 - RNA, 23 nt, Human
auuuauuuacagaugaauguauu

SEQ ID NO: 2347475 - RNA, 13 nt, Human
auuuauuuacaga

SEQ ID NO: 2347476 - RNA, 17 nt, Human
auuuauuuauuaagaug

SEQ ID NO: 2347477 - RNA, 14 nt, Human
auuuauuuauuuau

SEQ ID NO: 2347478 - RNA, 14 nt, Human
auuuauuuauuuaa

SEQ ID NO: 2347479 - RNA, 14 nt, Human
auuuauuuauuauu

SEQ ID NO: 2347480 - RNA, 17 nt, Human
auuuauuuuaauaaugu

SEQ ID NO: 2347481 - RNA, 18 nt, Human
auuuauucaauuccucug

SEQ ID NO: 2347482 - RNA, 22 nt, Human
auuuauucaauaaaguauuuaa

SEQ ID NO: 2347483 - RNA, 19 nt, Human
auuuauucaauuccucugg

SEQ ID NO: 2347484 - RNA, 18 nt, Human
auuuauucagcuucauuu

SEQ ID NO: 2347485 - RNA, 20 nt, Human
auuuauucagcuucauuugu

SEQ ID NO: 2347486 - RNA, 17 nt, Human
auuuauucauauuuucu

SEQ ID NO: 2347487 - RNA, 19 nt, Human
auuuauuccauauucaugu

SEQ ID NO: 2347488 - RNA, 20 nt, Human
auuuauuccauauucaugua

SEQ ID NO: 2347489 - RNA, 23 nt, Human
auuuauuccauauucauguaaac

SEQ ID NO: 2347490 - RNA, 13 nt, Human
auuuauucugcuc

SEQ ID NO: 2347491 - RNA, 17 nt, Human
auuuauuuaauguuaug

SEQ ID NO: 2347492 - RNA, 15 nt, Human
auuuauuuaauguua

SEQ ID NO: 2347493 - RNA, 14 nt, Human
auuuucauuguaaa

SEQ ID NO: 2347494 - RNA, 15 nt, Human
auuuucauuauuccu

SEQ ID NO: 2347495 - RNA, 22 nt, Human
auuuuccaaaaguggccucuuu

SEQ ID NO: 2347496 - RNA, 23 nt, Human
auuuucauuuucugcaagccugc

SEQ ID NO: 2347497 - RNA, 15 nt, Human
auuuucauuuucugc

SEQ ID NO: 2347498 - RNA, 17 nt, Human
auuuucauuuucugcaa

SEQ ID NO: 2347499 - RNA, 14 nt, Human
auuuuccaaagagu

SEQ ID NO: 2347500 - RNA, 14 nt, Human
auuuuccaaaugua

SEQ ID NO: 2347501 - RNA, 18 nt, Human
auuuucauguauaugugu

SEQ ID NO: 2347502 - RNA, 17 nt, Human
auuuucauguauaugug

SEQ ID NO: 2347503 - RNA, 19 nt, Human
auuuucaugacuuuuccau

SEQ ID NO: 2347504 - RNA, 20 nt, Human
auuuucaugacuuuuccaug

SEQ ID NO: 2347505 - RNA, 22 nt, Human
auuuucauacagcauuacaaau

SEQ ID NO: 2347506 - RNA, 13 nt, Human
auuuucaugacuu

SEQ ID NO: 2347507 - RNA, 16 nt, Human
auuuuccuccccagca

SEQ ID NO: 2347508 - RNA, 15 nt, Human
auuuuccuccccagc

SEQ ID NO: 2347509 - RNA, 14 nt, Human
auuuuccuccccag

SEQ ID NO: 2347510 - RNA, 13 nt, Human
auuuuccucccca

SEQ ID NO: 2347511 - RNA, 21 nt, Human
auuuuccacaagauucccaga

SEQ ID NO: 2347512 - RNA, 20 nt, Human
auuuuccacaagauucccag

SEQ ID NO: 2347513 - RNA, 23 nt, Human
auuuuccacaagauucccagaga

SEQ ID NO: 2347514 - RNA, 17 nt, Human
auuuuccaaauguaaua

SEQ ID NO: 2347515 - RNA, 15 nt, Human
auuuuccaagugugc

SEQ ID NO: 2347516 - RNA, 17 nt, Human
auuuuccaagugugcau

SEQ ID NO: 2347517 - RNA, 12 nt, Human
auuuuccucccc

SEQ ID NO: 2347518 - RNA, 21 nt, Human
auuuuccuaauaaaguucugu

SEQ ID NO: 2347519 - RNA, 19 nt, Human
auuuucaguauaauuuaac

SEQ ID NO: 2347520 - RNA, 11 nt, Human
auuuucaguau

SEQ ID NO: 2347521 - RNA, 22 nt, Human
auuuucaguagggcuacaaaac

SEQ ID NO: 2347522 - RNA, 21 nt, Human
auuuucaguagggcuacaaaa

SEQ ID NO: 2347523 - RNA, 14 nt, Human
auuuucaguauuuu

SEQ ID NO: 2347524 - RNA, 12 nt, Human
auuuucaguauu

SEQ ID NO: 2347525 - RNA, 22 nt, Human
auuuucauaaguauuucaaauu

SEQ ID NO: 2347526 - RNA, 21 nt, Human
auuuucauaaguauuucaaau

SEQ ID NO: 2347527 - RNA, 20 nt, Human
auuuucauaaguauuucaaa

SEQ ID NO: 2347528 - RNA, 22 nt, Human
auuuucaguuauuauauuuaca

SEQ ID NO: 2347529 - RNA, 12 nt, Human
auuuucagaccc

SEQ ID NO: 2347530 - RNA, 14 nt, Human
auuuucagaaaaua

SEQ ID NO: 2347531 - RNA, 17 nt, Human
auuuucagaaaauauua

SEQ ID NO: 2347532 - RNA, 17 nt, Human
auuuucagcaaacucuu

SEQ ID NO: 2347533 - RNA, 23 nt, Human
auuuucagcccauauuucaucgu

SEQ ID NO: 2347534 - RNA, 19 nt, Human
auuuucagcaaacucuuuu

SEQ ID NO: 2347535 - RNA, 18 nt, Human
auuuucagcaaacucuuu

SEQ ID NO: 2347536 - RNA, 20 nt, Human
auuuucacacaauacaauaa

SEQ ID NO: 2347537 - RNA, 15 nt, Human
auuuucacauaaaau

SEQ ID NO: 2347538 - RNA, 16 nt, Human
auuuucaaguaauugu

SEQ ID NO: 2347539 - RNA, 12 nt, Human
auuuucaaguaa

SEQ ID NO: 2347540 - RNA, 19 nt, Human
auuuucaaguaauugugaa

SEQ ID NO: 2347541 - RNA, 20 nt, Human
auuuucaaggcccucagcau

SEQ ID NO: 2347542 - RNA, 16 nt, Human
auuuucaccccacccu

SEQ ID NO: 2347543 - RNA, 15 nt, Human
auuuucaccccaccc

SEQ ID NO: 2347544 - RNA, 16 nt, Human
auuuucacaugaacau

SEQ ID NO: 2347545 - RNA, 17 nt, Human
auuuucacaugaacaua

SEQ ID NO: 2347546 - RNA, 22 nt, Human
auuuucacauucccaucuguca

SEQ ID NO: 2347547 - RNA, 22 nt, Human
auuuucaccccacccuuccccu

SEQ ID NO: 2347548 - RNA, 21 nt, Human
auuuucaccuguuuuuaagcu

SEQ ID NO: 2347549 - RNA, 14 nt, Human
auuuucacuuugug

SEQ ID NO: 2347550 - RNA, 13 nt, Human
auuuucacuguag

SEQ ID NO: 2347551 - RNA, 18 nt, Human
auuuucaacgcagcccug

SEQ ID NO: 2347552 - RNA, 22 nt, Human
auuuucaaagcuuuuuccagag

SEQ ID NO: 2347553 - RNA, 18 nt, Human
auuuucaaauuguaucua

SEQ ID NO: 2347554 - RNA, 13 nt, Human
auuuucaagaaac

SEQ ID NO: 2347555 - RNA, 20 nt, Human
auuuucaacgcagcccugcu

SEQ ID NO: 2347556 - RNA, 17 nt, Human
auuuucaaggcccucag

SEQ ID NO: 2347557 - RNA, 24 nt, Human
auuuucaagaauaaucacgcuuuc

SEQ ID NO: 2347558 - RNA, 23 nt, Human
auuuucaagaaacugaggaauuu

SEQ ID NO: 2347559 - RNA, 22 nt, Human
auuuucaagaaacugaggaauu

SEQ ID NO: 2347560 - RNA, 17 nt, Human
auuuucaagaaacugag

SEQ ID NO: 2347561 - RNA, 16 nt, Human
auuuucaagaaacuga

SEQ ID NO: 2347562 - RNA, 14 nt, Human
auuuucaagaaacu

SEQ ID NO: 2347563 - RNA, 16 nt, Human
auuuuacuuuuauaau

SEQ ID NO: 2347564 - RNA, 19 nt, Human
auuuuagaagacucuacca

SEQ ID NO: 2347565 - RNA, 21 nt, Human
auuuuagccuucucuguucau

SEQ ID NO: 2347566 - RNA, 18 nt, Human
auuuuagccuucucuguu

SEQ ID NO: 2347567 - RNA, 17 nt, Human
auuuuagccuucucugu

SEQ ID NO: 2347568 - RNA, 17 nt, Human
auuuuauuuuuuucuac

SEQ ID NO: 2347569 - RNA, 21 nt, Human
auuuuauuuuuuucugaauua

SEQ ID NO: 2347570 - RNA, 17 nt, Human
auuuuacuuuuuccugg

SEQ ID NO: 2347571 - RNA, 16 nt, Human
auuuuacuuuuuccug

SEQ ID NO: 2347572 - RNA, 14 nt, Human
auuuuaaaaagucu

SEQ ID NO: 2347573 - RNA, 18 nt, Human
auuuuaccucuuauugca

SEQ ID NO: 2347574 - RNA, 15 nt, Human
auuuuaccucuuauu

SEQ ID NO: 2347575 - RNA, 12 nt, Human
auuuuaauuuau

SEQ ID NO: 2347576 - RNA, 12 nt, Human
auuuuaauucau

SEQ ID NO: 2347577 - RNA, 23 nt, Human
auuuuaauuauuauucuucauaa

SEQ ID NO: 2347578 - RNA, 24 nt, Human
auuuuaauucaucccaacugucuu

SEQ ID NO: 2347579 - RNA, 15 nt, Human
auuuuaauucaguug

SEQ ID NO: 2347580 - RNA, 18 nt, Human
auuuuaaaauuuuaucuc

SEQ ID NO: 2347581 - RNA, 17 nt, Human
auuuuaaacaaaauaga

SEQ ID NO: 2347582 - RNA, 17 nt, Human
auuuuaaaauuuuaucu

SEQ ID NO: 2347583 - RNA, 19 nt, Human
auuuuaaaaagauuuguuu

SEQ ID NO: 2347584 - RNA, 18 nt, Human
auuuuaaaagaaugauua

SEQ ID NO: 2347585 - RNA, 22 nt, Human
auuuuaaaagaaugauuaugaa

SEQ ID NO: 2347586 - RNA, 18 nt, Human
auuuuaauuaucuuuucu

SEQ ID NO: 2347587 - RNA, 13 nt, Human
auuuuaauuauua

SEQ ID NO: 2347588 - RNA, 19 nt, Human
auuuuaauuauuauucuuc

SEQ ID NO: 2347589 - RNA, 21 nt, Human
auuuuaaaccauaaaaagcug

SEQ ID NO: 2347590 - RNA, 14 nt, Human
auuuuaaagacaug

SEQ ID NO: 2347591 - RNA, 21 nt, Human
auuuuaaugcaccugaauguu

SEQ ID NO: 2347592 - RNA, 20 nt, Human
auuuuaaaccauaaaaagcu

SEQ ID NO: 2347593 - RNA, 22 nt, Human
auuuuaaaccauaaaaagcuga

SEQ ID NO: 2347594 - RNA, 22 nt, Human
auuuuaaacaaagguugagaug

SEQ ID NO: 2347595 - RNA, 13 nt, Human
auuuuaaacaaag

SEQ ID NO: 2347596 - RNA, 21 nt, Human
auuuguuuugacggaugauug

SEQ ID NO: 2347597 - RNA, 19 nt, Human
auuuguuuucccgccaagc

SEQ ID NO: 2347598 - RNA, 18 nt, Human
auuuguuuugacggauga

SEQ ID NO: 2347599 - RNA, 17 nt, Human
auuuuaaaagaaugauu

SEQ ID NO: 2347600 - RNA, 22 nt, Human
auuuguuuuuguauuuuuaaug

SEQ ID NO: 2347601 - RNA, 16 nt, Human
auuugaaugaaaaauu

SEQ ID NO: 2347602 - RNA, 15 nt, Human
auuugaaugaaaaau

SEQ ID NO: 2347603 - RNA, 14 nt, Human
auuugaaugaaaaa

SEQ ID NO: 2347604 - RNA, 13 nt, Human
auuugaaugaaaa

SEQ ID NO: 2347605 - RNA, 11 nt, Human
auuugugacua

SEQ ID NO: 2347606 - RNA, 16 nt, Human
auuugugacuaauugu

SEQ ID NO: 2347607 - RNA, 18 nt, Human
auuugugacuaauuguau

SEQ ID NO: 2347608 - RNA, 19 nt, Human
auuugugacuaauuguaua

SEQ ID NO: 2347609 - RNA, 20 nt, Human
auuugugacuaauuguauaa

SEQ ID NO: 2347610 - RNA, 22 nt, Human
auuugugacuaauuguauaaca

SEQ ID NO: 2347611 - RNA, 14 nt, Human
auuugugauacaau

SEQ ID NO: 2347612 - RNA, 15 nt, Human
auuuguuuucauggu

SEQ ID NO: 2347613 - RNA, 13 nt, Human
auuuguuuucccg

SEQ ID NO: 2347614 - RNA, 14 nt, Human
auuugaaucuuguc

SEQ ID NO: 2347615 - RNA, 15 nt, Human
auuugaaucuugucu

SEQ ID NO: 2347616 - RNA, 16 nt, Human
auuugaaucuugucuc

SEQ ID NO: 2347617 - RNA, 11 nt, Human
auuugaaugaa

SEQ ID NO: 2347618 - RNA, 22 nt, Human
auuugaaucuugucucaaugcu

SEQ ID NO: 2347619 - RNA, 18 nt, Human
auuugaaucuugucucaa

SEQ ID NO: 2347620 - RNA, 20 nt, Human
auuugaaucuugucucaaug

SEQ ID NO: 2347621 - RNA, 14 nt, Human
auuugaaggucugc

SEQ ID NO: 2347622 - RNA, 23 nt, Human
auuugaaggucugcaagaaccug

SEQ ID NO: 2347623 - RNA, 19 nt, Human
auuugaagaaugaacaaau

SEQ ID NO: 2347624 - RNA, 16 nt, Human
auuugaagcaaagcac

SEQ ID NO: 2347625 - RNA, 13 nt, Human
auuugaaggccag

SEQ ID NO: 2347626 - RNA, 23 nt, Human
auuugugaagguggaaauaaacu

SEQ ID NO: 2347627 - RNA, 19 nt, Human
auuuguauaaaauaauuuu

SEQ ID NO: 2347628 - RNA, 15 nt, Human
auuuguauaaaauaa

SEQ ID NO: 2347629 - RNA, 18 nt, Human
auuuguauaaaauaauuu

SEQ ID NO: 2347630 - RNA, 13 nt, Human
aucuuuguggcca

SEQ ID NO: 2347631 - RNA, 15 nt, Human
aucuuuguggccaag

SEQ ID NO: 2347632 - RNA, 14 nt, Human
aucuuuguggccaa

SEQ ID NO: 2347633 - RNA, 16 nt, Human
aucuuucgcacagcag

SEQ ID NO: 2347634 - RNA, 17 nt, Human
aucuuucgcacagcagu

SEQ ID NO: 2347635 - RNA, 18 nt, Human
aucuuucgcacagcaguu

SEQ ID NO: 2347636 - RNA, 23 nt, Human
aucuuucgcacagcaguuccgga

SEQ ID NO: 2347637 - RNA, 16 nt, Human
aucuuucuauuccaaa

SEQ ID NO: 2347638 - RNA, 11 nt, Human
aucuuuuacau

SEQ ID NO: 2347639 - RNA, 23 nt, Human
aucuuuguggccaaggagcugcu

SEQ ID NO: 2347640 - RNA, 19 nt, Human
aucuuuguggccaaggagc

SEQ ID NO: 2347641 - RNA, 16 nt, Human
aucuuuguggccaagg

SEQ ID NO: 2347642 - RNA, 22 nt, Human
aucuuuuacaacugccucgaaa

SEQ ID NO: 2347643 - RNA, 17 nt, Human
uuggcgcacccuccccu

SEQ ID NO: 2347644 - RNA, 16 nt, Human
aucuuuauugagaaag

SEQ ID NO: 2347645 - RNA, 17 nt, Human
aucuuuauugagaaaga

SEQ ID NO: 2347646 - RNA, 18 nt, Human
aucuuuauugagaaagag

SEQ ID NO: 2347647 - RNA, 22 nt, Human
uuggcgcugccccuggcagccc

SEQ ID NO: 2347648 - RNA, 12 nt, Human
aucuuucaggaa

SEQ ID NO: 2347649 - RNA, 22 nt, Human
aucuuucacacuuccaccagcc

SEQ ID NO: 2347650 - RNA, 17 nt, Human
aucuuucacacuuccac

SEQ ID NO: 2347651 - RNA, 20 nt, Human
aucuuucauuaaaggcuucu

SEQ ID NO: 2347652 - RNA, 20 nt, Human
aucuuucaucaaucauugua

SEQ ID NO: 2347653 - RNA, 19 nt, Human
aucuuucauuaaaggcuuc

SEQ ID NO: 2347654 - RNA, 11 nt, Human
aucuuuccugu

SEQ ID NO: 2347655 - RNA, 12 nt, Human
aucuuuccuguc

SEQ ID NO: 2347656 - RNA, 14 nt, Human
augaaaugagguca

SEQ ID NO: 2347657 - RNA, 18 nt, Human
augaaaucuuacagcugg

SEQ ID NO: 2347658 - RNA, 13 nt, Human
augaaagaggagg

SEQ ID NO: 2347659 - RNA, 18 nt, Human
augaaagaguaaaggaaa

SEQ ID NO: 2347660 - RNA, 21 nt, Human
augaaauauuauguuaaaacu

SEQ ID NO: 2347661 - RNA, 20 nt, Human
augaaauauuauguuaaaac

SEQ ID NO: 2347662 - RNA, 19 nt, Human
augaaagauggcugugccu

SEQ ID NO: 2347663 - RNA, 20 nt, Human
augaaagauggcugugccuc

SEQ ID NO: 2347664 - RNA, 23 nt, Human
augaaagauggcugugccucugc

SEQ ID NO: 2347665 - RNA, 20 nt, Human
augaaagacuguacaaagua

SEQ ID NO: 2347666 - RNA, 13 nt, Human
aucuuuucacaaa

SEQ ID NO: 2347667 - RNA, 14 nt, Human
aucuuuucacaaau

SEQ ID NO: 2347668 - RNA, 15 nt, Human
aucuuuucacaaaua

SEQ ID NO: 2347669 - RNA, 16 nt, Human
aucuuuucacaaauaa

SEQ ID NO: 2347670 - RNA, 17 nt, Human
uuggacggcugggcaca

SEQ ID NO: 2347671 - RNA, 21 nt, Human
uuggacggccugaugcucccu

SEQ ID NO: 2347672 - RNA, 13 nt, Human
uuggacuauuaua

SEQ ID NO: 2347673 - RNA, 19 nt, Human
uuggccugaucagaccacg

SEQ ID NO: 2347674 - RNA, 13 nt, Human
uuggacggccuga

SEQ ID NO: 2347675 - RNA, 17 nt, Human
uuggaccucugcucuga

SEQ ID NO: 2347676 - RNA, 18 nt, Human
uuggaccucugcucugag

SEQ ID NO: 2347677 - RNA, 20 nt, Human
uuggaaaccugcccugccug

SEQ ID NO: 2347678 - RNA, 14 nt, Human
uuggaccucugcuc

SEQ ID NO: 2347679 - RNA, 15 nt, Human
uuggaccucugcucu

SEQ ID NO: 2347680 - RNA, 16 nt, Human
uuggaccucugcucug

SEQ ID NO: 2347681 - RNA, 23 nt, Human
uuggccugucucauccccagggg

SEQ ID NO: 2347682 - RNA, 16 nt, Human
uuggccugucucaucc

SEQ ID NO: 2347683 - RNA, 16 nt, Human
uuggccuggagguggg

SEQ ID NO: 2347684 - RNA, 12 nt, Human
uuggccugcugu

SEQ ID NO: 2347685 - RNA, 21 nt, Human
uuggaccucugcucugaggcu

SEQ ID NO: 2347686 - RNA, 13 nt, Human
uuggccugcugug

SEQ ID NO: 2347687 - RNA, 14 nt, Human
uuggccugcuguga

SEQ ID NO: 2347688 - RNA, 12 nt, Human
uuggccuggagg

SEQ ID NO: 2347689 - RNA, 13 nt, Human
uuggaccucugcu

SEQ ID NO: 2347690 - RNA, 17 nt, Human
uuggaccuaauccaagc

SEQ ID NO: 2347691 - RNA, 21 nt, Human
uuggaccuaaauggccucaug

SEQ ID NO: 2347692 - RNA, 23 nt, Human
uuggaccuaaauggccucaugug

SEQ ID NO: 2347693 - RNA, 16 nt, Human
uuggacccuuccaugg

SEQ ID NO: 2347694 - RNA, 19 nt, Human
uuggaccuaaauggccuca

SEQ ID NO: 2347695 - RNA, 14 nt, Human
uuggacccuuccau

SEQ ID NO: 2347696 - RNA, 13 nt, Human
uuggacccuucca

SEQ ID NO: 2347697 - RNA, 18 nt, Human
uuggaaagaguaggaaga

SEQ ID NO: 2347698 - RNA, 21 nt, Human
uuggaaaccugcccugccuga

SEQ ID NO: 2347699 - RNA, 22 nt, Human
uuggccugucucauccccaggg

SEQ ID NO: 2347700 - RNA, 22 nt, Human
uuggccuucagaaccauccaua

SEQ ID NO: 2347701 - RNA, 15 nt, Human
uuggcgcacccuccc

SEQ ID NO: 2347702 - RNA, 19 nt, Human
uuggcgcacccuccccucc

SEQ ID NO: 2347703 - RNA, 21 nt, Human
uuggcuagagguucaaagaua

SEQ ID NO: 2347704 - RNA, 22 nt, Human
uuggcuaggaccccuccaugug

SEQ ID NO: 2347705 - RNA, 22 nt, Human
uuggcuagagguucaaagauau

SEQ ID NO: 2347706 - RNA, 14 nt, Human
uuggcugcagggag

SEQ ID NO: 2347707 - RNA, 11 nt, Human
uuggcugcuga

SEQ ID NO: 2347708 - RNA, 15 nt, Human
uuggcugcugaaggc

SEQ ID NO: 2347709 - RNA, 11 nt, Human
uugcugaauag

SEQ ID NO: 2347710 - RNA, 19 nt, Human
uugcugaaauuuuauaugc

SEQ ID NO: 2347711 - RNA, 19 nt, Human
uugcugaauacagaggcaa

SEQ ID NO: 2347712 - RNA, 13 nt, Human
uugcuccgccucu

SEQ ID NO: 2347713 - RNA, 16 nt, Human
uugcugaaauuuuaua

SEQ ID NO: 2347714 - RNA, 11 nt, Human
uugcugaaauu

SEQ ID NO: 2347715 - RNA, 17 nt, Human
uugcuccuaauguugaa

SEQ ID NO: 2347716 - RNA, 16 nt, Human
uugcuaucuuaauuuu

SEQ ID NO: 2347717 - RNA, 18 nt, Human
uugcuaucuuaauuuugg

SEQ ID NO: 2347718 - RNA, 20 nt, Human
uugcuaugagcuggggaugu

SEQ ID NO: 2347719 - RNA, 12 nt, Human
uugcucauggaa

SEQ ID NO: 2347720 - RNA, 13 nt, Human
uugcuaucuuaau

SEQ ID NO: 2347721 - RNA, 14 nt, Human
uugcuaucuuaauu

SEQ ID NO: 2347722 - RNA, 15 nt, Human
uugcuaucuuaauuu

SEQ ID NO: 2347723 - RNA, 11 nt, Human
uugcucaugga

SEQ ID NO: 2347724 - RNA, 15 nt, Human
uugcuaaucaguguc

SEQ ID NO: 2347725 - RNA, 16 nt, Human
uugcuaaucagugucu

SEQ ID NO: 2347726 - RNA, 18 nt, Human
uugcuaaucagugucuca

SEQ ID NO: 2347727 - RNA, 21 nt, Human
uugcuaaucagugucucacac

SEQ ID NO: 2347728 - RNA, 14 nt, Human
uugcuaaucagugu

SEQ ID NO: 2347729 - RNA, 20 nt, Human
uugcuaagugaggaugaaaa

SEQ ID NO: 2347730 - RNA, 15 nt, Human
aucuaauaccucugu

SEQ ID NO: 2347731 - RNA, 17 nt, Human
aucuaauaccucugugu

SEQ ID NO: 2347732 - RNA, 19 nt, Human
aucuaauaccucugugugc

SEQ ID NO: 2347733 - RNA, 13 nt, Human
uugcuaccucagu

SEQ ID NO: 2347734 - RNA, 17 nt, Human
uugcuaccucagucagu

SEQ ID NO: 2347735 - RNA, 20 nt, Human
uugcuacuacuuaccuacca

SEQ ID NO: 2347736 - RNA, 23 nt, Human
uugcuuguugggauuccugaccc

SEQ ID NO: 2347737 - RNA, 24 nt, Human
uugcuuguugggauuccugaccca

SEQ ID NO: 2347738 - RNA, 16 nt, Human
uugcuuggacuauuau

SEQ ID NO: 2347739 - RNA, 14 nt, Human
uugcuuggcugcuu

SEQ ID NO: 2347740 - RNA, 15 nt, Human
uugcuuggcugcuug

SEQ ID NO: 2347741 - RNA, 19 nt, Human
uugcuuggcugcuuggccu

SEQ ID NO: 2347742 - RNA, 14 nt, Human
uugcuugggaaggg

SEQ ID NO: 2347743 - RNA, 15 nt, Human
uugcuugggaagggg

SEQ ID NO: 2347744 - RNA, 19 nt, Human
uugcugauggugcaaugac

SEQ ID NO: 2347745 - RNA, 20 nt, Human
uugcuugcaguagauuuucu

SEQ ID NO: 2347746 - RNA, 15 nt, Human
uugcugagccucugc

SEQ ID NO: 2347747 - RNA, 14 nt, Human
uugcugagccucug

SEQ ID NO: 2347748 - RNA, 22 nt, Human
uugcugagccucugcuccccag

SEQ ID NO: 2347749 - RNA, 11 nt, Human
uugcuugccuc

SEQ ID NO: 2347750 - RNA, 15 nt, Human
uugcuugccucucug

SEQ ID NO: 2347751 - RNA, 16 nt, Human
uugcuugccucucugu

SEQ ID NO: 2347752 - RNA, 16 nt, Human
uugcuugccugauaua

SEQ ID NO: 2347753 - RNA, 18 nt, Human
uugcuugccugauauaaa

SEQ ID NO: 2347754 - RNA, 18 nt, Human
uugcugaauaggcgauca

SEQ ID NO: 2347755 - RNA, 11 nt, Human
uugcugagccu

SEQ ID NO: 2347756 - RNA, 17 nt, Human
uugcugauggugcaaug

SEQ ID NO: 2347757 - RNA, 18 nt, Human
uugcugauggugcaauga

SEQ ID NO: 2347758 - RNA, 15 nt, Human
uugcuuuacugucaa

SEQ ID NO: 2347759 - RNA, 16 nt, Human
uugcuuuacugucaaa

SEQ ID NO: 2347760 - RNA, 19 nt, Human
uugcuuuacugucaaaaua

SEQ ID NO: 2347761 - RNA, 16 nt, Human
uugcuuuuaaaaucca

SEQ ID NO: 2347762 - RNA, 18 nt, Human
uugcuuuaauuguuaaga

SEQ ID NO: 2347763 - RNA, 16 nt, Human
uugcuuuaauuguuaa

SEQ ID NO: 2347764 - RNA, 22 nt, Human
uugcuuuacugucaaaauaauu

SEQ ID NO: 2347765 - RNA, 19 nt, Human
uugcuuuuccacugccugg

SEQ ID NO: 2347766 - RNA, 15 nt, Human
uugcuuuuucuaaug

SEQ ID NO: 2347767 - RNA, 22 nt, Human
uugcuuuuucuaaugugguuau

SEQ ID NO: 2347768 - RNA, 13 nt, Human
uugcuuuuucuga

SEQ ID NO: 2347769 - RNA, 15 nt, Human
uugcuuuuucugacu

SEQ ID NO: 2347770 - RNA, 20 nt, Human
uugcuuuuggcaaaacucua

SEQ ID NO: 2347771 - RNA, 13 nt, Human
uugcuuuugugaa

SEQ ID NO: 2347772 - RNA, 15 nt, Human
uugcuuuuucaccag

SEQ ID NO: 2347773 - RNA, 15 nt, Human
uuggaaaccugcccu

SEQ ID NO: 2347774 - RNA, 17 nt, Human
uuggaaaccugcccugc

SEQ ID NO: 2347775 - RNA, 18 nt, Human
uuggaaaccugcccugcc

SEQ ID NO: 2347776 - RNA, 17 nt, Human
uuggaaagaguaggaag

SEQ ID NO: 2347777 - RNA, 23 nt, Human
augacaaaaauucaacucagacu

SEQ ID NO: 2347778 - RNA, 15 nt, Human
augacaaaaauucaa

SEQ ID NO: 2347779 - RNA, 19 nt, Human
augacaaaaauucaacuca

SEQ ID NO: 2347780 - RNA, 18 nt, Human
augacaacuggaauaguu

SEQ ID NO: 2347781 - RNA, 14 nt, Human
augacaacagaagc

SEQ ID NO: 2347782 - RNA, 19 nt, Human
augacaacagaagcuucag

SEQ ID NO: 2347783 - RNA, 19 nt, Human
augacaacuggaauaguuu

SEQ ID NO: 2347784 - RNA, 23 nt, Human
augaauuuuuuucaucuucucug

SEQ ID NO: 2347785 - RNA, 17 nt, Human
augaauucuuaugcuua

SEQ ID NO: 2347786 - RNA, 23 nt, Human
augaauuaguuuuauaugcuucu

SEQ ID NO: 2347787 - RNA, 20 nt, Human
uuguauauuauggaagauuu

SEQ ID NO: 2347788 - RNA, 18 nt, Human
uuguauauuauggaagau

SEQ ID NO: 2347789 - RNA, 21 nt, Human
uuguauauuauggaagauuuu

SEQ ID NO: 2347790 - RNA, 16 nt, Human
uuguauauuauuucua

SEQ ID NO: 2347791 - RNA, 13 nt, Human
uuguauauucacu

SEQ ID NO: 2347792 - RNA, 14 nt, Human
uuguauauucacuu

SEQ ID NO: 2347793 - RNA, 21 nt, Human
augaauuaguuuuauaugcuu

SEQ ID NO: 2347794 - RNA, 15 nt, Human
augacaacuuugcca

SEQ ID NO: 2347795 - RNA, 16 nt, Human
augacaagccccaggc

SEQ ID NO: 2347796 - RNA, 15 nt, Human
augacaagccccagg

SEQ ID NO: 2347797 - RNA, 19 nt, Human
augacacgaauauugcuga

SEQ ID NO: 2347798 - RNA, 20 nt, Human
augacaagccccaggcaggc

SEQ ID NO: 2347799 - RNA, 18 nt, Human
augacaagccccaggcag

SEQ ID NO: 2347800 - RNA, 20 nt, Human
augacacgaauauugcugau

SEQ ID NO: 2347801 - RNA, 21 nt, Human
augacagcugucccugucacc

SEQ ID NO: 2347802 - RNA, 16 nt, Human
augacagguaaauuaa

SEQ ID NO: 2347803 - RNA, 23 nt, Human
augacaguaguaccaaaugcuuu

SEQ ID NO: 2347804 - RNA, 19 nt, Human
augacagcugucccuguca

SEQ ID NO: 2347805 - RNA, 17 nt, Human
augacagcugucccugu

SEQ ID NO: 2347806 - RNA, 16 nt, Human
augacagcugucccug

SEQ ID NO: 2347807 - RNA, 12 nt, Human
augacagagcga

SEQ ID NO: 2347808 - RNA, 15 nt, Human
augacagcugucccu

SEQ ID NO: 2347809 - RNA, 16 nt, Human
augacagauguugaau

SEQ ID NO: 2347810 - RNA, 13 nt, Human
augacagagccag

SEQ ID NO: 2347811 - RNA, 22 nt, Human
augacacuuguccccaaauccg

SEQ ID NO: 2347812 - RNA, 20 nt, Human
uuguaaggaaugauuaauua

SEQ ID NO: 2347813 - RNA, 12 nt, Human
uuguaaguuuau

SEQ ID NO: 2347814 - RNA, 14 nt, Human
uuguaaguuuaugu

SEQ ID NO: 2347815 - RNA, 13 nt, Human
uuguaaugaaaac

SEQ ID NO: 2347816 - RNA, 15 nt, Human
uuguaauguuacuga

SEQ ID NO: 2347817 - RNA, 14 nt, Human
uuguaaugucacca

SEQ ID NO: 2347818 - RNA, 23 nt, Human
uuguaguguuggagaagaacuga

SEQ ID NO: 2347819 - RNA, 20 nt, Human
uuguauaaaaauagaagaau

SEQ ID NO: 2347820 - RNA, 19 nt, Human
uuguauaaauuuauuuacu

SEQ ID NO: 2347821 - RNA, 12 nt, Human
uuguauaaauuu

SEQ ID NO: 2347822 - RNA, 19 nt, Human
uuguauaaaauaauuuuua

SEQ ID NO: 2347823 - RNA, 12 nt, Human
uuguauaaaaau

SEQ ID NO: 2347824 - RNA, 16 nt, Human
uuguauaaaaaaaaua

SEQ ID NO: 2347825 - RNA, 13 nt, Human
uuguaguuuaccu

SEQ ID NO: 2347826 - RNA, 17 nt, Human
uuguaguuuaccucuuu

SEQ ID NO: 2347827 - RNA, 13 nt, Human
uuguauaaaauaa

SEQ ID NO: 2347828 - RNA, 14 nt, Human
uuguauaguugcuu

SEQ ID NO: 2347829 - RNA, 15 nt, Human
uuguauaguugcuug

SEQ ID NO: 2347830 - RNA, 19 nt, Human
uuguauaguugcuugccug

SEQ ID NO: 2347831 - RNA, 12 nt, Human
uuguauaauugu

SEQ ID NO: 2347832 - RNA, 13 nt, Human
uuguauaauugua

SEQ ID NO: 2347833 - RNA, 20 nt, Human
uuguauaguugcuugccuga

SEQ ID NO: 2347834 - RNA, 11 nt, Human
uuguauauauc

SEQ ID NO: 2347835 - RNA, 13 nt, Human
uuguauauaucug

SEQ ID NO: 2347836 - RNA, 19 nt, Human
uuguauauaucugcuucag

SEQ ID NO: 2347837 - RNA, 14 nt, Human
uuguauauaugugu

SEQ ID NO: 2347838 - RNA, 15 nt, Human
uuguauauaugugug

SEQ ID NO: 2347839 - RNA, 16 nt, Human
uuguauauaugugugu

SEQ ID NO: 2347840 - RNA, 21 nt, Human
uuguauauauguguguuuaaa

SEQ ID NO: 2347841 - RNA, 23 nt, Human
uuguauaaauuuauuuacugcua

SEQ ID NO: 2347842 - RNA, 13 nt, Human
uuguauaacaggu

SEQ ID NO: 2347843 - RNA, 14 nt, Human
uuguauaacagguu

SEQ ID NO: 2347844 - RNA, 15 nt, Human
uuguauaacagguua

SEQ ID NO: 2347845 - RNA, 16 nt, Human
uuguauaacagguuau

SEQ ID NO: 2347846 - RNA, 17 nt, Human
uuguauaacagguuauu

SEQ ID NO: 2347847 - RNA, 14 nt, Human
uuguauaacuucuu

SEQ ID NO: 2347848 - RNA, 21 nt, Human
uuguauaagauuagaaugaaa

SEQ ID NO: 2347849 - RNA, 15 nt, Human
uuguaaaaaaaaaug

SEQ ID NO: 2347850 - RNA, 18 nt, Human
uugguuuuguuccccucc

SEQ ID NO: 2347851 - RNA, 18 nt, Human
uugguuuuuaaaacccag

SEQ ID NO: 2347852 - RNA, 16 nt, Human
uuguaaaaaaaaaugc

SEQ ID NO: 2347853 - RNA, 17 nt, Human
uuguaaaaaaaaaugcc

SEQ ID NO: 2347854 - RNA, 19 nt, Human
uuguaaaaaaaaaugccuu

SEQ ID NO: 2347855 - RNA, 20 nt, Human
uuguaaaaaaaaaugccuuu

SEQ ID NO: 2347856 - RNA, 21 nt, Human
uuguaaaaaaaaaugccuuug

SEQ ID NO: 2347857 - RNA, 22 nt, Human
uuguaaaaaaaaaugccuuuga

SEQ ID NO: 2347858 - RNA, 23 nt, Human
uuguaaaaaaaaaugccuuugag

SEQ ID NO: 2347859 - RNA, 23 nt, Human
uuguaaaaacagcauugcuuucu

SEQ ID NO: 2347860 - RNA, 20 nt, Human
uuguaaaaacagcauugcuu

SEQ ID NO: 2347861 - RNA, 19 nt, Human
uuguaaaaacagcauugcu

SEQ ID NO: 2347862 - RNA, 21 nt, Human
uuguaaaaacagcauugcuuu

SEQ ID NO: 2347863 - RNA, 20 nt, Human
uuguaacguugcugugggaa

SEQ ID NO: 2347864 - RNA, 21 nt, Human
uuguaacguugcugugggaac

SEQ ID NO: 2347865 - RNA, 14 nt, Human
uuguaagaaauacu

SEQ ID NO: 2347866 - RNA, 13 nt, Human
uuguaagaaauac

SEQ ID NO: 2347867 - RNA, 22 nt, Human
uuguaagcaugcacaaauucug

SEQ ID NO: 2347868 - RNA, 14 nt, Human
uuguaaggaaugau

SEQ ID NO: 2347869 - RNA, 14 nt, Human
uuguaacuccacca

SEQ ID NO: 2347870 - RNA, 17 nt, Human
uuguaacuuggauguag

SEQ ID NO: 2347871 - RNA, 11 nt, Human
uuguaagaaau

SEQ ID NO: 2347872 - RNA, 20 nt, Human
uuguaacuaggcucagagau

SEQ ID NO: 2347873 - RNA, 20 nt, Human
uugguucauuaauucuauaa

SEQ ID NO: 2347874 - RNA, 14 nt, Human
uugguucauuaauu

SEQ ID NO: 2347875 - RNA, 14 nt, Human
uugguucauaaaug

SEQ ID NO: 2347876 - RNA, 15 nt, Human
uugguucauaaauga

SEQ ID NO: 2347877 - RNA, 18 nt, Human
uugguucccccacugauc

SEQ ID NO: 2347878 - RNA, 14 nt, Human
uugguuuuguuccc

SEQ ID NO: 2347879 - RNA, 17 nt, Human
uugguuuuguuccccuc

SEQ ID NO: 2347880 - RNA, 16 nt, Human
uugguuaagucuguuu

SEQ ID NO: 2347881 - RNA, 19 nt, Human
uugguuaggcauuguggga

SEQ ID NO: 2347882 - RNA, 21 nt, Human
uugggguagcuagaggaacca

SEQ ID NO: 2347883 - RNA, 22 nt, Human
uugggguacccacugcucuggu

SEQ ID NO: 2347884 - RNA, 17 nt, Human
uuggggucuggcagccu

SEQ ID NO: 2347885 - RNA, 15 nt, Human
uuggggucagccagg

SEQ ID NO: 2347886 - RNA, 16 nt, Human
uuggggucugccacca

SEQ ID NO: 2347887 - RNA, 18 nt, Human
uugguuaagucuguuuua

SEQ ID NO: 2347888 - RNA, 13 nt, Human
uuggggucagcca

SEQ ID NO: 2347889 - RNA, 16 nt, Human
uuggggucagccaggg

SEQ ID NO: 2347890 - RNA, 14 nt, Human
uuggggucugaccc

SEQ ID NO: 2347891 - RNA, 15 nt, Human
uuggggucugacccc

SEQ ID NO: 2347892 - RNA, 17 nt, Human
uugggguacccacugcu

SEQ ID NO: 2347893 - RNA, 19 nt, Human
uuggggaagaacgaagcca

SEQ ID NO: 2347894 - RNA, 15 nt, Human
uugggcugagacugg

SEQ ID NO: 2347895 - RNA, 19 nt, Human
uugggcuggaacagauuca

SEQ ID NO: 2347896 - RNA, 22 nt, Human
uugggcugugcggaucucugga

SEQ ID NO: 2347897 - RNA, 13 nt, Human
uugggcugagacu

SEQ ID NO: 2347898 - RNA, 15 nt, Human
uugggcuccuuuuuc

SEQ ID NO: 2347899 - RNA, 16 nt, Human
uugggcuccuuuuucu

SEQ ID NO: 2347900 - RNA, 16 nt, Human
uugggcggcugagagc

SEQ ID NO: 2347901 - RNA, 18 nt, Human
uugggcggcugagagccc

SEQ ID NO: 2347902 - RNA, 21 nt, Human
uugggcggcugagagccccag

SEQ ID NO: 2347903 - RNA, 20 nt, Human
uugggcagaagggagaagga

SEQ ID NO: 2347904 - RNA, 12 nt, Human
uugggcagagcu

SEQ ID NO: 2347905 - RNA, 19 nt, Human
uugggcagaagggagaagg

SEQ ID NO: 2347906 - RNA, 22 nt, Human
uugggcagagcuggcucugagc

SEQ ID NO: 2347907 - RNA, 17 nt, Human
uugggcagagcuggcuc

SEQ ID NO: 2347908 - RNA, 21 nt, Human
uugggcagagcuggcucugag

SEQ ID NO: 2347909 - RNA, 20 nt, Human
uugggccugcuccagaccug

SEQ ID NO: 2347910 - RNA, 13 nt, Human
uugggccagacau

SEQ ID NO: 2347911 - RNA, 22 nt, Human
uugggcagcgcccuuccucucc

SEQ ID NO: 2347912 - RNA, 18 nt, Human
uugggcagcgcccuuccu

SEQ ID NO: 2347913 - RNA, 19 nt, Human
uugggcagcgcccuuccuc

SEQ ID NO: 2347914 - RNA, 21 nt, Human
uugggcagcgcccuuccucuc

SEQ ID NO: 2347915 - RNA, 23 nt, Human
uugggcagcgcccuuccucucca

SEQ ID NO: 2347916 - RNA, 20 nt, Human
augaaccacaucuugcucug

SEQ ID NO: 2347917 - RNA, 13 nt, Human
augaaccacaucu

SEQ ID NO: 2347918 - RNA, 21 nt, Human
augaacauauuguugaaaggu

SEQ ID NO: 2347919 - RNA, 15 nt, Human
augaacauguuccug

SEQ ID NO: 2347920 - RNA, 18 nt, Human
augaacauguacuguucu

SEQ ID NO: 2347921 - RNA, 22 nt, Human
augaauuacauuuguauaaaau

SEQ ID NO: 2347922 - RNA, 18 nt, Human
augaauuacauuuguaua

SEQ ID NO: 2347923 - RNA, 19 nt, Human
augaauuacauuuguauaa

SEQ ID NO: 2347924 - RNA, 21 nt, Human
augaucugagucccaggagcu

SEQ ID NO: 2347925 - RNA, 22 nt, Human
augaucucuucuuuuggcuucc

SEQ ID NO: 2347926 - RNA, 16 nt, Human
augaucuacucagaaa

SEQ ID NO: 2347927 - RNA, 18 nt, Human
augaucuacucagaaauu

SEQ ID NO: 2347928 - RNA, 14 nt, Human
augaucuucuuuau

SEQ ID NO: 2347929 - RNA, 15 nt, Human
augauccuaaugaau

SEQ ID NO: 2347930 - RNA, 23 nt, Human
augaucuaccagccucccuauuu

SEQ ID NO: 2347931 - RNA, 14 nt, Human
augaucuacucaga

SEQ ID NO: 2347932 - RNA, 15 nt, Human
augaucuacucagaa

SEQ ID NO: 2347933 - RNA, 20 nt, Human
augaucagcuguuugucaua

SEQ ID NO: 2347934 - RNA, 18 nt, Human
augaucccuguguugucu

SEQ ID NO: 2347935 - RNA, 20 nt, Human
augaucccuguguugucucu

SEQ ID NO: 2347936 - RNA, 21 nt, Human
augauccggauuuaauuugau

SEQ ID NO: 2347937 - RNA, 22 nt, Human
augauccggauuuaauuugaua

SEQ ID NO: 2347938 - RNA, 16 nt, Human
augauccuaggcauuu

SEQ ID NO: 2347939 - RNA, 19 nt, Human
augaucagcuguuugucau

SEQ ID NO: 2347940 - RNA, 18 nt, Human
augaucagcuguuuguca

SEQ ID NO: 2347941 - RNA, 20 nt, Human
uuguuggcagcauaaaggcc

SEQ ID NO: 2347942 - RNA, 22 nt, Human
augaucacuaauacuaauucau

SEQ ID NO: 2347943 - RNA, 23 nt, Human
augaucacggcucacugcagccu

SEQ ID NO: 2347944 - RNA, 18 nt, Human
augaucacggcucacugc

SEQ ID NO: 2347945 - RNA, 19 nt, Human
augaucacggcucacugca

SEQ ID NO: 2347946 - RNA, 15 nt, Human
augaucacggcucac

SEQ ID NO: 2347947 - RNA, 18 nt, Human
augauauugcauaugcau

SEQ ID NO: 2347948 - RNA, 13 nt, Human
augauauugcaua

SEQ ID NO: 2347949 - RNA, 20 nt, Human
uuguuggaucuucaauggcu

SEQ ID NO: 2347950 - RNA, 21 nt, Human
uuguuggaaaagaauacagaa

SEQ ID NO: 2347951 - RNA, 15 nt, Human
uuguuggagccugca

SEQ ID NO: 2347952 - RNA, 15 nt, Human
uuguuggaucuucaa

SEQ ID NO: 2347953 - RNA, 13 nt, Human
uuguuggaaugaa

SEQ ID NO: 2347954 - RNA, 18 nt, Human
uuguugcuguugauguuu

SEQ ID NO: 2347955 - RNA, 21 nt, Human
uuguugauaaauuccacugga

SEQ ID NO: 2347956 - RNA, 22 nt, Human
uuguugagguggucugaauguu

SEQ ID NO: 2347957 - RNA, 19 nt, Human
uuguugcaaguacugcugu

SEQ ID NO: 2347958 - RNA, 14 nt, Human
uugugaaguacaua

SEQ ID NO: 2347959 - RNA, 22 nt, Human
uugugaaguacccguucacauu

SEQ ID NO: 2347960 - RNA, 18 nt, Human
uugugaagacugggaagu

SEQ ID NO: 2347961 - RNA, 18 nt, Human
uugugugguuuggcccuu

SEQ ID NO: 2347962 - RNA, 17 nt, Human
uugugaagguggaaaua

SEQ ID NO: 2347963 - RNA, 18 nt, Human
uugugaagguggaaauaa

SEQ ID NO: 2347964 - RNA, 19 nt, Human
uugugaagaaaaauaaagu

SEQ ID NO: 2347965 - RNA, 11 nt, Human
uugugaagagg

SEQ ID NO: 2347966 - RNA, 13 nt, Human
uugugaaggcagg

SEQ ID NO: 2347967 - RNA, 18 nt, Human
uugugaagcaaaauuuuu

SEQ ID NO: 2347968 - RNA, 19 nt, Human
uugugaacaagucccugua

SEQ ID NO: 2347969 - RNA, 19 nt, Human
uugugaacucagccaagca

SEQ ID NO: 2347970 - RNA, 22 nt, Human
uugugaacucagccaagcacag

SEQ ID NO: 2347971 - RNA, 23 nt, Human
uugugaacucagccaagcacagu

SEQ ID NO: 2347972 - RNA, 17 nt, Human
uugugaacuuuuuguag

SEQ ID NO: 2347973 - RNA, 19 nt, Human
uugugugugggcugugagu

SEQ ID NO: 2347974 - RNA, 19 nt, Human
uugugugucuuaauuauua

SEQ ID NO: 2347975 - RNA, 16 nt, Human
uugugugugggagugu

SEQ ID NO: 2347976 - RNA, 13 nt, Human
uuguuccccuccu

SEQ ID NO: 2347977 - RNA, 19 nt, Human
uuguuccccaucaucugug

SEQ ID NO: 2347978 - RNA, 14 nt, Human
uuguuccccuccuc

SEQ ID NO: 2347979 - RNA, 15 nt, Human
uuguuccccuccucc

SEQ ID NO: 2347980 - RNA, 13 nt, Human
uugugugucuuaa

SEQ ID NO: 2347981 - RNA, 15 nt, Human
uuguguguaugugua

SEQ ID NO: 2347982 - RNA, 13 nt, Human
uugugugugggag

SEQ ID NO: 2347983 - RNA, 10 nt, Human
uugugugugg

SEQ ID NO: 2347984 - RNA, 20 nt, Human
uuguugauaaauuccacugg

SEQ ID NO: 2347985 - RNA, 21 nt, Human
uuguugagguggucugaaugu

SEQ ID NO: 2347986 - RNA, 14 nt, Human
uuguugaggugguc

SEQ ID NO: 2347987 - RNA, 13 nt, Human
uuguucucagcuc

SEQ ID NO: 2347988 - RNA, 17 nt, Human
uuguucgggugugcaau

SEQ ID NO: 2347989 - RNA, 16 nt, Human
uuguucgggugugcaa

SEQ ID NO: 2347990 - RNA, 15 nt, Human
uuguucuaguuuuca

SEQ ID NO: 2347991 - RNA, 16 nt, Human
uuguucuaguuuucag

SEQ ID NO: 2347992 - RNA, 14 nt, Human
uuguucccucuccc

SEQ ID NO: 2347993 - RNA, 10 nt, Human
uugugugugu

SEQ ID NO: 2347994 - RNA, 23 nt, Human
uuguuccccuccuccacucuccc

SEQ ID NO: 2347995 - RNA, 16 nt, Human
uuguuccccuccucca

SEQ ID NO: 2347996 - RNA, 18 nt, Human
uuguuccccuccuccacu

SEQ ID NO: 2347997 - RNA, 19 nt, Human
uuguuccccuccuccacuc

SEQ ID NO: 2347998 - RNA, 20 nt, Human
uuguuccccuccuccacucu

SEQ ID NO: 2347999 - RNA, 18 nt, Human
augaucuucuuuauaauu

SEQ ID NO: 2348000 - RNA, 15 nt, Human
augaucuucuuuaua

SEQ ID NO: 2348001 - RNA, 16 nt, Human
augcaaaccaucauug

SEQ ID NO: 2348002 - RNA, 18 nt, Human
augcaaaccaucauugaa

SEQ ID NO: 2348003 - RNA, 19 nt, Human
augcaaaccaucauugaaa

SEQ ID NO: 2348004 - RNA, 20 nt, Human
augcaaaccaucauugaaau

SEQ ID NO: 2348005 - RNA, 21 nt, Human
augcaaaccaucauugaaauc

SEQ ID NO: 2348006 - RNA, 22 nt, Human
augcaaaccaucauugaaaucu

SEQ ID NO: 2348007 - RNA, 15 nt, Human
augcaaagaaaauca

SEQ ID NO: 2348008 - RNA, 22 nt, Human
augcaaggaccaggacucccuc

SEQ ID NO: 2348009 - RNA, 13 nt, Human
augcaagggacug

SEQ ID NO: 2348010 - RNA, 18 nt, Human
augcaagggacugugugu

SEQ ID NO: 2348011 - RNA, 22 nt, Human
augcaaggucauuuuuuuuaag

SEQ ID NO: 2348012 - RNA, 14 nt, Human
augcaccuggaaua

SEQ ID NO: 2348013 - RNA, 16 nt, Human
augcaccuggaauaua

SEQ ID NO: 2348014 - RNA, 22 nt, Human
augcaaacuuuauuuuguguuu

SEQ ID NO: 2348015 - RNA, 16 nt, Human
augcaaggucauuuuu

SEQ ID NO: 2348016 - RNA, 14 nt, Human
augcaaggucauuu

SEQ ID NO: 2348017 - RNA, 14 nt, Human
uuguuuuguuuuaa

SEQ ID NO: 2348018 - RNA, 13 nt, Human
uuguuuuguuuua

SEQ ID NO: 2348019 - RNA, 16 nt, Human
uuguuuuguuuuuugg

SEQ ID NO: 2348020 - RNA, 19 nt, Human
augcaccuugugucuguac

SEQ ID NO: 2348021 - RNA, 15 nt, Human
augcaccuugugucu

SEQ ID NO: 2348022 - RNA, 16 nt, Human
augcaccuugugucug

SEQ ID NO: 2348023 - RNA, 18 nt, Human
augcaccuugugucugua

SEQ ID NO: 2348024 - RNA, 19 nt, Human
augcaccuggaauauauaa

SEQ ID NO: 2348025 - RNA, 18 nt, Human
uuguuuuuuuuuuccacu

SEQ ID NO: 2348026 - RNA, 22 nt, Human
uuguuuuuccuuguauuuaaau

SEQ ID NO: 2348027 - RNA, 21 nt, Human
uuguuuuuccuuguauuuaaa

SEQ ID NO: 2348028 - RNA, 13 nt, Human
uuguuuuuccuug

SEQ ID NO: 2348029 - RNA, 12 nt, Human
uuguuuuuauga

SEQ ID NO: 2348030 - RNA, 19 nt, Human
uuguuuuucauucagucuu

SEQ ID NO: 2348031 - RNA, 17 nt, Human
uuuaaaaaauuaaucug

SEQ ID NO: 2348032 - RNA, 20 nt, Human
uuuaaaaaauaacuaccaag

SEQ ID NO: 2348033 - RNA, 22 nt, Human
uuuaaacuguguacauaacuga

SEQ ID NO: 2348034 - RNA, 21 nt, Human
uuuaaacuguguacauaacug

SEQ ID NO: 2348035 - RNA, 19 nt, Human
uuuaaacuguguacauaac

SEQ ID NO: 2348036 - RNA, 15 nt, Human
uuuaaacuguguaca

SEQ ID NO: 2348037 - RNA, 15 nt, Human
uuuaaaaaaauaaaa

SEQ ID NO: 2348038 - RNA, 19 nt, Human
uuguuuuuuuuuuccacuu

SEQ ID NO: 2348039 - RNA, 20 nt, Human
uuuaaaaaagaaacauuugg

SEQ ID NO: 2348040 - RNA, 17 nt, Human
uuuaaaaaaauaaaaca

SEQ ID NO: 2348041 - RNA, 18 nt, Human
uuuaaaaaaauaaaacau

SEQ ID NO: 2348042 - RNA, 19 nt, Human
uuuaaaaaaauaaaacauu

SEQ ID NO: 2348043 - RNA, 20 nt, Human
uuuaaaaaaauaaaacauuu

SEQ ID NO: 2348044 - RNA, 16 nt, Human
uugucccucugcccca

SEQ ID NO: 2348045 - RNA, 15 nt, Human
uugucccucugcccc

SEQ ID NO: 2348046 - RNA, 21 nt, Human
uuguccccuaagaguguuuaa

SEQ ID NO: 2348047 - RNA, 14 nt, Human
uuguccccucuuga

SEQ ID NO: 2348048 - RNA, 21 nt, Human
uuguccccugccugugccugc

SEQ ID NO: 2348049 - RNA, 18 nt, Human
uugucccugaagagaagg

SEQ ID NO: 2348050 - RNA, 17 nt, Human
uugucccucugccccau

SEQ ID NO: 2348051 - RNA, 16 nt, Human
uugucccucugcuacg

SEQ ID NO: 2348052 - RNA, 15 nt, Human
uugucccugugccua

SEQ ID NO: 2348053 - RNA, 16 nt, Human
uuguccgcuggguggu

SEQ ID NO: 2348054 - RNA, 18 nt, Human
uuguccguguucauacau

SEQ ID NO: 2348055 - RNA, 16 nt, Human
uuguccuaugggaguc

SEQ ID NO: 2348056 - RNA, 13 nt, Human
uuguccuccccuu

SEQ ID NO: 2348057 - RNA, 15 nt, Human
uuguccuccccuugg

SEQ ID NO: 2348058 - RNA, 14 nt, Human
uuguccuugcuggu

SEQ ID NO: 2348059 - RNA, 15 nt, Human
uuguccuuucccuuc

SEQ ID NO: 2348060 - RNA, 17 nt, Human
uuguccuuucccuucag

SEQ ID NO: 2348061 - RNA, 13 nt, Human
uugugaaauuauu

SEQ ID NO: 2348062 - RNA, 14 nt, Human
uugucgcucaugug

SEQ ID NO: 2348063 - RNA, 22 nt, Human
uugucacaugaaacauuugcaa

SEQ ID NO: 2348064 - RNA, 19 nt, Human
uugucaucuuucuucuauu

SEQ ID NO: 2348065 - RNA, 21 nt, Human
uugucaucauuguauauaugu

SEQ ID NO: 2348066 - RNA, 21 nt, Human
uugucaucuuucuucuauuuu

SEQ ID NO: 2348067 - RNA, 23 nt, Human
uugucaucauuguauauaugugu

SEQ ID NO: 2348068 - RNA, 18 nt, Human
uugucacgcuucuucuuu

SEQ ID NO: 2348069 - RNA, 19 nt, Human
uugucacgcuucuucuuuu

SEQ ID NO: 2348070 - RNA, 14 nt, Human
uugucauugcuguu

SEQ ID NO: 2348071 - RNA, 15 nt, Human
uugucauugcuguug

SEQ ID NO: 2348072 - RNA, 13 nt, Human
uugucauuuauaa

SEQ ID NO: 2348073 - RNA, 12 nt, Human
uugucauuuucu

SEQ ID NO: 2348074 - RNA, 15 nt, Human
uugucauuuucucca

SEQ ID NO: 2348075 - RNA, 15 nt, Human
uuguccccguggucu

SEQ ID NO: 2348076 - RNA, 17 nt, Human
uugucauuagccugagu

SEQ ID NO: 2348077 - RNA, 18 nt, Human
uugucauuagccugagua

SEQ ID NO: 2348078 - RNA, 19 nt, Human
uugucauuagccugaguag

SEQ ID NO: 2348079 - RNA, 20 nt, Human
uugucauuagccugaguaga

SEQ ID NO: 2348080 - RNA, 14 nt, Human
uugucauuagccug

SEQ ID NO: 2348081 - RNA, 15 nt, Human
uugucauuagccuga

SEQ ID NO: 2348082 - RNA, 14 nt, Human
uugucauuaaaggu

SEQ ID NO: 2348083 - RNA, 12 nt, Human
uugucauuaaag

SEQ ID NO: 2348084 - RNA, 13 nt, Human
augaguuuuuccc

SEQ ID NO: 2348085 - RNA, 13 nt, Human
augaguuuuugau

SEQ ID NO: 2348086 - RNA, 20 nt, Human
augaguuuuugauagcuuua

SEQ ID NO: 2348087 - RNA, 19 nt, Human
augaguuuuugauagcuuu

SEQ ID NO: 2348088 - RNA, 17 nt, Human
augaguggcuuuaauga

SEQ ID NO: 2348089 - RNA, 17 nt, Human
augagugaauaaauguc

SEQ ID NO: 2348090 - RNA, 23 nt, Human
augagugcuucagaaugugauuu

SEQ ID NO: 2348091 - RNA, 16 nt, Human
augagugcgugcucag

SEQ ID NO: 2348092 - RNA, 17 nt, Human
augagugcgugcucagu

SEQ ID NO: 2348093 - RNA, 15 nt, Human
augagugaauaaaug

SEQ ID NO: 2348094 - RNA, 16 nt, Human
augagugaauaaaugu

SEQ ID NO: 2348095 - RNA, 21 nt, Human
augaguuuuugauagcuuuau

SEQ ID NO: 2348096 - RNA, 15 nt, Human
augauaaaacacaaa

SEQ ID NO: 2348097 - RNA, 18 nt, Human
uugucacacacuuuggcu

SEQ ID NO: 2348098 - RNA, 14 nt, Human
augauaacuggaaa

SEQ ID NO: 2348099 - RNA, 19 nt, Human
augaggugcugggagggau

SEQ ID NO: 2348100 - RNA, 13 nt, Human
augaggugggagg

SEQ ID NO: 2348101 - RNA, 14 nt, Human
augaggugggaggu

SEQ ID NO: 2348102 - RNA, 16 nt, Human
augaguccuugaaaau

SEQ ID NO: 2348103 - RNA, 18 nt, Human
augaguccuugaaaauau

SEQ ID NO: 2348104 - RNA, 20 nt, Human
augaguccuugaaaauauuu

SEQ ID NO: 2348105 - RNA, 21 nt, Human
augaguccuugaaaauauuuu

SEQ ID NO: 2348106 - RNA, 18 nt, Human
augaggugcugggaggga

SEQ ID NO: 2348107 - RNA, 17 nt, Human
augaggugcugggaggg

SEQ ID NO: 2348108 - RNA, 16 nt, Human
augaggugcugggagg

SEQ ID NO: 2348109 - RNA, 15 nt, Human
augaggugcugggag

SEQ ID NO: 2348110 - RNA, 22 nt, Human
augaggugggagguggaagaag

SEQ ID NO: 2348111 - RNA, 14 nt, Human
augaggugcuggga

SEQ ID NO: 2348112 - RNA, 15 nt, Human
augaggucugaaaug

SEQ ID NO: 2348113 - RNA, 17 nt, Human
augaggucugaaaugga

SEQ ID NO: 2348114 - RNA, 14 nt, Human
augaggucugaaau

SEQ ID NO: 2348115 - RNA, 23 nt, Human
augagccuacgcugaagauggca

SEQ ID NO: 2348116 - RNA, 20 nt, Human
augaggucccaggcagagaa

SEQ ID NO: 2348117 - RNA, 19 nt, Human
augaggucccaggcagaga

SEQ ID NO: 2348118 - RNA, 18 nt, Human
augaggucccaggcagag

SEQ ID NO: 2348119 - RNA, 17 nt, Human
augaggucccaggcaga

SEQ ID NO: 2348120 - RNA, 16 nt, Human
augaggucccaggcag

SEQ ID NO: 2348121 - RNA, 15 nt, Human
augaggucccaggca

SEQ ID NO: 2348122 - RNA, 14 nt, Human
augaggucccaggc

SEQ ID NO: 2348123 - RNA, 20 nt, Human
augagccgcugugagccccu

SEQ ID NO: 2348124 - RNA, 23 nt, Human
augagccgcugugagccccuggu

SEQ ID NO: 2348125 - RNA, 16 nt, Human
augagccuacgcugaa

SEQ ID NO: 2348126 - RNA, 19 nt, Human
augagccuacgcugaagau

SEQ ID NO: 2348127 - RNA, 17 nt, Human
augagccucagcauccu

SEQ ID NO: 2348128 - RNA, 18 nt, Human
augagccucagcauccug

SEQ ID NO: 2348129 - RNA, 18 nt, Human
augagauuguuuuaucau

SEQ ID NO: 2348130 - RNA, 22 nt, Human
augagauuguuuuaucaugaca

SEQ ID NO: 2348131 - RNA, 15 nt, Human
augagcaucaggcca

SEQ ID NO: 2348132 - RNA, 16 nt, Human
augagcaucaggccag

SEQ ID NO: 2348133 - RNA, 17 nt, Human
augagcaucaggccagg

SEQ ID NO: 2348134 - RNA, 18 nt, Human
augagcaucaggccaggc

SEQ ID NO: 2348135 - RNA, 19 nt, Human
augagcaucaggccaggcc

SEQ ID NO: 2348136 - RNA, 20 nt, Human
augagcaucaggccaggccc

SEQ ID NO: 2348137 - RNA, 21 nt, Human
augagcaucaggccaggcccu

SEQ ID NO: 2348138 - RNA, 18 nt, Human
augagccaccgcgcccag

SEQ ID NO: 2348139 - RNA, 18 nt, Human
augagcauggagcuggcc

SEQ ID NO: 2348140 - RNA, 15 nt, Human
augagcauggagcug

SEQ ID NO: 2348141 - RNA, 17 nt, Human
augagcauggagcuggc

SEQ ID NO: 2348142 - RNA, 21 nt, Human
augagccaccgcgcccagccu

SEQ ID NO: 2348143 - RNA, 14 nt, Human
augagccagacaaa

SEQ ID NO: 2348144 - RNA, 14 nt, Human
augagcaucccagg

SEQ ID NO: 2348145 - RNA, 15 nt, Human
augagcaucccagga

SEQ ID NO: 2348146 - RNA, 22 nt, Human
augagcaucaggccaggcccuc

SEQ ID NO: 2348147 - RNA, 11 nt, Human
augagccagac

SEQ ID NO: 2348148 - RNA, 12 nt, Human
augagccucagc

SEQ ID NO: 2348149 - RNA, 15 nt, Human
augagccucagcauc

SEQ ID NO: 2348150 - RNA, 16 nt, Human
augagccucagcaucc

SEQ ID NO: 2348151 - RNA, 22 nt, Human
augacaguuauacugucgguuu

SEQ ID NO: 2348152 - RNA, 18 nt, Human
augacaucaccacaguuu

SEQ ID NO: 2348153 - RNA, 18 nt, Human
augacaucacuuguacaa

SEQ ID NO: 2348154 - RNA, 14 nt, Human
augacaucacuugu

SEQ ID NO: 2348155 - RNA, 24 nt, Human
augacaucuucaaagcuugaagau

SEQ ID NO: 2348156 - RNA, 20 nt, Human
augacaucacuuguacaaaa

SEQ ID NO: 2348157 - RNA, 19 nt, Human
augacaucacuuguacaaa

SEQ ID NO: 2348158 - RNA, 16 nt, Human
augacaucucaggggc

SEQ ID NO: 2348159 - RNA, 18 nt, Human
augacaucucaggggcca

SEQ ID NO: 2348160 - RNA, 15 nt, Human
augacauguuauaua

SEQ ID NO: 2348161 - RNA, 16 nt, Human
augacauucaugccug

SEQ ID NO: 2348162 - RNA, 17 nt, Human
augacauguuauauauu

SEQ ID NO: 2348163 - RNA, 23 nt, Human
augacauguuauauauuuuuugu

SEQ ID NO: 2348164 - RNA, 17 nt, Human
augacauucaugccugg

SEQ ID NO: 2348165 - RNA, 13 nt, Human
augagagcccaga

SEQ ID NO: 2348166 - RNA, 14 nt, Human
augagagcccagag

SEQ ID NO: 2348167 - RNA, 16 nt, Human
augagagcccagaggu

SEQ ID NO: 2348168 - RNA, 18 nt, Human
augagagcccagagguaa

SEQ ID NO: 2348169 - RNA, 20 nt, Human
augagagcccagagguaaca

SEQ ID NO: 2348170 - RNA, 12 nt, Human
augagaggaaau

SEQ ID NO: 2348171 - RNA, 13 nt, Human
augagaggaaauc

SEQ ID NO: 2348172 - RNA, 19 nt, Human
augagaucccgccucuucu

SEQ ID NO: 2348173 - RNA, 20 nt, Human
augagaucaggcucugccuc

SEQ ID NO: 2348174 - RNA, 17 nt, Human
augagaucaggcucugc

SEQ ID NO: 2348175 - RNA, 18 nt, Human
augagaucaggcucugcc

SEQ ID NO: 2348176 - RNA, 16 nt, Human
augagauauuaaacca

SEQ ID NO: 2348177 - RNA, 15 nt, Human
augagaucaggcucu

SEQ ID NO: 2348178 - RNA, 16 nt, Human
augagaucaggcucug

SEQ ID NO: 2348179 - RNA, 13 nt, Human
augagagucacuu

SEQ ID NO: 2348180 - RNA, 21 nt, Human
augagaguuuuggaugcagug

SEQ ID NO: 2348181 - RNA, 18 nt, Human
augagaguuuuggaugca

SEQ ID NO: 2348182 - RNA, 20 nt, Human
augagaguuuuggaugcagu

SEQ ID NO: 2348183 - RNA, 23 nt, Human
augagaucuaagccuuuccauaa

SEQ ID NO: 2348184 - RNA, 22 nt, Human
augagaucuaagccuuuccaua

SEQ ID NO: 2348185 - RNA, 13 nt, Human
augagauccuuua

SEQ ID NO: 2348186 - RNA, 22 nt, Human
augagaucuaggugaggauuga

SEQ ID NO: 2348187 - RNA, 23 nt, Human
augagaugauacauccaaagcag

SEQ ID NO: 2348188 - RNA, 24 nt, Human
augagaugauacauccaaagcaga

SEQ ID NO: 2348189 - RNA, 18 nt, Human
augagaugccugaagcca

SEQ ID NO: 2348190 - RNA, 19 nt, Human
augagagggcaguguuucc

SEQ ID NO: 2348191 - RNA, 18 nt, Human
augagagggcaguguuuc

SEQ ID NO: 2348192 - RNA, 22 nt, Human
augagagcccagagguaacaga

SEQ ID NO: 2348193 - RNA, 15 nt, Human
augagaguuuuggau

SEQ ID NO: 2348194 - RNA, 17 nt, Human
augagaguuuuggaugc

SEQ ID NO: 2348195 - RNA, 16 nt, Human
augagaggaaaucacc

SEQ ID NO: 2348196 - RNA, 14 nt, Human
augagaggaaauca

SEQ ID NO: 2348197 - RNA, 15 nt, Human
augagaggaaaucac

SEQ ID NO: 2348198 - RNA, 18 nt, Human
uuucuaaagccuuaaguc

SEQ ID NO: 2348199 - RNA, 18 nt, Human
uuucuagggaaaugaaag

SEQ ID NO: 2348200 - RNA, 15 nt, Human
uuucuagggaaauga

SEQ ID NO: 2348201 - RNA, 14 nt, Human
uuucuagggaaaug

SEQ ID NO: 2348202 - RNA, 20 nt, Human
uuucuaggccuacaugcuuu

SEQ ID NO: 2348203 - RNA, 23 nt, Human
uuucuaguggucuuuguaagagu

SEQ ID NO: 2348204 - RNA, 20 nt, Human
uuucuaguggucuuuguaag

SEQ ID NO: 2348205 - RNA, 21 nt, Human
uuucuaguggucuuuguaaga

SEQ ID NO: 2348206 - RNA, 14 nt, Human
uuucuaguggucuu

SEQ ID NO: 2348207 - RNA, 17 nt, Human
uuucuaguggucuuugu

SEQ ID NO: 2348208 - RNA, 18 nt, Human
uuucuaguggucuuugua

SEQ ID NO: 2348209 - RNA, 19 nt, Human
uuucuaguggucuuuguaa

SEQ ID NO: 2348210 - RNA, 21 nt, Human
uuucuaugacacaugcaaggu

SEQ ID NO: 2348211 - RNA, 15 nt, Human
uuucuaugacacaug

SEQ ID NO: 2348212 - RNA, 22 nt, Human
uuucuauuaaauuaaauuuugu

SEQ ID NO: 2348213 - RNA, 13 nt, Human
uuucuaugaaaua

SEQ ID NO: 2348214 - RNA, 14 nt, Human
uuucuaucacauau

SEQ ID NO: 2348215 - RNA, 15 nt, Human
uuucuauccucugua

SEQ ID NO: 2348216 - RNA, 20 nt, Human
uuucuaucauuuuuguacag

SEQ ID NO: 2348217 - RNA, 14 nt, Human
uuucuaugaaauau

SEQ ID NO: 2348218 - RNA, 20 nt, Human
uuucuaugaaauauuauguu

SEQ ID NO: 2348219 - RNA, 12 nt, Human
uuucuccagcug

SEQ ID NO: 2348220 - RNA, 18 nt, Human
uuucuccagccagcaaug

SEQ ID NO: 2348221 - RNA, 20 nt, Human
uuucucccaggccaggcucc

SEQ ID NO: 2348222 - RNA, 12 nt, Human
uuucucccagcu

SEQ ID NO: 2348223 - RNA, 14 nt, Human
uuucugcaucagcu

SEQ ID NO: 2348224 - RNA, 22 nt, Human
uuucucauuugccaauaauaau

SEQ ID NO: 2348225 - RNA, 20 nt, Human
uuucuccaauaucagugcuc

SEQ ID NO: 2348226 - RNA, 11 nt, Human
uuucuccagcu

SEQ ID NO: 2348227 - RNA, 17 nt, Human
uuucuccaauaucagug

SEQ ID NO: 2348228 - RNA, 16 nt, Human
uuucugccagggagcu

SEQ ID NO: 2348229 - RNA, 18 nt, Human
uuucugcauuuugcuauu

SEQ ID NO: 2348230 - RNA, 13 nt, Human
uuucugcauuuug

SEQ ID NO: 2348231 - RNA, 13 nt, Human
uuucugcauaugu

SEQ ID NO: 2348232 - RNA, 17 nt, Human
uuucugcauauguugaa

SEQ ID NO: 2348233 - RNA, 19 nt, Human
uuucugcaguagucucugu

SEQ ID NO: 2348234 - RNA, 14 nt, Human
uuucugccgcagcc

SEQ ID NO: 2348235 - RNA, 16 nt, Human
uuucugccgcagcccu

SEQ ID NO: 2348236 - RNA, 21 nt, Human
uuucuauuuucccucgcuggg

SEQ ID NO: 2348237 - RNA, 17 nt, Human
uuucuauuucuccucca

SEQ ID NO: 2348238 - RNA, 14 nt, Human
uuucuauuccaaag

SEQ ID NO: 2348239 - RNA, 13 nt, Human
uuucuauuccaaa

SEQ ID NO: 2348240 - RNA, 17 nt, Human
uuucuauugaaaaauca

SEQ ID NO: 2348241 - RNA, 13 nt, Human
uuucuauuguaca

SEQ ID NO: 2348242 - RNA, 16 nt, Human
uuucuauuguacagaa

SEQ ID NO: 2348243 - RNA, 13 nt, Human
uuucuauuguuac

SEQ ID NO: 2348244 - RNA, 14 nt, Human
uuucuauuguuacu

SEQ ID NO: 2348245 - RNA, 23 nt, Human
uuucucagccgcuucugacugcu

SEQ ID NO: 2348246 - RNA, 20 nt, Human
uuucucagauccuuguuuca

SEQ ID NO: 2348247 - RNA, 23 nt, Human
uuucucagauccuuguuucaaac

SEQ ID NO: 2348248 - RNA, 19 nt, Human
uuucucagacuuuggaaaa

SEQ ID NO: 2348249 - RNA, 23 nt, Human
uuucucaccgcagucgucgcaca

SEQ ID NO: 2348250 - RNA, 17 nt, Human
uuucucagauccuuguu

SEQ ID NO: 2348251 - RNA, 16 nt, Human
uuucucaguuuucaua

SEQ ID NO: 2348252 - RNA, 18 nt, Human
uuucucaugaaucugcaa

SEQ ID NO: 2348253 - RNA, 14 nt, Human
uuucucagcuccca

SEQ ID NO: 2348254 - RNA, 15 nt, Human
uuucucagcucccau

SEQ ID NO: 2348255 - RNA, 20 nt, Human
uuucucagcucccauuucua

SEQ ID NO: 2348256 - RNA, 13 nt, Human
uuucucaaaguuu

SEQ ID NO: 2348257 - RNA, 14 nt, Human
uuucucaaaguuuu

SEQ ID NO: 2348258 - RNA, 15 nt, Human
uuucucaaaguuuug

SEQ ID NO: 2348259 - RNA, 16 nt, Human
uuucucaaaguuuuga

SEQ ID NO: 2348260 - RNA, 18 nt, Human
uuucucaaaguuuugaaa

SEQ ID NO: 2348261 - RNA, 22 nt, Human
uuucucaaaguuuugaaaagcu

SEQ ID NO: 2348262 - RNA, 22 nt, Human
uuucucaacaaagcacaguguu

SEQ ID NO: 2348263 - RNA, 15 nt, Human
uuugaaacaaagaag

SEQ ID NO: 2348264 - RNA, 20 nt, Human
uuugaaauagucugugugaa

SEQ ID NO: 2348265 - RNA, 19 nt, Human
uuugaaauagucuguguga

SEQ ID NO: 2348266 - RNA, 14 nt, Human
uuugaaauaauaaa

SEQ ID NO: 2348267 - RNA, 16 nt, Human
uuugaaacaauacuca

SEQ ID NO: 2348268 - RNA, 17 nt, Human
uuugaaacacuuugcau

SEQ ID NO: 2348269 - RNA, 19 nt, Human
uuugaaacacuuugcauaa

SEQ ID NO: 2348270 - RNA, 23 nt, Human
augggcuuguuuucuugccaaug

SEQ ID NO: 2348271 - RNA, 19 nt, Human
augggcuucacuguauaaa

SEQ ID NO: 2348272 - RNA, 20 nt, Human
augggcuucacuguauaaau

SEQ ID NO: 2348273 - RNA, 16 nt, Human
augggcuuagagcagu

SEQ ID NO: 2348274 - RNA, 15 nt, Human
augggcuucacugua

SEQ ID NO: 2348275 - RNA, 23 nt, Human
augggcuggguucuacccaggug

SEQ ID NO: 2348276 - RNA, 14 nt, Human
uuugaaauauugac

SEQ ID NO: 2348277 - RNA, 16 nt, Human
auggggaaggaggcug

SEQ ID NO: 2348278 - RNA, 18 nt, Human
augggcuuguuuucuugc

SEQ ID NO: 2348279 - RNA, 15 nt, Human
auggggagaaaagac

SEQ ID NO: 2348280 - RNA, 11 nt, Human
auggggaggga

SEQ ID NO: 2348281 - RNA, 14 nt, Human
auggggcccugccu

SEQ ID NO: 2348282 - RNA, 13 nt, Human
auggggcccugcc

SEQ ID NO: 2348283 - RNA, 19 nt, Human
uuucugcuggaaacagacu

SEQ ID NO: 2348284 - RNA, 21 nt, Human
uuucugcugaauuuucacaug

SEQ ID NO: 2348285 - RNA, 23 nt, Human
uuucugcugaauuuucacaugaa

SEQ ID NO: 2348286 - RNA, 19 nt, Human
uuucugcucagcuucuccu

SEQ ID NO: 2348287 - RNA, 20 nt, Human
uuucugcugaauuuucacau

SEQ ID NO: 2348288 - RNA, 18 nt, Human
uuucugcucagcuucucc

SEQ ID NO: 2348289 - RNA, 15 nt, Human
uuucugcucagcuuc

SEQ ID NO: 2348290 - RNA, 20 nt, Human
uuucuggaauacaugaaaua

SEQ ID NO: 2348291 - RNA, 18 nt, Human
uuucuggaauacaugaaa

SEQ ID NO: 2348292 - RNA, 12 nt, Human
uuucugcccugg

SEQ ID NO: 2348293 - RNA, 13 nt, Human
uuucugcccuggc

SEQ ID NO: 2348294 - RNA, 14 nt, Human
uuucugcccuggcu

SEQ ID NO: 2348295 - RNA, 13 nt, Human
uuucugccucuca

SEQ ID NO: 2348296 - RNA, 14 nt, Human
uuucugccucucaa

SEQ ID NO: 2348297 - RNA, 15 nt, Human
uuucugcccuggcug

SEQ ID NO: 2348298 - RNA, 20 nt, Human
uuucugcccuggcugcugcc

SEQ ID NO: 2348299 - RNA, 20 nt, Human
uuucugccuuccuugcuaau

SEQ ID NO: 2348300 - RNA, 13 nt, Human
uuucugccuuccu

SEQ ID NO: 2348301 - RNA, 15 nt, Human
uuucugccuuccuug

SEQ ID NO: 2348302 - RNA, 14 nt, Human
uuucugccuggagu

SEQ ID NO: 2348303 - RNA, 22 nt, Human
uuucugccuggaguguaugacu

SEQ ID NO: 2348304 - RNA, 15 nt, Human
uuucuuuaaaaaaca

SEQ ID NO: 2348305 - RNA, 13 nt, Human
uuucuuuaaaaga

SEQ ID NO: 2348306 - RNA, 14 nt, Human
uuucuuuaaaagaa

SEQ ID NO: 2348307 - RNA, 15 nt, Human
uuucuuuaagaaagu

SEQ ID NO: 2348308 - RNA, 16 nt, Human
uuucuuuaagaaagua

SEQ ID NO: 2348309 - RNA, 20 nt, Human
uuucuuuaaaagaaugggca

SEQ ID NO: 2348310 - RNA, 15 nt, Human
uuucuuuaaaagaau

SEQ ID NO: 2348311 - RNA, 23 nt, Human
uuucuggacugaagccugcagga

SEQ ID NO: 2348312 - RNA, 16 nt, Human
uuucuggagguugaua

SEQ ID NO: 2348313 - RNA, 21 nt, Human
uuucuggacugaagccugcag

SEQ ID NO: 2348314 - RNA, 18 nt, Human
uuucuggaauguaaucaa

SEQ ID NO: 2348315 - RNA, 21 nt, Human
uuucuggaauacaugaaauau

SEQ ID NO: 2348316 - RNA, 17 nt, Human
uuucuggagguugauaa

SEQ ID NO: 2348317 - RNA, 21 nt, Human
uuucuggagguugauaacuuu

SEQ ID NO: 2348318 - RNA, 22 nt, Human
uuucuggagguugauaacuuug

SEQ ID NO: 2348319 - RNA, 11 nt, Human
uuucuggaguc

SEQ ID NO: 2348320 - RNA, 19 nt, Human
uuucuuucaacuugcaucc

SEQ ID NO: 2348321 - RNA, 21 nt, Human
uuucuuuagagcauugccauu

SEQ ID NO: 2348322 - RNA, 13 nt, Human
uuucuuucaacuu

SEQ ID NO: 2348323 - RNA, 18 nt, Human
uuucuuuaaugcuuuuau

SEQ ID NO: 2348324 - RNA, 20 nt, Human
uuucuuuagagcauugccau

SEQ ID NO: 2348325 - RNA, 14 nt, Human
uuucuuucaaaauu

SEQ ID NO: 2348326 - RNA, 21 nt, Human
uuucuuuaguuuuugugaagu

SEQ ID NO: 2348327 - RNA, 13 nt, Human
uuucuuuaaugcu

SEQ ID NO: 2348328 - RNA, 20 nt, Human
uuucuuuaagauaauaguuu

SEQ ID NO: 2348329 - RNA, 13 nt, Human
uuucuuuguggcu

SEQ ID NO: 2348330 - RNA, 21 nt, Human
uuucuuuucuacccuagccau

SEQ ID NO: 2348331 - RNA, 16 nt, Human
uuucuuuguuaucaaa

SEQ ID NO: 2348332 - RNA, 15 nt, Human
uuucuuuguguagcu

SEQ ID NO: 2348333 - RNA, 16 nt, Human
uuucuuuuguaaaugu

SEQ ID NO: 2348334 - RNA, 23 nt, Human
uuucuuuugguaaagacuggcuu

SEQ ID NO: 2348335 - RNA, 22 nt, Human
uuucuuuugcccuucacagugu

SEQ ID NO: 2348336 - RNA, 14 nt, Human
uuucuuuucacaua

SEQ ID NO: 2348337 - RNA, 22 nt, Human
uuucuuuucuggaauguaauca

SEQ ID NO: 2348338 - RNA, 16 nt, Human
uuucuuuucucuggua

SEQ ID NO: 2348339 - RNA, 13 nt, Human
uuugaaaagcuau

SEQ ID NO: 2348340 - RNA, 14 nt, Human
uuugaaaagcuauu

SEQ ID NO: 2348341 - RNA, 15 nt, Human
uuugaaaagcuauua

SEQ ID NO: 2348342 - RNA, 18 nt, Human
uuugaaaagcuauuagcc

SEQ ID NO: 2348343 - RNA, 19 nt, Human
uuugaaaagcuauuagcca

SEQ ID NO: 2348344 - RNA, 24 nt, Human
augggagcuccucuccuggaggau

SEQ ID NO: 2348345 - RNA, 14 nt, Human
augggcacugcugg

SEQ ID NO: 2348346 - RNA, 14 nt, Human
augggcagagccca

SEQ ID NO: 2348347 - RNA, 18 nt, Human
augggcacugcugggugg

SEQ ID NO: 2348348 - RNA, 22 nt, Human
augggcacugcuggguggccca

SEQ ID NO: 2348349 - RNA, 15 nt, Human
augggcagagcagag

SEQ ID NO: 2348350 - RNA, 13 nt, Human
augggcagagcag

SEQ ID NO: 2348351 - RNA, 14 nt, Human
augggcagagcaga

SEQ ID NO: 2348352 - RNA, 15 nt, Human
augggccuccugugu

SEQ ID NO: 2348353 - RNA, 13 nt, Human
augggccaccgcc

SEQ ID NO: 2348354 - RNA, 12 nt, Human
augggccaccgc

SEQ ID NO: 2348355 - RNA, 14 nt, Human
augggcaguuacau

SEQ ID NO: 2348356 - RNA, 19 nt, Human
augggcaguuacaugcaua

SEQ ID NO: 2348357 - RNA, 23 nt, Human
augggcacugcuggguggcccau

SEQ ID NO: 2348358 - RNA, 22 nt, Human
augggcauggggugggccucug

SEQ ID NO: 2348359 - RNA, 23 nt, Human
augggcauggggugggccucugg

SEQ ID NO: 2348360 - RNA, 22 nt, Human
augggagccccagggucuuccc

SEQ ID NO: 2348361 - RNA, 20 nt, Human
augggagccgggucugccuc

SEQ ID NO: 2348362 - RNA, 17 nt, Human
augggagccgggucugc

SEQ ID NO: 2348363 - RNA, 13 nt, Human
augggagcucaug

SEQ ID NO: 2348364 - RNA, 13 nt, Human
augggagccccag

SEQ ID NO: 2348365 - RNA, 13 nt, Human
augggacugggag

SEQ ID NO: 2348366 - RNA, 23 nt, Human
augggagaguagauggugaaauu

SEQ ID NO: 2348367 - RNA, 15 nt, Human
augggacuggccucu

SEQ ID NO: 2348368 - RNA, 13 nt, Human
augggacauuuuu

SEQ ID NO: 2348369 - RNA, 18 nt, Human
augggcaacccccagccu

SEQ ID NO: 2348370 - RNA, 14 nt, Human
augggagcuccucu

SEQ ID NO: 2348371 - RNA, 15 nt, Human
augggagcuccucuc

SEQ ID NO: 2348372 - RNA, 19 nt, Human
augggagcuccucuccugg

SEQ ID NO: 2348373 - RNA, 20 nt, Human
augggagcuccucuccugga

SEQ ID NO: 2348374 - RNA, 21 nt, Human
augggagcuccucuccuggag

SEQ ID NO: 2348375 - RNA, 22 nt, Human
augggagcuccucuccuggagg

SEQ ID NO: 2348376 - RNA, 23 nt, Human
augggagcuccucuccuggagga

SEQ ID NO: 2348377 - RNA, 19 nt, Human
augggcaacccccagccug

SEQ ID NO: 2348378 - RNA, 21 nt, Human
augggcaacccccagccugcu

SEQ ID NO: 2348379 - RNA, 22 nt, Human
uuucccaucugcaccccuucuc

SEQ ID NO: 2348380 - RNA, 12 nt, Human
auggaauuugua

SEQ ID NO: 2348381 - RNA, 19 nt, Human
auggaauugauuugcauug

SEQ ID NO: 2348382 - RNA, 18 nt, Human
auggaauugauuugcauu

SEQ ID NO: 2348383 - RNA, 17 nt, Human
auggaauuucucccagu

SEQ ID NO: 2348384 - RNA, 19 nt, Human
auggacaugaucuucuuua

SEQ ID NO: 2348385 - RNA, 21 nt, Human
auggaauuuguaaguuuaugu

SEQ ID NO: 2348386 - RNA, 15 nt, Human
auggaauuuguaagu

SEQ ID NO: 2348387 - RNA, 17 nt, Human
auggaauuuguaaguuu

SEQ ID NO: 2348388 - RNA, 17 nt, Human
auggccucagcugccuc

SEQ ID NO: 2348389 - RNA, 16 nt, Human
auggccucagcugccu

SEQ ID NO: 2348390 - RNA, 13 nt, Human
auggacggugcuc

SEQ ID NO: 2348391 - RNA, 15 nt, Human
auggacggugcucca

SEQ ID NO: 2348392 - RNA, 20 nt, Human
auggacggugcuccaggcag

SEQ ID NO: 2348393 - RNA, 15 nt, Human
auggccucagcugcc

SEQ ID NO: 2348394 - RNA, 19 nt, Human
auggccucagcugccucac

SEQ ID NO: 2348395 - RNA, 18 nt, Human
auggccucagcugccuca

SEQ ID NO: 2348396 - RNA, 21 nt, Human
auggccucagcugccucacuu

SEQ ID NO: 2348397 - RNA, 13 nt, Human
auggccucaugug

SEQ ID NO: 2348398 - RNA, 14 nt, Human
auggaccugucacg

SEQ ID NO: 2348399 - RNA, 13 nt, Human
auggacccaaugc

SEQ ID NO: 2348400 - RNA, 18 nt, Human
auggacccaaugcacaca

SEQ ID NO: 2348401 - RNA, 21 nt, Human
auggacccaauauuuaccaga

SEQ ID NO: 2348402 - RNA, 18 nt, Human
auggccucuucagaucuc

SEQ ID NO: 2348403 - RNA, 17 nt, Human
auggccucauguggcug

SEQ ID NO: 2348404 - RNA, 18 nt, Human
auggccucauguggcugg

SEQ ID NO: 2348405 - RNA, 19 nt, Human
auggccucauguggcugga

SEQ ID NO: 2348406 - RNA, 20 nt, Human
auggccucauguggcuggaa

SEQ ID NO: 2348407 - RNA, 19 nt, Human
auggcuauaggugcuacaa

SEQ ID NO: 2348408 - RNA, 16 nt, Human
auggcuauaggugcua

SEQ ID NO: 2348409 - RNA, 22 nt, Human
augggacauuugcucauggaau

SEQ ID NO: 2348410 - RNA, 21 nt, Human
augggacauuugcucauggaa

SEQ ID NO: 2348411 - RNA, 23 nt, Human
auggcuauaggugcuacaaaaac

SEQ ID NO: 2348412 - RNA, 13 nt, Human
auggccuccuccc

SEQ ID NO: 2348413 - RNA, 17 nt, Human
auggacggugcuccagg

SEQ ID NO: 2348414 - RNA, 17 nt, Human
auggccugagaagagag

SEQ ID NO: 2348415 - RNA, 21 nt, Human
auggcuauaggugcuacaaaa

SEQ ID NO: 2348416 - RNA, 22 nt, Human
uuucgauucguuaagagagcaa

SEQ ID NO: 2348417 - RNA, 19 nt, Human
uuucgccguugaagaggaa

SEQ ID NO: 2348418 - RNA, 22 nt, Human
uuucgcaggauucuuccucccu

SEQ ID NO: 2348419 - RNA, 18 nt, Human
uuucgcaggauucuuccu

SEQ ID NO: 2348420 - RNA, 19 nt, Human
uuucgacuugcauuuuugc

SEQ ID NO: 2348421 - RNA, 15 nt, Human
uuucgacuugcauuu

SEQ ID NO: 2348422 - RNA, 15 nt, Human
uuucgagaagcugcu

SEQ ID NO: 2348423 - RNA, 19 nt, Human
uuucgagaagcugcucugg

SEQ ID NO: 2348424 - RNA, 14 nt, Human
uuucguuucuguau

SEQ ID NO: 2348425 - RNA, 14 nt, Human
uuucguuuguuugu

SEQ ID NO: 2348426 - RNA, 21 nt, Human
uuucgugggucuguuuuccuu

SEQ ID NO: 2348427 - RNA, 21 nt, Human
uuucgucuguuuauaaacauu

SEQ ID NO: 2348428 - RNA, 13 nt, Human
uuucguggggagg

SEQ ID NO: 2348429 - RNA, 17 nt, Human
uuucuaaacaagauuuu

SEQ ID NO: 2348430 - RNA, 13 nt, Human
uuucuaaacaaga

SEQ ID NO: 2348431 - RNA, 12 nt, Human
uuucuaaaacua

SEQ ID NO: 2348432 - RNA, 15 nt, Human
uuucuaaaacuaaau

SEQ ID NO: 2348433 - RNA, 14 nt, Human
uuucuaaaaaacag

SEQ ID NO: 2348434 - RNA, 19 nt, Human
uuucuaaaacuaaauagca

SEQ ID NO: 2348435 - RNA, 18 nt, Human
uuuccuuccuucccuggc

SEQ ID NO: 2348436 - RNA, 14 nt, Human
uuuccuucugaagu

SEQ ID NO: 2348437 - RNA, 18 nt, Human
uuuccuucucaucuguga

SEQ ID NO: 2348438 - RNA, 14 nt, Human
uuuccuugaagccg

SEQ ID NO: 2348439 - RNA, 13 nt, Human
uuuccuugaagcc

SEQ ID NO: 2348440 - RNA, 16 nt, Human
uuuccuucuugccuuc

SEQ ID NO: 2348441 - RNA, 19 nt, Human
uuuccuuggggcaggcagu

SEQ ID NO: 2348442 - RNA, 19 nt, Human
uuuccuuguccccacacuc

SEQ ID NO: 2348443 - RNA, 18 nt, Human
uuuccuuggggcaggcag

SEQ ID NO: 2348444 - RNA, 16 nt, Human
uuuccuuggcuggugc

SEQ ID NO: 2348445 - RNA, 12 nt, Human
uuuccuugcuca

SEQ ID NO: 2348446 - RNA, 23 nt, Human
uuuccuuggcucccauucacucu

SEQ ID NO: 2348447 - RNA, 21 nt, Human
uuuccuuuaaaaaaauuuaag

SEQ ID NO: 2348448 - RNA, 22 nt, Human
uuuccuuuaaaaaaauuuaagu

SEQ ID NO: 2348449 - RNA, 21 nt, Human
uuuccuuguccccacacuccu

SEQ ID NO: 2348450 - RNA, 19 nt, Human
uuuccuuucauuuacugug

SEQ ID NO: 2348451 - RNA, 16 nt, Human
uuuccuuuccccagcc

SEQ ID NO: 2348452 - RNA, 17 nt, Human
uuuccuuuccccagccc

SEQ ID NO: 2348453 - RNA, 23 nt, Human
uuuccuuuaaaaaaauuuaagug

SEQ ID NO: 2348454 - RNA, 19 nt, Human
uuuccuuuauauuuaguga

SEQ ID NO: 2348455 - RNA, 21 nt, Human
uuuccuuuuaaaacacuucca

SEQ ID NO: 2348456 - RNA, 14 nt, Human
uuuccuuucucacc

SEQ ID NO: 2348457 - RNA, 20 nt, Human
uuuccuuuccccagcccagg

SEQ ID NO: 2348458 - RNA, 12 nt, Human
uuuccuuuggag

SEQ ID NO: 2348459 - RNA, 23 nt, Human
uuuccuuugucaucauuguauau

SEQ ID NO: 2348460 - RNA, 16 nt, Human
uuuccuuugucaucau

SEQ ID NO: 2348461 - RNA, 21 nt, Human
uuuccuuuuuuaaaaaugcaa

SEQ ID NO: 2348462 - RNA, 13 nt, Human
uuuccuuuuuuau

SEQ ID NO: 2348463 - RNA, 18 nt, Human
uuuccuuuuuuauacaca

SEQ ID NO: 2348464 - RNA, 22 nt, Human
uuuccuuuuuuauacacauaau

SEQ ID NO: 2348465 - RNA, 16 nt, Human
uuuccuuuuuuaaaaa

SEQ ID NO: 2348466 - RNA, 15 nt, Human
uuuccuuuuuuaaaa

SEQ ID NO: 2348467 - RNA, 17 nt, Human
uuuccuuuuuuguuauu

SEQ ID NO: 2348468 - RNA, 16 nt, Human
uuuccuuuuuuguuau

SEQ ID NO: 2348469 - RNA, 13 nt, Human
uuuccuucagugc

SEQ ID NO: 2348470 - RNA, 23 nt, Human
uuuccuucauucaacccaccugc

SEQ ID NO: 2348471 - RNA, 15 nt, Human
uuuccuucucaucug

SEQ ID NO: 2348472 - RNA, 16 nt, Human
uuuccuuccuucccug

SEQ ID NO: 2348473 - RNA, 15 nt, Human
uuuccuuccaucccu

SEQ ID NO: 2348474 - RNA, 14 nt, Human
uuuccuuccauccc

SEQ ID NO: 2348475 - RNA, 19 nt, Human
uuuccuuccaucccuaccc

SEQ ID NO: 2348476 - RNA, 21 nt, Human
uuuccuucauucaacccaccu

SEQ ID NO: 2348477 - RNA, 22 nt, Human
uuuccuucagugccuuauggaa

SEQ ID NO: 2348478 - RNA, 18 nt, Human
uuuccuucagugccuuau

SEQ ID NO: 2348479 - RNA, 21 nt, Human
uuuccuucagugccuuaugga

SEQ ID NO: 2348480 - RNA, 19 nt, Human
uuuccuuaaauuaucuaaa

SEQ ID NO: 2348481 - RNA, 16 nt, Human
uuuccuuaaacugugu

SEQ ID NO: 2348482 - RNA, 23 nt, Human
uuuccuuaaacuguguggacugu

SEQ ID NO: 2348483 - RNA, 17 nt, Human
augggccuccugugugu

SEQ ID NO: 2348484 - RNA, 12 nt, Human
uuuccugugucu

SEQ ID NO: 2348485 - RNA, 11 nt, Human
uuuccuucagu

SEQ ID NO: 2348486 - RNA, 16 nt, Human
uuuccuuaauccagcu

SEQ ID NO: 2348487 - RNA, 13 nt, Human
uuuccuuaaucca

SEQ ID NO: 2348488 - RNA, 12 nt, Human
uuuccuucagug

SEQ ID NO: 2348489 - RNA, 15 nt, Human
uuuccuucagugccu

SEQ ID NO: 2348490 - RNA, 13 nt, Human
uuuacggacaccc

SEQ ID NO: 2348491 - RNA, 18 nt, Human
uuuacgcuuugauucaua

SEQ ID NO: 2348492 - RNA, 13 nt, Human
uuuacgcuuugau

SEQ ID NO: 2348493 - RNA, 21 nt, Human
uuuaccuuuuuuauacauaaa

SEQ ID NO: 2348494 - RNA, 17 nt, Human
uuuacggacacccccuc

SEQ ID NO: 2348495 - RNA, 18 nt, Human
uuuacgucugggagaaau

SEQ ID NO: 2348496 - RNA, 16 nt, Human
uuuaccuuuuaauuaa

SEQ ID NO: 2348497 - RNA, 15 nt, Human
uuuacuaaagaaaga

SEQ ID NO: 2348498 - RNA, 17 nt, Human
uuuacuaaagaaagauu

SEQ ID NO: 2348499 - RNA, 22 nt, Human
uuuacuaaagaaagauuacuua

SEQ ID NO: 2348500 - RNA, 18 nt, Human
uuuacuaauagacaauuu

SEQ ID NO: 2348501 - RNA, 15 nt, Human
uuuacuaagaugaca

SEQ ID NO: 2348502 - RNA, 16 nt, Human
uuuacuaagaugacau

SEQ ID NO: 2348503 - RNA, 21 nt, Human
uuuacuaagaugacauugcua

SEQ ID NO: 2348504 - RNA, 23 nt, Human
uuuacuaagaugacauugcuaag

SEQ ID NO: 2348505 - RNA, 20 nt, Human
uuuacuaagccacaagaaau

SEQ ID NO: 2348506 - RNA, 21 nt, Human
uuuacuaagccacaagaaauu

SEQ ID NO: 2348507 - RNA, 22 nt, Human
uuuacuaagccacaagaaauuu

SEQ ID NO: 2348508 - RNA, 19 nt, Human
uuuacuaauuuucuagauu

SEQ ID NO: 2348509 - RNA, 17 nt, Human
uuuacuaauagacaauu

SEQ ID NO: 2348510 - RNA, 14 nt, Human
uuuacuaauagaca

SEQ ID NO: 2348511 - RNA, 16 nt, Human
uuuaccugugaaauag

SEQ ID NO: 2348512 - RNA, 15 nt, Human
uuuaccugugaaaua

SEQ ID NO: 2348513 - RNA, 21 nt, Human
uuuaccugugcguuacuaauu

SEQ ID NO: 2348514 - RNA, 13 nt, Human
uuuaccuuguaua

SEQ ID NO: 2348515 - RNA, 14 nt, Human
uuuaccuuuuuuau

SEQ ID NO: 2348516 - RNA, 20 nt, Human
uuuaccuuuuuuauacauaa

SEQ ID NO: 2348517 - RNA, 19 nt, Human
uuuaccuuuuuuauacaua

SEQ ID NO: 2348518 - RNA, 19 nt, Human
augcggccgcauucccuga

SEQ ID NO: 2348519 - RNA, 21 nt, Human
augcggcccagcccggcuccc

SEQ ID NO: 2348520 - RNA, 21 nt, Human
augcuaauauaaguuucuuug

SEQ ID NO: 2348521 - RNA, 17 nt, Human
augcuacacacugcaug

SEQ ID NO: 2348522 - RNA, 18 nt, Human
augcuacacacugcaugu

SEQ ID NO: 2348523 - RNA, 16 nt, Human
uuuaccugcaaaaaau

SEQ ID NO: 2348524 - RNA, 13 nt, Human
uuuaccugagacc

SEQ ID NO: 2348525 - RNA, 16 nt, Human
uuuaccugagaccagu

SEQ ID NO: 2348526 - RNA, 13 nt, Human
augccucagcccu

SEQ ID NO: 2348527 - RNA, 23 nt, Human
augcgcaggcuggcccugcccug

SEQ ID NO: 2348528 - RNA, 15 nt, Human
augccucaaugugac

SEQ ID NO: 2348529 - RNA, 22 nt, Human
augccguggauugcacguggcc

SEQ ID NO: 2348530 - RNA, 17 nt, Human
augccggaugugcuuuu

SEQ ID NO: 2348531 - RNA, 20 nt, Human
augccggugagaauaagaga

SEQ ID NO: 2348532 - RNA, 18 nt, Human
augcggcaagaaggaauu

SEQ ID NO: 2348533 - RNA, 12 nt, Human
augcggcccagc

SEQ ID NO: 2348534 - RNA, 15 nt, Human
augcgcucagggcca

SEQ ID NO: 2348535 - RNA, 23 nt, Human
augcgcucagggccaugcugagg

SEQ ID NO: 2348536 - RNA, 13 nt, Human
augcgcccccucc

SEQ ID NO: 2348537 - RNA, 18 nt, Human
augcgcccccuccgcccu

SEQ ID NO: 2348538 - RNA, 22 nt, Human
augcgcccccuccgcccugcca

SEQ ID NO: 2348539 - RNA, 16 nt, Human
augcggcccaggaugg

SEQ ID NO: 2348540 - RNA, 20 nt, Human
augcggcccaggauggcuuu

SEQ ID NO: 2348541 - RNA, 13 nt, Human
augcggcccagcc

SEQ ID NO: 2348542 - RNA, 14 nt, Human
augcggcccagccc

SEQ ID NO: 2348543 - RNA, 15 nt, Human
augcggcccagcccg

SEQ ID NO: 2348544 - RNA, 18 nt, Human
augcggcccagcccggcu

SEQ ID NO: 2348545 - RNA, 13 nt, Human
augcuaagugaaa

SEQ ID NO: 2348546 - RNA, 23 nt, Human
uuuaaagcaacugucuauuucug

SEQ ID NO: 2348547 - RNA, 17 nt, Human
uuuaaagcaacugucua

SEQ ID NO: 2348548 - RNA, 20 nt, Human
uuuaaagcaacugucuauuu

SEQ ID NO: 2348549 - RNA, 14 nt, Human
augccggaugugcu

SEQ ID NO: 2348550 - RNA, 21 nt, Human
uuuaaaggaaaaaauguugga

SEQ ID NO: 2348551 - RNA, 15 nt, Human
augccggaugugcuu

SEQ ID NO: 2348552 - RNA, 16 nt, Human
augccggaugugcuuu

SEQ ID NO: 2348553 - RNA, 17 nt, Human
uuuaaaggcccuaucug

SEQ ID NO: 2348554 - RNA, 12 nt, Human
uuuaaaggaaaa

SEQ ID NO: 2348555 - RNA, 15 nt, Human
uuuaaaggaaaaaau

SEQ ID NO: 2348556 - RNA, 17 nt, Human
uuuaaaggaaaaaaugu

SEQ ID NO: 2348557 - RNA, 24 nt, Human
uuuaaagcuuauuaaaacucauuu

SEQ ID NO: 2348558 - RNA, 19 nt, Human
uuuauguaguaauugacau

SEQ ID NO: 2348559 - RNA, 22 nt, Human
uuuauguaaacugcauuagaaa

SEQ ID NO: 2348560 - RNA, 19 nt, Human
uuuauaugaagauaagugu

SEQ ID NO: 2348561 - RNA, 17 nt, Human
uuuauaugaagauaagu

SEQ ID NO: 2348562 - RNA, 20 nt, Human
uuuauaugcuuacugauaua

SEQ ID NO: 2348563 - RNA, 19 nt, Human
uuuauaugcuucuguuuua

SEQ ID NO: 2348564 - RNA, 21 nt, Human
uuuauaugaagaaaaucacuu

SEQ ID NO: 2348565 - RNA, 14 nt, Human
uuuauaugaagaaa

SEQ ID NO: 2348566 - RNA, 17 nt, Human
uuuauaugcuucuguuu

SEQ ID NO: 2348567 - RNA, 12 nt, Human
uuuauauauuua

SEQ ID NO: 2348568 - RNA, 23 nt, Human
uuuauauauugguaacauccuuu

SEQ ID NO: 2348569 - RNA, 13 nt, Human
uuuauauauguau

SEQ ID NO: 2348570 - RNA, 21 nt, Human
uuuauauauacaguaacuuua

SEQ ID NO: 2348571 - RNA, 16 nt, Human
uuuauauauuuauaac

SEQ ID NO: 2348572 - RNA, 15 nt, Human
uuuauaucacauguu

SEQ ID NO: 2348573 - RNA, 15 nt, Human
uuuauauauuuauaa

SEQ ID NO: 2348574 - RNA, 13 nt, Human
uuuauauauuuau

SEQ ID NO: 2348575 - RNA, 17 nt, Human
uuuauaucccauuuuua

SEQ ID NO: 2348576 - RNA, 17 nt, Human
uuuauaucagccugagu

SEQ ID NO: 2348577 - RNA, 21 nt, Human
uuuauuaaauacaaaacuucc

SEQ ID NO: 2348578 - RNA, 15 nt, Human
uuuauuaaauacaaa

SEQ ID NO: 2348579 - RNA, 19 nt, Human
uuuauuaaaugcccagccc

SEQ ID NO: 2348580 - RNA, 16 nt, Human
uuuauuacuguaagaa

SEQ ID NO: 2348581 - RNA, 12 nt, Human
uuuauuaacaaa

SEQ ID NO: 2348582 - RNA, 18 nt, Human
uuuauuaacaaauuaugu

SEQ ID NO: 2348583 - RNA, 16 nt, Human
uuuaugguuucuccag

SEQ ID NO: 2348584 - RNA, 22 nt, Human
uuuaugucccuucacauaguuu

SEQ ID NO: 2348585 - RNA, 14 nt, Human
uuuaugucuaaaga

SEQ ID NO: 2348586 - RNA, 19 nt, Human
uuuaugucuaaagagcuuu

SEQ ID NO: 2348587 - RNA, 14 nt, Human
uuuaugugaaacau

SEQ ID NO: 2348588 - RNA, 15 nt, Human
uuuaugugaaacaug

SEQ ID NO: 2348589 - RNA, 23 nt, Human
uuuauuaaacagauuuuuacaaa

SEQ ID NO: 2348590 - RNA, 18 nt, Human
uuuaugucuauuuaagcc

SEQ ID NO: 2348591 - RNA, 13 nt, Human
uuuacuauuuuac

SEQ ID NO: 2348592 - RNA, 17 nt, Human
uuuacucaacccucuca

SEQ ID NO: 2348593 - RNA, 21 nt, Human
uuuacucaacccucucaggug

SEQ ID NO: 2348594 - RNA, 15 nt, Human
uuuagauaauacacc

SEQ ID NO: 2348595 - RNA, 23 nt, Human
uuuagcaugacaagccccaggca

SEQ ID NO: 2348596 - RNA, 20 nt, Human
uuuagcaugacaagccccag

SEQ ID NO: 2348597 - RNA, 16 nt, Human
uuuagcauaaaauuuu

SEQ ID NO: 2348598 - RNA, 12 nt, Human
uuuagcaugugu

SEQ ID NO: 2348599 - RNA, 15 nt, Human
uuuagccaaacccuu

SEQ ID NO: 2348600 - RNA, 17 nt, Human
uuuagaucaaauacuuu

SEQ ID NO: 2348601 - RNA, 16 nt, Human
uuuagaucaaauacuu

SEQ ID NO: 2348602 - RNA, 21 nt, Human
uuuacuacuguggaaaaauau

SEQ ID NO: 2348603 - RNA, 20 nt, Human
uuuacuagaacacagaaagc

SEQ ID NO: 2348604 - RNA, 23 nt, Human
uuuacuacuguggaaaaauauuu

SEQ ID NO: 2348605 - RNA, 15 nt, Human
uuuacuaugccugug

SEQ ID NO: 2348606 - RNA, 18 nt, Human
uuuacuagggaucccuca

SEQ ID NO: 2348607 - RNA, 23 nt, Human
uuuacuagggaucccucaucugu

SEQ ID NO: 2348608 - RNA, 13 nt, Human
uuuagauaauaca

SEQ ID NO: 2348609 - RNA, 18 nt, Human
uuuagaguugauacuaca

SEQ ID NO: 2348610 - RNA, 15 nt, Human
uuuagccuaguucau

SEQ ID NO: 2348611 - RNA, 18 nt, Human
uuuagccaaacccuuguc

SEQ ID NO: 2348612 - RNA, 15 nt, Human
uuuagccaccaucuu

SEQ ID NO: 2348613 - RNA, 23 nt, Human
uuuagcuacuauauaugugauga

SEQ ID NO: 2348614 - RNA, 16 nt, Human
uuuagccuucucuguu

SEQ ID NO: 2348615 - RNA, 20 nt, Human
uuuagcucaaacguggcuuu

SEQ ID NO: 2348616 - RNA, 19 nt, Human
uuuaggucucuuccccucu

SEQ ID NO: 2348617 - RNA, 23 nt, Human
uuuagcugaugaacuuauucugu

SEQ ID NO: 2348618 - RNA, 21 nt, Human
uuuagcugaugaacuuauucu

SEQ ID NO: 2348619 - RNA, 13 nt, Human
uuuauauauacag

SEQ ID NO: 2348620 - RNA, 15 nt, Human
uuuauauauacagua

SEQ ID NO: 2348621 - RNA, 21 nt, Human
uuuaguaccugaaaaguaacu

SEQ ID NO: 2348622 - RNA, 16 nt, Human
uuuaguaaggcugugu

SEQ ID NO: 2348623 - RNA, 22 nt, Human
uuuaggucaagaagaagaugga

SEQ ID NO: 2348624 - RNA, 22 nt, Human
uuuagguguugauuuucuguug

SEQ ID NO: 2348625 - RNA, 22 nt, Human
uuuagguuuuuguuuguuuccu

SEQ ID NO: 2348626 - RNA, 16 nt, Human
auggaaggguuugugg

SEQ ID NO: 2348627 - RNA, 23 nt, Human
auggaacccuuuuggcccccgag

SEQ ID NO: 2348628 - RNA, 21 nt, Human
auggaaguacuauaauuuacc

SEQ ID NO: 2348629 - RNA, 16 nt, Human
augcuuauuuuaaaau

SEQ ID NO: 2348630 - RNA, 15 nt, Human
auggaacaggcucag

SEQ ID NO: 2348631 - RNA, 14 nt, Human
augcuuauuuuaaa

SEQ ID NO: 2348632 - RNA, 16 nt, Human
auggaacauaaaauac

SEQ ID NO: 2348633 - RNA, 19 nt, Human
augcuuaucaucuaaagau

SEQ ID NO: 2348634 - RNA, 23 nt, Human
augcuuagucccucaugcaaauc

SEQ ID NO: 2348635 - RNA, 23 nt, Human
augcuuagucacugccugcagag

SEQ ID NO: 2348636 - RNA, 21 nt, Human
augcuuagucccucaugcaaa

SEQ ID NO: 2348637 - RNA, 15 nt, Human
augcuuagucccuca

SEQ ID NO: 2348638 - RNA, 15 nt, Human
augcuuacaaaaaag

SEQ ID NO: 2348639 - RNA, 14 nt, Human
augcuuaguaaugc

SEQ ID NO: 2348640 - RNA, 15 nt, Human
augcuuaguaaugcu

SEQ ID NO: 2348641 - RNA, 15 nt, Human
augcuuagucacugc

SEQ ID NO: 2348642 - RNA, 18 nt, Human
auggaacacucugagacu

SEQ ID NO: 2348643 - RNA, 17 nt, Human
auggaacacucugagac

SEQ ID NO: 2348644 - RNA, 22 nt, Human
auggaagguuuguauauuguca

SEQ ID NO: 2348645 - RNA, 17 nt, Human
auggaagguuuguauau

SEQ ID NO: 2348646 - RNA, 16 nt, Human
auggaaccgcaggaag

SEQ ID NO: 2348647 - RNA, 16 nt, Human
uuuauuuuaauaaugu

SEQ ID NO: 2348648 - RNA, 15 nt, Human
auggaauaacaugua

SEQ ID NO: 2348649 - RNA, 14 nt, Human
auggaauaacaugu

SEQ ID NO: 2348650 - RNA, 22 nt, Human
uuuauuuucugguagauagaaa

SEQ ID NO: 2348651 - RNA, 16 nt, Human
uuuauuuuccucccca

SEQ ID NO: 2348652 - RNA, 21 nt, Human
uuuauuuucuuuuguaaaugu

SEQ ID NO: 2348653 - RNA, 17 nt, Human
uuuauuuuuuaaguauu

SEQ ID NO: 2348654 - RNA, 15 nt, Human
uuuauuuuuuacauu

SEQ ID NO: 2348655 - RNA, 13 nt, Human
uuuauuuuuuggg

SEQ ID NO: 2348656 - RNA, 14 nt, Human
uuuauuuuuuaagu

SEQ ID NO: 2348657 - RNA, 18 nt, Human
uuuauuuuguaauuauug

SEQ ID NO: 2348658 - RNA, 23 nt, Human
augcugugacacauggccccucc

SEQ ID NO: 2348659 - RNA, 19 nt, Human
augcugugcccuaaagugu

SEQ ID NO: 2348660 - RNA, 17 nt, Human
augcuuagauguuccag

SEQ ID NO: 2348661 - RNA, 23 nt, Human
augcuuacugauauauuuuacaa

SEQ ID NO: 2348662 - RNA, 22 nt, Human
augcuuacugauauauuuuaca

SEQ ID NO: 2348663 - RNA, 13 nt, Human
augcuuacugaua

SEQ ID NO: 2348664 - RNA, 14 nt, Human
augcuguauauguu

SEQ ID NO: 2348665 - RNA, 14 nt, Human
augcuguauuuuaa

SEQ ID NO: 2348666 - RNA, 19 nt, Human
augcuguauucuucuuugg

SEQ ID NO: 2348667 - RNA, 23 nt, Human
augcugucuacacuaagagagaa

SEQ ID NO: 2348668 - RNA, 22 nt, Human
augcuggggcaagucccugacu

SEQ ID NO: 2348669 - RNA, 15 nt, Human
augcugggcugggug

SEQ ID NO: 2348670 - RNA, 16 nt, Human
augcugggcugggugc

SEQ ID NO: 2348671 - RNA, 11 nt, Human
augcuggguug

SEQ ID NO: 2348672 - RNA, 19 nt, Human
augcuggguuggugcacag

SEQ ID NO: 2348673 - RNA, 23 nt, Human
augcuggguuggugcacagugau

SEQ ID NO: 2348674 - RNA, 23 nt, Human
augcuguacaucuauuuuggauu

SEQ ID NO: 2348675 - RNA, 19 nt, Human
augcuguauauccuuucua

SEQ ID NO: 2348676 - RNA, 16 nt, Human
augcugggcugacggu

SEQ ID NO: 2348677 - RNA, 16 nt, Human
augcugggacucagcc

SEQ ID NO: 2348678 - RNA, 12 nt, Human
augcugggcugg

SEQ ID NO: 2348679 - RNA, 14 nt, Human
augcugggcuggcu

SEQ ID NO: 2348680 - RNA, 21 nt, Human
augcugggcuggcucccucuu

SEQ ID NO: 2348681 - RNA, 14 nt, Human
augcugggcugggu

SEQ ID NO: 2348682 - RNA, 9 nt, Human
augcuggga

SEQ ID NO: 2348683 - RNA, 23 nt, Human
augcugggaagacgccugagcuc

SEQ ID NO: 2348684 - RNA, 10 nt, Human
augcugggac

SEQ ID NO: 2348685 - RNA, 15 nt, Human
augcugggacucagc

SEQ ID NO: 2348686 - RNA, 22 nt, Human
augcuggcuguuggcugggggc

SEQ ID NO: 2348687 - RNA, 12 nt, Human
uuuauuaagaug

SEQ ID NO: 2348688 - RNA, 19 nt, Human
uuuauuacuguaagaaaau

SEQ ID NO: 2348689 - RNA, 20 nt, Human
uuucauagauugagaaguuu

SEQ ID NO: 2348690 - RNA, 20 nt, Human
uuucauagcuaagaaauaaa

SEQ ID NO: 2348691 - RNA, 19 nt, Human
uuucauacucuagauuuug

SEQ ID NO: 2348692 - RNA, 22 nt, Human
uuucauacucuagauuuuguuu

SEQ ID NO: 2348693 - RNA, 19 nt, Human
uuuccagguuuaagcuguu

SEQ ID NO: 2348694 - RNA, 15 nt, Human
uuucauaugcuguau

SEQ ID NO: 2348695 - RNA, 12 nt, Human
uuucauaaucuu

SEQ ID NO: 2348696 - RNA, 14 nt, Human
uuucauaaucuuug

SEQ ID NO: 2348697 - RNA, 19 nt, Human
uuucauaaguauuucaaau

SEQ ID NO: 2348698 - RNA, 18 nt, Human
uuucauaaguauuucaaa

SEQ ID NO: 2348699 - RNA, 16 nt, Human
uuucauacucuagauu

SEQ ID NO: 2348700 - RNA, 17 nt, Human
uuucauacucuagauuu

SEQ ID NO: 2348701 - RNA, 18 nt, Human
uuucauacucuagauuuu

SEQ ID NO: 2348702 - RNA, 21 nt, Human
uuucauacagcauuacaaauu

SEQ ID NO: 2348703 - RNA, 14 nt, Human
uuucauacacuuau

SEQ ID NO: 2348704 - RNA, 17 nt, Human
uuucauaaguauuucaa

SEQ ID NO: 2348705 - RNA, 14 nt, Human
uuucauaaguauuu

SEQ ID NO: 2348706 - RNA, 20 nt, Human
uuucccagcuacaccuuucu

SEQ ID NO: 2348707 - RNA, 21 nt, Human
uuucccacuguuuaaggaguu

SEQ ID NO: 2348708 - RNA, 12 nt, Human
uuucccacugca

SEQ ID NO: 2348709 - RNA, 15 nt, Human
uuucccacugcaccc

SEQ ID NO: 2348710 - RNA, 18 nt, Human
uuucccacugcacccccu

SEQ ID NO: 2348711 - RNA, 18 nt, Human
uuucccaggacccugaag

SEQ ID NO: 2348712 - RNA, 16 nt, Human
uuucccaggacccuga

SEQ ID NO: 2348713 - RNA, 14 nt, Human
uuucccaggacccu

SEQ ID NO: 2348714 - RNA, 11 nt, Human
uuucccaggac

SEQ ID NO: 2348715 - RNA, 14 nt, Human
uuucccauaauuuu

SEQ ID NO: 2348716 - RNA, 12 nt, Human
uuucccauaauu

SEQ ID NO: 2348717 - RNA, 22 nt, Human
uuucccacugcacccccuccug

SEQ ID NO: 2348718 - RNA, 17 nt, Human
auggaauugauuugcau

SEQ ID NO: 2348719 - RNA, 12 nt, Human
uuucccaucugc

SEQ ID NO: 2348720 - RNA, 13 nt, Human
uuucccaucugca

SEQ ID NO: 2348721 - RNA, 23 nt, Human
auggaauuggagcucgugggaca

SEQ ID NO: 2348722 - RNA, 19 nt, Human
uuuccauaaagaagauguu

SEQ ID NO: 2348723 - RNA, 12 nt, Human
uuuccagugcaa

SEQ ID NO: 2348724 - RNA, 19 nt, Human
uuuccagugagcuuaucau

SEQ ID NO: 2348725 - RNA, 21 nt, Human
uuuccagucuccaccaggaac

SEQ ID NO: 2348726 - RNA, 20 nt, Human
uuuccagucuccaccaggaa

SEQ ID NO: 2348727 - RNA, 15 nt, Human
uuuccagucuccacc

SEQ ID NO: 2348728 - RNA, 15 nt, Human
uuuccaguaccuuug

SEQ ID NO: 2348729 - RNA, 15 nt, Human
uuuccauaaggaaug

SEQ ID NO: 2348730 - RNA, 18 nt, Human
uuuccauauggauuuucu

SEQ ID NO: 2348731 - RNA, 22 nt, Human
uuuccauauggauuuucuauug

SEQ ID NO: 2348732 - RNA, 12 nt, Human
uuuccauauguu

SEQ ID NO: 2348733 - RNA, 20 nt, Human
uuucccacaccguguaaacc

SEQ ID NO: 2348734 - RNA, 23 nt, Human
uuucccacaccguguaaaccaaa

SEQ ID NO: 2348735 - RNA, 15 nt, Human
uuucaguuuucagga

SEQ ID NO: 2348736 - RNA, 21 nt, Human
uuucaguugaucacuggcaau

SEQ ID NO: 2348737 - RNA, 12 nt, Human
uuucauaaagca

SEQ ID NO: 2348738 - RNA, 21 nt, Human
uuucacuuucacauagauguc

SEQ ID NO: 2348739 - RNA, 17 nt, Human
uuucacuuugugauuau

SEQ ID NO: 2348740 - RNA, 12 nt, Human
uuucacuuuaga

SEQ ID NO: 2348741 - RNA, 17 nt, Human
uuucacuuuagaugcug

SEQ ID NO: 2348742 - RNA, 22 nt, Human
uuucagaaaauauuauguguuu

SEQ ID NO: 2348743 - RNA, 24 nt, Human
uuucacucuuauugcccacgcugg

SEQ ID NO: 2348744 - RNA, 15 nt, Human
uuucacucuccuugg

SEQ ID NO: 2348745 - RNA, 24 nt, Human
uuucacugcuggcugccuuagaac

SEQ ID NO: 2348746 - RNA, 17 nt, Human
uuucacucccuccauca

SEQ ID NO: 2348747 - RNA, 23 nt, Human
uuucacuggccacaguuguuuga

SEQ ID NO: 2348748 - RNA, 24 nt, Human
uuucacuguagaaugauuucaugc

SEQ ID NO: 2348749 - RNA, 17 nt, Human
uuucacuggaguuacau

SEQ ID NO: 2348750 - RNA, 18 nt, Human
uuucacuggaguuacauu

SEQ ID NO: 2348751 - RNA, 19 nt, Human
uuucacuggaguuacauua

SEQ ID NO: 2348752 - RNA, 22 nt, Human
uuucaccccacccuuccccucc

SEQ ID NO: 2348753 - RNA, 13 nt, Human
uuucaccccuccc

SEQ ID NO: 2348754 - RNA, 14 nt, Human
uuucaccccucccu

SEQ ID NO: 2348755 - RNA, 15 nt, Human
uuucaccccucccuu

SEQ ID NO: 2348756 - RNA, 17 nt, Human
uuucaccccucccuuuc

SEQ ID NO: 2348757 - RNA, 18 nt, Human
uuucaccccucccuuucu

SEQ ID NO: 2348758 - RNA, 20 nt, Human
uuucaccccucccuuucucc

SEQ ID NO: 2348759 - RNA, 22 nt, Human
uuucaccccucccuuucucccc

SEQ ID NO: 2348760 - RNA, 23 nt, Human
uuucacuccggagugagaagcuu

SEQ ID NO: 2348761 - RNA, 14 nt, Human
uuucacucuccuug

SEQ ID NO: 2348762 - RNA, 14 nt, Human
uuuauuuuuuucua

SEQ ID NO: 2348763 - RNA, 16 nt, Human
uuuauuuuuugggaaa

SEQ ID NO: 2348764 - RNA, 17 nt, Human
uuuauuuuuuucugaau

SEQ ID NO: 2348765 - RNA, 15 nt, Human
uuucaaaaaaauaaa

SEQ ID NO: 2348766 - RNA, 15 nt, Human
uuucaaaaacacagu

SEQ ID NO: 2348767 - RNA, 13 nt, Human
uuucacauuuucc

SEQ ID NO: 2348768 - RNA, 13 nt, Human
uuucaaaaacauu

SEQ ID NO: 2348769 - RNA, 15 nt, Human
uuucaccacauucgu

SEQ ID NO: 2348770 - RNA, 14 nt, Human
uuucacauuuuccu

SEQ ID NO: 2348771 - RNA, 22 nt, Human
uuucaccauuugauuauguagc

SEQ ID NO: 2348772 - RNA, 17 nt, Human
uuucaccagauuugcua

SEQ ID NO: 2348773 - RNA, 19 nt, Human
auauguaguauaaagaaaa

SEQ ID NO: 2348774 - RNA, 18 nt, Human
auauguaguauaaagaaa

SEQ ID NO: 2348775 - RNA, 19 nt, Human
auauguacuugucaaagaa

SEQ ID NO: 2348776 - RNA, 20 nt, Human
auauguacuugucaaagaag

SEQ ID NO: 2348777 - RNA, 21 nt, Human
auauguacuugucaaagaagg

SEQ ID NO: 2348778 - RNA, 20 nt, Human
auauguggaguucaucuuga

SEQ ID NO: 2348779 - RNA, 21 nt, Human
auauguggaguucaucuugaa

SEQ ID NO: 2348780 - RNA, 16 nt, Human
auauggggaugcagca

SEQ ID NO: 2348781 - RNA, 20 nt, Human
auauggggaugcagcauuau

SEQ ID NO: 2348782 - RNA, 17 nt, Human
auauggggggccaacac

SEQ ID NO: 2348783 - RNA, 20 nt, Human
auaugggggccuggauucau

SEQ ID NO: 2348784 - RNA, 15 nt, Human
auaugggagaaauag

SEQ ID NO: 2348785 - RNA, 17 nt, Human
auaugggcauuguaguu

SEQ ID NO: 2348786 - RNA, 14 nt, Human
auaugggagaaaua

SEQ ID NO: 2348787 - RNA, 17 nt, Human
auaugggacauuuuuga

SEQ ID NO: 2348788 - RNA, 18 nt, Human
auauggggggccaacacc

SEQ ID NO: 2348789 - RNA, 23 nt, Human
auauggggggccaacaccaggga

SEQ ID NO: 2348790 - RNA, 17 nt, Human
auauggguucuuuuuug

SEQ ID NO: 2348791 - RNA, 17 nt, Human
auauguacuugucaaag

SEQ ID NO: 2348792 - RNA, 23 nt, Human
auauguaccuaacgaaguauccu

SEQ ID NO: 2348793 - RNA, 15 nt, Human
uucauuaaagcauuu

SEQ ID NO: 2348794 - RNA, 23 nt, Human
uucauuaaaggcuucucucucac

SEQ ID NO: 2348795 - RNA, 19 nt, Human
uucauuaagcccucuucca

SEQ ID NO: 2348796 - RNA, 21 nt, Human
uucauuaauaauaaauucccu

SEQ ID NO: 2348797 - RNA, 18 nt, Human
uucauuaauaauaaauuc

SEQ ID NO: 2348798 - RNA, 15 nt, Human
uucauuaauaauaaa

SEQ ID NO: 2348799 - RNA, 13 nt, Human
uucauuaaagcau

SEQ ID NO: 2348800 - RNA, 16 nt, Human
uucauggacacuuuga

SEQ ID NO: 2348801 - RNA, 20 nt, Human
uucauggacacuuugaaaug

SEQ ID NO: 2348802 - RNA, 14 nt, Human
uucauggacacuuu

SEQ ID NO: 2348803 - RNA, 15 nt, Human
uucauggacacuuug

SEQ ID NO: 2348804 - RNA, 20 nt, Human
auauguguguguauguuugc

SEQ ID NO: 2348805 - RNA, 22 nt, Human
auauguguauguacguuuguau

SEQ ID NO: 2348806 - RNA, 16 nt, Human
auauguguguguaugu

SEQ ID NO: 2348807 - RNA, 12 nt, Human
auauguguaugu

SEQ ID NO: 2348808 - RNA, 14 nt, Human
auauguguauguac

SEQ ID NO: 2348809 - RNA, 16 nt, Human
auauguguauguacgu

SEQ ID NO: 2348810 - RNA, 17 nt, Human
auauguaggugucugca

SEQ ID NO: 2348811 - RNA, 23 nt, Human
auauggccacaguagucuugaug

SEQ ID NO: 2348812 - RNA, 15 nt, Human
auaugcaaagcacug

SEQ ID NO: 2348813 - RNA, 15 nt, Human
auauggccucaagau

SEQ ID NO: 2348814 - RNA, 16 nt, Human
auauggccucaagauc

SEQ ID NO: 2348815 - RNA, 15 nt, Human
auaugggacauuuuu

SEQ ID NO: 2348816 - RNA, 15 nt, Human
auauggcuauaaaua

SEQ ID NO: 2348817 - RNA, 22 nt, Human
auauggcucuucauaauucuaa

SEQ ID NO: 2348818 - RNA, 14 nt, Human
auaugcaaagcacu

SEQ ID NO: 2348819 - RNA, 13 nt, Human
auaugcaaagcac

SEQ ID NO: 2348820 - RNA, 23 nt, Human
auaugagaaggugccucaagaau

SEQ ID NO: 2348821 - RNA, 22 nt, Human
auaugagcuuccuucugugaaa

SEQ ID NO: 2348822 - RNA, 12 nt, Human
auaugauuuaua

SEQ ID NO: 2348823 - RNA, 13 nt, Human
auaugauuuauag

SEQ ID NO: 2348824 - RNA, 14 nt, Human
auaugauuuauagu

SEQ ID NO: 2348825 - RNA, 16 nt, Human
auaugauuuuauuuga

SEQ ID NO: 2348826 - RNA, 19 nt, Human
auaugauuuuauuugacaa

SEQ ID NO: 2348827 - RNA, 22 nt, Human
auaugauuuuauuugacaaaau

SEQ ID NO: 2348828 - RNA, 23 nt, Human
auaugacggaagaacauagaacu

SEQ ID NO: 2348829 - RNA, 20 nt, Human
auaugacucacaugaugcau

SEQ ID NO: 2348830 - RNA, 21 nt, Human
auaugagcuuccuucugugaa

SEQ ID NO: 2348831 - RNA, 20 nt, Human
auaugacggaagaacauaga

SEQ ID NO: 2348832 - RNA, 18 nt, Human
auaugacggaagaacaua

SEQ ID NO: 2348833 - RNA, 13 nt, Human
auaugacucacau

SEQ ID NO: 2348834 - RNA, 16 nt, Human
auaugacggaagaaca

SEQ ID NO: 2348835 - RNA, 13 nt, Human
auaugaccucaug

SEQ ID NO: 2348836 - RNA, 19 nt, Human
auaugacauucaugccugg

SEQ ID NO: 2348837 - RNA, 22 nt, Human
auaugaauacagggcaugcauu

SEQ ID NO: 2348838 - RNA, 17 nt, Human
auaugaauuuaaauaua

SEQ ID NO: 2348839 - RNA, 17 nt, Human
auaugaagcucaccugu

SEQ ID NO: 2348840 - RNA, 21 nt, Human
auaugaagcucaccuguugcu

SEQ ID NO: 2348841 - RNA, 21 nt, Human
auaugacagcugucccuguca

SEQ ID NO: 2348842 - RNA, 15 nt, Human
auaugacagcugucc

SEQ ID NO: 2348843 - RNA, 14 nt, Human
auaugacagcuguc

SEQ ID NO: 2348844 - RNA, 21 nt, Human
auaugaauuuaaauauaauuc

SEQ ID NO: 2348845 - RNA, 15 nt, Human
auaugaacauauugu

SEQ ID NO: 2348846 - RNA, 20 nt, Human
auaugaacauauuguugaaa

SEQ ID NO: 2348847 - RNA, 19 nt, Human
auaugaacauauuguugaa

SEQ ID NO: 2348848 - RNA, 14 nt, Human
auaugaagacauaa

SEQ ID NO: 2348849 - RNA, 15 nt, Human
auaugaagacauaaa

SEQ ID NO: 2348850 - RNA, 16 nt, Human
auaugaagacauaaac

SEQ ID NO: 2348851 - RNA, 14 nt, Human
auaugaaauuuaau

SEQ ID NO: 2348852 - RNA, 14 nt, Human
auauauuuuuaaga

SEQ ID NO: 2348853 - RNA, 16 nt, Human
auauauuuuuaagaua

SEQ ID NO: 2348854 - RNA, 23 nt, Human
auauauuuuuaagauaauaauau

SEQ ID NO: 2348855 - RNA, 14 nt, Human
auauauuuuuauau

SEQ ID NO: 2348856 - RNA, 14 nt, Human
auauauuucuuugu

SEQ ID NO: 2348857 - RNA, 18 nt, Human
auauauuuuacaauuuuu

SEQ ID NO: 2348858 - RNA, 15 nt, Human
auauauuuucuguuu

SEQ ID NO: 2348859 - RNA, 18 nt, Human
uuccaguaccuuugucac

SEQ ID NO: 2348860 - RNA, 17 nt, Human
uuccaguaccuuuguca

SEQ ID NO: 2348861 - RNA, 19 nt, Human
uuccaguaccuuugucaca

SEQ ID NO: 2348862 - RNA, 17 nt, Human
uuccagguuuaagcugu

SEQ ID NO: 2348863 - RNA, 18 nt, Human
uuccagguuuaagcuguu

SEQ ID NO: 2348864 - RNA, 19 nt, Human
uuccacgucccccuggggc

SEQ ID NO: 2348865 - RNA, 24 nt, Human
uuccacggagccacuccucugacu

SEQ ID NO: 2348866 - RNA, 13 nt, Human
uuccaggcuggga

SEQ ID NO: 2348867 - RNA, 15 nt, Human
uuccaggcugggaga

SEQ ID NO: 2348868 - RNA, 17 nt, Human
uuccaggcugggagagc

SEQ ID NO: 2348869 - RNA, 19 nt, Human
uuccacguguuuuauuccu

SEQ ID NO: 2348870 - RNA, 11 nt, Human
uuccaccagcc

SEQ ID NO: 2348871 - RNA, 22 nt, Human
uuccaccacagccagcaccugg

SEQ ID NO: 2348872 - RNA, 18 nt, Human
uuccaccaucaagccacc

SEQ ID NO: 2348873 - RNA, 12 nt, Human
uuccaccagccu

SEQ ID NO: 2348874 - RNA, 14 nt, Human
uuccaccucccucc

SEQ ID NO: 2348875 - RNA, 15 nt, Human
uuccaccucccuccc

SEQ ID NO: 2348876 - RNA, 19 nt, Human
uuccacgcugucuccagac

SEQ ID NO: 2348877 - RNA, 18 nt, Human
uuccacgcugucuccaga

SEQ ID NO: 2348878 - RNA, 15 nt, Human
uuccacggagccacu

SEQ ID NO: 2348879 - RNA, 22 nt, Human
uuccacggagccacuccucuga

SEQ ID NO: 2348880 - RNA, 21 nt, Human
uuccacggagccacuccucug

SEQ ID NO: 2348881 - RNA, 15 nt, Human
uuccaccuucccaug

SEQ ID NO: 2348882 - RNA, 15 nt, Human
uuccacgcugucucc

SEQ ID NO: 2348883 - RNA, 19 nt, Human
uuccacgaugaaaaacuuc

SEQ ID NO: 2348884 - RNA, 14 nt, Human
uuccacgaugaaaa

SEQ ID NO: 2348885 - RNA, 22 nt, Human
uuccacaucuacguuuuuggug

SEQ ID NO: 2348886 - RNA, 15 nt, Human
uuccaccacagccag

SEQ ID NO: 2348887 - RNA, 16 nt, Human
uuccaccacagccagc

SEQ ID NO: 2348888 - RNA, 21 nt, Human
uuccaccacagccagcaccug

SEQ ID NO: 2348889 - RNA, 16 nt, Human
uuccacauauaaagcu

SEQ ID NO: 2348890 - RNA, 21 nt, Human
uuccacagccugcaagucagu

SEQ ID NO: 2348891 - RNA, 21 nt, Human
uuccacaagagcccaggccuc

SEQ ID NO: 2348892 - RNA, 18 nt, Human
uucauuauuggaauuaac

SEQ ID NO: 2348893 - RNA, 17 nt, Human
uucauuauuggaauuaa

SEQ ID NO: 2348894 - RNA, 13 nt, Human
uucauuauuggaa

SEQ ID NO: 2348895 - RNA, 20 nt, Human
uucauuauuggaauuaaccu

SEQ ID NO: 2348896 - RNA, 13 nt, Human
uucauucuuagcu

SEQ ID NO: 2348897 - RNA, 16 nt, Human
uucauucuucucuagc

SEQ ID NO: 2348898 - RNA, 18 nt, Human
uucauugauaugaaaaau

SEQ ID NO: 2348899 - RNA, 18 nt, Human
uucauucuucucuagcug

SEQ ID NO: 2348900 - RNA, 17 nt, Human
uucauugagaguuuugu

SEQ ID NO: 2348901 - RNA, 19 nt, Human
uucauugagaguuuugucu

SEQ ID NO: 2348902 - RNA, 22 nt, Human
uucauugagaguuuugucuuga

SEQ ID NO: 2348903 - RNA, 13 nt, Human
uucauucuugaaa

SEQ ID NO: 2348904 - RNA, 19 nt, Human
uucauucuugaaagcugug

SEQ ID NO: 2348905 - RNA, 16 nt, Human
uucauugacuaucaaa

SEQ ID NO: 2348906 - RNA, 21 nt, Human
uucauggacacuuugaaaugu

SEQ ID NO: 2348907 - RNA, 14 nt, Human
uucauuauguaaaa

SEQ ID NO: 2348908 - RNA, 17 nt, Human
uucauuauguaaaaugu

SEQ ID NO: 2348909 - RNA, 22 nt, Human
uucauuauuaguacugcucuug

SEQ ID NO: 2348910 - RNA, 14 nt, Human
uucauuaucucaaa

SEQ ID NO: 2348911 - RNA, 13 nt, Human
uucauuagagcag

SEQ ID NO: 2348912 - RNA, 16 nt, Human
uucauuaauucuauaa

SEQ ID NO: 2348913 - RNA, 13 nt, Human
uucauuacagcuu

SEQ ID NO: 2348914 - RNA, 18 nt, Human
uucauuacagcuuaauca

SEQ ID NO: 2348915 - RNA, 13 nt, Human
uucauuaccuuuu

SEQ ID NO: 2348916 - RNA, 21 nt, Human
uucauuaccuuuuuugauaaa

SEQ ID NO: 2348917 - RNA, 20 nt, Human
uuccaagacauugucaauaa

SEQ ID NO: 2348918 - RNA, 19 nt, Human
uuccaagacauugucaaua

SEQ ID NO: 2348919 - RNA, 17 nt, Human
uuccaagacauugucaa

SEQ ID NO: 2348920 - RNA, 16 nt, Human
uuccaagacauuguca

SEQ ID NO: 2348921 - RNA, 22 nt, Human
uuccaauuuacauacucugcuu

SEQ ID NO: 2348922 - RNA, 18 nt, Human
uuccacaaaaucugucca

SEQ ID NO: 2348923 - RNA, 11 nt, Human
uuccacaaaau

SEQ ID NO: 2348924 - RNA, 21 nt, Human
uuccaauuuucuggaauacau

SEQ ID NO: 2348925 - RNA, 12 nt, Human
uuccaagacagu

SEQ ID NO: 2348926 - RNA, 14 nt, Human
uuccaagacaguau

SEQ ID NO: 2348927 - RNA, 14 nt, Human
uuccaagacauugu

SEQ ID NO: 2348928 - RNA, 13 nt, Human
uuccaagacauug

SEQ ID NO: 2348929 - RNA, 12 nt, Human
uuccaagacauu

SEQ ID NO: 2348930 - RNA, 22 nt, Human
uuccaagacaguauacaguccu

SEQ ID NO: 2348931 - RNA, 21 nt, Human
uuccaagacaugucuguucua

SEQ ID NO: 2348932 - RNA, 16 nt, Human
uuccaagacaugucug

SEQ ID NO: 2348933 - RNA, 22 nt, Human
uuccaacuguauauauucccaa

SEQ ID NO: 2348934 - RNA, 12 nt, Human
uucauuguaaaa

SEQ ID NO: 2348935 - RNA, 20 nt, Human
uucauugcccccagggcacu

SEQ ID NO: 2348936 - RNA, 19 nt, Human
uucauugcacuuugauuag

SEQ ID NO: 2348937 - RNA, 21 nt, Human
uucauugccuuaacuggagcc

SEQ ID NO: 2348938 - RNA, 22 nt, Human
uucagauauaaaagacugacca

SEQ ID NO: 2348939 - RNA, 19 nt, Human
uucagaaccucuuccccag

SEQ ID NO: 2348940 - RNA, 18 nt, Human
uucagaaccucuucccca

SEQ ID NO: 2348941 - RNA, 17 nt, Human
uucagaaccucuucccc

SEQ ID NO: 2348942 - RNA, 16 nt, Human
uucagaaccucuuccc

SEQ ID NO: 2348943 - RNA, 16 nt, Human
uucagaagacacugca

SEQ ID NO: 2348944 - RNA, 19 nt, Human
uucagauauaaaagacuga

SEQ ID NO: 2348945 - RNA, 15 nt, Human
uucagauauauauca

SEQ ID NO: 2348946 - RNA, 16 nt, Human
uucagauauauuuuuc

SEQ ID NO: 2348947 - RNA, 14 nt, Human
uucagauucccaga

SEQ ID NO: 2348948 - RNA, 14 nt, Human
uucagauugcuuug

SEQ ID NO: 2348949 - RNA, 22 nt, Human
uucagauucccagagcaaaaua

SEQ ID NO: 2348950 - RNA, 21 nt, Human
uucagauucccagagcaaaau

SEQ ID NO: 2348951 - RNA, 16 nt, Human
uucagauuugccuuau

SEQ ID NO: 2348952 - RNA, 23 nt, Human
uucagaaaacccuuuucuacagu

SEQ ID NO: 2348953 - RNA, 20 nt, Human
uucacuuuugacaaaggcaa

SEQ ID NO: 2348954 - RNA, 17 nt, Human
uucacuuuugacaaagg

SEQ ID NO: 2348955 - RNA, 16 nt, Human
uucagaaauguguuau

SEQ ID NO: 2348956 - RNA, 15 nt, Human
uucagaaccucuucc

SEQ ID NO: 2348957 - RNA, 12 nt, Human
uucagaaccucu

SEQ ID NO: 2348958 - RNA, 16 nt, Human
uucagaaccauccaua

SEQ ID NO: 2348959 - RNA, 20 nt, Human
uucagaaauuggaacagaau

SEQ ID NO: 2348960 - RNA, 20 nt, Human
uucacuuuuagggagaguca

SEQ ID NO: 2348961 - RNA, 13 nt, Human
uucagaaauugga

SEQ ID NO: 2348962 - RNA, 21 nt, Human
uucagaaauuggaacagaaug

SEQ ID NO: 2348963 - RNA, 19 nt, Human
uucacuuucacauagaugu

SEQ ID NO: 2348964 - RNA, 17 nt, Human
uucacuuuagaugcuga

SEQ ID NO: 2348965 - RNA, 17 nt, Human
uucacuuucaaaaacau

SEQ ID NO: 2348966 - RNA, 13 nt, Human
uucacuuuaauuc

SEQ ID NO: 2348967 - RNA, 16 nt, Human
uucacuuuagaugcug

SEQ ID NO: 2348968 - RNA, 18 nt, Human
uucacuucucccaagacu

SEQ ID NO: 2348969 - RNA, 18 nt, Human
uucacuucaucuucucag

SEQ ID NO: 2348970 - RNA, 14 nt, Human
uucacuucucccaa

SEQ ID NO: 2348971 - RNA, 21 nt, Human
uuaucauguguaaucaauaaa

SEQ ID NO: 2348972 - RNA, 15 nt, Human
uuaucauguguaauc

SEQ ID NO: 2348973 - RNA, 18 nt, Human
uuaucauguguaaucaau

SEQ ID NO: 2348974 - RNA, 19 nt, Human
uuaucauucauucuuagcu

SEQ ID NO: 2348975 - RNA, 18 nt, Human
uuaucauucaaguguaaa

SEQ ID NO: 2348976 - RNA, 19 nt, Human
uucacuucauaauccagua

SEQ ID NO: 2348977 - RNA, 15 nt, Human
uucacuucaucuucu

SEQ ID NO: 2348978 - RNA, 16 nt, Human
uucacuucaucuucuc

SEQ ID NO: 2348979 - RNA, 14 nt, Human
uucaggguuggccc

SEQ ID NO: 2348980 - RNA, 18 nt, Human
uucagcucacacaugaga

SEQ ID NO: 2348981 - RNA, 16 nt, Human
uucagggugaugccag

SEQ ID NO: 2348982 - RNA, 16 nt, Human
uucaggguuggccccu

SEQ ID NO: 2348983 - RNA, 17 nt, Human
uucaggguuggccccug

SEQ ID NO: 2348984 - RNA, 19 nt, Human
uucaggguuggccccugcc

SEQ ID NO: 2348985 - RNA, 22 nt, Human
uucaggguuggccccugcccgg

SEQ ID NO: 2348986 - RNA, 15 nt, Human
uucagguaacaggca

SEQ ID NO: 2348987 - RNA, 16 nt, Human
uucagguaacaggcag

SEQ ID NO: 2348988 - RNA, 16 nt, Human
uucagcgauguaugca

SEQ ID NO: 2348989 - RNA, 10 nt, Human
uucagccaag

SEQ ID NO: 2348990 - RNA, 24 nt, Human
uucagcgauguaugcagcuaucug

SEQ ID NO: 2348991 - RNA, 14 nt, Human
uucagcuaagcuag

SEQ ID NO: 2348992 - RNA, 20 nt, Human
uucagcuaagcuaggaauga

SEQ ID NO: 2348993 - RNA, 17 nt, Human
uucagcgguuuauauaa

SEQ ID NO: 2348994 - RNA, 16 nt, Human
uucagcauauuuauag

SEQ ID NO: 2348995 - RNA, 20 nt, Human
uucagcacugucccuugccu

SEQ ID NO: 2348996 - RNA, 20 nt, Human
uucagauuuuaaaaagucuu

SEQ ID NO: 2348997 - RNA, 14 nt, Human
uucagcacuguccc

SEQ ID NO: 2348998 - RNA, 15 nt, Human
uucagcacugucccu

SEQ ID NO: 2348999 - RNA, 16 nt, Human
uucagcacugucccuu

SEQ ID NO: 2349000 - RNA, 21 nt, Human
uucagcacugucccuugccuc

SEQ ID NO: 2349001 - RNA, 13 nt, Human
auauauuuuaauu

SEQ ID NO: 2349002 - RNA, 16 nt, Human
auauauuuuacaauuu

SEQ ID NO: 2349003 - RNA, 15 nt, Human
auauauuuuaagacg

SEQ ID NO: 2349004 - RNA, 14 nt, Human
auauauuucagaua

SEQ ID NO: 2349005 - RNA, 23 nt, Human
auauauuuauaacucaucauaaa

SEQ ID NO: 2349006 - RNA, 20 nt, Human
auauauguuuaccuuuuaau

SEQ ID NO: 2349007 - RNA, 22 nt, Human
auauauuucacguguucccucu

SEQ ID NO: 2349008 - RNA, 21 nt, Human
auauauuuauaacucaucaua

SEQ ID NO: 2349009 - RNA, 16 nt, Human
auauauuuauaacuca

SEQ ID NO: 2349010 - RNA, 15 nt, Human
auauauuuauaacuc

SEQ ID NO: 2349011 - RNA, 14 nt, Human
auauauuuauaacu

SEQ ID NO: 2349012 - RNA, 9 nt, Human
auauauuuc

SEQ ID NO: 2349013 - RNA, 21 nt, Human
auauauguuuuaagaggcagg

SEQ ID NO: 2349014 - RNA, 22 nt, Human
auauauguuuuaagaggcaggg

SEQ ID NO: 2349015 - RNA, 14 nt, Human
auauauguuuaccu

SEQ ID NO: 2349016 - RNA, 17 nt, Human
auauauguuuaccuuuu

SEQ ID NO: 2349017 - RNA, 16 nt, Human
auauauuuaaugauaa

SEQ ID NO: 2349018 - RNA, 13 nt, Human
auauauuuauaac

SEQ ID NO: 2349019 - RNA, 12 nt, Human
auauauuuauaa

SEQ ID NO: 2349020 - RNA, 10 nt, Human
auauauuuau

SEQ ID NO: 2349021 - RNA, 17 nt, Human
auauauguuuuugaagg

SEQ ID NO: 2349022 - RNA, 14 nt, Human
uucaucaagacugg

SEQ ID NO: 2349023 - RNA, 13 nt, Human
uucaucaaucauu

SEQ ID NO: 2349024 - RNA, 16 nt, Human
uucaucaaucauugua

SEQ ID NO: 2349025 - RNA, 22 nt, Human
uucaucaaucauuguacaguuu

SEQ ID NO: 2349026 - RNA, 15 nt, Human
uucaucaaugaauga

SEQ ID NO: 2349027 - RNA, 13 nt, Human
auauaugcuaagu

SEQ ID NO: 2349028 - RNA, 23 nt, Human
auauauguguuuuucacauuugc

SEQ ID NO: 2349029 - RNA, 21 nt, Human
auauauguguuuuucacauuu

SEQ ID NO: 2349030 - RNA, 15 nt, Human
auauauguguuuuuc

SEQ ID NO: 2349031 - RNA, 13 nt, Human
auauauguguuuu

SEQ ID NO: 2349032 - RNA, 21 nt, Human
auauauggcagaguuguaaau

SEQ ID NO: 2349033 - RNA, 22 nt, Human
auauauggcagaguuguaaaua

SEQ ID NO: 2349034 - RNA, 19 nt, Human
uucaucauauuauacagac

SEQ ID NO: 2349035 - RNA, 14 nt, Human
auauauggauaaug

SEQ ID NO: 2349036 - RNA, 13 nt, Human
auauauggcagag

SEQ ID NO: 2349037 - RNA, 14 nt, Human
auauauggcagagu

SEQ ID NO: 2349038 - RNA, 17 nt, Human
auauauggcagaguugu

SEQ ID NO: 2349039 - RNA, 19 nt, Human
auauauggcagaguuguaa

SEQ ID NO: 2349040 - RNA, 20 nt, Human
auauauggcagaguuguaaa

SEQ ID NO: 2349041 - RNA, 15 nt, Human
uucaguaaaaaacaa

SEQ ID NO: 2349042 - RNA, 18 nt, Human
uucaguauuuuggagaaa

SEQ ID NO: 2349043 - RNA, 19 nt, Human
uucaguauuuuggagaaau

SEQ ID NO: 2349044 - RNA, 20 nt, Human
uucaguauuuuggagaaauu

SEQ ID NO: 2349045 - RNA, 21 nt, Human
uucaguauuuuggagaaauua

SEQ ID NO: 2349046 - RNA, 21 nt, Human
uucagucauauaaaagcuaug

SEQ ID NO: 2349047 - RNA, 19 nt, Human
uucagguuuuguaaagaug

SEQ ID NO: 2349048 - RNA, 15 nt, Human
uucagguuuuguaaa

SEQ ID NO: 2349049 - RNA, 24 nt, Human
uucagguuaucgaaauaacaaugu

SEQ ID NO: 2349050 - RNA, 22 nt, Human
uucagguuaucgaaauaacaau

SEQ ID NO: 2349051 - RNA, 16 nt, Human
uucagguuuuaguuuu

SEQ ID NO: 2349052 - RNA, 14 nt, Human
uucaguaagccgug

SEQ ID NO: 2349053 - RNA, 20 nt, Human
uucagguguuuaguugcaga

SEQ ID NO: 2349054 - RNA, 19 nt, Human
uucagguuaucgaaauaac

SEQ ID NO: 2349055 - RNA, 20 nt, Human
uucagguuaucgaaauaaca

SEQ ID NO: 2349056 - RNA, 21 nt, Human
uucagguuaucgaaauaacaa

SEQ ID NO: 2349057 - RNA, 21 nt, Human
uucaggugacaugugaaaccu

SEQ ID NO: 2349058 - RNA, 22 nt, Human
uucaggugacaugugaaaccuu

SEQ ID NO: 2349059 - RNA, 23 nt, Human
uucaggugacaugugaaaccuuu

SEQ ID NO: 2349060 - RNA, 13 nt, Human
uucaggugacaug

SEQ ID NO: 2349061 - RNA, 14 nt, Human
uucaggugacaugu

SEQ ID NO: 2349062 - RNA, 16 nt, Human
uucaggugacauguga

SEQ ID NO: 2349063 - RNA, 17 nt, Human
uucaggugacaugugaa

SEQ ID NO: 2349064 - RNA, 18 nt, Human
uucaggugacaugugaaa

SEQ ID NO: 2349065 - RNA, 19 nt, Human
uucaggugacaugugaaac

SEQ ID NO: 2349066 - RNA, 17 nt, Human
uucagguaacaggcaga

SEQ ID NO: 2349067 - RNA, 14 nt, Human
uucagguacuaaau

SEQ ID NO: 2349068 - RNA, 19 nt, Human
uucagguagcugccccugg

SEQ ID NO: 2349069 - RNA, 16 nt, Human
uucagguauguugccu

SEQ ID NO: 2349070 - RNA, 16 nt, Human
uucagugaaagcauca

SEQ ID NO: 2349071 - RNA, 20 nt, Human
uucagugagggucuucuuac

SEQ ID NO: 2349072 - RNA, 16 nt, Human
uucagugauuacuguc

SEQ ID NO: 2349073 - RNA, 14 nt, Human
uucauaggucacug

SEQ ID NO: 2349074 - RNA, 19 nt, Human
uucauaggucacuggcucu

SEQ ID NO: 2349075 - RNA, 17 nt, Human
uucauaguaacuucuua

SEQ ID NO: 2349076 - RNA, 20 nt, Human
uucauaucuauuuauuaaau

SEQ ID NO: 2349077 - RNA, 20 nt, Human
uucauaugacauucaugccu

SEQ ID NO: 2349078 - RNA, 21 nt, Human
uucauauaugaggacuugugu

SEQ ID NO: 2349079 - RNA, 18 nt, Human
uucauauaugaggacuug

SEQ ID NO: 2349080 - RNA, 19 nt, Human
uucaucaaauggaagacac

SEQ ID NO: 2349081 - RNA, 16 nt, Human
uucaucaaauggaaga

SEQ ID NO: 2349082 - RNA, 23 nt, Human
uucauaugacauucaugccuggc

SEQ ID NO: 2349083 - RNA, 23 nt, Human
uucccgaaccccaaggagggaga

SEQ ID NO: 2349084 - RNA, 21 nt, Human
uucccgagcaaagucuaaagu

SEQ ID NO: 2349085 - RNA, 17 nt, Human
uuccccuuuccccacuc

SEQ ID NO: 2349086 - RNA, 14 nt, Human
uuccccuuucccca

SEQ ID NO: 2349087 - RNA, 22 nt, Human
uuccccuugcccuugcccugac

SEQ ID NO: 2349088 - RNA, 23 nt, Human
uuccccuugcccuugcccugacc

SEQ ID NO: 2349089 - RNA, 13 nt, Human
uuccccuugcccu

SEQ ID NO: 2349090 - RNA, 14 nt, Human
uuccccuugcccuu

SEQ ID NO: 2349091 - RNA, 20 nt, Human
uuccccuugcccuugcccug

SEQ ID NO: 2349092 - RNA, 21 nt, Human
uuccccuugcccuugcccuga

SEQ ID NO: 2349093 - RNA, 14 nt, Human
uucccgcucagccc

SEQ ID NO: 2349094 - RNA, 15 nt, Human
uucccgcucagcccu

SEQ ID NO: 2349095 - RNA, 12 nt, Human
uucccgcucagc

SEQ ID NO: 2349096 - RNA, 22 nt, Human
uucccgagcaaagucuaaaguu

SEQ ID NO: 2349097 - RNA, 23 nt, Human
uucccgagcaaagucuaaaguuu

SEQ ID NO: 2349098 - RNA, 13 nt, Human
auauuugcuuuuu

SEQ ID NO: 2349099 - RNA, 21 nt, Human
auauuugaaucuugucucaau

SEQ ID NO: 2349100 - RNA, 15 nt, Human
auauuuacauaugaa

SEQ ID NO: 2349101 - RNA, 23 nt, Human
auauuuacagugaaaauguaagc

SEQ ID NO: 2349102 - RNA, 17 nt, Human
auauuugaaucuugucu

SEQ ID NO: 2349103 - RNA, 18 nt, Human
auauuugaaucuugucuc

SEQ ID NO: 2349104 - RNA, 19 nt, Human
auauuugaaucuugucuca

SEQ ID NO: 2349105 - RNA, 21 nt, Human
auauuugaauguaugcuucau

SEQ ID NO: 2349106 - RNA, 15 nt, Human
uucccuaagccaagg

SEQ ID NO: 2349107 - RNA, 19 nt, Human
uucccguggccccagccug

SEQ ID NO: 2349108 - RNA, 17 nt, Human
uucccguuucuccaccu

SEQ ID NO: 2349109 - RNA, 14 nt, Human
uucccguuucucca

SEQ ID NO: 2349110 - RNA, 15 nt, Human
uucccguuucuccac

SEQ ID NO: 2349111 - RNA, 13 nt, Human
uucccguggcccc

SEQ ID NO: 2349112 - RNA, 15 nt, Human
uucccguggccccag

SEQ ID NO: 2349113 - RNA, 16 nt, Human
uucccguggccccagc

SEQ ID NO: 2349114 - RNA, 17 nt, Human
uucccguggccccagcc

SEQ ID NO: 2349115 - RNA, 19 nt, Human
uucccuaagccaagggccu

SEQ ID NO: 2349116 - RNA, 16 nt, Human
uucccuaaucuauggu

SEQ ID NO: 2349117 - RNA, 14 nt, Human
uucccuaccucagg

SEQ ID NO: 2349118 - RNA, 13 nt, Human
uucccuaccucag

SEQ ID NO: 2349119 - RNA, 15 nt, Human
uucccuaccucaggc

SEQ ID NO: 2349120 - RNA, 20 nt, Human
uuccgaaaaauccucuuccu

SEQ ID NO: 2349121 - RNA, 20 nt, Human
uuccgaaaccaaagaagaaa

SEQ ID NO: 2349122 - RNA, 21 nt, Human
uuccgaaaaauccucuuccuc

SEQ ID NO: 2349123 - RNA, 23 nt, Human
uuccgaaaaauccucuuccucug

SEQ ID NO: 2349124 - RNA, 15 nt, Human
uucccuuuuuuuaag

SEQ ID NO: 2349125 - RNA, 23 nt, Human
uuccgacaaccgaugcuccagcc

SEQ ID NO: 2349126 - RNA, 22 nt, Human
uuccgacaaccgaugcuccagc

SEQ ID NO: 2349127 - RNA, 20 nt, Human
uuccgacaaccgaugcucca

SEQ ID NO: 2349128 - RNA, 19 nt, Human
uuccgcuuggagcagaggg

SEQ ID NO: 2349129 - RNA, 13 nt, Human
uuccgcuuggagc

SEQ ID NO: 2349130 - RNA, 18 nt, Human
uuccugaaacaacuugga

SEQ ID NO: 2349131 - RNA, 12 nt, Human
uuccugaaagaa

SEQ ID NO: 2349132 - RNA, 22 nt, Human
uuccucuuugcuuugcuuucug

SEQ ID NO: 2349133 - RNA, 22 nt, Human
uuccucuuuuuauuuaguuccu

SEQ ID NO: 2349134 - RNA, 18 nt, Human
uuccugaaagaaacaguu

SEQ ID NO: 2349135 - RNA, 17 nt, Human
uuccugaaagaaacagu

SEQ ID NO: 2349136 - RNA, 15 nt, Human
uuccugaaaugcagu

SEQ ID NO: 2349137 - RNA, 19 nt, Human
uuccuggcacugcuuccag

SEQ ID NO: 2349138 - RNA, 14 nt, Human
uuccuggcuucuua

SEQ ID NO: 2349139 - RNA, 17 nt, Human
uuccugggaaauauucc

SEQ ID NO: 2349140 - RNA, 21 nt, Human
uuccugggaaauauucccuag

SEQ ID NO: 2349141 - RNA, 22 nt, Human
uuccuguuguuauggaaacugu

SEQ ID NO: 2349142 - RNA, 20 nt, Human
uuccuggcacugcuuccagu

SEQ ID NO: 2349143 - RNA, 22 nt, Human
uuccuggcacugcuuccaguga

SEQ ID NO: 2349144 - RNA, 21 nt, Human
uuccggaauccuguccucagc

SEQ ID NO: 2349145 - RNA, 20 nt, Human
uuccuaaauauauuuuaaga

SEQ ID NO: 2349146 - RNA, 13 nt, Human
uuccuaaaugcag

SEQ ID NO: 2349147 - RNA, 14 nt, Human
uuccuaaaugcagu

SEQ ID NO: 2349148 - RNA, 21 nt, Human
uuccuaaauauauuuuaagac

SEQ ID NO: 2349149 - RNA, 19 nt, Human
uuccuaacaggauuagaca

SEQ ID NO: 2349150 - RNA, 14 nt, Human
uuccuaaggcugca

SEQ ID NO: 2349151 - RNA, 19 nt, Human
uuccuaacacagcaugugu

SEQ ID NO: 2349152 - RNA, 18 nt, Human
uuccuaacacagcaugug

SEQ ID NO: 2349153 - RNA, 14 nt, Human
uuccuaacacagca

SEQ ID NO: 2349154 - RNA, 16 nt, Human
uuccuaaaugcaguga

SEQ ID NO: 2349155 - RNA, 19 nt, Human
uuccucuccacugccuucg

SEQ ID NO: 2349156 - RNA, 17 nt, Human
uuccuaaguauaaaugg

SEQ ID NO: 2349157 - RNA, 16 nt, Human
uuccucuccacugccu

SEQ ID NO: 2349158 - RNA, 18 nt, Human
uuccucuccacugccuuc

SEQ ID NO: 2349159 - RNA, 13 nt, Human
uuccucugagccu

SEQ ID NO: 2349160 - RNA, 16 nt, Human
uuccucuuugcuuugc

SEQ ID NO: 2349161 - RNA, 15 nt, Human
uuccucuuugcuuug

SEQ ID NO: 2349162 - RNA, 21 nt, Human
uuccucucuuuguucucagcu

SEQ ID NO: 2349163 - RNA, 22 nt, Human
uuccucucuuuguucucagcuc

SEQ ID NO: 2349164 - RNA, 14 nt, Human
uuccucucuccaga

SEQ ID NO: 2349165 - RNA, 15 nt, Human
uuccucucuccagau

SEQ ID NO: 2349166 - RNA, 18 nt, Human
uuccucucuuuguucuca

SEQ ID NO: 2349167 - RNA, 18 nt, Human
auauuuuugguugucaau

SEQ ID NO: 2349168 - RNA, 21 nt, Human
auauuuuugguugucaauauu

SEQ ID NO: 2349169 - RNA, 15 nt, Human
aucaaauaugcaaag

SEQ ID NO: 2349170 - RNA, 16 nt, Human
uuccuuacugcagaau

SEQ ID NO: 2349171 - RNA, 21 nt, Human
auauuuuucaugauuuugaaa

SEQ ID NO: 2349172 - RNA, 13 nt, Human
uuccuuaccuuuu

SEQ ID NO: 2349173 - RNA, 17 nt, Human
uuccuuaaacugugugg

SEQ ID NO: 2349174 - RNA, 16 nt, Human
uuccuuaaacugugug

SEQ ID NO: 2349175 - RNA, 15 nt, Human
uuccuuaaacugugu

SEQ ID NO: 2349176 - RNA, 13 nt, Human
uuccuuaaacugu

SEQ ID NO: 2349177 - RNA, 23 nt, Human
uuccuguuuuucacauuuuccuu

SEQ ID NO: 2349178 - RNA, 19 nt, Human
uuccuguuuuucacauuuu

SEQ ID NO: 2349179 - RNA, 18 nt, Human
aucaaauaugcaaagcac

SEQ ID NO: 2349180 - RNA, 17 nt, Human
aucaaauaugcaaagca

SEQ ID NO: 2349181 - RNA, 16 nt, Human
aucaaauaugcaaagc

SEQ ID NO: 2349182 - RNA, 11 nt, Human
aucaacugaau

SEQ ID NO: 2349183 - RNA, 14 nt, Human
aucaacugaaugag

SEQ ID NO: 2349184 - RNA, 13 nt, Human
aucaacugaauga

SEQ ID NO: 2349185 - RNA, 21 nt, Human
aucaacugcaucaagauguga

SEQ ID NO: 2349186 - RNA, 19 nt, Human
aucaacugggcugaacacu

SEQ ID NO: 2349187 - RNA, 16 nt, Human
aucaaggguacacugc

SEQ ID NO: 2349188 - RNA, 14 nt, Human
aucacucugcugcu

SEQ ID NO: 2349189 - RNA, 21 nt, Human
aucacucugcugcuuagacau

SEQ ID NO: 2349190 - RNA, 13 nt, Human
aucacucuguccu

SEQ ID NO: 2349191 - RNA, 23 nt, Human
aucacgcuccccgccuguucccc

SEQ ID NO: 2349192 - RNA, 14 nt, Human
aucacuccccucca

SEQ ID NO: 2349193 - RNA, 12 nt, Human
aucacuccccuc

SEQ ID NO: 2349194 - RNA, 13 nt, Human
aucacuccccucc

SEQ ID NO: 2349195 - RNA, 23 nt, Human
aucacgccacugcacuccagccu

SEQ ID NO: 2349196 - RNA, 14 nt, Human
aucacgccacugca

SEQ ID NO: 2349197 - RNA, 13 nt, Human
aucacgcuuuccu

SEQ ID NO: 2349198 - RNA, 20 nt, Human
aucaauuuguaauugcuuac

SEQ ID NO: 2349199 - RNA, 12 nt, Human
aucacgcucccc

SEQ ID NO: 2349200 - RNA, 13 nt, Human
aucacgcuccccg

SEQ ID NO: 2349201 - RNA, 15 nt, Human
aucacgcuccccgcc

SEQ ID NO: 2349202 - RNA, 15 nt, Human
aucacgccacugcac

SEQ ID NO: 2349203 - RNA, 17 nt, Human
aucacgccacugcacua

SEQ ID NO: 2349204 - RNA, 19 nt, Human
aucaauuuuucuuauuuca

SEQ ID NO: 2349205 - RNA, 16 nt, Human
aucaauuuaaacccau

SEQ ID NO: 2349206 - RNA, 17 nt, Human
aucaauuuaaacccauu

SEQ ID NO: 2349207 - RNA, 21 nt, Human
aucaauuuaaacccauuuuag

SEQ ID NO: 2349208 - RNA, 14 nt, Human
aucaauuuuucuua

SEQ ID NO: 2349209 - RNA, 13 nt, Human
aucaauguucauu

SEQ ID NO: 2349210 - RNA, 23 nt, Human
aucaauggcgcagugccucuggu

SEQ ID NO: 2349211 - RNA, 14 nt, Human
aucaaugggaaaua

SEQ ID NO: 2349212 - RNA, 13 nt, Human
aucaacucuaaua

SEQ ID NO: 2349213 - RNA, 21 nt, Human
aucaaggguacacugccuucu

SEQ ID NO: 2349214 - RNA, 16 nt, Human
aucaauucauaucuau

SEQ ID NO: 2349215 - RNA, 15 nt, Human
aucaauuuaaaccca

SEQ ID NO: 2349216 - RNA, 13 nt, Human
aucaauuuaaaaa

SEQ ID NO: 2349217 - RNA, 14 nt, Human
aucaauuaaaugua

SEQ ID NO: 2349218 - RNA, 14 nt, Human
aucaauuaauuuuu

SEQ ID NO: 2349219 - RNA, 15 nt, Human
aucaauuaaauguag

SEQ ID NO: 2349220 - RNA, 15 nt, Human
aucaauuaauuuuuu

SEQ ID NO: 2349221 - RNA, 22 nt, Human
aucaauuaauuuuuuuauuguu

SEQ ID NO: 2349222 - RNA, 17 nt, Human
aucaauguucauuguaa

SEQ ID NO: 2349223 - RNA, 16 nt, Human
aucaauguucauugua

SEQ ID NO: 2349224 - RNA, 15 nt, Human
aucaauguucauugu

SEQ ID NO: 2349225 - RNA, 14 nt, Human
aucaauguucauug

SEQ ID NO: 2349226 - RNA, 13 nt, Human
aucaauuaaaugu

SEQ ID NO: 2349227 - RNA, 18 nt, Human
aucaauguucauuguaau

SEQ ID NO: 2349228 - RNA, 19 nt, Human
aucaauguuucuucuaggu

SEQ ID NO: 2349229 - RNA, 13 nt, Human
uucccagggaagu

SEQ ID NO: 2349230 - RNA, 14 nt, Human
uucccagggaagug

SEQ ID NO: 2349231 - RNA, 22 nt, Human
uucccagggaagugcucugaua

SEQ ID NO: 2349232 - RNA, 10 nt, Human
uucccagggu

SEQ ID NO: 2349233 - RNA, 16 nt, Human
uucccaggugcuacac

SEQ ID NO: 2349234 - RNA, 12 nt, Human
uucccaggugcu

SEQ ID NO: 2349235 - RNA, 23 nt, Human
uucccaggguagcccgccugcca

SEQ ID NO: 2349236 - RNA, 19 nt, Human
uucccaggguagcccgccu

SEQ ID NO: 2349237 - RNA, 20 nt, Human
uucccaggguagcccgccug

SEQ ID NO: 2349238 - RNA, 23 nt, Human
uucccagugacacuucagagagc

SEQ ID NO: 2349239 - RNA, 14 nt, Human
uucccaguggcugc

SEQ ID NO: 2349240 - RNA, 15 nt, Human
uucccaguggcugcu

SEQ ID NO: 2349241 - RNA, 17 nt, Human
uucccagugaauucuug

SEQ ID NO: 2349242 - RNA, 20 nt, Human
uucccaguggcugcugccca

SEQ ID NO: 2349243 - RNA, 21 nt, Human
uucccaguggcugcugcccag

SEQ ID NO: 2349244 - RNA, 16 nt, Human
uucccaguggcugcug

SEQ ID NO: 2349245 - RNA, 17 nt, Human
uucccaguggcugcugc

SEQ ID NO: 2349246 - RNA, 18 nt, Human
uucccaguggcugcugcc

SEQ ID NO: 2349247 - RNA, 19 nt, Human
uucccaguggcugcugccc

SEQ ID NO: 2349248 - RNA, 15 nt, Human
auauguucaacugga

SEQ ID NO: 2349249 - RNA, 12 nt, Human
auauguucaacu

SEQ ID NO: 2349250 - RNA, 20 nt, Human
auauguuaaccucaguguca

SEQ ID NO: 2349251 - RNA, 22 nt, Human
auauguguuuuucacauuugcg

SEQ ID NO: 2349252 - RNA, 19 nt, Human
auauguguuuuucacauuu

SEQ ID NO: 2349253 - RNA, 17 nt, Human
auauguguuuuucacau

SEQ ID NO: 2349254 - RNA, 19 nt, Human
auauguguguuuaaauaaa

SEQ ID NO: 2349255 - RNA, 20 nt, Human
auauguguguuuaaauaaag

SEQ ID NO: 2349256 - RNA, 18 nt, Human
auauguucuuuaaaaaua

SEQ ID NO: 2349257 - RNA, 14 nt, Human
auauguucacuguc

SEQ ID NO: 2349258 - RNA, 14 nt, Human
auauguugaauacu

SEQ ID NO: 2349259 - RNA, 16 nt, Human
auauguucaacuggag

SEQ ID NO: 2349260 - RNA, 21 nt, Human
auauguucacaccuagcguca

SEQ ID NO: 2349261 - RNA, 16 nt, Human
auauguucugacauaa

SEQ ID NO: 2349262 - RNA, 20 nt, Human
uucccaggaugagcauccca

SEQ ID NO: 2349263 - RNA, 20 nt, Human
uucccaggacccugaagggg

SEQ ID NO: 2349264 - RNA, 19 nt, Human
uucccaggacccugaaggg

SEQ ID NO: 2349265 - RNA, 23 nt, Human
uucccagcucucccucuggcccu

SEQ ID NO: 2349266 - RNA, 11 nt, Human
uucccaggacc

SEQ ID NO: 2349267 - RNA, 13 nt, Human
uucccaggacccu

SEQ ID NO: 2349268 - RNA, 12 nt, Human
uucccaggaccc

SEQ ID NO: 2349269 - RNA, 21 nt, Human
uucccagcuacaccuuucucc

SEQ ID NO: 2349270 - RNA, 14 nt, Human
uucccagcucuccc

SEQ ID NO: 2349271 - RNA, 20 nt, Human
uuccagucuuccugacacuu

SEQ ID NO: 2349272 - RNA, 20 nt, Human
uucccagcucucccucuggc

SEQ ID NO: 2349273 - RNA, 19 nt, Human
uucccagcucucccucugg

SEQ ID NO: 2349274 - RNA, 18 nt, Human
uucccagcucucccucug

SEQ ID NO: 2349275 - RNA, 17 nt, Human
uucccagcucucccucu

SEQ ID NO: 2349276 - RNA, 16 nt, Human
uucccagcucucccuc

SEQ ID NO: 2349277 - RNA, 21 nt, Human
uuccagugagcuuaucaugcu

SEQ ID NO: 2349278 - RNA, 22 nt, Human
uuccagugaaaucaguuacucu

SEQ ID NO: 2349279 - RNA, 22 nt, Human
uuccagucuccaccaggaaccu

SEQ ID NO: 2349280 - RNA, 18 nt, Human
uuccagucucugcaugua

SEQ ID NO: 2349281 - RNA, 17 nt, Human
uuccagucuuccugaca

SEQ ID NO: 2349282 - RNA, 15 nt, Human
uuccaguccaaucuc

SEQ ID NO: 2349283 - RNA, 15 nt, Human
uuccagucaggauga

SEQ ID NO: 2349284 - RNA, 20 nt, Human
uuccagucuccaccaggaac

SEQ ID NO: 2349285 - RNA, 11 nt, Human
uuccagucucc

SEQ ID NO: 2349286 - RNA, 15 nt, Human
uuccagugaggcucu

SEQ ID NO: 2349287 - RNA, 16 nt, Human
uuccagugaggcucug

SEQ ID NO: 2349288 - RNA, 23 nt, Human
auauuaaugccuuuaaaguauga

SEQ ID NO: 2349289 - RNA, 17 nt, Human
auauuaaugccuuuaaa

SEQ ID NO: 2349290 - RNA, 17 nt, Human
auauuaccacagacaua

SEQ ID NO: 2349291 - RNA, 22 nt, Human
auauuaagaaagacuaucuaaa

SEQ ID NO: 2349292 - RNA, 17 nt, Human
auauuaagaaagacuau

SEQ ID NO: 2349293 - RNA, 15 nt, Human
auauuaagaaagacu

SEQ ID NO: 2349294 - RNA, 16 nt, Human
auauuaagaaagacua

SEQ ID NO: 2349295 - RNA, 22 nt, Human
auauguugaugaaaaauagcaa

SEQ ID NO: 2349296 - RNA, 14 nt, Human
auauguugaugaaa

SEQ ID NO: 2349297 - RNA, 13 nt, Human
auauguugcucag

SEQ ID NO: 2349298 - RNA, 18 nt, Human
auauguugaauacuuuuu

SEQ ID NO: 2349299 - RNA, 17 nt, Human
auauguugaauacuuuu

SEQ ID NO: 2349300 - RNA, 16 nt, Human
auauguugaauacuuu

SEQ ID NO: 2349301 - RNA, 15 nt, Human
auauguugaauacuu

SEQ ID NO: 2349302 - RNA, 17 nt, Human
auauguuuaccuuuuaa

SEQ ID NO: 2349303 - RNA, 20 nt, Human
auauguuuaccuuuuaauua

SEQ ID NO: 2349304 - RNA, 22 nt, Human
auauguuuaccuuuuaauuaau

SEQ ID NO: 2349305 - RNA, 17 nt, Human
auauuaaaaauauaaaa

SEQ ID NO: 2349306 - RNA, 18 nt, Human
auauuaaaaauauaaaac

SEQ ID NO: 2349307 - RNA, 21 nt, Human
auauuaaaaauauaaaacugc

SEQ ID NO: 2349308 - RNA, 23 nt, Human
auauuaaaaauauggaacuucua

SEQ ID NO: 2349309 - RNA, 17 nt, Human
auauuaaaauauggcua

SEQ ID NO: 2349310 - RNA, 14 nt, Human
auauuaaaauaagc

SEQ ID NO: 2349311 - RNA, 21 nt, Human
auauuaaaauaagcacugugc

SEQ ID NO: 2349312 - RNA, 13 nt, Human
auauuaaaaauau

SEQ ID NO: 2349313 - RNA, 14 nt, Human
auauuaaaaauaua

SEQ ID NO: 2349314 - RNA, 15 nt, Human
auauuaaaaauauaa

SEQ ID NO: 2349315 - RNA, 16 nt, Human
auauuaaaaauauaaa

SEQ ID NO: 2349316 - RNA, 24 nt, Human
auauguuuaccuuuuaauuaauga

SEQ ID NO: 2349317 - RNA, 21 nt, Human
auauguuuuuuagaucaaaua

SEQ ID NO: 2349318 - RNA, 15 nt, Human
auauugguauucacu

SEQ ID NO: 2349319 - RNA, 22 nt, Human
auauugcuuuuucuaauguggu

SEQ ID NO: 2349320 - RNA, 18 nt, Human
auauugcuuuuucuaaug

SEQ ID NO: 2349321 - RNA, 21 nt, Human
auauugcuuuuucuaaugugg

SEQ ID NO: 2349322 - RNA, 17 nt, Human
auauugcuucuucuccu

SEQ ID NO: 2349323 - RNA, 13 nt, Human
auauugcuuuuuc

SEQ ID NO: 2349324 - RNA, 15 nt, Human
auauugcuuuuucua

SEQ ID NO: 2349325 - RNA, 16 nt, Human
auauugcuuuuucuaa

SEQ ID NO: 2349326 - RNA, 22 nt, Human
auauugcugauggugcaaugac

SEQ ID NO: 2349327 - RNA, 17 nt, Human
auauugagucaaauggu

SEQ ID NO: 2349328 - RNA, 21 nt, Human
auauugcugcugguaauuugu

SEQ ID NO: 2349329 - RNA, 12 nt, Human
auauuguaagaa

SEQ ID NO: 2349330 - RNA, 13 nt, Human
auauugguauuca

SEQ ID NO: 2349331 - RNA, 12 nt, Human
auauuguacagu

SEQ ID NO: 2349332 - RNA, 12 nt, Human
auauuguacacu

SEQ ID NO: 2349333 - RNA, 13 nt, Human
auauuguacacuu

SEQ ID NO: 2349334 - RNA, 14 nt, Human
auauuguacacuuu

SEQ ID NO: 2349335 - RNA, 16 nt, Human
auauuguaagaaauac

SEQ ID NO: 2349336 - RNA, 15 nt, Human
auauuguaagaaaua

SEQ ID NO: 2349337 - RNA, 14 nt, Human
auauuguaagaaau

SEQ ID NO: 2349338 - RNA, 13 nt, Human
auauuguaagaaa

SEQ ID NO: 2349339 - RNA, 21 nt, Human
auauuccugcauuugugaaau

SEQ ID NO: 2349340 - RNA, 16 nt, Human
auauuccuuucuauca

SEQ ID NO: 2349341 - RNA, 19 nt, Human
auauuccuuucuaucauuu

SEQ ID NO: 2349342 - RNA, 20 nt, Human
auauuccuuucuaucauuuu

SEQ ID NO: 2349343 - RNA, 18 nt, Human
auauucuauaugaauuua

SEQ ID NO: 2349344 - RNA, 23 nt, Human
auauucuauuuucauuuucugca

SEQ ID NO: 2349345 - RNA, 20 nt, Human
auauucuauaugaauuuaaa

SEQ ID NO: 2349346 - RNA, 15 nt, Human
auauugauaugcuua

SEQ ID NO: 2349347 - RNA, 18 nt, Human
auauugaauguuuccaac

SEQ ID NO: 2349348 - RNA, 14 nt, Human
auauugacuuguau

SEQ ID NO: 2349349 - RNA, 15 nt, Human
auauugacuuguaua

SEQ ID NO: 2349350 - RNA, 16 nt, Human
auauugacuuguauau

SEQ ID NO: 2349351 - RNA, 14 nt, Human
auauugugauucug

SEQ ID NO: 2349352 - RNA, 16 nt, Human
auauugucagauauuu

SEQ ID NO: 2349353 - RNA, 15 nt, Human
auauugucauuccug

SEQ ID NO: 2349354 - RNA, 18 nt, Human
auauugucauuccuguau

SEQ ID NO: 2349355 - RNA, 13 nt, Human
auauugugaagua

SEQ ID NO: 2349356 - RNA, 12 nt, Human
auauugugccaa

SEQ ID NO: 2349357 - RNA, 18 nt, Human
auauugugccaauaugua

SEQ ID NO: 2349358 - RNA, 19 nt, Human
auauugugccaauauguau

SEQ ID NO: 2349359 - RNA, 19 nt, Human
auauugugauucugccuuu

SEQ ID NO: 2349360 - RNA, 17 nt, Human
auauugugauucugccu

SEQ ID NO: 2349361 - RNA, 13 nt, Human
auauuguacaguu

SEQ ID NO: 2349362 - RNA, 14 nt, Human
auauuguacaguuu

SEQ ID NO: 2349363 - RNA, 17 nt, Human
auauugucagauauuuu

SEQ ID NO: 2349364 - RNA, 15 nt, Human
auauugucagauauu

SEQ ID NO: 2349365 - RNA, 12 nt, Human
auauugucagau

SEQ ID NO: 2349366 - RNA, 15 nt, Human
auauuguacacuuuu

SEQ ID NO: 2349367 - RNA, 16 nt, Human
auauuguauuacuaga

SEQ ID NO: 2349368 - RNA, 18 nt, Human
auauuguauuacuagaag

SEQ ID NO: 2349369 - RNA, 22 nt, Human
auauugucagaguucugcucua

SEQ ID NO: 2349370 - RNA, 12 nt, Human
auauuguuucua

SEQ ID NO: 2349371 - RNA, 20 nt, Human
auauugugccaauauguauu

SEQ ID NO: 2349372 - RNA, 21 nt, Human
auauugugccaauauguauug

SEQ ID NO: 2349373 - RNA, 14 nt, Human
auauuguuugcuaa

SEQ ID NO: 2349374 - RNA, 17 nt, Human
auauuguuuucagugua

SEQ ID NO: 2349375 - RNA, 13 nt, Human
auauuguuuucag

SEQ ID NO: 2349376 - RNA, 13 nt, Human
auauuuacaaaug

SEQ ID NO: 2349377 - RNA, 12 nt, Human
auauuuaaugau

SEQ ID NO: 2349378 - RNA, 13 nt, Human
auauuuaaugaua

SEQ ID NO: 2349379 - RNA, 23 nt, Human
auauuuaaugauaaguaaaugcu

SEQ ID NO: 2349380 - RNA, 18 nt, Human
uugagaagaaaacaucua

SEQ ID NO: 2349381 - RNA, 15 nt, Human
uugagaagaaaacau

SEQ ID NO: 2349382 - RNA, 22 nt, Human
uugagaagaccucaccuagaaa

SEQ ID NO: 2349383 - RNA, 21 nt, Human
uugagaacugcauauguuucg

SEQ ID NO: 2349384 - RNA, 19 nt, Human
uugagaacugcauauguuu

SEQ ID NO: 2349385 - RNA, 22 nt, Human
uugagaaaugaauaauuuccca

SEQ ID NO: 2349386 - RNA, 16 nt, Human
uugagaaaugaauaau

SEQ ID NO: 2349387 - RNA, 16 nt, Human
uugagaaaugcauauu

SEQ ID NO: 2349388 - RNA, 19 nt, Human
uugagaaaugcauauugua

SEQ ID NO: 2349389 - RNA, 15 nt, Human
uugagaaaugaauaa

SEQ ID NO: 2349390 - RNA, 21 nt, Human
uugagaaauauggacacuuaa

SEQ ID NO: 2349391 - RNA, 24 nt, Human
uugaccauucuccaccugccaggg

SEQ ID NO: 2349392 - RNA, 14 nt, Human
uugagaaggagaga

SEQ ID NO: 2349393 - RNA, 17 nt, Human
uugagagaccaggcaaa

SEQ ID NO: 2349394 - RNA, 16 nt, Human
uugagagaccaggcaa

SEQ ID NO: 2349395 - RNA, 17 nt, Human
uugagagaagagacaaa

SEQ ID NO: 2349396 - RNA, 16 nt, Human
uugagaaggagagaaa

SEQ ID NO: 2349397 - RNA, 17 nt, Human
uugagaaggagagaaag

SEQ ID NO: 2349398 - RNA, 19 nt, Human
uugagaggcccugggguuc

SEQ ID NO: 2349399 - RNA, 14 nt, Human
uugagaguucuaaa

SEQ ID NO: 2349400 - RNA, 19 nt, Human
uugacaguguugaaaaugu

SEQ ID NO: 2349401 - RNA, 18 nt, Human
uugacaguucugaagaau

SEQ ID NO: 2349402 - RNA, 15 nt, Human
uugacaguucugaag

SEQ ID NO: 2349403 - RNA, 17 nt, Human
uugacaguucugaagaa

SEQ ID NO: 2349404 - RNA, 19 nt, Human
uugacagggcacaccgggc

SEQ ID NO: 2349405 - RNA, 19 nt, Human
uugacacuuaaaaaugguu

SEQ ID NO: 2349406 - RNA, 20 nt, Human
uugacauaacacuauaaagg

SEQ ID NO: 2349407 - RNA, 18 nt, Human
uugaccauucuccaccug

SEQ ID NO: 2349408 - RNA, 19 nt, Human
uugaccauucuccaccugc

SEQ ID NO: 2349409 - RNA, 21 nt, Human
uugagguggucugaauguucu

SEQ ID NO: 2349410 - RNA, 22 nt, Human
uugagguggcacuuuuucauuu

SEQ ID NO: 2349411 - RNA, 12 nt, Human
uugaguuuuguu

SEQ ID NO: 2349412 - RNA, 21 nt, Human
uugaguuuuguuuuaaaauua

SEQ ID NO: 2349413 - RNA, 12 nt, Human
uugauaaaguaa

SEQ ID NO: 2349414 - RNA, 20 nt, Human
uugauaaaguaguaaaaauu

SEQ ID NO: 2349415 - RNA, 12 nt, Human
uugauaaaguuu

SEQ ID NO: 2349416 - RNA, 13 nt, Human
uugauaaaguuuc

SEQ ID NO: 2349417 - RNA, 14 nt, Human
uugauaaaguuucu

SEQ ID NO: 2349418 - RNA, 17 nt, Human
uugauaaaguuucucag

SEQ ID NO: 2349419 - RNA, 22 nt, Human
uugagguggaagcccuccuucc

SEQ ID NO: 2349420 - RNA, 19 nt, Human
uugagguggaagcccuccu

SEQ ID NO: 2349421 - RNA, 23 nt, Human
uugaggucuuuugacauguggaa

SEQ ID NO: 2349422 - RNA, 22 nt, Human
uugaggucuuuugacaugugga

SEQ ID NO: 2349423 - RNA, 19 nt, Human
uugaggucuuuugacaugu

SEQ ID NO: 2349424 - RNA, 18 nt, Human
uugaggucuuuugacaug

SEQ ID NO: 2349425 - RNA, 17 nt, Human
uugaggucuuuugacau

SEQ ID NO: 2349426 - RNA, 16 nt, Human
uugaggucuguucuuu

SEQ ID NO: 2349427 - RNA, 18 nt, Human
uugagauagaagaacugc

SEQ ID NO: 2349428 - RNA, 17 nt, Human
uugagauagaagaacug

SEQ ID NO: 2349429 - RNA, 18 nt, Human
uugagaguuuugucuuga

SEQ ID NO: 2349430 - RNA, 15 nt, Human
uugaggucuguucuu

SEQ ID NO: 2349431 - RNA, 17 nt, Human
aucuaagccuuuccaua

SEQ ID NO: 2349432 - RNA, 18 nt, Human
aucuaaggaugucacagg

SEQ ID NO: 2349433 - RNA, 18 nt, Human
aucuaagccuuuccauaa

SEQ ID NO: 2349434 - RNA, 13 nt, Human
aucuaagugauau

SEQ ID NO: 2349435 - RNA, 20 nt, Human
aucuaaggaugucacagggc

SEQ ID NO: 2349436 - RNA, 17 nt, Human
aucuaagugauauaaau

SEQ ID NO: 2349437 - RNA, 14 nt, Human
aucuaagugauaua

SEQ ID NO: 2349438 - RNA, 15 nt, Human
aucuaagugauauaa

SEQ ID NO: 2349439 - RNA, 16 nt, Human
aucuaagccuuuccau

SEQ ID NO: 2349440 - RNA, 13 nt, Human
aucuaagccugaa

SEQ ID NO: 2349441 - RNA, 18 nt, Human
aucuaagcagcauuucug

SEQ ID NO: 2349442 - RNA, 21 nt, Human
aucuaagcagcauuucugaag

SEQ ID NO: 2349443 - RNA, 19 nt, Human
uugauaaucaacugggcug

SEQ ID NO: 2349444 - RNA, 21 nt, Human
uugauaaauuccacuggacuu

SEQ ID NO: 2349445 - RNA, 19 nt, Human
uugauaaauuccacuggac

SEQ ID NO: 2349446 - RNA, 14 nt, Human
uugauaacagcacu

SEQ ID NO: 2349447 - RNA, 15 nt, Human
uugauaacagcacug

SEQ ID NO: 2349448 - RNA, 18 nt, Human
uugauaaauuccacugga

SEQ ID NO: 2349449 - RNA, 19 nt, Human
uugauaacagcacugacua

SEQ ID NO: 2349450 - RNA, 13 nt, Human
uugauaacuuugc

SEQ ID NO: 2349451 - RNA, 14 nt, Human
uugauaacuuugcu

SEQ ID NO: 2349452 - RNA, 16 nt, Human
uugauaagagggcaca

SEQ ID NO: 2349453 - RNA, 22 nt, Human
uugauaagagggcacacacugu

SEQ ID NO: 2349454 - RNA, 22 nt, Human
uugaauauaauauauuugugua

SEQ ID NO: 2349455 - RNA, 20 nt, Human
uugaauauaauauauuugug

SEQ ID NO: 2349456 - RNA, 21 nt, Human
uugaauauaauauauuugugu

SEQ ID NO: 2349457 - RNA, 19 nt, Human
uugaauauauuauaaucuu

SEQ ID NO: 2349458 - RNA, 13 nt, Human
uugaauauauuau

SEQ ID NO: 2349459 - RNA, 16 nt, Human
uugaauauccccuccc

SEQ ID NO: 2349460 - RNA, 17 nt, Human
uugaauauccccuccca

SEQ ID NO: 2349461 - RNA, 17 nt, Human
uugacacuuaaaaaugg

SEQ ID NO: 2349462 - RNA, 15 nt, Human
uugaauauaaacacu

SEQ ID NO: 2349463 - RNA, 16 nt, Human
uugaauauaaacacua

SEQ ID NO: 2349464 - RNA, 18 nt, Human
uugaauauaaacacuaua

SEQ ID NO: 2349465 - RNA, 19 nt, Human
uugaaguuguuacuaacua

SEQ ID NO: 2349466 - RNA, 13 nt, Human
uugaauacuuuuu

SEQ ID NO: 2349467 - RNA, 12 nt, Human
uugaauacuuuu

SEQ ID NO: 2349468 - RNA, 18 nt, Human
uugaaguggccagaugag

SEQ ID NO: 2349469 - RNA, 17 nt, Human
uugaaguguaggcagac

SEQ ID NO: 2349470 - RNA, 18 nt, Human
uugaaguguaggcagaca

SEQ ID NO: 2349471 - RNA, 19 nt, Human
uugaaguguaggcagacac

SEQ ID NO: 2349472 - RNA, 22 nt, Human
uugaaguguaggcagacacagg

SEQ ID NO: 2349473 - RNA, 20 nt, Human
uugaaguguaggcagacaca

SEQ ID NO: 2349474 - RNA, 21 nt, Human
uugaaguuguuacuaacuaaa

SEQ ID NO: 2349475 - RNA, 15 nt, Human
uugaaggaucuguuu

SEQ ID NO: 2349476 - RNA, 20 nt, Human
uugaagggccagagccaggg

SEQ ID NO: 2349477 - RNA, 19 nt, Human
uugaagggccagagccagg

SEQ ID NO: 2349478 - RNA, 17 nt, Human
uugaagggccagagcca

SEQ ID NO: 2349479 - RNA, 15 nt, Human
uugaagggccagagc

SEQ ID NO: 2349480 - RNA, 18 nt, Human
uugaaggaggugagggau

SEQ ID NO: 2349481 - RNA, 11 nt, Human
uugaaggaaac

SEQ ID NO: 2349482 - RNA, 13 nt, Human
uugaaggaaacag

SEQ ID NO: 2349483 - RNA, 14 nt, Human
uugaaggaaacagu

SEQ ID NO: 2349484 - RNA, 23 nt, Human
uugaaggugcugacggccaggga

SEQ ID NO: 2349485 - RNA, 18 nt, Human
uugaaggguaaagaaguu

SEQ ID NO: 2349486 - RNA, 19 nt, Human
uugaaggguaaagaaguuu

SEQ ID NO: 2349487 - RNA, 17 nt, Human
uugaaguaaugaauuuu

SEQ ID NO: 2349488 - RNA, 16 nt, Human
uugaaguaaugaauuu

SEQ ID NO: 2349489 - RNA, 12 nt, Human
uugaaguaauga

SEQ ID NO: 2349490 - RNA, 18 nt, Human
uugaaguaaucccgccac

SEQ ID NO: 2349491 - RNA, 18 nt, Human
uugaaguauuuugcugga

SEQ ID NO: 2349492 - RNA, 12 nt, Human
aucguccaggga

SEQ ID NO: 2349493 - RNA, 13 nt, Human
aucguccagggag

SEQ ID NO: 2349494 - RNA, 23 nt, Human
aucguauagcuguauugaaucau

SEQ ID NO: 2349495 - RNA, 19 nt, Human
aucguccagcgaccuuccu

SEQ ID NO: 2349496 - RNA, 18 nt, Human
aucgucacugcuuaacuu

SEQ ID NO: 2349497 - RNA, 14 nt, Human
aucgucacugcuua

SEQ ID NO: 2349498 - RNA, 16 nt, Human
aucguaaccagccaga

SEQ ID NO: 2349499 - RNA, 16 nt, Human
aucguaauguacagau

SEQ ID NO: 2349500 - RNA, 18 nt, Human
aucguaauguacagaugg

SEQ ID NO: 2349501 - RNA, 14 nt, Human
aucguauagcugua

SEQ ID NO: 2349502 - RNA, 15 nt, Human
aucguauagcuguau

SEQ ID NO: 2349503 - RNA, 16 nt, Human
aucguauagcuguauu

SEQ ID NO: 2349504 - RNA, 18 nt, Human
aucguauagcuguauuga

SEQ ID NO: 2349505 - RNA, 22 nt, Human
aucguauagcuguauugaauca

SEQ ID NO: 2349506 - RNA, 23 nt, Human
aucguccagggagcauuuuccuc

SEQ ID NO: 2349507 - RNA, 23 nt, Human
aucgucucucccucccuuugaaa

SEQ ID NO: 2349508 - RNA, 20 nt, Human
aucgugaaacccugucucua

SEQ ID NO: 2349509 - RNA, 12 nt, Human
aucgugaaaccc

SEQ ID NO: 2349510 - RNA, 17 nt, Human
aucgugacgcugaauaa

SEQ ID NO: 2349511 - RNA, 18 nt, Human
aucgugccguuacucucc

SEQ ID NO: 2349512 - RNA, 23 nt, Human
aucuaaaaauagacuuaaaucuc

SEQ ID NO: 2349513 - RNA, 18 nt, Human
aucgugacgcugaauaaa

SEQ ID NO: 2349514 - RNA, 20 nt, Human
aucgugacgcugaauaaaug

SEQ ID NO: 2349515 - RNA, 21 nt, Human
aucgugacgcugaauaaaugu

SEQ ID NO: 2349516 - RNA, 22 nt, Human
aucgugacgcugaauaaauguc

SEQ ID NO: 2349517 - RNA, 14 nt, Human
aucgugacaacacu

SEQ ID NO: 2349518 - RNA, 15 nt, Human
aucgugacaacacuu

SEQ ID NO: 2349519 - RNA, 15 nt, Human
aucuaaaguguguug

SEQ ID NO: 2349520 - RNA, 22 nt, Human
aucuaaacuggauucacagcuc

SEQ ID NO: 2349521 - RNA, 15 nt, Human
aucuaaacugccccc

SEQ ID NO: 2349522 - RNA, 19 nt, Human
aucuaaaagaaaugucuau

SEQ ID NO: 2349523 - RNA, 19 nt, Human
aucuaaauggaaccacucu

SEQ ID NO: 2349524 - RNA, 22 nt, Human
aucuaaauauugauuucugccu

SEQ ID NO: 2349525 - RNA, 18 nt, Human
aucuaaauaccugcccug

SEQ ID NO: 2349526 - RNA, 17 nt, Human
aucuaaaguguguuguu

SEQ ID NO: 2349527 - RNA, 20 nt, Human
aucuaaaguguguuguugcu

SEQ ID NO: 2349528 - RNA, 23 nt, Human
aucuaaaguguguuguugcuuua

SEQ ID NO: 2349529 - RNA, 21 nt, Human
aucuaaauugaauaaugguac

SEQ ID NO: 2349530 - RNA, 17 nt, Human
aucuaaauuuagaaauc

SEQ ID NO: 2349531 - RNA, 15 nt, Human
aucuaaauugaauaa

SEQ ID NO: 2349532 - RNA, 16 nt, Human
aucuaaauugaauaau

SEQ ID NO: 2349533 - RNA, 15 nt, Human
aucuaaauguugaaa

SEQ ID NO: 2349534 - RNA, 15 nt, Human
aucuaaccucaucuu

SEQ ID NO: 2349535 - RNA, 14 nt, Human
aucuaaccucaucu

SEQ ID NO: 2349536 - RNA, 13 nt, Human
aucuaaccucauc

SEQ ID NO: 2349537 - RNA, 14 nt, Human
aucuaaccacauca

SEQ ID NO: 2349538 - RNA, 15 nt, Human
aucuaacccucccau

SEQ ID NO: 2349539 - RNA, 18 nt, Human
aucuaaccucaucuucuu

SEQ ID NO: 2349540 - RNA, 22 nt, Human
aucuaacccucccauggcaccu

SEQ ID NO: 2349541 - RNA, 17 nt, Human
uugaaggaaaaugauac

SEQ ID NO: 2349542 - RNA, 19 nt, Human
auccucuuccucugaggcu

SEQ ID NO: 2349543 - RNA, 22 nt, Human
auccucuucugcuuaggagaga

SEQ ID NO: 2349544 - RNA, 13 nt, Human
auccucuuuagag

SEQ ID NO: 2349545 - RNA, 15 nt, Human
auccucuuuagaguu

SEQ ID NO: 2349546 - RNA, 13 nt, Human
auccucuuccucu

SEQ ID NO: 2349547 - RNA, 14 nt, Human
uucuuuuggcuucc

SEQ ID NO: 2349548 - RNA, 14 nt, Human
auccucuuccucug

SEQ ID NO: 2349549 - RNA, 15 nt, Human
auccucuuccucuga

SEQ ID NO: 2349550 - RNA, 16 nt, Human
auccucuuccucugag

SEQ ID NO: 2349551 - RNA, 17 nt, Human
auccucuuccucugagg

SEQ ID NO: 2349552 - RNA, 18 nt, Human
auccucuguacagagccc

SEQ ID NO: 2349553 - RNA, 20 nt, Human
auccucuguacagagcccac

SEQ ID NO: 2349554 - RNA, 12 nt, Human
uucuuuuguaaa

SEQ ID NO: 2349555 - RNA, 23 nt, Human
uucuuuugguaaagacuggcuuu

SEQ ID NO: 2349556 - RNA, 13 nt, Human
uucuuuugguaaa

SEQ ID NO: 2349557 - RNA, 22 nt, Human
uucuuuugguaaagacuggcuu

SEQ ID NO: 2349558 - RNA, 20 nt, Human
uucuuuugccguuauuaaaa

SEQ ID NO: 2349559 - RNA, 23 nt, Human
uucuuuugcccuucacaguguuu

SEQ ID NO: 2349560 - RNA, 22 nt, Human
uucuuuugcccuucacaguguu

SEQ ID NO: 2349561 - RNA, 21 nt, Human
uucuuuugcccuucacagugu

SEQ ID NO: 2349562 - RNA, 23 nt, Human
uucuuuugagcaacuuucuuaca

SEQ ID NO: 2349563 - RNA, 21 nt, Human
uucuuuucuggaauguaauca

SEQ ID NO: 2349564 - RNA, 18 nt, Human
auccugaaauagaggcua

SEQ ID NO: 2349565 - RNA, 22 nt, Human
auccucuuuagaguuagacugu

SEQ ID NO: 2349566 - RNA, 23 nt, Human
auccucuuuagaguuagacuguu

SEQ ID NO: 2349567 - RNA, 17 nt, Human
auccugaaauuucagau

SEQ ID NO: 2349568 - RNA, 16 nt, Human
auccugaaauuucaga

SEQ ID NO: 2349569 - RNA, 14 nt, Human
auccugaaauuuca

SEQ ID NO: 2349570 - RNA, 17 nt, Human
auccucuuugagugaag

SEQ ID NO: 2349571 - RNA, 16 nt, Human
auccucuuuagaguua

SEQ ID NO: 2349572 - RNA, 19 nt, Human
auccucuuuagaguuagac

SEQ ID NO: 2349573 - RNA, 20 nt, Human
auccucuuuagaguuagacu

SEQ ID NO: 2349574 - RNA, 21 nt, Human
auccucuuuagaguuagacug

SEQ ID NO: 2349575 - RNA, 21 nt, Human
auccugaaauagaggcuaaau

SEQ ID NO: 2349576 - RNA, 14 nt, Human
auccugacucugcc

SEQ ID NO: 2349577 - RNA, 15 nt, Human
auccugacucugccc

SEQ ID NO: 2349578 - RNA, 17 nt, Human
auccugacucugccccc

SEQ ID NO: 2349579 - RNA, 18 nt, Human
auccugacucugcccccu

SEQ ID NO: 2349580 - RNA, 11 nt, Human
auccugagcca

SEQ ID NO: 2349581 - RNA, 12 nt, Human
auccugagccag

SEQ ID NO: 2349582 - RNA, 13 nt, Human
auccugagccaga

SEQ ID NO: 2349583 - RNA, 12 nt, Human
auccugagccau

SEQ ID NO: 2349584 - RNA, 19 nt, Human
auccugaugagguuucuac

SEQ ID NO: 2349585 - RNA, 16 nt, Human
auccugcaauuccacu

SEQ ID NO: 2349586 - RNA, 24 nt, Human
auccugagccaucggugaaacuaa

SEQ ID NO: 2349587 - RNA, 19 nt, Human
auccugacucugcccccug

SEQ ID NO: 2349588 - RNA, 13 nt, Human
auccugaggcuga

SEQ ID NO: 2349589 - RNA, 22 nt, Human
auccugaggcuccacuuggucu

SEQ ID NO: 2349590 - RNA, 14 nt, Human
auccugcugcugug

SEQ ID NO: 2349591 - RNA, 16 nt, Human
auccugcggguggggc

SEQ ID NO: 2349592 - RNA, 23 nt, Human
auccugccuuagagccaggcaca

SEQ ID NO: 2349593 - RNA, 20 nt, Human
auccugcccccugaaacuua

SEQ ID NO: 2349594 - RNA, 22 nt, Human
auccugcccccugaaacuuauu

SEQ ID NO: 2349595 - RNA, 23 nt, Human
auccugcccccugaaacuuauuu

SEQ ID NO: 2349596 - RNA, 19 nt, Human
auccugccuuagagccagg

SEQ ID NO: 2349597 - RNA, 21 nt, Human
auccugccuuagagccaggca

SEQ ID NO: 2349598 - RNA, 22 nt, Human
auccugccuuagagccaggcac

SEQ ID NO: 2349599 - RNA, 16 nt, Human
auccugcagccuccuc

SEQ ID NO: 2349600 - RNA, 17 nt, Human
auccugcagccuccucc

SEQ ID NO: 2349601 - RNA, 20 nt, Human
auccugcagccuccuccuga

SEQ ID NO: 2349602 - RNA, 13 nt, Human
auccugccccuga

SEQ ID NO: 2349603 - RNA, 14 nt, Human
auccugagccagau

SEQ ID NO: 2349604 - RNA, 15 nt, Human
auccugagccagauu

SEQ ID NO: 2349605 - RNA, 17 nt, Human
auccugagccagauuuc

SEQ ID NO: 2349606 - RNA, 21 nt, Human
auccugagccagauuucacuc

SEQ ID NO: 2349607 - RNA, 18 nt, Human
auccugaggcuccacuug

SEQ ID NO: 2349608 - RNA, 16 nt, Human
auccugaggcuccacu

SEQ ID NO: 2349609 - RNA, 13 nt, Human
auccugaggcucc

SEQ ID NO: 2349610 - RNA, 11 nt, Human
auccugaggcu

SEQ ID NO: 2349611 - RNA, 19 nt, Human
auccugcuucugauaugca

SEQ ID NO: 2349612 - RNA, 21 nt, Human
auccugcuucugauaugcagu

SEQ ID NO: 2349613 - RNA, 22 nt, Human
auccuggacaugaagauucuuu

SEQ ID NO: 2349614 - RNA, 14 nt, Human
auccugcuucagug

SEQ ID NO: 2349615 - RNA, 15 nt, Human
auccuggaguucugg

SEQ ID NO: 2349616 - RNA, 17 nt, Human
auccuggaggcccaguu

SEQ ID NO: 2349617 - RNA, 16 nt, Human
auccuggaggcccagu

SEQ ID NO: 2349618 - RNA, 15 nt, Human
auccuggaggcccag

SEQ ID NO: 2349619 - RNA, 14 nt, Human
auccuggaggccca

SEQ ID NO: 2349620 - RNA, 17 nt, Human
auccuggcacccggccc

SEQ ID NO: 2349621 - RNA, 19 nt, Human
auccuggcacccggccccu

SEQ ID NO: 2349622 - RNA, 20 nt, Human
auccuggcacccggccccug

SEQ ID NO: 2349623 - RNA, 21 nt, Human
auccuggcacccggccccugc

SEQ ID NO: 2349624 - RNA, 22 nt, Human
auccuggcacccggccccugcu

SEQ ID NO: 2349625 - RNA, 23 nt, Human
auccuggcacccggccccugcug

SEQ ID NO: 2349626 - RNA, 20 nt, Human
auccuggaggcccaguucac

SEQ ID NO: 2349627 - RNA, 19 nt, Human
auccuggaggcccaguuca

SEQ ID NO: 2349628 - RNA, 17 nt, Human
auccuggccaacauggu

SEQ ID NO: 2349629 - RNA, 14 nt, Human
auccuggcccucug

SEQ ID NO: 2349630 - RNA, 14 nt, Human
auccuggcccauca

SEQ ID NO: 2349631 - RNA, 16 nt, Human
auccuggcccaucagu

SEQ ID NO: 2349632 - RNA, 12 nt, Human
auccuggcccau

SEQ ID NO: 2349633 - RNA, 13 nt, Human
auccuggcccauc

SEQ ID NO: 2349634 - RNA, 24 nt, Human
auccuggcucuuuggagaucaagg

SEQ ID NO: 2349635 - RNA, 18 nt, Human
auccugggcauccuucuu

SEQ ID NO: 2349636 - RNA, 22 nt, Human
auccugguugguguugcagaag

SEQ ID NO: 2349637 - RNA, 23 nt, Human
auccuggguggucugcaggcagg

SEQ ID NO: 2349638 - RNA, 22 nt, Human
auccuggguggucugcaggcag

SEQ ID NO: 2349639 - RNA, 20 nt, Human
auccuggggcucccuucauc

SEQ ID NO: 2349640 - RNA, 20 nt, Human
auccuggggcauuaaaaaaa

SEQ ID NO: 2349641 - RNA, 21 nt, Human
auccugggggacccaauguag

SEQ ID NO: 2349642 - RNA, 15 nt, Human
auccuggggcucccu

SEQ ID NO: 2349643 - RNA, 16 nt, Human
auccuggggcucccuu

SEQ ID NO: 2349644 - RNA, 14 nt, Human
auccuguccucagc

SEQ ID NO: 2349645 - RNA, 17 nt, Human
auccuguccucagcuuc

SEQ ID NO: 2349646 - RNA, 18 nt, Human
auccuguccucagcuucu

SEQ ID NO: 2349647 - RNA, 19 nt, Human
auccugucuuuaaggaaaa

SEQ ID NO: 2349648 - RNA, 23 nt, Human
auccugucuuuaaggaaaaaaag

SEQ ID NO: 2349649 - RNA, 21 nt, Human
auccugucuuuaaggaaaaaa

SEQ ID NO: 2349650 - RNA, 15 nt, Human
auccugucuuucuga

SEQ ID NO: 2349651 - RNA, 18 nt, Human
auccugucuuucugagca

SEQ ID NO: 2349652 - RNA, 23 nt, Human
auccugucuuucugagcacacuu

SEQ ID NO: 2349653 - RNA, 13 nt, Human
auccuguggguga

SEQ ID NO: 2349654 - RNA, 12 nt, Human
auccugugaagu

SEQ ID NO: 2349655 - RNA, 16 nt, Human
auccugugaaguaagg

SEQ ID NO: 2349656 - RNA, 15 nt, Human
auccugugacaugua

SEQ ID NO: 2349657 - RNA, 16 nt, Human
auccugugacauguaa

SEQ ID NO: 2349658 - RNA, 18 nt, Human
auccugugacauguaaca

SEQ ID NO: 2349659 - RNA, 18 nt, Human
auccuguguuucuaggga

SEQ ID NO: 2349660 - RNA, 14 nt, Human
auccuguguuucua

SEQ ID NO: 2349661 - RNA, 21 nt, Human
aucggugaaacuaacagauaa

SEQ ID NO: 2349662 - RNA, 19 nt, Human
aucggugaaacuaacagau

SEQ ID NO: 2349663 - RNA, 18 nt, Human
aucggugaaacuaacaga

SEQ ID NO: 2349664 - RNA, 15 nt, Human
aucguaaccagccag

SEQ ID NO: 2349665 - RNA, 17 nt, Human
aucguaaaauuaagaaa

SEQ ID NO: 2349666 - RNA, 13 nt, Human
aucguaaaauuaa

SEQ ID NO: 2349667 - RNA, 14 nt, Human
aucguaaaauuaag

SEQ ID NO: 2349668 - RNA, 19 nt, Human
aucggucuugcccagagga

SEQ ID NO: 2349669 - RNA, 17 nt, Human
aucggggcacugcaggg

SEQ ID NO: 2349670 - RNA, 12 nt, Human
aucguaaaauua

SEQ ID NO: 2349671 - RNA, 21 nt, Human
aucgggagcagugucuuccau

SEQ ID NO: 2349672 - RNA, 18 nt, Human
aucgggagcagugucuuc

SEQ ID NO: 2349673 - RNA, 17 nt, Human
aucgggagcagugucuu

SEQ ID NO: 2349674 - RNA, 16 nt, Human
aucgggagcagugucu

SEQ ID NO: 2349675 - RNA, 21 nt, Human
aucgggaacaguguuucccau

SEQ ID NO: 2349676 - RNA, 17 nt, Human
aucgggaacaguguuuc

SEQ ID NO: 2349677 - RNA, 16 nt, Human
aucgggaacaguguuu

SEQ ID NO: 2349678 - RNA, 15 nt, Human
aucgggaacaguguu

SEQ ID NO: 2349679 - RNA, 23 nt, Human
aucagugugucuaaauuugaaug

SEQ ID NO: 2349680 - RNA, 18 nt, Human
aucaguuacucugaaggg

SEQ ID NO: 2349681 - RNA, 21 nt, Human
aucaguuacucagcccugggc

SEQ ID NO: 2349682 - RNA, 19 nt, Human
aucaguuacucagcccugg

SEQ ID NO: 2349683 - RNA, 15 nt, Human
aucaguuagagcuga

SEQ ID NO: 2349684 - RNA, 18 nt, Human
aucaguuacucagcccug

SEQ ID NO: 2349685 - RNA, 17 nt, Human
aucaguuacucagcccu

SEQ ID NO: 2349686 - RNA, 16 nt, Human
aucaguuacucagccc

SEQ ID NO: 2349687 - RNA, 15 nt, Human
aucaguuacucagcc

SEQ ID NO: 2349688 - RNA, 18 nt, Human
aucaguuacuaagaagaa

SEQ ID NO: 2349689 - RNA, 14 nt, Human
aucaggugcugcca

SEQ ID NO: 2349690 - RNA, 13 nt, Human
aucagucucugag

SEQ ID NO: 2349691 - RNA, 20 nt, Human
aucagucuauccacagagag

SEQ ID NO: 2349692 - RNA, 18 nt, Human
aucagucucugagggcuu

SEQ ID NO: 2349693 - RNA, 19 nt, Human
aucagucugauucccaagc

SEQ ID NO: 2349694 - RNA, 15 nt, Human
aucagugcccuccag

SEQ ID NO: 2349695 - RNA, 13 nt, Human
aucagugcccucc

SEQ ID NO: 2349696 - RNA, 17 nt, Human
aucagugcccuccagga

SEQ ID NO: 2349697 - RNA, 15 nt, Human
aucagugcucccuca

SEQ ID NO: 2349698 - RNA, 20 nt, Human
aucagugcucgagacacagu

SEQ ID NO: 2349699 - RNA, 16 nt, Human
aucacucuuguggaug

SEQ ID NO: 2349700 - RNA, 14 nt, Human
aucacucuugugga

SEQ ID NO: 2349701 - RNA, 17 nt, Human
aucacucuuguggaugu

SEQ ID NO: 2349702 - RNA, 14 nt, Human
aucacugaacuuug

SEQ ID NO: 2349703 - RNA, 20 nt, Human
aucacuuaggaaauggcuuu

SEQ ID NO: 2349704 - RNA, 18 nt, Human
aucacuucugagaacuca

SEQ ID NO: 2349705 - RNA, 17 nt, Human
aucaggugcugccaucc

SEQ ID NO: 2349706 - RNA, 19 nt, Human
aucaggugcugccauccag

SEQ ID NO: 2349707 - RNA, 15 nt, Human
aucaggugcugccau

SEQ ID NO: 2349708 - RNA, 23 nt, Human
aucacuugaacccgggaggcaga

SEQ ID NO: 2349709 - RNA, 22 nt, Human
aucauuauaacugaaggagaag

SEQ ID NO: 2349710 - RNA, 20 nt, Human
aucauuauaacugaaggaga

SEQ ID NO: 2349711 - RNA, 20 nt, Human
aucauuaucagccugugcca

SEQ ID NO: 2349712 - RNA, 21 nt, Human
aucauucucugucucauccau

SEQ ID NO: 2349713 - RNA, 16 nt, Human
aucauucucugucuca

SEQ ID NO: 2349714 - RNA, 14 nt, Human
aucauucucugucu

SEQ ID NO: 2349715 - RNA, 12 nt, Human
aucauucucugu

SEQ ID NO: 2349716 - RNA, 23 nt, Human
aucauuauaaacgugaugaucag

SEQ ID NO: 2349717 - RNA, 16 nt, Human
aucauuauaaacguga

SEQ ID NO: 2349718 - RNA, 19 nt, Human
aucauuagggggaacucua

SEQ ID NO: 2349719 - RNA, 15 nt, Human
aucauuaaaguucua

SEQ ID NO: 2349720 - RNA, 11 nt, Human
aucauuagaac

SEQ ID NO: 2349721 - RNA, 13 nt, Human
aucauuaaaguuc

SEQ ID NO: 2349722 - RNA, 14 nt, Human
aucauuaaaguucu

SEQ ID NO: 2349723 - RNA, 16 nt, Human
aucauuaggugugacu

SEQ ID NO: 2349724 - RNA, 21 nt, Human
aucauccacugugccaugugc

SEQ ID NO: 2349725 - RNA, 18 nt, Human
aucaucauguguguccac

SEQ ID NO: 2349726 - RNA, 11 nt, Human
aucauuaauac

SEQ ID NO: 2349727 - RNA, 16 nt, Human
aucauccacauuguuu

SEQ ID NO: 2349728 - RNA, 11 nt, Human
aucauuaaagu

SEQ ID NO: 2349729 - RNA, 12 nt, Human
aucauuaaaguu

SEQ ID NO: 2349730 - RNA, 23 nt, Human
aucauccacugugccaugugcca

SEQ ID NO: 2349731 - RNA, 12 nt, Human
aucauaaaauaa

SEQ ID NO: 2349732 - RNA, 17 nt, Human
aucaguuuuauccacag

SEQ ID NO: 2349733 - RNA, 22 nt, Human
aucaguuugcuagcagaaaucu

SEQ ID NO: 2349734 - RNA, 13 nt, Human
aucauaaaauaaa

SEQ ID NO: 2349735 - RNA, 14 nt, Human
aucauaaacugugu

SEQ ID NO: 2349736 - RNA, 23 nt, Human
aucauaguggcuuaaaacaacac

SEQ ID NO: 2349737 - RNA, 18 nt, Human
aucaguugcaauaauacu

SEQ ID NO: 2349738 - RNA, 21 nt, Human
aucaguugcaauaauacuucu

SEQ ID NO: 2349739 - RNA, 15 nt, Human
aucauaaaacuugau

SEQ ID NO: 2349740 - RNA, 13 nt, Human
aucauaugauucu

SEQ ID NO: 2349741 - RNA, 20 nt, Human
aucauauaauaaauguacau

SEQ ID NO: 2349742 - RNA, 16 nt, Human
aucauauaauaaaugu

SEQ ID NO: 2349743 - RNA, 18 nt, Human
aucaucaguggagccaug

SEQ ID NO: 2349744 - RNA, 16 nt, Human
aucauaugauucugcu

SEQ ID NO: 2349745 - RNA, 18 nt, Human
aucauaugauucugcuuu

SEQ ID NO: 2349746 - RNA, 19 nt, Human
aucauaugauucugcuuuu

SEQ ID NO: 2349747 - RNA, 21 nt, Human
aucauaugauucugcuuuuac

SEQ ID NO: 2349748 - RNA, 19 nt, Human
aucaucaguauugaagcau

SEQ ID NO: 2349749 - RNA, 16 nt, Human
aucauaaacugugugc

SEQ ID NO: 2349750 - RNA, 17 nt, Human
uucucccucucacuguc

SEQ ID NO: 2349751 - RNA, 13 nt, Human
uucucccucugga

SEQ ID NO: 2349752 - RNA, 21 nt, Human
uucucccguucacguugccua

SEQ ID NO: 2349753 - RNA, 20 nt, Human
uucucccucauuucaggagc

SEQ ID NO: 2349754 - RNA, 15 nt, Human
uucuccccugccccc

SEQ ID NO: 2349755 - RNA, 16 nt, Human
uucuccccugccccca

SEQ ID NO: 2349756 - RNA, 17 nt, Human
uucuccccugcccccag

SEQ ID NO: 2349757 - RNA, 18 nt, Human
uucuccccugcccccagg

SEQ ID NO: 2349758 - RNA, 19 nt, Human
uucuccccugcccccagga

SEQ ID NO: 2349759 - RNA, 21 nt, Human
uucuccccugcccccaggacu

SEQ ID NO: 2349760 - RNA, 22 nt, Human
uucuccccugcccccaggacug

SEQ ID NO: 2349761 - RNA, 23 nt, Human
uucuccccugcccccaggacugg

SEQ ID NO: 2349762 - RNA, 17 nt, Human
uucuccuuucacaaccu

SEQ ID NO: 2349763 - RNA, 15 nt, Human
uucuccuauguguaa

SEQ ID NO: 2349764 - RNA, 18 nt, Human
uucuccguuagcuccugu

SEQ ID NO: 2349765 - RNA, 19 nt, Human
uucuccguuagcuccugug

SEQ ID NO: 2349766 - RNA, 20 nt, Human
uucuccguuagcuccugugg

SEQ ID NO: 2349767 - RNA, 22 nt, Human
uucuccguuagcuccuguggcc

SEQ ID NO: 2349768 - RNA, 23 nt, Human
uucuccgacugcuagggaguggu

SEQ ID NO: 2349769 - RNA, 13 nt, Human
uucuccgccagcc

SEQ ID NO: 2349770 - RNA, 14 nt, Human
uucuccgccagccu

SEQ ID NO: 2349771 - RNA, 15 nt, Human
uucuccgccagccuc

SEQ ID NO: 2349772 - RNA, 16 nt, Human
uucuccgccagccucc

SEQ ID NO: 2349773 - RNA, 17 nt, Human
uucuccgccagccuccu

SEQ ID NO: 2349774 - RNA, 18 nt, Human
uucuccgccagccuccuc

SEQ ID NO: 2349775 - RNA, 16 nt, Human
uucuccguuagcuccu

SEQ ID NO: 2349776 - RNA, 17 nt, Human
uucuccguuagcuccug

SEQ ID NO: 2349777 - RNA, 19 nt, Human
uucuccgccagccuccucu

SEQ ID NO: 2349778 - RNA, 20 nt, Human
uucuccgccagccuccucug

SEQ ID NO: 2349779 - RNA, 21 nt, Human
uucuccgccagccuccucugg

SEQ ID NO: 2349780 - RNA, 19 nt, Human
aucauugugaaauuauuca

SEQ ID NO: 2349781 - RNA, 13 nt, Human
aucauugugaaau

SEQ ID NO: 2349782 - RNA, 15 nt, Human
aucauugugaaauua

SEQ ID NO: 2349783 - RNA, 12 nt, Human
aucauugaaauc

SEQ ID NO: 2349784 - RNA, 24 nt, Human
aucauucucugucucauccaucau

SEQ ID NO: 2349785 - RNA, 19 nt, Human
aucauucuuauuucaugaa

SEQ ID NO: 2349786 - RNA, 20 nt, Human
aucauucuuauuucaugaaa

SEQ ID NO: 2349787 - RNA, 14 nt, Human
aucauuguauggau

SEQ ID NO: 2349788 - RNA, 16 nt, Human
aucauuguacaguuug

SEQ ID NO: 2349789 - RNA, 18 nt, Human
aucauuguacaguuuguu

SEQ ID NO: 2349790 - RNA, 22 nt, Human
aucauuguacaguuuguuuaca

SEQ ID NO: 2349791 - RNA, 18 nt, Human
aucauuguauauaugugu

SEQ ID NO: 2349792 - RNA, 15 nt, Human
aucauuguacaguuu

SEQ ID NO: 2349793 - RNA, 23 nt, Human
aucauucuuauuucaugaaaauu

SEQ ID NO: 2349794 - RNA, 13 nt, Human
aucauugaaaucu

SEQ ID NO: 2349795 - RNA, 12 nt, Human
uucuccuuugua

SEQ ID NO: 2349796 - RNA, 23 nt, Human
uucuccuccaugggagaaaauag

SEQ ID NO: 2349797 - RNA, 14 nt, Human
uucuccuuuguacu

SEQ ID NO: 2349798 - RNA, 17 nt, Human
uucuccuuuguacuuug

SEQ ID NO: 2349799 - RNA, 18 nt, Human
uucuccuuucacaaccuu

SEQ ID NO: 2349800 - RNA, 22 nt, Human
uucuccuuucacaaccuucugu

SEQ ID NO: 2349801 - RNA, 17 nt, Human
uucucgauuuuaucuuu

SEQ ID NO: 2349802 - RNA, 20 nt, Human
uucuccuuugauaaaauaaa

SEQ ID NO: 2349803 - RNA, 16 nt, Human
uucuccuuuugaaaag

SEQ ID NO: 2349804 - RNA, 13 nt, Human
uucuccuuuuccu

SEQ ID NO: 2349805 - RNA, 18 nt, Human
uucuccuuuuccucucuc

SEQ ID NO: 2349806 - RNA, 23 nt, Human
uucucuaaaugaggggccucagg

SEQ ID NO: 2349807 - RNA, 12 nt, Human
uucucgggcuga

SEQ ID NO: 2349808 - RNA, 20 nt, Human
uucucucaucucuuagcucc

SEQ ID NO: 2349809 - RNA, 23 nt, Human
uucucucaucucuuagcuccccu

SEQ ID NO: 2349810 - RNA, 13 nt, Human
uucucucaucucu

SEQ ID NO: 2349811 - RNA, 17 nt, Human
uucucucaucucuuagc

SEQ ID NO: 2349812 - RNA, 12 nt, Human
uucucucaucuc

SEQ ID NO: 2349813 - RNA, 16 nt, Human
uucucuaucauuuaau

SEQ ID NO: 2349814 - RNA, 13 nt, Human
uucucucaccucc

SEQ ID NO: 2349815 - RNA, 20 nt, Human
uucucuaaaauagccacuua

SEQ ID NO: 2349816 - RNA, 13 nt, Human
uucucuaucauuu

SEQ ID NO: 2349817 - RNA, 21 nt, Human
uucucuaguuugauuaaauuc

SEQ ID NO: 2349818 - RNA, 18 nt, Human
uucugaagucuacuuugu

SEQ ID NO: 2349819 - RNA, 17 nt, Human
uucugaauaacauuugu

SEQ ID NO: 2349820 - RNA, 15 nt, Human
uucugaauaugcugc

SEQ ID NO: 2349821 - RNA, 14 nt, Human
uucugaaugcugcu

SEQ ID NO: 2349822 - RNA, 16 nt, Human
uucugaaugcugcuac

SEQ ID NO: 2349823 - RNA, 16 nt, Human
uucugaauaauuucuu

SEQ ID NO: 2349824 - RNA, 17 nt, Human
uucugaauaauuucuua

SEQ ID NO: 2349825 - RNA, 19 nt, Human
uucugaauacaaagugaug

SEQ ID NO: 2349826 - RNA, 11 nt, Human
uucugaauaug

SEQ ID NO: 2349827 - RNA, 19 nt, Human
uucugcagccacuauuguu

SEQ ID NO: 2349828 - RNA, 22 nt, Human
uucugcaguaaaucuuuuacaa

SEQ ID NO: 2349829 - RNA, 19 nt, Human
uucugcaguagucucugug

SEQ ID NO: 2349830 - RNA, 20 nt, Human
uucugcaguagucucugugc

SEQ ID NO: 2349831 - RNA, 18 nt, Human
uucugcaguaaaucuuuu

SEQ ID NO: 2349832 - RNA, 15 nt, Human
uucugcaguaaaucu

SEQ ID NO: 2349833 - RNA, 18 nt, Human
uucugaaugcugcuacuu

SEQ ID NO: 2349834 - RNA, 11 nt, Human
uucugaaugua

SEQ ID NO: 2349835 - RNA, 12 nt, Human
uucugcagcugu

SEQ ID NO: 2349836 - RNA, 15 nt, Human
uucugcagcuguuuu

SEQ ID NO: 2349837 - RNA, 16 nt, Human
uucugcagcuguuuua

SEQ ID NO: 2349838 - RNA, 23 nt, Human
uucugcauauguugaauacuuuu

SEQ ID NO: 2349839 - RNA, 22 nt, Human
uucugcauauguugaauacuuu

SEQ ID NO: 2349840 - RNA, 21 nt, Human
uucugcauauguugaauacuu

SEQ ID NO: 2349841 - RNA, 17 nt, Human
uucugcauauguugaau

SEQ ID NO: 2349842 - RNA, 17 nt, Human
uucugccugccagcugc

SEQ ID NO: 2349843 - RNA, 16 nt, Human
uucugccugccagcug

SEQ ID NO: 2349844 - RNA, 12 nt, Human
uucugccugcca

SEQ ID NO: 2349845 - RNA, 21 nt, Human
uucugcaguagucucugugcu

SEQ ID NO: 2349846 - RNA, 16 nt, Human
uucugcaucagcugcu

SEQ ID NO: 2349847 - RNA, 23 nt, Human
uucuucucaggcaugaacaugua

SEQ ID NO: 2349848 - RNA, 16 nt, Human
uucuugccaaugaggu

SEQ ID NO: 2349849 - RNA, 18 nt, Human
uucuugccucuguccccu

SEQ ID NO: 2349850 - RNA, 20 nt, Human
uucuugccucuguccccuuc

SEQ ID NO: 2349851 - RNA, 15 nt, Human
uucuugccucugugc

SEQ ID NO: 2349852 - RNA, 16 nt, Human
uucuugccucugugcu

SEQ ID NO: 2349853 - RNA, 17 nt, Human
uucuugccucugugcug

SEQ ID NO: 2349854 - RNA, 22 nt, Human
uucuugccucugugcugugugu

SEQ ID NO: 2349855 - RNA, 12 nt, Human
uucuugccuuca

SEQ ID NO: 2349856 - RNA, 11 nt, Human
uucuucucccu

SEQ ID NO: 2349857 - RNA, 22 nt, Human
uucuucuccacuuucuagccag

SEQ ID NO: 2349858 - RNA, 20 nt, Human
uucuucggggaacuccugga

SEQ ID NO: 2349859 - RNA, 17 nt, Human
uucuucgggaagagagg

SEQ ID NO: 2349860 - RNA, 23 nt, Human
uucuucgagguggaucacagagg

SEQ ID NO: 2349861 - RNA, 15 nt, Human
uucuucgggaagaga

SEQ ID NO: 2349862 - RNA, 21 nt, Human
uucuucuagguucuaaaaauu

SEQ ID NO: 2349863 - RNA, 18 nt, Human
uucuucuagguucuaaaa

SEQ ID NO: 2349864 - RNA, 21 nt, Human
uucuugccuacuaugccagau

SEQ ID NO: 2349865 - RNA, 21 nt, Human
uucuuucuaguggucuuugua

SEQ ID NO: 2349866 - RNA, 22 nt, Human
uucuuucuaguggucuuuguaa

SEQ ID NO: 2349867 - RNA, 19 nt, Human
uucuuucuaguucagcugc

SEQ ID NO: 2349868 - RNA, 12 nt, Human
uucuuucuggcu

SEQ ID NO: 2349869 - RNA, 20 nt, Human
uucuuucuggcuaugcauuu

SEQ ID NO: 2349870 - RNA, 17 nt, Human
uucuuucuggcuaugca

SEQ ID NO: 2349871 - RNA, 17 nt, Human
uucuuugagacuggguc

SEQ ID NO: 2349872 - RNA, 16 nt, Human
uucuuugauaauguua

SEQ ID NO: 2349873 - RNA, 17 nt, Human
uucuuugauaauguuaa

SEQ ID NO: 2349874 - RNA, 18 nt, Human
uucuuugauaauguuaaa

SEQ ID NO: 2349875 - RNA, 11 nt, Human
uucuuugaaug

SEQ ID NO: 2349876 - RNA, 21 nt, Human
uucuuugauguuaacacauuu

SEQ ID NO: 2349877 - RNA, 22 nt, Human
uucuuugauguuaacacauuuu

SEQ ID NO: 2349878 - RNA, 13 nt, Human
uucuuugauguua

SEQ ID NO: 2349879 - RNA, 18 nt, Human
uucuuugauguuaacaca

SEQ ID NO: 2349880 - RNA, 20 nt, Human
uucuuugauguuaacacauu

SEQ ID NO: 2349881 - RNA, 22 nt, Human
uucuuugauaauguuaaauuug

SEQ ID NO: 2349882 - RNA, 14 nt, Human
aucccugccugguc

SEQ ID NO: 2349883 - RNA, 20 nt, Human
uucuguugucauugcuguug

SEQ ID NO: 2349884 - RNA, 15 nt, Human
aucccugccagcucu

SEQ ID NO: 2349885 - RNA, 14 nt, Human
aucccugccagcuc

SEQ ID NO: 2349886 - RNA, 15 nt, Human
aucccugccugguca

SEQ ID NO: 2349887 - RNA, 18 nt, Human
uucuguuuagauaauaca

SEQ ID NO: 2349888 - RNA, 13 nt, Human
uucuguuuagaua

SEQ ID NO: 2349889 - RNA, 15 nt, Human
uucuguuuccuuuuu

SEQ ID NO: 2349890 - RNA, 19 nt, Human
uucuguuuacaucaguuuu

SEQ ID NO: 2349891 - RNA, 16 nt, Human
uucuguuuuauaauuu

SEQ ID NO: 2349892 - RNA, 11 nt, Human
uucuguuucuu

SEQ ID NO: 2349893 - RNA, 16 nt, Human
uucuguuuggaggagc

SEQ ID NO: 2349894 - RNA, 17 nt, Human
uucuguuuuauaauuuu

SEQ ID NO: 2349895 - RNA, 21 nt, Human
uucuuaaaugggcuacuuugu

SEQ ID NO: 2349896 - RNA, 23 nt, Human
uucuuaaccagaucauugugaaa

SEQ ID NO: 2349897 - RNA, 22 nt, Human
uucuuaaccagaucauugugaa

SEQ ID NO: 2349898 - RNA, 15 nt, Human
uucuguuuucuguuu

SEQ ID NO: 2349899 - RNA, 19 nt, Human
uucuuaaauaauaaagauc

SEQ ID NO: 2349900 - RNA, 15 nt, Human
uucuuaaauaauaaa

SEQ ID NO: 2349901 - RNA, 12 nt, Human
uucuuagaaauu

SEQ ID NO: 2349902 - RNA, 15 nt, Human
uucuuacuaaacauu

SEQ ID NO: 2349903 - RNA, 18 nt, Human
uucuuacuaaacauuuug

SEQ ID NO: 2349904 - RNA, 21 nt, Human
uucuuagacuacauuuagaga

SEQ ID NO: 2349905 - RNA, 13 nt, Human
uucuuagaaauuu

SEQ ID NO: 2349906 - RNA, 22 nt, Human
uucuuagaaauuuauuuccuag

SEQ ID NO: 2349907 - RNA, 15 nt, Human
uucuuaccuguaugu

SEQ ID NO: 2349908 - RNA, 13 nt, Human
uucuuacauguuu

SEQ ID NO: 2349909 - RNA, 16 nt, Human
uucuuacaugcauuug

SEQ ID NO: 2349910 - RNA, 14 nt, Human
uucuuacaugcauu

SEQ ID NO: 2349911 - RNA, 14 nt, Human
uucuuacauguuuu

SEQ ID NO: 2349912 - RNA, 22 nt, Human
auccaagacagaauaaugaaug

SEQ ID NO: 2349913 - RNA, 22 nt, Human
auccaauggacugcauaaauaa

SEQ ID NO: 2349914 - RNA, 15 nt, Human
auccacacacagagg

SEQ ID NO: 2349915 - RNA, 23 nt, Human
auccacacacagaggaagagcag

SEQ ID NO: 2349916 - RNA, 19 nt, Human
auccacacacgcaggaacu

SEQ ID NO: 2349917 - RNA, 20 nt, Human
auccacacacagaggaagag

SEQ ID NO: 2349918 - RNA, 16 nt, Human
auccacacacagagga

SEQ ID NO: 2349919 - RNA, 13 nt, Human
auccacagagagu

SEQ ID NO: 2349920 - RNA, 17 nt, Human
auccacagagaguccca

SEQ ID NO: 2349921 - RNA, 19 nt, Human
auccacagagagucccacu

SEQ ID NO: 2349922 - RNA, 17 nt, Human
auccagguucagcuugu

SEQ ID NO: 2349923 - RNA, 13 nt, Human
auccacauuguuu

SEQ ID NO: 2349924 - RNA, 15 nt, Human
auccacauuguuuua

SEQ ID NO: 2349925 - RNA, 17 nt, Human
auccacauuguuuuaaa

SEQ ID NO: 2349926 - RNA, 20 nt, Human
auccacagagagucccacug

SEQ ID NO: 2349927 - RNA, 21 nt, Human
auccacagagagucccacugc

SEQ ID NO: 2349928 - RNA, 18 nt, Human
auccaucaucaugugugu

SEQ ID NO: 2349929 - RNA, 15 nt, Human
auccaguaucuugaa

SEQ ID NO: 2349930 - RNA, 20 nt, Human
auccaugaccuaguuuucca

SEQ ID NO: 2349931 - RNA, 18 nt, Human
auccaugaccuaguuuuc

SEQ ID NO: 2349932 - RNA, 21 nt, Human
auccaucuaaauaccugcccu

SEQ ID NO: 2349933 - RNA, 14 nt, Human
auccauccagaggc

SEQ ID NO: 2349934 - RNA, 14 nt, Human
auccaguaucuuga

SEQ ID NO: 2349935 - RNA, 16 nt, Human
auccaguaggauccag

SEQ ID NO: 2349936 - RNA, 20 nt, Human
auccaaccccccaccugcca

SEQ ID NO: 2349937 - RNA, 18 nt, Human
auccaaccccccaccugc

SEQ ID NO: 2349938 - RNA, 22 nt, Human
uucugccugccagcugcacuga

SEQ ID NO: 2349939 - RNA, 15 nt, Human
auccaaagcagacag

SEQ ID NO: 2349940 - RNA, 19 nt, Human
uucugccugccagcugcac

SEQ ID NO: 2349941 - RNA, 18 nt, Human
uucugccugccagcugca

SEQ ID NO: 2349942 - RNA, 15 nt, Human
uucugccugcccagg

SEQ ID NO: 2349943 - RNA, 16 nt, Human
uucugccugcccaggc

SEQ ID NO: 2349944 - RNA, 16 nt, Human
auccaagcaaauguga

SEQ ID NO: 2349945 - RNA, 20 nt, Human
auccaacuaaugccuuacuc

SEQ ID NO: 2349946 - RNA, 18 nt, Human
auccaacuaaugccuuac

SEQ ID NO: 2349947 - RNA, 16 nt, Human
auccaacuaaugccuu

SEQ ID NO: 2349948 - RNA, 19 nt, Human
auccaagauauuuuaaaau

SEQ ID NO: 2349949 - RNA, 14 nt, Human
auccaacuccagga

SEQ ID NO: 2349950 - RNA, 20 nt, Human
auccaauggguuuuucccug

SEQ ID NO: 2349951 - RNA, 16 nt, Human
aucccacuugccccug

SEQ ID NO: 2349952 - RNA, 19 nt, Human
auccaugggggcagggcau

SEQ ID NO: 2349953 - RNA, 16 nt, Human
auccaugggggcaggg

SEQ ID NO: 2349954 - RNA, 22 nt, Human
aucccacuuucuauagcagauu

SEQ ID NO: 2349955 - RNA, 20 nt, Human
aucccagagggugggcuuca

SEQ ID NO: 2349956 - RNA, 13 nt, Human
aucccagaaauua

SEQ ID NO: 2349957 - RNA, 19 nt, Human
auccaugaguuugcccugg

SEQ ID NO: 2349958 - RNA, 22 nt, Human
auccaugaccuaguuuuccaug

SEQ ID NO: 2349959 - RNA, 21 nt, Human
auccaugaccuaguuuuccau

SEQ ID NO: 2349960 - RNA, 20 nt, Human
auccauggggcugauuguau

SEQ ID NO: 2349961 - RNA, 19 nt, Human
aucccagcacuuugggagg

SEQ ID NO: 2349962 - RNA, 17 nt, Human
aucccagaaauuagaaa

SEQ ID NO: 2349963 - RNA, 14 nt, Human
aucccagcacuuug

SEQ ID NO: 2349964 - RNA, 22 nt, Human
aucccagcacuuugggaggcug

SEQ ID NO: 2349965 - RNA, 17 nt, Human
aucccagcacuuuggga

SEQ ID NO: 2349966 - RNA, 20 nt, Human
aucccagcacuuugggaggc

SEQ ID NO: 2349967 - RNA, 11 nt, Human
aucccagcccc

SEQ ID NO: 2349968 - RNA, 16 nt, Human
aucccaugagccucag

SEQ ID NO: 2349969 - RNA, 21 nt, Human
aucccagcacuuugggaggcc

SEQ ID NO: 2349970 - RNA, 15 nt, Human
aucccucugggcacu

SEQ ID NO: 2349971 - RNA, 20 nt, Human
aucccugaaucccccuugcc

SEQ ID NO: 2349972 - RNA, 22 nt, Human
aucccugaaucccccuugccac

SEQ ID NO: 2349973 - RNA, 22 nt, Human
aucccugaaggccccgcccagg

SEQ ID NO: 2349974 - RNA, 17 nt, Human
aucccugaaggccccgc

SEQ ID NO: 2349975 - RNA, 17 nt, Human
aucccaugagccucagc

SEQ ID NO: 2349976 - RNA, 18 nt, Human
aucccaugagccucagca

SEQ ID NO: 2349977 - RNA, 21 nt, Human
aggacugugacaggcagcaga

SEQ ID NO: 2349978 - RNA, 22 nt, Human
aggacugugacaggcagcagag

SEQ ID NO: 2349979 - RNA, 16 nt, Human
aggacugugacaggca

SEQ ID NO: 2349980 - RNA, 22 nt, Human
aggacuguauuugugacuaauu

SEQ ID NO: 2349981 - RNA, 17 nt, Human
aggacugugacaggcag

SEQ ID NO: 2349982 - RNA, 18 nt, Human
aggacugugacaggcagc

SEQ ID NO: 2349983 - RNA, 19 nt, Human
aggacugugacaggcagca

SEQ ID NO: 2349984 - RNA, 20 nt, Human
aggacugugacaggcagcag

SEQ ID NO: 2349985 - RNA, 19 nt, Human
aggacugaauuguccccag

SEQ ID NO: 2349986 - RNA, 17 nt, Human
aggacugaauugucccc

SEQ ID NO: 2349987 - RNA, 14 nt, Human
aggacauuucucua

SEQ ID NO: 2349988 - RNA, 20 nt, Human
aggacugaauuguccccagu

SEQ ID NO: 2349989 - RNA, 13 nt, Human
aggacugagcccc

SEQ ID NO: 2349990 - RNA, 16 nt, Human
aggacugagccccgca

SEQ ID NO: 2349991 - RNA, 24 nt, Human
aggacugagccccgcagaccuccc

SEQ ID NO: 2349992 - RNA, 12 nt, Human
aggacugaggga

SEQ ID NO: 2349993 - RNA, 18 nt, Human
aggacugagggacucuga

SEQ ID NO: 2349994 - RNA, 16 nt, Human
aggacuuggucugauu

SEQ ID NO: 2349995 - RNA, 20 nt, Human
aggacuuggucugauuucag

SEQ ID NO: 2349996 - RNA, 16 nt, Human
aggacuugugucucug

SEQ ID NO: 2349997 - RNA, 13 nt, Human
aggacuugugucu

SEQ ID NO: 2349998 - RNA, 22 nt, Human
aggacuguuuuuuccugagcuu

SEQ ID NO: 2349999 - RNA, 17 nt, Human
aggacuuaacggcucca

SEQ ID NO: 2350000 - RNA, 18 nt, Human
aggacuuaacggcuccag

SEQ ID NO: 2350001 - RNA, 20 nt, Human
aggacuuaacggcuccagga

SEQ ID NO: 2350002 - RNA, 18 nt, Human
aggacuguuuuuuccuga

SEQ ID NO: 2350003 - RNA, 21 nt, Human
aggacuguuuuuuccugagcu

SEQ ID NO: 2350004 - RNA, 19 nt, Human
aggacuuauuuaaacucug

SEQ ID NO: 2350005 - RNA, 21 nt, Human
aggacuuaacggcuccaggau

SEQ ID NO: 2350006 - RNA, 20 nt, Human
aggacuuccuguccagcucc

SEQ ID NO: 2350007 - RNA, 19 nt, Human
aggacucugccuccucuuc

SEQ ID NO: 2350008 - RNA, 15 nt, Human
aggacauuucccagg

SEQ ID NO: 2350009 - RNA, 17 nt, Human
aggacauuccaagacag

SEQ ID NO: 2350010 - RNA, 18 nt, Human
aggacauuccaagacagu

SEQ ID NO: 2350011 - RNA, 19 nt, Human
aggacauugcggacagcca

SEQ ID NO: 2350012 - RNA, 23 nt, Human
aggacauugcggacagccacggc

SEQ ID NO: 2350013 - RNA, 15 nt, Human
aggacauguuuuugu

SEQ ID NO: 2350014 - RNA, 16 nt, Human
aggacauguuuuuguu

SEQ ID NO: 2350015 - RNA, 21 nt, Human
aggacauguuuuuguuuucuu

SEQ ID NO: 2350016 - RNA, 23 nt, Human
aggacauguuuuuguuuucuuug

SEQ ID NO: 2350017 - RNA, 14 nt, Human
aggacauuccaaga

SEQ ID NO: 2350018 - RNA, 16 nt, Human
aggacauuccaagaca

SEQ ID NO: 2350019 - RNA, 15 nt, Human
aggacauugcggaca

SEQ ID NO: 2350020 - RNA, 17 nt, Human
aggacauugcggacagc

SEQ ID NO: 2350021 - RNA, 18 nt, Human
aggacauugcggacagcc

SEQ ID NO: 2350022 - RNA, 21 nt, Human
aggagcauuuggagagaaggc

SEQ ID NO: 2350023 - RNA, 22 nt, Human
aggagccccgaggccuucucug

SEQ ID NO: 2350024 - RNA, 18 nt, Human
aggagcccugggaggcuc

SEQ ID NO: 2350025 - RNA, 19 nt, Human
aggagcaggagccugagcc

SEQ ID NO: 2350026 - RNA, 20 nt, Human
aggagcagcuucaguuguuu

SEQ ID NO: 2350027 - RNA, 20 nt, Human
aggagcaggggcguggaggg

SEQ ID NO: 2350028 - RNA, 22 nt, Human
aggagcaaaggcugagaacacu

SEQ ID NO: 2350029 - RNA, 16 nt, Human
aggagcagccucagaa

SEQ ID NO: 2350030 - RNA, 19 nt, Human
aggagcagccucagaacaa

SEQ ID NO: 2350031 - RNA, 16 nt, Human
aggagcagcuucaguu

SEQ ID NO: 2350032 - RNA, 19 nt, Human
aggagcagugcaggcacag

SEQ ID NO: 2350033 - RNA, 16 nt, Human
aggagcauccaccucc

SEQ ID NO: 2350034 - RNA, 20 nt, Human
aggagcauccaccuccuucu

SEQ ID NO: 2350035 - RNA, 19 nt, Human
aggagcaguaucaugaagc

SEQ ID NO: 2350036 - RNA, 14 nt, Human
aggagcagugcagg

SEQ ID NO: 2350037 - RNA, 16 nt, Human
aggagcagugcaggca

SEQ ID NO: 2350038 - RNA, 14 nt, Human
aggagcagccacau

SEQ ID NO: 2350039 - RNA, 15 nt, Human
aggagauuuuccuuc

SEQ ID NO: 2350040 - RNA, 18 nt, Human
aggagauuuuccuuccua

SEQ ID NO: 2350041 - RNA, 15 nt, Human
aggagcaaaggcuga

SEQ ID NO: 2350042 - RNA, 16 nt, Human
aggagcaaaggcugag

SEQ ID NO: 2350043 - RNA, 18 nt, Human
aggagaaacagagacagg

SEQ ID NO: 2350044 - RNA, 16 nt, Human
aggagaaacagagaca

SEQ ID NO: 2350045 - RNA, 13 nt, Human
aggagauugagaa

SEQ ID NO: 2350046 - RNA, 14 nt, Human
aggagaaacagaga

SEQ ID NO: 2350047 - RNA, 13 nt, Human
aggagaaacacau

SEQ ID NO: 2350048 - RNA, 14 nt, Human
aggagaaacacauc

SEQ ID NO: 2350049 - RNA, 14 nt, Human
aggagaugggccuu

SEQ ID NO: 2350050 - RNA, 17 nt, Human
aggagauuggaaggaac

SEQ ID NO: 2350051 - RNA, 15 nt, Human
aggagauugagaagg

SEQ ID NO: 2350052 - RNA, 16 nt, Human
aggagauugagaagga

SEQ ID NO: 2350053 - RNA, 17 nt, Human
aggagauugagaaggag

SEQ ID NO: 2350054 - RNA, 19 nt, Human
aggagauugagaaggagag

SEQ ID NO: 2350055 - RNA, 21 nt, Human
aggagauugagaaggagagaa

SEQ ID NO: 2350056 - RNA, 22 nt, Human
aggagauugagaaggagagaaa

SEQ ID NO: 2350057 - RNA, 14 nt, Human
aggagauuuuccuu

SEQ ID NO: 2350058 - RNA, 21 nt, Human
aggacuuuccuaaauguuuaa

SEQ ID NO: 2350059 - RNA, 23 nt, Human
aggacuuuucuuuguggcuuccu

SEQ ID NO: 2350060 - RNA, 12 nt, Human
aggagaaacaca

SEQ ID NO: 2350061 - RNA, 13 nt, Human
aggagaaaaacaa

SEQ ID NO: 2350062 - RNA, 23 nt, Human
aggacuuggucugauuucaggau

SEQ ID NO: 2350063 - RNA, 17 nt, Human
aggacuuucugaagccu

SEQ ID NO: 2350064 - RNA, 11 nt, Human
aggacuuugca

SEQ ID NO: 2350065 - RNA, 11 nt, Human
aggagaaacug

SEQ ID NO: 2350066 - RNA, 19 nt, Human
uggaaaggagaggaaagaa

SEQ ID NO: 2350067 - RNA, 23 nt, Human
uggaaaggagaggaaagaacuca

SEQ ID NO: 2350068 - RNA, 14 nt, Human
uggaaaggagagga

SEQ ID NO: 2350069 - RNA, 15 nt, Human
uggaaaggagaggaa

SEQ ID NO: 2350070 - RNA, 16 nt, Human
uggaaaggagaggaaa

SEQ ID NO: 2350071 - RNA, 17 nt, Human
uggaaaggagaggaaag

SEQ ID NO: 2350072 - RNA, 13 nt, Human
uggaaaggcagcu

SEQ ID NO: 2350073 - RNA, 15 nt, Human
uggaaauauuaagaa

SEQ ID NO: 2350074 - RNA, 18 nt, Human
uggaaauacaguuguugg

SEQ ID NO: 2350075 - RNA, 22 nt, Human
uggaaauacaguuguuggccuc

SEQ ID NO: 2350076 - RNA, 21 nt, Human
uggaaauagaaauuuccagag

SEQ ID NO: 2350077 - RNA, 18 nt, Human
uggaaagccucugcugcc

SEQ ID NO: 2350078 - RNA, 16 nt, Human
uggaaagccucugcug

SEQ ID NO: 2350079 - RNA, 15 nt, Human
uggaaagccucugcu

SEQ ID NO: 2350080 - RNA, 20 nt, Human
uggaaagcuccuagcagaga

SEQ ID NO: 2350081 - RNA, 14 nt, Human
uggaaagccucugc

SEQ ID NO: 2350082 - RNA, 15 nt, Human
ugcuuuucugcccug

SEQ ID NO: 2350083 - RNA, 12 nt, Human
ugcuuuucucca

SEQ ID NO: 2350084 - RNA, 20 nt, Human
ugcuuuucuccaauaucagu

SEQ ID NO: 2350085 - RNA, 23 nt, Human
ugcuuuucuccaauaucagugcu

SEQ ID NO: 2350086 - RNA, 22 nt, Human
ugcuuuuccuuggggcaggcag

SEQ ID NO: 2350087 - RNA, 17 nt, Human
ugcuuugggcugcccug

SEQ ID NO: 2350088 - RNA, 17 nt, Human
ugcuuggguggagaagc

SEQ ID NO: 2350089 - RNA, 18 nt, Human
ugcuuggguggagaagcc

SEQ ID NO: 2350090 - RNA, 15 nt, Human
ugcuuggguggagaa

SEQ ID NO: 2350091 - RNA, 16 nt, Human
ugcuuggguggagaag

SEQ ID NO: 2350092 - RNA, 19 nt, Human
ugcuugggcuucauccucc

SEQ ID NO: 2350093 - RNA, 18 nt, Human
ugcuuugggcugcccugg

SEQ ID NO: 2350094 - RNA, 19 nt, Human
ugcuuugggcugcccuggu

SEQ ID NO: 2350095 - RNA, 20 nt, Human
ugcuuugggcugcccuggug

SEQ ID NO: 2350096 - RNA, 21 nt, Human
ugcuuugggcugcccuggugc

SEQ ID NO: 2350097 - RNA, 19 nt, Human
ugcuuggguggagaagcca

SEQ ID NO: 2350098 - RNA, 19 nt, Human
ugcuuuguaggugucucau

SEQ ID NO: 2350099 - RNA, 13 nt, Human
ugcuuuuaccaug

SEQ ID NO: 2350100 - RNA, 17 nt, Human
ugcuuuuaccaugcccc

SEQ ID NO: 2350101 - RNA, 18 nt, Human
ugcuuuucacugcugcaa

SEQ ID NO: 2350102 - RNA, 22 nt, Human
ugcuuuucacugcugcaaggcc

SEQ ID NO: 2350103 - RNA, 16 nt, Human
ugcuuuucacugcugc

SEQ ID NO: 2350104 - RNA, 17 nt, Human
ugcuuuucacugcugca

SEQ ID NO: 2350105 - RNA, 14 nt, Human
ugcuugccuagggc

SEQ ID NO: 2350106 - RNA, 18 nt, Human
ugcuugcccccaugcugg

SEQ ID NO: 2350107 - RNA, 17 nt, Human
ugcuugccacagagcgg

SEQ ID NO: 2350108 - RNA, 16 nt, Human
aggagcgggaccugug

SEQ ID NO: 2350109 - RNA, 18 nt, Human
aggagcgggaccuguggc

SEQ ID NO: 2350110 - RNA, 14 nt, Human
aggagccugcuggu

SEQ ID NO: 2350111 - RNA, 19 nt, Human
aggagcccugggaggcucu

SEQ ID NO: 2350112 - RNA, 11 nt, Human
aggagccuggc

SEQ ID NO: 2350113 - RNA, 22 nt, Human
aggagccugcuggucacagccu

SEQ ID NO: 2350114 - RNA, 19 nt, Human
ugcuugccugcguuuugga

SEQ ID NO: 2350115 - RNA, 22 nt, Human
ugcuugccuagggccuggucca

SEQ ID NO: 2350116 - RNA, 11 nt, Human
ugcuugccucu

SEQ ID NO: 2350117 - RNA, 19 nt, Human
ugcuugccuagggccuggu

SEQ ID NO: 2350118 - RNA, 21 nt, Human
ugcuuggaggaaggaaaccca

SEQ ID NO: 2350119 - RNA, 15 nt, Human
ugcuugccugauaua

SEQ ID NO: 2350120 - RNA, 15 nt, Human
ugcuugccucucugu

SEQ ID NO: 2350121 - RNA, 19 nt, Human
ugcuuggccuugggcuuca

SEQ ID NO: 2350122 - RNA, 19 nt, Human
ugcuuggcugcuuggccuu

SEQ ID NO: 2350123 - RNA, 15 nt, Human
ugcuugggaaggggc

SEQ ID NO: 2350124 - RNA, 19 nt, Human
ugcuugcugccuucuggau

SEQ ID NO: 2350125 - RNA, 12 nt, Human
ugcuugggcuuc

SEQ ID NO: 2350126 - RNA, 16 nt, Human
ugcuugggcuucaucc

SEQ ID NO: 2350127 - RNA, 20 nt, Human
uggacccagggaugacaugu

SEQ ID NO: 2350128 - RNA, 19 nt, Human
uggaccaggacaggaccag

SEQ ID NO: 2350129 - RNA, 18 nt, Human
uggaccaggacaggacca

SEQ ID NO: 2350130 - RNA, 14 nt, Human
uggaccaggacagg

SEQ ID NO: 2350131 - RNA, 13 nt, Human
uggaccaggacag

SEQ ID NO: 2350132 - RNA, 18 nt, Human
uggaccaguggucucaca

SEQ ID NO: 2350133 - RNA, 13 nt, Human
uggaccagugguc

SEQ ID NO: 2350134 - RNA, 15 nt, Human
uggacacagcucuuc

SEQ ID NO: 2350135 - RNA, 16 nt, Human
uggacacagcucuucu

SEQ ID NO: 2350136 - RNA, 17 nt, Human
uggaauuuauauacaac

SEQ ID NO: 2350137 - RNA, 18 nt, Human
uggacacagcucuucucc

SEQ ID NO: 2350138 - RNA, 19 nt, Human
uggaccuauguccuaagga

SEQ ID NO: 2350139 - RNA, 22 nt, Human
uggaccuaauccaagcaucccu

SEQ ID NO: 2350140 - RNA, 14 nt, Human
uggaccuaauccaa

SEQ ID NO: 2350141 - RNA, 22 nt, Human
uggaccuauguccuaaggacac

SEQ ID NO: 2350142 - RNA, 13 nt, Human
uggacccuuccau

SEQ ID NO: 2350143 - RNA, 17 nt, Human
uggaccuaaauggccuc

SEQ ID NO: 2350144 - RNA, 18 nt, Human
uggaccuaaauggccuca

SEQ ID NO: 2350145 - RNA, 21 nt, Human
uggaccuaaauggccucaugu

SEQ ID NO: 2350146 - RNA, 14 nt, Human
uggacccugaggcc

SEQ ID NO: 2350147 - RNA, 12 nt, Human
uggacccugagg

SEQ ID NO: 2350148 - RNA, 13 nt, Human
uggacccugaggc

SEQ ID NO: 2350149 - RNA, 19 nt, Human
aggcaacugaggcagacag

SEQ ID NO: 2350150 - RNA, 17 nt, Human
aggcaacugaggcagac

SEQ ID NO: 2350151 - RNA, 23 nt, Human
uggaauugauuugcauugaacac

SEQ ID NO: 2350152 - RNA, 18 nt, Human
uggaauuggagcucgugg

SEQ ID NO: 2350153 - RNA, 17 nt, Human
uggaauugggagcuugg

SEQ ID NO: 2350154 - RNA, 22 nt, Human
uggaauuggguggggggcuuca

SEQ ID NO: 2350155 - RNA, 22 nt, Human
uggaauuucucccagucauuua

SEQ ID NO: 2350156 - RNA, 16 nt, Human
aggcaacugaggcaga

SEQ ID NO: 2350157 - RNA, 15 nt, Human
aggcaacugaggcag

SEQ ID NO: 2350158 - RNA, 14 nt, Human
aggcaacugaggca

SEQ ID NO: 2350159 - RNA, 17 nt, Human
aggcaacucaucuuagg

SEQ ID NO: 2350160 - RNA, 16 nt, Human
aggcaacauccaaaau

SEQ ID NO: 2350161 - RNA, 17 nt, Human
aggcaaauguguacaug

SEQ ID NO: 2350162 - RNA, 17 nt, Human
aggcaaaauugcaaauc

SEQ ID NO: 2350163 - RNA, 13 nt, Human
aggcaaaauugca

SEQ ID NO: 2350164 - RNA, 19 nt, Human
aggcaaaauccuugcuuau

SEQ ID NO: 2350165 - RNA, 17 nt, Human
aggcaaaauccuugcuu

SEQ ID NO: 2350166 - RNA, 22 nt, Human
aggaugcccagggccacucugc

SEQ ID NO: 2350167 - RNA, 14 nt, Human
aggaugcccagggc

SEQ ID NO: 2350168 - RNA, 13 nt, Human
aggaugcccaggg

SEQ ID NO: 2350169 - RNA, 19 nt, Human
aggaugcagagucagcaga

SEQ ID NO: 2350170 - RNA, 21 nt, Human
aggaugaggccgcuagaggcc

SEQ ID NO: 2350171 - RNA, 23 nt, Human
aggaugaggccgcuagaggccug

SEQ ID NO: 2350172 - RNA, 19 nt, Human
aggaugcccaaagaugcag

SEQ ID NO: 2350173 - RNA, 20 nt, Human
aggaugaucuaggaagacuu

SEQ ID NO: 2350174 - RNA, 14 nt, Human
aggaugcccaaaga

SEQ ID NO: 2350175 - RNA, 19 nt, Human
aggauuuugauccaagcug

SEQ ID NO: 2350176 - RNA, 17 nt, Human
aggaugccccguccccc

SEQ ID NO: 2350177 - RNA, 16 nt, Human
aggaugcuaacaucua

SEQ ID NO: 2350178 - RNA, 17 nt, Human
aggaugcuaacaucuaa

SEQ ID NO: 2350179 - RNA, 15 nt, Human
aggcaaaaauguaaa

SEQ ID NO: 2350180 - RNA, 16 nt, Human
aggauuuuuuucugag

SEQ ID NO: 2350181 - RNA, 17 nt, Human
aggauuuuuuucugagc

SEQ ID NO: 2350182 - RNA, 20 nt, Human
aggauuuuaugcuuuaaaca

SEQ ID NO: 2350183 - RNA, 15 nt, Human
aggauuuuuaucuuu

SEQ ID NO: 2350184 - RNA, 19 nt, Human
aggaugcuaacaucuaaaa

SEQ ID NO: 2350185 - RNA, 17 nt, Human
aggaugcuaaaccuuag

SEQ ID NO: 2350186 - RNA, 17 nt, Human
aggauuuuaugcuuuaa

SEQ ID NO: 2350187 - RNA, 12 nt, Human
aggauaaaauaa

SEQ ID NO: 2350188 - RNA, 21 nt, Human
aggauacaaaagcaugugaga

SEQ ID NO: 2350189 - RNA, 15 nt, Human
aggauccugagccag

SEQ ID NO: 2350190 - RNA, 16 nt, Human
aggauccugagccaga

SEQ ID NO: 2350191 - RNA, 21 nt, Human
aggagggagcaucagugcccu

SEQ ID NO: 2350192 - RNA, 14 nt, Human
aggagggagaggga

SEQ ID NO: 2350193 - RNA, 15 nt, Human
aggagggagagggag

SEQ ID NO: 2350194 - RNA, 14 nt, Human
aggagggaggggga

SEQ ID NO: 2350195 - RNA, 22 nt, Human
aggaucucuugagccugggagg

SEQ ID NO: 2350196 - RNA, 21 nt, Human
aggaucucuugagccugggag

SEQ ID NO: 2350197 - RNA, 17 nt, Human
aggauccugagccagau

SEQ ID NO: 2350198 - RNA, 18 nt, Human
aggauccugagccagauu

SEQ ID NO: 2350199 - RNA, 23 nt, Human
aggaucuguuuuuaaaaaucaua

SEQ ID NO: 2350200 - RNA, 20 nt, Human
aggaucuguuuuuaaaaauc

SEQ ID NO: 2350201 - RNA, 14 nt, Human
aggaucuggagaac

SEQ ID NO: 2350202 - RNA, 17 nt, Human
aggaucuuuguggccaa

SEQ ID NO: 2350203 - RNA, 16 nt, Human
aggaucuuuguggcca

SEQ ID NO: 2350204 - RNA, 15 nt, Human
aggaucuuuguggcc

SEQ ID NO: 2350205 - RNA, 13 nt, Human
aggaucuuugugg

SEQ ID NO: 2350206 - RNA, 13 nt, Human
aggaugagcugga

SEQ ID NO: 2350207 - RNA, 15 nt, Human
aggaugagcuggaag

SEQ ID NO: 2350208 - RNA, 16 nt, Human
aggaugagcuggaagg

SEQ ID NO: 2350209 - RNA, 20 nt, Human
aggaucuuuguggccaagga

SEQ ID NO: 2350210 - RNA, 18 nt, Human
aggaucuuuguggccaag

SEQ ID NO: 2350211 - RNA, 20 nt, Human
aggaugagcucuacccaggg

SEQ ID NO: 2350212 - RNA, 16 nt, Human
aggaugaucuaggaag

SEQ ID NO: 2350213 - RNA, 17 nt, Human
aggaugaucuaggaaga

SEQ ID NO: 2350214 - RNA, 20 nt, Human
uggaaauuaagaagaaacua

SEQ ID NO: 2350215 - RNA, 18 nt, Human
uggaaauuaagaagaaac

SEQ ID NO: 2350216 - RNA, 23 nt, Human
uggaaaugggcagagcagagacc

SEQ ID NO: 2350217 - RNA, 23 nt, Human
uggaaauauucaugcuucuuccu

SEQ ID NO: 2350218 - RNA, 22 nt, Human
uggaaauaucaguuacucagcc

SEQ ID NO: 2350219 - RNA, 20 nt, Human
uggaaauauuaagaaagacu

SEQ ID NO: 2350220 - RNA, 22 nt, Human
aggagcugccuuggcucagaca

SEQ ID NO: 2350221 - RNA, 21 nt, Human
aggagcugccuuggcucagac

SEQ ID NO: 2350222 - RNA, 23 nt, Human
aggagcugccuuggcucagacau

SEQ ID NO: 2350223 - RNA, 11 nt, Human
aggagcugcua

SEQ ID NO: 2350224 - RNA, 19 nt, Human
aggagcugccuuggcucag

SEQ ID NO: 2350225 - RNA, 18 nt, Human
aggagcugccuuggcuca

SEQ ID NO: 2350226 - RNA, 18 nt, Human
uggaaauucccuucaucu

SEQ ID NO: 2350227 - RNA, 16 nt, Human
uggaaauugacgaggg

SEQ ID NO: 2350228 - RNA, 14 nt, Human
aggagcugcccaga

SEQ ID NO: 2350229 - RNA, 21 nt, Human
aggagcugcccagaguugcug

SEQ ID NO: 2350230 - RNA, 22 nt, Human
uggaaauucccuucaucuggaa

SEQ ID NO: 2350231 - RNA, 17 nt, Human
uggaaauucccuucauc

SEQ ID NO: 2350232 - RNA, 23 nt, Human
aggaggauugcuugagcccagga

SEQ ID NO: 2350233 - RNA, 21 nt, Human
aggaggauugcuugagcccag

SEQ ID NO: 2350234 - RNA, 20 nt, Human
aggaggauugcuugagccca

SEQ ID NO: 2350235 - RNA, 21 nt, Human
aggaggagguuuaggucaaga

SEQ ID NO: 2350236 - RNA, 23 nt, Human
aggaggaggcaauugggauggcg

SEQ ID NO: 2350237 - RNA, 18 nt, Human
aggaggaggugccaacag

SEQ ID NO: 2350238 - RNA, 14 nt, Human
aggaggaugggcuc

SEQ ID NO: 2350239 - RNA, 15 nt, Human
aggaggaugggcucg

SEQ ID NO: 2350240 - RNA, 22 nt, Human
aggaggaugggcucgcccacca

SEQ ID NO: 2350241 - RNA, 16 nt, Human
aggagcugcuggcuug

SEQ ID NO: 2350242 - RNA, 14 nt, Human
aggagcugcuggcu

SEQ ID NO: 2350243 - RNA, 12 nt, Human
aggaggaggagg

SEQ ID NO: 2350244 - RNA, 17 nt, Human
aggagcugcuggcuugc

SEQ ID NO: 2350245 - RNA, 13 nt, Human
aggagcugcuggc

SEQ ID NO: 2350246 - RNA, 12 nt, Human
aggagcugcugg

SEQ ID NO: 2350247 - RNA, 21 nt, Human
aggagcugcuauagccugggg

SEQ ID NO: 2350248 - RNA, 20 nt, Human
aggagcugcuauagccuggg

SEQ ID NO: 2350249 - RNA, 19 nt, Human
aggagcugcuauagccugg

SEQ ID NO: 2350250 - RNA, 13 nt, Human
aggagcugcuaua

SEQ ID NO: 2350251 - RNA, 20 nt, Human
aggaggcagcuguugcagug

SEQ ID NO: 2350252 - RNA, 14 nt, Human
aggaggcaggaccu

SEQ ID NO: 2350253 - RNA, 20 nt, Human
aggaggcuuggaaagcauca

SEQ ID NO: 2350254 - RNA, 12 nt, Human
aggaggccaccu

SEQ ID NO: 2350255 - RNA, 13 nt, Human
aggaggccaccuc

SEQ ID NO: 2350256 - RNA, 16 nt, Human
aggagggagacacugg

SEQ ID NO: 2350257 - RNA, 23 nt, Human
aggagggagacacuggccccuca

SEQ ID NO: 2350258 - RNA, 12 nt, Human
aggagggagagg

SEQ ID NO: 2350259 - RNA, 13 nt, Human
aggagggagaggg

SEQ ID NO: 2350260 - RNA, 21 nt, Human
ugcucugcuugacaacaucug

SEQ ID NO: 2350261 - RNA, 16 nt, Human
ugcucugcuugacaac

SEQ ID NO: 2350262 - RNA, 18 nt, Human
ugcugacauucaccugcc

SEQ ID NO: 2350263 - RNA, 13 nt, Human
ugcuccgugccuc

SEQ ID NO: 2350264 - RNA, 14 nt, Human
ugcuccgugccucc

SEQ ID NO: 2350265 - RNA, 16 nt, Human
ugcucugcugacagac

SEQ ID NO: 2350266 - RNA, 16 nt, Human
ugcugaccuccacagc

SEQ ID NO: 2350267 - RNA, 15 nt, Human
ugcugaccuccacag

SEQ ID NO: 2350268 - RNA, 15 nt, Human
ugcugacccuccugu

SEQ ID NO: 2350269 - RNA, 19 nt, Human
ugcucuggaaaaugugacc

SEQ ID NO: 2350270 - RNA, 23 nt, Human
ugcucuggaaaaugugacccaga

SEQ ID NO: 2350271 - RNA, 15 nt, Human
ugcugagucugaagg

SEQ ID NO: 2350272 - RNA, 14 nt, Human
ugcugagucugaag

SEQ ID NO: 2350273 - RNA, 20 nt, Human
ugcugacggccagggagaag

SEQ ID NO: 2350274 - RNA, 17 nt, Human
ugcugacggccagggag

SEQ ID NO: 2350275 - RNA, 15 nt, Human
ugcugacggccaggg

SEQ ID NO: 2350276 - RNA, 14 nt, Human
ugcugacggccagg

SEQ ID NO: 2350277 - RNA, 22 nt, Human
ugcugacggccagggagaagcu

SEQ ID NO: 2350278 - RNA, 21 nt, Human
ugcucugcugacagacacagg

SEQ ID NO: 2350279 - RNA, 22 nt, Human
ugcucugcugacagacacaggc

SEQ ID NO: 2350280 - RNA, 18 nt, Human
ugcuccgccucugcuggc

SEQ ID NO: 2350281 - RNA, 18 nt, Human
ugcucccugguucugaug

SEQ ID NO: 2350282 - RNA, 22 nt, Human
ugcucccugaagccagccuucu

SEQ ID NO: 2350283 - RNA, 18 nt, Human
ugcucccugaagccagcc

SEQ ID NO: 2350284 - RNA, 19 nt, Human
ugcucccugaagccagccu

SEQ ID NO: 2350285 - RNA, 20 nt, Human
ugcucccugaagccagccuu

SEQ ID NO: 2350286 - RNA, 21 nt, Human
ugcucccugaagccagccuuc

SEQ ID NO: 2350287 - RNA, 19 nt, Human
ugcucccuccccugcccug

SEQ ID NO: 2350288 - RNA, 15 nt, Human
ugcucccccauccuc

SEQ ID NO: 2350289 - RNA, 23 nt, Human
ugcucccccacccccuccccagg

SEQ ID NO: 2350290 - RNA, 21 nt, Human
ugcucccccacccccucccca

SEQ ID NO: 2350291 - RNA, 16 nt, Human
ugcucccccacccccu

SEQ ID NO: 2350292 - RNA, 14 nt, Human
ugcucccccacccc

SEQ ID NO: 2350293 - RNA, 20 nt, Human
ugcucccuccccugcccugg

SEQ ID NO: 2350294 - RNA, 13 nt, Human
ugcucccccaucc

SEQ ID NO: 2350295 - RNA, 13 nt, Human
ugcucccugaagc

SEQ ID NO: 2350296 - RNA, 14 nt, Human
ugcucccugaagcc

SEQ ID NO: 2350297 - RNA, 15 nt, Human
ugcucccugaagcca

SEQ ID NO: 2350298 - RNA, 17 nt, Human
ugcucccugaagccagc

SEQ ID NO: 2350299 - RNA, 17 nt, Human
ugcucccagcagcccua

SEQ ID NO: 2350300 - RNA, 20 nt, Human
ugcucccagcagcccuaagg

SEQ ID NO: 2350301 - RNA, 21 nt, Human
ugcucccagcagcccuaagga

SEQ ID NO: 2350302 - RNA, 16 nt, Human
ugcuccccagcccugg

SEQ ID NO: 2350303 - RNA, 17 nt, Human
ugcuccccagcccuggc

SEQ ID NO: 2350304 - RNA, 18 nt, Human
ugcuccccagcccuggcu

SEQ ID NO: 2350305 - RNA, 22 nt, Human
ugcuccccagcccuggcucugc

SEQ ID NO: 2350306 - RNA, 23 nt, Human
ugcuccccagcccuggcucugca

SEQ ID NO: 2350307 - RNA, 19 nt, Human
ugcuccacccuuggccugu

SEQ ID NO: 2350308 - RNA, 18 nt, Human
ugcuccacccuuggccug

SEQ ID NO: 2350309 - RNA, 17 nt, Human
ugcuccacccuuggccu

SEQ ID NO: 2350310 - RNA, 16 nt, Human
ugcuccacccuuggcc

SEQ ID NO: 2350311 - RNA, 23 nt, Human
ugcuccacccuuggccugucuca

SEQ ID NO: 2350312 - RNA, 22 nt, Human
ugcuccacccuuggccugucuc

SEQ ID NO: 2350313 - RNA, 22 nt, Human
ugcuccagccaaccccugugga

SEQ ID NO: 2350314 - RNA, 14 nt, Human
ugcuccagccuggc

SEQ ID NO: 2350315 - RNA, 23 nt, Human
ugcuccagccaaccccuguggag

SEQ ID NO: 2350316 - RNA, 20 nt, Human
ugcuccagccaaccccugug

SEQ ID NO: 2350317 - RNA, 18 nt, Human
ugcuccagccaaccccug

SEQ ID NO: 2350318 - RNA, 17 nt, Human
ugcuccagccaaccccu

SEQ ID NO: 2350319 - RNA, 15 nt, Human
ugcuccagccaaccc

SEQ ID NO: 2350320 - RNA, 21 nt, Human
ugcuccagaccugauccugga

SEQ ID NO: 2350321 - RNA, 14 nt, Human
ugcuccagaccuga

SEQ ID NO: 2350322 - RNA, 12 nt, Human
ugcuccagaccu

SEQ ID NO: 2350323 - RNA, 19 nt, Human
ugcuccagcuguucagcug

SEQ ID NO: 2350324 - RNA, 16 nt, Human
ugcuccagcuguucag

SEQ ID NO: 2350325 - RNA, 13 nt, Human
ugcucccagcagc

SEQ ID NO: 2350326 - RNA, 14 nt, Human
ugcucccagcagcc

SEQ ID NO: 2350327 - RNA, 15 nt, Human
ugcucccagcagccc

SEQ ID NO: 2350328 - RNA, 17 nt, Human
ugcuccagccuggcucc

SEQ ID NO: 2350329 - RNA, 15 nt, Human
ugcuccagccuggcu

SEQ ID NO: 2350330 - RNA, 16 nt, Human
ugcuccagccuggcuc

SEQ ID NO: 2350331 - RNA, 15 nt, Human
ugcuccaccacaucc

SEQ ID NO: 2350332 - RNA, 22 nt, Human
ugcuauuguagagccagagguc

SEQ ID NO: 2350333 - RNA, 19 nt, Human
agcugggacuacaggcacc

SEQ ID NO: 2350334 - RNA, 16 nt, Human
agcugggacuacaggc

SEQ ID NO: 2350335 - RNA, 18 nt, Human
agcugggacuacaggcac

SEQ ID NO: 2350336 - RNA, 18 nt, Human
aggaagcaccccaugcca

SEQ ID NO: 2350337 - RNA, 11 nt, Human
aggaagcagaa

SEQ ID NO: 2350338 - RNA, 12 nt, Human
aggaagcagaau

SEQ ID NO: 2350339 - RNA, 13 nt, Human
aggaagcagaaua

SEQ ID NO: 2350340 - RNA, 14 nt, Human
aggaagcagaauaa

SEQ ID NO: 2350341 - RNA, 15 nt, Human
aggaagcagaauaaa

SEQ ID NO: 2350342 - RNA, 16 nt, Human
aggaagcagaauaaag

SEQ ID NO: 2350343 - RNA, 17 nt, Human
aggaagcagaauaaagc

SEQ ID NO: 2350344 - RNA, 18 nt, Human
aggaagcagaauaaagca

SEQ ID NO: 2350345 - RNA, 19 nt, Human
aggaagcagaauaaagcaa

SEQ ID NO: 2350346 - RNA, 14 nt, Human
aggaagccagcagg

SEQ ID NO: 2350347 - RNA, 15 nt, Human
aggaagccagcaggc

SEQ ID NO: 2350348 - RNA, 13 nt, Human
aggaagacuuugg

SEQ ID NO: 2350349 - RNA, 14 nt, Human
aggaagacuuugga

SEQ ID NO: 2350350 - RNA, 23 nt, Human
aggaagcacaugccucucucagg

SEQ ID NO: 2350351 - RNA, 24 nt, Human
aggaagcacaugccucucucaggc

SEQ ID NO: 2350352 - RNA, 16 nt, Human
ugcugagucugaaggc

SEQ ID NO: 2350353 - RNA, 17 nt, Human
ugcugagucugaaggcu

SEQ ID NO: 2350354 - RNA, 18 nt, Human
ugcugagucugaaggcug

SEQ ID NO: 2350355 - RNA, 21 nt, Human
ugcugagucugaaggcugggu

SEQ ID NO: 2350356 - RNA, 22 nt, Human
ugcugagucugaaggcuggguu

SEQ ID NO: 2350357 - RNA, 23 nt, Human
ugcugagucugaaggcuggguuc

SEQ ID NO: 2350358 - RNA, 13 nt, Human
aggaagacuucau

SEQ ID NO: 2350359 - RNA, 19 nt, Human
aggaagacuucaucccucu

SEQ ID NO: 2350360 - RNA, 18 nt, Human
aggaaggaaacccagcuc

SEQ ID NO: 2350361 - RNA, 17 nt, Human
aggaagccagcaggcuc

SEQ ID NO: 2350362 - RNA, 17 nt, Human
aggaagcugcuccgugc

SEQ ID NO: 2350363 - RNA, 20 nt, Human
aggaagcagaauaaagcaau

SEQ ID NO: 2350364 - RNA, 18 nt, Human
aggaaggagagccugcug

SEQ ID NO: 2350365 - RNA, 21 nt, Human
aggaaggagagaaggggagga

SEQ ID NO: 2350366 - RNA, 15 nt, Human
aggaaggagaggaga

SEQ ID NO: 2350367 - RNA, 17 nt, Human
aggaaggagagccugcu

SEQ ID NO: 2350368 - RNA, 15 nt, Human
aggaaggagagccug

SEQ ID NO: 2350369 - RNA, 23 nt, Human
aggaaggagacucaccucugccu

SEQ ID NO: 2350370 - RNA, 19 nt, Human
aggaaggaaacccagcucu

SEQ ID NO: 2350371 - RNA, 12 nt, Human
aggaauugacuu

SEQ ID NO: 2350372 - RNA, 18 nt, Human
aggaauuucaccuguaaa

SEQ ID NO: 2350373 - RNA, 23 nt, Human
aggaauuguguuuauaauuuuaa

SEQ ID NO: 2350374 - RNA, 21 nt, Human
aggaauuucccaggacccuga

SEQ ID NO: 2350375 - RNA, 20 nt, Human
aggaauuucccaggacccug

SEQ ID NO: 2350376 - RNA, 19 nt, Human
aggaauuucccaggacccu

SEQ ID NO: 2350377 - RNA, 18 nt, Human
aggaauuucccaggaccc

SEQ ID NO: 2350378 - RNA, 17 nt, Human
aggaauuucccaggacc

SEQ ID NO: 2350379 - RNA, 15 nt, Human
aggaauuucccagga

SEQ ID NO: 2350380 - RNA, 22 nt, Human
aggaauuucaccuguaaaccug

SEQ ID NO: 2350381 - RNA, 11 nt, Human
aggaauuuaaa

SEQ ID NO: 2350382 - RNA, 23 nt, Human
aggaauugacccacaagaaauga

SEQ ID NO: 2350383 - RNA, 22 nt, Human
ugcugugaaaaaaaaaaugcug

SEQ ID NO: 2350384 - RNA, 14 nt, Human
ugcugugaaaaaaa

SEQ ID NO: 2350385 - RNA, 18 nt, Human
ugcugugaauuagcucac

SEQ ID NO: 2350386 - RNA, 19 nt, Human
ugcugugaauuagcucacu

SEQ ID NO: 2350387 - RNA, 21 nt, Human
ugcugugaauuuguguaagga

SEQ ID NO: 2350388 - RNA, 13 nt, Human
ugcugugaggcug

SEQ ID NO: 2350389 - RNA, 14 nt, Human
ugcugugaggcugu

SEQ ID NO: 2350390 - RNA, 13 nt, Human
ugcugugaaaaaa

SEQ ID NO: 2350391 - RNA, 12 nt, Human
ugcugugaaaaa

SEQ ID NO: 2350392 - RNA, 19 nt, Human
ugcuuagucacugccugca

SEQ ID NO: 2350393 - RNA, 20 nt, Human
ugcuuaguguacuuggagua

SEQ ID NO: 2350394 - RNA, 21 nt, Human
ugcuuagucacuuauuucaua

SEQ ID NO: 2350395 - RNA, 23 nt, Human
ugcuuagucacuuauuucauaaa

SEQ ID NO: 2350396 - RNA, 16 nt, Human
ugcugugaggcugucc

SEQ ID NO: 2350397 - RNA, 17 nt, Human
ugcugugaggcuguccu

SEQ ID NO: 2350398 - RNA, 18 nt, Human
ugcugugaggcuguccug

SEQ ID NO: 2350399 - RNA, 19 nt, Human
ugcugugaggcuguccugu

SEQ ID NO: 2350400 - RNA, 13 nt, Human
ugcuuauacacuu

SEQ ID NO: 2350401 - RNA, 18 nt, Human
ugcuuauagguggccucu

SEQ ID NO: 2350402 - RNA, 21 nt, Human
ugcuuaugacaucacuuguac

SEQ ID NO: 2350403 - RNA, 20 nt, Human
ugcuuaguccaauuccuugc

SEQ ID NO: 2350404 - RNA, 17 nt, Human
ugcuuauagguggccuc

SEQ ID NO: 2350405 - RNA, 13 nt, Human
ugcuucagccucc

SEQ ID NO: 2350406 - RNA, 14 nt, Human
ugcuucagccuccc

SEQ ID NO: 2350407 - RNA, 16 nt, Human
ugcuucacuucuccca

SEQ ID NO: 2350408 - RNA, 12 nt, Human
ugcuucaaggau

SEQ ID NO: 2350409 - RNA, 22 nt, Human
ugcuuaugcaguuuuucagagu

SEQ ID NO: 2350410 - RNA, 16 nt, Human
ugcuucaaggauccug

SEQ ID NO: 2350411 - RNA, 18 nt, Human
ugcuucaaggauccugag

SEQ ID NO: 2350412 - RNA, 19 nt, Human
ugcuucaaggauccugagc

SEQ ID NO: 2350413 - RNA, 20 nt, Human
aggacauccccccgccaaaa

SEQ ID NO: 2350414 - RNA, 24 nt, Human
aggacauaaugggguccuggccau

SEQ ID NO: 2350415 - RNA, 21 nt, Human
aggacaugauggagcgcaccu

SEQ ID NO: 2350416 - RNA, 20 nt, Human
aggacauaaugggguccugg

SEQ ID NO: 2350417 - RNA, 13 nt, Human
aggacaugaaacu

SEQ ID NO: 2350418 - RNA, 18 nt, Human
aggacaugaaacuccacc

SEQ ID NO: 2350419 - RNA, 17 nt, Human
aggacaugcugaagcca

SEQ ID NO: 2350420 - RNA, 22 nt, Human
aggacaugcgguagccagcaca

SEQ ID NO: 2350421 - RNA, 20 nt, Human
aggacaugcgguagccagca

SEQ ID NO: 2350422 - RNA, 22 nt, Human
aggacagggaggugaccccagg

SEQ ID NO: 2350423 - RNA, 12 nt, Human
aggacaggcccg

SEQ ID NO: 2350424 - RNA, 18 nt, Human
aggacaggaccagauuuu

SEQ ID NO: 2350425 - RNA, 23 nt, Human
aggacagccuguggcggugccug

SEQ ID NO: 2350426 - RNA, 12 nt, Human
aggacagcuguc

SEQ ID NO: 2350427 - RNA, 22 nt, Human
aggacagccuguggcggugccu

SEQ ID NO: 2350428 - RNA, 13 nt, Human
aggacagcugucc

SEQ ID NO: 2350429 - RNA, 15 nt, Human
aggacagcuguccuc

SEQ ID NO: 2350430 - RNA, 16 nt, Human
ugcuucaguggagaau

SEQ ID NO: 2350431 - RNA, 18 nt, Human
ugcuucaguggagaauua

SEQ ID NO: 2350432 - RNA, 23 nt, Human
ugcuucagccugaggcugagacu

SEQ ID NO: 2350433 - RNA, 22 nt, Human
ugcuucagccugaggcugagac

SEQ ID NO: 2350434 - RNA, 17 nt, Human
ugcuucagccugaggcu

SEQ ID NO: 2350435 - RNA, 15 nt, Human
ugcuucagccugagg

SEQ ID NO: 2350436 - RNA, 14 nt, Human
ugcuucagccugag

SEQ ID NO: 2350437 - RNA, 12 nt, Human
ugcuucagccug

SEQ ID NO: 2350438 - RNA, 16 nt, Human
ugcuucauacagggau

SEQ ID NO: 2350439 - RNA, 15 nt, Human
ugcuucauacaggga

SEQ ID NO: 2350440 - RNA, 14 nt, Human
ugcuucauacaggg

SEQ ID NO: 2350441 - RNA, 11 nt, Human
ugcuucauaca

SEQ ID NO: 2350442 - RNA, 18 nt, Human
ugcuucauaaaugaagca

SEQ ID NO: 2350443 - RNA, 20 nt, Human
ugcuucauaaaugaagcagc

SEQ ID NO: 2350444 - RNA, 14 nt, Human
ugcuucaucccuuu

SEQ ID NO: 2350445 - RNA, 14 nt, Human
aggacacugauaug

SEQ ID NO: 2350446 - RNA, 23 nt, Human
aggacacuaaccacgcuggaccu

SEQ ID NO: 2350447 - RNA, 19 nt, Human
aggacacuaaccacgcugg

SEQ ID NO: 2350448 - RNA, 21 nt, Human
ugcuguccucagguggccaug

SEQ ID NO: 2350449 - RNA, 19 nt, Human
ugcuguccucagguggcca

SEQ ID NO: 2350450 - RNA, 17 nt, Human
ugcugucuaaccuguga

SEQ ID NO: 2350451 - RNA, 18 nt, Human
ugcugucuaaccugugac

SEQ ID NO: 2350452 - RNA, 14 nt, Human
ugcugucuaugugg

SEQ ID NO: 2350453 - RNA, 19 nt, Human
ugcugucugaucugugcuu

SEQ ID NO: 2350454 - RNA, 14 nt, Human
ugcuguccucaggu

SEQ ID NO: 2350455 - RNA, 18 nt, Human
ugcuguccucagguggcc

SEQ ID NO: 2350456 - RNA, 12 nt, Human
ugcuguccucag

SEQ ID NO: 2350457 - RNA, 23 nt, Human
ugcuguccuaggccacaccaucu

SEQ ID NO: 2350458 - RNA, 16 nt, Human
ugcuguccuaggccac

SEQ ID NO: 2350459 - RNA, 21 nt, Human
ugcuguccccucuugccccaa

SEQ ID NO: 2350460 - RNA, 14 nt, Human
ugcuguccuaggcc

SEQ ID NO: 2350461 - RNA, 20 nt, Human
ugcugucaaguuccuuuggg

SEQ ID NO: 2350462 - RNA, 14 nt, Human
ugcuguacuagaga

SEQ ID NO: 2350463 - RNA, 19 nt, Human
ugcuguacuagagaucugg

SEQ ID NO: 2350464 - RNA, 21 nt, Human
ugcuguacuagagaucugguu

SEQ ID NO: 2350465 - RNA, 15 nt, Human
ugcuguccagacagc

SEQ ID NO: 2350466 - RNA, 10 nt, Human
ugcugucccc

SEQ ID NO: 2350467 - RNA, 19 nt, Human
ugcuguccagacagccugu

SEQ ID NO: 2350468 - RNA, 21 nt, Human
ugcuguccagacagccuguau

SEQ ID NO: 2350469 - RNA, 13 nt, Human
ugcuguccccucu

SEQ ID NO: 2350470 - RNA, 15 nt, Human
ugcuguccccucuug

SEQ ID NO: 2350471 - RNA, 17 nt, Human
ugcuguccccucuugcc

SEQ ID NO: 2350472 - RNA, 20 nt, Human
ugcuguccccucuugcccca

SEQ ID NO: 2350473 - RNA, 12 nt, Human
ugcugucccucc

SEQ ID NO: 2350474 - RNA, 13 nt, Human
ugcugucccuccc

SEQ ID NO: 2350475 - RNA, 16 nt, Human
ugcugucccucccccu

SEQ ID NO: 2350476 - RNA, 17 nt, Human
ugcugucccucccccuu

SEQ ID NO: 2350477 - RNA, 17 nt, Human
ugcugggacuggccagg

SEQ ID NO: 2350478 - RNA, 15 nt, Human
ugcugggacuggcca

SEQ ID NO: 2350479 - RNA, 21 nt, Human
ugcuggcuggaagggaggagc

SEQ ID NO: 2350480 - RNA, 16 nt, Human
ugcugggacugagcca

SEQ ID NO: 2350481 - RNA, 17 nt, Human
ugcugggacugagccag

SEQ ID NO: 2350482 - RNA, 20 nt, Human
ugcugggacugagccagucc

SEQ ID NO: 2350483 - RNA, 15 nt, Human
ugcugggagcuccac

SEQ ID NO: 2350484 - RNA, 16 nt, Human
ugcugggagcuccacu

SEQ ID NO: 2350485 - RNA, 17 nt, Human
ugcugggagcuccacuc

SEQ ID NO: 2350486 - RNA, 18 nt, Human
ugcugggagcuccacucu

SEQ ID NO: 2350487 - RNA, 20 nt, Human
ugcugggagcuccacucugc

SEQ ID NO: 2350488 - RNA, 21 nt, Human
ugcugggagcuccacucugcu

SEQ ID NO: 2350489 - RNA, 22 nt, Human
ugcugggagcuccacucugcuu

SEQ ID NO: 2350490 - RNA, 23 nt, Human
ugcugggagcuccacucugcuuc

SEQ ID NO: 2350491 - RNA, 14 nt, Human
ugcugggagcugaa

SEQ ID NO: 2350492 - RNA, 18 nt, Human
ugcugggagcugaaaaau

SEQ ID NO: 2350493 - RNA, 21 nt, Human
ugcugggagcugaaaaaucac

SEQ ID NO: 2350494 - RNA, 17 nt, Human
ugcugggaggagggaga

SEQ ID NO: 2350495 - RNA, 18 nt, Human
ugcugggaggagggagag

SEQ ID NO: 2350496 - RNA, 21 nt, Human
ugcuguacaucuauuuuggau

SEQ ID NO: 2350497 - RNA, 17 nt, Human
ugcuguacaucuauuuu

SEQ ID NO: 2350498 - RNA, 16 nt, Human
ugcuguacaucuauuu

SEQ ID NO: 2350499 - RNA, 15 nt, Human
ugcuguacaucuauu

SEQ ID NO: 2350500 - RNA, 18 nt, Human
ugcuguaacuuucugaaa

SEQ ID NO: 2350501 - RNA, 20 nt, Human
ugcugggaggagggagaggg

SEQ ID NO: 2350502 - RNA, 19 nt, Human
ugcugccgccccacccaga

SEQ ID NO: 2350503 - RNA, 21 nt, Human
ugcugccgccccacccagaug

SEQ ID NO: 2350504 - RNA, 21 nt, Human
ugcuggagccuguguaacagc

SEQ ID NO: 2350505 - RNA, 22 nt, Human
ugcuggagccuguguaacagcu

SEQ ID NO: 2350506 - RNA, 20 nt, Human
aggaauuuuauuuuuuucug

SEQ ID NO: 2350507 - RNA, 15 nt, Human
ugcugcccugugagu

SEQ ID NO: 2350508 - RNA, 14 nt, Human
ugcuggagcucugc

SEQ ID NO: 2350509 - RNA, 13 nt, Human
ugcuggagcucug

SEQ ID NO: 2350510 - RNA, 12 nt, Human
ugcugcccugug

SEQ ID NO: 2350511 - RNA, 13 nt, Human
ugcugcccuguga

SEQ ID NO: 2350512 - RNA, 14 nt, Human
ugcugcccugugag

SEQ ID NO: 2350513 - RNA, 18 nt, Human
ugcuggcuguuggcuggg

SEQ ID NO: 2350514 - RNA, 16 nt, Human
ugcuggcugguuagag

SEQ ID NO: 2350515 - RNA, 15 nt, Human
ugcuggcugccuuag

SEQ ID NO: 2350516 - RNA, 14 nt, Human
ugcuggcugccuua

SEQ ID NO: 2350517 - RNA, 15 nt, Human
ugcuggccccucacc

SEQ ID NO: 2350518 - RNA, 16 nt, Human
ugcuggcuggaaggga

SEQ ID NO: 2350519 - RNA, 13 nt, Human
ugcuggccccuca

SEQ ID NO: 2350520 - RNA, 12 nt, Human
ugcuggccccuc

SEQ ID NO: 2350521 - RNA, 21 nt, Human
ugcuggcugccuuagaaccuu

SEQ ID NO: 2350522 - RNA, 23 nt, Human
ugcuggcccagggcccagagccc

SEQ ID NO: 2350523 - RNA, 22 nt, Human
ugcuggcccagggcccagagcc

SEQ ID NO: 2350524 - RNA, 21 nt, Human
ugcuggcccagggcccagagc

SEQ ID NO: 2350525 - RNA, 20 nt, Human
ugcuggcccagggcccagag

SEQ ID NO: 2350526 - RNA, 19 nt, Human
ugcuggcccagggcccaga

SEQ ID NO: 2350527 - RNA, 18 nt, Human
ugcuggcccagggcccag

SEQ ID NO: 2350528 - RNA, 17 nt, Human
ugcuggcccagggccca

SEQ ID NO: 2350529 - RNA, 16 nt, Human
ugcuggcccagggccc

SEQ ID NO: 2350530 - RNA, 14 nt, Human
ugcuggcccagggc

SEQ ID NO: 2350531 - RNA, 13 nt, Human
ugcuggcccaggg

SEQ ID NO: 2350532 - RNA, 12 nt, Human
ugcuggcccagg

SEQ ID NO: 2350533 - RNA, 21 nt, Human
ugcuggaggugacaucucuua

SEQ ID NO: 2350534 - RNA, 23 nt, Human
ugcuggagccuguguaacagcuc

SEQ ID NO: 2350535 - RNA, 13 nt, Human
ugcuggaggacug

SEQ ID NO: 2350536 - RNA, 14 nt, Human
ugcuggagguggga

SEQ ID NO: 2350537 - RNA, 15 nt, Human
ugcuggaggugggag

SEQ ID NO: 2350538 - RNA, 16 nt, Human
ugcuggaggugggagc

SEQ ID NO: 2350539 - RNA, 21 nt, Human
aggcuggcagcucuccaguca

SEQ ID NO: 2350540 - RNA, 13 nt, Human
aggcuggccagcc

SEQ ID NO: 2350541 - RNA, 14 nt, Human
aggcuggccagccc

SEQ ID NO: 2350542 - RNA, 15 nt, Human
aggcuggccagcccc

SEQ ID NO: 2350543 - RNA, 16 nt, Human
aggcuggccagcccca

SEQ ID NO: 2350544 - RNA, 17 nt, Human
aggcuggccagccccac

SEQ ID NO: 2350545 - RNA, 15 nt, Human
aggcuggccagucca

SEQ ID NO: 2350546 - RNA, 22 nt, Human
aggcuggccagccccacagccc

SEQ ID NO: 2350547 - RNA, 18 nt, Human
aggcuggccagccccaca

SEQ ID NO: 2350548 - RNA, 19 nt, Human
aggcuggccagccccacag

SEQ ID NO: 2350549 - RNA, 20 nt, Human
aggcuggccagccccacagc

SEQ ID NO: 2350550 - RNA, 21 nt, Human
aggcuggccagccccacagcc

SEQ ID NO: 2350551 - RNA, 15 nt, Human
aggcuggcagguaug

SEQ ID NO: 2350552 - RNA, 19 nt, Human
aggcuggcagcucuccagu

SEQ ID NO: 2350553 - RNA, 20 nt, Human
aggcuggcagcucuccaguc

SEQ ID NO: 2350554 - RNA, 15 nt, Human
aggcuggcagcucuc

SEQ ID NO: 2350555 - RNA, 16 nt, Human
aggcuggcagcucucc

SEQ ID NO: 2350556 - RNA, 17 nt, Human
aggcuggcagcucucca

SEQ ID NO: 2350557 - RNA, 18 nt, Human
aggcuggcagcucuccag

SEQ ID NO: 2350558 - RNA, 20 nt, Human
aggcuggcaccgccuucucu

SEQ ID NO: 2350559 - RNA, 19 nt, Human
aggcuggcaccgccuucuc

SEQ ID NO: 2350560 - RNA, 18 nt, Human
aggcuggcacaggacaug

SEQ ID NO: 2350561 - RNA, 17 nt, Human
aggcuggcacaggacau

SEQ ID NO: 2350562 - RNA, 16 nt, Human
aggcuggcacaggaca

SEQ ID NO: 2350563 - RNA, 15 nt, Human
aggcuggaggcaggg

SEQ ID NO: 2350564 - RNA, 14 nt, Human
aggcuggaggcagg

SEQ ID NO: 2350565 - RNA, 13 nt, Human
aggcuggaggcag

SEQ ID NO: 2350566 - RNA, 18 nt, Human
aggcuggagcuggcgucu

SEQ ID NO: 2350567 - RNA, 17 nt, Human
aggcuggagcuggcguc

SEQ ID NO: 2350568 - RNA, 14 nt, Human
aggcuggagcuggc

SEQ ID NO: 2350569 - RNA, 12 nt, Human
aggcuggagcug

SEQ ID NO: 2350570 - RNA, 18 nt, Human
aggcuggagcccagggag

SEQ ID NO: 2350571 - RNA, 15 nt, Human
aggcuggagcccagg

SEQ ID NO: 2350572 - RNA, 13 nt, Human
aggcuggagccca

SEQ ID NO: 2350573 - RNA, 20 nt, Human
aggcuggagaagcucaccca

SEQ ID NO: 2350574 - RNA, 13 nt, Human
aggcuggagaagc

SEQ ID NO: 2350575 - RNA, 14 nt, Human
aggcuggagaagcu

SEQ ID NO: 2350576 - RNA, 23 nt, Human
aggcuggaggcagggccuugccc

SEQ ID NO: 2350577 - RNA, 20 nt, Human
aggcuggagugcaguggcau

SEQ ID NO: 2350578 - RNA, 20 nt, Human
aggcuggagugcaguggcgu

SEQ ID NO: 2350579 - RNA, 19 nt, Human
aggcuggaggcagggccuu

SEQ ID NO: 2350580 - RNA, 18 nt, Human
aggcuggaggcagggccu

SEQ ID NO: 2350581 - RNA, 17 nt, Human
aggcuggaggcagggcc

SEQ ID NO: 2350582 - RNA, 16 nt, Human
aggcuggaggcagggc

SEQ ID NO: 2350583 - RNA, 22 nt, Human
aggcuggauuuugaauuuucuu

SEQ ID NO: 2350584 - RNA, 22 nt, Human
aggcuggauccuagccuuaucc

SEQ ID NO: 2350585 - RNA, 14 nt, Human
aggcuggcacagga

SEQ ID NO: 2350586 - RNA, 20 nt, Human
aggcuggaguggaguggcgu

SEQ ID NO: 2350587 - RNA, 13 nt, Human
aggcuggcgugca

SEQ ID NO: 2350588 - RNA, 17 nt, Human
aggcuggcgugcagugg

SEQ ID NO: 2350589 - RNA, 19 nt, Human
aggcuggcccugcccuggu

SEQ ID NO: 2350590 - RNA, 14 nt, Human
aggcuggcgcagcc

SEQ ID NO: 2350591 - RNA, 15 nt, Human
aggcuggcgcagcca

SEQ ID NO: 2350592 - RNA, 17 nt, Human
aggcuggcgcagccaag

SEQ ID NO: 2350593 - RNA, 19 nt, Human
aggcuggcgcagccaaggc

SEQ ID NO: 2350594 - RNA, 20 nt, Human
aggcuggcgcagccaaggcc

SEQ ID NO: 2350595 - RNA, 14 nt, Human
aggcuggcccugcc

SEQ ID NO: 2350596 - RNA, 12 nt, Human
aggcuggcccug

SEQ ID NO: 2350597 - RNA, 17 nt, Human
aggcuggccaguccagg

SEQ ID NO: 2350598 - RNA, 18 nt, Human
aggcuggccaguccaggc

SEQ ID NO: 2350599 - RNA, 19 nt, Human
aggcuggccaguccaggcu

SEQ ID NO: 2350600 - RNA, 21 nt, Human
aggcuggccaguccaggcugc

SEQ ID NO: 2350601 - RNA, 18 nt, Human
aggcuggcccugcccugg

SEQ ID NO: 2350602 - RNA, 17 nt, Human
aggcuggcccugcccug

SEQ ID NO: 2350603 - RNA, 16 nt, Human
aggcuggcccugcccu

SEQ ID NO: 2350604 - RNA, 15 nt, Human
aggcuggcccugccc

SEQ ID NO: 2350605 - RNA, 12 nt, Human
aggcuggagaag

SEQ ID NO: 2350606 - RNA, 13 nt, Human
aggcugcuuggga

SEQ ID NO: 2350607 - RNA, 22 nt, Human
aggcugcuuagaauccaaacuu

SEQ ID NO: 2350608 - RNA, 21 nt, Human
aggcugcuuuccaaagccaau

SEQ ID NO: 2350609 - RNA, 19 nt, Human
aggcugcuuuccaaagcca

SEQ ID NO: 2350610 - RNA, 18 nt, Human
aggcugcuuuccaaagcc

SEQ ID NO: 2350611 - RNA, 17 nt, Human
aggcugcuuuccaaagc

SEQ ID NO: 2350612 - RNA, 15 nt, Human
aggcugcuuuccaaa

SEQ ID NO: 2350613 - RNA, 16 nt, Human
aggcugcuggaggaaa

SEQ ID NO: 2350614 - RNA, 15 nt, Human
aggcugcuggaggaa

SEQ ID NO: 2350615 - RNA, 12 nt, Human
aggcugcuggcg

SEQ ID NO: 2350616 - RNA, 14 nt, Human
aggcugcuggcgcc

SEQ ID NO: 2350617 - RNA, 14 nt, Human
aggcugcuggagga

SEQ ID NO: 2350618 - RNA, 13 nt, Human
aggcugcuggagg

SEQ ID NO: 2350619 - RNA, 23 nt, Human
aggcugcucuugaacuccugacc

SEQ ID NO: 2350620 - RNA, 17 nt, Human
aggcugcgucuggaggg

SEQ ID NO: 2350621 - RNA, 14 nt, Human
aggcugcuuuccaa

SEQ ID NO: 2350622 - RNA, 13 nt, Human
aggcugcuuucca

SEQ ID NO: 2350623 - RNA, 14 nt, Human
aggcugcuuagaau

SEQ ID NO: 2350624 - RNA, 21 nt, Human
aggcugcuggcgccucugcaa

SEQ ID NO: 2350625 - RNA, 15 nt, Human
aggcugcuggcgccu

SEQ ID NO: 2350626 - RNA, 18 nt, Human
aggcugcuggcgccucug

SEQ ID NO: 2350627 - RNA, 19 nt, Human
aggcugcuggcgccucugc

SEQ ID NO: 2350628 - RNA, 20 nt, Human
aggcugcuggcgccucugca

SEQ ID NO: 2350629 - RNA, 17 nt, Human
aggcucugcccugcccu

SEQ ID NO: 2350630 - RNA, 14 nt, Human
aggcucugcccugc

SEQ ID NO: 2350631 - RNA, 23 nt, Human
aggcucugcccugcccuagcucc

SEQ ID NO: 2350632 - RNA, 18 nt, Human
aggcucugcgccugcccc

SEQ ID NO: 2350633 - RNA, 15 nt, Human
aggcugcucagggcu

SEQ ID NO: 2350634 - RNA, 16 nt, Human
aggcugcgucuggagg

SEQ ID NO: 2350635 - RNA, 16 nt, Human
aggcugcucagggcug

SEQ ID NO: 2350636 - RNA, 17 nt, Human
aggcugcucagggcugg

SEQ ID NO: 2350637 - RNA, 18 nt, Human
aggcucuggagcccacug

SEQ ID NO: 2350638 - RNA, 19 nt, Human
aggcucuggagcccacugu

SEQ ID NO: 2350639 - RNA, 14 nt, Human
aggcucuggagccc

SEQ ID NO: 2350640 - RNA, 15 nt, Human
aggcucuggagccca

SEQ ID NO: 2350641 - RNA, 13 nt, Human
aggcucuggagcc

SEQ ID NO: 2350642 - RNA, 16 nt, Human
aggcucugcccuuggu

SEQ ID NO: 2350643 - RNA, 20 nt, Human
aggcucucaacaggggagag

SEQ ID NO: 2350644 - RNA, 22 nt, Human
aggcucgauuuuguaucugcag

SEQ ID NO: 2350645 - RNA, 17 nt, Human
aggcucgauuuuguauc

SEQ ID NO: 2350646 - RNA, 19 nt, Human
aggcucgauuuuguaucug

SEQ ID NO: 2350647 - RNA, 23 nt, Human
aggcucgauuuuguaucugcagg

SEQ ID NO: 2350648 - RNA, 23 nt, Human
aggcuccuuccugucuuccugca

SEQ ID NO: 2350649 - RNA, 14 nt, Human
aggcucgauuuugu

SEQ ID NO: 2350650 - RNA, 15 nt, Human
aggcucgauuuugua

SEQ ID NO: 2350651 - RNA, 16 nt, Human
aggcucgauuuuguau

SEQ ID NO: 2350652 - RNA, 16 nt, Human
aggcuccuuccugucu

SEQ ID NO: 2350653 - RNA, 15 nt, Human
aggcuccuuccuguc

SEQ ID NO: 2350654 - RNA, 13 nt, Human
aggcuccuuccug

SEQ ID NO: 2350655 - RNA, 21 nt, Human
aggcucgagcaugccuggaug

SEQ ID NO: 2350656 - RNA, 15 nt, Human
aggcucgagcaugcc

SEQ ID NO: 2350657 - RNA, 17 nt, Human
aggcucgagcaugccug

SEQ ID NO: 2350658 - RNA, 18 nt, Human
aggcucgagcaugccugg

SEQ ID NO: 2350659 - RNA, 19 nt, Human
aggcucgagcaugccugga

SEQ ID NO: 2350660 - RNA, 19 nt, Human
aggcuccuuuagcgcccag

SEQ ID NO: 2350661 - RNA, 12 nt, Human
aggcucgagcau

SEQ ID NO: 2350662 - RNA, 13 nt, Human
aggcuccugugcu

SEQ ID NO: 2350663 - RNA, 19 nt, Human
aggcuccugugcuacuuug

SEQ ID NO: 2350664 - RNA, 21 nt, Human
aggcuccugccaguguggaac

SEQ ID NO: 2350665 - RNA, 13 nt, Human
aggcuccugccac

SEQ ID NO: 2350666 - RNA, 20 nt, Human
aggcuccugccaccacgccc

SEQ ID NO: 2350667 - RNA, 16 nt, Human
aggccugggugcuggc

SEQ ID NO: 2350668 - RNA, 12 nt, Human
aggccugggugc

SEQ ID NO: 2350669 - RNA, 21 nt, Human
aggccugggucugugucucuu

SEQ ID NO: 2350670 - RNA, 19 nt, Human
aggccugggucugugucuc

SEQ ID NO: 2350671 - RNA, 17 nt, Human
aggccugggucuguguc

SEQ ID NO: 2350672 - RNA, 16 nt, Human
aggccugggucugugu

SEQ ID NO: 2350673 - RNA, 16 nt, Human
aggccuggccaggcac

SEQ ID NO: 2350674 - RNA, 19 nt, Human
aggccugggccgcugccac

SEQ ID NO: 2350675 - RNA, 22 nt, Human
aggccuguccugaccugucuca

SEQ ID NO: 2350676 - RNA, 23 nt, Human
aggccugggugcuggcugcccag

SEQ ID NO: 2350677 - RNA, 17 nt, Human
aggccugggugcuggcu

SEQ ID NO: 2350678 - RNA, 14 nt, Human
aggcuccugccacc

SEQ ID NO: 2350679 - RNA, 13 nt, Human
aggcucugcccug

SEQ ID NO: 2350680 - RNA, 17 nt, Human
aggcucugcacagaugg

SEQ ID NO: 2350681 - RNA, 15 nt, Human
aggcucugcacagau

SEQ ID NO: 2350682 - RNA, 13 nt, Human
aggcucugcacag

SEQ ID NO: 2350683 - RNA, 13 nt, Human
aggcucugcccuu

SEQ ID NO: 2350684 - RNA, 14 nt, Human
aggcucugcccuug

SEQ ID NO: 2350685 - RNA, 15 nt, Human
aggcucugcccuugg

SEQ ID NO: 2350686 - RNA, 12 nt, Human
aggcucugcccu

SEQ ID NO: 2350687 - RNA, 11 nt, Human
aggcucugccc

SEQ ID NO: 2350688 - RNA, 18 nt, Human
aggcucugaaagccagcu

SEQ ID NO: 2350689 - RNA, 19 nt, Human
aggcucugacccagugaga

SEQ ID NO: 2350690 - RNA, 21 nt, Human
aggcucucaggccagcugcuu

SEQ ID NO: 2350691 - RNA, 11 nt, Human
aggcucucagg

SEQ ID NO: 2350692 - RNA, 12 nt, Human
aggcucucaggc

SEQ ID NO: 2350693 - RNA, 14 nt, Human
aggcucucaggcca

SEQ ID NO: 2350694 - RNA, 15 nt, Human
aggcucucaggccag

SEQ ID NO: 2350695 - RNA, 16 nt, Human
aggcucucaggccagc

SEQ ID NO: 2350696 - RNA, 18 nt, Human
aggcucucaggccagcug

SEQ ID NO: 2350697 - RNA, 19 nt, Human
aggcucucaggccagcugc

SEQ ID NO: 2350698 - RNA, 20 nt, Human
aggcucucaggccagcugcu

SEQ ID NO: 2350699 - RNA, 18 nt, Human
ugggaacugcagaccugu

SEQ ID NO: 2350700 - RNA, 13 nt, Human
ugggaagacauga

SEQ ID NO: 2350701 - RNA, 21 nt, Human
ugggaagacauggggaggaag

SEQ ID NO: 2350702 - RNA, 23 nt, Human
ugggaagaccagcuuugcaguga

SEQ ID NO: 2350703 - RNA, 17 nt, Human
ugggaagacgaggcccu

SEQ ID NO: 2350704 - RNA, 18 nt, Human
ugggaagacgaggcccuc

SEQ ID NO: 2350705 - RNA, 21 nt, Human
ugggaagacgccugagcucac

SEQ ID NO: 2350706 - RNA, 18 nt, Human
ugggaagacgccugagcu

SEQ ID NO: 2350707 - RNA, 19 nt, Human
ugggaagacgccugagcuc

SEQ ID NO: 2350708 - RNA, 16 nt, Human
ugggaacugcagaccu

SEQ ID NO: 2350709 - RNA, 17 nt, Human
ugggaacugcagaccug

SEQ ID NO: 2350710 - RNA, 18 nt, Human
ugggaacgugacugcccc

SEQ ID NO: 2350711 - RNA, 15 nt, Human
ugggaacucaccugg

SEQ ID NO: 2350712 - RNA, 17 nt, Human
ugggaacucaccugggg

SEQ ID NO: 2350713 - RNA, 18 nt, Human
ugggaacucaccuggggc

SEQ ID NO: 2350714 - RNA, 16 nt, Human
ugggaacgugacugcc

SEQ ID NO: 2350715 - RNA, 20 nt, Human
ugggaacgagaggggaagag

SEQ ID NO: 2350716 - RNA, 24 nt, Human
ugggaacgcagaugauccaugagu

SEQ ID NO: 2350717 - RNA, 13 nt, Human
ugggaacuagacu

SEQ ID NO: 2350718 - RNA, 22 nt, Human
ugggaaggggacccccgccccc

SEQ ID NO: 2350719 - RNA, 21 nt, Human
ugggaagggagagcggggcag

SEQ ID NO: 2350720 - RNA, 15 nt, Human
ugggaagugaagacu

SEQ ID NO: 2350721 - RNA, 14 nt, Human
ugggaagugacuua

SEQ ID NO: 2350722 - RNA, 20 nt, Human
ugggaagugacuuagcagau

SEQ ID NO: 2350723 - RNA, 13 nt, Human
ugggaauaaauau

SEQ ID NO: 2350724 - RNA, 14 nt, Human
ugggaauaaauaug

SEQ ID NO: 2350725 - RNA, 15 nt, Human
ugggaauaaauaugc

SEQ ID NO: 2350726 - RNA, 19 nt, Human
ugggaaggggacccccgcc

SEQ ID NO: 2350727 - RNA, 13 nt, Human
ugggaagggagag

SEQ ID NO: 2350728 - RNA, 15 nt, Human
ugggaaggccagcug

SEQ ID NO: 2350729 - RNA, 16 nt, Human
ugggaaggccagcugc

SEQ ID NO: 2350730 - RNA, 12 nt, Human
ugggaaggaggg

SEQ ID NO: 2350731 - RNA, 20 nt, Human
ugggaagauaggcucugcac

SEQ ID NO: 2350732 - RNA, 17 nt, Human
ugggaagauaggcucug

SEQ ID NO: 2350733 - RNA, 22 nt, Human
ugggaagauaggcucugcacag

SEQ ID NO: 2350734 - RNA, 21 nt, Human
ugggaacgcagaugauccaug

SEQ ID NO: 2350735 - RNA, 15 nt, Human
ugggaacgagagggg

SEQ ID NO: 2350736 - RNA, 16 nt, Human
ugggaacgagagggga

SEQ ID NO: 2350737 - RNA, 17 nt, Human
ugggaaaggaguagaaa

SEQ ID NO: 2350738 - RNA, 17 nt, Human
ugggaaauaagagagaa

SEQ ID NO: 2350739 - RNA, 16 nt, Human
ugggaaaguauucugu

SEQ ID NO: 2350740 - RNA, 16 nt, Human
ugggaaaggaguagaa

SEQ ID NO: 2350741 - RNA, 22 nt, Human
ugggaaagccaccucucccuca

SEQ ID NO: 2350742 - RNA, 20 nt, Human
ugggaaagccaccucucccu

SEQ ID NO: 2350743 - RNA, 21 nt, Human
ugggaaagccaccucucccuc

SEQ ID NO: 2350744 - RNA, 16 nt, Human
ugggaaaggggaaguu

SEQ ID NO: 2350745 - RNA, 17 nt, Human
uggcuucccgcucagcc

SEQ ID NO: 2350746 - RNA, 15 nt, Human
ugggaaagccaccuc

SEQ ID NO: 2350747 - RNA, 16 nt, Human
ugggaaagccaccucu

SEQ ID NO: 2350748 - RNA, 15 nt, Human
uggcuucccgcucag

SEQ ID NO: 2350749 - RNA, 16 nt, Human
uggcuucccgcucagc

SEQ ID NO: 2350750 - RNA, 23 nt, Human
uggcuuccagguaucuccaggau

SEQ ID NO: 2350751 - RNA, 16 nt, Human
uggcuuccaugauggu

SEQ ID NO: 2350752 - RNA, 23 nt, Human
uggcuucacggaagagccuugcg

SEQ ID NO: 2350753 - RNA, 12 nt, Human
uggcuucaggag

SEQ ID NO: 2350754 - RNA, 13 nt, Human
uggcuucaggagg

SEQ ID NO: 2350755 - RNA, 22 nt, Human
uggcuuccagaaaaccccagca

SEQ ID NO: 2350756 - RNA, 16 nt, Human
uggcuucaucugucaa

SEQ ID NO: 2350757 - RNA, 18 nt, Human
uggcuucauuagagcagg

SEQ ID NO: 2350758 - RNA, 23 nt, Human
uggcuuccagaaaaccccagcau

SEQ ID NO: 2350759 - RNA, 20 nt, Human
uggcuucauuagagcaggcg

SEQ ID NO: 2350760 - RNA, 14 nt, Human
uggcuuccagguau

SEQ ID NO: 2350761 - RNA, 15 nt, Human
uggcuuccagguauc

SEQ ID NO: 2350762 - RNA, 20 nt, Human
uggcuuccagguaucuccag

SEQ ID NO: 2350763 - RNA, 21 nt, Human
uggcuuccagguaucuccagg

SEQ ID NO: 2350764 - RNA, 22 nt, Human
uggcuuccagguaucuccagga

SEQ ID NO: 2350765 - RNA, 20 nt, Human
uggcuuacuacaugugggag

SEQ ID NO: 2350766 - RNA, 23 nt, Human
uggcuuacuacaugugggagcuu

SEQ ID NO: 2350767 - RNA, 15 nt, Human
uggcuuauccagcug

SEQ ID NO: 2350768 - RNA, 22 nt, Human
uggcuucacggaagagccuugc

SEQ ID NO: 2350769 - RNA, 15 nt, Human
uggcuuaaugcuucu

SEQ ID NO: 2350770 - RNA, 16 nt, Human
uggcuuaaugcuucuu

SEQ ID NO: 2350771 - RNA, 22 nt, Human
uggcuguguucuggugaggccu

SEQ ID NO: 2350772 - RNA, 14 nt, Human
uggcuguucuggaa

SEQ ID NO: 2350773 - RNA, 18 nt, Human
uggcuguuggcagugagu

SEQ ID NO: 2350774 - RNA, 15 nt, Human
uggcuuaauguuuau

SEQ ID NO: 2350775 - RNA, 20 nt, Human
uggcuuaaugcuucuuucau

SEQ ID NO: 2350776 - RNA, 14 nt, Human
uggcuuaauguuua

SEQ ID NO: 2350777 - RNA, 16 nt, Human
uggcugcggcacccuu

SEQ ID NO: 2350778 - RNA, 17 nt, Human
uggcugcggcacccuug

SEQ ID NO: 2350779 - RNA, 14 nt, Human
uggcugcuagcacu

SEQ ID NO: 2350780 - RNA, 13 nt, Human
uggcugcuagcac

SEQ ID NO: 2350781 - RNA, 15 nt, Human
uggcugcuagcacuu

SEQ ID NO: 2350782 - RNA, 20 nt, Human
uggcugugucuaaacugcau

SEQ ID NO: 2350783 - RNA, 19 nt, Human
uggcugugucuaaacugca

SEQ ID NO: 2350784 - RNA, 20 nt, Human
uggcugccuccacucccacu

SEQ ID NO: 2350785 - RNA, 17 nt, Human
uggcugccuccacuccc

SEQ ID NO: 2350786 - RNA, 18 nt, Human
uggcugccuccacuccca

SEQ ID NO: 2350787 - RNA, 22 nt, Human
uggcugccuugugaaggaauua

SEQ ID NO: 2350788 - RNA, 17 nt, Human
uggcugccucauuuaga

SEQ ID NO: 2350789 - RNA, 17 nt, Human
uggcugcccuggcccug

SEQ ID NO: 2350790 - RNA, 14 nt, Human
uggcugccuccacu

SEQ ID NO: 2350791 - RNA, 16 nt, Human
uggcugccuccacucc

SEQ ID NO: 2350792 - RNA, 13 nt, Human
uggcugcccuggc

SEQ ID NO: 2350793 - RNA, 14 nt, Human
uggcugcccuggcc

SEQ ID NO: 2350794 - RNA, 15 nt, Human
uggcugcccuggccc

SEQ ID NO: 2350795 - RNA, 16 nt, Human
uggcugcccuggcccu

SEQ ID NO: 2350796 - RNA, 13 nt, Human
uggcuguuggcug

SEQ ID NO: 2350797 - RNA, 14 nt, Human
uggcugugucuccc

SEQ ID NO: 2350798 - RNA, 15 nt, Human
uggcuguuggcuggg

SEQ ID NO: 2350799 - RNA, 17 nt, Human
uggcuuaaaacaacacu

SEQ ID NO: 2350800 - RNA, 20 nt, Human
uggcugcaucccccccaccu

SEQ ID NO: 2350801 - RNA, 12 nt, Human
uggcugcaugcg

SEQ ID NO: 2350802 - RNA, 13 nt, Human
uggcugcccacac

SEQ ID NO: 2350803 - RNA, 14 nt, Human
uggcugccagcuau

SEQ ID NO: 2350804 - RNA, 21 nt, Human
uggcugcccagaccccucugg

SEQ ID NO: 2350805 - RNA, 17 nt, Human
uggcugccccaaccugc

SEQ ID NO: 2350806 - RNA, 20 nt, Human
uggcugccccaaccugcuga

SEQ ID NO: 2350807 - RNA, 22 nt, Human
uggcugccccauuuauccaccu

SEQ ID NO: 2350808 - RNA, 23 nt, Human
uggcugcccagaccccucuggcc

SEQ ID NO: 2350809 - RNA, 20 nt, Human
uggcugcccagaccccucug

SEQ ID NO: 2350810 - RNA, 22 nt, Human
uggcugccagcuauuuuuacua

SEQ ID NO: 2350811 - RNA, 18 nt, Human
uggcugccaaugggagcu

SEQ ID NO: 2350812 - RNA, 20 nt, Human
uggcugccaaugggagcuca

SEQ ID NO: 2350813 - RNA, 15 nt, Human
uggcugcagggaguc

SEQ ID NO: 2350814 - RNA, 23 nt, Human
uggcugagguuccucugccugcc

SEQ ID NO: 2350815 - RNA, 24 nt, Human
uggcugagguuccucugccugccc

SEQ ID NO: 2350816 - RNA, 19 nt, Human
uggcugcauaaauguggua

SEQ ID NO: 2350817 - RNA, 13 nt, Human
uggcugcagggag

SEQ ID NO: 2350818 - RNA, 14 nt, Human
uggcugcagggagu

SEQ ID NO: 2350819 - RNA, 20 nt, Human
uggcugaggauuucaagccu

SEQ ID NO: 2350820 - RNA, 23 nt, Human
uggcugaggaggccuccaucuca

SEQ ID NO: 2350821 - RNA, 15 nt, Human
uggcucuucugccca

SEQ ID NO: 2350822 - RNA, 22 nt, Human
uggcucuugaacugagcuugga

SEQ ID NO: 2350823 - RNA, 16 nt, Human
uggcucuugaacugag

SEQ ID NO: 2350824 - RNA, 12 nt, Human
uggcugcaaagg

SEQ ID NO: 2350825 - RNA, 17 nt, Human
uggcugagguuccucug

SEQ ID NO: 2350826 - RNA, 18 nt, Human
uggcugagguuccucugc

SEQ ID NO: 2350827 - RNA, 20 nt, Human
uggcugagguuccucugccu

SEQ ID NO: 2350828 - RNA, 21 nt, Human
uggcugagguuccucugccug

SEQ ID NO: 2350829 - RNA, 22 nt, Human
uggcugagguuccucugccugc

SEQ ID NO: 2350830 - RNA, 18 nt, Human
uggcucaaguccucuuuu

SEQ ID NO: 2350831 - RNA, 19 nt, Human
uggcucuuccaggcuggga

SEQ ID NO: 2350832 - RNA, 20 nt, Human
uggcucuuccaggcugggag

SEQ ID NO: 2350833 - RNA, 21 nt, Human
uggcucuuccaggcugggaga

SEQ ID NO: 2350834 - RNA, 17 nt, Human
uggcuagugucuaucag

SEQ ID NO: 2350835 - RNA, 23 nt, Human
uggcuagucaagcuccuccuccc

SEQ ID NO: 2350836 - RNA, 22 nt, Human
uggcuagucaagcuccuccucc

SEQ ID NO: 2350837 - RNA, 21 nt, Human
uggcuagucaagcuccuccuc

SEQ ID NO: 2350838 - RNA, 20 nt, Human
uggcuagucaagcuccuccu

SEQ ID NO: 2350839 - RNA, 18 nt, Human
uggcuagucaagcuccuc

SEQ ID NO: 2350840 - RNA, 17 nt, Human
uggcuagucaagcuccu

SEQ ID NO: 2350841 - RNA, 14 nt, Human
uggcuaugcauuug

SEQ ID NO: 2350842 - RNA, 17 nt, Human
uggcuaugcauuugaaa

SEQ ID NO: 2350843 - RNA, 15 nt, Human
uggcuaugcauuuga

SEQ ID NO: 2350844 - RNA, 16 nt, Human
uggcuagucagagaga

SEQ ID NO: 2350845 - RNA, 13 nt, Human
uggcuauaaauau

SEQ ID NO: 2350846 - RNA, 19 nt, Human
uggcuauaaauauauaaaa

SEQ ID NO: 2350847 - RNA, 14 nt, Human
uggcuauggccacc

SEQ ID NO: 2350848 - RNA, 16 nt, Human
uggcuaugagggccuu

SEQ ID NO: 2350849 - RNA, 19 nt, Human
uggcuaugcauuugaaaau

SEQ ID NO: 2350850 - RNA, 16 nt, Human
uggcuauuuaaagaca

SEQ ID NO: 2350851 - RNA, 15 nt, Human
uggcuauuuaaaacu

SEQ ID NO: 2350852 - RNA, 22 nt, Human
uggcuauuagagaucaaccccu

SEQ ID NO: 2350853 - RNA, 21 nt, Human
uggcuagaguccucacuccca

SEQ ID NO: 2350854 - RNA, 18 nt, Human
uggcuagaguccucacuc

SEQ ID NO: 2350855 - RNA, 15 nt, Human
uggcuagucaagcuc

SEQ ID NO: 2350856 - RNA, 17 nt, Human
uggcuaggggagcaggg

SEQ ID NO: 2350857 - RNA, 16 nt, Human
uggcuagaguccucac

SEQ ID NO: 2350858 - RNA, 15 nt, Human
uggcuagaguccuca

SEQ ID NO: 2350859 - RNA, 20 nt, Human
aggcuggcuuguccccuccu

SEQ ID NO: 2350860 - RNA, 22 nt, Human
uggcuagagguucaaagauauu

SEQ ID NO: 2350861 - RNA, 14 nt, Human
aggcugggagagcc

SEQ ID NO: 2350862 - RNA, 22 nt, Human
aggcuggcuuguccccuccuca

SEQ ID NO: 2350863 - RNA, 14 nt, Human
aggcuggcuugucc

SEQ ID NO: 2350864 - RNA, 17 nt, Human
aggcuggcuggggccua

SEQ ID NO: 2350865 - RNA, 17 nt, Human
aggcugggaccacguga

SEQ ID NO: 2350866 - RNA, 22 nt, Human
aggcuggcuggcccgucauguu

SEQ ID NO: 2350867 - RNA, 12 nt, Human
aggcuggcuggg

SEQ ID NO: 2350868 - RNA, 13 nt, Human
aggcuggcugggg

SEQ ID NO: 2350869 - RNA, 15 nt, Human
aggcuggcuggggcc

SEQ ID NO: 2350870 - RNA, 13 nt, Human
aggcuggcuggcc

SEQ ID NO: 2350871 - RNA, 22 nt, Human
aggcuggcgcagccaaggccga

SEQ ID NO: 2350872 - RNA, 19 nt, Human
aggcuggcuccagaugcag

SEQ ID NO: 2350873 - RNA, 18 nt, Human
aggcuggcgugcaguggu

SEQ ID NO: 2350874 - RNA, 20 nt, Human
aggcuggcgugcaguggugc

SEQ ID NO: 2350875 - RNA, 18 nt, Human
uggcacaucagaaaggaa

SEQ ID NO: 2350876 - RNA, 13 nt, Human
uggcaccagcgaa

SEQ ID NO: 2350877 - RNA, 21 nt, Human
uggcacaucagcacgauuucu

SEQ ID NO: 2350878 - RNA, 15 nt, Human
uggcacccggccccu

SEQ ID NO: 2350879 - RNA, 16 nt, Human
uggcacccggccccug

SEQ ID NO: 2350880 - RNA, 21 nt, Human
uggcagaguugaagacagagc

SEQ ID NO: 2350881 - RNA, 20 nt, Human
uggcacccaccguggaggag

SEQ ID NO: 2350882 - RNA, 18 nt, Human
uggcaccagcgaagggag

SEQ ID NO: 2350883 - RNA, 21 nt, Human
uggcacccaccguggaggagg

SEQ ID NO: 2350884 - RNA, 22 nt, Human
uggcacccaccguggaggagga

SEQ ID NO: 2350885 - RNA, 15 nt, Human
uggcagaguuguaaa

SEQ ID NO: 2350886 - RNA, 16 nt, Human
uggcagaguuguaaau

SEQ ID NO: 2350887 - RNA, 17 nt, Human
uggcagaguuguaaaua

SEQ ID NO: 2350888 - RNA, 22 nt, Human
uggcagaguugaagacagagcu

SEQ ID NO: 2350889 - RNA, 19 nt, Human
uggcagauaaucagccucu

SEQ ID NO: 2350890 - RNA, 18 nt, Human
uggcagaguuuguguguu

SEQ ID NO: 2350891 - RNA, 22 nt, Human
uggcagaguuuguguguugucu

SEQ ID NO: 2350892 - RNA, 19 nt, Human
uggcagaguuguaaauaua

SEQ ID NO: 2350893 - RNA, 20 nt, Human
uggcagaguuguaaauauau

SEQ ID NO: 2350894 - RNA, 23 nt, Human
uggcagaguuguaaauauauaaa

SEQ ID NO: 2350895 - RNA, 17 nt, Human
uggcagaguuugugugu

SEQ ID NO: 2350896 - RNA, 21 nt, Human
uggcagauaaucagccucuua

SEQ ID NO: 2350897 - RNA, 20 nt, Human
uggcagauaaucagccucuu

SEQ ID NO: 2350898 - RNA, 18 nt, Human
uggcaccagcagccugga

SEQ ID NO: 2350899 - RNA, 20 nt, Human
uggcacaucagcacgauuuc

SEQ ID NO: 2350900 - RNA, 22 nt, Human
uggcacaguuuucugagaaaga

SEQ ID NO: 2350901 - RNA, 14 nt, Human
uggaugucuuccuu

SEQ ID NO: 2350902 - RNA, 15 nt, Human
uggaugucuuccuug

SEQ ID NO: 2350903 - RNA, 23 nt, Human
uggaugugggguccccaucaucc

SEQ ID NO: 2350904 - RNA, 13 nt, Human
uggauguuuuaau

SEQ ID NO: 2350905 - RNA, 18 nt, Human
uggauguuuuaauuccau

SEQ ID NO: 2350906 - RNA, 20 nt, Human
uggauguuuuaauuccauga

SEQ ID NO: 2350907 - RNA, 14 nt, Human
uggcacaucagaaa

SEQ ID NO: 2350908 - RNA, 15 nt, Human
uggcacaucagaaag

SEQ ID NO: 2350909 - RNA, 17 nt, Human
uggaugucugccaauuu

SEQ ID NO: 2350910 - RNA, 20 nt, Human
uggaugucugccaauuuuug

SEQ ID NO: 2350911 - RNA, 12 nt, Human
uggauguucuga

SEQ ID NO: 2350912 - RNA, 22 nt, Human
uggauuaaacuuaaucuaaaug

SEQ ID NO: 2350913 - RNA, 20 nt, Human
uggcacaguuuucugagaaa

SEQ ID NO: 2350914 - RNA, 12 nt, Human
aggccagagaca

SEQ ID NO: 2350915 - RNA, 13 nt, Human
aggccacggcagc

SEQ ID NO: 2350916 - RNA, 22 nt, Human
aggccaccugcccccuucuccc

SEQ ID NO: 2350917 - RNA, 21 nt, Human
aggccaccugcccccuucucc

SEQ ID NO: 2350918 - RNA, 14 nt, Human
aggccacuccucca

SEQ ID NO: 2350919 - RNA, 13 nt, Human
aggccacuccucc

SEQ ID NO: 2350920 - RNA, 19 nt, Human
aggccacgugauguggagg

SEQ ID NO: 2350921 - RNA, 23 nt, Human
aggccacgugauguggagggcac

SEQ ID NO: 2350922 - RNA, 19 nt, Human
aggccacuccuccaaagga

SEQ ID NO: 2350923 - RNA, 22 nt, Human
aggccacaccaucuccuuucag

SEQ ID NO: 2350924 - RNA, 21 nt, Human
aggccacaccaucuccuuuca

SEQ ID NO: 2350925 - RNA, 16 nt, Human
aggccacaugaguccc

SEQ ID NO: 2350926 - RNA, 18 nt, Human
aggccacacucagcacaa

SEQ ID NO: 2350927 - RNA, 17 nt, Human
aggccacacucagcaca

SEQ ID NO: 2350928 - RNA, 22 nt, Human
aggccaccauauucagugcugu

SEQ ID NO: 2350929 - RNA, 12 nt, Human
aggccaccagga

SEQ ID NO: 2350930 - RNA, 13 nt, Human
aggccaccaggau

SEQ ID NO: 2350931 - RNA, 19 nt, Human
aggccacaugagucccagu

SEQ ID NO: 2350932 - RNA, 18 nt, Human
aggccacaugagucccag

SEQ ID NO: 2350933 - RNA, 19 nt, Human
aggccacauggggcugggc

SEQ ID NO: 2350934 - RNA, 22 nt, Human
aggccacauggggcugggcagc

SEQ ID NO: 2350935 - RNA, 23 nt, Human
aggccacauggggcugggcagcu

SEQ ID NO: 2350936 - RNA, 15 nt, Human
aggccacaugucacc

SEQ ID NO: 2350937 - RNA, 21 nt, Human
aggccacaugucaccguggac

SEQ ID NO: 2350938 - RNA, 17 nt, Human
uggcagcccuguaggga

SEQ ID NO: 2350939 - RNA, 14 nt, Human
uggcagcccuguag

SEQ ID NO: 2350940 - RNA, 16 nt, Human
uggcagccgugccuuc

SEQ ID NO: 2350941 - RNA, 12 nt, Human
uggcagcccugu

SEQ ID NO: 2350942 - RNA, 11 nt, Human
uggcagcccug

SEQ ID NO: 2350943 - RNA, 12 nt, Human
uggcagccccug

SEQ ID NO: 2350944 - RNA, 14 nt, Human
uggcagccgagcuc

SEQ ID NO: 2350945 - RNA, 22 nt, Human
uggcagccgugccuucagcucu

SEQ ID NO: 2350946 - RNA, 23 nt, Human
uggcagccgugccuucagcucua

SEQ ID NO: 2350947 - RNA, 22 nt, Human
uggcagccucccauccagggcc

SEQ ID NO: 2350948 - RNA, 21 nt, Human
uggcagccucccauccagggc

SEQ ID NO: 2350949 - RNA, 20 nt, Human
uggcagccucccauccaggg

SEQ ID NO: 2350950 - RNA, 19 nt, Human
uggcagccucccauccagg

SEQ ID NO: 2350951 - RNA, 16 nt, Human
uggcagccucuucaaa

SEQ ID NO: 2350952 - RNA, 15 nt, Human
uggcagccucuucaa

SEQ ID NO: 2350953 - RNA, 20 nt, Human
aggccacaagacccuugugg

SEQ ID NO: 2350954 - RNA, 22 nt, Human
uggagucaugguccgguguccu

SEQ ID NO: 2350955 - RNA, 15 nt, Human
uggaguccagucucu

SEQ ID NO: 2350956 - RNA, 14 nt, Human
uggaguccagucuc

SEQ ID NO: 2350957 - RNA, 15 nt, Human
uggagucaugccaag

SEQ ID NO: 2350958 - RNA, 19 nt, Human
uggagucagacagaugugg

SEQ ID NO: 2350959 - RNA, 14 nt, Human
uggaguccccucac

SEQ ID NO: 2350960 - RNA, 15 nt, Human
uggaguccccucacc

SEQ ID NO: 2350961 - RNA, 19 nt, Human
uggaguccccucaccuccu

SEQ ID NO: 2350962 - RNA, 20 nt, Human
uggaguccccucaccuccuc

SEQ ID NO: 2350963 - RNA, 21 nt, Human
uggaguccccucaccuccucu

SEQ ID NO: 2350964 - RNA, 14 nt, Human
uggagucggaaggg

SEQ ID NO: 2350965 - RNA, 13 nt, Human
uggagucuccagu

SEQ ID NO: 2350966 - RNA, 17 nt, Human
uggagucuccagugguu

SEQ ID NO: 2350967 - RNA, 21 nt, Human
aggccaagugcaggcuggcac

SEQ ID NO: 2350968 - RNA, 15 nt, Human
aggccaagugcaggc

SEQ ID NO: 2350969 - RNA, 14 nt, Human
aggccaagugcagg

SEQ ID NO: 2350970 - RNA, 18 nt, Human
aggccaagucaggcccuu

SEQ ID NO: 2350971 - RNA, 21 nt, Human
aggccaagaaacgucuucuaa

SEQ ID NO: 2350972 - RNA, 22 nt, Human
aggccaagugugauaaauaaac

SEQ ID NO: 2350973 - RNA, 23 nt, Human
aggccaaguuuguaucaggugcc

SEQ ID NO: 2350974 - RNA, 15 nt, Human
aggccacaagacccu

SEQ ID NO: 2350975 - RNA, 15 nt, Human
uggaugccugguggc

SEQ ID NO: 2350976 - RNA, 20 nt, Human
uggaguucaucuugaauugu

SEQ ID NO: 2350977 - RNA, 16 nt, Human
uggaguucaucuugaa

SEQ ID NO: 2350978 - RNA, 17 nt, Human
uggaguucaucuugaau

SEQ ID NO: 2350979 - RNA, 20 nt, Human
uggaugccugguggcagcug

SEQ ID NO: 2350980 - RNA, 23 nt, Human
uggaugggggaacucagauccag

SEQ ID NO: 2350981 - RNA, 16 nt, Human
uggaguuccugaaccu

SEQ ID NO: 2350982 - RNA, 20 nt, Human
uggaguuccugaaccugaug

SEQ ID NO: 2350983 - RNA, 18 nt, Human
uggaugccugguggcagc

SEQ ID NO: 2350984 - RNA, 19 nt, Human
uggaugccugguggcagcu

SEQ ID NO: 2350985 - RNA, 13 nt, Human
aggccaaaaaaau

SEQ ID NO: 2350986 - RNA, 23 nt, Human
aggccaaaauuaccaaaaaucuu

SEQ ID NO: 2350987 - RNA, 15 nt, Human
aggccaaaccucugu

SEQ ID NO: 2350988 - RNA, 14 nt, Human
aggccaaaccucug

SEQ ID NO: 2350989 - RNA, 16 nt, Human
aggccaaacucaccug

SEQ ID NO: 2350990 - RNA, 18 nt, Human
aggcauuuggcauuuauu

SEQ ID NO: 2350991 - RNA, 15 nt, Human
uggacggcaggcuca

SEQ ID NO: 2350992 - RNA, 18 nt, Human
uggacggcaggcucacug

SEQ ID NO: 2350993 - RNA, 20 nt, Human
uggacggcaggcucacugcc

SEQ ID NO: 2350994 - RNA, 18 nt, Human
aggcauuuguuugaacug

SEQ ID NO: 2350995 - RNA, 16 nt, Human
uggaccuugagaccac

SEQ ID NO: 2350996 - RNA, 17 nt, Human
uggaccucugcucugag

SEQ ID NO: 2350997 - RNA, 13 nt, Human
uggaccucugcuc

SEQ ID NO: 2350998 - RNA, 15 nt, Human
uggaccucugcucug

SEQ ID NO: 2350999 - RNA, 16 nt, Human
uggaccucugcucuga

SEQ ID NO: 2351000 - RNA, 13 nt, Human
uggacggcaggcu

SEQ ID NO: 2351001 - RNA, 22 nt, Human
uggaccuuuccugaggaagagg

SEQ ID NO: 2351002 - RNA, 18 nt, Human
uggacgagaaaacaauaa

SEQ ID NO: 2351003 - RNA, 22 nt, Human
aggccaacccaaaauaagcagg

SEQ ID NO: 2351004 - RNA, 17 nt, Human
aggccaagaaacgucuu

SEQ ID NO: 2351005 - RNA, 14 nt, Human
aggccaagaaacgu

SEQ ID NO: 2351006 - RNA, 18 nt, Human
aggccaaggugggaggau

SEQ ID NO: 2351007 - RNA, 23 nt, Human
aggccaaaggaagcacaugccuc

SEQ ID NO: 2351008 - RNA, 20 nt, Human
aggccaaaggaagcacaugc

SEQ ID NO: 2351009 - RNA, 21 nt, Human
aggccaaacuggcaaacuuca

SEQ ID NO: 2351010 - RNA, 22 nt, Human
aggccaaaccucuguucagugu

SEQ ID NO: 2351011 - RNA, 18 nt, Human
aggccaaaccucuguuca

SEQ ID NO: 2351012 - RNA, 17 nt, Human
aggccaaaccucuguuc

SEQ ID NO: 2351013 - RNA, 16 nt, Human
aggccaaaccucuguu

SEQ ID NO: 2351014 - RNA, 20 nt, Human
aggccaaacucaccugcccc

SEQ ID NO: 2351015 - RNA, 14 nt, Human
aggccaaaggaagc

SEQ ID NO: 2351016 - RNA, 15 nt, Human
aggccaaaggaagca

SEQ ID NO: 2351017 - RNA, 15 nt, Human
aggcccucgcugcca

SEQ ID NO: 2351018 - RNA, 22 nt, Human
aggcccucgcugccagcucugu

SEQ ID NO: 2351019 - RNA, 17 nt, Human
aggcccucgcugccagc

SEQ ID NO: 2351020 - RNA, 15 nt, Human
aggcccaaagccucg

SEQ ID NO: 2351021 - RNA, 13 nt, Human
aggcccaaagccu

SEQ ID NO: 2351022 - RNA, 12 nt, Human
aggcccaaagcc

SEQ ID NO: 2351023 - RNA, 15 nt, Human
aggcccucugcccac

SEQ ID NO: 2351024 - RNA, 15 nt, Human
aggcccucgggccca

SEQ ID NO: 2351025 - RNA, 16 nt, Human
aggcccucgggcccag

SEQ ID NO: 2351026 - RNA, 17 nt, Human
aggcccucgggcccagc

SEQ ID NO: 2351027 - RNA, 18 nt, Human
aggcccucgggcccagcc

SEQ ID NO: 2351028 - RNA, 13 nt, Human
aggccucagccag

SEQ ID NO: 2351029 - RNA, 19 nt, Human
aggcccucgggcccagccc

SEQ ID NO: 2351030 - RNA, 20 nt, Human
aggcccucgggcccagcccc

SEQ ID NO: 2351031 - RNA, 16 nt, Human
aggccuauaaugaagc

SEQ ID NO: 2351032 - RNA, 22 nt, Human
aggccuauaaugaagcuuuaua

SEQ ID NO: 2351033 - RNA, 13 nt, Human
aggcccucugccc

SEQ ID NO: 2351034 - RNA, 14 nt, Human
aggcccucugccca

SEQ ID NO: 2351035 - RNA, 12 nt, Human
aggccucccugu

SEQ ID NO: 2351036 - RNA, 13 nt, Human
aggccucccuguu

SEQ ID NO: 2351037 - RNA, 14 nt, Human
aggccucccuguuu

SEQ ID NO: 2351038 - RNA, 20 nt, Human
aggccucgaaaaccaucaca

SEQ ID NO: 2351039 - RNA, 21 nt, Human
aggccucucauuccagaggaa

SEQ ID NO: 2351040 - RNA, 13 nt, Human
aggccucuguguc

SEQ ID NO: 2351041 - RNA, 17 nt, Human
aggccugaggaugagcu

SEQ ID NO: 2351042 - RNA, 18 nt, Human
aggccugaggaugagcug

SEQ ID NO: 2351043 - RNA, 19 nt, Human
aggccugaggaugagcugg

SEQ ID NO: 2351044 - RNA, 20 nt, Human
aggccugaggaugagcugga

SEQ ID NO: 2351045 - RNA, 23 nt, Human
aggccugaggaugagcuggaagg

SEQ ID NO: 2351046 - RNA, 17 nt, Human
aggccuccaucucaugu

SEQ ID NO: 2351047 - RNA, 16 nt, Human
aggccucaguggacuu

SEQ ID NO: 2351048 - RNA, 15 nt, Human
aggccucaguggacu

SEQ ID NO: 2351049 - RNA, 23 nt, Human
aggccucaguggacuuuccaccc

SEQ ID NO: 2351050 - RNA, 14 nt, Human
aggccucccaaguu

SEQ ID NO: 2351051 - RNA, 13 nt, Human
aggccucagugga

SEQ ID NO: 2351052 - RNA, 15 nt, Human
aggccucagccagag

SEQ ID NO: 2351053 - RNA, 14 nt, Human
aggccucagccaga

SEQ ID NO: 2351054 - RNA, 16 nt, Human
aggccucagccagaga

SEQ ID NO: 2351055 - RNA, 13 nt, Human
aggccucccucaa

SEQ ID NO: 2351056 - RNA, 16 nt, Human
aggccucccacaguga

SEQ ID NO: 2351057 - RNA, 18 nt, Human
aggccucccacagugacu

SEQ ID NO: 2351058 - RNA, 12 nt, Human
aggccucccaca

SEQ ID NO: 2351059 - RNA, 13 nt, Human
aggccucccacag

SEQ ID NO: 2351060 - RNA, 14 nt, Human
aggccucccacagu

SEQ ID NO: 2351061 - RNA, 15 nt, Human
aggccucccacagug

SEQ ID NO: 2351062 - RNA, 22 nt, Human
aggccucccucucucuucugcu

SEQ ID NO: 2351063 - RNA, 15 nt, Human
aggccucccucucuc

SEQ ID NO: 2351064 - RNA, 15 nt, Human
aggccucccuagcca

SEQ ID NO: 2351065 - RNA, 15 nt, Human
uggcaugccuuccag

SEQ ID NO: 2351066 - RNA, 19 nt, Human
uggcaugccuuccagcacc

SEQ ID NO: 2351067 - RNA, 15 nt, Human
aggccugcucaggga

SEQ ID NO: 2351068 - RNA, 18 nt, Human
aggccugcucagggacug

SEQ ID NO: 2351069 - RNA, 21 nt, Human
aggccugccuccagggcugga

SEQ ID NO: 2351070 - RNA, 23 nt, Human
aggccugccagacggcacccacc

SEQ ID NO: 2351071 - RNA, 16 nt, Human
aggccugcccucaggg

SEQ ID NO: 2351072 - RNA, 17 nt, Human
aggccugccuccagggc

SEQ ID NO: 2351073 - RNA, 17 nt, Human
aggccugcccucaggga

SEQ ID NO: 2351074 - RNA, 22 nt, Human
aggccugcccucagggaucuug

SEQ ID NO: 2351075 - RNA, 13 nt, Human
aggccugccuguu

SEQ ID NO: 2351076 - RNA, 19 nt, Human
aggccugccuccagggcug

SEQ ID NO: 2351077 - RNA, 20 nt, Human
aggccugccuccagggcugg

SEQ ID NO: 2351078 - RNA, 17 nt, Human
uggcauggcuccagucu

SEQ ID NO: 2351079 - RNA, 16 nt, Human
uggccaaauuauuugu

SEQ ID NO: 2351080 - RNA, 18 nt, Human
uggccaaauuauuugugu

SEQ ID NO: 2351081 - RNA, 20 nt, Human
uggccaaauuauuuguguaa

SEQ ID NO: 2351082 - RNA, 22 nt, Human
uggccaacaucgugaaacccug

SEQ ID NO: 2351083 - RNA, 14 nt, Human
uggcauggccacca

SEQ ID NO: 2351084 - RNA, 16 nt, Human
uggcauggcuccaguc

SEQ ID NO: 2351085 - RNA, 15 nt, Human
uggcauggcuccagu

SEQ ID NO: 2351086 - RNA, 14 nt, Human
uggccaaaguguua

SEQ ID NO: 2351087 - RNA, 12 nt, Human
uggcaugggaau

SEQ ID NO: 2351088 - RNA, 15 nt, Human
uggcaugggaaugaa

SEQ ID NO: 2351089 - RNA, 16 nt, Human
uggccaaguucuuagu

SEQ ID NO: 2351090 - RNA, 20 nt, Human
uggccaggcuggucucgaac

SEQ ID NO: 2351091 - RNA, 23 nt, Human
uggccagggccuggaagacagag

SEQ ID NO: 2351092 - RNA, 12 nt, Human
uggccaggguga

SEQ ID NO: 2351093 - RNA, 13 nt, Human
uggccagggugag

SEQ ID NO: 2351094 - RNA, 23 nt, Human
uggccaguccaggcugccguggg

SEQ ID NO: 2351095 - RNA, 19 nt, Human
uggccagggugagagcugc

SEQ ID NO: 2351096 - RNA, 17 nt, Human
uggccaguccaggcugc

SEQ ID NO: 2351097 - RNA, 21 nt, Human
uggccaguccaggcugccgug

SEQ ID NO: 2351098 - RNA, 16 nt, Human
uggccaguccaggcug

SEQ ID NO: 2351099 - RNA, 17 nt, Human
uggccagggugagagcu

SEQ ID NO: 2351100 - RNA, 18 nt, Human
uggccagggugagagcug

SEQ ID NO: 2351101 - RNA, 15 nt, Human
uggccaggcuggucu

SEQ ID NO: 2351102 - RNA, 17 nt, Human
uggccaggcuggucuca

SEQ ID NO: 2351103 - RNA, 19 nt, Human
uggccaaggagcugcuaua

SEQ ID NO: 2351104 - RNA, 18 nt, Human
uggccaaggagcugcuau

SEQ ID NO: 2351105 - RNA, 17 nt, Human
uggccaaggagcugcua

SEQ ID NO: 2351106 - RNA, 16 nt, Human
uggccaaggagcugcu

SEQ ID NO: 2351107 - RNA, 15 nt, Human
uggccaaggagcugc

SEQ ID NO: 2351108 - RNA, 23 nt, Human
uggccaagcagggaggaagaagc

SEQ ID NO: 2351109 - RNA, 21 nt, Human
uggccccuucacuucugacca

SEQ ID NO: 2351110 - RNA, 13 nt, Human
uggccccuucacu

SEQ ID NO: 2351111 - RNA, 11 nt, Human
uggccccuuca

SEQ ID NO: 2351112 - RNA, 12 nt, Human
uggccccugggu

SEQ ID NO: 2351113 - RNA, 21 nt, Human
uggccccugcccggcugcgga

SEQ ID NO: 2351114 - RNA, 23 nt, Human
uggccaguggcuggaucugugag

SEQ ID NO: 2351115 - RNA, 16 nt, Human
uggccaguggcuggau

SEQ ID NO: 2351116 - RNA, 15 nt, Human
uggccaguggcugga

SEQ ID NO: 2351117 - RNA, 14 nt, Human
uggccaguggcugg

SEQ ID NO: 2351118 - RNA, 16 nt, Human
uggccccuucacuucu

SEQ ID NO: 2351119 - RNA, 15 nt, Human
uggcccgugacagac

SEQ ID NO: 2351120 - RNA, 18 nt, Human
uggcccgugacagacucc

SEQ ID NO: 2351121 - RNA, 18 nt, Human
uggcccucaaggccuccc

SEQ ID NO: 2351122 - RNA, 20 nt, Human
uggcccgugacagacuccug

SEQ ID NO: 2351123 - RNA, 23 nt, Human
uggcccgugacagacuccugagg

SEQ ID NO: 2351124 - RNA, 18 nt, Human
uggcccgacagccuggca

SEQ ID NO: 2351125 - RNA, 19 nt, Human
uggcccgacagccuggcac

SEQ ID NO: 2351126 - RNA, 14 nt, Human
uggcccgacagccu

SEQ ID NO: 2351127 - RNA, 15 nt, Human
uggcccgacagccug

SEQ ID NO: 2351128 - RNA, 16 nt, Human
uggcccgacagccugg

SEQ ID NO: 2351129 - RNA, 17 nt, Human
uggcccgacagccuggc

SEQ ID NO: 2351130 - RNA, 22 nt, Human
uggccggagcaaacucugcugu

SEQ ID NO: 2351131 - RNA, 15 nt, Human
uggccgggagccuga

SEQ ID NO: 2351132 - RNA, 23 nt, Human
uggccgggaccccgagccuggcu

SEQ ID NO: 2351133 - RNA, 17 nt, Human
uggccgggaccccgagc

SEQ ID NO: 2351134 - RNA, 15 nt, Human
uggccgggaccccga

SEQ ID NO: 2351135 - RNA, 17 nt, Human
uggccgcugaguggcag

SEQ ID NO: 2351136 - RNA, 19 nt, Human
uggccgcugaguggcaggg

SEQ ID NO: 2351137 - RNA, 24 nt, Human
uggccggcaaccccaguucugcuc

SEQ ID NO: 2351138 - RNA, 21 nt, Human
uggccgcgccaaauaaugucu

SEQ ID NO: 2351139 - RNA, 22 nt, Human
uggccgcgccaaauaaugucuc

SEQ ID NO: 2351140 - RNA, 23 nt, Human
uggccgcgccaaauaaugucucu

SEQ ID NO: 2351141 - RNA, 12 nt, Human
uggccgccucac

SEQ ID NO: 2351142 - RNA, 16 nt, Human
uggccgccucaccccc

SEQ ID NO: 2351143 - RNA, 18 nt, Human
uggccgccucacccccuc

SEQ ID NO: 2351144 - RNA, 21 nt, Human
uggccgcccccugccccccag

SEQ ID NO: 2351145 - RNA, 23 nt, Human
uggccgcccccugccccccagcc

SEQ ID NO: 2351146 - RNA, 19 nt, Human
uggccgaguccaagcuggg

SEQ ID NO: 2351147 - RNA, 17 nt, Human
uggccgaguccaagcug

SEQ ID NO: 2351148 - RNA, 19 nt, Human
uggcccucaaggccuccca

SEQ ID NO: 2351149 - RNA, 20 nt, Human
uggcccucaaggccucccac

SEQ ID NO: 2351150 - RNA, 21 nt, Human
uggcccucaaggccucccaca

SEQ ID NO: 2351151 - RNA, 22 nt, Human
uggcccucaaggccucccacag

SEQ ID NO: 2351152 - RNA, 13 nt, Human
uggccgcccccug

SEQ ID NO: 2351153 - RNA, 15 nt, Human
uggccgcccccugcc

SEQ ID NO: 2351154 - RNA, 17 nt, Human
uggccgcccccugcccc

SEQ ID NO: 2351155 - RNA, 22 nt, Human
aggccuggccagaugcaccagc

SEQ ID NO: 2351156 - RNA, 23 nt, Human
aggccuggccagaugcaccagcc

SEQ ID NO: 2351157 - RNA, 13 nt, Human
aggccuggccagg

SEQ ID NO: 2351158 - RNA, 14 nt, Human
aggccuggccaggc

SEQ ID NO: 2351159 - RNA, 15 nt, Human
aggccuggccaggca

SEQ ID NO: 2351160 - RNA, 23 nt, Human
aggccugggggcugggcagagga

SEQ ID NO: 2351161 - RNA, 15 nt, Human
aggccuggccagaug

SEQ ID NO: 2351162 - RNA, 16 nt, Human
aggccuggccagaugc

SEQ ID NO: 2351163 - RNA, 17 nt, Human
aggccuggccagaugca

SEQ ID NO: 2351164 - RNA, 21 nt, Human
aggccuggccagaugcaccag

SEQ ID NO: 2351165 - RNA, 17 nt, Human
uggccuggccaggagcu

SEQ ID NO: 2351166 - RNA, 16 nt, Human
uggccuggccaggagc

SEQ ID NO: 2351167 - RNA, 15 nt, Human
uggccuggccaggag

SEQ ID NO: 2351168 - RNA, 13 nt, Human
uggccuggccagg

SEQ ID NO: 2351169 - RNA, 21 nt, Human
uggccuggccaggagcucuuc

SEQ ID NO: 2351170 - RNA, 18 nt, Human
uggccuggccaggagcuc

SEQ ID NO: 2351171 - RNA, 21 nt, Human
uggccuggaucuccccacucu

SEQ ID NO: 2351172 - RNA, 12 nt, Human
uggccuggccag

SEQ ID NO: 2351173 - RNA, 18 nt, Human
uggccuggcacacaucag

SEQ ID NO: 2351174 - RNA, 12 nt, Human
uggccuggcaca

SEQ ID NO: 2351175 - RNA, 16 nt, Human
uggccuggcacacauc

SEQ ID NO: 2351176 - RNA, 19 nt, Human
uggccggcaaccccaguuc

SEQ ID NO: 2351177 - RNA, 16 nt, Human
uggccuggaggugggg

SEQ ID NO: 2351178 - RNA, 18 nt, Human
uggccuggaggugggguu

SEQ ID NO: 2351179 - RNA, 22 nt, Human
uggccuggaggugggguuggga

SEQ ID NO: 2351180 - RNA, 12 nt, Human
uggccuggaucu

SEQ ID NO: 2351181 - RNA, 14 nt, Human
uggccuggaucucc

SEQ ID NO: 2351182 - RNA, 14 nt, Human
uggccucugcacuc

SEQ ID NO: 2351183 - RNA, 15 nt, Human
uggccucugcacucc

SEQ ID NO: 2351184 - RNA, 17 nt, Human
uggccucugcacucccc

SEQ ID NO: 2351185 - RNA, 21 nt, Human
ugcauucugccgugugcccuc

SEQ ID NO: 2351186 - RNA, 20 nt, Human
ugcauuuaaaagauacaguu

SEQ ID NO: 2351187 - RNA, 20 nt, Human
ugcauucacccagacagcuc

SEQ ID NO: 2351188 - RNA, 14 nt, Human
ugcauucacccaga

SEQ ID NO: 2351189 - RNA, 14 nt, Human
ugcauucaaauuaa

SEQ ID NO: 2351190 - RNA, 12 nt, Human
ugcauucaaauu

SEQ ID NO: 2351191 - RNA, 16 nt, Human
ugcauucacccagaca

SEQ ID NO: 2351192 - RNA, 14 nt, Human
ugcauucccagugg

SEQ ID NO: 2351193 - RNA, 23 nt, Human
ugcauuccugauaugauuuaaaa

SEQ ID NO: 2351194 - RNA, 12 nt, Human
ugcauucuagua

SEQ ID NO: 2351195 - RNA, 24 nt, Human
ugcauuuaaauacagucuuccauu

SEQ ID NO: 2351196 - RNA, 22 nt, Human
ugcauuuaaauacagucuucca

SEQ ID NO: 2351197 - RNA, 16 nt, Human
ugcauuuaaauacagu

SEQ ID NO: 2351198 - RNA, 19 nt, Human
ugcauuuaugagcucuuca

SEQ ID NO: 2351199 - RNA, 18 nt, Human
ugcauuugaggucuguuc

SEQ ID NO: 2351200 - RNA, 19 nt, Human
ugcauuugaggucuguucu

SEQ ID NO: 2351201 - RNA, 17 nt, Human
agcggaacaaggaguca

SEQ ID NO: 2351202 - RNA, 22 nt, Human
agcggaacaaggagucagacau

SEQ ID NO: 2351203 - RNA, 19 nt, Human
agcggacaucagcugguca

SEQ ID NO: 2351204 - RNA, 23 nt, Human
agcggaaagcagcucaaaggcac

SEQ ID NO: 2351205 - RNA, 17 nt, Human
agcggaaagcagcucaa

SEQ ID NO: 2351206 - RNA, 14 nt, Human
agcggaaagcagcu

SEQ ID NO: 2351207 - RNA, 13 nt, Human
agcggaaagcagc

SEQ ID NO: 2351208 - RNA, 22 nt, Human
agcggaaaagguuuuauuuugu

SEQ ID NO: 2351209 - RNA, 17 nt, Human
agcgcuuucuggaaaag

SEQ ID NO: 2351210 - RNA, 21 nt, Human
agcgcuuucuggaaaagagga

SEQ ID NO: 2351211 - RNA, 22 nt, Human
agcgcuggccgggaccccgagc

SEQ ID NO: 2351212 - RNA, 16 nt, Human
agcgcuuucuggaaaa

SEQ ID NO: 2351213 - RNA, 21 nt, Human
agcgcugccgcaccccagagu

SEQ ID NO: 2351214 - RNA, 20 nt, Human
agcgcugccgcaccccagag

SEQ ID NO: 2351215 - RNA, 18 nt, Human
agcgccaagcaaccuggg

SEQ ID NO: 2351216 - RNA, 16 nt, Human
agcgcuggccgggacc

SEQ ID NO: 2351217 - RNA, 19 nt, Human
agcgcagguuuaguuuacu

SEQ ID NO: 2351218 - RNA, 16 nt, Human
agcgccaagcaaccug

SEQ ID NO: 2351219 - RNA, 21 nt, Human
agcgccaagcaaccugggucc

SEQ ID NO: 2351220 - RNA, 19 nt, Human
agcgcaccugcccccuggu

SEQ ID NO: 2351221 - RNA, 18 nt, Human
agcgcaccugcccccugg

SEQ ID NO: 2351222 - RNA, 21 nt, Human
agcgcaccugcccccuggugg

SEQ ID NO: 2351223 - RNA, 17 nt, Human
agcgcaccugcccccug

SEQ ID NO: 2351224 - RNA, 14 nt, Human
agcgcaccugcccc

SEQ ID NO: 2351225 - RNA, 12 nt, Human
agcgcaccugcc

SEQ ID NO: 2351226 - RNA, 21 nt, Human
agccuugcccggauucuggga

SEQ ID NO: 2351227 - RNA, 19 nt, Human
agccuugccagagauccaa

SEQ ID NO: 2351228 - RNA, 17 nt, Human
agccuugccagagaucc

SEQ ID NO: 2351229 - RNA, 15 nt, Human
agccuugccagagau

SEQ ID NO: 2351230 - RNA, 22 nt, Human
agcgauucuucugcuucagccu

SEQ ID NO: 2351231 - RNA, 23 nt, Human
agccuugaccauucuccaccugc

SEQ ID NO: 2351232 - RNA, 14 nt, Human
agccuugccagaga

SEQ ID NO: 2351233 - RNA, 13 nt, Human
agccuugccagag

SEQ ID NO: 2351234 - RNA, 22 nt, Human
agccuugaacuuugaccucugc

SEQ ID NO: 2351235 - RNA, 16 nt, Human
agccuugaacuuugac

SEQ ID NO: 2351236 - RNA, 22 nt, Human
agccuugaccauucuccaccug

SEQ ID NO: 2351237 - RNA, 22 nt, Human
agccuuccccuugcccagggcu

SEQ ID NO: 2351238 - RNA, 12 nt, Human
agccuuccucca

SEQ ID NO: 2351239 - RNA, 19 nt, Human
agccuuccuccacauccuu

SEQ ID NO: 2351240 - RNA, 21 nt, Human
agccuuccuccacauccuuuc

SEQ ID NO: 2351241 - RNA, 23 nt, Human
agccuuccuccacauccuuucua

SEQ ID NO: 2351242 - RNA, 14 nt, Human
agccuuccucugca

SEQ ID NO: 2351243 - RNA, 17 nt, Human
agccuuccucugcagcu

SEQ ID NO: 2351244 - RNA, 20 nt, Human
agccuuccccuugcccaggg

SEQ ID NO: 2351245 - RNA, 19 nt, Human
agccuucccccucccaggg

SEQ ID NO: 2351246 - RNA, 21 nt, Human
ugcagcugaccucuguugucc

SEQ ID NO: 2351247 - RNA, 15 nt, Human
agccuugaacuuuga

SEQ ID NO: 2351248 - RNA, 12 nt, Human
agccuucucugu

SEQ ID NO: 2351249 - RNA, 23 nt, Human
agccuuccucugcagcugaccuc

SEQ ID NO: 2351250 - RNA, 18 nt, Human
agccuuccucugcagcug

SEQ ID NO: 2351251 - RNA, 19 nt, Human
agccuuccucugcagcuga

SEQ ID NO: 2351252 - RNA, 21 nt, Human
agccuuccucugcagcugacc

SEQ ID NO: 2351253 - RNA, 22 nt, Human
agccuuccucugcagcugaccu

SEQ ID NO: 2351254 - RNA, 15 nt, Human
ugcagcugaccucug

SEQ ID NO: 2351255 - RNA, 20 nt, Human
ugcagcugaccucuguuguc

SEQ ID NO: 2351256 - RNA, 18 nt, Human
agccuuccagggguggga

SEQ ID NO: 2351257 - RNA, 20 nt, Human
agcgggaauggcagcugcca

SEQ ID NO: 2351258 - RNA, 21 nt, Human
agcggcuggacuuggagguag

SEQ ID NO: 2351259 - RNA, 23 nt, Human
agcggcuggcagcccaccccuca

SEQ ID NO: 2351260 - RNA, 19 nt, Human
agcggggacagcuccuucu

SEQ ID NO: 2351261 - RNA, 20 nt, Human
agcggggacagcuccuucug

SEQ ID NO: 2351262 - RNA, 19 nt, Human
agcggggcgaagcccaggc

SEQ ID NO: 2351263 - RNA, 21 nt, Human
agcggggccccagggcuaccc

SEQ ID NO: 2351264 - RNA, 14 nt, Human
agcgggaccugugg

SEQ ID NO: 2351265 - RNA, 15 nt, Human
agcgggaccuguggc

SEQ ID NO: 2351266 - RNA, 16 nt, Human
agcgggaccuguggcu

SEQ ID NO: 2351267 - RNA, 22 nt, Human
agcggggacagcuccuucuguc

SEQ ID NO: 2351268 - RNA, 13 nt, Human
agcgucccagucu

SEQ ID NO: 2351269 - RNA, 16 nt, Human
agcgucccagucucug

SEQ ID NO: 2351270 - RNA, 18 nt, Human
agcgucccagucucuggc

SEQ ID NO: 2351271 - RNA, 17 nt, Human
agcguccuccucuguga

SEQ ID NO: 2351272 - RNA, 16 nt, Human
agcguccuccucugug

SEQ ID NO: 2351273 - RNA, 15 nt, Human
agcguccuccucugu

SEQ ID NO: 2351274 - RNA, 19 nt, Human
agcgucccagucucuggca

SEQ ID NO: 2351275 - RNA, 18 nt, Human
ugccagcuuaucucaggg

SEQ ID NO: 2351276 - RNA, 20 nt, Human
ugccagcuuuuccucccuug

SEQ ID NO: 2351277 - RNA, 20 nt, Human
ugccagucccccugccccag

SEQ ID NO: 2351278 - RNA, 16 nt, Human
ugccaguccuagcugc

SEQ ID NO: 2351279 - RNA, 19 nt, Human
ugccagcuuuuccucccuu

SEQ ID NO: 2351280 - RNA, 17 nt, Human
ugccaguccuagcugca

SEQ ID NO: 2351281 - RNA, 12 nt, Human
ugccagucgcgc

SEQ ID NO: 2351282 - RNA, 16 nt, Human
ugccagucgcgcugcc

SEQ ID NO: 2351283 - RNA, 17 nt, Human
ugccagucgcgcugccu

SEQ ID NO: 2351284 - RNA, 18 nt, Human
ugccagucgcgcugccug

SEQ ID NO: 2351285 - RNA, 15 nt, Human
ugccagugccuuacc

SEQ ID NO: 2351286 - RNA, 13 nt, Human
ugccagugccuua

SEQ ID NO: 2351287 - RNA, 11 nt, Human
ugccagugccu

SEQ ID NO: 2351288 - RNA, 16 nt, Human
ugccagugacacuucc

SEQ ID NO: 2351289 - RNA, 13 nt, Human
agcggcuggcagc

SEQ ID NO: 2351290 - RNA, 16 nt, Human
ugccagugacagacag

SEQ ID NO: 2351291 - RNA, 23 nt, Human
ugccagucgcgcugccugugugg

SEQ ID NO: 2351292 - RNA, 23 nt, Human
ugccagucucacugugggaaggc

SEQ ID NO: 2351293 - RNA, 19 nt, Human
ugccagucgcgcugccugu

SEQ ID NO: 2351294 - RNA, 20 nt, Human
ugccagucgcgcugccugug

SEQ ID NO: 2351295 - RNA, 21 nt, Human
ugccagucgcgcugccugugu

SEQ ID NO: 2351296 - RNA, 22 nt, Human
ugccagucgcgcugccugugug

SEQ ID NO: 2351297 - RNA, 17 nt, Human
ugccagugacagacagg

SEQ ID NO: 2351298 - RNA, 19 nt, Human
ugccagugacagacaggcu

SEQ ID NO: 2351299 - RNA, 20 nt, Human
ugccagugacagacaggcuc

SEQ ID NO: 2351300 - RNA, 22 nt, Human
ugccagugacagacaggcucuu

SEQ ID NO: 2351301 - RNA, 15 nt, Human
ugccagccagcagcc

SEQ ID NO: 2351302 - RNA, 22 nt, Human
ugccagcucuguaucaggaccc

SEQ ID NO: 2351303 - RNA, 23 nt, Human
ugccagcucuguaucaggaccca

SEQ ID NO: 2351304 - RNA, 15 nt, Human
ugccagcugcacuga

SEQ ID NO: 2351305 - RNA, 23 nt, Human
ugccagcaaugacaucucagggg

SEQ ID NO: 2351306 - RNA, 12 nt, Human
ugccagccagca

SEQ ID NO: 2351307 - RNA, 11 nt, Human
ugccagccagc

SEQ ID NO: 2351308 - RNA, 11 nt, Human
ugccagccaca

SEQ ID NO: 2351309 - RNA, 21 nt, Human
ugccagaugccuuuauggcug

SEQ ID NO: 2351310 - RNA, 21 nt, Human
ugccagaggugggcagguggu

SEQ ID NO: 2351311 - RNA, 11 nt, Human
ugccagaugcu

SEQ ID NO: 2351312 - RNA, 12 nt, Human
ugccagaugcug

SEQ ID NO: 2351313 - RNA, 14 nt, Human
ugccagaugcugau

SEQ ID NO: 2351314 - RNA, 16 nt, Human
ugccagaugcugaugu

SEQ ID NO: 2351315 - RNA, 17 nt, Human
ugccagaugcugauguu

SEQ ID NO: 2351316 - RNA, 21 nt, Human
ugccagaugcugauguucagu

SEQ ID NO: 2351317 - RNA, 15 nt, Human
ugccagaggugggca

SEQ ID NO: 2351318 - RNA, 16 nt, Human
ugccagaggugggcag

SEQ ID NO: 2351319 - RNA, 17 nt, Human
ugccagaggugggcagg

SEQ ID NO: 2351320 - RNA, 18 nt, Human
ugccagaggugggcaggu

SEQ ID NO: 2351321 - RNA, 19 nt, Human
ugccagaggugggcaggug

SEQ ID NO: 2351322 - RNA, 20 nt, Human
ugccagaggugggcaggugg

SEQ ID NO: 2351323 - RNA, 22 nt, Human
ugccagaugcugauguucagug

SEQ ID NO: 2351324 - RNA, 13 nt, Human
ugccagcaaagcc

SEQ ID NO: 2351325 - RNA, 14 nt, Human
ugccagcaaagccc

SEQ ID NO: 2351326 - RNA, 15 nt, Human
ugccagcaaagcccc

SEQ ID NO: 2351327 - RNA, 16 nt, Human
ugccagcaaagcccca

SEQ ID NO: 2351328 - RNA, 24 nt, Human
ugccagcaaagccccaugcuggag

SEQ ID NO: 2351329 - RNA, 11 nt, Human
ugccagcaacu

SEQ ID NO: 2351330 - RNA, 12 nt, Human
ugccagcaacug

SEQ ID NO: 2351331 - RNA, 13 nt, Human
ugccagcaacuga

SEQ ID NO: 2351332 - RNA, 14 nt, Human
ugccagcaacugaa

SEQ ID NO: 2351333 - RNA, 15 nt, Human
ugccagcaacugaau

SEQ ID NO: 2351334 - RNA, 16 nt, Human
ugccagcaacugaaua

SEQ ID NO: 2351335 - RNA, 17 nt, Human
ugccagcaacugaauaa

SEQ ID NO: 2351336 - RNA, 18 nt, Human
ugccagcaacugaauaaa

SEQ ID NO: 2351337 - RNA, 22 nt, Human
ugccagcaaugacaucucaggg

SEQ ID NO: 2351338 - RNA, 13 nt, Human
ugccacugccucu

SEQ ID NO: 2351339 - RNA, 17 nt, Human
ugccacugccucuuccu

SEQ ID NO: 2351340 - RNA, 21 nt, Human
ugccacugcccgagcuggugc

SEQ ID NO: 2351341 - RNA, 20 nt, Human
ugccacugcccgagcuggug

SEQ ID NO: 2351342 - RNA, 20 nt, Human
ugcauuuaugagcucuucau

SEQ ID NO: 2351343 - RNA, 21 nt, Human
ugcauuugaggucuguucuuu

SEQ ID NO: 2351344 - RNA, 20 nt, Human
ugcauuugaggucuguucuu

SEQ ID NO: 2351345 - RNA, 21 nt, Human
ugccagagauggagguucucu

SEQ ID NO: 2351346 - RNA, 15 nt, Human
ugccagagauggagg

SEQ ID NO: 2351347 - RNA, 22 nt, Human
ugccacugcccgagcuggugca

SEQ ID NO: 2351348 - RNA, 14 nt, Human
ugccagagauccaa

SEQ ID NO: 2351349 - RNA, 20 nt, Human
ugccacugccucuuccuccc

SEQ ID NO: 2351350 - RNA, 18 nt, Human
ugccacugccucuuccuc

SEQ ID NO: 2351351 - RNA, 19 nt, Human
ugccacugccucuuccucc

SEQ ID NO: 2351352 - RNA, 12 nt, Human
ugccccauucuu

SEQ ID NO: 2351353 - RNA, 18 nt, Human
ugccccauucuuuuguaa

SEQ ID NO: 2351354 - RNA, 23 nt, Human
ugccccaugccuguccagccugg

SEQ ID NO: 2351355 - RNA, 15 nt, Human
ugccccaugccuguc

SEQ ID NO: 2351356 - RNA, 21 nt, Human
ugcccccaccacggccacugg

SEQ ID NO: 2351357 - RNA, 17 nt, Human
ugccccccauccuggcc

SEQ ID NO: 2351358 - RNA, 16 nt, Human
ugccccauuuauccac

SEQ ID NO: 2351359 - RNA, 12 nt, Human
ugccccaugccu

SEQ ID NO: 2351360 - RNA, 20 nt, Human
ugcccaggagagccagcccu

SEQ ID NO: 2351361 - RNA, 19 nt, Human
ugcccaggagagccagccc

SEQ ID NO: 2351362 - RNA, 21 nt, Human
ugccccauccuccagcaggga

SEQ ID NO: 2351363 - RNA, 20 nt, Human
ugccccauccuccagcaggg

SEQ ID NO: 2351364 - RNA, 16 nt, Human
ugccccauucaacauc

SEQ ID NO: 2351365 - RNA, 15 nt, Human
ugcccccggcccccu

SEQ ID NO: 2351366 - RNA, 17 nt, Human
ugcccccggcccccugg

SEQ ID NO: 2351367 - RNA, 18 nt, Human
ugcccccggcccccuggu

SEQ ID NO: 2351368 - RNA, 11 nt, Human
ugcccccuccu

SEQ ID NO: 2351369 - RNA, 21 nt, Human
ugcccccggcccccuggucuc

SEQ ID NO: 2351370 - RNA, 12 nt, Human
ugcccccuccuc

SEQ ID NO: 2351371 - RNA, 14 nt, Human
ugcccccuccucuc

SEQ ID NO: 2351372 - RNA, 16 nt, Human
ugcccccuccucuccc

SEQ ID NO: 2351373 - RNA, 17 nt, Human
ugcccccuccucuccca

SEQ ID NO: 2351374 - RNA, 20 nt, Human
ugcccccuccucucccaucc

SEQ ID NO: 2351375 - RNA, 21 nt, Human
ugcccccuccucucccauccc

SEQ ID NO: 2351376 - RNA, 13 nt, Human
ugcccccucgugc

SEQ ID NO: 2351377 - RNA, 15 nt, Human
ugcccccucgugcca

SEQ ID NO: 2351378 - RNA, 14 nt, Human
ugcccccggccccc

SEQ ID NO: 2351379 - RNA, 23 nt, Human
ugccccccucaaaccuccucuuc

SEQ ID NO: 2351380 - RNA, 18 nt, Human
ugccccccuugccagaca

SEQ ID NO: 2351381 - RNA, 23 nt, Human
ugccccccauccuggcccaucag

SEQ ID NO: 2351382 - RNA, 20 nt, Human
ugccccccucaaaccuccuc

SEQ ID NO: 2351383 - RNA, 22 nt, Human
ugccccccucaaaccuccucuu

SEQ ID NO: 2351384 - RNA, 18 nt, Human
ugccccccauccuggccc

SEQ ID NO: 2351385 - RNA, 19 nt, Human
ugccccccauccuggccca

SEQ ID NO: 2351386 - RNA, 20 nt, Human
ugccccccauccuggcccau

SEQ ID NO: 2351387 - RNA, 21 nt, Human
ugccccccauccuggcccauc

SEQ ID NO: 2351388 - RNA, 15 nt, Human
ugccccgccuccccg

SEQ ID NO: 2351389 - RNA, 13 nt, Human
ugccccggccacc

SEQ ID NO: 2351390 - RNA, 14 nt, Human
ugccccggccaccu

SEQ ID NO: 2351391 - RNA, 13 nt, Human
ugccccgcccagc

SEQ ID NO: 2351392 - RNA, 23 nt, Human
ugcccccuuucagaugucuucug

SEQ ID NO: 2351393 - RNA, 22 nt, Human
ugccccgcccccaguccccacc

SEQ ID NO: 2351394 - RNA, 23 nt, Human
ugccccgaacauguuuuucuucu

SEQ ID NO: 2351395 - RNA, 20 nt, Human
ugcccuaaaguguauuuuuu

SEQ ID NO: 2351396 - RNA, 15 nt, Human
ugccccggccaccuc

SEQ ID NO: 2351397 - RNA, 16 nt, Human
ugccccggccaccucu

SEQ ID NO: 2351398 - RNA, 17 nt, Human
ugccccggccaccucug

SEQ ID NO: 2351399 - RNA, 18 nt, Human
ugccccggccaccucugc

SEQ ID NO: 2351400 - RNA, 23 nt, Human
ugccccggccaccucugcggacc

SEQ ID NO: 2351401 - RNA, 21 nt, Human
ugccccggccccggccccagc

SEQ ID NO: 2351402 - RNA, 22 nt, Human
ugccccggccccggccccagcc

SEQ ID NO: 2351403 - RNA, 23 nt, Human
ugccccggccccggccccagcca

SEQ ID NO: 2351404 - RNA, 18 nt, Human
ugcccccucugcccugcg

SEQ ID NO: 2351405 - RNA, 16 nt, Human
ugcccccucgugccag

SEQ ID NO: 2351406 - RNA, 17 nt, Human
ugcccccucgugccagu

SEQ ID NO: 2351407 - RNA, 18 nt, Human
ugcccccucgugccaguc

SEQ ID NO: 2351408 - RNA, 18 nt, Human
ugcccccugaaacuuauu

SEQ ID NO: 2351409 - RNA, 16 nt, Human
ugcccccuuucagaug

SEQ ID NO: 2351410 - RNA, 18 nt, Human
ugcccccuuucagauguc

SEQ ID NO: 2351411 - RNA, 21 nt, Human
ugcccccuuucagaugucuuc

SEQ ID NO: 2351412 - RNA, 22 nt, Human
ugcccccuuucagaugucuucu

SEQ ID NO: 2351413 - RNA, 17 nt, Human
ugcccccucugcccugc

SEQ ID NO: 2351414 - RNA, 16 nt, Human
ugcccccucugcccug

SEQ ID NO: 2351415 - RNA, 15 nt, Human
ugcccccucugcccu

SEQ ID NO: 2351416 - RNA, 14 nt, Human
ugcccccucugccc

SEQ ID NO: 2351417 - RNA, 15 nt, Human
ugcccaacaccagcc

SEQ ID NO: 2351418 - RNA, 16 nt, Human
ugcccaacaccagccc

SEQ ID NO: 2351419 - RNA, 17 nt, Human
ugcccaacaccagcccc

SEQ ID NO: 2351420 - RNA, 14 nt, Human
ugcccaacaccagc

SEQ ID NO: 2351421 - RNA, 21 nt, Human
ugcccaaagugcuuccaaggc

SEQ ID NO: 2351422 - RNA, 18 nt, Human
ugcccaaagucuguguga

SEQ ID NO: 2351423 - RNA, 19 nt, Human
ugcccaaaaauaugguuga

SEQ ID NO: 2351424 - RNA, 17 nt, Human
ugcccaaagaugcagcc

SEQ ID NO: 2351425 - RNA, 20 nt, Human
ugcccaaagaugcagccggu

SEQ ID NO: 2351426 - RNA, 13 nt, Human
ugcccagccccuu

SEQ ID NO: 2351427 - RNA, 12 nt, Human
ugcccagccccu

SEQ ID NO: 2351428 - RNA, 18 nt, Human
ugcccaacaccagccccu

SEQ ID NO: 2351429 - RNA, 19 nt, Human
ugcccaacaccagccccug

SEQ ID NO: 2351430 - RNA, 21 nt, Human
ugcccaacaccagccccugcc

SEQ ID NO: 2351431 - RNA, 22 nt, Human
ugcccaacaccagccccugccc

SEQ ID NO: 2351432 - RNA, 16 nt, Human
ugcccagccccuucug

SEQ ID NO: 2351433 - RNA, 17 nt, Human
ugcccagccccuucuga

SEQ ID NO: 2351434 - RNA, 17 nt, Human
ugcccagcucagagggu

SEQ ID NO: 2351435 - RNA, 22 nt, Human
ugcccagcuauaccugugccuc

SEQ ID NO: 2351436 - RNA, 21 nt, Human
ugcccagcuauaccugugccu

SEQ ID NO: 2351437 - RNA, 20 nt, Human
ugcccagcuauaccugugcc

SEQ ID NO: 2351438 - RNA, 19 nt, Human
ugcccaacccuucccucac

SEQ ID NO: 2351439 - RNA, 14 nt, Human
ugcccagcuagcug

SEQ ID NO: 2351440 - RNA, 18 nt, Human
ugcccagcuauaccugug

SEQ ID NO: 2351441 - RNA, 23 nt, Human
ugcccaacaccagccccugcccc

SEQ ID NO: 2351442 - RNA, 20 nt, Human
ugcccagcuagcugcagagc

SEQ ID NO: 2351443 - RNA, 13 nt, Human
ugcccagcucucg

SEQ ID NO: 2351444 - RNA, 21 nt, Human
ugcccagcuagcugcagagcc

SEQ ID NO: 2351445 - RNA, 13 nt, Human
ugcccagcuuggg

SEQ ID NO: 2351446 - RNA, 14 nt, Human
ugcccagcuugggc

SEQ ID NO: 2351447 - RNA, 16 nt, Human
ugcccagcuugggccc

SEQ ID NO: 2351448 - RNA, 18 nt, Human
ugcccagcuugggcccag

SEQ ID NO: 2351449 - RNA, 20 nt, Human
ugcccagcuugggcccagcu

SEQ ID NO: 2351450 - RNA, 21 nt, Human
ugcccagcuugggcccagcug

SEQ ID NO: 2351451 - RNA, 23 nt, Human
ugcccagcuugggcccagcuggg

SEQ ID NO: 2351452 - RNA, 21 nt, Human
ugcccaggacggggccggcca

SEQ ID NO: 2351453 - RNA, 22 nt, Human
ugcccaggacggggccggccag

SEQ ID NO: 2351454 - RNA, 21 nt, Human
ugcccaggagagccagcccuc

SEQ ID NO: 2351455 - RNA, 18 nt, Human
ugcccaggagagccagcc

SEQ ID NO: 2351456 - RNA, 17 nt, Human
ugcccaggagagccagc

SEQ ID NO: 2351457 - RNA, 16 nt, Human
ugcccaggagagccag

SEQ ID NO: 2351458 - RNA, 15 nt, Human
ugcccaggccccugc

SEQ ID NO: 2351459 - RNA, 17 nt, Human
ugcccaggccccugcca

SEQ ID NO: 2351460 - RNA, 18 nt, Human
ugcccaggccccugccac

SEQ ID NO: 2351461 - RNA, 17 nt, Human
agcuacccgcagaguuc

SEQ ID NO: 2351462 - RNA, 19 nt, Human
agcuacagguuacaacaga

SEQ ID NO: 2351463 - RNA, 20 nt, Human
agcuacagguuacaacagau

SEQ ID NO: 2351464 - RNA, 22 nt, Human
agcuacagguuacaacagauuu

SEQ ID NO: 2351465 - RNA, 21 nt, Human
agcuaggccuggccagaugca

SEQ ID NO: 2351466 - RNA, 21 nt, Human
agcuacagguuacaacagauu

SEQ ID NO: 2351467 - RNA, 22 nt, Human
agcuacaggaagcaccccaugc

SEQ ID NO: 2351468 - RNA, 14 nt, Human
agcuacaggaagca

SEQ ID NO: 2351469 - RNA, 12 nt, Human
agcuacagguua

SEQ ID NO: 2351470 - RNA, 13 nt, Human
agcuacagguuac

SEQ ID NO: 2351471 - RNA, 14 nt, Human
agcuacagguuaca

SEQ ID NO: 2351472 - RNA, 18 nt, Human
agcuacagguuacaacag

SEQ ID NO: 2351473 - RNA, 23 nt, Human
agcgugaaggccgagaagcaaga

SEQ ID NO: 2351474 - RNA, 22 nt, Human
agcgugagacgccaccauuccu

SEQ ID NO: 2351475 - RNA, 22 nt, Human
agcgugaaggccgagaagcaag

SEQ ID NO: 2351476 - RNA, 19 nt, Human
agcguccuccucugugacc

SEQ ID NO: 2351477 - RNA, 17 nt, Human
agcuaucucucagugaa

SEQ ID NO: 2351478 - RNA, 16 nt, Human
agcuauccuggcucuu

SEQ ID NO: 2351479 - RNA, 22 nt, Human
agcuaucuggucaaccuccugg

SEQ ID NO: 2351480 - RNA, 17 nt, Human
agcuaucguaaaauuaa

SEQ ID NO: 2351481 - RNA, 20 nt, Human
agcuauguuauauugaaaaa

SEQ ID NO: 2351482 - RNA, 15 nt, Human
agcuauuacugucug

SEQ ID NO: 2351483 - RNA, 20 nt, Human
agcuauuacugucugguuuu

SEQ ID NO: 2351484 - RNA, 21 nt, Human
agcuauuacugucugguuuua

SEQ ID NO: 2351485 - RNA, 14 nt, Human
agcuauuagccagg

SEQ ID NO: 2351486 - RNA, 18 nt, Human
agcuauuagccaggauca

SEQ ID NO: 2351487 - RNA, 22 nt, Human
agcuauguuauauugaaaaaau

SEQ ID NO: 2351488 - RNA, 18 nt, Human
agcuauguuauauugaaa

SEQ ID NO: 2351489 - RNA, 19 nt, Human
agcuauaucuauauauaau

SEQ ID NO: 2351490 - RNA, 17 nt, Human
agcuaucaagugugcuu

SEQ ID NO: 2351491 - RNA, 22 nt, Human
agcuauauccauguacuguagu

SEQ ID NO: 2351492 - RNA, 20 nt, Human
agcuauauccauguacugua

SEQ ID NO: 2351493 - RNA, 15 nt, Human
agcuauaucuauaua

SEQ ID NO: 2351494 - RNA, 17 nt, Human
agcuauaucuauauaua

SEQ ID NO: 2351495 - RNA, 14 nt, Human
agcuaucaggaaca

SEQ ID NO: 2351496 - RNA, 22 nt, Human
agcuaucaagugugcuuuagcu

SEQ ID NO: 2351497 - RNA, 23 nt, Human
agcuaucaagugugcuuuagcuu

SEQ ID NO: 2351498 - RNA, 15 nt, Human
agcuauccuggcucu

SEQ ID NO: 2351499 - RNA, 20 nt, Human
agcuaucagaagaccacaaa

SEQ ID NO: 2351500 - RNA, 17 nt, Human
agcuauauccauguacu

SEQ ID NO: 2351501 - RNA, 18 nt, Human
agcuaguucguagcuuuc

SEQ ID NO: 2351502 - RNA, 17 nt, Human
agcuaguucguagcuuu

SEQ ID NO: 2351503 - RNA, 19 nt, Human
agcuaguggcuucaaaaua

SEQ ID NO: 2351504 - RNA, 14 nt, Human
agcucaggaccagg

SEQ ID NO: 2351505 - RNA, 20 nt, Human
agcuauuagccaggaucaug

SEQ ID NO: 2351506 - RNA, 22 nt, Human
agcuauuagccaggaucauggu

SEQ ID NO: 2351507 - RNA, 18 nt, Human
agcucaggaccugggacc

SEQ ID NO: 2351508 - RNA, 18 nt, Human
agcucaggaccaggcaau

SEQ ID NO: 2351509 - RNA, 19 nt, Human
agcuauucaguaauaacuc

SEQ ID NO: 2351510 - RNA, 12 nt, Human
agcucagggccu

SEQ ID NO: 2351511 - RNA, 13 nt, Human
agcucagggccug

SEQ ID NO: 2351512 - RNA, 17 nt, Human
agcucaggaggcuugga

SEQ ID NO: 2351513 - RNA, 13 nt, Human
agcucaggaucuc

SEQ ID NO: 2351514 - RNA, 14 nt, Human
agcucagggccugg

SEQ ID NO: 2351515 - RNA, 19 nt, Human
agcucagggccuggcucag

SEQ ID NO: 2351516 - RNA, 20 nt, Human
agcucagggccuggcucagg

SEQ ID NO: 2351517 - RNA, 14 nt, Human
agcucagggcuuca

SEQ ID NO: 2351518 - RNA, 15 nt, Human
agcucagggcuucau

SEQ ID NO: 2351519 - RNA, 17 nt, Human
ugccauuugcacccucc

SEQ ID NO: 2351520 - RNA, 16 nt, Human
ugccauuugcacccuc

SEQ ID NO: 2351521 - RNA, 23 nt, Human
agcuccaagaccuguugguucca

SEQ ID NO: 2351522 - RNA, 21 nt, Human
ugccauuugcacccuccgccu

SEQ ID NO: 2351523 - RNA, 19 nt, Human
ugccauuugcacccuccgc

SEQ ID NO: 2351524 - RNA, 22 nt, Human
ugccauuugcacccuccgccuu

SEQ ID NO: 2351525 - RNA, 16 nt, Human
agcuccaagcucccag

SEQ ID NO: 2351526 - RNA, 22 nt, Human
ugccauuuaaagcuuauuaaaa

SEQ ID NO: 2351527 - RNA, 17 nt, Human
agcucaggugucccugc

SEQ ID NO: 2351528 - RNA, 22 nt, Human
agcuccaaccugcaaagaucug

SEQ ID NO: 2351529 - RNA, 10 nt, Human
agcucaggug

SEQ ID NO: 2351530 - RNA, 16 nt, Human
agcucaggugggcgug

SEQ ID NO: 2351531 - RNA, 15 nt, Human
agcuccaagcuccca

SEQ ID NO: 2351532 - RNA, 15 nt, Human
agcuccaagccccau

SEQ ID NO: 2351533 - RNA, 20 nt, Human
agcuccaagaccuguugguu

SEQ ID NO: 2351534 - RNA, 22 nt, Human
agcuccaagaccuguugguucc

SEQ ID NO: 2351535 - RNA, 18 nt, Human
ugcccuacagaggucucu

SEQ ID NO: 2351536 - RNA, 23 nt, Human
ugcccuaaugcgcaggcuggccc

SEQ ID NO: 2351537 - RNA, 20 nt, Human
ugcccuccaucccgacaugg

SEQ ID NO: 2351538 - RNA, 12 nt, Human
ugcccucccauc

SEQ ID NO: 2351539 - RNA, 15 nt, Human
ugcccucccaucccg

SEQ ID NO: 2351540 - RNA, 15 nt, Human
ugcccuccccagagc

SEQ ID NO: 2351541 - RNA, 17 nt, Human
ugcccuccaucccgaca

SEQ ID NO: 2351542 - RNA, 14 nt, Human
ugcccuccaucccg

SEQ ID NO: 2351543 - RNA, 13 nt, Human
ugcccuccauccc

SEQ ID NO: 2351544 - RNA, 21 nt, Human
ugcccuccagcucuuuccucc

SEQ ID NO: 2351545 - RNA, 20 nt, Human
ugcccuaaugcgcaggcugg

SEQ ID NO: 2351546 - RNA, 19 nt, Human
ugccccggggaggggcgcu

SEQ ID NO: 2351547 - RNA, 22 nt, Human
ugcccuaaccucugagucacca

SEQ ID NO: 2351548 - RNA, 14 nt, Human
ugcccuccccucuc

SEQ ID NO: 2351549 - RNA, 17 nt, Human
ugcccuccccucucugc

SEQ ID NO: 2351550 - RNA, 16 nt, Human
ugcccuccccagagca

SEQ ID NO: 2351551 - RNA, 17 nt, Human
ugcccuccccagagcac

SEQ ID NO: 2351552 - RNA, 19 nt, Human
ugcccuccccagagcacug

SEQ ID NO: 2351553 - RNA, 20 nt, Human
ugcccuccccagagcacugg

SEQ ID NO: 2351554 - RNA, 21 nt, Human
ugcccuccccucucugcaccg

SEQ ID NO: 2351555 - RNA, 15 nt, Human
ugcccuccucuccca

SEQ ID NO: 2351556 - RNA, 14 nt, Human
ugcccuccucuccc

SEQ ID NO: 2351557 - RNA, 12 nt, Human
ugcccuccucuc

SEQ ID NO: 2351558 - RNA, 23 nt, Human
ugcccucgggcgagucacugccu

SEQ ID NO: 2351559 - RNA, 22 nt, Human
ugcccucgggcgagucacugcc

SEQ ID NO: 2351560 - RNA, 20 nt, Human
ugcccucgggcgagucacug

SEQ ID NO: 2351561 - RNA, 19 nt, Human
ugcccucgggcgagucacu

SEQ ID NO: 2351562 - RNA, 13 nt, Human
ugcccucgcugcu

SEQ ID NO: 2351563 - RNA, 14 nt, Human
ugcccucgcugcuu

SEQ ID NO: 2351564 - RNA, 15 nt, Human
ugcccucgcugcuuc

SEQ ID NO: 2351565 - RNA, 17 nt, Human
ugcccucgcugcuucug

SEQ ID NO: 2351566 - RNA, 16 nt, Human
ugcccuccucucccau

SEQ ID NO: 2351567 - RNA, 19 nt, Human
ugcccuccuuguccaccca

SEQ ID NO: 2351568 - RNA, 22 nt, Human
ugcccuccuuguccacccaccu

SEQ ID NO: 2351569 - RNA, 21 nt, Human
ugcccucguggccagcccggc

SEQ ID NO: 2351570 - RNA, 19 nt, Human
ugcccucguggccagcccg

SEQ ID NO: 2351571 - RNA, 20 nt, Human
ugcccucguggccagcccgg

SEQ ID NO: 2351572 - RNA, 15 nt, Human
ugcccucguggccag

SEQ ID NO: 2351573 - RNA, 16 nt, Human
ugcccucguggccagc

SEQ ID NO: 2351574 - RNA, 17 nt, Human
ugcccucguggccagcc

SEQ ID NO: 2351575 - RNA, 18 nt, Human
ugcccucguggccagccc

SEQ ID NO: 2351576 - RNA, 12 nt, Human
ugcccucuucau

SEQ ID NO: 2351577 - RNA, 12 nt, Human
ugcccugaccuc

SEQ ID NO: 2351578 - RNA, 13 nt, Human
ugcccugaccucc

SEQ ID NO: 2351579 - RNA, 14 nt, Human
ugcccugaccuccc

SEQ ID NO: 2351580 - RNA, 15 nt, Human
ugcccugaccuccca

SEQ ID NO: 2351581 - RNA, 16 nt, Human
ugcccugaccucccag

SEQ ID NO: 2351582 - RNA, 17 nt, Human
ugcccugaccucccagc

SEQ ID NO: 2351583 - RNA, 18 nt, Human
ugcccugaccucccagcc

SEQ ID NO: 2351584 - RNA, 20 nt, Human
ugcccugaccucccagcccu

SEQ ID NO: 2351585 - RNA, 21 nt, Human
ugcccugaccucccagcccua

SEQ ID NO: 2351586 - RNA, 22 nt, Human
ugcccugcacgucaugggaggg

SEQ ID NO: 2351587 - RNA, 22 nt, Human
ugcccugaguggaucuccaagg

SEQ ID NO: 2351588 - RNA, 22 nt, Human
ugcccugaccucccagcccuau

SEQ ID NO: 2351589 - RNA, 17 nt, Human
agcuccaagcucccagg

SEQ ID NO: 2351590 - RNA, 18 nt, Human
agcuccaagcucccaggc

SEQ ID NO: 2351591 - RNA, 19 nt, Human
agcuccaagcucccaggca

SEQ ID NO: 2351592 - RNA, 21 nt, Human
agcuccacacccucucccagg

SEQ ID NO: 2351593 - RNA, 23 nt, Human
ugcccugaguggaucuccaagga

SEQ ID NO: 2351594 - RNA, 23 nt, Human
agcuccacacccucucccaggac

SEQ ID NO: 2351595 - RNA, 22 nt, Human
agcuccacacccucucccagga

SEQ ID NO: 2351596 - RNA, 15 nt, Human
agcuccacccuggcc

SEQ ID NO: 2351597 - RNA, 17 nt, Human
agcuccacccuggccga

SEQ ID NO: 2351598 - RNA, 11 nt, Human
agcuccacucu

SEQ ID NO: 2351599 - RNA, 12 nt, Human
agcuccacucug

SEQ ID NO: 2351600 - RNA, 13 nt, Human
agcuccacucugc

SEQ ID NO: 2351601 - RNA, 14 nt, Human
agcuccacucugcu

SEQ ID NO: 2351602 - RNA, 16 nt, Human
agcuccacucugcuuc

SEQ ID NO: 2351603 - RNA, 17 nt, Human
agcuccacucugcuucu

SEQ ID NO: 2351604 - RNA, 18 nt, Human
agcuccacucugcuucuc

SEQ ID NO: 2351605 - RNA, 19 nt, Human
agcuccacucugcuucucu

SEQ ID NO: 2351606 - RNA, 22 nt, Human
agcuccacucugcuucucugac

SEQ ID NO: 2351607 - RNA, 13 nt, Human
agcuccagcucac

SEQ ID NO: 2351608 - RNA, 17 nt, Human
agcuccagcucaccagc

SEQ ID NO: 2351609 - RNA, 23 nt, Human
agcuccagacccccagcaacccu

SEQ ID NO: 2351610 - RNA, 18 nt, Human
agcuccagacccccagca

SEQ ID NO: 2351611 - RNA, 17 nt, Human
agcuccagacccccagc

SEQ ID NO: 2351612 - RNA, 16 nt, Human
agcuccagacccccag

SEQ ID NO: 2351613 - RNA, 14 nt, Human
agcuccagaccccc

SEQ ID NO: 2351614 - RNA, 18 nt, Human
agcuccacugucacccuc

SEQ ID NO: 2351615 - RNA, 21 nt, Human
agcuccacugucacccuccac

SEQ ID NO: 2351616 - RNA, 23 nt, Human
agcuccacugucacccuccaccu

SEQ ID NO: 2351617 - RNA, 23 nt, Human
agcuccacucugcuucucugacu

SEQ ID NO: 2351618 - RNA, 24 nt, Human
agcuccacucugcuucucugacuu

SEQ ID NO: 2351619 - RNA, 16 nt, Human
agcucuguguugccau

SEQ ID NO: 2351620 - RNA, 15 nt, Human
agcucuguguugcca

SEQ ID NO: 2351621 - RNA, 22 nt, Human
agcucuggcugaacccugugcu

SEQ ID NO: 2351622 - RNA, 12 nt, Human
agcucuggcuga

SEQ ID NO: 2351623 - RNA, 16 nt, Human
agcucuggcugaaccc

SEQ ID NO: 2351624 - RNA, 17 nt, Human
agcucuggcugaacccu

SEQ ID NO: 2351625 - RNA, 18 nt, Human
agcucuggcugaacccug

SEQ ID NO: 2351626 - RNA, 19 nt, Human
agcucuggcugaacccugu

SEQ ID NO: 2351627 - RNA, 20 nt, Human
agcucuggcugaacccugug

SEQ ID NO: 2351628 - RNA, 21 nt, Human
agcucuggcugaacccugugc

SEQ ID NO: 2351629 - RNA, 15 nt, Human
agcucuggaccagcc

SEQ ID NO: 2351630 - RNA, 17 nt, Human
agcucuggaccagccug

SEQ ID NO: 2351631 - RNA, 12 nt, Human
agcucuggaggg

SEQ ID NO: 2351632 - RNA, 16 nt, Human
agcucuggaggggagg

SEQ ID NO: 2351633 - RNA, 17 nt, Human
agcucuggaggggaggg

SEQ ID NO: 2351634 - RNA, 18 nt, Human
agcucuggaggggagggg

SEQ ID NO: 2351635 - RNA, 19 nt, Human
agcucuggaggggaggggg

SEQ ID NO: 2351636 - RNA, 20 nt, Human
agcucuggaggggaggggga

SEQ ID NO: 2351637 - RNA, 23 nt, Human
agcucuguguugccaugugugcu

SEQ ID NO: 2351638 - RNA, 18 nt, Human
agcucuguguugccaugu

SEQ ID NO: 2351639 - RNA, 20 nt, Human
agcucuuaauuguucauuuu

SEQ ID NO: 2351640 - RNA, 18 nt, Human
agcucuucaggccucccu

SEQ ID NO: 2351641 - RNA, 16 nt, Human
agcucuucauguuuca

SEQ ID NO: 2351642 - RNA, 13 nt, Human
agcucuucauguu

SEQ ID NO: 2351643 - RNA, 17 nt, Human
agcucuucaggccuccc

SEQ ID NO: 2351644 - RNA, 16 nt, Human
agcucuucaggccucc

SEQ ID NO: 2351645 - RNA, 15 nt, Human
agcucuucaggccuc

SEQ ID NO: 2351646 - RNA, 13 nt, Human
agcucuucaggcc

SEQ ID NO: 2351647 - RNA, 20 nt, Human
agcucuagacaacccugcaa

SEQ ID NO: 2351648 - RNA, 19 nt, Human
agcucuagacaacccugca

SEQ ID NO: 2351649 - RNA, 17 nt, Human
agcucuagacaacccug

SEQ ID NO: 2351650 - RNA, 16 nt, Human
agcucuagacaacccu

SEQ ID NO: 2351651 - RNA, 21 nt, Human
agcucuacccagggccugcag

SEQ ID NO: 2351652 - RNA, 20 nt, Human
agcucuacccagggccugca

SEQ ID NO: 2351653 - RNA, 19 nt, Human
agcucuacccagggccugc

SEQ ID NO: 2351654 - RNA, 17 nt, Human
agcucuacccagggccu

SEQ ID NO: 2351655 - RNA, 15 nt, Human
agcucuacccagggc

SEQ ID NO: 2351656 - RNA, 13 nt, Human
agcucuacccagg

SEQ ID NO: 2351657 - RNA, 20 nt, Human
agcucguguauccuggggcu

SEQ ID NO: 2351658 - RNA, 21 nt, Human
agcucugcagagcaggaaaca

SEQ ID NO: 2351659 - RNA, 12 nt, Human
agcucugcauua

SEQ ID NO: 2351660 - RNA, 14 nt, Human
agcucugcagccca

SEQ ID NO: 2351661 - RNA, 16 nt, Human
agcucugcagcccagg

SEQ ID NO: 2351662 - RNA, 23 nt, Human
agcucugcccauccugccccuga

SEQ ID NO: 2351663 - RNA, 21 nt, Human
agcucuggacagccccacccu

SEQ ID NO: 2351664 - RNA, 13 nt, Human
agcucugcauuau

SEQ ID NO: 2351665 - RNA, 12 nt, Human
agcucuggacca

SEQ ID NO: 2351666 - RNA, 18 nt, Human
agcucuggacagccccac

SEQ ID NO: 2351667 - RNA, 17 nt, Human
agcucuggacagcccca

SEQ ID NO: 2351668 - RNA, 19 nt, Human
agcuccagacccccagcaa

SEQ ID NO: 2351669 - RNA, 21 nt, Human
agcuccagcucaccagcccca

SEQ ID NO: 2351670 - RNA, 18 nt, Human
agcuccagcucaccagcc

SEQ ID NO: 2351671 - RNA, 19 nt, Human
agcuccagcucaccagccc

SEQ ID NO: 2351672 - RNA, 21 nt, Human
agcuccaucuccacuccagau

SEQ ID NO: 2351673 - RNA, 18 nt, Human
agcucccaagggauggug

SEQ ID NO: 2351674 - RNA, 20 nt, Human
agcucccaagggauggugcc

SEQ ID NO: 2351675 - RNA, 22 nt, Human
agcucccaagggauggugcccu

SEQ ID NO: 2351676 - RNA, 23 nt, Human
agcucccaagggauggugcccug

SEQ ID NO: 2351677 - RNA, 17 nt, Human
agcucccaccccacccc

SEQ ID NO: 2351678 - RNA, 15 nt, Human
agcucccaccccacc

SEQ ID NO: 2351679 - RNA, 13 nt, Human
agcucccacccca

SEQ ID NO: 2351680 - RNA, 23 nt, Human
agcucccaccccacccccuucag

SEQ ID NO: 2351681 - RNA, 20 nt, Human
agcuccuugggaggccccac

SEQ ID NO: 2351682 - RNA, 19 nt, Human
agcuccuugggaggcccca

SEQ ID NO: 2351683 - RNA, 18 nt, Human
agcucguguauccugggg

SEQ ID NO: 2351684 - RNA, 19 nt, Human
agcucguguauccuggggc

SEQ ID NO: 2351685 - RNA, 15 nt, Human
agcuccuugggaggc

SEQ ID NO: 2351686 - RNA, 23 nt, Human
agcuccuugggaggaagcagaau

SEQ ID NO: 2351687 - RNA, 21 nt, Human
agcuccuugggaggaagcaga

SEQ ID NO: 2351688 - RNA, 22 nt, Human
agcuccuugggaggaagcagaa

SEQ ID NO: 2351689 - RNA, 12 nt, Human
agcuccuuggga

SEQ ID NO: 2351690 - RNA, 17 nt, Human
agcuccuugggaggaag

SEQ ID NO: 2351691 - RNA, 18 nt, Human
agcuccuugggaggaagc

SEQ ID NO: 2351692 - RNA, 19 nt, Human
agcuccuugggaggaagca

SEQ ID NO: 2351693 - RNA, 20 nt, Human
agcuccuugggaggaagcag

SEQ ID NO: 2351694 - RNA, 22 nt, Human
agcuccuucuguccuacucugu

SEQ ID NO: 2351695 - RNA, 23 nt, Human
agcuccuucuguccuacucugug

SEQ ID NO: 2351696 - RNA, 23 nt, Human
agcucccccuguccccucagcuc

SEQ ID NO: 2351697 - RNA, 20 nt, Human
agcuccccgcuucugccugc

SEQ ID NO: 2351698 - RNA, 16 nt, Human
agcucccccugucccc

SEQ ID NO: 2351699 - RNA, 17 nt, Human
agcucccccuguccccu

SEQ ID NO: 2351700 - RNA, 19 nt, Human
agcucccccuguccccuca

SEQ ID NO: 2351701 - RNA, 21 nt, Human
agcucccccuguccccucagc

SEQ ID NO: 2351702 - RNA, 19 nt, Human
agcucccccgggaggggcc

SEQ ID NO: 2351703 - RNA, 23 nt, Human
agcucccccgggaggggcccgcu

SEQ ID NO: 2351704 - RNA, 23 nt, Human
agcucccccucccccacugccau

SEQ ID NO: 2351705 - RNA, 13 nt, Human
agcucccccuguc

SEQ ID NO: 2351706 - RNA, 14 nt, Human
agcucccccugucc

SEQ ID NO: 2351707 - RNA, 15 nt, Human
agcucccccuguccc

SEQ ID NO: 2351708 - RNA, 21 nt, Human
agcuccccaccaccccagcug

SEQ ID NO: 2351709 - RNA, 13 nt, Human
agcuccccagagu

SEQ ID NO: 2351710 - RNA, 20 nt, Human
agcuccccaccaccccagcu

SEQ ID NO: 2351711 - RNA, 17 nt, Human
agcuccccaccacccca

SEQ ID NO: 2351712 - RNA, 14 nt, Human
agcuccccaccacc

SEQ ID NO: 2351713 - RNA, 22 nt, Human
agcuccccaaaaaccucacccg

SEQ ID NO: 2351714 - RNA, 18 nt, Human
agcucccauuucuacucu

SEQ ID NO: 2351715 - RNA, 23 nt, Human
agcucccauuucuacucucccau

SEQ ID NO: 2351716 - RNA, 18 nt, Human
agcuccccagaguccucu

SEQ ID NO: 2351717 - RNA, 12 nt, Human
ugccucagguuc

SEQ ID NO: 2351718 - RNA, 21 nt, Human
ugccucaggaggcaggaccuu

SEQ ID NO: 2351719 - RNA, 14 nt, Human
ugccucagccuccg

SEQ ID NO: 2351720 - RNA, 18 nt, Human
ugccucaggaggcaggac

SEQ ID NO: 2351721 - RNA, 18 nt, Human
ugccuccccaacccugcc

SEQ ID NO: 2351722 - RNA, 16 nt, Human
ugccuccccaacccug

SEQ ID NO: 2351723 - RNA, 15 nt, Human
ugccuccccaacccu

SEQ ID NO: 2351724 - RNA, 17 nt, Human
ugccucccauucugacc

SEQ ID NO: 2351725 - RNA, 14 nt, Human
ugccucagguuccu

SEQ ID NO: 2351726 - RNA, 16 nt, Human
ugccucagguuccuau

SEQ ID NO: 2351727 - RNA, 22 nt, Human
ugccucccaucacccgcuaaga

SEQ ID NO: 2351728 - RNA, 17 nt, Human
ugccucagccuccugag

SEQ ID NO: 2351729 - RNA, 15 nt, Human
ugccucagccuccug

SEQ ID NO: 2351730 - RNA, 18 nt, Human
ugccucagccucccgagu

SEQ ID NO: 2351731 - RNA, 15 nt, Human
ugccucagccucccg

SEQ ID NO: 2351732 - RNA, 18 nt, Human
ugccucagaaaacaagga

SEQ ID NO: 2351733 - RNA, 12 nt, Human
ugccucagcccg

SEQ ID NO: 2351734 - RNA, 23 nt, Human
ugccuccccaacccugccccugc

SEQ ID NO: 2351735 - RNA, 17 nt, Human
ugccuccccauuuccca

SEQ ID NO: 2351736 - RNA, 20 nt, Human
ugccuccccauuucccaucu

SEQ ID NO: 2351737 - RNA, 21 nt, Human
ugccuccccauuucccaucug

SEQ ID NO: 2351738 - RNA, 22 nt, Human
ugccuccccaacccugccccug

SEQ ID NO: 2351739 - RNA, 21 nt, Human
ugccuccccaacccugccccu

SEQ ID NO: 2351740 - RNA, 20 nt, Human
ugccuccccaacccugcccc

SEQ ID NO: 2351741 - RNA, 19 nt, Human
ugccuccccaacccugccc

SEQ ID NO: 2351742 - RNA, 18 nt, Human
ugccuccccggcucgagc

SEQ ID NO: 2351743 - RNA, 22 nt, Human
ugccuccccauuucccaucugc

SEQ ID NO: 2351744 - RNA, 23 nt, Human
ugccuccccauuucccaucugca

SEQ ID NO: 2351745 - RNA, 11 nt, Human
ugccucucugc

SEQ ID NO: 2351746 - RNA, 12 nt, Human
ugccucucugca

SEQ ID NO: 2351747 - RNA, 17 nt, Human
ugccucucucaggccaa

SEQ ID NO: 2351748 - RNA, 15 nt, Human
agcucuucuccaggc

SEQ ID NO: 2351749 - RNA, 15 nt, Human
agcucuguuucgguu

SEQ ID NO: 2351750 - RNA, 16 nt, Human
agcucuucuccaggcu

SEQ ID NO: 2351751 - RNA, 23 nt, Human
ugcccugugaguacuacaguccu

SEQ ID NO: 2351752 - RNA, 15 nt, Human
ugcccugugggcccc

SEQ ID NO: 2351753 - RNA, 18 nt, Human
ugcccugugggcccccaa

SEQ ID NO: 2351754 - RNA, 22 nt, Human
ugcccuuaccugccaggaagcc

SEQ ID NO: 2351755 - RNA, 12 nt, Human
ugcccugugcaa

SEQ ID NO: 2351756 - RNA, 19 nt, Human
ugcccuguuaaaagaugaa

SEQ ID NO: 2351757 - RNA, 14 nt, Human
ugccgccucccagc

SEQ ID NO: 2351758 - RNA, 13 nt, Human
ugccgccucccag

SEQ ID NO: 2351759 - RNA, 16 nt, Human
ugccgccucaaugugg

SEQ ID NO: 2351760 - RNA, 15 nt, Human
ugccucaccccuugc

SEQ ID NO: 2351761 - RNA, 15 nt, Human
ugccgccgccucgcc

SEQ ID NO: 2351762 - RNA, 16 nt, Human
ugccgccgccucgccc

SEQ ID NO: 2351763 - RNA, 17 nt, Human
ugccgccgccucgccca

SEQ ID NO: 2351764 - RNA, 21 nt, Human
ugccgccgccucgcccaccgc

SEQ ID NO: 2351765 - RNA, 18 nt, Human
ugccgccgccucgcccac

SEQ ID NO: 2351766 - RNA, 20 nt, Human
ugccgccgccucgcccaccg

SEQ ID NO: 2351767 - RNA, 14 nt, Human
ugccgccccaccca

SEQ ID NO: 2351768 - RNA, 15 nt, Human
ugccgccccacccag

SEQ ID NO: 2351769 - RNA, 16 nt, Human
ugccgccccacccaga

SEQ ID NO: 2351770 - RNA, 13 nt, Human
ugcccuucccugu

SEQ ID NO: 2351771 - RNA, 15 nt, Human
ugcccuucaccccag

SEQ ID NO: 2351772 - RNA, 20 nt, Human
ugcccuucaccccaguggcc

SEQ ID NO: 2351773 - RNA, 15 nt, Human
ugcccuucccugucc

SEQ ID NO: 2351774 - RNA, 16 nt, Human
ugcccuucccuguccc

SEQ ID NO: 2351775 - RNA, 17 nt, Human
ugcccuucccugucccu

SEQ ID NO: 2351776 - RNA, 18 nt, Human
ugcccuucccugucccuc

SEQ ID NO: 2351777 - RNA, 17 nt, Human
ugcccuucacaguguuu

SEQ ID NO: 2351778 - RNA, 14 nt, Human
ugcccuucacccca

SEQ ID NO: 2351779 - RNA, 17 nt, Human
agcucugccgcaauggc

SEQ ID NO: 2351780 - RNA, 19 nt, Human
ugcccuuaccugccaggaa

SEQ ID NO: 2351781 - RNA, 20 nt, Human
ugccgcagcccugcagaggg

SEQ ID NO: 2351782 - RNA, 18 nt, Human
ugcccuuccucaguuuaa

SEQ ID NO: 2351783 - RNA, 20 nt, Human
ugcccuucccugucccucua

SEQ ID NO: 2351784 - RNA, 16 nt, Human
ugcccuuccucaguuu

SEQ ID NO: 2351785 - RNA, 19 nt, Human
ugccugcggaguugugcac

SEQ ID NO: 2351786 - RNA, 20 nt, Human
ugccugcgcccaccccgcuc

SEQ ID NO: 2351787 - RNA, 21 nt, Human
ugccugcgcccaccccgcucu

SEQ ID NO: 2351788 - RNA, 14 nt, Human
ugccugcgcccacc

SEQ ID NO: 2351789 - RNA, 21 nt, Human
ugccugccugucugucucucc

SEQ ID NO: 2351790 - RNA, 20 nt, Human
ugccugccugucugucucuc

SEQ ID NO: 2351791 - RNA, 12 nt, Human
ugccucugccuc

SEQ ID NO: 2351792 - RNA, 17 nt, Human
ugccugcccaggccccu

SEQ ID NO: 2351793 - RNA, 18 nt, Human
ugccugcccaggccccug

SEQ ID NO: 2351794 - RNA, 19 nt, Human
ugccugcccaggccccugc

SEQ ID NO: 2351795 - RNA, 14 nt, Human
ugccucugacacac

SEQ ID NO: 2351796 - RNA, 16 nt, Human
ugccucugacacacag

SEQ ID NO: 2351797 - RNA, 15 nt, Human
ugccucucugcaggu

SEQ ID NO: 2351798 - RNA, 23 nt, Human
ugccucucugcaggucccuaaua

SEQ ID NO: 2351799 - RNA, 11 nt, Human
ugccucugccu

SEQ ID NO: 2351800 - RNA, 21 nt, Human
ugccucugccaaaggauguga

SEQ ID NO: 2351801 - RNA, 22 nt, Human
ugccucugccaaaggaugugau

SEQ ID NO: 2351802 - RNA, 21 nt, Human
ugccucucugcaggucccuaa

SEQ ID NO: 2351803 - RNA, 12 nt, Human
ugccucucuguu

SEQ ID NO: 2351804 - RNA, 13 nt, Human
ugccucucuguuu

SEQ ID NO: 2351805 - RNA, 15 nt, Human
agcugggacuacagg

SEQ ID NO: 2351806 - RNA, 20 nt, Human
agcuggaggacuagaaccug

SEQ ID NO: 2351807 - RNA, 22 nt, Human
agcuggaggacuagaaccugga

SEQ ID NO: 2351808 - RNA, 14 nt, Human
agcuggagccuggu

SEQ ID NO: 2351809 - RNA, 15 nt, Human
agcuggagccuggug

SEQ ID NO: 2351810 - RNA, 17 nt, Human
agcuggagccuggugcc

SEQ ID NO: 2351811 - RNA, 19 nt, Human
agcuggagccuggugcccu

SEQ ID NO: 2351812 - RNA, 13 nt, Human
agcuggaggacua

SEQ ID NO: 2351813 - RNA, 23 nt, Human
agcugcuuuugucuaugggacuc

SEQ ID NO: 2351814 - RNA, 24 nt, Human
agcugcuuuugucuaugggacuca

SEQ ID NO: 2351815 - RNA, 14 nt, Human
agcugccugugccu

SEQ ID NO: 2351816 - RNA, 23 nt, Human
agcugccuguaguuaggaaauaa

SEQ ID NO: 2351817 - RNA, 22 nt, Human
agcugccuguaguuaggaaaua

SEQ ID NO: 2351818 - RNA, 20 nt, Human
agcugccuguaguuaggaaa

SEQ ID NO: 2351819 - RNA, 19 nt, Human
agcugccuguaguuaggaa

SEQ ID NO: 2351820 - RNA, 18 nt, Human
agcugccuguaguuagga

SEQ ID NO: 2351821 - RNA, 15 nt, Human
agcugccuguaguua

SEQ ID NO: 2351822 - RNA, 14 nt, Human
agcugccuguaguu

SEQ ID NO: 2351823 - RNA, 22 nt, Human
ugccugcuuuucacugcugcaa

SEQ ID NO: 2351824 - RNA, 13 nt, Human
agcugccuguuca

SEQ ID NO: 2351825 - RNA, 22 nt, Human
agcugcuuuugucuaugggacu

SEQ ID NO: 2351826 - RNA, 10 nt, Human
agcugccugu

SEQ ID NO: 2351827 - RNA, 19 nt, Human
ugccugcuuuucacugcug

SEQ ID NO: 2351828 - RNA, 21 nt, Human
ugccugcuuuucacugcugca

SEQ ID NO: 2351829 - RNA, 23 nt, Human
ugccugcugaaugauuuccaaag

SEQ ID NO: 2351830 - RNA, 10 nt, Human
ugccugcuga

SEQ ID NO: 2351831 - RNA, 14 nt, Human
ugcagacuagaauu

SEQ ID NO: 2351832 - RNA, 17 nt, Human
ugcagacuagaauucua

SEQ ID NO: 2351833 - RNA, 19 nt, Human
ugcagacuagaauucuagu

SEQ ID NO: 2351834 - RNA, 19 nt, Human
ugcagacucaauaaaauca

SEQ ID NO: 2351835 - RNA, 16 nt, Human
ugcagacucaauaaaa

SEQ ID NO: 2351836 - RNA, 22 nt, Human
ugcagacuagaauucuagugcu

SEQ ID NO: 2351837 - RNA, 23 nt, Human
ugcagacuagaauucuagugcug

SEQ ID NO: 2351838 - RNA, 14 nt, Human
ugcagaccuguccu

SEQ ID NO: 2351839 - RNA, 15 nt, Human
ugcagaccuguccuc

SEQ ID NO: 2351840 - RNA, 18 nt, Human
ugcagaccuguccuccug

SEQ ID NO: 2351841 - RNA, 19 nt, Human
ugcagaccuguccuccugg

SEQ ID NO: 2351842 - RNA, 20 nt, Human
ugcagaccuguccuccuggu

SEQ ID NO: 2351843 - RNA, 21 nt, Human
ugcagaccuguccuccuggug

SEQ ID NO: 2351844 - RNA, 23 nt, Human
ugcagaccuguccuccugguggg

SEQ ID NO: 2351845 - RNA, 15 nt, Human
ugcagacaugagugc

SEQ ID NO: 2351846 - RNA, 23 nt, Human
ugcagaccacgcccguccugccu

SEQ ID NO: 2351847 - RNA, 14 nt, Human
ugcagaacuaaacu

SEQ ID NO: 2351848 - RNA, 21 nt, Human
ugcacucuaaaagguucaggg

SEQ ID NO: 2351849 - RNA, 22 nt, Human
ugcacucuaacccuaggcauca

SEQ ID NO: 2351850 - RNA, 14 nt, Human
ugcagaagacagua

SEQ ID NO: 2351851 - RNA, 22 nt, Human
ugcagacaggcaagcaccuccu

SEQ ID NO: 2351852 - RNA, 15 nt, Human
ugcagaagacaguau

SEQ ID NO: 2351853 - RNA, 19 nt, Human
ugcacuccccugcugggug

SEQ ID NO: 2351854 - RNA, 17 nt, Human
agcccuggucucagcag

SEQ ID NO: 2351855 - RNA, 18 nt, Human
ugcacucuaaaagguuca

SEQ ID NO: 2351856 - RNA, 16 nt, Human
ugcacuccccugcugg

SEQ ID NO: 2351857 - RNA, 17 nt, Human
ugcacuccccugcuggg

SEQ ID NO: 2351858 - RNA, 15 nt, Human
ugcacacauuuuuua

SEQ ID NO: 2351859 - RNA, 13 nt, Human
ugcacacauuuuu

SEQ ID NO: 2351860 - RNA, 12 nt, Human
ugcacacauuuu

SEQ ID NO: 2351861 - RNA, 11 nt, Human
ugcacacauuu

SEQ ID NO: 2351862 - RNA, 17 nt, Human
agcccuugcauugcaga

SEQ ID NO: 2351863 - RNA, 18 nt, Human
agcccuuaucugugcuca

SEQ ID NO: 2351864 - RNA, 12 nt, Human
agcccuugccuc

SEQ ID NO: 2351865 - RNA, 13 nt, Human
agcccuugccucc

SEQ ID NO: 2351866 - RNA, 14 nt, Human
agcccuugccuccc

SEQ ID NO: 2351867 - RNA, 16 nt, Human
agcccuugccucccca

SEQ ID NO: 2351868 - RNA, 12 nt, Human
agcccuuggguu

SEQ ID NO: 2351869 - RNA, 12 nt, Human
agcccuuggcca

SEQ ID NO: 2351870 - RNA, 23 nt, Human
agcccuugccuccccauuuccca

SEQ ID NO: 2351871 - RNA, 11 nt, Human
agcccuuggcc

SEQ ID NO: 2351872 - RNA, 21 nt, Human
agcccuuagcagggaaacagc

SEQ ID NO: 2351873 - RNA, 21 nt, Human
agcccuguugacacaggucuu

SEQ ID NO: 2351874 - RNA, 20 nt, Human
agcccuguugacacaggucu

SEQ ID NO: 2351875 - RNA, 18 nt, Human
agcccuguugacacaggu

SEQ ID NO: 2351876 - RNA, 17 nt, Human
agcccuguugacacagg

SEQ ID NO: 2351877 - RNA, 23 nt, Human
agcccuguugacacaggucuuuc

SEQ ID NO: 2351878 - RNA, 15 nt, Human
agcccuuaucugugc

SEQ ID NO: 2351879 - RNA, 17 nt, Human
agccgagaucacgccac

SEQ ID NO: 2351880 - RNA, 21 nt, Human
agccgagauagccaaggccaa

SEQ ID NO: 2351881 - RNA, 20 nt, Human
agccgagauagccaaggcca

SEQ ID NO: 2351882 - RNA, 21 nt, Human
agcccuuuacuugaccuccua

SEQ ID NO: 2351883 - RNA, 12 nt, Human
agcccuuucugu

SEQ ID NO: 2351884 - RNA, 13 nt, Human
agcccuuucugug

SEQ ID NO: 2351885 - RNA, 16 nt, Human
agcccuuucugugugc

SEQ ID NO: 2351886 - RNA, 17 nt, Human
agcccuuucugugugca

SEQ ID NO: 2351887 - RNA, 18 nt, Human
agcccuuucugugugcac

SEQ ID NO: 2351888 - RNA, 19 nt, Human
agcccugucagugcagccc

SEQ ID NO: 2351889 - RNA, 17 nt, Human
agcccugucagugcagc

SEQ ID NO: 2351890 - RNA, 20 nt, Human
ugcagacucaguuugucaga

SEQ ID NO: 2351891 - RNA, 19 nt, Human
ugcagacucaguuugucag

SEQ ID NO: 2351892 - RNA, 20 nt, Human
agcccugucagugcagcccg

SEQ ID NO: 2351893 - RNA, 15 nt, Human
ugcagacucaguuug

SEQ ID NO: 2351894 - RNA, 14 nt, Human
ugcagacucaguuu

SEQ ID NO: 2351895 - RNA, 14 nt, Human
ugcagacucacugu

SEQ ID NO: 2351896 - RNA, 16 nt, Human
agcccugucagugcag

SEQ ID NO: 2351897 - RNA, 16 nt, Human
ugcagacucuacagag

SEQ ID NO: 2351898 - RNA, 17 nt, Human
ugcagacucuacagagg

SEQ ID NO: 2351899 - RNA, 17 nt, Human
agcccugucgagacacu

SEQ ID NO: 2351900 - RNA, 18 nt, Human
agcccugucgagacacuu

SEQ ID NO: 2351901 - RNA, 12 nt, Human
agcccuguggaa

SEQ ID NO: 2351902 - RNA, 21 nt, Human
agcccugucgagacacuugcc

SEQ ID NO: 2351903 - RNA, 23 nt, Human
agcccugucgagacacuugccuu

SEQ ID NO: 2351904 - RNA, 16 nt, Human
agcccuuagcagggaa

SEQ ID NO: 2351905 - RNA, 23 nt, Human
agcccuguggaugagcccucaga

SEQ ID NO: 2351906 - RNA, 22 nt, Human
agcccuguggaugagcccucag

SEQ ID NO: 2351907 - RNA, 19 nt, Human
agcccuguggaugagcccu

SEQ ID NO: 2351908 - RNA, 18 nt, Human
agcccuguggaugagccc

SEQ ID NO: 2351909 - RNA, 17 nt, Human
agccucacuugaaugug

SEQ ID NO: 2351910 - RNA, 16 nt, Human
agccucacuugaaugu

SEQ ID NO: 2351911 - RNA, 18 nt, Human
agccucacaguccuuacc

SEQ ID NO: 2351912 - RNA, 15 nt, Human
agccucacagaagaa

SEQ ID NO: 2351913 - RNA, 18 nt, Human
agccucaauaagccuugu

SEQ ID NO: 2351914 - RNA, 19 nt, Human
agccucaauaagccuuguc

SEQ ID NO: 2351915 - RNA, 20 nt, Human
agccucaauaagccuugucg

SEQ ID NO: 2351916 - RNA, 17 nt, Human
agccucacaguccuuac

SEQ ID NO: 2351917 - RNA, 22 nt, Human
agcccuuugggaggcugaggcg

SEQ ID NO: 2351918 - RNA, 21 nt, Human
agcccuuugggaggcugaggc

SEQ ID NO: 2351919 - RNA, 21 nt, Human
agccucaagucuuauuuccuc

SEQ ID NO: 2351920 - RNA, 20 nt, Human
agccucaaccuccugggcua

SEQ ID NO: 2351921 - RNA, 19 nt, Human
agccucaaccuccugggcu

SEQ ID NO: 2351922 - RNA, 18 nt, Human
agccgagaucacgccacu

SEQ ID NO: 2351923 - RNA, 22 nt, Human
agccucacuugaaugugucacu

SEQ ID NO: 2351924 - RNA, 15 nt, Human
agccucagccauuca

SEQ ID NO: 2351925 - RNA, 12 nt, Human
agccucagccau

SEQ ID NO: 2351926 - RNA, 11 nt, Human
agccucagucc

SEQ ID NO: 2351927 - RNA, 15 nt, Human
agccucaguccuccc

SEQ ID NO: 2351928 - RNA, 16 nt, Human
agccucaguccucccc

SEQ ID NO: 2351929 - RNA, 17 nt, Human
agccucaguccuccccu

SEQ ID NO: 2351930 - RNA, 14 nt, Human
agccucauccgagg

SEQ ID NO: 2351931 - RNA, 17 nt, Human
agccucauauuuaaaga

SEQ ID NO: 2351932 - RNA, 19 nt, Human
agccucauauuuaaagaca

SEQ ID NO: 2351933 - RNA, 14 nt, Human
agccucauauuuaa

SEQ ID NO: 2351934 - RNA, 15 nt, Human
agccucauauuuaaa

SEQ ID NO: 2351935 - RNA, 16 nt, Human
agccucauauuuaaag

SEQ ID NO: 2351936 - RNA, 22 nt, Human
agccucagucucccucccuugg

SEQ ID NO: 2351937 - RNA, 20 nt, Human
agccucaguccuccccucac

SEQ ID NO: 2351938 - RNA, 18 nt, Human
agccucaguccuccccuc

SEQ ID NO: 2351939 - RNA, 19 nt, Human
agccucaguccuccccuca

SEQ ID NO: 2351940 - RNA, 20 nt, Human
agccucagucucccucccuu

SEQ ID NO: 2351941 - RNA, 19 nt, Human
agccucagucucccucccu

SEQ ID NO: 2351942 - RNA, 16 nt, Human
agccucagucucccuc

SEQ ID NO: 2351943 - RNA, 13 nt, Human
agccucagucucc

SEQ ID NO: 2351944 - RNA, 18 nt, Human
agccucugcugccauggc

SEQ ID NO: 2351945 - RNA, 14 nt, Human
agccucugcugcca

SEQ ID NO: 2351946 - RNA, 22 nt, Human
agccucuggcauuagaauuauu

SEQ ID NO: 2351947 - RNA, 23 nt, Human
agccucuggcauuagaauuauuu

SEQ ID NO: 2351948 - RNA, 13 nt, Human
agccucugcugcc

SEQ ID NO: 2351949 - RNA, 12 nt, Human
agccucugcugc

SEQ ID NO: 2351950 - RNA, 16 nt, Human
agccucugcuccccag

SEQ ID NO: 2351951 - RNA, 15 nt, Human
agccucugcucccca

SEQ ID NO: 2351952 - RNA, 15 nt, Human
agccucuggcuagag

SEQ ID NO: 2351953 - RNA, 14 nt, Human
agccucuggcuaga

SEQ ID NO: 2351954 - RNA, 13 nt, Human
agccucuggcuag

SEQ ID NO: 2351955 - RNA, 12 nt, Human
agccucuggcua

SEQ ID NO: 2351956 - RNA, 20 nt, Human
agccucuggcuagaggccag

SEQ ID NO: 2351957 - RNA, 13 nt, Human
agccucuggguca

SEQ ID NO: 2351958 - RNA, 20 nt, Human
ugcagccucaaccuccuggg

SEQ ID NO: 2351959 - RNA, 21 nt, Human
ugcagccucaaccuccugggc

SEQ ID NO: 2351960 - RNA, 22 nt, Human
ugcagccucaaccuccugggcu

SEQ ID NO: 2351961 - RNA, 21 nt, Human
ugcagcucaaggaaaggccug

SEQ ID NO: 2351962 - RNA, 16 nt, Human
ugcagcucacuacccu

SEQ ID NO: 2351963 - RNA, 22 nt, Human
ugcagcucaaggaaaggccuga

SEQ ID NO: 2351964 - RNA, 12 nt, Human
agccucugaccc

SEQ ID NO: 2351965 - RNA, 15 nt, Human
agccucugaccccuc

SEQ ID NO: 2351966 - RNA, 17 nt, Human
agccucugaccccuccu

SEQ ID NO: 2351967 - RNA, 18 nt, Human
agccucugaccccuccuc

SEQ ID NO: 2351968 - RNA, 19 nt, Human
agccucugaccccuccuca

SEQ ID NO: 2351969 - RNA, 20 nt, Human
agccucugaccccuccucac

SEQ ID NO: 2351970 - RNA, 21 nt, Human
agccucugaccccuccucacu

SEQ ID NO: 2351971 - RNA, 18 nt, Human
agccucugagccccuggg

SEQ ID NO: 2351972 - RNA, 22 nt, Human
agccucugaccccuccucacug

SEQ ID NO: 2351973 - RNA, 21 nt, Human
agccucugacuuaagcugccu

SEQ ID NO: 2351974 - RNA, 13 nt, Human
agccucugcuccc

SEQ ID NO: 2351975 - RNA, 18 nt, Human
agccucucucccagucua

SEQ ID NO: 2351976 - RNA, 16 nt, Human
agccucucucccaguc

SEQ ID NO: 2351977 - RNA, 17 nt, Human
agccucucucccagucu

SEQ ID NO: 2351978 - RNA, 14 nt, Human
agccucucucccag

SEQ ID NO: 2351979 - RNA, 15 nt, Human
agccucucucccagu

SEQ ID NO: 2351980 - RNA, 16 nt, Human
agccuccaguccaagg

SEQ ID NO: 2351981 - RNA, 22 nt, Human
agccuccaguccaaggaaacca

SEQ ID NO: 2351982 - RNA, 23 nt, Human
agccucugaaaaccaauguucuc

SEQ ID NO: 2351983 - RNA, 17 nt, Human
agccuccaugcugccuc

SEQ ID NO: 2351984 - RNA, 15 nt, Human
agccuccagccucug

SEQ ID NO: 2351985 - RNA, 16 nt, Human
agccuccagccucugu

SEQ ID NO: 2351986 - RNA, 18 nt, Human
agccuccagccucuguuc

SEQ ID NO: 2351987 - RNA, 17 nt, Human
agccuccagcugccccg

SEQ ID NO: 2351988 - RNA, 12 nt, Human
agccuccagccu

SEQ ID NO: 2351989 - RNA, 13 nt, Human
agccuccagccuc

SEQ ID NO: 2351990 - RNA, 14 nt, Human
agccuccagccucu

SEQ ID NO: 2351991 - RNA, 18 nt, Human
agccucauccgaggcagg

SEQ ID NO: 2351992 - RNA, 17 nt, Human
agccucauccgaggcag

SEQ ID NO: 2351993 - RNA, 21 nt, Human
agccuccaagcuccaucucca

SEQ ID NO: 2351994 - RNA, 20 nt, Human
agccucauauuuaaagacag

SEQ ID NO: 2351995 - RNA, 13 nt, Human
agcccccccuucc

SEQ ID NO: 2351996 - RNA, 15 nt, Human
agcccccccuuccac

SEQ ID NO: 2351997 - RNA, 22 nt, Human
agcccccgccccgccccacauu

SEQ ID NO: 2351998 - RNA, 23 nt, Human
agcccccccaacacugugcccug

SEQ ID NO: 2351999 - RNA, 23 nt, Human
agcccccgccccgccccacauuc

SEQ ID NO: 2352000 - RNA, 16 nt, Human
agcccccuccuugucu

SEQ ID NO: 2352001 - RNA, 18 nt, Human
agcccccaggcugcugga

SEQ ID NO: 2352002 - RNA, 18 nt, Human
agcccccccaacacugug

SEQ ID NO: 2352003 - RNA, 17 nt, Human
agcccccaggcugcugg

SEQ ID NO: 2352004 - RNA, 19 nt, Human
agcccccccaacacugugc

SEQ ID NO: 2352005 - RNA, 20 nt, Human
agcccccccaacacugugcc

SEQ ID NO: 2352006 - RNA, 21 nt, Human
agcccccccaacacugugccc

SEQ ID NO: 2352007 - RNA, 22 nt, Human
agcccccccaacacugugcccu

SEQ ID NO: 2352008 - RNA, 23 nt, Human
agccccauucugccugcccaggc

SEQ ID NO: 2352009 - RNA, 22 nt, Human
agccccucuugccccccacccc

SEQ ID NO: 2352010 - RNA, 21 nt, Human
agccccucuugccccccaccc

SEQ ID NO: 2352011 - RNA, 23 nt, Human
agccccucuugccccccacccca

SEQ ID NO: 2352012 - RNA, 20 nt, Human
agccccucuugccccccacc

SEQ ID NO: 2352013 - RNA, 17 nt, Human
agccccucuugcccccc

SEQ ID NO: 2352014 - RNA, 16 nt, Human
agccccucuugccccc

SEQ ID NO: 2352015 - RNA, 20 nt, Human
agccccugauccugugaagu

SEQ ID NO: 2352016 - RNA, 12 nt, Human
agccccugcccc

SEQ ID NO: 2352017 - RNA, 10 nt, Human
agccccucuu

SEQ ID NO: 2352018 - RNA, 22 nt, Human
agccccucuggucgcuccugcc

SEQ ID NO: 2352019 - RNA, 20 nt, Human
agccccucuggucgcuccug

SEQ ID NO: 2352020 - RNA, 21 nt, Human
agccccucuggucgcuccugc

SEQ ID NO: 2352021 - RNA, 14 nt, Human
agcccccuggccuc

SEQ ID NO: 2352022 - RNA, 15 nt, Human
agcccgcggggacau

SEQ ID NO: 2352023 - RNA, 22 nt, Human
agcccgccugccaguccuagcu

SEQ ID NO: 2352024 - RNA, 23 nt, Human
agcccgccugccaguccuagcug

SEQ ID NO: 2352025 - RNA, 20 nt, Human
agcccgcggggacauuggga

SEQ ID NO: 2352026 - RNA, 12 nt, Human
agcccgccugcc

SEQ ID NO: 2352027 - RNA, 13 nt, Human
agcccgccugcca

SEQ ID NO: 2352028 - RNA, 14 nt, Human
agcccgccugccag

SEQ ID NO: 2352029 - RNA, 15 nt, Human
agcccgccugccagu

SEQ ID NO: 2352030 - RNA, 16 nt, Human
agcccgccugccaguc

SEQ ID NO: 2352031 - RNA, 18 nt, Human
agcccgccugccaguccu

SEQ ID NO: 2352032 - RNA, 19 nt, Human
agcccgccugccaguccua

SEQ ID NO: 2352033 - RNA, 21 nt, Human
agcccgccugccaguccuagc

SEQ ID NO: 2352034 - RNA, 14 nt, Human
agcccggaugcuuc

SEQ ID NO: 2352035 - RNA, 19 nt, Human
agcccgcugaguggacugg

SEQ ID NO: 2352036 - RNA, 20 nt, Human
agcccggaccuuggcagccc

SEQ ID NO: 2352037 - RNA, 11 nt, Human
agcccggccug

SEQ ID NO: 2352038 - RNA, 19 nt, Human
agcccggccugcucccagc

SEQ ID NO: 2352039 - RNA, 20 nt, Human
agcccggccugcucccagca

SEQ ID NO: 2352040 - RNA, 21 nt, Human
agcccggccugcucccagcag

SEQ ID NO: 2352041 - RNA, 22 nt, Human
agcccggccugcucccagcagc

SEQ ID NO: 2352042 - RNA, 20 nt, Human
agcccggcgccaccauccug

SEQ ID NO: 2352043 - RNA, 21 nt, Human
agcccggcgccaccauccugc

SEQ ID NO: 2352044 - RNA, 16 nt, Human
agcccggcgccccugc

SEQ ID NO: 2352045 - RNA, 18 nt, Human
agcccggcgccccugcca

SEQ ID NO: 2352046 - RNA, 21 nt, Human
agcccggcgccccugccaccu

SEQ ID NO: 2352047 - RNA, 22 nt, Human
agcccggcgccccugccaccuc

SEQ ID NO: 2352048 - RNA, 22 nt, Human
agccccuuuuucauauguugcu

SEQ ID NO: 2352049 - RNA, 23 nt, Human
agccccuuuuucauauguugcuc

SEQ ID NO: 2352050 - RNA, 14 nt, Human
agcccgaauacaaa

SEQ ID NO: 2352051 - RNA, 13 nt, Human
agccccugcccca

SEQ ID NO: 2352052 - RNA, 15 nt, Human
agccccugccccagc

SEQ ID NO: 2352053 - RNA, 16 nt, Human
agccccugccccagcc

SEQ ID NO: 2352054 - RNA, 17 nt, Human
agccccugccccagccc

SEQ ID NO: 2352055 - RNA, 18 nt, Human
agccccugccccagccca

SEQ ID NO: 2352056 - RNA, 21 nt, Human
agccccugccccagcccaagu

SEQ ID NO: 2352057 - RNA, 23 nt, Human
agccccugccccagcccaagucc

SEQ ID NO: 2352058 - RNA, 15 nt, Human
agcccgcacccccac

SEQ ID NO: 2352059 - RNA, 15 nt, Human
agcccgaauacaaac

SEQ ID NO: 2352060 - RNA, 18 nt, Human
agcccgcacccccacccu

SEQ ID NO: 2352061 - RNA, 17 nt, Human
agcccgcacccccaccc

SEQ ID NO: 2352062 - RNA, 16 nt, Human
agcccgcacccccacc

SEQ ID NO: 2352063 - RNA, 19 nt, Human
agcccgccaagguagccau

SEQ ID NO: 2352064 - RNA, 21 nt, Human
agcccgcacccccacccuuug

SEQ ID NO: 2352065 - RNA, 19 nt, Human
agcccgcacccccacccuu

SEQ ID NO: 2352066 - RNA, 21 nt, Human
ugcacacaccagagcccaccu

SEQ ID NO: 2352067 - RNA, 16 nt, Human
agcccuggucucagca

SEQ ID NO: 2352068 - RNA, 17 nt, Human
ugcacacaccagagccc

SEQ ID NO: 2352069 - RNA, 18 nt, Human
ugcacacaccagagccca

SEQ ID NO: 2352070 - RNA, 14 nt, Human
agcccugguggcag

SEQ ID NO: 2352071 - RNA, 16 nt, Human
agcccuggcugaagga

SEQ ID NO: 2352072 - RNA, 18 nt, Human
agcccuggcugaaggacu

SEQ ID NO: 2352073 - RNA, 20 nt, Human
agcccuggcugaaggacugu

SEQ ID NO: 2352074 - RNA, 21 nt, Human
agcccuggcugaaggacugug

SEQ ID NO: 2352075 - RNA, 15 nt, Human
agcccugguggcagu

SEQ ID NO: 2352076 - RNA, 16 nt, Human
agcccugguggcagug

SEQ ID NO: 2352077 - RNA, 17 nt, Human
agcccuggccagaggcu

SEQ ID NO: 2352078 - RNA, 14 nt, Human
agcccuggcucugc

SEQ ID NO: 2352079 - RNA, 15 nt, Human
agcccuggcucugca

SEQ ID NO: 2352080 - RNA, 12 nt, Human
agcccuggcuga

SEQ ID NO: 2352081 - RNA, 13 nt, Human
agcccuggcugaa

SEQ ID NO: 2352082 - RNA, 15 nt, Human
agcccuggcugaagg

SEQ ID NO: 2352083 - RNA, 16 nt, Human
agcccuggccagaggc

SEQ ID NO: 2352084 - RNA, 15 nt, Human
agcccuggccagagg

SEQ ID NO: 2352085 - RNA, 14 nt, Human
agcccuggccagag

SEQ ID NO: 2352086 - RNA, 23 nt, Human
agcccuggauuucagaaagagca

SEQ ID NO: 2352087 - RNA, 21 nt, Human
agcccuggcaggaugacccug

SEQ ID NO: 2352088 - RNA, 13 nt, Human
agcccuggccaga

SEQ ID NO: 2352089 - RNA, 17 nt, Human
agcccuggcaggaugac

SEQ ID NO: 2352090 - RNA, 13 nt, Human
agcccuggcagga

SEQ ID NO: 2352091 - RNA, 12 nt, Human
agcccuggcagg

SEQ ID NO: 2352092 - RNA, 17 nt, Human
agcccugcuggccgccu

SEQ ID NO: 2352093 - RNA, 21 nt, Human
agcccugcuggccgccucacc

SEQ ID NO: 2352094 - RNA, 19 nt, Human
agcccugcuuugggcugcc

SEQ ID NO: 2352095 - RNA, 20 nt, Human
agcccugcuuugggcugccc

SEQ ID NO: 2352096 - RNA, 17 nt, Human
agcccugcuuugggcug

SEQ ID NO: 2352097 - RNA, 12 nt, Human
agcccugcuggc

SEQ ID NO: 2352098 - RNA, 13 nt, Human
agcccugcuggcc

SEQ ID NO: 2352099 - RNA, 16 nt, Human
agcccugcuggccgcc

SEQ ID NO: 2352100 - RNA, 13 nt, Human
agcccggcugguu

SEQ ID NO: 2352101 - RNA, 15 nt, Human
agcccggcucccacc

SEQ ID NO: 2352102 - RNA, 15 nt, Human
agcccggcugguuuu

SEQ ID NO: 2352103 - RNA, 23 nt, Human
agcccagggagcggaaagcagcu

SEQ ID NO: 2352104 - RNA, 22 nt, Human
agcccagggagcggaaagcagc

SEQ ID NO: 2352105 - RNA, 21 nt, Human
agcccagggagcggaaagcag

SEQ ID NO: 2352106 - RNA, 20 nt, Human
agcccagggagcggaaagca

SEQ ID NO: 2352107 - RNA, 19 nt, Human
agcccagggagcggaaagc

SEQ ID NO: 2352108 - RNA, 18 nt, Human
agcccagggagcggaaag

SEQ ID NO: 2352109 - RNA, 21 nt, Human
agcccaggccuccuacagcuu

SEQ ID NO: 2352110 - RNA, 21 nt, Human
agcccaggcgggagcgguggc

SEQ ID NO: 2352111 - RNA, 19 nt, Human
agcccaggaguuugaggcu

SEQ ID NO: 2352112 - RNA, 11 nt, Human
agcccaggagu

SEQ ID NO: 2352113 - RNA, 10 nt, Human
agcccagggu

SEQ ID NO: 2352114 - RNA, 17 nt, Human
agcccagggcuccugca

SEQ ID NO: 2352115 - RNA, 23 nt, Human
agcccagggcuccugcacuuacu

SEQ ID NO: 2352116 - RNA, 14 nt, Human
agcccagggcuccu

SEQ ID NO: 2352117 - RNA, 15 nt, Human
agcccagggcuccug

SEQ ID NO: 2352118 - RNA, 16 nt, Human
agcccagggcuccugc

SEQ ID NO: 2352119 - RNA, 19 nt, Human
agcccauggcccucccagu

SEQ ID NO: 2352120 - RNA, 14 nt, Human
agcccauucauucc

SEQ ID NO: 2352121 - RNA, 15 nt, Human
agcccauucucucuc

SEQ ID NO: 2352122 - RNA, 23 nt, Human
agcccauucauuccauucuggaa

SEQ ID NO: 2352123 - RNA, 22 nt, Human
agcccauucauuccauucugga

SEQ ID NO: 2352124 - RNA, 17 nt, Human
agcccauucauuccauu

SEQ ID NO: 2352125 - RNA, 19 nt, Human
agcccauucucucuccugu

SEQ ID NO: 2352126 - RNA, 18 nt, Human
agcccauucucucuccug

SEQ ID NO: 2352127 - RNA, 17 nt, Human
agcccauucucucuccu

SEQ ID NO: 2352128 - RNA, 16 nt, Human
agcccauucucucucc

SEQ ID NO: 2352129 - RNA, 21 nt, Human
agcccauucucucuccugucc

SEQ ID NO: 2352130 - RNA, 20 nt, Human
agcccauucucucuccuguc

SEQ ID NO: 2352131 - RNA, 22 nt, Human
agcccauucucucuccugucca

SEQ ID NO: 2352132 - RNA, 13 nt, Human
agcccauuucaau

SEQ ID NO: 2352133 - RNA, 16 nt, Human
agccccaaaacucucc

SEQ ID NO: 2352134 - RNA, 17 nt, Human
agccccaaaacucuccu

SEQ ID NO: 2352135 - RNA, 20 nt, Human
agccccauucugccugccca

SEQ ID NO: 2352136 - RNA, 18 nt, Human
agccccaaaacucuccuc

SEQ ID NO: 2352137 - RNA, 21 nt, Human
agccccauucugccugcccag

SEQ ID NO: 2352138 - RNA, 22 nt, Human
agccccauucugccugcccagg

SEQ ID NO: 2352139 - RNA, 16 nt, Human
ugcaagugacaucucu

SEQ ID NO: 2352140 - RNA, 13 nt, Human
ugcaagugaaggu

SEQ ID NO: 2352141 - RNA, 18 nt, Human
ugcaagugaagguuuaca

SEQ ID NO: 2352142 - RNA, 16 nt, Human
ugcaagucauggcugu

SEQ ID NO: 2352143 - RNA, 17 nt, Human
ugcaagugucugugugc

SEQ ID NO: 2352144 - RNA, 16 nt, Human
ugcaagugucugugug

SEQ ID NO: 2352145 - RNA, 21 nt, Human
ugcaaguguaugcacgugugc

SEQ ID NO: 2352146 - RNA, 21 nt, Human
ugcaagugguagcaagaagug

SEQ ID NO: 2352147 - RNA, 18 nt, Human
ugcaagugucugugugca

SEQ ID NO: 2352148 - RNA, 19 nt, Human
ugcaauaaaucugacccag

SEQ ID NO: 2352149 - RNA, 20 nt, Human
ugcaauaaaucugacccagu

SEQ ID NO: 2352150 - RNA, 23 nt, Human
ugcaauaaaucugacccagugcc

SEQ ID NO: 2352151 - RNA, 21 nt, Human
ugcaauaaaucugacccagug

SEQ ID NO: 2352152 - RNA, 21 nt, Human
ugcaauaagaauuuagggaga

SEQ ID NO: 2352153 - RNA, 14 nt, Human
ugcaauaauacuuc

SEQ ID NO: 2352154 - RNA, 20 nt, Human
ugcaauagaacagagaaaga

SEQ ID NO: 2352155 - RNA, 18 nt, Human
ugcaauauaucuaaauug

SEQ ID NO: 2352156 - RNA, 19 nt, Human
ugcaauauaucuaaauuga

SEQ ID NO: 2352157 - RNA, 20 nt, Human
ugcaauauaucuaaauugaa

SEQ ID NO: 2352158 - RNA, 21 nt, Human
ugcaauauaucuaaauugaau

SEQ ID NO: 2352159 - RNA, 18 nt, Human
agcccaggagagagaaag

SEQ ID NO: 2352160 - RNA, 19 nt, Human
agcccaggagagagaaagc

SEQ ID NO: 2352161 - RNA, 12 nt, Human
agcccaggagga

SEQ ID NO: 2352162 - RNA, 17 nt, Human
agcccaggaggacugcc

SEQ ID NO: 2352163 - RNA, 22 nt, Human
agcccaggagagagaaagccag

SEQ ID NO: 2352164 - RNA, 19 nt, Human
ugauuuguuuuccucuuaa

SEQ ID NO: 2352165 - RNA, 18 nt, Human
ugauuuguacugaaaaau

SEQ ID NO: 2352166 - RNA, 15 nt, Human
ugauuuguacugaaa

SEQ ID NO: 2352167 - RNA, 21 nt, Human
ugcaaaccaucauugaaaucu

SEQ ID NO: 2352168 - RNA, 22 nt, Human
ugcaaaccugaccccugcucag

SEQ ID NO: 2352169 - RNA, 22 nt, Human
ugauuuuaaaccauaaaaagcu

SEQ ID NO: 2352170 - RNA, 16 nt, Human
ugcaaacgcugccugc

SEQ ID NO: 2352171 - RNA, 15 nt, Human
ugcaaacgcugccug

SEQ ID NO: 2352172 - RNA, 14 nt, Human
ugcaaacgcugccu

SEQ ID NO: 2352173 - RNA, 23 nt, Human
ugcaaaccugaccccugcucagu

SEQ ID NO: 2352174 - RNA, 15 nt, Human
ugcaaguaugugagu

SEQ ID NO: 2352175 - RNA, 16 nt, Human
ugcaaacucacugcuc

SEQ ID NO: 2352176 - RNA, 21 nt, Human
ugcaaacgcugccugccggua

SEQ ID NO: 2352177 - RNA, 21 nt, Human
ugcaaacgcugccugcccgua

SEQ ID NO: 2352178 - RNA, 19 nt, Human
ugcaaacgcugccugccca

SEQ ID NO: 2352179 - RNA, 17 nt, Human
ugcaaacgcugccugcc

SEQ ID NO: 2352180 - RNA, 21 nt, Human
ugcaaguauguuuuagcaugu

SEQ ID NO: 2352181 - RNA, 19 nt, Human
ugcaaguauguuuuagcau

SEQ ID NO: 2352182 - RNA, 22 nt, Human
ugcaaguaugugagugugucca

SEQ ID NO: 2352183 - RNA, 18 nt, Human
ugcaaguaugugagugug

SEQ ID NO: 2352184 - RNA, 13 nt, Human
ugcaagucagagg

SEQ ID NO: 2352185 - RNA, 22 nt, Human
ugcaaguauguuuuagcaugug

SEQ ID NO: 2352186 - RNA, 14 nt, Human
ugcaagucagagga

SEQ ID NO: 2352187 - RNA, 15 nt, Human
ugcaagucagaggau

SEQ ID NO: 2352188 - RNA, 16 nt, Human
ugcaagucagaggaug

SEQ ID NO: 2352189 - RNA, 23 nt, Human
ugcaagucaguccaggaugcuaa

SEQ ID NO: 2352190 - RNA, 21 nt, Human
ugcaagucagaggauggccag

SEQ ID NO: 2352191 - RNA, 14 nt, Human
ugcaagucauggcu

SEQ ID NO: 2352192 - RNA, 18 nt, Human
agccagcccagcccagcu

SEQ ID NO: 2352193 - RNA, 17 nt, Human
agccagcccagcccagc

SEQ ID NO: 2352194 - RNA, 16 nt, Human
agccagcccagcccag

SEQ ID NO: 2352195 - RNA, 15 nt, Human
agccagcccagccca

SEQ ID NO: 2352196 - RNA, 14 nt, Human
agccagcccagccc

SEQ ID NO: 2352197 - RNA, 12 nt, Human
agccagcccagc

SEQ ID NO: 2352198 - RNA, 21 nt, Human
agccagagaagugacagggaa

SEQ ID NO: 2352199 - RNA, 23 nt, Human
agccagcccucccuguccuccuc

SEQ ID NO: 2352200 - RNA, 22 nt, Human
agccagcccucccuguccuccu

SEQ ID NO: 2352201 - RNA, 20 nt, Human
agccagcccucccuguccuc

SEQ ID NO: 2352202 - RNA, 18 nt, Human
agccagcccucccugucc

SEQ ID NO: 2352203 - RNA, 16 nt, Human
agccagcccucccugu

SEQ ID NO: 2352204 - RNA, 15 nt, Human
agccagcccucccug

SEQ ID NO: 2352205 - RNA, 13 nt, Human
agccagcccuccc

SEQ ID NO: 2352206 - RNA, 12 nt, Human
agccagcccucc

SEQ ID NO: 2352207 - RNA, 18 nt, Human
agccagccuucuuccauc

SEQ ID NO: 2352208 - RNA, 21 nt, Human
agccagccuucuuccauccca

SEQ ID NO: 2352209 - RNA, 10 nt, Human
agccagagga

SEQ ID NO: 2352210 - RNA, 11 nt, Human
agccagaggag

SEQ ID NO: 2352211 - RNA, 20 nt, Human
agccacugcaccgggccaca

SEQ ID NO: 2352212 - RNA, 11 nt, Human
agccagagaag

SEQ ID NO: 2352213 - RNA, 14 nt, Human
agccagagaaguga

SEQ ID NO: 2352214 - RNA, 15 nt, Human
agccagagaagugac

SEQ ID NO: 2352215 - RNA, 16 nt, Human
agccagagaagugaca

SEQ ID NO: 2352216 - RNA, 17 nt, Human
agccagagaagugacag

SEQ ID NO: 2352217 - RNA, 18 nt, Human
agccagagaagugacagg

SEQ ID NO: 2352218 - RNA, 19 nt, Human
agccagagaagugacaggg

SEQ ID NO: 2352219 - RNA, 18 nt, Human
agccacugcaccgggcca

SEQ ID NO: 2352220 - RNA, 19 nt, Human
agccacugcaccgggccac

SEQ ID NO: 2352221 - RNA, 19 nt, Human
ugauuaaccacuucagcug

SEQ ID NO: 2352222 - RNA, 18 nt, Human
ugauuaaguaaugauaac

SEQ ID NO: 2352223 - RNA, 17 nt, Human
ugauggugaugaaaugu

SEQ ID NO: 2352224 - RNA, 20 nt, Human
ugauuaaauucuugcaaagu

SEQ ID NO: 2352225 - RNA, 15 nt, Human
ugauggugaugaaau

SEQ ID NO: 2352226 - RNA, 16 nt, Human
ugauggugaugaaaug

SEQ ID NO: 2352227 - RNA, 13 nt, Human
ugauggugcaaug

SEQ ID NO: 2352228 - RNA, 19 nt, Human
ugauuaaauucuugcaaag

SEQ ID NO: 2352229 - RNA, 15 nt, Human
ugauggugcaaugac

SEQ ID NO: 2352230 - RNA, 17 nt, Human
ugauuaauccagaauaa

SEQ ID NO: 2352231 - RNA, 13 nt, Human
ugauuaauccaga

SEQ ID NO: 2352232 - RNA, 16 nt, Human
ugauuaauccagaaua

SEQ ID NO: 2352233 - RNA, 23 nt, Human
ugauuaaguaaugauaacuggaa

SEQ ID NO: 2352234 - RNA, 21 nt, Human
agccacguuccuuacugcaga

SEQ ID NO: 2352235 - RNA, 20 nt, Human
agccacguuccuuacugcag

SEQ ID NO: 2352236 - RNA, 18 nt, Human
agccacguuccuuacugc

SEQ ID NO: 2352237 - RNA, 17 nt, Human
agccacguuccuuacug

SEQ ID NO: 2352238 - RNA, 17 nt, Human
ugauuaauggaaauguu

SEQ ID NO: 2352239 - RNA, 15 nt, Human
agccacgguguucug

SEQ ID NO: 2352240 - RNA, 16 nt, Human
agccacugcaccgggc

SEQ ID NO: 2352241 - RNA, 12 nt, Human
agccacuccucu

SEQ ID NO: 2352242 - RNA, 23 nt, Human
agccacguuccuuacugcagaau

SEQ ID NO: 2352243 - RNA, 22 nt, Human
agccacguuccuuacugcagaa

SEQ ID NO: 2352244 - RNA, 13 nt, Human
agccacuaacuag

SEQ ID NO: 2352245 - RNA, 22 nt, Human
agccacucaggaggcugaggca

SEQ ID NO: 2352246 - RNA, 15 nt, Human
agccacucaggaggc

SEQ ID NO: 2352247 - RNA, 14 nt, Human
agccacuaacuaga

SEQ ID NO: 2352248 - RNA, 14 nt, Human
ugaugacagacacu

SEQ ID NO: 2352249 - RNA, 20 nt, Human
ugaugaagaaaagugggcca

SEQ ID NO: 2352250 - RNA, 17 nt, Human
ugaugacaguaguacca

SEQ ID NO: 2352251 - RNA, 15 nt, Human
ugaugacagagcgag

SEQ ID NO: 2352252 - RNA, 14 nt, Human
ugaugaccaaaguc

SEQ ID NO: 2352253 - RNA, 18 nt, Human
ugaugaagaaaagugggc

SEQ ID NO: 2352254 - RNA, 23 nt, Human
ugaugaacuuucucuucauacuu

SEQ ID NO: 2352255 - RNA, 14 nt, Human
ugaugaacuuucuc

SEQ ID NO: 2352256 - RNA, 15 nt, Human
ugaugaacuuucucu

SEQ ID NO: 2352257 - RNA, 18 nt, Human
ugaugaacucuuaaucaa

SEQ ID NO: 2352258 - RNA, 17 nt, Human
ugaugaacuuauucugu

SEQ ID NO: 2352259 - RNA, 13 nt, Human
ugaugaacuuucu

SEQ ID NO: 2352260 - RNA, 18 nt, Human
ugauccuggaggcccagu

SEQ ID NO: 2352261 - RNA, 17 nt, Human
ugauccuggaggcccag

SEQ ID NO: 2352262 - RNA, 16 nt, Human
ugauccuggaggccca

SEQ ID NO: 2352263 - RNA, 11 nt, Human
ugaugaagaag

SEQ ID NO: 2352264 - RNA, 12 nt, Human
ugaugaagaagu

SEQ ID NO: 2352265 - RNA, 11 nt, Human
agcaccugccg

SEQ ID NO: 2352266 - RNA, 20 nt, Human
agcaccugccgaccucgucc

SEQ ID NO: 2352267 - RNA, 19 nt, Human
agcaccugccgaccucguc

SEQ ID NO: 2352268 - RNA, 16 nt, Human
agcaccugccgaccuc

SEQ ID NO: 2352269 - RNA, 15 nt, Human
agcaccugccgaccu

SEQ ID NO: 2352270 - RNA, 16 nt, Human
ugauccuaguuccacc

SEQ ID NO: 2352271 - RNA, 15 nt, Human
ugauccucccaccuc

SEQ ID NO: 2352272 - RNA, 22 nt, Human
agcaccugccgaccucguccuc

SEQ ID NO: 2352273 - RNA, 18 nt, Human
ugauccucauauggccca

SEQ ID NO: 2352274 - RNA, 22 nt, Human
ugauccuaaugaaugcauaaaa

SEQ ID NO: 2352275 - RNA, 21 nt, Human
agcaccugccgaccucguccu

SEQ ID NO: 2352276 - RNA, 17 nt, Human
ugauccuccaacuucau

SEQ ID NO: 2352277 - RNA, 15 nt, Human
ugauccuggaggccc

SEQ ID NO: 2352278 - RNA, 14 nt, Human
ugauccuggaggcc

SEQ ID NO: 2352279 - RNA, 22 nt, Human
ugauccucccaccucagccucc

SEQ ID NO: 2352280 - RNA, 16 nt, Human
ugauccucccaccuca

SEQ ID NO: 2352281 - RNA, 21 nt, Human
ugauccucccaccucagccuc

SEQ ID NO: 2352282 - RNA, 18 nt, Human
ugaugcuuucagauuaaa

SEQ ID NO: 2352283 - RNA, 23 nt, Human
ugaugcuucuucagagacuccug

SEQ ID NO: 2352284 - RNA, 18 nt, Human
ugauggaaauauuuauuu

SEQ ID NO: 2352285 - RNA, 20 nt, Human
ugauggacccaaugcacaca

SEQ ID NO: 2352286 - RNA, 14 nt, Human
ugaugggaaagcau

SEQ ID NO: 2352287 - RNA, 13 nt, Human
ugaugagaggaaa

SEQ ID NO: 2352288 - RNA, 14 nt, Human
ugaugagaggaaau

SEQ ID NO: 2352289 - RNA, 15 nt, Human
ugaugagaggaaauc

SEQ ID NO: 2352290 - RNA, 16 nt, Human
ugaugagaggaaauca

SEQ ID NO: 2352291 - RNA, 14 nt, Human
ugauggggcccugc

SEQ ID NO: 2352292 - RNA, 15 nt, Human
ugauggggcccugcc

SEQ ID NO: 2352293 - RNA, 16 nt, Human
ugauggggcccugccu

SEQ ID NO: 2352294 - RNA, 19 nt, Human
ugauggggcccugccuccu

SEQ ID NO: 2352295 - RNA, 14 nt, Human
ugaugggauuuggu

SEQ ID NO: 2352296 - RNA, 19 nt, Human
ugaugggaaagcauuguaa

SEQ ID NO: 2352297 - RNA, 15 nt, Human
ugauggagcagagca

SEQ ID NO: 2352298 - RNA, 18 nt, Human
ugauggagguuucauacu

SEQ ID NO: 2352299 - RNA, 21 nt, Human
ugauggagguuucauacucua

SEQ ID NO: 2352300 - RNA, 19 nt, Human
ugaugggagaguagauggu

SEQ ID NO: 2352301 - RNA, 22 nt, Human
agccagggcuaugggagcagcu

SEQ ID NO: 2352302 - RNA, 12 nt, Human
agccagggccag

SEQ ID NO: 2352303 - RNA, 13 nt, Human
agccagggccagg

SEQ ID NO: 2352304 - RNA, 14 nt, Human
agccagggccaggg

SEQ ID NO: 2352305 - RNA, 17 nt, Human
agccagggccagggguc

SEQ ID NO: 2352306 - RNA, 11 nt, Human
agccagggcug

SEQ ID NO: 2352307 - RNA, 23 nt, Human
agccagggcuaugggagcagcuu

SEQ ID NO: 2352308 - RNA, 12 nt, Human
agccagggcugc

SEQ ID NO: 2352309 - RNA, 13 nt, Human
agccaggugccuu

SEQ ID NO: 2352310 - RNA, 14 nt, Human
agccagggcugcua

SEQ ID NO: 2352311 - RNA, 21 nt, Human
agccagggcugcuagacggag

SEQ ID NO: 2352312 - RNA, 18 nt, Human
agccaggugccuuggagg

SEQ ID NO: 2352313 - RNA, 16 nt, Human
agccaguaaacagagg

SEQ ID NO: 2352314 - RNA, 14 nt, Human
agccaggugccuug

SEQ ID NO: 2352315 - RNA, 16 nt, Human
agccaggugccuugga

SEQ ID NO: 2352316 - RNA, 17 nt, Human
agccaggugccuuggag

SEQ ID NO: 2352317 - RNA, 13 nt, Human
agccaguaaaugg

SEQ ID NO: 2352318 - RNA, 14 nt, Human
agccaucccagccu

SEQ ID NO: 2352319 - RNA, 17 nt, Human
agccaucccagccuugg

SEQ ID NO: 2352320 - RNA, 18 nt, Human
agccaucccagccuuggc

SEQ ID NO: 2352321 - RNA, 19 nt, Human
agccaucccagccuuggca

SEQ ID NO: 2352322 - RNA, 13 nt, Human
agccaucauggau

SEQ ID NO: 2352323 - RNA, 18 nt, Human
agccaucauaggaaggga

SEQ ID NO: 2352324 - RNA, 21 nt, Human
agccaguaaaugggggugcau

SEQ ID NO: 2352325 - RNA, 18 nt, Human
agccaucaaaaugcuuuu

SEQ ID NO: 2352326 - RNA, 18 nt, Human
agccaguaaacagaggag

SEQ ID NO: 2352327 - RNA, 18 nt, Human
agccaucaacaagaguug

SEQ ID NO: 2352328 - RNA, 22 nt, Human
agccagcgggaauggcagcugc

SEQ ID NO: 2352329 - RNA, 16 nt, Human
agccagcguccuccuc

SEQ ID NO: 2352330 - RNA, 21 nt, Human
agccagcguccuccucuguga

SEQ ID NO: 2352331 - RNA, 19 nt, Human
agccagcguccuccucugu

SEQ ID NO: 2352332 - RNA, 18 nt, Human
agccagcguccuccucug

SEQ ID NO: 2352333 - RNA, 17 nt, Human
agccagcguccuccucu

SEQ ID NO: 2352334 - RNA, 19 nt, Human
agccagcucccucuauuua

SEQ ID NO: 2352335 - RNA, 17 nt, Human
agccagcucccucuauu

SEQ ID NO: 2352336 - RNA, 15 nt, Human
agccagcucccucua

SEQ ID NO: 2352337 - RNA, 14 nt, Human
agccagcucccucu

SEQ ID NO: 2352338 - RNA, 23 nt, Human
agccagcguccuccucugugacc

SEQ ID NO: 2352339 - RNA, 23 nt, Human
agccagccuucuuccaucccagg

SEQ ID NO: 2352340 - RNA, 15 nt, Human
agccagcucauuuca

SEQ ID NO: 2352341 - RNA, 20 nt, Human
agccaggcugccaaggccag

SEQ ID NO: 2352342 - RNA, 16 nt, Human
agccaggcucugugcu

SEQ ID NO: 2352343 - RNA, 17 nt, Human
agccaggcucugugcug

SEQ ID NO: 2352344 - RNA, 14 nt, Human
agccaggcucugug

SEQ ID NO: 2352345 - RNA, 16 nt, Human
agccagcucucagcca

SEQ ID NO: 2352346 - RNA, 15 nt, Human
agccagcucucagcc

SEQ ID NO: 2352347 - RNA, 14 nt, Human
agccagcucucagc

SEQ ID NO: 2352348 - RNA, 13 nt, Human
agccagcucucag

SEQ ID NO: 2352349 - RNA, 22 nt, Human
agccagcucccucuauuuaugu

SEQ ID NO: 2352350 - RNA, 11 nt, Human
agccagggcca

SEQ ID NO: 2352351 - RNA, 21 nt, Human
agccaggcugccaaggccaga

SEQ ID NO: 2352352 - RNA, 21 nt, Human
agccaggcucugugcugaccc

SEQ ID NO: 2352353 - RNA, 22 nt, Human
agccaucucucuacuccuaccu

SEQ ID NO: 2352354 - RNA, 19 nt, Human
agccaucccaugaacacac

SEQ ID NO: 2352355 - RNA, 14 nt, Human
agccaucugcccag

SEQ ID NO: 2352356 - RNA, 22 nt, Human
agccaucggugaaacuaacaga

SEQ ID NO: 2352357 - RNA, 22 nt, Human
agccaucuccaucuugaaggaa

SEQ ID NO: 2352358 - RNA, 15 nt, Human
agccaucugcccagg

SEQ ID NO: 2352359 - RNA, 16 nt, Human
agccaucugcccaggg

SEQ ID NO: 2352360 - RNA, 18 nt, Human
agccaucugcccaggggu

SEQ ID NO: 2352361 - RNA, 19 nt, Human
agccaucugcccaggggug

SEQ ID NO: 2352362 - RNA, 15 nt, Human
agccaucuugguaaa

SEQ ID NO: 2352363 - RNA, 17 nt, Human
agccaucuugguaaauu

SEQ ID NO: 2352364 - RNA, 19 nt, Human
agccaucuugguaaauuuc

SEQ ID NO: 2352365 - RNA, 17 nt, Human
agccaugaccuuacauu

SEQ ID NO: 2352366 - RNA, 20 nt, Human
agccaugacuugagaaacaa

SEQ ID NO: 2352367 - RNA, 18 nt, Human
agccaugaccuuacauuu

SEQ ID NO: 2352368 - RNA, 21 nt, Human
agccaugagaugauacaucca

SEQ ID NO: 2352369 - RNA, 20 nt, Human
agccaugaggaguugcuguu

SEQ ID NO: 2352370 - RNA, 19 nt, Human
agccaugaggaguugcugu

SEQ ID NO: 2352371 - RNA, 18 nt, Human
agccaugaggaguugcug

SEQ ID NO: 2352372 - RNA, 18 nt, Human
agccaugauaacugcaau

SEQ ID NO: 2352373 - RNA, 23 nt, Human
agccaugauguggaguggggcag

SEQ ID NO: 2352374 - RNA, 16 nt, Human
agccaugcgcccccuc

SEQ ID NO: 2352375 - RNA, 23 nt, Human
agccaugcgcccccuccgcccug

SEQ ID NO: 2352376 - RNA, 18 nt, Human
agccauggacucuacacu

SEQ ID NO: 2352377 - RNA, 12 nt, Human
agccaugggacc

SEQ ID NO: 2352378 - RNA, 15 nt, Human
agccaugcugggaag

SEQ ID NO: 2352379 - RNA, 19 nt, Human
agccaugcugggaagacgc

SEQ ID NO: 2352380 - RNA, 14 nt, Human
agcccacuguacuu

SEQ ID NO: 2352381 - RNA, 16 nt, Human
agcccacuguacuugc

SEQ ID NO: 2352382 - RNA, 14 nt, Human
agcccacuguccug

SEQ ID NO: 2352383 - RNA, 17 nt, Human
agccaugggaccaaacc

SEQ ID NO: 2352384 - RNA, 19 nt, Human
agcccacugcccacccccu

SEQ ID NO: 2352385 - RNA, 20 nt, Human
agcccacugcccacccccuc

SEQ ID NO: 2352386 - RNA, 13 nt, Human
agccaugggacca

SEQ ID NO: 2352387 - RNA, 15 nt, Human
agccaugggaccaaa

SEQ ID NO: 2352388 - RNA, 16 nt, Human
agccaugggaccaaac

SEQ ID NO: 2352389 - RNA, 23 nt, Human
agcccacuguccugggccugcag

SEQ ID NO: 2352390 - RNA, 13 nt, Human
agcccagagguaa

SEQ ID NO: 2352391 - RNA, 22 nt, Human
agcccacuguccugggccugca

SEQ ID NO: 2352392 - RNA, 20 nt, Human
agcccacuguccugggccug

SEQ ID NO: 2352393 - RNA, 16 nt, Human
agcccagaggagggca

SEQ ID NO: 2352394 - RNA, 20 nt, Human
agcccagagguaacagaaca

SEQ ID NO: 2352395 - RNA, 21 nt, Human
agcccagagguaacagaacag

SEQ ID NO: 2352396 - RNA, 15 nt, Human
agcccagagguaaca

SEQ ID NO: 2352397 - RNA, 16 nt, Human
agcccagagguaacag

SEQ ID NO: 2352398 - RNA, 17 nt, Human
agcccagagguaacaga

SEQ ID NO: 2352399 - RNA, 18 nt, Human
agcccagagguaacagaa

SEQ ID NO: 2352400 - RNA, 15 nt, Human
agcccagcacugcuu

SEQ ID NO: 2352401 - RNA, 16 nt, Human
agcccagaucagcucc

SEQ ID NO: 2352402 - RNA, 17 nt, Human
agcccagaucagcuccu

SEQ ID NO: 2352403 - RNA, 18 nt, Human
agcccagaucagcuccua

SEQ ID NO: 2352404 - RNA, 22 nt, Human
agcccagauguuuuacgucugg

SEQ ID NO: 2352405 - RNA, 13 nt, Human
agcccacuucugc

SEQ ID NO: 2352406 - RNA, 19 nt, Human
agcccacuguccugggccu

SEQ ID NO: 2352407 - RNA, 18 nt, Human
agcccacuguccugggcc

SEQ ID NO: 2352408 - RNA, 17 nt, Human
agcccacuguccugggc

SEQ ID NO: 2352409 - RNA, 15 nt, Human
agcccacuguccugg

SEQ ID NO: 2352410 - RNA, 14 nt, Human
agcccacuucugcc

SEQ ID NO: 2352411 - RNA, 15 nt, Human
agcccacuucugcca

SEQ ID NO: 2352412 - RNA, 21 nt, Human
ugauuucagcaccuacagugu

SEQ ID NO: 2352413 - RNA, 17 nt, Human
ugauuucagcucacugc

SEQ ID NO: 2352414 - RNA, 20 nt, Human
ugauuucagcaccuacagug

SEQ ID NO: 2352415 - RNA, 22 nt, Human
ugauuuaguguuuuuaccucug

SEQ ID NO: 2352416 - RNA, 22 nt, Human
ugauuuaggagaagccaggaau

SEQ ID NO: 2352417 - RNA, 21 nt, Human
ugauuuaggagaagccaggaa

SEQ ID NO: 2352418 - RNA, 21 nt, Human
ugauuuagaacuguaugucag

SEQ ID NO: 2352419 - RNA, 16 nt, Human
ugauuuacgcucauug

SEQ ID NO: 2352420 - RNA, 20 nt, Human
ugauuuaggagaagccagga

SEQ ID NO: 2352421 - RNA, 16 nt, Human
ugauuuaggagaagcc

SEQ ID NO: 2352422 - RNA, 23 nt, Human
ugauuucaggauacucugucaga

SEQ ID NO: 2352423 - RNA, 18 nt, Human
ugauuucaggauacucug

SEQ ID NO: 2352424 - RNA, 11 nt, Human
ugauuucagga

SEQ ID NO: 2352425 - RNA, 19 nt, Human
ugauuucaggauacucugu

SEQ ID NO: 2352426 - RNA, 18 nt, Human
ugauuuccguuaaaauac

SEQ ID NO: 2352427 - RNA, 15 nt, Human
ugauuucauuaauac

SEQ ID NO: 2352428 - RNA, 22 nt, Human
ugauuuccguuaaaauaccagc

SEQ ID NO: 2352429 - RNA, 17 nt, Human
ugauuucugccuuccuu

SEQ ID NO: 2352430 - RNA, 19 nt, Human
ugauuucuucuguuuucug

SEQ ID NO: 2352431 - RNA, 15 nt, Human
ugauuucuuuccaga

SEQ ID NO: 2352432 - RNA, 16 nt, Human
ugauuucuuuccagag

SEQ ID NO: 2352433 - RNA, 17 nt, Human
ugauuuggggauauuuu

SEQ ID NO: 2352434 - RNA, 19 nt, Human
ugauuugaagaacauguga

SEQ ID NO: 2352435 - RNA, 17 nt, Human
ugauuugaagaacaugu

SEQ ID NO: 2352436 - RNA, 20 nt, Human
ugauuuggugaccaacuguc

SEQ ID NO: 2352437 - RNA, 19 nt, Human
ugauuuggugaccaacugu

SEQ ID NO: 2352438 - RNA, 13 nt, Human
ugauuuggugacc

SEQ ID NO: 2352439 - RNA, 23 nt, Human
ugauuuccuugaauguggcuuga

SEQ ID NO: 2352440 - RNA, 19 nt, Human
ugauuuccuugaauguggc

SEQ ID NO: 2352441 - RNA, 17 nt, Human
ugauuuccuugaaugug

SEQ ID NO: 2352442 - RNA, 16 nt, Human
ugauuuccuugaaugu

SEQ ID NO: 2352443 - RNA, 15 nt, Human
ugauuuccuugaaug

SEQ ID NO: 2352444 - RNA, 14 nt, Human
ugauuuccuugaau

SEQ ID NO: 2352445 - RNA, 13 nt, Human
ugauuuccuugaa

SEQ ID NO: 2352446 - RNA, 17 nt, Human
ugauuucuagaaagccu

SEQ ID NO: 2352447 - RNA, 13 nt, Human
ugauuucuauuca

SEQ ID NO: 2352448 - RNA, 14 nt, Human
ugauuucuauucaa

SEQ ID NO: 2352449 - RNA, 20 nt, Human
ugauuucuauucaagguggc

SEQ ID NO: 2352450 - RNA, 13 nt, Human
ugauucuccugcc

SEQ ID NO: 2352451 - RNA, 16 nt, Human
ugauucucaugccuca

SEQ ID NO: 2352452 - RNA, 13 nt, Human
ugauuuacaguuu

SEQ ID NO: 2352453 - RNA, 15 nt, Human
ugauuuacaguuuca

SEQ ID NO: 2352454 - RNA, 17 nt, Human
ugauuuacaguuucaaa

SEQ ID NO: 2352455 - RNA, 15 nt, Human
ugauucucaugccuc

SEQ ID NO: 2352456 - RNA, 14 nt, Human
ugauucucaugccu

SEQ ID NO: 2352457 - RNA, 13 nt, Human
ugauucucaugcc

SEQ ID NO: 2352458 - RNA, 12 nt, Human
ugauuccuuccu

SEQ ID NO: 2352459 - RNA, 21 nt, Human
ugauucucagggucucugcug

SEQ ID NO: 2352460 - RNA, 22 nt, Human
ugauucucagggucucugcugc

SEQ ID NO: 2352461 - RNA, 23 nt, Human
ugauucucagggucucugcugcc

SEQ ID NO: 2352462 - RNA, 17 nt, Human
ugauucccuccugcuac

SEQ ID NO: 2352463 - RNA, 19 nt, Human
ugauucauaguaacuucuu

SEQ ID NO: 2352464 - RNA, 19 nt, Human
ugauucaugccaauuagca

SEQ ID NO: 2352465 - RNA, 18 nt, Human
ugauucccuccugcuacu

SEQ ID NO: 2352466 - RNA, 14 nt, Human
ugauuccuuccugu

SEQ ID NO: 2352467 - RNA, 22 nt, Human
ugauucccaagcucugcuccuc

SEQ ID NO: 2352468 - RNA, 23 nt, Human
ugauucccaagcucugcuccucu

SEQ ID NO: 2352469 - RNA, 20 nt, Human
agcccagcuggugggaagcg

SEQ ID NO: 2352470 - RNA, 18 nt, Human
ugauucauaguaacuucu

SEQ ID NO: 2352471 - RNA, 16 nt, Human
ugauucauaguaacuu

SEQ ID NO: 2352472 - RNA, 21 nt, Human
ugauucauaaugacuuaagca

SEQ ID NO: 2352473 - RNA, 16 nt, Human
ugauucauaaugacuu

SEQ ID NO: 2352474 - RNA, 20 nt, Human
agcccagcagggccucaaag

SEQ ID NO: 2352475 - RNA, 15 nt, Human
agcccagcagggccu

SEQ ID NO: 2352476 - RNA, 21 nt, Human
agcccagcacugcuugaggaa

SEQ ID NO: 2352477 - RNA, 13 nt, Human
agcccagccacgu

SEQ ID NO: 2352478 - RNA, 21 nt, Human
agcccagccauuaccauggag

SEQ ID NO: 2352479 - RNA, 17 nt, Human
agcccagcugggucagg

SEQ ID NO: 2352480 - RNA, 20 nt, Human
agcccagcugggucaggcag

SEQ ID NO: 2352481 - RNA, 19 nt, Human
agcccagcugggucaggca

SEQ ID NO: 2352482 - RNA, 16 nt, Human
agcccagcugguggga

SEQ ID NO: 2352483 - RNA, 13 nt, Human
agcccagcuggug

SEQ ID NO: 2352484 - RNA, 21 nt, Human
agcccagcugggucaggcagg

SEQ ID NO: 2352485 - RNA, 23 nt, Human
agcccagcuugaaaccuucacuu

SEQ ID NO: 2352486 - RNA, 14 nt, Human
agcccaggaaaggc

SEQ ID NO: 2352487 - RNA, 22 nt, Human
uguuugggcagaagggagaagg

SEQ ID NO: 2352488 - RNA, 16 nt, Human
uguuugggcagaaggg

SEQ ID NO: 2352489 - RNA, 19 nt, Human
uguuuuacgucugggagaa

SEQ ID NO: 2352490 - RNA, 19 nt, Human
uguuuggggaugagaaagg

SEQ ID NO: 2352491 - RNA, 15 nt, Human
uguuuggggaugaga

SEQ ID NO: 2352492 - RNA, 19 nt, Human
uguuuggagacauuccugg

SEQ ID NO: 2352493 - RNA, 12 nt, Human
uguuuggagagc

SEQ ID NO: 2352494 - RNA, 15 nt, Human
uguuuggaggagcaa

SEQ ID NO: 2352495 - RNA, 14 nt, Human
uguuugcucucccg

SEQ ID NO: 2352496 - RNA, 23 nt, Human
uguuugcucucccgguucuucca

SEQ ID NO: 2352497 - RNA, 15 nt, Human
uguuuggagacauuc

SEQ ID NO: 2352498 - RNA, 20 nt, Human
uguuugccuucuacuuuuaa

SEQ ID NO: 2352499 - RNA, 22 nt, Human
uguuugccauacuuugucugaa

SEQ ID NO: 2352500 - RNA, 17 nt, Human
uguuugcuaucuuaauu

SEQ ID NO: 2352501 - RNA, 22 nt, Human
uguuugcaugugaaaaucaaau

SEQ ID NO: 2352502 - RNA, 15 nt, Human
uguuugccauacuuu

SEQ ID NO: 2352503 - RNA, 19 nt, Human
uguuugcuaagcauuccaa

SEQ ID NO: 2352504 - RNA, 14 nt, Human
uguuugccucugcc

SEQ ID NO: 2352505 - RNA, 15 nt, Human
uguuugcaucugaaa

SEQ ID NO: 2352506 - RNA, 16 nt, Human
uguuugccucugccuc

SEQ ID NO: 2352507 - RNA, 15 nt, Human
uguuugcuaagcauu

SEQ ID NO: 2352508 - RNA, 13 nt, Human
uguugucaaagag

SEQ ID NO: 2352509 - RNA, 11 nt, Human
uguugucauug

SEQ ID NO: 2352510 - RNA, 14 nt, Human
uguugucauugcug

SEQ ID NO: 2352511 - RNA, 14 nt, Human
uguugucagcugaa

SEQ ID NO: 2352512 - RNA, 13 nt, Human
uguugucccuucu

SEQ ID NO: 2352513 - RNA, 12 nt, Human
uguugucccuuc

SEQ ID NO: 2352514 - RNA, 15 nt, Human
uguugucauugcugu

SEQ ID NO: 2352515 - RNA, 15 nt, Human
uguuuucucuugaga

SEQ ID NO: 2352516 - RNA, 23 nt, Human
uguuuuccucccuucugcuacug

SEQ ID NO: 2352517 - RNA, 15 nt, Human
uguuuuccuuucuca

SEQ ID NO: 2352518 - RNA, 17 nt, Human
uguuuucaguguacaug

SEQ ID NO: 2352519 - RNA, 22 nt, Human
uguuuuccucccuucugcuacu

SEQ ID NO: 2352520 - RNA, 21 nt, Human
uguuuuccucccuucugcuac

SEQ ID NO: 2352521 - RNA, 14 nt, Human
uguuuuccucccuu

SEQ ID NO: 2352522 - RNA, 19 nt, Human
uguuuuccgugaaaacgga

SEQ ID NO: 2352523 - RNA, 16 nt, Human
uguuuuccgugaaaac

SEQ ID NO: 2352524 - RNA, 16 nt, Human
aguucucuccuucuuc

SEQ ID NO: 2352525 - RNA, 20 nt, Human
aguucucuucacucaaggau

SEQ ID NO: 2352526 - RNA, 21 nt, Human
uguuuucucuggaguauucua

SEQ ID NO: 2352527 - RNA, 16 nt, Human
aguucucucguaacug

SEQ ID NO: 2352528 - RNA, 17 nt, Human
aguucucucguaacugg

SEQ ID NO: 2352529 - RNA, 13 nt, Human
aguucucuccuuc

SEQ ID NO: 2352530 - RNA, 12 nt, Human
aguucucuccuu

SEQ ID NO: 2352531 - RNA, 19 nt, Human
uguuuuagacaaauacuca

SEQ ID NO: 2352532 - RNA, 18 nt, Human
uguuuuacugugaaacug

SEQ ID NO: 2352533 - RNA, 20 nt, Human
uguuuuagacaaauacucau

SEQ ID NO: 2352534 - RNA, 15 nt, Human
uguuuuacugugaaa

SEQ ID NO: 2352535 - RNA, 16 nt, Human
uguuuuacuaaagaaa

SEQ ID NO: 2352536 - RNA, 21 nt, Human
uguuuuacuaaagaaagauua

SEQ ID NO: 2352537 - RNA, 21 nt, Human
uguuuuagacaaauacucaug

SEQ ID NO: 2352538 - RNA, 22 nt, Human
uguuuuagacaaauacucaugu

SEQ ID NO: 2352539 - RNA, 23 nt, Human
uguuuuagacaaauacucaugug

SEQ ID NO: 2352540 - RNA, 24 nt, Human
uguuuuagacaaauacucaugugu

SEQ ID NO: 2352541 - RNA, 13 nt, Human
uguuuuauaauuu

SEQ ID NO: 2352542 - RNA, 20 nt, Human
uguuuuauaauuuugugaag

SEQ ID NO: 2352543 - RNA, 15 nt, Human
uguuuucaguguaca

SEQ ID NO: 2352544 - RNA, 15 nt, Human
uguuuucagacucag

SEQ ID NO: 2352545 - RNA, 23 nt, Human
uguuuuauuuuuuauuguuuuca

SEQ ID NO: 2352546 - RNA, 18 nt, Human
uguuuuauuuuuuauugu

SEQ ID NO: 2352547 - RNA, 19 nt, Human
uguuuuagaguuaacaaug

SEQ ID NO: 2352548 - RNA, 23 nt, Human
uguuuuagguuaaaaaaaggcau

SEQ ID NO: 2352549 - RNA, 16 nt, Human
uguuuuaguuaaauuu

SEQ ID NO: 2352550 - RNA, 17 nt, Human
uguuuuaguuaaauuuc

SEQ ID NO: 2352551 - RNA, 18 nt, Human
aguugauucagcucugca

SEQ ID NO: 2352552 - RNA, 17 nt, Human
aguugauucagcucugc

SEQ ID NO: 2352553 - RNA, 15 nt, Human
aguugauucagcucu

SEQ ID NO: 2352554 - RNA, 14 nt, Human
aguugauucagcuc

SEQ ID NO: 2352555 - RNA, 23 nt, Human
aguugauuuuacaauugaaauga

SEQ ID NO: 2352556 - RNA, 21 nt, Human
aguugauuuuacaauugaaau

SEQ ID NO: 2352557 - RNA, 18 nt, Human
aguugauuuaguguuuuu

SEQ ID NO: 2352558 - RNA, 13 nt, Human
aguugcaauaaua

SEQ ID NO: 2352559 - RNA, 14 nt, Human
aguugcaauaauac

SEQ ID NO: 2352560 - RNA, 17 nt, Human
aguugcaauaauacuuc

SEQ ID NO: 2352561 - RNA, 22 nt, Human
aguugcaauaauacuucucaaa

SEQ ID NO: 2352562 - RNA, 15 nt, Human
aguugcaauagaaca

SEQ ID NO: 2352563 - RNA, 17 nt, Human
aguugcaauagaacaga

SEQ ID NO: 2352564 - RNA, 19 nt, Human
aguugcaaucguaauguac

SEQ ID NO: 2352565 - RNA, 23 nt, Human
aguugauucagcucugcaagaau

SEQ ID NO: 2352566 - RNA, 19 nt, Human
aguugcaacuuuguauaaa

SEQ ID NO: 2352567 - RNA, 16 nt, Human
aguugauguugcauuu

SEQ ID NO: 2352568 - RNA, 15 nt, Human
aguugauguugcauu

SEQ ID NO: 2352569 - RNA, 23 nt, Human
aguugaucuggaacccagacuca

SEQ ID NO: 2352570 - RNA, 13 nt, Human
aguugauucagcu

SEQ ID NO: 2352571 - RNA, 13 nt, Human
aguugaucuggaa

SEQ ID NO: 2352572 - RNA, 17 nt, Human
aguugaucuggaaccca

SEQ ID NO: 2352573 - RNA, 15 nt, Human
aguugaucuggaacc

SEQ ID NO: 2352574 - RNA, 21 nt, Human
aguugaucuggaacccagacu

SEQ ID NO: 2352575 - RNA, 20 nt, Human
aguugaucuggaacccagac

SEQ ID NO: 2352576 - RNA, 19 nt, Human
aguugaucuggaacccaga

SEQ ID NO: 2352577 - RNA, 18 nt, Human
aguugaucuggaacccag

SEQ ID NO: 2352578 - RNA, 22 nt, Human
aguugauagcacagacccugcc

SEQ ID NO: 2352579 - RNA, 23 nt, Human
aguugauagcacagacccugccc

SEQ ID NO: 2352580 - RNA, 15 nt, Human
aguugauauagaaca

SEQ ID NO: 2352581 - RNA, 18 nt, Human
aguucuuugggccagaca

SEQ ID NO: 2352582 - RNA, 21 nt, Human
aguugaucgccuuucccaggu

SEQ ID NO: 2352583 - RNA, 17 nt, Human
aguugauauagaacagu

SEQ ID NO: 2352584 - RNA, 19 nt, Human
aguugauauagaacagugc

SEQ ID NO: 2352585 - RNA, 21 nt, Human
aguugauaugccuuuucccaa

SEQ ID NO: 2352586 - RNA, 18 nt, Human
aguucuguagaaaugguu

SEQ ID NO: 2352587 - RNA, 16 nt, Human
aguucuguagaaaugg

SEQ ID NO: 2352588 - RNA, 17 nt, Human
aguucuguagaaauggu

SEQ ID NO: 2352589 - RNA, 13 nt, Human
aguucuguagaaa

SEQ ID NO: 2352590 - RNA, 15 nt, Human
aguucuguagaaaug

SEQ ID NO: 2352591 - RNA, 16 nt, Human
aguucugaagaagaug

SEQ ID NO: 2352592 - RNA, 15 nt, Human
aguucugaagaagau

SEQ ID NO: 2352593 - RNA, 13 nt, Human
aguucugaagaag

SEQ ID NO: 2352594 - RNA, 14 nt, Human
aguucugaagaaga

SEQ ID NO: 2352595 - RNA, 14 nt, Human
aguugauagcacag

SEQ ID NO: 2352596 - RNA, 17 nt, Human
aguucuuugggccagac

SEQ ID NO: 2352597 - RNA, 16 nt, Human
aguucuuugggccaga

SEQ ID NO: 2352598 - RNA, 15 nt, Human
aguucuuugggccag

SEQ ID NO: 2352599 - RNA, 12 nt, Human
aguucuugugcc

SEQ ID NO: 2352600 - RNA, 22 nt, Human
aguucuugucugauuggcucac

SEQ ID NO: 2352601 - RNA, 13 nt, Human
aguucuugugcca

SEQ ID NO: 2352602 - RNA, 14 nt, Human
aguucuugugccau

SEQ ID NO: 2352603 - RNA, 18 nt, Human
aguucuucgggaagagag

SEQ ID NO: 2352604 - RNA, 19 nt, Human
aguucuucgggaagagagg

SEQ ID NO: 2352605 - RNA, 20 nt, Human
aguucuucgggaagagagga

SEQ ID NO: 2352606 - RNA, 22 nt, Human
aguucuucgggaagagaggagu

SEQ ID NO: 2352607 - RNA, 13 nt, Human
aguucuucuccaa

SEQ ID NO: 2352608 - RNA, 15 nt, Human
aguugauagcacaga

SEQ ID NO: 2352609 - RNA, 19 nt, Human
aguugauagcacagacccu

SEQ ID NO: 2352610 - RNA, 20 nt, Human
aguugauagcacagacccug

SEQ ID NO: 2352611 - RNA, 21 nt, Human
aguugauagcacagacccugc

SEQ ID NO: 2352612 - RNA, 15 nt, Human
aguuuccuuggcugg

SEQ ID NO: 2352613 - RNA, 17 nt, Human
aguuuccuuggcuggug

SEQ ID NO: 2352614 - RNA, 18 nt, Human
aguuuccuuggcuggugc

SEQ ID NO: 2352615 - RNA, 23 nt, Human
aguuuccucaggcugcuggagga

SEQ ID NO: 2352616 - RNA, 20 nt, Human
aguuuccucaggcugcugga

SEQ ID NO: 2352617 - RNA, 12 nt, Human
aguuuccugaaa

SEQ ID NO: 2352618 - RNA, 15 nt, Human
aguuucguuuucaaa

SEQ ID NO: 2352619 - RNA, 15 nt, Human
aguuucucagcuccc

SEQ ID NO: 2352620 - RNA, 19 nt, Human
aguuuccuuggcuggugca

SEQ ID NO: 2352621 - RNA, 16 nt, Human
aguuucguuuucaaaa

SEQ ID NO: 2352622 - RNA, 16 nt, Human
aguuucucagcuccca

SEQ ID NO: 2352623 - RNA, 21 nt, Human
aguuucuccaagcaggacaug

SEQ ID NO: 2352624 - RNA, 13 nt, Human
aguuucuccaagc

SEQ ID NO: 2352625 - RNA, 15 nt, Human
aguuucuccaagcag

SEQ ID NO: 2352626 - RNA, 15 nt, Human
aguuuauuuuaagac

SEQ ID NO: 2352627 - RNA, 15 nt, Human
aguuucaaaaacugu

SEQ ID NO: 2352628 - RNA, 18 nt, Human
aguuuccucaggcugcug

SEQ ID NO: 2352629 - RNA, 16 nt, Human
aguuucaaugugauuc

SEQ ID NO: 2352630 - RNA, 22 nt, Human
aguuucaaugugauucuaaugu

SEQ ID NO: 2352631 - RNA, 12 nt, Human
aguuucaaugug

SEQ ID NO: 2352632 - RNA, 14 nt, Human
aguuucaaugugau

SEQ ID NO: 2352633 - RNA, 15 nt, Human
aguuucaaugugauu

SEQ ID NO: 2352634 - RNA, 21 nt, Human
uuaaauuauaacuuaaaauau

SEQ ID NO: 2352635 - RNA, 21 nt, Human
uuaaauucaguccuaagaaag

SEQ ID NO: 2352636 - RNA, 12 nt, Human
uuaaauaaaugu

SEQ ID NO: 2352637 - RNA, 21 nt, Human
uuaaauaaaguaucaugcauu

SEQ ID NO: 2352638 - RNA, 13 nt, Human
uuaaauucuugca

SEQ ID NO: 2352639 - RNA, 16 nt, Human
uuaaauucuugcaaag

SEQ ID NO: 2352640 - RNA, 23 nt, Human
uuaaauucuccaguuuuuuguua

SEQ ID NO: 2352641 - RNA, 22 nt, Human
aguuuucaagucaaauuaauaa

SEQ ID NO: 2352642 - RNA, 16 nt, Human
aguuuucagaaccucu

SEQ ID NO: 2352643 - RNA, 21 nt, Human
aguuuucaagucaaauuaaua

SEQ ID NO: 2352644 - RNA, 22 nt, Human
aguuuucacucuuauugcccac

SEQ ID NO: 2352645 - RNA, 16 nt, Human
aguuuuauugagaauu

SEQ ID NO: 2352646 - RNA, 21 nt, Human
aguuuuauugagaauuuuaaa

SEQ ID NO: 2352647 - RNA, 15 nt, Human
aguuuuaucauuuuc

SEQ ID NO: 2352648 - RNA, 23 nt, Human
aguuuuauuaauaaacauucuau

SEQ ID NO: 2352649 - RNA, 20 nt, Human
aguuuucccuugaggaaaca

SEQ ID NO: 2352650 - RNA, 18 nt, Human
aguuuucccuugaggaaa

SEQ ID NO: 2352651 - RNA, 21 nt, Human
aguuuuccaugaaaacguuuu

SEQ ID NO: 2352652 - RNA, 16 nt, Human
aguuuuccaugaaaac

SEQ ID NO: 2352653 - RNA, 13 nt, Human
aguuuuccaugaa

SEQ ID NO: 2352654 - RNA, 12 nt, Human
aguuuuccauga

SEQ ID NO: 2352655 - RNA, 21 nt, Human
aguuuucagaaccucuucccc

SEQ ID NO: 2352656 - RNA, 20 nt, Human
aguuuucagaaccucuuccc

SEQ ID NO: 2352657 - RNA, 18 nt, Human
aguuuucagaaccucuuc

SEQ ID NO: 2352658 - RNA, 17 nt, Human
aguuuucagaaccucuu

SEQ ID NO: 2352659 - RNA, 22 nt, Human
aguuuucagaaccucuucccca

SEQ ID NO: 2352660 - RNA, 12 nt, Human
aguuuucagugg

SEQ ID NO: 2352661 - RNA, 11 nt, Human
aguuuucaguu

SEQ ID NO: 2352662 - RNA, 15 nt, Human
aguuuucaguuugua

SEQ ID NO: 2352663 - RNA, 17 nt, Human
aguuuucaguuuguaua

SEQ ID NO: 2352664 - RNA, 20 nt, Human
aguuuggggguuuugcuguu

SEQ ID NO: 2352665 - RNA, 21 nt, Human
aguuucucagcucccauuucu

SEQ ID NO: 2352666 - RNA, 22 nt, Human
aguuuggccgggugcgguggcu

SEQ ID NO: 2352667 - RNA, 22 nt, Human
aguuuguacagacguaugcuua

SEQ ID NO: 2352668 - RNA, 20 nt, Human
aguuugguucacuuacagau

SEQ ID NO: 2352669 - RNA, 14 nt, Human
aguuugucagacuu

SEQ ID NO: 2352670 - RNA, 18 nt, Human
aguuugucacaugaaaca

SEQ ID NO: 2352671 - RNA, 16 nt, Human
aguuuguccuguagag

SEQ ID NO: 2352672 - RNA, 22 nt, Human
aguuuguaugccaagugagaag

SEQ ID NO: 2352673 - RNA, 14 nt, Human
aguuuguauaacuu

SEQ ID NO: 2352674 - RNA, 13 nt, Human
aguuuguauauac

SEQ ID NO: 2352675 - RNA, 23 nt, Human
aguuuguacagacguaugcuuau

SEQ ID NO: 2352676 - RNA, 15 nt, Human
aguuuguacaugcau

SEQ ID NO: 2352677 - RNA, 17 nt, Human
aguuuguauaacuucuu

SEQ ID NO: 2352678 - RNA, 18 nt, Human
aguuuguacaugcauuca

SEQ ID NO: 2352679 - RNA, 14 nt, Human
aguuuuaucauuuu

SEQ ID NO: 2352680 - RNA, 20 nt, Human
aguuuuaucauuuucaaaau

SEQ ID NO: 2352681 - RNA, 17 nt, Human
aguuugucgcucaugug

SEQ ID NO: 2352682 - RNA, 19 nt, Human
aguuugucgcucaugugug

SEQ ID NO: 2352683 - RNA, 21 nt, Human
aguuugucgcucaugugugca

SEQ ID NO: 2352684 - RNA, 18 nt, Human
uuaaaccucucuucuacc

SEQ ID NO: 2352685 - RNA, 13 nt, Human
uuaaacggauuau

SEQ ID NO: 2352686 - RNA, 14 nt, Human
uuaaacggauuauu

SEQ ID NO: 2352687 - RNA, 15 nt, Human
uuaaacggauuauuu

SEQ ID NO: 2352688 - RNA, 20 nt, Human
uuaaacccuggaucaguccu

SEQ ID NO: 2352689 - RNA, 13 nt, Human
uuaaacccauuuu

SEQ ID NO: 2352690 - RNA, 16 nt, Human
uuaaacccauuuuagu

SEQ ID NO: 2352691 - RNA, 14 nt, Human
uuaaaaucauuucu

SEQ ID NO: 2352692 - RNA, 17 nt, Human
uuaaaccgccaaggcug

SEQ ID NO: 2352693 - RNA, 16 nt, Human
uuaaaauauuccugca

SEQ ID NO: 2352694 - RNA, 19 nt, Human
uuaaaauauuccugcauuu

SEQ ID NO: 2352695 - RNA, 14 nt, Human
uuaaaauauuuuau

SEQ ID NO: 2352696 - RNA, 12 nt, Human
uuaaaauauuuu

SEQ ID NO: 2352697 - RNA, 14 nt, Human
uuaaaauauggcua

SEQ ID NO: 2352698 - RNA, 17 nt, Human
uuaaaauauuuauuuau

SEQ ID NO: 2352699 - RNA, 12 nt, Human
uuaaaauauauu

SEQ ID NO: 2352700 - RNA, 13 nt, Human
uuaaaauaucuuu

SEQ ID NO: 2352701 - RNA, 19 nt, Human
uuaaaauaucuuuugaccu

SEQ ID NO: 2352702 - RNA, 17 nt, Human
uuaaauaaaguaucaug

SEQ ID NO: 2352703 - RNA, 19 nt, Human
uuaaauaaaguaucaugca

SEQ ID NO: 2352704 - RNA, 20 nt, Human
uuaaauaaaagugaucaaua

SEQ ID NO: 2352705 - RNA, 14 nt, Human
uuaaauaaaaguga

SEQ ID NO: 2352706 - RNA, 13 nt, Human
uuaaauaaaagug

SEQ ID NO: 2352707 - RNA, 22 nt, Human
uuaaacggauuauuuuuucaga

SEQ ID NO: 2352708 - RNA, 16 nt, Human
uuaaacggauuauuuu

SEQ ID NO: 2352709 - RNA, 21 nt, Human
uuaaacggauuauuuuuucag

SEQ ID NO: 2352710 - RNA, 15 nt, Human
uuaaauaaaucauaa

SEQ ID NO: 2352711 - RNA, 13 nt, Human
uuaaauaaaucau

SEQ ID NO: 2352712 - RNA, 19 nt, Human
uuaaauaaugugaaacugg

SEQ ID NO: 2352713 - RNA, 22 nt, Human
uuaaauaaugugaaacuggauu

SEQ ID NO: 2352714 - RNA, 21 nt, Human
uuaaauaaugugaaacuggau

SEQ ID NO: 2352715 - RNA, 20 nt, Human
uuaaauaaugugaaacugga

SEQ ID NO: 2352716 - RNA, 13 nt, Human
uuaaaaaacuugu

SEQ ID NO: 2352717 - RNA, 11 nt, Human
uuaaaaaacaa

SEQ ID NO: 2352718 - RNA, 18 nt, Human
uuaaaaaguggaaaaaua

SEQ ID NO: 2352719 - RNA, 14 nt, Human
uuaaaaagucuuca

SEQ ID NO: 2352720 - RNA, 13 nt, Human
uuaaaaauauaaa

SEQ ID NO: 2352721 - RNA, 17 nt, Human
uuaaaacaacacucaca

SEQ ID NO: 2352722 - RNA, 19 nt, Human
uuaaaaauguaaauauucu

SEQ ID NO: 2352723 - RNA, 21 nt, Human
uuaaaaauguuaaaauguauu

SEQ ID NO: 2352724 - RNA, 13 nt, Human
uuaaaaauguaaa

SEQ ID NO: 2352725 - RNA, 14 nt, Human
uuaaaaauguaaau

SEQ ID NO: 2352726 - RNA, 16 nt, Human
uuaaaaauguaaauau

SEQ ID NO: 2352727 - RNA, 17 nt, Human
uuaaaaauguaaauauu

SEQ ID NO: 2352728 - RNA, 20 nt, Human
uuaaaaauauggaacuucua

SEQ ID NO: 2352729 - RNA, 22 nt, Human
uuaaaaauauggaacuucuaau

SEQ ID NO: 2352730 - RNA, 23 nt, Human
uuaaaaauauggaacuucuaaua

SEQ ID NO: 2352731 - RNA, 15 nt, Human
uuaaaaauauaaaac

SEQ ID NO: 2352732 - RNA, 16 nt, Human
uuaaaaauauaaaacu

SEQ ID NO: 2352733 - RNA, 20 nt, Human
uuaaaaaugguuuaaauggu

SEQ ID NO: 2352734 - RNA, 19 nt, Human
aguugcaauugaauuaaau

SEQ ID NO: 2352735 - RNA, 18 nt, Human
aguugcaauugaauuaaa

SEQ ID NO: 2352736 - RNA, 20 nt, Human
aguugcaauugaauuaaauu

SEQ ID NO: 2352737 - RNA, 16 nt, Human
aguugcacagcuauga

SEQ ID NO: 2352738 - RNA, 22 nt, Human
aguugcauagguuuaauaauuu

SEQ ID NO: 2352739 - RNA, 20 nt, Human
aguugcauggcaucaccucc

SEQ ID NO: 2352740 - RNA, 21 nt, Human
aguugcauggcaucaccucca

SEQ ID NO: 2352741 - RNA, 20 nt, Human
aguugccagucaccccggcc

SEQ ID NO: 2352742 - RNA, 21 nt, Human
uuaaaaaaauugguuggagaa

SEQ ID NO: 2352743 - RNA, 16 nt, Human
uuaaaaaaauuuaagu

SEQ ID NO: 2352744 - RNA, 15 nt, Human
uuaaaaaagaaacau

SEQ ID NO: 2352745 - RNA, 18 nt, Human
uuaaaaaagaaacauuug

SEQ ID NO: 2352746 - RNA, 13 nt, Human
uguugucagcuga

SEQ ID NO: 2352747 - RNA, 13 nt, Human
uguuguauaaauu

SEQ ID NO: 2352748 - RNA, 11 nt, Human
uguuguauaaa

SEQ ID NO: 2352749 - RNA, 14 nt, Human
uguuguauaaauuu

SEQ ID NO: 2352750 - RNA, 15 nt, Human
uguuguaugccuuua

SEQ ID NO: 2352751 - RNA, 13 nt, Human
uguuguauuuuaa

SEQ ID NO: 2352752 - RNA, 21 nt, Human
uguuguaaauauuuauguaaa

SEQ ID NO: 2352753 - RNA, 14 nt, Human
uguuguaaauauuu

SEQ ID NO: 2352754 - RNA, 23 nt, Human
uguuguacauuuaugauuuaaua

SEQ ID NO: 2352755 - RNA, 13 nt, Human
uguuguacauuua

SEQ ID NO: 2352756 - RNA, 14 nt, Human
uguuguacauuuau

SEQ ID NO: 2352757 - RNA, 15 nt, Human
uguuguacauuuaug

SEQ ID NO: 2352758 - RNA, 16 nt, Human
uguuguacauuuauga

SEQ ID NO: 2352759 - RNA, 17 nt, Human
uguuguacauuuaugau

SEQ ID NO: 2352760 - RNA, 18 nt, Human
uguuguacauuuaugauu

SEQ ID NO: 2352761 - RNA, 20 nt, Human
uguuguacauuuaugauuua

SEQ ID NO: 2352762 - RNA, 22 nt, Human
uguuguacauuuaugauuuaau

SEQ ID NO: 2352763 - RNA, 19 nt, Human
aguucgagaccagccuggc

SEQ ID NO: 2352764 - RNA, 18 nt, Human
aguucgagaccagccugg

SEQ ID NO: 2352765 - RNA, 21 nt, Human
aguucgagaccagccuggcca

SEQ ID NO: 2352766 - RNA, 15 nt, Human
aguucuaaauuuugu

SEQ ID NO: 2352767 - RNA, 13 nt, Human
uguugggccagga

SEQ ID NO: 2352768 - RNA, 18 nt, Human
uguugggagugaggaugu

SEQ ID NO: 2352769 - RNA, 18 nt, Human
uguugggauacugcaggg

SEQ ID NO: 2352770 - RNA, 16 nt, Human
uguugggccaggagcc

SEQ ID NO: 2352771 - RNA, 15 nt, Human
uguugggauuccuga

SEQ ID NO: 2352772 - RNA, 17 nt, Human
uguugggauuccugacc

SEQ ID NO: 2352773 - RNA, 18 nt, Human
uguugggauuccugaccc

SEQ ID NO: 2352774 - RNA, 17 nt, Human
aguucgagaccagccug

SEQ ID NO: 2352775 - RNA, 14 nt, Human
aguucgagaccagc

SEQ ID NO: 2352776 - RNA, 18 nt, Human
aguucgagaccaaccuga

SEQ ID NO: 2352777 - RNA, 23 nt, Human
aguuccugucccuucucuuaauu

SEQ ID NO: 2352778 - RNA, 21 nt, Human
aguuccugucccuucucuuaa

SEQ ID NO: 2352779 - RNA, 20 nt, Human
aguuccuucagcuuccauuu

SEQ ID NO: 2352780 - RNA, 14 nt, Human
aguuccuuauguau

SEQ ID NO: 2352781 - RNA, 20 nt, Human
aguuccuugaucuguauaua

SEQ ID NO: 2352782 - RNA, 18 nt, Human
aguucccuuggccucaga

SEQ ID NO: 2352783 - RNA, 17 nt, Human
aguucccuuggccucag

SEQ ID NO: 2352784 - RNA, 16 nt, Human
aguucccuuggccuca

SEQ ID NO: 2352785 - RNA, 15 nt, Human
aguucccuuggccuc

SEQ ID NO: 2352786 - RNA, 20 nt, Human
aguuccugucccuucucuua

SEQ ID NO: 2352787 - RNA, 17 nt, Human
aguuccuagccaccgcc

SEQ ID NO: 2352788 - RNA, 16 nt, Human
aguuccgauuucccag

SEQ ID NO: 2352789 - RNA, 13 nt, Human
aguucccuuggcc

SEQ ID NO: 2352790 - RNA, 21 nt, Human
aguucccugaaaacccagaga

SEQ ID NO: 2352791 - RNA, 24 nt, Human
aguucccugaaaacccagagagga

SEQ ID NO: 2352792 - RNA, 20 nt, Human
aguucccugaaaacccagag

SEQ ID NO: 2352793 - RNA, 19 nt, Human
aguucccugaaaacccaga

SEQ ID NO: 2352794 - RNA, 14 nt, Human
aguucccugaaaac

SEQ ID NO: 2352795 - RNA, 17 nt, Human
aguucccuacuuccugu

SEQ ID NO: 2352796 - RNA, 21 nt, Human
aguuauuuuuauuuauuuaaa

SEQ ID NO: 2352797 - RNA, 13 nt, Human
aguucaaacaaga

SEQ ID NO: 2352798 - RNA, 19 nt, Human
aguuauuuuaauuaucuuu

SEQ ID NO: 2352799 - RNA, 21 nt, Human
aguuauuuauuuauuggagau

SEQ ID NO: 2352800 - RNA, 14 nt, Human
aguuauuuucuaca

SEQ ID NO: 2352801 - RNA, 23 nt, Human
aguuauuuucuacagugguuuua

SEQ ID NO: 2352802 - RNA, 22 nt, Human
aguuauuuaugccucuguauuu

SEQ ID NO: 2352803 - RNA, 18 nt, Human
aguuauuguacagcuguu

SEQ ID NO: 2352804 - RNA, 19 nt, Human
aguuauuguacagcuguuu

SEQ ID NO: 2352805 - RNA, 21 nt, Human
aguuauuguacagcuguuuaa

SEQ ID NO: 2352806 - RNA, 22 nt, Human
aguuauuguacagcuguuuaag

SEQ ID NO: 2352807 - RNA, 18 nt, Human
aguucaaauucuucugaa

SEQ ID NO: 2352808 - RNA, 15 nt, Human
aguguuucccauaau

SEQ ID NO: 2352809 - RNA, 22 nt, Human
aguguuuauuuuucauauugug

SEQ ID NO: 2352810 - RNA, 15 nt, Human
aguguuuauuuuuca

SEQ ID NO: 2352811 - RNA, 17 nt, Human
aguguuuauuuuucaua

SEQ ID NO: 2352812 - RNA, 19 nt, Human
aguguuuauuuuucauauu

SEQ ID NO: 2352813 - RNA, 21 nt, Human
aguguuuauuuuucauauugu

SEQ ID NO: 2352814 - RNA, 18 nt, Human
uguucuuuccaaaguaca

SEQ ID NO: 2352815 - RNA, 19 nt, Human
aguguuucgacagcugauu

SEQ ID NO: 2352816 - RNA, 16 nt, Human
aguguuucccauaauu

SEQ ID NO: 2352817 - RNA, 13 nt, Human
aguguuuccuuuu

SEQ ID NO: 2352818 - RNA, 16 nt, Human
aguguuuccuuuuugg

SEQ ID NO: 2352819 - RNA, 13 nt, Human
aguguuucugugc

SEQ ID NO: 2352820 - RNA, 16 nt, Human
aguuacauuaauguua

SEQ ID NO: 2352821 - RNA, 13 nt, Human
aguguuucuguua

SEQ ID NO: 2352822 - RNA, 14 nt, Human
aguguuucuguuau

SEQ ID NO: 2352823 - RNA, 14 nt, Human
aguguuucugugca

SEQ ID NO: 2352824 - RNA, 15 nt, Human
aguguuucugugcau

SEQ ID NO: 2352825 - RNA, 17 nt, Human
aguguuucugugcaugg

SEQ ID NO: 2352826 - RNA, 12 nt, Human
aguguuucuguu

SEQ ID NO: 2352827 - RNA, 17 nt, Human
aguuagggaauggcaca

SEQ ID NO: 2352828 - RNA, 18 nt, Human
aguuaggcuauucacaac

SEQ ID NO: 2352829 - RNA, 16 nt, Human
aguuaggauagcauuu

SEQ ID NO: 2352830 - RNA, 18 nt, Human
aguuaggauagcauuuuu

SEQ ID NO: 2352831 - RNA, 22 nt, Human
aguuaggaaauaaaaccuuuca

SEQ ID NO: 2352832 - RNA, 21 nt, Human
aguuaggaaauaaaaccuuuc

SEQ ID NO: 2352833 - RNA, 20 nt, Human
aguuaggaaauaaaaccuuu

SEQ ID NO: 2352834 - RNA, 18 nt, Human
aguuaggaaauaaaaccu

SEQ ID NO: 2352835 - RNA, 17 nt, Human
aguuaggaaauaaaacc

SEQ ID NO: 2352836 - RNA, 18 nt, Human
aguuacuaagaagaaaau

SEQ ID NO: 2352837 - RNA, 23 nt, Human
aguuacuaagaagaaaauugcug

SEQ ID NO: 2352838 - RNA, 17 nt, Human
aguuaguuucuuuggga

SEQ ID NO: 2352839 - RNA, 23 nt, Human
aguuaguucucucguaacugguu

SEQ ID NO: 2352840 - RNA, 16 nt, Human
aguuaguuucuuuggg

SEQ ID NO: 2352841 - RNA, 17 nt, Human
aguuaguagcauguuga

SEQ ID NO: 2352842 - RNA, 16 nt, Human
aguuaguagcauguug

SEQ ID NO: 2352843 - RNA, 17 nt, Human
aguuagucuacucuuaa

SEQ ID NO: 2352844 - RNA, 14 nt, Human
aguuaguagcaugu

SEQ ID NO: 2352845 - RNA, 15 nt, Human
aguuaguagcauguu

SEQ ID NO: 2352846 - RNA, 22 nt, Human
aguuagucuacucuuaagccau

SEQ ID NO: 2352847 - RNA, 20 nt, Human
aguuaguggauuacugccau

SEQ ID NO: 2352848 - RNA, 17 nt, Human
aguuaguggauuacugc

SEQ ID NO: 2352849 - RNA, 23 nt, Human
aguuagucuacucuuaagccauc

SEQ ID NO: 2352850 - RNA, 12 nt, Human
aguuauaaauca

SEQ ID NO: 2352851 - RNA, 21 nt, Human
aguuauaaguagcaggccaag

SEQ ID NO: 2352852 - RNA, 15 nt, Human
aguuauagaugucua

SEQ ID NO: 2352853 - RNA, 17 nt, Human
aguuauagaugucuagg

SEQ ID NO: 2352854 - RNA, 19 nt, Human
aguuauagaugucuaggua

SEQ ID NO: 2352855 - RNA, 17 nt, Human
aguuaucuaaaagaaau

SEQ ID NO: 2352856 - RNA, 19 nt, Human
aguuauaguauaucuggac

SEQ ID NO: 2352857 - RNA, 19 nt, Human
aguuaugccgcuagauaca

SEQ ID NO: 2352858 - RNA, 20 nt, Human
aguuaugauuuuuuuuucau

SEQ ID NO: 2352859 - RNA, 19 nt, Human
aguuauggcuauaggugcu

SEQ ID NO: 2352860 - RNA, 18 nt, Human
aguuauggccuauacacu

SEQ ID NO: 2352861 - RNA, 21 nt, Human
aguuauggccuauacacuauu

SEQ ID NO: 2352862 - RNA, 14 nt, Human
aguuaugugaauga

SEQ ID NO: 2352863 - RNA, 13 nt, Human
aguuaugugaaug

SEQ ID NO: 2352864 - RNA, 15 nt, Human
aguuaugugaaugau

SEQ ID NO: 2352865 - RNA, 20 nt, Human
aguuauuauauuuacaaaug

SEQ ID NO: 2352866 - RNA, 18 nt, Human
aguuauugacaaacucuc

SEQ ID NO: 2352867 - RNA, 17 nt, Human
aguuauugacaaacucu

SEQ ID NO: 2352868 - RNA, 13 nt, Human
aguuauugcaguu

SEQ ID NO: 2352869 - RNA, 16 nt, Human
aguuauugcaguuuau

SEQ ID NO: 2352870 - RNA, 18 nt, Human
aguuauugcaguuuauca

SEQ ID NO: 2352871 - RNA, 19 nt, Human
aguuauugcaguuuaucau

SEQ ID NO: 2352872 - RNA, 22 nt, Human
aguuauugcaguuuaucauuca

SEQ ID NO: 2352873 - RNA, 12 nt, Human
aguuauuguaca

SEQ ID NO: 2352874 - RNA, 13 nt, Human
aguuauuguacag

SEQ ID NO: 2352875 - RNA, 13 nt, Human
aguggcagggcuc

SEQ ID NO: 2352876 - RNA, 14 nt, Human
aguggcagggcuca

SEQ ID NO: 2352877 - RNA, 17 nt, Human
aguggcagggcucagga

SEQ ID NO: 2352878 - RNA, 18 nt, Human
aguggcagggcucaggau

SEQ ID NO: 2352879 - RNA, 14 nt, Human
aguggcagcugcuu

SEQ ID NO: 2352880 - RNA, 20 nt, Human
aguggcagcugcuuuugucu

SEQ ID NO: 2352881 - RNA, 12 nt, Human
aguggcagcugc

SEQ ID NO: 2352882 - RNA, 13 nt, Human
aguggcagcugcu

SEQ ID NO: 2352883 - RNA, 12 nt, Human
ugugcaaauccu

SEQ ID NO: 2352884 - RNA, 15 nt, Human
ugugcaaauuaacag

SEQ ID NO: 2352885 - RNA, 18 nt, Human
ugugcaacaggguaugga

SEQ ID NO: 2352886 - RNA, 20 nt, Human
ugugcaacaggguauggacu

SEQ ID NO: 2352887 - RNA, 11 nt, Human
aguggcagcug

SEQ ID NO: 2352888 - RNA, 15 nt, Human
aguggggcucgccau

SEQ ID NO: 2352889 - RNA, 11 nt, Human
aguggcagggg

SEQ ID NO: 2352890 - RNA, 16 nt, Human
agugggggagagcagg

SEQ ID NO: 2352891 - RNA, 19 nt, Human
agugggggagagcaggcug

SEQ ID NO: 2352892 - RNA, 18 nt, Human
aguggggcucgccaugcc

SEQ ID NO: 2352893 - RNA, 18 nt, Human
aguggcaggggacaggag

SEQ ID NO: 2352894 - RNA, 19 nt, Human
agugggggaguggccacag

SEQ ID NO: 2352895 - RNA, 20 nt, Human
agugggggaguggccacaga

SEQ ID NO: 2352896 - RNA, 18 nt, Human
agugggugaauaauacag

SEQ ID NO: 2352897 - RNA, 13 nt, Human
agugggugaauaa

SEQ ID NO: 2352898 - RNA, 18 nt, Human
agugggggaucacagccu

SEQ ID NO: 2352899 - RNA, 21 nt, Human
agugggguuaucucuguguua

SEQ ID NO: 2352900 - RNA, 21 nt, Human
agugggggagagcaggcuggc

SEQ ID NO: 2352901 - RNA, 23 nt, Human
agugggggagagcaggcuggcag

SEQ ID NO: 2352902 - RNA, 20 nt, Human
agugggguuaucucuguguu

SEQ ID NO: 2352903 - RNA, 19 nt, Human
agugggguugcaaccacug

SEQ ID NO: 2352904 - RNA, 22 nt, Human
agugggguugcaaccacugcaa

SEQ ID NO: 2352905 - RNA, 14 nt, Human
agugggucccacuu

SEQ ID NO: 2352906 - RNA, 13 nt, Human
aguguacagucuu

SEQ ID NO: 2352907 - RNA, 16 nt, Human
aguguaauuucuuugc

SEQ ID NO: 2352908 - RNA, 21 nt, Human
aguguaauuucuuugccuguu

SEQ ID NO: 2352909 - RNA, 15 nt, Human
aguguacagucuugu

SEQ ID NO: 2352910 - RNA, 16 nt, Human
aguguacagucuugua

SEQ ID NO: 2352911 - RNA, 22 nt, Human
aguguacauggaauaacaugua

SEQ ID NO: 2352912 - RNA, 21 nt, Human
aguguacauggaauaacaugu

SEQ ID NO: 2352913 - RNA, 11 nt, Human
aguguaaaaua

SEQ ID NO: 2352914 - RNA, 20 nt, Human
agugguuuuauacugaagga

SEQ ID NO: 2352915 - RNA, 21 nt, Human
agugguuuuauacugaaggaa

SEQ ID NO: 2352916 - RNA, 23 nt, Human
agugguuuuauacugaaggaaaa

SEQ ID NO: 2352917 - RNA, 13 nt, Human
aguguaaaauaag

SEQ ID NO: 2352918 - RNA, 13 nt, Human
aguguaaguguga

SEQ ID NO: 2352919 - RNA, 19 nt, Human
agugguuguuaguuauaga

SEQ ID NO: 2352920 - RNA, 17 nt, Human
agugguuuuauacugaa

SEQ ID NO: 2352921 - RNA, 18 nt, Human
agugguuuuauacugaag

SEQ ID NO: 2352922 - RNA, 11 nt, Human
aguggugccua

SEQ ID NO: 2352923 - RNA, 15 nt, Human
aguggguuucacaag

SEQ ID NO: 2352924 - RNA, 18 nt, Human
aguggguuauucuggagu

SEQ ID NO: 2352925 - RNA, 19 nt, Human
aguggguuauucuggaguu

SEQ ID NO: 2352926 - RNA, 21 nt, Human
aguggguuucacaagugaaaa

SEQ ID NO: 2352927 - RNA, 18 nt, Human
agugggugguggaucugu

SEQ ID NO: 2352928 - RNA, 15 nt, Human
aguggguuauucugg

SEQ ID NO: 2352929 - RNA, 16 nt, Human
aguggguuauucugga

SEQ ID NO: 2352930 - RNA, 22 nt, Human
agugggugagaugcuggagaag

SEQ ID NO: 2352931 - RNA, 18 nt, Human
agugggugagaugcugga

SEQ ID NO: 2352932 - RNA, 19 nt, Human
agugggugagaugcuggag

SEQ ID NO: 2352933 - RNA, 19 nt, Human
agugggugaauaauacagu

SEQ ID NO: 2352934 - RNA, 14 nt, Human
agugggucccagau

SEQ ID NO: 2352935 - RNA, 16 nt, Human
agugggucccacuucc

SEQ ID NO: 2352936 - RNA, 17 nt, Human
agugggucccacuuccc

SEQ ID NO: 2352937 - RNA, 21 nt, Human
agugggucccacuuccccucc

SEQ ID NO: 2352938 - RNA, 22 nt, Human
agugggucccacuuccccuccu

SEQ ID NO: 2352939 - RNA, 20 nt, Human
aguggucuuucuggagaggu

SEQ ID NO: 2352940 - RNA, 13 nt, Human
aguggucuuugua

SEQ ID NO: 2352941 - RNA, 14 nt, Human
aguggucuuuguaa

SEQ ID NO: 2352942 - RNA, 15 nt, Human
aguggucuuuguaag

SEQ ID NO: 2352943 - RNA, 16 nt, Human
aguggucuuuguaaga

SEQ ID NO: 2352944 - RNA, 17 nt, Human
aguggucuuuguaagag

SEQ ID NO: 2352945 - RNA, 18 nt, Human
aguggucuuuguaagagu

SEQ ID NO: 2352946 - RNA, 19 nt, Human
aguggucuuuguaagagug

SEQ ID NO: 2352947 - RNA, 18 nt, Human
aguggucuuucuggagag

SEQ ID NO: 2352948 - RNA, 16 nt, Human
aguggucuuucuggag

SEQ ID NO: 2352949 - RNA, 15 nt, Human
aguggucuuucugga

SEQ ID NO: 2352950 - RNA, 13 nt, Human
aguggucuuucug

SEQ ID NO: 2352951 - RNA, 20 nt, Human
aguggucuuuccuaucaugg

SEQ ID NO: 2352952 - RNA, 22 nt, Human
aguggucgcuuacuuugaguga

SEQ ID NO: 2352953 - RNA, 16 nt, Human
aguggugcgaucuggg

SEQ ID NO: 2352954 - RNA, 20 nt, Human
aguggucuuuguaagagugu

SEQ ID NO: 2352955 - RNA, 21 nt, Human
aguggucuuuguaagagugua

SEQ ID NO: 2352956 - RNA, 22 nt, Human
aguggucuuuguaagaguguag

SEQ ID NO: 2352957 - RNA, 24 nt, Human
aguggucuuuguaagaguguagaa

SEQ ID NO: 2352958 - RNA, 21 nt, Human
agugguuccuaauccucuagg

SEQ ID NO: 2352959 - RNA, 19 nt, Human
uguucaaaaaaacacuagu

SEQ ID NO: 2352960 - RNA, 21 nt, Human
uguuauuuuuguuucuuccaa

SEQ ID NO: 2352961 - RNA, 16 nt, Human
uguuauuuuuguuucu

SEQ ID NO: 2352962 - RNA, 18 nt, Human
uguuauuuuuuaauuauu

SEQ ID NO: 2352963 - RNA, 18 nt, Human
uguuauuuucuguugaag

SEQ ID NO: 2352964 - RNA, 14 nt, Human
uguuauuuugcaac

SEQ ID NO: 2352965 - RNA, 19 nt, Human
uguuauuuucuuugaaauu

SEQ ID NO: 2352966 - RNA, 22 nt, Human
uguuauuuuuauaucagccuga

SEQ ID NO: 2352967 - RNA, 20 nt, Human
uguucccauguagcccccug

SEQ ID NO: 2352968 - RNA, 22 nt, Human
uguucaaagccagcguccuccu

SEQ ID NO: 2352969 - RNA, 21 nt, Human
uguucaaagccagcguccucc

SEQ ID NO: 2352970 - RNA, 16 nt, Human
uguucccauucuugca

SEQ ID NO: 2352971 - RNA, 17 nt, Human
uguucccauuucagcug

SEQ ID NO: 2352972 - RNA, 16 nt, Human
uguucccauuucagcu

SEQ ID NO: 2352973 - RNA, 18 nt, Human
uguuauggcuuaaugaca

SEQ ID NO: 2352974 - RNA, 17 nt, Human
uguuauguagauaacaa

SEQ ID NO: 2352975 - RNA, 14 nt, Human
uguuauggaaacug

SEQ ID NO: 2352976 - RNA, 15 nt, Human
uguuaugcugugaca

SEQ ID NO: 2352977 - RNA, 22 nt, Human
uguuauguaaaaggccaaaccu

SEQ ID NO: 2352978 - RNA, 17 nt, Human
uguuauuuguacaguuc

SEQ ID NO: 2352979 - RNA, 16 nt, Human
uguuauuuguacaguu

SEQ ID NO: 2352980 - RNA, 14 nt, Human
uguuauuuucagua

SEQ ID NO: 2352981 - RNA, 18 nt, Human
uguuauuuucaguauuuu

SEQ ID NO: 2352982 - RNA, 20 nt, Human
uguuauuaaacguaugcaug

SEQ ID NO: 2352983 - RNA, 21 nt, Human
uguuauuaaacguaugcaugu

SEQ ID NO: 2352984 - RNA, 22 nt, Human
uguuauuaaacguaugcaugug

SEQ ID NO: 2352985 - RNA, 23 nt, Human
uguuauuaaacguaugcauguga

SEQ ID NO: 2352986 - RNA, 18 nt, Human
aguguagcccacacuuga

SEQ ID NO: 2352987 - RNA, 13 nt, Human
aguguagccuugc

SEQ ID NO: 2352988 - RNA, 23 nt, Human
aguguagaucagagcagcaguga

SEQ ID NO: 2352989 - RNA, 15 nt, Human
aguguagaucagagc

SEQ ID NO: 2352990 - RNA, 16 nt, Human
aguguaccauuugccu

SEQ ID NO: 2352991 - RNA, 22 nt, Human
aguguagaagcauuccuucuuu

SEQ ID NO: 2352992 - RNA, 17 nt, Human
aguguacagucuuguau

SEQ ID NO: 2352993 - RNA, 20 nt, Human
aguguaauuucuuugccugu

SEQ ID NO: 2352994 - RNA, 13 nt, Human
aguguaccauaau

SEQ ID NO: 2352995 - RNA, 23 nt, Human
aguguacauggaauaacauguaa

SEQ ID NO: 2352996 - RNA, 18 nt, Human
aguguagccuugcccgga

SEQ ID NO: 2352997 - RNA, 17 nt, Human
aguguagccuugcccgg

SEQ ID NO: 2352998 - RNA, 15 nt, Human
aguguagccuugccc

SEQ ID NO: 2352999 - RNA, 21 nt, Human
aguguagcccacacuugagag

SEQ ID NO: 2353000 - RNA, 23 nt, Human
aguguagcccacacuugagagga

SEQ ID NO: 2353001 - RNA, 13 nt, Human
aguguaggcagac

SEQ ID NO: 2353002 - RNA, 14 nt, Human
aguguaggcagaca

SEQ ID NO: 2353003 - RNA, 15 nt, Human
aguguaggcagacac

SEQ ID NO: 2353004 - RNA, 16 nt, Human
aguguaggcagacaca

SEQ ID NO: 2353005 - RNA, 18 nt, Human
aguguaggcagacacagg

SEQ ID NO: 2353006 - RNA, 20 nt, Human
aguguaggcagacacaggga

SEQ ID NO: 2353007 - RNA, 22 nt, Human
aguguaggcagacacagggacu

SEQ ID NO: 2353008 - RNA, 23 nt, Human
aguguaggcagacacagggacuu

SEQ ID NO: 2353009 - RNA, 16 nt, Human
uguucuuaagacguga

SEQ ID NO: 2353010 - RNA, 15 nt, Human
uguuccccucacugg

SEQ ID NO: 2353011 - RNA, 16 nt, Human
uguucuuaauugcacu

SEQ ID NO: 2353012 - RNA, 17 nt, Human
uguucuuaauugcacuc

SEQ ID NO: 2353013 - RNA, 22 nt, Human
uguucuuaccuguaugucucca

SEQ ID NO: 2353014 - RNA, 17 nt, Human
uguucuuaccuguaugu

SEQ ID NO: 2353015 - RNA, 18 nt, Human
uguucuuaauugcacucu

SEQ ID NO: 2353016 - RNA, 18 nt, Human
uguucuugguuuguaaau

SEQ ID NO: 2353017 - RNA, 17 nt, Human
uguucuugguuuguaaa

SEQ ID NO: 2353018 - RNA, 14 nt, Human
uguucuuuccaaag

SEQ ID NO: 2353019 - RNA, 13 nt, Human
uguucuuuccaaa

SEQ ID NO: 2353020 - RNA, 19 nt, Human
uguucuugguuuguaaauu

SEQ ID NO: 2353021 - RNA, 14 nt, Human
uguucugggacaca

SEQ ID NO: 2353022 - RNA, 15 nt, Human
uguucugggacacag

SEQ ID NO: 2353023 - RNA, 16 nt, Human
uguucuuaauucuuag

SEQ ID NO: 2353024 - RNA, 14 nt, Human
uguucuuaauucuu

SEQ ID NO: 2353025 - RNA, 22 nt, Human
uguuccccacugacagccuccc

SEQ ID NO: 2353026 - RNA, 13 nt, Human
uguuccccagaga

SEQ ID NO: 2353027 - RNA, 14 nt, Human
uguuccccagagaa

SEQ ID NO: 2353028 - RNA, 13 nt, Human
uguuccccaucug

SEQ ID NO: 2353029 - RNA, 15 nt, Human
uguucccccugugca

SEQ ID NO: 2353030 - RNA, 18 nt, Human
uguuccccauggccacuu

SEQ ID NO: 2353031 - RNA, 16 nt, Human
uguucccccgccgcuu

SEQ ID NO: 2353032 - RNA, 12 nt, Human
uguucugggaca

SEQ ID NO: 2353033 - RNA, 16 nt, Human
uguucccccugugcag

SEQ ID NO: 2353034 - RNA, 21 nt, Human
uguucccccgccgcuuuucuc

SEQ ID NO: 2353035 - RNA, 14 nt, Human
uguuccccucacug

SEQ ID NO: 2353036 - RNA, 13 nt, Human
uguucugggacac

SEQ ID NO: 2353037 - RNA, 22 nt, Human
uuagcaggagaggagagccaga

SEQ ID NO: 2353038 - RNA, 23 nt, Human
uuagcaggagaggagagccagag

SEQ ID NO: 2353039 - RNA, 16 nt, Human
uuagcaguuugcuuug

SEQ ID NO: 2353040 - RNA, 14 nt, Human
uuagccccauaauu

SEQ ID NO: 2353041 - RNA, 13 nt, Human
uuagccgggcgug

SEQ ID NO: 2353042 - RNA, 17 nt, Human
uuagcccccacccacuu

SEQ ID NO: 2353043 - RNA, 12 nt, Human
uuagcccccacc

SEQ ID NO: 2353044 - RNA, 13 nt, Human
uuagcccccaccc

SEQ ID NO: 2353045 - RNA, 12 nt, Human
uuauaaauauga

SEQ ID NO: 2353046 - RNA, 14 nt, Human
uuauaaaucgcuuu

SEQ ID NO: 2353047 - RNA, 21 nt, Human
uuauaaauaugaagcucaccu

SEQ ID NO: 2353048 - RNA, 15 nt, Human
uuagccucccugaaa

SEQ ID NO: 2353049 - RNA, 17 nt, Human
uuagccugaguagaaag

SEQ ID NO: 2353050 - RNA, 11 nt, Human
uuauaaauuau

SEQ ID NO: 2353051 - RNA, 13 nt, Human
uuauaaauuaugu

SEQ ID NO: 2353052 - RNA, 14 nt, Human
uuauaaauuauguu

SEQ ID NO: 2353053 - RNA, 15 nt, Human
uuauaaauuauguuu

SEQ ID NO: 2353054 - RNA, 16 nt, Human
uuauaaauuauguuua

SEQ ID NO: 2353055 - RNA, 17 nt, Human
uuauaaauuauguuuau

SEQ ID NO: 2353056 - RNA, 21 nt, Human
uuauaaauuauguuuauauaa

SEQ ID NO: 2353057 - RNA, 18 nt, Human
uuauaaaucgcuuuugau

SEQ ID NO: 2353058 - RNA, 17 nt, Human
uuauaaaucgcuuuuga

SEQ ID NO: 2353059 - RNA, 14 nt, Human
uuauaaaugcuauu

SEQ ID NO: 2353060 - RNA, 17 nt, Human
uuauaacuuaaaauauu

SEQ ID NO: 2353061 - RNA, 15 nt, Human
uuauaacuuaaaaaa

SEQ ID NO: 2353062 - RNA, 13 nt, Human
uuauaacuuaaaa

SEQ ID NO: 2353063 - RNA, 18 nt, Human
uuauacccccugcaaagc

SEQ ID NO: 2353064 - RNA, 22 nt, Human
uuauaacucaucauaaaauaaa

SEQ ID NO: 2353065 - RNA, 21 nt, Human
uuauaacucaucauaaaauaa

SEQ ID NO: 2353066 - RNA, 20 nt, Human
uuauaacucaucauaaaaua

SEQ ID NO: 2353067 - RNA, 19 nt, Human
uuauaacucaucauaaaau

SEQ ID NO: 2353068 - RNA, 18 nt, Human
uuauaacugaaggagaag

SEQ ID NO: 2353069 - RNA, 19 nt, Human
uuauaacucugcacuacuc

SEQ ID NO: 2353070 - RNA, 22 nt, Human
uuauaacuacuccggagacagg

SEQ ID NO: 2353071 - RNA, 16 nt, Human
uuauaacucugcacua

SEQ ID NO: 2353072 - RNA, 18 nt, Human
uuauaacucaucauaaaa

SEQ ID NO: 2353073 - RNA, 17 nt, Human
uuauaacucaucauaaa

SEQ ID NO: 2353074 - RNA, 16 nt, Human
uuauaacucaucauaa

SEQ ID NO: 2353075 - RNA, 18 nt, Human
uuauacuuuguaaagaca

SEQ ID NO: 2353076 - RNA, 14 nt, Human
uuauacuguauuaa

SEQ ID NO: 2353077 - RNA, 14 nt, Human
uuauagaaaguuca

SEQ ID NO: 2353078 - RNA, 15 nt, Human
uuauagaauauuuau

SEQ ID NO: 2353079 - RNA, 23 nt, Human
uuauagaauauuuauuaccucug

SEQ ID NO: 2353080 - RNA, 15 nt, Human
uuauagacaaauaau

SEQ ID NO: 2353081 - RNA, 21 nt, Human
uuauagaggcuagcuucugcu

SEQ ID NO: 2353082 - RNA, 19 nt, Human
uuauagagggccaagacuu

SEQ ID NO: 2353083 - RNA, 23 nt, Human
uuauagaguguacuuaacuauuc

SEQ ID NO: 2353084 - RNA, 22 nt, Human
uuauacuguacuuaauaaauuc

SEQ ID NO: 2353085 - RNA, 16 nt, Human
uuauacuaagaaaaga

SEQ ID NO: 2353086 - RNA, 16 nt, Human
uuauacucuuucugua

SEQ ID NO: 2353087 - RNA, 12 nt, Human
uuauacuaagaa

SEQ ID NO: 2353088 - RNA, 18 nt, Human
uuauacguguagcuauau

SEQ ID NO: 2353089 - RNA, 21 nt, Human
uuauacguguagcuauaucua

SEQ ID NO: 2353090 - RNA, 15 nt, Human
uuauacguguagcua

SEQ ID NO: 2353091 - RNA, 17 nt, Human
uuauacguguagcuaua

SEQ ID NO: 2353092 - RNA, 16 nt, Human
uuauagccgaaaugau

SEQ ID NO: 2353093 - RNA, 17 nt, Human
uuauagcaaacuuggaa

SEQ ID NO: 2353094 - RNA, 15 nt, Human
uuauagauuugaccu

SEQ ID NO: 2353095 - RNA, 15 nt, Human
uuauagaugucuagg

SEQ ID NO: 2353096 - RNA, 21 nt, Human
uuauagaucccccagacuuua

SEQ ID NO: 2353097 - RNA, 21 nt, Human
uuauagaugggaaugaagcuu

SEQ ID NO: 2353098 - RNA, 16 nt, Human
uuauagcucaguuuau

SEQ ID NO: 2353099 - RNA, 17 nt, Human
uuauagcuauuacuguc

SEQ ID NO: 2353100 - RNA, 22 nt, Human
uuauagccacaucccuuugaaa

SEQ ID NO: 2353101 - RNA, 16 nt, Human
uuauaggaucauuugu

SEQ ID NO: 2353102 - RNA, 21 nt, Human
uuauagugauguaaucuugaa

SEQ ID NO: 2353103 - RNA, 15 nt, Human
uuauaguauaucugg

SEQ ID NO: 2353104 - RNA, 18 nt, Human
uuauaguauaucuggaca

SEQ ID NO: 2353105 - RNA, 18 nt, Human
uuauaggucacuccuggg

SEQ ID NO: 2353106 - RNA, 17 nt, Human
uuauaggucacuccugg

SEQ ID NO: 2353107 - RNA, 19 nt, Human
uuauagguggccucuccuu

SEQ ID NO: 2353108 - RNA, 23 nt, Human
auaauuuuuaaaguauauauuua

SEQ ID NO: 2353109 - RNA, 21 nt, Human
auaauuuuuaaaguauauauu

SEQ ID NO: 2353110 - RNA, 19 nt, Human
auaauuuuuaaaguauaua

SEQ ID NO: 2353111 - RNA, 18 nt, Human
auaauuuuuaaaguauau

SEQ ID NO: 2353112 - RNA, 15 nt, Human
auaauuuuuuauuca

SEQ ID NO: 2353113 - RNA, 16 nt, Human
auaauuuuuuauucaa

SEQ ID NO: 2353114 - RNA, 20 nt, Human
auaauuuuuuucaauauuua

SEQ ID NO: 2353115 - RNA, 17 nt, Human
auaauuuuuuauucaag

SEQ ID NO: 2353116 - RNA, 21 nt, Human
auaauuuuuuucaauauuuau

SEQ ID NO: 2353117 - RNA, 22 nt, Human
auaauuuuuuucaauauuuauu

SEQ ID NO: 2353118 - RNA, 21 nt, Human
auaauuuuuauauuugaaaua

SEQ ID NO: 2353119 - RNA, 22 nt, Human
auaauuuuuauauuugaaauau

SEQ ID NO: 2353120 - RNA, 15 nt, Human
auacaaaagcaugug

SEQ ID NO: 2353121 - RNA, 13 nt, Human
auacaaaagcaug

SEQ ID NO: 2353122 - RNA, 12 nt, Human
auacaaaagcau

SEQ ID NO: 2353123 - RNA, 22 nt, Human
auacaaaaaaaaaaaaaaauua

SEQ ID NO: 2353124 - RNA, 15 nt, Human
auaauuuuuaaagua

SEQ ID NO: 2353125 - RNA, 14 nt, Human
auaauuuuuauauu

SEQ ID NO: 2353126 - RNA, 16 nt, Human
auaauuuuuauauuug

SEQ ID NO: 2353127 - RNA, 19 nt, Human
auaauuuuuauauuugaaa

SEQ ID NO: 2353128 - RNA, 13 nt, Human
auaauuuugugaa

SEQ ID NO: 2353129 - RNA, 14 nt, Human
auaauuuugugaag

SEQ ID NO: 2353130 - RNA, 15 nt, Human
auaauuuugugaagc

SEQ ID NO: 2353131 - RNA, 20 nt, Human
auaauuuugugaagcaaaau

SEQ ID NO: 2353132 - RNA, 18 nt, Human
uuauauaguuuacuauuu

SEQ ID NO: 2353133 - RNA, 21 nt, Human
uuauauagguuuuguuugcua

SEQ ID NO: 2353134 - RNA, 23 nt, Human
uuauauagguuuuguuugcuauc

SEQ ID NO: 2353135 - RNA, 15 nt, Human
uuauauauacaguaa

SEQ ID NO: 2353136 - RNA, 21 nt, Human
uuauauagggaucaaccagcu

SEQ ID NO: 2353137 - RNA, 18 nt, Human
uuauauagguugugcaaa

SEQ ID NO: 2353138 - RNA, 19 nt, Human
uuauauagauuauaacuug

SEQ ID NO: 2353139 - RNA, 14 nt, Human
uuauauauguauuu

SEQ ID NO: 2353140 - RNA, 19 nt, Human
uuauauauauauauauuuc

SEQ ID NO: 2353141 - RNA, 15 nt, Human
auaauuuuaugaaug

SEQ ID NO: 2353142 - RNA, 19 nt, Human
auaauuuuaugaaugucuu

SEQ ID NO: 2353143 - RNA, 23 nt, Human
auaauuuucuucaugcaaugaca

SEQ ID NO: 2353144 - RNA, 22 nt, Human
auaauuuucuucaugcaaugac

SEQ ID NO: 2353145 - RNA, 17 nt, Human
auaauuuucuucaugca

SEQ ID NO: 2353146 - RNA, 13 nt, Human
auaauuuucuuca

SEQ ID NO: 2353147 - RNA, 17 nt, Human
uuauauauguauuuaua

SEQ ID NO: 2353148 - RNA, 12 nt, Human
uuauauauguga

SEQ ID NO: 2353149 - RNA, 13 nt, Human
uuauauaugugaa

SEQ ID NO: 2353150 - RNA, 14 nt, Human
auaauuuuaagaaa

SEQ ID NO: 2353151 - RNA, 15 nt, Human
auaauuuuaagaaau

SEQ ID NO: 2353152 - RNA, 21 nt, Human
auaauuuuaagaaaucaaaga

SEQ ID NO: 2353153 - RNA, 22 nt, Human
uuauauagauuauaacuugucu

SEQ ID NO: 2353154 - RNA, 13 nt, Human
uuauauaaaugcu

SEQ ID NO: 2353155 - RNA, 14 nt, Human
uuauauaaaugcuu

SEQ ID NO: 2353156 - RNA, 15 nt, Human
uuauaguuuguacau

SEQ ID NO: 2353157 - RNA, 16 nt, Human
uuauaguuuguacaug

SEQ ID NO: 2353158 - RNA, 12 nt, Human
uuauaguuugua

SEQ ID NO: 2353159 - RNA, 18 nt, Human
uuauauaagcuuguauuc

SEQ ID NO: 2353160 - RNA, 20 nt, Human
uuauaguugugggugggaga

SEQ ID NO: 2353161 - RNA, 15 nt, Human
uuauaguuguaacua

SEQ ID NO: 2353162 - RNA, 18 nt, Human
auacaaauuagaaaaugu

SEQ ID NO: 2353163 - RNA, 14 nt, Human
auacagauuuugau

SEQ ID NO: 2353164 - RNA, 16 nt, Human
auacagauuuugauag

SEQ ID NO: 2353165 - RNA, 17 nt, Human
auacagauuuugauagc

SEQ ID NO: 2353166 - RNA, 18 nt, Human
auacagauuuugauagca

SEQ ID NO: 2353167 - RNA, 19 nt, Human
auacagauuuugauagcaa

SEQ ID NO: 2353168 - RNA, 22 nt, Human
auacagauuuugauagcaaagc

SEQ ID NO: 2353169 - RNA, 16 nt, Human
auacagcaacaauuua

SEQ ID NO: 2353170 - RNA, 18 nt, Human
auacagccaaagauaauc

SEQ ID NO: 2353171 - RNA, 20 nt, Human
auacagcccucccccagcag

SEQ ID NO: 2353172 - RNA, 20 nt, Human
auacagcauuacaaauugcu

SEQ ID NO: 2353173 - RNA, 13 nt, Human
auacagcucagaa

SEQ ID NO: 2353174 - RNA, 11 nt, Human
auacagcucua

SEQ ID NO: 2353175 - RNA, 19 nt, Human
auacaaacauauuuguuaa

SEQ ID NO: 2353176 - RNA, 22 nt, Human
auacaaacaauggaaacugaau

SEQ ID NO: 2353177 - RNA, 16 nt, Human
auacaaacaauggaaa

SEQ ID NO: 2353178 - RNA, 18 nt, Human
auacaaacaauggaaacu

SEQ ID NO: 2353179 - RNA, 23 nt, Human
auaauuuuuuuauuacugauuuu

SEQ ID NO: 2353180 - RNA, 14 nt, Human
auacaaauuagaaa

SEQ ID NO: 2353181 - RNA, 17 nt, Human
auacaaauuagaaaaug

SEQ ID NO: 2353182 - RNA, 15 nt, Human
auacaaauuagaaaa

SEQ ID NO: 2353183 - RNA, 14 nt, Human
auacaggaaaagcu

SEQ ID NO: 2353184 - RNA, 19 nt, Human
auacaggaaaagcugcuga

SEQ ID NO: 2353185 - RNA, 20 nt, Human
auacaggaaaagcugcugac

SEQ ID NO: 2353186 - RNA, 22 nt, Human
auacaggaaaagcugcugacag

SEQ ID NO: 2353187 - RNA, 17 nt, Human
auacaguaacuuuaugu

SEQ ID NO: 2353188 - RNA, 18 nt, Human
auacaguaacuuuaugug

SEQ ID NO: 2353189 - RNA, 21 nt, Human
auacagggcaugcauuuugca

SEQ ID NO: 2353190 - RNA, 21 nt, Human
auacaguucggugagcuacaa

SEQ ID NO: 2353191 - RNA, 16 nt, Human
auacaugacucagcau

SEQ ID NO: 2353192 - RNA, 21 nt, Human
auacauauuuuauagaacuuc

SEQ ID NO: 2353193 - RNA, 20 nt, Human
auacaucccuuaccugggaa

SEQ ID NO: 2353194 - RNA, 14 nt, Human
auacauauuuccaa

SEQ ID NO: 2353195 - RNA, 20 nt, Human
auacaguuguuggccuccgg

SEQ ID NO: 2353196 - RNA, 22 nt, Human
auacaguuugucacaugaaaca

SEQ ID NO: 2353197 - RNA, 21 nt, Human
auacauaucuuuauuaaucac

SEQ ID NO: 2353198 - RNA, 22 nt, Human
auacauaugaguguggaagccg

SEQ ID NO: 2353199 - RNA, 19 nt, Human
auacaguacaggcagcaca

SEQ ID NO: 2353200 - RNA, 16 nt, Human
auacaguacaggcagc

SEQ ID NO: 2353201 - RNA, 15 nt, Human
auacaguacaggcag

SEQ ID NO: 2353202 - RNA, 19 nt, Human
auacaguaagcugcucuau

SEQ ID NO: 2353203 - RNA, 19 nt, Human
auacaguaacuuuaugugu

SEQ ID NO: 2353204 - RNA, 20 nt, Human
auacaguaacuuuaugugua

SEQ ID NO: 2353205 - RNA, 17 nt, Human
auacagucccuaaagaa

SEQ ID NO: 2353206 - RNA, 18 nt, Human
auacagucccuaaagaaa

SEQ ID NO: 2353207 - RNA, 20 nt, Human
auacagucccuaaagaaaaa

SEQ ID NO: 2353208 - RNA, 22 nt, Human
auacagucccuaaagaaaaaaa

SEQ ID NO: 2353209 - RNA, 16 nt, Human
auacaguuguuggccu

SEQ ID NO: 2353210 - RNA, 19 nt, Human
auaccaaaauuauuucaga

SEQ ID NO: 2353211 - RNA, 20 nt, Human
auaccaaaauuauuucagaa

SEQ ID NO: 2353212 - RNA, 18 nt, Human
auaccaaaauuauuucag

SEQ ID NO: 2353213 - RNA, 14 nt, Human
auaccaaguauuua

SEQ ID NO: 2353214 - RNA, 22 nt, Human
auacauuucuccuuugauaaaa

SEQ ID NO: 2353215 - RNA, 19 nt, Human
auacauuugaggggaaaac

SEQ ID NO: 2353216 - RNA, 16 nt, Human
auacauuugauaaagu

SEQ ID NO: 2353217 - RNA, 23 nt, Human
auacauuuauaauguuugcuauu

SEQ ID NO: 2353218 - RNA, 17 nt, Human
auacauuuaugaauuaa

SEQ ID NO: 2353219 - RNA, 20 nt, Human
auacauuucuccuuugauaa

SEQ ID NO: 2353220 - RNA, 21 nt, Human
auacauuucuccuuugauaaa

SEQ ID NO: 2353221 - RNA, 21 nt, Human
auacauuuauaauguuugcua

SEQ ID NO: 2353222 - RNA, 20 nt, Human
auacauuuauaauguuugcu

SEQ ID NO: 2353223 - RNA, 15 nt, Human
auacauuuauaaugu

SEQ ID NO: 2353224 - RNA, 16 nt, Human
auacauugucucuaaa

SEQ ID NO: 2353225 - RNA, 21 nt, Human
auacauugucucuaaauugug

SEQ ID NO: 2353226 - RNA, 15 nt, Human
auacauugaauuaga

SEQ ID NO: 2353227 - RNA, 17 nt, Human
auacauugaauuagaaa

SEQ ID NO: 2353228 - RNA, 19 nt, Human
auacauugaauuagaaaca

SEQ ID NO: 2353229 - RNA, 20 nt, Human
uuaucaaaucagucagugca

SEQ ID NO: 2353230 - RNA, 14 nt, Human
uuaucaacauuugu

SEQ ID NO: 2353231 - RNA, 21 nt, Human
uuaucaccgugggcucccuga

SEQ ID NO: 2353232 - RNA, 11 nt, Human
uuaucaagugu

SEQ ID NO: 2353233 - RNA, 14 nt, Human
uuaucaagugucuu

SEQ ID NO: 2353234 - RNA, 18 nt, Human
uuaucacugacacaaaaa

SEQ ID NO: 2353235 - RNA, 20 nt, Human
uuaucaguaagaaaaagaag

SEQ ID NO: 2353236 - RNA, 13 nt, Human
auacucaugugua

SEQ ID NO: 2353237 - RNA, 12 nt, Human
auacucaugugu

SEQ ID NO: 2353238 - RNA, 18 nt, Human
auacucauccuuguauaa

SEQ ID NO: 2353239 - RNA, 11 nt, Human
auacucaugug

SEQ ID NO: 2353240 - RNA, 18 nt, Human
auacucauaaugugaagu

SEQ ID NO: 2353241 - RNA, 19 nt, Human
auacucauaaugugaagug

SEQ ID NO: 2353242 - RNA, 20 nt, Human
auacucauaaugugaagugu

SEQ ID NO: 2353243 - RNA, 15 nt, Human
auacucauccuugua

SEQ ID NO: 2353244 - RNA, 15 nt, Human
auacucauaauguga

SEQ ID NO: 2353245 - RNA, 16 nt, Human
auacucauaaugugaa

SEQ ID NO: 2353246 - RNA, 17 nt, Human
auacucauaaugugaag

SEQ ID NO: 2353247 - RNA, 15 nt, Human
uuaucaacaauagug

SEQ ID NO: 2353248 - RNA, 13 nt, Human
uuaucaaaucagu

SEQ ID NO: 2353249 - RNA, 15 nt, Human
uuaucaaaacuuucu

SEQ ID NO: 2353250 - RNA, 16 nt, Human
uuaucaaaacuuucuu

SEQ ID NO: 2353251 - RNA, 16 nt, Human
uuaucaugcugucuuu

SEQ ID NO: 2353252 - RNA, 13 nt, Human
uuaucaugcuguc

SEQ ID NO: 2353253 - RNA, 16 nt, Human
uuaucaugcaaaugcu

SEQ ID NO: 2353254 - RNA, 19 nt, Human
uuaucauggucucagucau

SEQ ID NO: 2353255 - RNA, 12 nt, Human
uuaucaugugua

SEQ ID NO: 2353256 - RNA, 13 nt, Human
uuaucauguguaa

SEQ ID NO: 2353257 - RNA, 14 nt, Human
uuaucauguguaau

SEQ ID NO: 2353258 - RNA, 22 nt, Human
uuaucaugugaaaucauucauu

SEQ ID NO: 2353259 - RNA, 18 nt, Human
uuaucaugugaaaucauu

SEQ ID NO: 2353260 - RNA, 20 nt, Human
uuaucaugugaaaucauuca

SEQ ID NO: 2353261 - RNA, 17 nt, Human
uuaucagugacagaguu

SEQ ID NO: 2353262 - RNA, 16 nt, Human
uuaucauccacauugu

SEQ ID NO: 2353263 - RNA, 16 nt, Human
uuaucagugacagagu

SEQ ID NO: 2353264 - RNA, 21 nt, Human
uuaucaguaagaaaaagaaga

SEQ ID NO: 2353265 - RNA, 23 nt, Human
uuaucagucauaacuaaauaaag

SEQ ID NO: 2353266 - RNA, 15 nt, Human
uuaucagucaauauu

SEQ ID NO: 2353267 - RNA, 14 nt, Human
uuaucagucaauau

SEQ ID NO: 2353268 - RNA, 23 nt, Human
uuaucagucaauauuuuuagaua

SEQ ID NO: 2353269 - RNA, 21 nt, Human
uuaucagucauaacuaaauaa

SEQ ID NO: 2353270 - RNA, 11 nt, Human
uuaucaugcaa

SEQ ID NO: 2353271 - RNA, 18 nt, Human
uuaucauccacauuguuu

SEQ ID NO: 2353272 - RNA, 19 nt, Human
uuaucaugacauguuauau

SEQ ID NO: 2353273 - RNA, 20 nt, Human
uuaucauccacauuguuuua

SEQ ID NO: 2353274 - RNA, 17 nt, Human
uuaucaugugaaaucau

SEQ ID NO: 2353275 - RNA, 23 nt, Human
auacuauuuaguuuuuguaauuu

SEQ ID NO: 2353276 - RNA, 15 nt, Human
auacuauuuuuacug

SEQ ID NO: 2353277 - RNA, 20 nt, Human
auacuauuuuuacugccacu

SEQ ID NO: 2353278 - RNA, 18 nt, Human
auacuauuuuuacugcca

SEQ ID NO: 2353279 - RNA, 19 nt, Human
auacuauuuuuacugccac

SEQ ID NO: 2353280 - RNA, 20 nt, Human
auacuauuuaguuuuuguaa

SEQ ID NO: 2353281 - RNA, 21 nt, Human
auacuauuuaaagccuccuca

SEQ ID NO: 2353282 - RNA, 22 nt, Human
auacuauuuaaagccuccucau

SEQ ID NO: 2353283 - RNA, 13 nt, Human
auacuacuccugu

SEQ ID NO: 2353284 - RNA, 17 nt, Human
auacuaccuugaaaaua

SEQ ID NO: 2353285 - RNA, 15 nt, Human
auacuaccuugaaaa

SEQ ID NO: 2353286 - RNA, 14 nt, Human
auacuaccuugaaa

SEQ ID NO: 2353287 - RNA, 20 nt, Human
auacuacaguuuguuaguau

SEQ ID NO: 2353288 - RNA, 16 nt, Human
auacuacaguuuguua

SEQ ID NO: 2353289 - RNA, 15 nt, Human
auacuacaguuuguu

SEQ ID NO: 2353290 - RNA, 13 nt, Human
auacuacaguuug

SEQ ID NO: 2353291 - RNA, 19 nt, Human
auaccauggugaauuaauc

SEQ ID NO: 2353292 - RNA, 12 nt, Human
auaccagugugg

SEQ ID NO: 2353293 - RNA, 16 nt, Human
auaccagguugaaaga

SEQ ID NO: 2353294 - RNA, 14 nt, Human
auaccagguugaaa

SEQ ID NO: 2353295 - RNA, 17 nt, Human
auaccagugaaccaaag

SEQ ID NO: 2353296 - RNA, 19 nt, Human
auaccagugaaccaaagag

SEQ ID NO: 2353297 - RNA, 17 nt, Human
auaccaggccgccccag

SEQ ID NO: 2353298 - RNA, 22 nt, Human
auaccagccccuguauggcacu

SEQ ID NO: 2353299 - RNA, 18 nt, Human
auaccagcuuagauuuua

SEQ ID NO: 2353300 - RNA, 22 nt, Human
auaccagcgaggaggcuccaga

SEQ ID NO: 2353301 - RNA, 16 nt, Human
auaccagcgaggaggc

SEQ ID NO: 2353302 - RNA, 14 nt, Human
auacuaagaaaaga

SEQ ID NO: 2353303 - RNA, 20 nt, Human
auaccagugaaccaaagaga

SEQ ID NO: 2353304 - RNA, 21 nt, Human
auacuaaccagcagaaaugcc

SEQ ID NO: 2353305 - RNA, 19 nt, Human
auaccagccaguaaauggg

SEQ ID NO: 2353306 - RNA, 21 nt, Human
auaccaaugaaaaaauguaua

SEQ ID NO: 2353307 - RNA, 17 nt, Human
auaccaaguauuuauua

SEQ ID NO: 2353308 - RNA, 20 nt, Human
auaccaaugcuuuuaucaaa

SEQ ID NO: 2353309 - RNA, 17 nt, Human
auaccagccaguaaaug

SEQ ID NO: 2353310 - RNA, 19 nt, Human
auaccaaugaaaaaaugua

SEQ ID NO: 2353311 - RNA, 22 nt, Human
auaccacaggaaccacaagacu

SEQ ID NO: 2353312 - RNA, 20 nt, Human
auaaucagugugucuaaauu

SEQ ID NO: 2353313 - RNA, 17 nt, Human
auaaucagccucuuaaa

SEQ ID NO: 2353314 - RNA, 16 nt, Human
auaaucagccucuuaa

SEQ ID NO: 2353315 - RNA, 15 nt, Human
auaaucagccucuua

SEQ ID NO: 2353316 - RNA, 14 nt, Human
auaaucagccucuu

SEQ ID NO: 2353317 - RNA, 13 nt, Human
auaaucuuugggu

SEQ ID NO: 2353318 - RNA, 17 nt, Human
auaauccagucuucacu

SEQ ID NO: 2353319 - RNA, 15 nt, Human
auaaucccagcacuu

SEQ ID NO: 2353320 - RNA, 21 nt, Human
auaaucuuucacaggggacag

SEQ ID NO: 2353321 - RNA, 19 nt, Human
auaauacaguaucucaggg

SEQ ID NO: 2353322 - RNA, 12 nt, Human
auaauaauauau

SEQ ID NO: 2353323 - RNA, 22 nt, Human
auaauacacuaauuccuuucua

SEQ ID NO: 2353324 - RNA, 21 nt, Human
auaauacagccaaagauaauc

SEQ ID NO: 2353325 - RNA, 17 nt, Human
auaauacagccaaagau

SEQ ID NO: 2353326 - RNA, 21 nt, Human
auaauacacuaauuccuuucu

SEQ ID NO: 2353327 - RNA, 18 nt, Human
auaaucacgcuuuccuga

SEQ ID NO: 2353328 - RNA, 16 nt, Human
auaaucacgcuuuccu

SEQ ID NO: 2353329 - RNA, 13 nt, Human
auaaucagccucu

SEQ ID NO: 2353330 - RNA, 21 nt, Human
auaaucagcaagaauuugauc

SEQ ID NO: 2353331 - RNA, 19 nt, Human
auaaucacuuuuuuccaca

SEQ ID NO: 2353332 - RNA, 22 nt, Human
auaauuaucggaagcagugccu

SEQ ID NO: 2353333 - RNA, 21 nt, Human
auaauuaucggaagcagugcc

SEQ ID NO: 2353334 - RNA, 20 nt, Human
auaauuaucggaagcagugc

SEQ ID NO: 2353335 - RNA, 19 nt, Human
auaauuaucggaagcagug

SEQ ID NO: 2353336 - RNA, 16 nt, Human
auaauuaucggaagca

SEQ ID NO: 2353337 - RNA, 17 nt, Human
auaauuauccagaguuu

SEQ ID NO: 2353338 - RNA, 19 nt, Human
auaauucccuaucuuuuag

SEQ ID NO: 2353339 - RNA, 17 nt, Human
auaauucccuaucuuuu

SEQ ID NO: 2353340 - RNA, 12 nt, Human
auaauucccuau

SEQ ID NO: 2353341 - RNA, 14 nt, Human
auaauuaugacagu

SEQ ID NO: 2353342 - RNA, 16 nt, Human
auaauuaugacaguua

SEQ ID NO: 2353343 - RNA, 14 nt, Human
auaauucuacuuug

SEQ ID NO: 2353344 - RNA, 14 nt, Human
auaaugaagcuuua

SEQ ID NO: 2353345 - RNA, 14 nt, Human
auaaugaauacuuu

SEQ ID NO: 2353346 - RNA, 12 nt, Human
auaauuguauca

SEQ ID NO: 2353347 - RNA, 17 nt, Human
auaauuguaucagaggc

SEQ ID NO: 2353348 - RNA, 23 nt, Human
auaauuguaucagaggccuauaa

SEQ ID NO: 2353349 - RNA, 13 nt, Human
auaauuguaucgu

SEQ ID NO: 2353350 - RNA, 23 nt, Human
uuagaugcaguucugaagaagau

SEQ ID NO: 2353351 - RNA, 22 nt, Human
uuagaugcaguucugaagaaga

SEQ ID NO: 2353352 - RNA, 11 nt, Human
auaauucugua

SEQ ID NO: 2353353 - RNA, 19 nt, Human
auaauugaguuuucagugg

SEQ ID NO: 2353354 - RNA, 15 nt, Human
auaauugaucaaauu

SEQ ID NO: 2353355 - RNA, 14 nt, Human
auaauugaucaaau

SEQ ID NO: 2353356 - RNA, 13 nt, Human
auaauugcauuca

SEQ ID NO: 2353357 - RNA, 14 nt, Human
auaauugcauucau

SEQ ID NO: 2353358 - RNA, 20 nt, Human
auaauucccuaucuuuuagu

SEQ ID NO: 2353359 - RNA, 12 nt, Human
auaauucuaaag

SEQ ID NO: 2353360 - RNA, 21 nt, Human
uuagcagcagccuuuaaugca

SEQ ID NO: 2353361 - RNA, 12 nt, Human
uuagcagacagg

SEQ ID NO: 2353362 - RNA, 20 nt, Human
uuagcaggagaggagagcca

SEQ ID NO: 2353363 - RNA, 15 nt, Human
uuagcagcuuccaga

SEQ ID NO: 2353364 - RNA, 12 nt, Human
uuagcaccaggg

SEQ ID NO: 2353365 - RNA, 23 nt, Human
uuagauggauucuccacucaguu

SEQ ID NO: 2353366 - RNA, 13 nt, Human
uuagaugugauuu

SEQ ID NO: 2353367 - RNA, 14 nt, Human
uuagauuagcucug

SEQ ID NO: 2353368 - RNA, 17 nt, Human
uuagauggauucuccac

SEQ ID NO: 2353369 - RNA, 16 nt, Human
uuagauggauucucca

SEQ ID NO: 2353370 - RNA, 22 nt, Human
auaauuguaucguauagcugua

SEQ ID NO: 2353371 - RNA, 20 nt, Human
auaauuguaucguauagcug

SEQ ID NO: 2353372 - RNA, 21 nt, Human
auaauuguaucguauagcugu

SEQ ID NO: 2353373 - RNA, 16 nt, Human
uuagauuagcucugga

SEQ ID NO: 2353374 - RNA, 17 nt, Human
uuagauuagcucuggac

SEQ ID NO: 2353375 - RNA, 23 nt, Human
uuagauugaaaacuuuucucaga

SEQ ID NO: 2353376 - RNA, 22 nt, Human
auaaguuaacuauuuuauuuuc

SEQ ID NO: 2353377 - RNA, 16 nt, Human
auaagcagauuuaaca

SEQ ID NO: 2353378 - RNA, 18 nt, Human
auaagcacugugcuaaua

SEQ ID NO: 2353379 - RNA, 16 nt, Human
auaagcaagagagaug

SEQ ID NO: 2353380 - RNA, 14 nt, Human
auaagcacugugcu

SEQ ID NO: 2353381 - RNA, 17 nt, Human
auaagcacugugcuaau

SEQ ID NO: 2353382 - RNA, 17 nt, Human
auaaguuaacuuccaau

SEQ ID NO: 2353383 - RNA, 17 nt, Human
auaagcaagagagaugu

SEQ ID NO: 2353384 - RNA, 15 nt, Human
auaagcaagagagau

SEQ ID NO: 2353385 - RNA, 14 nt, Human
auaagcaagagaga

SEQ ID NO: 2353386 - RNA, 12 nt, Human
auaagcaagaga

SEQ ID NO: 2353387 - RNA, 23 nt, Human
auaagcaaagggagcacuggguu

SEQ ID NO: 2353388 - RNA, 20 nt, Human
auaagaagggauggauucca

SEQ ID NO: 2353389 - RNA, 18 nt, Human
auaagaauaaaauguuga

SEQ ID NO: 2353390 - RNA, 21 nt, Human
auaagaagggauggauuccaa

SEQ ID NO: 2353391 - RNA, 15 nt, Human
auaagaauaaaaugu

SEQ ID NO: 2353392 - RNA, 23 nt, Human
auaagaaccuuuugagugccuua

SEQ ID NO: 2353393 - RNA, 15 nt, Human
auaagaaaguuucac

SEQ ID NO: 2353394 - RNA, 13 nt, Human
uuaccuaauuaga

SEQ ID NO: 2353395 - RNA, 11 nt, Human
uuaccucugau

SEQ ID NO: 2353396 - RNA, 21 nt, Human
uuaccucugauaccucaaccc

SEQ ID NO: 2353397 - RNA, 15 nt, Human
uuaccucuuaacaau

SEQ ID NO: 2353398 - RNA, 20 nt, Human
uuaccucuuaacaauuucug

SEQ ID NO: 2353399 - RNA, 12 nt, Human
uuaccucuuuaa

SEQ ID NO: 2353400 - RNA, 21 nt, Human
uuaccuaaacagauauaaaug

SEQ ID NO: 2353401 - RNA, 17 nt, Human
uuaccuaaacagauaua

SEQ ID NO: 2353402 - RNA, 18 nt, Human
uuaccuaaacagauauaa

SEQ ID NO: 2353403 - RNA, 19 nt, Human
uuaccuaaacagauauaaa

SEQ ID NO: 2353404 - RNA, 20 nt, Human
uuaccuaaacagauauaaau

SEQ ID NO: 2353405 - RNA, 15 nt, Human
uuaccgcguuguaaa

SEQ ID NO: 2353406 - RNA, 16 nt, Human
uuaccgcguuguaaaa

SEQ ID NO: 2353407 - RNA, 18 nt, Human
uuaccgcguuguaaaaua

SEQ ID NO: 2353408 - RNA, 21 nt, Human
uuaccgcguuguaaaauauag

SEQ ID NO: 2353409 - RNA, 14 nt, Human
uuaccguuucuucc

SEQ ID NO: 2353410 - RNA, 16 nt, Human
uuaccguuucuucccu

SEQ ID NO: 2353411 - RNA, 16 nt, Human
uuaccuaaacagauau

SEQ ID NO: 2353412 - RNA, 17 nt, Human
uuaccugaucaaugaca

SEQ ID NO: 2353413 - RNA, 18 nt, Human
uuaccugaucaaugacag

SEQ ID NO: 2353414 - RNA, 19 nt, Human
uuaccugaucaaugacaga

SEQ ID NO: 2353415 - RNA, 22 nt, Human
uuaccugaaaacacugugcaca

SEQ ID NO: 2353416 - RNA, 20 nt, Human
uuaccugaaaacacugugca

SEQ ID NO: 2353417 - RNA, 18 nt, Human
uuaccugaaaacacugug

SEQ ID NO: 2353418 - RNA, 22 nt, Human
auaagaaccuuuugagugccuu

SEQ ID NO: 2353419 - RNA, 20 nt, Human
uuaccugaucaaugacagag

SEQ ID NO: 2353420 - RNA, 23 nt, Human
uuaccugaucaaugacagagccu

SEQ ID NO: 2353421 - RNA, 22 nt, Human
auaaguuaacuuccaauuuaca

SEQ ID NO: 2353422 - RNA, 13 nt, Human
auaaguuauugca

SEQ ID NO: 2353423 - RNA, 14 nt, Human
auaaguuauugcag

SEQ ID NO: 2353424 - RNA, 16 nt, Human
auaaguuauugcaguu

SEQ ID NO: 2353425 - RNA, 20 nt, Human
auaaguuauugcaguuuauc

SEQ ID NO: 2353426 - RNA, 18 nt, Human
auaaguucaaauucuucu

SEQ ID NO: 2353427 - RNA, 21 nt, Human
auaaguuauugcaguuuauca

SEQ ID NO: 2353428 - RNA, 24 nt, Human
auaaguuauugcaguuuaucauuc

SEQ ID NO: 2353429 - RNA, 24 nt, Human
auaaguucaaauucuucugaacuc

SEQ ID NO: 2353430 - RNA, 21 nt, Human
auaaguucaaauucuucugaa

SEQ ID NO: 2353431 - RNA, 20 nt, Human
auaaguucaaauucuucuga

SEQ ID NO: 2353432 - RNA, 23 nt, Human
auaaguucuaguugcuuguaaaa

SEQ ID NO: 2353433 - RNA, 20 nt, Human
auaaguucuuaugccauguu

SEQ ID NO: 2353434 - RNA, 20 nt, Human
auaaguuucacugacuuaga

SEQ ID NO: 2353435 - RNA, 21 nt, Human
auaaguuucugggaccucagu

SEQ ID NO: 2353436 - RNA, 18 nt, Human
auaaguuucuuugcuuca

SEQ ID NO: 2353437 - RNA, 13 nt, Human
auaaguuugaagg

SEQ ID NO: 2353438 - RNA, 15 nt, Human
auaaguuugaaggaa

SEQ ID NO: 2353439 - RNA, 19 nt, Human
auaaguuugaaggaaacag

SEQ ID NO: 2353440 - RNA, 12 nt, Human
auaaguuuauuu

SEQ ID NO: 2353441 - RNA, 14 nt, Human
auaaguuuauuucu

SEQ ID NO: 2353442 - RNA, 18 nt, Human
auaaguuuauuucuuaaa

SEQ ID NO: 2353443 - RNA, 22 nt, Human
auaaguuuauuucuuaaaucua

SEQ ID NO: 2353444 - RNA, 15 nt, Human
auaauaagcuaaaga

SEQ ID NO: 2353445 - RNA, 13 nt, Human
auaauaagcuaaa

SEQ ID NO: 2353446 - RNA, 23 nt, Human
auaauaaauucccuggccuuuca

SEQ ID NO: 2353447 - RNA, 13 nt, Human
auaaguuuuaugu

SEQ ID NO: 2353448 - RNA, 20 nt, Human
auaaguuugaaggaaacagu

SEQ ID NO: 2353449 - RNA, 21 nt, Human
auaaguuugaaggaaacaguu

SEQ ID NO: 2353450 - RNA, 17 nt, Human
auaaguuugcaauuugg

SEQ ID NO: 2353451 - RNA, 18 nt, Human
auaaguuugcaauuuggg

SEQ ID NO: 2353452 - RNA, 21 nt, Human
auaauacaccacuacauucug

SEQ ID NO: 2353453 - RNA, 23 nt, Human
auaauacaccacuacauucuguu

SEQ ID NO: 2353454 - RNA, 13 nt, Human
auaaauaaaacau

SEQ ID NO: 2353455 - RNA, 17 nt, Human
auaaauaaaaauggaua

SEQ ID NO: 2353456 - RNA, 15 nt, Human
auaaauaaaaaugga

SEQ ID NO: 2353457 - RNA, 14 nt, Human
auaaaguaucuaca

SEQ ID NO: 2353458 - RNA, 19 nt, Human
auaaaguaugguauugaaa

SEQ ID NO: 2353459 - RNA, 12 nt, Human
auaaaguauuua

SEQ ID NO: 2353460 - RNA, 14 nt, Human
auaaaguauuuaau

SEQ ID NO: 2353461 - RNA, 15 nt, Human
auaaaguauuuaauu

SEQ ID NO: 2353462 - RNA, 17 nt, Human
auaaaguauuuaauuag

SEQ ID NO: 2353463 - RNA, 19 nt, Human
auaaaguauuuaauuagug

SEQ ID NO: 2353464 - RNA, 21 nt, Human
auaaaguauuuaauuagugcu

SEQ ID NO: 2353465 - RNA, 21 nt, Human
auaaacuuagaauaaaauugu

SEQ ID NO: 2353466 - RNA, 16 nt, Human
auaaaguaguccugug

SEQ ID NO: 2353467 - RNA, 18 nt, Human
auaaaguaguaaaaauua

SEQ ID NO: 2353468 - RNA, 15 nt, Human
auaaaguaucaugca

SEQ ID NO: 2353469 - RNA, 17 nt, Human
auaaaguaucaugcauu

SEQ ID NO: 2353470 - RNA, 18 nt, Human
auaaaguaucaugcauuc

SEQ ID NO: 2353471 - RNA, 17 nt, Human
auaaaguaguccuguga

SEQ ID NO: 2353472 - RNA, 15 nt, Human
auaaacuuuaccuuu

SEQ ID NO: 2353473 - RNA, 13 nt, Human
auaaacuuuaccu

SEQ ID NO: 2353474 - RNA, 23 nt, Human
auaaacuuagugcggacaaguuu

SEQ ID NO: 2353475 - RNA, 16 nt, Human
auaaacuguguuuacu

SEQ ID NO: 2353476 - RNA, 14 nt, Human
auaaacugugugca

SEQ ID NO: 2353477 - RNA, 20 nt, Human
auaaacugacuuuauccuca

SEQ ID NO: 2353478 - RNA, 16 nt, Human
auaaacuuuaauauaa

SEQ ID NO: 2353479 - RNA, 14 nt, Human
auaaacuuagaaua

SEQ ID NO: 2353480 - RNA, 15 nt, Human
auaaacuuagaauaa

SEQ ID NO: 2353481 - RNA, 20 nt, Human
auaaacuuuaauauaaagua

SEQ ID NO: 2353482 - RNA, 22 nt, Human
auaaacuuuaauauaaaguagu

SEQ ID NO: 2353483 - RNA, 12 nt, Human
auaaacugugug

SEQ ID NO: 2353484 - RNA, 15 nt, Human
auaaacugacuuuau

SEQ ID NO: 2353485 - RNA, 18 nt, Human
auaaacugacuuuauccu

SEQ ID NO: 2353486 - RNA, 18 nt, Human
auaaacuggcagcucagc

SEQ ID NO: 2353487 - RNA, 14 nt, Human
auaaacuaucaguu

SEQ ID NO: 2353488 - RNA, 15 nt, Human
auaaacucuaaacau

SEQ ID NO: 2353489 - RNA, 12 nt, Human
auaaacugacuu

SEQ ID NO: 2353490 - RNA, 13 nt, Human
auaaacugacuuu

SEQ ID NO: 2353491 - RNA, 20 nt, Human
auaaacgcgggaaaaaagau

SEQ ID NO: 2353492 - RNA, 20 nt, Human
auaaacgugaugaucagcug

SEQ ID NO: 2353493 - RNA, 19 nt, Human
auaaacuagauuacauuca

SEQ ID NO: 2353494 - RNA, 17 nt, Human
auaaacuagauuacauu

SEQ ID NO: 2353495 - RNA, 22 nt, Human
auaaacauuuguagcauccucu

SEQ ID NO: 2353496 - RNA, 13 nt, Human
auaaacauuguau

SEQ ID NO: 2353497 - RNA, 23 nt, Human
auaaacauuaagauugaggccug

SEQ ID NO: 2353498 - RNA, 21 nt, Human
auaaacauccuucaagaacuc

SEQ ID NO: 2353499 - RNA, 17 nt, Human
auaaacaucacacacac

SEQ ID NO: 2353500 - RNA, 22 nt, Human
auaaacaguggaauauaaggaa

SEQ ID NO: 2353501 - RNA, 16 nt, Human
auaaacaucacacaca

SEQ ID NO: 2353502 - RNA, 14 nt, Human
auaaacacugugua

SEQ ID NO: 2353503 - RNA, 11 nt, Human
aguuuuccuga

SEQ ID NO: 2353504 - RNA, 12 nt, Human
auaaacacugug

SEQ ID NO: 2353505 - RNA, 18 nt, Human
auaaacacucuugaaaaa

SEQ ID NO: 2353506 - RNA, 21 nt, Human
auaaacccaguugccaucugc

SEQ ID NO: 2353507 - RNA, 21 nt, Human
auaaaccagguuuagacagua

SEQ ID NO: 2353508 - RNA, 17 nt, Human
auaaaccuaaaaaagau

SEQ ID NO: 2353509 - RNA, 18 nt, Human
auaaaccuaaaaaagaua

SEQ ID NO: 2353510 - RNA, 16 nt, Human
auaaaccucaaaaugu

SEQ ID NO: 2353511 - RNA, 15 nt, Human
auaaacgauuuaauu

SEQ ID NO: 2353512 - RNA, 16 nt, Human
auaaaccuuaaguaag

SEQ ID NO: 2353513 - RNA, 18 nt, Human
auaaacgauuuaauucuc

SEQ ID NO: 2353514 - RNA, 19 nt, Human
auaaacgauuuaauucucu

SEQ ID NO: 2353515 - RNA, 20 nt, Human
auaaacgauuuaauucucuu

SEQ ID NO: 2353516 - RNA, 19 nt, Human
auaaaccuaaaaaagauau

SEQ ID NO: 2353517 - RNA, 20 nt, Human
auaaaccuaaaaaagauaua

SEQ ID NO: 2353518 - RNA, 22 nt, Human
auaaaccuaaaaaagauauauu

SEQ ID NO: 2353519 - RNA, 18 nt, Human
auaaaccucuaauuuauu

SEQ ID NO: 2353520 - RNA, 19 nt, Human
auaaaccucuaauuuauuu

SEQ ID NO: 2353521 - RNA, 20 nt, Human
auaaaccucuaauuuauuuu

SEQ ID NO: 2353522 - RNA, 22 nt, Human
auaaaccucuaauuuauuuugu

SEQ ID NO: 2353523 - RNA, 23 nt, Human
aguuuuccuucucaucugugauu

SEQ ID NO: 2353524 - RNA, 18 nt, Human
aguuuucugagaaagacu

SEQ ID NO: 2353525 - RNA, 17 nt, Human
aguuuucuccucccagg

SEQ ID NO: 2353526 - RNA, 23 nt, Human
auaaacacucuugaaaaaugcau

SEQ ID NO: 2353527 - RNA, 17 nt, Human
aguuuucugagaaagac

SEQ ID NO: 2353528 - RNA, 14 nt, Human
aguuuucugagaaa

SEQ ID NO: 2353529 - RNA, 22 nt, Human
aguuuuccuucucaucugugau

SEQ ID NO: 2353530 - RNA, 18 nt, Human
aguuuuccuucucaucug

SEQ ID NO: 2353531 - RNA, 14 nt, Human
aguuuuccuucuca

SEQ ID NO: 2353532 - RNA, 12 nt, Human
aguuuuccuucu

SEQ ID NO: 2353533 - RNA, 22 nt, Human
aguuuuccuaagugauuguaug

SEQ ID NO: 2353534 - RNA, 13 nt, Human
aguuuucugagaa

SEQ ID NO: 2353535 - RNA, 12 nt, Human
aguuuucugaga

SEQ ID NO: 2353536 - RNA, 16 nt, Human
uuacccacacacagau

SEQ ID NO: 2353537 - RNA, 20 nt, Human
uuacccaagcaaaaucaugg

SEQ ID NO: 2353538 - RNA, 12 nt, Human
uuacccaagcaa

SEQ ID NO: 2353539 - RNA, 13 nt, Human
uuacccaagcaaa

SEQ ID NO: 2353540 - RNA, 24 nt, Human
uuacccaaaaacuaaaucucuaau

SEQ ID NO: 2353541 - RNA, 16 nt, Human
uuacccuuuagacugu

SEQ ID NO: 2353542 - RNA, 13 nt, Human
uuacccuuuagac

SEQ ID NO: 2353543 - RNA, 22 nt, Human
uuacccugcgauuuugccugug

SEQ ID NO: 2353544 - RNA, 23 nt, Human
uuaccauuuugggguacccacug

SEQ ID NO: 2353545 - RNA, 16 nt, Human
uuaccaugugccugau

SEQ ID NO: 2353546 - RNA, 13 nt, Human
uuacaugcauuug

SEQ ID NO: 2353547 - RNA, 22 nt, Human
uuacaugcauacuucaaaagua

SEQ ID NO: 2353548 - RNA, 22 nt, Human
uuacaugcauuacugcaugcac

SEQ ID NO: 2353549 - RNA, 19 nt, Human
uuacaugcauacuucaaaa

SEQ ID NO: 2353550 - RNA, 21 nt, Human
uuacaugcauacuucaaaagu

SEQ ID NO: 2353551 - RNA, 23 nt, Human
uuacaugcaauuuauuaaaauga

SEQ ID NO: 2353552 - RNA, 22 nt, Human
uuacaugcaauuuauuaaaaug

SEQ ID NO: 2353553 - RNA, 12 nt, Human
uuacaugcauac

SEQ ID NO: 2353554 - RNA, 14 nt, Human
uuacaugcauacuu

SEQ ID NO: 2353555 - RNA, 15 nt, Human
uuacaugcauacuuc

SEQ ID NO: 2353556 - RNA, 18 nt, Human
uuacaugcauacuucaaa

SEQ ID NO: 2353557 - RNA, 12 nt, Human
auaacugugaag

SEQ ID NO: 2353558 - RNA, 15 nt, Human
uuacaggaaguacug

SEQ ID NO: 2353559 - RNA, 16 nt, Human
uuacaggaaguacugg

SEQ ID NO: 2353560 - RNA, 15 nt, Human
uuacaucuuucacau

SEQ ID NO: 2353561 - RNA, 21 nt, Human
uuacaucuguuuuaaauuuau

SEQ ID NO: 2353562 - RNA, 18 nt, Human
uuacaucuguuuuaaauu

SEQ ID NO: 2353563 - RNA, 14 nt, Human
uuacaugacacagc

SEQ ID NO: 2353564 - RNA, 17 nt, Human
uuacaugaauugcauuu

SEQ ID NO: 2353565 - RNA, 17 nt, Human
uuacaugauucauuuua

SEQ ID NO: 2353566 - RNA, 16 nt, Human
uuacaugauucauuuu

SEQ ID NO: 2353567 - RNA, 18 nt, Human
uuacaggaaguacuggag

SEQ ID NO: 2353568 - RNA, 22 nt, Human
uuacaggaaguacuggagaaaa

SEQ ID NO: 2353569 - RNA, 22 nt, Human
auaaaugucuuuuuuuuaaugu

SEQ ID NO: 2353570 - RNA, 23 nt, Human
auaaaugucuuuuuuuuaaugug

SEQ ID NO: 2353571 - RNA, 19 nt, Human
auaaaugugccuucauuuu

SEQ ID NO: 2353572 - RNA, 13 nt, Human
auaaauuauaagu

SEQ ID NO: 2353573 - RNA, 13 nt, Human
auaaauuauguuu

SEQ ID NO: 2353574 - RNA, 14 nt, Human
auaaauuauguuua

SEQ ID NO: 2353575 - RNA, 15 nt, Human
auaaauuauguuuau

SEQ ID NO: 2353576 - RNA, 21 nt, Human
auaaauuauuaguuuacauca

SEQ ID NO: 2353577 - RNA, 14 nt, Human
auaacauuaccuua

SEQ ID NO: 2353578 - RNA, 19 nt, Human
auaacauuaccuuacugug

SEQ ID NO: 2353579 - RNA, 20 nt, Human
auaacauuaccuuacugugg

SEQ ID NO: 2353580 - RNA, 21 nt, Human
auaaaugucauuaaaauaaau

SEQ ID NO: 2353581 - RNA, 12 nt, Human
auaaaugucugu

SEQ ID NO: 2353582 - RNA, 15 nt, Human
auaaaugucuguuga

SEQ ID NO: 2353583 - RNA, 12 nt, Human
auaaaugucuuu

SEQ ID NO: 2353584 - RNA, 20 nt, Human
auaaaugucuuuuuuuuaau

SEQ ID NO: 2353585 - RNA, 12 nt, Human
auaaauaaauau

SEQ ID NO: 2353586 - RNA, 14 nt, Human
auaaauaaaaugac

SEQ ID NO: 2353587 - RNA, 13 nt, Human
auaaauaaauaua

SEQ ID NO: 2353588 - RNA, 14 nt, Human
auaaauaaauauau

SEQ ID NO: 2353589 - RNA, 16 nt, Human
auaaauaaaugcaaua

SEQ ID NO: 2353590 - RNA, 15 nt, Human
auaaauaaauauaua

SEQ ID NO: 2353591 - RNA, 12 nt, Human
auaaauaaaugu

SEQ ID NO: 2353592 - RNA, 13 nt, Human
auaaauaaaguuu

SEQ ID NO: 2353593 - RNA, 19 nt, Human
auaaauaaaguuuguugaa

SEQ ID NO: 2353594 - RNA, 16 nt, Human
auaacugaaggagaag

SEQ ID NO: 2353595 - RNA, 12 nt, Human
auaacugagaau

SEQ ID NO: 2353596 - RNA, 18 nt, Human
auaacugaaggagaaggu

SEQ ID NO: 2353597 - RNA, 18 nt, Human
auaacugccuuaaaacuu

SEQ ID NO: 2353598 - RNA, 12 nt, Human
auaacuggaaac

SEQ ID NO: 2353599 - RNA, 23 nt, Human
auaaccacaaagcacaguuugaa

SEQ ID NO: 2353600 - RNA, 20 nt, Human
auaaccaaagcccaaagugg

SEQ ID NO: 2353601 - RNA, 13 nt, Human
auaaccacuuaaa

SEQ ID NO: 2353602 - RNA, 22 nt, Human
auaaccacuuaaaaaaugucca

SEQ ID NO: 2353603 - RNA, 20 nt, Human
auaaccaguguuguggauuu

SEQ ID NO: 2353604 - RNA, 14 nt, Human
auaacugaaggaga

SEQ ID NO: 2353605 - RNA, 15 nt, Human
auaacugaaaaugug

SEQ ID NO: 2353606 - RNA, 19 nt, Human
auaaccagcuguaacacag

SEQ ID NO: 2353607 - RNA, 13 nt, Human
auaacugaaaaug

SEQ ID NO: 2353608 - RNA, 22 nt, Human
auaacucuguggcauuauugca

SEQ ID NO: 2353609 - RNA, 14 nt, Human
auaaccagcuguaa

SEQ ID NO: 2353610 - RNA, 13 nt, Human
uguagaagcauuc

SEQ ID NO: 2353611 - RNA, 15 nt, Human
uguagaagcauuccu

SEQ ID NO: 2353612 - RNA, 16 nt, Human
uguagaagcauuccuu

SEQ ID NO: 2353613 - RNA, 21 nt, Human
uguagaaggagacagagcugg

SEQ ID NO: 2353614 - RNA, 17 nt, Human
uguagaaggagacagag

SEQ ID NO: 2353615 - RNA, 17 nt, Human
uguagaagcauuccuuc

SEQ ID NO: 2353616 - RNA, 22 nt, Human
uguagaagcauuccuucuuuga

SEQ ID NO: 2353617 - RNA, 22 nt, Human
uguagaaguaggaagugaaaau

SEQ ID NO: 2353618 - RNA, 16 nt, Human
uguagaaugauuucau

SEQ ID NO: 2353619 - RNA, 21 nt, Human
uguagaccuagggaggaccuu

SEQ ID NO: 2353620 - RNA, 18 nt, Human
uguagaauguauuguacc

SEQ ID NO: 2353621 - RNA, 17 nt, Human
uguagaauguauuguac

SEQ ID NO: 2353622 - RNA, 19 nt, Human
uguagaauguauuguaccu

SEQ ID NO: 2353623 - RNA, 18 nt, Human
uguagaaugauuucaugc

SEQ ID NO: 2353624 - RNA, 17 nt, Human
uguagaaugauuucaug

SEQ ID NO: 2353625 - RNA, 16 nt, Human
uguacuugaugacaga

SEQ ID NO: 2353626 - RNA, 21 nt, Human
uguacuucacugucaggaaga

SEQ ID NO: 2353627 - RNA, 21 nt, Human
uguacuucgucuucuaauuuc

SEQ ID NO: 2353628 - RNA, 14 nt, Human
uguacuucaaguua

SEQ ID NO: 2353629 - RNA, 22 nt, Human
uguacuuaauaaauucagauau

SEQ ID NO: 2353630 - RNA, 13 nt, Human
uguacuucacugu

SEQ ID NO: 2353631 - RNA, 14 nt, Human
uguacuucacuguc

SEQ ID NO: 2353632 - RNA, 21 nt, Human
uguacuuaauaaauucagaua

SEQ ID NO: 2353633 - RNA, 20 nt, Human
uguacuuaauaaauucagau

SEQ ID NO: 2353634 - RNA, 16 nt, Human
uguacuuaauaaauuc

SEQ ID NO: 2353635 - RNA, 16 nt, Human
uguacauuucugaaau

SEQ ID NO: 2353636 - RNA, 15 nt, Human
uguacuugcucuuga

SEQ ID NO: 2353637 - RNA, 18 nt, Human
uguacauuuccaaauuca

SEQ ID NO: 2353638 - RNA, 10 nt, Human
uguacauuuc

SEQ ID NO: 2353639 - RNA, 15 nt, Human
uguacauucuaaaau

SEQ ID NO: 2353640 - RNA, 20 nt, Human
uguacauuuaugauuuaaua

SEQ ID NO: 2353641 - RNA, 21 nt, Human
uguacauuuaugauuuaauaa

SEQ ID NO: 2353642 - RNA, 21 nt, Human
uguacauguguagccugugca

SEQ ID NO: 2353643 - RNA, 14 nt, Human
uguacauuaauuac

SEQ ID NO: 2353644 - RNA, 22 nt, Human
uguacauuagucauucaauaaa

SEQ ID NO: 2353645 - RNA, 13 nt, Human
uguacauuucuga

SEQ ID NO: 2353646 - RNA, 15 nt, Human
uguacuuaacuauuc

SEQ ID NO: 2353647 - RNA, 22 nt, Human
uguacauuuccaaauucacaag

SEQ ID NO: 2353648 - RNA, 21 nt, Human
uguacauuuccaaauucacaa

SEQ ID NO: 2353649 - RNA, 20 nt, Human
uguacaugaaaacacauuuu

SEQ ID NO: 2353650 - RNA, 17 nt, Human
uguacauguguagccug

SEQ ID NO: 2353651 - RNA, 20 nt, Human
uguacauguguagccugugc

SEQ ID NO: 2353652 - RNA, 19 nt, Human
uguacaugaaaacacauuu

SEQ ID NO: 2353653 - RNA, 18 nt, Human
uguacaugaaaacacauu

SEQ ID NO: 2353654 - RNA, 17 nt, Human
uguacaugaaaacacau

SEQ ID NO: 2353655 - RNA, 18 nt, Human
uguacauauguaaaauaa

SEQ ID NO: 2353656 - RNA, 16 nt, Human
uguacauauguaaaau

SEQ ID NO: 2353657 - RNA, 15 nt, Human
uguacauauguaaaa

SEQ ID NO: 2353658 - RNA, 13 nt, Human
uguacauauguaa

SEQ ID NO: 2353659 - RNA, 21 nt, Human
uguacauauguaaaauaaaau

SEQ ID NO: 2353660 - RNA, 19 nt, Human
uguacauauguaaaauaaa

SEQ ID NO: 2353661 - RNA, 15 nt, Human
uguacauaugugcug

SEQ ID NO: 2353662 - RNA, 17 nt, Human
uguacauaugugcugga

SEQ ID NO: 2353663 - RNA, 20 nt, Human
uguacauauuugagacuagu

SEQ ID NO: 2353664 - RNA, 18 nt, Human
uguacauauuuguggaau

SEQ ID NO: 2353665 - RNA, 19 nt, Human
uguacauauuuguggaaua

SEQ ID NO: 2353666 - RNA, 20 nt, Human
uguacauaugugcuggaauu

SEQ ID NO: 2353667 - RNA, 14 nt, Human
uguacaucuauuuu

SEQ ID NO: 2353668 - RNA, 22 nt, Human
uguacaucccauguaacagaaa

SEQ ID NO: 2353669 - RNA, 23 nt, Human
uguacaucccauguaacagaaag

SEQ ID NO: 2353670 - RNA, 17 nt, Human
uguacaucccauguaac

SEQ ID NO: 2353671 - RNA, 18 nt, Human
uguacaucccauguaaca

SEQ ID NO: 2353672 - RNA, 20 nt, Human
uguacaucccauguaacaga

SEQ ID NO: 2353673 - RNA, 21 nt, Human
uguacaucccauguaacagaa

SEQ ID NO: 2353674 - RNA, 23 nt, Human
uguacaaaguagaagucuuagau

SEQ ID NO: 2353675 - RNA, 19 nt, Human
uguacaaaguagaagucuu

SEQ ID NO: 2353676 - RNA, 21 nt, Human
uguacaaaaucgauuggcuuu

SEQ ID NO: 2353677 - RNA, 14 nt, Human
uguacauauaagug

SEQ ID NO: 2353678 - RNA, 21 nt, Human
uguaauuuuaaauaaaaguga

SEQ ID NO: 2353679 - RNA, 22 nt, Human
uguacaaaauaaacaaauaaca

SEQ ID NO: 2353680 - RNA, 16 nt, Human
uguaauuuuauaugaa

SEQ ID NO: 2353681 - RNA, 15 nt, Human
uguaaggcaugaagg

SEQ ID NO: 2353682 - RNA, 14 nt, Human
uguaaggcaugaag

SEQ ID NO: 2353683 - RNA, 21 nt, Human
uguaauuugugauacaaugcu

SEQ ID NO: 2353684 - RNA, 17 nt, Human
uguaauuugugauacaa

SEQ ID NO: 2353685 - RNA, 13 nt, Human
uguaagcugaagu

SEQ ID NO: 2353686 - RNA, 14 nt, Human
uguaagcuguuuau

SEQ ID NO: 2353687 - RNA, 15 nt, Human
uguaagcuguuuauu

SEQ ID NO: 2353688 - RNA, 16 nt, Human
uguaagcuguuuauuu

SEQ ID NO: 2353689 - RNA, 22 nt, Human
uguaagcuguuuauuuuauauu

SEQ ID NO: 2353690 - RNA, 18 nt, Human
uguaaggaaugauuaauu

SEQ ID NO: 2353691 - RNA, 15 nt, Human
uguaaggcaaucaug

SEQ ID NO: 2353692 - RNA, 16 nt, Human
uguaauuugugauaca

SEQ ID NO: 2353693 - RNA, 22 nt, Human
uguaagaaacacacugaggcag

SEQ ID NO: 2353694 - RNA, 17 nt, Human
uguaagaaacacacuga

SEQ ID NO: 2353695 - RNA, 13 nt, Human
agguuuaacucag

SEQ ID NO: 2353696 - RNA, 17 nt, Human
uguaagaaaauaucacu

SEQ ID NO: 2353697 - RNA, 18 nt, Human
uguaagaaaauaucacuu

SEQ ID NO: 2353698 - RNA, 22 nt, Human
uguaagcucuacugaggugcua

SEQ ID NO: 2353699 - RNA, 18 nt, Human
uguaagaaauacuguaca

SEQ ID NO: 2353700 - RNA, 12 nt, Human
uguaagaaauac

SEQ ID NO: 2353701 - RNA, 18 nt, Human
uguaagaacuacaaacaa

SEQ ID NO: 2353702 - RNA, 14 nt, Human
uguaagcugaaaau

SEQ ID NO: 2353703 - RNA, 16 nt, Human
uguaagcugaaaauau

SEQ ID NO: 2353704 - RNA, 13 nt, Human
uguaaggaaugau

SEQ ID NO: 2353705 - RNA, 14 nt, Human
uguaaggaaugauu

SEQ ID NO: 2353706 - RNA, 15 nt, Human
uguaaggaaugauua

SEQ ID NO: 2353707 - RNA, 20 nt, Human
agguguucuacacucaucuu

SEQ ID NO: 2353708 - RNA, 18 nt, Human
agguguugauuuucuguu

SEQ ID NO: 2353709 - RNA, 21 nt, Human
agguguugauuuucuguugua

SEQ ID NO: 2353710 - RNA, 12 nt, Human
agguguugccaa

SEQ ID NO: 2353711 - RNA, 21 nt, Human
agguguugccaaauauguccu

SEQ ID NO: 2353712 - RNA, 16 nt, Human
agguguugucccuucu

SEQ ID NO: 2353713 - RNA, 15 nt, Human
agguguugucccuuc

SEQ ID NO: 2353714 - RNA, 22 nt, Human
agguguugccaaauauguccug

SEQ ID NO: 2353715 - RNA, 23 nt, Human
agguguugccaaauauguccugg

SEQ ID NO: 2353716 - RNA, 17 nt, Human
agguguucuacacucau

SEQ ID NO: 2353717 - RNA, 22 nt, Human
agguguucaagaccagccugac

SEQ ID NO: 2353718 - RNA, 16 nt, Human
agguguuacuguaauu

SEQ ID NO: 2353719 - RNA, 15 nt, Human
agguguuacuguaau

SEQ ID NO: 2353720 - RNA, 16 nt, Human
agguugucugaaguca

SEQ ID NO: 2353721 - RNA, 13 nt, Human
agguguuuaaaga

SEQ ID NO: 2353722 - RNA, 17 nt, Human
agguguuuaaagagagg

SEQ ID NO: 2353723 - RNA, 18 nt, Human
agguguuuaaagagaggu

SEQ ID NO: 2353724 - RNA, 20 nt, Human
agguguuuaaagagagguua

SEQ ID NO: 2353725 - RNA, 20 nt, Human
agguugucugaagucacugc

SEQ ID NO: 2353726 - RNA, 16 nt, Human
agguuguuccuaaaau

SEQ ID NO: 2353727 - RNA, 17 nt, Human
agguuuaaacuucucug

SEQ ID NO: 2353728 - RNA, 21 nt, Human
agguggggucuuugugagagu

SEQ ID NO: 2353729 - RNA, 22 nt, Human
aggugggguugggauugggggc

SEQ ID NO: 2353730 - RNA, 22 nt, Human
agguggggucuuugugagagug

SEQ ID NO: 2353731 - RNA, 23 nt, Human
agguggguuuucuucccaucacu

SEQ ID NO: 2353732 - RNA, 23 nt, Human
agguggguuuucaucaagacugg

SEQ ID NO: 2353733 - RNA, 14 nt, Human
agguggggcagcuu

SEQ ID NO: 2353734 - RNA, 23 nt, Human
agguggggucacucuggcagcuc

SEQ ID NO: 2353735 - RNA, 13 nt, Human
agguggggaguca

SEQ ID NO: 2353736 - RNA, 23 nt, Human
agguggggaggggguuugggggc

SEQ ID NO: 2353737 - RNA, 22 nt, Human
agguggggaggggguuuggggg

SEQ ID NO: 2353738 - RNA, 11 nt, Human
agguggggagg

SEQ ID NO: 2353739 - RNA, 21 nt, Human
agguggggagacugggcugag

SEQ ID NO: 2353740 - RNA, 19 nt, Human
agguggggagacugggcug

SEQ ID NO: 2353741 - RNA, 13 nt, Human
agguggggcagcu

SEQ ID NO: 2353742 - RNA, 22 nt, Human
aggugauccacucgccuucauc

SEQ ID NO: 2353743 - RNA, 22 nt, Human
aggugcaacaagguccucuguc

SEQ ID NO: 2353744 - RNA, 23 nt, Human
aggugugaaccaccacacccagc

SEQ ID NO: 2353745 - RNA, 18 nt, Human
aggugugacugaauuucu

SEQ ID NO: 2353746 - RNA, 14 nt, Human
agguggucugaaug

SEQ ID NO: 2353747 - RNA, 19 nt, Human
aggugguccugagaccuga

SEQ ID NO: 2353748 - RNA, 18 nt, Human
aggugguaugugugugua

SEQ ID NO: 2353749 - RNA, 15 nt, Human
aggugguaugugugu

SEQ ID NO: 2353750 - RNA, 22 nt, Human
agguggguuuucuucccaucac

SEQ ID NO: 2353751 - RNA, 21 nt, Human
agguggguuuucuucccauca

SEQ ID NO: 2353752 - RNA, 19 nt, Human
agguggguuuucuucccau

SEQ ID NO: 2353753 - RNA, 22 nt, Human
aggugugaaccaccacacccag

SEQ ID NO: 2353754 - RNA, 18 nt, Human
agguggucugaauguucu

SEQ ID NO: 2353755 - RNA, 17 nt, Human
agguggucugaauguuc

SEQ ID NO: 2353756 - RNA, 16 nt, Human
agguggucugaauguu

SEQ ID NO: 2353757 - RNA, 15 nt, Human
agguggucugaaugu

SEQ ID NO: 2353758 - RNA, 20 nt, Human
aggugugagccaccacgccc

SEQ ID NO: 2353759 - RNA, 20 nt, Human
aggugugacugaauuucuuu

SEQ ID NO: 2353760 - RNA, 14 nt, Human
aggugugagucacc

SEQ ID NO: 2353761 - RNA, 20 nt, Human
aggugugagucaccaagccc

SEQ ID NO: 2353762 - RNA, 22 nt, Human
ugguuuuccuaaaugcagugaa

SEQ ID NO: 2353763 - RNA, 16 nt, Human
ugguuuuccuaaaugc

SEQ ID NO: 2353764 - RNA, 22 nt, Human
ugguuuuccccucccuggguuc

SEQ ID NO: 2353765 - RNA, 12 nt, Human
ugguuuucuguu

SEQ ID NO: 2353766 - RNA, 14 nt, Human
ugguuugcagauga

SEQ ID NO: 2353767 - RNA, 16 nt, Human
ugguuuuauacugaag

SEQ ID NO: 2353768 - RNA, 23 nt, Human
ugguuuuauacugaaggaaaaac

SEQ ID NO: 2353769 - RNA, 18 nt, Human
ugguuuuaguugcaacuu

SEQ ID NO: 2353770 - RNA, 18 nt, Human
ugguuuuaacaauuuccu

SEQ ID NO: 2353771 - RNA, 12 nt, Human
ugguuuuaacaa

SEQ ID NO: 2353772 - RNA, 15 nt, Human
ugguuugcaaggaag

SEQ ID NO: 2353773 - RNA, 17 nt, Human
ugguuugcaaggaagcc

SEQ ID NO: 2353774 - RNA, 15 nt, Human
ugguuugcagagcuu

SEQ ID NO: 2353775 - RNA, 17 nt, Human
ugguuugagcuuaguga

SEQ ID NO: 2353776 - RNA, 23 nt, Human
ugguuugagcuuagugaaauuac

SEQ ID NO: 2353777 - RNA, 21 nt, Human
ugguuugagacacugguuuac

SEQ ID NO: 2353778 - RNA, 23 nt, Human
ugguuucuucaacaggagaauuu

SEQ ID NO: 2353779 - RNA, 21 nt, Human
ugguuuguaaauuaacuuuua

SEQ ID NO: 2353780 - RNA, 21 nt, Human
ugguuuccacgaugaaaaacu

SEQ ID NO: 2353781 - RNA, 21 nt, Human
ugguuucacggugccagguuu

SEQ ID NO: 2353782 - RNA, 18 nt, Human
ugguuucacuggcccaag

SEQ ID NO: 2353783 - RNA, 13 nt, Human
ugguuuccuuccu

SEQ ID NO: 2353784 - RNA, 20 nt, Human
ugguuuccacgaugaaaaac

SEQ ID NO: 2353785 - RNA, 15 nt, Human
ugguuucgaacuccu

SEQ ID NO: 2353786 - RNA, 12 nt, Human
ugguuucuccag

SEQ ID NO: 2353787 - RNA, 16 nt, Human
ugguuucuagacuugu

SEQ ID NO: 2353788 - RNA, 11 nt, Human
ugguuuauaga

SEQ ID NO: 2353789 - RNA, 18 nt, Human
ugguuuaacuucugccug

SEQ ID NO: 2353790 - RNA, 16 nt, Human
ugguuucacuggccca

SEQ ID NO: 2353791 - RNA, 16 nt, Human
ugguuucaaagauuca

SEQ ID NO: 2353792 - RNA, 12 nt, Human
ugguuuauguca

SEQ ID NO: 2353793 - RNA, 21 nt, Human
ugguuuauagagggccaagac

SEQ ID NO: 2353794 - RNA, 11 nt, Human
ugguuuauguc

SEQ ID NO: 2353795 - RNA, 15 nt, Human
ugguuucagaaaugu

SEQ ID NO: 2353796 - RNA, 14 nt, Human
ugguuucagaaaug

SEQ ID NO: 2353797 - RNA, 21 nt, Human
uguaaauacacauagcaugua

SEQ ID NO: 2353798 - RNA, 12 nt, Human
uguaaauacacc

SEQ ID NO: 2353799 - RNA, 13 nt, Human
uguaaauacauaa

SEQ ID NO: 2353800 - RNA, 12 nt, Human
uguaaauacaua

SEQ ID NO: 2353801 - RNA, 12 nt, Human
uguaaauauaua

SEQ ID NO: 2353802 - RNA, 13 nt, Human
uguaaauauauaa

SEQ ID NO: 2353803 - RNA, 14 nt, Human
uguaaauauauaaa

SEQ ID NO: 2353804 - RNA, 15 nt, Human
uguaaauauauaaau

SEQ ID NO: 2353805 - RNA, 16 nt, Human
uguaaauauauaaaua

SEQ ID NO: 2353806 - RNA, 17 nt, Human
uguaaauauauaaauau

SEQ ID NO: 2353807 - RNA, 18 nt, Human
uguaaauauauaaauaua

SEQ ID NO: 2353808 - RNA, 19 nt, Human
uguaaauauauaaauauau

SEQ ID NO: 2353809 - RNA, 21 nt, Human
uguaaauauauaaauauauau

SEQ ID NO: 2353810 - RNA, 22 nt, Human
uguaaauauguuuuuuagauca

SEQ ID NO: 2353811 - RNA, 14 nt, Human
uguaaauauucuau

SEQ ID NO: 2353812 - RNA, 15 nt, Human
uguaaauauucuaua

SEQ ID NO: 2353813 - RNA, 16 nt, Human
uguaaauauucuauau

SEQ ID NO: 2353814 - RNA, 12 nt, Human
uguaaauauuua

SEQ ID NO: 2353815 - RNA, 20 nt, Human
uguaaauauucuauaugaau

SEQ ID NO: 2353816 - RNA, 13 nt, Human
uguaaauauuuau

SEQ ID NO: 2353817 - RNA, 21 nt, Human
aggugauccacccaccucagc

SEQ ID NO: 2353818 - RNA, 23 nt, Human
aggugauccacccaccucagccu

SEQ ID NO: 2353819 - RNA, 12 nt, Human
uguaaagcauuc

SEQ ID NO: 2353820 - RNA, 17 nt, Human
uguaaagcauuccaaca

SEQ ID NO: 2353821 - RNA, 18 nt, Human
uguaaagauauuuuuauc

SEQ ID NO: 2353822 - RNA, 22 nt, Human
uguaaagagaccuaccucaggu

SEQ ID NO: 2353823 - RNA, 23 nt, Human
uguaaagagaccuaccucagguu

SEQ ID NO: 2353824 - RNA, 23 nt, Human
uguaaagaaagagagaaaauaaa

SEQ ID NO: 2353825 - RNA, 21 nt, Human
uguaaagagaccuaccucagg

SEQ ID NO: 2353826 - RNA, 15 nt, Human
ugguuuucuguucuu

SEQ ID NO: 2353827 - RNA, 13 nt, Human
ugguuuucuguuc

SEQ ID NO: 2353828 - RNA, 18 nt, Human
uguaaagcauuccaacaa

SEQ ID NO: 2353829 - RNA, 18 nt, Human
uguaaagccaacacccug

SEQ ID NO: 2353830 - RNA, 17 nt, Human
ugguuaaucuuuccuga

SEQ ID NO: 2353831 - RNA, 18 nt, Human
ugguuaagucuguuuuau

SEQ ID NO: 2353832 - RNA, 15 nt, Human
ugguuaagucuguuu

SEQ ID NO: 2353833 - RNA, 22 nt, Human
ugguuauuuagggaacugcuug

SEQ ID NO: 2353834 - RNA, 15 nt, Human
ugguuauuucucuga

SEQ ID NO: 2353835 - RNA, 17 nt, Human
ugguucacucuuggagc

SEQ ID NO: 2353836 - RNA, 17 nt, Human
ugguguugcagaagguu

SEQ ID NO: 2353837 - RNA, 16 nt, Human
ugguguuguaugccuu

SEQ ID NO: 2353838 - RNA, 18 nt, Human
ugguguuucuagcacugg

SEQ ID NO: 2353839 - RNA, 21 nt, Human
ugguguuucuagcacuggccu

SEQ ID NO: 2353840 - RNA, 20 nt, Human
ugguguuuucuuaugcagga

SEQ ID NO: 2353841 - RNA, 16 nt, Human
ugguguuucucccucu

SEQ ID NO: 2353842 - RNA, 20 nt, Human
ugguguuuuggggaugagag

SEQ ID NO: 2353843 - RNA, 15 nt, Human
ugguguuuccuggca

SEQ ID NO: 2353844 - RNA, 17 nt, Human
ugguguuuccuggcacu

SEQ ID NO: 2353845 - RNA, 17 nt, Human
ugguuuacacuuuaugc

SEQ ID NO: 2353846 - RNA, 16 nt, Human
ugguucagcuaagcua

SEQ ID NO: 2353847 - RNA, 23 nt, Human
ugguucaggguuggccccugccc

SEQ ID NO: 2353848 - RNA, 20 nt, Human
ugguucaggguuggccccug

SEQ ID NO: 2353849 - RNA, 22 nt, Human
ugguucaggguuggccccugcc

SEQ ID NO: 2353850 - RNA, 13 nt, Human
ugguuauuucucu

SEQ ID NO: 2353851 - RNA, 22 nt, Human
ugguucacucuuggagccugca

SEQ ID NO: 2353852 - RNA, 21 nt, Human
ugguucacucuuggagccugc

SEQ ID NO: 2353853 - RNA, 20 nt, Human
ugguucacucuuggagccug

SEQ ID NO: 2353854 - RNA, 13 nt, Human
ugguguugcagaa

SEQ ID NO: 2353855 - RNA, 22 nt, Human
ugguguucaaaaaacuuguaaa

SEQ ID NO: 2353856 - RNA, 21 nt, Human
ugguguucaaaaaacuuguaa

SEQ ID NO: 2353857 - RNA, 15 nt, Human
ugguguguguaugcg

SEQ ID NO: 2353858 - RNA, 19 nt, Human
uggugugucccccucuguc

SEQ ID NO: 2353859 - RNA, 16 nt, Human
ugguguggcaaagccu

SEQ ID NO: 2353860 - RNA, 16 nt, Human
uggugugaucgucuga

SEQ ID NO: 2353861 - RNA, 16 nt, Human
uggugugaccugaggg

SEQ ID NO: 2353862 - RNA, 18 nt, Human
uggugugacccucugaau

SEQ ID NO: 2353863 - RNA, 17 nt, Human
uggugugaccugagggc

SEQ ID NO: 2353864 - RNA, 18 nt, Human
uggugugaucgucugacu

SEQ ID NO: 2353865 - RNA, 12 nt, Human
ugguggcagcug

SEQ ID NO: 2353866 - RNA, 17 nt, Human
ugguggcacugagcccc

SEQ ID NO: 2353867 - RNA, 19 nt, Human
ugguggcacugagcccccc

SEQ ID NO: 2353868 - RNA, 17 nt, Human
aggugaaggaauauaug

SEQ ID NO: 2353869 - RNA, 23 nt, Human
aggugaaggaauauauggcagag

SEQ ID NO: 2353870 - RNA, 14 nt, Human
aggugaaggaauau

SEQ ID NO: 2353871 - RNA, 16 nt, Human
aggugaaggaauauau

SEQ ID NO: 2353872 - RNA, 15 nt, Human
ugguggcagagugga

SEQ ID NO: 2353873 - RNA, 12 nt, Human
ugguggcagcuc

SEQ ID NO: 2353874 - RNA, 16 nt, Human
ugguggcagcucaccu

SEQ ID NO: 2353875 - RNA, 19 nt, Human
ugguggcagcucaccucuc

SEQ ID NO: 2353876 - RNA, 20 nt, Human
ugguggcagcucaccucucc

SEQ ID NO: 2353877 - RNA, 23 nt, Human
ugguggcagcucaccucucccuu

SEQ ID NO: 2353878 - RNA, 13 nt, Human
ugggaauauuuga

SEQ ID NO: 2353879 - RNA, 23 nt, Human
ugggaauaagugccaggauggaa

SEQ ID NO: 2353880 - RNA, 14 nt, Human
ugggaauauuugaa

SEQ ID NO: 2353881 - RNA, 15 nt, Human
ugggaauauuugaau

SEQ ID NO: 2353882 - RNA, 16 nt, Human
ugggaauauuugaauc

SEQ ID NO: 2353883 - RNA, 18 nt, Human
ugggaauauuugaaucuu

SEQ ID NO: 2353884 - RNA, 22 nt, Human
ugggaauauuugaaucuugucu

SEQ ID NO: 2353885 - RNA, 23 nt, Human
aggggacacuucccucuguuucu

SEQ ID NO: 2353886 - RNA, 14 nt, Human
ugggaaucaagauu

SEQ ID NO: 2353887 - RNA, 19 nt, Human
ugggaauauuugaaucuug

SEQ ID NO: 2353888 - RNA, 20 nt, Human
ugggaauauuugaaucuugu

SEQ ID NO: 2353889 - RNA, 15 nt, Human
aggggacccccgccc

SEQ ID NO: 2353890 - RNA, 18 nt, Human
aggggacccccgcccccu

SEQ ID NO: 2353891 - RNA, 19 nt, Human
aggggacccccgcccccug

SEQ ID NO: 2353892 - RNA, 14 nt, Human
aggggacccccgcc

SEQ ID NO: 2353893 - RNA, 22 nt, Human
aggggacccccgcccccugccc

SEQ ID NO: 2353894 - RNA, 13 nt, Human
aggggaggagggc

SEQ ID NO: 2353895 - RNA, 14 nt, Human
aggggacgcuggua

SEQ ID NO: 2353896 - RNA, 19 nt, Human
aggggaggaucacuggagc

SEQ ID NO: 2353897 - RNA, 14 nt, Human
aggggaggagggcg

SEQ ID NO: 2353898 - RNA, 23 nt, Human
aggggacgcugguagagauggag

SEQ ID NO: 2353899 - RNA, 21 nt, Human
aggggaggcagccggcaccca

SEQ ID NO: 2353900 - RNA, 13 nt, Human
aggggaggcagcc

SEQ ID NO: 2353901 - RNA, 18 nt, Human
aggggagggggauccgac

SEQ ID NO: 2353902 - RNA, 16 nt, Human
aggggaggggggcaca

SEQ ID NO: 2353903 - RNA, 16 nt, Human
aggggaggguggcagg

SEQ ID NO: 2353904 - RNA, 19 nt, Human
aggggaggguggcagguga

SEQ ID NO: 2353905 - RNA, 23 nt, Human
aggggcuggccuuccugcccuac

SEQ ID NO: 2353906 - RNA, 16 nt, Human
aggggcuggcuucagg

SEQ ID NO: 2353907 - RNA, 17 nt, Human
aggggcuggcuucagga

SEQ ID NO: 2353908 - RNA, 19 nt, Human
aggggcuggcuucaggagg

SEQ ID NO: 2353909 - RNA, 19 nt, Human
aggggcuggccuuccugcc

SEQ ID NO: 2353910 - RNA, 16 nt, Human
aggggaguugugucug

SEQ ID NO: 2353911 - RNA, 16 nt, Human
aggggauagagagaga

SEQ ID NO: 2353912 - RNA, 20 nt, Human
aggggcuuucuggagaggag

SEQ ID NO: 2353913 - RNA, 17 nt, Human
aggggcuuucuggagag

SEQ ID NO: 2353914 - RNA, 13 nt, Human
agggggcugggac

SEQ ID NO: 2353915 - RNA, 16 nt, Human
aggggcuuucuggaga

SEQ ID NO: 2353916 - RNA, 14 nt, Human
aggggcuuucugga

SEQ ID NO: 2353917 - RNA, 15 nt, Human
aggggucggcugacc

SEQ ID NO: 2353918 - RNA, 21 nt, Human
aggggucggcugaccaugcuc

SEQ ID NO: 2353919 - RNA, 18 nt, Human
aggggucccagccacccc

SEQ ID NO: 2353920 - RNA, 15 nt, Human
aggggucccagccac

SEQ ID NO: 2353921 - RNA, 19 nt, Human
aggggucccagccaccccg

SEQ ID NO: 2353922 - RNA, 19 nt, Human
aggggucuccaggaggaga

SEQ ID NO: 2353923 - RNA, 13 nt, Human
aggggucucccug

SEQ ID NO: 2353924 - RNA, 18 nt, Human
aggggucuccaggaggag

SEQ ID NO: 2353925 - RNA, 16 nt, Human
agggguccuuggugug

SEQ ID NO: 2353926 - RNA, 15 nt, Human
aggggucucccugga

SEQ ID NO: 2353927 - RNA, 16 nt, Human
aggggucucccuggag

SEQ ID NO: 2353928 - RNA, 19 nt, Human
aggggucucccuggagugc

SEQ ID NO: 2353929 - RNA, 15 nt, Human
aggguaaggugccuu

SEQ ID NO: 2353930 - RNA, 17 nt, Human
aggggucucccuggagu

SEQ ID NO: 2353931 - RNA, 24 nt, Human
aggggucagggaccaaggaccccu

SEQ ID NO: 2353932 - RNA, 20 nt, Human
aggggucagggaccaaggac

SEQ ID NO: 2353933 - RNA, 14 nt, Human
aggggucagggacc

SEQ ID NO: 2353934 - RNA, 16 nt, Human
aggggucaggcuccau

SEQ ID NO: 2353935 - RNA, 21 nt, Human
agggggguugugaggccuggc

SEQ ID NO: 2353936 - RNA, 16 nt, Human
aggggguccacccagc

SEQ ID NO: 2353937 - RNA, 16 nt, Human
agggggucccaguggg

SEQ ID NO: 2353938 - RNA, 19 nt, Human
agggggucccagugggagg

SEQ ID NO: 2353939 - RNA, 20 nt, Human
agggggucccagugggaggg

SEQ ID NO: 2353940 - RNA, 24 nt, Human
agggggucccagugggaggggcag

SEQ ID NO: 2353941 - RNA, 17 nt, Human
aggggggcugccuggcc

SEQ ID NO: 2353942 - RNA, 23 nt, Human
aggggggcacaugcugagucucc

SEQ ID NO: 2353943 - RNA, 17 nt, Human
aggggggaagaucaggu

SEQ ID NO: 2353944 - RNA, 14 nt, Human
aggggggaagauca

SEQ ID NO: 2353945 - RNA, 13 nt, Human
aggggggagcugg

SEQ ID NO: 2353946 - RNA, 14 nt, Human
aggggggagcuggg

SEQ ID NO: 2353947 - RNA, 16 nt, Human
agggggcuugaagcca

SEQ ID NO: 2353948 - RNA, 18 nt, Human
agggggcuugaagccaaa

SEQ ID NO: 2353949 - RNA, 19 nt, Human
agggggcuugaagccaaag

SEQ ID NO: 2353950 - RNA, 15 nt, Human
aggguagcagguacc

SEQ ID NO: 2353951 - RNA, 14 nt, Human
aggguagcccgccu

SEQ ID NO: 2353952 - RNA, 21 nt, Human
aggguaggagguuuggauggg

SEQ ID NO: 2353953 - RNA, 16 nt, Human
aggguagcccgccugc

SEQ ID NO: 2353954 - RNA, 23 nt, Human
aggguagcccgccugccaguccu

SEQ ID NO: 2353955 - RNA, 19 nt, Human
aggguacuaaggaaucuuu

SEQ ID NO: 2353956 - RNA, 19 nt, Human
aggguaccuugaacacugg

SEQ ID NO: 2353957 - RNA, 23 nt, Human
aggguaccuugaacacuggggga

SEQ ID NO: 2353958 - RNA, 22 nt, Human
aggguaauaaacuuagaauaaa

SEQ ID NO: 2353959 - RNA, 17 nt, Human
aggguagucugguuucu

SEQ ID NO: 2353960 - RNA, 21 nt, Human
agggucuugguuccagccugc

SEQ ID NO: 2353961 - RNA, 18 nt, Human
aggguaucaaauaaaauu

SEQ ID NO: 2353962 - RNA, 22 nt, Human
agggucuugguuccagccugcc

SEQ ID NO: 2353963 - RNA, 16 nt, Human
aggguaucaggugcug

SEQ ID NO: 2353964 - RNA, 12 nt, Human
aggguagggugg

SEQ ID NO: 2353965 - RNA, 16 nt, Human
uggucaucuuuuucuc

SEQ ID NO: 2353966 - RNA, 23 nt, Human
ugguccaaaagauugcugaaauu

SEQ ID NO: 2353967 - RNA, 21 nt, Human
ugguccaaaagauugcugaaa

SEQ ID NO: 2353968 - RNA, 18 nt, Human
uggucauuuuauguuaag

SEQ ID NO: 2353969 - RNA, 15 nt, Human
ugguccagcuugcuc

SEQ ID NO: 2353970 - RNA, 12 nt, Human
ugguccaggaga

SEQ ID NO: 2353971 - RNA, 17 nt, Human
ugguccagggaagcugg

SEQ ID NO: 2353972 - RNA, 16 nt, Human
ugguccaggagaaggc

SEQ ID NO: 2353973 - RNA, 22 nt, Human
ugguccagcuugcucuucagug

SEQ ID NO: 2353974 - RNA, 14 nt, Human
ugguccaggguuga

SEQ ID NO: 2353975 - RNA, 21 nt, Human
ugguccagggcuagugacuug

SEQ ID NO: 2353976 - RNA, 19 nt, Human
ugguccagggaagcuggcc

SEQ ID NO: 2353977 - RNA, 13 nt, Human
ugguccagggcua

SEQ ID NO: 2353978 - RNA, 15 nt, Human
ugguccauagagagc

SEQ ID NO: 2353979 - RNA, 16 nt, Human
ugguccauagagagca

SEQ ID NO: 2353980 - RNA, 17 nt, Human
ugguaaagacuggcuuu

SEQ ID NO: 2353981 - RNA, 22 nt, Human
ugguaauuuaagauuccagaga

SEQ ID NO: 2353982 - RNA, 19 nt, Human
ugguaaacgcugucccuag

SEQ ID NO: 2353983 - RNA, 16 nt, Human
ugguaaagacuggcuu

SEQ ID NO: 2353984 - RNA, 13 nt, Human
ugguaaacuauuu

SEQ ID NO: 2353985 - RNA, 21 nt, Human
ugguaaacuauuugucuuuca

SEQ ID NO: 2353986 - RNA, 19 nt, Human
ugguaauuuguaucugaag

SEQ ID NO: 2353987 - RNA, 21 nt, Human
ugguaauuuguaucugaagga

SEQ ID NO: 2353988 - RNA, 13 nt, Human
ugguaauuguugc

SEQ ID NO: 2353989 - RNA, 22 nt, Human
ugguaauuuguaucugaaggag

SEQ ID NO: 2353990 - RNA, 15 nt, Human
ugguacauggccagu

SEQ ID NO: 2353991 - RNA, 16 nt, Human
ugguacauggccagug

SEQ ID NO: 2353992 - RNA, 21 nt, Human
uggucaccaaaucagcugcua

SEQ ID NO: 2353993 - RNA, 23 nt, Human
uggucaccaaaucagcugcuacu

SEQ ID NO: 2353994 - RNA, 14 nt, Human
uggucaccagcucc

SEQ ID NO: 2353995 - RNA, 15 nt, Human
uggucaccagcuccu

SEQ ID NO: 2353996 - RNA, 14 nt, Human
uggucaccaugaaa

SEQ ID NO: 2353997 - RNA, 16 nt, Human
uggucaccaugaaacu

SEQ ID NO: 2353998 - RNA, 15 nt, Human
ugggugaagacagag

SEQ ID NO: 2353999 - RNA, 22 nt, Human
ugggucuucagggggccaggug

SEQ ID NO: 2354000 - RNA, 21 nt, Human
ugggucuguuuuccuuucuca

SEQ ID NO: 2354001 - RNA, 22 nt, Human
ugggucuguuuuccuuucucac

SEQ ID NO: 2354002 - RNA, 22 nt, Human
ugggucuuguuuuuuuuuucca

SEQ ID NO: 2354003 - RNA, 19 nt, Human
uggguggaaccaggaaccu

SEQ ID NO: 2354004 - RNA, 16 nt, Human
uggguggacaggggcc

SEQ ID NO: 2354005 - RNA, 14 nt, Human
uggguggagaagcc

SEQ ID NO: 2354006 - RNA, 15 nt, Human
uggguggagaagcca

SEQ ID NO: 2354007 - RNA, 16 nt, Human
uggguggagaagccau

SEQ ID NO: 2354008 - RNA, 17 nt, Human
uggguggagaagccauu

SEQ ID NO: 2354009 - RNA, 14 nt, Human
uggguggaugccug

SEQ ID NO: 2354010 - RNA, 24 nt, Human
uggguuuucuucccaucacuggag

SEQ ID NO: 2354011 - RNA, 14 nt, Human
uggguuuucuuccc

SEQ ID NO: 2354012 - RNA, 19 nt, Human
uggguuuucuuaaccaucu

SEQ ID NO: 2354013 - RNA, 21 nt, Human
uggguggagaagccauugucu

SEQ ID NO: 2354014 - RNA, 22 nt, Human
uggguggagaagccauugucuu

SEQ ID NO: 2354015 - RNA, 23 nt, Human
uggguggagaagccauugucuuc

SEQ ID NO: 2354016 - RNA, 20 nt, Human
uggguggauauaaauauaua

SEQ ID NO: 2354017 - RNA, 23 nt, Human
uggguggaugccugguggcagcu

SEQ ID NO: 2354018 - RNA, 22 nt, Human
uggguuuuuguuaccuuuaugg

SEQ ID NO: 2354019 - RNA, 15 nt, Human
uggguuuuuguuacc

SEQ ID NO: 2354020 - RNA, 14 nt, Human
uggguuuuucccug

SEQ ID NO: 2354021 - RNA, 21 nt, Human
uggguuuuguauucucugagc

SEQ ID NO: 2354022 - RNA, 19 nt, Human
uggguuuuguauucucuga

SEQ ID NO: 2354023 - RNA, 21 nt, Human
agggugcugcuucccucugcc

SEQ ID NO: 2354024 - RNA, 23 nt, Human
agggugcuacguacaugugaggc

SEQ ID NO: 2354025 - RNA, 17 nt, Human
agggugcugcuucccuc

SEQ ID NO: 2354026 - RNA, 22 nt, Human
agggugcuacguacaugugagg

SEQ ID NO: 2354027 - RNA, 20 nt, Human
agggugcaguaucaugcccu

SEQ ID NO: 2354028 - RNA, 15 nt, Human
agggugaugccaggu

SEQ ID NO: 2354029 - RNA, 19 nt, Human
agggugaugccagguucua

SEQ ID NO: 2354030 - RNA, 15 nt, Human
ugggucugugugugu

SEQ ID NO: 2354031 - RNA, 23 nt, Human
aggguggacuuagaaagcagggg

SEQ ID NO: 2354032 - RNA, 14 nt, Human
ugggucuguuuucc

SEQ ID NO: 2354033 - RNA, 15 nt, Human
ugggucuguuuuccu

SEQ ID NO: 2354034 - RNA, 19 nt, Human
ugggucuguuuuccuuucu

SEQ ID NO: 2354035 - RNA, 13 nt, Human
ugggucugugugu

SEQ ID NO: 2354036 - RNA, 16 nt, Human
aggguggacuuagaaa

SEQ ID NO: 2354037 - RNA, 20 nt, Human
aggguggacuuagaaagcag

SEQ ID NO: 2354038 - RNA, 21 nt, Human
aggguggacuuagaaagcagg

SEQ ID NO: 2354039 - RNA, 22 nt, Human
aggguggacuuagaaagcaggg

SEQ ID NO: 2354040 - RNA, 13 nt, Human
agggucuuuucau

SEQ ID NO: 2354041 - RNA, 18 nt, Human
agggucuuuucaucuggg

SEQ ID NO: 2354042 - RNA, 21 nt, Human
agggucuuuucaucugggaaa

SEQ ID NO: 2354043 - RNA, 13 nt, Human
agggugaggaugg

SEQ ID NO: 2354044 - RNA, 14 nt, Human
agggugagagcugc

SEQ ID NO: 2354045 - RNA, 14 nt, Human
agggugaugccagg

SEQ ID NO: 2354046 - RNA, 22 nt, Human
agggugaugggaaagcauugua

SEQ ID NO: 2354047 - RNA, 21 nt, Human
agggugaugggaaagcauugu

SEQ ID NO: 2354048 - RNA, 15 nt, Human
aggucaggaguucga

SEQ ID NO: 2354049 - RNA, 20 nt, Human
aggucaggaguuccuaacca

SEQ ID NO: 2354050 - RNA, 18 nt, Human
aggucaaguaagaagaca

SEQ ID NO: 2354051 - RNA, 22 nt, Human
aggucauacuaucuacucuccu

SEQ ID NO: 2354052 - RNA, 21 nt, Human
aggucauacaauccauucuua

SEQ ID NO: 2354053 - RNA, 20 nt, Human
aggucauacaauccauucuu

SEQ ID NO: 2354054 - RNA, 23 nt, Human
aggucauuuuuuuuaagaaaaag

SEQ ID NO: 2354055 - RNA, 22 nt, Human
aggucauuuuuuuuaagaaaaa

SEQ ID NO: 2354056 - RNA, 17 nt, Human
aggucaaguaagaagac

SEQ ID NO: 2354057 - RNA, 18 nt, Human
aggucaagcccaggagga

SEQ ID NO: 2354058 - RNA, 16 nt, Human
aggucaagcccaggag

SEQ ID NO: 2354059 - RNA, 19 nt, Human
aggucaagaagaagaugga

SEQ ID NO: 2354060 - RNA, 21 nt, Human
aggucaacagagaaggcagga

SEQ ID NO: 2354061 - RNA, 19 nt, Human
aggucaacagagaaggcag

SEQ ID NO: 2354062 - RNA, 17 nt, Human
aggucaacagagaaggc

SEQ ID NO: 2354063 - RNA, 21 nt, Human
aggucaaggcugcagugagcc

SEQ ID NO: 2354064 - RNA, 15 nt, Human
aggucagugcaaaua

SEQ ID NO: 2354065 - RNA, 21 nt, Human
aggucuuuugacauguggaaa

SEQ ID NO: 2354066 - RNA, 16 nt, Human
agguccaauuuguaaa

SEQ ID NO: 2354067 - RNA, 22 nt, Human
aggucuugaacuccuggccuca

SEQ ID NO: 2354068 - RNA, 21 nt, Human
aggugaaagggagcuaucagg

SEQ ID NO: 2354069 - RNA, 19 nt, Human
aggugaaaguuaauccacu

SEQ ID NO: 2354070 - RNA, 16 nt, Human
aggugaaagggagcua

SEQ ID NO: 2354071 - RNA, 14 nt, Human
aggugaaagggagc

SEQ ID NO: 2354072 - RNA, 20 nt, Human
aggucuugaacuccuggccu

SEQ ID NO: 2354073 - RNA, 21 nt, Human
aggucuugaacuccuggccuc

SEQ ID NO: 2354074 - RNA, 17 nt, Human
aggucauagcugagauu

SEQ ID NO: 2354075 - RNA, 14 nt, Human
agguccaagauacc

SEQ ID NO: 2354076 - RNA, 17 nt, Human
agguccacaacacacag

SEQ ID NO: 2354077 - RNA, 20 nt, Human
agguaugaccuucuaggaag

SEQ ID NO: 2354078 - RNA, 13 nt, Human
agguaugaauaag

SEQ ID NO: 2354079 - RNA, 15 nt, Human
agguaucuccaggau

SEQ ID NO: 2354080 - RNA, 21 nt, Human
agguaucauuuucugcauuua

SEQ ID NO: 2354081 - RNA, 13 nt, Human
agguaucuccagg

SEQ ID NO: 2354082 - RNA, 14 nt, Human
agguaucuccagga

SEQ ID NO: 2354083 - RNA, 17 nt, Human
agguaugcaaucaaauc

SEQ ID NO: 2354084 - RNA, 22 nt, Human
agguaugaccuucuaggaagcu

SEQ ID NO: 2354085 - RNA, 23 nt, Human
agguaugaccuucuaggaagcuc

SEQ ID NO: 2354086 - RNA, 14 nt, Human
agguauuucaaaac

SEQ ID NO: 2354087 - RNA, 14 nt, Human
aggucaacagagaa

SEQ ID NO: 2354088 - RNA, 16 nt, Human
agguaugaggucuagg

SEQ ID NO: 2354089 - RNA, 14 nt, Human
agguauuuaucuuu

SEQ ID NO: 2354090 - RNA, 19 nt, Human
agguaggagaauugcuuga

SEQ ID NO: 2354091 - RNA, 14 nt, Human
agguagcugccccu

SEQ ID NO: 2354092 - RNA, 23 nt, Human
agguagcuuugagguggaagagg

SEQ ID NO: 2354093 - RNA, 20 nt, Human
agguagcccuggccagaggc

SEQ ID NO: 2354094 - RNA, 19 nt, Human
agguagcccuggccagagg

SEQ ID NO: 2354095 - RNA, 21 nt, Human
agguagcccuggccagaggcu

SEQ ID NO: 2354096 - RNA, 19 nt, Human
agguagcugccccuggcuc

SEQ ID NO: 2354097 - RNA, 17 nt, Human
agguaucaguugcaaua

SEQ ID NO: 2354098 - RNA, 22 nt, Human
agguaucaguugcaauaauacu

SEQ ID NO: 2354099 - RNA, 14 nt, Human
aggguuggagcagu

SEQ ID NO: 2354100 - RNA, 14 nt, Human
aggguugaucacac

SEQ ID NO: 2354101 - RNA, 23 nt, Human
aggguuggguucaucugagcaag

SEQ ID NO: 2354102 - RNA, 17 nt, Human
aggguugggcugguguc

SEQ ID NO: 2354103 - RNA, 21 nt, Human
aggguuguuaauggugcaaau

SEQ ID NO: 2354104 - RNA, 21 nt, Human
aggguuuaauccccaguaaaa

SEQ ID NO: 2354105 - RNA, 20 nt, Human
aggguugguccucuugccuc

SEQ ID NO: 2354106 - RNA, 20 nt, Human
aggguuuauguuuaggaugu

SEQ ID NO: 2354107 - RNA, 22 nt, Human
aggguuuggcugugucuaaacu

SEQ ID NO: 2354108 - RNA, 23 nt, Human
aggguuuggcugugucuaaacug

SEQ ID NO: 2354109 - RNA, 16 nt, Human
agguagcccuggccag

SEQ ID NO: 2354110 - RNA, 20 nt, Human
agguagauguucagauugcu

SEQ ID NO: 2354111 - RNA, 17 nt, Human
agguagaguuugaagga

SEQ ID NO: 2354112 - RNA, 20 nt, Human
agguagaguuugaaggaggu

SEQ ID NO: 2354113 - RNA, 21 nt, Human
agguagaguuugaaggaggug

SEQ ID NO: 2354114 - RNA, 23 nt, Human
agguagaguuugaaggaggugag

SEQ ID NO: 2354115 - RNA, 17 nt, Human
aggguuucgagaagcug

SEQ ID NO: 2354116 - RNA, 17 nt, Human
aggguuucagagagccu

SEQ ID NO: 2354117 - RNA, 22 nt, Human
aggguuuaauccccaguaaaau

SEQ ID NO: 2354118 - RNA, 17 nt, Human
aggguuucugagcugcu

SEQ ID NO: 2354119 - RNA, 19 nt, Human
aggguuucgagaagcugcu

SEQ ID NO: 2354120 - RNA, 18 nt, Human
aggguuucugagcugcuc

SEQ ID NO: 2354121 - RNA, 20 nt, Human
aggguuuggcugugucuaaa

SEQ ID NO: 2354122 - RNA, 21 nt, Human
aggguuuggcugugucuaaac

SEQ ID NO: 2354123 - RNA, 18 nt, Human
uggugaaauuuauuaguu

SEQ ID NO: 2354124 - RNA, 13 nt, Human
uggugaauauugu

SEQ ID NO: 2354125 - RNA, 18 nt, Human
aggguucaaaaugucugu

SEQ ID NO: 2354126 - RNA, 14 nt, Human
aggguucaaaaugu

SEQ ID NO: 2354127 - RNA, 18 nt, Human
aggguuauugcauuugga

SEQ ID NO: 2354128 - RNA, 19 nt, Human
uggugaaauuuauuaguua

SEQ ID NO: 2354129 - RNA, 18 nt, Human
aggguucccccagcccug

SEQ ID NO: 2354130 - RNA, 17 nt, Human
aggguucccccagcccu

SEQ ID NO: 2354131 - RNA, 15 nt, Human
aggguucccccagcc

SEQ ID NO: 2354132 - RNA, 22 nt, Human
aggguucaaaaugucuguagcu

SEQ ID NO: 2354133 - RNA, 18 nt, Human
aggguucagagacucagg

SEQ ID NO: 2354134 - RNA, 16 nt, Human
aggguucagagacuca

SEQ ID NO: 2354135 - RNA, 21 nt, Human
aggguugaguuacuuccuauc

SEQ ID NO: 2354136 - RNA, 20 nt, Human
aggguucuccucuccccucu

SEQ ID NO: 2354137 - RNA, 18 nt, Human
aggguugaccccagagga

SEQ ID NO: 2354138 - RNA, 17 nt, Human
aggguugaccccagagg

SEQ ID NO: 2354139 - RNA, 16 nt, Human
aggguugaccccagag

SEQ ID NO: 2354140 - RNA, 19 nt, Human
aggguucccccagcccugu

SEQ ID NO: 2354141 - RNA, 21 nt, Human
aggguuccuguagaccuaggg

SEQ ID NO: 2354142 - RNA, 17 nt, Human
aggguucuccucucccc

SEQ ID NO: 2354143 - RNA, 23 nt, Human
aggguuccuguagaccuagggag

SEQ ID NO: 2354144 - RNA, 14 nt, Human
aggguucuggcugc

SEQ ID NO: 2354145 - RNA, 13 nt, Human
aggguuggccccu

SEQ ID NO: 2354146 - RNA, 14 nt, Human
aggguuggccccug

SEQ ID NO: 2354147 - RNA, 13 nt, Human
aggguugggcugg

SEQ ID NO: 2354148 - RNA, 15 nt, Human
aggguugggcuggug

SEQ ID NO: 2354149 - RNA, 19 nt, Human
uggugaacagaacaaaagg

SEQ ID NO: 2354150 - RNA, 14 nt, Human
uggucuucagccuc

SEQ ID NO: 2354151 - RNA, 15 nt, Human
uggugaaaauguacu

SEQ ID NO: 2354152 - RNA, 17 nt, Human
aggguggugaccucugc

SEQ ID NO: 2354153 - RNA, 18 nt, Human
aggguggugaccucugcc

SEQ ID NO: 2354154 - RNA, 19 nt, Human
aggguggugaccucugccu

SEQ ID NO: 2354155 - RNA, 14 nt, Human
uggucugcaggcag

SEQ ID NO: 2354156 - RNA, 18 nt, Human
uggucugcucgggcccag

SEQ ID NO: 2354157 - RNA, 19 nt, Human
uggucugcucgggcccagg

SEQ ID NO: 2354158 - RNA, 21 nt, Human
uggucugcucgggcccaggcc

SEQ ID NO: 2354159 - RNA, 15 nt, Human
uggucugcaggcagg

SEQ ID NO: 2354160 - RNA, 17 nt, Human
uggucugcucgggccca

SEQ ID NO: 2354161 - RNA, 16 nt, Human
uggucugggacucucu

SEQ ID NO: 2354162 - RNA, 16 nt, Human
uggucugggacuuccu

SEQ ID NO: 2354163 - RNA, 17 nt, Human
uggucugggacuuccuu

SEQ ID NO: 2354164 - RNA, 19 nt, Human
uggucugggacuuccuugc

SEQ ID NO: 2354165 - RNA, 16 nt, Human
uggucugauuucagga

SEQ ID NO: 2354166 - RNA, 22 nt, Human
uggucugaggggcaacugaguc

SEQ ID NO: 2354167 - RNA, 12 nt, Human
uggucugaaugu

SEQ ID NO: 2354168 - RNA, 22 nt, Human
uggucucugcugaagguuguaa

SEQ ID NO: 2354169 - RNA, 18 nt, Human
uggucugacccacugcuu

SEQ ID NO: 2354170 - RNA, 21 nt, Human
uggucugggacuuccuugcuc

SEQ ID NO: 2354171 - RNA, 14 nt, Human
uggucuguuggcag

SEQ ID NO: 2354172 - RNA, 18 nt, Human
uggucuguuggcaggcug

SEQ ID NO: 2354173 - RNA, 16 nt, Human
uggucuuauuuguaaa

SEQ ID NO: 2354174 - RNA, 12 nt, Human
uggucuguguga

SEQ ID NO: 2354175 - RNA, 22 nt, Human
uggucugugagaugcuagaacu

SEQ ID NO: 2354176 - RNA, 22 nt, Human
ugguccaugggccauaugaaaa

SEQ ID NO: 2354177 - RNA, 17 nt, Human
ugguccauggaaugcuu

SEQ ID NO: 2354178 - RNA, 20 nt, Human
ugguccauggaaugcuugaa

SEQ ID NO: 2354179 - RNA, 21 nt, Human
uggucccaacaggaggacaau

SEQ ID NO: 2354180 - RNA, 19 nt, Human
ugguccauagagagcaaga

SEQ ID NO: 2354181 - RNA, 21 nt, Human
uggucucgaacuccugaccuu

SEQ ID NO: 2354182 - RNA, 20 nt, Human
uggucucgaacuccugaccu

SEQ ID NO: 2354183 - RNA, 14 nt, Human
uggucucuaggcug

SEQ ID NO: 2354184 - RNA, 16 nt, Human
uggucucuaggcuggg

SEQ ID NO: 2354185 - RNA, 17 nt, Human
uggucucuaggcugggg

SEQ ID NO: 2354186 - RNA, 18 nt, Human
uggucucuaggcugggga

SEQ ID NO: 2354187 - RNA, 19 nt, Human
uggucucuaggcuggggaa

SEQ ID NO: 2354188 - RNA, 19 nt, Human
uggucucgaacuccugacc

SEQ ID NO: 2354189 - RNA, 15 nt, Human
uggucucgaacuccu

SEQ ID NO: 2354190 - RNA, 13 nt, Human
uggucccacccca

SEQ ID NO: 2354191 - RNA, 17 nt, Human
ugugaugcuuugaagua

SEQ ID NO: 2354192 - RNA, 16 nt, Human
agugagccgagauugu

SEQ ID NO: 2354193 - RNA, 15 nt, Human
ugugauggggcccug

SEQ ID NO: 2354194 - RNA, 16 nt, Human
ugugauggggcccugc

SEQ ID NO: 2354195 - RNA, 14 nt, Human
agugagagcugggu

SEQ ID NO: 2354196 - RNA, 22 nt, Human
agugagagagaugggagcuccu

SEQ ID NO: 2354197 - RNA, 15 nt, Human
agugagcacucccaa

SEQ ID NO: 2354198 - RNA, 16 nt, Human
agugagcacucccaag

SEQ ID NO: 2354199 - RNA, 23 nt, Human
agugagagcgugcuccagccugg

SEQ ID NO: 2354200 - RNA, 21 nt, Human
agugagcagucaggaaagaga

SEQ ID NO: 2354201 - RNA, 17 nt, Human
ugugauggggcccugcc

SEQ ID NO: 2354202 - RNA, 11 nt, Human
ugugauguguc

SEQ ID NO: 2354203 - RNA, 15 nt, Human
ugugaugugaagcca

SEQ ID NO: 2354204 - RNA, 14 nt, Human
ugugauucaaucug

SEQ ID NO: 2354205 - RNA, 22 nt, Human
ugugauuuggaagggaaacuuu

SEQ ID NO: 2354206 - RNA, 15 nt, Human
ugugauuauuucacu

SEQ ID NO: 2354207 - RNA, 17 nt, Human
ugugauuauuucacuuu

SEQ ID NO: 2354208 - RNA, 11 nt, Human
ugugauuuuuu

SEQ ID NO: 2354209 - RNA, 19 nt, Human
ugugauuuuaacucugucu

SEQ ID NO: 2354210 - RNA, 18 nt, Human
ugugauuuuaacucuguc

SEQ ID NO: 2354211 - RNA, 20 nt, Human
ugugauuuuaacucugucuu

SEQ ID NO: 2354212 - RNA, 17 nt, Human
ugugauuuuaacucugu

SEQ ID NO: 2354213 - RNA, 16 nt, Human
ugugauuuuaacucug

SEQ ID NO: 2354214 - RNA, 14 nt, Human
ugugauuuuaacuc

SEQ ID NO: 2354215 - RNA, 18 nt, Human
ugugauuauuucacuuua

SEQ ID NO: 2354216 - RNA, 14 nt, Human
agugaaagcaucac

SEQ ID NO: 2354217 - RNA, 22 nt, Human
agugaaaccuuuagggcagcuu

SEQ ID NO: 2354218 - RNA, 17 nt, Human
agugaaagacaagcugc

SEQ ID NO: 2354219 - RNA, 13 nt, Human
agugagacagaag

SEQ ID NO: 2354220 - RNA, 21 nt, Human
agugagacaguccagccugga

SEQ ID NO: 2354221 - RNA, 17 nt, Human
agugagacccugucuca

SEQ ID NO: 2354222 - RNA, 21 nt, Human
agugagacccugucucaaaaa

SEQ ID NO: 2354223 - RNA, 13 nt, Human
agugagacucugu

SEQ ID NO: 2354224 - RNA, 17 nt, Human
agugagacccugucucu

SEQ ID NO: 2354225 - RNA, 16 nt, Human
agugagacccugucuc

SEQ ID NO: 2354226 - RNA, 21 nt, Human
agugagacccagcccucaucc

SEQ ID NO: 2354227 - RNA, 22 nt, Human
agugagacucugucucaaaaaa

SEQ ID NO: 2354228 - RNA, 16 nt, Human
agugagacucugucuc

SEQ ID NO: 2354229 - RNA, 17 nt, Human
agugagacucugucuca

SEQ ID NO: 2354230 - RNA, 14 nt, Human
agugaaaauaggua

SEQ ID NO: 2354231 - RNA, 20 nt, Human
agugaaaacaagugcuggca

SEQ ID NO: 2354232 - RNA, 12 nt, Human
agugaaaacaag

SEQ ID NO: 2354233 - RNA, 19 nt, Human
agugaaaacaagugcuggc

SEQ ID NO: 2354234 - RNA, 14 nt, Human
agugaaaaaugaga

SEQ ID NO: 2354235 - RNA, 17 nt, Human
agucuuuuguucgcaug

SEQ ID NO: 2354236 - RNA, 15 nt, Human
agugaaaauugucuu

SEQ ID NO: 2354237 - RNA, 19 nt, Human
agugaaaccuuuagggcag

SEQ ID NO: 2354238 - RNA, 20 nt, Human
agugaaaccuuuagggcagc

SEQ ID NO: 2354239 - RNA, 21 nt, Human
agugaaaccuuuagggcagcu

SEQ ID NO: 2354240 - RNA, 20 nt, Human
agugaaacucguuaauuugu

SEQ ID NO: 2354241 - RNA, 17 nt, Human
agugaaagaaaauaaca

SEQ ID NO: 2354242 - RNA, 16 nt, Human
agugaaagaggcagcu

SEQ ID NO: 2354243 - RNA, 14 nt, Human
agugagacagcucu

SEQ ID NO: 2354244 - RNA, 22 nt, Human
agugaaagaggcagcuugaaac

SEQ ID NO: 2354245 - RNA, 14 nt, Human
ugugagauguaauu

SEQ ID NO: 2354246 - RNA, 19 nt, Human
ugugagcaagcauuuaugu

SEQ ID NO: 2354247 - RNA, 14 nt, Human
ugugagcaagaagu

SEQ ID NO: 2354248 - RNA, 19 nt, Human
ugugagcacaaagguagcu

SEQ ID NO: 2354249 - RNA, 22 nt, Human
ugugagaugcuagaacucccuu

SEQ ID NO: 2354250 - RNA, 21 nt, Human
ugugaagccaauucagacagg

SEQ ID NO: 2354251 - RNA, 20 nt, Human
ugugaagccaauucagacag

SEQ ID NO: 2354252 - RNA, 10 nt, Human
ugugaagcca

SEQ ID NO: 2354253 - RNA, 12 nt, Human
ugugaagcauuc

SEQ ID NO: 2354254 - RNA, 22 nt, Human
ugugaagaucacguuccuuccc

SEQ ID NO: 2354255 - RNA, 18 nt, Human
ugugaagagggagaagca

SEQ ID NO: 2354256 - RNA, 15 nt, Human
ugugaacugacaggc

SEQ ID NO: 2354257 - RNA, 22 nt, Human
ugugaagaugauauacuauuuu

SEQ ID NO: 2354258 - RNA, 14 nt, Human
ugugaagcaaaauu

SEQ ID NO: 2354259 - RNA, 23 nt, Human
ugugaacugaacucugacaacag

SEQ ID NO: 2354260 - RNA, 14 nt, Human
ugugaacugaacuc

SEQ ID NO: 2354261 - RNA, 18 nt, Human
ugugaacuggacccuguu

SEQ ID NO: 2354262 - RNA, 21 nt, Human
ugugaacucagccaagcacag

SEQ ID NO: 2354263 - RNA, 18 nt, Human
agucucauuacuuuugaa

SEQ ID NO: 2354264 - RNA, 17 nt, Human
agucucauuacuuuuga

SEQ ID NO: 2354265 - RNA, 19 nt, Human
agucuccagugguugcugu

SEQ ID NO: 2354266 - RNA, 15 nt, Human
agucuccaccaggaa

SEQ ID NO: 2354267 - RNA, 14 nt, Human
agucuccaccagga

SEQ ID NO: 2354268 - RNA, 15 nt, Human
agucucccucacagc

SEQ ID NO: 2354269 - RNA, 20 nt, Human
agucucccucacagcacaga

SEQ ID NO: 2354270 - RNA, 16 nt, Human
agucuccaccaggaac

SEQ ID NO: 2354271 - RNA, 22 nt, Human
agucuccagugguugcuguuga

SEQ ID NO: 2354272 - RNA, 13 nt, Human
agucucccaaggc

SEQ ID NO: 2354273 - RNA, 14 nt, Human
agucucccaaggcu

SEQ ID NO: 2354274 - RNA, 19 nt, Human
agucuccaaagucucugga

SEQ ID NO: 2354275 - RNA, 14 nt, Human
ugugagcagugagu

SEQ ID NO: 2354276 - RNA, 18 nt, Human
ugugagcaucacaguuuu

SEQ ID NO: 2354277 - RNA, 15 nt, Human
ugugagcccagcugg

SEQ ID NO: 2354278 - RNA, 14 nt, Human
ugugagcccagcug

SEQ ID NO: 2354279 - RNA, 18 nt, Human
agucucccucccuugggg

SEQ ID NO: 2354280 - RNA, 14 nt, Human
agucucccucccuu

SEQ ID NO: 2354281 - RNA, 19 nt, Human
agucucugaagugaaacug

SEQ ID NO: 2354282 - RNA, 18 nt, Human
agucucugaagugaaacu

SEQ ID NO: 2354283 - RNA, 23 nt, Human
agucucccucacagcacagagaa

SEQ ID NO: 2354284 - RNA, 16 nt, Human
agucucugagcaguga

SEQ ID NO: 2354285 - RNA, 15 nt, Human
agucucugagggcuu

SEQ ID NO: 2354286 - RNA, 19 nt, Human
agucucugagggcuuccuu

SEQ ID NO: 2354287 - RNA, 13 nt, Human
agucucugagcag

SEQ ID NO: 2354288 - RNA, 11 nt, Human
agucucugagc

SEQ ID NO: 2354289 - RNA, 13 nt, Human
agucuuaaaauaa

SEQ ID NO: 2354290 - RNA, 17 nt, Human
agucuuaaaauaacuua

SEQ ID NO: 2354291 - RNA, 16 nt, Human
agucucugugcuuuga

SEQ ID NO: 2354292 - RNA, 23 nt, Human
agucuuaaaauaacuuauaucau

SEQ ID NO: 2354293 - RNA, 13 nt, Human
agucuuaagaacu

SEQ ID NO: 2354294 - RNA, 24 nt, Human
agucuuagacuugaaauacuacuu

SEQ ID NO: 2354295 - RNA, 16 nt, Human
agucuuacgaauacuu

SEQ ID NO: 2354296 - RNA, 17 nt, Human
agucucugcuggcccag

SEQ ID NO: 2354297 - RNA, 16 nt, Human
agucucugcuggccca

SEQ ID NO: 2354298 - RNA, 21 nt, Human
agucucugagggcuuccuuug

SEQ ID NO: 2354299 - RNA, 18 nt, Human
agucuguuuuaugacuuc

SEQ ID NO: 2354300 - RNA, 17 nt, Human
agucuguuuuaugacuu

SEQ ID NO: 2354301 - RNA, 14 nt, Human
agucuguuuuauga

SEQ ID NO: 2354302 - RNA, 13 nt, Human
agucuguuuuaug

SEQ ID NO: 2354303 - RNA, 13 nt, Human
agucuucccugau

SEQ ID NO: 2354304 - RNA, 17 nt, Human
agucuuccauuugcaag

SEQ ID NO: 2354305 - RNA, 16 nt, Human
agucuuccauuugcaa

SEQ ID NO: 2354306 - RNA, 22 nt, Human
agucuuaauauauauauccaga

SEQ ID NO: 2354307 - RNA, 15 nt, Human
agucuuccauuugca

SEQ ID NO: 2354308 - RNA, 19 nt, Human
agucuuccugacacuuuaa

SEQ ID NO: 2354309 - RNA, 18 nt, Human
agucuuccugacacuuua

SEQ ID NO: 2354310 - RNA, 17 nt, Human
agucuuccugacacuuu

SEQ ID NO: 2354311 - RNA, 19 nt, Human
agucuuccauuugcaaggg

SEQ ID NO: 2354312 - RNA, 12 nt, Human
agucuuccugac

SEQ ID NO: 2354313 - RNA, 16 nt, Human
agucuuccugacacuu

SEQ ID NO: 2354314 - RNA, 15 nt, Human
agucuuccugacacu

SEQ ID NO: 2354315 - RNA, 15 nt, Human
agucuuuuccaugaa

SEQ ID NO: 2354316 - RNA, 13 nt, Human
agucuuuuccaug

SEQ ID NO: 2354317 - RNA, 18 nt, Human
agucuucucauagcauua

SEQ ID NO: 2354318 - RNA, 13 nt, Human
agucuucucauag

SEQ ID NO: 2354319 - RNA, 12 nt, Human
agucuucucaua

SEQ ID NO: 2354320 - RNA, 21 nt, Human
agucuucucauagcauuaacu

SEQ ID NO: 2354321 - RNA, 20 nt, Human
agucuucucauagcauuaac

SEQ ID NO: 2354322 - RNA, 14 nt, Human
agucuuuugcuuuu

SEQ ID NO: 2354323 - RNA, 18 nt, Human
agucuuuugcuuuuggca

SEQ ID NO: 2354324 - RNA, 22 nt, Human
agucuuuuguucgcauggucac

SEQ ID NO: 2354325 - RNA, 19 nt, Human
agucuuuugcuuuuggcaa

SEQ ID NO: 2354326 - RNA, 20 nt, Human
agucuuuugcuuuuggcaaa

SEQ ID NO: 2354327 - RNA, 23 nt, Human
agugaaaaaggaggaagagaaaa

SEQ ID NO: 2354328 - RNA, 20 nt, Human
agugaaaaaggaggaagaga

SEQ ID NO: 2354329 - RNA, 17 nt, Human
agugaaaaaggaggaag

SEQ ID NO: 2354330 - RNA, 11 nt, Human
agugaaaaagg

SEQ ID NO: 2354331 - RNA, 13 nt, Human
ugucucuuucaug

SEQ ID NO: 2354332 - RNA, 14 nt, Human
ugucucuuuucucu

SEQ ID NO: 2354333 - RNA, 18 nt, Human
ugucucuuuucucuuucu

SEQ ID NO: 2354334 - RNA, 22 nt, Human
ugucucuuuaaugucacaggca

SEQ ID NO: 2354335 - RNA, 21 nt, Human
ugucucuuuaaugucacaggc

SEQ ID NO: 2354336 - RNA, 22 nt, Human
ugucucuugguccugcugcagu

SEQ ID NO: 2354337 - RNA, 22 nt, Human
ugucugaaaaauuccuuugugu

SEQ ID NO: 2354338 - RNA, 14 nt, Human
ugucuuaauuaaaa

SEQ ID NO: 2354339 - RNA, 17 nt, Human
ugucuucaacagcuccc

SEQ ID NO: 2354340 - RNA, 13 nt, Human
ugucuuauauaua

SEQ ID NO: 2354341 - RNA, 22 nt, Human
ugucuuauauauauuucuuugu

SEQ ID NO: 2354342 - RNA, 12 nt, Human
ugucugaaaaau

SEQ ID NO: 2354343 - RNA, 14 nt, Human
ugucuuaauuauua

SEQ ID NO: 2354344 - RNA, 15 nt, Human
ugucuuaauuauuau

SEQ ID NO: 2354345 - RNA, 19 nt, Human
ugucucuggcgugugggua

SEQ ID NO: 2354346 - RNA, 18 nt, Human
ugucucuggcgugugggu

SEQ ID NO: 2354347 - RNA, 17 nt, Human
ugucucugccucccuca

SEQ ID NO: 2354348 - RNA, 13 nt, Human
ugucucuggccug

SEQ ID NO: 2354349 - RNA, 13 nt, Human
ugucucugccucc

SEQ ID NO: 2354350 - RNA, 22 nt, Human
ugucucugccucccucacccug

SEQ ID NO: 2354351 - RNA, 16 nt, Human
ugucucugucauggua

SEQ ID NO: 2354352 - RNA, 23 nt, Human
ugucucugggcuuggggcuuccu

SEQ ID NO: 2354353 - RNA, 13 nt, Human
ugucucugugaga

SEQ ID NO: 2354354 - RNA, 14 nt, Human
ugucucuugaguuu

SEQ ID NO: 2354355 - RNA, 17 nt, Human
ugucucuugaguuuguc

SEQ ID NO: 2354356 - RNA, 21 nt, Human
ugucucuuccauaugaccuca

SEQ ID NO: 2354357 - RNA, 13 nt, Human
ugucucuuccaua

SEQ ID NO: 2354358 - RNA, 16 nt, Human
ugucucuucugagcua

SEQ ID NO: 2354359 - RNA, 13 nt, Human
ugucucuucugag

SEQ ID NO: 2354360 - RNA, 18 nt, Human
ugucucuugguccugcug

SEQ ID NO: 2354361 - RNA, 19 nt, Human
ugucucuugguccugcugc

SEQ ID NO: 2354362 - RNA, 20 nt, Human
ugucucuugguccugcugca

SEQ ID NO: 2354363 - RNA, 21 nt, Human
ugucucuugguccugcugcag

SEQ ID NO: 2354364 - RNA, 17 nt, Human
ugucuccuuaacacuga

SEQ ID NO: 2354365 - RNA, 18 nt, Human
ugucuccuuaacacugag

SEQ ID NO: 2354366 - RNA, 12 nt, Human
ugucuccuaucc

SEQ ID NO: 2354367 - RNA, 19 nt, Human
ugucuccuuugcaggcuca

SEQ ID NO: 2354368 - RNA, 22 nt, Human
ugucuccuuucaccccagggcc

SEQ ID NO: 2354369 - RNA, 21 nt, Human
ugucuccuuucaccccagggc

SEQ ID NO: 2354370 - RNA, 23 nt, Human
aguccccuguuuguuucugaaag

SEQ ID NO: 2354371 - RNA, 13 nt, Human
agucccugccaau

SEQ ID NO: 2354372 - RNA, 14 nt, Human
agucccugccaaug

SEQ ID NO: 2354373 - RNA, 16 nt, Human
agucccugccaaugga

SEQ ID NO: 2354374 - RNA, 21 nt, Human
ugucucgugguaggacuguag

SEQ ID NO: 2354375 - RNA, 15 nt, Human
ugucucuagccacuu

SEQ ID NO: 2354376 - RNA, 16 nt, Human
ugucucuagccacuuu

SEQ ID NO: 2354377 - RNA, 17 nt, Human
ugucucuacuaaaaaua

SEQ ID NO: 2354378 - RNA, 18 nt, Human
ugucucgugguaggacug

SEQ ID NO: 2354379 - RNA, 19 nt, Human
ugucucgugguaggacugu

SEQ ID NO: 2354380 - RNA, 20 nt, Human
ugucucgugguaggacugua

SEQ ID NO: 2354381 - RNA, 13 nt, Human
ugucucucagaau

SEQ ID NO: 2354382 - RNA, 19 nt, Human
ugucucuagccacuuuggu

SEQ ID NO: 2354383 - RNA, 12 nt, Human
ugucucucauga

SEQ ID NO: 2354384 - RNA, 13 nt, Human
ugucucugagagu

SEQ ID NO: 2354385 - RNA, 22 nt, Human
ugucucuggauuauauuaugaa

SEQ ID NO: 2354386 - RNA, 18 nt, Human
ugucuuguguuucuuuag

SEQ ID NO: 2354387 - RNA, 13 nt, Human
ugucuuguucugu

SEQ ID NO: 2354388 - RNA, 23 nt, Human
ugucuugcuauggggagaaaaga

SEQ ID NO: 2354389 - RNA, 13 nt, Human
ugucuuggacacu

SEQ ID NO: 2354390 - RNA, 15 nt, Human
ugucuuggacacugu

SEQ ID NO: 2354391 - RNA, 21 nt, Human
ugucuuuaggcagcagcuuuu

SEQ ID NO: 2354392 - RNA, 19 nt, Human
ugucuuuaggcagcagcuu

SEQ ID NO: 2354393 - RNA, 15 nt, Human
ugucuuuaaggaaaa

SEQ ID NO: 2354394 - RNA, 14 nt, Human
ugucuuuaaggaaa

SEQ ID NO: 2354395 - RNA, 16 nt, Human
ugucuuucagauacau

SEQ ID NO: 2354396 - RNA, 15 nt, Human
ugucuuucagauaca

SEQ ID NO: 2354397 - RNA, 15 nt, Human
ugugaaccaccacac

SEQ ID NO: 2354398 - RNA, 21 nt, Human
ugugaacgauuuagaaagaag

SEQ ID NO: 2354399 - RNA, 17 nt, Human
ugugaaccgaggggcuc

SEQ ID NO: 2354400 - RNA, 20 nt, Human
ugucuuucagauacaugguu

SEQ ID NO: 2354401 - RNA, 19 nt, Human
ugucuuucagauacauggu

SEQ ID NO: 2354402 - RNA, 14 nt, Human
ugugaacauggacu

SEQ ID NO: 2354403 - RNA, 12 nt, Human
ugugaacauuua

SEQ ID NO: 2354404 - RNA, 14 nt, Human
ugugaacucagcca

SEQ ID NO: 2354405 - RNA, 15 nt, Human
ugugaacucagccaa

SEQ ID NO: 2354406 - RNA, 16 nt, Human
ugugaacucagccaag

SEQ ID NO: 2354407 - RNA, 18 nt, Human
ugugaacucagccaagca

SEQ ID NO: 2354408 - RNA, 19 nt, Human
ugugaacucagccaagcac

SEQ ID NO: 2354409 - RNA, 20 nt, Human
ugugaacucagccaagcaca

SEQ ID NO: 2354410 - RNA, 20 nt, Human
ugugaacuaaacuuucacac

SEQ ID NO: 2354411 - RNA, 19 nt, Human
ugugaacuaaacuuucaca

SEQ ID NO: 2354412 - RNA, 14 nt, Human
ugugaacuaaacuu

SEQ ID NO: 2354413 - RNA, 16 nt, Human
ugugaaccaccacacc

SEQ ID NO: 2354414 - RNA, 17 nt, Human
ugugaaccaccacaccc

SEQ ID NO: 2354415 - RNA, 22 nt, Human
ugugaaccaccacacccagccc

SEQ ID NO: 2354416 - RNA, 23 nt, Human
ugugaaccaccacacccagccca

SEQ ID NO: 2354417 - RNA, 15 nt, Human
ugucuugcaauggca

SEQ ID NO: 2354418 - RNA, 22 nt, Human
ugucuugaugcaugcacuguuc

SEQ ID NO: 2354419 - RNA, 16 nt, Human
ugucuucuucugugcu

SEQ ID NO: 2354420 - RNA, 19 nt, Human
ugucuugaaagauucaggu

SEQ ID NO: 2354421 - RNA, 17 nt, Human
ugucuugaaugucuuuu

SEQ ID NO: 2354422 - RNA, 20 nt, Human
ugucuugaaugucuuuugaa

SEQ ID NO: 2354423 - RNA, 23 nt, Human
ugucuucucaggcucugcccugc

SEQ ID NO: 2354424 - RNA, 14 nt, Human
ugucuucuccccag

SEQ ID NO: 2354425 - RNA, 12 nt, Human
ugucuucugccu

SEQ ID NO: 2354426 - RNA, 13 nt, Human
ugucuucugccug

SEQ ID NO: 2354427 - RNA, 14 nt, Human
ugucuucugccugu

SEQ ID NO: 2354428 - RNA, 15 nt, Human
ugucuucugccuguu

SEQ ID NO: 2354429 - RNA, 17 nt, Human
ugucuucugccuguuau

SEQ ID NO: 2354430 - RNA, 18 nt, Human
ugucuucugccuguuaua

SEQ ID NO: 2354431 - RNA, 17 nt, Human
ugucuugcaauggcagc

SEQ ID NO: 2354432 - RNA, 18 nt, Human
ugucuugcaauggcagcc

SEQ ID NO: 2354433 - RNA, 20 nt, Human
ugucuugcaauggcagccuu

SEQ ID NO: 2354434 - RNA, 21 nt, Human
ugucuugcaauggcagccuug

SEQ ID NO: 2354435 - RNA, 17 nt, Human
ugucuuccauaauguau

SEQ ID NO: 2354436 - RNA, 14 nt, Human
ugucuuccauaaug

SEQ ID NO: 2354437 - RNA, 13 nt, Human
ugucuuccauaau

SEQ ID NO: 2354438 - RNA, 12 nt, Human
ugucuuccauaa

SEQ ID NO: 2354439 - RNA, 21 nt, Human
ugucuucauuucauuguauga

SEQ ID NO: 2354440 - RNA, 23 nt, Human
ugucuucauuucauuguaugaug

SEQ ID NO: 2354441 - RNA, 15 nt, Human
ugucuucauagcaga

SEQ ID NO: 2354442 - RNA, 13 nt, Human
ugucuucaccuga

SEQ ID NO: 2354443 - RNA, 16 nt, Human
ugucuucauuucauug

SEQ ID NO: 2354444 - RNA, 17 nt, Human
ugucuucauuucauugu

SEQ ID NO: 2354445 - RNA, 19 nt, Human
ugucuucauuucauuguau

SEQ ID NO: 2354446 - RNA, 19 nt, Human
ugucuucacagcucugugu

SEQ ID NO: 2354447 - RNA, 24 nt, Human
ugucuucaccugauucaacuaaaa

SEQ ID NO: 2354448 - RNA, 22 nt, Human
ugucuucauaccuacauguauu

SEQ ID NO: 2354449 - RNA, 14 nt, Human
ugucuucacaacag

SEQ ID NO: 2354450 - RNA, 22 nt, Human
ugucuucucaggcucugcccug

SEQ ID NO: 2354451 - RNA, 21 nt, Human
ugucuucucaggcucugcccu

SEQ ID NO: 2354452 - RNA, 16 nt, Human
ugucuucucaggcucu

SEQ ID NO: 2354453 - RNA, 18 nt, Human
ugucuucguacaguucuu

SEQ ID NO: 2354454 - RNA, 14 nt, Human
ugucuuccuguggg

SEQ ID NO: 2354455 - RNA, 14 nt, Human
ugucuuccuuggag

SEQ ID NO: 2354456 - RNA, 16 nt, Human
ugucuucggaaaccuu

SEQ ID NO: 2354457 - RNA, 19 nt, Human
ugucuucggaaaccuuggu

SEQ ID NO: 2354458 - RNA, 20 nt, Human
ugucuucggaaaccuuggug

SEQ ID NO: 2354459 - RNA, 21 nt, Human
ugucuucggaaaccuuggugu

SEQ ID NO: 2354460 - RNA, 16 nt, Human
ugucuucguacaguuc

SEQ ID NO: 2354461 - RNA, 17 nt, Human
ugucuucguacaguucu

SEQ ID NO: 2354462 - RNA, 18 nt, Human
ugucuuccugcauucacc

SEQ ID NO: 2354463 - RNA, 13 nt, Human
ugucuuccugugg

SEQ ID NO: 2354464 - RNA, 17 nt, Human
ugucuuccugcauucac

SEQ ID NO: 2354465 - RNA, 13 nt, Human
ugucuuccugcau

SEQ ID NO: 2354466 - RNA, 16 nt, Human
ugucuuccucccaagu

SEQ ID NO: 2354467 - RNA, 22 nt, Human
ugucuucccaggguagcccgcc

SEQ ID NO: 2354468 - RNA, 13 nt, Human
ugucuucccaggg

SEQ ID NO: 2354469 - RNA, 14 nt, Human
ugucuucccagggu

SEQ ID NO: 2354470 - RNA, 16 nt, Human
ugucuucccaggguag

SEQ ID NO: 2354471 - RNA, 21 nt, Human
ugucuucccaggguagcccgc

SEQ ID NO: 2354472 - RNA, 21 nt, Human
aguccauauuucaauuuccaa

SEQ ID NO: 2354473 - RNA, 17 nt, Human
aguccagugaccugcug

SEQ ID NO: 2354474 - RNA, 15 nt, Human
aguccagucucuucu

SEQ ID NO: 2354475 - RNA, 21 nt, Human
agucaucuugaccaagcagga

SEQ ID NO: 2354476 - RNA, 21 nt, Human
agucaugaagcccaagugaaa

SEQ ID NO: 2354477 - RNA, 14 nt, Human
agucaugaagccca

SEQ ID NO: 2354478 - RNA, 13 nt, Human
agucaugaagccc

SEQ ID NO: 2354479 - RNA, 20 nt, Human
agucaucuugaccaagcagg

SEQ ID NO: 2354480 - RNA, 21 nt, Human
agucccaccuuggcugcaggg

SEQ ID NO: 2354481 - RNA, 23 nt, Human
agucccaccuuggcugcagggag

SEQ ID NO: 2354482 - RNA, 20 nt, Human
agucccaccuuggcugcagg

SEQ ID NO: 2354483 - RNA, 13 nt, Human
aguccccaggccc

SEQ ID NO: 2354484 - RNA, 17 nt, Human
aguccccaggccccagg

SEQ ID NO: 2354485 - RNA, 16 nt, Human
aguccccaggccccag

SEQ ID NO: 2354486 - RNA, 19 nt, Human
aguccccaggccccaggaa

SEQ ID NO: 2354487 - RNA, 18 nt, Human
aguccccaccccugcccc

SEQ ID NO: 2354488 - RNA, 20 nt, Human
aguccccaccccugccccca

SEQ ID NO: 2354489 - RNA, 13 nt, Human
aguccccaccccu

SEQ ID NO: 2354490 - RNA, 15 nt, Human
aguccccaccccugc

SEQ ID NO: 2354491 - RNA, 16 nt, Human
aguccccaccccugcc

SEQ ID NO: 2354492 - RNA, 17 nt, Human
aguccccaccccugccc

SEQ ID NO: 2354493 - RNA, 14 nt, Human
aguccccuguuugu

SEQ ID NO: 2354494 - RNA, 19 nt, Human
aguccccuguuuguuucug

SEQ ID NO: 2354495 - RNA, 23 nt, Human
aguccauauuucaauuuccaaga

SEQ ID NO: 2354496 - RNA, 12 nt, Human
agucccacugcc

SEQ ID NO: 2354497 - RNA, 17 nt, Human
agucccacugccucagg

SEQ ID NO: 2354498 - RNA, 20 nt, Human
agucccaggcugagccucag

SEQ ID NO: 2354499 - RNA, 15 nt, Human
agucccagugggagg

SEQ ID NO: 2354500 - RNA, 11 nt, Human
aguccccaccc

SEQ ID NO: 2354501 - RNA, 12 nt, Human
aguccccacccc

SEQ ID NO: 2354502 - RNA, 18 nt, Human
agucccacugccucaggu

SEQ ID NO: 2354503 - RNA, 20 nt, Human
agucccacugccucagguuc

SEQ ID NO: 2354504 - RNA, 13 nt, Human
agucccaguggga

SEQ ID NO: 2354505 - RNA, 13 nt, Human
agucauccaaucu

SEQ ID NO: 2354506 - RNA, 20 nt, Human
agucagugcccaacuguuau

SEQ ID NO: 2354507 - RNA, 20 nt, Human
agucaucuccaucagcugua

SEQ ID NO: 2354508 - RNA, 19 nt, Human
agucaucuccaucagcugu

SEQ ID NO: 2354509 - RNA, 18 nt, Human
agucaucuccaucagcug

SEQ ID NO: 2354510 - RNA, 17 nt, Human
agucaucuccaucagcu

SEQ ID NO: 2354511 - RNA, 15 nt, Human
agucaucucaaccau

SEQ ID NO: 2354512 - RNA, 14 nt, Human
agucaucucaacca

SEQ ID NO: 2354513 - RNA, 16 nt, Human
agucagugcaaauguc

SEQ ID NO: 2354514 - RNA, 23 nt, Human
agucagugcaaaugucagauaca

SEQ ID NO: 2354515 - RNA, 16 nt, Human
agucagugccaggucc

SEQ ID NO: 2354516 - RNA, 21 nt, Human
agucagucaugauggcaccac

SEQ ID NO: 2354517 - RNA, 23 nt, Human
agucagaugcccagagggcccag

SEQ ID NO: 2354518 - RNA, 14 nt, Human
agucagaugcccag

SEQ ID NO: 2354519 - RNA, 14 nt, Human
agucagguccaauu

SEQ ID NO: 2354520 - RNA, 13 nt, Human
agucaguauuguu

SEQ ID NO: 2354521 - RNA, 14 nt, Human
agucaguauuguuu

SEQ ID NO: 2354522 - RNA, 15 nt, Human
agucaguauuguuuu

SEQ ID NO: 2354523 - RNA, 17 nt, Human
agucaguauuguuuugg

SEQ ID NO: 2354524 - RNA, 19 nt, Human
agucagggguucccuuuuu

SEQ ID NO: 2354525 - RNA, 21 nt, Human
uguccuucucucaccuccuaa

SEQ ID NO: 2354526 - RNA, 18 nt, Human
uguccuucucucaccucc

SEQ ID NO: 2354527 - RNA, 19 nt, Human
uguccuucucucaccuccu

SEQ ID NO: 2354528 - RNA, 16 nt, Human
uguccuugcaccugca

SEQ ID NO: 2354529 - RNA, 18 nt, Human
uguccuuggaaguuucau

SEQ ID NO: 2354530 - RNA, 15 nt, Human
uguccuugcaccugc

SEQ ID NO: 2354531 - RNA, 13 nt, Human
uguccuugcaccu

SEQ ID NO: 2354532 - RNA, 14 nt, Human
uguccuugugcaug

SEQ ID NO: 2354533 - RNA, 15 nt, Human
uguccuuguguguuu

SEQ ID NO: 2354534 - RNA, 11 nt, Human
ugucuaaacug

SEQ ID NO: 2354535 - RNA, 13 nt, Human
uguccuuucccuc

SEQ ID NO: 2354536 - RNA, 18 nt, Human
ugucuaaauuugaauguu

SEQ ID NO: 2354537 - RNA, 13 nt, Human
ugucuaaacugca

SEQ ID NO: 2354538 - RNA, 19 nt, Human
ugucuaaagagcuuuaguc

SEQ ID NO: 2354539 - RNA, 15 nt, Human
ugucuaagauaguaa

SEQ ID NO: 2354540 - RNA, 14 nt, Human
ugucuaagauagua

SEQ ID NO: 2354541 - RNA, 21 nt, Human
ugucccuaguaaaaauacaaa

SEQ ID NO: 2354542 - RNA, 17 nt, Human
ugucccuaugcauauca

SEQ ID NO: 2354543 - RNA, 14 nt, Human
ugucccuaggucag

SEQ ID NO: 2354544 - RNA, 21 nt, Human
uguccagaagaauauucagga

SEQ ID NO: 2354545 - RNA, 21 nt, Human
ugucccucacuguugaauuuu

SEQ ID NO: 2354546 - RNA, 19 nt, Human
ugucccucaaaugacccaa

SEQ ID NO: 2354547 - RNA, 12 nt, Human
ugucccucccac

SEQ ID NO: 2354548 - RNA, 13 nt, Human
ugucccucccacc

SEQ ID NO: 2354549 - RNA, 14 nt, Human
ugucccucccaccu

SEQ ID NO: 2354550 - RNA, 15 nt, Human
ugucccucccaccuc

SEQ ID NO: 2354551 - RNA, 16 nt, Human
ugucccucccaccucu

SEQ ID NO: 2354552 - RNA, 15 nt, Human
ugucccucucaggca

SEQ ID NO: 2354553 - RNA, 21 nt, Human
ugucccucucggaaggcuggc

SEQ ID NO: 2354554 - RNA, 14 nt, Human
ugucccucucaggc

SEQ ID NO: 2354555 - RNA, 11 nt, Human
ugucccucuca

SEQ ID NO: 2354556 - RNA, 20 nt, Human
ugucccucccaccucuguga

SEQ ID NO: 2354557 - RNA, 13 nt, Human
ugucccucuaaag

SEQ ID NO: 2354558 - RNA, 12 nt, Human
ugucccuccggg

SEQ ID NO: 2354559 - RNA, 12 nt, Human
ugucccuccugg

SEQ ID NO: 2354560 - RNA, 14 nt, Human
ugucccucccccuu

SEQ ID NO: 2354561 - RNA, 17 nt, Human
ugucccucccaccucug

SEQ ID NO: 2354562 - RNA, 18 nt, Human
ugucccucccaccucugu

SEQ ID NO: 2354563 - RNA, 20 nt, Human
ugucccuuucugugugaaga

SEQ ID NO: 2354564 - RNA, 14 nt, Human
ugucccuuggagcu

SEQ ID NO: 2354565 - RNA, 20 nt, Human
ugucccuucugucccucaca

SEQ ID NO: 2354566 - RNA, 22 nt, Human
ugucccuugccucaaugccagu

SEQ ID NO: 2354567 - RNA, 14 nt, Human
ugucccugcacuug

SEQ ID NO: 2354568 - RNA, 18 nt, Human
ugucccuucugucccuca

SEQ ID NO: 2354569 - RNA, 16 nt, Human
ugucccucugccccau

SEQ ID NO: 2354570 - RNA, 15 nt, Human
ugucccucugcccca

SEQ ID NO: 2354571 - RNA, 14 nt, Human
ugucccucugcccc

SEQ ID NO: 2354572 - RNA, 17 nt, Human
ugucccuuucuuggcca

SEQ ID NO: 2354573 - RNA, 16 nt, Human
ugucccuuucuuggcc

SEQ ID NO: 2354574 - RNA, 18 nt, Human
ugucccuuucuuggccag

SEQ ID NO: 2354575 - RNA, 12 nt, Human
ugucccuuuucc

SEQ ID NO: 2354576 - RNA, 22 nt, Human
uguccuguaaagguuacaagcc

SEQ ID NO: 2354577 - RNA, 15 nt, Human
uguccuguaaagguu

SEQ ID NO: 2354578 - RNA, 16 nt, Human
uguccuggugucacuu

SEQ ID NO: 2354579 - RNA, 21 nt, Human
uguccuggugucacuuacugu

SEQ ID NO: 2354580 - RNA, 13 nt, Human
uguccugguguca

SEQ ID NO: 2354581 - RNA, 15 nt, Human
uguccugguucccgu

SEQ ID NO: 2354582 - RNA, 20 nt, Human
uguccuuacccaucugcacc

SEQ ID NO: 2354583 - RNA, 18 nt, Human
uguccuuagaacauuuua

SEQ ID NO: 2354584 - RNA, 12 nt, Human
uguccuuagaac

SEQ ID NO: 2354585 - RNA, 11 nt, Human
uguccuuagca

SEQ ID NO: 2354586 - RNA, 14 nt, Human
uguccuucccugca

SEQ ID NO: 2354587 - RNA, 16 nt, Human
uguccuucccugcauu

SEQ ID NO: 2354588 - RNA, 22 nt, Human
uguccuucccugcauuucugag

SEQ ID NO: 2354589 - RNA, 20 nt, Human
uguccuguagagguuuuguu

SEQ ID NO: 2354590 - RNA, 16 nt, Human
uguccuguacauugug

SEQ ID NO: 2354591 - RNA, 24 nt, Human
uguccuguaguugcguggacucug

SEQ ID NO: 2354592 - RNA, 19 nt, Human
uguccacagaugccuccac

SEQ ID NO: 2354593 - RNA, 18 nt, Human
uguccacagaugccucca

SEQ ID NO: 2354594 - RNA, 14 nt, Human
uguccacagaugcc

SEQ ID NO: 2354595 - RNA, 23 nt, Human
ugucagcuacugcggaaaaggaa

SEQ ID NO: 2354596 - RNA, 21 nt, Human
uguccacccaccuaugugcca

SEQ ID NO: 2354597 - RNA, 20 nt, Human
uguccacagaugccuccacc

SEQ ID NO: 2354598 - RNA, 23 nt, Human
ugucagcuccccucggagaagag

SEQ ID NO: 2354599 - RNA, 21 nt, Human
ugucagcuccccucggagaag

SEQ ID NO: 2354600 - RNA, 20 nt, Human
ugucagcuccccucggagaa

SEQ ID NO: 2354601 - RNA, 16 nt, Human
ugucagccauuccugu

SEQ ID NO: 2354602 - RNA, 21 nt, Human
ugucagcuacuaaugauguuu

SEQ ID NO: 2354603 - RNA, 19 nt, Human
ugucagcuacuaaugaugu

SEQ ID NO: 2354604 - RNA, 18 nt, Human
ugucagcuacuaaugaug

SEQ ID NO: 2354605 - RNA, 22 nt, Human
ugucagccgggcccugaguaau

SEQ ID NO: 2354606 - RNA, 23 nt, Human
ugucagcgcagguuuaguuuacu

SEQ ID NO: 2354607 - RNA, 20 nt, Human
ugucagccgagccgggccug

SEQ ID NO: 2354608 - RNA, 21 nt, Human
ugucagccgagccgggccugg

SEQ ID NO: 2354609 - RNA, 22 nt, Human
ugucagccgagccgggccuggg

SEQ ID NO: 2354610 - RNA, 23 nt, Human
ugucagccgagccgggccugggg

SEQ ID NO: 2354611 - RNA, 15 nt, Human
ugucagccgggcccu

SEQ ID NO: 2354612 - RNA, 16 nt, Human
ugucagccgggcccug

SEQ ID NO: 2354613 - RNA, 17 nt, Human
ugucagccgggcccuga

SEQ ID NO: 2354614 - RNA, 21 nt, Human
ugucagccgggcccugaguaa

SEQ ID NO: 2354615 - RNA, 14 nt, Human
uguccaccuggccc

SEQ ID NO: 2354616 - RNA, 13 nt, Human
uguccaccuggcc

SEQ ID NO: 2354617 - RNA, 12 nt, Human
uguccaccuggc

SEQ ID NO: 2354618 - RNA, 11 nt, Human
uguccaccugg

SEQ ID NO: 2354619 - RNA, 15 nt, Human
uguccaccuggcccc

SEQ ID NO: 2354620 - RNA, 16 nt, Human
uguccacgacugucuc

SEQ ID NO: 2354621 - RNA, 18 nt, Human
uguccacgacugucucca

SEQ ID NO: 2354622 - RNA, 17 nt, Human
uguccacgacugucucc

SEQ ID NO: 2354623 - RNA, 23 nt, Human
uguccagcuccaaccugcaaaga

SEQ ID NO: 2354624 - RNA, 20 nt, Human
uguccagcuccaaccugcaa

SEQ ID NO: 2354625 - RNA, 16 nt, Human
uguccagcuccaaccu

SEQ ID NO: 2354626 - RNA, 12 nt, Human
uguccagcucca

SEQ ID NO: 2354627 - RNA, 11 nt, Human
uguccagcucc

SEQ ID NO: 2354628 - RNA, 16 nt, Human
uguccagaagaauauu

SEQ ID NO: 2354629 - RNA, 20 nt, Human
uguccagaagaauauucagg

SEQ ID NO: 2354630 - RNA, 19 nt, Human
uguccacgacugucuccau

SEQ ID NO: 2354631 - RNA, 13 nt, Human
uguccacugugua

SEQ ID NO: 2354632 - RNA, 15 nt, Human
uguccagaagaauau

SEQ ID NO: 2354633 - RNA, 19 nt, Human
uguccaggcacugcugccc

SEQ ID NO: 2354634 - RNA, 21 nt, Human
uguccagcugagcgccaggau

SEQ ID NO: 2354635 - RNA, 17 nt, Human
uguccagcugagcgcca

SEQ ID NO: 2354636 - RNA, 20 nt, Human
uguccaggcacugcugccca

SEQ ID NO: 2354637 - RNA, 21 nt, Human
uguccaggcacugcugcccag

SEQ ID NO: 2354638 - RNA, 19 nt, Human
ugucccuacaccccucccc

SEQ ID NO: 2354639 - RNA, 13 nt, Human
uguccagggcccu

SEQ ID NO: 2354640 - RNA, 20 nt, Human
ugucccuaccgagucucuuc

SEQ ID NO: 2354641 - RNA, 21 nt, Human
ugucccuaccgagucucuucu

SEQ ID NO: 2354642 - RNA, 22 nt, Human
ugucccuaccgagucucuucuc

SEQ ID NO: 2354643 - RNA, 16 nt, Human
agguuuggugugugga

SEQ ID NO: 2354644 - RNA, 12 nt, Human
agguuuguauau

SEQ ID NO: 2354645 - RNA, 22 nt, Human
agguuugguguguggagaugca

SEQ ID NO: 2354646 - RNA, 21 nt, Human
agguuugggaccccugguggu

SEQ ID NO: 2354647 - RNA, 16 nt, Human
agguuugggaccccug

SEQ ID NO: 2354648 - RNA, 19 nt, Human
uguauccaugggggcaggg

SEQ ID NO: 2354649 - RNA, 13 nt, Human
uguauccauuauc

SEQ ID NO: 2354650 - RNA, 14 nt, Human
uguauccauuauca

SEQ ID NO: 2354651 - RNA, 17 nt, Human
uguauccauuaucaugu

SEQ ID NO: 2354652 - RNA, 18 nt, Human
uguauccauuaucaugug

SEQ ID NO: 2354653 - RNA, 19 nt, Human
uguauccauuaucaugugu

SEQ ID NO: 2354654 - RNA, 20 nt, Human
uguauccauuaucaugugua

SEQ ID NO: 2354655 - RNA, 22 nt, Human
uguauccauuaucauguguaau

SEQ ID NO: 2354656 - RNA, 16 nt, Human
uguauccaugggggca

SEQ ID NO: 2354657 - RNA, 13 nt, Human
agguuuguauauu

SEQ ID NO: 2354658 - RNA, 20 nt, Human
agguuuguauauugucagau

SEQ ID NO: 2354659 - RNA, 22 nt, Human
uguauccauccauggggcugau

SEQ ID NO: 2354660 - RNA, 22 nt, Human
agguuucuggucucuaggcugg

SEQ ID NO: 2354661 - RNA, 23 nt, Human
agguuucuggucucuaggcuggg

SEQ ID NO: 2354662 - RNA, 14 nt, Human
agguuugaguagag

SEQ ID NO: 2354663 - RNA, 17 nt, Human
agguuugagaagcacug

SEQ ID NO: 2354664 - RNA, 21 nt, Human
agguuuggaugggagugagac

SEQ ID NO: 2354665 - RNA, 12 nt, Human
uguagagccagg

SEQ ID NO: 2354666 - RNA, 15 nt, Human
uguagagccaggguc

SEQ ID NO: 2354667 - RNA, 14 nt, Human
uguauguguaagua

SEQ ID NO: 2354668 - RNA, 22 nt, Human
uguaugugggggucuguguguu

SEQ ID NO: 2354669 - RNA, 21 nt, Human
uguaugugggggucugugugu

SEQ ID NO: 2354670 - RNA, 15 nt, Human
uguaucccaugagcc

SEQ ID NO: 2354671 - RNA, 16 nt, Human
uguauuaagaaugaaa

SEQ ID NO: 2354672 - RNA, 12 nt, Human
uguauuaagaau

SEQ ID NO: 2354673 - RNA, 17 nt, Human
uguauuaaaaaaaacaa

SEQ ID NO: 2354674 - RNA, 19 nt, Human
uguauuaaaaaaaacaaaa

SEQ ID NO: 2354675 - RNA, 20 nt, Human
uguauuaaaaaaaacaaaaa

SEQ ID NO: 2354676 - RNA, 21 nt, Human
uguauuaaaaaaaacaaaaag

SEQ ID NO: 2354677 - RNA, 22 nt, Human
uguauuaaaaaaaacaaaaaga

SEQ ID NO: 2354678 - RNA, 15 nt, Human
ugucaacuaugauau

SEQ ID NO: 2354679 - RNA, 18 nt, Human
ugucaaauaaacacugug

SEQ ID NO: 2354680 - RNA, 17 nt, Human
ugucaaagagagggcuu

SEQ ID NO: 2354681 - RNA, 12 nt, Human
ugucaaagcagg

SEQ ID NO: 2354682 - RNA, 15 nt, Human
ugucaaauaaacacu

SEQ ID NO: 2354683 - RNA, 17 nt, Human
ugucaaauaaacacugu

SEQ ID NO: 2354684 - RNA, 16 nt, Human
ugucaaaguggugaga

SEQ ID NO: 2354685 - RNA, 19 nt, Human
ugucaaaguggugagaggc

SEQ ID NO: 2354686 - RNA, 13 nt, Human
aguagcugggacu

SEQ ID NO: 2354687 - RNA, 14 nt, Human
aguagcugggacua

SEQ ID NO: 2354688 - RNA, 20 nt, Human
ugucaacuucuggcuccuca

SEQ ID NO: 2354689 - RNA, 15 nt, Human
ugucaacuucuggcu

SEQ ID NO: 2354690 - RNA, 18 nt, Human
ugucaacuucuggcuccu

SEQ ID NO: 2354691 - RNA, 15 nt, Human
ugucaacugaccuaa

SEQ ID NO: 2354692 - RNA, 15 nt, Human
ugucaacuucaacau

SEQ ID NO: 2354693 - RNA, 14 nt, Human
ugucaacuucuggc

SEQ ID NO: 2354694 - RNA, 21 nt, Human
uguauuaaguuguuaauaaaa

SEQ ID NO: 2354695 - RNA, 16 nt, Human
uguauuacuagaagau

SEQ ID NO: 2354696 - RNA, 19 nt, Human
uguauuacuagaagaugaa

SEQ ID NO: 2354697 - RNA, 14 nt, Human
uguauuaagccacu

SEQ ID NO: 2354698 - RNA, 18 nt, Human
uguauuaagagugaaaau

SEQ ID NO: 2354699 - RNA, 12 nt, Human
uguauuaagagu

SEQ ID NO: 2354700 - RNA, 16 nt, Human
uguauuaagagugaaa

SEQ ID NO: 2354701 - RNA, 17 nt, Human
uguauuaagagugaaaa

SEQ ID NO: 2354702 - RNA, 21 nt, Human
uguauuaggugucauuuccau

SEQ ID NO: 2354703 - RNA, 19 nt, Human
uguauuagauguucucuau

SEQ ID NO: 2354704 - RNA, 15 nt, Human
uguauuagucacaga

SEQ ID NO: 2354705 - RNA, 13 nt, Human
uguauuagauguu

SEQ ID NO: 2354706 - RNA, 14 nt, Human
uguauuagauguuc

SEQ ID NO: 2354707 - RNA, 16 nt, Human
uguauuagauguucuc

SEQ ID NO: 2354708 - RNA, 18 nt, Human
uguauuagauguucucua

SEQ ID NO: 2354709 - RNA, 23 nt, Human
uguauuacuagaagaugaauaca

SEQ ID NO: 2354710 - RNA, 11 nt, Human
uguauuaugug

SEQ ID NO: 2354711 - RNA, 18 nt, Human
ugucaaacuguagaaaug

SEQ ID NO: 2354712 - RNA, 12 nt, Human
ugucaaagaagg

SEQ ID NO: 2354713 - RNA, 14 nt, Human
ugucaaagaagguu

SEQ ID NO: 2354714 - RNA, 16 nt, Human
ugucaaacuguagaaa

SEQ ID NO: 2354715 - RNA, 14 nt, Human
ugucaaagugguga

SEQ ID NO: 2354716 - RNA, 15 nt, Human
ugucaaaguggugag

SEQ ID NO: 2354717 - RNA, 17 nt, Human
aguagcuggauuacagg

SEQ ID NO: 2354718 - RNA, 22 nt, Human
aguagcugggacuacaggcacc

SEQ ID NO: 2354719 - RNA, 19 nt, Human
aguagcugggacuacaggc

SEQ ID NO: 2354720 - RNA, 21 nt, Human
aguagcugggacuacaggcac

SEQ ID NO: 2354721 - RNA, 19 nt, Human
aguauguuaagcucuuuau

SEQ ID NO: 2354722 - RNA, 19 nt, Human
aguauguguuugugugugu

SEQ ID NO: 2354723 - RNA, 16 nt, Human
aguauguuaagcucuu

SEQ ID NO: 2354724 - RNA, 18 nt, Human
aguauguguuugugugug

SEQ ID NO: 2354725 - RNA, 21 nt, Human
aguauuagaauaccacaggaa

SEQ ID NO: 2354726 - RNA, 18 nt, Human
aguauguuagugcaaauu

SEQ ID NO: 2354727 - RNA, 21 nt, Human
aguauguuagugcaaauuguc

SEQ ID NO: 2354728 - RNA, 20 nt, Human
aguauuauaggccaaacugg

SEQ ID NO: 2354729 - RNA, 17 nt, Human
aguauugcaucuguaua

SEQ ID NO: 2354730 - RNA, 15 nt, Human
aguauuauaccuuuu

SEQ ID NO: 2354731 - RNA, 14 nt, Human
aguauguugucaaa

SEQ ID NO: 2354732 - RNA, 13 nt, Human
aguauuauaaauu

SEQ ID NO: 2354733 - RNA, 18 nt, Human
aguauuauaaauuauguu

SEQ ID NO: 2354734 - RNA, 19 nt, Human
aguauuauaaauuauguuu

SEQ ID NO: 2354735 - RNA, 20 nt, Human
aguauuauaaauuauguuua

SEQ ID NO: 2354736 - RNA, 14 nt, Human
aguauuauaccuuu

SEQ ID NO: 2354737 - RNA, 18 nt, Human
aguauuggggucugaccc

SEQ ID NO: 2354738 - RNA, 22 nt, Human
aguauugcaucuguauaaguaa

SEQ ID NO: 2354739 - RNA, 20 nt, Human
aguauugcaucuguauaagu

SEQ ID NO: 2354740 - RNA, 22 nt, Human
agucacagagauaauucuagcu

SEQ ID NO: 2354741 - RNA, 19 nt, Human
aguauuuaauuagugcuaa

SEQ ID NO: 2354742 - RNA, 21 nt, Human
aguauuuaauuagugcuaagu

SEQ ID NO: 2354743 - RNA, 21 nt, Human
aguauuuaauucauguugccu

SEQ ID NO: 2354744 - RNA, 11 nt, Human
aguauuuaauu

SEQ ID NO: 2354745 - RNA, 13 nt, Human
aguauuuaauuag

SEQ ID NO: 2354746 - RNA, 14 nt, Human
aguauuuaauuagu

SEQ ID NO: 2354747 - RNA, 15 nt, Human
aguauuuaauuagug

SEQ ID NO: 2354748 - RNA, 16 nt, Human
aguauuuaauuagugc

SEQ ID NO: 2354749 - RNA, 17 nt, Human
aguauuuaauuagugcu

SEQ ID NO: 2354750 - RNA, 15 nt, Human
aguauuguccagguc

SEQ ID NO: 2354751 - RNA, 16 nt, Human
aguauuguccaggucu

SEQ ID NO: 2354752 - RNA, 15 nt, Human
ugucagcauagaagu

SEQ ID NO: 2354753 - RNA, 17 nt, Human
agucacugagacagccc

SEQ ID NO: 2354754 - RNA, 15 nt, Human
agucacugagacagc

SEQ ID NO: 2354755 - RNA, 16 nt, Human
agucacugagacagcc

SEQ ID NO: 2354756 - RNA, 15 nt, Human
agucacaucacagga

SEQ ID NO: 2354757 - RNA, 14 nt, Human
agucacaucucuuc

SEQ ID NO: 2354758 - RNA, 16 nt, Human
agucacaucucuuccu

SEQ ID NO: 2354759 - RNA, 23 nt, Human
agucacauggccuaugcacauau

SEQ ID NO: 2354760 - RNA, 14 nt, Human
agucacaucacagg

SEQ ID NO: 2354761 - RNA, 13 nt, Human
agucacagccacc

SEQ ID NO: 2354762 - RNA, 20 nt, Human
agucacauuccaagccucau

SEQ ID NO: 2354763 - RNA, 18 nt, Human
ugaacaaaaaauaaaaau

SEQ ID NO: 2354764 - RNA, 15 nt, Human
ugaacaaagcagcca

SEQ ID NO: 2354765 - RNA, 14 nt, Human
ugaacaaagcagcc

SEQ ID NO: 2354766 - RNA, 18 nt, Human
ugaacaaauugaacucuu

SEQ ID NO: 2354767 - RNA, 17 nt, Human
ugaacaaagcagccacg

SEQ ID NO: 2354768 - RNA, 16 nt, Human
ugaacaaagcagccac

SEQ ID NO: 2354769 - RNA, 19 nt, Human
ugaaauuuuuauuaaauua

SEQ ID NO: 2354770 - RNA, 22 nt, Human
ugaaauuucagauucccagagc

SEQ ID NO: 2354771 - RNA, 20 nt, Human
ugaaauuuuuauuaaauuau

SEQ ID NO: 2354772 - RNA, 18 nt, Human
ugaaauagucugugugaa

SEQ ID NO: 2354773 - RNA, 17 nt, Human
ugaaauagucuguguga

SEQ ID NO: 2354774 - RNA, 16 nt, Human
ugaaauagucugugug

SEQ ID NO: 2354775 - RNA, 13 nt, Human
ugaaauagucugu

SEQ ID NO: 2354776 - RNA, 23 nt, Human
ugaaauagacccacaagaggcag

SEQ ID NO: 2354777 - RNA, 22 nt, Human
ugaaauuuaauauagcuauuuu

SEQ ID NO: 2354778 - RNA, 12 nt, Human
ugaaauuucaga

SEQ ID NO: 2354779 - RNA, 12 nt, Human
ugaaauuguaaa

SEQ ID NO: 2354780 - RNA, 16 nt, Human
ugaaauuuauacacca

SEQ ID NO: 2354781 - RNA, 23 nt, Human
ugaaauuuauacaccaauugauu

SEQ ID NO: 2354782 - RNA, 20 nt, Human
ugaaauuuauuaguuaauau

SEQ ID NO: 2354783 - RNA, 21 nt, Human
ugaaauuuauuaguuaauaua

SEQ ID NO: 2354784 - RNA, 22 nt, Human
ugaaauuuauuaguuaauauau

SEQ ID NO: 2354785 - RNA, 16 nt, Human
ugaaauaccagugugg

SEQ ID NO: 2354786 - RNA, 14 nt, Human
ugaaauaccagugu

SEQ ID NO: 2354787 - RNA, 23 nt, Human
ugaaauaccagugaaccaaagag

SEQ ID NO: 2354788 - RNA, 22 nt, Human
ugaaauaccagugaaccaaaga

SEQ ID NO: 2354789 - RNA, 13 nt, Human
ugaaauacuacuu

SEQ ID NO: 2354790 - RNA, 16 nt, Human
ugaaauacuguuugag

SEQ ID NO: 2354791 - RNA, 14 nt, Human
ugaaauacuguuug

SEQ ID NO: 2354792 - RNA, 21 nt, Human
ugaaauaaagaaauugcaaua

SEQ ID NO: 2354793 - RNA, 14 nt, Human
ugaaauaacuccuu

SEQ ID NO: 2354794 - RNA, 20 nt, Human
ugaaauaaagaaauugcaau

SEQ ID NO: 2354795 - RNA, 14 nt, Human
ugaaauaagccaga

SEQ ID NO: 2354796 - RNA, 17 nt, Human
ugaaauaacauggccuu

SEQ ID NO: 2354797 - RNA, 16 nt, Human
ugaaauaacauggccu

SEQ ID NO: 2354798 - RNA, 16 nt, Human
ugaaagaaaggacucu

SEQ ID NO: 2354799 - RNA, 14 nt, Human
agagauggaggagg

SEQ ID NO: 2354800 - RNA, 13 nt, Human
agagauggaggag

SEQ ID NO: 2354801 - RNA, 12 nt, Human
agagauggagga

SEQ ID NO: 2354802 - RNA, 19 nt, Human
agagauuaccuccugagaa

SEQ ID NO: 2354803 - RNA, 16 nt, Human
agagauuaccuccuga

SEQ ID NO: 2354804 - RNA, 12 nt, Human
agagauguuuuu

SEQ ID NO: 2354805 - RNA, 20 nt, Human
agagauguuuuuaaaaguuu

SEQ ID NO: 2354806 - RNA, 21 nt, Human
agagauguuuuuaaaaguuuc

SEQ ID NO: 2354807 - RNA, 16 nt, Human
agagauugugguuuca

SEQ ID NO: 2354808 - RNA, 20 nt, Human
agagauuaccuccugagaaa

SEQ ID NO: 2354809 - RNA, 22 nt, Human
ugaaauaaaacuggcuuuggcu

SEQ ID NO: 2354810 - RNA, 19 nt, Human
ugaaauaaaacuggcuuug

SEQ ID NO: 2354811 - RNA, 17 nt, Human
ugaaauaaaacuggcuu

SEQ ID NO: 2354812 - RNA, 21 nt, Human
agagauuggaaugggcagcuc

SEQ ID NO: 2354813 - RNA, 22 nt, Human
agagauguuuuuaaaaguuuca

SEQ ID NO: 2354814 - RNA, 20 nt, Human
agagauuggaaugggcagcu

SEQ ID NO: 2354815 - RNA, 22 nt, Human
agagauuggaaugggcagcuca

SEQ ID NO: 2354816 - RNA, 21 nt, Human
ugaaccaccacacccagccca

SEQ ID NO: 2354817 - RNA, 13 nt, Human
ugaacaaauuuac

SEQ ID NO: 2354818 - RNA, 22 nt, Human
ugaaccaccacacccagcccac

SEQ ID NO: 2354819 - RNA, 12 nt, Human
ugaacccaggag

SEQ ID NO: 2354820 - RNA, 22 nt, Human
ugaacccaggacgcuucugaau

SEQ ID NO: 2354821 - RNA, 21 nt, Human
ugaacccaggacgcuucugaa

SEQ ID NO: 2354822 - RNA, 20 nt, Human
ugaacccaggacgcuucuga

SEQ ID NO: 2354823 - RNA, 21 nt, Human
ugaaccaucauuauaaacgug

SEQ ID NO: 2354824 - RNA, 17 nt, Human
ugaaccauuaaagucga

SEQ ID NO: 2354825 - RNA, 23 nt, Human
ugaaccacuucccucaucucucc

SEQ ID NO: 2354826 - RNA, 21 nt, Human
ugaacaaauugaacucuuuga

SEQ ID NO: 2354827 - RNA, 14 nt, Human
ugaaccacuucccu

SEQ ID NO: 2354828 - RNA, 15 nt, Human
ugaaccacuucccuc

SEQ ID NO: 2354829 - RNA, 16 nt, Human
ugaaccacuucccuca

SEQ ID NO: 2354830 - RNA, 15 nt, Human
ugaacccuugcuugc

SEQ ID NO: 2354831 - RNA, 19 nt, Human
ugaacccugugcugguguc

SEQ ID NO: 2354832 - RNA, 20 nt, Human
ugaaccgaggggcucaggaa

SEQ ID NO: 2354833 - RNA, 13 nt, Human
ugaacccuugcuu

SEQ ID NO: 2354834 - RNA, 14 nt, Human
ugaacccugugcug

SEQ ID NO: 2354835 - RNA, 15 nt, Human
ugaacccugugcugg

SEQ ID NO: 2354836 - RNA, 19 nt, Human
ugaacccaggagguggagg

SEQ ID NO: 2354837 - RNA, 19 nt, Human
ugaacccauuuugagugac

SEQ ID NO: 2354838 - RNA, 14 nt, Human
ugaacccaggaggu

SEQ ID NO: 2354839 - RNA, 13 nt, Human
ugaacccaggagg

SEQ ID NO: 2354840 - RNA, 13 nt, Human
ugaacccugugcu

SEQ ID NO: 2354841 - RNA, 14 nt, Human
ugaacccccaugau

SEQ ID NO: 2354842 - RNA, 22 nt, Human
ugaacccgggacgcagggguug

SEQ ID NO: 2354843 - RNA, 18 nt, Human
ugaacccgggaggcagag

SEQ ID NO: 2354844 - RNA, 22 nt, Human
ugaacccauauuuguacaccaa

SEQ ID NO: 2354845 - RNA, 16 nt, Human
ugaacuaauaaaagca

SEQ ID NO: 2354846 - RNA, 23 nt, Human
ugaacuagaguuuagcuggaaaa

SEQ ID NO: 2354847 - RNA, 19 nt, Human
ugaacuaaacuuucacacc

SEQ ID NO: 2354848 - RNA, 17 nt, Human
ugaacuaaacuuucaca

SEQ ID NO: 2354849 - RNA, 15 nt, Human
ugaacggugagcauu

SEQ ID NO: 2354850 - RNA, 15 nt, Human
ugaacggggagaaaa

SEQ ID NO: 2354851 - RNA, 22 nt, Human
ugaaccgaggggcucaggaaaa

SEQ ID NO: 2354852 - RNA, 13 nt, Human
ugaacggggagaa

SEQ ID NO: 2354853 - RNA, 16 nt, Human
ugaacggggagaaaag

SEQ ID NO: 2354854 - RNA, 20 nt, Human
ugaagaacaguaacugccau

SEQ ID NO: 2354855 - RNA, 15 nt, Human
ugaagaacaguaacu

SEQ ID NO: 2354856 - RNA, 14 nt, Human
ugaagaacauguga

SEQ ID NO: 2354857 - RNA, 13 nt, Human
ugaagaacaugug

SEQ ID NO: 2354858 - RNA, 20 nt, Human
ugaagaaccaguccccccac

SEQ ID NO: 2354859 - RNA, 19 nt, Human
ugaagaaccagucccccca

SEQ ID NO: 2354860 - RNA, 19 nt, Human
ugaagaacugaggaggaaa

SEQ ID NO: 2354861 - RNA, 13 nt, Human
ugaagaacugagg

SEQ ID NO: 2354862 - RNA, 14 nt, Human
ugaagaacugcagg

SEQ ID NO: 2354863 - RNA, 15 nt, Human
ugaagaacugcaggc

SEQ ID NO: 2354864 - RNA, 16 nt, Human
ugaagaacugcaggcc

SEQ ID NO: 2354865 - RNA, 17 nt, Human
ugaagaacugcaggccc

SEQ ID NO: 2354866 - RNA, 20 nt, Human
ugaagaacugcaggcccugg

SEQ ID NO: 2354867 - RNA, 11 nt, Human
ugaacuccugg

SEQ ID NO: 2354868 - RNA, 13 nt, Human
ugaagaacaguaa

SEQ ID NO: 2354869 - RNA, 22 nt, Human
ugaacucagccaagcacagugg

SEQ ID NO: 2354870 - RNA, 23 nt, Human
ugaacucagccaagcacaguggu

SEQ ID NO: 2354871 - RNA, 15 nt, Human
ugaacuccugaccuc

SEQ ID NO: 2354872 - RNA, 20 nt, Human
ugaacucacuuuccuccuga

SEQ ID NO: 2354873 - RNA, 20 nt, Human
ugaacuaccuugguuccccc

SEQ ID NO: 2354874 - RNA, 21 nt, Human
ugaacuacgcuugcucauuuu

SEQ ID NO: 2354875 - RNA, 18 nt, Human
ugaacucagaucugucug

SEQ ID NO: 2354876 - RNA, 22 nt, Human
ugaacucagaucugucugauag

SEQ ID NO: 2354877 - RNA, 13 nt, Human
ugaacucagccaa

SEQ ID NO: 2354878 - RNA, 14 nt, Human
ugaacucagccaag

SEQ ID NO: 2354879 - RNA, 15 nt, Human
ugaacucagccaagc

SEQ ID NO: 2354880 - RNA, 16 nt, Human
ugaacucagccaagca

SEQ ID NO: 2354881 - RNA, 17 nt, Human
ugaacucagccaagcac

SEQ ID NO: 2354882 - RNA, 18 nt, Human
ugaacucagccaagcaca

SEQ ID NO: 2354883 - RNA, 19 nt, Human
ugaacucagccaagcacag

SEQ ID NO: 2354884 - RNA, 20 nt, Human
ugaacucagccaagcacagu

SEQ ID NO: 2354885 - RNA, 21 nt, Human
ugaacucagccaagcacagug

SEQ ID NO: 2354886 - RNA, 21 nt, Human
ugaagaaucuguuucccagca

SEQ ID NO: 2354887 - RNA, 22 nt, Human
ugaagaagcuaaauccuuuacu

SEQ ID NO: 2354888 - RNA, 18 nt, Human
ugaagaacugcaggcccu

SEQ ID NO: 2354889 - RNA, 13 nt, Human
ugaagacagagcu

SEQ ID NO: 2354890 - RNA, 23 nt, Human
ugaagacaaugacuuacuguaca

SEQ ID NO: 2354891 - RNA, 22 nt, Human
ugaagacaaugacuuacuguac

SEQ ID NO: 2354892 - RNA, 23 nt, Human
ugaaguacccguucacauuuuug

SEQ ID NO: 2354893 - RNA, 20 nt, Human
ugaaguacauauuaggaaaa

SEQ ID NO: 2354894 - RNA, 13 nt, Human
ugaaguacauauu

SEQ ID NO: 2354895 - RNA, 18 nt, Human
ugaaguacccguucacau

SEQ ID NO: 2354896 - RNA, 15 nt, Human
ugaaguauacuguau

SEQ ID NO: 2354897 - RNA, 14 nt, Human
ugaaguaguuugua

SEQ ID NO: 2354898 - RNA, 15 nt, Human
ugaaguaguuuguau

SEQ ID NO: 2354899 - RNA, 22 nt, Human
ugaaguauauaaugguuucaaa

SEQ ID NO: 2354900 - RNA, 16 nt, Human
ugaaguauauaauggu

SEQ ID NO: 2354901 - RNA, 17 nt, Human
ugaaguauuucucacuc

SEQ ID NO: 2354902 - RNA, 20 nt, Human
ugaaguaaugaauuuuuaug

SEQ ID NO: 2354903 - RNA, 14 nt, Human
ugaaguaaugaauu

SEQ ID NO: 2354904 - RNA, 15 nt, Human
ugaaguaagcaaaga

SEQ ID NO: 2354905 - RNA, 17 nt, Human
ugaaguacucauacaug

SEQ ID NO: 2354906 - RNA, 12 nt, Human
ugaauaauacag

SEQ ID NO: 2354907 - RNA, 15 nt, Human
ugaauaaccacuuaa

SEQ ID NO: 2354908 - RNA, 21 nt, Human
ugaauaaauucuauaggaaca

SEQ ID NO: 2354909 - RNA, 19 nt, Human
ugaauaaauucuauaggaa

SEQ ID NO: 2354910 - RNA, 15 nt, Human
ugaauaaaugucuug

SEQ ID NO: 2354911 - RNA, 20 nt, Human
ugaaguauuuugcuggaaua

SEQ ID NO: 2354912 - RNA, 13 nt, Human
ugaagucacacag

SEQ ID NO: 2354913 - RNA, 13 nt, Human
ugaaucaaagaca

SEQ ID NO: 2354914 - RNA, 20 nt, Human
ugaauauuuauauuucacua

SEQ ID NO: 2354915 - RNA, 19 nt, Human
ugaauacagggcaugcauu

SEQ ID NO: 2354916 - RNA, 19 nt, Human
ugaauauuuauauuucacu

SEQ ID NO: 2354917 - RNA, 21 nt, Human
ugaauauuuccauauggauuu

SEQ ID NO: 2354918 - RNA, 21 nt, Human
ugaauauuuguuauguagaua

SEQ ID NO: 2354919 - RNA, 18 nt, Human
ugaauauuuaguguucau

SEQ ID NO: 2354920 - RNA, 22 nt, Human
ugaauacaaacaauggaaacug

SEQ ID NO: 2354921 - RNA, 23 nt, Human
ugaauacaaacaauggaaacuga

SEQ ID NO: 2354922 - RNA, 15 nt, Human
ugaauacaaacaaug

SEQ ID NO: 2354923 - RNA, 16 nt, Human
ugaauacaaacaaugg

SEQ ID NO: 2354924 - RNA, 17 nt, Human
ugaauacaaacaaugga

SEQ ID NO: 2354925 - RNA, 20 nt, Human
ugaauacaaacaauggaaac

SEQ ID NO: 2354926 - RNA, 15 nt, Human
ugaauacaaagugau

SEQ ID NO: 2354927 - RNA, 13 nt, Human
ugaauaauacagu

SEQ ID NO: 2354928 - RNA, 18 nt, Human
ugaauaaugguaccagau

SEQ ID NO: 2354929 - RNA, 22 nt, Human
ugaauaagccauucugacucau

SEQ ID NO: 2354930 - RNA, 17 nt, Human
ugaauaagccauucuga

SEQ ID NO: 2354931 - RNA, 22 nt, Human
ugaauaauuucccaauuaggaa

SEQ ID NO: 2354932 - RNA, 13 nt, Human
ugaauaauuucuu

SEQ ID NO: 2354933 - RNA, 15 nt, Human
ugaauaauuucccaa

SEQ ID NO: 2354934 - RNA, 14 nt, Human
ugaauaauuuccca

SEQ ID NO: 2354935 - RNA, 20 nt, Human
ugaauaaugguaccagauaa

SEQ ID NO: 2354936 - RNA, 23 nt, Human
ugaauaauguaagacaaauaugu

SEQ ID NO: 2354937 - RNA, 13 nt, Human
ugaagcaaacaca

SEQ ID NO: 2354938 - RNA, 15 nt, Human
ugaagcaaacacauu

SEQ ID NO: 2354939 - RNA, 14 nt, Human
ugaagcaaacacau

SEQ ID NO: 2354940 - RNA, 22 nt, Human
ugaagggaaaggauauuuucuu

SEQ ID NO: 2354941 - RNA, 21 nt, Human
ugaagggaaaggauauuuucu

SEQ ID NO: 2354942 - RNA, 18 nt, Human
ugaagggaaaggauauuu

SEQ ID NO: 2354943 - RNA, 14 nt, Human
ugaagggagagcca

SEQ ID NO: 2354944 - RNA, 20 nt, Human
ugaagggaccuugaagggua

SEQ ID NO: 2354945 - RNA, 17 nt, Human
ugaagauuuaccacuug

SEQ ID NO: 2354946 - RNA, 20 nt, Human
ugaagauuuaccacuugugu

SEQ ID NO: 2354947 - RNA, 18 nt, Human
ugaagguuucugaaaauu

SEQ ID NO: 2354948 - RNA, 17 nt, Human
ugaagggccagagccag

SEQ ID NO: 2354949 - RNA, 16 nt, Human
ugaagggccagagcca

SEQ ID NO: 2354950 - RNA, 15 nt, Human
ugaagggccagagcc

SEQ ID NO: 2354951 - RNA, 24 nt, Human
ugaagggauuuuagucacacgugg

SEQ ID NO: 2354952 - RNA, 16 nt, Human
ugaagggaggugggga

SEQ ID NO: 2354953 - RNA, 21 nt, Human
ugaagggagguggggaugaga

SEQ ID NO: 2354954 - RNA, 19 nt, Human
ugaagggagagccagcucc

SEQ ID NO: 2354955 - RNA, 11 nt, Human
ugaagggaggu

SEQ ID NO: 2354956 - RNA, 17 nt, Human
ugaagggagagccagcu

SEQ ID NO: 2354957 - RNA, 16 nt, Human
ugaagggagagccagc

SEQ ID NO: 2354958 - RNA, 14 nt, Human
ugaagggccagagc

SEQ ID NO: 2354959 - RNA, 12 nt, Human
ugaagggccaga

SEQ ID NO: 2354960 - RNA, 19 nt, Human
ugaagggcaggugcuucag

SEQ ID NO: 2354961 - RNA, 15 nt, Human
ugaagggcaggugcu

SEQ ID NO: 2354962 - RNA, 13 nt, Human
ugaaguaagcaaa

SEQ ID NO: 2354963 - RNA, 14 nt, Human
ugaaguaagcaaag

SEQ ID NO: 2354964 - RNA, 15 nt, Human
ugaaguaauaugcac

SEQ ID NO: 2354965 - RNA, 22 nt, Human
ugaaguaauaugcacacauuuu

SEQ ID NO: 2354966 - RNA, 21 nt, Human
ugaaguaauaugcacacauuu

SEQ ID NO: 2354967 - RNA, 20 nt, Human
ugaaguaauaugcacacauu

SEQ ID NO: 2354968 - RNA, 16 nt, Human
ugaaguaauaugcaca

SEQ ID NO: 2354969 - RNA, 13 nt, Human
agaggccaaugcc

SEQ ID NO: 2354970 - RNA, 13 nt, Human
agaggccagaggc

SEQ ID NO: 2354971 - RNA, 21 nt, Human
agaggccagccccacccagga

SEQ ID NO: 2354972 - RNA, 18 nt, Human
agaggccagccccaccca

SEQ ID NO: 2354973 - RNA, 17 nt, Human
agaggccagccccaccc

SEQ ID NO: 2354974 - RNA, 16 nt, Human
agaggccagccccacc

SEQ ID NO: 2354975 - RNA, 15 nt, Human
agaggccagccuggc

SEQ ID NO: 2354976 - RNA, 21 nt, Human
agaggcccucuggaguggcca

SEQ ID NO: 2354977 - RNA, 23 nt, Human
agaggccagccccacccaggagg

SEQ ID NO: 2354978 - RNA, 14 nt, Human
agaggccagccugg

SEQ ID NO: 2354979 - RNA, 23 nt, Human
agaggcccucuggaguggccacu

SEQ ID NO: 2354980 - RNA, 22 nt, Human
agaggcccucuggaguggccac

SEQ ID NO: 2354981 - RNA, 24 nt, Human
agaggcccucuggaguggccacua

SEQ ID NO: 2354982 - RNA, 13 nt, Human
agaggccugagga

SEQ ID NO: 2354983 - RNA, 20 nt, Human
agaggccugccuccagggcu

SEQ ID NO: 2354984 - RNA, 22 nt, Human
agaggccugaggaugagcugga

SEQ ID NO: 2354985 - RNA, 12 nt, Human
agaggccugccc

SEQ ID NO: 2354986 - RNA, 21 nt, Human
agaggccugccuccagggcug

SEQ ID NO: 2354987 - RNA, 22 nt, Human
agaggccugccuccagggcugg

SEQ ID NO: 2354988 - RNA, 13 nt, Human
agaggccugcccg

SEQ ID NO: 2354989 - RNA, 21 nt, Human
agaggcagccccauucugccu

SEQ ID NO: 2354990 - RNA, 22 nt, Human
agaggcagccccauucugccug

SEQ ID NO: 2354991 - RNA, 21 nt, Human
agaggcagggucucacucugu

SEQ ID NO: 2354992 - RNA, 23 nt, Human
agaggcagccccauucugccugc

SEQ ID NO: 2354993 - RNA, 15 nt, Human
agagcuggugucuga

SEQ ID NO: 2354994 - RNA, 11 nt, Human
agagcuggugu

SEQ ID NO: 2354995 - RNA, 22 nt, Human
agagcugguugggaagacaugg

SEQ ID NO: 2354996 - RNA, 16 nt, Human
agagcugguugggaag

SEQ ID NO: 2354997 - RNA, 17 nt, Human
agagcuggugucugauu

SEQ ID NO: 2354998 - RNA, 19 nt, Human
agagcuguauuaagccacu

SEQ ID NO: 2354999 - RNA, 17 nt, Human
agagcuguauuaagcca

SEQ ID NO: 2355000 - RNA, 16 nt, Human
agagcuguggagaggg

SEQ ID NO: 2355001 - RNA, 19 nt, Human
agagcuguucacagccaga

SEQ ID NO: 2355002 - RNA, 18 nt, Human
agagcuguucacagccag

SEQ ID NO: 2355003 - RNA, 22 nt, Human
agaggcugccucucccaucacu

SEQ ID NO: 2355004 - RNA, 16 nt, Human
agaggcugcagccagg

SEQ ID NO: 2355005 - RNA, 21 nt, Human
agaggcugcagaaggccaaga

SEQ ID NO: 2355006 - RNA, 22 nt, Human
agaggcugcagaaggccaagaa

SEQ ID NO: 2355007 - RNA, 21 nt, Human
agaggcugaggcuggcacagg

SEQ ID NO: 2355008 - RNA, 13 nt, Human
agaggcugcagaa

SEQ ID NO: 2355009 - RNA, 19 nt, Human
agaggcugaggcuggcaca

SEQ ID NO: 2355010 - RNA, 16 nt, Human
agaggcugaggcuggc

SEQ ID NO: 2355011 - RNA, 20 nt, Human
agagggagugacagaggcag

SEQ ID NO: 2355012 - RNA, 13 nt, Human
agagguucaaaga

SEQ ID NO: 2355013 - RNA, 16 nt, Human
agaggcuggaggcagg

SEQ ID NO: 2355014 - RNA, 15 nt, Human
agagggagguaagga

SEQ ID NO: 2355015 - RNA, 15 nt, Human
agagggagugacaga

SEQ ID NO: 2355016 - RNA, 23 nt, Human
agagggaugaggugcugggaggg

SEQ ID NO: 2355017 - RNA, 22 nt, Human
agagggaugaggugcugggagg

SEQ ID NO: 2355018 - RNA, 16 nt, Human
agagguuuuguuguuu

SEQ ID NO: 2355019 - RNA, 19 nt, Human
agagguuuuguuguuuuau

SEQ ID NO: 2355020 - RNA, 20 nt, Human
agagggaggucacuggaaag

SEQ ID NO: 2355021 - RNA, 22 nt, Human
agagggaggucacuggaaaggg

SEQ ID NO: 2355022 - RNA, 14 nt, Human
agagggagguguuu

SEQ ID NO: 2355023 - RNA, 23 nt, Human
agagggauaagguaccuuucaca

SEQ ID NO: 2355024 - RNA, 20 nt, Human
agagguucaaagauauuuug

SEQ ID NO: 2355025 - RNA, 19 nt, Human
agagguucaaagauauuuu

SEQ ID NO: 2355026 - RNA, 16 nt, Human
agagguucaaagauau

SEQ ID NO: 2355027 - RNA, 15 nt, Human
agaguaaaaacugaa

SEQ ID NO: 2355028 - RNA, 18 nt, Human
agaguaaaggaaaugauu

SEQ ID NO: 2355029 - RNA, 22 nt, Human
agagguuuuucuuaaauaauaa

SEQ ID NO: 2355030 - RNA, 12 nt, Human
agagguuuuucu

SEQ ID NO: 2355031 - RNA, 18 nt, Human
agaguaauccaagcaaau

SEQ ID NO: 2355032 - RNA, 21 nt, Human
ugaagauucuuucccaauuca

SEQ ID NO: 2355033 - RNA, 20 nt, Human
agaguaauccaagcaaaugu

SEQ ID NO: 2355034 - RNA, 23 nt, Human
agacuccuccuccaaaggccccc

SEQ ID NO: 2355035 - RNA, 15 nt, Human
agacuccugaggaca

SEQ ID NO: 2355036 - RNA, 20 nt, Human
agacuccugaggacagcugu

SEQ ID NO: 2355037 - RNA, 22 nt, Human
agacuccugaggacagcugucc

SEQ ID NO: 2355038 - RNA, 13 nt, Human
agacuccugcagg

SEQ ID NO: 2355039 - RNA, 21 nt, Human
agacucuaggacauaaauuag

SEQ ID NO: 2355040 - RNA, 19 nt, Human
agacucuacccauauuaca

SEQ ID NO: 2355041 - RNA, 13 nt, Human
agacucuaccaga

SEQ ID NO: 2355042 - RNA, 21 nt, Human
agacucuaccagacuguguau

SEQ ID NO: 2355043 - RNA, 14 nt, Human
agacuccuccucca

SEQ ID NO: 2355044 - RNA, 14 nt, Human
agacuccuaggcag

SEQ ID NO: 2355045 - RNA, 22 nt, Human
agacuccuaggcaggacaugcu

SEQ ID NO: 2355046 - RNA, 18 nt, Human
agacuccgucucaaggaa

SEQ ID NO: 2355047 - RNA, 11 nt, Human
agacuccuagg

SEQ ID NO: 2355048 - RNA, 23 nt, Human
agacucccauuccugaagaacca

SEQ ID NO: 2355049 - RNA, 19 nt, Human
agacucccauuccugaaga

SEQ ID NO: 2355050 - RNA, 17 nt, Human
agacucccauuccugaa

SEQ ID NO: 2355051 - RNA, 16 nt, Human
agacucccaagcugga

SEQ ID NO: 2355052 - RNA, 21 nt, Human
agacuccagcuggguuggaaa

SEQ ID NO: 2355053 - RNA, 12 nt, Human
ucuuucucuccu

SEQ ID NO: 2355054 - RNA, 19 nt, Human
agacucuggucuucuuugg

SEQ ID NO: 2355055 - RNA, 20 nt, Human
agacucugaaaucucagaau

SEQ ID NO: 2355056 - RNA, 14 nt, Human
agacucuggucuuc

SEQ ID NO: 2355057 - RNA, 16 nt, Human
agacucugaaaucuca

SEQ ID NO: 2355058 - RNA, 14 nt, Human
agacucucuuagga

SEQ ID NO: 2355059 - RNA, 21 nt, Human
agacuggcacaguuuucugag

SEQ ID NO: 2355060 - RNA, 20 nt, Human
agacuggcacaguuuucuga

SEQ ID NO: 2355061 - RNA, 23 nt, Human
agacuggcacaguuuucugagaa

SEQ ID NO: 2355062 - RNA, 23 nt, Human
agacugggaagauaggcucugca

SEQ ID NO: 2355063 - RNA, 22 nt, Human
agacugggaagauaggcucugc

SEQ ID NO: 2355064 - RNA, 21 nt, Human
agacugggaagauaggcucug

SEQ ID NO: 2355065 - RNA, 22 nt, Human
agacuggcuuuuauuaaugcac

SEQ ID NO: 2355066 - RNA, 23 nt, Human
agacuggcuuuuauuaaugcacu

SEQ ID NO: 2355067 - RNA, 20 nt, Human
agacuggcuggcugcaguga

SEQ ID NO: 2355068 - RNA, 14 nt, Human
agacuggcuggcug

SEQ ID NO: 2355069 - RNA, 11 nt, Human
agacuggcuuu

SEQ ID NO: 2355070 - RNA, 18 nt, Human
agacuggcuuuuauuaau

SEQ ID NO: 2355071 - RNA, 20 nt, Human
ucuuucccugcuuaaugaaa

SEQ ID NO: 2355072 - RNA, 23 nt, Human
agacaggagggcaagggccaugc

SEQ ID NO: 2355073 - RNA, 11 nt, Human
ucuuuaaugcu

SEQ ID NO: 2355074 - RNA, 16 nt, Human
ucuuuaaugcuuuuau

SEQ ID NO: 2355075 - RNA, 13 nt, Human
ucuuuaaugcuuu

SEQ ID NO: 2355076 - RNA, 18 nt, Human
ucuuuaaugucacaggca

SEQ ID NO: 2355077 - RNA, 19 nt, Human
ucuuuaaugucacaggcag

SEQ ID NO: 2355078 - RNA, 20 nt, Human
agacaggcaagcaccuccug

SEQ ID NO: 2355079 - RNA, 14 nt, Human
agacaggagaaaug

SEQ ID NO: 2355080 - RNA, 16 nt, Human
agacaggaccuaggau

SEQ ID NO: 2355081 - RNA, 18 nt, Human
agacaggaccugacuauu

SEQ ID NO: 2355082 - RNA, 22 nt, Human
agacaggcaagcaccuccugcc

SEQ ID NO: 2355083 - RNA, 14 nt, Human
agacaggagggcaa

SEQ ID NO: 2355084 - RNA, 19 nt, Human
agacaggagggcaagggcc

SEQ ID NO: 2355085 - RNA, 15 nt, Human
ucuuuaaugucacag

SEQ ID NO: 2355086 - RNA, 24 nt, Human
ucuuucuccuuagucuucucauag

SEQ ID NO: 2355087 - RNA, 15 nt, Human
ucuuucucuccuuuc

SEQ ID NO: 2355088 - RNA, 16 nt, Human
ucuuucucuacuuuga

SEQ ID NO: 2355089 - RNA, 21 nt, Human
ucuuucuccuuagucuucuca

SEQ ID NO: 2355090 - RNA, 18 nt, Human
ucuuucuccuuagucuuc

SEQ ID NO: 2355091 - RNA, 19 nt, Human
ucuuucuaguucagcugcc

SEQ ID NO: 2355092 - RNA, 15 nt, Human
ucuuucuauuccaaa

SEQ ID NO: 2355093 - RNA, 16 nt, Human
agacuccaccaagccu

SEQ ID NO: 2355094 - RNA, 12 nt, Human
agacuccaccaa

SEQ ID NO: 2355095 - RNA, 22 nt, Human
agacuccaaagaaauguaaggg

SEQ ID NO: 2355096 - RNA, 19 nt, Human
ucuuucuaaugugugaauc

SEQ ID NO: 2355097 - RNA, 20 nt, Human
ucuuuccucuuccccuugcc

SEQ ID NO: 2355098 - RNA, 22 nt, Human
ucuuuccucuuccccuugcccu

SEQ ID NO: 2355099 - RNA, 23 nt, Human
ucuuuccucuuccccuugcccuu

SEQ ID NO: 2355100 - RNA, 14 nt, Human
ucuuucuacaguau

SEQ ID NO: 2355101 - RNA, 16 nt, Human
ucuuucuacucugaac

SEQ ID NO: 2355102 - RNA, 19 nt, Human
ucuuucuacucugaacuaa

SEQ ID NO: 2355103 - RNA, 15 nt, Human
ucuuucuaguggucu

SEQ ID NO: 2355104 - RNA, 16 nt, Human
ucuuucuaguggucuu

SEQ ID NO: 2355105 - RNA, 17 nt, Human
ucuuucuaguggucuuu

SEQ ID NO: 2355106 - RNA, 20 nt, Human
ucuuucuaguggucuuugua

SEQ ID NO: 2355107 - RNA, 21 nt, Human
ucuuucuaguggucuuuguaa

SEQ ID NO: 2355108 - RNA, 22 nt, Human
ucuuucuaguggucuuuguaag

SEQ ID NO: 2355109 - RNA, 22 nt, Human
ucuuucuaguucagcugcccca

SEQ ID NO: 2355110 - RNA, 12 nt, Human
ucuuuccugagg

SEQ ID NO: 2355111 - RNA, 14 nt, Human
ucuuuccuccuucc

SEQ ID NO: 2355112 - RNA, 22 nt, Human
ucuuuccuagauggcagucacu

SEQ ID NO: 2355113 - RNA, 15 nt, Human
ucuuuccuccuucca

SEQ ID NO: 2355114 - RNA, 11 nt, Human
ucuuuccucuu

SEQ ID NO: 2355115 - RNA, 17 nt, Human
ucuuuccuaaggcugca

SEQ ID NO: 2355116 - RNA, 19 nt, Human
ucuuuccuagauggcaguc

SEQ ID NO: 2355117 - RNA, 23 nt, Human
ucuuuccuaaggcugcaagguuu

SEQ ID NO: 2355118 - RNA, 12 nt, Human
ucuuuccuccuu

SEQ ID NO: 2355119 - RNA, 14 nt, Human
ucuuuuuucacaaa

SEQ ID NO: 2355120 - RNA, 23 nt, Human
ucuuuuuucauggacacuuugaa

SEQ ID NO: 2355121 - RNA, 21 nt, Human
ucuuuuuucuaaaguaaaaac

SEQ ID NO: 2355122 - RNA, 22 nt, Human
ucuuuuuucuaaaguaaaaaca

SEQ ID NO: 2355123 - RNA, 16 nt, Human
ucuuugugcuuuggcu

SEQ ID NO: 2355124 - RNA, 23 nt, Human
ucuuuguggccaaggagcugcua

SEQ ID NO: 2355125 - RNA, 22 nt, Human
ucuuuguggccaaggagcugcu

SEQ ID NO: 2355126 - RNA, 14 nt, Human
ucuuuguggccaag

SEQ ID NO: 2355127 - RNA, 13 nt, Human
ucuuuguggccaa

SEQ ID NO: 2355128 - RNA, 14 nt, Human
ucuuuguggcuucc

SEQ ID NO: 2355129 - RNA, 20 nt, Human
ucuuugucuaaaacaauaaa

SEQ ID NO: 2355130 - RNA, 19 nt, Human
ucuuugucuaaaacaauaa

SEQ ID NO: 2355131 - RNA, 15 nt, Human
ucuuugucuaaaaca

SEQ ID NO: 2355132 - RNA, 23 nt, Human
ucuuuguaaugucaccaccuucc

SEQ ID NO: 2355133 - RNA, 13 nt, Human
ucuuugucuaaaa

SEQ ID NO: 2355134 - RNA, 20 nt, Human
agagacaccugcaccucccc

SEQ ID NO: 2355135 - RNA, 19 nt, Human
agagacaccugcaccuccc

SEQ ID NO: 2355136 - RNA, 18 nt, Human
agagacaccugcaccucc

SEQ ID NO: 2355137 - RNA, 16 nt, Human
agagacaccugcaccu

SEQ ID NO: 2355138 - RNA, 15 nt, Human
agagacaccugcacc

SEQ ID NO: 2355139 - RNA, 14 nt, Human
agagacaccugcac

SEQ ID NO: 2355140 - RNA, 13 nt, Human
agagacaccugca

SEQ ID NO: 2355141 - RNA, 16 nt, Human
agagacacacugaaga

SEQ ID NO: 2355142 - RNA, 15 nt, Human
agagacagaaagcag

SEQ ID NO: 2355143 - RNA, 14 nt, Human
agagacagaaagca

SEQ ID NO: 2355144 - RNA, 22 nt, Human
agagacaccugcaccucccccc

SEQ ID NO: 2355145 - RNA, 21 nt, Human
agagacaccugcaccuccccc

SEQ ID NO: 2355146 - RNA, 16 nt, Human
ucuuuguaaugaaaac

SEQ ID NO: 2355147 - RNA, 14 nt, Human
ucuuuguacagaca

SEQ ID NO: 2355148 - RNA, 15 nt, Human
ucuuuguacagacaa

SEQ ID NO: 2355149 - RNA, 20 nt, Human
ucuuuguacagacaacaaac

SEQ ID NO: 2355150 - RNA, 23 nt, Human
agacuggugagcagacugguggg

SEQ ID NO: 2355151 - RNA, 14 nt, Human
agacuguaaugaau

SEQ ID NO: 2355152 - RNA, 18 nt, Human
agacuggugagcagacug

SEQ ID NO: 2355153 - RNA, 18 nt, Human
agacuggggggcuugaaa

SEQ ID NO: 2355154 - RNA, 22 nt, Human
agacugguuuauccacccacaa

SEQ ID NO: 2355155 - RNA, 15 nt, Human
agacuuuggaaagac

SEQ ID NO: 2355156 - RNA, 17 nt, Human
agacuuuggaaagacuu

SEQ ID NO: 2355157 - RNA, 15 nt, Human
agacuuuggaaagag

SEQ ID NO: 2355158 - RNA, 20 nt, Human
agacugguuccauggccucu

SEQ ID NO: 2355159 - RNA, 14 nt, Human
agacugggcugagg

SEQ ID NO: 2355160 - RNA, 12 nt, Human
agacugggcuga

SEQ ID NO: 2355161 - RNA, 16 nt, Human
agacugggcugaggga

SEQ ID NO: 2355162 - RNA, 15 nt, Human
agacugggcugaggg

SEQ ID NO: 2355163 - RNA, 20 nt, Human
agacugggcugagggagccu

SEQ ID NO: 2355164 - RNA, 15 nt, Human
agacuuuuaugauac

SEQ ID NO: 2355165 - RNA, 15 nt, Human
agacuuuuccaaccc

SEQ ID NO: 2355166 - RNA, 12 nt, Human
agacuuuuauga

SEQ ID NO: 2355167 - RNA, 19 nt, Human
agacuuuggaaagaguagg

SEQ ID NO: 2355168 - RNA, 18 nt, Human
agacuuuuaaucagacaa

SEQ ID NO: 2355169 - RNA, 16 nt, Human
agacuguaaugaaucu

SEQ ID NO: 2355170 - RNA, 15 nt, Human
agagacacaagccuu

SEQ ID NO: 2355171 - RNA, 16 nt, Human
agagacacaagccuuc

SEQ ID NO: 2355172 - RNA, 19 nt, Human
agagacacaagccuucggc

SEQ ID NO: 2355173 - RNA, 18 nt, Human
ugaaaauuaacacugcuu

SEQ ID NO: 2355174 - RNA, 19 nt, Human
ugaaacugcuuguuuccua

SEQ ID NO: 2355175 - RNA, 18 nt, Human
ugaaacugcuuguuuccu

SEQ ID NO: 2355176 - RNA, 14 nt, Human
ugaaaauuaacaug

SEQ ID NO: 2355177 - RNA, 14 nt, Human
ugaaaauuaacacu

SEQ ID NO: 2355178 - RNA, 13 nt, Human
ugaaaauguuuuu

SEQ ID NO: 2355179 - RNA, 15 nt, Human
ugaaaauuaacacug

SEQ ID NO: 2355180 - RNA, 16 nt, Human
ugaaaauuaacacugc

SEQ ID NO: 2355181 - RNA, 13 nt, Human
ugaaaaugugaau

SEQ ID NO: 2355182 - RNA, 22 nt, Human
ugaaaaugugcuauacugcaua

SEQ ID NO: 2355183 - RNA, 21 nt, Human
ugaaaaugugcuauacugcau

SEQ ID NO: 2355184 - RNA, 20 nt, Human
ugaaaaugugcuauacugca

SEQ ID NO: 2355185 - RNA, 13 nt, Human
ugaaagaaaauaa

SEQ ID NO: 2355186 - RNA, 18 nt, Human
ugaaacuggauuaaacuu

SEQ ID NO: 2355187 - RNA, 17 nt, Human
ugaaacuggauuaaacu

SEQ ID NO: 2355188 - RNA, 23 nt, Human
ugaaaaugcaacaacauguauaa

SEQ ID NO: 2355189 - RNA, 20 nt, Human
ugaaaaugcaacaacaugua

SEQ ID NO: 2355190 - RNA, 21 nt, Human
ugaaaaugcaacaacauguau

SEQ ID NO: 2355191 - RNA, 18 nt, Human
ugaaaaugcaacaacaug

SEQ ID NO: 2355192 - RNA, 12 nt, Human
ugaaaaucaaau

SEQ ID NO: 2355193 - RNA, 19 nt, Human
ugaaaauguaagcuguuua

SEQ ID NO: 2355194 - RNA, 16 nt, Human
ugaaaaugucuugugu

SEQ ID NO: 2355195 - RNA, 19 nt, Human
ugaaaaugugcuauacugc

SEQ ID NO: 2355196 - RNA, 17 nt, Human
ugaaaaugugcuauacu

SEQ ID NO: 2355197 - RNA, 21 nt, Human
ugaaaauggguuggugcuucu

SEQ ID NO: 2355198 - RNA, 15 nt, Human
ugaaaaugguauuuu

SEQ ID NO: 2355199 - RNA, 16 nt, Human
ugaaaaugguauuuuc

SEQ ID NO: 2355200 - RNA, 21 nt, Human
ugaaaaugguauuuucccccu

SEQ ID NO: 2355201 - RNA, 18 nt, Human
ugaaaauguaagcuguuu

SEQ ID NO: 2355202 - RNA, 23 nt, Human
ugaaaauacaacuuaaauaauaa

SEQ ID NO: 2355203 - RNA, 13 nt, Human
ugaaaauaauugu

SEQ ID NO: 2355204 - RNA, 18 nt, Human
ugaaaauacuuaggaagg

SEQ ID NO: 2355205 - RNA, 18 nt, Human
ugaaaauagguauacagu

SEQ ID NO: 2355206 - RNA, 21 nt, Human
ugaaaauauuuuuuauauaua

SEQ ID NO: 2355207 - RNA, 23 nt, Human
ugaaaauauuuuuuauauauaca

SEQ ID NO: 2355208 - RNA, 22 nt, Human
ugaaaauauuuguaucacaaau

SEQ ID NO: 2355209 - RNA, 21 nt, Human
ugaaaauauuuguaucacaaa

SEQ ID NO: 2355210 - RNA, 23 nt, Human
ucuuuuuuuuuuuuuaaagacag

SEQ ID NO: 2355211 - RNA, 18 nt, Human
ugaaaaaaaaaaugcuga

SEQ ID NO: 2355212 - RNA, 21 nt, Human
ugaaaaaaaaaaugcugaaca

SEQ ID NO: 2355213 - RNA, 20 nt, Human
ugaaaaaaaaaaugcugaac

SEQ ID NO: 2355214 - RNA, 22 nt, Human
ugaaaaaaaaaaugcugaacau

SEQ ID NO: 2355215 - RNA, 20 nt, Human
ugaaaaauuuaagcauuguu

SEQ ID NO: 2355216 - RNA, 12 nt, Human
ugaaaacaagug

SEQ ID NO: 2355217 - RNA, 14 nt, Human
ucuuuuuuugugau

SEQ ID NO: 2355218 - RNA, 16 nt, Human
ucuuuuuuugugaugu

SEQ ID NO: 2355219 - RNA, 19 nt, Human
ucuuuuuuuuaaugugcug

SEQ ID NO: 2355220 - RNA, 20 nt, Human
ucuuuuuuuuaaugugcugu

SEQ ID NO: 2355221 - RNA, 22 nt, Human
ucuuuuuuuuaaugugcugugu

SEQ ID NO: 2355222 - RNA, 19 nt, Human
ucuuuuuuuuauuccacau

SEQ ID NO: 2355223 - RNA, 13 nt, Human
ugaaaacacauuu

SEQ ID NO: 2355224 - RNA, 12 nt, Human
ugaaaacacauu

SEQ ID NO: 2355225 - RNA, 14 nt, Human
ugaaaacacauuuu

SEQ ID NO: 2355226 - RNA, 18 nt, Human
ugaaaacaagugcuggca

SEQ ID NO: 2355227 - RNA, 21 nt, Human
ugaaaacaagugcuggcacca

SEQ ID NO: 2355228 - RNA, 13 nt, Human
ugaaaacaagugc

SEQ ID NO: 2355229 - RNA, 14 nt, Human
ugaaaacaagugcu

SEQ ID NO: 2355230 - RNA, 15 nt, Human
ugaaaacaagugcug

SEQ ID NO: 2355231 - RNA, 16 nt, Human
ugaaaacaagugcugg

SEQ ID NO: 2355232 - RNA, 19 nt, Human
ugaaaauacaacuuaaaua

SEQ ID NO: 2355233 - RNA, 12 nt, Human
ugaaaauacaac

SEQ ID NO: 2355234 - RNA, 17 nt, Human
ugaaaauauuuguauca

SEQ ID NO: 2355235 - RNA, 16 nt, Human
ugaaaauaagaauaga

SEQ ID NO: 2355236 - RNA, 21 nt, Human
ugaaaauaaaaagaucacuuu

SEQ ID NO: 2355237 - RNA, 20 nt, Human
ugaaaacacauuuuucuuag

SEQ ID NO: 2355238 - RNA, 20 nt, Human
ugaaaauaaaaagaucacuu

SEQ ID NO: 2355239 - RNA, 22 nt, Human
ugaaaaguuacuaccugucaag

SEQ ID NO: 2355240 - RNA, 19 nt, Human
ugaaaacacauuuuucuua

SEQ ID NO: 2355241 - RNA, 17 nt, Human
ugaaaacacauuuuucu

SEQ ID NO: 2355242 - RNA, 15 nt, Human
ugaaaacacauuuuu

SEQ ID NO: 2355243 - RNA, 16 nt, Human
ugaaagacuguacaaa

SEQ ID NO: 2355244 - RNA, 20 nt, Human
ugaaagaaaauaugcaucua

SEQ ID NO: 2355245 - RNA, 22 nt, Human
ugaaagaaacaguuaacuuuca

SEQ ID NO: 2355246 - RNA, 20 nt, Human
ugaaagaaacaguuaacuuu

SEQ ID NO: 2355247 - RNA, 14 nt, Human
ugaaagaaacaguu

SEQ ID NO: 2355248 - RNA, 18 nt, Human
ugaaacuggcacugaauu

SEQ ID NO: 2355249 - RNA, 22 nt, Human
ugaaacugcuuguuuccuagca

SEQ ID NO: 2355250 - RNA, 20 nt, Human
ugaaacugcuuguuuccuag

SEQ ID NO: 2355251 - RNA, 22 nt, Human
ugaaagaaaauaccaaggaaca

SEQ ID NO: 2355252 - RNA, 22 nt, Human
ugaaagacuguacaaaguagaa

SEQ ID NO: 2355253 - RNA, 17 nt, Human
ugaaagaggaaugaagu

SEQ ID NO: 2355254 - RNA, 19 nt, Human
ugaaagacuguacaaagua

SEQ ID NO: 2355255 - RNA, 18 nt, Human
ugaaagacuguacaaagu

SEQ ID NO: 2355256 - RNA, 13 nt, Human
ugaaagagaacca

SEQ ID NO: 2355257 - RNA, 18 nt, Human
agagaccaucccugaagg

SEQ ID NO: 2355258 - RNA, 18 nt, Human
ugaaagaggaaugaagua

SEQ ID NO: 2355259 - RNA, 19 nt, Human
agagaccaucccugaaggc

SEQ ID NO: 2355260 - RNA, 21 nt, Human
agagaccaucccugaaggccc

SEQ ID NO: 2355261 - RNA, 21 nt, Human
agagacccccggaacaagccu

SEQ ID NO: 2355262 - RNA, 21 nt, Human
agagacccaaggaggaaaaac

SEQ ID NO: 2355263 - RNA, 16 nt, Human
agagacccaaggagga

SEQ ID NO: 2355264 - RNA, 14 nt, Human
agagacccaaggag

SEQ ID NO: 2355265 - RNA, 13 nt, Human
agagacccaagga

SEQ ID NO: 2355266 - RNA, 12 nt, Human
agagacccaagg

SEQ ID NO: 2355267 - RNA, 18 nt, Human
ugaaagagaaccaguuuc

SEQ ID NO: 2355268 - RNA, 16 nt, Human
ugaaagagaaccaguu

SEQ ID NO: 2355269 - RNA, 17 nt, Human
agagacccuuguuugau

SEQ ID NO: 2355270 - RNA, 22 nt, Human
agagaccguccucaccccuguc

SEQ ID NO: 2355271 - RNA, 15 nt, Human
agagaccguccucac

SEQ ID NO: 2355272 - RNA, 19 nt, Human
agagacccucugccaccag

SEQ ID NO: 2355273 - RNA, 21 nt, Human
agagacccucugccaccagag

SEQ ID NO: 2355274 - RNA, 23 nt, Human
agagacccucugccaccagagac

SEQ ID NO: 2355275 - RNA, 22 nt, Human
agagaccaucccugaaggcccc

SEQ ID NO: 2355276 - RNA, 23 nt, Human
agagaccaucccugaaggccccg

SEQ ID NO: 2355277 - RNA, 23 nt, Human
agagaugccuccaccgcugccua

SEQ ID NO: 2355278 - RNA, 21 nt, Human
agagaugccuccaccgcugcc

SEQ ID NO: 2355279 - RNA, 17 nt, Human
agagaugccuccaccgc

SEQ ID NO: 2355280 - RNA, 16 nt, Human
agagaugccuccaccg

SEQ ID NO: 2355281 - RNA, 18 nt, Human
agagaugacugaguccuc

SEQ ID NO: 2355282 - RNA, 12 nt, Human
agagaugaauua

SEQ ID NO: 2355283 - RNA, 12 nt, Human
agagaugccucc

SEQ ID NO: 2355284 - RNA, 14 nt, Human
agagaugccuccac

SEQ ID NO: 2355285 - RNA, 17 nt, Human
agagaugacugaguccu

SEQ ID NO: 2355286 - RNA, 17 nt, Human
agagauauggcagcgaa

SEQ ID NO: 2355287 - RNA, 20 nt, Human
agagauaugcagaaggaagg

SEQ ID NO: 2355288 - RNA, 19 nt, Human
agagaugaagagugagagg

SEQ ID NO: 2355289 - RNA, 18 nt, Human
agagauccaaaagaagcc

SEQ ID NO: 2355290 - RNA, 17 nt, Human
agagaguggcuccuccc

SEQ ID NO: 2355291 - RNA, 11 nt, Human
agagagaaaau

SEQ ID NO: 2355292 - RNA, 19 nt, Human
agagagaaaacuuauuuga

SEQ ID NO: 2355293 - RNA, 21 nt, Human
agagagaaaacuuauuugagu

SEQ ID NO: 2355294 - RNA, 12 nt, Human
agagagaaaaua

SEQ ID NO: 2355295 - RNA, 15 nt, Human
agagaguugaaccua

SEQ ID NO: 2355296 - RNA, 15 nt, Human
agagaccuaccucag

SEQ ID NO: 2355297 - RNA, 23 nt, Human
agagaccguccucaccccugucc

SEQ ID NO: 2355298 - RNA, 16 nt, Human
agagaccuaccucagg

SEQ ID NO: 2355299 - RNA, 17 nt, Human
agagaccuaccucaggu

SEQ ID NO: 2355300 - RNA, 18 nt, Human
agagaccuaccucagguu

SEQ ID NO: 2355301 - RNA, 20 nt, Human
agagaccuaccucagguugc

SEQ ID NO: 2355302 - RNA, 13 nt, Human
agagaccucauca

SEQ ID NO: 2355303 - RNA, 12 nt, Human
agagacuccugc

SEQ ID NO: 2355304 - RNA, 13 nt, Human
agagacuccugca

SEQ ID NO: 2355305 - RNA, 14 nt, Human
agagacuccugcag

SEQ ID NO: 2355306 - RNA, 13 nt, Human
agagacugggaag

SEQ ID NO: 2355307 - RNA, 21 nt, Human
agagacuggagcaucugacuc

SEQ ID NO: 2355308 - RNA, 23 nt, Human
agagacugggaagauaggcucug

SEQ ID NO: 2355309 - RNA, 20 nt, Human
agagacuugggacauugccu

SEQ ID NO: 2355310 - RNA, 17 nt, Human
agagacuuuuaaucaga

SEQ ID NO: 2355311 - RNA, 16 nt, Human
agagacuuuuaaucag

SEQ ID NO: 2355312 - RNA, 19 nt, Human
agagacuuuuaaucagaca

SEQ ID NO: 2355313 - RNA, 13 nt, Human
agagagaaaaaca

SEQ ID NO: 2355314 - RNA, 14 nt, Human
agagagaaaaacaa

SEQ ID NO: 2355315 - RNA, 11 nt, Human
agagacuccug

SEQ ID NO: 2355316 - RNA, 21 nt, Human
agagacuccuugagagaccag

SEQ ID NO: 2355317 - RNA, 22 nt, Human
agagacuccuugagagaccagg

SEQ ID NO: 2355318 - RNA, 22 nt, Human
agagacucuggccuccacaguu

SEQ ID NO: 2355319 - RNA, 13 nt, Human
agagacuggagca

SEQ ID NO: 2355320 - RNA, 14 nt, Human
agagacuggagcau

SEQ ID NO: 2355321 - RNA, 17 nt, Human
agagacuggagcaucug

SEQ ID NO: 2355322 - RNA, 15 nt, Human
ugagauuacagagga

SEQ ID NO: 2355323 - RNA, 15 nt, Human
ugagauuauuuuaau

SEQ ID NO: 2355324 - RNA, 17 nt, Human
ugagauuagagggaggu

SEQ ID NO: 2355325 - RNA, 19 nt, Human
ugagauuacagaggaaguu

SEQ ID NO: 2355326 - RNA, 14 nt, Human
ugagauguguucac

SEQ ID NO: 2355327 - RNA, 13 nt, Human
ugagauuucaucu

SEQ ID NO: 2355328 - RNA, 18 nt, Human
ugagauugcaccacugca

SEQ ID NO: 2355329 - RNA, 24 nt, Human
ugagaugugaacacaucagcuugc

SEQ ID NO: 2355330 - RNA, 19 nt, Human
ugagaugugaacacaucag

SEQ ID NO: 2355331 - RNA, 18 nt, Human
ugagaugugaacacauca

SEQ ID NO: 2355332 - RNA, 21 nt, Human
ugagauggaacccuuuuggcc

SEQ ID NO: 2355333 - RNA, 13 nt, Human
ugagauggacaca

SEQ ID NO: 2355334 - RNA, 21 nt, Human
ugagaugcugguaauggccau

SEQ ID NO: 2355335 - RNA, 16 nt, Human
ugagauggacacacug

SEQ ID NO: 2355336 - RNA, 18 nt, Human
ugagauggagucucacuc

SEQ ID NO: 2355337 - RNA, 23 nt, Human
ugagauguagccccucuccugga

SEQ ID NO: 2355338 - RNA, 13 nt, Human
ugagaugugaaca

SEQ ID NO: 2355339 - RNA, 23 nt, Human
ugagaggacuuuucuuuguggcu

SEQ ID NO: 2355340 - RNA, 17 nt, Human
ugagaggaaaucaccga

SEQ ID NO: 2355341 - RNA, 20 nt, Human
ugagaggcaaugauuguuaa

SEQ ID NO: 2355342 - RNA, 22 nt, Human
ugagaggaugaauguaugugca

SEQ ID NO: 2355343 - RNA, 23 nt, Human
ugagaggaugaauguaugugcac

SEQ ID NO: 2355344 - RNA, 19 nt, Human
ugagagcugcucuggaaaa

SEQ ID NO: 2355345 - RNA, 15 nt, Human
ugagaggaugaaugu

SEQ ID NO: 2355346 - RNA, 13 nt, Human
ugagaugcuggag

SEQ ID NO: 2355347 - RNA, 15 nt, Human
ugagaugcuggagaa

SEQ ID NO: 2355348 - RNA, 16 nt, Human
ugagaugcuggagaag

SEQ ID NO: 2355349 - RNA, 17 nt, Human
ugagaugcuggagaaga

SEQ ID NO: 2355350 - RNA, 18 nt, Human
ugagaugcuggagaagag

SEQ ID NO: 2355351 - RNA, 19 nt, Human
ugagaugcuggagaagaga

SEQ ID NO: 2355352 - RNA, 20 nt, Human
ugagaugcuggagaagagag

SEQ ID NO: 2355353 - RNA, 23 nt, Human
ugagaugcuggagaagagaggag

SEQ ID NO: 2355354 - RNA, 16 nt, Human
ugagagccccagcuga

SEQ ID NO: 2355355 - RNA, 19 nt, Human
ugagagccccagcugacau

SEQ ID NO: 2355356 - RNA, 19 nt, Human
ugagagcccagagguaaca

SEQ ID NO: 2355357 - RNA, 20 nt, Human
ugagagcccagagguaacag

SEQ ID NO: 2355358 - RNA, 12 nt, Human
ugagagccccag

SEQ ID NO: 2355359 - RNA, 15 nt, Human
ugagagccccagcug

SEQ ID NO: 2355360 - RNA, 14 nt, Human
ugagagcugggugu

SEQ ID NO: 2355361 - RNA, 10 nt, Human
ugagaggaaa

SEQ ID NO: 2355362 - RNA, 17 nt, Human
ugagagcugugcaucag

SEQ ID NO: 2355363 - RNA, 23 nt, Human
ugagagcgugcuccagccuggcu

SEQ ID NO: 2355364 - RNA, 22 nt, Human
ugagagccccagcugacaugga

SEQ ID NO: 2355365 - RNA, 16 nt, Human
ugagagcugcucugga

SEQ ID NO: 2355366 - RNA, 11 nt, Human
ugagaggaaau

SEQ ID NO: 2355367 - RNA, 12 nt, Human
ugagaggaaauc

SEQ ID NO: 2355368 - RNA, 13 nt, Human
ugagaggaaauca

SEQ ID NO: 2355369 - RNA, 14 nt, Human
ugagaggaaaucac

SEQ ID NO: 2355370 - RNA, 16 nt, Human
ugagagagaugggagc

SEQ ID NO: 2355371 - RNA, 17 nt, Human
ugagagagaugggagcu

SEQ ID NO: 2355372 - RNA, 21 nt, Human
ugagagagaugggagcuccuc

SEQ ID NO: 2355373 - RNA, 20 nt, Human
ugagagacccaaggaggaaa

SEQ ID NO: 2355374 - RNA, 12 nt, Human
ugagagacuuuu

SEQ ID NO: 2355375 - RNA, 21 nt, Human
ugagagacccaaggaggaaaa

SEQ ID NO: 2355376 - RNA, 19 nt, Human
ugagagaauuguaucauuu

SEQ ID NO: 2355377 - RNA, 18 nt, Human
ugagagaauuguaucauu

SEQ ID NO: 2355378 - RNA, 23 nt, Human
ugagagaauggaaaacagacuca

SEQ ID NO: 2355379 - RNA, 24 nt, Human
ugagagaccaggcaaagcaaguga

SEQ ID NO: 2355380 - RNA, 14 nt, Human
ugagagaccaggca

SEQ ID NO: 2355381 - RNA, 21 nt, Human
ugagagacacacugaagaagc

SEQ ID NO: 2355382 - RNA, 22 nt, Human
ugagagacacacugaagaagca

SEQ ID NO: 2355383 - RNA, 15 nt, Human
ugagagcccagaggu

SEQ ID NO: 2355384 - RNA, 16 nt, Human
ugagagcccagaggua

SEQ ID NO: 2355385 - RNA, 22 nt, Human
ugagagagaugggagcuccucu

SEQ ID NO: 2355386 - RNA, 23 nt, Human
ugagagagaugggagcuccucuc

SEQ ID NO: 2355387 - RNA, 19 nt, Human
ugagagaauggaaaacaga

SEQ ID NO: 2355388 - RNA, 14 nt, Human
ugagagaauggaaa

SEQ ID NO: 2355389 - RNA, 15 nt, Human
ugagagaagggacac

SEQ ID NO: 2355390 - RNA, 18 nt, Human
ugagagaauaagucaugu

SEQ ID NO: 2355391 - RNA, 22 nt, Human
ugagagaaauauggaacuuaca

SEQ ID NO: 2355392 - RNA, 13 nt, Human
ugagagaaaauaa

SEQ ID NO: 2355393 - RNA, 20 nt, Human
ugagacuugcucucuggccu

SEQ ID NO: 2355394 - RNA, 14 nt, Human
ugagacuugcucuc

SEQ ID NO: 2355395 - RNA, 18 nt, Human
ugagacugggucucgcuu

SEQ ID NO: 2355396 - RNA, 21 nt, Human
ugagacuggauacugcccggg

SEQ ID NO: 2355397 - RNA, 12 nt, Human
ugagacuuccaa

SEQ ID NO: 2355398 - RNA, 23 nt, Human
ugagacugcgggaugguccuggg

SEQ ID NO: 2355399 - RNA, 22 nt, Human
ugagacugcgggaugguccugg

SEQ ID NO: 2355400 - RNA, 14 nt, Human
ugagacagaaucuc

SEQ ID NO: 2355401 - RNA, 16 nt, Human
ugagagacacacugaa

SEQ ID NO: 2355402 - RNA, 17 nt, Human
ugagagacacacugaag

SEQ ID NO: 2355403 - RNA, 19 nt, Human
ugagagacacacugaagaa

SEQ ID NO: 2355404 - RNA, 20 nt, Human
ugagagacacacugaagaag

SEQ ID NO: 2355405 - RNA, 20 nt, Human
ugagacucugucucaaaaaa

SEQ ID NO: 2355406 - RNA, 20 nt, Human
ugagacucugucucagucca

SEQ ID NO: 2355407 - RNA, 22 nt, Human
ugagacagcccgggcucugccu

SEQ ID NO: 2355408 - RNA, 12 nt, Human
ugagacagcucu

SEQ ID NO: 2355409 - RNA, 17 nt, Human
ugagacagcccgggcuc

SEQ ID NO: 2355410 - RNA, 18 nt, Human
ugagacagcccgggcucu

SEQ ID NO: 2355411 - RNA, 19 nt, Human
ugagacagcccgggcucug

SEQ ID NO: 2355412 - RNA, 20 nt, Human
ugagacagcccgggcucugc

SEQ ID NO: 2355413 - RNA, 11 nt, Human
agauuuuccuu

SEQ ID NO: 2355414 - RNA, 20 nt, Human
agauuuuaggaaaugaaugu

SEQ ID NO: 2355415 - RNA, 16 nt, Human
agauuuuccugaaaac

SEQ ID NO: 2355416 - RNA, 15 nt, Human
agauuuuccugaaaa

SEQ ID NO: 2355417 - RNA, 19 nt, Human
agauuuuaggaaaugaaug

SEQ ID NO: 2355418 - RNA, 14 nt, Human
agauuuuccugaaa

SEQ ID NO: 2355419 - RNA, 17 nt, Human
ugagaagccgugggugg

SEQ ID NO: 2355420 - RNA, 16 nt, Human
ugagaagccgugggug

SEQ ID NO: 2355421 - RNA, 20 nt, Human
agauuuuccuuuuuuauaca

SEQ ID NO: 2355422 - RNA, 13 nt, Human
agauuuuccuucc

SEQ ID NO: 2355423 - RNA, 19 nt, Human
agauuuuccuuuuuuauac

SEQ ID NO: 2355424 - RNA, 17 nt, Human
ugagaaggaauuugagu

SEQ ID NO: 2355425 - RNA, 12 nt, Human
ugagaaggagag

SEQ ID NO: 2355426 - RNA, 13 nt, Human
ugagaaggagaga

SEQ ID NO: 2355427 - RNA, 14 nt, Human
ugagaaggagagaa

SEQ ID NO: 2355428 - RNA, 19 nt, Human
ugagaagcuuuugaauaaa

SEQ ID NO: 2355429 - RNA, 20 nt, Human
ugagaagcuuugcccuccua

SEQ ID NO: 2355430 - RNA, 14 nt, Human
ugagaaggcagcca

SEQ ID NO: 2355431 - RNA, 15 nt, Human
ugagaaggagagaaa

SEQ ID NO: 2355432 - RNA, 16 nt, Human
ugagaaggagagaaag

SEQ ID NO: 2355433 - RNA, 22 nt, Human
ugagaaggagucagaaacuguu

SEQ ID NO: 2355434 - RNA, 13 nt, Human
ugagaaggcagcc

SEQ ID NO: 2355435 - RNA, 11 nt, Human
ugagacagagu

SEQ ID NO: 2355436 - RNA, 20 nt, Human
ugagacagaaucucgcucug

SEQ ID NO: 2355437 - RNA, 22 nt, Human
ugagacacggagcccagcccuc

SEQ ID NO: 2355438 - RNA, 13 nt, Human
ugagacagaaucu

SEQ ID NO: 2355439 - RNA, 21 nt, Human
ugagacagaguuuucacucuu

SEQ ID NO: 2355440 - RNA, 13 nt, Human
ugagacagcccgg

SEQ ID NO: 2355441 - RNA, 19 nt, Human
ugagaaucuuuauugagaa

SEQ ID NO: 2355442 - RNA, 20 nt, Human
ugagaaucuuuauugagaaa

SEQ ID NO: 2355443 - RNA, 21 nt, Human
ugagaaucuuuauugagaaag

SEQ ID NO: 2355444 - RNA, 22 nt, Human
ugagaaucuuuauugagaaaga

SEQ ID NO: 2355445 - RNA, 17 nt, Human
ugagacacggagcccag

SEQ ID NO: 2355446 - RNA, 21 nt, Human
ugagacacggagcccagcccu

SEQ ID NO: 2355447 - RNA, 15 nt, Human
ugagaauguaagaac

SEQ ID NO: 2355448 - RNA, 22 nt, Human
ugagaaucccaaauuugauuga

SEQ ID NO: 2355449 - RNA, 21 nt, Human
ugagaaucccaaauuugauug

SEQ ID NO: 2355450 - RNA, 20 nt, Human
ugagaaucccaaauuugauu

SEQ ID NO: 2355451 - RNA, 13 nt, Human
ugagaaucccaaa

SEQ ID NO: 2355452 - RNA, 21 nt, Human
ugagaaucuacccccagaucc

SEQ ID NO: 2355453 - RNA, 12 nt, Human
ugagaaucuacc

SEQ ID NO: 2355454 - RNA, 23 nt, Human
ugagaaucuauauuuaacaagau

SEQ ID NO: 2355455 - RNA, 18 nt, Human
ugagaaucuauauuuaac

SEQ ID NO: 2355456 - RNA, 14 nt, Human
agcaagucaggguu

SEQ ID NO: 2355457 - RNA, 13 nt, Human
agcaagucucuuu

SEQ ID NO: 2355458 - RNA, 16 nt, Human
agcaagugagacccug

SEQ ID NO: 2355459 - RNA, 15 nt, Human
agcaagugagagcug

SEQ ID NO: 2355460 - RNA, 16 nt, Human
agcaagugagagcugg

SEQ ID NO: 2355461 - RNA, 20 nt, Human
agcaaggguucccucaagag

SEQ ID NO: 2355462 - RNA, 23 nt, Human
agcaaggugcucacaccccauug

SEQ ID NO: 2355463 - RNA, 15 nt, Human
agcaagucagaauag

SEQ ID NO: 2355464 - RNA, 22 nt, Human
agcaagggugaugggaaagcau

SEQ ID NO: 2355465 - RNA, 20 nt, Human
agcaagggugaugggaaagc

SEQ ID NO: 2355466 - RNA, 20 nt, Human
agcaagcucccaagggaugg

SEQ ID NO: 2355467 - RNA, 14 nt, Human
agcaaggagauuua

SEQ ID NO: 2355468 - RNA, 19 nt, Human
agcaaggagauuuacaacu

SEQ ID NO: 2355469 - RNA, 17 nt, Human
agcaaggagauuuacaa

SEQ ID NO: 2355470 - RNA, 13 nt, Human
agcaaggcaccug

SEQ ID NO: 2355471 - RNA, 22 nt, Human
agcaaggaggcuggcuggggcc

SEQ ID NO: 2355472 - RNA, 16 nt, Human
agcaaggaggcuggcu

SEQ ID NO: 2355473 - RNA, 17 nt, Human
agcaaggaggcuggcug

SEQ ID NO: 2355474 - RNA, 16 nt, Human
agcaaggcaccugcag

SEQ ID NO: 2355475 - RNA, 16 nt, Human
agcaagggugauggga

SEQ ID NO: 2355476 - RNA, 14 nt, Human
agcaagauuucaga

SEQ ID NO: 2355477 - RNA, 20 nt, Human
agcaagcauuuauguuuauu

SEQ ID NO: 2355478 - RNA, 11 nt, Human
agcaagcuccc

SEQ ID NO: 2355479 - RNA, 15 nt, Human
agcaagcucccaagg

SEQ ID NO: 2355480 - RNA, 20 nt, Human
ugagccagauuucacucucc

SEQ ID NO: 2355481 - RNA, 21 nt, Human
ugagccagauuucacucuccu

SEQ ID NO: 2355482 - RNA, 23 nt, Human
ugagcauuguggcugucagcagg

SEQ ID NO: 2355483 - RNA, 22 nt, Human
ugagcauuguggcugucagcag

SEQ ID NO: 2355484 - RNA, 14 nt, Human
ugagccacugcacc

SEQ ID NO: 2355485 - RNA, 18 nt, Human
ugagccagauuucacucu

SEQ ID NO: 2355486 - RNA, 19 nt, Human
ugagccagauuucacucuc

SEQ ID NO: 2355487 - RNA, 16 nt, Human
ugagcauggagcuggc

SEQ ID NO: 2355488 - RNA, 18 nt, Human
ugagcauggagcuggccg

SEQ ID NO: 2355489 - RNA, 15 nt, Human
ugagcauggagcugg

SEQ ID NO: 2355490 - RNA, 14 nt, Human
ugagcauggagcug

SEQ ID NO: 2355491 - RNA, 20 nt, Human
ugagcaaagggaacagugag

SEQ ID NO: 2355492 - RNA, 18 nt, Human
ugagcaaacuaacuugac

SEQ ID NO: 2355493 - RNA, 22 nt, Human
ugagauuucaucugcucuccuu

SEQ ID NO: 2355494 - RNA, 14 nt, Human
ugagauuuugguau

SEQ ID NO: 2355495 - RNA, 14 nt, Human
ugagauuucaucug

SEQ ID NO: 2355496 - RNA, 18 nt, Human
ugagauuucaucugcucu

SEQ ID NO: 2355497 - RNA, 19 nt, Human
ugagauuucaucugcucuc

SEQ ID NO: 2355498 - RNA, 21 nt, Human
ugagauuucaucugcucuccu

SEQ ID NO: 2355499 - RNA, 12 nt, Human
ugagccacugca

SEQ ID NO: 2355500 - RNA, 13 nt, Human
ugagccacugcac

SEQ ID NO: 2355501 - RNA, 21 nt, Human
ugagcauuguggcugucagca

SEQ ID NO: 2355502 - RNA, 16 nt, Human
ugagcauuagauuucu

SEQ ID NO: 2355503 - RNA, 14 nt, Human
ugagcauuagauuu

SEQ ID NO: 2355504 - RNA, 22 nt, Human
agcaccuacaguguacagucuu

SEQ ID NO: 2355505 - RNA, 18 nt, Human
agcaccguucugugcaca

SEQ ID NO: 2355506 - RNA, 15 nt, Human
agcaccuacuuacau

SEQ ID NO: 2355507 - RNA, 17 nt, Human
agcaccuagccucgcuc

SEQ ID NO: 2355508 - RNA, 18 nt, Human
agcaccuaguccagugac

SEQ ID NO: 2355509 - RNA, 14 nt, Human
agcaccuacagugu

SEQ ID NO: 2355510 - RNA, 15 nt, Human
agcaccuacagugua

SEQ ID NO: 2355511 - RNA, 19 nt, Human
agcaccuacaguguacagu

SEQ ID NO: 2355512 - RNA, 21 nt, Human
agcaccuacaguguacagucu

SEQ ID NO: 2355513 - RNA, 13 nt, Human
agcaccuccugcc

SEQ ID NO: 2355514 - RNA, 14 nt, Human
agcaccuccugccu

SEQ ID NO: 2355515 - RNA, 16 nt, Human
agcaccuccugccucg

SEQ ID NO: 2355516 - RNA, 19 nt, Human
agcaccccaugccaaagcu

SEQ ID NO: 2355517 - RNA, 14 nt, Human
agcaccccucucug

SEQ ID NO: 2355518 - RNA, 15 nt, Human
agcaccccucucugc

SEQ ID NO: 2355519 - RNA, 16 nt, Human
agcaccccucucugca

SEQ ID NO: 2355520 - RNA, 19 nt, Human
agcaccccucucugcaucu

SEQ ID NO: 2355521 - RNA, 13 nt, Human
agcaccccugucu

SEQ ID NO: 2355522 - RNA, 15 nt, Human
agcaccccugucucu

SEQ ID NO: 2355523 - RNA, 12 nt, Human
agcaccccuucc

SEQ ID NO: 2355524 - RNA, 13 nt, Human
agcaccccuucca

SEQ ID NO: 2355525 - RNA, 14 nt, Human
agcaccccuuccau

SEQ ID NO: 2355526 - RNA, 15 nt, Human
agcacccgggcucag

SEQ ID NO: 2355527 - RNA, 17 nt, Human
agcacccgggcucaggg

SEQ ID NO: 2355528 - RNA, 17 nt, Human
agcaccguucugugcac

SEQ ID NO: 2355529 - RNA, 16 nt, Human
agcaccguucugugca

SEQ ID NO: 2355530 - RNA, 15 nt, Human
agcaccguucugugc

SEQ ID NO: 2355531 - RNA, 20 nt, Human
agcacccagcaacuccaacu

SEQ ID NO: 2355532 - RNA, 19 nt, Human
agcaccauccgccagggcc

SEQ ID NO: 2355533 - RNA, 20 nt, Human
agcaccauccgccagggccc

SEQ ID NO: 2355534 - RNA, 14 nt, Human
agcaccccaaggcu

SEQ ID NO: 2355535 - RNA, 16 nt, Human
agcaccaucucuccuc

SEQ ID NO: 2355536 - RNA, 23 nt, Human
agcacaugccucucucaggccaa

SEQ ID NO: 2355537 - RNA, 23 nt, Human
agcaauccauguuaguuuuuacu

SEQ ID NO: 2355538 - RNA, 22 nt, Human
agcaauccauguuaguuuuuac

SEQ ID NO: 2355539 - RNA, 19 nt, Human
agcaauccuagguaggguu

SEQ ID NO: 2355540 - RNA, 14 nt, Human
agcacagcuugacc

SEQ ID NO: 2355541 - RNA, 21 nt, Human
agcacagcuucauuuccugug

SEQ ID NO: 2355542 - RNA, 20 nt, Human
agcaauccauguuaguuuuu

SEQ ID NO: 2355543 - RNA, 17 nt, Human
agcaauccauguuaguu

SEQ ID NO: 2355544 - RNA, 15 nt, Human
agcaauauguaaaua

SEQ ID NO: 2355545 - RNA, 12 nt, Human
agcaauaugcau

SEQ ID NO: 2355546 - RNA, 15 nt, Human
agcaauaucaguuau

SEQ ID NO: 2355547 - RNA, 21 nt, Human
agcaauaucaguuauuuuuug

SEQ ID NO: 2355548 - RNA, 13 nt, Human
agcaagucugcag

SEQ ID NO: 2355549 - RNA, 14 nt, Human
agcaagucugcagg

SEQ ID NO: 2355550 - RNA, 15 nt, Human
agcaagucugcaggu

SEQ ID NO: 2355551 - RNA, 17 nt, Human
agcaagugagagcuggg

SEQ ID NO: 2355552 - RNA, 15 nt, Human
agcaauaaaugaaug

SEQ ID NO: 2355553 - RNA, 14 nt, Human
agcaauaaaugaau

SEQ ID NO: 2355554 - RNA, 13 nt, Human
agcaauaaaugaa

SEQ ID NO: 2355555 - RNA, 14 nt, Human
agcaagugaauuuu

SEQ ID NO: 2355556 - RNA, 19 nt, Human
agcaauaauggucccaucc

SEQ ID NO: 2355557 - RNA, 20 nt, Human
agcaauaauggucccaucca

SEQ ID NO: 2355558 - RNA, 21 nt, Human
agcaauaauggucccauccag

SEQ ID NO: 2355559 - RNA, 23 nt, Human
agcaauaauggucccauccaggc

SEQ ID NO: 2355560 - RNA, 15 nt, Human
agcacaggcagcugg

SEQ ID NO: 2355561 - RNA, 12 nt, Human
agcacaggcagc

SEQ ID NO: 2355562 - RNA, 13 nt, Human
agcacaggcagcu

SEQ ID NO: 2355563 - RNA, 18 nt, Human
agcacagcuugaccugag

SEQ ID NO: 2355564 - RNA, 20 nt, Human
agcacagcuugaccugaggc

SEQ ID NO: 2355565 - RNA, 18 nt, Human
agcacaugccucucucag

SEQ ID NO: 2355566 - RNA, 15 nt, Human
agcacaggugggcuu

SEQ ID NO: 2355567 - RNA, 16 nt, Human
agcacaugccucucuc

SEQ ID NO: 2355568 - RNA, 19 nt, Human
agcacaugccucucucagg

SEQ ID NO: 2355569 - RNA, 20 nt, Human
agcacaugccucucucaggc

SEQ ID NO: 2355570 - RNA, 21 nt, Human
agcacaugccucucucaggcc

SEQ ID NO: 2355571 - RNA, 22 nt, Human
agcacaugccucucucaggcca

SEQ ID NO: 2355572 - RNA, 20 nt, Human
ugacaccuuucauaaucuuu

SEQ ID NO: 2355573 - RNA, 23 nt, Human
ugacaccuuucauaaucuuugcu

SEQ ID NO: 2355574 - RNA, 20 nt, Human
ugacacugcggggcuuggcu

SEQ ID NO: 2355575 - RNA, 18 nt, Human
ugacaccuuugcaggcau

SEQ ID NO: 2355576 - RNA, 19 nt, Human
ugacaccuuugcaggcaug

SEQ ID NO: 2355577 - RNA, 19 nt, Human
ugacacgaauauugcugau

SEQ ID NO: 2355578 - RNA, 23 nt, Human
ugacacugcggggcuuggcugag

SEQ ID NO: 2355579 - RNA, 19 nt, Human
ugacacugguauuccugcc

SEQ ID NO: 2355580 - RNA, 15 nt, Human
ugacagaguucacua

SEQ ID NO: 2355581 - RNA, 15 nt, Human
ugacagaucaagcug

SEQ ID NO: 2355582 - RNA, 20 nt, Human
ugacacugguauuccugccu

SEQ ID NO: 2355583 - RNA, 21 nt, Human
ugacacugguauuccugccuc

SEQ ID NO: 2355584 - RNA, 16 nt, Human
ugacagaucaagcugu

SEQ ID NO: 2355585 - RNA, 17 nt, Human
ugacagaucaagcugug

SEQ ID NO: 2355586 - RNA, 18 nt, Human
ugacagaucaagcuguga

SEQ ID NO: 2355587 - RNA, 19 nt, Human
ugacagaucaagcugugag

SEQ ID NO: 2355588 - RNA, 19 nt, Human
ugacagauguugaaugccc

SEQ ID NO: 2355589 - RNA, 22 nt, Human
ugacagaugucagccgagccgg

SEQ ID NO: 2355590 - RNA, 21 nt, Human
ugacagaucaagcugugagac

SEQ ID NO: 2355591 - RNA, 19 nt, Human
ugacagaugucagccgagc

SEQ ID NO: 2355592 - RNA, 22 nt, Human
ugacagagugagacucugucuc

SEQ ID NO: 2355593 - RNA, 15 nt, Human
ugacacuuaaaaaug

SEQ ID NO: 2355594 - RNA, 13 nt, Human
ugaaugcggccca

SEQ ID NO: 2355595 - RNA, 14 nt, Human
ugaaugccguggau

SEQ ID NO: 2355596 - RNA, 19 nt, Human
ugaaugcccccagcuggcc

SEQ ID NO: 2355597 - RNA, 20 nt, Human
ugaaugcccccagcuggccc

SEQ ID NO: 2355598 - RNA, 11 nt, Human
ugaaugcuggg

SEQ ID NO: 2355599 - RNA, 17 nt, Human
ugaaugccucaauguga

SEQ ID NO: 2355600 - RNA, 12 nt, Human
ugaaugcuggga

SEQ ID NO: 2355601 - RNA, 13 nt, Human
ugaaugcugggac

SEQ ID NO: 2355602 - RNA, 13 nt, Human
ugaaucaauaaua

SEQ ID NO: 2355603 - RNA, 15 nt, Human
ugaaucaauaauaua

SEQ ID NO: 2355604 - RNA, 16 nt, Human
ugaaucaauaauauau

SEQ ID NO: 2355605 - RNA, 17 nt, Human
ugaaucaauaauauauu

SEQ ID NO: 2355606 - RNA, 19 nt, Human
ugaaucaauaauauauuuu

SEQ ID NO: 2355607 - RNA, 20 nt, Human
ugaaucaauaauauauuuuc

SEQ ID NO: 2355608 - RNA, 17 nt, Human
ugaaugcccccagcugg

SEQ ID NO: 2355609 - RNA, 18 nt, Human
ugaaugcccccagcuggc

SEQ ID NO: 2355610 - RNA, 16 nt, Human
ugacacgaauauugcu

SEQ ID NO: 2355611 - RNA, 21 nt, Human
ugacaccgggguggugggaac

SEQ ID NO: 2355612 - RNA, 15 nt, Human
ugacaccugcugaga

SEQ ID NO: 2355613 - RNA, 19 nt, Human
ugaaugcuuauagguggcc

SEQ ID NO: 2355614 - RNA, 19 nt, Human
ugaaugcugggacucagcc

SEQ ID NO: 2355615 - RNA, 14 nt, Human
ugaaugcugggacu

SEQ ID NO: 2355616 - RNA, 15 nt, Human
ugaaugcugggacuc

SEQ ID NO: 2355617 - RNA, 13 nt, Human
ugacauuaacagu

SEQ ID NO: 2355618 - RNA, 17 nt, Human
ugacagguaaauuaaga

SEQ ID NO: 2355619 - RNA, 22 nt, Human
ugacauuaacaguuuuccauga

SEQ ID NO: 2355620 - RNA, 19 nt, Human
ugacauuaacaguuuucca

SEQ ID NO: 2355621 - RNA, 17 nt, Human
ugacauuaacaguuuuc

SEQ ID NO: 2355622 - RNA, 21 nt, Human
ugacauuaacaguuuuccaug

SEQ ID NO: 2355623 - RNA, 12 nt, Human
ugacauucaccu

SEQ ID NO: 2355624 - RNA, 18 nt, Human
ugacauucaccugcccca

SEQ ID NO: 2355625 - RNA, 15 nt, Human
ugacauucaccugcc

SEQ ID NO: 2355626 - RNA, 17 nt, Human
ugacauucaugccuggc

SEQ ID NO: 2355627 - RNA, 22 nt, Human
ugacauucucaggaagccccca

SEQ ID NO: 2355628 - RNA, 15 nt, Human
ugacauucaaggcau

SEQ ID NO: 2355629 - RNA, 15 nt, Human
ugacauucaugccug

SEQ ID NO: 2355630 - RNA, 20 nt, Human
ugacauuccuaaacuaucuu

SEQ ID NO: 2355631 - RNA, 21 nt, Human
ugacauuccuaaacuaucuuu

SEQ ID NO: 2355632 - RNA, 21 nt, Human
ugacauuugggagacauguga

SEQ ID NO: 2355633 - RNA, 22 nt, Human
ugacauuugggagacaugugac

SEQ ID NO: 2355634 - RNA, 23 nt, Human
ugacauuugggagacaugugaca

SEQ ID NO: 2355635 - RNA, 24 nt, Human
ugacauuugggagacaugugacau

SEQ ID NO: 2355636 - RNA, 12 nt, Human
ugacauuucuuu

SEQ ID NO: 2355637 - RNA, 21 nt, Human
ugacauuuauuuuucucauga

SEQ ID NO: 2355638 - RNA, 22 nt, Human
ugacauuuauuuuucucaugaa

SEQ ID NO: 2355639 - RNA, 14 nt, Human
ugacauuucuuugu

SEQ ID NO: 2355640 - RNA, 13 nt, Human
ugacauuucuuug

SEQ ID NO: 2355641 - RNA, 21 nt, Human
ugacauuuggaguguuccccu

SEQ ID NO: 2355642 - RNA, 21 nt, Human
ugacauuuauuuuucauuuag

SEQ ID NO: 2355643 - RNA, 18 nt, Human
ugacauuuauuuuucauu

SEQ ID NO: 2355644 - RNA, 19 nt, Human
ugacauuuauauauugaau

SEQ ID NO: 2355645 - RNA, 20 nt, Human
ugacauuuauauauugaauu

SEQ ID NO: 2355646 - RNA, 12 nt, Human
ugacagccuccc

SEQ ID NO: 2355647 - RNA, 11 nt, Human
ugacagccucc

SEQ ID NO: 2355648 - RNA, 14 nt, Human
ugacagcuuugcug

SEQ ID NO: 2355649 - RNA, 13 nt, Human
ugacagcuuugcu

SEQ ID NO: 2355650 - RNA, 14 nt, Human
ugacagcagguggg

SEQ ID NO: 2355651 - RNA, 17 nt, Human
ugacaggcaaugcuggc

SEQ ID NO: 2355652 - RNA, 19 nt, Human
ugacaggcaaugcuggcug

SEQ ID NO: 2355653 - RNA, 21 nt, Human
ugacagggcacaccgggcacu

SEQ ID NO: 2355654 - RNA, 18 nt, Human
ugacagcuuugcugcuga

SEQ ID NO: 2355655 - RNA, 17 nt, Human
ugacagcuuugcugcug

SEQ ID NO: 2355656 - RNA, 16 nt, Human
ugacagcuuugcugcu

SEQ ID NO: 2355657 - RNA, 15 nt, Human
ugacagcuuugcugc

SEQ ID NO: 2355658 - RNA, 22 nt, Human
ugacagggcacaccgggcacuc

SEQ ID NO: 2355659 - RNA, 15 nt, Human
ugacagguuugggac

SEQ ID NO: 2355660 - RNA, 15 nt, Human
ugacagguaaacuau

SEQ ID NO: 2355661 - RNA, 20 nt, Human
ugacagcuuugcugcugaag

SEQ ID NO: 2355662 - RNA, 21 nt, Human
ugacagcuuugcugcugaagg

SEQ ID NO: 2355663 - RNA, 20 nt, Human
agaugcaaugacucaggaca

SEQ ID NO: 2355664 - RNA, 18 nt, Human
agaugcaaggaccaggac

SEQ ID NO: 2355665 - RNA, 17 nt, Human
agaugcaaggaccagga

SEQ ID NO: 2355666 - RNA, 20 nt, Human
agaugcaaggaccaggacuc

SEQ ID NO: 2355667 - RNA, 18 nt, Human
agaugcaaugugcuacug

SEQ ID NO: 2355668 - RNA, 13 nt, Human
agaugcaagauau

SEQ ID NO: 2355669 - RNA, 19 nt, Human
agaugcaaugugcuacuga

SEQ ID NO: 2355670 - RNA, 18 nt, Human
agaugcaccaccaagcca

SEQ ID NO: 2355671 - RNA, 20 nt, Human
agaugcaguucugaagaaga

SEQ ID NO: 2355672 - RNA, 19 nt, Human
agaugcuagaacucccuuu

SEQ ID NO: 2355673 - RNA, 20 nt, Human
agaugcaccaccaagccaag

SEQ ID NO: 2355674 - RNA, 22 nt, Human
agaugcauucuugguuggcugg

SEQ ID NO: 2355675 - RNA, 21 nt, Human
agaugcaguucugaagaagau

SEQ ID NO: 2355676 - RNA, 21 nt, Human
agaugcuggaugucugccaau

SEQ ID NO: 2355677 - RNA, 22 nt, Human
agauguagccccucuccuggaa

SEQ ID NO: 2355678 - RNA, 21 nt, Human
agauguagccccucuccugga

SEQ ID NO: 2355679 - RNA, 19 nt, Human
agaugcuggcccagggccc

SEQ ID NO: 2355680 - RNA, 18 nt, Human
agaugcuggcccagggcc

SEQ ID NO: 2355681 - RNA, 17 nt, Human
agaugcuggcccagggc

SEQ ID NO: 2355682 - RNA, 16 nt, Human
agaugcuggcccaggg

SEQ ID NO: 2355683 - RNA, 15 nt, Human
agaugcuggcccagg

SEQ ID NO: 2355684 - RNA, 14 nt, Human
agaugcuggcccag

SEQ ID NO: 2355685 - RNA, 16 nt, Human
agaugcugauguucag

SEQ ID NO: 2355686 - RNA, 21 nt, Human
agaugcuagaacucccuuuca

SEQ ID NO: 2355687 - RNA, 17 nt, Human
agaugcugauguucagu

SEQ ID NO: 2355688 - RNA, 18 nt, Human
agaugcugauguucagug

SEQ ID NO: 2355689 - RNA, 19 nt, Human
agaugcugauguucagugu

SEQ ID NO: 2355690 - RNA, 20 nt, Human
agaugcugauguucagugua

SEQ ID NO: 2355691 - RNA, 21 nt, Human
agaugcugauguucaguguaa

SEQ ID NO: 2355692 - RNA, 22 nt, Human
agaugcugauguucaguguaau

SEQ ID NO: 2355693 - RNA, 11 nt, Human
agaugcuggag

SEQ ID NO: 2355694 - RNA, 13 nt, Human
agaugcuggagaa

SEQ ID NO: 2355695 - RNA, 16 nt, Human
agaugcuggagaagag

SEQ ID NO: 2355696 - RNA, 17 nt, Human
agaugcuggagaagaga

SEQ ID NO: 2355697 - RNA, 18 nt, Human
agaugcuggagaagagag

SEQ ID NO: 2355698 - RNA, 19 nt, Human
agaugcuggagaagagagg

SEQ ID NO: 2355699 - RNA, 20 nt, Human
agaugcuggagaagagagga

SEQ ID NO: 2355700 - RNA, 21 nt, Human
agaugcuggagaagagaggag

SEQ ID NO: 2355701 - RNA, 22 nt, Human
agaugcuggagaagagaggaga

SEQ ID NO: 2355702 - RNA, 16 nt, Human
agaucguucucugccu

SEQ ID NO: 2355703 - RNA, 18 nt, Human
agauccugcggguggggc

SEQ ID NO: 2355704 - RNA, 22 nt, Human
agaucgugccguuacucuccaa

SEQ ID NO: 2355705 - RNA, 14 nt, Human
agauccuggaaauc

SEQ ID NO: 2355706 - RNA, 17 nt, Human
agauccugcgggugggg

SEQ ID NO: 2355707 - RNA, 12 nt, Human
agauccuccugc

SEQ ID NO: 2355708 - RNA, 13 nt, Human
agauccuggaaau

SEQ ID NO: 2355709 - RNA, 15 nt, Human
agaugcaaggaccag

SEQ ID NO: 2355710 - RNA, 14 nt, Human
agaucuccuggcaa

SEQ ID NO: 2355711 - RNA, 20 nt, Human
agaugcaaagaggcaagagg

SEQ ID NO: 2355712 - RNA, 18 nt, Human
agaucuccuggcaaaggc

SEQ ID NO: 2355713 - RNA, 18 nt, Human
agaucucuaacuucacca

SEQ ID NO: 2355714 - RNA, 19 nt, Human
agaucuaggugaggauuga

SEQ ID NO: 2355715 - RNA, 22 nt, Human
agaucuaaggaugucacagggc

SEQ ID NO: 2355716 - RNA, 16 nt, Human
agaucguuaguaucua

SEQ ID NO: 2355717 - RNA, 17 nt, Human
agaucguuaguaucuaa

SEQ ID NO: 2355718 - RNA, 20 nt, Human
agaucuaagccuuuccauaa

SEQ ID NO: 2355719 - RNA, 22 nt, Human
agaucccgccucuucuucuuca

SEQ ID NO: 2355720 - RNA, 13 nt, Human
agauccuaaaaca

SEQ ID NO: 2355721 - RNA, 22 nt, Human
agauccuaaaacaaaagcucau

SEQ ID NO: 2355722 - RNA, 19 nt, Human
agaucccgccucuucuucu

SEQ ID NO: 2355723 - RNA, 15 nt, Human
agaucccgccucuuc

SEQ ID NO: 2355724 - RNA, 15 nt, Human
agauccccucaggac

SEQ ID NO: 2355725 - RNA, 22 nt, Human
agauccuaccccaauuccuugu

SEQ ID NO: 2355726 - RNA, 16 nt, Human
agauccuaaaacaaaa

SEQ ID NO: 2355727 - RNA, 13 nt, Human
agaucccagcuca

SEQ ID NO: 2355728 - RNA, 11 nt, Human
agauccccuca

SEQ ID NO: 2355729 - RNA, 14 nt, Human
agaucccccagacu

SEQ ID NO: 2355730 - RNA, 18 nt, Human
agauccccaagccuggca

SEQ ID NO: 2355731 - RNA, 22 nt, Human
agaucccagaaggaccuccuga

SEQ ID NO: 2355732 - RNA, 20 nt, Human
ugaccaaguuauaaaucaau

SEQ ID NO: 2355733 - RNA, 16 nt, Human
ugaccaaguuauaaau

SEQ ID NO: 2355734 - RNA, 13 nt, Human
ugaccaaguuaua

SEQ ID NO: 2355735 - RNA, 21 nt, Human
ugaccaagcaggaagcucaga

SEQ ID NO: 2355736 - RNA, 19 nt, Human
ugaccaagcaggaagcuca

SEQ ID NO: 2355737 - RNA, 18 nt, Human
ugaccaagcaggaagcuc

SEQ ID NO: 2355738 - RNA, 17 nt, Human
ugaccaagcaggaagcu

SEQ ID NO: 2355739 - RNA, 16 nt, Human
ugaccaagcaggaagc

SEQ ID NO: 2355740 - RNA, 15 nt, Human
ugaccaagcaggaag

SEQ ID NO: 2355741 - RNA, 18 nt, Human
ugaccaagagagaaagaa

SEQ ID NO: 2355742 - RNA, 17 nt, Human
ugaccaagagagaaaga

SEQ ID NO: 2355743 - RNA, 16 nt, Human
ugaccaagagagaaag

SEQ ID NO: 2355744 - RNA, 14 nt, Human
ugaccaagcaggaa

SEQ ID NO: 2355745 - RNA, 15 nt, Human
ugaccaagagagaaa

SEQ ID NO: 2355746 - RNA, 20 nt, Human
ugaccaacuagacauucugu

SEQ ID NO: 2355747 - RNA, 21 nt, Human
ugaccaacuagacauucuguc

SEQ ID NO: 2355748 - RNA, 22 nt, Human
ugaccaacuagacauucugucg

SEQ ID NO: 2355749 - RNA, 15 nt, Human
ugaccaacuagacau

SEQ ID NO: 2355750 - RNA, 16 nt, Human
ugaccaacuagacauu

SEQ ID NO: 2355751 - RNA, 18 nt, Human
ugaccaacuagacauucu

SEQ ID NO: 2355752 - RNA, 23 nt, Human
ugaccaacauggagaaacccugu

SEQ ID NO: 2355753 - RNA, 14 nt, Human
agauuaccuccuga

SEQ ID NO: 2355754 - RNA, 16 nt, Human
agauuacuuagaggaa

SEQ ID NO: 2355755 - RNA, 16 nt, Human
agauuaagagccauau

SEQ ID NO: 2355756 - RNA, 16 nt, Human
ugacuuagcagaugcu

SEQ ID NO: 2355757 - RNA, 20 nt, Human
ugacuuacuguacaugaaaa

SEQ ID NO: 2355758 - RNA, 12 nt, Human
ugacuuacugua

SEQ ID NO: 2355759 - RNA, 16 nt, Human
agauucauauuuacuu

SEQ ID NO: 2355760 - RNA, 13 nt, Human
agauucauauuua

SEQ ID NO: 2355761 - RNA, 18 nt, Human
agauucagguauguugcc

SEQ ID NO: 2355762 - RNA, 20 nt, Human
agauucagguauguugccuu

SEQ ID NO: 2355763 - RNA, 21 nt, Human
agauuacccccucauuguuua

SEQ ID NO: 2355764 - RNA, 15 nt, Human
agauuagaagcugaa

SEQ ID NO: 2355765 - RNA, 14 nt, Human
agauuagagggagg

SEQ ID NO: 2355766 - RNA, 15 nt, Human
agauuagaucuuuua

SEQ ID NO: 2355767 - RNA, 14 nt, Human
agauuagcucugga

SEQ ID NO: 2355768 - RNA, 15 nt, Human
agauuagcucuggac

SEQ ID NO: 2355769 - RNA, 17 nt, Human
agauuagcucuggacca

SEQ ID NO: 2355770 - RNA, 16 nt, Human
agauuagaucuuuuaa

SEQ ID NO: 2355771 - RNA, 21 nt, Human
agauuagaaugaaaauuguau

SEQ ID NO: 2355772 - RNA, 18 nt, Human
agauuagagggagguguu

SEQ ID NO: 2355773 - RNA, 14 nt, Human
agauuauacagaau

SEQ ID NO: 2355774 - RNA, 17 nt, Human
agauuauacagaauugu

SEQ ID NO: 2355775 - RNA, 13 nt, Human
agauuauaacuug

SEQ ID NO: 2355776 - RNA, 14 nt, Human
agauuauaacuugu

SEQ ID NO: 2355777 - RNA, 18 nt, Human
agauuauaacuugucuaa

SEQ ID NO: 2355778 - RNA, 13 nt, Human
agauucccagaga

SEQ ID NO: 2355779 - RNA, 12 nt, Human
agauucccagag

SEQ ID NO: 2355780 - RNA, 13 nt, Human
agauucccagagc

SEQ ID NO: 2355781 - RNA, 19 nt, Human
agauucauauuuacuucuu

SEQ ID NO: 2355782 - RNA, 21 nt, Human
agauuccagagaguggcuccu

SEQ ID NO: 2355783 - RNA, 22 nt, Human
agauuccagagaguggcuccuc

SEQ ID NO: 2355784 - RNA, 19 nt, Human
agauuccagagaguggcuc

SEQ ID NO: 2355785 - RNA, 19 nt, Human
agauucagguauguugccu

SEQ ID NO: 2355786 - RNA, 13 nt, Human
agauuguguaaca

SEQ ID NO: 2355787 - RNA, 15 nt, Human
agauuguguaacaau

SEQ ID NO: 2355788 - RNA, 21 nt, Human
agauuguguaacaauuuuaau

SEQ ID NO: 2355789 - RNA, 15 nt, Human
agauuguuaaaauaa

SEQ ID NO: 2355790 - RNA, 14 nt, Human
agauuguuaaaaua

SEQ ID NO: 2355791 - RNA, 14 nt, Human
agauucccagagac

SEQ ID NO: 2355792 - RNA, 16 nt, Human
agauucccagagcaaa

SEQ ID NO: 2355793 - RNA, 15 nt, Human
agauuguuguuugcc

SEQ ID NO: 2355794 - RNA, 16 nt, Human
agauuguuguuugcca

SEQ ID NO: 2355795 - RNA, 22 nt, Human
agauuguuguuugccauacuuu

SEQ ID NO: 2355796 - RNA, 23 nt, Human
agauuguuguuugccauacuuug

SEQ ID NO: 2355797 - RNA, 23 nt, Human
agauuguuuuaucaugacauguu

SEQ ID NO: 2355798 - RNA, 22 nt, Human
agauuguuuuaucaugacaugu

SEQ ID NO: 2355799 - RNA, 19 nt, Human
agauuuuaaauucacaaua

SEQ ID NO: 2355800 - RNA, 13 nt, Human
agauuuuaaauuc

SEQ ID NO: 2355801 - RNA, 22 nt, Human
agauuuuaaauucacaauagaa

SEQ ID NO: 2355802 - RNA, 19 nt, Human
agauuuuaaucaaguugaa

SEQ ID NO: 2355803 - RNA, 14 nt, Human
agauuuuaauuuug

SEQ ID NO: 2355804 - RNA, 17 nt, Human
agauuuuaauuuugaau

SEQ ID NO: 2355805 - RNA, 21 nt, Human
agauuuuaauuuugaauaaau

SEQ ID NO: 2355806 - RNA, 23 nt, Human
agauuucaucugcucuccuuccu

SEQ ID NO: 2355807 - RNA, 13 nt, Human
agauuuguguuau

SEQ ID NO: 2355808 - RNA, 12 nt, Human
agauuuuaaaga

SEQ ID NO: 2355809 - RNA, 17 nt, Human
agauuuuaaaaagucuu

SEQ ID NO: 2355810 - RNA, 17 nt, Human
agauuucacucuccuug

SEQ ID NO: 2355811 - RNA, 19 nt, Human
agauuucacucuccuuggu

SEQ ID NO: 2355812 - RNA, 13 nt, Human
agauuucaucugc

SEQ ID NO: 2355813 - RNA, 15 nt, Human
agauuucaucugcuc

SEQ ID NO: 2355814 - RNA, 18 nt, Human
agauuucaucugcucucc

SEQ ID NO: 2355815 - RNA, 19 nt, Human
agauuucaucugcucuccu

SEQ ID NO: 2355816 - RNA, 20 nt, Human
agauuucaucugcucuccuu

SEQ ID NO: 2355817 - RNA, 21 nt, Human
agauuucaucugcucuccuuc

SEQ ID NO: 2355818 - RNA, 16 nt, Human
ugaccuugcaacuuca

SEQ ID NO: 2355819 - RNA, 15 nt, Human
ugaccuuuaagagaa

SEQ ID NO: 2355820 - RNA, 12 nt, Human
ugaccugucacc

SEQ ID NO: 2355821 - RNA, 15 nt, Human
ugaccugucaugccc

SEQ ID NO: 2355822 - RNA, 16 nt, Human
ugaccugucaugcccc

SEQ ID NO: 2355823 - RNA, 19 nt, Human
ugaccugucaugccccccu

SEQ ID NO: 2355824 - RNA, 22 nt, Human
ugaccuggauaacuuagguggc

SEQ ID NO: 2355825 - RNA, 21 nt, Human
ugaccugccucccuucaugca

SEQ ID NO: 2355826 - RNA, 23 nt, Human
ugaccugccucccuucaugcaug

SEQ ID NO: 2355827 - RNA, 19 nt, Human
ugaccugccucccuucaug

SEQ ID NO: 2355828 - RNA, 17 nt, Human
ugaccugccucccuuca

SEQ ID NO: 2355829 - RNA, 21 nt, Human
ugaccugcuggguaaacugug

SEQ ID NO: 2355830 - RNA, 19 nt, Human
ugaccugccaggcacacug

SEQ ID NO: 2355831 - RNA, 16 nt, Human
ugaccugccaggcaca

SEQ ID NO: 2355832 - RNA, 19 nt, Human
ugaccugccccgcccagcu

SEQ ID NO: 2355833 - RNA, 13 nt, Human
ugaccugccccgc

SEQ ID NO: 2355834 - RNA, 20 nt, Human
ugaccugccccgcccagcug

SEQ ID NO: 2355835 - RNA, 16 nt, Human
ugaccugccucccuuc

SEQ ID NO: 2355836 - RNA, 17 nt, Human
agaugugauaaggauca

SEQ ID NO: 2355837 - RNA, 22 nt, Human
agaugugaacacaucagcuugc

SEQ ID NO: 2355838 - RNA, 15 nt, Human
agaugucuuuaggca

SEQ ID NO: 2355839 - RNA, 23 nt, Human
agaugucuuuaggcagcagcuuu

SEQ ID NO: 2355840 - RNA, 13 nt, Human
agaugucuuuagg

SEQ ID NO: 2355841 - RNA, 17 nt, Human
agaugugaacacaucag

SEQ ID NO: 2355842 - RNA, 22 nt, Human
agauguauguacuucaugcugu

SEQ ID NO: 2355843 - RNA, 19 nt, Human
agaugucuucugccuguua

SEQ ID NO: 2355844 - RNA, 20 nt, Human
ugacuauugaaguugcagau

SEQ ID NO: 2355845 - RNA, 22 nt, Human
ugacuaucaaacugaagccaga

SEQ ID NO: 2355846 - RNA, 16 nt, Human
ugacuaucaaacugaa

SEQ ID NO: 2355847 - RNA, 14 nt, Human
ugacuauauagaga

SEQ ID NO: 2355848 - RNA, 16 nt, Human
ugacuauauagagaug

SEQ ID NO: 2355849 - RNA, 17 nt, Human
ugacuauauagagaugu

SEQ ID NO: 2355850 - RNA, 18 nt, Human
ugacuauauagagauguu

SEQ ID NO: 2355851 - RNA, 19 nt, Human
ugacuauauagagauguuu

SEQ ID NO: 2355852 - RNA, 21 nt, Human
ugacuauauagagauguuuuu

SEQ ID NO: 2355853 - RNA, 12 nt, Human
ugaccuuucaau

SEQ ID NO: 2355854 - RNA, 21 nt, Human
ugaccuuguaccucucuuuga

SEQ ID NO: 2355855 - RNA, 13 nt, Human
ugaccuuucaaua

SEQ ID NO: 2355856 - RNA, 19 nt, Human
ugacuauuuuucagaaucu

SEQ ID NO: 2355857 - RNA, 14 nt, Human
ugacucgguuucuc

SEQ ID NO: 2355858 - RNA, 15 nt, Human
ugacucgguuucucc

SEQ ID NO: 2355859 - RNA, 16 nt, Human
ugacucgguuucucca

SEQ ID NO: 2355860 - RNA, 21 nt, Human
ugacucguauaugucucaggu

SEQ ID NO: 2355861 - RNA, 18 nt, Human
ugacucgguuucuccaaa

SEQ ID NO: 2355862 - RNA, 18 nt, Human
ugacucggggguggggaa

SEQ ID NO: 2355863 - RNA, 15 nt, Human
ugacucgucugacug

SEQ ID NO: 2355864 - RNA, 13 nt, Human
ugacucucaaauc

SEQ ID NO: 2355865 - RNA, 16 nt, Human
ugacucgucugacugu

SEQ ID NO: 2355866 - RNA, 20 nt, Human
ugacucgucugacugugugu

SEQ ID NO: 2355867 - RNA, 15 nt, Human
ugacucgugcugcau

SEQ ID NO: 2355868 - RNA, 15 nt, Human
ugacucucugugacc

SEQ ID NO: 2355869 - RNA, 13 nt, Human
ugacucucuguga

SEQ ID NO: 2355870 - RNA, 14 nt, Human
ugacucucaaaucu

SEQ ID NO: 2355871 - RNA, 11 nt, Human
ugacucugaaa

SEQ ID NO: 2355872 - RNA, 14 nt, Human
ugacucugaaaucu

SEQ ID NO: 2355873 - RNA, 15 nt, Human
ugacucugaaaucug

SEQ ID NO: 2355874 - RNA, 21 nt, Human
ugacuguuuucucuugagagg

SEQ ID NO: 2355875 - RNA, 17 nt, Human
ugacuguuuuuguagug

SEQ ID NO: 2355876 - RNA, 16 nt, Human
ugacuuaacugcauuu

SEQ ID NO: 2355877 - RNA, 18 nt, Human
ugacuguuuuuacccaua

SEQ ID NO: 2355878 - RNA, 16 nt, Human
ugacuguuuuuaccca

SEQ ID NO: 2355879 - RNA, 17 nt, Human
ugacuguuuuuacccau

SEQ ID NO: 2355880 - RNA, 16 nt, Human
ugacucugaaaucuga

SEQ ID NO: 2355881 - RNA, 15 nt, Human
ugacuguuuuuaccc

SEQ ID NO: 2355882 - RNA, 13 nt, Human
ucuauagacucua

SEQ ID NO: 2355883 - RNA, 17 nt, Human
ucuauagaacugaauga

SEQ ID NO: 2355884 - RNA, 20 nt, Human
ucuauaccugucuccuuucu

SEQ ID NO: 2355885 - RNA, 16 nt, Human
ucuauagacucuagga

SEQ ID NO: 2355886 - RNA, 17 nt, Human
ucuauagcaccagggcu

SEQ ID NO: 2355887 - RNA, 23 nt, Human
ucuaugggacucaaugcacugac

SEQ ID NO: 2355888 - RNA, 16 nt, Human
ucuauguauauacauu

SEQ ID NO: 2355889 - RNA, 19 nt, Human
ucuauguaaaugcaucugu

SEQ ID NO: 2355890 - RNA, 17 nt, Human
ucuaugugcuuguaaaa

SEQ ID NO: 2355891 - RNA, 22 nt, Human
ucuauguuuacaaauggacaua

SEQ ID NO: 2355892 - RNA, 13 nt, Human
ucuauucucucca

SEQ ID NO: 2355893 - RNA, 16 nt, Human
ucuauucuccagcuga

SEQ ID NO: 2355894 - RNA, 16 nt, Human
ucuauugauguacagu

SEQ ID NO: 2355895 - RNA, 13 nt, Human
ucuauugaaaaau

SEQ ID NO: 2355896 - RNA, 23 nt, Human
ucuauugcaguuauagaaaaucu

SEQ ID NO: 2355897 - RNA, 22 nt, Human
ucuauugacuucaaugauagua

SEQ ID NO: 2355898 - RNA, 20 nt, Human
ucuauugauguacagucugu

SEQ ID NO: 2355899 - RNA, 12 nt, Human
ucuauucagcuu

SEQ ID NO: 2355900 - RNA, 19 nt, Human
ucuauuauacuguauuaag

SEQ ID NO: 2355901 - RNA, 22 nt, Human
ucuauuauacuguauuaagagu

SEQ ID NO: 2355902 - RNA, 16 nt, Human
ucuauucagacaagca

SEQ ID NO: 2355903 - RNA, 14 nt, Human
ucuauuauacugua

SEQ ID NO: 2355904 - RNA, 15 nt, Human
ucuauuauacuguau

SEQ ID NO: 2355905 - RNA, 16 nt, Human
ucuauuaagauuucca

SEQ ID NO: 2355906 - RNA, 17 nt, Human
ucuauuaagauuuccaa

SEQ ID NO: 2355907 - RNA, 18 nt, Human
ucuauuaagauuuccaag

SEQ ID NO: 2355908 - RNA, 19 nt, Human
ucuauguauauacauuuau

SEQ ID NO: 2355909 - RNA, 18 nt, Human
ucuauuuauauguacaug

SEQ ID NO: 2355910 - RNA, 13 nt, Human
ucuauuuagcaug

SEQ ID NO: 2355911 - RNA, 13 nt, Human
ucuauuuauaugu

SEQ ID NO: 2355912 - RNA, 15 nt, Human
ucuauuuauuuacug

SEQ ID NO: 2355913 - RNA, 22 nt, Human
ucuauuuauuuacugagcuucu

SEQ ID NO: 2355914 - RNA, 15 nt, Human
ucuauuuauguuugc

SEQ ID NO: 2355915 - RNA, 13 nt, Human
ucuauuuauguuu

SEQ ID NO: 2355916 - RNA, 15 nt, Human
ucuauuuaaguaaaa

SEQ ID NO: 2355917 - RNA, 17 nt, Human
ucuauugcuggcaaaga

SEQ ID NO: 2355918 - RNA, 12 nt, Human
ucuauuuaauau

SEQ ID NO: 2355919 - RNA, 13 nt, Human
ucuauuuaauauu

SEQ ID NO: 2355920 - RNA, 22 nt, Human
ucuauugcuggcaaagacagaa

SEQ ID NO: 2355921 - RNA, 15 nt, Human
ucuauuuuggauugu

SEQ ID NO: 2355922 - RNA, 16 nt, Human
ucuauuuucauuuucu

SEQ ID NO: 2355923 - RNA, 16 nt, Human
ucuauuuggaauuuau

SEQ ID NO: 2355924 - RNA, 12 nt, Human
ucuauuuggaau

SEQ ID NO: 2355925 - RNA, 13 nt, Human
ucuauuuggaauu

SEQ ID NO: 2355926 - RNA, 19 nt, Human
ucucaccccaucccacacc

SEQ ID NO: 2355927 - RNA, 17 nt, Human
ucucaccccaucccaca

SEQ ID NO: 2355928 - RNA, 21 nt, Human
ucucaccccaucccacacccu

SEQ ID NO: 2355929 - RNA, 16 nt, Human
ucucaccgcagucguc

SEQ ID NO: 2355930 - RNA, 15 nt, Human
ucucaccccauccca

SEQ ID NO: 2355931 - RNA, 18 nt, Human
ucuauuuuggauuguaua

SEQ ID NO: 2355932 - RNA, 17 nt, Human
ucuauuuuguaaacuca

SEQ ID NO: 2355933 - RNA, 24 nt, Human
ucuauuuuguaacuuucucuauga

SEQ ID NO: 2355934 - RNA, 17 nt, Human
ucucacuauguugccca

SEQ ID NO: 2355935 - RNA, 19 nt, Human
ucucacuauguugcccagg

SEQ ID NO: 2355936 - RNA, 16 nt, Human
ucucacuauguugccc

SEQ ID NO: 2355937 - RNA, 12 nt, Human
acuuccccuccu

SEQ ID NO: 2355938 - RNA, 16 nt, Human
acuuccccuccuaccc

SEQ ID NO: 2355939 - RNA, 16 nt, Human
acuucaucccucuggg

SEQ ID NO: 2355940 - RNA, 17 nt, Human
acuucauagauuuccuu

SEQ ID NO: 2355941 - RNA, 18 nt, Human
acuucauauaugaggacu

SEQ ID NO: 2355942 - RNA, 22 nt, Human
acuucauauugcugagagaaau

SEQ ID NO: 2355943 - RNA, 14 nt, Human
acuucauauugcug

SEQ ID NO: 2355944 - RNA, 24 nt, Human
acuucauauugcugagagaaauau

SEQ ID NO: 2355945 - RNA, 19 nt, Human
acuuccccuuccuaauucc

SEQ ID NO: 2355946 - RNA, 13 nt, Human
acuuccccuuccu

SEQ ID NO: 2355947 - RNA, 20 nt, Human
acuucccgucccauauccug

SEQ ID NO: 2355948 - RNA, 17 nt, Human
acuuccccuccuacccc

SEQ ID NO: 2355949 - RNA, 21 nt, Human
acuuccccuccuaccccuccc

SEQ ID NO: 2355950 - RNA, 22 nt, Human
acuucccgucccauauccugcc

SEQ ID NO: 2355951 - RNA, 23 nt, Human
acuucccgucccauauccugccu

SEQ ID NO: 2355952 - RNA, 17 nt, Human
acuucccucaucucucc

SEQ ID NO: 2355953 - RNA, 14 nt, Human
acuucccucuguuu

SEQ ID NO: 2355954 - RNA, 17 nt, Human
ucuagacaacccugcaa

SEQ ID NO: 2355955 - RNA, 14 nt, Human
ucuagacacugcca

SEQ ID NO: 2355956 - RNA, 24 nt, Human
ucuagacucaagguucccagagau

SEQ ID NO: 2355957 - RNA, 13 nt, Human
ucuagacaacccu

SEQ ID NO: 2355958 - RNA, 19 nt, Human
ucuagaauuuuaagugcuu

SEQ ID NO: 2355959 - RNA, 14 nt, Human
acuucccugggcaa

SEQ ID NO: 2355960 - RNA, 20 nt, Human
acuucccucuguuucucuuu

SEQ ID NO: 2355961 - RNA, 13 nt, Human
acuucccugggca

SEQ ID NO: 2355962 - RNA, 22 nt, Human
acuucccugacacugcggggcu

SEQ ID NO: 2355963 - RNA, 20 nt, Human
ucuagagauaguacauaaag

SEQ ID NO: 2355964 - RNA, 16 nt, Human
ucuagagauaguacau

SEQ ID NO: 2355965 - RNA, 23 nt, Human
ucuagagagggaggcaagcccug

SEQ ID NO: 2355966 - RNA, 15 nt, Human
ucuagagcagggauu

SEQ ID NO: 2355967 - RNA, 13 nt, Human
ucuagagagggag

SEQ ID NO: 2355968 - RNA, 16 nt, Human
ucuagagaagaggcug

SEQ ID NO: 2355969 - RNA, 13 nt, Human
ucuagacuuucug

SEQ ID NO: 2355970 - RNA, 14 nt, Human
ucuagacuuucugu

SEQ ID NO: 2355971 - RNA, 15 nt, Human
ucuagacuuucuguu

SEQ ID NO: 2355972 - RNA, 13 nt, Human
ucuagagaagagg

SEQ ID NO: 2355973 - RNA, 20 nt, Human
ucuagagccgugaugccucc

SEQ ID NO: 2355974 - RNA, 17 nt, Human
ucuagagcuugaugcca

SEQ ID NO: 2355975 - RNA, 16 nt, Human
ucuagaggcuuccuuc

SEQ ID NO: 2355976 - RNA, 21 nt, Human
ucuagaggcuuccuucauuuc

SEQ ID NO: 2355977 - RNA, 13 nt, Human
ucuagauacugua

SEQ ID NO: 2355978 - RNA, 18 nt, Human
ucuagcauggcugccaau

SEQ ID NO: 2355979 - RNA, 15 nt, Human
ucuauaacaugcauu

SEQ ID NO: 2355980 - RNA, 16 nt, Human
ucuauaaauuguccgu

SEQ ID NO: 2355981 - RNA, 22 nt, Human
ucuauaaggccauaaaacaggu

SEQ ID NO: 2355982 - RNA, 16 nt, Human
ucuauaaggccauaaa

SEQ ID NO: 2355983 - RNA, 14 nt, Human
ucuauaaggccaua

SEQ ID NO: 2355984 - RNA, 13 nt, Human
ucuauaaggccau

SEQ ID NO: 2355985 - RNA, 20 nt, Human
ucuauaaagaagaacuugca

SEQ ID NO: 2355986 - RNA, 13 nt, Human
ucuauaaauaacc

SEQ ID NO: 2355987 - RNA, 18 nt, Human
ucuaguugcuuguaaaau

SEQ ID NO: 2355988 - RNA, 22 nt, Human
ucuaguuuaauuaaucuguaau

SEQ ID NO: 2355989 - RNA, 23 nt, Human
ucuaguuguuugauucagacagc

SEQ ID NO: 2355990 - RNA, 21 nt, Human
ucuaguuugauuaaauucuug

SEQ ID NO: 2355991 - RNA, 22 nt, Human
ucuaguuugauuaaauucuugc

SEQ ID NO: 2355992 - RNA, 14 nt, Human
ucuaguuucuugug

SEQ ID NO: 2355993 - RNA, 13 nt, Human
ucuaguuucccac

SEQ ID NO: 2355994 - RNA, 14 nt, Human
ucuaguuucccaca

SEQ ID NO: 2355995 - RNA, 22 nt, Human
ucuaguuguuugauucagacag

SEQ ID NO: 2355996 - RNA, 13 nt, Human
ucuaguucuuugu

SEQ ID NO: 2355997 - RNA, 12 nt, Human
ucuaggaagacu

SEQ ID NO: 2355998 - RNA, 13 nt, Human
ucuagccagagga

SEQ ID NO: 2355999 - RNA, 16 nt, Human
ucuaggaaauauuuau

SEQ ID NO: 2356000 - RNA, 16 nt, Human
ucuagccaaaugguuu

SEQ ID NO: 2356001 - RNA, 15 nt, Human
ucuaggaagaauuuu

SEQ ID NO: 2356002 - RNA, 23 nt, Human
ucuagccacuuuggucccgugca

SEQ ID NO: 2356003 - RNA, 20 nt, Human
ucuaggaagaauuuuaaaaa

SEQ ID NO: 2356004 - RNA, 22 nt, Human
ucuaggaagaauuuuaaaaaug

SEQ ID NO: 2356005 - RNA, 23 nt, Human
ucuaggaagaauuuuaaaaauga

SEQ ID NO: 2356006 - RNA, 17 nt, Human
ucuaggaaauauuuauu

SEQ ID NO: 2356007 - RNA, 18 nt, Human
acuguucccaccugcugg

SEQ ID NO: 2356008 - RNA, 16 nt, Human
acuguucccccugugc

SEQ ID NO: 2356009 - RNA, 15 nt, Human
acuguucccccugug

SEQ ID NO: 2356010 - RNA, 21 nt, Human
acuguuauuuauaaucacuuu

SEQ ID NO: 2356011 - RNA, 13 nt, Human
acuguucaagagc

SEQ ID NO: 2356012 - RNA, 15 nt, Human
acuguucaagagcac

SEQ ID NO: 2356013 - RNA, 16 nt, Human
acuguucaagagcaca

SEQ ID NO: 2356014 - RNA, 16 nt, Human
acuguucucugcccuc

SEQ ID NO: 2356015 - RNA, 17 nt, Human
acuguucucugcccucc

SEQ ID NO: 2356016 - RNA, 19 nt, Human
acuguucucugcccuccaa

SEQ ID NO: 2356017 - RNA, 18 nt, Human
acuguucccccugugcag

SEQ ID NO: 2356018 - RNA, 14 nt, Human
acuguuccagccug

SEQ ID NO: 2356019 - RNA, 15 nt, Human
acuguucccucugcu

SEQ ID NO: 2356020 - RNA, 18 nt, Human
acuguucucugcccucca

SEQ ID NO: 2356021 - RNA, 16 nt, Human
acuguucccucugcuc

SEQ ID NO: 2356022 - RNA, 18 nt, Human
acuguucccucugcuccu

SEQ ID NO: 2356023 - RNA, 13 nt, Human
acuguucuugaau

SEQ ID NO: 2356024 - RNA, 16 nt, Human
ucuacccagggccugc

SEQ ID NO: 2356025 - RNA, 13 nt, Human
ucuacccagggcc

SEQ ID NO: 2356026 - RNA, 21 nt, Human
ucuacccuggcacuauaaugu

SEQ ID NO: 2356027 - RNA, 20 nt, Human
acuguuauuuauaaucacuu

SEQ ID NO: 2356028 - RNA, 17 nt, Human
acuguuauuuauaauca

SEQ ID NO: 2356029 - RNA, 15 nt, Human
acuguuauuuauaau

SEQ ID NO: 2356030 - RNA, 14 nt, Human
acuguuauuuauaa

SEQ ID NO: 2356031 - RNA, 15 nt, Human
ucuaccucaggcagc

SEQ ID NO: 2356032 - RNA, 14 nt, Human
ucuacccuggcacu

SEQ ID NO: 2356033 - RNA, 19 nt, Human
ucuacccuggcacuauaau

SEQ ID NO: 2356034 - RNA, 20 nt, Human
ucuacccagcgagcccuggu

SEQ ID NO: 2356035 - RNA, 14 nt, Human
ucuacccaggugcu

SEQ ID NO: 2356036 - RNA, 23 nt, Human
uccugggagaaccucaggcuucc

SEQ ID NO: 2356037 - RNA, 13 nt, Human
uccugggaugugg

SEQ ID NO: 2356038 - RNA, 17 nt, Human
uccugggauguggcugc

SEQ ID NO: 2356039 - RNA, 18 nt, Human
uccugggauguggcugca

SEQ ID NO: 2356040 - RNA, 22 nt, Human
uccugggauguggcugcagcag

SEQ ID NO: 2356041 - RNA, 11 nt, Human
uccugggcaca

SEQ ID NO: 2356042 - RNA, 18 nt, Human
uccugggagugagcuggu

SEQ ID NO: 2356043 - RNA, 14 nt, Human
ucuaagguucucau

SEQ ID NO: 2356044 - RNA, 18 nt, Human
ucuaagguucucauagga

SEQ ID NO: 2356045 - RNA, 20 nt, Human
ucuaaguaaaaccacagcag

SEQ ID NO: 2356046 - RNA, 19 nt, Human
ucuaaguaaaaccacagca

SEQ ID NO: 2356047 - RNA, 15 nt, Human
ucuaaguaaaaccac

SEQ ID NO: 2356048 - RNA, 14 nt, Human
ucuaaguaaaacca

SEQ ID NO: 2356049 - RNA, 21 nt, Human
ucuacagaggccaugggccuc

SEQ ID NO: 2356050 - RNA, 14 nt, Human
ucuaauaccucugu

SEQ ID NO: 2356051 - RNA, 16 nt, Human
ucuaauaccucugugu

SEQ ID NO: 2356052 - RNA, 17 nt, Human
ucuaauaccucugugug

SEQ ID NO: 2356053 - RNA, 19 nt, Human
ucuacccagcgagcccugg

SEQ ID NO: 2356054 - RNA, 23 nt, Human
ucuacagcuaaucagcauucuca

SEQ ID NO: 2356055 - RNA, 19 nt, Human
ucuaauagaacucaguuuu

SEQ ID NO: 2356056 - RNA, 20 nt, Human
ucuaauaccucugugugcuc

SEQ ID NO: 2356057 - RNA, 20 nt, Human
ucuacagcuaaucagcauuc

SEQ ID NO: 2356058 - RNA, 17 nt, Human
acuuaugauuucaugug

SEQ ID NO: 2356059 - RNA, 16 nt, Human
acuuaugauuucaugu

SEQ ID NO: 2356060 - RNA, 13 nt, Human
acuuaugauuuca

SEQ ID NO: 2356061 - RNA, 23 nt, Human
acuuagggcaccagggguuucuc

SEQ ID NO: 2356062 - RNA, 23 nt, Human
acuuaugaccucuuccuuuagga

SEQ ID NO: 2356063 - RNA, 16 nt, Human
acuuagggcaccaggg

SEQ ID NO: 2356064 - RNA, 17 nt, Human
acuuaguauauuuucuu

SEQ ID NO: 2356065 - RNA, 15 nt, Human
acuuagguguggggg

SEQ ID NO: 2356066 - RNA, 20 nt, Human
acuuauuacugcuaaguauu

SEQ ID NO: 2356067 - RNA, 16 nt, Human
acuuauucucaagaag

SEQ ID NO: 2356068 - RNA, 14 nt, Human
acuuauuacugcua

SEQ ID NO: 2356069 - RNA, 16 nt, Human
acuuauuacugcuaag

SEQ ID NO: 2356070 - RNA, 19 nt, Human
acuuauuacugcuaaguau

SEQ ID NO: 2356071 - RNA, 22 nt, Human
acuuauuaaucuguaugaagau

SEQ ID NO: 2356072 - RNA, 22 nt, Human
acuucaggguucuccucucccc

SEQ ID NO: 2356073 - RNA, 21 nt, Human
acuucaggguucuccucuccc

SEQ ID NO: 2356074 - RNA, 23 nt, Human
acuucaggguucuccucuccccu

SEQ ID NO: 2356075 - RNA, 16 nt, Human
acuucaggggcugccc

SEQ ID NO: 2356076 - RNA, 17 nt, Human
acuucaggggcugcccg

SEQ ID NO: 2356077 - RNA, 19 nt, Human
acuucaggggcugcccgcu

SEQ ID NO: 2356078 - RNA, 22 nt, Human
acuucaggggcugcccgcuccc

SEQ ID NO: 2356079 - RNA, 23 nt, Human
acuucaguauguugucaaagaga

SEQ ID NO: 2356080 - RNA, 17 nt, Human
acuucaguauguuguca

SEQ ID NO: 2356081 - RNA, 19 nt, Human
acuucaguauguugucaaa

SEQ ID NO: 2356082 - RNA, 21 nt, Human
acuucaguauguugucaaaga

SEQ ID NO: 2356083 - RNA, 17 nt, Human
acuuacacuuuaugcac

SEQ ID NO: 2356084 - RNA, 22 nt, Human
acuuaauuucuuuauguaaucu

SEQ ID NO: 2356085 - RNA, 21 nt, Human
acuuaauuucuuuauguaauc

SEQ ID NO: 2356086 - RNA, 16 nt, Human
acuuacuguacaugaa

SEQ ID NO: 2356087 - RNA, 21 nt, Human
acuuacuguacaugaaaacac

SEQ ID NO: 2356088 - RNA, 21 nt, Human
acuuagcuugaaggaucuguu

SEQ ID NO: 2356089 - RNA, 22 nt, Human
acuuacuuacccucaccuguca

SEQ ID NO: 2356090 - RNA, 14 nt, Human
acuuagcugggaga

SEQ ID NO: 2356091 - RNA, 13 nt, Human
acuuacuugcuua

SEQ ID NO: 2356092 - RNA, 14 nt, Human
acuuacuugcuuau

SEQ ID NO: 2356093 - RNA, 16 nt, Human
acuuagcuaucagaag

SEQ ID NO: 2356094 - RNA, 22 nt, Human
acuuacuguacaugaaaacaca

SEQ ID NO: 2356095 - RNA, 12 nt, Human
acuuacaugauu

SEQ ID NO: 2356096 - RNA, 24 nt, Human
acuuacuguuguccuaugggaguc

SEQ ID NO: 2356097 - RNA, 13 nt, Human
acuuacuguuucu

SEQ ID NO: 2356098 - RNA, 16 nt, Human
acuuacuguuucuguc

SEQ ID NO: 2356099 - RNA, 20 nt, Human
acuuacuguuucugucagga

SEQ ID NO: 2356100 - RNA, 21 nt, Human
acuuacuguuucugucaggag

SEQ ID NO: 2356101 - RNA, 16 nt, Human
acuuacuuacccucac

SEQ ID NO: 2356102 - RNA, 13 nt, Human
acuuaagagaaua

SEQ ID NO: 2356103 - RNA, 14 nt, Human
acuuaagagaauau

SEQ ID NO: 2356104 - RNA, 15 nt, Human
acuuaagagaauauu

SEQ ID NO: 2356105 - RNA, 13 nt, Human
acuuaagcacacu

SEQ ID NO: 2356106 - RNA, 19 nt, Human
acuuaaucuaaauggaacc

SEQ ID NO: 2356107 - RNA, 17 nt, Human
acuuaaucuaaauggaa

SEQ ID NO: 2356108 - RNA, 16 nt, Human
acuuacacuuuaugca

SEQ ID NO: 2356109 - RNA, 14 nt, Human
acuuaauugcuaca

SEQ ID NO: 2356110 - RNA, 22 nt, Human
acuuaaucuaaauggaaccacu

SEQ ID NO: 2356111 - RNA, 18 nt, Human
acuuaagagaauauuuua

SEQ ID NO: 2356112 - RNA, 19 nt, Human
acuuaagagaauauuuuaa

SEQ ID NO: 2356113 - RNA, 13 nt, Human
acuuaaugaauga

SEQ ID NO: 2356114 - RNA, 14 nt, Human
acuguugccagaga

SEQ ID NO: 2356115 - RNA, 13 nt, Human
acuuaaaugaaag

SEQ ID NO: 2356116 - RNA, 18 nt, Human
acuguugccagagaugga

SEQ ID NO: 2356117 - RNA, 19 nt, Human
acuuaaauggaaaaaauga

SEQ ID NO: 2356118 - RNA, 20 nt, Human
acuuaaauaaugugaaacug

SEQ ID NO: 2356119 - RNA, 13 nt, Human
acuguugaaaauu

SEQ ID NO: 2356120 - RNA, 14 nt, Human
acuguugaaaauua

SEQ ID NO: 2356121 - RNA, 21 nt, Human
acuguugaaaauuauuuuaaa

SEQ ID NO: 2356122 - RNA, 23 nt, Human
acuguugaaaauuauuuuaaaca

SEQ ID NO: 2356123 - RNA, 15 nt, Human
acuuaacggcuccag

SEQ ID NO: 2356124 - RNA, 23 nt, Human
acuuaacuauucaggagaguaga

SEQ ID NO: 2356125 - RNA, 17 nt, Human
acuuaacggcuccagga

SEQ ID NO: 2356126 - RNA, 19 nt, Human
acuuaacggcuccaggauu

SEQ ID NO: 2356127 - RNA, 17 nt, Human
acuuaaauuuuaauuua

SEQ ID NO: 2356128 - RNA, 14 nt, Human
acuuaacagaugca

SEQ ID NO: 2356129 - RNA, 20 nt, Human
acuuaacaagcucccaggcc

SEQ ID NO: 2356130 - RNA, 15 nt, Human
acuuaacaagcuccc

SEQ ID NO: 2356131 - RNA, 21 nt, Human
acuuaacagaugcaaugugcu

SEQ ID NO: 2356132 - RNA, 14 nt, Human
acuuaacauauuua

SEQ ID NO: 2356133 - RNA, 11 nt, Human
acuuuguucac

SEQ ID NO: 2356134 - RNA, 21 nt, Human
acuuuuuaaaaucuuuucuau

SEQ ID NO: 2356135 - RNA, 18 nt, Human
acuuuuuaaauguaaaga

SEQ ID NO: 2356136 - RNA, 11 nt, Human
acuuuuuacaa

SEQ ID NO: 2356137 - RNA, 19 nt, Human
acuuuuuaacuauuaagag

SEQ ID NO: 2356138 - RNA, 18 nt, Human
acuuuuuaauucaccaaa

SEQ ID NO: 2356139 - RNA, 23 nt, Human
acuuuuguucuugguuuguaaau

SEQ ID NO: 2356140 - RNA, 15 nt, Human
acuuuuguucuuggu

SEQ ID NO: 2356141 - RNA, 21 nt, Human
acuuuuuauauuuuauacauu

SEQ ID NO: 2356142 - RNA, 12 nt, Human
agaaaaaagaag

SEQ ID NO: 2356143 - RNA, 18 nt, Human
agaaaaaagagaaaagaa

SEQ ID NO: 2356144 - RNA, 17 nt, Human
agaaaaaagagaaaaga

SEQ ID NO: 2356145 - RNA, 14 nt, Human
agaaaaaaguugua

SEQ ID NO: 2356146 - RNA, 12 nt, Human
agaaaaaaguug

SEQ ID NO: 2356147 - RNA, 10 nt, Human
agaaaaaagu

SEQ ID NO: 2356148 - RNA, 17 nt, Human
acuuuuuauauuuuaua

SEQ ID NO: 2356149 - RNA, 18 nt, Human
ucuccuuagucuucucau

SEQ ID NO: 2356150 - RNA, 22 nt, Human
agaaaaaauacauuuuauauua

SEQ ID NO: 2356151 - RNA, 17 nt, Human
ucuccuuagucuucuca

SEQ ID NO: 2356152 - RNA, 19 nt, Human
ucuccuuguggccugggcc

SEQ ID NO: 2356153 - RNA, 16 nt, Human
ucuccuucaccuuugu

SEQ ID NO: 2356154 - RNA, 21 nt, Human
ucuccuuguguuacuaaguuu

SEQ ID NO: 2356155 - RNA, 13 nt, Human
ucuccuuguguua

SEQ ID NO: 2356156 - RNA, 17 nt, Human
agaaaaaauauuuuccc

SEQ ID NO: 2356157 - RNA, 11 nt, Human
agaaaaaauac

SEQ ID NO: 2356158 - RNA, 18 nt, Human
agaaaaaauaacacacau

SEQ ID NO: 2356159 - RNA, 18 nt, Human
agaaaaaauacauuuuau

SEQ ID NO: 2356160 - RNA, 16 nt, Human
agaaaaaauacauuuu

SEQ ID NO: 2356161 - RNA, 14 nt, Human
agaaaaaauacauu

SEQ ID NO: 2356162 - RNA, 14 nt, Human
ucuccuucaccuuu

SEQ ID NO: 2356163 - RNA, 15 nt, Human
ucuccuucaccuuug

SEQ ID NO: 2356164 - RNA, 15 nt, Human
acuuuggaauacauu

SEQ ID NO: 2356165 - RNA, 13 nt, Human
acuuugaccucug

SEQ ID NO: 2356166 - RNA, 12 nt, Human
acuuugaccucu

SEQ ID NO: 2356167 - RNA, 18 nt, Human
acuuuggaauacauuucu

SEQ ID NO: 2356168 - RNA, 23 nt, Human
acuuuggaguccccucaccuccu

SEQ ID NO: 2356169 - RNA, 18 nt, Human
acuuuggaguccccucac

SEQ ID NO: 2356170 - RNA, 22 nt, Human
acuuuggaguccccucaccucc

SEQ ID NO: 2356171 - RNA, 13 nt, Human
acuuuuguucuug

SEQ ID NO: 2356172 - RNA, 12 nt, Human
acuuuuguucuu

SEQ ID NO: 2356173 - RNA, 21 nt, Human
acuuuguuaguuucuccaagc

SEQ ID NO: 2356174 - RNA, 14 nt, Human
acuuuguucuggcu

SEQ ID NO: 2356175 - RNA, 18 nt, Human
acuuuguaccccccaacc

SEQ ID NO: 2356176 - RNA, 22 nt, Human
acuuuguaccccccaaccccug

SEQ ID NO: 2356177 - RNA, 20 nt, Human
acuuuguuaguuucuccaag

SEQ ID NO: 2356178 - RNA, 16 nt, Human
ucuccucauguucugc

SEQ ID NO: 2356179 - RNA, 15 nt, Human
ucuccucaucucuaa

SEQ ID NO: 2356180 - RNA, 14 nt, Human
ucuccucaucucua

SEQ ID NO: 2356181 - RNA, 20 nt, Human
ucuccucagccuccucaucu

SEQ ID NO: 2356182 - RNA, 22 nt, Human
ucuccucagccuccucaucugg

SEQ ID NO: 2356183 - RNA, 13 nt, Human
ucuccucagccuc

SEQ ID NO: 2356184 - RNA, 14 nt, Human
ucuccucagccucc

SEQ ID NO: 2356185 - RNA, 23 nt, Human
ucuccucacucccuucuaccugc

SEQ ID NO: 2356186 - RNA, 17 nt, Human
ucuccgaccagacaccu

SEQ ID NO: 2356187 - RNA, 23 nt, Human
ucuccgaccagacaccuugacag

SEQ ID NO: 2356188 - RNA, 15 nt, Human
ucucccuuucccuuc

SEQ ID NO: 2356189 - RNA, 15 nt, Human
ucuccccagguccag

SEQ ID NO: 2356190 - RNA, 19 nt, Human
ucuccccagcccagagaca

SEQ ID NO: 2356191 - RNA, 18 nt, Human
ucuccccagcccagagac

SEQ ID NO: 2356192 - RNA, 12 nt, Human
ucuccccagagu

SEQ ID NO: 2356193 - RNA, 20 nt, Human
ucuccccaggguucaguccu

SEQ ID NO: 2356194 - RNA, 17 nt, Human
ucuccccagcccagaga

SEQ ID NO: 2356195 - RNA, 16 nt, Human
ucuccccagcccagag

SEQ ID NO: 2356196 - RNA, 15 nt, Human
ucuccccagcccaga

SEQ ID NO: 2356197 - RNA, 14 nt, Human
ucuccccagcccag

SEQ ID NO: 2356198 - RNA, 22 nt, Human
ucuccacacacagcugggcugu

SEQ ID NO: 2356199 - RNA, 23 nt, Human
ucuccaagugccagaggugggca

SEQ ID NO: 2356200 - RNA, 16 nt, Human
ucuccaauaucagugc

SEQ ID NO: 2356201 - RNA, 17 nt, Human
ucuccaagucucagugg

SEQ ID NO: 2356202 - RNA, 14 nt, Human
ucuccaagugccag

SEQ ID NO: 2356203 - RNA, 20 nt, Human
ucuccaagugccagaggugg

SEQ ID NO: 2356204 - RNA, 21 nt, Human
ucuccaagugccagagguggg

SEQ ID NO: 2356205 - RNA, 14 nt, Human
ucuccaaggaccag

SEQ ID NO: 2356206 - RNA, 16 nt, Human
ucuccaaggaccaggu

SEQ ID NO: 2356207 - RNA, 16 nt, Human
ucuccaagggcuucug

SEQ ID NO: 2356208 - RNA, 20 nt, Human
ucuccaagggcuucugcacc

SEQ ID NO: 2356209 - RNA, 21 nt, Human
ucuccaagggcuucugcaccc

SEQ ID NO: 2356210 - RNA, 22 nt, Human
ucuccaagggcuucugcacccu

SEQ ID NO: 2356211 - RNA, 23 nt, Human
ucuccaagggcuucugcacccuc

SEQ ID NO: 2356212 - RNA, 18 nt, Human
ucuccaagcaggacaugg

SEQ ID NO: 2356213 - RNA, 19 nt, Human
ucuccaagcaggacaugga

SEQ ID NO: 2356214 - RNA, 18 nt, Human
ucuccaccaggaaccucu

SEQ ID NO: 2356215 - RNA, 16 nt, Human
ucuccaccaggaaccu

SEQ ID NO: 2356216 - RNA, 18 nt, Human
ucuccaauaucagugcuc

SEQ ID NO: 2356217 - RNA, 19 nt, Human
ucuccacagcaaccccagg

SEQ ID NO: 2356218 - RNA, 14 nt, Human
ucuccacagcaacc

SEQ ID NO: 2356219 - RNA, 12 nt, Human
ucuccacccugc

SEQ ID NO: 2356220 - RNA, 23 nt, Human
ucuccccagcaagugagagcugg

SEQ ID NO: 2356221 - RNA, 19 nt, Human
ucuccacccccagcugcuu

SEQ ID NO: 2356222 - RNA, 14 nt, Human
ucuccacccuccca

SEQ ID NO: 2356223 - RNA, 23 nt, Human
ucuccacccucccagaccugccu

SEQ ID NO: 2356224 - RNA, 22 nt, Human
ucuccccacacuaaccuggguu

SEQ ID NO: 2356225 - RNA, 19 nt, Human
acuuucuguugccacaacc

SEQ ID NO: 2356226 - RNA, 19 nt, Human
acuuucuguaaacucaaaa

SEQ ID NO: 2356227 - RNA, 13 nt, Human
acuuucugccugg

SEQ ID NO: 2356228 - RNA, 14 nt, Human
acuuucugccugga

SEQ ID NO: 2356229 - RNA, 14 nt, Human
acuuucuguaaacu

SEQ ID NO: 2356230 - RNA, 18 nt, Human
acuuucuguaaacucaaa

SEQ ID NO: 2356231 - RNA, 12 nt, Human
acuuuaccuuuu

SEQ ID NO: 2356232 - RNA, 15 nt, Human
acuuuacaugacaca

SEQ ID NO: 2356233 - RNA, 17 nt, Human
acuuuacaugacacagc

SEQ ID NO: 2356234 - RNA, 18 nt, Human
acuuuacaugacacagcu

SEQ ID NO: 2356235 - RNA, 20 nt, Human
acuuuacaugacacagcuuu

SEQ ID NO: 2356236 - RNA, 15 nt, Human
acuuuaccaccccca

SEQ ID NO: 2356237 - RNA, 16 nt, Human
acuuuaccacccccac

SEQ ID NO: 2356238 - RNA, 17 nt, Human
acuuuacccaaaaacua

SEQ ID NO: 2356239 - RNA, 14 nt, Human
acuuucugaaauaa

SEQ ID NO: 2356240 - RNA, 20 nt, Human
acuuucugaaauaacauggc

SEQ ID NO: 2356241 - RNA, 18 nt, Human
ucuccuccauacucagga

SEQ ID NO: 2356242 - RNA, 17 nt, Human
ucuccuccauacucagg

SEQ ID NO: 2356243 - RNA, 18 nt, Human
ucuccucaucucuaacag

SEQ ID NO: 2356244 - RNA, 19 nt, Human
ucuccuccaagacacugug

SEQ ID NO: 2356245 - RNA, 23 nt, Human
ucuccuccaagacacuguggacu

SEQ ID NO: 2356246 - RNA, 14 nt, Human
ucuccuccaccgcc

SEQ ID NO: 2356247 - RNA, 15 nt, Human
ucuccuccagaguca

SEQ ID NO: 2356248 - RNA, 15 nt, Human
ucuccucugcugcug

SEQ ID NO: 2356249 - RNA, 16 nt, Human
ucuccucugcugcugg

SEQ ID NO: 2356250 - RNA, 17 nt, Human
ucuccucugcugcuggc

SEQ ID NO: 2356251 - RNA, 18 nt, Human
ucuccucugcugcuggcu

SEQ ID NO: 2356252 - RNA, 16 nt, Human
ucuccuccaugggaga

SEQ ID NO: 2356253 - RNA, 20 nt, Human
acuuuaauuaccaaccuguu

SEQ ID NO: 2356254 - RNA, 22 nt, Human
acuuuaauuaccaaccuguuac

SEQ ID NO: 2356255 - RNA, 20 nt, Human
ucuccuccaccgccauggcu

SEQ ID NO: 2356256 - RNA, 19 nt, Human
acuuuaauucucaugugau

SEQ ID NO: 2356257 - RNA, 23 nt, Human
acuuuaauucucaugugauccuu

SEQ ID NO: 2356258 - RNA, 19 nt, Human
acuuuacaauguucauccc

SEQ ID NO: 2356259 - RNA, 20 nt, Human
acuuuacaauguucauccca

SEQ ID NO: 2356260 - RNA, 21 nt, Human
ucucaggccaccugcccccuu

SEQ ID NO: 2356261 - RNA, 16 nt, Human
ucucaggccaucauca

SEQ ID NO: 2356262 - RNA, 20 nt, Human
ucucaugccucagccuccug

SEQ ID NO: 2356263 - RNA, 21 nt, Human
ucucaggccagcugcuugggc

SEQ ID NO: 2356264 - RNA, 17 nt, Human
ucucaggccagcugcuu

SEQ ID NO: 2356265 - RNA, 18 nt, Human
ucucaggccagcugcuug

SEQ ID NO: 2356266 - RNA, 20 nt, Human
ucucauggagaagcagaaau

SEQ ID NO: 2356267 - RNA, 21 nt, Human
ucucaugccucagccuccuga

SEQ ID NO: 2356268 - RNA, 22 nt, Human
ucucauggagaagcagaaauac

SEQ ID NO: 2356269 - RNA, 15 nt, Human
ucucauggagaaguu

SEQ ID NO: 2356270 - RNA, 16 nt, Human
ucucauggagaaguua

SEQ ID NO: 2356271 - RNA, 18 nt, Human
ucucauguaucaucugga

SEQ ID NO: 2356272 - RNA, 14 nt, Human
ucucaugugauccu

SEQ ID NO: 2356273 - RNA, 15 nt, Human
ucucaugugauccuu

SEQ ID NO: 2356274 - RNA, 20 nt, Human
ucucauuggacccuuccaug

SEQ ID NO: 2356275 - RNA, 19 nt, Human
ucucauguuuucaacugcc

SEQ ID NO: 2356276 - RNA, 18 nt, Human
ucucauguuuuccauugu

SEQ ID NO: 2356277 - RNA, 18 nt, Human
ucucauguuuucaacugc

SEQ ID NO: 2356278 - RNA, 23 nt, Human
ucucaugugauccuuuuauguua

SEQ ID NO: 2356279 - RNA, 17 nt, Human
ucucauguuuucaacug

SEQ ID NO: 2356280 - RNA, 21 nt, Human
ucucaugugugcucuucuucu

SEQ ID NO: 2356281 - RNA, 16 nt, Human
ucucaugugauccuuu

SEQ ID NO: 2356282 - RNA, 17 nt, Human
ucucaugugauccuuuu

SEQ ID NO: 2356283 - RNA, 18 nt, Human
ucucaugugauccuuuua

SEQ ID NO: 2356284 - RNA, 19 nt, Human
ucucaugugauccuuuuau

SEQ ID NO: 2356285 - RNA, 16 nt, Human
ucucauuugucacaca

SEQ ID NO: 2356286 - RNA, 13 nt, Human
ucuccaaaauaaa

SEQ ID NO: 2356287 - RNA, 15 nt, Human
ucuccaagcaggaca

SEQ ID NO: 2356288 - RNA, 16 nt, Human
ucuccaagcaggacau

SEQ ID NO: 2356289 - RNA, 14 nt, Human
ucucauuugucaca

SEQ ID NO: 2356290 - RNA, 19 nt, Human
ucucauuugccaauaauaa

SEQ ID NO: 2356291 - RNA, 19 nt, Human
ucucauuucaccccucccu

SEQ ID NO: 2356292 - RNA, 22 nt, Human
ucucauuucaccccucccuuuc

SEQ ID NO: 2356293 - RNA, 16 nt, Human
ucucauuucaccccuc

SEQ ID NO: 2356294 - RNA, 17 nt, Human
ucucauuucaccccucc

SEQ ID NO: 2356295 - RNA, 16 nt, Human
ucucauuuaauccucu

SEQ ID NO: 2356296 - RNA, 18 nt, Human
ucucauuuagaacuugca

SEQ ID NO: 2356297 - RNA, 15 nt, Human
ucucauuuccaagca

SEQ ID NO: 2356298 - RNA, 15 nt, Human
ucucaggagcauggg

SEQ ID NO: 2356299 - RNA, 20 nt, Human
ucucaggagcacaggcagcu

SEQ ID NO: 2356300 - RNA, 23 nt, Human
ucucaggagcacaggcagcugga

SEQ ID NO: 2356301 - RNA, 15 nt, Human
ucucaggagcacagg

SEQ ID NO: 2356302 - RNA, 16 nt, Human
ucucaggagcacaggc

SEQ ID NO: 2356303 - RNA, 18 nt, Human
ucucaggagcacaggcag

SEQ ID NO: 2356304 - RNA, 19 nt, Human
ucucaggagcacaggcagc

SEQ ID NO: 2356305 - RNA, 16 nt, Human
ucucaggaccuaggga

SEQ ID NO: 2356306 - RNA, 14 nt, Human
ucucaggagcacag

SEQ ID NO: 2356307 - RNA, 21 nt, Human
ucucaggaccuagggauguuc

SEQ ID NO: 2356308 - RNA, 23 nt, Human
ucucaggaccaaagcuuucaugu

SEQ ID NO: 2356309 - RNA, 20 nt, Human
ucucaggaucaagaaagugu

SEQ ID NO: 2356310 - RNA, 22 nt, Human
ucucaggauccccucucuuccu

SEQ ID NO: 2356311 - RNA, 10 nt, Human
ucucaggcca

SEQ ID NO: 2356312 - RNA, 19 nt, Human
ucucaggccaccugccccc

SEQ ID NO: 2356313 - RNA, 18 nt, Human
ucucaggccaccugcccc

SEQ ID NO: 2356314 - RNA, 13 nt, Human
ucucaggccaccu

SEQ ID NO: 2356315 - RNA, 21 nt, Human
ucucaggcaugccugugugac

SEQ ID NO: 2356316 - RNA, 20 nt, Human
ucucaggcaugccuguguga

SEQ ID NO: 2356317 - RNA, 18 nt, Human
ucucaggcaugccugugu

SEQ ID NO: 2356318 - RNA, 20 nt, Human
ucucaggcaugaacauguac

SEQ ID NO: 2356319 - RNA, 12 nt, Human
ucucaggccaaa

SEQ ID NO: 2356320 - RNA, 12 nt, Human
ucucaggccagc

SEQ ID NO: 2356321 - RNA, 13 nt, Human
ucucaggccagcu

SEQ ID NO: 2356322 - RNA, 11 nt, Human
ucucagccucc

SEQ ID NO: 2356323 - RNA, 23 nt, Human
ucucaggaaaucaaauaugcaaa

SEQ ID NO: 2356324 - RNA, 21 nt, Human
ucucaggaaaucaaauaugca

SEQ ID NO: 2356325 - RNA, 14 nt, Human
ucucaggaaaucaa

SEQ ID NO: 2356326 - RNA, 21 nt, Human
ucucagcaaugauuacucuuu

SEQ ID NO: 2356327 - RNA, 21 nt, Human
ucucagccgcuucugacugcu

SEQ ID NO: 2356328 - RNA, 15 nt, Human
ucucagccaacgagu

SEQ ID NO: 2356329 - RNA, 16 nt, Human
acuugucuuuuucugg

SEQ ID NO: 2356330 - RNA, 18 nt, Human
ucucagcagcgaccaccc

SEQ ID NO: 2356331 - RNA, 23 nt, Human
ucucagcagcgaccaccccugcc

SEQ ID NO: 2356332 - RNA, 18 nt, Human
acuugcuguuuuguucug

SEQ ID NO: 2356333 - RNA, 23 nt, Human
acuugcugccugaagaacaguaa

SEQ ID NO: 2356334 - RNA, 17 nt, Human
acuugcugccugaagaa

SEQ ID NO: 2356335 - RNA, 22 nt, Human
acuugcugcaguaugaaaauaa

SEQ ID NO: 2356336 - RNA, 16 nt, Human
acuugcuuauuugaca

SEQ ID NO: 2356337 - RNA, 14 nt, Human
acuugcuuuuaaaa

SEQ ID NO: 2356338 - RNA, 13 nt, Human
acuugucaaagaa

SEQ ID NO: 2356339 - RNA, 22 nt, Human
acuugcuuuaugccuucuuauu

SEQ ID NO: 2356340 - RNA, 15 nt, Human
acuugucaauaaaau

SEQ ID NO: 2356341 - RNA, 18 nt, Human
acuuguauuauguguguu

SEQ ID NO: 2356342 - RNA, 19 nt, Human
acuuguauuauguguguuu

SEQ ID NO: 2356343 - RNA, 17 nt, Human
acuugucuuuuucugga

SEQ ID NO: 2356344 - RNA, 14 nt, Human
acuugucaaagaag

SEQ ID NO: 2356345 - RNA, 15 nt, Human
acuugucaaagaagg

SEQ ID NO: 2356346 - RNA, 18 nt, Human
acuugucaaagaagguuu

SEQ ID NO: 2356347 - RNA, 21 nt, Human
acuugucuuuggacccugagg

SEQ ID NO: 2356348 - RNA, 20 nt, Human
acuugucuuuggacccugag

SEQ ID NO: 2356349 - RNA, 18 nt, Human
acuugucuuuggacccug

SEQ ID NO: 2356350 - RNA, 15 nt, Human
acuugucuuuuucug

SEQ ID NO: 2356351 - RNA, 16 nt, Human
acuugucaaagaaggu

SEQ ID NO: 2356352 - RNA, 15 nt, Human
acuuguggacuaaaa

SEQ ID NO: 2356353 - RNA, 18 nt, Human
acuuguggacuaaaagau

SEQ ID NO: 2356354 - RNA, 19 nt, Human
acuuguggacuaaaagaua

SEQ ID NO: 2356355 - RNA, 20 nt, Human
acuuguggacuaaaagauau

SEQ ID NO: 2356356 - RNA, 19 nt, Human
acuuguggacacagcucuu

SEQ ID NO: 2356357 - RNA, 22 nt, Human
acuuguggacacagcucuucuc

SEQ ID NO: 2356358 - RNA, 23 nt, Human
acuugcagcugauguuggaagag

SEQ ID NO: 2356359 - RNA, 21 nt, Human
acuugcugcaguaugaaaaua

SEQ ID NO: 2356360 - RNA, 20 nt, Human
acuugcagcugauguuggaa

SEQ ID NO: 2356361 - RNA, 20 nt, Human
acuugcucuugaugccuggc

SEQ ID NO: 2356362 - RNA, 17 nt, Human
acuugcucuugaugccu

SEQ ID NO: 2356363 - RNA, 18 nt, Human
acuugcucuugaugccug

SEQ ID NO: 2356364 - RNA, 23 nt, Human
acuugcagacucuacagaggcca

SEQ ID NO: 2356365 - RNA, 16 nt, Human
acuugcucuugaugcc

SEQ ID NO: 2356366 - RNA, 19 nt, Human
acuugcagacucuacagag

SEQ ID NO: 2356367 - RNA, 22 nt, Human
acuugcagacucuacagaggcc

SEQ ID NO: 2356368 - RNA, 20 nt, Human
ucucacuauguugcccaggc

SEQ ID NO: 2356369 - RNA, 21 nt, Human
ucucacuauguugcccaggca

SEQ ID NO: 2356370 - RNA, 22 nt, Human
ucucacuauguugcccaggcag

SEQ ID NO: 2356371 - RNA, 23 nt, Human
ucucacuauguugcccaggcagg

SEQ ID NO: 2356372 - RNA, 16 nt, Human
acuugaugugccauuu

SEQ ID NO: 2356373 - RNA, 20 nt, Human
acuugaugugccauuuuaaa

SEQ ID NO: 2356374 - RNA, 19 nt, Human
acuugcacgcccaugugug

SEQ ID NO: 2356375 - RNA, 13 nt, Human
acuugcaccucug

SEQ ID NO: 2356376 - RNA, 21 nt, Human
acuugcaaccgucuguuaugc

SEQ ID NO: 2356377 - RNA, 23 nt, Human
acuugcaaaaagggucaguaugg

SEQ ID NO: 2356378 - RNA, 17 nt, Human
acuugcaaaaaggguca

SEQ ID NO: 2356379 - RNA, 18 nt, Human
acuugaugugccauuuua

SEQ ID NO: 2356380 - RNA, 19 nt, Human
acuugaugugccauuuuaa

SEQ ID NO: 2356381 - RNA, 11 nt, Human
agaauuauuua

SEQ ID NO: 2356382 - RNA, 20 nt, Human
agaauucaaacuggggccuc

SEQ ID NO: 2356383 - RNA, 13 nt, Human
agaauuccaagga

SEQ ID NO: 2356384 - RNA, 16 nt, Human
ucugggagaggauuuu

SEQ ID NO: 2356385 - RNA, 14 nt, Human
agaauuccaaggag

SEQ ID NO: 2356386 - RNA, 20 nt, Human
agaauuccaaggaguuccau

SEQ ID NO: 2356387 - RNA, 23 nt, Human
ucugggaggaauggacagacaga

SEQ ID NO: 2356388 - RNA, 19 nt, Human
ucugggaggaauggacaga

SEQ ID NO: 2356389 - RNA, 16 nt, Human
ucugggaguccccuuu

SEQ ID NO: 2356390 - RNA, 18 nt, Human
ucugggauaaguaaguuu

SEQ ID NO: 2356391 - RNA, 19 nt, Human
ucugggauucuacuuuaag

SEQ ID NO: 2356392 - RNA, 21 nt, Human
ucugggagggcagcagggcua

SEQ ID NO: 2356393 - RNA, 19 nt, Human
ucugggagggcagcagggc

SEQ ID NO: 2356394 - RNA, 13 nt, Human
ucugggagggcag

SEQ ID NO: 2356395 - RNA, 19 nt, Human
ucugggccaaguuccucua

SEQ ID NO: 2356396 - RNA, 16 nt, Human
ucugggccaaguuccu

SEQ ID NO: 2356397 - RNA, 12 nt, Human
ucugggccaagu

SEQ ID NO: 2356398 - RNA, 18 nt, Human
ucugggcaucuguucugg

SEQ ID NO: 2356399 - RNA, 19 nt, Human
ucugggcaucuguucuggu

SEQ ID NO: 2356400 - RNA, 19 nt, Human
ucugggcaggaccucagag

SEQ ID NO: 2356401 - RNA, 14 nt, Human
ucugggcaggacuc

SEQ ID NO: 2356402 - RNA, 20 nt, Human
ucugggcaggacucagcucc

SEQ ID NO: 2356403 - RNA, 21 nt, Human
ucugggcaggacucagcuccc

SEQ ID NO: 2356404 - RNA, 18 nt, Human
ucugggcaggaccucaga

SEQ ID NO: 2356405 - RNA, 14 nt, Human
ucugggcaggaccu

SEQ ID NO: 2356406 - RNA, 15 nt, Human
ucugggauucuacuu

SEQ ID NO: 2356407 - RNA, 21 nt, Human
ucugggcacugguaaucccaa

SEQ ID NO: 2356408 - RNA, 13 nt, Human
agaauuauauagg

SEQ ID NO: 2356409 - RNA, 22 nt, Human
agaauuauauagguugugcaaa

SEQ ID NO: 2356410 - RNA, 23 nt, Human
agaauuaacacaugauccugcaa

SEQ ID NO: 2356411 - RNA, 17 nt, Human
agaauuaaaaaugaaau

SEQ ID NO: 2356412 - RNA, 15 nt, Human
agaauuaacacauga

SEQ ID NO: 2356413 - RNA, 13 nt, Human
agaaugucaguau

SEQ ID NO: 2356414 - RNA, 13 nt, Human
agaauguauugua

SEQ ID NO: 2356415 - RNA, 14 nt, Human
agaauguauuguac

SEQ ID NO: 2356416 - RNA, 15 nt, Human
agaauguauuguacc

SEQ ID NO: 2356417 - RNA, 16 nt, Human
agaauguauuguaccu

SEQ ID NO: 2356418 - RNA, 17 nt, Human
agaauguauuguaccuu

SEQ ID NO: 2356419 - RNA, 21 nt, Human
agaauguauuguaccuuuuaa

SEQ ID NO: 2356420 - RNA, 22 nt, Human
agaauguauuguaccuuuuaac

SEQ ID NO: 2356421 - RNA, 23 nt, Human
agaauguauuguaccuuuuaaca

SEQ ID NO: 2356422 - RNA, 14 nt, Human
agaauguagccauu

SEQ ID NO: 2356423 - RNA, 12 nt, Human
agaauguauugu

SEQ ID NO: 2356424 - RNA, 15 nt, Human
agaauguaagaacua

SEQ ID NO: 2356425 - RNA, 16 nt, Human
agaauguaagaacuac

SEQ ID NO: 2356426 - RNA, 22 nt, Human
agaaucagucuauccacagaga

SEQ ID NO: 2356427 - RNA, 14 nt, Human
agaaucauacuuag

SEQ ID NO: 2356428 - RNA, 16 nt, Human
agaaucagugcaaaga

SEQ ID NO: 2356429 - RNA, 17 nt, Human
agaaucauaugauucug

SEQ ID NO: 2356430 - RNA, 20 nt, Human
agaaucauaugauucugcuu

SEQ ID NO: 2356431 - RNA, 21 nt, Human
agaaucauaugauucugcuuu

SEQ ID NO: 2356432 - RNA, 21 nt, Human
agaaucaugugaacccgggac

SEQ ID NO: 2356433 - RNA, 18 nt, Human
agaaucaugugaacccgg

SEQ ID NO: 2356434 - RNA, 22 nt, Human
agaaucauaugauucugcuuuu

SEQ ID NO: 2356435 - RNA, 21 nt, Human
agaauccaaacuuggauuuuu

SEQ ID NO: 2356436 - RNA, 18 nt, Human
agaauccaagugaacacu

SEQ ID NO: 2356437 - RNA, 16 nt, Human
agaauccaaacuugga

SEQ ID NO: 2356438 - RNA, 14 nt, Human
agaauccaaacuug

SEQ ID NO: 2356439 - RNA, 12 nt, Human
agaauccaaacu

SEQ ID NO: 2356440 - RNA, 14 nt, Human
agaauauuuuaagu

SEQ ID NO: 2356441 - RNA, 16 nt, Human
agaauauuuauuaccu

SEQ ID NO: 2356442 - RNA, 19 nt, Human
agaauauuuauuaccucug

SEQ ID NO: 2356443 - RNA, 13 nt, Human
agaaucagccuag

SEQ ID NO: 2356444 - RNA, 19 nt, Human
agaaucagucuauccacag

SEQ ID NO: 2356445 - RNA, 21 nt, Human
agaaucagucuauccacagag

SEQ ID NO: 2356446 - RNA, 22 nt, Human
agaauauuuauuaccucugaua

SEQ ID NO: 2356447 - RNA, 19 nt, Human
agaauauuuuaaguauugc

SEQ ID NO: 2356448 - RNA, 17 nt, Human
agaaucagaucauuuca

SEQ ID NO: 2356449 - RNA, 23 nt, Human
agaauauuagcuuuacuguuugu

SEQ ID NO: 2356450 - RNA, 12 nt, Human
agaauauucagg

SEQ ID NO: 2356451 - RNA, 13 nt, Human
agaauauucagga

SEQ ID NO: 2356452 - RNA, 15 nt, Human
agaauauucaggacu

SEQ ID NO: 2356453 - RNA, 11 nt, Human
agaauauuuau

SEQ ID NO: 2356454 - RNA, 15 nt, Human
agaauggggugcaug

SEQ ID NO: 2356455 - RNA, 19 nt, Human
agaaugggcaguuacaugc

SEQ ID NO: 2356456 - RNA, 18 nt, Human
agaauggggaucacagag

SEQ ID NO: 2356457 - RNA, 17 nt, Human
agaaugggcaguuacau

SEQ ID NO: 2356458 - RNA, 16 nt, Human
agaaugggcaguuaca

SEQ ID NO: 2356459 - RNA, 18 nt, Human
agaaucccuggcaaaggg

SEQ ID NO: 2356460 - RNA, 19 nt, Human
agaaucccaaauuugauug

SEQ ID NO: 2356461 - RNA, 22 nt, Human
agaauccacccauccuaccaau

SEQ ID NO: 2356462 - RNA, 18 nt, Human
agaaucccacuuucuaua

SEQ ID NO: 2356463 - RNA, 18 nt, Human
agaaucccaaauuugauu

SEQ ID NO: 2356464 - RNA, 17 nt, Human
agaaucccaaauuugau

SEQ ID NO: 2356465 - RNA, 15 nt, Human
agaaucccaaauuug

SEQ ID NO: 2356466 - RNA, 23 nt, Human
agaaugguugccuuaaagaaagu

SEQ ID NO: 2356467 - RNA, 21 nt, Human
agaaugguugccuuaaagaaa

SEQ ID NO: 2356468 - RNA, 21 nt, Human
agaauaagucauguuccuuca

SEQ ID NO: 2356469 - RNA, 21 nt, Human
agaauaaguuauugcaguuua

SEQ ID NO: 2356470 - RNA, 19 nt, Human
agaauaaguuauugcaguu

SEQ ID NO: 2356471 - RNA, 20 nt, Human
agaauaaguuauugcaguuu

SEQ ID NO: 2356472 - RNA, 14 nt, Human
agaauaauaagagg

SEQ ID NO: 2356473 - RNA, 23 nt, Human
agaauaauaugcugccaaauuuu

SEQ ID NO: 2356474 - RNA, 22 nt, Human
agaauaauaugcugccaaauuu

SEQ ID NO: 2356475 - RNA, 19 nt, Human
agaauacuguuaaaggaaa

SEQ ID NO: 2356476 - RNA, 12 nt, Human
agaauaaguuau

SEQ ID NO: 2356477 - RNA, 15 nt, Human
agaauaagucauguu

SEQ ID NO: 2356478 - RNA, 18 nt, Human
agaauaagucauguuccu

SEQ ID NO: 2356479 - RNA, 16 nt, Human
agaauaagagaaagaa

SEQ ID NO: 2356480 - RNA, 21 nt, Human
agaauaagagaaagaaaauga

SEQ ID NO: 2356481 - RNA, 22 nt, Human
agaauaagagagucauaaaccu

SEQ ID NO: 2356482 - RNA, 13 nt, Human
agaauaaguuauu

SEQ ID NO: 2356483 - RNA, 14 nt, Human
agaauaaguuauug

SEQ ID NO: 2356484 - RNA, 16 nt, Human
agaauaaguuauugca

SEQ ID NO: 2356485 - RNA, 17 nt, Human
agaauaaguuauugcag

SEQ ID NO: 2356486 - RNA, 12 nt, Human
agaauaaaauuu

SEQ ID NO: 2356487 - RNA, 14 nt, Human
agaauaaaauuuuu

SEQ ID NO: 2356488 - RNA, 17 nt, Human
agaauaaaauuuuuaau

SEQ ID NO: 2356489 - RNA, 12 nt, Human
agaauaaaauug

SEQ ID NO: 2356490 - RNA, 13 nt, Human
agaauaaaauugu

SEQ ID NO: 2356491 - RNA, 14 nt, Human
agaauaaaauugua

SEQ ID NO: 2356492 - RNA, 14 nt, Human
agaauaagagaaag

SEQ ID NO: 2356493 - RNA, 16 nt, Human
agaauacuuuucucuu

SEQ ID NO: 2356494 - RNA, 22 nt, Human
agaauagaaauaaaggauguga

SEQ ID NO: 2356495 - RNA, 20 nt, Human
agaauacuguuaaaggaaaa

SEQ ID NO: 2356496 - RNA, 14 nt, Human
agaauacuuuucuc

SEQ ID NO: 2356497 - RNA, 16 nt, Human
agaauagaugcugacu

SEQ ID NO: 2356498 - RNA, 17 nt, Human
agaauagccacauuugg

SEQ ID NO: 2356499 - RNA, 17 nt, Human
agaauauccaugaccua

SEQ ID NO: 2356500 - RNA, 11 nt, Human
agaauaucugg

SEQ ID NO: 2356501 - RNA, 19 nt, Human
agaauauccuacuucucca

SEQ ID NO: 2356502 - RNA, 21 nt, Human
agaauauuagcuuuacuguuu

SEQ ID NO: 2356503 - RNA, 20 nt, Human
agaauauuagcuuuacuguu

SEQ ID NO: 2356504 - RNA, 19 nt, Human
agaauauuagcuuuacugu

SEQ ID NO: 2356505 - RNA, 19 nt, Human
agaaguuaagcaacaucua

SEQ ID NO: 2356506 - RNA, 14 nt, Human
agaaguuacugaau

SEQ ID NO: 2356507 - RNA, 15 nt, Human
agaaguuacugaaug

SEQ ID NO: 2356508 - RNA, 23 nt, Human
agaaguuauuuucuacagugguu

SEQ ID NO: 2356509 - RNA, 12 nt, Human
agaagugugauu

SEQ ID NO: 2356510 - RNA, 14 nt, Human
agaagugugauugg

SEQ ID NO: 2356511 - RNA, 22 nt, Human
agaagugugauugggaauaaau

SEQ ID NO: 2356512 - RNA, 15 nt, Human
agaaguuaagcaaca

SEQ ID NO: 2356513 - RNA, 23 nt, Human
agaagugugauugggaauaaaua

SEQ ID NO: 2356514 - RNA, 23 nt, Human
agaagugggccaggacaggcccg

SEQ ID NO: 2356515 - RNA, 19 nt, Human
agaagugggccaggacagg

SEQ ID NO: 2356516 - RNA, 18 nt, Human
agaagugggccaggacag

SEQ ID NO: 2356517 - RNA, 17 nt, Human
agaagugggccaggaca

SEQ ID NO: 2356518 - RNA, 20 nt, Human
agaaguggggacagagcaga

SEQ ID NO: 2356519 - RNA, 21 nt, Human
agaaguuucugccgcagcccu

SEQ ID NO: 2356520 - RNA, 22 nt, Human
agaaguuucugccgcagcccug

SEQ ID NO: 2356521 - RNA, 23 nt, Human
agaaguuucugccgcagcccugc

SEQ ID NO: 2356522 - RNA, 20 nt, Human
agaaguuuuuguacuguaaa

SEQ ID NO: 2356523 - RNA, 21 nt, Human
agaaguuuuuguacuguaaag

SEQ ID NO: 2356524 - RNA, 22 nt, Human
agaaguuuuuguacuguaaaga

SEQ ID NO: 2356525 - RNA, 13 nt, Human
agaauaaaauguu

SEQ ID NO: 2356526 - RNA, 14 nt, Human
agaauaaaauguug

SEQ ID NO: 2356527 - RNA, 16 nt, Human
agaauaaaauguugaa

SEQ ID NO: 2356528 - RNA, 20 nt, Human
agaauaaaauguugaaaagu

SEQ ID NO: 2356529 - RNA, 13 nt, Human
agaaggcagccac

SEQ ID NO: 2356530 - RNA, 22 nt, Human
agaaggcaaguuucuagcuaga

SEQ ID NO: 2356531 - RNA, 13 nt, Human
agaaggccaagaa

SEQ ID NO: 2356532 - RNA, 22 nt, Human
agaaggcauaucagucucugag

SEQ ID NO: 2356533 - RNA, 15 nt, Human
agaaggcaaaaaugu

SEQ ID NO: 2356534 - RNA, 14 nt, Human
agaaggcaaaugac

SEQ ID NO: 2356535 - RNA, 20 nt, Human
agaaggcaaaugacuuugga

SEQ ID NO: 2356536 - RNA, 15 nt, Human
agaaggcaaaugacu

SEQ ID NO: 2356537 - RNA, 15 nt, Human
agaaggcagggaaag

SEQ ID NO: 2356538 - RNA, 14 nt, Human
agaaggccacaugu

SEQ ID NO: 2356539 - RNA, 11 nt, Human
agaaggcucuu

SEQ ID NO: 2356540 - RNA, 12 nt, Human
agaaggcucuuc

SEQ ID NO: 2356541 - RNA, 13 nt, Human
agaaggccaagag

SEQ ID NO: 2356542 - RNA, 17 nt, Human
agaaggccaagaggcug

SEQ ID NO: 2356543 - RNA, 18 nt, Human
agaaggcucuucugacua

SEQ ID NO: 2356544 - RNA, 23 nt, Human
agaaguggaccaggacaggacca

SEQ ID NO: 2356545 - RNA, 18 nt, Human
ucugcuuuccucuuccug

SEQ ID NO: 2356546 - RNA, 13 nt, Human
ucugcuuuccucu

SEQ ID NO: 2356547 - RNA, 12 nt, Human
ucugcuuuccuc

SEQ ID NO: 2356548 - RNA, 15 nt, Human
ucugcuuuauguugc

SEQ ID NO: 2356549 - RNA, 13 nt, Human
ucugcuuuccaca

SEQ ID NO: 2356550 - RNA, 15 nt, Human
ucugcucagcagcua

SEQ ID NO: 2356551 - RNA, 19 nt, Human
ucugcuuguuauuagagau

SEQ ID NO: 2356552 - RNA, 14 nt, Human
ucugcuuguguuaa

SEQ ID NO: 2356553 - RNA, 22 nt, Human
agacacacacacgcacgcacac

SEQ ID NO: 2356554 - RNA, 23 nt, Human
agacacacacacgcacgcacaca

SEQ ID NO: 2356555 - RNA, 16 nt, Human
agacacagggacuuga

SEQ ID NO: 2356556 - RNA, 19 nt, Human
agacacagggacuugaagu

SEQ ID NO: 2356557 - RNA, 20 nt, Human
agacacagggacuugaaguu

SEQ ID NO: 2356558 - RNA, 22 nt, Human
agacacagggacuugaaguugu

SEQ ID NO: 2356559 - RNA, 16 nt, Human
agacacaggcccggcu

SEQ ID NO: 2356560 - RNA, 12 nt, Human
agacacaggccc

SEQ ID NO: 2356561 - RNA, 13 nt, Human
agacacaggcccg

SEQ ID NO: 2356562 - RNA, 12 nt, Human
agacacacacac

SEQ ID NO: 2356563 - RNA, 22 nt, Human
agaauuuuaagugcuuuguaau

SEQ ID NO: 2356564 - RNA, 21 nt, Human
agaauuuuaagugcuuuguaa

SEQ ID NO: 2356565 - RNA, 13 nt, Human
agacacacacaca

SEQ ID NO: 2356566 - RNA, 14 nt, Human
agacacacacacgc

SEQ ID NO: 2356567 - RNA, 15 nt, Human
agacacacacacgca

SEQ ID NO: 2356568 - RNA, 12 nt, Human
agacacacauga

SEQ ID NO: 2356569 - RNA, 15 nt, Human
agacacacaugaagu

SEQ ID NO: 2356570 - RNA, 12 nt, Human
agacacagacug

SEQ ID NO: 2356571 - RNA, 16 nt, Human
agacacacacacgcac

SEQ ID NO: 2356572 - RNA, 18 nt, Human
agacacacacacgcacgc

SEQ ID NO: 2356573 - RNA, 20 nt, Human
agacacacacacgcacgcac

SEQ ID NO: 2356574 - RNA, 21 nt, Human
agacacacacacgcacgcaca

SEQ ID NO: 2356575 - RNA, 18 nt, Human
agaauuuuaaauuauaac

SEQ ID NO: 2356576 - RNA, 15 nt, Human
agaauuuuaaauuau

SEQ ID NO: 2356577 - RNA, 13 nt, Human
agaauuuuaaauu

SEQ ID NO: 2356578 - RNA, 21 nt, Human
agaauuuuaaaaaugaauccu

SEQ ID NO: 2356579 - RNA, 16 nt, Human
agaauuuuaagugcuu

SEQ ID NO: 2356580 - RNA, 12 nt, Human
agaauuuuaaaa

SEQ ID NO: 2356581 - RNA, 14 nt, Human
agaauuuuaaaaau

SEQ ID NO: 2356582 - RNA, 16 nt, Human
agaauuuuaaaaauga

SEQ ID NO: 2356583 - RNA, 17 nt, Human
agaauuuuaaaaaugaa

SEQ ID NO: 2356584 - RNA, 18 nt, Human
agaauuuuaaaaaugaau

SEQ ID NO: 2356585 - RNA, 19 nt, Human
agaauuuuaaaaaugaauc

SEQ ID NO: 2356586 - RNA, 20 nt, Human
agaauuuuaaaaaugaaucc

SEQ ID NO: 2356587 - RNA, 22 nt, Human
agaauugaucauuuucccccca

SEQ ID NO: 2356588 - RNA, 21 nt, Human
agaauugaucauuuucccccc

SEQ ID NO: 2356589 - RNA, 20 nt, Human
agaauugauauacacggaug

SEQ ID NO: 2356590 - RNA, 19 nt, Human
agaauugaacccaggaggu

SEQ ID NO: 2356591 - RNA, 18 nt, Human
agaauugaacccaggagg

SEQ ID NO: 2356592 - RNA, 22 nt, Human
agaauugaacccaggaggugga

SEQ ID NO: 2356593 - RNA, 16 nt, Human
agacacauaugagggg

SEQ ID NO: 2356594 - RNA, 14 nt, Human
agacacauaugagg

SEQ ID NO: 2356595 - RNA, 16 nt, Human
agacacauguccaaga

SEQ ID NO: 2356596 - RNA, 20 nt, Human
agacacauguccaagaagcc

SEQ ID NO: 2356597 - RNA, 19 nt, Human
agacacugaccauccacuc

SEQ ID NO: 2356598 - RNA, 20 nt, Human
agacaccugcaccucccccc

SEQ ID NO: 2356599 - RNA, 18 nt, Human
agacaccuugacagggca

SEQ ID NO: 2356600 - RNA, 21 nt, Human
agacaccugcaccucccccca

SEQ ID NO: 2356601 - RNA, 17 nt, Human
agacaccugcaccuccc

SEQ ID NO: 2356602 - RNA, 16 nt, Human
agacaccugcaccucc

SEQ ID NO: 2356603 - RNA, 14 nt, Human
agacaccugcaccu

SEQ ID NO: 2356604 - RNA, 17 nt, Human
agacaccuugacagggc

SEQ ID NO: 2356605 - RNA, 16 nt, Human
agacaggaccagggau

SEQ ID NO: 2356606 - RNA, 19 nt, Human
agacagagaccuccugccu

SEQ ID NO: 2356607 - RNA, 15 nt, Human
agacagagaggacug

SEQ ID NO: 2356608 - RNA, 20 nt, Human
agacagagaggacuguaggg

SEQ ID NO: 2356609 - RNA, 22 nt, Human
agacacuguuuacaagaaaaaa

SEQ ID NO: 2356610 - RNA, 20 nt, Human
agacacuguuuacaagaaaa

SEQ ID NO: 2356611 - RNA, 19 nt, Human
agacacuguuuacaagaaa

SEQ ID NO: 2356612 - RNA, 18 nt, Human
agacacuguuuacaagaa

SEQ ID NO: 2356613 - RNA, 18 nt, Human
agacacugguuuacacuu

SEQ ID NO: 2356614 - RNA, 20 nt, Human
agacacugguuuacacuuua

SEQ ID NO: 2356615 - RNA, 13 nt, Human
agacacuugccuu

SEQ ID NO: 2356616 - RNA, 16 nt, Human
agacagagaccuccug

SEQ ID NO: 2356617 - RNA, 21 nt, Human
agacagagaccuccugccucc

SEQ ID NO: 2356618 - RNA, 20 nt, Human
agacacuucuaaaugaagug

SEQ ID NO: 2356619 - RNA, 20 nt, Human
agacacugccacacaggguc

SEQ ID NO: 2356620 - RNA, 13 nt, Human
agacacuggcccc

SEQ ID NO: 2356621 - RNA, 15 nt, Human
agacacuggccccuc

SEQ ID NO: 2356622 - RNA, 16 nt, Human
agacacuggccccuca

SEQ ID NO: 2356623 - RNA, 18 nt, Human
agacacuggcugccagcu

SEQ ID NO: 2356624 - RNA, 20 nt, Human
agacacuggcugccagcuau

SEQ ID NO: 2356625 - RNA, 14 nt, Human
ucuguugucauugc

SEQ ID NO: 2356626 - RNA, 18 nt, Human
ucuguugucauugcuguu

SEQ ID NO: 2356627 - RNA, 15 nt, Human
ucuguuguccucccc

SEQ ID NO: 2356628 - RNA, 17 nt, Human
ucuguuguccuccccuu

SEQ ID NO: 2356629 - RNA, 19 nt, Human
ucuguuguccuccccuugg

SEQ ID NO: 2356630 - RNA, 18 nt, Human
ucuguuggcaggcuggcc

SEQ ID NO: 2356631 - RNA, 20 nt, Human
ucuguuggcaggcuggccag

SEQ ID NO: 2356632 - RNA, 17 nt, Human
ucuguuuaaaguagauu

SEQ ID NO: 2356633 - RNA, 21 nt, Human
ucuguuguccuccccuugggc

SEQ ID NO: 2356634 - RNA, 15 nt, Human
ucuguuuaauacuca

SEQ ID NO: 2356635 - RNA, 17 nt, Human
ucuguuuaauacucauc

SEQ ID NO: 2356636 - RNA, 14 nt, Human
ucuguuuacagugu

SEQ ID NO: 2356637 - RNA, 17 nt, Human
agaauugaacccaggag

SEQ ID NO: 2356638 - RNA, 16 nt, Human
agaauugaacccagga

SEQ ID NO: 2356639 - RNA, 13 nt, Human
agaauucuuucaa

SEQ ID NO: 2356640 - RNA, 17 nt, Human
agaauucuucaggugga

SEQ ID NO: 2356641 - RNA, 14 nt, Human
agaauucuuucaag

SEQ ID NO: 2356642 - RNA, 23 nt, Human
agaauucuuacauguuuucuuug

SEQ ID NO: 2356643 - RNA, 20 nt, Human
agaauucuuacauguuuucu

SEQ ID NO: 2356644 - RNA, 19 nt, Human
agaauucuuacauguuuuc

SEQ ID NO: 2356645 - RNA, 17 nt, Human
agaauucuuacauguuu

SEQ ID NO: 2356646 - RNA, 16 nt, Human
agaauucuuacauguu

SEQ ID NO: 2356647 - RNA, 23 nt, Human
ucuguuuaauacucauccuugua

SEQ ID NO: 2356648 - RNA, 20 nt, Human
ucuguuuacaucaguuuuaa

SEQ ID NO: 2356649 - RNA, 13 nt, Human
ucuguuuagauaa

SEQ ID NO: 2356650 - RNA, 16 nt, Human
ucuguugcccaggcug

SEQ ID NO: 2356651 - RNA, 18 nt, Human
ucuguugccacaacccug

SEQ ID NO: 2356652 - RNA, 15 nt, Human
ucuguugccaggcua

SEQ ID NO: 2356653 - RNA, 15 nt, Human
ucuguuggcaggcug

SEQ ID NO: 2356654 - RNA, 15 nt, Human
ucuguugcugccuca

SEQ ID NO: 2356655 - RNA, 12 nt, Human
ucuguuggccag

SEQ ID NO: 2356656 - RNA, 17 nt, Human
ucuguuggccaguguga

SEQ ID NO: 2356657 - RNA, 12 nt, Human
ucuguugaaguu

SEQ ID NO: 2356658 - RNA, 12 nt, Human
ucuguugcaaac

SEQ ID NO: 2356659 - RNA, 16 nt, Human
ucuguugcaagugcaa

SEQ ID NO: 2356660 - RNA, 22 nt, Human
ucuguucuuuccaaaguacacu

SEQ ID NO: 2356661 - RNA, 13 nt, Human
ucuguucuuucca

SEQ ID NO: 2356662 - RNA, 20 nt, Human
ucugugagcaucacaguuuu

SEQ ID NO: 2356663 - RNA, 20 nt, Human
ucugugaaaugcuggcauuu

SEQ ID NO: 2356664 - RNA, 17 nt, Human
ucugugaaaugcuggca

SEQ ID NO: 2356665 - RNA, 17 nt, Human
ucugugaacgauuuaga

SEQ ID NO: 2356666 - RNA, 21 nt, Human
ucugugaacgauuuagaaaga

SEQ ID NO: 2356667 - RNA, 14 nt, Human
ucugugagaugcua

SEQ ID NO: 2356668 - RNA, 22 nt, Human
ucugugagaugcuagaacuccc

SEQ ID NO: 2356669 - RNA, 17 nt, Human
ucugugagaugcuagaa

SEQ ID NO: 2356670 - RNA, 23 nt, Human
ucugugagaugcuagaacucccu

SEQ ID NO: 2356671 - RNA, 17 nt, Human
ucugugagacucgagaa

SEQ ID NO: 2356672 - RNA, 21 nt, Human
ucugugagacucgagaacuuu

SEQ ID NO: 2356673 - RNA, 17 nt, Human
ucugugagauucauuca

SEQ ID NO: 2356674 - RNA, 19 nt, Human
ucugugagauucauucaug

SEQ ID NO: 2356675 - RNA, 23 nt, Human
ucuguauuuuauuuagacaagag

SEQ ID NO: 2356676 - RNA, 20 nt, Human
ucugggcccggccauguccu

SEQ ID NO: 2356677 - RNA, 18 nt, Human
ucugggccaagucaaaga

SEQ ID NO: 2356678 - RNA, 18 nt, Human
ucugggcccccuccuccc

SEQ ID NO: 2356679 - RNA, 23 nt, Human
ucugggccaaguuccucuagugc

SEQ ID NO: 2356680 - RNA, 21 nt, Human
ucugggccauucuccacagca

SEQ ID NO: 2356681 - RNA, 15 nt, Human
ucugggccagaauuu

SEQ ID NO: 2356682 - RNA, 14 nt, Human
ucugggccagaauu

SEQ ID NO: 2356683 - RNA, 19 nt, Human
ucugucagaugggaagaca

SEQ ID NO: 2356684 - RNA, 18 nt, Human
ucugucagaugggaagac

SEQ ID NO: 2356685 - RNA, 17 nt, Human
ucugucacugcaggcac

SEQ ID NO: 2356686 - RNA, 16 nt, Human
ucugugaaaguacauu

SEQ ID NO: 2356687 - RNA, 22 nt, Human
ucugugaaaggaaagagggagg

SEQ ID NO: 2356688 - RNA, 13 nt, Human
ucugucacuuaau

SEQ ID NO: 2356689 - RNA, 14 nt, Human
ucugucaaugaaaa

SEQ ID NO: 2356690 - RNA, 15 nt, Human
ucugucacaccagcc

SEQ ID NO: 2356691 - RNA, 19 nt, Human
ucugucaccaauugguuaa

SEQ ID NO: 2356692 - RNA, 16 nt, Human
ucugucacccaggcug

SEQ ID NO: 2356693 - RNA, 17 nt, Human
ucugucacccaggcugg

SEQ ID NO: 2356694 - RNA, 13 nt, Human
ucugucaagaaga

SEQ ID NO: 2356695 - RNA, 23 nt, Human
ucugcuccacccuuggccugucu

SEQ ID NO: 2356696 - RNA, 21 nt, Human
ucugcuccacccuuggccugu

SEQ ID NO: 2356697 - RNA, 20 nt, Human
ucugcuccacccuuggccug

SEQ ID NO: 2356698 - RNA, 13 nt, Human
ucugcuucagccu

SEQ ID NO: 2356699 - RNA, 14 nt, Human
ucugcuucagccuc

SEQ ID NO: 2356700 - RNA, 15 nt, Human
ucugcuucagccucc

SEQ ID NO: 2356701 - RNA, 18 nt, Human
ucugcuugcucuuguccu

SEQ ID NO: 2356702 - RNA, 13 nt, Human
ucugcuucagugg

SEQ ID NO: 2356703 - RNA, 14 nt, Human
ucugcuucagugga

SEQ ID NO: 2356704 - RNA, 20 nt, Human
ucugcgugucaccugugcuu

SEQ ID NO: 2356705 - RNA, 19 nt, Human
ucugcgugucaccugugcu

SEQ ID NO: 2356706 - RNA, 15 nt, Human
ucugcgugucaccug

SEQ ID NO: 2356707 - RNA, 21 nt, Human
ucugcuaacuuggagccccag

SEQ ID NO: 2356708 - RNA, 17 nt, Human
ucugcucacauaucugu

SEQ ID NO: 2356709 - RNA, 19 nt, Human
ucugcucacauaucuguca

SEQ ID NO: 2356710 - RNA, 20 nt, Human
ucugcucacauaucugucau

SEQ ID NO: 2356711 - RNA, 19 nt, Human
ucugcuccacccuuggccu

SEQ ID NO: 2356712 - RNA, 18 nt, Human
ucugcuccacccuuggcc

SEQ ID NO: 2356713 - RNA, 17 nt, Human
ucugcuccacccuuggc

SEQ ID NO: 2356714 - RNA, 16 nt, Human
ucugcuccacccuugg

SEQ ID NO: 2356715 - RNA, 15 nt, Human
ucugcuccacccuug

SEQ ID NO: 2356716 - RNA, 14 nt, Human
ucugcuccacccuu

SEQ ID NO: 2356717 - RNA, 12 nt, Human
ucugcuccaccc

SEQ ID NO: 2356718 - RNA, 20 nt, Human
ucugcuccaccacauccucc

SEQ ID NO: 2356719 - RNA, 14 nt, Human
ucugcuccaccaca

SEQ ID NO: 2356720 - RNA, 12 nt, Human
ucugcuccacca

SEQ ID NO: 2356721 - RNA, 10 nt, Human
ucugcuccac

SEQ ID NO: 2356722 - RNA, 23 nt, Human
ucugcucaucauucucugucuca

SEQ ID NO: 2356723 - RNA, 14 nt, Human
ucugcucagcagcu

SEQ ID NO: 2356724 - RNA, 13 nt, Human
ucugcucagcagc

SEQ ID NO: 2356725 - RNA, 22 nt, Human
ucugcucagacagaaccccuac

SEQ ID NO: 2356726 - RNA, 17 nt, Human
ucugcgucaugcuugug

SEQ ID NO: 2356727 - RNA, 16 nt, Human
ucugcgucaugcuugu

SEQ ID NO: 2356728 - RNA, 22 nt, Human
ucugcgugguuccuuucucagc

SEQ ID NO: 2356729 - RNA, 15 nt, Human
ucugcgucuguguug

SEQ ID NO: 2356730 - RNA, 16 nt, Human
ucugcgugacaauaaa

SEQ ID NO: 2356731 - RNA, 12 nt, Human
ucugccuguccc

SEQ ID NO: 2356732 - RNA, 21 nt, Human
ucugccuggaguguaugacug

SEQ ID NO: 2356733 - RNA, 23 nt, Human
ucugccuggagacuuagggcacc

SEQ ID NO: 2356734 - RNA, 12 nt, Human
ucugccugcccc

SEQ ID NO: 2356735 - RNA, 14 nt, Human
ucugccugccccgc

SEQ ID NO: 2356736 - RNA, 12 nt, Human
ucugccuggagu

SEQ ID NO: 2356737 - RNA, 13 nt, Human
ucugccuggagug

SEQ ID NO: 2356738 - RNA, 21 nt, Human
ucugccugcccaggccccugc

SEQ ID NO: 2356739 - RNA, 22 nt, Human
ucugccugcccaggccccugcc

SEQ ID NO: 2356740 - RNA, 18 nt, Human
ucugccgcaauacaggaa

SEQ ID NO: 2356741 - RNA, 22 nt, Human
ucugccgcagcccugcagaggg

SEQ ID NO: 2356742 - RNA, 18 nt, Human
ucugcccugcccuagcuc

SEQ ID NO: 2356743 - RNA, 21 nt, Human
agaagccaagggaaaggggug

SEQ ID NO: 2356744 - RNA, 10 nt, Human
ucugcccugc

SEQ ID NO: 2356745 - RNA, 12 nt, Human
ucugcccugcgg

SEQ ID NO: 2356746 - RNA, 11 nt, Human
ucugcccugcg

SEQ ID NO: 2356747 - RNA, 14 nt, Human
ucugccgcagcccu

SEQ ID NO: 2356748 - RNA, 15 nt, Human
ucugccgcagcccug

SEQ ID NO: 2356749 - RNA, 18 nt, Human
ucugcccacucccugcaa

SEQ ID NO: 2356750 - RNA, 21 nt, Human
ucugcccacucccugcaaccu

SEQ ID NO: 2356751 - RNA, 18 nt, Human
ucugcccuccaagaccuu

SEQ ID NO: 2356752 - RNA, 19 nt, Human
ucugcccuccaagaccuuc

SEQ ID NO: 2356753 - RNA, 23 nt, Human
agaaauuccuugauucacaauga

SEQ ID NO: 2356754 - RNA, 23 nt, Human
agaaauuccuguagcaucuucug

SEQ ID NO: 2356755 - RNA, 16 nt, Human
agaaauuccuguagca

SEQ ID NO: 2356756 - RNA, 19 nt, Human
agaaauuccuguagcaucu

SEQ ID NO: 2356757 - RNA, 20 nt, Human
agaaauuccuguagcaucuu

SEQ ID NO: 2356758 - RNA, 17 nt, Human
agaaauugcauuuccug

SEQ ID NO: 2356759 - RNA, 20 nt, Human
agaaauugcauuuccugaca

SEQ ID NO: 2356760 - RNA, 22 nt, Human
agaacugccuuuggcagaguuc

SEQ ID NO: 2356761 - RNA, 23 nt, Human
agaacugcuuucuuucguuuguu

SEQ ID NO: 2356762 - RNA, 20 nt, Human
agaacuggacucaggaugcc

SEQ ID NO: 2356763 - RNA, 17 nt, Human
agaacuggacucaggau

SEQ ID NO: 2356764 - RNA, 16 nt, Human
agaacuggacucagga

SEQ ID NO: 2356765 - RNA, 15 nt, Human
agaacuggacucagg

SEQ ID NO: 2356766 - RNA, 19 nt, Human
agaacuguaugucagacau

SEQ ID NO: 2356767 - RNA, 22 nt, Human
agaacuggacucaggaugccca

SEQ ID NO: 2356768 - RNA, 20 nt, Human
agaacuguguuucaaguuca

SEQ ID NO: 2356769 - RNA, 21 nt, Human
agaacuguguuucaaguucaa

SEQ ID NO: 2356770 - RNA, 19 nt, Human
agaacuguguuucaaguuc

SEQ ID NO: 2356771 - RNA, 13 nt, Human
agaagaacaucca

SEQ ID NO: 2356772 - RNA, 13 nt, Human
agaagaacugaaa

SEQ ID NO: 2356773 - RNA, 19 nt, Human
agaagaacuauaugugaau

SEQ ID NO: 2356774 - RNA, 20 nt, Human
agaagaauacaaacauauuu

SEQ ID NO: 2356775 - RNA, 14 nt, Human
agaagaaguguguc

SEQ ID NO: 2356776 - RNA, 14 nt, Human
agaagaacugaaau

SEQ ID NO: 2356777 - RNA, 23 nt, Human
agaagaauuuucagaccccagcg

SEQ ID NO: 2356778 - RNA, 22 nt, Human
agaagaauuuucagaccccagc

SEQ ID NO: 2356779 - RNA, 19 nt, Human
agaagaauugaacccagga

SEQ ID NO: 2356780 - RNA, 13 nt, Human
agaagacaaaauu

SEQ ID NO: 2356781 - RNA, 18 nt, Human
agaagaugguaccaccag

SEQ ID NO: 2356782 - RNA, 18 nt, Human
agaagaauauucaggacu

SEQ ID NO: 2356783 - RNA, 19 nt, Human
agaagaauauucaggacuu

SEQ ID NO: 2356784 - RNA, 14 nt, Human
agaagaauauucag

SEQ ID NO: 2356785 - RNA, 15 nt, Human
agaagaauauucagg

SEQ ID NO: 2356786 - RNA, 16 nt, Human
agaagaauauucagga

SEQ ID NO: 2356787 - RNA, 20 nt, Human
agaagaauugaacccaggag

SEQ ID NO: 2356788 - RNA, 17 nt, Human
agaagaauugaacccag

SEQ ID NO: 2356789 - RNA, 19 nt, Human
agaagauuugaugcuggag

SEQ ID NO: 2356790 - RNA, 22 nt, Human
agaagauguuuaacuuaaucaa

SEQ ID NO: 2356791 - RNA, 22 nt, Human
agaagauuugaugcuggagagg

SEQ ID NO: 2356792 - RNA, 19 nt, Human
agaagauggcacuuauaac

SEQ ID NO: 2356793 - RNA, 14 nt, Human
agaagauguuuaac

SEQ ID NO: 2356794 - RNA, 18 nt, Human
agaagauuuugaaauuuu

SEQ ID NO: 2356795 - RNA, 17 nt, Human
agaagcaacagaaaaaa

SEQ ID NO: 2356796 - RNA, 23 nt, Human
agaagauuugaugcuggagaggu

SEQ ID NO: 2356797 - RNA, 15 nt, Human
agaagcauuccuucu

SEQ ID NO: 2356798 - RNA, 17 nt, Human
agaagcauuccuucuuu

SEQ ID NO: 2356799 - RNA, 19 nt, Human
agaagcauuccuucuuuga

SEQ ID NO: 2356800 - RNA, 20 nt, Human
agaagcauuccuucuuugau

SEQ ID NO: 2356801 - RNA, 22 nt, Human
agaagcauuccuucuuugauaa

SEQ ID NO: 2356802 - RNA, 23 nt, Human
agaagcauuccuucuuugauaau

SEQ ID NO: 2356803 - RNA, 17 nt, Human
agaagccaaaagauugg

SEQ ID NO: 2356804 - RNA, 24 nt, Human
agaagcauuccuucuuugauaaug

SEQ ID NO: 2356805 - RNA, 16 nt, Human
agaagccacaggccug

SEQ ID NO: 2356806 - RNA, 22 nt, Human
agaagccaagggaaaggggugc

SEQ ID NO: 2356807 - RNA, 15 nt, Human
agaagccaagggaaa

SEQ ID NO: 2356808 - RNA, 16 nt, Human
agaagccaagggaaag

SEQ ID NO: 2356809 - RNA, 18 nt, Human
agaagccaagggaaaggg

SEQ ID NO: 2356810 - RNA, 19 nt, Human
agaagccaagggaaagggg

SEQ ID NO: 2356811 - RNA, 21 nt, Human
agaagcccaauauuauaauuu

SEQ ID NO: 2356812 - RNA, 17 nt, Human
agaagccacaggccuga

SEQ ID NO: 2356813 - RNA, 11 nt, Human
agaagcccaga

SEQ ID NO: 2356814 - RNA, 13 nt, Human
agaagcccagaau

SEQ ID NO: 2356815 - RNA, 12 nt, Human
agaagcccagaa

SEQ ID NO: 2356816 - RNA, 12 nt, Human
agaagcccagga

SEQ ID NO: 2356817 - RNA, 16 nt, Human
agaagcccaggaaagg

SEQ ID NO: 2356818 - RNA, 18 nt, Human
agaagcccaggaaaggcu

SEQ ID NO: 2356819 - RNA, 20 nt, Human
agaagcccaggaaaggcucc

SEQ ID NO: 2356820 - RNA, 21 nt, Human
agaagcccaggaaaggcucca

SEQ ID NO: 2356821 - RNA, 22 nt, Human
agaagcccaggaaaggcuccag

SEQ ID NO: 2356822 - RNA, 16 nt, Human
ucugcccacucccugc

SEQ ID NO: 2356823 - RNA, 17 nt, Human
ucugcccacucccugca

SEQ ID NO: 2356824 - RNA, 19 nt, Human
ucugcagggggugugucug

SEQ ID NO: 2356825 - RNA, 13 nt, Human
ucugcaggucccu

SEQ ID NO: 2356826 - RNA, 11 nt, Human
ucugcaggucc

SEQ ID NO: 2356827 - RNA, 12 nt, Human
ucugcagguccc

SEQ ID NO: 2356828 - RNA, 13 nt, Human
ucugcaggcaggg

SEQ ID NO: 2356829 - RNA, 17 nt, Human
agaaaugguuguauuag

SEQ ID NO: 2356830 - RNA, 18 nt, Human
agaaaugguuguauuaga

SEQ ID NO: 2356831 - RNA, 19 nt, Human
agaaaugguuguauuagau

SEQ ID NO: 2356832 - RNA, 20 nt, Human
agaaaugguuguauuagaug

SEQ ID NO: 2356833 - RNA, 21 nt, Human
agaaaugguuguauuagaugu

SEQ ID NO: 2356834 - RNA, 22 nt, Human
agaaaugguuguauuagauguu

SEQ ID NO: 2356835 - RNA, 23 nt, Human
agaaaugguuguauuagauguuc

SEQ ID NO: 2356836 - RNA, 15 nt, Human
agaaauguacagcaa

SEQ ID NO: 2356837 - RNA, 14 nt, Human
agaaauguacagca

SEQ ID NO: 2356838 - RNA, 14 nt, Human
ucugcaggcagggc

SEQ ID NO: 2356839 - RNA, 16 nt, Human
ucugcaggcagacacg

SEQ ID NO: 2356840 - RNA, 17 nt, Human
ucugcagcaauaaagca

SEQ ID NO: 2356841 - RNA, 15 nt, Human
ucugcagauaaacag

SEQ ID NO: 2356842 - RNA, 18 nt, Human
ucugcagauaaacaguag

SEQ ID NO: 2356843 - RNA, 21 nt, Human
ucugaugcaagcaagaaacac

SEQ ID NO: 2356844 - RNA, 17 nt, Human
ucugcacuccccugcug

SEQ ID NO: 2356845 - RNA, 16 nt, Human
ucugcacuccccugcu

SEQ ID NO: 2356846 - RNA, 14 nt, Human
ucugcacuccccug

SEQ ID NO: 2356847 - RNA, 15 nt, Human
ucugcacuccccugc

SEQ ID NO: 2356848 - RNA, 18 nt, Human
ucugagugaaccuguaua

SEQ ID NO: 2356849 - RNA, 21 nt, Human
ucugaucauccacugugccau

SEQ ID NO: 2356850 - RNA, 13 nt, Human
ucugagugaaccu

SEQ ID NO: 2356851 - RNA, 17 nt, Human
ucugaucauccacugug

SEQ ID NO: 2356852 - RNA, 15 nt, Human
ucugaucuccauggc

SEQ ID NO: 2356853 - RNA, 21 nt, Human
ucugaucuccauggcuuccuc

SEQ ID NO: 2356854 - RNA, 21 nt, Human
ucugaucgugacgcugaauaa

SEQ ID NO: 2356855 - RNA, 22 nt, Human
ucugaucgugacgcugaauaaa

SEQ ID NO: 2356856 - RNA, 21 nt, Human
ucugaucccucuacagagcuu

SEQ ID NO: 2356857 - RNA, 20 nt, Human
ucugaucgugacgcugaaua

SEQ ID NO: 2356858 - RNA, 16 nt, Human
ucugaugaugugccug

SEQ ID NO: 2356859 - RNA, 16 nt, Human
ucugaugcaagcaaga

SEQ ID NO: 2356860 - RNA, 22 nt, Human
ucugaucugugcuuuccagcuc

SEQ ID NO: 2356861 - RNA, 23 nt, Human
ucugaucugugcuuuccagcuca

SEQ ID NO: 2356862 - RNA, 14 nt, Human
ucugaucugugcuu

SEQ ID NO: 2356863 - RNA, 15 nt, Human
ucugaucugugcuuu

SEQ ID NO: 2356864 - RNA, 18 nt, Human
ucugaucugugcuuucca

SEQ ID NO: 2356865 - RNA, 21 nt, Human
ucugaucugugcuuuccagcu

SEQ ID NO: 2356866 - RNA, 18 nt, Human
ucugaguaucuccucgca

SEQ ID NO: 2356867 - RNA, 23 nt, Human
ucugaguaucuccucgcaagcug

SEQ ID NO: 2356868 - RNA, 20 nt, Human
ucugagugaaccuguauaag

SEQ ID NO: 2356869 - RNA, 14 nt, Human
ucugagucccagga

SEQ ID NO: 2356870 - RNA, 23 nt, Human
ucugagucccaggagcugcccag

SEQ ID NO: 2356871 - RNA, 24 nt, Human
ucugagucccaggagcugcccaga

SEQ ID NO: 2356872 - RNA, 21 nt, Human
ucugagacucgcgacaaugca

SEQ ID NO: 2356873 - RNA, 21 nt, Human
ucugaggugccugucccaccc

SEQ ID NO: 2356874 - RNA, 20 nt, Human
ucugagaagguccuuaauga

SEQ ID NO: 2356875 - RNA, 18 nt, Human
ucugagaagguccuuaau

SEQ ID NO: 2356876 - RNA, 17 nt, Human
ucugagaagguccuuaa

SEQ ID NO: 2356877 - RNA, 12 nt, Human
ucugagaaucuu

SEQ ID NO: 2356878 - RNA, 15 nt, Human
ucugagaaucuuuau

SEQ ID NO: 2356879 - RNA, 19 nt, Human
ucugagaaucuuuauugag

SEQ ID NO: 2356880 - RNA, 22 nt, Human
ucugagaaucuuuauugagaaa

SEQ ID NO: 2356881 - RNA, 23 nt, Human
ucugagaaucuuuauugagaaag

SEQ ID NO: 2356882 - RNA, 19 nt, Human
ucugagacaaagcaaugga

SEQ ID NO: 2356883 - RNA, 18 nt, Human
ucugagaauuccaaggag

SEQ ID NO: 2356884 - RNA, 20 nt, Human
ucugagaauuccaaggaguu

SEQ ID NO: 2356885 - RNA, 12 nt, Human
ucugacugugug

SEQ ID NO: 2356886 - RNA, 14 nt, Human
ucugacugugugug

SEQ ID NO: 2356887 - RNA, 16 nt, Human
ucugacugaugcuuuc

SEQ ID NO: 2356888 - RNA, 14 nt, Human
ucugacucugagcu

SEQ ID NO: 2356889 - RNA, 12 nt, Human
ucugacucucaa

SEQ ID NO: 2356890 - RNA, 15 nt, Human
ucugacucucaaauc

SEQ ID NO: 2356891 - RNA, 16 nt, Human
ucugaaggacacuucc

SEQ ID NO: 2356892 - RNA, 19 nt, Human
ucugaaggacacuuccugc

SEQ ID NO: 2356893 - RNA, 20 nt, Human
ucugaaggacacuuccugcc

SEQ ID NO: 2356894 - RNA, 22 nt, Human
ucugaaggacauugcggacagc

SEQ ID NO: 2356895 - RNA, 12 nt, Human
ucugaauguucu

SEQ ID NO: 2356896 - RNA, 21 nt, Human
ucugaaggacacuuccugccu

SEQ ID NO: 2356897 - RNA, 22 nt, Human
ucugaauguucugacauuaaca

SEQ ID NO: 2356898 - RNA, 19 nt, Human
ucugaauguucugacauua

SEQ ID NO: 2356899 - RNA, 17 nt, Human
ucugaauguucugacau

SEQ ID NO: 2356900 - RNA, 16 nt, Human
ucugaauguucugaca

SEQ ID NO: 2356901 - RNA, 14 nt, Human
ucugaauguucuga

SEQ ID NO: 2356902 - RNA, 13 nt, Human
ucugaauguucug

SEQ ID NO: 2356903 - RNA, 13 nt, Human
ucugaauggucca

SEQ ID NO: 2356904 - RNA, 10 nt, Human
ucugaauuau

SEQ ID NO: 2356905 - RNA, 18 nt, Human
agaaaugcauccauuccu

SEQ ID NO: 2356906 - RNA, 18 nt, Human
agaaaugcauauuguauu

SEQ ID NO: 2356907 - RNA, 22 nt, Human
agaaaugcauccauuccucagg

SEQ ID NO: 2356908 - RNA, 12 nt, Human
agaaaugcagaa

SEQ ID NO: 2356909 - RNA, 15 nt, Human
agaaaugcauauugu

SEQ ID NO: 2356910 - RNA, 16 nt, Human
agaaaugcauauugua

SEQ ID NO: 2356911 - RNA, 13 nt, Human
ucugaagccucac

SEQ ID NO: 2356912 - RNA, 16 nt, Human
ucugaagccucuggga

SEQ ID NO: 2356913 - RNA, 21 nt, Human
ucugaaggacauugcggacag

SEQ ID NO: 2356914 - RNA, 21 nt, Human
ucugaagcugacgaacuucca

SEQ ID NO: 2356915 - RNA, 20 nt, Human
ucugaagcugacgaacuucc

SEQ ID NO: 2356916 - RNA, 23 nt, Human
ucugaauguucugacauuaacag

SEQ ID NO: 2356917 - RNA, 18 nt, Human
ucugaauuaguccuugcu

SEQ ID NO: 2356918 - RNA, 19 nt, Human
ucugaauuaguccuugcuu

SEQ ID NO: 2356919 - RNA, 15 nt, Human
ucugaauuauuuucu

SEQ ID NO: 2356920 - RNA, 13 nt, Human
ucugacacacagc

SEQ ID NO: 2356921 - RNA, 14 nt, Human
ucugacacacagcu

SEQ ID NO: 2356922 - RNA, 15 nt, Human
ucugacacacagcuc

SEQ ID NO: 2356923 - RNA, 15 nt, Human
ucugacucagggcuc

SEQ ID NO: 2356924 - RNA, 14 nt, Human
ucugacucagggcu

SEQ ID NO: 2356925 - RNA, 13 nt, Human
ucugacucagggc

SEQ ID NO: 2356926 - RNA, 16 nt, Human
ucugacucacaagaag

SEQ ID NO: 2356927 - RNA, 23 nt, Human
ucugacuccaguggggcaagauu

SEQ ID NO: 2356928 - RNA, 13 nt, Human
ucugacuccagug

SEQ ID NO: 2356929 - RNA, 14 nt, Human
ucugacuccagugg

SEQ ID NO: 2356930 - RNA, 19 nt, Human
ucugacucauauccccuau

SEQ ID NO: 2356931 - RNA, 20 nt, Human
ucugacucagggcuccuggg

SEQ ID NO: 2356932 - RNA, 16 nt, Human
ucugacucgguuucuc

SEQ ID NO: 2356933 - RNA, 18 nt, Human
ucugacucgguuucucca

SEQ ID NO: 2356934 - RNA, 19 nt, Human
ucugacucgguuucuccaa

SEQ ID NO: 2356935 - RNA, 20 nt, Human
ucugacucgguuucuccaaa

SEQ ID NO: 2356936 - RNA, 20 nt, Human
ucuccuuuguacuuugugcu

SEQ ID NO: 2356937 - RNA, 22 nt, Human
ucuccuuugcugaggccuccag

SEQ ID NO: 2356938 - RNA, 14 nt, Human
ucuccuuuguauau

SEQ ID NO: 2356939 - RNA, 19 nt, Human
ucuccuuuguacuuugugc

SEQ ID NO: 2356940 - RNA, 17 nt, Human
ucuccuuugcaggcuca

SEQ ID NO: 2356941 - RNA, 23 nt, Human
ucuccuuugcacugagggccaca

SEQ ID NO: 2356942 - RNA, 14 nt, Human
agaaagcauuugaa

SEQ ID NO: 2356943 - RNA, 17 nt, Human
ucuccuuuuccucucuc

SEQ ID NO: 2356944 - RNA, 22 nt, Human
ucuccuuuguauauuauuucua

SEQ ID NO: 2356945 - RNA, 21 nt, Human
agaaagccaaaucaaaauaug

SEQ ID NO: 2356946 - RNA, 15 nt, Human
agaaagccaggcagg

SEQ ID NO: 2356947 - RNA, 22 nt, Human
agaaagcauuugaaugcauuuu

SEQ ID NO: 2356948 - RNA, 20 nt, Human
agaaagcauuugaaugcauu

SEQ ID NO: 2356949 - RNA, 21 nt, Human
agaaagcauuugaaugcauuu

SEQ ID NO: 2356950 - RNA, 15 nt, Human
agaaagcauuugaau

SEQ ID NO: 2356951 - RNA, 16 nt, Human
agaaagcauuugaaug

SEQ ID NO: 2356952 - RNA, 17 nt, Human
agaaagcauuugaaugc

SEQ ID NO: 2356953 - RNA, 18 nt, Human
agaaagcauuugaaugca

SEQ ID NO: 2356954 - RNA, 19 nt, Human
ucuccuuagucuucucaua

SEQ ID NO: 2356955 - RNA, 20 nt, Human
ucuccuuguggccugggccu

SEQ ID NO: 2356956 - RNA, 13 nt, Human
ucuccuuguucug

SEQ ID NO: 2356957 - RNA, 16 nt, Human
ucuccuuguucugaua

SEQ ID NO: 2356958 - RNA, 14 nt, Human
ucuccuuguucuga

SEQ ID NO: 2356959 - RNA, 16 nt, Human
ucuccuuucacaaccu

SEQ ID NO: 2356960 - RNA, 18 nt, Human
ucuccuuguucugauaau

SEQ ID NO: 2356961 - RNA, 15 nt, Human
ucuccuuucuuucua

SEQ ID NO: 2356962 - RNA, 14 nt, Human
ucuccuuucaggga

SEQ ID NO: 2356963 - RNA, 23 nt, Human
ucuccuuucaccccagggccuga

SEQ ID NO: 2356964 - RNA, 20 nt, Human
ucuccuuucuuuuucuucuu

SEQ ID NO: 2356965 - RNA, 17 nt, Human
ucuccuuugauaaaaua

SEQ ID NO: 2356966 - RNA, 23 nt, Human
ucuccuuugauaaaauaaaugag

SEQ ID NO: 2356967 - RNA, 16 nt, Human
ucuccuuugcacugag

SEQ ID NO: 2356968 - RNA, 17 nt, Human
ucuccuuugcacugagg

SEQ ID NO: 2356969 - RNA, 19 nt, Human
ucuccuuugcacugagggc

SEQ ID NO: 2356970 - RNA, 21 nt, Human
ucuccuuugcacugagggcca

SEQ ID NO: 2356971 - RNA, 22 nt, Human
ucuccuuugcacugagggccac

SEQ ID NO: 2356972 - RNA, 17 nt, Human
agaaaugagaucaggcu

SEQ ID NO: 2356973 - RNA, 19 nt, Human
agaaaugagaucaggcucu

SEQ ID NO: 2356974 - RNA, 20 nt, Human
agaaaugagaucaggcucug

SEQ ID NO: 2356975 - RNA, 23 nt, Human
agaaaugaccaauauuauacuaa

SEQ ID NO: 2356976 - RNA, 19 nt, Human
agaaaugaauaauuuccca

SEQ ID NO: 2356977 - RNA, 12 nt, Human
agaaaugaauaa

SEQ ID NO: 2356978 - RNA, 15 nt, Human
agaaauaugugguuu

SEQ ID NO: 2356979 - RNA, 14 nt, Human
agaaauaugugguu

SEQ ID NO: 2356980 - RNA, 22 nt, Human
agaaagcccuuaggaagaauuu

SEQ ID NO: 2356981 - RNA, 20 nt, Human
agaaagcccuuaggaagaau

SEQ ID NO: 2356982 - RNA, 21 nt, Human
agaaagccucagagaauugcu

SEQ ID NO: 2356983 - RNA, 15 nt, Human
agaaagccucagaga

SEQ ID NO: 2356984 - RNA, 22 nt, Human
agaaauauggaacuuacauugu

SEQ ID NO: 2356985 - RNA, 17 nt, Human
agaaauauggacacuua

SEQ ID NO: 2356986 - RNA, 20 nt, Human
agaaauauggaacuuacauu

SEQ ID NO: 2356987 - RNA, 17 nt, Human
agaaauauggaacuuac

SEQ ID NO: 2356988 - RNA, 14 nt, Human
agaaauauggacac

SEQ ID NO: 2356989 - RNA, 16 nt, Human
agaaauauggaacuua

SEQ ID NO: 2356990 - RNA, 22 nt, Human
agaaauaugauuuuauuugaca

SEQ ID NO: 2356991 - RNA, 21 nt, Human
agaaauaugcacaauagcagu

SEQ ID NO: 2356992 - RNA, 13 nt, Human
agaaauaugauuu

SEQ ID NO: 2356993 - RNA, 15 nt, Human
agaaauaugauuuua

SEQ ID NO: 2356994 - RNA, 16 nt, Human
agaaauaugauuuuau

SEQ ID NO: 2356995 - RNA, 22 nt, Human
uccucagguggccaugccucag

SEQ ID NO: 2356996 - RNA, 18 nt, Human
uccucagguggccaugcc

SEQ ID NO: 2356997 - RNA, 22 nt, Human
uccucagguggccagccuggau

SEQ ID NO: 2356998 - RNA, 15 nt, Human
uccucauauggccca

SEQ ID NO: 2356999 - RNA, 22 nt, Human
uccucauaguaugguggcuggg

SEQ ID NO: 2357000 - RNA, 13 nt, Human
uccucccaggcgc

SEQ ID NO: 2357001 - RNA, 21 nt, Human
uccucauauggcccaguguca

SEQ ID NO: 2357002 - RNA, 16 nt, Human
uccucauccagggcuc

SEQ ID NO: 2357003 - RNA, 14 nt, Human
uccucauccacccc

SEQ ID NO: 2357004 - RNA, 15 nt, Human
uccucauccacccca

SEQ ID NO: 2357005 - RNA, 17 nt, Human
uccucauccaccccauc

SEQ ID NO: 2357006 - RNA, 18 nt, Human
uccucauccaccccaucc

SEQ ID NO: 2357007 - RNA, 19 nt, Human
uccucccaggcgccccuuc

SEQ ID NO: 2357008 - RNA, 21 nt, Human
uccucccaggcgccccuuccc

SEQ ID NO: 2357009 - RNA, 13 nt, Human
uccucccaucccc

SEQ ID NO: 2357010 - RNA, 15 nt, Human
uccucccauccccug

SEQ ID NO: 2357011 - RNA, 18 nt, Human
uccucccauccccuggac

SEQ ID NO: 2357012 - RNA, 15 nt, Human
uccucccucagugcc

SEQ ID NO: 2357013 - RNA, 19 nt, Human
uccucccgggcccucccuu

SEQ ID NO: 2357014 - RNA, 21 nt, Human
uccucccgggcccucccuugg

SEQ ID NO: 2357015 - RNA, 15 nt, Human
uccucccgggcccuc

SEQ ID NO: 2357016 - RNA, 16 nt, Human
uccucccgggcccucc

SEQ ID NO: 2357017 - RNA, 17 nt, Human
uccucccgggcccuccc

SEQ ID NO: 2357018 - RNA, 14 nt, Human
uccucccgggcccu

SEQ ID NO: 2357019 - RNA, 16 nt, Human
uccuccccaaaucaau

SEQ ID NO: 2357020 - RNA, 13 nt, Human
uccuccccuuggg

SEQ ID NO: 2357021 - RNA, 14 nt, Human
uccuccccuugggc

SEQ ID NO: 2357022 - RNA, 23 nt, Human
uccucccauccccuggacuggga

SEQ ID NO: 2357023 - RNA, 19 nt, Human
uccucccauccccuggacu

SEQ ID NO: 2357024 - RNA, 21 nt, Human
uccucccauguuaugcccagc

SEQ ID NO: 2357025 - RNA, 13 nt, Human
uccucagguggcc

SEQ ID NO: 2357026 - RNA, 16 nt, Human
uccucagguggccaug

SEQ ID NO: 2357027 - RNA, 24 nt, Human
uccucagggacagagacaccugca

SEQ ID NO: 2357028 - RNA, 23 nt, Human
uccucauacccacccccacccaa

SEQ ID NO: 2357029 - RNA, 22 nt, Human
uccucagggacagagacaccug

SEQ ID NO: 2357030 - RNA, 18 nt, Human
uccucagggacagagaca

SEQ ID NO: 2357031 - RNA, 16 nt, Human
uccucagggacagaga

SEQ ID NO: 2357032 - RNA, 19 nt, Human
uccucaggcugcuggagga

SEQ ID NO: 2357033 - RNA, 13 nt, Human
uccucaggcugcu

SEQ ID NO: 2357034 - RNA, 21 nt, Human
uccucagccuugccagagauc

SEQ ID NO: 2357035 - RNA, 23 nt, Human
uccucaccucuggacuggcuaga

SEQ ID NO: 2357036 - RNA, 22 nt, Human
uccucaccucuggacuggcuag

SEQ ID NO: 2357037 - RNA, 21 nt, Human
uccucaccucuggacuggcua

SEQ ID NO: 2357038 - RNA, 20 nt, Human
uccucaccucuggacuggcu

SEQ ID NO: 2357039 - RNA, 16 nt, Human
uccucaccucuggacu

SEQ ID NO: 2357040 - RNA, 15 nt, Human
uccucaccucuggac

SEQ ID NO: 2357041 - RNA, 13 nt, Human
uccucaccucugg

SEQ ID NO: 2357042 - RNA, 12 nt, Human
uccucaccucug

SEQ ID NO: 2357043 - RNA, 14 nt, Human
uccucacucccagu

SEQ ID NO: 2357044 - RNA, 13 nt, Human
uccucacucccag

SEQ ID NO: 2357045 - RNA, 12 nt, Human
uccucacuccca

SEQ ID NO: 2357046 - RNA, 15 nt, Human
uccucaccuuuuccc

SEQ ID NO: 2357047 - RNA, 19 nt, Human
uccucaccuuuucccgggg

SEQ ID NO: 2357048 - RNA, 17 nt, Human
uccucacucccagucca

SEQ ID NO: 2357049 - RNA, 22 nt, Human
uccucaccuuuucccggggagg

SEQ ID NO: 2357050 - RNA, 12 nt, Human
uccucacucccu

SEQ ID NO: 2357051 - RNA, 18 nt, Human
uccucagccuugccagag

SEQ ID NO: 2357052 - RNA, 14 nt, Human
uccucacucccuuc

SEQ ID NO: 2357053 - RNA, 20 nt, Human
uccucagccuugccagagau

SEQ ID NO: 2357054 - RNA, 15 nt, Human
uccucaccucaugcc

SEQ ID NO: 2357055 - RNA, 16 nt, Human
uccucaccucaugccc

SEQ ID NO: 2357056 - RNA, 21 nt, Human
uccucaccucaugcccacccc

SEQ ID NO: 2357057 - RNA, 16 nt, Human
acucuugcucuuucua

SEQ ID NO: 2357058 - RNA, 16 nt, Human
acucuugguuucuuca

SEQ ID NO: 2357059 - RNA, 20 nt, Human
uccucaccccuguccucacu

SEQ ID NO: 2357060 - RNA, 21 nt, Human
uccucaccccuguccucacug

SEQ ID NO: 2357061 - RNA, 23 nt, Human
acucuuggagccugcagagcugc

SEQ ID NO: 2357062 - RNA, 22 nt, Human
acucuuggagccugcagagcug

SEQ ID NO: 2357063 - RNA, 14 nt, Human
acucuuggagccug

SEQ ID NO: 2357064 - RNA, 13 nt, Human
acucuugcucuuu

SEQ ID NO: 2357065 - RNA, 14 nt, Human
acucuugcucuuuc

SEQ ID NO: 2357066 - RNA, 16 nt, Human
acucuuggagccugca

SEQ ID NO: 2357067 - RNA, 15 nt, Human
acucuuggagccugc

SEQ ID NO: 2357068 - RNA, 15 nt, Human
acucuuaguuacuca

SEQ ID NO: 2357069 - RNA, 16 nt, Human
acucuugauuauccau

SEQ ID NO: 2357070 - RNA, 15 nt, Human
acucuugaccucagg

SEQ ID NO: 2357071 - RNA, 16 nt, Human
acucuugaccucaggu

SEQ ID NO: 2357072 - RNA, 19 nt, Human
acucuuaggaagagaaacc

SEQ ID NO: 2357073 - RNA, 20 nt, Human
acucuuaggaagagaaacca

SEQ ID NO: 2357074 - RNA, 14 nt, Human
acucuugaccucag

SEQ ID NO: 2357075 - RNA, 21 nt, Human
acucuugaaaaaugcauguug

SEQ ID NO: 2357076 - RNA, 17 nt, Human
acucuuaggaagagaaa

SEQ ID NO: 2357077 - RNA, 19 nt, Human
acucuuagauggauucucc

SEQ ID NO: 2357078 - RNA, 14 nt, Human
acucuuagaaauga

SEQ ID NO: 2357079 - RNA, 14 nt, Human
acucuuaaucaaau

SEQ ID NO: 2357080 - RNA, 22 nt, Human
acucuuaaguuucucagcuccc

SEQ ID NO: 2357081 - RNA, 14 nt, Human
acucuuaagccauc

SEQ ID NO: 2357082 - RNA, 22 nt, Human
acucuuaagccaucuugguaaa

SEQ ID NO: 2357083 - RNA, 14 nt, Human
acucuuaaguuucu

SEQ ID NO: 2357084 - RNA, 16 nt, Human
acucuuaaguuucuca

SEQ ID NO: 2357085 - RNA, 17 nt, Human
acucuuaaguuucucag

SEQ ID NO: 2357086 - RNA, 18 nt, Human
acucuuaaguuucucagc

SEQ ID NO: 2357087 - RNA, 19 nt, Human
acucuuaaguuucucagcu

SEQ ID NO: 2357088 - RNA, 21 nt, Human
acucuuaaguuucucagcucc

SEQ ID NO: 2357089 - RNA, 13 nt, Human
acucuuaagccau

SEQ ID NO: 2357090 - RNA, 21 nt, Human
acucuuaagaagacugcauua

SEQ ID NO: 2357091 - RNA, 18 nt, Human
acucucugaaccccuccc

SEQ ID NO: 2357092 - RNA, 21 nt, Human
acucucuccacccuauaugua

SEQ ID NO: 2357093 - RNA, 20 nt, Human
acucucuccacccuauaugu

SEQ ID NO: 2357094 - RNA, 13 nt, Human
acucucuccaccc

SEQ ID NO: 2357095 - RNA, 15 nt, Human
acucuccuggacugc

SEQ ID NO: 2357096 - RNA, 17 nt, Human
acucuccuugcuaccca

SEQ ID NO: 2357097 - RNA, 16 nt, Human
acucuccuuggugucg

SEQ ID NO: 2357098 - RNA, 23 nt, Human
acucuccuuggugucgggcauga

SEQ ID NO: 2357099 - RNA, 21 nt, Human
acucucugaaccccucccucc

SEQ ID NO: 2357100 - RNA, 19 nt, Human
acucucugaaccccucccu

SEQ ID NO: 2357101 - RNA, 23 nt, Human
acucugaggcucuuucugggcca

SEQ ID NO: 2357102 - RNA, 21 nt, Human
acucugaggcucuuucugggc

SEQ ID NO: 2357103 - RNA, 11 nt, Human
acucugagacu

SEQ ID NO: 2357104 - RNA, 22 nt, Human
acucugagacucgcgacaaugc

SEQ ID NO: 2357105 - RNA, 16 nt, Human
acucugccuccucuuc

SEQ ID NO: 2357106 - RNA, 14 nt, Human
acucuggcaaagcu

SEQ ID NO: 2357107 - RNA, 16 nt, Human
acucuggcaaagcuuu

SEQ ID NO: 2357108 - RNA, 15 nt, Human
acucuggcaaagcuu

SEQ ID NO: 2357109 - RNA, 23 nt, Human
acucuggcaaagcuuuuagaaau

SEQ ID NO: 2357110 - RNA, 17 nt, Human
acucuggcaaagcuuuu

SEQ ID NO: 2357111 - RNA, 13 nt, Human
acucuggcagcuc

SEQ ID NO: 2357112 - RNA, 15 nt, Human
acucuggcagcucag

SEQ ID NO: 2357113 - RNA, 16 nt, Human
acucugccagccacau

SEQ ID NO: 2357114 - RNA, 13 nt, Human
acucugccagcca

SEQ ID NO: 2357115 - RNA, 12 nt, Human
acucugccuccu

SEQ ID NO: 2357116 - RNA, 19 nt, Human
acucugcccccugcuggcu

SEQ ID NO: 2357117 - RNA, 21 nt, Human
acucugcccccugcuggcucu

SEQ ID NO: 2357118 - RNA, 12 nt, Human
acucugcccccu

SEQ ID NO: 2357119 - RNA, 13 nt, Human
acucugcccccug

SEQ ID NO: 2357120 - RNA, 15 nt, Human
acucugcccccugcu

SEQ ID NO: 2357121 - RNA, 17 nt, Human
acucugcccccugcugg

SEQ ID NO: 2357122 - RNA, 18 nt, Human
acucugcccccugcuggc

SEQ ID NO: 2357123 - RNA, 18 nt, Human
acucuccuggaaauauua

SEQ ID NO: 2357124 - RNA, 15 nt, Human
acucuccuugguguc

SEQ ID NO: 2357125 - RNA, 16 nt, Human
acucuccucugcugcu

SEQ ID NO: 2357126 - RNA, 16 nt, Human
acucuccucugccuca

SEQ ID NO: 2357127 - RNA, 12 nt, Human
acucuccucugc

SEQ ID NO: 2357128 - RNA, 15 nt, Human
acucuccucaucucu

SEQ ID NO: 2357129 - RNA, 14 nt, Human
acucuccucaucuc

SEQ ID NO: 2357130 - RNA, 19 nt, Human
acucuccucggcccccucc

SEQ ID NO: 2357131 - RNA, 20 nt, Human
acucuccucggcccccucca

SEQ ID NO: 2357132 - RNA, 22 nt, Human
acucuccucggcccccuccauc

SEQ ID NO: 2357133 - RNA, 14 nt, Human
acucuccucugccu

SEQ ID NO: 2357134 - RNA, 13 nt, Human
acucuccucugcu

SEQ ID NO: 2357135 - RNA, 14 nt, Human
acucuccucugcug

SEQ ID NO: 2357136 - RNA, 12 nt, Human
acucuccuagag

SEQ ID NO: 2357137 - RNA, 22 nt, Human
acucucccccacccccuccccg

SEQ ID NO: 2357138 - RNA, 23 nt, Human
acucuccuagagacagaagcagg

SEQ ID NO: 2357139 - RNA, 13 nt, Human
acucuccuagaga

SEQ ID NO: 2357140 - RNA, 21 nt, Human
acucuccuagagacagaagca

SEQ ID NO: 2357141 - RNA, 21 nt, Human
acuccuuccugccaccugcug

SEQ ID NO: 2357142 - RNA, 17 nt, Human
acuccuugagagaccag

SEQ ID NO: 2357143 - RNA, 18 nt, Human
acuccuugagagaccagg

SEQ ID NO: 2357144 - RNA, 20 nt, Human
acucucccccacccccuccc

SEQ ID NO: 2357145 - RNA, 21 nt, Human
acuccuugagagaccaggcaa

SEQ ID NO: 2357146 - RNA, 23 nt, Human
acuccuugagagaccaggcaaag

SEQ ID NO: 2357147 - RNA, 14 nt, Human
acucuccuccagag

SEQ ID NO: 2357148 - RNA, 17 nt, Human
acucuccuccagaguca

SEQ ID NO: 2357149 - RNA, 21 nt, Human
acuccuggggccucuuggguc

SEQ ID NO: 2357150 - RNA, 14 nt, Human
acuccuggguugag

SEQ ID NO: 2357151 - RNA, 16 nt, Human
acuccuggggccucuu

SEQ ID NO: 2357152 - RNA, 21 nt, Human
acuccugggcucaagcagucu

SEQ ID NO: 2357153 - RNA, 19 nt, Human
uccuaggcaggacaugcug

SEQ ID NO: 2357154 - RNA, 20 nt, Human
acuccuuccugccaccugcu

SEQ ID NO: 2357155 - RNA, 13 nt, Human
acuccuuccugcc

SEQ ID NO: 2357156 - RNA, 16 nt, Human
acuccuggguugagcu

SEQ ID NO: 2357157 - RNA, 17 nt, Human
acuccuggguugagcug

SEQ ID NO: 2357158 - RNA, 23 nt, Human
acuccuugaaaacacuguucucu

SEQ ID NO: 2357159 - RNA, 24 nt, Human
acuccuugaaaacacuguucucug

SEQ ID NO: 2357160 - RNA, 14 nt, Human
acucacagaccugg

SEQ ID NO: 2357161 - RNA, 18 nt, Human
acucacagaccuggagcc

SEQ ID NO: 2357162 - RNA, 19 nt, Human
acucacagaccuggagccc

SEQ ID NO: 2357163 - RNA, 22 nt, Human
acucacagaccuggagccccug

SEQ ID NO: 2357164 - RNA, 23 nt, Human
acucacagaccuggagccccugg

SEQ ID NO: 2357165 - RNA, 22 nt, Human
acucacacaggacccccuuccc

SEQ ID NO: 2357166 - RNA, 13 nt, Human
acucaccccagcc

SEQ ID NO: 2357167 - RNA, 13 nt, Human
acuccagaccccu

SEQ ID NO: 2357168 - RNA, 15 nt, Human
acuccagaccccugg

SEQ ID NO: 2357169 - RNA, 16 nt, Human
acucaccccagcccca

SEQ ID NO: 2357170 - RNA, 14 nt, Human
acucaccccagccc

SEQ ID NO: 2357171 - RNA, 15 nt, Human
acucaccccagcccc

SEQ ID NO: 2357172 - RNA, 20 nt, Human
acuccagugauguucuucaa

SEQ ID NO: 2357173 - RNA, 19 nt, Human
acuccagugagacagcucu

SEQ ID NO: 2357174 - RNA, 18 nt, Human
acuccagaccccuggcuu

SEQ ID NO: 2357175 - RNA, 19 nt, Human
acuccagaccccuggcuuu

SEQ ID NO: 2357176 - RNA, 21 nt, Human
acuccagaccccuggcuuuuc

SEQ ID NO: 2357177 - RNA, 17 nt, Human
acuccagacucucugug

SEQ ID NO: 2357178 - RNA, 19 nt, Human
acuccaucucaaaaaauaa

SEQ ID NO: 2357179 - RNA, 14 nt, Human
acuccaucagcuua

SEQ ID NO: 2357180 - RNA, 20 nt, Human
acuccaguuaaaaaaaauuu

SEQ ID NO: 2357181 - RNA, 18 nt, Human
acuccaguuaaaaaaaau

SEQ ID NO: 2357182 - RNA, 21 nt, Human
acuccagugccaacaauccua

SEQ ID NO: 2357183 - RNA, 14 nt, Human
acuccagugccagc

SEQ ID NO: 2357184 - RNA, 15 nt, Human
acuccagugccagca

SEQ ID NO: 2357185 - RNA, 19 nt, Human
acuccagugccagcaauga

SEQ ID NO: 2357186 - RNA, 10 nt, Human
acuccagugg

SEQ ID NO: 2357187 - RNA, 22 nt, Human
acuccaguggggcaagauuuuc

SEQ ID NO: 2357188 - RNA, 16 nt, Human
acuccaguggugaaga

SEQ ID NO: 2357189 - RNA, 18 nt, Human
acuccaguggugaagaaa

SEQ ID NO: 2357190 - RNA, 19 nt, Human
acuccaucaguuagagcug

SEQ ID NO: 2357191 - RNA, 14 nt, Human
acuccaugagaagc

SEQ ID NO: 2357192 - RNA, 18 nt, Human
acuccuaugaucucaggu

SEQ ID NO: 2357193 - RNA, 21 nt, Human
acuccucaaaagcaaaugaga

SEQ ID NO: 2357194 - RNA, 20 nt, Human
acuccucaaaagcaaaugag

SEQ ID NO: 2357195 - RNA, 19 nt, Human
acuccucaggguugagguc

SEQ ID NO: 2357196 - RNA, 16 nt, Human
acuccucaggguugag

SEQ ID NO: 2357197 - RNA, 12 nt, Human
acuccucccagg

SEQ ID NO: 2357198 - RNA, 12 nt, Human
acuccugcaggc

SEQ ID NO: 2357199 - RNA, 14 nt, Human
acuccugcaggcag

SEQ ID NO: 2357200 - RNA, 17 nt, Human
acuccugccaaggagga

SEQ ID NO: 2357201 - RNA, 22 nt, Human
acuccugcaggcagccaggcca

SEQ ID NO: 2357202 - RNA, 15 nt, Human
acuccugcaggcagc

SEQ ID NO: 2357203 - RNA, 16 nt, Human
acuccugcaggcagcc

SEQ ID NO: 2357204 - RNA, 11 nt, Human
acuccuggccu

SEQ ID NO: 2357205 - RNA, 21 nt, Human
acuccugccccuguucucuuc

SEQ ID NO: 2357206 - RNA, 14 nt, Human
acuccugcccuguu

SEQ ID NO: 2357207 - RNA, 22 nt, Human
acuccugcccuguuguguauag

SEQ ID NO: 2357208 - RNA, 16 nt, Human
ucccugguggcagcuc

SEQ ID NO: 2357209 - RNA, 17 nt, Human
ucccugguggcagcuca

SEQ ID NO: 2357210 - RNA, 18 nt, Human
ucccugguggcagcucac

SEQ ID NO: 2357211 - RNA, 19 nt, Human
ucccugguggcagcucacc

SEQ ID NO: 2357212 - RNA, 20 nt, Human
ucccugguggcagcucaccu

SEQ ID NO: 2357213 - RNA, 21 nt, Human
ucccugguggcagcucaccuc

SEQ ID NO: 2357214 - RNA, 12 nt, Human
acuccuggaaau

SEQ ID NO: 2357215 - RNA, 16 nt, Human
acuccuggaagcugug

SEQ ID NO: 2357216 - RNA, 13 nt, Human
acuccuggaagcu

SEQ ID NO: 2357217 - RNA, 23 nt, Human
ucccugguggcagcucaccucuc

SEQ ID NO: 2357218 - RNA, 22 nt, Human
ucccugguggcagcucaccucu

SEQ ID NO: 2357219 - RNA, 19 nt, Human
ucccuuggauuguccccga

SEQ ID NO: 2357220 - RNA, 20 nt, Human
ucccuuggauuguccccgac

SEQ ID NO: 2357221 - RNA, 14 nt, Human
ucccuuggccucag

SEQ ID NO: 2357222 - RNA, 13 nt, Human
ucccuuggccuca

SEQ ID NO: 2357223 - RNA, 12 nt, Human
ucccuuggccuc

SEQ ID NO: 2357224 - RNA, 16 nt, Human
ucccuuggccucagaa

SEQ ID NO: 2357225 - RNA, 12 nt, Human
ucccuugggcuc

SEQ ID NO: 2357226 - RNA, 14 nt, Human
ucccuugggcuccc

SEQ ID NO: 2357227 - RNA, 16 nt, Human
ucccuuugacgccauc

SEQ ID NO: 2357228 - RNA, 18 nt, Human
ucccuuugacgccauccc

SEQ ID NO: 2357229 - RNA, 13 nt, Human
ucccuuuuuuuaa

SEQ ID NO: 2357230 - RNA, 23 nt, Human
ucccuuuuuuggcugcugaaggc

SEQ ID NO: 2357231 - RNA, 20 nt, Human
ucccuuuuuuggcugcugaa

SEQ ID NO: 2357232 - RNA, 22 nt, Human
ucccuuuuuuggcugcugaagg

SEQ ID NO: 2357233 - RNA, 21 nt, Human
ucccuuugacgccaucccagc

SEQ ID NO: 2357234 - RNA, 17 nt, Human
ucccuuggguucugaua

SEQ ID NO: 2357235 - RNA, 19 nt, Human
ucccuuugacgccauccca

SEQ ID NO: 2357236 - RNA, 17 nt, Human
ucccuuuuuuggcugcu

SEQ ID NO: 2357237 - RNA, 19 nt, Human
ucccuuuuuuggcugcuga

SEQ ID NO: 2357238 - RNA, 17 nt, Human
uccggugugccugcagc

SEQ ID NO: 2357239 - RNA, 15 nt, Human
uccggugugccugca

SEQ ID NO: 2357240 - RNA, 12 nt, Human
uccggugugccu

SEQ ID NO: 2357241 - RNA, 15 nt, Human
ucccuuugaaaugaa

SEQ ID NO: 2357242 - RNA, 18 nt, Human
uccggucgugucucuggu

SEQ ID NO: 2357243 - RNA, 19 nt, Human
uccggugugccugcagccc

SEQ ID NO: 2357244 - RNA, 18 nt, Human
uccggugugccugcagcc

SEQ ID NO: 2357245 - RNA, 18 nt, Human
uccgguguuuaagacauu

SEQ ID NO: 2357246 - RNA, 16 nt, Human
ucccuuuuuuuaagua

SEQ ID NO: 2357247 - RNA, 21 nt, Human
ucccuuuuuuuaaguaaggaa

SEQ ID NO: 2357248 - RNA, 13 nt, Human
uccuacucugugu

SEQ ID NO: 2357249 - RNA, 14 nt, Human
uccuacucuguguc

SEQ ID NO: 2357250 - RNA, 13 nt, Human
uccguauuucaga

SEQ ID NO: 2357251 - RNA, 21 nt, Human
uccguagccagcugcucccca

SEQ ID NO: 2357252 - RNA, 22 nt, Human
uccguaacccaacucuccugga

SEQ ID NO: 2357253 - RNA, 16 nt, Human
uccguaacccaacucu

SEQ ID NO: 2357254 - RNA, 15 nt, Human
uccuacucuguguca

SEQ ID NO: 2357255 - RNA, 14 nt, Human
uccguaguucccug

SEQ ID NO: 2357256 - RNA, 20 nt, Human
uccguagccagcugcucccc

SEQ ID NO: 2357257 - RNA, 15 nt, Human
uccguaguucccuga

SEQ ID NO: 2357258 - RNA, 14 nt, Human
uccuagcugcacag

SEQ ID NO: 2357259 - RNA, 16 nt, Human
uccuagcugcacaggg

SEQ ID NO: 2357260 - RNA, 17 nt, Human
uccuagcugcacagggc

SEQ ID NO: 2357261 - RNA, 20 nt, Human
uccuagcugcacagggcagc

SEQ ID NO: 2357262 - RNA, 18 nt, Human
uccuaggaguauccucau

SEQ ID NO: 2357263 - RNA, 22 nt, Human
uccuagcuugggaggcuucccc

SEQ ID NO: 2357264 - RNA, 14 nt, Human
uccuaggaaaauac

SEQ ID NO: 2357265 - RNA, 21 nt, Human
uccuagcuugggaggcuuccc

SEQ ID NO: 2357266 - RNA, 13 nt, Human
uccuaggcauuug

SEQ ID NO: 2357267 - RNA, 12 nt, Human
acuccuggccuc

SEQ ID NO: 2357268 - RNA, 13 nt, Human
acuccuggccuca

SEQ ID NO: 2357269 - RNA, 14 nt, Human
acuccuggccucaa

SEQ ID NO: 2357270 - RNA, 21 nt, Human
acugaccugucaugccccccu

SEQ ID NO: 2357271 - RNA, 13 nt, Human
acugaacuucagg

SEQ ID NO: 2357272 - RNA, 22 nt, Human
acugaccugucaugccccccuc

SEQ ID NO: 2357273 - RNA, 21 nt, Human
acugaacuuugcugagccugu

SEQ ID NO: 2357274 - RNA, 12 nt, Human
acugaagaagca

SEQ ID NO: 2357275 - RNA, 13 nt, Human
acugacucuuaag

SEQ ID NO: 2357276 - RNA, 14 nt, Human
acugacucuuaaga

SEQ ID NO: 2357277 - RNA, 15 nt, Human
acugacucuuaagaa

SEQ ID NO: 2357278 - RNA, 16 nt, Human
acugacucuuaagaag

SEQ ID NO: 2357279 - RNA, 14 nt, Human
acugacuccuuaga

SEQ ID NO: 2357280 - RNA, 20 nt, Human
acugacucuuaagaagacug

SEQ ID NO: 2357281 - RNA, 17 nt, Human
acugacucuuaagaaga

SEQ ID NO: 2357282 - RNA, 18 nt, Human
acugacucuuaagaagac

SEQ ID NO: 2357283 - RNA, 22 nt, Human
acugacuucuaaguaaaaccac

SEQ ID NO: 2357284 - RNA, 16 nt, Human
acugacuucuaaguaa

SEQ ID NO: 2357285 - RNA, 15 nt, Human
acugacuucuaagua

SEQ ID NO: 2357286 - RNA, 13 nt, Human
acugacuucuaag

SEQ ID NO: 2357287 - RNA, 20 nt, Human
acugagauccuuccuuuuga

SEQ ID NO: 2357288 - RNA, 19 nt, Human
acugagauaccagcgagga

SEQ ID NO: 2357289 - RNA, 18 nt, Human
acugagauaccagcgagg

SEQ ID NO: 2357290 - RNA, 17 nt, Human
acugagaugugaacaca

SEQ ID NO: 2357291 - RNA, 17 nt, Human
acugagauuuugguauu

SEQ ID NO: 2357292 - RNA, 22 nt, Human
acugagaugugaacacaucagc

SEQ ID NO: 2357293 - RNA, 15 nt, Human
acugagaccaaagaa

SEQ ID NO: 2357294 - RNA, 18 nt, Human
acugagagugaacaaauu

SEQ ID NO: 2357295 - RNA, 22 nt, Human
acugagacagcccgggcucugc

SEQ ID NO: 2357296 - RNA, 23 nt, Human
acugagacagcccgggcucugcc

SEQ ID NO: 2357297 - RNA, 19 nt, Human
acugagaauguaagaacua

SEQ ID NO: 2357298 - RNA, 20 nt, Human
acugagaauguaagaacuac

SEQ ID NO: 2357299 - RNA, 15 nt, Human
acugagacagcccgg

SEQ ID NO: 2357300 - RNA, 18 nt, Human
acugagacagcccgggcu

SEQ ID NO: 2357301 - RNA, 21 nt, Human
acugagacagcccgggcucug

SEQ ID NO: 2357302 - RNA, 14 nt, Human
acugacuuuauccu

SEQ ID NO: 2357303 - RNA, 15 nt, Human
acugacuuuauccuc

SEQ ID NO: 2357304 - RNA, 12 nt, Human
acugagaaauuu

SEQ ID NO: 2357305 - RNA, 17 nt, Human
acugagaaauuuauaaa

SEQ ID NO: 2357306 - RNA, 21 nt, Human
acugagaaauuuauaaacuuu

SEQ ID NO: 2357307 - RNA, 18 nt, Human
acucuuuuuguuuuuugu

SEQ ID NO: 2357308 - RNA, 20 nt, Human
acucuuuuuucauggacacu

SEQ ID NO: 2357309 - RNA, 16 nt, Human
acucuuuuuguaccug

SEQ ID NO: 2357310 - RNA, 20 nt, Human
acucuuuuuguaccugguga

SEQ ID NO: 2357311 - RNA, 21 nt, Human
acucuuuugcuuuauuccaga

SEQ ID NO: 2357312 - RNA, 14 nt, Human
acucuuuuuagggc

SEQ ID NO: 2357313 - RNA, 19 nt, Human
acucuuuuuagggccaggc

SEQ ID NO: 2357314 - RNA, 20 nt, Human
acucuuuuuagggccaggca

SEQ ID NO: 2357315 - RNA, 17 nt, Human
acucuuuuugggcuccu

SEQ ID NO: 2357316 - RNA, 18 nt, Human
acucuuuuugggcuccuu

SEQ ID NO: 2357317 - RNA, 13 nt, Human
acucuuuuuguac

SEQ ID NO: 2357318 - RNA, 19 nt, Human
acugaacauguacacuggu

SEQ ID NO: 2357319 - RNA, 13 nt, Human
acugaacauucca

SEQ ID NO: 2357320 - RNA, 16 nt, Human
acugaacauuccagag

SEQ ID NO: 2357321 - RNA, 18 nt, Human
acugaaccggcuuuacca

SEQ ID NO: 2357322 - RNA, 20 nt, Human
acugaacucugacaacagac

SEQ ID NO: 2357323 - RNA, 18 nt, Human
acugaacucacuuuccuc

SEQ ID NO: 2357324 - RNA, 19 nt, Human
acugaaccggcuuuaccaa

SEQ ID NO: 2357325 - RNA, 19 nt, Human
acugaacuuugcugagccu

SEQ ID NO: 2357326 - RNA, 16 nt, Human
acugaacuuugcugag

SEQ ID NO: 2357327 - RNA, 21 nt, Human
acugaacuucaggauaauaaa

SEQ ID NO: 2357328 - RNA, 18 nt, Human
acucuuguggauguuuua

SEQ ID NO: 2357329 - RNA, 16 nt, Human
uccugaccacccuccc

SEQ ID NO: 2357330 - RNA, 14 nt, Human
uccugaccacccuc

SEQ ID NO: 2357331 - RNA, 15 nt, Human
uccugaccacccucc

SEQ ID NO: 2357332 - RNA, 15 nt, Human
acucuuguuuccuua

SEQ ID NO: 2357333 - RNA, 13 nt, Human
uccugacacuuua

SEQ ID NO: 2357334 - RNA, 13 nt, Human
uccugaccacccu

SEQ ID NO: 2357335 - RNA, 14 nt, Human
acucuuuguaagag

SEQ ID NO: 2357336 - RNA, 13 nt, Human
acucuuuguaaga

SEQ ID NO: 2357337 - RNA, 20 nt, Human
acucuuuugcuuuauuccag

SEQ ID NO: 2357338 - RNA, 14 nt, Human
acucuuuugcuuua

SEQ ID NO: 2357339 - RNA, 12 nt, Human
acucuuuugcuu

SEQ ID NO: 2357340 - RNA, 14 nt, Human
acucuuugguggcu

SEQ ID NO: 2357341 - RNA, 19 nt, Human
acucuuucuauuguuucuu

SEQ ID NO: 2357342 - RNA, 13 nt, Human
acucuuucaaaac

SEQ ID NO: 2357343 - RNA, 11 nt, Human
acucuuucaaa

SEQ ID NO: 2357344 - RNA, 12 nt, Human
uccucuuuccau

SEQ ID NO: 2357345 - RNA, 11 nt, Human
uccucuuucca

SEQ ID NO: 2357346 - RNA, 14 nt, Human
uccucccucccucu

SEQ ID NO: 2357347 - RNA, 11 nt, Human
uccucccuccc

SEQ ID NO: 2357348 - RNA, 19 nt, Human
uccucuuuccaucuacccu

SEQ ID NO: 2357349 - RNA, 22 nt, Human
uccucccgggcccucccuugga

SEQ ID NO: 2357350 - RNA, 19 nt, Human
uccucuuuggucuacacug

SEQ ID NO: 2357351 - RNA, 21 nt, Human
uccucuuuggucuacacugug

SEQ ID NO: 2357352 - RNA, 21 nt, Human
uccugaaagaaacaguuaacu

SEQ ID NO: 2357353 - RNA, 18 nt, Human
uccugaaagaaacaguua

SEQ ID NO: 2357354 - RNA, 16 nt, Human
uccugaaagacaauau

SEQ ID NO: 2357355 - RNA, 19 nt, Human
uccugaaacuuacacacaa

SEQ ID NO: 2357356 - RNA, 23 nt, Human
uccucuuugcuuugcuuucugcu

SEQ ID NO: 2357357 - RNA, 20 nt, Human
uccucuuugcuuugcuuucu

SEQ ID NO: 2357358 - RNA, 17 nt, Human
uccugaaacaacuugga

SEQ ID NO: 2357359 - RNA, 22 nt, Human
uccucuuuggucuacacugugc

SEQ ID NO: 2357360 - RNA, 16 nt, Human
uccucuuugcuuugcu

SEQ ID NO: 2357361 - RNA, 15 nt, Human
uccucuuugcuuugc

SEQ ID NO: 2357362 - RNA, 14 nt, Human
uccucuuugcaugg

SEQ ID NO: 2357363 - RNA, 17 nt, Human
uccucuuugcauggaau

SEQ ID NO: 2357364 - RNA, 22 nt, Human
uccugaauccaaacuaauccau

SEQ ID NO: 2357365 - RNA, 14 nt, Human
uccugaaauuucag

SEQ ID NO: 2357366 - RNA, 15 nt, Human
uccugaaauuucaga

SEQ ID NO: 2357367 - RNA, 19 nt, Human
uccugaaugaaauaucaga

SEQ ID NO: 2357368 - RNA, 14 nt, Human
uccugaaugaaaua

SEQ ID NO: 2357369 - RNA, 15 nt, Human
uccugaauucuauuu

SEQ ID NO: 2357370 - RNA, 21 nt, Human
uccugaauuuauuauuguucu

SEQ ID NO: 2357371 - RNA, 22 nt, Human
uccugaauuuauuauuguucuu

SEQ ID NO: 2357372 - RNA, 21 nt, Human
uccugaauuuuauuuuuuggg

SEQ ID NO: 2357373 - RNA, 14 nt, Human
uccugcugcugugu

SEQ ID NO: 2357374 - RNA, 15 nt, Human
uccugcugcuguguu

SEQ ID NO: 2357375 - RNA, 12 nt, Human
uccugcgggcuu

SEQ ID NO: 2357376 - RNA, 23 nt, Human
uccugcggagugaagaggggcag

SEQ ID NO: 2357377 - RNA, 21 nt, Human
uccugcggagugaagaggggc

SEQ ID NO: 2357378 - RNA, 22 nt, Human
uccugcggagugaagaggggca

SEQ ID NO: 2357379 - RNA, 21 nt, Human
uccugcugcaguugccaguca

SEQ ID NO: 2357380 - RNA, 20 nt, Human
uccugcgggcuuuuccccgg

SEQ ID NO: 2357381 - RNA, 14 nt, Human
uccugccuguggcg

SEQ ID NO: 2357382 - RNA, 17 nt, Human
uccugccuuagagccag

SEQ ID NO: 2357383 - RNA, 18 nt, Human
uccugccuuagagccagg

SEQ ID NO: 2357384 - RNA, 22 nt, Human
uccugccuuccuccugggcccu

SEQ ID NO: 2357385 - RNA, 19 nt, Human
uccugccuuccuccugggc

SEQ ID NO: 2357386 - RNA, 16 nt, Human
uccugccuuccuccug

SEQ ID NO: 2357387 - RNA, 14 nt, Human
uccugccuuccucc

SEQ ID NO: 2357388 - RNA, 19 nt, Human
uccugcggagugaagaggg

SEQ ID NO: 2357389 - RNA, 22 nt, Human
uccugccuucuucuuuuugcug

SEQ ID NO: 2357390 - RNA, 23 nt, Human
uccugccuuccuccugggcccuc

SEQ ID NO: 2357391 - RNA, 13 nt, Human
uccugccuucugu

SEQ ID NO: 2357392 - RNA, 14 nt, Human
uccugccuucuguc

SEQ ID NO: 2357393 - RNA, 17 nt, Human
uccugccuucuguccug

SEQ ID NO: 2357394 - RNA, 22 nt, Human
uccugccuucuguccugguguc

SEQ ID NO: 2357395 - RNA, 23 nt, Human
uccugccuucuguccugguguca

SEQ ID NO: 2357396 - RNA, 16 nt, Human
uccugccuucuucuuu

SEQ ID NO: 2357397 - RNA, 13 nt, Human
uccugccuggcca

SEQ ID NO: 2357398 - RNA, 12 nt, Human
uccugccuggcc

SEQ ID NO: 2357399 - RNA, 14 nt, Human
uccugccugccccu

SEQ ID NO: 2357400 - RNA, 14 nt, Human
uccugcagccugga

SEQ ID NO: 2357401 - RNA, 17 nt, Human
uccugcagccuggaggc

SEQ ID NO: 2357402 - RNA, 20 nt, Human
uccugccugucuccuuugca

SEQ ID NO: 2357403 - RNA, 16 nt, Human
uccugccuggccaggc

SEQ ID NO: 2357404 - RNA, 14 nt, Human
uccugccuggccag

SEQ ID NO: 2357405 - RNA, 20 nt, Human
uccugccugccccucucccg

SEQ ID NO: 2357406 - RNA, 18 nt, Human
uccugccugucugaagcc

SEQ ID NO: 2357407 - RNA, 12 nt, Human
uccugccugugg

SEQ ID NO: 2357408 - RNA, 13 nt, Human
uccugccuguggc

SEQ ID NO: 2357409 - RNA, 12 nt, Human
uccugcaggcag

SEQ ID NO: 2357410 - RNA, 13 nt, Human
uccugcaggcagc

SEQ ID NO: 2357411 - RNA, 14 nt, Human
uccugcaggcagcc

SEQ ID NO: 2357412 - RNA, 16 nt, Human
uccuggcuccugaggg

SEQ ID NO: 2357413 - RNA, 13 nt, Human
uccuggcuccuga

SEQ ID NO: 2357414 - RNA, 23 nt, Human
uccuggcucuugauaccccccuc

SEQ ID NO: 2357415 - RNA, 19 nt, Human
uccuggacacucagaccug

SEQ ID NO: 2357416 - RNA, 16 nt, Human
uccugggaaauauucc

SEQ ID NO: 2357417 - RNA, 14 nt, Human
uccugggaaauauu

SEQ ID NO: 2357418 - RNA, 18 nt, Human
uccugggagaaccucagg

SEQ ID NO: 2357419 - RNA, 17 nt, Human
uccugggagaaccucag

SEQ ID NO: 2357420 - RNA, 21 nt, Human
uccugggaaauauucccuaga

SEQ ID NO: 2357421 - RNA, 20 nt, Human
uccugggaaauauucccuag

SEQ ID NO: 2357422 - RNA, 20 nt, Human
uccugggagaaccucaggcu

SEQ ID NO: 2357423 - RNA, 19 nt, Human
uccugggagaaccucaggc

SEQ ID NO: 2357424 - RNA, 12 nt, Human
uccugggaguga

SEQ ID NO: 2357425 - RNA, 14 nt, Human
uccugggagugagc

SEQ ID NO: 2357426 - RNA, 17 nt, Human
uccugggagugagcugg

SEQ ID NO: 2357427 - RNA, 19 nt, Human
uccuggaaaggcucagucu

SEQ ID NO: 2357428 - RNA, 16 nt, Human
uccuggaaaggcucag

SEQ ID NO: 2357429 - RNA, 22 nt, Human
uccuggaaaggcucagucucag

SEQ ID NO: 2357430 - RNA, 14 nt, Human
uccuggaagccagc

SEQ ID NO: 2357431 - RNA, 14 nt, Human
uccuggaagcugug

SEQ ID NO: 2357432 - RNA, 14 nt, Human
uccuggaaaccaca

SEQ ID NO: 2357433 - RNA, 22 nt, Human
uccuggaagcgcgagggccuca

SEQ ID NO: 2357434 - RNA, 20 nt, Human
uccuggaagccagcuuuccc

SEQ ID NO: 2357435 - RNA, 18 nt, Human
uccuggaagccagcuuuc

SEQ ID NO: 2357436 - RNA, 21 nt, Human
uccuggaagcuguguccuugc

SEQ ID NO: 2357437 - RNA, 17 nt, Human
uccuggacacucagacc

SEQ ID NO: 2357438 - RNA, 23 nt, Human
uccuggaagugcuaauuuugaaa

SEQ ID NO: 2357439 - RNA, 18 nt, Human
uccugcuuugggaagccg

SEQ ID NO: 2357440 - RNA, 15 nt, Human
uccuggaaauauuaa

SEQ ID NO: 2357441 - RNA, 16 nt, Human
uccuggaaaucagggu

SEQ ID NO: 2357442 - RNA, 22 nt, Human
uccuggaaauugacgaggggug

SEQ ID NO: 2357443 - RNA, 15 nt, Human
acugcacccccuccu

SEQ ID NO: 2357444 - RNA, 16 nt, Human
acugcacccccuccug

SEQ ID NO: 2357445 - RNA, 17 nt, Human
acugcacccccuccugc

SEQ ID NO: 2357446 - RNA, 18 nt, Human
acugcacccccuccugcu

SEQ ID NO: 2357447 - RNA, 14 nt, Human
acugcaccgggcca

SEQ ID NO: 2357448 - RNA, 16 nt, Human
acugcaccgggccaca

SEQ ID NO: 2357449 - RNA, 20 nt, Human
acugcacuauagccuaggug

SEQ ID NO: 2357450 - RNA, 17 nt, Human
acugcaagagccuuggu

SEQ ID NO: 2357451 - RNA, 16 nt, Human
acugcaagagccuugg

SEQ ID NO: 2357452 - RNA, 15 nt, Human
acugcaagagccuug

SEQ ID NO: 2357453 - RNA, 16 nt, Human
acugcaagaaaaugau

SEQ ID NO: 2357454 - RNA, 18 nt, Human
acugcaagagccuuggug

SEQ ID NO: 2357455 - RNA, 22 nt, Human
acugcacagugcaucucagccc

SEQ ID NO: 2357456 - RNA, 23 nt, Human
acugcacagugcaucucagccca

SEQ ID NO: 2357457 - RNA, 16 nt, Human
acugcaacuucugccu

SEQ ID NO: 2357458 - RNA, 20 nt, Human
acugcaacuuguaaaugugg

SEQ ID NO: 2357459 - RNA, 14 nt, Human
acugcaacuucugc

SEQ ID NO: 2357460 - RNA, 23 nt, Human
acugcaaccuucgccaccugggu

SEQ ID NO: 2357461 - RNA, 23 nt, Human
acugauaguuacuguugugaccu

SEQ ID NO: 2357462 - RNA, 16 nt, Human
acugauauauuuuaca

SEQ ID NO: 2357463 - RNA, 22 nt, Human
acugauauaucaugagugaaua

SEQ ID NO: 2357464 - RNA, 18 nt, Human
acugauaguuacuguugu

SEQ ID NO: 2357465 - RNA, 20 nt, Human
acugauaguuacuguuguga

SEQ ID NO: 2357466 - RNA, 14 nt, Human
acugagccuuguaa

SEQ ID NO: 2357467 - RNA, 21 nt, Human
acugagccccgcagaccuccc

SEQ ID NO: 2357468 - RNA, 23 nt, Human
acugagccccgcagaccucccca

SEQ ID NO: 2357469 - RNA, 16 nt, Human
acugauaguguccaaa

SEQ ID NO: 2357470 - RNA, 17 nt, Human
acugauaguguccaaau

SEQ ID NO: 2357471 - RNA, 15 nt, Human
acugauaguuacugu

SEQ ID NO: 2357472 - RNA, 17 nt, Human
acugauaguuacuguug

SEQ ID NO: 2357473 - RNA, 20 nt, Human
acugagccagucccaggggc

SEQ ID NO: 2357474 - RNA, 13 nt, Human
acugagccccccc

SEQ ID NO: 2357475 - RNA, 15 nt, Human
acugagcccccccaa

SEQ ID NO: 2357476 - RNA, 22 nt, Human
acugagcccccccaacacugug

SEQ ID NO: 2357477 - RNA, 14 nt, Human
acugagccccgcag

SEQ ID NO: 2357478 - RNA, 18 nt, Human
acugagccccgcagaccu

SEQ ID NO: 2357479 - RNA, 20 nt, Human
acugagccccgcagaccucc

SEQ ID NO: 2357480 - RNA, 12 nt, Human
acugagcagacu

SEQ ID NO: 2357481 - RNA, 13 nt, Human
acugagcagacug

SEQ ID NO: 2357482 - RNA, 23 nt, Human
acugagcagacuggugagcagac

SEQ ID NO: 2357483 - RNA, 14 nt, Human
acugagcagacugg

SEQ ID NO: 2357484 - RNA, 14 nt, Human
acugagcagagucu

SEQ ID NO: 2357485 - RNA, 21 nt, Human
acugauaaagaugagugagca

SEQ ID NO: 2357486 - RNA, 13 nt, Human
acugauaaagaug

SEQ ID NO: 2357487 - RNA, 20 nt, Human
acugcacuccagccugggug

SEQ ID NO: 2357488 - RNA, 19 nt, Human
acugcacuccagccugggu

SEQ ID NO: 2357489 - RNA, 21 nt, Human
acugcacuccagccugggcga

SEQ ID NO: 2357490 - RNA, 20 nt, Human
acugcacuccagccugggcg

SEQ ID NO: 2357491 - RNA, 20 nt, Human
acugcacuccagccugggca

SEQ ID NO: 2357492 - RNA, 19 nt, Human
acugcacuccagccugggc

SEQ ID NO: 2357493 - RNA, 18 nt, Human
acugcacuccagccuggg

SEQ ID NO: 2357494 - RNA, 17 nt, Human
acugcacuccagccugg

SEQ ID NO: 2357495 - RNA, 15 nt, Human
acugcacuccagccu

SEQ ID NO: 2357496 - RNA, 19 nt, Human
acugcacccccuccugcug

SEQ ID NO: 2357497 - RNA, 20 nt, Human
acugcacccccuccugcugc

SEQ ID NO: 2357498 - RNA, 21 nt, Human
acugcacccccuccugcugca

SEQ ID NO: 2357499 - RNA, 22 nt, Human
acugcacccccuccugcugcag

SEQ ID NO: 2357500 - RNA, 14 nt, Human
acugcacuccagcc

SEQ ID NO: 2357501 - RNA, 21 nt, Human
acugcacuauagccuagguga

SEQ ID NO: 2357502 - RNA, 15 nt, Human
uccugaucagagccg

SEQ ID NO: 2357503 - RNA, 19 nt, Human
uccugaugcuucuucagag

SEQ ID NO: 2357504 - RNA, 20 nt, Human
uccugaugcuucuucagaga

SEQ ID NO: 2357505 - RNA, 21 nt, Human
uccugaugcuucuucagagac

SEQ ID NO: 2357506 - RNA, 14 nt, Human
uccugaucagagcc

SEQ ID NO: 2357507 - RNA, 22 nt, Human
uccugcaaugaagucucugaag

SEQ ID NO: 2357508 - RNA, 21 nt, Human
uccugcacacgcuccuuccuc

SEQ ID NO: 2357509 - RNA, 14 nt, Human
uccugcacacgcuc

SEQ ID NO: 2357510 - RNA, 21 nt, Human
uccugcaaugaagucucugaa

SEQ ID NO: 2357511 - RNA, 20 nt, Human
uccugcacaguuuucuggcu

SEQ ID NO: 2357512 - RNA, 21 nt, Human
uccugcacaguuuucuggcug

SEQ ID NO: 2357513 - RNA, 22 nt, Human
uccugcacacgcuccuuccucu

SEQ ID NO: 2357514 - RNA, 22 nt, Human
uccaggaugcuaacaucuaaaa

SEQ ID NO: 2357515 - RNA, 15 nt, Human
uccaggauccagaag

SEQ ID NO: 2357516 - RNA, 19 nt, Human
uccaggaugcuaacaucua

SEQ ID NO: 2357517 - RNA, 18 nt, Human
uccaggagccugugccuc

SEQ ID NO: 2357518 - RNA, 22 nt, Human
uccaggccugugaggugcagag

SEQ ID NO: 2357519 - RNA, 19 nt, Human
uccaggauugaagagcauu

SEQ ID NO: 2357520 - RNA, 10 nt, Human
uccaggcucc

SEQ ID NO: 2357521 - RNA, 12 nt, Human
uccaggcuccuu

SEQ ID NO: 2357522 - RNA, 22 nt, Human
uccaggcuccuuuagcgcccag

SEQ ID NO: 2357523 - RNA, 20 nt, Human
uccaggcugggagagccuuc

SEQ ID NO: 2357524 - RNA, 21 nt, Human
uccaggcugggagagccuucc

SEQ ID NO: 2357525 - RNA, 19 nt, Human
uccaggcgaugugcaagug

SEQ ID NO: 2357526 - RNA, 11 nt, Human
uccaggcuggu

SEQ ID NO: 2357527 - RNA, 13 nt, Human
uccaggcugguuc

SEQ ID NO: 2357528 - RNA, 23 nt, Human
uccaggcugggagagccuuccag

SEQ ID NO: 2357529 - RNA, 14 nt, Human
acgaacccaccugc

SEQ ID NO: 2357530 - RNA, 16 nt, Human
acgaaauguuauuuuu

SEQ ID NO: 2357531 - RNA, 23 nt, Human
acgaaauguuauuuuuuaauuau

SEQ ID NO: 2357532 - RNA, 12 nt, Human
acgaaauguuau

SEQ ID NO: 2357533 - RNA, 13 nt, Human
acgaaauguuauu

SEQ ID NO: 2357534 - RNA, 15 nt, Human
acgaauauugcugau

SEQ ID NO: 2357535 - RNA, 18 nt, Human
acgaauauugcugauggu

SEQ ID NO: 2357536 - RNA, 11 nt, Human
uccagccuggg

SEQ ID NO: 2357537 - RNA, 15 nt, Human
uccaggagccugugc

SEQ ID NO: 2357538 - RNA, 23 nt, Human
uccaggagccuggcuccguccag

SEQ ID NO: 2357539 - RNA, 14 nt, Human
uccaggagccuggc

SEQ ID NO: 2357540 - RNA, 13 nt, Human
uccaggagccugg

SEQ ID NO: 2357541 - RNA, 19 nt, Human
uccagccugccuggcaggc

SEQ ID NO: 2357542 - RNA, 16 nt, Human
uccagccugccuggca

SEQ ID NO: 2357543 - RNA, 12 nt, Human
uccagccuggac

SEQ ID NO: 2357544 - RNA, 13 nt, Human
uccagccuggacc

SEQ ID NO: 2357545 - RNA, 14 nt, Human
uccagccuggaccc

SEQ ID NO: 2357546 - RNA, 17 nt, Human
uccagccuggaccccca

SEQ ID NO: 2357547 - RNA, 18 nt, Human
uccagccuggacccccag

SEQ ID NO: 2357548 - RNA, 19 nt, Human
uccagccuggacccccagc

SEQ ID NO: 2357549 - RNA, 20 nt, Human
uccagccuggacccccagcu

SEQ ID NO: 2357550 - RNA, 21 nt, Human
uccagccuggacccccagcuu

SEQ ID NO: 2357551 - RNA, 22 nt, Human
uccagccuggacccccagcuuu

SEQ ID NO: 2357552 - RNA, 14 nt, Human
uccagccuggagau

SEQ ID NO: 2357553 - RNA, 12 nt, Human
uccagccuggcu

SEQ ID NO: 2357554 - RNA, 13 nt, Human
uccagccuggcuc

SEQ ID NO: 2357555 - RNA, 23 nt, Human
uccagccgccauugccaccagga

SEQ ID NO: 2357556 - RNA, 22 nt, Human
uccagccgccauugccaccagg

SEQ ID NO: 2357557 - RNA, 21 nt, Human
uccagcccuggcugaaggacu

SEQ ID NO: 2357558 - RNA, 20 nt, Human
uccagccggcauggcuggga

SEQ ID NO: 2357559 - RNA, 12 nt, Human
uccagccuagag

SEQ ID NO: 2357560 - RNA, 21 nt, Human
uccagccgccauugccaccag

SEQ ID NO: 2357561 - RNA, 20 nt, Human
uccagccgccauugccacca

SEQ ID NO: 2357562 - RNA, 19 nt, Human
uccagccgccauugccacc

SEQ ID NO: 2357563 - RNA, 18 nt, Human
uccagccgccauugccac

SEQ ID NO: 2357564 - RNA, 20 nt, Human
uccagccugcugccugcuuu

SEQ ID NO: 2357565 - RNA, 13 nt, Human
uccagccugccac

SEQ ID NO: 2357566 - RNA, 15 nt, Human
uccagccucuccccu

SEQ ID NO: 2357567 - RNA, 16 nt, Human
uccagccgccauugcc

SEQ ID NO: 2357568 - RNA, 19 nt, Human
uccagcccuggcugaagga

SEQ ID NO: 2357569 - RNA, 20 nt, Human
uccagcccuggcugaaggac

SEQ ID NO: 2357570 - RNA, 21 nt, Human
uccagacccccagcaacccuc

SEQ ID NO: 2357571 - RNA, 16 nt, Human
uccagacccccagcaa

SEQ ID NO: 2357572 - RNA, 15 nt, Human
uccagcccuggcuga

SEQ ID NO: 2357573 - RNA, 17 nt, Human
uccagcccuggcugaag

SEQ ID NO: 2357574 - RNA, 22 nt, Human
uccagcccugaguuccuagcca

SEQ ID NO: 2357575 - RNA, 20 nt, Human
uccagcccugaguuccuagc

SEQ ID NO: 2357576 - RNA, 15 nt, Human
uccagacccccagca

SEQ ID NO: 2357577 - RNA, 14 nt, Human
uccagacccccagc

SEQ ID NO: 2357578 - RNA, 22 nt, Human
uccagacccccaccccuucccc

SEQ ID NO: 2357579 - RNA, 21 nt, Human
uccagacccccaccccuuccc

SEQ ID NO: 2357580 - RNA, 20 nt, Human
uccagacccccaccccuucc

SEQ ID NO: 2357581 - RNA, 17 nt, Human
uccagacccccaccccu

SEQ ID NO: 2357582 - RNA, 16 nt, Human
uccagacccccacccc

SEQ ID NO: 2357583 - RNA, 14 nt, Human
uccagacccccacc

SEQ ID NO: 2357584 - RNA, 13 nt, Human
uccagaccccugg

SEQ ID NO: 2357585 - RNA, 13 nt, Human
uccagacacuuuu

SEQ ID NO: 2357586 - RNA, 13 nt, Human
uccagacagccug

SEQ ID NO: 2357587 - RNA, 14 nt, Human
uccagacagccugu

SEQ ID NO: 2357588 - RNA, 13 nt, Human
uccagacccccac

SEQ ID NO: 2357589 - RNA, 18 nt, Human
uccagacagccuguaucu

SEQ ID NO: 2357590 - RNA, 12 nt, Human
uccagaccccca

SEQ ID NO: 2357591 - RNA, 15 nt, Human
uccagacagccugua

SEQ ID NO: 2357592 - RNA, 16 nt, Human
uccagacagccuguau

SEQ ID NO: 2357593 - RNA, 14 nt, Human
uccagaauuuccca

SEQ ID NO: 2357594 - RNA, 15 nt, Human
uccagaauuucccaa

SEQ ID NO: 2357595 - RNA, 15 nt, Human
accuuucuccuuugu

SEQ ID NO: 2357596 - RNA, 16 nt, Human
accuuucuccuuugua

SEQ ID NO: 2357597 - RNA, 18 nt, Human
accuugaacuccugggcu

SEQ ID NO: 2357598 - RNA, 20 nt, Human
accuugaacuggguacuugu

SEQ ID NO: 2357599 - RNA, 21 nt, Human
accuugaacacugggggaggg

SEQ ID NO: 2357600 - RNA, 18 nt, Human
accuugaacacuggggga

SEQ ID NO: 2357601 - RNA, 20 nt, Human
accuugaaaauaagaauaga

SEQ ID NO: 2357602 - RNA, 14 nt, Human
ucauuccuguauuc

SEQ ID NO: 2357603 - RNA, 19 nt, Human
accuugaaaacuuuaugcu

SEQ ID NO: 2357604 - RNA, 17 nt, Human
ucauuccuaacacagca

SEQ ID NO: 2357605 - RNA, 14 nt, Human
ucauuccccaggug

SEQ ID NO: 2357606 - RNA, 12 nt, Human
ucauuccccagg

SEQ ID NO: 2357607 - RNA, 23 nt, Human
ucauuccccagguggcugaccca

SEQ ID NO: 2357608 - RNA, 15 nt, Human
ucauguuuuaacaaa

SEQ ID NO: 2357609 - RNA, 14 nt, Human
ucauguuuuaacaa

SEQ ID NO: 2357610 - RNA, 19 nt, Human
ucauuccauucuggaagug

SEQ ID NO: 2357611 - RNA, 19 nt, Human
ucauuccugccugucuccu

SEQ ID NO: 2357612 - RNA, 17 nt, Human
ucauuccugccugucuc

SEQ ID NO: 2357613 - RNA, 13 nt, Human
ucauuccugccug

SEQ ID NO: 2357614 - RNA, 22 nt, Human
ucauuccugaaagaaacaguua

SEQ ID NO: 2357615 - RNA, 21 nt, Human
ucauuccugaaagaaacaguu

SEQ ID NO: 2357616 - RNA, 20 nt, Human
ucauuccugaaagaaacagu

SEQ ID NO: 2357617 - RNA, 16 nt, Human
ucauuccugaaagaaa

SEQ ID NO: 2357618 - RNA, 18 nt, Human
ucauuccuaacacagcau

SEQ ID NO: 2357619 - RNA, 14 nt, Human
ucauuccugaaaga

SEQ ID NO: 2357620 - RNA, 23 nt, Human
accuuucuccuuuguacuuugug

SEQ ID NO: 2357621 - RNA, 19 nt, Human
accuuucuccuuuguacuu

SEQ ID NO: 2357622 - RNA, 20 nt, Human
accuuucuccuuuguacuuu

SEQ ID NO: 2357623 - RNA, 17 nt, Human
accuuuguccccaccgc

SEQ ID NO: 2357624 - RNA, 17 nt, Human
accuuugacaaagguaa

SEQ ID NO: 2357625 - RNA, 18 nt, Human
accuuugacaaagguaaa

SEQ ID NO: 2357626 - RNA, 14 nt, Human
accuuuuaacucac

SEQ ID NO: 2357627 - RNA, 21 nt, Human
accuuuuaacaccugaugugu

SEQ ID NO: 2357628 - RNA, 20 nt, Human
accuuuuaacaccugaugug

SEQ ID NO: 2357629 - RNA, 12 nt, Human
accuuuuaacac

SEQ ID NO: 2357630 - RNA, 22 nt, Human
accuuuguuugcaucugaaaau

SEQ ID NO: 2357631 - RNA, 18 nt, Human
accuuuguccccaccgca

SEQ ID NO: 2357632 - RNA, 18 nt, Human
accuuuggagcaaagcug

SEQ ID NO: 2357633 - RNA, 14 nt, Human
accuuugcaggcau

SEQ ID NO: 2357634 - RNA, 23 nt, Human
accuuugugggguuuuuggagaa

SEQ ID NO: 2357635 - RNA, 16 nt, Human
accuuuuauugacaca

SEQ ID NO: 2357636 - RNA, 17 nt, Human
accuuuugaggagcccc

SEQ ID NO: 2357637 - RNA, 21 nt, Human
accuuuugaggagccccagcu

SEQ ID NO: 2357638 - RNA, 20 nt, Human
accuuuuggucuggagggaa

SEQ ID NO: 2357639 - RNA, 15 nt, Human
accuuuuauccacuu

SEQ ID NO: 2357640 - RNA, 15 nt, Human
accuuuuauguagua

SEQ ID NO: 2357641 - RNA, 21 nt, Human
accuuuuaauuaaugaaauau

SEQ ID NO: 2357642 - RNA, 14 nt, Human
accuuuuauuacau

SEQ ID NO: 2357643 - RNA, 20 nt, Human
accuuuuauguaguaauuga

SEQ ID NO: 2357644 - RNA, 20 nt, Human
accuuuuauugacacagaaa

SEQ ID NO: 2357645 - RNA, 15 nt, Human
accuuuuuccuuccu

SEQ ID NO: 2357646 - RNA, 15 nt, Human
accuuuuuuaagauu

SEQ ID NO: 2357647 - RNA, 16 nt, Human
accuuuuuuaagauuu

SEQ ID NO: 2357648 - RNA, 14 nt, Human
uccacuccuuccug

SEQ ID NO: 2357649 - RNA, 13 nt, Human
uccacuccuuccu

SEQ ID NO: 2357650 - RNA, 20 nt, Human
accuuuuuuaagauuuuucu

SEQ ID NO: 2357651 - RNA, 22 nt, Human
accuuuuuuaagauuuuucuca

SEQ ID NO: 2357652 - RNA, 14 nt, Human
accuuuuuccuucc

SEQ ID NO: 2357653 - RNA, 19 nt, Human
accuuuuuauuugcaugug

SEQ ID NO: 2357654 - RNA, 14 nt, Human
accuuuuuaucucc

SEQ ID NO: 2357655 - RNA, 19 nt, Human
accuuuugaaguaguuugu

SEQ ID NO: 2357656 - RNA, 13 nt, Human
accuuuuuuauac

SEQ ID NO: 2357657 - RNA, 18 nt, Human
uccacucuacccucccac

SEQ ID NO: 2357658 - RNA, 17 nt, Human
uccacucuacccuccca

SEQ ID NO: 2357659 - RNA, 21 nt, Human
uccacucuacccucccacccc

SEQ ID NO: 2357660 - RNA, 20 nt, Human
uccacucuacccucccaccc

SEQ ID NO: 2357661 - RNA, 23 nt, Human
uccacucuacccucccacccccu

SEQ ID NO: 2357662 - RNA, 12 nt, Human
uccacucucccc

SEQ ID NO: 2357663 - RNA, 22 nt, Human
uccacugguucuucuuggucuc

SEQ ID NO: 2357664 - RNA, 13 nt, Human
uccacucuccccc

SEQ ID NO: 2357665 - RNA, 14 nt, Human
uccacucuccccca

SEQ ID NO: 2357666 - RNA, 16 nt, Human
uccacucucccccacc

SEQ ID NO: 2357667 - RNA, 18 nt, Human
uccacucucccccacccc

SEQ ID NO: 2357668 - RNA, 22 nt, Human
uccacugucacuguuucucugc

SEQ ID NO: 2357669 - RNA, 19 nt, Human
uccacugucacuguuucuc

SEQ ID NO: 2357670 - RNA, 18 nt, Human
uccagaaugcuguacauc

SEQ ID NO: 2357671 - RNA, 17 nt, Human
uccagaaugcuguacau

SEQ ID NO: 2357672 - RNA, 16 nt, Human
uccagaauugaccuuu

SEQ ID NO: 2357673 - RNA, 21 nt, Human
uccagaaugcuguacaucuau

SEQ ID NO: 2357674 - RNA, 18 nt, Human
uccagaauggucuuucua

SEQ ID NO: 2357675 - RNA, 21 nt, Human
uccacugugccaugugccagg

SEQ ID NO: 2357676 - RNA, 21 nt, Human
uccacuccuuccugccaccug

SEQ ID NO: 2357677 - RNA, 12 nt, Human
uccacugucacc

SEQ ID NO: 2357678 - RNA, 17 nt, Human
uccacugucacccucca

SEQ ID NO: 2357679 - RNA, 19 nt, Human
uccacugucacccuccacc

SEQ ID NO: 2357680 - RNA, 15 nt, Human
acgccucccacuggg

SEQ ID NO: 2357681 - RNA, 14 nt, Human
acgccucccacugg

SEQ ID NO: 2357682 - RNA, 18 nt, Human
acgccuaugaucccagca

SEQ ID NO: 2357683 - RNA, 17 nt, Human
acgccuaugaucccagc

SEQ ID NO: 2357684 - RNA, 16 nt, Human
acgccuaugaucccag

SEQ ID NO: 2357685 - RNA, 16 nt, Human
acgaacccaccugcug

SEQ ID NO: 2357686 - RNA, 15 nt, Human
acgaacccaccugcu

SEQ ID NO: 2357687 - RNA, 21 nt, Human
acgaauauugcugauggugca

SEQ ID NO: 2357688 - RNA, 21 nt, Human
acgccugcaaacgcugccugc

SEQ ID NO: 2357689 - RNA, 20 nt, Human
acgccugcaaacgcugccug

SEQ ID NO: 2357690 - RNA, 19 nt, Human
acgccugcaaacgcugccu

SEQ ID NO: 2357691 - RNA, 18 nt, Human
acgccugcaaacgcugcc

SEQ ID NO: 2357692 - RNA, 17 nt, Human
acgccugcaaacgcugc

SEQ ID NO: 2357693 - RNA, 14 nt, Human
acgccugcaaacgc

SEQ ID NO: 2357694 - RNA, 21 nt, Human
acgccugaggaacccuuacag

SEQ ID NO: 2357695 - RNA, 13 nt, Human
acgccugaggaac

SEQ ID NO: 2357696 - RNA, 18 nt, Human
acgccuuguucuuggcca

SEQ ID NO: 2357697 - RNA, 14 nt, Human
acgccuuguucuug

SEQ ID NO: 2357698 - RNA, 19 nt, Human
acgccuguaaucccagcag

SEQ ID NO: 2357699 - RNA, 23 nt, Human
acgcgaaaguaucaccagggugc

SEQ ID NO: 2357700 - RNA, 16 nt, Human
acgccuguaguccuag

SEQ ID NO: 2357701 - RNA, 21 nt, Human
acgccuguaaucccagcacuu

SEQ ID NO: 2357702 - RNA, 19 nt, Human
acgccuguaaucccagcac

SEQ ID NO: 2357703 - RNA, 18 nt, Human
acgccuguaaucccagca

SEQ ID NO: 2357704 - RNA, 20 nt, Human
acgccuguaaucccagcacu

SEQ ID NO: 2357705 - RNA, 17 nt, Human
acgccuguaaucccagc

SEQ ID NO: 2357706 - RNA, 16 nt, Human
acgccuguaaucccag

SEQ ID NO: 2357707 - RNA, 18 nt, Human
acgccugggggugccagg

SEQ ID NO: 2357708 - RNA, 15 nt, Human
acgccugccuccccu

SEQ ID NO: 2357709 - RNA, 23 nt, Human
acgccugcaaacgcugccugccc

SEQ ID NO: 2357710 - RNA, 22 nt, Human
acgccugcaaacgcugccugcc

SEQ ID NO: 2357711 - RNA, 19 nt, Human
acgccugcccuccccagag

SEQ ID NO: 2357712 - RNA, 21 nt, Human
acgccugcccuccccagagca

SEQ ID NO: 2357713 - RNA, 22 nt, Human
acgccugcccuccccagagcac

SEQ ID NO: 2357714 - RNA, 12 nt, Human
acgccugccucc

SEQ ID NO: 2357715 - RNA, 12 nt, Human
acgcggccgaga

SEQ ID NO: 2357716 - RNA, 12 nt, Human
acgcgucuccug

SEQ ID NO: 2357717 - RNA, 13 nt, Human
acgcgucuuccug

SEQ ID NO: 2357718 - RNA, 22 nt, Human
acgcgaaaguaucaccagggug

SEQ ID NO: 2357719 - RNA, 21 nt, Human
acgcuacccgggaagggggcu

SEQ ID NO: 2357720 - RNA, 15 nt, Human
acgcgucuuccugag

SEQ ID NO: 2357721 - RNA, 22 nt, Human
acgcucuccuuucuuucuaacu

SEQ ID NO: 2357722 - RNA, 13 nt, Human
acgcuggaccuug

SEQ ID NO: 2357723 - RNA, 14 nt, Human
acgcucucuggccu

SEQ ID NO: 2357724 - RNA, 11 nt, Human
acgcucucugg

SEQ ID NO: 2357725 - RNA, 22 nt, Human
acgcuccccgccuguucccccg

SEQ ID NO: 2357726 - RNA, 14 nt, Human
acgcuccuuccucu

SEQ ID NO: 2357727 - RNA, 22 nt, Human
acgcuccucccucugaggcugu

SEQ ID NO: 2357728 - RNA, 23 nt, Human
acgcuccucccucugaggcugua

SEQ ID NO: 2357729 - RNA, 15 nt, Human
acgcuccuuccucug

SEQ ID NO: 2357730 - RNA, 15 nt, Human
acgcgucuccuguuu

SEQ ID NO: 2357731 - RNA, 14 nt, Human
acgcuccccgccug

SEQ ID NO: 2357732 - RNA, 17 nt, Human
acgcuccccgccuguuc

SEQ ID NO: 2357733 - RNA, 18 nt, Human
acgcuccccgccuguucc

SEQ ID NO: 2357734 - RNA, 19 nt, Human
acgcuccccgccuguuccc

SEQ ID NO: 2357735 - RNA, 20 nt, Human
acgcuccccgccuguucccc

SEQ ID NO: 2357736 - RNA, 20 nt, Human
acggauccauguagcaggac

SEQ ID NO: 2357737 - RNA, 13 nt, Human
acggagucucgcu

SEQ ID NO: 2357738 - RNA, 17 nt, Human
acggaucagaaauacag

SEQ ID NO: 2357739 - RNA, 16 nt, Human
acggaucagaaauaca

SEQ ID NO: 2357740 - RNA, 23 nt, Human
acggagucccaccuuggcugcag

SEQ ID NO: 2357741 - RNA, 17 nt, Human
acgcuggagugcaguga

SEQ ID NO: 2357742 - RNA, 20 nt, Human
acgcuggaccuugaacuggg

SEQ ID NO: 2357743 - RNA, 23 nt, Human
acgcuggaccuugaacuggguac

SEQ ID NO: 2357744 - RNA, 15 nt, Human
acgcuggagugcagu

SEQ ID NO: 2357745 - RNA, 16 nt, Human
acgcuggagugcagug

SEQ ID NO: 2357746 - RNA, 18 nt, Human
acggccacaucaaagagg

SEQ ID NO: 2357747 - RNA, 13 nt, Human
acggccacaucaa

SEQ ID NO: 2357748 - RNA, 19 nt, Human
acggcucgauuucuccagg

SEQ ID NO: 2357749 - RNA, 18 nt, Human
acggcucgauuucuccag

SEQ ID NO: 2357750 - RNA, 15 nt, Human
acggccacuggccau

SEQ ID NO: 2357751 - RNA, 17 nt, Human
acggcucuagguggggc

SEQ ID NO: 2357752 - RNA, 18 nt, Human
acggcucuagguggggcg

SEQ ID NO: 2357753 - RNA, 19 nt, Human
acggcucuagguggggcgg

SEQ ID NO: 2357754 - RNA, 11 nt, Human
acggcugggca

SEQ ID NO: 2357755 - RNA, 22 nt, Human
acggcugggcacacgccuccca

SEQ ID NO: 2357756 - RNA, 23 nt, Human
acggcuuagacuucgacucagga

SEQ ID NO: 2357757 - RNA, 18 nt, Human
acggcuuuuacuuaaacc

SEQ ID NO: 2357758 - RNA, 14 nt, Human
uccaguaucuugaa

SEQ ID NO: 2357759 - RNA, 15 nt, Human
uccaguaucuugaag

SEQ ID NO: 2357760 - RNA, 15 nt, Human
uccaguaaucuaaua

SEQ ID NO: 2357761 - RNA, 19 nt, Human
uccaguaaucuaauauggc

SEQ ID NO: 2357762 - RNA, 13 nt, Human
acgggaccgggcc

SEQ ID NO: 2357763 - RNA, 15 nt, Human
acgggaccgggccgc

SEQ ID NO: 2357764 - RNA, 15 nt, Human
acgggacugacgcaa

SEQ ID NO: 2357765 - RNA, 17 nt, Human
acgggaaguuuagagag

SEQ ID NO: 2357766 - RNA, 16 nt, Human
acggcucacugcagcc

SEQ ID NO: 2357767 - RNA, 17 nt, Human
acggcucacugcagccu

SEQ ID NO: 2357768 - RNA, 18 nt, Human
acggcucacugcagccuc

SEQ ID NO: 2357769 - RNA, 12 nt, Human
acggccaggcca

SEQ ID NO: 2357770 - RNA, 22 nt, Human
acggcaggcucacugccaggcc

SEQ ID NO: 2357771 - RNA, 16 nt, Human
acggccaacaaagcug

SEQ ID NO: 2357772 - RNA, 21 nt, Human
acggauccauguagcaggacu

SEQ ID NO: 2357773 - RNA, 15 nt, Human
acggaucugagaauc

SEQ ID NO: 2357774 - RNA, 17 nt, Human
acggaucugagaaucuu

SEQ ID NO: 2357775 - RNA, 16 nt, Human
acggaugauuggauua

SEQ ID NO: 2357776 - RNA, 15 nt, Human
acggcaggcucacug

SEQ ID NO: 2357777 - RNA, 17 nt, Human
acggcaggcucacugcc

SEQ ID NO: 2357778 - RNA, 18 nt, Human
acggcaggcucacugcca

SEQ ID NO: 2357779 - RNA, 20 nt, Human
acggcaggcucacugccagg

SEQ ID NO: 2357780 - RNA, 18 nt, Human
uccagugcaacacugaag

SEQ ID NO: 2357781 - RNA, 14 nt, Human
uccagugcaauugu

SEQ ID NO: 2357782 - RNA, 18 nt, Human
uccagugagcuuaucaug

SEQ ID NO: 2357783 - RNA, 19 nt, Human
uccagugccaacaauccua

SEQ ID NO: 2357784 - RNA, 18 nt, Human
uccagugccaacaauccu

SEQ ID NO: 2357785 - RNA, 14 nt, Human
uccagugccagcaa

SEQ ID NO: 2357786 - RNA, 17 nt, Human
uccagugccagcaauga

SEQ ID NO: 2357787 - RNA, 20 nt, Human
uccagugcccauuccucacc

SEQ ID NO: 2357788 - RNA, 19 nt, Human
uccaguggggcaagauuuu

SEQ ID NO: 2357789 - RNA, 22 nt, Human
uccagugaggcucugcccuugg

SEQ ID NO: 2357790 - RNA, 23 nt, Human
uccagugaggcucugcccuuggu

SEQ ID NO: 2357791 - RNA, 14 nt, Human
uccagucugcugcc

SEQ ID NO: 2357792 - RNA, 13 nt, Human
uccagucugcugc

SEQ ID NO: 2357793 - RNA, 19 nt, Human
uccagucuccaccaggaac

SEQ ID NO: 2357794 - RNA, 16 nt, Human
uccagugaggcucugc

SEQ ID NO: 2357795 - RNA, 15 nt, Human
uccagugaggcucug

SEQ ID NO: 2357796 - RNA, 18 nt, Human
uccagugagacagcucug

SEQ ID NO: 2357797 - RNA, 22 nt, Human
uccagucuaaaaauaucugucu

SEQ ID NO: 2357798 - RNA, 16 nt, Human
uccagucuccaccagg

SEQ ID NO: 2357799 - RNA, 15 nt, Human
uccagucuccaccag

SEQ ID NO: 2357800 - RNA, 17 nt, Human
uccaguccaaucucaug

SEQ ID NO: 2357801 - RNA, 16 nt, Human
uccaguccaaggaaac

SEQ ID NO: 2357802 - RNA, 23 nt, Human
uccaguccaaggaaaccacagcu

SEQ ID NO: 2357803 - RNA, 23 nt, Human
uccaguagcuugggacaaaucaa

SEQ ID NO: 2357804 - RNA, 17 nt, Human
uccaguaccuuugucac

SEQ ID NO: 2357805 - RNA, 16 nt, Human
uccaguaggauccagu

SEQ ID NO: 2357806 - RNA, 13 nt, Human
uccaguauucuug

SEQ ID NO: 2357807 - RNA, 19 nt, Human
uccaguauucuugucaaaa

SEQ ID NO: 2357808 - RNA, 13 nt, Human
uccagucaacaaa

SEQ ID NO: 2357809 - RNA, 22 nt, Human
uccagucaacaaacuauuucuu

SEQ ID NO: 2357810 - RNA, 13 nt, Human
uccagucaggaug

SEQ ID NO: 2357811 - RNA, 20 nt, Human
uccagucaggccuaucuaaa

SEQ ID NO: 2357812 - RNA, 16 nt, Human
uccaguaucuugaaga

SEQ ID NO: 2357813 - RNA, 18 nt, Human
uccaguaucuugaagacu

SEQ ID NO: 2357814 - RNA, 13 nt, Human
acguuuguaugug

SEQ ID NO: 2357815 - RNA, 16 nt, Human
acuaaacuuucacacc

SEQ ID NO: 2357816 - RNA, 15 nt, Human
acuaaacuuucacac

SEQ ID NO: 2357817 - RNA, 18 nt, Human
acguuggagaagcccgug

SEQ ID NO: 2357818 - RNA, 22 nt, Human
acguuucuaaaggcuaccuuug

SEQ ID NO: 2357819 - RNA, 21 nt, Human
acuaaagagagaauguagaua

SEQ ID NO: 2357820 - RNA, 16 nt, Human
acuaaagagagaaugu

SEQ ID NO: 2357821 - RNA, 14 nt, Human
acuaaagagagaau

SEQ ID NO: 2357822 - RNA, 12 nt, Human
acuaaagagaga

SEQ ID NO: 2357823 - RNA, 15 nt, Human
acuaaagaaagauua

SEQ ID NO: 2357824 - RNA, 17 nt, Human
acuaaagaaagauuacu

SEQ ID NO: 2357825 - RNA, 13 nt, Human
acuaaacuuuacc

SEQ ID NO: 2357826 - RNA, 21 nt, Human
acuaaagaaaauaucugaaau

SEQ ID NO: 2357827 - RNA, 17 nt, Human
acuaaagcaguagaaau

SEQ ID NO: 2357828 - RNA, 13 nt, Human
acuaacagauaag

SEQ ID NO: 2357829 - RNA, 22 nt, Human
acuaacacuauuuuaugcaaau

SEQ ID NO: 2357830 - RNA, 16 nt, Human
acuaacagauaagcaa

SEQ ID NO: 2357831 - RNA, 17 nt, Human
acuaauuugauguuuac

SEQ ID NO: 2357832 - RNA, 19 nt, Human
acuacacauucaauaagca

SEQ ID NO: 2357833 - RNA, 15 nt, Human
acuacacauucaaua

SEQ ID NO: 2357834 - RNA, 23 nt, Human
acuacacaucccuaaugugugcc

SEQ ID NO: 2357835 - RNA, 18 nt, Human
acuacaaaauuugaaauu

SEQ ID NO: 2357836 - RNA, 16 nt, Human
acuacaaaauuugaaa

SEQ ID NO: 2357837 - RNA, 18 nt, Human
acuacaaacaaaauuucu

SEQ ID NO: 2357838 - RNA, 14 nt, Human
acuacaaaauuuga

SEQ ID NO: 2357839 - RNA, 13 nt, Human
acuacaaaauuug

SEQ ID NO: 2357840 - RNA, 21 nt, Human
acuacaaaaaaguuguuaacu

SEQ ID NO: 2357841 - RNA, 12 nt, Human
acuaacacuauu

SEQ ID NO: 2357842 - RNA, 15 nt, Human
acuaacacuauuuua

SEQ ID NO: 2357843 - RNA, 18 nt, Human
acuaaauuguaaacuccu

SEQ ID NO: 2357844 - RNA, 15 nt, Human
acuaauuuuaaaaug

SEQ ID NO: 2357845 - RNA, 17 nt, Human
ucccacuuggaggccuu

SEQ ID NO: 2357846 - RNA, 21 nt, Human
ucccacuuggcaucagcuggc

SEQ ID NO: 2357847 - RNA, 23 nt, Human
ucccacuuggcaucagcuggcgu

SEQ ID NO: 2357848 - RNA, 12 nt, Human
ucccacuuguca

SEQ ID NO: 2357849 - RNA, 13 nt, Human
ucccacuuggcca

SEQ ID NO: 2357850 - RNA, 14 nt, Human
ucccacuuggccaa

SEQ ID NO: 2357851 - RNA, 20 nt, Human
acuacacuccagccugagca

SEQ ID NO: 2357852 - RNA, 19 nt, Human
acuacacuccagccugagc

SEQ ID NO: 2357853 - RNA, 18 nt, Human
acuacacuccagccugag

SEQ ID NO: 2357854 - RNA, 17 nt, Human
acuacacuccagccuga

SEQ ID NO: 2357855 - RNA, 15 nt, Human
acuacacuccagccu

SEQ ID NO: 2357856 - RNA, 23 nt, Human
acuacaccauguuugagcucaga

SEQ ID NO: 2357857 - RNA, 14 nt, Human
acuacaccuggcug

SEQ ID NO: 2357858 - RNA, 13 nt, Human
acuacaccuggcu

SEQ ID NO: 2357859 - RNA, 16 nt, Human
ucccagagacaggaaa

SEQ ID NO: 2357860 - RNA, 22 nt, Human
ucccagaccugccucuuccccc

SEQ ID NO: 2357861 - RNA, 23 nt, Human
ucccagaaucaaagcaaugcauu

SEQ ID NO: 2357862 - RNA, 22 nt, Human
ucccagaaucaaagcaaugcau

SEQ ID NO: 2357863 - RNA, 18 nt, Human
ucccagacacccacccuc

SEQ ID NO: 2357864 - RNA, 18 nt, Human
ucccagagacaggaaaau

SEQ ID NO: 2357865 - RNA, 17 nt, Human
ucccagagacaggaaaa

SEQ ID NO: 2357866 - RNA, 20 nt, Human
ucccagagacaggaaaaucc

SEQ ID NO: 2357867 - RNA, 16 nt, Human
ucccagagcaaaauaa

SEQ ID NO: 2357868 - RNA, 20 nt, Human
ucccagaaggaccuccugag

SEQ ID NO: 2357869 - RNA, 12 nt, Human
ucccagaaucaa

SEQ ID NO: 2357870 - RNA, 18 nt, Human
ucccagaaucaaagcaau

SEQ ID NO: 2357871 - RNA, 19 nt, Human
ucccagaaucaaagcaaug

SEQ ID NO: 2357872 - RNA, 18 nt, Human
ucccagaaggaccuccug

SEQ ID NO: 2357873 - RNA, 20 nt, Human
ucccagaacacacuccauca

SEQ ID NO: 2357874 - RNA, 19 nt, Human
ucccagaacacacuccauc

SEQ ID NO: 2357875 - RNA, 17 nt, Human
ucccagaacacacucca

SEQ ID NO: 2357876 - RNA, 12 nt, Human
ucccagaaauua

SEQ ID NO: 2357877 - RNA, 23 nt, Human
ucccacuuggccaagcagggagg

SEQ ID NO: 2357878 - RNA, 16 nt, Human
ucccagauacuugggg

SEQ ID NO: 2357879 - RNA, 17 nt, Human
ucccagaggcugcccca

SEQ ID NO: 2357880 - RNA, 16 nt, Human
ucccagaggcugcccc

SEQ ID NO: 2357881 - RNA, 21 nt, Human
ucccagaggguuuccaugggg

SEQ ID NO: 2357882 - RNA, 18 nt, Human
ucccagagcaggaggccc

SEQ ID NO: 2357883 - RNA, 21 nt, Human
ucccagagcaggaggccccug

SEQ ID NO: 2357884 - RNA, 17 nt, Human
ucccagagcaggaggcc

SEQ ID NO: 2357885 - RNA, 15 nt, Human
ucccagagugcuggg

SEQ ID NO: 2357886 - RNA, 16 nt, Human
ucccagauaaugugaa

SEQ ID NO: 2357887 - RNA, 17 nt, Human
ucccagaucggaucugu

SEQ ID NO: 2357888 - RNA, 18 nt, Human
ucccagauacuugggggg

SEQ ID NO: 2357889 - RNA, 22 nt, Human
ucccagauuggcucacacugag

SEQ ID NO: 2357890 - RNA, 18 nt, Human
ucccagauuggcucacac

SEQ ID NO: 2357891 - RNA, 19 nt, Human
ucccagauuggcucacacu

SEQ ID NO: 2357892 - RNA, 20 nt, Human
ucccagauuggcucacacug

SEQ ID NO: 2357893 - RNA, 21 nt, Human
ucccagauuggcucacacuga

SEQ ID NO: 2357894 - RNA, 17 nt, Human
acguaaagcuagaaaug

SEQ ID NO: 2357895 - RNA, 18 nt, Human
acguaaagcuagaaauga

SEQ ID NO: 2357896 - RNA, 19 nt, Human
acggugggcauuugugagg

SEQ ID NO: 2357897 - RNA, 18 nt, Human
acggugggcauuugugag

SEQ ID NO: 2357898 - RNA, 20 nt, Human
acggugggccuugcugggga

SEQ ID NO: 2357899 - RNA, 15 nt, Human
acggugcuccaggca

SEQ ID NO: 2357900 - RNA, 18 nt, Human
acggugcuccaggcaggc

SEQ ID NO: 2357901 - RNA, 22 nt, Human
acggugcuccaggcaggcuaag

SEQ ID NO: 2357902 - RNA, 14 nt, Human
acggugcccaagcc

SEQ ID NO: 2357903 - RNA, 20 nt, Human
acggucuguucuugaagcag

SEQ ID NO: 2357904 - RNA, 15 nt, Human
acggugcccaagcca

SEQ ID NO: 2357905 - RNA, 17 nt, Human
acggugcagucugggug

SEQ ID NO: 2357906 - RNA, 21 nt, Human
acggugccuuuuuucacggaa

SEQ ID NO: 2357907 - RNA, 18 nt, Human
acguaaccacggaaaaga

SEQ ID NO: 2357908 - RNA, 17 nt, Human
acggugggccuugcugg

SEQ ID NO: 2357909 - RNA, 18 nt, Human
acguaaugaaacuuggau

SEQ ID NO: 2357910 - RNA, 17 nt, Human
acgucaagucuccuucc

SEQ ID NO: 2357911 - RNA, 17 nt, Human
acgucaaacaugaagug

SEQ ID NO: 2357912 - RNA, 16 nt, Human
acgucaaacaugaagu

SEQ ID NO: 2357913 - RNA, 14 nt, Human
acgucaaacaugaa

SEQ ID NO: 2357914 - RNA, 16 nt, Human
uccagugucucggagg

SEQ ID NO: 2357915 - RNA, 19 nt, Human
uccaguuaaaaaaaauuuu

SEQ ID NO: 2357916 - RNA, 19 nt, Human
uccauccugaggcuccacu

SEQ ID NO: 2357917 - RNA, 16 nt, Human
uccagugucucacagc

SEQ ID NO: 2357918 - RNA, 18 nt, Human
acggucuguucuugaagc

SEQ ID NO: 2357919 - RNA, 15 nt, Human
uccauccugaggcuc

SEQ ID NO: 2357920 - RNA, 12 nt, Human
uccauccugagg

SEQ ID NO: 2357921 - RNA, 20 nt, Human
uccaguguccuuagaacauu

SEQ ID NO: 2357922 - RNA, 15 nt, Human
uccagugucucacag

SEQ ID NO: 2357923 - RNA, 21 nt, Human
uccaguguccuuagaacauuu

SEQ ID NO: 2357924 - RNA, 18 nt, Human
uccaguguccuuagaaca

SEQ ID NO: 2357925 - RNA, 17 nt, Human
uccaguguccuuagaac

SEQ ID NO: 2357926 - RNA, 20 nt, Human
uccaguggggcaagauuuuc

SEQ ID NO: 2357927 - RNA, 20 nt, Human
uccagugguccauggaaugc

SEQ ID NO: 2357928 - RNA, 22 nt, Human
uccagugguccauggaaugcuu

SEQ ID NO: 2357929 - RNA, 12 nt, Human
uccaguggugaa

SEQ ID NO: 2357930 - RNA, 19 nt, Human
uccaguggugaagaaaacu

SEQ ID NO: 2357931 - RNA, 15 nt, Human
uccagugguugcugu

SEQ ID NO: 2357932 - RNA, 19 nt, Human
uccagugguugcuguugau

SEQ ID NO: 2357933 - RNA, 16 nt, Human
uccagugguuugagac

SEQ ID NO: 2357934 - RNA, 23 nt, Human
uccagugguuugagacacugguu

SEQ ID NO: 2357935 - RNA, 13 nt, Human
acguucaccccuc

SEQ ID NO: 2357936 - RNA, 19 nt, Human
acguuggagaagcccgugu

SEQ ID NO: 2357937 - RNA, 18 nt, Human
acguuagaccacaaauag

SEQ ID NO: 2357938 - RNA, 16 nt, Human
acguuaugguguuucu

SEQ ID NO: 2357939 - RNA, 17 nt, Human
acguuaugguguuucuc

SEQ ID NO: 2357940 - RNA, 13 nt, Human
acguugugcauuu

SEQ ID NO: 2357941 - RNA, 15 nt, Human
acguuaccaggcagg

SEQ ID NO: 2357942 - RNA, 21 nt, Human
acguuaagggaaggaacucug

SEQ ID NO: 2357943 - RNA, 16 nt, Human
acguuagucgugagcu

SEQ ID NO: 2357944 - RNA, 12 nt, Human
acguuacauuuu

SEQ ID NO: 2357945 - RNA, 17 nt, Human
acguuagaccacaaaua

SEQ ID NO: 2357946 - RNA, 21 nt, Human
acguuagucgugagcucuugu

SEQ ID NO: 2357947 - RNA, 22 nt, Human
acguuagucgugagcucuugug

SEQ ID NO: 2357948 - RNA, 15 nt, Human
acguugugcauuugg

SEQ ID NO: 2357949 - RNA, 14 nt, Human
acguugugcauuug

SEQ ID NO: 2357950 - RNA, 16 nt, Human
acguuucuaaaggcua

SEQ ID NO: 2357951 - RNA, 15 nt, Human
acguuucuaaaggcu

SEQ ID NO: 2357952 - RNA, 12 nt, Human
acgucccuccac

SEQ ID NO: 2357953 - RNA, 22 nt, Human
acgucccuccacguucaccccu

SEQ ID NO: 2357954 - RNA, 17 nt, Human
acguggcugcuucaagg

SEQ ID NO: 2357955 - RNA, 18 nt, Human
acguggcugcuucaagga

SEQ ID NO: 2357956 - RNA, 17 nt, Human
acgucaucuaguuuuaa

SEQ ID NO: 2357957 - RNA, 13 nt, Human
acgucccccuggg

SEQ ID NO: 2357958 - RNA, 23 nt, Human
acguccaccaugggguccuacca

SEQ ID NO: 2357959 - RNA, 18 nt, Human
acguccagaauuuuucau

SEQ ID NO: 2357960 - RNA, 21 nt, Human
acgucacuggaccacugggca

SEQ ID NO: 2357961 - RNA, 16 nt, Human
acguccugccaccugg

SEQ ID NO: 2357962 - RNA, 15 nt, Human
acguccugccaccug

SEQ ID NO: 2357963 - RNA, 23 nt, Human
acgugugugacucagaugucucu

SEQ ID NO: 2357964 - RNA, 16 nt, Human
acguguuugugcugug

SEQ ID NO: 2357965 - RNA, 22 nt, Human
acguguuuuauuccuguauguu

SEQ ID NO: 2357966 - RNA, 11 nt, Human
acguguugccu

SEQ ID NO: 2357967 - RNA, 19 nt, Human
acguggcugcuucaaggau

SEQ ID NO: 2357968 - RNA, 21 nt, Human
acguggcugcuucaaggaucc

SEQ ID NO: 2357969 - RNA, 16 nt, Human
ucccagcuacaccuuu

SEQ ID NO: 2357970 - RNA, 16 nt, Human
ucccagcuaccucaac

SEQ ID NO: 2357971 - RNA, 14 nt, Human
ucccagcuacucag

SEQ ID NO: 2357972 - RNA, 22 nt, Human
ucccagcuacucaagaggcuga

SEQ ID NO: 2357973 - RNA, 13 nt, Human
ucccagcuacuca

SEQ ID NO: 2357974 - RNA, 21 nt, Human
ucccagccuuggcaucuagag

SEQ ID NO: 2357975 - RNA, 23 nt, Human
ucccagcuacucagaagccugag

SEQ ID NO: 2357976 - RNA, 21 nt, Human
ucccagcuacucagaagccug

SEQ ID NO: 2357977 - RNA, 19 nt, Human
ucccagcuacucagaagcc

SEQ ID NO: 2357978 - RNA, 16 nt, Human
ucccagcuacucagaa

SEQ ID NO: 2357979 - RNA, 22 nt, Human
ucccagcccuuugggaggcuga

SEQ ID NO: 2357980 - RNA, 15 nt, Human
ucccagcccuaugga

SEQ ID NO: 2357981 - RNA, 16 nt, Human
ucccagcccuauggau

SEQ ID NO: 2357982 - RNA, 17 nt, Human
ucccagcccuauggaug

SEQ ID NO: 2357983 - RNA, 13 nt, Human
ucccagccuuggc

SEQ ID NO: 2357984 - RNA, 14 nt, Human
ucccagccuuggca

SEQ ID NO: 2357985 - RNA, 10 nt, Human
ucccagccug

SEQ ID NO: 2357986 - RNA, 18 nt, Human
ucccagcccuauggaugu

SEQ ID NO: 2357987 - RNA, 19 nt, Human
ucccagcuacuugggaggc

SEQ ID NO: 2357988 - RNA, 17 nt, Human
ucccagcuacuugggaa

SEQ ID NO: 2357989 - RNA, 17 nt, Human
ucccagcuacuugggag

SEQ ID NO: 2357990 - RNA, 18 nt, Human
ucccagcuacuugggagg

SEQ ID NO: 2357991 - RNA, 16 nt, Human
ucccagcuacucggga

SEQ ID NO: 2357992 - RNA, 16 nt, Human
ucccagcuacucagga

SEQ ID NO: 2357993 - RNA, 15 nt, Human
ucccagcuacucagg

SEQ ID NO: 2357994 - RNA, 17 nt, Human
ucccagcuacucaggag

SEQ ID NO: 2357995 - RNA, 16 nt, Human
ucccagcuacuuggga

SEQ ID NO: 2357996 - RNA, 20 nt, Human
ucccagcucuagacaacccu

SEQ ID NO: 2357997 - RNA, 21 nt, Human
ucccagcucuagacaacccug

SEQ ID NO: 2357998 - RNA, 21 nt, Human
ucccauugucccucugcccca

SEQ ID NO: 2357999 - RNA, 19 nt, Human
ucccauugucccucugccc

SEQ ID NO: 2358000 - RNA, 18 nt, Human
ucccauugucccucugcc

SEQ ID NO: 2358001 - RNA, 17 nt, Human
ucccauugucccucugc

SEQ ID NO: 2358002 - RNA, 17 nt, Human
ucccagcucacgucaca

SEQ ID NO: 2358003 - RNA, 16 nt, Human
ucccagcucacgucac

SEQ ID NO: 2358004 - RNA, 22 nt, Human
ucccauuuugcaaaauuuccag

SEQ ID NO: 2358005 - RNA, 21 nt, Human
ucccauuuugcaaaauuucca

SEQ ID NO: 2358006 - RNA, 13 nt, Human
ucccauuuugcaa

SEQ ID NO: 2358007 - RNA, 12 nt, Human
uccccacccuga

SEQ ID NO: 2358008 - RNA, 24 nt, Human
ucccauuucuaaaggccucuuccu

SEQ ID NO: 2358009 - RNA, 21 nt, Human
ucccauuucuaaaggccucuu

SEQ ID NO: 2358010 - RNA, 14 nt, Human
ucccauuucuacuc

SEQ ID NO: 2358011 - RNA, 15 nt, Human
ucccauuucucacug

SEQ ID NO: 2358012 - RNA, 16 nt, Human
ucccauuucucacuga

SEQ ID NO: 2358013 - RNA, 18 nt, Human
ucccauuucucacugaga

SEQ ID NO: 2358014 - RNA, 16 nt, Human
ucccauuguggcuccu

SEQ ID NO: 2358015 - RNA, 13 nt, Human
ucccauuucagcu

SEQ ID NO: 2358016 - RNA, 23 nt, Human
uccccacccugaaagcccugagc

SEQ ID NO: 2358017 - RNA, 15 nt, Human
uccccaccgcagaca

SEQ ID NO: 2358018 - RNA, 16 nt, Human
uccccaccgcagacag

SEQ ID NO: 2358019 - RNA, 18 nt, Human
uccccaggaggccagccu

SEQ ID NO: 2358020 - RNA, 23 nt, Human
acuacugacauguggggccaggu

SEQ ID NO: 2358021 - RNA, 18 nt, Human
acuacugacauguggggc

SEQ ID NO: 2358022 - RNA, 13 nt, Human
acuacucugugcc

SEQ ID NO: 2358023 - RNA, 16 nt, Human
ucccccagccccaucc

SEQ ID NO: 2358024 - RNA, 13 nt, Human
ucccccagcccca

SEQ ID NO: 2358025 - RNA, 15 nt, Human
ucccccagccccauc

SEQ ID NO: 2358026 - RNA, 19 nt, Human
acuagacucccaagcugga

SEQ ID NO: 2358027 - RNA, 18 nt, Human
acuacuguguuccuggca

SEQ ID NO: 2358028 - RNA, 16 nt, Human
acuacuguguuccugg

SEQ ID NO: 2358029 - RNA, 21 nt, Human
acuacuguguuccuggcaaua

SEQ ID NO: 2358030 - RNA, 15 nt, Human
acuagacauucuguc

SEQ ID NO: 2358031 - RNA, 16 nt, Human
acuagacauucugucg

SEQ ID NO: 2358032 - RNA, 20 nt, Human
acuagacauucugucgccuu

SEQ ID NO: 2358033 - RNA, 21 nt, Human
acuacuguggaaaaauauuua

SEQ ID NO: 2358034 - RNA, 20 nt, Human
acuacuguggaaaaauauuu

SEQ ID NO: 2358035 - RNA, 19 nt, Human
acuacuguggaaaaauauu

SEQ ID NO: 2358036 - RNA, 18 nt, Human
acuacuguggaaaaauau

SEQ ID NO: 2358037 - RNA, 15 nt, Human
acuacuguguuccug

SEQ ID NO: 2358038 - RNA, 22 nt, Human
acuacuguggaaaaauauuuaa

SEQ ID NO: 2358039 - RNA, 13 nt, Human
acuacuguguucc

SEQ ID NO: 2358040 - RNA, 20 nt, Human
acuacugcuaccacaacuau

SEQ ID NO: 2358041 - RNA, 18 nt, Human
acuacugggcaaagagug

SEQ ID NO: 2358042 - RNA, 19 nt, Human
ucccauuuuggaaguuuuc

SEQ ID NO: 2358043 - RNA, 18 nt, Human
ucccauuuuggaaguuuu

SEQ ID NO: 2358044 - RNA, 23 nt, Human
uccccaggggagagggucuggag

SEQ ID NO: 2358045 - RNA, 14 nt, Human
uccccaggggagag

SEQ ID NO: 2358046 - RNA, 18 nt, Human
uccccaggggaaaaugaa

SEQ ID NO: 2358047 - RNA, 19 nt, Human
uccccaggggaaaaugaag

SEQ ID NO: 2358048 - RNA, 10 nt, Human
uccccagggg

SEQ ID NO: 2358049 - RNA, 20 nt, Human
uccccaggaggccagccuug

SEQ ID NO: 2358050 - RNA, 21 nt, Human
uccccaggaggccagccuuga

SEQ ID NO: 2358051 - RNA, 23 nt, Human
uccccaggggucccagccacccc

SEQ ID NO: 2358052 - RNA, 22 nt, Human
uccccaggggucccagccaccc

SEQ ID NO: 2358053 - RNA, 15 nt, Human
uccccagguccagcu

SEQ ID NO: 2358054 - RNA, 16 nt, Human
uccccagguccagcuc

SEQ ID NO: 2358055 - RNA, 20 nt, Human
uccccaggggucccagccac

SEQ ID NO: 2358056 - RNA, 18 nt, Human
uccccaggggucccagcc

SEQ ID NO: 2358057 - RNA, 17 nt, Human
uccccaggggucccagc

SEQ ID NO: 2358058 - RNA, 15 nt, Human
uccccaggggaguug

SEQ ID NO: 2358059 - RNA, 20 nt, Human
uccccagguggcugacccag

SEQ ID NO: 2358060 - RNA, 19 nt, Human
uccccagguggcugaccca

SEQ ID NO: 2358061 - RNA, 18 nt, Human
uccccagguggcugaccc

SEQ ID NO: 2358062 - RNA, 15 nt, Human
uccccagguggcuga

SEQ ID NO: 2358063 - RNA, 17 nt, Human
uccccagguccagcucu

SEQ ID NO: 2358064 - RNA, 23 nt, Human
uccccagguccagcucuggaggg

SEQ ID NO: 2358065 - RNA, 11 nt, Human
ucccccagccc

SEQ ID NO: 2358066 - RNA, 19 nt, Human
acuagagggaccucuccca

SEQ ID NO: 2358067 - RNA, 18 nt, Human
acuagagggaccucuccc

SEQ ID NO: 2358068 - RNA, 21 nt, Human
acuagagcagcccuggaguca

SEQ ID NO: 2358069 - RNA, 15 nt, Human
acuagaggcagggag

SEQ ID NO: 2358070 - RNA, 14 nt, Human
acuagaggcaggga

SEQ ID NO: 2358071 - RNA, 17 nt, Human
acuagagaucugguuuu

SEQ ID NO: 2358072 - RNA, 16 nt, Human
acuagagcagcccugg

SEQ ID NO: 2358073 - RNA, 23 nt, Human
acuagagaucugguuuugcuauu

SEQ ID NO: 2358074 - RNA, 19 nt, Human
acuagagcagcccuggagu

SEQ ID NO: 2358075 - RNA, 20 nt, Human
acuauagccuaggugacaga

SEQ ID NO: 2358076 - RNA, 22 nt, Human
acuauagccuaggugacagagu

SEQ ID NO: 2358077 - RNA, 16 nt, Human
acuagaggcagggagg

SEQ ID NO: 2358078 - RNA, 18 nt, Human
acuauagccuaggugaca

SEQ ID NO: 2358079 - RNA, 17 nt, Human
acuauauuguuugcuaa

SEQ ID NO: 2358080 - RNA, 22 nt, Human
acuauauuugggccugcuccag

SEQ ID NO: 2358081 - RNA, 23 nt, Human
acuauauuugggccugcuccaga

SEQ ID NO: 2358082 - RNA, 21 nt, Human
acuauaguccagcuuuguucu

SEQ ID NO: 2358083 - RNA, 22 nt, Human
acuauauuguuugcuaagcauu

SEQ ID NO: 2358084 - RNA, 19 nt, Human
acuaucaaacugaagccag

SEQ ID NO: 2358085 - RNA, 14 nt, Human
acuaucaaacugaa

SEQ ID NO: 2358086 - RNA, 16 nt, Human
acuaucuacucuccuc

SEQ ID NO: 2358087 - RNA, 15 nt, Human
acuaucuacucuccu

SEQ ID NO: 2358088 - RNA, 15 nt, Human
acuaucucauuucca

SEQ ID NO: 2358089 - RNA, 21 nt, Human
acuaucuaaauguugaaagau

SEQ ID NO: 2358090 - RNA, 16 nt, Human
acuaucuaaauguuga

SEQ ID NO: 2358091 - RNA, 17 nt, Human
acuaucuacucuccuca

SEQ ID NO: 2358092 - RNA, 12 nt, Human
acuaucugggug

SEQ ID NO: 2358093 - RNA, 14 nt, Human
acuaucugucuggu

SEQ ID NO: 2358094 - RNA, 16 nt, Human
acuaugccugugucuu

SEQ ID NO: 2358095 - RNA, 17 nt, Human
acuaucugucugguggc

SEQ ID NO: 2358096 - RNA, 19 nt, Human
acuaucuacucuccucauc

SEQ ID NO: 2358097 - RNA, 20 nt, Human
acuaucugaaccauuaaagu

SEQ ID NO: 2358098 - RNA, 12 nt, Human
acuaucugcuuu

SEQ ID NO: 2358099 - RNA, 13 nt, Human
acuaucugcuuuu

SEQ ID NO: 2358100 - RNA, 16 nt, Human
acuaucucauuuccaa

SEQ ID NO: 2358101 - RNA, 17 nt, Human
acuaucucauuuccaag

SEQ ID NO: 2358102 - RNA, 22 nt, Human
acucaagugucucaguccaccu

SEQ ID NO: 2358103 - RNA, 23 nt, Human
acucaagugucucaguccaccug

SEQ ID NO: 2358104 - RNA, 16 nt, Human
acucaauggauuugau

SEQ ID NO: 2358105 - RNA, 15 nt, Human
acucaauugauaaac

SEQ ID NO: 2358106 - RNA, 21 nt, Human
acucaauguuacuaucugcuu

SEQ ID NO: 2358107 - RNA, 21 nt, Human
acucacaaccugaaccuagga

SEQ ID NO: 2358108 - RNA, 14 nt, Human
acucaauuucuccc

SEQ ID NO: 2358109 - RNA, 16 nt, Human
acucaauuucucccca

SEQ ID NO: 2358110 - RNA, 17 nt, Human
acucaauuucuccccag

SEQ ID NO: 2358111 - RNA, 14 nt, Human
acucacaagaagac

SEQ ID NO: 2358112 - RNA, 16 nt, Human
acucacaagaagacca

SEQ ID NO: 2358113 - RNA, 18 nt, Human
acucacaagaagaccaga

SEQ ID NO: 2358114 - RNA, 21 nt, Human
acucacaagaagaccagacug

SEQ ID NO: 2358115 - RNA, 14 nt, Human
acucacacagccag

SEQ ID NO: 2358116 - RNA, 15 nt, Human
acucacacagccagg

SEQ ID NO: 2358117 - RNA, 22 nt, Human
acucacacagccaggugccuug

SEQ ID NO: 2358118 - RNA, 14 nt, Human
acucacacaggacc

SEQ ID NO: 2358119 - RNA, 20 nt, Human
acucaagguucccagagaug

SEQ ID NO: 2358120 - RNA, 19 nt, Human
acucaagguucccagagau

SEQ ID NO: 2358121 - RNA, 16 nt, Human
acucaaugcacugaca

SEQ ID NO: 2358122 - RNA, 11 nt, Human
acucaagccaa

SEQ ID NO: 2358123 - RNA, 16 nt, Human
acucaagccaagcagc

SEQ ID NO: 2358124 - RNA, 14 nt, Human
acucaagccaagca

SEQ ID NO: 2358125 - RNA, 14 nt, Human
acucaagcccgcgg

SEQ ID NO: 2358126 - RNA, 19 nt, Human
acucaagccaagcagccaa

SEQ ID NO: 2358127 - RNA, 17 nt, Human
acucaagccaagcagcc

SEQ ID NO: 2358128 - RNA, 22 nt, Human
acucaagccaagcagccaagcu

SEQ ID NO: 2358129 - RNA, 17 nt, Human
acucaaggacuuugcag

SEQ ID NO: 2358130 - RNA, 18 nt, Human
acucaagaggcugaggca

SEQ ID NO: 2358131 - RNA, 17 nt, Human
acucaagaggcugaggc

SEQ ID NO: 2358132 - RNA, 15 nt, Human
acucaagaggcugag

SEQ ID NO: 2358133 - RNA, 14 nt, Human
acucaagaggcuga

SEQ ID NO: 2358134 - RNA, 16 nt, Human
acuaugguauuugagu

SEQ ID NO: 2358135 - RNA, 15 nt, Human
acuaugguauuugag

SEQ ID NO: 2358136 - RNA, 15 nt, Human
acuauguugcccagg

SEQ ID NO: 2358137 - RNA, 16 nt, Human
acuauguugcccaggc

SEQ ID NO: 2358138 - RNA, 14 nt, Human
acuauguugcccag

SEQ ID NO: 2358139 - RNA, 22 nt, Human
acuauggcccuggccuagcaua

SEQ ID NO: 2358140 - RNA, 19 nt, Human
acuaugccugugucuucuc

SEQ ID NO: 2358141 - RNA, 18 nt, Human
acuaugccugugucuucu

SEQ ID NO: 2358142 - RNA, 14 nt, Human
acuaugcguuuuua

SEQ ID NO: 2358143 - RNA, 18 nt, Human
acuaugcguuuuuauaaa

SEQ ID NO: 2358144 - RNA, 23 nt, Human
ucaugaacauguuccugaauucu

SEQ ID NO: 2358145 - RNA, 11 nt, Human
ucaugaaccuc

SEQ ID NO: 2358146 - RNA, 22 nt, Human
ucaugaaccucaagcugcaucu

SEQ ID NO: 2358147 - RNA, 15 nt, Human
ucaugaacuucgcau

SEQ ID NO: 2358148 - RNA, 18 nt, Human
ucaugaacuucgcaucaa

SEQ ID NO: 2358149 - RNA, 14 nt, Human
ucaugaaauaugca

SEQ ID NO: 2358150 - RNA, 15 nt, Human
ucaugaaauaugcau

SEQ ID NO: 2358151 - RNA, 12 nt, Human
ucaugaagccca

SEQ ID NO: 2358152 - RNA, 22 nt, Human
ucaugauucacccccaaacagu

SEQ ID NO: 2358153 - RNA, 19 nt, Human
ucaugaagauauuuuucca

SEQ ID NO: 2358154 - RNA, 21 nt, Human
ucaugaacuucgcaucaaaag

SEQ ID NO: 2358155 - RNA, 22 nt, Human
ucaugaacuucgcaucaaaaga

SEQ ID NO: 2358156 - RNA, 17 nt, Human
ucaugauuucauuucaa

SEQ ID NO: 2358157 - RNA, 23 nt, Human
ucaugauuucauuucaacuguuu

SEQ ID NO: 2358158 - RNA, 14 nt, Human
ucaugauuuugaaa

SEQ ID NO: 2358159 - RNA, 11 nt, Human
ucaugauuuuu

SEQ ID NO: 2358160 - RNA, 21 nt, Human
ucaugauuuugaaaucaugaa

SEQ ID NO: 2358161 - RNA, 14 nt, Human
ucaugcaaacuuua

SEQ ID NO: 2358162 - RNA, 18 nt, Human
ucaucgcguccuccuacc

SEQ ID NO: 2358163 - RNA, 17 nt, Human
ucaucgcguccuccuac

SEQ ID NO: 2358164 - RNA, 19 nt, Human
ucaucgggaauacuaggga

SEQ ID NO: 2358165 - RNA, 13 nt, Human
ucaucuaggauuu

SEQ ID NO: 2358166 - RNA, 21 nt, Human
ucaucgaaucuacuaauucca

SEQ ID NO: 2358167 - RNA, 14 nt, Human
ucaucgaaucuacu

SEQ ID NO: 2358168 - RNA, 18 nt, Human
ucaucccacgcacuccau

SEQ ID NO: 2358169 - RNA, 13 nt, Human
ucaucccagcugc

SEQ ID NO: 2358170 - RNA, 16 nt, Human
ucauccuuuccagcau

SEQ ID NO: 2358171 - RNA, 17 nt, Human
ucauccuuuccagcaug

SEQ ID NO: 2358172 - RNA, 21 nt, Human
accuccugcccaggagagcca

SEQ ID NO: 2358173 - RNA, 11 nt, Human
accuccugccu

SEQ ID NO: 2358174 - RNA, 20 nt, Human
accuccugcccaggagagcc

SEQ ID NO: 2358175 - RNA, 19 nt, Human
accuccugcccaggagagc

SEQ ID NO: 2358176 - RNA, 14 nt, Human
ucauccaucaucau

SEQ ID NO: 2358177 - RNA, 12 nt, Human
ucauccaucauc

SEQ ID NO: 2358178 - RNA, 11 nt, Human
ucauccaucau

SEQ ID NO: 2358179 - RNA, 14 nt, Human
ucauccagggcucu

SEQ ID NO: 2358180 - RNA, 21 nt, Human
ucauccagggcucugaccagu

SEQ ID NO: 2358181 - RNA, 13 nt, Human
ucauccauccagg

SEQ ID NO: 2358182 - RNA, 16 nt, Human
ucauccaucaucaugu

SEQ ID NO: 2358183 - RNA, 15 nt, Human
ucauccaucaucaug

SEQ ID NO: 2358184 - RNA, 16 nt, Human
ucaucccaacugucuu

SEQ ID NO: 2358185 - RNA, 19 nt, Human
ucauccauucuauuguuaa

SEQ ID NO: 2358186 - RNA, 17 nt, Human
ucauccaucaucaugug

SEQ ID NO: 2358187 - RNA, 14 nt, Human
ucauccauucuauu

SEQ ID NO: 2358188 - RNA, 15 nt, Human
ucauguuucuuaaau

SEQ ID NO: 2358189 - RNA, 11 nt, Human
ucauguuucuu

SEQ ID NO: 2358190 - RNA, 17 nt, Human
ucauguuuacagaggac

SEQ ID NO: 2358191 - RNA, 19 nt, Human
ucauguguaugggcaaaaa

SEQ ID NO: 2358192 - RNA, 16 nt, Human
ucauguuucuuaaaug

SEQ ID NO: 2358193 - RNA, 15 nt, Human
ucauguuugcucucc

SEQ ID NO: 2358194 - RNA, 14 nt, Human
ucauguuugcuuca

SEQ ID NO: 2358195 - RNA, 13 nt, Human
ucauguuuuaaca

SEQ ID NO: 2358196 - RNA, 20 nt, Human
ucauguuugcuucauaaaug

SEQ ID NO: 2358197 - RNA, 21 nt, Human
ucauguuuuaaagcuugcuca

SEQ ID NO: 2358198 - RNA, 15 nt, Human
ucauguuugcuucau

SEQ ID NO: 2358199 - RNA, 17 nt, Human
ucauguuugcuucauaa

SEQ ID NO: 2358200 - RNA, 21 nt, Human
ucauguuugcuucauaaauga

SEQ ID NO: 2358201 - RNA, 18 nt, Human
ucauguggaauauaaaga

SEQ ID NO: 2358202 - RNA, 22 nt, Human
ucaugcaucuccaccugcuccc

SEQ ID NO: 2358203 - RNA, 15 nt, Human
ucaugugauccuuuu

SEQ ID NO: 2358204 - RNA, 19 nt, Human
ucauguggaauauaaagau

SEQ ID NO: 2358205 - RNA, 13 nt, Human
ucauguggcugga

SEQ ID NO: 2358206 - RNA, 20 nt, Human
ucaugugauccuuuuauguu

SEQ ID NO: 2358207 - RNA, 18 nt, Human
ucauguguaaucaauaaa

SEQ ID NO: 2358208 - RNA, 16 nt, Human
ucauguggcuggaaga

SEQ ID NO: 2358209 - RNA, 21 nt, Human
ucauguggcuggaagauccug

SEQ ID NO: 2358210 - RNA, 20 nt, Human
ucauguguacaaaaguuuca

SEQ ID NO: 2358211 - RNA, 19 nt, Human
ucauguguaaucaauaaac

SEQ ID NO: 2358212 - RNA, 21 nt, Human
ucauguguaaucaauaaacga

SEQ ID NO: 2358213 - RNA, 22 nt, Human
ucauguguaaucaauaaacgau

SEQ ID NO: 2358214 - RNA, 23 nt, Human
ucauguguaaucaauaaacgauu

SEQ ID NO: 2358215 - RNA, 16 nt, Human
ucaugcaaugacaucu

SEQ ID NO: 2358216 - RNA, 15 nt, Human
ucaugcaaugacauc

SEQ ID NO: 2358217 - RNA, 13 nt, Human
ucaugcaaugaca

SEQ ID NO: 2358218 - RNA, 20 nt, Human
ucaugcaaaugcuguauucu

SEQ ID NO: 2358219 - RNA, 17 nt, Human
ucaugcaaaggcuggga

SEQ ID NO: 2358220 - RNA, 23 nt, Human
ucaugcaaacuuuauuuuguguu

SEQ ID NO: 2358221 - RNA, 14 nt, Human
ucaugcauaaauau

SEQ ID NO: 2358222 - RNA, 15 nt, Human
ucaugcauaaauaug

SEQ ID NO: 2358223 - RNA, 19 nt, Human
ucaugcauaaauaugcagu

SEQ ID NO: 2358224 - RNA, 13 nt, Human
ucaugcagccgug

SEQ ID NO: 2358225 - RNA, 14 nt, Human
ucaugcagccguga

SEQ ID NO: 2358226 - RNA, 23 nt, Human
ucaugcagccgugaucaagggaa

SEQ ID NO: 2358227 - RNA, 16 nt, Human
ucaugcaucuccaccu

SEQ ID NO: 2358228 - RNA, 20 nt, Human
ucaugcauaaauaugcagug

SEQ ID NO: 2358229 - RNA, 20 nt, Human
ucaugcaucuccaccugcuc

SEQ ID NO: 2358230 - RNA, 17 nt, Human
ucaugugaccacucugu

SEQ ID NO: 2358231 - RNA, 17 nt, Human
ucaugugaaaucauuca

SEQ ID NO: 2358232 - RNA, 16 nt, Human
ucaugugaaaucauuc

SEQ ID NO: 2358233 - RNA, 12 nt, Human
accuauuuccau

SEQ ID NO: 2358234 - RNA, 14 nt, Human
accuauuugacaua

SEQ ID NO: 2358235 - RNA, 20 nt, Human
accuauuuugaaaaauuccu

SEQ ID NO: 2358236 - RNA, 16 nt, Human
accucaaaaugucuaa

SEQ ID NO: 2358237 - RNA, 19 nt, Human
accucacccgaggcugccc

SEQ ID NO: 2358238 - RNA, 21 nt, Human
accuauuuugaaaaauuccua

SEQ ID NO: 2358239 - RNA, 12 nt, Human
accucacccugc

SEQ ID NO: 2358240 - RNA, 14 nt, Human
accucacccugcua

SEQ ID NO: 2358241 - RNA, 15 nt, Human
accucaccuagaaau

SEQ ID NO: 2358242 - RNA, 14 nt, Human
accucaccuagaaa

SEQ ID NO: 2358243 - RNA, 18 nt, Human
accucacgcaccucccau

SEQ ID NO: 2358244 - RNA, 17 nt, Human
accucacgcaccuccca

SEQ ID NO: 2358245 - RNA, 16 nt, Human
accucacgcaccuccc

SEQ ID NO: 2358246 - RNA, 15 nt, Human
accucacgcaccucc

SEQ ID NO: 2358247 - RNA, 22 nt, Human
accucacgcaccucccauccua

SEQ ID NO: 2358248 - RNA, 19 nt, Human
accucacgcaccucccauc

SEQ ID NO: 2358249 - RNA, 20 nt, Human
accucacuauucaaguauua

SEQ ID NO: 2358250 - RNA, 15 nt, Human
accuaggggcgccgc

SEQ ID NO: 2358251 - RNA, 24 nt, Human
accuagggaggaccuuaucugugc

SEQ ID NO: 2358252 - RNA, 17 nt, Human
accuagggaggaccuua

SEQ ID NO: 2358253 - RNA, 15 nt, Human
accuagggaggaccu

SEQ ID NO: 2358254 - RNA, 18 nt, Human
accuaggccacuccucca

SEQ ID NO: 2358255 - RNA, 17 nt, Human
accuaggccacuccucc

SEQ ID NO: 2358256 - RNA, 16 nt, Human
accuagggugauauua

SEQ ID NO: 2358257 - RNA, 20 nt, Human
accuagggauguucuggccc

SEQ ID NO: 2358258 - RNA, 19 nt, Human
accuaugucauuucauuuc

SEQ ID NO: 2358259 - RNA, 22 nt, Human
accuaugucauuucauuuccua

SEQ ID NO: 2358260 - RNA, 17 nt, Human
accuauguccuaaggac

SEQ ID NO: 2358261 - RNA, 19 nt, Human
accuauguccuaaggacac

SEQ ID NO: 2358262 - RNA, 22 nt, Human
accuauguccuaaggacacacu

SEQ ID NO: 2358263 - RNA, 23 nt, Human
accuauguccuaaggacacacua

SEQ ID NO: 2358264 - RNA, 16 nt, Human
accuauuccuccuggg

SEQ ID NO: 2358265 - RNA, 18 nt, Human
accuaccuucauuucagg

SEQ ID NO: 2358266 - RNA, 20 nt, Human
accuaccucagguugcuggu

SEQ ID NO: 2358267 - RNA, 17 nt, Human
accgcagacaggaccag

SEQ ID NO: 2358268 - RNA, 12 nt, Human
accgcagacagg

SEQ ID NO: 2358269 - RNA, 16 nt, Human
accgcagacaggacca

SEQ ID NO: 2358270 - RNA, 17 nt, Human
accuaggauaucuucuc

SEQ ID NO: 2358271 - RNA, 14 nt, Human
accuagaagggcua

SEQ ID NO: 2358272 - RNA, 20 nt, Human
accuagagacuucacccggg

SEQ ID NO: 2358273 - RNA, 22 nt, Human
accuagaaauugacacaagugg

SEQ ID NO: 2358274 - RNA, 21 nt, Human
accuacuuugacuuuuugcau

SEQ ID NO: 2358275 - RNA, 20 nt, Human
accuacuuugacuuuuugca

SEQ ID NO: 2358276 - RNA, 10 nt, Human
accuccaucu

SEQ ID NO: 2358277 - RNA, 20 nt, Human
accucccacaaaggagagcu

SEQ ID NO: 2358278 - RNA, 15 nt, Human
accucccauccuaau

SEQ ID NO: 2358279 - RNA, 22 nt, Human
accucccagcccuauggaugug

SEQ ID NO: 2358280 - RNA, 11 nt, Human
accuccccacg

SEQ ID NO: 2358281 - RNA, 14 nt, Human
accuccccacgccc

SEQ ID NO: 2358282 - RNA, 19 nt, Human
accuccccacgcccucccc

SEQ ID NO: 2358283 - RNA, 20 nt, Human
accuccccacgcccuccccu

SEQ ID NO: 2358284 - RNA, 21 nt, Human
accuccccacgcccuccccuc

SEQ ID NO: 2358285 - RNA, 22 nt, Human
accuccccacgcccuccccucc

SEQ ID NO: 2358286 - RNA, 13 nt, Human
accucccagcccu

SEQ ID NO: 2358287 - RNA, 14 nt, Human
accucccagcccua

SEQ ID NO: 2358288 - RNA, 15 nt, Human
accucccagcccuau

SEQ ID NO: 2358289 - RNA, 19 nt, Human
accucccagcccuauggau

SEQ ID NO: 2358290 - RNA, 20 nt, Human
accucccagcccuauggaug

SEQ ID NO: 2358291 - RNA, 21 nt, Human
accucccagcccuauggaugu

SEQ ID NO: 2358292 - RNA, 21 nt, Human
accuccagaaacggccauuca

SEQ ID NO: 2358293 - RNA, 14 nt, Human
accuccacauccuc

SEQ ID NO: 2358294 - RNA, 18 nt, Human
accuccacaguucagugg

SEQ ID NO: 2358295 - RNA, 19 nt, Human
accuccacaguucaguggc

SEQ ID NO: 2358296 - RNA, 16 nt, Human
accuccacauccucca

SEQ ID NO: 2358297 - RNA, 20 nt, Human
accuccacaguucaguggca

SEQ ID NO: 2358298 - RNA, 15 nt, Human
accuccacagcuucc

SEQ ID NO: 2358299 - RNA, 16 nt, Human
accucacucuugccaa

SEQ ID NO: 2358300 - RNA, 18 nt, Human
accucacucuugccaacc

SEQ ID NO: 2358301 - RNA, 14 nt, Human
accucacuccuguu

SEQ ID NO: 2358302 - RNA, 13 nt, Human
accucacuccugu

SEQ ID NO: 2358303 - RNA, 15 nt, Human
accucacucuugcca

SEQ ID NO: 2358304 - RNA, 18 nt, Human
accuccugcccaggagag

SEQ ID NO: 2358305 - RNA, 17 nt, Human
accuccugcccaggaga

SEQ ID NO: 2358306 - RNA, 16 nt, Human
accuccugcccaggag

SEQ ID NO: 2358307 - RNA, 15 nt, Human
accuccugcccagga

SEQ ID NO: 2358308 - RNA, 14 nt, Human
accuccugcccagg

SEQ ID NO: 2358309 - RNA, 13 nt, Human
accuccugcccag

SEQ ID NO: 2358310 - RNA, 12 nt, Human
accuccugccca

SEQ ID NO: 2358311 - RNA, 13 nt, Human
accuccugagaaa

SEQ ID NO: 2358312 - RNA, 16 nt, Human
accuccucuucugacg

SEQ ID NO: 2358313 - RNA, 12 nt, Human
accuccucugug

SEQ ID NO: 2358314 - RNA, 11 nt, Human
accuccucugu

SEQ ID NO: 2358315 - RNA, 18 nt, Human
accuccucugugaagcau

SEQ ID NO: 2358316 - RNA, 14 nt, Human
accuccucugugaa

SEQ ID NO: 2358317 - RNA, 13 nt, Human
accuccucuguga

SEQ ID NO: 2358318 - RNA, 20 nt, Human
accuccccuauccacccagc

SEQ ID NO: 2358319 - RNA, 19 nt, Human
accuccccuauccacccag

SEQ ID NO: 2358320 - RNA, 18 nt, Human
accuccccuauccaccca

SEQ ID NO: 2358321 - RNA, 17 nt, Human
accuccccuauccaccc

SEQ ID NO: 2358322 - RNA, 14 nt, Human
accuccccuaucca

SEQ ID NO: 2358323 - RNA, 15 nt, Human
accuccccagccccu

SEQ ID NO: 2358324 - RNA, 21 nt, Human
accucccccucccccuucucc

SEQ ID NO: 2358325 - RNA, 15 nt, Human
accucccccugcccc

SEQ ID NO: 2358326 - RNA, 15 nt, Human
accuccccagcauuc

SEQ ID NO: 2358327 - RNA, 21 nt, Human
accuccccagcauuccagccc

SEQ ID NO: 2358328 - RNA, 23 nt, Human
accuccccagcauuccagccccu

SEQ ID NO: 2358329 - RNA, 12 nt, Human
accuccccagcc

SEQ ID NO: 2358330 - RNA, 13 nt, Human
accuccccagccc

SEQ ID NO: 2358331 - RNA, 22 nt, Human
accuccccuccuugccuccugu

SEQ ID NO: 2358332 - RNA, 21 nt, Human
accuccccuccuugccuccug

SEQ ID NO: 2358333 - RNA, 20 nt, Human
accuccccuccuugccuccu

SEQ ID NO: 2358334 - RNA, 19 nt, Human
accuccccuccuugccucc

SEQ ID NO: 2358335 - RNA, 17 nt, Human
accuccccuccuugccu

SEQ ID NO: 2358336 - RNA, 13 nt, Human
accuccccuccuu

SEQ ID NO: 2358337 - RNA, 23 nt, Human
accuccccuauccacccagccca

SEQ ID NO: 2358338 - RNA, 21 nt, Human
accuccccuauccacccagcc

SEQ ID NO: 2358339 - RNA, 15 nt, Human
accuccccugaggcu

SEQ ID NO: 2358340 - RNA, 14 nt, Human
ucauauugaauaua

SEQ ID NO: 2358341 - RNA, 22 nt, Human
ucauauguaccauguacaugaa

SEQ ID NO: 2358342 - RNA, 21 nt, Human
ucauauguaccauguacauga

SEQ ID NO: 2358343 - RNA, 18 nt, Human
ucauauggcccaguguca

SEQ ID NO: 2358344 - RNA, 17 nt, Human
ucauauggcccaguguc

SEQ ID NO: 2358345 - RNA, 15 nt, Human
ucauaugauucugcu

SEQ ID NO: 2358346 - RNA, 19 nt, Human
ucauaugauucugcuuuua

SEQ ID NO: 2358347 - RNA, 11 nt, Human
ucauaugaaaa

SEQ ID NO: 2358348 - RNA, 20 nt, Human
ucauaugacauucaugccug

SEQ ID NO: 2358349 - RNA, 12 nt, Human
ucauaugaaaaa

SEQ ID NO: 2358350 - RNA, 21 nt, Human
ucauaugaaaaaaaugcauuu

SEQ ID NO: 2358351 - RNA, 18 nt, Human
ucauauccccuauuuaac

SEQ ID NO: 2358352 - RNA, 23 nt, Human
ucauauuuacuucuuauacauuu

SEQ ID NO: 2358353 - RNA, 15 nt, Human
ucauauuuacuucuu

SEQ ID NO: 2358354 - RNA, 19 nt, Human
ucauauuuaaagacaggga

SEQ ID NO: 2358355 - RNA, 14 nt, Human
ucauauuguuuccu

SEQ ID NO: 2358356 - RNA, 12 nt, Human
ucauauuuaaag

SEQ ID NO: 2358357 - RNA, 14 nt, Human
ucauauugugccaa

SEQ ID NO: 2358358 - RNA, 15 nt, Human
ucauauugugccaau

SEQ ID NO: 2358359 - RNA, 20 nt, Human
ucauauugugccaauaugua

SEQ ID NO: 2358360 - RNA, 22 nt, Human
ucauauugugccaauauguauu

SEQ ID NO: 2358361 - RNA, 21 nt, Human
ucauauugugauucugccuuu

SEQ ID NO: 2358362 - RNA, 19 nt, Human
ucauauugaauguuuccaa

SEQ ID NO: 2358363 - RNA, 22 nt, Human
ucauauuucuuaucaccacagu

SEQ ID NO: 2358364 - RNA, 15 nt, Human
ucauauuuucuuuca

SEQ ID NO: 2358365 - RNA, 18 nt, Human
accgagcgcuuucuggaa

SEQ ID NO: 2358366 - RNA, 20 nt, Human
accgagcgcuuucuggaaaa

SEQ ID NO: 2358367 - RNA, 18 nt, Human
accgaggcuggagcuggc

SEQ ID NO: 2358368 - RNA, 17 nt, Human
accgaggcuggagcugg

SEQ ID NO: 2358369 - RNA, 17 nt, Human
accgaggcgcgggggcc

SEQ ID NO: 2358370 - RNA, 15 nt, Human
accgaggacaugaaa

SEQ ID NO: 2358371 - RNA, 16 nt, Human
accgaggcgcgggggc

SEQ ID NO: 2358372 - RNA, 16 nt, Human
accgagucucuucucc

SEQ ID NO: 2358373 - RNA, 19 nt, Human
accgaggggcucaggaaaa

SEQ ID NO: 2358374 - RNA, 17 nt, Human
accgaggggcucaggaa

SEQ ID NO: 2358375 - RNA, 17 nt, Human
accgagucucuucucca

SEQ ID NO: 2358376 - RNA, 20 nt, Human
accgcagaagccuccccagc

SEQ ID NO: 2358377 - RNA, 23 nt, Human
accgcagaagccuccccagcuca

SEQ ID NO: 2358378 - RNA, 14 nt, Human
ucauaacggaucag

SEQ ID NO: 2358379 - RNA, 16 nt, Human
ucauaaauuuaugguu

SEQ ID NO: 2358380 - RNA, 16 nt, Human
ucauaacggaucagaa

SEQ ID NO: 2358381 - RNA, 18 nt, Human
ucauaacggaucagaaau

SEQ ID NO: 2358382 - RNA, 19 nt, Human
ucauaacggaucagaaaua

SEQ ID NO: 2358383 - RNA, 21 nt, Human
ucauaacggaucagaaauaca

SEQ ID NO: 2358384 - RNA, 12 nt, Human
ucauaaaauaaa

SEQ ID NO: 2358385 - RNA, 20 nt, Human
ucauaaaaagcaaaacaaaa

SEQ ID NO: 2358386 - RNA, 22 nt, Human
ucaguuuuuuuuuauacacugu

SEQ ID NO: 2358387 - RNA, 14 nt, Human
ucauaaccuagccu

SEQ ID NO: 2358388 - RNA, 15 nt, Human
ucauaguaugguggc

SEQ ID NO: 2358389 - RNA, 22 nt, Human
ucauaacggaucagaaauacag

SEQ ID NO: 2358390 - RNA, 23 nt, Human
ucauaacggaucagaaauacaga

SEQ ID NO: 2358391 - RNA, 18 nt, Human
ucauaguaugguggcugg

SEQ ID NO: 2358392 - RNA, 19 nt, Human
ucauaguaugguggcuggg

SEQ ID NO: 2358393 - RNA, 21 nt, Human
ucauaguaugguggcuggguu

SEQ ID NO: 2358394 - RNA, 21 nt, Human
ucauaguuauuguuucugguc

SEQ ID NO: 2358395 - RNA, 16 nt, Human
ucauaguuauuguuuc

SEQ ID NO: 2358396 - RNA, 17 nt, Human
ucauaguuauuguuucu

SEQ ID NO: 2358397 - RNA, 13 nt, Human
ucauaguuuaauu

SEQ ID NO: 2358398 - RNA, 16 nt, Human
ucauauaaaagcuaug

SEQ ID NO: 2358399 - RNA, 20 nt, Human
ucauauaaaagcuaugguga

SEQ ID NO: 2358400 - RNA, 20 nt, Human
ucauauaaacuuuuuaaaga

SEQ ID NO: 2358401 - RNA, 22 nt, Human
ucauauauggggggccaacacc

SEQ ID NO: 2358402 - RNA, 18 nt, Human
ucauauauggggggccaa

SEQ ID NO: 2358403 - RNA, 14 nt, Human
ucauauauaucuau

SEQ ID NO: 2358404 - RNA, 17 nt, Human
ucauauaccagcaauau

SEQ ID NO: 2358405 - RNA, 14 nt, Human
ucauauacgugaaa

SEQ ID NO: 2358406 - RNA, 16 nt, Human
ucauauaccagcaaua

SEQ ID NO: 2358407 - RNA, 16 nt, Human
ucauauaauaaaugua

SEQ ID NO: 2358408 - RNA, 18 nt, Human
ucauauaagauucauauu

SEQ ID NO: 2358409 - RNA, 15 nt, Human
ucauauaauaaaugu

SEQ ID NO: 2358410 - RNA, 12 nt, Human
ucaguggagcca

SEQ ID NO: 2358411 - RNA, 23 nt, Human
ucaguggacuuuccacccccucc

SEQ ID NO: 2358412 - RNA, 21 nt, Human
ucaguggacuuuccacccccu

SEQ ID NO: 2358413 - RNA, 19 nt, Human
ucaguggacuuuccacccc

SEQ ID NO: 2358414 - RNA, 21 nt, Human
ucaguggaagaagcagaugag

SEQ ID NO: 2358415 - RNA, 16 nt, Human
ucaguggaagaagcag

SEQ ID NO: 2358416 - RNA, 23 nt, Human
ucagugccgccgccucgcccacc

SEQ ID NO: 2358417 - RNA, 11 nt, Human
ucaguggcagc

SEQ ID NO: 2358418 - RNA, 15 nt, Human
ucagugcuucgcaga

SEQ ID NO: 2358419 - RNA, 20 nt, Human
ucagugccgccgccucgccc

SEQ ID NO: 2358420 - RNA, 21 nt, Human
ucagugccgccgccucgccca

SEQ ID NO: 2358421 - RNA, 18 nt, Human
ucagugccuuauggaaca

SEQ ID NO: 2358422 - RNA, 16 nt, Human
ucagugccuuauggaa

SEQ ID NO: 2358423 - RNA, 19 nt, Human
ucagugggaacgugacugc

SEQ ID NO: 2358424 - RNA, 15 nt, Human
ucagugggaacguga

SEQ ID NO: 2358425 - RNA, 17 nt, Human
ucaguggcuucaucugu

SEQ ID NO: 2358426 - RNA, 20 nt, Human
ucaguggcuucaucugucaa

SEQ ID NO: 2358427 - RNA, 20 nt, Human
ucaguggcauggcuccaguc

SEQ ID NO: 2358428 - RNA, 19 nt, Human
ucaguggcauggcuccagu

SEQ ID NO: 2358429 - RNA, 17 nt, Human
ucaguggcgagaaauaa

SEQ ID NO: 2358430 - RNA, 13 nt, Human
ucagugggagaaa

SEQ ID NO: 2358431 - RNA, 12 nt, Human
ucagugggagaa

SEQ ID NO: 2358432 - RNA, 23 nt, Human
ucagugggaacgugacugcccca

SEQ ID NO: 2358433 - RNA, 22 nt, Human
ucagugggaacgugacugcccc

SEQ ID NO: 2358434 - RNA, 16 nt, Human
ucaguggggaggggcu

SEQ ID NO: 2358435 - RNA, 12 nt, Human
ucaguggcagcu

SEQ ID NO: 2358436 - RNA, 14 nt, Human
ucaguggcagggcu

SEQ ID NO: 2358437 - RNA, 15 nt, Human
ucaguggcagggcuc

SEQ ID NO: 2358438 - RNA, 16 nt, Human
ucaguggcagggcuca

SEQ ID NO: 2358439 - RNA, 19 nt, Human
ucaguggcagggcucagga

SEQ ID NO: 2358440 - RNA, 16 nt, Human
ucaguuuucaggagug

SEQ ID NO: 2358441 - RNA, 13 nt, Human
ucaguuuucauuu

SEQ ID NO: 2358442 - RNA, 12 nt, Human
ucaguuuucauu

SEQ ID NO: 2358443 - RNA, 15 nt, Human
ucaguuuuuuuuuau

SEQ ID NO: 2358444 - RNA, 22 nt, Human
ucauaaaaagccugcaauuuca

SEQ ID NO: 2358445 - RNA, 17 nt, Human
ucaguuuuugugaaaag

SEQ ID NO: 2358446 - RNA, 13 nt, Human
ucaguuuuaacua

SEQ ID NO: 2358447 - RNA, 16 nt, Human
ucagugggagaaaaca

SEQ ID NO: 2358448 - RNA, 14 nt, Human
ucaguggggcaguc

SEQ ID NO: 2358449 - RNA, 14 nt, Human
ucaguuuuaucuuu

SEQ ID NO: 2358450 - RNA, 14 nt, Human
ucagugggagaaaa

SEQ ID NO: 2358451 - RNA, 19 nt, Human
ucaguuuuaucauuuucaa

SEQ ID NO: 2358452 - RNA, 16 nt, Human
ucaguuuuaucauuuu

SEQ ID NO: 2358453 - RNA, 17 nt, Human
ucaguuuuaucauuuuc

SEQ ID NO: 2358454 - RNA, 15 nt, Human
ucaguuuuugugaaa

SEQ ID NO: 2358455 - RNA, 22 nt, Human
ucagugcccaccaacaucccau

SEQ ID NO: 2358456 - RNA, 13 nt, Human
ucagugcccacca

SEQ ID NO: 2358457 - RNA, 16 nt, Human
ucagugcccaacuguu

SEQ ID NO: 2358458 - RNA, 9 nt, Human
ucagugccc

SEQ ID NO: 2358459 - RNA, 22 nt, Human
ucagugccaauaaaauuuagga

SEQ ID NO: 2358460 - RNA, 14 nt, Human
ucagugccgccgcc

SEQ ID NO: 2358461 - RNA, 16 nt, Human
ucagugccgccgccuc

SEQ ID NO: 2358462 - RNA, 20 nt, Human
ucagugcccuccaggauaga

SEQ ID NO: 2358463 - RNA, 9 nt, Human
ucagugccu

SEQ ID NO: 2358464 - RNA, 10 nt, Human
ucagugccuu

SEQ ID NO: 2358465 - RNA, 11 nt, Human
ucagugccuua

SEQ ID NO: 2358466 - RNA, 12 nt, Human
ucagugccuuau

SEQ ID NO: 2358467 - RNA, 14 nt, Human
ucagugccuuaugg

SEQ ID NO: 2358468 - RNA, 15 nt, Human
ucagugccuuaugga

SEQ ID NO: 2358469 - RNA, 16 nt, Human
ucaguauaauuuuuua

SEQ ID NO: 2358470 - RNA, 20 nt, Human
ucaguauaauucuguacuga

SEQ ID NO: 2358471 - RNA, 13 nt, Human
ucaguaucaggcc

SEQ ID NO: 2358472 - RNA, 18 nt, Human
ucaguaucuguaucucuc

SEQ ID NO: 2358473 - RNA, 20 nt, Human
ucaguaucuguaucucucuc

SEQ ID NO: 2358474 - RNA, 15 nt, Human
ucaguauaaacaaag

SEQ ID NO: 2358475 - RNA, 17 nt, Human
ucaguauaaacaaaguu

SEQ ID NO: 2358476 - RNA, 16 nt, Human
ucaguauaauucugua

SEQ ID NO: 2358477 - RNA, 17 nt, Human
accgaaaacguggcugc

SEQ ID NO: 2358478 - RNA, 19 nt, Human
accgaaaacguggcugcuu

SEQ ID NO: 2358479 - RNA, 12 nt, Human
ucagugccacua

SEQ ID NO: 2358480 - RNA, 16 nt, Human
ucagugccaaaaacaa

SEQ ID NO: 2358481 - RNA, 12 nt, Human
ucaguaugugga

SEQ ID NO: 2358482 - RNA, 24 nt, Human
ucaguaucuguaucucucucucuu

SEQ ID NO: 2358483 - RNA, 16 nt, Human
ucaguauguggaagug

SEQ ID NO: 2358484 - RNA, 14 nt, Human
ucaguauguggaag

SEQ ID NO: 2358485 - RNA, 19 nt, Human
accccauagugaccggcug

SEQ ID NO: 2358486 - RNA, 17 nt, Human
accccauccaguucaug

SEQ ID NO: 2358487 - RNA, 19 nt, Human
accccaguucugcuccucu

SEQ ID NO: 2358488 - RNA, 20 nt, Human
accccaguucugcuccucuc

SEQ ID NO: 2358489 - RNA, 21 nt, Human
accccaguucugcuccucucc

SEQ ID NO: 2358490 - RNA, 22 nt, Human
accccaguucugcuccucucca

SEQ ID NO: 2358491 - RNA, 23 nt, Human
accccaguucugcuccucuccag

SEQ ID NO: 2358492 - RNA, 15 nt, Human
accccaucccacacc

SEQ ID NO: 2358493 - RNA, 17 nt, Human
accccaucccuccccag

SEQ ID NO: 2358494 - RNA, 21 nt, Human
accccauagugaccggcugcu

SEQ ID NO: 2358495 - RNA, 13 nt, Human
accccaucugccc

SEQ ID NO: 2358496 - RNA, 18 nt, Human
accccaucucuacaaaaa

SEQ ID NO: 2358497 - RNA, 16 nt, Human
acccccucgcuuggac

SEQ ID NO: 2358498 - RNA, 19 nt, Human
acccccuccuucagacacc

SEQ ID NO: 2358499 - RNA, 18 nt, Human
acccccucgggucuccuc

SEQ ID NO: 2358500 - RNA, 21 nt, Human
acccccucgggucuccucacu

SEQ ID NO: 2358501 - RNA, 17 nt, Human
acccccuccuucagaca

SEQ ID NO: 2358502 - RNA, 16 nt, Human
acccccuccuucagac

SEQ ID NO: 2358503 - RNA, 15 nt, Human
acccccuccuucaga

SEQ ID NO: 2358504 - RNA, 12 nt, Human
acccccuccuuc

SEQ ID NO: 2358505 - RNA, 22 nt, Human
acccccucccuggccuguucug

SEQ ID NO: 2358506 - RNA, 20 nt, Human
acccccucccuggccuguuc

SEQ ID NO: 2358507 - RNA, 13 nt, Human
acccccuccucuc

SEQ ID NO: 2358508 - RNA, 14 nt, Human
acccccuccucucu

SEQ ID NO: 2358509 - RNA, 17 nt, Human
acccccucccuggccug

SEQ ID NO: 2358510 - RNA, 16 nt, Human
acccccucccuggccu

SEQ ID NO: 2358511 - RNA, 14 nt, Human
accccaucugccca

SEQ ID NO: 2358512 - RNA, 11 nt, Human
acccccuccuu

SEQ ID NO: 2358513 - RNA, 15 nt, Human
acccccuccugcugc

SEQ ID NO: 2358514 - RNA, 16 nt, Human
acccccuccugcugca

SEQ ID NO: 2358515 - RNA, 15 nt, Human
acccccuccucucug

SEQ ID NO: 2358516 - RNA, 16 nt, Human
acccccuccucucugc

SEQ ID NO: 2358517 - RNA, 13 nt, Human
acccccuccugcu

SEQ ID NO: 2358518 - RNA, 14 nt, Human
acccccuccugcug

SEQ ID NO: 2358519 - RNA, 18 nt, Human
accccucuggccaggaug

SEQ ID NO: 2358520 - RNA, 19 nt, Human
accccugaggaagaugggg

SEQ ID NO: 2358521 - RNA, 15 nt, Human
accccugaucugaca

SEQ ID NO: 2358522 - RNA, 15 nt, Human
accccugagcuugca

SEQ ID NO: 2358523 - RNA, 11 nt, Human
accccugcccc

SEQ ID NO: 2358524 - RNA, 10 nt, Human
accccugccc

SEQ ID NO: 2358525 - RNA, 22 nt, Human
accccuccuuccuugaccagca

SEQ ID NO: 2358526 - RNA, 21 nt, Human
accccuccuuccuugaccagc

SEQ ID NO: 2358527 - RNA, 14 nt, Human
acccccucuagaaa

SEQ ID NO: 2358528 - RNA, 20 nt, Human
accccuccuuccuugaccag

SEQ ID NO: 2358529 - RNA, 23 nt, Human
accccuccuuccuugaccagcag

SEQ ID NO: 2358530 - RNA, 13 nt, Human
accccucucugca

SEQ ID NO: 2358531 - RNA, 15 nt, Human
accccucuggccagg

SEQ ID NO: 2358532 - RNA, 14 nt, Human
accccucuggccag

SEQ ID NO: 2358533 - RNA, 13 nt, Human
accccucuggcca

SEQ ID NO: 2358534 - RNA, 16 nt, Human
accccugcccuugucc

SEQ ID NO: 2358535 - RNA, 15 nt, Human
accccugcccuggga

SEQ ID NO: 2358536 - RNA, 12 nt, Human
accccugccucc

SEQ ID NO: 2358537 - RNA, 13 nt, Human
accccugccucca

SEQ ID NO: 2358538 - RNA, 14 nt, Human
accccugccuccac

SEQ ID NO: 2358539 - RNA, 15 nt, Human
accccugccuccacc

SEQ ID NO: 2358540 - RNA, 16 nt, Human
accccugccuccaccc

SEQ ID NO: 2358541 - RNA, 17 nt, Human
accccugccuccacccu

SEQ ID NO: 2358542 - RNA, 14 nt, Human
accccugcccuggg

SEQ ID NO: 2358543 - RNA, 13 nt, Human
accccugcccugg

SEQ ID NO: 2358544 - RNA, 12 nt, Human
accccugcccug

SEQ ID NO: 2358545 - RNA, 20 nt, Human
accccugcccccagccccgg

SEQ ID NO: 2358546 - RNA, 12 nt, Human
accccugccccc

SEQ ID NO: 2358547 - RNA, 13 nt, Human
accccugccccca

SEQ ID NO: 2358548 - RNA, 19 nt, Human
accccugcccccacuuccu

SEQ ID NO: 2358549 - RNA, 17 nt, Human
accccugcccccagccc

SEQ ID NO: 2358550 - RNA, 22 nt, Human
accccugccuccacccucugag

SEQ ID NO: 2358551 - RNA, 23 nt, Human
accccugccuccacccucugagc

SEQ ID NO: 2358552 - RNA, 14 nt, Human
accccugcuucuga

SEQ ID NO: 2358553 - RNA, 18 nt, Human
accccugccuccacccuc

SEQ ID NO: 2358554 - RNA, 19 nt, Human
accccugccuccacccucu

SEQ ID NO: 2358555 - RNA, 20 nt, Human
accccugccuccacccucug

SEQ ID NO: 2358556 - RNA, 21 nt, Human
accccugccuccacccucuga

SEQ ID NO: 2358557 - RNA, 18 nt, Human
ucagcuccacuuucagug

SEQ ID NO: 2358558 - RNA, 12 nt, Human
ucagcucaugga

SEQ ID NO: 2358559 - RNA, 20 nt, Human
ucagcuacuaaugauguuuu

SEQ ID NO: 2358560 - RNA, 14 nt, Human
ucagcuacugauuu

SEQ ID NO: 2358561 - RNA, 15 nt, Human
ucagcuacuaaugau

SEQ ID NO: 2358562 - RNA, 12 nt, Human
ucagcuccagcu

SEQ ID NO: 2358563 - RNA, 18 nt, Human
ucagcuaaagcccaaccu

SEQ ID NO: 2358564 - RNA, 14 nt, Human
ucagcguugcaugu

SEQ ID NO: 2358565 - RNA, 18 nt, Human
ucagcgugcuuagccucc

SEQ ID NO: 2358566 - RNA, 16 nt, Human
ucagcgugcuuagccu

SEQ ID NO: 2358567 - RNA, 13 nt, Human
ucagcguugcaug

SEQ ID NO: 2358568 - RNA, 19 nt, Human
ucagcggggacagcuccuu

SEQ ID NO: 2358569 - RNA, 20 nt, Human
ucagcggggacagcuccuuc

SEQ ID NO: 2358570 - RNA, 21 nt, Human
ucagcggggacagcuccuucu

SEQ ID NO: 2358571 - RNA, 23 nt, Human
ucagcggggacagcuccuucugu

SEQ ID NO: 2358572 - RNA, 19 nt, Human
ucagccuggugggccuccu

SEQ ID NO: 2358573 - RNA, 18 nt, Human
ucagccuggugggccucc

SEQ ID NO: 2358574 - RNA, 17 nt, Human
ucagccuggugggccuc

SEQ ID NO: 2358575 - RNA, 17 nt, Human
accccugggggcucuca

SEQ ID NO: 2358576 - RNA, 16 nt, Human
accccugggggcucuc

SEQ ID NO: 2358577 - RNA, 17 nt, Human
accccuggcuuuucacu

SEQ ID NO: 2358578 - RNA, 15 nt, Human
accccugggggcucu

SEQ ID NO: 2358579 - RNA, 16 nt, Human
accccuggugguucac

SEQ ID NO: 2358580 - RNA, 18 nt, Human
accccuggcuuuucacug

SEQ ID NO: 2358581 - RNA, 19 nt, Human
accccuggcuuuucacugc

SEQ ID NO: 2358582 - RNA, 20 nt, Human
accccuggcuuuucacugcu

SEQ ID NO: 2358583 - RNA, 21 nt, Human
accccuggcuuuucacugcug

SEQ ID NO: 2358584 - RNA, 16 nt, Human
ucagccugugcugccc

SEQ ID NO: 2358585 - RNA, 12 nt, Human
ucagccugugcu

SEQ ID NO: 2358586 - RNA, 16 nt, Human
ucagccugucucuucc

SEQ ID NO: 2358587 - RNA, 17 nt, Human
ucagccugucucuucca

SEQ ID NO: 2358588 - RNA, 18 nt, Human
ucagccugucucuuccau

SEQ ID NO: 2358589 - RNA, 22 nt, Human
ucagccuucccccucccagggc

SEQ ID NO: 2358590 - RNA, 21 nt, Human
ucagccuucccccucccaggg

SEQ ID NO: 2358591 - RNA, 17 nt, Human
ucagccugugcugcccg

SEQ ID NO: 2358592 - RNA, 23 nt, Human
ucagccuuccccuugcccagggc

SEQ ID NO: 2358593 - RNA, 22 nt, Human
ucagccuuccccuugcccaggg

SEQ ID NO: 2358594 - RNA, 21 nt, Human
ucagccuuccccuugcccagg

SEQ ID NO: 2358595 - RNA, 24 nt, Human
ucagccuucccccucccagggcca

SEQ ID NO: 2358596 - RNA, 18 nt, Human
ucagcggggacagcuccu

SEQ ID NO: 2358597 - RNA, 18 nt, Human
ucagccaauuauguuaaa

SEQ ID NO: 2358598 - RNA, 21 nt, Human
ucagcaaaaagcaaaaucauu

SEQ ID NO: 2358599 - RNA, 23 nt, Human
ucagccaccauccuauugcaaag

SEQ ID NO: 2358600 - RNA, 12 nt, Human
ucagccagcacu

SEQ ID NO: 2358601 - RNA, 23 nt, Human
ucagccagcacuuguccagcuga

SEQ ID NO: 2358602 - RNA, 14 nt, Human
ucagccagcacuug

SEQ ID NO: 2358603 - RNA, 15 nt, Human
ucagcaaaagaugcu

SEQ ID NO: 2358604 - RNA, 13 nt, Human
ucagccaauuaug

SEQ ID NO: 2358605 - RNA, 15 nt, Human
ucagccaauuauguu

SEQ ID NO: 2358606 - RNA, 17 nt, Human
ucagccaauuauguuaa

SEQ ID NO: 2358607 - RNA, 13 nt, Human
ucagcaaaaagca

SEQ ID NO: 2358608 - RNA, 14 nt, Human
ucagcaaaaagcaa

SEQ ID NO: 2358609 - RNA, 15 nt, Human
ucagcaaaaagcaaa

SEQ ID NO: 2358610 - RNA, 16 nt, Human
ucagcaaaaagcaaaa

SEQ ID NO: 2358611 - RNA, 20 nt, Human
ucagcaaaaagcaaaaucau

SEQ ID NO: 2358612 - RNA, 22 nt, Human
ucagauuugccuuauuggcagc

SEQ ID NO: 2358613 - RNA, 17 nt, Human
ucagauuugccuuauug

SEQ ID NO: 2358614 - RNA, 19 nt, Human
accauaaccccggaagcca

SEQ ID NO: 2358615 - RNA, 20 nt, Human
accaguugggagcacuggag

SEQ ID NO: 2358616 - RNA, 21 nt, Human
accaguugggagcacuggagu

SEQ ID NO: 2358617 - RNA, 19 nt, Human
accaguuuaaccugaugca

SEQ ID NO: 2358618 - RNA, 20 nt, Human
accaguuuaaccugaugcag

SEQ ID NO: 2358619 - RNA, 21 nt, Human
accaguuuaaccugaugcagu

SEQ ID NO: 2358620 - RNA, 15 nt, Human
accauaaaaagcuga

SEQ ID NO: 2358621 - RNA, 21 nt, Human
accagugugguuuguguuuga

SEQ ID NO: 2358622 - RNA, 20 nt, Human
accaguguccccuccacugu

SEQ ID NO: 2358623 - RNA, 22 nt, Human
accaguguuagggaagggccug

SEQ ID NO: 2358624 - RNA, 18 nt, Human
accaguugggagcacugg

SEQ ID NO: 2358625 - RNA, 19 nt, Human
accaguugggagcacugga

SEQ ID NO: 2358626 - RNA, 18 nt, Human
accaguguuguggauuua

SEQ ID NO: 2358627 - RNA, 21 nt, Human
ucagauuugaacucuucaauc

SEQ ID NO: 2358628 - RNA, 15 nt, Human
accauaccuuccuuc

SEQ ID NO: 2358629 - RNA, 16 nt, Human
accauaccuuccuucc

SEQ ID NO: 2358630 - RNA, 17 nt, Human
accauaccuuccuuccc

SEQ ID NO: 2358631 - RNA, 12 nt, Human
ucagauuugaac

SEQ ID NO: 2358632 - RNA, 13 nt, Human
accauaauguuac

SEQ ID NO: 2358633 - RNA, 22 nt, Human
accauaagguuucguuucugua

SEQ ID NO: 2358634 - RNA, 15 nt, Human
accauaauguuacau

SEQ ID NO: 2358635 - RNA, 18 nt, Human
accauaauguuacauuau

SEQ ID NO: 2358636 - RNA, 12 nt, Human
ucagccaggagc

SEQ ID NO: 2358637 - RNA, 13 nt, Human
ucagccaggagcu

SEQ ID NO: 2358638 - RNA, 14 nt, Human
ucagccagagaagc

SEQ ID NO: 2358639 - RNA, 15 nt, Human
ucagccagccccauc

SEQ ID NO: 2358640 - RNA, 17 nt, Human
ucagccagccccaucag

SEQ ID NO: 2358641 - RNA, 13 nt, Human
ucagcccucccug

SEQ ID NO: 2358642 - RNA, 14 nt, Human
ucagcccucccugc

SEQ ID NO: 2358643 - RNA, 15 nt, Human
ucagcccucccugcc

SEQ ID NO: 2358644 - RNA, 16 nt, Human
ucagcccucccugccc

SEQ ID NO: 2358645 - RNA, 19 nt, Human
acccaggagccccgaggcc

SEQ ID NO: 2358646 - RNA, 23 nt, Human
acccaggagccccgaggccuucu

SEQ ID NO: 2358647 - RNA, 21 nt, Human
acccaggagguggagguugca

SEQ ID NO: 2358648 - RNA, 20 nt, Human
acccaggagguggagguugc

SEQ ID NO: 2358649 - RNA, 14 nt, Human
acccaggaggugga

SEQ ID NO: 2358650 - RNA, 11 nt, Human
acccaggaggu

SEQ ID NO: 2358651 - RNA, 19 nt, Human
acccaggagggagggggcu

SEQ ID NO: 2358652 - RNA, 22 nt, Human
accccacccccuucagugccca

SEQ ID NO: 2358653 - RNA, 21 nt, Human
accccacccuaguuucccuga

SEQ ID NO: 2358654 - RNA, 12 nt, Human
accccacccuca

SEQ ID NO: 2358655 - RNA, 13 nt, Human
accccacccucag

SEQ ID NO: 2358656 - RNA, 14 nt, Human
accccacccucagc

SEQ ID NO: 2358657 - RNA, 15 nt, Human
accccacccucagca

SEQ ID NO: 2358658 - RNA, 21 nt, Human
accccacccucagcaccccuu

SEQ ID NO: 2358659 - RNA, 13 nt, Human
accccacccuccc

SEQ ID NO: 2358660 - RNA, 21 nt, Human
accccacccccuucagugccc

SEQ ID NO: 2358661 - RNA, 12 nt, Human
accccacccccu

SEQ ID NO: 2358662 - RNA, 15 nt, Human
accccacccccaccc

SEQ ID NO: 2358663 - RNA, 21 nt, Human
accccacacuuguuccagcuc

SEQ ID NO: 2358664 - RNA, 22 nt, Human
accccaccacgauguggcccug

SEQ ID NO: 2358665 - RNA, 11 nt, Human
accccacccaa

SEQ ID NO: 2358666 - RNA, 11 nt, Human
accccacacuu

SEQ ID NO: 2358667 - RNA, 22 nt, Human
accccacaccaggccguccucc

SEQ ID NO: 2358668 - RNA, 18 nt, Human
accccacacgcuccuccc

SEQ ID NO: 2358669 - RNA, 23 nt, Human
acccaggagguggagguugcagu

SEQ ID NO: 2358670 - RNA, 16 nt, Human
accccacaccaggccg

SEQ ID NO: 2358671 - RNA, 17 nt, Human
accccacaccaggccgu

SEQ ID NO: 2358672 - RNA, 20 nt, Human
accccacaccaggccguccu

SEQ ID NO: 2358673 - RNA, 17 nt, Human
accccacacacgccaga

SEQ ID NO: 2358674 - RNA, 13 nt, Human
accccagagugug

SEQ ID NO: 2358675 - RNA, 13 nt, Human
accccagccccaa

SEQ ID NO: 2358676 - RNA, 13 nt, Human
accccagcauccu

SEQ ID NO: 2358677 - RNA, 15 nt, Human
accccacccucccug

SEQ ID NO: 2358678 - RNA, 12 nt, Human
accccagccuaa

SEQ ID NO: 2358679 - RNA, 23 nt, Human
accccagccgcucggaggcccca

SEQ ID NO: 2358680 - RNA, 22 nt, Human
accccagccccaaaacucuccu

SEQ ID NO: 2358681 - RNA, 17 nt, Human
acccuuuuucuccagcu

SEQ ID NO: 2358682 - RNA, 14 nt, Human
acccuuuugucugc

SEQ ID NO: 2358683 - RNA, 15 nt, Human
accgaaaacguggcu

SEQ ID NO: 2358684 - RNA, 13 nt, Human
acccuugaaaaga

SEQ ID NO: 2358685 - RNA, 16 nt, Human
acccuugcccacccca

SEQ ID NO: 2358686 - RNA, 17 nt, Human
acccuugcccaccccac

SEQ ID NO: 2358687 - RNA, 14 nt, Human
acccuuuccuuccu

SEQ ID NO: 2358688 - RNA, 20 nt, Human
acccuuuagccaaacccuug

SEQ ID NO: 2358689 - RNA, 19 nt, Human
acccuuuccuuccuucccu

SEQ ID NO: 2358690 - RNA, 18 nt, Human
acccuuuccuuccuuccc

SEQ ID NO: 2358691 - RNA, 17 nt, Human
acccuuuccuuccuucc

SEQ ID NO: 2358692 - RNA, 15 nt, Human
acccuuuccuuccuu

SEQ ID NO: 2358693 - RNA, 22 nt, Human
acccuuuccuuccuucccuggc

SEQ ID NO: 2358694 - RNA, 21 nt, Human
acccuuuccuuccuucccugg

SEQ ID NO: 2358695 - RNA, 23 nt, Human
acccuuuccuuccuucccuggcu

SEQ ID NO: 2358696 - RNA, 16 nt, Human
acccuugaaaagacau

SEQ ID NO: 2358697 - RNA, 11 nt, Human
acccuugacac

SEQ ID NO: 2358698 - RNA, 16 nt, Human
acccuucuuuccucuu

SEQ ID NO: 2358699 - RNA, 18 nt, Human
acccuucuuuccucuucc

SEQ ID NO: 2358700 - RNA, 20 nt, Human
acccuucuuuccucuucccc

SEQ ID NO: 2358701 - RNA, 17 nt, Human
acccuugccgucuaccu

SEQ ID NO: 2358702 - RNA, 20 nt, Human
acccuuguggucccacccca

SEQ ID NO: 2358703 - RNA, 23 nt, Human
acccuuguggucccaccccacac

SEQ ID NO: 2358704 - RNA, 23 nt, Human
acccuucuccucuuguaaauaaa

SEQ ID NO: 2358705 - RNA, 12 nt, Human
acccuucuuuuc

SEQ ID NO: 2358706 - RNA, 14 nt, Human
acccuucuuuccuc

SEQ ID NO: 2358707 - RNA, 15 nt, Human
acccuucuuuccucu

SEQ ID NO: 2358708 - RNA, 17 nt, Human
acccugcccugugggcc

SEQ ID NO: 2358709 - RNA, 22 nt, Human
acccugcccugugggcccccaa

SEQ ID NO: 2358710 - RNA, 15 nt, Human
acccugaggcccaga

SEQ ID NO: 2358711 - RNA, 16 nt, Human
acccugaggcccagag

SEQ ID NO: 2358712 - RNA, 17 nt, Human
acccugaggcccagagg

SEQ ID NO: 2358713 - RNA, 15 nt, Human
acccugcccuguggg

SEQ ID NO: 2358714 - RNA, 21 nt, Human
acccugaauuuggccugcacu

SEQ ID NO: 2358715 - RNA, 18 nt, Human
acccugaaggggccauga

SEQ ID NO: 2358716 - RNA, 21 nt, Human
acccugaaugguuccaugccu

SEQ ID NO: 2358717 - RNA, 22 nt, Human
acccugaaugguuccaugccug

SEQ ID NO: 2358718 - RNA, 14 nt, Human
acccugaggcccag

SEQ ID NO: 2358719 - RNA, 14 nt, Human
acccucugccacca

SEQ ID NO: 2358720 - RNA, 17 nt, Human
acccucugccaccagag

SEQ ID NO: 2358721 - RNA, 13 nt, Human
acccucugagcuu

SEQ ID NO: 2358722 - RNA, 18 nt, Human
acccucugagcuuugcau

SEQ ID NO: 2358723 - RNA, 21 nt, Human
acccucugagcuuugcauguu

SEQ ID NO: 2358724 - RNA, 13 nt, Human
acccucugccacc

SEQ ID NO: 2358725 - RNA, 17 nt, Human
acccugaaggggccaug

SEQ ID NO: 2358726 - RNA, 12 nt, Human
acccugaagggg

SEQ ID NO: 2358727 - RNA, 22 nt, Human
acccucugaaugguccaggguu

SEQ ID NO: 2358728 - RNA, 21 nt, Human
acccucugaaugguccagggu

SEQ ID NO: 2358729 - RNA, 15 nt, Human
acccucucccaggac

SEQ ID NO: 2358730 - RNA, 14 nt, Human
acccucucccagga

SEQ ID NO: 2358731 - RNA, 19 nt, Human
acccucugaaugguccagg

SEQ ID NO: 2358732 - RNA, 16 nt, Human
acccucuccaccccau

SEQ ID NO: 2358733 - RNA, 15 nt, Human
acccucuccacccca

SEQ ID NO: 2358734 - RNA, 14 nt, Human
acccucuccacccc

SEQ ID NO: 2358735 - RNA, 19 nt, Human
acccucucaggugaccaaa

SEQ ID NO: 2358736 - RNA, 15 nt, Human
acccucucagcucca

SEQ ID NO: 2358737 - RNA, 16 nt, Human
acccucucagcuccag

SEQ ID NO: 2358738 - RNA, 18 nt, Human
acccugaaagcccugagc

SEQ ID NO: 2358739 - RNA, 16 nt, Human
acccugaaagcccuga

SEQ ID NO: 2358740 - RNA, 14 nt, Human
acccucguggccuu

SEQ ID NO: 2358741 - RNA, 20 nt, Human
acccucguggccuuccccag

SEQ ID NO: 2358742 - RNA, 22 nt, Human
acccucgggcccaccuggccac

SEQ ID NO: 2358743 - RNA, 18 nt, Human
acccucgggcccaccugg

SEQ ID NO: 2358744 - RNA, 19 nt, Human
acccucgggcccaccuggc

SEQ ID NO: 2358745 - RNA, 20 nt, Human
acccucgggcccaccuggcc

SEQ ID NO: 2358746 - RNA, 21 nt, Human
acccucgggcccaccuggcca

SEQ ID NO: 2358747 - RNA, 13 nt, Human
acccucgggccca

SEQ ID NO: 2358748 - RNA, 14 nt, Human
acccucgggcccac

SEQ ID NO: 2358749 - RNA, 15 nt, Human
acccucgggcccacc

SEQ ID NO: 2358750 - RNA, 16 nt, Human
acccucgggcccaccu

SEQ ID NO: 2358751 - RNA, 17 nt, Human
acccucgggcccaccug

SEQ ID NO: 2358752 - RNA, 19 nt, Human
acccucgaggcggaucuuu

SEQ ID NO: 2358753 - RNA, 18 nt, Human
acccucgaggcggaucuu

SEQ ID NO: 2358754 - RNA, 21 nt, Human
acccgggaggcggagcuugca

SEQ ID NO: 2358755 - RNA, 12 nt, Human
acccgggcucag

SEQ ID NO: 2358756 - RNA, 13 nt, Human
acccgggcucagg

SEQ ID NO: 2358757 - RNA, 23 nt, Human
acccgggcucagggaccacagca

SEQ ID NO: 2358758 - RNA, 15 nt, Human
acccguacaacgugu

SEQ ID NO: 2358759 - RNA, 14 nt, Human
acccguccagaccu

SEQ ID NO: 2358760 - RNA, 12 nt, Human
ucagggggccag

SEQ ID NO: 2358761 - RNA, 13 nt, Human
ucagggggccagg

SEQ ID NO: 2358762 - RNA, 21 nt, Human
ucaggggcugcccgcucccag

SEQ ID NO: 2358763 - RNA, 22 nt, Human
ucaggggcugcccgcucccagu

SEQ ID NO: 2358764 - RNA, 18 nt, Human
ucaggggcuguuugagga

SEQ ID NO: 2358765 - RNA, 19 nt, Human
ucagggucccugguggcag

SEQ ID NO: 2358766 - RNA, 15 nt, Human
ucaggguucuccucu

SEQ ID NO: 2358767 - RNA, 18 nt, Human
ucagggucucugcugccg

SEQ ID NO: 2358768 - RNA, 16 nt, Human
ucagggugaugccagg

SEQ ID NO: 2358769 - RNA, 14 nt, Human
ucaggggcuguuug

SEQ ID NO: 2358770 - RNA, 12 nt, Human
ucagggucucug

SEQ ID NO: 2358771 - RNA, 16 nt, Human
ucagggucucugcugc

SEQ ID NO: 2358772 - RNA, 17 nt, Human
ucagggucucugcugcc

SEQ ID NO: 2358773 - RNA, 16 nt, Human
ucaggguuggccccug

SEQ ID NO: 2358774 - RNA, 20 nt, Human
ucaggggagucccgucagga

SEQ ID NO: 2358775 - RNA, 16 nt, Human
ucaggggagucccguc

SEQ ID NO: 2358776 - RNA, 12 nt, Human
ucaggggccaga

SEQ ID NO: 2358777 - RNA, 14 nt, Human
ucaggggccagagg

SEQ ID NO: 2358778 - RNA, 18 nt, Human
ucaggggacucagcccug

SEQ ID NO: 2358779 - RNA, 15 nt, Human
ucaggggccagagga

SEQ ID NO: 2358780 - RNA, 16 nt, Human
ucaggggccagaggaa

SEQ ID NO: 2358781 - RNA, 13 nt, Human
ucaggggcugccc

SEQ ID NO: 2358782 - RNA, 14 nt, Human
ucaggggcugcccg

SEQ ID NO: 2358783 - RNA, 16 nt, Human
ucaggggcugcccgcu

SEQ ID NO: 2358784 - RNA, 20 nt, Human
ucaggggcugcccgcuccca

SEQ ID NO: 2358785 - RNA, 16 nt, Human
ucaggggacucagccc

SEQ ID NO: 2358786 - RNA, 22 nt, Human
ucagggcugacacguccacccc

SEQ ID NO: 2358787 - RNA, 18 nt, Human
ucagcuuuuugucuuuuc

SEQ ID NO: 2358788 - RNA, 14 nt, Human
ucagggcuccuggg

SEQ ID NO: 2358789 - RNA, 12 nt, Human
ucagggcugaca

SEQ ID NO: 2358790 - RNA, 23 nt, Human
ucaggccaggcccucugcccacu

SEQ ID NO: 2358791 - RNA, 22 nt, Human
ucagcuuugccuuccacgcugu

SEQ ID NO: 2358792 - RNA, 16 nt, Human
ucagcuuuugcuucau

SEQ ID NO: 2358793 - RNA, 16 nt, Human
ucagcuuugccuucca

SEQ ID NO: 2358794 - RNA, 15 nt, Human
ucagcuuugccuucc

SEQ ID NO: 2358795 - RNA, 20 nt, Human
ucaggccaggcccucugccc

SEQ ID NO: 2358796 - RNA, 15 nt, Human
ucagcuacugauuuu

SEQ ID NO: 2358797 - RNA, 23 nt, Human
ucagcuccagacguaggggaggg

SEQ ID NO: 2358798 - RNA, 16 nt, Human
ucagcuugugcacaau

SEQ ID NO: 2358799 - RNA, 21 nt, Human
ucaggccaggcccucugccca

SEQ ID NO: 2358800 - RNA, 22 nt, Human
ucaggccaggcccucugcccac

SEQ ID NO: 2358801 - RNA, 14 nt, Human
ucagcuccagcuca

SEQ ID NO: 2358802 - RNA, 15 nt, Human
ucagcuccagcucac

SEQ ID NO: 2358803 - RNA, 21 nt, Human
ucagcuuguaaauagcucagg

SEQ ID NO: 2358804 - RNA, 22 nt, Human
ucagcuuguaaauagcucaggu

SEQ ID NO: 2358805 - RNA, 21 nt, Human
ucaggguucuccucuccccuc

SEQ ID NO: 2358806 - RNA, 15 nt, Human
acccggaggggccug

SEQ ID NO: 2358807 - RNA, 23 nt, Human
ucagguaacaggcagauacagga

SEQ ID NO: 2358808 - RNA, 21 nt, Human
ucagguaacaggcagauacag

SEQ ID NO: 2358809 - RNA, 22 nt, Human
ucagguaacaggcagauacagg

SEQ ID NO: 2358810 - RNA, 14 nt, Human
acccggccccugcu

SEQ ID NO: 2358811 - RNA, 18 nt, Human
acccggaggggccuggca

SEQ ID NO: 2358812 - RNA, 21 nt, Human
acccggaggggccuggcagcc

SEQ ID NO: 2358813 - RNA, 15 nt, Human
acccggccccugcug

SEQ ID NO: 2358814 - RNA, 16 nt, Human
acccggccccugcugg

SEQ ID NO: 2358815 - RNA, 21 nt, Human
acccggcgguccccuccgcca

SEQ ID NO: 2358816 - RNA, 22 nt, Human
acccggcaggcuagaaccuggc

SEQ ID NO: 2358817 - RNA, 22 nt, Human
acccggccccugcugguucagg

SEQ ID NO: 2358818 - RNA, 17 nt, Human
acccggccccugcuggu

SEQ ID NO: 2358819 - RNA, 20 nt, Human
acccggccccugcugguuca

SEQ ID NO: 2358820 - RNA, 17 nt, Human
acccgggaggcagaggu

SEQ ID NO: 2358821 - RNA, 14 nt, Human
acccggcugcagag

SEQ ID NO: 2358822 - RNA, 12 nt, Human
acccgggaaggg

SEQ ID NO: 2358823 - RNA, 13 nt, Human
acccgggaagggg

SEQ ID NO: 2358824 - RNA, 21 nt, Human
acaugguaaacgcugucccua

SEQ ID NO: 2358825 - RNA, 22 nt, Human
acaugguagccaguugaauuua

SEQ ID NO: 2358826 - RNA, 21 nt, Human
acauggugaaaccucaucucu

SEQ ID NO: 2358827 - RNA, 15 nt, Human
acauguaauuaagua

SEQ ID NO: 2358828 - RNA, 22 nt, Human
acaugggguuuucaauuuugca

SEQ ID NO: 2358829 - RNA, 18 nt, Human
acaugggguuuucaauuu

SEQ ID NO: 2358830 - RNA, 16 nt, Human
acaugggguuuucaau

SEQ ID NO: 2358831 - RNA, 21 nt, Human
acaugggguuggcugggccca

SEQ ID NO: 2358832 - RNA, 20 nt, Human
acaugggguuggcugggccc

SEQ ID NO: 2358833 - RNA, 17 nt, Human
acaugggguuggcuggg

SEQ ID NO: 2358834 - RNA, 18 nt, Human
acauggggcugggcagcu

SEQ ID NO: 2358835 - RNA, 16 nt, Human
acauggggaggaagga

SEQ ID NO: 2358836 - RNA, 23 nt, Human
acaugggagccgggucugccucu

SEQ ID NO: 2358837 - RNA, 22 nt, Human
acauguaauuaaguacuaugua

SEQ ID NO: 2358838 - RNA, 21 nt, Human
acauguaauuaaguacuaugu

SEQ ID NO: 2358839 - RNA, 19 nt, Human
acauguaauuaaguacuau

SEQ ID NO: 2358840 - RNA, 17 nt, Human
acauguaauuaaguacu

SEQ ID NO: 2358841 - RNA, 19 nt, Human
acauggcuuaguuuucaua

SEQ ID NO: 2358842 - RNA, 14 nt, Human
acauggcuuaguuu

SEQ ID NO: 2358843 - RNA, 13 nt, Human
acauggcuuccuc

SEQ ID NO: 2358844 - RNA, 16 nt, Human
acauggcuuccuccug

SEQ ID NO: 2358845 - RNA, 13 nt, Human
acaugcuuuguga

SEQ ID NO: 2358846 - RNA, 17 nt, Human
acauggaacucauuccu

SEQ ID NO: 2358847 - RNA, 11 nt, Human
acaugggacau

SEQ ID NO: 2358848 - RNA, 14 nt, Human
acaugggacauuug

SEQ ID NO: 2358849 - RNA, 20 nt, Human
acauggcuugccacagcucu

SEQ ID NO: 2358850 - RNA, 20 nt, Human
acaugggagccgggucugcc

SEQ ID NO: 2358851 - RNA, 21 nt, Human
acaugggacauuugcucaugg

SEQ ID NO: 2358852 - RNA, 15 nt, Human
acaugggacauuugc

SEQ ID NO: 2358853 - RNA, 20 nt, Human
acaugggacauuugcucaug

SEQ ID NO: 2358854 - RNA, 14 nt, Human
acaguccagccugg

SEQ ID NO: 2358855 - RNA, 14 nt, Human
acagucauuuaaaa

SEQ ID NO: 2358856 - RNA, 15 nt, Human
acaguccagccugga

SEQ ID NO: 2358857 - RNA, 13 nt, Human
acagucauuuaaa

SEQ ID NO: 2358858 - RNA, 20 nt, Human
acagucagauuuccagucuc

SEQ ID NO: 2358859 - RNA, 21 nt, Human
acaugaaguguguuuccuuca

SEQ ID NO: 2358860 - RNA, 19 nt, Human
acaugaaguguguuuccuu

SEQ ID NO: 2358861 - RNA, 18 nt, Human
acaguccagccuggagau

SEQ ID NO: 2358862 - RNA, 16 nt, Human
acaguccagccuggag

SEQ ID NO: 2358863 - RNA, 17 nt, Human
acagucccuaaagaaaa

SEQ ID NO: 2358864 - RNA, 20 nt, Human
acaugaauauuuaguguuca

SEQ ID NO: 2358865 - RNA, 15 nt, Human
acaugaaugcacacu

SEQ ID NO: 2358866 - RNA, 18 nt, Human
acaugaauugcauuuuac

SEQ ID NO: 2358867 - RNA, 13 nt, Human
acaugaauaugau

SEQ ID NO: 2358868 - RNA, 20 nt, Human
acaugaaucccacccacaug

SEQ ID NO: 2358869 - RNA, 21 nt, Human
acaugaaucccacccacaugu

SEQ ID NO: 2358870 - RNA, 23 nt, Human
acaugaaucccacccacauguga

SEQ ID NO: 2358871 - RNA, 20 nt, Human
acaugagguacugagaguga

SEQ ID NO: 2358872 - RNA, 16 nt, Human
acaugagguacugaga

SEQ ID NO: 2358873 - RNA, 21 nt, Human
acaugcuacacacugcauguu

SEQ ID NO: 2358874 - RNA, 15 nt, Human
acaugcuacacacug

SEQ ID NO: 2358875 - RNA, 23 nt, Human
acaugagguacugagagugaaca

SEQ ID NO: 2358876 - RNA, 23 nt, Human
acaugcgguagccagcacacagg

SEQ ID NO: 2358877 - RNA, 22 nt, Human
acaugcgguagccagcacacag

SEQ ID NO: 2358878 - RNA, 20 nt, Human
acaugcgguagccagcacac

SEQ ID NO: 2358879 - RNA, 13 nt, Human
acaugagucaaga

SEQ ID NO: 2358880 - RNA, 13 nt, Human
acaugagucccag

SEQ ID NO: 2358881 - RNA, 18 nt, Human
acaugcgguagccagcac

SEQ ID NO: 2358882 - RNA, 17 nt, Human
ucaaccaaugccaaaaa

SEQ ID NO: 2358883 - RNA, 15 nt, Human
ucaaccaauguagaa

SEQ ID NO: 2358884 - RNA, 17 nt, Human
ucaacauuuacauguau

SEQ ID NO: 2358885 - RNA, 14 nt, Human
ucaacauuucucaa

SEQ ID NO: 2358886 - RNA, 16 nt, Human
ucaacaagggagagac

SEQ ID NO: 2358887 - RNA, 16 nt, Human
ucaacauuuacaugua

SEQ ID NO: 2358888 - RNA, 14 nt, Human
ucaacaaccaggga

SEQ ID NO: 2358889 - RNA, 14 nt, Human
ucaacaaagcacag

SEQ ID NO: 2358890 - RNA, 15 nt, Human
ucaacaaagcacagu

SEQ ID NO: 2358891 - RNA, 18 nt, Human
ucaacaaagcacaguguu

SEQ ID NO: 2358892 - RNA, 23 nt, Human
ucaacaaagcacaguguuaaaug

SEQ ID NO: 2358893 - RNA, 14 nt, Human
ucaacauuuacaug

SEQ ID NO: 2358894 - RNA, 12 nt, Human
ucaaauuucaca

SEQ ID NO: 2358895 - RNA, 13 nt, Human
ucaaauuucuaaa

SEQ ID NO: 2358896 - RNA, 18 nt, Human
ucaacaaaaauugucccu

SEQ ID NO: 2358897 - RNA, 14 nt, Human
ucaacaaacuauuu

SEQ ID NO: 2358898 - RNA, 15 nt, Human
ucaacaaaaauuguc

SEQ ID NO: 2358899 - RNA, 18 nt, Human
ucaacaaacuauuucuua

SEQ ID NO: 2358900 - RNA, 17 nt, Human
ucaacaagggagagacc

SEQ ID NO: 2358901 - RNA, 15 nt, Human
ucaaccauuccccau

SEQ ID NO: 2358902 - RNA, 15 nt, Human
ucaacccaggagcau

SEQ ID NO: 2358903 - RNA, 16 nt, Human
ucaaccaucgcuuuau

SEQ ID NO: 2358904 - RNA, 18 nt, Human
ucaaccauuccccauggg

SEQ ID NO: 2358905 - RNA, 14 nt, Human
ucaaccagcagaug

SEQ ID NO: 2358906 - RNA, 23 nt, Human
ucaaccacuguaaaaugaaauua

SEQ ID NO: 2358907 - RNA, 17 nt, Human
ucaaccaccuuucagau

SEQ ID NO: 2358908 - RNA, 18 nt, Human
ucaacccccauuucuauu

SEQ ID NO: 2358909 - RNA, 19 nt, Human
ucaacugccaaaaugcucu

SEQ ID NO: 2358910 - RNA, 14 nt, Human
ucaacugccuacuc

SEQ ID NO: 2358911 - RNA, 18 nt, Human
ucaacugggcugaacacu

SEQ ID NO: 2358912 - RNA, 20 nt, Human
ucaacugccuacuccaaaau

SEQ ID NO: 2358913 - RNA, 18 nt, Human
ucaacugccuacuccaaa

SEQ ID NO: 2358914 - RNA, 20 nt, Human
ucaaccccaccacuucuuuu

SEQ ID NO: 2358915 - RNA, 23 nt, Human
ucaacccaggagcauccaccucc

SEQ ID NO: 2358916 - RNA, 20 nt, Human
ucaacugcaucaagauguga

SEQ ID NO: 2358917 - RNA, 20 nt, Human
acauguacuguucucuucuu

SEQ ID NO: 2358918 - RNA, 17 nt, Human
acauguaggaaguagga

SEQ ID NO: 2358919 - RNA, 16 nt, Human
acauguauuuguuugc

SEQ ID NO: 2358920 - RNA, 15 nt, Human
acauguagguguuug

SEQ ID NO: 2358921 - RNA, 23 nt, Human
acauguagguguuuguucaucug

SEQ ID NO: 2358922 - RNA, 18 nt, Human
acauguauuuguuugcau

SEQ ID NO: 2358923 - RNA, 17 nt, Human
acauguauuuguuugca

SEQ ID NO: 2358924 - RNA, 19 nt, Human
acauguauuuguuugcaua

SEQ ID NO: 2358925 - RNA, 20 nt, Human
acauguaguaguacuugaaa

SEQ ID NO: 2358926 - RNA, 23 nt, Human
acauguaauuaaguacuauguau

SEQ ID NO: 2358927 - RNA, 18 nt, Human
acauguaauauaaagaug

SEQ ID NO: 2358928 - RNA, 11 nt, Human
acauguacaga

SEQ ID NO: 2358929 - RNA, 13 nt, Human
acauguacagaga

SEQ ID NO: 2358930 - RNA, 13 nt, Human
acauggugccuga

SEQ ID NO: 2358931 - RNA, 16 nt, Human
acauggugccugagag

SEQ ID NO: 2358932 - RNA, 18 nt, Human
acauggugccugagaggc

SEQ ID NO: 2358933 - RNA, 19 nt, Human
acauuccuaaacuaucuuu

SEQ ID NO: 2358934 - RNA, 23 nt, Human
acauuccgacaaccgaugcucca

SEQ ID NO: 2358935 - RNA, 13 nt, Human
acauuccauccuu

SEQ ID NO: 2358936 - RNA, 20 nt, Human
acauuccuaaacuaucuuuu

SEQ ID NO: 2358937 - RNA, 17 nt, Human
acauucccaucugucac

SEQ ID NO: 2358938 - RNA, 15 nt, Human
acauguccaagaagc

SEQ ID NO: 2358939 - RNA, 21 nt, Human
acaugucaguaccuucaaacu

SEQ ID NO: 2358940 - RNA, 19 nt, Human
acaugucaguaccuucaaa

SEQ ID NO: 2358941 - RNA, 18 nt, Human
acaugucaguaccuucaa

SEQ ID NO: 2358942 - RNA, 23 nt, Human
acaugucaccguggaccuuccug

SEQ ID NO: 2358943 - RNA, 15 nt, Human
acauucggcucccug

SEQ ID NO: 2358944 - RNA, 17 nt, Human
acauuccuugccugcac

SEQ ID NO: 2358945 - RNA, 20 nt, Human
acauucggcucccuggagcc

SEQ ID NO: 2358946 - RNA, 17 nt, Human
acauucggcucccugga

SEQ ID NO: 2358947 - RNA, 18 nt, Human
acauuccuugccugcaca

SEQ ID NO: 2358948 - RNA, 14 nt, Human
acauuccugaugcu

SEQ ID NO: 2358949 - RNA, 20 nt, Human
acauucugacaucuuaguau

SEQ ID NO: 2358950 - RNA, 16 nt, Human
acauucugauuuggaa

SEQ ID NO: 2358951 - RNA, 18 nt, Human
ucaaauugugugaaaggu

SEQ ID NO: 2358952 - RNA, 15 nt, Human
ucaaauugugugaaa

SEQ ID NO: 2358953 - RNA, 14 nt, Human
ucaauauccuuugc

SEQ ID NO: 2358954 - RNA, 16 nt, Human
ucaauauccuuugccu

SEQ ID NO: 2358955 - RNA, 18 nt, Human
ucaauauccaaaccaaau

SEQ ID NO: 2358956 - RNA, 12 nt, Human
ucaagucuuccc

SEQ ID NO: 2358957 - RNA, 14 nt, Human
ucaauagucaagaa

SEQ ID NO: 2358958 - RNA, 17 nt, Human
ucaauagucaagaaaaa

SEQ ID NO: 2358959 - RNA, 14 nt, Human
ucaauauuccugaa

SEQ ID NO: 2358960 - RNA, 22 nt, Human
ucaauauuccugaaugaaauau

SEQ ID NO: 2358961 - RNA, 21 nt, Human
ucaauauuccugaaugaaaua

SEQ ID NO: 2358962 - RNA, 18 nt, Human
ucaauauuccugaaugaa

SEQ ID NO: 2358963 - RNA, 17 nt, Human
ucaauauuccugaauga

SEQ ID NO: 2358964 - RNA, 22 nt, Human
ucaauaucuuuuuuuuaauaaa

SEQ ID NO: 2358965 - RNA, 13 nt, Human
ucaauaugcuuac

SEQ ID NO: 2358966 - RNA, 14 nt, Human
ucaauauuaaauac

SEQ ID NO: 2358967 - RNA, 15 nt, Human
ucaauauuaaauaca

SEQ ID NO: 2358968 - RNA, 16 nt, Human
ucaauauuaaauacag

SEQ ID NO: 2358969 - RNA, 17 nt, Human
ucaauauuaaauacaga

SEQ ID NO: 2358970 - RNA, 19 nt, Human
ucaauauuaaauacagaca

SEQ ID NO: 2358971 - RNA, 21 nt, Human
ucaauauuaaauacagacacu

SEQ ID NO: 2358972 - RNA, 22 nt, Human
ucaauauuaaauacagacacua

SEQ ID NO: 2358973 - RNA, 19 nt, Human
ucaacuugcauccaacucc

SEQ ID NO: 2358974 - RNA, 22 nt, Human
ucaacuuucuuuugauuagugu

SEQ ID NO: 2358975 - RNA, 15 nt, Human
ucaacuuuuccuuug

SEQ ID NO: 2358976 - RNA, 19 nt, Human
ucaacuucuggcuccucaa

SEQ ID NO: 2358977 - RNA, 16 nt, Human
ucaacuucuggcuccu

SEQ ID NO: 2358978 - RNA, 18 nt, Human
ucaacuucuggcuccuca

SEQ ID NO: 2358979 - RNA, 12 nt, Human
ucaacugggcug

SEQ ID NO: 2358980 - RNA, 20 nt, Human
ucaacugccaaaaugcucua

SEQ ID NO: 2358981 - RNA, 19 nt, Human
ucaagucucugcuggccca

SEQ ID NO: 2358982 - RNA, 17 nt, Human
ucaagucucugcuggcc

SEQ ID NO: 2358983 - RNA, 16 nt, Human
ucaagucucugcuggc

SEQ ID NO: 2358984 - RNA, 14 nt, Human
ucaagucucugcug

SEQ ID NO: 2358985 - RNA, 18 nt, Human
ucaaguccuuaccucuuc

SEQ ID NO: 2358986 - RNA, 22 nt, Human
ucaaguccuuaccucuuccgga

SEQ ID NO: 2358987 - RNA, 22 nt, Human
ucaaguccucuuuucugagagg

SEQ ID NO: 2358988 - RNA, 17 nt, Human
ucaagaaaacaacuuca

SEQ ID NO: 2358989 - RNA, 21 nt, Human
ucaacuuuuccuuugaauccu

SEQ ID NO: 2358990 - RNA, 18 nt, Human
ucaagaaaaauuauugua

SEQ ID NO: 2358991 - RNA, 21 nt, Human
ucaagaaaaauuauuguauaa

SEQ ID NO: 2358992 - RNA, 10 nt, Human
ucaauauuua

SEQ ID NO: 2358993 - RNA, 15 nt, Human
ucaauauugucauuc

SEQ ID NO: 2358994 - RNA, 17 nt, Human
ucaauauugucauuccu

SEQ ID NO: 2358995 - RNA, 11 nt, Human
ucaauauuuau

SEQ ID NO: 2358996 - RNA, 18 nt, Human
ucaauauugucauuccug

SEQ ID NO: 2358997 - RNA, 13 nt, Human
ucaauauuuaaac

SEQ ID NO: 2358998 - RNA, 15 nt, Human
ucaauauuucagaua

SEQ ID NO: 2358999 - RNA, 20 nt, Human
ucaauauuuauuauuuucac

SEQ ID NO: 2359000 - RNA, 12 nt, Human
ucaauauuuauu

SEQ ID NO: 2359001 - RNA, 13 nt, Human
ucaauauuuauua

SEQ ID NO: 2359002 - RNA, 19 nt, Human
ucaauauuucagauaauca

SEQ ID NO: 2359003 - RNA, 15 nt, Human
ucaaucucucuuaga

SEQ ID NO: 2359004 - RNA, 15 nt, Human
ucaauccuuguucag

SEQ ID NO: 2359005 - RNA, 17 nt, Human
ucaauauuuaaacaugg

SEQ ID NO: 2359006 - RNA, 20 nt, Human
ucaaucucccgcugcugcug

SEQ ID NO: 2359007 - RNA, 18 nt, Human
ucaaucucccgcugcugc

SEQ ID NO: 2359008 - RNA, 13 nt, Human
ucaaucuguaaac

SEQ ID NO: 2359009 - RNA, 16 nt, Human
ucaaucuguaaacugu

SEQ ID NO: 2359010 - RNA, 14 nt, Human
ucaaucuguaaacu

SEQ ID NO: 2359011 - RNA, 16 nt, Human
ucaaucuguuuuucau

SEQ ID NO: 2359012 - RNA, 17 nt, Human
ucaaucuguaaacugug

SEQ ID NO: 2359013 - RNA, 20 nt, Human
acauugaaguaaugaauuuu

SEQ ID NO: 2359014 - RNA, 19 nt, Human
acauugaaguaaugaauuu

SEQ ID NO: 2359015 - RNA, 18 nt, Human
acauugaaguaaugaauu

SEQ ID NO: 2359016 - RNA, 15 nt, Human
acauugaaguaauga

SEQ ID NO: 2359017 - RNA, 12 nt, Human
acauugaaagag

SEQ ID NO: 2359018 - RNA, 19 nt, Human
acauucuuccaaaaagauu

SEQ ID NO: 2359019 - RNA, 23 nt, Human
acauucuuauaaauaugaagcuc

SEQ ID NO: 2359020 - RNA, 18 nt, Human
acauucuuauaaauauga

SEQ ID NO: 2359021 - RNA, 22 nt, Human
acauucuuauaaauaugaagcu

SEQ ID NO: 2359022 - RNA, 10 nt, Human
ucaaugaucu

SEQ ID NO: 2359023 - RNA, 11 nt, Human
ucaaugaucua

SEQ ID NO: 2359024 - RNA, 17 nt, Human
acauucuuauaaauaug

SEQ ID NO: 2359025 - RNA, 15 nt, Human
ucaaugacagagccu

SEQ ID NO: 2359026 - RNA, 23 nt, Human
ucaaugaaugaaugaauggcuaa

SEQ ID NO: 2359027 - RNA, 17 nt, Human
ucaaugacagagccuuc

SEQ ID NO: 2359028 - RNA, 18 nt, Human
ucaaugacagagccuucu

SEQ ID NO: 2359029 - RNA, 20 nt, Human
acauuuucacacaauacaau

SEQ ID NO: 2359030 - RNA, 15 nt, Human
acauuuucacacaau

SEQ ID NO: 2359031 - RNA, 13 nt, Human
acauuuucacaca

SEQ ID NO: 2359032 - RNA, 14 nt, Human
acauuguugagcua

SEQ ID NO: 2359033 - RNA, 19 nt, Human
acauuuuccuuuucaaaua

SEQ ID NO: 2359034 - RNA, 12 nt, Human
acauuuuccuuu

SEQ ID NO: 2359035 - RNA, 12 nt, Human
acauuuucauuu

SEQ ID NO: 2359036 - RNA, 17 nt, Human
acauuuuggugagaaau

SEQ ID NO: 2359037 - RNA, 14 nt, Human
acauuuugccaaaa

SEQ ID NO: 2359038 - RNA, 20 nt, Human
acauuuuguaacaaagaacu

SEQ ID NO: 2359039 - RNA, 20 nt, Human
acauuuuauuuuauuaugca

SEQ ID NO: 2359040 - RNA, 19 nt, Human
acauuuuauuuuauuaugc

SEQ ID NO: 2359041 - RNA, 14 nt, Human
acauuuuauuuuau

SEQ ID NO: 2359042 - RNA, 18 nt, Human
acauuuuauuuuauuaug

SEQ ID NO: 2359043 - RNA, 12 nt, Human
acauugucugcg

SEQ ID NO: 2359044 - RNA, 17 nt, Human
acauuguggcacauucu

SEQ ID NO: 2359045 - RNA, 20 nt, Human
acauuguucaauuagaauag

SEQ ID NO: 2359046 - RNA, 16 nt, Human
acauuguucaauuaga

SEQ ID NO: 2359047 - RNA, 22 nt, Human
acauugucucuaaauugugggu

SEQ ID NO: 2359048 - RNA, 17 nt, Human
acauuguugagcuauug

SEQ ID NO: 2359049 - RNA, 14 nt, Human
acauugucaauaaa

SEQ ID NO: 2359050 - RNA, 14 nt, Human
acauugucagcaaa

SEQ ID NO: 2359051 - RNA, 13 nt, Human
acauugucaauaa

SEQ ID NO: 2359052 - RNA, 12 nt, Human
acauugucaaua

SEQ ID NO: 2359053 - RNA, 22 nt, Human
acauugccuuuucuagcccgaa

SEQ ID NO: 2359054 - RNA, 18 nt, Human
acauugucagcaaauuaa

SEQ ID NO: 2359055 - RNA, 15 nt, Human
acauugucauuuaua

SEQ ID NO: 2359056 - RNA, 19 nt, Human
acauugucauuuauauaga

SEQ ID NO: 2359057 - RNA, 17 nt, Human
acauugucauuuauaua

SEQ ID NO: 2359058 - RNA, 19 nt, Human
acauugcauauaacuuaua

SEQ ID NO: 2359059 - RNA, 14 nt, Human
acauugaauuagaa

SEQ ID NO: 2359060 - RNA, 18 nt, Human
acauugaauuagaaacau

SEQ ID NO: 2359061 - RNA, 22 nt, Human
acauugaauuagaaacauaaau

SEQ ID NO: 2359062 - RNA, 15 nt, Human
accaaaagaacaaga

SEQ ID NO: 2359063 - RNA, 17 nt, Human
accaaaacugugcagag

SEQ ID NO: 2359064 - RNA, 12 nt, Human
accaaaacaugu

SEQ ID NO: 2359065 - RNA, 12 nt, Human
accaaaacugug

SEQ ID NO: 2359066 - RNA, 18 nt, Human
accaaaacugugcagagu

SEQ ID NO: 2359067 - RNA, 14 nt, Human
accaaaauccccuu

SEQ ID NO: 2359068 - RNA, 18 nt, Human
accaaaauaagaaaagau

SEQ ID NO: 2359069 - RNA, 17 nt, Human
accaaaauaagaaaaga

SEQ ID NO: 2359070 - RNA, 16 nt, Human
accaaaauaagaaaag

SEQ ID NO: 2359071 - RNA, 15 nt, Human
accaaaauaagaaaa

SEQ ID NO: 2359072 - RNA, 13 nt, Human
accaaaauaagaa

SEQ ID NO: 2359073 - RNA, 16 nt, Human
accaaaauuauuucag

SEQ ID NO: 2359074 - RNA, 23 nt, Human
accaaaccgccagcgaacuugac

SEQ ID NO: 2359075 - RNA, 14 nt, Human
accaaaccuagccc

SEQ ID NO: 2359076 - RNA, 16 nt, Human
accaaaauccccuucu

SEQ ID NO: 2359077 - RNA, 17 nt, Human
accaaaauccccuucuc

SEQ ID NO: 2359078 - RNA, 17 nt, Human
accaaaauuauuucaga

SEQ ID NO: 2359079 - RNA, 12 nt, Human
accaaagaagaa

SEQ ID NO: 2359080 - RNA, 13 nt, Human
accaaagaagaaa

SEQ ID NO: 2359081 - RNA, 18 nt, Human
accaaagagacuggagca

SEQ ID NO: 2359082 - RNA, 17 nt, Human
accaaagagacuggagc

SEQ ID NO: 2359083 - RNA, 22 nt, Human
accaaagauauauacacaggau

SEQ ID NO: 2359084 - RNA, 23 nt, Human
accaaagauauauacacaggauc

SEQ ID NO: 2359085 - RNA, 21 nt, Human
accaaagagacuggagcaucu

SEQ ID NO: 2359086 - RNA, 22 nt, Human
accaaagagacuggagcaucug

SEQ ID NO: 2359087 - RNA, 15 nt, Human
accaaagagggcuuc

SEQ ID NO: 2359088 - RNA, 18 nt, Human
accaaagagggcuuccuc

SEQ ID NO: 2359089 - RNA, 18 nt, Human
acauuuuggugagaaaug

SEQ ID NO: 2359090 - RNA, 12 nt, Human
acauuuuuacaa

SEQ ID NO: 2359091 - RNA, 19 nt, Human
acauuuuuaagugcugcau

SEQ ID NO: 2359092 - RNA, 23 nt, Human
acauuuuuaagugcugcauuuaa

SEQ ID NO: 2359093 - RNA, 22 nt, Human
acauuuuuaagugcugcauuua

SEQ ID NO: 2359094 - RNA, 21 nt, Human
acauuuuuaagugcugcauuu

SEQ ID NO: 2359095 - RNA, 21 nt, Human
acauuuuuuaaaugcaccugg

SEQ ID NO: 2359096 - RNA, 23 nt, Human
accaaaaaucucaauauuucaga

SEQ ID NO: 2359097 - RNA, 17 nt, Human
acauuuuuuaaaugcac

SEQ ID NO: 2359098 - RNA, 16 nt, Human
acauuuuuuaaaugca

SEQ ID NO: 2359099 - RNA, 14 nt, Human
acauuuuuuaaaug

SEQ ID NO: 2359100 - RNA, 16 nt, Human
ucacugucuuuccuag

SEQ ID NO: 2359101 - RNA, 15 nt, Human
ucacugucuuuccua

SEQ ID NO: 2359102 - RNA, 17 nt, Human
ucacugucuuuccuaga

SEQ ID NO: 2359103 - RNA, 13 nt, Human
ucacugcaggcac

SEQ ID NO: 2359104 - RNA, 22 nt, Human
ucacugcagccuccuucuccug

SEQ ID NO: 2359105 - RNA, 21 nt, Human
ucacugcaggcacucaaugca

SEQ ID NO: 2359106 - RNA, 15 nt, Human
ucacugcagccucaa

SEQ ID NO: 2359107 - RNA, 23 nt, Human
ucacuauggugccaauggaaccu

SEQ ID NO: 2359108 - RNA, 13 nt, Human
ucacugcagccuc

SEQ ID NO: 2359109 - RNA, 23 nt, Human
ucacuguugcccaggcuggcgug

SEQ ID NO: 2359110 - RNA, 15 nt, Human
ucacuguucccucug

SEQ ID NO: 2359111 - RNA, 17 nt, Human
ucacuguucccucugcu

SEQ ID NO: 2359112 - RNA, 16 nt, Human
ucacuguggugucugu

SEQ ID NO: 2359113 - RNA, 18 nt, Human
ucacugugggaaggccag

SEQ ID NO: 2359114 - RNA, 17 nt, Human
ucacugugguccuaugc

SEQ ID NO: 2359115 - RNA, 21 nt, Human
ucacugugggaaggccagcug

SEQ ID NO: 2359116 - RNA, 14 nt, Human
ucacuauggugcca

SEQ ID NO: 2359117 - RNA, 22 nt, Human
ucacuaugaaucuauuauacug

SEQ ID NO: 2359118 - RNA, 19 nt, Human
ucacuauggugccaaugga

SEQ ID NO: 2359119 - RNA, 16 nt, Human
ucacugagacagcccg

SEQ ID NO: 2359120 - RNA, 17 nt, Human
ucacuauaaaugguguu

SEQ ID NO: 2359121 - RNA, 20 nt, Human
ucacuacccuauucucucuu

SEQ ID NO: 2359122 - RNA, 19 nt, Human
ucacuaucccggcugcccu

SEQ ID NO: 2359123 - RNA, 13 nt, Human
ucacuauaaaugg

SEQ ID NO: 2359124 - RNA, 23 nt, Human
ucacuauaggucauacaauccau

SEQ ID NO: 2359125 - RNA, 21 nt, Human
ucacuauauaggcaucacauu

SEQ ID NO: 2359126 - RNA, 21 nt, Human
ucacuaugaaucuauuauacu

SEQ ID NO: 2359127 - RNA, 20 nt, Human
ucacuaucccggcugcccuu

SEQ ID NO: 2359128 - RNA, 14 nt, Human
ucacugcagccuca

SEQ ID NO: 2359129 - RNA, 22 nt, Human
ucacugagacagcccgggcucu

SEQ ID NO: 2359130 - RNA, 17 nt, Human
ucacugagacagcccgg

SEQ ID NO: 2359131 - RNA, 21 nt, Human
ucacugagacagcccgggcuc

SEQ ID NO: 2359132 - RNA, 15 nt, Human
accaguccccccacc

SEQ ID NO: 2359133 - RNA, 14 nt, Human
accagucugacugu

SEQ ID NO: 2359134 - RNA, 20 nt, Human
accaguaucgcucauagauc

SEQ ID NO: 2359135 - RNA, 14 nt, Human
accagucugacccu

SEQ ID NO: 2359136 - RNA, 17 nt, Human
accaguccccccacccu

SEQ ID NO: 2359137 - RNA, 14 nt, Human
accagugaaccaaa

SEQ ID NO: 2359138 - RNA, 16 nt, Human
accagugaaccaaaga

SEQ ID NO: 2359139 - RNA, 17 nt, Human
accagugaaccaaagag

SEQ ID NO: 2359140 - RNA, 13 nt, Human
accaguguccccu

SEQ ID NO: 2359141 - RNA, 18 nt, Human
accagugaaccaaagaga

SEQ ID NO: 2359142 - RNA, 18 nt, Human
accaguguccccuccacu

SEQ ID NO: 2359143 - RNA, 17 nt, Human
accaguguuguggauuu

SEQ ID NO: 2359144 - RNA, 15 nt, Human
accaguguuguggau

SEQ ID NO: 2359145 - RNA, 12 nt, Human
ucacuugagacc

SEQ ID NO: 2359146 - RNA, 14 nt, Human
ucacuugagacaaa

SEQ ID NO: 2359147 - RNA, 13 nt, Human
ucacuugaaugug

SEQ ID NO: 2359148 - RNA, 21 nt, Human
ucacuugaauccuagggccug

SEQ ID NO: 2359149 - RNA, 18 nt, Human
ucacuguuucucugcugu

SEQ ID NO: 2359150 - RNA, 23 nt, Human
ucacuugaacccgggaggcagag

SEQ ID NO: 2359151 - RNA, 17 nt, Human
ucacuguuucucugcug

SEQ ID NO: 2359152 - RNA, 14 nt, Human
ucacuguuucucug

SEQ ID NO: 2359153 - RNA, 16 nt, Human
ucacuguucccucugc

SEQ ID NO: 2359154 - RNA, 22 nt, Human
ucacuugaggucaggaguuccu

SEQ ID NO: 2359155 - RNA, 18 nt, Human
ucacuugaugugccauuu

SEQ ID NO: 2359156 - RNA, 19 nt, Human
ucacuugaugugccauuuu

SEQ ID NO: 2359157 - RNA, 10 nt, Human
ucacuugagu

SEQ ID NO: 2359158 - RNA, 15 nt, Human
accagcugccucuuc

SEQ ID NO: 2359159 - RNA, 16 nt, Human
accagcugccucuucu

SEQ ID NO: 2359160 - RNA, 16 nt, Human
accagcugcgcuugcu

SEQ ID NO: 2359161 - RNA, 14 nt, Human
accagcugccucuu

SEQ ID NO: 2359162 - RNA, 14 nt, Human
accagcuccucccu

SEQ ID NO: 2359163 - RNA, 23 nt, Human
accagcucaggacagaugccaca

SEQ ID NO: 2359164 - RNA, 13 nt, Human
accagcuccuccc

SEQ ID NO: 2359165 - RNA, 16 nt, Human
accagcuuagauuuua

SEQ ID NO: 2359166 - RNA, 22 nt, Human
accagcuguucugucccuugga

SEQ ID NO: 2359167 - RNA, 17 nt, Human
accagcuguaacacagc

SEQ ID NO: 2359168 - RNA, 21 nt, Human
accagcuggggcguggggagg

SEQ ID NO: 2359169 - RNA, 23 nt, Human
accagcuggggcguggggagggc

SEQ ID NO: 2359170 - RNA, 18 nt, Human
accagcugcgcuugcuuu

SEQ ID NO: 2359171 - RNA, 19 nt, Human
accagcugcgcuugcuuuu

SEQ ID NO: 2359172 - RNA, 20 nt, Human
accagcugcgcuugcuuuuc

SEQ ID NO: 2359173 - RNA, 10 nt, Human
accagcuggg

SEQ ID NO: 2359174 - RNA, 11 nt, Human
accagcugggg

SEQ ID NO: 2359175 - RNA, 20 nt, Human
accagcuggggcguggggag

SEQ ID NO: 2359176 - RNA, 15 nt, Human
accaggacaggacca

SEQ ID NO: 2359177 - RNA, 14 nt, Human
accaggacaggacc

SEQ ID NO: 2359178 - RNA, 17 nt, Human
accaggacaggaccaga

SEQ ID NO: 2359179 - RNA, 19 nt, Human
accaggacuauagcccagg

SEQ ID NO: 2359180 - RNA, 20 nt, Human
accaggacuauagcccaggu

SEQ ID NO: 2359181 - RNA, 21 nt, Human
accaggacuauagcccagguc

SEQ ID NO: 2359182 - RNA, 20 nt, Human
accaggaauguuaaagucag

SEQ ID NO: 2359183 - RNA, 17 nt, Human
accaggaaccucuucag

SEQ ID NO: 2359184 - RNA, 16 nt, Human
accagcuucuccaggc

SEQ ID NO: 2359185 - RNA, 18 nt, Human
accagcuucuccaggcuc

SEQ ID NO: 2359186 - RNA, 20 nt, Human
accagcuucuccaggcucuu

SEQ ID NO: 2359187 - RNA, 23 nt, Human
accagcuguucugucccuuggag

SEQ ID NO: 2359188 - RNA, 15 nt, Human
accagcuucuccagg

SEQ ID NO: 2359189 - RNA, 20 nt, Human
accacuagaacucuccaucu

SEQ ID NO: 2359190 - RNA, 13 nt, Human
accacuagaacuc

SEQ ID NO: 2359191 - RNA, 17 nt, Human
accacuaggacucugag

SEQ ID NO: 2359192 - RNA, 17 nt, Human
accacuacauucuguua

SEQ ID NO: 2359193 - RNA, 15 nt, Human
accacuacauucugu

SEQ ID NO: 2359194 - RNA, 13 nt, Human
accaccagaagcc

SEQ ID NO: 2359195 - RNA, 23 nt, Human
accaccacuggccaccaggcugg

SEQ ID NO: 2359196 - RNA, 24 nt, Human
accaccacuggccaccaggcuggc

SEQ ID NO: 2359197 - RNA, 16 nt, Human
accacuacauucuguu

SEQ ID NO: 2359198 - RNA, 15 nt, Human
accacuaugaagcua

SEQ ID NO: 2359199 - RNA, 17 nt, Human
accagcgcccgcugggc

SEQ ID NO: 2359200 - RNA, 18 nt, Human
accagcgcccgcugggcu

SEQ ID NO: 2359201 - RNA, 19 nt, Human
accagcgcccgcugggcug

SEQ ID NO: 2359202 - RNA, 20 nt, Human
accagcgcccgcugggcuga

SEQ ID NO: 2359203 - RNA, 22 nt, Human
accagcgugugacuacuccccc

SEQ ID NO: 2359204 - RNA, 16 nt, Human
accagcucaggacaga

SEQ ID NO: 2359205 - RNA, 15 nt, Human
accagcucaggacag

SEQ ID NO: 2359206 - RNA, 14 nt, Human
accagcucaggaca

SEQ ID NO: 2359207 - RNA, 13 nt, Human
accagcucaggac

SEQ ID NO: 2359208 - RNA, 22 nt, Human
accagcuaagaaaagauuuuaa

SEQ ID NO: 2359209 - RNA, 23 nt, Human
accagcuaagaaaagauuuuaau

SEQ ID NO: 2359210 - RNA, 23 nt, Human
accagcgcccgcugggcugagcc

SEQ ID NO: 2359211 - RNA, 19 nt, Human
ucacuacccuauucucucu

SEQ ID NO: 2359212 - RNA, 23 nt, Human
ucacuaggcccccacuugccucu

SEQ ID NO: 2359213 - RNA, 16 nt, Human
ucacuaggcuucuggu

SEQ ID NO: 2359214 - RNA, 22 nt, Human
ucacuaccauuguaacuuggau

SEQ ID NO: 2359215 - RNA, 13 nt, Human
ucacuaaacuuua

SEQ ID NO: 2359216 - RNA, 19 nt, Human
ucacuaauacuaauucauu

SEQ ID NO: 2359217 - RNA, 19 nt, Human
ucacguaaagcuagaaaug

SEQ ID NO: 2359218 - RNA, 20 nt, Human
ucacguaaagcuagaaauga

SEQ ID NO: 2359219 - RNA, 13 nt, Human
ucacgucacacuu

SEQ ID NO: 2359220 - RNA, 17 nt, Human
ucaccugucaggccuga

SEQ ID NO: 2359221 - RNA, 17 nt, Human
ucacgugcagcucaagg

SEQ ID NO: 2359222 - RNA, 17 nt, Human
ucacgugugugacucag

SEQ ID NO: 2359223 - RNA, 16 nt, Human
ucacgugugugacuca

SEQ ID NO: 2359224 - RNA, 22 nt, Human
ucacguuucauguaauccucaa

SEQ ID NO: 2359225 - RNA, 12 nt, Human
ucacguguguga

SEQ ID NO: 2359226 - RNA, 21 nt, Human
ucacguggaggagcagugcag

SEQ ID NO: 2359227 - RNA, 16 nt, Human
ucacguggaggagcag

SEQ ID NO: 2359228 - RNA, 18 nt, Human
ucacguaaagcuagaaau

SEQ ID NO: 2359229 - RNA, 14 nt, Human
ucaccugugcuucg

SEQ ID NO: 2359230 - RNA, 17 nt, Human
ucaccuguacucuuccg

SEQ ID NO: 2359231 - RNA, 18 nt, Human
ucaccuguacucuuccga

SEQ ID NO: 2359232 - RNA, 19 nt, Human
ucaccuggggugugggagg

SEQ ID NO: 2359233 - RNA, 22 nt, Human
ucaccuggggcugcuggccuga

SEQ ID NO: 2359234 - RNA, 16 nt, Human
ucaccuggggcugcug

SEQ ID NO: 2359235 - RNA, 17 nt, Human
ucaccuggggcugcugg

SEQ ID NO: 2359236 - RNA, 18 nt, Human
ucaccuggggcugcuggc

SEQ ID NO: 2359237 - RNA, 20 nt, Human
ucaccuggggcugcuggccu

SEQ ID NO: 2359238 - RNA, 19 nt, Human
ucaccuguaaaccugaguc

SEQ ID NO: 2359239 - RNA, 15 nt, Human
ucaccuguacucuuc

SEQ ID NO: 2359240 - RNA, 16 nt, Human
ucaccuguacucuucc

SEQ ID NO: 2359241 - RNA, 17 nt, Human
ucaccuguaaaccugag

SEQ ID NO: 2359242 - RNA, 16 nt, Human
ucaccuguaaaccuga

SEQ ID NO: 2359243 - RNA, 20 nt, Human
ucaccugggcaccuggggag

SEQ ID NO: 2359244 - RNA, 23 nt, Human
ucaccucaugcccacccccugcc

SEQ ID NO: 2359245 - RNA, 16 nt, Human
accaggacucccuccu

SEQ ID NO: 2359246 - RNA, 15 nt, Human
accaggacucccucc

SEQ ID NO: 2359247 - RNA, 14 nt, Human
accaggacucccuc

SEQ ID NO: 2359248 - RNA, 14 nt, Human
ucaccucauggaau

SEQ ID NO: 2359249 - RNA, 12 nt, Human
ucaccucaugga

SEQ ID NO: 2359250 - RNA, 13 nt, Human
ucaccucauggaa

SEQ ID NO: 2359251 - RNA, 14 nt, Human
ucacaaaauuuuau

SEQ ID NO: 2359252 - RNA, 17 nt, Human
ucacaaaaccuggcaca

SEQ ID NO: 2359253 - RNA, 21 nt, Human
ucacaaaaccuggcacaaugg

SEQ ID NO: 2359254 - RNA, 22 nt, Human
ucacaaaauuuuauuccuauau

SEQ ID NO: 2359255 - RNA, 17 nt, Human
ucacaaacuuuuauacu

SEQ ID NO: 2359256 - RNA, 15 nt, Human
ucacaaacuuuuaua

SEQ ID NO: 2359257 - RNA, 17 nt, Human
ucacaaaggaugcccaa

SEQ ID NO: 2359258 - RNA, 15 nt, Human
ucacaaagcccaagg

SEQ ID NO: 2359259 - RNA, 12 nt, Human
ucacaaagccca

SEQ ID NO: 2359260 - RNA, 21 nt, Human
ucacaaacuuuuauacucuuu

SEQ ID NO: 2359261 - RNA, 13 nt, Human
ucaauuuccaaga

SEQ ID NO: 2359262 - RNA, 18 nt, Human
ucaauuuccaagagcuga

SEQ ID NO: 2359263 - RNA, 20 nt, Human
ucaauuuccaagagcugagg

SEQ ID NO: 2359264 - RNA, 18 nt, Human
ucaauuucccugacuccu

SEQ ID NO: 2359265 - RNA, 21 nt, Human
ucaauuucccugacuccucua

SEQ ID NO: 2359266 - RNA, 20 nt, Human
ucaauuuauucaagaaaagu

SEQ ID NO: 2359267 - RNA, 20 nt, Human
ucaauuuguaauugcuuaca

SEQ ID NO: 2359268 - RNA, 23 nt, Human
ucaauuucuguguugccaagcuc

SEQ ID NO: 2359269 - RNA, 15 nt, Human
ucaauuucuguguug

SEQ ID NO: 2359270 - RNA, 14 nt, Human
ucaauuucucccca

SEQ ID NO: 2359271 - RNA, 15 nt, Human
ucaauuucuccccag

SEQ ID NO: 2359272 - RNA, 14 nt, Human
accaaagccaccag

SEQ ID NO: 2359273 - RNA, 20 nt, Human
accaaagcaccuuagcuggc

SEQ ID NO: 2359274 - RNA, 16 nt, Human
accaaagcgaauuuua

SEQ ID NO: 2359275 - RNA, 21 nt, Human
accaaaguccuuuuuuuccau

SEQ ID NO: 2359276 - RNA, 20 nt, Human
accaaaggugaaggaauaua

SEQ ID NO: 2359277 - RNA, 21 nt, Human
accaaaggugaaggaauauau

SEQ ID NO: 2359278 - RNA, 15 nt, Human
accaaaguauuuuuu

SEQ ID NO: 2359279 - RNA, 18 nt, Human
accaaaguauuuuuuuau

SEQ ID NO: 2359280 - RNA, 13 nt, Human
accaaaggccagg

SEQ ID NO: 2359281 - RNA, 17 nt, Human
accaaaggugaaggaau

SEQ ID NO: 2359282 - RNA, 18 nt, Human
accaaaggugaaggaaua

SEQ ID NO: 2359283 - RNA, 19 nt, Human
accaaaggugaaggaauau

SEQ ID NO: 2359284 - RNA, 16 nt, Human
ucaauucuugccaaau

SEQ ID NO: 2359285 - RNA, 18 nt, Human
ucaauuguaaauugaauc

SEQ ID NO: 2359286 - RNA, 14 nt, Human
ucaauuguaaauug

SEQ ID NO: 2359287 - RNA, 15 nt, Human
ucaauugaaugguca

SEQ ID NO: 2359288 - RNA, 13 nt, Human
ucaauuguaaauu

SEQ ID NO: 2359289 - RNA, 22 nt, Human
ucaauugcaucucccagauaau

SEQ ID NO: 2359290 - RNA, 18 nt, Human
ucaauugcaucucccaga

SEQ ID NO: 2359291 - RNA, 17 nt, Human
ucaauugcaucucccag

SEQ ID NO: 2359292 - RNA, 16 nt, Human
ucaauugcaucuccca

SEQ ID NO: 2359293 - RNA, 16 nt, Human
ucacaaccugaaccua

SEQ ID NO: 2359294 - RNA, 19 nt, Human
ucacaaccugaaccuagga

SEQ ID NO: 2359295 - RNA, 14 nt, Human
ucacaaccuucugu

SEQ ID NO: 2359296 - RNA, 14 nt, Human
ucacaaccugaacc

SEQ ID NO: 2359297 - RNA, 16 nt, Human
ucacaaagcccaaggg

SEQ ID NO: 2359298 - RNA, 21 nt, Human
ucacacugcaagagccuuggu

SEQ ID NO: 2359299 - RNA, 18 nt, Human
ucacacugcaagagccuu

SEQ ID NO: 2359300 - RNA, 14 nt, Human
ucacaagaagacca

SEQ ID NO: 2359301 - RNA, 20 nt, Human
ucacaacgugcauugugcuu

SEQ ID NO: 2359302 - RNA, 21 nt, Human
ucacaacgugcauugugcuuc

SEQ ID NO: 2359303 - RNA, 16 nt, Human
ucacaacgugcauugu

SEQ ID NO: 2359304 - RNA, 17 nt, Human
ucacaacgugcauugug

SEQ ID NO: 2359305 - RNA, 18 nt, Human
ucacaacgugcauugugc

SEQ ID NO: 2359306 - RNA, 19 nt, Human
ucacaacgugcauugugcu

SEQ ID NO: 2359307 - RNA, 20 nt, Human
ucacacugcaagagccuugg

SEQ ID NO: 2359308 - RNA, 11 nt, Human
ucacacuggga

SEQ ID NO: 2359309 - RNA, 16 nt, Human
ucacacuucugugaga

SEQ ID NO: 2359310 - RNA, 19 nt, Human
ucacacuuccaccagccug

SEQ ID NO: 2359311 - RNA, 18 nt, Human
ucacacuuccaccagccu

SEQ ID NO: 2359312 - RNA, 20 nt, Human
ucacagaugggugcuuggag

SEQ ID NO: 2359313 - RNA, 13 nt, Human
ucacagccucuga

SEQ ID NO: 2359314 - RNA, 11 nt, Human
ucacagccucu

SEQ ID NO: 2359315 - RNA, 12 nt, Human
ucacagccucug

SEQ ID NO: 2359316 - RNA, 16 nt, Human
ucacagccucugaccc

SEQ ID NO: 2359317 - RNA, 17 nt, Human
ucacagccucugacccc

SEQ ID NO: 2359318 - RNA, 18 nt, Human
ucacagccucugaccccu

SEQ ID NO: 2359319 - RNA, 19 nt, Human
ucacagccucugaccccuc

SEQ ID NO: 2359320 - RNA, 20 nt, Human
ucacagccucugaccccucc

SEQ ID NO: 2359321 - RNA, 21 nt, Human
ucacagccucugaccccuccu

SEQ ID NO: 2359322 - RNA, 16 nt, Human
ucacaguucucuccuu

SEQ ID NO: 2359323 - RNA, 20 nt, Human
ucacaguucucuccuucuuc

SEQ ID NO: 2359324 - RNA, 17 nt, Human
ucacagcacagagaaga

SEQ ID NO: 2359325 - RNA, 16 nt, Human
ucacagaaaugagauc

SEQ ID NO: 2359326 - RNA, 20 nt, Human
ucacacuuccaccagccugc

SEQ ID NO: 2359327 - RNA, 12 nt, Human
ucacagaaauga

SEQ ID NO: 2359328 - RNA, 18 nt, Human
ucacagcacagagaagac

SEQ ID NO: 2359329 - RNA, 15 nt, Human
ucacagcagcuucua

SEQ ID NO: 2359330 - RNA, 14 nt, Human
ucacagccuccucu

SEQ ID NO: 2359331 - RNA, 15 nt, Human
ucacagccuccucug

SEQ ID NO: 2359332 - RNA, 17 nt, Human
ucacagccuccucuguc

SEQ ID NO: 2359333 - RNA, 19 nt, Human
ucacagccuccucugucug

SEQ ID NO: 2359334 - RNA, 20 nt, Human
ucacagccuccucugucugc

SEQ ID NO: 2359335 - RNA, 22 nt, Human
ucacagccuccucugucugccc

SEQ ID NO: 2359336 - RNA, 23 nt, Human
ucacagaugugugauucacagug

SEQ ID NO: 2359337 - RNA, 23 nt, Human
ucacagcaagucacuggccagug

SEQ ID NO: 2359338 - RNA, 23 nt, Human
ucacacuucugugagacccccac

SEQ ID NO: 2359339 - RNA, 22 nt, Human
ucacacuucugugagaccccca

SEQ ID NO: 2359340 - RNA, 21 nt, Human
ucacagaugugugauucacag

SEQ ID NO: 2359341 - RNA, 21 nt, Human
ucaccauguuggccaggcugg

SEQ ID NO: 2359342 - RNA, 22 nt, Human
ucaccauguuggccaggcuggu

SEQ ID NO: 2359343 - RNA, 23 nt, Human
ucaccauuuggcaaugccaucau

SEQ ID NO: 2359344 - RNA, 19 nt, Human
ucacccaagcaaggccaaa

SEQ ID NO: 2359345 - RNA, 19 nt, Human
ucacccaagagauuguugu

SEQ ID NO: 2359346 - RNA, 22 nt, Human
ucaccauuugauuauguagcaa

SEQ ID NO: 2359347 - RNA, 17 nt, Human
ucaccauuugauuaugu

SEQ ID NO: 2359348 - RNA, 13 nt, Human
ucacccccaaggg

SEQ ID NO: 2359349 - RNA, 13 nt, Human
ucacccccagcuu

SEQ ID NO: 2359350 - RNA, 19 nt, Human
ucacccccaaggggcaguc

SEQ ID NO: 2359351 - RNA, 18 nt, Human
ucaccccccacacucacu

SEQ ID NO: 2359352 - RNA, 18 nt, Human
ucacccccagcuuugcua

SEQ ID NO: 2359353 - RNA, 13 nt, Human
ucacccccucggg

SEQ ID NO: 2359354 - RNA, 18 nt, Human
ucaccccccacucaccag

SEQ ID NO: 2359355 - RNA, 14 nt, Human
ucacccccucgggu

SEQ ID NO: 2359356 - RNA, 19 nt, Human
ucacccccucgggucuccu

SEQ ID NO: 2359357 - RNA, 13 nt, Human
ucaccccccacuc

SEQ ID NO: 2359358 - RNA, 14 nt, Human
ucaccccccacuca

SEQ ID NO: 2359359 - RNA, 19 nt, Human
ucaccccaucccacacccu

SEQ ID NO: 2359360 - RNA, 17 nt, Human
ucacccagacagcuccc

SEQ ID NO: 2359361 - RNA, 16 nt, Human
ucacccagacagcucc

SEQ ID NO: 2359362 - RNA, 14 nt, Human
ucacccacagggcu

SEQ ID NO: 2359363 - RNA, 12 nt, Human
ucacccacaggg

SEQ ID NO: 2359364 - RNA, 11 nt, Human
ucacccacagg

SEQ ID NO: 2359365 - RNA, 22 nt, Human
ucacccacagggcuaagagcua

SEQ ID NO: 2359366 - RNA, 15 nt, Human
ucacccacagggcua

SEQ ID NO: 2359367 - RNA, 15 nt, Human
ucaccauguuggcca

SEQ ID NO: 2359368 - RNA, 23 nt, Human
ucaccaucucaggccaccugccc

SEQ ID NO: 2359369 - RNA, 21 nt, Human
ucaccaucucaggccaccugc

SEQ ID NO: 2359370 - RNA, 14 nt, Human
ucaccaucugugca

SEQ ID NO: 2359371 - RNA, 15 nt, Human
ucaccaucuuggcca

SEQ ID NO: 2359372 - RNA, 17 nt, Human
ucaccaucucaggccac

SEQ ID NO: 2359373 - RNA, 15 nt, Human
ucacauagauguccc

SEQ ID NO: 2359374 - RNA, 16 nt, Human
ucacauacccuccccc

SEQ ID NO: 2359375 - RNA, 18 nt, Human
ucacauagagaucauccu

SEQ ID NO: 2359376 - RNA, 18 nt, Human
ucacauacaauuauuuuu

SEQ ID NO: 2359377 - RNA, 14 nt, Human
ucacauacccuccc

SEQ ID NO: 2359378 - RNA, 15 nt, Human
ucacauacccucccc

SEQ ID NO: 2359379 - RNA, 17 nt, Human
ucacauagaugucccuu

SEQ ID NO: 2359380 - RNA, 16 nt, Human
ucacauagaugucccu

SEQ ID NO: 2359381 - RNA, 17 nt, Human
ucacauaagcucagaau

SEQ ID NO: 2359382 - RNA, 19 nt, Human
ucacauaagcucagaaucc

SEQ ID NO: 2359383 - RNA, 20 nt, Human
ucacauaagcucagaaucca

SEQ ID NO: 2359384 - RNA, 18 nt, Human
ucacauaaaauagauuuu

SEQ ID NO: 2359385 - RNA, 17 nt, Human
ucacauaaaaccucauu

SEQ ID NO: 2359386 - RNA, 23 nt, Human
ucacaguuuugguugcuuuaaua

SEQ ID NO: 2359387 - RNA, 21 nt, Human
ucacaguuuugguugcuuuaa

SEQ ID NO: 2359388 - RNA, 22 nt, Human
ucacaguuggcuggaugaaauu

SEQ ID NO: 2359389 - RNA, 23 nt, Human
ucacagaaaugagaucaggcucu

SEQ ID NO: 2359390 - RNA, 22 nt, Human
ucacagccucugaccccuccuc

SEQ ID NO: 2359391 - RNA, 13 nt, Human
ucacagcggaggu

SEQ ID NO: 2359392 - RNA, 20 nt, Human
ucacaguucuuugggccaga

SEQ ID NO: 2359393 - RNA, 19 nt, Human
ucacaguucuuugggccag

SEQ ID NO: 2359394 - RNA, 22 nt, Human
ucacaguucuuugggccagaca

SEQ ID NO: 2359395 - RNA, 13 nt, Human
ucacaguugacaa

SEQ ID NO: 2359396 - RNA, 17 nt, Human
ucacaguuggccuucag

SEQ ID NO: 2359397 - RNA, 20 nt, Human
ucacaguuuugguugcuuua

SEQ ID NO: 2359398 - RNA, 15 nt, Human
accaccacacccagc

SEQ ID NO: 2359399 - RNA, 20 nt, Human
accaccacacccagcccacu

SEQ ID NO: 2359400 - RNA, 14 nt, Human
accaccacuggcca

SEQ ID NO: 2359401 - RNA, 15 nt, Human
accaccacuggccac

SEQ ID NO: 2359402 - RNA, 16 nt, Human
accaccacuggccacc

SEQ ID NO: 2359403 - RNA, 20 nt, Human
accaccacuggccaccaggc

SEQ ID NO: 2359404 - RNA, 21 nt, Human
accaccacuggccaccaggcu

SEQ ID NO: 2359405 - RNA, 22 nt, Human
accaccacuggccaccaggcug

SEQ ID NO: 2359406 - RNA, 16 nt, Human
accaccaagccaaggg

SEQ ID NO: 2359407 - RNA, 18 nt, Human
accacaugugcacaugca

SEQ ID NO: 2359408 - RNA, 22 nt, Human
accacagguucaugccaccaug

SEQ ID NO: 2359409 - RNA, 22 nt, Human
accacaugccaagcacugugcu

SEQ ID NO: 2359410 - RNA, 19 nt, Human
accacauuuuauauuuauu

SEQ ID NO: 2359411 - RNA, 18 nt, Human
accacaugcggagaacaa

SEQ ID NO: 2359412 - RNA, 24 nt, Human
accacauuggagauguuuaguaau

SEQ ID NO: 2359413 - RNA, 17 nt, Human
accacaucuugcucugc

SEQ ID NO: 2359414 - RNA, 17 nt, Human
accacaggguucaaaau

SEQ ID NO: 2359415 - RNA, 23 nt, Human
accacaggguucaaaaugucugu

SEQ ID NO: 2359416 - RNA, 22 nt, Human
accacaggguucaaaaugucug

SEQ ID NO: 2359417 - RNA, 18 nt, Human
accacaucuugcucugcu

SEQ ID NO: 2359418 - RNA, 19 nt, Human
accacaucuugcucugcug

SEQ ID NO: 2359419 - RNA, 13 nt, Human
accacagcccugu

SEQ ID NO: 2359420 - RNA, 20 nt, Human
accacagccagcaccuggca

SEQ ID NO: 2359421 - RNA, 18 nt, Human
ucacccccuucuccaucc

SEQ ID NO: 2359422 - RNA, 19 nt, Human
accacagccagcaccuggc

SEQ ID NO: 2359423 - RNA, 22 nt, Human
ucacccccuucuccauccacau

SEQ ID NO: 2359424 - RNA, 16 nt, Human
ucacccccuucuccau

SEQ ID NO: 2359425 - RNA, 13 nt, Human
ucacccccuucuc

SEQ ID NO: 2359426 - RNA, 17 nt, Human
accacagcccugucagu

SEQ ID NO: 2359427 - RNA, 16 nt, Human
accacagcccugucag

SEQ ID NO: 2359428 - RNA, 15 nt, Human
accacagcccuguca

SEQ ID NO: 2359429 - RNA, 14 nt, Human
accacagcccuguc

SEQ ID NO: 2359430 - RNA, 12 nt, Human
accacagcugcu

SEQ ID NO: 2359431 - RNA, 13 nt, Human
accacagcugcug

SEQ ID NO: 2359432 - RNA, 14 nt, Human
accacagcugcugg

SEQ ID NO: 2359433 - RNA, 15 nt, Human
accacagcugcugga

SEQ ID NO: 2359434 - RNA, 16 nt, Human
accacagcugcuggag

SEQ ID NO: 2359435 - RNA, 21 nt, Human
accacaggcccuuuccucagg

SEQ ID NO: 2359436 - RNA, 22 nt, Human
accacaggcccuuuccucaggc

SEQ ID NO: 2359437 - RNA, 13 nt, Human
aauauuuugucua

SEQ ID NO: 2359438 - RNA, 14 nt, Human
aauauuuugucuaa

SEQ ID NO: 2359439 - RNA, 15 nt, Human
aauauuuugucuaaa

SEQ ID NO: 2359440 - RNA, 20 nt, Human
aauauuuugcuaguuuuuga

SEQ ID NO: 2359441 - RNA, 12 nt, Human
aauauuugcuga

SEQ ID NO: 2359442 - RNA, 20 nt, Human
aauauuugaaucuugucuca

SEQ ID NO: 2359443 - RNA, 14 nt, Human
aauauuuguacaua

SEQ ID NO: 2359444 - RNA, 12 nt, Human
aauauuuguaca

SEQ ID NO: 2359445 - RNA, 14 nt, Human
aauauuuuuagaua

SEQ ID NO: 2359446 - RNA, 17 nt, Human
aauauuuuuaauauaua

SEQ ID NO: 2359447 - RNA, 16 nt, Human
aauauuuugucuaaaa

SEQ ID NO: 2359448 - RNA, 19 nt, Human
aauauuuugucuaaaaugc

SEQ ID NO: 2359449 - RNA, 20 nt, Human
aauauuuugucuaaaaugcc

SEQ ID NO: 2359450 - RNA, 21 nt, Human
aauauuuugucuaaaaugccu

SEQ ID NO: 2359451 - RNA, 13 nt, Human
aauauuuuucuua

SEQ ID NO: 2359452 - RNA, 23 nt, Human
aauauuuuugaaaggcauguucc

SEQ ID NO: 2359453 - RNA, 17 nt, Human
aauauuuuuuauauaua

SEQ ID NO: 2359454 - RNA, 22 nt, Human
aauauuuuuauagauuugaccu

SEQ ID NO: 2359455 - RNA, 16 nt, Human
aaucaggguuaguauu

SEQ ID NO: 2359456 - RNA, 21 nt, Human
aaucaggguuaguauugucca

SEQ ID NO: 2359457 - RNA, 21 nt, Human
uaagauggauucucagauauu

SEQ ID NO: 2359458 - RNA, 14 nt, Human
uaagauuccagaga

SEQ ID NO: 2359459 - RNA, 21 nt, Human
uaagauuccagagaguggcuc

SEQ ID NO: 2359460 - RNA, 22 nt, Human
uaagauggauucucagauauuu

SEQ ID NO: 2359461 - RNA, 18 nt, Human
uaagaugggcagcuaguu

SEQ ID NO: 2359462 - RNA, 20 nt, Human
uaagauggauucucagauau

SEQ ID NO: 2359463 - RNA, 18 nt, Human
uaagauggauucucagau

SEQ ID NO: 2359464 - RNA, 17 nt, Human
uaagauggauucucaga

SEQ ID NO: 2359465 - RNA, 15 nt, Human
uaagauggauucuca

SEQ ID NO: 2359466 - RNA, 23 nt, Human
uaagaugcuaccuugugacccag

SEQ ID NO: 2359467 - RNA, 24 nt, Human
uaagaugcucuaucuugcucugua

SEQ ID NO: 2359468 - RNA, 11 nt, Human
uaagaugcugg

SEQ ID NO: 2359469 - RNA, 12 nt, Human
uaagaugcuggg

SEQ ID NO: 2359470 - RNA, 13 nt, Human
uaagaugcugggu

SEQ ID NO: 2359471 - RNA, 17 nt, Human
uaagauggaagcuucca

SEQ ID NO: 2359472 - RNA, 18 nt, Human
uaagauggaagcuuccag

SEQ ID NO: 2359473 - RNA, 19 nt, Human
uaagauggaagcuuccagu

SEQ ID NO: 2359474 - RNA, 17 nt, Human
uaagaugcuaccuugug

SEQ ID NO: 2359475 - RNA, 16 nt, Human
uaagaugacauugcua

SEQ ID NO: 2359476 - RNA, 17 nt, Human
uaagaugacauugcuaa

SEQ ID NO: 2359477 - RNA, 18 nt, Human
aauauuuuuucuuuucua

SEQ ID NO: 2359478 - RNA, 19 nt, Human
aauauuuuuuauauauaca

SEQ ID NO: 2359479 - RNA, 21 nt, Human
aauauuuuuuauauauacagu

SEQ ID NO: 2359480 - RNA, 22 nt, Human
aaucaggguuaguauuguccag

SEQ ID NO: 2359481 - RNA, 15 nt, Human
uaagauuuuucucaa

SEQ ID NO: 2359482 - RNA, 19 nt, Human
uaagauuuagagaugaauu

SEQ ID NO: 2359483 - RNA, 23 nt, Human
uaagcaaagggagcacuggguug

SEQ ID NO: 2359484 - RNA, 16 nt, Human
uaagauuuuucucaaa

SEQ ID NO: 2359485 - RNA, 18 nt, Human
uaagauuuuucucaaagu

SEQ ID NO: 2359486 - RNA, 20 nt, Human
uaagauuuuucucaaaguuu

SEQ ID NO: 2359487 - RNA, 21 nt, Human
uaagauuuuucucaaaguuuu

SEQ ID NO: 2359488 - RNA, 23 nt, Human
uaagcaacaucuagcaaauguua

SEQ ID NO: 2359489 - RNA, 18 nt, Human
uaagcacacuugacauca

SEQ ID NO: 2359490 - RNA, 13 nt, Human
uaagcuguaaaaa

SEQ ID NO: 2359491 - RNA, 12 nt, Human
uaagcuguaaaa

SEQ ID NO: 2359492 - RNA, 17 nt, Human
uaagcagaggaggggcc

SEQ ID NO: 2359493 - RNA, 16 nt, Human
uaagcugcucuauugu

SEQ ID NO: 2359494 - RNA, 13 nt, Human
uaagcagaggagg

SEQ ID NO: 2359495 - RNA, 16 nt, Human
uaagcagaggaggggc

SEQ ID NO: 2359496 - RNA, 15 nt, Human
uaagcagaggagggg

SEQ ID NO: 2359497 - RNA, 22 nt, Human
uaagcagauggaaugcuguguu

SEQ ID NO: 2359498 - RNA, 14 nt, Human
uaagcugaaaauau

SEQ ID NO: 2359499 - RNA, 11 nt, Human
uaagcuguuuc

SEQ ID NO: 2359500 - RNA, 16 nt, Human
uaagcuguuuccauag

SEQ ID NO: 2359501 - RNA, 15 nt, Human
uaagcuguaaaaaga

SEQ ID NO: 2359502 - RNA, 13 nt, Human
uaagcuguuuauu

SEQ ID NO: 2359503 - RNA, 21 nt, Human
uaagcuguuuauuuuauauua

SEQ ID NO: 2359504 - RNA, 22 nt, Human
uaagcuguuacugucuucagua

SEQ ID NO: 2359505 - RNA, 18 nt, Human
uaagcaagagagauguuu

SEQ ID NO: 2359506 - RNA, 13 nt, Human
uaagcaagagaga

SEQ ID NO: 2359507 - RNA, 13 nt, Human
uaagcacuacaua

SEQ ID NO: 2359508 - RNA, 16 nt, Human
uaagcacuacauaaac

SEQ ID NO: 2359509 - RNA, 17 nt, Human
uaagcacuacauaaacu

SEQ ID NO: 2359510 - RNA, 22 nt, Human
uaagcacuacauaaacugacuu

SEQ ID NO: 2359511 - RNA, 13 nt, Human
uaagcacugugcu

SEQ ID NO: 2359512 - RNA, 14 nt, Human
uaagcacugugcua

SEQ ID NO: 2359513 - RNA, 17 nt, Human
uaagcacugugcuaaua

SEQ ID NO: 2359514 - RNA, 16 nt, Human
uaagcacugugcuaau

SEQ ID NO: 2359515 - RNA, 20 nt, Human
uaagcagaccacugauaaaa

SEQ ID NO: 2359516 - RNA, 17 nt, Human
uaagcagaccacugaua

SEQ ID NO: 2359517 - RNA, 19 nt, Human
aauauuuaaacagcagugu

SEQ ID NO: 2359518 - RNA, 13 nt, Human
aauauuuaaacau

SEQ ID NO: 2359519 - RNA, 12 nt, Human
aauauuuaagac

SEQ ID NO: 2359520 - RNA, 22 nt, Human
aauauuuaaacaugguuacaau

SEQ ID NO: 2359521 - RNA, 23 nt, Human
aauauugugaagaaaaauaaagu

SEQ ID NO: 2359522 - RNA, 17 nt, Human
aauauuguguugugaau

SEQ ID NO: 2359523 - RNA, 16 nt, Human
aauauugucauuccug

SEQ ID NO: 2359524 - RNA, 13 nt, Human
aauauuguccauu

SEQ ID NO: 2359525 - RNA, 23 nt, Human
aauauuguacaguuuuuauugcu

SEQ ID NO: 2359526 - RNA, 15 nt, Human
aauauuguacaguuu

SEQ ID NO: 2359527 - RNA, 17 nt, Human
aauauuguacaguuuuu

SEQ ID NO: 2359528 - RNA, 14 nt, Human
aauauugacuuugu

SEQ ID NO: 2359529 - RNA, 17 nt, Human
aauauugacuuguauau

SEQ ID NO: 2359530 - RNA, 14 nt, Human
aauauugacuugua

SEQ ID NO: 2359531 - RNA, 15 nt, Human
aauauugaacuuuuu

SEQ ID NO: 2359532 - RNA, 15 nt, Human
aauauugacuuuguc

SEQ ID NO: 2359533 - RNA, 16 nt, Human
aauauugacuuugucu

SEQ ID NO: 2359534 - RNA, 19 nt, Human
aauauugagaaagaaacua

SEQ ID NO: 2359535 - RNA, 16 nt, Human
aauauugagaaagaaa

SEQ ID NO: 2359536 - RNA, 14 nt, Human
aauauuguacaguu

SEQ ID NO: 2359537 - RNA, 20 nt, Human
aauauugagaaagaaacuaa

SEQ ID NO: 2359538 - RNA, 15 nt, Human
aauauuuacauauga

SEQ ID NO: 2359539 - RNA, 14 nt, Human
aauauuuagcaaau

SEQ ID NO: 2359540 - RNA, 17 nt, Human
aauauuuauaaaacuuc

SEQ ID NO: 2359541 - RNA, 16 nt, Human
aauauuuauaaaacuu

SEQ ID NO: 2359542 - RNA, 13 nt, Human
aauauuuauaaaa

SEQ ID NO: 2359543 - RNA, 20 nt, Human
aauauuuagcaaauaauuuc

SEQ ID NO: 2359544 - RNA, 18 nt, Human
aauauuuauuuuaauaau

SEQ ID NO: 2359545 - RNA, 17 nt, Human
aauauuuaagauaguuu

SEQ ID NO: 2359546 - RNA, 15 nt, Human
aauauuuaaacaugg

SEQ ID NO: 2359547 - RNA, 12 nt, Human
aauauuuagugu

SEQ ID NO: 2359548 - RNA, 14 nt, Human
aauauuugaaugua

SEQ ID NO: 2359549 - RNA, 16 nt, Human
aauauuugaaucuugu

SEQ ID NO: 2359550 - RNA, 16 nt, Human
aauauuucaagacauu

SEQ ID NO: 2359551 - RNA, 14 nt, Human
aauauuucaagaca

SEQ ID NO: 2359552 - RNA, 15 nt, Human
aauauuucaagacau

SEQ ID NO: 2359553 - RNA, 23 nt, Human
aauauuugaauguaugcuucaua

SEQ ID NO: 2359554 - RNA, 21 nt, Human
aauauuugaauguaugcuuca

SEQ ID NO: 2359555 - RNA, 19 nt, Human
aauauuuauaaaacuucuc

SEQ ID NO: 2359556 - RNA, 14 nt, Human
aauauuucagauaa

SEQ ID NO: 2359557 - RNA, 19 nt, Human
aauauuuauuuuaauaaug

SEQ ID NO: 2359558 - RNA, 23 nt, Human
aauauucuauuuucauuuucugc

SEQ ID NO: 2359559 - RNA, 15 nt, Human
aauauuccugaauga

SEQ ID NO: 2359560 - RNA, 16 nt, Human
aauauucuauaugaau

SEQ ID NO: 2359561 - RNA, 20 nt, Human
aauauucuauaugaauuuaa

SEQ ID NO: 2359562 - RNA, 15 nt, Human
aauauuccugcauuu

SEQ ID NO: 2359563 - RNA, 12 nt, Human
aauauuccagag

SEQ ID NO: 2359564 - RNA, 18 nt, Human
aauauucauaguuuaauu

SEQ ID NO: 2359565 - RNA, 12 nt, Human
aauauuccugaa

SEQ ID NO: 2359566 - RNA, 20 nt, Human
aauauuccccuaucucuaga

SEQ ID NO: 2359567 - RNA, 17 nt, Human
aauauucccuagaaacu

SEQ ID NO: 2359568 - RNA, 13 nt, Human
aauauucccaagc

SEQ ID NO: 2359569 - RNA, 15 nt, Human
aauauucccuagaaa

SEQ ID NO: 2359570 - RNA, 20 nt, Human
aauaugcaucuaauaaaaaa

SEQ ID NO: 2359571 - RNA, 16 nt, Human
aauaugccucuccuuu

SEQ ID NO: 2359572 - RNA, 19 nt, Human
aauaugccucuccuuugua

SEQ ID NO: 2359573 - RNA, 22 nt, Human
aauaugcagugauauggcagaa

SEQ ID NO: 2359574 - RNA, 15 nt, Human
aauaugcaguucugc

SEQ ID NO: 2359575 - RNA, 17 nt, Human
aauaugccuuuuugaag

SEQ ID NO: 2359576 - RNA, 21 nt, Human
aauaugccucuccuuuguaua

SEQ ID NO: 2359577 - RNA, 23 nt, Human
aauaugccucuccuuuguauauu

SEQ ID NO: 2359578 - RNA, 21 nt, Human
aauaugccccauucaacaucu

SEQ ID NO: 2359579 - RNA, 24 nt, Human
aauaugccccauucaacaucuagu

SEQ ID NO: 2359580 - RNA, 19 nt, Human
uaagagaauauuuuaagua

SEQ ID NO: 2359581 - RNA, 13 nt, Human
uaagagacaguca

SEQ ID NO: 2359582 - RNA, 22 nt, Human
aauaugcacacauuuuuuaaau

SEQ ID NO: 2359583 - RNA, 17 nt, Human
aauaugcacacauuuuu

SEQ ID NO: 2359584 - RNA, 16 nt, Human
aauaugcacacauuuu

SEQ ID NO: 2359585 - RNA, 20 nt, Human
uaagacuuugggauaggaaa

SEQ ID NO: 2359586 - RNA, 19 nt, Human
uaagacaugauuuccuuga

SEQ ID NO: 2359587 - RNA, 17 nt, Human
uaagacaugauuuccuu

SEQ ID NO: 2359588 - RNA, 22 nt, Human
uaagacauaacguuuuuccuuu

SEQ ID NO: 2359589 - RNA, 15 nt, Human
uaagagaaaugagcu

SEQ ID NO: 2359590 - RNA, 15 nt, Human
uaagacuuugggaua

SEQ ID NO: 2359591 - RNA, 13 nt, Human
uaagagaaagaaa

SEQ ID NO: 2359592 - RNA, 18 nt, Human
uaagagaaagaaaaugaa

SEQ ID NO: 2359593 - RNA, 19 nt, Human
aauauauuuguguauuuaa

SEQ ID NO: 2359594 - RNA, 21 nt, Human
aauauauuuguguauuuaaca

SEQ ID NO: 2359595 - RNA, 18 nt, Human
aauauauuuuaagacgaa

SEQ ID NO: 2359596 - RNA, 20 nt, Human
aauaucacuugucaauaaaa

SEQ ID NO: 2359597 - RNA, 13 nt, Human
aauaucagacuuu

SEQ ID NO: 2359598 - RNA, 20 nt, Human
aauaucagcaagucucuuua

SEQ ID NO: 2359599 - RNA, 24 nt, Human
aauauauuuguguauuuaacaggg

SEQ ID NO: 2359600 - RNA, 15 nt, Human
aauaucagacuagug

SEQ ID NO: 2359601 - RNA, 22 nt, Human
aauaucacuugucaauaaaauc

SEQ ID NO: 2359602 - RNA, 21 nt, Human
uaacaguuuuccaugaaaacg

SEQ ID NO: 2359603 - RNA, 19 nt, Human
uaacaguuuuccaugaaaa

SEQ ID NO: 2359604 - RNA, 17 nt, Human
uaacaguuuuccaugaa

SEQ ID NO: 2359605 - RNA, 16 nt, Human
uaacaguuuuccauga

SEQ ID NO: 2359606 - RNA, 15 nt, Human
uaacaguuuuccaug

SEQ ID NO: 2359607 - RNA, 14 nt, Human
uaacaguuuuccau

SEQ ID NO: 2359608 - RNA, 13 nt, Human
uaacaguuuucca

SEQ ID NO: 2359609 - RNA, 14 nt, Human
uaacaguucauguu

SEQ ID NO: 2359610 - RNA, 18 nt, Human
uaacaguucauguuugcu

SEQ ID NO: 2359611 - RNA, 22 nt, Human
aauaucaguuacucagcccugg

SEQ ID NO: 2359612 - RNA, 19 nt, Human
aauaucaguuacucagccc

SEQ ID NO: 2359613 - RNA, 19 nt, Human
aauaucaguagaaacucua

SEQ ID NO: 2359614 - RNA, 21 nt, Human
aauaucaguuacucagcccug

SEQ ID NO: 2359615 - RNA, 16 nt, Human
aauaucaucaguauug

SEQ ID NO: 2359616 - RNA, 21 nt, Human
uaacagugcauauuccuuucu

SEQ ID NO: 2359617 - RNA, 18 nt, Human
uaacauggacaugaucuu

SEQ ID NO: 2359618 - RNA, 17 nt, Human
uaacauguaauuaagua

SEQ ID NO: 2359619 - RNA, 23 nt, Human
uaacauggacaugaucuucuuua

SEQ ID NO: 2359620 - RNA, 23 nt, Human
uaacauccuuucuauugaaaaau

SEQ ID NO: 2359621 - RNA, 14 nt, Human
uaacauauuuacua

SEQ ID NO: 2359622 - RNA, 22 nt, Human
uaacauauuuacuaagccacaa

SEQ ID NO: 2359623 - RNA, 23 nt, Human
uaacauauuuacuaagccacaag

SEQ ID NO: 2359624 - RNA, 13 nt, Human
uaacaucugagaa

SEQ ID NO: 2359625 - RNA, 14 nt, Human
uaacaucuaaaaau

SEQ ID NO: 2359626 - RNA, 20 nt, Human
uaacaucuaaaaauagacuu

SEQ ID NO: 2359627 - RNA, 13 nt, Human
uaacauauuuacu

SEQ ID NO: 2359628 - RNA, 14 nt, Human
uaacauauaauguu

SEQ ID NO: 2359629 - RNA, 23 nt, Human
uaacauauaauguuguuauuuaa

SEQ ID NO: 2359630 - RNA, 20 nt, Human
uaacaguuuuccaugaaaac

SEQ ID NO: 2359631 - RNA, 16 nt, Human
aauaguugagccagca

SEQ ID NO: 2359632 - RNA, 18 nt, Human
aauaguugagccagcaga

SEQ ID NO: 2359633 - RNA, 19 nt, Human
aauaguugagccagcagac

SEQ ID NO: 2359634 - RNA, 20 nt, Human
aauaguugagccagcagaca

SEQ ID NO: 2359635 - RNA, 21 nt, Human
aauaguugagccagcagacau

SEQ ID NO: 2359636 - RNA, 13 nt, Human
aauaguuggcuag

SEQ ID NO: 2359637 - RNA, 13 nt, Human
aauaguguguucu

SEQ ID NO: 2359638 - RNA, 22 nt, Human
aauaguguggaaauuaagaaga

SEQ ID NO: 2359639 - RNA, 20 nt, Human
aauaguguggaaauuaagaa

SEQ ID NO: 2359640 - RNA, 19 nt, Human
aauaguguggaaauuaaga

SEQ ID NO: 2359641 - RNA, 17 nt, Human
aauaguguguucugauu

SEQ ID NO: 2359642 - RNA, 15 nt, Human
aauaguguguucuga

SEQ ID NO: 2359643 - RNA, 14 nt, Human
aauaguguguucug

SEQ ID NO: 2359644 - RNA, 13 nt, Human
aauauauuugugu

SEQ ID NO: 2359645 - RNA, 14 nt, Human
aauauauuugugua

SEQ ID NO: 2359646 - RNA, 19 nt, Human
aauaguuuacauguaguag

SEQ ID NO: 2359647 - RNA, 15 nt, Human
aauauauuucagaua

SEQ ID NO: 2359648 - RNA, 14 nt, Human
aauaguuguugauu

SEQ ID NO: 2359649 - RNA, 22 nt, Human
aauaguugagccagcagacauu

SEQ ID NO: 2359650 - RNA, 23 nt, Human
aauaguugagccagcagacauug

SEQ ID NO: 2359651 - RNA, 14 nt, Human
aauaguugagcccc

SEQ ID NO: 2359652 - RNA, 14 nt, Human
aauauauuuuaaga

SEQ ID NO: 2359653 - RNA, 15 nt, Human
aauauauuuuaagac

SEQ ID NO: 2359654 - RNA, 23 nt, Human
uaaaauuuauugcuugauacuuu

SEQ ID NO: 2359655 - RNA, 17 nt, Human
uaaaauuuaaguaucuu

SEQ ID NO: 2359656 - RNA, 13 nt, Human
uaaaauuucaaca

SEQ ID NO: 2359657 - RNA, 16 nt, Human
uaaaauuugcccuccc

SEQ ID NO: 2359658 - RNA, 21 nt, Human
uaaaauuugcccucccauccc

SEQ ID NO: 2359659 - RNA, 16 nt, Human
aauagucaaauugugu

SEQ ID NO: 2359660 - RNA, 20 nt, Human
aauaguauuugagaguucua

SEQ ID NO: 2359661 - RNA, 22 nt, Human
aauaguauuugagaguucuaaa

SEQ ID NO: 2359662 - RNA, 12 nt, Human
aauaguguggaa

SEQ ID NO: 2359663 - RNA, 22 nt, Human
aauaguggugugauuuggggau

SEQ ID NO: 2359664 - RNA, 16 nt, Human
aauaguggugugauuu

SEQ ID NO: 2359665 - RNA, 23 nt, Human
aauaguauuugagaguucuaaau

SEQ ID NO: 2359666 - RNA, 18 nt, Human
uaacauggugugcuucuu

SEQ ID NO: 2359667 - RNA, 21 nt, Human
uaaccuuaccagauuuuuaca

SEQ ID NO: 2359668 - RNA, 20 nt, Human
uaacgauaaaagacagugaa

SEQ ID NO: 2359669 - RNA, 23 nt, Human
uaacgacuucagggcagggcucu

SEQ ID NO: 2359670 - RNA, 14 nt, Human
uaacgacuucaggg

SEQ ID NO: 2359671 - RNA, 17 nt, Human
uaacgaccacagggucu

SEQ ID NO: 2359672 - RNA, 15 nt, Human
uaacuagaauuuauu

SEQ ID NO: 2359673 - RNA, 17 nt, Human
uaacuagaauuuauuca

SEQ ID NO: 2359674 - RNA, 18 nt, Human
uaacuagaauuuauucaa

SEQ ID NO: 2359675 - RNA, 18 nt, Human
uaacuuaaaaaaaugaca

SEQ ID NO: 2359676 - RNA, 17 nt, Human
uaacuuaaaaauguaaa

SEQ ID NO: 2359677 - RNA, 19 nt, Human
uaacuuaaaaauguaaaua

SEQ ID NO: 2359678 - RNA, 21 nt, Human
uaacuguuauuuauaaucacu

SEQ ID NO: 2359679 - RNA, 18 nt, Human
uaacuagagcagcccugg

SEQ ID NO: 2359680 - RNA, 21 nt, Human
uaacuagagcagcccuggagu

SEQ ID NO: 2359681 - RNA, 16 nt, Human
uaacuuaaaauauuuu

SEQ ID NO: 2359682 - RNA, 23 nt, Human
uaacuuaaaaauguaaauauucu

SEQ ID NO: 2359683 - RNA, 20 nt, Human
uaacuuaaaaauguaaauau

SEQ ID NO: 2359684 - RNA, 21 nt, Human
uaacuuaaaaauguaaauauu

SEQ ID NO: 2359685 - RNA, 22 nt, Human
uaacuuaaaagaacauguauau

SEQ ID NO: 2359686 - RNA, 16 nt, Human
uaacuuaauaguauuu

SEQ ID NO: 2359687 - RNA, 14 nt, Human
uaacuuaaucaauu

SEQ ID NO: 2359688 - RNA, 13 nt, Human
uaacuucacauau

SEQ ID NO: 2359689 - RNA, 21 nt, Human
uaacuucacauauugauuucc

SEQ ID NO: 2359690 - RNA, 17 nt, Human
uaacuuccaauuuacau

SEQ ID NO: 2359691 - RNA, 14 nt, Human
uaacuucaccauau

SEQ ID NO: 2359692 - RNA, 22 nt, Human
uaacuugagaguagaugguuug

SEQ ID NO: 2359693 - RNA, 22 nt, Human
uaacuugaggguaauaaacuua

SEQ ID NO: 2359694 - RNA, 15 nt, Human
uaacuugaguuuuau

SEQ ID NO: 2359695 - RNA, 21 nt, Human
uaacuugaguuuuauuuauuu

SEQ ID NO: 2359696 - RNA, 15 nt, Human
uaacuugcaccucug

SEQ ID NO: 2359697 - RNA, 15 nt, Human
uaacuuaaucaauua

SEQ ID NO: 2359698 - RNA, 23 nt, Human
uaacuucuuauggaauugauuug

SEQ ID NO: 2359699 - RNA, 23 nt, Human
uaacuuucagaagagaugggcuu

SEQ ID NO: 2359700 - RNA, 13 nt, Human
uaacuuucagaag

SEQ ID NO: 2359701 - RNA, 18 nt, Human
uaacuuuauguguaaaua

SEQ ID NO: 2359702 - RNA, 23 nt, Human
uaacuuucauuaaagcauuuacu

SEQ ID NO: 2359703 - RNA, 19 nt, Human
uaacuuucauuaaagcauu

SEQ ID NO: 2359704 - RNA, 15 nt, Human
uaacuuucucuauga

SEQ ID NO: 2359705 - RNA, 16 nt, Human
uaacuuucugaaauaa

SEQ ID NO: 2359706 - RNA, 21 nt, Human
uaacuuuaucacauuauuugc

SEQ ID NO: 2359707 - RNA, 14 nt, Human
uaacuuuaugugua

SEQ ID NO: 2359708 - RNA, 15 nt, Human
uaacuuuauguguaa

SEQ ID NO: 2359709 - RNA, 16 nt, Human
uaacuuuauguguaaa

SEQ ID NO: 2359710 - RNA, 17 nt, Human
uaacuuuaucacauuau

SEQ ID NO: 2359711 - RNA, 15 nt, Human
uaacuuuaucacauu

SEQ ID NO: 2359712 - RNA, 16 nt, Human
uaacuuggagccccag

SEQ ID NO: 2359713 - RNA, 19 nt, Human
uaacuuggauguagccaug

SEQ ID NO: 2359714 - RNA, 20 nt, Human
uaagacauacuccuuccauc

SEQ ID NO: 2359715 - RNA, 16 nt, Human
uaagacaugauuuccu

SEQ ID NO: 2359716 - RNA, 16 nt, Human
uaagacauaacguuuu

SEQ ID NO: 2359717 - RNA, 17 nt, Human
uaagacauaacguuuuu

SEQ ID NO: 2359718 - RNA, 20 nt, Human
uaagacauaacguuuuuccu

SEQ ID NO: 2359719 - RNA, 21 nt, Human
uaagacauaacguuuuuccuu

SEQ ID NO: 2359720 - RNA, 19 nt, Human
uaagacagucccaucaaaa

SEQ ID NO: 2359721 - RNA, 12 nt, Human
uaagacauaacg

SEQ ID NO: 2359722 - RNA, 14 nt, Human
uaagacacuuuuug

SEQ ID NO: 2359723 - RNA, 13 nt, Human
uaagacaaauaug

SEQ ID NO: 2359724 - RNA, 14 nt, Human
uaagaauauuugaa

SEQ ID NO: 2359725 - RNA, 20 nt, Human
uaagacacugaaaaaucuaa

SEQ ID NO: 2359726 - RNA, 23 nt, Human
uaagacacugaaaaaucuaagug

SEQ ID NO: 2359727 - RNA, 15 nt, Human
uaagaauaaaauguu

SEQ ID NO: 2359728 - RNA, 12 nt, Human
uaacuuugcuug

SEQ ID NO: 2359729 - RNA, 22 nt, Human
uaacuuugcuugcaguagauuu

SEQ ID NO: 2359730 - RNA, 24 nt, Human
uaacuuugcuugcaguagauuuuc

SEQ ID NO: 2359731 - RNA, 18 nt, Human
uaagaagugaaaaucuac

SEQ ID NO: 2359732 - RNA, 21 nt, Human
uaagaauaaaauguugaaaag

SEQ ID NO: 2359733 - RNA, 13 nt, Human
uaagaauauuuga

SEQ ID NO: 2359734 - RNA, 16 nt, Human
uaagaauaaaauguug

SEQ ID NO: 2359735 - RNA, 17 nt, Human
uaagaauaaaauguuga

SEQ ID NO: 2359736 - RNA, 19 nt, Human
uaagaauaaaauguugaaa

SEQ ID NO: 2359737 - RNA, 20 nt, Human
uaagaauaaaauguugaaaa

SEQ ID NO: 2359738 - RNA, 14 nt, Human
aaucauaugauucu

SEQ ID NO: 2359739 - RNA, 15 nt, Human
aaucauaugauucug

SEQ ID NO: 2359740 - RNA, 18 nt, Human
aaucaucugugugaaaau

SEQ ID NO: 2359741 - RNA, 16 nt, Human
aaucaugaaauaugca

SEQ ID NO: 2359742 - RNA, 17 nt, Human
aaucaugaaauaugcau

SEQ ID NO: 2359743 - RNA, 20 nt, Human
aaucaugaagauauuuuucc

SEQ ID NO: 2359744 - RNA, 12 nt, Human
aaucaugaauua

SEQ ID NO: 2359745 - RNA, 15 nt, Human
aaucaugaauuaguu

SEQ ID NO: 2359746 - RNA, 22 nt, Human
aaucauaguacucuuuguagca

SEQ ID NO: 2359747 - RNA, 18 nt, Human
aaucauauaauaaaugua

SEQ ID NO: 2359748 - RNA, 21 nt, Human
aaucauauaauaaauguacau

SEQ ID NO: 2359749 - RNA, 19 nt, Human
aaucauaguacucuuugua

SEQ ID NO: 2359750 - RNA, 15 nt, Human
uaauaaacuguguuu

SEQ ID NO: 2359751 - RNA, 14 nt, Human
uaauaaacuguguu

SEQ ID NO: 2359752 - RNA, 23 nt, Human
aaucauaagauauuuuucaugau

SEQ ID NO: 2359753 - RNA, 17 nt, Human
uaauaaacuuagaauaa

SEQ ID NO: 2359754 - RNA, 13 nt, Human
uaaguuguuugca

SEQ ID NO: 2359755 - RNA, 15 nt, Human
uaaguuguuugcaug

SEQ ID NO: 2359756 - RNA, 19 nt, Human
uaaguuuaccuauguaaca

SEQ ID NO: 2359757 - RNA, 20 nt, Human
uaaguucuggaugcauuucu

SEQ ID NO: 2359758 - RNA, 23 nt, Human
uaaguucuggaugcauuucucug

SEQ ID NO: 2359759 - RNA, 14 nt, Human
uaaguuccacugag

SEQ ID NO: 2359760 - RNA, 15 nt, Human
uaaguuccacugagc

SEQ ID NO: 2359761 - RNA, 17 nt, Human
uaaguuccacugagcuc

SEQ ID NO: 2359762 - RNA, 19 nt, Human
uaaguuccacugagcucca

SEQ ID NO: 2359763 - RNA, 17 nt, Human
uaaguugaauggccugc

SEQ ID NO: 2359764 - RNA, 22 nt, Human
uaauaaacauccuucaagaacu

SEQ ID NO: 2359765 - RNA, 17 nt, Human
uaaguuuaugucuaaag

SEQ ID NO: 2359766 - RNA, 13 nt, Human
uaauaaacauucu

SEQ ID NO: 2359767 - RNA, 12 nt, Human
uaauaaacacuc

SEQ ID NO: 2359768 - RNA, 18 nt, Human
uaauaaacacucuugaaa

SEQ ID NO: 2359769 - RNA, 17 nt, Human
uaagcuuugccagcugc

SEQ ID NO: 2359770 - RNA, 18 nt, Human
uaagcuuauuuaauuaaa

SEQ ID NO: 2359771 - RNA, 17 nt, Human
uaaggaaaaaaagacaa

SEQ ID NO: 2359772 - RNA, 18 nt, Human
uaagcuuugccagcugcu

SEQ ID NO: 2359773 - RNA, 19 nt, Human
uaagcuuugccagcugcug

SEQ ID NO: 2359774 - RNA, 21 nt, Human
uaagcuuugccagcugcugcu

SEQ ID NO: 2359775 - RNA, 22 nt, Human
uaagcuuugccagcugcugcug

SEQ ID NO: 2359776 - RNA, 14 nt, Human
uaagcuuauuuaau

SEQ ID NO: 2359777 - RNA, 16 nt, Human
uaagcuuaugucagac

SEQ ID NO: 2359778 - RNA, 16 nt, Human
uaagcuuguauuccuu

SEQ ID NO: 2359779 - RNA, 13 nt, Human
uaaguaaaugcua

SEQ ID NO: 2359780 - RNA, 12 nt, Human
uaaguaagaaaa

SEQ ID NO: 2359781 - RNA, 13 nt, Human
uaaguaagaaaau

SEQ ID NO: 2359782 - RNA, 14 nt, Human
uaaguaagaaaaua

SEQ ID NO: 2359783 - RNA, 15 nt, Human
uaaguaagaaaauau

SEQ ID NO: 2359784 - RNA, 19 nt, Human
uaaguaagaaaauauuuug

SEQ ID NO: 2359785 - RNA, 19 nt, Human
uaaguaaugauaacuggaa

SEQ ID NO: 2359786 - RNA, 19 nt, Human
uaaguauucuuauuuaaug

SEQ ID NO: 2359787 - RNA, 17 nt, Human
uaaguauuaugucucuu

SEQ ID NO: 2359788 - RNA, 22 nt, Human
uaaguucauauuccauauuuau

SEQ ID NO: 2359789 - RNA, 21 nt, Human
uaaguauuaugucucuucuga

SEQ ID NO: 2359790 - RNA, 20 nt, Human
uaaguauucuuauuuaauga

SEQ ID NO: 2359791 - RNA, 19 nt, Human
uaaguacuauguaucaaug

SEQ ID NO: 2359792 - RNA, 19 nt, Human
uaaguaagcaacagcauaa

SEQ ID NO: 2359793 - RNA, 20 nt, Human
uaaguaagaaaauauuuugu

SEQ ID NO: 2359794 - RNA, 17 nt, Human
uaaguacuauguaucaa

SEQ ID NO: 2359795 - RNA, 16 nt, Human
uaaguacuauguauca

SEQ ID NO: 2359796 - RNA, 13 nt, Human
uaaguacuaugua

SEQ ID NO: 2359797 - RNA, 21 nt, Human
aauccuggggaacauagaacu

SEQ ID NO: 2359798 - RNA, 14 nt, Human
aauccuggggaaca

SEQ ID NO: 2359799 - RNA, 15 nt, Human
aauccuaaaagaagc

SEQ ID NO: 2359800 - RNA, 20 nt, Human
aauccgaaccuccucuguga

SEQ ID NO: 2359801 - RNA, 19 nt, Human
aauccuggcccucuguguu

SEQ ID NO: 2359802 - RNA, 15 nt, Human
aauccuguccucagc

SEQ ID NO: 2359803 - RNA, 18 nt, Human
aauccuguccucagcuuc

SEQ ID NO: 2359804 - RNA, 21 nt, Human
aauccuguccucagcuucuua

SEQ ID NO: 2359805 - RNA, 13 nt, Human
aauccuuuacugu

SEQ ID NO: 2359806 - RNA, 12 nt, Human
aauccugucuuu

SEQ ID NO: 2359807 - RNA, 20 nt, Human
aauccuuuuucuuuauaaac

SEQ ID NO: 2359808 - RNA, 19 nt, Human
aaucgaggaaccagagcca

SEQ ID NO: 2359809 - RNA, 17 nt, Human
aaucgaggaaccagagc

SEQ ID NO: 2359810 - RNA, 15 nt, Human
aaucgaccugccucg

SEQ ID NO: 2359811 - RNA, 13 nt, Human
aaucgauggggga

SEQ ID NO: 2359812 - RNA, 14 nt, Human
aaucgauuggcuuu

SEQ ID NO: 2359813 - RNA, 22 nt, Human
aaucuaagcagcauuucugaag

SEQ ID NO: 2359814 - RNA, 15 nt, Human
aaucuaagugauaua

SEQ ID NO: 2359815 - RNA, 17 nt, Human
aaucuaagugauauaaa

SEQ ID NO: 2359816 - RNA, 13 nt, Human
aaucgauuggcuu

SEQ ID NO: 2359817 - RNA, 18 nt, Human
aaucgaggaaccagagcc

SEQ ID NO: 2359818 - RNA, 16 nt, Human
aaucaugaaauuacuu

SEQ ID NO: 2359819 - RNA, 22 nt, Human
aaucaugaauguguaacacagu

SEQ ID NO: 2359820 - RNA, 15 nt, Human
aaucauuagguguga

SEQ ID NO: 2359821 - RNA, 23 nt, Human
aaucauuaggugugacugaauuu

SEQ ID NO: 2359822 - RNA, 17 nt, Human
aaucauuaggugugacu

SEQ ID NO: 2359823 - RNA, 17 nt, Human
aaucccuguuuaauauu

SEQ ID NO: 2359824 - RNA, 23 nt, Human
aaucccuguuuaauauuuaaaca

SEQ ID NO: 2359825 - RNA, 19 nt, Human
aaucccuuuauuacccccu

SEQ ID NO: 2359826 - RNA, 23 nt, Human
aaucccuuuauuacccccuccuu

SEQ ID NO: 2359827 - RNA, 12 nt, Human
aauccgaaccuc

SEQ ID NO: 2359828 - RNA, 21 nt, Human
aauccgaccacuaauugccaa

SEQ ID NO: 2359829 - RNA, 19 nt, Human
aauccgaaccuccucugug

SEQ ID NO: 2359830 - RNA, 13 nt, Human
aauccgaaccucc

SEQ ID NO: 2359831 - RNA, 12 nt, Human
aauccgcccauc

SEQ ID NO: 2359832 - RNA, 16 nt, Human
aaucuaauauuaaaaa

SEQ ID NO: 2359833 - RNA, 17 nt, Human
aaucuaauauuaaaaau

SEQ ID NO: 2359834 - RNA, 19 nt, Human
aaucuaauauuaaaaauau

SEQ ID NO: 2359835 - RNA, 20 nt, Human
aaucuaauauuaaaaauaug

SEQ ID NO: 2359836 - RNA, 19 nt, Human
aaucuacacuccagugaga

SEQ ID NO: 2359837 - RNA, 15 nt, Human
aaucuggagaccagg

SEQ ID NO: 2359838 - RNA, 14 nt, Human
aaucuggagugagg

SEQ ID NO: 2359839 - RNA, 15 nt, Human
aaucuacccaaagga

SEQ ID NO: 2359840 - RNA, 16 nt, Human
aaucuacccaaaggau

SEQ ID NO: 2359841 - RNA, 17 nt, Human
aaucuacccaaaggaua

SEQ ID NO: 2359842 - RNA, 15 nt, Human
aaucuaccuucugua

SEQ ID NO: 2359843 - RNA, 16 nt, Human
aaucuaccuucuguag

SEQ ID NO: 2359844 - RNA, 17 nt, Human
aaucuaccuucuguagu

SEQ ID NO: 2359845 - RNA, 22 nt, Human
aaucuaccuucuguaguuuuau

SEQ ID NO: 2359846 - RNA, 16 nt, Human
aaucugggaagggaag

SEQ ID NO: 2359847 - RNA, 19 nt, Human
aaucuggagagcuagaacc

SEQ ID NO: 2359848 - RNA, 17 nt, Human
aaucugggccagaauuu

SEQ ID NO: 2359849 - RNA, 16 nt, Human
aaucugggccagaauu

SEQ ID NO: 2359850 - RNA, 19 nt, Human
aaucuuaggggagagcuuu

SEQ ID NO: 2359851 - RNA, 23 nt, Human
aaucuuacagcuggguggcacug

SEQ ID NO: 2359852 - RNA, 14 nt, Human
aaucuuacagcugg

SEQ ID NO: 2359853 - RNA, 18 nt, Human
aaucuuacagcugggugg

SEQ ID NO: 2359854 - RNA, 19 nt, Human
aaucuuauaauuuaaaaua

SEQ ID NO: 2359855 - RNA, 18 nt, Human
aaucuguguacaaagaaa

SEQ ID NO: 2359856 - RNA, 19 nt, Human
aaucuguguacaaagaaau

SEQ ID NO: 2359857 - RNA, 13 nt, Human
aaucuguguacaa

SEQ ID NO: 2359858 - RNA, 12 nt, Human
aaucugugauga

SEQ ID NO: 2359859 - RNA, 17 nt, Human
aaucuguguacaaagaa

SEQ ID NO: 2359860 - RNA, 20 nt, Human
aaucuguguacaaagaaaua

SEQ ID NO: 2359861 - RNA, 17 nt, Human
aaucuguuugaucccug

SEQ ID NO: 2359862 - RNA, 13 nt, Human
uaaugucuucauu

SEQ ID NO: 2359863 - RNA, 17 nt, Human
uaaugucuucauuucau

SEQ ID NO: 2359864 - RNA, 11 nt, Human
uaaugucucug

SEQ ID NO: 2359865 - RNA, 19 nt, Human
uaaugucucugugagacuc

SEQ ID NO: 2359866 - RNA, 22 nt, Human
uaaugucaccaccuucccagcu

SEQ ID NO: 2359867 - RNA, 21 nt, Human
uaaugucaccaccuucccagc

SEQ ID NO: 2359868 - RNA, 15 nt, Human
uaaugucaccaccuu

SEQ ID NO: 2359869 - RNA, 18 nt, Human
uaaugucacaggcagguc

SEQ ID NO: 2359870 - RNA, 14 nt, Human
uaauguagccaugg

SEQ ID NO: 2359871 - RNA, 13 nt, Human
uaauguacugcau

SEQ ID NO: 2359872 - RNA, 16 nt, Human
uaauguagccauggga

SEQ ID NO: 2359873 - RNA, 15 nt, Human
uaauguacaucuggc

SEQ ID NO: 2359874 - RNA, 15 nt, Human
uaaugaauggacuca

SEQ ID NO: 2359875 - RNA, 15 nt, Human
uaaugaaugcauaaa

SEQ ID NO: 2359876 - RNA, 13 nt, Human
uaauguuacugau

SEQ ID NO: 2359877 - RNA, 12 nt, Human
uaauguuacuga

SEQ ID NO: 2359878 - RNA, 14 nt, Human
uaauguuacugauc

SEQ ID NO: 2359879 - RNA, 21 nt, Human
aaucuuuagagaaguauacau

SEQ ID NO: 2359880 - RNA, 22 nt, Human
aaucuuuagagaaguauacaua

SEQ ID NO: 2359881 - RNA, 14 nt, Human
aaucuuuauugaga

SEQ ID NO: 2359882 - RNA, 15 nt, Human
aaucuuuaauuuuac

SEQ ID NO: 2359883 - RNA, 16 nt, Human
aaucuuuaauuuuaca

SEQ ID NO: 2359884 - RNA, 11 nt, Human
uaauguuacug

SEQ ID NO: 2359885 - RNA, 15 nt, Human
uaauguuaauucagc

SEQ ID NO: 2359886 - RNA, 20 nt, Human
uaauguuaaauuuguaaguu

SEQ ID NO: 2359887 - RNA, 22 nt, Human
uaauguuaaauuuguaaguuuc

SEQ ID NO: 2359888 - RNA, 13 nt, Human
uaauguuaaauuu

SEQ ID NO: 2359889 - RNA, 16 nt, Human
uaauguuaaauuugua

SEQ ID NO: 2359890 - RNA, 17 nt, Human
uaauguuaaauuuguaa

SEQ ID NO: 2359891 - RNA, 18 nt, Human
uaauguuaaauuuguaag

SEQ ID NO: 2359892 - RNA, 16 nt, Human
uaaugugguuauuucu

SEQ ID NO: 2359893 - RNA, 19 nt, Human
uaaugucuucauuucauug

SEQ ID NO: 2359894 - RNA, 21 nt, Human
uaaugucuucauuucauugua

SEQ ID NO: 2359895 - RNA, 19 nt, Human
uaauguguauuacaaauau

SEQ ID NO: 2359896 - RNA, 17 nt, Human
aaugaauuuuuaugaua

SEQ ID NO: 2359897 - RNA, 13 nt, Human
aaugaauuuuguu

SEQ ID NO: 2359898 - RNA, 20 nt, Human
aaugaaugugugugguuuuu

SEQ ID NO: 2359899 - RNA, 13 nt, Human
aaugacaacagaa

SEQ ID NO: 2359900 - RNA, 14 nt, Human
aaugacaacagaag

SEQ ID NO: 2359901 - RNA, 15 nt, Human
aaugacaacagaagc

SEQ ID NO: 2359902 - RNA, 22 nt, Human
aaugaaugucagugugacugau

SEQ ID NO: 2359903 - RNA, 23 nt, Human
aaugaauguuuacacucuuugua

SEQ ID NO: 2359904 - RNA, 13 nt, Human
aaugaaugugugu

SEQ ID NO: 2359905 - RNA, 16 nt, Human
aaugaauguguguggu

SEQ ID NO: 2359906 - RNA, 17 nt, Human
aaugaauuaaauaaacc

SEQ ID NO: 2359907 - RNA, 19 nt, Human
aaugaauggacucaaacug

SEQ ID NO: 2359908 - RNA, 13 nt, Human
aaugaaugucagu

SEQ ID NO: 2359909 - RNA, 17 nt, Human
aaugaaugcauaaaaug

SEQ ID NO: 2359910 - RNA, 20 nt, Human
aaugaaacccccacacacac

SEQ ID NO: 2359911 - RNA, 22 nt, Human
aaugaauggcuaagcaaaaugu

SEQ ID NO: 2359912 - RNA, 13 nt, Human
aaucuuucugcag

SEQ ID NO: 2359913 - RNA, 15 nt, Human
aaucuuuauugagaa

SEQ ID NO: 2359914 - RNA, 18 nt, Human
aaucuuuauugagaaaga

SEQ ID NO: 2359915 - RNA, 15 nt, Human
aaugaaaaugucuug

SEQ ID NO: 2359916 - RNA, 20 nt, Human
aaugaaaauuguauguuaag

SEQ ID NO: 2359917 - RNA, 16 nt, Human
aaugaaaaugucuugu

SEQ ID NO: 2359918 - RNA, 16 nt, Human
aaugaaacaccuucuc

SEQ ID NO: 2359919 - RNA, 17 nt, Human
aaugaaacauuuuguca

SEQ ID NO: 2359920 - RNA, 19 nt, Human
aaugaaacacucaguuguu

SEQ ID NO: 2359921 - RNA, 14 nt, Human
aaugaaacccccac

SEQ ID NO: 2359922 - RNA, 17 nt, Human
aaugaaacaccuucucu

SEQ ID NO: 2359923 - RNA, 20 nt, Human
aaugaaacaccuucucugga

SEQ ID NO: 2359924 - RNA, 17 nt, Human
aaugaaagacuguacaa

SEQ ID NO: 2359925 - RNA, 16 nt, Human
aaugaaagacuguaca

SEQ ID NO: 2359926 - RNA, 17 nt, Human
aaugaaaccugugucuc

SEQ ID NO: 2359927 - RNA, 14 nt, Human
aaugaaacuuggau

SEQ ID NO: 2359928 - RNA, 19 nt, Human
aaugaaacccccacacaca

SEQ ID NO: 2359929 - RNA, 18 nt, Human
aaugaaacccccacacac

SEQ ID NO: 2359930 - RNA, 15 nt, Human
uaauauuuuuaauua

SEQ ID NO: 2359931 - RNA, 18 nt, Human
uaaucacgcuuuccugaa

SEQ ID NO: 2359932 - RNA, 14 nt, Human
uaauauuuuuaauu

SEQ ID NO: 2359933 - RNA, 13 nt, Human
uaauauuuugcac

SEQ ID NO: 2359934 - RNA, 17 nt, Human
uaaucacuuuuuuccac

SEQ ID NO: 2359935 - RNA, 16 nt, Human
uaaucacuuuuuucca

SEQ ID NO: 2359936 - RNA, 16 nt, Human
uaaucccagcacuuug

SEQ ID NO: 2359937 - RNA, 23 nt, Human
uaauccaggcagauccaggacua

SEQ ID NO: 2359938 - RNA, 22 nt, Human
uaauccaggcagauccaggacu

SEQ ID NO: 2359939 - RNA, 19 nt, Human
uaaucccagcuacuuggga

SEQ ID NO: 2359940 - RNA, 19 nt, Human
uaaucccagcacuuuggga

SEQ ID NO: 2359941 - RNA, 21 nt, Human
uaaucccagcaugcugagauu

SEQ ID NO: 2359942 - RNA, 21 nt, Human
uaaucagcaagaauuugaucg

SEQ ID NO: 2359943 - RNA, 20 nt, Human
uaaucagcaagaauuugauc

SEQ ID NO: 2359944 - RNA, 18 nt, Human
uaaucacuuuuuuccaca

SEQ ID NO: 2359945 - RNA, 19 nt, Human
uaaucacuuuuuuccacau

SEQ ID NO: 2359946 - RNA, 11 nt, Human
uaaucagccuc

SEQ ID NO: 2359947 - RNA, 17 nt, Human
uaauccaggcagaucca

SEQ ID NO: 2359948 - RNA, 19 nt, Human
uaauccaggcagauccagg

SEQ ID NO: 2359949 - RNA, 18 nt, Human
uaauccaggcagauccag

SEQ ID NO: 2359950 - RNA, 17 nt, Human
uaaugaaugaaacauuu

SEQ ID NO: 2359951 - RNA, 18 nt, Human
uaaugaaucuaagcagca

SEQ ID NO: 2359952 - RNA, 15 nt, Human
uaaugaaaaugucag

SEQ ID NO: 2359953 - RNA, 14 nt, Human
uaaugaaaauguca

SEQ ID NO: 2359954 - RNA, 13 nt, Human
uaaugaaaauguc

SEQ ID NO: 2359955 - RNA, 21 nt, Human
uaaugaaguuugaauguuaaa

SEQ ID NO: 2359956 - RNA, 22 nt, Human
uaaugaaguuugaauguuaaau

SEQ ID NO: 2359957 - RNA, 20 nt, Human
uaaugaaguuugaauguuaa

SEQ ID NO: 2359958 - RNA, 19 nt, Human
uaaugaaguuugaauguua

SEQ ID NO: 2359959 - RNA, 12 nt, Human
uaaucuuugggu

SEQ ID NO: 2359960 - RNA, 18 nt, Human
uaaucuuucuuuaccuga

SEQ ID NO: 2359961 - RNA, 21 nt, Human
uaaucuuucuuuaccugagac

SEQ ID NO: 2359962 - RNA, 20 nt, Human
uaaucccagcuacucaggag

SEQ ID NO: 2359963 - RNA, 20 nt, Human
uaaucccagcuacuugggaa

SEQ ID NO: 2359964 - RNA, 17 nt, Human
uaauccccaguaaaauu

SEQ ID NO: 2359965 - RNA, 18 nt, Human
uaauccccaguaaaauug

SEQ ID NO: 2359966 - RNA, 20 nt, Human
uaauccccaguaaaauugcc

SEQ ID NO: 2359967 - RNA, 22 nt, Human
uaaucuuuggguaacuucaaaa

SEQ ID NO: 2359968 - RNA, 15 nt, Human
uaaucuuuucacaaa

SEQ ID NO: 2359969 - RNA, 16 nt, Human
uaaucuuuucacaaau

SEQ ID NO: 2359970 - RNA, 23 nt, Human
uaaucuuucuuuaccugagacca

SEQ ID NO: 2359971 - RNA, 19 nt, Human
uaaucuuuucacaaauaaa

SEQ ID NO: 2359972 - RNA, 17 nt, Human
uaaucuuuucacaaaua

SEQ ID NO: 2359973 - RNA, 18 nt, Human
uaaucuuuucacaaauaa

SEQ ID NO: 2359974 - RNA, 15 nt, Human
aaucuuauauuccau

SEQ ID NO: 2359975 - RNA, 21 nt, Human
aaucuuaucauggucucaguc

SEQ ID NO: 2359976 - RNA, 15 nt, Human
aaucuuaucaugguc

SEQ ID NO: 2359977 - RNA, 14 nt, Human
uaauacaccacuac

SEQ ID NO: 2359978 - RNA, 16 nt, Human
uaauacaccacuacau

SEQ ID NO: 2359979 - RNA, 16 nt, Human
uaauagacaauuuauu

SEQ ID NO: 2359980 - RNA, 14 nt, Human
uaauagacaauuua

SEQ ID NO: 2359981 - RNA, 19 nt, Human
uaauacaccacuacauucu

SEQ ID NO: 2359982 - RNA, 18 nt, Human
uaauacaccacuacauuc

SEQ ID NO: 2359983 - RNA, 12 nt, Human
uaauagagcaaa

SEQ ID NO: 2359984 - RNA, 21 nt, Human
uaauagagcaaaauugaugug

SEQ ID NO: 2359985 - RNA, 22 nt, Human
uaauagacaauuuauuauggca

SEQ ID NO: 2359986 - RNA, 18 nt, Human
uaauagacaauuuauuau

SEQ ID NO: 2359987 - RNA, 19 nt, Human
uaauagcggguuacuuuca

SEQ ID NO: 2359988 - RNA, 22 nt, Human
uaauagcggguuacuuucacau

SEQ ID NO: 2359989 - RNA, 14 nt, Human
uaauauuugcugac

SEQ ID NO: 2359990 - RNA, 18 nt, Human
uaauauuuauugcuuuau

SEQ ID NO: 2359991 - RNA, 20 nt, Human
uaauauuuauugcuuuauaa

SEQ ID NO: 2359992 - RNA, 14 nt, Human
uaauauuuauugcu

SEQ ID NO: 2359993 - RNA, 15 nt, Human
uaauauuuauugcuu

SEQ ID NO: 2359994 - RNA, 16 nt, Human
uaauauuuauugcuuu

SEQ ID NO: 2359995 - RNA, 17 nt, Human
uaauauuuauugcuuua

SEQ ID NO: 2359996 - RNA, 23 nt, Human
uaauauuuaugucuauuuaagcc

SEQ ID NO: 2359997 - RNA, 16 nt, Human
uaauauuuauauauuu

SEQ ID NO: 2359998 - RNA, 21 nt, Human
uaauauuuaugucuauuuaag

SEQ ID NO: 2359999 - RNA, 17 nt, Human
aauggcacagcccaaag

SEQ ID NO: 2360000 - RNA, 20 nt, Human
aauggcacagcccaaagaag

SEQ ID NO: 2360001 - RNA, 12 nt, Human
aauggcagccuu

SEQ ID NO: 2360002 - RNA, 19 nt, Human
aauggcacagcccaaagaa

SEQ ID NO: 2360003 - RNA, 16 nt, Human
aauggcagccuuggca

SEQ ID NO: 2360004 - RNA, 14 nt, Human
aauggacucaaacu

SEQ ID NO: 2360005 - RNA, 13 nt, Human
aauggaaaggaga

SEQ ID NO: 2360006 - RNA, 17 nt, Human
aauggacuggaagggga

SEQ ID NO: 2360007 - RNA, 23 nt, Human
aauggacuggaaggggaagggac

SEQ ID NO: 2360008 - RNA, 23 nt, Human
aauggauuggauuauuuaauaac

SEQ ID NO: 2360009 - RNA, 22 nt, Human
aauggauuggauuauuuaauaa

SEQ ID NO: 2360010 - RNA, 21 nt, Human
aauggauuugaugcuguuuga

SEQ ID NO: 2360011 - RNA, 21 nt, Human
aauggcaaggcagcccugucu

SEQ ID NO: 2360012 - RNA, 23 nt, Human
aauggcaaggcagcccugucuga

SEQ ID NO: 2360013 - RNA, 23 nt, Human
aauggcacaaucucggcucacug

SEQ ID NO: 2360014 - RNA, 12 nt, Human
aauggcucagau

SEQ ID NO: 2360015 - RNA, 15 nt, Human
aauggcucagaugcc

SEQ ID NO: 2360016 - RNA, 21 nt, Human
aauggcucacuauggugccaa

SEQ ID NO: 2360017 - RNA, 17 nt, Human
aauguaacagucugauc

SEQ ID NO: 2360018 - RNA, 22 nt, Human
aauggccugccuugaagccacu

SEQ ID NO: 2360019 - RNA, 17 nt, Human
aauggccuccucccuua

SEQ ID NO: 2360020 - RNA, 18 nt, Human
aauggcgcagugccucug

SEQ ID NO: 2360021 - RNA, 19 nt, Human
aauggcgcagugccucugg

SEQ ID NO: 2360022 - RNA, 19 nt, Human
aauggcgugaacccgggag

SEQ ID NO: 2360023 - RNA, 20 nt, Human
aauggcgucuggaaguccaa

SEQ ID NO: 2360024 - RNA, 16 nt, Human
aauggcuaauucccag

SEQ ID NO: 2360025 - RNA, 20 nt, Human
aauggcgcagugccucuggu

SEQ ID NO: 2360026 - RNA, 18 nt, Human
aauggcgugaucucggcu

SEQ ID NO: 2360027 - RNA, 20 nt, Human
aauggccugccuugaagcca

SEQ ID NO: 2360028 - RNA, 14 nt, Human
aauggccugccuug

SEQ ID NO: 2360029 - RNA, 20 nt, Human
aauggccucauguggcugga

SEQ ID NO: 2360030 - RNA, 22 nt, Human
aauggccucauguggcuggaag

SEQ ID NO: 2360031 - RNA, 17 nt, Human
aauggccauuugcuuuu

SEQ ID NO: 2360032 - RNA, 16 nt, Human
aauggccggcuggaaa

SEQ ID NO: 2360033 - RNA, 15 nt, Human
aauggccucaugugg

SEQ ID NO: 2360034 - RNA, 15 nt, Human
uacacuaaaagguga

SEQ ID NO: 2360035 - RNA, 23 nt, Human
uacacauuuuauuuuauuaugca

SEQ ID NO: 2360036 - RNA, 14 nt, Human
uacacuaagagaga

SEQ ID NO: 2360037 - RNA, 18 nt, Human
uacacuaagagagaauga

SEQ ID NO: 2360038 - RNA, 15 nt, Human
aauguaacuuuugua

SEQ ID NO: 2360039 - RNA, 22 nt, Human
aauguaacuuuuguaagacaaa

SEQ ID NO: 2360040 - RNA, 16 nt, Human
aauguaacuuuuguaa

SEQ ID NO: 2360041 - RNA, 19 nt, Human
uacacauuuuauuuuauua

SEQ ID NO: 2360042 - RNA, 22 nt, Human
uacacauuuuauuuuauuaugc

SEQ ID NO: 2360043 - RNA, 21 nt, Human
uacacauuuuauuuuauuaug

SEQ ID NO: 2360044 - RNA, 11 nt, Human
uacagacacua

SEQ ID NO: 2360045 - RNA, 13 nt, Human
uacagacacuaag

SEQ ID NO: 2360046 - RNA, 14 nt, Human
uacagacacuaagu

SEQ ID NO: 2360047 - RNA, 19 nt, Human
uacagacacuaaguuauag

SEQ ID NO: 2360048 - RNA, 23 nt, Human
uacagaccgaacuguuguauaaa

SEQ ID NO: 2360049 - RNA, 21 nt, Human
uacagaccgaacuguuguaua

SEQ ID NO: 2360050 - RNA, 20 nt, Human
uacagaccgaacuguuguau

SEQ ID NO: 2360051 - RNA, 19 nt, Human
uacagaccgaacuguugua

SEQ ID NO: 2360052 - RNA, 22 nt, Human
uacagacaacaaaccuguuucu

SEQ ID NO: 2360053 - RNA, 13 nt, Human
uacacguguccug

SEQ ID NO: 2360054 - RNA, 17 nt, Human
uacacguguccuguagu

SEQ ID NO: 2360055 - RNA, 19 nt, Human
uacagacaaagcguggugg

SEQ ID NO: 2360056 - RNA, 13 nt, Human
uacagacguaugc

SEQ ID NO: 2360057 - RNA, 16 nt, Human
uacagagugauagccu

SEQ ID NO: 2360058 - RNA, 18 nt, Human
uacagacacuaaguuaua

SEQ ID NO: 2360059 - RNA, 20 nt, Human
uacagaggucucugccggcu

SEQ ID NO: 2360060 - RNA, 23 nt, Human
uacagaggucucugccggcucuu

SEQ ID NO: 2360061 - RNA, 19 nt, Human
uacagauagucaaaccaua

SEQ ID NO: 2360062 - RNA, 20 nt, Human
uacagauccccaagccuggc

SEQ ID NO: 2360063 - RNA, 21 nt, Human
aaugccauggacagaagaagg

SEQ ID NO: 2360064 - RNA, 16 nt, Human
aaugccauuaucccug

SEQ ID NO: 2360065 - RNA, 22 nt, Human
aaugccauccucaaacacugca

SEQ ID NO: 2360066 - RNA, 15 nt, Human
aaugccaucaucucc

SEQ ID NO: 2360067 - RNA, 17 nt, Human
aaugccauccucaaaca

SEQ ID NO: 2360068 - RNA, 21 nt, Human
aaugccauccucaaacacugc

SEQ ID NO: 2360069 - RNA, 21 nt, Human
aaugccaguaacgcgucuucc

SEQ ID NO: 2360070 - RNA, 22 nt, Human
aaugccagagacggaagccuuu

SEQ ID NO: 2360071 - RNA, 23 nt, Human
aaugccaguaacgcgucuuccug

SEQ ID NO: 2360072 - RNA, 22 nt, Human
aaugcagcgaaccaauauuugu

SEQ ID NO: 2360073 - RNA, 22 nt, Human
aaugcagggauugcugccacuu

SEQ ID NO: 2360074 - RNA, 23 nt, Human
aaugcagggauugcugccacuuu

SEQ ID NO: 2360075 - RNA, 12 nt, Human
aaugcagccaga

SEQ ID NO: 2360076 - RNA, 14 nt, Human
aaugcagcgugaag

SEQ ID NO: 2360077 - RNA, 22 nt, Human
aaugccacugccuucgcuucuu

SEQ ID NO: 2360078 - RNA, 22 nt, Human
aaugcacuuuguucuggcucuu

SEQ ID NO: 2360079 - RNA, 22 nt, Human
uacaaugugaacuuuauuaaau

SEQ ID NO: 2360080 - RNA, 22 nt, Human
aaugcagcagggaugcccugga

SEQ ID NO: 2360081 - RNA, 20 nt, Human
aaugcagcagggaugcccug

SEQ ID NO: 2360082 - RNA, 21 nt, Human
uacaaugcugugcccuaaagu

SEQ ID NO: 2360083 - RNA, 18 nt, Human
aaugaccuuucaauagga

SEQ ID NO: 2360084 - RNA, 16 nt, Human
aaugaccuuucaauag

SEQ ID NO: 2360085 - RNA, 17 nt, Human
aaugaccuuucaauagg

SEQ ID NO: 2360086 - RNA, 21 nt, Human
aaugcacuuuguucuggcucu

SEQ ID NO: 2360087 - RNA, 21 nt, Human
uacaaugugaacuuuauuaaa

SEQ ID NO: 2360088 - RNA, 20 nt, Human
uacaaugugaacuuuauuaa

SEQ ID NO: 2360089 - RNA, 17 nt, Human
uacaaugugaacuuuau

SEQ ID NO: 2360090 - RNA, 16 nt, Human
uacaaugugaacuuua

SEQ ID NO: 2360091 - RNA, 15 nt, Human
uacaaugugaacuuu

SEQ ID NO: 2360092 - RNA, 14 nt, Human
uacaaugugaacuu

SEQ ID NO: 2360093 - RNA, 22 nt, Human
uacaauguauuuauuuaaaaga

SEQ ID NO: 2360094 - RNA, 16 nt, Human
aaugacaacagaagcu

SEQ ID NO: 2360095 - RNA, 14 nt, Human
uacaauguauuuau

SEQ ID NO: 2360096 - RNA, 17 nt, Human
uacaauguauuuauuua

SEQ ID NO: 2360097 - RNA, 18 nt, Human
uacaauguauuuauuuaa

SEQ ID NO: 2360098 - RNA, 19 nt, Human
uacaauguauuuauuuaaa

SEQ ID NO: 2360099 - RNA, 20 nt, Human
uacaauguauuuauuuaaaa

SEQ ID NO: 2360100 - RNA, 16 nt, Human
aauggaaacugaaugc

SEQ ID NO: 2360101 - RNA, 23 nt, Human
aaugcuuccuagaaguuacugaa

SEQ ID NO: 2360102 - RNA, 16 nt, Human
aaugcuucaucccuuu

SEQ ID NO: 2360103 - RNA, 20 nt, Human
aauggaaaugggcagagcag

SEQ ID NO: 2360104 - RNA, 21 nt, Human
aauggaaaugggcagagcaga

SEQ ID NO: 2360105 - RNA, 21 nt, Human
aaugcuuccugacaaucaacu

SEQ ID NO: 2360106 - RNA, 17 nt, Human
aauggaaacugaaugcu

SEQ ID NO: 2360107 - RNA, 15 nt, Human
aauggaaaggagagg

SEQ ID NO: 2360108 - RNA, 21 nt, Human
aauggacguguuaugacucca

SEQ ID NO: 2360109 - RNA, 14 nt, Human
aauggaaccacucu

SEQ ID NO: 2360110 - RNA, 23 nt, Human
aauggacguguuaugacuccaga

SEQ ID NO: 2360111 - RNA, 20 nt, Human
aauggacuaacuugucuuug

SEQ ID NO: 2360112 - RNA, 18 nt, Human
aaugcugguuuuucaguu

SEQ ID NO: 2360113 - RNA, 16 nt, Human
aaugcuguugccucau

SEQ ID NO: 2360114 - RNA, 23 nt, Human
aaugcuguacaucuauuuuggau

SEQ ID NO: 2360115 - RNA, 13 nt, Human
aaugcuguguuaa

SEQ ID NO: 2360116 - RNA, 20 nt, Human
aaugcuuaucaucuaaagau

SEQ ID NO: 2360117 - RNA, 22 nt, Human
aaugcuguauuagucacagaga

SEQ ID NO: 2360118 - RNA, 16 nt, Human
aaugcuguauuuuaaa

SEQ ID NO: 2360119 - RNA, 13 nt, Human
aaugcccagcccc

SEQ ID NO: 2360120 - RNA, 17 nt, Human
aaugcuguacaucuauu

SEQ ID NO: 2360121 - RNA, 15 nt, Human
aaugcuguacaucua

SEQ ID NO: 2360122 - RNA, 13 nt, Human
aaugcuguacauc

SEQ ID NO: 2360123 - RNA, 12 nt, Human
aaugcuguacau

SEQ ID NO: 2360124 - RNA, 11 nt, Human
aaugcccagcc

SEQ ID NO: 2360125 - RNA, 12 nt, Human
aaugcccagccc

SEQ ID NO: 2360126 - RNA, 17 nt, Human
aaugugccuaguucuuu

SEQ ID NO: 2360127 - RNA, 19 nt, Human
aaugugcuacugauuguuu

SEQ ID NO: 2360128 - RNA, 13 nt, Human
aaugugcccccag

SEQ ID NO: 2360129 - RNA, 23 nt, Human
aaugugcauucuuuuaaaagaca

SEQ ID NO: 2360130 - RNA, 24 nt, Human
aaugugcauucuuuuaaaagacaa

SEQ ID NO: 2360131 - RNA, 11 nt, Human
aaugugugugu

SEQ ID NO: 2360132 - RNA, 18 nt, Human
aaugugcuauacugcaua

SEQ ID NO: 2360133 - RNA, 16 nt, Human
aaugugauuuuucuga

SEQ ID NO: 2360134 - RNA, 22 nt, Human
aaugugauucuaaugucuucau

SEQ ID NO: 2360135 - RNA, 19 nt, Human
aaugugcagguuuguuaca

SEQ ID NO: 2360136 - RNA, 20 nt, Human
aaugugcagguuuguuacau

SEQ ID NO: 2360137 - RNA, 22 nt, Human
aaugugcagguuuguuacauag

SEQ ID NO: 2360138 - RNA, 20 nt, Human
aaugugauuuacgcucauug

SEQ ID NO: 2360139 - RNA, 14 nt, Human
aaugugauucuaau

SEQ ID NO: 2360140 - RNA, 19 nt, Human
aaugugauucuaaugucuu

SEQ ID NO: 2360141 - RNA, 21 nt, Human
aaugugauuccuuugaagagg

SEQ ID NO: 2360142 - RNA, 22 nt, Human
aaugugauuccuuugaagagga

SEQ ID NO: 2360143 - RNA, 19 nt, Human
aaugugaaaagaaaaauga

SEQ ID NO: 2360144 - RNA, 14 nt, Human
aaugugaaacugga

SEQ ID NO: 2360145 - RNA, 16 nt, Human
aauguauuauucugca

SEQ ID NO: 2360146 - RNA, 14 nt, Human
aauguauuauucug

SEQ ID NO: 2360147 - RNA, 22 nt, Human
aaugugaaaaugguccaggaga

SEQ ID NO: 2360148 - RNA, 15 nt, Human
aaugugaaacuggau

SEQ ID NO: 2360149 - RNA, 17 nt, Human
aauguauuauucugcag

SEQ ID NO: 2360150 - RNA, 14 nt, Human
aauguaucaggaaa

SEQ ID NO: 2360151 - RNA, 13 nt, Human
aauguaucaggaa

SEQ ID NO: 2360152 - RNA, 21 nt, Human
aauguauauguuuugugggaa

SEQ ID NO: 2360153 - RNA, 20 nt, Human
aauguauguguaaguauucu

SEQ ID NO: 2360154 - RNA, 19 nt, Human
aauguauguguaaguauuc

SEQ ID NO: 2360155 - RNA, 14 nt, Human
aauguauaugcacu

SEQ ID NO: 2360156 - RNA, 13 nt, Human
aauguauaugcac

SEQ ID NO: 2360157 - RNA, 17 nt, Human
uacauauguaaaauaaa

SEQ ID NO: 2360158 - RNA, 16 nt, Human
uacaucacuugagaca

SEQ ID NO: 2360159 - RNA, 23 nt, Human
uacauccaaagcagacagcucca

SEQ ID NO: 2360160 - RNA, 16 nt, Human
uacaucccauguaaca

SEQ ID NO: 2360161 - RNA, 17 nt, Human
uacaucccauguaacag

SEQ ID NO: 2360162 - RNA, 20 nt, Human
uacauccaaagcagacagcu

SEQ ID NO: 2360163 - RNA, 19 nt, Human
uacauccaaagcagacagc

SEQ ID NO: 2360164 - RNA, 22 nt, Human
uacaucccauguaacagaaagg

SEQ ID NO: 2360165 - RNA, 18 nt, Human
uacaucccauguaacaga

SEQ ID NO: 2360166 - RNA, 19 nt, Human
uacaucccauguaacagaa

SEQ ID NO: 2360167 - RNA, 20 nt, Human
uacaucccauguaacagaaa

SEQ ID NO: 2360168 - RNA, 21 nt, Human
uacaucccauguaacagaaag

SEQ ID NO: 2360169 - RNA, 20 nt, Human
uacaucccuuaccugggaaa

SEQ ID NO: 2360170 - RNA, 22 nt, Human
uacauauaagugauugcugguu

SEQ ID NO: 2360171 - RNA, 22 nt, Human
uacauaucuuuauuaaucacua

SEQ ID NO: 2360172 - RNA, 16 nt, Human
uacauaucuuuauuaa

SEQ ID NO: 2360173 - RNA, 12 nt, Human
uacauaucuuua

SEQ ID NO: 2360174 - RNA, 18 nt, Human
uacauaucaccucauggc

SEQ ID NO: 2360175 - RNA, 20 nt, Human
uacauaucaccucauggccu

SEQ ID NO: 2360176 - RNA, 20 nt, Human
uacauauguaaaauaaaauu

SEQ ID NO: 2360177 - RNA, 16 nt, Human
uacauauguaaaauaa

SEQ ID NO: 2360178 - RNA, 15 nt, Human
uacauauguaaaaua

SEQ ID NO: 2360179 - RNA, 13 nt, Human
uacauaugaaauu

SEQ ID NO: 2360180 - RNA, 16 nt, Human
uacauaugagugugga

SEQ ID NO: 2360181 - RNA, 22 nt, Human
uacauaugaguguggaagccgg

SEQ ID NO: 2360182 - RNA, 22 nt, Human
uacagaugaauguauuuauuug

SEQ ID NO: 2360183 - RNA, 18 nt, Human
uacagaugaauguauuua

SEQ ID NO: 2360184 - RNA, 16 nt, Human
uacaggugugagucac

SEQ ID NO: 2360185 - RNA, 13 nt, Human
uacagguuacaac

SEQ ID NO: 2360186 - RNA, 15 nt, Human
uacagguuacaacag

SEQ ID NO: 2360187 - RNA, 17 nt, Human
uacagguuacaacagau

SEQ ID NO: 2360188 - RNA, 18 nt, Human
uacagguuacaacagauu

SEQ ID NO: 2360189 - RNA, 21 nt, Human
uacagguuacaacagauuugu

SEQ ID NO: 2360190 - RNA, 23 nt, Human
uacagguuacaacagauuuguga

SEQ ID NO: 2360191 - RNA, 13 nt, Human
uacaguaaauaaa

SEQ ID NO: 2360192 - RNA, 15 nt, Human
uacaguaaauaaauu

SEQ ID NO: 2360193 - RNA, 24 nt, Human
uacauaaugcgugcauaccacuuu

SEQ ID NO: 2360194 - RNA, 22 nt, Human
uacauaauuuuuuauucaaguu

SEQ ID NO: 2360195 - RNA, 19 nt, Human
uacauaauuuuuuauucaa

SEQ ID NO: 2360196 - RNA, 13 nt, Human
uacaguaacuuua

SEQ ID NO: 2360197 - RNA, 23 nt, Human
uacauaaugcgugcauaccacuu

SEQ ID NO: 2360198 - RNA, 21 nt, Human
uacauaaugcgugcauaccac

SEQ ID NO: 2360199 - RNA, 16 nt, Human
uacaguaaauaaauug

SEQ ID NO: 2360200 - RNA, 17 nt, Human
uacaguaaauaaauugu

SEQ ID NO: 2360201 - RNA, 18 nt, Human
uacaguaaauaaauuguu

SEQ ID NO: 2360202 - RNA, 21 nt, Human
uacaguaaauaaauuguuuga

SEQ ID NO: 2360203 - RNA, 22 nt, Human
aauguuaaauuuguaaguuuca

SEQ ID NO: 2360204 - RNA, 18 nt, Human
aauguuaaggaaacucuu

SEQ ID NO: 2360205 - RNA, 22 nt, Human
aauguuaaggaaacucuuaucu

SEQ ID NO: 2360206 - RNA, 23 nt, Human
aauguuaauucagcacugauuuc

SEQ ID NO: 2360207 - RNA, 13 nt, Human
aauguuaagcaga

SEQ ID NO: 2360208 - RNA, 18 nt, Human
aauguuaaauaaauugua

SEQ ID NO: 2360209 - RNA, 20 nt, Human
aauguuaaauaaauuguaua

SEQ ID NO: 2360210 - RNA, 21 nt, Human
aauguuaaauaaauuguauau

SEQ ID NO: 2360211 - RNA, 22 nt, Human
aauguuaaauaaauuguauauu

SEQ ID NO: 2360212 - RNA, 23 nt, Human
aauguuaaauaaauuguauauuc

SEQ ID NO: 2360213 - RNA, 12 nt, Human
aauguuaaauuu

SEQ ID NO: 2360214 - RNA, 13 nt, Human
aauguuaaauuug

SEQ ID NO: 2360215 - RNA, 16 nt, Human
aauguuaaauuuguaa

SEQ ID NO: 2360216 - RNA, 17 nt, Human
aauguuaaauuuguaag

SEQ ID NO: 2360217 - RNA, 18 nt, Human
aauguuaaauuuguaagu

SEQ ID NO: 2360218 - RNA, 21 nt, Human
aauguuaaauuuguaaguuuc

SEQ ID NO: 2360219 - RNA, 15 nt, Human
aauguuaaagucagu

SEQ ID NO: 2360220 - RNA, 14 nt, Human
aauguuaaagucag

SEQ ID NO: 2360221 - RNA, 13 nt, Human
aauguuaaauaaa

SEQ ID NO: 2360222 - RNA, 15 nt, Human
aauguuaaauaaauu

SEQ ID NO: 2360223 - RNA, 13 nt, Human
aauguguuucugu

SEQ ID NO: 2360224 - RNA, 15 nt, Human
aauguuaaaauguau

SEQ ID NO: 2360225 - RNA, 16 nt, Human
aauguuaaaauguauu

SEQ ID NO: 2360226 - RNA, 16 nt, Human
aauuaaccuggugcug

SEQ ID NO: 2360227 - RNA, 15 nt, Human
aauuaaccuggugcu

SEQ ID NO: 2360228 - RNA, 14 nt, Human
aauuaaccuggugc

SEQ ID NO: 2360229 - RNA, 13 nt, Human
aauuaaccuggug

SEQ ID NO: 2360230 - RNA, 18 nt, Human
aauuaaccuggugcugga

SEQ ID NO: 2360231 - RNA, 11 nt, Human
aauuaacuuuu

SEQ ID NO: 2360232 - RNA, 20 nt, Human
aauuaacauugggaaaucuu

SEQ ID NO: 2360233 - RNA, 17 nt, Human
aauuaaccaaaaaaguu

SEQ ID NO: 2360234 - RNA, 12 nt, Human
aauuaaccuggu

SEQ ID NO: 2360235 - RNA, 19 nt, Human
aauguugaaaagucaaacu

SEQ ID NO: 2360236 - RNA, 20 nt, Human
aauguucugacauuaacagu

SEQ ID NO: 2360237 - RNA, 19 nt, Human
aauguucugacauuaacag

SEQ ID NO: 2360238 - RNA, 17 nt, Human
aauguucugacauuaac

SEQ ID NO: 2360239 - RNA, 15 nt, Human
aauguucugacauua

SEQ ID NO: 2360240 - RNA, 14 nt, Human
aauguucugacauu

SEQ ID NO: 2360241 - RNA, 12 nt, Human
aauguucugaca

SEQ ID NO: 2360242 - RNA, 21 nt, Human
aauguucugaauaauuucuua

SEQ ID NO: 2360243 - RNA, 21 nt, Human
aauguucucucuucuccaccu

SEQ ID NO: 2360244 - RNA, 12 nt, Human
aauguugaaaag

SEQ ID NO: 2360245 - RNA, 13 nt, Human
aauguugaaaagu

SEQ ID NO: 2360246 - RNA, 16 nt, Human
aauguugaaaagucaa

SEQ ID NO: 2360247 - RNA, 13 nt, Human
uacaugugggagc

SEQ ID NO: 2360248 - RNA, 16 nt, Human
uacauguggcccaaca

SEQ ID NO: 2360249 - RNA, 16 nt, Human
uacauguguagccugu

SEQ ID NO: 2360250 - RNA, 14 nt, Human
uacaugugguuuau

SEQ ID NO: 2360251 - RNA, 19 nt, Human
uacauguguagccugugca

SEQ ID NO: 2360252 - RNA, 18 nt, Human
uacauguguagccugugc

SEQ ID NO: 2360253 - RNA, 20 nt, Human
uacaugugccgaaugugcag

SEQ ID NO: 2360254 - RNA, 19 nt, Human
uacauguauugcacauugu

SEQ ID NO: 2360255 - RNA, 20 nt, Human
uacauguauugcacauugua

SEQ ID NO: 2360256 - RNA, 21 nt, Human
uacauguauugcacauuguaa

SEQ ID NO: 2360257 - RNA, 22 nt, Human
uacauguauugcacauuguaaa

SEQ ID NO: 2360258 - RNA, 17 nt, Human
uacaugugccgaaugug

SEQ ID NO: 2360259 - RNA, 19 nt, Human
uacaugugccgaaugugca

SEQ ID NO: 2360260 - RNA, 13 nt, Human
uacauguauuugu

SEQ ID NO: 2360261 - RNA, 17 nt, Human
uacauugaauuagaaac

SEQ ID NO: 2360262 - RNA, 17 nt, Human
uacauuguaaauaguau

SEQ ID NO: 2360263 - RNA, 18 nt, Human
uaccaccagucugacugu

SEQ ID NO: 2360264 - RNA, 13 nt, Human
uacauucuguuaa

SEQ ID NO: 2360265 - RNA, 19 nt, Human
aauuaauaucccuacaugu

SEQ ID NO: 2360266 - RNA, 14 nt, Human
aauuaauagcuuuu

SEQ ID NO: 2360267 - RNA, 22 nt, Human
aauuaaucugggccagaauuuc

SEQ ID NO: 2360268 - RNA, 21 nt, Human
aauuaauaucccuacauguau

SEQ ID NO: 2360269 - RNA, 13 nt, Human
aauuaauagcuuu

SEQ ID NO: 2360270 - RNA, 16 nt, Human
aauuaaucaugaaugu

SEQ ID NO: 2360271 - RNA, 13 nt, Human
aauuaaugacaga

SEQ ID NO: 2360272 - RNA, 19 nt, Human
aauuaaugaaauaucugua

SEQ ID NO: 2360273 - RNA, 16 nt, Human
aauuaaugaaauaucu

SEQ ID NO: 2360274 - RNA, 17 nt, Human
aauuaaugaaauaucug

SEQ ID NO: 2360275 - RNA, 18 nt, Human
aauuaauuggcagcagau

SEQ ID NO: 2360276 - RNA, 13 nt, Human
aauuaauuggcag

SEQ ID NO: 2360277 - RNA, 17 nt, Human
aauuaauuggcagcaga

SEQ ID NO: 2360278 - RNA, 12 nt, Human
aauuaagaagaa

SEQ ID NO: 2360279 - RNA, 20 nt, Human
aauuaagaaaggauaaaguu

SEQ ID NO: 2360280 - RNA, 11 nt, Human
aauuaacuuga

SEQ ID NO: 2360281 - RNA, 15 nt, Human
aauuaacuugaguuu

SEQ ID NO: 2360282 - RNA, 17 nt, Human
aauuaacuugaguuuua

SEQ ID NO: 2360283 - RNA, 21 nt, Human
aauuaagaaaggauaaaguug

SEQ ID NO: 2360284 - RNA, 16 nt, Human
aauuaagaagaaacua

SEQ ID NO: 2360285 - RNA, 13 nt, Human
aauuaagaaggca

SEQ ID NO: 2360286 - RNA, 16 nt, Human
aauuaagaaggcaaaa

SEQ ID NO: 2360287 - RNA, 14 nt, Human
aauuaagaaggcaa

SEQ ID NO: 2360288 - RNA, 23 nt, Human
aauuaagaaggcaaaaauguaaa

SEQ ID NO: 2360289 - RNA, 19 nt, Human
aauuaagaaggcaaaaaug

SEQ ID NO: 2360290 - RNA, 17 nt, Human
aauuagguuuuguacaa

SEQ ID NO: 2360291 - RNA, 16 nt, Human
aauuagguuuuguaca

SEQ ID NO: 2360292 - RNA, 17 nt, Human
aauuaguaacauguguu

SEQ ID NO: 2360293 - RNA, 18 nt, Human
aauuaguauuuauuuaau

SEQ ID NO: 2360294 - RNA, 17 nt, Human
aauuaguauuuauuuaa

SEQ ID NO: 2360295 - RNA, 20 nt, Human
aauuagggguugcuaagaag

SEQ ID NO: 2360296 - RNA, 17 nt, Human
aauuagggguugcuaag

SEQ ID NO: 2360297 - RNA, 18 nt, Human
aauuauuauuuguguuuu

SEQ ID NO: 2360298 - RNA, 15 nt, Human
aauuauuauuugugu

SEQ ID NO: 2360299 - RNA, 16 nt, Human
aauuauuauuuguguu

SEQ ID NO: 2360300 - RNA, 16 nt, Human
aauuauuauuuggccc

SEQ ID NO: 2360301 - RNA, 22 nt, Human
aauuauuauuuauauauguauu

SEQ ID NO: 2360302 - RNA, 12 nt, Human
aauuauuauuug

SEQ ID NO: 2360303 - RNA, 20 nt, Human
aauuagugcuaagugugaac

SEQ ID NO: 2360304 - RNA, 21 nt, Human
aauuagugcuaagugugaacu

SEQ ID NO: 2360305 - RNA, 14 nt, Human
aauuagugcuaagu

SEQ ID NO: 2360306 - RNA, 18 nt, Human
aauuagugcuaaguguga

SEQ ID NO: 2360307 - RNA, 16 nt, Human
aauucaaaaaguguuu

SEQ ID NO: 2360308 - RNA, 20 nt, Human
aauucaaacuggggccucca

SEQ ID NO: 2360309 - RNA, 14 nt, Human
aauucaaagcucua

SEQ ID NO: 2360310 - RNA, 18 nt, Human
aauucaaagcucuauuaa

SEQ ID NO: 2360311 - RNA, 15 nt, Human
aauucaaaaaguguu

SEQ ID NO: 2360312 - RNA, 14 nt, Human
aauucaaaaagugu

SEQ ID NO: 2360313 - RNA, 17 nt, Human
aauuauuuuuacaguuc

SEQ ID NO: 2360314 - RNA, 20 nt, Human
aauuauuuugguacuuuuau

SEQ ID NO: 2360315 - RNA, 11 nt, Human
aauuauuuugg

SEQ ID NO: 2360316 - RNA, 18 nt, Human
aauuauuuuggauuuugu

SEQ ID NO: 2360317 - RNA, 19 nt, Human
aauuauuuugguacuuuua

SEQ ID NO: 2360318 - RNA, 15 nt, Human
aauucaacucagacu

SEQ ID NO: 2360319 - RNA, 18 nt, Human
aauucaacccuuugcccc

SEQ ID NO: 2360320 - RNA, 21 nt, Human
aauucaaccacuguaaaauga

SEQ ID NO: 2360321 - RNA, 14 nt, Human
aauucaacccuuug

SEQ ID NO: 2360322 - RNA, 14 nt, Human
aauucacaaacuuu

SEQ ID NO: 2360323 - RNA, 19 nt, Human
aauucacaaacuuuuauac

SEQ ID NO: 2360324 - RNA, 22 nt, Human
aauucacaucuaaccucaucuu

SEQ ID NO: 2360325 - RNA, 21 nt, Human
aauucacaucuaaccucaucu

SEQ ID NO: 2360326 - RNA, 13 nt, Human
aauucacucccac

SEQ ID NO: 2360327 - RNA, 21 nt, Human
aauucacccccuuuccuggac

SEQ ID NO: 2360328 - RNA, 17 nt, Human
aauucaccaaaguauuu

SEQ ID NO: 2360329 - RNA, 14 nt, Human
aauucaccaaagua

SEQ ID NO: 2360330 - RNA, 23 nt, Human
aauucacucccacacccaagaag

SEQ ID NO: 2360331 - RNA, 18 nt, Human
aauuccaagugauugaaa

SEQ ID NO: 2360332 - RNA, 16 nt, Human
aauucccauuuugcaa

SEQ ID NO: 2360333 - RNA, 22 nt, Human
aauucccauuuugcaaaauuuc

SEQ ID NO: 2360334 - RNA, 21 nt, Human
aauucccauuuugcaaaauuu

SEQ ID NO: 2360335 - RNA, 19 nt, Human
aauucccauuuugcaaaau

SEQ ID NO: 2360336 - RNA, 17 nt, Human
aauucccauuuugcaaa

SEQ ID NO: 2360337 - RNA, 16 nt, Human
aauuccaugaaucgcu

SEQ ID NO: 2360338 - RNA, 18 nt, Human
aauuccaugaaucgcuuc

SEQ ID NO: 2360339 - RNA, 10 nt, Human
aauuccauga

SEQ ID NO: 2360340 - RNA, 11 nt, Human
aauuccaugaa

SEQ ID NO: 2360341 - RNA, 14 nt, Human
aauuccccacccug

SEQ ID NO: 2360342 - RNA, 12 nt, Human
aauuccccagau

SEQ ID NO: 2360343 - RNA, 21 nt, Human
aauuccacuggacuugagcuu

SEQ ID NO: 2360344 - RNA, 14 nt, Human
aauuccacugucaa

SEQ ID NO: 2360345 - RNA, 22 nt, Human
aauuccacugucaagaaagagc

SEQ ID NO: 2360346 - RNA, 16 nt, Human
aauuccaauaugauga

SEQ ID NO: 2360347 - RNA, 22 nt, Human
aauuccacuuauaggaauugac

SEQ ID NO: 2360348 - RNA, 14 nt, Human
aauuccacuggacu

SEQ ID NO: 2360349 - RNA, 13 nt, Human
aauuccacuggac

SEQ ID NO: 2360350 - RNA, 12 nt, Human
aauuccaaggag

SEQ ID NO: 2360351 - RNA, 23 nt, Human
aauuccaaggaguuccaugaaga

SEQ ID NO: 2360352 - RNA, 14 nt, Human
aauuccaaaggaau

SEQ ID NO: 2360353 - RNA, 15 nt, Human
aauucauuuuuuuca

SEQ ID NO: 2360354 - RNA, 15 nt, Human
uaccuguauucccag

SEQ ID NO: 2360355 - RNA, 13 nt, Human
uaccugugaaaua

SEQ ID NO: 2360356 - RNA, 18 nt, Human
aauuaauuuuuuuauugu

SEQ ID NO: 2360357 - RNA, 21 nt, Human
aauuaauuuuuuuauuguuua

SEQ ID NO: 2360358 - RNA, 22 nt, Human
aauuaauuuuuuuauuguuuaa

SEQ ID NO: 2360359 - RNA, 23 nt, Human
aauuaauuuuuuuauuguuuaaa

SEQ ID NO: 2360360 - RNA, 23 nt, Human
aauuacaauugucauuuauaaaa

SEQ ID NO: 2360361 - RNA, 11 nt, Human
aauuacaggaa

SEQ ID NO: 2360362 - RNA, 17 nt, Human
aauuacuacaaaauuug

SEQ ID NO: 2360363 - RNA, 15 nt, Human
aauuacuacaaaauu

SEQ ID NO: 2360364 - RNA, 14 nt, Human
aauuacaauuguca

SEQ ID NO: 2360365 - RNA, 14 nt, Human
aauuacacccaaag

SEQ ID NO: 2360366 - RNA, 21 nt, Human
aauuaccuugagccaguaauu

SEQ ID NO: 2360367 - RNA, 21 nt, Human
aauuaccuuagauuagcucug

SEQ ID NO: 2360368 - RNA, 23 nt, Human
aauuaccuuagauuagcucugga

SEQ ID NO: 2360369 - RNA, 16 nt, Human
aauuagcugugugaaa

SEQ ID NO: 2360370 - RNA, 22 nt, Human
aauuaggaaguguaacagcuga

SEQ ID NO: 2360371 - RNA, 20 nt, Human
aauuaggaauaaauaaaaau

SEQ ID NO: 2360372 - RNA, 21 nt, Human
aauuaggaaguguaacagcug

SEQ ID NO: 2360373 - RNA, 17 nt, Human
aauuaggaagugauuau

SEQ ID NO: 2360374 - RNA, 16 nt, Human
aauuacuacaaaauuu

SEQ ID NO: 2360375 - RNA, 13 nt, Human
aauuacucaggaa

SEQ ID NO: 2360376 - RNA, 19 nt, Human
aauuacucaggaagaacac

SEQ ID NO: 2360377 - RNA, 14 nt, Human
aauuacugguccaa

SEQ ID NO: 2360378 - RNA, 15 nt, Human
aauuagccaagugug

SEQ ID NO: 2360379 - RNA, 14 nt, Human
aauuagccgggcgu

SEQ ID NO: 2360380 - RNA, 12 nt, Human
aauuagcaauug

SEQ ID NO: 2360381 - RNA, 14 nt, Human
uaccacucaggcca

SEQ ID NO: 2360382 - RNA, 13 nt, Human
uaccacuccugcc

SEQ ID NO: 2360383 - RNA, 10 nt, Human
uaccaccucc

SEQ ID NO: 2360384 - RNA, 19 nt, Human
uaccaccccuuccuguccc

SEQ ID NO: 2360385 - RNA, 19 nt, Human
uacauuggcugguaacagu

SEQ ID NO: 2360386 - RNA, 15 nt, Human
uaccacccaaugcug

SEQ ID NO: 2360387 - RNA, 14 nt, Human
uaccacccccacac

SEQ ID NO: 2360388 - RNA, 15 nt, Human
uaccacccccacacc

SEQ ID NO: 2360389 - RNA, 14 nt, Human
uaccaccccuuccu

SEQ ID NO: 2360390 - RNA, 15 nt, Human
uaccaccccuuccug

SEQ ID NO: 2360391 - RNA, 16 nt, Human
uaccaccccuuccugu

SEQ ID NO: 2360392 - RNA, 17 nt, Human
uaccaccccuuccuguc

SEQ ID NO: 2360393 - RNA, 18 nt, Human
uaccaccccuuccugucc

SEQ ID NO: 2360394 - RNA, 23 nt, Human
uaccugccaggaagccagcaggc

SEQ ID NO: 2360395 - RNA, 16 nt, Human
uaccugcccugacaug

SEQ ID NO: 2360396 - RNA, 18 nt, Human
uaccugccaggaagccag

SEQ ID NO: 2360397 - RNA, 20 nt, Human
uaccugccaggaagccagca

SEQ ID NO: 2360398 - RNA, 21 nt, Human
uaccuggguccuuuucagaag

SEQ ID NO: 2360399 - RNA, 17 nt, Human
uaccuggaggaggagca

SEQ ID NO: 2360400 - RNA, 14 nt, Human
uaccugggaagggg

SEQ ID NO: 2360401 - RNA, 20 nt, Human
uaccugggcauacuaauaaa

SEQ ID NO: 2360402 - RNA, 14 nt, Human
uaccugcucuccaa

SEQ ID NO: 2360403 - RNA, 23 nt, Human
uaccugcucuccaagucucagug

SEQ ID NO: 2360404 - RNA, 10 nt, Human
uaccuguccc

SEQ ID NO: 2360405 - RNA, 18 nt, Human
uaccugggugauuacaua

SEQ ID NO: 2360406 - RNA, 13 nt, Human
uaccugucccccu

SEQ ID NO: 2360407 - RNA, 14 nt, Human
uaccugucccccug

SEQ ID NO: 2360408 - RNA, 16 nt, Human
uaccugucccccugac

SEQ ID NO: 2360409 - RNA, 17 nt, Human
uaccugucccccugaca

SEQ ID NO: 2360410 - RNA, 13 nt, Human
uacguuuguaugu

SEQ ID NO: 2360411 - RNA, 14 nt, Human
uacguuuguaugug

SEQ ID NO: 2360412 - RNA, 20 nt, Human
uacguuuguauguguguaga

SEQ ID NO: 2360413 - RNA, 13 nt, Human
uacuacuccugua

SEQ ID NO: 2360414 - RNA, 17 nt, Human
uacuacuccuguaggaa

SEQ ID NO: 2360415 - RNA, 13 nt, Human
uacguuuuuguaa

SEQ ID NO: 2360416 - RNA, 16 nt, Human
uacuaaaaagaaggaa

SEQ ID NO: 2360417 - RNA, 23 nt, Human
uacuaaaaagaaggaaaaugauc

SEQ ID NO: 2360418 - RNA, 17 nt, Human
uacuaaaaagaaggaaa

SEQ ID NO: 2360419 - RNA, 16 nt, Human
uacuacuccuguaauu

SEQ ID NO: 2360420 - RNA, 20 nt, Human
uacuaucaugucaaacguga

SEQ ID NO: 2360421 - RNA, 14 nt, Human
uacuauauuuaugg

SEQ ID NO: 2360422 - RNA, 19 nt, Human
uacuauauaugugaugauc

SEQ ID NO: 2360423 - RNA, 22 nt, Human
uacuacuguggaaaaauauuua

SEQ ID NO: 2360424 - RNA, 20 nt, Human
uacuacuuuugcaugaaaau

SEQ ID NO: 2360425 - RNA, 12 nt, Human
uacuagaacaca

SEQ ID NO: 2360426 - RNA, 18 nt, Human
uacuagaacacagaaagc

SEQ ID NO: 2360427 - RNA, 14 nt, Human
uacuagaagaugaa

SEQ ID NO: 2360428 - RNA, 20 nt, Human
uacuacuguggaaaaauauu

SEQ ID NO: 2360429 - RNA, 16 nt, Human
uacuacugaaucucua

SEQ ID NO: 2360430 - RNA, 17 nt, Human
uacuacugaaucucuaa

SEQ ID NO: 2360431 - RNA, 13 nt, Human
uacuauguaucaa

SEQ ID NO: 2360432 - RNA, 12 nt, Human
uacuauguauca

SEQ ID NO: 2360433 - RNA, 17 nt, Human
uacuagaagaugaauac

SEQ ID NO: 2360434 - RNA, 17 nt, Human
uacuaucuacucuccuc

SEQ ID NO: 2360435 - RNA, 15 nt, Human
uacuaucuacucucc

SEQ ID NO: 2360436 - RNA, 23 nt, Human
uacuauggcccuggccuagcaua

SEQ ID NO: 2360437 - RNA, 23 nt, Human
uacucuccuggaaauauuaagaa

SEQ ID NO: 2360438 - RNA, 22 nt, Human
uacucuccuggaaauauuaaga

SEQ ID NO: 2360439 - RNA, 16 nt, Human
uacucuccucaucucu

SEQ ID NO: 2360440 - RNA, 14 nt, Human
uacucuccucaucu

SEQ ID NO: 2360441 - RNA, 14 nt, Human
uacuaugccugugu

SEQ ID NO: 2360442 - RNA, 13 nt, Human
uacuaugccugug

SEQ ID NO: 2360443 - RNA, 14 nt, Human
uacuauguaucaau

SEQ ID NO: 2360444 - RNA, 22 nt, Human
aauucccuaucuuuuaguuuua

SEQ ID NO: 2360445 - RNA, 10 nt, Human
aauucccuau

SEQ ID NO: 2360446 - RNA, 16 nt, Human
aauucccucucucuga

SEQ ID NO: 2360447 - RNA, 23 nt, Human
aauucccuaucuuuuaguuuuag

SEQ ID NO: 2360448 - RNA, 17 nt, Human
aauucccucucucugac

SEQ ID NO: 2360449 - RNA, 21 nt, Human
aauucccucucucugacucuc

SEQ ID NO: 2360450 - RNA, 23 nt, Human
aauucccucucucugacucucaa

SEQ ID NO: 2360451 - RNA, 19 nt, Human
aauucccuggccuuucaua

SEQ ID NO: 2360452 - RNA, 13 nt, Human
aauucccugcugu

SEQ ID NO: 2360453 - RNA, 14 nt, Human
aauucccugcuguc

SEQ ID NO: 2360454 - RNA, 22 nt, Human
aauuccuauacgcagcgugcuu

SEQ ID NO: 2360455 - RNA, 20 nt, Human
aauucccuggccuuucauau

SEQ ID NO: 2360456 - RNA, 13 nt, Human
aauuccucuggga

SEQ ID NO: 2360457 - RNA, 14 nt, Human
aauuccucugggaa

SEQ ID NO: 2360458 - RNA, 12 nt, Human
aauuccuauugu

SEQ ID NO: 2360459 - RNA, 15 nt, Human
aauuccuauugugau

SEQ ID NO: 2360460 - RNA, 16 nt, Human
aauuccuauugugauu

SEQ ID NO: 2360461 - RNA, 18 nt, Human
aauuccuauugugauuug

SEQ ID NO: 2360462 - RNA, 19 nt, Human
aauuccuauugugauuuga

SEQ ID NO: 2360463 - RNA, 20 nt, Human
aauuccuauugugauuugac

SEQ ID NO: 2360464 - RNA, 22 nt, Human
aauuccuauugugauuugacug

SEQ ID NO: 2360465 - RNA, 22 nt, Human
uacgccaggggaaaaucagccu

SEQ ID NO: 2360466 - RNA, 16 nt, Human
uacgauggcacccagu

SEQ ID NO: 2360467 - RNA, 18 nt, Human
uacgggaggguaaggcug

SEQ ID NO: 2360468 - RNA, 17 nt, Human
uacgccugcauguaaac

SEQ ID NO: 2360469 - RNA, 22 nt, Human
uacgcagcgugcuuuaaaaaau

SEQ ID NO: 2360470 - RNA, 21 nt, Human
aauuccucucacuaaacuuua

SEQ ID NO: 2360471 - RNA, 23 nt, Human
uacgcacuacaugugguuuauag

SEQ ID NO: 2360472 - RNA, 17 nt, Human
uacgcccaacccuuccc

SEQ ID NO: 2360473 - RNA, 19 nt, Human
uacgcccaacccuucccca

SEQ ID NO: 2360474 - RNA, 16 nt, Human
uacgccugccuccccu

SEQ ID NO: 2360475 - RNA, 13 nt, Human
uacgcuaguuauc

SEQ ID NO: 2360476 - RNA, 12 nt, Human
uacguacacauu

SEQ ID NO: 2360477 - RNA, 16 nt, Human
uacguugugcauuugg

SEQ ID NO: 2360478 - RNA, 15 nt, Human
uacguugugcauuug

SEQ ID NO: 2360479 - RNA, 14 nt, Human
uacguacacauuuu

SEQ ID NO: 2360480 - RNA, 13 nt, Human
uacguacacauuu

SEQ ID NO: 2360481 - RNA, 19 nt, Human
uacucugaagggcaucaug

SEQ ID NO: 2360482 - RNA, 22 nt, Human
uacucugaagggcaucaugcau

SEQ ID NO: 2360483 - RNA, 12 nt, Human
uacucugaaggg

SEQ ID NO: 2360484 - RNA, 19 nt, Human
uacucuccucggcccccuc

SEQ ID NO: 2360485 - RNA, 20 nt, Human
uacucuccucggcccccucc

SEQ ID NO: 2360486 - RNA, 17 nt, Human
uacucugguucuuuguu

SEQ ID NO: 2360487 - RNA, 15 nt, Human
uacucugucagaugg

SEQ ID NO: 2360488 - RNA, 15 nt, Human
uacucugguucuuug

SEQ ID NO: 2360489 - RNA, 14 nt, Human
uacuggagaagucu

SEQ ID NO: 2360490 - RNA, 16 nt, Human
uacuggagaaaaugga

SEQ ID NO: 2360491 - RNA, 17 nt, Human
uacuggaaguuuugcau

SEQ ID NO: 2360492 - RNA, 12 nt, Human
uacucuguguca

SEQ ID NO: 2360493 - RNA, 23 nt, Human
uacuggaaguuuugcauuuaugg

SEQ ID NO: 2360494 - RNA, 18 nt, Human
uacuggaaguuuugcauu

SEQ ID NO: 2360495 - RNA, 22 nt, Human
uacuggcaaaaggaucuuugug

SEQ ID NO: 2360496 - RNA, 18 nt, Human
uacuggcaaaaggaucuu

SEQ ID NO: 2360497 - RNA, 14 nt, Human
uacuggccucgccu

SEQ ID NO: 2360498 - RNA, 19 nt, Human
uacuggccucgccuggccu

SEQ ID NO: 2360499 - RNA, 21 nt, Human
uacuggccucgccuggccuga

SEQ ID NO: 2360500 - RNA, 18 nt, Human
uacuguaaggcaaucaug

SEQ ID NO: 2360501 - RNA, 14 nt, Human
uacuguaagaaaau

SEQ ID NO: 2360502 - RNA, 19 nt, Human
uacuguaaggcaaucaugg

SEQ ID NO: 2360503 - RNA, 18 nt, Human
uacuguaauuugugauac

SEQ ID NO: 2360504 - RNA, 20 nt, Human
uacuguaauuugugauacaa

SEQ ID NO: 2360505 - RNA, 19 nt, Human
uacuguaauuugugauaca

SEQ ID NO: 2360506 - RNA, 14 nt, Human
aauugacuuauuua

SEQ ID NO: 2360507 - RNA, 14 nt, Human
aauugacugucacu

SEQ ID NO: 2360508 - RNA, 22 nt, Human
aauugacccacaagaaaugaaa

SEQ ID NO: 2360509 - RNA, 15 nt, Human
uacuguaguuuuucu

SEQ ID NO: 2360510 - RNA, 13 nt, Human
uacuguaguuuuu

SEQ ID NO: 2360511 - RNA, 14 nt, Human
uacuguacuuaaua

SEQ ID NO: 2360512 - RNA, 12 nt, Human
uacuguaguuuu

SEQ ID NO: 2360513 - RNA, 21 nt, Human
aauugacccacaagaaaugaa

SEQ ID NO: 2360514 - RNA, 23 nt, Human
uacuguaauuugugauacaaugc

SEQ ID NO: 2360515 - RNA, 21 nt, Human
uacuguacaugaaaacacauu

SEQ ID NO: 2360516 - RNA, 14 nt, Human
uacuggcuggugau

SEQ ID NO: 2360517 - RNA, 18 nt, Human
uacuguacaugaaaacac

SEQ ID NO: 2360518 - RNA, 22 nt, Human
uacuguacaugaaaacacauuu

SEQ ID NO: 2360519 - RNA, 19 nt, Human
aauugaggucugcucggcc

SEQ ID NO: 2360520 - RNA, 14 nt, Human
aauugaggucugcu

SEQ ID NO: 2360521 - RNA, 15 nt, Human
aauugacucaaaucu

SEQ ID NO: 2360522 - RNA, 17 nt, Human
aauugaguuuucagugg

SEQ ID NO: 2360523 - RNA, 19 nt, Human
aauugaugggauuugguca

SEQ ID NO: 2360524 - RNA, 21 nt, Human
aauugaucauagguauuucaa

SEQ ID NO: 2360525 - RNA, 22 nt, Human
aauugaucauagguauuucaaa

SEQ ID NO: 2360526 - RNA, 13 nt, Human
aauugauguguuu

SEQ ID NO: 2360527 - RNA, 12 nt, Human
aauugcauuucc

SEQ ID NO: 2360528 - RNA, 14 nt, Human
aauugauguguuua

SEQ ID NO: 2360529 - RNA, 14 nt, Human
aauugccaaagcug

SEQ ID NO: 2360530 - RNA, 22 nt, Human
aauugaucauuuuccccccacu

SEQ ID NO: 2360531 - RNA, 12 nt, Human
aauugccauauu

SEQ ID NO: 2360532 - RNA, 13 nt, Human
aauugccauauug

SEQ ID NO: 2360533 - RNA, 15 nt, Human
aauugccauauugca

SEQ ID NO: 2360534 - RNA, 15 nt, Human
aauugccugacgaac

SEQ ID NO: 2360535 - RNA, 19 nt, Human
aauugccugcagagagaag

SEQ ID NO: 2360536 - RNA, 23 nt, Human
aauugccugacgaacuccuugau

SEQ ID NO: 2360537 - RNA, 16 nt, Human
aauugccauauugcac

SEQ ID NO: 2360538 - RNA, 17 nt, Human
aauugccauauugcaca

SEQ ID NO: 2360539 - RNA, 19 nt, Human
aauugccauauugcacaug

SEQ ID NO: 2360540 - RNA, 23 nt, Human
aauugccauauugcacaugucuu

SEQ ID NO: 2360541 - RNA, 14 nt, Human
uaugccucuccuuu

SEQ ID NO: 2360542 - RNA, 21 nt, Human
uaugccggaugugcuuuucuc

SEQ ID NO: 2360543 - RNA, 23 nt, Human
uaugccggaugugcuuuucucca

SEQ ID NO: 2360544 - RNA, 20 nt, Human
uaugccgaaugcccucaggg

SEQ ID NO: 2360545 - RNA, 15 nt, Human
uaugccggaugugcu

SEQ ID NO: 2360546 - RNA, 16 nt, Human
uaugccggaugugcuu

SEQ ID NO: 2360547 - RNA, 16 nt, Human
uaugccucuguauuua

SEQ ID NO: 2360548 - RNA, 20 nt, Human
uaugccucuccuuuguauau

SEQ ID NO: 2360549 - RNA, 21 nt, Human
uaugccucuccuuuguauauu

SEQ ID NO: 2360550 - RNA, 15 nt, Human
uaugccucuccuuug

SEQ ID NO: 2360551 - RNA, 17 nt, Human
uaugccucuccuuugua

SEQ ID NO: 2360552 - RNA, 18 nt, Human
uaugccucuccuuuguau

SEQ ID NO: 2360553 - RNA, 19 nt, Human
uaugccucuccuuuguaua

SEQ ID NO: 2360554 - RNA, 22 nt, Human
uaugcauuuaaauacagucuuc

SEQ ID NO: 2360555 - RNA, 21 nt, Human
uaugcauuuaaauacagucuu

SEQ ID NO: 2360556 - RNA, 14 nt, Human
uaugccaaagauca

SEQ ID NO: 2360557 - RNA, 19 nt, Human
uaugccccauucaacaucu

SEQ ID NO: 2360558 - RNA, 13 nt, Human
uaugcuaaucagg

SEQ ID NO: 2360559 - RNA, 16 nt, Human
uaugccuuuaaaucug

SEQ ID NO: 2360560 - RNA, 19 nt, Human
uaugccuucuuauugcuuu

SEQ ID NO: 2360561 - RNA, 20 nt, Human
uaugccuuuaaaucugugau

SEQ ID NO: 2360562 - RNA, 22 nt, Human
uaugccuuuaaaucugugauga

SEQ ID NO: 2360563 - RNA, 12 nt, Human
uaugccuguacu

SEQ ID NO: 2360564 - RNA, 10 nt, Human
uaugccugug

SEQ ID NO: 2360565 - RNA, 22 nt, Human
uaugccuguacucgcuugugca

SEQ ID NO: 2360566 - RNA, 14 nt, Human
uaugccuucuuauu

SEQ ID NO: 2360567 - RNA, 17 nt, Human
uaugccugggcagaagg

SEQ ID NO: 2360568 - RNA, 18 nt, Human
uaugaacggugagcauug

SEQ ID NO: 2360569 - RNA, 17 nt, Human
uaugaacauauuguuga

SEQ ID NO: 2360570 - RNA, 19 nt, Human
uaugaacauauuguugaaa

SEQ ID NO: 2360571 - RNA, 16 nt, Human
uaugauuaaguaauga

SEQ ID NO: 2360572 - RNA, 20 nt, Human
uaugauuaaguaaugauaac

SEQ ID NO: 2360573 - RNA, 24 nt, Human
uaugcauuugaaaauuuugauguu

SEQ ID NO: 2360574 - RNA, 23 nt, Human
uaugcauuugaaaauuuugaugu

SEQ ID NO: 2360575 - RNA, 11 nt, Human
uaugcauuuga

SEQ ID NO: 2360576 - RNA, 21 nt, Human
uaugauuaaguaaugauaacu

SEQ ID NO: 2360577 - RNA, 15 nt, Human
uaugcuuacugauau

SEQ ID NO: 2360578 - RNA, 15 nt, Human
uaugcuuauacacuu

SEQ ID NO: 2360579 - RNA, 16 nt, Human
uaugcuacuacaaaaa

SEQ ID NO: 2360580 - RNA, 16 nt, Human
uaugcugccaaauuuu

SEQ ID NO: 2360581 - RNA, 22 nt, Human
uaugcugccaaauuuuggccaa

SEQ ID NO: 2360582 - RNA, 20 nt, Human
uaugcugccaaauuuuggcc

SEQ ID NO: 2360583 - RNA, 17 nt, Human
uauggcuuuugugcauu

SEQ ID NO: 2360584 - RNA, 21 nt, Human
uaugcuuacugauauauuuua

SEQ ID NO: 2360585 - RNA, 16 nt, Human
uaugcuuacugauaua

SEQ ID NO: 2360586 - RNA, 17 nt, Human
uaugcuuaguaaugcua

SEQ ID NO: 2360587 - RNA, 21 nt, Human
uauggcuuuugugcauuaucu

SEQ ID NO: 2360588 - RNA, 18 nt, Human
uauggcuuuugugcauua

SEQ ID NO: 2360589 - RNA, 19 nt, Human
uauggggggccaacaccag

SEQ ID NO: 2360590 - RNA, 22 nt, Human
uaugggggccuggauucauuuc

SEQ ID NO: 2360591 - RNA, 20 nt, Human
uauggggcugaacggggaga

SEQ ID NO: 2360592 - RNA, 20 nt, Human
uauggggauagaugugugga

SEQ ID NO: 2360593 - RNA, 23 nt, Human
uauggcuuuugugcauuaucuag

SEQ ID NO: 2360594 - RNA, 23 nt, Human
uauggggggccaacaccagggau

SEQ ID NO: 2360595 - RNA, 22 nt, Human
uauggguguguguuugugugag

SEQ ID NO: 2360596 - RNA, 12 nt, Human
acagccuggcac

SEQ ID NO: 2360597 - RNA, 19 nt, Human
acagcggcuggacuuggag

SEQ ID NO: 2360598 - RNA, 21 nt, Human
acagccucugaccccuccuca

SEQ ID NO: 2360599 - RNA, 22 nt, Human
acagccucugaccccuccucac

SEQ ID NO: 2360600 - RNA, 23 nt, Human
acagccucugaccccuccucacu

SEQ ID NO: 2360601 - RNA, 13 nt, Human
acagccucugacu

SEQ ID NO: 2360602 - RNA, 20 nt, Human
acagccucugaccccuccuc

SEQ ID NO: 2360603 - RNA, 16 nt, Human
acagccucuuagaugc

SEQ ID NO: 2360604 - RNA, 18 nt, Human
acagaugccacacaagga

SEQ ID NO: 2360605 - RNA, 17 nt, Human
acagaugcaaugugcua

SEQ ID NO: 2360606 - RNA, 16 nt, Human
acagaugcaaugugcu

SEQ ID NO: 2360607 - RNA, 17 nt, Human
acagaugaauguauuua

SEQ ID NO: 2360608 - RNA, 14 nt, Human
acagaugaauguau

SEQ ID NO: 2360609 - RNA, 19 nt, Human
acagaugaaacacaaacaa

SEQ ID NO: 2360610 - RNA, 20 nt, Human
acagaugaaacacaaacaau

SEQ ID NO: 2360611 - RNA, 22 nt, Human
acagaucuggaaccucagccug

SEQ ID NO: 2360612 - RNA, 21 nt, Human
acagaucuggaaccucagccu

SEQ ID NO: 2360613 - RNA, 20 nt, Human
acagaucuggaaccucagcc

SEQ ID NO: 2360614 - RNA, 16 nt, Human
acagaucuggaaccuc

SEQ ID NO: 2360615 - RNA, 14 nt, Human
acagaucuggaacc

SEQ ID NO: 2360616 - RNA, 20 nt, Human
acagaugcaaugugcuacug

SEQ ID NO: 2360617 - RNA, 15 nt, Human
acagauuugagcuca

SEQ ID NO: 2360618 - RNA, 14 nt, Human
acagauuugagcuc

SEQ ID NO: 2360619 - RNA, 17 nt, Human
acagcaaggagauuuac

SEQ ID NO: 2360620 - RNA, 14 nt, Human
acagagacaccugc

SEQ ID NO: 2360621 - RNA, 14 nt, Human
acagagcccacgcc

SEQ ID NO: 2360622 - RNA, 15 nt, Human
acagagcccacgccc

SEQ ID NO: 2360623 - RNA, 18 nt, Human
acagagcccacgccccca

SEQ ID NO: 2360624 - RNA, 19 nt, Human
acagagcccacgcccccac

SEQ ID NO: 2360625 - RNA, 23 nt, Human
acagaucgaaccguuuugaagcu

SEQ ID NO: 2360626 - RNA, 18 nt, Human
acagauccccaagccugg

SEQ ID NO: 2360627 - RNA, 17 nt, Human
acagaucuccuggcaaa

SEQ ID NO: 2360628 - RNA, 12 nt, Human
acagaucuggaa

SEQ ID NO: 2360629 - RNA, 22 nt, Human
acagaucucugcuuuggaaauc

SEQ ID NO: 2360630 - RNA, 21 nt, Human
acagauaguaucuagcaauca

SEQ ID NO: 2360631 - RNA, 23 nt, Human
acagauagucaaaccauaaacuu

SEQ ID NO: 2360632 - RNA, 13 nt, Human
acagauaguugug

SEQ ID NO: 2360633 - RNA, 14 nt, Human
acagaucaagcugu

SEQ ID NO: 2360634 - RNA, 17 nt, Human
acagauauaaauggcug

SEQ ID NO: 2360635 - RNA, 17 nt, Human
acagauccccaagccug

SEQ ID NO: 2360636 - RNA, 14 nt, Human
acagauauaaaugg

SEQ ID NO: 2360637 - RNA, 15 nt, Human
acagaucaagcugug

SEQ ID NO: 2360638 - RNA, 16 nt, Human
acagaucaagcuguga

SEQ ID NO: 2360639 - RNA, 18 nt, Human
acagaucaagcugugaga

SEQ ID NO: 2360640 - RNA, 18 nt, Human
acagccgcuccugucugc

SEQ ID NO: 2360641 - RNA, 14 nt, Human
acagccgcuccugu

SEQ ID NO: 2360642 - RNA, 23 nt, Human
acagccgcagccucccucugacc

SEQ ID NO: 2360643 - RNA, 20 nt, Human
acagcccgggcucugccucc

SEQ ID NO: 2360644 - RNA, 23 nt, Human
acagcaaggaggcuggcuggggc

SEQ ID NO: 2360645 - RNA, 16 nt, Human
acagcaaggcaccugc

SEQ ID NO: 2360646 - RNA, 18 nt, Human
acagcaaggcaccugcag

SEQ ID NO: 2360647 - RNA, 22 nt, Human
acagccgcagccucccucugac

SEQ ID NO: 2360648 - RNA, 18 nt, Human
acagcccgggcucugccu

SEQ ID NO: 2360649 - RNA, 19 nt, Human
acagcccgggcucugccuc

SEQ ID NO: 2360650 - RNA, 16 nt, Human
acagcaaggagauuua

SEQ ID NO: 2360651 - RNA, 16 nt, Human
acagcaaggaggcugg

SEQ ID NO: 2360652 - RNA, 17 nt, Human
acagcaaggaggcuggc

SEQ ID NO: 2360653 - RNA, 21 nt, Human
acagcaaggagauuuacaacu

SEQ ID NO: 2360654 - RNA, 17 nt, Human
acagcccgggcucugcc

SEQ ID NO: 2360655 - RNA, 18 nt, Human
acagcaagggugauggga

SEQ ID NO: 2360656 - RNA, 18 nt, Human
acagcaaggaggcuggcu

SEQ ID NO: 2360657 - RNA, 19 nt, Human
acagcaaggaggcuggcug

SEQ ID NO: 2360658 - RNA, 20 nt, Human
acagcaaggaggcuggcugg

SEQ ID NO: 2360659 - RNA, 21 nt, Human
acagcaaggaggcuggcuggg

SEQ ID NO: 2360660 - RNA, 17 nt, Human
acagccucacagaagaa

SEQ ID NO: 2360661 - RNA, 20 nt, Human
acagccgucagccaaaugua

SEQ ID NO: 2360662 - RNA, 18 nt, Human
acagccucacuugaaugu

SEQ ID NO: 2360663 - RNA, 14 nt, Human
acagccucacagaa

SEQ ID NO: 2360664 - RNA, 19 nt, Human
uaucuuugauucuccuuca

SEQ ID NO: 2360665 - RNA, 22 nt, Human
uaucuuugauucuccuucagcc

SEQ ID NO: 2360666 - RNA, 11 nt, Human
uaucuuugcca

SEQ ID NO: 2360667 - RNA, 16 nt, Human
uaucuuugccacccuc

SEQ ID NO: 2360668 - RNA, 14 nt, Human
uaucuuugccaccc

SEQ ID NO: 2360669 - RNA, 24 nt, Human
acagccgcuccugucugccagcca

SEQ ID NO: 2360670 - RNA, 23 nt, Human
acagccgcuccugucugccagcc

SEQ ID NO: 2360671 - RNA, 20 nt, Human
acagccgcuccugucugcca

SEQ ID NO: 2360672 - RNA, 19 nt, Human
acagccgcuccugucugcc

SEQ ID NO: 2360673 - RNA, 17 nt, Human
acagccgucagccaaau

SEQ ID NO: 2360674 - RNA, 19 nt, Human
acagccgucagccaaaugu

SEQ ID NO: 2360675 - RNA, 18 nt, Human
acagccguuuguucccca

SEQ ID NO: 2360676 - RNA, 23 nt, Human
uaucuuuucuauuguuuauucuu

SEQ ID NO: 2360677 - RNA, 22 nt, Human
uaucuuugccacccucaugcug

SEQ ID NO: 2360678 - RNA, 22 nt, Human
uaucuuuuugcuuacaguuuua

SEQ ID NO: 2360679 - RNA, 19 nt, Human
uaucuuuugaccuguggug

SEQ ID NO: 2360680 - RNA, 13 nt, Human
uaucuuuugaccu

SEQ ID NO: 2360681 - RNA, 14 nt, Human
uaugaacauauugu

SEQ ID NO: 2360682 - RNA, 20 nt, Human
uaugaaauuuaauauagcua

SEQ ID NO: 2360683 - RNA, 15 nt, Human
uaucuuuuuucaaaa

SEQ ID NO: 2360684 - RNA, 22 nt, Human
uaugaaauuuaauauagcuauu

SEQ ID NO: 2360685 - RNA, 21 nt, Human
uaucuuuuuuuuauuccacau

SEQ ID NO: 2360686 - RNA, 15 nt, Human
uaucuccaagaccag

SEQ ID NO: 2360687 - RNA, 11 nt, Human
uaucucaucuc

SEQ ID NO: 2360688 - RNA, 18 nt, Human
uaucucagucaugcauaa

SEQ ID NO: 2360689 - RNA, 23 nt, Human
uaucuccaggauugaagagcauu

SEQ ID NO: 2360690 - RNA, 13 nt, Human
uaucucccccagc

SEQ ID NO: 2360691 - RNA, 14 nt, Human
uaucucccccagcc

SEQ ID NO: 2360692 - RNA, 22 nt, Human
uaucucagucaugcauaaauau

SEQ ID NO: 2360693 - RNA, 17 nt, Human
uaucucaaaacugcacu

SEQ ID NO: 2360694 - RNA, 13 nt, Human
uaucuaucuuaua

SEQ ID NO: 2360695 - RNA, 14 nt, Human
uaucuauauuuuug

SEQ ID NO: 2360696 - RNA, 16 nt, Human
acagagaaggcaggaa

SEQ ID NO: 2360697 - RNA, 14 nt, Human
acagagaaggcagg

SEQ ID NO: 2360698 - RNA, 15 nt, Human
acagagaaggcagga

SEQ ID NO: 2360699 - RNA, 11 nt, Human
acagagaaagu

SEQ ID NO: 2360700 - RNA, 18 nt, Human
acagagaaaguacuucuc

SEQ ID NO: 2360701 - RNA, 17 nt, Human
acagagaaagagagaga

SEQ ID NO: 2360702 - RNA, 19 nt, Human
acagagaaagaggaagcuu

SEQ ID NO: 2360703 - RNA, 14 nt, Human
acagagaaccugga

SEQ ID NO: 2360704 - RNA, 18 nt, Human
acagagaacuaacacuau

SEQ ID NO: 2360705 - RNA, 16 nt, Human
acagagaagacaaaau

SEQ ID NO: 2360706 - RNA, 19 nt, Human
acagagaacuaacacuauu

SEQ ID NO: 2360707 - RNA, 16 nt, Human
uauccggacuccugcc

SEQ ID NO: 2360708 - RNA, 14 nt, Human
uaucccuuccuuuu

SEQ ID NO: 2360709 - RNA, 11 nt, Human
uauccaggacu

SEQ ID NO: 2360710 - RNA, 20 nt, Human
uauccacccagcccauucuc

SEQ ID NO: 2360711 - RNA, 19 nt, Human
uauccacccagcccauucu

SEQ ID NO: 2360712 - RNA, 18 nt, Human
uauccacuuugcacagcu

SEQ ID NO: 2360713 - RNA, 15 nt, Human
uauccacuuugcaca

SEQ ID NO: 2360714 - RNA, 11 nt, Human
uauccagucua

SEQ ID NO: 2360715 - RNA, 17 nt, Human
uauccauauugagucaa

SEQ ID NO: 2360716 - RNA, 18 nt, Human
uauccagguaauccaaga

SEQ ID NO: 2360717 - RNA, 21 nt, Human
uauccagguaauccaagauau

SEQ ID NO: 2360718 - RNA, 16 nt, Human
uaucauuuaauaauau

SEQ ID NO: 2360719 - RNA, 23 nt, Human
uaucaagccaguacgugcuaaca

SEQ ID NO: 2360720 - RNA, 15 nt, Human
uaucaagcagccaag

SEQ ID NO: 2360721 - RNA, 21 nt, Human
uaucaacacuguuacuuucgu

SEQ ID NO: 2360722 - RNA, 21 nt, Human
uauauuuauaacucaucauaa

SEQ ID NO: 2360723 - RNA, 12 nt, Human
uaucaagaaagu

SEQ ID NO: 2360724 - RNA, 21 nt, Human
uaucauuuucugcauuuaacc

SEQ ID NO: 2360725 - RNA, 14 nt, Human
uaucauuuucugca

SEQ ID NO: 2360726 - RNA, 17 nt, Human
uaucauuuuagaagacu

SEQ ID NO: 2360727 - RNA, 20 nt, Human
uaucauuuauuuuuuacauu

SEQ ID NO: 2360728 - RNA, 22 nt, Human
uaucauuuaauaauauacuugu

SEQ ID NO: 2360729 - RNA, 18 nt, Human
uaucauuuaauaauauac

SEQ ID NO: 2360730 - RNA, 19 nt, Human
uaucauuuaauaauauacu

SEQ ID NO: 2360731 - RNA, 20 nt, Human
uaucauuuaauaauauacuu

SEQ ID NO: 2360732 - RNA, 21 nt, Human
uaucauuuaauaauauacuug

SEQ ID NO: 2360733 - RNA, 19 nt, Human
uauccaaaccaaauaaaaa

SEQ ID NO: 2360734 - RNA, 13 nt, Human
uauccaaaagcuu

SEQ ID NO: 2360735 - RNA, 15 nt, Human
uaucauuuuuguaca

SEQ ID NO: 2360736 - RNA, 17 nt, Human
uaucauuuuuguacagu

SEQ ID NO: 2360737 - RNA, 21 nt, Human
uaucauuuuuguacaguuugc

SEQ ID NO: 2360738 - RNA, 22 nt, Human
uaucauuuuuguacaguuugcu

SEQ ID NO: 2360739 - RNA, 16 nt, Human
uauauuuaguuauagu

SEQ ID NO: 2360740 - RNA, 18 nt, Human
uauauuuaguuauaguuu

SEQ ID NO: 2360741 - RNA, 21 nt, Human
uauauuuagauuguuaaaaua

SEQ ID NO: 2360742 - RNA, 16 nt, Human
uauauuuauaacucau

SEQ ID NO: 2360743 - RNA, 15 nt, Human
uauauuuauaacuca

SEQ ID NO: 2360744 - RNA, 14 nt, Human
uauauuuauaacuc

SEQ ID NO: 2360745 - RNA, 12 nt, Human
uauauuuauaac

SEQ ID NO: 2360746 - RNA, 16 nt, Human
uauauuuaguaucuuu

SEQ ID NO: 2360747 - RNA, 19 nt, Human
uauauugucagauauuuuu

SEQ ID NO: 2360748 - RNA, 19 nt, Human
uauauuguguuuguguauu

SEQ ID NO: 2360749 - RNA, 15 nt, Human
uauauuguuugcuaa

SEQ ID NO: 2360750 - RNA, 19 nt, Human
uauauuguaagaaauacug

SEQ ID NO: 2360751 - RNA, 15 nt, Human
uauauuguaagaaau

SEQ ID NO: 2360752 - RNA, 12 nt, Human
uauauuguaaga

SEQ ID NO: 2360753 - RNA, 22 nt, Human
uauauuguaagaaauacuguac

SEQ ID NO: 2360754 - RNA, 20 nt, Human
uauauuguaagaaauacugu

SEQ ID NO: 2360755 - RNA, 18 nt, Human
uauauuguguuuguguau

SEQ ID NO: 2360756 - RNA, 20 nt, Human
uauauuaucaugcaaaugcu

SEQ ID NO: 2360757 - RNA, 14 nt, Human
uauauuaucaugca

SEQ ID NO: 2360758 - RNA, 23 nt, Human
uauauuagcauuuaguccaaugu

SEQ ID NO: 2360759 - RNA, 16 nt, Human
uauauuagcauuuagu

SEQ ID NO: 2360760 - RNA, 22 nt, Human
uauauuacuagcauaugaguuu

SEQ ID NO: 2360761 - RNA, 22 nt, Human
acagaccacaucuuuaucuguu

SEQ ID NO: 2360762 - RNA, 13 nt, Human
acagacccugccc

SEQ ID NO: 2360763 - RNA, 14 nt, Human
acagacccugcccu

SEQ ID NO: 2360764 - RNA, 11 nt, Human
acagacauugu

SEQ ID NO: 2360765 - RNA, 12 nt, Human
acagacauuguu

SEQ ID NO: 2360766 - RNA, 16 nt, Human
acagacauuguuuugc

SEQ ID NO: 2360767 - RNA, 20 nt, Human
acagaccacaucuuuaucug

SEQ ID NO: 2360768 - RNA, 21 nt, Human
acagaccacaucuuuaucugu

SEQ ID NO: 2360769 - RNA, 15 nt, Human
acagacccugcccug

SEQ ID NO: 2360770 - RNA, 17 nt, Human
acagaaauuagccgggc

SEQ ID NO: 2360771 - RNA, 17 nt, Human
acagaaauguacagcaa

SEQ ID NO: 2360772 - RNA, 16 nt, Human
acagaaauguacagca

SEQ ID NO: 2360773 - RNA, 14 nt, Human
acagaaauguacag

SEQ ID NO: 2360774 - RNA, 20 nt, Human
acagaaaauggaagacagcu

SEQ ID NO: 2360775 - RNA, 21 nt, Human
acagaaaauauacuguaaaga

SEQ ID NO: 2360776 - RNA, 20 nt, Human
acagaaaauauacuguaaag

SEQ ID NO: 2360777 - RNA, 19 nt, Human
acagaaaauauacuguaaa

SEQ ID NO: 2360778 - RNA, 18 nt, Human
acagaaaauauacuguaa

SEQ ID NO: 2360779 - RNA, 17 nt, Human
acagaaaauucuucucc

SEQ ID NO: 2360780 - RNA, 19 nt, Human
uauaauuuuuuagagagcu

SEQ ID NO: 2360781 - RNA, 19 nt, Human
uauaauuuuuaaaguauau

SEQ ID NO: 2360782 - RNA, 16 nt, Human
uauaaguuugaaggaa

SEQ ID NO: 2360783 - RNA, 20 nt, Human
uauaauuuuuuuauuacuga

SEQ ID NO: 2360784 - RNA, 18 nt, Human
uauaauuuuuuucaauau

SEQ ID NO: 2360785 - RNA, 15 nt, Human
uauaauuuuuuaaag

SEQ ID NO: 2360786 - RNA, 21 nt, Human
uauaauuuuuuucaauauuua

SEQ ID NO: 2360787 - RNA, 12 nt, Human
uauacaacagug

SEQ ID NO: 2360788 - RNA, 17 nt, Human
acagaaaauauacugua

SEQ ID NO: 2360789 - RNA, 13 nt, Human
uauacaacagugc

SEQ ID NO: 2360790 - RNA, 16 nt, Human
acagaaaauauacugu

SEQ ID NO: 2360791 - RNA, 17 nt, Human
uauacaaauuagaaaau

SEQ ID NO: 2360792 - RNA, 18 nt, Human
uauacaaauuagaaaaug

SEQ ID NO: 2360793 - RNA, 16 nt, Human
uauacaaauuagaaaa

SEQ ID NO: 2360794 - RNA, 14 nt, Human
uauacaaauuagaa

SEQ ID NO: 2360795 - RNA, 13 nt, Human
uauacaaauuaga

SEQ ID NO: 2360796 - RNA, 17 nt, Human
uauaaguguguguuuuu

SEQ ID NO: 2360797 - RNA, 23 nt, Human
uauaaguguguguuuuucauaaa

SEQ ID NO: 2360798 - RNA, 18 nt, Human
uauaaguguacauaugug

SEQ ID NO: 2360799 - RNA, 15 nt, Human
uauaaguguacauau

SEQ ID NO: 2360800 - RNA, 12 nt, Human
uauaaguuucuu

SEQ ID NO: 2360801 - RNA, 13 nt, Human
uauaaguuugaag

SEQ ID NO: 2360802 - RNA, 12 nt, Human
uauaauaaaagg

SEQ ID NO: 2360803 - RNA, 14 nt, Human
uaugugaacauuua

SEQ ID NO: 2360804 - RNA, 12 nt, Human
uaugugaaugau

SEQ ID NO: 2360805 - RNA, 21 nt, Human
uaugugaauccucuucuuuau

SEQ ID NO: 2360806 - RNA, 22 nt, Human
uaugugaauauggacucaguuu

SEQ ID NO: 2360807 - RNA, 19 nt, Human
uaugugacaauuuuguaca

SEQ ID NO: 2360808 - RNA, 22 nt, Human
uaugugaaugaucucucugaau

SEQ ID NO: 2360809 - RNA, 17 nt, Human
uaugugaaacauguuuc

SEQ ID NO: 2360810 - RNA, 13 nt, Human
uaugugagugugu

SEQ ID NO: 2360811 - RNA, 23 nt, Human
uaugugccagauuuaugcauauu

SEQ ID NO: 2360812 - RNA, 20 nt, Human
uauguggaguucaucuugaa

SEQ ID NO: 2360813 - RNA, 16 nt, Human
uauguggaaguguggg

SEQ ID NO: 2360814 - RNA, 12 nt, Human
uauguggaagug

SEQ ID NO: 2360815 - RNA, 15 nt, Human
acaggcauguucucu

SEQ ID NO: 2360816 - RNA, 18 nt, Human
acaggcauguucucugag

SEQ ID NO: 2360817 - RNA, 19 nt, Human
acaggcauguucucugagg

SEQ ID NO: 2360818 - RNA, 20 nt, Human
acaggcauguucucugagga

SEQ ID NO: 2360819 - RNA, 22 nt, Human
acaggcauguucucugaggaca

SEQ ID NO: 2360820 - RNA, 14 nt, Human
uaugugaaacaugu

SEQ ID NO: 2360821 - RNA, 14 nt, Human
uaugucuuggacac

SEQ ID NO: 2360822 - RNA, 17 nt, Human
uaugucuuggacacugu

SEQ ID NO: 2360823 - RNA, 19 nt, Human
uaugucuuggacacuguac

SEQ ID NO: 2360824 - RNA, 21 nt, Human
uaugucuuggacacuguacaa

SEQ ID NO: 2360825 - RNA, 16 nt, Human
uauuaaaacucauuuu

SEQ ID NO: 2360826 - RNA, 12 nt, Human
uauuaaaaauau

SEQ ID NO: 2360827 - RNA, 13 nt, Human
uauuaaaaauaua

SEQ ID NO: 2360828 - RNA, 14 nt, Human
uauuaaaaauauaa

SEQ ID NO: 2360829 - RNA, 15 nt, Human
uauuaaaaauauaaa

SEQ ID NO: 2360830 - RNA, 18 nt, Human
uauuaaaaauauaaaacu

SEQ ID NO: 2360831 - RNA, 19 nt, Human
uauuaaaaauauaaaacug

SEQ ID NO: 2360832 - RNA, 21 nt, Human
uauuaaaaauauaaaacugcg

SEQ ID NO: 2360833 - RNA, 14 nt, Human
uauguuuuugugua

SEQ ID NO: 2360834 - RNA, 18 nt, Human
uauguuuuuguguauuug

SEQ ID NO: 2360835 - RNA, 16 nt, Human
uauguuuuuguucaaa

SEQ ID NO: 2360836 - RNA, 16 nt, Human
uauguuuuugaaggca

SEQ ID NO: 2360837 - RNA, 14 nt, Human
uauguuuuugaagg

SEQ ID NO: 2360838 - RNA, 15 nt, Human
uauguuuuuuuucug

SEQ ID NO: 2360839 - RNA, 22 nt, Human
uauguuuuuuuucugcuggaaa

SEQ ID NO: 2360840 - RNA, 14 nt, Human
uauuaaaaaaaaca

SEQ ID NO: 2360841 - RNA, 23 nt, Human
uauuaaaaaaaacaaaaagaaca

SEQ ID NO: 2360842 - RNA, 13 nt, Human
uauuaaaaaacaa

SEQ ID NO: 2360843 - RNA, 23 nt, Human
uauguuuuuuagaucaaauacuu

SEQ ID NO: 2360844 - RNA, 17 nt, Human
uauguuuuuuagaucaa

SEQ ID NO: 2360845 - RNA, 19 nt, Human
uauguuuuuuagaucaaau

SEQ ID NO: 2360846 - RNA, 17 nt, Human
uauguuuuuuaaaauau

SEQ ID NO: 2360847 - RNA, 15 nt, Human
uauguuuuuguucaa

SEQ ID NO: 2360848 - RNA, 17 nt, Human
uaugugggcagauuuuc

SEQ ID NO: 2360849 - RNA, 23 nt, Human
uaugugggcagauuuucagcaaa

SEQ ID NO: 2360850 - RNA, 14 nt, Human
uauguguaaauaca

SEQ ID NO: 2360851 - RNA, 15 nt, Human
uaugugugaggagcu

SEQ ID NO: 2360852 - RNA, 13 nt, Human
uauguguauguac

SEQ ID NO: 2360853 - RNA, 12 nt, Human
uauguguaugua

SEQ ID NO: 2360854 - RNA, 21 nt, Human
uaugugugaggagcugcuggc

SEQ ID NO: 2360855 - RNA, 16 nt, Human
uaugugugaggagcug

SEQ ID NO: 2360856 - RNA, 14 nt, Human
uauguguguagaca

SEQ ID NO: 2360857 - RNA, 21 nt, Human
uauguuuucaggcuagaugua

SEQ ID NO: 2360858 - RNA, 20 nt, Human
uauguuuugguaucuguucu

SEQ ID NO: 2360859 - RNA, 14 nt, Human
uauguuuugguauc

SEQ ID NO: 2360860 - RNA, 18 nt, Human
uauguuuugguaucuguu

SEQ ID NO: 2360861 - RNA, 22 nt, Human
uauguuuugacauuuuuaguuu

SEQ ID NO: 2360862 - RNA, 12 nt, Human
uauguuuuggua

SEQ ID NO: 2360863 - RNA, 17 nt, Human
acaggacagugcuucag

SEQ ID NO: 2360864 - RNA, 16 nt, Human
acaggacacagucaga

SEQ ID NO: 2360865 - RNA, 15 nt, Human
acaggacacagucag

SEQ ID NO: 2360866 - RNA, 14 nt, Human
acaggacacaguca

SEQ ID NO: 2360867 - RNA, 19 nt, Human
acaggaaucaagagcugcc

SEQ ID NO: 2360868 - RNA, 22 nt, Human
acaggacagugcuucagccuga

SEQ ID NO: 2360869 - RNA, 20 nt, Human
acaggacagugcuucagccu

SEQ ID NO: 2360870 - RNA, 22 nt, Human
acaggacaugcgguagccagca

SEQ ID NO: 2360871 - RNA, 23 nt, Human
acaggaccagggauuuccaugau

SEQ ID NO: 2360872 - RNA, 14 nt, Human
acaggacucugccu

SEQ ID NO: 2360873 - RNA, 18 nt, Human
acaggagggcaagggcca

SEQ ID NO: 2360874 - RNA, 14 nt, Human
acaggaccagauuu

SEQ ID NO: 2360875 - RNA, 17 nt, Human
acaggacccccuucccc

SEQ ID NO: 2360876 - RNA, 14 nt, Human
acaggacccccuuc

SEQ ID NO: 2360877 - RNA, 14 nt, Human
acaggcauguucuc

SEQ ID NO: 2360878 - RNA, 19 nt, Human
acaggauaaagauaucaau

SEQ ID NO: 2360879 - RNA, 19 nt, Human
acaggcaguuacuucugag

SEQ ID NO: 2360880 - RNA, 14 nt, Human
acaggcagguccag

SEQ ID NO: 2360881 - RNA, 16 nt, Human
acaggcagguccaggg

SEQ ID NO: 2360882 - RNA, 16 nt, Human
acaggagugagcacua

SEQ ID NO: 2360883 - RNA, 14 nt, Human
acaggaucagucug

SEQ ID NO: 2360884 - RNA, 13 nt, Human
acaggcaggucca

SEQ ID NO: 2360885 - RNA, 15 nt, Human
acagcuuugcugcug

SEQ ID NO: 2360886 - RNA, 15 nt, Human
acagcuuugugacug

SEQ ID NO: 2360887 - RNA, 21 nt, Human
acagcuuugcugcugaaggcu

SEQ ID NO: 2360888 - RNA, 19 nt, Human
acagcuuugugacuguaua

SEQ ID NO: 2360889 - RNA, 20 nt, Human
acagcuuugugacuguauau

SEQ ID NO: 2360890 - RNA, 21 nt, Human
acagcuuugugacuguauaua

SEQ ID NO: 2360891 - RNA, 23 nt, Human
acagcuuugugacuguauauaaa

SEQ ID NO: 2360892 - RNA, 20 nt, Human
acagcuuucaugauuagcaa

SEQ ID NO: 2360893 - RNA, 12 nt, Human
acagcuuugcug

SEQ ID NO: 2360894 - RNA, 11 nt, Human
acagcuuugcu

SEQ ID NO: 2360895 - RNA, 17 nt, Human
acagcuuuaucaccaga

SEQ ID NO: 2360896 - RNA, 15 nt, Human
acagcuuguauuuug

SEQ ID NO: 2360897 - RNA, 18 nt, Human
acagcuaacacacagcuc

SEQ ID NO: 2360898 - RNA, 19 nt, Human
acagcuaacacacagcucc

SEQ ID NO: 2360899 - RNA, 16 nt, Human
acagcggggccccagg

SEQ ID NO: 2360900 - RNA, 15 nt, Human
acagccugcaaguca

SEQ ID NO: 2360901 - RNA, 22 nt, Human
acagcggcuggacuuggaggua

SEQ ID NO: 2360902 - RNA, 11 nt, Human
acagccuggca

SEQ ID NO: 2360903 - RNA, 21 nt, Human
acagcggcuggacuuggaggu

SEQ ID NO: 2360904 - RNA, 16 nt, Human
acagcguuuaagacug

SEQ ID NO: 2360905 - RNA, 17 nt, Human
acagcguuuaagacugu

SEQ ID NO: 2360906 - RNA, 19 nt, Human
acagcuaacaauugugaag

SEQ ID NO: 2360907 - RNA, 15 nt, Human
acagcuaacacacag

SEQ ID NO: 2360908 - RNA, 13 nt, Human
acagcuaacaugg

SEQ ID NO: 2360909 - RNA, 17 nt, Human
acaggaagucuucaggg

SEQ ID NO: 2360910 - RNA, 20 nt, Human
acaggaagguggugcuuaca

SEQ ID NO: 2360911 - RNA, 15 nt, Human
acaggaagugaagaa

SEQ ID NO: 2360912 - RNA, 20 nt, Human
acaggaagcaccccaugcca

SEQ ID NO: 2360913 - RNA, 15 nt, Human
acaggaagcacccca

SEQ ID NO: 2360914 - RNA, 17 nt, Human
acaggaaguagaggagg

SEQ ID NO: 2360915 - RNA, 10 nt, Human
acaggaagau

SEQ ID NO: 2360916 - RNA, 17 nt, Human
acaggaagaucuuaaau

SEQ ID NO: 2360917 - RNA, 18 nt, Human
acaggaagaucuuaaauu

SEQ ID NO: 2360918 - RNA, 22 nt, Human
acaggaagaucuuaaauuuugu

SEQ ID NO: 2360919 - RNA, 13 nt, Human
acaggaaguacug

SEQ ID NO: 2360920 - RNA, 15 nt, Human
acaggaaaagcugcu

SEQ ID NO: 2360921 - RNA, 16 nt, Human
acaggaaaagcugcug

SEQ ID NO: 2360922 - RNA, 17 nt, Human
acaggaaaagcugcuga

SEQ ID NO: 2360923 - RNA, 16 nt, Human
uauucaauauccuuug

SEQ ID NO: 2360924 - RNA, 21 nt, Human
uauucaauaaaguauuuaauu

SEQ ID NO: 2360925 - RNA, 19 nt, Human
uauucaauaaaguauuuaa

SEQ ID NO: 2360926 - RNA, 20 nt, Human
uauucaauaaaguauuuaau

SEQ ID NO: 2360927 - RNA, 15 nt, Human
uauucaauaaaguau

SEQ ID NO: 2360928 - RNA, 17 nt, Human
uauucaauaaaguauuu

SEQ ID NO: 2360929 - RNA, 14 nt, Human
uauucaauaaagua

SEQ ID NO: 2360930 - RNA, 14 nt, Human
uauucaauuccucu

SEQ ID NO: 2360931 - RNA, 15 nt, Human
uauucaauuccucug

SEQ ID NO: 2360932 - RNA, 16 nt, Human
uauucaauuccucugg

SEQ ID NO: 2360933 - RNA, 17 nt, Human
uauucaauuccucuggg

SEQ ID NO: 2360934 - RNA, 18 nt, Human
uauucaauuccucuggga

SEQ ID NO: 2360935 - RNA, 21 nt, Human
uauucagcuucauuuguguca

SEQ ID NO: 2360936 - RNA, 17 nt, Human
uauucagcuucauuugu

SEQ ID NO: 2360937 - RNA, 19 nt, Human
uauucagcuucauuugugu

SEQ ID NO: 2360938 - RNA, 14 nt, Human
uauucagcuucauu

SEQ ID NO: 2360939 - RNA, 16 nt, Human
uauucagcuucauuug

SEQ ID NO: 2360940 - RNA, 21 nt, Human
uauucagcucauggacuucug

SEQ ID NO: 2360941 - RNA, 22 nt, Human
uauucagugcuguggccugggc

SEQ ID NO: 2360942 - RNA, 18 nt, Human
uauucagugcuguggccu

SEQ ID NO: 2360943 - RNA, 15 nt, Human
uauucagugcugugg

SEQ ID NO: 2360944 - RNA, 20 nt, Human
uauucaguaauaacucuacc

SEQ ID NO: 2360945 - RNA, 14 nt, Human
uauucaguaaaaaa

SEQ ID NO: 2360946 - RNA, 17 nt, Human
uauucaggaaaagccuc

SEQ ID NO: 2360947 - RNA, 19 nt, Human
uauucagcuuuaguagaua

SEQ ID NO: 2360948 - RNA, 16 nt, Human
uauucaggaagcucag

SEQ ID NO: 2360949 - RNA, 14 nt, Human
uauucaggaagcuc

SEQ ID NO: 2360950 - RNA, 14 nt, Human
uauucaguucccag

SEQ ID NO: 2360951 - RNA, 17 nt, Human
uauucaguucccagaau

SEQ ID NO: 2360952 - RNA, 21 nt, Human
uauucaguucccagaaucaaa

SEQ ID NO: 2360953 - RNA, 21 nt, Human
uauucagugcuguggccuggg

SEQ ID NO: 2360954 - RNA, 15 nt, Human
uauucagugucacug

SEQ ID NO: 2360955 - RNA, 22 nt, Human
acaggcgugagccaccgugccu

SEQ ID NO: 2360956 - RNA, 14 nt, Human
acaggcgaggccug

SEQ ID NO: 2360957 - RNA, 20 nt, Human
uauucauaagccaauuuuuc

SEQ ID NO: 2360958 - RNA, 23 nt, Human
uauucauaagccaauuuuucugc

SEQ ID NO: 2360959 - RNA, 14 nt, Human
acaggcucaauauu

SEQ ID NO: 2360960 - RNA, 18 nt, Human
acaggcuacucuccucgg

SEQ ID NO: 2360961 - RNA, 12 nt, Human
acaggcuccugc

SEQ ID NO: 2360962 - RNA, 16 nt, Human
uauuagcuuuacuguu

SEQ ID NO: 2360963 - RNA, 16 nt, Human
uauuagggagaaaauu

SEQ ID NO: 2360964 - RNA, 15 nt, Human
uauuagggagaaaau

SEQ ID NO: 2360965 - RNA, 21 nt, Human
uauuagggagaaaauucaauu

SEQ ID NO: 2360966 - RNA, 17 nt, Human
uauuagggguaauauau

SEQ ID NO: 2360967 - RNA, 18 nt, Human
uauuagggguaauauauu

SEQ ID NO: 2360968 - RNA, 14 nt, Human
uauuaguaccauag

SEQ ID NO: 2360969 - RNA, 21 nt, Human
uauuaguacugcucuuguuuc

SEQ ID NO: 2360970 - RNA, 14 nt, Human
uauuagcuuuacug

SEQ ID NO: 2360971 - RNA, 16 nt, Human
uauuagucuuggggca

SEQ ID NO: 2360972 - RNA, 19 nt, Human
uauuagugaccucagcuuu

SEQ ID NO: 2360973 - RNA, 15 nt, Human
uauucaaacagucuc

SEQ ID NO: 2360974 - RNA, 21 nt, Human
uauuagucuuggggcaggaug

SEQ ID NO: 2360975 - RNA, 21 nt, Human
uauuagugaccucagcuuuga

SEQ ID NO: 2360976 - RNA, 23 nt, Human
uauucaaacagucucaggaaauc

SEQ ID NO: 2360977 - RNA, 14 nt, Human
uauuacuucugcua

SEQ ID NO: 2360978 - RNA, 23 nt, Human
uauuacuuauuuuugacaguguu

SEQ ID NO: 2360979 - RNA, 21 nt, Human
uauuacuguuugucuucuccc

SEQ ID NO: 2360980 - RNA, 13 nt, Human
uauuacuucugcu

SEQ ID NO: 2360981 - RNA, 18 nt, Human
uauuacugucugguuuua

SEQ ID NO: 2360982 - RNA, 23 nt, Human
uauuacugucugguuuuaacaau

SEQ ID NO: 2360983 - RNA, 22 nt, Human
uauuacuaugacugcuccccag

SEQ ID NO: 2360984 - RNA, 13 nt, Human
uauuaaaaucuua

SEQ ID NO: 2360985 - RNA, 17 nt, Human
uauuaaaaugauuguaa

SEQ ID NO: 2360986 - RNA, 18 nt, Human
uauuaaaaugauuguaaa

SEQ ID NO: 2360987 - RNA, 19 nt, Human
uauuaaaaugauuguaaaa

SEQ ID NO: 2360988 - RNA, 10 nt, Human
uauuaaaauc

SEQ ID NO: 2360989 - RNA, 20 nt, Human
uauuaaaauaagcacugugc

SEQ ID NO: 2360990 - RNA, 22 nt, Human
uauuaaaauauggcuauaaaua

SEQ ID NO: 2360991 - RNA, 20 nt, Human
uauuaaaaugauuguaaaau

SEQ ID NO: 2360992 - RNA, 22 nt, Human
uauuaaaaugauuguaaaauag

SEQ ID NO: 2360993 - RNA, 22 nt, Human
uauuacuaaggaguaaucugug

SEQ ID NO: 2360994 - RNA, 21 nt, Human
uauuacuagaagaugaauaca

SEQ ID NO: 2360995 - RNA, 14 nt, Human
uauuacuguaagaa

SEQ ID NO: 2360996 - RNA, 22 nt, Human
acagggacugaaaaccucuccu

SEQ ID NO: 2360997 - RNA, 13 nt, Human
acagggacuugaa

SEQ ID NO: 2360998 - RNA, 16 nt, Human
acagggacuugaaguu

SEQ ID NO: 2360999 - RNA, 12 nt, Human
acagggacccac

SEQ ID NO: 2361000 - RNA, 22 nt, Human
acagggaaugccugagugccug

SEQ ID NO: 2361001 - RNA, 16 nt, Human
acagggagcugggaca

SEQ ID NO: 2361002 - RNA, 19 nt, Human
acagggagccuccugccca

SEQ ID NO: 2361003 - RNA, 17 nt, Human
acagggagccuccugcc

SEQ ID NO: 2361004 - RNA, 18 nt, Human
acagggagccuccugccc

SEQ ID NO: 2361005 - RNA, 13 nt, Human
acagggagccucc

SEQ ID NO: 2361006 - RNA, 14 nt, Human
acagggagccuccu

SEQ ID NO: 2361007 - RNA, 15 nt, Human
acagggagccuccug

SEQ ID NO: 2361008 - RNA, 16 nt, Human
acagggagccuccugc

SEQ ID NO: 2361009 - RNA, 21 nt, Human
acagggaggacgcucucuggc

SEQ ID NO: 2361010 - RNA, 20 nt, Human
acagggaggacgcucucugg

SEQ ID NO: 2361011 - RNA, 15 nt, Human
acagggaagagcaga

SEQ ID NO: 2361012 - RNA, 23 nt, Human
acagggaacccugcuugcacuuu

SEQ ID NO: 2361013 - RNA, 22 nt, Human
acagggaacccugcuugcacuu

SEQ ID NO: 2361014 - RNA, 23 nt, Human
acagggaagcuacagguuacaac

SEQ ID NO: 2361015 - RNA, 18 nt, Human
acagggaagcuacagguu

SEQ ID NO: 2361016 - RNA, 19 nt, Human
acagggaagcuacagguua

SEQ ID NO: 2361017 - RNA, 13 nt, Human
acagggaagcuac

SEQ ID NO: 2361018 - RNA, 14 nt, Human
acagggaagcuaca

SEQ ID NO: 2361019 - RNA, 15 nt, Human
acagggaagcuacag

SEQ ID NO: 2361020 - RNA, 16 nt, Human
acagggaagcuacagg

SEQ ID NO: 2361021 - RNA, 12 nt, Human
acaggcugggcu

SEQ ID NO: 2361022 - RNA, 22 nt, Human
acaggcugggcuucaguggcag

SEQ ID NO: 2361023 - RNA, 23 nt, Human
acaggcugggcuucaguggcagc

SEQ ID NO: 2361024 - RNA, 13 nt, Human
acaggcucuuagc

SEQ ID NO: 2361025 - RNA, 15 nt, Human
acaggcucuuagcag

SEQ ID NO: 2361026 - RNA, 19 nt, Human
acaggcucuuagcagcuuc

SEQ ID NO: 2361027 - RNA, 20 nt, Human
acaggcucuuagcagcuucc

SEQ ID NO: 2361028 - RNA, 22 nt, Human
acaggcuccugccaccacgccc

SEQ ID NO: 2361029 - RNA, 21 nt, Human
acaggcuccugccaccacgcc

SEQ ID NO: 2361030 - RNA, 15 nt, Human
acaggcuccugccac

SEQ ID NO: 2361031 - RNA, 13 nt, Human
acaggcuccugcc

SEQ ID NO: 2361032 - RNA, 10 nt, Human
acagggaggg

SEQ ID NO: 2361033 - RNA, 12 nt, Human
acagggagggga

SEQ ID NO: 2361034 - RNA, 13 nt, Human
acagggaugagca

SEQ ID NO: 2361035 - RNA, 14 nt, Human
acagggaugagcau

SEQ ID NO: 2361036 - RNA, 12 nt, Human
acagggcacacc

SEQ ID NO: 2361037 - RNA, 20 nt, Human
acagggcacaccgggcacuc

SEQ ID NO: 2361038 - RNA, 16 nt, Human
acaguaacuuuaugug

SEQ ID NO: 2361039 - RNA, 18 nt, Human
acaguaacuuuaugugua

SEQ ID NO: 2361040 - RNA, 21 nt, Human
acagggaugagcauggagcug

SEQ ID NO: 2361041 - RNA, 23 nt, Human
acagggaugagcauggagcuggc

SEQ ID NO: 2361042 - RNA, 18 nt, Human
acaguacaggcagcacag

SEQ ID NO: 2361043 - RNA, 16 nt, Human
acaguacaggcagcac

SEQ ID NO: 2361044 - RNA, 14 nt, Human
acaguacaggcagc

SEQ ID NO: 2361045 - RNA, 13 nt, Human
acaguacaggcag

SEQ ID NO: 2361046 - RNA, 20 nt, Human
acaguacaggcagcacagag

SEQ ID NO: 2361047 - RNA, 13 nt, Human
acaguaggagccc

SEQ ID NO: 2361048 - RNA, 12 nt, Human
acaguacaggca

SEQ ID NO: 2361049 - RNA, 19 nt, Human
acaguaacuuuauguguaa

SEQ ID NO: 2361050 - RNA, 21 nt, Human
acaguaacuuuauguguaaau

SEQ ID NO: 2361051 - RNA, 14 nt, Human
acaguaagcugcuc

SEQ ID NO: 2361052 - RNA, 14 nt, Human
acaguaaguuccua

SEQ ID NO: 2361053 - RNA, 16 nt, Human
acaguaaguuccuacu

SEQ ID NO: 2361054 - RNA, 20 nt, Human
acaguaaguuccuacuaggc

SEQ ID NO: 2361055 - RNA, 22 nt, Human
acagucaaggaguggcuuacua

SEQ ID NO: 2361056 - RNA, 23 nt, Human
acaguaguaccaaaugcuuuaaa

SEQ ID NO: 2361057 - RNA, 18 nt, Human
acagucaaggaguggcuu

SEQ ID NO: 2361058 - RNA, 21 nt, Human
acagucagauuuccagucucc

SEQ ID NO: 2361059 - RNA, 15 nt, Human
acagucagauuucca

SEQ ID NO: 2361060 - RNA, 17 nt, Human
acagucaccucauggaa

SEQ ID NO: 2361061 - RNA, 18 nt, Human
acagucaccucauggaau

SEQ ID NO: 2361062 - RNA, 23 nt, Human
acaguagucuugaugaccaaagu

SEQ ID NO: 2361063 - RNA, 14 nt, Human
acaguagucuugau

SEQ ID NO: 2361064 - RNA, 21 nt, Human
acaguaguaccaaaugcuuua

SEQ ID NO: 2361065 - RNA, 22 nt, Human
acaguaggagcccagcucugaa

SEQ ID NO: 2361066 - RNA, 14 nt, Human
acaguaggagccca

SEQ ID NO: 2361067 - RNA, 16 nt, Human
acagucaccucaugga

SEQ ID NO: 2361068 - RNA, 15 nt, Human
uaguuacuauaugcc

SEQ ID NO: 2361069 - RNA, 14 nt, Human
uaguucauccaauc

SEQ ID NO: 2361070 - RNA, 14 nt, Human
uaguuacucauuca

SEQ ID NO: 2361071 - RNA, 20 nt, Human
uaguucauccaauccucacu

SEQ ID NO: 2361072 - RNA, 18 nt, Human
uaguucauccaauccuca

SEQ ID NO: 2361073 - RNA, 20 nt, Human
uaguuccaccaucaagccac

SEQ ID NO: 2361074 - RNA, 14 nt, Human
uauaaaaaaaauag

SEQ ID NO: 2361075 - RNA, 23 nt, Human
uauaaaaaaaauaguugagccag

SEQ ID NO: 2361076 - RNA, 20 nt, Human
uauaaaaaccccaaacuguu

SEQ ID NO: 2361077 - RNA, 19 nt, Human
uauaaaaagaaaagauaaa

SEQ ID NO: 2361078 - RNA, 18 nt, Human
uauaaaaagcuuccauga

SEQ ID NO: 2361079 - RNA, 21 nt, Human
uauaaaaagaaaagauaaaga

SEQ ID NO: 2361080 - RNA, 23 nt, Human
uauaaaaagaaaagauaaagaug

SEQ ID NO: 2361081 - RNA, 19 nt, Human
uauaaaaaauggugccuga

SEQ ID NO: 2361082 - RNA, 13 nt, Human
uauaaaaaauggu

SEQ ID NO: 2361083 - RNA, 17 nt, Human
uauaaaaaauggugccu

SEQ ID NO: 2361084 - RNA, 11 nt, Human
uauaaaaacaa

SEQ ID NO: 2361085 - RNA, 17 nt, Human
acacauagcauguaaug

SEQ ID NO: 2361086 - RNA, 14 nt, Human
acacauauaaacau

SEQ ID NO: 2361087 - RNA, 22 nt, Human
acacauauaaacaucacacaca

SEQ ID NO: 2361088 - RNA, 17 nt, Human
acacauaugagggggaa

SEQ ID NO: 2361089 - RNA, 16 nt, Human
acacauaugucauaua

SEQ ID NO: 2361090 - RNA, 13 nt, Human
acacauaugaggg

SEQ ID NO: 2361091 - RNA, 15 nt, Human
acacauacccucuuc

SEQ ID NO: 2361092 - RNA, 19 nt, Human
uauaaaauaaauauauaua

SEQ ID NO: 2361093 - RNA, 21 nt, Human
uauaaaauaaauauauauaaa

SEQ ID NO: 2361094 - RNA, 20 nt, Human
uauaaaaggcaaauguguac

SEQ ID NO: 2361095 - RNA, 13 nt, Human
uauaaaagugauu

SEQ ID NO: 2361096 - RNA, 22 nt, Human
uauaaaagugauuguuggcaca

SEQ ID NO: 2361097 - RNA, 13 nt, Human
uauaaaauaaaua

SEQ ID NO: 2361098 - RNA, 14 nt, Human
uauaaaauaaauau

SEQ ID NO: 2361099 - RNA, 15 nt, Human
uauaaaauaaauaua

SEQ ID NO: 2361100 - RNA, 16 nt, Human
uauaaaauaaauauau

SEQ ID NO: 2361101 - RNA, 17 nt, Human
uauaaaauaaauauaua

SEQ ID NO: 2361102 - RNA, 19 nt, Human
uauaaaagccuguuuaaga

SEQ ID NO: 2361103 - RNA, 19 nt, Human
uauaaaaggcaaaugugua

SEQ ID NO: 2361104 - RNA, 18 nt, Human
uauaaaagcuauggugag

SEQ ID NO: 2361105 - RNA, 22 nt, Human
uauaaaagggacugagaaauuu

SEQ ID NO: 2361106 - RNA, 19 nt, Human
uauaaaaauaaaaaacacu

SEQ ID NO: 2361107 - RNA, 20 nt, Human
uauaaaagccuguuuaagag

SEQ ID NO: 2361108 - RNA, 23 nt, Human
acaccauguuugagcucagaccc

SEQ ID NO: 2361109 - RNA, 14 nt, Human
acaccaucuuuugu

SEQ ID NO: 2361110 - RNA, 18 nt, Human
acacaucacccuuaccau

SEQ ID NO: 2361111 - RNA, 16 nt, Human
acacccucucccagga

SEQ ID NO: 2361112 - RNA, 13 nt, Human
acacccucuccca

SEQ ID NO: 2361113 - RNA, 12 nt, Human
acacccucuccc

SEQ ID NO: 2361114 - RNA, 19 nt, Human
acacccucccccgccacuc

SEQ ID NO: 2361115 - RNA, 22 nt, Human
acacccucgaagcgcgccacuc

SEQ ID NO: 2361116 - RNA, 14 nt, Human
acacccucccccgc

SEQ ID NO: 2361117 - RNA, 16 nt, Human
acacccucccccgcca

SEQ ID NO: 2361118 - RNA, 13 nt, Human
acacccucacacu

SEQ ID NO: 2361119 - RNA, 13 nt, Human
acacccucccccg

SEQ ID NO: 2361120 - RNA, 16 nt, Human
acacccucacacuggg

SEQ ID NO: 2361121 - RNA, 17 nt, Human
acacccgacuccucaaa

SEQ ID NO: 2361122 - RNA, 19 nt, Human
acaccccuuauccaggacu

SEQ ID NO: 2361123 - RNA, 20 nt, Human
acaccccuuauccaggacuc

SEQ ID NO: 2361124 - RNA, 18 nt, Human
acacccucaaccucuucu

SEQ ID NO: 2361125 - RNA, 17 nt, Human
acacccucaaccucuuc

SEQ ID NO: 2361126 - RNA, 18 nt, Human
acaccccuuauccaggac

SEQ ID NO: 2361127 - RNA, 19 nt, Human
acacccaaagagguauuua

SEQ ID NO: 2361128 - RNA, 20 nt, Human
acacccaaagagguauuuau

SEQ ID NO: 2361129 - RNA, 20 nt, Human
acacauuuuauuuuauuaug

SEQ ID NO: 2361130 - RNA, 19 nt, Human
acacauuuuauuuuauuau

SEQ ID NO: 2361131 - RNA, 14 nt, Human
acacauuuuauuuu

SEQ ID NO: 2361132 - RNA, 13 nt, Human
acacauuuuauuu

SEQ ID NO: 2361133 - RNA, 21 nt, Human
acacaugagcaucaggccagg

SEQ ID NO: 2361134 - RNA, 18 nt, Human
acacaugauccugcaauu

SEQ ID NO: 2361135 - RNA, 15 nt, Human
acacaugaaguccaa

SEQ ID NO: 2361136 - RNA, 15 nt, Human
acacaucagcuugcc

SEQ ID NO: 2361137 - RNA, 14 nt, Human
acaccuuucuccuu

SEQ ID NO: 2361138 - RNA, 17 nt, Human
acaccuuucuccuuugu

SEQ ID NO: 2361139 - RNA, 22 nt, Human
acaccuuggacauccuccuccc

SEQ ID NO: 2361140 - RNA, 13 nt, Human
acaccuucucugg

SEQ ID NO: 2361141 - RNA, 22 nt, Human
acaccuuucuccuuuguacuuu

SEQ ID NO: 2361142 - RNA, 16 nt, Human
acaccuuugcaggcau

SEQ ID NO: 2361143 - RNA, 17 nt, Human
acaccuuuuaacucacc

SEQ ID NO: 2361144 - RNA, 15 nt, Human
acaccuuuuaacuca

SEQ ID NO: 2361145 - RNA, 18 nt, Human
acaccuuugcaggcaugc

SEQ ID NO: 2361146 - RNA, 22 nt, Human
acaccuuugcaggcaugcaugu

SEQ ID NO: 2361147 - RNA, 20 nt, Human
acacuaaccacgcuggaccu

SEQ ID NO: 2361148 - RNA, 21 nt, Human
acaccuuuuauugacacagaa

SEQ ID NO: 2361149 - RNA, 23 nt, Human
acaccuuuuauugacacagaaaa

SEQ ID NO: 2361150 - RNA, 15 nt, Human
acaccuuauauuuac

SEQ ID NO: 2361151 - RNA, 14 nt, Human
acaccuuccagcuc

SEQ ID NO: 2361152 - RNA, 16 nt, Human
acaccuuccagcuccu

SEQ ID NO: 2361153 - RNA, 21 nt, Human
acaccuguagucccagcuacu

SEQ ID NO: 2361154 - RNA, 20 nt, Human
acaccuuccagcuccuguaa

SEQ ID NO: 2361155 - RNA, 23 nt, Human
acaccuuggacauccuccuccca

SEQ ID NO: 2361156 - RNA, 19 nt, Human
acaccuggcugagguuccu

SEQ ID NO: 2361157 - RNA, 20 nt, Human
acaccuguagcacuuacugg

SEQ ID NO: 2361158 - RNA, 23 nt, Human
acaccuggcugagguuccucugc

SEQ ID NO: 2361159 - RNA, 17 nt, Human
acaccugggcuuaagaa

SEQ ID NO: 2361160 - RNA, 19 nt, Human
acaccuguagucccagcua

SEQ ID NO: 2361161 - RNA, 17 nt, Human
acaccuguagucccagc

SEQ ID NO: 2361162 - RNA, 16 nt, Human
acaccuguagucccag

SEQ ID NO: 2361163 - RNA, 21 nt, Human
acaccuuagccugcccuccuu

SEQ ID NO: 2361164 - RNA, 21 nt, Human
acaccucugcacaagcugcac

SEQ ID NO: 2361165 - RNA, 19 nt, Human
acaccucugcacaagcugc

SEQ ID NO: 2361166 - RNA, 14 nt, Human
acaccugacucuga

SEQ ID NO: 2361167 - RNA, 16 nt, Human
acaccugacucugaaa

SEQ ID NO: 2361168 - RNA, 18 nt, Human
acaccugacucugaaauc

SEQ ID NO: 2361169 - RNA, 21 nt, Human
acaccugacucugaaaucuga

SEQ ID NO: 2361170 - RNA, 17 nt, Human
acaccugagccagccug

SEQ ID NO: 2361171 - RNA, 12 nt, Human
acaccugaugug

SEQ ID NO: 2361172 - RNA, 14 nt, Human
acaccugaugugua

SEQ ID NO: 2361173 - RNA, 12 nt, Human
acaccucugcca

SEQ ID NO: 2361174 - RNA, 13 nt, Human
acaccucugccag

SEQ ID NO: 2361175 - RNA, 14 nt, Human
acaccucugccaga

SEQ ID NO: 2361176 - RNA, 16 nt, Human
acaccgggcacucaga

SEQ ID NO: 2361177 - RNA, 14 nt, Human
acaccgggccugga

SEQ ID NO: 2361178 - RNA, 15 nt, Human
acaccgagggcgacc

SEQ ID NO: 2361179 - RNA, 22 nt, Human
acaccgccacauggcuuccucc

SEQ ID NO: 2361180 - RNA, 17 nt, Human
acacccucucccaggac

SEQ ID NO: 2361181 - RNA, 12 nt, Human
acacccugcccu

SEQ ID NO: 2361182 - RNA, 17 nt, Human
acacccugcccucaugc

SEQ ID NO: 2361183 - RNA, 19 nt, Human
acacccugugauggggccc

SEQ ID NO: 2361184 - RNA, 18 nt, Human
acacccuuggacuugagg

SEQ ID NO: 2361185 - RNA, 16 nt, Human
acacccuuggacuuga

SEQ ID NO: 2361186 - RNA, 20 nt, Human
acacccuucacauacccucc

SEQ ID NO: 2361187 - RNA, 18 nt, Human
acacuaguuuugugccag

SEQ ID NO: 2361188 - RNA, 19 nt, Human
acacuaguuuugugccagc

SEQ ID NO: 2361189 - RNA, 23 nt, Human
acacuaguuuugugccagccgug

SEQ ID NO: 2361190 - RNA, 13 nt, Human
acacuauaucugu

SEQ ID NO: 2361191 - RNA, 14 nt, Human
acacuauaucugua

SEQ ID NO: 2361192 - RNA, 15 nt, Human
acacuauaucuguau

SEQ ID NO: 2361193 - RNA, 17 nt, Human
acacuauaucuguauau

SEQ ID NO: 2361194 - RNA, 14 nt, Human
acacuaagagagaa

SEQ ID NO: 2361195 - RNA, 15 nt, Human
acacuaaccuggguu

SEQ ID NO: 2361196 - RNA, 18 nt, Human
acacgaacuuuagcugca

SEQ ID NO: 2361197 - RNA, 14 nt, Human
acacuaaccugacc

SEQ ID NO: 2361198 - RNA, 13 nt, Human
acacuaagagaga

SEQ ID NO: 2361199 - RNA, 17 nt, Human
acacuaugguauuugag

SEQ ID NO: 2361200 - RNA, 21 nt, Human
acacuauaucuguauauaaaa

SEQ ID NO: 2361201 - RNA, 18 nt, Human
acacuaugguauuugagu

SEQ ID NO: 2361202 - RNA, 19 nt, Human
acacuaugguauuugagug

SEQ ID NO: 2361203 - RNA, 13 nt, Human
acacuauuuuaug

SEQ ID NO: 2361204 - RNA, 14 nt, Human
acacuauuuuaugc

SEQ ID NO: 2361205 - RNA, 15 nt, Human
acacuauuuuaugca

SEQ ID NO: 2361206 - RNA, 22 nt, Human
acacuaugguauuugaguguuu

SEQ ID NO: 2361207 - RNA, 18 nt, Human
acacuauaucuguauaua

SEQ ID NO: 2361208 - RNA, 18 nt, Human
acacuauuaccaugagaa

SEQ ID NO: 2361209 - RNA, 15 nt, Human
acacucaaaagcugg

SEQ ID NO: 2361210 - RNA, 19 nt, Human
acacucaaaucaagaaacu

SEQ ID NO: 2361211 - RNA, 15 nt, Human
acacucaagaagcag

SEQ ID NO: 2361212 - RNA, 16 nt, Human
acacucaagaagcagg

SEQ ID NO: 2361213 - RNA, 20 nt, Human
acacucacauuuauucugcu

SEQ ID NO: 2361214 - RNA, 22 nt, Human
acacucacauuuauucugcuca

SEQ ID NO: 2361215 - RNA, 17 nt, Human
uauaacuuauauuguaa

SEQ ID NO: 2361216 - RNA, 18 nt, Human
uauaacuuaaaauauuuu

SEQ ID NO: 2361217 - RNA, 17 nt, Human
acacucaagaagcaggc

SEQ ID NO: 2361218 - RNA, 24 nt, Human
uauaacuuauauuguaagaaauac

SEQ ID NO: 2361219 - RNA, 22 nt, Human
uauaacuuauauuguaagaaau

SEQ ID NO: 2361220 - RNA, 21 nt, Human
uauaacuuauauuguaagaaa

SEQ ID NO: 2361221 - RNA, 19 nt, Human
uauaacuuauauuguaaga

SEQ ID NO: 2361222 - RNA, 13 nt, Human
uauaacuugucua

SEQ ID NO: 2361223 - RNA, 19 nt, Human
uauaacuugucuaaauaag

SEQ ID NO: 2361224 - RNA, 15 nt, Human
uauaacuucuuaaaa

SEQ ID NO: 2361225 - RNA, 16 nt, Human
uauaacuucuuaaaag

SEQ ID NO: 2361226 - RNA, 15 nt, Human
uauaaguguguguuu

SEQ ID NO: 2361227 - RNA, 12 nt, Human
acaaugugaacu

SEQ ID NO: 2361228 - RNA, 19 nt, Human
acaaugugaaaagaaaaau

SEQ ID NO: 2361229 - RNA, 17 nt, Human
acaaugugaaaagaaaa

SEQ ID NO: 2361230 - RNA, 19 nt, Human
acaauggaaacugaaugcu

SEQ ID NO: 2361231 - RNA, 14 nt, Human
acaauggaaacuga

SEQ ID NO: 2361232 - RNA, 16 nt, Human
acaauggaaacugaau

SEQ ID NO: 2361233 - RNA, 20 nt, Human
acaauguauuuauuuaaaag

SEQ ID NO: 2361234 - RNA, 21 nt, Human
acaauguauuuauuuaaaaga

SEQ ID NO: 2361235 - RNA, 23 nt, Human
acaauguauuuauuuaaaagauu

SEQ ID NO: 2361236 - RNA, 17 nt, Human
acaaugugaacuuuauu

SEQ ID NO: 2361237 - RNA, 14 nt, Human
acacaauaugaaua

SEQ ID NO: 2361238 - RNA, 22 nt, Human
acacacaaaauguacccaguau

SEQ ID NO: 2361239 - RNA, 14 nt, Human
acacacaacaauua

SEQ ID NO: 2361240 - RNA, 13 nt, Human
acacacacacaca

SEQ ID NO: 2361241 - RNA, 12 nt, Human
acacacacacac

SEQ ID NO: 2361242 - RNA, 14 nt, Human
acacacacacacac

SEQ ID NO: 2361243 - RNA, 16 nt, Human
acacacacacacacag

SEQ ID NO: 2361244 - RNA, 14 nt, Human
acacacacauacac

SEQ ID NO: 2361245 - RNA, 22 nt, Human
uagggaggaccuuaucugugcg

SEQ ID NO: 2361246 - RNA, 23 nt, Human
uagggaggaccagggcagggcca

SEQ ID NO: 2361247 - RNA, 12 nt, Human
uagggagaguca

SEQ ID NO: 2361248 - RNA, 17 nt, Human
uagggagagucauauuu

SEQ ID NO: 2361249 - RNA, 21 nt, Human
acaaugcugugcccuaaagug

SEQ ID NO: 2361250 - RNA, 22 nt, Human
acaaugcuguauuuuaaaagaa

SEQ ID NO: 2361251 - RNA, 19 nt, Human
acaauggauaggcacagga

SEQ ID NO: 2361252 - RNA, 24 nt, Human
acaaugcugugcccuaaaguguau

SEQ ID NO: 2361253 - RNA, 23 nt, Human
acaaugcugugcccuaaagugua

SEQ ID NO: 2361254 - RNA, 22 nt, Human
acaaugcugugcccuaaagugu

SEQ ID NO: 2361255 - RNA, 17 nt, Human
acacacagcucuguccu

SEQ ID NO: 2361256 - RNA, 13 nt, Human
acacacagcucug

SEQ ID NO: 2361257 - RNA, 14 nt, Human
acacacagcucugu

SEQ ID NO: 2361258 - RNA, 15 nt, Human
acacacacacacaca

SEQ ID NO: 2361259 - RNA, 12 nt, Human
acacacacaugc

SEQ ID NO: 2361260 - RNA, 11 nt, Human
acacacacaug

SEQ ID NO: 2361261 - RNA, 15 nt, Human
acacacacaugcaua

SEQ ID NO: 2361262 - RNA, 14 nt, Human
acacacacaugcau

SEQ ID NO: 2361263 - RNA, 13 nt, Human
acacacacaugca

SEQ ID NO: 2361264 - RNA, 17 nt, Human
acacacaccacacauac

SEQ ID NO: 2361265 - RNA, 14 nt, Human
acacacacgcacgc

SEQ ID NO: 2361266 - RNA, 19 nt, Human
acacacacgcacgcacaca

SEQ ID NO: 2361267 - RNA, 21 nt, Human
acacacacgcacgcacacaca

SEQ ID NO: 2361268 - RNA, 16 nt, Human
acacacacaugcauac

SEQ ID NO: 2361269 - RNA, 12 nt, Human
acacacacgcac

SEQ ID NO: 2361270 - RNA, 22 nt, Human
acacacacgcgugcacacacca

SEQ ID NO: 2361271 - RNA, 14 nt, Human
acacaccagagccc

SEQ ID NO: 2361272 - RNA, 15 nt, Human
acacaccagagccca

SEQ ID NO: 2361273 - RNA, 20 nt, Human
acacaccagagcccaccuug

SEQ ID NO: 2361274 - RNA, 21 nt, Human
acacacgcgugcacacaccag

SEQ ID NO: 2361275 - RNA, 21 nt, Human
acacacgcaggaacucccagc

SEQ ID NO: 2361276 - RNA, 19 nt, Human
acacacgugcaauuuguuu

SEQ ID NO: 2361277 - RNA, 15 nt, Human
acacacucaaaucaa

SEQ ID NO: 2361278 - RNA, 21 nt, Human
acacacugcauguuugugauu

SEQ ID NO: 2361279 - RNA, 13 nt, Human
acacacugaugcu

SEQ ID NO: 2361280 - RNA, 22 nt, Human
acacacgugcaauuuguuugug

SEQ ID NO: 2361281 - RNA, 13 nt, Human
acacacuaaucga

SEQ ID NO: 2361282 - RNA, 21 nt, Human
acacaguguuuuuguaaagug

SEQ ID NO: 2361283 - RNA, 20 nt, Human
acacagugggugguggaucu

SEQ ID NO: 2361284 - RNA, 18 nt, Human
acacaguuacacuugugc

SEQ ID NO: 2361285 - RNA, 13 nt, Human
acacagugagucg

SEQ ID NO: 2361286 - RNA, 20 nt, Human
acacacuguguccuggugcu

SEQ ID NO: 2361287 - RNA, 16 nt, Human
acacagugccuucaau

SEQ ID NO: 2361288 - RNA, 19 nt, Human
acacagugccuucaauaaa

SEQ ID NO: 2361289 - RNA, 20 nt, Human
acacagugccuucaauaaau

SEQ ID NO: 2361290 - RNA, 19 nt, Human
acacaguauuacuucugcu

SEQ ID NO: 2361291 - RNA, 22 nt, Human
acacaguauuacuucugcuaca

SEQ ID NO: 2361292 - RNA, 18 nt, Human
acacaguauuacuucugc

SEQ ID NO: 2361293 - RNA, 23 nt, Human
acacacuuuugguuaagucuguu

SEQ ID NO: 2361294 - RNA, 16 nt, Human
acacaguauuacuucu

SEQ ID NO: 2361295 - RNA, 17 nt, Human
acacacugaugcuuaga

SEQ ID NO: 2361296 - RNA, 15 nt, Human
acacacugaugcuua

SEQ ID NO: 2361297 - RNA, 11 nt, Human
acacacugugc

SEQ ID NO: 2361298 - RNA, 16 nt, Human
acacacugugcuuucu

SEQ ID NO: 2361299 - RNA, 17 nt, Human
acacacugugcuuucua

SEQ ID NO: 2361300 - RNA, 19 nt, Human
acacacugugcuuucuauu

SEQ ID NO: 2361301 - RNA, 21 nt, Human
acacacugugcuuucuauugu

SEQ ID NO: 2361302 - RNA, 22 nt, Human
acacacugugcuuucuauugua

SEQ ID NO: 2361303 - RNA, 23 nt, Human
acacacugugcuuucuauuguac

SEQ ID NO: 2361304 - RNA, 16 nt, Human
acacacuguguccugg

SEQ ID NO: 2361305 - RNA, 21 nt, Human
uaguacauaaaggugguaugu

SEQ ID NO: 2361306 - RNA, 19 nt, Human
uaguaccaaaugcuuuaaa

SEQ ID NO: 2361307 - RNA, 16 nt, Human
uaguaccaaucauuuu

SEQ ID NO: 2361308 - RNA, 16 nt, Human
uaguaccauuuauaca

SEQ ID NO: 2361309 - RNA, 20 nt, Human
uaguaccaaaugcuuuaaaa

SEQ ID NO: 2361310 - RNA, 23 nt, Human
uaguaccaaucauuuuaauuauu

SEQ ID NO: 2361311 - RNA, 12 nt, Human
uaguacauaaag

SEQ ID NO: 2361312 - RNA, 23 nt, Human
uaguacagguaaggugagggaau

SEQ ID NO: 2361313 - RNA, 16 nt, Human
uaguaccaaaugcuuu

SEQ ID NO: 2361314 - RNA, 19 nt, Human
uaguaacuucuuauggaau

SEQ ID NO: 2361315 - RNA, 18 nt, Human
uaguaacuucuuauggaa

SEQ ID NO: 2361316 - RNA, 22 nt, Human
acacaguugcugucauaagaau

SEQ ID NO: 2361317 - RNA, 15 nt, Human
acacaguugcuguca

SEQ ID NO: 2361318 - RNA, 13 nt, Human
acacauaauuaaa

SEQ ID NO: 2361319 - RNA, 15 nt, Human
acacauaauuaaagu

SEQ ID NO: 2361320 - RNA, 16 nt, Human
acacauaauuaaagug

SEQ ID NO: 2361321 - RNA, 17 nt, Human
acacauaauuaaagugu

SEQ ID NO: 2361322 - RNA, 18 nt, Human
acacauaauuaaaguguc

SEQ ID NO: 2361323 - RNA, 19 nt, Human
acacauaauuaaagugucc

SEQ ID NO: 2361324 - RNA, 20 nt, Human
acacauaauuaaagugucca

SEQ ID NO: 2361325 - RNA, 21 nt, Human
acacauaauuaaaguguccau

SEQ ID NO: 2361326 - RNA, 13 nt, Human
uaguaaagaaauu

SEQ ID NO: 2361327 - RNA, 14 nt, Human
uaguaaagaaauga

SEQ ID NO: 2361328 - RNA, 13 nt, Human
uaguaaagaaaug

SEQ ID NO: 2361329 - RNA, 12 nt, Human
uaguaaagaaau

SEQ ID NO: 2361330 - RNA, 22 nt, Human
uaguaaaauucuacuguaugga

SEQ ID NO: 2361331 - RNA, 21 nt, Human
uagugaaucacguaaagcuag

SEQ ID NO: 2361332 - RNA, 21 nt, Human
uagugaaggcuucucucugug

SEQ ID NO: 2361333 - RNA, 23 nt, Human
uaguguuggagaagaacugaaau

SEQ ID NO: 2361334 - RNA, 20 nt, Human
uaguguuuggguauauucau

SEQ ID NO: 2361335 - RNA, 18 nt, Human
uagugacccggaggccac

SEQ ID NO: 2361336 - RNA, 17 nt, Human
uagugacccggaggcca

SEQ ID NO: 2361337 - RNA, 15 nt, Human
uaguguuucugugca

SEQ ID NO: 2361338 - RNA, 16 nt, Human
uaguguuucugugcau

SEQ ID NO: 2361339 - RNA, 17 nt, Human
uaguguuucugugcaug

SEQ ID NO: 2361340 - RNA, 12 nt, Human
uaguuaaauuuc

SEQ ID NO: 2361341 - RNA, 15 nt, Human
uaguuaaauuucugg

SEQ ID NO: 2361342 - RNA, 23 nt, Human
uaguuaauauugugaagaaaaau

SEQ ID NO: 2361343 - RNA, 23 nt, Human
uaguuaagacaugauuuccuuga

SEQ ID NO: 2361344 - RNA, 21 nt, Human
uaguuaagacaugauuuccuu

SEQ ID NO: 2361345 - RNA, 19 nt, Human
uaguuaagacaugauuucc

SEQ ID NO: 2361346 - RNA, 14 nt, Human
uaguuaagacauga

SEQ ID NO: 2361347 - RNA, 19 nt, Human
uaguuaaauuucuggaccu

SEQ ID NO: 2361348 - RNA, 13 nt, Human
uaguuaauucugu

SEQ ID NO: 2361349 - RNA, 14 nt, Human
uaguuacagcugug

SEQ ID NO: 2361350 - RNA, 21 nt, Human
uagucccagcuacucagaagc

SEQ ID NO: 2361351 - RNA, 14 nt, Human
uagucccagcuacu

SEQ ID NO: 2361352 - RNA, 20 nt, Human
uagucccagcuacucaggag

SEQ ID NO: 2361353 - RNA, 18 nt, Human
uagucccucaugcaaauc

SEQ ID NO: 2361354 - RNA, 15 nt, Human
uagucccuuccccuc

SEQ ID NO: 2361355 - RNA, 14 nt, Human
uagucccuuccccu

SEQ ID NO: 2361356 - RNA, 15 nt, Human
uagucccagcuacuc

SEQ ID NO: 2361357 - RNA, 12 nt, Human
uagucccuucca

SEQ ID NO: 2361358 - RNA, 17 nt, Human
uagucccuuccacaccc

SEQ ID NO: 2361359 - RNA, 15 nt, Human
uaguaccugaaaagu

SEQ ID NO: 2361360 - RNA, 19 nt, Human
uaguaccauuuauacaaau

SEQ ID NO: 2361361 - RNA, 18 nt, Human
uaguaccauuuauacaaa

SEQ ID NO: 2361362 - RNA, 18 nt, Human
uaguaccugaaaaguaac

SEQ ID NO: 2361363 - RNA, 20 nt, Human
uaguaccauuuauacaaauu

SEQ ID NO: 2361364 - RNA, 16 nt, Human
uaguaccugaaaagua

SEQ ID NO: 2361365 - RNA, 14 nt, Human
uaguacuaacuccu

SEQ ID NO: 2361366 - RNA, 22 nt, Human
uaguccagcuuuguucuucuua

SEQ ID NO: 2361367 - RNA, 23 nt, Human
uaguccagcuuuguucuucuuaa

SEQ ID NO: 2361368 - RNA, 23 nt, Human
uagucccuuccccucccuggcuc

SEQ ID NO: 2361369 - RNA, 22 nt, Human
uagucccuuccccucccuggcu

SEQ ID NO: 2361370 - RNA, 20 nt, Human
uagucccuuccccucccugg

SEQ ID NO: 2361371 - RNA, 16 nt, Human
uagucccuuccccucc

SEQ ID NO: 2361372 - RNA, 24 nt, Human
uagugaaaccccaucucuacugaa

SEQ ID NO: 2361373 - RNA, 23 nt, Human
uaguccgugcugacagcugcucc

SEQ ID NO: 2361374 - RNA, 14 nt, Human
uaguccuauucuau

SEQ ID NO: 2361375 - RNA, 22 nt, Human
uaguccgugcugacagcugcuc

SEQ ID NO: 2361376 - RNA, 21 nt, Human
uaguccgugcugacagcugcu

SEQ ID NO: 2361377 - RNA, 18 nt, Human
uaguccuagaggaccuga

SEQ ID NO: 2361378 - RNA, 23 nt, Human
uagugaaaugaauauuuaaauaa

SEQ ID NO: 2361379 - RNA, 19 nt, Human
uagugaaggcuucucucug

SEQ ID NO: 2361380 - RNA, 22 nt, Human
uagugaaacucguuaauuugua

SEQ ID NO: 2361381 - RNA, 20 nt, Human
aauuguugacaguucugaag

SEQ ID NO: 2361382 - RNA, 24 nt, Human
acaaagauguuugucagauaugau

SEQ ID NO: 2361383 - RNA, 15 nt, Human
acaaagcacaguguu

SEQ ID NO: 2361384 - RNA, 14 nt, Human
acaaagcacagugu

SEQ ID NO: 2361385 - RNA, 23 nt, Human
acaaagauguuugucagauauga

SEQ ID NO: 2361386 - RNA, 22 nt, Human
acaaagauguuugucagauaug

SEQ ID NO: 2361387 - RNA, 21 nt, Human
acaaagauguuugucagauau

SEQ ID NO: 2361388 - RNA, 12 nt, Human
acaaagcagcca

SEQ ID NO: 2361389 - RNA, 19 nt, Human
acaaagcacaguuugaaca

SEQ ID NO: 2361390 - RNA, 16 nt, Human
acaaagcacaguguua

SEQ ID NO: 2361391 - RNA, 16 nt, Human
acaaagcacaguuuga

SEQ ID NO: 2361392 - RNA, 17 nt, Human
acaaagcacaguuugaa

SEQ ID NO: 2361393 - RNA, 18 nt, Human
acaaagcacaguuugaac

SEQ ID NO: 2361394 - RNA, 13 nt, Human
acaaagcagccac

SEQ ID NO: 2361395 - RNA, 22 nt, Human
acaaaggaugcccaaagaugca

SEQ ID NO: 2361396 - RNA, 15 nt, Human
acaaaggguuuuaau

SEQ ID NO: 2361397 - RNA, 11 nt, Human
acaaaggcaag

SEQ ID NO: 2361398 - RNA, 15 nt, Human
aauuguuaagauaug

SEQ ID NO: 2361399 - RNA, 20 nt, Human
aauuguguuuauaauuuuaa

SEQ ID NO: 2361400 - RNA, 21 nt, Human
aauuguguuuauaauuuuaaa

SEQ ID NO: 2361401 - RNA, 13 nt, Human
aauuguugacagu

SEQ ID NO: 2361402 - RNA, 18 nt, Human
aauuguugacaguucuga

SEQ ID NO: 2361403 - RNA, 16 nt, Human
aauuguuacaaauugu

SEQ ID NO: 2361404 - RNA, 18 nt, Human
acaaaaggauaaugaaua

SEQ ID NO: 2361405 - RNA, 22 nt, Human
acaaaagcaugugagacugguu

SEQ ID NO: 2361406 - RNA, 11 nt, Human
acaaaagcaug

SEQ ID NO: 2361407 - RNA, 23 nt, Human
uagauaucgacuuguuuuugcac

SEQ ID NO: 2361408 - RNA, 19 nt, Human
uagauauccacuugagaca

SEQ ID NO: 2361409 - RNA, 19 nt, Human
uagauauaugcucugcaug

SEQ ID NO: 2361410 - RNA, 21 nt, Human
uagaugagauuguuuuaucau

SEQ ID NO: 2361411 - RNA, 14 nt, Human
uagauauuauucau

SEQ ID NO: 2361412 - RNA, 19 nt, Human
uagaggcagggaggggacu

SEQ ID NO: 2361413 - RNA, 23 nt, Human
uagagauguuuuuaaaaguuuca

SEQ ID NO: 2361414 - RNA, 20 nt, Human
uagagcaccuaguccaguga

SEQ ID NO: 2361415 - RNA, 18 nt, Human
uagaggccagccccaccc

SEQ ID NO: 2361416 - RNA, 20 nt, Human
uagaggaucccucucuggau

SEQ ID NO: 2361417 - RNA, 22 nt, Human
uagaggagaaacuggaacucuc

SEQ ID NO: 2361418 - RNA, 15 nt, Human
uagauauaugcucug

SEQ ID NO: 2361419 - RNA, 16 nt, Human
uagaggccagccuggc

SEQ ID NO: 2361420 - RNA, 20 nt, Human
uagaggccagccccacccag

SEQ ID NO: 2361421 - RNA, 15 nt, Human
uagaggccagccugg

SEQ ID NO: 2361422 - RNA, 17 nt, Human
uagagaugacugagucc

SEQ ID NO: 2361423 - RNA, 19 nt, Human
uagagaucugguuuugcua

SEQ ID NO: 2361424 - RNA, 20 nt, Human
uagagaucugguuuugcuau

SEQ ID NO: 2361425 - RNA, 20 nt, Human
uagagaucauccuuuccagc

SEQ ID NO: 2361426 - RNA, 23 nt, Human
uagagaucauccuuuccagcaug

SEQ ID NO: 2361427 - RNA, 17 nt, Human
uagagaucugguuuugc

SEQ ID NO: 2361428 - RNA, 18 nt, Human
uagagaucugguuuugcu

SEQ ID NO: 2361429 - RNA, 17 nt, Human
uagagauaguacauaaa

SEQ ID NO: 2361430 - RNA, 17 nt, Human
acaaaggguuuuaaugu

SEQ ID NO: 2361431 - RNA, 18 nt, Human
acaaaggguuuuaaugua

SEQ ID NO: 2361432 - RNA, 20 nt, Human
uagagauaugcagaaggaag

SEQ ID NO: 2361433 - RNA, 19 nt, Human
uagagauaugcagaaggaa

SEQ ID NO: 2361434 - RNA, 19 nt, Human
uagagaucauccuuuccag

SEQ ID NO: 2361435 - RNA, 12 nt, Human
uagagauguuuu

SEQ ID NO: 2361436 - RNA, 19 nt, Human
uagagauggaggaggaggc

SEQ ID NO: 2361437 - RNA, 14 nt, Human
uagagauggaggag

SEQ ID NO: 2361438 - RNA, 21 nt, Human
uagagaucugguuuugcuauu

SEQ ID NO: 2361439 - RNA, 19 nt, Human
uagagauuaccuccugaga

SEQ ID NO: 2361440 - RNA, 18 nt, Human
uagagauuaccuccugag

SEQ ID NO: 2361441 - RNA, 17 nt, Human
uagagauuaccuccuga

SEQ ID NO: 2361442 - RNA, 19 nt, Human
uagagauguuuuuaaaagu

SEQ ID NO: 2361443 - RNA, 20 nt, Human
uagagauguuuuuaaaaguu

SEQ ID NO: 2361444 - RNA, 17 nt, Human
uagagcacacuguagca

SEQ ID NO: 2361445 - RNA, 16 nt, Human
uagagcacacuguagc

SEQ ID NO: 2361446 - RNA, 22 nt, Human
uagagcaaaauugauguguuua

SEQ ID NO: 2361447 - RNA, 19 nt, Human
uagaggagaaacuggaacu

SEQ ID NO: 2361448 - RNA, 21 nt, Human
uagagauuaccuccugagaaa

SEQ ID NO: 2361449 - RNA, 14 nt, Human
uagagcaaaauuga

SEQ ID NO: 2361450 - RNA, 21 nt, Human
uagagcaaaauugauguguuu

SEQ ID NO: 2361451 - RNA, 19 nt, Human
uagccagcacacagggcag

SEQ ID NO: 2361452 - RNA, 18 nt, Human
uagccagcacacagggca

SEQ ID NO: 2361453 - RNA, 19 nt, Human
acaaauuuacagagacaga

SEQ ID NO: 2361454 - RNA, 16 nt, Human
uagccagacacucugc

SEQ ID NO: 2361455 - RNA, 23 nt, Human
uagccacuuaccuucaauaaagu

SEQ ID NO: 2361456 - RNA, 21 nt, Human
uagccacuuuggucccgugca

SEQ ID NO: 2361457 - RNA, 14 nt, Human
uagccagacacucu

SEQ ID NO: 2361458 - RNA, 15 nt, Human
uagccagacacucug

SEQ ID NO: 2361459 - RNA, 18 nt, Human
acaaauuuacagagacag

SEQ ID NO: 2361460 - RNA, 22 nt, Human
uagccacuuaccuucaauaaag

SEQ ID NO: 2361461 - RNA, 18 nt, Human
uagccacuuaccuucaau

SEQ ID NO: 2361462 - RNA, 16 nt, Human
uagccacauuuggaau

SEQ ID NO: 2361463 - RNA, 19 nt, Human
uagccacaucccuuugaaa

SEQ ID NO: 2361464 - RNA, 20 nt, Human
uagccacaaaauugggaaag

SEQ ID NO: 2361465 - RNA, 14 nt, Human
uagccaauguggga

SEQ ID NO: 2361466 - RNA, 18 nt, Human
uagccaauauuuuucuua

SEQ ID NO: 2361467 - RNA, 11 nt, Human
uagccagagga

SEQ ID NO: 2361468 - RNA, 15 nt, Human
uagccagaggagaga

SEQ ID NO: 2361469 - RNA, 17 nt, Human
acaacaaaaagcuuccc

SEQ ID NO: 2361470 - RNA, 13 nt, Human
acaacagaaguca

SEQ ID NO: 2361471 - RNA, 11 nt, Human
acaacagaagu

SEQ ID NO: 2361472 - RNA, 13 nt, Human
acaacagaagcuu

SEQ ID NO: 2361473 - RNA, 19 nt, Human
acaacagaagcuucagaag

SEQ ID NO: 2361474 - RNA, 23 nt, Human
acaacacucauugaccugaggcc

SEQ ID NO: 2361475 - RNA, 21 nt, Human
acaacacucauugaccugagg

SEQ ID NO: 2361476 - RNA, 13 nt, Human
acaacagauuugu

SEQ ID NO: 2361477 - RNA, 14 nt, Human
acaacagauuugug

SEQ ID NO: 2361478 - RNA, 19 nt, Human
acaagaccacguuucuaaa

SEQ ID NO: 2361479 - RNA, 19 nt, Human
acaagacccuugugguccc

SEQ ID NO: 2361480 - RNA, 20 nt, Human
acaagacccaaaaggcagaa

SEQ ID NO: 2361481 - RNA, 13 nt, Human
uagcauguauugu

SEQ ID NO: 2361482 - RNA, 15 nt, Human
uagcauguauugugu

SEQ ID NO: 2361483 - RNA, 18 nt, Human
uagcauguauugugucuu

SEQ ID NO: 2361484 - RNA, 19 nt, Human
uagcauguauugugucuuu

SEQ ID NO: 2361485 - RNA, 16 nt, Human
uagcauuuugcuaaau

SEQ ID NO: 2361486 - RNA, 23 nt, Human
uagcauguauugugucuuuugca

SEQ ID NO: 2361487 - RNA, 22 nt, Human
uagcauuuugcuaaaugugaau

SEQ ID NO: 2361488 - RNA, 14 nt, Human
uagcauuuuugauu

SEQ ID NO: 2361489 - RNA, 20 nt, Human
uagcauuuuugauuuaugca

SEQ ID NO: 2361490 - RNA, 14 nt, Human
uagccaaggccaaa

SEQ ID NO: 2361491 - RNA, 23 nt, Human
uagccaaggugggcugagcccug

SEQ ID NO: 2361492 - RNA, 21 nt, Human
uagccaaggugggcugagccc

SEQ ID NO: 2361493 - RNA, 20 nt, Human
uagccaaggugggcugagcc

SEQ ID NO: 2361494 - RNA, 21 nt, Human
uagccaaggccaaaggaagca

SEQ ID NO: 2361495 - RNA, 23 nt, Human
uagaugcugacuguacuccuccc

SEQ ID NO: 2361496 - RNA, 14 nt, Human
uagaugcugacugu

SEQ ID NO: 2361497 - RNA, 15 nt, Human
uagaugcuggcccag

SEQ ID NO: 2361498 - RNA, 14 nt, Human
uagaugcuggccca

SEQ ID NO: 2361499 - RNA, 13 nt, Human
uagaugcuggccc

SEQ ID NO: 2361500 - RNA, 15 nt, Human
uagaugcaguucuga

SEQ ID NO: 2361501 - RNA, 19 nt, Human
uagaugcaagauauuuaua

SEQ ID NO: 2361502 - RNA, 12 nt, Human
uagcauguaaug

SEQ ID NO: 2361503 - RNA, 13 nt, Human
uagaugggaauga

SEQ ID NO: 2361504 - RNA, 15 nt, Human
uagaugggaaugaag

SEQ ID NO: 2361505 - RNA, 19 nt, Human
uagcauggcugccaauggg

SEQ ID NO: 2361506 - RNA, 22 nt, Human
uagaugcuggcccagggcccag

SEQ ID NO: 2361507 - RNA, 21 nt, Human
uagaugcuggcccagggccca

SEQ ID NO: 2361508 - RNA, 18 nt, Human
uagaugcuggcccagggc

SEQ ID NO: 2361509 - RNA, 16 nt, Human
uagaugcuggcccagg

SEQ ID NO: 2361510 - RNA, 14 nt, Human
uagauggauucucc

SEQ ID NO: 2361511 - RNA, 20 nt, Human
uagaugcugaugauuuguuu

SEQ ID NO: 2361512 - RNA, 14 nt, Human
uagauggcuccucu

SEQ ID NO: 2361513 - RNA, 21 nt, Human
acaauaaguuaacuauuuuau

SEQ ID NO: 2361514 - RNA, 21 nt, Human
acaauaacuacuguguuccug

SEQ ID NO: 2361515 - RNA, 20 nt, Human
acaauaacuacuguguuccu

SEQ ID NO: 2361516 - RNA, 19 nt, Human
acaauaacuacuguguucc

SEQ ID NO: 2361517 - RNA, 18 nt, Human
acaauaacuacuguguuc

SEQ ID NO: 2361518 - RNA, 22 nt, Human
acaauaacuacuguguuccugg

SEQ ID NO: 2361519 - RNA, 14 nt, Human
acaauaaaugugca

SEQ ID NO: 2361520 - RNA, 17 nt, Human
acaauaacuacuguguu

SEQ ID NO: 2361521 - RNA, 16 nt, Human
acaauaacuacugugu

SEQ ID NO: 2361522 - RNA, 15 nt, Human
acaauaaaugugcuu

SEQ ID NO: 2361523 - RNA, 22 nt, Human
acaauaaaauuuuuuuucaugu

SEQ ID NO: 2361524 - RNA, 14 nt, Human
acaauaaagagauu

SEQ ID NO: 2361525 - RNA, 23 nt, Human
acaauaaagaucgcccccaccuc

SEQ ID NO: 2361526 - RNA, 14 nt, Human
acaauaaauaaucu

SEQ ID NO: 2361527 - RNA, 13 nt, Human
acaauaauuucag

SEQ ID NO: 2361528 - RNA, 12 nt, Human
acaauaauuuca

SEQ ID NO: 2361529 - RNA, 14 nt, Human
acaauaauuuucua

SEQ ID NO: 2361530 - RNA, 23 nt, Human
acaauacaucccuuaccugggaa

SEQ ID NO: 2361531 - RNA, 16 nt, Human
acaauacaugcugcua

SEQ ID NO: 2361532 - RNA, 13 nt, Human
acaauacccccag

SEQ ID NO: 2361533 - RNA, 15 nt, Human
acaaucaguccccuc

SEQ ID NO: 2361534 - RNA, 16 nt, Human
acaaucaguccccucc

SEQ ID NO: 2361535 - RNA, 17 nt, Human
acaaucaguccccuccc

SEQ ID NO: 2361536 - RNA, 18 nt, Human
acaaucaguccccuccca

SEQ ID NO: 2361537 - RNA, 19 nt, Human
acaaucaguccccucccau

SEQ ID NO: 2361538 - RNA, 20 nt, Human
acaaucaguccccucccauc

SEQ ID NO: 2361539 - RNA, 22 nt, Human
acaaucaguccccucccaucug

SEQ ID NO: 2361540 - RNA, 15 nt, Human
acaacagauuuguga

SEQ ID NO: 2361541 - RNA, 21 nt, Human
acaagacuucaguauguuguc

SEQ ID NO: 2361542 - RNA, 16 nt, Human
acaagacuucaguaug

SEQ ID NO: 2361543 - RNA, 17 nt, Human
acaagacuucaguaugu

SEQ ID NO: 2361544 - RNA, 18 nt, Human
acaagaccacguuucuaa

SEQ ID NO: 2361545 - RNA, 19 nt, Human
acaagaccccgucucaaaa

SEQ ID NO: 2361546 - RNA, 14 nt, Human
acaagacuucagua

SEQ ID NO: 2361547 - RNA, 13 nt, Human
acaagacugcaca

SEQ ID NO: 2361548 - RNA, 14 nt, Human
acaagacugcacau

SEQ ID NO: 2361549 - RNA, 12 nt, Human
acaauaaagaga

SEQ ID NO: 2361550 - RNA, 23 nt, Human
acaauaaaauuuuuuuucauguu

SEQ ID NO: 2361551 - RNA, 21 nt, Human
acaaggauagaugcuggccca

SEQ ID NO: 2361552 - RNA, 18 nt, Human
acaaggauagaugcuggc

SEQ ID NO: 2361553 - RNA, 17 nt, Human
acaaggauagaugcugg

SEQ ID NO: 2361554 - RNA, 16 nt, Human
acaaggauagaugcug

SEQ ID NO: 2361555 - RNA, 15 nt, Human
acaaggacuuccugu

SEQ ID NO: 2361556 - RNA, 19 nt, Human
acaaggacuaggguccugg

SEQ ID NO: 2361557 - RNA, 18 nt, Human
acaaggacuaggguccug

SEQ ID NO: 2361558 - RNA, 21 nt, Human
acaaggacagccccuccucca

SEQ ID NO: 2361559 - RNA, 22 nt, Human
acaaggacagccccuccuccau

SEQ ID NO: 2361560 - RNA, 16 nt, Human
acaaugacauuuauau

SEQ ID NO: 2361561 - RNA, 18 nt, Human
acaaugacuuacuguaca

SEQ ID NO: 2361562 - RNA, 17 nt, Human
acaaugacuuacuguac

SEQ ID NO: 2361563 - RNA, 17 nt, Human
acaaucgauggccuugc

SEQ ID NO: 2361564 - RNA, 23 nt, Human
acaauccuagugcuuuccuuuuu

SEQ ID NO: 2361565 - RNA, 16 nt, Human
acaaucgauggccuug

SEQ ID NO: 2361566 - RNA, 22 nt, Human
acaauccuagugcuuuccuuuu

SEQ ID NO: 2361567 - RNA, 17 nt, Human
acaauccuagugcuuuc

SEQ ID NO: 2361568 - RNA, 16 nt, Human
acaauccuagugcuuu

SEQ ID NO: 2361569 - RNA, 15 nt, Human
acaauccuagugcuu

SEQ ID NO: 2361570 - RNA, 12 nt, Human
acaaugacuuac

SEQ ID NO: 2361571 - RNA, 18 nt, Human
acaaucaugaaauaugca

SEQ ID NO: 2361572 - RNA, 19 nt, Human
acaaucaugaaauaugcau

SEQ ID NO: 2361573 - RNA, 13 nt, Human
acaaucauugcug

SEQ ID NO: 2361574 - RNA, 14 nt, Human
acaaucauugcuga

SEQ ID NO: 2361575 - RNA, 18 nt, Human
acaaucauugcugaaaau

SEQ ID NO: 2361576 - RNA, 21 nt, Human
acaaucauugcugaaaauggu

SEQ ID NO: 2361577 - RNA, 22 nt, Human
acaaucauugcugaaaauggua

SEQ ID NO: 2361578 - RNA, 18 nt, Human
acaaucauuugcuuuuug

SEQ ID NO: 2361579 - RNA, 12 nt, Human
uagcuaauguaa

SEQ ID NO: 2361580 - RNA, 19 nt, Human
uagcuaauguaauaacugu

SEQ ID NO: 2361581 - RNA, 20 nt, Human
uagcuacaggaagcacccca

SEQ ID NO: 2361582 - RNA, 15 nt, Human
uagcuacaggaagca

SEQ ID NO: 2361583 - RNA, 22 nt, Human
uagcuauauccauguacuguag

SEQ ID NO: 2361584 - RNA, 15 nt, Human
uagcuauaucuauau

SEQ ID NO: 2361585 - RNA, 21 nt, Human
uagcuauauccauguacugua

SEQ ID NO: 2361586 - RNA, 20 nt, Human
uagcuauauccauguacugu

SEQ ID NO: 2361587 - RNA, 19 nt, Human
uagcuauauccauguacug

SEQ ID NO: 2361588 - RNA, 18 nt, Human
uagcuauauccauguacu

SEQ ID NO: 2361589 - RNA, 17 nt, Human
uagcuauauccauguac

SEQ ID NO: 2361590 - RNA, 16 nt, Human
uagcuauauccaugua

SEQ ID NO: 2361591 - RNA, 15 nt, Human
uagcuagaggaacca

SEQ ID NO: 2361592 - RNA, 14 nt, Human
uagcuagaggaacc

SEQ ID NO: 2361593 - RNA, 13 nt, Human
uagcuagaggaac

SEQ ID NO: 2361594 - RNA, 15 nt, Human
uagcuauauccaugu

SEQ ID NO: 2361595 - RNA, 14 nt, Human
uagcuauauccaug

SEQ ID NO: 2361596 - RNA, 16 nt, Human
uagcugugaccucucc

SEQ ID NO: 2361597 - RNA, 17 nt, Human
uagcuauaucuauauau

SEQ ID NO: 2361598 - RNA, 14 nt, Human
uagcuaucagaaga

SEQ ID NO: 2361599 - RNA, 15 nt, Human
uagcuaucagaagac

SEQ ID NO: 2361600 - RNA, 16 nt, Human
uagcuaucagaagacc

SEQ ID NO: 2361601 - RNA, 10 nt, Human
uagcuguggg

SEQ ID NO: 2361602 - RNA, 21 nt, Human
uagggaauggcacagcccaaa

SEQ ID NO: 2361603 - RNA, 21 nt, Human
uagggaagggugguggagcca

SEQ ID NO: 2361604 - RNA, 22 nt, Human
uagggacaauacagaacccauu

SEQ ID NO: 2361605 - RNA, 20 nt, Human
uagggaagggugguggagcc

SEQ ID NO: 2361606 - RNA, 14 nt, Human
uagggaaguaacag

SEQ ID NO: 2361607 - RNA, 14 nt, Human
uagggaagggccug

SEQ ID NO: 2361608 - RNA, 21 nt, Human
uagggaaggauacaaaagcau

SEQ ID NO: 2361609 - RNA, 12 nt, Human
uaggcauuuccu

SEQ ID NO: 2361610 - RNA, 16 nt, Human
uaggcaggacaugcug

SEQ ID NO: 2361611 - RNA, 14 nt, Human
uagggacuuaaaaa

SEQ ID NO: 2361612 - RNA, 16 nt, Human
uagggagaaauguugu

SEQ ID NO: 2361613 - RNA, 13 nt, Human
uagggacuuaaaa

SEQ ID NO: 2361614 - RNA, 17 nt, Human
uagggaccccuccuccc

SEQ ID NO: 2361615 - RNA, 20 nt, Human
uagggacucaauuucucccc

SEQ ID NO: 2361616 - RNA, 15 nt, Human
uagggaccccuccuc

SEQ ID NO: 2361617 - RNA, 16 nt, Human
uagggaccccuccucc

SEQ ID NO: 2361618 - RNA, 14 nt, Human
uagggaccccuccu

SEQ ID NO: 2361619 - RNA, 15 nt, Human
uagggagagaagaua

SEQ ID NO: 2361620 - RNA, 14 nt, Human
uagggagagaagau

SEQ ID NO: 2361621 - RNA, 11 nt, Human
uaggcagacac

SEQ ID NO: 2361622 - RNA, 12 nt, Human
uaggcagacaca

SEQ ID NO: 2361623 - RNA, 14 nt, Human
uaggcagacacagg

SEQ ID NO: 2361624 - RNA, 15 nt, Human
uaggcagacacaggg

SEQ ID NO: 2361625 - RNA, 21 nt, Human
uaggagggaguuaucuaaaag

SEQ ID NO: 2361626 - RNA, 18 nt, Human
uaggagggaguuaucuaa

SEQ ID NO: 2361627 - RNA, 18 nt, Human
uaggcaaccuuuauuuuu

SEQ ID NO: 2361628 - RNA, 16 nt, Human
uaggagggaguuaucu

SEQ ID NO: 2361629 - RNA, 14 nt, Human
uaggagggagacac

SEQ ID NO: 2361630 - RNA, 13 nt, Human
uaggaggaugggc

SEQ ID NO: 2361631 - RNA, 20 nt, Human
uaggcauuugcugaauacag

SEQ ID NO: 2361632 - RNA, 16 nt, Human
uaggcauuugcugaau

SEQ ID NO: 2361633 - RNA, 13 nt, Human
uaggcagcagcuu

SEQ ID NO: 2361634 - RNA, 20 nt, Human
uaggcagauugaaaaggaca

SEQ ID NO: 2361635 - RNA, 13 nt, Human
uaggcagagccuu

SEQ ID NO: 2361636 - RNA, 16 nt, Human
uaggcagagccuuugg

SEQ ID NO: 2361637 - RNA, 17 nt, Human
uaggcagacuggguuuc

SEQ ID NO: 2361638 - RNA, 22 nt, Human
uaggcagacacagggacuugaa

SEQ ID NO: 2361639 - RNA, 12 nt, Human
uaggcagagccu

SEQ ID NO: 2361640 - RNA, 14 nt, Human
uaggcauuguggga

SEQ ID NO: 2361641 - RNA, 13 nt, Human
uaggacuguagaa

SEQ ID NO: 2361642 - RNA, 14 nt, Human
uaggacuguagaaa

SEQ ID NO: 2361643 - RNA, 18 nt, Human
uaggacucugaggcucuu

SEQ ID NO: 2361644 - RNA, 17 nt, Human
uaggagaaccaaaucug

SEQ ID NO: 2361645 - RNA, 12 nt, Human
uaggagaagcca

SEQ ID NO: 2361646 - RNA, 20 nt, Human
uaggagaaccaaaucuggaa

SEQ ID NO: 2361647 - RNA, 21 nt, Human
uaggagaccaaggcgggagca

SEQ ID NO: 2361648 - RNA, 14 nt, Human
uaggagaccaaggc

SEQ ID NO: 2361649 - RNA, 14 nt, Human
uaggagagaccgag

SEQ ID NO: 2361650 - RNA, 22 nt, Human
uaggagaauugcuugaaccugg

SEQ ID NO: 2361651 - RNA, 16 nt, Human
uaggagaagccaggaa

SEQ ID NO: 2361652 - RNA, 15 nt, Human
uaggagaagccagga

SEQ ID NO: 2361653 - RNA, 22 nt, Human
uaggagauaccagguugaaaga

SEQ ID NO: 2361654 - RNA, 16 nt, Human
uaggagauaccagguu

SEQ ID NO: 2361655 - RNA, 22 nt, Human
uaggagaggaugagagcccaga

SEQ ID NO: 2361656 - RNA, 14 nt, Human
uaggagaggaugag

SEQ ID NO: 2361657 - RNA, 18 nt, Human
uaggagaggaugagagcc

SEQ ID NO: 2361658 - RNA, 14 nt, Human
uaggagcagagcuc

SEQ ID NO: 2361659 - RNA, 11 nt, Human
uaggagccugc

SEQ ID NO: 2361660 - RNA, 18 nt, Human
uaggagcugggaggaaaa

SEQ ID NO: 2361661 - RNA, 20 nt, Human
uaggaggaccagagcuacug

SEQ ID NO: 2361662 - RNA, 14 nt, Human
uaggagcugggagg

SEQ ID NO: 2361663 - RNA, 23 nt, Human
uaggagcugccuuggcucagaca

SEQ ID NO: 2361664 - RNA, 18 nt, Human
uaggagcugccuuggcuc

SEQ ID NO: 2361665 - RNA, 15 nt, Human
uaggagccugcuggu

SEQ ID NO: 2361666 - RNA, 23 nt, Human
uaggagccugcuggucacagccu

SEQ ID NO: 2361667 - RNA, 16 nt, Human
uaggacucugaggcuc

SEQ ID NO: 2361668 - RNA, 15 nt, Human
uaggacucugaggcu

SEQ ID NO: 2361669 - RNA, 14 nt, Human
uaggacucugaggc

SEQ ID NO: 2361670 - RNA, 19 nt, Human
uaggacucaaaguuucaga

SEQ ID NO: 2361671 - RNA, 16 nt, Human
uaggacgccacccagc

SEQ ID NO: 2361672 - RNA, 19 nt, Human
uaggaccuuuccaccacag

SEQ ID NO: 2361673 - RNA, 21 nt, Human
uaggaccuuuccaccacagcc

SEQ ID NO: 2361674 - RNA, 22 nt, Human
uaggaccuuuccaccacagcca

SEQ ID NO: 2361675 - RNA, 16 nt, Human
uaggaaaugaaugugu

SEQ ID NO: 2361676 - RNA, 15 nt, Human
uaggacgccacccag

SEQ ID NO: 2361677 - RNA, 20 nt, Human
uaggaaauaaaaccuuucaa

SEQ ID NO: 2361678 - RNA, 14 nt, Human
uaggaaaugaaugu

SEQ ID NO: 2361679 - RNA, 16 nt, Human
uaggaaauccagggug

SEQ ID NO: 2361680 - RNA, 19 nt, Human
uaggaaauauuuauuuuaa

SEQ ID NO: 2361681 - RNA, 18 nt, Human
uagcuguggugagguggg

SEQ ID NO: 2361682 - RNA, 14 nt, Human
uagcuguggugagg

SEQ ID NO: 2361683 - RNA, 14 nt, Human
uagcugugugaaau

SEQ ID NO: 2361684 - RNA, 13 nt, Human
uagcugugggggu

SEQ ID NO: 2361685 - RNA, 14 nt, Human
uagcugugggggug

SEQ ID NO: 2361686 - RNA, 16 nt, Human
uagcuguugagcuguu

SEQ ID NO: 2361687 - RNA, 17 nt, Human
uagcuguugagcuguuu

SEQ ID NO: 2361688 - RNA, 13 nt, Human
uagcuguugagcu

SEQ ID NO: 2361689 - RNA, 17 nt, Human
uagcuguuauuucuauu

SEQ ID NO: 2361690 - RNA, 20 nt, Human
uagcuguuauuucuauuuuu

SEQ ID NO: 2361691 - RNA, 19 nt, Human
uaggaaauaaaaccuuuca

SEQ ID NO: 2361692 - RNA, 18 nt, Human
uaggaaauauuuauuuua

SEQ ID NO: 2361693 - RNA, 14 nt, Human
gugaugaacuuucu

SEQ ID NO: 2361694 - RNA, 15 nt, Human
gugaugaacuuucuc

SEQ ID NO: 2361695 - RNA, 23 nt, Human
gugaugguuccccuguucacucu

SEQ ID NO: 2361696 - RNA, 22 nt, Human
gugaucuuggcuuacugcagcc

SEQ ID NO: 2361697 - RNA, 15 nt, Human
gugaucugaacagaa

SEQ ID NO: 2361698 - RNA, 13 nt, Human
gugaucuccauau

SEQ ID NO: 2361699 - RNA, 12 nt, Human
gugaucuccaua

SEQ ID NO: 2361700 - RNA, 19 nt, Human
gugauccuuuuauguuauu

SEQ ID NO: 2361701 - RNA, 14 nt, Human
gugaucucauuuaa

SEQ ID NO: 2361702 - RNA, 15 nt, Human
gugaucucagaucag

SEQ ID NO: 2361703 - RNA, 14 nt, Human
gugaucucagauca

SEQ ID NO: 2361704 - RNA, 22 nt, Human
aacuugagcuuuaaaaaucauu

SEQ ID NO: 2361705 - RNA, 14 nt, Human
gugauccuuuuaug

SEQ ID NO: 2361706 - RNA, 22 nt, Human
gugaugguuccccuguucacuc

SEQ ID NO: 2361707 - RNA, 15 nt, Human
gugaugugaagccaa

SEQ ID NO: 2361708 - RNA, 14 nt, Human
gugaugucaucugu

SEQ ID NO: 2361709 - RNA, 14 nt, Human
gugauguuuguccu

SEQ ID NO: 2361710 - RNA, 10 nt, Human
gugauguguc

SEQ ID NO: 2361711 - RNA, 15 nt, Human
gugaugugaguugca

SEQ ID NO: 2361712 - RNA, 14 nt, Human
gugcaagugugugc

SEQ ID NO: 2361713 - RNA, 19 nt, Human
gugauuauuuguuauuugu

SEQ ID NO: 2361714 - RNA, 22 nt, Human
gugauucaauucaacacucccu

SEQ ID NO: 2361715 - RNA, 23 nt, Human
gugauucaaucuguaaacugugu

SEQ ID NO: 2361716 - RNA, 21 nt, Human
gugauucaaucuguaaacugu

SEQ ID NO: 2361717 - RNA, 16 nt, Human
gugauuauuucacuuu

SEQ ID NO: 2361718 - RNA, 22 nt, Human
gugauuagagggaggagaauga

SEQ ID NO: 2361719 - RNA, 16 nt, Human
gugauucaaucuguaa

SEQ ID NO: 2361720 - RNA, 14 nt, Human
gugauucaaucugu

SEQ ID NO: 2361721 - RNA, 22 nt, Human
gugcaagugugugcacaugugu

SEQ ID NO: 2361722 - RNA, 15 nt, Human
gugcaagugugugca

SEQ ID NO: 2361723 - RNA, 20 nt, Human
gugcaagugugugcaugugu

SEQ ID NO: 2361724 - RNA, 21 nt, Human
gugcaauaaaucugacccagu

SEQ ID NO: 2361725 - RNA, 19 nt, Human
gugcaauaaaucugaccca

SEQ ID NO: 2361726 - RNA, 23 nt, Human
gugcaauaaaucugacccagugc

SEQ ID NO: 2361727 - RNA, 22 nt, Human
gugcaauaaaucugacccagug

SEQ ID NO: 2361728 - RNA, 17 nt, Human
gugauuacauaaucugu

SEQ ID NO: 2361729 - RNA, 19 nt, Human
gugauuagaggcagaucug

SEQ ID NO: 2361730 - RNA, 19 nt, Human
gugauuaaacgugcagacu

SEQ ID NO: 2361731 - RNA, 22 nt, Human
gugauguuuaacaggaagaucu

SEQ ID NO: 2361732 - RNA, 14 nt, Human
gugauuaaacgugc

SEQ ID NO: 2361733 - RNA, 15 nt, Human
gugauuaaacgugca

SEQ ID NO: 2361734 - RNA, 18 nt, Human
gugauuaaacgugcagac

SEQ ID NO: 2361735 - RNA, 17 nt, Human
gugauuaccagggacug

SEQ ID NO: 2361736 - RNA, 16 nt, Human
gugauuaccagggacu

SEQ ID NO: 2361737 - RNA, 11 nt, Human
gugauuaccag

SEQ ID NO: 2361738 - RNA, 21 nt, Human
gugcacaugcacgugugugca

SEQ ID NO: 2361739 - RNA, 23 nt, Human
gugcacaagcuccaagcucccag

SEQ ID NO: 2361740 - RNA, 15 nt, Human
gugcacccacucugc

SEQ ID NO: 2361741 - RNA, 23 nt, Human
gugcaccaucccuuuuugaagug

SEQ ID NO: 2361742 - RNA, 19 nt, Human
gugcacccaugggcucuga

SEQ ID NO: 2361743 - RNA, 23 nt, Human
gugcacccaugggcucugacaga

SEQ ID NO: 2361744 - RNA, 16 nt, Human
gugcaccaucccuuuu

SEQ ID NO: 2361745 - RNA, 20 nt, Human
gugcacaaauauuuauuuuc

SEQ ID NO: 2361746 - RNA, 18 nt, Human
gugcaaugaccuuucaau

SEQ ID NO: 2361747 - RNA, 13 nt, Human
gugcacaagcucc

SEQ ID NO: 2361748 - RNA, 16 nt, Human
gugcacaagcuccaag

SEQ ID NO: 2361749 - RNA, 21 nt, Human
gugcacaagcuccaagcuccc

SEQ ID NO: 2361750 - RNA, 21 nt, Human
gugcaccuguacucaggaggc

SEQ ID NO: 2361751 - RNA, 18 nt, Human
gugcaccuguacucagga

SEQ ID NO: 2361752 - RNA, 20 nt, Human
gugcaccuuaccaacuuucu

SEQ ID NO: 2361753 - RNA, 21 nt, Human
gugcaccuuaccaacuuucug

SEQ ID NO: 2361754 - RNA, 19 nt, Human
gugcauucuuuuaaaagac

SEQ ID NO: 2361755 - RNA, 22 nt, Human
gugcauucuuuuaaaagacaag

SEQ ID NO: 2361756 - RNA, 23 nt, Human
gugcauucuuuuaaaagacaaga

SEQ ID NO: 2361757 - RNA, 20 nt, Human
gugcauuggaagaccccacc

SEQ ID NO: 2361758 - RNA, 21 nt, Human
gugcauuggaagaccccaccc

SEQ ID NO: 2361759 - RNA, 19 nt, Human
gugcauuugaggucuguuc

SEQ ID NO: 2361760 - RNA, 17 nt, Human
gugcauuugaggucugu

SEQ ID NO: 2361761 - RNA, 16 nt, Human
gugcauuuuugugaaa

SEQ ID NO: 2361762 - RNA, 17 nt, Human
gugcauuuucccagaua

SEQ ID NO: 2361763 - RNA, 22 nt, Human
gugccaaacaaaaagguucuca

SEQ ID NO: 2361764 - RNA, 23 nt, Human
gugccaaaaacaacaacaaaaug

SEQ ID NO: 2361765 - RNA, 21 nt, Human
gugcauuuggugguuucagaa

SEQ ID NO: 2361766 - RNA, 11 nt, Human
gugcauugugc

SEQ ID NO: 2361767 - RNA, 13 nt, Human
gugcauugugcuu

SEQ ID NO: 2361768 - RNA, 17 nt, Human
gugcauuuaugagcucu

SEQ ID NO: 2361769 - RNA, 19 nt, Human
aacuugagggcccagagca

SEQ ID NO: 2361770 - RNA, 24 nt, Human
aacuucuuuguaaucguuaugugu

SEQ ID NO: 2361771 - RNA, 22 nt, Human
aacuucagagggaaaguaaaua

SEQ ID NO: 2361772 - RNA, 15 nt, Human
aacuucagacacaaa

SEQ ID NO: 2361773 - RNA, 13 nt, Human
aacuucagacaua

SEQ ID NO: 2361774 - RNA, 18 nt, Human
aacuucagcgguuuauau

SEQ ID NO: 2361775 - RNA, 22 nt, Human
aacuuccuuggacucauuuuaa

SEQ ID NO: 2361776 - RNA, 20 nt, Human
aacuucgaaagcaucauuau

SEQ ID NO: 2361777 - RNA, 11 nt, Human
aacuucagcag

SEQ ID NO: 2361778 - RNA, 21 nt, Human
aacuucagcgguuuauauaag

SEQ ID NO: 2361779 - RNA, 23 nt, Human
aacuuccuuggacucauuuuaaa

SEQ ID NO: 2361780 - RNA, 14 nt, Human
aacuucuaauauau

SEQ ID NO: 2361781 - RNA, 16 nt, Human
aacuucuaauauauuu

SEQ ID NO: 2361782 - RNA, 18 nt, Human
aacuucagcaguaccuau

SEQ ID NO: 2361783 - RNA, 17 nt, Human
aacuucgcaucaaaaga

SEQ ID NO: 2361784 - RNA, 19 nt, Human
aacuucgcaucaaaagaca

SEQ ID NO: 2361785 - RNA, 23 nt, Human
aacuucgcaucaaaagacaauuc

SEQ ID NO: 2361786 - RNA, 20 nt, Human
aacuguggccguuaucugga

SEQ ID NO: 2361787 - RNA, 11 nt, Human
aacuguggccg

SEQ ID NO: 2361788 - RNA, 23 nt, Human
aacuguguacauaacugaaaaug

SEQ ID NO: 2361789 - RNA, 21 nt, Human
aacuguguacauaacugaaaa

SEQ ID NO: 2361790 - RNA, 20 nt, Human
aacuguguacauaacugaaa

SEQ ID NO: 2361791 - RNA, 22 nt, Human
aacugugcagagucuagaaguu

SEQ ID NO: 2361792 - RNA, 19 nt, Human
aacugugaaguuuacauug

SEQ ID NO: 2361793 - RNA, 17 nt, Human
aacugugaaguuuacau

SEQ ID NO: 2361794 - RNA, 19 nt, Human
aacugucucucaugaaccu

SEQ ID NO: 2361795 - RNA, 18 nt, Human
aacuguguggacugugau

SEQ ID NO: 2361796 - RNA, 17 nt, Human
aacuguguucauuagaa

SEQ ID NO: 2361797 - RNA, 14 nt, Human
aacuucacauauug

SEQ ID NO: 2361798 - RNA, 22 nt, Human
aacuucaccauauuaccacaga

SEQ ID NO: 2361799 - RNA, 22 nt, Human
aacuucacauauugauuuccgu

SEQ ID NO: 2361800 - RNA, 14 nt, Human
aacugcauuagaaa

SEQ ID NO: 2361801 - RNA, 19 nt, Human
aacugccaguuuuguuucc

SEQ ID NO: 2361802 - RNA, 14 nt, Human
aacugccaguuuug

SEQ ID NO: 2361803 - RNA, 17 nt, Human
aacugcccccucugccc

SEQ ID NO: 2361804 - RNA, 16 nt, Human
aacugcccccucugcc

SEQ ID NO: 2361805 - RNA, 21 nt, Human
aacugcccccucugcccugcg

SEQ ID NO: 2361806 - RNA, 20 nt, Human
aacugcccccucugcccugc

SEQ ID NO: 2361807 - RNA, 19 nt, Human
aacugcccccucugcccug

SEQ ID NO: 2361808 - RNA, 18 nt, Human
aacugcccccucugcccu

SEQ ID NO: 2361809 - RNA, 14 nt, Human
aacuguccagagag

SEQ ID NO: 2361810 - RNA, 14 nt, Human
aacugucuauuucu

SEQ ID NO: 2361811 - RNA, 16 nt, Human
aacugucuauuucugc

SEQ ID NO: 2361812 - RNA, 23 nt, Human
aacugucucgaugcaaugaacac

SEQ ID NO: 2361813 - RNA, 17 nt, Human
aacugucuauuucugcu

SEQ ID NO: 2361814 - RNA, 19 nt, Human
aacugucuauuucugcuga

SEQ ID NO: 2361815 - RNA, 16 nt, Human
aacuguccagagagca

SEQ ID NO: 2361816 - RNA, 16 nt, Human
aacugcccccaacuuu

SEQ ID NO: 2361817 - RNA, 16 nt, Human
aacugccuacuccaaa

SEQ ID NO: 2361818 - RNA, 21 nt, Human
gugcuacacccuuuuccagcu

SEQ ID NO: 2361819 - RNA, 23 nt, Human
aagaauaaucacgcuuuccugaa

SEQ ID NO: 2361820 - RNA, 16 nt, Human
gugcuaccuggguccu

SEQ ID NO: 2361821 - RNA, 19 nt, Human
gugcuaccuggguccuuuu

SEQ ID NO: 2361822 - RNA, 20 nt, Human
gugcuacguacaugugaggc

SEQ ID NO: 2361823 - RNA, 16 nt, Human
gugcuacugauuguuu

SEQ ID NO: 2361824 - RNA, 16 nt, Human
aagaauacaaacauau

SEQ ID NO: 2361825 - RNA, 22 nt, Human
gugcuacaaaaacacagcaagg

SEQ ID NO: 2361826 - RNA, 17 nt, Human
gugcuaggaacacuccu

SEQ ID NO: 2361827 - RNA, 21 nt, Human
gugcuauacugcauacuuuuu

SEQ ID NO: 2361828 - RNA, 16 nt, Human
gugcuauaggcuggag

SEQ ID NO: 2361829 - RNA, 18 nt, Human
gugcuauaggcuggagaa

SEQ ID NO: 2361830 - RNA, 19 nt, Human
gugcuauaggcuggagaag

SEQ ID NO: 2361831 - RNA, 15 nt, Human
gugcuaucuccccca

SEQ ID NO: 2361832 - RNA, 18 nt, Human
gugcuaucucccccagcc

SEQ ID NO: 2361833 - RNA, 14 nt, Human
aagaagagacagga

SEQ ID NO: 2361834 - RNA, 22 nt, Human
aagaagagagaagacccuucuc

SEQ ID NO: 2361835 - RNA, 10 nt, Human
aagaagagac

SEQ ID NO: 2361836 - RNA, 11 nt, Human
aagaagagaca

SEQ ID NO: 2361837 - RNA, 13 nt, Human
aagaagacuuuuu

SEQ ID NO: 2361838 - RNA, 22 nt, Human
aagaagaucacgcuccccgccu

SEQ ID NO: 2361839 - RNA, 19 nt, Human
aagaagauccuaaaacaaa

SEQ ID NO: 2361840 - RNA, 22 nt, Human
aagaagaggagaaaaaaacuuc

SEQ ID NO: 2361841 - RNA, 13 nt, Human
aagaagagggaga

SEQ ID NO: 2361842 - RNA, 17 nt, Human
aagaagaucacgcuccc

SEQ ID NO: 2361843 - RNA, 21 nt, Human
aagaagaucacgcuccccgcc

SEQ ID NO: 2361844 - RNA, 21 nt, Human
aagaauaauaugcugccaaau

SEQ ID NO: 2361845 - RNA, 23 nt, Human
aagaauaaaauguugaaaaguca

SEQ ID NO: 2361846 - RNA, 20 nt, Human
aagaauaaaauguugaaaag

SEQ ID NO: 2361847 - RNA, 21 nt, Human
aagaauaaaauguugaaaagu

SEQ ID NO: 2361848 - RNA, 22 nt, Human
aagaauaaucacgcuuuccuga

SEQ ID NO: 2361849 - RNA, 16 nt, Human
aagaauaaucacgcuu

SEQ ID NO: 2361850 - RNA, 15 nt, Human
aagaauaaaauguug

SEQ ID NO: 2361851 - RNA, 18 nt, Human
aagaauaaaauguugaaa

SEQ ID NO: 2361852 - RNA, 14 nt, Human
aagaagauguuuaa

SEQ ID NO: 2361853 - RNA, 17 nt, Human
aagaaguuuaaggaaua

SEQ ID NO: 2361854 - RNA, 14 nt, Human
aagaaguuuaagga

SEQ ID NO: 2361855 - RNA, 16 nt, Human
gugcucugaucaucca

SEQ ID NO: 2361856 - RNA, 15 nt, Human
gugcucuccaagccc

SEQ ID NO: 2361857 - RNA, 22 nt, Human
gugcucgcuguugcugaauagg

SEQ ID NO: 2361858 - RNA, 21 nt, Human
gugcucgagacacagugaagc

SEQ ID NO: 2361859 - RNA, 13 nt, Human
gugcucuggacag

SEQ ID NO: 2361860 - RNA, 14 nt, Human
gugcucuggacagg

SEQ ID NO: 2361861 - RNA, 12 nt, Human
gugcugcccugc

SEQ ID NO: 2361862 - RNA, 13 nt, Human
gugcugcccugcc

SEQ ID NO: 2361863 - RNA, 14 nt, Human
gugcugcccugccc

SEQ ID NO: 2361864 - RNA, 15 nt, Human
gugcugcccugccca

SEQ ID NO: 2361865 - RNA, 13 nt, Human
gugcucagggcug

SEQ ID NO: 2361866 - RNA, 13 nt, Human
gugcucagggcua

SEQ ID NO: 2361867 - RNA, 21 nt, Human
gugcuauaggcuggagaagcu

SEQ ID NO: 2361868 - RNA, 13 nt, Human
gugcucaguugua

SEQ ID NO: 2361869 - RNA, 17 nt, Human
gugcucaguuguagaau

SEQ ID NO: 2361870 - RNA, 19 nt, Human
gugcucaguuguagaaugu

SEQ ID NO: 2361871 - RNA, 19 nt, Human
gugcucaggagcccuggga

SEQ ID NO: 2361872 - RNA, 18 nt, Human
gugcucaggagcccuggg

SEQ ID NO: 2361873 - RNA, 19 nt, Human
gugcuaucucccccagccc

SEQ ID NO: 2361874 - RNA, 16 nt, Human
gugcucaggagcccug

SEQ ID NO: 2361875 - RNA, 18 nt, Human
gugcucccuaccaccucc

SEQ ID NO: 2361876 - RNA, 13 nt, Human
gugcuccgugccu

SEQ ID NO: 2361877 - RNA, 16 nt, Human
gugcuccgugccucca

SEQ ID NO: 2361878 - RNA, 17 nt, Human
gugcuccgugccuccac

SEQ ID NO: 2361879 - RNA, 15 nt, Human
gugcucccuaccacc

SEQ ID NO: 2361880 - RNA, 13 nt, Human
gugcuccaggcag

SEQ ID NO: 2361881 - RNA, 22 nt, Human
gugcucaguuguagaauguauu

SEQ ID NO: 2361882 - RNA, 16 nt, Human
gugcucauuucaggau

SEQ ID NO: 2361883 - RNA, 16 nt, Human
gugcuccagccuggcu

SEQ ID NO: 2361884 - RNA, 14 nt, Human
gugcucgcccugcg

SEQ ID NO: 2361885 - RNA, 15 nt, Human
gugcucgcuguugcu

SEQ ID NO: 2361886 - RNA, 18 nt, Human
gugcucgcuguugcugaa

SEQ ID NO: 2361887 - RNA, 19 nt, Human
gugcucgcuguugcugaau

SEQ ID NO: 2361888 - RNA, 16 nt, Human
gugcucgccccagcag

SEQ ID NO: 2361889 - RNA, 14 nt, Human
gugcucgccccagc

SEQ ID NO: 2361890 - RNA, 14 nt, Human
gugcuccuccuugg

SEQ ID NO: 2361891 - RNA, 18 nt, Human
gugcuccgugccuccacc

SEQ ID NO: 2361892 - RNA, 22 nt, Human
gugcuccgugccuccaccacca

SEQ ID NO: 2361893 - RNA, 19 nt, Human
aagaaagcccuuaggaaga

SEQ ID NO: 2361894 - RNA, 16 nt, Human
aagaaagcauagacau

SEQ ID NO: 2361895 - RNA, 17 nt, Human
aagaaagcugguaaacu

SEQ ID NO: 2361896 - RNA, 22 nt, Human
aagaaagcuucaaacugcauga

SEQ ID NO: 2361897 - RNA, 23 nt, Human
aagaaagagcaacaauccaucuc

SEQ ID NO: 2361898 - RNA, 20 nt, Human
aagaaagagagaaaauaaaa

SEQ ID NO: 2361899 - RNA, 17 nt, Human
aagaaagaggagugcuu

SEQ ID NO: 2361900 - RNA, 18 nt, Human
aagaaagagagaaaauaa

SEQ ID NO: 2361901 - RNA, 16 nt, Human
aagaaagagagaaaau

SEQ ID NO: 2361902 - RNA, 15 nt, Human
aagaaagagagaaaa

SEQ ID NO: 2361903 - RNA, 14 nt, Human
aagaaagagagaaa

SEQ ID NO: 2361904 - RNA, 18 nt, Human
aagaaacccgacagaggg

SEQ ID NO: 2361905 - RNA, 16 nt, Human
aagaaacccgacagag

SEQ ID NO: 2361906 - RNA, 13 nt, Human
aagaaagagagaa

SEQ ID NO: 2361907 - RNA, 12 nt, Human
aagaaagagaga

SEQ ID NO: 2361908 - RNA, 16 nt, Human
aagaaagaaaaucagg

SEQ ID NO: 2361909 - RNA, 13 nt, Human
aagaaagaaaauc

SEQ ID NO: 2361910 - RNA, 14 nt, Human
aagaaagaaaauca

SEQ ID NO: 2361911 - RNA, 22 nt, Human
aagaaacacacugaggcaggga

SEQ ID NO: 2361912 - RNA, 19 nt, Human
aagaaacaacucuuugaga

SEQ ID NO: 2361913 - RNA, 14 nt, Human
aagaaacaacagaa

SEQ ID NO: 2361914 - RNA, 11 nt, Human
aagaaacccaa

SEQ ID NO: 2361915 - RNA, 19 nt, Human
aagaaacagaucuccuggc

SEQ ID NO: 2361916 - RNA, 11 nt, Human
aagaaacauuu

SEQ ID NO: 2361917 - RNA, 22 nt, Human
aagaaaauaguggugugauuug

SEQ ID NO: 2361918 - RNA, 21 nt, Human
aagaaaauaguggugugauuu

SEQ ID NO: 2361919 - RNA, 15 nt, Human
aagaaaauaguggug

SEQ ID NO: 2361920 - RNA, 16 nt, Human
aagaaaacaucuauuc

SEQ ID NO: 2361921 - RNA, 13 nt, Human
aagaaaacaucua

SEQ ID NO: 2361922 - RNA, 16 nt, Human
aagaaaauaccaagga

SEQ ID NO: 2361923 - RNA, 22 nt, Human
gugcauuuuugugaaaugaaaa

SEQ ID NO: 2361924 - RNA, 18 nt, Human
gugcauuuuugugaaaug

SEQ ID NO: 2361925 - RNA, 20 nt, Human
gugccaacaauccuagugcu

SEQ ID NO: 2361926 - RNA, 13 nt, Human
gugccaacacuca

SEQ ID NO: 2361927 - RNA, 18 nt, Human
gugccaacacucaagaag

SEQ ID NO: 2361928 - RNA, 19 nt, Human
gugccagauuuaugcauau

SEQ ID NO: 2361929 - RNA, 14 nt, Human
gugccagagguggg

SEQ ID NO: 2361930 - RNA, 15 nt, Human
gugccagaggugggc

SEQ ID NO: 2361931 - RNA, 16 nt, Human
gugccagaggugggca

SEQ ID NO: 2361932 - RNA, 17 nt, Human
gugccagaggugggcag

SEQ ID NO: 2361933 - RNA, 18 nt, Human
gugccagaggugggcagg

SEQ ID NO: 2361934 - RNA, 19 nt, Human
gugccagaggugggcaggu

SEQ ID NO: 2361935 - RNA, 20 nt, Human
gugccagaggugggcaggug

SEQ ID NO: 2361936 - RNA, 21 nt, Human
gugccagaggugggcaggugg

SEQ ID NO: 2361937 - RNA, 23 nt, Human
aacuuuaccuuuuuuauacauaa

SEQ ID NO: 2361938 - RNA, 22 nt, Human
aacuuuaccuuuuuuauacaua

SEQ ID NO: 2361939 - RNA, 21 nt, Human
aacuuuaccuuuuuuauacau

SEQ ID NO: 2361940 - RNA, 22 nt, Human
gugccagaggugggcagguggu

SEQ ID NO: 2361941 - RNA, 14 nt, Human
gugccagcaaagcc

SEQ ID NO: 2361942 - RNA, 15 nt, Human
gugccagcaaagccc

SEQ ID NO: 2361943 - RNA, 16 nt, Human
gugccagcaaagcccc

SEQ ID NO: 2361944 - RNA, 17 nt, Human
gugccagcaaagcccca

SEQ ID NO: 2361945 - RNA, 18 nt, Human
gugccagcaaagccccau

SEQ ID NO: 2361946 - RNA, 19 nt, Human
gugccagcaaagccccaug

SEQ ID NO: 2361947 - RNA, 12 nt, Human
gugccagcaacu

SEQ ID NO: 2361948 - RNA, 18 nt, Human
aagaaaaagaaaaagaaa

SEQ ID NO: 2361949 - RNA, 13 nt, Human
aagaaaaagaaaa

SEQ ID NO: 2361950 - RNA, 22 nt, Human
aacuuuagaguagcaugagaga

SEQ ID NO: 2361951 - RNA, 20 nt, Human
aacuuuacuaagaugacauu

SEQ ID NO: 2361952 - RNA, 16 nt, Human
gugccagcaacugaau

SEQ ID NO: 2361953 - RNA, 18 nt, Human
gugccagcaacugaauaa

SEQ ID NO: 2361954 - RNA, 22 nt, Human
gugccaacacucaagaagcagg

SEQ ID NO: 2361955 - RNA, 21 nt, Human
gugccagcaacugaauaaaua

SEQ ID NO: 2361956 - RNA, 19 nt, Human
aacuuuacuaagaugacau

SEQ ID NO: 2361957 - RNA, 19 nt, Human
aagaaaaaauauuuucccu

SEQ ID NO: 2361958 - RNA, 18 nt, Human
aagaaaaaugagccuggc

SEQ ID NO: 2361959 - RNA, 19 nt, Human
aagaaaaaucauguuugcu

SEQ ID NO: 2361960 - RNA, 22 nt, Human
aagaaaaaucauguuugcucuc

SEQ ID NO: 2361961 - RNA, 14 nt, Human
aagaaaacaacuuc

SEQ ID NO: 2361962 - RNA, 17 nt, Human
aagaaaaaugagccugg

SEQ ID NO: 2361963 - RNA, 16 nt, Human
aagaaaaaauacauuu

SEQ ID NO: 2361964 - RNA, 14 nt, Human
aagaaaaaauacau

SEQ ID NO: 2361965 - RNA, 12 nt, Human
aagaaaaaauac

SEQ ID NO: 2361966 - RNA, 17 nt, Human
aagaaaaaucauguuug

SEQ ID NO: 2361967 - RNA, 17 nt, Human
aacucuuuuugggcucc

SEQ ID NO: 2361968 - RNA, 23 nt, Human
aacucuuuuugggcuccuuuuuc

SEQ ID NO: 2361969 - RNA, 14 nt, Human
aacucuuugagaaa

SEQ ID NO: 2361970 - RNA, 13 nt, Human
aacucuuucaaaa

SEQ ID NO: 2361971 - RNA, 19 nt, Human
aacucuuugaaugacaaag

SEQ ID NO: 2361972 - RNA, 20 nt, Human
aacugauuuuuuuuuccuuc

SEQ ID NO: 2361973 - RNA, 21 nt, Human
aacugauuuuuuuuuccuuca

SEQ ID NO: 2361974 - RNA, 14 nt, Human
aacugcauugagaa

SEQ ID NO: 2361975 - RNA, 16 nt, Human
aacugcauuagaaauu

SEQ ID NO: 2361976 - RNA, 20 nt, Human
aacugcauugagaacugcau

SEQ ID NO: 2361977 - RNA, 18 nt, Human
aacugccaaaaugcucua

SEQ ID NO: 2361978 - RNA, 16 nt, Human
aacugcauuggcuuug

SEQ ID NO: 2361979 - RNA, 22 nt, Human
aacugauuuuuuuuuccuucag

SEQ ID NO: 2361980 - RNA, 23 nt, Human
aacugauuuuuuuuuccuucagu

SEQ ID NO: 2361981 - RNA, 12 nt, Human
aacucucugaac

SEQ ID NO: 2361982 - RNA, 22 nt, Human
aacucucuccacccuauaugua

SEQ ID NO: 2361983 - RNA, 12 nt, Human
aacucucuccac

SEQ ID NO: 2361984 - RNA, 13 nt, Human
gugaggccuugcu

SEQ ID NO: 2361985 - RNA, 10 nt, Human
aacucucuuu

SEQ ID NO: 2361986 - RNA, 19 nt, Human
aacucucuuugggaauguu

SEQ ID NO: 2361987 - RNA, 22 nt, Human
aacucuccucugcugcuggcug

SEQ ID NO: 2361988 - RNA, 23 nt, Human
aacucuccucugcugcuggcugg

SEQ ID NO: 2361989 - RNA, 11 nt, Human
aacucuugauu

SEQ ID NO: 2361990 - RNA, 12 nt, Human
aacucuuucaaa

SEQ ID NO: 2361991 - RNA, 17 nt, Human
aacucuugguuucuuca

SEQ ID NO: 2361992 - RNA, 17 nt, Human
aacucuugauuauccau

SEQ ID NO: 2361993 - RNA, 16 nt, Human
aacucugacaacagac

SEQ ID NO: 2361994 - RNA, 19 nt, Human
aacucugaauuuuaaagca

SEQ ID NO: 2361995 - RNA, 14 nt, Human
gugaggcuguccug

SEQ ID NO: 2361996 - RNA, 16 nt, Human
gugaggcuguccugua

SEQ ID NO: 2361997 - RNA, 18 nt, Human
gugaggcucugcccuugg

SEQ ID NO: 2361998 - RNA, 17 nt, Human
gugagucaccaagccca

SEQ ID NO: 2361999 - RNA, 23 nt, Human
gugaguacuacaguccucccauc

SEQ ID NO: 2362000 - RNA, 19 nt, Human
gugagucaccaagcccagu

SEQ ID NO: 2362001 - RNA, 17 nt, Human
aacucuccucugcugcu

SEQ ID NO: 2362002 - RNA, 19 nt, Human
aacucuccucugcugcugg

SEQ ID NO: 2362003 - RNA, 21 nt, Human
aacucuccucugcugcuggcu

SEQ ID NO: 2362004 - RNA, 18 nt, Human
gugagacucugucucaaa

SEQ ID NO: 2362005 - RNA, 17 nt, Human
gugagagagaugggagc

SEQ ID NO: 2362006 - RNA, 19 nt, Human
gugagacgccaccauuccu

SEQ ID NO: 2362007 - RNA, 12 nt, Human
gugaggcucugc

SEQ ID NO: 2362008 - RNA, 13 nt, Human
gugaggcucugcc

SEQ ID NO: 2362009 - RNA, 14 nt, Human
gugaggcucugccc

SEQ ID NO: 2362010 - RNA, 15 nt, Human
gugaggcucugcccu

SEQ ID NO: 2362011 - RNA, 16 nt, Human
gugaggcucugcccuu

SEQ ID NO: 2362012 - RNA, 17 nt, Human
gugaggcucugcccuug

SEQ ID NO: 2362013 - RNA, 15 nt, Human
gugaauaauaaaagu

SEQ ID NO: 2362014 - RNA, 13 nt, Human
gugaauaaauguc

SEQ ID NO: 2362015 - RNA, 16 nt, Human
gugaauaaaugucuug

SEQ ID NO: 2362016 - RNA, 23 nt, Human
gugacagaggcagccccauucug

SEQ ID NO: 2362017 - RNA, 20 nt, Human
gugacagagugagacucugu

SEQ ID NO: 2362018 - RNA, 22 nt, Human
gugacagagugagacucugucu

SEQ ID NO: 2362019 - RNA, 18 nt, Human
gugacagaguucacuaua

SEQ ID NO: 2362020 - RNA, 17 nt, Human
gugacagaguucacuau

SEQ ID NO: 2362021 - RNA, 16 nt, Human
gugacagauuauacag

SEQ ID NO: 2362022 - RNA, 14 nt, Human
gugacaggcagcag

SEQ ID NO: 2362023 - RNA, 15 nt, Human
gugacaggcagcaga

SEQ ID NO: 2362024 - RNA, 16 nt, Human
gugacaggcagcagag

SEQ ID NO: 2362025 - RNA, 13 nt, Human
gugacagggaagc

SEQ ID NO: 2362026 - RNA, 16 nt, Human
gugacagggaagcuac

SEQ ID NO: 2362027 - RNA, 22 nt, Human
gugacagggaagcuacagguua

SEQ ID NO: 2362028 - RNA, 17 nt, Human
gugacagggaagcuaca

SEQ ID NO: 2362029 - RNA, 18 nt, Human
gugacagggaagcuacag

SEQ ID NO: 2362030 - RNA, 19 nt, Human
gugacagggaagcuacagg

SEQ ID NO: 2362031 - RNA, 20 nt, Human
gugacagggaagcuacaggu

SEQ ID NO: 2362032 - RNA, 23 nt, Human
gugacagugccugggaauguauu

SEQ ID NO: 2362033 - RNA, 17 nt, Human
gugacagugccugggaa

SEQ ID NO: 2362034 - RNA, 15 nt, Human
gugacagugccuggg

SEQ ID NO: 2362035 - RNA, 19 nt, Human
gugacaguauuuugguucu

SEQ ID NO: 2362036 - RNA, 15 nt, Human
gugacaucaguggca

SEQ ID NO: 2362037 - RNA, 14 nt, Human
gugacaucaguggc

SEQ ID NO: 2362038 - RNA, 18 nt, Human
gugacaguggauugcauu

SEQ ID NO: 2362039 - RNA, 14 nt, Human
gugaaguuuacauu

SEQ ID NO: 2362040 - RNA, 23 nt, Human
gugaauaauacaguaucucaggg

SEQ ID NO: 2362041 - RNA, 19 nt, Human
gugaaguuuaauugacuua

SEQ ID NO: 2362042 - RNA, 18 nt, Human
aacuccuggaaauaucag

SEQ ID NO: 2362043 - RNA, 17 nt, Human
aacuccugccccuguuc

SEQ ID NO: 2362044 - RNA, 18 nt, Human
aacuccugccccuguucu

SEQ ID NO: 2362045 - RNA, 12 nt, Human
aacuccugcccc

SEQ ID NO: 2362046 - RNA, 16 nt, Human
aacuccugacagucuu

SEQ ID NO: 2362047 - RNA, 14 nt, Human
aacuccugaccuca

SEQ ID NO: 2362048 - RNA, 12 nt, Human
aacuccugaccu

SEQ ID NO: 2362049 - RNA, 23 nt, Human
aacuccaccaacccaucagaagg

SEQ ID NO: 2362050 - RNA, 15 nt, Human
aacuccaccaaccca

SEQ ID NO: 2362051 - RNA, 17 nt, Human
aacuccacaucugccuu

SEQ ID NO: 2362052 - RNA, 18 nt, Human
aacuccacaucugccuua

SEQ ID NO: 2362053 - RNA, 14 nt, Human
aacuccacaucugc

SEQ ID NO: 2362054 - RNA, 15 nt, Human
aacuccacaucugcc

SEQ ID NO: 2362055 - RNA, 16 nt, Human
aacuccacaucugccu

SEQ ID NO: 2362056 - RNA, 19 nt, Human
aacuccaccuugcggggau

SEQ ID NO: 2362057 - RNA, 21 nt, Human
aacuccuagggccacugaaga

SEQ ID NO: 2362058 - RNA, 18 nt, Human
gugacuguggcacacgcc

SEQ ID NO: 2362059 - RNA, 21 nt, Human
gugacuuagcagaugcugguc

SEQ ID NO: 2362060 - RNA, 22 nt, Human
gugacauguguuggcagccucu

SEQ ID NO: 2362061 - RNA, 21 nt, Human
gugacauuuauuuuucucaug

SEQ ID NO: 2362062 - RNA, 22 nt, Human
gugacauuugggagacauguga

SEQ ID NO: 2362063 - RNA, 19 nt, Human
gugacaugucuuuucuugc

SEQ ID NO: 2362064 - RNA, 14 nt, Human
gugacaugugaaac

SEQ ID NO: 2362065 - RNA, 15 nt, Human
gugacaugugaaacc

SEQ ID NO: 2362066 - RNA, 16 nt, Human
gugacaugugaaaccu

SEQ ID NO: 2362067 - RNA, 17 nt, Human
gugacaugugaaaccuu

SEQ ID NO: 2362068 - RNA, 18 nt, Human
gugacaugugaaaccuuu

SEQ ID NO: 2362069 - RNA, 19 nt, Human
gugacaugugaaaccuuuu

SEQ ID NO: 2362070 - RNA, 20 nt, Human
gugacaugugaaaccuuuuu

SEQ ID NO: 2362071 - RNA, 22 nt, Human
gugacaugugaaaccuuuuuua

SEQ ID NO: 2362072 - RNA, 16 nt, Human
gugacuucagcucugu

SEQ ID NO: 2362073 - RNA, 21 nt, Human
gugacuugcaucguggagaca

SEQ ID NO: 2362074 - RNA, 15 nt, Human
gugacuucuccaggu

SEQ ID NO: 2362075 - RNA, 22 nt, Human
gugacuugcaucguggagacag

SEQ ID NO: 2362076 - RNA, 17 nt, Human
gugacuugugucccaug

SEQ ID NO: 2362077 - RNA, 16 nt, Human
gugagacagugggaaa

SEQ ID NO: 2362078 - RNA, 18 nt, Human
gugacuuuggcugcaugc

SEQ ID NO: 2362079 - RNA, 23 nt, Human
gugacuugugucccaugaucccu

SEQ ID NO: 2362080 - RNA, 15 nt, Human
gugagacccccacac

SEQ ID NO: 2362081 - RNA, 14 nt, Human
gugagacccccaca

SEQ ID NO: 2362082 - RNA, 20 nt, Human
gugagacccagcccucaucc

SEQ ID NO: 2362083 - RNA, 22 nt, Human
gugagacccugucucaaaaaaa

SEQ ID NO: 2362084 - RNA, 17 nt, Human
gugagacccccacaccu

SEQ ID NO: 2362085 - RNA, 16 nt, Human
gugagacccccacacc

SEQ ID NO: 2362086 - RNA, 13 nt, Human
gugagaccugccc

SEQ ID NO: 2362087 - RNA, 15 nt, Human
gugagaccugccccu

SEQ ID NO: 2362088 - RNA, 14 nt, Human
gugagaccugcccc

SEQ ID NO: 2362089 - RNA, 16 nt, Human
gugagacccugucucu

SEQ ID NO: 2362090 - RNA, 17 nt, Human
gugagacucgagaacuu

SEQ ID NO: 2362091 - RNA, 20 nt, Human
gugagacucgagaacuuuca

SEQ ID NO: 2362092 - RNA, 22 nt, Human
gugagacucgagaacuuucauu

SEQ ID NO: 2362093 - RNA, 23 nt, Human
gugagaccugccccuccucucug

SEQ ID NO: 2362094 - RNA, 16 nt, Human
gugagaccugccccuc

SEQ ID NO: 2362095 - RNA, 14 nt, Human
gugagacucugucu

SEQ ID NO: 2362096 - RNA, 16 nt, Human
gugagacucugucuca

SEQ ID NO: 2362097 - RNA, 20 nt, Human
aacgugaugaucagcuguuu

SEQ ID NO: 2362098 - RNA, 15 nt, Human
aacgugaugaucagc

SEQ ID NO: 2362099 - RNA, 11 nt, Human
aacgugcauug

SEQ ID NO: 2362100 - RNA, 12 nt, Human
aacgugaaaaug

SEQ ID NO: 2362101 - RNA, 13 nt, Human
aacguggcccaga

SEQ ID NO: 2362102 - RNA, 15 nt, Human
aacguggcucugcug

SEQ ID NO: 2362103 - RNA, 16 nt, Human
aacguggcucugcugg

SEQ ID NO: 2362104 - RNA, 17 nt, Human
aacguggcucugcuggc

SEQ ID NO: 2362105 - RNA, 23 nt, Human
aacgugcauugugcuucuuucuu

SEQ ID NO: 2362106 - RNA, 17 nt, Human
aacgugcagacuaugca

SEQ ID NO: 2362107 - RNA, 14 nt, Human
aacgugcauugugc

SEQ ID NO: 2362108 - RNA, 16 nt, Human
aacgugcauugugcuu

SEQ ID NO: 2362109 - RNA, 17 nt, Human
aaccuuccaucucgcca

SEQ ID NO: 2362110 - RNA, 13 nt, Human
aaccuuccaucuc

SEQ ID NO: 2362111 - RNA, 19 nt, Human
aaccuuccaucucgccacc

SEQ ID NO: 2362112 - RNA, 21 nt, Human
aaccuucgccaccuggguucc

SEQ ID NO: 2362113 - RNA, 12 nt, Human
aaccuucuggcc

SEQ ID NO: 2362114 - RNA, 13 nt, Human
aacgucugugcca

SEQ ID NO: 2362115 - RNA, 13 nt, Human
gucuuucuggaga

SEQ ID NO: 2362116 - RNA, 16 nt, Human
gucuuuccuggcacua

SEQ ID NO: 2362117 - RNA, 12 nt, Human
gucuuuccuaga

SEQ ID NO: 2362118 - RNA, 20 nt, Human
gucuuucccauggggaggga

SEQ ID NO: 2362119 - RNA, 20 nt, Human
gucuuuccauuggaucucau

SEQ ID NO: 2362120 - RNA, 19 nt, Human
gucuuucccauggggaggg

SEQ ID NO: 2362121 - RNA, 19 nt, Human
aaccuggagggcuagaacc

SEQ ID NO: 2362122 - RNA, 22 nt, Human
aaccuggagggcuagaaucugg

SEQ ID NO: 2362123 - RNA, 19 nt, Human
aaccuggcaagcuagaacc

SEQ ID NO: 2362124 - RNA, 22 nt, Human
aaccuggagggcuggaaucugg

SEQ ID NO: 2362125 - RNA, 20 nt, Human
aaccuggaggggcuagaacc

SEQ ID NO: 2362126 - RNA, 16 nt, Human
aaccuuauuguaccuc

SEQ ID NO: 2362127 - RNA, 17 nt, Human
aaccuuauuguaccucu

SEQ ID NO: 2362128 - RNA, 18 nt, Human
aaccuuauuguaccucuc

SEQ ID NO: 2362129 - RNA, 19 nt, Human
aaccuuauuguaccucucu

SEQ ID NO: 2362130 - RNA, 15 nt, Human
aaccuuauuguaccu

SEQ ID NO: 2362131 - RNA, 21 nt, Human
aaccugggauucaggaaugug

SEQ ID NO: 2362132 - RNA, 20 nt, Human
aaccugggauucaggaaugu

SEQ ID NO: 2362133 - RNA, 17 nt, Human
aaccugggauucaggaa

SEQ ID NO: 2362134 - RNA, 14 nt, Human
aaccugggauucag

SEQ ID NO: 2362135 - RNA, 12 nt, Human
aaccuggggggc

SEQ ID NO: 2362136 - RNA, 22 nt, Human
aaccugggaggcggagaguaca

SEQ ID NO: 2362137 - RNA, 17 nt, Human
aaccuggguccaaauaa

SEQ ID NO: 2362138 - RNA, 22 nt, Human
aaccuggguccaaauaaaaacu

SEQ ID NO: 2362139 - RNA, 18 nt, Human
aaccuggguccaaauaaa

SEQ ID NO: 2362140 - RNA, 19 nt, Human
aaccuggguccaaauaaaa

SEQ ID NO: 2362141 - RNA, 17 nt, Human
aacguuuuuccuguucu

SEQ ID NO: 2362142 - RNA, 20 nt, Human
aacguuuugaacuaauaaaa

SEQ ID NO: 2362143 - RNA, 15 nt, Human
aacguuuugaacuaa

SEQ ID NO: 2362144 - RNA, 23 nt, Human
aacguuuucuguuuggaggagca

SEQ ID NO: 2362145 - RNA, 15 nt, Human
aacguuuuauugugu

SEQ ID NO: 2362146 - RNA, 13 nt, Human
aacguuuuauugu

SEQ ID NO: 2362147 - RNA, 12 nt, Human
aacguggcugcu

SEQ ID NO: 2362148 - RNA, 13 nt, Human
aacguggcugcuu

SEQ ID NO: 2362149 - RNA, 17 nt, Human
aacuagggaagauaaua

SEQ ID NO: 2362150 - RNA, 21 nt, Human
aacuaggugcauauuuauaaa

SEQ ID NO: 2362151 - RNA, 23 nt, Human
aacguuuuuccuuuaaaaaaauu

SEQ ID NO: 2362152 - RNA, 18 nt, Human
aacuauggaucagaauag

SEQ ID NO: 2362153 - RNA, 12 nt, Human
aacuauggccug

SEQ ID NO: 2362154 - RNA, 14 nt, Human
aacuauaugugaau

SEQ ID NO: 2362155 - RNA, 15 nt, Human
aacuaguccuuuacu

SEQ ID NO: 2362156 - RNA, 22 nt, Human
aacuaggucugauauucaaaug

SEQ ID NO: 2362157 - RNA, 17 nt, Human
aacuagggccaagccca

SEQ ID NO: 2362158 - RNA, 15 nt, Human
aacuauguugauaaa

SEQ ID NO: 2362159 - RNA, 22 nt, Human
aacuauuaagaggcagaaaauu

SEQ ID NO: 2362160 - RNA, 21 nt, Human
aacucauuuuuguuuucauua

SEQ ID NO: 2362161 - RNA, 23 nt, Human
aacuauucaggagaguagaacag

SEQ ID NO: 2362162 - RNA, 24 nt, Human
aacucauuuuuguuuucauuaucu

SEQ ID NO: 2362163 - RNA, 22 nt, Human
gucucuuucaugaguuuuuccc

SEQ ID NO: 2362164 - RNA, 16 nt, Human
gucuauuuuugucuua

SEQ ID NO: 2362165 - RNA, 23 nt, Human
gucucuuuucuuuagagcauugc

SEQ ID NO: 2362166 - RNA, 14 nt, Human
gucugaagcagaug

SEQ ID NO: 2362167 - RNA, 19 nt, Human
gucugaaggacacuuccug

SEQ ID NO: 2362168 - RNA, 15 nt, Human
gucugaacagcugua

SEQ ID NO: 2362169 - RNA, 13 nt, Human
gucugaauguucu

SEQ ID NO: 2362170 - RNA, 11 nt, Human
gucugaaaugg

SEQ ID NO: 2362171 - RNA, 17 nt, Human
gucuauuucugcugaau

SEQ ID NO: 2362172 - RNA, 14 nt, Human
gucuauuucuaguu

SEQ ID NO: 2362173 - RNA, 13 nt, Human
gucuauuucugcu

SEQ ID NO: 2362174 - RNA, 12 nt, Human
gucuauuuaagc

SEQ ID NO: 2362175 - RNA, 16 nt, Human
gucuauuuaagccuca

SEQ ID NO: 2362176 - RNA, 14 nt, Human
gucucaaaaaaaca

SEQ ID NO: 2362177 - RNA, 17 nt, Human
gucucaaaaaaagaaaa

SEQ ID NO: 2362178 - RNA, 14 nt, Human
gucuggaaguccaa

SEQ ID NO: 2362179 - RNA, 20 nt, Human
gucugacaggcaaugcuggc

SEQ ID NO: 2362180 - RNA, 15 nt, Human
gucugacaggcaaug

SEQ ID NO: 2362181 - RNA, 18 nt, Human
gucugacaggcaaugcug

SEQ ID NO: 2362182 - RNA, 20 nt, Human
gucugaauguucugacauua

SEQ ID NO: 2362183 - RNA, 18 nt, Human
gucugaauguucugacau

SEQ ID NO: 2362184 - RNA, 17 nt, Human
gucugaauguucugaca

SEQ ID NO: 2362185 - RNA, 15 nt, Human
gucugaauguucuga

SEQ ID NO: 2362186 - RNA, 14 nt, Human
gucugaauguucug

SEQ ID NO: 2362187 - RNA, 22 nt, Human
gucugaaggacacuuccugccu

SEQ ID NO: 2362188 - RNA, 20 nt, Human
gucugaaggacacuuccugc

SEQ ID NO: 2362189 - RNA, 21 nt, Human
gucugaaggacacuuccugcc

SEQ ID NO: 2362190 - RNA, 12 nt, Human
gucugacaggca

SEQ ID NO: 2362191 - RNA, 13 nt, Human
gucugacaggcaa

SEQ ID NO: 2362192 - RNA, 14 nt, Human
gucugacaggcaau

SEQ ID NO: 2362193 - RNA, 14 nt, Human
gucuucaagggcuu

SEQ ID NO: 2362194 - RNA, 14 nt, Human
gucuuauuuccuca

SEQ ID NO: 2362195 - RNA, 16 nt, Human
gucuucaacagcuccc

SEQ ID NO: 2362196 - RNA, 14 nt, Human
gucuuauuuauuau

SEQ ID NO: 2362197 - RNA, 19 nt, Human
gucuucaacagcuccccau

SEQ ID NO: 2362198 - RNA, 15 nt, Human
gucuuaucaagcagc

SEQ ID NO: 2362199 - RNA, 20 nt, Human
gucuuguguuucuuuaguuu

SEQ ID NO: 2362200 - RNA, 23 nt, Human
gucuuguguuuccacagccugca

SEQ ID NO: 2362201 - RNA, 22 nt, Human
gucuuguuuuuuuuuuccacuu

SEQ ID NO: 2362202 - RNA, 20 nt, Human
gucuuguuaagugcagucug

SEQ ID NO: 2362203 - RNA, 18 nt, Human
gucuuuccacggagccac

SEQ ID NO: 2362204 - RNA, 22 nt, Human
gucuuuccacuccuccuagcca

SEQ ID NO: 2362205 - RNA, 21 nt, Human
gucuuucaggaccuuuugaag

SEQ ID NO: 2362206 - RNA, 12 nt, Human
gucuuguucugu

SEQ ID NO: 2362207 - RNA, 12 nt, Human
gucuuaaaauaa

SEQ ID NO: 2362208 - RNA, 15 nt, Human
gucuuaaaauaacuu

SEQ ID NO: 2362209 - RNA, 22 nt, Human
gucuuaaaauaacuuauaucau

SEQ ID NO: 2362210 - RNA, 18 nt, Human
gucuggaaugcaguggua

SEQ ID NO: 2362211 - RNA, 15 nt, Human
gucuggaaugcagug

SEQ ID NO: 2362212 - RNA, 16 nt, Human
gucuggaaugcagugg

SEQ ID NO: 2362213 - RNA, 19 nt, Human
gucuuauauauuguagaua

SEQ ID NO: 2362214 - RNA, 14 nt, Human
gucuuaauuaaaag

SEQ ID NO: 2362215 - RNA, 14 nt, Human
gucuuaaugaaguu

SEQ ID NO: 2362216 - RNA, 23 nt, Human
gucuuaagccuuuugcucacaaa

SEQ ID NO: 2362217 - RNA, 16 nt, Human
gucuuaaugaaguuug

SEQ ID NO: 2362218 - RNA, 17 nt, Human
gucuuaaugaaguuuga

SEQ ID NO: 2362219 - RNA, 18 nt, Human
gucuuaaugaaguuugaa

SEQ ID NO: 2362220 - RNA, 19 nt, Human
gucuuaaugaaguuugaau

SEQ ID NO: 2362221 - RNA, 20 nt, Human
gucuuaaugaaguuugaaug

SEQ ID NO: 2362222 - RNA, 22 nt, Human
gucuuaaugaaguuugaauguu

SEQ ID NO: 2362223 - RNA, 9 nt, Human
guauuuaac

SEQ ID NO: 2362224 - RNA, 20 nt, Human
guauuguuuugguuugcuac

SEQ ID NO: 2362225 - RNA, 14 nt, Human
guauuguucccagu

SEQ ID NO: 2362226 - RNA, 11 nt, Human
guauuguuccc

SEQ ID NO: 2362227 - RNA, 18 nt, Human
guauuguucccagugaca

SEQ ID NO: 2362228 - RNA, 17 nt, Human
guauugugucuuuugca

SEQ ID NO: 2362229 - RNA, 18 nt, Human
guauugugucuuuugcau

SEQ ID NO: 2362230 - RNA, 21 nt, Human
guauugugucuuuugcaugau

SEQ ID NO: 2362231 - RNA, 13 nt, Human
guauuuauauauu

SEQ ID NO: 2362232 - RNA, 12 nt, Human
guauuuauauau

SEQ ID NO: 2362233 - RNA, 13 nt, Human
guauuuauaaaua

SEQ ID NO: 2362234 - RNA, 19 nt, Human
guauuuacgcuuugauuca

SEQ ID NO: 2362235 - RNA, 17 nt, Human
guauuuacgcuuugauu

SEQ ID NO: 2362236 - RNA, 16 nt, Human
guauuuacgcuuugau

SEQ ID NO: 2362237 - RNA, 16 nt, Human
guauuuauauauuuau

SEQ ID NO: 2362238 - RNA, 15 nt, Human
guauuuauauauuua

SEQ ID NO: 2362239 - RNA, 17 nt, Human
guauuuauauauuuaua

SEQ ID NO: 2362240 - RNA, 13 nt, Human
guauuuaucuuua

SEQ ID NO: 2362241 - RNA, 11 nt, Human
guauuuauuca

SEQ ID NO: 2362242 - RNA, 15 nt, Human
aaauguauaugcacu

SEQ ID NO: 2362243 - RNA, 14 nt, Human
aaauguauaugcac

SEQ ID NO: 2362244 - RNA, 17 nt, Human
aaauguaucuuauucac

SEQ ID NO: 2362245 - RNA, 18 nt, Human
aaauguaugauuacauca

SEQ ID NO: 2362246 - RNA, 14 nt, Human
aaauguaucuuauu

SEQ ID NO: 2362247 - RNA, 17 nt, Human
aaauguaucauagaaau

SEQ ID NO: 2362248 - RNA, 20 nt, Human
aaauguaucauagaaaugua

SEQ ID NO: 2362249 - RNA, 16 nt, Human
aaaugucuauuaaggu

SEQ ID NO: 2362250 - RNA, 21 nt, Human
aaaugucucuuuaaugucaca

SEQ ID NO: 2362251 - RNA, 17 nt, Human
aaaugugauuuuucuga

SEQ ID NO: 2362252 - RNA, 17 nt, Human
aaaugugcaaaacagcg

SEQ ID NO: 2362253 - RNA, 22 nt, Human
aaaugugcauucuuuuaaaaga

SEQ ID NO: 2362254 - RNA, 23 nt, Human
aaaugugcauucuuuuaaaagac

SEQ ID NO: 2362255 - RNA, 16 nt, Human
aaaugugauuuuucug

SEQ ID NO: 2362256 - RNA, 16 nt, Human
aaaugucuucuguauu

SEQ ID NO: 2362257 - RNA, 15 nt, Human
aaaugugauuuuucu

SEQ ID NO: 2362258 - RNA, 14 nt, Human
aaaugucuuccugg

SEQ ID NO: 2362259 - RNA, 12 nt, Human
aaaugucuugug

SEQ ID NO: 2362260 - RNA, 18 nt, Human
aaaugucuucuguauuca

SEQ ID NO: 2362261 - RNA, 18 nt, Human
guauucuaguuuugucaa

SEQ ID NO: 2362262 - RNA, 21 nt, Human
aaaucauugcuuugaagcagu

SEQ ID NO: 2362263 - RNA, 19 nt, Human
guauucuagcuaauguaau

SEQ ID NO: 2362264 - RNA, 11 nt, Human
guauucuuuga

SEQ ID NO: 2362265 - RNA, 14 nt, Human
guauucuuugaugu

SEQ ID NO: 2362266 - RNA, 21 nt, Human
guauucucuccuguaccucuu

SEQ ID NO: 2362267 - RNA, 14 nt, Human
guauucuugucaaa

SEQ ID NO: 2362268 - RNA, 18 nt, Human
guauucucuccuguaccu

SEQ ID NO: 2362269 - RNA, 17 nt, Human
aaaucauguacauuucu

SEQ ID NO: 2362270 - RNA, 12 nt, Human
aaaucauguuug

SEQ ID NO: 2362271 - RNA, 19 nt, Human
aaaucauuaauacucuucu

SEQ ID NO: 2362272 - RNA, 11 nt, Human
aaaucauuucu

SEQ ID NO: 2362273 - RNA, 16 nt, Human
aaaucauucauuuucu

SEQ ID NO: 2362274 - RNA, 16 nt, Human
aaaucauguacauuuc

SEQ ID NO: 2362275 - RNA, 17 nt, Human
aaaucauggaaugguua

SEQ ID NO: 2362276 - RNA, 21 nt, Human
aaaucaugaagauauuuuucc

SEQ ID NO: 2362277 - RNA, 20 nt, Human
guauuguaccuuuuaacacc

SEQ ID NO: 2362278 - RNA, 22 nt, Human
guauuguauuuauucaauaaag

SEQ ID NO: 2362279 - RNA, 17 nt, Human
guauuguauuuauucaa

SEQ ID NO: 2362280 - RNA, 18 nt, Human
guauuguauuuauucaau

SEQ ID NO: 2362281 - RNA, 12 nt, Human
guauuguauuua

SEQ ID NO: 2362282 - RNA, 13 nt, Human
guauuguauuuau

SEQ ID NO: 2362283 - RNA, 15 nt, Human
guauuguauuuauuc

SEQ ID NO: 2362284 - RNA, 16 nt, Human
guauuguauuuauuca

SEQ ID NO: 2362285 - RNA, 17 nt, Human
guauugaaucauguagu

SEQ ID NO: 2362286 - RNA, 12 nt, Human
guauugaaucau

SEQ ID NO: 2362287 - RNA, 14 nt, Human
guauugaaucaugu

SEQ ID NO: 2362288 - RNA, 17 nt, Human
guauuguaaacaugugu

SEQ ID NO: 2362289 - RNA, 22 nt, Human
guauugaagcauuuuauaaauc

SEQ ID NO: 2362290 - RNA, 18 nt, Human
guauugaagcauuuuaua

SEQ ID NO: 2362291 - RNA, 17 nt, Human
guauugaagcauuuuau

SEQ ID NO: 2362292 - RNA, 13 nt, Human
guauugaagcauu

SEQ ID NO: 2362293 - RNA, 10 nt, Human
guauugaagc

SEQ ID NO: 2362294 - RNA, 16 nt, Human
guauucuuugauguua

SEQ ID NO: 2362295 - RNA, 18 nt, Human
guauucuuugauguuaac

SEQ ID NO: 2362296 - RNA, 21 nt, Human
guauucuuugauguuaacaca

SEQ ID NO: 2362297 - RNA, 23 nt, Human
guauucuuugauguuaacacauu

SEQ ID NO: 2362298 - RNA, 13 nt, Human
aaauuccacugga

SEQ ID NO: 2362299 - RNA, 16 nt, Human
aaauucacaauagaaa

SEQ ID NO: 2362300 - RNA, 23 nt, Human
aaauuccuuagcuuagaccucag

SEQ ID NO: 2362301 - RNA, 17 nt, Human
aaauucgaccugauuua

SEQ ID NO: 2362302 - RNA, 18 nt, Human
aaauucgaccugauuuac

SEQ ID NO: 2362303 - RNA, 21 nt, Human
aaauucgcugcaaccuguuga

SEQ ID NO: 2362304 - RNA, 23 nt, Human
aaauucgaccugauuuacaguuu

SEQ ID NO: 2362305 - RNA, 22 nt, Human
aaauuccuuagcuuagaccuca

SEQ ID NO: 2362306 - RNA, 20 nt, Human
aaauuccucuuugcuuugcu

SEQ ID NO: 2362307 - RNA, 14 nt, Human
aaauuccuguagca

SEQ ID NO: 2362308 - RNA, 16 nt, Human
aaauuccccacccuga

SEQ ID NO: 2362309 - RNA, 19 nt, Human
aaauucacaaguuguguuu

SEQ ID NO: 2362310 - RNA, 18 nt, Human
aaauucacaaguuguguu

SEQ ID NO: 2362311 - RNA, 18 nt, Human
aaauucacaaacuuuuau

SEQ ID NO: 2362312 - RNA, 17 nt, Human
aaauucacaaacuuuua

SEQ ID NO: 2362313 - RNA, 23 nt, Human
aaauucaauuguaaauugaauca

SEQ ID NO: 2362314 - RNA, 20 nt, Human
aaauucaauuguaaauugaa

SEQ ID NO: 2362315 - RNA, 19 nt, Human
aaauucaauuguaaauuga

SEQ ID NO: 2362316 - RNA, 17 nt, Human
aaauucaauuguaaauu

SEQ ID NO: 2362317 - RNA, 15 nt, Human
aaauucacaaacuuu

SEQ ID NO: 2362318 - RNA, 14 nt, Human
aaauucacaaacuu

SEQ ID NO: 2362319 - RNA, 17 nt, Human
aaauuccaagugauuga

SEQ ID NO: 2362320 - RNA, 20 nt, Human
aaauucucagucaguaauug

SEQ ID NO: 2362321 - RNA, 13 nt, Human
aaauucuccugga

SEQ ID NO: 2362322 - RNA, 19 nt, Human
aaauucuauuacaguaugu

SEQ ID NO: 2362323 - RNA, 21 nt, Human
aaauucuauucugaucuuauu

SEQ ID NO: 2362324 - RNA, 23 nt, Human
aaauucuauaggaacauaugaaa

SEQ ID NO: 2362325 - RNA, 22 nt, Human
aaauucuauaggaacauaugaa

SEQ ID NO: 2362326 - RNA, 19 nt, Human
aaauucuauaggaacauau

SEQ ID NO: 2362327 - RNA, 15 nt, Human
aaauucuacaacaca

SEQ ID NO: 2362328 - RNA, 17 nt, Human
aaauuguauuacaaauc

SEQ ID NO: 2362329 - RNA, 22 nt, Human
aaauuguaucuagugcagcuga

SEQ ID NO: 2362330 - RNA, 18 nt, Human
aaauugucagaugcugug

SEQ ID NO: 2362331 - RNA, 17 nt, Human
aaauuguauauucacuu

SEQ ID NO: 2362332 - RNA, 14 nt, Human
aaauucuccuggag

SEQ ID NO: 2362333 - RNA, 16 nt, Human
aaauucuccuggaggu

SEQ ID NO: 2362334 - RNA, 21 nt, Human
aaauugucccuuaaacaaaaa

SEQ ID NO: 2362335 - RNA, 23 nt, Human
aaauuguccguguucauacauuu

SEQ ID NO: 2362336 - RNA, 23 nt, Human
aaauuuaaaagacacuguuuaca

SEQ ID NO: 2362337 - RNA, 20 nt, Human
aaauuguuuugagcuuucca

SEQ ID NO: 2362338 - RNA, 19 nt, Human
aaauuagcugugugaaaua

SEQ ID NO: 2362339 - RNA, 18 nt, Human
aaauuaggaauaaauaaa

SEQ ID NO: 2362340 - RNA, 18 nt, Human
aaauuaggauuucaugau

SEQ ID NO: 2362341 - RNA, 16 nt, Human
aaauuaggaauaaaua

SEQ ID NO: 2362342 - RNA, 15 nt, Human
aaauuaggaauaaau

SEQ ID NO: 2362343 - RNA, 14 nt, Human
aaauuaggaauaaa

SEQ ID NO: 2362344 - RNA, 18 nt, Human
aaauuagcugugugaaau

SEQ ID NO: 2362345 - RNA, 17 nt, Human
aaauuagcugugugaaa

SEQ ID NO: 2362346 - RNA, 19 nt, Human
aaauuaggauuucaugauu

SEQ ID NO: 2362347 - RNA, 15 nt, Human
aaauucaauuguaaa

SEQ ID NO: 2362348 - RNA, 20 nt, Human
aaauuauguuacaucuguuu

SEQ ID NO: 2362349 - RNA, 19 nt, Human
aaauuauguauguuuacau

SEQ ID NO: 2362350 - RNA, 14 nt, Human
aaauuauguuuaua

SEQ ID NO: 2362351 - RNA, 17 nt, Human
aaauuauguuuauauaa

SEQ ID NO: 2362352 - RNA, 23 nt, Human
aaauuauguuuauauaaaugcuu

SEQ ID NO: 2362353 - RNA, 24 nt, Human
aaauuauguuuauauaaaugcuuu

SEQ ID NO: 2362354 - RNA, 23 nt, Human
aaauuaugugccagauuuaugca

SEQ ID NO: 2362355 - RNA, 17 nt, Human
aaauuauguauguuuac

SEQ ID NO: 2362356 - RNA, 15 nt, Human
aaauguggcuccugg

SEQ ID NO: 2362357 - RNA, 14 nt, Human
aaauuaaucugggc

SEQ ID NO: 2362358 - RNA, 16 nt, Human
aaauuaauuggcagca

SEQ ID NO: 2362359 - RNA, 21 nt, Human
aaauuaauuggcagcagauuu

SEQ ID NO: 2362360 - RNA, 18 nt, Human
aaauuaauuggcagcaga

SEQ ID NO: 2362361 - RNA, 19 nt, Human
aaauuaauuggcagcagau

SEQ ID NO: 2362362 - RNA, 15 nt, Human
aaaugugcuuuuaaa

SEQ ID NO: 2362363 - RNA, 18 nt, Human
aaaugugccuucauuuuu

SEQ ID NO: 2362364 - RNA, 15 nt, Human
aaauuagccgggcgu

SEQ ID NO: 2362365 - RNA, 22 nt, Human
aaauuacacccaaagagguauu

SEQ ID NO: 2362366 - RNA, 16 nt, Human
aaauuacacccaaaga

SEQ ID NO: 2362367 - RNA, 16 nt, Human
gucacuuugcucuggg

SEQ ID NO: 2362368 - RNA, 17 nt, Human
gucacuuugcucugggu

SEQ ID NO: 2362369 - RNA, 23 nt, Human
gucacuuugcucuggguggaagu

SEQ ID NO: 2362370 - RNA, 17 nt, Human
gucacuuuguuuuacug

SEQ ID NO: 2362371 - RNA, 20 nt, Human
gucacuuaccuagauuuaca

SEQ ID NO: 2362372 - RNA, 16 nt, Human
gucacuguuucucugc

SEQ ID NO: 2362373 - RNA, 15 nt, Human
gucacuuauuucaua

SEQ ID NO: 2362374 - RNA, 16 nt, Human
gucacuuacuguuucu

SEQ ID NO: 2362375 - RNA, 18 nt, Human
gucacuuacuguuucugu

SEQ ID NO: 2362376 - RNA, 23 nt, Human
gucacuugaugugccauuuuaaa

SEQ ID NO: 2362377 - RNA, 24 nt, Human
gucacuucgcgugcccucgcugcu

SEQ ID NO: 2362378 - RNA, 16 nt, Human
gucacuuauuucauaa

SEQ ID NO: 2362379 - RNA, 18 nt, Human
gucacuucgcgugcccuc

SEQ ID NO: 2362380 - RNA, 13 nt, Human
gucagaaacuguu

SEQ ID NO: 2362381 - RNA, 21 nt, Human
gucagaaguuucugccgcagc

SEQ ID NO: 2362382 - RNA, 14 nt, Human
gucaggaaagagaa

SEQ ID NO: 2362383 - RNA, 13 nt, Human
gucaggaaagaga

SEQ ID NO: 2362384 - RNA, 18 nt, Human
gucacugccugcagaggu

SEQ ID NO: 2362385 - RNA, 23 nt, Human
gucacugccugcagaggucugug

SEQ ID NO: 2362386 - RNA, 11 nt, Human
gucacugcugu

SEQ ID NO: 2362387 - RNA, 12 nt, Human
gucacugcuguc

SEQ ID NO: 2362388 - RNA, 12 nt, Human
gucacuggaaag

SEQ ID NO: 2362389 - RNA, 19 nt, Human
gucacuggaccacugggca

SEQ ID NO: 2362390 - RNA, 18 nt, Human
gucacuggagguugaagc

SEQ ID NO: 2362391 - RNA, 20 nt, Human
gucacuggagguugaagcca

SEQ ID NO: 2362392 - RNA, 15 nt, Human
gucacuggaaagggg

SEQ ID NO: 2362393 - RNA, 18 nt, Human
gucacuggaaaggggaga

SEQ ID NO: 2362394 - RNA, 20 nt, Human
gucacuggaaaggggagagc

SEQ ID NO: 2362395 - RNA, 23 nt, Human
gucacuggaaaggggagagccug

SEQ ID NO: 2362396 - RNA, 21 nt, Human
gucacugcuuaacuucacaua

SEQ ID NO: 2362397 - RNA, 15 nt, Human
gucacugcuuaacuu

SEQ ID NO: 2362398 - RNA, 15 nt, Human
gucacuguuucucug

SEQ ID NO: 2362399 - RNA, 13 nt, Human
gucacuguuucuc

SEQ ID NO: 2362400 - RNA, 17 nt, Human
gucacuguuccuuguca

SEQ ID NO: 2362401 - RNA, 19 nt, Human
gucacuguuuauuuuuuua

SEQ ID NO: 2362402 - RNA, 14 nt, Human
gucacugugguccu

SEQ ID NO: 2362403 - RNA, 21 nt, Human
gucacugguagaccaaaauaa

SEQ ID NO: 2362404 - RNA, 17 nt, Human
gucacugucccucaaau

SEQ ID NO: 2362405 - RNA, 23 nt, Human
gucacuggcugccuccacuccca

SEQ ID NO: 2362406 - RNA, 20 nt, Human
gucacuggcugccuccacuc

SEQ ID NO: 2362407 - RNA, 21 nt, Human
gucacuggcugccuccacucc

SEQ ID NO: 2362408 - RNA, 21 nt, Human
gucacuggcucuccaagugcc

SEQ ID NO: 2362409 - RNA, 14 nt, Human
gucacuggcugccu

SEQ ID NO: 2362410 - RNA, 16 nt, Human
gucacuggcugccucc

SEQ ID NO: 2362411 - RNA, 19 nt, Human
gucacuggcugccuccacu

SEQ ID NO: 2362412 - RNA, 23 nt, Human
gucacuggagguugaagccaagu

SEQ ID NO: 2362413 - RNA, 12 nt, Human
gucacuggcucu

SEQ ID NO: 2362414 - RNA, 14 nt, Human
gucacuggcucucc

SEQ ID NO: 2362415 - RNA, 15 nt, Human
gucacuggcucucca

SEQ ID NO: 2362416 - RNA, 16 nt, Human
gucacuggcucuccaa

SEQ ID NO: 2362417 - RNA, 17 nt, Human
gucacuggcucuccaag

SEQ ID NO: 2362418 - RNA, 18 nt, Human
gucacuggcucuccaagu

SEQ ID NO: 2362419 - RNA, 20 nt, Human
gucacuggcucuccaagugc

SEQ ID NO: 2362420 - RNA, 22 nt, Human
gucagucaugauggcaccacug

SEQ ID NO: 2362421 - RNA, 13 nt, Human
gucagguuugagu

SEQ ID NO: 2362422 - RNA, 23 nt, Human
gucagugcagcccguguggcccc

SEQ ID NO: 2362423 - RNA, 16 nt, Human
gucagugcagcccgug

SEQ ID NO: 2362424 - RNA, 17 nt, Human
gucagugccgccgccuc

SEQ ID NO: 2362425 - RNA, 22 nt, Human
gucagugccgccgccucgccca

SEQ ID NO: 2362426 - RNA, 22 nt, Human
gucagugggaacgugacugccc

SEQ ID NO: 2362427 - RNA, 23 nt, Human
gucagugaggcccagggagaggc

SEQ ID NO: 2362428 - RNA, 18 nt, Human
gucagugcaaaugucaga

SEQ ID NO: 2362429 - RNA, 14 nt, Human
gucagugaggccca

SEQ ID NO: 2362430 - RNA, 17 nt, Human
gucaguguccaaagcag

SEQ ID NO: 2362431 - RNA, 20 nt, Human
gucaguguccaaagcagggu

SEQ ID NO: 2362432 - RNA, 23 nt, Human
gucaguguccaaagcagggucug

SEQ ID NO: 2362433 - RNA, 22 nt, Human
gucagugguccacaucccggga

SEQ ID NO: 2362434 - RNA, 23 nt, Human
gucagugccgccgccucgcccac

SEQ ID NO: 2362435 - RNA, 12 nt, Human
aaauuucuaaau

SEQ ID NO: 2362436 - RNA, 15 nt, Human
aaauuucuaaaucuc

SEQ ID NO: 2362437 - RNA, 13 nt, Human
aaauuucuaaauc

SEQ ID NO: 2362438 - RNA, 16 nt, Human
gucagguggggcagcu

SEQ ID NO: 2362439 - RNA, 17 nt, Human
gucagguggggcagcuu

SEQ ID NO: 2362440 - RNA, 18 nt, Human
gucagguggggcagcuug

SEQ ID NO: 2362441 - RNA, 22 nt, Human
gucagguggggcagcuugaggg

SEQ ID NO: 2362442 - RNA, 16 nt, Human
gucaggaacagaagga

SEQ ID NO: 2362443 - RNA, 15 nt, Human
gucaggaacagaagg

SEQ ID NO: 2362444 - RNA, 17 nt, Human
gucaggaacagaaggau

SEQ ID NO: 2362445 - RNA, 15 nt, Human
gucaggaagaaauca

SEQ ID NO: 2362446 - RNA, 18 nt, Human
gucaggaaggaugagcau

SEQ ID NO: 2362447 - RNA, 17 nt, Human
gucaggaaggaugagca

SEQ ID NO: 2362448 - RNA, 12 nt, Human
gucaggagagca

SEQ ID NO: 2362449 - RNA, 14 nt, Human
gucaggagagcagc

SEQ ID NO: 2362450 - RNA, 15 nt, Human
gucaggagagcagcg

SEQ ID NO: 2362451 - RNA, 12 nt, Human
gucagggcccaa

SEQ ID NO: 2362452 - RNA, 14 nt, Human
gucagggcccaagu

SEQ ID NO: 2362453 - RNA, 15 nt, Human
gucagggcccaaguc

SEQ ID NO: 2362454 - RNA, 19 nt, Human
gucagggcccaagucccug

SEQ ID NO: 2362455 - RNA, 21 nt, Human
gucagggcccaagucccuguu

SEQ ID NO: 2362456 - RNA, 20 nt, Human
gucagggcccaagucccugu

SEQ ID NO: 2362457 - RNA, 14 nt, Human
gucaggggcagcug

SEQ ID NO: 2362458 - RNA, 17 nt, Human
gucaggggcagcugacc

SEQ ID NO: 2362459 - RNA, 17 nt, Human
gucaauuucuguguugc

SEQ ID NO: 2362460 - RNA, 22 nt, Human
gucaauuucuguguugccaagc

SEQ ID NO: 2362461 - RNA, 21 nt, Human
gucaauuuuguuauguauauu

SEQ ID NO: 2362462 - RNA, 15 nt, Human
gucacaggaaguaga

SEQ ID NO: 2362463 - RNA, 13 nt, Human
gucacaggaagua

SEQ ID NO: 2362464 - RNA, 17 nt, Human
aaauuuaagcauuguuu

SEQ ID NO: 2362465 - RNA, 16 nt, Human
aaauuuaagcauuguu

SEQ ID NO: 2362466 - RNA, 15 nt, Human
aaauuuaagcauugu

SEQ ID NO: 2362467 - RNA, 14 nt, Human
aaauuuaagcauug

SEQ ID NO: 2362468 - RNA, 15 nt, Human
aaauuuaaguaucuu

SEQ ID NO: 2362469 - RNA, 23 nt, Human
aaauuuaaguaucuuuuuucaaa

SEQ ID NO: 2362470 - RNA, 16 nt, Human
aaauuuaagugcgugu

SEQ ID NO: 2362471 - RNA, 21 nt, Human
aaauuuaagugcguguguaga

SEQ ID NO: 2362472 - RNA, 13 nt, Human
aaauuuaagcauu

SEQ ID NO: 2362473 - RNA, 12 nt, Human
aaauuuaagcau

SEQ ID NO: 2362474 - RNA, 23 nt, Human
aaauuuaaaggguguacuuauau

SEQ ID NO: 2362475 - RNA, 20 nt, Human
aaauuuaauauagcuauuuu

SEQ ID NO: 2362476 - RNA, 22 nt, Human
gucaauuucccugacuccucua

SEQ ID NO: 2362477 - RNA, 22 nt, Human
gucaauuacaggaaguacugga

SEQ ID NO: 2362478 - RNA, 17 nt, Human
gucacaggacucugccu

SEQ ID NO: 2362479 - RNA, 18 nt, Human
gucacaggacucugccuc

SEQ ID NO: 2362480 - RNA, 20 nt, Human
gucacaggaaguagaggagg

SEQ ID NO: 2362481 - RNA, 12 nt, Human
gucacaggcagg

SEQ ID NO: 2362482 - RNA, 19 nt, Human
gucacaggacucugccucc

SEQ ID NO: 2362483 - RNA, 16 nt, Human
gucacaggagggaggg

SEQ ID NO: 2362484 - RNA, 22 nt, Human
gucaccaaaucagcugcuacua

SEQ ID NO: 2362485 - RNA, 21 nt, Human
gucacauggccuaugcacaua

SEQ ID NO: 2362486 - RNA, 23 nt, Human
gucacauggccuaugcacauaug

SEQ ID NO: 2362487 - RNA, 14 nt, Human
gucacauacaauua

SEQ ID NO: 2362488 - RNA, 15 nt, Human
gucacagggccaacu

SEQ ID NO: 2362489 - RNA, 15 nt, Human
gucacaucacaggac

SEQ ID NO: 2362490 - RNA, 13 nt, Human
gucacaugaaaca

SEQ ID NO: 2362491 - RNA, 20 nt, Human
gucacagggcaugccccggc

SEQ ID NO: 2362492 - RNA, 18 nt, Human
gucacagggccuggggag

SEQ ID NO: 2362493 - RNA, 12 nt, Human
gucacagggcca

SEQ ID NO: 2362494 - RNA, 13 nt, Human
gucacagggccaa

SEQ ID NO: 2362495 - RNA, 16 nt, Human
gucacugccauggagg

SEQ ID NO: 2362496 - RNA, 20 nt, Human
gucacugccauggaggcaca

SEQ ID NO: 2362497 - RNA, 23 nt, Human
gucacugccucucccuggcccuc

SEQ ID NO: 2362498 - RNA, 22 nt, Human
gucacugccucucccuggcccu

SEQ ID NO: 2362499 - RNA, 20 nt, Human
gucacugccucucccuggcc

SEQ ID NO: 2362500 - RNA, 12 nt, Human
gucacugccucu

SEQ ID NO: 2362501 - RNA, 10 nt, Human
gucacugcuu

SEQ ID NO: 2362502 - RNA, 21 nt, Human
gucacugaaggccuggcccac

SEQ ID NO: 2362503 - RNA, 20 nt, Human
gucacugcacagugcaucuc

SEQ ID NO: 2362504 - RNA, 23 nt, Human
gucacugcacagugcaucucagc

SEQ ID NO: 2362505 - RNA, 14 nt, Human
gucacugcaggcac

SEQ ID NO: 2362506 - RNA, 17 nt, Human
gucacugagacagcccg

SEQ ID NO: 2362507 - RNA, 18 nt, Human
gucacugagacagcccgg

SEQ ID NO: 2362508 - RNA, 21 nt, Human
gucacugagacagcccgggcu

SEQ ID NO: 2362509 - RNA, 23 nt, Human
gucacugagacagcccgggcucu

SEQ ID NO: 2362510 - RNA, 12 nt, Human
gucaccaagccc

SEQ ID NO: 2362511 - RNA, 15 nt, Human
gucaccaagcccagu

SEQ ID NO: 2362512 - RNA, 14 nt, Human
gucacauucaggaa

SEQ ID NO: 2362513 - RNA, 17 nt, Human
gucaccaagcucacagu

SEQ ID NO: 2362514 - RNA, 16 nt, Human
gucacauucaggaaga

SEQ ID NO: 2362515 - RNA, 23 nt, Human
gucacucuggcagcucagagagg

SEQ ID NO: 2362516 - RNA, 14 nt, Human
gucacugagacagc

SEQ ID NO: 2362517 - RNA, 19 nt, Human
gucacucuuccugcaagga

SEQ ID NO: 2362518 - RNA, 20 nt, Human
gucacucuuccugcaaggac

SEQ ID NO: 2362519 - RNA, 15 nt, Human
gucacugaaggccug

SEQ ID NO: 2362520 - RNA, 15 nt, Human
gucacugagacagcc

SEQ ID NO: 2362521 - RNA, 16 nt, Human
gucacugagacagccc

SEQ ID NO: 2362522 - RNA, 15 nt, Human
guccccaccugggac

SEQ ID NO: 2362523 - RNA, 13 nt, Human
guccccucuugcc

SEQ ID NO: 2362524 - RNA, 16 nt, Human
guccccuccccggccc

SEQ ID NO: 2362525 - RNA, 22 nt, Human
guccccuccccggcccuaccag

SEQ ID NO: 2362526 - RNA, 17 nt, Human
guccccucccaucuggg

SEQ ID NO: 2362527 - RNA, 19 nt, Human
guccccucccaucugggag

SEQ ID NO: 2362528 - RNA, 18 nt, Human
guccccuguuuguuucug

SEQ ID NO: 2362529 - RNA, 23 nt, Human
guccccucuugccccaaccccca

SEQ ID NO: 2362530 - RNA, 15 nt, Human
guccccucuugcccc

SEQ ID NO: 2362531 - RNA, 16 nt, Human
guccccucuugcccca

SEQ ID NO: 2362532 - RNA, 21 nt, Human
guccccucuugccccaacccc

SEQ ID NO: 2362533 - RNA, 15 nt, Human
gucccggggcuccac

SEQ ID NO: 2362534 - RNA, 14 nt, Human
gucccgggguccug

SEQ ID NO: 2362535 - RNA, 16 nt, Human
gucccgggguccugug

SEQ ID NO: 2362536 - RNA, 19 nt, Human
gucccgggguccuguggca

SEQ ID NO: 2362537 - RNA, 20 nt, Human
gucccgggguccuguggcag

SEQ ID NO: 2362538 - RNA, 21 nt, Human
gucccgggguccuguggcagg

SEQ ID NO: 2362539 - RNA, 12 nt, Human
gucccuaauaaa

SEQ ID NO: 2362540 - RNA, 22 nt, Human
guccccuguuuguuucugaaag

SEQ ID NO: 2362541 - RNA, 18 nt, Human
gucccuuccccucccugg

SEQ ID NO: 2362542 - RNA, 17 nt, Human
gucccuuccccucccug

SEQ ID NO: 2362543 - RNA, 14 nt, Human
gucccuuccccucc

SEQ ID NO: 2362544 - RNA, 13 nt, Human
gucccuuccccuc

SEQ ID NO: 2362545 - RNA, 12 nt, Human
gucccuuccccu

SEQ ID NO: 2362546 - RNA, 20 nt, Human
gucccuuccacacccccacc

SEQ ID NO: 2362547 - RNA, 22 nt, Human
gucccuuccacacccccacccc

SEQ ID NO: 2362548 - RNA, 17 nt, Human
gucccuucacauaguuu

SEQ ID NO: 2362549 - RNA, 20 nt, Human
gucccuguuuucugagcccg

SEQ ID NO: 2362550 - RNA, 18 nt, Human
gucccuuccacaccccca

SEQ ID NO: 2362551 - RNA, 18 nt, Human
gucccuuacgugaguccu

SEQ ID NO: 2362552 - RNA, 19 nt, Human
gucccuuacgugaguccug

SEQ ID NO: 2362553 - RNA, 19 nt, Human
gucccgucaggacguugag

SEQ ID NO: 2362554 - RNA, 23 nt, Human
gucccgggguccuguggcaggca

SEQ ID NO: 2362555 - RNA, 21 nt, Human
gucccgugcagcuucuguccu

SEQ ID NO: 2362556 - RNA, 15 nt, Human
gucccuaaagaaaaa

SEQ ID NO: 2362557 - RNA, 15 nt, Human
gucccuaauaaagcu

SEQ ID NO: 2362558 - RNA, 18 nt, Human
gucccugguggcagcuca

SEQ ID NO: 2362559 - RNA, 17 nt, Human
gucccuaaagaaaaaaa

SEQ ID NO: 2362560 - RNA, 15 nt, Human
gucccugugccuaac

SEQ ID NO: 2362561 - RNA, 15 nt, Human
gucccuguuuucuga

SEQ ID NO: 2362562 - RNA, 17 nt, Human
gucccuguuuucugagc

SEQ ID NO: 2362563 - RNA, 18 nt, Human
gucccuguuuucugagcc

SEQ ID NO: 2362564 - RNA, 19 nt, Human
gucccuguuuucugagccc

SEQ ID NO: 2362565 - RNA, 19 nt, Human
gucccugguggcagcucac

SEQ ID NO: 2362566 - RNA, 17 nt, Human
gucccacacuggugacu

SEQ ID NO: 2362567 - RNA, 23 nt, Human
gucccaaggaaagccccagcacu

SEQ ID NO: 2362568 - RNA, 15 nt, Human
gucccaccccacaca

SEQ ID NO: 2362569 - RNA, 22 nt, Human
guccccaccgcagacaggacca

SEQ ID NO: 2362570 - RNA, 22 nt, Human
guccccagacuccaccaagccu

SEQ ID NO: 2362571 - RNA, 20 nt, Human
gucccaccaugcagugcccc

SEQ ID NO: 2362572 - RNA, 14 nt, Human
guccccaccuggga

SEQ ID NO: 2362573 - RNA, 20 nt, Human
gucccaccccacacacgcca

SEQ ID NO: 2362574 - RNA, 18 nt, Human
guccccaccgcagacagg

SEQ ID NO: 2362575 - RNA, 20 nt, Human
guccaaaggaggcuggcagg

SEQ ID NO: 2362576 - RNA, 16 nt, Human
guccaaaggaggcugg

SEQ ID NO: 2362577 - RNA, 11 nt, Human
guccaaauaaa

SEQ ID NO: 2362578 - RNA, 13 nt, Human
guccaaauaaaaa

SEQ ID NO: 2362579 - RNA, 15 nt, Human
guccaaauaaaaacu

SEQ ID NO: 2362580 - RNA, 18 nt, Human
guccaaauaaaaacuaaa

SEQ ID NO: 2362581 - RNA, 14 nt, Human
guccaaaggaggcu

SEQ ID NO: 2362582 - RNA, 17 nt, Human
guccaaagcagggucug

SEQ ID NO: 2362583 - RNA, 19 nt, Human
gucauuugagcagggcuca

SEQ ID NO: 2362584 - RNA, 14 nt, Human
guccaaacugccua

SEQ ID NO: 2362585 - RNA, 21 nt, Human
guccaaacugccuaagcccuc

SEQ ID NO: 2362586 - RNA, 18 nt, Human
guccaaaagauugcugaa

SEQ ID NO: 2362587 - RNA, 22 nt, Human
guccaaauguccuccagaagcc

SEQ ID NO: 2362588 - RNA, 20 nt, Human
guccaaauaaaaacuaaauu

SEQ ID NO: 2362589 - RNA, 18 nt, Human
guccaaauguuuacaggg

SEQ ID NO: 2362590 - RNA, 17 nt, Human
guccaaccuaaccccuu

SEQ ID NO: 2362591 - RNA, 14 nt, Human
guccaaccuaaccc

SEQ ID NO: 2362592 - RNA, 20 nt, Human
guccaacccgaggcccgcau

SEQ ID NO: 2362593 - RNA, 21 nt, Human
guccaaccuaaccccuuuccu

SEQ ID NO: 2362594 - RNA, 20 nt, Human
guccaaccuaaccccuuucc

SEQ ID NO: 2362595 - RNA, 23 nt, Human
guccaugaagauguagaggagaa

SEQ ID NO: 2362596 - RNA, 22 nt, Human
guccaugaagauguagaggaga

SEQ ID NO: 2362597 - RNA, 17 nt, Human
aacacaaacccccacuc

SEQ ID NO: 2362598 - RNA, 19 nt, Human
aacacaaacuguaaauaaa

SEQ ID NO: 2362599 - RNA, 16 nt, Human
aacacaaacuguaaau

SEQ ID NO: 2362600 - RNA, 15 nt, Human
aacacaaacuguaaa

SEQ ID NO: 2362601 - RNA, 20 nt, Human
aaauuugaauggguccauuu

SEQ ID NO: 2362602 - RNA, 13 nt, Human
aacacaaacugua

SEQ ID NO: 2362603 - RNA, 19 nt, Human
aacacaaacgggcucagca

SEQ ID NO: 2362604 - RNA, 14 nt, Human
aaauuucuggaccu

SEQ ID NO: 2362605 - RNA, 24 nt, Human
gucaguguccaaagcagggucugg

SEQ ID NO: 2362606 - RNA, 19 nt, Human
aaauuucuaaaucuccaaa

SEQ ID NO: 2362607 - RNA, 10 nt, Human
aaauuugaau

SEQ ID NO: 2362608 - RNA, 16 nt, Human
aaauuugaagaaugaa

SEQ ID NO: 2362609 - RNA, 16 nt, Human
aacacaaguccuguga

SEQ ID NO: 2362610 - RNA, 18 nt, Human
aacacaagcuggaagcac

SEQ ID NO: 2362611 - RNA, 14 nt, Human
aacacacaaaggua

SEQ ID NO: 2362612 - RNA, 12 nt, Human
aacacaagcaaa

SEQ ID NO: 2362613 - RNA, 13 nt, Human
aacacaagcaaaa

SEQ ID NO: 2362614 - RNA, 16 nt, Human
aacacaagcaaaaaaa

SEQ ID NO: 2362615 - RNA, 14 nt, Human
aacacaagccacag

SEQ ID NO: 2362616 - RNA, 16 nt, Human
aacacaagccacagaa

SEQ ID NO: 2362617 - RNA, 17 nt, Human
aacacaagccacagaag

SEQ ID NO: 2362618 - RNA, 18 nt, Human
aacacagcauguguauuu

SEQ ID NO: 2362619 - RNA, 16 nt, Human
aacacagcauguguau

SEQ ID NO: 2362620 - RNA, 20 nt, Human
aacacagcaagggugauggg

SEQ ID NO: 2362621 - RNA, 15 nt, Human
aacacaccaggcugu

SEQ ID NO: 2362622 - RNA, 16 nt, Human
aacacaccaggcugug

SEQ ID NO: 2362623 - RNA, 12 nt, Human
aacacacagaca

SEQ ID NO: 2362624 - RNA, 15 nt, Human
aacacaagcuggaag

SEQ ID NO: 2362625 - RNA, 18 nt, Human
aacacagcaagggugaug

SEQ ID NO: 2362626 - RNA, 16 nt, Human
aacacugggggagggg

SEQ ID NO: 2362627 - RNA, 15 nt, Human
aacacuggggcuggc

SEQ ID NO: 2362628 - RNA, 18 nt, Human
aacacuggggcuggcaca

SEQ ID NO: 2362629 - RNA, 17 nt, Human
aacacugggggagggga

SEQ ID NO: 2362630 - RNA, 13 nt, Human
aacacuggccccu

SEQ ID NO: 2362631 - RNA, 12 nt, Human
aacacuggcccc

SEQ ID NO: 2362632 - RNA, 15 nt, Human
aacacucaugcugaa

SEQ ID NO: 2362633 - RNA, 16 nt, Human
aacacucaugcugaaa

SEQ ID NO: 2362634 - RNA, 15 nt, Human
aacacuggccccuag

SEQ ID NO: 2362635 - RNA, 14 nt, Human
aacacuggggcugg

SEQ ID NO: 2362636 - RNA, 21 nt, Human
aacacugggagaaaugaaaaa

SEQ ID NO: 2362637 - RNA, 19 nt, Human
aacacuggcaacaacaaag

SEQ ID NO: 2362638 - RNA, 14 nt, Human
aacacucaugcuga

SEQ ID NO: 2362639 - RNA, 19 nt, Human
aacacagcgagacuccguc

SEQ ID NO: 2362640 - RNA, 15 nt, Human
aacacaggcaaaauc

SEQ ID NO: 2362641 - RNA, 19 nt, Human
aacacagcugagagacuuu

SEQ ID NO: 2362642 - RNA, 17 nt, Human
aacacucaagaagcagg

SEQ ID NO: 2362643 - RNA, 21 nt, Human
aacacuauauggcagugucuu

SEQ ID NO: 2362644 - RNA, 16 nt, Human
aacacuauguuuauuu

SEQ ID NO: 2362645 - RNA, 13 nt, Human
aacacuauuuuau

SEQ ID NO: 2362646 - RNA, 21 nt, Human
aacacucacauuuauucugcu

SEQ ID NO: 2362647 - RNA, 16 nt, Human
aacacuauuuuaugca

SEQ ID NO: 2362648 - RNA, 17 nt, Human
gucauuugagcagggcu

SEQ ID NO: 2362649 - RNA, 15 nt, Human
gucauuucauuuccu

SEQ ID NO: 2362650 - RNA, 19 nt, Human
aacacuguucucugcccuc

SEQ ID NO: 2362651 - RNA, 14 nt, Human
gucauuuauaaaac

SEQ ID NO: 2362652 - RNA, 23 nt, Human
gucauuuauauagauuauaacuu

SEQ ID NO: 2362653 - RNA, 23 nt, Human
aacacugguggaggauggaaagg

SEQ ID NO: 2362654 - RNA, 17 nt, Human
aacacuggugugaccug

SEQ ID NO: 2362655 - RNA, 20 nt, Human
aacacuggugugaccugagg

SEQ ID NO: 2362656 - RNA, 22 nt, Human
aacacuggugugaccugagggc

SEQ ID NO: 2362657 - RNA, 16 nt, Human
aacacuguucucugcc

SEQ ID NO: 2362658 - RNA, 17 nt, Human
aacacuguucucugccc

SEQ ID NO: 2362659 - RNA, 18 nt, Human
aacacuguucucugcccu

SEQ ID NO: 2362660 - RNA, 16 nt, Human
aacauuauuuauucag

SEQ ID NO: 2362661 - RNA, 23 nt, Human
aacauuauuuauucagcuucauu

SEQ ID NO: 2362662 - RNA, 23 nt, Human
aacauuccauccuugagucaaaa

SEQ ID NO: 2362663 - RNA, 14 nt, Human
aacauuccauccuu

SEQ ID NO: 2362664 - RNA, 13 nt, Human
aacauuccauccu

SEQ ID NO: 2362665 - RNA, 10 nt, Human
aacauuccau

SEQ ID NO: 2362666 - RNA, 17 nt, Human
aacauguauaauauuuu

SEQ ID NO: 2362667 - RNA, 22 nt, Human
aacauauaauguuguuauuuaa

SEQ ID NO: 2362668 - RNA, 15 nt, Human
aacauguaggaagua

SEQ ID NO: 2362669 - RNA, 13 nt, Human
aacauguguacuu

SEQ ID NO: 2362670 - RNA, 19 nt, Human
aacaugucuccuauccugg

SEQ ID NO: 2362671 - RNA, 13 nt, Human
aacauguguuuua

SEQ ID NO: 2362672 - RNA, 15 nt, Human
aacauguacuguucu

SEQ ID NO: 2362673 - RNA, 13 nt, Human
aacaugucuccua

SEQ ID NO: 2362674 - RNA, 21 nt, Human
guccuccucggaucaccgaga

SEQ ID NO: 2362675 - RNA, 22 nt, Human
guccuccucggaucaccgagag

SEQ ID NO: 2362676 - RNA, 12 nt, Human
guccuccucugu

SEQ ID NO: 2362677 - RNA, 18 nt, Human
aacauugggaaaucuuau

SEQ ID NO: 2362678 - RNA, 13 nt, Human
guccuccucaccu

SEQ ID NO: 2362679 - RNA, 21 nt, Human
guccuccucaccucaugccca

SEQ ID NO: 2362680 - RNA, 15 nt, Human
guccuccucaccuca

SEQ ID NO: 2362681 - RNA, 17 nt, Human
guccuccucaccucaug

SEQ ID NO: 2362682 - RNA, 17 nt, Human
guccucguagccaucuc

SEQ ID NO: 2362683 - RNA, 12 nt, Human
guccucuccacc

SEQ ID NO: 2362684 - RNA, 21 nt, Human
guccuccugguggguccaggg

SEQ ID NO: 2362685 - RNA, 22 nt, Human
guccuccugguggguccagggg

SEQ ID NO: 2362686 - RNA, 23 nt, Human
guccuccugguggguccaggggc

SEQ ID NO: 2362687 - RNA, 14 nt, Human
guccuccucuguga

SEQ ID NO: 2362688 - RNA, 13 nt, Human
guccuccucugug

SEQ ID NO: 2362689 - RNA, 14 nt, Human
aacauugccuauuu

SEQ ID NO: 2362690 - RNA, 16 nt, Human
aacauugccuauuuca

SEQ ID NO: 2362691 - RNA, 20 nt, Human
aacauugccuauuucagugg

SEQ ID NO: 2362692 - RNA, 16 nt, Human
aacauugguucuugua

SEQ ID NO: 2362693 - RNA, 23 nt, Human
aacauugguucuuguauuaagaa

SEQ ID NO: 2362694 - RNA, 22 nt, Human
aacauugguucuuguauuaaga

SEQ ID NO: 2362695 - RNA, 19 nt, Human
aacauugguucuuguauua

SEQ ID NO: 2362696 - RNA, 18 nt, Human
aacauugguucuuguauu

SEQ ID NO: 2362697 - RNA, 14 nt, Human
aacauaaauaaaau

SEQ ID NO: 2362698 - RNA, 17 nt, Human
aacauaaauaaaaugac

SEQ ID NO: 2362699 - RNA, 15 nt, Human
aacauauaaagcacu

SEQ ID NO: 2362700 - RNA, 13 nt, Human
aacauauaauguu

SEQ ID NO: 2362701 - RNA, 18 nt, Human
aacauauaauguuguuau

SEQ ID NO: 2362702 - RNA, 21 nt, Human
aacauauaauguuguuauuua

SEQ ID NO: 2362703 - RNA, 12 nt, Human
aacauauauaac

SEQ ID NO: 2362704 - RNA, 21 nt, Human
aacaguuuuuuaugcuaauca

SEQ ID NO: 2362705 - RNA, 14 nt, Human
aacagucauuuaaa

SEQ ID NO: 2362706 - RNA, 14 nt, Human
aacagucucaggaa

SEQ ID NO: 2362707 - RNA, 14 nt, Human
aacauaaaauacaa

SEQ ID NO: 2362708 - RNA, 17 nt, Human
aacagucaaaacagaga

SEQ ID NO: 2362709 - RNA, 22 nt, Human
guccgugcugacagcugcuccu

SEQ ID NO: 2362710 - RNA, 13 nt, Human
aacagucauuuaa

SEQ ID NO: 2362711 - RNA, 21 nt, Human
guccgugcugacagcugcucc

SEQ ID NO: 2362712 - RNA, 20 nt, Human
guccgugcugacagcugcuc

SEQ ID NO: 2362713 - RNA, 19 nt, Human
guccgugcugacagcugcu

SEQ ID NO: 2362714 - RNA, 15 nt, Human
guccgugcugacagc

SEQ ID NO: 2362715 - RNA, 19 nt, Human
guccgugggacggugccca

SEQ ID NO: 2362716 - RNA, 18 nt, Human
aacaguccauugaaaggg

SEQ ID NO: 2362717 - RNA, 13 nt, Human
aacagucucagga

SEQ ID NO: 2362718 - RNA, 19 nt, Human
gucccuucucuuaauuuaa

SEQ ID NO: 2362719 - RNA, 22 nt, Human
gucccuuccccucccuggcucc

SEQ ID NO: 2362720 - RNA, 20 nt, Human
gucccuuccccucccuggcu

SEQ ID NO: 2362721 - RNA, 19 nt, Human
gucccuuccccucccuggc

SEQ ID NO: 2362722 - RNA, 24 nt, Human
guccgguguccuuuucacuacacc

SEQ ID NO: 2362723 - RNA, 14 nt, Human
gucccuugagaccu

SEQ ID NO: 2362724 - RNA, 17 nt, Human
guccgguguccuuuuca

SEQ ID NO: 2362725 - RNA, 16 nt, Human
gucccuugagaccuca

SEQ ID NO: 2362726 - RNA, 15 nt, Human
guccucuuucaaagg

SEQ ID NO: 2362727 - RNA, 20 nt, Human
guccucuccaccuaguggcu

SEQ ID NO: 2362728 - RNA, 18 nt, Human
guccucuugccuccugga

SEQ ID NO: 2362729 - RNA, 13 nt, Human
guccucuccaccu

SEQ ID NO: 2362730 - RNA, 14 nt, Human
guccucuccaccua

SEQ ID NO: 2362731 - RNA, 18 nt, Human
guccucuccaccuagugg

SEQ ID NO: 2362732 - RNA, 14 nt, Human
guccucuuuucuga

SEQ ID NO: 2362733 - RNA, 16 nt, Human
guccugaagaggcggg

SEQ ID NO: 2362734 - RNA, 17 nt, Human
guccugaagaggcgggc

SEQ ID NO: 2362735 - RNA, 20 nt, Human
guccugaagaggcgggccag

SEQ ID NO: 2362736 - RNA, 21 nt, Human
guccugaagaggcgggccagc

SEQ ID NO: 2362737 - RNA, 22 nt, Human
guccugaagaggcgggccagcc

SEQ ID NO: 2362738 - RNA, 19 nt, Human
guccugcugcaguugccag

SEQ ID NO: 2362739 - RNA, 23 nt, Human
guccugaagaggcgggccagcca

SEQ ID NO: 2362740 - RNA, 12 nt, Human
guccugaccacc

SEQ ID NO: 2362741 - RNA, 16 nt, Human
guccugaccacccucc

SEQ ID NO: 2362742 - RNA, 16 nt, Human
guccuggcaugggaau

SEQ ID NO: 2362743 - RNA, 21 nt, Human
guccuggaagcgcgagggccu

SEQ ID NO: 2362744 - RNA, 20 nt, Human
guccuggacaccgggccagu

SEQ ID NO: 2362745 - RNA, 13 nt, Human
guccugaccaccc

SEQ ID NO: 2362746 - RNA, 14 nt, Human
guccugaccacccu

SEQ ID NO: 2362747 - RNA, 15 nt, Human
guccugaccacccuc

SEQ ID NO: 2362748 - RNA, 14 nt, Human
gucgauaaucagag

SEQ ID NO: 2362749 - RNA, 14 nt, Human
gucgauagagcugu

SEQ ID NO: 2362750 - RNA, 14 nt, Human
gucgaggggcucuc

SEQ ID NO: 2362751 - RNA, 15 nt, Human
gucgaggggcucuca

SEQ ID NO: 2362752 - RNA, 16 nt, Human
gucgaggggcucucag

SEQ ID NO: 2362753 - RNA, 19 nt, Human
gucgaggggcucucagcuc

SEQ ID NO: 2362754 - RNA, 12 nt, Human
gucgaggcagga

SEQ ID NO: 2362755 - RNA, 16 nt, Human
gucgaggacagggagg

SEQ ID NO: 2362756 - RNA, 13 nt, Human
guccuuucccucc

SEQ ID NO: 2362757 - RNA, 11 nt, Human
guccuuucccu

SEQ ID NO: 2362758 - RNA, 22 nt, Human
guccuuuauguggaaaacagaa

SEQ ID NO: 2362759 - RNA, 18 nt, Human
guccuuuccaaggcuucu

SEQ ID NO: 2362760 - RNA, 20 nt, Human
guccuuuccaaggcuucucc

SEQ ID NO: 2362761 - RNA, 22 nt, Human
guccuuuccaaggcuucuccaa

SEQ ID NO: 2362762 - RNA, 19 nt, Human
guccuggagcagaccaccc

SEQ ID NO: 2362763 - RNA, 18 nt, Human
guccuuuucacuacacca

SEQ ID NO: 2362764 - RNA, 15 nt, Human
guccuuuucacuaca

SEQ ID NO: 2362765 - RNA, 15 nt, Human
guccuuucccuccac

SEQ ID NO: 2362766 - RNA, 14 nt, Human
guccuuucccucca

SEQ ID NO: 2362767 - RNA, 15 nt, Human
guccuuuucagaagu

SEQ ID NO: 2362768 - RNA, 22 nt, Human
guccuuuucagaagugagcuuu

SEQ ID NO: 2362769 - RNA, 13 nt, Human
gucgcgcucagca

SEQ ID NO: 2362770 - RNA, 12 nt, Human
gucgcgcugccu

SEQ ID NO: 2362771 - RNA, 13 nt, Human
gucgcgcugccug

SEQ ID NO: 2362772 - RNA, 16 nt, Human
gucgcgcugccugugu

SEQ ID NO: 2362773 - RNA, 17 nt, Human
gucgcgcugccugugug

SEQ ID NO: 2362774 - RNA, 16 nt, Human
gucgcucaugugugca

SEQ ID NO: 2362775 - RNA, 21 nt, Human
gucgcucaugugugcaacagg

SEQ ID NO: 2362776 - RNA, 11 nt, Human
gucgcuccugc

SEQ ID NO: 2362777 - RNA, 15 nt, Human
gucgcuccugcccac

SEQ ID NO: 2362778 - RNA, 14 nt, Human
gucgaugaacuauu

SEQ ID NO: 2362779 - RNA, 19 nt, Human
gucgccaccuggcauuccu

SEQ ID NO: 2362780 - RNA, 12 nt, Human
gucgccucugca

SEQ ID NO: 2362781 - RNA, 17 nt, Human
gucgccuuagcauguuu

SEQ ID NO: 2362782 - RNA, 18 nt, Human
gucgccuuagcauguuug

SEQ ID NO: 2362783 - RNA, 20 nt, Human
gucgccuuagcauguuugcu

SEQ ID NO: 2362784 - RNA, 14 nt, Human
gucuaccugagggg

SEQ ID NO: 2362785 - RNA, 13 nt, Human
gucuaccugaggg

SEQ ID NO: 2362786 - RNA, 15 nt, Human
gucuaccugaggggc

SEQ ID NO: 2362787 - RNA, 16 nt, Human
gucuaccugaggggcc

SEQ ID NO: 2362788 - RNA, 19 nt, Human
gucuagcagagcaggggca

SEQ ID NO: 2362789 - RNA, 13 nt, Human
gucuaggagcugg

SEQ ID NO: 2362790 - RNA, 21 nt, Human
gucuaggagcugggaggaaaa

SEQ ID NO: 2362791 - RNA, 23 nt, Human
gucuaggcaggaccuguggccaa

SEQ ID NO: 2362792 - RNA, 14 nt, Human
gucuagggagagac

SEQ ID NO: 2362793 - RNA, 12 nt, Human
gucuagggagag

SEQ ID NO: 2362794 - RNA, 21 nt, Human
gucuagauggcuccucucagu

SEQ ID NO: 2362795 - RNA, 20 nt, Human
gucuagauggcuccucucag

SEQ ID NO: 2362796 - RNA, 20 nt, Human
gucgcucugcuggccuggcc

SEQ ID NO: 2362797 - RNA, 18 nt, Human
gucgcgcugccugugugg

SEQ ID NO: 2362798 - RNA, 18 nt, Human
gucgcucugcuggccugg

SEQ ID NO: 2362799 - RNA, 17 nt, Human
gucuauucuccagcuga

SEQ ID NO: 2362800 - RNA, 10 nt, Human
gucuauuuaa

SEQ ID NO: 2362801 - RNA, 13 nt, Human
gucuauucuaguc

SEQ ID NO: 2362802 - RNA, 13 nt, Human
gucuauucagcuu

SEQ ID NO: 2362803 - RNA, 12 nt, Human
gucuauucauua

SEQ ID NO: 2362804 - RNA, 19 nt, Human
gucuaguuaacauuucaag

SEQ ID NO: 2362805 - RNA, 22 nt, Human
gucuauguaaaugcaucugucc

SEQ ID NO: 2362806 - RNA, 22 nt, Human
gucuaugggacucaaugcacug

SEQ ID NO: 2362807 - RNA, 15 nt, Human
aaguauuuugcugga

SEQ ID NO: 2362808 - RNA, 23 nt, Human
aaguauucuuauuuaaugaaaga

SEQ ID NO: 2362809 - RNA, 19 nt, Human
aaguauugcaucuguauaa

SEQ ID NO: 2362810 - RNA, 22 nt, Human
aaguauugcaucuguauaagua

SEQ ID NO: 2362811 - RNA, 15 nt, Human
aaguauuaugucucu

SEQ ID NO: 2362812 - RNA, 17 nt, Human
aaguauuauaaauuaug

SEQ ID NO: 2362813 - RNA, 18 nt, Human
aaguauugcaucuguaua

SEQ ID NO: 2362814 - RNA, 21 nt, Human
aaguauucuuauuuaaugaaa

SEQ ID NO: 2362815 - RNA, 13 nt, Human
aaguauuaucaga

SEQ ID NO: 2362816 - RNA, 13 nt, Human
aaguauuauaaau

SEQ ID NO: 2362817 - RNA, 19 nt, Human
aaguauuauaccuuuuuua

SEQ ID NO: 2362818 - RNA, 16 nt, Human
aaguauuauaccuuuu

SEQ ID NO: 2362819 - RNA, 14 nt, Human
aagucaaaguaaaa

SEQ ID NO: 2362820 - RNA, 20 nt, Human
aagucaaagcaaggaaacua

SEQ ID NO: 2362821 - RNA, 22 nt, Human
aagucaaaguaaaacuugcugc

SEQ ID NO: 2362822 - RNA, 19 nt, Human
aagucaaauuaauaaucuu

SEQ ID NO: 2362823 - RNA, 15 nt, Human
aagucaaauuaauaa

SEQ ID NO: 2362824 - RNA, 22 nt, Human
aagucacugcacagugcaucuc

SEQ ID NO: 2362825 - RNA, 21 nt, Human
aagucacuggccaguggcugg

SEQ ID NO: 2362826 - RNA, 23 nt, Human
aagucaaagacauucugacaucu

SEQ ID NO: 2362827 - RNA, 19 nt, Human
aagucaaaaggugccugug

SEQ ID NO: 2362828 - RNA, 16 nt, Human
aagucaaaaggugccu

SEQ ID NO: 2362829 - RNA, 15 nt, Human
aaguauuuuuuuauc

SEQ ID NO: 2362830 - RNA, 20 nt, Human
aagucagacugcugggacug

SEQ ID NO: 2362831 - RNA, 12 nt, Human
aagucagaggau

SEQ ID NO: 2362832 - RNA, 17 nt, Human
aagucagacugcuggga

SEQ ID NO: 2362833 - RNA, 16 nt, Human
aagucagacugcuggg

SEQ ID NO: 2362834 - RNA, 14 nt, Human
aagucacugcacag

SEQ ID NO: 2362835 - RNA, 15 nt, Human
aagucagaggauggc

SEQ ID NO: 2362836 - RNA, 20 nt, Human
aagucagaggauggccagug

SEQ ID NO: 2362837 - RNA, 21 nt, Human
aagucagaggauggccagugu

SEQ ID NO: 2362838 - RNA, 22 nt, Human
aagucagaggauggccaguguc

SEQ ID NO: 2362839 - RNA, 13 nt, Human
aaguacuauguau

SEQ ID NO: 2362840 - RNA, 17 nt, Human
aaguacuauaauuuacc

SEQ ID NO: 2362841 - RNA, 14 nt, Human
aaguacuauaauuu

SEQ ID NO: 2362842 - RNA, 20 nt, Human
aaguacccguucacauuuuu

SEQ ID NO: 2362843 - RNA, 15 nt, Human
aaguacguuauuguu

SEQ ID NO: 2362844 - RNA, 16 nt, Human
aaguacguuauuguug

SEQ ID NO: 2362845 - RNA, 23 nt, Human
aaguaauuaucgggaacaguguu

SEQ ID NO: 2362846 - RNA, 22 nt, Human
aaguaauuaucgggaacagugu

SEQ ID NO: 2362847 - RNA, 15 nt, Human
aaguaauuaucggga

SEQ ID NO: 2362848 - RNA, 13 nt, Human
aaguaauuaucgg

SEQ ID NO: 2362849 - RNA, 11 nt, Human
aaguaauuauc

SEQ ID NO: 2362850 - RNA, 19 nt, Human
guuuugauuuguacugaaa

SEQ ID NO: 2362851 - RNA, 16 nt, Human
aaguaauugugaaaaa

SEQ ID NO: 2362852 - RNA, 14 nt, Human
aaguaauuccucuc

SEQ ID NO: 2362853 - RNA, 22 nt, Human
aaguaauucugcugucucagcc

SEQ ID NO: 2362854 - RNA, 16 nt, Human
aaguacuguguacaga

SEQ ID NO: 2362855 - RNA, 18 nt, Human
aaguacuucuccacccug

SEQ ID NO: 2362856 - RNA, 19 nt, Human
aaguacuucuccacccugc

SEQ ID NO: 2362857 - RNA, 20 nt, Human
aaguacuucuccacccugcu

SEQ ID NO: 2362858 - RNA, 19 nt, Human
aaguauguguaaaauguga

SEQ ID NO: 2362859 - RNA, 15 nt, Human
aaguauuauaccuuu

SEQ ID NO: 2362860 - RNA, 18 nt, Human
aaguauguuagugcaaau

SEQ ID NO: 2362861 - RNA, 19 nt, Human
aaguauguuagugcaaauu

SEQ ID NO: 2362862 - RNA, 21 nt, Human
guuuuaauuuaaacaccuccu

SEQ ID NO: 2362863 - RNA, 14 nt, Human
guuuuaauuuaaac

SEQ ID NO: 2362864 - RNA, 19 nt, Human
guuuuauauuuuuauagac

SEQ ID NO: 2362865 - RNA, 18 nt, Human
guuuuaucacauguaugu

SEQ ID NO: 2362866 - RNA, 20 nt, Human
guuuuaucacauguauguuu

SEQ ID NO: 2362867 - RNA, 21 nt, Human
guuuuaucacauguauguuuu

SEQ ID NO: 2362868 - RNA, 22 nt, Human
guuuuaucacauguauguuuug

SEQ ID NO: 2362869 - RNA, 14 nt, Human
guuuuaucaugaca

SEQ ID NO: 2362870 - RNA, 22 nt, Human
guuuuaucaugacauguuauau

SEQ ID NO: 2362871 - RNA, 18 nt, Human
guuuuaugacuucauuaa

SEQ ID NO: 2362872 - RNA, 13 nt, Human
guuuuaugacuuc

SEQ ID NO: 2362873 - RNA, 13 nt, Human
guuuuauuguguu

SEQ ID NO: 2362874 - RNA, 14 nt, Human
guuuuauuccugua

SEQ ID NO: 2362875 - RNA, 20 nt, Human
guuuuauuccuguauguugu

SEQ ID NO: 2362876 - RNA, 19 nt, Human
guuuuaacuagaauuuauu

SEQ ID NO: 2362877 - RNA, 14 nt, Human
guuuuaacaaaaac

SEQ ID NO: 2362878 - RNA, 22 nt, Human
guuuuaacaauuuccuuuauau

SEQ ID NO: 2362879 - RNA, 22 nt, Human
guuuuaaggaugcuuguacaua

SEQ ID NO: 2362880 - RNA, 18 nt, Human
guuuuaaguuguuugcau

SEQ ID NO: 2362881 - RNA, 17 nt, Human
guuuuaaguuguuugca

SEQ ID NO: 2362882 - RNA, 20 nt, Human
guuuuaauuccaauaugaug

SEQ ID NO: 2362883 - RNA, 23 nt, Human
guuuuaauuccaauaugaugacu

SEQ ID NO: 2362884 - RNA, 13 nt, Human
guuuuaauuccau

SEQ ID NO: 2362885 - RNA, 14 nt, Human
guuuuaauuccaug

SEQ ID NO: 2362886 - RNA, 16 nt, Human
guuuuaauuccaugaa

SEQ ID NO: 2362887 - RNA, 22 nt, Human
guuuuaauuccaugaaucgcuu

SEQ ID NO: 2362888 - RNA, 21 nt, Human
guuuugauguuuguggccuca

SEQ ID NO: 2362889 - RNA, 20 nt, Human
guuuugauaaaguaguaaaa

SEQ ID NO: 2362890 - RNA, 23 nt, Human
guuuugagguuuccuucagacag

SEQ ID NO: 2362891 - RNA, 14 nt, Human
guuuugauaaagua

SEQ ID NO: 2362892 - RNA, 19 nt, Human
guuuugauaaaguaguaaa

SEQ ID NO: 2362893 - RNA, 23 nt, Human
guuuugauguuuguggccucaga

SEQ ID NO: 2362894 - RNA, 22 nt, Human
guuuugauguuuguggccucag

SEQ ID NO: 2362895 - RNA, 20 nt, Human
guuuugauuuaauguuuuca

SEQ ID NO: 2362896 - RNA, 13 nt, Human
guuuugauugaga

SEQ ID NO: 2362897 - RNA, 19 nt, Human
guuuugauugagaguaacu

SEQ ID NO: 2362898 - RNA, 12 nt, Human
guuuugagcuuu

SEQ ID NO: 2362899 - RNA, 16 nt, Human
guuuugacggaugauu

SEQ ID NO: 2362900 - RNA, 14 nt, Human
guuuugacauuuuu

SEQ ID NO: 2362901 - RNA, 17 nt, Human
guuuugacauuuuuagu

SEQ ID NO: 2362902 - RNA, 15 nt, Human
guuuugaaggcaaaa

SEQ ID NO: 2362903 - RNA, 21 nt, Human
guuuugaaggcaaaauugcaa

SEQ ID NO: 2362904 - RNA, 18 nt, Human
guuuugaaugguguugua

SEQ ID NO: 2362905 - RNA, 16 nt, Human
guuuucuguucuuucu

SEQ ID NO: 2362906 - RNA, 15 nt, Human
guuuucuguucuuuc

SEQ ID NO: 2362907 - RNA, 14 nt, Human
guuuucuguucuuu

SEQ ID NO: 2362908 - RNA, 11 nt, Human
aaguaagaaaa

SEQ ID NO: 2362909 - RNA, 12 nt, Human
aaguaagaaaau

SEQ ID NO: 2362910 - RNA, 13 nt, Human
aaguaagaaaaua

SEQ ID NO: 2362911 - RNA, 14 nt, Human
aaguaagaaaauau

SEQ ID NO: 2362912 - RNA, 15 nt, Human
aaguaagaaaauauu

SEQ ID NO: 2362913 - RNA, 16 nt, Human
aaguaagaaaauauuu

SEQ ID NO: 2362914 - RNA, 18 nt, Human
aaguaagaaaauauuuug

SEQ ID NO: 2362915 - RNA, 17 nt, Human
aaguaauaugcacacau

SEQ ID NO: 2362916 - RNA, 20 nt, Human
aaguaauaugcacacauuuu

SEQ ID NO: 2362917 - RNA, 18 nt, Human
aaguaauaugcacacauu

SEQ ID NO: 2362918 - RNA, 20 nt, Human
aaguaagaaagugaagcaaa

SEQ ID NO: 2362919 - RNA, 19 nt, Human
aaguaagaaaauauuuugu

SEQ ID NO: 2362920 - RNA, 18 nt, Human
aaguaagaaagugaagca

SEQ ID NO: 2362921 - RNA, 19 nt, Human
guuugcugaacaccuugug

SEQ ID NO: 2362922 - RNA, 21 nt, Human
aaguaauaugcacacauuuuu

SEQ ID NO: 2362923 - RNA, 18 nt, Human
guuugcuuauuguuccaa

SEQ ID NO: 2362924 - RNA, 17 nt, Human
guuugcuucauaaauga

SEQ ID NO: 2362925 - RNA, 16 nt, Human
guuugcuucauaaaug

SEQ ID NO: 2362926 - RNA, 17 nt, Human
guuugcuuauuguucca

SEQ ID NO: 2362927 - RNA, 16 nt, Human
guuugcuuauuguucc

SEQ ID NO: 2362928 - RNA, 15 nt, Human
guuugcuuauuguuc

SEQ ID NO: 2362929 - RNA, 14 nt, Human
guuugcuuauuguu

SEQ ID NO: 2362930 - RNA, 13 nt, Human
guuugcuuauugu

SEQ ID NO: 2362931 - RNA, 18 nt, Human
guuugcuguugauuucuu

SEQ ID NO: 2362932 - RNA, 22 nt, Human
guuuuaaagaccugacaccuuu

SEQ ID NO: 2362933 - RNA, 19 nt, Human
guuuuaaauuuauuucaaa

SEQ ID NO: 2362934 - RNA, 15 nt, Human
guuuuaaagugauua

SEQ ID NO: 2362935 - RNA, 12 nt, Human
guuuuaaauucu

SEQ ID NO: 2362936 - RNA, 22 nt, Human
guuuuaaauacgcacuacaugu

SEQ ID NO: 2362937 - RNA, 14 nt, Human
guuuuaaaauuaaa

SEQ ID NO: 2362938 - RNA, 18 nt, Human
guuuggauucuuauguag

SEQ ID NO: 2362939 - RNA, 19 nt, Human
guuuuaaacauagaaaguu

SEQ ID NO: 2362940 - RNA, 12 nt, Human
guuuuaaaauua

SEQ ID NO: 2362941 - RNA, 17 nt, Human
guuuuaaaaugagaaau

SEQ ID NO: 2362942 - RNA, 20 nt, Human
guuuggaugggagugagaca

SEQ ID NO: 2362943 - RNA, 21 nt, Human
guuuggaggagcaaaggcuga

SEQ ID NO: 2362944 - RNA, 13 nt, Human
guuuggagacauu

SEQ ID NO: 2362945 - RNA, 23 nt, Human
guuuggagacauuccugggcaca

SEQ ID NO: 2362946 - RNA, 20 nt, Human
guuugcuuuguaugcacuuu

SEQ ID NO: 2362947 - RNA, 13 nt, Human
guuuggagacaga

SEQ ID NO: 2362948 - RNA, 17 nt, Human
guuuggaccccagcugg

SEQ ID NO: 2362949 - RNA, 18 nt, Human
guuuggaccccagcuggg

SEQ ID NO: 2362950 - RNA, 19 nt, Human
guuuggaccccagcuggga

SEQ ID NO: 2362951 - RNA, 13 nt, Human
guuuggaaugcuu

SEQ ID NO: 2362952 - RNA, 15 nt, Human
guuuggaaugcuucu

SEQ ID NO: 2362953 - RNA, 15 nt, Human
guuuggaccccagcu

SEQ ID NO: 2362954 - RNA, 16 nt, Human
guuuggaccccagcug

SEQ ID NO: 2362955 - RNA, 23 nt, Human
aaggcuguugcaugggcuaauga

SEQ ID NO: 2362956 - RNA, 13 nt, Human
aaggcuguugcau

SEQ ID NO: 2362957 - RNA, 22 nt, Human
aaggcugugcucccugguucug

SEQ ID NO: 2362958 - RNA, 19 nt, Human
aaggcuguguacacugaca

SEQ ID NO: 2362959 - RNA, 19 nt, Human
aagggcuagaaccuggagg

SEQ ID NO: 2362960 - RNA, 15 nt, Human
aagggcuguuauaau

SEQ ID NO: 2362961 - RNA, 16 nt, Human
aaggggacccccgccc

SEQ ID NO: 2362962 - RNA, 20 nt, Human
aaggggacccccgcccccug

SEQ ID NO: 2362963 - RNA, 19 nt, Human
aagggcuucugcacccucc

SEQ ID NO: 2362964 - RNA, 21 nt, Human
aagggcuuacacguggaggaa

SEQ ID NO: 2362965 - RNA, 17 nt, Human
aagggcuucugcacccu

SEQ ID NO: 2362966 - RNA, 18 nt, Human
aagggcuucugcacccuc

SEQ ID NO: 2362967 - RNA, 17 nt, Human
aagggcuguuauaaucu

SEQ ID NO: 2362968 - RNA, 17 nt, Human
aaggggaauugaggaca

SEQ ID NO: 2362969 - RNA, 21 nt, Human
guuucacuuucacauagaugu

SEQ ID NO: 2362970 - RNA, 20 nt, Human
guuucacugacuuagaacca

SEQ ID NO: 2362971 - RNA, 22 nt, Human
aaggcuguccuuacccaucugc

SEQ ID NO: 2362972 - RNA, 16 nt, Human
aaggcugugcucccug

SEQ ID NO: 2362973 - RNA, 20 nt, Human
aaggcugucaauuacaggaa

SEQ ID NO: 2362974 - RNA, 22 nt, Human
aaggcugggggaagaagcucuc

SEQ ID NO: 2362975 - RNA, 19 nt, Human
aaggcugggggaagaagcu

SEQ ID NO: 2362976 - RNA, 14 nt, Human
aaggcugggggaag

SEQ ID NO: 2362977 - RNA, 16 nt, Human
aaggcugggggaagaa

SEQ ID NO: 2362978 - RNA, 13 nt, Human
guuucagaaaugu

SEQ ID NO: 2362979 - RNA, 11 nt, Human
guuucagaaau

SEQ ID NO: 2362980 - RNA, 13 nt, Human
aagguuuggugug

SEQ ID NO: 2362981 - RNA, 17 nt, Human
aagguuuguauauuguc

SEQ ID NO: 2362982 - RNA, 16 nt, Human
aagguuucugaaaauu

SEQ ID NO: 2362983 - RNA, 21 nt, Human
aagguuucguuucuguauaca

SEQ ID NO: 2362984 - RNA, 22 nt, Human
aagguuucguuucuguauacaa

SEQ ID NO: 2362985 - RNA, 23 nt, Human
aagguuucagaaagaagugggga

SEQ ID NO: 2362986 - RNA, 22 nt, Human
aagguuuaggcugguggcccag

SEQ ID NO: 2362987 - RNA, 16 nt, Human
aagguuucguuucugu

SEQ ID NO: 2362988 - RNA, 11 nt, Human
aagguauaauu

SEQ ID NO: 2362989 - RNA, 20 nt, Human
aagguaucaguugcaauaau

SEQ ID NO: 2362990 - RNA, 19 nt, Human
aagguaucaguugcaauaa

SEQ ID NO: 2362991 - RNA, 22 nt, Human
aagguauuaaauugauguugcu

SEQ ID NO: 2362992 - RNA, 18 nt, Human
aagguauuaaauugaugu

SEQ ID NO: 2362993 - RNA, 20 nt, Human
aagguuuuauaaggcugaug

SEQ ID NO: 2362994 - RNA, 12 nt, Human
aaguaaaugcua

SEQ ID NO: 2362995 - RNA, 21 nt, Human
aagggggauaugaauggagau

SEQ ID NO: 2362996 - RNA, 15 nt, Human
aaggggggagcuggg

SEQ ID NO: 2362997 - RNA, 16 nt, Human
aaggggguccacccag

SEQ ID NO: 2362998 - RNA, 19 nt, Human
aagggggucccagugggag

SEQ ID NO: 2362999 - RNA, 17 nt, Human
aaggggguggugucucc

SEQ ID NO: 2363000 - RNA, 12 nt, Human
aaggggguccca

SEQ ID NO: 2363001 - RNA, 17 nt, Human
aagggggucccaguggg

SEQ ID NO: 2363002 - RNA, 20 nt, Human
aagguagcccuggccagagg

SEQ ID NO: 2363003 - RNA, 22 nt, Human
aagguaguuuuuaccuaccaca

SEQ ID NO: 2363004 - RNA, 12 nt, Human
aagguaguuuuu

SEQ ID NO: 2363005 - RNA, 14 nt, Human
aagguagccauccc

SEQ ID NO: 2363006 - RNA, 13 nt, Human
aaggggagaguaa

SEQ ID NO: 2363007 - RNA, 19 nt, Human
aaggggagagccugcuggc

SEQ ID NO: 2363008 - RNA, 12 nt, Human
aaggggagagcc

SEQ ID NO: 2363009 - RNA, 14 nt, Human
aaggggagagccug

SEQ ID NO: 2363010 - RNA, 15 nt, Human
aaggggagagccugc

SEQ ID NO: 2363011 - RNA, 18 nt, Human
aaggggagagccugcugg

SEQ ID NO: 2363012 - RNA, 12 nt, Human
aagggggcuggg

SEQ ID NO: 2363013 - RNA, 23 nt, Human
aagggggcugggacaugggaaag

SEQ ID NO: 2363014 - RNA, 17 nt, Human
aaggaaaauaguaaugu

SEQ ID NO: 2363015 - RNA, 12 nt, Human
aaggaaacucuu

SEQ ID NO: 2363016 - RNA, 13 nt, Human
aaggaaacucuua

SEQ ID NO: 2363017 - RNA, 20 nt, Human
aaggaaacuggguuccugca

SEQ ID NO: 2363018 - RNA, 16 nt, Human
aaggaaacucuuaucu

SEQ ID NO: 2363019 - RNA, 19 nt, Human
aaggaaacucuuaucucag

SEQ ID NO: 2363020 - RNA, 13 nt, Human
guuguuuguaugu

SEQ ID NO: 2363021 - RNA, 21 nt, Human
aaggaaacuugaaucaaagca

SEQ ID NO: 2363022 - RNA, 12 nt, Human
guuguuugcaug

SEQ ID NO: 2363023 - RNA, 23 nt, Human
guuguuugauucagacagcugcc

SEQ ID NO: 2363024 - RNA, 17 nt, Human
aaggaaacccagcucug

SEQ ID NO: 2363025 - RNA, 22 nt, Human
aaggaaacccagcucuggucca

SEQ ID NO: 2363026 - RNA, 21 nt, Human
aaggaaaaagcacaagaagcg

SEQ ID NO: 2363027 - RNA, 17 nt, Human
aaggaaaaauaaauauu

SEQ ID NO: 2363028 - RNA, 14 nt, Human
aaggaaaaaugugu

SEQ ID NO: 2363029 - RNA, 15 nt, Human
aaggaaaaaugugua

SEQ ID NO: 2363030 - RNA, 16 nt, Human
aaggaaaaauguguaa

SEQ ID NO: 2363031 - RNA, 17 nt, Human
aaggaaaaauguguaau

SEQ ID NO: 2363032 - RNA, 21 nt, Human
aaggaaaaauguguaauuuug

SEQ ID NO: 2363033 - RNA, 13 nt, Human
guuuaaauaaagu

SEQ ID NO: 2363034 - RNA, 14 nt, Human
guuuaaagcaacug

SEQ ID NO: 2363035 - RNA, 14 nt, Human
guuuaaauaaagua

SEQ ID NO: 2363036 - RNA, 15 nt, Human
guuuaaauaaaguau

SEQ ID NO: 2363037 - RNA, 16 nt, Human
guuuaaauaaaguauc

SEQ ID NO: 2363038 - RNA, 17 nt, Human
guuuaaauaaaguauca

SEQ ID NO: 2363039 - RNA, 19 nt, Human
guuuaaauaaaguaucaug

SEQ ID NO: 2363040 - RNA, 22 nt, Human
guuuaaauaaaguaucaugcau

SEQ ID NO: 2363041 - RNA, 23 nt, Human
guuuaaauaaaguaucaugcauu

SEQ ID NO: 2363042 - RNA, 13 nt, Human
guuuaaauauuuc

SEQ ID NO: 2363043 - RNA, 14 nt, Human
guuuaaauauuuca

SEQ ID NO: 2363044 - RNA, 21 nt, Human
guuuaagugacugauggcuaa

SEQ ID NO: 2363045 - RNA, 12 nt, Human
guuuaaguguug

SEQ ID NO: 2363046 - RNA, 13 nt, Human
guuuaauacucau

SEQ ID NO: 2363047 - RNA, 19 nt, Human
guuuaaauauuucaagaca

SEQ ID NO: 2363048 - RNA, 19 nt, Human
guuguuuuuugaaaacaug

SEQ ID NO: 2363049 - RNA, 17 nt, Human
guuguuuguauguauaa

SEQ ID NO: 2363050 - RNA, 15 nt, Human
guuuaaagagagguu

SEQ ID NO: 2363051 - RNA, 16 nt, Human
guuuaaagagagguua

SEQ ID NO: 2363052 - RNA, 13 nt, Human
guuuaugagccag

SEQ ID NO: 2363053 - RNA, 20 nt, Human
guuuaauacucauccuugua

SEQ ID NO: 2363054 - RNA, 14 nt, Human
guuuaugauuccac

SEQ ID NO: 2363055 - RNA, 23 nt, Human
guuuauggccucagcugccucac

SEQ ID NO: 2363056 - RNA, 22 nt, Human
guuuauggccucagcugccuca

SEQ ID NO: 2363057 - RNA, 18 nt, Human
guuuauggccucagcugc

SEQ ID NO: 2363058 - RNA, 15 nt, Human
guuuauggccucagc

SEQ ID NO: 2363059 - RNA, 14 nt, Human
guuuauggccucag

SEQ ID NO: 2363060 - RNA, 13 nt, Human
guuuauggccuca

SEQ ID NO: 2363061 - RNA, 17 nt, Human
guuuaugcaaggaagga

SEQ ID NO: 2363062 - RNA, 23 nt, Human
guuucaaccaagucaugugcauu

SEQ ID NO: 2363063 - RNA, 17 nt, Human
guuucaaacuuuacuau

SEQ ID NO: 2363064 - RNA, 15 nt, Human
guuucaauucagugc

SEQ ID NO: 2363065 - RNA, 22 nt, Human
guuucaauuccaccugcaauca

SEQ ID NO: 2363066 - RNA, 13 nt, Human
guuucaaugugau

SEQ ID NO: 2363067 - RNA, 19 nt, Human
guuucaaugugauucuaau

SEQ ID NO: 2363068 - RNA, 21 nt, Human
guuucaaugugauucuaaugu

SEQ ID NO: 2363069 - RNA, 19 nt, Human
guuucacggugccagguuu

SEQ ID NO: 2363070 - RNA, 17 nt, Human
guuucaauugcaucucc

SEQ ID NO: 2363071 - RNA, 16 nt, Human
guuucaauugcaucuc

SEQ ID NO: 2363072 - RNA, 22 nt, Human
guuucaauugcaucucccagau

SEQ ID NO: 2363073 - RNA, 16 nt, Human
uaaaacugaagucuga

SEQ ID NO: 2363074 - RNA, 13 nt, Human
uaaaacccaagug

SEQ ID NO: 2363075 - RNA, 20 nt, Human
uaaaacugaagucugaaauu

SEQ ID NO: 2363076 - RNA, 18 nt, Human
uaaaacuggcuuuggcuu

SEQ ID NO: 2363077 - RNA, 13 nt, Human
uaaaacuguacuu

SEQ ID NO: 2363078 - RNA, 17 nt, Human
uaaaacuggcuuuggcu

SEQ ID NO: 2363079 - RNA, 17 nt, Human
uaaaacugaagucugaa

SEQ ID NO: 2363080 - RNA, 18 nt, Human
uaaaacugaagucugaaa

SEQ ID NO: 2363081 - RNA, 19 nt, Human
uaaaacugaagucugaaau

SEQ ID NO: 2363082 - RNA, 13 nt, Human
uaaaacugaauug

SEQ ID NO: 2363083 - RNA, 10 nt, Human
uaaaacugcg

SEQ ID NO: 2363084 - RNA, 13 nt, Human
uaaaacugucccu

SEQ ID NO: 2363085 - RNA, 15 nt, Human
uaaaacuuugcugcc

SEQ ID NO: 2363086 - RNA, 14 nt, Human
uaaaacuuugcugc

SEQ ID NO: 2363087 - RNA, 17 nt, Human
uaaaacuguuaaagucu

SEQ ID NO: 2363088 - RNA, 20 nt, Human
uaaaacuucucaagauacug

SEQ ID NO: 2363089 - RNA, 15 nt, Human
uaaaacuuuuuaaaa

SEQ ID NO: 2363090 - RNA, 12 nt, Human
uaaaacuuuuua

SEQ ID NO: 2363091 - RNA, 15 nt, Human
uaaaaaugagguacu

SEQ ID NO: 2363092 - RNA, 15 nt, Human
uaaaaauauguacaa

SEQ ID NO: 2363093 - RNA, 23 nt, Human
uaaaaauauggaacuucuaauau

SEQ ID NO: 2363094 - RNA, 14 nt, Human
uaaaaaugaaauua

SEQ ID NO: 2363095 - RNA, 18 nt, Human
uaaaaaugaaauuauuua

SEQ ID NO: 2363096 - RNA, 14 nt, Human
uaaaaaugaaauuu

SEQ ID NO: 2363097 - RNA, 23 nt, Human
uaaaaaucucaaauuucuaaauc

SEQ ID NO: 2363098 - RNA, 21 nt, Human
uaaaaauauuguguugugaau

SEQ ID NO: 2363099 - RNA, 22 nt, Human
uaaaaauauuguguugugaaug

SEQ ID NO: 2363100 - RNA, 14 nt, Human
uaaaaaugaauccu

SEQ ID NO: 2363101 - RNA, 21 nt, Human
uaaaaccauguagaaaauuug

SEQ ID NO: 2363102 - RNA, 15 nt, Human
uaaaaccacagcagu

SEQ ID NO: 2363103 - RNA, 22 nt, Human
uaaaaaugagguacucuccugg

SEQ ID NO: 2363104 - RNA, 14 nt, Human
uaaaaccacagcag

SEQ ID NO: 2363105 - RNA, 19 nt, Human
aagucagcuuugccuucca

SEQ ID NO: 2363106 - RNA, 23 nt, Human
aagucagaggauggccagugucu

SEQ ID NO: 2363107 - RNA, 13 nt, Human
aagucagaugugg

SEQ ID NO: 2363108 - RNA, 21 nt, Human
aagucagaugugguaacuguu

SEQ ID NO: 2363109 - RNA, 15 nt, Human
aagucagguccaauu

SEQ ID NO: 2363110 - RNA, 16 nt, Human
aagucagguccaauuu

SEQ ID NO: 2363111 - RNA, 21 nt, Human
aagucaggcccuuauuuucaa

SEQ ID NO: 2363112 - RNA, 16 nt, Human
uaaaaaaaaaaaagua

SEQ ID NO: 2363113 - RNA, 17 nt, Human
uaaaaaaaaaaaaguua

SEQ ID NO: 2363114 - RNA, 18 nt, Human
uaaaaaaaaaaaaguuau

SEQ ID NO: 2363115 - RNA, 19 nt, Human
uaaaaaaaaaaaaguuaua

SEQ ID NO: 2363116 - RNA, 22 nt, Human
uaaaaaaaaaaaccaaaacugu

SEQ ID NO: 2363117 - RNA, 20 nt, Human
uaaaaaaaaaaaaguuauau

SEQ ID NO: 2363118 - RNA, 22 nt, Human
uaaaaagcuccaaaugcagcuu

SEQ ID NO: 2363119 - RNA, 20 nt, Human
uaaaaagcuuccaugauucu

SEQ ID NO: 2363120 - RNA, 11 nt, Human
uaaaaagcuga

SEQ ID NO: 2363121 - RNA, 13 nt, Human
uaaaaagcugacc

SEQ ID NO: 2363122 - RNA, 19 nt, Human
uaaaaagccugcaauuuca

SEQ ID NO: 2363123 - RNA, 22 nt, Human
uaaaaagccugcaauuucauau

SEQ ID NO: 2363124 - RNA, 21 nt, Human
uaaaaaaaaaccugagcccca

SEQ ID NO: 2363125 - RNA, 14 nt, Human
uaaaaagucuucac

SEQ ID NO: 2363126 - RNA, 17 nt, Human
uaaaaagucuucacucu

SEQ ID NO: 2363127 - RNA, 16 nt, Human
uaaaaagucaauguuu

SEQ ID NO: 2363128 - RNA, 15 nt, Human
uaaaaagugacacag

SEQ ID NO: 2363129 - RNA, 17 nt, Human
uaaaaagugacacagca

SEQ ID NO: 2363130 - RNA, 18 nt, Human
uaaaaagugacacagcag

SEQ ID NO: 2363131 - RNA, 10 nt, Human
uaaaaauaua

SEQ ID NO: 2363132 - RNA, 12 nt, Human
uaaaaauauaaa

SEQ ID NO: 2363133 - RNA, 14 nt, Human
uaaaaauauaaaac

SEQ ID NO: 2363134 - RNA, 15 nt, Human
uaaaaauauaaaacu

SEQ ID NO: 2363135 - RNA, 19 nt, Human
uaaaaauauggaacuucua

SEQ ID NO: 2363136 - RNA, 14 nt, Human
uaaaaauauugugu

SEQ ID NO: 2363137 - RNA, 19 nt, Human
uaaaaaggcaccuauaaaa

SEQ ID NO: 2363138 - RNA, 20 nt, Human
uaaaaaggaauccacuccca

SEQ ID NO: 2363139 - RNA, 20 nt, Human
uaaaaagggcagggcaucuc

SEQ ID NO: 2363140 - RNA, 16 nt, Human
uaaaaaguauauguua

SEQ ID NO: 2363141 - RNA, 22 nt, Human
uaaaagaaagccucagagaauu

SEQ ID NO: 2363142 - RNA, 21 nt, Human
uaaaagaaagccucagagaau

SEQ ID NO: 2363143 - RNA, 17 nt, Human
uaaaagaacaguaaaca

SEQ ID NO: 2363144 - RNA, 18 nt, Human
uaaaagaacaguaaacau

SEQ ID NO: 2363145 - RNA, 23 nt, Human
uaaaacuuuuuauauuuuauaca

SEQ ID NO: 2363146 - RNA, 14 nt, Human
uaaaagaaaauaaa

SEQ ID NO: 2363147 - RNA, 13 nt, Human
uaaaacuuuuuau

SEQ ID NO: 2363148 - RNA, 16 nt, Human
uaaaacuuugcugcca

SEQ ID NO: 2363149 - RNA, 22 nt, Human
uaaaagaaaauaaaaaaaagaa

SEQ ID NO: 2363150 - RNA, 17 nt, Human
uaaaagaaaauaaaaaa

SEQ ID NO: 2363151 - RNA, 21 nt, Human
uaaaagguucagggaaccguu

SEQ ID NO: 2363152 - RNA, 15 nt, Human
uaaaagguucaggga

SEQ ID NO: 2363153 - RNA, 12 nt, Human
uaaaaguaaaca

SEQ ID NO: 2363154 - RNA, 13 nt, Human
uaaaaguaaacau

SEQ ID NO: 2363155 - RNA, 14 nt, Human
uaaaaguaaacauu

SEQ ID NO: 2363156 - RNA, 13 nt, Human
uaaaagucuugug

SEQ ID NO: 2363157 - RNA, 16 nt, Human
uaaaagaauauuuuaa

SEQ ID NO: 2363158 - RNA, 13 nt, Human
uaaaagaauauuu

SEQ ID NO: 2363159 - RNA, 24 nt, Human
uaaaauaacuaguguugcuuggac

SEQ ID NO: 2363160 - RNA, 20 nt, Human
uaaaauaagcacugugcuaa

SEQ ID NO: 2363161 - RNA, 22 nt, Human
uaaaauaauuuuuauauuugaa

SEQ ID NO: 2363162 - RNA, 21 nt, Human
uaaaauacacacucaaaucaa

SEQ ID NO: 2363163 - RNA, 23 nt, Human
uaaaauaaauauauauaaaccua

SEQ ID NO: 2363164 - RNA, 21 nt, Human
uaaaauaacuaguguugcuug

SEQ ID NO: 2363165 - RNA, 17 nt, Human
uaaaauaaaguauauau

SEQ ID NO: 2363166 - RNA, 13 nt, Human
uaaaauaaaguau

SEQ ID NO: 2363167 - RNA, 13 nt, Human
uaaaauaaauaaa

SEQ ID NO: 2363168 - RNA, 13 nt, Human
uaaaauaaauaua

SEQ ID NO: 2363169 - RNA, 14 nt, Human
uaaaauaaauauau

SEQ ID NO: 2363170 - RNA, 20 nt, Human
uaaaaguacauguuaaacuu

SEQ ID NO: 2363171 - RNA, 15 nt, Human
uaaaagugaucaaua

SEQ ID NO: 2363172 - RNA, 13 nt, Human
uaaaagugaucaa

SEQ ID NO: 2363173 - RNA, 19 nt, Human
uaaaagugggcuugauucu

SEQ ID NO: 2363174 - RNA, 21 nt, Human
aagugauucuccugccucagc

SEQ ID NO: 2363175 - RNA, 17 nt, Human
aagugauucucaugccu

SEQ ID NO: 2363176 - RNA, 13 nt, Human
aagugauuguaug

SEQ ID NO: 2363177 - RNA, 18 nt, Human
aagugauuguaugaauuu

SEQ ID NO: 2363178 - RNA, 18 nt, Human
aagugauggagcagagca

SEQ ID NO: 2363179 - RNA, 19 nt, Human
aagugauggagcagagcaa

SEQ ID NO: 2363180 - RNA, 21 nt, Human
aagugauuaaacgugcagacu

SEQ ID NO: 2363181 - RNA, 14 nt, Human
aagugauugaaaau

SEQ ID NO: 2363182 - RNA, 21 nt, Human
aagugcaggcuggcaccgccu

SEQ ID NO: 2363183 - RNA, 17 nt, Human
aagugcaggcuggcacc

SEQ ID NO: 2363184 - RNA, 13 nt, Human
aagugcaggcugg

SEQ ID NO: 2363185 - RNA, 12 nt, Human
aagugcaggcug

SEQ ID NO: 2363186 - RNA, 17 nt, Human
aagugauuuuuuugucc

SEQ ID NO: 2363187 - RNA, 23 nt, Human
aagugcaauaaaucugacccagu

SEQ ID NO: 2363188 - RNA, 22 nt, Human
aagugcaauaaaucugacccag

SEQ ID NO: 2363189 - RNA, 18 nt, Human
aagugauugggacagagg

SEQ ID NO: 2363190 - RNA, 15 nt, Human
aagugauuguuggca

SEQ ID NO: 2363191 - RNA, 23 nt, Human
aagugaucaauaaaaugugauuu

SEQ ID NO: 2363192 - RNA, 23 nt, Human
aagugauccucccaccucagccu

SEQ ID NO: 2363193 - RNA, 19 nt, Human
aagugauucucaugccuca

SEQ ID NO: 2363194 - RNA, 20 nt, Human
aagugauucuccugccucag

SEQ ID NO: 2363195 - RNA, 16 nt, Human
aagugauucucaugcc

SEQ ID NO: 2363196 - RNA, 13 nt, Human
aagugauucucau

SEQ ID NO: 2363197 - RNA, 21 nt, Human
uaaaauagccacuuaccuuca

SEQ ID NO: 2363198 - RNA, 15 nt, Human
uaaaauagccacuua

SEQ ID NO: 2363199 - RNA, 23 nt, Human
uaaaauagccacuuaccuucaau

SEQ ID NO: 2363200 - RNA, 21 nt, Human
uaaaauagcaacacucuauau

SEQ ID NO: 2363201 - RNA, 14 nt, Human
uaaaauagcuugua

SEQ ID NO: 2363202 - RNA, 21 nt, Human
uaaaauaccagccaguaaaug

SEQ ID NO: 2363203 - RNA, 17 nt, Human
uaaaauauauuucagau

SEQ ID NO: 2363204 - RNA, 19 nt, Human
uaaaauauagcuguacaaa

SEQ ID NO: 2363205 - RNA, 18 nt, Human
uaaaauauagcuguacaa

SEQ ID NO: 2363206 - RNA, 18 nt, Human
uaaaauagcuuguauagu

SEQ ID NO: 2363207 - RNA, 13 nt, Human
aagugauccuccc

SEQ ID NO: 2363208 - RNA, 19 nt, Human
aagugauccucccaccuca

SEQ ID NO: 2363209 - RNA, 20 nt, Human
aagugauccucccaccucag

SEQ ID NO: 2363210 - RNA, 16 nt, Human
aaguuuccuuggcugg

SEQ ID NO: 2363211 - RNA, 20 nt, Human
aaguuuccuuggcuggugca

SEQ ID NO: 2363212 - RNA, 17 nt, Human
aaguuuccuuggcuggu

SEQ ID NO: 2363213 - RNA, 18 nt, Human
aaguuuccuuggcuggug

SEQ ID NO: 2363214 - RNA, 19 nt, Human
aaguuucuagcuagaaaua

SEQ ID NO: 2363215 - RNA, 21 nt, Human
aaguuucuagcuagaaauaug

SEQ ID NO: 2363216 - RNA, 23 nt, Human
aaguuucuagcuagaaauaugau

SEQ ID NO: 2363217 - RNA, 13 nt, Human
aaguuucucagau

SEQ ID NO: 2363218 - RNA, 22 nt, Human
aaguuucucagauccuuguuuc

SEQ ID NO: 2363219 - RNA, 23 nt, Human
aaguuucucagauccuuguuuca

SEQ ID NO: 2363220 - RNA, 13 nt, Human
aaguuucucagcu

SEQ ID NO: 2363221 - RNA, 14 nt, Human
aaguuucucagcuc

SEQ ID NO: 2363222 - RNA, 16 nt, Human
aaguuucucagcuccc

SEQ ID NO: 2363223 - RNA, 17 nt, Human
aaguuucucagcuccca

SEQ ID NO: 2363224 - RNA, 18 nt, Human
aaguuucucagcucccau

SEQ ID NO: 2363225 - RNA, 16 nt, Human
aaguuucuuugcuuca

SEQ ID NO: 2363226 - RNA, 13 nt, Human
aaguuugaauguu

SEQ ID NO: 2363227 - RNA, 14 nt, Human
aaguuugaauguua

SEQ ID NO: 2363228 - RNA, 15 nt, Human
aaguuugaauguuaa

SEQ ID NO: 2363229 - RNA, 16 nt, Human
aaguuugaauguuaaa

SEQ ID NO: 2363230 - RNA, 18 nt, Human
aaguuugaauguuaaaua

SEQ ID NO: 2363231 - RNA, 22 nt, Human
aaguuugaauguuaaauaaauu

SEQ ID NO: 2363232 - RNA, 19 nt, Human
aaguuucugccgcagcccu

SEQ ID NO: 2363233 - RNA, 21 nt, Human
aaguuucugccgcagcccugc

SEQ ID NO: 2363234 - RNA, 23 nt, Human
aaguucaaauucuucugaacuca

SEQ ID NO: 2363235 - RNA, 18 nt, Human
aaguuauuuucuacagug

SEQ ID NO: 2363236 - RNA, 21 nt, Human
aaguuauuuucuacagugguu

SEQ ID NO: 2363237 - RNA, 14 nt, Human
aaguuauuuucuac

SEQ ID NO: 2363238 - RNA, 15 nt, Human
aaguucaccauuaaa

SEQ ID NO: 2363239 - RNA, 19 nt, Human
aaguucaaucuguuuuuca

SEQ ID NO: 2363240 - RNA, 19 nt, Human
aaguuccaaguugcuaaua

SEQ ID NO: 2363241 - RNA, 15 nt, Human
aaguuccacugagcu

SEQ ID NO: 2363242 - RNA, 19 nt, Human
aaguuccaguguucucucu

SEQ ID NO: 2363243 - RNA, 20 nt, Human
aaguuccuuauguauauuua

SEQ ID NO: 2363244 - RNA, 14 nt, Human
aaguuccuuugggu

SEQ ID NO: 2363245 - RNA, 12 nt, Human
aaguuuccauau

SEQ ID NO: 2363246 - RNA, 18 nt, Human
aaguuuccauauguuaua

SEQ ID NO: 2363247 - RNA, 14 nt, Human
aaguucccuacuuc

SEQ ID NO: 2363248 - RNA, 17 nt, Human
aaguucccuacuuccug

SEQ ID NO: 2363249 - RNA, 14 nt, Human
aaguuccucuagug

SEQ ID NO: 2363250 - RNA, 20 nt, Human
aaguucccuacuuccuguga

SEQ ID NO: 2363251 - RNA, 23 nt, Human
uaaaauguauucuuaaauucauu

SEQ ID NO: 2363252 - RNA, 22 nt, Human
uaaaauguauucuuaaauucau

SEQ ID NO: 2363253 - RNA, 11 nt, Human
uaaaaugugaa

SEQ ID NO: 2363254 - RNA, 20 nt, Human
aaguuugagaucagccuggg

SEQ ID NO: 2363255 - RNA, 17 nt, Human
aaguuugaaggaaacag

SEQ ID NO: 2363256 - RNA, 15 nt, Human
aaguuugauuucauu

SEQ ID NO: 2363257 - RNA, 16 nt, Human
aaguuugauuucauua

SEQ ID NO: 2363258 - RNA, 9 nt, Human
uaaaauggu

SEQ ID NO: 2363259 - RNA, 19 nt, Human
uaaaaugugauuuuucuga

SEQ ID NO: 2363260 - RNA, 18 nt, Human
uaaaaugugauuuuucug

SEQ ID NO: 2363261 - RNA, 13 nt, Human
uaaaaugugaagu

SEQ ID NO: 2363262 - RNA, 16 nt, Human
uaaaauucuacuguau

SEQ ID NO: 2363263 - RNA, 13 nt, Human
uaaaauugaaagg

SEQ ID NO: 2363264 - RNA, 14 nt, Human
uaaaauugcacuuu

SEQ ID NO: 2363265 - RNA, 14 nt, Human
uaaaauuauuuugg

SEQ ID NO: 2363266 - RNA, 15 nt, Human
uaaaauuauuuugga

SEQ ID NO: 2363267 - RNA, 21 nt, Human
uaaaauuauuuuggauuuugu

SEQ ID NO: 2363268 - RNA, 12 nt, Human
uaaaauuccacu

SEQ ID NO: 2363269 - RNA, 22 nt, Human
uaaaauuccacugcguugucca

SEQ ID NO: 2363270 - RNA, 16 nt, Human
uaaaauugugaugugu

SEQ ID NO: 2363271 - RNA, 14 nt, Human
uaaaauuguauaga

SEQ ID NO: 2363272 - RNA, 16 nt, Human
uaaaauuguauagaga

SEQ ID NO: 2363273 - RNA, 23 nt, Human
uaaaauuguauagagauaugcag

SEQ ID NO: 2363274 - RNA, 22 nt, Human
uaaaauuguaaaauuguauaga

SEQ ID NO: 2363275 - RNA, 16 nt, Human
uaaaauuguaaaauug

SEQ ID NO: 2363276 - RNA, 19 nt, Human
uaaaauuguaaaauuguau

SEQ ID NO: 2363277 - RNA, 15 nt, Human
uaaaauugugaugug

SEQ ID NO: 2363278 - RNA, 12 nt, Human
uaaaauugccau

SEQ ID NO: 2363279 - RNA, 13 nt, Human
uaaaauugccaua

SEQ ID NO: 2363280 - RNA, 14 nt, Human
uaaaauugccauau

SEQ ID NO: 2363281 - RNA, 15 nt, Human
uaaaauugccauauu

SEQ ID NO: 2363282 - RNA, 16 nt, Human
uaaaauugccauauug

SEQ ID NO: 2363283 - RNA, 18 nt, Human
uaaaauugccauauugca

SEQ ID NO: 2363284 - RNA, 19 nt, Human
uaaaauugccauauugcac

SEQ ID NO: 2363285 - RNA, 14 nt, Human
uaaaauuguaaaau

SEQ ID NO: 2363286 - RNA, 15 nt, Human
uaaaauuguaaaauu

SEQ ID NO: 2363287 - RNA, 14 nt, Human
aagugccagaggug

SEQ ID NO: 2363288 - RNA, 15 nt, Human
aagugccagaggugg

SEQ ID NO: 2363289 - RNA, 18 nt, Human
aagugccagaggugggca

SEQ ID NO: 2363290 - RNA, 19 nt, Human
aagugccagaggugggcag

SEQ ID NO: 2363291 - RNA, 20 nt, Human
aagugccagaggugggcagg

SEQ ID NO: 2363292 - RNA, 23 nt, Human
aaguguauuuuuuuacuaauaga

SEQ ID NO: 2363293 - RNA, 23 nt, Human
aagugccacugcccgagcuggug

SEQ ID NO: 2363294 - RNA, 22 nt, Human
aagugccacugcccgagcuggu

SEQ ID NO: 2363295 - RNA, 21 nt, Human
aagugccacugcccgagcugg

SEQ ID NO: 2363296 - RNA, 21 nt, Human
aagugccacucauuccuguag

SEQ ID NO: 2363297 - RNA, 15 nt, Human
aagugcauccaaagg

SEQ ID NO: 2363298 - RNA, 16 nt, Human
aagugcauccaaaggu

SEQ ID NO: 2363299 - RNA, 19 nt, Human
aagugcauccaaaggugcu

SEQ ID NO: 2363300 - RNA, 20 nt, Human
aagugccacucauuccugua

SEQ ID NO: 2363301 - RNA, 16 nt, Human
aagugcaugcucucug

SEQ ID NO: 2363302 - RNA, 21 nt, Human
aagugccagucuugugucugc

SEQ ID NO: 2363303 - RNA, 13 nt, Human
aagugccccugcu

SEQ ID NO: 2363304 - RNA, 12 nt, Human
aagugccccugc

SEQ ID NO: 2363305 - RNA, 24 nt, Human
aagugucauauguaggugucugca

SEQ ID NO: 2363306 - RNA, 22 nt, Human
aagugucauauguaggugucug

SEQ ID NO: 2363307 - RNA, 18 nt, Human
aaguguccauugacaugu

SEQ ID NO: 2363308 - RNA, 19 nt, Human
aaguguccauugacaugua

SEQ ID NO: 2363309 - RNA, 21 nt, Human
aaguguccauugacauguaca

SEQ ID NO: 2363310 - RNA, 14 nt, Human
aagugucugugugc

SEQ ID NO: 2363311 - RNA, 17 nt, Human
aagugugaacaaaagau

SEQ ID NO: 2363312 - RNA, 19 nt, Human
aagugucucaguccaccug

SEQ ID NO: 2363313 - RNA, 22 nt, Human
aaguguccauugacauguacag

SEQ ID NO: 2363314 - RNA, 23 nt, Human
aaguguccauugacauguacaga

SEQ ID NO: 2363315 - RNA, 13 nt, Human
aagugugaacugg

SEQ ID NO: 2363316 - RNA, 21 nt, Human
aagugugaacuggacccuguu

SEQ ID NO: 2363317 - RNA, 21 nt, Human
aagugugaguaagagcuggug

SEQ ID NO: 2363318 - RNA, 11 nt, Human
aagugugauug

SEQ ID NO: 2363319 - RNA, 20 nt, Human
aagugugauugggaauaaau

SEQ ID NO: 2363320 - RNA, 21 nt, Human
aagugugauugggaauaaaua

SEQ ID NO: 2363321 - RNA, 22 nt, Human
aagugugauugggaauaaauau

SEQ ID NO: 2363322 - RNA, 11 nt, Human
aagugugcaua

SEQ ID NO: 2363323 - RNA, 17 nt, Human
aagugugcauauuguac

SEQ ID NO: 2363324 - RNA, 18 nt, Human
aagugugcauauuguaca

SEQ ID NO: 2363325 - RNA, 20 nt, Human
aagugugaguaagagcuggu

SEQ ID NO: 2363326 - RNA, 19 nt, Human
aagugugaguaagagcugg

SEQ ID NO: 2363327 - RNA, 18 nt, Human
aagugugaguaagagcug

SEQ ID NO: 2363328 - RNA, 11 nt, Human
aagugugagua

SEQ ID NO: 2363329 - RNA, 13 nt, Human
aagugugagcaaa

SEQ ID NO: 2363330 - RNA, 15 nt, Human
aagugugagcaguga

SEQ ID NO: 2363331 - RNA, 18 nt, Human
aagugugggucugugugu

SEQ ID NO: 2363332 - RNA, 17 nt, Human
aagugugggucugugug

SEQ ID NO: 2363333 - RNA, 10 nt, Human
aagugugggu

SEQ ID NO: 2363334 - RNA, 21 nt, Human
aagugugcuuuaugcugaaac

SEQ ID NO: 2363335 - RNA, 22 nt, Human
aagugugcauauuguacacuuu

SEQ ID NO: 2363336 - RNA, 19 nt, Human
aagugugcauauuguacac

SEQ ID NO: 2363337 - RNA, 21 nt, Human
aagugugcauauuguacacuu

SEQ ID NO: 2363338 - RNA, 13 nt, Human
aagugugguagag

SEQ ID NO: 2363339 - RNA, 20 nt, Human
aagugugggucugugugugu

SEQ ID NO: 2363340 - RNA, 23 nt, Human
aagugugcuuuaugcugaaacag

SEQ ID NO: 2363341 - RNA, 19 nt, Human
aaguguggucccaacagga

SEQ ID NO: 2363342 - RNA, 22 nt, Human
aaguguguaugugcgugugugc

SEQ ID NO: 2363343 - RNA, 12 nt, Human
aaguguguaugu

SEQ ID NO: 2363344 - RNA, 13 nt, Human
aaguguguauuaa

SEQ ID NO: 2363345 - RNA, 15 nt, Human
aaguguguauuaaaa

SEQ ID NO: 2363346 - RNA, 16 nt, Human
aaguguguauuaaaaa

SEQ ID NO: 2363347 - RNA, 23 nt, Human
aaguguguggucccaaguuggaa

SEQ ID NO: 2363348 - RNA, 12 nt, Human
aaguguguguuu

SEQ ID NO: 2363349 - RNA, 22 nt, Human
aaguuaucagacacucuggcug

SEQ ID NO: 2363350 - RNA, 23 nt, Human
aaguuauauagguuuuguuugcu

SEQ ID NO: 2363351 - RNA, 16 nt, Human
aaguuauaguauaucu

SEQ ID NO: 2363352 - RNA, 17 nt, Human
aaguuauaguauaucug

SEQ ID NO: 2363353 - RNA, 14 nt, Human
aaguuauuaauauu

SEQ ID NO: 2363354 - RNA, 11 nt, Human
aaguuauugua

SEQ ID NO: 2363355 - RNA, 12 nt, Human
aaguuauuguac

SEQ ID NO: 2363356 - RNA, 20 nt, Human
aaguuauuguacagcuguuu

SEQ ID NO: 2363357 - RNA, 20 nt, Human
aaguuauaaaucaaugucac

SEQ ID NO: 2363358 - RNA, 19 nt, Human
aaguuauaaaucaauguca

SEQ ID NO: 2363359 - RNA, 18 nt, Human
aaguuauaaaucaauguc

SEQ ID NO: 2363360 - RNA, 15 nt, Human
aaguuagcucaggag

SEQ ID NO: 2363361 - RNA, 14 nt, Human
aaguuagcucagga

SEQ ID NO: 2363362 - RNA, 14 nt, Human
aaguuagcugagcg

SEQ ID NO: 2363363 - RNA, 21 nt, Human
aaguuagcugagcgugguggc

SEQ ID NO: 2363364 - RNA, 11 nt, Human
aaguuagucua

SEQ ID NO: 2363365 - RNA, 23 nt, Human
aaguuagucuacucuuaagccau

SEQ ID NO: 2363366 - RNA, 14 nt, Human
aaguuaaauuuuau

SEQ ID NO: 2363367 - RNA, 13 nt, Human
aaguuaacagaga

SEQ ID NO: 2363368 - RNA, 16 nt, Human
aaguguuaauacuagu

SEQ ID NO: 2363369 - RNA, 15 nt, Human
aaguguuagauagaa

SEQ ID NO: 2363370 - RNA, 11 nt, Human
aaguuaagaau

SEQ ID NO: 2363371 - RNA, 21 nt, Human
aaguguguuuccuucagugca

SEQ ID NO: 2363372 - RNA, 17 nt, Human
aaguguguuuccuucag

SEQ ID NO: 2363373 - RNA, 11 nt, Human
aagugugugug

SEQ ID NO: 2363374 - RNA, 16 nt, Human
aaguguguuguugcuu

SEQ ID NO: 2363375 - RNA, 13 nt, Human
aagugugugugcg

SEQ ID NO: 2363376 - RNA, 16 nt, Human
aaguguguguuuuuca

SEQ ID NO: 2363377 - RNA, 21 nt, Human
aaguguguguuuuucauaaag

SEQ ID NO: 2363378 - RNA, 14 nt, Human
aaguuacacauuuu

SEQ ID NO: 2363379 - RNA, 18 nt, Human
aaguuacaacuuccuaau

SEQ ID NO: 2363380 - RNA, 15 nt, Human
aaguuagaauuccuu

SEQ ID NO: 2363381 - RNA, 13 nt, Human
aaguuagcucagg

SEQ ID NO: 2363382 - RNA, 17 nt, Human
aaguuagaauuccuuca

SEQ ID NO: 2363383 - RNA, 21 nt, Human
aaguuagaauuccuucagggu

SEQ ID NO: 2363384 - RNA, 22 nt, Human
aaguuagaauuccuucagggug

SEQ ID NO: 2363385 - RNA, 20 nt, Human
aaguuacaaauugcuugaaa

SEQ ID NO: 2363386 - RNA, 23 nt, Human
aaguuaagaauguucuuauguug

SEQ ID NO: 2363387 - RNA, 19 nt, Human
aaguuaauccacugugacu

SEQ ID NO: 2363388 - RNA, 17 nt, Human
aagcucuugaagacacu

SEQ ID NO: 2363389 - RNA, 21 nt, Human
aagcucuggugacaccagccu

SEQ ID NO: 2363390 - RNA, 22 nt, Human
aagcucuuacacuacauuagaa

SEQ ID NO: 2363391 - RNA, 20 nt, Human
aagcucuggugacaccagcc

SEQ ID NO: 2363392 - RNA, 24 nt, Human
aagcucuggcugaacccugugcug

SEQ ID NO: 2363393 - RNA, 22 nt, Human
aagcucuggcugaacccugugc

SEQ ID NO: 2363394 - RNA, 23 nt, Human
aagcucuggcugaacccugugcu

SEQ ID NO: 2363395 - RNA, 20 nt, Human
aagcucuugaagacacugaa

SEQ ID NO: 2363396 - RNA, 19 nt, Human
aagcucuugaagacacuga

SEQ ID NO: 2363397 - RNA, 12 nt, Human
aagcugaaaaua

SEQ ID NO: 2363398 - RNA, 14 nt, Human
aagcucagcccacc

SEQ ID NO: 2363399 - RNA, 13 nt, Human
aagcucagcccac

SEQ ID NO: 2363400 - RNA, 17 nt, Human
aagcucagacugguuga

SEQ ID NO: 2363401 - RNA, 15 nt, Human
aagcucagccagccc

SEQ ID NO: 2363402 - RNA, 11 nt, Human
aagcucuggcu

SEQ ID NO: 2363403 - RNA, 13 nt, Human
aagcucuggcuga

SEQ ID NO: 2363404 - RNA, 15 nt, Human
aagcucuggcugaac

SEQ ID NO: 2363405 - RNA, 21 nt, Human
aagcucuggcugaacccugug

SEQ ID NO: 2363406 - RNA, 17 nt, Human
aagcucugcuccucucc

SEQ ID NO: 2363407 - RNA, 23 nt, Human
aagcucacaguuccucgcccugg

SEQ ID NO: 2363408 - RNA, 16 nt, Human
aagcucaccuguugcu

SEQ ID NO: 2363409 - RNA, 18 nt, Human
aagcucaccuguugcuua

SEQ ID NO: 2363410 - RNA, 22 nt, Human
aagcucaccuguugcuuacaau

SEQ ID NO: 2363411 - RNA, 23 nt, Human
aagcucaccuguugcuuacaauu

SEQ ID NO: 2363412 - RNA, 22 nt, Human
aagcucacaguuccucgcccug

SEQ ID NO: 2363413 - RNA, 20 nt, Human
aagcucacaguuccucgccc

SEQ ID NO: 2363414 - RNA, 19 nt, Human
aagcucacaguuccucgcc

SEQ ID NO: 2363415 - RNA, 18 nt, Human
aagcuauaaauuccucuu

SEQ ID NO: 2363416 - RNA, 14 nt, Human
aagcucagaaggcu

SEQ ID NO: 2363417 - RNA, 16 nt, Human
aagcucagaaggcucu

SEQ ID NO: 2363418 - RNA, 23 nt, Human
aagcucacuucugggcuucaucu

SEQ ID NO: 2363419 - RNA, 14 nt, Human
aagcucacuucugg

SEQ ID NO: 2363420 - RNA, 23 nt, Human
aagcucagaggcgcacugugacc

SEQ ID NO: 2363421 - RNA, 22 nt, Human
aagcucagaggcgcacugugac

SEQ ID NO: 2363422 - RNA, 12 nt, Human
aagcucagaauc

SEQ ID NO: 2363423 - RNA, 13 nt, Human
aagcucagaaucc

SEQ ID NO: 2363424 - RNA, 14 nt, Human
aagcucagaaucca

SEQ ID NO: 2363425 - RNA, 15 nt, Human
aagcucagaauccaa

SEQ ID NO: 2363426 - RNA, 21 nt, Human
aagcucuugaagacacugaaa

SEQ ID NO: 2363427 - RNA, 10 nt, Human
aagcuuagaa

SEQ ID NO: 2363428 - RNA, 11 nt, Human
aagcuuagaac

SEQ ID NO: 2363429 - RNA, 13 nt, Human
aagcuuagcagga

SEQ ID NO: 2363430 - RNA, 15 nt, Human
aagcuuagcaggaga

SEQ ID NO: 2363431 - RNA, 16 nt, Human
aagcuuagcaggagag

SEQ ID NO: 2363432 - RNA, 20 nt, Human
aagcuuagcaggagaggaga

SEQ ID NO: 2363433 - RNA, 22 nt, Human
aagcuuagcaggagaggagagc

SEQ ID NO: 2363434 - RNA, 13 nt, Human
aagcuuaggcagg

SEQ ID NO: 2363435 - RNA, 18 nt, Human
aagcuuauuaaaacucau

SEQ ID NO: 2363436 - RNA, 13 nt, Human
aagcuuccuuggc

SEQ ID NO: 2363437 - RNA, 23 nt, Human
aagcuuccuuuguuuuuuuuucc

SEQ ID NO: 2363438 - RNA, 22 nt, Human
aagcuucgaggcccagcgaccu

SEQ ID NO: 2363439 - RNA, 21 nt, Human
aagcuuccaugauucuauuua

SEQ ID NO: 2363440 - RNA, 21 nt, Human
aagcuuggcuguagaaggaga

SEQ ID NO: 2363441 - RNA, 21 nt, Human
aagcuuggcagccgagcucgu

SEQ ID NO: 2363442 - RNA, 14 nt, Human
aagcuuggcagccg

SEQ ID NO: 2363443 - RNA, 23 nt, Human
aagcuuguauuccuuuuucucuc

SEQ ID NO: 2363444 - RNA, 22 nt, Human
aagcuucuuaaaugagaaggaa

SEQ ID NO: 2363445 - RNA, 20 nt, Human
aagcuucuuaaaugagaagg

SEQ ID NO: 2363446 - RNA, 14 nt, Human
aagcuugcucacau

SEQ ID NO: 2363447 - RNA, 19 nt, Human
guuccggaauccuguccuc

SEQ ID NO: 2363448 - RNA, 22 nt, Human
guuccggaauccuguccucagc

SEQ ID NO: 2363449 - RNA, 21 nt, Human
guuccgaaaccaaagaagaaa

SEQ ID NO: 2363450 - RNA, 21 nt, Human
guucccuuuuuuggcugcuga

SEQ ID NO: 2363451 - RNA, 22 nt, Human
guucccuuuuuuggcugcugaa

SEQ ID NO: 2363452 - RNA, 16 nt, Human
guucccuuggccucag

SEQ ID NO: 2363453 - RNA, 15 nt, Human
guucccuuggccuca

SEQ ID NO: 2363454 - RNA, 14 nt, Human
guucccuuggccuc

SEQ ID NO: 2363455 - RNA, 13 nt, Human
guucccuuggccu

SEQ ID NO: 2363456 - RNA, 12 nt, Human
guucccuuggcc

SEQ ID NO: 2363457 - RNA, 21 nt, Human
guucccugaaaacccagagag

SEQ ID NO: 2363458 - RNA, 16 nt, Human
guucccugucuugucc

SEQ ID NO: 2363459 - RNA, 20 nt, Human
guucccugaaaacccagaga

SEQ ID NO: 2363460 - RNA, 19 nt, Human
guucccugaaaacccagag

SEQ ID NO: 2363461 - RNA, 18 nt, Human
guucccugaaaacccaga

SEQ ID NO: 2363462 - RNA, 17 nt, Human
guucccugaaaacccag

SEQ ID NO: 2363463 - RNA, 20 nt, Human
guuccccuaguaagugccuu

SEQ ID NO: 2363464 - RNA, 21 nt, Human
guuccccuaguaagugccuuc

SEQ ID NO: 2363465 - RNA, 16 nt, Human
guucccucugcuccug

SEQ ID NO: 2363466 - RNA, 21 nt, Human
guucccucugcuccuggagcc

SEQ ID NO: 2363467 - RNA, 18 nt, Human
guucccuugaugaagaag

SEQ ID NO: 2363468 - RNA, 14 nt, Human
guucccccagcccu

SEQ ID NO: 2363469 - RNA, 13 nt, Human
guucccccagccc

SEQ ID NO: 2363470 - RNA, 23 nt, Human
guuccccaucuggguccuugcac

SEQ ID NO: 2363471 - RNA, 14 nt, Human
guuccccaugcaga

SEQ ID NO: 2363472 - RNA, 14 nt, Human
guuccccagagaaa

SEQ ID NO: 2363473 - RNA, 18 nt, Human
guuccccaucuggguccu

SEQ ID NO: 2363474 - RNA, 19 nt, Human
guuccccaucuggguccuu

SEQ ID NO: 2363475 - RNA, 20 nt, Human
guucccccagcccuguggaa

SEQ ID NO: 2363476 - RNA, 17 nt, Human
guucccccagcccugug

SEQ ID NO: 2363477 - RNA, 16 nt, Human
guucccccagcccugu

SEQ ID NO: 2363478 - RNA, 15 nt, Human
guucccccagcccug

SEQ ID NO: 2363479 - RNA, 21 nt, Human
guucccccuucacaaagccca

SEQ ID NO: 2363480 - RNA, 15 nt, Human
guuccccaagacauu

SEQ ID NO: 2363481 - RNA, 23 nt, Human
aagcuuuuuauuccuccugcuca

SEQ ID NO: 2363482 - RNA, 13 nt, Human
guuccccagagaa

SEQ ID NO: 2363483 - RNA, 12 nt, Human
guuccccagaga

SEQ ID NO: 2363484 - RNA, 19 nt, Human
aagcuuuuaugugaaacau

SEQ ID NO: 2363485 - RNA, 21 nt, Human
aagcuuuuaugugaaacaugu

SEQ ID NO: 2363486 - RNA, 14 nt, Human
guucuugguuugua

SEQ ID NO: 2363487 - RNA, 14 nt, Human
guucuucgaggugg

SEQ ID NO: 2363488 - RNA, 14 nt, Human
guucuucgggaaga

SEQ ID NO: 2363489 - RNA, 16 nt, Human
guucuucgggaagaga

SEQ ID NO: 2363490 - RNA, 21 nt, Human
guucuucgggaagagaggagu

SEQ ID NO: 2363491 - RNA, 22 nt, Human
guucuucgggaagagaggaguu

SEQ ID NO: 2363492 - RNA, 17 nt, Human
guucuucuuccugaagc

SEQ ID NO: 2363493 - RNA, 20 nt, Human
guucuucuuccugaagcuga

SEQ ID NO: 2363494 - RNA, 15 nt, Human
guucuugaagcagua

SEQ ID NO: 2363495 - RNA, 15 nt, Human
guugaccccagagga

SEQ ID NO: 2363496 - RNA, 19 nt, Human
guucuuggggcccuacacc

SEQ ID NO: 2363497 - RNA, 16 nt, Human
guucuugguagagauu

SEQ ID NO: 2363498 - RNA, 14 nt, Human
guugaccccagagg

SEQ ID NO: 2363499 - RNA, 18 nt, Human
guucuugguuuguaaauu

SEQ ID NO: 2363500 - RNA, 15 nt, Human
guucuugguuuguaa

SEQ ID NO: 2363501 - RNA, 19 nt, Human
guugacuugacagaacacu

SEQ ID NO: 2363502 - RNA, 20 nt, Human
guugacuugacagaacacug

SEQ ID NO: 2363503 - RNA, 20 nt, Human
guugacuuauuuucucugug

SEQ ID NO: 2363504 - RNA, 14 nt, Human
guugacuuucaggu

SEQ ID NO: 2363505 - RNA, 21 nt, Human
guugacuuauuuucucugugu

SEQ ID NO: 2363506 - RNA, 15 nt, Human
guugacuuuagggac

SEQ ID NO: 2363507 - RNA, 12 nt, Human
guugagaaauga

SEQ ID NO: 2363508 - RNA, 18 nt, Human
guugacuuuagggacuca

SEQ ID NO: 2363509 - RNA, 16 nt, Human
guugagaaucccaaau

SEQ ID NO: 2363510 - RNA, 22 nt, Human
guugauagcaagugaauuuuuc

SEQ ID NO: 2363511 - RNA, 19 nt, Human
guugagaaucccaaauuug

SEQ ID NO: 2363512 - RNA, 14 nt, Human
guugauaacuuugc

SEQ ID NO: 2363513 - RNA, 17 nt, Human
guugauaacuuugcuug

SEQ ID NO: 2363514 - RNA, 20 nt, Human
guugagaauugugcucaaaa

SEQ ID NO: 2363515 - RNA, 15 nt, Human
guugauaacuuugcu

SEQ ID NO: 2363516 - RNA, 23 nt, Human
guugauagcaagugaauuuuucu

SEQ ID NO: 2363517 - RNA, 15 nt, Human
aaggaaaaaauguug

SEQ ID NO: 2363518 - RNA, 16 nt, Human
aaggaaaaacacaagc

SEQ ID NO: 2363519 - RNA, 17 nt, Human
aaggaaaaaauguugga

SEQ ID NO: 2363520 - RNA, 19 nt, Human
aaggaaaaacacaagcaaa

SEQ ID NO: 2363521 - RNA, 20 nt, Human
aaggaaaaacacaagcaaaa

SEQ ID NO: 2363522 - RNA, 16 nt, Human
aaggaaaaagcacaag

SEQ ID NO: 2363523 - RNA, 19 nt, Human
aaggaaaaagcacaagaag

SEQ ID NO: 2363524 - RNA, 14 nt, Human
guugauagcacaga

SEQ ID NO: 2363525 - RNA, 19 nt, Human
guugauagcacagacccug

SEQ ID NO: 2363526 - RNA, 16 nt, Human
guucuuaagacgugau

SEQ ID NO: 2363527 - RNA, 13 nt, Human
guucuuaauucuu

SEQ ID NO: 2363528 - RNA, 17 nt, Human
guucucugcccuccaag

SEQ ID NO: 2363529 - RNA, 18 nt, Human
guucucugcccuccaaga

SEQ ID NO: 2363530 - RNA, 13 nt, Human
guucuuaauugca

SEQ ID NO: 2363531 - RNA, 15 nt, Human
guucuuaauugcacu

SEQ ID NO: 2363532 - RNA, 17 nt, Human
guucuuaauugcacucu

SEQ ID NO: 2363533 - RNA, 14 nt, Human
guucuucaucuaag

SEQ ID NO: 2363534 - RNA, 17 nt, Human
guucuuaauucuuagcu

SEQ ID NO: 2363535 - RNA, 14 nt, Human
guucuuaauucuua

SEQ ID NO: 2363536 - RNA, 15 nt, Human
guucucucuucucca

SEQ ID NO: 2363537 - RNA, 12 nt, Human
guucucugagga

SEQ ID NO: 2363538 - RNA, 14 nt, Human
guucucugaggaca

SEQ ID NO: 2363539 - RNA, 13 nt, Human
guucucugcccuc

SEQ ID NO: 2363540 - RNA, 15 nt, Human
guucucugcccucca

SEQ ID NO: 2363541 - RNA, 13 nt, Human
guucucuccuucu

SEQ ID NO: 2363542 - RNA, 14 nt, Human
guucuaguugcuug

SEQ ID NO: 2363543 - RNA, 23 nt, Human
guucuagucuccuuugcacugag

SEQ ID NO: 2363544 - RNA, 14 nt, Human
guucuagucuccuu

SEQ ID NO: 2363545 - RNA, 21 nt, Human
guucuagucuccuuugcacug

SEQ ID NO: 2363546 - RNA, 14 nt, Human
guucuagucucucu

SEQ ID NO: 2363547 - RNA, 20 nt, Human
guuccgaaaccaaagaagaa

SEQ ID NO: 2363548 - RNA, 19 nt, Human
guuccggauuggcuugugu

SEQ ID NO: 2363549 - RNA, 19 nt, Human
guucuagcauggcugccaa

SEQ ID NO: 2363550 - RNA, 16 nt, Human
aagccuuccacacuca

SEQ ID NO: 2363551 - RNA, 21 nt, Human
aagccuuggggcugaugcagu

SEQ ID NO: 2363552 - RNA, 16 nt, Human
aagccuucauugccuu

SEQ ID NO: 2363553 - RNA, 16 nt, Human
aagccuuaucaagugu

SEQ ID NO: 2363554 - RNA, 22 nt, Human
aagccuuaucaagugucuucca

SEQ ID NO: 2363555 - RNA, 23 nt, Human
aagccuuaucaagugucuuccau

SEQ ID NO: 2363556 - RNA, 19 nt, Human
aagcuaggguggcccuugc

SEQ ID NO: 2363557 - RNA, 15 nt, Human
aagcuaggguggccc

SEQ ID NO: 2363558 - RNA, 22 nt, Human
aagcuaggguggcccuugcagu

SEQ ID NO: 2363559 - RNA, 19 nt, Human
aagcuaguggcuucaaaau

SEQ ID NO: 2363560 - RNA, 18 nt, Human
aagcuaguggcuucaaaa

SEQ ID NO: 2363561 - RNA, 17 nt, Human
aagccuguaaucccagc

SEQ ID NO: 2363562 - RNA, 16 nt, Human
aagccuguuccccuca

SEQ ID NO: 2363563 - RNA, 20 nt, Human
aagccuguuccccucacugg

SEQ ID NO: 2363564 - RNA, 18 nt, Human
aagccuguuccccucacu

SEQ ID NO: 2363565 - RNA, 19 nt, Human
aagccuguuuuguuggaag

SEQ ID NO: 2363566 - RNA, 18 nt, Human
aagccuguuuaagagaca

SEQ ID NO: 2363567 - RNA, 22 nt, Human
aagccuccauuuaguucuuugu

SEQ ID NO: 2363568 - RNA, 20 nt, Human
aagccuccauuuaguucuuu

SEQ ID NO: 2363569 - RNA, 14 nt, Human
aagccuccccagcu

SEQ ID NO: 2363570 - RNA, 21 nt, Human
aagccuguauucucaaacaca

SEQ ID NO: 2363571 - RNA, 15 nt, Human
aagccuguuuaagag

SEQ ID NO: 2363572 - RNA, 15 nt, Human
aagccuccuccagcc

SEQ ID NO: 2363573 - RNA, 18 nt, Human
aagccuggucagcccaaa

SEQ ID NO: 2363574 - RNA, 19 nt, Human
aagccuccauuuaguucuu

SEQ ID NO: 2363575 - RNA, 20 nt, Human
aagccucauauuuaaagaca

SEQ ID NO: 2363576 - RNA, 14 nt, Human
aagccucauauuua

SEQ ID NO: 2363577 - RNA, 16 nt, Human
aagccucccacgacug

SEQ ID NO: 2363578 - RNA, 17 nt, Human
guucaguggcagggcuc

SEQ ID NO: 2363579 - RNA, 16 nt, Human
guucaguaccuggagg

SEQ ID NO: 2363580 - RNA, 18 nt, Human
guucaguggcagggcuca

SEQ ID NO: 2363581 - RNA, 20 nt, Human
guucaguggcagggcucagg

SEQ ID NO: 2363582 - RNA, 14 nt, Human
guucaguaccugga

SEQ ID NO: 2363583 - RNA, 17 nt, Human
guucaguaccuggagga

SEQ ID NO: 2363584 - RNA, 18 nt, Human
guucaggggacucagccc

SEQ ID NO: 2363585 - RNA, 15 nt, Human
guucaggggacucag

SEQ ID NO: 2363586 - RNA, 13 nt, Human
guucagguagcug

SEQ ID NO: 2363587 - RNA, 19 nt, Human
guucaggggacucagcccu

SEQ ID NO: 2363588 - RNA, 13 nt, Human
guucaguaccugg

SEQ ID NO: 2363589 - RNA, 17 nt, Human
guucagguaacaggcag

SEQ ID NO: 2363590 - RNA, 18 nt, Human
guucagguaacaggcaga

SEQ ID NO: 2363591 - RNA, 14 nt, Human
aagccgugcccugc

SEQ ID NO: 2363592 - RNA, 22 nt, Human
aagccguuguuuacuuaaagau

SEQ ID NO: 2363593 - RNA, 23 nt, Human
aagccuaaaagugggcuugauuc

SEQ ID NO: 2363594 - RNA, 15 nt, Human
aagccguggcuuccc

SEQ ID NO: 2363595 - RNA, 13 nt, Human
aagccguggcuuc

SEQ ID NO: 2363596 - RNA, 14 nt, Human
aagccguggcuucc

SEQ ID NO: 2363597 - RNA, 21 nt, Human
aagccgugauuuucauugcug

SEQ ID NO: 2363598 - RNA, 22 nt, Human
aagccgugcucgccccagcagg

SEQ ID NO: 2363599 - RNA, 13 nt, Human
guucaguguaauu

SEQ ID NO: 2363600 - RNA, 16 nt, Human
guucaguguaauuucu

SEQ ID NO: 2363601 - RNA, 16 nt, Human
guucaguguaaauagu

SEQ ID NO: 2363602 - RNA, 12 nt, Human
guucaguguaau

SEQ ID NO: 2363603 - RNA, 21 nt, Human
guucaguggcagggcucagga

SEQ ID NO: 2363604 - RNA, 22 nt, Human
guucaguggcagggcucaggau

SEQ ID NO: 2363605 - RNA, 20 nt, Human
guucaggguuggccccugcc

SEQ ID NO: 2363606 - RNA, 21 nt, Human
guucaggagucccaaggaaag

SEQ ID NO: 2363607 - RNA, 20 nt, Human
guucaggagucccaaggaaa

SEQ ID NO: 2363608 - RNA, 15 nt, Human
guucagcugccccac

SEQ ID NO: 2363609 - RNA, 21 nt, Human
guucaggguuggccccugccc

SEQ ID NO: 2363610 - RNA, 22 nt, Human
guucaggguuggccccugcccg

SEQ ID NO: 2363611 - RNA, 18 nt, Human
guucaggagucccaagga

SEQ ID NO: 2363612 - RNA, 15 nt, Human
guucaggagucccaa

SEQ ID NO: 2363613 - RNA, 12 nt, Human
guucagcuuggg

SEQ ID NO: 2363614 - RNA, 23 nt, Human
guucagcuuguaaauagcucagg

SEQ ID NO: 2363615 - RNA, 20 nt, Human
guuauuuucuacagugguuu

SEQ ID NO: 2363616 - RNA, 15 nt, Human
guuauuuucuacagu

SEQ ID NO: 2363617 - RNA, 17 nt, Human
guuauuuucuacagugg

SEQ ID NO: 2363618 - RNA, 12 nt, Human
guuauuuucuac

SEQ ID NO: 2363619 - RNA, 17 nt, Human
guuauuuucaguauuuu

SEQ ID NO: 2363620 - RNA, 14 nt, Human
guuauuuucuacag

SEQ ID NO: 2363621 - RNA, 23 nt, Human
guuauuuucuuugaaauuguuua

SEQ ID NO: 2363622 - RNA, 20 nt, Human
guuauugggcaagugauuga

SEQ ID NO: 2363623 - RNA, 21 nt, Human
guuauugggcaagugauugaa

SEQ ID NO: 2363624 - RNA, 16 nt, Human
guuauugcaguuuauc

SEQ ID NO: 2363625 - RNA, 23 nt, Human
guuauugcaguuuaucauucaag

SEQ ID NO: 2363626 - RNA, 10 nt, Human
guuauuuaaa

SEQ ID NO: 2363627 - RNA, 13 nt, Human
guuauuuaaagaa

SEQ ID NO: 2363628 - RNA, 17 nt, Human
guuauuguacagcuguu

SEQ ID NO: 2363629 - RNA, 17 nt, Human
guuauuuguuuaccacu

SEQ ID NO: 2363630 - RNA, 15 nt, Human
guuauuuaaagaaga

SEQ ID NO: 2363631 - RNA, 19 nt, Human
guuauuuguuauuuucagu

SEQ ID NO: 2363632 - RNA, 13 nt, Human
guuauuuuaguuu

SEQ ID NO: 2363633 - RNA, 15 nt, Human
guuauuuuaguuucu

SEQ ID NO: 2363634 - RNA, 21 nt, Human
guuauuuuauugauuauuacu

SEQ ID NO: 2363635 - RNA, 19 nt, Human
guuauuuuaguuucuguuc

SEQ ID NO: 2363636 - RNA, 12 nt, Human
guuauuuucagu

SEQ ID NO: 2363637 - RNA, 14 nt, Human
guuauuuucaguau

SEQ ID NO: 2363638 - RNA, 15 nt, Human
guuauuuucaguauu

SEQ ID NO: 2363639 - RNA, 17 nt, Human
guuauuauauuuacaaa

SEQ ID NO: 2363640 - RNA, 20 nt, Human
guuauuauauuuacaaaugg

SEQ ID NO: 2363641 - RNA, 22 nt, Human
guuagagguuuuaaagugauua

SEQ ID NO: 2363642 - RNA, 13 nt, Human
guuauugcaguuu

SEQ ID NO: 2363643 - RNA, 14 nt, Human
guuauugcaguuua

SEQ ID NO: 2363644 - RNA, 16 nt, Human
guuacuguuauagagg

SEQ ID NO: 2363645 - RNA, 13 nt, Human
guuacuguaauuc

SEQ ID NO: 2363646 - RNA, 20 nt, Human
guuagaauuccuucagggug

SEQ ID NO: 2363647 - RNA, 18 nt, Human
guuagacucuuacuuuuu

SEQ ID NO: 2363648 - RNA, 16 nt, Human
guuacuguugugaccu

SEQ ID NO: 2363649 - RNA, 14 nt, Human
guuacuguugugac

SEQ ID NO: 2363650 - RNA, 13 nt, Human
guuagaauuccuu

SEQ ID NO: 2363651 - RNA, 19 nt, Human
guuagagguucccuuugac

SEQ ID NO: 2363652 - RNA, 19 nt, Human
guuauuauauuuacaaaug

SEQ ID NO: 2363653 - RNA, 12 nt, Human
guuaauaaaagu

SEQ ID NO: 2363654 - RNA, 15 nt, Human
guuaauaaauuaaaa

SEQ ID NO: 2363655 - RNA, 15 nt, Human
guuaauauuuaagac

SEQ ID NO: 2363656 - RNA, 12 nt, Human
guuaauacuagu

SEQ ID NO: 2363657 - RNA, 21 nt, Human
guuaauauaucccagaaauua

SEQ ID NO: 2363658 - RNA, 13 nt, Human
aagcccagcuuga

SEQ ID NO: 2363659 - RNA, 23 nt, Human
aagcccagcacugcuugaggaaa

SEQ ID NO: 2363660 - RNA, 20 nt, Human
aagcccagcacugcuugagg

SEQ ID NO: 2363661 - RNA, 18 nt, Human
aagcccagaaaaggacag

SEQ ID NO: 2363662 - RNA, 20 nt, Human
aagccauucuaaggaaauua

SEQ ID NO: 2363663 - RNA, 20 nt, Human
aagccaauccccuccuuggg

SEQ ID NO: 2363664 - RNA, 12 nt, Human
aagccauugucu

SEQ ID NO: 2363665 - RNA, 22 nt, Human
aagcccaaccuccugaccuguc

SEQ ID NO: 2363666 - RNA, 17 nt, Human
aagcccaaccuccugac

SEQ ID NO: 2363667 - RNA, 18 nt, Human
aagcccaauauuauaauu

SEQ ID NO: 2363668 - RNA, 16 nt, Human
aagcccaaccuccuga

SEQ ID NO: 2363669 - RNA, 13 nt, Human
aagccauugucuu

SEQ ID NO: 2363670 - RNA, 14 nt, Human
aagccauugucuuc

SEQ ID NO: 2363671 - RNA, 12 nt, Human
guuaaucaauuu

SEQ ID NO: 2363672 - RNA, 13 nt, Human
guuaaucaauuua

SEQ ID NO: 2363673 - RNA, 14 nt, Human
guuaaucaauuuaa

SEQ ID NO: 2363674 - RNA, 19 nt, Human
guuaauauuuauaggucac

SEQ ID NO: 2363675 - RNA, 18 nt, Human
guuaaucauuagguguga

SEQ ID NO: 2363676 - RNA, 19 nt, Human
guuaauuccaauuauauga

SEQ ID NO: 2363677 - RNA, 17 nt, Human
guuaaucaauuuaaacc

SEQ ID NO: 2363678 - RNA, 21 nt, Human
guuaaucaauuuaaacccauu

SEQ ID NO: 2363679 - RNA, 22 nt, Human
guuaaucaauuuaaacccauuu

SEQ ID NO: 2363680 - RNA, 21 nt, Human
guuaauucagcacugauuuca

SEQ ID NO: 2363681 - RNA, 19 nt, Human
guuacugaucaugcauugu

SEQ ID NO: 2363682 - RNA, 18 nt, Human
guuacugaucaugcauug

SEQ ID NO: 2363683 - RNA, 17 nt, Human
guuacugaucaugcauu

SEQ ID NO: 2363684 - RNA, 14 nt, Human
guuacucugguucu

SEQ ID NO: 2363685 - RNA, 23 nt, Human
guuacucuucaguuaagccuuug

SEQ ID NO: 2363686 - RNA, 14 nt, Human
guuaauuuuuccua

SEQ ID NO: 2363687 - RNA, 12 nt, Human
aagcauguuuca

SEQ ID NO: 2363688 - RNA, 14 nt, Human
aagcauguuucaug

SEQ ID NO: 2363689 - RNA, 15 nt, Human
aagcauguuucaugu

SEQ ID NO: 2363690 - RNA, 19 nt, Human
aagcauguggcauguucau

SEQ ID NO: 2363691 - RNA, 13 nt, Human
aagcauguggcau

SEQ ID NO: 2363692 - RNA, 17 nt, Human
aagcaugucucaauagu

SEQ ID NO: 2363693 - RNA, 18 nt, Human
aagcauuguaaaugugcu

SEQ ID NO: 2363694 - RNA, 16 nt, Human
aagcauguaggagaau

SEQ ID NO: 2363695 - RNA, 22 nt, Human
aagcauguacaguguucuguuu

SEQ ID NO: 2363696 - RNA, 18 nt, Human
aagcauguauucagcuuu

SEQ ID NO: 2363697 - RNA, 16 nt, Human
aagcauguacaguguu

SEQ ID NO: 2363698 - RNA, 17 nt, Human
aagcauguacaguguuc

SEQ ID NO: 2363699 - RNA, 18 nt, Human
aagcauguacaguguucu

SEQ ID NO: 2363700 - RNA, 21 nt, Human
aagcauguacaguguucuguu

SEQ ID NO: 2363701 - RNA, 12 nt, Human
aagcaugugaga

SEQ ID NO: 2363702 - RNA, 13 nt, Human
aagcaugaaaaag

SEQ ID NO: 2363703 - RNA, 20 nt, Human
aagcaucuuggggggguggc

SEQ ID NO: 2363704 - RNA, 23 nt, Human
aagcaugcacaaauucugucucu

SEQ ID NO: 2363705 - RNA, 12 nt, Human
aagcauguacag

SEQ ID NO: 2363706 - RNA, 13 nt, Human
aagcauguacagu

SEQ ID NO: 2363707 - RNA, 15 nt, Human
aagcauguacagugu

SEQ ID NO: 2363708 - RNA, 15 nt, Human
aagcaucaaacucuu

SEQ ID NO: 2363709 - RNA, 23 nt, Human
aagcaucaccucaggccaggugc

SEQ ID NO: 2363710 - RNA, 21 nt, Human
aagcaucuuccagaaguguga

SEQ ID NO: 2363711 - RNA, 19 nt, Human
aagcaucaccucaggccag

SEQ ID NO: 2363712 - RNA, 18 nt, Human
aagcaucaccucaggcca

SEQ ID NO: 2363713 - RNA, 16 nt, Human
aagcaucaccucaggc

SEQ ID NO: 2363714 - RNA, 15 nt, Human
aagcaucaccucagg

SEQ ID NO: 2363715 - RNA, 14 nt, Human
aagcaucaaacucu

SEQ ID NO: 2363716 - RNA, 23 nt, Human
aagcauauuguuauuauauaauu

SEQ ID NO: 2363717 - RNA, 17 nt, Human
aagcauauuguuauuau

SEQ ID NO: 2363718 - RNA, 19 nt, Human
aagcauauguguuggcuug

SEQ ID NO: 2363719 - RNA, 21 nt, Human
aagcacugaccugucaugccc

SEQ ID NO: 2363720 - RNA, 16 nt, Human
aagcacugaccuguca

SEQ ID NO: 2363721 - RNA, 19 nt, Human
aagcacugcuaggcgagug

SEQ ID NO: 2363722 - RNA, 23 nt, Human
aagcacugcuaggcgagugccag

SEQ ID NO: 2363723 - RNA, 12 nt, Human
aagcacugugcu

SEQ ID NO: 2363724 - RNA, 13 nt, Human
aagcacugugcua

SEQ ID NO: 2363725 - RNA, 20 nt, Human
aagcacugacuucuaaguaa

SEQ ID NO: 2363726 - RNA, 19 nt, Human
aagcacugacuucuaagua

SEQ ID NO: 2363727 - RNA, 16 nt, Human
aagccaaagacuuagu

SEQ ID NO: 2363728 - RNA, 12 nt, Human
aagccaaagagu

SEQ ID NO: 2363729 - RNA, 21 nt, Human
aagcauuuuauaaaucgcuuu

SEQ ID NO: 2363730 - RNA, 19 nt, Human
aagcauuuuauaaaucgcu

SEQ ID NO: 2363731 - RNA, 17 nt, Human
aagcauuuuauaaaucg

SEQ ID NO: 2363732 - RNA, 18 nt, Human
aagcauuugaaugcauuu

SEQ ID NO: 2363733 - RNA, 21 nt, Human
aagcauuugaaugcauuuugu

SEQ ID NO: 2363734 - RNA, 15 nt, Human
aagcauuuuauaaau

SEQ ID NO: 2363735 - RNA, 14 nt, Human
aagcauuuuauaaa

SEQ ID NO: 2363736 - RNA, 12 nt, Human
aagcauuuuaua

SEQ ID NO: 2363737 - RNA, 16 nt, Human
aagcauuuacuuugaa

SEQ ID NO: 2363738 - RNA, 23 nt, Human
aagcauuuaauguagccauggga

SEQ ID NO: 2363739 - RNA, 19 nt, Human
aagcauuuaauguagccau

SEQ ID NO: 2363740 - RNA, 20 nt, Human
aagcauuuaauguagccaug

SEQ ID NO: 2363741 - RNA, 21 nt, Human
aagcauuguuugcuuauuguu

SEQ ID NO: 2363742 - RNA, 20 nt, Human
aagcauuguuugcuuauugu

SEQ ID NO: 2363743 - RNA, 14 nt, Human
aagcauuguuugcu

SEQ ID NO: 2363744 - RNA, 11 nt, Human
aagcauuguuu

SEQ ID NO: 2363745 - RNA, 23 nt, Human
aagcauuguuugcuuauuguucc

SEQ ID NO: 2363746 - RNA, 22 nt, Human
aagcauuguuugcuuauuguuc

SEQ ID NO: 2363747 - RNA, 17 nt, Human
aagcauuaacuucucug

SEQ ID NO: 2363748 - RNA, 16 nt, Human
aagcauguuucauguu

SEQ ID NO: 2363749 - RNA, 20 nt, Human
aagcauguuucauguuuugu

SEQ ID NO: 2363750 - RNA, 19 nt, Human
aagcauuguaaaugugcuu

SEQ ID NO: 2363751 - RNA, 22 nt, Human
aagccaagucagcuuugccuuc

SEQ ID NO: 2363752 - RNA, 13 nt, Human
aagccaagugggg

SEQ ID NO: 2363753 - RNA, 16 nt, Human
aagccaagggccucuu

SEQ ID NO: 2363754 - RNA, 19 nt, Human
aagccaaguggggugcugg

SEQ ID NO: 2363755 - RNA, 17 nt, Human
aagccaauaacacacag

SEQ ID NO: 2363756 - RNA, 18 nt, Human
aagccaauaacacacagc

SEQ ID NO: 2363757 - RNA, 20 nt, Human
aagccaauaacacacagcua

SEQ ID NO: 2363758 - RNA, 13 nt, Human
aagccaagggccu

SEQ ID NO: 2363759 - RNA, 23 nt, Human
aagccaagggaaaggggugcuuu

SEQ ID NO: 2363760 - RNA, 20 nt, Human
aagccaagggaaccuguguc

SEQ ID NO: 2363761 - RNA, 18 nt, Human
aagccaagggaaccugug

SEQ ID NO: 2363762 - RNA, 19 nt, Human
aagccaagggaaccugugu

SEQ ID NO: 2363763 - RNA, 14 nt, Human
aagccaauccccuc

SEQ ID NO: 2363764 - RNA, 15 nt, Human
aagccaauccccucc

SEQ ID NO: 2363765 - RNA, 16 nt, Human
aagccaauccccuccu

SEQ ID NO: 2363766 - RNA, 19 nt, Human
aagccaauccccuccuugg

SEQ ID NO: 2363767 - RNA, 17 nt, Human
aagccaaagcuaggccu

SEQ ID NO: 2363768 - RNA, 18 nt, Human
aagccaaagcuaggccug

SEQ ID NO: 2363769 - RNA, 17 nt, Human
aagccaagcagccaagc

SEQ ID NO: 2363770 - RNA, 13 nt, Human
aagccaagggaaa

SEQ ID NO: 2363771 - RNA, 14 nt, Human
aagccaagggaaag

SEQ ID NO: 2363772 - RNA, 16 nt, Human
aagccaagggaaaggg

SEQ ID NO: 2363773 - RNA, 16 nt, Human
aagccaagcagccaag

SEQ ID NO: 2363774 - RNA, 14 nt, Human
aagccaagcagcca

SEQ ID NO: 2363775 - RNA, 13 nt, Human
aagccaaagccaa

SEQ ID NO: 2363776 - RNA, 13 nt, Human
aagccaagcagcc

SEQ ID NO: 2363777 - RNA, 20 nt, Human
aagccaaagcuaggccuggc

SEQ ID NO: 2363778 - RNA, 19 nt, Human
aagcacacucauccccuca

SEQ ID NO: 2363779 - RNA, 19 nt, Human
aagcacagaaggaggagga

SEQ ID NO: 2363780 - RNA, 16 nt, Human
aagcacacuugacauc

SEQ ID NO: 2363781 - RNA, 13 nt, Human
aagcacaagaagc

SEQ ID NO: 2363782 - RNA, 21 nt, Human
aagcaauuuuccuugaagccg

SEQ ID NO: 2363783 - RNA, 22 nt, Human
aagcaauuuuccuugaagccga

SEQ ID NO: 2363784 - RNA, 18 nt, Human
aagcaauuuuccuugaag

SEQ ID NO: 2363785 - RNA, 19 nt, Human
aagcaauuuuccuugaagc

SEQ ID NO: 2363786 - RNA, 20 nt, Human
aagcaauuuuccuugaagcc

SEQ ID NO: 2363787 - RNA, 22 nt, Human
guguuugcacguuaugguguuu

SEQ ID NO: 2363788 - RNA, 17 nt, Human
gugugaaguuagaauuc

SEQ ID NO: 2363789 - RNA, 21 nt, Human
gugugaaguuagaauuccuuc

SEQ ID NO: 2363790 - RNA, 18 nt, Human
gugugaagguccugcuau

SEQ ID NO: 2363791 - RNA, 11 nt, Human
gugugaaguua

SEQ ID NO: 2363792 - RNA, 12 nt, Human
gugugaaguuag

SEQ ID NO: 2363793 - RNA, 13 nt, Human
gugugaaguuaga

SEQ ID NO: 2363794 - RNA, 17 nt, Human
guguuucuauugacuuc

SEQ ID NO: 2363795 - RNA, 13 nt, Human
guguuucugacuc

SEQ ID NO: 2363796 - RNA, 13 nt, Human
guguuucucccuc

SEQ ID NO: 2363797 - RNA, 21 nt, Human
guguuucucccucucacuguc

SEQ ID NO: 2363798 - RNA, 13 nt, Human
guguuucuuuagu

SEQ ID NO: 2363799 - RNA, 16 nt, Human
guguuucuuuaguuuu

SEQ ID NO: 2363800 - RNA, 22 nt, Human
guguuucucccucucacugucu

SEQ ID NO: 2363801 - RNA, 13 nt, Human
guguuucugugca

SEQ ID NO: 2363802 - RNA, 15 nt, Human
guguuucuguuauua

SEQ ID NO: 2363803 - RNA, 12 nt, Human
guguuucuguau

SEQ ID NO: 2363804 - RNA, 15 nt, Human
aagcacagugccugc

SEQ ID NO: 2363805 - RNA, 12 nt, Human
aagcacaguggu

SEQ ID NO: 2363806 - RNA, 20 nt, Human
aagcacagucugaugacaca

SEQ ID NO: 2363807 - RNA, 13 nt, Human
aagcacaguggug

SEQ ID NO: 2363808 - RNA, 14 nt, Human
aagcacaguggugg

SEQ ID NO: 2363809 - RNA, 18 nt, Human
aagcacagugguggcagg

SEQ ID NO: 2363810 - RNA, 19 nt, Human
aagcacagugguggcaggg

SEQ ID NO: 2363811 - RNA, 16 nt, Human
aagcacagcagccugg

SEQ ID NO: 2363812 - RNA, 11 nt, Human
aagcacagcag

SEQ ID NO: 2363813 - RNA, 14 nt, Human
aagcacaugccucu

SEQ ID NO: 2363814 - RNA, 20 nt, Human
aagcacagugguggcagggc

SEQ ID NO: 2363815 - RNA, 23 nt, Human
aagcacagugguggcagggccua

SEQ ID NO: 2363816 - RNA, 24 nt, Human
aagcacagugguggcagggccuag

SEQ ID NO: 2363817 - RNA, 13 nt, Human
aagcacaguguua

SEQ ID NO: 2363818 - RNA, 18 nt, Human
aagcacaguguuaaauga

SEQ ID NO: 2363819 - RNA, 20 nt, Human
aagcacaguguuaaaugaaa

SEQ ID NO: 2363820 - RNA, 14 nt, Human
aagcacaguuugaa

SEQ ID NO: 2363821 - RNA, 15 nt, Human
aagcacaguuugaac

SEQ ID NO: 2363822 - RNA, 15 nt, Human
aagcacaugccucuc

SEQ ID NO: 2363823 - RNA, 16 nt, Human
aagcacaugccucucu

SEQ ID NO: 2363824 - RNA, 19 nt, Human
aagcacaugccucucucag

SEQ ID NO: 2363825 - RNA, 20 nt, Human
aagcacaugccucucucagg

SEQ ID NO: 2363826 - RNA, 16 nt, Human
aagcacaucugcauuu

SEQ ID NO: 2363827 - RNA, 18 nt, Human
aagcacaguuugaacaaa

SEQ ID NO: 2363828 - RNA, 16 nt, Human
aagcacauguuuauuu

SEQ ID NO: 2363829 - RNA, 16 nt, Human
aagcacauauugagca

SEQ ID NO: 2363830 - RNA, 16 nt, Human
aagcacaguuugaaca

SEQ ID NO: 2363831 - RNA, 17 nt, Human
aagcacaguuugaacaa

SEQ ID NO: 2363832 - RNA, 21 nt, Human
aagcacaugccucucucaggc

SEQ ID NO: 2363833 - RNA, 20 nt, Human
aagcaccagcuucuccaggc

SEQ ID NO: 2363834 - RNA, 21 nt, Human
aagcaccagcuucuccaggcu

SEQ ID NO: 2363835 - RNA, 22 nt, Human
aagcaccaaaauaagaaaagau

SEQ ID NO: 2363836 - RNA, 14 nt, Human
aagcaccaagcuca

SEQ ID NO: 2363837 - RNA, 19 nt, Human
aagcaccagcuucuccagg

SEQ ID NO: 2363838 - RNA, 21 nt, Human
aagcaccaaaauaagaaaaga

SEQ ID NO: 2363839 - RNA, 19 nt, Human
aagcaccaaaauaagaaaa

SEQ ID NO: 2363840 - RNA, 17 nt, Human
aagcaccaaaauaagaa

SEQ ID NO: 2363841 - RNA, 16 nt, Human
aagcaccaaaauaaga

SEQ ID NO: 2363842 - RNA, 13 nt, Human
aagcaccuccugc

SEQ ID NO: 2363843 - RNA, 14 nt, Human
aagcaccuccugcc

SEQ ID NO: 2363844 - RNA, 15 nt, Human
aagcaccuccugccu

SEQ ID NO: 2363845 - RNA, 16 nt, Human
aagcaccuccugccuc

SEQ ID NO: 2363846 - RNA, 23 nt, Human
aagcacuacauaaacugacuuua

SEQ ID NO: 2363847 - RNA, 17 nt, Human
aagcacuacauaaacug

SEQ ID NO: 2363848 - RNA, 20 nt, Human
aagcaccugccgaccucguc

SEQ ID NO: 2363849 - RNA, 16 nt, Human
aagcaccuuagcuggc

SEQ ID NO: 2363850 - RNA, 15 nt, Human
aagcacgaaauguua

SEQ ID NO: 2363851 - RNA, 19 nt, Human
aagcaccuuagcuggcauu

SEQ ID NO: 2363852 - RNA, 17 nt, Human
aagcacugacuucuaag

SEQ ID NO: 2363853 - RNA, 16 nt, Human
aagcacugacuucuaa

SEQ ID NO: 2363854 - RNA, 17 nt, Human
aagcaccugccgaccuc

SEQ ID NO: 2363855 - RNA, 13 nt, Human
aagcaccugccga

SEQ ID NO: 2363856 - RNA, 12 nt, Human
aagcaccugccg

SEQ ID NO: 2363857 - RNA, 12 nt, Human
aagcacccuuga

SEQ ID NO: 2363858 - RNA, 19 nt, Human
aagcaccgccuccaaaugc

SEQ ID NO: 2363859 - RNA, 14 nt, Human
aagcaccccaugcc

SEQ ID NO: 2363860 - RNA, 17 nt, Human
aagcaccuccugccucg

SEQ ID NO: 2363861 - RNA, 16 nt, Human
aagcacuaaacaaaga

SEQ ID NO: 2363862 - RNA, 19 nt, Human
gugcugccucuaccugaca

SEQ ID NO: 2363863 - RNA, 12 nt, Human
gugcugccucua

SEQ ID NO: 2363864 - RNA, 11 nt, Human
gugcugccucu

SEQ ID NO: 2363865 - RNA, 15 nt, Human
gugcugcuacccucc

SEQ ID NO: 2363866 - RNA, 17 nt, Human
gugcugcuacccucccu

SEQ ID NO: 2363867 - RNA, 18 nt, Human
gugcugcuacccucccug

SEQ ID NO: 2363868 - RNA, 19 nt, Human
gugcugcuacccucccugc

SEQ ID NO: 2363869 - RNA, 21 nt, Human
gugcugcuacccucccugcug

SEQ ID NO: 2363870 - RNA, 23 nt, Human
gugcugcccugcccaccuggccu

SEQ ID NO: 2363871 - RNA, 13 nt, Human
gugcucucugcca

SEQ ID NO: 2363872 - RNA, 20 nt, Human
gugcucucugccacuggaag

SEQ ID NO: 2363873 - RNA, 13 nt, Human
gugcugcugaaga

SEQ ID NO: 2363874 - RNA, 18 nt, Human
gugguuccccaccgaagu

SEQ ID NO: 2363875 - RNA, 18 nt, Human
gugguugcuguuuuccuc

SEQ ID NO: 2363876 - RNA, 15 nt, Human
gugguuucagaaaug

SEQ ID NO: 2363877 - RNA, 15 nt, Human
gugcugcugcugcug

SEQ ID NO: 2363878 - RNA, 14 nt, Human
gugcugcugcugcu

SEQ ID NO: 2363879 - RNA, 22 nt, Human
gugcugcuacccucccugcugu

SEQ ID NO: 2363880 - RNA, 23 nt, Human
gugcugcuacccucccugcuguc

SEQ ID NO: 2363881 - RNA, 23 nt, Human
gugguucacucuuggagccugca

SEQ ID NO: 2363882 - RNA, 22 nt, Human
gugguucacucuuggagccugc

SEQ ID NO: 2363883 - RNA, 19 nt, Human
gugguugcuguuuuccucc

SEQ ID NO: 2363884 - RNA, 20 nt, Human
gugguugcuguuuuccuccc

SEQ ID NO: 2363885 - RNA, 23 nt, Human
guguaaaacgagaauccacccau

SEQ ID NO: 2363886 - RNA, 17 nt, Human
guguaaaauauuuugaa

SEQ ID NO: 2363887 - RNA, 18 nt, Human
guguaaaauauuuugaau

SEQ ID NO: 2363888 - RNA, 19 nt, Human
guguaaaauauuuugaauc

SEQ ID NO: 2363889 - RNA, 15 nt, Human
guguaaaaugugaag

SEQ ID NO: 2363890 - RNA, 15 nt, Human
guguaaaccaaagcc

SEQ ID NO: 2363891 - RNA, 22 nt, Human
guguaaaccaaagcccuaaaau

SEQ ID NO: 2363892 - RNA, 12 nt, Human
guguaaagcauu

SEQ ID NO: 2363893 - RNA, 21 nt, Human
guguaaagcauuccaacaaag

SEQ ID NO: 2363894 - RNA, 13 nt, Human
guguaaaguuagu

SEQ ID NO: 2363895 - RNA, 16 nt, Human
guguaaaguuagucua

SEQ ID NO: 2363896 - RNA, 19 nt, Human
guguaaaguuagucuacuc

SEQ ID NO: 2363897 - RNA, 19 nt, Human
guguaacaggucuccucuu

SEQ ID NO: 2363898 - RNA, 17 nt, Human
guguaacaggucuccuc

SEQ ID NO: 2363899 - RNA, 18 nt, Human
guguaacuggcaguuuuc

SEQ ID NO: 2363900 - RNA, 23 nt, Human
guguaacugucagccgggcccug

SEQ ID NO: 2363901 - RNA, 21 nt, Human
guguaacagcugaggucucuu

SEQ ID NO: 2363902 - RNA, 15 nt, Human
guguaacagcugagg

SEQ ID NO: 2363903 - RNA, 12 nt, Human
guguaacagcug

SEQ ID NO: 2363904 - RNA, 23 nt, Human
guguaacagcuccuugggaggaa

SEQ ID NO: 2363905 - RNA, 13 nt, Human
guguaacagcucc

SEQ ID NO: 2363906 - RNA, 14 nt, Human
guguaacagcuccu

SEQ ID NO: 2363907 - RNA, 15 nt, Human
guguaacagcuccuu

SEQ ID NO: 2363908 - RNA, 19 nt, Human
guguaaauaguuacuccag

SEQ ID NO: 2363909 - RNA, 17 nt, Human
aagauagcuucacccca

SEQ ID NO: 2363910 - RNA, 15 nt, Human
aagauagcagggcau

SEQ ID NO: 2363911 - RNA, 18 nt, Human
aagauaggcucugcacag

SEQ ID NO: 2363912 - RNA, 17 nt, Human
aagauaggcucugcaca

SEQ ID NO: 2363913 - RNA, 16 nt, Human
aagauaggcucugcac

SEQ ID NO: 2363914 - RNA, 15 nt, Human
aagauaggcucugca

SEQ ID NO: 2363915 - RNA, 14 nt, Human
aagauaggcucugc

SEQ ID NO: 2363916 - RNA, 13 nt, Human
aagauaggcucug

SEQ ID NO: 2363917 - RNA, 15 nt, Human
aagauauaagugcug

SEQ ID NO: 2363918 - RNA, 20 nt, Human
aagauauaacuauugcccag

SEQ ID NO: 2363919 - RNA, 16 nt, Human
aagauauaagugcugu

SEQ ID NO: 2363920 - RNA, 17 nt, Human
aagauauaagugcugua

SEQ ID NO: 2363921 - RNA, 22 nt, Human
aagagggucugaggaauccaga

SEQ ID NO: 2363922 - RNA, 21 nt, Human
aagagguauuuaucuuuacuu

SEQ ID NO: 2363923 - RNA, 19 nt, Human
aagagguagaaaagauugg

SEQ ID NO: 2363924 - RNA, 18 nt, Human
aagaggugugcaagagag

SEQ ID NO: 2363925 - RNA, 16 nt, Human
aagaggugugcaagag

SEQ ID NO: 2363926 - RNA, 16 nt, Human
aagaggugacugggcc

SEQ ID NO: 2363927 - RNA, 11 nt, Human
aagaggcaggg

SEQ ID NO: 2363928 - RNA, 18 nt, Human
aagaggcaccugucccag

SEQ ID NO: 2363929 - RNA, 15 nt, Human
aagaggcaccugucc

SEQ ID NO: 2363930 - RNA, 14 nt, Human
aagaggcagggucu

SEQ ID NO: 2363931 - RNA, 15 nt, Human
aagaggccaaugccc

SEQ ID NO: 2363932 - RNA, 14 nt, Human
aagaggcgggccag

SEQ ID NO: 2363933 - RNA, 19 nt, Human
aagaggcagaaaauugcac

SEQ ID NO: 2363934 - RNA, 16 nt, Human
aagaggcagaaaauug

SEQ ID NO: 2363935 - RNA, 18 nt, Human
aagagggagaagcaugaa

SEQ ID NO: 2363936 - RNA, 17 nt, Human
aagagggagaagcauga

SEQ ID NO: 2363937 - RNA, 19 nt, Human
aagagggagagguggagca

SEQ ID NO: 2363938 - RNA, 18 nt, Human
aagagggagauggagacu

SEQ ID NO: 2363939 - RNA, 17 nt, Human
aagagggacgccugggg

SEQ ID NO: 2363940 - RNA, 16 nt, Human
aagagggacgccuggg

SEQ ID NO: 2363941 - RNA, 23 nt, Human
aagaggcccugucuguaccuaac

SEQ ID NO: 2363942 - RNA, 17 nt, Human
aagaggcuggugcugug

SEQ ID NO: 2363943 - RNA, 13 nt, Human
aagaggcugguuc

SEQ ID NO: 2363944 - RNA, 23 nt, Human
aagagggaagaaagagaaggagc

SEQ ID NO: 2363945 - RNA, 22 nt, Human
aagagggaauccccgaaggugc

SEQ ID NO: 2363946 - RNA, 21 nt, Human
aagagggagggagggcuccag

SEQ ID NO: 2363947 - RNA, 22 nt, Human
aagagggagggagggcuccaga

SEQ ID NO: 2363948 - RNA, 18 nt, Human
guguauuuaacagggagg

SEQ ID NO: 2363949 - RNA, 12 nt, Human
guguauuguucc

SEQ ID NO: 2363950 - RNA, 16 nt, Human
gugucaaguugugcuu

SEQ ID NO: 2363951 - RNA, 17 nt, Human
guguauuuaacagggag

SEQ ID NO: 2363952 - RNA, 19 nt, Human
guguauucuaguuuuguca

SEQ ID NO: 2363953 - RNA, 14 nt, Human
gugucaccugaaga

SEQ ID NO: 2363954 - RNA, 18 nt, Human
guguauguuugcacacuu

SEQ ID NO: 2363955 - RNA, 22 nt, Human
guguauguuugcacacuugugu

SEQ ID NO: 2363956 - RNA, 18 nt, Human
guguaugugcgugugugc

SEQ ID NO: 2363957 - RNA, 16 nt, Human
guguauuaaaaaaaac

SEQ ID NO: 2363958 - RNA, 20 nt, Human
guguauuccaagacaugucu

SEQ ID NO: 2363959 - RNA, 13 nt, Human
guguauuccaaga

SEQ ID NO: 2363960 - RNA, 22 nt, Human
gugucaccugaagacucauucu

SEQ ID NO: 2363961 - RNA, 14 nt, Human
gugucaccugugcu

SEQ ID NO: 2363962 - RNA, 18 nt, Human
gugucaaguugugcuugu

SEQ ID NO: 2363963 - RNA, 23 nt, Human
gugucaaguugugcuuguuuaca

SEQ ID NO: 2363964 - RNA, 14 nt, Human
gugucagguggggc

SEQ ID NO: 2363965 - RNA, 18 nt, Human
gugucagguggggcagcu

SEQ ID NO: 2363966 - RNA, 14 nt, Human
gugucuguauuuau

SEQ ID NO: 2363967 - RNA, 13 nt, Human
gugucuguauuua

SEQ ID NO: 2363968 - RNA, 13 nt, Human
gugucugggcuga

SEQ ID NO: 2363969 - RNA, 14 nt, Human
gugucuuaauuauu

SEQ ID NO: 2363970 - RNA, 23 nt, Human
gugugaaccaccacacccagccc

SEQ ID NO: 2363971 - RNA, 18 nt, Human
gugugaaagucagaugcc

SEQ ID NO: 2363972 - RNA, 14 nt, Human
gugugaacuggacc

SEQ ID NO: 2363973 - RNA, 15 nt, Human
gugucuuaauuauua

SEQ ID NO: 2363974 - RNA, 19 nt, Human
gugucuuaauuauuauuug

SEQ ID NO: 2363975 - RNA, 13 nt, Human
gugugaagguccu

SEQ ID NO: 2363976 - RNA, 17 nt, Human
gugugaacuggacccug

SEQ ID NO: 2363977 - RNA, 22 nt, Human
gugugaacuggacccuguugcu

SEQ ID NO: 2363978 - RNA, 23 nt, Human
gugucacuacucacagucucuuu

SEQ ID NO: 2363979 - RNA, 12 nt, Human
gugucuguacac

SEQ ID NO: 2363980 - RNA, 12 nt, Human
gugucugggcug

SEQ ID NO: 2363981 - RNA, 19 nt, Human
gugucagguggggcagcuu

SEQ ID NO: 2363982 - RNA, 13 nt, Human
gugucuguacacg

SEQ ID NO: 2363983 - RNA, 16 nt, Human
gugucuguacacgugu

SEQ ID NO: 2363984 - RNA, 21 nt, Human
gugucuguacacguguccugu

SEQ ID NO: 2363985 - RNA, 22 nt, Human
gugucuguacacguguccugua

SEQ ID NO: 2363986 - RNA, 22 nt, Human
gugucuuaauuaaaagaauauu

SEQ ID NO: 2363987 - RNA, 18 nt, Human
aagcaaaugugaccugug

SEQ ID NO: 2363988 - RNA, 17 nt, Human
aagcaaaaucauggaau

SEQ ID NO: 2363989 - RNA, 23 nt, Human
aagcaaaaucauuuuauauguca

SEQ ID NO: 2363990 - RNA, 13 nt, Human
aagcaaaauauua

SEQ ID NO: 2363991 - RNA, 14 nt, Human
aagcaaaauauuau

SEQ ID NO: 2363992 - RNA, 20 nt, Human
aagcaaaugugaaucauuuu

SEQ ID NO: 2363993 - RNA, 14 nt, Human
aagcaaauugauga

SEQ ID NO: 2363994 - RNA, 14 nt, Human
aagcaacagguuuu

SEQ ID NO: 2363995 - RNA, 17 nt, Human
aagcaacccaaauguuc

SEQ ID NO: 2363996 - RNA, 21 nt, Human
guguaugugggggucugugug

SEQ ID NO: 2363997 - RNA, 13 nt, Human
guguauguggggg

SEQ ID NO: 2363998 - RNA, 23 nt, Human
aagauggcacuuauaaccaaagc

SEQ ID NO: 2363999 - RNA, 18 nt, Human
aagauggcauccugugaa

SEQ ID NO: 2364000 - RNA, 21 nt, Human
aagauggcccagcuccccaag

SEQ ID NO: 2364001 - RNA, 21 nt, Human
aagauggauugguguaaaagg

SEQ ID NO: 2364002 - RNA, 21 nt, Human
aagauggauucucagauauuu

SEQ ID NO: 2364003 - RNA, 17 nt, Human
aagauggauucucagau

SEQ ID NO: 2364004 - RNA, 16 nt, Human
aagauggauucucaga

SEQ ID NO: 2364005 - RNA, 14 nt, Human
aagauggauucuca

SEQ ID NO: 2364006 - RNA, 15 nt, Human
aagauggaugugcuu

SEQ ID NO: 2364007 - RNA, 17 nt, Human
aagauggcugacuuugc

SEQ ID NO: 2364008 - RNA, 16 nt, Human
aagauggcugugccuc

SEQ ID NO: 2364009 - RNA, 15 nt, Human
aagauuuuucucaaa

SEQ ID NO: 2364010 - RNA, 22 nt, Human
aagauggcccagcuccccaaga

SEQ ID NO: 2364011 - RNA, 19 nt, Human
aagauuuuucucaaaguuu

SEQ ID NO: 2364012 - RNA, 20 nt, Human
aagauuuuucucaaaguuuu

SEQ ID NO: 2364013 - RNA, 21 nt, Human
aagauuuuucucaaaguuuug

SEQ ID NO: 2364014 - RNA, 20 nt, Human
aagaucaaaagguuaauaaa

SEQ ID NO: 2364015 - RNA, 15 nt, Human
aagauauuuuucaug

SEQ ID NO: 2364016 - RNA, 17 nt, Human
aagauauuuuucaugau

SEQ ID NO: 2364017 - RNA, 19 nt, Human
aagauauuuuuaucuuuau

SEQ ID NO: 2364018 - RNA, 17 nt, Human
aagauauuuuuaucuuu

SEQ ID NO: 2364019 - RNA, 23 nt, Human
aagaucaaaagguuaauaaagua

SEQ ID NO: 2364020 - RNA, 13 nt, Human
aagauauuuuucc

SEQ ID NO: 2364021 - RNA, 22 nt, Human
aagaucaaaagcuuauucaucu

SEQ ID NO: 2364022 - RNA, 15 nt, Human
aagaucaaaauaaaa

SEQ ID NO: 2364023 - RNA, 12 nt, Human
aaaaaauuuaag

SEQ ID NO: 2364024 - RNA, 11 nt, Human
aaaaaauuggu

SEQ ID NO: 2364025 - RNA, 14 nt, Human
aaaaacacaaaagu

SEQ ID NO: 2364026 - RNA, 11 nt, Human
aaaaacaaaaa

SEQ ID NO: 2364027 - RNA, 16 nt, Human
aaaaaauuuccaguga

SEQ ID NO: 2364028 - RNA, 14 nt, Human
aaaaaauuuaagug

SEQ ID NO: 2364029 - RNA, 22 nt, Human
aaaaaauuugagaaagccuuca

SEQ ID NO: 2364030 - RNA, 19 nt, Human
aaaaacagccucacagaag

SEQ ID NO: 2364031 - RNA, 21 nt, Human
aaaaacagcauugcuuucuga

SEQ ID NO: 2364032 - RNA, 20 nt, Human
aaaaacagcauugcuuucug

SEQ ID NO: 2364033 - RNA, 19 nt, Human
aaaaacagcauugcuuucu

SEQ ID NO: 2364034 - RNA, 12 nt, Human
aaaaacacagca

SEQ ID NO: 2364035 - RNA, 18 nt, Human
aaaaauugguucuuuauu

SEQ ID NO: 2364036 - RNA, 14 nt, Human
aaaaauugugauca

SEQ ID NO: 2364037 - RNA, 21 nt, Human
aaaaauuguuaauuuuuccua

SEQ ID NO: 2364038 - RNA, 19 nt, Human
aaaaauuccuuuguguuuc

SEQ ID NO: 2364039 - RNA, 14 nt, Human
aaaaagacagggcu

SEQ ID NO: 2364040 - RNA, 13 nt, Human
aaaaagaccagac

SEQ ID NO: 2364041 - RNA, 19 nt, Human
aaaaagagaaguauuauaa

SEQ ID NO: 2364042 - RNA, 18 nt, Human
aaaaagaggaaagaauga

SEQ ID NO: 2364043 - RNA, 12 nt, Human
aaaaagaggcua

SEQ ID NO: 2364044 - RNA, 20 nt, Human
aaaaagauguucagucauuu

SEQ ID NO: 2364045 - RNA, 19 nt, Human
aaaaagaggaaagaaugaa

SEQ ID NO: 2364046 - RNA, 22 nt, Human
aaaaagauauauuaaaaauaua

SEQ ID NO: 2364047 - RNA, 13 nt, Human
aaaaagauauauu

SEQ ID NO: 2364048 - RNA, 17 nt, Human
aaaaagauauauuaaaa

SEQ ID NO: 2364049 - RNA, 12 nt, Human
aaaaacuuguaa

SEQ ID NO: 2364050 - RNA, 18 nt, Human
aaaaacuuguaaaugcug

SEQ ID NO: 2364051 - RNA, 19 nt, Human
aaaaacuucaguaaguacg

SEQ ID NO: 2364052 - RNA, 12 nt, Human
aaaaacuguauu

SEQ ID NO: 2364053 - RNA, 12 nt, Human
aaaaacugaaug

SEQ ID NO: 2364054 - RNA, 15 nt, Human
aaaaacugauuuuuu

SEQ ID NO: 2364055 - RNA, 14 nt, Human
aaaaaccaaaacug

SEQ ID NO: 2364056 - RNA, 14 nt, Human
aaaaacauggccuu

SEQ ID NO: 2364057 - RNA, 13 nt, Human
aaaaacugauuuu

SEQ ID NO: 2364058 - RNA, 18 nt, Human
aaaacaacuucuuuguaa

SEQ ID NO: 2364059 - RNA, 22 nt, Human
aaaacaacuauggaucagaaua

SEQ ID NO: 2364060 - RNA, 16 nt, Human
aaaacaauaaaauuuu

SEQ ID NO: 2364061 - RNA, 17 nt, Human
aaaacaaggaugaauua

SEQ ID NO: 2364062 - RNA, 13 nt, Human
aaaacaaugaaga

SEQ ID NO: 2364063 - RNA, 14 nt, Human
aaaacaauuguaau

SEQ ID NO: 2364064 - RNA, 15 nt, Human
aaaacacaagcaaaa

SEQ ID NO: 2364065 - RNA, 19 nt, Human
aaaacaaucauuugcuuuu

SEQ ID NO: 2364066 - RNA, 18 nt, Human
aaaacaauauuguuucua

SEQ ID NO: 2364067 - RNA, 17 nt, Human
aaaacaauauuguuucu

SEQ ID NO: 2364068 - RNA, 15 nt, Human
aaaacaauauuguuu

SEQ ID NO: 2364069 - RNA, 12 nt, Human
aaaacacauuuu

SEQ ID NO: 2364070 - RNA, 18 nt, Human
aaaacacagcaaggguga

SEQ ID NO: 2364071 - RNA, 13 nt, Human
aaaacacagcaag

SEQ ID NO: 2364072 - RNA, 12 nt, Human
aaaacacagcaa

SEQ ID NO: 2364073 - RNA, 22 nt, Human
aaaaauuuuauaaaauuaagca

SEQ ID NO: 2364074 - RNA, 20 nt, Human
aaaaauuuaagcauuguuug

SEQ ID NO: 2364075 - RNA, 18 nt, Human
aaaaauuuaagcauuguu

SEQ ID NO: 2364076 - RNA, 16 nt, Human
aaaaauuuaagcauug

SEQ ID NO: 2364077 - RNA, 15 nt, Human
aaaaauuuaagcauu

SEQ ID NO: 2364078 - RNA, 14 nt, Human
aaaaauuuaagcau

SEQ ID NO: 2364079 - RNA, 21 nt, Human
aaaaauuuaaaggguguacuu

SEQ ID NO: 2364080 - RNA, 23 nt, Human
aaaaauuguuucaaaauaaaaac

SEQ ID NO: 2364081 - RNA, 22 nt, Human
aaaaauuuaagcauuguuugcu

SEQ ID NO: 2364082 - RNA, 21 nt, Human
aaaaauuuaagcauuguuugc

SEQ ID NO: 2364083 - RNA, 13 nt, Human
aaaaauuuaagug

SEQ ID NO: 2364084 - RNA, 15 nt, Human
aaaacaaaugccaca

SEQ ID NO: 2364085 - RNA, 14 nt, Human
aaaacaaggaugaa

SEQ ID NO: 2364086 - RNA, 16 nt, Human
aaaacaaaaagaacaa

SEQ ID NO: 2364087 - RNA, 17 nt, Human
aaaacaaaaagaacaaa

SEQ ID NO: 2364088 - RNA, 15 nt, Human
aaaacaaaaagaaca

SEQ ID NO: 2364089 - RNA, 12 nt, Human
aaaacaaagaag

SEQ ID NO: 2364090 - RNA, 18 nt, Human
aggaccucugaaacccug

SEQ ID NO: 2364091 - RNA, 23 nt, Human
aggaccccucaccuugcaacaca

SEQ ID NO: 2364092 - RNA, 15 nt, Human
aggaccccucaccuu

SEQ ID NO: 2364093 - RNA, 17 nt, Human
aggacccggaggggccu

SEQ ID NO: 2364094 - RNA, 20 nt, Human
aggaccucaggugagaagca

SEQ ID NO: 2364095 - RNA, 14 nt, Human
aggaccucagguga

SEQ ID NO: 2364096 - RNA, 11 nt, Human
aggagaagcca

SEQ ID NO: 2364097 - RNA, 13 nt, Human
aggagaagccagg

SEQ ID NO: 2364098 - RNA, 12 nt, Human
aggagaagccag

SEQ ID NO: 2364099 - RNA, 15 nt, Human
aggagaaccacuaca

SEQ ID NO: 2364100 - RNA, 14 nt, Human
aggagaaccacuac

SEQ ID NO: 2364101 - RNA, 19 nt, Human
aggagaaccaaaucuggaa

SEQ ID NO: 2364102 - RNA, 22 nt, Human
aggagaaccaaaucuggaagcc

SEQ ID NO: 2364103 - RNA, 20 nt, Human
aggaccucugaaacccugga

SEQ ID NO: 2364104 - RNA, 16 nt, Human
aggagaaccaaaucug

SEQ ID NO: 2364105 - RNA, 19 nt, Human
aggagaggggcagaacagc

SEQ ID NO: 2364106 - RNA, 18 nt, Human
aggagaggggcagaacag

SEQ ID NO: 2364107 - RNA, 13 nt, Human
aggagaggggcag

SEQ ID NO: 2364108 - RNA, 16 nt, Human
aggagaggagagccag

SEQ ID NO: 2364109 - RNA, 17 nt, Human
aggagaggagagccaga

SEQ ID NO: 2364110 - RNA, 18 nt, Human
aggagaggggcacagggu

SEQ ID NO: 2364111 - RNA, 16 nt, Human
aggagaggggcacagg

SEQ ID NO: 2364112 - RNA, 14 nt, Human
aggagaggggcaca

SEQ ID NO: 2364113 - RNA, 12 nt, Human
aggagaggaaag

SEQ ID NO: 2364114 - RNA, 13 nt, Human
aggagaggagaga

SEQ ID NO: 2364115 - RNA, 15 nt, Human
aggagaggaaaagua

SEQ ID NO: 2364116 - RNA, 20 nt, Human
aggagaggaaaaguaaggug

SEQ ID NO: 2364117 - RNA, 14 nt, Human
aggagaggagagag

SEQ ID NO: 2364118 - RNA, 15 nt, Human
aggagaggagagagg

SEQ ID NO: 2364119 - RNA, 16 nt, Human
aggagaggagagaggc

SEQ ID NO: 2364120 - RNA, 17 nt, Human
aggagaggagagaggca

SEQ ID NO: 2364121 - RNA, 18 nt, Human
aggagaggagagaggcag

SEQ ID NO: 2364122 - RNA, 13 nt, Human
aggagaggagagc

SEQ ID NO: 2364123 - RNA, 14 nt, Human
aggagaggagagcc

SEQ ID NO: 2364124 - RNA, 15 nt, Human
aggagaggagagcca

SEQ ID NO: 2364125 - RNA, 15 nt, Human
aggagagcuagcagc

SEQ ID NO: 2364126 - RNA, 15 nt, Human
aggagaagccaggaa

SEQ ID NO: 2364127 - RNA, 14 nt, Human
aggagaagccagga

SEQ ID NO: 2364128 - RNA, 22 nt, Human
aggaccacuccuguacacugaa

SEQ ID NO: 2364129 - RNA, 16 nt, Human
aggaccacuccuguac

SEQ ID NO: 2364130 - RNA, 12 nt, Human
aggaccacuccu

SEQ ID NO: 2364131 - RNA, 12 nt, Human
aggaccagcuca

SEQ ID NO: 2364132 - RNA, 17 nt, Human
aggaccaagcaucuugg

SEQ ID NO: 2364133 - RNA, 19 nt, Human
aggaccaagcaucuugggg

SEQ ID NO: 2364134 - RNA, 13 nt, Human
aggaccccucacc

SEQ ID NO: 2364135 - RNA, 17 nt, Human
aggacccccuuccccua

SEQ ID NO: 2364136 - RNA, 15 nt, Human
aggacccccuucccc

SEQ ID NO: 2364137 - RNA, 16 nt, Human
aggacccccuuccccu

SEQ ID NO: 2364138 - RNA, 13 nt, Human
aggacccccuucc

SEQ ID NO: 2364139 - RNA, 20 nt, Human
aggaccccuccaugugggcu

SEQ ID NO: 2364140 - RNA, 18 nt, Human
aggaccagcucaggacag

SEQ ID NO: 2364141 - RNA, 15 nt, Human
aggaccagcucagga

SEQ ID NO: 2364142 - RNA, 14 nt, Human
aggaccagcucagg

SEQ ID NO: 2364143 - RNA, 13 nt, Human
aggaccagcucag

SEQ ID NO: 2364144 - RNA, 23 nt, Human
aggaccagcucaggacagaugcc

SEQ ID NO: 2364145 - RNA, 20 nt, Human
aggaacgguaaauuucugug

SEQ ID NO: 2364146 - RNA, 13 nt, Human
aggaacucccagc

SEQ ID NO: 2364147 - RNA, 14 nt, Human
aggaacucccagca

SEQ ID NO: 2364148 - RNA, 23 nt, Human
aggaacucccagcaacacaagcu

SEQ ID NO: 2364149 - RNA, 13 nt, Human
aggaacucuggcu

SEQ ID NO: 2364150 - RNA, 16 nt, Human
aggaacucuggcuucc

SEQ ID NO: 2364151 - RNA, 18 nt, Human
aggaacucuggcuuccag

SEQ ID NO: 2364152 - RNA, 15 nt, Human
aggaacuacugagga

SEQ ID NO: 2364153 - RNA, 16 nt, Human
aggaacugcugggcuu

SEQ ID NO: 2364154 - RNA, 21 nt, Human
aggaacucuggcuuccaggua

SEQ ID NO: 2364155 - RNA, 19 nt, Human
aggaacucuggcuuccagg

SEQ ID NO: 2364156 - RNA, 16 nt, Human
aggauucuaugaggca

SEQ ID NO: 2364157 - RNA, 15 nt, Human
aggauucuaugaggc

SEQ ID NO: 2364158 - RNA, 13 nt, Human
aggauucuaugag

SEQ ID NO: 2364159 - RNA, 12 nt, Human
aggauucuuccu

SEQ ID NO: 2364160 - RNA, 16 nt, Human
aggauucuuccucccu

SEQ ID NO: 2364161 - RNA, 17 nt, Human
aggaggggauagagaga

SEQ ID NO: 2364162 - RNA, 19 nt, Human
aggagaggagagccagaga

SEQ ID NO: 2364163 - RNA, 13 nt, Human
aggaggggccgcu

SEQ ID NO: 2364164 - RNA, 20 nt, Human
aggaggggcccguugucucc

SEQ ID NO: 2364165 - RNA, 16 nt, Human
aggaggggcuguaaaa

SEQ ID NO: 2364166 - RNA, 17 nt, Human
aggagggucaggaagga

SEQ ID NO: 2364167 - RNA, 14 nt, Human
aggagggucaggaa

SEQ ID NO: 2364168 - RNA, 17 nt, Human
aggauguugaaaaaguu

SEQ ID NO: 2364169 - RNA, 20 nt, Human
aggauguucugggacacagu

SEQ ID NO: 2364170 - RNA, 14 nt, Human
aggauguugaaaaa

SEQ ID NO: 2364171 - RNA, 14 nt, Human
aggcacugcugccc

SEQ ID NO: 2364172 - RNA, 16 nt, Human
aggcacugcugcccag

SEQ ID NO: 2364173 - RNA, 22 nt, Human
aggcacugcugcccagccucca

SEQ ID NO: 2364174 - RNA, 14 nt, Human
aggcacugccugau

SEQ ID NO: 2364175 - RNA, 22 nt, Human
aggcagaagaauugaacccagg

SEQ ID NO: 2364176 - RNA, 23 nt, Human
aggcacugggggcagcgggggcc

SEQ ID NO: 2364177 - RNA, 23 nt, Human
aggcagaagaauugaacccagga

SEQ ID NO: 2364178 - RNA, 20 nt, Human
aggcagaauccuggcccucu

SEQ ID NO: 2364179 - RNA, 21 nt, Human
aggcagaauccuggcccucug

SEQ ID NO: 2364180 - RNA, 11 nt, Human
aggcagacaca

SEQ ID NO: 2364181 - RNA, 14 nt, Human
aggcagacacaggg

SEQ ID NO: 2364182 - RNA, 15 nt, Human
aggcagacacaggga

SEQ ID NO: 2364183 - RNA, 21 nt, Human
aggcagacacagggacuugaa

SEQ ID NO: 2364184 - RNA, 13 nt, Human
aggcacugccuga

SEQ ID NO: 2364185 - RNA, 15 nt, Human
agcuccucauccagg

SEQ ID NO: 2364186 - RNA, 18 nt, Human
agcuccucauccagggcu

SEQ ID NO: 2364187 - RNA, 12 nt, Human
agcuccucccac

SEQ ID NO: 2364188 - RNA, 19 nt, Human
agcuccucauccagggcuc

SEQ ID NO: 2364189 - RNA, 21 nt, Human
agcuccucauccagggcucug

SEQ ID NO: 2364190 - RNA, 16 nt, Human
agcuccucaacucacc

SEQ ID NO: 2364191 - RNA, 23 nt, Human
agcuccucaacucaccuaauguu

SEQ ID NO: 2364192 - RNA, 17 nt, Human
agcuccuccucccugca

SEQ ID NO: 2364193 - RNA, 16 nt, Human
agcuccuccucccugc

SEQ ID NO: 2364194 - RNA, 15 nt, Human
agcuccuccucccug

SEQ ID NO: 2364195 - RNA, 14 nt, Human
agcuccuccucccu

SEQ ID NO: 2364196 - RNA, 13 nt, Human
agcuccuccuccc

SEQ ID NO: 2364197 - RNA, 22 nt, Human
agcuccuccgugcuuccucagu

SEQ ID NO: 2364198 - RNA, 20 nt, Human
agcuccucccuuguucucua

SEQ ID NO: 2364199 - RNA, 20 nt, Human
agcuccuccgugcuuccuca

SEQ ID NO: 2364200 - RNA, 16 nt, Human
agcuccucccuuguuc

SEQ ID NO: 2364201 - RNA, 20 nt, Human
agcuccuggucuugagaugu

SEQ ID NO: 2364202 - RNA, 22 nt, Human
agcuccuggucuugagaugucu

SEQ ID NO: 2364203 - RNA, 11 nt, Human
agcuccuguaa

SEQ ID NO: 2364204 - RNA, 23 nt, Human
agcuccugcuccacagccauccc

SEQ ID NO: 2364205 - RNA, 13 nt, Human
agcuccucuuccu

SEQ ID NO: 2364206 - RNA, 20 nt, Human
agcuccucugggcaggaccu

SEQ ID NO: 2364207 - RNA, 19 nt, Human
agcuccucugggcaggacc

SEQ ID NO: 2364208 - RNA, 17 nt, Human
agcuccucugggcagga

SEQ ID NO: 2364209 - RNA, 21 nt, Human
agcuccuccucccugcaucug

SEQ ID NO: 2364210 - RNA, 23 nt, Human
agcuccuccucccugcaucugac

SEQ ID NO: 2364211 - RNA, 14 nt, Human
agcugacacaaacc

SEQ ID NO: 2364212 - RNA, 12 nt, Human
agcuccuguccu

SEQ ID NO: 2364213 - RNA, 14 nt, Human
agcuccuguccucc

SEQ ID NO: 2364214 - RNA, 13 nt, Human
agcuccuguccuc

SEQ ID NO: 2364215 - RNA, 19 nt, Human
agcugacacaaaccugccu

SEQ ID NO: 2364216 - RNA, 20 nt, Human
agcugacacaaaccugccug

SEQ ID NO: 2364217 - RNA, 21 nt, Human
agcugacacaaaccugccugg

SEQ ID NO: 2364218 - RNA, 22 nt, Human
agcugacacaaaccugccuggg

SEQ ID NO: 2364219 - RNA, 23 nt, Human
agcugacacaaaccugccugggu

SEQ ID NO: 2364220 - RNA, 13 nt, Human
agcugacaguccu

SEQ ID NO: 2364221 - RNA, 14 nt, Human
agcugacaguccuc

SEQ ID NO: 2364222 - RNA, 21 nt, Human
agcugacaguccucuccaccu

SEQ ID NO: 2364223 - RNA, 16 nt, Human
agcugacaguccucuc

SEQ ID NO: 2364224 - RNA, 12 nt, Human
agcugacaugga

SEQ ID NO: 2364225 - RNA, 14 nt, Human
agcugacauggaaa

SEQ ID NO: 2364226 - RNA, 16 nt, Human
agcugaccacaggcag

SEQ ID NO: 2364227 - RNA, 17 nt, Human
agcugaccacaggcagu

SEQ ID NO: 2364228 - RNA, 23 nt, Human
agcugaggucucuugagggagcu

SEQ ID NO: 2364229 - RNA, 21 nt, Human
agcugaggucucuugagggag

SEQ ID NO: 2364230 - RNA, 16 nt, Human
agcugacccagccccu

SEQ ID NO: 2364231 - RNA, 23 nt, Human
agcugacccagccccuugagaaa

SEQ ID NO: 2364232 - RNA, 12 nt, Human
agcugaccucug

SEQ ID NO: 2364233 - RNA, 15 nt, Human
agcugaccucuguug

SEQ ID NO: 2364234 - RNA, 18 nt, Human
agcugaggucucuugagg

SEQ ID NO: 2364235 - RNA, 23 nt, Human
agcugaggggggccgugcccagg

SEQ ID NO: 2364236 - RNA, 13 nt, Human
agcugaggggggc

SEQ ID NO: 2364237 - RNA, 22 nt, Human
agcugaggggggccgugcccag

SEQ ID NO: 2364238 - RNA, 22 nt, Human
agcugaggccacacucagcaca

SEQ ID NO: 2364239 - RNA, 21 nt, Human
agcugaggccacacucagcac

SEQ ID NO: 2364240 - RNA, 17 nt, Human
agcugaccucuguuguc

SEQ ID NO: 2364241 - RNA, 12 nt, Human
agcugcuccccu

SEQ ID NO: 2364242 - RNA, 20 nt, Human
agcugcuccccagcagcgga

SEQ ID NO: 2364243 - RNA, 17 nt, Human
agcugcuccccagcagc

SEQ ID NO: 2364244 - RNA, 15 nt, Human
agcugauccagagca

SEQ ID NO: 2364245 - RNA, 13 nt, Human
agcugcuccccag

SEQ ID NO: 2364246 - RNA, 13 nt, Human
agcugauccagag

SEQ ID NO: 2364247 - RNA, 21 nt, Human
agcugauacaaauugcagacu

SEQ ID NO: 2364248 - RNA, 19 nt, Human
agcugcuccccucccuccu

SEQ ID NO: 2364249 - RNA, 14 nt, Human
agcugcuccccucc

SEQ ID NO: 2364250 - RNA, 13 nt, Human
agcugcuccccuc

SEQ ID NO: 2364251 - RNA, 15 nt, Human
agcugcuccccuccc

SEQ ID NO: 2364252 - RNA, 22 nt, Human
agcugcuccuagagggaggggc

SEQ ID NO: 2364253 - RNA, 20 nt, Human
agcugcuccuagagggaggg

SEQ ID NO: 2364254 - RNA, 14 nt, Human
agcugcucuauugu

SEQ ID NO: 2364255 - RNA, 23 nt, Human
agcugcucugaauuaguccuugc

SEQ ID NO: 2364256 - RNA, 19 nt, Human
agcugcuccuagagggagg

SEQ ID NO: 2364257 - RNA, 18 nt, Human
agcugcuccuagagggag

SEQ ID NO: 2364258 - RNA, 17 nt, Human
agcugcuccuagaggga

SEQ ID NO: 2364259 - RNA, 14 nt, Human
agcugcucuggaaa

SEQ ID NO: 2364260 - RNA, 16 nt, Human
agcugcucugucuucu

SEQ ID NO: 2364261 - RNA, 15 nt, Human
agcugggucaggcag

SEQ ID NO: 2364262 - RNA, 18 nt, Human
agcuggguggcacugcca

SEQ ID NO: 2364263 - RNA, 15 nt, Human
agcugcucuggaaaa

SEQ ID NO: 2364264 - RNA, 19 nt, Human
agcuggguggcacugccau

SEQ ID NO: 2364265 - RNA, 17 nt, Human
agcugggucaggcaggg

SEQ ID NO: 2364266 - RNA, 16 nt, Human
agcugggucaggcagg

SEQ ID NO: 2364267 - RNA, 17 nt, Human
agcugggugucaagagg

SEQ ID NO: 2364268 - RNA, 22 nt, Human
agcugggugucaagagggucug

SEQ ID NO: 2364269 - RNA, 18 nt, Human
agcuggugcauuacagag

SEQ ID NO: 2364270 - RNA, 17 nt, Human
agcuggugcauuacaga

SEQ ID NO: 2364271 - RNA, 14 nt, Human
agcuggugcauuac

SEQ ID NO: 2364272 - RNA, 13 nt, Human
agcuggugcauua

SEQ ID NO: 2364273 - RNA, 12 nt, Human
agcuggugcauu

SEQ ID NO: 2364274 - RNA, 10 nt, Human
agcuggugca

SEQ ID NO: 2364275 - RNA, 20 nt, Human
agcuggguggcacugccaug

SEQ ID NO: 2364276 - RNA, 18 nt, Human
agcuggugagugaugcgg

SEQ ID NO: 2364277 - RNA, 22 nt, Human
agcuggugcauuacagagagga

SEQ ID NO: 2364278 - RNA, 21 nt, Human
agcuggugcauuacagagagg

SEQ ID NO: 2364279 - RNA, 20 nt, Human
agcuggugcauuacagagag

SEQ ID NO: 2364280 - RNA, 19 nt, Human
agcuggugcauuacagaga

SEQ ID NO: 2364281 - RNA, 21 nt, Human
agcuggucccacucaguccau

SEQ ID NO: 2364282 - RNA, 19 nt, Human
agcuucucauccugcaggc

SEQ ID NO: 2364283 - RNA, 20 nt, Human
agcuucuguugcugccucau

SEQ ID NO: 2364284 - RNA, 22 nt, Human
agcuucuguugcugccucaugc

SEQ ID NO: 2364285 - RNA, 21 nt, Human
agcuucuguugcugccucaug

SEQ ID NO: 2364286 - RNA, 14 nt, Human
agcuuccuuggcuu

SEQ ID NO: 2364287 - RNA, 15 nt, Human
agcuuccuuggcuuu

SEQ ID NO: 2364288 - RNA, 23 nt, Human
agcuuccuuuguuuuuuuuuccu

SEQ ID NO: 2364289 - RNA, 14 nt, Human
agcuucgcgugaga

SEQ ID NO: 2364290 - RNA, 17 nt, Human
agcuucuaucccaggag

SEQ ID NO: 2364291 - RNA, 18 nt, Human
agcuucuaucccaggagg

SEQ ID NO: 2364292 - RNA, 17 nt, Human
agcuucuaccaugaaca

SEQ ID NO: 2364293 - RNA, 18 nt, Human
agcuucuaccaugaacag

SEQ ID NO: 2364294 - RNA, 20 nt, Human
agcuucguuuauuuucaaga

SEQ ID NO: 2364295 - RNA, 17 nt, Human
agcuucagccaggagcu

SEQ ID NO: 2364296 - RNA, 19 nt, Human
agcuucagccaggagcugg

SEQ ID NO: 2364297 - RNA, 20 nt, Human
agcuucagccaggagcuggg

SEQ ID NO: 2364298 - RNA, 11 nt, Human
agcuucagguu

SEQ ID NO: 2364299 - RNA, 19 nt, Human
agcuucaguuguuuucccg

SEQ ID NO: 2364300 - RNA, 15 nt, Human
agcuucaguuuccug

SEQ ID NO: 2364301 - RNA, 16 nt, Human
agcuucagaaguuugg

SEQ ID NO: 2364302 - RNA, 13 nt, Human
agcuucagguuau

SEQ ID NO: 2364303 - RNA, 23 nt, Human
agcuucagguuaucgaaauaaca

SEQ ID NO: 2364304 - RNA, 17 nt, Human
agcuucauauaccagca

SEQ ID NO: 2364305 - RNA, 16 nt, Human
agcuucauacuucaug

SEQ ID NO: 2364306 - RNA, 19 nt, Human
agcuuccuucugugaaagu

SEQ ID NO: 2364307 - RNA, 15 nt, Human
agcuucagccaggag

SEQ ID NO: 2364308 - RNA, 21 nt, Human
agcuucagaaguuuggcaaua

SEQ ID NO: 2364309 - RNA, 20 nt, Human
agcuucuuaauauaacugcc

SEQ ID NO: 2364310 - RNA, 21 nt, Human
agcuucuuaauauaacugccu

SEQ ID NO: 2364311 - RNA, 22 nt, Human
agcuucuuaauauaacugccuu

SEQ ID NO: 2364312 - RNA, 23 nt, Human
agcuucuuaauauaacugccuua

SEQ ID NO: 2364313 - RNA, 18 nt, Human
agcuucuuaaaugagaag

SEQ ID NO: 2364314 - RNA, 16 nt, Human
agcuucuuaaaugaga

SEQ ID NO: 2364315 - RNA, 17 nt, Human
agcuucuauuagccagu

SEQ ID NO: 2364316 - RNA, 23 nt, Human
agcuucuauuauagccacauccc

SEQ ID NO: 2364317 - RNA, 23 nt, Human
agcuucuguugcugccucaugcu

SEQ ID NO: 2364318 - RNA, 13 nt, Human
agcuuuucccuuc

SEQ ID NO: 2364319 - RNA, 17 nt, Human
agcuuuuauuguauaaa

SEQ ID NO: 2364320 - RNA, 15 nt, Human
agcuuuuauuguaua

SEQ ID NO: 2364321 - RNA, 21 nt, Human
agcuuuuaugugaaacauguu

SEQ ID NO: 2364322 - RNA, 19 nt, Human
agcuuuuauuguauaaacu

SEQ ID NO: 2364323 - RNA, 16 nt, Human
agcuuuucccuucuuu

SEQ ID NO: 2364324 - RNA, 14 nt, Human
aggaaaaacagguc

SEQ ID NO: 2364325 - RNA, 15 nt, Human
agcuuuucccuuuuu

SEQ ID NO: 2364326 - RNA, 13 nt, Human
aggaaaaacugau

SEQ ID NO: 2364327 - RNA, 15 nt, Human
aggaaaaacugauuu

SEQ ID NO: 2364328 - RNA, 16 nt, Human
aggaaaucucacccca

SEQ ID NO: 2364329 - RNA, 19 nt, Human
aggaaaugaaaaugucuug

SEQ ID NO: 2364330 - RNA, 13 nt, Human
aggaaaugaaugu

SEQ ID NO: 2364331 - RNA, 14 nt, Human
aggaaaugaaugug

SEQ ID NO: 2364332 - RNA, 15 nt, Human
aggaaaugaaugugu

SEQ ID NO: 2364333 - RNA, 17 nt, Human
aggaaaugaaugugugu

SEQ ID NO: 2364334 - RNA, 20 nt, Human
aggaaauggcuguggagugu

SEQ ID NO: 2364335 - RNA, 16 nt, Human
aggaacgguaaauuuc

SEQ ID NO: 2364336 - RNA, 22 nt, Human
aggaacguaaucguguccccua

SEQ ID NO: 2364337 - RNA, 18 nt, Human
aggaaauggaauacugaa

SEQ ID NO: 2364338 - RNA, 14 nt, Human
aggaaaucucaccc

SEQ ID NO: 2364339 - RNA, 13 nt, Human
aggaaaaaugugu

SEQ ID NO: 2364340 - RNA, 14 nt, Human
aggaaaaaugugua

SEQ ID NO: 2364341 - RNA, 17 nt, Human
aggaaauccaggguggu

SEQ ID NO: 2364342 - RNA, 15 nt, Human
aggaaauccagggug

SEQ ID NO: 2364343 - RNA, 17 nt, Human
aggaaaaagcacaagaa

SEQ ID NO: 2364344 - RNA, 18 nt, Human
agcuuuucccaaaagccc

SEQ ID NO: 2364345 - RNA, 15 nt, Human
aggaaaaagcacaag

SEQ ID NO: 2364346 - RNA, 18 nt, Human
aggaaaaagcacaagaag

SEQ ID NO: 2364347 - RNA, 22 nt, Human
agcuguaguagcccuuucugug

SEQ ID NO: 2364348 - RNA, 20 nt, Human
agcuguaggugugcgggacc

SEQ ID NO: 2364349 - RNA, 19 nt, Human
agcuguacuucgucuucua

SEQ ID NO: 2364350 - RNA, 21 nt, Human
agcuguacuucgucuucuaau

SEQ ID NO: 2364351 - RNA, 20 nt, Human
agcuguaguagcccuuucug

SEQ ID NO: 2364352 - RNA, 21 nt, Human
agcuguaguagcccuuucugu

SEQ ID NO: 2364353 - RNA, 23 nt, Human
agcuguaguagcccuuucugugu

SEQ ID NO: 2364354 - RNA, 14 nt, Human
agcuguaugauucc

SEQ ID NO: 2364355 - RNA, 23 nt, Human
agcuguaagaagagacugggaag

SEQ ID NO: 2364356 - RNA, 22 nt, Human
agcuguaagaagagacugggaa

SEQ ID NO: 2364357 - RNA, 14 nt, Human
agcuggugcccgga

SEQ ID NO: 2364358 - RNA, 17 nt, Human
agcuguaaggcaugaag

SEQ ID NO: 2364359 - RNA, 13 nt, Human
agcuguaaggcau

SEQ ID NO: 2364360 - RNA, 19 nt, Human
agcuguaaggcaugaagga

SEQ ID NO: 2364361 - RNA, 18 nt, Human
agcuguaaggcaugaagg

SEQ ID NO: 2364362 - RNA, 13 nt, Human
agcuguacaaaua

SEQ ID NO: 2364363 - RNA, 17 nt, Human
agcuguacaaauauaag

SEQ ID NO: 2364364 - RNA, 22 nt, Human
agcuguacaaauauaagaauaa

SEQ ID NO: 2364365 - RNA, 23 nt, Human
agcuguacaaauauaagaauaaa

SEQ ID NO: 2364366 - RNA, 14 nt, Human
agggcacacacugu

SEQ ID NO: 2364367 - RNA, 17 nt, Human
agggcacaccgggcacu

SEQ ID NO: 2364368 - RNA, 15 nt, Human
agggccuggccugag

SEQ ID NO: 2364369 - RNA, 16 nt, Human
agggccuggccugagc

SEQ ID NO: 2364370 - RNA, 17 nt, Human
agggccuggccugagcu

SEQ ID NO: 2364371 - RNA, 20 nt, Human
agggcacaccgggcacucag

SEQ ID NO: 2364372 - RNA, 21 nt, Human
agggcacaccgggcacucaga

SEQ ID NO: 2364373 - RNA, 22 nt, Human
agggcacagaaaauggaagaca

SEQ ID NO: 2364374 - RNA, 12 nt, Human
aggggcagcccu

SEQ ID NO: 2364375 - RNA, 13 nt, Human
aggggcagcccuu

SEQ ID NO: 2364376 - RNA, 16 nt, Human
aggggcagcccuugcu

SEQ ID NO: 2364377 - RNA, 17 nt, Human
aggggcagaaaaacucu

SEQ ID NO: 2364378 - RNA, 19 nt, Human
aggggcacuucauugagag

SEQ ID NO: 2364379 - RNA, 19 nt, Human
aggggauugaagcccucca

SEQ ID NO: 2364380 - RNA, 14 nt, Human
aggggcagaacagc

SEQ ID NO: 2364381 - RNA, 15 nt, Human
aggggcacagggucu

SEQ ID NO: 2364382 - RNA, 14 nt, Human
aggggcccguggga

SEQ ID NO: 2364383 - RNA, 23 nt, Human
aggggcccggccagccaugucug

SEQ ID NO: 2364384 - RNA, 21 nt, Human
aggggcccggccagccauguc

SEQ ID NO: 2364385 - RNA, 19 nt, Human
aggggcccggccagccaug

SEQ ID NO: 2364386 - RNA, 17 nt, Human
aggggcccggccagcca

SEQ ID NO: 2364387 - RNA, 15 nt, Human
aggggcccggccagc

SEQ ID NO: 2364388 - RNA, 13 nt, Human
aggggcccggcca

SEQ ID NO: 2364389 - RNA, 20 nt, Human
aggggcccgcuugccucggc

SEQ ID NO: 2364390 - RNA, 14 nt, Human
aggggcagcugacc

SEQ ID NO: 2364391 - RNA, 15 nt, Human
aggggcagcugacca

SEQ ID NO: 2364392 - RNA, 11 nt, Human
aggggcagcuu

SEQ ID NO: 2364393 - RNA, 14 nt, Human
aggggcagcuucua

SEQ ID NO: 2364394 - RNA, 16 nt, Human
aggggcccgcuugccu

SEQ ID NO: 2364395 - RNA, 19 nt, Human
aggggcccgcuugccucgg

SEQ ID NO: 2364396 - RNA, 12 nt, Human
aggggcccuggu

SEQ ID NO: 2364397 - RNA, 20 nt, Human
aggggcccguugucucccug

SEQ ID NO: 2364398 - RNA, 21 nt, Human
aggggcccguugucucccugg

SEQ ID NO: 2364399 - RNA, 22 nt, Human
aggggccgcugccacccaccuc

SEQ ID NO: 2364400 - RNA, 16 nt, Human
aggggccgcugccacc

SEQ ID NO: 2364401 - RNA, 15 nt, Human
aggggccgcugccac

SEQ ID NO: 2364402 - RNA, 14 nt, Human
aggggaugggaggu

SEQ ID NO: 2364403 - RNA, 15 nt, Human
agggcgugacucacc

SEQ ID NO: 2364404 - RNA, 17 nt, Human
aggggauauaggagagg

SEQ ID NO: 2364405 - RNA, 18 nt, Human
aggggauauaggagagga

SEQ ID NO: 2364406 - RNA, 22 nt, Human
aggggauguauccaugggggca

SEQ ID NO: 2364407 - RNA, 19 nt, Human
aggggauguauccaugggg

SEQ ID NO: 2364408 - RNA, 18 nt, Human
aggggauuaauaugaaaa

SEQ ID NO: 2364409 - RNA, 17 nt, Human
aggggauugaagcccuc

SEQ ID NO: 2364410 - RNA, 16 nt, Human
agggcgugacucaccc

SEQ ID NO: 2364411 - RNA, 21 nt, Human
aggggauagagagagaccacu

SEQ ID NO: 2364412 - RNA, 19 nt, Human
agggcgggaggauguucug

SEQ ID NO: 2364413 - RNA, 13 nt, Human
agggcggcacuca

SEQ ID NO: 2364414 - RNA, 19 nt, Human
agggcggcaggggccugga

SEQ ID NO: 2364415 - RNA, 23 nt, Human
agggcggcaggggccuggagauc

SEQ ID NO: 2364416 - RNA, 18 nt, Human
agggccuggccugagcug

SEQ ID NO: 2364417 - RNA, 13 nt, Human
agggcggcagggg

SEQ ID NO: 2364418 - RNA, 15 nt, Human
agggcggcaggggcc

SEQ ID NO: 2364419 - RNA, 16 nt, Human
agggcggcaggggccu

SEQ ID NO: 2364420 - RNA, 18 nt, Human
agggcggcaggggccugg

SEQ ID NO: 2364421 - RNA, 17 nt, Human
agggacgcuacccggga

SEQ ID NO: 2364422 - RNA, 21 nt, Human
agggacgcuacccgggaaggg

SEQ ID NO: 2364423 - RNA, 20 nt, Human
agggacucaucauuuccauu

SEQ ID NO: 2364424 - RNA, 17 nt, Human
agggacuaggagcacug

SEQ ID NO: 2364425 - RNA, 20 nt, Human
agggacuaugaaugggcaaa

SEQ ID NO: 2364426 - RNA, 20 nt, Human
agggacucaauuucucccca

SEQ ID NO: 2364427 - RNA, 14 nt, Human
agggacucugaagc

SEQ ID NO: 2364428 - RNA, 19 nt, Human
agggacucugaagccucug

SEQ ID NO: 2364429 - RNA, 12 nt, Human
agggacagaggg

SEQ ID NO: 2364430 - RNA, 22 nt, Human
agggacagaggccccagccucc

SEQ ID NO: 2364431 - RNA, 21 nt, Human
agggacagaggccccagccuc

SEQ ID NO: 2364432 - RNA, 20 nt, Human
agggacagaggccccagccu

SEQ ID NO: 2364433 - RNA, 17 nt, Human
agggacagaggccccag

SEQ ID NO: 2364434 - RNA, 13 nt, Human
agggacagagggg

SEQ ID NO: 2364435 - RNA, 20 nt, Human
agggacagaggggguggccu

SEQ ID NO: 2364436 - RNA, 18 nt, Human
aggcugccucucccauca

SEQ ID NO: 2364437 - RNA, 20 nt, Human
aggcugcccccggcccccug

SEQ ID NO: 2364438 - RNA, 22 nt, Human
aggcugcccccggcccccuggu

SEQ ID NO: 2364439 - RNA, 21 nt, Human
aggcugcagaaggccaagaau

SEQ ID NO: 2364440 - RNA, 12 nt, Human
aggcugcccccg

SEQ ID NO: 2364441 - RNA, 15 nt, Human
aggcugcccccggcc

SEQ ID NO: 2364442 - RNA, 18 nt, Human
aggcugugggccucaagg

SEQ ID NO: 2364443 - RNA, 15 nt, Human
aggcugugggccuca

SEQ ID NO: 2364444 - RNA, 16 nt, Human
aggcuguggucacagc

SEQ ID NO: 2364445 - RNA, 23 nt, Human
aggcugucuucucaggcucugcc

SEQ ID NO: 2364446 - RNA, 22 nt, Human
aggcugucuucucaggcucugc

SEQ ID NO: 2364447 - RNA, 21 nt, Human
aggcugucuucucaggcucug

SEQ ID NO: 2364448 - RNA, 20 nt, Human
aggcugucuucucaggcucu

SEQ ID NO: 2364449 - RNA, 13 nt, Human
aggcugugcuccc

SEQ ID NO: 2364450 - RNA, 14 nt, Human
aggcugugcucccu

SEQ ID NO: 2364451 - RNA, 20 nt, Human
aggcugugcucccugguucu

SEQ ID NO: 2364452 - RNA, 24 nt, Human
aggcugugcucccugguucugaug

SEQ ID NO: 2364453 - RNA, 15 nt, Human
aggcugcagcgagcu

SEQ ID NO: 2364454 - RNA, 18 nt, Human
aggcugcagaaggccaag

SEQ ID NO: 2364455 - RNA, 20 nt, Human
aggcugcagaaggccaagaa

SEQ ID NO: 2364456 - RNA, 18 nt, Human
aggcugcagccaggccac

SEQ ID NO: 2364457 - RNA, 22 nt, Human
aggcugcaagguuuaggcuggu

SEQ ID NO: 2364458 - RNA, 17 nt, Human
aggcugcagaaggccaa

SEQ ID NO: 2364459 - RNA, 21 nt, Human
aggcugcaagguuuaggcugg

SEQ ID NO: 2364460 - RNA, 23 nt, Human
aggcugaugccaaguuguuugag

SEQ ID NO: 2364461 - RNA, 21 nt, Human
aggcugaugucaauuucugug

SEQ ID NO: 2364462 - RNA, 22 nt, Human
aggcugaggggaggaucacugg

SEQ ID NO: 2364463 - RNA, 14 nt, Human
aggcugaggugucu

SEQ ID NO: 2364464 - RNA, 19 nt, Human
aggcugagguugcgccacu

SEQ ID NO: 2364465 - RNA, 17 nt, Human
aggcugauaauuccagu

SEQ ID NO: 2364466 - RNA, 20 nt, Human
aggcugauaauuccaguggu

SEQ ID NO: 2364467 - RNA, 17 nt, Human
aggcugaaagaggccaa

SEQ ID NO: 2364468 - RNA, 16 nt, Human
aggcugaaagaggcca

SEQ ID NO: 2364469 - RNA, 14 nt, Human
aggcugaccaagag

SEQ ID NO: 2364470 - RNA, 17 nt, Human
aggcugaccaagagaga

SEQ ID NO: 2364471 - RNA, 15 nt, Human
aggcugaccaagaga

SEQ ID NO: 2364472 - RNA, 18 nt, Human
aggcugaggcuggcacag

SEQ ID NO: 2364473 - RNA, 21 nt, Human
aggcugaacuuguuuucuggg

SEQ ID NO: 2364474 - RNA, 20 nt, Human
aggcugaacuuguuuucugg

SEQ ID NO: 2364475 - RNA, 13 nt, Human
aggcugaaagagg

SEQ ID NO: 2364476 - RNA, 23 nt, Human
aggcucuuuggggucagccaggg

SEQ ID NO: 2364477 - RNA, 21 nt, Human
aggcucuuuggggucagccag

SEQ ID NO: 2364478 - RNA, 22 nt, Human
aggcucuuuggggucagccagg

SEQ ID NO: 2364479 - RNA, 20 nt, Human
aggcucuuucugggccaagu

SEQ ID NO: 2364480 - RNA, 18 nt, Human
aggcucuuucugggccaa

SEQ ID NO: 2364481 - RNA, 15 nt, Human
aggcucuuucugggc

SEQ ID NO: 2364482 - RNA, 15 nt, Human
aggcucuucugacua

SEQ ID NO: 2364483 - RNA, 14 nt, Human
aggcucuucuccuu

SEQ ID NO: 2364484 - RNA, 23 nt, Human
aggcuauacuugucuuguucacc

SEQ ID NO: 2364485 - RNA, 22 nt, Human
aggcuauggacagggcaugcca

SEQ ID NO: 2364486 - RNA, 19 nt, Human
aggcuauggggauagaugu

SEQ ID NO: 2364487 - RNA, 22 nt, Human
aggcuauggggauagaugugug

SEQ ID NO: 2364488 - RNA, 21 nt, Human
aggcuauggggauagaugugu

SEQ ID NO: 2364489 - RNA, 23 nt, Human
aggcuagugugguguuuccuggc

SEQ ID NO: 2364490 - RNA, 21 nt, Human
aggcagacagcagcucaggca

SEQ ID NO: 2364491 - RNA, 20 nt, Human
aggcagacagcagcucaggc

SEQ ID NO: 2364492 - RNA, 19 nt, Human
aggcagacagcagcucagg

SEQ ID NO: 2364493 - RNA, 18 nt, Human
aggcagacagcagcucag

SEQ ID NO: 2364494 - RNA, 15 nt, Human
aggcagacagcagcu

SEQ ID NO: 2364495 - RNA, 14 nt, Human
aggcagacagcagc

SEQ ID NO: 2364496 - RNA, 13 nt, Human
aggcagacagcag

SEQ ID NO: 2364497 - RNA, 11 nt, Human
aggcagacacg

SEQ ID NO: 2364498 - RNA, 18 nt, Human
aggcagacacggaucuga

SEQ ID NO: 2364499 - RNA, 20 nt, Human
aggcagacacggaucugaga

SEQ ID NO: 2364500 - RNA, 14 nt, Human
agguggaagcccuc

SEQ ID NO: 2364501 - RNA, 13 nt, Human
agguggaagcccu

SEQ ID NO: 2364502 - RNA, 11 nt, Human
agguggaagcc

SEQ ID NO: 2364503 - RNA, 22 nt, Human
agguggaagaagggagaagaaa

SEQ ID NO: 2364504 - RNA, 16 nt, Human
agguggaagcccuccu

SEQ ID NO: 2364505 - RNA, 15 nt, Human
agguggaagcccucc

SEQ ID NO: 2364506 - RNA, 16 nt, Human
agguggauggccccag

SEQ ID NO: 2364507 - RNA, 23 nt, Human
agguggauggccccagcacagcu

SEQ ID NO: 2364508 - RNA, 15 nt, Human
agguggauggcccca

SEQ ID NO: 2364509 - RNA, 14 nt, Human
agguggcaaggcug

SEQ ID NO: 2364510 - RNA, 15 nt, Human
agguggcaaggcugu

SEQ ID NO: 2364511 - RNA, 16 nt, Human
agguggcaaggcugug

SEQ ID NO: 2364512 - RNA, 18 nt, Human
agguggcaaggcugugcu

SEQ ID NO: 2364513 - RNA, 18 nt, Human
agguggaaaaacaucuga

SEQ ID NO: 2364514 - RNA, 15 nt, Human
agguggaagaaggga

SEQ ID NO: 2364515 - RNA, 13 nt, Human
agguggaaaaaca

SEQ ID NO: 2364516 - RNA, 16 nt, Human
agguggaagagggcug

SEQ ID NO: 2364517 - RNA, 16 nt, Human
agguggaagaagggag

SEQ ID NO: 2364518 - RNA, 17 nt, Human
agguggaagaagggaga

SEQ ID NO: 2364519 - RNA, 18 nt, Human
agguggaagaagggagaa

SEQ ID NO: 2364520 - RNA, 19 nt, Human
agguggaagaagggagaag

SEQ ID NO: 2364521 - RNA, 15 nt, Human
aggugcugggaggga

SEQ ID NO: 2364522 - RNA, 20 nt, Human
aggugcuuaagcagaagcau

SEQ ID NO: 2364523 - RNA, 21 nt, Human
aggugcuucaggauaccauau

SEQ ID NO: 2364524 - RNA, 19 nt, Human
aggugcuuaagcagaagca

SEQ ID NO: 2364525 - RNA, 23 nt, Human
aggugcuguuauccauggggaag

SEQ ID NO: 2364526 - RNA, 13 nt, Human
aggugcugggagg

SEQ ID NO: 2364527 - RNA, 12 nt, Human
aggugcugggag

SEQ ID NO: 2364528 - RNA, 19 nt, Human
aggugcuggaggugggagc

SEQ ID NO: 2364529 - RNA, 23 nt, Human
aggugcuggaggugggagcagga

SEQ ID NO: 2364530 - RNA, 14 nt, Human
aggugcuggaggug

SEQ ID NO: 2364531 - RNA, 17 nt, Human
aggugcuggagguggga

SEQ ID NO: 2364532 - RNA, 15 nt, Human
agguggaaauaaacu

SEQ ID NO: 2364533 - RNA, 14 nt, Human
aggucgaggcagga

SEQ ID NO: 2364534 - RNA, 21 nt, Human
aggucgaccccaaagccccuu

SEQ ID NO: 2364535 - RNA, 17 nt, Human
agguccuugcccuuugu

SEQ ID NO: 2364536 - RNA, 12 nt, Human
agguccuugccc

SEQ ID NO: 2364537 - RNA, 20 nt, Human
agguccugcagucuggcuga

SEQ ID NO: 2364538 - RNA, 21 nt, Human
agguccugcagucuggcugag

SEQ ID NO: 2364539 - RNA, 16 nt, Human
agguccuucugcugga

SEQ ID NO: 2364540 - RNA, 16 nt, Human
aggugcugccauccag

SEQ ID NO: 2364541 - RNA, 17 nt, Human
aggucggaggcuuggga

SEQ ID NO: 2364542 - RNA, 16 nt, Human
aggugcugacggccag

SEQ ID NO: 2364543 - RNA, 20 nt, Human
aggugcugacggccagggag

SEQ ID NO: 2364544 - RNA, 17 nt, Human
aggugcugacggccagg

SEQ ID NO: 2364545 - RNA, 17 nt, Human
aggugcugccauccagg

SEQ ID NO: 2364546 - RNA, 22 nt, Human
aggugcugcuacccucccugcu

SEQ ID NO: 2364547 - RNA, 23 nt, Human
aggugcugcuacccucccugcug

SEQ ID NO: 2364548 - RNA, 21 nt, Human
aggugcugagcaaagggaaca

SEQ ID NO: 2364549 - RNA, 20 nt, Human
aggugcugcuacccucccug

SEQ ID NO: 2364550 - RNA, 21 nt, Human
aggugcugcuacccucccugc

SEQ ID NO: 2364551 - RNA, 14 nt, Human
agguggcagcccug

SEQ ID NO: 2364552 - RNA, 13 nt, Human
agguggcagcccu

SEQ ID NO: 2364553 - RNA, 17 nt, Human
agguggcacuuuuucau

SEQ ID NO: 2364554 - RNA, 18 nt, Human
agguggcacuuuuucauu

SEQ ID NO: 2364555 - RNA, 19 nt, Human
agguggcacuuuuucauuu

SEQ ID NO: 2364556 - RNA, 23 nt, Human
agguggcacuuuuucauuugccu

SEQ ID NO: 2364557 - RNA, 15 nt, Human
agguggcagcccugu

SEQ ID NO: 2364558 - RNA, 14 nt, Human
agguggcaggacca

SEQ ID NO: 2364559 - RNA, 17 nt, Human
agguggcaggaccagga

SEQ ID NO: 2364560 - RNA, 22 nt, Human
agguggcaucagugucuuucca

SEQ ID NO: 2364561 - RNA, 15 nt, Human
agguuaauaaaguaa

SEQ ID NO: 2364562 - RNA, 19 nt, Human
agguggcaggaccaggacu

SEQ ID NO: 2364563 - RNA, 13 nt, Human
agguuaauauuua

SEQ ID NO: 2364564 - RNA, 23 nt, Human
agguggcaucagugucuuuccac

SEQ ID NO: 2364565 - RNA, 14 nt, Human
agguuaauguucau

SEQ ID NO: 2364566 - RNA, 15 nt, Human
agguuaauuccaauu

SEQ ID NO: 2364567 - RNA, 22 nt, Human
agguuaauuccaauuauaugag

SEQ ID NO: 2364568 - RNA, 17 nt, Human
agguucaaagauauuuu

SEQ ID NO: 2364569 - RNA, 14 nt, Human
agguuacaacagau

SEQ ID NO: 2364570 - RNA, 16 nt, Human
agguuaauauuuaaga

SEQ ID NO: 2364571 - RNA, 15 nt, Human
agguuacaacagauu

SEQ ID NO: 2364572 - RNA, 21 nt, Human
agguucaugccaccauggcca

SEQ ID NO: 2364573 - RNA, 15 nt, Human
agguucagccaaggu

SEQ ID NO: 2364574 - RNA, 19 nt, Human
agguucagccaagguuuua

SEQ ID NO: 2364575 - RNA, 17 nt, Human
agguucaugcaaacuuu

SEQ ID NO: 2364576 - RNA, 16 nt, Human
agguucacuaaagcag

SEQ ID NO: 2364577 - RNA, 13 nt, Human
agguucagccaag

SEQ ID NO: 2364578 - RNA, 16 nt, Human
agguucacgugcagcu

SEQ ID NO: 2364579 - RNA, 13 nt, Human
agguucagcuugu

SEQ ID NO: 2364580 - RNA, 14 nt, Human
agguucccaagcuc

SEQ ID NO: 2364581 - RNA, 17 nt, Human
agguuccaacuguauau

SEQ ID NO: 2364582 - RNA, 18 nt, Human
agguuccaacuguauaua

SEQ ID NO: 2364583 - RNA, 16 nt, Human
agguucccaagcucag

SEQ ID NO: 2364584 - RNA, 15 nt, Human
agguucccaagcuca

SEQ ID NO: 2364585 - RNA, 16 nt, Human
agguucccagagauga

SEQ ID NO: 2364586 - RNA, 11 nt, Human
agguucuaaaa

SEQ ID NO: 2364587 - RNA, 17 nt, Human
agguuccucugccugcc

SEQ ID NO: 2364588 - RNA, 18 nt, Human
agguuccucugccugccc

SEQ ID NO: 2364589 - RNA, 19 nt, Human
agguuccucugccugcccc

SEQ ID NO: 2364590 - RNA, 20 nt, Human
agguuccucugccugccccg

SEQ ID NO: 2364591 - RNA, 13 nt, Human
agguuccucugcc

SEQ ID NO: 2364592 - RNA, 16 nt, Human
agguucccucugagaa

SEQ ID NO: 2364593 - RNA, 14 nt, Human
agguuccucugccu

SEQ ID NO: 2364594 - RNA, 15 nt, Human
agguuccucugccug

SEQ ID NO: 2364595 - RNA, 16 nt, Human
agguuccucugccugc

SEQ ID NO: 2364596 - RNA, 21 nt, Human
agguaccacugauuuggagau

SEQ ID NO: 2364597 - RNA, 22 nt, Human
agguaccagcaauauguaaaua

SEQ ID NO: 2364598 - RNA, 13 nt, Human
agguaccagcugc

SEQ ID NO: 2364599 - RNA, 16 nt, Human
agguaccagcugcgcu

SEQ ID NO: 2364600 - RNA, 21 nt, Human
agguaauccaagauauuuuaa

SEQ ID NO: 2364601 - RNA, 17 nt, Human
aggucccuaauaaagcu

SEQ ID NO: 2364602 - RNA, 17 nt, Human
agguaccccuuucuggc

SEQ ID NO: 2364603 - RNA, 21 nt, Human
agguaccccuuucuggcucuc

SEQ ID NO: 2364604 - RNA, 23 nt, Human
agguaccagcugcgcuugcuuuu

SEQ ID NO: 2364605 - RNA, 18 nt, Human
aggucccuaauaaagcug

SEQ ID NO: 2364606 - RNA, 19 nt, Human
aggucccuaauaaagcugu

SEQ ID NO: 2364607 - RNA, 20 nt, Human
aggucccuaauaaagcugug

SEQ ID NO: 2364608 - RNA, 16 nt, Human
agguaccuuucacaua

SEQ ID NO: 2364609 - RNA, 19 nt, Human
agguaccuuucacauagag

SEQ ID NO: 2364610 - RNA, 18 nt, Human
agguaaucgaccugccuc

SEQ ID NO: 2364611 - RNA, 17 nt, Human
agguaaucgaccugccu

SEQ ID NO: 2364612 - RNA, 18 nt, Human
agguaauauaaaaagcuu

SEQ ID NO: 2364613 - RNA, 17 nt, Human
agguaaggaauaccugu

SEQ ID NO: 2364614 - RNA, 19 nt, Human
agguaagcaggaggaggug

SEQ ID NO: 2364615 - RNA, 16 nt, Human
agguaaggugaaggug

SEQ ID NO: 2364616 - RNA, 21 nt, Human
agguaagcaggaggaggugcc

SEQ ID NO: 2364617 - RNA, 17 nt, Human
aggggccgcugccaccc

SEQ ID NO: 2364618 - RNA, 22 nt, Human
agauagaaauaaauagcuauau

SEQ ID NO: 2364619 - RNA, 18 nt, Human
agauagaaauaaauagcu

SEQ ID NO: 2364620 - RNA, 15 nt, Human
agauagaaauaaaua

SEQ ID NO: 2364621 - RNA, 11 nt, Human
agauagaaaua

SEQ ID NO: 2364622 - RNA, 13 nt, Human
agauagccaaggc

SEQ ID NO: 2364623 - RNA, 20 nt, Human
agaguuaauauauagaaggg

SEQ ID NO: 2364624 - RNA, 20 nt, Human
agaguuaagaagcuguugua

SEQ ID NO: 2364625 - RNA, 21 nt, Human
agaguuaagaagcuguuguac

SEQ ID NO: 2364626 - RNA, 22 nt, Human
agaguuaacaaugauauaugga

SEQ ID NO: 2364627 - RNA, 12 nt, Human
agaguuaagaag

SEQ ID NO: 2364628 - RNA, 13 nt, Human
agaguuaagaagc

SEQ ID NO: 2364629 - RNA, 14 nt, Human
agaguuaagaagcu

SEQ ID NO: 2364630 - RNA, 15 nt, Human
agaguuaagaagcug

SEQ ID NO: 2364631 - RNA, 16 nt, Human
agaguuaagaagcugu

SEQ ID NO: 2364632 - RNA, 17 nt, Human
agaguuaagaagcuguu

SEQ ID NO: 2364633 - RNA, 18 nt, Human
agaguuaagaagcuguug

SEQ ID NO: 2364634 - RNA, 22 nt, Human
agauacuuggggggcugaggug

SEQ ID NO: 2364635 - RNA, 12 nt, Human
agaggggcagcc

SEQ ID NO: 2364636 - RNA, 16 nt, Human
agaggggcagaacagc

SEQ ID NO: 2364637 - RNA, 15 nt, Human
agaggggcagaacag

SEQ ID NO: 2364638 - RNA, 13 nt, Human
agaggggcagccc

SEQ ID NO: 2364639 - RNA, 14 nt, Human
agaggggcagcccu

SEQ ID NO: 2364640 - RNA, 15 nt, Human
agaggggcagcccuu

SEQ ID NO: 2364641 - RNA, 16 nt, Human
agaggggcagcccuug

SEQ ID NO: 2364642 - RNA, 18 nt, Human
agaggggcagcccuugcu

SEQ ID NO: 2364643 - RNA, 19 nt, Human
agaggggcagcccuugcuu

SEQ ID NO: 2364644 - RNA, 15 nt, Human
agaggggcaggcccu

SEQ ID NO: 2364645 - RNA, 18 nt, Human
agaggggcuuucuggaga

SEQ ID NO: 2364646 - RNA, 13 nt, Human
agaggggcugucc

SEQ ID NO: 2364647 - RNA, 21 nt, Human
agaggggcugaauagcagaag

SEQ ID NO: 2364648 - RNA, 23 nt, Human
agaggguggugaccucugccuga

SEQ ID NO: 2364649 - RNA, 13 nt, Human
agaggguuccugu

SEQ ID NO: 2364650 - RNA, 16 nt, Human
agagguaaaaguguga

SEQ ID NO: 2364651 - RNA, 18 nt, Human
agagguaaaagugugagc

SEQ ID NO: 2364652 - RNA, 19 nt, Human
agagguaaaagugugagca

SEQ ID NO: 2364653 - RNA, 20 nt, Human
agagguaaaagugugagcag

SEQ ID NO: 2364654 - RNA, 22 nt, Human
agagguaaaagugugagcagug

SEQ ID NO: 2364655 - RNA, 23 nt, Human
agagguaaaagugugagcaguga

SEQ ID NO: 2364656 - RNA, 16 nt, Human
agagguaacagaacag

SEQ ID NO: 2364657 - RNA, 17 nt, Human
agagguaacagaacagc

SEQ ID NO: 2364658 - RNA, 18 nt, Human
agagguaacagaacagcu

SEQ ID NO: 2364659 - RNA, 23 nt, Human
agaguuaaauagaguauaugcac

SEQ ID NO: 2364660 - RNA, 16 nt, Human
agaguuaacaaugaua

SEQ ID NO: 2364661 - RNA, 22 nt, Human
agagguaacagaacagcuucag

SEQ ID NO: 2364662 - RNA, 20 nt, Human
agagguaacagaacagcuuc

SEQ ID NO: 2364663 - RNA, 14 nt, Human
agaggauggccagu

SEQ ID NO: 2364664 - RNA, 20 nt, Human
agaggaugagcucuacccag

SEQ ID NO: 2364665 - RNA, 22 nt, Human
agaggaugagagcccagaggua

SEQ ID NO: 2364666 - RNA, 15 nt, Human
agaggauggccagug

SEQ ID NO: 2364667 - RNA, 16 nt, Human
agaggauggccagugu

SEQ ID NO: 2364668 - RNA, 18 nt, Human
agaggauggccagugucu

SEQ ID NO: 2364669 - RNA, 20 nt, Human
agaggaugaauguaugugca

SEQ ID NO: 2364670 - RNA, 21 nt, Human
agaggaugaauguaugugcac

SEQ ID NO: 2364671 - RNA, 22 nt, Human
agaggaugaauguaugugcacu

SEQ ID NO: 2364672 - RNA, 13 nt, Human
agaggaugagagc

SEQ ID NO: 2364673 - RNA, 14 nt, Human
agaggaugagagcc

SEQ ID NO: 2364674 - RNA, 17 nt, Human
agaggaugagagcccag

SEQ ID NO: 2364675 - RNA, 18 nt, Human
agaggaugagagcccaga

SEQ ID NO: 2364676 - RNA, 18 nt, Human
agaggauuuuuuucugag

SEQ ID NO: 2364677 - RNA, 22 nt, Human
agaggauggccagugucugucc

SEQ ID NO: 2364678 - RNA, 16 nt, Human
agaggggaaaagagau

SEQ ID NO: 2364679 - RNA, 19 nt, Human
agaggauuuuuuucugagc

SEQ ID NO: 2364680 - RNA, 20 nt, Human
agaggauuuuuuucugagcg

SEQ ID NO: 2364681 - RNA, 22 nt, Human
agagggcuuccucuagaagcca

SEQ ID NO: 2364682 - RNA, 20 nt, Human
agaggggaauaauagaagaa

SEQ ID NO: 2364683 - RNA, 19 nt, Human
agaggggaauaauagaaga

SEQ ID NO: 2364684 - RNA, 20 nt, Human
agaggggacaaaacccaccu

SEQ ID NO: 2364685 - RNA, 22 nt, Human
agaggggaaaccaguguagccu

SEQ ID NO: 2364686 - RNA, 22 nt, Human
agaggggaagaguguacugggg

SEQ ID NO: 2364687 - RNA, 16 nt, Human
agaggggaagggccag

SEQ ID NO: 2364688 - RNA, 16 nt, Human
agaggggaagagacuu

SEQ ID NO: 2364689 - RNA, 22 nt, Human
agaggggaacagacuggaagca

SEQ ID NO: 2364690 - RNA, 13 nt, Human
agagggcuuccuc

SEQ ID NO: 2364691 - RNA, 17 nt, Human
agagggcuuuaauuuuu

SEQ ID NO: 2364692 - RNA, 18 nt, Human
agaggggaaaagagauga

SEQ ID NO: 2364693 - RNA, 13 nt, Human
agaggagaggggc

SEQ ID NO: 2364694 - RNA, 16 nt, Human
agaggagaggagagag

SEQ ID NO: 2364695 - RNA, 17 nt, Human
agaggagaggagagagg

SEQ ID NO: 2364696 - RNA, 21 nt, Human
agaggagagccagagaaguga

SEQ ID NO: 2364697 - RNA, 23 nt, Human
agaggagagccagagaagugaca

SEQ ID NO: 2364698 - RNA, 12 nt, Human
agaggagaggag

SEQ ID NO: 2364699 - RNA, 15 nt, Human
agaggagaggagaga

SEQ ID NO: 2364700 - RNA, 14 nt, Human
agaggaguucaaug

SEQ ID NO: 2364701 - RNA, 15 nt, Human
agaggaguucaauga

SEQ ID NO: 2364702 - RNA, 16 nt, Human
agaggaguucaaugau

SEQ ID NO: 2364703 - RNA, 17 nt, Human
agaggaguucaaugauc

SEQ ID NO: 2364704 - RNA, 18 nt, Human
agaggaguucaaugaucu

SEQ ID NO: 2364705 - RNA, 19 nt, Human
agaggaguucaaugaucua

SEQ ID NO: 2364706 - RNA, 23 nt, Human
agaggaguucaaugaucuagguu

SEQ ID NO: 2364707 - RNA, 13 nt, Human
agaggagagccag

SEQ ID NO: 2364708 - RNA, 14 nt, Human
agaggagagccaga

SEQ ID NO: 2364709 - RNA, 15 nt, Human
agaggagagccagag

SEQ ID NO: 2364710 - RNA, 16 nt, Human
agaggagagccagaga

SEQ ID NO: 2364711 - RNA, 17 nt, Human
agaggagagccagagaa

SEQ ID NO: 2364712 - RNA, 15 nt, Human
agauaguuacuauau

SEQ ID NO: 2364713 - RNA, 17 nt, Human
agauaguagcauacauu

SEQ ID NO: 2364714 - RNA, 18 nt, Human
agauaguacauaaaggug

SEQ ID NO: 2364715 - RNA, 14 nt, Human
agauaguacauaaa

SEQ ID NO: 2364716 - RNA, 15 nt, Human
agauagguaaauacc

SEQ ID NO: 2364717 - RNA, 19 nt, Human
agauaguaucuagcaauca

SEQ ID NO: 2364718 - RNA, 22 nt, Human
agauaguaucuagcaaucacaa

SEQ ID NO: 2364719 - RNA, 19 nt, Human
agauagcauugugaacuga

SEQ ID NO: 2364720 - RNA, 22 nt, Human
agauagcauugugaacugacag

SEQ ID NO: 2364721 - RNA, 14 nt, Human
agauagcauuguga

SEQ ID NO: 2364722 - RNA, 16 nt, Human
agauagcauugugaac

SEQ ID NO: 2364723 - RNA, 17 nt, Human
agauagcauugugaacu

SEQ ID NO: 2364724 - RNA, 18 nt, Human
agauagcauugugaacug

SEQ ID NO: 2364725 - RNA, 21 nt, Human
agauaggucagugcaaauacu

SEQ ID NO: 2364726 - RNA, 15 nt, Human
agauagccaaggcca

SEQ ID NO: 2364727 - RNA, 16 nt, Human
agauagccaaggccaa

SEQ ID NO: 2364728 - RNA, 14 nt, Human
agaugaccccuccc

SEQ ID NO: 2364729 - RNA, 18 nt, Human
agaucuguuuugaaggca

SEQ ID NO: 2364730 - RNA, 13 nt, Human
agaucuuaaauuu

SEQ ID NO: 2364731 - RNA, 14 nt, Human
agaucuuaaauuuu

SEQ ID NO: 2364732 - RNA, 16 nt, Human
agaucuuaaauuuugu

SEQ ID NO: 2364733 - RNA, 15 nt, Human
agaugacugaguccu

SEQ ID NO: 2364734 - RNA, 14 nt, Human
agaugacugagucc

SEQ ID NO: 2364735 - RNA, 23 nt, Human
agauggcugugccucugccuguc

SEQ ID NO: 2364736 - RNA, 14 nt, Human
agaugggaaugaag

SEQ ID NO: 2364737 - RNA, 15 nt, Human
agaugggaaugaagc

SEQ ID NO: 2364738 - RNA, 16 nt, Human
agaugggaaugaagcu

SEQ ID NO: 2364739 - RNA, 17 nt, Human
agaugggaaugaagcuu

SEQ ID NO: 2364740 - RNA, 18 nt, Human
agaugggaaugaagcuug

SEQ ID NO: 2364741 - RNA, 23 nt, Human
agaugggaaugaagcuuguguau

SEQ ID NO: 2364742 - RNA, 13 nt, Human
agaugggaaugag

SEQ ID NO: 2364743 - RNA, 18 nt, Human
agaugggaaugagguggg

SEQ ID NO: 2364744 - RNA, 13 nt, Human
agaugagcuuuuc

SEQ ID NO: 2364745 - RNA, 16 nt, Human
agaugagcuuuucuag

SEQ ID NO: 2364746 - RNA, 16 nt, Human
agaucugugccccaug

SEQ ID NO: 2364747 - RNA, 14 nt, Human
agaucugugcccca

SEQ ID NO: 2364748 - RNA, 13 nt, Human
agaucugugcccc

SEQ ID NO: 2364749 - RNA, 12 nt, Human
agaucugugccc

SEQ ID NO: 2364750 - RNA, 19 nt, Human
agaucugugccccaugccu

SEQ ID NO: 2364751 - RNA, 14 nt, Human
agaucuguuuugaa

SEQ ID NO: 2364752 - RNA, 21 nt, Human
agaucuguuuugaaggcaaaa

SEQ ID NO: 2364753 - RNA, 23 nt, Human
agaucuguccucagccuugccag

SEQ ID NO: 2364754 - RNA, 19 nt, Human
agaucuguccucagccuug

SEQ ID NO: 2364755 - RNA, 19 nt, Human
agacguguggcaauagugg

SEQ ID NO: 2364756 - RNA, 13 nt, Human
agacuaagcccug

SEQ ID NO: 2364757 - RNA, 14 nt, Human
agacuaagcccugu

SEQ ID NO: 2364758 - RNA, 15 nt, Human
agacuaagcccuguc

SEQ ID NO: 2364759 - RNA, 14 nt, Human
agacuagaauucua

SEQ ID NO: 2364760 - RNA, 17 nt, Human
agacuagaauucuagug

SEQ ID NO: 2364761 - RNA, 19 nt, Human
agacuagaauucuagugcu

SEQ ID NO: 2364762 - RNA, 14 nt, Human
agacuaauuuaaaa

SEQ ID NO: 2364763 - RNA, 23 nt, Human
agacuaagcccugucgagacacu

SEQ ID NO: 2364764 - RNA, 19 nt, Human
agacuaauuccugcccugc

SEQ ID NO: 2364765 - RNA, 15 nt, Human
agacuaauuuaaaaa

SEQ ID NO: 2364766 - RNA, 14 nt, Human
agacguguuugugu

SEQ ID NO: 2364767 - RNA, 18 nt, Human
agacgggggcagagaggg

SEQ ID NO: 2364768 - RNA, 19 nt, Human
agacggagucccaccuugg

SEQ ID NO: 2364769 - RNA, 16 nt, Human
agacggcacccaccca

SEQ ID NO: 2364770 - RNA, 14 nt, Human
agacggauugcauu

SEQ ID NO: 2364771 - RNA, 15 nt, Human
agacggagucucgcu

SEQ ID NO: 2364772 - RNA, 20 nt, Human
agacggagucucgcucuguc

SEQ ID NO: 2364773 - RNA, 20 nt, Human
agacuagaauucuagugcug

SEQ ID NO: 2364774 - RNA, 23 nt, Human
agaccaaggcgggagcaucucuu

SEQ ID NO: 2364775 - RNA, 17 nt, Human
agaccaaggcgggagca

SEQ ID NO: 2364776 - RNA, 14 nt, Human
agaccaaggcggga

SEQ ID NO: 2364777 - RNA, 16 nt, Human
agaccaagcuugucca

SEQ ID NO: 2364778 - RNA, 17 nt, Human
agaccaagacucugaaa

SEQ ID NO: 2364779 - RNA, 19 nt, Human
agacacaacaacuccuagg

SEQ ID NO: 2364780 - RNA, 13 nt, Human
agaccaagcuugu

SEQ ID NO: 2364781 - RNA, 14 nt, Human
agaccaaccugacc

SEQ ID NO: 2364782 - RNA, 21 nt, Human
agaccacaggguucaaaaugu

SEQ ID NO: 2364783 - RNA, 20 nt, Human
agaccacaggguucaaaaug

SEQ ID NO: 2364784 - RNA, 14 nt, Human
agaccacaaauagu

SEQ ID NO: 2364785 - RNA, 21 nt, Human
agaccacaaauagugcucgcu

SEQ ID NO: 2364786 - RNA, 16 nt, Human
agaccacaaaaauuga

SEQ ID NO: 2364787 - RNA, 16 nt, Human
agaccaccacuucgaa

SEQ ID NO: 2364788 - RNA, 15 nt, Human
agaccaccaccucag

SEQ ID NO: 2364789 - RNA, 13 nt, Human
agaccacaucuuu

SEQ ID NO: 2364790 - RNA, 23 nt, Human
agaccacaucuuuaucuguucuu

SEQ ID NO: 2364791 - RNA, 18 nt, Human
agacagcccgggcucugc

SEQ ID NO: 2364792 - RNA, 20 nt, Human
agacagcccgggcucugccu

SEQ ID NO: 2364793 - RNA, 16 nt, Human
agacagcccgggcucu

SEQ ID NO: 2364794 - RNA, 14 nt, Human
agacacaacuauuu

SEQ ID NO: 2364795 - RNA, 17 nt, Human
agacagcccgggcucug

SEQ ID NO: 2364796 - RNA, 15 nt, Human
agaccauagugacca

SEQ ID NO: 2364797 - RNA, 23 nt, Human
agaccaguugggagcacuggagu

SEQ ID NO: 2364798 - RNA, 13 nt, Human
agaccauaauguu

SEQ ID NO: 2364799 - RNA, 21 nt, Human
agaccaguugggagcacugga

SEQ ID NO: 2364800 - RNA, 22 nt, Human
agaccaguugggagcacuggag

SEQ ID NO: 2364801 - RNA, 13 nt, Human
agaccaucccuga

SEQ ID NO: 2364802 - RNA, 15 nt, Human
agaccagggagccuu

SEQ ID NO: 2364803 - RNA, 16 nt, Human
agaccaggcaaagcaa

SEQ ID NO: 2364804 - RNA, 16 nt, Human
agaccaccaccucaga

SEQ ID NO: 2364805 - RNA, 17 nt, Human
agaccaggcaaagcaag

SEQ ID NO: 2364806 - RNA, 14 nt, Human
agaccagucuggcc

SEQ ID NO: 2364807 - RNA, 13 nt, Human
agaccaguuggga

SEQ ID NO: 2364808 - RNA, 18 nt, Human
agaccaguugggagcacu

SEQ ID NO: 2364809 - RNA, 19 nt, Human
agaccaguugggagcacug

SEQ ID NO: 2364810 - RNA, 20 nt, Human
agaccaguugggagcacugg

SEQ ID NO: 2364811 - RNA, 14 nt, Human
agaccaucccugaa

SEQ ID NO: 2364812 - RNA, 17 nt, Human
agaccaucccugaaggc

SEQ ID NO: 2364813 - RNA, 18 nt, Human
agaccaucccugaaggcc

SEQ ID NO: 2364814 - RNA, 21 nt, Human
agaccaucccugaaggccccg

SEQ ID NO: 2364815 - RNA, 15 nt, Human
agacacaacaacucc

SEQ ID NO: 2364816 - RNA, 18 nt, Human
agacacaacaacuccuag

SEQ ID NO: 2364817 - RNA, 21 nt, Human
agacaauuuauuauggcacau

SEQ ID NO: 2364818 - RNA, 15 nt, Human
agacaauuuauuaug

SEQ ID NO: 2364819 - RNA, 19 nt, Human
agacaaugacuuacuguac

SEQ ID NO: 2364820 - RNA, 17 nt, Human
agacaaugacuuacugu

SEQ ID NO: 2364821 - RNA, 13 nt, Human
agacaaugacuua

SEQ ID NO: 2364822 - RNA, 23 nt, Human
agacugaguacguugugcauuug

SEQ ID NO: 2364823 - RNA, 18 nt, Human
agagaaaggggagcccac

SEQ ID NO: 2364824 - RNA, 21 nt, Human
agagaaaggggagcccacugu

SEQ ID NO: 2364825 - RNA, 19 nt, Human
agagaaaggggagcccacu

SEQ ID NO: 2364826 - RNA, 18 nt, Human
agagaaagcacgugucuc

SEQ ID NO: 2364827 - RNA, 13 nt, Human
agagaaagccagg

SEQ ID NO: 2364828 - RNA, 14 nt, Human
agagaaagccaggc

SEQ ID NO: 2364829 - RNA, 16 nt, Human
agagaaagccaggcag

SEQ ID NO: 2364830 - RNA, 17 nt, Human
agagaaagccaggcagg

SEQ ID NO: 2364831 - RNA, 19 nt, Human
agagaaagccaggcaggua

SEQ ID NO: 2364832 - RNA, 22 nt, Human
agagaaagccaggcagguagcc

SEQ ID NO: 2364833 - RNA, 17 nt, Human
agacugcauuauauuua

SEQ ID NO: 2364834 - RNA, 15 nt, Human
agagaaagaagagac

SEQ ID NO: 2364835 - RNA, 16 nt, Human
agagaaagaagagaca

SEQ ID NO: 2364836 - RNA, 17 nt, Human
agagaaagaagagacag

SEQ ID NO: 2364837 - RNA, 13 nt, Human
agagaaagagaga

SEQ ID NO: 2364838 - RNA, 21 nt, Human
agagaagagauugugguuuca

SEQ ID NO: 2364839 - RNA, 10 nt, Human
agagaagaga

SEQ ID NO: 2364840 - RNA, 12 nt, Human
agagaaagggga

SEQ ID NO: 2364841 - RNA, 23 nt, Human
agagaaaggggagcccacugucc

SEQ ID NO: 2364842 - RNA, 18 nt, Human
agagaaaguacuucucca

SEQ ID NO: 2364843 - RNA, 12 nt, Human
agagaagaggcu

SEQ ID NO: 2364844 - RNA, 18 nt, Human
agagaggacgugggcggc

SEQ ID NO: 2364845 - RNA, 17 nt, Human
agagaggaaucagacuu

SEQ ID NO: 2364846 - RNA, 13 nt, Human
agagaggacagcu

SEQ ID NO: 2364847 - RNA, 14 nt, Human
agagaggaaucaga

SEQ ID NO: 2364848 - RNA, 23 nt, Human
agagaggaaagguuugagaagca

SEQ ID NO: 2364849 - RNA, 18 nt, Human
agagagcuuaaugauaau

SEQ ID NO: 2364850 - RNA, 23 nt, Human
agagagcuucuguugcugccuca

SEQ ID NO: 2364851 - RNA, 20 nt, Human
agagagcuucuguugcugcc

SEQ ID NO: 2364852 - RNA, 12 nt, Human
agagaaggggag

SEQ ID NO: 2364853 - RNA, 18 nt, Human
agagaaggccucccuagc

SEQ ID NO: 2364854 - RNA, 20 nt, Human
agagaaggcaggaaugugug

SEQ ID NO: 2364855 - RNA, 13 nt, Human
agagaaggcagga

SEQ ID NO: 2364856 - RNA, 12 nt, Human
agagaaggcagg

SEQ ID NO: 2364857 - RNA, 15 nt, Human
agagaaggggaggag

SEQ ID NO: 2364858 - RNA, 17 nt, Human
agagagcuguucccaaa

SEQ ID NO: 2364859 - RNA, 16 nt, Human
agagagcuucuguugc

SEQ ID NO: 2364860 - RNA, 20 nt, Human
agagaagcuaaaaccugagc

SEQ ID NO: 2364861 - RNA, 13 nt, Human
agagaaggagcca

SEQ ID NO: 2364862 - RNA, 12 nt, Human
agagaaggagcc

SEQ ID NO: 2364863 - RNA, 23 nt, Human
agagaagccccuuccccauggga

SEQ ID NO: 2364864 - RNA, 13 nt, Human
agagaagccugug

SEQ ID NO: 2364865 - RNA, 16 nt, Human
agagaagcaaguggug

SEQ ID NO: 2364866 - RNA, 13 nt, Human
agagaagccccuu

SEQ ID NO: 2364867 - RNA, 17 nt, Human
agagaagccccuucccc

SEQ ID NO: 2364868 - RNA, 20 nt, Human
agagaagccccuuccccaug

SEQ ID NO: 2364869 - RNA, 23 nt, Human
agagaggucaagcccaggaggac

SEQ ID NO: 2364870 - RNA, 20 nt, Human
agagagguuauagaguagaa

SEQ ID NO: 2364871 - RNA, 22 nt, Human
agagaggucaagcccaggagga

SEQ ID NO: 2364872 - RNA, 15 nt, Human
agagaggagaggaga

SEQ ID NO: 2364873 - RNA, 18 nt, Human
agagaggagaaacacauc

SEQ ID NO: 2364874 - RNA, 13 nt, Human
agagaggagagga

SEQ ID NO: 2364875 - RNA, 16 nt, Human
agagaggagaaacaca

SEQ ID NO: 2364876 - RNA, 14 nt, Human
agagaggagaaaca

SEQ ID NO: 2364877 - RNA, 23 nt, Human
agagaggguggugaccucugccu

SEQ ID NO: 2364878 - RNA, 14 nt, Human
agagaguggcuccu

SEQ ID NO: 2364879 - RNA, 16 nt, Human
agagaguggcuccucc

SEQ ID NO: 2364880 - RNA, 22 nt, Human
agagaguaauggguuucauauu

SEQ ID NO: 2364881 - RNA, 15 nt, Human
agagagucccacugc

SEQ ID NO: 2364882 - RNA, 18 nt, Human
agagagucccacugccuc

SEQ ID NO: 2364883 - RNA, 20 nt, Human
agagagucccacugccucag

SEQ ID NO: 2364884 - RNA, 21 nt, Human
agagagucccacugccucagg

SEQ ID NO: 2364885 - RNA, 23 nt, Human
agagagucccacugccucagguu

SEQ ID NO: 2364886 - RNA, 15 nt, Human
agagaguccucugga

SEQ ID NO: 2364887 - RNA, 14 nt, Human
agagccccagcuga

SEQ ID NO: 2364888 - RNA, 15 nt, Human
agagccccagcugac

SEQ ID NO: 2364889 - RNA, 16 nt, Human
agagccccagcugaca

SEQ ID NO: 2364890 - RNA, 17 nt, Human
agagcccgggagcugcu

SEQ ID NO: 2364891 - RNA, 15 nt, Human
agagccccacacgga

SEQ ID NO: 2364892 - RNA, 16 nt, Human
agagaguccucuggau

SEQ ID NO: 2364893 - RNA, 22 nt, Human
agagaguccucuggauggcacc

SEQ ID NO: 2364894 - RNA, 17 nt, Human
agagccccacacggagg

SEQ ID NO: 2364895 - RNA, 13 nt, Human
agagccccagcug

SEQ ID NO: 2364896 - RNA, 16 nt, Human
agagccuggugcugcu

SEQ ID NO: 2364897 - RNA, 18 nt, Human
agagccuggugcugcugc

SEQ ID NO: 2364898 - RNA, 17 nt, Human
agagccuggagaagcug

SEQ ID NO: 2364899 - RNA, 13 nt, Human
agagccuggagaa

SEQ ID NO: 2364900 - RNA, 14 nt, Human
agagccuggagaag

SEQ ID NO: 2364901 - RNA, 15 nt, Human
agagccuggagaagc

SEQ ID NO: 2364902 - RNA, 16 nt, Human
agagccuggagaagcu

SEQ ID NO: 2364903 - RNA, 13 nt, Human
agagccugcuggc

SEQ ID NO: 2364904 - RNA, 19 nt, Human
agagccugcuggcacccac

SEQ ID NO: 2364905 - RNA, 24 nt, Human
agagccugcuggcacccaccgugg

SEQ ID NO: 2364906 - RNA, 17 nt, Human
agagccugcugcauggg

SEQ ID NO: 2364907 - RNA, 12 nt, Human
agagccugcugg

SEQ ID NO: 2364908 - RNA, 13 nt, Human
agcaugaggaacu

SEQ ID NO: 2364909 - RNA, 14 nt, Human
agcaugcacaaauu

SEQ ID NO: 2364910 - RNA, 12 nt, Human
agcaugccugga

SEQ ID NO: 2364911 - RNA, 19 nt, Human
agccaaagcuaggccuggc

SEQ ID NO: 2364912 - RNA, 20 nt, Human
agccaaagcuaggccuggcc

SEQ ID NO: 2364913 - RNA, 23 nt, Human
agccaaagcuaggccuggccaga

SEQ ID NO: 2364914 - RNA, 12 nt, Human
agcaucuucugg

SEQ ID NO: 2364915 - RNA, 22 nt, Human
agcaucuuccagaagugugauu

SEQ ID NO: 2364916 - RNA, 23 nt, Human
agcaucuuccagaagugugauug

SEQ ID NO: 2364917 - RNA, 23 nt, Human
agcaucuucacuucuaaaugcau

SEQ ID NO: 2364918 - RNA, 20 nt, Human
agcaucuucacuucuaaaug

SEQ ID NO: 2364919 - RNA, 17 nt, Human
agcaucuuccagaagug

SEQ ID NO: 2364920 - RNA, 20 nt, Human
agcaucuuccagaaguguga

SEQ ID NO: 2364921 - RNA, 18 nt, Human
agcaucuucacuucuaaa

SEQ ID NO: 2364922 - RNA, 14 nt, Human
agcaugaaaaagca

SEQ ID NO: 2364923 - RNA, 13 nt, Human
agcaugaaaaagc

SEQ ID NO: 2364924 - RNA, 15 nt, Human
agcaucuucuggagu

SEQ ID NO: 2364925 - RNA, 19 nt, Human
agcaucuuggggggguggc

SEQ ID NO: 2364926 - RNA, 21 nt, Human
agcaucuuggggggguggccg

SEQ ID NO: 2364927 - RNA, 23 nt, Human
agcaucuuggggggguggccgcu

SEQ ID NO: 2364928 - RNA, 14 nt, Human
agccaagggaaagg

SEQ ID NO: 2364929 - RNA, 20 nt, Human
agccaaggccgaagcucugg

SEQ ID NO: 2364930 - RNA, 22 nt, Human
agccaaggccgaagcucuggcu

SEQ ID NO: 2364931 - RNA, 23 nt, Human
agccaaggcccugaguuggcagu

SEQ ID NO: 2364932 - RNA, 23 nt, Human
agccaaggccaaaggaagcacau

SEQ ID NO: 2364933 - RNA, 22 nt, Human
agccaaggccaaaggaagcaca

SEQ ID NO: 2364934 - RNA, 20 nt, Human
agccaaggccaaaggaagca

SEQ ID NO: 2364935 - RNA, 16 nt, Human
agccaagggaaagggg

SEQ ID NO: 2364936 - RNA, 23 nt, Human
agccaagggaaaggggugcuuuu

SEQ ID NO: 2364937 - RNA, 11 nt, Human
agccagaggcu

SEQ ID NO: 2364938 - RNA, 14 nt, Human
agccagaggcuggg

SEQ ID NO: 2364939 - RNA, 20 nt, Human
agccagaggagagaggaccc

SEQ ID NO: 2364940 - RNA, 13 nt, Human
agccagaggucug

SEQ ID NO: 2364941 - RNA, 15 nt, Human
agccagaggcugggu

SEQ ID NO: 2364942 - RNA, 18 nt, Human
agccagaggcuggguuca

SEQ ID NO: 2364943 - RNA, 20 nt, Human
agccaagggaaaggggugcu

SEQ ID NO: 2364944 - RNA, 15 nt, Human
agccagaguuccugc

SEQ ID NO: 2364945 - RNA, 12 nt, Human
agccagauccuc

SEQ ID NO: 2364946 - RNA, 14 nt, Human
agccagauccucuu

SEQ ID NO: 2364947 - RNA, 15 nt, Human
agccagauccucuug

SEQ ID NO: 2364948 - RNA, 16 nt, Human
agccagauccucuugg

SEQ ID NO: 2364949 - RNA, 22 nt, Human
agccagauggacuccagccugc

SEQ ID NO: 2364950 - RNA, 14 nt, Human
agcccaaagaagga

SEQ ID NO: 2364951 - RNA, 16 nt, Human
agcccaaagaaggaaa

SEQ ID NO: 2364952 - RNA, 14 nt, Human
agccauuucuuguu

SEQ ID NO: 2364953 - RNA, 21 nt, Human
agccauuggcuauuuaaaacu

SEQ ID NO: 2364954 - RNA, 22 nt, Human
agccauuggcuauuuaaaacuu

SEQ ID NO: 2364955 - RNA, 12 nt, Human
agccauugucuu

SEQ ID NO: 2364956 - RNA, 17 nt, Human
agccauugucuucggaa

SEQ ID NO: 2364957 - RNA, 18 nt, Human
agccauuguuggcuuucc

SEQ ID NO: 2364958 - RNA, 20 nt, Human
agccauuaccauggagacaa

SEQ ID NO: 2364959 - RNA, 18 nt, Human
agccauuaccauggagac

SEQ ID NO: 2364960 - RNA, 17 nt, Human
agccauucugacucaua

SEQ ID NO: 2364961 - RNA, 22 nt, Human
agccauuccugguacccagcca

SEQ ID NO: 2364962 - RNA, 23 nt, Human
agccauuccugguacccagccau

SEQ ID NO: 2364963 - RNA, 24 nt, Human
agccagcaaugauguccagaagaa

SEQ ID NO: 2364964 - RNA, 14 nt, Human
agccauucacugcc

SEQ ID NO: 2364965 - RNA, 12 nt, Human
agccauuccugg

SEQ ID NO: 2364966 - RNA, 20 nt, Human
agccauuccugguacccagc

SEQ ID NO: 2364967 - RNA, 13 nt, Human
agccagcacacag

SEQ ID NO: 2364968 - RNA, 23 nt, Human
agccagcaaugauguccagaaga

SEQ ID NO: 2364969 - RNA, 22 nt, Human
agccagcaaugauguccagaag

SEQ ID NO: 2364970 - RNA, 17 nt, Human
agccagauccucuuggu

SEQ ID NO: 2364971 - RNA, 15 nt, Human
agccagauuuuccug

SEQ ID NO: 2364972 - RNA, 19 nt, Human
agccagauuuuccugaaaa

SEQ ID NO: 2364973 - RNA, 13 nt, Human
agcaguuguguca

SEQ ID NO: 2364974 - RNA, 23 nt, Human
agcaguugagucgucaucacuuu

SEQ ID NO: 2364975 - RNA, 15 nt, Human
agaugggacugggag

SEQ ID NO: 2364976 - RNA, 19 nt, Human
agaugggacugggagggcc

SEQ ID NO: 2364977 - RNA, 22 nt, Human
agauguaauuguuugucuuuaa

SEQ ID NO: 2364978 - RNA, 21 nt, Human
agaugggagaaucacuugaac

SEQ ID NO: 2364979 - RNA, 14 nt, Human
agauguagaggaga

SEQ ID NO: 2364980 - RNA, 14 nt, Human
agcacuaaagcagu

SEQ ID NO: 2364981 - RNA, 13 nt, Human
agcacuaaagcag

SEQ ID NO: 2364982 - RNA, 16 nt, Human
agcacuaacguaaaua

SEQ ID NO: 2364983 - RNA, 12 nt, Human
agcacugcccaa

SEQ ID NO: 2364984 - RNA, 23 nt, Human
agcacuaaagcaguggacaccag

SEQ ID NO: 2364985 - RNA, 20 nt, Human
agcacuaaagcaguggacac

SEQ ID NO: 2364986 - RNA, 17 nt, Human
agcacuaaagcagugga

SEQ ID NO: 2364987 - RNA, 16 nt, Human
agcacuaaagcagugg

SEQ ID NO: 2364988 - RNA, 19 nt, Human
agcacuaaggugugcucug

SEQ ID NO: 2364989 - RNA, 21 nt, Human
agcagccacauuccugaugcu

SEQ ID NO: 2364990 - RNA, 15 nt, Human
agcacuggccugcac

SEQ ID NO: 2364991 - RNA, 17 nt, Human
agcacuggccugcacgg

SEQ ID NO: 2364992 - RNA, 13 nt, Human
agcacuggcucuc

SEQ ID NO: 2364993 - RNA, 14 nt, Human
agcacuggcucucu

SEQ ID NO: 2364994 - RNA, 17 nt, Human
agcacuggcucucucca

SEQ ID NO: 2364995 - RNA, 18 nt, Human
agcacuggcucucuccag

SEQ ID NO: 2364996 - RNA, 19 nt, Human
agcacuggcucucuccagg

SEQ ID NO: 2364997 - RNA, 20 nt, Human
agcacuggcucucuccagga

SEQ ID NO: 2364998 - RNA, 17 nt, Human
agcacugcuugaggaaa

SEQ ID NO: 2364999 - RNA, 21 nt, Human
agcacugcuaggcgagugcca

SEQ ID NO: 2365000 - RNA, 22 nt, Human
agcacugcuaggcgagugccag

SEQ ID NO: 2365001 - RNA, 23 nt, Human
agcacugcuaggcgagugccagg

SEQ ID NO: 2365002 - RNA, 16 nt, Human
agcacuggagugcagg

SEQ ID NO: 2365003 - RNA, 17 nt, Human
agcacuggagugcaggg

SEQ ID NO: 2365004 - RNA, 19 nt, Human
agcacuggagugcagggag

SEQ ID NO: 2365005 - RNA, 20 nt, Human
agcacuggagugcagggagg

SEQ ID NO: 2365006 - RNA, 22 nt, Human
agcacuggagugcagggaggag

SEQ ID NO: 2365007 - RNA, 23 nt, Human
agcacuggagugcagggaggaga

SEQ ID NO: 2365008 - RNA, 12 nt, Human
agcacuggccug

SEQ ID NO: 2365009 - RNA, 13 nt, Human
agcacuggccugc

SEQ ID NO: 2365010 - RNA, 14 nt, Human
agcagcccuccuca

SEQ ID NO: 2365011 - RNA, 13 nt, Human
agcagcccuccuc

SEQ ID NO: 2365012 - RNA, 12 nt, Human
agcagcccuccu

SEQ ID NO: 2365013 - RNA, 14 nt, Human
agcagcccuaagga

SEQ ID NO: 2365014 - RNA, 18 nt, Human
agcagcccuaaggaucuc

SEQ ID NO: 2365015 - RNA, 20 nt, Human
agcagccaucauaggaaggg

SEQ ID NO: 2365016 - RNA, 21 nt, Human
agcagcccgcugaguggacug

SEQ ID NO: 2365017 - RNA, 19 nt, Human
agcagccagcucucagcca

SEQ ID NO: 2365018 - RNA, 18 nt, Human
agcagccagcucucagcc

SEQ ID NO: 2365019 - RNA, 17 nt, Human
agcagccagcucucagc

SEQ ID NO: 2365020 - RNA, 16 nt, Human
agcagccagcucucag

SEQ ID NO: 2365021 - RNA, 23 nt, Human
agcagccagcucucagccaacga

SEQ ID NO: 2365022 - RNA, 19 nt, Human
agcagccaucauaggaagg

SEQ ID NO: 2365023 - RNA, 15 nt, Human
agcagccagcucuca

SEQ ID NO: 2365024 - RNA, 14 nt, Human
agcagccagcucuc

SEQ ID NO: 2365025 - RNA, 13 nt, Human
agcagccagcucu

SEQ ID NO: 2365026 - RNA, 13 nt, Human
agcagccacgagg

SEQ ID NO: 2365027 - RNA, 10 nt, Human
agcagccacg

SEQ ID NO: 2365028 - RNA, 23 nt, Human
agcagucuacccaccucagccuc

SEQ ID NO: 2365029 - RNA, 19 nt, Human
agcagucgugccugugucc

SEQ ID NO: 2365030 - RNA, 21 nt, Human
agcagucgugccuguguccau

SEQ ID NO: 2365031 - RNA, 21 nt, Human
agcagucuacccaccucagcc

SEQ ID NO: 2365032 - RNA, 20 nt, Human
agcagugaaugauucagugu

SEQ ID NO: 2365033 - RNA, 22 nt, Human
agcagugagccgcaucuucucc

SEQ ID NO: 2365034 - RNA, 14 nt, Human
agcagugagccgca

SEQ ID NO: 2365035 - RNA, 16 nt, Human
agcagugagucucuuc

SEQ ID NO: 2365036 - RNA, 23 nt, Human
agcagugaguuacagcgagaggc

SEQ ID NO: 2365037 - RNA, 22 nt, Human
agcagugaaugauucaguguua

SEQ ID NO: 2365038 - RNA, 21 nt, Human
agcagugaaugauucaguguu

SEQ ID NO: 2365039 - RNA, 17 nt, Human
agcagugaaaacaagug

SEQ ID NO: 2365040 - RNA, 16 nt, Human
agcagugagaaaaagc

SEQ ID NO: 2365041 - RNA, 21 nt, Human
agcagugagaaaaagcuccug

SEQ ID NO: 2365042 - RNA, 22 nt, Human
agcagugagaaaaagcuccugu

SEQ ID NO: 2365043 - RNA, 21 nt, Human
agcaguugaaaagacuccaaa

SEQ ID NO: 2365044 - RNA, 23 nt, Human
agcaguugaaaagacuccaaaga

SEQ ID NO: 2365045 - RNA, 15 nt, Human
agcccugacccugug

SEQ ID NO: 2365046 - RNA, 17 nt, Human
agcccugacccugugga

SEQ ID NO: 2365047 - RNA, 21 nt, Human
agcccugacccuguggaagca

SEQ ID NO: 2365048 - RNA, 17 nt, Human
agcccugacuggugcua

SEQ ID NO: 2365049 - RNA, 13 nt, Human
agcccugacccug

SEQ ID NO: 2365050 - RNA, 23 nt, Human
agcccucuuccaucaugucccca

SEQ ID NO: 2365051 - RNA, 16 nt, Human
agcccucuuccaucau

SEQ ID NO: 2365052 - RNA, 16 nt, Human
agcccuauggaugugg

SEQ ID NO: 2365053 - RNA, 17 nt, Human
agcccucuuccaucaug

SEQ ID NO: 2365054 - RNA, 19 nt, Human
agcccucuuccaucauguc

SEQ ID NO: 2365055 - RNA, 20 nt, Human
agcccuaggguggagagcca

SEQ ID NO: 2365056 - RNA, 17 nt, Human
agcccuaggguggagag

SEQ ID NO: 2365057 - RNA, 12 nt, Human
agcccuauggau

SEQ ID NO: 2365058 - RNA, 13 nt, Human
agcccuauggaug

SEQ ID NO: 2365059 - RNA, 14 nt, Human
agcccuauggaugu

SEQ ID NO: 2365060 - RNA, 15 nt, Human
agcccuauggaugug

SEQ ID NO: 2365061 - RNA, 16 nt, Human
agcccuaggguggaga

SEQ ID NO: 2365062 - RNA, 20 nt, Human
agcccuagagccugccugga

SEQ ID NO: 2365063 - RNA, 22 nt, Human
agcccuagagccugccuggagc

SEQ ID NO: 2365064 - RNA, 15 nt, Human
agcccuagagccugc

SEQ ID NO: 2365065 - RNA, 16 nt, Human
agcccuagagccugcc

SEQ ID NO: 2365066 - RNA, 17 nt, Human
agcccuagagccugccu

SEQ ID NO: 2365067 - RNA, 15 nt, Human
agcccugagcuuucu

SEQ ID NO: 2365068 - RNA, 22 nt, Human
agcccugaggugaaagggagcu

SEQ ID NO: 2365069 - RNA, 21 nt, Human
agcccugaggugaaagggagc

SEQ ID NO: 2365070 - RNA, 19 nt, Human
agccgagaucacgccacug

SEQ ID NO: 2365071 - RNA, 20 nt, Human
agccgagaucacgccacugc

SEQ ID NO: 2365072 - RNA, 21 nt, Human
agcccuaaggaucucucagga

SEQ ID NO: 2365073 - RNA, 16 nt, Human
agcccuaaggaucucu

SEQ ID NO: 2365074 - RNA, 14 nt, Human
agcccuagagccug

SEQ ID NO: 2365075 - RNA, 20 nt, Human
agccccaucccaaacccuuc

SEQ ID NO: 2365076 - RNA, 11 nt, Human
agccccauccu

SEQ ID NO: 2365077 - RNA, 22 nt, Human
agccccagggucuucccuaccu

SEQ ID NO: 2365078 - RNA, 20 nt, Human
agccccagggucuucccuac

SEQ ID NO: 2365079 - RNA, 18 nt, Human
agccccagggucuucccu

SEQ ID NO: 2365080 - RNA, 21 nt, Human
agccccaggccucuguguccu

SEQ ID NO: 2365081 - RNA, 20 nt, Human
agccccaggcaggcugugcg

SEQ ID NO: 2365082 - RNA, 16 nt, Human
agccccaggcaggcug

SEQ ID NO: 2365083 - RNA, 13 nt, Human
agccccaggcagg

SEQ ID NO: 2365084 - RNA, 12 nt, Human
agccccagcuga

SEQ ID NO: 2365085 - RNA, 12 nt, Human
agccccaggccu

SEQ ID NO: 2365086 - RNA, 15 nt, Human
agccccaggccucug

SEQ ID NO: 2365087 - RNA, 16 nt, Human
agccccaggccucugu

SEQ ID NO: 2365088 - RNA, 18 nt, Human
agccccaggccucugugu

SEQ ID NO: 2365089 - RNA, 16 nt, Human
agccccagugcccaca

SEQ ID NO: 2365090 - RNA, 23 nt, Human
agccccagggucuucccuaccuc

SEQ ID NO: 2365091 - RNA, 17 nt, Human
agccccaucagcuccag

SEQ ID NO: 2365092 - RNA, 23 nt, Human
agccccauaauuuuuuuuuuccu

SEQ ID NO: 2365093 - RNA, 12 nt, Human
agccccagcccc

SEQ ID NO: 2365094 - RNA, 16 nt, Human
agccccagagcagggu

SEQ ID NO: 2365095 - RNA, 11 nt, Human
agccccagccc

SEQ ID NO: 2365096 - RNA, 18 nt, Human
agccccagcccccuuugg

SEQ ID NO: 2365097 - RNA, 14 nt, Human
agccccagcccccu

SEQ ID NO: 2365098 - RNA, 15 nt, Human
agccccagcacuaac

SEQ ID NO: 2365099 - RNA, 12 nt, Human
agccccagcacu

SEQ ID NO: 2365100 - RNA, 12 nt, Human
agccccagagca

SEQ ID NO: 2365101 - RNA, 14 nt, Human
agccccaccccagg

SEQ ID NO: 2365102 - RNA, 20 nt, Human
agcccaaagugguauagaaa

SEQ ID NO: 2365103 - RNA, 23 nt, Human
agcccaaagugguauagaaaugc

SEQ ID NO: 2365104 - RNA, 16 nt, Human
agcccaaagcuguugg

SEQ ID NO: 2365105 - RNA, 23 nt, Human
agcccaacagacaccaucuuuug

SEQ ID NO: 2365106 - RNA, 16 nt, Human
agcccaagggaucugg

SEQ ID NO: 2365107 - RNA, 22 nt, Human
agcccaagggaucugguccuac

SEQ ID NO: 2365108 - RNA, 22 nt, Human
agcccaagguuuaaacuucucu

SEQ ID NO: 2365109 - RNA, 21 nt, Human
agcccaagggaucugguccua

SEQ ID NO: 2365110 - RNA, 23 nt, Human
agcccaagguuuaaacuucucug

SEQ ID NO: 2365111 - RNA, 10 nt, Human
agcccaaguc

SEQ ID NO: 2365112 - RNA, 14 nt, Human
agcccaaguccaaa

SEQ ID NO: 2365113 - RNA, 17 nt, Human
agcccaaguccaaaugu

SEQ ID NO: 2365114 - RNA, 11 nt, Human
agccuccugag

SEQ ID NO: 2365115 - RNA, 14 nt, Human
agccuccugaccug

SEQ ID NO: 2365116 - RNA, 16 nt, Human
agccuccugaccugag

SEQ ID NO: 2365117 - RNA, 17 nt, Human
agccuccugaccugagg

SEQ ID NO: 2365118 - RNA, 18 nt, Human
agccuccugaccugaggc

SEQ ID NO: 2365119 - RNA, 19 nt, Human
agccuccucuggacggcag

SEQ ID NO: 2365120 - RNA, 12 nt, Human
agccuccucugu

SEQ ID NO: 2365121 - RNA, 15 nt, Human
agccuccucugucug

SEQ ID NO: 2365122 - RNA, 16 nt, Human
agccuccucugucugc

SEQ ID NO: 2365123 - RNA, 18 nt, Human
agccuccucugucugccc

SEQ ID NO: 2365124 - RNA, 19 nt, Human
agccuccucugucugcccu

SEQ ID NO: 2365125 - RNA, 20 nt, Human
agccuccucugucugcccuu

SEQ ID NO: 2365126 - RNA, 21 nt, Human
agccuccucugucugcccuuc

SEQ ID NO: 2365127 - RNA, 19 nt, Human
agccgucagccaaauguaa

SEQ ID NO: 2365128 - RNA, 19 nt, Human
agccuccuccugaccacgg

SEQ ID NO: 2365129 - RNA, 13 nt, Human
agccuccucucuc

SEQ ID NO: 2365130 - RNA, 11 nt, Human
agccuccucug

SEQ ID NO: 2365131 - RNA, 12 nt, Human
agccuccucugg

SEQ ID NO: 2365132 - RNA, 13 nt, Human
agccuccucugga

SEQ ID NO: 2365133 - RNA, 14 nt, Human
agccuccucuggac

SEQ ID NO: 2365134 - RNA, 18 nt, Human
agccuccucuggacggca

SEQ ID NO: 2365135 - RNA, 15 nt, Human
agccucccugaagcc

SEQ ID NO: 2365136 - RNA, 14 nt, Human
agccucccugaagc

SEQ ID NO: 2365137 - RNA, 17 nt, Human
agccucccugaagacca

SEQ ID NO: 2365138 - RNA, 21 nt, Human
agccucccucugaccugcagg

SEQ ID NO: 2365139 - RNA, 15 nt, Human
agccucccucugacc

SEQ ID NO: 2365140 - RNA, 14 nt, Human
agccucccucugac

SEQ ID NO: 2365141 - RNA, 13 nt, Human
agccucccucuga

SEQ ID NO: 2365142 - RNA, 11 nt, Human
agccucccuga

SEQ ID NO: 2365143 - RNA, 22 nt, Human
agccucccucugaccugcaggc

SEQ ID NO: 2365144 - RNA, 12 nt, Human
agccucccugaa

SEQ ID NO: 2365145 - RNA, 13 nt, Human
agccucccugaag

SEQ ID NO: 2365146 - RNA, 22 nt, Human
agccucccgaguagcugggacu

SEQ ID NO: 2365147 - RNA, 22 nt, Human
agccuccccugccagggcaggg

SEQ ID NO: 2365148 - RNA, 20 nt, Human
agccuccccugccagggcag

SEQ ID NO: 2365149 - RNA, 23 nt, Human
agccucccuauuuuuuuucuguu

SEQ ID NO: 2365150 - RNA, 17 nt, Human
agccucccaaagugcug

SEQ ID NO: 2365151 - RNA, 15 nt, Human
agccuccccugccag

SEQ ID NO: 2365152 - RNA, 14 nt, Human
agccuccccugcca

SEQ ID NO: 2365153 - RNA, 20 nt, Human
agccucccaaagugcuggga

SEQ ID NO: 2365154 - RNA, 18 nt, Human
agccucccgaauagcugg

SEQ ID NO: 2365155 - RNA, 19 nt, Human
agccuccccugccagggca

SEQ ID NO: 2365156 - RNA, 18 nt, Human
agccuccccugccagggc

SEQ ID NO: 2365157 - RNA, 17 nt, Human
agccuccccugccaggg

SEQ ID NO: 2365158 - RNA, 16 nt, Human
agccuccccugccagg

SEQ ID NO: 2365159 - RNA, 19 nt, Human
agccucccgaauagcuggg

SEQ ID NO: 2365160 - RNA, 20 nt, Human
agccucccgaauagcuggga

SEQ ID NO: 2365161 - RNA, 22 nt, Human
agccucccgaauagcugggacu

SEQ ID NO: 2365162 - RNA, 17 nt, Human
agccucccgaguagcug

SEQ ID NO: 2365163 - RNA, 23 nt, Human
agccgagcucguguauccugggg

SEQ ID NO: 2365164 - RNA, 16 nt, Human
agccgcugugagcccc

SEQ ID NO: 2365165 - RNA, 19 nt, Human
agccgcugugagccccugg

SEQ ID NO: 2365166 - RNA, 16 nt, Human
agccgcaucuucucca

SEQ ID NO: 2365167 - RNA, 18 nt, Human
agccgcagccucccucug

SEQ ID NO: 2365168 - RNA, 22 nt, Human
agccgcuggggccaguuggucc

SEQ ID NO: 2365169 - RNA, 14 nt, Human
agccgcagccuccc

SEQ ID NO: 2365170 - RNA, 18 nt, Human
agccgauucaccugagca

SEQ ID NO: 2365171 - RNA, 17 nt, Human
agccgagccgggccugg

SEQ ID NO: 2365172 - RNA, 18 nt, Human
agccgagccgggccuggg

SEQ ID NO: 2365173 - RNA, 21 nt, Human
agccgagccgggccuggggcu

SEQ ID NO: 2365174 - RNA, 14 nt, Human
agccgcuggggcca

SEQ ID NO: 2365175 - RNA, 20 nt, Human
agccgagauugcaccacugc

SEQ ID NO: 2365176 - RNA, 16 nt, Human
agccgagccgggccug

SEQ ID NO: 2365177 - RNA, 14 nt, Human
agcccugaguuccu

SEQ ID NO: 2365178 - RNA, 19 nt, Human
agccgagauugcaccacug

SEQ ID NO: 2365179 - RNA, 21 nt, Human
agccgagaucacgccacugca

SEQ ID NO: 2365180 - RNA, 21 nt, Human
agccggggaguuucuuuccug

SEQ ID NO: 2365181 - RNA, 20 nt, Human
agccggggaguuucuuuccu

SEQ ID NO: 2365182 - RNA, 16 nt, Human
agccggcacagggucu

SEQ ID NO: 2365183 - RNA, 21 nt, Human
agccggagccuccagcugccc

SEQ ID NO: 2365184 - RNA, 16 nt, Human
agccggcauggcuggg

SEQ ID NO: 2365185 - RNA, 16 nt, Human
agccgggucugccucu

SEQ ID NO: 2365186 - RNA, 22 nt, Human
agccgcugugagccccuggucc

SEQ ID NO: 2365187 - RNA, 23 nt, Human
agccggacuuucggaguuggggg

SEQ ID NO: 2365188 - RNA, 14 nt, Human
agccggcacagggu

SEQ ID NO: 2365189 - RNA, 15 nt, Human
agccggcacaggguc

SEQ ID NO: 2365190 - RNA, 14 nt, Human
agccggccucucug

SEQ ID NO: 2365191 - RNA, 18 nt, Human
agccucccaaagugcugg

SEQ ID NO: 2365192 - RNA, 19 nt, Human
agccucccaaagugcuggg

SEQ ID NO: 2365193 - RNA, 16 nt, Human
agccgucagccaaaug

SEQ ID NO: 2365194 - RNA, 22 nt, Human
agccgggucugccucuucuggg

SEQ ID NO: 2365195 - RNA, 21 nt, Human
agccgggucugccucuucugg

SEQ ID NO: 2365196 - RNA, 20 nt, Human
agccgggucugccucuucug

SEQ ID NO: 2365197 - RNA, 19 nt, Human
agccuccugaccugaggcu

SEQ ID NO: 2365198 - RNA, 22 nt, Human
agccuccugaccugaggcuccu

SEQ ID NO: 2365199 - RNA, 19 nt, Human
augggaaggagggagguau

SEQ ID NO: 2365200 - RNA, 17 nt, Human
augggaaggagggaggu

SEQ ID NO: 2365201 - RNA, 14 nt, Human
augggaaggaggga

SEQ ID NO: 2365202 - RNA, 19 nt, Human
augggaagacgaggcccuc

SEQ ID NO: 2365203 - RNA, 20 nt, Human
augggaagacgaggcccucg

SEQ ID NO: 2365204 - RNA, 13 nt, Human
augggaaugaagc

SEQ ID NO: 2365205 - RNA, 18 nt, Human
augggaaucaagauuuaa

SEQ ID NO: 2365206 - RNA, 14 nt, Human
augggaaugaagcu

SEQ ID NO: 2365207 - RNA, 15 nt, Human
augggaaugaagcuu

SEQ ID NO: 2365208 - RNA, 16 nt, Human
augggaaugaagcuug

SEQ ID NO: 2365209 - RNA, 21 nt, Human
augggaaugaagcuuguguau

SEQ ID NO: 2365210 - RNA, 21 nt, Human
augggaaugaaugucagugug

SEQ ID NO: 2365211 - RNA, 15 nt, Human
augggaaugaauguc

SEQ ID NO: 2365212 - RNA, 18 nt, Human
auggcugacuuugcucuu

SEQ ID NO: 2365213 - RNA, 22 nt, Human
auggcugaaggaaaccagugca

SEQ ID NO: 2365214 - RNA, 12 nt, Human
auggcugcugaa

SEQ ID NO: 2365215 - RNA, 14 nt, Human
auggcugcugaagc

SEQ ID NO: 2365216 - RNA, 19 nt, Human
auggcugcugaagcugccu

SEQ ID NO: 2365217 - RNA, 22 nt, Human
auggcugcugaagcugccugcu

SEQ ID NO: 2365218 - RNA, 23 nt, Human
auggcugcugaagcugccugcuu

SEQ ID NO: 2365219 - RNA, 17 nt, Human
augggaagacgaggccc

SEQ ID NO: 2365220 - RNA, 23 nt, Human
auggcugccaaugggagcucaug

SEQ ID NO: 2365221 - RNA, 13 nt, Human
auggcuccucuca

SEQ ID NO: 2365222 - RNA, 12 nt, Human
auggcuccucuc

SEQ ID NO: 2365223 - RNA, 12 nt, Human
auggcucuucau

SEQ ID NO: 2365224 - RNA, 21 nt, Human
auggcugaaggaaaccagugc

SEQ ID NO: 2365225 - RNA, 18 nt, Human
auggcucuaaaaaguuuu

SEQ ID NO: 2365226 - RNA, 19 nt, Human
auggaugggggaacucaga

SEQ ID NO: 2365227 - RNA, 12 nt, Human
auggaugugcuu

SEQ ID NO: 2365228 - RNA, 14 nt, Human
auggauggcuucua

SEQ ID NO: 2365229 - RNA, 17 nt, Human
auggauguggggucccc

SEQ ID NO: 2365230 - RNA, 20 nt, Human
auggaugugggguccccauc

SEQ ID NO: 2365231 - RNA, 22 nt, Human
auggauguuuuagccauuguug

SEQ ID NO: 2365232 - RNA, 18 nt, Human
auggauucauuacagcuu

SEQ ID NO: 2365233 - RNA, 13 nt, Human
auggagcuggccg

SEQ ID NO: 2365234 - RNA, 13 nt, Human
auggaugauucag

SEQ ID NO: 2365235 - RNA, 18 nt, Human
auggaugauucagaaauu

SEQ ID NO: 2365236 - RNA, 23 nt, Human
auggaugccaauauuaaaucugc

SEQ ID NO: 2365237 - RNA, 21 nt, Human
auggaugauucagaaauugga

SEQ ID NO: 2365238 - RNA, 22 nt, Human
auggaugccaauauuaaaucug

SEQ ID NO: 2365239 - RNA, 13 nt, Human
auggaugccaaua

SEQ ID NO: 2365240 - RNA, 23 nt, Human
auggagcgcaccugcccccuggu

SEQ ID NO: 2365241 - RNA, 17 nt, Human
auggagcgcaccugccc

SEQ ID NO: 2365242 - RNA, 12 nt, Human
auggagccccag

SEQ ID NO: 2365243 - RNA, 15 nt, Human
auggagccccagccc

SEQ ID NO: 2365244 - RNA, 16 nt, Human
auggagccccagcccc

SEQ ID NO: 2365245 - RNA, 14 nt, Human
auggagcucagaga

SEQ ID NO: 2365246 - RNA, 22 nt, Human
auggagcucagagagggcaggc

SEQ ID NO: 2365247 - RNA, 21 nt, Human
auggagccagcucugcauuau

SEQ ID NO: 2365248 - RNA, 12 nt, Human
auggagcccagg

SEQ ID NO: 2365249 - RNA, 13 nt, Human
auggagcccaggc

SEQ ID NO: 2365250 - RNA, 14 nt, Human
auggagcccaggcg

SEQ ID NO: 2365251 - RNA, 23 nt, Human
auggagcccaggcgggagcggug

SEQ ID NO: 2365252 - RNA, 16 nt, Human
augcuuuuugaauguu

SEQ ID NO: 2365253 - RNA, 22 nt, Human
augcuuuuugaauguuauuugu

SEQ ID NO: 2365254 - RNA, 14 nt, Human
auggaaaaaaugau

SEQ ID NO: 2365255 - RNA, 23 nt, Human
augcuuuuuauuucugcauaugu

SEQ ID NO: 2365256 - RNA, 19 nt, Human
augcuuuuuauuucugcau

SEQ ID NO: 2365257 - RNA, 16 nt, Human
augcuuuuuauuucug

SEQ ID NO: 2365258 - RNA, 22 nt, Human
augcuuuuuauuauuauuauuu

SEQ ID NO: 2365259 - RNA, 15 nt, Human
augcuuugugaacaa

SEQ ID NO: 2365260 - RNA, 22 nt, Human
augcuuuuauauuuuuuuaaaa

SEQ ID NO: 2365261 - RNA, 19 nt, Human
augcuuuucugucucugcc

SEQ ID NO: 2365262 - RNA, 20 nt, Human
augcuuuucugucucugccu

SEQ ID NO: 2365263 - RNA, 16 nt, Human
augcuuugugugauug

SEQ ID NO: 2365264 - RNA, 22 nt, Human
augcuuugugugauugaaucug

SEQ ID NO: 2365265 - RNA, 17 nt, Human
augcuuuuaaaaaucua

SEQ ID NO: 2365266 - RNA, 12 nt, Human
auggaaaaggaa

SEQ ID NO: 2365267 - RNA, 13 nt, Human
auggaaauguuua

SEQ ID NO: 2365268 - RNA, 20 nt, Human
auggaaauucccuucaucug

SEQ ID NO: 2365269 - RNA, 19 nt, Human
auggaaaugggcagagcag

SEQ ID NO: 2365270 - RNA, 20 nt, Human
auggaaaugggcagagcaga

SEQ ID NO: 2365271 - RNA, 12 nt, Human
augcuugaaaaa

SEQ ID NO: 2365272 - RNA, 15 nt, Human
augcuugaaaaaugu

SEQ ID NO: 2365273 - RNA, 23 nt, Human
augcuugccuagggccuggucca

SEQ ID NO: 2365274 - RNA, 21 nt, Human
augcuugccuagggccugguc

SEQ ID NO: 2365275 - RNA, 20 nt, Human
augcuugccuagggccuggu

SEQ ID NO: 2365276 - RNA, 16 nt, Human
augcuugccuagggcc

SEQ ID NO: 2365277 - RNA, 11 nt, Human
augcuugccua

SEQ ID NO: 2365278 - RNA, 12 nt, Human
augcuucuugga

SEQ ID NO: 2365279 - RNA, 15 nt, Human
augcuucuucucagg

SEQ ID NO: 2365280 - RNA, 15 nt, Human
augcuucuuccuuac

SEQ ID NO: 2365281 - RNA, 19 nt, Human
augaugugggucaaggaau

SEQ ID NO: 2365282 - RNA, 19 nt, Human
augauguggaguggggcag

SEQ ID NO: 2365283 - RNA, 19 nt, Human
augauguguacccaaacgu

SEQ ID NO: 2365284 - RNA, 23 nt, Human
augauguggaguggggcaguaga

SEQ ID NO: 2365285 - RNA, 20 nt, Human
augauguggugccugagguc

SEQ ID NO: 2365286 - RNA, 16 nt, Human
augaugugugaaaacu

SEQ ID NO: 2365287 - RNA, 13 nt, Human
augcaauauguau

SEQ ID NO: 2365288 - RNA, 22 nt, Human
augcaauauaucuaaauugaau

SEQ ID NO: 2365289 - RNA, 20 nt, Human
augcaauauaucuaaauuga

SEQ ID NO: 2365290 - RNA, 21 nt, Human
augcaauauaucuaaauugaa

SEQ ID NO: 2365291 - RNA, 15 nt, Human
augcaauauaucuaa

SEQ ID NO: 2365292 - RNA, 23 nt, Human
augauguggugccugaggucugu

SEQ ID NO: 2365293 - RNA, 19 nt, Human
augcaauauaucuaaauug

SEQ ID NO: 2365294 - RNA, 14 nt, Human
augcaauauguauu

SEQ ID NO: 2365295 - RNA, 23 nt, Human
augauguccagaagaauauucag

SEQ ID NO: 2365296 - RNA, 14 nt, Human
augaugugccuggg

SEQ ID NO: 2365297 - RNA, 16 nt, Human
augaugugccugggug

SEQ ID NO: 2365298 - RNA, 15 nt, Human
augauguauuuuugu

SEQ ID NO: 2365299 - RNA, 16 nt, Human
augauguauuuuugua

SEQ ID NO: 2365300 - RNA, 14 nt, Human
augauguccagaag

SEQ ID NO: 2365301 - RNA, 15 nt, Human
augauguccagaaga

SEQ ID NO: 2365302 - RNA, 18 nt, Human
augauguccagaagaaua

SEQ ID NO: 2365303 - RNA, 19 nt, Human
augauguccagaagaauau

SEQ ID NO: 2365304 - RNA, 23 nt, Human
augauguauguugaagccuuugu

SEQ ID NO: 2365305 - RNA, 18 nt, Human
augcaaugugcuacugau

SEQ ID NO: 2365306 - RNA, 17 nt, Human
augcaaugugcuacuga

SEQ ID NO: 2365307 - RNA, 16 nt, Human
augcaaugugcuacug

SEQ ID NO: 2365308 - RNA, 13 nt, Human
augcaaugugcua

SEQ ID NO: 2365309 - RNA, 14 nt, Human
augcaaugugaagc

SEQ ID NO: 2365310 - RNA, 19 nt, Human
augcaaugacaucuucaaa

SEQ ID NO: 2365311 - RNA, 17 nt, Human
augcacacauuuuuuaa

SEQ ID NO: 2365312 - RNA, 22 nt, Human
augcacacauuuuuuaaaugca

SEQ ID NO: 2365313 - RNA, 19 nt, Human
augcacacauuuuuuaaau

SEQ ID NO: 2365314 - RNA, 21 nt, Human
augcacagcuaacauggaagu

SEQ ID NO: 2365315 - RNA, 19 nt, Human
augcaauuuauuaaaauga

SEQ ID NO: 2365316 - RNA, 23 nt, Human
augcacacauuuuuuaaaugcac

SEQ ID NO: 2365317 - RNA, 23 nt, Human
augcacagaguuguuacauuuuu

SEQ ID NO: 2365318 - RNA, 14 nt, Human
augcacagcuaaca

SEQ ID NO: 2365319 - RNA, 15 nt, Human
augccugguggcagc

SEQ ID NO: 2365320 - RNA, 16 nt, Human
augccugguggcagcu

SEQ ID NO: 2365321 - RNA, 17 nt, Human
augccugguggcagcug

SEQ ID NO: 2365322 - RNA, 13 nt, Human
augccuuucuagu

SEQ ID NO: 2365323 - RNA, 21 nt, Human
augccuuucuaguccuauucu

SEQ ID NO: 2365324 - RNA, 22 nt, Human
augccuuucuaguccuauucua

SEQ ID NO: 2365325 - RNA, 12 nt, Human
augccuuugaga

SEQ ID NO: 2365326 - RNA, 13 nt, Human
augccuuugagac

SEQ ID NO: 2365327 - RNA, 14 nt, Human
augccuuugagaca

SEQ ID NO: 2365328 - RNA, 21 nt, Human
augccuggauggggcugcacc

SEQ ID NO: 2365329 - RNA, 23 nt, Human
augccuggauggggcugcaccgg

SEQ ID NO: 2365330 - RNA, 18 nt, Human
augccuggucuuuccucu

SEQ ID NO: 2365331 - RNA, 13 nt, Human
augccuggcuucg

SEQ ID NO: 2365332 - RNA, 16 nt, Human
augccuggucuuuccu

SEQ ID NO: 2365333 - RNA, 17 nt, Human
augccugggcagaagga

SEQ ID NO: 2365334 - RNA, 17 nt, Human
augcauuugaggucaag

SEQ ID NO: 2365335 - RNA, 13 nt, Human
augcauuugaggu

SEQ ID NO: 2365336 - RNA, 22 nt, Human
augcauuguuguucugcucaau

SEQ ID NO: 2365337 - RNA, 16 nt, Human
augcauuguugaggug

SEQ ID NO: 2365338 - RNA, 15 nt, Human
augcauuguugaggu

SEQ ID NO: 2365339 - RNA, 18 nt, Human
augcauuugaaaauuuug

SEQ ID NO: 2365340 - RNA, 12 nt, Human
augcauuugaaa

SEQ ID NO: 2365341 - RNA, 10 nt, Human
augcauuuga

SEQ ID NO: 2365342 - RNA, 18 nt, Human
augcacauauggacucug

SEQ ID NO: 2365343 - RNA, 20 nt, Human
augcaugaaguaauaugcac

SEQ ID NO: 2365344 - RNA, 23 nt, Human
augcaugaaguaauaugcacaca

SEQ ID NO: 2365345 - RNA, 12 nt, Human
augcauggaaac

SEQ ID NO: 2365346 - RNA, 12 nt, Human
augcauggaaau

SEQ ID NO: 2365347 - RNA, 20 nt, Human
augcauggaaaccugaaaaa

SEQ ID NO: 2365348 - RNA, 23 nt, Human
augcauggaaaccugaaaaaaag

SEQ ID NO: 2365349 - RNA, 20 nt, Human
augcaugcagccacugugcu

SEQ ID NO: 2365350 - RNA, 17 nt, Human
augcaugcacuguuccc

SEQ ID NO: 2365351 - RNA, 14 nt, Human
augccuuuuauuuc

SEQ ID NO: 2365352 - RNA, 23 nt, Human
augccuuugagacaguuucuuag

SEQ ID NO: 2365353 - RNA, 21 nt, Human
augccuuugagacaguuucuu

SEQ ID NO: 2365354 - RNA, 22 nt, Human
augccuuugagacaguuucuua

SEQ ID NO: 2365355 - RNA, 15 nt, Human
augccuuugagacag

SEQ ID NO: 2365356 - RNA, 16 nt, Human
augccuuugagacagu

SEQ ID NO: 2365357 - RNA, 19 nt, Human
augccuuugagacaguuuc

SEQ ID NO: 2365358 - RNA, 20 nt, Human
augccuuugagacaguuucu

SEQ ID NO: 2365359 - RNA, 21 nt, Human
augccuuuguacuuuagggaa

SEQ ID NO: 2365360 - RNA, 13 nt, Human
auguacagucugu

SEQ ID NO: 2365361 - RNA, 14 nt, Human
auguacagucuguc

SEQ ID NO: 2365362 - RNA, 15 nt, Human
auguacagucuguca

SEQ ID NO: 2365363 - RNA, 16 nt, Human
auguacagucugucau

SEQ ID NO: 2365364 - RNA, 17 nt, Human
auguacagucugucaug

SEQ ID NO: 2365365 - RNA, 11 nt, Human
auguacagugu

SEQ ID NO: 2365366 - RNA, 14 nt, Human
auguacaguguucu

SEQ ID NO: 2365367 - RNA, 17 nt, Human
auguacauguacugauu

SEQ ID NO: 2365368 - RNA, 17 nt, Human
auguacaguguucuguu

SEQ ID NO: 2365369 - RNA, 20 nt, Human
auguacaguguucuguuuaa

SEQ ID NO: 2365370 - RNA, 21 nt, Human
auguacagagaacuaacacua

SEQ ID NO: 2365371 - RNA, 14 nt, Human
auguacaagaugaa

SEQ ID NO: 2365372 - RNA, 23 nt, Human
auguacagagaacuaacacuauu

SEQ ID NO: 2365373 - RNA, 19 nt, Human
auguaaucuugaauuguaa

SEQ ID NO: 2365374 - RNA, 23 nt, Human
auguaaucugauggcuucuccag

SEQ ID NO: 2365375 - RNA, 16 nt, Human
augucaaguaccaaaa

SEQ ID NO: 2365376 - RNA, 16 nt, Human
augucaaucagccuag

SEQ ID NO: 2365377 - RNA, 19 nt, Human
augucaacuucuggcuccu

SEQ ID NO: 2365378 - RNA, 17 nt, Human
augucaacuucuggcuc

SEQ ID NO: 2365379 - RNA, 18 nt, Human
augucaacuucuggcucc

SEQ ID NO: 2365380 - RNA, 20 nt, Human
augucaaagagaaaacuuau

SEQ ID NO: 2365381 - RNA, 17 nt, Human
augucaacugaccuaaa

SEQ ID NO: 2365382 - RNA, 14 nt, Human
augucaacuucugg

SEQ ID NO: 2365383 - RNA, 15 nt, Human
auguacaugagaagg

SEQ ID NO: 2365384 - RNA, 15 nt, Human
augucacaggcaggu

SEQ ID NO: 2365385 - RNA, 14 nt, Human
augucacaggcagg

SEQ ID NO: 2365386 - RNA, 16 nt, Human
augucacaggcagguc

SEQ ID NO: 2365387 - RNA, 17 nt, Human
augucacaggcaggucc

SEQ ID NO: 2365388 - RNA, 14 nt, Human
augucacugugguc

SEQ ID NO: 2365389 - RNA, 16 nt, Human
augucacugugguccu

SEQ ID NO: 2365390 - RNA, 16 nt, Human
augucagacuggcugg

SEQ ID NO: 2365391 - RNA, 23 nt, Human
augucagacauccauguuuguaa

SEQ ID NO: 2365392 - RNA, 14 nt, Human
augucagauacaau

SEQ ID NO: 2365393 - RNA, 16 nt, Human
augucagauacaaugu

SEQ ID NO: 2365394 - RNA, 18 nt, Human
augucagauacaauguau

SEQ ID NO: 2365395 - RNA, 13 nt, Human
augucagcaaaaa

SEQ ID NO: 2365396 - RNA, 15 nt, Human
augucagcaaaaagc

SEQ ID NO: 2365397 - RNA, 16 nt, Human
augucagcaaaaagca

SEQ ID NO: 2365398 - RNA, 22 nt, Human
augucagcaaaaagcaaaauca

SEQ ID NO: 2365399 - RNA, 23 nt, Human
augucagcaaaaagcaaaaucau

SEQ ID NO: 2365400 - RNA, 20 nt, Human
auguaagagcaccuuccuca

SEQ ID NO: 2365401 - RNA, 18 nt, Human
auguaacuuuuguaagac

SEQ ID NO: 2365402 - RNA, 17 nt, Human
auguaacuuuuguaaga

SEQ ID NO: 2365403 - RNA, 24 nt, Human
auggugaaaccccgucucuacuaa

SEQ ID NO: 2365404 - RNA, 16 nt, Human
auggugaaaauguacu

SEQ ID NO: 2365405 - RNA, 17 nt, Human
auggugaaaauguacug

SEQ ID NO: 2365406 - RNA, 23 nt, Human
auggugacuuuugaaaagaggug

SEQ ID NO: 2365407 - RNA, 17 nt, Human
auggugaaauuuauuag

SEQ ID NO: 2365408 - RNA, 21 nt, Human
auggugagagaagccugugcc

SEQ ID NO: 2365409 - RNA, 16 nt, Human
auguaacuuuuguaag

SEQ ID NO: 2365410 - RNA, 18 nt, Human
auggugagaugcagcugg

SEQ ID NO: 2365411 - RNA, 14 nt, Human
auguaacuuuugua

SEQ ID NO: 2365412 - RNA, 14 nt, Human
auggucucagaaac

SEQ ID NO: 2365413 - RNA, 18 nt, Human
auggucucagaaaccaaa

SEQ ID NO: 2365414 - RNA, 15 nt, Human
auggucuucagccuc

SEQ ID NO: 2365415 - RNA, 17 nt, Human
auggucuucagccucuu

SEQ ID NO: 2365416 - RNA, 12 nt, Human
auggugaaaaug

SEQ ID NO: 2365417 - RNA, 14 nt, Human
auggugaaaaugua

SEQ ID NO: 2365418 - RNA, 17 nt, Human
auguaagcucuacugag

SEQ ID NO: 2365419 - RNA, 20 nt, Human
auguaagggaaacugccagc

SEQ ID NO: 2365420 - RNA, 22 nt, Human
auguaagggaaacugccagcaa

SEQ ID NO: 2365421 - RNA, 21 nt, Human
auguaagggaaacugccagca

SEQ ID NO: 2365422 - RNA, 14 nt, Human
auguaauaauguga

SEQ ID NO: 2365423 - RNA, 19 nt, Human
auguaauaaaaaguauaug

SEQ ID NO: 2365424 - RNA, 22 nt, Human
auguaauaagguugaacacuuu

SEQ ID NO: 2365425 - RNA, 17 nt, Human
auguaauaacugugaag

SEQ ID NO: 2365426 - RNA, 16 nt, Human
auguaauaaugugaau

SEQ ID NO: 2365427 - RNA, 15 nt, Human
auguaaucaauguuu

SEQ ID NO: 2365428 - RNA, 16 nt, Human
auguaaucaauguuuc

SEQ ID NO: 2365429 - RNA, 18 nt, Human
auguaaguuuaccuaugu

SEQ ID NO: 2365430 - RNA, 14 nt, Human
auguaauaaacuuu

SEQ ID NO: 2365431 - RNA, 15 nt, Human
auguaauaaacuuua

SEQ ID NO: 2365432 - RNA, 16 nt, Human
auguaauaaacuuuaa

SEQ ID NO: 2365433 - RNA, 14 nt, Human
augucuuguacaug

SEQ ID NO: 2365434 - RNA, 17 nt, Human
augucuuguacaugugu

SEQ ID NO: 2365435 - RNA, 22 nt, Human
augucuuguacauguguagccu

SEQ ID NO: 2365436 - RNA, 19 nt, Human
augucuuggguaggcggga

SEQ ID NO: 2365437 - RNA, 20 nt, Human
augucuuggacacuguacaa

SEQ ID NO: 2365438 - RNA, 16 nt, Human
augucuuggacacugu

SEQ ID NO: 2365439 - RNA, 19 nt, Human
augucuuggacacuguaca

SEQ ID NO: 2365440 - RNA, 14 nt, Human
augucuucugccug

SEQ ID NO: 2365441 - RNA, 12 nt, Human
augucuucugcc

SEQ ID NO: 2365442 - RNA, 15 nt, Human
augucuucugccugu

SEQ ID NO: 2365443 - RNA, 17 nt, Human
augucuucugccuguua

SEQ ID NO: 2365444 - RNA, 19 nt, Human
augucuucugccuguuaua

SEQ ID NO: 2365445 - RNA, 20 nt, Human
augucuucuguauucacuua

SEQ ID NO: 2365446 - RNA, 13 nt, Human
augucuuggacac

SEQ ID NO: 2365447 - RNA, 23 nt, Human
augucuugaugcaugcacuguuc

SEQ ID NO: 2365448 - RNA, 17 nt, Human
augugguuauuucucug

SEQ ID NO: 2365449 - RNA, 15 nt, Human
augugguucuucaaa

SEQ ID NO: 2365450 - RNA, 20 nt, Human
augugguugcaaggccgcug

SEQ ID NO: 2365451 - RNA, 18 nt, Human
augugguuauuucucuga

SEQ ID NO: 2365452 - RNA, 19 nt, Human
augugguuuauagagggcc

SEQ ID NO: 2365453 - RNA, 21 nt, Human
auguggugggacagggaccca

SEQ ID NO: 2365454 - RNA, 15 nt, Human
auguggugggacagg

SEQ ID NO: 2365455 - RNA, 15 nt, Human
augugguuacacacu

SEQ ID NO: 2365456 - RNA, 13 nt, Human
auguggugccuga

SEQ ID NO: 2365457 - RNA, 14 nt, Human
auguguaaguauuc

SEQ ID NO: 2365458 - RNA, 13 nt, Human
augugguuuauag

SEQ ID NO: 2365459 - RNA, 16 nt, Human
auguguaaucaauaaa

SEQ ID NO: 2365460 - RNA, 17 nt, Human
auguguaaucaauaaac

SEQ ID NO: 2365461 - RNA, 20 nt, Human
auguguaaucaauaaacgau

SEQ ID NO: 2365462 - RNA, 21 nt, Human
auguguaaucaauaaacgauu

SEQ ID NO: 2365463 - RNA, 16 nt, Human
augugggucaaggaau

SEQ ID NO: 2365464 - RNA, 21 nt, Human
augugggguccccaucauccc

SEQ ID NO: 2365465 - RNA, 18 nt, Human
augugggggucugugugu

SEQ ID NO: 2365466 - RNA, 17 nt, Human
augugggggucugugug

SEQ ID NO: 2365467 - RNA, 18 nt, Human
auguggugaggcaggcuu

SEQ ID NO: 2365468 - RNA, 18 nt, Human
augugguggcacaggccc

SEQ ID NO: 2365469 - RNA, 22 nt, Human
augugguggcacaggcccccuu

SEQ ID NO: 2365470 - RNA, 16 nt, Human
augugggggucugugu

SEQ ID NO: 2365471 - RNA, 13 nt, Human
auguggggccagg

SEQ ID NO: 2365472 - RNA, 16 nt, Human
auguggggccagguca

SEQ ID NO: 2365473 - RNA, 11 nt, Human
auuaaauuaug

SEQ ID NO: 2365474 - RNA, 13 nt, Human
auuaaauucacaa

SEQ ID NO: 2365475 - RNA, 16 nt, Human
auuaaaugcccagccc

SEQ ID NO: 2365476 - RNA, 13 nt, Human
auuaaauucuugc

SEQ ID NO: 2365477 - RNA, 18 nt, Human
auuaaauucacaaacuuu

SEQ ID NO: 2365478 - RNA, 17 nt, Human
auuaaauucacaaacuu

SEQ ID NO: 2365479 - RNA, 16 nt, Human
auuaaauucacaaacu

SEQ ID NO: 2365480 - RNA, 14 nt, Human
auuaaauucacaaa

SEQ ID NO: 2365481 - RNA, 14 nt, Human
auuaaaugcccagc

SEQ ID NO: 2365482 - RNA, 15 nt, Human
auuaaaugcccagcc

SEQ ID NO: 2365483 - RNA, 16 nt, Human
auguuuuaagaggcag

SEQ ID NO: 2365484 - RNA, 18 nt, Human
auguuuuaagaggcaggg

SEQ ID NO: 2365485 - RNA, 16 nt, Human
auguuugcacuuguga

SEQ ID NO: 2365486 - RNA, 18 nt, Human
auguuuguggccucagaa

SEQ ID NO: 2365487 - RNA, 21 nt, Human
auguuuuaaacauagaaaguu

SEQ ID NO: 2365488 - RNA, 14 nt, Human
auguuuuaauucca

SEQ ID NO: 2365489 - RNA, 16 nt, Human
auguuuuaacaaaaac

SEQ ID NO: 2365490 - RNA, 15 nt, Human
auguuuuaacaaaaa

SEQ ID NO: 2365491 - RNA, 15 nt, Human
auguuuuaauuccau

SEQ ID NO: 2365492 - RNA, 16 nt, Human
auguuuuaauuccaug

SEQ ID NO: 2365493 - RNA, 17 nt, Human
auguuuuaauuccauga

SEQ ID NO: 2365494 - RNA, 18 nt, Human
auguuuuaauuccaugaa

SEQ ID NO: 2365495 - RNA, 23 nt, Human
auuaaaguguccauugacaugua

SEQ ID NO: 2365496 - RNA, 12 nt, Human
auuaaaguucua

SEQ ID NO: 2365497 - RNA, 19 nt, Human
auuaaaguucuagugaccg

SEQ ID NO: 2365498 - RNA, 21 nt, Human
auuaaaguucuguaaaauaua

SEQ ID NO: 2365499 - RNA, 15 nt, Human
auuaaaguguccauu

SEQ ID NO: 2365500 - RNA, 17 nt, Human
auuaaaguguccauuga

SEQ ID NO: 2365501 - RNA, 19 nt, Human
auuaaaguguccauugaca

SEQ ID NO: 2365502 - RNA, 20 nt, Human
auuaaaguguccauugacau

SEQ ID NO: 2365503 - RNA, 22 nt, Human
auuaaaguguccauugacaugu

SEQ ID NO: 2365504 - RNA, 17 nt, Human
auguucugacauuaaca

SEQ ID NO: 2365505 - RNA, 16 nt, Human
auguucugacauuaac

SEQ ID NO: 2365506 - RNA, 15 nt, Human
auguucugacauuaa

SEQ ID NO: 2365507 - RNA, 14 nt, Human
auguucugacauua

SEQ ID NO: 2365508 - RNA, 22 nt, Human
auguucugacccugcuucaaau

SEQ ID NO: 2365509 - RNA, 20 nt, Human
auguucuuaguggauguucu

SEQ ID NO: 2365510 - RNA, 15 nt, Human
auguucuuaauucuu

SEQ ID NO: 2365511 - RNA, 20 nt, Human
auguucuuucacccuuuucu

SEQ ID NO: 2365512 - RNA, 20 nt, Human
auguucugacauuaacaguu

SEQ ID NO: 2365513 - RNA, 19 nt, Human
auguucugacauuaacagu

SEQ ID NO: 2365514 - RNA, 18 nt, Human
auguucugacauuaacag

SEQ ID NO: 2365515 - RNA, 18 nt, Human
auguuucuuuguaaugaa

SEQ ID NO: 2365516 - RNA, 21 nt, Human
auguuucuuuuguauguaaau

SEQ ID NO: 2365517 - RNA, 18 nt, Human
auguuucuuuuguaugua

SEQ ID NO: 2365518 - RNA, 19 nt, Human
auguuucuuuuguauguaa

SEQ ID NO: 2365519 - RNA, 20 nt, Human
auguuucuuuuguauguaaa

SEQ ID NO: 2365520 - RNA, 18 nt, Human
auguucucugaggacacu

SEQ ID NO: 2365521 - RNA, 16 nt, Human
auguucugaauaauuu

SEQ ID NO: 2365522 - RNA, 18 nt, Human
auguucugaauaauuucu

SEQ ID NO: 2365523 - RNA, 21 nt, Human
augugucaacuucaacauuua

SEQ ID NO: 2365524 - RNA, 13 nt, Human
auguguccugguu

SEQ ID NO: 2365525 - RNA, 21 nt, Human
augugucacuacucacagucu

SEQ ID NO: 2365526 - RNA, 17 nt, Human
auguguauuuuauuaca

SEQ ID NO: 2365527 - RNA, 20 nt, Human
auguguauuuccagugcaau

SEQ ID NO: 2365528 - RNA, 18 nt, Human
auguguauuacaaauauu

SEQ ID NO: 2365529 - RNA, 20 nt, Human
auguguaugggcaaaaaacu

SEQ ID NO: 2365530 - RNA, 20 nt, Human
auguguauguacguuuguau

SEQ ID NO: 2365531 - RNA, 19 nt, Human
auguguacaucccauguaa

SEQ ID NO: 2365532 - RNA, 21 nt, Human
auguguacaucccauguaaca

SEQ ID NO: 2365533 - RNA, 14 nt, Human
auguguacauggca

SEQ ID NO: 2365534 - RNA, 16 nt, Human
auguguacauggcaga

SEQ ID NO: 2365535 - RNA, 22 nt, Human
auguguacauggcagaguuugu

SEQ ID NO: 2365536 - RNA, 16 nt, Human
auguguacgugugugu

SEQ ID NO: 2365537 - RNA, 22 nt, Human
auguguaaucaauaaacgauuu

SEQ ID NO: 2365538 - RNA, 22 nt, Human
auguguacaaaaguuucauccu

SEQ ID NO: 2365539 - RNA, 14 nt, Human
aucccuagcuguga

SEQ ID NO: 2365540 - RNA, 19 nt, Human
aucccuaugcugccuaggc

SEQ ID NO: 2365541 - RNA, 14 nt, Human
aucccuaugcugcc

SEQ ID NO: 2365542 - RNA, 21 nt, Human
aucccuagucuucaagcagau

SEQ ID NO: 2365543 - RNA, 19 nt, Human
aucccuagucuucaagcag

SEQ ID NO: 2365544 - RNA, 17 nt, Human
aucccuaugggauucag

SEQ ID NO: 2365545 - RNA, 13 nt, Human
aucccucaccugu

SEQ ID NO: 2365546 - RNA, 22 nt, Human
aucccgccucuucuucuucaga

SEQ ID NO: 2365547 - RNA, 16 nt, Human
aucccgccaccuaucu

SEQ ID NO: 2365548 - RNA, 14 nt, Human
aucccggcugcccu

SEQ ID NO: 2365549 - RNA, 15 nt, Human
aucccuacuguaauu

SEQ ID NO: 2365550 - RNA, 18 nt, Human
auccucauacccaccccc

SEQ ID NO: 2365551 - RNA, 14 nt, Human
aucccucaccugua

SEQ ID NO: 2365552 - RNA, 17 nt, Human
aucccucaccuguagca

SEQ ID NO: 2365553 - RNA, 19 nt, Human
auccucauacccaccccca

SEQ ID NO: 2365554 - RNA, 22 nt, Human
auccucauacccacccccaccc

SEQ ID NO: 2365555 - RNA, 18 nt, Human
auccacccaccucagccu

SEQ ID NO: 2365556 - RNA, 20 nt, Human
auccacccaccucagccucc

SEQ ID NO: 2365557 - RNA, 16 nt, Human
auccacccaccucagc

SEQ ID NO: 2365558 - RNA, 15 nt, Human
aucccgauucacccu

SEQ ID NO: 2365559 - RNA, 20 nt, Human
aucccgauucacccugucca

SEQ ID NO: 2365560 - RNA, 19 nt, Human
aucccgagcaccuccacau

SEQ ID NO: 2365561 - RNA, 17 nt, Human
aucccgagcaccuccac

SEQ ID NO: 2365562 - RNA, 14 nt, Human
aucccgagcaccuc

SEQ ID NO: 2365563 - RNA, 14 nt, Human
aucccgaaaaucuc

SEQ ID NO: 2365564 - RNA, 15 nt, Human
auccacccagcccau

SEQ ID NO: 2365565 - RNA, 13 nt, Human
auccacccagccc

SEQ ID NO: 2365566 - RNA, 14 nt, Human
auccacccagccca

SEQ ID NO: 2365567 - RNA, 16 nt, Human
auccuccguccagccg

SEQ ID NO: 2365568 - RNA, 15 nt, Human
auccuccguccagcc

SEQ ID NO: 2365569 - RNA, 19 nt, Human
auccuccccuucccugcaa

SEQ ID NO: 2365570 - RNA, 11 nt, Human
auccuccucag

SEQ ID NO: 2365571 - RNA, 18 nt, Human
auccuccccuucccugca

SEQ ID NO: 2365572 - RNA, 15 nt, Human
auccuccccuucccu

SEQ ID NO: 2365573 - RNA, 13 nt, Human
auccuccccuucc

SEQ ID NO: 2365574 - RNA, 11 nt, Human
auccuccccuu

SEQ ID NO: 2365575 - RNA, 12 nt, Human
auccucccaggc

SEQ ID NO: 2365576 - RNA, 23 nt, Human
auccucauacccacccccaccca

SEQ ID NO: 2365577 - RNA, 13 nt, Human
auccuccaggugc

SEQ ID NO: 2365578 - RNA, 14 nt, Human
auccuccaggugca

SEQ ID NO: 2365579 - RNA, 19 nt, Human
auccuccaggugcacaagc

SEQ ID NO: 2365580 - RNA, 22 nt, Human
auccuccaggugcacaagcucc

SEQ ID NO: 2365581 - RNA, 13 nt, Human
aucgaugcagugc

SEQ ID NO: 2365582 - RNA, 15 nt, Human
auccuuuuucuuuau

SEQ ID NO: 2365583 - RNA, 19 nt, Human
auccuuuuauguuauuuau

SEQ ID NO: 2365584 - RNA, 13 nt, Human
aucgauguuaugu

SEQ ID NO: 2365585 - RNA, 15 nt, Human
aucgauguuauguaa

SEQ ID NO: 2365586 - RNA, 20 nt, Human
aucgauuuuuaaaaauuaaa

SEQ ID NO: 2365587 - RNA, 11 nt, Human
aucgauuggcu

SEQ ID NO: 2365588 - RNA, 12 nt, Human
aucgauuggcuu

SEQ ID NO: 2365589 - RNA, 15 nt, Human
aucgaggaaccagag

SEQ ID NO: 2365590 - RNA, 22 nt, Human
auccuuuuuaaauucaguccua

SEQ ID NO: 2365591 - RNA, 23 nt, Human
aucgaugggggagucugaagcag

SEQ ID NO: 2365592 - RNA, 13 nt, Human
aucgauggccuug

SEQ ID NO: 2365593 - RNA, 15 nt, Human
auccuuuucugcaga

SEQ ID NO: 2365594 - RNA, 17 nt, Human
auccuuuuauguuauuu

SEQ ID NO: 2365595 - RNA, 18 nt, Human
auccuuuuauguuauuua

SEQ ID NO: 2365596 - RNA, 13 nt, Human
auccuuuuauguu

SEQ ID NO: 2365597 - RNA, 16 nt, Human
auccuuuuauguuauu

SEQ ID NO: 2365598 - RNA, 17 nt, Human
auccuuucugccucuca

SEQ ID NO: 2365599 - RNA, 19 nt, Human
auccuuucugccucucaac

SEQ ID NO: 2365600 - RNA, 14 nt, Human
auccuccucagauc

SEQ ID NO: 2365601 - RNA, 15 nt, Human
auccuuucuaaacaa

SEQ ID NO: 2365602 - RNA, 15 nt, Human
auccuuucuauugaa

SEQ ID NO: 2365603 - RNA, 13 nt, Human
auccuuucuaaca

SEQ ID NO: 2365604 - RNA, 20 nt, Human
aucgcaccacuguguauuua

SEQ ID NO: 2365605 - RNA, 17 nt, Human
aucgcaccauucugacu

SEQ ID NO: 2365606 - RNA, 18 nt, Human
aucgcaccauucugacuc

SEQ ID NO: 2365607 - RNA, 13 nt, Human
aucauguacauuu

SEQ ID NO: 2365608 - RNA, 23 nt, Human
aucaugguguaauaagacauaac

SEQ ID NO: 2365609 - RNA, 17 nt, Human
aucaugguguaauaaga

SEQ ID NO: 2365610 - RNA, 18 nt, Human
aucaugguguaauaagac

SEQ ID NO: 2365611 - RNA, 19 nt, Human
aucaugguguaauaagaca

SEQ ID NO: 2365612 - RNA, 20 nt, Human
aucaugguguaauaagacau

SEQ ID NO: 2365613 - RNA, 14 nt, Human
aucauguacauuuc

SEQ ID NO: 2365614 - RNA, 21 nt, Human
aucaugguguaauaagacaua

SEQ ID NO: 2365615 - RNA, 20 nt, Human
aucauggauucauuacagcu

SEQ ID NO: 2365616 - RNA, 21 nt, Human
aucauggauucauuacagcuu

SEQ ID NO: 2365617 - RNA, 15 nt, Human
aucauggcuaucugu

SEQ ID NO: 2365618 - RNA, 14 nt, Human
aucaugguguaaua

SEQ ID NO: 2365619 - RNA, 16 nt, Human
aucaugguguaauaag

SEQ ID NO: 2365620 - RNA, 21 nt, Human
aucaucuauugcuggcaaaga

SEQ ID NO: 2365621 - RNA, 23 nt, Human
aucaucuccugccuuccuccugg

SEQ ID NO: 2365622 - RNA, 20 nt, Human
aucaucuccugccuuccucc

SEQ ID NO: 2365623 - RNA, 19 nt, Human
aucauggagguuugaagau

SEQ ID NO: 2365624 - RNA, 12 nt, Human
aucauggaguga

SEQ ID NO: 2365625 - RNA, 18 nt, Human
aucaucugugugaaaaug

SEQ ID NO: 2365626 - RNA, 19 nt, Human
aucaucugugugaaaaugg

SEQ ID NO: 2365627 - RNA, 18 nt, Human
aucaucuguggaacccau

SEQ ID NO: 2365628 - RNA, 13 nt, Human
aucaucuguguga

SEQ ID NO: 2365629 - RNA, 16 nt, Human
aucaucugugugaaaa

SEQ ID NO: 2365630 - RNA, 13 nt, Human
aucaucugccgug

SEQ ID NO: 2365631 - RNA, 18 nt, Human
aucaucuauaaagaagaa

SEQ ID NO: 2365632 - RNA, 23 nt, Human
aucagcugcuacuacuccuguag

SEQ ID NO: 2365633 - RNA, 13 nt, Human
aucagcugcuacu

SEQ ID NO: 2365634 - RNA, 17 nt, Human
aucagcugcugaaacaa

SEQ ID NO: 2365635 - RNA, 14 nt, Human
aucagccugucucu

SEQ ID NO: 2365636 - RNA, 22 nt, Human
aucagccugagucuccugugcc

SEQ ID NO: 2365637 - RNA, 12 nt, Human
aucagcugcuac

SEQ ID NO: 2365638 - RNA, 21 nt, Human
aucagccugggcaaugugaua

SEQ ID NO: 2365639 - RNA, 20 nt, Human
aucagccugggcaaugugau

SEQ ID NO: 2365640 - RNA, 11 nt, Human
aucagccuggg

SEQ ID NO: 2365641 - RNA, 15 nt, Human
aucagccucuuaaag

SEQ ID NO: 2365642 - RNA, 12 nt, Human
aucagccugagu

SEQ ID NO: 2365643 - RNA, 17 nt, Human
aucagccugagucuccu

SEQ ID NO: 2365644 - RNA, 18 nt, Human
aucagccugagucuccug

SEQ ID NO: 2365645 - RNA, 19 nt, Human
aucagccugagucuccugu

SEQ ID NO: 2365646 - RNA, 20 nt, Human
aucagccugagucuccugug

SEQ ID NO: 2365647 - RNA, 13 nt, Human
aucagccucuuaa

SEQ ID NO: 2365648 - RNA, 11 nt, Human
aucagccucuu

SEQ ID NO: 2365649 - RNA, 20 nt, Human
aucagccuaggggucaggga

SEQ ID NO: 2365650 - RNA, 15 nt, Human
aucagccacauucua

SEQ ID NO: 2365651 - RNA, 16 nt, Human
aucagccaauuauguu

SEQ ID NO: 2365652 - RNA, 18 nt, Human
aucagccaauuauguuaa

SEQ ID NO: 2365653 - RNA, 19 nt, Human
aucagccaauuauguuaaa

SEQ ID NO: 2365654 - RNA, 14 nt, Human
aucaccucaggcca

SEQ ID NO: 2365655 - RNA, 13 nt, Human
aucaccuccccuc

SEQ ID NO: 2365656 - RNA, 15 nt, Human
aucagccaauuaugu

SEQ ID NO: 2365657 - RNA, 14 nt, Human
aucagccaauuaug

SEQ ID NO: 2365658 - RNA, 12 nt, Human
aucaccugaggu

SEQ ID NO: 2365659 - RNA, 15 nt, Human
aucaccuccccuccu

SEQ ID NO: 2365660 - RNA, 15 nt, Human
aucaccucaggccag

SEQ ID NO: 2365661 - RNA, 12 nt, Human
aucaccuccccu

SEQ ID NO: 2365662 - RNA, 13 nt, Human
aucaccugcccug

SEQ ID NO: 2365663 - RNA, 12 nt, Human
aucaccugcccu

SEQ ID NO: 2365664 - RNA, 13 nt, Human
augaccuuacauu

SEQ ID NO: 2365665 - RNA, 19 nt, Human
augacucaggacauccccc

SEQ ID NO: 2365666 - RNA, 17 nt, Human
augacucacaugaugca

SEQ ID NO: 2365667 - RNA, 14 nt, Human
augacucagaauau

SEQ ID NO: 2365668 - RNA, 19 nt, Human
augacuagaggcagggagg

SEQ ID NO: 2365669 - RNA, 15 nt, Human
augacuagaggcagg

SEQ ID NO: 2365670 - RNA, 21 nt, Human
augaccugugaccagcacugu

SEQ ID NO: 2365671 - RNA, 19 nt, Human
augaccugugaccagcacu

SEQ ID NO: 2365672 - RNA, 14 nt, Human
augaccuggauaac

SEQ ID NO: 2365673 - RNA, 22 nt, Human
augacuagaggcagggagggga

SEQ ID NO: 2365674 - RNA, 17 nt, Human
augacuccagaauuucc

SEQ ID NO: 2365675 - RNA, 16 nt, Human
augacucggggguggg

SEQ ID NO: 2365676 - RNA, 12 nt, Human
augacuccagaa

SEQ ID NO: 2365677 - RNA, 16 nt, Human
augacuccagaauuuc

SEQ ID NO: 2365678 - RNA, 11 nt, Human
augaccccucc

SEQ ID NO: 2365679 - RNA, 22 nt, Human
augacccaggcugggcaaggag

SEQ ID NO: 2365680 - RNA, 19 nt, Human
augaagcuuguguauccau

SEQ ID NO: 2365681 - RNA, 23 nt, Human
augaagcuuuauacguguagcua

SEQ ID NO: 2365682 - RNA, 12 nt, Human
augacccagugg

SEQ ID NO: 2365683 - RNA, 16 nt, Human
augaccucaugcaucu

SEQ ID NO: 2365684 - RNA, 18 nt, Human
augaccucuuccuuuagg

SEQ ID NO: 2365685 - RNA, 23 nt, Human
augacccugcgaaggggcccugg

SEQ ID NO: 2365686 - RNA, 18 nt, Human
augaccuaguuuuccaug

SEQ ID NO: 2365687 - RNA, 18 nt, Human
augaagcuuuuaugugaa

SEQ ID NO: 2365688 - RNA, 19 nt, Human
augaagcuuuuaugugaaa

SEQ ID NO: 2365689 - RNA, 20 nt, Human
augaagcuuuuaugugaaac

SEQ ID NO: 2365690 - RNA, 21 nt, Human
augaagcuuuuaugugaaaca

SEQ ID NO: 2365691 - RNA, 20 nt, Human
augaaaacguuuuauugugu

SEQ ID NO: 2365692 - RNA, 18 nt, Human
augaaaacguuuuauugu

SEQ ID NO: 2365693 - RNA, 21 nt, Human
augaaaaaaggacaauuucaa

SEQ ID NO: 2365694 - RNA, 12 nt, Human
augaaaacuuau

SEQ ID NO: 2365695 - RNA, 19 nt, Human
augaaaacguuuuauugug

SEQ ID NO: 2365696 - RNA, 12 nt, Human
augaaaacucau

SEQ ID NO: 2365697 - RNA, 17 nt, Human
augaaaauacaacuuaa

SEQ ID NO: 2365698 - RNA, 13 nt, Human
augaaaauacaac

SEQ ID NO: 2365699 - RNA, 22 nt, Human
augaaaauacaacuuaaauaau

SEQ ID NO: 2365700 - RNA, 16 nt, Human
augaaaaugucuugug

SEQ ID NO: 2365701 - RNA, 14 nt, Human
augaaaauuguaug

SEQ ID NO: 2365702 - RNA, 12 nt, Human
augaaacaccuu

SEQ ID NO: 2365703 - RNA, 16 nt, Human
augaaacaccuucucu

SEQ ID NO: 2365704 - RNA, 20 nt, Human
augaaacacucaguuguuca

SEQ ID NO: 2365705 - RNA, 13 nt, Human
augaaacagaaac

SEQ ID NO: 2365706 - RNA, 17 nt, Human
augaaacaccuucucug

SEQ ID NO: 2365707 - RNA, 19 nt, Human
augaaacaccuucucugga

SEQ ID NO: 2365708 - RNA, 22 nt, Human
augaaacagaaacaaaaacacu

SEQ ID NO: 2365709 - RNA, 18 nt, Human
augaaacagaaacaaaaa

SEQ ID NO: 2365710 - RNA, 16 nt, Human
augaaacccccacaca

SEQ ID NO: 2365711 - RNA, 15 nt, Human
augaaacccccacac

SEQ ID NO: 2365712 - RNA, 19 nt, Human
augaaacccccacacacac

SEQ ID NO: 2365713 - RNA, 22 nt, Human
augaaaccuuauuuuuucccaa

SEQ ID NO: 2365714 - RNA, 18 nt, Human
augaagcuuguguaucca

SEQ ID NO: 2365715 - RNA, 18 nt, Human
augaaacccccacacaca

SEQ ID NO: 2365716 - RNA, 17 nt, Human
augaaacccccacacac

SEQ ID NO: 2365717 - RNA, 13 nt, Human
augaaaacaugua

SEQ ID NO: 2365718 - RNA, 20 nt, Human
aucuuuuuuuuauuccacau

SEQ ID NO: 2365719 - RNA, 14 nt, Human
aucuuuuuucacaa

SEQ ID NO: 2365720 - RNA, 17 nt, Human
aucuuuuuucacaaauu

SEQ ID NO: 2365721 - RNA, 22 nt, Human
augaaaaaauauauaucaaaua

SEQ ID NO: 2365722 - RNA, 14 nt, Human
augaaaaaauauau

SEQ ID NO: 2365723 - RNA, 17 nt, Human
augaaaaaauauauauc

SEQ ID NO: 2365724 - RNA, 14 nt, Human
aucuuuuuucaaaa

SEQ ID NO: 2365725 - RNA, 14 nt, Human
augagcuccagacc

SEQ ID NO: 2365726 - RNA, 14 nt, Human
augagccuggcaag

SEQ ID NO: 2365727 - RNA, 13 nt, Human
augagccuggcaa

SEQ ID NO: 2365728 - RNA, 13 nt, Human
augagcuccagac

SEQ ID NO: 2365729 - RNA, 20 nt, Human
augagcuauuuccauuccag

SEQ ID NO: 2365730 - RNA, 21 nt, Human
augagcuauuuccauuccaga

SEQ ID NO: 2365731 - RNA, 22 nt, Human
augagcuauuuccauuccagaa

SEQ ID NO: 2365732 - RNA, 23 nt, Human
augagcuauuuccauuccagaau

SEQ ID NO: 2365733 - RNA, 19 nt, Human
augagcuacgccugccucc

SEQ ID NO: 2365734 - RNA, 22 nt, Human
augacucccuuaaaauagaaau

SEQ ID NO: 2365735 - RNA, 14 nt, Human
augagcuauguauu

SEQ ID NO: 2365736 - RNA, 15 nt, Human
augagcuauguauua

SEQ ID NO: 2365737 - RNA, 16 nt, Human
augagcuauguauuaa

SEQ ID NO: 2365738 - RNA, 18 nt, Human
aucugggcauagaugcag

SEQ ID NO: 2365739 - RNA, 20 nt, Human
aucugggaguccccuuuucu

SEQ ID NO: 2365740 - RNA, 22 nt, Human
aucugggauucccaccaagguc

SEQ ID NO: 2365741 - RNA, 15 nt, Human
aucugggccagaauu

SEQ ID NO: 2365742 - RNA, 23 nt, Human
aucugggacccuuuccuuccuuc

SEQ ID NO: 2365743 - RNA, 18 nt, Human
aucugggaguccccuuuu

SEQ ID NO: 2365744 - RNA, 22 nt, Human
aucugggacccuuuccuuccuu

SEQ ID NO: 2365745 - RNA, 20 nt, Human
aucugggacccuuuccuucc

SEQ ID NO: 2365746 - RNA, 17 nt, Human
aucugggacccuuuccu

SEQ ID NO: 2365747 - RNA, 19 nt, Human
aucuggaccccaucuguga

SEQ ID NO: 2365748 - RNA, 21 nt, Human
aucuggaagccaaaauguagg

SEQ ID NO: 2365749 - RNA, 20 nt, Human
aucuggaaggggaucccacc

SEQ ID NO: 2365750 - RNA, 21 nt, Human
aucuggaaucuggagaccagg

SEQ ID NO: 2365751 - RNA, 22 nt, Human
aucuggaaccucagccuggcca

SEQ ID NO: 2365752 - RNA, 21 nt, Human
aucuggaaccucagccuggcc

SEQ ID NO: 2365753 - RNA, 20 nt, Human
aucuggaaccucagccuggc

SEQ ID NO: 2365754 - RNA, 19 nt, Human
aucuggaaccucagccugg

SEQ ID NO: 2365755 - RNA, 17 nt, Human
aucugggccagaauuuc

SEQ ID NO: 2365756 - RNA, 22 nt, Human
aucugggcuccuaaccuuccug

SEQ ID NO: 2365757 - RNA, 22 nt, Human
aucuuauaauuuaaaauaugcu

SEQ ID NO: 2365758 - RNA, 18 nt, Human
aucuuaucauggucucag

SEQ ID NO: 2365759 - RNA, 20 nt, Human
aucuuaucauggucucaguc

SEQ ID NO: 2365760 - RNA, 23 nt, Human
aucuucacuucuaaaugcauauc

SEQ ID NO: 2365761 - RNA, 13 nt, Human
aucuucacuucua

SEQ ID NO: 2365762 - RNA, 14 nt, Human
aucuucagagcagg

SEQ ID NO: 2365763 - RNA, 18 nt, Human
aucuucagagcagggguc

SEQ ID NO: 2365764 - RNA, 12 nt, Human
aucuucagcuuc

SEQ ID NO: 2365765 - RNA, 13 nt, Human
aucuucagcuucu

SEQ ID NO: 2365766 - RNA, 14 nt, Human
aucuucagcuucuu

SEQ ID NO: 2365767 - RNA, 15 nt, Human
aucuucagcuucuuc

SEQ ID NO: 2365768 - RNA, 21 nt, Human
aucuucaccagaggaaucacu

SEQ ID NO: 2365769 - RNA, 22 nt, Human
aucuucaccagaggaaucacuc

SEQ ID NO: 2365770 - RNA, 22 nt, Human
aucuucaguuuuaucuuuaauc

SEQ ID NO: 2365771 - RNA, 20 nt, Human
aucuucaguuuuaucuuuaa

SEQ ID NO: 2365772 - RNA, 14 nt, Human
aucuucaguuuuau

SEQ ID NO: 2365773 - RNA, 19 nt, Human
aucuuccaacucaaacucu

SEQ ID NO: 2365774 - RNA, 13 nt, Human
aucuucuaaaugg

SEQ ID NO: 2365775 - RNA, 15 nt, Human
aucucucuucuuuuc

SEQ ID NO: 2365776 - RNA, 12 nt, Human
aucucucuggcc

SEQ ID NO: 2365777 - RNA, 13 nt, Human
aucucucuggccc

SEQ ID NO: 2365778 - RNA, 14 nt, Human
aucucucuggcccu

SEQ ID NO: 2365779 - RNA, 22 nt, Human
aucucucugaauccuaagggcu

SEQ ID NO: 2365780 - RNA, 23 nt, Human
aucucucuacuccuaccucagcc

SEQ ID NO: 2365781 - RNA, 14 nt, Human
aucucucugcccaa

SEQ ID NO: 2365782 - RNA, 13 nt, Human
aucugcucuccuu

SEQ ID NO: 2365783 - RNA, 14 nt, Human
aucugcucuccuuc

SEQ ID NO: 2365784 - RNA, 20 nt, Human
aucugcucagcccuggaggu

SEQ ID NO: 2365785 - RNA, 18 nt, Human
aucucucugugcugugga

SEQ ID NO: 2365786 - RNA, 23 nt, Human
aucucucugugcuguggaagcaa

SEQ ID NO: 2365787 - RNA, 15 nt, Human
aucugcucuccuucc

SEQ ID NO: 2365788 - RNA, 16 nt, Human
aucugcucuccuuccu

SEQ ID NO: 2365789 - RNA, 17 nt, Human
aucugcucuccuuccug

SEQ ID NO: 2365790 - RNA, 20 nt, Human
aucugcucuccuuccuggag

SEQ ID NO: 2365791 - RNA, 11 nt, Human
aucugcugucc

SEQ ID NO: 2365792 - RNA, 16 nt, Human
aucugcuguccagaca

SEQ ID NO: 2365793 - RNA, 17 nt, Human
aucugcuguccagacag

SEQ ID NO: 2365794 - RNA, 18 nt, Human
aucugcuguccagacagc

SEQ ID NO: 2365795 - RNA, 21 nt, Human
aucugcuguccagacagccug

SEQ ID NO: 2365796 - RNA, 22 nt, Human
aucugcuguccagacagccugu

SEQ ID NO: 2365797 - RNA, 23 nt, Human
aucugcuguccagacagccugua

SEQ ID NO: 2365798 - RNA, 13 nt, Human
aucugcuccuccc

SEQ ID NO: 2365799 - RNA, 21 nt, Human
aucugcucuccuuccuggagc

SEQ ID NO: 2365800 - RNA, 18 nt, Human
aucugcuggaguuucaug

SEQ ID NO: 2365801 - RNA, 14 nt, Human
aucugcuggaguuu

SEQ ID NO: 2365802 - RNA, 23 nt, Human
aucuggaacccagacucagacau

SEQ ID NO: 2365803 - RNA, 19 nt, Human
aucuggaacccagacucag

SEQ ID NO: 2365804 - RNA, 18 nt, Human
aucuggaaccucagccug

SEQ ID NO: 2365805 - RNA, 17 nt, Human
aucuggaaccucagccu

SEQ ID NO: 2365806 - RNA, 16 nt, Human
aucuggaaccucagcc

SEQ ID NO: 2365807 - RNA, 11 nt, Human
aucuggaaccu

SEQ ID NO: 2365808 - RNA, 22 nt, Human
aucucucuacuccuaccucagc

SEQ ID NO: 2365809 - RNA, 21 nt, Human
aucucucuacuccuaccucag

SEQ ID NO: 2365810 - RNA, 13 nt, Human
aucucuauuuaau

SEQ ID NO: 2365811 - RNA, 14 nt, Human
aucucuauuuaaua

SEQ ID NO: 2365812 - RNA, 15 nt, Human
aucucuauuuaauau

SEQ ID NO: 2365813 - RNA, 16 nt, Human
aucucuauuuaauauu

SEQ ID NO: 2365814 - RNA, 22 nt, Human
aucucucgugauugauaagaac

SEQ ID NO: 2365815 - RNA, 18 nt, Human
aucucuacuaaaaauaca

SEQ ID NO: 2365816 - RNA, 23 nt, Human
aucucuaauuggaagaaauuccu

SEQ ID NO: 2365817 - RNA, 22 nt, Human
aucucuaauauggcaaaaaugg

SEQ ID NO: 2365818 - RNA, 15 nt, Human
aucucuaauuggaag

SEQ ID NO: 2365819 - RNA, 18 nt, Human
aucucuagaauuuuaagu

SEQ ID NO: 2365820 - RNA, 16 nt, Human
aucucuagaauuuuaa

SEQ ID NO: 2365821 - RNA, 15 nt, Human
aucucuagaauuuua

SEQ ID NO: 2365822 - RNA, 21 nt, Human
aucucuagaauuuuaagugcu

SEQ ID NO: 2365823 - RNA, 20 nt, Human
aucucuaacagcucaggauc

SEQ ID NO: 2365824 - RNA, 18 nt, Human
aucucuaacagcucagga

SEQ ID NO: 2365825 - RNA, 13 nt, Human
aucucuaauaugg

SEQ ID NO: 2365826 - RNA, 15 nt, Human
aucucuaauauggca

SEQ ID NO: 2365827 - RNA, 15 nt, Human
aucucguuucaaaaa

SEQ ID NO: 2365828 - RNA, 17 nt, Human
aucucguuucaaaaaca

SEQ ID NO: 2365829 - RNA, 22 nt, Human
aucucguuuuucuucuuaagac

SEQ ID NO: 2365830 - RNA, 23 nt, Human
aucucguuuuucuucuuaagacu

SEQ ID NO: 2365831 - RNA, 14 nt, Human
aucucguuucaaaa

SEQ ID NO: 2365832 - RNA, 22 nt, Human
aucuucuccaucuggcagggug

SEQ ID NO: 2365833 - RNA, 14 nt, Human
aucuucucuggcga

SEQ ID NO: 2365834 - RNA, 19 nt, Human
aucuucuccaucuggcagg

SEQ ID NO: 2365835 - RNA, 15 nt, Human
aucuucuccaucugg

SEQ ID NO: 2365836 - RNA, 22 nt, Human
aucuucucagcucccauuucua

SEQ ID NO: 2365837 - RNA, 15 nt, Human
aucuucuccaggaug

SEQ ID NO: 2365838 - RNA, 24 nt, Human
aucuucucagaaggcaaaugacuu

SEQ ID NO: 2365839 - RNA, 12 nt, Human
aucuucucagcu

SEQ ID NO: 2365840 - RNA, 13 nt, Human
aucuucucagcuc

SEQ ID NO: 2365841 - RNA, 14 nt, Human
aucuucucagcucc

SEQ ID NO: 2365842 - RNA, 15 nt, Human
aucuucucagcuccc

SEQ ID NO: 2365843 - RNA, 16 nt, Human
aucuucucagcuccca

SEQ ID NO: 2365844 - RNA, 21 nt, Human
aucuucucagcucccauuucu

SEQ ID NO: 2365845 - RNA, 17 nt, Human
aucuucuuuauaauucu

SEQ ID NO: 2365846 - RNA, 12 nt, Human
aucuugaaauua

SEQ ID NO: 2365847 - RNA, 14 nt, Human
aucuucuuugcagc

SEQ ID NO: 2365848 - RNA, 21 nt, Human
aucuucuuugcagccugggug

SEQ ID NO: 2365849 - RNA, 17 nt, Human
aucuugaaaugaaagua

SEQ ID NO: 2365850 - RNA, 23 nt, Human
aucuugaaauuaagaaggcaaaa

SEQ ID NO: 2365851 - RNA, 22 nt, Human
aucuugaaauuaagaaggcaaa

SEQ ID NO: 2365852 - RNA, 21 nt, Human
aucuugaaauuaagaaggcaa

SEQ ID NO: 2365853 - RNA, 17 nt, Human
aucuugaagacuuuucu

SEQ ID NO: 2365854 - RNA, 17 nt, Human
agucauucguucugugg

SEQ ID NO: 2365855 - RNA, 15 nt, Human
agucauuggcugucu

SEQ ID NO: 2365856 - RNA, 14 nt, Human
agucauuggcuuua

SEQ ID NO: 2365857 - RNA, 15 nt, Human
agucauuggcuuuau

SEQ ID NO: 2365858 - RNA, 18 nt, Human
agucauuggcuuuauccu

SEQ ID NO: 2365859 - RNA, 20 nt, Human
agucauuggcuuuauccucu

SEQ ID NO: 2365860 - RNA, 21 nt, Human
agucauuggcuuuauccucuu

SEQ ID NO: 2365861 - RNA, 22 nt, Human
agucauuggcuuuauccucuuu

SEQ ID NO: 2365862 - RNA, 16 nt, Human
aguccaagcauuuaga

SEQ ID NO: 2365863 - RNA, 17 nt, Human
aguccaaugucuuuuua

SEQ ID NO: 2365864 - RNA, 20 nt, Human
aguccaaucucauggagaag

SEQ ID NO: 2365865 - RNA, 14 nt, Human
aguccacaaaauaa

SEQ ID NO: 2365866 - RNA, 14 nt, Human
aguccaauguggca

SEQ ID NO: 2365867 - RNA, 21 nt, Human
aguccaaggaaaccacagcug

SEQ ID NO: 2365868 - RNA, 23 nt, Human
aguccaaggaaaccacagcugcu

SEQ ID NO: 2365869 - RNA, 16 nt, Human
aguccaagcugggaga

SEQ ID NO: 2365870 - RNA, 18 nt, Human
aguccaaggaaaccacag

SEQ ID NO: 2365871 - RNA, 14 nt, Human
aguccaagcuggga

SEQ ID NO: 2365872 - RNA, 11 nt, Human
aguccaagcug

SEQ ID NO: 2365873 - RNA, 21 nt, Human
aguccaagcauuuagauguau

SEQ ID NO: 2365874 - RNA, 22 nt, Human
agucauuaugagaggcaaugau

SEQ ID NO: 2365875 - RNA, 21 nt, Human
agucauuauagaucccccaga

SEQ ID NO: 2365876 - RNA, 23 nt, Human
agucauuauagaucccccagacu

SEQ ID NO: 2365877 - RNA, 18 nt, Human
agucauuauccuugcuau

SEQ ID NO: 2365878 - RNA, 20 nt, Human
agucauuauccuugcuauga

SEQ ID NO: 2365879 - RNA, 14 nt, Human
agucauuagacucc

SEQ ID NO: 2365880 - RNA, 15 nt, Human
agucauuagacuccu

SEQ ID NO: 2365881 - RNA, 16 nt, Human
agucauuagacuccuc

SEQ ID NO: 2365882 - RNA, 18 nt, Human
agucauuagacuccuccu

SEQ ID NO: 2365883 - RNA, 19 nt, Human
agucauuagacuccuccuc

SEQ ID NO: 2365884 - RNA, 20 nt, Human
agucauuagacuccuccucc

SEQ ID NO: 2365885 - RNA, 19 nt, Human
agucauuauagauccccca

SEQ ID NO: 2365886 - RNA, 20 nt, Human
agucauuauagaucccccag

SEQ ID NO: 2365887 - RNA, 16 nt, Human
agucaaggaguggcuu

SEQ ID NO: 2365888 - RNA, 22 nt, Human
agucaagcuccuccucccugca

SEQ ID NO: 2365889 - RNA, 20 nt, Human
agucaagcuccuccucccug

SEQ ID NO: 2365890 - RNA, 15 nt, Human
agucaagagcauccu

SEQ ID NO: 2365891 - RNA, 14 nt, Human
agucaagcuccucc

SEQ ID NO: 2365892 - RNA, 13 nt, Human
agucaagcuccuc

SEQ ID NO: 2365893 - RNA, 18 nt, Human
agucaagcuccuccuccc

SEQ ID NO: 2365894 - RNA, 17 nt, Human
agucaagcuccuccucc

SEQ ID NO: 2365895 - RNA, 16 nt, Human
agucaagcuccuccuc

SEQ ID NO: 2365896 - RNA, 15 nt, Human
agucaagcuccuccu

SEQ ID NO: 2365897 - RNA, 16 nt, Human
agucaagugaaaaagg

SEQ ID NO: 2365898 - RNA, 18 nt, Human
agucaaggguaggguggg

SEQ ID NO: 2365899 - RNA, 15 nt, Human
agucaaccugggcaa

SEQ ID NO: 2365900 - RNA, 14 nt, Human
agucaaccugggca

SEQ ID NO: 2365901 - RNA, 12 nt, Human
agucaagaaaaa

SEQ ID NO: 2365902 - RNA, 19 nt, Human
agucaagaaaaauuauugu

SEQ ID NO: 2365903 - RNA, 15 nt, Human
agucaaccugccuga

SEQ ID NO: 2365904 - RNA, 15 nt, Human
agucaaauuguguga

SEQ ID NO: 2365905 - RNA, 17 nt, Human
agucaaauugugugaaa

SEQ ID NO: 2365906 - RNA, 13 nt, Human
agucaaauugugu

SEQ ID NO: 2365907 - RNA, 20 nt, Human
agucaagugaaaaaggagga

SEQ ID NO: 2365908 - RNA, 17 nt, Human
agucaauauuuuuagau

SEQ ID NO: 2365909 - RNA, 20 nt, Human
agucaagugcguccacgagc

SEQ ID NO: 2365910 - RNA, 17 nt, Human
aguccaccugagcugcc

SEQ ID NO: 2365911 - RNA, 18 nt, Human
aguccaaugucuuuuuaa

SEQ ID NO: 2365912 - RNA, 12 nt, Human
aguccaccugag

SEQ ID NO: 2365913 - RNA, 14 nt, Human
aguccacuuuguuu

SEQ ID NO: 2365914 - RNA, 14 nt, Human
aguccacucccagu

SEQ ID NO: 2365915 - RNA, 16 nt, Human
aguccacucccagugc

SEQ ID NO: 2365916 - RNA, 20 nt, Human
aguccacucccagugcuugc

SEQ ID NO: 2365917 - RNA, 21 nt, Human
aguccugccuggccaggcaga

SEQ ID NO: 2365918 - RNA, 20 nt, Human
aguccugccuggccaggcag

SEQ ID NO: 2365919 - RNA, 17 nt, Human
aguccugccuggccagg

SEQ ID NO: 2365920 - RNA, 16 nt, Human
aguccugccuggccag

SEQ ID NO: 2365921 - RNA, 15 nt, Human
aguccugccuggcca

SEQ ID NO: 2365922 - RNA, 14 nt, Human
aguccugccuggcc

SEQ ID NO: 2365923 - RNA, 13 nt, Human
aguccugccuggc

SEQ ID NO: 2365924 - RNA, 16 nt, Human
aguccugccucagccu

SEQ ID NO: 2365925 - RNA, 14 nt, Human
aguccuggaagcca

SEQ ID NO: 2365926 - RNA, 23 nt, Human
aguccuggaagccagcuuucccu

SEQ ID NO: 2365927 - RNA, 22 nt, Human
aguccuggaagccagcuuuccc

SEQ ID NO: 2365928 - RNA, 20 nt, Human
aguccuggaagccagcuuuc

SEQ ID NO: 2365929 - RNA, 23 nt, Human
agugacaaggccccagagacuca

SEQ ID NO: 2365930 - RNA, 13 nt, Human
agugacacagcag

SEQ ID NO: 2365931 - RNA, 21 nt, Human
agugacaaggccccagagacu

SEQ ID NO: 2365932 - RNA, 20 nt, Human
agugacaaggccccagagac

SEQ ID NO: 2365933 - RNA, 18 nt, Human
agugacaaggccccagag

SEQ ID NO: 2365934 - RNA, 16 nt, Human
agugacaaggccccag

SEQ ID NO: 2365935 - RNA, 15 nt, Human
agugacaaggcccca

SEQ ID NO: 2365936 - RNA, 14 nt, Human
agugacaaggcccc

SEQ ID NO: 2365937 - RNA, 22 nt, Human
agugacacuucagagagcuggu

SEQ ID NO: 2365938 - RNA, 21 nt, Human
agugacacuucagagagcugg

SEQ ID NO: 2365939 - RNA, 20 nt, Human
agugacacuucagagagcug

SEQ ID NO: 2365940 - RNA, 18 nt, Human
agugacacuucagagagc

SEQ ID NO: 2365941 - RNA, 15 nt, Human
agugacacuucagag

SEQ ID NO: 2365942 - RNA, 23 nt, Human
agugacacagcagcuucaccaga

SEQ ID NO: 2365943 - RNA, 17 nt, Human
agugacacagcagcuuc

SEQ ID NO: 2365944 - RNA, 18 nt, Human
agugacacagcagcuuca

SEQ ID NO: 2365945 - RNA, 23 nt, Human
agugacacuucagagagcuggua

SEQ ID NO: 2365946 - RNA, 21 nt, Human
agugacagaccacaucuuuau

SEQ ID NO: 2365947 - RNA, 16 nt, Human
agugacagacaggcuc

SEQ ID NO: 2365948 - RNA, 17 nt, Human
agugacagacaggcucu

SEQ ID NO: 2365949 - RNA, 13 nt, Human
agugauccuccca

SEQ ID NO: 2365950 - RNA, 19 nt, Human
agugaucaauaaaauguga

SEQ ID NO: 2365951 - RNA, 17 nt, Human
agugaucaauaaaaugu

SEQ ID NO: 2365952 - RNA, 16 nt, Human
agugaucaauaaaaug

SEQ ID NO: 2365953 - RNA, 24 nt, Human
agugauauggcagaagacaccaga

SEQ ID NO: 2365954 - RNA, 21 nt, Human
agugauauggcagaagacacc

SEQ ID NO: 2365955 - RNA, 22 nt, Human
agugauauggcagaagacacca

SEQ ID NO: 2365956 - RNA, 20 nt, Human
agugugaagcuuccuuggcu

SEQ ID NO: 2365957 - RNA, 12 nt, Human
agugugaaguua

SEQ ID NO: 2365958 - RNA, 13 nt, Human
agugugaaguuag

SEQ ID NO: 2365959 - RNA, 14 nt, Human
agugugaaguuaga

SEQ ID NO: 2365960 - RNA, 15 nt, Human
agugugaaguuagaa

SEQ ID NO: 2365961 - RNA, 18 nt, Human
agugugaaguuagaauuc

SEQ ID NO: 2365962 - RNA, 20 nt, Human
agugugaaguuagaauuccu

SEQ ID NO: 2365963 - RNA, 21 nt, Human
agugugaaguuagaauuccuu

SEQ ID NO: 2365964 - RNA, 22 nt, Human
agugugaaguuagaauuccuuc

SEQ ID NO: 2365965 - RNA, 23 nt, Human
agugugacaaggauugcuacugu

SEQ ID NO: 2365966 - RNA, 15 nt, Human
agugugaaauagaca

SEQ ID NO: 2365967 - RNA, 16 nt, Human
agugucuuccuguggg

SEQ ID NO: 2365968 - RNA, 14 nt, Human
agugugaacuggac

SEQ ID NO: 2365969 - RNA, 13 nt, Human
agugugaacaaaa

SEQ ID NO: 2365970 - RNA, 22 nt, Human
agugugaacaaaagaugcucuu

SEQ ID NO: 2365971 - RNA, 22 nt, Human
agugugaacuggacccuguugc

SEQ ID NO: 2365972 - RNA, 23 nt, Human
agugugaacuggacccuguugcu

SEQ ID NO: 2365973 - RNA, 15 nt, Human
agugucuuccauaau

SEQ ID NO: 2365974 - RNA, 14 nt, Human
agugucuuccugug

SEQ ID NO: 2365975 - RNA, 13 nt, Human
agugucuuuccac

SEQ ID NO: 2365976 - RNA, 14 nt, Human
agugucuuccauaa

SEQ ID NO: 2365977 - RNA, 13 nt, Human
agugucuuccaua

SEQ ID NO: 2365978 - RNA, 19 nt, Human
agugucuucacggcaggac

SEQ ID NO: 2365979 - RNA, 14 nt, Human
agugauuacuguca

SEQ ID NO: 2365980 - RNA, 23 nt, Human
agugucuuuccacggagccacuc

SEQ ID NO: 2365981 - RNA, 16 nt, Human
agugucuuuccacucc

SEQ ID NO: 2365982 - RNA, 20 nt, Human
agugaucaauaaaaugugau

SEQ ID NO: 2365983 - RNA, 14 nt, Human
agugaucacagcag

SEQ ID NO: 2365984 - RNA, 15 nt, Human
agugaucacagcagc

SEQ ID NO: 2365985 - RNA, 16 nt, Human
agugaucacagcagcu

SEQ ID NO: 2365986 - RNA, 18 nt, Human
agugauucucaugccuca

SEQ ID NO: 2365987 - RNA, 19 nt, Human
agugauucucaugccucag

SEQ ID NO: 2365988 - RNA, 15 nt, Human
agugauuaccaggga

SEQ ID NO: 2365989 - RNA, 18 nt, Human
agugauuaccagggacug

SEQ ID NO: 2365990 - RNA, 16 nt, Human
aguuaacuauuuuauu

SEQ ID NO: 2365991 - RNA, 14 nt, Human
aguuaacuuucaga

SEQ ID NO: 2365992 - RNA, 18 nt, Human
aguuaacuuuaagacuga

SEQ ID NO: 2365993 - RNA, 12 nt, Human
aguuaagaagcu

SEQ ID NO: 2365994 - RNA, 15 nt, Human
aguuaagaagcuguu

SEQ ID NO: 2365995 - RNA, 16 nt, Human
aguuaagaagcuguug

SEQ ID NO: 2365996 - RNA, 20 nt, Human
aguuaagacaugauuuccuu

SEQ ID NO: 2365997 - RNA, 19 nt, Human
aguuaagacaugauuuccu

SEQ ID NO: 2365998 - RNA, 17 nt, Human
aguuaagaagcuguugu

SEQ ID NO: 2365999 - RNA, 18 nt, Human
aguuaagaagcuguugua

SEQ ID NO: 2366000 - RNA, 20 nt, Human
aguuaagaagcuguuguaca

SEQ ID NO: 2366001 - RNA, 21 nt, Human
aguuaagaagcuguuguacau

SEQ ID NO: 2366002 - RNA, 23 nt, Human
aguuguuaauaaaaguacauguu

SEQ ID NO: 2366003 - RNA, 16 nt, Human
aguuguuaauaaaagu

SEQ ID NO: 2366004 - RNA, 16 nt, Human
aguuguuacauuuuua

SEQ ID NO: 2366005 - RNA, 15 nt, Human
aguuguuacauuuuu

SEQ ID NO: 2366006 - RNA, 13 nt, Human
aguuguuacauuu

SEQ ID NO: 2366007 - RNA, 19 nt, Human
aguugucaagucucugcug

SEQ ID NO: 2366008 - RNA, 16 nt, Human
aguuguaucucuuuug

SEQ ID NO: 2366009 - RNA, 15 nt, Human
aguuguaucucuuuu

SEQ ID NO: 2366010 - RNA, 14 nt, Human
aguuguaucucuuu

SEQ ID NO: 2366011 - RNA, 22 nt, Human
aguuguaucucuuuugaaucca

SEQ ID NO: 2366012 - RNA, 17 nt, Human
aguuguaucucuuuuga

SEQ ID NO: 2366013 - RNA, 22 nt, Human
aguuguaggcgaaucauuuguu

SEQ ID NO: 2366014 - RNA, 21 nt, Human
aguuguaggcgaaucauuugu

SEQ ID NO: 2366015 - RNA, 18 nt, Human
aguuguagaauguauugu

SEQ ID NO: 2366016 - RNA, 20 nt, Human
aguuguagaauguauuguac

SEQ ID NO: 2366017 - RNA, 21 nt, Human
aguuguagaauguauuguacc

SEQ ID NO: 2366018 - RNA, 23 nt, Human
aguuguaucagcacguguggccu

SEQ ID NO: 2366019 - RNA, 20 nt, Human
aguuguaucagcacgugugg

SEQ ID NO: 2366020 - RNA, 13 nt, Human
aguuguagaaugu

SEQ ID NO: 2366021 - RNA, 16 nt, Human
aguuguagaauguauu

SEQ ID NO: 2366022 - RNA, 17 nt, Human
aguuguagaauguauug

SEQ ID NO: 2366023 - RNA, 19 nt, Human
aguuguaccgcaaugugac

SEQ ID NO: 2366024 - RNA, 18 nt, Human
aguuguaccgcaauguga

SEQ ID NO: 2366025 - RNA, 20 nt, Human
aguugaauggccugccuuga

SEQ ID NO: 2366026 - RNA, 23 nt, Human
aguugaauugaggggauuaauau

SEQ ID NO: 2366027 - RNA, 22 nt, Human
aguuacaugcauacuucaaaag

SEQ ID NO: 2366028 - RNA, 20 nt, Human
aguuacaugcauacuucaaa

SEQ ID NO: 2366029 - RNA, 21 nt, Human
aguuacaugcauacuucaaaa

SEQ ID NO: 2366030 - RNA, 17 nt, Human
aguuacaugcauacuuc

SEQ ID NO: 2366031 - RNA, 18 nt, Human
aguuacagacaaagcgug

SEQ ID NO: 2366032 - RNA, 17 nt, Human
aguuaagaccuggcagc

SEQ ID NO: 2366033 - RNA, 16 nt, Human
aguuaagaccuggcag

SEQ ID NO: 2366034 - RNA, 13 nt, Human
aguuaagaccugg

SEQ ID NO: 2366035 - RNA, 22 nt, Human
aguuacagccuguuaguaacau

SEQ ID NO: 2366036 - RNA, 17 nt, Human
aguuacagcgagaggca

SEQ ID NO: 2366037 - RNA, 20 nt, Human
aguuacagccuguuaguaac

SEQ ID NO: 2366038 - RNA, 22 nt, Human
aguuaagaagcuguuguacauu

SEQ ID NO: 2366039 - RNA, 14 nt, Human
aguuaagaguagca

SEQ ID NO: 2366040 - RNA, 22 nt, Human
aguuacagcgagaggcagagaa

SEQ ID NO: 2366041 - RNA, 23 nt, Human
aguuacagcgagaggcagagaaa

SEQ ID NO: 2366042 - RNA, 13 nt, Human
aguuacagcugug

SEQ ID NO: 2366043 - RNA, 16 nt, Human
aguuacagcugugauu

SEQ ID NO: 2366044 - RNA, 20 nt, Human
auaccugggauacugugccc

SEQ ID NO: 2366045 - RNA, 11 nt, Human
auaccugcccu

SEQ ID NO: 2366046 - RNA, 18 nt, Human
auaccugggcauacuaau

SEQ ID NO: 2366047 - RNA, 13 nt, Human
auaccuguccccc

SEQ ID NO: 2366048 - RNA, 12 nt, Human
auaccugucccc

SEQ ID NO: 2366049 - RNA, 15 nt, Human
auaccuacauguauu

SEQ ID NO: 2366050 - RNA, 19 nt, Human
auacccuggccgcccccug

SEQ ID NO: 2366051 - RNA, 12 nt, Human
auacccuccccc

SEQ ID NO: 2366052 - RNA, 13 nt, Human
auaccuaaaagag

SEQ ID NO: 2366053 - RNA, 17 nt, Human
auaccugggauacugug

SEQ ID NO: 2366054 - RNA, 20 nt, Human
auaccugauuuuuuuuccuu

SEQ ID NO: 2366055 - RNA, 17 nt, Human
auaccucuuagcugagu

SEQ ID NO: 2366056 - RNA, 20 nt, Human
auaccucuuagcugagugga

SEQ ID NO: 2366057 - RNA, 16 nt, Human
auaccucugugugcuc

SEQ ID NO: 2366058 - RNA, 17 nt, Human
auaccucugugugcucc

SEQ ID NO: 2366059 - RNA, 15 nt, Human
auaccucuuagcuga

SEQ ID NO: 2366060 - RNA, 16 nt, Human
auaccucuuagcugag

SEQ ID NO: 2366061 - RNA, 15 nt, Human
auacacaacacacac

SEQ ID NO: 2366062 - RNA, 11 nt, Human
auacacaaauu

SEQ ID NO: 2366063 - RNA, 16 nt, Human
auaauuauaauauacu

SEQ ID NO: 2366064 - RNA, 14 nt, Human
auaauuacuauguc

SEQ ID NO: 2366065 - RNA, 22 nt, Human
auacccccugcaaagcccagcu

SEQ ID NO: 2366066 - RNA, 21 nt, Human
auacacacacacacacagcca

SEQ ID NO: 2366067 - RNA, 20 nt, Human
auacacacacacacacagcc

SEQ ID NO: 2366068 - RNA, 15 nt, Human
auacacacacacaca

SEQ ID NO: 2366069 - RNA, 19 nt, Human
auacacacacacacacagc

SEQ ID NO: 2366070 - RNA, 18 nt, Human
auacacacacacacacag

SEQ ID NO: 2366071 - RNA, 15 nt, Human
auacacaaguaaaca

SEQ ID NO: 2366072 - RNA, 11 nt, Human
auacacacaca

SEQ ID NO: 2366073 - RNA, 14 nt, Human
auacacacacacac

SEQ ID NO: 2366074 - RNA, 13 nt, Human
auacacacacaca

SEQ ID NO: 2366075 - RNA, 16 nt, Human
auacuuaucucucugu

SEQ ID NO: 2366076 - RNA, 17 nt, Human
auacuuaucucucugug

SEQ ID NO: 2366077 - RNA, 18 nt, Human
auacuuaucucucugugc

SEQ ID NO: 2366078 - RNA, 20 nt, Human
auacuuaucucucugugcug

SEQ ID NO: 2366079 - RNA, 15 nt, Human
auacuuaucucucug

SEQ ID NO: 2366080 - RNA, 22 nt, Human
auacuuagcaaaguuuuaccug

SEQ ID NO: 2366081 - RNA, 12 nt, Human
auaacagcacug

SEQ ID NO: 2366082 - RNA, 13 nt, Human
auaacagguuauu

SEQ ID NO: 2366083 - RNA, 16 nt, Human
auaacaguaaaugugc

SEQ ID NO: 2366084 - RNA, 14 nt, Human
auaacagguuauuu

SEQ ID NO: 2366085 - RNA, 18 nt, Human
auaacagguuauuuuagu

SEQ ID NO: 2366086 - RNA, 22 nt, Human
auaacagguuauuuuaguuucu

SEQ ID NO: 2366087 - RNA, 23 nt, Human
auaacagguuauuuuaguuucug

SEQ ID NO: 2366088 - RNA, 23 nt, Human
auaacacuauaaagguugacaau

SEQ ID NO: 2366089 - RNA, 23 nt, Human
auaacagaaagccugggugacau

SEQ ID NO: 2366090 - RNA, 21 nt, Human
auaaguccuugcaagaaucag

SEQ ID NO: 2366091 - RNA, 16 nt, Human
auaagucauguuccuu

SEQ ID NO: 2366092 - RNA, 14 nt, Human
auaagucuaaauaa

SEQ ID NO: 2366093 - RNA, 14 nt, Human
auaagucauguucc

SEQ ID NO: 2366094 - RNA, 15 nt, Human
auaaguggugugugu

SEQ ID NO: 2366095 - RNA, 13 nt, Human
auaaguguacaua

SEQ ID NO: 2366096 - RNA, 14 nt, Human
auaaguguacauau

SEQ ID NO: 2366097 - RNA, 16 nt, Human
auaaguguauuuuuca

SEQ ID NO: 2366098 - RNA, 14 nt, Human
auaaguguauuuuu

SEQ ID NO: 2366099 - RNA, 19 nt, Human
auaaguguacauaugugcu

SEQ ID NO: 2366100 - RNA, 20 nt, Human
auaaguguacauaugugcug

SEQ ID NO: 2366101 - RNA, 19 nt, Human
auaaguacuguguacagaa

SEQ ID NO: 2366102 - RNA, 19 nt, Human
auaaguauuuaauucaugu

SEQ ID NO: 2366103 - RNA, 19 nt, Human
auaaguauuucaaauugga

SEQ ID NO: 2366104 - RNA, 18 nt, Human
auaaguauuucaaauugg

SEQ ID NO: 2366105 - RNA, 16 nt, Human
auaaguauuucaaauu

SEQ ID NO: 2366106 - RNA, 16 nt, Human
auaaugugaaaauggu

SEQ ID NO: 2366107 - RNA, 13 nt, Human
auaaugugaaaau

SEQ ID NO: 2366108 - RNA, 18 nt, Human
auaaugugaaacuggauu

SEQ ID NO: 2366109 - RNA, 19 nt, Human
auaaguguguguuuuucau

SEQ ID NO: 2366110 - RNA, 22 nt, Human
auaaguguguguuuuucauaaa

SEQ ID NO: 2366111 - RNA, 21 nt, Human
auaaguguguggucccaaguu

SEQ ID NO: 2366112 - RNA, 21 nt, Human
auaaugugaaacuggauuaaa

SEQ ID NO: 2366113 - RNA, 19 nt, Human
auaaugugaaacuggauua

SEQ ID NO: 2366114 - RNA, 21 nt, Human
auacuucucaaaccuguuuaa

SEQ ID NO: 2366115 - RNA, 22 nt, Human
auacuucagcucacacaugaga

SEQ ID NO: 2366116 - RNA, 14 nt, Human
auacuucaaaagua

SEQ ID NO: 2366117 - RNA, 21 nt, Human
auacuucaugaaauccugggu

SEQ ID NO: 2366118 - RNA, 12 nt, Human
auacuucaaaag

SEQ ID NO: 2366119 - RNA, 15 nt, Human
auacuugaaaauuaa

SEQ ID NO: 2366120 - RNA, 16 nt, Human
auacuugaaaauuaac

SEQ ID NO: 2366121 - RNA, 13 nt, Human
auaguaguaugau

SEQ ID NO: 2366122 - RNA, 16 nt, Human
auaguauaucuggaca

SEQ ID NO: 2366123 - RNA, 17 nt, Human
auaguagcauacauuua

SEQ ID NO: 2366124 - RNA, 15 nt, Human
auaguauaucuggac

SEQ ID NO: 2366125 - RNA, 15 nt, Human
auaguaugguggcug

SEQ ID NO: 2366126 - RNA, 17 nt, Human
auaguauaucuggacaa

SEQ ID NO: 2366127 - RNA, 16 nt, Human
auaguauccuccaggu

SEQ ID NO: 2366128 - RNA, 17 nt, Human
auaguauccuccagguu

SEQ ID NO: 2366129 - RNA, 18 nt, Human
auaguauccuccagguuu

SEQ ID NO: 2366130 - RNA, 19 nt, Human
auaguauccuccagguuuu

SEQ ID NO: 2366131 - RNA, 20 nt, Human
auaguauccuccagguuuuu

SEQ ID NO: 2366132 - RNA, 22 nt, Human
auaguauccuccagguuuuuca

SEQ ID NO: 2366133 - RNA, 16 nt, Human
auaguaugguggcugg

SEQ ID NO: 2366134 - RNA, 15 nt, Human
auauaagugauugcu

SEQ ID NO: 2366135 - RNA, 20 nt, Human
auauaagugcuguauaaaau

SEQ ID NO: 2366136 - RNA, 14 nt, Human
auauaaguguacau

SEQ ID NO: 2366137 - RNA, 17 nt, Human
auauaagugcuguauaa

SEQ ID NO: 2366138 - RNA, 18 nt, Human
auauaagugcuguauaaa

SEQ ID NO: 2366139 - RNA, 13 nt, Human
auauaagugcugu

SEQ ID NO: 2366140 - RNA, 15 nt, Human
auauaagugcuguau

SEQ ID NO: 2366141 - RNA, 21 nt, Human
auauaauuaucggaagcagug

SEQ ID NO: 2366142 - RNA, 14 nt, Human
auauaauuaucgga

SEQ ID NO: 2366143 - RNA, 12 nt, Human
auauaauucugu

SEQ ID NO: 2366144 - RNA, 13 nt, Human
auauaauucugua

SEQ ID NO: 2366145 - RNA, 14 nt, Human
auauaauucuguaa

SEQ ID NO: 2366146 - RNA, 16 nt, Human
auauaauucuguaaau

SEQ ID NO: 2366147 - RNA, 17 nt, Human
auauaauucuguaaaug

SEQ ID NO: 2366148 - RNA, 14 nt, Human
auauaauucuguac

SEQ ID NO: 2366149 - RNA, 15 nt, Human
auauaaguguguguu

SEQ ID NO: 2366150 - RNA, 21 nt, Human
auauaauguuguuauuuaaag

SEQ ID NO: 2366151 - RNA, 22 nt, Human
auauaauguuguuauuuaaaga

SEQ ID NO: 2366152 - RNA, 15 nt, Human
auauaaguguacaua

SEQ ID NO: 2366153 - RNA, 18 nt, Human
auauaaguguacauaugu

SEQ ID NO: 2366154 - RNA, 16 nt, Human
auauagcccagccagg

SEQ ID NO: 2366155 - RNA, 21 nt, Human
auauagcuauuuuuauggaau

SEQ ID NO: 2366156 - RNA, 14 nt, Human
auauagcuguacaa

SEQ ID NO: 2366157 - RNA, 15 nt, Human
auauagcuguacaaa

SEQ ID NO: 2366158 - RNA, 17 nt, Human
auauagcuguacaaaua

SEQ ID NO: 2366159 - RNA, 18 nt, Human
auauagcuguacaaauau

SEQ ID NO: 2366160 - RNA, 19 nt, Human
auauagcuguacaaauaua

SEQ ID NO: 2366161 - RNA, 20 nt, Human
auauagcuguacaaauauaa

SEQ ID NO: 2366162 - RNA, 19 nt, Human
auauacucacuuucuagau

SEQ ID NO: 2366163 - RNA, 18 nt, Human
auauacauucuuuaucuu

SEQ ID NO: 2366164 - RNA, 20 nt, Human
auauacgugaaaauuauuug

SEQ ID NO: 2366165 - RNA, 15 nt, Human
auauagauuauaacu

SEQ ID NO: 2366166 - RNA, 18 nt, Human
auauagauuauaacuugu

SEQ ID NO: 2366167 - RNA, 23 nt, Human
auauagauuauaacuugucuaaa

SEQ ID NO: 2366168 - RNA, 20 nt, Human
auauaauuuuuuagagagcu

SEQ ID NO: 2366169 - RNA, 22 nt, Human
auauaauucuguacauagccua

SEQ ID NO: 2366170 - RNA, 17 nt, Human
auauaauucuguacaua

SEQ ID NO: 2366171 - RNA, 19 nt, Human
auauaauucuguacauagc

SEQ ID NO: 2366172 - RNA, 14 nt, Human
auauaccauuuauc

SEQ ID NO: 2366173 - RNA, 18 nt, Human
auauacauucaaacuuaa

SEQ ID NO: 2366174 - RNA, 16 nt, Human
auauaggaacuuaaau

SEQ ID NO: 2366175 - RNA, 19 nt, Human
auauuuagcaaauaauuuc

SEQ ID NO: 2366176 - RNA, 15 nt, Human
auauuuagcaaauaa

SEQ ID NO: 2366177 - RNA, 14 nt, Human
auauuuauaaaacu

SEQ ID NO: 2366178 - RNA, 21 nt, Human
auauuuaguuauaguuucaga

SEQ ID NO: 2366179 - RNA, 22 nt, Human
auauuuaguuauaguuucagau

SEQ ID NO: 2366180 - RNA, 13 nt, Human
auauuuauaacuc

SEQ ID NO: 2366181 - RNA, 11 nt, Human
auauuuauaac

SEQ ID NO: 2366182 - RNA, 15 nt, Human
auauuuauaacucau

SEQ ID NO: 2366183 - RNA, 14 nt, Human
auauuuauuaccuc

SEQ ID NO: 2366184 - RNA, 18 nt, Human
auauuuaguguucauaaa

SEQ ID NO: 2366185 - RNA, 16 nt, Human
auauuuauaaaaauaa

SEQ ID NO: 2366186 - RNA, 16 nt, Human
auauuuauuaccucug

SEQ ID NO: 2366187 - RNA, 21 nt, Human
auauuuauuuucuuucuguaa

SEQ ID NO: 2366188 - RNA, 22 nt, Human
auauuuauuacuguaagaaaau

SEQ ID NO: 2366189 - RNA, 18 nt, Human
auauuuauuuuaauaaug

SEQ ID NO: 2366190 - RNA, 14 nt, Human
auauuuauuacugu

SEQ ID NO: 2366191 - RNA, 19 nt, Human
auauuuauuacuguaagaa

SEQ ID NO: 2366192 - RNA, 15 nt, Human
auauuaggaaaauau

SEQ ID NO: 2366193 - RNA, 17 nt, Human
auauuauaacuuaaaaa

SEQ ID NO: 2366194 - RNA, 22 nt, Human
auauuauaauuuuuuucaauau

SEQ ID NO: 2366195 - RNA, 13 nt, Human
auauucaggaagc

SEQ ID NO: 2366196 - RNA, 21 nt, Human
auauuagcuuuacuguuuguu

SEQ ID NO: 2366197 - RNA, 20 nt, Human
auauuagcuuuacuguuugu

SEQ ID NO: 2366198 - RNA, 22 nt, Human
auauuagcauuuaguccaaugu

SEQ ID NO: 2366199 - RNA, 15 nt, Human
auauuagcauuuagu

SEQ ID NO: 2366200 - RNA, 13 nt, Human
auauuagauguga

SEQ ID NO: 2366201 - RNA, 14 nt, Human
auauuagaugugau

SEQ ID NO: 2366202 - RNA, 15 nt, Human
auauuagaugugauu

SEQ ID NO: 2366203 - RNA, 16 nt, Human
auauuagaugugauuu

SEQ ID NO: 2366204 - RNA, 17 nt, Human
auauuagaugugauuua

SEQ ID NO: 2366205 - RNA, 18 nt, Human
auauuagaugugauuuaa

SEQ ID NO: 2366206 - RNA, 20 nt, Human
auauuagaugugauuuaaua

SEQ ID NO: 2366207 - RNA, 20 nt, Human
auauuauacuaagaaaagau

SEQ ID NO: 2366208 - RNA, 17 nt, Human
auauucaggaagcucag

SEQ ID NO: 2366209 - RNA, 19 nt, Human
auauuuagauuguuaaaau

SEQ ID NO: 2366210 - RNA, 14 nt, Human
auauucaggaagcu

SEQ ID NO: 2366211 - RNA, 16 nt, Human
auauucaggaagcuca

SEQ ID NO: 2366212 - RNA, 18 nt, Human
auauuuauuuuuuuaagc

SEQ ID NO: 2366213 - RNA, 13 nt, Human
auauuucaagaca

SEQ ID NO: 2366214 - RNA, 19 nt, Human
auauuuauuuuuuuuaagu

SEQ ID NO: 2366215 - RNA, 23 nt, Human
auauuucagauaaucacaauaca

SEQ ID NO: 2366216 - RNA, 17 nt, Human
auaugcaguuuuccuua

SEQ ID NO: 2366217 - RNA, 15 nt, Human
auauccuuucuaaca

SEQ ID NO: 2366218 - RNA, 16 nt, Human
auauccuuucuaacaa

SEQ ID NO: 2366219 - RNA, 15 nt, Human
auauccugagccauc

SEQ ID NO: 2366220 - RNA, 11 nt, Human
auauccugccu

SEQ ID NO: 2366221 - RNA, 12 nt, Human
auauccugccuc

SEQ ID NO: 2366222 - RNA, 13 nt, Human
auauccugccuca

SEQ ID NO: 2366223 - RNA, 14 nt, Human
auauccugccucag

SEQ ID NO: 2366224 - RNA, 14 nt, Human
auauccugagccau

SEQ ID NO: 2366225 - RNA, 13 nt, Human
auauccugagcca

SEQ ID NO: 2366226 - RNA, 11 nt, Human
auauccucugu

SEQ ID NO: 2366227 - RNA, 16 nt, Human
auauccuacuucucca

SEQ ID NO: 2366228 - RNA, 14 nt, Human
auaugcuuacugau

SEQ ID NO: 2366229 - RNA, 13 nt, Human
auaugcuuaguaa

SEQ ID NO: 2366230 - RNA, 15 nt, Human
auaugcuuaguaaug

SEQ ID NO: 2366231 - RNA, 22 nt, Human
auaugccucuccuuuguauauu

SEQ ID NO: 2366232 - RNA, 19 nt, Human
auaugccucuccuuuguau

SEQ ID NO: 2366233 - RNA, 22 nt, Human
auaugccugggcagaaggaaga

SEQ ID NO: 2366234 - RNA, 19 nt, Human
auaugcuuauacacuuaca

SEQ ID NO: 2366235 - RNA, 23 nt, Human
auaugcuucuguuuuauaauuuu

SEQ ID NO: 2366236 - RNA, 16 nt, Human
auaugcuuauacacuu

SEQ ID NO: 2366237 - RNA, 14 nt, Human
auaugcuuauacac

SEQ ID NO: 2366238 - RNA, 18 nt, Human
auauggacucaguuuucu

SEQ ID NO: 2366239 - RNA, 18 nt, Human
auauuagaaguguuaacu

SEQ ID NO: 2366240 - RNA, 20 nt, Human
auauggacacuuaauacuac

SEQ ID NO: 2366241 - RNA, 15 nt, Human
auauggacacuuaau

SEQ ID NO: 2366242 - RNA, 19 nt, Human
auauggaacuuacauuguu

SEQ ID NO: 2366243 - RNA, 18 nt, Human
auauggaacuucuaauau

SEQ ID NO: 2366244 - RNA, 20 nt, Human
auauggaacuucuaauauau

SEQ ID NO: 2366245 - RNA, 18 nt, Human
auauccauguacuguagu

SEQ ID NO: 2366246 - RNA, 17 nt, Human
auauccauguacuguag

SEQ ID NO: 2366247 - RNA, 15 nt, Human
auauccauguacugu

SEQ ID NO: 2366248 - RNA, 14 nt, Human
auauccauguacug

SEQ ID NO: 2366249 - RNA, 18 nt, Human
auauccccuauuuaacag

SEQ ID NO: 2366250 - RNA, 18 nt, Human
auauccauucuuucugau

SEQ ID NO: 2366251 - RNA, 12 nt, Human
auauccauguac

SEQ ID NO: 2366252 - RNA, 21 nt, Human
auauccaugaccuaguuuucc

SEQ ID NO: 2366253 - RNA, 16 nt, Human
auauccaccaccuccc

SEQ ID NO: 2366254 - RNA, 17 nt, Human
auauccauucuuucuga

SEQ ID NO: 2366255 - RNA, 15 nt, Human
auauccccucccagu

SEQ ID NO: 2366256 - RNA, 15 nt, Human
auaucccuacaugua

SEQ ID NO: 2366257 - RNA, 16 nt, Human
auaucccuacauguau

SEQ ID NO: 2366258 - RNA, 17 nt, Human
auaucccuacauguauu

SEQ ID NO: 2366259 - RNA, 18 nt, Human
auaucacauguuuucucu

SEQ ID NO: 2366260 - RNA, 18 nt, Human
auaucacuugucaauaaa

SEQ ID NO: 2366261 - RNA, 14 nt, Human
auaucagaaaaggg

SEQ ID NO: 2366262 - RNA, 17 nt, Human
auaucagaaaagggaag

SEQ ID NO: 2366263 - RNA, 15 nt, Human
auaucaauuuaaaaa

SEQ ID NO: 2366264 - RNA, 18 nt, Human
acacugcuaggugggcca

SEQ ID NO: 2366265 - RNA, 19 nt, Human
acacugcggggcuuggcug

SEQ ID NO: 2366266 - RNA, 18 nt, Human
acacugcggggcuuggcu

SEQ ID NO: 2366267 - RNA, 21 nt, Human
acacugcugcuccagugcagg

SEQ ID NO: 2366268 - RNA, 13 nt, Human
acacugucuugaa

SEQ ID NO: 2366269 - RNA, 23 nt, Human
acacugcuaggugggccagcccc

SEQ ID NO: 2366270 - RNA, 21 nt, Human
acacuguauuuguaucucuga

SEQ ID NO: 2366271 - RNA, 22 nt, Human
acacugucugguuucaccgagg

SEQ ID NO: 2366272 - RNA, 18 nt, Human
acacugugcacaucugug

SEQ ID NO: 2366273 - RNA, 18 nt, Human
acacugugcccuggugga

SEQ ID NO: 2366274 - RNA, 14 nt, Human
acacugugcccugg

SEQ ID NO: 2366275 - RNA, 15 nt, Human
acacugugcccuggu

SEQ ID NO: 2366276 - RNA, 16 nt, Human
acacugugcccuggug

SEQ ID NO: 2366277 - RNA, 17 nt, Human
acacugugcccuggugg

SEQ ID NO: 2366278 - RNA, 21 nt, Human
acacugugcacaucugugucu

SEQ ID NO: 2366279 - RNA, 20 nt, Human
acacugugcacaucuguguc

SEQ ID NO: 2366280 - RNA, 22 nt, Human
acacugugcccagcccggaccu

SEQ ID NO: 2366281 - RNA, 23 nt, Human
acacugugcccagcccggaccuu

SEQ ID NO: 2366282 - RNA, 12 nt, Human
acacugugcccu

SEQ ID NO: 2366283 - RNA, 13 nt, Human
acacugugcccug

SEQ ID NO: 2366284 - RNA, 12 nt, Human
acagaacacugu

SEQ ID NO: 2366285 - RNA, 14 nt, Human
acagaacacugucu

SEQ ID NO: 2366286 - RNA, 13 nt, Human
acagaacacuaaa

SEQ ID NO: 2366287 - RNA, 21 nt, Human
acagaacacauaauucaggaa

SEQ ID NO: 2366288 - RNA, 16 nt, Human
acagaagaaggcagca

SEQ ID NO: 2366289 - RNA, 18 nt, Human
acagaacagcuucagguu

SEQ ID NO: 2366290 - RNA, 20 nt, Human
acagaacagcuucagguuau

SEQ ID NO: 2366291 - RNA, 12 nt, Human
acagaacagcuu

SEQ ID NO: 2366292 - RNA, 13 nt, Human
acagaacagcuuc

SEQ ID NO: 2366293 - RNA, 14 nt, Human
acagaacagcuuca

SEQ ID NO: 2366294 - RNA, 15 nt, Human
acagaacagcuucag

SEQ ID NO: 2366295 - RNA, 16 nt, Human
acagaacagcuucagg

SEQ ID NO: 2366296 - RNA, 17 nt, Human
acagaacagcuucaggu

SEQ ID NO: 2366297 - RNA, 20 nt, Human
acagaagaaggcagcaggug

SEQ ID NO: 2366298 - RNA, 12 nt, Human
acagaagcagcu

SEQ ID NO: 2366299 - RNA, 14 nt, Human
acagaagcagcucu

SEQ ID NO: 2366300 - RNA, 13 nt, Human
acagaagcagcuc

SEQ ID NO: 2366301 - RNA, 17 nt, Human
acagaagucaugaagcc

SEQ ID NO: 2366302 - RNA, 18 nt, Human
acagaagccaggagcaaa

SEQ ID NO: 2366303 - RNA, 16 nt, Human
acagaagccaggagca

SEQ ID NO: 2366304 - RNA, 18 nt, Human
acagaagcaggcuggagg

SEQ ID NO: 2366305 - RNA, 19 nt, Human
acagaagcaggcuggaggu

SEQ ID NO: 2366306 - RNA, 13 nt, Human
acagaagccagga

SEQ ID NO: 2366307 - RNA, 15 nt, Human
acagaagccaggagc

SEQ ID NO: 2366308 - RNA, 15 nt, Human
acagaagcagcucuu

SEQ ID NO: 2366309 - RNA, 22 nt, Human
acagaagcaguugagucgucau

SEQ ID NO: 2366310 - RNA, 21 nt, Human
acacugaagcucuugaagaca

SEQ ID NO: 2366311 - RNA, 22 nt, Human
acacugccaucuuaguuuggau

SEQ ID NO: 2366312 - RNA, 17 nt, Human
acacugaggcagggaag

SEQ ID NO: 2366313 - RNA, 16 nt, Human
acacugaggcagggaa

SEQ ID NO: 2366314 - RNA, 22 nt, Human
acacugaugcuuagauguucca

SEQ ID NO: 2366315 - RNA, 14 nt, Human
acacugaggcaggg

SEQ ID NO: 2366316 - RNA, 14 nt, Human
acacugagcuguca

SEQ ID NO: 2366317 - RNA, 22 nt, Human
acacugacaccuuugcaggcau

SEQ ID NO: 2366318 - RNA, 15 nt, Human
acacugauccagccc

SEQ ID NO: 2366319 - RNA, 17 nt, Human
acacugaccauccacuc

SEQ ID NO: 2366320 - RNA, 19 nt, Human
acacugagaauguaagaac

SEQ ID NO: 2366321 - RNA, 20 nt, Human
acacugagaauguaagaacu

SEQ ID NO: 2366322 - RNA, 22 nt, Human
acacugagaauguaagaacuac

SEQ ID NO: 2366323 - RNA, 23 nt, Human
acacugaauauuuauauuucacu

SEQ ID NO: 2366324 - RNA, 18 nt, Human
acacugaauauuuauauu

SEQ ID NO: 2366325 - RNA, 19 nt, Human
acacugaaguuaacagaga

SEQ ID NO: 2366326 - RNA, 23 nt, Human
acagaguaugaacaccugggcuu

SEQ ID NO: 2366327 - RNA, 21 nt, Human
acagaguaaauagcauucucu

SEQ ID NO: 2366328 - RNA, 22 nt, Human
acagaggggguggccucccaac

SEQ ID NO: 2366329 - RNA, 12 nt, Human
acagagucucac

SEQ ID NO: 2366330 - RNA, 14 nt, Human
acagagucucacug

SEQ ID NO: 2366331 - RNA, 18 nt, Human
acagaagucaugaagccc

SEQ ID NO: 2366332 - RNA, 15 nt, Human
acagaauaaugaaug

SEQ ID NO: 2366333 - RNA, 22 nt, Human
acagaauacuguuaaaggaaaa

SEQ ID NO: 2366334 - RNA, 22 nt, Human
acagaaucauaugauucugcuu

SEQ ID NO: 2366335 - RNA, 21 nt, Human
acagaggggguggccucccaa

SEQ ID NO: 2366336 - RNA, 16 nt, Human
acagcaucauuuugca

SEQ ID NO: 2366337 - RNA, 13 nt, Human
acagcaguguucc

SEQ ID NO: 2366338 - RNA, 19 nt, Human
acagcaguguuccccaucu

SEQ ID NO: 2366339 - RNA, 16 nt, Human
acagcagugucaucag

SEQ ID NO: 2366340 - RNA, 17 nt, Human
acagcagugucaucaga

SEQ ID NO: 2366341 - RNA, 17 nt, Human
acagcaucauuuugcau

SEQ ID NO: 2366342 - RNA, 20 nt, Human
acagcaucauuuugcauuca

SEQ ID NO: 2366343 - RNA, 21 nt, Human
acagcaucauuuugcauucaa

SEQ ID NO: 2366344 - RNA, 18 nt, Human
acagcaguugaaaagacu

SEQ ID NO: 2366345 - RNA, 15 nt, Human
acagcaguugaaaag

SEQ ID NO: 2366346 - RNA, 17 nt, Human
acagagucucacuguug

SEQ ID NO: 2366347 - RNA, 19 nt, Human
acagagucucacuguugcc

SEQ ID NO: 2366348 - RNA, 11 nt, Human
acagcaggugu

SEQ ID NO: 2366349 - RNA, 22 nt, Human
acagcaggguagucugguuucu

SEQ ID NO: 2366350 - RNA, 23 nt, Human
acagccaaaugcauggugcaguu

SEQ ID NO: 2366351 - RNA, 19 nt, Human
acagccacggccaggccag

SEQ ID NO: 2366352 - RNA, 11 nt, Human
acagcauugcu

SEQ ID NO: 2366353 - RNA, 13 nt, Human
acagcauguguau

SEQ ID NO: 2366354 - RNA, 13 nt, Human
acagcauugcuuu

SEQ ID NO: 2366355 - RNA, 12 nt, Human
acagcauugcuu

SEQ ID NO: 2366356 - RNA, 15 nt, Human
acagcauugcuuucu

SEQ ID NO: 2366357 - RNA, 20 nt, Human
acagcaugagaggcucugug

SEQ ID NO: 2366358 - RNA, 13 nt, Human
acagccagcaccu

SEQ ID NO: 2366359 - RNA, 16 nt, Human
acagccagcaccuggc

SEQ ID NO: 2366360 - RNA, 16 nt, Human
acagccagacuggcac

SEQ ID NO: 2366361 - RNA, 15 nt, Human
acagccagacuggca

SEQ ID NO: 2366362 - RNA, 13 nt, Human
acagccagacugg

SEQ ID NO: 2366363 - RNA, 16 nt, Human
acagcccaaagaagga

SEQ ID NO: 2366364 - RNA, 19 nt, Human
acagccaucccagccuugg

SEQ ID NO: 2366365 - RNA, 17 nt, Human
acagcccaaagaaggaa

SEQ ID NO: 2366366 - RNA, 18 nt, Human
acagcccaaagaaggaaa

SEQ ID NO: 2366367 - RNA, 15 nt, Human
acagccaucccagcc

SEQ ID NO: 2366368 - RNA, 16 nt, Human
acagccaucccagccu

SEQ ID NO: 2366369 - RNA, 18 nt, Human
acagccaucccagccuug

SEQ ID NO: 2366370 - RNA, 15 nt, Human
acagccaggugccuu

SEQ ID NO: 2366371 - RNA, 16 nt, Human
acagccaggugccuug

SEQ ID NO: 2366372 - RNA, 17 nt, Human
acagccaggugccuugg

SEQ ID NO: 2366373 - RNA, 19 nt, Human
acagccaggugccuuggag

SEQ ID NO: 2366374 - RNA, 15 nt, Human
acagccaugauucuu

SEQ ID NO: 2366375 - RNA, 15 nt, Human
acaggggcaggagga

SEQ ID NO: 2366376 - RNA, 20 nt, Human
acaggggaagguggccucug

SEQ ID NO: 2366377 - RNA, 20 nt, Human
acagcugcuccuagagggag

SEQ ID NO: 2366378 - RNA, 21 nt, Human
acagcugcucaauaaaguaca

SEQ ID NO: 2366379 - RNA, 18 nt, Human
acaggcaagcaccuccug

SEQ ID NO: 2366380 - RNA, 15 nt, Human
acaggcaagcaccuc

SEQ ID NO: 2366381 - RNA, 16 nt, Human
acaggcaagcaccucc

SEQ ID NO: 2366382 - RNA, 23 nt, Human
acaggucaauacaguacaggcag

SEQ ID NO: 2366383 - RNA, 22 nt, Human
acaggucaauacaguacaggca

SEQ ID NO: 2366384 - RNA, 21 nt, Human
acagggucucuagugcuguga

SEQ ID NO: 2366385 - RNA, 17 nt, Human
acaggguagcagguacc

SEQ ID NO: 2366386 - RNA, 19 nt, Human
acagggucucuagugcugu

SEQ ID NO: 2366387 - RNA, 19 nt, Human
acagguaacgucuguaagc

SEQ ID NO: 2366388 - RNA, 15 nt, Human
acagguaauauaaaa

SEQ ID NO: 2366389 - RNA, 18 nt, Human
acagguaaacuaucuugg

SEQ ID NO: 2366390 - RNA, 20 nt, Human
acaggugugaaccaccacac

SEQ ID NO: 2366391 - RNA, 23 nt, Human
acaggugugaaccaccacaccca

SEQ ID NO: 2366392 - RNA, 18 nt, Human
acaggucuccucuuaaaa

SEQ ID NO: 2366393 - RNA, 22 nt, Human
acaggugugagccaccacgccc

SEQ ID NO: 2366394 - RNA, 14 nt, Human
acaggucuccucuu

SEQ ID NO: 2366395 - RNA, 21 nt, Human
acaggugugagccaccacgcc

SEQ ID NO: 2366396 - RNA, 12 nt, Human
acagcuccuucu

SEQ ID NO: 2366397 - RNA, 13 nt, Human
acagcuccuucug

SEQ ID NO: 2366398 - RNA, 14 nt, Human
acagcuccuucugu

SEQ ID NO: 2366399 - RNA, 13 nt, Human
acagcuccuuggg

SEQ ID NO: 2366400 - RNA, 14 nt, Human
acagcuccuuggga

SEQ ID NO: 2366401 - RNA, 15 nt, Human
acagcuccuugggag

SEQ ID NO: 2366402 - RNA, 17 nt, Human
acagcuccuugggagga

SEQ ID NO: 2366403 - RNA, 23 nt, Human
acagcuccuugggaggaagcaga

SEQ ID NO: 2366404 - RNA, 19 nt, Human
acagcuccuugggaggaag

SEQ ID NO: 2366405 - RNA, 20 nt, Human
acagcuccuugggaggaagc

SEQ ID NO: 2366406 - RNA, 21 nt, Human
acagcuccuugggaggaagca

SEQ ID NO: 2366407 - RNA, 22 nt, Human
acagcuccuugggaggaagcag

SEQ ID NO: 2366408 - RNA, 20 nt, Human
acagcucugcauacucauua

SEQ ID NO: 2366409 - RNA, 14 nt, Human
acagcugccuggga

SEQ ID NO: 2366410 - RNA, 23 nt, Human
acagcugccugggaucccucauc

SEQ ID NO: 2366411 - RNA, 10 nt, Human
acagcugcuc

SEQ ID NO: 2366412 - RNA, 13 nt, Human
acagcucuagaca

SEQ ID NO: 2366413 - RNA, 14 nt, Human
acaccagacagaca

SEQ ID NO: 2366414 - RNA, 13 nt, Human
acaccagagcaga

SEQ ID NO: 2366415 - RNA, 17 nt, Human
acaccagagcagaugca

SEQ ID NO: 2366416 - RNA, 21 nt, Human
acaccacuacauucuguuaau

SEQ ID NO: 2366417 - RNA, 14 nt, Human
acaccacuacauuc

SEQ ID NO: 2366418 - RNA, 18 nt, Human
acaccacagacacacaca

SEQ ID NO: 2366419 - RNA, 21 nt, Human
acaccacagacacacacacgc

SEQ ID NO: 2366420 - RNA, 22 nt, Human
acaccacagacacacacacgca

SEQ ID NO: 2366421 - RNA, 18 nt, Human
acaccaccucacuccugu

SEQ ID NO: 2366422 - RNA, 17 nt, Human
acaccacacccagccuc

SEQ ID NO: 2366423 - RNA, 18 nt, Human
acaccacacccagccuca

SEQ ID NO: 2366424 - RNA, 12 nt, Human
acaccacagaca

SEQ ID NO: 2366425 - RNA, 13 nt, Human
acaccacagacac

SEQ ID NO: 2366426 - RNA, 14 nt, Human
acaccacagacaca

SEQ ID NO: 2366427 - RNA, 15 nt, Human
acaccacagacacac

SEQ ID NO: 2366428 - RNA, 16 nt, Human
acaccacagacacaca

SEQ ID NO: 2366429 - RNA, 17 nt, Human
acaccacagacacacac

SEQ ID NO: 2366430 - RNA, 12 nt, Human
acaccagagccc

SEQ ID NO: 2366431 - RNA, 18 nt, Human
acaccagagcagaugcag

SEQ ID NO: 2366432 - RNA, 19 nt, Human
acaccagagcagaugcaga

SEQ ID NO: 2366433 - RNA, 20 nt, Human
acaccagagcagaugcagag

SEQ ID NO: 2366434 - RNA, 22 nt, Human
acaccagagcagaugcagagag

SEQ ID NO: 2366435 - RNA, 19 nt, Human
acacgcuccuuccucugag

SEQ ID NO: 2366436 - RNA, 17 nt, Human
acacgcuccuuccucug

SEQ ID NO: 2366437 - RNA, 20 nt, Human
acacagcuaacacacagcuc

SEQ ID NO: 2366438 - RNA, 23 nt, Human
acacagcuaacacacagcuccca

SEQ ID NO: 2366439 - RNA, 23 nt, Human
acacagacugcgauuugucccag

SEQ ID NO: 2366440 - RNA, 23 nt, Human
acacagacauucugccaggcccc

SEQ ID NO: 2366441 - RNA, 13 nt, Human
acacagaaaccuu

SEQ ID NO: 2366442 - RNA, 19 nt, Human
acacagaaaccuuuuuaaa

SEQ ID NO: 2366443 - RNA, 18 nt, Human
acacagaaaccuuuuuaa

SEQ ID NO: 2366444 - RNA, 21 nt, Human
acacagaaaccuuuuuaaaaa

SEQ ID NO: 2366445 - RNA, 17 nt, Human
acacagaaagccuauca

SEQ ID NO: 2366446 - RNA, 11 nt, Human
acacagcucug

SEQ ID NO: 2366447 - RNA, 12 nt, Human
acacagcucugu

SEQ ID NO: 2366448 - RNA, 13 nt, Human
acaccacacccag

SEQ ID NO: 2366449 - RNA, 14 nt, Human
acaccacacccagc

SEQ ID NO: 2366450 - RNA, 15 nt, Human
acaccacacccagcc

SEQ ID NO: 2366451 - RNA, 16 nt, Human
acaccacacccagccu

SEQ ID NO: 2366452 - RNA, 21 nt, Human
acacagcuaacacacagcucc

SEQ ID NO: 2366453 - RNA, 15 nt, Human
acacggacacucaaa

SEQ ID NO: 2366454 - RNA, 22 nt, Human
acacggagcccagcccucccca

SEQ ID NO: 2366455 - RNA, 18 nt, Human
acacggagcccagcccuc

SEQ ID NO: 2366456 - RNA, 14 nt, Human
acacuaaaaauaaa

SEQ ID NO: 2366457 - RNA, 15 nt, Human
acacuaaacagacua

SEQ ID NO: 2366458 - RNA, 20 nt, Human
acacuaaacagacuauuuaa

SEQ ID NO: 2366459 - RNA, 21 nt, Human
acacuaaacagacuauuuaac

SEQ ID NO: 2366460 - RNA, 14 nt, Human
acacuaaccacgcu

SEQ ID NO: 2366461 - RNA, 15 nt, Human
acacuaaccacgcug

SEQ ID NO: 2366462 - RNA, 11 nt, Human
acaauguuaag

SEQ ID NO: 2366463 - RNA, 14 nt, Human
acaauguuaaggaa

SEQ ID NO: 2366464 - RNA, 19 nt, Human
acaauguuaaggaaacucu

SEQ ID NO: 2366465 - RNA, 20 nt, Human
acaauguuaaggaaacucuu

SEQ ID NO: 2366466 - RNA, 21 nt, Human
acaauguuaaggaaacucuua

SEQ ID NO: 2366467 - RNA, 22 nt, Human
acaauguuaaggaaacucuuau

SEQ ID NO: 2366468 - RNA, 15 nt, Human
acaauguucauccca

SEQ ID NO: 2366469 - RNA, 21 nt, Human
acaauguucaucccaugaugu

SEQ ID NO: 2366470 - RNA, 19 nt, Human
acaauuaaagcuguuauuu

SEQ ID NO: 2366471 - RNA, 16 nt, Human
acaauuaaagcuguua

SEQ ID NO: 2366472 - RNA, 15 nt, Human
acaauuuauuauggc

SEQ ID NO: 2366473 - RNA, 19 nt, Human
acaauuucaaaaaaauaaa

SEQ ID NO: 2366474 - RNA, 20 nt, Human
acaauuucaaaaaaauaaaa

SEQ ID NO: 2366475 - RNA, 16 nt, Human
acaauuuccuuuauau

SEQ ID NO: 2366476 - RNA, 17 nt, Human
acaauuuccuuuauauu

SEQ ID NO: 2366477 - RNA, 16 nt, Human
acaauuuauuauggca

SEQ ID NO: 2366478 - RNA, 11 nt, Human
acaauuucugu

SEQ ID NO: 2366479 - RNA, 20 nt, Human
acaauuuccuuuauauuuag

SEQ ID NO: 2366480 - RNA, 23 nt, Human
acaauuuccuuuauauuuaguga

SEQ ID NO: 2366481 - RNA, 21 nt, Human
acaauuugagauguauuucaa

SEQ ID NO: 2366482 - RNA, 15 nt, Human
acacaaacguaugua

SEQ ID NO: 2366483 - RNA, 19 nt, Human
acacaaacuguaaauaaaa

SEQ ID NO: 2366484 - RNA, 18 nt, Human
acacaaacgggcucagca

SEQ ID NO: 2366485 - RNA, 16 nt, Human
acacaaacuguaaaua

SEQ ID NO: 2366486 - RNA, 15 nt, Human
acacaaacuguaaau

SEQ ID NO: 2366487 - RNA, 14 nt, Human
acacaaacuguaaa

SEQ ID NO: 2366488 - RNA, 16 nt, Human
acacaaaccugccugg

SEQ ID NO: 2366489 - RNA, 17 nt, Human
acacaaaccugccuggg

SEQ ID NO: 2366490 - RNA, 15 nt, Human
acaauuuuguacaaa

SEQ ID NO: 2366491 - RNA, 15 nt, Human
acacaaaccugccug

SEQ ID NO: 2366492 - RNA, 12 nt, Human
acaauuuuguac

SEQ ID NO: 2366493 - RNA, 22 nt, Human
acaaugugaacuuuauuaaaua

SEQ ID NO: 2366494 - RNA, 19 nt, Human
acaaugugaacuuuauuaa

SEQ ID NO: 2366495 - RNA, 17 nt, Human
aauuauaacuuaaaaua

SEQ ID NO: 2366496 - RNA, 23 nt, Human
aauuauaacuuaaaauauuuuau

SEQ ID NO: 2366497 - RNA, 17 nt, Human
aauuauaagaggcugau

SEQ ID NO: 2366498 - RNA, 20 nt, Human
aauuauaagaggcugauaau

SEQ ID NO: 2366499 - RNA, 16 nt, Human
aauuauaauauacuau

SEQ ID NO: 2366500 - RNA, 19 nt, Human
aauuuuauagcucaguuua

SEQ ID NO: 2366501 - RNA, 14 nt, Human
aauuuuaucccuca

SEQ ID NO: 2366502 - RNA, 20 nt, Human
aauuuuaucccucaccugua

SEQ ID NO: 2366503 - RNA, 12 nt, Human
aauuuuaugaau

SEQ ID NO: 2366504 - RNA, 19 nt, Human
aauuuuaugagggccacgg

SEQ ID NO: 2366505 - RNA, 16 nt, Human
aauuuuaucucuuauu

SEQ ID NO: 2366506 - RNA, 20 nt, Human
aauuuuauagcucaguuuau

SEQ ID NO: 2366507 - RNA, 13 nt, Human
aauuuugaaaaac

SEQ ID NO: 2366508 - RNA, 19 nt, Human
aauuuuaguagagacaggg

SEQ ID NO: 2366509 - RNA, 23 nt, Human
aauuuuagugacagcucugccug

SEQ ID NO: 2366510 - RNA, 22 nt, Human
acaaagacaaauucuguuucuu

SEQ ID NO: 2366511 - RNA, 19 nt, Human
acaaagacaaauucuguuu

SEQ ID NO: 2366512 - RNA, 13 nt, Human
acaaagacugagu

SEQ ID NO: 2366513 - RNA, 18 nt, Human
acaacuaugauuuggaaa

SEQ ID NO: 2366514 - RNA, 13 nt, Human
acaacuauauugu

SEQ ID NO: 2366515 - RNA, 18 nt, Human
acaaagaagacaacauua

SEQ ID NO: 2366516 - RNA, 21 nt, Human
acaaacguauguaaauguaua

SEQ ID NO: 2366517 - RNA, 13 nt, Human
acaaagaagacau

SEQ ID NO: 2366518 - RNA, 14 nt, Human
acaaaccugccugg

SEQ ID NO: 2366519 - RNA, 18 nt, Human
acaaaccugccuggguuu

SEQ ID NO: 2366520 - RNA, 18 nt, Human
acaaacguauguaaaugu

SEQ ID NO: 2366521 - RNA, 18 nt, Human
acaaagacaaauucuguu

SEQ ID NO: 2366522 - RNA, 22 nt, Human
acaaagaagacauguuuuagac

SEQ ID NO: 2366523 - RNA, 15 nt, Human
acaaagaagacaugu

SEQ ID NO: 2366524 - RNA, 16 nt, Human
acaaagaagacauguu

SEQ ID NO: 2366525 - RNA, 19 nt, Human
acaaagaagacauguuuua

SEQ ID NO: 2366526 - RNA, 21 nt, Human
acaaagaagacauguuuuaga

SEQ ID NO: 2366527 - RNA, 15 nt, Human
acaaacgggcucagc

SEQ ID NO: 2366528 - RNA, 21 nt, Human
acaaaccuguuucugcagcca

SEQ ID NO: 2366529 - RNA, 21 nt, Human
aauuuugaauaaauaaaugua

SEQ ID NO: 2366530 - RNA, 16 nt, Human
aauuuugacacuauau

SEQ ID NO: 2366531 - RNA, 21 nt, Human
aauuuucuuuuuaauaaaaag

SEQ ID NO: 2366532 - RNA, 19 nt, Human
aauuuugacacuauaucug

SEQ ID NO: 2366533 - RNA, 20 nt, Human
aauuuugaguucuacauaag

SEQ ID NO: 2366534 - RNA, 20 nt, Human
acaaaauguaggguuauaau

SEQ ID NO: 2366535 - RNA, 12 nt, Human
acaaaccugccu

SEQ ID NO: 2366536 - RNA, 21 nt, Human
acaaaccgagugcaaugaaug

SEQ ID NO: 2366537 - RNA, 14 nt, Human
acaaaccagaagca

SEQ ID NO: 2366538 - RNA, 14 nt, Human
acaaaccaugcaaa

SEQ ID NO: 2366539 - RNA, 18 nt, Human
acaacuucccagugaauu

SEQ ID NO: 2366540 - RNA, 17 nt, Human
acaacuucaagugcaug

SEQ ID NO: 2366541 - RNA, 17 nt, Human
acaacuucaauauccaa

SEQ ID NO: 2366542 - RNA, 19 nt, Human
acaacuaggcuucagcaua

SEQ ID NO: 2366543 - RNA, 17 nt, Human
acaacuauggaucagaa

SEQ ID NO: 2366544 - RNA, 16 nt, Human
acaacuauuuuuccaa

SEQ ID NO: 2366545 - RNA, 14 nt, Human
acaacuucuuugua

SEQ ID NO: 2366546 - RNA, 22 nt, Human
acaacuugucuauuaccuguua

SEQ ID NO: 2366547 - RNA, 13 nt, Human
acaacuuugccag

SEQ ID NO: 2366548 - RNA, 17 nt, Human
acaacuuuaagaggaca

SEQ ID NO: 2366549 - RNA, 14 nt, Human
acaacuucagcagu

SEQ ID NO: 2366550 - RNA, 22 nt, Human
acaagugaguuguugcccuggg

SEQ ID NO: 2366551 - RNA, 18 nt, Human
acaagugaaaaacaucca

SEQ ID NO: 2366552 - RNA, 12 nt, Human
acaagugccacu

SEQ ID NO: 2366553 - RNA, 21 nt, Human
acaaguaugaauaaagacacc

SEQ ID NO: 2366554 - RNA, 23 nt, Human
acaaguaugaauaaagacaccua

SEQ ID NO: 2366555 - RNA, 23 nt, Human
acaagucauuuuaacuuuaucac

SEQ ID NO: 2366556 - RNA, 21 nt, Human
acaagucauuuuaacuuuauc

SEQ ID NO: 2366557 - RNA, 16 nt, Human
acaagucccuguaauu

SEQ ID NO: 2366558 - RNA, 23 nt, Human
acaagucauagguuaauauuuaa

SEQ ID NO: 2366559 - RNA, 17 nt, Human
acaagucccuguaauug

SEQ ID NO: 2366560 - RNA, 15 nt, Human
acaaguccugugaau

SEQ ID NO: 2366561 - RNA, 16 nt, Human
acaaguccugugaauu

SEQ ID NO: 2366562 - RNA, 17 nt, Human
acaaguccugugaauuu

SEQ ID NO: 2366563 - RNA, 19 nt, Human
acaaguccugugaauuucu

SEQ ID NO: 2366564 - RNA, 20 nt, Human
accccgucgaggggcucuca

SEQ ID NO: 2366565 - RNA, 23 nt, Human
accccgucugggguucagccccu

SEQ ID NO: 2366566 - RNA, 22 nt, Human
accccgucugggguucagcccc

SEQ ID NO: 2366567 - RNA, 23 nt, Human
accccggggugcccacaggccgc

SEQ ID NO: 2366568 - RNA, 21 nt, Human
accccggggugcccacaggcc

SEQ ID NO: 2366569 - RNA, 20 nt, Human
accccggggugcccacaggc

SEQ ID NO: 2366570 - RNA, 15 nt, Human
accccggggacccug

SEQ ID NO: 2366571 - RNA, 16 nt, Human
accccggggacccugu

SEQ ID NO: 2366572 - RNA, 17 nt, Human
accccggggacccugug

SEQ ID NO: 2366573 - RNA, 18 nt, Human
accccggggacccuguga

SEQ ID NO: 2366574 - RNA, 21 nt, Human
accccguguccccggccucag

SEQ ID NO: 2366575 - RNA, 22 nt, Human
accccuaaagagauacuuugau

SEQ ID NO: 2366576 - RNA, 21 nt, Human
accccgggcucucugcuguac

SEQ ID NO: 2366577 - RNA, 18 nt, Human
accccgggcucucugcug

SEQ ID NO: 2366578 - RNA, 17 nt, Human
accccgggcucucugcu

SEQ ID NO: 2366579 - RNA, 16 nt, Human
accccgggcucucugc

SEQ ID NO: 2366580 - RNA, 15 nt, Human
accccgggcucucug

SEQ ID NO: 2366581 - RNA, 13 nt, Human
accccgggcucuc

SEQ ID NO: 2366582 - RNA, 21 nt, Human
accccgcucugcaugcggccc

SEQ ID NO: 2366583 - RNA, 22 nt, Human
accccgcucugcaugcggccca

SEQ ID NO: 2366584 - RNA, 13 nt, Human
accccgggcgggu

SEQ ID NO: 2366585 - RNA, 15 nt, Human
accccggccaccugc

SEQ ID NO: 2366586 - RNA, 19 nt, Human
accccgccugcccucaugg

SEQ ID NO: 2366587 - RNA, 14 nt, Human
accccgcucugcau

SEQ ID NO: 2366588 - RNA, 16 nt, Human
accccgcucugcaugc

SEQ ID NO: 2366589 - RNA, 23 nt, Human
accccgcucugcaugcggcccag

SEQ ID NO: 2366590 - RNA, 23 nt, Human
acccccuucucugcuccaccaca

SEQ ID NO: 2366591 - RNA, 13 nt, Human
acccccuucuggg

SEQ ID NO: 2366592 - RNA, 14 nt, Human
acccccuucugggc

SEQ ID NO: 2366593 - RNA, 20 nt, Human
acccccuucucugcuccacc

SEQ ID NO: 2366594 - RNA, 19 nt, Human
acccccuucucugcuccac

SEQ ID NO: 2366595 - RNA, 18 nt, Human
acccccuucucugcucca

SEQ ID NO: 2366596 - RNA, 17 nt, Human
acccccuucucugcucc

SEQ ID NO: 2366597 - RNA, 16 nt, Human
acccccuucucugcuc

SEQ ID NO: 2366598 - RNA, 18 nt, Human
accccaaagccccuugcu

SEQ ID NO: 2366599 - RNA, 16 nt, Human
accccaaagccccuug

SEQ ID NO: 2366600 - RNA, 15 nt, Human
accccaaagccccuu

SEQ ID NO: 2366601 - RNA, 21 nt, Human
accccaaagagccuggagaag

SEQ ID NO: 2366602 - RNA, 22 nt, Human
accccaaagagccuggagaagc

SEQ ID NO: 2366603 - RNA, 15 nt, Human
accccaaagcuuucc

SEQ ID NO: 2366604 - RNA, 17 nt, Human
accccaaagcuuuccug

SEQ ID NO: 2366605 - RNA, 18 nt, Human
accccaaagcuuuccugc

SEQ ID NO: 2366606 - RNA, 15 nt, Human
accccgcagacaccu

SEQ ID NO: 2366607 - RNA, 17 nt, Human
accccgcagacaccuug

SEQ ID NO: 2366608 - RNA, 18 nt, Human
accccgcagacaccuugg

SEQ ID NO: 2366609 - RNA, 20 nt, Human
accccgcagacaccuuggac

SEQ ID NO: 2366610 - RNA, 14 nt, Human
accccgccugcccu

SEQ ID NO: 2366611 - RNA, 18 nt, Human
accccgaccaccugccca

SEQ ID NO: 2366612 - RNA, 15 nt, Human
acccccuucugggca

SEQ ID NO: 2366613 - RNA, 16 nt, Human
acccccuucugggcau

SEQ ID NO: 2366614 - RNA, 17 nt, Human
acccccuucugggcauc

SEQ ID NO: 2366615 - RNA, 18 nt, Human
acccccuuugugcugugg

SEQ ID NO: 2366616 - RNA, 14 nt, Human
acccauuuucacau

SEQ ID NO: 2366617 - RNA, 16 nt, Human
acccaugcugcccugu

SEQ ID NO: 2366618 - RNA, 19 nt, Human
acccaugcugcccugugag

SEQ ID NO: 2366619 - RNA, 20 nt, Human
acccauuuugagugacucga

SEQ ID NO: 2366620 - RNA, 16 nt, Human
accccaaacaccuucc

SEQ ID NO: 2366621 - RNA, 18 nt, Human
accccaaacaccuuccag

SEQ ID NO: 2366622 - RNA, 20 nt, Human
accccaaacaccuuccagcu

SEQ ID NO: 2366623 - RNA, 23 nt, Human
accccaaacaccuuccagcuccu

SEQ ID NO: 2366624 - RNA, 14 nt, Human
accccaaaccucca

SEQ ID NO: 2366625 - RNA, 14 nt, Human
accccaaagagccu

SEQ ID NO: 2366626 - RNA, 15 nt, Human
accccaaagagccug

SEQ ID NO: 2366627 - RNA, 19 nt, Human
accccaaagagccuggaga

SEQ ID NO: 2366628 - RNA, 20 nt, Human
acccaugaggcaaugucagg

SEQ ID NO: 2366629 - RNA, 13 nt, Human
acccaugaggcaa

SEQ ID NO: 2366630 - RNA, 21 nt, Human
acccaugaguuggggucuggc

SEQ ID NO: 2366631 - RNA, 20 nt, Human
acccaugaguuggggucugg

SEQ ID NO: 2366632 - RNA, 20 nt, Human
acccaugaagacaggacagu

SEQ ID NO: 2366633 - RNA, 19 nt, Human
acccaugaagacaggacag

SEQ ID NO: 2366634 - RNA, 14 nt, Human
acccaugaaucaaa

SEQ ID NO: 2366635 - RNA, 17 nt, Human
acccaugaaucaaagac

SEQ ID NO: 2366636 - RNA, 23 nt, Human
acccaugacuuuauauggaugau

SEQ ID NO: 2366637 - RNA, 17 nt, Human
acccaugcugcccugug

SEQ ID NO: 2366638 - RNA, 18 nt, Human
acccaugcugcccuguga

SEQ ID NO: 2366639 - RNA, 20 nt, Human
acccacaaaaguacaauuua

SEQ ID NO: 2366640 - RNA, 13 nt, Human
acccaaugauuca

SEQ ID NO: 2366641 - RNA, 20 nt, Human
acccaaugcacacaaaacaa

SEQ ID NO: 2366642 - RNA, 14 nt, Human
acccaauccaaaug

SEQ ID NO: 2366643 - RNA, 13 nt, Human
acccaauccaaau

SEQ ID NO: 2366644 - RNA, 15 nt, Human
acccacaagaaauga

SEQ ID NO: 2366645 - RNA, 20 nt, Human
acccaucugcaccccccugg

SEQ ID NO: 2366646 - RNA, 13 nt, Human
acccaucugcacc

SEQ ID NO: 2366647 - RNA, 15 nt, Human
acccaucgcugugug

SEQ ID NO: 2366648 - RNA, 17 nt, Human
acccaucgcuguguguu

SEQ ID NO: 2366649 - RNA, 20 nt, Human
acccauccuaccaaugcaug

SEQ ID NO: 2366650 - RNA, 21 nt, Human
acccauccuaccaaugcaugc

SEQ ID NO: 2366651 - RNA, 22 nt, Human
acccaucugcaccccccugggc

SEQ ID NO: 2366652 - RNA, 21 nt, Human
acccaucugcaccccccuggg

SEQ ID NO: 2366653 - RNA, 13 nt, Human
acccaucugggcu

SEQ ID NO: 2366654 - RNA, 17 nt, Human
acccaucuguuuuuugu

SEQ ID NO: 2366655 - RNA, 18 nt, Human
acccaucuguuuuuugua

SEQ ID NO: 2366656 - RNA, 15 nt, Human
acccaaggaggaaaa

SEQ ID NO: 2366657 - RNA, 16 nt, Human
acccaagugggggcag

SEQ ID NO: 2366658 - RNA, 13 nt, Human
acccaaggacuga

SEQ ID NO: 2366659 - RNA, 16 nt, Human
acccaaguccaagcau

SEQ ID NO: 2366660 - RNA, 13 nt, Human
acccaagggccug

SEQ ID NO: 2366661 - RNA, 16 nt, Human
acccaagggccuggcc

SEQ ID NO: 2366662 - RNA, 14 nt, Human
accaucaugucugg

SEQ ID NO: 2366663 - RNA, 12 nt, Human
accaucauccua

SEQ ID NO: 2366664 - RNA, 16 nt, Human
accaucaugucuggcu

SEQ ID NO: 2366665 - RNA, 17 nt, Human
accaucaugucuggcua

SEQ ID NO: 2366666 - RNA, 18 nt, Human
accaucccugaaggcccc

SEQ ID NO: 2366667 - RNA, 16 nt, Human
accaucccugaaggcc

SEQ ID NO: 2366668 - RNA, 21 nt, Human
accaucccugaaggccccgcc

SEQ ID NO: 2366669 - RNA, 22 nt, Human
accaucccugaaggccccgccc

SEQ ID NO: 2366670 - RNA, 18 nt, Human
accaucccuuuuugaagu

SEQ ID NO: 2366671 - RNA, 15 nt, Human
accaucccuuuuuga

SEQ ID NO: 2366672 - RNA, 15 nt, Human
acccaagcuuagaac

SEQ ID NO: 2366673 - RNA, 13 nt, Human
acccaagcuuggc

SEQ ID NO: 2366674 - RNA, 14 nt, Human
acccaagcuuggca

SEQ ID NO: 2366675 - RNA, 18 nt, Human
acccaagcuuggcagccg

SEQ ID NO: 2366676 - RNA, 22 nt, Human
acccaagcuuggcagccgagcu

SEQ ID NO: 2366677 - RNA, 17 nt, Human
acccaaggacugaggga

SEQ ID NO: 2366678 - RNA, 20 nt, Human
accccucaacaccucugcac

SEQ ID NO: 2366679 - RNA, 16 nt, Human
accccuacaugaaaca

SEQ ID NO: 2366680 - RNA, 21 nt, Human
acauuuguagcauccucuuua

SEQ ID NO: 2366681 - RNA, 19 nt, Human
acauuugggagacauguga

SEQ ID NO: 2366682 - RNA, 20 nt, Human
acauuugggagacaugugac

SEQ ID NO: 2366683 - RNA, 21 nt, Human
acauuugggagacaugugaca

SEQ ID NO: 2366684 - RNA, 18 nt, Human
acauuuggaauacuuuuu

SEQ ID NO: 2366685 - RNA, 17 nt, Human
acauuuggaauacuuuu

SEQ ID NO: 2366686 - RNA, 16 nt, Human
acauuuggaauacuuu

SEQ ID NO: 2366687 - RNA, 15 nt, Human
acauuuggaauacuu

SEQ ID NO: 2366688 - RNA, 20 nt, Human
acauuuggaguguuccccuu

SEQ ID NO: 2366689 - RNA, 17 nt, Human
acauuugggagacaugu

SEQ ID NO: 2366690 - RNA, 15 nt, Human
acauuuggaguguuc

SEQ ID NO: 2366691 - RNA, 14 nt, Human
accaacugggccca

SEQ ID NO: 2366692 - RNA, 20 nt, Human
accaacuagacauucugucg

SEQ ID NO: 2366693 - RNA, 14 nt, Human
accaacucuugcag

SEQ ID NO: 2366694 - RNA, 23 nt, Human
accaacugucacucauugcugag

SEQ ID NO: 2366695 - RNA, 16 nt, Human
accaacuacaaccaag

SEQ ID NO: 2366696 - RNA, 15 nt, Human
accaacuagacauuc

SEQ ID NO: 2366697 - RNA, 17 nt, Human
accaacuagacauucug

SEQ ID NO: 2366698 - RNA, 19 nt, Human
accaacuagacauucuguc

SEQ ID NO: 2366699 - RNA, 14 nt, Human
acauuuguauaaaa

SEQ ID NO: 2366700 - RNA, 12 nt, Human
acauuuggaaua

SEQ ID NO: 2366701 - RNA, 18 nt, Human
acauuugcucauggaauu

SEQ ID NO: 2366702 - RNA, 17 nt, Human
accacuacaugcagccc

SEQ ID NO: 2366703 - RNA, 17 nt, Human
accagcagcgccuuucc

SEQ ID NO: 2366704 - RNA, 18 nt, Human
accagcagcgccuuuccc

SEQ ID NO: 2366705 - RNA, 17 nt, Human
accagcagccuggaccc

SEQ ID NO: 2366706 - RNA, 14 nt, Human
accagcagccugga

SEQ ID NO: 2366707 - RNA, 13 nt, Human
accagcagccugg

SEQ ID NO: 2366708 - RNA, 23 nt, Human
accacuaaaagaucgcaguuugc

SEQ ID NO: 2366709 - RNA, 14 nt, Human
accacuacauucug

SEQ ID NO: 2366710 - RNA, 19 nt, Human
accacguuucuaaaggcua

SEQ ID NO: 2366711 - RNA, 15 nt, Human
accacguuucuaaag

SEQ ID NO: 2366712 - RNA, 19 nt, Human
accaagcucacaguuccuc

SEQ ID NO: 2366713 - RNA, 18 nt, Human
accaagcucacaguuccu

SEQ ID NO: 2366714 - RNA, 14 nt, Human
accaagcucucugc

SEQ ID NO: 2366715 - RNA, 12 nt, Human
accaagcugugc

SEQ ID NO: 2366716 - RNA, 17 nt, Human
accaagcucacaguucc

SEQ ID NO: 2366717 - RNA, 13 nt, Human
accaacuuucugu

SEQ ID NO: 2366718 - RNA, 17 nt, Human
accaagcuauccuggcu

SEQ ID NO: 2366719 - RNA, 15 nt, Human
accaagcuauccugg

SEQ ID NO: 2366720 - RNA, 14 nt, Human
accaacuuucugua

SEQ ID NO: 2366721 - RNA, 12 nt, Human
accaacuuucug

SEQ ID NO: 2366722 - RNA, 20 nt, Human
accaagccuggucagcccaa

SEQ ID NO: 2366723 - RNA, 19 nt, Human
accaagccuggucagccca

SEQ ID NO: 2366724 - RNA, 22 nt, Human
accacgauguggcccuggccug

SEQ ID NO: 2366725 - RNA, 23 nt, Human
accacgcccguccugccuguggc

SEQ ID NO: 2366726 - RNA, 20 nt, Human
accacgcccguccugccugu

SEQ ID NO: 2366727 - RNA, 21 nt, Human
accacgcccguccugccugug

SEQ ID NO: 2366728 - RNA, 20 nt, Human
accacgcccggcuaauuuuu

SEQ ID NO: 2366729 - RNA, 18 nt, Human
accacgcccguccugccu

SEQ ID NO: 2366730 - RNA, 19 nt, Human
accacgcccguccugccug

SEQ ID NO: 2366731 - RNA, 21 nt, Human
accacgauguggcccuggccu

SEQ ID NO: 2366732 - RNA, 20 nt, Human
accacgauguggcccuggcc

SEQ ID NO: 2366733 - RNA, 13 nt, Human
accaaggaccccu

SEQ ID NO: 2366734 - RNA, 14 nt, Human
accacgcccggcua

SEQ ID NO: 2366735 - RNA, 13 nt, Human
accaagcugugcc

SEQ ID NO: 2366736 - RNA, 14 nt, Human
accaagcugugcca

SEQ ID NO: 2366737 - RNA, 18 nt, Human
accaagcugugccacccu

SEQ ID NO: 2366738 - RNA, 19 nt, Human
accaagcugugccacccug

SEQ ID NO: 2366739 - RNA, 20 nt, Human
accaagcugugccacccugg

SEQ ID NO: 2366740 - RNA, 23 nt, Human
accaagcugugccacccugggcu

SEQ ID NO: 2366741 - RNA, 22 nt, Human
accagcaucccuugaccaggcc

SEQ ID NO: 2366742 - RNA, 15 nt, Human
acauaaacugacuuu

SEQ ID NO: 2366743 - RNA, 13 nt, Human
acauaaacugacu

SEQ ID NO: 2366744 - RNA, 23 nt, Human
acauaaacaagaccacguuucua

SEQ ID NO: 2366745 - RNA, 14 nt, Human
acagguuuuauaau

SEQ ID NO: 2366746 - RNA, 18 nt, Human
acagguuugggaccccug

SEQ ID NO: 2366747 - RNA, 15 nt, Human
acagguuugggaccc

SEQ ID NO: 2366748 - RNA, 19 nt, Human
acagguuacaacagauuug

SEQ ID NO: 2366749 - RNA, 20 nt, Human
acagguuacaacagauuugu

SEQ ID NO: 2366750 - RNA, 21 nt, Human
acagguuacaacagauuugug

SEQ ID NO: 2366751 - RNA, 22 nt, Human
acagguuacaacagauuuguga

SEQ ID NO: 2366752 - RNA, 23 nt, Human
acagguuacaacagauuugugaa

SEQ ID NO: 2366753 - RNA, 14 nt, Human
acagguuauuuuag

SEQ ID NO: 2366754 - RNA, 21 nt, Human
acagguuauuuuaguuucugu

SEQ ID NO: 2366755 - RNA, 22 nt, Human
acagguuauuuuaguuucuguu

SEQ ID NO: 2366756 - RNA, 23 nt, Human
acagguuauuuuaguuucuguuc

SEQ ID NO: 2366757 - RNA, 16 nt, Human
acaucccauguaacag

SEQ ID NO: 2366758 - RNA, 16 nt, Human
acauccuguguuucua

SEQ ID NO: 2366759 - RNA, 14 nt, Human
acauccuguguuuc

SEQ ID NO: 2366760 - RNA, 13 nt, Human
acauccuuucuaa

SEQ ID NO: 2366761 - RNA, 14 nt, Human
acauccuuccuucc

SEQ ID NO: 2366762 - RNA, 15 nt, Human
acauccuuccuuccc

SEQ ID NO: 2366763 - RNA, 23 nt, Human
acauccuguguuucuagggaaau

SEQ ID NO: 2366764 - RNA, 13 nt, Human
acauccuuccuuc

SEQ ID NO: 2366765 - RNA, 17 nt, Human
acaucgugaaacccugu

SEQ ID NO: 2366766 - RNA, 17 nt, Human
acaucuaaccucaucuu

SEQ ID NO: 2366767 - RNA, 16 nt, Human
acaucuaaccucaucu

SEQ ID NO: 2366768 - RNA, 14 nt, Human
acaucgcccuccac

SEQ ID NO: 2366769 - RNA, 19 nt, Human
acauccuuucuaaacaaga

SEQ ID NO: 2366770 - RNA, 14 nt, Human
acaucgaaugugua

SEQ ID NO: 2366771 - RNA, 17 nt, Human
acauccuuucuaaacaa

SEQ ID NO: 2366772 - RNA, 18 nt, Human
acauccuuucuaaacaag

SEQ ID NO: 2366773 - RNA, 21 nt, Human
acauccuuucuauugaaaaau

SEQ ID NO: 2366774 - RNA, 22 nt, Human
acauccaaggagaaacagagac

SEQ ID NO: 2366775 - RNA, 14 nt, Human
acauccaaggagaa

SEQ ID NO: 2366776 - RNA, 13 nt, Human
acauccaaggaga

SEQ ID NO: 2366777 - RNA, 23 nt, Human
acauccaaggagaaacagagaca

SEQ ID NO: 2366778 - RNA, 20 nt, Human
acauccaauauuuucuuuaa

SEQ ID NO: 2366779 - RNA, 13 nt, Human
acauccauaaaga

SEQ ID NO: 2366780 - RNA, 20 nt, Human
acauccauuucaucuauuuc

SEQ ID NO: 2366781 - RNA, 18 nt, Human
acauccauguuuguaaaa

SEQ ID NO: 2366782 - RNA, 15 nt, Human
acauccauaaagaag

SEQ ID NO: 2366783 - RNA, 17 nt, Human
acauccauaaagaagca

SEQ ID NO: 2366784 - RNA, 19 nt, Human
acauccauaaagaagcaau

SEQ ID NO: 2366785 - RNA, 20 nt, Human
acauccauguuuguaaaacu

SEQ ID NO: 2366786 - RNA, 16 nt, Human
acauccaagcuuccuu

SEQ ID NO: 2366787 - RNA, 13 nt, Human
acauaaauuagag

SEQ ID NO: 2366788 - RNA, 19 nt, Human
acauaaauaaaaugaccag

SEQ ID NO: 2366789 - RNA, 22 nt, Human
acaucagcacgauuucuguuua

SEQ ID NO: 2366790 - RNA, 21 nt, Human
acaucagcacgauuucuguuu

SEQ ID NO: 2366791 - RNA, 20 nt, Human
acaucagcacgauuucuguu

SEQ ID NO: 2366792 - RNA, 21 nt, Human
acauaaaggugguaugugugu

SEQ ID NO: 2366793 - RNA, 15 nt, Human
acauaaauaaaauga

SEQ ID NO: 2366794 - RNA, 19 nt, Human
acaucagcacgauuucugu

SEQ ID NO: 2366795 - RNA, 17 nt, Human
acauguuaaacuuacuu

SEQ ID NO: 2366796 - RNA, 16 nt, Human
acauguuacugaccag

SEQ ID NO: 2366797 - RNA, 17 nt, Human
acauguuacugaccagc

SEQ ID NO: 2366798 - RNA, 14 nt, Human
acauguuauauauu

SEQ ID NO: 2366799 - RNA, 19 nt, Human
acauguuacugaccagcaa

SEQ ID NO: 2366800 - RNA, 13 nt, Human
acauguuacaaca

SEQ ID NO: 2366801 - RNA, 15 nt, Human
acauguuauauauuu

SEQ ID NO: 2366802 - RNA, 20 nt, Human
acauguugggaaacuuggcu

SEQ ID NO: 2366803 - RNA, 21 nt, Human
acauguuuuucuucucccuca

SEQ ID NO: 2366804 - RNA, 19 nt, Human
acaugcaaggucauuuuuu

SEQ ID NO: 2366805 - RNA, 13 nt, Human
acaucuaagccug

SEQ ID NO: 2366806 - RNA, 20 nt, Human
acaucgugaaacccugucuc

SEQ ID NO: 2366807 - RNA, 15 nt, Human
acaucuaagccugaa

SEQ ID NO: 2366808 - RNA, 20 nt, Human
acaugcacagcuaacaugga

SEQ ID NO: 2366809 - RNA, 18 nt, Human
acaugcacaccucccccu

SEQ ID NO: 2366810 - RNA, 21 nt, Human
acaugcaauuuauuaaaauga

SEQ ID NO: 2366811 - RNA, 23 nt, Human
acaugcacagcuaacauggaagu

SEQ ID NO: 2366812 - RNA, 17 nt, Human
acauuaaaucuaugaag

SEQ ID NO: 2366813 - RNA, 20 nt, Human
acauguuuagaguugcaauc

SEQ ID NO: 2366814 - RNA, 22 nt, Human
acauuaaaacaauauuguuucu

SEQ ID NO: 2366815 - RNA, 15 nt, Human
acauuaaaacaauau

SEQ ID NO: 2366816 - RNA, 21 nt, Human
acauguuuacuuuucagggca

SEQ ID NO: 2366817 - RNA, 18 nt, Human
acauguuuagaguugcaa

SEQ ID NO: 2366818 - RNA, 23 nt, Human
acauguuuuuguuuucuuugaau

SEQ ID NO: 2366819 - RNA, 12 nt, Human
acuguuuguuau

SEQ ID NO: 2366820 - RNA, 18 nt, Human
acuguuugucuucucccc

SEQ ID NO: 2366821 - RNA, 19 nt, Human
acuguuugucuucucccca

SEQ ID NO: 2366822 - RNA, 20 nt, Human
acuguuugucuucuccccag

SEQ ID NO: 2366823 - RNA, 21 nt, Human
acuguuugucuucuccccagg

SEQ ID NO: 2366824 - RNA, 15 nt, Human
acuguuugucuucuc

SEQ ID NO: 2366825 - RNA, 13 nt, Human
acuguuucaaacu

SEQ ID NO: 2366826 - RNA, 16 nt, Human
acuguugugaccugaa

SEQ ID NO: 2366827 - RNA, 19 nt, Human
acuguugugaccugaaguu

SEQ ID NO: 2366828 - RNA, 19 nt, Human
acuguuguauaaauuuauu

SEQ ID NO: 2366829 - RNA, 15 nt, Human
acuguuguauaaauu

SEQ ID NO: 2366830 - RNA, 20 nt, Human
acuguuuacaagaaaaaaug

SEQ ID NO: 2366831 - RNA, 20 nt, Human
acuuauuggaacucugcuug

SEQ ID NO: 2366832 - RNA, 21 nt, Human
acuuauuggaacucugcuuga

SEQ ID NO: 2366833 - RNA, 13 nt, Human
acuguuuuuaccc

SEQ ID NO: 2366834 - RNA, 12 nt, Human
acuguuuuuacc

SEQ ID NO: 2366835 - RNA, 22 nt, Human
acuguuuucucucggcucccca

SEQ ID NO: 2366836 - RNA, 23 nt, Human
acuguuuucucucggcuccccau

SEQ ID NO: 2366837 - RNA, 23 nt, Human
acuucacacugcaagagccuugg

SEQ ID NO: 2366838 - RNA, 19 nt, Human
acuucacacugcaagagcc

SEQ ID NO: 2366839 - RNA, 12 nt, Human
acuucacagagu

SEQ ID NO: 2366840 - RNA, 16 nt, Human
acuucacagagugugc

SEQ ID NO: 2366841 - RNA, 16 nt, Human
acuucacacugcaaga

SEQ ID NO: 2366842 - RNA, 15 nt, Human
acuucacacugcaag

SEQ ID NO: 2366843 - RNA, 14 nt, Human
acuucacacugcaa

SEQ ID NO: 2366844 - RNA, 13 nt, Human
acuucacacugca

SEQ ID NO: 2366845 - RNA, 19 nt, Human
acuucacauauugauuucc

SEQ ID NO: 2366846 - RNA, 19 nt, Human
acuucacacacaggcaacu

SEQ ID NO: 2366847 - RNA, 17 nt, Human
acuucacacacaggcaa

SEQ ID NO: 2366848 - RNA, 13 nt, Human
acuuauuuaaugc

SEQ ID NO: 2366849 - RNA, 15 nt, Human
acuuauuuaaacucu

SEQ ID NO: 2366850 - RNA, 19 nt, Human
acuucugccauauucuguu

SEQ ID NO: 2366851 - RNA, 22 nt, Human
acuucuuuuauaacuaguccuu

SEQ ID NO: 2366852 - RNA, 15 nt, Human
acuucuuuuauaacu

SEQ ID NO: 2366853 - RNA, 21 nt, Human
acuucuuugcuuugcccagca

SEQ ID NO: 2366854 - RNA, 11 nt, Human
acuucuuuuca

SEQ ID NO: 2366855 - RNA, 12 nt, Human
acuucuuuucac

SEQ ID NO: 2366856 - RNA, 14 nt, Human
acuucuuuucacau

SEQ ID NO: 2366857 - RNA, 16 nt, Human
acuucuuugcuuugcc

SEQ ID NO: 2366858 - RNA, 18 nt, Human
acuucuuugcuuugccca

SEQ ID NO: 2366859 - RNA, 20 nt, Human
acuucuuugcuuugcccagc

SEQ ID NO: 2366860 - RNA, 16 nt, Human
acuucugaccacacuu

SEQ ID NO: 2366861 - RNA, 23 nt, Human
acuucacauauugauuuccguua

SEQ ID NO: 2366862 - RNA, 15 nt, Human
acuucugaccacacu

SEQ ID NO: 2366863 - RNA, 18 nt, Human
acuucacagagugugcug

SEQ ID NO: 2366864 - RNA, 19 nt, Human
acuucacagagugugcugg

SEQ ID NO: 2366865 - RNA, 20 nt, Human
acuucacagagugugcugga

SEQ ID NO: 2366866 - RNA, 22 nt, Human
acuucacagagugugcuggagg

SEQ ID NO: 2366867 - RNA, 18 nt, Human
acuucugccauauucugu

SEQ ID NO: 2366868 - RNA, 22 nt, Human
acuucugccagcauaauacuug

SEQ ID NO: 2366869 - RNA, 18 nt, Human
acuuguaaaggaauuuaa

SEQ ID NO: 2366870 - RNA, 15 nt, Human
acuuggucugugaga

SEQ ID NO: 2366871 - RNA, 14 nt, Human
acuuggucugugag

SEQ ID NO: 2366872 - RNA, 20 nt, Human
acuucuuuugcucuuagcug

SEQ ID NO: 2366873 - RNA, 15 nt, Human
acuucuuuucacauu

SEQ ID NO: 2366874 - RNA, 17 nt, Human
acuucuuuucacauucu

SEQ ID NO: 2366875 - RNA, 18 nt, Human
acuucuuuucacauucuu

SEQ ID NO: 2366876 - RNA, 19 nt, Human
acuucuuuucacauucuua

SEQ ID NO: 2366877 - RNA, 20 nt, Human
acuuguaaaggaauuuaaaa

SEQ ID NO: 2366878 - RNA, 19 nt, Human
acuuguaaaggaauuuaaa

SEQ ID NO: 2366879 - RNA, 20 nt, Human
acuuguaaaugugguaaaga

SEQ ID NO: 2366880 - RNA, 14 nt, Human
acuuguaaguugcu

SEQ ID NO: 2366881 - RNA, 14 nt, Human
acuuguaaaugcug

SEQ ID NO: 2366882 - RNA, 18 nt, Human
acuuguaaaugugguaaa

SEQ ID NO: 2366883 - RNA, 21 nt, Human
acuuggucugugagaugcuag

SEQ ID NO: 2366884 - RNA, 19 nt, Human
acuucuuuugcucuuagcu

SEQ ID NO: 2366885 - RNA, 21 nt, Human
acuucuuuucacauucuuaua

SEQ ID NO: 2366886 - RNA, 13 nt, Human
acuuguaaauaca

SEQ ID NO: 2366887 - RNA, 16 nt, Human
acuuguaaauacacca

SEQ ID NO: 2366888 - RNA, 14 nt, Human
acuuguaaauacac

SEQ ID NO: 2366889 - RNA, 15 nt, Human
acuuguaaauacacc

SEQ ID NO: 2366890 - RNA, 17 nt, Human
acugucugguuuuaaca

SEQ ID NO: 2366891 - RNA, 18 nt, Human
acugucugguuuuaacaa

SEQ ID NO: 2366892 - RNA, 19 nt, Human
acugucugguuuuaacaau

SEQ ID NO: 2366893 - RNA, 13 nt, Human
acugucugguuuu

SEQ ID NO: 2366894 - RNA, 19 nt, Human
acugucuauuucugcugaa

SEQ ID NO: 2366895 - RNA, 23 nt, Human
acugucuauuucugcugaauuuu

SEQ ID NO: 2366896 - RNA, 15 nt, Human
acugucugagaguuu

SEQ ID NO: 2366897 - RNA, 20 nt, Human
acugucugagaguuuaguug

SEQ ID NO: 2366898 - RNA, 23 nt, Human
acugugaucaggcuauguaugga

SEQ ID NO: 2366899 - RNA, 12 nt, Human
acugucuuucag

SEQ ID NO: 2366900 - RNA, 12 nt, Human
acugucuuuccu

SEQ ID NO: 2366901 - RNA, 16 nt, Human
acugucuucuucaggg

SEQ ID NO: 2366902 - RNA, 12 nt, Human
acugucuucagu

SEQ ID NO: 2366903 - RNA, 13 nt, Human
acugugaugccac

SEQ ID NO: 2366904 - RNA, 22 nt, Human
acugugaugccacacagagugg

SEQ ID NO: 2366905 - RNA, 20 nt, Human
acugugaugccacacagagu

SEQ ID NO: 2366906 - RNA, 21 nt, Human
acugugcacaucugugucuug

SEQ ID NO: 2366907 - RNA, 20 nt, Human
acugugcacaucugugucuu

SEQ ID NO: 2366908 - RNA, 19 nt, Human
acugugcacaucugugucu

SEQ ID NO: 2366909 - RNA, 15 nt, Human
acugugcacaucugu

SEQ ID NO: 2366910 - RNA, 18 nt, Human
acugugcaccaagcagga

SEQ ID NO: 2366911 - RNA, 12 nt, Human
acugugcagagu

SEQ ID NO: 2366912 - RNA, 21 nt, Human
acugugcagagucuagaaguu

SEQ ID NO: 2366913 - RNA, 20 nt, Human
acuggugggaucugugccca

SEQ ID NO: 2366914 - RNA, 17 nt, Human
acuggugugaccugagg

SEQ ID NO: 2366915 - RNA, 14 nt, Human
acuggugugaccug

SEQ ID NO: 2366916 - RNA, 23 nt, Human
acugguggcccgacagccuggca

SEQ ID NO: 2366917 - RNA, 16 nt, Human
acuguccugggccugc

SEQ ID NO: 2366918 - RNA, 21 nt, Human
acuggugugaccugagggcag

SEQ ID NO: 2366919 - RNA, 17 nt, Human
acuguccugggccugca

SEQ ID NO: 2366920 - RNA, 22 nt, Human
acugguguuaucaccgugggcu

SEQ ID NO: 2366921 - RNA, 21 nt, Human
acugguguuaucaccgugggc

SEQ ID NO: 2366922 - RNA, 21 nt, Human
acugguggcccgacagccugg

SEQ ID NO: 2366923 - RNA, 22 nt, Human
acugguggcccgacagccuggc

SEQ ID NO: 2366924 - RNA, 20 nt, Human
acugguggcccgacagccug

SEQ ID NO: 2366925 - RNA, 23 nt, Human
acuggguuuggaccccagcuggg

SEQ ID NO: 2366926 - RNA, 15 nt, Human
acugucucuccugau

SEQ ID NO: 2366927 - RNA, 13 nt, Human
acugucuauuucu

SEQ ID NO: 2366928 - RNA, 16 nt, Human
acugucuauuucugcu

SEQ ID NO: 2366929 - RNA, 17 nt, Human
acugucuauuucugcug

SEQ ID NO: 2366930 - RNA, 18 nt, Human
acugucuauuucugcuga

SEQ ID NO: 2366931 - RNA, 19 nt, Human
acuguccugggccugcaga

SEQ ID NO: 2366932 - RNA, 13 nt, Human
acuguccugggcg

SEQ ID NO: 2366933 - RNA, 18 nt, Human
acuguccugggcgcccug

SEQ ID NO: 2366934 - RNA, 23 nt, Human
acuguccugggcgcccuggaagc

SEQ ID NO: 2366935 - RNA, 22 nt, Human
acuguccugggcgcccuggaag

SEQ ID NO: 2366936 - RNA, 19 nt, Human
acuguccugggcgcccugg

SEQ ID NO: 2366937 - RNA, 20 nt, Human
acuguccugggcgcccugga

SEQ ID NO: 2366938 - RNA, 14 nt, Human
acuggacuccggcc

SEQ ID NO: 2366939 - RNA, 16 nt, Human
acuggacuccggcccu

SEQ ID NO: 2366940 - RNA, 19 nt, Human
acuggacuccggcccuccu

SEQ ID NO: 2366941 - RNA, 14 nt, Human
acuggagaaaaugg

SEQ ID NO: 2366942 - RNA, 23 nt, Human
acuggacucaggaugcccagggc

SEQ ID NO: 2366943 - RNA, 21 nt, Human
acuggacucaggaugcccagg

SEQ ID NO: 2366944 - RNA, 20 nt, Human
acuggacucaggaugcccag

SEQ ID NO: 2366945 - RNA, 14 nt, Human
acuggacucaggau

SEQ ID NO: 2366946 - RNA, 19 nt, Human
acuggacccuguugcuaag

SEQ ID NO: 2366947 - RNA, 20 nt, Human
acuggacccuguugcuaagc

SEQ ID NO: 2366948 - RNA, 17 nt, Human
acuggacccuguugcua

SEQ ID NO: 2366949 - RNA, 18 nt, Human
acuggacccuguugcuaa

SEQ ID NO: 2366950 - RNA, 16 nt, Human
acuggacccuguugcu

SEQ ID NO: 2366951 - RNA, 18 nt, Human
acuggacuccggcccucc

SEQ ID NO: 2366952 - RNA, 22 nt, Human
acuggacuugagcuuggcagcu

SEQ ID NO: 2366953 - RNA, 18 nt, Human
acuggguggggugaggac

SEQ ID NO: 2366954 - RNA, 21 nt, Human
acugggugcccaagcucagaa

SEQ ID NO: 2366955 - RNA, 22 nt, Human
acuggguggggugaggaccacu

SEQ ID NO: 2366956 - RNA, 20 nt, Human
acuggguggggugaggacca

SEQ ID NO: 2366957 - RNA, 20 nt, Human
acuggguuucucuguauagu

SEQ ID NO: 2366958 - RNA, 15 nt, Human
acuggguuucuagcc

SEQ ID NO: 2366959 - RNA, 16 nt, Human
acuggguuuggacccc

SEQ ID NO: 2366960 - RNA, 19 nt, Human
acuggguuuggaccccagc

SEQ ID NO: 2366961 - RNA, 20 nt, Human
acuggguuuggaccccagcu

SEQ ID NO: 2366962 - RNA, 21 nt, Human
acuggguuuggaccccagcug

SEQ ID NO: 2366963 - RNA, 22 nt, Human
acuggguuuggaccccagcugg

SEQ ID NO: 2366964 - RNA, 20 nt, Human
acuggguugacuuucaggua

SEQ ID NO: 2366965 - RNA, 16 nt, Human
acuggguucccaugcu

SEQ ID NO: 2366966 - RNA, 14 nt, Human
acuggguuucuagc

SEQ ID NO: 2366967 - RNA, 13 nt, Human
acuggguugacuu

SEQ ID NO: 2366968 - RNA, 14 nt, Human
acuggguuccugca

SEQ ID NO: 2366969 - RNA, 20 nt, Human
acugcccgagcuggugcauu

SEQ ID NO: 2366970 - RNA, 19 nt, Human
acugcccgagcuggugcau

SEQ ID NO: 2366971 - RNA, 16 nt, Human
acuggaagcacagcuu

SEQ ID NO: 2366972 - RNA, 15 nt, Human
acuggaagcacagcu

SEQ ID NO: 2366973 - RNA, 21 nt, Human
acugcccgagcuggugcauua

SEQ ID NO: 2366974 - RNA, 14 nt, Human
acuggaagcacagc

SEQ ID NO: 2366975 - RNA, 18 nt, Human
acugcccgagcuggugca

SEQ ID NO: 2366976 - RNA, 16 nt, Human
acugcccgagcuggug

SEQ ID NO: 2366977 - RNA, 15 nt, Human
acugcccgagcuggu

SEQ ID NO: 2366978 - RNA, 14 nt, Human
acugcccgagcugg

SEQ ID NO: 2366979 - RNA, 23 nt, Human
acugccccgugcagacuggaggg

SEQ ID NO: 2366980 - RNA, 19 nt, Human
acugccccgugcagacugg

SEQ ID NO: 2366981 - RNA, 18 nt, Human
acugccccgugcagacug

SEQ ID NO: 2366982 - RNA, 17 nt, Human
acugccccgugcagacu

SEQ ID NO: 2366983 - RNA, 20 nt, Human
acugcccccucugcccugcg

SEQ ID NO: 2366984 - RNA, 14 nt, Human
acugccagaugcug

SEQ ID NO: 2366985 - RNA, 18 nt, Human
acugcccccucugcccug

SEQ ID NO: 2366986 - RNA, 19 nt, Human
acugcccccucugcccugc

SEQ ID NO: 2366987 - RNA, 18 nt, Human
acugccaaaaugcucuag

SEQ ID NO: 2366988 - RNA, 17 nt, Human
acugccaaaaugcucua

SEQ ID NO: 2366989 - RNA, 21 nt, Human
acugccaaagggaaauaucau

SEQ ID NO: 2366990 - RNA, 22 nt, Human
acugccacacgucugacccucu

SEQ ID NO: 2366991 - RNA, 14 nt, Human
acugccaaccuggg

SEQ ID NO: 2366992 - RNA, 17 nt, Human
acugaagguaaaauuga

SEQ ID NO: 2366993 - RNA, 19 nt, Human
acugaaguagugugcaguu

SEQ ID NO: 2366994 - RNA, 13 nt, Human
acugaagugcuua

SEQ ID NO: 2366995 - RNA, 17 nt, Human
acugaagugcuuagugu

SEQ ID NO: 2366996 - RNA, 13 nt, Human
acugaagucugaa

SEQ ID NO: 2366997 - RNA, 14 nt, Human
acugaagucugaaa

SEQ ID NO: 2366998 - RNA, 16 nt, Human
acugaagucugaaauu

SEQ ID NO: 2366999 - RNA, 11 nt, Human
acugaaggaga

SEQ ID NO: 2367000 - RNA, 23 nt, Human
acugaaggaaaaacacaagcaaa

SEQ ID NO: 2367001 - RNA, 20 nt, Human
acugaaggaaaaacacaagc

SEQ ID NO: 2367002 - RNA, 22 nt, Human
acugaaggaaaaacacaagcaa

SEQ ID NO: 2367003 - RNA, 18 nt, Human
acugaaggaaaaacacaa

SEQ ID NO: 2367004 - RNA, 21 nt, Human
acugaaggagaaggugcccca

SEQ ID NO: 2367005 - RNA, 14 nt, Human
acugaaggagaagg

SEQ ID NO: 2367006 - RNA, 13 nt, Human
acugaaggagaag

SEQ ID NO: 2367007 - RNA, 17 nt, Human
acugaaggccuggccca

SEQ ID NO: 2367008 - RNA, 20 nt, Human
acugaaggccuggcccacag

SEQ ID NO: 2367009 - RNA, 15 nt, Human
acugaagucugaaau

SEQ ID NO: 2367010 - RNA, 18 nt, Human
acuuucagugaaagcauc

SEQ ID NO: 2367011 - RNA, 19 nt, Human
acuuucauuaaagcauuua

SEQ ID NO: 2367012 - RNA, 17 nt, Human
acuuucauuuuuuucca

SEQ ID NO: 2367013 - RNA, 20 nt, Human
acuuucauuuuuuuccaggc

SEQ ID NO: 2367014 - RNA, 19 nt, Human
acuuucauccugacucugc

SEQ ID NO: 2367015 - RNA, 21 nt, Human
acuuucauccugacucugccc

SEQ ID NO: 2367016 - RNA, 23 nt, Human
acuuucauccugacucugccccc

SEQ ID NO: 2367017 - RNA, 23 nt, Human
acuuuagggaaguacuuuuggca

SEQ ID NO: 2367018 - RNA, 23 nt, Human
acuuuagggcuguaaaaugcaug

SEQ ID NO: 2367019 - RNA, 22 nt, Human
acuuuagggcuguaaaaugcau

SEQ ID NO: 2367020 - RNA, 15 nt, Human
acuuuagggcuguaa

SEQ ID NO: 2367021 - RNA, 15 nt, Human
acuuuagucugcaaa

SEQ ID NO: 2367022 - RNA, 16 nt, Human
acuuuagucugcaaaa

SEQ ID NO: 2367023 - RNA, 17 nt, Human
acuuuagucugcaaaau

SEQ ID NO: 2367024 - RNA, 18 nt, Human
acuuuagucugcaaaaug

SEQ ID NO: 2367025 - RNA, 20 nt, Human
acuuuccacccccucccugg

SEQ ID NO: 2367026 - RNA, 19 nt, Human
acuuuccacccccucccug

SEQ ID NO: 2367027 - RNA, 18 nt, Human
acuuuccacccccucccu

SEQ ID NO: 2367028 - RNA, 14 nt, Human
acuuuccugcaacu

SEQ ID NO: 2367029 - RNA, 16 nt, Human
acuuuccacccccucc

SEQ ID NO: 2367030 - RNA, 21 nt, Human
acuuucauuuuuuuccaggcu

SEQ ID NO: 2367031 - RNA, 23 nt, Human
acuuucauuuuuuuccaggcugg

SEQ ID NO: 2367032 - RNA, 23 nt, Human
acuuuccuucauucaacccaccu

SEQ ID NO: 2367033 - RNA, 17 nt, Human
acuuuccuuuccccagc

SEQ ID NO: 2367034 - RNA, 18 nt, Human
acuuuccuuuccccagcc

SEQ ID NO: 2367035 - RNA, 22 nt, Human
acuuuccuuuccccagcccagg

SEQ ID NO: 2367036 - RNA, 19 nt, Human
acuuuccuuuccccagccc

SEQ ID NO: 2367037 - RNA, 15 nt, Human
acuuucguacauugg

SEQ ID NO: 2367038 - RNA, 16 nt, Human
acuuucguacauuggc

SEQ ID NO: 2367039 - RNA, 15 nt, Human
acuuuguucuuuagg

SEQ ID NO: 2367040 - RNA, 15 nt, Human
acuuucuagauuaag

SEQ ID NO: 2367041 - RNA, 20 nt, Human
acuuuguuucguggggaggu

SEQ ID NO: 2367042 - RNA, 20 nt, Human
acuuuguucuuuaggagauu

SEQ ID NO: 2367043 - RNA, 13 nt, Human
acuuuuaaacugu

SEQ ID NO: 2367044 - RNA, 15 nt, Human
acuuuuaaacaguga

SEQ ID NO: 2367045 - RNA, 12 nt, Human
acuuuuaaacag

SEQ ID NO: 2367046 - RNA, 19 nt, Human
acuuuguucuuuaggagau

SEQ ID NO: 2367047 - RNA, 23 nt, Human
acuuuguucuggcucuuccaggc

SEQ ID NO: 2367048 - RNA, 21 nt, Human
acuuucuacaaugugaacuuu

SEQ ID NO: 2367049 - RNA, 19 nt, Human
acuuucuacaaugugaacu

SEQ ID NO: 2367050 - RNA, 17 nt, Human
acuuucuacaaugugaa

SEQ ID NO: 2367051 - RNA, 15 nt, Human
agaaaauggacacug

SEQ ID NO: 2367052 - RNA, 23 nt, Human
agaaaauauuauguguuuccaua

SEQ ID NO: 2367053 - RNA, 13 nt, Human
agaaaauguuauu

SEQ ID NO: 2367054 - RNA, 18 nt, Human
agaaaauguuauuuaaca

SEQ ID NO: 2367055 - RNA, 16 nt, Human
agaaaauguuauuuaa

SEQ ID NO: 2367056 - RNA, 19 nt, Human
agaaaauguuauuuaacag

SEQ ID NO: 2367057 - RNA, 22 nt, Human
agaaaauggacguguuaugacu

SEQ ID NO: 2367058 - RNA, 23 nt, Human
agaaaauggacguguuaugacuc

SEQ ID NO: 2367059 - RNA, 18 nt, Human
agaaaauucaauuguaaa

SEQ ID NO: 2367060 - RNA, 17 nt, Human
agaaaauucaauuguaa

SEQ ID NO: 2367061 - RNA, 15 nt, Human
agaaaauucaauugu

SEQ ID NO: 2367062 - RNA, 13 nt, Human
agaaaauucaauu

SEQ ID NO: 2367063 - RNA, 12 nt, Human
agaaaauucaau

SEQ ID NO: 2367064 - RNA, 17 nt, Human
agaaaauguugagaauc

SEQ ID NO: 2367065 - RNA, 16 nt, Human
agaaaauguugagaau

SEQ ID NO: 2367066 - RNA, 18 nt, Human
agaaaauugcugugccuc

SEQ ID NO: 2367067 - RNA, 18 nt, Human
agaaacaacaauuucuac

SEQ ID NO: 2367068 - RNA, 14 nt, Human
agaaaauugcugug

SEQ ID NO: 2367069 - RNA, 12 nt, Human
agaaaauauacu

SEQ ID NO: 2367070 - RNA, 14 nt, Human
agaaaauauacugu

SEQ ID NO: 2367071 - RNA, 13 nt, Human
agaaaauauacug

SEQ ID NO: 2367072 - RNA, 11 nt, Human
agaaaauauac

SEQ ID NO: 2367073 - RNA, 22 nt, Human
agaaaauauacuguaaagaaag

SEQ ID NO: 2367074 - RNA, 21 nt, Human
agaaaauauacuguaaagaaa

SEQ ID NO: 2367075 - RNA, 20 nt, Human
agaaaauauacuguaaagaa

SEQ ID NO: 2367076 - RNA, 19 nt, Human
agaaaauauacuguaaaga

SEQ ID NO: 2367077 - RNA, 18 nt, Human
agaaaauauacuguaaag

SEQ ID NO: 2367078 - RNA, 17 nt, Human
agaaaauauacuguaaa

SEQ ID NO: 2367079 - RNA, 16 nt, Human
agaaaauauacuguaa

SEQ ID NO: 2367080 - RNA, 15 nt, Human
agaaaauauacugua

SEQ ID NO: 2367081 - RNA, 22 nt, Human
agaaaauaucugaaaugugaua

SEQ ID NO: 2367082 - RNA, 23 nt, Human
agaaaauauacuguaaagaaaga

SEQ ID NO: 2367083 - RNA, 23 nt, Human
agaaaauggaagacagcucuuau

SEQ ID NO: 2367084 - RNA, 15 nt, Human
agaaaauggacgugu

SEQ ID NO: 2367085 - RNA, 20 nt, Human
agaaaauggacguguuauga

SEQ ID NO: 2367086 - RNA, 20 nt, Human
agaaaagggaacugaacauu

SEQ ID NO: 2367087 - RNA, 23 nt, Human
agaaaagggaaguugugccuuuu

SEQ ID NO: 2367088 - RNA, 24 nt, Human
acuuuucuuaaaccuucaguuaug

SEQ ID NO: 2367089 - RNA, 16 nt, Human
acuuuucuuaaaccuu

SEQ ID NO: 2367090 - RNA, 15 nt, Human
agaaaaguaagcccu

SEQ ID NO: 2367091 - RNA, 22 nt, Human
agaaaauaaaaaaaagaaaaaa

SEQ ID NO: 2367092 - RNA, 21 nt, Human
agaaaauaaaaaaaagaaaaa

SEQ ID NO: 2367093 - RNA, 14 nt, Human
agaaaauaaaaagu

SEQ ID NO: 2367094 - RNA, 13 nt, Human
agaaaauaaaaag

SEQ ID NO: 2367095 - RNA, 18 nt, Human
agaaaauaaaaaguuaaa

SEQ ID NO: 2367096 - RNA, 17 nt, Human
agaaaauaaaaaguuaa

SEQ ID NO: 2367097 - RNA, 16 nt, Human
agaaaauaaaaaguua

SEQ ID NO: 2367098 - RNA, 15 nt, Human
agaaaauaaaaaguu

SEQ ID NO: 2367099 - RNA, 20 nt, Human
agaaaauaaaaaaaagaaaa

SEQ ID NO: 2367100 - RNA, 19 nt, Human
agaaaauaaaaaaaagaaa

SEQ ID NO: 2367101 - RNA, 18 nt, Human
agaaaauaaaaaaaagaa

SEQ ID NO: 2367102 - RNA, 17 nt, Human
agaaaauaaaaaaaaga

SEQ ID NO: 2367103 - RNA, 16 nt, Human
agaaaauaaaaaaaag

SEQ ID NO: 2367104 - RNA, 12 nt, Human
agaaaauaaaaa

SEQ ID NO: 2367105 - RNA, 11 nt, Human
acuuuuauaau

SEQ ID NO: 2367106 - RNA, 23 nt, Human
acuuuuauacucuuucuguauau

SEQ ID NO: 2367107 - RNA, 17 nt, Human
acuuuuccucccucagu

SEQ ID NO: 2367108 - RNA, 19 nt, Human
acuuuuauaauaaaaggaa

SEQ ID NO: 2367109 - RNA, 15 nt, Human
acuuuucuccaugag

SEQ ID NO: 2367110 - RNA, 19 nt, Human
acuuuuccuuugaauccuc

SEQ ID NO: 2367111 - RNA, 18 nt, Human
acuuuuccuuugaauccu

SEQ ID NO: 2367112 - RNA, 22 nt, Human
acuuuuauaaacuuuaccuuuu

SEQ ID NO: 2367113 - RNA, 17 nt, Human
acuuuuaaacuguguac

SEQ ID NO: 2367114 - RNA, 15 nt, Human
acuuuuaaacugugu

SEQ ID NO: 2367115 - RNA, 14 nt, Human
acuuuuaaacugug

SEQ ID NO: 2367116 - RNA, 19 nt, Human
acuuuuauaaacuuuaccu

SEQ ID NO: 2367117 - RNA, 15 nt, Human
acuuuuauaaacuuu

SEQ ID NO: 2367118 - RNA, 19 nt, Human
agaaauaaaguuggugaca

SEQ ID NO: 2367119 - RNA, 21 nt, Human
agaaauaaaguuggugacaga

SEQ ID NO: 2367120 - RNA, 18 nt, Human
agaaauaaaguuugcuua

SEQ ID NO: 2367121 - RNA, 18 nt, Human
agaaauaaaguuucuguu

SEQ ID NO: 2367122 - RNA, 15 nt, Human
agaaauaaaguuucu

SEQ ID NO: 2367123 - RNA, 20 nt, Human
agaaauaaaaggaagccaaa

SEQ ID NO: 2367124 - RNA, 19 nt, Human
agaaauaaaaggaagccaa

SEQ ID NO: 2367125 - RNA, 18 nt, Human
agaaauaaaaggaagcca

SEQ ID NO: 2367126 - RNA, 20 nt, Human
agaaaggaggggauagagag

SEQ ID NO: 2367127 - RNA, 23 nt, Human
agaaaggaggggauagagagaga

SEQ ID NO: 2367128 - RNA, 15 nt, Human
agaaaggacucuggg

SEQ ID NO: 2367129 - RNA, 11 nt, Human
agaaaggagac

SEQ ID NO: 2367130 - RNA, 14 nt, Human
agaaaggacucugg

SEQ ID NO: 2367131 - RNA, 17 nt, Human
agaaacaacucuuugag

SEQ ID NO: 2367132 - RNA, 17 nt, Human
agaaaggagucugcaca

SEQ ID NO: 2367133 - RNA, 22 nt, Human
acuaggggauauaggagaggaa

SEQ ID NO: 2367134 - RNA, 14 nt, Human
acuagguaacuuca

SEQ ID NO: 2367135 - RNA, 16 nt, Human
acuaggguccugggga

SEQ ID NO: 2367136 - RNA, 22 nt, Human
acuaguuacacaucuucaacag

SEQ ID NO: 2367137 - RNA, 17 nt, Human
acuaguugugaccuuag

SEQ ID NO: 2367138 - RNA, 20 nt, Human
acuaguugugaccuuagugu

SEQ ID NO: 2367139 - RNA, 21 nt, Human
acuaguugugaccuuaguguu

SEQ ID NO: 2367140 - RNA, 18 nt, Human
acuaguuacacaucuuca

SEQ ID NO: 2367141 - RNA, 15 nt, Human
acuaguuacacaucu

SEQ ID NO: 2367142 - RNA, 16 nt, Human
acuagguaacuucaua

SEQ ID NO: 2367143 - RNA, 15 nt, Human
acuagguaacuucau

SEQ ID NO: 2367144 - RNA, 19 nt, Human
acuagggauucaggcugcu

SEQ ID NO: 2367145 - RNA, 18 nt, Human
acuagggauucaggcugc

SEQ ID NO: 2367146 - RNA, 17 nt, Human
acuagggauucaggcug

SEQ ID NO: 2367147 - RNA, 16 nt, Human
acuagggauucaggcu

SEQ ID NO: 2367148 - RNA, 21 nt, Human
acuagggauucaggcugcuug

SEQ ID NO: 2367149 - RNA, 16 nt, Human
acuagggccaagccca

SEQ ID NO: 2367150 - RNA, 15 nt, Human
acuaggguccugggg

SEQ ID NO: 2367151 - RNA, 18 nt, Human
acuaggcccccacuugcc

SEQ ID NO: 2367152 - RNA, 20 nt, Human
acuagggaucccucaucugu

SEQ ID NO: 2367153 - RNA, 19 nt, Human
acuagggaucccucaucug

SEQ ID NO: 2367154 - RNA, 18 nt, Human
acuagggaucccucaucu

SEQ ID NO: 2367155 - RNA, 20 nt, Human
acuaggcccccacuugccuc

SEQ ID NO: 2367156 - RNA, 23 nt, Human
acuagcuagaagugggccaggac

SEQ ID NO: 2367157 - RNA, 17 nt, Human
acuaggacucugaggcu

SEQ ID NO: 2367158 - RNA, 18 nt, Human
acuaggagaaccaaaucu

SEQ ID NO: 2367159 - RNA, 16 nt, Human
acuaggacucugaggc

SEQ ID NO: 2367160 - RNA, 18 nt, Human
acuaggaaauccauucac

SEQ ID NO: 2367161 - RNA, 15 nt, Human
acuagccucuccagg

SEQ ID NO: 2367162 - RNA, 21 nt, Human
acuagccccuguggagacugg

SEQ ID NO: 2367163 - RNA, 17 nt, Human
acuagccuuuggcucug

SEQ ID NO: 2367164 - RNA, 18 nt, Human
acuagccuuuggcucugg

SEQ ID NO: 2367165 - RNA, 19 nt, Human
acuagccuuuggcucugga

SEQ ID NO: 2367166 - RNA, 20 nt, Human
acuagccuuuggcucuggag

SEQ ID NO: 2367167 - RNA, 22 nt, Human
acuagccuuuggcucuggagac

SEQ ID NO: 2367168 - RNA, 17 nt, Human
acuagcccaaugaaaug

SEQ ID NO: 2367169 - RNA, 15 nt, Human
acuagcccaaugaaa

SEQ ID NO: 2367170 - RNA, 22 nt, Human
acuagccagacacucugcucug

SEQ ID NO: 2367171 - RNA, 21 nt, Human
acuagccaugauaacugcaau

SEQ ID NO: 2367172 - RNA, 14 nt, Human
acuagcuauggugu

SEQ ID NO: 2367173 - RNA, 15 nt, Human
acuagccaccaacuc

SEQ ID NO: 2367174 - RNA, 16 nt, Human
acuagccaccaacucu

SEQ ID NO: 2367175 - RNA, 23 nt, Human
acuagccaccaacucuugcaggu

SEQ ID NO: 2367176 - RNA, 22 nt, Human
acucagcucuuggcuccacugg

SEQ ID NO: 2367177 - RNA, 14 nt, Human
acucagcuccguga

SEQ ID NO: 2367178 - RNA, 21 nt, Human
acucagcccugggccccacca

SEQ ID NO: 2367179 - RNA, 14 nt, Human
acucagcuccccag

SEQ ID NO: 2367180 - RNA, 15 nt, Human
acucagcuccccaga

SEQ ID NO: 2367181 - RNA, 19 nt, Human
acucagcuccccagagucc

SEQ ID NO: 2367182 - RNA, 11 nt, Human
acucagccuuc

SEQ ID NO: 2367183 - RNA, 23 nt, Human
acucagccuucagacagagagga

SEQ ID NO: 2367184 - RNA, 17 nt, Human
acucaggcccaaagccu

SEQ ID NO: 2367185 - RNA, 15 nt, Human
acucaggcuuucacu

SEQ ID NO: 2367186 - RNA, 23 nt, Human
acucaggcuuucacuauuuccuu

SEQ ID NO: 2367187 - RNA, 13 nt, Human
acucagggacaga

SEQ ID NO: 2367188 - RNA, 15 nt, Human
acucagggacagagc

SEQ ID NO: 2367189 - RNA, 17 nt, Human
acucagggacagagcca

SEQ ID NO: 2367190 - RNA, 18 nt, Human
acucagggacagagccau

SEQ ID NO: 2367191 - RNA, 20 nt, Human
acucagggacagagccaugc

SEQ ID NO: 2367192 - RNA, 14 nt, Human
acucagggccccag

SEQ ID NO: 2367193 - RNA, 13 nt, Human
acucagggcccca

SEQ ID NO: 2367194 - RNA, 22 nt, Human
acucagggcagcgccaggcuga

SEQ ID NO: 2367195 - RNA, 21 nt, Human
acucagggcagcgccaggcug

SEQ ID NO: 2367196 - RNA, 20 nt, Human
acucagggcagcgccaggcu

SEQ ID NO: 2367197 - RNA, 17 nt, Human
acucagggcagcgccag

SEQ ID NO: 2367198 - RNA, 19 nt, Human
acucaguuugucagacuuu

SEQ ID NO: 2367199 - RNA, 15 nt, Human
acucaguuugucaga

SEQ ID NO: 2367200 - RNA, 14 nt, Human
acucaguuugucag

SEQ ID NO: 2367201 - RNA, 13 nt, Human
acucaguuuguca

SEQ ID NO: 2367202 - RNA, 18 nt, Human
acucagggccaugccugc

SEQ ID NO: 2367203 - RNA, 14 nt, Human
acucaguggggagg

SEQ ID NO: 2367204 - RNA, 13 nt, Human
acucagucuuuaa

SEQ ID NO: 2367205 - RNA, 15 nt, Human
acucaguuuuaacua

SEQ ID NO: 2367206 - RNA, 22 nt, Human
acucaguuuuaacuagaauuua

SEQ ID NO: 2367207 - RNA, 21 nt, Human
acucauaaaaagccugcaauu

SEQ ID NO: 2367208 - RNA, 13 nt, Human
acucaguuuucuu

SEQ ID NO: 2367209 - RNA, 22 nt, Human
acucaguuugucagacuuuaaa

SEQ ID NO: 2367210 - RNA, 12 nt, Human
acuccccaggcc

SEQ ID NO: 2367211 - RNA, 14 nt, Human
acucccccaggugg

SEQ ID NO: 2367212 - RNA, 16 nt, Human
acuccccgaagucuuu

SEQ ID NO: 2367213 - RNA, 14 nt, Human
acuccccgaagucu

SEQ ID NO: 2367214 - RNA, 13 nt, Human
acuccccaggcca

SEQ ID NO: 2367215 - RNA, 15 nt, Human
acuccccaggccagg

SEQ ID NO: 2367216 - RNA, 19 nt, Human
acuccccaggccaggccac

SEQ ID NO: 2367217 - RNA, 22 nt, Human
acuccccugcacuggaguccag

SEQ ID NO: 2367218 - RNA, 16 nt, Human
acuccccugcacugga

SEQ ID NO: 2367219 - RNA, 12 nt, Human
acuccccugcac

SEQ ID NO: 2367220 - RNA, 11 nt, Human
acuccccucca

SEQ ID NO: 2367221 - RNA, 17 nt, Human
acuccccgaagucuuuu

SEQ ID NO: 2367222 - RNA, 17 nt, Human
acuccccugcugggugu

SEQ ID NO: 2367223 - RNA, 12 nt, Human
acuccccuccuu

SEQ ID NO: 2367224 - RNA, 13 nt, Human
acuccccugcugg

SEQ ID NO: 2367225 - RNA, 23 nt, Human
acucaaacuuuuccccuguccug

SEQ ID NO: 2367226 - RNA, 21 nt, Human
acucaaacugccuuggcuuca

SEQ ID NO: 2367227 - RNA, 23 nt, Human
acucaaacugaggaauuucaccu

SEQ ID NO: 2367228 - RNA, 20 nt, Human
acucaaaguuucagagacca

SEQ ID NO: 2367229 - RNA, 19 nt, Human
acucaaaguuucagagacc

SEQ ID NO: 2367230 - RNA, 22 nt, Human
acucaaaguuucagagaccauu

SEQ ID NO: 2367231 - RNA, 19 nt, Human
acucagauccagggacaga

SEQ ID NO: 2367232 - RNA, 17 nt, Human
acucagauccagggaca

SEQ ID NO: 2367233 - RNA, 16 nt, Human
acucagauccagggac

SEQ ID NO: 2367234 - RNA, 14 nt, Human
acucagauccaggg

SEQ ID NO: 2367235 - RNA, 12 nt, Human
acucagauccag

SEQ ID NO: 2367236 - RNA, 11 nt, Human
acucagaucca

SEQ ID NO: 2367237 - RNA, 14 nt, Human
acucaaaucaagaa

SEQ ID NO: 2367238 - RNA, 22 nt, Human
acucagcccugggccccaccac

SEQ ID NO: 2367239 - RNA, 16 nt, Human
acucagcccugggccc

SEQ ID NO: 2367240 - RNA, 15 nt, Human
acucagcccugggcc

SEQ ID NO: 2367241 - RNA, 22 nt, Human
acucagccucaauaagccuugu

SEQ ID NO: 2367242 - RNA, 14 nt, Human
acucagcccugggc

SEQ ID NO: 2367243 - RNA, 13 nt, Human
acucagcccuggg

SEQ ID NO: 2367244 - RNA, 12 nt, Human
acucagcccugg

SEQ ID NO: 2367245 - RNA, 17 nt, Human
acucagcagcccuccuc

SEQ ID NO: 2367246 - RNA, 15 nt, Human
acucagcccugaggu

SEQ ID NO: 2367247 - RNA, 15 nt, Human
acucagcagcccucc

SEQ ID NO: 2367248 - RNA, 14 nt, Human
acucagcagcccuc

SEQ ID NO: 2367249 - RNA, 22 nt, Human
acucagaugucucuggcgugug

SEQ ID NO: 2367250 - RNA, 23 nt, Human
acucagauggaaccgcaggaagc

SEQ ID NO: 2367251 - RNA, 22 nt, Human
acucagauggaaccgcaggaag

SEQ ID NO: 2367252 - RNA, 21 nt, Human
acucagauggaaccgcaggaa

SEQ ID NO: 2367253 - RNA, 16 nt, Human
acucagaucugucuga

SEQ ID NO: 2367254 - RNA, 13 nt, Human
acucagcagcccu

SEQ ID NO: 2367255 - RNA, 15 nt, Human
acucagcacaaggcc

SEQ ID NO: 2367256 - RNA, 20 nt, Human
acucaaaauauuuguacaua

SEQ ID NO: 2367257 - RNA, 19 nt, Human
acucaaaauauuuguacau

SEQ ID NO: 2367258 - RNA, 17 nt, Human
acucaaaauauuuguac

SEQ ID NO: 2367259 - RNA, 16 nt, Human
acucaaacucuuaaaa

SEQ ID NO: 2367260 - RNA, 17 nt, Human
acucaaacucuuaaaac

SEQ ID NO: 2367261 - RNA, 20 nt, Human
acucaaaccaaaucacugaa

SEQ ID NO: 2367262 - RNA, 19 nt, Human
acucaaaccaaaucacuga

SEQ ID NO: 2367263 - RNA, 21 nt, Human
acucaaacugaggaauuucac

SEQ ID NO: 2367264 - RNA, 14 nt, Human
acucaaacugagga

SEQ ID NO: 2367265 - RNA, 11 nt, Human
acuauaaugua

SEQ ID NO: 2367266 - RNA, 18 nt, Human
acucaaaagcugggcagg

SEQ ID NO: 2367267 - RNA, 15 nt, Human
acucaaaauauuugu

SEQ ID NO: 2367268 - RNA, 17 nt, Human
acuaguuuugugccagc

SEQ ID NO: 2367269 - RNA, 19 nt, Human
acuaguuuaguuaaaugag

SEQ ID NO: 2367270 - RNA, 20 nt, Human
acuauaaagaaguaacaaaa

SEQ ID NO: 2367271 - RNA, 18 nt, Human
acuauaaagguugacaau

SEQ ID NO: 2367272 - RNA, 16 nt, Human
acucugggcuccagag

SEQ ID NO: 2367273 - RNA, 14 nt, Human
acucugggcuccag

SEQ ID NO: 2367274 - RNA, 17 nt, Human
acucugggcugcuaccc

SEQ ID NO: 2367275 - RNA, 17 nt, Human
acucugggguuuuuacu

SEQ ID NO: 2367276 - RNA, 18 nt, Human
acucuggucuucuuuggg

SEQ ID NO: 2367277 - RNA, 12 nt, Human
acucuggcuggu

SEQ ID NO: 2367278 - RNA, 11 nt, Human
acucuggccuc

SEQ ID NO: 2367279 - RNA, 22 nt, Human
acucuggcugguuuggaaugcu

SEQ ID NO: 2367280 - RNA, 23 nt, Human
acucuggcugguuuggaaugcuu

SEQ ID NO: 2367281 - RNA, 14 nt, Human
acucuggcuuccag

SEQ ID NO: 2367282 - RNA, 13 nt, Human
acucugggaaaua

SEQ ID NO: 2367283 - RNA, 15 nt, Human
acucuggcuuccagg

SEQ ID NO: 2367284 - RNA, 17 nt, Human
acucuggcuuccaggua

SEQ ID NO: 2367285 - RNA, 19 nt, Human
acucugggaaauaagagag

SEQ ID NO: 2367286 - RNA, 18 nt, Human
acucuauagacucuagga

SEQ ID NO: 2367287 - RNA, 16 nt, Human
acucuaucaaguauua

SEQ ID NO: 2367288 - RNA, 15 nt, Human
acucuauagacucua

SEQ ID NO: 2367289 - RNA, 14 nt, Human
acucuaucaaguau

SEQ ID NO: 2367290 - RNA, 14 nt, Human
acucuguuccuuca

SEQ ID NO: 2367291 - RNA, 17 nt, Human
acucuguuccuucacau

SEQ ID NO: 2367292 - RNA, 22 nt, Human
acucuguuccuucacauccugu

SEQ ID NO: 2367293 - RNA, 20 nt, Human
acucuguuccuucacauccu

SEQ ID NO: 2367294 - RNA, 20 nt, Human
acucuguugcaagugcaaua

SEQ ID NO: 2367295 - RNA, 18 nt, Human
acucuuaaaacccaagug

SEQ ID NO: 2367296 - RNA, 11 nt, Human
acucuuaaaac

SEQ ID NO: 2367297 - RNA, 16 nt, Human
acucuguggggccuug

SEQ ID NO: 2367298 - RNA, 15 nt, Human
acucuguggccaaag

SEQ ID NO: 2367299 - RNA, 17 nt, Human
acucuguggggccuugg

SEQ ID NO: 2367300 - RNA, 16 nt, Human
acucugugucaggugg

SEQ ID NO: 2367301 - RNA, 12 nt, Human
acucugugccca

SEQ ID NO: 2367302 - RNA, 20 nt, Human
acucugugccugaccuugag

SEQ ID NO: 2367303 - RNA, 23 nt, Human
acucugugcccaugggcacugcu

SEQ ID NO: 2367304 - RNA, 24 nt, Human
acucugugcccaugggcacugcug

SEQ ID NO: 2367305 - RNA, 13 nt, Human
acucugugcccau

SEQ ID NO: 2367306 - RNA, 15 nt, Human
acucugugcccaugg

SEQ ID NO: 2367307 - RNA, 18 nt, Human
acucugugcccaugggca

SEQ ID NO: 2367308 - RNA, 21 nt, Human
acucugugcccaugggcacug

SEQ ID NO: 2367309 - RNA, 18 nt, Human
acucuacccucuuagaaa

SEQ ID NO: 2367310 - RNA, 13 nt, Human
acucuacccucuu

SEQ ID NO: 2367311 - RNA, 21 nt, Human
acucuacccucuuagaaaaac

SEQ ID NO: 2367312 - RNA, 22 nt, Human
acucuaccucauaucaguuugc

SEQ ID NO: 2367313 - RNA, 13 nt, Human
acucuaccucaua

SEQ ID NO: 2367314 - RNA, 17 nt, Human
acuccccuugagcugag

SEQ ID NO: 2367315 - RNA, 15 nt, Human
acuccccuugagcug

SEQ ID NO: 2367316 - RNA, 20 nt, Human
acuccccuugagcugagaug

SEQ ID NO: 2367317 - RNA, 18 nt, Human
acucccggcacuccaugc

SEQ ID NO: 2367318 - RNA, 19 nt, Human
acucccggcacuccaugcu

SEQ ID NO: 2367319 - RNA, 13 nt, Human
acucccuccucac

SEQ ID NO: 2367320 - RNA, 22 nt, Human
acucccuucuaccugccacuca

SEQ ID NO: 2367321 - RNA, 13 nt, Human
acucccuuucaac

SEQ ID NO: 2367322 - RNA, 12 nt, Human
acucccuuucaa

SEQ ID NO: 2367323 - RNA, 14 nt, Human
acucccuugggcuc

SEQ ID NO: 2367324 - RNA, 19 nt, Human
acucccuugguggcaagag

SEQ ID NO: 2367325 - RNA, 21 nt, Human
acucccuugguggcaagagcc

SEQ ID NO: 2367326 - RNA, 22 nt, Human
acucccuugguggcaagagccc

SEQ ID NO: 2367327 - RNA, 18 nt, Human
accuuucauaaucuuugc

SEQ ID NO: 2367328 - RNA, 23 nt, Human
accuuucagauaacuguuauuua

SEQ ID NO: 2367329 - RNA, 16 nt, Human
accuuucagcugugaa

SEQ ID NO: 2367330 - RNA, 17 nt, Human
accuuucagcugugaac

SEQ ID NO: 2367331 - RNA, 17 nt, Human
accuuuauuuuagaauu

SEQ ID NO: 2367332 - RNA, 17 nt, Human
accuuucaaauuucaca

SEQ ID NO: 2367333 - RNA, 15 nt, Human
accuuucacauagag

SEQ ID NO: 2367334 - RNA, 23 nt, Human
accuuucaauaggaaaaacugau

SEQ ID NO: 2367335 - RNA, 17 nt, Human
accuuucaauaggaaaa

SEQ ID NO: 2367336 - RNA, 21 nt, Human
accuuucaauaggaaaaacug

SEQ ID NO: 2367337 - RNA, 14 nt, Human
accuguagucccag

SEQ ID NO: 2367338 - RNA, 12 nt, Human
accuguacucag

SEQ ID NO: 2367339 - RNA, 18 nt, Human
accuguagucccagcuac

SEQ ID NO: 2367340 - RNA, 17 nt, Human
accuguagucccagcua

SEQ ID NO: 2367341 - RNA, 21 nt, Human
accuguauaaguggaggcacu

SEQ ID NO: 2367342 - RNA, 23 nt, Human
accuguauaaguggaggcacuuu

SEQ ID NO: 2367343 - RNA, 16 nt, Human
accugcccccuucucc

SEQ ID NO: 2367344 - RNA, 15 nt, Human
accugcccccuucuc

SEQ ID NO: 2367345 - RNA, 17 nt, Human
accugcccccuucuccc

SEQ ID NO: 2367346 - RNA, 22 nt, Human
accugccccuccucucugcccu

SEQ ID NO: 2367347 - RNA, 20 nt, Human
accugccccuccucucugcc

SEQ ID NO: 2367348 - RNA, 14 nt, Human
accuuggcucaagu

SEQ ID NO: 2367349 - RNA, 12 nt, Human
accuuggcugca

SEQ ID NO: 2367350 - RNA, 22 nt, Human
accugucaaugauacagucccu

SEQ ID NO: 2367351 - RNA, 24 nt, Human
accugucaaacaaagccagaagcu

SEQ ID NO: 2367352 - RNA, 20 nt, Human
accugucaaacaaagccaga

SEQ ID NO: 2367353 - RNA, 19 nt, Human
accugucaaacaaagccag

SEQ ID NO: 2367354 - RNA, 17 nt, Human
accuguaugucuccagu

SEQ ID NO: 2367355 - RNA, 12 nt, Human
accuuggcucaa

SEQ ID NO: 2367356 - RNA, 14 nt, Human
accuuuauugugau

SEQ ID NO: 2367357 - RNA, 16 nt, Human
accuuuauugugaucu

SEQ ID NO: 2367358 - RNA, 18 nt, Human
accuuuauugugaucuau

SEQ ID NO: 2367359 - RNA, 22 nt, Human
accuuguugcaugauguauuuu

SEQ ID NO: 2367360 - RNA, 16 nt, Human
accuuucaauaggaaa

SEQ ID NO: 2367361 - RNA, 13 nt, Human
accuuuauucugg

SEQ ID NO: 2367362 - RNA, 12 nt, Human
accuuuauucug

SEQ ID NO: 2367363 - RNA, 22 nt, Human
accuuguuauuucucagacuuu

SEQ ID NO: 2367364 - RNA, 14 nt, Human
accuuguucacacu

SEQ ID NO: 2367365 - RNA, 16 nt, Human
accuuguucacacucu

SEQ ID NO: 2367366 - RNA, 21 nt, Human
accuuguucacacucucacau

SEQ ID NO: 2367367 - RNA, 17 nt, Human
accuuguuauuucucag

SEQ ID NO: 2367368 - RNA, 18 nt, Human
accuuguguguaugugua

SEQ ID NO: 2367369 - RNA, 17 nt, Human
accuuguuacuucugag

SEQ ID NO: 2367370 - RNA, 14 nt, Human
accuuggcugcagg

SEQ ID NO: 2367371 - RNA, 17 nt, Human
accuugugccuggcuca

SEQ ID NO: 2367372 - RNA, 18 nt, Human
accuugugucuguacacg

SEQ ID NO: 2367373 - RNA, 21 nt, Human
accuugugucuguacacgugu

SEQ ID NO: 2367374 - RNA, 15 nt, Human
accuuguuacuucug

SEQ ID NO: 2367375 - RNA, 16 nt, Human
accuuguuacuucuga

SEQ ID NO: 2367376 - RNA, 12 nt, Human
accuugugucug

SEQ ID NO: 2367377 - RNA, 14 nt, Human
accuugugccuggc

SEQ ID NO: 2367378 - RNA, 20 nt, Human
accuuguggcaagccccugc

SEQ ID NO: 2367379 - RNA, 13 nt, Human
accuugugucugu

SEQ ID NO: 2367380 - RNA, 15 nt, Human
accuugugucuguac

SEQ ID NO: 2367381 - RNA, 14 nt, Human
accucuuagcugag

SEQ ID NO: 2367382 - RNA, 21 nt, Human
accucuuaaagaaaacccacc

SEQ ID NO: 2367383 - RNA, 22 nt, Human
accucuuaaagaaaacccaccc

SEQ ID NO: 2367384 - RNA, 15 nt, Human
accucuucagaggcc

SEQ ID NO: 2367385 - RNA, 20 nt, Human
accucuuaacaauuucuguc

SEQ ID NO: 2367386 - RNA, 15 nt, Human
accucuuagcugagu

SEQ ID NO: 2367387 - RNA, 14 nt, Human
accucuuccccaga

SEQ ID NO: 2367388 - RNA, 13 nt, Human
accucuuccccag

SEQ ID NO: 2367389 - RNA, 18 nt, Human
accucuucagaggcccuc

SEQ ID NO: 2367390 - RNA, 17 nt, Human
accucuucagaggcccu

SEQ ID NO: 2367391 - RNA, 21 nt, Human
accucugcacaagcugcaccc

SEQ ID NO: 2367392 - RNA, 20 nt, Human
accucuguuguccuccccuu

SEQ ID NO: 2367393 - RNA, 22 nt, Human
accucuguuguccuccccuugg

SEQ ID NO: 2367394 - RNA, 21 nt, Human
accucugcacuacugacaugu

SEQ ID NO: 2367395 - RNA, 18 nt, Human
accucugcacaagcugca

SEQ ID NO: 2367396 - RNA, 16 nt, Human
accucugcacaagcug

SEQ ID NO: 2367397 - RNA, 12 nt, Human
accugcccccuu

SEQ ID NO: 2367398 - RNA, 15 nt, Human
accugcccccuggug

SEQ ID NO: 2367399 - RNA, 18 nt, Human
accugcccccuucuccca

SEQ ID NO: 2367400 - RNA, 13 nt, Human
accugcccccugg

SEQ ID NO: 2367401 - RNA, 16 nt, Human
accugcccccaaucca

SEQ ID NO: 2367402 - RNA, 18 nt, Human
accugccccuccucucug

SEQ ID NO: 2367403 - RNA, 14 nt, Human
accugccccuccuc

SEQ ID NO: 2367404 - RNA, 23 nt, Human
accugccccucaacucuccucca

SEQ ID NO: 2367405 - RNA, 22 nt, Human
accugcccagaucccagaagga

SEQ ID NO: 2367406 - RNA, 15 nt, Human
accugcccaucacag

SEQ ID NO: 2367407 - RNA, 17 nt, Human
accugccccaacucucc

SEQ ID NO: 2367408 - RNA, 20 nt, Human
accugcccagaucccagaag

SEQ ID NO: 2367409 - RNA, 21 nt, Human
accucuucucuuccuguaaca

SEQ ID NO: 2367410 - RNA, 16 nt, Human
accucuucuggcucaa

SEQ ID NO: 2367411 - RNA, 21 nt, Human
accugcccaaccugcucuccu

SEQ ID NO: 2367412 - RNA, 13 nt, Human
accugcccaaccu

SEQ ID NO: 2367413 - RNA, 14 nt, Human
accucuucuggcuc

SEQ ID NO: 2367414 - RNA, 16 nt, Human
accucuucucuuccug

SEQ ID NO: 2367415 - RNA, 17 nt, Human
accucuucucuuccugu

SEQ ID NO: 2367416 - RNA, 23 nt, Human
accucuuccccagaaaggagacu

SEQ ID NO: 2367417 - RNA, 22 nt, Human
accucuuccccagaaaggagac

SEQ ID NO: 2367418 - RNA, 19 nt, Human
accucuuccggagauguag

SEQ ID NO: 2367419 - RNA, 15 nt, Human
accucuucacccccc

SEQ ID NO: 2367420 - RNA, 19 nt, Human
acgugauuuugcuguagaa

SEQ ID NO: 2367421 - RNA, 23 nt, Human
acgccacugcacuccagccuggg

SEQ ID NO: 2367422 - RNA, 22 nt, Human
acgugauucaauucaacacucc

SEQ ID NO: 2367423 - RNA, 18 nt, Human
acgcugugcugcccugcc

SEQ ID NO: 2367424 - RNA, 20 nt, Human
acgugcaccuguacucagga

SEQ ID NO: 2367425 - RNA, 21 nt, Human
acgugcaauuuguuugugcuu

SEQ ID NO: 2367426 - RNA, 22 nt, Human
acgugcaauuuguuugugcuuc

SEQ ID NO: 2367427 - RNA, 14 nt, Human
acgugcaauuuguu

SEQ ID NO: 2367428 - RNA, 19 nt, Human
acgugcaauuuguuugugc

SEQ ID NO: 2367429 - RNA, 20 nt, Human
acgugcaauuuguuugugcu

SEQ ID NO: 2367430 - RNA, 23 nt, Human
acgugcaccuguacucaggaggc

SEQ ID NO: 2367431 - RNA, 21 nt, Human
acgugcaccuguacucaggag

SEQ ID NO: 2367432 - RNA, 15 nt, Human
acgcugugcugcccu

SEQ ID NO: 2367433 - RNA, 16 nt, Human
acgcugugcugcccug

SEQ ID NO: 2367434 - RNA, 17 nt, Human
acgcugugcugcccugc

SEQ ID NO: 2367435 - RNA, 17 nt, Human
acuaagaugacauugcu

SEQ ID NO: 2367436 - RNA, 18 nt, Human
acuaagaugacauugcua

SEQ ID NO: 2367437 - RNA, 19 nt, Human
acuaagaugacauugcuaa

SEQ ID NO: 2367438 - RNA, 11 nt, Human
acguggcugcu

SEQ ID NO: 2367439 - RNA, 22 nt, Human
acgugcauugugcuucuuucuu

SEQ ID NO: 2367440 - RNA, 15 nt, Human
acuaagagagaauga

SEQ ID NO: 2367441 - RNA, 16 nt, Human
acuaagagagaaugag

SEQ ID NO: 2367442 - RNA, 13 nt, Human
acguggcugcuuc

SEQ ID NO: 2367443 - RNA, 12 nt, Human
acgugcauugug

SEQ ID NO: 2367444 - RNA, 14 nt, Human
acgugcauugugcu

SEQ ID NO: 2367445 - RNA, 15 nt, Human
acgugcauugugcuu

SEQ ID NO: 2367446 - RNA, 16 nt, Human
acgugcauugugcuuc

SEQ ID NO: 2367447 - RNA, 14 nt, Human
acguggcugcuuca

SEQ ID NO: 2367448 - RNA, 15 nt, Human
acguggcugcuucaa

SEQ ID NO: 2367449 - RNA, 22 nt, Human
acuaauaaaagcauaaaugcaa

SEQ ID NO: 2367450 - RNA, 12 nt, Human
acuaagcagagg

SEQ ID NO: 2367451 - RNA, 20 nt, Human
acuaagaugacauugcuaag

SEQ ID NO: 2367452 - RNA, 15 nt, Human
acuaagcagaggagg

SEQ ID NO: 2367453 - RNA, 14 nt, Human
acuaagcagaggag

SEQ ID NO: 2367454 - RNA, 13 nt, Human
acuaagcagagga

SEQ ID NO: 2367455 - RNA, 22 nt, Human
acuaaguuuuuauggcuuuugu

SEQ ID NO: 2367456 - RNA, 15 nt, Human
acuaaguuuuuaugg

SEQ ID NO: 2367457 - RNA, 14 nt, Human
acgaugaaaaacuu

SEQ ID NO: 2367458 - RNA, 15 nt, Human
acgauggcacccagu

SEQ ID NO: 2367459 - RNA, 14 nt, Human
acgauguggcccug

SEQ ID NO: 2367460 - RNA, 21 nt, Human
acgauguggaaaaaugagaga

SEQ ID NO: 2367461 - RNA, 13 nt, Human
acgaugucuucau

SEQ ID NO: 2367462 - RNA, 19 nt, Human
acgauguggcccuggccug

SEQ ID NO: 2367463 - RNA, 18 nt, Human
acgauguggcccuggccu

SEQ ID NO: 2367464 - RNA, 17 nt, Human
acgauguggcccuggcc

SEQ ID NO: 2367465 - RNA, 16 nt, Human
acgauguggcccuggc

SEQ ID NO: 2367466 - RNA, 22 nt, Human
acgauguggcccuggccugcug

SEQ ID NO: 2367467 - RNA, 18 nt, Human
acgauuuagaaagaagcc

SEQ ID NO: 2367468 - RNA, 14 nt, Human
acgauuuaauucuc

SEQ ID NO: 2367469 - RNA, 15 nt, Human
acgauuuaauucucu

SEQ ID NO: 2367470 - RNA, 17 nt, Human
acgauuuaauucucuug

SEQ ID NO: 2367471 - RNA, 19 nt, Human
acgauuuaauucucuugaa

SEQ ID NO: 2367472 - RNA, 13 nt, Human
acgauuucuguuu

SEQ ID NO: 2367473 - RNA, 12 nt, Human
acgauuucuguu

SEQ ID NO: 2367474 - RNA, 22 nt, Human
acgccacugcacuccagccugg

SEQ ID NO: 2367475 - RNA, 20 nt, Human
acgccacugcacuccagccu

SEQ ID NO: 2367476 - RNA, 18 nt, Human
acgccacugcacuauagc

SEQ ID NO: 2367477 - RNA, 17 nt, Human
acgauuucuguuuagau

SEQ ID NO: 2367478 - RNA, 14 nt, Human
acgauuucuguuua

SEQ ID NO: 2367479 - RNA, 14 nt, Human
aacaaaaauuaggu

SEQ ID NO: 2367480 - RNA, 15 nt, Human
aacaaaagcaagacu

SEQ ID NO: 2367481 - RNA, 16 nt, Human
aacaaaaagcuucccc

SEQ ID NO: 2367482 - RNA, 14 nt, Human
aacaaaaagcuucc

SEQ ID NO: 2367483 - RNA, 13 nt, Human
aacaaaaauuagg

SEQ ID NO: 2367484 - RNA, 11 nt, Human
aacaaaaauaa

SEQ ID NO: 2367485 - RNA, 13 nt, Human
aacaaaaauuguc

SEQ ID NO: 2367486 - RNA, 13 nt, Human
aacaaaaagaaca

SEQ ID NO: 2367487 - RNA, 12 nt, Human
aacaaaauagaa

SEQ ID NO: 2367488 - RNA, 20 nt, Human
aacaaaaucuccucuuuuag

SEQ ID NO: 2367489 - RNA, 15 nt, Human
aacaaagaaauuaug

SEQ ID NO: 2367490 - RNA, 17 nt, Human
aacaaagaaauuaugug

SEQ ID NO: 2367491 - RNA, 12 nt, Human
aaauugcacaau

SEQ ID NO: 2367492 - RNA, 13 nt, Human
aaauugcaaaucu

SEQ ID NO: 2367493 - RNA, 19 nt, Human
aaauugcaaaucuugaaau

SEQ ID NO: 2367494 - RNA, 14 nt, Human
aaauugcaaaucuu

SEQ ID NO: 2367495 - RNA, 21 nt, Human
aaauugauguguuuauuuaua

SEQ ID NO: 2367496 - RNA, 18 nt, Human
aaauugcauuuccugaca

SEQ ID NO: 2367497 - RNA, 14 nt, Human
aaauugccauauug

SEQ ID NO: 2367498 - RNA, 22 nt, Human
aaauugcugugccucccaaaau

SEQ ID NO: 2367499 - RNA, 13 nt, Human
aaauugcuugaaa

SEQ ID NO: 2367500 - RNA, 18 nt, Human
aaauugcuuacuuuggaa

SEQ ID NO: 2367501 - RNA, 14 nt, Human
aaauugcuguguau

SEQ ID NO: 2367502 - RNA, 16 nt, Human
aaauugcuugaaagaa

SEQ ID NO: 2367503 - RNA, 20 nt, Human
aaauugggaaaggaguagaa

SEQ ID NO: 2367504 - RNA, 15 nt, Human
aaauugggaaaggag

SEQ ID NO: 2367505 - RNA, 16 nt, Human
aaauuggaacagaaug

SEQ ID NO: 2367506 - RNA, 19 nt, Human
aaauuggaacagaauguuu

SEQ ID NO: 2367507 - RNA, 17 nt, Human
aacaccaagcacagcag

SEQ ID NO: 2367508 - RNA, 14 nt, Human
aacaccaagcacag

SEQ ID NO: 2367509 - RNA, 21 nt, Human
aacaccaagcacagcagccug

SEQ ID NO: 2367510 - RNA, 19 nt, Human
aacaccaagcacagcagcc

SEQ ID NO: 2367511 - RNA, 18 nt, Human
aacaccaagcacagcagc

SEQ ID NO: 2367512 - RNA, 13 nt, Human
aacaccugaugug

SEQ ID NO: 2367513 - RNA, 15 nt, Human
aacaccugaugugua

SEQ ID NO: 2367514 - RNA, 17 nt, Human
aacaccuuccagcuccu

SEQ ID NO: 2367515 - RNA, 17 nt, Human
aacaccugauguguaca

SEQ ID NO: 2367516 - RNA, 19 nt, Human
aacaccugggcuuaagaaa

SEQ ID NO: 2367517 - RNA, 15 nt, Human
aacacgagcaggcua

SEQ ID NO: 2367518 - RNA, 23 nt, Human
aacacauuuuguauaauuguauc

SEQ ID NO: 2367519 - RNA, 16 nt, Human
aacacauuuuguauaa

SEQ ID NO: 2367520 - RNA, 19 nt, Human
aacacauuuuguauaauug

SEQ ID NO: 2367521 - RNA, 21 nt, Human
aacacauuuuguauaauugua

SEQ ID NO: 2367522 - RNA, 22 nt, Human
aacacauuuuguauaauuguau

SEQ ID NO: 2367523 - RNA, 19 nt, Human
aacacauuuuucuuaggga

SEQ ID NO: 2367524 - RNA, 21 nt, Human
aacaagaagccacagaccuag

SEQ ID NO: 2367525 - RNA, 22 nt, Human
aacaagaccaccacuucgaaac

SEQ ID NO: 2367526 - RNA, 12 nt, Human
aacaagaauugg

SEQ ID NO: 2367527 - RNA, 14 nt, Human
aacacauuuuguau

SEQ ID NO: 2367528 - RNA, 15 nt, Human
aacacauuuuguaua

SEQ ID NO: 2367529 - RNA, 11 nt, Human
aacaaagccag

SEQ ID NO: 2367530 - RNA, 15 nt, Human
aacaaagcagccacg

SEQ ID NO: 2367531 - RNA, 14 nt, Human
aacaaagcagccac

SEQ ID NO: 2367532 - RNA, 16 nt, Human
aacaaagcacaguguu

SEQ ID NO: 2367533 - RNA, 17 nt, Human
aacaaagcacaguguua

SEQ ID NO: 2367534 - RNA, 17 nt, Human
aacaaagccagaagcug

SEQ ID NO: 2367535 - RNA, 14 nt, Human
aacaaagccagaag

SEQ ID NO: 2367536 - RNA, 15 nt, Human
aacaaagcuguugau

SEQ ID NO: 2367537 - RNA, 12 nt, Human
aacaaagccaga

SEQ ID NO: 2367538 - RNA, 17 nt, Human
aacaaagaagacaacau

SEQ ID NO: 2367539 - RNA, 13 nt, Human
aacaaagaagguu

SEQ ID NO: 2367540 - RNA, 15 nt, Human
aacaaagcacagugu

SEQ ID NO: 2367541 - RNA, 19 nt, Human
aacaaagagaaaaaauaca

SEQ ID NO: 2367542 - RNA, 16 nt, Human
aacaacuaggcuucag

SEQ ID NO: 2367543 - RNA, 17 nt, Human
aacaaagcuuagcagga

SEQ ID NO: 2367544 - RNA, 22 nt, Human
aacaaaauuuaguuuuuguucu

SEQ ID NO: 2367545 - RNA, 19 nt, Human
aacaaagcuuagcaggaga

SEQ ID NO: 2367546 - RNA, 14 nt, Human
aacaaagcuuagca

SEQ ID NO: 2367547 - RNA, 16 nt, Human
aacaaagcuuagcagg

SEQ ID NO: 2367548 - RNA, 17 nt, Human
aacaacuucuuuguaau

SEQ ID NO: 2367549 - RNA, 16 nt, Human
aacaacuucuuuguaa

SEQ ID NO: 2367550 - RNA, 15 nt, Human
aacaacucuuugaga

SEQ ID NO: 2367551 - RNA, 21 nt, Human
aacaacuccuagggccacuga

SEQ ID NO: 2367552 - RNA, 22 nt, Human
aacaacuuaauguucugaauaa

SEQ ID NO: 2367553 - RNA, 14 nt, Human
aacacgcaccugcc

SEQ ID NO: 2367554 - RNA, 13 nt, Human
aacaccuucucug

SEQ ID NO: 2367555 - RNA, 19 nt, Human
aacacgcaccugccucagg

SEQ ID NO: 2367556 - RNA, 15 nt, Human
aacacgcaccugccu

SEQ ID NO: 2367557 - RNA, 19 nt, Human
aacccugccccugccccgu

SEQ ID NO: 2367558 - RNA, 16 nt, Human
aacccugcguggggac

SEQ ID NO: 2367559 - RNA, 17 nt, Human
aacccugcguggggaca

SEQ ID NO: 2367560 - RNA, 19 nt, Human
aacccugcguggggacagg

SEQ ID NO: 2367561 - RNA, 12 nt, Human
aacccuggagag

SEQ ID NO: 2367562 - RNA, 14 nt, Human
aacccuggugacca

SEQ ID NO: 2367563 - RNA, 22 nt, Human
aaccaggagcugcucacuaccu

SEQ ID NO: 2367564 - RNA, 13 nt, Human
aacccuguuuccu

SEQ ID NO: 2367565 - RNA, 19 nt, Human
aacccugugcugguguccu

SEQ ID NO: 2367566 - RNA, 21 nt, Human
aacccugugcugguguccuga

SEQ ID NO: 2367567 - RNA, 14 nt, Human
aacccugugcuggu

SEQ ID NO: 2367568 - RNA, 12 nt, Human
aacccugugcug

SEQ ID NO: 2367569 - RNA, 21 nt, Human
aaccacgucugucuucacagc

SEQ ID NO: 2367570 - RNA, 19 nt, Human
aaccacucaaauuaaucuu

SEQ ID NO: 2367571 - RNA, 17 nt, Human
aaccacugaaucuggac

SEQ ID NO: 2367572 - RNA, 14 nt, Human
aaccacugcaacgg

SEQ ID NO: 2367573 - RNA, 13 nt, Human
aaccacugaaucu

SEQ ID NO: 2367574 - RNA, 11 nt, Human
aaccacugaau

SEQ ID NO: 2367575 - RNA, 14 nt, Human
aaccagaucauugu

SEQ ID NO: 2367576 - RNA, 12 nt, Human
aaccagaucauu

SEQ ID NO: 2367577 - RNA, 21 nt, Human
aacauguaauuaaguacuaug

SEQ ID NO: 2367578 - RNA, 14 nt, Human
aacauguaauuaag

SEQ ID NO: 2367579 - RNA, 23 nt, Human
aacauguaauuaaguacuaugua

SEQ ID NO: 2367580 - RNA, 22 nt, Human
aaccacucuaucaaguauuaua

SEQ ID NO: 2367581 - RNA, 14 nt, Human
aaccagcuaagaaa

SEQ ID NO: 2367582 - RNA, 21 nt, Human
aaccagcaucccuugaccagg

SEQ ID NO: 2367583 - RNA, 21 nt, Human
aaccagcuaagaaaagauuuu

SEQ ID NO: 2367584 - RNA, 16 nt, Human
aaccagcuaagaaaag

SEQ ID NO: 2367585 - RNA, 22 nt, Human
aaccagcuguaacacagcugag

SEQ ID NO: 2367586 - RNA, 15 nt, Human
aaccaggaaauggaa

SEQ ID NO: 2367587 - RNA, 15 nt, Human
aaccaggagcugcuc

SEQ ID NO: 2367588 - RNA, 14 nt, Human
aaccaguguagccu

SEQ ID NO: 2367589 - RNA, 11 nt, Human
aacccugcccc

SEQ ID NO: 2367590 - RNA, 14 nt, Human
aacccugccccugc

SEQ ID NO: 2367591 - RNA, 12 nt, Human
aacccugccccu

SEQ ID NO: 2367592 - RNA, 17 nt, Human
aacccugcccccaaaua

SEQ ID NO: 2367593 - RNA, 22 nt, Human
aaccaguccccccacccucauu

SEQ ID NO: 2367594 - RNA, 18 nt, Human
aaccaguccccccacccu

SEQ ID NO: 2367595 - RNA, 17 nt, Human
aaccaggagcugcucac

SEQ ID NO: 2367596 - RNA, 18 nt, Human
aaccaggagcugcucacu

SEQ ID NO: 2367597 - RNA, 17 nt, Human
aacaucacugaaaugcu

SEQ ID NO: 2367598 - RNA, 19 nt, Human
aacaucaauguucauugua

SEQ ID NO: 2367599 - RNA, 18 nt, Human
aacaucaauguucauugu

SEQ ID NO: 2367600 - RNA, 13 nt, Human
aacaucacacaca

SEQ ID NO: 2367601 - RNA, 21 nt, Human
aacaucaguuacucugaaggg

SEQ ID NO: 2367602 - RNA, 19 nt, Human
aacaucaguuacucugaag

SEQ ID NO: 2367603 - RNA, 18 nt, Human
aacaucaguuacucugaa

SEQ ID NO: 2367604 - RNA, 14 nt, Human
aacaucaucaaggc

SEQ ID NO: 2367605 - RNA, 16 nt, Human
aacaucaucaaggcac

SEQ ID NO: 2367606 - RNA, 21 nt, Human
aacaucaucaaggcacugccu

SEQ ID NO: 2367607 - RNA, 14 nt, Human
aacaucauuagaac

SEQ ID NO: 2367608 - RNA, 22 nt, Human
aacaucaucaaggcacugccug

SEQ ID NO: 2367609 - RNA, 13 nt, Human
aacaugauuuggg

SEQ ID NO: 2367610 - RNA, 21 nt, Human
aacaugccugccccaaacaaa

SEQ ID NO: 2367611 - RNA, 22 nt, Human
aacaugccugccccaaacaaau

SEQ ID NO: 2367612 - RNA, 14 nt, Human
aacaugcccuguuc

SEQ ID NO: 2367613 - RNA, 20 nt, Human
aacaugguuuugaaaugcuu

SEQ ID NO: 2367614 - RNA, 12 nt, Human
aacauguaauau

SEQ ID NO: 2367615 - RNA, 18 nt, Human
aacauguaauauaaagau

SEQ ID NO: 2367616 - RNA, 19 nt, Human
aacauguaauauaaagaug

SEQ ID NO: 2367617 - RNA, 22 nt, Human
aacauguaauauaaagauguua

SEQ ID NO: 2367618 - RNA, 22 nt, Human
aacaugcaauuuugcauuugaa

SEQ ID NO: 2367619 - RNA, 19 nt, Human
aacaugcaauuuugcauuu

SEQ ID NO: 2367620 - RNA, 17 nt, Human
aacaugagucaagagca

SEQ ID NO: 2367621 - RNA, 15 nt, Human
aacaucauuagaaca

SEQ ID NO: 2367622 - RNA, 18 nt, Human
aacagcucaguucuaguc

SEQ ID NO: 2367623 - RNA, 14 nt, Human
aacagcucaggauc

SEQ ID NO: 2367624 - RNA, 10 nt, Human
aacagcuccu

SEQ ID NO: 2367625 - RNA, 13 nt, Human
aacagcuccuugg

SEQ ID NO: 2367626 - RNA, 14 nt, Human
aacaucaauguuca

SEQ ID NO: 2367627 - RNA, 13 nt, Human
aacaucaauguuc

SEQ ID NO: 2367628 - RNA, 12 nt, Human
aacaucaauguu

SEQ ID NO: 2367629 - RNA, 20 nt, Human
aacagcugaggucucuugag

SEQ ID NO: 2367630 - RNA, 21 nt, Human
aacagcugaggucucuugagg

SEQ ID NO: 2367631 - RNA, 19 nt, Human
aacagcugaggucucuuga

SEQ ID NO: 2367632 - RNA, 23 nt, Human
aacagcuccuugggaggaagcag

SEQ ID NO: 2367633 - RNA, 13 nt, Human
aacagcucgacuu

SEQ ID NO: 2367634 - RNA, 14 nt, Human
aacagcuccuuggg

SEQ ID NO: 2367635 - RNA, 15 nt, Human
aacagcuccuuggga

SEQ ID NO: 2367636 - RNA, 18 nt, Human
aacagcuccuugggagga

SEQ ID NO: 2367637 - RNA, 22 nt, Human
aacagcuccuugggaggaagca

SEQ ID NO: 2367638 - RNA, 14 nt, Human
aacucaauauuuuc

SEQ ID NO: 2367639 - RNA, 20 nt, Human
aacucaauauuuuccaugaa

SEQ ID NO: 2367640 - RNA, 21 nt, Human
aacucaauauuuuccaugaaa

SEQ ID NO: 2367641 - RNA, 12 nt, Human
aacucaccccag

SEQ ID NO: 2367642 - RNA, 12 nt, Human
aacucaauauuu

SEQ ID NO: 2367643 - RNA, 13 nt, Human
aacucaauauuuu

SEQ ID NO: 2367644 - RNA, 22 nt, Human
aacucaccugcuggccccucac

SEQ ID NO: 2367645 - RNA, 16 nt, Human
aacucaccugcuggcc

SEQ ID NO: 2367646 - RNA, 12 nt, Human
aacucaccugcu

SEQ ID NO: 2367647 - RNA, 17 nt, Human
aacucaccucucaaggu

SEQ ID NO: 2367648 - RNA, 21 nt, Human
aacucaccuaauguuuaugag

SEQ ID NO: 2367649 - RNA, 16 nt, Human
aacucaccugccccuc

SEQ ID NO: 2367650 - RNA, 21 nt, Human
aacucaccauguaaaagaguc

SEQ ID NO: 2367651 - RNA, 16 nt, Human
aacucaccauguaaaa

SEQ ID NO: 2367652 - RNA, 15 nt, Human
aacucaccauguaaa

SEQ ID NO: 2367653 - RNA, 15 nt, Human
aacucaccccagccc

SEQ ID NO: 2367654 - RNA, 15 nt, Human
aacucaccugccccu

SEQ ID NO: 2367655 - RNA, 20 nt, Human
aacugaagcagccucucccc

SEQ ID NO: 2367656 - RNA, 16 nt, Human
aacucauacugugcug

SEQ ID NO: 2367657 - RNA, 18 nt, Human
aacugaagcagccucucc

SEQ ID NO: 2367658 - RNA, 23 nt, Human
aacugaacucugacaacagacuu

SEQ ID NO: 2367659 - RNA, 16 nt, Human
aacugaacucugacaa

SEQ ID NO: 2367660 - RNA, 18 nt, Human
aacucauaccuuuaaagg

SEQ ID NO: 2367661 - RNA, 22 nt, Human
aacucauacugugcuggagcca

SEQ ID NO: 2367662 - RNA, 14 nt, Human
aacugaacucugac

SEQ ID NO: 2367663 - RNA, 20 nt, Human
aacugaacucugacaacaga

SEQ ID NO: 2367664 - RNA, 19 nt, Human
aacugaacucugacaacag

SEQ ID NO: 2367665 - RNA, 21 nt, Human
aacucaccugcuggccccuca

SEQ ID NO: 2367666 - RNA, 20 nt, Human
aacucaccugcuggccccuc

SEQ ID NO: 2367667 - RNA, 20 nt, Human
aacucaccuggggcugcugg

SEQ ID NO: 2367668 - RNA, 17 nt, Human
aacucagaucugucuga

SEQ ID NO: 2367669 - RNA, 15 nt, Human
aacucaccuggggcu

SEQ ID NO: 2367670 - RNA, 12 nt, Human
aacucagccaag

SEQ ID NO: 2367671 - RNA, 14 nt, Human
aacucagccaagca

SEQ ID NO: 2367672 - RNA, 15 nt, Human
aacucagccaagcac

SEQ ID NO: 2367673 - RNA, 16 nt, Human
aacucagccaagcaca

SEQ ID NO: 2367674 - RNA, 17 nt, Human
aacucagccaagcacag

SEQ ID NO: 2367675 - RNA, 18 nt, Human
aacucagccaagcacagu

SEQ ID NO: 2367676 - RNA, 20 nt, Human
aacucagccaagcacagugg

SEQ ID NO: 2367677 - RNA, 22 nt, Human
aacucagccucaauaagccuug

SEQ ID NO: 2367678 - RNA, 21 nt, Human
aacucagccaagcacaguggu

SEQ ID NO: 2367679 - RNA, 13 nt, Human
aacucagggacag

SEQ ID NO: 2367680 - RNA, 16 nt, Human
aacucagggacagagc

SEQ ID NO: 2367681 - RNA, 17 nt, Human
aacucagggacagagcc

SEQ ID NO: 2367682 - RNA, 15 nt, Human
aacucaguuuuaacu

SEQ ID NO: 2367683 - RNA, 18 nt, Human
aacucaguuuuaacuaga

SEQ ID NO: 2367684 - RNA, 18 nt, Human
aacucagggacagagcca

SEQ ID NO: 2367685 - RNA, 22 nt, Human
aacucagucauuagacuccucc

SEQ ID NO: 2367686 - RNA, 23 nt, Human
aacucagucauuagacuccuccu

SEQ ID NO: 2367687 - RNA, 13 nt, Human
aacuuauucugua

SEQ ID NO: 2367688 - RNA, 14 nt, Human
aacuuauucuguag

SEQ ID NO: 2367689 - RNA, 19 nt, Human
aacuuauccuaaaacaaau

SEQ ID NO: 2367690 - RNA, 21 nt, Human
aacuuaugaccucuuccuuua

SEQ ID NO: 2367691 - RNA, 22 nt, Human
aacuuagugcggacaaguuuua

SEQ ID NO: 2367692 - RNA, 20 nt, Human
aacuuauauacuauuucccu

SEQ ID NO: 2367693 - RNA, 23 nt, Human
aacuuauaucaucagcauaccuu

SEQ ID NO: 2367694 - RNA, 21 nt, Human
aacuuauauuguaagaaauac

SEQ ID NO: 2367695 - RNA, 20 nt, Human
aacuuauauuguaagaaaua

SEQ ID NO: 2367696 - RNA, 19 nt, Human
aacuuauauuguaagaaau

SEQ ID NO: 2367697 - RNA, 15 nt, Human
aacuuauauuguaag

SEQ ID NO: 2367698 - RNA, 19 nt, Human
aacuuaaauaaaugucauu

SEQ ID NO: 2367699 - RNA, 15 nt, Human
aacuuaaauaaaugu

SEQ ID NO: 2367700 - RNA, 16 nt, Human
aacuuaaaauauuuua

SEQ ID NO: 2367701 - RNA, 14 nt, Human
aacuuaaaauauuu

SEQ ID NO: 2367702 - RNA, 13 nt, Human
aacuuaaaauauu

SEQ ID NO: 2367703 - RNA, 18 nt, Human
aacuuaaaaauguaaaua

SEQ ID NO: 2367704 - RNA, 21 nt, Human
aacuuaaaaauguaaauauuc

SEQ ID NO: 2367705 - RNA, 17 nt, Human
aacuuaaauaaugugaa

SEQ ID NO: 2367706 - RNA, 23 nt, Human
aacuuagugcggacaaguuuuaa

SEQ ID NO: 2367707 - RNA, 16 nt, Human
aacuuagguggcaagc

SEQ ID NO: 2367708 - RNA, 19 nt, Human
aacuuagcauguguugaaa

SEQ ID NO: 2367709 - RNA, 14 nt, Human
aacuuaaauaauaa

SEQ ID NO: 2367710 - RNA, 13 nt, Human
aacuuaaauaaua

SEQ ID NO: 2367711 - RNA, 19 nt, Human
aacuuaaauaaugugaaac

SEQ ID NO: 2367712 - RNA, 14 nt, Human
aacugaccagccuc

SEQ ID NO: 2367713 - RNA, 19 nt, Human
aacugaccagccuccaugc

SEQ ID NO: 2367714 - RNA, 21 nt, Human
aacugacaggcagccuggaca

SEQ ID NO: 2367715 - RNA, 13 nt, Human
aacugauucauaa

SEQ ID NO: 2367716 - RNA, 17 nt, Human
aacugauuuuuuuuucc

SEQ ID NO: 2367717 - RNA, 13 nt, Human
aacuuaaaaaugu

SEQ ID NO: 2367718 - RNA, 17 nt, Human
aacuuaaaaauguaaau

SEQ ID NO: 2367719 - RNA, 19 nt, Human
aacugauuuuuuuuuccuu

SEQ ID NO: 2367720 - RNA, 22 nt, Human
aacuucaagugcaugcucucug

SEQ ID NO: 2367721 - RNA, 13 nt, Human
aacuucacauauu

SEQ ID NO: 2367722 - RNA, 23 nt, Human
aacuuauucuguagauucugugg

SEQ ID NO: 2367723 - RNA, 19 nt, Human
aacuuauuugagugauuau

SEQ ID NO: 2367724 - RNA, 13 nt, Human
aacuuauuugagu

SEQ ID NO: 2367725 - RNA, 16 nt, Human
aacuuauuuuuuucug

SEQ ID NO: 2367726 - RNA, 17 nt, Human
aacuuauuuuuuucuga

SEQ ID NO: 2367727 - RNA, 18 nt, Human
aacuuauuuuuuucugau

SEQ ID NO: 2367728 - RNA, 19 nt, Human
aacuuauuuuuuucugauu

SEQ ID NO: 2367729 - RNA, 20 nt, Human
aacuuauuuuuuucugauug

SEQ ID NO: 2367730 - RNA, 21 nt, Human
aacuuauuuuuuucugauugu

SEQ ID NO: 2367731 - RNA, 22 nt, Human
aacuuauuuuuuucugauugua

SEQ ID NO: 2367732 - RNA, 14 nt, Human
aacuucaacauuua

SEQ ID NO: 2367733 - RNA, 19 nt, Human
aacuucaacauuuacaugu

SEQ ID NO: 2367734 - RNA, 20 nt, Human
aacuuuuuuuuaaguuacac

SEQ ID NO: 2367735 - RNA, 19 nt, Human
aacuuuuuugaaauaauaa

SEQ ID NO: 2367736 - RNA, 16 nt, Human
aacuuuuuuuugagaa

SEQ ID NO: 2367737 - RNA, 17 nt, Human
aacuuuuuuuugagaau

SEQ ID NO: 2367738 - RNA, 14 nt, Human
aacuuuuuuuuaag

SEQ ID NO: 2367739 - RNA, 13 nt, Human
aacuuuuuuccac

SEQ ID NO: 2367740 - RNA, 22 nt, Human
aacuuuuugguuugcagaugac

SEQ ID NO: 2367741 - RNA, 14 nt, Human
aagaaaugacacuu

SEQ ID NO: 2367742 - RNA, 14 nt, Human
aagaaauguaaggg

SEQ ID NO: 2367743 - RNA, 13 nt, Human
aagaaauguaagg

SEQ ID NO: 2367744 - RNA, 14 nt, Human
aacuuuuguaaaua

SEQ ID NO: 2367745 - RNA, 21 nt, Human
aacuuuuguaagacaaagguu

SEQ ID NO: 2367746 - RNA, 11 nt, Human
aacuuuuguaa

SEQ ID NO: 2367747 - RNA, 15 nt, Human
aacuuuuuaaagagu

SEQ ID NO: 2367748 - RNA, 15 nt, Human
aacuuuuccccuguc

SEQ ID NO: 2367749 - RNA, 18 nt, Human
aacuuuuccccuguccug

SEQ ID NO: 2367750 - RNA, 12 nt, Human
aacuuuucucag

SEQ ID NO: 2367751 - RNA, 19 nt, Human
aacuuuuauaaacuuuacc

SEQ ID NO: 2367752 - RNA, 16 nt, Human
aacuuuuauaaacuuu

SEQ ID NO: 2367753 - RNA, 17 nt, Human
aacuuugaccucugcag

SEQ ID NO: 2367754 - RNA, 14 nt, Human
aacuuugaccucug

SEQ ID NO: 2367755 - RNA, 11 nt, Human
aacuuucugua

SEQ ID NO: 2367756 - RNA, 15 nt, Human
aacuuucuguaaacu

SEQ ID NO: 2367757 - RNA, 13 nt, Human
aacuuugaccucu

SEQ ID NO: 2367758 - RNA, 15 nt, Human
aacuuugcugagccu

SEQ ID NO: 2367759 - RNA, 12 nt, Human
aacuuugcuugc

SEQ ID NO: 2367760 - RNA, 21 nt, Human
aacuuugcuugcaguagauuu

SEQ ID NO: 2367761 - RNA, 20 nt, Human
aacuuugaccucugcagcaa

SEQ ID NO: 2367762 - RNA, 19 nt, Human
aacuuugaccucugcagca

SEQ ID NO: 2367763 - RNA, 19 nt, Human
aacuuuguggaugucuucc

SEQ ID NO: 2367764 - RNA, 20 nt, Human
aacuuuguggaugucuuccu

SEQ ID NO: 2367765 - RNA, 22 nt, Human
aacuuuuaauuaaaugcucauc

SEQ ID NO: 2367766 - RNA, 18 nt, Human
aacuuuggaguccccuca

SEQ ID NO: 2367767 - RNA, 15 nt, Human
aacuuuuauaaacuu

SEQ ID NO: 2367768 - RNA, 12 nt, Human
aacuuuuauaaa

SEQ ID NO: 2367769 - RNA, 12 nt, Human
aaagauauauua

SEQ ID NO: 2367770 - RNA, 17 nt, Human
aaagauauauacacagg

SEQ ID NO: 2367771 - RNA, 19 nt, Human
aaagauauauuaaaaauau

SEQ ID NO: 2367772 - RNA, 20 nt, Human
aaagauaucucaucucuucu

SEQ ID NO: 2367773 - RNA, 20 nt, Human
aaagauauauuaaaaauaua

SEQ ID NO: 2367774 - RNA, 21 nt, Human
aaagauauauuaaaaauauaa

SEQ ID NO: 2367775 - RNA, 18 nt, Human
aaagauauaagugcugua

SEQ ID NO: 2367776 - RNA, 20 nt, Human
aaagauauaagugcuguaua

SEQ ID NO: 2367777 - RNA, 21 nt, Human
aaagauauaagugcuguauaa

SEQ ID NO: 2367778 - RNA, 22 nt, Human
aaagauauaagugcuguauaaa

SEQ ID NO: 2367779 - RNA, 22 nt, Human
aaagauacgacuuuauuuucug

SEQ ID NO: 2367780 - RNA, 15 nt, Human
aaagauauaagugcu

SEQ ID NO: 2367781 - RNA, 16 nt, Human
aaagauauaagugcug

SEQ ID NO: 2367782 - RNA, 17 nt, Human
aaagauauaagugcugu

SEQ ID NO: 2367783 - RNA, 20 nt, Human
aaagauacgacuuuauuuuc

SEQ ID NO: 2367784 - RNA, 16 nt, Human
aaagauacgacuuuau

SEQ ID NO: 2367785 - RNA, 23 nt, Human
aaagaguagacauuucucuuacu

SEQ ID NO: 2367786 - RNA, 18 nt, Human
aaagaguagaauugcauu

SEQ ID NO: 2367787 - RNA, 13 nt, Human
aaagaguagaauu

SEQ ID NO: 2367788 - RNA, 17 nt, Human
aaagaguacucuuguuu

SEQ ID NO: 2367789 - RNA, 12 nt, Human
aaagaguacucu

SEQ ID NO: 2367790 - RNA, 19 nt, Human
aaagagguuuuucuuaaau

SEQ ID NO: 2367791 - RNA, 22 nt, Human
aaagaacauggacuuguauauu

SEQ ID NO: 2367792 - RNA, 19 nt, Human
aaagaguaaaggaaaugau

SEQ ID NO: 2367793 - RNA, 16 nt, Human
aaagagguuuuucuua

SEQ ID NO: 2367794 - RNA, 20 nt, Human
aaagaacauggacuuguaua

SEQ ID NO: 2367795 - RNA, 21 nt, Human
aaagaacauggacuuguauau

SEQ ID NO: 2367796 - RNA, 18 nt, Human
aaagaaagccucagagaa

SEQ ID NO: 2367797 - RNA, 17 nt, Human
aaagaaagccucagaga

SEQ ID NO: 2367798 - RNA, 12 nt, Human
aaacugacuuua

SEQ ID NO: 2367799 - RNA, 18 nt, Human
aaagaaagagagaaaaua

SEQ ID NO: 2367800 - RNA, 17 nt, Human
aaagaaagagagaaaau

SEQ ID NO: 2367801 - RNA, 23 nt, Human
aaagaaaguugcacggcugcuga

SEQ ID NO: 2367802 - RNA, 13 nt, Human
aaagaaauuaugu

SEQ ID NO: 2367803 - RNA, 19 nt, Human
aaagaaaugucuauuaagg

SEQ ID NO: 2367804 - RNA, 15 nt, Human
aaagaaauuaugugc

SEQ ID NO: 2367805 - RNA, 11 nt, Human
aaagagguuuu

SEQ ID NO: 2367806 - RNA, 18 nt, Human
aaagaacauggacuugua

SEQ ID NO: 2367807 - RNA, 16 nt, Human
aaagaacaaaaaaauc

SEQ ID NO: 2367808 - RNA, 15 nt, Human
aaagaacaguaaaca

SEQ ID NO: 2367809 - RNA, 11 nt, Human
aaagaacaucc

SEQ ID NO: 2367810 - RNA, 14 nt, Human
aaacugaauggaag

SEQ ID NO: 2367811 - RNA, 16 nt, Human
aaacugaaugaaaccc

SEQ ID NO: 2367812 - RNA, 14 nt, Human
aaacugcauuagaa

SEQ ID NO: 2367813 - RNA, 19 nt, Human
aaacugaagucugaaauuu

SEQ ID NO: 2367814 - RNA, 17 nt, Human
aaacugacucuuaagaa

SEQ ID NO: 2367815 - RNA, 15 nt, Human
aaacugccagcaacg

SEQ ID NO: 2367816 - RNA, 14 nt, Human
aaacugccagcaac

SEQ ID NO: 2367817 - RNA, 14 nt, Human
aaacugaagccaga

SEQ ID NO: 2367818 - RNA, 15 nt, Human
aaacugaagucugaa

SEQ ID NO: 2367819 - RNA, 16 nt, Human
aaacugaagucugaaa

SEQ ID NO: 2367820 - RNA, 17 nt, Human
aaacugaagucugaaau

SEQ ID NO: 2367821 - RNA, 16 nt, Human
aaacugacucuuaaga

SEQ ID NO: 2367822 - RNA, 17 nt, Human
aaacugcauuagaaauu

SEQ ID NO: 2367823 - RNA, 20 nt, Human
aaacugccaguuuuguuucc

SEQ ID NO: 2367824 - RNA, 19 nt, Human
aaacugccagcaacgcagg

SEQ ID NO: 2367825 - RNA, 12 nt, Human
aaagaaaacuug

SEQ ID NO: 2367826 - RNA, 20 nt, Human
aaagaaaacuuguauuaugu

SEQ ID NO: 2367827 - RNA, 14 nt, Human
aaagaaagaaggaa

SEQ ID NO: 2367828 - RNA, 12 nt, Human
aaagaaagagag

SEQ ID NO: 2367829 - RNA, 21 nt, Human
aaagaaaauaaaaaaaagaaa

SEQ ID NO: 2367830 - RNA, 16 nt, Human
aaagaaagagagaaaa

SEQ ID NO: 2367831 - RNA, 15 nt, Human
aaagaaagagagaaa

SEQ ID NO: 2367832 - RNA, 14 nt, Human
aaagaaagagagaa

SEQ ID NO: 2367833 - RNA, 13 nt, Human
aaagaaagagaga

SEQ ID NO: 2367834 - RNA, 12 nt, Human
aaagaaaauaaa

SEQ ID NO: 2367835 - RNA, 14 nt, Human
aaagaaaagauaaa

SEQ ID NO: 2367836 - RNA, 23 nt, Human
aaagaaaagauaaagaugaucua

SEQ ID NO: 2367837 - RNA, 16 nt, Human
aaagaaaacccacccc

SEQ ID NO: 2367838 - RNA, 21 nt, Human
aaagaucuguuuugaaggcaa

SEQ ID NO: 2367839 - RNA, 23 nt, Human
aaagauauauuaaaaauauaaaa

SEQ ID NO: 2367840 - RNA, 17 nt, Human
aaagaugaaaauauuug

SEQ ID NO: 2367841 - RNA, 16 nt, Human
aaagaugaaaauauuu

SEQ ID NO: 2367842 - RNA, 13 nt, Human
aaagaugaaaaua

SEQ ID NO: 2367843 - RNA, 20 nt, Human
aaacagacucgauucauauu

SEQ ID NO: 2367844 - RNA, 14 nt, Human
aaacagacucaggu

SEQ ID NO: 2367845 - RNA, 16 nt, Human
aaacagagacaggccc

SEQ ID NO: 2367846 - RNA, 15 nt, Human
aaacagagacaggcc

SEQ ID NO: 2367847 - RNA, 23 nt, Human
aaacacugccaucuuaguuugga

SEQ ID NO: 2367848 - RNA, 19 nt, Human
aaacacuguucucugcccu

SEQ ID NO: 2367849 - RNA, 22 nt, Human
aaacacuguucucugcccucca

SEQ ID NO: 2367850 - RNA, 14 nt, Human
aaacagauuuuuac

SEQ ID NO: 2367851 - RNA, 19 nt, Human
aaacagauuuuuacaaaug

SEQ ID NO: 2367852 - RNA, 15 nt, Human
aaacagauuuuuaca

SEQ ID NO: 2367853 - RNA, 16 nt, Human
aaacagagaugugaua

SEQ ID NO: 2367854 - RNA, 22 nt, Human
aaacagagacaggcccaagaga

SEQ ID NO: 2367855 - RNA, 20 nt, Human
aaacagaggccauggcagaa

SEQ ID NO: 2367856 - RNA, 15 nt, Human
aaacagauauaaaug

SEQ ID NO: 2367857 - RNA, 12 nt, Human
aaacagauauaa

SEQ ID NO: 2367858 - RNA, 20 nt, Human
aaacagaucuccuggcaaag

SEQ ID NO: 2367859 - RNA, 23 nt, Human
aaaacacagacauucugccaggc

SEQ ID NO: 2367860 - RNA, 21 nt, Human
aaaacacaguguuuuuguaaa

SEQ ID NO: 2367861 - RNA, 20 nt, Human
aaaacacaguguuuuuguaa

SEQ ID NO: 2367862 - RNA, 14 nt, Human
aaaauucaaaaagu

SEQ ID NO: 2367863 - RNA, 16 nt, Human
aaaauucaaaaagugu

SEQ ID NO: 2367864 - RNA, 17 nt, Human
aaaauucaaaaaguguu

SEQ ID NO: 2367865 - RNA, 18 nt, Human
aaaauucaaaaaguguuu

SEQ ID NO: 2367866 - RNA, 15 nt, Human
aaaacacauuuuucu

SEQ ID NO: 2367867 - RNA, 13 nt, Human
aaaacacauuuuu

SEQ ID NO: 2367868 - RNA, 13 nt, Human
aaaauucagugga

SEQ ID NO: 2367869 - RNA, 17 nt, Human
aaaauucaauuguaaau

SEQ ID NO: 2367870 - RNA, 18 nt, Human
aaaauucacuauuggcug

SEQ ID NO: 2367871 - RNA, 14 nt, Human
aaaauucaauugua

SEQ ID NO: 2367872 - RNA, 13 nt, Human
aaaauugccauau

SEQ ID NO: 2367873 - RNA, 14 nt, Human
aaaauugccauauu

SEQ ID NO: 2367874 - RNA, 16 nt, Human
aaaauugccauauugc

SEQ ID NO: 2367875 - RNA, 17 nt, Human
aaaauugccauauugca

SEQ ID NO: 2367876 - RNA, 18 nt, Human
aaaauugccauauugcac

SEQ ID NO: 2367877 - RNA, 20 nt, Human
aaacacucggcauuucaaau

SEQ ID NO: 2367878 - RNA, 21 nt, Human
aaacacucggcauuucaaaug

SEQ ID NO: 2367879 - RNA, 14 nt, Human
aaacacugcaggca

SEQ ID NO: 2367880 - RNA, 15 nt, Human
aaacacugcaggcau

SEQ ID NO: 2367881 - RNA, 13 nt, Human
aaacacugccauc

SEQ ID NO: 2367882 - RNA, 18 nt, Human
aaacacuguucucugccc

SEQ ID NO: 2367883 - RNA, 14 nt, Human
aaacacucuugaaa

SEQ ID NO: 2367884 - RNA, 17 nt, Human
aaacacucuugaaaaau

SEQ ID NO: 2367885 - RNA, 21 nt, Human
aaaauugcugugccucccaaa

SEQ ID NO: 2367886 - RNA, 15 nt, Human
aaaauugcugugccu

SEQ ID NO: 2367887 - RNA, 19 nt, Human
aaaauugccauauugcaca

SEQ ID NO: 2367888 - RNA, 21 nt, Human
aaaauugccauauugcacaug

SEQ ID NO: 2367889 - RNA, 13 nt, Human
aaacacucuugaa

SEQ ID NO: 2367890 - RNA, 23 nt, Human
aaauggcugcaucccccccaccu

SEQ ID NO: 2367891 - RNA, 17 nt, Human
aaauggcugguuuuuag

SEQ ID NO: 2367892 - RNA, 19 nt, Human
aaauggccauuugcuuuuu

SEQ ID NO: 2367893 - RNA, 23 nt, Human
aaauggccauuugcuuuuucacc

SEQ ID NO: 2367894 - RNA, 22 nt, Human
aaauggccauuugcuuuuucac

SEQ ID NO: 2367895 - RNA, 11 nt, Human
aaauggccuca

SEQ ID NO: 2367896 - RNA, 15 nt, Human
aaauggccucaugug

SEQ ID NO: 2367897 - RNA, 21 nt, Human
aaauggcgucuggaaguccaa

SEQ ID NO: 2367898 - RNA, 16 nt, Human
aaauggcucagaugcc

SEQ ID NO: 2367899 - RNA, 21 nt, Human
aaauggccucauguggcugga

SEQ ID NO: 2367900 - RNA, 22 nt, Human
aaauggccucauguggcuggaa

SEQ ID NO: 2367901 - RNA, 18 nt, Human
aaauggcuuccuggcaau

SEQ ID NO: 2367902 - RNA, 17 nt, Human
aaaucuuggcacagaaa

SEQ ID NO: 2367903 - RNA, 13 nt, Human
aaaucuugaaauu

SEQ ID NO: 2367904 - RNA, 19 nt, Human
aaaucaaauaugcaaagca

SEQ ID NO: 2367905 - RNA, 18 nt, Human
aaaucaaauaugcaaagc

SEQ ID NO: 2367906 - RNA, 15 nt, Human
aaauauuuugaauca

SEQ ID NO: 2367907 - RNA, 21 nt, Human
aaauauuuugaaucaauaaua

SEQ ID NO: 2367908 - RNA, 20 nt, Human
aaauauuuucauacagcauu

SEQ ID NO: 2367909 - RNA, 16 nt, Human
aaauauuuucuggguu

SEQ ID NO: 2367910 - RNA, 16 nt, Human
aaauggaaaugggcag

SEQ ID NO: 2367911 - RNA, 18 nt, Human
aaauggaagacagcucuu

SEQ ID NO: 2367912 - RNA, 20 nt, Human
aaaucuuucuuucuuagaaa

SEQ ID NO: 2367913 - RNA, 20 nt, Human
aaaugcuuuuuauuucugca

SEQ ID NO: 2367914 - RNA, 16 nt, Human
aaaucuuucuuucuua

SEQ ID NO: 2367915 - RNA, 18 nt, Human
aaaucuuucuuucuuaga

SEQ ID NO: 2367916 - RNA, 21 nt, Human
aaauggaaaggagaggaaaga

SEQ ID NO: 2367917 - RNA, 15 nt, Human
aaauggaagacacau

SEQ ID NO: 2367918 - RNA, 18 nt, Human
aaauggaagacacauuga

SEQ ID NO: 2367919 - RNA, 20 nt, Human
aaauggacguguuaugacuc

SEQ ID NO: 2367920 - RNA, 21 nt, Human
aaauggacguguuaugacucc

SEQ ID NO: 2367921 - RNA, 22 nt, Human
aaauggacguguuaugacucca

SEQ ID NO: 2367922 - RNA, 14 nt, Human
aaauauaauugaca

SEQ ID NO: 2367923 - RNA, 19 nt, Human
aaauauaauucuguaaaug

SEQ ID NO: 2367924 - RNA, 17 nt, Human
aaauauaauucuguaaa

SEQ ID NO: 2367925 - RNA, 18 nt, Human
aaauauaauucuguaaau

SEQ ID NO: 2367926 - RNA, 14 nt, Human
aaauauaagaauaa

SEQ ID NO: 2367927 - RNA, 11 nt, Human
aaauauaauuc

SEQ ID NO: 2367928 - RNA, 12 nt, Human
aaauauaauucu

SEQ ID NO: 2367929 - RNA, 13 nt, Human
aaauauaauucug

SEQ ID NO: 2367930 - RNA, 16 nt, Human
aaauauaauucuguaa

SEQ ID NO: 2367931 - RNA, 12 nt, Human
aaauauaaaacu

SEQ ID NO: 2367932 - RNA, 13 nt, Human
aaauauaaaauau

SEQ ID NO: 2367933 - RNA, 16 nt, Human
aaauagggucuaacuc

SEQ ID NO: 2367934 - RNA, 20 nt, Human
aaauagugcagaaucucaua

SEQ ID NO: 2367935 - RNA, 21 nt, Human
aaauagugcagaaucucauag

SEQ ID NO: 2367936 - RNA, 13 nt, Human
aaauaguaaaaau

SEQ ID NO: 2367937 - RNA, 16 nt, Human
aaauaguaaaaauaaa

SEQ ID NO: 2367938 - RNA, 14 nt, Human
aaauaguauuugag

SEQ ID NO: 2367939 - RNA, 19 nt, Human
aaauagacaguauauuuau

SEQ ID NO: 2367940 - RNA, 16 nt, Human
aaauagacaguauauu

SEQ ID NO: 2367941 - RNA, 15 nt, Human
aaauagacaguauau

SEQ ID NO: 2367942 - RNA, 22 nt, Human
aaauagaagaauacaaacauau

SEQ ID NO: 2367943 - RNA, 16 nt, Human
aaauagaaccacuaug

SEQ ID NO: 2367944 - RNA, 14 nt, Human
aaauagaaauaagu

SEQ ID NO: 2367945 - RNA, 16 nt, Human
aaauacuuuaaaggaa

SEQ ID NO: 2367946 - RNA, 17 nt, Human
aaauacuuuaaaggaaa

SEQ ID NO: 2367947 - RNA, 11 nt, Human
aaauacuuguc

SEQ ID NO: 2367948 - RNA, 15 nt, Human
aaauacuuuaaagga

SEQ ID NO: 2367949 - RNA, 20 nt, Human
aaauacuugucaauauuuaa

SEQ ID NO: 2367950 - RNA, 21 nt, Human
aaauacuugucaauauuuaaa

SEQ ID NO: 2367951 - RNA, 22 nt, Human
aaauacuugucaauauuuaaac

SEQ ID NO: 2367952 - RNA, 22 nt, Human
aaauacuguuuuuaacaacuau

SEQ ID NO: 2367953 - RNA, 14 nt, Human
aaauacuguuugag

SEQ ID NO: 2367954 - RNA, 20 nt, Human
aaauacuguguuucagaagc

SEQ ID NO: 2367955 - RNA, 12 nt, Human
aaauaaagcccu

SEQ ID NO: 2367956 - RNA, 20 nt, Human
aaauaaagcuugcaacaaaa

SEQ ID NO: 2367957 - RNA, 13 nt, Human
aaauaaaguauau

SEQ ID NO: 2367958 - RNA, 23 nt, Human
aaauaaaggaugugauuguggaa

SEQ ID NO: 2367959 - RNA, 13 nt, Human
aaauaaaggaacc

SEQ ID NO: 2367960 - RNA, 12 nt, Human
aaauaacaauga

SEQ ID NO: 2367961 - RNA, 13 nt, Human
aaauaaaauuaug

SEQ ID NO: 2367962 - RNA, 15 nt, Human
aaauaaaauuuguug

SEQ ID NO: 2367963 - RNA, 16 nt, Human
aaauaaaauuuguugc

SEQ ID NO: 2367964 - RNA, 17 nt, Human
aaauaaaauuuguugca

SEQ ID NO: 2367965 - RNA, 22 nt, Human
aaauaaaauuaaagcugaaaac

SEQ ID NO: 2367966 - RNA, 15 nt, Human
aaauaaaauggauuu

SEQ ID NO: 2367967 - RNA, 14 nt, Human
aaauaaacucuaaa

SEQ ID NO: 2367968 - RNA, 17 nt, Human
aaauaaaaggaagccaa

SEQ ID NO: 2367969 - RNA, 12 nt, Human
aaagugcuggga

SEQ ID NO: 2367970 - RNA, 14 nt, Human
aaagugcugggauu

SEQ ID NO: 2367971 - RNA, 14 nt, Human
aaauaaaaugacca

SEQ ID NO: 2367972 - RNA, 15 nt, Human
aaauaaaaugaccag

SEQ ID NO: 2367973 - RNA, 16 nt, Human
aaauaaaaugaccagu

SEQ ID NO: 2367974 - RNA, 14 nt, Human
aaauaaaauaaagc

SEQ ID NO: 2367975 - RNA, 16 nt, Human
aaauaaaagugaucaa

SEQ ID NO: 2367976 - RNA, 18 nt, Human
aaauaaaaggaagccaaa

SEQ ID NO: 2367977 - RNA, 15 nt, Human
aaagugauaauuucu

SEQ ID NO: 2367978 - RNA, 20 nt, Human
aaagugagggccgagugaga

SEQ ID NO: 2367979 - RNA, 22 nt, Human
aaagugaauuugaaugaaaaau

SEQ ID NO: 2367980 - RNA, 21 nt, Human
aaagugaauuugaaugaaaaa

SEQ ID NO: 2367981 - RNA, 13 nt, Human
aaagugacacagc

SEQ ID NO: 2367982 - RNA, 14 nt, Human
aaagugacacagca

SEQ ID NO: 2367983 - RNA, 11 nt, Human
aaagugcuggg

SEQ ID NO: 2367984 - RNA, 20 nt, Human
aaagugaaaguccagaaacu

SEQ ID NO: 2367985 - RNA, 13 nt, Human
aaagugaagcaaa

SEQ ID NO: 2367986 - RNA, 20 nt, Human
aaagugaauuugaaugaaaa

SEQ ID NO: 2367987 - RNA, 19 nt, Human
aaagugaauuugaaugaaa

SEQ ID NO: 2367988 - RNA, 17 nt, Human
aaagugaauuugaauga

SEQ ID NO: 2367989 - RNA, 15 nt, Human
aaagugaauuugaau

SEQ ID NO: 2367990 - RNA, 23 nt, Human
aaagugaagcaaaucagaaacuu

SEQ ID NO: 2367991 - RNA, 12 nt, Human
aaagugaauuug

SEQ ID NO: 2367992 - RNA, 20 nt, Human
aaagucuucacucucugaag

SEQ ID NO: 2367993 - RNA, 11 nt, Human
aaagucugcaa

SEQ ID NO: 2367994 - RNA, 12 nt, Human
aaagucucuugu

SEQ ID NO: 2367995 - RNA, 22 nt, Human
aaagucugugugaugaacuuuc

SEQ ID NO: 2367996 - RNA, 23 nt, Human
aaagucugugugaugaacuuucu

SEQ ID NO: 2367997 - RNA, 20 nt, Human
aaagucucuggaauuugaaa

SEQ ID NO: 2367998 - RNA, 22 nt, Human
aaagucucuggaauuugaaaca

SEQ ID NO: 2367999 - RNA, 19 nt, Human
aaagucucuggaauuugaa

SEQ ID NO: 2368000 - RNA, 18 nt, Human
aaagggaaguugugccuu

SEQ ID NO: 2368001 - RNA, 16 nt, Human
aaagggacugagaaau

SEQ ID NO: 2368002 - RNA, 16 nt, Human
aaagggaacugaacau

SEQ ID NO: 2368003 - RNA, 21 nt, Human
aaagggaacugaacauuccag

SEQ ID NO: 2368004 - RNA, 14 nt, Human
aaagggaaacuauu

SEQ ID NO: 2368005 - RNA, 15 nt, Human
aaaggcuucucucuc

SEQ ID NO: 2368006 - RNA, 17 nt, Human
aaaggcuucucucucac

SEQ ID NO: 2368007 - RNA, 15 nt, Human
aaauaaaguauauau

SEQ ID NO: 2368008 - RNA, 19 nt, Human
aaauaaauuugguucuaau

SEQ ID NO: 2368009 - RNA, 23 nt, Human
aaauaacaaaucucaagcaaaca

SEQ ID NO: 2368010 - RNA, 17 nt, Human
aaauaacaaugugcucu

SEQ ID NO: 2368011 - RNA, 14 nt, Human
aaauaacaaugugc

SEQ ID NO: 2368012 - RNA, 21 nt, Human
aaauaacaagucgaugaacua

SEQ ID NO: 2368013 - RNA, 14 nt, Human
aaauaacaauguua

SEQ ID NO: 2368014 - RNA, 15 nt, Human
aaauaacaauguuaa

SEQ ID NO: 2368015 - RNA, 16 nt, Human
aaauaacaauguuaag

SEQ ID NO: 2368016 - RNA, 17 nt, Human
aaauaacaauguuaagg

SEQ ID NO: 2368017 - RNA, 22 nt, Human
aaugucuucuguauucacuuau

SEQ ID NO: 2368018 - RNA, 21 nt, Human
aaugucuucauuucauuguau

SEQ ID NO: 2368019 - RNA, 23 nt, Human
aaugucuguagcuccucaacuca

SEQ ID NO: 2368020 - RNA, 12 nt, Human
aaugucugugcu

SEQ ID NO: 2368021 - RNA, 13 nt, Human
aaugucugugcua

SEQ ID NO: 2368022 - RNA, 17 nt, Human
aaugucuucauuucauu

SEQ ID NO: 2368023 - RNA, 17 nt, Human
aaugucuguuaacuuaa

SEQ ID NO: 2368024 - RNA, 18 nt, Human
aauguuugccucugccuc

SEQ ID NO: 2368025 - RNA, 13 nt, Human
aaugucuuguguu

SEQ ID NO: 2368026 - RNA, 11 nt, Human
aaugucuugug

SEQ ID NO: 2368027 - RNA, 20 nt, Human
aaugucuugaugcaugcacu

SEQ ID NO: 2368028 - RNA, 17 nt, Human
aauguuuuauacuguuu

SEQ ID NO: 2368029 - RNA, 20 nt, Human
aauguuuuacugugaaacug

SEQ ID NO: 2368030 - RNA, 22 nt, Human
aauguuuuacugugaaacuggc

SEQ ID NO: 2368031 - RNA, 12 nt, Human
aauguuuugaca

SEQ ID NO: 2368032 - RNA, 15 nt, Human
aauguuuuaaauucu

SEQ ID NO: 2368033 - RNA, 14 nt, Human
aauguuuuaaauuc

SEQ ID NO: 2368034 - RNA, 13 nt, Human
aauguuuuaaauu

SEQ ID NO: 2368035 - RNA, 18 nt, Human
aauguuugucucauccca

SEQ ID NO: 2368036 - RNA, 18 nt, Human
aauguuugggcagaaggg

SEQ ID NO: 2368037 - RNA, 23 nt, Human
aauguuugggcagaagggagaag

SEQ ID NO: 2368038 - RNA, 12 nt, Human
aauguuugcuau

SEQ ID NO: 2368039 - RNA, 19 nt, Human
aauguuugccucugccucu

SEQ ID NO: 2368040 - RNA, 12 nt, Human
aauuaaacggau

SEQ ID NO: 2368041 - RNA, 18 nt, Human
aauuaaaaguugaauuuu

SEQ ID NO: 2368042 - RNA, 13 nt, Human
aauuaaacggauu

SEQ ID NO: 2368043 - RNA, 14 nt, Human
aauuaaacggauua

SEQ ID NO: 2368044 - RNA, 15 nt, Human
aauuaaacggauuau

SEQ ID NO: 2368045 - RNA, 23 nt, Human
aauuaaacggauuauuuuuucag

SEQ ID NO: 2368046 - RNA, 16 nt, Human
aauuaaacggauuauu

SEQ ID NO: 2368047 - RNA, 17 nt, Human
aauuaaacggauuauuu

SEQ ID NO: 2368048 - RNA, 21 nt, Human
aauuaaacggauuauuuuuuc

SEQ ID NO: 2368049 - RNA, 22 nt, Human
aauuaaacggauuauuuuuuca

SEQ ID NO: 2368050 - RNA, 18 nt, Human
aauuaaaacacaacaucu

SEQ ID NO: 2368051 - RNA, 13 nt, Human
aauuaaaacugaa

SEQ ID NO: 2368052 - RNA, 17 nt, Human
aauuaaaaaauuuccag

SEQ ID NO: 2368053 - RNA, 21 nt, Human
aauguuuuucugccagggagc

SEQ ID NO: 2368054 - RNA, 15 nt, Human
aauguuuuucugcca

SEQ ID NO: 2368055 - RNA, 13 nt, Human
aauguuuuucuau

SEQ ID NO: 2368056 - RNA, 14 nt, Human
aauuaaauuaggaa

SEQ ID NO: 2368057 - RNA, 14 nt, Human
aauuaaauuuugag

SEQ ID NO: 2368058 - RNA, 22 nt, Human
aauuaaauuuugaguucuacau

SEQ ID NO: 2368059 - RNA, 12 nt, Human
aauuaaauguag

SEQ ID NO: 2368060 - RNA, 11 nt, Human
aauuaaaugua

SEQ ID NO: 2368061 - RNA, 13 nt, Human
aauuaaagugucc

SEQ ID NO: 2368062 - RNA, 18 nt, Human
aauuaaaguguccauuga

SEQ ID NO: 2368063 - RNA, 20 nt, Human
aauuaaaguguccauugaca

SEQ ID NO: 2368064 - RNA, 21 nt, Human
aauuaaaguguccauugacau

SEQ ID NO: 2368065 - RNA, 15 nt, Human
aauuaaagcuguuau

SEQ ID NO: 2368066 - RNA, 12 nt, Human
aauuaaaguguc

SEQ ID NO: 2368067 - RNA, 14 nt, Human
aaugggaaaagaga

SEQ ID NO: 2368068 - RNA, 20 nt, Human
aaugggaaauacuacuccug

SEQ ID NO: 2368069 - RNA, 21 nt, Human
aauggcuuauccagcugguga

SEQ ID NO: 2368070 - RNA, 22 nt, Human
aauggcuuauccagcuggugag

SEQ ID NO: 2368071 - RNA, 23 nt, Human
aaugguaguaaucacaguuggcc

SEQ ID NO: 2368072 - RNA, 18 nt, Human
aaugguaggcauuuccua

SEQ ID NO: 2368073 - RNA, 17 nt, Human
aaugguaggcauuuccu

SEQ ID NO: 2368074 - RNA, 16 nt, Human
aaugguauaaauuuca

SEQ ID NO: 2368075 - RNA, 14 nt, Human
aauggggccagauc

SEQ ID NO: 2368076 - RNA, 15 nt, Human
aaugguaccagauaa

SEQ ID NO: 2368077 - RNA, 17 nt, Human
aauggggaucacagaga

SEQ ID NO: 2368078 - RNA, 16 nt, Human
aaugggaauauuuuau

SEQ ID NO: 2368079 - RNA, 16 nt, Human
aaugguaccagauaaa

SEQ ID NO: 2368080 - RNA, 22 nt, Human
aaugggaacugccucuuuccug

SEQ ID NO: 2368081 - RNA, 17 nt, Human
aaugggcaguuacaugc

SEQ ID NO: 2368082 - RNA, 18 nt, Human
aaugggcaguuacaugca

SEQ ID NO: 2368083 - RNA, 21 nt, Human
aaugggcaguuacaugcauac

SEQ ID NO: 2368084 - RNA, 22 nt, Human
aaugggcaguuacaugcauacu

SEQ ID NO: 2368085 - RNA, 13 nt, Human
aauggggccagau

SEQ ID NO: 2368086 - RNA, 12 nt, Human
aauggggccaga

SEQ ID NO: 2368087 - RNA, 17 nt, Human
aaugggcuuagagcagu

SEQ ID NO: 2368088 - RNA, 15 nt, Human
aaugggcagagcaga

SEQ ID NO: 2368089 - RNA, 13 nt, Human
aaugggcagagca

SEQ ID NO: 2368090 - RNA, 16 nt, Human
aauggucgcccaggag

SEQ ID NO: 2368091 - RNA, 15 nt, Human
aauggucgcccagga

SEQ ID NO: 2368092 - RNA, 22 nt, Human
aauggucuuucuaaugugugaa

SEQ ID NO: 2368093 - RNA, 22 nt, Human
aauggugaaaauaaaauaaagc

SEQ ID NO: 2368094 - RNA, 15 nt, Human
aaugguauagcaaau

SEQ ID NO: 2368095 - RNA, 13 nt, Human
aaugguguacaua

SEQ ID NO: 2368096 - RNA, 10 nt, Human
aauggugccu

SEQ ID NO: 2368097 - RNA, 16 nt, Human
aaugguguacauaaug

SEQ ID NO: 2368098 - RNA, 22 nt, Human
aaugguggggaacuauaaagaa

SEQ ID NO: 2368099 - RNA, 16 nt, Human
aauggugccuucauuu

SEQ ID NO: 2368100 - RNA, 15 nt, Human
aaugucagugugacu

SEQ ID NO: 2368101 - RNA, 16 nt, Human
aaugucagugugacug

SEQ ID NO: 2368102 - RNA, 13 nt, Human
aaugucaguguga

SEQ ID NO: 2368103 - RNA, 22 nt, Human
aaugucaguauguggaagugug

SEQ ID NO: 2368104 - RNA, 16 nt, Human
aaugucaguaugugga

SEQ ID NO: 2368105 - RNA, 22 nt, Human
aaugucuaguuguaacaccaug

SEQ ID NO: 2368106 - RNA, 17 nt, Human
aaugucagugugacuga

SEQ ID NO: 2368107 - RNA, 21 nt, Human
aaugucagugugacugaucuc

SEQ ID NO: 2368108 - RNA, 20 nt, Human
aaugucucuuuaaugucaca

SEQ ID NO: 2368109 - RNA, 17 nt, Human
aaugucugagugaaccu

SEQ ID NO: 2368110 - RNA, 16 nt, Human
aaugucuaauguauuu

SEQ ID NO: 2368111 - RNA, 14 nt, Human
aaugucuauuaagg

SEQ ID NO: 2368112 - RNA, 19 nt, Human
aaugucuaauguauuuuau

SEQ ID NO: 2368113 - RNA, 20 nt, Human
aaugucuaauguauuuuauu

SEQ ID NO: 2368114 - RNA, 17 nt, Human
aaugucucugugagacu

SEQ ID NO: 2368115 - RNA, 18 nt, Human
aaugucucugugagacuc

SEQ ID NO: 2368116 - RNA, 22 nt, Human
aauuagugcuaagugugaacug

SEQ ID NO: 2368117 - RNA, 14 nt, Human
aauuaguuuuauau

SEQ ID NO: 2368118 - RNA, 17 nt, Human
aauuaguuuuauaugcu

SEQ ID NO: 2368119 - RNA, 20 nt, Human
aauuaguuuuauaugcuucu

SEQ ID NO: 2368120 - RNA, 18 nt, Human
aauuaguggcacuugcuu

SEQ ID NO: 2368121 - RNA, 21 nt, Human
aaucuggaccccaucugugaa

SEQ ID NO: 2368122 - RNA, 22 nt, Human
aaucugcuuuuuaaagaaugcu

SEQ ID NO: 2368123 - RNA, 17 nt, Human
aaucucauugcuuacaa

SEQ ID NO: 2368124 - RNA, 23 nt, Human
aaucucauagguugccaauaaua

SEQ ID NO: 2368125 - RNA, 14 nt, Human
aaucugcagaagga

SEQ ID NO: 2368126 - RNA, 17 nt, Human
aaucugcagaaggaaaa

SEQ ID NO: 2368127 - RNA, 23 nt, Human
aaucugcagaaggaaaaaugugu

SEQ ID NO: 2368128 - RNA, 16 nt, Human
aaugaaccacaucuug

SEQ ID NO: 2368129 - RNA, 22 nt, Human
aaucuggaccccaucugugaau

SEQ ID NO: 2368130 - RNA, 17 nt, Human
aaugaaccacaucuugc

SEQ ID NO: 2368131 - RNA, 23 nt, Human
aaugaaccacaucuugcucugcu

SEQ ID NO: 2368132 - RNA, 17 nt, Human
aaugaaccccacugggu

SEQ ID NO: 2368133 - RNA, 21 nt, Human
aaugaacccccaugauguaag

SEQ ID NO: 2368134 - RNA, 22 nt, Human
aaugaacccccaugauguaagu

SEQ ID NO: 2368135 - RNA, 18 nt, Human
aaugaaccgcugaauaug

SEQ ID NO: 2368136 - RNA, 11 nt, Human
aaugaacugaa

SEQ ID NO: 2368137 - RNA, 14 nt, Human
aaugaacugaaguu

SEQ ID NO: 2368138 - RNA, 15 nt, Human
aaugaacugaaguuu

SEQ ID NO: 2368139 - RNA, 11 nt, Human
aaugaagaaag

SEQ ID NO: 2368140 - RNA, 17 nt, Human
aaugauaacuggaaacu

SEQ ID NO: 2368141 - RNA, 20 nt, Human
aaugauaauauuguggugcc

SEQ ID NO: 2368142 - RNA, 21 nt, Human
aaugauaaguaaaugcuaggu

SEQ ID NO: 2368143 - RNA, 21 nt, Human
aaugaugauccuaggcauuug

SEQ ID NO: 2368144 - RNA, 18 nt, Human
aaugauaaguaaaugcua

SEQ ID NO: 2368145 - RNA, 20 nt, Human
aaugauaacuggaaacuuca

SEQ ID NO: 2368146 - RNA, 22 nt, Human
aauccauguuaguuuuuacuuu

SEQ ID NO: 2368147 - RNA, 19 nt, Human
aauccauguuaguuuuuac

SEQ ID NO: 2368148 - RNA, 16 nt, Human
aaucccaaauuugauu

SEQ ID NO: 2368149 - RNA, 11 nt, Human
aaucccaaauu

SEQ ID NO: 2368150 - RNA, 18 nt, Human
aaucuccaaaauaaaacu

SEQ ID NO: 2368151 - RNA, 22 nt, Human
aaucugauuuguuuuccucuua

SEQ ID NO: 2368152 - RNA, 14 nt, Human
aaucuccaaaauaa

SEQ ID NO: 2368153 - RNA, 13 nt, Human
aaucuccaaaaua

SEQ ID NO: 2368154 - RNA, 18 nt, Human
aaucccaaauuugauuga

SEQ ID NO: 2368155 - RNA, 18 nt, Human
aauccaggguggugguga

SEQ ID NO: 2368156 - RNA, 22 nt, Human
aauccaggcagauccaggacua

SEQ ID NO: 2368157 - RNA, 21 nt, Human
aauccaggcagauccaggacu

SEQ ID NO: 2368158 - RNA, 20 nt, Human
aauccaggcagauccaggac

SEQ ID NO: 2368159 - RNA, 13 nt, Human
aauccauacauuu

SEQ ID NO: 2368160 - RNA, 14 nt, Human
aauccauacauuug

SEQ ID NO: 2368161 - RNA, 17 nt, Human
aaugaucuuuucaaguu

SEQ ID NO: 2368162 - RNA, 20 nt, Human
aaugaugaugggaauugugu

SEQ ID NO: 2368163 - RNA, 16 nt, Human
aaugaucucuucuuuu

SEQ ID NO: 2368164 - RNA, 19 nt, Human
aaugaugccaugaggaaca

SEQ ID NO: 2368165 - RNA, 21 nt, Human
aaugaugauguggaagaacuu

SEQ ID NO: 2368166 - RNA, 18 nt, Human
aauaugguguacauucuu

SEQ ID NO: 2368167 - RNA, 16 nt, Human
aauaugguugauaguu

SEQ ID NO: 2368168 - RNA, 13 nt, Human
aauaugggagaaa

SEQ ID NO: 2368169 - RNA, 15 nt, Human
aauauggcuauaaau

SEQ ID NO: 2368170 - RNA, 18 nt, Human
aauauggcuauaaauaua

SEQ ID NO: 2368171 - RNA, 19 nt, Human
aauaugggcauuguaguua

SEQ ID NO: 2368172 - RNA, 21 nt, Human
aauauauaaaaagaaaagaua

SEQ ID NO: 2368173 - RNA, 20 nt, Human
aauauguauuguaaacaugu

SEQ ID NO: 2368174 - RNA, 14 nt, Human
aauauguauuguaa

SEQ ID NO: 2368175 - RNA, 15 nt, Human
aauauguauuguaaa

SEQ ID NO: 2368176 - RNA, 14 nt, Human
aauauuauguguuu

SEQ ID NO: 2368177 - RNA, 16 nt, Human
aauauuauguuaaaac

SEQ ID NO: 2368178 - RNA, 14 nt, Human
aaucaacucuaaua

SEQ ID NO: 2368179 - RNA, 19 nt, Human
aaucaacugggcugaacac

SEQ ID NO: 2368180 - RNA, 14 nt, Human
aaucaacugggcug

SEQ ID NO: 2368181 - RNA, 15 nt, Human
aaucaagaaacuuaa

SEQ ID NO: 2368182 - RNA, 22 nt, Human
aaucaauuaauuuuuuuauugu

SEQ ID NO: 2368183 - RNA, 13 nt, Human
aaucacaauacau

SEQ ID NO: 2368184 - RNA, 15 nt, Human
aaucacaguuggccu

SEQ ID NO: 2368185 - RNA, 11 nt, Human
aaucacauccu

SEQ ID NO: 2368186 - RNA, 13 nt, Human
aaucacauccugg

SEQ ID NO: 2368187 - RNA, 16 nt, Human
aaucacauccuggccu

SEQ ID NO: 2368188 - RNA, 19 nt, Human
aaucacagcuuguauuuug

SEQ ID NO: 2368189 - RNA, 21 nt, Human
aaucacagcuuguauuuugug

SEQ ID NO: 2368190 - RNA, 20 nt, Human
aaucaauuuaaacccauuuu

SEQ ID NO: 2368191 - RNA, 22 nt, Human
aaucaauuuaaacccauuuuag

SEQ ID NO: 2368192 - RNA, 13 nt, Human
aaucacagaauca

SEQ ID NO: 2368193 - RNA, 18 nt, Human
aaucaauuuaaacccauu

SEQ ID NO: 2368194 - RNA, 20 nt, Human
aaucaauuacugguccaaaa

SEQ ID NO: 2368195 - RNA, 14 nt, Human
aauauaauacugua

SEQ ID NO: 2368196 - RNA, 17 nt, Human
aauauaaguuucuuugc

SEQ ID NO: 2368197 - RNA, 23 nt, Human
aauauaaggaaagcaauaaauga

SEQ ID NO: 2368198 - RNA, 16 nt, Human
aauauaaguuucuuug

SEQ ID NO: 2368199 - RNA, 21 nt, Human
aauauaaggaaagcaauaaau

SEQ ID NO: 2368200 - RNA, 19 nt, Human
aauauaaggaaagcaauaa

SEQ ID NO: 2368201 - RNA, 18 nt, Human
aauauaaggaaagcaaua

SEQ ID NO: 2368202 - RNA, 16 nt, Human
aauauaagaauaaaau

SEQ ID NO: 2368203 - RNA, 22 nt, Human
aauauaagaauaaaauguugaa

SEQ ID NO: 2368204 - RNA, 14 nt, Human
aauauaauuaucgg

SEQ ID NO: 2368205 - RNA, 13 nt, Human
aauauaauucugu

SEQ ID NO: 2368206 - RNA, 15 nt, Human
aauauaauucuguaa

SEQ ID NO: 2368207 - RNA, 16 nt, Human
aauauaauucuguaaa

SEQ ID NO: 2368208 - RNA, 11 nt, Human
aauauaauuau

SEQ ID NO: 2368209 - RNA, 18 nt, Human
aauauaggaacuuaaaua

SEQ ID NO: 2368210 - RNA, 13 nt, Human
aauauacacacag

SEQ ID NO: 2368211 - RNA, 18 nt, Human
aauauaauuuuuuagaga

SEQ ID NO: 2368212 - RNA, 18 nt, Human
aauauauaaaaagaaaag

SEQ ID NO: 2368213 - RNA, 17 nt, Human
aauauggacacuuaaua

SEQ ID NO: 2368214 - RNA, 17 nt, Human
aauauggacucaguuuu

SEQ ID NO: 2368215 - RNA, 21 nt, Human
aauauggacacuuaauacuac

SEQ ID NO: 2368216 - RNA, 21 nt, Human
aauauaggaacuuaaauaaug

SEQ ID NO: 2368217 - RNA, 20 nt, Human
aauauaggaacuuaaauaau

SEQ ID NO: 2368218 - RNA, 22 nt, Human
aauauaacugccuuaaaacuuu

SEQ ID NO: 2368219 - RNA, 21 nt, Human
aauauaacuuaaaaauguaaa

SEQ ID NO: 2368220 - RNA, 13 nt, Human
aauauaagaauaa

SEQ ID NO: 2368221 - RNA, 16 nt, Human
aagccaucuugguaaa

SEQ ID NO: 2368222 - RNA, 15 nt, Human
aagccaucuugguaa

SEQ ID NO: 2368223 - RNA, 14 nt, Human
aagccaucuuggua

SEQ ID NO: 2368224 - RNA, 18 nt, Human
aagccauaauuguucuua

SEQ ID NO: 2368225 - RNA, 14 nt, Human
aagcagaggaagga

SEQ ID NO: 2368226 - RNA, 13 nt, Human
aagauuuuaaauu

SEQ ID NO: 2368227 - RNA, 18 nt, Human
aagauuuuaaucaaguug

SEQ ID NO: 2368228 - RNA, 17 nt, Human
aagauuuuaaucaaguu

SEQ ID NO: 2368229 - RNA, 12 nt, Human
aagcagacagcu

SEQ ID NO: 2368230 - RNA, 15 nt, Human
aagcagacagcucca

SEQ ID NO: 2368231 - RNA, 14 nt, Human
aagcagacagcucc

SEQ ID NO: 2368232 - RNA, 21 nt, Human
aagcagaccacugauaaaacc

SEQ ID NO: 2368233 - RNA, 13 nt, Human
aagcagcucuccc

SEQ ID NO: 2368234 - RNA, 14 nt, Human
aagcagcucucccc

SEQ ID NO: 2368235 - RNA, 13 nt, Human
aagcagagcuucc

SEQ ID NO: 2368236 - RNA, 17 nt, Human
aagcagcucuccccuca

SEQ ID NO: 2368237 - RNA, 17 nt, Human
aagcagcucuugcuaau

SEQ ID NO: 2368238 - RNA, 11 nt, Human
aagcagcucuu

SEQ ID NO: 2368239 - RNA, 13 nt, Human
aagcaggaagcuc

SEQ ID NO: 2368240 - RNA, 12 nt, Human
aagcaggaagcu

SEQ ID NO: 2368241 - RNA, 11 nt, Human
aagcaggaagc

SEQ ID NO: 2368242 - RNA, 21 nt, Human
aagcagcuuuaaacaaauuca

SEQ ID NO: 2368243 - RNA, 22 nt, Human
aagcaggaaaugaaaaugucuu

SEQ ID NO: 2368244 - RNA, 16 nt, Human
aagcagcuuuaaacaa

SEQ ID NO: 2368245 - RNA, 17 nt, Human
aagcagcuuuaaacaaa

SEQ ID NO: 2368246 - RNA, 16 nt, Human
aagcaggaagcucaga

SEQ ID NO: 2368247 - RNA, 21 nt, Human
aagcaggaggaggugccaaca

SEQ ID NO: 2368248 - RNA, 16 nt, Human
aagcaggcuacacuga

SEQ ID NO: 2368249 - RNA, 22 nt, Human
aagcaggcuacacugacacugg

SEQ ID NO: 2368250 - RNA, 15 nt, Human
aagcaggcuggaggu

SEQ ID NO: 2368251 - RNA, 12 nt, Human
aagccagaagcu

SEQ ID NO: 2368252 - RNA, 15 nt, Human
aagccagaaccagau

SEQ ID NO: 2368253 - RNA, 18 nt, Human
aagccacuuaaaauguuc

SEQ ID NO: 2368254 - RNA, 20 nt, Human
aagccagaagcugagcacca

SEQ ID NO: 2368255 - RNA, 17 nt, Human
aagccagaagcugagca

SEQ ID NO: 2368256 - RNA, 14 nt, Human
aagccagaagcuga

SEQ ID NO: 2368257 - RNA, 13 nt, Human
aagccagaagcug

SEQ ID NO: 2368258 - RNA, 11 nt, Human
aagccagacag

SEQ ID NO: 2368259 - RNA, 14 nt, Human
aagccagaggcugg

SEQ ID NO: 2368260 - RNA, 13 nt, Human
aagccagauuuuc

SEQ ID NO: 2368261 - RNA, 15 nt, Human
aagccagaggcuggg

SEQ ID NO: 2368262 - RNA, 16 nt, Human
aagccagaggcugggu

SEQ ID NO: 2368263 - RNA, 23 nt, Human
aagccagcugccgaccagagccc

SEQ ID NO: 2368264 - RNA, 21 nt, Human
aagccagcugccgaccagagc

SEQ ID NO: 2368265 - RNA, 15 nt, Human
aagccagcugccgac

SEQ ID NO: 2368266 - RNA, 20 nt, Human
aagccagcguccuccucugu

SEQ ID NO: 2368267 - RNA, 22 nt, Human
aagccaggaauuucccaggacc

SEQ ID NO: 2368268 - RNA, 21 nt, Human
aagccaggaauuucccaggac

SEQ ID NO: 2368269 - RNA, 20 nt, Human
aagccaggaauuucccagga

SEQ ID NO: 2368270 - RNA, 23 nt, Human
aagccagcuuucccugccucuca

SEQ ID NO: 2368271 - RNA, 17 nt, Human
aagccagcuuucccugc

SEQ ID NO: 2368272 - RNA, 15 nt, Human
aagccagcuuucccu

SEQ ID NO: 2368273 - RNA, 14 nt, Human
aagccagcuuuccc

SEQ ID NO: 2368274 - RNA, 12 nt, Human
aagccagcuuuc

SEQ ID NO: 2368275 - RNA, 13 nt, Human
aagaaauuaugug

SEQ ID NO: 2368276 - RNA, 14 nt, Human
aagaaauuccugua

SEQ ID NO: 2368277 - RNA, 17 nt, Human
aagaaauuccuguagca

SEQ ID NO: 2368278 - RNA, 22 nt, Human
aagaaauuaugugccagauuua

SEQ ID NO: 2368279 - RNA, 21 nt, Human
aagaacaauauugacuuuguc

SEQ ID NO: 2368280 - RNA, 21 nt, Human
aagaacaaagagaaaaaauac

SEQ ID NO: 2368281 - RNA, 15 nt, Human
aagaacaauauugac

SEQ ID NO: 2368282 - RNA, 14 nt, Human
aagaacaagaauuu

SEQ ID NO: 2368283 - RNA, 12 nt, Human
aagaacauagaa

SEQ ID NO: 2368284 - RNA, 16 nt, Human
aagaacacccucuaaa

SEQ ID NO: 2368285 - RNA, 20 nt, Human
aagaacacuuuuaauaaacu

SEQ ID NO: 2368286 - RNA, 19 nt, Human
aagaacacccuauauuuug

SEQ ID NO: 2368287 - RNA, 21 nt, Human
aagaacacccuauauuuugca

SEQ ID NO: 2368288 - RNA, 16 nt, Human
aagaaauuugauuucu

SEQ ID NO: 2368289 - RNA, 17 nt, Human
aagaaauuuaaaagaca

SEQ ID NO: 2368290 - RNA, 13 nt, Human
aagaaauugcaau

SEQ ID NO: 2368291 - RNA, 16 nt, Human
aagaaauugcaauaac

SEQ ID NO: 2368292 - RNA, 20 nt, Human
aagaacaaaaaaaucugcag

SEQ ID NO: 2368293 - RNA, 21 nt, Human
aagaacaaaaaaaucugcaga

SEQ ID NO: 2368294 - RNA, 21 nt, Human
aagauuuguuuugucaagugu

SEQ ID NO: 2368295 - RNA, 16 nt, Human
aagauuuuaaagacau

SEQ ID NO: 2368296 - RNA, 13 nt, Human
aagauuucuugag

SEQ ID NO: 2368297 - RNA, 22 nt, Human
aagauuugaugcuggagagguu

SEQ ID NO: 2368298 - RNA, 23 nt, Human
aagauuugaugcuggagagguua

SEQ ID NO: 2368299 - RNA, 16 nt, Human
aagauuugcuuuaauu

SEQ ID NO: 2368300 - RNA, 17 nt, Human
aagauuuggaauaaagu

SEQ ID NO: 2368301 - RNA, 17 nt, Human
aagauuuccaagugcca

SEQ ID NO: 2368302 - RNA, 18 nt, Human
aagauuuaucaaaucagu

SEQ ID NO: 2368303 - RNA, 16 nt, Human
aagauuuccauauaaa

SEQ ID NO: 2368304 - RNA, 14 nt, Human
aagauuuaucaaau

SEQ ID NO: 2368305 - RNA, 17 nt, Human
aagauuuaucaaaucag

SEQ ID NO: 2368306 - RNA, 16 nt, Human
aagauugcuuaaaaua

SEQ ID NO: 2368307 - RNA, 16 nt, Human
aagauugcugaaauuu

SEQ ID NO: 2368308 - RNA, 18 nt, Human
aagaacauccaaggagaa

SEQ ID NO: 2368309 - RNA, 16 nt, Human
aagaacauagaacucu

SEQ ID NO: 2368310 - RNA, 16 nt, Human
aagauuuaccacuugu

SEQ ID NO: 2368311 - RNA, 22 nt, Human
aaggcaccuauaaaacagguca

SEQ ID NO: 2368312 - RNA, 20 nt, Human
aaggcaaguuucuagcuaga

SEQ ID NO: 2368313 - RNA, 22 nt, Human
aaggcaaugccauccucaaaca

SEQ ID NO: 2368314 - RNA, 14 nt, Human
aaggcaaaaaugua

SEQ ID NO: 2368315 - RNA, 16 nt, Human
aaggcaaggcugucaa

SEQ ID NO: 2368316 - RNA, 17 nt, Human
aaggcaaggcugucaau

SEQ ID NO: 2368317 - RNA, 18 nt, Human
aaggcaaggcugucaauu

SEQ ID NO: 2368318 - RNA, 13 nt, Human
aagcugggcaggu

SEQ ID NO: 2368319 - RNA, 13 nt, Human
aaggaccaggacu

SEQ ID NO: 2368320 - RNA, 12 nt, Human
aaggaccaggac

SEQ ID NO: 2368321 - RNA, 16 nt, Human
aaggaccacauuuuau

SEQ ID NO: 2368322 - RNA, 19 nt, Human
aaggaccacauuuuauauu

SEQ ID NO: 2368323 - RNA, 23 nt, Human
aaggaccacauuuuauauuuauu

SEQ ID NO: 2368324 - RNA, 18 nt, Human
aaggacauugcggacagc

SEQ ID NO: 2368325 - RNA, 21 nt, Human
aagcugccuguaguuaggaaa

SEQ ID NO: 2368326 - RNA, 19 nt, Human
aagcugccuguaguuagga

SEQ ID NO: 2368327 - RNA, 16 nt, Human
aagcugccuguaguua

SEQ ID NO: 2368328 - RNA, 15 nt, Human
aagcugccuguaguu

SEQ ID NO: 2368329 - RNA, 22 nt, Human
aagcugccuguaguuaggaaau

SEQ ID NO: 2368330 - RNA, 16 nt, Human
aagcugcucuggaauu

SEQ ID NO: 2368331 - RNA, 11 nt, Human
aagcugggcag

SEQ ID NO: 2368332 - RNA, 21 nt, Human
aagcuggccgaggguccuggc

SEQ ID NO: 2368333 - RNA, 22 nt, Human
aagcuggccgaggguccuggcu

SEQ ID NO: 2368334 - RNA, 20 nt, Human
aaggaccccucaccuugcaa

SEQ ID NO: 2368335 - RNA, 15 nt, Human
aaggaccccucaccu

SEQ ID NO: 2368336 - RNA, 13 nt, Human
aaggaccccucac

SEQ ID NO: 2368337 - RNA, 20 nt, Human
aaggaccacauuuuauauuu

SEQ ID NO: 2368338 - RNA, 18 nt, Human
aaggacccggaggggccu

SEQ ID NO: 2368339 - RNA, 21 nt, Human
aaggacccggaggggccuggc

SEQ ID NO: 2368340 - RNA, 15 nt, Human
aaggacuaggguccu

SEQ ID NO: 2368341 - RNA, 12 nt, Human
aaggacucuggg

SEQ ID NO: 2368342 - RNA, 13 nt, Human
aaggacuccaccc

SEQ ID NO: 2368343 - RNA, 20 nt, Human
aaggacuaggguccugggga

SEQ ID NO: 2368344 - RNA, 18 nt, Human
aaggacuaggguccuggg

SEQ ID NO: 2368345 - RNA, 22 nt, Human
aaggacugccgaccgaggcugg

SEQ ID NO: 2368346 - RNA, 13 nt, Human
aaggacugaggga

SEQ ID NO: 2368347 - RNA, 17 nt, Human
aaggacugagggacucu

SEQ ID NO: 2368348 - RNA, 23 nt, Human
aaggacugcgggacuugggucuc

SEQ ID NO: 2368349 - RNA, 17 nt, Human
aaggauugugauauuuu

SEQ ID NO: 2368350 - RNA, 20 nt, Human
aaggacugugacaggcagca

SEQ ID NO: 2368351 - RNA, 21 nt, Human
aaggacugugacaggcagcag

SEQ ID NO: 2368352 - RNA, 14 nt, Human
aaggauugugauau

SEQ ID NO: 2368353 - RNA, 13 nt, Human
aaggauuuuaugc

SEQ ID NO: 2368354 - RNA, 12 nt, Human
aaggauuuuaug

SEQ ID NO: 2368355 - RNA, 23 nt, Human
aaggauuuuaugcuuuaaacauu

SEQ ID NO: 2368356 - RNA, 22 nt, Human
aaggauuuuaugcuuuaaacau

SEQ ID NO: 2368357 - RNA, 21 nt, Human
aaggauuuuaugcuuuaaaca

SEQ ID NO: 2368358 - RNA, 20 nt, Human
aaggauuuuaugcuuuaaac

SEQ ID NO: 2368359 - RNA, 16 nt, Human
aaggauuuuaugcuuu

SEQ ID NO: 2368360 - RNA, 14 nt, Human
aagcugccuguagu

SEQ ID NO: 2368361 - RNA, 20 nt, Human
aagcugccugguauauccaa

SEQ ID NO: 2368362 - RNA, 15 nt, Human
aagcugccugguaua

SEQ ID NO: 2368363 - RNA, 17 nt, Human
aagcugccugcuuuuca

SEQ ID NO: 2368364 - RNA, 20 nt, Human
aagcugccugcuuuucacug

SEQ ID NO: 2368365 - RNA, 12 nt, Human
aagcugccugcu

SEQ ID NO: 2368366 - RNA, 15 nt, Human
aagcugccugcuuuu

SEQ ID NO: 2368367 - RNA, 22 nt, Human
aagcugcacccucaggcaggug

SEQ ID NO: 2368368 - RNA, 23 nt, Human
aagcugccuccccucuccuuccu

SEQ ID NO: 2368369 - RNA, 20 nt, Human
aagcugcacccucaggcagg

SEQ ID NO: 2368370 - RNA, 21 nt, Human
aagcugcacccucaggcaggu

SEQ ID NO: 2368371 - RNA, 11 nt, Human
aagcuaaagag

SEQ ID NO: 2368372 - RNA, 23 nt, Human
aagcuaaaaccugagcuagaagc

SEQ ID NO: 2368373 - RNA, 21 nt, Human
aagcuaaauccuuuacuguua

SEQ ID NO: 2368374 - RNA, 12 nt, Human
aagcguggugga

SEQ ID NO: 2368375 - RNA, 16 nt, Human
aagcuaaaaccugagc

SEQ ID NO: 2368376 - RNA, 14 nt, Human
aagucuccuucccc

SEQ ID NO: 2368377 - RNA, 17 nt, Human
aagucucuagguucuga

SEQ ID NO: 2368378 - RNA, 19 nt, Human
aagucucugaagugaaacu

SEQ ID NO: 2368379 - RNA, 15 nt, Human
aagucucugcuggcc

SEQ ID NO: 2368380 - RNA, 22 nt, Human
aagucucugaagugaaacugcu

SEQ ID NO: 2368381 - RNA, 22 nt, Human
aaguccccaggccccaggaagc

SEQ ID NO: 2368382 - RNA, 19 nt, Human
aagucccugacucucugug

SEQ ID NO: 2368383 - RNA, 23 nt, Human
aaguccccaggccccaggaagcc

SEQ ID NO: 2368384 - RNA, 21 nt, Human
aaguccccaggccccaggaag

SEQ ID NO: 2368385 - RNA, 18 nt, Human
aaguccccaggccccagg

SEQ ID NO: 2368386 - RNA, 14 nt, Human
aaguccccaggccc

SEQ ID NO: 2368387 - RNA, 21 nt, Human
aaguccccgaguuuccccaga

SEQ ID NO: 2368388 - RNA, 18 nt, Human
aagucucuuuucuuuaga

SEQ ID NO: 2368389 - RNA, 21 nt, Human
aagucucugcuggcccagcca

SEQ ID NO: 2368390 - RNA, 16 nt, Human
aagucucugcuggccc

SEQ ID NO: 2368391 - RNA, 19 nt, Human
aagucucuggaauuugaaa

SEQ ID NO: 2368392 - RNA, 23 nt, Human
aagucuguuuuaugacuucauua

SEQ ID NO: 2368393 - RNA, 20 nt, Human
aagucuguuuuaugacuuca

SEQ ID NO: 2368394 - RNA, 17 nt, Human
aagucuuaaaauaacuu

SEQ ID NO: 2368395 - RNA, 18 nt, Human
aagucuuaaaauaacuua

SEQ ID NO: 2368396 - RNA, 23 nt, Human
aagucuuaaaauaacuuauauca

SEQ ID NO: 2368397 - RNA, 19 nt, Human
aagucuguuuuaugacuuc

SEQ ID NO: 2368398 - RNA, 18 nt, Human
aagucuguuuuaugacuu

SEQ ID NO: 2368399 - RNA, 16 nt, Human
aagucuguuuuaugac

SEQ ID NO: 2368400 - RNA, 15 nt, Human
aagucuguuuuauga

SEQ ID NO: 2368401 - RNA, 16 nt, Human
aagucuuagauguaua

SEQ ID NO: 2368402 - RNA, 13 nt, Human
aaguauguaaaca

SEQ ID NO: 2368403 - RNA, 17 nt, Human
aaguaugagggaaaaug

SEQ ID NO: 2368404 - RNA, 21 nt, Human
aaguaugagggaaaaugagua

SEQ ID NO: 2368405 - RNA, 18 nt, Human
aaguaucuuuuuucaaaa

SEQ ID NO: 2368406 - RNA, 22 nt, Human
aaguaucugacaucucugcaau

SEQ ID NO: 2368407 - RNA, 14 nt, Human
aaguaucuucaugu

SEQ ID NO: 2368408 - RNA, 14 nt, Human
aaguaugaaucuau

SEQ ID NO: 2368409 - RNA, 16 nt, Human
aaguaugaaucuaugc

SEQ ID NO: 2368410 - RNA, 23 nt, Human
aaguaugaaucuaugccaaagau

SEQ ID NO: 2368411 - RNA, 15 nt, Human
aaguaucaugcauuc

SEQ ID NO: 2368412 - RNA, 12 nt, Human
aaguaucaugca

SEQ ID NO: 2368413 - RNA, 14 nt, Human
aaguaucaugcauu

SEQ ID NO: 2368414 - RNA, 15 nt, Human
aaguaucugacaucu

SEQ ID NO: 2368415 - RNA, 16 nt, Human
aaguaucccuacugua

SEQ ID NO: 2368416 - RNA, 18 nt, Human
aaguaugugagugugucc

SEQ ID NO: 2368417 - RNA, 18 nt, Human
aaguauguguaaaaugug

SEQ ID NO: 2368418 - RNA, 13 nt, Human
aaguaugugagug

SEQ ID NO: 2368419 - RNA, 22 nt, Human
aaguauguaaaguauguaaaca

SEQ ID NO: 2368420 - RNA, 21 nt, Human
aaguauguaaacaggagacag

SEQ ID NO: 2368421 - RNA, 12 nt, Human
aaguauguaaag

SEQ ID NO: 2368422 - RNA, 23 nt, Human
aaguccaggcuuuuuuaucaugu

SEQ ID NO: 2368423 - RNA, 13 nt, Human
aaguauauauuua

SEQ ID NO: 2368424 - RNA, 16 nt, Human
aaguauauauagaauc

SEQ ID NO: 2368425 - RNA, 11 nt, Human
aaguauauaua

SEQ ID NO: 2368426 - RNA, 18 nt, Human
aaguauauaaugguuuca

SEQ ID NO: 2368427 - RNA, 23 nt, Human
aaguauauaaugguuucaaagau

SEQ ID NO: 2368428 - RNA, 11 nt, Human
aaguaucaugc

SEQ ID NO: 2368429 - RNA, 18 nt, Human
aaguauauauauauauua

SEQ ID NO: 2368430 - RNA, 12 nt, Human
aaguauauaaug

SEQ ID NO: 2368431 - RNA, 11 nt, Human
aaguacuucuu

SEQ ID NO: 2368432 - RNA, 21 nt, Human
aagguuuaggcugguggccca

SEQ ID NO: 2368433 - RNA, 20 nt, Human
aagguuuaggcugguggccc

SEQ ID NO: 2368434 - RNA, 19 nt, Human
aagguuuaggcugguggcc

SEQ ID NO: 2368435 - RNA, 15 nt, Human
aagguuuaggcuggu

SEQ ID NO: 2368436 - RNA, 21 nt, Human
aagguuuacaauuuacaaagu

SEQ ID NO: 2368437 - RNA, 14 nt, Human
aaguacuuuuggca

SEQ ID NO: 2368438 - RNA, 15 nt, Human
aaguacuuuuggcau

SEQ ID NO: 2368439 - RNA, 16 nt, Human
aagguuaagcccugag

SEQ ID NO: 2368440 - RNA, 17 nt, Human
aagguuguauugcauau

SEQ ID NO: 2368441 - RNA, 22 nt, Human
aagguuuaaacuucucugaagg

SEQ ID NO: 2368442 - RNA, 23 nt, Human
aagguuuaaacuucucugaaggg

SEQ ID NO: 2368443 - RNA, 13 nt, Human
aagguuguauugc

SEQ ID NO: 2368444 - RNA, 16 nt, Human
aagguugggcagggug

SEQ ID NO: 2368445 - RNA, 22 nt, Human
aagguugacaauaaaugugcuu

SEQ ID NO: 2368446 - RNA, 21 nt, Human
aagguucuucccuuuuacaua

SEQ ID NO: 2368447 - RNA, 18 nt, Human
aagguucuggugugaacu

SEQ ID NO: 2368448 - RNA, 20 nt, Human
aagguuaauguucaucaucc

SEQ ID NO: 2368449 - RNA, 16 nt, Human
aagguuaauaaaguaa

SEQ ID NO: 2368450 - RNA, 15 nt, Human
aagguuaauaaagua

SEQ ID NO: 2368451 - RNA, 16 nt, Human
aaggugggcugagccc

SEQ ID NO: 2368452 - RNA, 17 nt, Human
aaggugggccuugcuac

SEQ ID NO: 2368453 - RNA, 19 nt, Human
aagguggauggccccagca

SEQ ID NO: 2368454 - RNA, 19 nt, Human
aaggugggcugagcccugg

SEQ ID NO: 2368455 - RNA, 18 nt, Human
aaggugggcugagcccug

SEQ ID NO: 2368456 - RNA, 22 nt, Human
aaggugggccuugcuaccucaa

SEQ ID NO: 2368457 - RNA, 20 nt, Human
aagguggacuggaaggggcc

SEQ ID NO: 2368458 - RNA, 15 nt, Human
aaggugcuggaggug

SEQ ID NO: 2368459 - RNA, 20 nt, Human
aaggugcuggaggugggagc

SEQ ID NO: 2368460 - RNA, 11 nt, Human
aaggugggagg

SEQ ID NO: 2368461 - RNA, 18 nt, Human
aaggugcugacggccagg

SEQ ID NO: 2368462 - RNA, 22 nt, Human
aauaaguuaacuauuuuauuuu

SEQ ID NO: 2368463 - RNA, 11 nt, Human
aauaaguuauu

SEQ ID NO: 2368464 - RNA, 17 nt, Human
aauaagugguuauuucu

SEQ ID NO: 2368465 - RNA, 17 nt, Human
aauaagugccaggaugg

SEQ ID NO: 2368466 - RNA, 15 nt, Human
aauaaacucuaaaca

SEQ ID NO: 2368467 - RNA, 17 nt, Human
aauaaacuuagaauaaa

SEQ ID NO: 2368468 - RNA, 19 nt, Human
aauaaacuuagaauaaaau

SEQ ID NO: 2368469 - RNA, 21 nt, Human
aauaaacuuagaauaaaauug

SEQ ID NO: 2368470 - RNA, 17 nt, Human
aauaaacuguguuuacu

SEQ ID NO: 2368471 - RNA, 18 nt, Human
aauaaacucaaugagcuc

SEQ ID NO: 2368472 - RNA, 18 nt, Human
aauaaacuggcagcucag

SEQ ID NO: 2368473 - RNA, 19 nt, Human
aauaaacuauuuguaaagu

SEQ ID NO: 2368474 - RNA, 14 nt, Human
aauaaaaugugauu

SEQ ID NO: 2368475 - RNA, 13 nt, Human
aauaaaaugugau

SEQ ID NO: 2368476 - RNA, 21 nt, Human
aauaaaaugugauuuuucuga

SEQ ID NO: 2368477 - RNA, 17 nt, Human
aauaaaauguugaaaag

SEQ ID NO: 2368478 - RNA, 23 nt, Human
aauaaaauuaaagcugaaaacug

SEQ ID NO: 2368479 - RNA, 15 nt, Human
aauaaaauuauuuug

SEQ ID NO: 2368480 - RNA, 14 nt, Human
aauaaaauugcacu

SEQ ID NO: 2368481 - RNA, 21 nt, Human
aaguuguuacuaacuaaacuc

SEQ ID NO: 2368482 - RNA, 23 nt, Human
aaguuguuacuaacuaaacucuc

SEQ ID NO: 2368483 - RNA, 17 nt, Human
aaguuguuaacuaaauu

SEQ ID NO: 2368484 - RNA, 20 nt, Human
aaguuguuacuaacuaaacu

SEQ ID NO: 2368485 - RNA, 16 nt, Human
aaguuguggugcugac

SEQ ID NO: 2368486 - RNA, 20 nt, Human
aaguuguggugcugacaaag

SEQ ID NO: 2368487 - RNA, 15 nt, Human
aaguuguuucauuga

SEQ ID NO: 2368488 - RNA, 12 nt, Human
aaguuguuugag

SEQ ID NO: 2368489 - RNA, 15 nt, Human
aaguuguuaauaaaa

SEQ ID NO: 2368490 - RNA, 15 nt, Human
aaguugugcuuguuu

SEQ ID NO: 2368491 - RNA, 19 nt, Human
aaguugugccuuuuauagc

SEQ ID NO: 2368492 - RNA, 20 nt, Human
aaguugugccuuuuauagcu

SEQ ID NO: 2368493 - RNA, 22 nt, Human
aaguuguaggcauaaagucagg

SEQ ID NO: 2368494 - RNA, 18 nt, Human
aaguugugccuuuuauag

SEQ ID NO: 2368495 - RNA, 20 nt, Human
aaguguaaagcauuccaaca

SEQ ID NO: 2368496 - RNA, 18 nt, Human
aaguguaaagcauuccaa

SEQ ID NO: 2368497 - RNA, 13 nt, Human
aagugguauagaa

SEQ ID NO: 2368498 - RNA, 17 nt, Human
aagugguauagaaaugc

SEQ ID NO: 2368499 - RNA, 17 nt, Human
aagugcuuccaaggcag

SEQ ID NO: 2368500 - RNA, 20 nt, Human
aaguggguuauucuggaguu

SEQ ID NO: 2368501 - RNA, 18 nt, Human
aaguggugguaacccugg

SEQ ID NO: 2368502 - RNA, 17 nt, Human
aaguggugguaacccug

SEQ ID NO: 2368503 - RNA, 13 nt, Human
aaguggugcucag

SEQ ID NO: 2368504 - RNA, 15 nt, Human
aaguggugcucaguu

SEQ ID NO: 2368505 - RNA, 17 nt, Human
aaguggugcucaguugu

SEQ ID NO: 2368506 - RNA, 19 nt, Human
aaguggugcucaguuguag

SEQ ID NO: 2368507 - RNA, 22 nt, Human
aaguguaaaauauuuugaauca

SEQ ID NO: 2368508 - RNA, 17 nt, Human
aaguguaaacaccauag

SEQ ID NO: 2368509 - RNA, 11 nt, Human
aaguguaaagc

SEQ ID NO: 2368510 - RNA, 13 nt, Human
aaguguaaagcau

SEQ ID NO: 2368511 - RNA, 14 nt, Human
aaguguaaagcauu

SEQ ID NO: 2368512 - RNA, 16 nt, Human
aaguguaaagcauucc

SEQ ID NO: 2368513 - RNA, 17 nt, Human
aaguguaaagcauucca

SEQ ID NO: 2368514 - RNA, 19 nt, Human
aauaauguacaucuggccu

SEQ ID NO: 2368515 - RNA, 20 nt, Human
aauaauggucccauccaggc

SEQ ID NO: 2368516 - RNA, 21 nt, Human
aauaauggucccauccaggca

SEQ ID NO: 2368517 - RNA, 17 nt, Human
aauaaugguaccagaua

SEQ ID NO: 2368518 - RNA, 20 nt, Human
aauaaugguaccagauaaaa

SEQ ID NO: 2368519 - RNA, 21 nt, Human
aauaaugguaccagauaaaau

SEQ ID NO: 2368520 - RNA, 23 nt, Human
aauaaugguaccagauaaaauua

SEQ ID NO: 2368521 - RNA, 13 nt, Human
aauaaugucucug

SEQ ID NO: 2368522 - RNA, 11 nt, Human
aauaaugucuc

SEQ ID NO: 2368523 - RNA, 12 nt, Human
aauaaugucucu

SEQ ID NO: 2368524 - RNA, 16 nt, Human
aauaaugugaaacugg

SEQ ID NO: 2368525 - RNA, 12 nt, Human
aauaauguaaga

SEQ ID NO: 2368526 - RNA, 19 nt, Human
aauaauguaagacaaauau

SEQ ID NO: 2368527 - RNA, 20 nt, Human
aauaaugggcuuagagcagu

SEQ ID NO: 2368528 - RNA, 19 nt, Human
aauaaugggcuuagagcag

SEQ ID NO: 2368529 - RNA, 13 nt, Human
aauaaugguacca

SEQ ID NO: 2368530 - RNA, 13 nt, Human
aauaauaaacuuu

SEQ ID NO: 2368531 - RNA, 13 nt, Human
aauaaucauugga

SEQ ID NO: 2368532 - RNA, 21 nt, Human
aauaaucacgcuuuccugaau

SEQ ID NO: 2368533 - RNA, 20 nt, Human
aauaaucacgcuuuccugaa

SEQ ID NO: 2368534 - RNA, 22 nt, Human
aauaaguucaaauucuucugaa

SEQ ID NO: 2368535 - RNA, 21 nt, Human
aauaaguucaaauucuucuga

SEQ ID NO: 2368536 - RNA, 18 nt, Human
aauaaguuauugcaguuu

SEQ ID NO: 2368537 - RNA, 13 nt, Human
aauaaguuauugc

SEQ ID NO: 2368538 - RNA, 14 nt, Human
aauaaguuauugca

SEQ ID NO: 2368539 - RNA, 14 nt, Human
aauaaucuuugggu

SEQ ID NO: 2368540 - RNA, 22 nt, Human
aauaaugaauggacucaaacug

SEQ ID NO: 2368541 - RNA, 23 nt, Human
aauaaucuuauuagggagaaaau

SEQ ID NO: 2368542 - RNA, 19 nt, Human
aauaaucuuauuagggaga

SEQ ID NO: 2368543 - RNA, 13 nt, Human
aauaaucuuauua

SEQ ID NO: 2368544 - RNA, 16 nt, Human
aauaaucggcccacag

SEQ ID NO: 2368545 - RNA, 13 nt, Human
aauaaucggccca

SEQ ID NO: 2368546 - RNA, 16 nt, Human
aauaaucuauuucuau

SEQ ID NO: 2368547 - RNA, 21 nt, Human
aauaauccuaaacauaugaau

SEQ ID NO: 2368548 - RNA, 22 nt, Human
aagugcugggauuacaggugug

SEQ ID NO: 2368549 - RNA, 23 nt, Human
aagugcuguauaaaaucagccaa

SEQ ID NO: 2368550 - RNA, 19 nt, Human
aagugcuguauaaaaucag

SEQ ID NO: 2368551 - RNA, 22 nt, Human
aagugcuguauaaaaucagcca

SEQ ID NO: 2368552 - RNA, 12 nt, Human
aagugcuguaua

SEQ ID NO: 2368553 - RNA, 13 nt, Human
aagugcuguauaa

SEQ ID NO: 2368554 - RNA, 15 nt, Human
aagugcuguauaaaa

SEQ ID NO: 2368555 - RNA, 16 nt, Human
aagugcuguauaaaau

SEQ ID NO: 2368556 - RNA, 17 nt, Human
aagugcuguauaaaauc

SEQ ID NO: 2368557 - RNA, 18 nt, Human
cacagugucuguaucgga

SEQ ID NO: 2368558 - RNA, 21 nt, Human
cacagugucugggcugacugg

SEQ ID NO: 2368559 - RNA, 14 nt, Human
cacagugucugggc

SEQ ID NO: 2368560 - RNA, 16 nt, Human
cacagugucugggcug

SEQ ID NO: 2368561 - RNA, 17 nt, Human
cacagugucugggcuga

SEQ ID NO: 2368562 - RNA, 20 nt, Human
cacagugucugggcugacug

SEQ ID NO: 2368563 - RNA, 13 nt, Human
cacagugucuggg

SEQ ID NO: 2368564 - RNA, 14 nt, Human
cacagugggagcca

SEQ ID NO: 2368565 - RNA, 18 nt, Human
cacagugggagccagggc

SEQ ID NO: 2368566 - RNA, 19 nt, Human
cacagugggagccagggcu

SEQ ID NO: 2368567 - RNA, 15 nt, Human
cacagugguggcagg

SEQ ID NO: 2368568 - RNA, 23 nt, Human
cacagugguggcagggccuagcu

SEQ ID NO: 2368569 - RNA, 17 nt, Human
cacagugguggcagggc

SEQ ID NO: 2368570 - RNA, 19 nt, Human
cacagugguggcagggccu

SEQ ID NO: 2368571 - RNA, 20 nt, Human
cacaguuccucgcccugggu

SEQ ID NO: 2368572 - RNA, 19 nt, Human
cacaguuccucgcccuggg

SEQ ID NO: 2368573 - RNA, 16 nt, Human
cacaguuccucgcccu

SEQ ID NO: 2368574 - RNA, 14 nt, Human
cacaguucucuccu

SEQ ID NO: 2368575 - RNA, 15 nt, Human
cacaguucucuccuu

SEQ ID NO: 2368576 - RNA, 20 nt, Human
cacaguucuuugggccagac

SEQ ID NO: 2368577 - RNA, 19 nt, Human
cacaguucuuugggccaga

SEQ ID NO: 2368578 - RNA, 18 nt, Human
cacaguucuuugggccag

SEQ ID NO: 2368579 - RNA, 19 nt, Human
cacaguucgaccugcggcu

SEQ ID NO: 2368580 - RNA, 14 nt, Human
cacagugcaucuca

SEQ ID NO: 2368581 - RNA, 11 nt, Human
cacagugauuu

SEQ ID NO: 2368582 - RNA, 14 nt, Human
cacagugauuuuuu

SEQ ID NO: 2368583 - RNA, 22 nt, Human
cacagugagucgaggacaggga

SEQ ID NO: 2368584 - RNA, 21 nt, Human
cacagugagucgaggacaggg

SEQ ID NO: 2368585 - RNA, 13 nt, Human
cacaguccuuacc

SEQ ID NO: 2368586 - RNA, 15 nt, Human
cacaguccuuaccag

SEQ ID NO: 2368587 - RNA, 21 nt, Human
cacaguccuuaccagcagagc

SEQ ID NO: 2368588 - RNA, 22 nt, Human
cacaguccuuaccagcagagca

SEQ ID NO: 2368589 - RNA, 11 nt, Human
cacaggcaggu

SEQ ID NO: 2368590 - RNA, 18 nt, Human
cacaggagugggaaaaca

SEQ ID NO: 2368591 - RNA, 14 nt, Human
cacaggcaggucca

SEQ ID NO: 2368592 - RNA, 15 nt, Human
cacaggcagguccag

SEQ ID NO: 2368593 - RNA, 22 nt, Human
cacaggaggagaaaucucacuu

SEQ ID NO: 2368594 - RNA, 14 nt, Human
cacaggagggaggg

SEQ ID NO: 2368595 - RNA, 21 nt, Human
cacaggagggagggggaaggc

SEQ ID NO: 2368596 - RNA, 19 nt, Human
cacaggagggagggggaag

SEQ ID NO: 2368597 - RNA, 14 nt, Human
cacagcuuccccuc

SEQ ID NO: 2368598 - RNA, 22 nt, Human
cacagcuucagccaggagcugg

SEQ ID NO: 2368599 - RNA, 18 nt, Human
cacagcuucagccaggag

SEQ ID NO: 2368600 - RNA, 19 nt, Human
cacagcuucagccaggagc

SEQ ID NO: 2368601 - RNA, 15 nt, Human
cacagcuuccccucu

SEQ ID NO: 2368602 - RNA, 15 nt, Human
cacaggagcauuugg

SEQ ID NO: 2368603 - RNA, 23 nt, Human
caauuuguaaaaacagcauugcu

SEQ ID NO: 2368604 - RNA, 23 nt, Human
caauuuguaauugcuuacauuuu

SEQ ID NO: 2368605 - RNA, 16 nt, Human
caauuuguuugugcuu

SEQ ID NO: 2368606 - RNA, 18 nt, Human
caauuuguuugugcuucu

SEQ ID NO: 2368607 - RNA, 19 nt, Human
caauuuguuugugcuucua

SEQ ID NO: 2368608 - RNA, 14 nt, Human
cacagcugcuggag

SEQ ID NO: 2368609 - RNA, 15 nt, Human
cacagcugcuggaga

SEQ ID NO: 2368610 - RNA, 19 nt, Human
caauuuguaaaaacagcau

SEQ ID NO: 2368611 - RNA, 18 nt, Human
caauuugggagauauauu

SEQ ID NO: 2368612 - RNA, 19 nt, Human
caauuugggagauauauuu

SEQ ID NO: 2368613 - RNA, 22 nt, Human
cacagcugggguggggaccuca

SEQ ID NO: 2368614 - RNA, 23 nt, Human
cacagcugggguggggaccucag

SEQ ID NO: 2368615 - RNA, 14 nt, Human
cacagcuucagcca

SEQ ID NO: 2368616 - RNA, 17 nt, Human
cacagcuucagccagga

SEQ ID NO: 2368617 - RNA, 14 nt, Human
cacagcugggcugu

SEQ ID NO: 2368618 - RNA, 15 nt, Human
cacagcugggcugug

SEQ ID NO: 2368619 - RNA, 20 nt, Human
cacagcugcuggagacuccu

SEQ ID NO: 2368620 - RNA, 14 nt, Human
cacagcugcuuucu

SEQ ID NO: 2368621 - RNA, 20 nt, Human
cacagcugcuuucuguuguc

SEQ ID NO: 2368622 - RNA, 14 nt, Human
cacagcuggccucc

SEQ ID NO: 2368623 - RNA, 21 nt, Human
cacagcuucauuuccuguguc

SEQ ID NO: 2368624 - RNA, 22 nt, Human
cacagcuucauuuccugugucu

SEQ ID NO: 2368625 - RNA, 21 nt, Human
cacaguucuuugggccagaca

SEQ ID NO: 2368626 - RNA, 22 nt, Human
cacaguuccucgcccugggucu

SEQ ID NO: 2368627 - RNA, 13 nt, Human
cacauacccuccc

SEQ ID NO: 2368628 - RNA, 15 nt, Human
cacauacccuccccc

SEQ ID NO: 2368629 - RNA, 22 nt, Human
cacauacccucuucauggaugg

SEQ ID NO: 2368630 - RNA, 19 nt, Human
cacauacccucuucaugga

SEQ ID NO: 2368631 - RNA, 16 nt, Human
cacauacuugagacug

SEQ ID NO: 2368632 - RNA, 20 nt, Human
cacauacgcaccacaucucu

SEQ ID NO: 2368633 - RNA, 18 nt, Human
cacauagcauguaauggu

SEQ ID NO: 2368634 - RNA, 15 nt, Human
cacauagagaucauc

SEQ ID NO: 2368635 - RNA, 14 nt, Human
cacauaucugucau

SEQ ID NO: 2368636 - RNA, 20 nt, Human
cacaguuuucugagaaagac

SEQ ID NO: 2368637 - RNA, 19 nt, Human
cacaguuuucugagaaaga

SEQ ID NO: 2368638 - RNA, 17 nt, Human
cacaguuuucugagaaa

SEQ ID NO: 2368639 - RNA, 16 nt, Human
cacaguuuucugagaa

SEQ ID NO: 2368640 - RNA, 13 nt, Human
cacauaugagggg

SEQ ID NO: 2368641 - RNA, 16 nt, Human
cacauagcugucuaga

SEQ ID NO: 2368642 - RNA, 18 nt, Human
cacauaugcaccuugugu

SEQ ID NO: 2368643 - RNA, 13 nt, Human
cacauagcugucu

SEQ ID NO: 2368644 - RNA, 19 nt, Human
cacauaugcaccuuguguc

SEQ ID NO: 2368645 - RNA, 20 nt, Human
cacauaugcaccuugugucu

SEQ ID NO: 2368646 - RNA, 21 nt, Human
cacauaugcaccuugugucug

SEQ ID NO: 2368647 - RNA, 22 nt, Human
cacauaugcaccuugugucugu

SEQ ID NO: 2368648 - RNA, 16 nt, Human
caaaaacuacacauau

SEQ ID NO: 2368649 - RNA, 17 nt, Human
caaaaaccucacccgag

SEQ ID NO: 2368650 - RNA, 23 nt, Human
caaaaacuuuggaguccccucac

SEQ ID NO: 2368651 - RNA, 22 nt, Human
caaaaacuguauugaugacagu

SEQ ID NO: 2368652 - RNA, 13 nt, Human
caaaaacuuguua

SEQ ID NO: 2368653 - RNA, 16 nt, Human
caaaaacagccucaca

SEQ ID NO: 2368654 - RNA, 15 nt, Human
caaaaacagccucac

SEQ ID NO: 2368655 - RNA, 22 nt, Human
caaaaacagccucacagaagaa

SEQ ID NO: 2368656 - RNA, 13 nt, Human
caaaaaggcagga

SEQ ID NO: 2368657 - RNA, 22 nt, Human
caaaaagcucuuacacuacauu

SEQ ID NO: 2368658 - RNA, 15 nt, Human
caaaaagcaaaauca

SEQ ID NO: 2368659 - RNA, 16 nt, Human
caaaaagcaaaaucau

SEQ ID NO: 2368660 - RNA, 21 nt, Human
caaaaagaacaaaaaaaucug

SEQ ID NO: 2368661 - RNA, 13 nt, Human
caaaaagaccaga

SEQ ID NO: 2368662 - RNA, 14 nt, Human
caaaaagaccagac

SEQ ID NO: 2368663 - RNA, 15 nt, Human
caaaaagaccagacu

SEQ ID NO: 2368664 - RNA, 12 nt, Human
caaaaagaacaa

SEQ ID NO: 2368665 - RNA, 13 nt, Human
caaaaagaacaaa

SEQ ID NO: 2368666 - RNA, 14 nt, Human
caaaaagaacaaaa

SEQ ID NO: 2368667 - RNA, 19 nt, Human
caaaaagaacaaaaaaauc

SEQ ID NO: 2368668 - RNA, 16 nt, Human
caaaaaauuagccggg

SEQ ID NO: 2368669 - RNA, 18 nt, Human
caaaaaauuagccgggcg

SEQ ID NO: 2368670 - RNA, 17 nt, Human
auuuuguaaacucaaaa

SEQ ID NO: 2368671 - RNA, 21 nt, Human
auuuugguuguauucuuugau

SEQ ID NO: 2368672 - RNA, 10 nt, Human
auuuuguaaa

SEQ ID NO: 2368673 - RNA, 14 nt, Human
caaaaacacagcaa

SEQ ID NO: 2368674 - RNA, 13 nt, Human
caaaaacacagca

SEQ ID NO: 2368675 - RNA, 14 nt, Human
caaaaacagccuca

SEQ ID NO: 2368676 - RNA, 13 nt, Human
caaaaacagccuc

SEQ ID NO: 2368677 - RNA, 22 nt, Human
caaaaacacaguguuuuuguaa

SEQ ID NO: 2368678 - RNA, 23 nt, Human
caaaaacacaguguuuuuguaaa

SEQ ID NO: 2368679 - RNA, 20 nt, Human
caaaaacacaguguuuuugu

SEQ ID NO: 2368680 - RNA, 20 nt, Human
caaaaacauggccuuugcuu

SEQ ID NO: 2368681 - RNA, 17 nt, Human
caaaaacacagcaaggg

SEQ ID NO: 2368682 - RNA, 15 nt, Human
caaaaacacagcaag

SEQ ID NO: 2368683 - RNA, 14 nt, Human
auuuucuacagugg

SEQ ID NO: 2368684 - RNA, 21 nt, Human
auuuucuaccuggucucuccu

SEQ ID NO: 2368685 - RNA, 16 nt, Human
auuuucuagacuuucu

SEQ ID NO: 2368686 - RNA, 18 nt, Human
auuuucuagacuuucugu

SEQ ID NO: 2368687 - RNA, 21 nt, Human
auuuuggagaaauuauuuaau

SEQ ID NO: 2368688 - RNA, 19 nt, Human
auuuucuagacuuucuguu

SEQ ID NO: 2368689 - RNA, 20 nt, Human
auuuuggagaguuuccugaa

SEQ ID NO: 2368690 - RNA, 21 nt, Human
auuuugggguacccacugcuc

SEQ ID NO: 2368691 - RNA, 21 nt, Human
auuuuggagaguuuccugaaa

SEQ ID NO: 2368692 - RNA, 22 nt, Human
auuuuggagaguuuccugaaac

SEQ ID NO: 2368693 - RNA, 13 nt, Human
auuuuccuuuuuu

SEQ ID NO: 2368694 - RNA, 17 nt, Human
auuuuccuuuuuuauac

SEQ ID NO: 2368695 - RNA, 18 nt, Human
auuuuccuuuuuuauaca

SEQ ID NO: 2368696 - RNA, 20 nt, Human
auuuuccuuuuuuauacaca

SEQ ID NO: 2368697 - RNA, 21 nt, Human
auuuuccuuuuuuauacacau

SEQ ID NO: 2368698 - RNA, 22 nt, Human
auuuuccuuuuuuauacacaua

SEQ ID NO: 2368699 - RNA, 16 nt, Human
auuuuccuugaagccg

SEQ ID NO: 2368700 - RNA, 14 nt, Human
auuuuccuuuucaa

SEQ ID NO: 2368701 - RNA, 13 nt, Human
auuuuccuugaag

SEQ ID NO: 2368702 - RNA, 14 nt, Human
auuuuccuugaagc

SEQ ID NO: 2368703 - RNA, 15 nt, Human
auuuuccuugaagcc

SEQ ID NO: 2368704 - RNA, 13 nt, Human
auuuuccugaaaa

SEQ ID NO: 2368705 - RNA, 22 nt, Human
auuuugggguacccacugcucu

SEQ ID NO: 2368706 - RNA, 23 nt, Human
auuuugggguacccacugcucug

SEQ ID NO: 2368707 - RNA, 19 nt, Human
auuuuggguuuugggucuu

SEQ ID NO: 2368708 - RNA, 22 nt, Human
auuuugguaaaauacuucuuga

SEQ ID NO: 2368709 - RNA, 15 nt, Human
auuuugguacuuuua

SEQ ID NO: 2368710 - RNA, 20 nt, Human
auuuugguauuacacuguau

SEQ ID NO: 2368711 - RNA, 21 nt, Human
auuuugguauuacacuguauu

SEQ ID NO: 2368712 - RNA, 16 nt, Human
auuuugggaaucuuuu

SEQ ID NO: 2368713 - RNA, 15 nt, Human
auuuugggaaucuuu

SEQ ID NO: 2368714 - RNA, 20 nt, Human
auuuugggguuguguuguca

SEQ ID NO: 2368715 - RNA, 16 nt, Human
caaaaaaugcuugcuu

SEQ ID NO: 2368716 - RNA, 17 nt, Human
auuuugguuuuguuccc

SEQ ID NO: 2368717 - RNA, 21 nt, Human
auuuugguuuuguuccccucc

SEQ ID NO: 2368718 - RNA, 22 nt, Human
auuuugguuuuguuccccuccu

SEQ ID NO: 2368719 - RNA, 23 nt, Human
auuuugguuuuguuccccuccuc

SEQ ID NO: 2368720 - RNA, 18 nt, Human
auuuugguccaaguugug

SEQ ID NO: 2368721 - RNA, 15 nt, Human
auuuuggugagaaau

SEQ ID NO: 2368722 - RNA, 14 nt, Human
auuuuggugagaaa

SEQ ID NO: 2368723 - RNA, 21 nt, Human
auuuuggugagaaaugggacu

SEQ ID NO: 2368724 - RNA, 16 nt, Human
auuuuggugagaaaug

SEQ ID NO: 2368725 - RNA, 16 nt, Human
auuuugguuuuguucc

SEQ ID NO: 2368726 - RNA, 19 nt, Human
auuuugguuguauucuuug

SEQ ID NO: 2368727 - RNA, 20 nt, Human
auuuugguuguauucuuuga

SEQ ID NO: 2368728 - RNA, 14 nt, Human
auuuugguuguauu

SEQ ID NO: 2368729 - RNA, 15 nt, Human
auuuugguuguauuc

SEQ ID NO: 2368730 - RNA, 16 nt, Human
auuuugguuguauucu

SEQ ID NO: 2368731 - RNA, 17 nt, Human
auuuugguuguauucuu

SEQ ID NO: 2368732 - RNA, 18 nt, Human
caaaacagcguuuaagac

SEQ ID NO: 2368733 - RNA, 19 nt, Human
caaaacagagaugugauaa

SEQ ID NO: 2368734 - RNA, 23 nt, Human
caaaacagcguuuaagacuguaa

SEQ ID NO: 2368735 - RNA, 22 nt, Human
caaaacaugucuccuauccugg

SEQ ID NO: 2368736 - RNA, 13 nt, Human
caaaaccacagcc

SEQ ID NO: 2368737 - RNA, 20 nt, Human
caaaacaaguuuuucuguca

SEQ ID NO: 2368738 - RNA, 21 nt, Human
caaaacaaaugccacacauca

SEQ ID NO: 2368739 - RNA, 19 nt, Human
caaaacacucggcauuuca

SEQ ID NO: 2368740 - RNA, 21 nt, Human
caaaaccacagcccugucagu

SEQ ID NO: 2368741 - RNA, 19 nt, Human
caaaaccacagcccuguca

SEQ ID NO: 2368742 - RNA, 18 nt, Human
caaaaccacagcccuguc

SEQ ID NO: 2368743 - RNA, 16 nt, Human
caaaaccacagcccug

SEQ ID NO: 2368744 - RNA, 13 nt, Human
caaaacccaccuu

SEQ ID NO: 2368745 - RNA, 15 nt, Human
caaaacccagaccug

SEQ ID NO: 2368746 - RNA, 13 nt, Human
caaaacccagacc

SEQ ID NO: 2368747 - RNA, 21 nt, Human
caaaaccugauguuaaaauuc

SEQ ID NO: 2368748 - RNA, 18 nt, Human
caaaaccugauguuaaaa

SEQ ID NO: 2368749 - RNA, 19 nt, Human
caaaaccccacuacacagu

SEQ ID NO: 2368750 - RNA, 21 nt, Human
caaaagaaaaaaaaaagcacc

SEQ ID NO: 2368751 - RNA, 13 nt, Human
caaaacuuaacau

SEQ ID NO: 2368752 - RNA, 23 nt, Human
caaaacuucagacauagaauuaa

SEQ ID NO: 2368753 - RNA, 17 nt, Human
caaaauaaaaaugaggu

SEQ ID NO: 2368754 - RNA, 19 nt, Human
caaaagaacaagaauuucu

SEQ ID NO: 2368755 - RNA, 19 nt, Human
caaaauaaaaagugacaca

SEQ ID NO: 2368756 - RNA, 21 nt, Human
caaaauaaaaagugacacagc

SEQ ID NO: 2368757 - RNA, 22 nt, Human
caaaacugccucaggaggcagg

SEQ ID NO: 2368758 - RNA, 14 nt, Human
caaaacugugcaga

SEQ ID NO: 2368759 - RNA, 22 nt, Human
caaaacucuccucugcugcugg

SEQ ID NO: 2368760 - RNA, 20 nt, Human
caaaacucuccucugcugcu

SEQ ID NO: 2368761 - RNA, 21 nt, Human
caaaacucuccucugcugcug

SEQ ID NO: 2368762 - RNA, 23 nt, Human
caaaacaaaaauuagguauuuug

SEQ ID NO: 2368763 - RNA, 22 nt, Human
caaaacaaaaauuagguauuuu

SEQ ID NO: 2368764 - RNA, 18 nt, Human
caaaacaaaaauuaggua

SEQ ID NO: 2368765 - RNA, 19 nt, Human
caaaaauuugcuucacuca

SEQ ID NO: 2368766 - RNA, 17 nt, Human
caaaacaaaaauuaggu

SEQ ID NO: 2368767 - RNA, 19 nt, Human
caaaaauucaacucagacu

SEQ ID NO: 2368768 - RNA, 16 nt, Human
caaaaauucucaguuc

SEQ ID NO: 2368769 - RNA, 18 nt, Human
caaaaauuagguauuuug

SEQ ID NO: 2368770 - RNA, 16 nt, Human
caaaaauuagguauuu

SEQ ID NO: 2368771 - RNA, 11 nt, Human
caaaaauuagg

SEQ ID NO: 2368772 - RNA, 20 nt, Human
caaaaauuagccgggcgugg

SEQ ID NO: 2368773 - RNA, 17 nt, Human
caaaaauuagccgggcg

SEQ ID NO: 2368774 - RNA, 15 nt, Human
caaaaauuagccggg

SEQ ID NO: 2368775 - RNA, 17 nt, Human
caaaaauuagccgggca

SEQ ID NO: 2368776 - RNA, 19 nt, Human
caaaaaugaaagcaugucu

SEQ ID NO: 2368777 - RNA, 17 nt, Human
caaaaaugaacugaagu

SEQ ID NO: 2368778 - RNA, 11 nt, Human
caaaaauauaa

SEQ ID NO: 2368779 - RNA, 12 nt, Human
caaaaauaaaua

SEQ ID NO: 2368780 - RNA, 17 nt, Human
caaaaaguguuuauuuu

SEQ ID NO: 2368781 - RNA, 22 nt, Human
caaaaauauuuauaaaacuucu

SEQ ID NO: 2368782 - RNA, 14 nt, Human
caaaaauauuuaua

SEQ ID NO: 2368783 - RNA, 15 nt, Human
caaaaauauaacuua

SEQ ID NO: 2368784 - RNA, 12 nt, Human
caaaaauauaaa

SEQ ID NO: 2368785 - RNA, 23 nt, Human
caaaaauauaaaauaugaagaca

SEQ ID NO: 2368786 - RNA, 20 nt, Human
caaaaagggaaacuauuguc

SEQ ID NO: 2368787 - RNA, 11 nt, Human
caaaaaguguu

SEQ ID NO: 2368788 - RNA, 12 nt, Human
caaaaaguguuu

SEQ ID NO: 2368789 - RNA, 15 nt, Human
caaaaaguuuccaua

SEQ ID NO: 2368790 - RNA, 14 nt, Human
caaaaagcuucccc

SEQ ID NO: 2368791 - RNA, 13 nt, Human
caaaaagcuuccc

SEQ ID NO: 2368792 - RNA, 19 nt, Human
caaaaaucucaauauuuca

SEQ ID NO: 2368793 - RNA, 15 nt, Human
caaaauguaggguua

SEQ ID NO: 2368794 - RNA, 13 nt, Human
caaaaugucugua

SEQ ID NO: 2368795 - RNA, 22 nt, Human
caaaaugucuguagcuccucaa

SEQ ID NO: 2368796 - RNA, 23 nt, Human
caaaauguaggcuuaguuugugu

SEQ ID NO: 2368797 - RNA, 23 nt, Human
caaaaugcuuuuuauuucugcau

SEQ ID NO: 2368798 - RNA, 20 nt, Human
caaaaugcuuuuuauuucug

SEQ ID NO: 2368799 - RNA, 18 nt, Human
caaaaugcuuuuuauuuc

SEQ ID NO: 2368800 - RNA, 18 nt, Human
caaaaugcucuagugccu

SEQ ID NO: 2368801 - RNA, 22 nt, Human
caaaaugaggaauguauauguu

SEQ ID NO: 2368802 - RNA, 20 nt, Human
caaaaugauggacccaaugc

SEQ ID NO: 2368803 - RNA, 14 nt, Human
caaaauaaaacuuu

SEQ ID NO: 2368804 - RNA, 22 nt, Human
caaaauaaaaagugacacagca

SEQ ID NO: 2368805 - RNA, 23 nt, Human
caaaauaaaaagugacacagcag

SEQ ID NO: 2368806 - RNA, 12 nt, Human
caaaauaaaacu

SEQ ID NO: 2368807 - RNA, 16 nt, Human
caaaauuauuucagaa

SEQ ID NO: 2368808 - RNA, 17 nt, Human
caaaauuauuucagaaa

SEQ ID NO: 2368809 - RNA, 15 nt, Human
caaaauuauuucaga

SEQ ID NO: 2368810 - RNA, 20 nt, Human
caaaauuaccaaaaaucuug

SEQ ID NO: 2368811 - RNA, 21 nt, Human
caaaauguuggucauuuuaug

SEQ ID NO: 2368812 - RNA, 18 nt, Human
caaaauguuggucauuuu

SEQ ID NO: 2368813 - RNA, 17 nt, Human
caaaauguuggucauuu

SEQ ID NO: 2368814 - RNA, 16 nt, Human
caaaauuguuacaaau

SEQ ID NO: 2368815 - RNA, 17 nt, Human
caaaauugcaaaucuug

SEQ ID NO: 2368816 - RNA, 16 nt, Human
caaaauugcaaaucuu

SEQ ID NO: 2368817 - RNA, 22 nt, Human
caaaauugauguguuuauuuau

SEQ ID NO: 2368818 - RNA, 13 nt, Human
caaaauugacauu

SEQ ID NO: 2368819 - RNA, 17 nt, Human
caaaauugacauugcuu

SEQ ID NO: 2368820 - RNA, 19 nt, Human
caaaauugacauugcuuua

SEQ ID NO: 2368821 - RNA, 11 nt, Human
caaaauuccca

SEQ ID NO: 2368822 - RNA, 13 nt, Human
caaaauucccagg

SEQ ID NO: 2368823 - RNA, 21 nt, Human
caaaauucgaccugauuuaca

SEQ ID NO: 2368824 - RNA, 23 nt, Human
caaaauucgaccugauuuacagu

SEQ ID NO: 2368825 - RNA, 15 nt, Human
caaaauugauguguu

SEQ ID NO: 2368826 - RNA, 16 nt, Human
caaaauugauguguuu

SEQ ID NO: 2368827 - RNA, 23 nt, Human
caaacacauuaagccuuccacac

SEQ ID NO: 2368828 - RNA, 21 nt, Human
caaacacaguuacacuugugc

SEQ ID NO: 2368829 - RNA, 15 nt, Human
caaacacauacagga

SEQ ID NO: 2368830 - RNA, 17 nt, Human
caaacaauggaaacuga

SEQ ID NO: 2368831 - RNA, 20 nt, Human
caaaauuuaguuuuuguucu

SEQ ID NO: 2368832 - RNA, 21 nt, Human
caaaauuuaguuuuuguucuu

SEQ ID NO: 2368833 - RNA, 14 nt, Human
caaacacaaaugca

SEQ ID NO: 2368834 - RNA, 15 nt, Human
caaacacaaaugcag

SEQ ID NO: 2368835 - RNA, 19 nt, Human
caaacaauggaaacugaau

SEQ ID NO: 2368836 - RNA, 20 nt, Human
caaacaauggaaacugaaug

SEQ ID NO: 2368837 - RNA, 21 nt, Human
caaacaauggaaacugaaugc

SEQ ID NO: 2368838 - RNA, 22 nt, Human
caaacaauggaaacugaaugcu

SEQ ID NO: 2368839 - RNA, 23 nt, Human
caaaauugggaaaggaguagaaa

SEQ ID NO: 2368840 - RNA, 22 nt, Human
caaaauugcaaaucuugaaauu

SEQ ID NO: 2368841 - RNA, 20 nt, Human
caaaauuguuuugagcuuuc

SEQ ID NO: 2368842 - RNA, 22 nt, Human
caaaauuguuuugagcuuucca

SEQ ID NO: 2368843 - RNA, 23 nt, Human
caaaauuguuuugagcuuuccau

SEQ ID NO: 2368844 - RNA, 17 nt, Human
caaaauuuaguuuuugu

SEQ ID NO: 2368845 - RNA, 16 nt, Human
caaaauuuuuucucua

SEQ ID NO: 2368846 - RNA, 21 nt, Human
caaaauuuuuucucuaggaaa

SEQ ID NO: 2368847 - RNA, 22 nt, Human
caaaauuuuuucucuaggaaau

SEQ ID NO: 2368848 - RNA, 13 nt, Human
caaacacauuaag

SEQ ID NO: 2368849 - RNA, 17 nt, Human
caaaccgccagcgaacu

SEQ ID NO: 2368850 - RNA, 21 nt, Human
caaaccgccagcgaacuugac

SEQ ID NO: 2368851 - RNA, 23 nt, Human
caaaccgccagcgaacuugacaa

SEQ ID NO: 2368852 - RNA, 15 nt, Human
caaaccuccucuucu

SEQ ID NO: 2368853 - RNA, 20 nt, Human
caaaccuagccccuuagccc

SEQ ID NO: 2368854 - RNA, 12 nt, Human
caaaccucuguu

SEQ ID NO: 2368855 - RNA, 11 nt, Human
caaaccucugu

SEQ ID NO: 2368856 - RNA, 21 nt, Human
caaaccuccaaaacuccugcc

SEQ ID NO: 2368857 - RNA, 14 nt, Human
caaacccuucagug

SEQ ID NO: 2368858 - RNA, 20 nt, Human
caaacccuucagugccaaaa

SEQ ID NO: 2368859 - RNA, 17 nt, Human
caaacgccuccccugcc

SEQ ID NO: 2368860 - RNA, 14 nt, Human
caaacgccuccccu

SEQ ID NO: 2368861 - RNA, 13 nt, Human
caaacgcuaaaga

SEQ ID NO: 2368862 - RNA, 21 nt, Human
caaacgcuaaagagcccuugc

SEQ ID NO: 2368863 - RNA, 22 nt, Human
caaacgcuaaagagcccuugcc

SEQ ID NO: 2368864 - RNA, 23 nt, Human
caaacgcuaaagagcccuugccu

SEQ ID NO: 2368865 - RNA, 19 nt, Human
caaaccucuguucagugua

SEQ ID NO: 2368866 - RNA, 15 nt, Human
caaaccucuguucag

SEQ ID NO: 2368867 - RNA, 14 nt, Human
caaaccucuguuca

SEQ ID NO: 2368868 - RNA, 13 nt, Human
caaaccucuguuc

SEQ ID NO: 2368869 - RNA, 17 nt, Human
caaacgcugccugccca

SEQ ID NO: 2368870 - RNA, 16 nt, Human
caaacgcugccugccc

SEQ ID NO: 2368871 - RNA, 19 nt, Human
caaacguauguaaauguau

SEQ ID NO: 2368872 - RNA, 15 nt, Human
caaacgcugccugcc

SEQ ID NO: 2368873 - RNA, 14 nt, Human
caaacgcugccugc

SEQ ID NO: 2368874 - RNA, 13 nt, Human
caaacgcugccug

SEQ ID NO: 2368875 - RNA, 12 nt, Human
caaacgcugccu

SEQ ID NO: 2368876 - RNA, 13 nt, Human
caaaggccagggu

SEQ ID NO: 2368877 - RNA, 15 nt, Human
caaaggccaggguca

SEQ ID NO: 2368878 - RNA, 13 nt, Human
caaaggccaugga

SEQ ID NO: 2368879 - RNA, 19 nt, Human
caaaggccauggagagcug

SEQ ID NO: 2368880 - RNA, 20 nt, Human
caaaggccauggagagcugg

SEQ ID NO: 2368881 - RNA, 21 nt, Human
caaaggccauggagagcugga

SEQ ID NO: 2368882 - RNA, 23 nt, Human
caaaggccauggagagcuggagc

SEQ ID NO: 2368883 - RNA, 23 nt, Human
caaaggcgcagugcuucucuaca

SEQ ID NO: 2368884 - RNA, 14 nt, Human
caaaggcugagaac

SEQ ID NO: 2368885 - RNA, 23 nt, Human
caaaggcugagaacacugugaaa

SEQ ID NO: 2368886 - RNA, 11 nt, Human
caaaggcuggg

SEQ ID NO: 2368887 - RNA, 17 nt, Human
caaaggccccagcaucu

SEQ ID NO: 2368888 - RNA, 13 nt, Human
caaaggcccccua

SEQ ID NO: 2368889 - RNA, 16 nt, Human
caaaggguaucaggug

SEQ ID NO: 2368890 - RNA, 18 nt, Human
caaaggguaucaggugcu

SEQ ID NO: 2368891 - RNA, 16 nt, Human
caaaggaagucuagga

SEQ ID NO: 2368892 - RNA, 19 nt, Human
caaaggaaucuccaguuuu

SEQ ID NO: 2368893 - RNA, 22 nt, Human
caaaggaaucuccaguuuucag

SEQ ID NO: 2368894 - RNA, 20 nt, Human
caaaggcacagugaaggcug

SEQ ID NO: 2368895 - RNA, 21 nt, Human
caaaggaaggacccugaggcc

SEQ ID NO: 2368896 - RNA, 17 nt, Human
caaaggaagguggaugg

SEQ ID NO: 2368897 - RNA, 14 nt, Human
caaaggaagcacau

SEQ ID NO: 2368898 - RNA, 23 nt, Human
caaagcucuauuaagauuuccaa

SEQ ID NO: 2368899 - RNA, 22 nt, Human
caaagcuaggguggcccuugca

SEQ ID NO: 2368900 - RNA, 21 nt, Human
caaagcuaggguggcccuugc

SEQ ID NO: 2368901 - RNA, 21 nt, Human
caaagccuugugucuacagag

SEQ ID NO: 2368902 - RNA, 23 nt, Human
caaagccuugugucuacagagaa

SEQ ID NO: 2368903 - RNA, 19 nt, Human
caaagcugaugacaacuuc

SEQ ID NO: 2368904 - RNA, 12 nt, Human
caaaggaagcac

SEQ ID NO: 2368905 - RNA, 13 nt, Human
caaaggaagcaca

SEQ ID NO: 2368906 - RNA, 13 nt, Human
caaagcuaggccu

SEQ ID NO: 2368907 - RNA, 14 nt, Human
caaagcuaggccug

SEQ ID NO: 2368908 - RNA, 19 nt, Human
caaagcuaggccuggccag

SEQ ID NO: 2368909 - RNA, 20 nt, Human
caaagcgaauuuuaaaagau

SEQ ID NO: 2368910 - RNA, 19 nt, Human
caaacuagggccaagccca

SEQ ID NO: 2368911 - RNA, 14 nt, Human
caaacuauuucuua

SEQ ID NO: 2368912 - RNA, 18 nt, Human
caaacuauuucuuauaua

SEQ ID NO: 2368913 - RNA, 17 nt, Human
caaacucaccugccccu

SEQ ID NO: 2368914 - RNA, 14 nt, Human
caaacguauguaaa

SEQ ID NO: 2368915 - RNA, 13 nt, Human
caaacuaagcccc

SEQ ID NO: 2368916 - RNA, 18 nt, Human
caaacgcugccugcccac

SEQ ID NO: 2368917 - RNA, 13 nt, Human
caaacuagggcca

SEQ ID NO: 2368918 - RNA, 19 nt, Human
caaacuaagcccccgcugu

SEQ ID NO: 2368919 - RNA, 20 nt, Human
caaacuaagcccccgcugua

SEQ ID NO: 2368920 - RNA, 16 nt, Human
caaacuacauguaauc

SEQ ID NO: 2368921 - RNA, 13 nt, Human
caaacuguugauu

SEQ ID NO: 2368922 - RNA, 20 nt, Human
caaacuguaaauaaaaagaa

SEQ ID NO: 2368923 - RNA, 14 nt, Human
caaacuguaaauaa

SEQ ID NO: 2368924 - RNA, 21 nt, Human
caaacuguaaauaaaaagaaa

SEQ ID NO: 2368925 - RNA, 21 nt, Human
caaacuggggccuccagaacu

SEQ ID NO: 2368926 - RNA, 17 nt, Human
caaacuggggccucccu

SEQ ID NO: 2368927 - RNA, 12 nt, Human
caaacuguaaau

SEQ ID NO: 2368928 - RNA, 19 nt, Human
caaacuggggccuccagaa

SEQ ID NO: 2368929 - RNA, 16 nt, Human
caaacuggggccucca

SEQ ID NO: 2368930 - RNA, 18 nt, Human
caaacucacugcucaaga

SEQ ID NO: 2368931 - RNA, 19 nt, Human
caaacucacugcucaagaa

SEQ ID NO: 2368932 - RNA, 14 nt, Human
caaacucagccuca

SEQ ID NO: 2368933 - RNA, 15 nt, Human
caaagccagacagca

SEQ ID NO: 2368934 - RNA, 14 nt, Human
caaagccagacagc

SEQ ID NO: 2368935 - RNA, 18 nt, Human
caaagccagaagcugagc

SEQ ID NO: 2368936 - RNA, 16 nt, Human
caaagccagaagcuga

SEQ ID NO: 2368937 - RNA, 14 nt, Human
caaagccagaagcu

SEQ ID NO: 2368938 - RNA, 13 nt, Human
caaagccagaagc

SEQ ID NO: 2368939 - RNA, 11 nt, Human
caaagccagaa

SEQ ID NO: 2368940 - RNA, 12 nt, Human
caaagccagaac

SEQ ID NO: 2368941 - RNA, 22 nt, Human
caaagccaaagcuaggccuggc

SEQ ID NO: 2368942 - RNA, 22 nt, Human
caaagccaacagucaaaacaga

SEQ ID NO: 2368943 - RNA, 18 nt, Human
caaagcccuuccaugucg

SEQ ID NO: 2368944 - RNA, 22 nt, Human
caaagccagcguccuccucugu

SEQ ID NO: 2368945 - RNA, 23 nt, Human
caaagccagcguccuccucugug

SEQ ID NO: 2368946 - RNA, 21 nt, Human
caaagccagcguccuccucug

SEQ ID NO: 2368947 - RNA, 20 nt, Human
caaagccagcguccuccucu

SEQ ID NO: 2368948 - RNA, 18 nt, Human
caaagccuccuccagccg

SEQ ID NO: 2368949 - RNA, 17 nt, Human
caaagccuccuccagcc

SEQ ID NO: 2368950 - RNA, 19 nt, Human
caaagcgaauuuuaaaaga

SEQ ID NO: 2368951 - RNA, 14 nt, Human
caaagcgaauuuua

SEQ ID NO: 2368952 - RNA, 11 nt, Human
caaagccuuau

SEQ ID NO: 2368953 - RNA, 18 nt, Human
caaagccuuaucaagugu

SEQ ID NO: 2368954 - RNA, 17 nt, Human
caaagccuugugucuac

SEQ ID NO: 2368955 - RNA, 21 nt, Human
caaauacuguguuucagaagc

SEQ ID NO: 2368956 - RNA, 14 nt, Human
caaauacucuuagg

SEQ ID NO: 2368957 - RNA, 17 nt, Human
caaauacucauguguau

SEQ ID NO: 2368958 - RNA, 18 nt, Human
caaauacucauguguaug

SEQ ID NO: 2368959 - RNA, 14 nt, Human
caaauacucaugug

SEQ ID NO: 2368960 - RNA, 15 nt, Human
caaauacucaugugu

SEQ ID NO: 2368961 - RNA, 16 nt, Human
caaauacucaugugua

SEQ ID NO: 2368962 - RNA, 22 nt, Human
caaagggggaggcuaaagccca

SEQ ID NO: 2368963 - RNA, 12 nt, Human
caaaggcuggga

SEQ ID NO: 2368964 - RNA, 13 nt, Human
caaaggcugggac

SEQ ID NO: 2368965 - RNA, 20 nt, Human
caaagugcugggauuacagg

SEQ ID NO: 2368966 - RNA, 23 nt, Human
caaagugcugggauuacaggugu

SEQ ID NO: 2368967 - RNA, 19 nt, Human
caaagugcugggauuacag

SEQ ID NO: 2368968 - RNA, 19 nt, Human
caaaggguaucaggugcug

SEQ ID NO: 2368969 - RNA, 20 nt, Human
caaaugguaggcauuuccua

SEQ ID NO: 2368970 - RNA, 15 nt, Human
caaaugguaggcauu

SEQ ID NO: 2368971 - RNA, 13 nt, Human
caaaugguaggca

SEQ ID NO: 2368972 - RNA, 23 nt, Human
caaauggggccagauccagccug

SEQ ID NO: 2368973 - RNA, 20 nt, Human
caaauggggccagauccagc

SEQ ID NO: 2368974 - RNA, 19 nt, Human
caaauggggccagauccag

SEQ ID NO: 2368975 - RNA, 18 nt, Human
caaauggggccagaucca

SEQ ID NO: 2368976 - RNA, 17 nt, Human
caaauggggccagaucc

SEQ ID NO: 2368977 - RNA, 16 nt, Human
caaauggggccagauc

SEQ ID NO: 2368978 - RNA, 15 nt, Human
caaauggggccagau

SEQ ID NO: 2368979 - RNA, 14 nt, Human
caaauggggccaga

SEQ ID NO: 2368980 - RNA, 20 nt, Human
caaauauuagaugugauuua

SEQ ID NO: 2368981 - RNA, 23 nt, Human
caaauauuagaugugauuuaaua

SEQ ID NO: 2368982 - RNA, 15 nt, Human
caaauauuagaugug

SEQ ID NO: 2368983 - RNA, 16 nt, Human
caaauauuagauguga

SEQ ID NO: 2368984 - RNA, 17 nt, Human
caaauauuagaugugau

SEQ ID NO: 2368985 - RNA, 19 nt, Human
caaauauuagaugugauuu

SEQ ID NO: 2368986 - RNA, 13 nt, Human
caaauauguccug

SEQ ID NO: 2368987 - RNA, 14 nt, Human
caaauauguccugg

SEQ ID NO: 2368988 - RNA, 15 nt, Human
caaauauguccuggg

SEQ ID NO: 2368989 - RNA, 17 nt, Human
caaauauguccuggggu

SEQ ID NO: 2368990 - RNA, 21 nt, Human
caaauaugcaaagcacugacu

SEQ ID NO: 2368991 - RNA, 19 nt, Human
caaauaugcaaagcacuga

SEQ ID NO: 2368992 - RNA, 19 nt, Human
caaauuguaucuagugcag

SEQ ID NO: 2368993 - RNA, 18 nt, Human
caaauuguaucuagugca

SEQ ID NO: 2368994 - RNA, 22 nt, Human
caaauuguaucuagugcagcug

SEQ ID NO: 2368995 - RNA, 15 nt, Human
caaauugugugaaag

SEQ ID NO: 2368996 - RNA, 21 nt, Human
caaauuguaagcaugcacaaa

SEQ ID NO: 2368997 - RNA, 11 nt, Human
caaauuucuaa

SEQ ID NO: 2368998 - RNA, 14 nt, Human
caaauuucuaaauc

SEQ ID NO: 2368999 - RNA, 12 nt, Human
caaauuucuaaa

SEQ ID NO: 2369000 - RNA, 21 nt, Human
caaauguaauugaauaaaguu

SEQ ID NO: 2369001 - RNA, 16 nt, Human
caaaugucagauacaa

SEQ ID NO: 2369002 - RNA, 19 nt, Human
caaaugucagauacaaugu

SEQ ID NO: 2369003 - RNA, 20 nt, Human
caaaugucagauacaaugua

SEQ ID NO: 2369004 - RNA, 17 nt, Human
caaaugucaucagaacu

SEQ ID NO: 2369005 - RNA, 18 nt, Human
caaaugucaucagaacuu

SEQ ID NO: 2369006 - RNA, 18 nt, Human
caaauguaauugaauaaa

SEQ ID NO: 2369007 - RNA, 23 nt, Human
caaaugguuuaacuucugccugu

SEQ ID NO: 2369008 - RNA, 19 nt, Human
caaauguccuccagaagcc

SEQ ID NO: 2369009 - RNA, 18 nt, Human
caaauguccuccagaagc

SEQ ID NO: 2369010 - RNA, 15 nt, Human
caaauuauuaaugaa

SEQ ID NO: 2369011 - RNA, 17 nt, Human
caaauuauuaaugaaaa

SEQ ID NO: 2369012 - RNA, 12 nt, Human
caaauuauuugu

SEQ ID NO: 2369013 - RNA, 14 nt, Human
caaauuauuugugu

SEQ ID NO: 2369014 - RNA, 15 nt, Human
caaauuauuugugua

SEQ ID NO: 2369015 - RNA, 16 nt, Human
caaauuauuuguguaa

SEQ ID NO: 2369016 - RNA, 20 nt, Human
caaauuauuuguguaauaga

SEQ ID NO: 2369017 - RNA, 17 nt, Human
caaauuauuuguguaau

SEQ ID NO: 2369018 - RNA, 18 nt, Human
caaauuauuuguguaaua

SEQ ID NO: 2369019 - RNA, 17 nt, Human
caaauuguaagcaugca

SEQ ID NO: 2369020 - RNA, 22 nt, Human
caagccagcgggaauggcagcu

SEQ ID NO: 2369021 - RNA, 17 nt, Human
caagccguggcuucccg

SEQ ID NO: 2369022 - RNA, 21 nt, Human
caagccagauuuuccugaaaa

SEQ ID NO: 2369023 - RNA, 13 nt, Human
caagcagggagga

SEQ ID NO: 2369024 - RNA, 15 nt, Human
caagcagggcucugc

SEQ ID NO: 2369025 - RNA, 22 nt, Human
caagccaccaacauacucccau

SEQ ID NO: 2369026 - RNA, 13 nt, Human
caagccagaggcu

SEQ ID NO: 2369027 - RNA, 15 nt, Human
caagccagaggcugg

SEQ ID NO: 2369028 - RNA, 16 nt, Human
caagccagaggcuggg

SEQ ID NO: 2369029 - RNA, 16 nt, Human
caagcaggaagcucag

SEQ ID NO: 2369030 - RNA, 15 nt, Human
caagcaggaagcuca

SEQ ID NO: 2369031 - RNA, 14 nt, Human
caagcaggacaugg

SEQ ID NO: 2369032 - RNA, 21 nt, Human
caagcaggaagcucagacugg

SEQ ID NO: 2369033 - RNA, 17 nt, Human
caagcaggaagcucaga

SEQ ID NO: 2369034 - RNA, 16 nt, Human
caagcaggaaguucaa

SEQ ID NO: 2369035 - RNA, 12 nt, Human
caagcagggagg

SEQ ID NO: 2369036 - RNA, 18 nt, Human
caagcaggacauggacaa

SEQ ID NO: 2369037 - RNA, 21 nt, Human
caagccugaccacgcuuucua

SEQ ID NO: 2369038 - RNA, 18 nt, Human
caagccguggcuucccgc

SEQ ID NO: 2369039 - RNA, 14 nt, Human
caagccugccuagg

SEQ ID NO: 2369040 - RNA, 22 nt, Human
caagccugcagucaucuugacc

SEQ ID NO: 2369041 - RNA, 23 nt, Human
caagccugcacaauaaaaauguu

SEQ ID NO: 2369042 - RNA, 13 nt, Human
caagccugcaacu

SEQ ID NO: 2369043 - RNA, 19 nt, Human
caagcgauucuucugcuuc

SEQ ID NO: 2369044 - RNA, 20 nt, Human
caagcgauucuucugcuuca

SEQ ID NO: 2369045 - RNA, 22 nt, Human
caagcgauucuucugcuucagc

SEQ ID NO: 2369046 - RNA, 11 nt, Human
caagcugggcc

SEQ ID NO: 2369047 - RNA, 14 nt, Human
caagccuggcaagg

SEQ ID NO: 2369048 - RNA, 19 nt, Human
caaggagggugagugcaag

SEQ ID NO: 2369049 - RNA, 18 nt, Human
caaggaggggcuguaaaa

SEQ ID NO: 2369050 - RNA, 12 nt, Human
caaggagggaga

SEQ ID NO: 2369051 - RNA, 21 nt, Human
caaggaggcuggcuggggccu

SEQ ID NO: 2369052 - RNA, 22 nt, Human
caaggaggcuggcuggggccua

SEQ ID NO: 2369053 - RNA, 20 nt, Human
caaggaggaaaaacagacaa

SEQ ID NO: 2369054 - RNA, 14 nt, Human
caaggaggcuggcu

SEQ ID NO: 2369055 - RNA, 16 nt, Human
caaggaggcuggcugg

SEQ ID NO: 2369056 - RNA, 19 nt, Human
caaggaggcuggcuggggc

SEQ ID NO: 2369057 - RNA, 14 nt, Human
caaggaggaaaaac

SEQ ID NO: 2369058 - RNA, 13 nt, Human
caaggaggaaaaa

SEQ ID NO: 2369059 - RNA, 12 nt, Human
caaggaggaaaa

SEQ ID NO: 2369060 - RNA, 22 nt, Human
caaggagcugcuauagccuggg

SEQ ID NO: 2369061 - RNA, 20 nt, Human
caaggagggugagugcaagg

SEQ ID NO: 2369062 - RNA, 17 nt, Human
caaggaggucugugcca

SEQ ID NO: 2369063 - RNA, 21 nt, Human
caaggcugaccaagagagaaa

SEQ ID NO: 2369064 - RNA, 20 nt, Human
caaggcugaccaagagagaa

SEQ ID NO: 2369065 - RNA, 17 nt, Human
caaggcugauuaaacca

SEQ ID NO: 2369066 - RNA, 14 nt, Human
caaggacugccgac

SEQ ID NO: 2369067 - RNA, 14 nt, Human
caaggacuuccugu

SEQ ID NO: 2369068 - RNA, 22 nt, Human
caaggacugcagggacugccag

SEQ ID NO: 2369069 - RNA, 23 nt, Human
caaggacuuccuguccagcucca

SEQ ID NO: 2369070 - RNA, 22 nt, Human
caaggacuuccuguccagcucc

SEQ ID NO: 2369071 - RNA, 21 nt, Human
caaggacuuccuguccagcuc

SEQ ID NO: 2369072 - RNA, 19 nt, Human
caaggacuuccuguccagc

SEQ ID NO: 2369073 - RNA, 20 nt, Human
caaggacuugaaagcaucca

SEQ ID NO: 2369074 - RNA, 16 nt, Human
caaggacuuugcagcc

SEQ ID NO: 2369075 - RNA, 18 nt, Human
caaggacuugaaagcauc

SEQ ID NO: 2369076 - RNA, 16 nt, Human
caaggacuugaaagca

SEQ ID NO: 2369077 - RNA, 15 nt, Human
caaggacuuugcagc

SEQ ID NO: 2369078 - RNA, 13 nt, Human
caaggagcugcua

SEQ ID NO: 2369079 - RNA, 11 nt, Human
caaggagcugc

SEQ ID NO: 2369080 - RNA, 14 nt, Human
caaggagccaaaca

SEQ ID NO: 2369081 - RNA, 17 nt, Human
caagcuggucccacuca

SEQ ID NO: 2369082 - RNA, 12 nt, Human
caagcugggccc

SEQ ID NO: 2369083 - RNA, 15 nt, Human
caagcugggccccag

SEQ ID NO: 2369084 - RNA, 16 nt, Human
caagcugggccccagc

SEQ ID NO: 2369085 - RNA, 17 nt, Human
caagcugggccccagcc

SEQ ID NO: 2369086 - RNA, 18 nt, Human
caagcugggccccagccc

SEQ ID NO: 2369087 - RNA, 19 nt, Human
caagcugggccccagccca

SEQ ID NO: 2369088 - RNA, 20 nt, Human
caagcugggccccagcccac

SEQ ID NO: 2369089 - RNA, 22 nt, Human
caagcugggccccagcccaccc

SEQ ID NO: 2369090 - RNA, 17 nt, Human
caaggaaggaaagaaag

SEQ ID NO: 2369091 - RNA, 16 nt, Human
caaggaaggaaagaaa

SEQ ID NO: 2369092 - RNA, 13 nt, Human
caaggaaggaaag

SEQ ID NO: 2369093 - RNA, 12 nt, Human
caaggaaggaaa

SEQ ID NO: 2369094 - RNA, 19 nt, Human
caagcuggucccacucagu

SEQ ID NO: 2369095 - RNA, 23 nt, Human
caaggaaggaaagaaagaaggaa

SEQ ID NO: 2369096 - RNA, 18 nt, Human
caaggaaggaaagaaaga

SEQ ID NO: 2369097 - RNA, 12 nt, Human
caaggaagucaa

SEQ ID NO: 2369098 - RNA, 16 nt, Human
caaggaagccacagcu

SEQ ID NO: 2369099 - RNA, 15 nt, Human
caaggacugcaggga

SEQ ID NO: 2369100 - RNA, 16 nt, Human
caagcaguagacaagc

SEQ ID NO: 2369101 - RNA, 23 nt, Human
caaggcugaccaagagagaaaga

SEQ ID NO: 2369102 - RNA, 21 nt, Human
caaggcugucaauuacaggaa

SEQ ID NO: 2369103 - RNA, 23 nt, Human
caaggcugucaauuacaggaagu

SEQ ID NO: 2369104 - RNA, 15 nt, Human
caaggcugcagugag

SEQ ID NO: 2369105 - RNA, 12 nt, Human
caaggcugcagu

SEQ ID NO: 2369106 - RNA, 17 nt, Human
caaggggcccaaauucu

SEQ ID NO: 2369107 - RNA, 18 nt, Human
caaggcugugcucccugg

SEQ ID NO: 2369108 - RNA, 17 nt, Human
caaggcugugcucccug

SEQ ID NO: 2369109 - RNA, 18 nt, Human
caaggcuguugcaugggc

SEQ ID NO: 2369110 - RNA, 18 nt, Human
caaggggcccaaauucuu

SEQ ID NO: 2369111 - RNA, 14 nt, Human
caaggcuguugcau

SEQ ID NO: 2369112 - RNA, 15 nt, Human
caagggggacugucu

SEQ ID NO: 2369113 - RNA, 21 nt, Human
caagggggaugacaugugacu

SEQ ID NO: 2369114 - RNA, 18 nt, Human
caaggguagggugggccu

SEQ ID NO: 2369115 - RNA, 20 nt, Human
caaggucauuuuuuuuaaga

SEQ ID NO: 2369116 - RNA, 14 nt, Human
caaggucauuuuuu

SEQ ID NO: 2369117 - RNA, 16 nt, Human
caaggucgguaaguug

SEQ ID NO: 2369118 - RNA, 22 nt, Human
caagguccucugucagucacag

SEQ ID NO: 2369119 - RNA, 21 nt, Human
caagguccucugucagucaca

SEQ ID NO: 2369120 - RNA, 20 nt, Human
caagguccucugucagucac

SEQ ID NO: 2369121 - RNA, 20 nt, Human
caagucccuguaauuguugu

SEQ ID NO: 2369122 - RNA, 11 nt, Human
caagucccugu

SEQ ID NO: 2369123 - RNA, 14 nt, Human
caaguccucuuuuc

SEQ ID NO: 2369124 - RNA, 22 nt, Human
caagucccuguuuucugagccc

SEQ ID NO: 2369125 - RNA, 23 nt, Human
caagucccuguuuucugagcccg

SEQ ID NO: 2369126 - RNA, 19 nt, Human
caagucccuguuuucugag

SEQ ID NO: 2369127 - RNA, 20 nt, Human
caagucccuguuuucugagc

SEQ ID NO: 2369128 - RNA, 21 nt, Human
caagucccuguuuucugagcc

SEQ ID NO: 2369129 - RNA, 21 nt, Human
caaguguaaaauauuuugaau

SEQ ID NO: 2369130 - RNA, 23 nt, Human
caaguguaaaauauuuugaauca

SEQ ID NO: 2369131 - RNA, 14 nt, Human
caaguguauaucag

SEQ ID NO: 2369132 - RNA, 20 nt, Human
caagugucucaguccaccug

SEQ ID NO: 2369133 - RNA, 17 nt, Human
caagugucucaguccac

SEQ ID NO: 2369134 - RNA, 13 nt, Human
caagugucuucca

SEQ ID NO: 2369135 - RNA, 14 nt, Human
caagugucuuccau

SEQ ID NO: 2369136 - RNA, 22 nt, Human
caaguguaugcacgugugcaca

SEQ ID NO: 2369137 - RNA, 18 nt, Human
caaguguauaucagaaaa

SEQ ID NO: 2369138 - RNA, 16 nt, Human
caaguguauaucagaa

SEQ ID NO: 2369139 - RNA, 14 nt, Human
caaguuaaauaaau

SEQ ID NO: 2369140 - RNA, 15 nt, Human
caagugugcauauug

SEQ ID NO: 2369141 - RNA, 17 nt, Human
caagugugcauauugua

SEQ ID NO: 2369142 - RNA, 19 nt, Human
caagugugaacaaaagaug

SEQ ID NO: 2369143 - RNA, 15 nt, Human
caagugucuuccauc

SEQ ID NO: 2369144 - RNA, 14 nt, Human
caagugugaacaaa

SEQ ID NO: 2369145 - RNA, 19 nt, Human
caaguggaccuugagacca

SEQ ID NO: 2369146 - RNA, 23 nt, Human
caaguggaccuuaggccuuccuc

SEQ ID NO: 2369147 - RNA, 16 nt, Human
caaguggacucagggc

SEQ ID NO: 2369148 - RNA, 15 nt, Human
caaguggacucaggg

SEQ ID NO: 2369149 - RNA, 22 nt, Human
caaguggaccuuaggccuuccu

SEQ ID NO: 2369150 - RNA, 21 nt, Human
caaguggaccuuaggccuucc

SEQ ID NO: 2369151 - RNA, 12 nt, Human
caaguggaccuu

SEQ ID NO: 2369152 - RNA, 19 nt, Human
caaguggcucccacacccu

SEQ ID NO: 2369153 - RNA, 18 nt, Human
caaguggcagagcuugga

SEQ ID NO: 2369154 - RNA, 23 nt, Human
caaguggcagagcuuggacugga

SEQ ID NO: 2369155 - RNA, 23 nt, Human
caaguggacucagggcagcgcca

SEQ ID NO: 2369156 - RNA, 18 nt, Human
caaguggacucagggcag

SEQ ID NO: 2369157 - RNA, 16 nt, Human
caaguccugaagaggc

SEQ ID NO: 2369158 - RNA, 14 nt, Human
caaguccugaagag

SEQ ID NO: 2369159 - RNA, 15 nt, Human
caaguccugaagagg

SEQ ID NO: 2369160 - RNA, 19 nt, Human
caaguccugaagaggcggg

SEQ ID NO: 2369161 - RNA, 18 nt, Human
caagugagagcugggugu

SEQ ID NO: 2369162 - RNA, 21 nt, Human
caagugauucucaugccucag

SEQ ID NO: 2369163 - RNA, 20 nt, Human
caagugauucucaugccuca

SEQ ID NO: 2369164 - RNA, 18 nt, Human
caagugauucucaugccu

SEQ ID NO: 2369165 - RNA, 17 nt, Human
caagugauucucaugcc

SEQ ID NO: 2369166 - RNA, 21 nt, Human
caaguccucuuuucugagagg

SEQ ID NO: 2369167 - RNA, 14 nt, Human
caagugagagcugg

SEQ ID NO: 2369168 - RNA, 15 nt, Human
caagugagagcuggg

SEQ ID NO: 2369169 - RNA, 17 nt, Human
caagugagagcugggug

SEQ ID NO: 2369170 - RNA, 20 nt, Human
caagaggcuguucccaccag

SEQ ID NO: 2369171 - RNA, 16 nt, Human
caagagggaauccccg

SEQ ID NO: 2369172 - RNA, 13 nt, Human
caagagggcacug

SEQ ID NO: 2369173 - RNA, 19 nt, Human
caagagggacgccuggggg

SEQ ID NO: 2369174 - RNA, 17 nt, Human
caagagggacgccuggg

SEQ ID NO: 2369175 - RNA, 16 nt, Human
caagagcccaggccuc

SEQ ID NO: 2369176 - RNA, 16 nt, Human
caagaggcugcagcca

SEQ ID NO: 2369177 - RNA, 14 nt, Human
caagaggcugcagc

SEQ ID NO: 2369178 - RNA, 15 nt, Human
caagcaccuccugcc

SEQ ID NO: 2369179 - RNA, 14 nt, Human
caagagggcacugg

SEQ ID NO: 2369180 - RNA, 15 nt, Human
caagagggcacuggu

SEQ ID NO: 2369181 - RNA, 16 nt, Human
caagcaccuccugccu

SEQ ID NO: 2369182 - RNA, 17 nt, Human
caagcaccuccugccuc

SEQ ID NO: 2369183 - RNA, 15 nt, Human
caagacucugucuca

SEQ ID NO: 2369184 - RNA, 22 nt, Human
caagacucccucgucgagcugg

SEQ ID NO: 2369185 - RNA, 23 nt, Human
caagacgcugugcugcccugccc

SEQ ID NO: 2369186 - RNA, 18 nt, Human
caagaagacauggagacu

SEQ ID NO: 2369187 - RNA, 19 nt, Human
caagacgcugugcugcccu

SEQ ID NO: 2369188 - RNA, 19 nt, Human
caagaagaagggcacccua

SEQ ID NO: 2369189 - RNA, 22 nt, Human
caagaagaaaugcuuuccaaaa

SEQ ID NO: 2369190 - RNA, 12 nt, Human
caagaagacaug

SEQ ID NO: 2369191 - RNA, 18 nt, Human
caagacgcugugcugccc

SEQ ID NO: 2369192 - RNA, 18 nt, Human
caagacucuuuggacacu

SEQ ID NO: 2369193 - RNA, 13 nt, Human
caagagcccaggc

SEQ ID NO: 2369194 - RNA, 19 nt, Human
caagacugcacaucaaaau

SEQ ID NO: 2369195 - RNA, 14 nt, Human
caagagcccaggcc

SEQ ID NO: 2369196 - RNA, 15 nt, Human
caagagcccaggccu

SEQ ID NO: 2369197 - RNA, 14 nt, Human
caagaacucugggc

SEQ ID NO: 2369198 - RNA, 16 nt, Human
caagaaauuugauuuc

SEQ ID NO: 2369199 - RNA, 20 nt, Human
caagaacuuuccaggaaggc

SEQ ID NO: 2369200 - RNA, 14 nt, Human
caagaccuucuccu

SEQ ID NO: 2369201 - RNA, 16 nt, Human
caagaccuucuccuuc

SEQ ID NO: 2369202 - RNA, 17 nt, Human
caagaccuucuccuuca

SEQ ID NO: 2369203 - RNA, 18 nt, Human
caagaccuucuccuucac

SEQ ID NO: 2369204 - RNA, 16 nt, Human
caagacgcugugcugc

SEQ ID NO: 2369205 - RNA, 17 nt, Human
caagacgcugugcugcc

SEQ ID NO: 2369206 - RNA, 21 nt, Human
caacugaggcagacagcagcu

SEQ ID NO: 2369207 - RNA, 20 nt, Human
caacugaggcagacagcagc

SEQ ID NO: 2369208 - RNA, 17 nt, Human
caacugaggcagacagc

SEQ ID NO: 2369209 - RNA, 16 nt, Human
caacugaggcagacag

SEQ ID NO: 2369210 - RNA, 14 nt, Human
caacugaggcagac

SEQ ID NO: 2369211 - RNA, 13 nt, Human
caacugaggcaga

SEQ ID NO: 2369212 - RNA, 19 nt, Human
caacugaccagccuccaug

SEQ ID NO: 2369213 - RNA, 22 nt, Human
caacugaggcagacagcagcuc

SEQ ID NO: 2369214 - RNA, 21 nt, Human
caacuuuguggaugucuuccu

SEQ ID NO: 2369215 - RNA, 20 nt, Human
caacuuuuccuuugaauccu

SEQ ID NO: 2369216 - RNA, 22 nt, Human
caacuuuguggaugucuuccuu

SEQ ID NO: 2369217 - RNA, 18 nt, Human
caagaaaacaacuucaau

SEQ ID NO: 2369218 - RNA, 13 nt, Human
caagaaauuugau

SEQ ID NO: 2369219 - RNA, 15 nt, Human
caagaaaacaacuuc

SEQ ID NO: 2369220 - RNA, 20 nt, Human
caacacugggaaacagaggc

SEQ ID NO: 2369221 - RNA, 13 nt, Human
caacacuggugug

SEQ ID NO: 2369222 - RNA, 18 nt, Human
caacacuggugugaccug

SEQ ID NO: 2369223 - RNA, 22 nt, Human
caaccccuucgcuccugugucu

SEQ ID NO: 2369224 - RNA, 11 nt, Human
caaauuucaca

SEQ ID NO: 2369225 - RNA, 22 nt, Human
caacacucacauuuauucugcu

SEQ ID NO: 2369226 - RNA, 18 nt, Human
caacacucauugaccuga

SEQ ID NO: 2369227 - RNA, 20 nt, Human
caacacucauugaccugagg

SEQ ID NO: 2369228 - RNA, 22 nt, Human
caacacucauugaccugaggcc

SEQ ID NO: 2369229 - RNA, 16 nt, Human
caacccugccccugcc

SEQ ID NO: 2369230 - RNA, 15 nt, Human
caacccugccccugc

SEQ ID NO: 2369231 - RNA, 14 nt, Human
caacccugccccug

SEQ ID NO: 2369232 - RNA, 13 nt, Human
caacccugccccu

SEQ ID NO: 2369233 - RNA, 11 nt, Human
caacccugccc

SEQ ID NO: 2369234 - RNA, 22 nt, Human
caacccugcaaaggacuguuuu

SEQ ID NO: 2369235 - RNA, 12 nt, Human
caacccugcaaa

SEQ ID NO: 2369236 - RNA, 11 nt, Human
caacccugcaa

SEQ ID NO: 2369237 - RNA, 22 nt, Human
caacccucccucagccccucuu

SEQ ID NO: 2369238 - RNA, 21 nt, Human
caacccucccucagccccucu

SEQ ID NO: 2369239 - RNA, 20 nt, Human
caacccucccucagccccuc

SEQ ID NO: 2369240 - RNA, 19 nt, Human
caacccucccucagccccu

SEQ ID NO: 2369241 - RNA, 22 nt, Human
caacccuccuaucaccuccccu

SEQ ID NO: 2369242 - RNA, 19 nt, Human
caacccuccuaucaccucc

SEQ ID NO: 2369243 - RNA, 15 nt, Human
caacccuccuaucac

SEQ ID NO: 2369244 - RNA, 21 nt, Human
caaccgaugcuccagccaacc

SEQ ID NO: 2369245 - RNA, 18 nt, Human
caaccgaugcuccagcca

SEQ ID NO: 2369246 - RNA, 17 nt, Human
caaccgaugcuccagcc

SEQ ID NO: 2369247 - RNA, 14 nt, Human
caaccgaugcucca

SEQ ID NO: 2369248 - RNA, 23 nt, Human
caacccuggagaguucaauggcu

SEQ ID NO: 2369249 - RNA, 19 nt, Human
caacccuggcauuaugucc

SEQ ID NO: 2369250 - RNA, 22 nt, Human
caacccugccccugccccguca

SEQ ID NO: 2369251 - RNA, 13 nt, Human
caacccuggagag

SEQ ID NO: 2369252 - RNA, 23 nt, Human
caacccugccccugccccgucac

SEQ ID NO: 2369253 - RNA, 17 nt, Human
caacccuggcacccagg

SEQ ID NO: 2369254 - RNA, 16 nt, Human
caacccgaggcccgca

SEQ ID NO: 2369255 - RNA, 14 nt, Human
caacacugugcccu

SEQ ID NO: 2369256 - RNA, 15 nt, Human
caacacugugcccug

SEQ ID NO: 2369257 - RNA, 13 nt, Human
caacacugugccc

SEQ ID NO: 2369258 - RNA, 22 nt, Human
caacacuggugugaccugaggg

SEQ ID NO: 2369259 - RNA, 23 nt, Human
caacacuggugugaccugagggc

SEQ ID NO: 2369260 - RNA, 13 nt, Human
caacccucagagc

SEQ ID NO: 2369261 - RNA, 15 nt, Human
caaccuccugggcua

SEQ ID NO: 2369262 - RNA, 16 nt, Human
caaccuguaauaaaua

SEQ ID NO: 2369263 - RNA, 13 nt, Human
caaccucuggagc

SEQ ID NO: 2369264 - RNA, 17 nt, Human
caaccuguaauaaauau

SEQ ID NO: 2369265 - RNA, 18 nt, Human
caaccuguaauaaauaug

SEQ ID NO: 2369266 - RNA, 19 nt, Human
caaccuguaauaaauauga

SEQ ID NO: 2369267 - RNA, 21 nt, Human
caaccuguaauaaauaugagu

SEQ ID NO: 2369268 - RNA, 22 nt, Human
caaccuguaauaaauaugagug

SEQ ID NO: 2369269 - RNA, 18 nt, Human
caaccguuggaaacauaa

SEQ ID NO: 2369270 - RNA, 16 nt, Human
caacacugugcccugg

SEQ ID NO: 2369271 - RNA, 14 nt, Human
caaccuccugggcu

SEQ ID NO: 2369272 - RNA, 20 nt, Human
caaccggggagcccccgccc

SEQ ID NO: 2369273 - RNA, 19 nt, Human
caaccggggagcccccgcc

SEQ ID NO: 2369274 - RNA, 21 nt, Human
caaccgguggauccucaaaca

SEQ ID NO: 2369275 - RNA, 22 nt, Human
caaccgaugcuccagccaaccc

SEQ ID NO: 2369276 - RNA, 22 nt, Human
caaccgccacacacacaggagc

SEQ ID NO: 2369277 - RNA, 15 nt, Human
caacugaccagccuc

SEQ ID NO: 2369278 - RNA, 17 nt, Human
caacugaccagccucca

SEQ ID NO: 2369279 - RNA, 13 nt, Human
caacgugcauugu

SEQ ID NO: 2369280 - RNA, 15 nt, Human
caacguagcuucuac

SEQ ID NO: 2369281 - RNA, 16 nt, Human
caacgugcauugugcu

SEQ ID NO: 2369282 - RNA, 17 nt, Human
caacgugcauugugcuu

SEQ ID NO: 2369283 - RNA, 13 nt, Human
caacgucugugcc

SEQ ID NO: 2369284 - RNA, 14 nt, Human
caacgucugugcca

SEQ ID NO: 2369285 - RNA, 20 nt, Human
caaccuguuaccuacuuuga

SEQ ID NO: 2369286 - RNA, 23 nt, Human
caaccuguuaccuacuuugacuu

SEQ ID NO: 2369287 - RNA, 22 nt, Human
caaccuguuaccuacuuugacu

SEQ ID NO: 2369288 - RNA, 20 nt, Human
caaccuguucugcuuuccuc

SEQ ID NO: 2369289 - RNA, 18 nt, Human
caaccuuagauguucuaa

SEQ ID NO: 2369290 - RNA, 17 nt, Human
caaccuuagauguucua

SEQ ID NO: 2369291 - RNA, 21 nt, Human
caacggagagcgccugccccu

SEQ ID NO: 2369292 - RNA, 22 nt, Human
caacgcuuaaaggugucuuccu

SEQ ID NO: 2369293 - RNA, 21 nt, Human
caacgcuuaaaggugucuucc

SEQ ID NO: 2369294 - RNA, 19 nt, Human
caaccuucgccaccugggu

SEQ ID NO: 2369295 - RNA, 11 nt, Human
caauguuaagg

SEQ ID NO: 2369296 - RNA, 15 nt, Human
caaugugauucuaau

SEQ ID NO: 2369297 - RNA, 12 nt, Human
caaugugcagug

SEQ ID NO: 2369298 - RNA, 13 nt, Human
caaugugcagugu

SEQ ID NO: 2369299 - RNA, 14 nt, Human
caauguuaaggaaa

SEQ ID NO: 2369300 - RNA, 16 nt, Human
caauguuaaggaaacu

SEQ ID NO: 2369301 - RNA, 18 nt, Human
caauguuaaggaaacucu

SEQ ID NO: 2369302 - RNA, 16 nt, Human
caaugucaggaacaga

SEQ ID NO: 2369303 - RNA, 17 nt, Human
caaugugauaaaacccc

SEQ ID NO: 2369304 - RNA, 15 nt, Human
caaugugauaaaacc

SEQ ID NO: 2369305 - RNA, 23 nt, Human
caauguucauuguaauguuacug

SEQ ID NO: 2369306 - RNA, 22 nt, Human
caauguucauuguaauguuacu

SEQ ID NO: 2369307 - RNA, 23 nt, Human
caauuaaggauuuuaugcuuuaa

SEQ ID NO: 2369308 - RNA, 18 nt, Human
caauuaauaaaaaaugga

SEQ ID NO: 2369309 - RNA, 12 nt, Human
caauuaauuuuu

SEQ ID NO: 2369310 - RNA, 18 nt, Human
caauguucauuguaaugu

SEQ ID NO: 2369311 - RNA, 15 nt, Human
caauguucauuguaa

SEQ ID NO: 2369312 - RNA, 14 nt, Human
caauguucauugua

SEQ ID NO: 2369313 - RNA, 13 nt, Human
caauguucauugu

SEQ ID NO: 2369314 - RNA, 12 nt, Human
caauguucauug

SEQ ID NO: 2369315 - RNA, 15 nt, Human
caauguucaucccau

SEQ ID NO: 2369316 - RNA, 14 nt, Human
caauguucauccca

SEQ ID NO: 2369317 - RNA, 19 nt, Human
caauguuacuaucugcuuu

SEQ ID NO: 2369318 - RNA, 19 nt, Human
caauguuaaggaaacucuu

SEQ ID NO: 2369319 - RNA, 20 nt, Human
caauguuaaggaaacucuua

SEQ ID NO: 2369320 - RNA, 13 nt, Human
caauguucaucau

SEQ ID NO: 2369321 - RNA, 24 nt, Human
caauguuaaggaaacucuuaucuc

SEQ ID NO: 2369322 - RNA, 23 nt, Human
caauucucauuugucacacacuu

SEQ ID NO: 2369323 - RNA, 16 nt, Human
caauucgauauccgga

SEQ ID NO: 2369324 - RNA, 13 nt, Human
caauucuccugcc

SEQ ID NO: 2369325 - RNA, 16 nt, Human
caauuacaggaaguac

SEQ ID NO: 2369326 - RNA, 22 nt, Human
caauuaauuuuuuuauuguuua

SEQ ID NO: 2369327 - RNA, 23 nt, Human
caauuaauuuuuuuauuguuuaa

SEQ ID NO: 2369328 - RNA, 15 nt, Human
caauuaauaaaaaau

SEQ ID NO: 2369329 - RNA, 13 nt, Human
caauuaauuuuuu

SEQ ID NO: 2369330 - RNA, 19 nt, Human
caauuaauuuuuuuauugu

SEQ ID NO: 2369331 - RNA, 20 nt, Human
caauuaauuuuuuuauuguu

SEQ ID NO: 2369332 - RNA, 16 nt, Human
caauuugggagauaua

SEQ ID NO: 2369333 - RNA, 15 nt, Human
caauucuccugccuc

SEQ ID NO: 2369334 - RNA, 14 nt, Human
caauucuccugccu

SEQ ID NO: 2369335 - RNA, 14 nt, Human
caaugacucucugg

SEQ ID NO: 2369336 - RNA, 17 nt, Human
caaugaggucugaaaug

SEQ ID NO: 2369337 - RNA, 17 nt, Human
caaugcacuuuguucug

SEQ ID NO: 2369338 - RNA, 18 nt, Human
caaugaggucugaaaugg

SEQ ID NO: 2369339 - RNA, 19 nt, Human
caaugggagcugaggccac

SEQ ID NO: 2369340 - RNA, 23 nt, Human
caaugggagcugaggccacacuc

SEQ ID NO: 2369341 - RNA, 22 nt, Human
caaugcacuuuguucuggcucu

SEQ ID NO: 2369342 - RNA, 20 nt, Human
caaugcacuuuguucuggcu

SEQ ID NO: 2369343 - RNA, 21 nt, Human
caaugcacuuuguucuggcuc

SEQ ID NO: 2369344 - RNA, 19 nt, Human
caauguagaggggaaaaga

SEQ ID NO: 2369345 - RNA, 20 nt, Human
caauguauugauaagagggc

SEQ ID NO: 2369346 - RNA, 15 nt, Human
caauguauuuauuua

SEQ ID NO: 2369347 - RNA, 17 nt, Human
caauguagaaagcuuug

SEQ ID NO: 2369348 - RNA, 19 nt, Human
caaugucaggaacagaagg

SEQ ID NO: 2369349 - RNA, 14 nt, Human
caaugucaggaaca

SEQ ID NO: 2369350 - RNA, 14 nt, Human
caaugucacuuaaa

SEQ ID NO: 2369351 - RNA, 18 nt, Human
caauguauuuauuuaaaa

SEQ ID NO: 2369352 - RNA, 20 nt, Human
caauguauuuauuuaaaaga

SEQ ID NO: 2369353 - RNA, 22 nt, Human
caauguauuuauuuaaaagauu

SEQ ID NO: 2369354 - RNA, 23 nt, Human
caauguauuuauuuaaaagauuc

SEQ ID NO: 2369355 - RNA, 22 nt, Human
caaugguguugcccugagugga

SEQ ID NO: 2369356 - RNA, 22 nt, Human
caaugguguucaccaucggcag

SEQ ID NO: 2369357 - RNA, 17 nt, Human
caaugguguugcccuga

SEQ ID NO: 2369358 - RNA, 23 nt, Human
caauggguuuuucccuguacagu

SEQ ID NO: 2369359 - RNA, 22 nt, Human
caauggggauguuguguuucug

SEQ ID NO: 2369360 - RNA, 18 nt, Human
caaugggcacugggauga

SEQ ID NO: 2369361 - RNA, 21 nt, Human
caaugggagcugaggccacac

SEQ ID NO: 2369362 - RNA, 15 nt, Human
caaugggcaaugaca

SEQ ID NO: 2369363 - RNA, 15 nt, Human
caaugggcacuggga

SEQ ID NO: 2369364 - RNA, 17 nt, Human
caaugggcacugggaug

SEQ ID NO: 2369365 - RNA, 19 nt, Human
caaugggcacugggaugag

SEQ ID NO: 2369366 - RNA, 19 nt, Human
caaucuuaaggggcagcuu

SEQ ID NO: 2369367 - RNA, 21 nt, Human
caaugaccuuucaauaggaaa

SEQ ID NO: 2369368 - RNA, 15 nt, Human
caaugacuuacugua

SEQ ID NO: 2369369 - RNA, 18 nt, Human
caaugacuuacuguacau

SEQ ID NO: 2369370 - RNA, 17 nt, Human
caaugacuuacuguaca

SEQ ID NO: 2369371 - RNA, 19 nt, Human
caaucugacauucucagga

SEQ ID NO: 2369372 - RNA, 17 nt, Human
caaucuguaaacugugu

SEQ ID NO: 2369373 - RNA, 16 nt, Human
caaucuguaaacugug

SEQ ID NO: 2369374 - RNA, 15 nt, Human
caaucuguaaacugu

SEQ ID NO: 2369375 - RNA, 12 nt, Human
caaucuguaaac

SEQ ID NO: 2369376 - RNA, 18 nt, Human
caaucuguaaacugugua

SEQ ID NO: 2369377 - RNA, 23 nt, Human
caaugaccuuucaauaggaaaaa

SEQ ID NO: 2369378 - RNA, 12 nt, Human
caauauagcaag

SEQ ID NO: 2369379 - RNA, 19 nt, Human
caauauagaaacacgaacu

SEQ ID NO: 2369380 - RNA, 19 nt, Human
caauauaucuaaauugaau

SEQ ID NO: 2369381 - RNA, 13 nt, Human
caauauagcaaga

SEQ ID NO: 2369382 - RNA, 23 nt, Human
caauauaaaaggcaaauguguac

SEQ ID NO: 2369383 - RNA, 12 nt, Human
caauauagaaac

SEQ ID NO: 2369384 - RNA, 14 nt, Human
caauauagaaacac

SEQ ID NO: 2369385 - RNA, 17 nt, Human
caauauucgcuguguca

SEQ ID NO: 2369386 - RNA, 20 nt, Human
caauauaucuaaauugaaua

SEQ ID NO: 2369387 - RNA, 21 nt, Human
caauauaucuaaauugaauaa

SEQ ID NO: 2369388 - RNA, 22 nt, Human
caauauaucuaaauugaauaau

SEQ ID NO: 2369389 - RNA, 14 nt, Human
caauauugacuuug

SEQ ID NO: 2369390 - RNA, 15 nt, Human
caauauugaacuuuu

SEQ ID NO: 2369391 - RNA, 21 nt, Human
caauauuccugaaugaaauau

SEQ ID NO: 2369392 - RNA, 16 nt, Human
caauauugacuuuguc

SEQ ID NO: 2369393 - RNA, 17 nt, Human
caaucugacauucucag

SEQ ID NO: 2369394 - RNA, 17 nt, Human
caauauugacuuugucu

SEQ ID NO: 2369395 - RNA, 14 nt, Human
caauauuguacagu

SEQ ID NO: 2369396 - RNA, 14 nt, Human
caauaauuucaggu

SEQ ID NO: 2369397 - RNA, 16 nt, Human
caauaauugcagaacu

SEQ ID NO: 2369398 - RNA, 22 nt, Human
caauaauuucagguuuuguaaa

SEQ ID NO: 2369399 - RNA, 23 nt, Human
caauaauggucccauccaggcag

SEQ ID NO: 2369400 - RNA, 19 nt, Human
caauaauggucccauccag

SEQ ID NO: 2369401 - RNA, 20 nt, Human
caauaauggucccauccagg

SEQ ID NO: 2369402 - RNA, 18 nt, Human
caauaauauauuuucugu

SEQ ID NO: 2369403 - RNA, 17 nt, Human
caauaauggucccaucc

SEQ ID NO: 2369404 - RNA, 18 nt, Human
caauaauggucccaucca

SEQ ID NO: 2369405 - RNA, 20 nt, Human
caauaauauauuuucuguuu

SEQ ID NO: 2369406 - RNA, 13 nt, Human
caauaauauauuu

SEQ ID NO: 2369407 - RNA, 14 nt, Human
caauaauauauuuu

SEQ ID NO: 2369408 - RNA, 16 nt, Human
caauaauauauuuucu

SEQ ID NO: 2369409 - RNA, 17 nt, Human
caauaauauauuuucug

SEQ ID NO: 2369410 - RNA, 13 nt, Human
caaguuagcucag

SEQ ID NO: 2369411 - RNA, 16 nt, Human
caaguuagaaaacaua

SEQ ID NO: 2369412 - RNA, 22 nt, Human
caagugugcauauuguacacuu

SEQ ID NO: 2369413 - RNA, 19 nt, Human
caagugugcuuuagcuuga

SEQ ID NO: 2369414 - RNA, 18 nt, Human
caagugugcauauuguac

SEQ ID NO: 2369415 - RNA, 21 nt, Human
caagugugcauauuguacacu

SEQ ID NO: 2369416 - RNA, 23 nt, Human
caagugugcauauuguacacuuu

SEQ ID NO: 2369417 - RNA, 19 nt, Human
caaguuagcucaggaggcu

SEQ ID NO: 2369418 - RNA, 17 nt, Human
caaguuagcucaggagg

SEQ ID NO: 2369419 - RNA, 16 nt, Human
caaguuagcucaggag

SEQ ID NO: 2369420 - RNA, 14 nt, Human
caaguuagcucagg

SEQ ID NO: 2369421 - RNA, 20 nt, Human
caaguuauaaaucaauguca

SEQ ID NO: 2369422 - RNA, 16 nt, Human
caaguuauaaaucaau

SEQ ID NO: 2369423 - RNA, 20 nt, Human
caaguuacagcugugacaau

SEQ ID NO: 2369424 - RNA, 22 nt, Human
caauauaaaacuguacuucacu

SEQ ID NO: 2369425 - RNA, 22 nt, Human
caauauaaaaggcaaaugugua

SEQ ID NO: 2369426 - RNA, 23 nt, Human
caauagcuuuacccucaggcaua

SEQ ID NO: 2369427 - RNA, 20 nt, Human
caauauaaaacuguacuuca

SEQ ID NO: 2369428 - RNA, 21 nt, Human
caauagcuuuacccucaggca

SEQ ID NO: 2369429 - RNA, 18 nt, Human
caauagcuuuacccucag

SEQ ID NO: 2369430 - RNA, 13 nt, Human
caauaggaaaaac

SEQ ID NO: 2369431 - RNA, 19 nt, Human
caauacccaaauccucucc

SEQ ID NO: 2369432 - RNA, 12 nt, Human
caauaggaaaaa

SEQ ID NO: 2369433 - RNA, 19 nt, Human
caauacaguacaggcagca

SEQ ID NO: 2369434 - RNA, 17 nt, Human
caauacaguacaggcag

SEQ ID NO: 2369435 - RNA, 18 nt, Human
caauacaguacaggcagc

SEQ ID NO: 2369436 - RNA, 15 nt, Human
caauacaugcugcua

SEQ ID NO: 2369437 - RNA, 17 nt, Human
caauacaugcugcuaau

SEQ ID NO: 2369438 - RNA, 23 nt, Human
caauacaucccuuaccugggaaa

SEQ ID NO: 2369439 - RNA, 17 nt, Human
caauacacuaguuguuu

SEQ ID NO: 2369440 - RNA, 19 nt, Human
caauacacuaguuguuucu

SEQ ID NO: 2369441 - RNA, 14 nt, Human
caauaauuuucuac

SEQ ID NO: 2369442 - RNA, 13 nt, Human
caauaauuuucua

SEQ ID NO: 2369443 - RNA, 14 nt, Human
caauguucucucuu

SEQ ID NO: 2369444 - RNA, 14 nt, Human
caauaggaaaaacu

SEQ ID NO: 2369445 - RNA, 16 nt, Human
uuauccugaaauuuca

SEQ ID NO: 2369446 - RNA, 13 nt, Human
uuaucgaaauaac

SEQ ID NO: 2369447 - RNA, 14 nt, Human
uuaucgaaauaaca

SEQ ID NO: 2369448 - RNA, 15 nt, Human
uuaucgaaauaacaa

SEQ ID NO: 2369449 - RNA, 18 nt, Human
uuauccucuuuagaguua

SEQ ID NO: 2369450 - RNA, 20 nt, Human
uuauccucuuuagaguuaga

SEQ ID NO: 2369451 - RNA, 17 nt, Human
uuauccugaaauuucag

SEQ ID NO: 2369452 - RNA, 14 nt, Human
uuauccucuuuaga

SEQ ID NO: 2369453 - RNA, 16 nt, Human
uuauccucugguuuaa

SEQ ID NO: 2369454 - RNA, 15 nt, Human
uuauccucuuuagag

SEQ ID NO: 2369455 - RNA, 17 nt, Human
uuauccucuuuagaguu

SEQ ID NO: 2369456 - RNA, 14 nt, Human
uuauccucugaucu

SEQ ID NO: 2369457 - RNA, 15 nt, Human
uuauccucugaucuc

SEQ ID NO: 2369458 - RNA, 16 nt, Human
uuauccucugaucucc

SEQ ID NO: 2369459 - RNA, 19 nt, Human
uuauccucugaucuccaug

SEQ ID NO: 2369460 - RNA, 20 nt, Human
uuauccucugaucuccaugg

SEQ ID NO: 2369461 - RNA, 21 nt, Human
uuauccucugaucuccauggc

SEQ ID NO: 2369462 - RNA, 23 nt, Human
uuaucccuuccuuuuagccuagu

SEQ ID NO: 2369463 - RNA, 19 nt, Human
uuauccuaaaacaaauagu

SEQ ID NO: 2369464 - RNA, 13 nt, Human
uuauauuugaaau

SEQ ID NO: 2369465 - RNA, 15 nt, Human
uuauauuugaaauau

SEQ ID NO: 2369466 - RNA, 15 nt, Human
uuauauugauaacag

SEQ ID NO: 2369467 - RNA, 14 nt, Human
uuauauuguaagaa

SEQ ID NO: 2369468 - RNA, 22 nt, Human
uuauauuguaagaaauacugua

SEQ ID NO: 2369469 - RNA, 16 nt, Human
uuauauuguaagaaau

SEQ ID NO: 2369470 - RNA, 24 nt, Human
uuauauuguaagaaauacuguaca

SEQ ID NO: 2369471 - RNA, 16 nt, Human
uuauauuuacaaaugg

SEQ ID NO: 2369472 - RNA, 12 nt, Human
uuauauuugaaa

SEQ ID NO: 2369473 - RNA, 19 nt, Human
uuauauuuaguuauaguuu

SEQ ID NO: 2369474 - RNA, 22 nt, Human
uuauauuuaguuauaguuucag

SEQ ID NO: 2369475 - RNA, 17 nt, Human
uuauauuuaguuauagu

SEQ ID NO: 2369476 - RNA, 18 nt, Human
uuauauuuaguuauaguu

SEQ ID NO: 2369477 - RNA, 20 nt, Human
uuauauuuauuacuguaaga

SEQ ID NO: 2369478 - RNA, 20 nt, Human
uuaucuaauaccucugugug

SEQ ID NO: 2369479 - RNA, 14 nt, Human
uuaucuagauacug

SEQ ID NO: 2369480 - RNA, 19 nt, Human
uuaucuauacauaucuuua

SEQ ID NO: 2369481 - RNA, 23 nt, Human
uuaucgggagcagugucuuccau

SEQ ID NO: 2369482 - RNA, 21 nt, Human
uuaucgggagcagugucuucc

SEQ ID NO: 2369483 - RNA, 15 nt, Human
uuaucuaaaagaaau

SEQ ID NO: 2369484 - RNA, 21 nt, Human
uuaucuaaaagaaaugucuau

SEQ ID NO: 2369485 - RNA, 19 nt, Human
uuaucuaauaccucugugu

SEQ ID NO: 2369486 - RNA, 19 nt, Human
uuaucgggagcagugucuu

SEQ ID NO: 2369487 - RNA, 18 nt, Human
uuaucgggagcagugucu

SEQ ID NO: 2369488 - RNA, 16 nt, Human
uuaucgggagcagugu

SEQ ID NO: 2369489 - RNA, 23 nt, Human
uuaucgggaacaguguuucccau

SEQ ID NO: 2369490 - RNA, 17 nt, Human
uuaucgggaacaguguu

SEQ ID NO: 2369491 - RNA, 16 nt, Human
uuaucgggaacagugu

SEQ ID NO: 2369492 - RNA, 14 nt, Human
uuaucgggaacagu

SEQ ID NO: 2369493 - RNA, 16 nt, Human
uuaucggaagcagugc

SEQ ID NO: 2369494 - RNA, 14 nt, Human
uuaucggaagcagu

SEQ ID NO: 2369495 - RNA, 15 nt, Human
uuaucggaagcagug

SEQ ID NO: 2369496 - RNA, 22 nt, Human
uuaucgaaauaacaauguuaag

SEQ ID NO: 2369497 - RNA, 19 nt, Human
uuaucgaaauaacaauguu

SEQ ID NO: 2369498 - RNA, 21 nt, Human
uuaucgaaauaacaauguuaa

SEQ ID NO: 2369499 - RNA, 17 nt, Human
uuaucuuaugccacggg

SEQ ID NO: 2369500 - RNA, 14 nt, Human
uuaucuugaauaau

SEQ ID NO: 2369501 - RNA, 16 nt, Human
uuaucuugaauaaugu

SEQ ID NO: 2369502 - RNA, 21 nt, Human
uuaucuccccuucacaugcau

SEQ ID NO: 2369503 - RNA, 21 nt, Human
uuaucucagucaugcauaaau

SEQ ID NO: 2369504 - RNA, 22 nt, Human
uuaucucagucaugcauaaaua

SEQ ID NO: 2369505 - RNA, 14 nt, Human
uuaucucuauuuaa

SEQ ID NO: 2369506 - RNA, 15 nt, Human
uuaucucuauuuaau

SEQ ID NO: 2369507 - RNA, 17 nt, Human
uuaucucagucaugcau

SEQ ID NO: 2369508 - RNA, 19 nt, Human
uuaucucagucaugcauaa

SEQ ID NO: 2369509 - RNA, 20 nt, Human
uuaucucagucaugcauaaa

SEQ ID NO: 2369510 - RNA, 16 nt, Human
uuaucucacuugugcc

SEQ ID NO: 2369511 - RNA, 11 nt, Human
uuaucucaaaa

SEQ ID NO: 2369512 - RNA, 22 nt, Human
uuauguuuuuuaaaauauuuau

SEQ ID NO: 2369513 - RNA, 18 nt, Human
uuauuaaauacaaaacuu

SEQ ID NO: 2369514 - RNA, 20 nt, Human
uuauuaaauacaaaacuucc

SEQ ID NO: 2369515 - RNA, 19 nt, Human
uuauuaacaaauuauguua

SEQ ID NO: 2369516 - RNA, 18 nt, Human
uuauuaacauaggugaaa

SEQ ID NO: 2369517 - RNA, 21 nt, Human
uuauuaacuaauaugggcauu

SEQ ID NO: 2369518 - RNA, 20 nt, Human
uuauguuugccacuuugcaa

SEQ ID NO: 2369519 - RNA, 11 nt, Human
uuauguuugcc

SEQ ID NO: 2369520 - RNA, 23 nt, Human
uuauuaaaaaucucaaauuucua

SEQ ID NO: 2369521 - RNA, 19 nt, Human
uuauuaaaugcccagcccc

SEQ ID NO: 2369522 - RNA, 21 nt, Human
uuauuaaaugcccagccccuu

SEQ ID NO: 2369523 - RNA, 14 nt, Human
uuauuacugcuaag

SEQ ID NO: 2369524 - RNA, 19 nt, Human
uuauuacugcuaaguauuu

SEQ ID NO: 2369525 - RNA, 15 nt, Human
uuauuaccucugaua

SEQ ID NO: 2369526 - RNA, 12 nt, Human
uuauuaccucug

SEQ ID NO: 2369527 - RNA, 13 nt, Human
uuauuaccucuga

SEQ ID NO: 2369528 - RNA, 22 nt, Human
uuauuacccccuccuucagaca

SEQ ID NO: 2369529 - RNA, 20 nt, Human
uuauuacccccuccuucaga

SEQ ID NO: 2369530 - RNA, 19 nt, Human
uuauuacccccuccuucag

SEQ ID NO: 2369531 - RNA, 18 nt, Human
uuauuacccagaguuuuu

SEQ ID NO: 2369532 - RNA, 18 nt, Human
uuauuacaucuuucacau

SEQ ID NO: 2369533 - RNA, 12 nt, Human
uuauuacaucuu

SEQ ID NO: 2369534 - RNA, 13 nt, Human
uuauuaaucacua

SEQ ID NO: 2369535 - RNA, 21 nt, Human
uuauuaagauggauucucaga

SEQ ID NO: 2369536 - RNA, 20 nt, Human
uuauuaagauggauucucag

SEQ ID NO: 2369537 - RNA, 19 nt, Human
uuauuaagauggauucuca

SEQ ID NO: 2369538 - RNA, 17 nt, Human
uuauuaagauggauucu

SEQ ID NO: 2369539 - RNA, 23 nt, Human
uuauuaagauggauucucagaua

SEQ ID NO: 2369540 - RNA, 14 nt, Human
uuauuaauaaacau

SEQ ID NO: 2369541 - RNA, 15 nt, Human
uuauuaauaaacauu

SEQ ID NO: 2369542 - RNA, 13 nt, Human
uuaugauuuaaua

SEQ ID NO: 2369543 - RNA, 15 nt, Human
uuaugauuuaauaaa

SEQ ID NO: 2369544 - RNA, 20 nt, Human
uuaugauuuaauaaaauaau

SEQ ID NO: 2369545 - RNA, 17 nt, Human
uuauggaacacucugag

SEQ ID NO: 2369546 - RNA, 19 nt, Human
uuaugauuuuuuuuucaua

SEQ ID NO: 2369547 - RNA, 18 nt, Human
uuaugauuuuuuuuucau

SEQ ID NO: 2369548 - RNA, 17 nt, Human
uuaugauuuaauaaaau

SEQ ID NO: 2369549 - RNA, 22 nt, Human
uuauggaagauuuuaaauucac

SEQ ID NO: 2369550 - RNA, 22 nt, Human
uuauggaaucuaccaacuguuu

SEQ ID NO: 2369551 - RNA, 19 nt, Human
uuauggaagauuuuaaauu

SEQ ID NO: 2369552 - RNA, 19 nt, Human
uuauggaauugauuugcau

SEQ ID NO: 2369553 - RNA, 14 nt, Human
uuauggaauugauu

SEQ ID NO: 2369554 - RNA, 21 nt, Human
uuauggacaaugacccagugg

SEQ ID NO: 2369555 - RNA, 18 nt, Human
uuauggaacacucugaga

SEQ ID NO: 2369556 - RNA, 20 nt, Human
uuauggaacacucugagacu

SEQ ID NO: 2369557 - RNA, 19 nt, Human
uuauguuuauauaaaugcu

SEQ ID NO: 2369558 - RNA, 17 nt, Human
uuauguugcauagaaua

SEQ ID NO: 2369559 - RNA, 17 nt, Human
uuauggcuuuugugcau

SEQ ID NO: 2369560 - RNA, 21 nt, Human
uuauggcucacuaugaaucua

SEQ ID NO: 2369561 - RNA, 18 nt, Human
uuauggcuuuugugcauu

SEQ ID NO: 2369562 - RNA, 14 nt, Human
uuauggcacaucag

SEQ ID NO: 2369563 - RNA, 23 nt, Human
uuauggaauugauuugcauugaa

SEQ ID NO: 2369564 - RNA, 21 nt, Human
uuauggaauugauuugcauug

SEQ ID NO: 2369565 - RNA, 20 nt, Human
uuauggaauugauuugcauu

SEQ ID NO: 2369566 - RNA, 16 nt, Human
uuauggcuuuugugca

SEQ ID NO: 2369567 - RNA, 18 nt, Human
uuauggcuauaggugcua

SEQ ID NO: 2369568 - RNA, 21 nt, Human
uuauaauuuuuuuauuacuga

SEQ ID NO: 2369569 - RNA, 16 nt, Human
uuauaauuuuuuucaa

SEQ ID NO: 2369570 - RNA, 16 nt, Human
uuauaauuuuccuaau

SEQ ID NO: 2369571 - RNA, 14 nt, Human
uuauaauuuuccua

SEQ ID NO: 2369572 - RNA, 18 nt, Human
uuauaauuuugugaagca

SEQ ID NO: 2369573 - RNA, 16 nt, Human
uuauaauuuugugaag

SEQ ID NO: 2369574 - RNA, 17 nt, Human
uuauaauuuugugaagc

SEQ ID NO: 2369575 - RNA, 15 nt, Human
uuauacaauaucauc

SEQ ID NO: 2369576 - RNA, 23 nt, Human
uuauacaacagugcuaaaaaugg

SEQ ID NO: 2369577 - RNA, 21 nt, Human
uuauacaacagugcuaaaaau

SEQ ID NO: 2369578 - RNA, 12 nt, Human
uuauacacauaa

SEQ ID NO: 2369579 - RNA, 13 nt, Human
uuauacacauaau

SEQ ID NO: 2369580 - RNA, 14 nt, Human
uuauacacauaauu

SEQ ID NO: 2369581 - RNA, 19 nt, Human
uuauacaaauuagaaaaug

SEQ ID NO: 2369582 - RNA, 12 nt, Human
uuauacaacagu

SEQ ID NO: 2369583 - RNA, 16 nt, Human
uuauacaacagugcua

SEQ ID NO: 2369584 - RNA, 17 nt, Human
uuauacaacagugcuaa

SEQ ID NO: 2369585 - RNA, 15 nt, Human
uuauacaaaugucuu

SEQ ID NO: 2369586 - RNA, 18 nt, Human
uuauacagcucagcuuuu

SEQ ID NO: 2369587 - RNA, 23 nt, Human
uuauacagaauugugucugcagg

SEQ ID NO: 2369588 - RNA, 22 nt, Human
uuauacagaccgaacuguugua

SEQ ID NO: 2369589 - RNA, 22 nt, Human
uuauacagaauugugucugcag

SEQ ID NO: 2369590 - RNA, 15 nt, Human
uuauacacuguaaug

SEQ ID NO: 2369591 - RNA, 18 nt, Human
uuauacacauaauuaaag

SEQ ID NO: 2369592 - RNA, 21 nt, Human
uuauacacauaauuaaagugu

SEQ ID NO: 2369593 - RNA, 19 nt, Human
uuauaucaguccucuuuca

SEQ ID NO: 2369594 - RNA, 16 nt, Human
uuauaucagccugagu

SEQ ID NO: 2369595 - RNA, 21 nt, Human
uuauaucaucagcauaccuuu

SEQ ID NO: 2369596 - RNA, 20 nt, Human
uuauauauuuauaacucauc

SEQ ID NO: 2369597 - RNA, 15 nt, Human
uuauauauuuauaac

SEQ ID NO: 2369598 - RNA, 14 nt, Human
uuauauauuuauaa

SEQ ID NO: 2369599 - RNA, 13 nt, Human
uuauauauuuaua

SEQ ID NO: 2369600 - RNA, 23 nt, Human
uuauauauuuauaacucaucaua

SEQ ID NO: 2369601 - RNA, 15 nt, Human
uuauaucagccugag

SEQ ID NO: 2369602 - RNA, 11 nt, Human
uuauacauaaa

SEQ ID NO: 2369603 - RNA, 23 nt, Human
uuauauaugugaacauuuaucaa

SEQ ID NO: 2369604 - RNA, 22 nt, Human
uuauauauugguaacauccuuu

SEQ ID NO: 2369605 - RNA, 13 nt, Human
uuauacauaaaca

SEQ ID NO: 2369606 - RNA, 19 nt, Human
uuauaugaagaaaaucacu

SEQ ID NO: 2369607 - RNA, 15 nt, Human
uuauaugaagaaaau

SEQ ID NO: 2369608 - RNA, 16 nt, Human
uuauaugaagauaagu

SEQ ID NO: 2369609 - RNA, 13 nt, Human
uuauaugcuuacu

SEQ ID NO: 2369610 - RNA, 19 nt, Human
uuauaugcuuacugauaua

SEQ ID NO: 2369611 - RNA, 16 nt, Human
uuauaugucaaagcag

SEQ ID NO: 2369612 - RNA, 15 nt, Human
uuauauuaaaauaug

SEQ ID NO: 2369613 - RNA, 19 nt, Human
uuauauguacaugagaagg

SEQ ID NO: 2369614 - RNA, 16 nt, Human
uuauauguacaugaga

SEQ ID NO: 2369615 - RNA, 20 nt, Human
uuauauggaugauucagaaa

SEQ ID NO: 2369616 - RNA, 22 nt, Human
uuauauggaugauucagaaauu

SEQ ID NO: 2369617 - RNA, 21 nt, Human
uuauauuccauauauuagcau

SEQ ID NO: 2369618 - RNA, 16 nt, Human
uuauauuccauauauu

SEQ ID NO: 2369619 - RNA, 14 nt, Human
uuauauuccauaua

SEQ ID NO: 2369620 - RNA, 16 nt, Human
uuauauuaugaagcuu

SEQ ID NO: 2369621 - RNA, 20 nt, Human
uuauauuaaaauauggcuau

SEQ ID NO: 2369622 - RNA, 15 nt, Human
ugugaaaagaaaaau

SEQ ID NO: 2369623 - RNA, 13 nt, Human
ugugaaaagaaaa

SEQ ID NO: 2369624 - RNA, 17 nt, Human
ugugaaaagaaaaauga

SEQ ID NO: 2369625 - RNA, 21 nt, Human
ugugaaaagaaaaaugagccu

SEQ ID NO: 2369626 - RNA, 14 nt, Human
uuagucuucucaua

SEQ ID NO: 2369627 - RNA, 13 nt, Human
uuagucuucucau

SEQ ID NO: 2369628 - RNA, 15 nt, Human
uuagucugcaaaaug

SEQ ID NO: 2369629 - RNA, 17 nt, Human
uuagucugcaaaaugag

SEQ ID NO: 2369630 - RNA, 19 nt, Human
uuagugaccucagcuuuga

SEQ ID NO: 2369631 - RNA, 18 nt, Human
uuagucuucucauagcau

SEQ ID NO: 2369632 - RNA, 19 nt, Human
uuagugcggacaaguuuua

SEQ ID NO: 2369633 - RNA, 17 nt, Human
uuagugcggacaaguuu

SEQ ID NO: 2369634 - RNA, 14 nt, Human
uuagugccugugug

SEQ ID NO: 2369635 - RNA, 12 nt, Human
uuagugcuaagu

SEQ ID NO: 2369636 - RNA, 15 nt, Human
uuagugcuaagugug

SEQ ID NO: 2369637 - RNA, 18 nt, Human
uuagugaugucaucuguc

SEQ ID NO: 2369638 - RNA, 23 nt, Human
uuagugucacuuaccuagauuua

SEQ ID NO: 2369639 - RNA, 14 nt, Human
uuagugucacuuac

SEQ ID NO: 2369640 - RNA, 16 nt, Human
uuaguguaugcuuuga

SEQ ID NO: 2369641 - RNA, 12 nt, Human
uuaguggcuuca

SEQ ID NO: 2369642 - RNA, 12 nt, Human
uuaguggcuuuu

SEQ ID NO: 2369643 - RNA, 23 nt, Human
uuaguggcucaacauuguguucc

SEQ ID NO: 2369644 - RNA, 20 nt, Human
uuaguggcucaacauugugu

SEQ ID NO: 2369645 - RNA, 16 nt, Human
uuaguggcucaacauu

SEQ ID NO: 2369646 - RNA, 21 nt, Human
uuagugcuaagugugaacugg

SEQ ID NO: 2369647 - RNA, 16 nt, Human
uuagugcuaaguguga

SEQ ID NO: 2369648 - RNA, 17 nt, Human
uuagugcuaagugugaa

SEQ ID NO: 2369649 - RNA, 19 nt, Human
uuagugcuaagugugaacu

SEQ ID NO: 2369650 - RNA, 20 nt, Human
uuagugcuaagugugaacug

SEQ ID NO: 2369651 - RNA, 18 nt, Human
uuauaaguagcaggccaa

SEQ ID NO: 2369652 - RNA, 18 nt, Human
uuauaaguaucuucaugu

SEQ ID NO: 2369653 - RNA, 16 nt, Human
uuauaagcagauuuaa

SEQ ID NO: 2369654 - RNA, 14 nt, Human
uuauaagcagauuu

SEQ ID NO: 2369655 - RNA, 15 nt, Human
uuauaaugaaugaaa

SEQ ID NO: 2369656 - RNA, 11 nt, Human
uuauaaucuuu

SEQ ID NO: 2369657 - RNA, 20 nt, Human
uuauaaucuuccauacuucu

SEQ ID NO: 2369658 - RNA, 13 nt, Human
uuauaaucacuuu

SEQ ID NO: 2369659 - RNA, 19 nt, Human
uuauaaugaggaugauuau

SEQ ID NO: 2369660 - RNA, 13 nt, Human
uuauaauggguaa

SEQ ID NO: 2369661 - RNA, 15 nt, Human
uuauaauaauguuaa

SEQ ID NO: 2369662 - RNA, 17 nt, Human
uuauaauaaaaggaaaa

SEQ ID NO: 2369663 - RNA, 21 nt, Human
uuauaauaaaaggaaaagcaa

SEQ ID NO: 2369664 - RNA, 22 nt, Human
uuauaauaaaaggaaaagcaaa

SEQ ID NO: 2369665 - RNA, 18 nt, Human
uuauaauaauguuaacau

SEQ ID NO: 2369666 - RNA, 13 nt, Human
uuauaauauacua

SEQ ID NO: 2369667 - RNA, 12 nt, Human
uuauaauuuaaa

SEQ ID NO: 2369668 - RNA, 14 nt, Human
uuauaauuguauca

SEQ ID NO: 2369669 - RNA, 22 nt, Human
uuauaauuguaucagaggccua

SEQ ID NO: 2369670 - RNA, 12 nt, Human
uuauaauuuuaa

SEQ ID NO: 2369671 - RNA, 17 nt, Human
uuauaauuuuaaauguu

SEQ ID NO: 2369672 - RNA, 21 nt, Human
uuauaauuuuaaauguuuuuu

SEQ ID NO: 2369673 - RNA, 14 nt, Human
uuauaauuuuguga

SEQ ID NO: 2369674 - RNA, 15 nt, Human
uuauaauuuugugaa

SEQ ID NO: 2369675 - RNA, 12 nt, Human
uucauaaaugaa

SEQ ID NO: 2369676 - RNA, 15 nt, Human
uucauaaaugaauuu

SEQ ID NO: 2369677 - RNA, 16 nt, Human
uucauaaaugaauuuu

SEQ ID NO: 2369678 - RNA, 15 nt, Human
uucauaaccuagccu

SEQ ID NO: 2369679 - RNA, 15 nt, Human
uucauccuccucaga

SEQ ID NO: 2369680 - RNA, 19 nt, Human
uucauccuccucagaucuu

SEQ ID NO: 2369681 - RNA, 18 nt, Human
uucaucgaaucuacuaau

SEQ ID NO: 2369682 - RNA, 18 nt, Human
uucauccggcagccugga

SEQ ID NO: 2369683 - RNA, 18 nt, Human
uucauccugacucugccc

SEQ ID NO: 2369684 - RNA, 14 nt, Human
uucauaacuuucau

SEQ ID NO: 2369685 - RNA, 20 nt, Human
uucaucgaaucuacuaauuc

SEQ ID NO: 2369686 - RNA, 23 nt, Human
uucaucgaaucuacuaauuccac

SEQ ID NO: 2369687 - RNA, 13 nt, Human
uucaucugcucuc

SEQ ID NO: 2369688 - RNA, 15 nt, Human
uucaucugcucuccu

SEQ ID NO: 2369689 - RNA, 16 nt, Human
uucaucugcucuccuu

SEQ ID NO: 2369690 - RNA, 19 nt, Human
uucaucugcucuccuuccu

SEQ ID NO: 2369691 - RNA, 18 nt, Human
uucaguugaucacuggca

SEQ ID NO: 2369692 - RNA, 16 nt, Human
uucaguugaucacugg

SEQ ID NO: 2369693 - RNA, 19 nt, Human
uucauaaacaacuuaaugu

SEQ ID NO: 2369694 - RNA, 20 nt, Human
uucauaaauaaaguuuguug

SEQ ID NO: 2369695 - RNA, 14 nt, Human
uucaguuacagaaa

SEQ ID NO: 2369696 - RNA, 15 nt, Human
uucaguuacagaaag

SEQ ID NO: 2369697 - RNA, 16 nt, Human
uucaguuacagaaagu

SEQ ID NO: 2369698 - RNA, 17 nt, Human
uucaguuacagaaagug

SEQ ID NO: 2369699 - RNA, 23 nt, Human
uucaguuccucuuugcauggaau

SEQ ID NO: 2369700 - RNA, 17 nt, Human
uucaguuccucuuugca

SEQ ID NO: 2369701 - RNA, 22 nt, Human
uucaguuccucuuugcauggaa

SEQ ID NO: 2369702 - RNA, 15 nt, Human
uucaguucccagaau

SEQ ID NO: 2369703 - RNA, 17 nt, Human
uucaguucccagaauca

SEQ ID NO: 2369704 - RNA, 19 nt, Human
uucaguucccagaaucaaa

SEQ ID NO: 2369705 - RNA, 11 nt, Human
uucaguuacag

SEQ ID NO: 2369706 - RNA, 13 nt, Human
uucaguuacagaa

SEQ ID NO: 2369707 - RNA, 18 nt, Human
uucagugucccgggcccg

SEQ ID NO: 2369708 - RNA, 22 nt, Human
uucaguguuaaaugugaugaau

SEQ ID NO: 2369709 - RNA, 18 nt, Human
uucaguguuaaaugugau

SEQ ID NO: 2369710 - RNA, 12 nt, Human
uucaguguuaaa

SEQ ID NO: 2369711 - RNA, 23 nt, Human
uucaguuauuauauuuacaaaug

SEQ ID NO: 2369712 - RNA, 22 nt, Human
uucagcuuguaaauagcucagg

SEQ ID NO: 2369713 - RNA, 22 nt, Human
uucagcuucguuuauuuucaag

SEQ ID NO: 2369714 - RNA, 23 nt, Human
uucagcugugaacauggacucuu

SEQ ID NO: 2369715 - RNA, 14 nt, Human
uucagcuucauuug

SEQ ID NO: 2369716 - RNA, 15 nt, Human
uucagcuucugcugg

SEQ ID NO: 2369717 - RNA, 16 nt, Human
uucagcuucugcuggg

SEQ ID NO: 2369718 - RNA, 17 nt, Human
uucagcuucugcugggc

SEQ ID NO: 2369719 - RNA, 18 nt, Human
uucagcuucugcugggcu

SEQ ID NO: 2369720 - RNA, 14 nt, Human
uucaguggcagcug

SEQ ID NO: 2369721 - RNA, 13 nt, Human
uucagcuugggga

SEQ ID NO: 2369722 - RNA, 22 nt, Human
uucagcuccagcucaccagccc

SEQ ID NO: 2369723 - RNA, 21 nt, Human
uucagcugguugagguuucaa

SEQ ID NO: 2369724 - RNA, 13 nt, Human
uucagcucacugu

SEQ ID NO: 2369725 - RNA, 20 nt, Human
uucagcugugaacauggacu

SEQ ID NO: 2369726 - RNA, 12 nt, Human
uucagcuccagc

SEQ ID NO: 2369727 - RNA, 15 nt, Human
uucagcuccagcuca

SEQ ID NO: 2369728 - RNA, 13 nt, Human
uucaguguacaug

SEQ ID NO: 2369729 - RNA, 20 nt, Human
uucaguguauggaaauaaau

SEQ ID NO: 2369730 - RNA, 21 nt, Human
uucaguguaauuucuuugccu

SEQ ID NO: 2369731 - RNA, 22 nt, Human
uucagugucaaauaaacacugu

SEQ ID NO: 2369732 - RNA, 23 nt, Human
uucagugucaaauaaacacugug

SEQ ID NO: 2369733 - RNA, 13 nt, Human
uucagugucccgg

SEQ ID NO: 2369734 - RNA, 12 nt, Human
uucaguguacau

SEQ ID NO: 2369735 - RNA, 13 nt, Human
uucaguguaaaua

SEQ ID NO: 2369736 - RNA, 12 nt, Human
uucaguguaauu

SEQ ID NO: 2369737 - RNA, 13 nt, Human
uucaguguaauuu

SEQ ID NO: 2369738 - RNA, 16 nt, Human
uucaguguaauuucuu

SEQ ID NO: 2369739 - RNA, 17 nt, Human
uucaguguaauuucuuu

SEQ ID NO: 2369740 - RNA, 19 nt, Human
uucaguguaauuucuuugc

SEQ ID NO: 2369741 - RNA, 20 nt, Human
uucaguguaauuucuuugcc

SEQ ID NO: 2369742 - RNA, 14 nt, Human
uucagugggagaaa

SEQ ID NO: 2369743 - RNA, 20 nt, Human
uucaguggcagggcucagga

SEQ ID NO: 2369744 - RNA, 14 nt, Human
uucaguggggcagu

SEQ ID NO: 2369745 - RNA, 20 nt, Human
uucagcuucugcugggcugg

SEQ ID NO: 2369746 - RNA, 22 nt, Human
uucagcuucugcugggcugggg

SEQ ID NO: 2369747 - RNA, 16 nt, Human
uucaguggcagggcuc

SEQ ID NO: 2369748 - RNA, 17 nt, Human
uucaguggcagggcuca

SEQ ID NO: 2369749 - RNA, 17 nt, Human
uucaguggcagcugcuu

SEQ ID NO: 2369750 - RNA, 15 nt, Human
uucaguggcagcugc

SEQ ID NO: 2369751 - RNA, 16 nt, Human
uucaguggcagcugcu

SEQ ID NO: 2369752 - RNA, 23 nt, Human
uuccaacaccacagacacacaca

SEQ ID NO: 2369753 - RNA, 23 nt, Human
uuccaacagcucaagucuucccu

SEQ ID NO: 2369754 - RNA, 14 nt, Human
uuccaacagugagu

SEQ ID NO: 2369755 - RNA, 12 nt, Human
uuccaacaccac

SEQ ID NO: 2369756 - RNA, 17 nt, Human
uuccaacaccacagaca

SEQ ID NO: 2369757 - RNA, 18 nt, Human
uuccaacaccacagacac

SEQ ID NO: 2369758 - RNA, 19 nt, Human
uuccaacaccacagacaca

SEQ ID NO: 2369759 - RNA, 20 nt, Human
uuccaacaccacagacacac

SEQ ID NO: 2369760 - RNA, 21 nt, Human
uuccaacaccacagacacaca

SEQ ID NO: 2369761 - RNA, 22 nt, Human
uuccaacaccacagacacacac

SEQ ID NO: 2369762 - RNA, 16 nt, Human
uuccaaaguacacugu

SEQ ID NO: 2369763 - RNA, 23 nt, Human
uuccaacaaaggguuuuaaugua

SEQ ID NO: 2369764 - RNA, 14 nt, Human
uuccaaaguuaaca

SEQ ID NO: 2369765 - RNA, 15 nt, Human
uuccaaauaaaauga

SEQ ID NO: 2369766 - RNA, 23 nt, Human
uuccaaaggccauggagagcugg

SEQ ID NO: 2369767 - RNA, 19 nt, Human
uuccaaagcacauugaaag

SEQ ID NO: 2369768 - RNA, 22 nt, Human
uuccaaagaguagaauugcauu

SEQ ID NO: 2369769 - RNA, 20 nt, Human
uuccaaagcacauugaaaga

SEQ ID NO: 2369770 - RNA, 22 nt, Human
uuccaaaaguggccucuuuguc

SEQ ID NO: 2369771 - RNA, 13 nt, Human
uuccaaaguacac

SEQ ID NO: 2369772 - RNA, 18 nt, Human
uucauuuuuuuccaggcu

SEQ ID NO: 2369773 - RNA, 13 nt, Human
uuccaaaaaaaua

SEQ ID NO: 2369774 - RNA, 15 nt, Human
uuccaaaaaaauacu

SEQ ID NO: 2369775 - RNA, 21 nt, Human
uuccaaaaagauuuucagaaa

SEQ ID NO: 2369776 - RNA, 21 nt, Human
uuccaaaaguggccucuuugu

SEQ ID NO: 2369777 - RNA, 18 nt, Human
uuccaaaaguggccucuu

SEQ ID NO: 2369778 - RNA, 17 nt, Human
uuccaaaaguggccucu

SEQ ID NO: 2369779 - RNA, 16 nt, Human
uuccaaaaguggccuc

SEQ ID NO: 2369780 - RNA, 23 nt, Human
uucauuuuuuucacuggaguuac

SEQ ID NO: 2369781 - RNA, 15 nt, Human
uucauuuuuccuaac

SEQ ID NO: 2369782 - RNA, 14 nt, Human
uucauuuuuuucca

SEQ ID NO: 2369783 - RNA, 17 nt, Human
uucauuuuuuuccaggc

SEQ ID NO: 2369784 - RNA, 13 nt, Human
uucauuuuuccua

SEQ ID NO: 2369785 - RNA, 17 nt, Human
uucauuuuuaaucauga

SEQ ID NO: 2369786 - RNA, 18 nt, Human
uucauuuuuaaucaugaa

SEQ ID NO: 2369787 - RNA, 22 nt, Human
uucaugccagcuacuuccuccu

SEQ ID NO: 2369788 - RNA, 22 nt, Human
uucaugccaccauggccagcca

SEQ ID NO: 2369789 - RNA, 21 nt, Human
uucaugccagcuacuuccucc

SEQ ID NO: 2369790 - RNA, 18 nt, Human
uucaugcuaucucugugu

SEQ ID NO: 2369791 - RNA, 17 nt, Human
uucaugcuaucucugug

SEQ ID NO: 2369792 - RNA, 16 nt, Human
uucaugccuggcuucg

SEQ ID NO: 2369793 - RNA, 14 nt, Human
uucaugcucagccc

SEQ ID NO: 2369794 - RNA, 17 nt, Human
uucaugcucagcccuga

SEQ ID NO: 2369795 - RNA, 19 nt, Human
uucaugccaccauggccag

SEQ ID NO: 2369796 - RNA, 21 nt, Human
uucaugccaauuagcaauuga

SEQ ID NO: 2369797 - RNA, 16 nt, Human
uucaugcauggaaauu

SEQ ID NO: 2369798 - RNA, 15 nt, Human
uucaugcauggaaau

SEQ ID NO: 2369799 - RNA, 14 nt, Human
uucaugcauggaaa

SEQ ID NO: 2369800 - RNA, 18 nt, Human
uucaucuguuguuuuguu

SEQ ID NO: 2369801 - RNA, 18 nt, Human
uucaucuguaacucuaaa

SEQ ID NO: 2369802 - RNA, 19 nt, Human
uucaucuguaacucuaaaa

SEQ ID NO: 2369803 - RNA, 21 nt, Human
uucaucuguaacucuaaaaga

SEQ ID NO: 2369804 - RNA, 23 nt, Human
uucaucuguaacucuaaaagauc

SEQ ID NO: 2369805 - RNA, 21 nt, Human
uucaucugcucuccuuccugg

SEQ ID NO: 2369806 - RNA, 12 nt, Human
uucaucuggaac

SEQ ID NO: 2369807 - RNA, 23 nt, Human
uucaucuggaaccaucagaaaca

SEQ ID NO: 2369808 - RNA, 17 nt, Human
uucaucuggaaccauca

SEQ ID NO: 2369809 - RNA, 19 nt, Human
uucaucuggcaacaucuuu

SEQ ID NO: 2369810 - RNA, 13 nt, Human
uucaucugggaaa

SEQ ID NO: 2369811 - RNA, 14 nt, Human
uucaucugggaaag

SEQ ID NO: 2369812 - RNA, 18 nt, Human
uucaucugggaaagacau

SEQ ID NO: 2369813 - RNA, 13 nt, Human
uucaucuguaacu

SEQ ID NO: 2369814 - RNA, 15 nt, Human
uuccagaaucccaag

SEQ ID NO: 2369815 - RNA, 16 nt, Human
uuccagaaucccaaga

SEQ ID NO: 2369816 - RNA, 15 nt, Human
uuccagaaugcugua

SEQ ID NO: 2369817 - RNA, 14 nt, Human
uuccagaaugcugu

SEQ ID NO: 2369818 - RNA, 18 nt, Human
uuccagaaugcuguacau

SEQ ID NO: 2369819 - RNA, 16 nt, Human
uuccagaaugcuguac

SEQ ID NO: 2369820 - RNA, 19 nt, Human
uuccagaaugcuguacauc

SEQ ID NO: 2369821 - RNA, 14 nt, Human
uuccagaccugaag

SEQ ID NO: 2369822 - RNA, 15 nt, Human
uuccaaccccaacuc

SEQ ID NO: 2369823 - RNA, 15 nt, Human
uuccagaagugugau

SEQ ID NO: 2369824 - RNA, 21 nt, Human
uuccagaagugugauugggaa

SEQ ID NO: 2369825 - RNA, 19 nt, Human
uuccagaauaucugggauu

SEQ ID NO: 2369826 - RNA, 19 nt, Human
uuccaacccucaucaccaa

SEQ ID NO: 2369827 - RNA, 20 nt, Human
uuccagacuuccuugagaca

SEQ ID NO: 2369828 - RNA, 23 nt, Human
uuccagacugcuuccaauuuucu

SEQ ID NO: 2369829 - RNA, 17 nt, Human
uuccagaccugaagaau

SEQ ID NO: 2369830 - RNA, 16 nt, Human
uuccagaccugaagaa

SEQ ID NO: 2369831 - RNA, 19 nt, Human
uuccagaggcuauuauuuu

SEQ ID NO: 2369832 - RNA, 20 nt, Human
uuccagaggcuauuauuuuc

SEQ ID NO: 2369833 - RNA, 16 nt, Human
uuccagagggguugag

SEQ ID NO: 2369834 - RNA, 18 nt, Human
uuccagauaaccagcugu

SEQ ID NO: 2369835 - RNA, 18 nt, Human
uuccagauccuggaaauc

SEQ ID NO: 2369836 - RNA, 11 nt, Human
uuccagagaag

SEQ ID NO: 2369837 - RNA, 18 nt, Human
uuccauauauuagcauuu

SEQ ID NO: 2369838 - RNA, 15 nt, Human
uuccauaugaccuca

SEQ ID NO: 2369839 - RNA, 20 nt, Human
uuccauaugaccucaugcau

SEQ ID NO: 2369840 - RNA, 23 nt, Human
uuccagauaaccagcuguaacac

SEQ ID NO: 2369841 - RNA, 12 nt, Human
uuccaucauguc

SEQ ID NO: 2369842 - RNA, 19 nt, Human
uuccaucagguuccauccc

SEQ ID NO: 2369843 - RNA, 14 nt, Human
uuccaucauguccc

SEQ ID NO: 2369844 - RNA, 16 nt, Human
uuccaucaugucccca

SEQ ID NO: 2369845 - RNA, 15 nt, Human
uuccauauucaugua

SEQ ID NO: 2369846 - RNA, 14 nt, Human
uuccauauucaugu

SEQ ID NO: 2369847 - RNA, 20 nt, Human
uuccauauggauuuucuauu

SEQ ID NO: 2369848 - RNA, 15 nt, Human
uuccauauggauuuu

SEQ ID NO: 2369849 - RNA, 14 nt, Human
uuccauggacuuug

SEQ ID NO: 2369850 - RNA, 15 nt, Human
uuccauggacuuugu

SEQ ID NO: 2369851 - RNA, 21 nt, Human
uuccaugcguguuucugacuc

SEQ ID NO: 2369852 - RNA, 18 nt, Human
uuccaugcguguuucuga

SEQ ID NO: 2369853 - RNA, 13 nt, Human
uuccaucccagag

SEQ ID NO: 2369854 - RNA, 16 nt, Human
uuccaugccugagggu

SEQ ID NO: 2369855 - RNA, 18 nt, Human
uuccaugccugagggugg

SEQ ID NO: 2369856 - RNA, 22 nt, Human
uuccaugccugaggguggagac

SEQ ID NO: 2369857 - RNA, 17 nt, Human
uuccaucauguccccaa

SEQ ID NO: 2369858 - RNA, 21 nt, Human
uucaacaucaauguucauugu

SEQ ID NO: 2369859 - RNA, 19 nt, Human
uucaaccacuguaaaauga

SEQ ID NO: 2369860 - RNA, 15 nt, Human
uucaaccauucccca

SEQ ID NO: 2369861 - RNA, 18 nt, Human
uucaauaaaugucuguug

SEQ ID NO: 2369862 - RNA, 19 nt, Human
uucaauaaaugucuguuga

SEQ ID NO: 2369863 - RNA, 16 nt, Human
uucaauaauaaauauu

SEQ ID NO: 2369864 - RNA, 18 nt, Human
uucaaauugagagaaugg

SEQ ID NO: 2369865 - RNA, 19 nt, Human
uucaaauucuucugaacuc

SEQ ID NO: 2369866 - RNA, 16 nt, Human
uucaaauucuucugaa

SEQ ID NO: 2369867 - RNA, 22 nt, Human
uucaacaucaauguucauugua

SEQ ID NO: 2369868 - RNA, 19 nt, Human
uucaacaucaauguucauu

SEQ ID NO: 2369869 - RNA, 16 nt, Human
uucaacaucaauguuc

SEQ ID NO: 2369870 - RNA, 15 nt, Human
uucaacaucaauguu

SEQ ID NO: 2369871 - RNA, 14 nt, Human
uucaacaucaaugu

SEQ ID NO: 2369872 - RNA, 21 nt, Human
uucaacagguuuuccugaaga

SEQ ID NO: 2369873 - RNA, 19 nt, Human
uucaaauuagaagacauuu

SEQ ID NO: 2369874 - RNA, 14 nt, Human
uucaaaugugcugu

SEQ ID NO: 2369875 - RNA, 22 nt, Human
uucaaaugauuuuuacaaguuu

SEQ ID NO: 2369876 - RNA, 18 nt, Human
uucaaaugcuguaacuuu

SEQ ID NO: 2369877 - RNA, 18 nt, Human
uuauuuuguaauuauugu

SEQ ID NO: 2369878 - RNA, 21 nt, Human
uuauuuuguaauuauugugau

SEQ ID NO: 2369879 - RNA, 18 nt, Human
uuauuuugguacuuuuau

SEQ ID NO: 2369880 - RNA, 13 nt, Human
uuauuuuguaauu

SEQ ID NO: 2369881 - RNA, 14 nt, Human
uuauuuuguaauua

SEQ ID NO: 2369882 - RNA, 15 nt, Human
uuauuuuguaauuau

SEQ ID NO: 2369883 - RNA, 13 nt, Human
uuauuuucaagaa

SEQ ID NO: 2369884 - RNA, 18 nt, Human
uuauuuucaagaaacuga

SEQ ID NO: 2369885 - RNA, 17 nt, Human
uuauuuuaaacaaaaua

SEQ ID NO: 2369886 - RNA, 22 nt, Human
uuauuuuggaaaauaaauuauu

SEQ ID NO: 2369887 - RNA, 13 nt, Human
uuauuuugguacu

SEQ ID NO: 2369888 - RNA, 12 nt, Human
uuauuuugcaac

SEQ ID NO: 2369889 - RNA, 23 nt, Human
uuauuuugccauggaugagaguc

SEQ ID NO: 2369890 - RNA, 19 nt, Human
uuauuucuuaaacaaaugu

SEQ ID NO: 2369891 - RNA, 20 nt, Human
uuauuaguaaaugcuuauca

SEQ ID NO: 2369892 - RNA, 20 nt, Human
uuauuagggagaaaauucaa

SEQ ID NO: 2369893 - RNA, 19 nt, Human
uuauuagggagaaaauuca

SEQ ID NO: 2369894 - RNA, 23 nt, Human
uuauuagggagaaaauucaauug

SEQ ID NO: 2369895 - RNA, 22 nt, Human
uuauuugaaaacauauaaagca

SEQ ID NO: 2369896 - RNA, 14 nt, Human
uuauuugacaaaau

SEQ ID NO: 2369897 - RNA, 22 nt, Human
uuauuagccagguaaugugaau

SEQ ID NO: 2369898 - RNA, 16 nt, Human
uuauuagggagaaaau

SEQ ID NO: 2369899 - RNA, 18 nt, Human
uuauuagggagaaaauuc

SEQ ID NO: 2369900 - RNA, 17 nt, Human
uuauuagggagaaaauu

SEQ ID NO: 2369901 - RNA, 17 nt, Human
uuauuagagugucuuuc

SEQ ID NO: 2369902 - RNA, 21 nt, Human
uuauuagagauuaccuccuga

SEQ ID NO: 2369903 - RNA, 18 nt, Human
uuauuugcagagacagga

SEQ ID NO: 2369904 - RNA, 15 nt, Human
uuauuugcagagaca

SEQ ID NO: 2369905 - RNA, 13 nt, Human
uuauuugcaugug

SEQ ID NO: 2369906 - RNA, 13 nt, Human
uuauuuguacagu

SEQ ID NO: 2369907 - RNA, 11 nt, Human
uuauuugcaua

SEQ ID NO: 2369908 - RNA, 18 nt, Human
uuauuuuauuaugcauga

SEQ ID NO: 2369909 - RNA, 20 nt, Human
uuauuuuaauaauguuucaa

SEQ ID NO: 2369910 - RNA, 14 nt, Human
uuauuuguacaguu

SEQ ID NO: 2369911 - RNA, 15 nt, Human
uuauuuguacaguuc

SEQ ID NO: 2369912 - RNA, 22 nt, Human
uuauuuguguuuuaauuuaaac

SEQ ID NO: 2369913 - RNA, 13 nt, Human
uuauuuguguaau

SEQ ID NO: 2369914 - RNA, 16 nt, Human
uuauuuguguaauaga

SEQ ID NO: 2369915 - RNA, 13 nt, Human
uuauuuuaaaaga

SEQ ID NO: 2369916 - RNA, 21 nt, Human
uuauuuguguaauagaaaacu

SEQ ID NO: 2369917 - RNA, 18 nt, Human
uuauuuguuauuuucagu

SEQ ID NO: 2369918 - RNA, 19 nt, Human
uuauuuuaauaauguuuca

SEQ ID NO: 2369919 - RNA, 15 nt, Human
uuauuuguuuucccg

SEQ ID NO: 2369920 - RNA, 14 nt, Human
uuauuuuaaacaaa

SEQ ID NO: 2369921 - RNA, 16 nt, Human
uuauuuuaaacaaaau

SEQ ID NO: 2369922 - RNA, 15 nt, Human
uucaauauccuuugc

SEQ ID NO: 2369923 - RNA, 11 nt, Human
uucaauauuua

SEQ ID NO: 2369924 - RNA, 17 nt, Human
uucacaaacuuuuauac

SEQ ID NO: 2369925 - RNA, 16 nt, Human
uucacaaacuuuuaua

SEQ ID NO: 2369926 - RNA, 11 nt, Human
uucacaaauaa

SEQ ID NO: 2369927 - RNA, 15 nt, Human
uucacaaagcccaag

SEQ ID NO: 2369928 - RNA, 22 nt, Human
uucacaaacuuuuauacucuuu

SEQ ID NO: 2369929 - RNA, 20 nt, Human
uucaauaagcaucaaacucu

SEQ ID NO: 2369930 - RNA, 21 nt, Human
uucaauaggaaaaacugauuu

SEQ ID NO: 2369931 - RNA, 22 nt, Human
uucaauaggaaaaacugauuuu

SEQ ID NO: 2369932 - RNA, 21 nt, Human
uucacaaccuucuguggcuca

SEQ ID NO: 2369933 - RNA, 15 nt, Human
uucaccccucccuuu

SEQ ID NO: 2369934 - RNA, 16 nt, Human
uucaccccucccuuuc

SEQ ID NO: 2369935 - RNA, 22 nt, Human
uucacaagacccaaaaggcaga

SEQ ID NO: 2369936 - RNA, 13 nt, Human
uucacccuuuucu

SEQ ID NO: 2369937 - RNA, 17 nt, Human
uucaccccucccuuucu

SEQ ID NO: 2369938 - RNA, 18 nt, Human
uucaccccucccuuucuc

SEQ ID NO: 2369939 - RNA, 20 nt, Human
uucaccccucccuuucuccc

SEQ ID NO: 2369940 - RNA, 22 nt, Human
uucaccccucccuuucuccccu

SEQ ID NO: 2369941 - RNA, 22 nt, Human
uucacccuguccaaacugccua

SEQ ID NO: 2369942 - RNA, 14 nt, Human
uucaccgaggacau

SEQ ID NO: 2369943 - RNA, 14 nt, Human
uucaccuuuguccc

SEQ ID NO: 2369944 - RNA, 19 nt, Human
uucaccuuuguccccaccg

SEQ ID NO: 2369945 - RNA, 20 nt, Human
uucaccuuuguccccaccgc

SEQ ID NO: 2369946 - RNA, 14 nt, Human
uucagcucacugca

SEQ ID NO: 2369947 - RNA, 14 nt, Human
uucagauauaaaag

SEQ ID NO: 2369948 - RNA, 15 nt, Human
uucagauauaaaaga

SEQ ID NO: 2369949 - RNA, 12 nt, Human
uucagauauaaa

SEQ ID NO: 2369950 - RNA, 12 nt, Human
uucagauacaug

SEQ ID NO: 2369951 - RNA, 17 nt, Human
uucagauacaaacugca

SEQ ID NO: 2369952 - RNA, 17 nt, Human
uucagacagcugccugg

SEQ ID NO: 2369953 - RNA, 17 nt, Human
uucacggaagagccuug

SEQ ID NO: 2369954 - RNA, 14 nt, Human
uucagacagcugcc

SEQ ID NO: 2369955 - RNA, 15 nt, Human
uucagacagcugccu

SEQ ID NO: 2369956 - RNA, 16 nt, Human
uucagacagcugccug

SEQ ID NO: 2369957 - RNA, 19 nt, Human
uucaccucacugaaaacau

SEQ ID NO: 2369958 - RNA, 17 nt, Human
uucacgaaguguugcau

SEQ ID NO: 2369959 - RNA, 20 nt, Human
uucacgaaguguugcaugga

SEQ ID NO: 2369960 - RNA, 15 nt, Human
uucacgagagcccgg

SEQ ID NO: 2369961 - RNA, 22 nt, Human
uucaccucacugaaaacaucug

SEQ ID NO: 2369962 - RNA, 22 nt, Human
uucaccuuuguccccaccgcag

SEQ ID NO: 2369963 - RNA, 23 nt, Human
uucacgccuguaaucccagcacu

SEQ ID NO: 2369964 - RNA, 21 nt, Human
uucacgccuguaaucccagca

SEQ ID NO: 2369965 - RNA, 13 nt, Human
uucacggaagagc

SEQ ID NO: 2369966 - RNA, 22 nt, Human
uugaacugauaguuacuguugu

SEQ ID NO: 2369967 - RNA, 20 nt, Human
uugaacugauaguuacuguu

SEQ ID NO: 2369968 - RNA, 21 nt, Human
uugaacugauaguuacuguug

SEQ ID NO: 2369969 - RNA, 13 nt, Human
uugaacuuugacc

SEQ ID NO: 2369970 - RNA, 18 nt, Human
uugaacuggguacuugug

SEQ ID NO: 2369971 - RNA, 15 nt, Human
uugaacuccugggcu

SEQ ID NO: 2369972 - RNA, 19 nt, Human
uugaacugauaguuacugu

SEQ ID NO: 2369973 - RNA, 17 nt, Human
uugaacuccugaccuca

SEQ ID NO: 2369974 - RNA, 22 nt, Human
uugaacuuaaauaaaugucauu

SEQ ID NO: 2369975 - RNA, 14 nt, Human
uugaauuguaagga

SEQ ID NO: 2369976 - RNA, 18 nt, Human
uugaacuuaaauaaaugu

SEQ ID NO: 2369977 - RNA, 18 nt, Human
uugaacuuccugcaggua

SEQ ID NO: 2369978 - RNA, 16 nt, Human
uugaauuuucccacug

SEQ ID NO: 2369979 - RNA, 17 nt, Human
uugaauuuucccacugc

SEQ ID NO: 2369980 - RNA, 18 nt, Human
uugaauuuugaugaacaa

SEQ ID NO: 2369981 - RNA, 18 nt, Human
uugaauuuucccacugca

SEQ ID NO: 2369982 - RNA, 14 nt, Human
uugaauuuucugug

SEQ ID NO: 2369983 - RNA, 14 nt, Human
uugacaacaaauua

SEQ ID NO: 2369984 - RNA, 13 nt, Human
uugacaaacucuc

SEQ ID NO: 2369985 - RNA, 13 nt, Human
uugacaacaucug

SEQ ID NO: 2369986 - RNA, 12 nt, Human
uugacaacaucu

SEQ ID NO: 2369987 - RNA, 16 nt, Human
uugacaaccaugagac

SEQ ID NO: 2369988 - RNA, 20 nt, Human
uugacaaagucaagccacau

SEQ ID NO: 2369989 - RNA, 18 nt, Human
uugacaaaggcaagcacu

SEQ ID NO: 2369990 - RNA, 19 nt, Human
uugacaaagucaagccaca

SEQ ID NO: 2369991 - RNA, 16 nt, Human
uugacaaaauuuguug

SEQ ID NO: 2369992 - RNA, 20 nt, Human
uugaccgcgacuaauuucaa

SEQ ID NO: 2369993 - RNA, 21 nt, Human
uugaccucaggugauccaccc

SEQ ID NO: 2369994 - RNA, 15 nt, Human
uugaccucugcagca

SEQ ID NO: 2369995 - RNA, 14 nt, Human
uugaccucugcagc

SEQ ID NO: 2369996 - RNA, 18 nt, Human
uugacaauaaaugugcuu

SEQ ID NO: 2369997 - RNA, 22 nt, Human
uugacaagucauuuuaacuuua

SEQ ID NO: 2369998 - RNA, 14 nt, Human
uugacccacaagaa

SEQ ID NO: 2369999 - RNA, 17 nt, Human
uugaccgugaggccaga

SEQ ID NO: 2370000 - RNA, 17 nt, Human
uugacccacaagaaaug

SEQ ID NO: 2370001 - RNA, 23 nt, Human
uugacuccuugugguuuauguca

SEQ ID NO: 2370002 - RNA, 19 nt, Human
uugacucuggcaaagcuuu

SEQ ID NO: 2370003 - RNA, 13 nt, Human
uugacucugggga

SEQ ID NO: 2370004 - RNA, 15 nt, Human
uugacucuuuugcca

SEQ ID NO: 2370005 - RNA, 21 nt, Human
uugacucuuuugccauuaaac

SEQ ID NO: 2370006 - RNA, 20 nt, Human
uugacugaagaugcagcuca

SEQ ID NO: 2370007 - RNA, 14 nt, Human
uugacucaccuguu

SEQ ID NO: 2370008 - RNA, 19 nt, Human
uugacucaccuguuacuug

SEQ ID NO: 2370009 - RNA, 16 nt, Human
uugaccucugcagcaa

SEQ ID NO: 2370010 - RNA, 17 nt, Human
uugacgccaucccagcc

SEQ ID NO: 2370011 - RNA, 18 nt, Human
uugacgccaucccagccc

SEQ ID NO: 2370012 - RNA, 19 nt, Human
uugacgccaucccagcccc

SEQ ID NO: 2370013 - RNA, 18 nt, Human
uugauauaaauaaaacau

SEQ ID NO: 2370014 - RNA, 20 nt, Human
uugauauacuuuuuucuuau

SEQ ID NO: 2370015 - RNA, 21 nt, Human
uugauauacuuuuuucuuauu

SEQ ID NO: 2370016 - RNA, 17 nt, Human
uugauauagaacagugc

SEQ ID NO: 2370017 - RNA, 22 nt, Human
uugauauagaacagugcuugcc

SEQ ID NO: 2370018 - RNA, 23 nt, Human
uugauauccucuuugagugaagc

SEQ ID NO: 2370019 - RNA, 17 nt, Human
uugaggucugcucggcc

SEQ ID NO: 2370020 - RNA, 14 nt, Human
uugauagcuuuauu

SEQ ID NO: 2370021 - RNA, 19 nt, Human
uugauagcuuuauuuuuua

SEQ ID NO: 2370022 - RNA, 23 nt, Human
uugauagcacagacccugcccug

SEQ ID NO: 2370023 - RNA, 20 nt, Human
uugaugaccaaaguccuuuu

SEQ ID NO: 2370024 - RNA, 15 nt, Human
uugauaucacagucu

SEQ ID NO: 2370025 - RNA, 23 nt, Human
uugaugaagaaguugauaugccu

SEQ ID NO: 2370026 - RNA, 13 nt, Human
uugaugaagaagu

SEQ ID NO: 2370027 - RNA, 14 nt, Human
uugaugaagaaguu

SEQ ID NO: 2370028 - RNA, 21 nt, Human
uugagguaggagaauugcuug

SEQ ID NO: 2370029 - RNA, 19 nt, Human
uugagguacucugcacaua

SEQ ID NO: 2370030 - RNA, 22 nt, Human
uugaggucaaguaagaagacau

SEQ ID NO: 2370031 - RNA, 16 nt, Human
uugaggucaaguaaga

SEQ ID NO: 2370032 - RNA, 21 nt, Human
uugagguccagcccuggcuga

SEQ ID NO: 2370033 - RNA, 16 nt, Human
uugaggguugggcugg

SEQ ID NO: 2370034 - RNA, 13 nt, Human
uugaggguugggc

SEQ ID NO: 2370035 - RNA, 20 nt, Human
uugagccgggccccugggcu

SEQ ID NO: 2370036 - RNA, 11 nt, Human
uugagccuggg

SEQ ID NO: 2370037 - RNA, 19 nt, Human
uugagccgggccccugggc

SEQ ID NO: 2370038 - RNA, 19 nt, Human
uugagccccaaguccugaa

SEQ ID NO: 2370039 - RNA, 14 nt, Human
uugagccccaaguc

SEQ ID NO: 2370040 - RNA, 18 nt, Human
uugagccccaaguccuga

SEQ ID NO: 2370041 - RNA, 23 nt, Human
uugagccccaaguccugaagagg

SEQ ID NO: 2370042 - RNA, 13 nt, Human
uugagcccaggag

SEQ ID NO: 2370043 - RNA, 22 nt, Human
uugagccaggccugggucugug

SEQ ID NO: 2370044 - RNA, 19 nt, Human
uugagcccacaaagccuua

SEQ ID NO: 2370045 - RNA, 17 nt, Human
uugagccaggccugggu

SEQ ID NO: 2370046 - RNA, 13 nt, Human
uugagccaggccu

SEQ ID NO: 2370047 - RNA, 19 nt, Human
uugagccagcagacauugu

SEQ ID NO: 2370048 - RNA, 20 nt, Human
uugagccagcagacauuguc

SEQ ID NO: 2370049 - RNA, 23 nt, Human
uugacuggguuucucuguauagu

SEQ ID NO: 2370050 - RNA, 17 nt, Human
uugacuggguuucucug

SEQ ID NO: 2370051 - RNA, 12 nt, Human
uugacuguuuuu

SEQ ID NO: 2370052 - RNA, 19 nt, Human
uugacuguuuuuacccaua

SEQ ID NO: 2370053 - RNA, 23 nt, Human
uugauuuuacaauugaaaugacu

SEQ ID NO: 2370054 - RNA, 13 nt, Human
uugauuuuacaau

SEQ ID NO: 2370055 - RNA, 20 nt, Human
uugauuuuagccuucucugu

SEQ ID NO: 2370056 - RNA, 18 nt, Human
uugauuugaagaacaugu

SEQ ID NO: 2370057 - RNA, 14 nt, Human
uugauuugcauuga

SEQ ID NO: 2370058 - RNA, 13 nt, Human
uugauuugcauug

SEQ ID NO: 2370059 - RNA, 19 nt, Human
uugauuugcauugaacaca

SEQ ID NO: 2370060 - RNA, 17 nt, Human
uugauuugcauugaaca

SEQ ID NO: 2370061 - RNA, 15 nt, Human
uugauuugcauugaa

SEQ ID NO: 2370062 - RNA, 12 nt, Human
uugcaaauaguc

SEQ ID NO: 2370063 - RNA, 22 nt, Human
uugcaaaggagcucacuguggu

SEQ ID NO: 2370064 - RNA, 21 nt, Human
uugcaaaguaucccuacugua

SEQ ID NO: 2370065 - RNA, 17 nt, Human
uugcaaaucuugaaauu

SEQ ID NO: 2370066 - RNA, 23 nt, Human
uugcaaaugcccuuacacuuacu

SEQ ID NO: 2370067 - RNA, 16 nt, Human
uugcaaaucuugaaau

SEQ ID NO: 2370068 - RNA, 15 nt, Human
uugcaaaucuugaaa

SEQ ID NO: 2370069 - RNA, 12 nt, Human
uugcaaaucuug

SEQ ID NO: 2370070 - RNA, 23 nt, Human
uugauugcuaaauguaacagucu

SEQ ID NO: 2370071 - RNA, 14 nt, Human
uugauuugaagaac

SEQ ID NO: 2370072 - RNA, 13 nt, Human
uugauuugaagaa

SEQ ID NO: 2370073 - RNA, 21 nt, Human
uugauugagaguaacuuaagu

SEQ ID NO: 2370074 - RNA, 12 nt, Human
uugauucuuccu

SEQ ID NO: 2370075 - RNA, 20 nt, Human
uugauucugcaguaaaucuu

SEQ ID NO: 2370076 - RNA, 12 nt, Human
uugauucugcag

SEQ ID NO: 2370077 - RNA, 14 nt, Human
uugauugauuugaa

SEQ ID NO: 2370078 - RNA, 13 nt, Human
uugauugauuuga

SEQ ID NO: 2370079 - RNA, 12 nt, Human
uugauugcuaaa

SEQ ID NO: 2370080 - RNA, 13 nt, Human
uugauugcuaaau

SEQ ID NO: 2370081 - RNA, 15 nt, Human
uugauugcuaaaugu

SEQ ID NO: 2370082 - RNA, 20 nt, Human
uugauugcuaaauguaacag

SEQ ID NO: 2370083 - RNA, 16 nt, Human
uugaugaucuuugcag

SEQ ID NO: 2370084 - RNA, 19 nt, Human
uugauaucacagucuaauu

SEQ ID NO: 2370085 - RNA, 14 nt, Human
uugaugaggccucu

SEQ ID NO: 2370086 - RNA, 17 nt, Human
uugaugacccccaacca

SEQ ID NO: 2370087 - RNA, 20 nt, Human
uugaugcauuaaaagaaaau

SEQ ID NO: 2370088 - RNA, 19 nt, Human
uugaugcauuaaaagaaaa

SEQ ID NO: 2370089 - RNA, 19 nt, Human
uucuucccaucacuggagc

SEQ ID NO: 2370090 - RNA, 21 nt, Human
uucuucccuuuuacauacugc

SEQ ID NO: 2370091 - RNA, 20 nt, Human
uucuucccuuuuacauacug

SEQ ID NO: 2370092 - RNA, 22 nt, Human
uucuucccuuuuacauacugcu

SEQ ID NO: 2370093 - RNA, 21 nt, Human
uucuuccuauuugccaugggc

SEQ ID NO: 2370094 - RNA, 13 nt, Human
uucuuccauccca

SEQ ID NO: 2370095 - RNA, 13 nt, Human
uucuuccaucuga

SEQ ID NO: 2370096 - RNA, 14 nt, Human
uucuuccaucccag

SEQ ID NO: 2370097 - RNA, 16 nt, Human
uucuuccaucccagga

SEQ ID NO: 2370098 - RNA, 17 nt, Human
uucuuccaucccaggac

SEQ ID NO: 2370099 - RNA, 14 nt, Human
uucuuccaucugau

SEQ ID NO: 2370100 - RNA, 21 nt, Human
uucuuauacauuugauaaagu

SEQ ID NO: 2370101 - RNA, 17 nt, Human
uucuuccaaaaagauuu

SEQ ID NO: 2370102 - RNA, 22 nt, Human
uucuuauaaauaugaagcucac

SEQ ID NO: 2370103 - RNA, 21 nt, Human
uucuucauucaauacaagugu

SEQ ID NO: 2370104 - RNA, 20 nt, Human
uucuuccaggugcccagcua

SEQ ID NO: 2370105 - RNA, 19 nt, Human
uucuuccaggugcccagcu

SEQ ID NO: 2370106 - RNA, 21 nt, Human
uucuuccacaagagcccaggc

SEQ ID NO: 2370107 - RNA, 14 nt, Human
uucuuuccaaagua

SEQ ID NO: 2370108 - RNA, 12 nt, Human
uucuuucagcca

SEQ ID NO: 2370109 - RNA, 23 nt, Human
uucuuuaaaaaacaacuauggau

SEQ ID NO: 2370110 - RNA, 13 nt, Human
uucuuuaaaagaa

SEQ ID NO: 2370111 - RNA, 16 nt, Human
uucuuuaaaagaaugg

SEQ ID NO: 2370112 - RNA, 19 nt, Human
uucuuuaaaagaaugggca

SEQ ID NO: 2370113 - RNA, 13 nt, Human
uucuuccucccuc

SEQ ID NO: 2370114 - RNA, 21 nt, Human
uucuuguguguuuauugucaa

SEQ ID NO: 2370115 - RNA, 22 nt, Human
uugaaaaaauagagccugaggg

SEQ ID NO: 2370116 - RNA, 16 nt, Human
uugaaaaccugacaaa

SEQ ID NO: 2370117 - RNA, 18 nt, Human
uugaaaacauaaucugca

SEQ ID NO: 2370118 - RNA, 23 nt, Human
uugaaaacacuguucucugcccu

SEQ ID NO: 2370119 - RNA, 18 nt, Human
uucuuuuuuuucauuaua

SEQ ID NO: 2370120 - RNA, 14 nt, Human
uucuuucauuuucu

SEQ ID NO: 2370121 - RNA, 21 nt, Human
uucuuuccaaaguacacuguu

SEQ ID NO: 2370122 - RNA, 20 nt, Human
uugaaaaaauagagccugag

SEQ ID NO: 2370123 - RNA, 20 nt, Human
uugaaaaaccauuuugcugu

SEQ ID NO: 2370124 - RNA, 12 nt, Human
uugaaaagcuau

SEQ ID NO: 2370125 - RNA, 21 nt, Human
uugaaaagaggugugcaagag

SEQ ID NO: 2370126 - RNA, 14 nt, Human
uugaaaagaggugu

SEQ ID NO: 2370127 - RNA, 13 nt, Human
uugaaaagacauc

SEQ ID NO: 2370128 - RNA, 17 nt, Human
uugaaaacuuuucucag

SEQ ID NO: 2370129 - RNA, 13 nt, Human
uugaaaagaggug

SEQ ID NO: 2370130 - RNA, 13 nt, Human
uugaaaacuuuuc

SEQ ID NO: 2370131 - RNA, 14 nt, Human
uugaaaacuuuucu

SEQ ID NO: 2370132 - RNA, 16 nt, Human
uugaaaacuuuucuca

SEQ ID NO: 2370133 - RNA, 15 nt, Human
uugaacuccuggccu

SEQ ID NO: 2370134 - RNA, 16 nt, Human
uugaacuccuggccuc

SEQ ID NO: 2370135 - RNA, 15 nt, Human
uugaaaagucaaacu

SEQ ID NO: 2370136 - RNA, 15 nt, Human
uugaacucagaucug

SEQ ID NO: 2370137 - RNA, 20 nt, Human
uugaacucagaucugucuga

SEQ ID NO: 2370138 - RNA, 13 nt, Human
uugaaaagcuauu

SEQ ID NO: 2370139 - RNA, 22 nt, Human
uugaaaagcuauuagccaggau

SEQ ID NO: 2370140 - RNA, 14 nt, Human
uugaaaagcuauua

SEQ ID NO: 2370141 - RNA, 16 nt, Human
uugaaaaggugaccuu

SEQ ID NO: 2370142 - RNA, 14 nt, Human
uucugcuuaggaga

SEQ ID NO: 2370143 - RNA, 20 nt, Human
uucugcugggcuggggccug

SEQ ID NO: 2370144 - RNA, 18 nt, Human
uucugcuuguguuaagua

SEQ ID NO: 2370145 - RNA, 19 nt, Human
uucugcuucagccucccga

SEQ ID NO: 2370146 - RNA, 15 nt, Human
uucugcuucagccuc

SEQ ID NO: 2370147 - RNA, 16 nt, Human
uucugcuucagccucc

SEQ ID NO: 2370148 - RNA, 18 nt, Human
uucugcuggaaacagacu

SEQ ID NO: 2370149 - RNA, 21 nt, Human
uucugcuggauaaaaugaggu

SEQ ID NO: 2370150 - RNA, 13 nt, Human
uucugcuggauaa

SEQ ID NO: 2370151 - RNA, 12 nt, Human
uucugcuggccu

SEQ ID NO: 2370152 - RNA, 14 nt, Human
uucugcugaauuuu

SEQ ID NO: 2370153 - RNA, 18 nt, Human
uucugcugaauuuucaca

SEQ ID NO: 2370154 - RNA, 20 nt, Human
uucugcugaauuuucacaug

SEQ ID NO: 2370155 - RNA, 14 nt, Human
uucugcuucagccu

SEQ ID NO: 2370156 - RNA, 13 nt, Human
uucugcuggccug

SEQ ID NO: 2370157 - RNA, 14 nt, Human
uucugcuggccugg

SEQ ID NO: 2370158 - RNA, 15 nt, Human
uucugcuggccugga

SEQ ID NO: 2370159 - RNA, 18 nt, Human
uucugcuggccuggaucu

SEQ ID NO: 2370160 - RNA, 19 nt, Human
uucugcuggccuggaucuc

SEQ ID NO: 2370161 - RNA, 13 nt, Human
uucugcugggcug

SEQ ID NO: 2370162 - RNA, 15 nt, Human
uucugcugggcuggg

SEQ ID NO: 2370163 - RNA, 15 nt, Human
uucuggagcccuugg

SEQ ID NO: 2370164 - RNA, 13 nt, Human
uucuggagcccuu

SEQ ID NO: 2370165 - RNA, 20 nt, Human
uucuggagguugauaacuuu

SEQ ID NO: 2370166 - RNA, 15 nt, Human
uucuggagucuccag

SEQ ID NO: 2370167 - RNA, 17 nt, Human
uucuggagucuccagug

SEQ ID NO: 2370168 - RNA, 10 nt, Human
uucuggaguu

SEQ ID NO: 2370169 - RNA, 10 nt, Human
uucuggagcc

SEQ ID NO: 2370170 - RNA, 21 nt, Human
uucuggaccuuguuguuguua

SEQ ID NO: 2370171 - RNA, 19 nt, Human
uucuggacccguucaacuu

SEQ ID NO: 2370172 - RNA, 22 nt, Human
uucuggaauguaaucaauguuu

SEQ ID NO: 2370173 - RNA, 15 nt, Human
uucuggaauguaauc

SEQ ID NO: 2370174 - RNA, 19 nt, Human
uucuggaauacaugaaaua

SEQ ID NO: 2370175 - RNA, 16 nt, Human
uucuggaauguaauca

SEQ ID NO: 2370176 - RNA, 20 nt, Human
uucuggaauguaaucaaugu

SEQ ID NO: 2370177 - RNA, 15 nt, Human
uucugcuuucaucuu

SEQ ID NO: 2370178 - RNA, 16 nt, Human
uucugcuuaggagaga

SEQ ID NO: 2370179 - RNA, 18 nt, Human
uucugcuuuccucuuccu

SEQ ID NO: 2370180 - RNA, 14 nt, Human
uucugcuuugcucu

SEQ ID NO: 2370181 - RNA, 21 nt, Human
uucugcuuuuaccaugccccu

SEQ ID NO: 2370182 - RNA, 17 nt, Human
uucuggaauacaugaaa

SEQ ID NO: 2370183 - RNA, 19 nt, Human
uucugcuuuugaaaucugu

SEQ ID NO: 2370184 - RNA, 18 nt, Human
uucuggaaaagaggaguu

SEQ ID NO: 2370185 - RNA, 13 nt, Human
uucugcuuuucug

SEQ ID NO: 2370186 - RNA, 17 nt, Human
uucugcuuuucugcccu

SEQ ID NO: 2370187 - RNA, 18 nt, Human
uucugcuuuucugcccug

SEQ ID NO: 2370188 - RNA, 19 nt, Human
uucugcuuuucugcccugg

SEQ ID NO: 2370189 - RNA, 14 nt, Human
uucuuaguugcugu

SEQ ID NO: 2370190 - RNA, 15 nt, Human
uucuuaguugcugua

SEQ ID NO: 2370191 - RNA, 23 nt, Human
uucuuaguugcuguaugucucgu

SEQ ID NO: 2370192 - RNA, 13 nt, Human
uucuuauaaauau

SEQ ID NO: 2370193 - RNA, 14 nt, Human
uucuuauaaauaug

SEQ ID NO: 2370194 - RNA, 15 nt, Human
uucuuauaaauauga

SEQ ID NO: 2370195 - RNA, 17 nt, Human
uucuuauaaauaugaag

SEQ ID NO: 2370196 - RNA, 20 nt, Human
uucuguguguuuucauaaua

SEQ ID NO: 2370197 - RNA, 22 nt, Human
uucugugugugaugugcauggg

SEQ ID NO: 2370198 - RNA, 23 nt, Human
uucugugugcaccuuaccaacuu

SEQ ID NO: 2370199 - RNA, 22 nt, Human
uucugugguuuuccccucccug

SEQ ID NO: 2370200 - RNA, 18 nt, Human
uucuuaguucucacuguu

SEQ ID NO: 2370201 - RNA, 19 nt, Human
uucuuaguucucacuguuc

SEQ ID NO: 2370202 - RNA, 13 nt, Human
uucugugugaaga

SEQ ID NO: 2370203 - RNA, 23 nt, Human
uucugugucuuucacagcuccuc

SEQ ID NO: 2370204 - RNA, 12 nt, Human
uucugugucuuu

SEQ ID NO: 2370205 - RNA, 22 nt, Human
uucugugucuuucacagcuccu

SEQ ID NO: 2370206 - RNA, 18 nt, Human
uucugugguuuuccccuc

SEQ ID NO: 2370207 - RNA, 20 nt, Human
uucugugguuuuccccuccc

SEQ ID NO: 2370208 - RNA, 23 nt, Human
uucugugguuuuccccucccugg

SEQ ID NO: 2370209 - RNA, 21 nt, Human
uucugucucugccucccucac

SEQ ID NO: 2370210 - RNA, 14 nt, Human
uucugucuuuagau

SEQ ID NO: 2370211 - RNA, 17 nt, Human
uucugucuucacaacag

SEQ ID NO: 2370212 - RNA, 18 nt, Human
uucuguauuuuguuuuug

SEQ ID NO: 2370213 - RNA, 20 nt, Human
uucuguauuuuuuuuucuaa

SEQ ID NO: 2370214 - RNA, 22 nt, Human
uucuguauuuuuuuuucuaaga

SEQ ID NO: 2370215 - RNA, 11 nt, Human
uucuguauuuu

SEQ ID NO: 2370216 - RNA, 20 nt, Human
uucuggauuuugucaagcag

SEQ ID NO: 2370217 - RNA, 15 nt, Human
uucuggauucuuggc

SEQ ID NO: 2370218 - RNA, 15 nt, Human
uucuggaugcauuuc

SEQ ID NO: 2370219 - RNA, 20 nt, Human
uucuggaugcauuucucugg

SEQ ID NO: 2370220 - RNA, 13 nt, Human
uucuggauaaagc

SEQ ID NO: 2370221 - RNA, 18 nt, Human
uucuggauaaagccacug

SEQ ID NO: 2370222 - RNA, 19 nt, Human
uucuggauaaagccacuga

SEQ ID NO: 2370223 - RNA, 23 nt, Human
uucuguccuuuuggcacugagau

SEQ ID NO: 2370224 - RNA, 18 nt, Human
uucugucgccuuagcaug

SEQ ID NO: 2370225 - RNA, 22 nt, Human
uucuguccuuuuggcacugaga

SEQ ID NO: 2370226 - RNA, 14 nt, Human
uucuguccuucaga

SEQ ID NO: 2370227 - RNA, 17 nt, Human
uucugucccuuggagcu

SEQ ID NO: 2370228 - RNA, 13 nt, Human
uucuguccugcug

SEQ ID NO: 2370229 - RNA, 18 nt, Human
uucuguccuggugucacu

SEQ ID NO: 2370230 - RNA, 16 nt, Human
uucugucucauaugau

SEQ ID NO: 2370231 - RNA, 21 nt, Human
uucugucgccuuagcauguuu

SEQ ID NO: 2370232 - RNA, 13 nt, Human
uucugucucugcc

SEQ ID NO: 2370233 - RNA, 14 nt, Human
uucugucucugccu

SEQ ID NO: 2370234 - RNA, 19 nt, Human
uucugucucugccucccuc

SEQ ID NO: 2370235 - RNA, 14 nt, Human
uucugucaagaaga

SEQ ID NO: 2370236 - RNA, 19 nt, Human
uucuguccuacucuguguc

SEQ ID NO: 2370237 - RNA, 14 nt, Human
uucugucccuucug

SEQ ID NO: 2370238 - RNA, 15 nt, Human
uucugucccucacag

SEQ ID NO: 2370239 - RNA, 17 nt, Human
uucggggaacuccugga

SEQ ID NO: 2370240 - RNA, 21 nt, Human
uucgggugugcaaugucugag

SEQ ID NO: 2370241 - RNA, 17 nt, Human
uucgggugugcaauguc

SEQ ID NO: 2370242 - RNA, 16 nt, Human
uuccuuucauuuacug

SEQ ID NO: 2370243 - RNA, 14 nt, Human
uuccuuuauauuua

SEQ ID NO: 2370244 - RNA, 13 nt, Human
uuccuuuauaaug

SEQ ID NO: 2370245 - RNA, 18 nt, Human
uucggugagcuacaaaug

SEQ ID NO: 2370246 - RNA, 20 nt, Human
uuccugauaugauuuaaaac

SEQ ID NO: 2370247 - RNA, 18 nt, Human
uuccuugcucugcacccc

SEQ ID NO: 2370248 - RNA, 17 nt, Human
uuccuuggacucauuuu

SEQ ID NO: 2370249 - RNA, 20 nt, Human
uuccuugcuguccuaggcca

SEQ ID NO: 2370250 - RNA, 18 nt, Human
uuccuugcuguccuaggc

SEQ ID NO: 2370251 - RNA, 18 nt, Human
uuccuuguauuuaaauau

SEQ ID NO: 2370252 - RNA, 15 nt, Human
uuccuuguauuuaaa

SEQ ID NO: 2370253 - RNA, 13 nt, Human
uuccuugucccca

SEQ ID NO: 2370254 - RNA, 16 nt, Human
uuccuugucacuggua

SEQ ID NO: 2370255 - RNA, 17 nt, Human
uuccuuuaaaaaaauuu

SEQ ID NO: 2370256 - RNA, 23 nt, Human
uuccuuuaaaaaaauuuaagugc

SEQ ID NO: 2370257 - RNA, 21 nt, Human
uuccuuguccccacacuccua

SEQ ID NO: 2370258 - RNA, 16 nt, Human
uuccuuguccccacac

SEQ ID NO: 2370259 - RNA, 17 nt, Human
uuccuuguccccacacu

SEQ ID NO: 2370260 - RNA, 20 nt, Human
uuccuuguccccacacuccu

SEQ ID NO: 2370261 - RNA, 16 nt, Human
uuccuuuaaaaaaauu

SEQ ID NO: 2370262 - RNA, 21 nt, Human
uuccuugaguugauucagcuc

SEQ ID NO: 2370263 - RNA, 15 nt, Human
uuccuggacacucag

SEQ ID NO: 2370264 - RNA, 13 nt, Human
uuccuugccugca

SEQ ID NO: 2370265 - RNA, 19 nt, Human
uuccuugccugcacaaacu

SEQ ID NO: 2370266 - RNA, 13 nt, Human
uuccuugcuaaug

SEQ ID NO: 2370267 - RNA, 13 nt, Human
uuccuugcucaac

SEQ ID NO: 2370268 - RNA, 15 nt, Human
uuccuugcucaacca

SEQ ID NO: 2370269 - RNA, 11 nt, Human
uuccuugcucu

SEQ ID NO: 2370270 - RNA, 13 nt, Human
uuccuugcucucc

SEQ ID NO: 2370271 - RNA, 14 nt, Human
uuccuugcucuccc

SEQ ID NO: 2370272 - RNA, 16 nt, Human
uuccuugcucugcacc

SEQ ID NO: 2370273 - RNA, 21 nt, Human
uuccugcgggcuuuuccccgg

SEQ ID NO: 2370274 - RNA, 15 nt, Human
uuccugcguccuccu

SEQ ID NO: 2370275 - RNA, 20 nt, Human
uuccugcggagugaagaggg

SEQ ID NO: 2370276 - RNA, 23 nt, Human
uuccugcggagugaagaggggca

SEQ ID NO: 2370277 - RNA, 23 nt, Human
uuccugccuucuucuuuuugcug

SEQ ID NO: 2370278 - RNA, 17 nt, Human
uuccugcggagugaaga

SEQ ID NO: 2370279 - RNA, 19 nt, Human
uuccugcggagugaagagg

SEQ ID NO: 2370280 - RNA, 18 nt, Human
uuccugccugucuccuuu

SEQ ID NO: 2370281 - RNA, 16 nt, Human
uuccugccugucuccu

SEQ ID NO: 2370282 - RNA, 18 nt, Human
uuccugcauucacccaga

SEQ ID NO: 2370283 - RNA, 18 nt, Human
uuccugcagccuggaggc

SEQ ID NO: 2370284 - RNA, 15 nt, Human
uuccugccugucucc

SEQ ID NO: 2370285 - RNA, 19 nt, Human
uuccugcguccuccucacc

SEQ ID NO: 2370286 - RNA, 16 nt, Human
uuccugcguccuccuc

SEQ ID NO: 2370287 - RNA, 17 nt, Human
uuccugcguccuccuca

SEQ ID NO: 2370288 - RNA, 17 nt, Human
uuccauggcccucauua

SEQ ID NO: 2370289 - RNA, 21 nt, Human
uuccauggugugaucgucuga

SEQ ID NO: 2370290 - RNA, 12 nt, Human
uuccauggggua

SEQ ID NO: 2370291 - RNA, 16 nt, Human
uuccauggccucuuca

SEQ ID NO: 2370292 - RNA, 14 nt, Human
uuccauggauuuug

SEQ ID NO: 2370293 - RNA, 23 nt, Human
uuccaugccugaggguggagacu

SEQ ID NO: 2370294 - RNA, 15 nt, Human
uuccauggcccucau

SEQ ID NO: 2370295 - RNA, 16 nt, Human
uuccauggcccucauu

SEQ ID NO: 2370296 - RNA, 12 nt, Human
uuccauggccuc

SEQ ID NO: 2370297 - RNA, 16 nt, Human
uuccugaaugaaauau

SEQ ID NO: 2370298 - RNA, 20 nt, Human
uuccugaauucuauuugcug

SEQ ID NO: 2370299 - RNA, 13 nt, Human
uuccugacacuuu

SEQ ID NO: 2370300 - RNA, 22 nt, Human
uuccugacacuuuaauuaccaa

SEQ ID NO: 2370301 - RNA, 22 nt, Human
uuccugaauucuauuugcuggg

SEQ ID NO: 2370302 - RNA, 13 nt, Human
uuccugacccagg

SEQ ID NO: 2370303 - RNA, 14 nt, Human
uuccugacccaggc

SEQ ID NO: 2370304 - RNA, 15 nt, Human
uuccugacccaggcc

SEQ ID NO: 2370305 - RNA, 16 nt, Human
uuccugacccaggccg

SEQ ID NO: 2370306 - RNA, 22 nt, Human
uuccugacccaggccgcagcuc

SEQ ID NO: 2370307 - RNA, 23 nt, Human
uuccugacccaggccgcagcucu

SEQ ID NO: 2370308 - RNA, 14 nt, Human
uuccugaaugaaau

SEQ ID NO: 2370309 - RNA, 14 nt, Human
uuccugaagcugag

SEQ ID NO: 2370310 - RNA, 18 nt, Human
uuccugaauccaaacuaa

SEQ ID NO: 2370311 - RNA, 11 nt, Human
uuccugaagcu

SEQ ID NO: 2370312 - RNA, 13 nt, Human
uuccugaauccaa

SEQ ID NO: 2370313 - RNA, 16 nt, Human
uuccugagcuuggcca

SEQ ID NO: 2370314 - RNA, 21 nt, Human
uuccugaggaagagggacugu

SEQ ID NO: 2370315 - RNA, 20 nt, Human
uuccugaggcugggcucccu

SEQ ID NO: 2370316 - RNA, 20 nt, Human
uuccugagcuuggccagaag

SEQ ID NO: 2370317 - RNA, 13 nt, Human
uuccugagcuugg

SEQ ID NO: 2370318 - RNA, 11 nt, Human
uuccugagcuu

SEQ ID NO: 2370319 - RNA, 15 nt, Human
uuccugaggcugggc

SEQ ID NO: 2370320 - RNA, 21 nt, Human
uuccugcaggccaggccagcu

SEQ ID NO: 2370321 - RNA, 14 nt, Human
uuccugcagccugg

SEQ ID NO: 2370322 - RNA, 15 nt, Human
uuccugcagccugga

SEQ ID NO: 2370323 - RNA, 21 nt, Human
uuccugcaaugaagucucuga

SEQ ID NO: 2370324 - RNA, 13 nt, Human
uuccugcaaugaa

SEQ ID NO: 2370325 - RNA, 20 nt, Human
uuccugcaacucaaggacuu

SEQ ID NO: 2370326 - RNA, 23 nt, Human
uuccugaugcuucuucagagacu

SEQ ID NO: 2370327 - RNA, 19 nt, Human
uuccugauaauaauugauc

SEQ ID NO: 2370328 - RNA, 17 nt, Human
uuccugauaauaauuga

SEQ ID NO: 2370329 - RNA, 21 nt, Human
uuccugauggcaggauggccu

SEQ ID NO: 2370330 - RNA, 19 nt, Human
uuccugaugguacaggaaa

SEQ ID NO: 2370331 - RNA, 22 nt, Human
uuccugaugguacaggaaagcu

SEQ ID NO: 2370332 - RNA, 19 nt, Human
uuccugcaacucaaggacu

SEQ ID NO: 2370333 - RNA, 15 nt, Human
uucuacuuuuaaaga

SEQ ID NO: 2370334 - RNA, 18 nt, Human
uucuacuuuaagcacuac

SEQ ID NO: 2370335 - RNA, 21 nt, Human
uucuacucuuaaguuucucag

SEQ ID NO: 2370336 - RNA, 13 nt, Human
uucuacugugacu

SEQ ID NO: 2370337 - RNA, 18 nt, Human
uucuacucauauauaucu

SEQ ID NO: 2370338 - RNA, 14 nt, Human
uucuacucucccau

SEQ ID NO: 2370339 - RNA, 19 nt, Human
uucuacucucccauggcuu

SEQ ID NO: 2370340 - RNA, 17 nt, Human
uucuacucuuaaguuuc

SEQ ID NO: 2370341 - RNA, 12 nt, Human
uucuacuguaug

SEQ ID NO: 2370342 - RNA, 22 nt, Human
uucuacucgaguuacagacaaa

SEQ ID NO: 2370343 - RNA, 20 nt, Human
uucuauaggaacauaugaaa

SEQ ID NO: 2370344 - RNA, 12 nt, Human
uucuauaugaau

SEQ ID NO: 2370345 - RNA, 20 nt, Human
uucuauaugaauuuaaauau

SEQ ID NO: 2370346 - RNA, 19 nt, Human
uucuaucauuuuuguacag

SEQ ID NO: 2370347 - RNA, 23 nt, Human
uucuauagcagauuguguaacaa

SEQ ID NO: 2370348 - RNA, 14 nt, Human
uucuauagcuuuuc

SEQ ID NO: 2370349 - RNA, 13 nt, Human
uucuacgccaggg

SEQ ID NO: 2370350 - RNA, 12 nt, Human
uucuaccuccca

SEQ ID NO: 2370351 - RNA, 13 nt, Human
uucuaccucccag

SEQ ID NO: 2370352 - RNA, 18 nt, Human
uucuacccuagccauucc

SEQ ID NO: 2370353 - RNA, 20 nt, Human
uucuacccuagccauuccug

SEQ ID NO: 2370354 - RNA, 21 nt, Human
uucuacccuagccauuccugg

SEQ ID NO: 2370355 - RNA, 19 nt, Human
uucuaccuugaggucuuuu

SEQ ID NO: 2370356 - RNA, 18 nt, Human
uucuaccuugaggucuuu

SEQ ID NO: 2370357 - RNA, 12 nt, Human
uucuaccugcca

SEQ ID NO: 2370358 - RNA, 14 nt, Human
uucuaccucccaga

SEQ ID NO: 2370359 - RNA, 11 nt, Human
uucuaccugcc

SEQ ID NO: 2370360 - RNA, 15 nt, Human
uucuacucauauaua

SEQ ID NO: 2370361 - RNA, 13 nt, Human
uucuacuauuuau

SEQ ID NO: 2370362 - RNA, 20 nt, Human
uucuacccagcgagcccugg

SEQ ID NO: 2370363 - RNA, 21 nt, Human
uucuacccagcgagcccuggu

SEQ ID NO: 2370364 - RNA, 14 nt, Human
uucuacccaggugc

SEQ ID NO: 2370365 - RNA, 18 nt, Human
uucuaccauuucagagag

SEQ ID NO: 2370366 - RNA, 15 nt, Human
uucuaccauuucaga

SEQ ID NO: 2370367 - RNA, 22 nt, Human
uucuaccaugaacagaaaacau

SEQ ID NO: 2370368 - RNA, 14 nt, Human
uucuacccuagcca

SEQ ID NO: 2370369 - RNA, 15 nt, Human
uucuacccuagccau

SEQ ID NO: 2370370 - RNA, 18 nt, Human
uucgugaaguauacugua

SEQ ID NO: 2370371 - RNA, 17 nt, Human
uucgugaaguauacugu

SEQ ID NO: 2370372 - RNA, 21 nt, Human
uucgugaaguauacuguauuu

SEQ ID NO: 2370373 - RNA, 14 nt, Human
uucgucuucuaauu

SEQ ID NO: 2370374 - RNA, 19 nt, Human
uucgucuguuuauaaacau

SEQ ID NO: 2370375 - RNA, 13 nt, Human
uucgucuucuaau

SEQ ID NO: 2370376 - RNA, 16 nt, Human
uucgucuucuaauuuc

SEQ ID NO: 2370377 - RNA, 23 nt, Human
uucguacaguucuucgggaagag

SEQ ID NO: 2370378 - RNA, 20 nt, Human
uucguacaguucuucgggaa

SEQ ID NO: 2370379 - RNA, 22 nt, Human
uucguacaguucuucgggaaga

SEQ ID NO: 2370380 - RNA, 19 nt, Human
uucguagcuuucccaaaua

SEQ ID NO: 2370381 - RNA, 22 nt, Human
uucgguggcuagucaagcuccu

SEQ ID NO: 2370382 - RNA, 14 nt, Human
uucgguuucuaacu

SEQ ID NO: 2370383 - RNA, 13 nt, Human
uucggugugcacc

SEQ ID NO: 2370384 - RNA, 20 nt, Human
uucgguuucuaacuuggagc

SEQ ID NO: 2370385 - RNA, 14 nt, Human
uucguacaguucuu

SEQ ID NO: 2370386 - RNA, 15 nt, Human
uucguacaguucuuc

SEQ ID NO: 2370387 - RNA, 14 nt, Human
uucuaaugucuuca

SEQ ID NO: 2370388 - RNA, 23 nt, Human
uucuaaugugugaaucagagcac

SEQ ID NO: 2370389 - RNA, 22 nt, Human
uucguggugaucaauuaaaugu

SEQ ID NO: 2370390 - RNA, 17 nt, Human
uucguggugaucaauua

SEQ ID NO: 2370391 - RNA, 13 nt, Human
uucguggggaggu

SEQ ID NO: 2370392 - RNA, 20 nt, Human
uucgugcggaaucagcuucu

SEQ ID NO: 2370393 - RNA, 17 nt, Human
uucuaauuggcaugaag

SEQ ID NO: 2370394 - RNA, 16 nt, Human
uucuaaugucuucauu

SEQ ID NO: 2370395 - RNA, 17 nt, Human
uucuaaugucuucauuu

SEQ ID NO: 2370396 - RNA, 20 nt, Human
uucuaauuaauaaauuauuu

SEQ ID NO: 2370397 - RNA, 15 nt, Human
uucuacagugguuuu

SEQ ID NO: 2370398 - RNA, 21 nt, Human
uucuacagugguuuuauacug

SEQ ID NO: 2370399 - RNA, 17 nt, Human
uucuacaguauuaugua

SEQ ID NO: 2370400 - RNA, 15 nt, Human
uucuacauacuaugg

SEQ ID NO: 2370401 - RNA, 18 nt, Human
uucuacaaaauccugaug

SEQ ID NO: 2370402 - RNA, 17 nt, Human
uucuaauuuuggaugga

SEQ ID NO: 2370403 - RNA, 21 nt, Human
uucuaauuucaaaaauauaac

SEQ ID NO: 2370404 - RNA, 19 nt, Human
uucuacaaugugaacuuua

SEQ ID NO: 2370405 - RNA, 15 nt, Human
uucuacacagagcag

SEQ ID NO: 2370406 - RNA, 18 nt, Human
uucuacaaugugaacuuu

SEQ ID NO: 2370407 - RNA, 16 nt, Human
uucuacaaugugaacu

SEQ ID NO: 2370408 - RNA, 15 nt, Human
uucuacaaugugaac

SEQ ID NO: 2370409 - RNA, 21 nt, Human
uucuaccacacagcagcaguu

SEQ ID NO: 2370410 - RNA, 14 nt, Human
uucuaccauuucag

SEQ ID NO: 2370411 - RNA, 17 nt, Human
uucuacauuucuuagac

SEQ ID NO: 2370412 - RNA, 16 nt, Human
uucuacauuucuuaga

SEQ ID NO: 2370413 - RNA, 15 nt, Human
uucuacauagaugcu

SEQ ID NO: 2370414 - RNA, 22 nt, Human
uucuacauaaguaauucaagaa

SEQ ID NO: 2370415 - RNA, 12 nt, Human
uucuacccagcg

SEQ ID NO: 2370416 - RNA, 19 nt, Human
uucuacccagcgagcccug

SEQ ID NO: 2370417 - RNA, 20 nt, Human
uucucauuccaacagugagu

SEQ ID NO: 2370418 - RNA, 18 nt, Human
uucucauuccaacaguga

SEQ ID NO: 2370419 - RNA, 20 nt, Human
uucucauuugccaauaauaa

SEQ ID NO: 2370420 - RNA, 15 nt, Human
uucucauuucacccc

SEQ ID NO: 2370421 - RNA, 16 nt, Human
uucucauuucaccccu

SEQ ID NO: 2370422 - RNA, 16 nt, Human
uucuccacccugcucu

SEQ ID NO: 2370423 - RNA, 19 nt, Human
uucucauuucaccccuccc

SEQ ID NO: 2370424 - RNA, 21 nt, Human
uucuccaccuagacuguaaac

SEQ ID NO: 2370425 - RNA, 23 nt, Human
uucuauccuacaacaagaguuua

SEQ ID NO: 2370426 - RNA, 20 nt, Human
uucuaucauuuuuguacagu

SEQ ID NO: 2370427 - RNA, 14 nt, Human
uucuauccucugua

SEQ ID NO: 2370428 - RNA, 15 nt, Human
uucuauccucuguaa

SEQ ID NO: 2370429 - RNA, 14 nt, Human
uucuaugaaauauu

SEQ ID NO: 2370430 - RNA, 17 nt, Human
uucucaugugauccuuu

SEQ ID NO: 2370431 - RNA, 18 nt, Human
uucucaugugauccuuuu

SEQ ID NO: 2370432 - RNA, 21 nt, Human
uucuaugaaauauuauguuaa

SEQ ID NO: 2370433 - RNA, 21 nt, Human
uucuccaccucccacaaagga

SEQ ID NO: 2370434 - RNA, 12 nt, Human
uucuccaccugc

SEQ ID NO: 2370435 - RNA, 14 nt, Human
uucuccaccugcca

SEQ ID NO: 2370436 - RNA, 15 nt, Human
uucuccaccugccag

SEQ ID NO: 2370437 - RNA, 12 nt, Human
uucuccacugga

SEQ ID NO: 2370438 - RNA, 14 nt, Human
uucuccacucaguu

SEQ ID NO: 2370439 - RNA, 20 nt, Human
uucuccaccugccagggaca

SEQ ID NO: 2370440 - RNA, 16 nt, Human
uucuccaccugccagg

SEQ ID NO: 2370441 - RNA, 18 nt, Human
uucuccaccugccaggga

SEQ ID NO: 2370442 - RNA, 18 nt, Human
uucucugagcugugcagg

SEQ ID NO: 2370443 - RNA, 17 nt, Human
uucucugagcugugcag

SEQ ID NO: 2370444 - RNA, 16 nt, Human
uucucugagcugugca

SEQ ID NO: 2370445 - RNA, 19 nt, Human
uucucuccuguaccucuug

SEQ ID NO: 2370446 - RNA, 20 nt, Human
uucuccagcugggcucugca

SEQ ID NO: 2370447 - RNA, 14 nt, Human
uucucugaggacac

SEQ ID NO: 2370448 - RNA, 20 nt, Human
uucucugaggacacuaacca

SEQ ID NO: 2370449 - RNA, 11 nt, Human
uucucugcccu

SEQ ID NO: 2370450 - RNA, 12 nt, Human
uucucugcccuc

SEQ ID NO: 2370451 - RNA, 19 nt, Human
uucuccagacccaccacac

SEQ ID NO: 2370452 - RNA, 17 nt, Human
uucuccacucaguugca

SEQ ID NO: 2370453 - RNA, 13 nt, Human
uucuccagccagc

SEQ ID NO: 2370454 - RNA, 17 nt, Human
uucuccagccuggaccc

SEQ ID NO: 2370455 - RNA, 14 nt, Human
uucuccagccagca

SEQ ID NO: 2370456 - RNA, 22 nt, Human
uucuccagccuggacccccagc

SEQ ID NO: 2370457 - RNA, 12 nt, Human
uucuccagcugg

SEQ ID NO: 2370458 - RNA, 23 nt, Human
uucuccagccuggacccccagcu

SEQ ID NO: 2370459 - RNA, 14 nt, Human
uucuccagcugggc

SEQ ID NO: 2370460 - RNA, 15 nt, Human
uucuccagcugggcu

SEQ ID NO: 2370461 - RNA, 13 nt, Human
uucucuccagccc

SEQ ID NO: 2370462 - RNA, 14 nt, Human
uucucuccagcccc

SEQ ID NO: 2370463 - RNA, 18 nt, Human
uucucuccuguaccucuu

SEQ ID NO: 2370464 - RNA, 14 nt, Human
uucucuccuguacc

SEQ ID NO: 2370465 - RNA, 15 nt, Human
uucucuccagccccu

SEQ ID NO: 2370466 - RNA, 16 nt, Human
uucucuccagccccug

SEQ ID NO: 2370467 - RNA, 18 nt, Human
uucugagaagguccuuaa

SEQ ID NO: 2370468 - RNA, 19 nt, Human
uucugagagcugugcauca

SEQ ID NO: 2370469 - RNA, 13 nt, Human
uucugagagcugu

SEQ ID NO: 2370470 - RNA, 14 nt, Human
uucugaguguuuuu

SEQ ID NO: 2370471 - RNA, 15 nt, Human
uucugaguuccugca

SEQ ID NO: 2370472 - RNA, 12 nt, Human
uucugaguuccu

SEQ ID NO: 2370473 - RNA, 21 nt, Human
uucugaggacauuccaagaca

SEQ ID NO: 2370474 - RNA, 20 nt, Human
uucugaggguccacuacuca

SEQ ID NO: 2370475 - RNA, 20 nt, Human
uucugaguguuuuuacuaca

SEQ ID NO: 2370476 - RNA, 16 nt, Human
uucugaguuucauucu

SEQ ID NO: 2370477 - RNA, 19 nt, Human
uucugaguuucauucuccu

SEQ ID NO: 2370478 - RNA, 20 nt, Human
uucugaguuucauucuccug

SEQ ID NO: 2370479 - RNA, 23 nt, Human
uucugaguuucauucuccugccu

SEQ ID NO: 2370480 - RNA, 23 nt, Human
uucugauaacuagauggugcuga

SEQ ID NO: 2370481 - RNA, 16 nt, Human
uucugauaaugaaaau

SEQ ID NO: 2370482 - RNA, 22 nt, Human
uucugauaacuagauggugcug

SEQ ID NO: 2370483 - RNA, 21 nt, Human
uucugacccugcuucaaauau

SEQ ID NO: 2370484 - RNA, 18 nt, Human
uucugacccugcuucaaa

SEQ ID NO: 2370485 - RNA, 21 nt, Human
uucugagaaagacuauucaaa

SEQ ID NO: 2370486 - RNA, 16 nt, Human
uucugagaaagacuau

SEQ ID NO: 2370487 - RNA, 16 nt, Human
uucucugcccuccaag

SEQ ID NO: 2370488 - RNA, 17 nt, Human
uucucugcccuccaaga

SEQ ID NO: 2370489 - RNA, 23 nt, Human
uucugacccaugcugcccuguga

SEQ ID NO: 2370490 - RNA, 22 nt, Human
uucugacccaugcugcccugug

SEQ ID NO: 2370491 - RNA, 20 nt, Human
uucugcuccacccuuggccu

SEQ ID NO: 2370492 - RNA, 18 nt, Human
uucugcuccacccuuggc

SEQ ID NO: 2370493 - RNA, 17 nt, Human
uucugcuccacccuugg

SEQ ID NO: 2370494 - RNA, 11 nt, Human
uucugcuccuc

SEQ ID NO: 2370495 - RNA, 13 nt, Human
uucugcuccucuc

SEQ ID NO: 2370496 - RNA, 14 nt, Human
uucugcuccucucc

SEQ ID NO: 2370497 - RNA, 15 nt, Human
uucugcuccucucca

SEQ ID NO: 2370498 - RNA, 16 nt, Human
uucugcuccucuccag

SEQ ID NO: 2370499 - RNA, 17 nt, Human
uucugcuccucuccagg

SEQ ID NO: 2370500 - RNA, 18 nt, Human
uucugcuccucuccaggc

SEQ ID NO: 2370501 - RNA, 12 nt, Human
uucugcucagcu

SEQ ID NO: 2370502 - RNA, 21 nt, Human
uucugcucaucauucucuguc

SEQ ID NO: 2370503 - RNA, 20 nt, Human
uucugcucaucauucucugu

SEQ ID NO: 2370504 - RNA, 19 nt, Human
uucugcucaucauucucug

SEQ ID NO: 2370505 - RNA, 16 nt, Human
uucugcuccacccuug

SEQ ID NO: 2370506 - RNA, 15 nt, Human
uucugcuccacccuu

SEQ ID NO: 2370507 - RNA, 13 nt, Human
uucugcuccaccc

SEQ ID NO: 2370508 - RNA, 9 nt, Human
uucugcucc

SEQ ID NO: 2370509 - RNA, 21 nt, Human
uucugcuaccucacugggguc

SEQ ID NO: 2370510 - RNA, 16 nt, Human
uucugcuaccucacug

SEQ ID NO: 2370511 - RNA, 14 nt, Human
uucugcucagcucu

SEQ ID NO: 2370512 - RNA, 19 nt, Human
uucugcuacuggcaaaagg

SEQ ID NO: 2370513 - RNA, 20 nt, Human
uucugcucagcucugggcca

SEQ ID NO: 2370514 - RNA, 15 nt, Human
uucugcucagcucug

SEQ ID NO: 2370515 - RNA, 14 nt, Human
uucugcucaucauu

SEQ ID NO: 2370516 - RNA, 13 nt, Human
uucugcucaucau

SEQ ID NO: 2370517 - RNA, 19 nt, Human
uucugcucacauaucuguc

SEQ ID NO: 2370518 - RNA, 15 nt, Human
uucugcuaccucacu

SEQ ID NO: 2370519 - RNA, 15 nt, Human
uucugccuuuuuuau

SEQ ID NO: 2370520 - RNA, 22 nt, Human
uucugccuuuggggacuuuucu

SEQ ID NO: 2370521 - RNA, 22 nt, Human
uucugauaugcaguuuuccuua

SEQ ID NO: 2370522 - RNA, 19 nt, Human
uucugauccuaguuccacc

SEQ ID NO: 2370523 - RNA, 15 nt, Human
uucugauuagaaaug

SEQ ID NO: 2370524 - RNA, 14 nt, Human
uucugauuagaaau

SEQ ID NO: 2370525 - RNA, 18 nt, Human
uucugaugaugugccugg

SEQ ID NO: 2370526 - RNA, 17 nt, Human
uucugauuacacaaaac

SEQ ID NO: 2370527 - RNA, 17 nt, Human
uucugauuagaaaugac

SEQ ID NO: 2370528 - RNA, 20 nt, Human
uucugccuguuauaacucug

SEQ ID NO: 2370529 - RNA, 21 nt, Human
uucugcaagcacaucugcauu

SEQ ID NO: 2370530 - RNA, 14 nt, Human
uucugccuucucau

SEQ ID NO: 2370531 - RNA, 21 nt, Human
uucugccuguuauaacucugc

SEQ ID NO: 2370532 - RNA, 24 nt, Human
uucugccuguuauaacucugcacu

SEQ ID NO: 2370533 - RNA, 11 nt, Human
uucugccuucc

SEQ ID NO: 2370534 - RNA, 16 nt, Human
uucugccuucucauga

SEQ ID NO: 2370535 - RNA, 19 nt, Human
uucugcaaaaauauuuaua

SEQ ID NO: 2370536 - RNA, 23 nt, Human
uucugauuguaacguugcugugg

SEQ ID NO: 2370537 - RNA, 12 nt, Human
uucugauuccac

SEQ ID NO: 2370538 - RNA, 11 nt, Human
uucugauugua

SEQ ID NO: 2370539 - RNA, 21 nt, Human
uucugauuguaacguugcugu

SEQ ID NO: 2370540 - RNA, 22 nt, Human
uucugauuguaacguugcugug

SEQ ID NO: 2370541 - RNA, 13 nt, Human
uuuccaagagcug

SEQ ID NO: 2370542 - RNA, 14 nt, Human
uuuccaagagcuga

SEQ ID NO: 2370543 - RNA, 16 nt, Human
uuuccaagagcugagg

SEQ ID NO: 2370544 - RNA, 23 nt, Human
uuuccaaauucacaaguuguguu

SEQ ID NO: 2370545 - RNA, 15 nt, Human
uuuccaacaccacag

SEQ ID NO: 2370546 - RNA, 18 nt, Human
uuuccaacaccacagaca

SEQ ID NO: 2370547 - RNA, 20 nt, Human
uuuccaacaccacagacaca

SEQ ID NO: 2370548 - RNA, 21 nt, Human
uuuccaacaccacagacacac

SEQ ID NO: 2370549 - RNA, 22 nt, Human
uuuccaacaccacagacacaca

SEQ ID NO: 2370550 - RNA, 23 nt, Human
uuuccaacaccacagacacacac

SEQ ID NO: 2370551 - RNA, 18 nt, Human
uuucauuuaggugaggaa

SEQ ID NO: 2370552 - RNA, 14 nt, Human
uuucauuuacugug

SEQ ID NO: 2370553 - RNA, 17 nt, Human
uuucauuuacuguggcu

SEQ ID NO: 2370554 - RNA, 19 nt, Human
uuucauuuagucaugugac

SEQ ID NO: 2370555 - RNA, 14 nt, Human
uuucauuuagguga

SEQ ID NO: 2370556 - RNA, 20 nt, Human
uuucauuguaugauguguug

SEQ ID NO: 2370557 - RNA, 23 nt, Human
uuucauuguaugauguguuguga

SEQ ID NO: 2370558 - RNA, 21 nt, Human
uuucagcagacuaugaauauu

SEQ ID NO: 2370559 - RNA, 14 nt, Human
uuucagcagacuau

SEQ ID NO: 2370560 - RNA, 23 nt, Human
uuucagcaccuacaguguacagu

SEQ ID NO: 2370561 - RNA, 20 nt, Human
uuucagauucccagagcaaa

SEQ ID NO: 2370562 - RNA, 21 nt, Human
uuucagaugucuucugccugu

SEQ ID NO: 2370563 - RNA, 22 nt, Human
uuucagaugucuucugccuguu

SEQ ID NO: 2370564 - RNA, 15 nt, Human
uuucagaugucuucu

SEQ ID NO: 2370565 - RNA, 17 nt, Human
uuucagaugucuucugc

SEQ ID NO: 2370566 - RNA, 19 nt, Human
uuucagaugucuucugccu

SEQ ID NO: 2370567 - RNA, 20 nt, Human
uuucagaugucuucugccug

SEQ ID NO: 2370568 - RNA, 14 nt, Human
uuucaguguacaug

SEQ ID NO: 2370569 - RNA, 13 nt, Human
uuucaguguacau

SEQ ID NO: 2370570 - RNA, 23 nt, Human
uuucagugucaaauaaacacugu

SEQ ID NO: 2370571 - RNA, 21 nt, Human
uuucaguggggcagucauuau

SEQ ID NO: 2370572 - RNA, 22 nt, Human
uuucaguggcacgucaucuagu

SEQ ID NO: 2370573 - RNA, 21 nt, Human
uuucagugucaaauaaacacu

SEQ ID NO: 2370574 - RNA, 22 nt, Human
uuucagugucaaauaaacacug

SEQ ID NO: 2370575 - RNA, 19 nt, Human
uuucaauuuccaagagcug

SEQ ID NO: 2370576 - RNA, 19 nt, Human
uuucaauaggaaaaacuga

SEQ ID NO: 2370577 - RNA, 17 nt, Human
uuucaauaggaaaaacu

SEQ ID NO: 2370578 - RNA, 12 nt, Human
uuucaauaggaa

SEQ ID NO: 2370579 - RNA, 14 nt, Human
uuucaauaggaaaa

SEQ ID NO: 2370580 - RNA, 21 nt, Human
uuucaagugaaucuaaaagcu

SEQ ID NO: 2370581 - RNA, 20 nt, Human
uuucaagucaaauuaauaau

SEQ ID NO: 2370582 - RNA, 18 nt, Human
uuucaagucaaauuaaua

SEQ ID NO: 2370583 - RNA, 18 nt, Human
uuucaaggcccucagcau

SEQ ID NO: 2370584 - RNA, 20 nt, Human
uuucaagguaauuucuugug

SEQ ID NO: 2370585 - RNA, 20 nt, Human
uuucaauaaagcauuuauaa

SEQ ID NO: 2370586 - RNA, 19 nt, Human
uuucaauaaagcauuuaua

SEQ ID NO: 2370587 - RNA, 23 nt, Human
uuucaagucaaauuaauaaucuu

SEQ ID NO: 2370588 - RNA, 22 nt, Human
uuucaaguuccaaguugcuaau

SEQ ID NO: 2370589 - RNA, 17 nt, Human
uuucaauuuugcaugcu

SEQ ID NO: 2370590 - RNA, 12 nt, Human
uuucacaaauaa

SEQ ID NO: 2370591 - RNA, 13 nt, Human
uuucacaaauaaa

SEQ ID NO: 2370592 - RNA, 22 nt, Human
uuucacaaccuucuguggcuca

SEQ ID NO: 2370593 - RNA, 16 nt, Human
uuucacaaccuucugu

SEQ ID NO: 2370594 - RNA, 14 nt, Human
uuucacaaauuugu

SEQ ID NO: 2370595 - RNA, 14 nt, Human
uuucagauauaaaa

SEQ ID NO: 2370596 - RNA, 16 nt, Human
uuucagauauaaaaga

SEQ ID NO: 2370597 - RNA, 18 nt, Human
uuucagauauaaaagacu

SEQ ID NO: 2370598 - RNA, 13 nt, Human
uuucacaacagau

SEQ ID NO: 2370599 - RNA, 15 nt, Human
uuucagauauauauc

SEQ ID NO: 2370600 - RNA, 16 nt, Human
uuucagauauauauca

SEQ ID NO: 2370601 - RNA, 20 nt, Human
uuucagaugcuucugggaga

SEQ ID NO: 2370602 - RNA, 12 nt, Human
uuucagaugucu

SEQ ID NO: 2370603 - RNA, 16 nt, Human
uuucagaugcuucugg

SEQ ID NO: 2370604 - RNA, 14 nt, Human
uuucagaugcuucu

SEQ ID NO: 2370605 - RNA, 12 nt, Human
uuucagaugcuu

SEQ ID NO: 2370606 - RNA, 16 nt, Human
uuuauucuuuuuaaag

SEQ ID NO: 2370607 - RNA, 12 nt, Human
uuuauugacaau

SEQ ID NO: 2370608 - RNA, 13 nt, Human
uuuauugacacag

SEQ ID NO: 2370609 - RNA, 12 nt, Human
uuuauugacaca

SEQ ID NO: 2370610 - RNA, 14 nt, Human
uuuauugagaauuu

SEQ ID NO: 2370611 - RNA, 16 nt, Human
uuuauugagaaagagc

SEQ ID NO: 2370612 - RNA, 14 nt, Human
uuuauugagaaaga

SEQ ID NO: 2370613 - RNA, 15 nt, Human
uuuauugacacagaa

SEQ ID NO: 2370614 - RNA, 14 nt, Human
uuuauugacacaga

SEQ ID NO: 2370615 - RNA, 16 nt, Human
uuuauuauuacuguuu

SEQ ID NO: 2370616 - RNA, 22 nt, Human
uuuauuccuauauaguuuauug

SEQ ID NO: 2370617 - RNA, 16 nt, Human
uuuauuauuuauuuau

SEQ ID NO: 2370618 - RNA, 14 nt, Human
uuuauuccuuguga

SEQ ID NO: 2370619 - RNA, 16 nt, Human
uuuauuccuguauguu

SEQ ID NO: 2370620 - RNA, 17 nt, Human
uuuauuuaauguuaugu

SEQ ID NO: 2370621 - RNA, 22 nt, Human
uuuauuuaaaagauucauuuuu

SEQ ID NO: 2370622 - RNA, 15 nt, Human
uuuauuuaaaugucu

SEQ ID NO: 2370623 - RNA, 21 nt, Human
uuuauuuaaaugucuaaugua

SEQ ID NO: 2370624 - RNA, 16 nt, Human
uuuauuuacugcuagu

SEQ ID NO: 2370625 - RNA, 20 nt, Human
uuuauuuacagaugaaugua

SEQ ID NO: 2370626 - RNA, 23 nt, Human
uuuauuguuuaaagcaacugucu

SEQ ID NO: 2370627 - RNA, 14 nt, Human
uuuauuuaaaagau

SEQ ID NO: 2370628 - RNA, 15 nt, Human
uuuauuuaaaagauu

SEQ ID NO: 2370629 - RNA, 17 nt, Human
uuuauuuaaaagauuca

SEQ ID NO: 2370630 - RNA, 21 nt, Human
uuucaacgcagcccugcuuug

SEQ ID NO: 2370631 - RNA, 16 nt, Human
uuucaacugccaaaau

SEQ ID NO: 2370632 - RNA, 19 nt, Human
uuucaagaaacugaggaau

SEQ ID NO: 2370633 - RNA, 15 nt, Human
uuucaacgcagcccu

SEQ ID NO: 2370634 - RNA, 11 nt, Human
uuuauuuacua

SEQ ID NO: 2370635 - RNA, 16 nt, Human
uuucaacgcagcccug

SEQ ID NO: 2370636 - RNA, 20 nt, Human
uuucaacgcagcccugcuuu

SEQ ID NO: 2370637 - RNA, 22 nt, Human
uuucaagcagucgugccugugu

SEQ ID NO: 2370638 - RNA, 23 nt, Human
uuucaagcagucgugccuguguc

SEQ ID NO: 2370639 - RNA, 22 nt, Human
uuucaacuuggcuuccuuucuu

SEQ ID NO: 2370640 - RNA, 17 nt, Human
uuucaagaaacugagga

SEQ ID NO: 2370641 - RNA, 20 nt, Human
uuucaagacauuaaaucuau

SEQ ID NO: 2370642 - RNA, 23 nt, Human
uuucaagaauaaucacgcuuucc

SEQ ID NO: 2370643 - RNA, 22 nt, Human
uuucaagccugccuaggaauuc

SEQ ID NO: 2370644 - RNA, 17 nt, Human
uuucaaggcccucagca

SEQ ID NO: 2370645 - RNA, 22 nt, Human
uuuauaacucaucauaaaauaa

SEQ ID NO: 2370646 - RNA, 20 nt, Human
uuuauaacucaucauaaaau

SEQ ID NO: 2370647 - RNA, 19 nt, Human
uuuauaacucaucauaaaa

SEQ ID NO: 2370648 - RNA, 18 nt, Human
uuuauaacucaucauaaa

SEQ ID NO: 2370649 - RNA, 16 nt, Human
uuuauaacucaucaua

SEQ ID NO: 2370650 - RNA, 19 nt, Human
uuuauaacuaguccuuuac

SEQ ID NO: 2370651 - RNA, 16 nt, Human
uuuaguuuuuguucuu

SEQ ID NO: 2370652 - RNA, 20 nt, Human
uuuauaagcagauuuaacaa

SEQ ID NO: 2370653 - RNA, 21 nt, Human
uuuauaacucaucauaaaaua

SEQ ID NO: 2370654 - RNA, 13 nt, Human
uuuauaaaacuuc

SEQ ID NO: 2370655 - RNA, 15 nt, Human
uuuauacaaauuaga

SEQ ID NO: 2370656 - RNA, 13 nt, Human
uuuauacaaauua

SEQ ID NO: 2370657 - RNA, 17 nt, Human
uuuauacaaaugucuua

SEQ ID NO: 2370658 - RNA, 22 nt, Human
uuuauaauuuugugaagcaaaa

SEQ ID NO: 2370659 - RNA, 13 nt, Human
uuuauaagguuuu

SEQ ID NO: 2370660 - RNA, 13 nt, Human
uuuauggccucag

SEQ ID NO: 2370661 - RNA, 12 nt, Human
uuuauggccuca

SEQ ID NO: 2370662 - RNA, 17 nt, Human
uuuauacaaauuagaaa

SEQ ID NO: 2370663 - RNA, 19 nt, Human
uuuauacaaauuagaaaau

SEQ ID NO: 2370664 - RNA, 17 nt, Human
uuuauggcacuaguauu

SEQ ID NO: 2370665 - RNA, 16 nt, Human
uuuauggcuuuugugc

SEQ ID NO: 2370666 - RNA, 14 nt, Human
uuuauggcuuuugu

SEQ ID NO: 2370667 - RNA, 22 nt, Human
uuuauggccucagcugccucac

SEQ ID NO: 2370668 - RNA, 13 nt, Human
uuuauuauggcac

SEQ ID NO: 2370669 - RNA, 13 nt, Human
uuuauuaugcaug

SEQ ID NO: 2370670 - RNA, 16 nt, Human
uuuacauuguugagcu

SEQ ID NO: 2370671 - RNA, 19 nt, Human
uuuacagugaaaauguaag

SEQ ID NO: 2370672 - RNA, 23 nt, Human
uuuacagugaaaauguaagcugu

SEQ ID NO: 2370673 - RNA, 12 nt, Human
uuuaccaaguuu

SEQ ID NO: 2370674 - RNA, 13 nt, Human
uuuaccaccccca

SEQ ID NO: 2370675 - RNA, 15 nt, Human
uuuaccacccccaca

SEQ ID NO: 2370676 - RNA, 13 nt, Human
uuuaccacuugug

SEQ ID NO: 2370677 - RNA, 23 nt, Human
uuuacagcuuucaugauuagcaa

SEQ ID NO: 2370678 - RNA, 20 nt, Human
uuuacagcuuucaugauuag

SEQ ID NO: 2370679 - RNA, 18 nt, Human
uuuacagggagccuccug

SEQ ID NO: 2370680 - RNA, 20 nt, Human
uuuacagggagccuccugcc

SEQ ID NO: 2370681 - RNA, 22 nt, Human
uuuacagggagccuccugccca

SEQ ID NO: 2370682 - RNA, 23 nt, Human
uuuacagggagccuccugcccag

SEQ ID NO: 2370683 - RNA, 15 nt, Human
uuuacaguaaauaaa

SEQ ID NO: 2370684 - RNA, 19 nt, Human
uuuacaguaaauaaauugu

SEQ ID NO: 2370685 - RNA, 20 nt, Human
uuuacaguaaauaaauuguu

SEQ ID NO: 2370686 - RNA, 15 nt, Human
uuuacagcugccugc

SEQ ID NO: 2370687 - RNA, 16 nt, Human
uuuacagcugccugca

SEQ ID NO: 2370688 - RNA, 21 nt, Human
uuuacaccaguuccuuucaau

SEQ ID NO: 2370689 - RNA, 21 nt, Human
uuuacacauucggcucccugg

SEQ ID NO: 2370690 - RNA, 14 nt, Human
uuuacacucaggcu

SEQ ID NO: 2370691 - RNA, 22 nt, Human
uuuacacucaggcuuucacuau

SEQ ID NO: 2370692 - RNA, 16 nt, Human
uuuacacucuuuguaa

SEQ ID NO: 2370693 - RNA, 21 nt, Human
uuuacacacgugcaauuuguu

SEQ ID NO: 2370694 - RNA, 21 nt, Human
uuuaauagaauauaauuaucg

SEQ ID NO: 2370695 - RNA, 19 nt, Human
uuuaauagaauauaauuau

SEQ ID NO: 2370696 - RNA, 14 nt, Human
uuuaauacagggua

SEQ ID NO: 2370697 - RNA, 17 nt, Human
uuuaauaauauacuugu

SEQ ID NO: 2370698 - RNA, 14 nt, Human
uuuaauacagcagu

SEQ ID NO: 2370699 - RNA, 17 nt, Human
uuuauaaaaaauggugc

SEQ ID NO: 2370700 - RNA, 11 nt, Human
uuuaguuuuug

SEQ ID NO: 2370701 - RNA, 15 nt, Human
uuuaguuuuuguucu

SEQ ID NO: 2370702 - RNA, 21 nt, Human
uuuauaaaaauaaaaaacacu

SEQ ID NO: 2370703 - RNA, 23 nt, Human
uuuauaaaaauaaaaaacacugg

SEQ ID NO: 2370704 - RNA, 22 nt, Human
uuuagacaagagaugggaauga

SEQ ID NO: 2370705 - RNA, 23 nt, Human
uuuagacaaauacucauguguau

SEQ ID NO: 2370706 - RNA, 14 nt, Human
uuuagacacuggcu

SEQ ID NO: 2370707 - RNA, 22 nt, Human
uuuaguuucuguucuguggaaa

SEQ ID NO: 2370708 - RNA, 12 nt, Human
uuuagacagagu

SEQ ID NO: 2370709 - RNA, 16 nt, Human
uuuagacaaauacuca

SEQ ID NO: 2370710 - RNA, 18 nt, Human
uuuagacaaauacucaug

SEQ ID NO: 2370711 - RNA, 19 nt, Human
uuuagacaaauacucaugu

SEQ ID NO: 2370712 - RNA, 20 nt, Human
uuuagacaaauacucaugug

SEQ ID NO: 2370713 - RNA, 21 nt, Human
uuuagacaaauacucaugugu

SEQ ID NO: 2370714 - RNA, 22 nt, Human
uuuagacaaauacucaugugua

SEQ ID NO: 2370715 - RNA, 21 nt, Human
uuuacuugcauugaauauauu

SEQ ID NO: 2370716 - RNA, 18 nt, Human
uuuacuugcauugaauau

SEQ ID NO: 2370717 - RNA, 18 nt, Human
uuuaccacccccacaccu

SEQ ID NO: 2370718 - RNA, 18 nt, Human
uuuacuugccauuacuca

SEQ ID NO: 2370719 - RNA, 22 nt, Human
uuuacuucuuauacauuugaua

SEQ ID NO: 2370720 - RNA, 19 nt, Human
uuuacuucuuauacauuug

SEQ ID NO: 2370721 - RNA, 13 nt, Human
uuuagaaagcauu

SEQ ID NO: 2370722 - RNA, 23 nt, Human
uuuagaaagaagcccaauauuau

SEQ ID NO: 2370723 - RNA, 15 nt, Human
uuuagaaagaauauu

SEQ ID NO: 2370724 - RNA, 14 nt, Human
uuuagaaagcauuu

SEQ ID NO: 2370725 - RNA, 16 nt, Human
uuuagaaagcauuuga

SEQ ID NO: 2370726 - RNA, 18 nt, Human
uuuagaaagcauuugaau

SEQ ID NO: 2370727 - RNA, 19 nt, Human
uuuagaaagcauuugaaug

SEQ ID NO: 2370728 - RNA, 14 nt, Human
uuuagaaauauaau

SEQ ID NO: 2370729 - RNA, 22 nt, Human
uuuagaaauacugcaagaaaau

SEQ ID NO: 2370730 - RNA, 20 nt, Human
uuuagaaauacugcaagaaa

SEQ ID NO: 2370731 - RNA, 19 nt, Human
uuuagaaauacugcaagaa

SEQ ID NO: 2370732 - RNA, 22 nt, Human
uuuagaaagcauuugaaugcau

SEQ ID NO: 2370733 - RNA, 24 nt, Human
uuuaacucaauauuuuccaugaaa

SEQ ID NO: 2370734 - RNA, 17 nt, Human
uuuaacuagaauuuauu

SEQ ID NO: 2370735 - RNA, 12 nt, Human
uuuaacucagau

SEQ ID NO: 2370736 - RNA, 15 nt, Human
uuuaacucagaucac

SEQ ID NO: 2370737 - RNA, 18 nt, Human
uuuaacucagaucacuac

SEQ ID NO: 2370738 - RNA, 21 nt, Human
uuuaacucagaucacuacugc

SEQ ID NO: 2370739 - RNA, 23 nt, Human
uuuaacucgagaccuuuucaacu

SEQ ID NO: 2370740 - RNA, 12 nt, Human
uuuaacucuguc

SEQ ID NO: 2370741 - RNA, 22 nt, Human
uuuaacucauaccuuuaaagga

SEQ ID NO: 2370742 - RNA, 23 nt, Human
uuuaacucagaucacuacugcag

SEQ ID NO: 2370743 - RNA, 17 nt, Human
uuuaacucugucuucac

SEQ ID NO: 2370744 - RNA, 14 nt, Human
uuuaacucugucuu

SEQ ID NO: 2370745 - RNA, 13 nt, Human
uuuaacucugucu

SEQ ID NO: 2370746 - RNA, 14 nt, Human
uuuaacugccuugu

SEQ ID NO: 2370747 - RNA, 22 nt, Human
uuuaacgaaugaagaugucuaa

SEQ ID NO: 2370748 - RNA, 15 nt, Human
uuuaacuagaauuua

SEQ ID NO: 2370749 - RNA, 21 nt, Human
uuuaacauauaauuucuuuaa

SEQ ID NO: 2370750 - RNA, 19 nt, Human
uuuaacucuauaauguguu

SEQ ID NO: 2370751 - RNA, 17 nt, Human
uuuaacagucauuuaaa

SEQ ID NO: 2370752 - RNA, 15 nt, Human
uuuaacagucauuua

SEQ ID NO: 2370753 - RNA, 16 nt, Human
uuuaacagucauuuaa

SEQ ID NO: 2370754 - RNA, 23 nt, Human
uuuaacagggucucuagugcugu

SEQ ID NO: 2370755 - RNA, 14 nt, Human
uuuaacagggucuc

SEQ ID NO: 2370756 - RNA, 20 nt, Human
uuuaacagcugaauuaucua

SEQ ID NO: 2370757 - RNA, 18 nt, Human
uuuaacaggaagaucuua

SEQ ID NO: 2370758 - RNA, 17 nt, Human
uuuaacagcugaauuau

SEQ ID NO: 2370759 - RNA, 23 nt, Human
uuuaacaauaacuacuguguucc

SEQ ID NO: 2370760 - RNA, 22 nt, Human
uuuaacaauaacuacuguguuc

SEQ ID NO: 2370761 - RNA, 21 nt, Human
uuuaacaauaacuacuguguu

SEQ ID NO: 2370762 - RNA, 20 nt, Human
uuuaacaauaacuacugugu

SEQ ID NO: 2370763 - RNA, 18 nt, Human
uuuaacaauaacuacugu

SEQ ID NO: 2370764 - RNA, 18 nt, Human
uuuaacagaaauguacag

SEQ ID NO: 2370765 - RNA, 23 nt, Human
uuuaacaacuaugauuuggaaaa

SEQ ID NO: 2370766 - RNA, 16 nt, Human
uuuaacaaaagcaaga

SEQ ID NO: 2370767 - RNA, 15 nt, Human
uuuaacaaaagcaag

SEQ ID NO: 2370768 - RNA, 15 nt, Human
uuuaacaaaaaccaa

SEQ ID NO: 2370769 - RNA, 22 nt, Human
uuuaaauuuuacccuuuagacu

SEQ ID NO: 2370770 - RNA, 18 nt, Human
uuuaaauuuuacccuuua

SEQ ID NO: 2370771 - RNA, 15 nt, Human
uuguuugcuuauugu

SEQ ID NO: 2370772 - RNA, 18 nt, Human
uuuaaauuuuuuuccuua

SEQ ID NO: 2370773 - RNA, 18 nt, Human
uuguuuggagacagaguc

SEQ ID NO: 2370774 - RNA, 18 nt, Human
uuuaaguuacacauuuuu

SEQ ID NO: 2370775 - RNA, 23 nt, Human
uuuaaguucuggaugcauuucuc

SEQ ID NO: 2370776 - RNA, 14 nt, Human
uuuaaguuguuugc

SEQ ID NO: 2370777 - RNA, 21 nt, Human
uuuaaguuguuugcaugugaa

SEQ ID NO: 2370778 - RNA, 15 nt, Human
uuuaaguuguuugca

SEQ ID NO: 2370779 - RNA, 14 nt, Human
uuuaaguguaacug

SEQ ID NO: 2370780 - RNA, 18 nt, Human
uuuaagugcuuuguaaug

SEQ ID NO: 2370781 - RNA, 18 nt, Human
uuuaagacagucuuuggg

SEQ ID NO: 2370782 - RNA, 22 nt, Human
uuuaaguguaacuggcaguuuu

SEQ ID NO: 2370783 - RNA, 20 nt, Human
uuuaagacgaaacauuuguu

SEQ ID NO: 2370784 - RNA, 12 nt, Human
uuuaauaacauu

SEQ ID NO: 2370785 - RNA, 14 nt, Human
uuuaauaacaauug

SEQ ID NO: 2370786 - RNA, 20 nt, Human
uuuaauaaaauaauucuaaa

SEQ ID NO: 2370787 - RNA, 13 nt, Human
uuuaauaaacuuu

SEQ ID NO: 2370788 - RNA, 20 nt, Human
uuuaauaaaaaggcaccuau

SEQ ID NO: 2370789 - RNA, 16 nt, Human
uuuaauaaaauaauuc

SEQ ID NO: 2370790 - RNA, 17 nt, Human
uuuaauaaaauaauucu

SEQ ID NO: 2370791 - RNA, 15 nt, Human
uuuaauaauauacuu

SEQ ID NO: 2370792 - RNA, 23 nt, Human
uuuaauaacauuaccuuacugug

SEQ ID NO: 2370793 - RNA, 15 nt, Human
uuuaauaacauuacc

SEQ ID NO: 2370794 - RNA, 18 nt, Human
uuuaauaacauuaccuua

SEQ ID NO: 2370795 - RNA, 20 nt, Human
uuuaauaacauuaccuuacu

SEQ ID NO: 2370796 - RNA, 22 nt, Human
uuuaauaacauuaccuuacugu

SEQ ID NO: 2370797 - RNA, 13 nt, Human
uuuaauaauguuu

SEQ ID NO: 2370798 - RNA, 19 nt, Human
uuuaacuuuaucacauuau

SEQ ID NO: 2370799 - RNA, 18 nt, Human
uuuaagaaaaaauaacac

SEQ ID NO: 2370800 - RNA, 22 nt, Human
uuuaagaaaaaauaacacacau

SEQ ID NO: 2370801 - RNA, 18 nt, Human
uuuaagaaaaaggaugca

SEQ ID NO: 2370802 - RNA, 21 nt, Human
uuuaacuuaaucaauuaauuu

SEQ ID NO: 2370803 - RNA, 14 nt, Human
uuuaacuuuaaguu

SEQ ID NO: 2370804 - RNA, 18 nt, Human
uuuaacuuuaaguuucag

SEQ ID NO: 2370805 - RNA, 13 nt, Human
uuuaacuucugcc

SEQ ID NO: 2370806 - RNA, 12 nt, Human
uuuaacuugagc

SEQ ID NO: 2370807 - RNA, 19 nt, Human
uuuaacuugaggguaauaa

SEQ ID NO: 2370808 - RNA, 22 nt, Human
uuuaagaaaaaggaugcacaga

SEQ ID NO: 2370809 - RNA, 22 nt, Human
uuuaagacagucccaucaaaac

SEQ ID NO: 2370810 - RNA, 19 nt, Human
uuuaagacauuuuuggaag

SEQ ID NO: 2370811 - RNA, 15 nt, Human
uuuaagacacuuuuu

SEQ ID NO: 2370812 - RNA, 15 nt, Human
uugugccuggcucag

SEQ ID NO: 2370813 - RNA, 17 nt, Human
uugugcccacugucucu

SEQ ID NO: 2370814 - RNA, 12 nt, Human
uugugccccugc

SEQ ID NO: 2370815 - RNA, 21 nt, Human
uugugccagaaugcuuuagga

SEQ ID NO: 2370816 - RNA, 16 nt, Human
uugugccagaaugcuu

SEQ ID NO: 2370817 - RNA, 22 nt, Human
uugugccauagucacauggccu

SEQ ID NO: 2370818 - RNA, 17 nt, Human
uugugccaauauguauu

SEQ ID NO: 2370819 - RNA, 22 nt, Human
uugugccaauauguauuguaaa

SEQ ID NO: 2370820 - RNA, 22 nt, Human
uugugcugaucgugcuaaauuu

SEQ ID NO: 2370821 - RNA, 18 nt, Human
uugugcuggauggagccc

SEQ ID NO: 2370822 - RNA, 23 nt, Human
uugugcuucuuucuuugggaaua

SEQ ID NO: 2370823 - RNA, 14 nt, Human
uugugcuuguuuac

SEQ ID NO: 2370824 - RNA, 11 nt, Human
uugugcuucua

SEQ ID NO: 2370825 - RNA, 16 nt, Human
uugugccuuuuauagc

SEQ ID NO: 2370826 - RNA, 16 nt, Human
uugugccaauauguau

SEQ ID NO: 2370827 - RNA, 12 nt, Human
uugugcauuugg

SEQ ID NO: 2370828 - RNA, 23 nt, Human
uugugcauuaucuagauacugua

SEQ ID NO: 2370829 - RNA, 22 nt, Human
uugugcauuaucuagauacugu

SEQ ID NO: 2370830 - RNA, 23 nt, Human
uugugaaaugaaaacauguaaua

SEQ ID NO: 2370831 - RNA, 11 nt, Human
uugugauuuga

SEQ ID NO: 2370832 - RNA, 15 nt, Human
uugugauuugacugu

SEQ ID NO: 2370833 - RNA, 16 nt, Human
uugugauuugacuguu

SEQ ID NO: 2370834 - RNA, 17 nt, Human
uugugauuugacuguuu

SEQ ID NO: 2370835 - RNA, 22 nt, Human
uugugauuugacuguuuuuacc

SEQ ID NO: 2370836 - RNA, 17 nt, Human
uugugcauuaucuagau

SEQ ID NO: 2370837 - RNA, 19 nt, Human
uugugcacccucuauccca

SEQ ID NO: 2370838 - RNA, 21 nt, Human
uugugcacccucuaucccaau

SEQ ID NO: 2370839 - RNA, 15 nt, Human
uugugcagaaaacau

SEQ ID NO: 2370840 - RNA, 16 nt, Human
uugugcagaaaacauu

SEQ ID NO: 2370841 - RNA, 18 nt, Human
uugugcagaaaacauugu

SEQ ID NO: 2370842 - RNA, 19 nt, Human
uugugcagaaaacauuguu

SEQ ID NO: 2370843 - RNA, 13 nt, Human
uuguguugugaau

SEQ ID NO: 2370844 - RNA, 11 nt, Human
uuguguuguca

SEQ ID NO: 2370845 - RNA, 21 nt, Human
uuguguuuauauauaagccaa

SEQ ID NO: 2370846 - RNA, 13 nt, Human
uuguguucaccuu

SEQ ID NO: 2370847 - RNA, 21 nt, Human
uuguggauguuuuaauuccau

SEQ ID NO: 2370848 - RNA, 23 nt, Human
uuguggauguuuuaauuccauga

SEQ ID NO: 2370849 - RNA, 13 nt, Human
uuguguucuaaua

SEQ ID NO: 2370850 - RNA, 20 nt, Human
uuguguucccauuucagcug

SEQ ID NO: 2370851 - RNA, 14 nt, Human
uuguggcacauucu

SEQ ID NO: 2370852 - RNA, 23 nt, Human
uuguggauuuaacagaaauguac

SEQ ID NO: 2370853 - RNA, 22 nt, Human
uuguggauuuaacagaaaugua

SEQ ID NO: 2370854 - RNA, 22 nt, Human
uuguggaggagcucaggacacu

SEQ ID NO: 2370855 - RNA, 15 nt, Human
uuguggacauuuaag

SEQ ID NO: 2370856 - RNA, 14 nt, Human
uuguggagccccac

SEQ ID NO: 2370857 - RNA, 14 nt, Human
uuguggaugucuuc

SEQ ID NO: 2370858 - RNA, 18 nt, Human
uuguggauguuuuaauuc

SEQ ID NO: 2370859 - RNA, 13 nt, Human
uuguggacuaaaa

SEQ ID NO: 2370860 - RNA, 16 nt, Human
uuguggacuaaaagau

SEQ ID NO: 2370861 - RNA, 18 nt, Human
uuguggacuaaaagauau

SEQ ID NO: 2370862 - RNA, 22 nt, Human
uuguggacuaaaagauauaagu

SEQ ID NO: 2370863 - RNA, 21 nt, Human
uuguggauuuaacagaaaugu

SEQ ID NO: 2370864 - RNA, 20 nt, Human
uuguggauuuaacagaaaug

SEQ ID NO: 2370865 - RNA, 17 nt, Human
uuguggacacagcucuu

SEQ ID NO: 2370866 - RNA, 22 nt, Human
uuguggaauggagauucaguuu

SEQ ID NO: 2370867 - RNA, 22 nt, Human
uuguggaagcaaaaaucugaaa

SEQ ID NO: 2370868 - RNA, 21 nt, Human
uuguggaauugggagcuuggg

SEQ ID NO: 2370869 - RNA, 16 nt, Human
uuguggacauuuaaga

SEQ ID NO: 2370870 - RNA, 16 nt, Human
uuguggacacagcucu

SEQ ID NO: 2370871 - RNA, 18 nt, Human
uuguggaaagccucugcu

SEQ ID NO: 2370872 - RNA, 16 nt, Human
uugugcuuuuccuauu

SEQ ID NO: 2370873 - RNA, 21 nt, Human
uuguggaaaaugaaaauuagg

SEQ ID NO: 2370874 - RNA, 13 nt, Human
uuguuaucaguaa

SEQ ID NO: 2370875 - RNA, 22 nt, Human
uuguuaucagucaauauuuuua

SEQ ID NO: 2370876 - RNA, 16 nt, Human
uuguuaucagucaaua

SEQ ID NO: 2370877 - RNA, 22 nt, Human
uuguuaguaugaggcauuuguu

SEQ ID NO: 2370878 - RNA, 20 nt, Human
uuguuagugugucuuagugu

SEQ ID NO: 2370879 - RNA, 14 nt, Human
uuguuauggcuuaa

SEQ ID NO: 2370880 - RNA, 19 nt, Human
uuguuauggcuuaaugaca

SEQ ID NO: 2370881 - RNA, 18 nt, Human
uuguuauguagauaacaa

SEQ ID NO: 2370882 - RNA, 21 nt, Human
uuguuguuaaugaaaauguca

SEQ ID NO: 2370883 - RNA, 20 nt, Human
uuguuguuauuuuuugagaa

SEQ ID NO: 2370884 - RNA, 14 nt, Human
uuguuguuugccau

SEQ ID NO: 2370885 - RNA, 15 nt, Human
uuguuguuuguaugu

SEQ ID NO: 2370886 - RNA, 21 nt, Human
uuguuguuugccauacuuugu

SEQ ID NO: 2370887 - RNA, 16 nt, Human
uuguuucucccccugg

SEQ ID NO: 2370888 - RNA, 17 nt, Human
uuguuucuaccucccag

SEQ ID NO: 2370889 - RNA, 14 nt, Human
uuguuucuaccucc

SEQ ID NO: 2370890 - RNA, 16 nt, Human
uuguuucuaccuccca

SEQ ID NO: 2370891 - RNA, 16 nt, Human
uuguuucguggggagg

SEQ ID NO: 2370892 - RNA, 13 nt, Human
uuguuugcuuauu

SEQ ID NO: 2370893 - RNA, 16 nt, Human
uuguuugcuaucuuaa

SEQ ID NO: 2370894 - RNA, 19 nt, Human
uuguuugcucaccuggggu

SEQ ID NO: 2370895 - RNA, 15 nt, Human
uuguuugccauacuu

SEQ ID NO: 2370896 - RNA, 16 nt, Human
uuguuugccauacuuu

SEQ ID NO: 2370897 - RNA, 12 nt, Human
uuguuugcuauc

SEQ ID NO: 2370898 - RNA, 21 nt, Human
uuguuugaaacaaagaagguu

SEQ ID NO: 2370899 - RNA, 15 nt, Human
uuguuugagaaauua

SEQ ID NO: 2370900 - RNA, 23 nt, Human
uuguuugaugcauuaaaagaaaa

SEQ ID NO: 2370901 - RNA, 21 nt, Human
uuguuugagaaauuaaguauc

SEQ ID NO: 2370902 - RNA, 18 nt, Human
uuguuucaaacacaaaug

SEQ ID NO: 2370903 - RNA, 20 nt, Human
uuguuuauuuaucagugaca

SEQ ID NO: 2370904 - RNA, 23 nt, Human
uuguuguuugccauacuuugucu

SEQ ID NO: 2370905 - RNA, 16 nt, Human
uuguuguuuuuaagau

SEQ ID NO: 2370906 - RNA, 14 nt, Human
uuguuuaaaaucau

SEQ ID NO: 2370907 - RNA, 20 nt, Human
uuguuucauugacuaucaaa

SEQ ID NO: 2370908 - RNA, 16 nt, Human
uuguuucaauugcauc

SEQ ID NO: 2370909 - RNA, 9 nt, Human
uuguuuaaa

SEQ ID NO: 2370910 - RNA, 15 nt, Human
uuguuuccuuucacu

SEQ ID NO: 2370911 - RNA, 19 nt, Human
uuguuaaugguuugaauau

SEQ ID NO: 2370912 - RNA, 17 nt, Human
uuguuaauggugcaaau

SEQ ID NO: 2370913 - RNA, 19 nt, Human
uuguuaaugaaaaugucag

SEQ ID NO: 2370914 - RNA, 14 nt, Human
uuguuacauuuuua

SEQ ID NO: 2370915 - RNA, 12 nt, Human
uuguuaccuuua

SEQ ID NO: 2370916 - RNA, 21 nt, Human
uuguuacaggcaccgagaaug

SEQ ID NO: 2370917 - RNA, 22 nt, Human
uuguuaauuuuuccuauauugc

SEQ ID NO: 2370918 - RNA, 22 nt, Human
uuguuacucugguucuuuguuu

SEQ ID NO: 2370919 - RNA, 17 nt, Human
uuguuacuaacuaaacu

SEQ ID NO: 2370920 - RNA, 18 nt, Human
uuguuacuaacuaaacuc

SEQ ID NO: 2370921 - RNA, 17 nt, Human
uuguuacucugguucuu

SEQ ID NO: 2370922 - RNA, 14 nt, Human
uuguuacuucugag

SEQ ID NO: 2370923 - RNA, 21 nt, Human
uuguuaguaugaggcauuugu

SEQ ID NO: 2370924 - RNA, 19 nt, Human
uuguuaguaugaggcauuu

SEQ ID NO: 2370925 - RNA, 18 nt, Human
uuguuaaugaaaauguca

SEQ ID NO: 2370926 - RNA, 17 nt, Human
uuguuaaugaaaauguc

SEQ ID NO: 2370927 - RNA, 21 nt, Human
uuguuaauaaaaguacauguu

SEQ ID NO: 2370928 - RNA, 22 nt, Human
uuguuaagucuaaauauuuccu

SEQ ID NO: 2370929 - RNA, 14 nt, Human
uuguuaauaaaagu

SEQ ID NO: 2370930 - RNA, 19 nt, Human
uuguuaauaaaaguacaug

SEQ ID NO: 2370931 - RNA, 17 nt, Human
uuguuaagauaugaugu

SEQ ID NO: 2370932 - RNA, 14 nt, Human
uuguuaaauauuua

SEQ ID NO: 2370933 - RNA, 22 nt, Human
uuguuaacucuugucuauuuuu

SEQ ID NO: 2370934 - RNA, 18 nt, Human
uuguguuuuuaauuuauu

SEQ ID NO: 2370935 - RNA, 18 nt, Human
uuguuaacucuugucuau

SEQ ID NO: 2370936 - RNA, 19 nt, Human
uuguguuucuuuaguuuuu

SEQ ID NO: 2370937 - RNA, 14 nt, Human
uuguguuugucauu

SEQ ID NO: 2370938 - RNA, 18 nt, Human
uuguguuuugcaagccag

SEQ ID NO: 2370939 - RNA, 16 nt, Human
uuguuaaaauaacuag

SEQ ID NO: 2370940 - RNA, 21 nt, Human
uuguguuuuuaauuuauuuau

SEQ ID NO: 2370941 - RNA, 17 nt, Human
uuguguuuuuaauuuau

SEQ ID NO: 2370942 - RNA, 17 nt, Human
uuguguuuguguauuua

SEQ ID NO: 2370943 - RNA, 15 nt, Human
uuguguuugucauua

SEQ ID NO: 2370944 - RNA, 20 nt, Human
uuguguuugucauuagccug

SEQ ID NO: 2370945 - RNA, 21 nt, Human
uuguaaaaccugucaaugaua

SEQ ID NO: 2370946 - RNA, 23 nt, Human
uuguaaaaccugucaaugauaca

SEQ ID NO: 2370947 - RNA, 20 nt, Human
uuguaaaaccugucaaugau

SEQ ID NO: 2370948 - RNA, 23 nt, Human
uuguaaaagaacaguaaacauug

SEQ ID NO: 2370949 - RNA, 14 nt, Human
uuguaaaacuacac

SEQ ID NO: 2370950 - RNA, 20 nt, Human
uuguaaaagaacaguaaaca

SEQ ID NO: 2370951 - RNA, 14 nt, Human
uuguaaauacacau

SEQ ID NO: 2370952 - RNA, 13 nt, Human
uuguaaauacacc

SEQ ID NO: 2370953 - RNA, 14 nt, Human
uuguaaauacacca

SEQ ID NO: 2370954 - RNA, 12 nt, Human
uuguaaauacac

SEQ ID NO: 2370955 - RNA, 11 nt, Human
uuguaaauaca

SEQ ID NO: 2370956 - RNA, 21 nt, Human
uuguaaaauagcuuguauagu

SEQ ID NO: 2370957 - RNA, 21 nt, Human
uuguaaaagaacaguaaacau

SEQ ID NO: 2370958 - RNA, 15 nt, Human
uuguaaaauagcuug

SEQ ID NO: 2370959 - RNA, 17 nt, Human
uuguaaauagcucaggu

SEQ ID NO: 2370960 - RNA, 17 nt, Human
uuguaaauaguauuuga

SEQ ID NO: 2370961 - RNA, 16 nt, Human
uuguaaaugugguaaa

SEQ ID NO: 2370962 - RNA, 21 nt, Human
uuguaaaugugguaaagaguu

SEQ ID NO: 2370963 - RNA, 12 nt, Human
uuguaaauauau

SEQ ID NO: 2370964 - RNA, 13 nt, Human
uuguaaauauaua

SEQ ID NO: 2370965 - RNA, 15 nt, Human
uuguaaauauauaaa

SEQ ID NO: 2370966 - RNA, 17 nt, Human
uuguaaauauauaaaua

SEQ ID NO: 2370967 - RNA, 21 nt, Human
uuguaaauauauaaauauaua

SEQ ID NO: 2370968 - RNA, 15 nt, Human
uuguaaauuaaucuu

SEQ ID NO: 2370969 - RNA, 18 nt, Human
uuguaaauauauaaauau

SEQ ID NO: 2370970 - RNA, 14 nt, Human
uuguaaauuaaucu

SEQ ID NO: 2370971 - RNA, 16 nt, Human
uuguaaauuaaucuuu

SEQ ID NO: 2370972 - RNA, 14 nt, Human
uuguacauaaugcg

SEQ ID NO: 2370973 - RNA, 18 nt, Human
uuguacauaaugcgugca

SEQ ID NO: 2370974 - RNA, 23 nt, Human
uuguaaauuaacuuuuauaaacu

SEQ ID NO: 2370975 - RNA, 18 nt, Human
uuguaaauuaacuuuuau

SEQ ID NO: 2370976 - RNA, 16 nt, Human
uuguaaauuaacuuuu

SEQ ID NO: 2370977 - RNA, 15 nt, Human
uuguaaauuaacuuu

SEQ ID NO: 2370978 - RNA, 22 nt, Human
uuguaaaaauuaaaaguuaugg

SEQ ID NO: 2370979 - RNA, 19 nt, Human
uuggucuuauuuauuauug

SEQ ID NO: 2370980 - RNA, 15 nt, Human
uuggucuuauuuauu

SEQ ID NO: 2370981 - RNA, 15 nt, Human
uugguccaggaaaug

SEQ ID NO: 2370982 - RNA, 13 nt, Human
uuggucuguguga

SEQ ID NO: 2370983 - RNA, 16 nt, Human
uuggucugugagaugc

SEQ ID NO: 2370984 - RNA, 22 nt, Human
uugguacuacuagaugucuuua

SEQ ID NO: 2370985 - RNA, 15 nt, Human
uugguagagauucau

SEQ ID NO: 2370986 - RNA, 13 nt, Human
uugguagagauuc

SEQ ID NO: 2370987 - RNA, 16 nt, Human
uugguaucaagaaagu

SEQ ID NO: 2370988 - RNA, 17 nt, Human
uugguaucaagaaaguc

SEQ ID NO: 2370989 - RNA, 12 nt, Human
uugguauuguau

SEQ ID NO: 2370990 - RNA, 18 nt, Human
uugguaucuguucuuuaa

SEQ ID NO: 2370991 - RNA, 13 nt, Human
uugguauuguauu

SEQ ID NO: 2370992 - RNA, 14 nt, Human
uugguauuguauuu

SEQ ID NO: 2370993 - RNA, 21 nt, Human
uugguauuguauuuauucaau

SEQ ID NO: 2370994 - RNA, 15 nt, Human
uugcacuaaaguaug

SEQ ID NO: 2370995 - RNA, 19 nt, Human
uugcacuaaaguauguaaa

SEQ ID NO: 2370996 - RNA, 23 nt, Human
uuggguguaacaggucuccucuu

SEQ ID NO: 2370997 - RNA, 21 nt, Human
uuggguguaacaggucuccuc

SEQ ID NO: 2370998 - RNA, 15 nt, Human
uugcacuccagccug

SEQ ID NO: 2370999 - RNA, 14 nt, Human
uugcacuccagccu

SEQ ID NO: 2371000 - RNA, 20 nt, Human
uugcacgcccaugugugagu

SEQ ID NO: 2371001 - RNA, 18 nt, Human
uugcacgcccauguguga

SEQ ID NO: 2371002 - RNA, 17 nt, Human
uugcacgcccaugugug

SEQ ID NO: 2371003 - RNA, 15 nt, Human
uugcacguggccucu

SEQ ID NO: 2371004 - RNA, 14 nt, Human
uugcacggcugcug

SEQ ID NO: 2371005 - RNA, 15 nt, Human
uugcacggcugcuga

SEQ ID NO: 2371006 - RNA, 22 nt, Human
uuggguucaagcgauucuucug

SEQ ID NO: 2371007 - RNA, 16 nt, Human
uuggguucaucugagc

SEQ ID NO: 2371008 - RNA, 19 nt, Human
uugucugugcauccggggg

SEQ ID NO: 2371009 - RNA, 17 nt, Human
uugugaaaugaaaacau

SEQ ID NO: 2371010 - RNA, 21 nt, Human
uugugaaauaaaacuggcuuu

SEQ ID NO: 2371011 - RNA, 20 nt, Human
uugugaaaggaaagaggcuc

SEQ ID NO: 2371012 - RNA, 14 nt, Human
uugugaaaugaugg

SEQ ID NO: 2371013 - RNA, 12 nt, Human
uugugauuuuug

SEQ ID NO: 2371014 - RNA, 17 nt, Human
uugugauuuuuguaauu

SEQ ID NO: 2371015 - RNA, 16 nt, Human
uugugauuuuuguaau

SEQ ID NO: 2371016 - RNA, 18 nt, Human
uugucucaaugcucauaa

SEQ ID NO: 2371017 - RNA, 16 nt, Human
uugucucaaugcucau

SEQ ID NO: 2371018 - RNA, 17 nt, Human
uugucucaaugcucaua

SEQ ID NO: 2371019 - RNA, 15 nt, Human
uugucuagugaaacu

SEQ ID NO: 2371020 - RNA, 15 nt, Human
uugucuuaaaaagug

SEQ ID NO: 2371021 - RNA, 21 nt, Human
uugucugaagucacugcacag

SEQ ID NO: 2371022 - RNA, 18 nt, Human
uugucucccuggcccuca

SEQ ID NO: 2371023 - RNA, 20 nt, Human
uugucugaagucacugcaca

SEQ ID NO: 2371024 - RNA, 14 nt, Human
uugucucccuggcc

SEQ ID NO: 2371025 - RNA, 15 nt, Human
uugucucccuggccc

SEQ ID NO: 2371026 - RNA, 16 nt, Human
uugucucccuggcccu

SEQ ID NO: 2371027 - RNA, 17 nt, Human
uugucucccuggcccuc

SEQ ID NO: 2371028 - RNA, 12 nt, Human
uugucucccugg

SEQ ID NO: 2371029 - RNA, 16 nt, Human
uuguauuaaagacaga

SEQ ID NO: 2371030 - RNA, 12 nt, Human
uuguauuaagaa

SEQ ID NO: 2371031 - RNA, 18 nt, Human
uuguauuaagaaugaaau

SEQ ID NO: 2371032 - RNA, 13 nt, Human
uuguauuaagaau

SEQ ID NO: 2371033 - RNA, 21 nt, Human
uuguauucagaguugaugguu

SEQ ID NO: 2371034 - RNA, 16 nt, Human
uuguauucucuccugu

SEQ ID NO: 2371035 - RNA, 15 nt, Human
uuguauucucuccug

SEQ ID NO: 2371036 - RNA, 11 nt, Human
uugucuaaaau

SEQ ID NO: 2371037 - RNA, 22 nt, Human
uugucuaaaaugccucagugua

SEQ ID NO: 2371038 - RNA, 19 nt, Human
uuguauucucuccuguacc

SEQ ID NO: 2371039 - RNA, 16 nt, Human
uuguauuaaacucuuc

SEQ ID NO: 2371040 - RNA, 18 nt, Human
uugucuaaaacaauaaaa

SEQ ID NO: 2371041 - RNA, 17 nt, Human
uugucuaaaacaauaaa

SEQ ID NO: 2371042 - RNA, 22 nt, Human
uugucguugacuuuagggacuc

SEQ ID NO: 2371043 - RNA, 14 nt, Human
uuguauuaaagaca

SEQ ID NO: 2371044 - RNA, 15 nt, Human
uuguauuaaacucuu

SEQ ID NO: 2371045 - RNA, 13 nt, Human
uuguauuaaacuc

SEQ ID NO: 2371046 - RNA, 18 nt, Human
uuguauguaaaugugcau

SEQ ID NO: 2371047 - RNA, 17 nt, Human
uuguauguguguagaca

SEQ ID NO: 2371048 - RNA, 19 nt, Human
uuguauguuaaguuacuuc

SEQ ID NO: 2371049 - RNA, 23 nt, Human
uuguaugccuuuaaaucugugau

SEQ ID NO: 2371050 - RNA, 13 nt, Human
uuguauguaaaug

SEQ ID NO: 2371051 - RNA, 16 nt, Human
uuguauguaaaugugc

SEQ ID NO: 2371052 - RNA, 12 nt, Human
uuguacuguaaa

SEQ ID NO: 2371053 - RNA, 14 nt, Human
uuguacuguaaaga

SEQ ID NO: 2371054 - RNA, 15 nt, Human
uuguacuguaaagag

SEQ ID NO: 2371055 - RNA, 21 nt, Human
uuguaugccuuuaaaucugug

SEQ ID NO: 2371056 - RNA, 22 nt, Human
uuguaugccuuuaaaucuguga

SEQ ID NO: 2371057 - RNA, 18 nt, Human
uuguacauauguaaaaua

SEQ ID NO: 2371058 - RNA, 15 nt, Human
uuguacauauuugug

SEQ ID NO: 2371059 - RNA, 20 nt, Human
uuguacauguguagccugug

SEQ ID NO: 2371060 - RNA, 21 nt, Human
uuguacauguguagccugugc

SEQ ID NO: 2371061 - RNA, 16 nt, Human
uuguacauaguuauuu

SEQ ID NO: 2371062 - RNA, 21 nt, Human
uuguacauauuuguggaauaa

SEQ ID NO: 2371063 - RNA, 17 nt, Human
uuguacauuuaugauuu

SEQ ID NO: 2371064 - RNA, 20 nt, Human
uuguacauuuaugauuuaau

SEQ ID NO: 2371065 - RNA, 19 nt, Human
uuuuucccagcuacaccuu

SEQ ID NO: 2371066 - RNA, 13 nt, Human
uuuuuccaucuuu

SEQ ID NO: 2371067 - RNA, 14 nt, Human
uuuuuccccaaagu

SEQ ID NO: 2371068 - RNA, 15 nt, Human
uuuuuccccaaaguc

SEQ ID NO: 2371069 - RNA, 16 nt, Human
uuuuuccccaaagucu

SEQ ID NO: 2371070 - RNA, 19 nt, Human
uuuuuuaaccaaaggugaa

SEQ ID NO: 2371071 - RNA, 11 nt, Human
uuuuuuaagau

SEQ ID NO: 2371072 - RNA, 17 nt, Human
uuuuuuaaguauuuaua

SEQ ID NO: 2371073 - RNA, 12 nt, Human
uuuuuuaagauu

SEQ ID NO: 2371074 - RNA, 12 nt, Human
uuuuuucaucuu

SEQ ID NO: 2371075 - RNA, 14 nt, Human
uuuuuucagaccga

SEQ ID NO: 2371076 - RNA, 20 nt, Human
uuuuuucauguuuuaacaaa

SEQ ID NO: 2371077 - RNA, 18 nt, Human
uuuuuucaauauuuauua

SEQ ID NO: 2371078 - RNA, 11 nt, Human
uuuuuucagac

SEQ ID NO: 2371079 - RNA, 12 nt, Human
uuuuuucagacc

SEQ ID NO: 2371080 - RNA, 16 nt, Human
uuuuuuauuguuuaaa

SEQ ID NO: 2371081 - RNA, 16 nt, Human
uuuuuuaaugugcugu

SEQ ID NO: 2371082 - RNA, 12 nt, Human
uuuuuuaauuuu

SEQ ID NO: 2371083 - RNA, 15 nt, Human
uuuuuuaaugugcug

SEQ ID NO: 2371084 - RNA, 13 nt, Human
uuuuuuccacuua

SEQ ID NO: 2371085 - RNA, 22 nt, Human
uuuuuuccaucuuuacaaaacu

SEQ ID NO: 2371086 - RNA, 13 nt, Human
uuuuuuccaucuu

SEQ ID NO: 2371087 - RNA, 13 nt, Human
uuuuuuuaaugug

SEQ ID NO: 2371088 - RNA, 11 nt, Human
uuuuuuuacua

SEQ ID NO: 2371089 - RNA, 12 nt, Human
uuuuuuuuaaga

SEQ ID NO: 2371090 - RNA, 10 nt, Human
uuuuuuucca

SEQ ID NO: 2371091 - RNA, 14 nt, Human
uuuuuuucuaagag

SEQ ID NO: 2371092 - RNA, 12 nt, Human
uuuuuuugagau

SEQ ID NO: 2371093 - RNA, 12 nt, Human
uuuuuuucuuua

SEQ ID NO: 2371094 - RNA, 22 nt, Human
uuuuuaacucaauauuuuccau

SEQ ID NO: 2371095 - RNA, 23 nt, Human
uuuuuaagaaaaaggaugcacag

SEQ ID NO: 2371096 - RNA, 12 nt, Human
uuuuuaagaaaa

SEQ ID NO: 2371097 - RNA, 17 nt, Human
uuuuuaagugcugcauu

SEQ ID NO: 2371098 - RNA, 16 nt, Human
uuuuuaagugcugcau

SEQ ID NO: 2371099 - RNA, 23 nt, Human
uuuuuaagugcugcauuuaaaag

SEQ ID NO: 2371100 - RNA, 22 nt, Human
uuuuuaagugcugcauuuaaaa

SEQ ID NO: 2371101 - RNA, 19 nt, Human
uuuuuaagugcugcauuua

SEQ ID NO: 2371102 - RNA, 18 nt, Human
uuuuuaagugcugcauuu

SEQ ID NO: 2371103 - RNA, 21 nt, Human
uuuugacucuggcaaagcuuu

SEQ ID NO: 2371104 - RNA, 20 nt, Human
uuuuuaaauguaaagauauu

SEQ ID NO: 2371105 - RNA, 12 nt, Human
uuuuuaaccaaa

SEQ ID NO: 2371106 - RNA, 20 nt, Human
uuuuuaaauuuuauuuccug

SEQ ID NO: 2371107 - RNA, 22 nt, Human
uuuugacuagggauucaggcug

SEQ ID NO: 2371108 - RNA, 15 nt, Human
uuuugacggaugauu

SEQ ID NO: 2371109 - RNA, 20 nt, Human
uuuugacggaugauuggauu

SEQ ID NO: 2371110 - RNA, 17 nt, Human
uuuugacuuaaagcaga

SEQ ID NO: 2371111 - RNA, 11 nt, Human
uuuugaagugu

SEQ ID NO: 2371112 - RNA, 18 nt, Human
uuuugaccuguggugcaa

SEQ ID NO: 2371113 - RNA, 24 nt, Human
uuuugacaguguugaaaauguuca

SEQ ID NO: 2371114 - RNA, 14 nt, Human
uuuugaaggcaaaa

SEQ ID NO: 2371115 - RNA, 13 nt, Human
uuuugaaggcaaa

SEQ ID NO: 2371116 - RNA, 22 nt, Human
uuuugaaguguaggcagacaca

SEQ ID NO: 2371117 - RNA, 19 nt, Human
uuuugaaguaguuuguaua

SEQ ID NO: 2371118 - RNA, 10 nt, Human
uuuugaagug

SEQ ID NO: 2371119 - RNA, 15 nt, Human
uuuugaauaaaaacu

SEQ ID NO: 2371120 - RNA, 23 nt, Human
uuuugacaguguugaaaauguuc

SEQ ID NO: 2371121 - RNA, 19 nt, Human
uuuugacaguguugaaaau

SEQ ID NO: 2371122 - RNA, 15 nt, Human
uuuuuaaucaugaaa

SEQ ID NO: 2371123 - RNA, 17 nt, Human
uuuuuaaugugcugugu

SEQ ID NO: 2371124 - RNA, 12 nt, Human
uuuuuaaugugc

SEQ ID NO: 2371125 - RNA, 19 nt, Human
uuuuuaaugugcuguguaa

SEQ ID NO: 2371126 - RNA, 20 nt, Human
uuuuuaaugugcuguguaaa

SEQ ID NO: 2371127 - RNA, 13 nt, Human
uuuuucaauuaaa

SEQ ID NO: 2371128 - RNA, 14 nt, Human
uuuuucaauuaaac

SEQ ID NO: 2371129 - RNA, 15 nt, Human
uuuuucaauuaaacg

SEQ ID NO: 2371130 - RNA, 21 nt, Human
uuuuucagcagacuaugaaua

SEQ ID NO: 2371131 - RNA, 11 nt, Human
uuuuucagacc

SEQ ID NO: 2371132 - RNA, 12 nt, Human
uuuuucagaccg

SEQ ID NO: 2371133 - RNA, 14 nt, Human
uuuuucagaaauau

SEQ ID NO: 2371134 - RNA, 10 nt, Human
uuuuucagac

SEQ ID NO: 2371135 - RNA, 19 nt, Human
uuuuucacggaaguuuuca

SEQ ID NO: 2371136 - RNA, 22 nt, Human
uuuuucacggaaguuuucaaug

SEQ ID NO: 2371137 - RNA, 13 nt, Human
uuuuucacauuuu

SEQ ID NO: 2371138 - RNA, 21 nt, Human
uuuuucaauuaaacggauuau

SEQ ID NO: 2371139 - RNA, 16 nt, Human
uuuuucacggaaguuu

SEQ ID NO: 2371140 - RNA, 17 nt, Human
uuuuucaauuaaacgga

SEQ ID NO: 2371141 - RNA, 18 nt, Human
uuuuucaauuaaacggau

SEQ ID NO: 2371142 - RNA, 19 nt, Human
uuuuucaauuaaacggauu

SEQ ID NO: 2371143 - RNA, 20 nt, Human
uuuuucaauuaaacggauua

SEQ ID NO: 2371144 - RNA, 18 nt, Human
uuuuuaaguuacacauuu

SEQ ID NO: 2371145 - RNA, 18 nt, Human
uuuuuaauaaaaaggcac

SEQ ID NO: 2371146 - RNA, 17 nt, Human
uuuuuaauaaagacagg

SEQ ID NO: 2371147 - RNA, 20 nt, Human
uuuuuaauaaagacaggguu

SEQ ID NO: 2371148 - RNA, 13 nt, Human
uuuuuaaucauga

SEQ ID NO: 2371149 - RNA, 17 nt, Human
uuuuuaaucaugaaauu

SEQ ID NO: 2371150 - RNA, 13 nt, Human
uuuuuaaucuuua

SEQ ID NO: 2371151 - RNA, 21 nt, Human
uuuuucauugauaugaaaaau

SEQ ID NO: 2371152 - RNA, 20 nt, Human
uuuuucauguuuuaacaaaa

SEQ ID NO: 2371153 - RNA, 12 nt, Human
uuuuuccaggcu

SEQ ID NO: 2371154 - RNA, 14 nt, Human
uuuuuccacuuugu

SEQ ID NO: 2371155 - RNA, 20 nt, Human
uuuuuccacuuuguucuuua

SEQ ID NO: 2371156 - RNA, 21 nt, Human
uuuuuccacauaaggaaacug

SEQ ID NO: 2371157 - RNA, 14 nt, Human
uuuuuccaacugug

SEQ ID NO: 2371158 - RNA, 19 nt, Human
uuuuuccaaaaaaauacug

SEQ ID NO: 2371159 - RNA, 13 nt, Human
uuuuuccaaaaaa

SEQ ID NO: 2371160 - RNA, 16 nt, Human
uuuuuccaaaaaaaua

SEQ ID NO: 2371161 - RNA, 12 nt, Human
uuuuucaguuuu

SEQ ID NO: 2371162 - RNA, 15 nt, Human
uuuuucaguuuucag

SEQ ID NO: 2371163 - RNA, 14 nt, Human
uuuuucagaccgaa

SEQ ID NO: 2371164 - RNA, 13 nt, Human
uuuuucauauugu

SEQ ID NO: 2371165 - RNA, 18 nt, Human
uuuuucauguuuuaacaa

SEQ ID NO: 2371166 - RNA, 11 nt, Human
uuuuucauguu

SEQ ID NO: 2371167 - RNA, 10 nt, Human
uuuuucaugu

SEQ ID NO: 2371168 - RNA, 11 nt, Human
uuuuucaugau

SEQ ID NO: 2371169 - RNA, 18 nt, Human
uuuuucaugauuuugaaa

SEQ ID NO: 2371170 - RNA, 12 nt, Human
uuugcacugagg

SEQ ID NO: 2371171 - RNA, 14 nt, Human
uuugcacugagggc

SEQ ID NO: 2371172 - RNA, 18 nt, Human
uuugcacugauauaucau

SEQ ID NO: 2371173 - RNA, 16 nt, Human
uuugcacugagggcca

SEQ ID NO: 2371174 - RNA, 17 nt, Human
uuugcacugagggccac

SEQ ID NO: 2371175 - RNA, 19 nt, Human
uuugaguuauuuuaauuau

SEQ ID NO: 2371176 - RNA, 17 nt, Human
uuugcaccccaugcugu

SEQ ID NO: 2371177 - RNA, 18 nt, Human
uuugcaccccaugcuguu

SEQ ID NO: 2371178 - RNA, 20 nt, Human
uuugcaccccaugcuguuga

SEQ ID NO: 2371179 - RNA, 12 nt, Human
uuugcaccccuc

SEQ ID NO: 2371180 - RNA, 13 nt, Human
uuugcaccccucc

SEQ ID NO: 2371181 - RNA, 15 nt, Human
uuugcaccccuccca

SEQ ID NO: 2371182 - RNA, 16 nt, Human
uuugcaccccucccau

SEQ ID NO: 2371183 - RNA, 16 nt, Human
uuugcaccugcucucu

SEQ ID NO: 2371184 - RNA, 20 nt, Human
uuugaguggaugauguuucg

SEQ ID NO: 2371185 - RNA, 16 nt, Human
uuugaguggaugaugu

SEQ ID NO: 2371186 - RNA, 14 nt, Human
uuugagugcucuga

SEQ ID NO: 2371187 - RNA, 21 nt, Human
uuugaguggaugauguuucgu

SEQ ID NO: 2371188 - RNA, 14 nt, Human
uuugaguguuuuaa

SEQ ID NO: 2371189 - RNA, 12 nt, Human
uuugaguucuac

SEQ ID NO: 2371190 - RNA, 16 nt, Human
uuuccguggcacugca

SEQ ID NO: 2371191 - RNA, 13 nt, Human
uuugagugcucug

SEQ ID NO: 2371192 - RNA, 21 nt, Human
uuugagugccuuacacaaugg

SEQ ID NO: 2371193 - RNA, 15 nt, Human
uuuccguuaaaauac

SEQ ID NO: 2371194 - RNA, 13 nt, Human
uuugagugccuua

SEQ ID NO: 2371195 - RNA, 17 nt, Human
uuuccguuaaaauacca

SEQ ID NO: 2371196 - RNA, 20 nt, Human
uuuccacaagauucccagag

SEQ ID NO: 2371197 - RNA, 15 nt, Human
uuuccacaaaucagu

SEQ ID NO: 2371198 - RNA, 19 nt, Human
uuuccacaaaaucugucca

SEQ ID NO: 2371199 - RNA, 22 nt, Human
uuuccacaagauucccagagac

SEQ ID NO: 2371200 - RNA, 17 nt, Human
uuuccacaccuggcacu

SEQ ID NO: 2371201 - RNA, 20 nt, Human
uuuccacauaaggaaacugg

SEQ ID NO: 2371202 - RNA, 23 nt, Human
uuuccacauaaggaaacuggguu

SEQ ID NO: 2371203 - RNA, 19 nt, Human
uuuccaccacagccagcac

SEQ ID NO: 2371204 - RNA, 16 nt, Human
uuuccaagugugcaua

SEQ ID NO: 2371205 - RNA, 15 nt, Human
uuuccacagaagcuc

SEQ ID NO: 2371206 - RNA, 14 nt, Human
uuugcauuccuaca

SEQ ID NO: 2371207 - RNA, 15 nt, Human
uuugcauucaaauua

SEQ ID NO: 2371208 - RNA, 17 nt, Human
uuugcauucaaauuaag

SEQ ID NO: 2371209 - RNA, 19 nt, Human
uuugcauugaacacaaacu

SEQ ID NO: 2371210 - RNA, 21 nt, Human
uuugcauuuaaaacagacacu

SEQ ID NO: 2371211 - RNA, 19 nt, Human
uuugcauuuaaaacagaca

SEQ ID NO: 2371212 - RNA, 17 nt, Human
uuugcauuuaaaacaga

SEQ ID NO: 2371213 - RNA, 16 nt, Human
uuugcauuuaaaacag

SEQ ID NO: 2371214 - RNA, 22 nt, Human
uuugcauuaaauucacaaacuu

SEQ ID NO: 2371215 - RNA, 21 nt, Human
uuugcauuaaauucacaaacu

SEQ ID NO: 2371216 - RNA, 12 nt, Human
uuugcauucaaa

SEQ ID NO: 2371217 - RNA, 13 nt, Human
uuugcauucaaau

SEQ ID NO: 2371218 - RNA, 14 nt, Human
uuugcauucaaauu

SEQ ID NO: 2371219 - RNA, 18 nt, Human
uuugcauuaaauucacaa

SEQ ID NO: 2371220 - RNA, 17 nt, Human
uuugcauuaaauucaca

SEQ ID NO: 2371221 - RNA, 22 nt, Human
uuugcauaacaauuccucuacu

SEQ ID NO: 2371222 - RNA, 20 nt, Human
uuugcauaacaauuccucua

SEQ ID NO: 2371223 - RNA, 12 nt, Human
uuugcaggcuca

SEQ ID NO: 2371224 - RNA, 22 nt, Human
uuugcacugagggccacacuau

SEQ ID NO: 2371225 - RNA, 16 nt, Human
uuugcaggcaugcaug

SEQ ID NO: 2371226 - RNA, 20 nt, Human
uuugcacuggaguucuaugc

SEQ ID NO: 2371227 - RNA, 14 nt, Human
uuugcagguugcuu

SEQ ID NO: 2371228 - RNA, 21 nt, Human
uuugcaguagagucaucucca

SEQ ID NO: 2371229 - RNA, 16 nt, Human
uuugcauaacaauucc

SEQ ID NO: 2371230 - RNA, 18 nt, Human
uuugcauaacaauuccuc

SEQ ID NO: 2371231 - RNA, 17 nt, Human
uuugcauaacaauuccu

SEQ ID NO: 2371232 - RNA, 18 nt, Human
uuugcauaacguauaaaa

SEQ ID NO: 2371233 - RNA, 13 nt, Human
uuuggacccugag

SEQ ID NO: 2371234 - RNA, 12 nt, Human
uuuggaaaauaa

SEQ ID NO: 2371235 - RNA, 23 nt, Human
uuugcauuuaaaacagacacugg

SEQ ID NO: 2371236 - RNA, 15 nt, Human
uuuggaaaaugcauu

SEQ ID NO: 2371237 - RNA, 19 nt, Human
uuugguaucuguucuuuaa

SEQ ID NO: 2371238 - RNA, 16 nt, Human
uuuggaccccagcugg

SEQ ID NO: 2371239 - RNA, 13 nt, Human
uuugguauuguau

SEQ ID NO: 2371240 - RNA, 17 nt, Human
uuuggaccccagcuggg

SEQ ID NO: 2371241 - RNA, 22 nt, Human
uuugguauuacacuguauuugu

SEQ ID NO: 2371242 - RNA, 14 nt, Human
uuugguauuguauu

SEQ ID NO: 2371243 - RNA, 23 nt, Human
uuuggucccgugcagcuucuguc

SEQ ID NO: 2371244 - RNA, 13 nt, Human
uuuggucccuggg

SEQ ID NO: 2371245 - RNA, 15 nt, Human
uuuggucaacacuaa

SEQ ID NO: 2371246 - RNA, 17 nt, Human
uuuggucuacacugugc

SEQ ID NO: 2371247 - RNA, 17 nt, Human
uuuguauaaaauaauuu

SEQ ID NO: 2371248 - RNA, 18 nt, Human
uuuguauaaaauaauuuu

SEQ ID NO: 2371249 - RNA, 19 nt, Human
uuuguauaaaauaauuuuu

SEQ ID NO: 2371250 - RNA, 13 nt, Human
uuuguguauuuaa

SEQ ID NO: 2371251 - RNA, 14 nt, Human
uuuguauuuuuaau

SEQ ID NO: 2371252 - RNA, 17 nt, Human
uuuguauuuuuuugcaa

SEQ ID NO: 2371253 - RNA, 14 nt, Human
uuuguauuuuuagu

SEQ ID NO: 2371254 - RNA, 20 nt, Human
uuuguguauuuaacagggag

SEQ ID NO: 2371255 - RNA, 21 nt, Human
uuugugucauguuuaagaaau

SEQ ID NO: 2371256 - RNA, 13 nt, Human
uuugugugucuua

SEQ ID NO: 2371257 - RNA, 14 nt, Human
uuuguguguagucu

SEQ ID NO: 2371258 - RNA, 14 nt, Human
uuugugugagagac

SEQ ID NO: 2371259 - RNA, 13 nt, Human
uuugugugauuga

SEQ ID NO: 2371260 - RNA, 12 nt, Human
uuugugugagag

SEQ ID NO: 2371261 - RNA, 22 nt, Human
uuugugucaaugggcaaugaca

SEQ ID NO: 2371262 - RNA, 14 nt, Human
uuugugugauugaa

SEQ ID NO: 2371263 - RNA, 10 nt, Human
uuuguauuuu

SEQ ID NO: 2371264 - RNA, 15 nt, Human
uuuguauuuuccaag

SEQ ID NO: 2371265 - RNA, 17 nt, Human
uuuguauuuuguuuaaa

SEQ ID NO: 2371266 - RNA, 23 nt, Human
uuuguauuuuccaagugugcaua

SEQ ID NO: 2371267 - RNA, 21 nt, Human
uuuguauuguuucaauugcau

SEQ ID NO: 2371268 - RNA, 16 nt, Human
uuuguauucucugagc

SEQ ID NO: 2371269 - RNA, 14 nt, Human
uuuguauucucuga

SEQ ID NO: 2371270 - RNA, 20 nt, Human
uuuuaaaauaucuuuugacc

SEQ ID NO: 2371271 - RNA, 14 nt, Human
uuuuaaaauaucuu

SEQ ID NO: 2371272 - RNA, 14 nt, Human
uuuuaaaauccacu

SEQ ID NO: 2371273 - RNA, 12 nt, Human
uuuguuguaaaa

SEQ ID NO: 2371274 - RNA, 19 nt, Human
uuuuaaaaguuucaaugug

SEQ ID NO: 2371275 - RNA, 21 nt, Human
uuuuaaaaguuucaaugugau

SEQ ID NO: 2371276 - RNA, 22 nt, Human
uuuuaaaaguuucaaugugauu

SEQ ID NO: 2371277 - RNA, 20 nt, Human
uuuuaaacccuauugguaaa

SEQ ID NO: 2371278 - RNA, 19 nt, Human
uuuuaaacagugagccuga

SEQ ID NO: 2371279 - RNA, 21 nt, Human
uuuuaaaccauaaaaagcuga

SEQ ID NO: 2371280 - RNA, 23 nt, Human
uuuuaaacaaaauagaagcugua

SEQ ID NO: 2371281 - RNA, 13 nt, Human
uuuuaaacaguga

SEQ ID NO: 2371282 - RNA, 23 nt, Human
uuuuaaaauccacuuuaucuuga

SEQ ID NO: 2371283 - RNA, 12 nt, Human
uuuguuauuugu

SEQ ID NO: 2371284 - RNA, 13 nt, Human
uuuguuaccuuua

SEQ ID NO: 2371285 - RNA, 22 nt, Human
uuuguuaguaugaggcauuugu

SEQ ID NO: 2371286 - RNA, 17 nt, Human
uuuguguguugucucuu

SEQ ID NO: 2371287 - RNA, 19 nt, Human
uuuguguguugucuugaaa

SEQ ID NO: 2371288 - RNA, 18 nt, Human
uuuguguguugucuugaa

SEQ ID NO: 2371289 - RNA, 15 nt, Human
uuuguguguugucuu

SEQ ID NO: 2371290 - RNA, 17 nt, Human
uuuguguguugucuuga

SEQ ID NO: 2371291 - RNA, 15 nt, Human
uuuguugucagcuga

SEQ ID NO: 2371292 - RNA, 23 nt, Human
uuuguuggaagguuuggugugug

SEQ ID NO: 2371293 - RNA, 14 nt, Human
uuuguugcuguuuu

SEQ ID NO: 2371294 - RNA, 19 nt, Human
uuuguuauuuguacaguuc

SEQ ID NO: 2371295 - RNA, 17 nt, Human
uuuguuauuuguacagu

SEQ ID NO: 2371296 - RNA, 18 nt, Human
uuuguuauuuguacaguu

SEQ ID NO: 2371297 - RNA, 20 nt, Human
uuuguuauuuucaguauuuu

SEQ ID NO: 2371298 - RNA, 13 nt, Human
uuuuacuaaagaa

SEQ ID NO: 2371299 - RNA, 22 nt, Human
uuuuacuaaagaaagauuacuu

SEQ ID NO: 2371300 - RNA, 21 nt, Human
uuuuaccuaccacagugucug

SEQ ID NO: 2371301 - RNA, 19 nt, Human
uuuuacguccaucucuugu

SEQ ID NO: 2371302 - RNA, 16 nt, Human
uuuuacaauugaaaug

SEQ ID NO: 2371303 - RNA, 20 nt, Human
uuuuaccuaccacagugucu

SEQ ID NO: 2371304 - RNA, 19 nt, Human
uuuuaccuaccacaguguc

SEQ ID NO: 2371305 - RNA, 18 nt, Human
uuuuaccuaccacagugu

SEQ ID NO: 2371306 - RNA, 18 nt, Human
uuuuaccguuucuucccu

SEQ ID NO: 2371307 - RNA, 17 nt, Human
uuuuaccguuucuuccc

SEQ ID NO: 2371308 - RNA, 13 nt, Human
uuuuauacacaua

SEQ ID NO: 2371309 - RNA, 15 nt, Human
uuuuauacacauaau

SEQ ID NO: 2371310 - RNA, 14 nt, Human
uuuuacuacugugg

SEQ ID NO: 2371311 - RNA, 23 nt, Human
uuuuauaauuuugugaagcaaaa

SEQ ID NO: 2371312 - RNA, 15 nt, Human
uuuuacuaauagaca

SEQ ID NO: 2371313 - RNA, 21 nt, Human
uuuuauaauuuugugaagcaa

SEQ ID NO: 2371314 - RNA, 14 nt, Human
uuuuaaagugauua

SEQ ID NO: 2371315 - RNA, 22 nt, Human
uuuuaaaguauguuauugcaua

SEQ ID NO: 2371316 - RNA, 16 nt, Human
uuuuaaaguauauauu

SEQ ID NO: 2371317 - RNA, 23 nt, Human
uuuuaaacuguguacauaacuga

SEQ ID NO: 2371318 - RNA, 20 nt, Human
uuuuaaacuguguacauaac

SEQ ID NO: 2371319 - RNA, 13 nt, Human
uuuuaaacugugu

SEQ ID NO: 2371320 - RNA, 21 nt, Human
uuuuaaaguaacccuacaaaa

SEQ ID NO: 2371321 - RNA, 17 nt, Human
uuuuaaauaaaagugau

SEQ ID NO: 2371322 - RNA, 15 nt, Human
uuuuaaauaaaagca

SEQ ID NO: 2371323 - RNA, 19 nt, Human
uuuuaaagugauuaaacgu

SEQ ID NO: 2371324 - RNA, 19 nt, Human
uuuuacaaaaaagaaaaga

SEQ ID NO: 2371325 - RNA, 17 nt, Human
uuuuaaauaaaagcagc

SEQ ID NO: 2371326 - RNA, 14 nt, Human
uuuuacaauugaaa

SEQ ID NO: 2371327 - RNA, 18 nt, Human
uuuuacaauaaauaaucu

SEQ ID NO: 2371328 - RNA, 17 nt, Human
uuuuacaauaaaaucuu

SEQ ID NO: 2371329 - RNA, 12 nt, Human
uuuuacaauaaa

SEQ ID NO: 2371330 - RNA, 15 nt, Human
uuuuauacuguacuu

SEQ ID NO: 2371331 - RNA, 12 nt, Human
uuuuauacugua

SEQ ID NO: 2371332 - RNA, 19 nt, Human
uuuuauacucuuucuguau

SEQ ID NO: 2371333 - RNA, 16 nt, Human
uuuuauagauuugacc

SEQ ID NO: 2371334 - RNA, 19 nt, Human
uuuuauacacauaauuaaa

SEQ ID NO: 2371335 - RNA, 18 nt, Human
uuuuauacucuuucugua

SEQ ID NO: 2371336 - RNA, 13 nt, Human
uuuuauacucuuu

SEQ ID NO: 2371337 - RNA, 21 nt, Human
uuuuauacauaaacaagacca

SEQ ID NO: 2371338 - RNA, 13 nt, Human
uuuuauacauaaa

SEQ ID NO: 2371339 - RNA, 13 nt, Human
uuuuauauuuagu

SEQ ID NO: 2371340 - RNA, 23 nt, Human
uuuuauauuuaguuauaguuuca

SEQ ID NO: 2371341 - RNA, 13 nt, Human
uuuuauauuugaa

SEQ ID NO: 2371342 - RNA, 18 nt, Human
uuuuauauuugaaauauu

SEQ ID NO: 2371343 - RNA, 17 nt, Human
uuuucaaaauaaaaaug

SEQ ID NO: 2371344 - RNA, 17 nt, Human
uuuuauuuuuuucuacc

SEQ ID NO: 2371345 - RNA, 13 nt, Human
uuuuauuuuucua

SEQ ID NO: 2371346 - RNA, 18 nt, Human
uuuuauuuuucuaaaaaa

SEQ ID NO: 2371347 - RNA, 18 nt, Human
uuuuauuuuuagacagag

SEQ ID NO: 2371348 - RNA, 21 nt, Human
uuuuauuuuucucaugaugag

SEQ ID NO: 2371349 - RNA, 15 nt, Human
uuuuauuuuguaauu

SEQ ID NO: 2371350 - RNA, 16 nt, Human
uuuuauuuuguaauua

SEQ ID NO: 2371351 - RNA, 20 nt, Human
uuuuauuuuguaauuauugu

SEQ ID NO: 2371352 - RNA, 23 nt, Human
uuuuaucuccccuucacaugcau

SEQ ID NO: 2371353 - RNA, 19 nt, Human
uuuuaucgucacugcuuaa

SEQ ID NO: 2371354 - RNA, 23 nt, Human
uuuuaugaagaaaaaauacauuu

SEQ ID NO: 2371355 - RNA, 19 nt, Human
uuuuaucuuucgugauaaa

SEQ ID NO: 2371356 - RNA, 21 nt, Human
uuuuaugacuucauuaauaau

SEQ ID NO: 2371357 - RNA, 20 nt, Human
uuuuaugacuucauuaauaa

SEQ ID NO: 2371358 - RNA, 15 nt, Human
uuuucuucacugucc

SEQ ID NO: 2371359 - RNA, 22 nt, Human
uuuucuucaacaucaauguuca

SEQ ID NO: 2371360 - RNA, 21 nt, Human
uuuucuucaacaucaauguuc

SEQ ID NO: 2371361 - RNA, 17 nt, Human
uuuucuuaaccaucuuu

SEQ ID NO: 2371362 - RNA, 13 nt, Human
uuuucuuacauaa

SEQ ID NO: 2371363 - RNA, 13 nt, Human
uuuucuucucccu

SEQ ID NO: 2371364 - RNA, 12 nt, Human
uuuucuuuaaaa

SEQ ID NO: 2371365 - RNA, 16 nt, Human
uuuucuucaugcaaug

SEQ ID NO: 2371366 - RNA, 22 nt, Human
uuuucuuguguguuuauuguca

SEQ ID NO: 2371367 - RNA, 21 nt, Human
uuuugaacuaauaaaagcaua

SEQ ID NO: 2371368 - RNA, 20 nt, Human
uuuugaacuaauaaaagcau

SEQ ID NO: 2371369 - RNA, 17 nt, Human
uuuugaaauuaaccucu

SEQ ID NO: 2371370 - RNA, 16 nt, Human
uuuucuuuaaugcuuu

SEQ ID NO: 2371371 - RNA, 15 nt, Human
uuuucuuuaaaagaa

SEQ ID NO: 2371372 - RNA, 16 nt, Human
uuuucuuuaaaagaau

SEQ ID NO: 2371373 - RNA, 16 nt, Human
uuuucuuucagccaag

SEQ ID NO: 2371374 - RNA, 14 nt, Human
uuuuccuaaaugca

SEQ ID NO: 2371375 - RNA, 13 nt, Human
uuuuccuaaguga

SEQ ID NO: 2371376 - RNA, 20 nt, Human
uuuuccuaauaaaguucugu

SEQ ID NO: 2371377 - RNA, 20 nt, Human
uuuuccuaagugauuguaug

SEQ ID NO: 2371378 - RNA, 13 nt, Human
uuuucuacucgag

SEQ ID NO: 2371379 - RNA, 15 nt, Human
uuuucccuguacagu

SEQ ID NO: 2371380 - RNA, 23 nt, Human
uuuucccgagcaaagucuaaagu

SEQ ID NO: 2371381 - RNA, 22 nt, Human
uuuucccucuuuggcuccccug

SEQ ID NO: 2371382 - RNA, 12 nt, Human
uuuuccccuccc

SEQ ID NO: 2371383 - RNA, 16 nt, Human
uuuuccccuguccuga

SEQ ID NO: 2371384 - RNA, 20 nt, Human
uuuucuacucgaguuacaga

SEQ ID NO: 2371385 - RNA, 22 nt, Human
uuuucuacucgaguuacagaca

SEQ ID NO: 2371386 - RNA, 23 nt, Human
uuuucuacucgaguuacagacaa

SEQ ID NO: 2371387 - RNA, 17 nt, Human
uuuuccuagcccucuca

SEQ ID NO: 2371388 - RNA, 13 nt, Human
uuuucuuauuuca

SEQ ID NO: 2371389 - RNA, 19 nt, Human
uuuucccagcuacaccuuu

SEQ ID NO: 2371390 - RNA, 18 nt, Human
uuuuccccccacucuccc

SEQ ID NO: 2371391 - RNA, 23 nt, Human
uuuuccccggucccuugagaccu

SEQ ID NO: 2371392 - RNA, 19 nt, Human
uuuuccccggucccuugag

SEQ ID NO: 2371393 - RNA, 16 nt, Human
uuuuccccccuagaaa

SEQ ID NO: 2371394 - RNA, 19 nt, Human
uuuuccccccacucucccc

SEQ ID NO: 2371395 - RNA, 19 nt, Human
uuuucccccuuuucugcau

SEQ ID NO: 2371396 - RNA, 22 nt, Human
uuuucccuauuagagaagagau

SEQ ID NO: 2371397 - RNA, 18 nt, Human
uuuucccuauuagagaag

SEQ ID NO: 2371398 - RNA, 18 nt, Human
uuuucccagcuacaccuu

SEQ ID NO: 2371399 - RNA, 20 nt, Human
uuuucccagauacuucccau

SEQ ID NO: 2371400 - RNA, 22 nt, Human
uuuucccacugcacccccuccu

SEQ ID NO: 2371401 - RNA, 16 nt, Human
uuuucagacucagacu

SEQ ID NO: 2371402 - RNA, 20 nt, Human
uuuucccacugcacccccuc

SEQ ID NO: 2371403 - RNA, 13 nt, Human
uuuucccacugca

SEQ ID NO: 2371404 - RNA, 15 nt, Human
uuuucagauauaaaa

SEQ ID NO: 2371405 - RNA, 14 nt, Human
uuuucagacucaga

SEQ ID NO: 2371406 - RNA, 13 nt, Human
uuuucagaccgaa

SEQ ID NO: 2371407 - RNA, 15 nt, Human
uuuucagaaauaugu

SEQ ID NO: 2371408 - RNA, 11 nt, Human
uuuucagaccg

SEQ ID NO: 2371409 - RNA, 22 nt, Human
uuuucagaaccucuuccccaga

SEQ ID NO: 2371410 - RNA, 11 nt, Human
uuuucagaccc

SEQ ID NO: 2371411 - RNA, 18 nt, Human
uuuucagaaccucuuccc

SEQ ID NO: 2371412 - RNA, 17 nt, Human
uuuucagaaccucuucc

SEQ ID NO: 2371413 - RNA, 23 nt, Human
uuuucagaaaauauuauguguuu

SEQ ID NO: 2371414 - RNA, 20 nt, Human
uuuucaccccacccuucccc

SEQ ID NO: 2371415 - RNA, 13 nt, Human
uuuucaccccacc

SEQ ID NO: 2371416 - RNA, 23 nt, Human
uuuucaccuguuuuuaagcuguu

SEQ ID NO: 2371417 - RNA, 15 nt, Human
uuuucacggaaguuu

SEQ ID NO: 2371418 - RNA, 17 nt, Human
uuuucacggaaguuuuc

SEQ ID NO: 2371419 - RNA, 18 nt, Human
uuuucacggaaguuuuca

SEQ ID NO: 2371420 - RNA, 22 nt, Human
uuuucagaaaauauuauguguu

SEQ ID NO: 2371421 - RNA, 23 nt, Human
uuuucacauucuuauaaauauga

SEQ ID NO: 2371422 - RNA, 19 nt, Human
uuuucaccagauuugcuaa

SEQ ID NO: 2371423 - RNA, 12 nt, Human
uuuucacauuuu

SEQ ID NO: 2371424 - RNA, 23 nt, Human
uuuucacaugaacauacuggcug

SEQ ID NO: 2371425 - RNA, 22 nt, Human
uuuucacauucuuauaaauaug

SEQ ID NO: 2371426 - RNA, 18 nt, Human
uuuucacauucuuauaaa

SEQ ID NO: 2371427 - RNA, 13 nt, Human
uuuucacaugaac

SEQ ID NO: 2371428 - RNA, 14 nt, Human
uuuucacaugaaca

SEQ ID NO: 2371429 - RNA, 19 nt, Human
uuuucaaauuguaucuagu

SEQ ID NO: 2371430 - RNA, 14 nt, Human
uuuucaaauuguau

SEQ ID NO: 2371431 - RNA, 21 nt, Human
uuuucaaaauuguuacaaauu

SEQ ID NO: 2371432 - RNA, 14 nt, Human
uuuucaaaauggag

SEQ ID NO: 2371433 - RNA, 11 nt, Human
uuuuuuuucau

SEQ ID NO: 2371434 - RNA, 14 nt, Human
uuuuuuuuaaacua

SEQ ID NO: 2371435 - RNA, 13 nt, Human
uuuuuuuuaaugu

SEQ ID NO: 2371436 - RNA, 13 nt, Human
uuuuuuuugacaa

SEQ ID NO: 2371437 - RNA, 22 nt, Human
ugccuccgcgugaucaaagcca

SEQ ID NO: 2371438 - RNA, 19 nt, Human
ugccuccgccucaguaaga

SEQ ID NO: 2371439 - RNA, 12 nt, Human
ugccuccucacc

SEQ ID NO: 2371440 - RNA, 16 nt, Human
ugccucccuucaugca

SEQ ID NO: 2371441 - RNA, 22 nt, Human
ugccucccucacccugagcccc

SEQ ID NO: 2371442 - RNA, 17 nt, Human
ugccucccucacccuga

SEQ ID NO: 2371443 - RNA, 21 nt, Human
ugccucccucacccugagccc

SEQ ID NO: 2371444 - RNA, 17 nt, Human
ugcccuggcccugaggu

SEQ ID NO: 2371445 - RNA, 13 nt, Human
ugccuccccugug

SEQ ID NO: 2371446 - RNA, 16 nt, Human
ugccucccucacccug

SEQ ID NO: 2371447 - RNA, 22 nt, Human
ugccguuacucuccaaccugga

SEQ ID NO: 2371448 - RNA, 19 nt, Human
ugccguuacucuccaaccu

SEQ ID NO: 2371449 - RNA, 16 nt, Human
ugccguuacucuccaa

SEQ ID NO: 2371450 - RNA, 20 nt, Human
ugccgugugcccucgggcga

SEQ ID NO: 2371451 - RNA, 13 nt, Human
ugccuaagcccuc

SEQ ID NO: 2371452 - RNA, 13 nt, Human
ugccucugggacu

SEQ ID NO: 2371453 - RNA, 21 nt, Human
ugccucugugcugugugugac

SEQ ID NO: 2371454 - RNA, 17 nt, Human
ugccucugugcugugug

SEQ ID NO: 2371455 - RNA, 16 nt, Human
ugccucugccugcauu

SEQ ID NO: 2371456 - RNA, 21 nt, Human
ugccucgaaacacagaaaccu

SEQ ID NO: 2371457 - RNA, 18 nt, Human
ugccucugccugucuccc

SEQ ID NO: 2371458 - RNA, 13 nt, Human
ugccucugccugu

SEQ ID NO: 2371459 - RNA, 14 nt, Human
ugccucugccuguc

SEQ ID NO: 2371460 - RNA, 22 nt, Human
ugccuccuuugugaggaagccg

SEQ ID NO: 2371461 - RNA, 17 nt, Human
ugccucgaaacacagaa

SEQ ID NO: 2371462 - RNA, 13 nt, Human
ugccucgaaacac

SEQ ID NO: 2371463 - RNA, 24 nt, Human
ugccuccucacccccagcuuugcu

SEQ ID NO: 2371464 - RNA, 19 nt, Human
ugccuccucacccccagcu

SEQ ID NO: 2371465 - RNA, 21 nt, Human
ugccuccuuugugaggaagcc

SEQ ID NO: 2371466 - RNA, 20 nt, Human
ugccuccuuugugaggaagc

SEQ ID NO: 2371467 - RNA, 11 nt, Human
ugccugcagcc

SEQ ID NO: 2371468 - RNA, 19 nt, Human
ugccugcagaggucugugc

SEQ ID NO: 2371469 - RNA, 20 nt, Human
ugccugcagaggucugugcu

SEQ ID NO: 2371470 - RNA, 18 nt, Human
ugccugcagagagaagcc

SEQ ID NO: 2371471 - RNA, 17 nt, Human
ugccucuuccuugaaga

SEQ ID NO: 2371472 - RNA, 21 nt, Human
ugccucuucucuacucuaggg

SEQ ID NO: 2371473 - RNA, 13 nt, Human
ugccucuuccucc

SEQ ID NO: 2371474 - RNA, 23 nt, Human
ugccucuucccccugcuuccacc

SEQ ID NO: 2371475 - RNA, 16 nt, Human
ugccucuguuugacaa

SEQ ID NO: 2371476 - RNA, 23 nt, Human
ugccucuguuugacaaaccucua

SEQ ID NO: 2371477 - RNA, 15 nt, Human
ugccucuuagacuuc

SEQ ID NO: 2371478 - RNA, 23 nt, Human
ugccucuuccagucuuccugaca

SEQ ID NO: 2371479 - RNA, 21 nt, Human
ugccucuuccagucuuccuga

SEQ ID NO: 2371480 - RNA, 22 nt, Human
ugccugcagccccgcgccuccu

SEQ ID NO: 2371481 - RNA, 15 nt, Human
ugccugcagccccgc

SEQ ID NO: 2371482 - RNA, 15 nt, Human
ugccugcauguauuu

SEQ ID NO: 2371483 - RNA, 13 nt, Human
ugccugcauucug

SEQ ID NO: 2371484 - RNA, 21 nt, Human
ugccugcagaggucugugcug

SEQ ID NO: 2371485 - RNA, 15 nt, Human
ugccugccagcugca

SEQ ID NO: 2371486 - RNA, 19 nt, Human
ugccugccagcugcacuga

SEQ ID NO: 2371487 - RNA, 16 nt, Human
ugccugcccacccgug

SEQ ID NO: 2371488 - RNA, 15 nt, Human
ugccugcccacccgu

SEQ ID NO: 2371489 - RNA, 12 nt, Human
ugccugggcugu

SEQ ID NO: 2371490 - RNA, 16 nt, Human
ugccugggcuguuggc

SEQ ID NO: 2371491 - RNA, 17 nt, Human
ugccugggcuguuggca

SEQ ID NO: 2371492 - RNA, 21 nt, Human
ugccuggguggacauggcccc

SEQ ID NO: 2371493 - RNA, 14 nt, Human
ugccugcccacccg

SEQ ID NO: 2371494 - RNA, 13 nt, Human
ugccugcccaccc

SEQ ID NO: 2371495 - RNA, 16 nt, Human
ugccugccagcugcac

SEQ ID NO: 2371496 - RNA, 24 nt, Human
ugccuggguggggcugcuccucca

SEQ ID NO: 2371497 - RNA, 23 nt, Human
ugccuggguggggcugcuccucc

SEQ ID NO: 2371498 - RNA, 22 nt, Human
ugccuggguggggcugcuccuc

SEQ ID NO: 2371499 - RNA, 21 nt, Human
ugccuggguggggcugcuccu

SEQ ID NO: 2371500 - RNA, 19 nt, Human
ugccuggguggggcugcuc

SEQ ID NO: 2371501 - RNA, 17 nt, Human
ugccuggguggggcugc

SEQ ID NO: 2371502 - RNA, 16 nt, Human
ugccuggguggggcug

SEQ ID NO: 2371503 - RNA, 22 nt, Human
ugccuggguuuaaggggagagg

SEQ ID NO: 2371504 - RNA, 23 nt, Human
ugccugguauauccaaaagcuuu

SEQ ID NO: 2371505 - RNA, 20 nt, Human
ugccugguauauccaaaagc

SEQ ID NO: 2371506 - RNA, 17 nt, Human
ugccugguggcagcugc

SEQ ID NO: 2371507 - RNA, 18 nt, Human
ugccugguggcagcugcg

SEQ ID NO: 2371508 - RNA, 22 nt, Human
ugccuguaguuaggaaauaaaa

SEQ ID NO: 2371509 - RNA, 21 nt, Human
ugccuguaguuaggaaauaaa

SEQ ID NO: 2371510 - RNA, 20 nt, Human
ugccuguaguuaggaaauaa

SEQ ID NO: 2371511 - RNA, 19 nt, Human
ugccuguaguuaggaaaua

SEQ ID NO: 2371512 - RNA, 18 nt, Human
ugccuguaguuaggaaau

SEQ ID NO: 2371513 - RNA, 17 nt, Human
ugccuguaguuaggaaa

SEQ ID NO: 2371514 - RNA, 16 nt, Human
ugccuguaguuaggaa

SEQ ID NO: 2371515 - RNA, 13 nt, Human
ugccuguaaacau

SEQ ID NO: 2371516 - RNA, 15 nt, Human
ugccuguaguuagga

SEQ ID NO: 2371517 - RNA, 19 nt, Human
ugccugguggcagcugcgg

SEQ ID NO: 2371518 - RNA, 17 nt, Human
ugccugguccucacacu

SEQ ID NO: 2371519 - RNA, 16 nt, Human
ugccuggucacagggc

SEQ ID NO: 2371520 - RNA, 17 nt, Human
ugccuggucacagggca

SEQ ID NO: 2371521 - RNA, 22 nt, Human
ugccuggucacagggcaugccc

SEQ ID NO: 2371522 - RNA, 14 nt, Human
ugccugguuuugau

SEQ ID NO: 2371523 - RNA, 19 nt, Human
ugcccgucuucagccuagc

SEQ ID NO: 2371524 - RNA, 23 nt, Human
ugcccgucucucucccauggagc

SEQ ID NO: 2371525 - RNA, 18 nt, Human
ugcccgucuucagccuag

SEQ ID NO: 2371526 - RNA, 17 nt, Human
ugcccgucuucagccua

SEQ ID NO: 2371527 - RNA, 16 nt, Human
ugcccgucuucagccu

SEQ ID NO: 2371528 - RNA, 13 nt, Human
ugcccgucuucag

SEQ ID NO: 2371529 - RNA, 18 nt, Human
ugcccgucucucucccau

SEQ ID NO: 2371530 - RNA, 19 nt, Human
ugcccgucucucucccaug

SEQ ID NO: 2371531 - RNA, 20 nt, Human
ugcccgucucucucccaugg

SEQ ID NO: 2371532 - RNA, 21 nt, Human
ugcccgucucucucccaugga

SEQ ID NO: 2371533 - RNA, 23 nt, Human
ugcccggggcagcugccagagaa

SEQ ID NO: 2371534 - RNA, 20 nt, Human
ugcccguaaacacgccugca

SEQ ID NO: 2371535 - RNA, 20 nt, Human
ugcccggggcagcugccaga

SEQ ID NO: 2371536 - RNA, 17 nt, Human
ugcccgucucucuccca

SEQ ID NO: 2371537 - RNA, 23 nt, Human
ugcccguaaacacgccugcaaac

SEQ ID NO: 2371538 - RNA, 18 nt, Human
ugcccggggcagcugcca

SEQ ID NO: 2371539 - RNA, 22 nt, Human
ugcccgggcgcggccagccccg

SEQ ID NO: 2371540 - RNA, 19 nt, Human
ugcccgggcgcggccagcc

SEQ ID NO: 2371541 - RNA, 20 nt, Human
ugcccgggcgcggccagccc

SEQ ID NO: 2371542 - RNA, 21 nt, Human
ugcccggggaaaggcaagguc

SEQ ID NO: 2371543 - RNA, 18 nt, Human
ugcccggggaaaggcaag

SEQ ID NO: 2371544 - RNA, 21 nt, Human
ugcccagaauaaguuauugca

SEQ ID NO: 2371545 - RNA, 17 nt, Human
ugcccagaauaaguuau

SEQ ID NO: 2371546 - RNA, 19 nt, Human
ugcccagaauaaguuauug

SEQ ID NO: 2371547 - RNA, 18 nt, Human
ugcccagaaugaggcugc

SEQ ID NO: 2371548 - RNA, 17 nt, Human
ugcccagaaugaggcug

SEQ ID NO: 2371549 - RNA, 16 nt, Human
ugcccugcccuagcuc

SEQ ID NO: 2371550 - RNA, 14 nt, Human
ugcccugccugagg

SEQ ID NO: 2371551 - RNA, 12 nt, Human
ugcccugccuga

SEQ ID NO: 2371552 - RNA, 11 nt, Human
ugcccugcccc

SEQ ID NO: 2371553 - RNA, 16 nt, Human
ugcccugcccccacga

SEQ ID NO: 2371554 - RNA, 21 nt, Human
ugcccugcccaccuggccucu

SEQ ID NO: 2371555 - RNA, 23 nt, Human
ugcccugcugagucccaggcuga

SEQ ID NO: 2371556 - RNA, 22 nt, Human
ugcccugcugagucccaggcug

SEQ ID NO: 2371557 - RNA, 18 nt, Human
ugcccugcugagucccag

SEQ ID NO: 2371558 - RNA, 19 nt, Human
ugcccugcgggucacagga

SEQ ID NO: 2371559 - RNA, 19 nt, Human
ugcccuaaaguguauuuuu

SEQ ID NO: 2371560 - RNA, 17 nt, Human
ugcccuaaaguguauuu

SEQ ID NO: 2371561 - RNA, 22 nt, Human
ugcccugcccaccuggccucug

SEQ ID NO: 2371562 - RNA, 23 nt, Human
ugcccugcccaccuggccucugc

SEQ ID NO: 2371563 - RNA, 18 nt, Human
ugccggguuuuauauuuu

SEQ ID NO: 2371564 - RNA, 20 nt, Human
ugccgguaaacacgccugca

SEQ ID NO: 2371565 - RNA, 14 nt, Human
ugccggguuuuaua

SEQ ID NO: 2371566 - RNA, 22 nt, Human
ugcccugguuucacuggcccaa

SEQ ID NO: 2371567 - RNA, 15 nt, Human
ugcccugguuuccug

SEQ ID NO: 2371568 - RNA, 15 nt, Human
ugccgucuaccugag

SEQ ID NO: 2371569 - RNA, 16 nt, Human
ugccgucuaccugagg

SEQ ID NO: 2371570 - RNA, 16 nt, Human
ugccggugagaauaag

SEQ ID NO: 2371571 - RNA, 20 nt, Human
ugccguggauugcacguggc

SEQ ID NO: 2371572 - RNA, 22 nt, Human
ugccguggauugcacguggccu

SEQ ID NO: 2371573 - RNA, 23 nt, Human
ugccguggggccgccgccucuuu

SEQ ID NO: 2371574 - RNA, 17 nt, Human
ugccgucuaccugaggg

SEQ ID NO: 2371575 - RNA, 19 nt, Human
ugccgucuaccugaggggc

SEQ ID NO: 2371576 - RNA, 20 nt, Human
ugcccuggugcugccacacu

SEQ ID NO: 2371577 - RNA, 18 nt, Human
ugcccuggugcugccaca

SEQ ID NO: 2371578 - RNA, 16 nt, Human
ugcccuggagguggcu

SEQ ID NO: 2371579 - RNA, 12 nt, Human
ugcccuggcccu

SEQ ID NO: 2371580 - RNA, 13 nt, Human
ugcccuggcccug

SEQ ID NO: 2371581 - RNA, 14 nt, Human
ugcccuggcccuga

SEQ ID NO: 2371582 - RNA, 17 nt, Human
ugcccugguuucacugg

SEQ ID NO: 2371583 - RNA, 15 nt, Human
ugcccugguuucacu

SEQ ID NO: 2371584 - RNA, 22 nt, Human
ugcccugguggagaaagcacug

SEQ ID NO: 2371585 - RNA, 23 nt, Human
ugcccugguggagaaagcacuga

SEQ ID NO: 2371586 - RNA, 21 nt, Human
ugcccuggugcugccacacuu

SEQ ID NO: 2371587 - RNA, 16 nt, Human
ugcccuggcccugagg

SEQ ID NO: 2371588 - RNA, 13 nt, Human
ugcccugguggag

SEQ ID NO: 2371589 - RNA, 14 nt, Human
ugcccugguggaga

SEQ ID NO: 2371590 - RNA, 15 nt, Human
ugcccugguggagaa

SEQ ID NO: 2371591 - RNA, 18 nt, Human
ugcccuggauccaucagg

SEQ ID NO: 2371592 - RNA, 11 nt, Human
ugcccugcugc

SEQ ID NO: 2371593 - RNA, 17 nt, Human
ugcccugccugagggcc

SEQ ID NO: 2371594 - RNA, 19 nt, Human
ugcccugcggccccgucug

SEQ ID NO: 2371595 - RNA, 21 nt, Human
ugcccugcugccgccucccag

SEQ ID NO: 2371596 - RNA, 23 nt, Human
ugcccugcugccgccucccagcc

SEQ ID NO: 2371597 - RNA, 19 nt, Human
ugcauguuuuccagcuccu

SEQ ID NO: 2371598 - RNA, 18 nt, Human
ugcauguuccacuaaccc

SEQ ID NO: 2371599 - RNA, 16 nt, Human
ugcauguuccacuaac

SEQ ID NO: 2371600 - RNA, 17 nt, Human
ugcauguuccacuaacc

SEQ ID NO: 2371601 - RNA, 15 nt, Human
ugcauguuugugauu

SEQ ID NO: 2371602 - RNA, 22 nt, Human
ugcauguuaggaaaauuucaca

SEQ ID NO: 2371603 - RNA, 16 nt, Human
ugcauguaugucuugg

SEQ ID NO: 2371604 - RNA, 14 nt, Human
ugcauguuccacua

SEQ ID NO: 2371605 - RNA, 13 nt, Human
ugcauguaugucu

SEQ ID NO: 2371606 - RNA, 14 nt, Human
ugcauguaugucuu

SEQ ID NO: 2371607 - RNA, 15 nt, Human
ugcauguaugucuug

SEQ ID NO: 2371608 - RNA, 20 nt, Human
ugcauguaaacacgccugca

SEQ ID NO: 2371609 - RNA, 15 nt, Human
ugcauccuccgccuc

SEQ ID NO: 2371610 - RNA, 15 nt, Human
ugcauccuccaagaa

SEQ ID NO: 2371611 - RNA, 22 nt, Human
ugcauccuccaagaaucuaucu

SEQ ID NO: 2371612 - RNA, 17 nt, Human
ugcaugguuuagaaagc

SEQ ID NO: 2371613 - RNA, 15 nt, Human
ugcaucccccccacc

SEQ ID NO: 2371614 - RNA, 17 nt, Human
ugcaucccccccaccuc

SEQ ID NO: 2371615 - RNA, 19 nt, Human
ugcauccgggggcagcucu

SEQ ID NO: 2371616 - RNA, 16 nt, Human
ugcauccccuuggcug

SEQ ID NO: 2371617 - RNA, 14 nt, Human
ugcauccuccaaga

SEQ ID NO: 2371618 - RNA, 20 nt, Human
ugcauccguaguucccugaa

SEQ ID NO: 2371619 - RNA, 19 nt, Human
ugcauccguaguucccuga

SEQ ID NO: 2371620 - RNA, 14 nt, Human
ugcauccuccgccu

SEQ ID NO: 2371621 - RNA, 13 nt, Human
ugcagauucauuu

SEQ ID NO: 2371622 - RNA, 22 nt, Human
ugcagauggggcucccgcccgu

SEQ ID NO: 2371623 - RNA, 16 nt, Human
ugcagauuugggcugg

SEQ ID NO: 2371624 - RNA, 17 nt, Human
ugcagauuugggcugga

SEQ ID NO: 2371625 - RNA, 20 nt, Human
ugcauccauuccucagggac

SEQ ID NO: 2371626 - RNA, 19 nt, Human
ugcauccauuccucaggga

SEQ ID NO: 2371627 - RNA, 21 nt, Human
ugcauccauuccucagggaca

SEQ ID NO: 2371628 - RNA, 14 nt, Human
ugcagaugacaaaa

SEQ ID NO: 2371629 - RNA, 15 nt, Human
ugcagaugacaaaaa

SEQ ID NO: 2371630 - RNA, 18 nt, Human
ugcagauggggcucccgc

SEQ ID NO: 2371631 - RNA, 21 nt, Human
ugcagaggucugugcugaggc

SEQ ID NO: 2371632 - RNA, 18 nt, Human
ugcagaggucugugcuga

SEQ ID NO: 2371633 - RNA, 19 nt, Human
ugcagaggucugugcugag

SEQ ID NO: 2371634 - RNA, 22 nt, Human
ugcagaggucugugcugaggcc

SEQ ID NO: 2371635 - RNA, 19 nt, Human
ugcagauaaacaguaguga

SEQ ID NO: 2371636 - RNA, 21 nt, Human
ugccacaucuugaucugcuca

SEQ ID NO: 2371637 - RNA, 23 nt, Human
ugccacaggccucccuguuugaa

SEQ ID NO: 2371638 - RNA, 22 nt, Human
ugccacauuuauuuuuauaucu

SEQ ID NO: 2371639 - RNA, 18 nt, Human
ugccaccaaaggccaggg

SEQ ID NO: 2371640 - RNA, 15 nt, Human
ugccaccacgcccgg

SEQ ID NO: 2371641 - RNA, 23 nt, Human
ugcauuuuggagaguuuccugaa

SEQ ID NO: 2371642 - RNA, 18 nt, Human
ugcauuuuguuugguauu

SEQ ID NO: 2371643 - RNA, 22 nt, Human
ugcauuuuguuugguauuguau

SEQ ID NO: 2371644 - RNA, 15 nt, Human
ugccacaggccuccc

SEQ ID NO: 2371645 - RNA, 22 nt, Human
ugcauuuugcuauuguaaauau

SEQ ID NO: 2371646 - RNA, 17 nt, Human
ugccacaggccucccug

SEQ ID NO: 2371647 - RNA, 18 nt, Human
ugccacaggccucccugu

SEQ ID NO: 2371648 - RNA, 22 nt, Human
ugccacaggccucccuguuuga

SEQ ID NO: 2371649 - RNA, 18 nt, Human
ugcauuuugcagcaguga

SEQ ID NO: 2371650 - RNA, 17 nt, Human
ugcauuuucaccccacc

SEQ ID NO: 2371651 - RNA, 17 nt, Human
ugcauuuuaauuuuaac

SEQ ID NO: 2371652 - RNA, 19 nt, Human
ugcauuuuaauuuuaacca

SEQ ID NO: 2371653 - RNA, 21 nt, Human
ugcauuuuaauuuuaaccaaa

SEQ ID NO: 2371654 - RNA, 13 nt, Human
ugcauuuugcuau

SEQ ID NO: 2371655 - RNA, 15 nt, Human
ugcauuuugcuauug

SEQ ID NO: 2371656 - RNA, 16 nt, Human
ugcauuuugcuauugu

SEQ ID NO: 2371657 - RNA, 17 nt, Human
ugcauuuugcuauugua

SEQ ID NO: 2371658 - RNA, 18 nt, Human
ugcauuuugcuauuguaa

SEQ ID NO: 2371659 - RNA, 19 nt, Human
ugcauuuugcuauuguaaa

SEQ ID NO: 2371660 - RNA, 20 nt, Human
ugcauuuugcuauuguaaau

SEQ ID NO: 2371661 - RNA, 21 nt, Human
ugcauuuuaaaaaugaaauuu

SEQ ID NO: 2371662 - RNA, 16 nt, Human
ugcauuuuaaaaauga

SEQ ID NO: 2371663 - RNA, 19 nt, Human
ugcauuugucuauucucca

SEQ ID NO: 2371664 - RNA, 20 nt, Human
ugcauuugucuauucuccag

SEQ ID NO: 2371665 - RNA, 23 nt, Human
ugcauuagaaauuagcuguguga

SEQ ID NO: 2371666 - RNA, 14 nt, Human
ugcauuagaaauua

SEQ ID NO: 2371667 - RNA, 13 nt, Human
ugcauuagaaauu

SEQ ID NO: 2371668 - RNA, 22 nt, Human
ugcauuagaaauagacaguaua

SEQ ID NO: 2371669 - RNA, 21 nt, Human
ugcauuagagcccauuucaau

SEQ ID NO: 2371670 - RNA, 20 nt, Human
ugcauuagaaauagacagua

SEQ ID NO: 2371671 - RNA, 19 nt, Human
ugcauuagaaauagacagu

SEQ ID NO: 2371672 - RNA, 18 nt, Human
ugcauuacugcaugcacu

SEQ ID NO: 2371673 - RNA, 17 nt, Human
ugcauuacugcaugcac

SEQ ID NO: 2371674 - RNA, 15 nt, Human
ugcauuacugcaugc

SEQ ID NO: 2371675 - RNA, 19 nt, Human
ugcauuaccgcguuguaaa

SEQ ID NO: 2371676 - RNA, 23 nt, Human
ugcauuacagagaggagaaacac

SEQ ID NO: 2371677 - RNA, 22 nt, Human
ugcauuaccgcguuguaaaaua

SEQ ID NO: 2371678 - RNA, 23 nt, Human
ugcauuaccgcguuguaaaauau

SEQ ID NO: 2371679 - RNA, 19 nt, Human
ugcauuaaaagaaaauaaa

SEQ ID NO: 2371680 - RNA, 22 nt, Human
ugcauuacagagaggagaaaca

SEQ ID NO: 2371681 - RNA, 17 nt, Human
ugcauuaaaagaaaaua

SEQ ID NO: 2371682 - RNA, 16 nt, Human
ugcauuaaaagaaaau

SEQ ID NO: 2371683 - RNA, 15 nt, Human
ugcauuaaaagaaaa

SEQ ID NO: 2371684 - RNA, 14 nt, Human
ugcauuaaaagaaa

SEQ ID NO: 2371685 - RNA, 21 nt, Human
ugcauguuuuccagcuccuca

SEQ ID NO: 2371686 - RNA, 21 nt, Human
ugcauuauauuuguaaauuua

SEQ ID NO: 2371687 - RNA, 17 nt, Human
ugcauuaucuagauacu

SEQ ID NO: 2371688 - RNA, 12 nt, Human
ugcauuaucuag

SEQ ID NO: 2371689 - RNA, 14 nt, Human
ugcauuauauuuau

SEQ ID NO: 2371690 - RNA, 15 nt, Human
ugccaucuucccagc

SEQ ID NO: 2371691 - RNA, 16 nt, Human
ugccaucuucccagca

SEQ ID NO: 2371692 - RNA, 20 nt, Human
ugccaugaggaacaaggcaa

SEQ ID NO: 2371693 - RNA, 23 nt, Human
ugccaugaggaacaaggcaaggc

SEQ ID NO: 2371694 - RNA, 14 nt, Human
ugccaugugccagg

SEQ ID NO: 2371695 - RNA, 20 nt, Human
ugccauguaggguucccuua

SEQ ID NO: 2371696 - RNA, 15 nt, Human
ugccaugugccaggu

SEQ ID NO: 2371697 - RNA, 16 nt, Human
ugccaugugaagaggg

SEQ ID NO: 2371698 - RNA, 15 nt, Human
ugccaugugaagagg

SEQ ID NO: 2371699 - RNA, 17 nt, Human
ugccaugugugcugaac

SEQ ID NO: 2371700 - RNA, 21 nt, Human
ugcccagaacuggacucagga

SEQ ID NO: 2371701 - RNA, 17 nt, Human
ugcccacugucucuccu

SEQ ID NO: 2371702 - RNA, 13 nt, Human
ugcccacucccug

SEQ ID NO: 2371703 - RNA, 11 nt, Human
ugcccaccugu

SEQ ID NO: 2371704 - RNA, 19 nt, Human
ugcccacggagucgugggg

SEQ ID NO: 2371705 - RNA, 19 nt, Human
ugcccaccuggccucugca

SEQ ID NO: 2371706 - RNA, 18 nt, Human
ugcccacgcuggagugca

SEQ ID NO: 2371707 - RNA, 12 nt, Human
ugccauguuggc

SEQ ID NO: 2371708 - RNA, 15 nt, Human
ugccauguuggccag

SEQ ID NO: 2371709 - RNA, 16 nt, Human
ugccauguuggccagg

SEQ ID NO: 2371710 - RNA, 20 nt, Human
ugcccaccuggccucugcac

SEQ ID NO: 2371711 - RNA, 19 nt, Human
ugccacugcccgagcuggu

SEQ ID NO: 2371712 - RNA, 18 nt, Human
ugccacugcccgagcugg

SEQ ID NO: 2371713 - RNA, 15 nt, Human
ugccagggcagggcc

SEQ ID NO: 2371714 - RNA, 16 nt, Human
ugccagggcagggccc

SEQ ID NO: 2371715 - RNA, 20 nt, Human
ugccaggguuucgagaagcu

SEQ ID NO: 2371716 - RNA, 23 nt, Human
ugccaggguuucgagaagcugcu

SEQ ID NO: 2371717 - RNA, 17 nt, Human
ugccagguuuuuggucu

SEQ ID NO: 2371718 - RNA, 16 nt, Human
ugccagguccuugccc

SEQ ID NO: 2371719 - RNA, 20 nt, Human
ugccagguccuugcccuuug

SEQ ID NO: 2371720 - RNA, 19 nt, Human
ugccagguucuauuuggaa

SEQ ID NO: 2371721 - RNA, 15 nt, Human
ugccauccagguuca

SEQ ID NO: 2371722 - RNA, 14 nt, Human
ugccaucuucccag

SEQ ID NO: 2371723 - RNA, 12 nt, Human
ugccauccaggu

SEQ ID NO: 2371724 - RNA, 22 nt, Human
ugccaucauguuuacagaggac

SEQ ID NO: 2371725 - RNA, 20 nt, Human
ugccagguucuauuuggaau

SEQ ID NO: 2371726 - RNA, 14 nt, Human
ugccagguuuucug

SEQ ID NO: 2371727 - RNA, 18 nt, Human
ugccagguuuucugggug

SEQ ID NO: 2371728 - RNA, 19 nt, Human
ugccagguuuucugggugu

SEQ ID NO: 2371729 - RNA, 17 nt, Human
ugccacugcccgagcug

SEQ ID NO: 2371730 - RNA, 23 nt, Human
ugccacucacacagccaggugcc

SEQ ID NO: 2371731 - RNA, 17 nt, Human
ugccacucauuccugua

SEQ ID NO: 2371732 - RNA, 18 nt, Human
ugccacucauuccuguag

SEQ ID NO: 2371733 - RNA, 19 nt, Human
ugccacucacuaggccccc

SEQ ID NO: 2371734 - RNA, 20 nt, Human
ugccacucacuaggccccca

SEQ ID NO: 2371735 - RNA, 21 nt, Human
ugccacucacuaggcccccac

SEQ ID NO: 2371736 - RNA, 22 nt, Human
ugccacucacuaggcccccacu

SEQ ID NO: 2371737 - RNA, 13 nt, Human
ugccaccagagac

SEQ ID NO: 2371738 - RNA, 13 nt, Human
ugccacucacuag

SEQ ID NO: 2371739 - RNA, 14 nt, Human
ugccaccagagacc

SEQ ID NO: 2371740 - RNA, 22 nt, Human
ugccacucacacagccaggugc

SEQ ID NO: 2371741 - RNA, 14 nt, Human
ugccacucacuagg

SEQ ID NO: 2371742 - RNA, 15 nt, Human
ugccacucacuaggc

SEQ ID NO: 2371743 - RNA, 17 nt, Human
ugccacucacuaggccc

SEQ ID NO: 2371744 - RNA, 18 nt, Human
ugccacucacuaggcccc

SEQ ID NO: 2371745 - RNA, 12 nt, Human
ugccaggaagcc

SEQ ID NO: 2371746 - RNA, 16 nt, Human
ugccaggaagccagca

SEQ ID NO: 2371747 - RNA, 18 nt, Human
ugccaggaagccagcagg

SEQ ID NO: 2371748 - RNA, 19 nt, Human
ugccaggaagccagcaggc

SEQ ID NO: 2371749 - RNA, 16 nt, Human
ugcaacccaaggacug

SEQ ID NO: 2371750 - RNA, 20 nt, Human
ugcaacccaaggacugaggg

SEQ ID NO: 2371751 - RNA, 17 nt, Human
ugcaacccuuaccccuu

SEQ ID NO: 2371752 - RNA, 15 nt, Human
ugcaacccuuacccc

SEQ ID NO: 2371753 - RNA, 16 nt, Human
ugcaaccgucuguuau

SEQ ID NO: 2371754 - RNA, 13 nt, Human
ugcaaccuccgcc

SEQ ID NO: 2371755 - RNA, 14 nt, Human
ugcaaccuccgccu

SEQ ID NO: 2371756 - RNA, 19 nt, Human
ugcaacaggcugggcuuca

SEQ ID NO: 2371757 - RNA, 20 nt, Human
ugcaacaggcugggcuucag

SEQ ID NO: 2371758 - RNA, 14 nt, Human
ugcaacaguagcau

SEQ ID NO: 2371759 - RNA, 13 nt, Human
ugcaacaguagca

SEQ ID NO: 2371760 - RNA, 14 nt, Human
ugcaacaggcuugu

SEQ ID NO: 2371761 - RNA, 24 nt, Human
ugcaacaggguauggacuaucugu

SEQ ID NO: 2371762 - RNA, 11 nt, Human
ugcaaccacug

SEQ ID NO: 2371763 - RNA, 17 nt, Human
ugcaaccaacuacaacc

SEQ ID NO: 2371764 - RNA, 13 nt, Human
ugcaaccacugca

SEQ ID NO: 2371765 - RNA, 15 nt, Human
ugcaaccacugcaac

SEQ ID NO: 2371766 - RNA, 14 nt, Human
ugcaacaggcuggg

SEQ ID NO: 2371767 - RNA, 15 nt, Human
ugcaacaggcugggc

SEQ ID NO: 2371768 - RNA, 16 nt, Human
ugcaacaggcugggcu

SEQ ID NO: 2371769 - RNA, 17 nt, Human
ugcaacaggcugggcuu

SEQ ID NO: 2371770 - RNA, 22 nt, Human
ugcaaaagguucacuaaagcag

SEQ ID NO: 2371771 - RNA, 22 nt, Human
ugcaaaaggacucucaggacca

SEQ ID NO: 2371772 - RNA, 23 nt, Human
ugcaaaagguucacuaaagcagu

SEQ ID NO: 2371773 - RNA, 20 nt, Human
ugcaaaaguucugacuugac

SEQ ID NO: 2371774 - RNA, 17 nt, Human
ugcaaaaugagacccuc

SEQ ID NO: 2371775 - RNA, 18 nt, Human
ugcaaaaugaggaaugua

SEQ ID NO: 2371776 - RNA, 21 nt, Human
ugcaaaaugaggaauguauau

SEQ ID NO: 2371777 - RNA, 20 nt, Human
ugcaaaagacuaauuuaaaa

SEQ ID NO: 2371778 - RNA, 21 nt, Human
ugcaaaauuuccaguaccuuu

SEQ ID NO: 2371779 - RNA, 21 nt, Human
ugcaaaauuugaugccaggac

SEQ ID NO: 2371780 - RNA, 22 nt, Human
ugcaaaauuugaugccaggaca

SEQ ID NO: 2371781 - RNA, 16 nt, Human
ugcaaaauuuccagua

SEQ ID NO: 2371782 - RNA, 15 nt, Human
ugcaaaauuuccagu

SEQ ID NO: 2371783 - RNA, 14 nt, Human
ugcaaaauuuccag

SEQ ID NO: 2371784 - RNA, 23 nt, Human
ugcaaacacacaaagguauaauu

SEQ ID NO: 2371785 - RNA, 22 nt, Human
ugcaaacaugggguuggcuggg

SEQ ID NO: 2371786 - RNA, 13 nt, Human
ugcaacuucugcc

SEQ ID NO: 2371787 - RNA, 14 nt, Human
ugcaacuucugccu

SEQ ID NO: 2371788 - RNA, 21 nt, Human
ugcaacuucuuuuuauuuucu

SEQ ID NO: 2371789 - RNA, 17 nt, Human
ugcaacuucuuuuuauu

SEQ ID NO: 2371790 - RNA, 16 nt, Human
ugcaacuuguaaaugu

SEQ ID NO: 2371791 - RNA, 18 nt, Human
ugcaacuuguaaaugugg

SEQ ID NO: 2371792 - RNA, 14 nt, Human
ugcaacuuggacuu

SEQ ID NO: 2371793 - RNA, 19 nt, Human
ugcaacuuuaagcagcucu

SEQ ID NO: 2371794 - RNA, 20 nt, Human
ugcaacuuuaagcagcucuu

SEQ ID NO: 2371795 - RNA, 23 nt, Human
ugcaacuuuaagcagcucuugcu

SEQ ID NO: 2371796 - RNA, 18 nt, Human
ugcaacuuuguauaaaag

SEQ ID NO: 2371797 - RNA, 14 nt, Human
ugcaaccuguugau

SEQ ID NO: 2371798 - RNA, 16 nt, Human
ugcaacggcuuagacu

SEQ ID NO: 2371799 - RNA, 16 nt, Human
ugcaacucaaggacuu

SEQ ID NO: 2371800 - RNA, 17 nt, Human
ugcaacucaaggacuuu

SEQ ID NO: 2371801 - RNA, 15 nt, Human
ugcaacuucauguca

SEQ ID NO: 2371802 - RNA, 22 nt, Human
ugcaacuucaugucaacuucug

SEQ ID NO: 2371803 - RNA, 21 nt, Human
ugcaaccuucgccaccugggu

SEQ ID NO: 2371804 - RNA, 18 nt, Human
ugcaaccuucgccaccug

SEQ ID NO: 2371805 - RNA, 22 nt, Human
ugcaaccugauugugucucuug

SEQ ID NO: 2371806 - RNA, 18 nt, Human
ugcaaccuccgccucuug

SEQ ID NO: 2371807 - RNA, 21 nt, Human
ugcaacccaaggacugaggga

SEQ ID NO: 2371808 - RNA, 20 nt, Human
ugcaaccuccgccucccggg

SEQ ID NO: 2371809 - RNA, 20 nt, Human
ugcaaccuccgccucuuggg

SEQ ID NO: 2371810 - RNA, 21 nt, Human
ugcaaccuccgccucuugggu

SEQ ID NO: 2371811 - RNA, 19 nt, Human
ugcaaccugauugugucuc

SEQ ID NO: 2371812 - RNA, 20 nt, Human
ugcaaccugauugugucucu

SEQ ID NO: 2371813 - RNA, 18 nt, Human
ugcaaccucuuggccuga

SEQ ID NO: 2371814 - RNA, 22 nt, Human
ugcaaccucgcuggacucucag

SEQ ID NO: 2371815 - RNA, 20 nt, Human
ugcaaccucgcuggacucuc

SEQ ID NO: 2371816 - RNA, 19 nt, Human
ugcaaccucgcuggacucu

SEQ ID NO: 2371817 - RNA, 14 nt, Human
ugcaaccucgcugg

SEQ ID NO: 2371818 - RNA, 21 nt, Human
ugcaaccuccgccucccgggu

SEQ ID NO: 2371819 - RNA, 21 nt, Human
ugauuuuuaccguuucuuccc

SEQ ID NO: 2371820 - RNA, 13 nt, Human
ugauuuugcaaau

SEQ ID NO: 2371821 - RNA, 22 nt, Human
ugauuuuuaccguuucuucccu

SEQ ID NO: 2371822 - RNA, 17 nt, Human
ugauuuugcuguagaag

SEQ ID NO: 2371823 - RNA, 19 nt, Human
ugauuuugcuguagaagau

SEQ ID NO: 2371824 - RNA, 14 nt, Human
ugauuuugcuguag

SEQ ID NO: 2371825 - RNA, 16 nt, Human
ugauuuugcuguagaa

SEQ ID NO: 2371826 - RNA, 15 nt, Human
ugauuuugaaaucau

SEQ ID NO: 2371827 - RNA, 13 nt, Human
ugauuuucuguug

SEQ ID NO: 2371828 - RNA, 15 nt, Human
ugauuuugaaaccau

SEQ ID NO: 2371829 - RNA, 12 nt, Human
ugauuuucuguu

SEQ ID NO: 2371830 - RNA, 13 nt, Human
ugauuuucauugc

SEQ ID NO: 2371831 - RNA, 15 nt, Human
ugauuuuaucuguga

SEQ ID NO: 2371832 - RNA, 16 nt, Human
ugauuuuaucugugaa

SEQ ID NO: 2371833 - RNA, 15 nt, Human
ugauuuucauugcug

SEQ ID NO: 2371834 - RNA, 20 nt, Human
ugauuuucaaagcuuuuucc

SEQ ID NO: 2371835 - RNA, 16 nt, Human
ugaugucccuauggaa

SEQ ID NO: 2371836 - RNA, 14 nt, Human
ugaugugaagccaa

SEQ ID NO: 2371837 - RNA, 22 nt, Human
ugaugugaagccaauucagaca

SEQ ID NO: 2371838 - RNA, 21 nt, Human
ugaugugccauuuuaaaaaaa

SEQ ID NO: 2371839 - RNA, 13 nt, Human
ugaugugccuggg

SEQ ID NO: 2371840 - RNA, 19 nt, Human
ugauuuuacaauugaaaug

SEQ ID NO: 2371841 - RNA, 15 nt, Human
ugauuuuagccuucu

SEQ ID NO: 2371842 - RNA, 18 nt, Human
ugauuuuagcugcagaac

SEQ ID NO: 2371843 - RNA, 19 nt, Human
ugauuuuagccuucucugu

SEQ ID NO: 2371844 - RNA, 17 nt, Human
ugauuuuaacucugucu

SEQ ID NO: 2371845 - RNA, 15 nt, Human
ugauuuuaacucugu

SEQ ID NO: 2371846 - RNA, 16 nt, Human
ugauuuuaauaauaua

SEQ ID NO: 2371847 - RNA, 17 nt, Human
ugauuuuaacaauaacu

SEQ ID NO: 2371848 - RNA, 16 nt, Human
ugauuuuaacaauaac

SEQ ID NO: 2371849 - RNA, 14 nt, Human
ugauuuuaacaaua

SEQ ID NO: 2371850 - RNA, 13 nt, Human
ugauuuuaacaau

SEQ ID NO: 2371851 - RNA, 19 nt, Human
ugauuuuaacaauaacuac

SEQ ID NO: 2371852 - RNA, 18 nt, Human
ugauuuuaacaauaacua

SEQ ID NO: 2371853 - RNA, 22 nt, Human
ugauuuuaacaauaacuacugu

SEQ ID NO: 2371854 - RNA, 14 nt, Human
ugauuuuaacucug

SEQ ID NO: 2371855 - RNA, 18 nt, Human
ugauguggaguggggcag

SEQ ID NO: 2371856 - RNA, 17 nt, Human
ugauguggaguggggca

SEQ ID NO: 2371857 - RNA, 12 nt, Human
ugauuuuaacaa

SEQ ID NO: 2371858 - RNA, 13 nt, Human
ugauuuuuuucca

SEQ ID NO: 2371859 - RNA, 18 nt, Human
ugauuuuuguaagacaau

SEQ ID NO: 2371860 - RNA, 16 nt, Human
ugauuuuuuuuccuuu

SEQ ID NO: 2371861 - RNA, 13 nt, Human
ugauuuuuugcau

SEQ ID NO: 2371862 - RNA, 22 nt, Human
ugauuuuugccucuuccagucu

SEQ ID NO: 2371863 - RNA, 20 nt, Human
ugauuuuuagaugagauugu

SEQ ID NO: 2371864 - RNA, 13 nt, Human
ugauuuuucugga

SEQ ID NO: 2371865 - RNA, 19 nt, Human
ugauuuuucuggagguuga

SEQ ID NO: 2371866 - RNA, 21 nt, Human
ugauuuuugccucuuccaguc

SEQ ID NO: 2371867 - RNA, 16 nt, Human
ugauuuuuuuuuccuu

SEQ ID NO: 2371868 - RNA, 17 nt, Human
ugauuuuuuuuuccuuc

SEQ ID NO: 2371869 - RNA, 19 nt, Human
ugauuuuuuuuuccuucag

SEQ ID NO: 2371870 - RNA, 20 nt, Human
ugauuuuuuuuuccuucagu

SEQ ID NO: 2371871 - RNA, 23 nt, Human
ugcaaaacagcguuuaagacugu

SEQ ID NO: 2371872 - RNA, 19 nt, Human
ugcaaaaggacucucagga

SEQ ID NO: 2371873 - RNA, 23 nt, Human
ugcaaaagacuaauuuaaaaaau

SEQ ID NO: 2371874 - RNA, 19 nt, Human
ugcaaaacagcguuuaaga

SEQ ID NO: 2371875 - RNA, 23 nt, Human
ugcaaaaauauuuauaaaacuuc

SEQ ID NO: 2371876 - RNA, 22 nt, Human
ugcaaaaauauuuauaaaacuu

SEQ ID NO: 2371877 - RNA, 12 nt, Human
ugcaaaaaauag

SEQ ID NO: 2371878 - RNA, 18 nt, Human
ugcaaaaauauuuauaaa

SEQ ID NO: 2371879 - RNA, 14 nt, Human
ugcaaaaaggguca

SEQ ID NO: 2371880 - RNA, 16 nt, Human
ugauuuuuuuuuuuca

SEQ ID NO: 2371881 - RNA, 22 nt, Human
ugauuuuuuuuucauacacuua

SEQ ID NO: 2371882 - RNA, 18 nt, Human
ugauuuuuuuuucauaca

SEQ ID NO: 2371883 - RNA, 22 nt, Human
ugauuuuuuuuuccuucagugc

SEQ ID NO: 2371884 - RNA, 23 nt, Human
ugauuuuuuuuuccuucagugcc

SEQ ID NO: 2371885 - RNA, 20 nt, Human
ugcacagaguuguuacauuu

SEQ ID NO: 2371886 - RNA, 20 nt, Human
ugcacagggcagcugggccc

SEQ ID NO: 2371887 - RNA, 21 nt, Human
ugcacaaauauuuauuuucuu

SEQ ID NO: 2371888 - RNA, 14 nt, Human
ugcacaacauuaca

SEQ ID NO: 2371889 - RNA, 21 nt, Human
ugcacagagcucuccagcucc

SEQ ID NO: 2371890 - RNA, 19 nt, Human
ugcacagggcagcugggcc

SEQ ID NO: 2371891 - RNA, 15 nt, Human
ugcacagugcaucuc

SEQ ID NO: 2371892 - RNA, 13 nt, Human
ugcacagugauuu

SEQ ID NO: 2371893 - RNA, 16 nt, Human
ugcacagugcaucuca

SEQ ID NO: 2371894 - RNA, 17 nt, Human
ugcacagugcaucucag

SEQ ID NO: 2371895 - RNA, 18 nt, Human
ugcaccggcuggccuggc

SEQ ID NO: 2371896 - RNA, 19 nt, Human
ugcaccggcuggccuggcc

SEQ ID NO: 2371897 - RNA, 20 nt, Human
ugcaccggcuggccuggccc

SEQ ID NO: 2371898 - RNA, 15 nt, Human
ugcacgaccuuggga

SEQ ID NO: 2371899 - RNA, 14 nt, Human
ugcaccuugugucu

SEQ ID NO: 2371900 - RNA, 20 nt, Human
ugcaccuuaccaacuuucug

SEQ ID NO: 2371901 - RNA, 21 nt, Human
ugcaccuuaccaacuuucugu

SEQ ID NO: 2371902 - RNA, 15 nt, Human
ugcaccuugugucug

SEQ ID NO: 2371903 - RNA, 16 nt, Human
ugcaccuugugucugu

SEQ ID NO: 2371904 - RNA, 20 nt, Human
ugcaccuguacucaggaggc

SEQ ID NO: 2371905 - RNA, 12 nt, Human
ugcaccugugca

SEQ ID NO: 2371906 - RNA, 13 nt, Human
ugcaccuuaccaa

SEQ ID NO: 2371907 - RNA, 18 nt, Human
ugcaccuuaccaacuuuc

SEQ ID NO: 2371908 - RNA, 19 nt, Human
ugcaccuuaccaacuuucu

SEQ ID NO: 2371909 - RNA, 17 nt, Human
ugcaccuguacucagga

SEQ ID NO: 2371910 - RNA, 16 nt, Human
ugcaccuguacucagg

SEQ ID NO: 2371911 - RNA, 19 nt, Human
ugcacagugauuuuuuucu

SEQ ID NO: 2371912 - RNA, 22 nt, Human
ugcaccuggaauauauaaccag

SEQ ID NO: 2371913 - RNA, 20 nt, Human
ugcaccuggaauauauaacc

SEQ ID NO: 2371914 - RNA, 17 nt, Human
ugcaccuggaauauaua

SEQ ID NO: 2371915 - RNA, 21 nt, Human
ugcaccggcuggccuggcccc

SEQ ID NO: 2371916 - RNA, 21 nt, Human
ugcacucugugcccaugggca

SEQ ID NO: 2371917 - RNA, 15 nt, Human
ugcacucugugccca

SEQ ID NO: 2371918 - RNA, 16 nt, Human
ugcacucugugcccau

SEQ ID NO: 2371919 - RNA, 12 nt, Human
ugcacucugugc

SEQ ID NO: 2371920 - RNA, 13 nt, Human
ugcacucugugcc

SEQ ID NO: 2371921 - RNA, 18 nt, Human
ugcacugacauuguuggc

SEQ ID NO: 2371922 - RNA, 21 nt, Human
ugcacugacauuguuggccaa

SEQ ID NO: 2371923 - RNA, 15 nt, Human
ugcacugucacuuug

SEQ ID NO: 2371924 - RNA, 19 nt, Human
ugcacugucacuuugcucu

SEQ ID NO: 2371925 - RNA, 21 nt, Human
ugcacugucacuuugcucugg

SEQ ID NO: 2371926 - RNA, 16 nt, Human
ugcacugucaagauga

SEQ ID NO: 2371927 - RNA, 15 nt, Human
ugcacugugaaggac

SEQ ID NO: 2371928 - RNA, 23 nt, Human
ugcacuguccugcuccacagugu

SEQ ID NO: 2371929 - RNA, 19 nt, Human
ugcacugucgauaaucaga

SEQ ID NO: 2371930 - RNA, 18 nt, Human
ugcacuguccugcuccac

SEQ ID NO: 2371931 - RNA, 20 nt, Human
ugcacuguccugcuccacag

SEQ ID NO: 2371932 - RNA, 21 nt, Human
ugcacuguccugcuccacagu

SEQ ID NO: 2371933 - RNA, 22 nt, Human
ugcacuguccugcuccacagug

SEQ ID NO: 2371934 - RNA, 22 nt, Human
ugcacugucacuuugcucuggg

SEQ ID NO: 2371935 - RNA, 23 nt, Human
ugcacugucacuuugcucugggu

SEQ ID NO: 2371936 - RNA, 12 nt, Human
ugcacuguccug

SEQ ID NO: 2371937 - RNA, 13 nt, Human
ugcacuguccugc

SEQ ID NO: 2371938 - RNA, 14 nt, Human
ugcacuguccugcu

SEQ ID NO: 2371939 - RNA, 15 nt, Human
ugcacuguccugcuc

SEQ ID NO: 2371940 - RNA, 16 nt, Human
ugcacuguccugcucc

SEQ ID NO: 2371941 - RNA, 17 nt, Human
ugcacuguccugcucca

SEQ ID NO: 2371942 - RNA, 18 nt, Human
ugcacuuaacaagcuccc

SEQ ID NO: 2371943 - RNA, 23 nt, Human
ugcacuuaacaagcucccaggcc

SEQ ID NO: 2371944 - RNA, 16 nt, Human
ugcacuuaaggcacuc

SEQ ID NO: 2371945 - RNA, 15 nt, Human
ugcacuuacuugcuu

SEQ ID NO: 2371946 - RNA, 21 nt, Human
ugcacuuaaggcacucuguua

SEQ ID NO: 2371947 - RNA, 20 nt, Human
ugcacuuaugauuucaugug

SEQ ID NO: 2371948 - RNA, 19 nt, Human
ugcacuuaugauuucaugu

SEQ ID NO: 2371949 - RNA, 18 nt, Human
ugcacuuaugauuucaug

SEQ ID NO: 2371950 - RNA, 16 nt, Human
ugcacuuacuugcuua

SEQ ID NO: 2371951 - RNA, 18 nt, Human
ugcacuuacuugcuuauu

SEQ ID NO: 2371952 - RNA, 18 nt, Human
ugcacugugaaggacccu

SEQ ID NO: 2371953 - RNA, 13 nt, Human
ugcacuguucccc

SEQ ID NO: 2371954 - RNA, 19 nt, Human
ugcacuguucccccugugc

SEQ ID NO: 2371955 - RNA, 14 nt, Human
ugcacuguuccccc

SEQ ID NO: 2371956 - RNA, 23 nt, Human
ugcacuguucccccugugcagcc

SEQ ID NO: 2371957 - RNA, 21 nt, Human
ugcacuguucccccugugcag

SEQ ID NO: 2371958 - RNA, 20 nt, Human
ugcacuguucccccugugca

SEQ ID NO: 2371959 - RNA, 20 nt, Human
ugcagaggggcuuucuggag

SEQ ID NO: 2371960 - RNA, 21 nt, Human
ugcagaggggcaggcccugca

SEQ ID NO: 2371961 - RNA, 22 nt, Human
ugcagaggggcaggcccugcac

SEQ ID NO: 2371962 - RNA, 17 nt, Human
ugcagaggggcaggccc

SEQ ID NO: 2371963 - RNA, 18 nt, Human
ugcagaggggcaggcccu

SEQ ID NO: 2371964 - RNA, 20 nt, Human
ugcagaggggcaggcccugc

SEQ ID NO: 2371965 - RNA, 14 nt, Human
ugcacuucuuacaa

SEQ ID NO: 2371966 - RNA, 15 nt, Human
ugcagaggggcaggc

SEQ ID NO: 2371967 - RNA, 19 nt, Human
ugcagaggguacuuuaaga

SEQ ID NO: 2371968 - RNA, 20 nt, Human
ugcagagguaaaagugugag

SEQ ID NO: 2371969 - RNA, 22 nt, Human
ugcagaggggcuuucuggagag

SEQ ID NO: 2371970 - RNA, 21 nt, Human
ugcagaggggcuuucuggaga

SEQ ID NO: 2371971 - RNA, 19 nt, Human
ugcagagguccacaacaca

SEQ ID NO: 2371972 - RNA, 14 nt, Human
ugcagaggucugug

SEQ ID NO: 2371973 - RNA, 15 nt, Human
ugcagaggucugugc

SEQ ID NO: 2371974 - RNA, 16 nt, Human
ugcagaggucugugcu

SEQ ID NO: 2371975 - RNA, 17 nt, Human
ugcagaggucugugcug

SEQ ID NO: 2371976 - RNA, 16 nt, Human
ugcaaugacucaggac

SEQ ID NO: 2371977 - RNA, 17 nt, Human
ugcaaugacaucuucaa

SEQ ID NO: 2371978 - RNA, 16 nt, Human
ugcaaugacaucuuca

SEQ ID NO: 2371979 - RNA, 18 nt, Human
ugcaauggcuauauggca

SEQ ID NO: 2371980 - RNA, 20 nt, Human
ugcaauggcgugaucucggc

SEQ ID NO: 2371981 - RNA, 15 nt, Human
ugcaaugggcacugg

SEQ ID NO: 2371982 - RNA, 17 nt, Human
ugcaaugguuaacaucu

SEQ ID NO: 2371983 - RNA, 22 nt, Human
ugcaauguagaggggaaaagag

SEQ ID NO: 2371984 - RNA, 16 nt, Human
ugcaaugugcuacuga

SEQ ID NO: 2371985 - RNA, 19 nt, Human
ugcaaugucugagugaacc

SEQ ID NO: 2371986 - RNA, 22 nt, Human
ugcaaugucugagugaaccugu

SEQ ID NO: 2371987 - RNA, 15 nt, Human
ugcaauguuuuccuu

SEQ ID NO: 2371988 - RNA, 13 nt, Human
ugcaauggcagcc

SEQ ID NO: 2371989 - RNA, 14 nt, Human
ugcaauggcagccu

SEQ ID NO: 2371990 - RNA, 15 nt, Human
ugcaauggcagccuu

SEQ ID NO: 2371991 - RNA, 16 nt, Human
ugcaauggcagccuug

SEQ ID NO: 2371992 - RNA, 21 nt, Human
ugcaaugacacagucuuggcu

SEQ ID NO: 2371993 - RNA, 22 nt, Human
ugcaaugaagucucugaaguga

SEQ ID NO: 2371994 - RNA, 18 nt, Human
ugcaaugaagucucugaa

SEQ ID NO: 2371995 - RNA, 20 nt, Human
ugcaagaaaaugauguguac

SEQ ID NO: 2371996 - RNA, 17 nt, Human
ugcaagagacucuggcc

SEQ ID NO: 2371997 - RNA, 15 nt, Human
ugcaaugaagucucu

SEQ ID NO: 2371998 - RNA, 11 nt, Human
ugcaaugaaca

SEQ ID NO: 2371999 - RNA, 18 nt, Human
ugcaagagacucuggccu

SEQ ID NO: 2372000 - RNA, 13 nt, Human
ugcaaugaccuuu

SEQ ID NO: 2372001 - RNA, 16 nt, Human
ugcaaugaccuuucaa

SEQ ID NO: 2372002 - RNA, 17 nt, Human
ugcaaugaccuuucaau

SEQ ID NO: 2372003 - RNA, 19 nt, Human
ugcaaugaccuuucaauag

SEQ ID NO: 2372004 - RNA, 22 nt, Human
ugcaaugaccuuucaauaggaa

SEQ ID NO: 2372005 - RNA, 23 nt, Human
ugcaaugaccuuucaauaggaaa

SEQ ID NO: 2372006 - RNA, 15 nt, Human
ugcacaaagcccuuc

SEQ ID NO: 2372007 - RNA, 17 nt, Human
ugcacaaagcccuucca

SEQ ID NO: 2372008 - RNA, 17 nt, Human
ugcacagaguuguuaca

SEQ ID NO: 2372009 - RNA, 19 nt, Human
ugcacagaguuguuacauu

SEQ ID NO: 2372010 - RNA, 18 nt, Human
ugcacagaguuguuacau

SEQ ID NO: 2372011 - RNA, 20 nt, Human
ugcacaaacagaggccgcca

SEQ ID NO: 2372012 - RNA, 18 nt, Human
ugcacaaaacccagaccu

SEQ ID NO: 2372013 - RNA, 19 nt, Human
ugcacaaaacccagaccug

SEQ ID NO: 2372014 - RNA, 21 nt, Human
ugcacaaaauucgaccugauu

SEQ ID NO: 2372015 - RNA, 15 nt, Human
ugcacaaacucacca

SEQ ID NO: 2372016 - RNA, 17 nt, Human
ugcacaaacagaggccg

SEQ ID NO: 2372017 - RNA, 19 nt, Human
ugcacaaacagaggccgcc

SEQ ID NO: 2372018 - RNA, 22 nt, Human
ugcaauuguaggggugugugug

SEQ ID NO: 2372019 - RNA, 14 nt, Human
ugcaauuuauuaaa

SEQ ID NO: 2372020 - RNA, 15 nt, Human
ugcaauuuauuaaaa

SEQ ID NO: 2372021 - RNA, 21 nt, Human
ugcaauuguaggggugugugu

SEQ ID NO: 2372022 - RNA, 15 nt, Human
ugcaauugcuuagga

SEQ ID NO: 2372023 - RNA, 18 nt, Human
ugcaauuuauuaaaauga

SEQ ID NO: 2372024 - RNA, 22 nt, Human
ugcaauuuauuaaaaugauugu

SEQ ID NO: 2372025 - RNA, 15 nt, Human
ugcaauuaaagugau

SEQ ID NO: 2372026 - RNA, 16 nt, Human
ugcaauuaaagugaua

SEQ ID NO: 2372027 - RNA, 13 nt, Human
ugcaauuccccuc

SEQ ID NO: 2372028 - RNA, 14 nt, Human
ugcaauuccccucu

SEQ ID NO: 2372029 - RNA, 18 nt, Human
ugcaauuccccucugcug

SEQ ID NO: 2372030 - RNA, 20 nt, Human
ugcaauuuuaauugauuauu

SEQ ID NO: 2372031 - RNA, 20 nt, Human
ugcaauuuguuugugcuucu

SEQ ID NO: 2372032 - RNA, 21 nt, Human
ugcaauuuguuugugcuucua

SEQ ID NO: 2372033 - RNA, 19 nt, Human
ugcaauuugggagauauau

SEQ ID NO: 2372034 - RNA, 17 nt, Human
ugcaauuuguuugugcu

SEQ ID NO: 2372035 - RNA, 19 nt, Human
ugcaauuuguuugugcuuc

SEQ ID NO: 2372036 - RNA, 14 nt, Human
ugcaauuucauaug

SEQ ID NO: 2372037 - RNA, 20 nt, Human
ugcaauuucauaugcuguau

SEQ ID NO: 2372038 - RNA, 15 nt, Human
ugcacaaacagaggc

SEQ ID NO: 2372039 - RNA, 16 nt, Human
ugcacaaacagaggcc

SEQ ID NO: 2372040 - RNA, 20 nt, Human
ugagcuccagacccccagca

SEQ ID NO: 2372041 - RNA, 19 nt, Human
ugagcuccagacccccagc

SEQ ID NO: 2372042 - RNA, 18 nt, Human
ugagcuccagacccccag

SEQ ID NO: 2372043 - RNA, 21 nt, Human
ugagcuccagacccccagcaa

SEQ ID NO: 2372044 - RNA, 16 nt, Human
ugagcuccaugugccc

SEQ ID NO: 2372045 - RNA, 16 nt, Human
ugagcuccccaaaaac

SEQ ID NO: 2372046 - RNA, 15 nt, Human
ugagcuccccaaaaa

SEQ ID NO: 2372047 - RNA, 22 nt, Human
ugagcuccccaccaccccagcu

SEQ ID NO: 2372048 - RNA, 20 nt, Human
ugagcuccccaccaccccag

SEQ ID NO: 2372049 - RNA, 15 nt, Human
ugagcuccccaccac

SEQ ID NO: 2372050 - RNA, 21 nt, Human
ugagcuccccaaaaaccucac

SEQ ID NO: 2372051 - RNA, 15 nt, Human
ugagcuccucugggc

SEQ ID NO: 2372052 - RNA, 14 nt, Human
ugagcuccucuggg

SEQ ID NO: 2372053 - RNA, 13 nt, Human
ugagcuccucugg

SEQ ID NO: 2372054 - RNA, 23 nt, Human
ugagcuccccaccaccccagcug

SEQ ID NO: 2372055 - RNA, 18 nt, Human
ugagcuccucugggcagg

SEQ ID NO: 2372056 - RNA, 16 nt, Human
ugagcuccucugggca

SEQ ID NO: 2372057 - RNA, 21 nt, Human
ugagcucucggaacugcaugc

SEQ ID NO: 2372058 - RNA, 20 nt, Human
ugagcucucggaacugcaug

SEQ ID NO: 2372059 - RNA, 18 nt, Human
ugagcucuugugaggaaa

SEQ ID NO: 2372060 - RNA, 22 nt, Human
ugagcucuugugaggaaaguca

SEQ ID NO: 2372061 - RNA, 13 nt, Human
ugagcucuuguga

SEQ ID NO: 2372062 - RNA, 18 nt, Human
ugagcucuucauguuuca

SEQ ID NO: 2372063 - RNA, 16 nt, Human
ugagcucuucauguuu

SEQ ID NO: 2372064 - RNA, 15 nt, Human
ugagcucuucauguu

SEQ ID NO: 2372065 - RNA, 12 nt, Human
ugagcucuucau

SEQ ID NO: 2372066 - RNA, 22 nt, Human
ugagcucugcauuugucuauuc

SEQ ID NO: 2372067 - RNA, 23 nt, Human
ugagcucugcauuugucuauucu

SEQ ID NO: 2372068 - RNA, 12 nt, Human
ugagcucucugu

SEQ ID NO: 2372069 - RNA, 18 nt, Human
ugagcucugcagcccagg

SEQ ID NO: 2372070 - RNA, 21 nt, Human
ugagcucugcagcccagggac

SEQ ID NO: 2372071 - RNA, 17 nt, Human
ugagcccggaugcuucu

SEQ ID NO: 2372072 - RNA, 13 nt, Human
ugagccccuuccu

SEQ ID NO: 2372073 - RNA, 14 nt, Human
ugagccccuuccuu

SEQ ID NO: 2372074 - RNA, 13 nt, Human
ugagcccgggcug

SEQ ID NO: 2372075 - RNA, 14 nt, Human
ugagcccgggcugc

SEQ ID NO: 2372076 - RNA, 15 nt, Human
ugagcccgggcugcc

SEQ ID NO: 2372077 - RNA, 16 nt, Human
ugagcccgggcugccu

SEQ ID NO: 2372078 - RNA, 15 nt, Human
ugagccccugggacu

SEQ ID NO: 2372079 - RNA, 15 nt, Human
ugagccccugguccu

SEQ ID NO: 2372080 - RNA, 14 nt, Human
ugagccccugggac

SEQ ID NO: 2372081 - RNA, 13 nt, Human
ugagccccuggga

SEQ ID NO: 2372082 - RNA, 22 nt, Human
ugagccccugucuagagaggga

SEQ ID NO: 2372083 - RNA, 12 nt, Human
ugagccccuucc

SEQ ID NO: 2372084 - RNA, 21 nt, Human
ugagccccugucuagagaggg

SEQ ID NO: 2372085 - RNA, 17 nt, Human
ugagccccugucuagag

SEQ ID NO: 2372086 - RNA, 17 nt, Human
ugagcccucagaacccu

SEQ ID NO: 2372087 - RNA, 14 nt, Human
ugagcccucagaac

SEQ ID NO: 2372088 - RNA, 12 nt, Human
ugagcccucaga

SEQ ID NO: 2372089 - RNA, 16 nt, Human
ugagcccucaaaguga

SEQ ID NO: 2372090 - RNA, 17 nt, Human
ugagcccgggcugccug

SEQ ID NO: 2372091 - RNA, 18 nt, Human
ugagcccgggcugccugg

SEQ ID NO: 2372092 - RNA, 19 nt, Human
ugagcccgggcugccuggg

SEQ ID NO: 2372093 - RNA, 20 nt, Human
ugagcccgggcugccugggc

SEQ ID NO: 2372094 - RNA, 22 nt, Human
ugagcccgggcugccugggcug

SEQ ID NO: 2372095 - RNA, 21 nt, Human
ugagcccgggcugccugggcu

SEQ ID NO: 2372096 - RNA, 13 nt, Human
ugagccucagcau

SEQ ID NO: 2372097 - RNA, 15 nt, Human
ugagccucagcaucc

SEQ ID NO: 2372098 - RNA, 16 nt, Human
ugagccuacgcugaag

SEQ ID NO: 2372099 - RNA, 15 nt, Human
ugagccgggccccug

SEQ ID NO: 2372100 - RNA, 16 nt, Human
ugagccgggccccugg

SEQ ID NO: 2372101 - RNA, 17 nt, Human
ugagccgggccccuggg

SEQ ID NO: 2372102 - RNA, 20 nt, Human
ugagccgggccccugggcuu

SEQ ID NO: 2372103 - RNA, 19 nt, Human
ugagccgggccccugggcu

SEQ ID NO: 2372104 - RNA, 13 nt, Human
ugagcccaggagu

SEQ ID NO: 2372105 - RNA, 12 nt, Human
ugagcccaggag

SEQ ID NO: 2372106 - RNA, 21 nt, Human
ugagcccagcugggucaggca

SEQ ID NO: 2372107 - RNA, 17 nt, Human
ugagcccagcuggguca

SEQ ID NO: 2372108 - RNA, 17 nt, Human
ugagcccauggcccucc

SEQ ID NO: 2372109 - RNA, 13 nt, Human
ugagccccaaaag

SEQ ID NO: 2372110 - RNA, 14 nt, Human
ugagcaucaggcca

SEQ ID NO: 2372111 - RNA, 15 nt, Human
ugagcaucaggccag

SEQ ID NO: 2372112 - RNA, 16 nt, Human
ugagcccacaaagccu

SEQ ID NO: 2372113 - RNA, 16 nt, Human
ugagcaucacaguuuu

SEQ ID NO: 2372114 - RNA, 17 nt, Human
ugagcaucacaguuuug

SEQ ID NO: 2372115 - RNA, 17 nt, Human
ugagcccacaaagccuu

SEQ ID NO: 2372116 - RNA, 19 nt, Human
ugagcccacugcccacccc

SEQ ID NO: 2372117 - RNA, 20 nt, Human
ugagcccacugcccaccccc

SEQ ID NO: 2372118 - RNA, 21 nt, Human
ugagcccacugcccacccccu

SEQ ID NO: 2372119 - RNA, 22 nt, Human
ugagcccacugcccacccccuc

SEQ ID NO: 2372120 - RNA, 23 nt, Human
ugagcccacugcccacccccuca

SEQ ID NO: 2372121 - RNA, 20 nt, Human
ugagaugcuagaacucccuu

SEQ ID NO: 2372122 - RNA, 16 nt, Human
ugagaugcuagaacuc

SEQ ID NO: 2372123 - RNA, 14 nt, Human
ugagaugcuagaac

SEQ ID NO: 2372124 - RNA, 18 nt, Human
ugagaugauucagaaggg

SEQ ID NO: 2372125 - RNA, 19 nt, Human
ugagaugauucagaagggg

SEQ ID NO: 2372126 - RNA, 14 nt, Human
ugagaugcagcugg

SEQ ID NO: 2372127 - RNA, 15 nt, Human
ugagaugcagcugga

SEQ ID NO: 2372128 - RNA, 16 nt, Human
ugagaugcagcuggaa

SEQ ID NO: 2372129 - RNA, 18 nt, Human
ugagaugcagcuggaaaa

SEQ ID NO: 2372130 - RNA, 13 nt, Human
ugagcaucaggcc

SEQ ID NO: 2372131 - RNA, 20 nt, Human
ugagcagucaggaaagagaa

SEQ ID NO: 2372132 - RNA, 17 nt, Human
ugagcagucaggaaaga

SEQ ID NO: 2372133 - RNA, 15 nt, Human
ugagcagucaggaaa

SEQ ID NO: 2372134 - RNA, 18 nt, Human
ugagauccuuccuuuuga

SEQ ID NO: 2372135 - RNA, 23 nt, Human
ugagaguauuuaggcagauugaa

SEQ ID NO: 2372136 - RNA, 13 nt, Human
ugagaucaggcuc

SEQ ID NO: 2372137 - RNA, 17 nt, Human
ugagaguaucaggucuc

SEQ ID NO: 2372138 - RNA, 19 nt, Human
ugagaguaucaggucuccc

SEQ ID NO: 2372139 - RNA, 22 nt, Human
ugagagguuugacuagaugaug

SEQ ID NO: 2372140 - RNA, 18 nt, Human
ugagaguaacuuaaguua

SEQ ID NO: 2372141 - RNA, 19 nt, Human
ugagaguauauuauguauu

SEQ ID NO: 2372142 - RNA, 22 nt, Human
ugagaucuaagccuuuccauaa

SEQ ID NO: 2372143 - RNA, 21 nt, Human
ugagaucuaagccuuuccaua

SEQ ID NO: 2372144 - RNA, 20 nt, Human
ugagaucuaagccuuuccau

SEQ ID NO: 2372145 - RNA, 16 nt, Human
ugagaucuaagccuuu

SEQ ID NO: 2372146 - RNA, 23 nt, Human
ugagaucuaagccuuuccauaag

SEQ ID NO: 2372147 - RNA, 20 nt, Human
ugagaugauacauccaaagc

SEQ ID NO: 2372148 - RNA, 14 nt, Human
ugagaucaggcucu

SEQ ID NO: 2372149 - RNA, 19 nt, Human
ugagaggggaacagacugg

SEQ ID NO: 2372150 - RNA, 17 nt, Human
ugagaguagagucacug

SEQ ID NO: 2372151 - RNA, 14 nt, Human
ugagagguuugacu

SEQ ID NO: 2372152 - RNA, 18 nt, Human
ugagaggggcuguccagu

SEQ ID NO: 2372153 - RNA, 16 nt, Human
ugagaggcaggcauag

SEQ ID NO: 2372154 - RNA, 12 nt, Human
ugagaggcaggc

SEQ ID NO: 2372155 - RNA, 13 nt, Human
ugagaggcaggca

SEQ ID NO: 2372156 - RNA, 14 nt, Human
ugagaggcaggcau

SEQ ID NO: 2372157 - RNA, 23 nt, Human
ugagaggcauccaguaucuugaa

SEQ ID NO: 2372158 - RNA, 18 nt, Human
ugagaggcagacuucccu

SEQ ID NO: 2372159 - RNA, 19 nt, Human
ugagacucucuuaggagca

SEQ ID NO: 2372160 - RNA, 23 nt, Human
ugagacucucuuaggagcagagc

SEQ ID NO: 2372161 - RNA, 14 nt, Human
ugagaccucagcca

SEQ ID NO: 2372162 - RNA, 22 nt, Human
ugagaggcauccaguaucuuga

SEQ ID NO: 2372163 - RNA, 12 nt, Human
ugagacucuguc

SEQ ID NO: 2372164 - RNA, 13 nt, Human
ugagaccucagcc

SEQ ID NO: 2372165 - RNA, 12 nt, Human
ugagaccucagc

SEQ ID NO: 2372166 - RNA, 13 nt, Human
ugagacucugucu

SEQ ID NO: 2372167 - RNA, 14 nt, Human
ugagacucugucuc

SEQ ID NO: 2372168 - RNA, 12 nt, Human
ugagaaaugcau

SEQ ID NO: 2372169 - RNA, 14 nt, Human
ugagaaauuaagua

SEQ ID NO: 2372170 - RNA, 22 nt, Human
ugagaaaugaauaauuucccaa

SEQ ID NO: 2372171 - RNA, 11 nt, Human
ugagaaaugca

SEQ ID NO: 2372172 - RNA, 20 nt, Human
ugagaaaugaauaauuuccc

SEQ ID NO: 2372173 - RNA, 15 nt, Human
ugagaaaugaauaau

SEQ ID NO: 2372174 - RNA, 13 nt, Human
ugagaaauuaagu

SEQ ID NO: 2372175 - RNA, 13 nt, Human
ugagaaaugcaua

SEQ ID NO: 2372176 - RNA, 16 nt, Human
ugagacagcucugcau

SEQ ID NO: 2372177 - RNA, 14 nt, Human
ugagacagcucugc

SEQ ID NO: 2372178 - RNA, 22 nt, Human
ugagacccccacaccucaguuc

SEQ ID NO: 2372179 - RNA, 19 nt, Human
ugagacaguccagccugga

SEQ ID NO: 2372180 - RNA, 13 nt, Human
ugagaccccuggc

SEQ ID NO: 2372181 - RNA, 14 nt, Human
ugagaccccuggcc

SEQ ID NO: 2372182 - RNA, 15 nt, Human
ugagaccccuggccu

SEQ ID NO: 2372183 - RNA, 15 nt, Human
ugagacaggagaauc

SEQ ID NO: 2372184 - RNA, 16 nt, Human
ugagacaguccagccu

SEQ ID NO: 2372185 - RNA, 18 nt, Human
ugagacaguccagccugg

SEQ ID NO: 2372186 - RNA, 15 nt, Human
ugagacccugucucu

SEQ ID NO: 2372187 - RNA, 14 nt, Human
ugagacccugucuc

SEQ ID NO: 2372188 - RNA, 22 nt, Human
ugagaccccuggccuccggcgu

SEQ ID NO: 2372189 - RNA, 16 nt, Human
ugagaccccuggccuc

SEQ ID NO: 2372190 - RNA, 18 nt, Human
ugagaccccuggccuccg

SEQ ID NO: 2372191 - RNA, 12 nt, Human
ugagacccuguc

SEQ ID NO: 2372192 - RNA, 23 nt, Human
ugacuggguuucucuguauagua

SEQ ID NO: 2372193 - RNA, 14 nt, Human
ugacuguauauaaa

SEQ ID NO: 2372194 - RNA, 20 nt, Human
ugagaaagacuauucaaaca

SEQ ID NO: 2372195 - RNA, 18 nt, Human
ugagaaagacuauucaaa

SEQ ID NO: 2372196 - RNA, 13 nt, Human
ugagaaaucuaaa

SEQ ID NO: 2372197 - RNA, 17 nt, Human
ugagaaaucuaaaaaac

SEQ ID NO: 2372198 - RNA, 16 nt, Human
ugacuguacuccuccc

SEQ ID NO: 2372199 - RNA, 17 nt, Human
ugacuguacuccuccca

SEQ ID NO: 2372200 - RNA, 18 nt, Human
ugacuguacuccucccag

SEQ ID NO: 2372201 - RNA, 22 nt, Human
ugacuguacuccucccaggcgc

SEQ ID NO: 2372202 - RNA, 17 nt, Human
ugagaaagacuauucaa

SEQ ID NO: 2372203 - RNA, 16 nt, Human
ugagaaagacuauuca

SEQ ID NO: 2372204 - RNA, 13 nt, Human
ucuugaaucccau

SEQ ID NO: 2372205 - RNA, 16 nt, Human
ucuugaaugucuuuug

SEQ ID NO: 2372206 - RNA, 16 nt, Human
ucuugaauaauguaag

SEQ ID NO: 2372207 - RNA, 15 nt, Human
ucuugaacuccuggc

SEQ ID NO: 2372208 - RNA, 13 nt, Human
ucuugaaggugcu

SEQ ID NO: 2372209 - RNA, 17 nt, Human
ucuugaauuguaaggaa

SEQ ID NO: 2372210 - RNA, 20 nt, Human
ugaccauucuccaccugcca

SEQ ID NO: 2372211 - RNA, 21 nt, Human
ugaccauucuccaccugccag

SEQ ID NO: 2372212 - RNA, 22 nt, Human
ugaccauucuccaccugccagg

SEQ ID NO: 2372213 - RNA, 13 nt, Human
ugacccuccuguu

SEQ ID NO: 2372214 - RNA, 14 nt, Human
ucuugaaugucuuu

SEQ ID NO: 2372215 - RNA, 18 nt, Human
ugacccucuccaccccau

SEQ ID NO: 2372216 - RNA, 15 nt, Human
ugacccucuccaccc

SEQ ID NO: 2372217 - RNA, 22 nt, Human
ugacccucugaaugguccaggg

SEQ ID NO: 2372218 - RNA, 23 nt, Human
ugacccucugaaugguccagggu

SEQ ID NO: 2372219 - RNA, 16 nt, Human
ugacccuccuguugca

SEQ ID NO: 2372220 - RNA, 21 nt, Human
ugacccuccuguugcacccag

SEQ ID NO: 2372221 - RNA, 22 nt, Human
ugacccuccuguugcacccagc

SEQ ID NO: 2372222 - RNA, 16 nt, Human
ugacccugaucagucu

SEQ ID NO: 2372223 - RNA, 15 nt, Human
ugacccugaagugag

SEQ ID NO: 2372224 - RNA, 20 nt, Human
ugaccgugggcggggccuug

SEQ ID NO: 2372225 - RNA, 23 nt, Human
ugaccgugggcggggccuugcgg

SEQ ID NO: 2372226 - RNA, 20 nt, Human
ugacccugcgaaggggcccu

SEQ ID NO: 2372227 - RNA, 13 nt, Human
ugaccuacucuca

SEQ ID NO: 2372228 - RNA, 16 nt, Human
ugaccuacaaaucaau

SEQ ID NO: 2372229 - RNA, 17 nt, Human
ugaccuacucgagggac

SEQ ID NO: 2372230 - RNA, 21 nt, Human
ugaccucaagauguccuccuu

SEQ ID NO: 2372231 - RNA, 18 nt, Human
ugaccucaaccugugaug

SEQ ID NO: 2372232 - RNA, 17 nt, Human
ugaccucaaccugugau

SEQ ID NO: 2372233 - RNA, 22 nt, Human
ugaccuaguuuuccaugcgugu

SEQ ID NO: 2372234 - RNA, 17 nt, Human
ugaccuaguuuuccaug

SEQ ID NO: 2372235 - RNA, 18 nt, Human
ugaccuacucgagggacu

SEQ ID NO: 2372236 - RNA, 16 nt, Human
ugaccuaucacuucca

SEQ ID NO: 2372237 - RNA, 22 nt, Human
ugaccucccucuaauuuaucuu

SEQ ID NO: 2372238 - RNA, 18 nt, Human
ugaccucgugauccaccc

SEQ ID NO: 2372239 - RNA, 22 nt, Human
ugaccucccagcccuauggaug

SEQ ID NO: 2372240 - RNA, 23 nt, Human
ugaccucccagcccuauggaugu

SEQ ID NO: 2372241 - RNA, 13 nt, Human
ugaccucccucua

SEQ ID NO: 2372242 - RNA, 14 nt, Human
ugaccucccucuaa

SEQ ID NO: 2372243 - RNA, 16 nt, Human
ugaccucugcagcaau

SEQ ID NO: 2372244 - RNA, 13 nt, Human
ugaccucugcagc

SEQ ID NO: 2372245 - RNA, 15 nt, Human
ugaccuccacagcuu

SEQ ID NO: 2372246 - RNA, 14 nt, Human
ugaccuccacagcu

SEQ ID NO: 2372247 - RNA, 17 nt, Human
ugaccuccacagcuucc

SEQ ID NO: 2372248 - RNA, 16 nt, Human
ugaccucaugcaucuc

SEQ ID NO: 2372249 - RNA, 19 nt, Human
ugaccucaugcaucuccac

SEQ ID NO: 2372250 - RNA, 22 nt, Human
ugaccucaugcaucuccaccug

SEQ ID NO: 2372251 - RNA, 22 nt, Human
ugaccuccaugacugcacagua

SEQ ID NO: 2372252 - RNA, 11 nt, Human
ugaccucccag

SEQ ID NO: 2372253 - RNA, 12 nt, Human
ugaccucccagc

SEQ ID NO: 2372254 - RNA, 14 nt, Human
ugaccucccagccc

SEQ ID NO: 2372255 - RNA, 15 nt, Human
ugaccucccagcccu

SEQ ID NO: 2372256 - RNA, 16 nt, Human
ugaccucccagcccua

SEQ ID NO: 2372257 - RNA, 22 nt, Human
ugaccucaggugauccacccac

SEQ ID NO: 2372258 - RNA, 13 nt, Human
ugaccucaugcau

SEQ ID NO: 2372259 - RNA, 14 nt, Human
ugaccuuucaauag

SEQ ID NO: 2372260 - RNA, 15 nt, Human
ugaccuuucaauagg

SEQ ID NO: 2372261 - RNA, 16 nt, Human
ugaccuuucaauagga

SEQ ID NO: 2372262 - RNA, 12 nt, Human
ugaccucugccu

SEQ ID NO: 2372263 - RNA, 23 nt, Human
ugaccucugcagcaauaaagcag

SEQ ID NO: 2372264 - RNA, 21 nt, Human
ugaccucugcagcaauaaagc

SEQ ID NO: 2372265 - RNA, 18 nt, Human
ugaccucugcagcaauaa

SEQ ID NO: 2372266 - RNA, 14 nt, Human
ugacgaagucucuu

SEQ ID NO: 2372267 - RNA, 15 nt, Human
ugacgacaagugcug

SEQ ID NO: 2372268 - RNA, 20 nt, Human
ugaccuuuugacuuaaagca

SEQ ID NO: 2372269 - RNA, 19 nt, Human
ugacgaacuuccauggccc

SEQ ID NO: 2372270 - RNA, 23 nt, Human
ugaccuuuuauguaguaauugac

SEQ ID NO: 2372271 - RNA, 18 nt, Human
ugaccuuuuauguaguaa

SEQ ID NO: 2372272 - RNA, 17 nt, Human
ugaccuuuuauguagua

SEQ ID NO: 2372273 - RNA, 18 nt, Human
ugaccuuucaauaggaaa

SEQ ID NO: 2372274 - RNA, 22 nt, Human
ugaccuuucaauaggaaaaacu

SEQ ID NO: 2372275 - RNA, 13 nt, Human
ugacgccauccca

SEQ ID NO: 2372276 - RNA, 14 nt, Human
ugacgccaucccag

SEQ ID NO: 2372277 - RNA, 15 nt, Human
ugacgccaucccagc

SEQ ID NO: 2372278 - RNA, 16 nt, Human
ugacgccaucccagcc

SEQ ID NO: 2372279 - RNA, 14 nt, Human
ugacggaagaacau

SEQ ID NO: 2372280 - RNA, 22 nt, Human
ugacgcugaauaaaugucuuuu

SEQ ID NO: 2372281 - RNA, 15 nt, Human
ugacgcugaauaaau

SEQ ID NO: 2372282 - RNA, 17 nt, Human
ugacgcugaauaaaugu

SEQ ID NO: 2372283 - RNA, 18 nt, Human
ugacgcugaauaaauguc

SEQ ID NO: 2372284 - RNA, 20 nt, Human
ugacgcugaauaaaugucuu

SEQ ID NO: 2372285 - RNA, 20 nt, Human
ugacgacaagugcugaacag

SEQ ID NO: 2372286 - RNA, 19 nt, Human
ugacgcaacccacguguaa

SEQ ID NO: 2372287 - RNA, 19 nt, Human
ugacgccugcccuccccag

SEQ ID NO: 2372288 - RNA, 14 nt, Human
ugacgcugaauaaa

SEQ ID NO: 2372289 - RNA, 18 nt, Human
ugacgguauuaugcuucu

SEQ ID NO: 2372290 - RNA, 19 nt, Human
ugacgguauuaugcuucuu

SEQ ID NO: 2372291 - RNA, 19 nt, Human
ugacggucccacacuggug

SEQ ID NO: 2372292 - RNA, 21 nt, Human
ugacggucccacacuggugac

SEQ ID NO: 2372293 - RNA, 23 nt, Human
ugacggucccacacuggugacug

SEQ ID NO: 2372294 - RNA, 17 nt, Human
ugacggugcagucuggg

SEQ ID NO: 2372295 - RNA, 19 nt, Human
ugacggaugauuggauuau

SEQ ID NO: 2372296 - RNA, 18 nt, Human
ugacggaagaacauagaa

SEQ ID NO: 2372297 - RNA, 20 nt, Human
ugacggaagccaacuuggcu

SEQ ID NO: 2372298 - RNA, 19 nt, Human
ugacggccagggagaagcu

SEQ ID NO: 2372299 - RNA, 17 nt, Human
ugacgccaucccagccc

SEQ ID NO: 2372300 - RNA, 18 nt, Human
ugacgccaucccagcccc

SEQ ID NO: 2372301 - RNA, 19 nt, Human
ugacgccaucccagcccca

SEQ ID NO: 2372302 - RNA, 20 nt, Human
ugacgccaucccagccccaa

SEQ ID NO: 2372303 - RNA, 19 nt, Human
ugacgugcaccuguacuca

SEQ ID NO: 2372304 - RNA, 18 nt, Human
ugacgugcaccuguacuc

SEQ ID NO: 2372305 - RNA, 22 nt, Human
ugacgugaccggacuuuucugc

SEQ ID NO: 2372306 - RNA, 24 nt, Human
ugacgugaccggacuuuucugcaa

SEQ ID NO: 2372307 - RNA, 23 nt, Human
ugacgugcaccuguacucaggag

SEQ ID NO: 2372308 - RNA, 16 nt, Human
ugacgugccuuuugca

SEQ ID NO: 2372309 - RNA, 18 nt, Human
ugacgugccuuuugcacc

SEQ ID NO: 2372310 - RNA, 19 nt, Human
ugacgugccuuuugcaccc

SEQ ID NO: 2372311 - RNA, 22 nt, Human
ugacgugccuuuugcaccccuc

SEQ ID NO: 2372312 - RNA, 22 nt, Human
ugacucugaaaucugaagaccu

SEQ ID NO: 2372313 - RNA, 13 nt, Human
ugacucugccccc

SEQ ID NO: 2372314 - RNA, 19 nt, Human
ugacgucaagucuccuucc

SEQ ID NO: 2372315 - RNA, 17 nt, Human
ugacgugaccggacuuu

SEQ ID NO: 2372316 - RNA, 18 nt, Human
ugacggugcagucugggu

SEQ ID NO: 2372317 - RNA, 13 nt, Human
ugacugaauuucu

SEQ ID NO: 2372318 - RNA, 12 nt, Human
ugacucuuaaga

SEQ ID NO: 2372319 - RNA, 22 nt, Human
ugacucuggcaaagcuuuuaga

SEQ ID NO: 2372320 - RNA, 14 nt, Human
ugacucugcccccu

SEQ ID NO: 2372321 - RNA, 15 nt, Human
ugacucugcccccug

SEQ ID NO: 2372322 - RNA, 18 nt, Human
ugacucugcccccugcug

SEQ ID NO: 2372323 - RNA, 19 nt, Human
ugacucugcccccugcugg

SEQ ID NO: 2372324 - RNA, 17 nt, Human
ugacucuggcaaagcuu

SEQ ID NO: 2372325 - RNA, 23 nt, Human
ugacugguguuaucaccgugggc

SEQ ID NO: 2372326 - RNA, 15 nt, Human
ugacugagcagacug

SEQ ID NO: 2372327 - RNA, 19 nt, Human
ugacugagcagacugguga

SEQ ID NO: 2372328 - RNA, 20 nt, Human
ugacugaugcuuucagauua

SEQ ID NO: 2372329 - RNA, 11 nt, Human
ugacugagcuu

SEQ ID NO: 2372330 - RNA, 15 nt, Human
ugacugagcuucccu

SEQ ID NO: 2372331 - RNA, 15 nt, Human
ugacugaauuucuuu

SEQ ID NO: 2372332 - RNA, 14 nt, Human
ugacugaauuucuu

SEQ ID NO: 2372333 - RNA, 21 nt, Human
ugagguuuccuucagacagau

SEQ ID NO: 2372334 - RNA, 11 nt, Human
ugaguccuggc

SEQ ID NO: 2372335 - RNA, 18 nt, Human
ugaguccuggcaugggaa

SEQ ID NO: 2372336 - RNA, 14 nt, Human
ugagucgaggacag

SEQ ID NO: 2372337 - RNA, 14 nt, Human
ugaguccuuaaaca

SEQ ID NO: 2372338 - RNA, 18 nt, Human
ugaguccuuaaacagggc

SEQ ID NO: 2372339 - RNA, 15 nt, Human
ugaguccuugaaaau

SEQ ID NO: 2372340 - RNA, 19 nt, Human
ugaguccuggcaugggaau

SEQ ID NO: 2372341 - RNA, 22 nt, Human
ugaguccuggcaugggaaugaa

SEQ ID NO: 2372342 - RNA, 22 nt, Human
ugagguggaagcccuccuucca

SEQ ID NO: 2372343 - RNA, 21 nt, Human
ugagguggaagcccuccuucc

SEQ ID NO: 2372344 - RNA, 14 nt, Human
ugagguggcacuuu

SEQ ID NO: 2372345 - RNA, 16 nt, Human
ugagguggcacuuuuu

SEQ ID NO: 2372346 - RNA, 20 nt, Human
ugagguggaagcccuccuuc

SEQ ID NO: 2372347 - RNA, 17 nt, Human
ugagguggaagcccucc

SEQ ID NO: 2372348 - RNA, 16 nt, Human
ugagguggaagcccuc

SEQ ID NO: 2372349 - RNA, 15 nt, Human
ugagguggaagcccu

SEQ ID NO: 2372350 - RNA, 17 nt, Human
ugaggugcugggaggga

SEQ ID NO: 2372351 - RNA, 16 nt, Human
ugaggugcugggaggg

SEQ ID NO: 2372352 - RNA, 15 nt, Human
ugaggugcugggagg

SEQ ID NO: 2372353 - RNA, 20 nt, Human
ugaggucuuuugacaugugg

SEQ ID NO: 2372354 - RNA, 19 nt, Human
ugagguggaagagggcugc

SEQ ID NO: 2372355 - RNA, 15 nt, Human
ugaggugcuauguuc

SEQ ID NO: 2372356 - RNA, 16 nt, Human
ugaggugcuauguucu

SEQ ID NO: 2372357 - RNA, 12 nt, Human
ugagguuaggag

SEQ ID NO: 2372358 - RNA, 14 nt, Human
ugagguuccucugc

SEQ ID NO: 2372359 - RNA, 15 nt, Human
ugagguuccucugcc

SEQ ID NO: 2372360 - RNA, 21 nt, Human
ugaggugugggggcugcagca

SEQ ID NO: 2372361 - RNA, 23 nt, Human
ugaggugugggggcugcagcaug

SEQ ID NO: 2372362 - RNA, 16 nt, Human
ugagguuccucugccu

SEQ ID NO: 2372363 - RNA, 17 nt, Human
ugagguuccucugccug

SEQ ID NO: 2372364 - RNA, 18 nt, Human
ugagguuccucugccugc

SEQ ID NO: 2372365 - RNA, 19 nt, Human
ugagguuccucugccugcc

SEQ ID NO: 2372366 - RNA, 20 nt, Human
ugagguuccucugccugccc

SEQ ID NO: 2372367 - RNA, 21 nt, Human
ugagguuccucugccugcccc

SEQ ID NO: 2372368 - RNA, 16 nt, Human
ugagguugcuagagaa

SEQ ID NO: 2372369 - RNA, 15 nt, Human
ugagguugcuuacua

SEQ ID NO: 2372370 - RNA, 19 nt, Human
ugagguuucaaaccucccu

SEQ ID NO: 2372371 - RNA, 21 nt, Human
ugaguccccuguuuguuucug

SEQ ID NO: 2372372 - RNA, 21 nt, Human
ugaggcuguggucacagcgga

SEQ ID NO: 2372373 - RNA, 18 nt, Human
ugaggcuguccuguacau

SEQ ID NO: 2372374 - RNA, 11 nt, Human
ugaggcugugg

SEQ ID NO: 2372375 - RNA, 23 nt, Human
ugaggcuuagcuuugcucugcca

SEQ ID NO: 2372376 - RNA, 15 nt, Human
ugaggcuuccagaga

SEQ ID NO: 2372377 - RNA, 16 nt, Human
ugaggcuuccagagag

SEQ ID NO: 2372378 - RNA, 13 nt, Human
ugaggcuugcuga

SEQ ID NO: 2372379 - RNA, 14 nt, Human
ugaggcuugcugag

SEQ ID NO: 2372380 - RNA, 15 nt, Human
ugaggcuugcugaga

SEQ ID NO: 2372381 - RNA, 16 nt, Human
ugaggcuugcugagag

SEQ ID NO: 2372382 - RNA, 17 nt, Human
ugaggcuugcugagagg

SEQ ID NO: 2372383 - RNA, 18 nt, Human
ugaggcuuuggauuugac

SEQ ID NO: 2372384 - RNA, 13 nt, Human
ugaggcuuuggau

SEQ ID NO: 2372385 - RNA, 18 nt, Human
ugaggcuuucagguuuua

SEQ ID NO: 2372386 - RNA, 20 nt, Human
ugaggcuugcugagaggggc

SEQ ID NO: 2372387 - RNA, 21 nt, Human
ugaggcuugcugagaggggcu

SEQ ID NO: 2372388 - RNA, 23 nt, Human
ugaggcuuuggauuugacauugc

SEQ ID NO: 2372389 - RNA, 19 nt, Human
ugaggucuuuugacaugug

SEQ ID NO: 2372390 - RNA, 17 nt, Human
ugaggucuuuugacaug

SEQ ID NO: 2372391 - RNA, 16 nt, Human
ugagggaacagacagg

SEQ ID NO: 2372392 - RNA, 20 nt, Human
ugaggucuguucuuuccaaa

SEQ ID NO: 2372393 - RNA, 15 nt, Human
ugaggucuguucuuu

SEQ ID NO: 2372394 - RNA, 14 nt, Human
ugaggucuguucuu

SEQ ID NO: 2372395 - RNA, 11 nt, Human
ugaggcuggca

SEQ ID NO: 2372396 - RNA, 23 nt, Human
ugaggcugcuuuccaaagccaau

SEQ ID NO: 2372397 - RNA, 20 nt, Human
ugaggcugcuuuccaaagcc

SEQ ID NO: 2372398 - RNA, 16 nt, Human
ugaggcugcuuuccaa

SEQ ID NO: 2372399 - RNA, 12 nt, Human
ugaggcugggaa

SEQ ID NO: 2372400 - RNA, 17 nt, Human
ugaggcuggcacaggac

SEQ ID NO: 2372401 - RNA, 15 nt, Human
ugaggcuggcacagg

SEQ ID NO: 2372402 - RNA, 14 nt, Human
ugaggcuggcacag

SEQ ID NO: 2372403 - RNA, 11 nt, Human
ugaggcugggc

SEQ ID NO: 2372404 - RNA, 13 nt, Human
ugaggcugcagcg

SEQ ID NO: 2372405 - RNA, 12 nt, Human
ugaggagcugcu

SEQ ID NO: 2372406 - RNA, 11 nt, Human
ugaggagcugc

SEQ ID NO: 2372407 - RNA, 16 nt, Human
ugaggagccccagcua

SEQ ID NO: 2372408 - RNA, 11 nt, Human
ugaggagcccc

SEQ ID NO: 2372409 - RNA, 14 nt, Human
ugaggagccccagc

SEQ ID NO: 2372410 - RNA, 20 nt, Human
ugaggagcagcuucaguugu

SEQ ID NO: 2372411 - RNA, 15 nt, Human
ugaggagccaggccg

SEQ ID NO: 2372412 - RNA, 23 nt, Human
ugaggacuuaaaauauuccugca

SEQ ID NO: 2372413 - RNA, 23 nt, Human
ugagcucuugugaggaaagucau

SEQ ID NO: 2372414 - RNA, 21 nt, Human
ugaggacauguuuuuguuuuc

SEQ ID NO: 2372415 - RNA, 20 nt, Human
ugaggacauuccaagacagu

SEQ ID NO: 2372416 - RNA, 16 nt, Human
ugaggagcagcuucag

SEQ ID NO: 2372417 - RNA, 16 nt, Human
ugaggacuauggaaau

SEQ ID NO: 2372418 - RNA, 20 nt, Human
ugaguugguguugacaugug

SEQ ID NO: 2372419 - RNA, 18 nt, Human
ugaguuguugcccugggu

SEQ ID NO: 2372420 - RNA, 21 nt, Human
ugaguuggggucuggcagccu

SEQ ID NO: 2372421 - RNA, 19 nt, Human
ugaguuggggucuggcagc

SEQ ID NO: 2372422 - RNA, 17 nt, Human
ugaguuggggucuggca

SEQ ID NO: 2372423 - RNA, 17 nt, Human
ugaguuggcugggaaua

SEQ ID NO: 2372424 - RNA, 14 nt, Human
ugaguuuaaagcaa

SEQ ID NO: 2372425 - RNA, 23 nt, Human
ugaguuguuuucagacucagacu

SEQ ID NO: 2372426 - RNA, 16 nt, Human
ugaguuuaccuuguau

SEQ ID NO: 2372427 - RNA, 23 nt, Human
ugaguuuaccuuguauacuguag

SEQ ID NO: 2372428 - RNA, 19 nt, Human
ugaguuuccucaggcugcu

SEQ ID NO: 2372429 - RNA, 17 nt, Human
ugaguuuccucaggcug

SEQ ID NO: 2372430 - RNA, 16 nt, Human
ugaguuuccucaggcu

SEQ ID NO: 2372431 - RNA, 22 nt, Human
ugaguuuccucaggcugcugga

SEQ ID NO: 2372432 - RNA, 16 nt, Human
ugauaaaaccauguag

SEQ ID NO: 2372433 - RNA, 21 nt, Human
ugaguuuagugaucugaacag

SEQ ID NO: 2372434 - RNA, 17 nt, Human
ugaguuuauaucucuca

SEQ ID NO: 2372435 - RNA, 19 nt, Human
ugaguuuaguaaggcugug

SEQ ID NO: 2372436 - RNA, 14 nt, Human
ugaguuucauagcu

SEQ ID NO: 2372437 - RNA, 15 nt, Human
ugaguuucauagcua

SEQ ID NO: 2372438 - RNA, 18 nt, Human
ugaguuucauucuccugc

SEQ ID NO: 2372439 - RNA, 19 nt, Human
ugaguuucauucuccugcc

SEQ ID NO: 2372440 - RNA, 14 nt, Human
ugauaaacauuuaa

SEQ ID NO: 2372441 - RNA, 14 nt, Human
ugauaaacuuugcu

SEQ ID NO: 2372442 - RNA, 19 nt, Human
ugauaaaguaguaaaaauu

SEQ ID NO: 2372443 - RNA, 13 nt, Human
ugauaaaguuucu

SEQ ID NO: 2372444 - RNA, 16 nt, Human
ugauaaaguuucucag

SEQ ID NO: 2372445 - RNA, 15 nt, Human
ugagucgaggacagg

SEQ ID NO: 2372446 - RNA, 16 nt, Human
ugagucgaggacaggg

SEQ ID NO: 2372447 - RNA, 21 nt, Human
ugaguugauagcacagacccu

SEQ ID NO: 2372448 - RNA, 23 nt, Human
ugaguugauagcacagacccugc

SEQ ID NO: 2372449 - RNA, 19 nt, Human
ugaguugauucagcucugc

SEQ ID NO: 2372450 - RNA, 16 nt, Human
ugaguugauucagcuc

SEQ ID NO: 2372451 - RNA, 18 nt, Human
ugagucgaggacagggag

SEQ ID NO: 2372452 - RNA, 16 nt, Human
ugaguccuugaaaaua

SEQ ID NO: 2372453 - RNA, 18 nt, Human
ugaguccuugaaaauauu

SEQ ID NO: 2372454 - RNA, 16 nt, Human
ugaguuggcugggaau

SEQ ID NO: 2372455 - RNA, 14 nt, Human
ugaguuggcuggga

SEQ ID NO: 2372456 - RNA, 12 nt, Human
ugauaguuacug

SEQ ID NO: 2372457 - RNA, 13 nt, Human
ugauaguuacugu

SEQ ID NO: 2372458 - RNA, 14 nt, Human
ugauaguuacuguu

SEQ ID NO: 2372459 - RNA, 16 nt, Human
ugauaguuacuguugu

SEQ ID NO: 2372460 - RNA, 17 nt, Human
ugauaguuacuguugug

SEQ ID NO: 2372461 - RNA, 21 nt, Human
ugauaguuacuguugugaccu

SEQ ID NO: 2372462 - RNA, 20 nt, Human
ugauagggauacaugcucuu

SEQ ID NO: 2372463 - RNA, 16 nt, Human
ugauagucuuuugcuu

SEQ ID NO: 2372464 - RNA, 17 nt, Human
ugauagucuuuugcuuu

SEQ ID NO: 2372465 - RNA, 23 nt, Human
ugauagcuuuauuuuuuaaguau

SEQ ID NO: 2372466 - RNA, 14 nt, Human
ugauagcuuuauuu

SEQ ID NO: 2372467 - RNA, 13 nt, Human
ugauagcuuuauu

SEQ ID NO: 2372468 - RNA, 11 nt, Human
ugauagcuuua

SEQ ID NO: 2372469 - RNA, 18 nt, Human
ugauagguauaaguggug

SEQ ID NO: 2372470 - RNA, 21 nt, Human
ugauaggaaugugaaagcacg

SEQ ID NO: 2372471 - RNA, 17 nt, Human
ugauagggauacaugcu

SEQ ID NO: 2372472 - RNA, 16 nt, Human
ugauagcuaacauuuu

SEQ ID NO: 2372473 - RNA, 18 nt, Human
ugauagcuaacauuuuaa

SEQ ID NO: 2372474 - RNA, 21 nt, Human
ugauagcuaacauuuuaaaua

SEQ ID NO: 2372475 - RNA, 22 nt, Human
ugauagcucuuuggcagucuau

SEQ ID NO: 2372476 - RNA, 12 nt, Human
ugauagcacuuu

SEQ ID NO: 2372477 - RNA, 14 nt, Human
ugauagcacuuucu

SEQ ID NO: 2372478 - RNA, 13 nt, Human
ugauagcacuuuc

SEQ ID NO: 2372479 - RNA, 21 nt, Human
ugauagcacuuucuacaaugu

SEQ ID NO: 2372480 - RNA, 15 nt, Human
ugauagcacuuucua

SEQ ID NO: 2372481 - RNA, 22 nt, Human
ugauagcacagacccugcccug

SEQ ID NO: 2372482 - RNA, 23 nt, Human
ugauagcacagacccugcccugu

SEQ ID NO: 2372483 - RNA, 19 nt, Human
ugauaaauuccacuggacu

SEQ ID NO: 2372484 - RNA, 22 nt, Human
ugauaaaguuucucagauccuu

SEQ ID NO: 2372485 - RNA, 18 nt, Human
ugauaaaguuucucagau

SEQ ID NO: 2372486 - RNA, 21 nt, Human
ugauaaaguuucucagauccu

SEQ ID NO: 2372487 - RNA, 15 nt, Human
ugauagcacagaccc

SEQ ID NO: 2372488 - RNA, 16 nt, Human
ugauagcacagacccu

SEQ ID NO: 2372489 - RNA, 17 nt, Human
ugauagcacagacccug

SEQ ID NO: 2372490 - RNA, 18 nt, Human
ugauagcacagacccugc

SEQ ID NO: 2372491 - RNA, 20 nt, Human
ugauagcacagacccugccc

SEQ ID NO: 2372492 - RNA, 21 nt, Human
ugauagcacagacccugcccu

SEQ ID NO: 2372493 - RNA, 14 nt, Human
ugaugcucaggcuu

SEQ ID NO: 2372494 - RNA, 19 nt, Human
ugaugccagguucuauuug

SEQ ID NO: 2372495 - RNA, 23 nt, Human
ugaugccacaccaagcugugcca

SEQ ID NO: 2372496 - RNA, 14 nt, Human
ugaugccaggacac

SEQ ID NO: 2372497 - RNA, 15 nt, Human
ugaugcucaggcuug

SEQ ID NO: 2372498 - RNA, 14 nt, Human
ugaugcucccuccc

SEQ ID NO: 2372499 - RNA, 16 nt, Human
ugaugcucccuccccu

SEQ ID NO: 2372500 - RNA, 15 nt, Human
ugaugcucccucccc

SEQ ID NO: 2372501 - RNA, 22 nt, Human
ugaugcucccuccccugcccug

SEQ ID NO: 2372502 - RNA, 21 nt, Human
ugaugcucccuccccugcccu

SEQ ID NO: 2372503 - RNA, 20 nt, Human
ugaugcucccuccccugccc

SEQ ID NO: 2372504 - RNA, 17 nt, Human
ugaugcucccuccccug

SEQ ID NO: 2372505 - RNA, 23 nt, Human
ugaugcucccuccccugcccugg

SEQ ID NO: 2372506 - RNA, 15 nt, Human
ugaugcugccccuca

SEQ ID NO: 2372507 - RNA, 20 nt, Human
ugaugcuggaugcuccuucc

SEQ ID NO: 2372508 - RNA, 14 nt, Human
ugaugcuggagagg

SEQ ID NO: 2372509 - RNA, 15 nt, Human
ugaugcuggagaggu

SEQ ID NO: 2372510 - RNA, 19 nt, Human
ugaugcuucuucagagacu

SEQ ID NO: 2372511 - RNA, 21 nt, Human
ugaugcuucuucagagacucc

SEQ ID NO: 2372512 - RNA, 22 nt, Human
ugaugcuucuucagagacuccu

SEQ ID NO: 2372513 - RNA, 21 nt, Human
ugauguaaccgauucaucucu

SEQ ID NO: 2372514 - RNA, 15 nt, Human
ugaugcuggaugcuc

SEQ ID NO: 2372515 - RNA, 16 nt, Human
ugaugcuggagagguu

SEQ ID NO: 2372516 - RNA, 17 nt, Human
ugaugcuggagagguua

SEQ ID NO: 2372517 - RNA, 21 nt, Human
ugaugguuguacauauaagug

SEQ ID NO: 2372518 - RNA, 19 nt, Human
ugauguaaguuuaccuaug

SEQ ID NO: 2372519 - RNA, 22 nt, Human
ugauguaaucuugaauuguaac

SEQ ID NO: 2372520 - RNA, 13 nt, Human
ugauguacaugua

SEQ ID NO: 2372521 - RNA, 15 nt, Human
ugaugucccuaugga

SEQ ID NO: 2372522 - RNA, 12 nt, Human
ugauguauauuu

SEQ ID NO: 2372523 - RNA, 17 nt, Human
ugauguagugccucuuu

SEQ ID NO: 2372524 - RNA, 18 nt, Human
ugauguagugccucuuuc

SEQ ID NO: 2372525 - RNA, 21 nt, Human
ugauguauucuagcuaaugua

SEQ ID NO: 2372526 - RNA, 14 nt, Human
ugauguauucuagc

SEQ ID NO: 2372527 - RNA, 20 nt, Human
ugauguauucuagcuaaugu

SEQ ID NO: 2372528 - RNA, 18 nt, Human
ugauguaccaugaaacaa

SEQ ID NO: 2372529 - RNA, 20 nt, Human
ugauguaccaugaaacaaag

SEQ ID NO: 2372530 - RNA, 16 nt, Human
ugauguacagucuguc

SEQ ID NO: 2372531 - RNA, 17 nt, Human
ugauguacagucuguca

SEQ ID NO: 2372532 - RNA, 18 nt, Human
ugauguacagucugucau

SEQ ID NO: 2372533 - RNA, 19 nt, Human
ugauguacagucugucaug

SEQ ID NO: 2372534 - RNA, 20 nt, Human
ugauguaggguaaggugccu

SEQ ID NO: 2372535 - RNA, 13 nt, Human
ugauguauucuag

SEQ ID NO: 2372536 - RNA, 15 nt, Human
ugaugaaaaauagca

SEQ ID NO: 2372537 - RNA, 14 nt, Human
ugaucuggaaccca

SEQ ID NO: 2372538 - RNA, 21 nt, Human
ugaucuuugcagacaggcaag

SEQ ID NO: 2372539 - RNA, 23 nt, Human
ugaucuuugcagacaggcaagca

SEQ ID NO: 2372540 - RNA, 21 nt, Human
ugaucugaugcaagcaagaaa

SEQ ID NO: 2372541 - RNA, 14 nt, Human
ugaucugcucagcc

SEQ ID NO: 2372542 - RNA, 15 nt, Human
ugaucugcucagccc

SEQ ID NO: 2372543 - RNA, 13 nt, Human
ugaucuggaaccc

SEQ ID NO: 2372544 - RNA, 20 nt, Human
ugaucugcucagcccuggag

SEQ ID NO: 2372545 - RNA, 21 nt, Human
ugaucugcucagcccuggagg

SEQ ID NO: 2372546 - RNA, 16 nt, Human
ugaucugcucagcccu

SEQ ID NO: 2372547 - RNA, 17 nt, Human
ugaucugcucagcccug

SEQ ID NO: 2372548 - RNA, 18 nt, Human
ugaucugcucagcccugg

SEQ ID NO: 2372549 - RNA, 19 nt, Human
ugaucugcucagcccugga

SEQ ID NO: 2372550 - RNA, 19 nt, Human
ugaucuuugcagacaggca

SEQ ID NO: 2372551 - RNA, 20 nt, Human
ugaucuuugcagacaggcaa

SEQ ID NO: 2372552 - RNA, 18 nt, Human
ugaugaugggaauugugu

SEQ ID NO: 2372553 - RNA, 15 nt, Human
ugaugaaaauauuua

SEQ ID NO: 2372554 - RNA, 21 nt, Human
ugaugaugggaauugugugau

SEQ ID NO: 2372555 - RNA, 21 nt, Human
ugaugccaaguuguuugagaa

SEQ ID NO: 2372556 - RNA, 15 nt, Human
ugaugccaaguuguu

SEQ ID NO: 2372557 - RNA, 15 nt, Human
ugaugccaaccucug

SEQ ID NO: 2372558 - RNA, 18 nt, Human
ugaugccacacagagugg

SEQ ID NO: 2372559 - RNA, 15 nt, Human
ugaugccacaccaag

SEQ ID NO: 2372560 - RNA, 19 nt, Human
ugaugccaaguuguuugag

SEQ ID NO: 2372561 - RNA, 17 nt, Human
ugaugccacaccaagcu

SEQ ID NO: 2372562 - RNA, 18 nt, Human
ugaugccacaccaagcug

SEQ ID NO: 2372563 - RNA, 20 nt, Human
ugaugccacaccaagcugug

SEQ ID NO: 2372564 - RNA, 22 nt, Human
ugaugccacaccaagcugugcc

SEQ ID NO: 2372565 - RNA, 14 nt, Human
ugaugccaugagga

SEQ ID NO: 2372566 - RNA, 22 nt, Human
ugaugaucuuugcagacaggca

SEQ ID NO: 2372567 - RNA, 14 nt, Human
ugaugaaaauauuu

SEQ ID NO: 2372568 - RNA, 23 nt, Human
ugaugaucuuugcagacaggcaa

SEQ ID NO: 2372569 - RNA, 20 nt, Human
ugaugaugaaaugaggucag

SEQ ID NO: 2372570 - RNA, 17 nt, Human
ugaucugacauccccac

SEQ ID NO: 2372571 - RNA, 23 nt, Human
ugaucucuucuuuuggcuuccau

SEQ ID NO: 2372572 - RNA, 17 nt, Human
ugaucugagucccagga

SEQ ID NO: 2372573 - RNA, 20 nt, Human
ugaucugaugcaagcaagaa

SEQ ID NO: 2372574 - RNA, 22 nt, Human
ugaucuagguuuaacucagauc

SEQ ID NO: 2372575 - RNA, 13 nt, Human
ugaucuagguuua

SEQ ID NO: 2372576 - RNA, 20 nt, Human
ugaucauagguauuucaaaa

SEQ ID NO: 2372577 - RNA, 14 nt, Human
ugaucuagguuuaa

SEQ ID NO: 2372578 - RNA, 15 nt, Human
ugaucuagguuuaac

SEQ ID NO: 2372579 - RNA, 16 nt, Human
ugaucuagguuuaacu

SEQ ID NO: 2372580 - RNA, 17 nt, Human
ugaucuagguuuaacuc

SEQ ID NO: 2372581 - RNA, 18 nt, Human
ugaucuagguuuaacuca

SEQ ID NO: 2372582 - RNA, 19 nt, Human
ugaucuagguuuaacucag

SEQ ID NO: 2372583 - RNA, 20 nt, Human
ugaucuagguuuaacucaga

SEQ ID NO: 2372584 - RNA, 21 nt, Human
ugaucuagguuuaacucagau

SEQ ID NO: 2372585 - RNA, 21 nt, Human
ugauccacccaccucagccuc

SEQ ID NO: 2372586 - RNA, 22 nt, Human
ugauccacccaccucagccucc

SEQ ID NO: 2372587 - RNA, 19 nt, Human
ugaucuaggaagacuuugg

SEQ ID NO: 2372588 - RNA, 21 nt, Human
ugaucuaggaagacuuuggaa

SEQ ID NO: 2372589 - RNA, 13 nt, Human
ugaucauccacug

SEQ ID NO: 2372590 - RNA, 24 nt, Human
ugaucauccacugugccaugugcc

SEQ ID NO: 2372591 - RNA, 17 nt, Human
ugauccaagcugguccc

SEQ ID NO: 2372592 - RNA, 21 nt, Human
ugaucauaagucuaaauaaau

SEQ ID NO: 2372593 - RNA, 15 nt, Human
ugaucauaagucuaa

SEQ ID NO: 2372594 - RNA, 19 nt, Human
ugaucauagguauuucaaa

SEQ ID NO: 2372595 - RNA, 21 nt, Human
ugauccaagcuggucccacuc

SEQ ID NO: 2372596 - RNA, 15 nt, Human
ugauccacccaccuc

SEQ ID NO: 2372597 - RNA, 20 nt, Human
ugauccacccaccucagccu

SEQ ID NO: 2372598 - RNA, 14 nt, Human
ugauauaaauaaaa

SEQ ID NO: 2372599 - RNA, 19 nt, Human
ugauauaaaucagauucuu

SEQ ID NO: 2372600 - RNA, 20 nt, Human
ugauaguuacuguugugacc

SEQ ID NO: 2372601 - RNA, 24 nt, Human
ugauaguuguaccgcaaugugacu

SEQ ID NO: 2372602 - RNA, 17 nt, Human
ugauauaaguguguguu

SEQ ID NO: 2372603 - RNA, 23 nt, Human
ugauauaaguguguguuuuucau

SEQ ID NO: 2372604 - RNA, 22 nt, Human
ugauauacuuuuuucuuauuua

SEQ ID NO: 2372605 - RNA, 13 nt, Human
ugauauaaaugca

SEQ ID NO: 2372606 - RNA, 16 nt, Human
ugauauaaaugcaaua

SEQ ID NO: 2372607 - RNA, 22 nt, Human
ugauauagaacagugcuugcca

SEQ ID NO: 2372608 - RNA, 18 nt, Human
ugauauauaaguguacau

SEQ ID NO: 2372609 - RNA, 19 nt, Human
ugauauauaaguguacaua

SEQ ID NO: 2372610 - RNA, 21 nt, Human
ugauauauguguuuuucacau

SEQ ID NO: 2372611 - RNA, 14 nt, Human
ugauauauuuaaaa

SEQ ID NO: 2372612 - RNA, 14 nt, Human
ugauauauuuuaca

SEQ ID NO: 2372613 - RNA, 13 nt, Human
ugauauauuuuac

SEQ ID NO: 2372614 - RNA, 13 nt, Human
ugauauauguguu

SEQ ID NO: 2372615 - RNA, 16 nt, Human
ugauauauggauaaug

SEQ ID NO: 2372616 - RNA, 22 nt, Human
ugauauauaaguguacauaugu

SEQ ID NO: 2372617 - RNA, 11 nt, Human
ugauaugaaaa

SEQ ID NO: 2372618 - RNA, 21 nt, Human
ugauauccauucuuucugaua

SEQ ID NO: 2372619 - RNA, 16 nt, Human
ugauaucccccagccu

SEQ ID NO: 2372620 - RNA, 21 nt, Human
ugauaucaugccccuguacuc

SEQ ID NO: 2372621 - RNA, 19 nt, Human
ugauauccauucuuucuga

SEQ ID NO: 2372622 - RNA, 19 nt, Human
ugauaucacagucuaauuu

SEQ ID NO: 2372623 - RNA, 19 nt, Human
ugauauauuuaaaaauauu

SEQ ID NO: 2372624 - RNA, 17 nt, Human
ugauaucacagucuaau

SEQ ID NO: 2372625 - RNA, 15 nt, Human
ugauauauuuuacaa

SEQ ID NO: 2372626 - RNA, 19 nt, Human
ugauaugcaguuuuccuua

SEQ ID NO: 2372627 - RNA, 15 nt, Human
ugauaugaaaaauau

SEQ ID NO: 2372628 - RNA, 12 nt, Human
ugauaugaaaaa

SEQ ID NO: 2372629 - RNA, 15 nt, Human
ugauaugauuuaaaa

SEQ ID NO: 2372630 - RNA, 19 nt, Human
ugauaugauuuaaaacaug

SEQ ID NO: 2372631 - RNA, 19 nt, Human
ugauaugaaaaauaugaua

SEQ ID NO: 2372632 - RNA, 22 nt, Human
ugaucacggcucacugcagccu

SEQ ID NO: 2372633 - RNA, 15 nt, Human
ugauauggcagaaga

SEQ ID NO: 2372634 - RNA, 17 nt, Human
ugauauggagcccugua

SEQ ID NO: 2372635 - RNA, 20 nt, Human
ugauauggagcccuguaauu

SEQ ID NO: 2372636 - RNA, 16 nt, Human
ugauauggcagaagac

SEQ ID NO: 2372637 - RNA, 18 nt, Human
ugaucacuggcaaugaaa

SEQ ID NO: 2372638 - RNA, 18 nt, Human
ugaucagaccauaauguu

SEQ ID NO: 2372639 - RNA, 21 nt, Human
ugaucagagccgugguccuuu

SEQ ID NO: 2372640 - RNA, 23 nt, Human
ugaucagaucugacaugauuccu

SEQ ID NO: 2372641 - RNA, 17 nt, Human
ugaucagaucugacaug

SEQ ID NO: 2372642 - RNA, 16 nt, Human
ugaucagaucugacau

SEQ ID NO: 2372643 - RNA, 15 nt, Human
ugaucagaucugaca

SEQ ID NO: 2372644 - RNA, 23 nt, Human
ugaucagagccgugguccuuugg

SEQ ID NO: 2372645 - RNA, 22 nt, Human
ugaucagagccgugguccuuug

SEQ ID NO: 2372646 - RNA, 17 nt, Human
uggauuuaacagaaaug

SEQ ID NO: 2372647 - RNA, 14 nt, Human
uggaugcagugcuc

SEQ ID NO: 2372648 - RNA, 15 nt, Human
uggauuuaacagaaa

SEQ ID NO: 2372649 - RNA, 15 nt, Human
uggcaagaaagcugg

SEQ ID NO: 2372650 - RNA, 22 nt, Human
uggcaaccuugucucuaugcca

SEQ ID NO: 2372651 - RNA, 19 nt, Human
uggcaagaaagcugguaaa

SEQ ID NO: 2372652 - RNA, 13 nt, Human
uggcaagagcccc

SEQ ID NO: 2372653 - RNA, 16 nt, Human
uggcaaggaaaaacag

SEQ ID NO: 2372654 - RNA, 13 nt, Human
uggcaagcuguga

SEQ ID NO: 2372655 - RNA, 15 nt, Human
uggcaagccccugcc

SEQ ID NO: 2372656 - RNA, 16 nt, Human
uggcaagccccugccc

SEQ ID NO: 2372657 - RNA, 21 nt, Human
uggcaagccccugcccaucug

SEQ ID NO: 2372658 - RNA, 21 nt, Human
uggcaagcuagaaccuggagg

SEQ ID NO: 2372659 - RNA, 21 nt, Human
uggcacuauaauguaagcucu

SEQ ID NO: 2372660 - RNA, 19 nt, Human
uggcaaggacacagaugaa

SEQ ID NO: 2372661 - RNA, 20 nt, Human
uggcaaggcagcccugucug

SEQ ID NO: 2372662 - RNA, 12 nt, Human
uggcaaggcugu

SEQ ID NO: 2372663 - RNA, 18 nt, Human
uggcacuggaugcagaaa

SEQ ID NO: 2372664 - RNA, 20 nt, Human
uggcacuggcauugucccug

SEQ ID NO: 2372665 - RNA, 17 nt, Human
uggcacuggggcacuug

SEQ ID NO: 2372666 - RNA, 20 nt, Human
uggcacuggggcacuuggca

SEQ ID NO: 2372667 - RNA, 12 nt, Human
uggcagcucucc

SEQ ID NO: 2372668 - RNA, 13 nt, Human
uggcagcucucca

SEQ ID NO: 2372669 - RNA, 14 nt, Human
uggcagcucuccag

SEQ ID NO: 2372670 - RNA, 15 nt, Human
uggcagcucuccagu

SEQ ID NO: 2372671 - RNA, 15 nt, Human
uggcacuggaugcag

SEQ ID NO: 2372672 - RNA, 13 nt, Human
uggcacuggaugc

SEQ ID NO: 2372673 - RNA, 14 nt, Human
uggcacugagcccc

SEQ ID NO: 2372674 - RNA, 15 nt, Human
uggcacugagccccc

SEQ ID NO: 2372675 - RNA, 22 nt, Human
uggcacugcuuccagugaggcu

SEQ ID NO: 2372676 - RNA, 22 nt, Human
uggcacuauaauguaagcucua

SEQ ID NO: 2372677 - RNA, 14 nt, Human
uggcaaggcugugc

SEQ ID NO: 2372678 - RNA, 15 nt, Human
uggcaaggcugugcu

SEQ ID NO: 2372679 - RNA, 16 nt, Human
uggcaaggcugugcuc

SEQ ID NO: 2372680 - RNA, 15 nt, Human
uggcacucaacauga

SEQ ID NO: 2372681 - RNA, 22 nt, Human
uggcacucacagaccuggagcc

SEQ ID NO: 2372682 - RNA, 22 nt, Human
uggcacugagauauuuauuguu

SEQ ID NO: 2372683 - RNA, 13 nt, Human
uggcacugagccc

SEQ ID NO: 2372684 - RNA, 19 nt, Human
uggcacugacugggcauag

SEQ ID NO: 2372685 - RNA, 17 nt, Human
uggcacucacagaccug

SEQ ID NO: 2372686 - RNA, 18 nt, Human
uggcacucacagaccugg

SEQ ID NO: 2372687 - RNA, 19 nt, Human
uggcacucacagaccugga

SEQ ID NO: 2372688 - RNA, 19 nt, Human
uggcacugcuuccagugag

SEQ ID NO: 2372689 - RNA, 14 nt, Human
uggagauccuccug

SEQ ID NO: 2372690 - RNA, 16 nt, Human
uggagauccuccugca

SEQ ID NO: 2372691 - RNA, 18 nt, Human
uggagauccuccugcaga

SEQ ID NO: 2372692 - RNA, 20 nt, Human
uggagauaaagauuucuuga

SEQ ID NO: 2372693 - RNA, 17 nt, Human
uggagaguuuccugaaa

SEQ ID NO: 2372694 - RNA, 23 nt, Human
uggagauauuuauggggggagaa

SEQ ID NO: 2372695 - RNA, 19 nt, Human
uggagauauuuaugggggg

SEQ ID NO: 2372696 - RNA, 16 nt, Human
uggagauagggaaaga

SEQ ID NO: 2372697 - RNA, 21 nt, Human
uggagggcuagaaccuggagg

SEQ ID NO: 2372698 - RNA, 20 nt, Human
uggagggcuagaacuggaga

SEQ ID NO: 2372699 - RNA, 21 nt, Human
uggagggcuagaacuggagag

SEQ ID NO: 2372700 - RNA, 20 nt, Human
uggagauccuccugcagacc

SEQ ID NO: 2372701 - RNA, 21 nt, Human
uggagauccuccugcagacca

SEQ ID NO: 2372702 - RNA, 14 nt, Human
uggaggggccccug

SEQ ID NO: 2372703 - RNA, 20 nt, Human
uggaggggcauggccagcag

SEQ ID NO: 2372704 - RNA, 23 nt, Human
uggaggggggaggugggauccuc

SEQ ID NO: 2372705 - RNA, 21 nt, Human
uggagggcuggaaucuggaga

SEQ ID NO: 2372706 - RNA, 22 nt, Human
uggagggcuggaaucuggagag

SEQ ID NO: 2372707 - RNA, 21 nt, Human
uggagggcuagaaucuggaga

SEQ ID NO: 2372708 - RNA, 22 nt, Human
uggagggcuagaaucuggagag

SEQ ID NO: 2372709 - RNA, 23 nt, Human
uggagggcuagaaucuggagagc

SEQ ID NO: 2372710 - RNA, 12 nt, Human
uggagggcugga

SEQ ID NO: 2372711 - RNA, 23 nt, Human
uggauauuuucaaauuguaucua

SEQ ID NO: 2372712 - RNA, 22 nt, Human
uggauauuuucaaauuguaucu

SEQ ID NO: 2372713 - RNA, 18 nt, Human
uggauauuuucaaauugu

SEQ ID NO: 2372714 - RNA, 23 nt, Human
uggaucacagaggcuucuucaga

SEQ ID NO: 2372715 - RNA, 19 nt, Human
uggaucaaauccagccugc

SEQ ID NO: 2372716 - RNA, 13 nt, Human
uggauauuuucaa

SEQ ID NO: 2372717 - RNA, 18 nt, Human
uggauauauguuuuugaa

SEQ ID NO: 2372718 - RNA, 17 nt, Human
uggauauaguuuuacuu

SEQ ID NO: 2372719 - RNA, 17 nt, Human
uggaugauguuucguga

SEQ ID NO: 2372720 - RNA, 14 nt, Human
uggaugauguuucg

SEQ ID NO: 2372721 - RNA, 15 nt, Human
uggaugcagugcucg

SEQ ID NO: 2372722 - RNA, 22 nt, Human
uggaugcagccucacaguccuu

SEQ ID NO: 2372723 - RNA, 13 nt, Human
uggaugcagccuc

SEQ ID NO: 2372724 - RNA, 21 nt, Human
uggaugcagccucacaguccu

SEQ ID NO: 2372725 - RNA, 22 nt, Human
uggacauuguuggcagcauaaa

SEQ ID NO: 2372726 - RNA, 15 nt, Human
uggacauugucugcg

SEQ ID NO: 2372727 - RNA, 17 nt, Human
uggacauggccccugug

SEQ ID NO: 2372728 - RNA, 17 nt, Human
uggacaggcauguucuc

SEQ ID NO: 2372729 - RNA, 23 nt, Human
uggacaggcauguucucugagga

SEQ ID NO: 2372730 - RNA, 17 nt, Human
uggacauuugccuugcu

SEQ ID NO: 2372731 - RNA, 18 nt, Human
uggacauuugccuugcug

SEQ ID NO: 2372732 - RNA, 19 nt, Human
uggacauuugccuugcugg

SEQ ID NO: 2372733 - RNA, 22 nt, Human
uggacauuugccuugcuggacg

SEQ ID NO: 2372734 - RNA, 18 nt, Human
uggacaggcauguucucu

SEQ ID NO: 2372735 - RNA, 22 nt, Human
uggacaggcauguucucugagg

SEQ ID NO: 2372736 - RNA, 17 nt, Human
uggaagaaauuccugua

SEQ ID NO: 2372737 - RNA, 20 nt, Human
uggaagaaauuccuguagca

SEQ ID NO: 2372738 - RNA, 15 nt, Human
uggaagaagagggag

SEQ ID NO: 2372739 - RNA, 12 nt, Human
uggaagaaggga

SEQ ID NO: 2372740 - RNA, 21 nt, Human
uggaagaagggagaagaaagg

SEQ ID NO: 2372741 - RNA, 11 nt, Human
uggaagacaca

SEQ ID NO: 2372742 - RNA, 15 nt, Human
uggaagacacauuga

SEQ ID NO: 2372743 - RNA, 13 nt, Human
uggaagaagggag

SEQ ID NO: 2372744 - RNA, 15 nt, Human
uggaagaagggagaa

SEQ ID NO: 2372745 - RNA, 17 nt, Human
uggaagaagggagaaga

SEQ ID NO: 2372746 - RNA, 19 nt, Human
uggaagaagggagaagaaa

SEQ ID NO: 2372747 - RNA, 15 nt, Human
uggacggcugggcac

SEQ ID NO: 2372748 - RNA, 22 nt, Human
uggacggcaggcucacugccag

SEQ ID NO: 2372749 - RNA, 23 nt, Human
uggacggcaggcucacugccagg

SEQ ID NO: 2372750 - RNA, 17 nt, Human
uggacauuuuuucaguc

SEQ ID NO: 2372751 - RNA, 21 nt, Human
uggacggcaggcucacugcca

SEQ ID NO: 2372752 - RNA, 16 nt, Human
uggacggggacugggg

SEQ ID NO: 2372753 - RNA, 14 nt, Human
uggacggugcucca

SEQ ID NO: 2372754 - RNA, 16 nt, Human
uggacggugcuccagg

SEQ ID NO: 2372755 - RNA, 17 nt, Human
uggacggugcuccaggc

SEQ ID NO: 2372756 - RNA, 18 nt, Human
uggacggugcuccaggca

SEQ ID NO: 2372757 - RNA, 19 nt, Human
uggacggugcuccaggcag

SEQ ID NO: 2372758 - RNA, 22 nt, Human
uggacggugcuccaggcaggcu

SEQ ID NO: 2372759 - RNA, 19 nt, Human
uggacguguuaugacucca

SEQ ID NO: 2372760 - RNA, 23 nt, Human
uggacguguuaugacuccagaau

SEQ ID NO: 2372761 - RNA, 17 nt, Human
uggacguucggggcaug

SEQ ID NO: 2372762 - RNA, 13 nt, Human
uggacuaaaagau

SEQ ID NO: 2372763 - RNA, 14 nt, Human
uggacuaaaagaua

SEQ ID NO: 2372764 - RNA, 15 nt, Human
uggacuaaaagauau

SEQ ID NO: 2372765 - RNA, 21 nt, Human
uggacuaaaagauauaagugc

SEQ ID NO: 2372766 - RNA, 22 nt, Human
uggacuaaaagauauaagugcu

SEQ ID NO: 2372767 - RNA, 23 nt, Human
uggacuaaaagauauaagugcug

SEQ ID NO: 2372768 - RNA, 19 nt, Human
uggacuaacuugucuuugg

SEQ ID NO: 2372769 - RNA, 20 nt, Human
uggacuaacuugucuuugga

SEQ ID NO: 2372770 - RNA, 13 nt, Human
uggacugggaggu

SEQ ID NO: 2372771 - RNA, 22 nt, Human
uggacuggcuagaguccucacu

SEQ ID NO: 2372772 - RNA, 20 nt, Human
uggacuggcuagaguccuca

SEQ ID NO: 2372773 - RNA, 19 nt, Human
uggacuggcuagaguccuc

SEQ ID NO: 2372774 - RNA, 13 nt, Human
uggacuggcuaga

SEQ ID NO: 2372775 - RNA, 17 nt, Human
uggacuggccccugggu

SEQ ID NO: 2372776 - RNA, 20 nt, Human
uggacuggccccugggucag

SEQ ID NO: 2372777 - RNA, 17 nt, Human
uggacuggaguggagca

SEQ ID NO: 2372778 - RNA, 14 nt, Human
uggacuggccccug

SEQ ID NO: 2372779 - RNA, 15 nt, Human
uggacuggccccugg

SEQ ID NO: 2372780 - RNA, 16 nt, Human
uggacuggccccuggg

SEQ ID NO: 2372781 - RNA, 20 nt, Human
uggacugugaugccacacag

SEQ ID NO: 2372782 - RNA, 21 nt, Human
uggacugugaugccacacaga

SEQ ID NO: 2372783 - RNA, 15 nt, Human
uggacugucauagaa

SEQ ID NO: 2372784 - RNA, 15 nt, Human
uggacugugaugcca

SEQ ID NO: 2372785 - RNA, 21 nt, Human
uggacugucauagaaauuaca

SEQ ID NO: 2372786 - RNA, 15 nt, Human
uggacugaagccugc

SEQ ID NO: 2372787 - RNA, 19 nt, Human
uggacucuuugguggcuuu

SEQ ID NO: 2372788 - RNA, 15 nt, Human
uggacucuugcucuu

SEQ ID NO: 2372789 - RNA, 18 nt, Human
uggacucuugcucuuucu

SEQ ID NO: 2372790 - RNA, 12 nt, Human
uggacucuugcu

SEQ ID NO: 2372791 - RNA, 14 nt, Human
uggacucuugcucu

SEQ ID NO: 2372792 - RNA, 19 nt, Human
uggacucugcacaugucuu

SEQ ID NO: 2372793 - RNA, 15 nt, Human
uggacucugcacaug

SEQ ID NO: 2372794 - RNA, 20 nt, Human
uggacggugcuccaggcagg

SEQ ID NO: 2372795 - RNA, 16 nt, Human
uggacucugcacauga

SEQ ID NO: 2372796 - RNA, 17 nt, Human
uggacucugcacaugaa

SEQ ID NO: 2372797 - RNA, 17 nt, Human
uggacucugcacauguc

SEQ ID NO: 2372798 - RNA, 18 nt, Human
uggacucugcacaugucu

SEQ ID NO: 2372799 - RNA, 22 nt, Human
uggacucugcacaugucuugua

SEQ ID NO: 2372800 - RNA, 11 nt, Human
uggagagcugg

SEQ ID NO: 2372801 - RNA, 13 nt, Human
uggagagcuggag

SEQ ID NO: 2372802 - RNA, 15 nt, Human
uggagagcuggagcc

SEQ ID NO: 2372803 - RNA, 17 nt, Human
uggagagcuggagccug

SEQ ID NO: 2372804 - RNA, 19 nt, Human
uggagagcuagaaccugga

SEQ ID NO: 2372805 - RNA, 20 nt, Human
uggagagcuagaaccuggag

SEQ ID NO: 2372806 - RNA, 21 nt, Human
uggagagcuagaaccuggaga

SEQ ID NO: 2372807 - RNA, 21 nt, Human
uggagagcuagaaccuggagg

SEQ ID NO: 2372808 - RNA, 22 nt, Human
uggagagcuagaaccuggagag

SEQ ID NO: 2372809 - RNA, 23 nt, Human
uggagagcuagaaccuggagagc

SEQ ID NO: 2372810 - RNA, 19 nt, Human
uggagagcuggugcccgga

SEQ ID NO: 2372811 - RNA, 16 nt, Human
uggagagcuggugccc

SEQ ID NO: 2372812 - RNA, 14 nt, Human
uggagagcuggugc

SEQ ID NO: 2372813 - RNA, 18 nt, Human
uggagagcuggagccugg

SEQ ID NO: 2372814 - RNA, 20 nt, Human
uggagagcuggagccuggug

SEQ ID NO: 2372815 - RNA, 16 nt, Human
uggagaguuuccugaa

SEQ ID NO: 2372816 - RNA, 15 nt, Human
uggagaguuuccuga

SEQ ID NO: 2372817 - RNA, 19 nt, Human
uggagaccagggagccuuu

SEQ ID NO: 2372818 - RNA, 18 nt, Human
uggagaccagggagccuu

SEQ ID NO: 2372819 - RNA, 18 nt, Human
uggagaccaugcagagcg

SEQ ID NO: 2372820 - RNA, 19 nt, Human
uggagaccaugcagagcgc

SEQ ID NO: 2372821 - RNA, 20 nt, Human
uggagaccaugcagagcgcc

SEQ ID NO: 2372822 - RNA, 18 nt, Human
uggagagcuagaaccugg

SEQ ID NO: 2372823 - RNA, 17 nt, Human
uggagacacaacuauuu

SEQ ID NO: 2372824 - RNA, 12 nt, Human
uggagacagccc

SEQ ID NO: 2372825 - RNA, 13 nt, Human
uggagacagcccc

SEQ ID NO: 2372826 - RNA, 17 nt, Human
uggagacagccccagag

SEQ ID NO: 2372827 - RNA, 19 nt, Human
uggagacagccccagagca

SEQ ID NO: 2372828 - RNA, 20 nt, Human
uggagacagccccagagcag

SEQ ID NO: 2372829 - RNA, 21 nt, Human
uggagacagccccagagcagg

SEQ ID NO: 2372830 - RNA, 22 nt, Human
uggagacagccccagagcaggg

SEQ ID NO: 2372831 - RNA, 15 nt, Human
uggagacauuccugg

SEQ ID NO: 2372832 - RNA, 20 nt, Human
uggagacauuccugggcaca

SEQ ID NO: 2372833 - RNA, 21 nt, Human
uggagacauuccugggcacag

SEQ ID NO: 2372834 - RNA, 22 nt, Human
uggagacauuccugggcacagu

SEQ ID NO: 2372835 - RNA, 23 nt, Human
ugcuuccagugaggcucugcccu

SEQ ID NO: 2372836 - RNA, 14 nt, Human
ugcuucccauccua

SEQ ID NO: 2372837 - RNA, 15 nt, Human
ugcuucccauccuac

SEQ ID NO: 2372838 - RNA, 16 nt, Human
ugcuucccauccuacc

SEQ ID NO: 2372839 - RNA, 18 nt, Human
ugcuucccauccuacccu

SEQ ID NO: 2372840 - RNA, 23 nt, Human
ugcuucccauccuacccucgggc

SEQ ID NO: 2372841 - RNA, 17 nt, Human
ugcuucccauuguggcu

SEQ ID NO: 2372842 - RNA, 20 nt, Human
ugcuucccucugccuguccc

SEQ ID NO: 2372843 - RNA, 15 nt, Human
ugcuucccucugccu

SEQ ID NO: 2372844 - RNA, 13 nt, Human
ugcuucccucugc

SEQ ID NO: 2372845 - RNA, 20 nt, Human
ugcuucccauuguggcuccu

SEQ ID NO: 2372846 - RNA, 15 nt, Human
ugcuucccuaaucua

SEQ ID NO: 2372847 - RNA, 23 nt, Human
ugcuucccauuguggcuccuauc

SEQ ID NO: 2372848 - RNA, 22 nt, Human
ugcuuccagugaggcucugccc

SEQ ID NO: 2372849 - RNA, 18 nt, Human
ugcuuacauuuuuacaau

SEQ ID NO: 2372850 - RNA, 15 nt, Human
ugcuuacauuuuuac

SEQ ID NO: 2372851 - RNA, 17 nt, Human
ugcuuacauuuuuacaa

SEQ ID NO: 2372852 - RNA, 20 nt, Human
ugcuuacauuuuuacaauaa

SEQ ID NO: 2372853 - RNA, 18 nt, Human
ugcuuacaauucccugcu

SEQ ID NO: 2372854 - RNA, 20 nt, Human
ugcuuacaauucccugcugu

SEQ ID NO: 2372855 - RNA, 21 nt, Human
ugcuuacaauucccugcuguc

SEQ ID NO: 2372856 - RNA, 22 nt, Human
ugcuuacaauucccugcugucg

SEQ ID NO: 2372857 - RNA, 13 nt, Human
ugcuuacaauuuu

SEQ ID NO: 2372858 - RNA, 14 nt, Human
ugcuuacaauuuuu

SEQ ID NO: 2372859 - RNA, 22 nt, Human
ugcuuacaauuuuuuuaauuuu

SEQ ID NO: 2372860 - RNA, 23 nt, Human
ugcuuacaauuuuuuuaauuuug

SEQ ID NO: 2372861 - RNA, 15 nt, Human
ugcuuacacaucuca

SEQ ID NO: 2372862 - RNA, 16 nt, Human
ugcuuacacaucucag

SEQ ID NO: 2372863 - RNA, 17 nt, Human
ugcuuacacaucucaga

SEQ ID NO: 2372864 - RNA, 20 nt, Human
ugcuuacacaucucagaccc

SEQ ID NO: 2372865 - RNA, 12 nt, Human
ugcuuacauuuu

SEQ ID NO: 2372866 - RNA, 14 nt, Human
ugcuuacauuuuua

SEQ ID NO: 2372867 - RNA, 16 nt, Human
ugcuucucuacagacu

SEQ ID NO: 2372868 - RNA, 14 nt, Human
ugcuucucuacaga

SEQ ID NO: 2372869 - RNA, 12 nt, Human
ugcuucucugac

SEQ ID NO: 2372870 - RNA, 13 nt, Human
ugcuucucugacu

SEQ ID NO: 2372871 - RNA, 17 nt, Human
ugcuucuguuuuauaau

SEQ ID NO: 2372872 - RNA, 17 nt, Human
ugcuucuccaugagaca

SEQ ID NO: 2372873 - RNA, 13 nt, Human
ugcuucuccagcc

SEQ ID NO: 2372874 - RNA, 15 nt, Human
ugcuucuccagccug

SEQ ID NO: 2372875 - RNA, 21 nt, Human
ugcuucccucugccugucccu

SEQ ID NO: 2372876 - RNA, 12 nt, Human
ugcuuccuagaa

SEQ ID NO: 2372877 - RNA, 20 nt, Human
ugcuuccuagaaguuacuga

SEQ ID NO: 2372878 - RNA, 21 nt, Human
ugcuuccuagaaguuacugaa

SEQ ID NO: 2372879 - RNA, 22 nt, Human
ugcuuccuagaaguuacugaau

SEQ ID NO: 2372880 - RNA, 12 nt, Human
ugcuuccuccug

SEQ ID NO: 2372881 - RNA, 13 nt, Human
ugcuuccuccugg

SEQ ID NO: 2372882 - RNA, 13 nt, Human
ugcuucgggcccu

SEQ ID NO: 2372883 - RNA, 14 nt, Human
ugcuuccuccugga

SEQ ID NO: 2372884 - RNA, 15 nt, Human
ugcuuccuccuggaa

SEQ ID NO: 2372885 - RNA, 14 nt, Human
ugcuuaaugaaaag

SEQ ID NO: 2372886 - RNA, 12 nt, Human
ugcuuaaugaaa

SEQ ID NO: 2372887 - RNA, 19 nt, Human
ugcuuaacuucacauauug

SEQ ID NO: 2372888 - RNA, 16 nt, Human
ugcuuaagcagaagca

SEQ ID NO: 2372889 - RNA, 18 nt, Human
ugcuuaacuucacauauu

SEQ ID NO: 2372890 - RNA, 17 nt, Human
ugcuuaacuucacauau

SEQ ID NO: 2372891 - RNA, 14 nt, Human
ugcuuaacuucaca

SEQ ID NO: 2372892 - RNA, 13 nt, Human
ugcuuaacuucac

SEQ ID NO: 2372893 - RNA, 18 nt, Human
ugccuguccagccugggc

SEQ ID NO: 2372894 - RNA, 16 nt, Human
ugccuguccagccugg

SEQ ID NO: 2372895 - RNA, 15 nt, Human
ugccuguccagccug

SEQ ID NO: 2372896 - RNA, 23 nt, Human
ugccuguaguuaggaaauaaaac

SEQ ID NO: 2372897 - RNA, 20 nt, Human
ugccuguccagccugggcag

SEQ ID NO: 2372898 - RNA, 19 nt, Human
ugccuguccagccugggca

SEQ ID NO: 2372899 - RNA, 16 nt, Human
ugccugucccaccccc

SEQ ID NO: 2372900 - RNA, 19 nt, Human
ugccugucccacccccacc

SEQ ID NO: 2372901 - RNA, 11 nt, Human
ugccugucucc

SEQ ID NO: 2372902 - RNA, 11 nt, Human
ugccugucccu

SEQ ID NO: 2372903 - RNA, 14 nt, Human
ugccugucccucuc

SEQ ID NO: 2372904 - RNA, 19 nt, Human
ugcuguuuguuugacaaag

SEQ ID NO: 2372905 - RNA, 15 nt, Human
ugcuguuuuccuccc

SEQ ID NO: 2372906 - RNA, 14 nt, Human
ugcuguuuuccucc

SEQ ID NO: 2372907 - RNA, 22 nt, Human
ugcuguuuuccucccuucugcu

SEQ ID NO: 2372908 - RNA, 18 nt, Human
ugcuguuuugauuuguac

SEQ ID NO: 2372909 - RNA, 21 nt, Human
ugcuguuuuccucccuucugc

SEQ ID NO: 2372910 - RNA, 19 nt, Human
ugcuguuuuccucccuucu

SEQ ID NO: 2372911 - RNA, 17 nt, Human
ugcuguuuuccucccuu

SEQ ID NO: 2372912 - RNA, 16 nt, Human
ugcuguuuuccucccu

SEQ ID NO: 2372913 - RNA, 19 nt, Human
ugcuuaaaaaucauugauu

SEQ ID NO: 2372914 - RNA, 17 nt, Human
ugcuuaaaaaucauuga

SEQ ID NO: 2372915 - RNA, 18 nt, Human
ugcuguuuuguucugugg

SEQ ID NO: 2372916 - RNA, 18 nt, Human
ugcuuaaaaaucauugau

SEQ ID NO: 2372917 - RNA, 15 nt, Human
ugcuguuuuguucug

SEQ ID NO: 2372918 - RNA, 16 nt, Human
ugcuguuuuguucugu

SEQ ID NO: 2372919 - RNA, 13 nt, Human
ugcuuucugaaau

SEQ ID NO: 2372920 - RNA, 12 nt, Human
ugcuuucugaaa

SEQ ID NO: 2372921 - RNA, 18 nt, Human
ugcuuucgaacugcuagu

SEQ ID NO: 2372922 - RNA, 12 nt, Human
ugcuuucuauug

SEQ ID NO: 2372923 - RNA, 13 nt, Human
ugcuuucuauugu

SEQ ID NO: 2372924 - RNA, 18 nt, Human
ugcuuucuauuguacaga

SEQ ID NO: 2372925 - RNA, 18 nt, Human
ugcuuucuccauuguaaa

SEQ ID NO: 2372926 - RNA, 15 nt, Human
ugcuuugccccugag

SEQ ID NO: 2372927 - RNA, 13 nt, Human
ugcuuugcccagc

SEQ ID NO: 2372928 - RNA, 22 nt, Human
ugcuuugacugagcagacuggu

SEQ ID NO: 2372929 - RNA, 20 nt, Human
ugcuuugacugagcagacug

SEQ ID NO: 2372930 - RNA, 19 nt, Human
uggaaaagaauacagaaag

SEQ ID NO: 2372931 - RNA, 14 nt, Human
uggaaaagaauaca

SEQ ID NO: 2372932 - RNA, 14 nt, Human
ugcuuugcuuucug

SEQ ID NO: 2372933 - RNA, 19 nt, Human
ugcuuugcuuucugcucag

SEQ ID NO: 2372934 - RNA, 19 nt, Human
uggaaaagccaagaggcug

SEQ ID NO: 2372935 - RNA, 16 nt, Human
uggaaaagccaagagg

SEQ ID NO: 2372936 - RNA, 13 nt, Human
ugcuuuggaaauc

SEQ ID NO: 2372937 - RNA, 13 nt, Human
ugcuuugcuuucu

SEQ ID NO: 2372938 - RNA, 14 nt, Human
ugcuuugcccagca

SEQ ID NO: 2372939 - RNA, 17 nt, Human
ugcuuuggaaaacccag

SEQ ID NO: 2372940 - RNA, 17 nt, Human
ugcuucuuaaccccagu

SEQ ID NO: 2372941 - RNA, 19 nt, Human
ugcuucuuaaccccaguaa

SEQ ID NO: 2372942 - RNA, 12 nt, Human
ugcuuguguuaa

SEQ ID NO: 2372943 - RNA, 18 nt, Human
ugcuugugaaaggaaaga

SEQ ID NO: 2372944 - RNA, 13 nt, Human
ugcuucuucagag

SEQ ID NO: 2372945 - RNA, 22 nt, Human
ugcuucuguuuuauaauuuugu

SEQ ID NO: 2372946 - RNA, 17 nt, Human
ugcuuuccguggcacug

SEQ ID NO: 2372947 - RNA, 20 nt, Human
ugcuuuccccuguggggauc

SEQ ID NO: 2372948 - RNA, 16 nt, Human
ugcuuucccugaacug

SEQ ID NO: 2372949 - RNA, 13 nt, Human
ugcuuuccccugu

SEQ ID NO: 2372950 - RNA, 14 nt, Human
ugcuuuccccugug

SEQ ID NO: 2372951 - RNA, 15 nt, Human
ugcuuuccccugugg

SEQ ID NO: 2372952 - RNA, 21 nt, Human
ugcuuuccguggcacugcaua

SEQ ID NO: 2372953 - RNA, 20 nt, Human
ugcuuuccguggcacugcau

SEQ ID NO: 2372954 - RNA, 20 nt, Human
ugcuuucgucuccagccccu

SEQ ID NO: 2372955 - RNA, 14 nt, Human
ugcuuguuaacuga

SEQ ID NO: 2372956 - RNA, 15 nt, Human
ugcuuguguuaagua

SEQ ID NO: 2372957 - RNA, 16 nt, Human
ugcuuguuaacugagu

SEQ ID NO: 2372958 - RNA, 12 nt, Human
ugcuuguguuau

SEQ ID NO: 2372959 - RNA, 15 nt, Human
uggaaaccugaaaaa

SEQ ID NO: 2372960 - RNA, 21 nt, Human
uggaaacccuuaggacagggu

SEQ ID NO: 2372961 - RNA, 21 nt, Human
uggaaaagggucuugggaaau

SEQ ID NO: 2372962 - RNA, 22 nt, Human
uggaaaagggucuugggaaaua

SEQ ID NO: 2372963 - RNA, 12 nt, Human
uggaaaccacag

SEQ ID NO: 2372964 - RNA, 17 nt, Human
uggaaaccugaaaaaaa

SEQ ID NO: 2372965 - RNA, 14 nt, Human
uggaaaccugcccu

SEQ ID NO: 2372966 - RNA, 15 nt, Human
uggaaaccugcccug

SEQ ID NO: 2372967 - RNA, 16 nt, Human
uggaaaccugcccugc

SEQ ID NO: 2372968 - RNA, 17 nt, Human
uggaaaccugcccugcc

SEQ ID NO: 2372969 - RNA, 19 nt, Human
uggaaaccugcccugccug

SEQ ID NO: 2372970 - RNA, 20 nt, Human
uggaaaccugcccugccuga

SEQ ID NO: 2372971 - RNA, 21 nt, Human
uggaaaccugcccugccugag

SEQ ID NO: 2372972 - RNA, 18 nt, Human
uggaaaaggaagacuaga

SEQ ID NO: 2372973 - RNA, 16 nt, Human
uggaaaaggaagacua

SEQ ID NO: 2372974 - RNA, 15 nt, Human
uggaaaaggaagacu

SEQ ID NO: 2372975 - RNA, 16 nt, Human
uggaaaagaggaguuu

SEQ ID NO: 2372976 - RNA, 22 nt, Human
uggaaaaggaagacuagaggcu

SEQ ID NO: 2372977 - RNA, 20 nt, Human
uggaaaaggaagacuagagg

SEQ ID NO: 2372978 - RNA, 19 nt, Human
uggaaaagggucuugggaa

SEQ ID NO: 2372979 - RNA, 22 nt, Human
uggaaaaguauguuagugcaaa

SEQ ID NO: 2372980 - RNA, 18 nt, Human
uggaaacucuuuaacuuc

SEQ ID NO: 2372981 - RNA, 19 nt, Human
uggaaacucuuuaacuucu

SEQ ID NO: 2372982 - RNA, 12 nt, Human
uggaaacugaau

SEQ ID NO: 2372983 - RNA, 22 nt, Human
uggaaaccugcccugccugagg

SEQ ID NO: 2372984 - RNA, 24 nt, Human
uggaaaccugcccugccugagggc

SEQ ID NO: 2372985 - RNA, 15 nt, Human
uggaacacucugaga

SEQ ID NO: 2372986 - RNA, 17 nt, Human
uggaacacucugagacu

SEQ ID NO: 2372987 - RNA, 21 nt, Human
uggaaacuggaugaggucaua

SEQ ID NO: 2372988 - RNA, 16 nt, Human
uggaacagaauguuuu

SEQ ID NO: 2372989 - RNA, 14 nt, Human
uggaaacugaaugc

SEQ ID NO: 2372990 - RNA, 15 nt, Human
uggaaacugaaugcu

SEQ ID NO: 2372991 - RNA, 23 nt, Human
uggaacagauucacacugucugg

SEQ ID NO: 2372992 - RNA, 16 nt, Human
uggaaacugaaugcuc

SEQ ID NO: 2372993 - RNA, 21 nt, Human
uggaacagaauguuuuacugu

SEQ ID NO: 2372994 - RNA, 19 nt, Human
uggaacagauucacacugu

SEQ ID NO: 2372995 - RNA, 20 nt, Human
uggaacagauucacacuguc

SEQ ID NO: 2372996 - RNA, 12 nt, Human
uggaaccuccuu

SEQ ID NO: 2372997 - RNA, 23 nt, Human
uggaaccucagccuggccagaca

SEQ ID NO: 2372998 - RNA, 21 nt, Human
uggaaccuccuuucucuucuc

SEQ ID NO: 2372999 - RNA, 19 nt, Human
uggaaccucagccuggcca

SEQ ID NO: 2373000 - RNA, 18 nt, Human
uggaaccucagccuggcc

SEQ ID NO: 2373001 - RNA, 17 nt, Human
uggaaccucagccuggc

SEQ ID NO: 2373002 - RNA, 21 nt, Human
uggaacuucuaauauauuuuu

SEQ ID NO: 2373003 - RNA, 13 nt, Human
uggaacuucuaau

SEQ ID NO: 2373004 - RNA, 13 nt, Human
uggaaccuccuuu

SEQ ID NO: 2373005 - RNA, 15 nt, Human
uggaaccuccuuucu

SEQ ID NO: 2373006 - RNA, 14 nt, Human
uggaacuucuaaua

SEQ ID NO: 2373007 - RNA, 15 nt, Human
uggaacuucuaauau

SEQ ID NO: 2373008 - RNA, 16 nt, Human
uggaacuucuaauaua

SEQ ID NO: 2373009 - RNA, 18 nt, Human
uggaacuucuaauauauu

SEQ ID NO: 2373010 - RNA, 16 nt, Human
uggcagcugccacgcc

SEQ ID NO: 2373011 - RNA, 22 nt, Human
uggcagcucuggacagccccac

SEQ ID NO: 2373012 - RNA, 21 nt, Human
uggcagcucuggacagcccca

SEQ ID NO: 2373013 - RNA, 11 nt, Human
uggcagcucug

SEQ ID NO: 2373014 - RNA, 17 nt, Human
uggcagcugcgguccac

SEQ ID NO: 2373015 - RNA, 19 nt, Human
uggcagcugcgguccaccc

SEQ ID NO: 2373016 - RNA, 13 nt, Human
uggccccagcaca

SEQ ID NO: 2373017 - RNA, 14 nt, Human
uggccccagcacag

SEQ ID NO: 2373018 - RNA, 17 nt, Human
uggccccagcacagcuu

SEQ ID NO: 2373019 - RNA, 18 nt, Human
uggccccagcacagcuug

SEQ ID NO: 2373020 - RNA, 19 nt, Human
uggccccagcacagcuuga

SEQ ID NO: 2373021 - RNA, 13 nt, Human
uggccccucaggg

SEQ ID NO: 2373022 - RNA, 20 nt, Human
uggccccucagggucccugg

SEQ ID NO: 2373023 - RNA, 20 nt, Human
uggccccaggaccuggcugc

SEQ ID NO: 2373024 - RNA, 15 nt, Human
uggccccaggaccug

SEQ ID NO: 2373025 - RNA, 12 nt, Human
uggccccaggac

SEQ ID NO: 2373026 - RNA, 21 nt, Human
uggccccagccuggcccagcu

SEQ ID NO: 2373027 - RNA, 22 nt, Human
uggccccagccuggcccagcuc

SEQ ID NO: 2373028 - RNA, 17 nt, Human
uggcagcucuccaguca

SEQ ID NO: 2373029 - RNA, 12 nt, Human
uggccccagccu

SEQ ID NO: 2373030 - RNA, 13 nt, Human
uggccccagccug

SEQ ID NO: 2373031 - RNA, 16 nt, Human
uggccccagccuggcc

SEQ ID NO: 2373032 - RNA, 17 nt, Human
uggccccagccuggccc

SEQ ID NO: 2373033 - RNA, 18 nt, Human
uggccccagccuggccca

SEQ ID NO: 2373034 - RNA, 19 nt, Human
uggccccagccuggcccag

SEQ ID NO: 2373035 - RNA, 20 nt, Human
uggccccagccuggcccagc

SEQ ID NO: 2373036 - RNA, 21 nt, Human
uggccccucaccugggcaccu

SEQ ID NO: 2373037 - RNA, 16 nt, Human
uggccccucaccuggg

SEQ ID NO: 2373038 - RNA, 19 nt, Human
uggccccucccccugccag

SEQ ID NO: 2373039 - RNA, 21 nt, Human
uggccccaugucucucagaau

SEQ ID NO: 2373040 - RNA, 19 nt, Human
uggccccaugucucucaga

SEQ ID NO: 2373041 - RNA, 23 nt, Human
uggccccaugucucucagaauuc

SEQ ID NO: 2373042 - RNA, 13 nt, Human
uggccccucaccu

SEQ ID NO: 2373043 - RNA, 10 nt, Human
uggccccucu

SEQ ID NO: 2373044 - RNA, 12 nt, Human
uggccccucuga

SEQ ID NO: 2373045 - RNA, 13 nt, Human
uggccccucugac

SEQ ID NO: 2373046 - RNA, 14 nt, Human
uggccccucugacc

SEQ ID NO: 2373047 - RNA, 21 nt, Human
uggccccucagggucccuggu

SEQ ID NO: 2373048 - RNA, 22 nt, Human
uggccccucagggucccuggug

SEQ ID NO: 2373049 - RNA, 20 nt, Human
uggccuagcauacguacaca

SEQ ID NO: 2373050 - RNA, 14 nt, Human
uggccccugagauc

SEQ ID NO: 2373051 - RNA, 20 nt, Human
uggccccugaacaagaauug

SEQ ID NO: 2373052 - RNA, 14 nt, Human
uggccccugaacaa

SEQ ID NO: 2373053 - RNA, 16 nt, Human
uggccccucugaccug

SEQ ID NO: 2373054 - RNA, 18 nt, Human
uggccccucugaccugca

SEQ ID NO: 2373055 - RNA, 21 nt, Human
uggccuccacaguucgaccug

SEQ ID NO: 2373056 - RNA, 17 nt, Human
uggccucagaauucaca

SEQ ID NO: 2373057 - RNA, 23 nt, Human
uggccucaacccucccucagccc

SEQ ID NO: 2373058 - RNA, 21 nt, Human
uggccucaagaucaaugaaau

SEQ ID NO: 2373059 - RNA, 22 nt, Human
uggccucaagaucaaugaaaug

SEQ ID NO: 2373060 - RNA, 11 nt, Human
uggccucccaa

SEQ ID NO: 2373061 - RNA, 14 nt, Human
uggccucccaacuc

SEQ ID NO: 2373062 - RNA, 18 nt, Human
uggccucaagugauucuc

SEQ ID NO: 2373063 - RNA, 23 nt, Human
uggccucaagugauucuccugcc

SEQ ID NO: 2373064 - RNA, 22 nt, Human
uggccucaacccucccucagcc

SEQ ID NO: 2373065 - RNA, 21 nt, Human
uggccucaacccucccucagc

SEQ ID NO: 2373066 - RNA, 13 nt, Human
uggccucaagauc

SEQ ID NO: 2373067 - RNA, 23 nt, Human
uggccuagcauacguacacauuu

SEQ ID NO: 2373068 - RNA, 19 nt, Human
uggccucccaacucacccc

SEQ ID NO: 2373069 - RNA, 20 nt, Human
uggccucccaacucacccca

SEQ ID NO: 2373070 - RNA, 21 nt, Human
uggccucccaacucaccccag

SEQ ID NO: 2373071 - RNA, 22 nt, Human
uggccucccaacucaccccagc

SEQ ID NO: 2373072 - RNA, 19 nt, Human
uggccucgggacaccugcc

SEQ ID NO: 2373073 - RNA, 21 nt, Human
uggccucuccuuguggccugg

SEQ ID NO: 2373074 - RNA, 14 nt, Human
uggccucgccuggc

SEQ ID NO: 2373075 - RNA, 15 nt, Human
uggccucgccuggcc

SEQ ID NO: 2373076 - RNA, 16 nt, Human
uggccucgccuggccu

SEQ ID NO: 2373077 - RNA, 17 nt, Human
uggccucgccuggccug

SEQ ID NO: 2373078 - RNA, 23 nt, Human
uggccucgggacaccugcccugc

SEQ ID NO: 2373079 - RNA, 12 nt, Human
uggccuccggcc

SEQ ID NO: 2373080 - RNA, 15 nt, Human
uggccuccggccucc

SEQ ID NO: 2373081 - RNA, 18 nt, Human
uggccuccggccuccccu

SEQ ID NO: 2373082 - RNA, 20 nt, Human
uggccucccaaaugagccau

SEQ ID NO: 2373083 - RNA, 19 nt, Human
uggccuccucccuuagcuc

SEQ ID NO: 2373084 - RNA, 19 nt, Human
uggccuccggcgucagccu

SEQ ID NO: 2373085 - RNA, 20 nt, Human
uggccuccggcgucagccuc

SEQ ID NO: 2373086 - RNA, 21 nt, Human
uggccuccggcgucagccucc

SEQ ID NO: 2373087 - RNA, 18 nt, Human
uggccuccucccuuagcu

SEQ ID NO: 2373088 - RNA, 12 nt, Human
ugggaaugaagc

SEQ ID NO: 2373089 - RNA, 13 nt, Human
ugggaaugaagcu

SEQ ID NO: 2373090 - RNA, 14 nt, Human
ugggaaugaagcuu

SEQ ID NO: 2373091 - RNA, 14 nt, Human
ugggaaugaagcaa

SEQ ID NO: 2373092 - RNA, 18 nt, Human
uggcuuuucacugcuggc

SEQ ID NO: 2373093 - RNA, 19 nt, Human
uggcuuuucacugcuggcu

SEQ ID NO: 2373094 - RNA, 21 nt, Human
uggcuuuucacugcuggcugc

SEQ ID NO: 2373095 - RNA, 22 nt, Human
uggcuuuucacugcuggcugcc

SEQ ID NO: 2373096 - RNA, 14 nt, Human
uggcuuguguguuu

SEQ ID NO: 2373097 - RNA, 16 nt, Human
uggcuuguguguuuca

SEQ ID NO: 2373098 - RNA, 18 nt, Human
uggcuuguguguuucacu

SEQ ID NO: 2373099 - RNA, 24 nt, Human
uggcuuguaucaacacuguuacuu

SEQ ID NO: 2373100 - RNA, 16 nt, Human
uggcuuuucacugcug

SEQ ID NO: 2373101 - RNA, 20 nt, Human
uggcuuguguguuucacuuu

SEQ ID NO: 2373102 - RNA, 19 nt, Human
uggcuuguguguuucacuu

SEQ ID NO: 2373103 - RNA, 17 nt, Human
uggcuuguaacuccacc

SEQ ID NO: 2373104 - RNA, 14 nt, Human
uggcuccucaaaca

SEQ ID NO: 2373105 - RNA, 14 nt, Human
uggcuggcugcagu

SEQ ID NO: 2373106 - RNA, 13 nt, Human
uggcuggcugcag

SEQ ID NO: 2373107 - RNA, 17 nt, Human
uggcuggcccgucaugu

SEQ ID NO: 2373108 - RNA, 15 nt, Human
uggcuggccacugca

SEQ ID NO: 2373109 - RNA, 22 nt, Human
uggcugcugaagcugccugcuu

SEQ ID NO: 2373110 - RNA, 22 nt, Human
uggcuggcuaacuggaagcaug

SEQ ID NO: 2373111 - RNA, 21 nt, Human
uggcuggccuuccacuuggcu

SEQ ID NO: 2373112 - RNA, 12 nt, Human
uggcugggcaug

SEQ ID NO: 2373113 - RNA, 12 nt, Human
uggcugggccca

SEQ ID NO: 2373114 - RNA, 21 nt, Human
uggcugggaacugcagaccug

SEQ ID NO: 2373115 - RNA, 23 nt, Human
uggcugggacguggcucagccag

SEQ ID NO: 2373116 - RNA, 19 nt, Human
uggcugggacguggcucag

SEQ ID NO: 2373117 - RNA, 15 nt, Human
uggcugggacguggc

SEQ ID NO: 2373118 - RNA, 15 nt, Human
uggcugggaacucac

SEQ ID NO: 2373119 - RNA, 23 nt, Human
uggcugggaacucaccuggggcu

SEQ ID NO: 2373120 - RNA, 17 nt, Human
uggcugggaacugcaga

SEQ ID NO: 2373121 - RNA, 22 nt, Human
uggcuuccuaaaauucagugga

SEQ ID NO: 2373122 - RNA, 22 nt, Human
uggcuucccgcucagcccuccc

SEQ ID NO: 2373123 - RNA, 17 nt, Human
uggcuugccacagcucu

SEQ ID NO: 2373124 - RNA, 15 nt, Human
uggcugggcccagaa

SEQ ID NO: 2373125 - RNA, 18 nt, Human
uggcuucccgcucagccc

SEQ ID NO: 2373126 - RNA, 19 nt, Human
uggcuucccgcucagcccu

SEQ ID NO: 2373127 - RNA, 20 nt, Human
uggcuucccgcucagcccuc

SEQ ID NO: 2373128 - RNA, 21 nt, Human
uggcuucccgcucagcccucc

SEQ ID NO: 2373129 - RNA, 18 nt, Human
uggccuugaaaccaccuu

SEQ ID NO: 2373130 - RNA, 18 nt, Human
uggccucugcaaaggaaa

SEQ ID NO: 2373131 - RNA, 13 nt, Human
uggccucugcacu

SEQ ID NO: 2373132 - RNA, 23 nt, Human
uggccuucggccuccauccugag

SEQ ID NO: 2373133 - RNA, 20 nt, Human
uggccuucggccuccauccu

SEQ ID NO: 2373134 - RNA, 22 nt, Human
uggccuucggccuccauccuga

SEQ ID NO: 2373135 - RNA, 15 nt, Human
uggcuccagucugcu

SEQ ID NO: 2373136 - RNA, 15 nt, Human
uggcuccaggccagg

SEQ ID NO: 2373137 - RNA, 23 nt, Human
uggcuccagucugcugcccucca

SEQ ID NO: 2373138 - RNA, 20 nt, Human
uggcuccagucugcugcccu

SEQ ID NO: 2373139 - RNA, 19 nt, Human
uggcuccagucugcugccc

SEQ ID NO: 2373140 - RNA, 20 nt, Human
uggcuccauugguguugaca

SEQ ID NO: 2373141 - RNA, 17 nt, Human
uggcuccagcuggccgg

SEQ ID NO: 2373142 - RNA, 23 nt, Human
uggcuccagaugcagggcaguca

SEQ ID NO: 2373143 - RNA, 13 nt, Human
uggcuccagcacc

SEQ ID NO: 2373144 - RNA, 21 nt, Human
uggcuccagcaccauccgcca

SEQ ID NO: 2373145 - RNA, 15 nt, Human
uggcuccagaaaugu

SEQ ID NO: 2373146 - RNA, 20 nt, Human
uggcuccagaaaugucuaaa

SEQ ID NO: 2373147 - RNA, 21 nt, Human
uggcuccagaugcagggcagu

SEQ ID NO: 2373148 - RNA, 20 nt, Human
uggcuccagaugcagggcag

SEQ ID NO: 2373149 - RNA, 23 nt, Human
uggcuccccucuauuuagcauga

SEQ ID NO: 2373150 - RNA, 23 nt, Human
uggcucccaugaccauacugagg

SEQ ID NO: 2373151 - RNA, 17 nt, Human
uggcucccauucacucu

SEQ ID NO: 2373152 - RNA, 18 nt, Human
uggcucccauucacucuu

SEQ ID NO: 2373153 - RNA, 14 nt, Human
uggcuccccucuau

SEQ ID NO: 2373154 - RNA, 13 nt, Human
uggcuccccucua

SEQ ID NO: 2373155 - RNA, 14 nt, Human
uggcucccucuugg

SEQ ID NO: 2373156 - RNA, 16 nt, Human
uggcuccuaucugugu

SEQ ID NO: 2373157 - RNA, 19 nt, Human
uggcuccgaacacccucga

SEQ ID NO: 2373158 - RNA, 21 nt, Human
uggcuccccucuauuuagcau

SEQ ID NO: 2373159 - RNA, 20 nt, Human
uggcucccggagggcccuga

SEQ ID NO: 2373160 - RNA, 11 nt, Human
uggcugcugaa

SEQ ID NO: 2373161 - RNA, 18 nt, Human
uggcuccuaucuguguuu

SEQ ID NO: 2373162 - RNA, 12 nt, Human
uggcugcugaag

SEQ ID NO: 2373163 - RNA, 15 nt, Human
uggcugcugaagcug

SEQ ID NO: 2373164 - RNA, 21 nt, Human
uggcugcugaagcugccugcu

SEQ ID NO: 2373165 - RNA, 13 nt, Human
uggcugcugaagg

SEQ ID NO: 2373166 - RNA, 14 nt, Human
uggcugcugaaggc

SEQ ID NO: 2373167 - RNA, 16 nt, Human
uggcugcugaaggcuc

SEQ ID NO: 2373168 - RNA, 13 nt, Human
uggggcagcacag

SEQ ID NO: 2373169 - RNA, 14 nt, Human
uggggcagcacaga

SEQ ID NO: 2373170 - RNA, 19 nt, Human
uggggcaagucccugacuc

SEQ ID NO: 2373171 - RNA, 18 nt, Human
uggggcaagauuuuccuu

SEQ ID NO: 2373172 - RNA, 12 nt, Human
uggggcaaggcu

SEQ ID NO: 2373173 - RNA, 22 nt, Human
uggggcagcacagagagggggc

SEQ ID NO: 2373174 - RNA, 16 nt, Human
uggggcagcacagaga

SEQ ID NO: 2373175 - RNA, 18 nt, Human
uggggcagcacagagagg

SEQ ID NO: 2373176 - RNA, 13 nt, Human
uggggcagcuuga

SEQ ID NO: 2373177 - RNA, 17 nt, Human
uggggauuucucccagc

SEQ ID NO: 2373178 - RNA, 15 nt, Human
uggggauuucuccca

SEQ ID NO: 2373179 - RNA, 17 nt, Human
ugggccugcuuccuguc

SEQ ID NO: 2373180 - RNA, 22 nt, Human
ugggcuuggggaccagagcugc

SEQ ID NO: 2373181 - RNA, 21 nt, Human
ugggcuugucuguagauuuua

SEQ ID NO: 2373182 - RNA, 17 nt, Human
ugggcuugucuguagau

SEQ ID NO: 2373183 - RNA, 23 nt, Human
ugggcuuggggaccagagcugcc

SEQ ID NO: 2373184 - RNA, 23 nt, Human
ugggccucaaggacuugaaagca

SEQ ID NO: 2373185 - RNA, 20 nt, Human
ugggccuccucacaacaugg

SEQ ID NO: 2373186 - RNA, 13 nt, Human
ugggccuccucac

SEQ ID NO: 2373187 - RNA, 16 nt, Human
ugggccucugguuugg

SEQ ID NO: 2373188 - RNA, 21 nt, Human
ugggccucugguuuggggcga

SEQ ID NO: 2373189 - RNA, 21 nt, Human
ugggccucuuggaaaaaguga

SEQ ID NO: 2373190 - RNA, 13 nt, Human
ugggccugcagaa

SEQ ID NO: 2373191 - RNA, 15 nt, Human
ugggccugcuccaga

SEQ ID NO: 2373192 - RNA, 14 nt, Human
ugggccugcuccag

SEQ ID NO: 2373193 - RNA, 20 nt, Human
ugggccugcuccagaccuga

SEQ ID NO: 2373194 - RNA, 19 nt, Human
ugggccugcuccagaccug

SEQ ID NO: 2373195 - RNA, 18 nt, Human
ugggccugcuccagaccu

SEQ ID NO: 2373196 - RNA, 16 nt, Human
ugggccugcuccagac

SEQ ID NO: 2373197 - RNA, 22 nt, Human
ugggcuucaguggcagcugcuu

SEQ ID NO: 2373198 - RNA, 21 nt, Human
ugggcuucaguggcagcugcu

SEQ ID NO: 2373199 - RNA, 22 nt, Human
ugggcuucauccuccucagauc

SEQ ID NO: 2373200 - RNA, 13 nt, Human
ugggccugcuucc

SEQ ID NO: 2373201 - RNA, 14 nt, Human
ugggccugcuuccu

SEQ ID NO: 2373202 - RNA, 15 nt, Human
ugggccugcuuccug

SEQ ID NO: 2373203 - RNA, 15 nt, Human
ugggcuucauccucc

SEQ ID NO: 2373204 - RNA, 14 nt, Human
uggggccacacaga

SEQ ID NO: 2373205 - RNA, 13 nt, Human
uggggccagaucc

SEQ ID NO: 2373206 - RNA, 17 nt, Human
uggggccacacagaaac

SEQ ID NO: 2373207 - RNA, 18 nt, Human
uggggccagauccagccu

SEQ ID NO: 2373208 - RNA, 16 nt, Human
uggggccagauccagc

SEQ ID NO: 2373209 - RNA, 15 nt, Human
uggggccagauccag

SEQ ID NO: 2373210 - RNA, 14 nt, Human
uggggccagaucca

SEQ ID NO: 2373211 - RNA, 17 nt, Human
uggggccaggcuggguc

SEQ ID NO: 2373212 - RNA, 20 nt, Human
uggggccagauccagccugg

SEQ ID NO: 2373213 - RNA, 19 nt, Human
uggggccagauccagccug

SEQ ID NO: 2373214 - RNA, 17 nt, Human
ugggggcagagggcaga

SEQ ID NO: 2373215 - RNA, 22 nt, Human
ugggggcaggagggcccuaccu

SEQ ID NO: 2373216 - RNA, 17 nt, Human
ugggggcagggcaugac

SEQ ID NO: 2373217 - RNA, 18 nt, Human
ugggggcagagggcagag

SEQ ID NO: 2373218 - RNA, 21 nt, Human
uggggccagauccagccuggg

SEQ ID NO: 2373219 - RNA, 16 nt, Human
ugggggccaugagcuc

SEQ ID NO: 2373220 - RNA, 13 nt, Human
ugggggccaugag

SEQ ID NO: 2373221 - RNA, 16 nt, Human
ugggggccucagugcc

SEQ ID NO: 2373222 - RNA, 14 nt, Human
ugggggccuggauu

SEQ ID NO: 2373223 - RNA, 17 nt, Human
uggggggccaacaccag

SEQ ID NO: 2373224 - RNA, 15 nt, Human
uggggggccaacacc

SEQ ID NO: 2373225 - RNA, 17 nt, Human
uggggggcuucauacac

SEQ ID NO: 2373226 - RNA, 19 nt, Human
uggggggcugaggugggag

SEQ ID NO: 2373227 - RNA, 16 nt, Human
ugggggcuggugccag

SEQ ID NO: 2373228 - RNA, 13 nt, Human
ugggggcuggugc

SEQ ID NO: 2373229 - RNA, 15 nt, Human
ugggggcuggugcca

SEQ ID NO: 2373230 - RNA, 20 nt, Human
ugggguucguggaaagggug

SEQ ID NO: 2373231 - RNA, 16 nt, Human
ugggguugcaaccacu

SEQ ID NO: 2373232 - RNA, 14 nt, Human
ugggguucguggaa

SEQ ID NO: 2373233 - RNA, 22 nt, Human
ugggguucagccccuccucugc

SEQ ID NO: 2373234 - RNA, 21 nt, Human
ugggguucagccccuccucug

SEQ ID NO: 2373235 - RNA, 19 nt, Human
ugggguucagccccuccuc

SEQ ID NO: 2373236 - RNA, 17 nt, Human
ugggguucagccccucc

SEQ ID NO: 2373237 - RNA, 15 nt, Human
ugggguucagccccu

SEQ ID NO: 2373238 - RNA, 14 nt, Human
ugggguucagcccc

SEQ ID NO: 2373239 - RNA, 21 nt, Human
ugggguguguuccaacugccc

SEQ ID NO: 2373240 - RNA, 19 nt, Human
ugggguuaucucuguguua

SEQ ID NO: 2373241 - RNA, 15 nt, Human
uggggugugggaggc

SEQ ID NO: 2373242 - RNA, 18 nt, Human
ugggguuaucucuguguu

SEQ ID NO: 2373243 - RNA, 13 nt, Human
uggggugugcugg

SEQ ID NO: 2373244 - RNA, 15 nt, Human
uggggugugcuggga

SEQ ID NO: 2373245 - RNA, 21 nt, Human
uggggggccaacaccagggau

SEQ ID NO: 2373246 - RNA, 15 nt, Human
ugggguggguauaaa

SEQ ID NO: 2373247 - RNA, 19 nt, Human
ugggguggguauaaaagau

SEQ ID NO: 2373248 - RNA, 16 nt, Human
ugggcaggaccucaga

SEQ ID NO: 2373249 - RNA, 17 nt, Human
ugggcaggacucagcuc

SEQ ID NO: 2373250 - RNA, 18 nt, Human
ugggcaggacucagcucc

SEQ ID NO: 2373251 - RNA, 21 nt, Human
ugggcaggacucagcucccca

SEQ ID NO: 2373252 - RNA, 13 nt, Human
ugggcaggaccuc

SEQ ID NO: 2373253 - RNA, 23 nt, Human
ugggcaggaagugaagagauccu

SEQ ID NO: 2373254 - RNA, 13 nt, Human
ugggcaggaaaag

SEQ ID NO: 2373255 - RNA, 10 nt, Human
ugggcagcuc

SEQ ID NO: 2373256 - RNA, 19 nt, Human
ugggcagcucaucucuguc

SEQ ID NO: 2373257 - RNA, 19 nt, Human
ugggcagcgcccuuccucu

SEQ ID NO: 2373258 - RNA, 20 nt, Human
ugggcagcgcccuuccucuc

SEQ ID NO: 2373259 - RNA, 21 nt, Human
ugggcagcgcccuuccucucc

SEQ ID NO: 2373260 - RNA, 22 nt, Human
ugggcagcuaccauuucccuuu

SEQ ID NO: 2373261 - RNA, 16 nt, Human
ugggccucaaggacuu

SEQ ID NO: 2373262 - RNA, 14 nt, Human
ugggccgcugccac

SEQ ID NO: 2373263 - RNA, 21 nt, Human
ugggccggcuucaugccagcu

SEQ ID NO: 2373264 - RNA, 13 nt, Human
ugggcccuuugag

SEQ ID NO: 2373265 - RNA, 13 nt, Human
ugggccgcugcca

SEQ ID NO: 2373266 - RNA, 14 nt, Human
ugggcccugggcug

SEQ ID NO: 2373267 - RNA, 16 nt, Human
ugggcccugggcugga

SEQ ID NO: 2373268 - RNA, 17 nt, Human
ugggcccugggcuggaa

SEQ ID NO: 2373269 - RNA, 22 nt, Human
ugggcaggacucagcuccccag

SEQ ID NO: 2373270 - RNA, 16 nt, Human
ugggcagccaggcugc

SEQ ID NO: 2373271 - RNA, 13 nt, Human
ugggcagcgcccu

SEQ ID NO: 2373272 - RNA, 17 nt, Human
ugggcagcgcccuuccu

SEQ ID NO: 2373273 - RNA, 15 nt, Human
ugggcagccaggcug

SEQ ID NO: 2373274 - RNA, 14 nt, Human
ugggcagccaggcu

SEQ ID NO: 2373275 - RNA, 18 nt, Human
ugggcagcauagcaagac

SEQ ID NO: 2373276 - RNA, 16 nt, Human
ugggcagcauagcaag

SEQ ID NO: 2373277 - RNA, 14 nt, Human
ugggauggaggaga

SEQ ID NO: 2373278 - RNA, 16 nt, Human
ugggauggaggagaag

SEQ ID NO: 2373279 - RNA, 13 nt, Human
ugggauggaggag

SEQ ID NO: 2373280 - RNA, 20 nt, Human
ugggaugcuugccuagggcc

SEQ ID NO: 2373281 - RNA, 17 nt, Human
ugggaugguggagggcc

SEQ ID NO: 2373282 - RNA, 16 nt, Human
ugggaugguggagggc

SEQ ID NO: 2373283 - RNA, 14 nt, Human
ugggcagagcagag

SEQ ID NO: 2373284 - RNA, 15 nt, Human
ugggcagagcagaga

SEQ ID NO: 2373285 - RNA, 17 nt, Human
ugggcagagcagagacc

SEQ ID NO: 2373286 - RNA, 16 nt, Human
ugggaggaucucuuga

SEQ ID NO: 2373287 - RNA, 21 nt, Human
ugggaaugaagcuuguguauc

SEQ ID NO: 2373288 - RNA, 15 nt, Human
ugggaaugaagcuug

SEQ ID NO: 2373289 - RNA, 18 nt, Human
ugggaaugaagcuugugu

SEQ ID NO: 2373290 - RNA, 19 nt, Human
ugggaaugaagcuugugua

SEQ ID NO: 2373291 - RNA, 20 nt, Human
ugggaaugaagcuuguguau

SEQ ID NO: 2373292 - RNA, 14 nt, Human
ugggacagggagga

SEQ ID NO: 2373293 - RNA, 16 nt, Human
ugggaaugaaugucag

SEQ ID NO: 2373294 - RNA, 21 nt, Human
ugggaaugaaugucaguguga

SEQ ID NO: 2373295 - RNA, 14 nt, Human
ugggacacccugug

SEQ ID NO: 2373296 - RNA, 15 nt, Human
ugggacacccuguga

SEQ ID NO: 2373297 - RNA, 23 nt, Human
ugggauaaagaugcaaggaccag

SEQ ID NO: 2373298 - RNA, 20 nt, Human
ugggaguuuuguauucaucu

SEQ ID NO: 2373299 - RNA, 15 nt, Human
ugggaggagggagag

SEQ ID NO: 2373300 - RNA, 18 nt, Human
ugggaggagggagaggga

SEQ ID NO: 2373301 - RNA, 22 nt, Human
ugggaguugaucgccuuuccca

SEQ ID NO: 2373302 - RNA, 19 nt, Human
ugggaggagggagagggag

SEQ ID NO: 2373303 - RNA, 19 nt, Human
ugggaugcuugccuagggc

SEQ ID NO: 2373304 - RNA, 14 nt, Human
ugggaugcuugccu

SEQ ID NO: 2373305 - RNA, 16 nt, Human
ugggaugagccgcugu

SEQ ID NO: 2373306 - RNA, 18 nt, Human
ugggaugauuggaggggg

SEQ ID NO: 2373307 - RNA, 16 nt, Human
ugggauacugcagggc

SEQ ID NO: 2373308 - RNA, 21 nt, Human
ugggauaggaaaaaugaguaa

SEQ ID NO: 2373309 - RNA, 13 nt, Human
ugggauaggaaaa

SEQ ID NO: 2373310 - RNA, 19 nt, Human
ugggaugagaguuuuggau

SEQ ID NO: 2373311 - RNA, 23 nt, Human
ugggaucugccccucccugcuuc

SEQ ID NO: 2373312 - RNA, 19 nt, Human
ugggaucugccccucccug

SEQ ID NO: 2373313 - RNA, 20 nt, Human
ugggauauaagaggcagcgu

SEQ ID NO: 2373314 - RNA, 17 nt, Human
ugucacagggacugaaa

SEQ ID NO: 2373315 - RNA, 13 nt, Human
ugucacaggcagg

SEQ ID NO: 2373316 - RNA, 20 nt, Human
ugucacaugaaacauuugca

SEQ ID NO: 2373317 - RNA, 11 nt, Human
ugucacagggc

SEQ ID NO: 2373318 - RNA, 12 nt, Human
ugucacagggcc

SEQ ID NO: 2373319 - RNA, 13 nt, Human
ugucacagggcca

SEQ ID NO: 2373320 - RNA, 14 nt, Human
ugucacagggccaa

SEQ ID NO: 2373321 - RNA, 21 nt, Human
ugucacugguagaccaaaaua

SEQ ID NO: 2373322 - RNA, 12 nt, Human
ugucacuguggu

SEQ ID NO: 2373323 - RNA, 15 nt, Human
ugucacugugguccu

SEQ ID NO: 2373324 - RNA, 23 nt, Human
ugucacugguagaccaaaauaaa

SEQ ID NO: 2373325 - RNA, 13 nt, Human
ugucacuggcugc

SEQ ID NO: 2373326 - RNA, 14 nt, Human
ugucacuggcugcc

SEQ ID NO: 2373327 - RNA, 16 nt, Human
ugucacuggcugccuc

SEQ ID NO: 2373328 - RNA, 17 nt, Human
ugucacuggcugccucc

SEQ ID NO: 2373329 - RNA, 18 nt, Human
ugucacuggcugccucca

SEQ ID NO: 2373330 - RNA, 19 nt, Human
ugucacuggcugccuccac

SEQ ID NO: 2373331 - RNA, 21 nt, Human
ugucacuggcugccuccacuc

SEQ ID NO: 2373332 - RNA, 22 nt, Human
ugucacuggcugccuccacucc

SEQ ID NO: 2373333 - RNA, 15 nt, Human
ugucacaggcagguc

SEQ ID NO: 2373334 - RNA, 16 nt, Human
ugucacaggcaggucc

SEQ ID NO: 2373335 - RNA, 17 nt, Human
ugucacaggcaggucca

SEQ ID NO: 2373336 - RNA, 21 nt, Human
ugucacaggcagguccagggu

SEQ ID NO: 2373337 - RNA, 18 nt, Human
ugucacuguuucucugcu

SEQ ID NO: 2373338 - RNA, 14 nt, Human
ugucacuuacuguu

SEQ ID NO: 2373339 - RNA, 21 nt, Human
ugucacuuacuguuucuguca

SEQ ID NO: 2373340 - RNA, 17 nt, Human
ugucacuguuucucugc

SEQ ID NO: 2373341 - RNA, 13 nt, Human
ugucacuguuucu

SEQ ID NO: 2373342 - RNA, 22 nt, Human
ugucacuucgcgugcccucgcu

SEQ ID NO: 2373343 - RNA, 14 nt, Human
ugucacuuugcucu

SEQ ID NO: 2373344 - RNA, 15 nt, Human
ugucacuuugcucug

SEQ ID NO: 2373345 - RNA, 15 nt, Human
ugucagugugacuga

SEQ ID NO: 2373346 - RNA, 14 nt, Human
ugucagugugacug

SEQ ID NO: 2373347 - RNA, 16 nt, Human
ugucagugugacugau

SEQ ID NO: 2373348 - RNA, 19 nt, Human
ugucagugugacugaucuc

SEQ ID NO: 2373349 - RNA, 21 nt, Human
ugucaucagccaccauccuau

SEQ ID NO: 2373350 - RNA, 15 nt, Human
ugucaucagccacca

SEQ ID NO: 2373351 - RNA, 18 nt, Human
ugucaucagccaccaucc

SEQ ID NO: 2373352 - RNA, 16 nt, Human
ugucacuuugcucugg

SEQ ID NO: 2373353 - RNA, 17 nt, Human
ugucacuuugcucuggg

SEQ ID NO: 2373354 - RNA, 18 nt, Human
ugucaucauuguauauau

SEQ ID NO: 2373355 - RNA, 19 nt, Human
ugucaucauuguauauaug

SEQ ID NO: 2373356 - RNA, 22 nt, Human
ugucaucauuguauauaugugu

SEQ ID NO: 2373357 - RNA, 12 nt, Human
uguaugcuggac

SEQ ID NO: 2373358 - RNA, 18 nt, Human
uguauggaaauaaaugua

SEQ ID NO: 2373359 - RNA, 17 nt, Human
uguauggaauacagugu

SEQ ID NO: 2373360 - RNA, 16 nt, Human
uguauggaauacagug

SEQ ID NO: 2373361 - RNA, 23 nt, Human
uguauggaaauaaauguaucaua

SEQ ID NO: 2373362 - RNA, 19 nt, Human
uguauggaauacaguguua

SEQ ID NO: 2373363 - RNA, 18 nt, Human
uguauggaauacaguguu

SEQ ID NO: 2373364 - RNA, 17 nt, Human
uguauggagagaaaaca

SEQ ID NO: 2373365 - RNA, 14 nt, Human
uguaugggcaaaaa

SEQ ID NO: 2373366 - RNA, 16 nt, Human
uguauggauaguaaaa

SEQ ID NO: 2373367 - RNA, 21 nt, Human
uguauggauaguaaaauucua

SEQ ID NO: 2373368 - RNA, 14 nt, Human
uguauguaaaugug

SEQ ID NO: 2373369 - RNA, 15 nt, Human
uguauguaaaugugc

SEQ ID NO: 2373370 - RNA, 22 nt, Human
uguauguaaaugugcauucuuu

SEQ ID NO: 2373371 - RNA, 10 nt, Human
uguauguaaa

SEQ ID NO: 2373372 - RNA, 23 nt, Human
uguauggguguguguuuguguga

SEQ ID NO: 2373373 - RNA, 15 nt, Human
uguaugguucugugc

SEQ ID NO: 2373374 - RNA, 15 nt, Human
uguaugggcaaaaaa

SEQ ID NO: 2373375 - RNA, 20 nt, Human
uguaugccaagugagaagau

SEQ ID NO: 2373376 - RNA, 12 nt, Human
uguaugccuuua

SEQ ID NO: 2373377 - RNA, 21 nt, Human
uguaugccuuuaaaucuguga

SEQ ID NO: 2373378 - RNA, 18 nt, Human
uguaugccaagugagaag

SEQ ID NO: 2373379 - RNA, 16 nt, Human
uguaugccaagugaga

SEQ ID NO: 2373380 - RNA, 13 nt, Human
uguaugcgugugu

SEQ ID NO: 2373381 - RNA, 22 nt, Human
uguaugccuuuaaaucugugau

SEQ ID NO: 2373382 - RNA, 23 nt, Human
uguaugccuuuaaaucugugaug

SEQ ID NO: 2373383 - RNA, 19 nt, Human
uguaugcuucauacaggga

SEQ ID NO: 2373384 - RNA, 16 nt, Human
uguaugcuucauacag

SEQ ID NO: 2373385 - RNA, 14 nt, Human
uguaugcuucauac

SEQ ID NO: 2373386 - RNA, 13 nt, Human
uguaugcuucaua

SEQ ID NO: 2373387 - RNA, 21 nt, Human
ugucacaauccuaacacauua

SEQ ID NO: 2373388 - RNA, 19 nt, Human
ugucacaauccuaacacau

SEQ ID NO: 2373389 - RNA, 14 nt, Human
ugucacaauccuaa

SEQ ID NO: 2373390 - RNA, 13 nt, Human
ugucacacacuuu

SEQ ID NO: 2373391 - RNA, 14 nt, Human
ugucacaggcaggu

SEQ ID NO: 2373392 - RNA, 21 nt, Human
ugucaauuacaggaaguacug

SEQ ID NO: 2373393 - RNA, 19 nt, Human
ugucaauuucccugacucc

SEQ ID NO: 2373394 - RNA, 23 nt, Human
ugucaauuucccugacuccucua

SEQ ID NO: 2373395 - RNA, 15 nt, Human
ugucaauuucugugu

SEQ ID NO: 2373396 - RNA, 16 nt, Human
ugucaauuucuguguu

SEQ ID NO: 2373397 - RNA, 12 nt, Human
uguauguauaau

SEQ ID NO: 2373398 - RNA, 14 nt, Human
uguauuuguuugca

SEQ ID NO: 2373399 - RNA, 15 nt, Human
uguauuuguuugcau

SEQ ID NO: 2373400 - RNA, 14 nt, Human
uguauuuuaacuca

SEQ ID NO: 2373401 - RNA, 15 nt, Human
uguauuuuaacucau

SEQ ID NO: 2373402 - RNA, 19 nt, Human
uguauuuuacuaauaaaau

SEQ ID NO: 2373403 - RNA, 18 nt, Human
uguauuuuaaaagaauga

SEQ ID NO: 2373404 - RNA, 19 nt, Human
uguauuuuaaaagaaugau

SEQ ID NO: 2373405 - RNA, 21 nt, Human
uguauaguacuggcaugguac

SEQ ID NO: 2373406 - RNA, 19 nt, Human
uguaucuaugcauuuucug

SEQ ID NO: 2373407 - RNA, 17 nt, Human
uguaucucugaagcaug

SEQ ID NO: 2373408 - RNA, 18 nt, Human
uguaucucugaagcaugu

SEQ ID NO: 2373409 - RNA, 19 nt, Human
uguaucucugaagcauguu

SEQ ID NO: 2373410 - RNA, 21 nt, Human
uguaucucugaagcauguuuc

SEQ ID NO: 2373411 - RNA, 22 nt, Human
uguaucucugaagcauguuuca

SEQ ID NO: 2373412 - RNA, 13 nt, Human
uguaucugagcag

SEQ ID NO: 2373413 - RNA, 17 nt, Human
uguaucugcaggcagac

SEQ ID NO: 2373414 - RNA, 18 nt, Human
uguaucugcaggcagaca

SEQ ID NO: 2373415 - RNA, 19 nt, Human
uguaucugcaggcagacac

SEQ ID NO: 2373416 - RNA, 20 nt, Human
uguaucugcaggcagacacg

SEQ ID NO: 2373417 - RNA, 18 nt, Human
uguaucugaaggagauuu

SEQ ID NO: 2373418 - RNA, 23 nt, Human
uguaucucugaagcauguuucau

SEQ ID NO: 2373419 - RNA, 22 nt, Human
uguaucugaaggagauuuuccu

SEQ ID NO: 2373420 - RNA, 20 nt, Human
uguaucugauagcucuuugg

SEQ ID NO: 2373421 - RNA, 21 nt, Human
uguaucuugggggacagggcu

SEQ ID NO: 2373422 - RNA, 21 nt, Human
uguaucugcaggcagacacgg

SEQ ID NO: 2373423 - RNA, 22 nt, Human
uguaucugcaggcagacacgga

SEQ ID NO: 2373424 - RNA, 22 nt, Human
uguaugaaagauggcugugccu

SEQ ID NO: 2373425 - RNA, 21 nt, Human
uguaugacuaaagagagaaug

SEQ ID NO: 2373426 - RNA, 17 nt, Human
uguaugacugcacauga

SEQ ID NO: 2373427 - RNA, 20 nt, Human
uguaugacuaaagagagaau

SEQ ID NO: 2373428 - RNA, 16 nt, Human
uguaugacuaaagaga

SEQ ID NO: 2373429 - RNA, 16 nt, Human
uguaugacugcacaug

SEQ ID NO: 2373430 - RNA, 15 nt, Human
uguaugacuaaagag

SEQ ID NO: 2373431 - RNA, 14 nt, Human
uguaugacuaaaga

SEQ ID NO: 2373432 - RNA, 22 nt, Human
uguaucuugggggacagggcug

SEQ ID NO: 2373433 - RNA, 19 nt, Human
uguauagaugcaagauauu

SEQ ID NO: 2373434 - RNA, 20 nt, Human
uguauagaugcaagauauuu

SEQ ID NO: 2373435 - RNA, 23 nt, Human
uguauaguaaagugauaauuucu

SEQ ID NO: 2373436 - RNA, 15 nt, Human
uguauaguacuggca

SEQ ID NO: 2373437 - RNA, 16 nt, Human
uguauagguagauguu

SEQ ID NO: 2373438 - RNA, 14 nt, Human
uguauaaguaagaa

SEQ ID NO: 2373439 - RNA, 18 nt, Human
uguauagaugcaagauau

SEQ ID NO: 2373440 - RNA, 18 nt, Human
uguauaaauaggagagga

SEQ ID NO: 2373441 - RNA, 21 nt, Human
uguauaaaucuuucuuuugau

SEQ ID NO: 2373442 - RNA, 13 nt, Human
uguauaaagaaca

SEQ ID NO: 2373443 - RNA, 14 nt, Human
uguauaaauaggag

SEQ ID NO: 2373444 - RNA, 19 nt, Human
uguauaaagcaacuguuau

SEQ ID NO: 2373445 - RNA, 23 nt, Human
uguauaaagcaacuguuaugaaa

SEQ ID NO: 2373446 - RNA, 14 nt, Human
uguauaaauuuauu

SEQ ID NO: 2373447 - RNA, 14 nt, Human
uguauaacagguua

SEQ ID NO: 2373448 - RNA, 15 nt, Human
uguauaacagguuau

SEQ ID NO: 2373449 - RNA, 17 nt, Human
uguauaacagguuauuu

SEQ ID NO: 2373450 - RNA, 21 nt, Human
uguauaacagguuauuuuagu

SEQ ID NO: 2373451 - RNA, 18 nt, Human
uguauaacuucuuaaaag

SEQ ID NO: 2373452 - RNA, 21 nt, Human
uguauaacuucuuaaaaguug

SEQ ID NO: 2373453 - RNA, 22 nt, Human
uguauaagauuagaaugaaaau

SEQ ID NO: 2373454 - RNA, 19 nt, Human
uguacagaugaaugauaaa

SEQ ID NO: 2373455 - RNA, 23 nt, Human
uguacagcaaggagauuuacaac

SEQ ID NO: 2373456 - RNA, 15 nt, Human
uguagcuuugcucuu

SEQ ID NO: 2373457 - RNA, 13 nt, Human
uguagcuuugcuc

SEQ ID NO: 2373458 - RNA, 12 nt, Human
uguagcuuugcu

SEQ ID NO: 2373459 - RNA, 22 nt, Human
uguacagcaaggagauuuacaa

SEQ ID NO: 2373460 - RNA, 21 nt, Human
uguacagagcccacgccccca

SEQ ID NO: 2373461 - RNA, 12 nt, Human
uguacagagccc

SEQ ID NO: 2373462 - RNA, 19 nt, Human
uguaggaagaguagcauuu

SEQ ID NO: 2373463 - RNA, 21 nt, Human
uguaggaagaguagcauuuca

SEQ ID NO: 2373464 - RNA, 23 nt, Human
uguaggaagaguagcauuucauu

SEQ ID NO: 2373465 - RNA, 19 nt, Human
uguaguguuggagaagaac

SEQ ID NO: 2373466 - RNA, 20 nt, Human
uguaguguuggagaagaacu

SEQ ID NO: 2373467 - RNA, 21 nt, Human
uguaguguuggagaagaacug

SEQ ID NO: 2373468 - RNA, 14 nt, Human
uguauaaaaucagc

SEQ ID NO: 2373469 - RNA, 16 nt, Human
uguauaaaaucagcca

SEQ ID NO: 2373470 - RNA, 14 nt, Human
uguauaaaauaauu

SEQ ID NO: 2373471 - RNA, 13 nt, Human
uguauaaaauaau

SEQ ID NO: 2373472 - RNA, 17 nt, Human
uguccuccaagccagcg

SEQ ID NO: 2373473 - RNA, 23 nt, Human
uguccuccaacaccaagcacagc

SEQ ID NO: 2373474 - RNA, 17 nt, Human
uguccuccagaagccuc

SEQ ID NO: 2373475 - RNA, 16 nt, Human
uguccuccagaagccu

SEQ ID NO: 2373476 - RNA, 21 nt, Human
uguccuccagaagccucuggc

SEQ ID NO: 2373477 - RNA, 20 nt, Human
uguccuccagaagccucugg

SEQ ID NO: 2373478 - RNA, 19 nt, Human
uguccuccagaagccucug

SEQ ID NO: 2373479 - RNA, 18 nt, Human
uguccuccagaagccucu

SEQ ID NO: 2373480 - RNA, 14 nt, Human
uguccucaccacau

SEQ ID NO: 2373481 - RNA, 20 nt, Human
uguccucacggugccuuuuu

SEQ ID NO: 2373482 - RNA, 22 nt, Human
uguccucacggugccuuuuuuc

SEQ ID NO: 2373483 - RNA, 14 nt, Human
uguccucacugcuc

SEQ ID NO: 2373484 - RNA, 15 nt, Human
uguccucacugcucc

SEQ ID NO: 2373485 - RNA, 14 nt, Human
uguccucagcagcu

SEQ ID NO: 2373486 - RNA, 19 nt, Human
uguccucacugcucccuga

SEQ ID NO: 2373487 - RNA, 22 nt, Human
uguccucacugcucccugaagc

SEQ ID NO: 2373488 - RNA, 13 nt, Human
uguccucccaucc

SEQ ID NO: 2373489 - RNA, 23 nt, Human
uguccuccagaagccucuggcua

SEQ ID NO: 2373490 - RNA, 22 nt, Human
uguccuccagaagccucuggcu

SEQ ID NO: 2373491 - RNA, 14 nt, Human
uguccuccccuugg

SEQ ID NO: 2373492 - RNA, 23 nt, Human
uguccucccauccccuggacugg

SEQ ID NO: 2373493 - RNA, 17 nt, Human
uguccucccauccccug

SEQ ID NO: 2373494 - RNA, 18 nt, Human
uguccucccauccccugg

SEQ ID NO: 2373495 - RNA, 19 nt, Human
uguccucccauccccugga

SEQ ID NO: 2373496 - RNA, 22 nt, Human
uguccucccauccccuggacug

SEQ ID NO: 2373497 - RNA, 17 nt, Human
uguccugaccugucuca

SEQ ID NO: 2373498 - RNA, 21 nt, Human
uguccugacuucaggggcugc

SEQ ID NO: 2373499 - RNA, 22 nt, Human
uguccugacuucaggggcugcc

SEQ ID NO: 2373500 - RNA, 16 nt, Human
uguccugaccacccuc

SEQ ID NO: 2373501 - RNA, 17 nt, Human
uguccugaccacccucc

SEQ ID NO: 2373502 - RNA, 19 nt, Human
uguccugaccacccucccc

SEQ ID NO: 2373503 - RNA, 20 nt, Human
uguccugaccacccuccccu

SEQ ID NO: 2373504 - RNA, 21 nt, Human
uguccugaccacccuccccuc

SEQ ID NO: 2373505 - RNA, 22 nt, Human
uguccugaccacccuccccucu

SEQ ID NO: 2373506 - RNA, 23 nt, Human
uguccugaccacccuccccucuc

SEQ ID NO: 2373507 - RNA, 13 nt, Human
ugucaucucagcu

SEQ ID NO: 2373508 - RNA, 17 nt, Human
uguccccgcacugggcu

SEQ ID NO: 2373509 - RNA, 19 nt, Human
uguccccgcacugggcuug

SEQ ID NO: 2373510 - RNA, 23 nt, Human
uguccccuauggggaugguccac

SEQ ID NO: 2373511 - RNA, 16 nt, Human
uguccccggccucagc

SEQ ID NO: 2373512 - RNA, 13 nt, Human
uguccccuauccu

SEQ ID NO: 2373513 - RNA, 15 nt, Human
ugucaucucagugcu

SEQ ID NO: 2373514 - RNA, 20 nt, Human
uguccuaggaguauccucau

SEQ ID NO: 2373515 - RNA, 18 nt, Human
uguccccuccacugucac

SEQ ID NO: 2373516 - RNA, 13 nt, Human
uguccccucagcu

SEQ ID NO: 2373517 - RNA, 14 nt, Human
uguccccucagcuc

SEQ ID NO: 2373518 - RNA, 22 nt, Human
uguccuaugggagucaagugug

SEQ ID NO: 2373519 - RNA, 12 nt, Human
ugucuacagaga

SEQ ID NO: 2373520 - RNA, 19 nt, Human
ugucuacagagaaccugga

SEQ ID NO: 2373521 - RNA, 22 nt, Human
ugucuacacuaagagagaauga

SEQ ID NO: 2373522 - RNA, 19 nt, Human
ugucuaauguauuuuauug

SEQ ID NO: 2373523 - RNA, 17 nt, Human
ugucuacacuaagagag

SEQ ID NO: 2373524 - RNA, 14 nt, Human
ugucuaaugaaacc

SEQ ID NO: 2373525 - RNA, 20 nt, Human
uguccuggugcucucugcca

SEQ ID NO: 2373526 - RNA, 22 nt, Human
ugucuaaggucacacaguauua

SEQ ID NO: 2373527 - RNA, 13 nt, Human
ugucuaauguauu

SEQ ID NO: 2373528 - RNA, 17 nt, Human
ugucuaauguauuuuau

SEQ ID NO: 2373529 - RNA, 18 nt, Human
ugucuaauguauuuuauu

SEQ ID NO: 2373530 - RNA, 17 nt, Human
uguccugggccugcaga

SEQ ID NO: 2373531 - RNA, 10 nt, Human
uguccugggc

SEQ ID NO: 2373532 - RNA, 11 nt, Human
uguccugggcg

SEQ ID NO: 2373533 - RNA, 15 nt, Human
uguccugggccugca

SEQ ID NO: 2373534 - RNA, 14 nt, Human
uguccugggccugc

SEQ ID NO: 2373535 - RNA, 16 nt, Human
uguccugggcgcccug

SEQ ID NO: 2373536 - RNA, 17 nt, Human
uguccugggcgcccugg

SEQ ID NO: 2373537 - RNA, 18 nt, Human
uguccugggcgcccugga

SEQ ID NO: 2373538 - RNA, 13 nt, Human
uguccugggcugg

SEQ ID NO: 2373539 - RNA, 17 nt, Human
uguccugggcugguggc

SEQ ID NO: 2373540 - RNA, 13 nt, Human
uguccuggugcuc

SEQ ID NO: 2373541 - RNA, 16 nt, Human
uguccuggugcucucu

SEQ ID NO: 2373542 - RNA, 19 nt, Human
uguccuggugcucucugcc

SEQ ID NO: 2373543 - RNA, 12 nt, Human
uguccugggagu

SEQ ID NO: 2373544 - RNA, 14 nt, Human
uguccugcuccaca

SEQ ID NO: 2373545 - RNA, 15 nt, Human
uguccugcuccacag

SEQ ID NO: 2373546 - RNA, 16 nt, Human
uguccugcuccacagu

SEQ ID NO: 2373547 - RNA, 17 nt, Human
uguccugcuccacagug

SEQ ID NO: 2373548 - RNA, 18 nt, Human
uguccugcuccacagugu

SEQ ID NO: 2373549 - RNA, 12 nt, Human
uguccugcuggu

SEQ ID NO: 2373550 - RNA, 19 nt, Human
uguccugggagugagcugg

SEQ ID NO: 2373551 - RNA, 20 nt, Human
uguccugggagugagcuggu

SEQ ID NO: 2373552 - RNA, 22 nt, Human
uguccugccuaaggcugaacuu

SEQ ID NO: 2373553 - RNA, 19 nt, Human
uguccugccugucugaagc

SEQ ID NO: 2373554 - RNA, 19 nt, Human
uguccugauggucagcucc

SEQ ID NO: 2373555 - RNA, 20 nt, Human
uguccugauggucagcuccc

SEQ ID NO: 2373556 - RNA, 21 nt, Human
uguccugauggucagcucccu

SEQ ID NO: 2373557 - RNA, 18 nt, Human
uguccugauggucagcuc

SEQ ID NO: 2373558 - RNA, 21 nt, Human
ugucugagugaaccuguauaa

SEQ ID NO: 2373559 - RNA, 20 nt, Human
ugucugagugaaccuguaua

SEQ ID NO: 2373560 - RNA, 17 nt, Human
ugucugagugaaccugu

SEQ ID NO: 2373561 - RNA, 16 nt, Human
ugucugaucugugcuu

SEQ ID NO: 2373562 - RNA, 15 nt, Human
ugucugaucugugcu

SEQ ID NO: 2373563 - RNA, 20 nt, Human
ugucugaucugugcuuucca

SEQ ID NO: 2373564 - RNA, 23 nt, Human
ugucugaucugugcuuuccagcu

SEQ ID NO: 2373565 - RNA, 19 nt, Human
ugucugauuggcucaccca

SEQ ID NO: 2373566 - RNA, 16 nt, Human
ugucugcacccagggg

SEQ ID NO: 2373567 - RNA, 20 nt, Human
ugucugaagucacugcacag

SEQ ID NO: 2373568 - RNA, 15 nt, Human
ugucugagugaaccu

SEQ ID NO: 2373569 - RNA, 14 nt, Human
ugucugagugaacc

SEQ ID NO: 2373570 - RNA, 18 nt, Human
ugucugagcccucaaagu

SEQ ID NO: 2373571 - RNA, 20 nt, Human
ugucugagcccucaaaguga

SEQ ID NO: 2373572 - RNA, 18 nt, Human
ugucugagaguuuaguug

SEQ ID NO: 2373573 - RNA, 16 nt, Human
ugucugagaugcuggu

SEQ ID NO: 2373574 - RNA, 17 nt, Human
ugucugagcccucaaag

SEQ ID NO: 2373575 - RNA, 12 nt, Human
ugucugugugca

SEQ ID NO: 2373576 - RNA, 21 nt, Human
ugucugugugcaagugugugc

SEQ ID NO: 2373577 - RNA, 11 nt, Human
ugucugugcua

SEQ ID NO: 2373578 - RNA, 21 nt, Human
ugucugugcuagggaaacuuc

SEQ ID NO: 2373579 - RNA, 13 nt, Human
ugucuguucuaca

SEQ ID NO: 2373580 - RNA, 19 nt, Human
ugucuguuaccaugucacu

SEQ ID NO: 2373581 - RNA, 22 nt, Human
ugucuguuaccaugucacugug

SEQ ID NO: 2373582 - RNA, 11 nt, Human
ugucuguuaca

SEQ ID NO: 2373583 - RNA, 12 nt, Human
ugucuguuacac

SEQ ID NO: 2373584 - RNA, 17 nt, Human
ugucuguuacacuggag

SEQ ID NO: 2373585 - RNA, 14 nt, Human
ugucugcacccagg

SEQ ID NO: 2373586 - RNA, 15 nt, Human
ugucugcacccaggg

SEQ ID NO: 2373587 - RNA, 12 nt, Human
ugucuuaauuaa

SEQ ID NO: 2373588 - RNA, 23 nt, Human
ugucuuuggacccugaggcccag

SEQ ID NO: 2373589 - RNA, 19 nt, Human
ugucuuuguuggaaaagaa

SEQ ID NO: 2373590 - RNA, 16 nt, Human
ugucuuuucuugcaug

SEQ ID NO: 2373591 - RNA, 14 nt, Human
ugucuuaaugaagu

SEQ ID NO: 2373592 - RNA, 15 nt, Human
ugucuuaaugaaguu

SEQ ID NO: 2373593 - RNA, 18 nt, Human
ugucuuaaugaaguuuga

SEQ ID NO: 2373594 - RNA, 19 nt, Human
ugucuuaaugaaguuugaa

SEQ ID NO: 2373595 - RNA, 20 nt, Human
ugucuuaaugaaguuugaau

SEQ ID NO: 2373596 - RNA, 21 nt, Human
ugucuuaaugaaguuugaaug

SEQ ID NO: 2373597 - RNA, 22 nt, Human
ugucuuaaugaaguuugaaugu

SEQ ID NO: 2373598 - RNA, 21 nt, Human
ugucuguucuacauagaugcu

SEQ ID NO: 2373599 - RNA, 15 nt, Human
ugucuguucuacaua

SEQ ID NO: 2373600 - RNA, 23 nt, Human
ugucuguuaccaugucacugugg

SEQ ID NO: 2373601 - RNA, 16 nt, Human
ugucuguuuguucucu

SEQ ID NO: 2373602 - RNA, 17 nt, Human
ugucuaggcaggaccug

SEQ ID NO: 2373603 - RNA, 19 nt, Human
ugucuaggcaggaccugug

SEQ ID NO: 2373604 - RNA, 14 nt, Human
ugucuagagaggga

SEQ ID NO: 2373605 - RNA, 14 nt, Human
ugucuagaguagcu

SEQ ID NO: 2373606 - RNA, 15 nt, Human
ugucuaguuguuuga

SEQ ID NO: 2373607 - RNA, 23 nt, Human
ugucuaguuguuugauucagaca

SEQ ID NO: 2373608 - RNA, 22 nt, Human
ugucuauaaucccagcacuuug

SEQ ID NO: 2373609 - RNA, 14 nt, Human
ugucuaugggacuc

SEQ ID NO: 2373610 - RNA, 15 nt, Human
ugucuaugggacuca

SEQ ID NO: 2373611 - RNA, 16 nt, Human
ugucuaugggacucaa

SEQ ID NO: 2373612 - RNA, 15 nt, Human
ugucucagccuccca

SEQ ID NO: 2373613 - RNA, 14 nt, Human
ugucucagccuccc

SEQ ID NO: 2373614 - RNA, 16 nt, Human
ugucucagccuccuga

SEQ ID NO: 2373615 - RNA, 13 nt, Human
ugucucagccucc

SEQ ID NO: 2373616 - RNA, 17 nt, Human
ugucucacugaaacauu

SEQ ID NO: 2373617 - RNA, 15 nt, Human
ugucuauuucugcug

SEQ ID NO: 2373618 - RNA, 18 nt, Human
ugucuauuucugcugaau

SEQ ID NO: 2373619 - RNA, 14 nt, Human
ugucuauucuccag

SEQ ID NO: 2373620 - RNA, 13 nt, Human
ugucuauuucugc

SEQ ID NO: 2373621 - RNA, 14 nt, Human
ugucuauuucugcu

SEQ ID NO: 2373622 - RNA, 14 nt, Human
ugucuauucagcuu

SEQ ID NO: 2373623 - RNA, 13 nt, Human
ugucuauucagcu

SEQ ID NO: 2373624 - RNA, 18 nt, Human
ugucuauuaccuguuagu

SEQ ID NO: 2373625 - RNA, 19 nt, Human
ugucuauucaaaauaucaa

SEQ ID NO: 2373626 - RNA, 21 nt, Human
ugucucaaaaaaagaaaaaga

SEQ ID NO: 2373627 - RNA, 17 nt, Human
ugucucaagagggcacu

SEQ ID NO: 2373628 - RNA, 18 nt, Human
ugucucaagagggcacug

SEQ ID NO: 2373629 - RNA, 23 nt, Human
uggugggaggggcgcccaccucc

SEQ ID NO: 2373630 - RNA, 21 nt, Human
uggugggaggggcgcccaccu

SEQ ID NO: 2373631 - RNA, 22 nt, Human
uggugggaggggcgcccaccuc

SEQ ID NO: 2373632 - RNA, 23 nt, Human
uggugggccaacaaagaacacua

SEQ ID NO: 2373633 - RNA, 20 nt, Human
uggugggccaacaaagaaca

SEQ ID NO: 2373634 - RNA, 13 nt, Human
ugguggggagggg

SEQ ID NO: 2373635 - RNA, 15 nt, Human
ugguggggaggggcg

SEQ ID NO: 2373636 - RNA, 20 nt, Human
ugguggggaggggcgcuggc

SEQ ID NO: 2373637 - RNA, 21 nt, Human
ugguggggaggggcgcuggcc

SEQ ID NO: 2373638 - RNA, 22 nt, Human
ugguggggaggggcgcuggccc

SEQ ID NO: 2373639 - RNA, 23 nt, Human
ugguggggaggggcgcuggccca

SEQ ID NO: 2373640 - RNA, 18 nt, Human
uggugggggccucggugu

SEQ ID NO: 2373641 - RNA, 16 nt, Human
uggugggggccucggu

SEQ ID NO: 2373642 - RNA, 21 nt, Human
uggugggaagcgucuguccgu

SEQ ID NO: 2373643 - RNA, 12 nt, Human
uggugggagggg

SEQ ID NO: 2373644 - RNA, 21 nt, Human
ugguggcucccggagggcccu

SEQ ID NO: 2373645 - RNA, 13 nt, Human
ugguggcuuugca

SEQ ID NO: 2373646 - RNA, 17 nt, Human
ugguggcgcaagccugu

SEQ ID NO: 2373647 - RNA, 13 nt, Human
ugguggcuggguu

SEQ ID NO: 2373648 - RNA, 16 nt, Human
ugguggcgcaagccug

SEQ ID NO: 2373649 - RNA, 21 nt, Human
ugguggccucugccccgucuc

SEQ ID NO: 2373650 - RNA, 21 nt, Human
ugguggcccgacagccuggca

SEQ ID NO: 2373651 - RNA, 15 nt, Human
uggugguaucugagu

SEQ ID NO: 2373652 - RNA, 17 nt, Human
uggugguaacccuggug

SEQ ID NO: 2373653 - RNA, 15 nt, Human
ugguggucuguuggc

SEQ ID NO: 2373654 - RNA, 21 nt, Human
ugguggguucaggggacucag

SEQ ID NO: 2373655 - RNA, 19 nt, Human
ugguggguucaggggacuc

SEQ ID NO: 2373656 - RNA, 16 nt, Human
uggugguaacccuggu

SEQ ID NO: 2373657 - RNA, 21 nt, Human
ugguggggguagagcugaucc

SEQ ID NO: 2373658 - RNA, 17 nt, Human
ugguggggguagagcug

SEQ ID NO: 2373659 - RNA, 18 nt, Human
ugguggggguagagcuga

SEQ ID NO: 2373660 - RNA, 23 nt, Human
uggugggguguguuccaacugcc

SEQ ID NO: 2373661 - RNA, 16 nt, Human
ugguggguccaugggc

SEQ ID NO: 2373662 - RNA, 18 nt, Human
ugguggguccaugggcag

SEQ ID NO: 2373663 - RNA, 17 nt, Human
ugguggguccaugggca

SEQ ID NO: 2373664 - RNA, 13 nt, Human
ugguguaauaaga

SEQ ID NO: 2373665 - RNA, 17 nt, Human
uggugguuucacggugc

SEQ ID NO: 2373666 - RNA, 14 nt, Human
uggugguugcuguu

SEQ ID NO: 2373667 - RNA, 19 nt, Human
uggugguuuucuguucuuu

SEQ ID NO: 2373668 - RNA, 18 nt, Human
uggugguuucagaaaugu

SEQ ID NO: 2373669 - RNA, 17 nt, Human
uggugguuucagaaaug

SEQ ID NO: 2373670 - RNA, 14 nt, Human
uggugcaaauccua

SEQ ID NO: 2373671 - RNA, 14 nt, Human
uggugcaaugaccu

SEQ ID NO: 2373672 - RNA, 19 nt, Human
uggugcaaugaccuuucaa

SEQ ID NO: 2373673 - RNA, 20 nt, Human
uggugcaaugaccuuucaau

SEQ ID NO: 2373674 - RNA, 20 nt, Human
ugguggcagugggagcugcc

SEQ ID NO: 2373675 - RNA, 19 nt, Human
ugguggcccgacagccugg

SEQ ID NO: 2373676 - RNA, 13 nt, Human
ugguggcaguggg

SEQ ID NO: 2373677 - RNA, 18 nt, Human
ugguggcagugggagcug

SEQ ID NO: 2373678 - RNA, 23 nt, Human
uggugagaacuacucagggaaug

SEQ ID NO: 2373679 - RNA, 22 nt, Human
uggugagaacuacucagggaau

SEQ ID NO: 2373680 - RNA, 14 nt, Human
uggugagaggcauc

SEQ ID NO: 2373681 - RNA, 18 nt, Human
ugggguuggcugggccca

SEQ ID NO: 2373682 - RNA, 14 nt, Human
uggguagacacaca

SEQ ID NO: 2373683 - RNA, 20 nt, Human
uggguacuuguggacacagc

SEQ ID NO: 2373684 - RNA, 23 nt, Human
uggguacuuguggacacagcucu

SEQ ID NO: 2373685 - RNA, 20 nt, Human
ugguuccggaauccuguccu

SEQ ID NO: 2373686 - RNA, 12 nt, Human
ugguuccucccc

SEQ ID NO: 2373687 - RNA, 23 nt, Human
ugguuccuccccuccuccuggac

SEQ ID NO: 2373688 - RNA, 18 nt, Human
ugguuccuccccuccucc

SEQ ID NO: 2373689 - RNA, 14 nt, Human
ugguucuauuuaau

SEQ ID NO: 2373690 - RNA, 16 nt, Human
ugguucuauuuaaugg

SEQ ID NO: 2373691 - RNA, 15 nt, Human
ugguucuaauagaac

SEQ ID NO: 2373692 - RNA, 17 nt, Human
ugguuccuuucucagcc

SEQ ID NO: 2373693 - RNA, 23 nt, Human
ugguuccccuguucacucuacuu

SEQ ID NO: 2373694 - RNA, 18 nt, Human
ugguucccguuucuccac

SEQ ID NO: 2373695 - RNA, 20 nt, Human
ugguucccguuucuccaccu

SEQ ID NO: 2373696 - RNA, 16 nt, Human
ugguucccuugaugaa

SEQ ID NO: 2373697 - RNA, 17 nt, Human
ugguucccuugaugaag

SEQ ID NO: 2373698 - RNA, 20 nt, Human
ugguucccuugaugaagaag

SEQ ID NO: 2373699 - RNA, 18 nt, Human
ugguucugugucuguguu

SEQ ID NO: 2373700 - RNA, 19 nt, Human
ugguucuuaguucucacug

SEQ ID NO: 2373701 - RNA, 21 nt, Human
ugguucuugguagagauucau

SEQ ID NO: 2373702 - RNA, 12 nt, Human
ugguucuggggc

SEQ ID NO: 2373703 - RNA, 13 nt, Human
ugguucugugcca

SEQ ID NO: 2373704 - RNA, 12 nt, Human
ugguucuggcca

SEQ ID NO: 2373705 - RNA, 20 nt, Human
ugguucugaugaugugccug

SEQ ID NO: 2373706 - RNA, 11 nt, Human
ugguucucauc

SEQ ID NO: 2373707 - RNA, 13 nt, Human
ugguucucaucuu

SEQ ID NO: 2373708 - RNA, 17 nt, Human
ugguucucaucuuucuu

SEQ ID NO: 2373709 - RNA, 14 nt, Human
ugguucucaucuuu

SEQ ID NO: 2373710 - RNA, 15 nt, Human
ugguucucaucuuuc

SEQ ID NO: 2373711 - RNA, 18 nt, Human
ugguugaugaucuuugca

SEQ ID NO: 2373712 - RNA, 15 nt, Human
ugguugacuggguuu

SEQ ID NO: 2373713 - RNA, 12 nt, Human
ugguugaggaaa

SEQ ID NO: 2373714 - RNA, 15 nt, Human
ugguugagguggaag

SEQ ID NO: 2373715 - RNA, 17 nt, Human
ugguugagaaaugaaua

SEQ ID NO: 2373716 - RNA, 22 nt, Human
ugguugagguggaagcccuccu

SEQ ID NO: 2373717 - RNA, 19 nt, Human
ugguucuuguauuaagaau

SEQ ID NO: 2373718 - RNA, 18 nt, Human
ugguucuuguauuaagaa

SEQ ID NO: 2373719 - RNA, 14 nt, Human
ugguucuuguauua

SEQ ID NO: 2373720 - RNA, 18 nt, Human
ugguugaauaaacuagau

SEQ ID NO: 2373721 - RNA, 12 nt, Human
ugguugaauaaa

SEQ ID NO: 2373722 - RNA, 16 nt, Human
ugguugaaaauaaaaa

SEQ ID NO: 2373723 - RNA, 16 nt, Human
ugguucauaaaugaau

SEQ ID NO: 2373724 - RNA, 13 nt, Human
ugguucauaaaug

SEQ ID NO: 2373725 - RNA, 15 nt, Human
ugguucauaaaugaa

SEQ ID NO: 2373726 - RNA, 13 nt, Human
ugguuccaagccc

SEQ ID NO: 2373727 - RNA, 16 nt, Human
ugguucauuaauucua

SEQ ID NO: 2373728 - RNA, 16 nt, Human
ugguuccagccugcca

SEQ ID NO: 2373729 - RNA, 15 nt, Human
ugguuccagccugcc

SEQ ID NO: 2373730 - RNA, 18 nt, Human
uggugucgggcaugacac

SEQ ID NO: 2373731 - RNA, 19 nt, Human
uggugucgggcaugacacg

SEQ ID NO: 2373732 - RNA, 11 nt, Human
ugguuccccug

SEQ ID NO: 2373733 - RNA, 18 nt, Human
ugguuccccuguucacuc

SEQ ID NO: 2373734 - RNA, 19 nt, Human
ugguuccccuguucacucu

SEQ ID NO: 2373735 - RNA, 20 nt, Human
ugguuccccuguucacucua

SEQ ID NO: 2373736 - RNA, 13 nt, Human
ugguuccaugccu

SEQ ID NO: 2373737 - RNA, 15 nt, Human
ugguuccaugccuga

SEQ ID NO: 2373738 - RNA, 17 nt, Human
ugguuccaugccugagg

SEQ ID NO: 2373739 - RNA, 19 nt, Human
ugguuccaugccugagggu

SEQ ID NO: 2373740 - RNA, 22 nt, Human
ugguuccaugccugagggugga

SEQ ID NO: 2373741 - RNA, 21 nt, Human
ugguuccauuguuuggagaca

SEQ ID NO: 2373742 - RNA, 23 nt, Human
ugguuccauuguuuggagacauu

SEQ ID NO: 2373743 - RNA, 12 nt, Human
ugguuccagggu

SEQ ID NO: 2373744 - RNA, 16 nt, Human
ugguuccaagcccugg

SEQ ID NO: 2373745 - RNA, 17 nt, Human
ugguuccaagcccugga

SEQ ID NO: 2373746 - RNA, 21 nt, Human
ugguuccagggucccucugug

SEQ ID NO: 2373747 - RNA, 22 nt, Human
ugguuccagggucccucugugu

SEQ ID NO: 2373748 - RNA, 19 nt, Human
ugguguccuuucccuccac

SEQ ID NO: 2373749 - RNA, 21 nt, Human
ugguguccugaccacccuccc

SEQ ID NO: 2373750 - RNA, 18 nt, Human
uggugucgcgccuucucc

SEQ ID NO: 2373751 - RNA, 21 nt, Human
uggugucgcgccuucuccccc

SEQ ID NO: 2373752 - RNA, 15 nt, Human
ugguguccugaccac

SEQ ID NO: 2373753 - RNA, 17 nt, Human
ugguguccugaccaccc

SEQ ID NO: 2373754 - RNA, 19 nt, Human
ugguguccugaccacccuc

SEQ ID NO: 2373755 - RNA, 20 nt, Human
ugguguccugaccacccucc

SEQ ID NO: 2373756 - RNA, 15 nt, Human
uggugucgggcauga

SEQ ID NO: 2373757 - RNA, 17 nt, Human
ugguguccaccuggccc

SEQ ID NO: 2373758 - RNA, 15 nt, Human
ugguguccaccuggc

SEQ ID NO: 2373759 - RNA, 14 nt, Human
ugguguccaccugg

SEQ ID NO: 2373760 - RNA, 13 nt, Human
ugguguccaccug

SEQ ID NO: 2373761 - RNA, 14 nt, Human
ugguguccugacca

SEQ ID NO: 2373762 - RNA, 18 nt, Human
ugguguccaccuggcccc

SEQ ID NO: 2373763 - RNA, 16 nt, Human
uggugucacuuacugu

SEQ ID NO: 2373764 - RNA, 17 nt, Human
uggugucacuuacuguu

SEQ ID NO: 2373765 - RNA, 18 nt, Human
uggugucacuuacuguuu

SEQ ID NO: 2373766 - RNA, 20 nt, Human
uggugucacuuacuguuucu

SEQ ID NO: 2373767 - RNA, 16 nt, Human
uggugucaccugaaga

SEQ ID NO: 2373768 - RNA, 19 nt, Human
ugguguaguugaacugaua

SEQ ID NO: 2373769 - RNA, 23 nt, Human
ugguguauccccccccuguauag

SEQ ID NO: 2373770 - RNA, 19 nt, Human
ugguguaauaagacauaac

SEQ ID NO: 2373771 - RNA, 14 nt, Human
ugguguaauaagac

SEQ ID NO: 2373772 - RNA, 15 nt, Human
ugguguaauaagaca

SEQ ID NO: 2373773 - RNA, 16 nt, Human
ugguguaauaagacau

SEQ ID NO: 2373774 - RNA, 17 nt, Human
ugguguaauaagacaua

SEQ ID NO: 2373775 - RNA, 17 nt, Human
uguaaauuuaugugaug

SEQ ID NO: 2373776 - RNA, 14 nt, Human
uguaacaagccacc

SEQ ID NO: 2373777 - RNA, 23 nt, Human
uguaaacucaaaauauuuguaca

SEQ ID NO: 2373778 - RNA, 15 nt, Human
uguaaacugugcacc

SEQ ID NO: 2373779 - RNA, 14 nt, Human
uguaaacugugcac

SEQ ID NO: 2373780 - RNA, 18 nt, Human
uguaaacuguguauucca

SEQ ID NO: 2373781 - RNA, 22 nt, Human
uguaaacucaaaacuuaacaua

SEQ ID NO: 2373782 - RNA, 14 nt, Human
uguaaacuguguau

SEQ ID NO: 2373783 - RNA, 13 nt, Human
uguaaacugugua

SEQ ID NO: 2373784 - RNA, 23 nt, Human
uguaacacagcugagagacuuuu

SEQ ID NO: 2373785 - RNA, 20 nt, Human
uguaacacagcugagagacu

SEQ ID NO: 2373786 - RNA, 21 nt, Human
uguaacacagcugagagacuu

SEQ ID NO: 2373787 - RNA, 16 nt, Human
uguaacacaagccaca

SEQ ID NO: 2373788 - RNA, 20 nt, Human
uguaacacaagccacagaag

SEQ ID NO: 2373789 - RNA, 21 nt, Human
uguaacacaagccacagaagc

SEQ ID NO: 2373790 - RNA, 24 nt, Human
uguaacacaagccacagaagccag

SEQ ID NO: 2373791 - RNA, 15 nt, Human
uguaacacaagccac

SEQ ID NO: 2373792 - RNA, 17 nt, Human
uguaacaagccacccca

SEQ ID NO: 2373793 - RNA, 20 nt, Human
uguaaauuuuguaugaaaaa

SEQ ID NO: 2373794 - RNA, 16 nt, Human
uguaacacuuuacaau

SEQ ID NO: 2373795 - RNA, 18 nt, Human
uguaacacuuuacaaugu

SEQ ID NO: 2373796 - RNA, 20 nt, Human
uguaacacuuuacaauguuc

SEQ ID NO: 2373797 - RNA, 13 nt, Human
uguaacagaaagg

SEQ ID NO: 2373798 - RNA, 17 nt, Human
uguaacagaaagggcaa

SEQ ID NO: 2373799 - RNA, 22 nt, Human
uguaacagaaagggcaacaaua

SEQ ID NO: 2373800 - RNA, 23 nt, Human
uguaacagaaagggcaacaauaa

SEQ ID NO: 2373801 - RNA, 13 nt, Human
uguaacagacauu

SEQ ID NO: 2373802 - RNA, 15 nt, Human
uguaacagacauugu

SEQ ID NO: 2373803 - RNA, 16 nt, Human
uguaacagacauuguu

SEQ ID NO: 2373804 - RNA, 18 nt, Human
uguaacagccaggagugu

SEQ ID NO: 2373805 - RNA, 12 nt, Human
uguaacagcucc

SEQ ID NO: 2373806 - RNA, 13 nt, Human
uguaacagcuccu

SEQ ID NO: 2373807 - RNA, 14 nt, Human
uguaacagcuccuu

SEQ ID NO: 2373808 - RNA, 16 nt, Human
uguaacagcuccuugg

SEQ ID NO: 2373809 - RNA, 17 nt, Human
uguaacagcuccuuggg

SEQ ID NO: 2373810 - RNA, 21 nt, Human
uguaacaggucuccucuuaaa

SEQ ID NO: 2373811 - RNA, 20 nt, Human
uguaacaggucuccucuuaa

SEQ ID NO: 2373812 - RNA, 18 nt, Human
uguaacaggucuccucuu

SEQ ID NO: 2373813 - RNA, 15 nt, Human
uguaacagcugaggu

SEQ ID NO: 2373814 - RNA, 14 nt, Human
uguaacagcugagg

SEQ ID NO: 2373815 - RNA, 11 nt, Human
uguaacagcug

SEQ ID NO: 2373816 - RNA, 18 nt, Human
uguaacagcuccuuggga

SEQ ID NO: 2373817 - RNA, 22 nt, Human
uguaacagcuccuugggaggaa

SEQ ID NO: 2373818 - RNA, 22 nt, Human
uguaacaggucuccucuuaaaa

SEQ ID NO: 2373819 - RNA, 14 nt, Human
uguaacagucugau

SEQ ID NO: 2373820 - RNA, 17 nt, Human
uguaacauacuggccug

SEQ ID NO: 2373821 - RNA, 11 nt, Human
uguaacaugua

SEQ ID NO: 2373822 - RNA, 16 nt, Human
uguaacagucugaucg

SEQ ID NO: 2373823 - RNA, 20 nt, Human
uguaaccgauucaucucuca

SEQ ID NO: 2373824 - RNA, 22 nt, Human
uguaaccgauucaucucucaga

SEQ ID NO: 2373825 - RNA, 12 nt, Human
uguaaccucagc

SEQ ID NO: 2373826 - RNA, 14 nt, Human
uguaaccucagcuc

SEQ ID NO: 2373827 - RNA, 15 nt, Human
uguaaccucagcucu

SEQ ID NO: 2373828 - RNA, 16 nt, Human
uguaaccucagcucug

SEQ ID NO: 2373829 - RNA, 18 nt, Human
uguaaccucagcucuggg

SEQ ID NO: 2373830 - RNA, 19 nt, Human
uguaaccucagcucuggga

SEQ ID NO: 2373831 - RNA, 23 nt, Human
uguaaccucagcucugggagagg

SEQ ID NO: 2373832 - RNA, 15 nt, Human
uguaauaaauaugag

SEQ ID NO: 2373833 - RNA, 14 nt, Human
uguaauaacuguga

SEQ ID NO: 2373834 - RNA, 22 nt, Human
uguaauaacugugaaguuuaca

SEQ ID NO: 2373835 - RNA, 14 nt, Human
uguaauaaauauga

SEQ ID NO: 2373836 - RNA, 12 nt, Human
uguaauaagaca

SEQ ID NO: 2373837 - RNA, 13 nt, Human
uguaauaagacau

SEQ ID NO: 2373838 - RNA, 14 nt, Human
uguaauaagacaua

SEQ ID NO: 2373839 - RNA, 18 nt, Human
uguaauaagacauaacgu

SEQ ID NO: 2373840 - RNA, 13 nt, Human
uguaauaauguga

SEQ ID NO: 2373841 - RNA, 15 nt, Human
uguaauaagacauaa

SEQ ID NO: 2373842 - RNA, 11 nt, Human
uguaaugaaaa

SEQ ID NO: 2373843 - RNA, 12 nt, Human
uguaaugaaaac

SEQ ID NO: 2373844 - RNA, 13 nt, Human
uguaaugaaaacc

SEQ ID NO: 2373845 - RNA, 17 nt, Human
uguaaugaaaaccacau

SEQ ID NO: 2373846 - RNA, 20 nt, Human
uguacacugaauauuuauau

SEQ ID NO: 2373847 - RNA, 12 nt, Human
uguacacuuuuu

SEQ ID NO: 2373848 - RNA, 21 nt, Human
uguacacugaauauuuauauu

SEQ ID NO: 2373849 - RNA, 19 nt, Human
uguacacugaauauuuaua

SEQ ID NO: 2373850 - RNA, 17 nt, Human
uguacacugaauauuua

SEQ ID NO: 2373851 - RNA, 16 nt, Human
uguacacugaauauuu

SEQ ID NO: 2373852 - RNA, 15 nt, Human
uguacacugaauauu

SEQ ID NO: 2373853 - RNA, 14 nt, Human
uguacacugaauau

SEQ ID NO: 2373854 - RNA, 12 nt, Human
uguacacugaau

SEQ ID NO: 2373855 - RNA, 17 nt, Human
uguacacguguccugua

SEQ ID NO: 2373856 - RNA, 16 nt, Human
uguacacguguccugu

SEQ ID NO: 2373857 - RNA, 15 nt, Human
uguacacgggacuga

SEQ ID NO: 2373858 - RNA, 20 nt, Human
uguacacgggacugacgcaa

SEQ ID NO: 2373859 - RNA, 15 nt, Human
uguacaacuuaaguu

SEQ ID NO: 2373860 - RNA, 21 nt, Human
uguacaaauauaagaauaaaa

SEQ ID NO: 2373861 - RNA, 15 nt, Human
uguacaaauauaaga

SEQ ID NO: 2373862 - RNA, 18 nt, Human
uguacaaauauaagaaua

SEQ ID NO: 2373863 - RNA, 13 nt, Human
uguacacgggacu

SEQ ID NO: 2373864 - RNA, 14 nt, Human
uguacacgggacug

SEQ ID NO: 2373865 - RNA, 16 nt, Human
uguacaagaugaagga

SEQ ID NO: 2373866 - RNA, 16 nt, Human
uguaaugaaacaccuu

SEQ ID NO: 2373867 - RNA, 17 nt, Human
uguaaugaaacaccuuc

SEQ ID NO: 2373868 - RNA, 19 nt, Human
uguacaaauaaagucccag

SEQ ID NO: 2373869 - RNA, 20 nt, Human
uguacagacguaugcuuauu

SEQ ID NO: 2373870 - RNA, 19 nt, Human
uguacagacguaugcuuau

SEQ ID NO: 2373871 - RNA, 21 nt, Human
uguacagagaacuaacacuau

SEQ ID NO: 2373872 - RNA, 22 nt, Human
uguacagagaacuaacacuauu

SEQ ID NO: 2373873 - RNA, 18 nt, Human
uguacagacguaugcuua

SEQ ID NO: 2373874 - RNA, 17 nt, Human
uguacagacguaugcuu

SEQ ID NO: 2373875 - RNA, 11 nt, Human
uguacagagcc

SEQ ID NO: 2373876 - RNA, 21 nt, Human
uguacagaauucugcuaccuc

SEQ ID NO: 2373877 - RNA, 13 nt, Human
uguacacuuuuuu

SEQ ID NO: 2373878 - RNA, 18 nt, Human
uguacagaauucugcuac

SEQ ID NO: 2373879 - RNA, 14 nt, Human
uguacagacaacaa

SEQ ID NO: 2373880 - RNA, 23 nt, Human
uguaaaacaaaaauguaaugauc

SEQ ID NO: 2373881 - RNA, 20 nt, Human
uguaaaaauuggucacccua

SEQ ID NO: 2373882 - RNA, 22 nt, Human
uguaaaaagagagaaaacuuau

SEQ ID NO: 2373883 - RNA, 14 nt, Human
uguaaaaacugugg

SEQ ID NO: 2373884 - RNA, 24 nt, Human
uguaaaaacagcauugcuuucuga

SEQ ID NO: 2373885 - RNA, 23 nt, Human
uguaaaaacagcauugcuuucug

SEQ ID NO: 2373886 - RNA, 22 nt, Human
uguaaaaacagcauugcuuucu

SEQ ID NO: 2373887 - RNA, 20 nt, Human
uguaaaaacagcauugcuuu

SEQ ID NO: 2373888 - RNA, 19 nt, Human
uguaaaaacagcauugcuu

SEQ ID NO: 2373889 - RNA, 19 nt, Human
uguaaaaaaaaaugccuuu

SEQ ID NO: 2373890 - RNA, 16 nt, Human
uguaaaaccugucaau

SEQ ID NO: 2373891 - RNA, 18 nt, Human
uguaaaaccugucaauga

SEQ ID NO: 2373892 - RNA, 22 nt, Human
uguaaaacgagaauccacccau

SEQ ID NO: 2373893 - RNA, 16 nt, Human
uguaaaacugaggcac

SEQ ID NO: 2373894 - RNA, 15 nt, Human
uguaaaacugaggca

SEQ ID NO: 2373895 - RNA, 19 nt, Human
uguaaaagaacaguaaaca

SEQ ID NO: 2373896 - RNA, 14 nt, Human
uguaaaauaaaauu

SEQ ID NO: 2373897 - RNA, 23 nt, Human
uguaaaaggccaaaccucuguuc

SEQ ID NO: 2373898 - RNA, 22 nt, Human
uguaaaaggccaaaccucuguu

SEQ ID NO: 2373899 - RNA, 21 nt, Human
uguaaaaggccaaaccucugu

SEQ ID NO: 2373900 - RNA, 18 nt, Human
uguaaaauaagaaugauu

SEQ ID NO: 2373901 - RNA, 12 nt, Human
uguaaaauagcu

SEQ ID NO: 2373902 - RNA, 14 nt, Human
uguaaaauagcuug

SEQ ID NO: 2373903 - RNA, 17 nt, Human
uguaaaauagcuuguau

SEQ ID NO: 2373904 - RNA, 20 nt, Human
uguaaaauagcuuguauagu

SEQ ID NO: 2373905 - RNA, 21 nt, Human
uguaaaauagcuuguauagug

SEQ ID NO: 2373906 - RNA, 19 nt, Human
uguaaaauauuuugaauca

SEQ ID NO: 2373907 - RNA, 20 nt, Human
uguaaaauauuuugaaucaa

SEQ ID NO: 2373908 - RNA, 11 nt, Human
uguaaaauaua

SEQ ID NO: 2373909 - RNA, 18 nt, Human
uguaaaauauacuuaaau

SEQ ID NO: 2373910 - RNA, 19 nt, Human
uguaaaauauagcuguaca

SEQ ID NO: 2373911 - RNA, 21 nt, Human
uguaaaauauagcuguacaaa

SEQ ID NO: 2373912 - RNA, 18 nt, Human
uguaaacugcauuagaaa

SEQ ID NO: 2373913 - RNA, 20 nt, Human
uguaaacucaaaauauuugu

SEQ ID NO: 2373914 - RNA, 15 nt, Human
uguaaacucaaaaua

SEQ ID NO: 2373915 - RNA, 23 nt, Human
uguaaaccacaaggcuguugcau

SEQ ID NO: 2373916 - RNA, 19 nt, Human
uguaaaccugagucguaca

SEQ ID NO: 2373917 - RNA, 16 nt, Human
uguaaacucaaaacuu

SEQ ID NO: 2373918 - RNA, 21 nt, Human
uguaaacucaaaacuuaacau

SEQ ID NO: 2373919 - RNA, 12 nt, Human
uguaaaauggug

SEQ ID NO: 2373920 - RNA, 21 nt, Human
uguaaaaucuuggcacagaaa

SEQ ID NO: 2373921 - RNA, 21 nt, Human
uguaaaauauuuugaaucaau

SEQ ID NO: 2373922 - RNA, 22 nt, Human
uguaaaaucuuggcacagaaac

SEQ ID NO: 2373923 - RNA, 14 nt, Human
uguaaaaucuuucu

SEQ ID NO: 2373924 - RNA, 21 nt, Human
uguaaaaucuuucuuucuuag

SEQ ID NO: 2373925 - RNA, 13 nt, Human
uguaaaaucuuuc

SEQ ID NO: 2373926 - RNA, 15 nt, Human
uguaaaaugaaauua

SEQ ID NO: 2373927 - RNA, 14 nt, Human
uguaaaaugaaauu

SEQ ID NO: 2373928 - RNA, 22 nt, Human
uguaaaaucuuucuuucuuaga

SEQ ID NO: 2373929 - RNA, 23 nt, Human
uguaaaaucuuucuuucuuagaa

SEQ ID NO: 2373930 - RNA, 11 nt, Human
uguaaaauggu

SEQ ID NO: 2373931 - RNA, 16 nt, Human
ugguuuuucaguuuuc

SEQ ID NO: 2373932 - RNA, 17 nt, Human
ugguuuuuguagccuuc

SEQ ID NO: 2373933 - RNA, 22 nt, Human
ugguuuuuguagccuuccucca

SEQ ID NO: 2373934 - RNA, 15 nt, Human
ugguuuuuuuucuaa

SEQ ID NO: 2373935 - RNA, 13 nt, Human
uguaaaaaaaaaa

SEQ ID NO: 2373936 - RNA, 20 nt, Human
uguaaaaaaaaaaaaguuau

SEQ ID NO: 2373937 - RNA, 22 nt, Human
uguaaaaaaaaaaaaguuauau

SEQ ID NO: 2373938 - RNA, 18 nt, Human
uguaaaaaaaaaugccuu

SEQ ID NO: 2373939 - RNA, 23 nt, Human
ugguuuuuaaaaaacugcugacu

SEQ ID NO: 2373940 - RNA, 17 nt, Human
ugguuuuguuccccucc

SEQ ID NO: 2373941 - RNA, 20 nt, Human
ugguuuuguuccccuccucc

SEQ ID NO: 2373942 - RNA, 18 nt, Human
ugguuuuguaagaugcug

SEQ ID NO: 2373943 - RNA, 16 nt, Human
ugguuuuguuccccuc

SEQ ID NO: 2373944 - RNA, 19 nt, Human
ugguuuuguaagaugcugg

SEQ ID NO: 2373945 - RNA, 21 nt, Human
ugguuuuuaaaaaacugcuga

SEQ ID NO: 2373946 - RNA, 23 nt, Human
ugguugucauuuuugcaguagag

SEQ ID NO: 2373947 - RNA, 21 nt, Human
ugguuguuaguuauagauguc

SEQ ID NO: 2373948 - RNA, 22 nt, Human
ugguuguuaguuauagaugucu

SEQ ID NO: 2373949 - RNA, 19 nt, Human
ugguuuucuuguguguuua

SEQ ID NO: 2373950 - RNA, 15 nt, Human
ugguuggguccucac

SEQ ID NO: 2373951 - RNA, 22 nt, Human
ugguugguaacacaaauuuuca

SEQ ID NO: 2373952 - RNA, 16 nt, Human
ugguuggcuggccuuc

SEQ ID NO: 2373953 - RNA, 16 nt, Human
ugguuggagaauuuag

SEQ ID NO: 2373954 - RNA, 16 nt, Human
ugguuggagagcuaga

SEQ ID NO: 2373955 - RNA, 18 nt, Human
ugguugcuuuaauaucau

SEQ ID NO: 2373956 - RNA, 22 nt, Human
ugguugaguucagguagcugcc

SEQ ID NO: 2373957 - RNA, 15 nt, Human
ugguugauggguucu

SEQ ID NO: 2373958 - RNA, 13 nt, Human
ugguugcauccua

SEQ ID NO: 2373959 - RNA, 20 nt, Human
ugguugcacuuaugauuuca

SEQ ID NO: 2373960 - RNA, 17 nt, Human
ugguugccuuaaagaaa

SEQ ID NO: 2373961 - RNA, 18 nt, Human
ugguugccuuaaagaaag

SEQ ID NO: 2373962 - RNA, 19 nt, Human
ugguugcuguuuuccuccc

SEQ ID NO: 2373963 - RNA, 13 nt, Human
ugguugcugugug

SEQ ID NO: 2373964 - RNA, 14 nt, Human
ugguugcuuuaaua

SEQ ID NO: 2373965 - RNA, 16 nt, Human
ugguuuucuguucuuu

SEQ ID NO: 2373966 - RNA, 18 nt, Human
ugguuguauuagauguuc

SEQ ID NO: 2373967 - RNA, 11 nt, Human
ugguuguauuc

SEQ ID NO: 2373968 - RNA, 15 nt, Human
ugguuguauucuuug

SEQ ID NO: 2373969 - RNA, 16 nt, Human
ugguuguauucuuuga

SEQ ID NO: 2373970 - RNA, 17 nt, Human
ugguuguauucuuugau

SEQ ID NO: 2373971 - RNA, 15 nt, Human
ugguugucaauauua

SEQ ID NO: 2373972 - RNA, 17 nt, Human
ugguugucaauauuaaa

SEQ ID NO: 2373973 - RNA, 12 nt, Human
ugguuguauuag

SEQ ID NO: 2373974 - RNA, 14 nt, Human
ugguuguauuagau

SEQ ID NO: 2373975 - RNA, 16 nt, Human
ugguuguauuagaugu

SEQ ID NO: 2373976 - RNA, 20 nt, Human
ugguuguacauauaagugau

SEQ ID NO: 2373977 - RNA, 14 nt, Human
uccuauugcaaagg

SEQ ID NO: 2373978 - RNA, 20 nt, Human
uccuauucucaccaggaagg

SEQ ID NO: 2373979 - RNA, 16 nt, Human
uccuauucucgggcug

SEQ ID NO: 2373980 - RNA, 15 nt, Human
uccuauucucaccag

SEQ ID NO: 2373981 - RNA, 16 nt, Human
uccuauucucaccagg

SEQ ID NO: 2373982 - RNA, 17 nt, Human
uccuauucucaccagga

SEQ ID NO: 2373983 - RNA, 18 nt, Human
uccuauucucaccaggaa

SEQ ID NO: 2373984 - RNA, 20 nt, Human
uccucaucucuaacagcuca

SEQ ID NO: 2373985 - RNA, 12 nt, Human
uccucaucucua

SEQ ID NO: 2373986 - RNA, 22 nt, Human
uccucaucccguguucuccuuu

SEQ ID NO: 2373987 - RNA, 14 nt, Human
uccucaucccgugu

SEQ ID NO: 2373988 - RNA, 17 nt, Human
uccuauugucauuaaag

SEQ ID NO: 2373989 - RNA, 18 nt, Human
uccucauccagggcucug

SEQ ID NO: 2373990 - RNA, 17 nt, Human
uccucauuagcauuuug

SEQ ID NO: 2373991 - RNA, 23 nt, Human
uccucaucucuaacagcucagga

SEQ ID NO: 2373992 - RNA, 22 nt, Human
uccucaucucuaacagcucagg

SEQ ID NO: 2373993 - RNA, 19 nt, Human
uccucaucugggggagugg

SEQ ID NO: 2373994 - RNA, 20 nt, Human
uccucaucugggggagugga

SEQ ID NO: 2373995 - RNA, 21 nt, Human
uccucaucugggggaguggaa

SEQ ID NO: 2373996 - RNA, 18 nt, Human
uccuauauaguuuauuga

SEQ ID NO: 2373997 - RNA, 21 nt, Human
uccuaugugauuuuaacucug

SEQ ID NO: 2373998 - RNA, 13 nt, Human
uccuauaugcacu

SEQ ID NO: 2373999 - RNA, 22 nt, Human
uccuaugugauuuuaacucugu

SEQ ID NO: 2374000 - RNA, 23 nt, Human
uccuaugugauuuuaacucuguc

SEQ ID NO: 2374001 - RNA, 12 nt, Human
uccuauguguaa

SEQ ID NO: 2374002 - RNA, 18 nt, Human
uccuauguuuuuguucaa

SEQ ID NO: 2374003 - RNA, 19 nt, Human
uccuauguuuuuguucaaa

SEQ ID NO: 2374004 - RNA, 14 nt, Human
uccuauucaguucc

SEQ ID NO: 2374005 - RNA, 22 nt, Human
uccuauucaguucccagaauca

SEQ ID NO: 2374006 - RNA, 23 nt, Human
uccuauucaguucccagaaucaa

SEQ ID NO: 2374007 - RNA, 14 nt, Human
uccuauucuauugc

SEQ ID NO: 2374008 - RNA, 14 nt, Human
uccuauucucacca

SEQ ID NO: 2374009 - RNA, 18 nt, Human
uccuaguucuguagaaau

SEQ ID NO: 2374010 - RNA, 19 nt, Human
uccuaguucuguagaaaug

SEQ ID NO: 2374011 - RNA, 16 nt, Human
uccuaguucuguagaa

SEQ ID NO: 2374012 - RNA, 17 nt, Human
uccuaguucuguagaaa

SEQ ID NO: 2374013 - RNA, 22 nt, Human
uccuaguuccaccaucaagcca

SEQ ID NO: 2374014 - RNA, 19 nt, Human
uccuaccccaauuccuugu

SEQ ID NO: 2374015 - RNA, 16 nt, Human
uccuaccccaauuccu

SEQ ID NO: 2374016 - RNA, 18 nt, Human
uccuaccccaauuccuug

SEQ ID NO: 2374017 - RNA, 15 nt, Human
uccuacccauccccg

SEQ ID NO: 2374018 - RNA, 14 nt, Human
uccuacccaucccc

SEQ ID NO: 2374019 - RNA, 21 nt, Human
uccuacccacaccucugccag

SEQ ID NO: 2374020 - RNA, 22 nt, Human
uccuacccacaccucugccaga

SEQ ID NO: 2374021 - RNA, 16 nt, Human
uccuacccaaccacuc

SEQ ID NO: 2374022 - RNA, 15 nt, Human
uccuacccacaccuc

SEQ ID NO: 2374023 - RNA, 16 nt, Human
uccuacccacaccucu

SEQ ID NO: 2374024 - RNA, 20 nt, Human
uccuacccacaccucugcca

SEQ ID NO: 2374025 - RNA, 18 nt, Human
uccuauauuguuuucagu

SEQ ID NO: 2374026 - RNA, 15 nt, Human
uccuauauaguuuau

SEQ ID NO: 2374027 - RNA, 19 nt, Human
uccuauacgcagcgugcuu

SEQ ID NO: 2374028 - RNA, 18 nt, Human
uccuauacgcagcgugcu

SEQ ID NO: 2374029 - RNA, 20 nt, Human
uccuauaauauaauaaauau

SEQ ID NO: 2374030 - RNA, 20 nt, Human
uccuauaauucccuaucuuu

SEQ ID NO: 2374031 - RNA, 13 nt, Human
uccuaguuuucuc

SEQ ID NO: 2374032 - RNA, 23 nt, Human
uccuaguucuguagaaaugguug

SEQ ID NO: 2374033 - RNA, 20 nt, Human
uccuaguuuucuccucccag

SEQ ID NO: 2374034 - RNA, 13 nt, Human
uccgaccagacac

SEQ ID NO: 2374035 - RNA, 17 nt, Human
uccgaccagacaccuug

SEQ ID NO: 2374036 - RNA, 16 nt, Human
uccuaaucuucugaac

SEQ ID NO: 2374037 - RNA, 20 nt, Human
uccuaauaaucauuggauuc

SEQ ID NO: 2374038 - RNA, 18 nt, Human
uccuaauaaaguucugua

SEQ ID NO: 2374039 - RNA, 18 nt, Human
uccuacccacccuccuuu

SEQ ID NO: 2374040 - RNA, 15 nt, Human
uccuacccaaccacu

SEQ ID NO: 2374041 - RNA, 17 nt, Human
uccuaccaaugcaugca

SEQ ID NO: 2374042 - RNA, 21 nt, Human
uccuaccaaugcaugcagcca

SEQ ID NO: 2374043 - RNA, 13 nt, Human
uccuaccaaugca

SEQ ID NO: 2374044 - RNA, 14 nt, Human
uccuaccaaugcau

SEQ ID NO: 2374045 - RNA, 15 nt, Human
uccuaccaaugcaug

SEQ ID NO: 2374046 - RNA, 16 nt, Human
uccuaccaaugcaugc

SEQ ID NO: 2374047 - RNA, 18 nt, Human
uccuacaagagcagccug

SEQ ID NO: 2374048 - RNA, 14 nt, Human
uccuacaaagaugu

SEQ ID NO: 2374049 - RNA, 19 nt, Human
uccuaauuucuccucccuu

SEQ ID NO: 2374050 - RNA, 15 nt, Human
uccuacaaagauguu

SEQ ID NO: 2374051 - RNA, 20 nt, Human
uccuaccaauagauucccca

SEQ ID NO: 2374052 - RNA, 15 nt, Human
uccuacaagacacag

SEQ ID NO: 2374053 - RNA, 16 nt, Human
uccuaauuuugagaaa

SEQ ID NO: 2374054 - RNA, 15 nt, Human
uccuaauuucuccuc

SEQ ID NO: 2374055 - RNA, 16 nt, Human
uccuaauuucuccucc

SEQ ID NO: 2374056 - RNA, 22 nt, Human
uccuaaugaaugcauaaaaugu

SEQ ID NO: 2374057 - RNA, 15 nt, Human
uccuaaucauccaau

SEQ ID NO: 2374058 - RNA, 14 nt, Human
uccuaaucauccaa

SEQ ID NO: 2374059 - RNA, 15 nt, Human
uccuaauuccacagc

SEQ ID NO: 2374060 - RNA, 18 nt, Human
uccuaauuccacagcugc

SEQ ID NO: 2374061 - RNA, 17 nt, Human
uccuaauuccacagcug

SEQ ID NO: 2374062 - RNA, 16 nt, Human
uccuaauuccacagcu

SEQ ID NO: 2374063 - RNA, 15 nt, Human
uccucuggacggcag

SEQ ID NO: 2374064 - RNA, 17 nt, Human
uccucuggacggcaggc

SEQ ID NO: 2374065 - RNA, 21 nt, Human
uccucuagcugugggggugag

SEQ ID NO: 2374066 - RNA, 22 nt, Human
uccucuagaagccaagggaaag

SEQ ID NO: 2374067 - RNA, 15 nt, Human
uccucuagcuguggg

SEQ ID NO: 2374068 - RNA, 18 nt, Human
uccucuagaagccaaggg

SEQ ID NO: 2374069 - RNA, 19 nt, Human
uccucuagaagccaaggga

SEQ ID NO: 2374070 - RNA, 12 nt, Human
uccucugcugcu

SEQ ID NO: 2374071 - RNA, 14 nt, Human
uccucugcugcugg

SEQ ID NO: 2374072 - RNA, 15 nt, Human
uccucugcugcuggc

SEQ ID NO: 2374073 - RNA, 16 nt, Human
uccucugcugcuggcu

SEQ ID NO: 2374074 - RNA, 21 nt, Human
uccucuuccugaauuuuauuu

SEQ ID NO: 2374075 - RNA, 14 nt, Human
uccucuuccucuga

SEQ ID NO: 2374076 - RNA, 15 nt, Human
uccucuuccucugag

SEQ ID NO: 2374077 - RNA, 16 nt, Human
uccucuuccucugagg

SEQ ID NO: 2374078 - RNA, 19 nt, Human
uccucuucuauuuuguaaa

SEQ ID NO: 2374079 - RNA, 15 nt, Human
uccucuucugacgug

SEQ ID NO: 2374080 - RNA, 17 nt, Human
uccucuucugacgugcc

SEQ ID NO: 2374081 - RNA, 17 nt, Human
uccucuucugcaucuug

SEQ ID NO: 2374082 - RNA, 22 nt, Human
uccucuggacggcaggcucacu

SEQ ID NO: 2374083 - RNA, 18 nt, Human
uccucuggacggcaggcu

SEQ ID NO: 2374084 - RNA, 20 nt, Human
uccucuggacggcaggcuca

SEQ ID NO: 2374085 - RNA, 15 nt, Human
uccucuuccccuugc

SEQ ID NO: 2374086 - RNA, 16 nt, Human
uccucuuccccuugcc

SEQ ID NO: 2374087 - RNA, 18 nt, Human
uccucuuccccuugcccu

SEQ ID NO: 2374088 - RNA, 19 nt, Human
uccucuuccccuugcccuu

SEQ ID NO: 2374089 - RNA, 12 nt, Human
uccucuuccucu

SEQ ID NO: 2374090 - RNA, 13 nt, Human
uccucuuccucug

SEQ ID NO: 2374091 - RNA, 16 nt, Human
uccucuguacagagcc

SEQ ID NO: 2374092 - RNA, 17 nt, Human
uccucuguacagagccc

SEQ ID NO: 2374093 - RNA, 18 nt, Human
uccucuguacagagccca

SEQ ID NO: 2374094 - RNA, 24 nt, Human
uccucuggacggcaggcucacugc

SEQ ID NO: 2374095 - RNA, 17 nt, Human
uccucauguucugcuuu

SEQ ID NO: 2374096 - RNA, 21 nt, Human
uccuccacguucugcucauca

SEQ ID NO: 2374097 - RNA, 16 nt, Human
uccuccacucuccccc

SEQ ID NO: 2374098 - RNA, 19 nt, Human
uccuccacucucccccacc

SEQ ID NO: 2374099 - RNA, 23 nt, Human
uccuccacguucugcucaucauu

SEQ ID NO: 2374100 - RNA, 22 nt, Human
uccuccacguucugcucaucau

SEQ ID NO: 2374101 - RNA, 18 nt, Human
uccuccagaagccucugg

SEQ ID NO: 2374102 - RNA, 16 nt, Human
uccuccagaagccucu

SEQ ID NO: 2374103 - RNA, 14 nt, Human
uccuccagaagccu

SEQ ID NO: 2374104 - RNA, 23 nt, Human
uccuccacucucccccacccccu

SEQ ID NO: 2374105 - RNA, 22 nt, Human
uccuccagaagccucuggcuag

SEQ ID NO: 2374106 - RNA, 21 nt, Human
uccuccagaagccucuggcua

SEQ ID NO: 2374107 - RNA, 20 nt, Human
uccuccagaagccucuggcu

SEQ ID NO: 2374108 - RNA, 19 nt, Human
uccuccagaagccucuggc

SEQ ID NO: 2374109 - RNA, 14 nt, Human
uccuccagcaggga

SEQ ID NO: 2374110 - RNA, 12 nt, Human
uccuccagcagg

SEQ ID NO: 2374111 - RNA, 20 nt, Human
uccuccugggcccucucugc

SEQ ID NO: 2374112 - RNA, 20 nt, Human
uccuccagcagggaaaaugc

SEQ ID NO: 2374113 - RNA, 13 nt, Human
uccuccugguggg

SEQ ID NO: 2374114 - RNA, 22 nt, Human
uccuccugggcccucucugcuc

SEQ ID NO: 2374115 - RNA, 15 nt, Human
uccuccuuccaugga

SEQ ID NO: 2374116 - RNA, 13 nt, Human
uccuccuucccaa

SEQ ID NO: 2374117 - RNA, 13 nt, Human
uccuccuuccaug

SEQ ID NO: 2374118 - RNA, 22 nt, Human
uccuccugguggguccaggggc

SEQ ID NO: 2374119 - RNA, 16 nt, Human
uccuccuguguacagg

SEQ ID NO: 2374120 - RNA, 20 nt, Human
uccuccugguggguccaggg

SEQ ID NO: 2374121 - RNA, 21 nt, Human
uccuccugguggguccagggg

SEQ ID NO: 2374122 - RNA, 16 nt, Human
uccuccuuggugccug

SEQ ID NO: 2374123 - RNA, 17 nt, Human
uccuccuuggugccugg

SEQ ID NO: 2374124 - RNA, 19 nt, Human
uccuccuuggugccuggcc

SEQ ID NO: 2374125 - RNA, 16 nt, Human
uccucgguacucccau

SEQ ID NO: 2374126 - RNA, 20 nt, Human
uccucuaagccacucuucca

SEQ ID NO: 2374127 - RNA, 18 nt, Human
uccucuacuaacaaucag

SEQ ID NO: 2374128 - RNA, 17 nt, Human
uccucuacuaacaauca

SEQ ID NO: 2374129 - RNA, 19 nt, Human
uccucuacuuaaugagaua

SEQ ID NO: 2374130 - RNA, 14 nt, Human
uccucuagaagcca

SEQ ID NO: 2374131 - RNA, 16 nt, Human
uccucuagaagccaag

SEQ ID NO: 2374132 - RNA, 17 nt, Human
uccucuagaagccaagg

SEQ ID NO: 2374133 - RNA, 18 nt, Human
uccucuacuuaaugagau

SEQ ID NO: 2374134 - RNA, 21 nt, Human
uccucuaagccacucuuccaa

SEQ ID NO: 2374135 - RNA, 19 nt, Human
uccucuacuaacaaucagc

SEQ ID NO: 2374136 - RNA, 14 nt, Human
uccucuaggagguc

SEQ ID NO: 2374137 - RNA, 14 nt, Human
uccucgcccugggu

SEQ ID NO: 2374138 - RNA, 13 nt, Human
uccucgcccuggg

SEQ ID NO: 2374139 - RNA, 13 nt, Human
uccucgccugaca

SEQ ID NO: 2374140 - RNA, 24 nt, Human
uccucgcagagaggccaggugcag

SEQ ID NO: 2374141 - RNA, 19 nt, Human
uccuccuuuucacaguucu

SEQ ID NO: 2374142 - RNA, 19 nt, Human
uccucggaucaccgagagu

SEQ ID NO: 2374143 - RNA, 14 nt, Human
uccucggcccccuc

SEQ ID NO: 2374144 - RNA, 16 nt, Human
uccucggaucaccgag

SEQ ID NO: 2374145 - RNA, 15 nt, Human
uccucgccugacaac

SEQ ID NO: 2374146 - RNA, 24 nt, Human
uccucgccugacaaccacuggucu

SEQ ID NO: 2374147 - RNA, 15 nt, Human
uccucgguacuccca

SEQ ID NO: 2374148 - RNA, 17 nt, Human
uccucgguacucccaua

SEQ ID NO: 2374149 - RNA, 15 nt, Human
uccucggcccccucc

SEQ ID NO: 2374150 - RNA, 19 nt, Human
uccucggcccccuccaucg

SEQ ID NO: 2374151 - RNA, 14 nt, Human
uccucggccuggcu

SEQ ID NO: 2374152 - RNA, 15 nt, Human
uccucggccuggcuc

SEQ ID NO: 2374153 - RNA, 14 nt, Human
ucccugccgccuca

SEQ ID NO: 2374154 - RNA, 17 nt, Human
ucccugcccucaucucu

SEQ ID NO: 2374155 - RNA, 15 nt, Human
ucccugcccucaucu

SEQ ID NO: 2374156 - RNA, 16 nt, Human
ucccugcccucaucuc

SEQ ID NO: 2374157 - RNA, 20 nt, Human
ucccugccccucccuucaac

SEQ ID NO: 2374158 - RNA, 23 nt, Human
ucccugccugguccucacacuca

SEQ ID NO: 2374159 - RNA, 11 nt, Human
ucccugccugg

SEQ ID NO: 2374160 - RNA, 23 nt, Human
ucccugccucucaucaacugaau

SEQ ID NO: 2374161 - RNA, 17 nt, Human
ucccugccucucaucaa

SEQ ID NO: 2374162 - RNA, 17 nt, Human
ucccuggagccagacuc

SEQ ID NO: 2374163 - RNA, 13 nt, Human
ucccuggaaggug

SEQ ID NO: 2374164 - RNA, 12 nt, Human
ucccugcuucca

SEQ ID NO: 2374165 - RNA, 14 nt, Human
ucccugcuuccagg

SEQ ID NO: 2374166 - RNA, 18 nt, Human
ucccugcuuccaggaaac

SEQ ID NO: 2374167 - RNA, 13 nt, Human
ucccugcuguccc

SEQ ID NO: 2374168 - RNA, 14 nt, Human
ucccugcugucccc

SEQ ID NO: 2374169 - RNA, 17 nt, Human
ucccugcuguccccucu

SEQ ID NO: 2374170 - RNA, 21 nt, Human
ucccugcuguccccucuugcc

SEQ ID NO: 2374171 - RNA, 22 nt, Human
ucccugcuguccccucuugccc

SEQ ID NO: 2374172 - RNA, 19 nt, Human
ucccugcugucgucuuagc

SEQ ID NO: 2374173 - RNA, 16 nt, Human
ucccugcuguguuccc

SEQ ID NO: 2374174 - RNA, 17 nt, Human
ucccugcuccacgucug

SEQ ID NO: 2374175 - RNA, 23 nt, Human
ucccugcuagggguuuuaggucu

SEQ ID NO: 2374176 - RNA, 15 nt, Human
ucccugccuggucac

SEQ ID NO: 2374177 - RNA, 20 nt, Human
ucccucucucuucugcucca

SEQ ID NO: 2374178 - RNA, 22 nt, Human
ucccucucucugacucucaaau

SEQ ID NO: 2374179 - RNA, 19 nt, Human
ucccucucucuucugcucc

SEQ ID NO: 2374180 - RNA, 18 nt, Human
ucccucucucuucugcuc

SEQ ID NO: 2374181 - RNA, 16 nt, Human
ucccucucucuucugc

SEQ ID NO: 2374182 - RNA, 12 nt, Human
ucccucucucuu

SEQ ID NO: 2374183 - RNA, 15 nt, Human
ucccucucucugacu

SEQ ID NO: 2374184 - RNA, 17 nt, Human
ucccucucucugacucu

SEQ ID NO: 2374185 - RNA, 16 nt, Human
ucccucuccugccuac

SEQ ID NO: 2374186 - RNA, 13 nt, Human
ucccucucucuga

SEQ ID NO: 2374187 - RNA, 12 nt, Human
ucccucucggaa

SEQ ID NO: 2374188 - RNA, 15 nt, Human
ucccucuccugccua

SEQ ID NO: 2374189 - RNA, 14 nt, Human
ucccucuccugccu

SEQ ID NO: 2374190 - RNA, 13 nt, Human
ucccucuccugcc

SEQ ID NO: 2374191 - RNA, 12 nt, Human
ucccucucccug

SEQ ID NO: 2374192 - RNA, 23 nt, Human
ucccucucggaaggcuggcuggg

SEQ ID NO: 2374193 - RNA, 22 nt, Human
ucccucucggaaggcuggcugg

SEQ ID NO: 2374194 - RNA, 12 nt, Human
ucccucucucug

SEQ ID NO: 2374195 - RNA, 14 nt, Human
ucccugcacuugca

SEQ ID NO: 2374196 - RNA, 19 nt, Human
ucccugccccucccuucaa

SEQ ID NO: 2374197 - RNA, 13 nt, Human
ucccugcacuugc

SEQ ID NO: 2374198 - RNA, 23 nt, Human
ucccuugaggaaacaacagcuuu

SEQ ID NO: 2374199 - RNA, 14 nt, Human
ucccuugagcccuc

SEQ ID NO: 2374200 - RNA, 16 nt, Human
ucccuugaugaagaag

SEQ ID NO: 2374201 - RNA, 19 nt, Human
ucccuugagaccucagcca

SEQ ID NO: 2374202 - RNA, 18 nt, Human
uccgaaccuccucuguga

SEQ ID NO: 2374203 - RNA, 22 nt, Human
uccgaaccuccucugugaagca

SEQ ID NO: 2374204 - RNA, 21 nt, Human
uccgaaguaugagggaaaaug

SEQ ID NO: 2374205 - RNA, 20 nt, Human
uccgacaaccgaugcuccag

SEQ ID NO: 2374206 - RNA, 19 nt, Human
uccgaaccuccucugugaa

SEQ ID NO: 2374207 - RNA, 23 nt, Human
uccgacaaccgaugcuccagcca

SEQ ID NO: 2374208 - RNA, 17 nt, Human
uccgacagcccccucug

SEQ ID NO: 2374209 - RNA, 22 nt, Human
uccgacaaccgaugcuccagcc

SEQ ID NO: 2374210 - RNA, 21 nt, Human
uccgacaaccgaugcuccagc

SEQ ID NO: 2374211 - RNA, 20 nt, Human
uccgaccacuaauugccaag

SEQ ID NO: 2374212 - RNA, 20 nt, Human
uccgacagcccccucugccg

SEQ ID NO: 2374213 - RNA, 17 nt, Human
ucccuuccuuuucccug

SEQ ID NO: 2374214 - RNA, 18 nt, Human
ucccuuccuuuucccugc

SEQ ID NO: 2374215 - RNA, 19 nt, Human
ucccuuccuuuucccugcu

SEQ ID NO: 2374216 - RNA, 20 nt, Human
ucccuuccuuuucccugcuu

SEQ ID NO: 2374217 - RNA, 15 nt, Human
ucccuucuaccugcc

SEQ ID NO: 2374218 - RNA, 20 nt, Human
ucccuucuaccugccacuca

SEQ ID NO: 2374219 - RNA, 11 nt, Human
ucccuucucca

SEQ ID NO: 2374220 - RNA, 22 nt, Human
ucccuucuaggguuauugcauu

SEQ ID NO: 2374221 - RNA, 18 nt, Human
ucccuugagaccucagcc

SEQ ID NO: 2374222 - RNA, 23 nt, Human
ucccuucucuguagggaacucug

SEQ ID NO: 2374223 - RNA, 20 nt, Human
ucccuucucuguagggaacu

SEQ ID NO: 2374224 - RNA, 16 nt, Human
ucccuucuccaucucu

SEQ ID NO: 2374225 - RNA, 21 nt, Human
ucccuucuccaucucucuggc

SEQ ID NO: 2374226 - RNA, 22 nt, Human
ucccuucuccaucucucuggcc

SEQ ID NO: 2374227 - RNA, 15 nt, Human
ucccuugaugaagaa

SEQ ID NO: 2374228 - RNA, 10 nt, Human
ucccuggagu

SEQ ID NO: 2374229 - RNA, 11 nt, Human
ucccuggagug

SEQ ID NO: 2374230 - RNA, 21 nt, Human
ucccuggaguguggcugagga

SEQ ID NO: 2374231 - RNA, 19 nt, Human
ucccuggagccagacucug

SEQ ID NO: 2374232 - RNA, 22 nt, Human
ucccuggagccagacucugguc

SEQ ID NO: 2374233 - RNA, 22 nt, Human
ucccuggaguguggcugaggag

SEQ ID NO: 2374234 - RNA, 13 nt, Human
ucccuggccuguu

SEQ ID NO: 2374235 - RNA, 18 nt, Human
ucccuggccuguucuguu

SEQ ID NO: 2374236 - RNA, 14 nt, Human
ucccuggccuguuc

SEQ ID NO: 2374237 - RNA, 11 nt, Human
ucccuggccuu

SEQ ID NO: 2374238 - RNA, 21 nt, Human
ucccuucaucuggaaccauca

SEQ ID NO: 2374239 - RNA, 18 nt, Human
ucccuucaugcauggaaa

SEQ ID NO: 2374240 - RNA, 17 nt, Human
ucccuucaugcauggaa

SEQ ID NO: 2374241 - RNA, 16 nt, Human
ucccuuccacaccccc

SEQ ID NO: 2374242 - RNA, 18 nt, Human
ucccuuccacacccccac

SEQ ID NO: 2374243 - RNA, 13 nt, Human
ucccuucccaccu

SEQ ID NO: 2374244 - RNA, 16 nt, Human
ucccuaguaaaaauac

SEQ ID NO: 2374245 - RNA, 18 nt, Human
ucccuaggggacacuucc

SEQ ID NO: 2374246 - RNA, 24 nt, Human
ucccuacauguauugcacauugua

SEQ ID NO: 2374247 - RNA, 13 nt, Human
ucccuacauguau

SEQ ID NO: 2374248 - RNA, 15 nt, Human
ucccuaggagaccaa

SEQ ID NO: 2374249 - RNA, 18 nt, Human
ucccuaaaaacacagaca

SEQ ID NO: 2374250 - RNA, 16 nt, Human
ucccuaaucuaugguc

SEQ ID NO: 2374251 - RNA, 23 nt, Human
ucccuaaucuauggucgggagac

SEQ ID NO: 2374252 - RNA, 14 nt, Human
ucccuaaugcugca

SEQ ID NO: 2374253 - RNA, 20 nt, Human
ucccuaaugcugcagauuug

SEQ ID NO: 2374254 - RNA, 16 nt, Human
ucccuaauaaagcugu

SEQ ID NO: 2374255 - RNA, 19 nt, Human
ucccuaucuuugccacccu

SEQ ID NO: 2374256 - RNA, 13 nt, Human
ucccuauguauuu

SEQ ID NO: 2374257 - RNA, 15 nt, Human
ucccuauguauuugc

SEQ ID NO: 2374258 - RNA, 18 nt, Human
ucccuagucuucaagcag

SEQ ID NO: 2374259 - RNA, 22 nt, Human
ucccuagucuauucauuauauu

SEQ ID NO: 2374260 - RNA, 17 nt, Human
ucccuagucuauucauu

SEQ ID NO: 2374261 - RNA, 20 nt, Human
ucccuagugacccggaggcc

SEQ ID NO: 2374262 - RNA, 18 nt, Human
ucccuccucaccucugga

SEQ ID NO: 2374263 - RNA, 17 nt, Human
ucccuccucaccucugg

SEQ ID NO: 2374264 - RNA, 16 nt, Human
ucccuccucaccucug

SEQ ID NO: 2374265 - RNA, 14 nt, Human
ucccuccucaccuc

SEQ ID NO: 2374266 - RNA, 16 nt, Human
ucccuauuagagaaga

SEQ ID NO: 2374267 - RNA, 19 nt, Human
ucccucgcugcacaaauac

SEQ ID NO: 2374268 - RNA, 22 nt, Human
ucccucgcugcacaaauacucc

SEQ ID NO: 2374269 - RNA, 14 nt, Human
ucccucuaauuuau

SEQ ID NO: 2374270 - RNA, 16 nt, Human
ucccucuaauuuaucu

SEQ ID NO: 2374271 - RNA, 15 nt, Human
ucccucuacugggag

SEQ ID NO: 2374272 - RNA, 22 nt, Human
ucccucuacagagcuucccuga

SEQ ID NO: 2374273 - RNA, 21 nt, Human
ucccucuacagagcuucccug

SEQ ID NO: 2374274 - RNA, 17 nt, Human
ucccucuacugggagcc

SEQ ID NO: 2374275 - RNA, 14 nt, Human
ucccuccugcuacu

SEQ ID NO: 2374276 - RNA, 18 nt, Human
ucccuauguauuugcagu

SEQ ID NO: 2374277 - RNA, 16 nt, Human
ucccuccugccgacuc

SEQ ID NO: 2374278 - RNA, 21 nt, Human
ucccuccugccgacuccuggg

SEQ ID NO: 2374279 - RNA, 18 nt, Human
ucccuccugggaucugcu

SEQ ID NO: 2374280 - RNA, 19 nt, Human
ucccuccugggaucugcuc

SEQ ID NO: 2374281 - RNA, 19 nt, Human
ucccuccugggaaugaagc

SEQ ID NO: 2374282 - RNA, 15 nt, Human
ucccuccucuguccc

SEQ ID NO: 2374283 - RNA, 11 nt, Human
ucccuccuggg

SEQ ID NO: 2374284 - RNA, 16 nt, Human
ucccguggaacguuuu

SEQ ID NO: 2374285 - RNA, 22 nt, Human
ucccguggaacguuuuuccugu

SEQ ID NO: 2374286 - RNA, 23 nt, Human
ucccguggaacguuuuuccuguu

SEQ ID NO: 2374287 - RNA, 13 nt, Human
ucccgugcagcuu

SEQ ID NO: 2374288 - RNA, 12 nt, Human
ucccguggcccc

SEQ ID NO: 2374289 - RNA, 21 nt, Human
ucccgucccauauccugccuc

SEQ ID NO: 2374290 - RNA, 17 nt, Human
ucccgucuacucauucc

SEQ ID NO: 2374291 - RNA, 14 nt, Human
ucccggggcuccac

SEQ ID NO: 2374292 - RNA, 19 nt, Human
ucccgggguccuguggcag

SEQ ID NO: 2374293 - RNA, 18 nt, Human
ucccgggcccucccuugg

SEQ ID NO: 2374294 - RNA, 16 nt, Human
ucccgucagggcccaa

SEQ ID NO: 2374295 - RNA, 16 nt, Human
ucccgguucuuccagu

SEQ ID NO: 2374296 - RNA, 20 nt, Human
ucccgucagggcccaagucc

SEQ ID NO: 2374297 - RNA, 23 nt, Human
ucccgucagggcccaagucccug

SEQ ID NO: 2374298 - RNA, 18 nt, Human
ucccgucccauauccugc

SEQ ID NO: 2374299 - RNA, 20 nt, Human
ucccgucccauauccugccu

SEQ ID NO: 2374300 - RNA, 14 nt, Human
ucccuaauaaagcu

SEQ ID NO: 2374301 - RNA, 23 nt, Human
ucccguuuagaguuauuuaggcu

SEQ ID NO: 2374302 - RNA, 15 nt, Human
ucccuaauaaagcug

SEQ ID NO: 2374303 - RNA, 15 nt, Human
ucccguguucuccuu

SEQ ID NO: 2374304 - RNA, 20 nt, Human
ucccguuucuccaccuagac

SEQ ID NO: 2374305 - RNA, 21 nt, Human
ucccguggccccagccuggcc

SEQ ID NO: 2374306 - RNA, 22 nt, Human
ucccguggccccagccuggccc

SEQ ID NO: 2374307 - RNA, 23 nt, Human
ucccguggccccagccuggccca

SEQ ID NO: 2374308 - RNA, 24 nt, Human
ucccguggccccagccuggcccag

SEQ ID NO: 2374309 - RNA, 13 nt, Human
ucccguggcccca

SEQ ID NO: 2374310 - RNA, 14 nt, Human
ucccguggccccag

SEQ ID NO: 2374311 - RNA, 15 nt, Human
ucccguggccccagc

SEQ ID NO: 2374312 - RNA, 16 nt, Human
ucccguggccccagcc

SEQ ID NO: 2374313 - RNA, 17 nt, Human
ucccguggccccagccu

SEQ ID NO: 2374314 - RNA, 18 nt, Human
ucccguggccccagccug

SEQ ID NO: 2374315 - RNA, 19 nt, Human
ucccguggccccagccugg

SEQ ID NO: 2374316 - RNA, 20 nt, Human
ucccguggccccagccuggc

SEQ ID NO: 2374317 - RNA, 18 nt, Human
uccagguuuaagcuguua

SEQ ID NO: 2374318 - RNA, 18 nt, Human
uccccuguuuguuucuga

SEQ ID NO: 2374319 - RNA, 20 nt, Human
uccccuguuuguuucugaaa

SEQ ID NO: 2374320 - RNA, 17 nt, Human
uccagguuuaagcuguu

SEQ ID NO: 2374321 - RNA, 18 nt, Human
uccagguguuacuguaau

SEQ ID NO: 2374322 - RNA, 21 nt, Human
ucccgggcccguugaggauga

SEQ ID NO: 2374323 - RNA, 13 nt, Human
ucccgggcccucc

SEQ ID NO: 2374324 - RNA, 14 nt, Human
ucccgggcccuccc

SEQ ID NO: 2374325 - RNA, 15 nt, Human
ucccgggcccucccu

SEQ ID NO: 2374326 - RNA, 15 nt, Human
ucccgggacgcagca

SEQ ID NO: 2374327 - RNA, 21 nt, Human
uccccuguuuguuucugaaag

SEQ ID NO: 2374328 - RNA, 17 nt, Human
uccaggugugcacgugg

SEQ ID NO: 2374329 - RNA, 14 nt, Human
uccuuuucagaagu

SEQ ID NO: 2374330 - RNA, 14 nt, Human
uccuuuuauguuau

SEQ ID NO: 2374331 - RNA, 15 nt, Human
uccuuuuauguuauu

SEQ ID NO: 2374332 - RNA, 14 nt, Human
uccuuuuagccuag

SEQ ID NO: 2374333 - RNA, 12 nt, Human
uccuuuuauguu

SEQ ID NO: 2374334 - RNA, 15 nt, Human
uccuuuuagccuagu

SEQ ID NO: 2374335 - RNA, 13 nt, Human
uccuuuucccugc

SEQ ID NO: 2374336 - RNA, 15 nt, Human
uccuuuuccucucuc

SEQ ID NO: 2374337 - RNA, 14 nt, Human
uccuuuucccugcu

SEQ ID NO: 2374338 - RNA, 15 nt, Human
uccuuuucccugcuu

SEQ ID NO: 2374339 - RNA, 19 nt, Human
ucgaaaccugggauucagg

SEQ ID NO: 2374340 - RNA, 13 nt, Human
ucgaaacacagaa

SEQ ID NO: 2374341 - RNA, 18 nt, Human
ucgaaacacagaaaccuu

SEQ ID NO: 2374342 - RNA, 15 nt, Human
ucgagggcagggacu

SEQ ID NO: 2374343 - RNA, 20 nt, Human
ucgaggcugcagucagucau

SEQ ID NO: 2374344 - RNA, 16 nt, Human
ucgaggcugcagucag

SEQ ID NO: 2374345 - RNA, 22 nt, Human
ucgaggcggaucuuuggacaga

SEQ ID NO: 2374346 - RNA, 17 nt, Human
ucgaggcggaucuuugg

SEQ ID NO: 2374347 - RNA, 12 nt, Human
ucgaaauaacaa

SEQ ID NO: 2374348 - RNA, 14 nt, Human
ucgaaauaacaaug

SEQ ID NO: 2374349 - RNA, 16 nt, Human
ucgaaauaacaauguu

SEQ ID NO: 2374350 - RNA, 18 nt, Human
ucgaaauaacaauguuaa

SEQ ID NO: 2374351 - RNA, 19 nt, Human
ucgaaauaacaauguuaag

SEQ ID NO: 2374352 - RNA, 20 nt, Human
ucgaaauaacaauguuaagg

SEQ ID NO: 2374353 - RNA, 15 nt, Human
ucgaacuccugaccu

SEQ ID NO: 2374354 - RNA, 18 nt, Human
ucgaaccguuuugaagcu

SEQ ID NO: 2374355 - RNA, 15 nt, Human
ucgaaccguuuugaa

SEQ ID NO: 2374356 - RNA, 20 nt, Human
uccuuuuaaaucuugauacc

SEQ ID NO: 2374357 - RNA, 13 nt, Human
uccuuuuagccua

SEQ ID NO: 2374358 - RNA, 17 nt, Human
uccuuuuaauuuuccug

SEQ ID NO: 2374359 - RNA, 23 nt, Human
uccuuuucacaguucucuccuuc

SEQ ID NO: 2374360 - RNA, 19 nt, Human
uccuuuguuuuuuuuuccu

SEQ ID NO: 2374361 - RNA, 23 nt, Human
uccuuuguuuuuuuuuccugucc

SEQ ID NO: 2374362 - RNA, 19 nt, Human
uccuuuuaaaacacuucca

SEQ ID NO: 2374363 - RNA, 15 nt, Human
uccuuuguuuuuaug

SEQ ID NO: 2374364 - RNA, 24 nt, Human
uccuuuguucuuaccuguaugucu

SEQ ID NO: 2374365 - RNA, 16 nt, Human
uccuuuguucuuaccu

SEQ ID NO: 2374366 - RNA, 20 nt, Human
uccuuggcaugccuuccagc

SEQ ID NO: 2374367 - RNA, 10 nt, Human
uccuuuguuc

SEQ ID NO: 2374368 - RNA, 18 nt, Human
uccuuggcaugccuucca

SEQ ID NO: 2374369 - RNA, 17 nt, Human
uccuuggcaugccuucc

SEQ ID NO: 2374370 - RNA, 15 nt, Human
uccuuggcaugccuu

SEQ ID NO: 2374371 - RNA, 20 nt, Human
uccuuggcaucacagggcag

SEQ ID NO: 2374372 - RNA, 12 nt, Human
uccuuggaaauc

SEQ ID NO: 2374373 - RNA, 16 nt, Human
uccuuggaaguuucau

SEQ ID NO: 2374374 - RNA, 19 nt, Human
uccuuggauaggcuuuuua

SEQ ID NO: 2374375 - RNA, 16 nt, Human
uccuuggacucauuuu

SEQ ID NO: 2374376 - RNA, 20 nt, Human
uccuucacauccuguguuuc

SEQ ID NO: 2374377 - RNA, 14 nt, Human
uccuucacauccug

SEQ ID NO: 2374378 - RNA, 19 nt, Human
uccuucacagaugggugcu

SEQ ID NO: 2374379 - RNA, 18 nt, Human
uccuucaccuuugucccc

SEQ ID NO: 2374380 - RNA, 20 nt, Human
uccuucaccuuuguccccac

SEQ ID NO: 2374381 - RNA, 16 nt, Human
uccuuaccagcagagc

SEQ ID NO: 2374382 - RNA, 17 nt, Human
uccuuaccagcagagca

SEQ ID NO: 2374383 - RNA, 18 nt, Human
uccuuaccagcagagcac

SEQ ID NO: 2374384 - RNA, 18 nt, Human
uccuucacagaugggugc

SEQ ID NO: 2374385 - RNA, 21 nt, Human
uccuugaccagcagaucccag

SEQ ID NO: 2374386 - RNA, 13 nt, Human
uccuugaccagca

SEQ ID NO: 2374387 - RNA, 23 nt, Human
uccuucagacacccucaaccucu

SEQ ID NO: 2374388 - RNA, 12 nt, Human
uccuugaagccg

SEQ ID NO: 2374389 - RNA, 23 nt, Human
uccuugagacacggagcccagcc

SEQ ID NO: 2374390 - RNA, 21 nt, Human
uccuugagacacggagcccag

SEQ ID NO: 2374391 - RNA, 17 nt, Human
uccuugagacacggagc

SEQ ID NO: 2374392 - RNA, 16 nt, Human
uccuugagagaccagg

SEQ ID NO: 2374393 - RNA, 20 nt, Human
uccuugagagaccaggcaaa

SEQ ID NO: 2374394 - RNA, 22 nt, Human
uccuugcuuaugacaucacuug

SEQ ID NO: 2374395 - RNA, 13 nt, Human
uccuugcuuggcu

SEQ ID NO: 2374396 - RNA, 21 nt, Human
uccuucaccuuuguccccacc

SEQ ID NO: 2374397 - RNA, 22 nt, Human
uccuucaccuuuguccccaccg

SEQ ID NO: 2374398 - RNA, 13 nt, Human
uccuucagacacc

SEQ ID NO: 2374399 - RNA, 20 nt, Human
uccuugaagaacugcaggcc

SEQ ID NO: 2374400 - RNA, 21 nt, Human
uccuugaagaacugcaggccc

SEQ ID NO: 2374401 - RNA, 23 nt, Human
uccuugaagaacugcaggcccug

SEQ ID NO: 2374402 - RNA, 12 nt, Human
uccuucagacac

SEQ ID NO: 2374403 - RNA, 17 nt, Human
uccuucaccucacugaa

SEQ ID NO: 2374404 - RNA, 19 nt, Human
uccuucaccucacugaaaa

SEQ ID NO: 2374405 - RNA, 13 nt, Human
uccuucaccucug

SEQ ID NO: 2374406 - RNA, 14 nt, Human
uccugccucagccu

SEQ ID NO: 2374407 - RNA, 14 nt, Human
uccugagccagauu

SEQ ID NO: 2374408 - RNA, 20 nt, Human
uccugccuaagugcagcccc

SEQ ID NO: 2374409 - RNA, 14 nt, Human
uccugagaccccug

SEQ ID NO: 2374410 - RNA, 16 nt, Human
uccugagaccccuggc

SEQ ID NO: 2374411 - RNA, 17 nt, Human
uccugagaccccuggcc

SEQ ID NO: 2374412 - RNA, 23 nt, Human
uccucuucugcuuaggagagacc

SEQ ID NO: 2374413 - RNA, 13 nt, Human
uccucuucuuuau

SEQ ID NO: 2374414 - RNA, 20 nt, Human
uccugagaccccuggccucc

SEQ ID NO: 2374415 - RNA, 18 nt, Human
uccugagaccccuggccu

SEQ ID NO: 2374416 - RNA, 19 nt, Human
uccugagaccccuggccuc

SEQ ID NO: 2374417 - RNA, 21 nt, Human
uccugagaccccuggccuccg

SEQ ID NO: 2374418 - RNA, 13 nt, Human
uccugagccagau

SEQ ID NO: 2374419 - RNA, 17 nt, Human
uccugccucagccuccc

SEQ ID NO: 2374420 - RNA, 16 nt, Human
uccugccucagccucc

SEQ ID NO: 2374421 - RNA, 13 nt, Human
uccugccucagcc

SEQ ID NO: 2374422 - RNA, 15 nt, Human
uccugccucagccuc

SEQ ID NO: 2374423 - RNA, 14 nt, Human
uccuggcacccggc

SEQ ID NO: 2374424 - RNA, 16 nt, Human
uccuggcacccggccc

SEQ ID NO: 2374425 - RNA, 19 nt, Human
uccuggcacccggccccug

SEQ ID NO: 2374426 - RNA, 16 nt, Human
uccuguccucagcuuc

SEQ ID NO: 2374427 - RNA, 21 nt, Human
uccuguacacugaauauuuau

SEQ ID NO: 2374428 - RNA, 11 nt, Human
uccuguccucc

SEQ ID NO: 2374429 - RNA, 21 nt, Human
uccuguccucccauccccugg

SEQ ID NO: 2374430 - RNA, 22 nt, Human
uccuguccuucucucaccuccu

SEQ ID NO: 2374431 - RNA, 23 nt, Human
uccuguccuuuacacauucggcu

SEQ ID NO: 2374432 - RNA, 17 nt, Human
uccuguacacugaauau

SEQ ID NO: 2374433 - RNA, 16 nt, Human
uccuguacacugaaua

SEQ ID NO: 2374434 - RNA, 14 nt, Human
uccuguacauugug

SEQ ID NO: 2374435 - RNA, 13 nt, Human
uccuguaauuccu

SEQ ID NO: 2374436 - RNA, 15 nt, Human
uccuguaauuccuac

SEQ ID NO: 2374437 - RNA, 16 nt, Human
uccuguaauuccuacc

SEQ ID NO: 2374438 - RNA, 21 nt, Human
uccuguaauuccuaccucccu

SEQ ID NO: 2374439 - RNA, 20 nt, Human
uccuguaaaugguguacaua

SEQ ID NO: 2374440 - RNA, 20 nt, Human
uccuguaacacaagccacag

SEQ ID NO: 2374441 - RNA, 21 nt, Human
uccuguaacacaagccacaga

SEQ ID NO: 2374442 - RNA, 23 nt, Human
uccuguaacacaagccacagaag

SEQ ID NO: 2374443 - RNA, 20 nt, Human
uccuguacauugugggaugu

SEQ ID NO: 2374444 - RNA, 22 nt, Human
uccuguaccucuugagccuuga

SEQ ID NO: 2374445 - RNA, 20 nt, Human
uccuguaccucuugagccuu

SEQ ID NO: 2374446 - RNA, 20 nt, Human
uccuggcaauaguguguucu

SEQ ID NO: 2374447 - RNA, 11 nt, Human
uccugccuacu

SEQ ID NO: 2374448 - RNA, 22 nt, Human
uccuggcaauaguguguucuga

SEQ ID NO: 2374449 - RNA, 21 nt, Human
uccuggcaauaguguguucug

SEQ ID NO: 2374450 - RNA, 23 nt, Human
uccuggcaauaguguguucugau

SEQ ID NO: 2374451 - RNA, 15 nt, Human
uccuggcagaaugcu

SEQ ID NO: 2374452 - RNA, 18 nt, Human
uccuggcacugcuuccag

SEQ ID NO: 2374453 - RNA, 22 nt, Human
uccuggcacugcuuccagugag

SEQ ID NO: 2374454 - RNA, 20 nt, Human
uccuggcacccggccccugc

SEQ ID NO: 2374455 - RNA, 21 nt, Human
uccuggcacccggccccugcu

SEQ ID NO: 2374456 - RNA, 22 nt, Human
uccuggcacccggccccugcug

SEQ ID NO: 2374457 - RNA, 17 nt, Human
uccuggcacugcuucca

SEQ ID NO: 2374458 - RNA, 16 nt, Human
ucuacuuuaagcacua

SEQ ID NO: 2374459 - RNA, 22 nt, Human
ucuaauucccauuuugcaaaau

SEQ ID NO: 2374460 - RNA, 21 nt, Human
ucuaauucccauuuugcaaaa

SEQ ID NO: 2374461 - RNA, 19 nt, Human
ucuaauucccauuuugcaa

SEQ ID NO: 2374462 - RNA, 18 nt, Human
ucuaauucccauuuugca

SEQ ID NO: 2374463 - RNA, 20 nt, Human
ucuaauucuaaggaauauga

SEQ ID NO: 2374464 - RNA, 22 nt, Human
ucuacuuuagaaugagagugug

SEQ ID NO: 2374465 - RNA, 14 nt, Human
ucuacuuuauuaau

SEQ ID NO: 2374466 - RNA, 12 nt, Human
ucuacuuugaag

SEQ ID NO: 2374467 - RNA, 20 nt, Human
ucuacuuugaagucauacca

SEQ ID NO: 2374468 - RNA, 21 nt, Human
ucuacuuuauuaauuguuuug

SEQ ID NO: 2374469 - RNA, 16 nt, Human
ucuacuuugaggaaac

SEQ ID NO: 2374470 - RNA, 14 nt, Human
ucuacuuuuaaaga

SEQ ID NO: 2374471 - RNA, 14 nt, Human
ucuaauauguaaca

SEQ ID NO: 2374472 - RNA, 14 nt, Human
ucuaaugugugaau

SEQ ID NO: 2374473 - RNA, 16 nt, Human
ucuaggagcugggagg

SEQ ID NO: 2374474 - RNA, 18 nt, Human
ucuaggacgccacccagc

SEQ ID NO: 2374475 - RNA, 22 nt, Human
ucuagaaagccuguuccccuca

SEQ ID NO: 2374476 - RNA, 16 nt, Human
ucuagaacacaggcaa

SEQ ID NO: 2374477 - RNA, 15 nt, Human
ucuagaacacaggca

SEQ ID NO: 2374478 - RNA, 13 nt, Human
ucuagaacacagg

SEQ ID NO: 2374479 - RNA, 21 nt, Human
ucuaggagcugggaggaaaag

SEQ ID NO: 2374480 - RNA, 20 nt, Human
ucuaggagcugggaggaaaa

SEQ ID NO: 2374481 - RNA, 18 nt, Human
ucuaggagcugggaggaa

SEQ ID NO: 2374482 - RNA, 17 nt, Human
ucuaggagcugggagga

SEQ ID NO: 2374483 - RNA, 20 nt, Human
ucuagucuccuuugcacuga

SEQ ID NO: 2374484 - RNA, 19 nt, Human
ucuagugagcagucaggaa

SEQ ID NO: 2374485 - RNA, 14 nt, Human
ucuagugcagcuga

SEQ ID NO: 2374486 - RNA, 18 nt, Human
ucuagucucucuggggcc

SEQ ID NO: 2374487 - RNA, 19 nt, Human
ucuaggagggagacacugg

SEQ ID NO: 2374488 - RNA, 22 nt, Human
ucuagucuccuuugcacugagg

SEQ ID NO: 2374489 - RNA, 14 nt, Human
ucuagucucucugg

SEQ ID NO: 2374490 - RNA, 22 nt, Human
ucuagugagcagucaggaaaga

SEQ ID NO: 2374491 - RNA, 16 nt, Human
ucuagugcagcugauu

SEQ ID NO: 2374492 - RNA, 15 nt, Human
ucuaucaaguauuau

SEQ ID NO: 2374493 - RNA, 22 nt, Human
ucuaucaaguauuauaccuuuu

SEQ ID NO: 2374494 - RNA, 21 nt, Human
ucuaucaaguauuauaccuuu

SEQ ID NO: 2374495 - RNA, 13 nt, Human
ucuaugaaauauu

SEQ ID NO: 2374496 - RNA, 14 nt, Human
ucuaugaaauauua

SEQ ID NO: 2374497 - RNA, 17 nt, Human
ucuaugaaauauuaugu

SEQ ID NO: 2374498 - RNA, 16 nt, Human
ucucaaaguuuugaaa

SEQ ID NO: 2374499 - RNA, 17 nt, Human
ucucaaauaacuaaaag

SEQ ID NO: 2374500 - RNA, 15 nt, Human
ucucaacuccaaacu

SEQ ID NO: 2374501 - RNA, 14 nt, Human
ucuaugccagcuca

SEQ ID NO: 2374502 - RNA, 16 nt, Human
ucuaugccaaagauca

SEQ ID NO: 2374503 - RNA, 17 nt, Human
ucuaugccaaagaucac

SEQ ID NO: 2374504 - RNA, 15 nt, Human
ucuaugcauuuucug

SEQ ID NO: 2374505 - RNA, 15 nt, Human
ucuaugccaaagauc

SEQ ID NO: 2374506 - RNA, 22 nt, Human
ucuaugauuccagguggcauca

SEQ ID NO: 2374507 - RNA, 14 nt, Human
ucuaugcauuuucu

SEQ ID NO: 2374508 - RNA, 15 nt, Human
ucuaugaugcuguug

SEQ ID NO: 2374509 - RNA, 12 nt, Human
ucuaugcucucg

SEQ ID NO: 2374510 - RNA, 21 nt, Human
ucuaugccaaagaucacuugu

SEQ ID NO: 2374511 - RNA, 12 nt, Human
ucuaacaaguca

SEQ ID NO: 2374512 - RNA, 23 nt, Human
ucuaacaagucauagguuaauau

SEQ ID NO: 2374513 - RNA, 13 nt, Human
ucuaacaaugaca

SEQ ID NO: 2374514 - RNA, 17 nt, Human
ucuaacagcucaggauc

SEQ ID NO: 2374515 - RNA, 15 nt, Human
ucuaacagcucagga

SEQ ID NO: 2374516 - RNA, 21 nt, Human
ucuaauagcggguuacuuuca

SEQ ID NO: 2374517 - RNA, 22 nt, Human
ucuaauagaacucaguuuuaac

SEQ ID NO: 2374518 - RNA, 19 nt, Human
ucuaacagcucaggaucuc

SEQ ID NO: 2374519 - RNA, 17 nt, Human
ucuaaccacaucaauau

SEQ ID NO: 2374520 - RNA, 13 nt, Human
ucuaauagugcuu

SEQ ID NO: 2374521 - RNA, 15 nt, Human
ucuaauauauuuuua

SEQ ID NO: 2374522 - RNA, 14 nt, Human
ucuaauaucagcaa

SEQ ID NO: 2374523 - RNA, 14 nt, Human
ucuaauauggccac

SEQ ID NO: 2374524 - RNA, 20 nt, Human
ucuaauauggcaaaaauggc

SEQ ID NO: 2374525 - RNA, 19 nt, Human
ucguggccuuccccagccu

SEQ ID NO: 2374526 - RNA, 23 nt, Human
ucgugggagagagacguguacau

SEQ ID NO: 2374527 - RNA, 12 nt, Human
ucguggggaggu

SEQ ID NO: 2374528 - RNA, 15 nt, Human
ucguggggugugcug

SEQ ID NO: 2374529 - RNA, 18 nt, Human
ucguggggugugcuggga

SEQ ID NO: 2374530 - RNA, 20 nt, Human
ucgugggaucugccccuccc

SEQ ID NO: 2374531 - RNA, 19 nt, Human
ucgugggucuguuuuccuu

SEQ ID NO: 2374532 - RNA, 13 nt, Human
ucguuaauuugua

SEQ ID NO: 2374533 - RNA, 23 nt, Human
ucuaaauauuuccuuaaacugug

SEQ ID NO: 2374534 - RNA, 21 nt, Human
ucuaaaucuccaaaauaaaac

SEQ ID NO: 2374535 - RNA, 13 nt, Human
ucuaaauauuucc

SEQ ID NO: 2374536 - RNA, 17 nt, Human
ucuaaauaccugcccug

SEQ ID NO: 2374537 - RNA, 13 nt, Human
ucuaaauagccaa

SEQ ID NO: 2374538 - RNA, 21 nt, Human
ucuaaauagccaacacccauc

SEQ ID NO: 2374539 - RNA, 18 nt, Human
ucggccuccauccugagg

SEQ ID NO: 2374540 - RNA, 23 nt, Human
ucgagguagguggaucaccugag

SEQ ID NO: 2374541 - RNA, 14 nt, Human
ucgaggggcucuca

SEQ ID NO: 2374542 - RNA, 16 nt, Human
ucgaggggcucucagc

SEQ ID NO: 2374543 - RNA, 18 nt, Human
ucgaggggcucucagcuc

SEQ ID NO: 2374544 - RNA, 20 nt, Human
ucgaggggcucucagcucag

SEQ ID NO: 2374545 - RNA, 22 nt, Human
ucggccucccaaagugcuggga

SEQ ID NO: 2374546 - RNA, 17 nt, Human
ucggccucuaaccccag

SEQ ID NO: 2374547 - RNA, 21 nt, Human
ucgagguagaguuugaaggag

SEQ ID NO: 2374548 - RNA, 22 nt, Human
ucggccucuaaccccaggcccc

SEQ ID NO: 2374549 - RNA, 23 nt, Human
ucggccucuaaccccaggccccg

SEQ ID NO: 2374550 - RNA, 18 nt, Human
ucggccucuaaccccagg

SEQ ID NO: 2374551 - RNA, 19 nt, Human
ucggccucuaaccccaggc

SEQ ID NO: 2374552 - RNA, 20 nt, Human
ucggccucuaaccccaggcc

SEQ ID NO: 2374553 - RNA, 21 nt, Human
ucggccucuaaccccaggccc

SEQ ID NO: 2374554 - RNA, 16 nt, Human
ucgugauugauaagaa

SEQ ID NO: 2374555 - RNA, 15 nt, Human
ucgugagcucuugug

SEQ ID NO: 2374556 - RNA, 21 nt, Human
ucgugacgcugaauaaauguc

SEQ ID NO: 2374557 - RNA, 16 nt, Human
ucgugagcucuuguga

SEQ ID NO: 2374558 - RNA, 22 nt, Human
ucgugagcucuugugaggaaag

SEQ ID NO: 2374559 - RNA, 20 nt, Human
ucguggccuuccccagccuc

SEQ ID NO: 2374560 - RNA, 17 nt, Human
ucguggccagcccggcu

SEQ ID NO: 2374561 - RNA, 18 nt, Human
ucguggccagcccggcug

SEQ ID NO: 2374562 - RNA, 12 nt, Human
ucguggccagcc

SEQ ID NO: 2374563 - RNA, 13 nt, Human
ucguggccagccc

SEQ ID NO: 2374564 - RNA, 14 nt, Human
ucguggccagcccg

SEQ ID NO: 2374565 - RNA, 15 nt, Human
ucguggccagcccgg

SEQ ID NO: 2374566 - RNA, 22 nt, Human
ucgugggacagucaccucaugg

SEQ ID NO: 2374567 - RNA, 24 nt, Human
ucguggaaagggugcugcuucccu

SEQ ID NO: 2374568 - RNA, 23 nt, Human
ucgugccuccuuccaccucccuc

SEQ ID NO: 2374569 - RNA, 23 nt, Human
ucguggaaagggugcugcuuccc

SEQ ID NO: 2374570 - RNA, 23 nt, Human
ucguggcagauaaucagccucuu

SEQ ID NO: 2374571 - RNA, 22 nt, Human
ucguggcagauaaucagccucu

SEQ ID NO: 2374572 - RNA, 21 nt, Human
ucguggaacaguuaccucugc

SEQ ID NO: 2374573 - RNA, 23 nt, Human
ucgugccguuacucuccaaccug

SEQ ID NO: 2374574 - RNA, 20 nt, Human
ucgugccuccuuccaccucc

SEQ ID NO: 2374575 - RNA, 12 nt, Human
ucgugccugugu

SEQ ID NO: 2374576 - RNA, 13 nt, Human
ucgugccuguguc

SEQ ID NO: 2374577 - RNA, 14 nt, Human
ucgugccugugucc

SEQ ID NO: 2374578 - RNA, 18 nt, Human
ucgugcuaaauuuucagu

SEQ ID NO: 2374579 - RNA, 18 nt, Human
ucgugcggaaucagcuuc

SEQ ID NO: 2374580 - RNA, 15 nt, Human
ucgugccugugucca

SEQ ID NO: 2374581 - RNA, 21 nt, Human
ucgugccuguguccaugcgcu

SEQ ID NO: 2374582 - RNA, 20 nt, Human
ucgugccguuacucuccaac

SEQ ID NO: 2374583 - RNA, 23 nt, Human
ucgugccagucgcgcugccugug

SEQ ID NO: 2374584 - RNA, 21 nt, Human
ucgugccagucgcgcugccug

SEQ ID NO: 2374585 - RNA, 22 nt, Human
ucgugccagucgcgcugccugu

SEQ ID NO: 2374586 - RNA, 19 nt, Human
ucgugcagcauaugaggau

SEQ ID NO: 2374587 - RNA, 20 nt, Human
ucgugcauuggaagacccca

SEQ ID NO: 2374588 - RNA, 22 nt, Human
ucgugcauuggaagaccccacc

SEQ ID NO: 2374589 - RNA, 20 nt, Human
ucgugccagucgcgcugccu

SEQ ID NO: 2374590 - RNA, 22 nt, Human
ucgugacgcugaauaaaugucu

SEQ ID NO: 2374591 - RNA, 15 nt, Human
ucgugauaaacuuug

SEQ ID NO: 2374592 - RNA, 19 nt, Human
ucgugccagucgcgcugcc

SEQ ID NO: 2374593 - RNA, 11 nt, Human
ucucugaaccc

SEQ ID NO: 2374594 - RNA, 22 nt, Human
ucucugaagaguggguuucaca

SEQ ID NO: 2374595 - RNA, 23 nt, Human
ucucugaagaguggguuucacaa

SEQ ID NO: 2374596 - RNA, 21 nt, Human
ucucucuggcccucuaccccu

SEQ ID NO: 2374597 - RNA, 13 nt, Human
ucucugaagauga

SEQ ID NO: 2374598 - RNA, 12 nt, Human
ucucucuggccc

SEQ ID NO: 2374599 - RNA, 13 nt, Human
ucucucuggcccu

SEQ ID NO: 2374600 - RNA, 19 nt, Human
ucucucuggcccucuaccc

SEQ ID NO: 2374601 - RNA, 16 nt, Human
ucucucugcccaaccc

SEQ ID NO: 2374602 - RNA, 14 nt, Human
ucucucugcccaac

SEQ ID NO: 2374603 - RNA, 13 nt, Human
ucucucuccuguc

SEQ ID NO: 2374604 - RNA, 13 nt, Human
ucucucucuacaa

SEQ ID NO: 2374605 - RNA, 12 nt, Human
ucucucuccugu

SEQ ID NO: 2374606 - RNA, 14 nt, Human
ucucucucucuccc

SEQ ID NO: 2374607 - RNA, 14 nt, Human
ucucucucuacaaa

SEQ ID NO: 2374608 - RNA, 15 nt, Human
ucucucucuuagcau

SEQ ID NO: 2374609 - RNA, 14 nt, Human
ucucucucucucuc

SEQ ID NO: 2374610 - RNA, 14 nt, Human
ucucucugacucuc

SEQ ID NO: 2374611 - RNA, 20 nt, Human
ucucucugacucucaaaucu

SEQ ID NO: 2374612 - RNA, 12 nt, Human
ucucucugccca

SEQ ID NO: 2374613 - RNA, 21 nt, Human
ucucucugacucucaaaucuu

SEQ ID NO: 2374614 - RNA, 22 nt, Human
ucucucuccuguacuuuuucca

SEQ ID NO: 2374615 - RNA, 11 nt, Human
ucucucuccug

SEQ ID NO: 2374616 - RNA, 23 nt, Human
ucucucucccauggagccccagc

SEQ ID NO: 2374617 - RNA, 18 nt, Human
ucucucucccauggagcc

SEQ ID NO: 2374618 - RNA, 19 nt, Human
ucucuagugcugugaaaaa

SEQ ID NO: 2374619 - RNA, 17 nt, Human
ucucuagugcugugaaa

SEQ ID NO: 2374620 - RNA, 16 nt, Human
ucucuagugcugugaa

SEQ ID NO: 2374621 - RNA, 16 nt, Human
ucucuaguuugauuaa

SEQ ID NO: 2374622 - RNA, 14 nt, Human
ucucuagugcugug

SEQ ID NO: 2374623 - RNA, 14 nt, Human
ucucuaggcugggg

SEQ ID NO: 2374624 - RNA, 15 nt, Human
ucucuaggcugggga

SEQ ID NO: 2374625 - RNA, 15 nt, Human
ucucuaguuugauua

SEQ ID NO: 2374626 - RNA, 17 nt, Human
ucucugaggacacuaac

SEQ ID NO: 2374627 - RNA, 13 nt, Human
ucucugcaggucc

SEQ ID NO: 2374628 - RNA, 14 nt, Human
ucucugcagguccc

SEQ ID NO: 2374629 - RNA, 14 nt, Human
ucucugaauccuaa

SEQ ID NO: 2374630 - RNA, 16 nt, Human
ucucugaagugaaacu

SEQ ID NO: 2374631 - RNA, 16 nt, Human
ucucugaagggaggug

SEQ ID NO: 2374632 - RNA, 12 nt, Human
ucucugaccuac

SEQ ID NO: 2374633 - RNA, 21 nt, Human
ucucugaccuacucgagggac

SEQ ID NO: 2374634 - RNA, 17 nt, Human
ucucugacucucaaauc

SEQ ID NO: 2374635 - RNA, 14 nt, Human
ucucugaggacacu

SEQ ID NO: 2374636 - RNA, 11 nt, Human
ucucugaaggg

SEQ ID NO: 2374637 - RNA, 13 nt, Human
ucucugaagggag

SEQ ID NO: 2374638 - RNA, 14 nt, Human
ucucugaagggagg

SEQ ID NO: 2374639 - RNA, 22 nt, Human
ucucugaagcauguuucauguu

SEQ ID NO: 2374640 - RNA, 19 nt, Human
ucucugaagcauguuucau

SEQ ID NO: 2374641 - RNA, 21 nt, Human
ucucugaagcauguuucaugu

SEQ ID NO: 2374642 - RNA, 12 nt, Human
ucucugaagcau

SEQ ID NO: 2374643 - RNA, 13 nt, Human
ucucugaagcaug

SEQ ID NO: 2374644 - RNA, 14 nt, Human
ucucugaagcaugu

SEQ ID NO: 2374645 - RNA, 16 nt, Human
ucucugaagcauguuu

SEQ ID NO: 2374646 - RNA, 16 nt, Human
ucucugugaacgauuu

SEQ ID NO: 2374647 - RNA, 18 nt, Human
ucucuguagggaacucug

SEQ ID NO: 2374648 - RNA, 16 nt, Human
ucucugucucaugugu

SEQ ID NO: 2374649 - RNA, 23 nt, Human
ucucugucucauccaucaucaug

SEQ ID NO: 2374650 - RNA, 21 nt, Human
ucucugucucauccaucauca

SEQ ID NO: 2374651 - RNA, 18 nt, Human
ucucugugaccugccccg

SEQ ID NO: 2374652 - RNA, 14 nt, Human
ucucugugagacuc

SEQ ID NO: 2374653 - RNA, 22 nt, Human
ucucugugaacgauuuagaaag

SEQ ID NO: 2374654 - RNA, 23 nt, Human
ucucugugaacgauuuagaaaga

SEQ ID NO: 2374655 - RNA, 19 nt, Human
ucucugugagacucgagaa

SEQ ID NO: 2374656 - RNA, 22 nt, Human
ucucugugagacucgagaacuu

SEQ ID NO: 2374657 - RNA, 12 nt, Human
ucucugugccuu

SEQ ID NO: 2374658 - RNA, 17 nt, Human
ucucugugccuucgucu

SEQ ID NO: 2374659 - RNA, 11 nt, Human
ucucugugcuu

SEQ ID NO: 2374660 - RNA, 15 nt, Human
ucucugugcugugga

SEQ ID NO: 2374661 - RNA, 19 nt, Human
ucucugugcuucaauuaau

SEQ ID NO: 2374662 - RNA, 16 nt, Human
ucucugugcuuugacu

SEQ ID NO: 2374663 - RNA, 21 nt, Human
ucucugugcuuugacucaccu

SEQ ID NO: 2374664 - RNA, 22 nt, Human
ucucugugcuuugacucaccug

SEQ ID NO: 2374665 - RNA, 19 nt, Human
ucucuguagggaacucugg

SEQ ID NO: 2374666 - RNA, 16 nt, Human
ucucugucucauccau

SEQ ID NO: 2374667 - RNA, 15 nt, Human
ucucugucucaucca

SEQ ID NO: 2374668 - RNA, 14 nt, Human
ucucugucucaucc

SEQ ID NO: 2374669 - RNA, 12 nt, Human
ucucugucucau

SEQ ID NO: 2374670 - RNA, 13 nt, Human
ucucugguccgga

SEQ ID NO: 2374671 - RNA, 20 nt, Human
ucucugguccggacacuccu

SEQ ID NO: 2374672 - RNA, 17 nt, Human
ucucuggugagcgagga

SEQ ID NO: 2374673 - RNA, 12 nt, Human
ucucuggcuggg

SEQ ID NO: 2374674 - RNA, 13 nt, Human
ucucuggcugggg

SEQ ID NO: 2374675 - RNA, 22 nt, Human
ucucuggcgacaguuuuccuuc

SEQ ID NO: 2374676 - RNA, 17 nt, Human
ucucuggcgacaguuuu

SEQ ID NO: 2374677 - RNA, 16 nt, Human
ucucuggcgacaguuu

SEQ ID NO: 2374678 - RNA, 14 nt, Human
ucucuggcugggga

SEQ ID NO: 2374679 - RNA, 21 nt, Human
ucucugggcuuggggcuuccu

SEQ ID NO: 2374680 - RNA, 18 nt, Human
ucucuggggccacacaga

SEQ ID NO: 2374681 - RNA, 17 nt, Human
ucucugguaauauugac

SEQ ID NO: 2374682 - RNA, 15 nt, Human
ucucugcaggucccu

SEQ ID NO: 2374683 - RNA, 16 nt, Human
ucucugcaggucccua

SEQ ID NO: 2374684 - RNA, 20 nt, Human
ucucugagggcuuccuuugg

SEQ ID NO: 2374685 - RNA, 20 nt, Human
ucucugaugugauauccacu

SEQ ID NO: 2374686 - RNA, 17 nt, Human
ucucuggccuuuuccua

SEQ ID NO: 2374687 - RNA, 19 nt, Human
ucucuaaagaguuuauuuu

SEQ ID NO: 2374688 - RNA, 21 nt, Human
ucucuaaagaguuuauuuuaa

SEQ ID NO: 2374689 - RNA, 15 nt, Human
ucucguuucaaaaac

SEQ ID NO: 2374690 - RNA, 14 nt, Human
ucucguuucaaaaa

SEQ ID NO: 2374691 - RNA, 12 nt, Human
ucucguuuuucu

SEQ ID NO: 2374692 - RNA, 22 nt, Human
ucucuaaagaguuuauuuuaag

SEQ ID NO: 2374693 - RNA, 23 nt, Human
ucucuaaaugaggggccucaggu

SEQ ID NO: 2374694 - RNA, 18 nt, Human
ucucuaacagcucaggau

SEQ ID NO: 2374695 - RNA, 17 nt, Human
ucucuaacagcucagga

SEQ ID NO: 2374696 - RNA, 21 nt, Human
ucucuaacucagaaacaucag

SEQ ID NO: 2374697 - RNA, 20 nt, Human
ucucuaacucagaaacauca

SEQ ID NO: 2374698 - RNA, 18 nt, Human
ucucuaacucagaaacau

SEQ ID NO: 2374699 - RNA, 12 nt, Human
ucucuaacuuca

SEQ ID NO: 2374700 - RNA, 22 nt, Human
ucucuaacuucaaggcccauau

SEQ ID NO: 2374701 - RNA, 22 nt, Human
ucucuaacucagaaacaucagu

SEQ ID NO: 2374702 - RNA, 16 nt, Human
ucucuaaguuccacug

SEQ ID NO: 2374703 - RNA, 19 nt, Human
ucucuaacuucaccauauu

SEQ ID NO: 2374704 - RNA, 21 nt, Human
ucucuaaguuccacugagcuc

SEQ ID NO: 2374705 - RNA, 11 nt, Human
ucucuaauaug

SEQ ID NO: 2374706 - RNA, 18 nt, Human
ucucuaaguuccacugag

SEQ ID NO: 2374707 - RNA, 21 nt, Human
ucucgugguaggacuguagaa

SEQ ID NO: 2374708 - RNA, 18 nt, Human
ucucgugggagagccauc

SEQ ID NO: 2374709 - RNA, 19 nt, Human
ucucgugguaggacuguag

SEQ ID NO: 2374710 - RNA, 14 nt, Human
ucucgugauugaua

SEQ ID NO: 2374711 - RNA, 22 nt, Human
ucucgugauugauaagaaccuu

SEQ ID NO: 2374712 - RNA, 17 nt, Human
ucuccuguaccucuuga

SEQ ID NO: 2374713 - RNA, 16 nt, Human
ucuccuguaccucuug

SEQ ID NO: 2374714 - RNA, 17 nt, Human
ucucgguuccacguccc

SEQ ID NO: 2374715 - RNA, 14 nt, Human
ucucggugguacca

SEQ ID NO: 2374716 - RNA, 21 nt, Human
ucucggcuccccauguguccu

SEQ ID NO: 2374717 - RNA, 19 nt, Human
ucuccuguaccucuugagc

SEQ ID NO: 2374718 - RNA, 21 nt, Human
ucuccuggaaauauuaagaaa

SEQ ID NO: 2374719 - RNA, 21 nt, Human
ucuccuggaagugcuaauuuu

SEQ ID NO: 2374720 - RNA, 15 nt, Human
ucuccuguaccucuu

SEQ ID NO: 2374721 - RNA, 11 nt, Human
ucuccuggagg

SEQ ID NO: 2374722 - RNA, 12 nt, Human
ucuccuggagga

SEQ ID NO: 2374723 - RNA, 13 nt, Human
ucuccuggaggau

SEQ ID NO: 2374724 - RNA, 17 nt, Human
ucuccuggaggauugca

SEQ ID NO: 2374725 - RNA, 17 nt, Human
ucuccugccucagccuc

SEQ ID NO: 2374726 - RNA, 15 nt, Human
ucuccugccucagcc

SEQ ID NO: 2374727 - RNA, 20 nt, Human
ucucaaggugggccuugcua

SEQ ID NO: 2374728 - RNA, 23 nt, Human
ucucaagggcuagcaucccugag

SEQ ID NO: 2374729 - RNA, 13 nt, Human
ucucaagcccugc

SEQ ID NO: 2374730 - RNA, 19 nt, Human
ucucaagagggcacuggug

SEQ ID NO: 2374731 - RNA, 17 nt, Human
ucucaagagggcacugg

SEQ ID NO: 2374732 - RNA, 18 nt, Human
ucucaagagggcacuggu

SEQ ID NO: 2374733 - RNA, 17 nt, Human
ucucaaauucucaaccu

SEQ ID NO: 2374734 - RNA, 17 nt, Human
ucucaaaguuuugaaaa

SEQ ID NO: 2374735 - RNA, 18 nt, Human
ucucaaaguuuugaaaag

SEQ ID NO: 2374736 - RNA, 20 nt, Human
ucucaaaguuuugaaaagcu

SEQ ID NO: 2374737 - RNA, 23 nt, Human
ucucaaaguuuugaaaagcuauu

SEQ ID NO: 2374738 - RNA, 14 nt, Human
ucucaauaugcuua

SEQ ID NO: 2374739 - RNA, 22 nt, Human
ucucaauccuaauuucuccucc

SEQ ID NO: 2374740 - RNA, 12 nt, Human
ucuccugccuca

SEQ ID NO: 2374741 - RNA, 13 nt, Human
ucucaaugcucau

SEQ ID NO: 2374742 - RNA, 23 nt, Human
ucucaauccuaauuucuccuccc

SEQ ID NO: 2374743 - RNA, 16 nt, Human
ucugcauuuugcuauu

SEQ ID NO: 2374744 - RNA, 18 nt, Human
ucugcauuuugcuauugu

SEQ ID NO: 2374745 - RNA, 19 nt, Human
ucugcauuuugcuauugua

SEQ ID NO: 2374746 - RNA, 19 nt, Human
ucugccaaaggaugugaua

SEQ ID NO: 2374747 - RNA, 21 nt, Human
ucugcauuuucaccccacccu

SEQ ID NO: 2374748 - RNA, 17 nt, Human
ucugcauuuucacccca

SEQ ID NO: 2374749 - RNA, 19 nt, Human
ucugcauuucgguggcuag

SEQ ID NO: 2374750 - RNA, 14 nt, Human
ucugcauuugucua

SEQ ID NO: 2374751 - RNA, 15 nt, Human
ucugcauuugucuau

SEQ ID NO: 2374752 - RNA, 10 nt, Human
ucugcauuuu

SEQ ID NO: 2374753 - RNA, 18 nt, Human
ucugcauuucgguggcua

SEQ ID NO: 2374754 - RNA, 15 nt, Human
ucugcauuucggugg

SEQ ID NO: 2374755 - RNA, 16 nt, Human
ucugcauucuaguacu

SEQ ID NO: 2374756 - RNA, 17 nt, Human
ucugcauucaggaucaa

SEQ ID NO: 2374757 - RNA, 20 nt, Human
ucugcaugcggcccagcccg

SEQ ID NO: 2374758 - RNA, 21 nt, Human
ucugcaugcggcccagcccgg

SEQ ID NO: 2374759 - RNA, 22 nt, Human
ucugcaugcggcccagcccggc

SEQ ID NO: 2374760 - RNA, 23 nt, Human
ucugccaccuccccuauccaccc

SEQ ID NO: 2374761 - RNA, 20 nt, Human
ucugccaccuccccuaucca

SEQ ID NO: 2374762 - RNA, 15 nt, Human
ucugccaccuccccu

SEQ ID NO: 2374763 - RNA, 14 nt, Human
ucugccaccucccc

SEQ ID NO: 2374764 - RNA, 21 nt, Human
ucugccacccuaccuguucag

SEQ ID NO: 2374765 - RNA, 17 nt, Human
ucugccacccuaccugu

SEQ ID NO: 2374766 - RNA, 18 nt, Human
ucugccacccuaccuguu

SEQ ID NO: 2374767 - RNA, 14 nt, Human
ucugccacuggaag

SEQ ID NO: 2374768 - RNA, 15 nt, Human
ucugccacuucccag

SEQ ID NO: 2374769 - RNA, 16 nt, Human
ucugccacuucccagg

SEQ ID NO: 2374770 - RNA, 17 nt, Human
ucugccacuucccaggu

SEQ ID NO: 2374771 - RNA, 20 nt, Human
ucugccagaagauccccuca

SEQ ID NO: 2374772 - RNA, 21 nt, Human
ucugccagaagauccccucag

SEQ ID NO: 2374773 - RNA, 22 nt, Human
ucugccagaagauccccucagg

SEQ ID NO: 2374774 - RNA, 23 nt, Human
ucugccagaagauccccucagga

SEQ ID NO: 2374775 - RNA, 22 nt, Human
ucugccaauuuuugccuucauu

SEQ ID NO: 2374776 - RNA, 22 nt, Human
ucugcauuuugcuauuguaaau

SEQ ID NO: 2374777 - RNA, 19 nt, Human
ucugccaauuuuugccuuc

SEQ ID NO: 2374778 - RNA, 14 nt, Human
ucugccacccuacc

SEQ ID NO: 2374779 - RNA, 17 nt, Human
ucugccaccauccugcu

SEQ ID NO: 2374780 - RNA, 10 nt, Human
ucugccacca

SEQ ID NO: 2374781 - RNA, 16 nt, Human
ucugccaccaaaggcc

SEQ ID NO: 2374782 - RNA, 19 nt, Human
ucugccaccaaaggccagg

SEQ ID NO: 2374783 - RNA, 15 nt, Human
ucugccaccagagac

SEQ ID NO: 2374784 - RNA, 19 nt, Human
ucugcacaugucuuguaca

SEQ ID NO: 2374785 - RNA, 16 nt, Human
ucugcacaugucuugu

SEQ ID NO: 2374786 - RNA, 17 nt, Human
ucugcacaugucuugua

SEQ ID NO: 2374787 - RNA, 23 nt, Human
ucugcacaugcagcugcacccuc

SEQ ID NO: 2374788 - RNA, 17 nt, Human
ucugcaucuacucccaa

SEQ ID NO: 2374789 - RNA, 13 nt, Human
ucugcaucugacc

SEQ ID NO: 2374790 - RNA, 15 nt, Human
ucugcaucugaccac

SEQ ID NO: 2374791 - RNA, 20 nt, Human
ucugcaucugaccacgugcu

SEQ ID NO: 2374792 - RNA, 19 nt, Human
ucugcaucuacucccaagu

SEQ ID NO: 2374793 - RNA, 17 nt, Human
ucugcaucuuggggaca

SEQ ID NO: 2374794 - RNA, 22 nt, Human
ucugcaucuuggggacaucucu

SEQ ID NO: 2374795 - RNA, 14 nt, Human
ucugcaugcggccc

SEQ ID NO: 2374796 - RNA, 15 nt, Human
ucugcaugcggccca

SEQ ID NO: 2374797 - RNA, 16 nt, Human
ucugcaugcggcccag

SEQ ID NO: 2374798 - RNA, 17 nt, Human
ucugcaugcggcccagc

SEQ ID NO: 2374799 - RNA, 18 nt, Human
ucugcaugcggcccagcc

SEQ ID NO: 2374800 - RNA, 19 nt, Human
ucugcaugcggcccagccc

SEQ ID NO: 2374801 - RNA, 20 nt, Human
ucugcacaugcagcugcacc

SEQ ID NO: 2374802 - RNA, 21 nt, Human
ucugcacaugcagcugcaccc

SEQ ID NO: 2374803 - RNA, 22 nt, Human
ucugcacaugcagcugcacccu

SEQ ID NO: 2374804 - RNA, 12 nt, Human
ucugcacauguc

SEQ ID NO: 2374805 - RNA, 15 nt, Human
ucugcacaugucuug

SEQ ID NO: 2374806 - RNA, 14 nt, Human
ucugcaucagcugc

SEQ ID NO: 2374807 - RNA, 21 nt, Human
ucugcaucagcugcugaaaca

SEQ ID NO: 2374808 - RNA, 19 nt, Human
ucugcaucagcugcugaaa

SEQ ID NO: 2374809 - RNA, 14 nt, Human
ucugacccacugcu

SEQ ID NO: 2374810 - RNA, 15 nt, Human
ucugacccacugcuu

SEQ ID NO: 2374811 - RNA, 23 nt, Human
ucugaggaauccagacccggcug

SEQ ID NO: 2374812 - RNA, 14 nt, Human
ucugaccauuucag

SEQ ID NO: 2374813 - RNA, 23 nt, Human
ucugaccaguuuaaccugaugca

SEQ ID NO: 2374814 - RNA, 18 nt, Human
ucugaccauuucaggggu

SEQ ID NO: 2374815 - RNA, 22 nt, Human
ucugaggagaaacaaauaagac

SEQ ID NO: 2374816 - RNA, 20 nt, Human
ucugaggacauuccaagaca

SEQ ID NO: 2374817 - RNA, 12 nt, Human
ucugaggacauu

SEQ ID NO: 2374818 - RNA, 21 nt, Human
ucugaggcucuuucugggcca

SEQ ID NO: 2374819 - RNA, 21 nt, Human
ucugaggcuggauccuagccu

SEQ ID NO: 2374820 - RNA, 22 nt, Human
ucugaggcuggauccuagccuu

SEQ ID NO: 2374821 - RNA, 14 nt, Human
ucugcaacuuuaag

SEQ ID NO: 2374822 - RNA, 21 nt, Human
ucugcaacuuuaagcagcucu

SEQ ID NO: 2374823 - RNA, 23 nt, Human
ucugaggccuccucucucaguuu

SEQ ID NO: 2374824 - RNA, 19 nt, Human
ucugaggcucuuucugggc

SEQ ID NO: 2374825 - RNA, 23 nt, Human
ucugaggcugaaauucagaauau

SEQ ID NO: 2374826 - RNA, 11 nt, Human
ucugaggcuga

SEQ ID NO: 2374827 - RNA, 21 nt, Human
ucugcaagaauugaagcagga

SEQ ID NO: 2374828 - RNA, 20 nt, Human
ucugcaagaauugaagcagg

SEQ ID NO: 2374829 - RNA, 15 nt, Human
ucugcacagauggau

SEQ ID NO: 2374830 - RNA, 15 nt, Human
ucugcacagcuggcc

SEQ ID NO: 2374831 - RNA, 17 nt, Human
ucugcacagcuggccuc

SEQ ID NO: 2374832 - RNA, 12 nt, Human
ucugcacaugaa

SEQ ID NO: 2374833 - RNA, 23 nt, Human
ucugcacaugaaucccacccaca

SEQ ID NO: 2374834 - RNA, 13 nt, Human
ucugcacagaugg

SEQ ID NO: 2374835 - RNA, 10 nt, Human
ucugcacaga

SEQ ID NO: 2374836 - RNA, 22 nt, Human
ucugcaacuuuaagcagcucuu

SEQ ID NO: 2374837 - RNA, 14 nt, Human
ucugcacacagcac

SEQ ID NO: 2374838 - RNA, 15 nt, Human
ucugaacaauucucu

SEQ ID NO: 2374839 - RNA, 16 nt, Human
ucugaaccauuaaagu

SEQ ID NO: 2374840 - RNA, 12 nt, Human
ucugaaagccac

SEQ ID NO: 2374841 - RNA, 16 nt, Human
ucugacacacagcucu

SEQ ID NO: 2374842 - RNA, 17 nt, Human
ucugacacacagcucug

SEQ ID NO: 2374843 - RNA, 18 nt, Human
ucugacacacagcucugu

SEQ ID NO: 2374844 - RNA, 19 nt, Human
ucugacacacagcucuguc

SEQ ID NO: 2374845 - RNA, 16 nt, Human
ucugacagaaagcaga

SEQ ID NO: 2374846 - RNA, 12 nt, Human
ucugacaggcaa

SEQ ID NO: 2374847 - RNA, 21 nt, Human
ucugacaggcaaugcuggcug

SEQ ID NO: 2374848 - RNA, 22 nt, Human
ucugacaggcaaugcuggcugu

SEQ ID NO: 2374849 - RNA, 13 nt, Human
ucugacccacugc

SEQ ID NO: 2374850 - RNA, 18 nt, Human
ucugaccagcagcgccuu

SEQ ID NO: 2374851 - RNA, 17 nt, Human
ucugaccagcagcgccu

SEQ ID NO: 2374852 - RNA, 15 nt, Human
ucugacaucucugca

SEQ ID NO: 2374853 - RNA, 14 nt, Human
ucugacaucucugc

SEQ ID NO: 2374854 - RNA, 12 nt, Human
ucugacaucucu

SEQ ID NO: 2374855 - RNA, 15 nt, Human
ucugacauaaguauu

SEQ ID NO: 2374856 - RNA, 17 nt, Human
ucucuuauagaauauuu

SEQ ID NO: 2374857 - RNA, 18 nt, Human
ucucuuauagaauauuua

SEQ ID NO: 2374858 - RNA, 20 nt, Human
ucucuuauagaauauuuauu

SEQ ID NO: 2374859 - RNA, 21 nt, Human
ucucuuauagaauauuuauua

SEQ ID NO: 2374860 - RNA, 19 nt, Human
ucucuuuuuggaggugcuu

SEQ ID NO: 2374861 - RNA, 20 nt, Human
ucucuuuuuggaggugcuua

SEQ ID NO: 2374862 - RNA, 15 nt, Human
ucucuuauagaauau

SEQ ID NO: 2374863 - RNA, 19 nt, Human
ucucuuagcuccccuccaa

SEQ ID NO: 2374864 - RNA, 17 nt, Human
ucucuuagcuccccucc

SEQ ID NO: 2374865 - RNA, 18 nt, Human
ucucuuagcuccccucca

SEQ ID NO: 2374866 - RNA, 16 nt, Human
ucucuuagcuccccuc

SEQ ID NO: 2374867 - RNA, 13 nt, Human
ucucuuacugcaa

SEQ ID NO: 2374868 - RNA, 15 nt, Human
ucucuuacugcaaau

SEQ ID NO: 2374869 - RNA, 19 nt, Human
ucucuuacugcaaauguca

SEQ ID NO: 2374870 - RNA, 22 nt, Human
ucucuuacgcccaacccuuccc

SEQ ID NO: 2374871 - RNA, 18 nt, Human
ucucuuaauuuaaucuuu

SEQ ID NO: 2374872 - RNA, 21 nt, Human
ucucuguuccauugaaucugu

SEQ ID NO: 2374873 - RNA, 18 nt, Human
ucucuguucauuuccuca

SEQ ID NO: 2374874 - RNA, 17 nt, Human
ucucuguucauuuccuc

SEQ ID NO: 2374875 - RNA, 16 nt, Human
ucucuguucauuuccu

SEQ ID NO: 2374876 - RNA, 14 nt, Human
ucucuguucauuuc

SEQ ID NO: 2374877 - RNA, 13 nt, Human
ucucuguucauuu

SEQ ID NO: 2374878 - RNA, 10 nt, Human
ucucuguguu

SEQ ID NO: 2374879 - RNA, 20 nt, Human
ucucuguguuuguuccuaca

SEQ ID NO: 2374880 - RNA, 18 nt, Human
ucucugugugcacaaaua

SEQ ID NO: 2374881 - RNA, 18 nt, Human
ucugaaaauauaaccagc

SEQ ID NO: 2374882 - RNA, 22 nt, Human
ucugaaaauugaugggauuugg

SEQ ID NO: 2374883 - RNA, 23 nt, Human
ucugaaacccuggaccagugguc

SEQ ID NO: 2374884 - RNA, 20 nt, Human
ucugaaaccaguguuaggga

SEQ ID NO: 2374885 - RNA, 15 nt, Human
ucugaaaccaguguu

SEQ ID NO: 2374886 - RNA, 13 nt, Human
ucugaaaauguau

SEQ ID NO: 2374887 - RNA, 14 nt, Human
ucugaaaauugaug

SEQ ID NO: 2374888 - RNA, 15 nt, Human
ucugaaaacggcccu

SEQ ID NO: 2374889 - RNA, 17 nt, Human
ucugaaaacggcccucu

SEQ ID NO: 2374890 - RNA, 23 nt, Human
ucugaaaaauuccuuuguguuuc

SEQ ID NO: 2374891 - RNA, 13 nt, Human
ucugaaaauauaa

SEQ ID NO: 2374892 - RNA, 14 nt, Human
ucugaaaauauaac

SEQ ID NO: 2374893 - RNA, 12 nt, Human
ucugguuccagg

SEQ ID NO: 2374894 - RNA, 13 nt, Human
ucugguuccaggg

SEQ ID NO: 2374895 - RNA, 14 nt, Human
ucugguuccagggu

SEQ ID NO: 2374896 - RNA, 13 nt, Human
ucugguuccuccc

SEQ ID NO: 2374897 - RNA, 21 nt, Human
ucugguuccagggucccucug

SEQ ID NO: 2374898 - RNA, 23 nt, Human
ucugguuccagggucccucugug

SEQ ID NO: 2374899 - RNA, 14 nt, Human
ucuguccuacucug

SEQ ID NO: 2374900 - RNA, 21 nt, Human
ucugguuccuccccuccuccu

SEQ ID NO: 2374901 - RNA, 20 nt, Human
ucugguuccuccccuccucc

SEQ ID NO: 2374902 - RNA, 13 nt, Human
ucuggugucugcu

SEQ ID NO: 2374903 - RNA, 16 nt, Human
ucugguggucucugcu

SEQ ID NO: 2374904 - RNA, 21 nt, Human
ucugguggccgaucggggcac

SEQ ID NO: 2374905 - RNA, 16 nt, Human
ucugguggucuguugg

SEQ ID NO: 2374906 - RNA, 12 nt, Human
ucugguggcccc

SEQ ID NO: 2374907 - RNA, 14 nt, Human
ucugguggccccgu

SEQ ID NO: 2374908 - RNA, 23 nt, Human
ucuggugggguguguuccaacug

SEQ ID NO: 2374909 - RNA, 13 nt, Human
ucugggagaggau

SEQ ID NO: 2374910 - RNA, 15 nt, Human
ucugggagaggauuu

SEQ ID NO: 2374911 - RNA, 22 nt, Human
ucuggugagcgaggacauucuc

SEQ ID NO: 2374912 - RNA, 13 nt, Human
ucugggacuuccu

SEQ ID NO: 2374913 - RNA, 15 nt, Human
ucugggacuuccuug

SEQ ID NO: 2374914 - RNA, 17 nt, Human
ucugggacuuccuugcu

SEQ ID NO: 2374915 - RNA, 21 nt, Human
ucugggacuuccuugcucucc

SEQ ID NO: 2374916 - RNA, 17 nt, Human
ucuggugaggccuugcu

SEQ ID NO: 2374917 - RNA, 18 nt, Human
ucuggugaggccuugcuc

SEQ ID NO: 2374918 - RNA, 21 nt, Human
ucuguccuuuuggcacugaga

SEQ ID NO: 2374919 - RNA, 22 nt, Human
ucugucuccuuaacacugagcu

SEQ ID NO: 2374920 - RNA, 19 nt, Human
ucuguccuuuuggcacuga

SEQ ID NO: 2374921 - RNA, 12 nt, Human
ucugucucugcc

SEQ ID NO: 2374922 - RNA, 22 nt, Human
ucugucucuggauuauauuaug

SEQ ID NO: 2374923 - RNA, 16 nt, Human
ucugucgcccagucug

SEQ ID NO: 2374924 - RNA, 20 nt, Human
ucuguccuucagauggaaac

SEQ ID NO: 2374925 - RNA, 14 nt, Human
ucuguccugguguc

SEQ ID NO: 2374926 - RNA, 14 nt, Human
ucuguccuucagau

SEQ ID NO: 2374927 - RNA, 14 nt, Human
ucugucgcccaguc

SEQ ID NO: 2374928 - RNA, 21 nt, Human
ucuguccugggagugagcugg

SEQ ID NO: 2374929 - RNA, 20 nt, Human
ucuguccuacucugugucag

SEQ ID NO: 2374930 - RNA, 17 nt, Human
ucuguccuggugucacu

SEQ ID NO: 2374931 - RNA, 15 nt, Human
ucuguccuacucugu

SEQ ID NO: 2374932 - RNA, 19 nt, Human
ucuguccuacucuguguca

SEQ ID NO: 2374933 - RNA, 18 nt, Human
ucuggcugaacacuggca

SEQ ID NO: 2374934 - RNA, 13 nt, Human
ucuggcugaaccc

SEQ ID NO: 2374935 - RNA, 14 nt, Human
ucuggcugaacccu

SEQ ID NO: 2374936 - RNA, 16 nt, Human
ucuggcugaacccugu

SEQ ID NO: 2374937 - RNA, 17 nt, Human
ucuggcugaacccugug

SEQ ID NO: 2374938 - RNA, 18 nt, Human
ucuggcugaacccugugc

SEQ ID NO: 2374939 - RNA, 19 nt, Human
ucuggcugaacccugugcu

SEQ ID NO: 2374940 - RNA, 21 nt, Human
ucuggcugaacccugugcugg

SEQ ID NO: 2374941 - RNA, 20 nt, Human
ucuggcugaacccugugcug

SEQ ID NO: 2374942 - RNA, 15 nt, Human
ucuggcugagcccug

SEQ ID NO: 2374943 - RNA, 16 nt, Human
ucuggcugagcccugc

SEQ ID NO: 2374944 - RNA, 14 nt, Human
ucuggcugagcuga

SEQ ID NO: 2374945 - RNA, 18 nt, Human
ucuggcucuuccaggcug

SEQ ID NO: 2374946 - RNA, 23 nt, Human
ucuggcucuuccaggcugggaga

SEQ ID NO: 2374947 - RNA, 16 nt, Human
ucugggacccuuuccu

SEQ ID NO: 2374948 - RNA, 15 nt, Human
ucugggacccuuucc

SEQ ID NO: 2374949 - RNA, 15 nt, Human
ucuggcugagcugaa

SEQ ID NO: 2374950 - RNA, 21 nt, Human
ucuggcugagcugaacccauu

SEQ ID NO: 2374951 - RNA, 14 nt, Human
ucugggacacaguu

SEQ ID NO: 2374952 - RNA, 19 nt, Human
ucugggacccuuuccuucc

SEQ ID NO: 2374953 - RNA, 20 nt, Human
ucugggaccugccaggcagg

SEQ ID NO: 2374954 - RNA, 21 nt, Human
ucugggaccugccaggcaggg

SEQ ID NO: 2374955 - RNA, 22 nt, Human
ucugggaccugccaggcagggg

SEQ ID NO: 2374956 - RNA, 13 nt, Human
ucugggaccucag

SEQ ID NO: 2374957 - RNA, 16 nt, Human
ucugggaccucaguuu

SEQ ID NO: 2374958 - RNA, 23 nt, Human
ucuggugacuuuccucuuugguc

SEQ ID NO: 2374959 - RNA, 20 nt, Human
ucuggaccccaucugugaau

SEQ ID NO: 2374960 - RNA, 23 nt, Human
ucuggaccaacccuguuuccuga

SEQ ID NO: 2374961 - RNA, 19 nt, Human
ucuggcuccucaaacagua

SEQ ID NO: 2374962 - RNA, 15 nt, Human
ucuggcuccagcugg

SEQ ID NO: 2374963 - RNA, 22 nt, Human
ucuggcuaugcauuugaaaauu

SEQ ID NO: 2374964 - RNA, 19 nt, Human
ucuggcuaugcauuugaaa

SEQ ID NO: 2374965 - RNA, 23 nt, Human
ucuggccuucggccuccauccug

SEQ ID NO: 2374966 - RNA, 18 nt, Human
ucuggccuucggccucca

SEQ ID NO: 2374967 - RNA, 19 nt, Human
ucuggaccccaucugugaa

SEQ ID NO: 2374968 - RNA, 18 nt, Human
ucuggaccccaucuguga

SEQ ID NO: 2374969 - RNA, 17 nt, Human
ucuggaccccaucugug

SEQ ID NO: 2374970 - RNA, 14 nt, Human
ucuggaccccaucu

SEQ ID NO: 2374971 - RNA, 17 nt, Human
ucuggccuucggccucc

SEQ ID NO: 2374972 - RNA, 19 nt, Human
ucuggaaucuggagaccag

SEQ ID NO: 2374973 - RNA, 22 nt, Human
ucuggaccaacccuguuuccug

SEQ ID NO: 2374974 - RNA, 21 nt, Human
ucuggacaggcauguucucug

SEQ ID NO: 2374975 - RNA, 16 nt, Human
ucuggaaugcaguggu

SEQ ID NO: 2374976 - RNA, 14 nt, Human
ucuggacaggcaug

SEQ ID NO: 2374977 - RNA, 15 nt, Human
ucuggaaugcagugg

SEQ ID NO: 2374978 - RNA, 22 nt, Human
ucuggaauacaugaaauauaga

SEQ ID NO: 2374979 - RNA, 14 nt, Human
ucuggaauacauga

SEQ ID NO: 2374980 - RNA, 19 nt, Human
ucuggaauaaggagaauga

SEQ ID NO: 2374981 - RNA, 22 nt, Human
ucugcugggcuggggccugaug

SEQ ID NO: 2374982 - RNA, 24 nt, Human
ucugcugggcuggggccugauggg

SEQ ID NO: 2374983 - RNA, 12 nt, Human
ucugcugggcug

SEQ ID NO: 2374984 - RNA, 13 nt, Human
ucugcugggcugg

SEQ ID NO: 2374985 - RNA, 14 nt, Human
ucugcugggcuggg

SEQ ID NO: 2374986 - RNA, 17 nt, Human
ucugcugggcuggggcc

SEQ ID NO: 2374987 - RNA, 19 nt, Human
ucugcugacagacacaggc

SEQ ID NO: 2374988 - RNA, 20 nt, Human
ucugcugacagacacaggcc

SEQ ID NO: 2374989 - RNA, 21 nt, Human
ucugcugacagacacaggccc

SEQ ID NO: 2374990 - RNA, 22 nt, Human
ucugcugacagacacaggcccg

SEQ ID NO: 2374991 - RNA, 14 nt, Human
ucugcuggcccagc

SEQ ID NO: 2374992 - RNA, 12 nt, Human
ucugcuggccca

SEQ ID NO: 2374993 - RNA, 22 nt, Human
ucugcuggauaaaaugagguuc

SEQ ID NO: 2374994 - RNA, 18 nt, Human
ucugcuggauaaaaugag

SEQ ID NO: 2374995 - RNA, 16 nt, Human
ucugcuggauaaaaug

SEQ ID NO: 2374996 - RNA, 22 nt, Human
ucugcugauccucccaggcuuc

SEQ ID NO: 2374997 - RNA, 20 nt, Human
ucugcuggcccagccaaacc

SEQ ID NO: 2374998 - RNA, 14 nt, Human
ucugcuggccugga

SEQ ID NO: 2374999 - RNA, 15 nt, Human
ucugcuggccuggau

SEQ ID NO: 2375000 - RNA, 16 nt, Human
ucugcuggccuggauc

SEQ ID NO: 2375001 - RNA, 17 nt, Human
ucugcuggccuggaucu

SEQ ID NO: 2375002 - RNA, 18 nt, Human
ucugcuggccuggaucuc

SEQ ID NO: 2375003 - RNA, 15 nt, Human
ucugcuggccuggcc

SEQ ID NO: 2375004 - RNA, 16 nt, Human
ucugcuggccuggccg

SEQ ID NO: 2375005 - RNA, 14 nt, Human
ucugccugcccagg

SEQ ID NO: 2375006 - RNA, 13 nt, Human
ucugccugcccag

SEQ ID NO: 2375007 - RNA, 19 nt, Human
ucugccagugacagacagg

SEQ ID NO: 2375008 - RNA, 21 nt, Human
ucugccagugacagacaggcu

SEQ ID NO: 2375009 - RNA, 13 nt, Human
ucugccagugaca

SEQ ID NO: 2375010 - RNA, 19 nt, Human
ucugccagggagcuugaaa

SEQ ID NO: 2375011 - RNA, 14 nt, Human
ucugccagggagcu

SEQ ID NO: 2375012 - RNA, 13 nt, Human
ucugccagggagc

SEQ ID NO: 2375013 - RNA, 12 nt, Human
ucugccagggag

SEQ ID NO: 2375014 - RNA, 23 nt, Human
ucugccaggcccccaagccugca

SEQ ID NO: 2375015 - RNA, 19 nt, Human
ucugccagccagcagccag

SEQ ID NO: 2375016 - RNA, 14 nt, Human
ucugccaggccccc

SEQ ID NO: 2375017 - RNA, 17 nt, Human
ucugccagccagcagcc

SEQ ID NO: 2375018 - RNA, 16 nt, Human
ucugccagccagcagc

SEQ ID NO: 2375019 - RNA, 15 nt, Human
ucugccagccagcag

SEQ ID NO: 2375020 - RNA, 13 nt, Human
ucugccagccagc

SEQ ID NO: 2375021 - RNA, 13 nt, Human
ucugccagccaca

SEQ ID NO: 2375022 - RNA, 15 nt, Human
ucugccugcccaggc

SEQ ID NO: 2375023 - RNA, 16 nt, Human
ucugccugcccaggcc

SEQ ID NO: 2375024 - RNA, 12 nt, Human
ucugcuccucuc

SEQ ID NO: 2375025 - RNA, 13 nt, Human
ucugcuccucucc

SEQ ID NO: 2375026 - RNA, 14 nt, Human
ucugcuccucucca

SEQ ID NO: 2375027 - RNA, 15 nt, Human
ucugcuccucuccag

SEQ ID NO: 2375028 - RNA, 16 nt, Human
ucugcuccccagggga

SEQ ID NO: 2375029 - RNA, 23 nt, Human
ucugccagugacagacaggcucu

SEQ ID NO: 2375030 - RNA, 18 nt, Human
ucugcuccucuccccagc

SEQ ID NO: 2375031 - RNA, 21 nt, Human
ucugcuccucuccccagcaag

SEQ ID NO: 2375032 - RNA, 16 nt, Human
ucugcuccucuccagg

SEQ ID NO: 2375033 - RNA, 17 nt, Human
ucugcuccucuccaggc

SEQ ID NO: 2375034 - RNA, 18 nt, Human
ucugcuccucuccaggca

SEQ ID NO: 2375035 - RNA, 20 nt, Human
ucugcuccucuccaggcacc

SEQ ID NO: 2375036 - RNA, 18 nt, Human
ucugcugacagacacagg

SEQ ID NO: 2375037 - RNA, 17 nt, Human
ucugcugacagacacag

SEQ ID NO: 2375038 - RNA, 17 nt, Human
ucuuaaacaaauguaug

SEQ ID NO: 2375039 - RNA, 16 nt, Human
ucuuaaaccuucaguu

SEQ ID NO: 2375040 - RNA, 18 nt, Human
ucuuaaaaaauaaaaacu

SEQ ID NO: 2375041 - RNA, 14 nt, Human
ucuguuuuucuuuu

SEQ ID NO: 2375042 - RNA, 16 nt, Human
ucuguuuuuaaaaauc

SEQ ID NO: 2375043 - RNA, 19 nt, Human
ucuuaaagcugccuguagu

SEQ ID NO: 2375044 - RNA, 16 nt, Human
ucuuaaagcugccugu

SEQ ID NO: 2375045 - RNA, 20 nt, Human
ucuuaaagaaaacccacccc

SEQ ID NO: 2375046 - RNA, 21 nt, Human
ucuuaaagcugccuguaguua

SEQ ID NO: 2375047 - RNA, 20 nt, Human
ucuuaaagcugccuguaguu

SEQ ID NO: 2375048 - RNA, 23 nt, Human
ucuuaaagcugccuguaguuagg

SEQ ID NO: 2375049 - RNA, 18 nt, Human
ucuuaaaguauucuucuc

SEQ ID NO: 2375050 - RNA, 22 nt, Human
ucuuaaaguauucuucucuucc

SEQ ID NO: 2375051 - RNA, 19 nt, Human
ucuuaaagaaaacccaccc

SEQ ID NO: 2375052 - RNA, 16 nt, Human
ucuguuuugccugaag

SEQ ID NO: 2375053 - RNA, 17 nt, Human
ucuguuuugaaggcaaa

SEQ ID NO: 2375054 - RNA, 23 nt, Human
ucuguuuucuuucuaaugagaua

SEQ ID NO: 2375055 - RNA, 20 nt, Human
ucuguuuuccuuucucaccg

SEQ ID NO: 2375056 - RNA, 12 nt, Human
ucuguuuucugu

SEQ ID NO: 2375057 - RNA, 15 nt, Human
ucugucuucaccuga

SEQ ID NO: 2375058 - RNA, 12 nt, Human
ucugucuugaag

SEQ ID NO: 2375059 - RNA, 19 nt, Human
ucugucuuggcuuucaugu

SEQ ID NO: 2375060 - RNA, 22 nt, Human
ucugucuucacagcucuguguu

SEQ ID NO: 2375061 - RNA, 15 nt, Human
ucugucuucacagcu

SEQ ID NO: 2375062 - RNA, 14 nt, Human
ucugucuucacagc

SEQ ID NO: 2375063 - RNA, 12 nt, Human
ucugucuucaca

SEQ ID NO: 2375064 - RNA, 15 nt, Human
ucugucuucacaaca

SEQ ID NO: 2375065 - RNA, 17 nt, Human
ucugucuucaagggcuu

SEQ ID NO: 2375066 - RNA, 16 nt, Human
ucugucugguggcccc

SEQ ID NO: 2375067 - RNA, 17 nt, Human
ucugucugguggccccg

SEQ ID NO: 2375068 - RNA, 13 nt, Human
ucugucugguggc

SEQ ID NO: 2375069 - RNA, 18 nt, Human
ucugucuggagugacaga

SEQ ID NO: 2375070 - RNA, 22 nt, Human
ucugucugcccuucaccccagu

SEQ ID NO: 2375071 - RNA, 13 nt, Human
ucugucugcccuu

SEQ ID NO: 2375072 - RNA, 14 nt, Human
ucugucucugccuc

SEQ ID NO: 2375073 - RNA, 17 nt, Human
ucugucucugccucccu

SEQ ID NO: 2375074 - RNA, 15 nt, Human
ucuuaaauaauaaag

SEQ ID NO: 2375075 - RNA, 11 nt, Human
ucuuaaauuuu

SEQ ID NO: 2375076 - RNA, 13 nt, Human
ucuuaaauuuugu

SEQ ID NO: 2375077 - RNA, 14 nt, Human
ucuuaaauuuugug

SEQ ID NO: 2375078 - RNA, 19 nt, Human
ucuuaaauaauaaagauca

SEQ ID NO: 2375079 - RNA, 22 nt, Human
ucuuaaauauguggaguucauc

SEQ ID NO: 2375080 - RNA, 16 nt, Human
ucuuaaccagaucauu

SEQ ID NO: 2375081 - RNA, 17 nt, Human
ucuuaaccagaucauug

SEQ ID NO: 2375082 - RNA, 15 nt, Human
ucuuaagacuuuugg

SEQ ID NO: 2375083 - RNA, 12 nt, Human
ucuuaagccauc

SEQ ID NO: 2375084 - RNA, 13 nt, Human
ucuuaagccaucu

SEQ ID NO: 2375085 - RNA, 16 nt, Human
ucuuaagccaucuugg

SEQ ID NO: 2375086 - RNA, 17 nt, Human
ucuuaagccaucuuggu

SEQ ID NO: 2375087 - RNA, 19 nt, Human
ucuuaagccaucuugguaa

SEQ ID NO: 2375088 - RNA, 18 nt, Human
ucuuaagaagacugcauu

SEQ ID NO: 2375089 - RNA, 12 nt, Human
ucuuaagcuucc

SEQ ID NO: 2375090 - RNA, 21 nt, Human
ucuuaagccuuuugcucacaa

SEQ ID NO: 2375091 - RNA, 17 nt, Human
ucuuagcuccccuccaa

SEQ ID NO: 2375092 - RNA, 20 nt, Human
ucuuaagccaucuugguaaa

SEQ ID NO: 2375093 - RNA, 22 nt, Human
ucuuaagccaucuugguaaauu

SEQ ID NO: 2375094 - RNA, 23 nt, Human
ucuuaagccaucuugguaaauuu

SEQ ID NO: 2375095 - RNA, 23 nt, Human
ucuuagcugucugcucagacaga

SEQ ID NO: 2375096 - RNA, 12 nt, Human
ucuuagcugagu

SEQ ID NO: 2375097 - RNA, 14 nt, Human
ucuuagcuuuuuaa

SEQ ID NO: 2375098 - RNA, 18 nt, Human
ucuuagcugucugcucag

SEQ ID NO: 2375099 - RNA, 15 nt, Human
ucuuagcugucugcu

SEQ ID NO: 2375100 - RNA, 12 nt, Human
ucuuaagaagac

SEQ ID NO: 2375101 - RNA, 12 nt, Human
ucuuaaccaucu

SEQ ID NO: 2375102 - RNA, 22 nt, Human
ucuuaacguuagaccacaaaua

SEQ ID NO: 2375103 - RNA, 18 nt, Human
ucuuaaauuuugugauau

SEQ ID NO: 2375104 - RNA, 15 nt, Human
ucuuaacaauuucug

SEQ ID NO: 2375105 - RNA, 19 nt, Human
ucuuaacaauuucuguccu

SEQ ID NO: 2375106 - RNA, 23 nt, Human
ucuuaacacauguccuugugugu

SEQ ID NO: 2375107 - RNA, 22 nt, Human
ucuuaaccagaucauugugaaa

SEQ ID NO: 2375108 - RNA, 22 nt, Human
ucuuccuugaagaacugcaggc

SEQ ID NO: 2375109 - RNA, 16 nt, Human
ucuucucauagcauua

SEQ ID NO: 2375110 - RNA, 21 nt, Human
ucuucucaggcucugcccugc

SEQ ID NO: 2375111 - RNA, 20 nt, Human
ucuucucaggcucugcccug

SEQ ID NO: 2375112 - RNA, 14 nt, Human
ucuucucaggcucu

SEQ ID NO: 2375113 - RNA, 20 nt, Human
ucuucucauagcauuaacua

SEQ ID NO: 2375114 - RNA, 19 nt, Human
ucuucucauagcauuaacu

SEQ ID NO: 2375115 - RNA, 18 nt, Human
ucuucucauagcauuaac

SEQ ID NO: 2375116 - RNA, 17 nt, Human
ucuucucauagcauuaa

SEQ ID NO: 2375117 - RNA, 10 nt, Human
ucuucucauu

SEQ ID NO: 2375118 - RNA, 19 nt, Human
ucuuccugugggggaagag

SEQ ID NO: 2375119 - RNA, 12 nt, Human
ucuuccuguggg

SEQ ID NO: 2375120 - RNA, 13 nt, Human
ucuuccugugggg

SEQ ID NO: 2375121 - RNA, 13 nt, Human
ucuuccuucugcc

SEQ ID NO: 2375122 - RNA, 21 nt, Human
ucuuccuugaagaacugcagg

SEQ ID NO: 2375123 - RNA, 12 nt, Human
ucuucuccacug

SEQ ID NO: 2375124 - RNA, 22 nt, Human
ucuucucauuucaccccucccu

SEQ ID NO: 2375125 - RNA, 23 nt, Human
ucuucucauuucaccccucccuu

SEQ ID NO: 2375126 - RNA, 15 nt, Human
ucuucucauuucacc

SEQ ID NO: 2375127 - RNA, 18 nt, Human
ucuucucauuucaccccu

SEQ ID NO: 2375128 - RNA, 19 nt, Human
ucuucucauuucaccccuc

SEQ ID NO: 2375129 - RNA, 20 nt, Human
ucuucucauuucaccccucc

SEQ ID NO: 2375130 - RNA, 12 nt, Human
ucuucuccacca

SEQ ID NO: 2375131 - RNA, 14 nt, Human
ucuucuccaucugg

SEQ ID NO: 2375132 - RNA, 12 nt, Human
ucuucuccccag

SEQ ID NO: 2375133 - RNA, 12 nt, Human
ucuucuccaucu

SEQ ID NO: 2375134 - RNA, 14 nt, Human
ucuucuccccaggu

SEQ ID NO: 2375135 - RNA, 19 nt, Human
ucuucuuuuugcuucaaaa

SEQ ID NO: 2375136 - RNA, 16 nt, Human
ucuucuuuuuuuguga

SEQ ID NO: 2375137 - RNA, 17 nt, Human
ucuucuuuuuuugugau

SEQ ID NO: 2375138 - RNA, 18 nt, Human
ucuucuuuuuuugugaug

SEQ ID NO: 2375139 - RNA, 14 nt, Human
ucuucuccuuucac

SEQ ID NO: 2375140 - RNA, 13 nt, Human
ucuucucuagcug

SEQ ID NO: 2375141 - RNA, 17 nt, Human
ucuucuccuauguguaa

SEQ ID NO: 2375142 - RNA, 15 nt, Human
ucuucucuagcuggu

SEQ ID NO: 2375143 - RNA, 13 nt, Human
ucuucuccuuuca

SEQ ID NO: 2375144 - RNA, 16 nt, Human
ucuucuccuaugugua

SEQ ID NO: 2375145 - RNA, 12 nt, Human
ucuugaacuccu

SEQ ID NO: 2375146 - RNA, 19 nt, Human
ucuugaacuccugaccuca

SEQ ID NO: 2375147 - RNA, 17 nt, Human
ucuugaacuccugaccu

SEQ ID NO: 2375148 - RNA, 13 nt, Human
ucuugaaaaaugc

SEQ ID NO: 2375149 - RNA, 19 nt, Human
ucuugaacacucaugcuga

SEQ ID NO: 2375150 - RNA, 20 nt, Human
ucuugaacacucaugcugaa

SEQ ID NO: 2375151 - RNA, 21 nt, Human
ucuugaacacucaugcugaaa

SEQ ID NO: 2375152 - RNA, 20 nt, Human
ucuucucuagcuggugguuu

SEQ ID NO: 2375153 - RNA, 18 nt, Human
ucuucuuuuugcuguugu

SEQ ID NO: 2375154 - RNA, 20 nt, Human
ucuucuuuuugcuguuguuu

SEQ ID NO: 2375155 - RNA, 23 nt, Human
ucuugaaagauucagguauguug

SEQ ID NO: 2375156 - RNA, 15 nt, Human
ucuuaggaagagaaa

SEQ ID NO: 2375157 - RNA, 19 nt, Human
ucuuaggaagagaaaccag

SEQ ID NO: 2375158 - RNA, 16 nt, Human
ucuuagcuuuuuaauu

SEQ ID NO: 2375159 - RNA, 17 nt, Human
ucuuagcuuuuuaauug

SEQ ID NO: 2375160 - RNA, 18 nt, Human
ucuuagcuuuuuaauugu

SEQ ID NO: 2375161 - RNA, 21 nt, Human
ucuuagcuuuuuaauuguugu

SEQ ID NO: 2375162 - RNA, 23 nt, Human
ucuucagaucucuaacuucacca

SEQ ID NO: 2375163 - RNA, 18 nt, Human
ucuucagaucucuaacuu

SEQ ID NO: 2375164 - RNA, 12 nt, Human
ucuucagccuag

SEQ ID NO: 2375165 - RNA, 11 nt, Human
ucuucagccua

SEQ ID NO: 2375166 - RNA, 19 nt, Human
ucuucagccaccucucuuu

SEQ ID NO: 2375167 - RNA, 13 nt, Human
ucuucagccauca

SEQ ID NO: 2375168 - RNA, 16 nt, Human
ucuucagccaucaaca

SEQ ID NO: 2375169 - RNA, 16 nt, Human
ucuucagccaccucuc

SEQ ID NO: 2375170 - RNA, 19 nt, Human
ucuuaggagcagagcucug

SEQ ID NO: 2375171 - RNA, 22 nt, Human
ucuuagcuuuuuaauuguuguu

SEQ ID NO: 2375172 - RNA, 14 nt, Human
ucuuaggagcagag

SEQ ID NO: 2375173 - RNA, 19 nt, Human
ucuuaggggagagcuuucu

SEQ ID NO: 2375174 - RNA, 17 nt, Human
ucuuaggggagagcuuu

SEQ ID NO: 2375175 - RNA, 19 nt, Human
ucuucauccggcagccugg

SEQ ID NO: 2375176 - RNA, 18 nt, Human
ucuucauccggcagccug

SEQ ID NO: 2375177 - RNA, 13 nt, Human
ucuucauacuuuu

SEQ ID NO: 2375178 - RNA, 15 nt, Human
ucuucauacuuuuuu

SEQ ID NO: 2375179 - RNA, 22 nt, Human
ucuucauacuuuuuuucacagu

SEQ ID NO: 2375180 - RNA, 18 nt, Human
ucuucaggccucccucuc

SEQ ID NO: 2375181 - RNA, 20 nt, Human
ucuucagcuugugcacaauu

SEQ ID NO: 2375182 - RNA, 15 nt, Human
ucuucauaauucuaa

SEQ ID NO: 2375183 - RNA, 21 nt, Human
ucuucauaccuacauguauuu

SEQ ID NO: 2375184 - RNA, 18 nt, Human
ucuucauaccuacaugua

SEQ ID NO: 2375185 - RNA, 15 nt, Human
ucuucaggccucccu

SEQ ID NO: 2375186 - RNA, 14 nt, Human
ucuucaggccuccc

SEQ ID NO: 2375187 - RNA, 13 nt, Human
ucuucaggccucc

SEQ ID NO: 2375188 - RNA, 13 nt, Human
ucuucagcuucuu

SEQ ID NO: 2375189 - RNA, 16 nt, Human
ucuucagcuucuucau

SEQ ID NO: 2375190 - RNA, 22 nt, Human
ucuucagccuagccgaccucag

SEQ ID NO: 2375191 - RNA, 21 nt, Human
ucuucagccuagccgaccuca

SEQ ID NO: 2375192 - RNA, 23 nt, Human
ucuucagccuagccgaccucagc

SEQ ID NO: 2375193 - RNA, 22 nt, Human
ucuucagccucuuucugucccu

SEQ ID NO: 2375194 - RNA, 20 nt, Human
ucuucauccggcagccugga

SEQ ID NO: 2375195 - RNA, 13 nt, Human
ucuucaucuucac

SEQ ID NO: 2375196 - RNA, 14 nt, Human
ucuucaugcaauga

SEQ ID NO: 2375197 - RNA, 17 nt, Human
ucuucaugcaaugacau

SEQ ID NO: 2375198 - RNA, 18 nt, Human
ucuucaucuucaccagag

SEQ ID NO: 2375199 - RNA, 22 nt, Human
ucuuccuguaacacaagccaca

SEQ ID NO: 2375200 - RNA, 17 nt, Human
ucuuccuggauuauuca

SEQ ID NO: 2375201 - RNA, 14 nt, Human
ucaaaaauauaacu

SEQ ID NO: 2375202 - RNA, 14 nt, Human
ucaaaaaaacacua

SEQ ID NO: 2375203 - RNA, 16 nt, Human
ucaaaaaaacacuagu

SEQ ID NO: 2375204 - RNA, 15 nt, Human
ucaaaaauauaacuu

SEQ ID NO: 2375205 - RNA, 16 nt, Human
ucaaaaauauaacuua

SEQ ID NO: 2375206 - RNA, 15 nt, Human
ucaaaaaacuuguaa

SEQ ID NO: 2375207 - RNA, 14 nt, Human
ucaaaaaacuugua

SEQ ID NO: 2375208 - RNA, 15 nt, Human
ucaaaacagagaugu

SEQ ID NO: 2375209 - RNA, 12 nt, Human
ucaaagaaaugc

SEQ ID NO: 2375210 - RNA, 16 nt, Human
ucaaagaaaugcugau

SEQ ID NO: 2375211 - RNA, 19 nt, Human
ucaaagaaaugcugaugga

SEQ ID NO: 2375212 - RNA, 21 nt, Human
ucaaaacacaucuuuccuguc

SEQ ID NO: 2375213 - RNA, 12 nt, Human
ucaaagaaggaa

SEQ ID NO: 2375214 - RNA, 16 nt, Human
ucaaagaaggauggca

SEQ ID NO: 2375215 - RNA, 23 nt, Human
ucaaagaagguuuguguuuuucu

SEQ ID NO: 2375216 - RNA, 17 nt, Human
ucaaagacauucugaca

SEQ ID NO: 2375217 - RNA, 22 nt, Human
ucaaagaaggauggcaccuaaa

SEQ ID NO: 2375218 - RNA, 17 nt, Human
ucaaagaccuugugugu

SEQ ID NO: 2375219 - RNA, 19 nt, Human
ucaaagaccuuguguguau

SEQ ID NO: 2375220 - RNA, 21 nt, Human
ucaaagaccuuguguguaugu

SEQ ID NO: 2375221 - RNA, 21 nt, Human
ucaaauauauucagccuggcu

SEQ ID NO: 2375222 - RNA, 22 nt, Human
ucaaauauauucagccuggcuu

SEQ ID NO: 2375223 - RNA, 23 nt, Human
ucaaauauauucagccuggcuuc

SEQ ID NO: 2375224 - RNA, 16 nt, Human
ucaaagagaaaacuua

SEQ ID NO: 2375225 - RNA, 15 nt, Human
ucaaauauuagaugu

SEQ ID NO: 2375226 - RNA, 16 nt, Human
ucaaauauuagaugug

SEQ ID NO: 2375227 - RNA, 15 nt, Human
ucaaaucagucagug

SEQ ID NO: 2375228 - RNA, 24 nt, Human
ucaaaucagucagugcaaauguca

SEQ ID NO: 2375229 - RNA, 19 nt, Human
ucaaauauuagaugugauu

SEQ ID NO: 2375230 - RNA, 14 nt, Human
ucaaaucagucagu

SEQ ID NO: 2375231 - RNA, 20 nt, Human
ucaaaucaagaaacuuaagg

SEQ ID NO: 2375232 - RNA, 14 nt, Human
ucaaauaugcaaag

SEQ ID NO: 2375233 - RNA, 23 nt, Human
ucaacccuaaaaagcagagcuuu

SEQ ID NO: 2375234 - RNA, 22 nt, Human
ucaacccuaaaaagcagagcuu

SEQ ID NO: 2375235 - RNA, 18 nt, Human
ucaacccuaaaaagcaga

SEQ ID NO: 2375236 - RNA, 13 nt, Human
ucaaauuguaucu

SEQ ID NO: 2375237 - RNA, 23 nt, Human
ucaacccucccucagccccucuu

SEQ ID NO: 2375238 - RNA, 21 nt, Human
ucaacccucccucagccccuc

SEQ ID NO: 2375239 - RNA, 20 nt, Human
ucaacccucccucagccccu

SEQ ID NO: 2375240 - RNA, 19 nt, Human
ucaacccucccucagcccc

SEQ ID NO: 2375241 - RNA, 18 nt, Human
ucaacccucccucagccc

SEQ ID NO: 2375242 - RNA, 17 nt, Human
ucaacccucccucagcc

SEQ ID NO: 2375243 - RNA, 15 nt, Human
ucaacccucccucag

SEQ ID NO: 2375244 - RNA, 14 nt, Human
ucaacccucccuca

SEQ ID NO: 2375245 - RNA, 23 nt, Human
ucaaccccuucgcuccugugucu

SEQ ID NO: 2375246 - RNA, 14 nt, Human
ucaaauuguaucua

SEQ ID NO: 2375247 - RNA, 12 nt, Human
ucaaauuguauc

SEQ ID NO: 2375248 - RNA, 16 nt, Human
ucaaauugagagaaug

SEQ ID NO: 2375249 - RNA, 16 nt, Human
ucaaauucucaaccua

SEQ ID NO: 2375250 - RNA, 21 nt, Human
ucaaauucuucugaacucaaa

SEQ ID NO: 2375251 - RNA, 16 nt, Human
ucaaauucuucugaac

SEQ ID NO: 2375252 - RNA, 14 nt, Human
ucaaauugugugaa

SEQ ID NO: 2375253 - RNA, 17 nt, Human
ucaaauuguaagcaugc

SEQ ID NO: 2375254 - RNA, 20 nt, Human
ucaaauuguaagcaugcaca

SEQ ID NO: 2375255 - RNA, 21 nt, Human
ucaaaugcucagaccagcucu

SEQ ID NO: 2375256 - RNA, 21 nt, Human
ucaaaugcuuggcuucucaua

SEQ ID NO: 2375257 - RNA, 15 nt, Human
ucaaauggaaaggag

SEQ ID NO: 2375258 - RNA, 20 nt, Human
ucaaauggaagacacauuga

SEQ ID NO: 2375259 - RNA, 23 nt, Human
ucaaauggaaaggagaggaaaga

SEQ ID NO: 2375260 - RNA, 17 nt, Human
ucaaauggaagacacau

SEQ ID NO: 2375261 - RNA, 12 nt, Human
ucaaauuaauaa

SEQ ID NO: 2375262 - RNA, 22 nt, Human
ucaaauuaauaaucuuauuagg

SEQ ID NO: 2375263 - RNA, 17 nt, Human
ucaaauuaauaaucuua

SEQ ID NO: 2375264 - RNA, 18 nt, Human
ucaaauggggccagaucc

SEQ ID NO: 2375265 - RNA, 15 nt, Human
ucaaauuagaagaca

SEQ ID NO: 2375266 - RNA, 16 nt, Human
ucaaauuagaagacau

SEQ ID NO: 2375267 - RNA, 23 nt, Human
ucaaauuaaucuuucuuuaccug

SEQ ID NO: 2375268 - RNA, 15 nt, Human
ucaaauucuucugaa

SEQ ID NO: 2375269 - RNA, 14 nt, Human
ucaaauucuucuga

SEQ ID NO: 2375270 - RNA, 20 nt, Human
ucaaauucauuuuuuucacu

SEQ ID NO: 2375271 - RNA, 17 nt, Human
ucaaauuagaagacauu

SEQ ID NO: 2375272 - RNA, 22 nt, Human
ucaaauuagaagacauuuauac

SEQ ID NO: 2375273 - RNA, 19 nt, Human
ucaaaugcucagaccagcu

SEQ ID NO: 2375274 - RNA, 14 nt, Human
ucaaaugcucagac

SEQ ID NO: 2375275 - RNA, 21 nt, Human
ucaaaugacccaaagaccaau

SEQ ID NO: 2375276 - RNA, 17 nt, Human
ucaaaugacccaaagac

SEQ ID NO: 2375277 - RNA, 19 nt, Human
ucaaaugacccaaagacca

SEQ ID NO: 2375278 - RNA, 16 nt, Human
ucaaaugacccaaaga

SEQ ID NO: 2375279 - RNA, 15 nt, Human
ucaaauccauccaga

SEQ ID NO: 2375280 - RNA, 15 nt, Human
ucaaaugacccaaag

SEQ ID NO: 2375281 - RNA, 20 nt, Human
uauuuuccaugaaaaugcaa

SEQ ID NO: 2375282 - RNA, 22 nt, Human
uauuuuccaagugugcauauug

SEQ ID NO: 2375283 - RNA, 24 nt, Human
uauuuuccaagugugcauauugua

SEQ ID NO: 2375284 - RNA, 18 nt, Human
uauuuucccccuuuucug

SEQ ID NO: 2375285 - RNA, 16 nt, Human
uauuuuccaugaaaau

SEQ ID NO: 2375286 - RNA, 22 nt, Human
uauuuuccaaaaguggccucuu

SEQ ID NO: 2375287 - RNA, 14 nt, Human
uauuuuccaagugu

SEQ ID NO: 2375288 - RNA, 15 nt, Human
uauuuuccaagugug

SEQ ID NO: 2375289 - RNA, 19 nt, Human
uauuuuccaagugugcaua

SEQ ID NO: 2375290 - RNA, 22 nt, Human
uauuuucaaauuguaucuagug

SEQ ID NO: 2375291 - RNA, 17 nt, Human
uauuuuauuuuuuucua

SEQ ID NO: 2375292 - RNA, 19 nt, Human
uauuuucaacgcagcccug

SEQ ID NO: 2375293 - RNA, 13 nt, Human
uauuuucauugua

SEQ ID NO: 2375294 - RNA, 15 nt, Human
uauuuucauuguaaa

SEQ ID NO: 2375295 - RNA, 16 nt, Human
uauuuucauuguaaaa

SEQ ID NO: 2375296 - RNA, 19 nt, Human
uauuuuauucccuuucaca

SEQ ID NO: 2375297 - RNA, 16 nt, Human
uauuuuauuguaacag

SEQ ID NO: 2375298 - RNA, 17 nt, Human
uauuuuauuguaacaga

SEQ ID NO: 2375299 - RNA, 13 nt, Human
uauuuuauucccu

SEQ ID NO: 2375300 - RNA, 20 nt, Human
uauuuuauuuagacaagaga

SEQ ID NO: 2375301 - RNA, 18 nt, Human
uauuuuauuguaacagac

SEQ ID NO: 2375302 - RNA, 19 nt, Human
uauuuuauuguaacagaca

SEQ ID NO: 2375303 - RNA, 23 nt, Human
uauuuuauuguaacagacauugu

SEQ ID NO: 2375304 - RNA, 17 nt, Human
uauuuuauuuagacaag

SEQ ID NO: 2375305 - RNA, 17 nt, Human
uauuuuauuaugcauga

SEQ ID NO: 2375306 - RNA, 14 nt, Human
uauuuuauuaugca

SEQ ID NO: 2375307 - RNA, 13 nt, Human
uauuuauauaaau

SEQ ID NO: 2375308 - RNA, 18 nt, Human
uauuuauagcaauccaug

SEQ ID NO: 2375309 - RNA, 17 nt, Human
uauuuauaauacauuuc

SEQ ID NO: 2375310 - RNA, 17 nt, Human
uauuuauaagcagauuu

SEQ ID NO: 2375311 - RNA, 14 nt, Human
uauuuauaagcaga

SEQ ID NO: 2375312 - RNA, 17 nt, Human
uauuuauaaucacuuuu

SEQ ID NO: 2375313 - RNA, 20 nt, Human
uauuuauaacucaucauaaa

SEQ ID NO: 2375314 - RNA, 13 nt, Human
uauuuauaacuca

SEQ ID NO: 2375315 - RNA, 19 nt, Human
uauuuauaacaaccuaaau

SEQ ID NO: 2375316 - RNA, 20 nt, Human
uauuuauaacaaccuaaauu

SEQ ID NO: 2375317 - RNA, 22 nt, Human
uauuuauaacucaucauaaaau

SEQ ID NO: 2375318 - RNA, 21 nt, Human
uauuuauaacucaucauaaaa

SEQ ID NO: 2375319 - RNA, 23 nt, Human
uauuuauaacucaucauaaaaua

SEQ ID NO: 2375320 - RNA, 15 nt, Human
uauuuauaaaacuuc

SEQ ID NO: 2375321 - RNA, 21 nt, Human
uauuuuauuacaucuuucaca

SEQ ID NO: 2375322 - RNA, 13 nt, Human
uauuuauauauuu

SEQ ID NO: 2375323 - RNA, 20 nt, Human
uauuuauauauugguaacau

SEQ ID NO: 2375324 - RNA, 23 nt, Human
uauuuauauauguauuuauaaau

SEQ ID NO: 2375325 - RNA, 14 nt, Human
uauuuauauauauu

SEQ ID NO: 2375326 - RNA, 16 nt, Human
uauuuauauauguauu

SEQ ID NO: 2375327 - RNA, 17 nt, Human
uauuuuauguugcauag

SEQ ID NO: 2375328 - RNA, 15 nt, Human
ucaaaaaaagaaaaa

SEQ ID NO: 2375329 - RNA, 14 nt, Human
ucaaaaaaagaaaa

SEQ ID NO: 2375330 - RNA, 17 nt, Human
uauuuuuuugcaaguga

SEQ ID NO: 2375331 - RNA, 19 nt, Human
uauuuuuuugcaagugaag

SEQ ID NO: 2375332 - RNA, 14 nt, Human
uauuuuuuuucugu

SEQ ID NO: 2375333 - RNA, 16 nt, Human
uauuuuuuuuucuaag

SEQ ID NO: 2375334 - RNA, 19 nt, Human
uauuuuuuuuucuaagaga

SEQ ID NO: 2375335 - RNA, 19 nt, Human
ucaaaaaaaaaaaaaugca

SEQ ID NO: 2375336 - RNA, 20 nt, Human
ucaaaaaaaaaaaaaugcac

SEQ ID NO: 2375337 - RNA, 18 nt, Human
uauuuuuuucugauugua

SEQ ID NO: 2375338 - RNA, 13 nt, Human
uauuuuuuugcaa

SEQ ID NO: 2375339 - RNA, 16 nt, Human
uauuuuuuugcaagug

SEQ ID NO: 2375340 - RNA, 17 nt, Human
uauuuuuuuuaaguauu

SEQ ID NO: 2375341 - RNA, 17 nt, Human
uauuuuuuucuuuucuu

SEQ ID NO: 2375342 - RNA, 14 nt, Human
uauuuuuuuacuaa

SEQ ID NO: 2375343 - RNA, 22 nt, Human
uauuuuuuucugaauuauuuuc

SEQ ID NO: 2375344 - RNA, 20 nt, Human
uauuuuuuuaagcuguaaaa

SEQ ID NO: 2375345 - RNA, 15 nt, Human
uauuuuuuucugauu

SEQ ID NO: 2375346 - RNA, 17 nt, Human
uauuuuuuucugauugu

SEQ ID NO: 2375347 - RNA, 22 nt, Human
uauuuucccuauuagagaagag

SEQ ID NO: 2375348 - RNA, 12 nt, Human
uauuuuccuccc

SEQ ID NO: 2375349 - RNA, 16 nt, Human
uauuuuccuccccagc

SEQ ID NO: 2375350 - RNA, 15 nt, Human
uauuuuccuccccag

SEQ ID NO: 2375351 - RNA, 20 nt, Human
uauuuucugguagauagaaa

SEQ ID NO: 2375352 - RNA, 14 nt, Human
uauuuucuacagug

SEQ ID NO: 2375353 - RNA, 14 nt, Human
uauuuuccuguaaa

SEQ ID NO: 2375354 - RNA, 15 nt, Human
uauuuucuacagugg

SEQ ID NO: 2375355 - RNA, 15 nt, Human
uauuuuuuuaagcgu

SEQ ID NO: 2375356 - RNA, 19 nt, Human
uauuuuuuuaagcuguaaa

SEQ ID NO: 2375357 - RNA, 22 nt, Human
uauuuuuugaggcuaugaauau

SEQ ID NO: 2375358 - RNA, 22 nt, Human
uauuuucugguagauagaaaua

SEQ ID NO: 2375359 - RNA, 21 nt, Human
uauuuucugugccugaauauu

SEQ ID NO: 2375360 - RNA, 13 nt, Human
uauuuuuucccaa

SEQ ID NO: 2375361 - RNA, 15 nt, Human
uauuuuuucagaccg

SEQ ID NO: 2375362 - RNA, 14 nt, Human
uauuuuuucccaaa

SEQ ID NO: 2375363 - RNA, 12 nt, Human
ucacaccugacu

SEQ ID NO: 2375364 - RNA, 20 nt, Human
ucacaccuagcgucaguauu

SEQ ID NO: 2375365 - RNA, 15 nt, Human
ucacaccuagcguca

SEQ ID NO: 2375366 - RNA, 23 nt, Human
ucacaccccagacgaugucuuca

SEQ ID NO: 2375367 - RNA, 24 nt, Human
ucacacccaccguccgcccugcuc

SEQ ID NO: 2375368 - RNA, 22 nt, Human
ucacacccaccguccgcccugc

SEQ ID NO: 2375369 - RNA, 23 nt, Human
ucacacccaccguccgcccugcu

SEQ ID NO: 2375370 - RNA, 23 nt, Human
ucacaccaggcuugccugcaggc

SEQ ID NO: 2375371 - RNA, 15 nt, Human
ucacacccaccgucc

SEQ ID NO: 2375372 - RNA, 20 nt, Human
ucacacccaccguccgcccu

SEQ ID NO: 2375373 - RNA, 21 nt, Human
ucacacccaccguccgcccug

SEQ ID NO: 2375374 - RNA, 11 nt, Human
ucacacccacc

SEQ ID NO: 2375375 - RNA, 20 nt, Human
ucaauuacugguccaaaaga

SEQ ID NO: 2375376 - RNA, 15 nt, Human
ucacaagaagaccag

SEQ ID NO: 2375377 - RNA, 16 nt, Human
ucaauuacugguccaa

SEQ ID NO: 2375378 - RNA, 13 nt, Human
ucaauuacugguc

SEQ ID NO: 2375379 - RNA, 20 nt, Human
ucaauuacaggaaguacugg

SEQ ID NO: 2375380 - RNA, 13 nt, Human
ucacaagacccaa

SEQ ID NO: 2375381 - RNA, 18 nt, Human
ucacaagacccaaaaggc

SEQ ID NO: 2375382 - RNA, 17 nt, Human
ucacaagacccaaaagg

SEQ ID NO: 2375383 - RNA, 16 nt, Human
ucacaggcagguccag

SEQ ID NO: 2375384 - RNA, 17 nt, Human
ucacaggcagguccagg

SEQ ID NO: 2375385 - RNA, 18 nt, Human
ucacaggcagguccaggg

SEQ ID NO: 2375386 - RNA, 13 nt, Human
ucacaccugacuc

SEQ ID NO: 2375387 - RNA, 17 nt, Human
ucacaccugacucugaa

SEQ ID NO: 2375388 - RNA, 18 nt, Human
ucacaccugacucugaaa

SEQ ID NO: 2375389 - RNA, 22 nt, Human
ucacaguccuuaccagcagagc

SEQ ID NO: 2375390 - RNA, 23 nt, Human
ucacaguccuuaccagcagagca

SEQ ID NO: 2375391 - RNA, 19 nt, Human
ucacaguccuuaccagcag

SEQ ID NO: 2375392 - RNA, 16 nt, Human
ucacagucacauucca

SEQ ID NO: 2375393 - RNA, 18 nt, Human
ucacauuuauucugcuca

SEQ ID NO: 2375394 - RNA, 19 nt, Human
ucacauuuauucugcucac

SEQ ID NO: 2375395 - RNA, 17 nt, Human
ucacagugggagccagg

SEQ ID NO: 2375396 - RNA, 18 nt, Human
ucacagugggagccaggg

SEQ ID NO: 2375397 - RNA, 11 nt, Human
ucacauuuucc

SEQ ID NO: 2375398 - RNA, 18 nt, Human
ucacauuuuccuuuucaa

SEQ ID NO: 2375399 - RNA, 17 nt, Human
ucacauuuuccuuuuca

SEQ ID NO: 2375400 - RNA, 16 nt, Human
ucacauuuuccuuuuc

SEQ ID NO: 2375401 - RNA, 14 nt, Human
ucacauuuuccuuu

SEQ ID NO: 2375402 - RNA, 23 nt, Human
ucacagucucuuuaaucuucagu

SEQ ID NO: 2375403 - RNA, 21 nt, Human
ucacagucucuuuaaucuuca

SEQ ID NO: 2375404 - RNA, 19 nt, Human
ucacagucucuuuaaucuu

SEQ ID NO: 2375405 - RNA, 18 nt, Human
ucacagucucuuuaaucu

SEQ ID NO: 2375406 - RNA, 19 nt, Human
ucacaccugacucugaaau

SEQ ID NO: 2375407 - RNA, 20 nt, Human
ucacaccugacucugaaauc

SEQ ID NO: 2375408 - RNA, 15 nt, Human
ucacagucuaauuuu

SEQ ID NO: 2375409 - RNA, 16 nt, Human
ucacagucuaauuuuu

SEQ ID NO: 2375410 - RNA, 21 nt, Human
ucacagucuaauuuuuauuca

SEQ ID NO: 2375411 - RNA, 13 nt, Human
ucacagucucaca

SEQ ID NO: 2375412 - RNA, 17 nt, Human
ucacauuuauucugcuc

SEQ ID NO: 2375413 - RNA, 13 nt, Human
ucacagugcugag

SEQ ID NO: 2375414 - RNA, 22 nt, Human
ucaccaagcucacaguuccucg

SEQ ID NO: 2375415 - RNA, 21 nt, Human
ucaccaagcucacaguuccuc

SEQ ID NO: 2375416 - RNA, 20 nt, Human
ucaccaagcucacaguuccu

SEQ ID NO: 2375417 - RNA, 16 nt, Human
ucaccaagcucacagu

SEQ ID NO: 2375418 - RNA, 12 nt, Human
ucaccaagcuca

SEQ ID NO: 2375419 - RNA, 18 nt, Human
ucaccacaguaaguuccu

SEQ ID NO: 2375420 - RNA, 19 nt, Human
ucaccacaguaaguuccua

SEQ ID NO: 2375421 - RNA, 21 nt, Human
ucaccacaguaaguuccuacu

SEQ ID NO: 2375422 - RNA, 23 nt, Human
ucaccacaccaaaccucucuuau

SEQ ID NO: 2375423 - RNA, 20 nt, Human
ucaccacaugcggagaacaa

SEQ ID NO: 2375424 - RNA, 16 nt, Human
ucaccagagagggacu

SEQ ID NO: 2375425 - RNA, 18 nt, Human
ucaccagaggaaucacuc

SEQ ID NO: 2375426 - RNA, 21 nt, Human
ucaccagauuugcuaauuuau

SEQ ID NO: 2375427 - RNA, 13 nt, Human
ucaccagcaccaa

SEQ ID NO: 2375428 - RNA, 19 nt, Human
ucaccagcaccaacaccac

SEQ ID NO: 2375429 - RNA, 15 nt, Human
ucaccagauuugcua

SEQ ID NO: 2375430 - RNA, 19 nt, Human
ucaccagaggaaucacucu

SEQ ID NO: 2375431 - RNA, 20 nt, Human
ucaccaaaucagcugcuacu

SEQ ID NO: 2375432 - RNA, 19 nt, Human
ucaccaaaucagcugcuac

SEQ ID NO: 2375433 - RNA, 13 nt, Human
ucacaguguguuu

SEQ ID NO: 2375434 - RNA, 17 nt, Human
ucaccaaaguauuuuuu

SEQ ID NO: 2375435 - RNA, 14 nt, Human
ucaccaaggcugau

SEQ ID NO: 2375436 - RNA, 15 nt, Human
ucaaugugaaucaga

SEQ ID NO: 2375437 - RNA, 15 nt, Human
ucaaugugauucuaa

SEQ ID NO: 2375438 - RNA, 15 nt, Human
ucaaugucaaguacc

SEQ ID NO: 2375439 - RNA, 11 nt, Human
ucaaugucacu

SEQ ID NO: 2375440 - RNA, 18 nt, Human
ucaaugguuugcaaggaa

SEQ ID NO: 2375441 - RNA, 19 nt, Human
ucaaugguuugcaaggaag

SEQ ID NO: 2375442 - RNA, 16 nt, Human
ucaauguucauuguaa

SEQ ID NO: 2375443 - RNA, 14 nt, Human
ucaauguucauugu

SEQ ID NO: 2375444 - RNA, 13 nt, Human
ucaauguucauug

SEQ ID NO: 2375445 - RNA, 12 nt, Human
ucaauguucauu

SEQ ID NO: 2375446 - RNA, 11 nt, Human
ucaauguucau

SEQ ID NO: 2375447 - RNA, 22 nt, Human
ucaaugugauucuaaugucuuc

SEQ ID NO: 2375448 - RNA, 13 nt, Human
ucaaugugcagug

SEQ ID NO: 2375449 - RNA, 16 nt, Human
ucaaugugauucuaau

SEQ ID NO: 2375450 - RNA, 17 nt, Human
ucaaugugauucuaaug

SEQ ID NO: 2375451 - RNA, 18 nt, Human
ucaaugugauucuaaugu

SEQ ID NO: 2375452 - RNA, 21 nt, Human
ucaaugugauucuaaugucuu

SEQ ID NO: 2375453 - RNA, 18 nt, Human
ucaauguggugaugaaau

SEQ ID NO: 2375454 - RNA, 21 nt, Human
ucaauuacaggaaguacugga

SEQ ID NO: 2375455 - RNA, 23 nt, Human
ucaauuacaggaaguacuggaga

SEQ ID NO: 2375456 - RNA, 20 nt, Human
ucaauaagcaucaaacucuu

SEQ ID NO: 2375457 - RNA, 14 nt, Human
ucaauacacuaguu

SEQ ID NO: 2375458 - RNA, 18 nt, Human
ucaauacacuaguuguuu

SEQ ID NO: 2375459 - RNA, 19 nt, Human
ucaauaauauauuuucugu

SEQ ID NO: 2375460 - RNA, 20 nt, Human
ucaauaauauauuuucuguu

SEQ ID NO: 2375461 - RNA, 13 nt, Human
ucaaugcagcccc

SEQ ID NO: 2375462 - RNA, 14 nt, Human
ucaauaagccuugu

SEQ ID NO: 2375463 - RNA, 15 nt, Human
ucaauaauauauuuu

SEQ ID NO: 2375464 - RNA, 18 nt, Human
ucaauaauauauuuucug

SEQ ID NO: 2375465 - RNA, 16 nt, Human
ucaauaaaugucuguu

SEQ ID NO: 2375466 - RNA, 13 nt, Human
ucaauaaaguauc

SEQ ID NO: 2375467 - RNA, 12 nt, Human
ucaauaaaguau

SEQ ID NO: 2375468 - RNA, 14 nt, Human
ucaauaaaguauuu

SEQ ID NO: 2375469 - RNA, 19 nt, Human
ucaauaaagcauuuauaaa

SEQ ID NO: 2375470 - RNA, 15 nt, Human
ucaauaaagcauuua

SEQ ID NO: 2375471 - RNA, 11 nt, Human
ucaauaaagua

SEQ ID NO: 2375472 - RNA, 15 nt, Human
ucaauaaaguauuua

SEQ ID NO: 2375473 - RNA, 16 nt, Human
ucaauaaaguauuuaa

SEQ ID NO: 2375474 - RNA, 17 nt, Human
ucaauaaaguauuuaau

SEQ ID NO: 2375475 - RNA, 18 nt, Human
ucaauaaaguauuuaauu

SEQ ID NO: 2375476 - RNA, 17 nt, Human
ucaauaaaguaucuaca

SEQ ID NO: 2375477 - RNA, 20 nt, Human
ucaauaaaguauuuaauuag

SEQ ID NO: 2375478 - RNA, 22 nt, Human
ucaauaaaguauuuaauuagug

SEQ ID NO: 2375479 - RNA, 15 nt, Human
ucaauaaaugucugu

SEQ ID NO: 2375480 - RNA, 15 nt, Human
ucaauaaaugguaua

SEQ ID NO: 2375481 - RNA, 13 nt, Human
ucaauaaaaugug

SEQ ID NO: 2375482 - RNA, 17 nt, Human
ucaaguugugcuuguuu

SEQ ID NO: 2375483 - RNA, 22 nt, Human
ucaaguugugcuuguuuacagc

SEQ ID NO: 2375484 - RNA, 16 nt, Human
ucaaguuuuucagaaa

SEQ ID NO: 2375485 - RNA, 18 nt, Human
ucaauaaaaugugauuuu

SEQ ID NO: 2375486 - RNA, 16 nt, Human
ucaauaaaaugugauu

SEQ ID NO: 2375487 - RNA, 15 nt, Human
ucaauaaaaugugau

SEQ ID NO: 2375488 - RNA, 14 nt, Human
ucaauaaaauguga

SEQ ID NO: 2375489 - RNA, 22 nt, Human
ucaauaaaaugugauuuuucug

SEQ ID NO: 2375490 - RNA, 19 nt, Human
ucaauaaaaugugauuuuu

SEQ ID NO: 2375491 - RNA, 23 nt, Human
ucaauaaaaugugauuuuucuga

SEQ ID NO: 2375492 - RNA, 15 nt, Human
ucaauaaacgauuua

SEQ ID NO: 2375493 - RNA, 13 nt, Human
ucaauaaacgauu

SEQ ID NO: 2375494 - RNA, 12 nt, Human
ucaauaaagcau

SEQ ID NO: 2375495 - RNA, 17 nt, Human
ucaauaaacgauuuaau

SEQ ID NO: 2375496 - RNA, 18 nt, Human
ucaauaaacgauuuaauu

SEQ ID NO: 2375497 - RNA, 22 nt, Human
ucaauaaacgauuuaauucucu

SEQ ID NO: 2375498 - RNA, 23 nt, Human
ucaauaaacgauuuaauucucuu

SEQ ID NO: 2375499 - RNA, 13 nt, Human
ucaaguugugcuu

SEQ ID NO: 2375500 - RNA, 14 nt, Human
ucaaguugugcuug

SEQ ID NO: 2375501 - RNA, 21 nt, Human
ucaauaaaauccauacauuug

SEQ ID NO: 2375502 - RNA, 14 nt, Human
ucaaguuccuuugg

SEQ ID NO: 2375503 - RNA, 16 nt, Human
ucaaguuccuuugggu

SEQ ID NO: 2375504 - RNA, 19 nt, Human
ucaagugauucuccugccu

SEQ ID NO: 2375505 - RNA, 22 nt, Human
ucaacgcuuaaaggugucuucc

SEQ ID NO: 2375506 - RNA, 13 nt, Human
ucaaguuauugua

SEQ ID NO: 2375507 - RNA, 17 nt, Human
ucaaguuauuguacagc

SEQ ID NO: 2375508 - RNA, 21 nt, Human
ucaagugauucuccugccuca

SEQ ID NO: 2375509 - RNA, 18 nt, Human
ucaagugauucuccugcc

SEQ ID NO: 2375510 - RNA, 20 nt, Human
ucaagugauucuccugccuc

SEQ ID NO: 2375511 - RNA, 20 nt, Human
ucaaccugugaugaggggag

SEQ ID NO: 2375512 - RNA, 16 nt, Human
ucaaccuugagacagc

SEQ ID NO: 2375513 - RNA, 17 nt, Human
ucaaccuugagacagcu

SEQ ID NO: 2375514 - RNA, 18 nt, Human
ucaaccugggcaaagccu

SEQ ID NO: 2375515 - RNA, 15 nt, Human
ucaaccugugaugag

SEQ ID NO: 2375516 - RNA, 14 nt, Human
ucaacccuggagag

SEQ ID NO: 2375517 - RNA, 18 nt, Human
ucaacccucucaggugac

SEQ ID NO: 2375518 - RNA, 13 nt, Human
ucaacccuggaga

SEQ ID NO: 2375519 - RNA, 14 nt, Human
ucaacgcagcccug

SEQ ID NO: 2375520 - RNA, 15 nt, Human
ucaacgcagcccugc

SEQ ID NO: 2375521 - RNA, 18 nt, Human
ucaacgcagcccugcuuu

SEQ ID NO: 2375522 - RNA, 18 nt, Human
ucaaccuugagacagcuu

SEQ ID NO: 2375523 - RNA, 19 nt, Human
ucaacgcuuaaaggugucu

SEQ ID NO: 2375524 - RNA, 20 nt, Human
ucaacgcuuaaaggugucuu

SEQ ID NO: 2375525 - RNA, 17 nt, Human
uauuaauagcugccuua

SEQ ID NO: 2375526 - RNA, 18 nt, Human
uauuaauauauaucugcu

SEQ ID NO: 2375527 - RNA, 20 nt, Human
uauuaauauauaucugcugu

SEQ ID NO: 2375528 - RNA, 21 nt, Human
uauuaagauggauucucagau

SEQ ID NO: 2375529 - RNA, 20 nt, Human
uauuaagauggauucucaga

SEQ ID NO: 2375530 - RNA, 19 nt, Human
uauuaagauggauucucag

SEQ ID NO: 2375531 - RNA, 18 nt, Human
uauuaagauggauucuca

SEQ ID NO: 2375532 - RNA, 16 nt, Human
uauuaagauggauucu

SEQ ID NO: 2375533 - RNA, 20 nt, Human
uauuaauauucauuguauaa

SEQ ID NO: 2375534 - RNA, 17 nt, Human
uauuaauauucauugua

SEQ ID NO: 2375535 - RNA, 15 nt, Human
uauuaauauuuuaau

SEQ ID NO: 2375536 - RNA, 23 nt, Human
uauuaaugccuuuaaaguaugaa

SEQ ID NO: 2375537 - RNA, 13 nt, Human
uauuaaugccuuu

SEQ ID NO: 2375538 - RNA, 14 nt, Human
uauuaaugccuuua

SEQ ID NO: 2375539 - RNA, 22 nt, Human
uauuaaugccuuuaaaguauga

SEQ ID NO: 2375540 - RNA, 13 nt, Human
uauuaaugcacuu

SEQ ID NO: 2375541 - RNA, 14 nt, Human
uauuaaugcacuuu

SEQ ID NO: 2375542 - RNA, 17 nt, Human
uauuaaugcacuuucua

SEQ ID NO: 2375543 - RNA, 20 nt, Human
uauuaaugcacuuucuaucc

SEQ ID NO: 2375544 - RNA, 13 nt, Human
uauuaaugaaaau

SEQ ID NO: 2375545 - RNA, 12 nt, Human
uauuaaugcacu

SEQ ID NO: 2375546 - RNA, 22 nt, Human
uauguuuguauaaugaaugaga

SEQ ID NO: 2375547 - RNA, 19 nt, Human
uauuaaauuaaauuuugug

SEQ ID NO: 2375548 - RNA, 21 nt, Human
uauuaaauuaaauuuuguguc

SEQ ID NO: 2375549 - RNA, 19 nt, Human
uauguuugcacacuugugu

SEQ ID NO: 2375550 - RNA, 14 nt, Human
uauguuugcacacu

SEQ ID NO: 2375551 - RNA, 22 nt, Human
uauguuugccacuuugcaaagg

SEQ ID NO: 2375552 - RNA, 12 nt, Human
uauuaaauuaug

SEQ ID NO: 2375553 - RNA, 15 nt, Human
uauuaagauggauuc

SEQ ID NO: 2375554 - RNA, 13 nt, Human
uauuaagauggau

SEQ ID NO: 2375555 - RNA, 14 nt, Human
uauuaagagugaaa

SEQ ID NO: 2375556 - RNA, 13 nt, Human
uauuaagaaugaa

SEQ ID NO: 2375557 - RNA, 22 nt, Human
uauuaagaggcagaaaauugca

SEQ ID NO: 2375558 - RNA, 16 nt, Human
uauuaagaaugaaaua

SEQ ID NO: 2375559 - RNA, 24 nt, Human
uauuaagaaagacuaucuaaaugu

SEQ ID NO: 2375560 - RNA, 14 nt, Human
uauguugauaaaag

SEQ ID NO: 2375561 - RNA, 12 nt, Human
uauguugcauag

SEQ ID NO: 2375562 - RNA, 19 nt, Human
uaugucaucauacaugacu

SEQ ID NO: 2375563 - RNA, 15 nt, Human
uaugucaucauacau

SEQ ID NO: 2375564 - RNA, 23 nt, Human
uaugucauuuccuucaaggcauc

SEQ ID NO: 2375565 - RNA, 16 nt, Human
uaugucauuucauuuc

SEQ ID NO: 2375566 - RNA, 18 nt, Human
uauguugaauacuuuuua

SEQ ID NO: 2375567 - RNA, 14 nt, Human
uaugucaaagcagg

SEQ ID NO: 2375568 - RNA, 12 nt, Human
uauguauuuaua

SEQ ID NO: 2375569 - RNA, 18 nt, Human
uauguauuguaaacaugu

SEQ ID NO: 2375570 - RNA, 20 nt, Human
uauguauuguaaacaugugu

SEQ ID NO: 2375571 - RNA, 22 nt, Human
uauguauuguaaacauguguuu

SEQ ID NO: 2375572 - RNA, 19 nt, Human
uauguauuaauauucauug

SEQ ID NO: 2375573 - RNA, 16 nt, Human
uauguauguuuacaua

SEQ ID NO: 2375574 - RNA, 17 nt, Human
uauguauguuuacauau

SEQ ID NO: 2375575 - RNA, 13 nt, Human
uauguugcccagg

SEQ ID NO: 2375576 - RNA, 16 nt, Human
uauguugcauagaaua

SEQ ID NO: 2375577 - RNA, 16 nt, Human
uauguugcccaggcag

SEQ ID NO: 2375578 - RNA, 19 nt, Human
uauguugcccaggcagguc

SEQ ID NO: 2375579 - RNA, 14 nt, Human
uauguuuacauauc

SEQ ID NO: 2375580 - RNA, 12 nt, Human
uauguuuacaaa

SEQ ID NO: 2375581 - RNA, 15 nt, Human
uauguugaugaaaaa

SEQ ID NO: 2375582 - RNA, 20 nt, Human
uauguugcccaggcaggucu

SEQ ID NO: 2375583 - RNA, 18 nt, Human
uauguuuaccuuuuaauu

SEQ ID NO: 2375584 - RNA, 18 nt, Human
uauguuuauauaaaugcu

SEQ ID NO: 2375585 - RNA, 18 nt, Human
uauguuuauuuacuaauu

SEQ ID NO: 2375586 - RNA, 14 nt, Human
uauguacaaguguu

SEQ ID NO: 2375587 - RNA, 15 nt, Human
uauguacaugagaag

SEQ ID NO: 2375588 - RNA, 16 nt, Human
uauguaauaaugugaa

SEQ ID NO: 2375589 - RNA, 15 nt, Human
uauguaauaauguga

SEQ ID NO: 2375590 - RNA, 15 nt, Human
uauguaagagcaccu

SEQ ID NO: 2375591 - RNA, 16 nt, Human
uauguaagagcaccuu

SEQ ID NO: 2375592 - RNA, 13 nt, Human
uauguaaucuaug

SEQ ID NO: 2375593 - RNA, 24 nt, Human
uauguaacugcauugagaacugca

SEQ ID NO: 2375594 - RNA, 14 nt, Human
uauguaacugcauu

SEQ ID NO: 2375595 - RNA, 12 nt, Human
uauguaacaugu

SEQ ID NO: 2375596 - RNA, 11 nt, Human
uauguaacaug

SEQ ID NO: 2375597 - RNA, 20 nt, Human
uauguacuccucuuuacacu

SEQ ID NO: 2375598 - RNA, 18 nt, Human
uauguacguuuguaugug

SEQ ID NO: 2375599 - RNA, 19 nt, Human
uauguacguuuguaugugu

SEQ ID NO: 2375600 - RNA, 21 nt, Human
uauguacguuuguaugugugu

SEQ ID NO: 2375601 - RNA, 22 nt, Human
uauguacguuuguaugugugua

SEQ ID NO: 2375602 - RNA, 16 nt, Human
uauguacguuuguaug

SEQ ID NO: 2375603 - RNA, 16 nt, Human
uauguaccauguacau

SEQ ID NO: 2375604 - RNA, 13 nt, Human
uauguacuucaug

SEQ ID NO: 2375605 - RNA, 17 nt, Human
uauguacuucaugcugu

SEQ ID NO: 2375606 - RNA, 20 nt, Human
uauguauggaauacaguguu

SEQ ID NO: 2375607 - RNA, 19 nt, Human
uauguauauuuaaaagaaa

SEQ ID NO: 2375608 - RNA, 15 nt, Human
uauguauaauucaaa

SEQ ID NO: 2375609 - RNA, 18 nt, Human
uauguaguccgugcugac

SEQ ID NO: 2375610 - RNA, 16 nt, Human
uauguaugugaaaguu

SEQ ID NO: 2375611 - RNA, 17 nt, Human
uauguauguguguaugg

SEQ ID NO: 2375612 - RNA, 14 nt, Human
uauguaugugugua

SEQ ID NO: 2375613 - RNA, 13 nt, Human
uauguaugugugu

SEQ ID NO: 2375614 - RNA, 13 nt, Human
uauguauguuuac

SEQ ID NO: 2375615 - RNA, 16 nt, Human
uauguagaugugcauu

SEQ ID NO: 2375616 - RNA, 12 nt, Human
uauguagaugug

SEQ ID NO: 2375617 - RNA, 15 nt, Human
uauguagcaaaauac

SEQ ID NO: 2375618 - RNA, 17 nt, Human
uauguagaugugcauuu

SEQ ID NO: 2375619 - RNA, 21 nt, Human
uauguagcaggaaauaaagua

SEQ ID NO: 2375620 - RNA, 19 nt, Human
uauguagcagggaaaauau

SEQ ID NO: 2375621 - RNA, 20 nt, Human
uauguaguaauugacaugug

SEQ ID NO: 2375622 - RNA, 17 nt, Human
uauguaguaauugacau

SEQ ID NO: 2375623 - RNA, 14 nt, Human
uauguaguaauuga

SEQ ID NO: 2375624 - RNA, 21 nt, Human
uauguacuccucuuuacacug

SEQ ID NO: 2375625 - RNA, 15 nt, Human
uauguacuugucaaa

SEQ ID NO: 2375626 - RNA, 23 nt, Human
uauguagaaaaaaguaaauguga

SEQ ID NO: 2375627 - RNA, 19 nt, Human
uauguacuugucaaagaag

SEQ ID NO: 2375628 - RNA, 16 nt, Human
uauguacuugucaaag

SEQ ID NO: 2375629 - RNA, 14 nt, Human
uauguagauaacaa

SEQ ID NO: 2375630 - RNA, 18 nt, Human
gggagugggacagagucu

SEQ ID NO: 2375631 - RNA, 17 nt, Human
gggaguggaguggaaga

SEQ ID NO: 2375632 - RNA, 21 nt, Human
gggaguggaauaguauccucc

SEQ ID NO: 2375633 - RNA, 15 nt, Human
gggaguggaguggaa

SEQ ID NO: 2375634 - RNA, 20 nt, Human
gggagugggacagagucugg

SEQ ID NO: 2375635 - RNA, 19 nt, Human
uauggaugauucagaaauu

SEQ ID NO: 2375636 - RNA, 11 nt, Human
uauggaugugg

SEQ ID NO: 2375637 - RNA, 20 nt, Human
uauggaugauucagaaauug

SEQ ID NO: 2375638 - RNA, 13 nt, Human
gggaguggccaca

SEQ ID NO: 2375639 - RNA, 15 nt, Human
gggaguggccacaga

SEQ ID NO: 2375640 - RNA, 21 nt, Human
uauggauuuucuauuguuacu

SEQ ID NO: 2375641 - RNA, 14 nt, Human
uauggcaaaaaugg

SEQ ID NO: 2375642 - RNA, 12 nt, Human
uauggcagaaga

SEQ ID NO: 2375643 - RNA, 13 nt, Human
uauggcagaagac

SEQ ID NO: 2375644 - RNA, 14 nt, Human
uauggcagaagaca

SEQ ID NO: 2375645 - RNA, 15 nt, Human
uauggcagaagacac

SEQ ID NO: 2375646 - RNA, 16 nt, Human
uauggcagaagacacc

SEQ ID NO: 2375647 - RNA, 22 nt, Human
uauggcagaagacaccagagca

SEQ ID NO: 2375648 - RNA, 23 nt, Human
uauggcagaagacaccagagcag

SEQ ID NO: 2375649 - RNA, 17 nt, Human
uauggcagaguuguaaa

SEQ ID NO: 2375650 - RNA, 18 nt, Human
uauggcagaguuguaaau

SEQ ID NO: 2375651 - RNA, 22 nt, Human
uaugguugauaguuuaccugaa

SEQ ID NO: 2375652 - RNA, 20 nt, Human
uaugguugauaguuuaccug

SEQ ID NO: 2375653 - RNA, 21 nt, Human
uaugguugauaguuuaccuga

SEQ ID NO: 2375654 - RNA, 21 nt, Human
uauggcagaguuguaaauaua

SEQ ID NO: 2375655 - RNA, 19 nt, Human
uauggcagaguuguaaaua

SEQ ID NO: 2375656 - RNA, 20 nt, Human
uauggcagaguuguaaauau

SEQ ID NO: 2375657 - RNA, 19 nt, Human
uaugguguuucucccucuc

SEQ ID NO: 2375658 - RNA, 13 nt, Human
uauguaaaugugc

SEQ ID NO: 2375659 - RNA, 21 nt, Human
uauguaacaaaccugcacuua

SEQ ID NO: 2375660 - RNA, 13 nt, Human
uauguaaauguau

SEQ ID NO: 2375661 - RNA, 14 nt, Human
uauguaaauguaua

SEQ ID NO: 2375662 - RNA, 10 nt, Human
uauguaaaug

SEQ ID NO: 2375663 - RNA, 19 nt, Human
uauguaaaauaaaauuaug

SEQ ID NO: 2375664 - RNA, 12 nt, Human
uauguaaaauaa

SEQ ID NO: 2375665 - RNA, 23 nt, Human
uauguaaaaggccaaaccucugu

SEQ ID NO: 2375666 - RNA, 22 nt, Human
uauguaaaaggccaaaccucug

SEQ ID NO: 2375667 - RNA, 21 nt, Human
uauguaaaaggccaaaccucu

SEQ ID NO: 2375668 - RNA, 14 nt, Human
uauguaaacauaau

SEQ ID NO: 2375669 - RNA, 15 nt, Human
uauguaaacaggaga

SEQ ID NO: 2375670 - RNA, 15 nt, Human
uauguaaaauguuuu

SEQ ID NO: 2375671 - RNA, 17 nt, Human
uauguaaaauguuuuag

SEQ ID NO: 2375672 - RNA, 23 nt, Human
uauguaaacugcauuagaaauua

SEQ ID NO: 2375673 - RNA, 14 nt, Human
uauguaaaguaugu

SEQ ID NO: 2375674 - RNA, 19 nt, Human
uauguaaacugcauuagaa

SEQ ID NO: 2375675 - RNA, 18 nt, Human
uauguaaacauaauucuu

SEQ ID NO: 2375676 - RNA, 17 nt, Human
uauguaaaguauguaaa

SEQ ID NO: 2375677 - RNA, 18 nt, Human
uauguaaaguauguaaac

SEQ ID NO: 2375678 - RNA, 19 nt, Human
uauguaaaguauguaaaca

SEQ ID NO: 2375679 - RNA, 20 nt, Human
uauguaaaguauguaaacag

SEQ ID NO: 2375680 - RNA, 21 nt, Human
uauuccuuuuguguacagugu

SEQ ID NO: 2375681 - RNA, 19 nt, Human
uauuccuuuuguguacagu

SEQ ID NO: 2375682 - RNA, 20 nt, Human
uauuccuuuuguguacagug

SEQ ID NO: 2375683 - RNA, 22 nt, Human
uauucgauacugcgacuuucug

SEQ ID NO: 2375684 - RNA, 20 nt, Human
uauuccugaaugaaauauca

SEQ ID NO: 2375685 - RNA, 14 nt, Human
uauuccugaaugaa

SEQ ID NO: 2375686 - RNA, 22 nt, Human
uauuccuguggauguaaaguga

SEQ ID NO: 2375687 - RNA, 22 nt, Human
uauuccuugauacuaaaaguuc

SEQ ID NO: 2375688 - RNA, 11 nt, Human
uauuccugccu

SEQ ID NO: 2375689 - RNA, 14 nt, Human
uauuccuguauguu

SEQ ID NO: 2375690 - RNA, 17 nt, Human
uauuccuguauguuguc

SEQ ID NO: 2375691 - RNA, 16 nt, Human
uauuccuuucuaucau

SEQ ID NO: 2375692 - RNA, 17 nt, Human
uauuccugcauuuguga

SEQ ID NO: 2375693 - RNA, 19 nt, Human
uauuccugcauuugugaaa

SEQ ID NO: 2375694 - RNA, 20 nt, Human
uauuccugcauuugugaaau

SEQ ID NO: 2375695 - RNA, 21 nt, Human
uauuccugcauuugugaaaug

SEQ ID NO: 2375696 - RNA, 21 nt, Human
uauuccuauauaguuuauuga

SEQ ID NO: 2375697 - RNA, 20 nt, Human
uauuccuauauaguuuauug

SEQ ID NO: 2375698 - RNA, 21 nt, Human
uauucccuguacaauauuuaa

SEQ ID NO: 2375699 - RNA, 21 nt, Human
uauucccuagaaacuuccaaa

SEQ ID NO: 2375700 - RNA, 22 nt, Human
uauuccuauauaguuuauugac

SEQ ID NO: 2375701 - RNA, 13 nt, Human
uauuccuccuggg

SEQ ID NO: 2375702 - RNA, 18 nt, Human
uauuccuccugcucauau

SEQ ID NO: 2375703 - RNA, 10 nt, Human
uauucuaguc

SEQ ID NO: 2375704 - RNA, 14 nt, Human
uauucuauaugaau

SEQ ID NO: 2375705 - RNA, 15 nt, Human
uauucuauaugaauu

SEQ ID NO: 2375706 - RNA, 12 nt, Human
uauucuauugca

SEQ ID NO: 2375707 - RNA, 17 nt, Human
uauucuauaugaauuua

SEQ ID NO: 2375708 - RNA, 19 nt, Human
uauucuauaugaauuuaaa

SEQ ID NO: 2375709 - RNA, 13 nt, Human
uauucuauuaacu

SEQ ID NO: 2375710 - RNA, 19 nt, Human
uauucuauuaacuuuaauu

SEQ ID NO: 2375711 - RNA, 22 nt, Human
uauucucacuccaccacccaaa

SEQ ID NO: 2375712 - RNA, 15 nt, Human
uauucucacuccacc

SEQ ID NO: 2375713 - RNA, 14 nt, Human
uauucucacuccac

SEQ ID NO: 2375714 - RNA, 13 nt, Human
uauucucacucca

SEQ ID NO: 2375715 - RNA, 15 nt, Human
uauucucaccaggaa

SEQ ID NO: 2375716 - RNA, 14 nt, Human
uauucucaccagga

SEQ ID NO: 2375717 - RNA, 17 nt, Human
uauucucaaacacaguu

SEQ ID NO: 2375718 - RNA, 22 nt, Human
uauucucaaacacaguuacacu

SEQ ID NO: 2375719 - RNA, 14 nt, Human
uauucuauuuucau

SEQ ID NO: 2375720 - RNA, 22 nt, Human
uauucuauuuucauuuucugca

SEQ ID NO: 2375721 - RNA, 19 nt, Human
uauucuagcuaauguaaua

SEQ ID NO: 2375722 - RNA, 22 nt, Human
uauuccccuaucucuagaauuu

SEQ ID NO: 2375723 - RNA, 20 nt, Human
uauuccccuaucucuagaau

SEQ ID NO: 2375724 - RNA, 17 nt, Human
uauuccccauucuuccu

SEQ ID NO: 2375725 - RNA, 23 nt, Human
uauuccccagcagggucuuuuca

SEQ ID NO: 2375726 - RNA, 23 nt, Human
uauucccaagcucuagugggaag

SEQ ID NO: 2375727 - RNA, 12 nt, Human
uauucccaugag

SEQ ID NO: 2375728 - RNA, 20 nt, Human
uauucccaagcccaugaguc

SEQ ID NO: 2375729 - RNA, 22 nt, Human
uauucccaagcccaugaguccu

SEQ ID NO: 2375730 - RNA, 22 nt, Human
uauuccaugaauguaucaggaa

SEQ ID NO: 2375731 - RNA, 17 nt, Human
uauuccaugaauguauc

SEQ ID NO: 2375732 - RNA, 16 nt, Human
uauuccaugaauguau

SEQ ID NO: 2375733 - RNA, 19 nt, Human
uauuccauccauauacuuu

SEQ ID NO: 2375734 - RNA, 23 nt, Human
uauuccaugaauguaucaggaaa

SEQ ID NO: 2375735 - RNA, 18 nt, Human
uauuccauauauuagcau

SEQ ID NO: 2375736 - RNA, 15 nt, Human
uauuccauauuuauu

SEQ ID NO: 2375737 - RNA, 17 nt, Human
uauuccauauuuauuca

SEQ ID NO: 2375738 - RNA, 18 nt, Human
uauuccauccauauacuu

SEQ ID NO: 2375739 - RNA, 15 nt, Human
uauuauucugcagca

SEQ ID NO: 2375740 - RNA, 13 nt, Human
uauuauucugcag

SEQ ID NO: 2375741 - RNA, 14 nt, Human
uauuauugaaauug

SEQ ID NO: 2375742 - RNA, 15 nt, Human
uauuauugaaauugu

SEQ ID NO: 2375743 - RNA, 13 nt, Human
uauuccacaucua

SEQ ID NO: 2375744 - RNA, 16 nt, Human
uauuauugaaauugua

SEQ ID NO: 2375745 - RNA, 17 nt, Human
uauuccaagacaugucu

SEQ ID NO: 2375746 - RNA, 19 nt, Human
uauuccaagacaugucugu

SEQ ID NO: 2375747 - RNA, 16 nt, Human
uauuccagaaugcugu

SEQ ID NO: 2375748 - RNA, 20 nt, Human
uauuccagaaugcuguacau

SEQ ID NO: 2375749 - RNA, 17 nt, Human
uauuccagaaugcugua

SEQ ID NO: 2375750 - RNA, 14 nt, Human
uauuccauauauua

SEQ ID NO: 2375751 - RNA, 23 nt, Human
uauuccagaaugcuguacaucua

SEQ ID NO: 2375752 - RNA, 21 nt, Human
uauuccagaaugcuguacauc

SEQ ID NO: 2375753 - RNA, 13 nt, Human
uauuacacuguau

SEQ ID NO: 2375754 - RNA, 17 nt, Human
uauuacacuguauuugu

SEQ ID NO: 2375755 - RNA, 19 nt, Human
uauuacacuguauuuguau

SEQ ID NO: 2375756 - RNA, 14 nt, Human
uauuaauugcuuug

SEQ ID NO: 2375757 - RNA, 13 nt, Human
uauuaauugcuuu

SEQ ID NO: 2375758 - RNA, 21 nt, Human
uauuaauuguuuugcacuuuu

SEQ ID NO: 2375759 - RNA, 19 nt, Human
uauuauuaguuuugauuua

SEQ ID NO: 2375760 - RNA, 16 nt, Human
uauuauucccauucua

SEQ ID NO: 2375761 - RNA, 13 nt, Human
uauuauuacuguu

SEQ ID NO: 2375762 - RNA, 19 nt, Human
uauuauuacuuauuuuuga

SEQ ID NO: 2375763 - RNA, 14 nt, Human
uauuauuacuguuu

SEQ ID NO: 2375764 - RNA, 21 nt, Human
uauuacacuguauuuguaucu

SEQ ID NO: 2375765 - RNA, 19 nt, Human
uauugcuuguuggauuuuu

SEQ ID NO: 2375766 - RNA, 21 nt, Human
uauugcuugcacaaaccaauu

SEQ ID NO: 2375767 - RNA, 22 nt, Human
uauuggaaauuuguuauaauga

SEQ ID NO: 2375768 - RNA, 17 nt, Human
uauugcugauggugcaa

SEQ ID NO: 2375769 - RNA, 15 nt, Human
uauugcugagagaaa

SEQ ID NO: 2375770 - RNA, 16 nt, Human
uauuggaauuaaccug

SEQ ID NO: 2375771 - RNA, 15 nt, Human
uauuggaauuaaccu

SEQ ID NO: 2375772 - RNA, 19 nt, Human
uauugcugagagaaauaug

SEQ ID NO: 2375773 - RNA, 16 nt, Human
uauugcugagagaaau

SEQ ID NO: 2375774 - RNA, 16 nt, Human
uauugcuuuauaaaua

SEQ ID NO: 2375775 - RNA, 23 nt, Human
uauuggaauuaaccuggugcugg

SEQ ID NO: 2375776 - RNA, 21 nt, Human
uauuggaauuaaccuggugcu

SEQ ID NO: 2375777 - RNA, 21 nt, Human
uauuggaggguaaaugaugug

SEQ ID NO: 2375778 - RNA, 16 nt, Human
uauuguguuuguguau

SEQ ID NO: 2375779 - RNA, 21 nt, Human
uauuguguuugucauuagccu

SEQ ID NO: 2375780 - RNA, 17 nt, Human
uauuguguuugucauua

SEQ ID NO: 2375781 - RNA, 18 nt, Human
uauuguguuugucauuag

SEQ ID NO: 2375782 - RNA, 14 nt, Human
uauuguguuuguca

SEQ ID NO: 2375783 - RNA, 16 nt, Human
uauuguguuugucauu

SEQ ID NO: 2375784 - RNA, 12 nt, Human
uauuggccugga

SEQ ID NO: 2375785 - RNA, 21 nt, Human
uauugauaugcuuauacacuu

SEQ ID NO: 2375786 - RNA, 18 nt, Human
uauucucuccaaaaaugc

SEQ ID NO: 2375787 - RNA, 18 nt, Human
uauucucuccuguaccuc

SEQ ID NO: 2375788 - RNA, 19 nt, Human
uauucucacuccaccaccc

SEQ ID NO: 2375789 - RNA, 16 nt, Human
uauucucacuccacca

SEQ ID NO: 2375790 - RNA, 17 nt, Human
uauucucuccuguaccu

SEQ ID NO: 2375791 - RNA, 22 nt, Human
uauugcaaagguuccaacugua

SEQ ID NO: 2375792 - RNA, 20 nt, Human
uauugcaaaauagcauuugu

SEQ ID NO: 2375793 - RNA, 21 nt, Human
uauugcaaagguuccaacugu

SEQ ID NO: 2375794 - RNA, 23 nt, Human
uauugcaaagguuccaacuguau

SEQ ID NO: 2375795 - RNA, 22 nt, Human
uauugauguacagucugucaug

SEQ ID NO: 2375796 - RNA, 20 nt, Human
uauugauguacagucuguca

SEQ ID NO: 2375797 - RNA, 23 nt, Human
uauuguuccaagacauugucaau

SEQ ID NO: 2375798 - RNA, 21 nt, Human
uauuguuccaagacauuguca

SEQ ID NO: 2375799 - RNA, 20 nt, Human
uauuguuccaagacauuguc

SEQ ID NO: 2375800 - RNA, 19 nt, Human
uauuguuccaagacauugu

SEQ ID NO: 2375801 - RNA, 18 nt, Human
uauuguuccaagacauug

SEQ ID NO: 2375802 - RNA, 17 nt, Human
uauuguuccaagacauu

SEQ ID NO: 2375803 - RNA, 13 nt, Human
uauuguuccaaga

SEQ ID NO: 2375804 - RNA, 17 nt, Human
uauuguuaacucuuguc

SEQ ID NO: 2375805 - RNA, 21 nt, Human
uauuguuaacucuugucuauu

SEQ ID NO: 2375806 - RNA, 15 nt, Human
uauuguuacucuggu

SEQ ID NO: 2375807 - RNA, 12 nt, Human
uauuguuuucag

SEQ ID NO: 2375808 - RNA, 17 nt, Human
uauuguuccagcaguuu

SEQ ID NO: 2375809 - RNA, 21 nt, Human
uauuguuucuggucacuauau

SEQ ID NO: 2375810 - RNA, 20 nt, Human
uauuguuucuuuaagaaagu

SEQ ID NO: 2375811 - RNA, 20 nt, Human
uauuguuuucaguguacaug

SEQ ID NO: 2375812 - RNA, 18 nt, Human
uauuguuuucaguguaca

SEQ ID NO: 2375813 - RNA, 22 nt, Human
uauuguuuuuccuuguauuuaa

SEQ ID NO: 2375814 - RNA, 22 nt, Human
uauuguuuucaguguacaugga

SEQ ID NO: 2375815 - RNA, 23 nt, Human
uauuuaaaagaaagccucagaga

SEQ ID NO: 2375816 - RNA, 12 nt, Human
uauuuaaaagau

SEQ ID NO: 2375817 - RNA, 13 nt, Human
uauuuaaaagauu

SEQ ID NO: 2375818 - RNA, 15 nt, Human
uauuuaaaagauuca

SEQ ID NO: 2375819 - RNA, 12 nt, Human
uauuuaaaacuu

SEQ ID NO: 2375820 - RNA, 13 nt, Human
uauuuaaaacuug

SEQ ID NO: 2375821 - RNA, 16 nt, Human
uauuuaaaagauucau

SEQ ID NO: 2375822 - RNA, 16 nt, Human
uauuguuuugguuugc

SEQ ID NO: 2375823 - RNA, 18 nt, Human
uauuuaaaaauauuuuug

SEQ ID NO: 2375824 - RNA, 19 nt, Human
uauuuaaaauuuauugcuu

SEQ ID NO: 2375825 - RNA, 14 nt, Human
uauuuaaacauggu

SEQ ID NO: 2375826 - RNA, 24 nt, Human
uauuuaaacucuguugcaagugca

SEQ ID NO: 2375827 - RNA, 24 nt, Human
uauuuauaaaaauaaaaaacacug

SEQ ID NO: 2375828 - RNA, 20 nt, Human
uauuuaaagaagaaacgucu

SEQ ID NO: 2375829 - RNA, 14 nt, Human
uauuuauaaaacuu

SEQ ID NO: 2375830 - RNA, 20 nt, Human
uauuuaguuauaguuucaga

SEQ ID NO: 2375831 - RNA, 17 nt, Human
uauuuauaaaacuucuc

SEQ ID NO: 2375832 - RNA, 16 nt, Human
uauuuauaaauauauu

SEQ ID NO: 2375833 - RNA, 17 nt, Human
uauuuauaaauauauuu

SEQ ID NO: 2375834 - RNA, 19 nt, Human
uauuuauaaauauauuuaa

SEQ ID NO: 2375835 - RNA, 13 nt, Human
uccacacacagag

SEQ ID NO: 2375836 - RNA, 12 nt, Human
uccacacacaga

SEQ ID NO: 2375837 - RNA, 22 nt, Human
uccacacacagaggaagagcag

SEQ ID NO: 2375838 - RNA, 19 nt, Human
uccacacacagaggaagag

SEQ ID NO: 2375839 - RNA, 15 nt, Human
uccacacacagagga

SEQ ID NO: 2375840 - RNA, 14 nt, Human
uccacacacagagg

SEQ ID NO: 2375841 - RNA, 23 nt, Human
uccacacacagaggaagagcagg

SEQ ID NO: 2375842 - RNA, 20 nt, Human
uccacagaaacauuuucauu

SEQ ID NO: 2375843 - RNA, 18 nt, Human
uccacaaguuaaauaaau

SEQ ID NO: 2375844 - RNA, 17 nt, Human
uccacaaguuaaauaaa

SEQ ID NO: 2375845 - RNA, 16 nt, Human
uccacaagagcccagg

SEQ ID NO: 2375846 - RNA, 17 nt, Human
uccacaagagcccaggc

SEQ ID NO: 2375847 - RNA, 15 nt, Human
uccacaagagcccag

SEQ ID NO: 2375848 - RNA, 18 nt, Human
uccacaagagcccaggcc

SEQ ID NO: 2375849 - RNA, 18 nt, Human
uccaauuuacauacucug

SEQ ID NO: 2375850 - RNA, 17 nt, Human
uccaauuuacauacucu

SEQ ID NO: 2375851 - RNA, 22 nt, Human
uccaauuuguaaaaacagcauu

SEQ ID NO: 2375852 - RNA, 16 nt, Human
uccaauuguugacagu

SEQ ID NO: 2375853 - RNA, 21 nt, Human
uccaauuguugacaguucuga

SEQ ID NO: 2375854 - RNA, 22 nt, Human
uccaauuguugacaguucugaa

SEQ ID NO: 2375855 - RNA, 18 nt, Human
uccaauuuucuggaauac

SEQ ID NO: 2375856 - RNA, 14 nt, Human
uccaauuuucugga

SEQ ID NO: 2375857 - RNA, 18 nt, Human
uccaaaauaaaacuuuuu

SEQ ID NO: 2375858 - RNA, 20 nt, Human
uccaaaauaaaacuuuuuaa

SEQ ID NO: 2375859 - RNA, 21 nt, Human
ucauuucuauuucuccuccau

SEQ ID NO: 2375860 - RNA, 17 nt, Human
ucauuucuauuucuccu

SEQ ID NO: 2375861 - RNA, 15 nt, Human
uccaaaauaauuuua

SEQ ID NO: 2375862 - RNA, 19 nt, Human
uccaaaauaauuuuaagaa

SEQ ID NO: 2375863 - RNA, 22 nt, Human
uccaaaauguuggucauuuuau

SEQ ID NO: 2375864 - RNA, 13 nt, Human
uccaccuggcccc

SEQ ID NO: 2375865 - RNA, 17 nt, Human
uccaccuggccccaugu

SEQ ID NO: 2375866 - RNA, 23 nt, Human
uccaccugggcauauccaccacc

SEQ ID NO: 2375867 - RNA, 13 nt, Human
uccaccugcuccc

SEQ ID NO: 2375868 - RNA, 16 nt, Human
uccaccugcucccagg

SEQ ID NO: 2375869 - RNA, 17 nt, Human
uccaccugcucccaggc

SEQ ID NO: 2375870 - RNA, 18 nt, Human
uccaccugcucccaggcc

SEQ ID NO: 2375871 - RNA, 18 nt, Human
uccaccugccagggacag

SEQ ID NO: 2375872 - RNA, 21 nt, Human
uccaccugccagggacagagg

SEQ ID NO: 2375873 - RNA, 17 nt, Human
uccaccugccagggaca

SEQ ID NO: 2375874 - RNA, 15 nt, Human
uccaccugccaggga

SEQ ID NO: 2375875 - RNA, 16 nt, Human
uccacccucugagcuu

SEQ ID NO: 2375876 - RNA, 12 nt, Human
uccacccucuga

SEQ ID NO: 2375877 - RNA, 14 nt, Human
uccacccucugagc

SEQ ID NO: 2375878 - RNA, 12 nt, Human
uccacccccucc

SEQ ID NO: 2375879 - RNA, 22 nt, Human
uccaccccccagaaccuguccu

SEQ ID NO: 2375880 - RNA, 16 nt, Human
uccacccccagcugcu

SEQ ID NO: 2375881 - RNA, 17 nt, Human
uccacagcaaccccagg

SEQ ID NO: 2375882 - RNA, 21 nt, Human
uccacagagagucccacugcc

SEQ ID NO: 2375883 - RNA, 17 nt, Human
uccacagaugccuccac

SEQ ID NO: 2375884 - RNA, 18 nt, Human
uccacagagagucccacu

SEQ ID NO: 2375885 - RNA, 19 nt, Human
uccacagaagcuccaggua

SEQ ID NO: 2375886 - RNA, 18 nt, Human
uccacccccucccuggcc

SEQ ID NO: 2375887 - RNA, 15 nt, Human
uccacccccucccug

SEQ ID NO: 2375888 - RNA, 13 nt, Human
uccacccccuccc

SEQ ID NO: 2375889 - RNA, 23 nt, Human
uccaccccccagaaccuguccuu

SEQ ID NO: 2375890 - RNA, 20 nt, Human
uccacccccucccuggccug

SEQ ID NO: 2375891 - RNA, 19 nt, Human
uccacccccucccuggccu

SEQ ID NO: 2375892 - RNA, 21 nt, Human
uccacccccucccuggccugu

SEQ ID NO: 2375893 - RNA, 12 nt, Human
uccacccugcuc

SEQ ID NO: 2375894 - RNA, 16 nt, Human
uccacccucccagacc

SEQ ID NO: 2375895 - RNA, 22 nt, Human
uccacccucccagaccugccuc

SEQ ID NO: 2375896 - RNA, 15 nt, Human
uccagguucagcuug

SEQ ID NO: 2375897 - RNA, 16 nt, Human
uccagguucagcuugu

SEQ ID NO: 2375898 - RNA, 11 nt, Human
uccaggguggu

SEQ ID NO: 2375899 - RNA, 13 nt, Human
uccaggugcccag

SEQ ID NO: 2375900 - RNA, 14 nt, Human
uccagguggcauca

SEQ ID NO: 2375901 - RNA, 16 nt, Human
uccagguguuacugua

SEQ ID NO: 2375902 - RNA, 16 nt, Human
uccagguggggugagg

SEQ ID NO: 2375903 - RNA, 21 nt, Human
uccagguggggugaggcagug

SEQ ID NO: 2375904 - RNA, 18 nt, Human
uccaggugcacaagcucc

SEQ ID NO: 2375905 - RNA, 20 nt, Human
uccaggugcacaagcuccaa

SEQ ID NO: 2375906 - RNA, 21 nt, Human
uccaggugcacaagcuccaag

SEQ ID NO: 2375907 - RNA, 22 nt, Human
uccaggugcacaagcuccaagc

SEQ ID NO: 2375908 - RNA, 15 nt, Human
uccaggugcacaagc

SEQ ID NO: 2375909 - RNA, 23 nt, Human
uccaggggugggacacccuguga

SEQ ID NO: 2375910 - RNA, 21 nt, Human
uccagcuuuguucuucuuaaa

SEQ ID NO: 2375911 - RNA, 16 nt, Human
uccagggucccucugu

SEQ ID NO: 2375912 - RNA, 17 nt, Human
uccagggucccucugug

SEQ ID NO: 2375913 - RNA, 18 nt, Human
uccagggucccucugugu

SEQ ID NO: 2375914 - RNA, 22 nt, Human
uccaggagcagccacauuccug

SEQ ID NO: 2375915 - RNA, 23 nt, Human
uccagcuuguggagccccacacu

SEQ ID NO: 2375916 - RNA, 18 nt, Human
uccagcuuguggagcccc

SEQ ID NO: 2375917 - RNA, 19 nt, Human
uccagcuuguggagcccca

SEQ ID NO: 2375918 - RNA, 17 nt, Human
uccaggagcagccacau

SEQ ID NO: 2375919 - RNA, 18 nt, Human
uccaggagcagccacauu

SEQ ID NO: 2375920 - RNA, 13 nt, Human
uccagcuggugag

SEQ ID NO: 2375921 - RNA, 18 nt, Human
uccagcucaccagcccca

SEQ ID NO: 2375922 - RNA, 16 nt, Human
uccagcucaccagccc

SEQ ID NO: 2375923 - RNA, 17 nt, Human
uccagcucaccagcccc

SEQ ID NO: 2375924 - RNA, 19 nt, Human
uccagcuugcucuucagug

SEQ ID NO: 2375925 - RNA, 17 nt, Human
uccagcuugcucuucag

SEQ ID NO: 2375926 - RNA, 16 nt, Human
uccagcuuguggagcc

SEQ ID NO: 2375927 - RNA, 17 nt, Human
uccagcuuguggagccc

SEQ ID NO: 2375928 - RNA, 16 nt, Human
uccagcuugcucuuca

SEQ ID NO: 2375929 - RNA, 15 nt, Human
uccagcuugcucuuc

SEQ ID NO: 2375930 - RNA, 23 nt, Human
uccagcuucugguacucuccuag

SEQ ID NO: 2375931 - RNA, 16 nt, Human
uccaggagcagccaca

SEQ ID NO: 2375932 - RNA, 19 nt, Human
uccagcuucugguacucuc

SEQ ID NO: 2375933 - RNA, 20 nt, Human
uccagcuucugguacucucc

SEQ ID NO: 2375934 - RNA, 21 nt, Human
uccagcuucugguacucuccu

SEQ ID NO: 2375935 - RNA, 17 nt, Human
uccagcuguucagcugg

SEQ ID NO: 2375936 - RNA, 20 nt, Human
uccagccaaccccuguggag

SEQ ID NO: 2375937 - RNA, 16 nt, Human
uccagccaaccccugu

SEQ ID NO: 2375938 - RNA, 14 nt, Human
uccagccaaccccu

SEQ ID NO: 2375939 - RNA, 13 nt, Human
uccagccaacccc

SEQ ID NO: 2375940 - RNA, 23 nt, Human
uccagccaaccccuguggagccc

SEQ ID NO: 2375941 - RNA, 23 nt, Human
uccagccagcaaugauguccaga

SEQ ID NO: 2375942 - RNA, 13 nt, Human
uccagccagggcu

SEQ ID NO: 2375943 - RNA, 14 nt, Human
uccagccagggcug

SEQ ID NO: 2375944 - RNA, 15 nt, Human
uccagccagggcugc

SEQ ID NO: 2375945 - RNA, 17 nt, Human
uccagccagggcugcua

SEQ ID NO: 2375946 - RNA, 20 nt, Human
uccaccugucucagccuccc

SEQ ID NO: 2375947 - RNA, 17 nt, Human
uccaccugucucagccu

SEQ ID NO: 2375948 - RNA, 16 nt, Human
uccaccugucucagcc

SEQ ID NO: 2375949 - RNA, 13 nt, Human
uccaccugucuca

SEQ ID NO: 2375950 - RNA, 15 nt, Human
uccaccuucccaugc

SEQ ID NO: 2375951 - RNA, 16 nt, Human
uccacuuggucuguga

SEQ ID NO: 2375952 - RNA, 15 nt, Human
uccacuuggucugug

SEQ ID NO: 2375953 - RNA, 17 nt, Human
ucauagcugagauuccu

SEQ ID NO: 2375954 - RNA, 12 nt, Human
ucauagcugaga

SEQ ID NO: 2375955 - RNA, 13 nt, Human
ucauagcuaagaa

SEQ ID NO: 2375956 - RNA, 16 nt, Human
ucauagcuaagaaaua

SEQ ID NO: 2375957 - RNA, 20 nt, Human
ucauaggaaaaguacauuua

SEQ ID NO: 2375958 - RNA, 20 nt, Human
ucauaggaagggaccaaggc

SEQ ID NO: 2375959 - RNA, 21 nt, Human
ucauaggaagggaccaaggca

SEQ ID NO: 2375960 - RNA, 19 nt, Human
ucaucaccaacgucugugc

SEQ ID NO: 2375961 - RNA, 20 nt, Human
ucaucaccaacgucugugcc

SEQ ID NO: 2375962 - RNA, 21 nt, Human
ucaucaccaacgucugugcca

SEQ ID NO: 2375963 - RNA, 21 nt, Human
ucauagcauuaacuaaucuau

SEQ ID NO: 2375964 - RNA, 14 nt, Human
ucauagcauuaacu

SEQ ID NO: 2375965 - RNA, 20 nt, Human
ucauacuaucuacucuccuc

SEQ ID NO: 2375966 - RNA, 14 nt, Human
ucauacguccacca

SEQ ID NO: 2375967 - RNA, 15 nt, Human
ucauacguccaccau

SEQ ID NO: 2375968 - RNA, 15 nt, Human
ucauacucaccucac

SEQ ID NO: 2375969 - RNA, 19 nt, Human
ucauagcauuaacuaaucu

SEQ ID NO: 2375970 - RNA, 14 nt, Human
ucauagcccaguag

SEQ ID NO: 2375971 - RNA, 18 nt, Human
ucauagcccagaucagcu

SEQ ID NO: 2375972 - RNA, 21 nt, Human
ucauagcccagaucagcuccu

SEQ ID NO: 2375973 - RNA, 21 nt, Human
ucauagcccucacccuggggc

SEQ ID NO: 2375974 - RNA, 12 nt, Human
ucauagcuaaga

SEQ ID NO: 2375975 - RNA, 22 nt, Human
ucauagcccaguagaccuuguu

SEQ ID NO: 2375976 - RNA, 21 nt, Human
ucaggugagaagcagaggaag

SEQ ID NO: 2375977 - RNA, 23 nt, Human
ucaggugccucaagagaaggcaa

SEQ ID NO: 2375978 - RNA, 13 nt, Human
ucaggugcugcca

SEQ ID NO: 2375979 - RNA, 14 nt, Human
ucaggugcugccau

SEQ ID NO: 2375980 - RNA, 15 nt, Human
ucaggugcugccauc

SEQ ID NO: 2375981 - RNA, 21 nt, Human
ucagggcuccugccuucuguc

SEQ ID NO: 2375982 - RNA, 23 nt, Human
ucagggcuccugccuucuguccu

SEQ ID NO: 2375983 - RNA, 16 nt, Human
ucauaccuacauguau

SEQ ID NO: 2375984 - RNA, 15 nt, Human
ucauaccuacaugua

SEQ ID NO: 2375985 - RNA, 21 nt, Human
ucaggugacaugugaaaccuu

SEQ ID NO: 2375986 - RNA, 22 nt, Human
ucaggugaccaaaauccccuuc

SEQ ID NO: 2375987 - RNA, 18 nt, Human
ucauaccuaucaucuuaa

SEQ ID NO: 2375988 - RNA, 19 nt, Human
ucauagggaagaccugcug

SEQ ID NO: 2375989 - RNA, 14 nt, Human
ucaucacuccccuc

SEQ ID NO: 2375990 - RNA, 15 nt, Human
ucaucacuccccucc

SEQ ID NO: 2375991 - RNA, 16 nt, Human
ucaucacuccccucca

SEQ ID NO: 2375992 - RNA, 15 nt, Human
ucaucacuuuucagu

SEQ ID NO: 2375993 - RNA, 17 nt, Human
ucaucacuuuucaguga

SEQ ID NO: 2375994 - RNA, 15 nt, Human
ucaucacuggaugaa

SEQ ID NO: 2375995 - RNA, 22 nt, Human
ucaucacuggaugaagauucuc

SEQ ID NO: 2375996 - RNA, 14 nt, Human
ucaucagcauaccu

SEQ ID NO: 2375997 - RNA, 18 nt, Human
ucaucagccaccauccua

SEQ ID NO: 2375998 - RNA, 21 nt, Human
ucaucagcauaccuuuauugu

SEQ ID NO: 2375999 - RNA, 16 nt, Human
ucaucagccaccaucc

SEQ ID NO: 2376000 - RNA, 15 nt, Human
ucaucagaagauaac

SEQ ID NO: 2376001 - RNA, 14 nt, Human
ucaucaguauugaa

SEQ ID NO: 2376002 - RNA, 11 nt, Human
ucaucaggaug

SEQ ID NO: 2376003 - RNA, 13 nt, Human
ucaucaggaugaa

SEQ ID NO: 2376004 - RNA, 14 nt, Human
ucaucaggaugaac

SEQ ID NO: 2376005 - RNA, 22 nt, Human
ucaucaggaugaacccaggacg

SEQ ID NO: 2376006 - RNA, 17 nt, Human
ucaucaggggccugcag

SEQ ID NO: 2376007 - RNA, 13 nt, Human
ucaucugccgugc

SEQ ID NO: 2376008 - RNA, 17 nt, Human
ucaucugcucagcagcu

SEQ ID NO: 2376009 - RNA, 13 nt, Human
ucaucuucucugg

SEQ ID NO: 2376010 - RNA, 15 nt, Human
ucaucuucucagcuc

SEQ ID NO: 2376011 - RNA, 18 nt, Human
ucaucuucucagcuccca

SEQ ID NO: 2376012 - RNA, 19 nt, Human
ucaucuugaauuguaagga

SEQ ID NO: 2376013 - RNA, 11 nt, Human
ucaugcugaaa

SEQ ID NO: 2376014 - RNA, 13 nt, Human
ucaugcugaaagc

SEQ ID NO: 2376015 - RNA, 19 nt, Human
ucaucuucucagcucccau

SEQ ID NO: 2376016 - RNA, 16 nt, Human
ucaucuucuucaccau

SEQ ID NO: 2376017 - RNA, 14 nt, Human
ucaugcugaaagcc

SEQ ID NO: 2376018 - RNA, 23 nt, Human
ucaucuuagguuggcaaaaaggc

SEQ ID NO: 2376019 - RNA, 12 nt, Human
ucaucugcucuc

SEQ ID NO: 2376020 - RNA, 14 nt, Human
ucaucugcucuccu

SEQ ID NO: 2376021 - RNA, 15 nt, Human
ucaucugcucuccuu

SEQ ID NO: 2376022 - RNA, 16 nt, Human
ucaucugcucuccuuc

SEQ ID NO: 2376023 - RNA, 19 nt, Human
ucaucuucaccagaggaau

SEQ ID NO: 2376024 - RNA, 17 nt, Human
ucaucugcucuccuucc

SEQ ID NO: 2376025 - RNA, 18 nt, Human
ucaucugcucuccuuccu

SEQ ID NO: 2376026 - RNA, 13 nt, Human
ucaucuucucagc

SEQ ID NO: 2376027 - RNA, 16 nt, Human
ucaucuuacuguaccu

SEQ ID NO: 2376028 - RNA, 14 nt, Human
ucaucuucucagcu

SEQ ID NO: 2376029 - RNA, 12 nt, Human
ucauuucaggau

SEQ ID NO: 2376030 - RNA, 15 nt, Human
ucauuucaggagcag

SEQ ID NO: 2376031 - RNA, 16 nt, Human
ucauuucaggagcagc

SEQ ID NO: 2376032 - RNA, 23 nt, Human
ucauuucaccccucccuuucucc

SEQ ID NO: 2376033 - RNA, 16 nt, Human
ucauuccauucuggaa

SEQ ID NO: 2376034 - RNA, 14 nt, Human
ucauuucaccccuc

SEQ ID NO: 2376035 - RNA, 15 nt, Human
ucauuucaccccucc

SEQ ID NO: 2376036 - RNA, 16 nt, Human
ucauuucaccccuccc

SEQ ID NO: 2376037 - RNA, 21 nt, Human
ucauuucaccccucccuuucu

SEQ ID NO: 2376038 - RNA, 12 nt, Human
ucauugugaaau

SEQ ID NO: 2376039 - RNA, 15 nt, Human
ucauugugaaauuau

SEQ ID NO: 2376040 - RNA, 17 nt, Human
ucauugugaaauuauuc

SEQ ID NO: 2376041 - RNA, 18 nt, Human
ucauugugaaauuauuca

SEQ ID NO: 2376042 - RNA, 22 nt, Human
ucauuuccuauguaacugcauu

SEQ ID NO: 2376043 - RNA, 13 nt, Human
ucauuuccucaaa

SEQ ID NO: 2376044 - RNA, 12 nt, Human
ucauuuccugcc

SEQ ID NO: 2376045 - RNA, 13 nt, Human
ucauuuccugccc

SEQ ID NO: 2376046 - RNA, 14 nt, Human
ucauuuccugcccu

SEQ ID NO: 2376047 - RNA, 15 nt, Human
ucauuuccugcccuu

SEQ ID NO: 2376048 - RNA, 13 nt, Human
ucauuuccugugu

SEQ ID NO: 2376049 - RNA, 16 nt, Human
ucauuuccugugucuu

SEQ ID NO: 2376050 - RNA, 13 nt, Human
ucauuucuauuuc

SEQ ID NO: 2376051 - RNA, 18 nt, Human
ucauuucuacugugacug

SEQ ID NO: 2376052 - RNA, 19 nt, Human
ucauuucuacugugacuga

SEQ ID NO: 2376053 - RNA, 21 nt, Human
ucauuuccuucaaggcaucau

SEQ ID NO: 2376054 - RNA, 23 nt, Human
ucauuuccugcccuuccucaguu

SEQ ID NO: 2376055 - RNA, 15 nt, Human
ucauuucuacuguga

SEQ ID NO: 2376056 - RNA, 16 nt, Human
ucauuucauuccuaac

SEQ ID NO: 2376057 - RNA, 14 nt, Human
ucauuucauuguau

SEQ ID NO: 2376058 - RNA, 13 nt, Human
ucauuuccaagca

SEQ ID NO: 2376059 - RNA, 19 nt, Human
ucauuucauuguaugaugu

SEQ ID NO: 2376060 - RNA, 15 nt, Human
ucauuucauuuccua

SEQ ID NO: 2376061 - RNA, 16 nt, Human
ucauuuccaagcaagu

SEQ ID NO: 2376062 - RNA, 18 nt, Human
ucauuauuggaauuaacc

SEQ ID NO: 2376063 - RNA, 17 nt, Human
ucauuauuggaauuaac

SEQ ID NO: 2376064 - RNA, 14 nt, Human
ucauuauuggaauu

SEQ ID NO: 2376065 - RNA, 18 nt, Human
ucauuauagaucccccag

SEQ ID NO: 2376066 - RNA, 21 nt, Human
ucauuauuggaauuaaccugg

SEQ ID NO: 2376067 - RNA, 19 nt, Human
ucauuauuggaauuaaccu

SEQ ID NO: 2376068 - RNA, 14 nt, Human
ucauuauuggaggg

SEQ ID NO: 2376069 - RNA, 17 nt, Human
ucauuauuuuuccacuu

SEQ ID NO: 2376070 - RNA, 18 nt, Human
ucauucaaaaguugaaau

SEQ ID NO: 2376071 - RNA, 16 nt, Human
ucauucaaaaguugaa

SEQ ID NO: 2376072 - RNA, 22 nt, Human
ucauucaaaaguugaaauuaac

SEQ ID NO: 2376073 - RNA, 22 nt, Human
ucauucaaguguaaaauauuuu

SEQ ID NO: 2376074 - RNA, 21 nt, Human
ucauucaacccaccugcgucu

SEQ ID NO: 2376075 - RNA, 15 nt, Human
ucauuccauucugga

SEQ ID NO: 2376076 - RNA, 14 nt, Human
ucauuccauucugg

SEQ ID NO: 2376077 - RNA, 21 nt, Human
ucauuccaacuucccaguuca

SEQ ID NO: 2376078 - RNA, 14 nt, Human
ucauuccagaggaa

SEQ ID NO: 2376079 - RNA, 16 nt, Human
ucauucaauacaagug

SEQ ID NO: 2376080 - RNA, 13 nt, Human
ucauucaauaaau

SEQ ID NO: 2376081 - RNA, 23 nt, Human
ucauuccaccuucccaugcccug

SEQ ID NO: 2376082 - RNA, 17 nt, Human
ucauuccaacagugagu

SEQ ID NO: 2376083 - RNA, 17 nt, Human
ucauuauagauccccca

SEQ ID NO: 2376084 - RNA, 23 nt, Human
ucauuauaaacgugaugaucagc

SEQ ID NO: 2376085 - RNA, 15 nt, Human
ucauuauaaacguga

SEQ ID NO: 2376086 - RNA, 13 nt, Human
ucauuauaaacgu

SEQ ID NO: 2376087 - RNA, 13 nt, Human
ucauuauguaaaa

SEQ ID NO: 2376088 - RNA, 20 nt, Human
ucauuauguaaaauguuuua

SEQ ID NO: 2376089 - RNA, 20 nt, Human
ucauuaucucaaaacugcac

SEQ ID NO: 2376090 - RNA, 19 nt, Human
ucauuaucucaaaacugca

SEQ ID NO: 2376091 - RNA, 13 nt, Human
ucauuaucucaaa

SEQ ID NO: 2376092 - RNA, 18 nt, Human
ucagaaacacuggggcug

SEQ ID NO: 2376093 - RNA, 22 nt, Human
ucagaaacaucaguuacucuga

SEQ ID NO: 2376094 - RNA, 18 nt, Human
ucagaaacaucaguuacu

SEQ ID NO: 2376095 - RNA, 13 nt, Human
ucagaaaccaguu

SEQ ID NO: 2376096 - RNA, 21 nt, Human
ucagaaacacuggggcuggca

SEQ ID NO: 2376097 - RNA, 18 nt, Human
ucagaaaccaaacaguuu

SEQ ID NO: 2376098 - RNA, 22 nt, Human
ucagaaaccaguuaugugaaug

SEQ ID NO: 2376099 - RNA, 12 nt, Human
ucagaaacuguu

SEQ ID NO: 2376100 - RNA, 18 nt, Human
ucagaaacuugugaagug

SEQ ID NO: 2376101 - RNA, 17 nt, Human
ucagaaacuugugaagu

SEQ ID NO: 2376102 - RNA, 16 nt, Human
ucagaaacuugugaag

SEQ ID NO: 2376103 - RNA, 15 nt, Human
ucagaaacuugugaa

SEQ ID NO: 2376104 - RNA, 10 nt, Human
ucagaaaugu

SEQ ID NO: 2376105 - RNA, 19 nt, Human
ucacuuucacauagauguc

SEQ ID NO: 2376106 - RNA, 19 nt, Human
ucagaaacacccucacacu

SEQ ID NO: 2376107 - RNA, 22 nt, Human
ucagaaacacccucacacuggg

SEQ ID NO: 2376108 - RNA, 21 nt, Human
ucagaaacacccucacacugg

SEQ ID NO: 2376109 - RNA, 18 nt, Human
ucacuuucacauagaugu

SEQ ID NO: 2376110 - RNA, 17 nt, Human
ucacuuucacauagaug

SEQ ID NO: 2376111 - RNA, 22 nt, Human
ucacuuuaauucucaugugauc

SEQ ID NO: 2376112 - RNA, 15 nt, Human
ucacuuuagaugcug

SEQ ID NO: 2376113 - RNA, 16 nt, Human
ucacuuuagaugcuga

SEQ ID NO: 2376114 - RNA, 17 nt, Human
ucacuuuagaugcugau

SEQ ID NO: 2376115 - RNA, 15 nt, Human
ucacuuguuguuuua

SEQ ID NO: 2376116 - RNA, 20 nt, Human
ucacuuguuguuuuacuaaa

SEQ ID NO: 2376117 - RNA, 21 nt, Human
ucacuuguuguuuuacuaaag

SEQ ID NO: 2376118 - RNA, 22 nt, Human
ucacuuguuguuuuacuaaaga

SEQ ID NO: 2376119 - RNA, 14 nt, Human
ucacuuuagaugcu

SEQ ID NO: 2376120 - RNA, 18 nt, Human
ucacuuuaauucucaugu

SEQ ID NO: 2376121 - RNA, 20 nt, Human
ucacuuuaauucucauguga

SEQ ID NO: 2376122 - RNA, 23 nt, Human
ucacuuguuguuuuacuaaagaa

SEQ ID NO: 2376123 - RNA, 23 nt, Human
ucacaccugacucugaaaucuga

SEQ ID NO: 2376124 - RNA, 15 nt, Human
ucacuuuaauucuca

SEQ ID NO: 2376125 - RNA, 16 nt, Human
ucacuuuaauucucau

SEQ ID NO: 2376126 - RNA, 18 nt, Human
ucagaaauguacaacuuu

SEQ ID NO: 2376127 - RNA, 16 nt, Human
ucagaaauuggaacag

SEQ ID NO: 2376128 - RNA, 18 nt, Human
ucagaaauuggaacagaa

SEQ ID NO: 2376129 - RNA, 16 nt, Human
ucagaaaugcugccug

SEQ ID NO: 2376130 - RNA, 17 nt, Human
ucagaaaugcugccugc

SEQ ID NO: 2376131 - RNA, 19 nt, Human
ucagaaaugcugccugccu

SEQ ID NO: 2376132 - RNA, 21 nt, Human
ucagaaaugcugccugccugu

SEQ ID NO: 2376133 - RNA, 15 nt, Human
ucagaaauguguuau

SEQ ID NO: 2376134 - RNA, 23 nt, Human
ucagaaauuuaauucauguuucu

SEQ ID NO: 2376135 - RNA, 21 nt, Human
ucagaaauuggaacagaaugu

SEQ ID NO: 2376136 - RNA, 21 nt, Human
ucagaaauuuaauucauguuu

SEQ ID NO: 2376137 - RNA, 14 nt, Human
ucagaaauuuaauu

SEQ ID NO: 2376138 - RNA, 23 nt, Human
ucagaauucucuaguuugauuaa

SEQ ID NO: 2376139 - RNA, 15 nt, Human
ucagacacccucaac

SEQ ID NO: 2376140 - RNA, 22 nt, Human
ucagacacccucaaccucuucu

SEQ ID NO: 2376141 - RNA, 17 nt, Human
ucagacacccucaaccu

SEQ ID NO: 2376142 - RNA, 23 nt, Human
ucagacacccucaaccucuucug

SEQ ID NO: 2376143 - RNA, 14 nt, Human
ucagacacucuggc

SEQ ID NO: 2376144 - RNA, 15 nt, Human
ucagacacucuggcu

SEQ ID NO: 2376145 - RNA, 18 nt, Human
ucagacagaaccccuaca

SEQ ID NO: 2376146 - RNA, 17 nt, Human
ucagacacucuggcugg

SEQ ID NO: 2376147 - RNA, 18 nt, Human
ucagacacucuggcuggu

SEQ ID NO: 2376148 - RNA, 21 nt, Human
ucagaauugaucauuuucccc

SEQ ID NO: 2376149 - RNA, 16 nt, Human
ucagaauucucuaguu

SEQ ID NO: 2376150 - RNA, 11 nt, Human
ucagacaagca

SEQ ID NO: 2376151 - RNA, 21 nt, Human
ucagaccuuggaucagaugaa

SEQ ID NO: 2376152 - RNA, 17 nt, Human
ucagacgccugaggaac

SEQ ID NO: 2376153 - RNA, 18 nt, Human
ucagacccuaccccacca

SEQ ID NO: 2376154 - RNA, 16 nt, Human
ucagacccuaccccac

SEQ ID NO: 2376155 - RNA, 14 nt, Human
ucagacccuacccc

SEQ ID NO: 2376156 - RNA, 13 nt, Human
ucagacccuaccc

SEQ ID NO: 2376157 - RNA, 13 nt, Human
ucagacccuuuag

SEQ ID NO: 2376158 - RNA, 20 nt, Human
ucagaccuuggaucagauga

SEQ ID NO: 2376159 - RNA, 21 nt, Human
ucagacuggcuggcugcagug

SEQ ID NO: 2376160 - RNA, 20 nt, Human
ucagacuggcuggcugcagu

SEQ ID NO: 2376161 - RNA, 15 nt, Human
ucagacuuaccagga

SEQ ID NO: 2376162 - RNA, 14 nt, Human
ucagacuggcuggc

SEQ ID NO: 2376163 - RNA, 13 nt, Human
ucagacuggcugg

SEQ ID NO: 2376164 - RNA, 23 nt, Human
ucagacugcugggacuggccagg

SEQ ID NO: 2376165 - RNA, 16 nt, Human
ucagacgccugaggaa

SEQ ID NO: 2376166 - RNA, 17 nt, Human
ucagacagagaggacug

SEQ ID NO: 2376167 - RNA, 22 nt, Human
ucagacagagaggacuguaggg

SEQ ID NO: 2376168 - RNA, 13 nt, Human
ucagacagcugcc

SEQ ID NO: 2376169 - RNA, 22 nt, Human
ucagacccccacucucauuccc

SEQ ID NO: 2376170 - RNA, 18 nt, Human
ucagacccccacucucau

SEQ ID NO: 2376171 - RNA, 14 nt, Human
ucagacccccacuc

SEQ ID NO: 2376172 - RNA, 12 nt, Human
ucagacccccac

SEQ ID NO: 2376173 - RNA, 17 nt, Human
ucagaccccagcggcug

SEQ ID NO: 2376174 - RNA, 13 nt, Human
ucagaccccagcg

SEQ ID NO: 2376175 - RNA, 12 nt, Human
ucagaccccagc

SEQ ID NO: 2376176 - RNA, 14 nt, Human
ucagacagcugccu

SEQ ID NO: 2376177 - RNA, 15 nt, Human
ucagaccauaauguu

SEQ ID NO: 2376178 - RNA, 23 nt, Human
ucagaccauaauguuacauuauu

SEQ ID NO: 2376179 - RNA, 23 nt, Human
ucagacuuuaaagaauaauaugc

SEQ ID NO: 2376180 - RNA, 17 nt, Human
ucagacuuuaaagaaua

SEQ ID NO: 2376181 - RNA, 15 nt, Human
ucagacuuuggaaaa

SEQ ID NO: 2376182 - RNA, 13 nt, Human
ucagacuuugcuu

SEQ ID NO: 2376183 - RNA, 16 nt, Human
ucagacuuuaaagaau

SEQ ID NO: 2376184 - RNA, 20 nt, Human
ucagacuuuggaaaaugcau

SEQ ID NO: 2376185 - RNA, 21 nt, Human
ucagacuuuggaaaaugcauu

SEQ ID NO: 2376186 - RNA, 19 nt, Human
ucagacuuuggaaaaugca

SEQ ID NO: 2376187 - RNA, 16 nt, Human
ucagacuuuggaaaau

SEQ ID NO: 2376188 - RNA, 21 nt, Human
ucagaguaauccaagcaaaug

SEQ ID NO: 2376189 - RNA, 22 nt, Human
ucagaguaauccaagcaaaugu

SEQ ID NO: 2376190 - RNA, 12 nt, Human
ucagagaauuuc

SEQ ID NO: 2376191 - RNA, 21 nt, Human
ucagaggggaauaaacuguug

SEQ ID NO: 2376192 - RNA, 18 nt, Human
ucacugcauccuccgccu

SEQ ID NO: 2376193 - RNA, 20 nt, Human
ucacucuuauugcccacgcu

SEQ ID NO: 2376194 - RNA, 19 nt, Human
ucacugcauccuccgccuc

SEQ ID NO: 2376195 - RNA, 13 nt, Human
ucacugcauccuc

SEQ ID NO: 2376196 - RNA, 11 nt, Human
ucacugccagg

SEQ ID NO: 2376197 - RNA, 14 nt, Human
ucacugccaggcca

SEQ ID NO: 2376198 - RNA, 21 nt, Human
ucacugccucucccuggcccu

SEQ ID NO: 2376199 - RNA, 14 nt, Human
ucacugccugcaga

SEQ ID NO: 2376200 - RNA, 19 nt, Human
ucacugccucucccuggcc

SEQ ID NO: 2376201 - RNA, 12 nt, Human
ucacugccucuc

SEQ ID NO: 2376202 - RNA, 11 nt, Human
ucacugccucu

SEQ ID NO: 2376203 - RNA, 19 nt, Human
ucacugcuaagaauauuug

SEQ ID NO: 2376204 - RNA, 15 nt, Human
ucacugccugcagag

SEQ ID NO: 2376205 - RNA, 22 nt, Human
ucacugccugcagaggucugug

SEQ ID NO: 2376206 - RNA, 14 nt, Human
ucacugccuuugcu

SEQ ID NO: 2376207 - RNA, 18 nt, Human
ucacugccaugccagcuu

SEQ ID NO: 2376208 - RNA, 13 nt, Human
ucacugccauaua

SEQ ID NO: 2376209 - RNA, 20 nt, Human
ucacugccaggccagccucc

SEQ ID NO: 2376210 - RNA, 23 nt, Human
ucacugccaggccagccuccgag

SEQ ID NO: 2376211 - RNA, 15 nt, Human
ucacugccaggccag

SEQ ID NO: 2376212 - RNA, 16 nt, Human
ucacugccaggccagc

SEQ ID NO: 2376213 - RNA, 18 nt, Human
ucacugccaggccagccu

SEQ ID NO: 2376214 - RNA, 19 nt, Human
ucacugccaggccagccuc

SEQ ID NO: 2376215 - RNA, 12 nt, Human
ucaccccuccac

SEQ ID NO: 2376216 - RNA, 17 nt, Human
ucaccccuccacccuug

SEQ ID NO: 2376217 - RNA, 13 nt, Human
ucaccccuccagg

SEQ ID NO: 2376218 - RNA, 14 nt, Human
ucaccccuccagga

SEQ ID NO: 2376219 - RNA, 14 nt, Human
ucaccccgucuggg

SEQ ID NO: 2376220 - RNA, 22 nt, Human
ucaccccggccaccugcggugc

SEQ ID NO: 2376221 - RNA, 13 nt, Human
ucaccagccccag

SEQ ID NO: 2376222 - RNA, 16 nt, Human
ucaccagccccagugc

SEQ ID NO: 2376223 - RNA, 17 nt, Human
ucaccccugcccuggga

SEQ ID NO: 2376224 - RNA, 16 nt, Human
ucaccccugcccuggg

SEQ ID NO: 2376225 - RNA, 14 nt, Human
ucaccccugcccug

SEQ ID NO: 2376226 - RNA, 13 nt, Human
ucaccccugcccu

SEQ ID NO: 2376227 - RNA, 15 nt, Human
ucaccccugguucuc

SEQ ID NO: 2376228 - RNA, 18 nt, Human
ucaccccugguucucauc

SEQ ID NO: 2376229 - RNA, 14 nt, Human
ucaccccucccuuu

SEQ ID NO: 2376230 - RNA, 17 nt, Human
ucaccccucccuuucuc

SEQ ID NO: 2376231 - RNA, 18 nt, Human
ucaccccucccuuucucc

SEQ ID NO: 2376232 - RNA, 20 nt, Human
ucaccccucccuuucucccc

SEQ ID NO: 2376233 - RNA, 17 nt, Human
ucacucuuauugcccac

SEQ ID NO: 2376234 - RNA, 19 nt, Human
ucaccccugguucucaucu

SEQ ID NO: 2376235 - RNA, 20 nt, Human
ucacuggguggggugaggac

SEQ ID NO: 2376236 - RNA, 11 nt, Human
ucacugggugg

SEQ ID NO: 2376237 - RNA, 21 nt, Human
ucacugggguccuggggccuc

SEQ ID NO: 2376238 - RNA, 20 nt, Human
ucacugggguccuggggccu

SEQ ID NO: 2376239 - RNA, 19 nt, Human
ucacugggguccuggggcc

SEQ ID NO: 2376240 - RNA, 17 nt, Human
ucacugggguccugggg

SEQ ID NO: 2376241 - RNA, 16 nt, Human
ucacugggguccuggg

SEQ ID NO: 2376242 - RNA, 18 nt, Human
ucacuggguggggugagg

SEQ ID NO: 2376243 - RNA, 23 nt, Human
ucacuguaagacucauucccuag

SEQ ID NO: 2376244 - RNA, 20 nt, Human
ucacugguagaccaaaauaa

SEQ ID NO: 2376245 - RNA, 19 nt, Human
ucacugguagaccaaaaua

SEQ ID NO: 2376246 - RNA, 18 nt, Human
ucacugguagaccaaaau

SEQ ID NO: 2376247 - RNA, 20 nt, Human
ucacuguagaaugauuucau

SEQ ID NO: 2376248 - RNA, 19 nt, Human
ucacuugugccaacacuca

SEQ ID NO: 2376249 - RNA, 12 nt, Human
ucacuugugggg

SEQ ID NO: 2376250 - RNA, 21 nt, Human
ucacuugugccaacacucaag

SEQ ID NO: 2376251 - RNA, 13 nt, Human
ucacuggagccca

SEQ ID NO: 2376252 - RNA, 12 nt, Human
ucacuggagccc

SEQ ID NO: 2376253 - RNA, 11 nt, Human
ucacuggagcc

SEQ ID NO: 2376254 - RNA, 22 nt, Human
ucacuggagcaccaggcacgaa

SEQ ID NO: 2376255 - RNA, 18 nt, Human
ucacuggagcaccaggca

SEQ ID NO: 2376256 - RNA, 15 nt, Human
ucacuggagcccagg

SEQ ID NO: 2376257 - RNA, 14 nt, Human
ucacuggagcccag

SEQ ID NO: 2376258 - RNA, 21 nt, Human
ucacuggcugccuccacuccc

SEQ ID NO: 2376259 - RNA, 17 nt, Human
ucacuggggccuacagc

SEQ ID NO: 2376260 - RNA, 17 nt, Human
ucacuggagcaccaggc

SEQ ID NO: 2376261 - RNA, 18 nt, Human
ucacuggaccacugggca

SEQ ID NO: 2376262 - RNA, 15 nt, Human
ucacuggaaagggga

SEQ ID NO: 2376263 - RNA, 17 nt, Human
ucacuggaaaggggaga

SEQ ID NO: 2376264 - RNA, 18 nt, Human
ucacuggaaaggggagag

SEQ ID NO: 2376265 - RNA, 21 nt, Human
ucacuggaaaggggagagccu

SEQ ID NO: 2376266 - RNA, 23 nt, Human
ucacuggaaaggggagagccugc

SEQ ID NO: 2376267 - RNA, 14 nt, Human
ucacuggaacucag

SEQ ID NO: 2376268 - RNA, 17 nt, Human
ucacugcuggcugccuu

SEQ ID NO: 2376269 - RNA, 18 nt, Human
ucacugcuggcugccuua

SEQ ID NO: 2376270 - RNA, 22 nt, Human
ucacugcuggcugccuuagaac

SEQ ID NO: 2376271 - RNA, 10 nt, Human
ucacugcugu

SEQ ID NO: 2376272 - RNA, 11 nt, Human
ucacugcuguc

SEQ ID NO: 2376273 - RNA, 12 nt, Human
ucacugcuguca

SEQ ID NO: 2376274 - RNA, 13 nt, Human
ucacugcugucau

SEQ ID NO: 2376275 - RNA, 14 nt, Human
ucacugcuuaacuu

SEQ ID NO: 2376276 - RNA, 15 nt, Human
ucacugcugucauca

SEQ ID NO: 2376277 - RNA, 16 nt, Human
ucacugcugucaucaa

SEQ ID NO: 2376278 - RNA, 13 nt, Human
ucacugcuggcug

SEQ ID NO: 2376279 - RNA, 14 nt, Human
ucacugcuggcugc

SEQ ID NO: 2376280 - RNA, 15 nt, Human
ucacugcuggcugcc

SEQ ID NO: 2376281 - RNA, 16 nt, Human
ucacugcuggcugccu

SEQ ID NO: 2376282 - RNA, 14 nt, Human
ucacugcucccuga

SEQ ID NO: 2376283 - RNA, 18 nt, Human
ucacugcucccugaagcc

SEQ ID NO: 2376284 - RNA, 19 nt, Human
ucacugcucccugaagcca

SEQ ID NO: 2376285 - RNA, 20 nt, Human
ucacugcucccugaagccag

SEQ ID NO: 2376286 - RNA, 21 nt, Human
ucacugcucccugaagccagc

SEQ ID NO: 2376287 - RNA, 23 nt, Human
ucacugcucccugaagccagccu

SEQ ID NO: 2376288 - RNA, 24 nt, Human
ucacugcucccugaagccagccuu

SEQ ID NO: 2376289 - RNA, 12 nt, Human
ucacugcuggcu

SEQ ID NO: 2376290 - RNA, 12 nt, Human
ucacugcugcaa

SEQ ID NO: 2376291 - RNA, 17 nt, Human
ucacugcugcaaggccu

SEQ ID NO: 2376292 - RNA, 18 nt, Human
ucacugcugcaaggccuu

SEQ ID NO: 2376293 - RNA, 22 nt, Human
ucacugcugcaaggccuuucug

SEQ ID NO: 2376294 - RNA, 23 nt, Human
ucagggaaaagcagcucuccccu

SEQ ID NO: 2376295 - RNA, 19 nt, Human
ucagggaaaagcagcucuc

SEQ ID NO: 2376296 - RNA, 18 nt, Human
ucagggaaaagcagcucu

SEQ ID NO: 2376297 - RNA, 16 nt, Human
ucagggaaaagcagcu

SEQ ID NO: 2376298 - RNA, 18 nt, Human
ucaggcuugaaaugcauu

SEQ ID NO: 2376299 - RNA, 21 nt, Human
ucaggcuuucacuauuuccuu

SEQ ID NO: 2376300 - RNA, 20 nt, Human
ucaggcuuucacuauuuccu

SEQ ID NO: 2376301 - RNA, 16 nt, Human
ucaggcuugaaaugca

SEQ ID NO: 2376302 - RNA, 21 nt, Human
ucagggagugggcuaagcacg

SEQ ID NO: 2376303 - RNA, 15 nt, Human
ucagggaggucauuu

SEQ ID NO: 2376304 - RNA, 16 nt, Human
ucagggaaaggccagu

SEQ ID NO: 2376305 - RNA, 22 nt, Human
ucagggaaccguuauuauaauu

SEQ ID NO: 2376306 - RNA, 16 nt, Human
ucagggcagggcucug

SEQ ID NO: 2376307 - RNA, 19 nt, Human
ucagggcagcgccaggcug

SEQ ID NO: 2376308 - RNA, 15 nt, Human
ucagggcagcgccag

SEQ ID NO: 2376309 - RNA, 14 nt, Human
ucagggccaugccu

SEQ ID NO: 2376310 - RNA, 13 nt, Human
ucagggccaugcu

SEQ ID NO: 2376311 - RNA, 14 nt, Human
ucagggccaugcug

SEQ ID NO: 2376312 - RNA, 17 nt, Human
ucagggccaugcugagg

SEQ ID NO: 2376313 - RNA, 23 nt, Human
ucagggauagcacugagcaaagc

SEQ ID NO: 2376314 - RNA, 20 nt, Human
ucagggauuuuuuuuuuaaa

SEQ ID NO: 2376315 - RNA, 15 nt, Human
ucagggaucuugcau

SEQ ID NO: 2376316 - RNA, 21 nt, Human
ucagggauggccguuggccac

SEQ ID NO: 2376317 - RNA, 22 nt, Human
ucagggcacugcugcugccuuu

SEQ ID NO: 2376318 - RNA, 23 nt, Human
ucagggccccagcacuaaagcag

SEQ ID NO: 2376319 - RNA, 16 nt, Human
ucagggccccagcacu

SEQ ID NO: 2376320 - RNA, 14 nt, Human
ucagggccccagca

SEQ ID NO: 2376321 - RNA, 23 nt, Human
ucagggcgcacagcaugagaggc

SEQ ID NO: 2376322 - RNA, 23 nt, Human
ucagggcuaaacgggcauugccu

SEQ ID NO: 2376323 - RNA, 13 nt, Human
ucagggcuccugc

SEQ ID NO: 2376324 - RNA, 14 nt, Human
ucagggcuccugcc

SEQ ID NO: 2376325 - RNA, 15 nt, Human
ucagggcuccugccu

SEQ ID NO: 2376326 - RNA, 20 nt, Human
ucagggcuccugccuucugu

SEQ ID NO: 2376327 - RNA, 16 nt, Human
ucaggugagaagcaga

SEQ ID NO: 2376328 - RNA, 15 nt, Human
ucaggugagaagcag

SEQ ID NO: 2376329 - RNA, 14 nt, Human
ucagggccuggcuc

SEQ ID NO: 2376330 - RNA, 16 nt, Human
ucagggccuggcucag

SEQ ID NO: 2376331 - RNA, 18 nt, Human
ucagggccaugcugaggc

SEQ ID NO: 2376332 - RNA, 19 nt, Human
ucagggccaugcugaggcc

SEQ ID NO: 2376333 - RNA, 21 nt, Human
ucagggccaugcugaggccug

SEQ ID NO: 2376334 - RNA, 23 nt, Human
ucagggccaugcugaggccuggg

SEQ ID NO: 2376335 - RNA, 17 nt, Human
ucagggccaugccugcc

SEQ ID NO: 2376336 - RNA, 14 nt, Human
ucagggcccaaguc

SEQ ID NO: 2376337 - RNA, 15 nt, Human
ucagggcccaagucc

SEQ ID NO: 2376338 - RNA, 18 nt, Human
ucagggcccaagucccug

SEQ ID NO: 2376339 - RNA, 19 nt, Human
ucagggcccaagucccugu

SEQ ID NO: 2376340 - RNA, 16 nt, Human
ucaggaugcccagggc

SEQ ID NO: 2376341 - RNA, 15 nt, Human
ucaggaugcccaggg

SEQ ID NO: 2376342 - RNA, 14 nt, Human
ucaggaugcccagg

SEQ ID NO: 2376343 - RNA, 13 nt, Human
ucaggaugcccag

SEQ ID NO: 2376344 - RNA, 17 nt, Human
ucaggauucuguuccuu

SEQ ID NO: 2376345 - RNA, 22 nt, Human
ucaggaugcccagggccacucu

SEQ ID NO: 2376346 - RNA, 20 nt, Human
ucaggaugauacacuaugaa

SEQ ID NO: 2376347 - RNA, 20 nt, Human
ucaggagcccugggaggcuc

SEQ ID NO: 2376348 - RNA, 23 nt, Human
ucaggagcccugggaggcucugg

SEQ ID NO: 2376349 - RNA, 16 nt, Human
ucagcugccccacagg

SEQ ID NO: 2376350 - RNA, 22 nt, Human
ucagcucccccuguccccucag

SEQ ID NO: 2376351 - RNA, 23 nt, Human
ucagcucccccuguccccucagc

SEQ ID NO: 2376352 - RNA, 19 nt, Human
ucaggagcccugggaggcu

SEQ ID NO: 2376353 - RNA, 18 nt, Human
ucaggagcccugggaggc

SEQ ID NO: 2376354 - RNA, 23 nt, Human
ucaggcuuccuuggcaucacagg

SEQ ID NO: 2376355 - RNA, 15 nt, Human
ucaggcuuccuuggc

SEQ ID NO: 2376356 - RNA, 14 nt, Human
ucaggcuuccuugg

SEQ ID NO: 2376357 - RNA, 16 nt, Human
ucaggcuggugggagg

SEQ ID NO: 2376358 - RNA, 17 nt, Human
ucaggcuggugggaggg

SEQ ID NO: 2376359 - RNA, 15 nt, Human
ucaggcugcuuggga

SEQ ID NO: 2376360 - RNA, 22 nt, Human
ucaggcugcuggcgccucugca

SEQ ID NO: 2376361 - RNA, 14 nt, Human
ucaggcugguggga

SEQ ID NO: 2376362 - RNA, 19 nt, Human
ucaggcucugcccugcccu

SEQ ID NO: 2376363 - RNA, 14 nt, Human
ucaggcucugcccu

SEQ ID NO: 2376364 - RNA, 15 nt, Human
ucaggcucugccuca

SEQ ID NO: 2376365 - RNA, 13 nt, Human
ucaggcucugccc

SEQ ID NO: 2376366 - RNA, 16 nt, Human
ucaggcuccauuagga

SEQ ID NO: 2376367 - RNA, 20 nt, Human
ucaggcuccauuaggauuug

SEQ ID NO: 2376368 - RNA, 15 nt, Human
ucaggcacuagccuu

SEQ ID NO: 2376369 - RNA, 16 nt, Human
ucaggcacuagccuuu

SEQ ID NO: 2376370 - RNA, 21 nt, Human
ucaggcacuagccuuuggcuc

SEQ ID NO: 2376371 - RNA, 22 nt, Human
ucaggcacuagccuuuggcucu

SEQ ID NO: 2376372 - RNA, 11 nt, Human
ucaggcuccau

SEQ ID NO: 2376373 - RNA, 15 nt, Human
ucaggcuccauuagg

SEQ ID NO: 2376374 - RNA, 17 nt, Human
ucaggcaaggucuggcc

SEQ ID NO: 2376375 - RNA, 18 nt, Human
ucaggcaaggucuggccu

SEQ ID NO: 2376376 - RNA, 13 nt, Human
ucaggcuagaugu

SEQ ID NO: 2376377 - RNA, 17 nt, Human
ucaggcuagauguaugu

SEQ ID NO: 2376378 - RNA, 20 nt, Human
ucagccuccugaguagcugg

SEQ ID NO: 2376379 - RNA, 20 nt, Human
ucagccuccggaguagcugg

SEQ ID NO: 2376380 - RNA, 21 nt, Human
ucagccucccgaguagcugag

SEQ ID NO: 2376381 - RNA, 13 nt, Human
ucagccuccucau

SEQ ID NO: 2376382 - RNA, 21 nt, Human
ucagccucccgaguagcuggg

SEQ ID NO: 2376383 - RNA, 22 nt, Human
ucagccucccgaguagcuggga

SEQ ID NO: 2376384 - RNA, 13 nt, Human
ucagccuccugag

SEQ ID NO: 2376385 - RNA, 21 nt, Human
ucagccuccugaguagcugga

SEQ ID NO: 2376386 - RNA, 16 nt, Human
ucagccuccuguguag

SEQ ID NO: 2376387 - RNA, 14 nt, Human
ucagccuccugugu

SEQ ID NO: 2376388 - RNA, 13 nt, Human
ucagccuccugug

SEQ ID NO: 2376389 - RNA, 19 nt, Human
ucagccuccucaucugggg

SEQ ID NO: 2376390 - RNA, 22 nt, Human
ucagccuccugaguagcuggga

SEQ ID NO: 2376391 - RNA, 19 nt, Human
ucagccugcuccagcuguu

SEQ ID NO: 2376392 - RNA, 18 nt, Human
ucagccugcuccagcugu

SEQ ID NO: 2376393 - RNA, 20 nt, Human
ucagccuccuguguagcugg

SEQ ID NO: 2376394 - RNA, 14 nt, Human
ucagccuggccaga

SEQ ID NO: 2376395 - RNA, 12 nt, Human
ucagccuggcca

SEQ ID NO: 2376396 - RNA, 18 nt, Human
ucagccuggccagacaca

SEQ ID NO: 2376397 - RNA, 17 nt, Human
ucagccuggccagacac

SEQ ID NO: 2376398 - RNA, 16 nt, Human
ucagccuggccagaca

SEQ ID NO: 2376399 - RNA, 15 nt, Human
ucagccuggccagac

SEQ ID NO: 2376400 - RNA, 17 nt, Human
ucagcuccccucggaga

SEQ ID NO: 2376401 - RNA, 15 nt, Human
ucagcucccauuucu

SEQ ID NO: 2376402 - RNA, 16 nt, Human
ucagcucccauuucua

SEQ ID NO: 2376403 - RNA, 19 nt, Human
ucagcucccauuucuacuc

SEQ ID NO: 2376404 - RNA, 20 nt, Human
ucagcucccauuucuacucu

SEQ ID NO: 2376405 - RNA, 13 nt, Human
ucagcuccccaga

SEQ ID NO: 2376406 - RNA, 15 nt, Human
ucagcuccccagagu

SEQ ID NO: 2376407 - RNA, 17 nt, Human
ucagcuccccagagucc

SEQ ID NO: 2376408 - RNA, 16 nt, Human
ucagcugaaccugggu

SEQ ID NO: 2376409 - RNA, 15 nt, Human
ucagcugaaccuggg

SEQ ID NO: 2376410 - RNA, 18 nt, Human
ucagcuccccucggagaa

SEQ ID NO: 2376411 - RNA, 19 nt, Human
ucagcucuuggcuccacug

SEQ ID NO: 2376412 - RNA, 13 nt, Human
ucagcucccccug

SEQ ID NO: 2376413 - RNA, 15 nt, Human
ucagcucccccuguc

SEQ ID NO: 2376414 - RNA, 18 nt, Human
ucagcucccccugucccc

SEQ ID NO: 2376415 - RNA, 20 nt, Human
ucagcucccccuguccccuc

SEQ ID NO: 2376416 - RNA, 18 nt, Human
ucagauauaaaagacuga

SEQ ID NO: 2376417 - RNA, 20 nt, Human
ucagauauaaaagacugacc

SEQ ID NO: 2376418 - RNA, 16 nt, Human
ucagauauauuuuuca

SEQ ID NO: 2376419 - RNA, 18 nt, Human
ucagauauauaucauauu

SEQ ID NO: 2376420 - RNA, 15 nt, Human
ucagaguauggagcu

SEQ ID NO: 2376421 - RNA, 23 nt, Human
ucagauauauuuuucacaguuuu

SEQ ID NO: 2376422 - RNA, 18 nt, Human
ucagauauauuuuucaca

SEQ ID NO: 2376423 - RNA, 14 nt, Human
ucagauauaaaaga

SEQ ID NO: 2376424 - RNA, 17 nt, Human
ucagauauaaaagacug

SEQ ID NO: 2376425 - RNA, 18 nt, Human
ucagagguagggcugcca

SEQ ID NO: 2376426 - RNA, 23 nt, Human
ucagaggugaaagcuauaucaau

SEQ ID NO: 2376427 - RNA, 12 nt, Human
ucagcaugucua

SEQ ID NO: 2376428 - RNA, 17 nt, Human
ucagcauucucacuccu

SEQ ID NO: 2376429 - RNA, 20 nt, Human
ucagcauucucacuccuacc

SEQ ID NO: 2376430 - RNA, 21 nt, Human
ucagcaugucuauucagcuuc

SEQ ID NO: 2376431 - RNA, 19 nt, Human
ucagcaugucuauucagcu

SEQ ID NO: 2376432 - RNA, 16 nt, Human
ucagcaugucuauuca

SEQ ID NO: 2376433 - RNA, 20 nt, Human
ucagccucccgaguagcugg

SEQ ID NO: 2376434 - RNA, 18 nt, Human
ucagccucccgaguagcu

SEQ ID NO: 2376435 - RNA, 21 nt, Human
ucagccucccgaauagcuggg

SEQ ID NO: 2376436 - RNA, 22 nt, Human
ucagccucccgaauagcuggga

SEQ ID NO: 2376437 - RNA, 14 nt, Human
ucagccucccaaag

SEQ ID NO: 2376438 - RNA, 23 nt, Human
ucagcauucucacuccuaccugg

SEQ ID NO: 2376439 - RNA, 19 nt, Human
ucagccucccaaagugcug

SEQ ID NO: 2376440 - RNA, 21 nt, Human
ucagccucccaaagugcuggg

SEQ ID NO: 2376441 - RNA, 11 nt, Human
gggagccuccu

SEQ ID NO: 2376442 - RNA, 12 nt, Human
gggagccuccug

SEQ ID NO: 2376443 - RNA, 13 nt, Human
gggagccuccugc

SEQ ID NO: 2376444 - RNA, 14 nt, Human
gggagccuccugcc

SEQ ID NO: 2376445 - RNA, 17 nt, Human
gggagccuccugcccag

SEQ ID NO: 2376446 - RNA, 21 nt, Human
gggagccugaucaccugcccu

SEQ ID NO: 2376447 - RNA, 21 nt, Human
gggagccuuugguucuggcca

SEQ ID NO: 2376448 - RNA, 21 nt, Human
gggagccuccugcccaguccc

SEQ ID NO: 2376449 - RNA, 12 nt, Human
gggagcccccgc

SEQ ID NO: 2376450 - RNA, 22 nt, Human
gggagcccccgccccgccccac

SEQ ID NO: 2376451 - RNA, 16 nt, Human
gggagcccccgccccg

SEQ ID NO: 2376452 - RNA, 19 nt, Human
gggagccccuucugcucag

SEQ ID NO: 2376453 - RNA, 23 nt, Human
gggagcccucaggcaccugcacu

SEQ ID NO: 2376454 - RNA, 16 nt, Human
gggagccgcuggcaga

SEQ ID NO: 2376455 - RNA, 19 nt, Human
gggagcuccacucugcuuc

SEQ ID NO: 2376456 - RNA, 12 nt, Human
gggagcucugca

SEQ ID NO: 2376457 - RNA, 23 nt, Human
gggagcuccacucugcuucucug

SEQ ID NO: 2376458 - RNA, 18 nt, Human
gggagcuccucuccugga

SEQ ID NO: 2376459 - RNA, 17 nt, Human
gggagcgugggaggcgg

SEQ ID NO: 2376460 - RNA, 22 nt, Human
gggagccuuugguucuggccag

SEQ ID NO: 2376461 - RNA, 12 nt, Human
gggagcugaggc

SEQ ID NO: 2376462 - RNA, 22 nt, Human
gggagcuccucuccuggaggau

SEQ ID NO: 2376463 - RNA, 20 nt, Human
gggagcuccucuccuggagg

SEQ ID NO: 2376464 - RNA, 21 nt, Human
gggagcuccucuccuggagga

SEQ ID NO: 2376465 - RNA, 13 nt, Human
gggagcugccugu

SEQ ID NO: 2376466 - RNA, 21 nt, Human
gggagcugccuguucagcucc

SEQ ID NO: 2376467 - RNA, 22 nt, Human
gggagcugccuguucagcucca

SEQ ID NO: 2376468 - RNA, 19 nt, Human
gggaggaaucgaggaacca

SEQ ID NO: 2376469 - RNA, 23 nt, Human
gggaggaagcagguugaggggcu

SEQ ID NO: 2376470 - RNA, 12 nt, Human
gggaggaagcag

SEQ ID NO: 2376471 - RNA, 13 nt, Human
gggaggaagcaga

SEQ ID NO: 2376472 - RNA, 14 nt, Human
gggaggaagcagaa

SEQ ID NO: 2376473 - RNA, 15 nt, Human
gggaggaagcagaau

SEQ ID NO: 2376474 - RNA, 16 nt, Human
gggaggaagcagaaua

SEQ ID NO: 2376475 - RNA, 18 nt, Human
gggaggaagcagaauaaa

SEQ ID NO: 2376476 - RNA, 20 nt, Human
gggaggaagcagaauaaagc

SEQ ID NO: 2376477 - RNA, 21 nt, Human
gggaggaagcagaauaaagca

SEQ ID NO: 2376478 - RNA, 24 nt, Human
gggaggaaauuugaauggguccau

SEQ ID NO: 2376479 - RNA, 23 nt, Human
gggaggaagaagcuuaggcaggg

SEQ ID NO: 2376480 - RNA, 16 nt, Human
gggaggaaaagaaaag

SEQ ID NO: 2376481 - RNA, 19 nt, Human
gggagcugguuagaaaugc

SEQ ID NO: 2376482 - RNA, 15 nt, Human
gggagcugcugcccu

SEQ ID NO: 2376483 - RNA, 23 nt, Human
gggaggaucacuggagcccagga

SEQ ID NO: 2376484 - RNA, 18 nt, Human
gggaggagggagagggag

SEQ ID NO: 2376485 - RNA, 18 nt, Human
gggaggcaagaggggugg

SEQ ID NO: 2376486 - RNA, 22 nt, Human
gggaggaucacuggagcccagg

SEQ ID NO: 2376487 - RNA, 19 nt, Human
gggaggaucacuggagccc

SEQ ID NO: 2376488 - RNA, 23 nt, Human
gggaggauugcuugagcucagga

SEQ ID NO: 2376489 - RNA, 20 nt, Human
gggagguguuuaaagagagg

SEQ ID NO: 2376490 - RNA, 22 nt, Human
gggagguguuuaaagagagguu

SEQ ID NO: 2376491 - RNA, 20 nt, Human
gggaggugggauccuccagg

SEQ ID NO: 2376492 - RNA, 23 nt, Human
gggagucugaagcagaugcaaag

SEQ ID NO: 2376493 - RNA, 17 nt, Human
gggagucugaagcagau

SEQ ID NO: 2376494 - RNA, 15 nt, Human
gggagucccgucagg

SEQ ID NO: 2376495 - RNA, 17 nt, Human
gggaguccccuuuucuu

SEQ ID NO: 2376496 - RNA, 21 nt, Human
gggagugaguugauagcacag

SEQ ID NO: 2376497 - RNA, 21 nt, Human
gggagucaucucaaccauccc

SEQ ID NO: 2376498 - RNA, 21 nt, Human
gggaguaugcaaaaguucuga

SEQ ID NO: 2376499 - RNA, 16 nt, Human
gggaguccccuccccg

SEQ ID NO: 2376500 - RNA, 16 nt, Human
gggaguaugcaaaagu

SEQ ID NO: 2376501 - RNA, 18 nt, Human
gggagguugaucagaucu

SEQ ID NO: 2376502 - RNA, 17 nt, Human
gggagugacagaggcag

SEQ ID NO: 2376503 - RNA, 17 nt, Human
gggaggaucacuggagc

SEQ ID NO: 2376504 - RNA, 20 nt, Human
gggaggagguggcagcccug

SEQ ID NO: 2376505 - RNA, 23 nt, Human
gggaggaucucuugagccuggga

SEQ ID NO: 2376506 - RNA, 21 nt, Human
gggaggauugcuugagcucag

SEQ ID NO: 2376507 - RNA, 22 nt, Human
gggaggauguucugggacacag

SEQ ID NO: 2376508 - RNA, 23 nt, Human
gggaggaagcagaauaaagcaau

SEQ ID NO: 2376509 - RNA, 21 nt, Human
gggaggaccagggcagggcca

SEQ ID NO: 2376510 - RNA, 17 nt, Human
gggaggaggccaccucu

SEQ ID NO: 2376511 - RNA, 14 nt, Human
gggaggagaaugag

SEQ ID NO: 2376512 - RNA, 21 nt, Human
gggaggagaggggaagggcca

SEQ ID NO: 2376513 - RNA, 13 nt, Human
gggaggagggaga

SEQ ID NO: 2376514 - RNA, 14 nt, Human
gggaggagggagag

SEQ ID NO: 2376515 - RNA, 17 nt, Human
gggaggagggagaggga

SEQ ID NO: 2376516 - RNA, 20 nt, Human
gggaggacgcucucuggccu

SEQ ID NO: 2376517 - RNA, 17 nt, Human
gggaggacgcucucugg

SEQ ID NO: 2376518 - RNA, 20 nt, Human
ggcuuuuacugaagccuuuc

SEQ ID NO: 2376519 - RNA, 19 nt, Human
ggcuuuuauuaaugcacuu

SEQ ID NO: 2376520 - RNA, 18 nt, Human
ggcuuuuacugaagccuu

SEQ ID NO: 2376521 - RNA, 23 nt, Human
gggaagugaagacuggaagcuaa

SEQ ID NO: 2376522 - RNA, 20 nt, Human
ggcuuuuauuaaugcacuuu

SEQ ID NO: 2376523 - RNA, 14 nt, Human
ggcuuugccagcuu

SEQ ID NO: 2376524 - RNA, 13 nt, Human
ggcuuuggcuucu

SEQ ID NO: 2376525 - RNA, 12 nt, Human
ggcuuuggauuu

SEQ ID NO: 2376526 - RNA, 11 nt, Human
gggaauguuug

SEQ ID NO: 2376527 - RNA, 19 nt, Human
gggaauccccgaaggugcu

SEQ ID NO: 2376528 - RNA, 22 nt, Human
gggaauccccgaaggugcugga

SEQ ID NO: 2376529 - RNA, 23 nt, Human
gggaauagucuagauggcuccuc

SEQ ID NO: 2376530 - RNA, 12 nt, Human
gggaauauuuua

SEQ ID NO: 2376531 - RNA, 18 nt, Human
gggaauauuugaaucuug

SEQ ID NO: 2376532 - RNA, 14 nt, Human
gggaaucagaacuc

SEQ ID NO: 2376533 - RNA, 12 nt, Human
gggaaucaagau

SEQ ID NO: 2376534 - RNA, 21 nt, Human
gggaagugacaaggccccaga

SEQ ID NO: 2376535 - RNA, 23 nt, Human
gggaagugacuuagcagaugcug

SEQ ID NO: 2376536 - RNA, 17 nt, Human
gggaagugaggaagcca

SEQ ID NO: 2376537 - RNA, 14 nt, Human
gggaauaaauaugc

SEQ ID NO: 2376538 - RNA, 13 nt, Human
gggaauauuugaa

SEQ ID NO: 2376539 - RNA, 14 nt, Human
gggaauauuugaau

SEQ ID NO: 2376540 - RNA, 19 nt, Human
gggaauaaauaugccucuc

SEQ ID NO: 2376541 - RNA, 19 nt, Human
gggaauacuagggagaagg

SEQ ID NO: 2376542 - RNA, 23 nt, Human
gggaauguuugggcagaagggag

SEQ ID NO: 2376543 - RNA, 22 nt, Human
gggaauguuugggcagaaggga

SEQ ID NO: 2376544 - RNA, 22 nt, Human
gggacaaguggacucagggcag

SEQ ID NO: 2376545 - RNA, 14 nt, Human
gggaauugaggaca

SEQ ID NO: 2376546 - RNA, 19 nt, Human
gggaauguuugccucugcc

SEQ ID NO: 2376547 - RNA, 21 nt, Human
gggaauguuugccucugccuc

SEQ ID NO: 2376548 - RNA, 14 nt, Human
gggacacccuguga

SEQ ID NO: 2376549 - RNA, 20 nt, Human
gggacaccaagccuuggcuc

SEQ ID NO: 2376550 - RNA, 19 nt, Human
gggacaaguggacucaggg

SEQ ID NO: 2376551 - RNA, 23 nt, Human
gggacacauucaacccuggagag

SEQ ID NO: 2376552 - RNA, 14 nt, Human
gggacaccagccag

SEQ ID NO: 2376553 - RNA, 21 nt, Human
gggacccaauguaggagcugc

SEQ ID NO: 2376554 - RNA, 18 nt, Human
gggacccaggcaccugca

SEQ ID NO: 2376555 - RNA, 18 nt, Human
gggacaccagccaggcuc

SEQ ID NO: 2376556 - RNA, 19 nt, Human
gggacaccagccaggcucu

SEQ ID NO: 2376557 - RNA, 20 nt, Human
gggacaccagccaggcucug

SEQ ID NO: 2376558 - RNA, 22 nt, Human
gggacaccagccaggcucugug

SEQ ID NO: 2376559 - RNA, 21 nt, Human
gggacccccgcccccugcccu

SEQ ID NO: 2376560 - RNA, 24 nt, Human
gggacccccgcccccugcccuccc

SEQ ID NO: 2376561 - RNA, 16 nt, Human
gggaccccgagccugg

SEQ ID NO: 2376562 - RNA, 17 nt, Human
gggaccugccaggcagg

SEQ ID NO: 2376563 - RNA, 18 nt, Human
gggaccugguacccuccu

SEQ ID NO: 2376564 - RNA, 18 nt, Human
gggaccugccaggcaggg

SEQ ID NO: 2376565 - RNA, 19 nt, Human
gggaccugccaggcagggg

SEQ ID NO: 2376566 - RNA, 21 nt, Human
gggaccugguacccuccuggc

SEQ ID NO: 2376567 - RNA, 15 nt, Human
gggaccuuuaguggu

SEQ ID NO: 2376568 - RNA, 14 nt, Human
gggacccccgcccc

SEQ ID NO: 2376569 - RNA, 17 nt, Human
gggacccccgcccccug

SEQ ID NO: 2376570 - RNA, 18 nt, Human
gggacccccgcccccugc

SEQ ID NO: 2376571 - RNA, 19 nt, Human
gggacccccgcccccugcc

SEQ ID NO: 2376572 - RNA, 13 nt, Human
gggacccccgccc

SEQ ID NO: 2376573 - RNA, 22 nt, Human
gggacgccugggggugccagga

SEQ ID NO: 2376574 - RNA, 21 nt, Human
gggacgccugggggugccagg

SEQ ID NO: 2376575 - RNA, 21 nt, Human
gggacggggggccccagucag

SEQ ID NO: 2376576 - RNA, 23 nt, Human
gggacguccugccaccuggggca

SEQ ID NO: 2376577 - RNA, 16 nt, Human
gggacgucccugccca

SEQ ID NO: 2376578 - RNA, 17 nt, Human
gggacggugcccaagcc

SEQ ID NO: 2376579 - RNA, 17 nt, Human
gggacucaaugcacuga

SEQ ID NO: 2376580 - RNA, 19 nt, Human
gggacucaaugcacugaca

SEQ ID NO: 2376581 - RNA, 16 nt, Human
gggagccccagggucu

SEQ ID NO: 2376582 - RNA, 14 nt, Human
gggagccccagggu

SEQ ID NO: 2376583 - RNA, 21 nt, Human
gggagccccagggucuucccu

SEQ ID NO: 2376584 - RNA, 13 nt, Human
gggagccccaggg

SEQ ID NO: 2376585 - RNA, 12 nt, Human
gggagccccagg

SEQ ID NO: 2376586 - RNA, 21 nt, Human
gggagcccacuguccugggcc

SEQ ID NO: 2376587 - RNA, 20 nt, Human
gggagcccacuguccugggc

SEQ ID NO: 2376588 - RNA, 23 nt, Human
gggacugccagucccccugcccc

SEQ ID NO: 2376589 - RNA, 10 nt, Human
gggagcccac

SEQ ID NO: 2376590 - RNA, 19 nt, Human
gggagcccacuguccuggg

SEQ ID NO: 2376591 - RNA, 17 nt, Human
gggacugagccaguccc

SEQ ID NO: 2376592 - RNA, 19 nt, Human
gggacugagccagucccag

SEQ ID NO: 2376593 - RNA, 14 nt, Human
gggacugagccagu

SEQ ID NO: 2376594 - RNA, 13 nt, Human
gggacugagccag

SEQ ID NO: 2376595 - RNA, 23 nt, Human
gggacucaaugcacugacauugu

SEQ ID NO: 2376596 - RNA, 15 nt, Human
gggacugagaaauuu

SEQ ID NO: 2376597 - RNA, 21 nt, Human
gggacugaggggaggggagca

SEQ ID NO: 2376598 - RNA, 18 nt, Human
gggacguggcucagccag

SEQ ID NO: 2376599 - RNA, 14 nt, Human
gggacguggcucag

SEQ ID NO: 2376600 - RNA, 20 nt, Human
gggacucaauuucuccccag

SEQ ID NO: 2376601 - RNA, 14 nt, Human
ggcuugccugcagg

SEQ ID NO: 2376602 - RNA, 15 nt, Human
ggcuugccugcaggc

SEQ ID NO: 2376603 - RNA, 11 nt, Human
ggcuugcugcc

SEQ ID NO: 2376604 - RNA, 13 nt, Human
ggcuugcugagag

SEQ ID NO: 2376605 - RNA, 12 nt, Human
ggcuuggccugc

SEQ ID NO: 2376606 - RNA, 13 nt, Human
ggcuuggccugcu

SEQ ID NO: 2376607 - RNA, 14 nt, Human
ggcuuggccugcug

SEQ ID NO: 2376608 - RNA, 16 nt, Human
ggcuuggccugcugug

SEQ ID NO: 2376609 - RNA, 14 nt, Human
ggcuugcaugccaa

SEQ ID NO: 2376610 - RNA, 15 nt, Human
ggcuugcugagaggg

SEQ ID NO: 2376611 - RNA, 14 nt, Human
ggcuuucuggagag

SEQ ID NO: 2376612 - RNA, 13 nt, Human
ggcuuucuggaga

SEQ ID NO: 2376613 - RNA, 18 nt, Human
ggcuuggggaccagagcu

SEQ ID NO: 2376614 - RNA, 23 nt, Human
ggcuugggcuuccauuugugugu

SEQ ID NO: 2376615 - RNA, 15 nt, Human
ggcuuggccugcugu

SEQ ID NO: 2376616 - RNA, 14 nt, Human
ggcuugggaccgcc

SEQ ID NO: 2376617 - RNA, 17 nt, Human
ggcuuggggaccagagc

SEQ ID NO: 2376618 - RNA, 18 nt, Human
ggcuuagcuuugcucugc

SEQ ID NO: 2376619 - RNA, 12 nt, Human
ggcuucacagau

SEQ ID NO: 2376620 - RNA, 21 nt, Human
ggcuucacggaagagccuugc

SEQ ID NO: 2376621 - RNA, 15 nt, Human
ggcuucacuguauaa

SEQ ID NO: 2376622 - RNA, 18 nt, Human
ggcuucacuguauaaaua

SEQ ID NO: 2376623 - RNA, 19 nt, Human
ggcuucacuguauaaauag

SEQ ID NO: 2376624 - RNA, 17 nt, Human
ggcuucagcauauuuau

SEQ ID NO: 2376625 - RNA, 21 nt, Human
ggcuucacuguauaaauagga

SEQ ID NO: 2376626 - RNA, 22 nt, Human
ggcuucacuguauaaauaggag

SEQ ID NO: 2376627 - RNA, 13 nt, Human
ggcuugccugcag

SEQ ID NO: 2376628 - RNA, 16 nt, Human
ggcuugccacagcucu

SEQ ID NO: 2376629 - RNA, 20 nt, Human
ggcuucacggaagagccuug

SEQ ID NO: 2376630 - RNA, 14 nt, Human
ggcuguuugaggau

SEQ ID NO: 2376631 - RNA, 21 nt, Human
ggcuuagacuucgacucagga

SEQ ID NO: 2376632 - RNA, 15 nt, Human
ggcuuagucacugag

SEQ ID NO: 2376633 - RNA, 14 nt, Human
ggcuuagucacuga

SEQ ID NO: 2376634 - RNA, 22 nt, Human
ggcugugggccucaaggacuug

SEQ ID NO: 2376635 - RNA, 14 nt, Human
ggcugugucuaaac

SEQ ID NO: 2376636 - RNA, 20 nt, Human
ggcuguguucuggugaggcc

SEQ ID NO: 2376637 - RNA, 15 nt, Human
ggcugugucuaaacu

SEQ ID NO: 2376638 - RNA, 16 nt, Human
ggcugugucuaaacug

SEQ ID NO: 2376639 - RNA, 14 nt, Human
ggcuguucuggaag

SEQ ID NO: 2376640 - RNA, 13 nt, Human
ggcuguugcaugg

SEQ ID NO: 2376641 - RNA, 12 nt, Human
ggcuguuggcac

SEQ ID NO: 2376642 - RNA, 14 nt, Human
ggcuguuggcuggg

SEQ ID NO: 2376643 - RNA, 15 nt, Human
ggcuguuggcugggg

SEQ ID NO: 2376644 - RNA, 16 nt, Human
ggcuguuggcuggggg

SEQ ID NO: 2376645 - RNA, 20 nt, Human
ggcuguuggcugggggccuc

SEQ ID NO: 2376646 - RNA, 17 nt, Human
ggcuguuggcacucaca

SEQ ID NO: 2376647 - RNA, 23 nt, Human
ggcuguuggcacucacagaccug

SEQ ID NO: 2376648 - RNA, 15 nt, Human
ggcuguuggcaguga

SEQ ID NO: 2376649 - RNA, 17 nt, Human
ggcuguuggcagugagu

SEQ ID NO: 2376650 - RNA, 17 nt, Human
ggcugggggcaggaggg

SEQ ID NO: 2376651 - RNA, 16 nt, Human
ggcugggggcaggagg

SEQ ID NO: 2376652 - RNA, 18 nt, Human
ggcugggggcaggagggc

SEQ ID NO: 2376653 - RNA, 23 nt, Human
ggcuguccaguucccagaaggca

SEQ ID NO: 2376654 - RNA, 13 nt, Human
ggcuguccuguac

SEQ ID NO: 2376655 - RNA, 22 nt, Human
ggcuguccuguacauuguggga

SEQ ID NO: 2376656 - RNA, 13 nt, Human
ggcugugccucug

SEQ ID NO: 2376657 - RNA, 16 nt, Human
ggcugugccucugccu

SEQ ID NO: 2376658 - RNA, 23 nt, Human
ggcugucuucucaggcucugccc

SEQ ID NO: 2376659 - RNA, 13 nt, Human
ggcugugaggccc

SEQ ID NO: 2376660 - RNA, 22 nt, Human
ggcugucuucucaggcucugcc

SEQ ID NO: 2376661 - RNA, 19 nt, Human
ggcugucuucucaggcucu

SEQ ID NO: 2376662 - RNA, 18 nt, Human
ggcugucuucucaggcuc

SEQ ID NO: 2376663 - RNA, 19 nt, Human
ggcugugcgcugacaacca

SEQ ID NO: 2376664 - RNA, 20 nt, Human
ggcugugcucccugguucug

SEQ ID NO: 2376665 - RNA, 11 nt, Human
ggcugugagug

SEQ ID NO: 2376666 - RNA, 18 nt, Human
ggcugugcagccuguccu

SEQ ID NO: 2376667 - RNA, 10 nt, Human
ggcugugcua

SEQ ID NO: 2376668 - RNA, 24 nt, Human
ggcugugguagggggugucucagg

SEQ ID NO: 2376669 - RNA, 15 nt, Human
ggcuguggucacagc

SEQ ID NO: 2376670 - RNA, 21 nt, Human
ggcugugggccucaaggacuu

SEQ ID NO: 2376671 - RNA, 14 nt, Human
ggcuggagugagga

SEQ ID NO: 2376672 - RNA, 16 nt, Human
ggcuggagugaggaaa

SEQ ID NO: 2376673 - RNA, 19 nt, Human
ggcuggaggcagggccuug

SEQ ID NO: 2376674 - RNA, 17 nt, Human
ggcuggaggcagggccu

SEQ ID NO: 2376675 - RNA, 23 nt, Human
ggcuggaggcagggccuugccca

SEQ ID NO: 2376676 - RNA, 15 nt, Human
ggcuggaggcagggc

SEQ ID NO: 2376677 - RNA, 13 nt, Human
ggcuggaggcagg

SEQ ID NO: 2376678 - RNA, 23 nt, Human
ggcuggagcccagggagcggaaa

SEQ ID NO: 2376679 - RNA, 19 nt, Human
ggcuggagacgggugggcg

SEQ ID NO: 2376680 - RNA, 19 nt, Human
ggcuggagaccaugcagag

SEQ ID NO: 2376681 - RNA, 18 nt, Human
ggcuggacuuggagguag

SEQ ID NO: 2376682 - RNA, 13 nt, Human
ggcuggagcuggc

SEQ ID NO: 2376683 - RNA, 13 nt, Human
ggcuggacugagg

SEQ ID NO: 2376684 - RNA, 14 nt, Human
ggcuggacugaggc

SEQ ID NO: 2376685 - RNA, 16 nt, Human
ggcuggacugaggccu

SEQ ID NO: 2376686 - RNA, 13 nt, Human
ggcuggacuugga

SEQ ID NO: 2376687 - RNA, 17 nt, Human
ggcuggacugaggccug

SEQ ID NO: 2376688 - RNA, 18 nt, Human
ggcuggacugaggccuga

SEQ ID NO: 2376689 - RNA, 21 nt, Human
ggcugcuucaaggauccugag

SEQ ID NO: 2376690 - RNA, 15 nt, Human
ggcugagggagccug

SEQ ID NO: 2376691 - RNA, 20 nt, Human
ggcugcuucaaggauccuga

SEQ ID NO: 2376692 - RNA, 17 nt, Human
ggcugaggcagaagaau

SEQ ID NO: 2376693 - RNA, 14 nt, Human
ggcugaggcaggag

SEQ ID NO: 2376694 - RNA, 14 nt, Human
ggcugaggccugga

SEQ ID NO: 2376695 - RNA, 18 nt, Human
ggcugaggcuggcacagg

SEQ ID NO: 2376696 - RNA, 17 nt, Human
ggcugaggcuggcacag

SEQ ID NO: 2376697 - RNA, 14 nt, Human
ggcugaggcuggca

SEQ ID NO: 2376698 - RNA, 16 nt, Human
ggcugaggccuggacu

SEQ ID NO: 2376699 - RNA, 15 nt, Human
ggcugcuucaaggau

SEQ ID NO: 2376700 - RNA, 19 nt, Human
ggcugcuucaaggauccug

SEQ ID NO: 2376701 - RNA, 14 nt, Human
ggcugaggcagaag

SEQ ID NO: 2376702 - RNA, 13 nt, Human
ggcugaggcagaa

SEQ ID NO: 2376703 - RNA, 21 nt, Human
ggcugaggauuucaagccugc

SEQ ID NO: 2376704 - RNA, 20 nt, Human
ggcugaggaggccuccaucu

SEQ ID NO: 2376705 - RNA, 15 nt, Human
ggcugaggaggccuc

SEQ ID NO: 2376706 - RNA, 16 nt, Human
ggcugaggaggccucc

SEQ ID NO: 2376707 - RNA, 19 nt, Human
ggcugaggaggccuccauc

SEQ ID NO: 2376708 - RNA, 22 nt, Human
ggcugaggaaaggccagcuggc

SEQ ID NO: 2376709 - RNA, 21 nt, Human
ggcugaggaagcacagcagca

SEQ ID NO: 2376710 - RNA, 17 nt, Human
ggcugaggaaaggccag

SEQ ID NO: 2376711 - RNA, 13 nt, Human
ggcucugcccugc

SEQ ID NO: 2376712 - RNA, 23 nt, Human
ggcucugccccagcucuggcuuc

SEQ ID NO: 2376713 - RNA, 23 nt, Human
ggcucugggauagcugacccagc

SEQ ID NO: 2376714 - RNA, 23 nt, Human
ggcucuggagcccacuguacuug

SEQ ID NO: 2376715 - RNA, 19 nt, Human
ggcuggaguggaguggcgu

SEQ ID NO: 2376716 - RNA, 20 nt, Human
ggcuggagugcaguggugug

SEQ ID NO: 2376717 - RNA, 19 nt, Human
ggcuggagugcaguggcgu

SEQ ID NO: 2376718 - RNA, 20 nt, Human
ggcuggaguucaguggugug

SEQ ID NO: 2376719 - RNA, 15 nt, Human
ggcugggagcucugc

SEQ ID NO: 2376720 - RNA, 13 nt, Human
ggcugggaguggu

SEQ ID NO: 2376721 - RNA, 23 nt, Human
ggcugggaguaguugucuuuccu

SEQ ID NO: 2376722 - RNA, 14 nt, Human
ggcugggaguggug

SEQ ID NO: 2376723 - RNA, 15 nt, Human
ggcugggaguggugg

SEQ ID NO: 2376724 - RNA, 16 nt, Human
ggcugggaugggccug

SEQ ID NO: 2376725 - RNA, 17 nt, Human
ggcugggcaaggaggcc

SEQ ID NO: 2376726 - RNA, 20 nt, Human
ggcugggcucccuucccacc

SEQ ID NO: 2376727 - RNA, 21 nt, Human
ggcugggcucccuucccaccu

SEQ ID NO: 2376728 - RNA, 11 nt, Human
ggcugggcuuc

SEQ ID NO: 2376729 - RNA, 21 nt, Human
ggcugggcuucaguggcagcu

SEQ ID NO: 2376730 - RNA, 22 nt, Human
ggcugggcuucaguggcagcug

SEQ ID NO: 2376731 - RNA, 18 nt, Human
ggcugggcuucaguggca

SEQ ID NO: 2376732 - RNA, 17 nt, Human
ggcuggggaaguccucu

SEQ ID NO: 2376733 - RNA, 16 nt, Human
ggcugggggaagaagc

SEQ ID NO: 2376734 - RNA, 20 nt, Human
ggcuggggccuaucagugug

SEQ ID NO: 2376735 - RNA, 18 nt, Human
ggcuggggaaguccucug

SEQ ID NO: 2376736 - RNA, 21 nt, Human
ggcuggggaaguccucugggu

SEQ ID NO: 2376737 - RNA, 14 nt, Human
ggcugggggccuca

SEQ ID NO: 2376738 - RNA, 14 nt, Human
ggcugggggcagga

SEQ ID NO: 2376739 - RNA, 16 nt, Human
ggcuggggcugaccuu

SEQ ID NO: 2376740 - RNA, 21 nt, Human
ggcuggggccuaucagugugc

SEQ ID NO: 2376741 - RNA, 22 nt, Human
ggcuggggccuaucagugugcc

SEQ ID NO: 2376742 - RNA, 19 nt, Human
ggcgccgcaaaccacacug

SEQ ID NO: 2376743 - RNA, 11 nt, Human
ggcgcugcccc

SEQ ID NO: 2376744 - RNA, 16 nt, Human
ggcgggagcaucucuu

SEQ ID NO: 2376745 - RNA, 16 nt, Human
ggcgggacccaggcac

SEQ ID NO: 2376746 - RNA, 17 nt, Human
ggcgcugccccuggcag

SEQ ID NO: 2376747 - RNA, 13 nt, Human
ggcgcccaccucc

SEQ ID NO: 2376748 - RNA, 14 nt, Human
ggcgcccaccuccc

SEQ ID NO: 2376749 - RNA, 15 nt, Human
ggcgcccaccucccc

SEQ ID NO: 2376750 - RNA, 24 nt, Human
ggcgcccaccuccccacgcccucc

SEQ ID NO: 2376751 - RNA, 13 nt, Human
ggcgccccugcca

SEQ ID NO: 2376752 - RNA, 15 nt, Human
ggcgccccugccacc

SEQ ID NO: 2376753 - RNA, 22 nt, Human
ggcgccccugccaccucccuga

SEQ ID NO: 2376754 - RNA, 11 nt, Human
ggcgcccucug

SEQ ID NO: 2376755 - RNA, 13 nt, Human
ggcgcccucuguc

SEQ ID NO: 2376756 - RNA, 14 nt, Human
ggcgcccucugucc

SEQ ID NO: 2376757 - RNA, 19 nt, Human
ggcgcgguggcucacgccu

SEQ ID NO: 2376758 - RNA, 16 nt, Human
ggcgcccuggaagccg

SEQ ID NO: 2376759 - RNA, 16 nt, Human
ggcgcccucuguccug

SEQ ID NO: 2376760 - RNA, 17 nt, Human
ggcgcccucuguccuga

SEQ ID NO: 2376761 - RNA, 12 nt, Human
ggcgcccuggaa

SEQ ID NO: 2376762 - RNA, 14 nt, Human
ggcgcccuggaagc

SEQ ID NO: 2376763 - RNA, 15 nt, Human
ggcgcgguggcucac

SEQ ID NO: 2376764 - RNA, 15 nt, Human
ggcuagucagagaga

SEQ ID NO: 2376765 - RNA, 14 nt, Human
ggcuagucagagag

SEQ ID NO: 2376766 - RNA, 20 nt, Human
ggcuagugacuuguguccca

SEQ ID NO: 2376767 - RNA, 18 nt, Human
ggcuagucagagagagug

SEQ ID NO: 2376768 - RNA, 23 nt, Human
ggcuagugacuugugucccauga

SEQ ID NO: 2376769 - RNA, 23 nt, Human
ggcuauaggugcuacaaaaacac

SEQ ID NO: 2376770 - RNA, 13 nt, Human
ggcuagucagaga

SEQ ID NO: 2376771 - RNA, 23 nt, Human
ggcuagucaagcuccuccucccu

SEQ ID NO: 2376772 - RNA, 22 nt, Human
ggcuagucaagcuccuccuccc

SEQ ID NO: 2376773 - RNA, 19 nt, Human
ggcuagucaagcuccuccu

SEQ ID NO: 2376774 - RNA, 17 nt, Human
ggcuagucaagcuccuc

SEQ ID NO: 2376775 - RNA, 16 nt, Human
ggcuagucaagcuccu

SEQ ID NO: 2376776 - RNA, 16 nt, Human
ggcgggugggggugga

SEQ ID NO: 2376777 - RNA, 20 nt, Human
ggcuaguaucaaaagaaaga

SEQ ID NO: 2376778 - RNA, 14 nt, Human
ggcgggcggucagg

SEQ ID NO: 2376779 - RNA, 12 nt, Human
ggcggguggggg

SEQ ID NO: 2376780 - RNA, 13 nt, Human
ggcuagguacaca

SEQ ID NO: 2376781 - RNA, 17 nt, Human
ggcgggccaaggacugc

SEQ ID NO: 2376782 - RNA, 12 nt, Human
ggcgggccagcc

SEQ ID NO: 2376783 - RNA, 13 nt, Human
ggcgggccagcca

SEQ ID NO: 2376784 - RNA, 14 nt, Human
ggcgggccagccag

SEQ ID NO: 2376785 - RNA, 15 nt, Human
ggcgggccagccagg

SEQ ID NO: 2376786 - RNA, 17 nt, Human
ggcgggccagccaggcg

SEQ ID NO: 2376787 - RNA, 14 nt, Human
ggcgggccccucau

SEQ ID NO: 2376788 - RNA, 22 nt, Human
ggcgggcaccuauagucccagc

SEQ ID NO: 2376789 - RNA, 15 nt, Human
ggcgggcagcacagc

SEQ ID NO: 2376790 - RNA, 16 nt, Human
ggcgggaugggccacc

SEQ ID NO: 2376791 - RNA, 19 nt, Human
ggcgggacccaggcaccug

SEQ ID NO: 2376792 - RNA, 21 nt, Human
ggcgggaguggaguggaagaa

SEQ ID NO: 2376793 - RNA, 13 nt, Human
ggcucacgugugu

SEQ ID NO: 2376794 - RNA, 24 nt, Human
ggcucacgccuguaaucccagcag

SEQ ID NO: 2376795 - RNA, 22 nt, Human
ggcucacgccuguaaucccagc

SEQ ID NO: 2376796 - RNA, 23 nt, Human
ggcucacgccuguaaucccagca

SEQ ID NO: 2376797 - RNA, 13 nt, Human
ggcuccagagggc

SEQ ID NO: 2376798 - RNA, 17 nt, Human
ggcucacuauggugcca

SEQ ID NO: 2376799 - RNA, 18 nt, Human
ggcucacuauggugccaa

SEQ ID NO: 2376800 - RNA, 10 nt, Human
ggcuccagac

SEQ ID NO: 2376801 - RNA, 14 nt, Human
ggcuccaggagcag

SEQ ID NO: 2376802 - RNA, 16 nt, Human
ggcuccaggagcagcc

SEQ ID NO: 2376803 - RNA, 12 nt, Human
ggcuccaggcuc

SEQ ID NO: 2376804 - RNA, 13 nt, Human
ggcuccaggcucc

SEQ ID NO: 2376805 - RNA, 18 nt, Human
ggcuccaggagcagccac

SEQ ID NO: 2376806 - RNA, 17 nt, Human
ggcuccaggagcagcca

SEQ ID NO: 2376807 - RNA, 19 nt, Human
ggcucacccaagcaaggcc

SEQ ID NO: 2376808 - RNA, 17 nt, Human
ggcucacacugagaaug

SEQ ID NO: 2376809 - RNA, 18 nt, Human
ggcucacacugagaaugu

SEQ ID NO: 2376810 - RNA, 14 nt, Human
ggcuaugcauuuga

SEQ ID NO: 2376811 - RNA, 15 nt, Human
ggcucacacugagaa

SEQ ID NO: 2376812 - RNA, 14 nt, Human
ggcucacacugaga

SEQ ID NO: 2376813 - RNA, 13 nt, Human
ggcuaugcauuug

SEQ ID NO: 2376814 - RNA, 12 nt, Human
ggcuaugcauuu

SEQ ID NO: 2376815 - RNA, 23 nt, Human
ggcucacgccuaugaucccagca

SEQ ID NO: 2376816 - RNA, 21 nt, Human
ggcucacgccuaugaucccag

SEQ ID NO: 2376817 - RNA, 17 nt, Human
ggcucacgccuguaauc

SEQ ID NO: 2376818 - RNA, 18 nt, Human
ggcucacgccuguaaucc

SEQ ID NO: 2376819 - RNA, 20 nt, Human
ggcucacgccuaugauccca

SEQ ID NO: 2376820 - RNA, 22 nt, Human
ggcucacccccuucuccaucca

SEQ ID NO: 2376821 - RNA, 17 nt, Human
ggcucacccccuucucc

SEQ ID NO: 2376822 - RNA, 9 nt, Human
ggcuccaga

SEQ ID NO: 2376823 - RNA, 16 nt, Human
ggcuccacuuggucug

SEQ ID NO: 2376824 - RNA, 12 nt, Human
ggcucugcccca

SEQ ID NO: 2376825 - RNA, 16 nt, Human
ggcucugccccagagg

SEQ ID NO: 2376826 - RNA, 17 nt, Human
ggcucugccccagaggc

SEQ ID NO: 2376827 - RNA, 19 nt, Human
ggcucugccacccuaccug

SEQ ID NO: 2376828 - RNA, 12 nt, Human
ggcucugcacag

SEQ ID NO: 2376829 - RNA, 14 nt, Human
ggcucugccacccu

SEQ ID NO: 2376830 - RNA, 19 nt, Human
ggcucugcaauuccccucu

SEQ ID NO: 2376831 - RNA, 20 nt, Human
ggcucugcaauuccccucug

SEQ ID NO: 2376832 - RNA, 21 nt, Human
ggcucugccccagcucuggcu

SEQ ID NO: 2376833 - RNA, 20 nt, Human
ggcucugccccagcucuggc

SEQ ID NO: 2376834 - RNA, 14 nt, Human
ggcucugccccagc

SEQ ID NO: 2376835 - RNA, 18 nt, Human
ggcucugccccagaggcc

SEQ ID NO: 2376836 - RNA, 21 nt, Human
ggcucugccccagaggccucu

SEQ ID NO: 2376837 - RNA, 12 nt, Human
ggcucugcccuu

SEQ ID NO: 2376838 - RNA, 13 nt, Human
ggcucugaccagu

SEQ ID NO: 2376839 - RNA, 14 nt, Human
ggcucugaaagcca

SEQ ID NO: 2376840 - RNA, 18 nt, Human
ggcucucuuuccuucuug

SEQ ID NO: 2376841 - RNA, 23 nt, Human
ggcucucuuuccuucuugccuuc

SEQ ID NO: 2376842 - RNA, 17 nt, Human
ggcucucuuuccuucuu

SEQ ID NO: 2376843 - RNA, 14 nt, Human
ggcucucuccagga

SEQ ID NO: 2376844 - RNA, 14 nt, Human
ggcucugagcgccu

SEQ ID NO: 2376845 - RNA, 15 nt, Human
ggcucugagcgccuc

SEQ ID NO: 2376846 - RNA, 17 nt, Human
ggcucugaggugccugu

SEQ ID NO: 2376847 - RNA, 19 nt, Human
ggcucugaggugccugucc

SEQ ID NO: 2376848 - RNA, 20 nt, Human
ggcucugaggugccuguccc

SEQ ID NO: 2376849 - RNA, 23 nt, Human
ggcucugaggugccugucccacc

SEQ ID NO: 2376850 - RNA, 20 nt, Human
ggcucugcaaugggcacugg

SEQ ID NO: 2376851 - RNA, 17 nt, Human
ggcucuggagcccacug

SEQ ID NO: 2376852 - RNA, 19 nt, Human
ggcucuggagcccacugua

SEQ ID NO: 2376853 - RNA, 16 nt, Human
ggcucuggagcccacu

SEQ ID NO: 2376854 - RNA, 16 nt, Human
ggcucugccucccauc

SEQ ID NO: 2376855 - RNA, 14 nt, Human
ggcucugcccuugg

SEQ ID NO: 2376856 - RNA, 15 nt, Human
ggcucugcccuuggu

SEQ ID NO: 2376857 - RNA, 13 nt, Human
ggcucugccuccc

SEQ ID NO: 2376858 - RNA, 15 nt, Human
ggcucugccucccau

SEQ ID NO: 2376859 - RNA, 22 nt, Human
ggcucuccaccucagccuugga

SEQ ID NO: 2376860 - RNA, 21 nt, Human
ggcucuccaccucagccuugg

SEQ ID NO: 2376861 - RNA, 13 nt, Human
ggcucuccaguua

SEQ ID NO: 2376862 - RNA, 20 nt, Human
ggcucuccucagaagaaaga

SEQ ID NO: 2376863 - RNA, 20 nt, Human
ggcucuccaccucagccuug

SEQ ID NO: 2376864 - RNA, 19 nt, Human
ggcucuccaccucagccuu

SEQ ID NO: 2376865 - RNA, 18 nt, Human
ggcucuccaccucagccu

SEQ ID NO: 2376866 - RNA, 17 nt, Human
ggcucuccaccucagcc

SEQ ID NO: 2376867 - RNA, 22 nt, Human
ggcucucuauagcaccagggcu

SEQ ID NO: 2376868 - RNA, 12 nt, Human
ggcucucuccag

SEQ ID NO: 2376869 - RNA, 13 nt, Human
ggcucucuccagg

SEQ ID NO: 2376870 - RNA, 16 nt, Human
ggcucuccaccucagc

SEQ ID NO: 2376871 - RNA, 15 nt, Human
ggcucuccaccucag

SEQ ID NO: 2376872 - RNA, 14 nt, Human
ggcucuccaccuca

SEQ ID NO: 2376873 - RNA, 13 nt, Human
ggcucuccaccuc

SEQ ID NO: 2376874 - RNA, 12 nt, Human
ggcucuccaccu

SEQ ID NO: 2376875 - RNA, 23 nt, Human
ggcucuccaagugccagaggugg

SEQ ID NO: 2376876 - RNA, 19 nt, Human
ggcucuccaagugccagag

SEQ ID NO: 2376877 - RNA, 20 nt, Human
ggcucuccaagugccagagg

SEQ ID NO: 2376878 - RNA, 23 nt, Human
ggcucucauguuuucaacugcca

SEQ ID NO: 2376879 - RNA, 12 nt, Human
ggcucuccaagu

SEQ ID NO: 2376880 - RNA, 17 nt, Human
ggcucuccaagugccag

SEQ ID NO: 2376881 - RNA, 18 nt, Human
ggcucuccaagugccaga

SEQ ID NO: 2376882 - RNA, 17 nt, Human
ggcucucaggccagcug

SEQ ID NO: 2376883 - RNA, 18 nt, Human
ggcucucaggccagcugc

SEQ ID NO: 2376884 - RNA, 19 nt, Human
ggcucucaggccagcugcu

SEQ ID NO: 2376885 - RNA, 20 nt, Human
ggcucucaggccagcugcuu

SEQ ID NO: 2376886 - RNA, 11 nt, Human
ggcuccccucu

SEQ ID NO: 2376887 - RNA, 22 nt, Human
ggcuccccauguguccugguuc

SEQ ID NO: 2376888 - RNA, 17 nt, Human
ggcuccccauguguccu

SEQ ID NO: 2376889 - RNA, 21 nt, Human
ggcuccccauguguccugguu

SEQ ID NO: 2376890 - RNA, 12 nt, Human
ggcuccccucua

SEQ ID NO: 2376891 - RNA, 22 nt, Human
ggcucccauucacucuuccaga

SEQ ID NO: 2376892 - RNA, 15 nt, Human
ggcucucaggccagc

SEQ ID NO: 2376893 - RNA, 16 nt, Human
ggcucucaggccagcu

SEQ ID NO: 2376894 - RNA, 14 nt, Human
ggcuccaggcuccu

SEQ ID NO: 2376895 - RNA, 16 nt, Human
ggcuccagagggcacu

SEQ ID NO: 2376896 - RNA, 19 nt, Human
ggcucccaugaccauacug

SEQ ID NO: 2376897 - RNA, 18 nt, Human
ggcucccauucacucuuc

SEQ ID NO: 2376898 - RNA, 15 nt, Human
ggcucccauucacuc

SEQ ID NO: 2376899 - RNA, 14 nt, Human
ggcuccagaaaugu

SEQ ID NO: 2376900 - RNA, 22 nt, Human
ggcgcacuuuccuccuggcaga

SEQ ID NO: 2376901 - RNA, 14 nt, Human
ggcgcagccaaggc

SEQ ID NO: 2376902 - RNA, 15 nt, Human
ggcgcagccaaggcc

SEQ ID NO: 2376903 - RNA, 11 nt, Human
ggcgcaggagg

SEQ ID NO: 2376904 - RNA, 17 nt, Human
ggcgcagccaaggccga

SEQ ID NO: 2376905 - RNA, 16 nt, Human
ggcgcagugccucugg

SEQ ID NO: 2376906 - RNA, 17 nt, Human
ggcgcagugccucuggu

SEQ ID NO: 2376907 - RNA, 15 nt, Human
ggcgccaccauccug

SEQ ID NO: 2376908 - RNA, 12 nt, Human
ggcgcccaccuc

SEQ ID NO: 2376909 - RNA, 23 nt, Human
ggcgcagcauauucaggaagcuc

SEQ ID NO: 2376910 - RNA, 24 nt, Human
ggcgcagcauauucaggaagcuca

SEQ ID NO: 2376911 - RNA, 18 nt, Human
ggcgcacccuccccuccc

SEQ ID NO: 2376912 - RNA, 12 nt, Human
ggcgcacuguga

SEQ ID NO: 2376913 - RNA, 16 nt, Human
ggcgcacccuccccuc

SEQ ID NO: 2376914 - RNA, 17 nt, Human
ggcgcacccuccccucc

SEQ ID NO: 2376915 - RNA, 19 nt, Human
ggccugggucugugucucu

SEQ ID NO: 2376916 - RNA, 11 nt, Human
ggccuggguuu

SEQ ID NO: 2376917 - RNA, 21 nt, Human
ggccugguccaugauggaguc

SEQ ID NO: 2376918 - RNA, 19 nt, Human
ggccugguguucuguggga

SEQ ID NO: 2376919 - RNA, 21 nt, Human
ggccugggugcuggcugccca

SEQ ID NO: 2376920 - RNA, 14 nt, Human
ggccugggucugug

SEQ ID NO: 2376921 - RNA, 21 nt, Human
ggccuggccggcaaccccagu

SEQ ID NO: 2376922 - RNA, 14 nt, Human
ggccugggccagag

SEQ ID NO: 2376923 - RNA, 15 nt, Human
ggccugggccgcugc

SEQ ID NO: 2376924 - RNA, 11 nt, Human
ggccugggccc

SEQ ID NO: 2376925 - RNA, 18 nt, Human
ggccugggguaccaagag

SEQ ID NO: 2376926 - RNA, 23 nt, Human
ggccugggggcugggcagaggaa

SEQ ID NO: 2376927 - RNA, 15 nt, Human
ggccuggccugagcu

SEQ ID NO: 2376928 - RNA, 16 nt, Human
ggccuggccugagcug

SEQ ID NO: 2376929 - RNA, 18 nt, Human
ggccugagcgcuccugcc

SEQ ID NO: 2376930 - RNA, 23 nt, Human
ggccucugccccgucucaugagg

SEQ ID NO: 2376931 - RNA, 23 nt, Human
ggccugaaugcuuauagguggcc

SEQ ID NO: 2376932 - RNA, 16 nt, Human
ggccugacucucagca

SEQ ID NO: 2376933 - RNA, 22 nt, Human
ggccucugcacuccccugcugg

SEQ ID NO: 2376934 - RNA, 18 nt, Human
ggccucugcacuccccug

SEQ ID NO: 2376935 - RNA, 19 nt, Human
ggccucugcacuccccugc

SEQ ID NO: 2376936 - RNA, 20 nt, Human
ggccugagauuucaucugcu

SEQ ID NO: 2376937 - RNA, 22 nt, Human
ggccugagauuucaucugcucu

SEQ ID NO: 2376938 - RNA, 13 nt, Human
ggccuggccccuc

SEQ ID NO: 2376939 - RNA, 16 nt, Human
ggccugagccuggcca

SEQ ID NO: 2376940 - RNA, 15 nt, Human
ggccugagccuggcc

SEQ ID NO: 2376941 - RNA, 14 nt, Human
ggccuggccccuca

SEQ ID NO: 2376942 - RNA, 15 nt, Human
ggccuggccccucag

SEQ ID NO: 2376943 - RNA, 17 nt, Human
ggccuggccccucaggg

SEQ ID NO: 2376944 - RNA, 18 nt, Human
ggccuggccccucagggu

SEQ ID NO: 2376945 - RNA, 23 nt, Human
ggccuggccccucagggucccug

SEQ ID NO: 2376946 - RNA, 10 nt, Human
ggccuggccu

SEQ ID NO: 2376947 - RNA, 13 nt, Human
ggccuggccugag

SEQ ID NO: 2376948 - RNA, 14 nt, Human
ggccuggccugagc

SEQ ID NO: 2376949 - RNA, 14 nt, Human
ggccucgccuggcc

SEQ ID NO: 2376950 - RNA, 15 nt, Human
ggccucgccuggccu

SEQ ID NO: 2376951 - RNA, 16 nt, Human
ggccucgccuggccug

SEQ ID NO: 2376952 - RNA, 17 nt, Human
ggccucgccuggccuga

SEQ ID NO: 2376953 - RNA, 20 nt, Human
ggccucgguguggagaagcg

SEQ ID NO: 2376954 - RNA, 19 nt, Human
ggccuccucuguccagggc

SEQ ID NO: 2376955 - RNA, 17 nt, Human
ggccuccucccuuagcu

SEQ ID NO: 2376956 - RNA, 14 nt, Human
ggccuccugugugu

SEQ ID NO: 2376957 - RNA, 20 nt, Human
ggccucucauuccagaggaa

SEQ ID NO: 2376958 - RNA, 19 nt, Human
ggccucuccuuguggccug

SEQ ID NO: 2376959 - RNA, 18 nt, Human
ggccucgccuggccugag

SEQ ID NO: 2376960 - RNA, 16 nt, Human
ggccucuaaccccagg

SEQ ID NO: 2376961 - RNA, 17 nt, Human
ggccucuaaccccaggc

SEQ ID NO: 2376962 - RNA, 18 nt, Human
ggccucuaaccccaggcc

SEQ ID NO: 2376963 - RNA, 19 nt, Human
ggccucuaaccccaggccc

SEQ ID NO: 2376964 - RNA, 20 nt, Human
ggccucuaaccccaggcccc

SEQ ID NO: 2376965 - RNA, 22 nt, Human
ggccucuaaccccaggccccga

SEQ ID NO: 2376966 - RNA, 13 nt, Human
ggccucucuggcc

SEQ ID NO: 2376967 - RNA, 15 nt, Human
ggccucucuggccuc

SEQ ID NO: 2376968 - RNA, 16 nt, Human
ggccucucuggccucc

SEQ ID NO: 2376969 - RNA, 17 nt, Human
ggccucucuggccuccc

SEQ ID NO: 2376970 - RNA, 19 nt, Human
ggccucucuggccucccac

SEQ ID NO: 2376971 - RNA, 20 nt, Human
ggccucucuggccucccacc

SEQ ID NO: 2376972 - RNA, 21 nt, Human
ggccucucuggccucccaccc

SEQ ID NO: 2376973 - RNA, 23 nt, Human
ggccuagauccacacacagagga

SEQ ID NO: 2376974 - RNA, 17 nt, Human
ggccuagauccacacac

SEQ ID NO: 2376975 - RNA, 21 nt, Human
ggccucaacccucccucagcc

SEQ ID NO: 2376976 - RNA, 22 nt, Human
ggccuagcauacguacacauuu

SEQ ID NO: 2376977 - RNA, 20 nt, Human
ggccuagcauacguacacau

SEQ ID NO: 2376978 - RNA, 18 nt, Human
ggccuccucuguccaggg

SEQ ID NO: 2376979 - RNA, 15 nt, Human
ggccucaaggacuug

SEQ ID NO: 2376980 - RNA, 22 nt, Human
ggccuccucacaacaugguguc

SEQ ID NO: 2376981 - RNA, 18 nt, Human
ggccucaagaucaaugaa

SEQ ID NO: 2376982 - RNA, 23 nt, Human
ggccucaacccucccucagcccc

SEQ ID NO: 2376983 - RNA, 22 nt, Human
ggccucaacccucccucagccc

SEQ ID NO: 2376984 - RNA, 12 nt, Human
ggccucaagauc

SEQ ID NO: 2376985 - RNA, 21 nt, Human
ggccuccguccaggagccugg

SEQ ID NO: 2376986 - RNA, 14 nt, Human
ggccucaagugauu

SEQ ID NO: 2376987 - RNA, 22 nt, Human
ggccucaagugauucuccugcc

SEQ ID NO: 2376988 - RNA, 13 nt, Human
ggccggggccggg

SEQ ID NO: 2376989 - RNA, 15 nt, Human
ggccgggagccugau

SEQ ID NO: 2376990 - RNA, 22 nt, Human
ggccggcuucaugccagcuacu

SEQ ID NO: 2376991 - RNA, 18 nt, Human
ggccggcgagcccugugg

SEQ ID NO: 2376992 - RNA, 17 nt, Human
ggccggcgagcccugug

SEQ ID NO: 2376993 - RNA, 23 nt, Human
ggccgggaccccgagccuggcuc

SEQ ID NO: 2376994 - RNA, 22 nt, Human
ggccgggaccccgagccuggcu

SEQ ID NO: 2376995 - RNA, 13 nt, Human
ggccguggcugcc

SEQ ID NO: 2376996 - RNA, 16 nt, Human
ggccguggcugcccac

SEQ ID NO: 2376997 - RNA, 14 nt, Human
ggccgugggccugg

SEQ ID NO: 2376998 - RNA, 16 nt, Human
ggccuaaaaguaaaca

SEQ ID NO: 2376999 - RNA, 13 nt, Human
ggccguuggccac

SEQ ID NO: 2377000 - RNA, 17 nt, Human
ggccgugggccuggggu

SEQ ID NO: 2377001 - RNA, 19 nt, Human
ggccguugauguuggcugg

SEQ ID NO: 2377002 - RNA, 21 nt, Human
ggccguugauguuggcuggga

SEQ ID NO: 2377003 - RNA, 17 nt, Human
ggccuaaaaguaaacau

SEQ ID NO: 2377004 - RNA, 22 nt, Human
ggcccagaucuggucccuugca

SEQ ID NO: 2377005 - RNA, 15 nt, Human
ggcccagcauugcug

SEQ ID NO: 2377006 - RNA, 17 nt, Human
ggcccagcauugcuggu

SEQ ID NO: 2377007 - RNA, 15 nt, Human
ggccggcgagcccug

SEQ ID NO: 2377008 - RNA, 20 nt, Human
ggcccagcauugcugguucu

SEQ ID NO: 2377009 - RNA, 20 nt, Human
ggcccagagggccugcaagg

SEQ ID NO: 2377010 - RNA, 17 nt, Human
ggcccagagggccugca

SEQ ID NO: 2377011 - RNA, 19 nt, Human
ggcccagagggccugcaag

SEQ ID NO: 2377012 - RNA, 19 nt, Human
ggcccagagcccagcucca

SEQ ID NO: 2377013 - RNA, 18 nt, Human
ggcccagagcccagcucc

SEQ ID NO: 2377014 - RNA, 14 nt, Human
ggcccagagggccu

SEQ ID NO: 2377015 - RNA, 17 nt, Human
ggcccagagcccagcuc

SEQ ID NO: 2377016 - RNA, 16 nt, Human
ggcccagagcccagcu

SEQ ID NO: 2377017 - RNA, 15 nt, Human
ggcccagagcccagc

SEQ ID NO: 2377018 - RNA, 14 nt, Human
ggcccagagcccag

SEQ ID NO: 2377019 - RNA, 13 nt, Human
ggcccagagccca

SEQ ID NO: 2377020 - RNA, 12 nt, Human
ggcccagagccc

SEQ ID NO: 2377021 - RNA, 14 nt, Human
ggcccaccuggcca

SEQ ID NO: 2377022 - RNA, 15 nt, Human
ggcccaccuggccac

SEQ ID NO: 2377023 - RNA, 14 nt, Human
ggcccagagcagga

SEQ ID NO: 2377024 - RNA, 16 nt, Human
ggcccagagcaggaag

SEQ ID NO: 2377025 - RNA, 19 nt, Human
ggcaugagggaucacaggg

SEQ ID NO: 2377026 - RNA, 14 nt, Human
ggcaugagggauca

SEQ ID NO: 2377027 - RNA, 18 nt, Human
ggcauggggugggccucu

SEQ ID NO: 2377028 - RNA, 22 nt, Human
ggcaugccccggccaccucugc

SEQ ID NO: 2377029 - RNA, 15 nt, Human
ggcaugccccggcca

SEQ ID NO: 2377030 - RNA, 18 nt, Human
ggcaugccccggccaccu

SEQ ID NO: 2377031 - RNA, 19 nt, Human
ggcaugccccggccaccuc

SEQ ID NO: 2377032 - RNA, 20 nt, Human
ggcaugccccggccaccucu

SEQ ID NO: 2377033 - RNA, 19 nt, Human
ggcaugguacggagauguu

SEQ ID NO: 2377034 - RNA, 19 nt, Human
ggcaugguggcgcaagccu

SEQ ID NO: 2377035 - RNA, 21 nt, Human
ggcaugccccggccaccucug

SEQ ID NO: 2377036 - RNA, 19 nt, Human
ggcauggggugggccucug

SEQ ID NO: 2377037 - RNA, 21 nt, Human
ggcauggggugggccucuggu

SEQ ID NO: 2377038 - RNA, 21 nt, Human
ggcauguauuggccuggaggu

SEQ ID NO: 2377039 - RNA, 19 nt, Human
ggcauguauuggccuggag

SEQ ID NO: 2377040 - RNA, 20 nt, Human
ggcauguauuggccuggagg

SEQ ID NO: 2377041 - RNA, 15 nt, Human
ggcauguauuggccu

SEQ ID NO: 2377042 - RNA, 16 nt, Human
ggcauguauuggccug

SEQ ID NO: 2377043 - RNA, 17 nt, Human
ggcauguauuggccugg

SEQ ID NO: 2377044 - RNA, 18 nt, Human
ggcauguauuggccugga

SEQ ID NO: 2377045 - RNA, 21 nt, Human
ggcaugguggcgcaagccugu

SEQ ID NO: 2377046 - RNA, 20 nt, Human
ggcauggggugggccucugg

SEQ ID NO: 2377047 - RNA, 22 nt, Human
ggcaugguggcgcaagccugua

SEQ ID NO: 2377048 - RNA, 18 nt, Human
ggcaugugaugagaggaa

SEQ ID NO: 2377049 - RNA, 23 nt, Human
ggcaugugaugagaggaaaucac

SEQ ID NO: 2377050 - RNA, 23 nt, Human
ggcaguagcuguggugagguggg

SEQ ID NO: 2377051 - RNA, 19 nt, Human
ggcagucaccugcccagau

SEQ ID NO: 2377052 - RNA, 20 nt, Human
ggcagucauuggcugucucc

SEQ ID NO: 2377053 - RNA, 21 nt, Human
ggcaguagaaggucggaggcu

SEQ ID NO: 2377054 - RNA, 22 nt, Human
ggcagucauucagcaccagagc

SEQ ID NO: 2377055 - RNA, 19 nt, Human
ggcagucgauagagcugua

SEQ ID NO: 2377056 - RNA, 23 nt, Human
ggcagucauucagcaccagagca

SEQ ID NO: 2377057 - RNA, 14 nt, Human
ggcagucgggggcu

SEQ ID NO: 2377058 - RNA, 15 nt, Human
ggcagucgggggcug

SEQ ID NO: 2377059 - RNA, 18 nt, Human
ggcagucgggggcuggcc

SEQ ID NO: 2377060 - RNA, 19 nt, Human
ggcagucgggggcuggccu

SEQ ID NO: 2377061 - RNA, 21 nt, Human
ggcagucgggggcuggccuag

SEQ ID NO: 2377062 - RNA, 20 nt, Human
ggcaguggagucggaagggc

SEQ ID NO: 2377063 - RNA, 22 nt, Human
ggcaugacacgaauauugcuga

SEQ ID NO: 2377064 - RNA, 21 nt, Human
ggcagaguucuauaauguaaa

SEQ ID NO: 2377065 - RNA, 12 nt, Human
ggcagcugccac

SEQ ID NO: 2377066 - RNA, 11 nt, Human
ggcagcugcca

SEQ ID NO: 2377067 - RNA, 17 nt, Human
ggcagcugaccauggaa

SEQ ID NO: 2377068 - RNA, 17 nt, Human
ggcagcugccagagaag

SEQ ID NO: 2377069 - RNA, 16 nt, Human
ggcagcugccagagaa

SEQ ID NO: 2377070 - RNA, 15 nt, Human
ggcagcugccagaga

SEQ ID NO: 2377071 - RNA, 14 nt, Human
ggcagcugccagag

SEQ ID NO: 2377072 - RNA, 21 nt, Human
ggcagcugcgguccacccagg

SEQ ID NO: 2377073 - RNA, 18 nt, Human
ggcagagguuguggugag

SEQ ID NO: 2377074 - RNA, 17 nt, Human
ggcagaguugaagacag

SEQ ID NO: 2377075 - RNA, 19 nt, Human
ggcagaguugaagacagag

SEQ ID NO: 2377076 - RNA, 21 nt, Human
ggcagaguugaagacagagcu

SEQ ID NO: 2377077 - RNA, 17 nt, Human
ggcagggucaggagagg

SEQ ID NO: 2377078 - RNA, 15 nt, Human
ggcagggucaggaga

SEQ ID NO: 2377079 - RNA, 14 nt, Human
ggcaguaauaaaaa

SEQ ID NO: 2377080 - RNA, 17 nt, Human
ggcagguuggugggggc

SEQ ID NO: 2377081 - RNA, 17 nt, Human
ggcagggucucacucug

SEQ ID NO: 2377082 - RNA, 18 nt, Human
ggcagggucucacucugu

SEQ ID NO: 2377083 - RNA, 12 nt, Human
ggcaggguccua

SEQ ID NO: 2377084 - RNA, 23 nt, Human
ggcagcugcgguccacccaggag

SEQ ID NO: 2377085 - RNA, 24 nt, Human
ggcagcugcgguccacccaggagc

SEQ ID NO: 2377086 - RNA, 15 nt, Human
ggccacuuuugacua

SEQ ID NO: 2377087 - RNA, 21 nt, Human
ggccacuucuggguggggcag

SEQ ID NO: 2377088 - RNA, 17 nt, Human
ggccagacacaggcccu

SEQ ID NO: 2377089 - RNA, 16 nt, Human
ggccagacacaggccc

SEQ ID NO: 2377090 - RNA, 16 nt, Human
ggccaggacaggcccg

SEQ ID NO: 2377091 - RNA, 15 nt, Human
ggccaggacaggccc

SEQ ID NO: 2377092 - RNA, 15 nt, Human
ggccagacaugccac

SEQ ID NO: 2377093 - RNA, 18 nt, Human
ggccagacacaggcccuc

SEQ ID NO: 2377094 - RNA, 22 nt, Human
ggccaccugaggugggcccagg

SEQ ID NO: 2377095 - RNA, 23 nt, Human
ggccaccugaggugggcccagga

SEQ ID NO: 2377096 - RNA, 13 nt, Human
ggccaccugcccc

SEQ ID NO: 2377097 - RNA, 15 nt, Human
ggccacuucugggug

SEQ ID NO: 2377098 - RNA, 20 nt, Human
ggccacugugaagagaacca

SEQ ID NO: 2377099 - RNA, 16 nt, Human
ggccaccugagguggg

SEQ ID NO: 2377100 - RNA, 17 nt, Human
ggccaccugaggugggc

SEQ ID NO: 2377101 - RNA, 19 nt, Human
ggccaccugaggugggccc

SEQ ID NO: 2377102 - RNA, 20 nt, Human
ggccaccugaggugggccca

SEQ ID NO: 2377103 - RNA, 21 nt, Human
ggccaccugaggugggcccag

SEQ ID NO: 2377104 - RNA, 12 nt, Human
ggccaccucugc

SEQ ID NO: 2377105 - RNA, 23 nt, Human
ggccaccucugcggaccccagcu

SEQ ID NO: 2377106 - RNA, 14 nt, Human
ggccaccucuccaa

SEQ ID NO: 2377107 - RNA, 15 nt, Human
ggccaccucuccaag

SEQ ID NO: 2377108 - RNA, 18 nt, Human
ggccaccucuccaagggc

SEQ ID NO: 2377109 - RNA, 20 nt, Human
ggccaccucuccaagggcuu

SEQ ID NO: 2377110 - RNA, 22 nt, Human
ggccacagaggacucacuugcc

SEQ ID NO: 2377111 - RNA, 20 nt, Human
ggccacagggcgagacuccg

SEQ ID NO: 2377112 - RNA, 23 nt, Human
ggccacagggcgagacuccgucu

SEQ ID NO: 2377113 - RNA, 14 nt, Human
ggccacaguuguuu

SEQ ID NO: 2377114 - RNA, 20 nt, Human
ggccacaguagucuugauga

SEQ ID NO: 2377115 - RNA, 16 nt, Human
ggccacaguuguuuga

SEQ ID NO: 2377116 - RNA, 16 nt, Human
ggccacaucaaagagg

SEQ ID NO: 2377117 - RNA, 11 nt, Human
ggccaccucuc

SEQ ID NO: 2377118 - RNA, 13 nt, Human
ggccaccucucca

SEQ ID NO: 2377119 - RNA, 17 nt, Human
ggccaccuccccagcau

SEQ ID NO: 2377120 - RNA, 19 nt, Human
ggccacaucaaagaggcug

SEQ ID NO: 2377121 - RNA, 13 nt, Human
ggccaccucccca

SEQ ID NO: 2377122 - RNA, 16 nt, Human
ggccaccuccccagca

SEQ ID NO: 2377123 - RNA, 13 nt, Human
ggcauguggccug

SEQ ID NO: 2377124 - RNA, 15 nt, Human
ggcauguggccugug

SEQ ID NO: 2377125 - RNA, 16 nt, Human
ggcauguggccugugg

SEQ ID NO: 2377126 - RNA, 17 nt, Human
ggcauguggccuguggc

SEQ ID NO: 2377127 - RNA, 23 nt, Human
ggcauguguuuacuuuauguuac

SEQ ID NO: 2377128 - RNA, 19 nt, Human
ggcauguggccuguggccu

SEQ ID NO: 2377129 - RNA, 20 nt, Human
ggcauguggccuguggccug

SEQ ID NO: 2377130 - RNA, 20 nt, Human
ggcauguucucugaggacac

SEQ ID NO: 2377131 - RNA, 22 nt, Human
ggccacagaaaauucuucucca

SEQ ID NO: 2377132 - RNA, 21 nt, Human
ggccacacucagcacaaggcc

SEQ ID NO: 2377133 - RNA, 17 nt, Human
ggcauguguauguuccc

SEQ ID NO: 2377134 - RNA, 16 nt, Human
ggccacacucagcaca

SEQ ID NO: 2377135 - RNA, 14 nt, Human
ggcauguuccucug

SEQ ID NO: 2377136 - RNA, 14 nt, Human
ggcccacagcuccc

SEQ ID NO: 2377137 - RNA, 13 nt, Human
ggcccacagcucc

SEQ ID NO: 2377138 - RNA, 19 nt, Human
ggcccacagcaggugcuga

SEQ ID NO: 2377139 - RNA, 23 nt, Human
ggcccacagcaggugcugagcaa

SEQ ID NO: 2377140 - RNA, 16 nt, Human
ggccauggagagcugg

SEQ ID NO: 2377141 - RNA, 17 nt, Human
ggccauggagagcugga

SEQ ID NO: 2377142 - RNA, 21 nt, Human
ggccauggagagcuggagccu

SEQ ID NO: 2377143 - RNA, 14 nt, Human
ggccauggagagcu

SEQ ID NO: 2377144 - RNA, 17 nt, Human
ggccaugcugaagggac

SEQ ID NO: 2377145 - RNA, 13 nt, Human
ggccaugcugagg

SEQ ID NO: 2377146 - RNA, 14 nt, Human
ggccaugcugaggc

SEQ ID NO: 2377147 - RNA, 15 nt, Human
ggccaugcugaggcc

SEQ ID NO: 2377148 - RNA, 18 nt, Human
ggccaugcugaggccugg

SEQ ID NO: 2377149 - RNA, 19 nt, Human
ggccaugcugaggccuggg

SEQ ID NO: 2377150 - RNA, 22 nt, Human
ggccaugcugaggccugggccg

SEQ ID NO: 2377151 - RNA, 19 nt, Human
ggcccacagcucccacccc

SEQ ID NO: 2377152 - RNA, 18 nt, Human
ggcccacagcucccaccc

SEQ ID NO: 2377153 - RNA, 17 nt, Human
ggcccacagcucccacc

SEQ ID NO: 2377154 - RNA, 15 nt, Human
ggcccacagcuccca

SEQ ID NO: 2377155 - RNA, 20 nt, Human
ggcccacagcucccacccca

SEQ ID NO: 2377156 - RNA, 20 nt, Human
ggcccacagggaacccugcu

SEQ ID NO: 2377157 - RNA, 15 nt, Human
ggcccaccagagcug

SEQ ID NO: 2377158 - RNA, 12 nt, Human
ggcccaccuggc

SEQ ID NO: 2377159 - RNA, 16 nt, Human
ggcccaccuggccacc

SEQ ID NO: 2377160 - RNA, 11 nt, Human
ggccaggagcc

SEQ ID NO: 2377161 - RNA, 13 nt, Human
ggccaggacugag

SEQ ID NO: 2377162 - RNA, 20 nt, Human
ggccaggacugagccccgca

SEQ ID NO: 2377163 - RNA, 15 nt, Human
ggccaggacugagcc

SEQ ID NO: 2377164 - RNA, 13 nt, Human
ggccaggagccuc

SEQ ID NO: 2377165 - RNA, 14 nt, Human
ggccaggcccucug

SEQ ID NO: 2377166 - RNA, 17 nt, Human
ggccaggcccucugccc

SEQ ID NO: 2377167 - RNA, 13 nt, Human
ggccaugccugcc

SEQ ID NO: 2377168 - RNA, 14 nt, Human
ggccaugccugccc

SEQ ID NO: 2377169 - RNA, 16 nt, Human
ggccaugcugaaggga

SEQ ID NO: 2377170 - RNA, 15 nt, Human
ggccaggcccucugc

SEQ ID NO: 2377171 - RNA, 16 nt, Human
ggccaggcccucugcc

SEQ ID NO: 2377172 - RNA, 22 nt, Human
ggcagagccuuuggaugaccag

SEQ ID NO: 2377173 - RNA, 16 nt, Human
ggcagagccgggaagc

SEQ ID NO: 2377174 - RNA, 16 nt, Human
ggcagagcccaaggga

SEQ ID NO: 2377175 - RNA, 12 nt, Human
ggcagagcccaa

SEQ ID NO: 2377176 - RNA, 22 nt, Human
ggcagagcagagaccaucccug

SEQ ID NO: 2377177 - RNA, 22 nt, Human
ggcacucacagaccuggagccc

SEQ ID NO: 2377178 - RNA, 23 nt, Human
ggcacucacagaccuggagcccc

SEQ ID NO: 2377179 - RNA, 16 nt, Human
ggcagagggcagaggc

SEQ ID NO: 2377180 - RNA, 14 nt, Human
ggcagagggcagag

SEQ ID NO: 2377181 - RNA, 23 nt, Human
ggcagaggcuggaggcagggccu

SEQ ID NO: 2377182 - RNA, 22 nt, Human
ggcagaggcuggaggcagggcc

SEQ ID NO: 2377183 - RNA, 20 nt, Human
ggcagagggcagaggcugga

SEQ ID NO: 2377184 - RNA, 19 nt, Human
ggcagagggcagaggcugg

SEQ ID NO: 2377185 - RNA, 21 nt, Human
ggcagaggcuggaggcagggc

SEQ ID NO: 2377186 - RNA, 19 nt, Human
ggcagagcuggcucugagc

SEQ ID NO: 2377187 - RNA, 16 nt, Human
ggcagagcuggcucug

SEQ ID NO: 2377188 - RNA, 17 nt, Human
ggcagagcuggcucuga

SEQ ID NO: 2377189 - RNA, 18 nt, Human
ggcagagguucauuucaa

SEQ ID NO: 2377190 - RNA, 21 nt, Human
ggcagagguugcagugagccg

SEQ ID NO: 2377191 - RNA, 20 nt, Human
ggcacccaccaucaugucug

SEQ ID NO: 2377192 - RNA, 18 nt, Human
ggcacccggccccugcug

SEQ ID NO: 2377193 - RNA, 19 nt, Human
ggcacccggccccugcugg

SEQ ID NO: 2377194 - RNA, 20 nt, Human
ggcacccggccccugcuggu

SEQ ID NO: 2377195 - RNA, 20 nt, Human
ggcacccacaagugccacug

SEQ ID NO: 2377196 - RNA, 18 nt, Human
ggcacucagaagacacug

SEQ ID NO: 2377197 - RNA, 19 nt, Human
ggcacucagaagacacuga

SEQ ID NO: 2377198 - RNA, 20 nt, Human
ggcacucagaagacacugau

SEQ ID NO: 2377199 - RNA, 18 nt, Human
ggcacucaaugcagccag

SEQ ID NO: 2377200 - RNA, 23 nt, Human
ggcacucaaugcagccagaccua

SEQ ID NO: 2377201 - RNA, 17 nt, Human
ggcacucacagaccugg

SEQ ID NO: 2377202 - RNA, 21 nt, Human
ggcacucacagaccuggagcc

SEQ ID NO: 2377203 - RNA, 17 nt, Human
ggcaccagggguuucuc

SEQ ID NO: 2377204 - RNA, 17 nt, Human
ggcaccagcagccugga

SEQ ID NO: 2377205 - RNA, 12 nt, Human
ggcaaggcaggu

SEQ ID NO: 2377206 - RNA, 13 nt, Human
ggcaaggcaggug

SEQ ID NO: 2377207 - RNA, 14 nt, Human
ggcaaggcaggugc

SEQ ID NO: 2377208 - RNA, 22 nt, Human
ggcaaggcaggugccuccaggu

SEQ ID NO: 2377209 - RNA, 18 nt, Human
ggcaagcaccuccugccu

SEQ ID NO: 2377210 - RNA, 19 nt, Human
ggcaagcaccuccugccuc

SEQ ID NO: 2377211 - RNA, 22 nt, Human
ggcaagcuuggcuguagaagga

SEQ ID NO: 2377212 - RNA, 16 nt, Human
ggcaaggacacagaug

SEQ ID NO: 2377213 - RNA, 23 nt, Human
ggcaagcugugacuucuccaggu

SEQ ID NO: 2377214 - RNA, 14 nt, Human
ggcaaggacacaga

SEQ ID NO: 2377215 - RNA, 22 nt, Human
ggcaagcugugacuucuccagg

SEQ ID NO: 2377216 - RNA, 20 nt, Human
ggcaagcuagaaccuggagg

SEQ ID NO: 2377217 - RNA, 19 nt, Human
ggcaagauuuuccuuuuuu

SEQ ID NO: 2377218 - RNA, 19 nt, Human
ggcaagccccugcccaucu

SEQ ID NO: 2377219 - RNA, 18 nt, Human
ggcaagcuagaaccugga

SEQ ID NO: 2377220 - RNA, 19 nt, Human
ggauucugggaggaagcag

SEQ ID NO: 2377221 - RNA, 14 nt, Human
ggauucugguucca

SEQ ID NO: 2377222 - RNA, 18 nt, Human
ggauucugguuccagggu

SEQ ID NO: 2377223 - RNA, 19 nt, Human
ggauucugguuccaggguc

SEQ ID NO: 2377224 - RNA, 21 nt, Human
ggauucuuccucccucccucu

SEQ ID NO: 2377225 - RNA, 18 nt, Human
ggauucuuuccauuauga

SEQ ID NO: 2377226 - RNA, 13 nt, Human
ggauucuuggccc

SEQ ID NO: 2377227 - RNA, 23 nt, Human
ggauucuguacaugcauugagcu

SEQ ID NO: 2377228 - RNA, 19 nt, Human
ggcaagagcccccuugaca

SEQ ID NO: 2377229 - RNA, 22 nt, Human
ggcaagagcccccuugacaccg

SEQ ID NO: 2377230 - RNA, 16 nt, Human
ggcaagagggggugga

SEQ ID NO: 2377231 - RNA, 12 nt, Human
ggcaagauuuuc

SEQ ID NO: 2377232 - RNA, 12 nt, Human
ggcaagaggggu

SEQ ID NO: 2377233 - RNA, 14 nt, Human
ggcaagaggggugg

SEQ ID NO: 2377234 - RNA, 17 nt, Human
ggcaagcaccuccugcc

SEQ ID NO: 2377235 - RNA, 14 nt, Human
ggauugaagcccuc

SEQ ID NO: 2377236 - RNA, 16 nt, Human
ggauugaagcccucca

SEQ ID NO: 2377237 - RNA, 13 nt, Human
ggauugagucugu

SEQ ID NO: 2377238 - RNA, 18 nt, Human
ggcaagaaggaauugacu

SEQ ID NO: 2377239 - RNA, 20 nt, Human
ggauugaucggagccuccuc

SEQ ID NO: 2377240 - RNA, 23 nt, Human
ggauucccaccaaggucuucagc

SEQ ID NO: 2377241 - RNA, 13 nt, Human
ggauuccugaccc

SEQ ID NO: 2377242 - RNA, 14 nt, Human
ggauuccugaccca

SEQ ID NO: 2377243 - RNA, 15 nt, Human
ggauuccugacccag

SEQ ID NO: 2377244 - RNA, 16 nt, Human
ggauuccugacccagg

SEQ ID NO: 2377245 - RNA, 18 nt, Human
ggauucauuuccugcccu

SEQ ID NO: 2377246 - RNA, 22 nt, Human
ggauucccaccaaggucuucag

SEQ ID NO: 2377247 - RNA, 13 nt, Human
ggauucugggagg

SEQ ID NO: 2377248 - RNA, 21 nt, Human
ggauucuggccuagucccuuc

SEQ ID NO: 2377249 - RNA, 23 nt, Human
ggauucuacuuuaagcacuacau

SEQ ID NO: 2377250 - RNA, 16 nt, Human
ggauucugagagcugu

SEQ ID NO: 2377251 - RNA, 19 nt, Human
ggauuccugacccaggccg

SEQ ID NO: 2377252 - RNA, 20 nt, Human
ggauuccugacccaggccgc

SEQ ID NO: 2377253 - RNA, 20 nt, Human
ggauucuacuuuaagcacua

SEQ ID NO: 2377254 - RNA, 15 nt, Human
ggauucaggcugcuu

SEQ ID NO: 2377255 - RNA, 14 nt, Human
ggauucaggcugcu

SEQ ID NO: 2377256 - RNA, 13 nt, Human
ggauucaggcugc

SEQ ID NO: 2377257 - RNA, 21 nt, Human
ggauucaggaauguguggccu

SEQ ID NO: 2377258 - RNA, 13 nt, Human
ggauucauuuccu

SEQ ID NO: 2377259 - RNA, 16 nt, Human
ggauucauuacagcuu

SEQ ID NO: 2377260 - RNA, 14 nt, Human
ggauucauuuccug

SEQ ID NO: 2377261 - RNA, 15 nt, Human
ggauucauuuccugc

SEQ ID NO: 2377262 - RNA, 16 nt, Human
ggauucauuuccugcc

SEQ ID NO: 2377263 - RNA, 17 nt, Human
ggauucauuuccugccc

SEQ ID NO: 2377264 - RNA, 19 nt, Human
ggauuauuuuuucagaccg

SEQ ID NO: 2377265 - RNA, 20 nt, Human
ggauuauuuuuucagaccga

SEQ ID NO: 2377266 - RNA, 17 nt, Human
ggauuauuuaauaacau

SEQ ID NO: 2377267 - RNA, 19 nt, Human
ggauuauuuaauaacauua

SEQ ID NO: 2377268 - RNA, 22 nt, Human
ggauuauuuaauaacauuaccu

SEQ ID NO: 2377269 - RNA, 13 nt, Human
ggauuauuuuuuc

SEQ ID NO: 2377270 - RNA, 14 nt, Human
ggauuauuuuuuca

SEQ ID NO: 2377271 - RNA, 16 nt, Human
ggauuauuuuuucaga

SEQ ID NO: 2377272 - RNA, 17 nt, Human
ggauuauuuuuucagac

SEQ ID NO: 2377273 - RNA, 18 nt, Human
ggauuauuuuuucagacc

SEQ ID NO: 2377274 - RNA, 23 nt, Human
ggaugcccagggccacucugccu

SEQ ID NO: 2377275 - RNA, 12 nt, Human
ggaugcccugga

SEQ ID NO: 2377276 - RNA, 15 nt, Human
ggaugcccuggaggu

SEQ ID NO: 2377277 - RNA, 13 nt, Human
ggaugcccuggag

SEQ ID NO: 2377278 - RNA, 21 nt, Human
ggaugcccuggagguggcuga

SEQ ID NO: 2377279 - RNA, 18 nt, Human
ggaugcccuggagguggc

SEQ ID NO: 2377280 - RNA, 12 nt, Human
ggauuauauuau

SEQ ID NO: 2377281 - RNA, 15 nt, Human
ggauuauucauuuaa

SEQ ID NO: 2377282 - RNA, 17 nt, Human
ggauuauucauuuaaaa

SEQ ID NO: 2377283 - RNA, 19 nt, Human
ggauuauucauuuaaaaug

SEQ ID NO: 2377284 - RNA, 21 nt, Human
ggauuauucauuuaaaaugau

SEQ ID NO: 2377285 - RNA, 22 nt, Human
ggauuauucauuuaaaaugauu

SEQ ID NO: 2377286 - RNA, 18 nt, Human
ggaugccugguggcagcu

SEQ ID NO: 2377287 - RNA, 19 nt, Human
ggaugccugguggcagcug

SEQ ID NO: 2377288 - RNA, 20 nt, Human
ggaugccugguggcagcugc

SEQ ID NO: 2377289 - RNA, 21 nt, Human
ggaugccugguggcagcugcg

SEQ ID NO: 2377290 - RNA, 15 nt, Human
ggaugaugccucaug

SEQ ID NO: 2377291 - RNA, 17 nt, Human
ggaugaggugcugggag

SEQ ID NO: 2377292 - RNA, 23 nt, Human
ggaugaguacccaaaagcucagc

SEQ ID NO: 2377293 - RNA, 18 nt, Human
ggaugaugacuauggaaa

SEQ ID NO: 2377294 - RNA, 18 nt, Human
ggaugcccaaagaugcag

SEQ ID NO: 2377295 - RNA, 14 nt, Human
ggaugaugccacac

SEQ ID NO: 2377296 - RNA, 16 nt, Human
ggaugauucagaaauu

SEQ ID NO: 2377297 - RNA, 20 nt, Human
ggaugauucagaaauuggaa

SEQ ID NO: 2377298 - RNA, 21 nt, Human
ggaugauucagaaauuggaac

SEQ ID NO: 2377299 - RNA, 22 nt, Human
ggaugccaauauuaaaucugcu

SEQ ID NO: 2377300 - RNA, 22 nt, Human
ggaugcccagggccacucugcc

SEQ ID NO: 2377301 - RNA, 19 nt, Human
ggaugccaucugugggcac

SEQ ID NO: 2377302 - RNA, 18 nt, Human
ggaugccaucugugggca

SEQ ID NO: 2377303 - RNA, 17 nt, Human
ggaugccccgucccccu

SEQ ID NO: 2377304 - RNA, 19 nt, Human
ggaugcccaaagaugcagc

SEQ ID NO: 2377305 - RNA, 13 nt, Human
ggaugccuggugg

SEQ ID NO: 2377306 - RNA, 17 nt, Human
ggaugccugguggcagc

SEQ ID NO: 2377307 - RNA, 18 nt, Human
ggaugaggugcugggagg

SEQ ID NO: 2377308 - RNA, 16 nt, Human
ggaugaggugcuggga

SEQ ID NO: 2377309 - RNA, 15 nt, Human
ggaugagcuggaagg

SEQ ID NO: 2377310 - RNA, 20 nt, Human
ggaugaggccgcuagaggcc

SEQ ID NO: 2377311 - RNA, 21 nt, Human
ggaugaggccgcuagaggccu

SEQ ID NO: 2377312 - RNA, 16 nt, Human
ggaugaucuaggaaga

SEQ ID NO: 2377313 - RNA, 18 nt, Human
ggaugaucuaggaagacu

SEQ ID NO: 2377314 - RNA, 22 nt, Human
ggaugaucuaggaagacuuugg

SEQ ID NO: 2377315 - RNA, 13 nt, Human
ggaugagcauuua

SEQ ID NO: 2377316 - RNA, 23 nt, Human
ggaguccccuccccggcccuacc

SEQ ID NO: 2377317 - RNA, 17 nt, Human
ggaugagcauggagcug

SEQ ID NO: 2377318 - RNA, 19 nt, Human
ggaugagcauggagcuggc

SEQ ID NO: 2377319 - RNA, 20 nt, Human
ggaugagcauggagcuggcc

SEQ ID NO: 2377320 - RNA, 15 nt, Human
ggagucccgucagga

SEQ ID NO: 2377321 - RNA, 13 nt, Human
ggaguccccuccc

SEQ ID NO: 2377322 - RNA, 21 nt, Human
ggaguccccuccccggcccua

SEQ ID NO: 2377323 - RNA, 20 nt, Human
ggaugagaguuuuggaugca

SEQ ID NO: 2377324 - RNA, 22 nt, Human
ggaugagaguuuuggaugcagu

SEQ ID NO: 2377325 - RNA, 23 nt, Human
ggagucccaccuuggcugcaggg

SEQ ID NO: 2377326 - RNA, 15 nt, Human
ggagucagugccagg

SEQ ID NO: 2377327 - RNA, 14 nt, Human
ggagucagugccag

SEQ ID NO: 2377328 - RNA, 13 nt, Human
ggaguccccucac

SEQ ID NO: 2377329 - RNA, 15 nt, Human
ggaguccccucaccu

SEQ ID NO: 2377330 - RNA, 17 nt, Human
ggaccaucauccuacug

SEQ ID NO: 2377331 - RNA, 16 nt, Human
ggacccaaugcacaca

SEQ ID NO: 2377332 - RNA, 14 nt, Human
ggaccauccuauuu

SEQ ID NO: 2377333 - RNA, 19 nt, Human
ggaccagucaaccugggca

SEQ ID NO: 2377334 - RNA, 17 nt, Human
ggaccagggcagggcca

SEQ ID NO: 2377335 - RNA, 13 nt, Human
ggaccaggcaaug

SEQ ID NO: 2377336 - RNA, 23 nt, Human
ggaccaggcaaugugacuuugca

SEQ ID NO: 2377337 - RNA, 20 nt, Human
ggaccuuuccaccacagcca

SEQ ID NO: 2377338 - RNA, 22 nt, Human
ggacgcagcaggaggccaggcc

SEQ ID NO: 2377339 - RNA, 14 nt, Human
ggacgacucugacc

SEQ ID NO: 2377340 - RNA, 18 nt, Human
ggaccuuuccaccacagc

SEQ ID NO: 2377341 - RNA, 19 nt, Human
ggaccuuuccaccacagcc

SEQ ID NO: 2377342 - RNA, 22 nt, Human
ggaccuuuccaccacagccagc

SEQ ID NO: 2377343 - RNA, 18 nt, Human
ggaccuugaacuggguac

SEQ ID NO: 2377344 - RNA, 19 nt, Human
ggacccaauguaggagcug

SEQ ID NO: 2377345 - RNA, 10 nt, Human
ggacccagac

SEQ ID NO: 2377346 - RNA, 12 nt, Human
ggacccagaccc

SEQ ID NO: 2377347 - RNA, 13 nt, Human
ggacccagaccca

SEQ ID NO: 2377348 - RNA, 19 nt, Human
ggaccuuuagugguggcca

SEQ ID NO: 2377349 - RNA, 15 nt, Human
ggaccuuucagcugu

SEQ ID NO: 2377350 - RNA, 17 nt, Human
ggaccuuucagcuguga

SEQ ID NO: 2377351 - RNA, 23 nt, Human
ggacgcagcaggaggccaggccg

SEQ ID NO: 2377352 - RNA, 13 nt, Human
ggacgcuucugaa

SEQ ID NO: 2377353 - RNA, 21 nt, Human
ggacucuugcucuuucuacuc

SEQ ID NO: 2377354 - RNA, 19 nt, Human
ggacgcucucuggccuucg

SEQ ID NO: 2377355 - RNA, 16 nt, Human
ggacgcucucuggccu

SEQ ID NO: 2377356 - RNA, 15 nt, Human
ggacgccacccagca

SEQ ID NO: 2377357 - RNA, 17 nt, Human
ggacugaaaaccucucc

SEQ ID NO: 2377358 - RNA, 16 nt, Human
ggacugaaaaccucuc

SEQ ID NO: 2377359 - RNA, 18 nt, Human
ggacugaaaaccucuccu

SEQ ID NO: 2377360 - RNA, 14 nt, Human
ggacugaagccugc

SEQ ID NO: 2377361 - RNA, 19 nt, Human
ggacucuuugguggcuuug

SEQ ID NO: 2377362 - RNA, 19 nt, Human
ggacugaauuguccccagu

SEQ ID NO: 2377363 - RNA, 19 nt, Human
ggacugaagccugcaggag

SEQ ID NO: 2377364 - RNA, 17 nt, Human
ggacugaagccugcagg

SEQ ID NO: 2377365 - RNA, 16 nt, Human
ggacugaagccugcag

SEQ ID NO: 2377366 - RNA, 16 nt, Human
ggacugacacccaugu

SEQ ID NO: 2377367 - RNA, 14 nt, Human
ggacugagaaauuu

SEQ ID NO: 2377368 - RNA, 22 nt, Human
ggagacagccccagagcagggu

SEQ ID NO: 2377369 - RNA, 23 nt, Human
ggagacagccccagagcagggug

SEQ ID NO: 2377370 - RNA, 21 nt, Human
ggagacagccccagagcaggg

SEQ ID NO: 2377371 - RNA, 20 nt, Human
ggagacagccccagagcagg

SEQ ID NO: 2377372 - RNA, 14 nt, Human
ggagaagggaugga

SEQ ID NO: 2377373 - RNA, 20 nt, Human
ggagaaggaucuagaaugug

SEQ ID NO: 2377374 - RNA, 21 nt, Human
ggagaagggauggaggucaca

SEQ ID NO: 2377375 - RNA, 22 nt, Human
ggagaagucuuagacuugaaau

SEQ ID NO: 2377376 - RNA, 16 nt, Human
ggagaagcagugagcc

SEQ ID NO: 2377377 - RNA, 15 nt, Human
ggagaagcagugagc

SEQ ID NO: 2377378 - RNA, 13 nt, Human
ggagaagcaugaa

SEQ ID NO: 2377379 - RNA, 19 nt, Human
ggagaagcagugagccgca

SEQ ID NO: 2377380 - RNA, 18 nt, Human
ggagaagccacaggccug

SEQ ID NO: 2377381 - RNA, 23 nt, Human
ggagaagagcuguucacagccag

SEQ ID NO: 2377382 - RNA, 22 nt, Human
ggagaaggaaggagacucaccu

SEQ ID NO: 2377383 - RNA, 13 nt, Human
ggagaagcugaug

SEQ ID NO: 2377384 - RNA, 12 nt, Human
ggagaaggaucu

SEQ ID NO: 2377385 - RNA, 14 nt, Human
ggagaaggaucuag

SEQ ID NO: 2377386 - RNA, 17 nt, Human
ggagaaggaaggagacu

SEQ ID NO: 2377387 - RNA, 18 nt, Human
ggagaagcaugaaaaagc

SEQ ID NO: 2377388 - RNA, 19 nt, Human
ggagaagccacaggccuga

SEQ ID NO: 2377389 - RNA, 19 nt, Human
ggagaagcuccucucccca

SEQ ID NO: 2377390 - RNA, 16 nt, Human
ggagaagcugaugcuu

SEQ ID NO: 2377391 - RNA, 22 nt, Human
ggagaagaauuuucagacccca

SEQ ID NO: 2377392 - RNA, 13 nt, Human
ggagaagagagga

SEQ ID NO: 2377393 - RNA, 13 nt, Human
ggagaagaaguca

SEQ ID NO: 2377394 - RNA, 14 nt, Human
ggagaagagaggag

SEQ ID NO: 2377395 - RNA, 15 nt, Human
ggagaagagaggaga

SEQ ID NO: 2377396 - RNA, 16 nt, Human
ggagaagagaggagag

SEQ ID NO: 2377397 - RNA, 22 nt, Human
ggagaagagaggagaggagaga

SEQ ID NO: 2377398 - RNA, 15 nt, Human
ggagaagagcuguuc

SEQ ID NO: 2377399 - RNA, 11 nt, Human
ggagaagaacu

SEQ ID NO: 2377400 - RNA, 14 nt, Human
ggagaagaacugaa

SEQ ID NO: 2377401 - RNA, 21 nt, Human
ggagaacuccuaggguggcug

SEQ ID NO: 2377402 - RNA, 17 nt, Human
ggacugagggacucuga

SEQ ID NO: 2377403 - RNA, 13 nt, Human
ggacugaggccug

SEQ ID NO: 2377404 - RNA, 15 nt, Human
ggacugagccccgca

SEQ ID NO: 2377405 - RNA, 14 nt, Human
ggacugaggccuga

SEQ ID NO: 2377406 - RNA, 21 nt, Human
ggacugagggacucugaagcc

SEQ ID NO: 2377407 - RNA, 12 nt, Human
ggacugagccag

SEQ ID NO: 2377408 - RNA, 17 nt, Human
ggacugagccaguccca

SEQ ID NO: 2377409 - RNA, 18 nt, Human
ggacugagccagucccag

SEQ ID NO: 2377410 - RNA, 12 nt, Human
ggacugagcccc

SEQ ID NO: 2377411 - RNA, 18 nt, Human
ggacugagaaauuuauaa

SEQ ID NO: 2377412 - RNA, 23 nt, Human
ggacagacucacaaccugaaccu

SEQ ID NO: 2377413 - RNA, 17 nt, Human
ggacagaagcagcucuu

SEQ ID NO: 2377414 - RNA, 16 nt, Human
ggacagaagcagcucu

SEQ ID NO: 2377415 - RNA, 15 nt, Human
ggacagaagcagcuc

SEQ ID NO: 2377416 - RNA, 14 nt, Human
ggacagaagaaggc

SEQ ID NO: 2377417 - RNA, 23 nt, Human
ggacacuuugaaauguguuucug

SEQ ID NO: 2377418 - RNA, 14 nt, Human
ggacagaagcagcu

SEQ ID NO: 2377419 - RNA, 17 nt, Human
ggacacuucccucuguu

SEQ ID NO: 2377420 - RNA, 18 nt, Human
ggacacuucccucuguuu

SEQ ID NO: 2377421 - RNA, 21 nt, Human
ggacacuucccucuguuucuc

SEQ ID NO: 2377422 - RNA, 14 nt, Human
ggacacuuccugcc

SEQ ID NO: 2377423 - RNA, 15 nt, Human
ggacacuuccugccu

SEQ ID NO: 2377424 - RNA, 16 nt, Human
ggacacuuccugccua

SEQ ID NO: 2377425 - RNA, 20 nt, Human
ggacacuuugaaauguguuu

SEQ ID NO: 2377426 - RNA, 19 nt, Human
ggacagagacaccugcacc

SEQ ID NO: 2377427 - RNA, 18 nt, Human
ggacagagacaccugcac

SEQ ID NO: 2377428 - RNA, 17 nt, Human
ggacagagacaccugca

SEQ ID NO: 2377429 - RNA, 14 nt, Human
ggacagagacaccu

SEQ ID NO: 2377430 - RNA, 21 nt, Human
ggacagagacaccugcaccuc

SEQ ID NO: 2377431 - RNA, 20 nt, Human
ggacagagacaccugcaccu

SEQ ID NO: 2377432 - RNA, 14 nt, Human
ggacagaggcccca

SEQ ID NO: 2377433 - RNA, 18 nt, Human
ggacagaggccccagccu

SEQ ID NO: 2377434 - RNA, 17 nt, Human
ggacagaggccccagcc

SEQ ID NO: 2377435 - RNA, 16 nt, Human
ggacagaggccccagc

SEQ ID NO: 2377436 - RNA, 15 nt, Human
ggacagaggccccag

SEQ ID NO: 2377437 - RNA, 16 nt, Human
ggacagaggggguggc

SEQ ID NO: 2377438 - RNA, 23 nt, Human
ggacagaggccccagccucccug

SEQ ID NO: 2377439 - RNA, 20 nt, Human
ggacagaggccccagccucc

SEQ ID NO: 2377440 - RNA, 14 nt, Human
ggacagagccaugc

SEQ ID NO: 2377441 - RNA, 14 nt, Human
ggacagaggccugc

SEQ ID NO: 2377442 - RNA, 15 nt, Human
ggacagaggccugcc

SEQ ID NO: 2377443 - RNA, 16 nt, Human
ggacagaggccugccc

SEQ ID NO: 2377444 - RNA, 18 nt, Human
ggacacuuaacagaugca

SEQ ID NO: 2377445 - RNA, 16 nt, Human
ggacacuuaauacuac

SEQ ID NO: 2377446 - RNA, 15 nt, Human
ggacacuccuagaga

SEQ ID NO: 2377447 - RNA, 21 nt, Human
ggacacuccagugccagcaau

SEQ ID NO: 2377448 - RNA, 14 nt, Human
ggacacuccuagag

SEQ ID NO: 2377449 - RNA, 14 nt, Human
ggacacucagaccu

SEQ ID NO: 2377450 - RNA, 14 nt, Human
ggacacuccagugc

SEQ ID NO: 2377451 - RNA, 15 nt, Human
ggacacuccagugcc

SEQ ID NO: 2377452 - RNA, 16 nt, Human
ggacacuccagugcca

SEQ ID NO: 2377453 - RNA, 18 nt, Human
ggacacuccagugccagc

SEQ ID NO: 2377454 - RNA, 12 nt, Human
gcuuuucacugc

SEQ ID NO: 2377455 - RNA, 19 nt, Human
gcuuuuauuaaugcacuuu

SEQ ID NO: 2377456 - RNA, 22 nt, Human
gcuuuuauuaaugcacuuucua

SEQ ID NO: 2377457 - RNA, 15 nt, Human
gcuuuuauuguauaa

SEQ ID NO: 2377458 - RNA, 19 nt, Human
gcuuuuaugugaaacaugu

SEQ ID NO: 2377459 - RNA, 20 nt, Human
gcuuuuaugugaaacauguu

SEQ ID NO: 2377460 - RNA, 21 nt, Human
gcuuuuaugugaaacauguuu

SEQ ID NO: 2377461 - RNA, 15 nt, Human
gcuuuuauuaaugca

SEQ ID NO: 2377462 - RNA, 18 nt, Human
gcuuuuauuaaugcacuu

SEQ ID NO: 2377463 - RNA, 22 nt, Human
gcuuuuauagaggcuagcuucu

SEQ ID NO: 2377464 - RNA, 19 nt, Human
gcuuuuauagaggcuagcu

SEQ ID NO: 2377465 - RNA, 22 nt, Human
ggacagccacggccaggccaga

SEQ ID NO: 2377466 - RNA, 17 nt, Human
ggacagaggccugcccg

SEQ ID NO: 2377467 - RNA, 20 nt, Human
ggacagaggggguggccucc

SEQ ID NO: 2377468 - RNA, 14 nt, Human
ggacagccccaccc

SEQ ID NO: 2377469 - RNA, 16 nt, Human
ggacagccccacccug

SEQ ID NO: 2377470 - RNA, 15 nt, Human
ggacagccccacccu

SEQ ID NO: 2377471 - RNA, 16 nt, Human
ggacagccccuccucc

SEQ ID NO: 2377472 - RNA, 15 nt, Human
ggacagccccuccuc

SEQ ID NO: 2377473 - RNA, 11 nt, Human
ggacagcuccu

SEQ ID NO: 2377474 - RNA, 15 nt, Human
ggacagcuccuucug

SEQ ID NO: 2377475 - RNA, 16 nt, Human
ggacagcuccuucugu

SEQ ID NO: 2377476 - RNA, 17 nt, Human
ggacagcuccuucuguc

SEQ ID NO: 2377477 - RNA, 21 nt, Human
ggacagccuguggcggugccu

SEQ ID NO: 2377478 - RNA, 17 nt, Human
ggacagccccacccugg

SEQ ID NO: 2377479 - RNA, 17 nt, Human
ggacauuugcucaugga

SEQ ID NO: 2377480 - RNA, 14 nt, Human
ggaccagagcugcc

SEQ ID NO: 2377481 - RNA, 20 nt, Human
ggacauuugcucauggaauu

SEQ ID NO: 2377482 - RNA, 23 nt, Human
ggacagccuguggcggugccugg

SEQ ID NO: 2377483 - RNA, 22 nt, Human
ggacagccuguggcggugccug

SEQ ID NO: 2377484 - RNA, 15 nt, Human
ggacauuuuuucagu

SEQ ID NO: 2377485 - RNA, 19 nt, Human
ggaccagagcugccaccug

SEQ ID NO: 2377486 - RNA, 13 nt, Human
ggaccagcucagg

SEQ ID NO: 2377487 - RNA, 17 nt, Human
ggaccagccuguuggac

SEQ ID NO: 2377488 - RNA, 17 nt, Human
ggagcuccacucugcuu

SEQ ID NO: 2377489 - RNA, 23 nt, Human
ggagcucacuguggugucugugu

SEQ ID NO: 2377490 - RNA, 20 nt, Human
ggagcucacuguggugucug

SEQ ID NO: 2377491 - RNA, 14 nt, Human
ggagcucagagagg

SEQ ID NO: 2377492 - RNA, 17 nt, Human
ggagcucagagagggca

SEQ ID NO: 2377493 - RNA, 20 nt, Human
ggagcucagagagggcaggc

SEQ ID NO: 2377494 - RNA, 15 nt, Human
ggagcuaucaggaac

SEQ ID NO: 2377495 - RNA, 22 nt, Human
ggagcuaucaggaacagcuaug

SEQ ID NO: 2377496 - RNA, 19 nt, Human
ggagcuaacacuggccccu

SEQ ID NO: 2377497 - RNA, 18 nt, Human
ggagcuaacacuggcccc

SEQ ID NO: 2377498 - RNA, 17 nt, Human
ggagcuaacacuggccc

SEQ ID NO: 2377499 - RNA, 16 nt, Human
ggagcuaacacuggcc

SEQ ID NO: 2377500 - RNA, 17 nt, Human
ggagcgggaccuguggc

SEQ ID NO: 2377501 - RNA, 15 nt, Human
ggagcgguggcccug

SEQ ID NO: 2377502 - RNA, 14 nt, Human
ggagcgugggaggc

SEQ ID NO: 2377503 - RNA, 22 nt, Human
ggagcgguggcccugucccucc

SEQ ID NO: 2377504 - RNA, 15 nt, Human
ggagcggaaagcagc

SEQ ID NO: 2377505 - RNA, 14 nt, Human
ggagcggaaagcag

SEQ ID NO: 2377506 - RNA, 23 nt, Human
ggagcgcaccugcccccuggugg

SEQ ID NO: 2377507 - RNA, 21 nt, Human
ggagcgcaccugcccccuggu

SEQ ID NO: 2377508 - RNA, 19 nt, Human
ggagcgcaccugcccccug

SEQ ID NO: 2377509 - RNA, 16 nt, Human
ggagcggaaagcagcu

SEQ ID NO: 2377510 - RNA, 20 nt, Human
ggagcggccggccagccccu

SEQ ID NO: 2377511 - RNA, 13 nt, Human
ggagcgggaccug

SEQ ID NO: 2377512 - RNA, 16 nt, Human
ggagcgggaccugugg

SEQ ID NO: 2377513 - RNA, 15 nt, Human
ggagcgcaccugccc

SEQ ID NO: 2377514 - RNA, 20 nt, Human
ggagccuuugguucuggcca

SEQ ID NO: 2377515 - RNA, 19 nt, Human
ggagccuguguaacagcuc

SEQ ID NO: 2377516 - RNA, 20 nt, Human
ggagccuguguaacagcucc

SEQ ID NO: 2377517 - RNA, 21 nt, Human
ggagccuguguaacagcuccu

SEQ ID NO: 2377518 - RNA, 22 nt, Human
ggagccuguguaacagcuccuu

SEQ ID NO: 2377519 - RNA, 15 nt, Human
ggagccuguguaaca

SEQ ID NO: 2377520 - RNA, 16 nt, Human
ggagccuguguaacag

SEQ ID NO: 2377521 - RNA, 17 nt, Human
ggagccuguguaacagc

SEQ ID NO: 2377522 - RNA, 18 nt, Human
ggagccuguguaacagcu

SEQ ID NO: 2377523 - RNA, 22 nt, Human
ggagccugcaaacucacugcuc

SEQ ID NO: 2377524 - RNA, 15 nt, Human
ggagccuccugcccu

SEQ ID NO: 2377525 - RNA, 17 nt, Human
ggagccugcagagcugc

SEQ ID NO: 2377526 - RNA, 11 nt, Human
ggagccugcag

SEQ ID NO: 2377527 - RNA, 13 nt, Human
ggagccugcaggg

SEQ ID NO: 2377528 - RNA, 16 nt, Human
ggagccugcagggugg

SEQ ID NO: 2377529 - RNA, 21 nt, Human
ggagccugcaggguggugcug

SEQ ID NO: 2377530 - RNA, 12 nt, Human
ggagccuggugc

SEQ ID NO: 2377531 - RNA, 22 nt, Human
ggagccugcaggguggugcugg

SEQ ID NO: 2377532 - RNA, 13 nt, Human
ggagccugcuggu

SEQ ID NO: 2377533 - RNA, 22 nt, Human
ggagccugcuggucacagccuc

SEQ ID NO: 2377534 - RNA, 13 nt, Human
ggagcacaggcag

SEQ ID NO: 2377535 - RNA, 14 nt, Human
ggagcacaggcagc

SEQ ID NO: 2377536 - RNA, 17 nt, Human
ggagcaccaggcacgaa

SEQ ID NO: 2377537 - RNA, 15 nt, Human
ggagcacaggcagcu

SEQ ID NO: 2377538 - RNA, 16 nt, Human
ggagcccugggaggcu

SEQ ID NO: 2377539 - RNA, 19 nt, Human
ggagcccugggaggcucug

SEQ ID NO: 2377540 - RNA, 22 nt, Human
ggagcaacuuguucguggguca

SEQ ID NO: 2377541 - RNA, 15 nt, Human
ggagcaaauguuucu

SEQ ID NO: 2377542 - RNA, 16 nt, Human
ggagcaaauguuucug

SEQ ID NO: 2377543 - RNA, 18 nt, Human
ggagcaaauguuucugca

SEQ ID NO: 2377544 - RNA, 20 nt, Human
ggagcaaauguuucugcagu

SEQ ID NO: 2377545 - RNA, 15 nt, Human
ggagcaaagugaggg

SEQ ID NO: 2377546 - RNA, 17 nt, Human
ggagcaaagugagggcc

SEQ ID NO: 2377547 - RNA, 20 nt, Human
ggagacauuccugggcacag

SEQ ID NO: 2377548 - RNA, 19 nt, Human
ggagaccaugcagagcgcc

SEQ ID NO: 2377549 - RNA, 11 nt, Human
ggagacagggu

SEQ ID NO: 2377550 - RNA, 13 nt, Human
ggagacagugauc

SEQ ID NO: 2377551 - RNA, 12 nt, Human
ggagacaggguu

SEQ ID NO: 2377552 - RNA, 18 nt, Human
ggagacagugaucuccau

SEQ ID NO: 2377553 - RNA, 14 nt, Human
ggagacaugugaca

SEQ ID NO: 2377554 - RNA, 17 nt, Human
ggagaccaaggcgggag

SEQ ID NO: 2377555 - RNA, 18 nt, Human
ggagaccaugcagagcgc

SEQ ID NO: 2377556 - RNA, 15 nt, Human
ggagacaugugacau

SEQ ID NO: 2377557 - RNA, 19 nt, Human
ggagacaugugacauuuau

SEQ ID NO: 2377558 - RNA, 11 nt, Human
ggagccuccug

SEQ ID NO: 2377559 - RNA, 12 nt, Human
ggagccuccugc

SEQ ID NO: 2377560 - RNA, 13 nt, Human
ggagccuccugcc

SEQ ID NO: 2377561 - RNA, 15 nt, Human
ggagccuccugccca

SEQ ID NO: 2377562 - RNA, 14 nt, Human
ggagccuccugccc

SEQ ID NO: 2377563 - RNA, 16 nt, Human
ggagccgguggcggug

SEQ ID NO: 2377564 - RNA, 17 nt, Human
ggagccgggucugccuc

SEQ ID NO: 2377565 - RNA, 21 nt, Human
ggagccuagagugagggccug

SEQ ID NO: 2377566 - RNA, 21 nt, Human
ggagccucauccgaggcaggg

SEQ ID NO: 2377567 - RNA, 20 nt, Human
ggagccucauccgaggcagg

SEQ ID NO: 2377568 - RNA, 19 nt, Human
ggagccucauccgaggcag

SEQ ID NO: 2377569 - RNA, 18 nt, Human
ggagcacuggagugcagg

SEQ ID NO: 2377570 - RNA, 16 nt, Human
ggagccuacccacccc

SEQ ID NO: 2377571 - RNA, 18 nt, Human
ggagccgggucugccucu

SEQ ID NO: 2377572 - RNA, 13 nt, Human
ggagcacuggagu

SEQ ID NO: 2377573 - RNA, 15 nt, Human
ggagcacuggagugc

SEQ ID NO: 2377574 - RNA, 20 nt, Human
ggagcccugggaggcucugg

SEQ ID NO: 2377575 - RNA, 16 nt, Human
ggaggcacacagcugc

SEQ ID NO: 2377576 - RNA, 14 nt, Human
ggaggcaagcccug

SEQ ID NO: 2377577 - RNA, 23 nt, Human
ggaggcaagagggguggagacug

SEQ ID NO: 2377578 - RNA, 19 nt, Human
ggaggcaagagggguggag

SEQ ID NO: 2377579 - RNA, 22 nt, Human
ggaggauugcuugagcccagga

SEQ ID NO: 2377580 - RNA, 20 nt, Human
ggaggauugcuugagcccag

SEQ ID NO: 2377581 - RNA, 17 nt, Human
ggaggauucuaugaggc

SEQ ID NO: 2377582 - RNA, 12 nt, Human
ggaggaccuuau

SEQ ID NO: 2377583 - RNA, 18 nt, Human
ggaggauguucugggaca

SEQ ID NO: 2377584 - RNA, 21 nt, Human
ggaggauguucugggacacag

SEQ ID NO: 2377585 - RNA, 16 nt, Human
ggaggacgcucucugg

SEQ ID NO: 2377586 - RNA, 17 nt, Human
ggaggcacacagcugca

SEQ ID NO: 2377587 - RNA, 22 nt, Human
ggaggcacuuuagggcuguaaa

SEQ ID NO: 2377588 - RNA, 17 nt, Human
ggaggcaggaguuucgu

SEQ ID NO: 2377589 - RNA, 21 nt, Human
ggaggcagggccuugcccaga

SEQ ID NO: 2377590 - RNA, 19 nt, Human
ggaggcagggccuugccca

SEQ ID NO: 2377591 - RNA, 18 nt, Human
ggaggcagggccuugccc

SEQ ID NO: 2377592 - RNA, 13 nt, Human
ggaggcagggccu

SEQ ID NO: 2377593 - RNA, 21 nt, Human
ggagggaugcugccugaguca

SEQ ID NO: 2377594 - RNA, 17 nt, Human
ggagggauucugguucc

SEQ ID NO: 2377595 - RNA, 22 nt, Human
ggagggauucugguuccagggu

SEQ ID NO: 2377596 - RNA, 17 nt, Human
ggagggagggcuccaga

SEQ ID NO: 2377597 - RNA, 13 nt, Human
ggagggagggcuc

SEQ ID NO: 2377598 - RNA, 16 nt, Human
ggagggagggcuccag

SEQ ID NO: 2377599 - RNA, 17 nt, Human
ggaguacaggugaagca

SEQ ID NO: 2377600 - RNA, 20 nt, Human
ggagguuuaggucaagaaga

SEQ ID NO: 2377601 - RNA, 15 nt, Human
ggagguugggugggc

SEQ ID NO: 2377602 - RNA, 19 nt, Human
ggaggggcgcuggcccagc

SEQ ID NO: 2377603 - RNA, 20 nt, Human
ggaggggcgcuggcccagcc

SEQ ID NO: 2377604 - RNA, 14 nt, Human
ggaggggccuggca

SEQ ID NO: 2377605 - RNA, 18 nt, Human
ggaggggccuggcagccg

SEQ ID NO: 2377606 - RNA, 21 nt, Human
ggaggggccuggcagccgugc

SEQ ID NO: 2377607 - RNA, 17 nt, Human
ggaggggcgcccaccuc

SEQ ID NO: 2377608 - RNA, 22 nt, Human
ggaggggcgcccaccuccccac

SEQ ID NO: 2377609 - RNA, 12 nt, Human
ggaggggcgcug

SEQ ID NO: 2377610 - RNA, 16 nt, Human
ggaggggcgcuggccc

SEQ ID NO: 2377611 - RNA, 14 nt, Human
ggagucagagagaa

SEQ ID NO: 2377612 - RNA, 18 nt, Human
ggagucagugccaggucc

SEQ ID NO: 2377613 - RNA, 22 nt, Human
ggagucccaccuuggcugcagg

SEQ ID NO: 2377614 - RNA, 15 nt, Human
ggaguaucugggaac

SEQ ID NO: 2377615 - RNA, 14 nt, Human
ggaguaucugggaa

SEQ ID NO: 2377616 - RNA, 15 nt, Human
ggaguaugcaaaagu

SEQ ID NO: 2377617 - RNA, 15 nt, Human
ggagucaagugugga

SEQ ID NO: 2377618 - RNA, 18 nt, Human
ggaguaaucuguguacaa

SEQ ID NO: 2377619 - RNA, 13 nt, Human
ggaguaucuggga

SEQ ID NO: 2377620 - RNA, 20 nt, Human
ggaggggcauggccagcagc

SEQ ID NO: 2377621 - RNA, 13 nt, Human
ggaggggccccug

SEQ ID NO: 2377622 - RNA, 14 nt, Human
ggaggggcaggcug

SEQ ID NO: 2377623 - RNA, 21 nt, Human
ggaggggccccugcuucucca

SEQ ID NO: 2377624 - RNA, 13 nt, Human
ggaggggcccgcu

SEQ ID NO: 2377625 - RNA, 18 nt, Human
ggaggggcccgcuugccu

SEQ ID NO: 2377626 - RNA, 22 nt, Human
ggaggggcccgcuugccucggc

SEQ ID NO: 2377627 - RNA, 13 nt, Human
ggaggggccuggc

SEQ ID NO: 2377628 - RNA, 21 nt, Human
ggaggggccuaggccucagcc

SEQ ID NO: 2377629 - RNA, 15 nt, Human
ggaggggccuaggcc

SEQ ID NO: 2377630 - RNA, 13 nt, Human
ggaggggccuagg

SEQ ID NO: 2377631 - RNA, 23 nt, Human
ggaggggcccgcuugccucggcu

SEQ ID NO: 2377632 - RNA, 13 nt, Human
ggaggggcaggcu

SEQ ID NO: 2377633 - RNA, 13 nt, Human
ggaggggaggggg

SEQ ID NO: 2377634 - RNA, 22 nt, Human
ggagggcuagaaccuggagagc

SEQ ID NO: 2377635 - RNA, 20 nt, Human
ggagggcuagaaccuggcag

SEQ ID NO: 2377636 - RNA, 16 nt, Human
ggagggcuagaaccug

SEQ ID NO: 2377637 - RNA, 21 nt, Human
ggagggcuagaaccuggaagg

SEQ ID NO: 2377638 - RNA, 19 nt, Human
ggagggcuagaaccuggag

SEQ ID NO: 2377639 - RNA, 20 nt, Human
ggagggcuagaaccuggaga

SEQ ID NO: 2377640 - RNA, 17 nt, Human
ggagggcgugacucacc

SEQ ID NO: 2377641 - RNA, 15 nt, Human
ggagggcgugggagc

SEQ ID NO: 2377642 - RNA, 16 nt, Human
ggagggcuagaaccua

SEQ ID NO: 2377643 - RNA, 20 nt, Human
ggagggcuagaaccuagaag

SEQ ID NO: 2377644 - RNA, 20 nt, Human
ggagggcggcaggggccugg

SEQ ID NO: 2377645 - RNA, 21 nt, Human
ggagggcggcaggggccugga

SEQ ID NO: 2377646 - RNA, 19 nt, Human
ggaggggagcaugggaagu

SEQ ID NO: 2377647 - RNA, 20 nt, Human
ggagggauagaggggggcug

SEQ ID NO: 2377648 - RNA, 20 nt, Human
ggagggccguaccccacccu

SEQ ID NO: 2377649 - RNA, 16 nt, Human
ggagggcccuaccuga

SEQ ID NO: 2377650 - RNA, 23 nt, Human
ggagggccacaugggaggcucac

SEQ ID NO: 2377651 - RNA, 19 nt, Human
ggagggccacaugggaggc

SEQ ID NO: 2377652 - RNA, 21 nt, Human
ggagggccguaccccacccuc

SEQ ID NO: 2377653 - RNA, 13 nt, Human
ggagggccugggc

SEQ ID NO: 2377654 - RNA, 16 nt, Human
gcggugcuguccucag

SEQ ID NO: 2377655 - RNA, 18 nt, Human
gcggugcuguccucaggu

SEQ ID NO: 2377656 - RNA, 19 nt, Human
gcuagaugggcauggggug

SEQ ID NO: 2377657 - RNA, 20 nt, Human
gcuagaguccucacucccag

SEQ ID NO: 2377658 - RNA, 13 nt, Human
gcuagauguaugu

SEQ ID NO: 2377659 - RNA, 19 nt, Human
gcggugcuaucucccccag

SEQ ID NO: 2377660 - RNA, 22 nt, Human
gcggugcuaucucccccagccc

SEQ ID NO: 2377661 - RNA, 21 nt, Human
gcuaguugggcuuccucauag

SEQ ID NO: 2377662 - RNA, 17 nt, Human
gcuauaaacaauuacau

SEQ ID NO: 2377663 - RNA, 15 nt, Human
gcuauaaauauauaa

SEQ ID NO: 2377664 - RNA, 13 nt, Human
gcuauaaauauau

SEQ ID NO: 2377665 - RNA, 14 nt, Human
gcuagauguaugua

SEQ ID NO: 2377666 - RNA, 16 nt, Human
gcuagauguauguacu

SEQ ID NO: 2377667 - RNA, 19 nt, Human
gcuauccagcuauuuuuau

SEQ ID NO: 2377668 - RNA, 14 nt, Human
gcuauauuuucaug

SEQ ID NO: 2377669 - RNA, 22 nt, Human
gcuauauuuucaugacuuuucc

SEQ ID NO: 2377670 - RNA, 23 nt, Human
gcuauauuuucaugacuuuucca

SEQ ID NO: 2377671 - RNA, 20 nt, Human
gcuauccugccaaaaucauu

SEQ ID NO: 2377672 - RNA, 17 nt, Human
gcuauccauuucucaug

SEQ ID NO: 2377673 - RNA, 23 nt, Human
gcuauauccauguacuguaguuu

SEQ ID NO: 2377674 - RNA, 21 nt, Human
gcuauauccauguacuguagu

SEQ ID NO: 2377675 - RNA, 15 nt, Human
gcuauaucuauauau

SEQ ID NO: 2377676 - RNA, 19 nt, Human
gcuauaucuauauauaauu

SEQ ID NO: 2377677 - RNA, 19 nt, Human
gcuauauccauguacugua

SEQ ID NO: 2377678 - RNA, 18 nt, Human
gcuauauccauguacugu

SEQ ID NO: 2377679 - RNA, 17 nt, Human
gcuauauccauguacug

SEQ ID NO: 2377680 - RNA, 15 nt, Human
gcuauauccauguac

SEQ ID NO: 2377681 - RNA, 14 nt, Human
gcuauauccaugua

SEQ ID NO: 2377682 - RNA, 23 nt, Human
gcuauaccugggcauacuaauaa

SEQ ID NO: 2377683 - RNA, 20 nt, Human
gcuauaacuauguugauaaa

SEQ ID NO: 2377684 - RNA, 23 nt, Human
gcuauaaauuccucuuugcuuug

SEQ ID NO: 2377685 - RNA, 18 nt, Human
gcuauaaauuccucuuug

SEQ ID NO: 2377686 - RNA, 18 nt, Human
gcuauaacaguagggaug

SEQ ID NO: 2377687 - RNA, 16 nt, Human
gcuauaccugugccuc

SEQ ID NO: 2377688 - RNA, 15 nt, Human
gcuauaccugugccu

SEQ ID NO: 2377689 - RNA, 17 nt, Human
gcuauaccugugccucg

SEQ ID NO: 2377690 - RNA, 21 nt, Human
gcuauacugcauacuuuuuaa

SEQ ID NO: 2377691 - RNA, 19 nt, Human
gcuauaggugcuacaaaaa

SEQ ID NO: 2377692 - RNA, 21 nt, Human
gcuauaggugcuacaaaaaca

SEQ ID NO: 2377693 - RNA, 14 nt, Human
gcucacaccuguaa

SEQ ID NO: 2377694 - RNA, 14 nt, Human
gcucacacaugaga

SEQ ID NO: 2377695 - RNA, 14 nt, Human
gcucacaccccauu

SEQ ID NO: 2377696 - RNA, 15 nt, Human
gcucacacaugagau

SEQ ID NO: 2377697 - RNA, 13 nt, Human
gcucacacaccug

SEQ ID NO: 2377698 - RNA, 23 nt, Human
gcucacaauaaaaauggcucaga

SEQ ID NO: 2377699 - RNA, 16 nt, Human
gcucaauccucuaagc

SEQ ID NO: 2377700 - RNA, 14 nt, Human
gcucaauccucuaa

SEQ ID NO: 2377701 - RNA, 22 nt, Human
gcucaauauuccugaaugaaau

SEQ ID NO: 2377702 - RNA, 20 nt, Human
gcucaauccauguucuauuu

SEQ ID NO: 2377703 - RNA, 14 nt, Human
gcucacaaaccaug

SEQ ID NO: 2377704 - RNA, 17 nt, Human
gcucaauggacuggaag

SEQ ID NO: 2377705 - RNA, 17 nt, Human
gcucaagucuucccuga

SEQ ID NO: 2377706 - RNA, 23 nt, Human
gcucaaggaaagggggucccagu

SEQ ID NO: 2377707 - RNA, 17 nt, Human
gcucaaggcgugaggau

SEQ ID NO: 2377708 - RNA, 20 nt, Human
gcucaaggaaaggccugaaa

SEQ ID NO: 2377709 - RNA, 19 nt, Human
gcucaaggaaaggccugaa

SEQ ID NO: 2377710 - RNA, 20 nt, Human
gcucaagucuucccugauca

SEQ ID NO: 2377711 - RNA, 21 nt, Human
gcucaauauuccugaaugaaa

SEQ ID NO: 2377712 - RNA, 19 nt, Human
gcucaauauuccugaauga

SEQ ID NO: 2377713 - RNA, 16 nt, Human
gcucaaucaagaaaau

SEQ ID NO: 2377714 - RNA, 19 nt, Human
gcucaaguccucuuuucug

SEQ ID NO: 2377715 - RNA, 22 nt, Human
gcucaaguccucuuuucugaga

SEQ ID NO: 2377716 - RNA, 22 nt, Human
gcucaagcagucuacccaccuc

SEQ ID NO: 2377717 - RNA, 18 nt, Human
gcucaagcgauucuccug

SEQ ID NO: 2377718 - RNA, 13 nt, Human
gcucaaggaaagg

SEQ ID NO: 2377719 - RNA, 17 nt, Human
gcucaaggaaaggccug

SEQ ID NO: 2377720 - RNA, 18 nt, Human
gcucaaguccucuuuucu

SEQ ID NO: 2377721 - RNA, 14 nt, Human
gcuaucucccccag

SEQ ID NO: 2377722 - RNA, 15 nt, Human
gcuaucucccccagc

SEQ ID NO: 2377723 - RNA, 15 nt, Human
gcuauccuggcucuu

SEQ ID NO: 2377724 - RNA, 13 nt, Human
gcuaucacacagu

SEQ ID NO: 2377725 - RNA, 15 nt, Human
gcuaucguaaaauua

SEQ ID NO: 2377726 - RNA, 16 nt, Human
gcuaucguaaaauuaa

SEQ ID NO: 2377727 - RNA, 17 nt, Human
gcuaucguaaaauuaag

SEQ ID NO: 2377728 - RNA, 13 nt, Human
gcuaucuccccca

SEQ ID NO: 2377729 - RNA, 17 nt, Human
gcucagcccaccccccu

SEQ ID NO: 2377730 - RNA, 16 nt, Human
gcucagcccacccccc

SEQ ID NO: 2377731 - RNA, 15 nt, Human
gcucagcccaccccc

SEQ ID NO: 2377732 - RNA, 14 nt, Human
gcucagcccacccc

SEQ ID NO: 2377733 - RNA, 18 nt, Human
gcucagcccaccccccuc

SEQ ID NO: 2377734 - RNA, 11 nt, Human
gcucaccuggg

SEQ ID NO: 2377735 - RNA, 17 nt, Human
gcucagccagccccauc

SEQ ID NO: 2377736 - RNA, 11 nt, Human
gcucagcccac

SEQ ID NO: 2377737 - RNA, 23 nt, Human
gcucacaguuccucgcccugggu

SEQ ID NO: 2377738 - RNA, 22 nt, Human
gcucacaguuccucgcccuggg

SEQ ID NO: 2377739 - RNA, 15 nt, Human
gcucagccagcacuu

SEQ ID NO: 2377740 - RNA, 15 nt, Human
gcucagcccucccug

SEQ ID NO: 2377741 - RNA, 16 nt, Human
gcucagcccucccugc

SEQ ID NO: 2377742 - RNA, 12 nt, Human
gcucagcccucc

SEQ ID NO: 2377743 - RNA, 14 nt, Human
gcucaccucucccu

SEQ ID NO: 2377744 - RNA, 16 nt, Human
gcucaccucucccuug

SEQ ID NO: 2377745 - RNA, 17 nt, Human
gcucaccucucccuugg

SEQ ID NO: 2377746 - RNA, 18 nt, Human
gcucaccucucccuugga

SEQ ID NO: 2377747 - RNA, 15 nt, Human
gcucacaguuccucg

SEQ ID NO: 2377748 - RNA, 13 nt, Human
gcucacaguuccu

SEQ ID NO: 2377749 - RNA, 22 nt, Human
gcucacagaacccuuggagcca

SEQ ID NO: 2377750 - RNA, 13 nt, Human
gcucacacugaga

SEQ ID NO: 2377751 - RNA, 22 nt, Human
gcucacaccccauugguggacu

SEQ ID NO: 2377752 - RNA, 21 nt, Human
gcucacacgggguauuuuagg

SEQ ID NO: 2377753 - RNA, 14 nt, Human
gcucacacugagaa

SEQ ID NO: 2377754 - RNA, 22 nt, Human
gcucacacugagaauguaagaa

SEQ ID NO: 2377755 - RNA, 16 nt, Human
gcucacauaucuguca

SEQ ID NO: 2377756 - RNA, 12 nt, Human
gcucaccagccc

SEQ ID NO: 2377757 - RNA, 13 nt, Human
gcucaccagcccc

SEQ ID NO: 2377758 - RNA, 14 nt, Human
gcucaccagcccca

SEQ ID NO: 2377759 - RNA, 21 nt, Human
gcucacaguuccucgcccugg

SEQ ID NO: 2377760 - RNA, 19 nt, Human
gcucacaguuccucgcccu

SEQ ID NO: 2377761 - RNA, 17 nt, Human
gcucacaguuccucgcc

SEQ ID NO: 2377762 - RNA, 16 nt, Human
gcucacaguuccucgc

SEQ ID NO: 2377763 - RNA, 15 nt, Human
gcucaccagccccag

SEQ ID NO: 2377764 - RNA, 16 nt, Human
gcucagcggggacagc

SEQ ID NO: 2377765 - RNA, 20 nt, Human
gcucagcccugacuggugcu

SEQ ID NO: 2377766 - RNA, 21 nt, Human
gcucagcccugacuggugcua

SEQ ID NO: 2377767 - RNA, 16 nt, Human
gcucagcccugacugg

SEQ ID NO: 2377768 - RNA, 11 nt, Human
gcucagcccug

SEQ ID NO: 2377769 - RNA, 19 nt, Human
gcucagcccugacuggugc

SEQ ID NO: 2377770 - RNA, 17 nt, Human
gcucagcccucccugcc

SEQ ID NO: 2377771 - RNA, 18 nt, Human
gcucagcccucccugccc

SEQ ID NO: 2377772 - RNA, 19 nt, Human
gcucagcccucccugcccc

SEQ ID NO: 2377773 - RNA, 21 nt, Human
gcucagcccucccugccccuc

SEQ ID NO: 2377774 - RNA, 17 nt, Human
gcucagcggggacagcu

SEQ ID NO: 2377775 - RNA, 18 nt, Human
gcucagcggggacagcuc

SEQ ID NO: 2377776 - RNA, 19 nt, Human
gcucagcggggacagcucc

SEQ ID NO: 2377777 - RNA, 23 nt, Human
gcucagcggggacagcuccuucu

SEQ ID NO: 2377778 - RNA, 12 nt, Human
gcucagcccugg

SEQ ID NO: 2377779 - RNA, 13 nt, Human
gcucagcccugga

SEQ ID NO: 2377780 - RNA, 20 nt, Human
gcucagcuacugauuuuugu

SEQ ID NO: 2377781 - RNA, 17 nt, Human
gcucagcucugggccau

SEQ ID NO: 2377782 - RNA, 16 nt, Human
gcucagcucugggcca

SEQ ID NO: 2377783 - RNA, 21 nt, Human
gcucagcuuuuugucuuuucu

SEQ ID NO: 2377784 - RNA, 16 nt, Human
gcucagcuucuccugu

SEQ ID NO: 2377785 - RNA, 11 nt, Human
gcucaggaaaa

SEQ ID NO: 2377786 - RNA, 13 nt, Human
gcucagcuucucc

SEQ ID NO: 2377787 - RNA, 12 nt, Human
gcucagcuucuc

SEQ ID NO: 2377788 - RNA, 20 nt, Human
gcucauauuccugcagccug

SEQ ID NO: 2377789 - RNA, 13 nt, Human
gcucaggaaaacg

SEQ ID NO: 2377790 - RNA, 14 nt, Human
gcucauauuuugua

SEQ ID NO: 2377791 - RNA, 22 nt, Human
gcucauauuccugcagccugga

SEQ ID NO: 2377792 - RNA, 18 nt, Human
gcucauauuuuguauaua

SEQ ID NO: 2377793 - RNA, 22 nt, Human
gcucaucucugucccacuuggc

SEQ ID NO: 2377794 - RNA, 23 nt, Human
gcucaucugcugguccgugggac

SEQ ID NO: 2377795 - RNA, 16 nt, Human
gcucaucugcuggucc

SEQ ID NO: 2377796 - RNA, 21 nt, Human
gcucaucugcugguccguggg

SEQ ID NO: 2377797 - RNA, 18 nt, Human
gcucauggacuucugcca

SEQ ID NO: 2377798 - RNA, 20 nt, Human
gcucaucauucucugucuca

SEQ ID NO: 2377799 - RNA, 19 nt, Human
gcucaucauucucugucuc

SEQ ID NO: 2377800 - RNA, 18 nt, Human
gcucaucauucucugucu

SEQ ID NO: 2377801 - RNA, 16 nt, Human
gcucaucauucucugu

SEQ ID NO: 2377802 - RNA, 13 nt, Human
gcucaucugcugg

SEQ ID NO: 2377803 - RNA, 21 nt, Human
gcucauccccaccugucuuca

SEQ ID NO: 2377804 - RNA, 16 nt, Human
gcucaucucuguccca

SEQ ID NO: 2377805 - RNA, 14 nt, Human
gcucaucugcuggu

SEQ ID NO: 2377806 - RNA, 15 nt, Human
gcucaucugcugguc

SEQ ID NO: 2377807 - RNA, 15 nt, Human
gcucauuuuuucuua

SEQ ID NO: 2377808 - RNA, 14 nt, Human
gcucauuucaggau

SEQ ID NO: 2377809 - RNA, 11 nt, Human
gcuccaggagc

SEQ ID NO: 2377810 - RNA, 12 nt, Human
gcuccaggagca

SEQ ID NO: 2377811 - RNA, 14 nt, Human
gcuccaggagcagc

SEQ ID NO: 2377812 - RNA, 17 nt, Human
gcucaugugugcaacag

SEQ ID NO: 2377813 - RNA, 22 nt, Human
gcucaugugugcaacaggguau

SEQ ID NO: 2377814 - RNA, 21 nt, Human
gcuccagcuguucagcugguu

SEQ ID NO: 2377815 - RNA, 13 nt, Human
gcuccaaacccuc

SEQ ID NO: 2377816 - RNA, 12 nt, Human
gcuccaggcucc

SEQ ID NO: 2377817 - RNA, 24 nt, Human
gcuccaggcuccuuuagcgcccag

SEQ ID NO: 2377818 - RNA, 13 nt, Human
gcuccaggcaggc

SEQ ID NO: 2377819 - RNA, 18 nt, Human
gcuccaggccagggggcc

SEQ ID NO: 2377820 - RNA, 17 nt, Human
gcuccaggccagggggc

SEQ ID NO: 2377821 - RNA, 15 nt, Human
gcuccaggagcagcc

SEQ ID NO: 2377822 - RNA, 16 nt, Human
gcuccaggagcagcca

SEQ ID NO: 2377823 - RNA, 17 nt, Human
gcuccaggagcagccac

SEQ ID NO: 2377824 - RNA, 18 nt, Human
gcuccaggagcagccaca

SEQ ID NO: 2377825 - RNA, 14 nt, Human
gcucccacaggcag

SEQ ID NO: 2377826 - RNA, 15 nt, Human
gcucccacaggcagc

SEQ ID NO: 2377827 - RNA, 16 nt, Human
gcucccacaggcagcu

SEQ ID NO: 2377828 - RNA, 15 nt, Human
gcucccuucucugua

SEQ ID NO: 2377829 - RNA, 17 nt, Human
gcucccacaggcagcuu

SEQ ID NO: 2377830 - RNA, 18 nt, Human
gcucccacaggcagcuuu

SEQ ID NO: 2377831 - RNA, 20 nt, Human
gcucccuucccaccucucuc

SEQ ID NO: 2377832 - RNA, 17 nt, Human
gcuccgccucugcuggc

SEQ ID NO: 2377833 - RNA, 14 nt, Human
gcuccgccucugcu

SEQ ID NO: 2377834 - RNA, 13 nt, Human
gcuccgccucugc

SEQ ID NO: 2377835 - RNA, 15 nt, Human
gcucccuugugcgug

SEQ ID NO: 2377836 - RNA, 16 nt, Human
gcucccuucucuguag

SEQ ID NO: 2377837 - RNA, 18 nt, Human
gcuccgcuuucuacccag

SEQ ID NO: 2377838 - RNA, 21 nt, Human
gcuccgcuuucuacccagcga

SEQ ID NO: 2377839 - RNA, 22 nt, Human
gcuccgcuuucuacccagcgag

SEQ ID NO: 2377840 - RNA, 23 nt, Human
gcuccgcuuucuacccagcgagc

SEQ ID NO: 2377841 - RNA, 11 nt, Human
gcucccaaggg

SEQ ID NO: 2377842 - RNA, 12 nt, Human
gcucccaaggga

SEQ ID NO: 2377843 - RNA, 23 nt, Human
gcucccaagggauggugcccugu

SEQ ID NO: 2377844 - RNA, 15 nt, Human
gcucccacaggcccu

SEQ ID NO: 2377845 - RNA, 15 nt, Human
gcuccagguggcucu

SEQ ID NO: 2377846 - RNA, 21 nt, Human
gcuccaggcaggcuaaggcgu

SEQ ID NO: 2377847 - RNA, 16 nt, Human
gcuccagguggcucug

SEQ ID NO: 2377848 - RNA, 18 nt, Human
gcuccagguggcucugag

SEQ ID NO: 2377849 - RNA, 21 nt, Human
gcuccagguggcucugaggug

SEQ ID NO: 2377850 - RNA, 21 nt, Human
gcuccagucaacaaacuauuu

SEQ ID NO: 2377851 - RNA, 17 nt, Human
gcuccagucugcugccc

SEQ ID NO: 2377852 - RNA, 21 nt, Human
gcuccagucugcugcccucca

SEQ ID NO: 2377853 - RNA, 20 nt, Human
gcuccagucugcugcccucc

SEQ ID NO: 2377854 - RNA, 18 nt, Human
gcuccagucugcugcccu

SEQ ID NO: 2377855 - RNA, 21 nt, Human
gcuccugucugccagccagca

SEQ ID NO: 2377856 - RNA, 20 nt, Human
gcuccugucugccagccagc

SEQ ID NO: 2377857 - RNA, 19 nt, Human
gcuccugucugccagccag

SEQ ID NO: 2377858 - RNA, 18 nt, Human
gcuccugucugccagcca

SEQ ID NO: 2377859 - RNA, 17 nt, Human
gcuccugucugccagcc

SEQ ID NO: 2377860 - RNA, 16 nt, Human
gcuccugucugccagc

SEQ ID NO: 2377861 - RNA, 14 nt, Human
gcuccugucugcca

SEQ ID NO: 2377862 - RNA, 15 nt, Human
gcuccuguccuccca

SEQ ID NO: 2377863 - RNA, 13 nt, Human
gcuccuguggccc

SEQ ID NO: 2377864 - RNA, 15 nt, Human
gcuccuguggcccca

SEQ ID NO: 2377865 - RNA, 20 nt, Human
gcuccuguggccccacccug

SEQ ID NO: 2377866 - RNA, 21 nt, Human
gcuccuguggccccacccugg

SEQ ID NO: 2377867 - RNA, 22 nt, Human
gcuccuguccucccauccccug

SEQ ID NO: 2377868 - RNA, 12 nt, Human
gcuccugugccc

SEQ ID NO: 2377869 - RNA, 13 nt, Human
gcuccugugcccu

SEQ ID NO: 2377870 - RNA, 15 nt, Human
gcuccugugcccuua

SEQ ID NO: 2377871 - RNA, 21 nt, Human
gcuccugugcuacuuugccuu

SEQ ID NO: 2377872 - RNA, 14 nt, Human
gcuccugugcuuuc

SEQ ID NO: 2377873 - RNA, 16 nt, Human
gcuccugugcuuuccc

SEQ ID NO: 2377874 - RNA, 22 nt, Human
gcuccugugcuuucccugaacu

SEQ ID NO: 2377875 - RNA, 23 nt, Human
gcuccuccagggccacgugccag

SEQ ID NO: 2377876 - RNA, 22 nt, Human
gcuccuccagggccacgugcca

SEQ ID NO: 2377877 - RNA, 18 nt, Human
gcuccuccagggccacgu

SEQ ID NO: 2377878 - RNA, 15 nt, Human
gcuccuccagggcca

SEQ ID NO: 2377879 - RNA, 20 nt, Human
gcuccuccagggugugugcu

SEQ ID NO: 2377880 - RNA, 11 nt, Human
gcuccucccac

SEQ ID NO: 2377881 - RNA, 13 nt, Human
gcuccuguccucc

SEQ ID NO: 2377882 - RNA, 19 nt, Human
gcuccuggucuugagaugu

SEQ ID NO: 2377883 - RNA, 23 nt, Human
gcuccuggggguucuuucuuccu

SEQ ID NO: 2377884 - RNA, 14 nt, Human
gcuccucccggugc

SEQ ID NO: 2377885 - RNA, 14 nt, Human
gcuccuccagggcc

SEQ ID NO: 2377886 - RNA, 21 nt, Human
gcuccucauccagggcucuga

SEQ ID NO: 2377887 - RNA, 19 nt, Human
gcuccucaugguggguuca

SEQ ID NO: 2377888 - RNA, 18 nt, Human
gcuccucauccagggcuc

SEQ ID NO: 2377889 - RNA, 18 nt, Human
gcuccucaacucaccuaa

SEQ ID NO: 2377890 - RNA, 15 nt, Human
gcuccuaucuguguu

SEQ ID NO: 2377891 - RNA, 19 nt, Human
gcuccuagagggaggggcc

SEQ ID NO: 2377892 - RNA, 18 nt, Human
gcuccuagagggaggggc

SEQ ID NO: 2377893 - RNA, 16 nt, Human
gcuccuagagggaggg

SEQ ID NO: 2377894 - RNA, 15 nt, Human
gcuccuagagggagg

SEQ ID NO: 2377895 - RNA, 14 nt, Human
gcuccuagcagaga

SEQ ID NO: 2377896 - RNA, 14 nt, Human
gcuccuaucugugu

SEQ ID NO: 2377897 - RNA, 14 nt, Human
gcuccuagagggag

SEQ ID NO: 2377898 - RNA, 13 nt, Human
gcuccuagaggga

SEQ ID NO: 2377899 - RNA, 15 nt, Human
gcuccuaagcuucaa

SEQ ID NO: 2377900 - RNA, 21 nt, Human
gcuccuacccaccgcccuugc

SEQ ID NO: 2377901 - RNA, 23 nt, Human
gcuccuaacccuuaucaccagcu

SEQ ID NO: 2377902 - RNA, 22 nt, Human
gcuccuaacccuuaucaccagc

SEQ ID NO: 2377903 - RNA, 24 nt, Human
gcuccgcuuucuacccagcgagcc

SEQ ID NO: 2377904 - RNA, 22 nt, Human
gcuccgugagugaaccaucauu

SEQ ID NO: 2377905 - RNA, 13 nt, Human
gcuccgugccucc

SEQ ID NO: 2377906 - RNA, 14 nt, Human
gcuccgugccucca

SEQ ID NO: 2377907 - RNA, 15 nt, Human
gcuccgugccuccac

SEQ ID NO: 2377908 - RNA, 16 nt, Human
gcuccgugccuccacc

SEQ ID NO: 2377909 - RNA, 17 nt, Human
gcuccgugccuccacca

SEQ ID NO: 2377910 - RNA, 23 nt, Human
gcuccguccaggagccugugccu

SEQ ID NO: 2377911 - RNA, 22 nt, Human
gcuccguccaggagccugugcc

SEQ ID NO: 2377912 - RNA, 12 nt, Human
gcuccugugucu

SEQ ID NO: 2377913 - RNA, 13 nt, Human
gcuccugugucuu

SEQ ID NO: 2377914 - RNA, 19 nt, Human
gcuccuuccugucuuccug

SEQ ID NO: 2377915 - RNA, 13 nt, Human
gcuccuuccuguc

SEQ ID NO: 2377916 - RNA, 15 nt, Human
gcuccuuccuucacc

SEQ ID NO: 2377917 - RNA, 21 nt, Human
gcuccuucucucuuacauuga

SEQ ID NO: 2377918 - RNA, 23 nt, Human
gcuccuuccuggagacugcccag

SEQ ID NO: 2377919 - RNA, 14 nt, Human
gcuccuuccuggag

SEQ ID NO: 2377920 - RNA, 22 nt, Human
gcuccuuccucugaggcugaaa

SEQ ID NO: 2377921 - RNA, 20 nt, Human
gcuccuuccucugaggcuga

SEQ ID NO: 2377922 - RNA, 23 nt, Human
gcuccuucccaggaguggaggag

SEQ ID NO: 2377923 - RNA, 13 nt, Human
gcuccuucccauc

SEQ ID NO: 2377924 - RNA, 18 nt, Human
gcuccuucccaucgcugu

SEQ ID NO: 2377925 - RNA, 18 nt, Human
gcuccuuccucugaggcu

SEQ ID NO: 2377926 - RNA, 13 nt, Human
gcuccuucugucc

SEQ ID NO: 2377927 - RNA, 19 nt, Human
gcuccuugggcccuuugag

SEQ ID NO: 2377928 - RNA, 17 nt, Human
gcuccuugggcccuuug

SEQ ID NO: 2377929 - RNA, 14 nt, Human
gcuccuugggcccu

SEQ ID NO: 2377930 - RNA, 17 nt, Human
gcuccuuuagcgcccag

SEQ ID NO: 2377931 - RNA, 14 nt, Human
gcuccuuguuccua

SEQ ID NO: 2377932 - RNA, 20 nt, Human
gcuccuuucuccagccagca

SEQ ID NO: 2377933 - RNA, 21 nt, Human
gcucgagcaugccuggauggg

SEQ ID NO: 2377934 - RNA, 19 nt, Human
gcucgagcaugccuggaug

SEQ ID NO: 2377935 - RNA, 16 nt, Human
gcuccuuguuccuaga

SEQ ID NO: 2377936 - RNA, 14 nt, Human
gcuccuuucuccag

SEQ ID NO: 2377937 - RNA, 16 nt, Human
gcuccuuucuccagcc

SEQ ID NO: 2377938 - RNA, 17 nt, Human
gcuccuuucuccagcca

SEQ ID NO: 2377939 - RNA, 18 nt, Human
gcuccuuucuccagccag

SEQ ID NO: 2377940 - RNA, 19 nt, Human
gcuccuuucuccagccagc

SEQ ID NO: 2377941 - RNA, 14 nt, Human
gccuggauucauuu

SEQ ID NO: 2377942 - RNA, 16 nt, Human
gccuggauucauuucc

SEQ ID NO: 2377943 - RNA, 18 nt, Human
gccuggauucauuuccug

SEQ ID NO: 2377944 - RNA, 19 nt, Human
gccuggauucauuuccugc

SEQ ID NO: 2377945 - RNA, 21 nt, Human
gccuggauucauuuccugccc

SEQ ID NO: 2377946 - RNA, 20 nt, Human
gccuggauggggcugcaccg

SEQ ID NO: 2377947 - RNA, 13 nt, Human
gccuggcacaggg

SEQ ID NO: 2377948 - RNA, 14 nt, Human
gccuggcacagggc

SEQ ID NO: 2377949 - RNA, 13 nt, Human
gccuggcacacau

SEQ ID NO: 2377950 - RNA, 18 nt, Human
gccuggcaagugggugaa

SEQ ID NO: 2377951 - RNA, 16 nt, Human
gccuggcacacaucag

SEQ ID NO: 2377952 - RNA, 20 nt, Human
gccuggacauuugccuugcu

SEQ ID NO: 2377953 - RNA, 17 nt, Human
gccuggacccccagcuu

SEQ ID NO: 2377954 - RNA, 13 nt, Human
gccuggaccccca

SEQ ID NO: 2377955 - RNA, 15 nt, Human
gccuggacccccagc

SEQ ID NO: 2377956 - RNA, 16 nt, Human
gccuggauggggcugc

SEQ ID NO: 2377957 - RNA, 18 nt, Human
gccuggauggggcugcac

SEQ ID NO: 2377958 - RNA, 13 nt, Human
gccugcauucugc

SEQ ID NO: 2377959 - RNA, 16 nt, Human
gccugcauguaaacac

SEQ ID NO: 2377960 - RNA, 22 nt, Human
gccugcucccagcagcccuaag

SEQ ID NO: 2377961 - RNA, 21 nt, Human
gccugcaugcuggguucugca

SEQ ID NO: 2377962 - RNA, 17 nt, Human
gccugcaguccuggaag

SEQ ID NO: 2377963 - RNA, 19 nt, Human
gccugcucccccacccccu

SEQ ID NO: 2377964 - RNA, 17 nt, Human
gccugcucccccacccc

SEQ ID NO: 2377965 - RNA, 16 nt, Human
gccugcucccccaccc

SEQ ID NO: 2377966 - RNA, 15 nt, Human
gccugcucccccacc

SEQ ID NO: 2377967 - RNA, 13 nt, Human
gccugcuccccca

SEQ ID NO: 2377968 - RNA, 11 nt, Human
gccugcucccc

SEQ ID NO: 2377969 - RNA, 23 nt, Human
gccugcugaaugauuuccaaaga

SEQ ID NO: 2377970 - RNA, 16 nt, Human
gcccagcuugggccca

SEQ ID NO: 2377971 - RNA, 18 nt, Human
gccugcugcauggggugg

SEQ ID NO: 2377972 - RNA, 11 nt, Human
gccugcugcau

SEQ ID NO: 2377973 - RNA, 10 nt, Human
gccugcugca

SEQ ID NO: 2377974 - RNA, 14 nt, Human
gccuggaagacaga

SEQ ID NO: 2377975 - RNA, 15 nt, Human
gccuggaagacagag

SEQ ID NO: 2377976 - RNA, 22 nt, Human
gccuggaagacagagaccuccu

SEQ ID NO: 2377977 - RNA, 23 nt, Human
gccuggaagacagagaccuccug

SEQ ID NO: 2377978 - RNA, 13 nt, Human
gccuggaagacag

SEQ ID NO: 2377979 - RNA, 13 nt, Human
gccugaggcuggg

SEQ ID NO: 2377980 - RNA, 18 nt, Human
gccugaggcugagacugc

SEQ ID NO: 2377981 - RNA, 17 nt, Human
gccugaggcugagacug

SEQ ID NO: 2377982 - RNA, 15 nt, Human
gccugaggcugagac

SEQ ID NO: 2377983 - RNA, 14 nt, Human
gccugaggcuggga

SEQ ID NO: 2377984 - RNA, 10 nt, Human
gccugaggga

SEQ ID NO: 2377985 - RNA, 22 nt, Human
gccugcaggaccugccuguagc

SEQ ID NO: 2377986 - RNA, 19 nt, Human
gccugcaggguggugcugg

SEQ ID NO: 2377987 - RNA, 20 nt, Human
gccugcaggguggugcuggg

SEQ ID NO: 2377988 - RNA, 21 nt, Human
gccugcaggguggugcuggga

SEQ ID NO: 2377989 - RNA, 22 nt, Human
gccugcaggguggugcugggac

SEQ ID NO: 2377990 - RNA, 23 nt, Human
gccugcaggguggugcugggacu

SEQ ID NO: 2377991 - RNA, 24 nt, Human
gccugcaggguggugcugggacug

SEQ ID NO: 2377992 - RNA, 14 nt, Human
gccugcaggugcug

SEQ ID NO: 2377993 - RNA, 16 nt, Human
gccugcaggugcugcu

SEQ ID NO: 2377994 - RNA, 19 nt, Human
gccugcaggugcugcugcg

SEQ ID NO: 2377995 - RNA, 14 nt, Human
gccugaggaugagc

SEQ ID NO: 2377996 - RNA, 23 nt, Human
gccugagcucacucggcacccug

SEQ ID NO: 2377997 - RNA, 17 nt, Human
gccugaggaugagcugg

SEQ ID NO: 2377998 - RNA, 23 nt, Human
gccugagcgcuccugccgcagag

SEQ ID NO: 2377999 - RNA, 14 nt, Human
gccugagcucacuc

SEQ ID NO: 2378000 - RNA, 17 nt, Human
gccugagcucacucggc

SEQ ID NO: 2378001 - RNA, 14 nt, Human
gccugaggcugaga

SEQ ID NO: 2378002 - RNA, 13 nt, Human
gccugaggcugag

SEQ ID NO: 2378003 - RNA, 21 nt, Human
gccugaggaugagcuggaagg

SEQ ID NO: 2378004 - RNA, 18 nt, Human
gccugaggaugagcugga

SEQ ID NO: 2378005 - RNA, 20 nt, Human
gccugaggaugagcuggaag

SEQ ID NO: 2378006 - RNA, 12 nt, Human
gccugagcuggg

SEQ ID NO: 2378007 - RNA, 22 nt, Human
gccugagcgcuccugccgcaga

SEQ ID NO: 2378008 - RNA, 17 nt, Human
gccugagccuggccagc

SEQ ID NO: 2378009 - RNA, 16 nt, Human
gccugagccuggccag

SEQ ID NO: 2378010 - RNA, 21 nt, Human
gcccaguccuggccuggcuuc

SEQ ID NO: 2378011 - RNA, 19 nt, Human
gcccaguuggguggaugcc

SEQ ID NO: 2378012 - RNA, 21 nt, Human
gcccaguuggguggaugccug

SEQ ID NO: 2378013 - RNA, 22 nt, Human
gcccaguuggguggaugccugg

SEQ ID NO: 2378014 - RNA, 16 nt, Human
gccugaagucacacag

SEQ ID NO: 2378015 - RNA, 17 nt, Human
gccugaagucacacagu

SEQ ID NO: 2378016 - RNA, 18 nt, Human
gccugaagucacacagug

SEQ ID NO: 2378017 - RNA, 20 nt, Human
gccugagcgacagugagacu

SEQ ID NO: 2378018 - RNA, 17 nt, Human
gccugagcgacagugag

SEQ ID NO: 2378019 - RNA, 23 nt, Human
gccuggguggggcugcuccucca

SEQ ID NO: 2378020 - RNA, 23 nt, Human
gccuggggcuccuuucuccagcc

SEQ ID NO: 2378021 - RNA, 17 nt, Human
gccuggggcgggccccu

SEQ ID NO: 2378022 - RNA, 22 nt, Human
gccuggggcuccuuucuccagc

SEQ ID NO: 2378023 - RNA, 24 nt, Human
gccuggguggggcugcuccuccag

SEQ ID NO: 2378024 - RNA, 20 nt, Human
gccuggguuuaaggggagag

SEQ ID NO: 2378025 - RNA, 15 nt, Human
gccugggcuguuggc

SEQ ID NO: 2378026 - RNA, 18 nt, Human
gccugggcuguuggcacu

SEQ ID NO: 2378027 - RNA, 20 nt, Human
gccugggcuguuggcacuca

SEQ ID NO: 2378028 - RNA, 13 nt, Human
gccuggucagccc

SEQ ID NO: 2378029 - RNA, 20 nt, Human
gccugguauauccaaaagcu

SEQ ID NO: 2378030 - RNA, 15 nt, Human
gccuggucagcccaa

SEQ ID NO: 2378031 - RNA, 14 nt, Human
gccuggucagccca

SEQ ID NO: 2378032 - RNA, 23 nt, Human
gccugggcucccuugugcguggg

SEQ ID NO: 2378033 - RNA, 20 nt, Human
gccugggcgacagagcgaga

SEQ ID NO: 2378034 - RNA, 21 nt, Human
gccugggccuccucacaacau

SEQ ID NO: 2378035 - RNA, 17 nt, Human
gccugggccgcugccac

SEQ ID NO: 2378036 - RNA, 18 nt, Human
gccugggccgcugccacg

SEQ ID NO: 2378037 - RNA, 22 nt, Human
gccugguccaugauggagucag

SEQ ID NO: 2378038 - RNA, 17 nt, Human
gccuggucacagggcau

SEQ ID NO: 2378039 - RNA, 14 nt, Human
gccuggucccuggg

SEQ ID NO: 2378040 - RNA, 15 nt, Human
gccuguaauccuagc

SEQ ID NO: 2378041 - RNA, 15 nt, Human
gccuggucccuggga

SEQ ID NO: 2378042 - RNA, 16 nt, Human
gccuggucccugggag

SEQ ID NO: 2378043 - RNA, 16 nt, Human
gccuguaaucccagcu

SEQ ID NO: 2378044 - RNA, 20 nt, Human
gccuguaauccuagcacuuu

SEQ ID NO: 2378045 - RNA, 18 nt, Human
gccugucucauccccagg

SEQ ID NO: 2378046 - RNA, 17 nt, Human
gccugucucauccccag

SEQ ID NO: 2378047 - RNA, 13 nt, Human
gccuguccugggc

SEQ ID NO: 2378048 - RNA, 19 nt, Human
gccuguaaucccagcuacu

SEQ ID NO: 2378049 - RNA, 19 nt, Human
gccuguacucgcuugugca

SEQ ID NO: 2378050 - RNA, 18 nt, Human
gccuguaaucccagcuac

SEQ ID NO: 2378051 - RNA, 17 nt, Human
gccuguaaucccagcua

SEQ ID NO: 2378052 - RNA, 20 nt, Human
gccuguacucgcuugugcag

SEQ ID NO: 2378053 - RNA, 22 nt, Human
gccugucuccuuugcaggcuca

SEQ ID NO: 2378054 - RNA, 21 nt, Human
gccugucuccuuugcaggcuc

SEQ ID NO: 2378055 - RNA, 13 nt, Human
gccugucuccuuu

SEQ ID NO: 2378056 - RNA, 16 nt, Human
gccuguccugggcugg

SEQ ID NO: 2378057 - RNA, 22 nt, Human
gccugucucauccccagggguc

SEQ ID NO: 2378058 - RNA, 19 nt, Human
gccugucucauccccaggg

SEQ ID NO: 2378059 - RNA, 13 nt, Human
gccugucucuucc

SEQ ID NO: 2378060 - RNA, 14 nt, Human
gccugucucuucca

SEQ ID NO: 2378061 - RNA, 12 nt, Human
gccugucugucu

SEQ ID NO: 2378062 - RNA, 14 nt, Human
gccugucugucucu

SEQ ID NO: 2378063 - RNA, 17 nt, Human
gccugucugucucucca

SEQ ID NO: 2378064 - RNA, 23 nt, Human
gccugggcagccaggcugccaag

SEQ ID NO: 2378065 - RNA, 20 nt, Human
gccugggcagccaggcugcc

SEQ ID NO: 2378066 - RNA, 18 nt, Human
gccugggcagccaggcug

SEQ ID NO: 2378067 - RNA, 17 nt, Human
gccugggcagccaggcu

SEQ ID NO: 2378068 - RNA, 19 nt, Human
gccugggcagcauagcaag

SEQ ID NO: 2378069 - RNA, 13 nt, Human
gccugggcagcau

SEQ ID NO: 2378070 - RNA, 18 nt, Human
gccuggcccccagcugug

SEQ ID NO: 2378071 - RNA, 15 nt, Human
gccuggcccccagcu

SEQ ID NO: 2378072 - RNA, 17 nt, Human
gccuggcccccuguccu

SEQ ID NO: 2378073 - RNA, 20 nt, Human
gccugggccacagggcgaga

SEQ ID NO: 2378074 - RNA, 16 nt, Human
gccugggccgcugcca

SEQ ID NO: 2378075 - RNA, 13 nt, Human
gccugggccagag

SEQ ID NO: 2378076 - RNA, 22 nt, Human
gccuggcagaacugagcuccuc

SEQ ID NO: 2378077 - RNA, 12 nt, Human
gccuggcccagc

SEQ ID NO: 2378078 - RNA, 11 nt, Human
gccuggcccag

SEQ ID NO: 2378079 - RNA, 13 nt, Human
gccuggcccagcu

SEQ ID NO: 2378080 - RNA, 14 nt, Human
gccuggcccagcuc

SEQ ID NO: 2378081 - RNA, 15 nt, Human
gccuggcccagcucc

SEQ ID NO: 2378082 - RNA, 16 nt, Human
gccuggcccagcuccc

SEQ ID NO: 2378083 - RNA, 17 nt, Human
gccuggcccagcucccc

SEQ ID NO: 2378084 - RNA, 16 nt, Human
gccuggccccaugguc

SEQ ID NO: 2378085 - RNA, 13 nt, Human
gccuggccccuca

SEQ ID NO: 2378086 - RNA, 14 nt, Human
gccuggccccucag

SEQ ID NO: 2378087 - RNA, 20 nt, Human
gccuggccagaugcaccagc

SEQ ID NO: 2378088 - RNA, 22 nt, Human
gccuggcagccgugccuucagc

SEQ ID NO: 2378089 - RNA, 16 nt, Human
gccuggccagaugcac

SEQ ID NO: 2378090 - RNA, 21 nt, Human
gccuggccagaugcaccagcc

SEQ ID NO: 2378091 - RNA, 22 nt, Human
gccuggccagaugcaccagccc

SEQ ID NO: 2378092 - RNA, 18 nt, Human
gccuggcacagggcagug

SEQ ID NO: 2378093 - RNA, 19 nt, Human
gccuggcacagggcagugg

SEQ ID NO: 2378094 - RNA, 14 nt, Human
gccuggcacacauc

SEQ ID NO: 2378095 - RNA, 20 nt, Human
gccuggauucauuuccugcc

SEQ ID NO: 2378096 - RNA, 14 nt, Human
gccuggcacagugu

SEQ ID NO: 2378097 - RNA, 16 nt, Human
gccuggcacagugucu

SEQ ID NO: 2378098 - RNA, 21 nt, Human
gccuggcacagugucugggcu

SEQ ID NO: 2378099 - RNA, 22 nt, Human
gccuggcacagugucugggcug

SEQ ID NO: 2378100 - RNA, 23 nt, Human
gccuggcacagugucugggcuga

SEQ ID NO: 2378101 - RNA, 19 nt, Human
gccuggcagaacugagcuc

SEQ ID NO: 2378102 - RNA, 18 nt, Human
gccuggcagaacugagcu

SEQ ID NO: 2378103 - RNA, 13 nt, Human
gccuggcagaacu

SEQ ID NO: 2378104 - RNA, 18 nt, Human
gccuggcacaucagaaag

SEQ ID NO: 2378105 - RNA, 12 nt, Human
gccuggcagccg

SEQ ID NO: 2378106 - RNA, 20 nt, Human
gccuggcagccgugccuuca

SEQ ID NO: 2378107 - RNA, 21 nt, Human
gccuggcagccgugccuucag

SEQ ID NO: 2378108 - RNA, 22 nt, Human
gcgcccaguccuuccaccucga

SEQ ID NO: 2378109 - RNA, 23 nt, Human
gcgccacucgcuucccccauagc

SEQ ID NO: 2378110 - RNA, 23 nt, Human
gcgcccaguuggguggaugccug

SEQ ID NO: 2378111 - RNA, 13 nt, Human
gcgccccuucccc

SEQ ID NO: 2378112 - RNA, 13 nt, Human
gcgcccgcgcccg

SEQ ID NO: 2378113 - RNA, 22 nt, Human
gcgcccccuccgcccugccacu

SEQ ID NO: 2378114 - RNA, 21 nt, Human
gcgcccccuccgcccugccac

SEQ ID NO: 2378115 - RNA, 18 nt, Human
gcgccacucgcuuccccc

SEQ ID NO: 2378116 - RNA, 16 nt, Human
gcgccacucgcuuccc

SEQ ID NO: 2378117 - RNA, 24 nt, Human
gcgccacuacacuccagccugagc

SEQ ID NO: 2378118 - RNA, 14 nt, Human
gcgccaccauccug

SEQ ID NO: 2378119 - RNA, 22 nt, Human
gcgccacuacacuccagccugg

SEQ ID NO: 2378120 - RNA, 22 nt, Human
gcgccacuacacuccagccuga

SEQ ID NO: 2378121 - RNA, 21 nt, Human
gcgccacuacacuccagccug

SEQ ID NO: 2378122 - RNA, 21 nt, Human
gcgccaagcaaccugggucca

SEQ ID NO: 2378123 - RNA, 22 nt, Human
gcgcagugcuucucuacagacu

SEQ ID NO: 2378124 - RNA, 21 nt, Human
gcgcagugccucuggucuggg

SEQ ID NO: 2378125 - RNA, 18 nt, Human
gcgcagugcuucucuaca

SEQ ID NO: 2378126 - RNA, 18 nt, Human
gcgccaaauaaugucucu

SEQ ID NO: 2378127 - RNA, 14 nt, Human
gcgccaagcaaccu

SEQ ID NO: 2378128 - RNA, 17 nt, Human
gcgccgcaaaccacacu

SEQ ID NO: 2378129 - RNA, 18 nt, Human
gcgccgcaaaccacacug

SEQ ID NO: 2378130 - RNA, 19 nt, Human
gcgccuccauccaaggcca

SEQ ID NO: 2378131 - RNA, 22 nt, Human
gcgccuccuuccuugcuguccu

SEQ ID NO: 2378132 - RNA, 15 nt, Human
gcgccuccuuccuug

SEQ ID NO: 2378133 - RNA, 20 nt, Human
gcgccgagucugucucuguc

SEQ ID NO: 2378134 - RNA, 12 nt, Human
gcgccucugcaa

SEQ ID NO: 2378135 - RNA, 18 nt, Human
gcgccugccccucccaga

SEQ ID NO: 2378136 - RNA, 16 nt, Human
gcgccuguagucccag

SEQ ID NO: 2378137 - RNA, 17 nt, Human
gcgccugccccucccag

SEQ ID NO: 2378138 - RNA, 16 nt, Human
gcgccugccccuccca

SEQ ID NO: 2378139 - RNA, 21 nt, Human
gcgccuuaaggauguucuagc

SEQ ID NO: 2378140 - RNA, 14 nt, Human
gcgcccuggaagcc

SEQ ID NO: 2378141 - RNA, 13 nt, Human
gcgcccuggaagc

SEQ ID NO: 2378142 - RNA, 13 nt, Human
gcgcccgcugggc

SEQ ID NO: 2378143 - RNA, 14 nt, Human
gcgcccgcugggcu

SEQ ID NO: 2378144 - RNA, 15 nt, Human
gcgcccgcugggcug

SEQ ID NO: 2378145 - RNA, 16 nt, Human
gcgcccgcugggcuga

SEQ ID NO: 2378146 - RNA, 13 nt, Human
gcgcccucugucc

SEQ ID NO: 2378147 - RNA, 14 nt, Human
gcgcccucuguccu

SEQ ID NO: 2378148 - RNA, 15 nt, Human
gcgcccucuguccug

SEQ ID NO: 2378149 - RNA, 16 nt, Human
gcgcccucuguccuga

SEQ ID NO: 2378150 - RNA, 12 nt, Human
gcgcccuuccuc

SEQ ID NO: 2378151 - RNA, 14 nt, Human
gcgcccuuccucuc

SEQ ID NO: 2378152 - RNA, 18 nt, Human
gcgcccuuccucuccacc

SEQ ID NO: 2378153 - RNA, 16 nt, Human
gcgcccuuccucucca

SEQ ID NO: 2378154 - RNA, 17 nt, Human
gcgccgagucugucucu

SEQ ID NO: 2378155 - RNA, 10 nt, Human
gcgcuggccc

SEQ ID NO: 2378156 - RNA, 19 nt, Human
gcgcugccugugugguguc

SEQ ID NO: 2378157 - RNA, 14 nt, Human
gcgcugccugugug

SEQ ID NO: 2378158 - RNA, 15 nt, Human
gcgcugccugugugg

SEQ ID NO: 2378159 - RNA, 11 nt, Human
gcgcuggccca

SEQ ID NO: 2378160 - RNA, 12 nt, Human
gcgcuggcccag

SEQ ID NO: 2378161 - RNA, 13 nt, Human
gcgcuggcccagc

SEQ ID NO: 2378162 - RNA, 14 nt, Human
gcgcuggcccagcc

SEQ ID NO: 2378163 - RNA, 21 nt, Human
gcgcugccgcaccccagagug

SEQ ID NO: 2378164 - RNA, 19 nt, Human
gcgcugccgcaccccagag

SEQ ID NO: 2378165 - RNA, 17 nt, Human
gcgcugccgcaccccag

SEQ ID NO: 2378166 - RNA, 16 nt, Human
gcgcugccgcacccca

SEQ ID NO: 2378167 - RNA, 13 nt, Human
gcgccuucucccc

SEQ ID NO: 2378168 - RNA, 18 nt, Human
gcgcugccccuggcagcc

SEQ ID NO: 2378169 - RNA, 21 nt, Human
gcgcugccccuggcagccccu

SEQ ID NO: 2378170 - RNA, 14 nt, Human
gcggacguuccagc

SEQ ID NO: 2378171 - RNA, 21 nt, Human
gcggaccccagcugugagccu

SEQ ID NO: 2378172 - RNA, 14 nt, Human
gcggaccccagcug

SEQ ID NO: 2378173 - RNA, 20 nt, Human
gcggaccccagcugugagcc

SEQ ID NO: 2378174 - RNA, 13 nt, Human
gcggaccccagcu

SEQ ID NO: 2378175 - RNA, 16 nt, Human
gcggagaaaggaaggg

SEQ ID NO: 2378176 - RNA, 19 nt, Human
gcggagacggagucccacc

SEQ ID NO: 2378177 - RNA, 14 nt, Human
gcggggacagcucc

SEQ ID NO: 2378178 - RNA, 15 nt, Human
gcggggacagcuccu

SEQ ID NO: 2378179 - RNA, 17 nt, Human
gcggggacagcuccuuc

SEQ ID NO: 2378180 - RNA, 15 nt, Human
gcgggugggggugga

SEQ ID NO: 2378181 - RNA, 15 nt, Human
gcgguagccagcaca

SEQ ID NO: 2378182 - RNA, 14 nt, Human
gcgggugggggugg

SEQ ID NO: 2378183 - RNA, 19 nt, Human
gcggagaaccuugugccug

SEQ ID NO: 2378184 - RNA, 23 nt, Human
gcggagaaccuugugccuggcuc

SEQ ID NO: 2378185 - RNA, 19 nt, Human
gcggguggaucaccugagg

SEQ ID NO: 2378186 - RNA, 16 nt, Human
gcggacguuccagccg

SEQ ID NO: 2378187 - RNA, 15 nt, Human
gcggacguuccagcc

SEQ ID NO: 2378188 - RNA, 18 nt, Human
gcggagaaccuugugccu

SEQ ID NO: 2378189 - RNA, 19 nt, Human
gcggugagaggggaacaga

SEQ ID NO: 2378190 - RNA, 23 nt, Human
gcgguagccagcacacagggcag

SEQ ID NO: 2378191 - RNA, 22 nt, Human
gcgguagccagcacacagggca

SEQ ID NO: 2378192 - RNA, 21 nt, Human
gcgguagccagcacacagggc

SEQ ID NO: 2378193 - RNA, 13 nt, Human
gcgguccacccag

SEQ ID NO: 2378194 - RNA, 14 nt, Human
gcgguccacccagg

SEQ ID NO: 2378195 - RNA, 12 nt, Human
gccuuguguaca

SEQ ID NO: 2378196 - RNA, 15 nt, Human
gccuugugucuacag

SEQ ID NO: 2378197 - RNA, 17 nt, Human
gccuugugucuacagag

SEQ ID NO: 2378198 - RNA, 17 nt, Human
gccuugucccagaggcu

SEQ ID NO: 2378199 - RNA, 18 nt, Human
gccuuguccccugccugu

SEQ ID NO: 2378200 - RNA, 23 nt, Human
gccuuguccccugccugugccug

SEQ ID NO: 2378201 - RNA, 21 nt, Human
gccuugguguccaccuggccc

SEQ ID NO: 2378202 - RNA, 19 nt, Human
gccuugguguccaccuggc

SEQ ID NO: 2378203 - RNA, 18 nt, Human
gccuugguguccaccugg

SEQ ID NO: 2378204 - RNA, 17 nt, Human
gccuugguguccaccug

SEQ ID NO: 2378205 - RNA, 18 nt, Human
gccuugguucccuugugu

SEQ ID NO: 2378206 - RNA, 22 nt, Human
gccuugguguccaccuggcccc

SEQ ID NO: 2378207 - RNA, 17 nt, Human
gccuuguaauucuaaau

SEQ ID NO: 2378208 - RNA, 20 nt, Human
gccuuguaauucuaaaugaa

SEQ ID NO: 2378209 - RNA, 16 nt, Human
gccuugguguccaccu

SEQ ID NO: 2378210 - RNA, 18 nt, Human
gccuuccuccacauccuu

SEQ ID NO: 2378211 - RNA, 18 nt, Human
gccuuccucucuccagau

SEQ ID NO: 2378212 - RNA, 17 nt, Human
gccuuccucucuccaga

SEQ ID NO: 2378213 - RNA, 16 nt, Human
gccuuccucucuccag

SEQ ID NO: 2378214 - RNA, 13 nt, Human
gccuuccucucuc

SEQ ID NO: 2378215 - RNA, 17 nt, Human
gccuuccuccacauccu

SEQ ID NO: 2378216 - RNA, 13 nt, Human
gccuuccuccugg

SEQ ID NO: 2378217 - RNA, 20 nt, Human
gccuuccguaacccaacucu

SEQ ID NO: 2378218 - RNA, 22 nt, Human
gccuuccuccugggcccucucu

SEQ ID NO: 2378219 - RNA, 17 nt, Human
gccuuccuccugggccc

SEQ ID NO: 2378220 - RNA, 16 nt, Human
gccuuccuccugggcc

SEQ ID NO: 2378221 - RNA, 14 nt, Human
gccuuccuccuggg

SEQ ID NO: 2378222 - RNA, 18 nt, Human
gccuuccccuugcccagg

SEQ ID NO: 2378223 - RNA, 17 nt, Human
gccuuaauuuucaguau

SEQ ID NO: 2378224 - RNA, 24 nt, Human
gccuucccuagcuuuagacccugg

SEQ ID NO: 2378225 - RNA, 23 nt, Human
gccuucccuagcuuuagacccug

SEQ ID NO: 2378226 - RNA, 16 nt, Human
gccuuacacaaugguu

SEQ ID NO: 2378227 - RNA, 16 nt, Human
gccuuaaaacuuuaau

SEQ ID NO: 2378228 - RNA, 20 nt, Human
gccugucugucucuccaucu

SEQ ID NO: 2378229 - RNA, 16 nt, Human
gccuuaaagaaagucg

SEQ ID NO: 2378230 - RNA, 15 nt, Human
gccuuacacaauggu

SEQ ID NO: 2378231 - RNA, 16 nt, Human
gcgaaggggcccuggu

SEQ ID NO: 2378232 - RNA, 15 nt, Human
gcgaaggggcccugg

SEQ ID NO: 2378233 - RNA, 14 nt, Human
gcgaaggggcccug

SEQ ID NO: 2378234 - RNA, 13 nt, Human
gccuuucugugug

SEQ ID NO: 2378235 - RNA, 16 nt, Human
gcgaauuuuaaaagau

SEQ ID NO: 2378236 - RNA, 15 nt, Human
gcgaauuuuaaaaga

SEQ ID NO: 2378237 - RNA, 14 nt, Human
gcgaaucauuuguu

SEQ ID NO: 2378238 - RNA, 14 nt, Human
gcgaauuuuaaaag

SEQ ID NO: 2378239 - RNA, 23 nt, Human
gccuuucucccaggccaggcucc

SEQ ID NO: 2378240 - RNA, 12 nt, Human
gccuuucugugu

SEQ ID NO: 2378241 - RNA, 19 nt, Human
gccuuucucgauuuuaucu

SEQ ID NO: 2378242 - RNA, 18 nt, Human
gccuuucucccaggccag

SEQ ID NO: 2378243 - RNA, 22 nt, Human
gccuuucucccaggccaggcuc

SEQ ID NO: 2378244 - RNA, 17 nt, Human
gccuuuccuguagccuu

SEQ ID NO: 2378245 - RNA, 21 nt, Human
gccuuuccuguagccuucugu

SEQ ID NO: 2378246 - RNA, 19 nt, Human
gccuuucccaacucuagcu

SEQ ID NO: 2378247 - RNA, 22 nt, Human
gccuuuccauaaggaauguagc

SEQ ID NO: 2378248 - RNA, 21 nt, Human
gccuuuccauaaggaauguag

SEQ ID NO: 2378249 - RNA, 13 nt, Human
gccuuuaaaauuu

SEQ ID NO: 2378250 - RNA, 18 nt, Human
gccuuucccaacucuagc

SEQ ID NO: 2378251 - RNA, 13 nt, Human
gcgacaaagauga

SEQ ID NO: 2378252 - RNA, 17 nt, Human
gcgcaggcuggcccugc

SEQ ID NO: 2378253 - RNA, 19 nt, Human
gcgcaggcuggcccugccc

SEQ ID NO: 2378254 - RNA, 18 nt, Human
gcgcaggcuggcccugcc

SEQ ID NO: 2378255 - RNA, 22 nt, Human
gcgcaggcuggcccugcccugg

SEQ ID NO: 2378256 - RNA, 14 nt, Human
gcgcagugccucug

SEQ ID NO: 2378257 - RNA, 15 nt, Human
gcgcagugccucugg

SEQ ID NO: 2378258 - RNA, 16 nt, Human
gcgcagugccucuggu

SEQ ID NO: 2378259 - RNA, 21 nt, Human
gcgcaggcuggcccugcccug

SEQ ID NO: 2378260 - RNA, 20 nt, Human
gcgcaggcuggcccugcccu

SEQ ID NO: 2378261 - RNA, 12 nt, Human
gcgacaaugcaa

SEQ ID NO: 2378262 - RNA, 13 nt, Human
gcgacaaugcaaa

SEQ ID NO: 2378263 - RNA, 20 nt, Human
gcgacaaugcaaaccaucau

SEQ ID NO: 2378264 - RNA, 21 nt, Human
gcgacaaugcaaaccaucauu

SEQ ID NO: 2378265 - RNA, 14 nt, Human
gcucuuuggagauc

SEQ ID NO: 2378266 - RNA, 18 nt, Human
gcucuuuggggucagcca

SEQ ID NO: 2378267 - RNA, 23 nt, Human
gcucuuugaaauagucuguguga

SEQ ID NO: 2378268 - RNA, 21 nt, Human
gcucuuugaaauagucugugu

SEQ ID NO: 2378269 - RNA, 18 nt, Human
gcucuuucugggccaagu

SEQ ID NO: 2378270 - RNA, 14 nt, Human
gcucuuucugggcc

SEQ ID NO: 2378271 - RNA, 13 nt, Human
gcucuuucugggc

SEQ ID NO: 2378272 - RNA, 18 nt, Human
gcucuuucucugccagug

SEQ ID NO: 2378273 - RNA, 21 nt, Human
gcucuuucucugccagugaca

SEQ ID NO: 2378274 - RNA, 20 nt, Human
gcucuugcuaaucagugucu

SEQ ID NO: 2378275 - RNA, 23 nt, Human
gcucuugcuaaucagugucucac

SEQ ID NO: 2378276 - RNA, 21 nt, Human
gcucuucugccggcccugggg

SEQ ID NO: 2378277 - RNA, 14 nt, Human
gcucuucuucuuuc

SEQ ID NO: 2378278 - RNA, 17 nt, Human
gcucuugauaccccccu

SEQ ID NO: 2378279 - RNA, 19 nt, Human
gcucuugauaccccccucu

SEQ ID NO: 2378280 - RNA, 20 nt, Human
gcucuugauaccccccucug

SEQ ID NO: 2378281 - RNA, 19 nt, Human
gcucuugaugccuggcggg

SEQ ID NO: 2378282 - RNA, 19 nt, Human
gcucuuggcagguacucag

SEQ ID NO: 2378283 - RNA, 22 nt, Human
gcucuugcccuucccugucccu

SEQ ID NO: 2378284 - RNA, 23 nt, Human
gcucuugcccuucccugucccuc

SEQ ID NO: 2378285 - RNA, 13 nt, Human
gcucuugcuaauc

SEQ ID NO: 2378286 - RNA, 19 nt, Human
gcucuugcuaaucaguguc

SEQ ID NO: 2378287 - RNA, 12 nt, Human
gcucuugcccuu

SEQ ID NO: 2378288 - RNA, 16 nt, Human
gcucuugcccuucccu

SEQ ID NO: 2378289 - RNA, 17 nt, Human
gcucuugcccuucccug

SEQ ID NO: 2378290 - RNA, 18 nt, Human
gcucuugcccuucccugu

SEQ ID NO: 2378291 - RNA, 19 nt, Human
gcucuugcccuucccuguc

SEQ ID NO: 2378292 - RNA, 14 nt, Human
gcucuucugccggc

SEQ ID NO: 2378293 - RNA, 19 nt, Human
gcucuccaagugccagagg

SEQ ID NO: 2378294 - RNA, 12 nt, Human
gcucuucuuaaa

SEQ ID NO: 2378295 - RNA, 13 nt, Human
gcucuccaagugc

SEQ ID NO: 2378296 - RNA, 16 nt, Human
gcucuccaagugccag

SEQ ID NO: 2378297 - RNA, 17 nt, Human
gcucuccaagugccaga

SEQ ID NO: 2378298 - RNA, 18 nt, Human
gcucuccaagugccagag

SEQ ID NO: 2378299 - RNA, 15 nt, Human
gcucuccaagcccag

SEQ ID NO: 2378300 - RNA, 18 nt, Human
gcucuccaagucucagug

SEQ ID NO: 2378301 - RNA, 22 nt, Human
gcucuccaagucucaguggcuu

SEQ ID NO: 2378302 - RNA, 21 nt, Human
gcucuugaacuccugaccuca

SEQ ID NO: 2378303 - RNA, 19 nt, Human
gcucuugaacuccugaccu

SEQ ID NO: 2378304 - RNA, 16 nt, Human
gcucuugaacuccuga

SEQ ID NO: 2378305 - RNA, 14 nt, Human
gcucuugaacuccu

SEQ ID NO: 2378306 - RNA, 14 nt, Human
gcucgauuuuguau

SEQ ID NO: 2378307 - RNA, 13 nt, Human
gcucgccaugccg

SEQ ID NO: 2378308 - RNA, 21 nt, Human
gcucgccucaggaaugggcug

SEQ ID NO: 2378309 - RNA, 22 nt, Human
gcucucaguuccgauuucccag

SEQ ID NO: 2378310 - RNA, 21 nt, Human
gcucucaggccagcugcuugg

SEQ ID NO: 2378311 - RNA, 23 nt, Human
gcugaccuugaacuccugggcuc

SEQ ID NO: 2378312 - RNA, 20 nt, Human
gcugaccuugaacuccuggg

SEQ ID NO: 2378313 - RNA, 23 nt, Human
gcugaccuuccucgcagagaggc

SEQ ID NO: 2378314 - RNA, 21 nt, Human
gcugaccuugaacuccugggc

SEQ ID NO: 2378315 - RNA, 15 nt, Human
gcugacgaacuucca

SEQ ID NO: 2378316 - RNA, 17 nt, Human
gcugaccuuccucgcag

SEQ ID NO: 2378317 - RNA, 18 nt, Human
gcugaccuuccucgcaga

SEQ ID NO: 2378318 - RNA, 19 nt, Human
gcugaccuuccucgcagag

SEQ ID NO: 2378319 - RNA, 20 nt, Human
gcugaccuuccucgcagaga

SEQ ID NO: 2378320 - RNA, 22 nt, Human
gcugaccuuccucgcagagagg

SEQ ID NO: 2378321 - RNA, 21 nt, Human
gcugaccacaggcaguuacuu

SEQ ID NO: 2378322 - RNA, 19 nt, Human
gcugaccucuguuguccuc

SEQ ID NO: 2378323 - RNA, 22 nt, Human
gcugaccucuguuguccucccc

SEQ ID NO: 2378324 - RNA, 19 nt, Human
gcugaccacagcacagcca

SEQ ID NO: 2378325 - RNA, 17 nt, Human
gcugaccacagcacagc

SEQ ID NO: 2378326 - RNA, 16 nt, Human
gcugaccacagcacag

SEQ ID NO: 2378327 - RNA, 14 nt, Human
gcugaccacagcac

SEQ ID NO: 2378328 - RNA, 19 nt, Human
gcugacgaacuuccauggc

SEQ ID NO: 2378329 - RNA, 17 nt, Human
gcugacgaacuuccaug

SEQ ID NO: 2378330 - RNA, 15 nt, Human
gcugacggccaggga

SEQ ID NO: 2378331 - RNA, 13 nt, Human
gcugacggccagg

SEQ ID NO: 2378332 - RNA, 22 nt, Human
gcugacuguuuucucuugagag

SEQ ID NO: 2378333 - RNA, 19 nt, Human
gcugacuucaucucccacc

SEQ ID NO: 2378334 - RNA, 17 nt, Human
gcugacggugcagucug

SEQ ID NO: 2378335 - RNA, 24 nt, Human
gcugacuucaucucccaccuagca

SEQ ID NO: 2378336 - RNA, 14 nt, Human
gcugaccaagagag

SEQ ID NO: 2378337 - RNA, 13 nt, Human
gcugaccaagaga

SEQ ID NO: 2378338 - RNA, 21 nt, Human
gcugacauuguggcacauucu

SEQ ID NO: 2378339 - RNA, 22 nt, Human
gcugacauuguggcacauucuu

SEQ ID NO: 2378340 - RNA, 17 nt, Human
gcugacauucaccugcc

SEQ ID NO: 2378341 - RNA, 16 nt, Human
gcugacauucaccugc

SEQ ID NO: 2378342 - RNA, 20 nt, Human
gcugaccaagagagaaagaa

SEQ ID NO: 2378343 - RNA, 16 nt, Human
gcugaccaagagagaa

SEQ ID NO: 2378344 - RNA, 15 nt, Human
gcugaccaagagaga

SEQ ID NO: 2378345 - RNA, 13 nt, Human
gcugaccacagca

SEQ ID NO: 2378346 - RNA, 20 nt, Human
gcugacagacacaggcccgg

SEQ ID NO: 2378347 - RNA, 22 nt, Human
gcucuuugguagaaaaggcuag

SEQ ID NO: 2378348 - RNA, 17 nt, Human
gcugacagacacaggcc

SEQ ID NO: 2378349 - RNA, 18 nt, Human
gcucuuugguagaaaagg

SEQ ID NO: 2378350 - RNA, 13 nt, Human
gcucuuugguaga

SEQ ID NO: 2378351 - RNA, 20 nt, Human
gcucuuuggggucagccagg

SEQ ID NO: 2378352 - RNA, 21 nt, Human
gcucuuuggggucagccaggg

SEQ ID NO: 2378353 - RNA, 22 nt, Human
gcucuuuggggucagccagggc

SEQ ID NO: 2378354 - RNA, 23 nt, Human
gcucuuuggggucagccagggcc

SEQ ID NO: 2378355 - RNA, 18 nt, Human
gcugacagacacaggccc

SEQ ID NO: 2378356 - RNA, 19 nt, Human
gcugacagacacaggcccg

SEQ ID NO: 2378357 - RNA, 14 nt, Human
gcugccacccaccu

SEQ ID NO: 2378358 - RNA, 16 nt, Human
gcugccacaccugagc

SEQ ID NO: 2378359 - RNA, 21 nt, Human
gcugccacccaccucccugcc

SEQ ID NO: 2378360 - RNA, 20 nt, Human
gcugccacccaccucccugc

SEQ ID NO: 2378361 - RNA, 19 nt, Human
gcugccacccaccucccug

SEQ ID NO: 2378362 - RNA, 17 nt, Human
gcugccacccaccuccc

SEQ ID NO: 2378363 - RNA, 12 nt, Human
gcugccaccugc

SEQ ID NO: 2378364 - RNA, 13 nt, Human
gcugccaccugcc

SEQ ID NO: 2378365 - RNA, 23 nt, Human
gcugccacccaccucccugccuc

SEQ ID NO: 2378366 - RNA, 22 nt, Human
gcugccacccaccucccugccu

SEQ ID NO: 2378367 - RNA, 16 nt, Human
gcugcccuccuugucc

SEQ ID NO: 2378368 - RNA, 20 nt, Human
gcugcccuccuuguccaccc

SEQ ID NO: 2378369 - RNA, 21 nt, Human
gcugcccuccuuguccaccca

SEQ ID NO: 2378370 - RNA, 22 nt, Human
gcugcccuccuuguccacccac

SEQ ID NO: 2378371 - RNA, 17 nt, Human
gcugccaaggccagagu

SEQ ID NO: 2378372 - RNA, 16 nt, Human
gcugccaaggccagag

SEQ ID NO: 2378373 - RNA, 20 nt, Human
gcugccaaugggagcucaug

SEQ ID NO: 2378374 - RNA, 15 nt, Human
gcugccacacuucag

SEQ ID NO: 2378375 - RNA, 17 nt, Human
gcugccacacuucaggc

SEQ ID NO: 2378376 - RNA, 18 nt, Human
gcugccacacuucaggcu

SEQ ID NO: 2378377 - RNA, 21 nt, Human
gcugccacacuucaggcucuu

SEQ ID NO: 2378378 - RNA, 22 nt, Human
gcugccacacuucaggcucuuc

SEQ ID NO: 2378379 - RNA, 23 nt, Human
gcugccacacuucaggcucuucu

SEQ ID NO: 2378380 - RNA, 20 nt, Human
gcugcagugacgugcaccug

SEQ ID NO: 2378381 - RNA, 18 nt, Human
gcugcaguaugaaaauaa

SEQ ID NO: 2378382 - RNA, 21 nt, Human
gcugcaggggcucuggagaga

SEQ ID NO: 2378383 - RNA, 17 nt, Human
gcugcaaaagugagggc

SEQ ID NO: 2378384 - RNA, 15 nt, Human
gcugcaaaggacaga

SEQ ID NO: 2378385 - RNA, 13 nt, Human
gcugcaaaggaca

SEQ ID NO: 2378386 - RNA, 22 nt, Human
gcugcaggggcucuggagagaa

SEQ ID NO: 2378387 - RNA, 13 nt, Human
gcugcaguugcca

SEQ ID NO: 2378388 - RNA, 14 nt, Human
gcugcaguugccag

SEQ ID NO: 2378389 - RNA, 15 nt, Human
gcugccaaggccaga

SEQ ID NO: 2378390 - RNA, 17 nt, Human
gcugccaaauuuuggcc

SEQ ID NO: 2378391 - RNA, 23 nt, Human
gcugcauuuuaauuuuaaccaaa

SEQ ID NO: 2378392 - RNA, 15 nt, Human
gcugccaaauuuugg

SEQ ID NO: 2378393 - RNA, 19 nt, Human
gcugcauuuaaaagauaca

SEQ ID NO: 2378394 - RNA, 18 nt, Human
gcugcauuuaaaagauac

SEQ ID NO: 2378395 - RNA, 17 nt, Human
gcugcauuuaaaagaua

SEQ ID NO: 2378396 - RNA, 17 nt, Human
gcugcaguugccaguca

SEQ ID NO: 2378397 - RNA, 20 nt, Human
gcugauauauguguuuuuca

SEQ ID NO: 2378398 - RNA, 18 nt, Human
gcugauauauguguuuuu

SEQ ID NO: 2378399 - RNA, 17 nt, Human
gcugauauauguguuuu

SEQ ID NO: 2378400 - RNA, 18 nt, Human
gcugauccagagcacaga

SEQ ID NO: 2378401 - RNA, 16 nt, Human
gcugaucagugggccu

SEQ ID NO: 2378402 - RNA, 22 nt, Human
gcugagagacccaaggaggaaa

SEQ ID NO: 2378403 - RNA, 20 nt, Human
gcugagagacccaaggagga

SEQ ID NO: 2378404 - RNA, 14 nt, Human
gcugagagacuuuu

SEQ ID NO: 2378405 - RNA, 13 nt, Human
gcugagagcccca

SEQ ID NO: 2378406 - RNA, 14 nt, Human
gcugagagccccag

SEQ ID NO: 2378407 - RNA, 15 nt, Human
gcugagagccccagc

SEQ ID NO: 2378408 - RNA, 17 nt, Human
gcugagagccccagcug

SEQ ID NO: 2378409 - RNA, 18 nt, Human
gcugagagccccagcuga

SEQ ID NO: 2378410 - RNA, 20 nt, Human
gcugagagccccagcugaca

SEQ ID NO: 2378411 - RNA, 18 nt, Human
gcugacuuugcucuuucu

SEQ ID NO: 2378412 - RNA, 14 nt, Human
gcugagaacacugu

SEQ ID NO: 2378413 - RNA, 23 nt, Human
gcugagaacccugcguggggaca

SEQ ID NO: 2378414 - RNA, 17 nt, Human
gcugagagacccaagga

SEQ ID NO: 2378415 - RNA, 15 nt, Human
gcugagagacccaag

SEQ ID NO: 2378416 - RNA, 14 nt, Human
gcugagagacccaa

SEQ ID NO: 2378417 - RNA, 22 nt, Human
gcugagagaccaggagggcacu

SEQ ID NO: 2378418 - RNA, 14 nt, Human
gcugagagaaccuc

SEQ ID NO: 2378419 - RNA, 19 nt, Human
gcugagagaccaggagggc

SEQ ID NO: 2378420 - RNA, 15 nt, Human
gcugagagaaaauaa

SEQ ID NO: 2378421 - RNA, 20 nt, Human
gcugagacuggauacugccc

SEQ ID NO: 2378422 - RNA, 19 nt, Human
gcugagacuggauacugcc

SEQ ID NO: 2378423 - RNA, 15 nt, Human
gcugagacaggagaa

SEQ ID NO: 2378424 - RNA, 14 nt, Human
gcugagacugcggg

SEQ ID NO: 2378425 - RNA, 18 nt, Human
gcugagaagcuuuugaau

SEQ ID NO: 2378426 - RNA, 13 nt, Human
gcugauucucagg

SEQ ID NO: 2378427 - RNA, 16 nt, Human
gcugaucgugcuaaau

SEQ ID NO: 2378428 - RNA, 21 nt, Human
gcugaugaacuuauucuguag

SEQ ID NO: 2378429 - RNA, 21 nt, Human
gcugauguucaguguaauuuc

SEQ ID NO: 2378430 - RNA, 20 nt, Human
gcugauguuggaagagaaag

SEQ ID NO: 2378431 - RNA, 20 nt, Human
gcugauucucagggucucug

SEQ ID NO: 2378432 - RNA, 14 nt, Human
gcugauuguauuua

SEQ ID NO: 2378433 - RNA, 21 nt, Human
gcugauuaaaccaaggcuaga

SEQ ID NO: 2378434 - RNA, 20 nt, Human
gcugauuuuaacaauaacua

SEQ ID NO: 2378435 - RNA, 14 nt, Human
gcugauuuuaacaa

SEQ ID NO: 2378436 - RNA, 15 nt, Human
gcugauuuuaacaau

SEQ ID NO: 2378437 - RNA, 17 nt, Human
gcugauuuggugaccaa

SEQ ID NO: 2378438 - RNA, 21 nt, Human
gcugauucucagggucucugc

SEQ ID NO: 2378439 - RNA, 22 nt, Human
gcugcaaaggguaucaggugcu

SEQ ID NO: 2378440 - RNA, 23 nt, Human
gcugcaaaggguaucaggugcug

SEQ ID NO: 2378441 - RNA, 16 nt, Human
gcuggccaguccaggc

SEQ ID NO: 2378442 - RNA, 17 nt, Human
gcuggccaguccaggcu

SEQ ID NO: 2378443 - RNA, 14 nt, Human
gcuggcccagccaa

SEQ ID NO: 2378444 - RNA, 12 nt, Human
gcuggcccagcc

SEQ ID NO: 2378445 - RNA, 11 nt, Human
gcuggcccagc

SEQ ID NO: 2378446 - RNA, 21 nt, Human
gcuggccagccccacagccca

SEQ ID NO: 2378447 - RNA, 18 nt, Human
gcuggccagccccacagc

SEQ ID NO: 2378448 - RNA, 19 nt, Human
gcuggccagccccacagcc

SEQ ID NO: 2378449 - RNA, 14 nt, Human
gcuggccaguccag

SEQ ID NO: 2378450 - RNA, 15 nt, Human
gcuggccaguccagg

SEQ ID NO: 2378451 - RNA, 13 nt, Human
gcuggccagcccc

SEQ ID NO: 2378452 - RNA, 14 nt, Human
gcuggccagcccca

SEQ ID NO: 2378453 - RNA, 15 nt, Human
gcuggccagccccac

SEQ ID NO: 2378454 - RNA, 16 nt, Human
gcuggccagccccaca

SEQ ID NO: 2378455 - RNA, 22 nt, Human
gcuggccagccccacagcccac

SEQ ID NO: 2378456 - RNA, 19 nt, Human
gcuggccgaggguccuggc

SEQ ID NO: 2378457 - RNA, 15 nt, Human
gcuggccgagggucc

SEQ ID NO: 2378458 - RNA, 19 nt, Human
gcuggcccuggcucccaca

SEQ ID NO: 2378459 - RNA, 24 nt, Human
gcuggccgaggguccuggcuccug

SEQ ID NO: 2378460 - RNA, 20 nt, Human
gcuggccgaggguccuggcu

SEQ ID NO: 2378461 - RNA, 15 nt, Human
gcuggcccagcccug

SEQ ID NO: 2378462 - RNA, 20 nt, Human
gcuggccgccucacccccuc

SEQ ID NO: 2378463 - RNA, 16 nt, Human
gcuggcccugcccugg

SEQ ID NO: 2378464 - RNA, 15 nt, Human
gcuggcccugcccug

SEQ ID NO: 2378465 - RNA, 14 nt, Human
gcuggcccugcccu

SEQ ID NO: 2378466 - RNA, 13 nt, Human
gcuggcccagccc

SEQ ID NO: 2378467 - RNA, 14 nt, Human
gcuggcccagcccu

SEQ ID NO: 2378468 - RNA, 13 nt, Human
gcuggcccugccc

SEQ ID NO: 2378469 - RNA, 12 nt, Human
gcuggccacugc

SEQ ID NO: 2378470 - RNA, 13 nt, Human
gcuggccacugca

SEQ ID NO: 2378471 - RNA, 19 nt, Human
gcuggccacugcacagagc

SEQ ID NO: 2378472 - RNA, 20 nt, Human
gcuggccacugcacagagcu

SEQ ID NO: 2378473 - RNA, 21 nt, Human
gcuggccacugcacagagcuc

SEQ ID NO: 2378474 - RNA, 16 nt, Human
gcuggcauuugcaccu

SEQ ID NO: 2378475 - RNA, 17 nt, Human
gcuggcaguccuggaag

SEQ ID NO: 2378476 - RNA, 18 nt, Human
gcuggcagcucuccaguc

SEQ ID NO: 2378477 - RNA, 23 nt, Human
gcuggcagcucuccagucaggag

SEQ ID NO: 2378478 - RNA, 15 nt, Human
gcuggcagcagagug

SEQ ID NO: 2378479 - RNA, 13 nt, Human
gcuggcagcucuc

SEQ ID NO: 2378480 - RNA, 13 nt, Human
gcuggcagcagag

SEQ ID NO: 2378481 - RNA, 17 nt, Human
gcuggcaccgccuucuc

SEQ ID NO: 2378482 - RNA, 14 nt, Human
gcuggcagcucucc

SEQ ID NO: 2378483 - RNA, 15 nt, Human
gcuggcagcucucca

SEQ ID NO: 2378484 - RNA, 16 nt, Human
gcuggcagcucuccag

SEQ ID NO: 2378485 - RNA, 17 nt, Human
gcuggcagcucuccagu

SEQ ID NO: 2378486 - RNA, 18 nt, Human
gcuggcaccgccuucucu

SEQ ID NO: 2378487 - RNA, 21 nt, Human
gcuggcacccaccguggagga

SEQ ID NO: 2378488 - RNA, 23 nt, Human
gcuggcacccaccguggaggagg

SEQ ID NO: 2378489 - RNA, 16 nt, Human
gcuggcacccaccgug

SEQ ID NO: 2378490 - RNA, 20 nt, Human
gcuggcacccaccguggagg

SEQ ID NO: 2378491 - RNA, 20 nt, Human
gcuggacaguaucacugucu

SEQ ID NO: 2378492 - RNA, 15 nt, Human
gcuggaccuugaacu

SEQ ID NO: 2378493 - RNA, 23 nt, Human
gcuggcacauuuccccagaccug

SEQ ID NO: 2378494 - RNA, 23 nt, Human
gcuggaccuauguccuaaggaca

SEQ ID NO: 2378495 - RNA, 20 nt, Human
gcuggaaacagacucgauuc

SEQ ID NO: 2378496 - RNA, 23 nt, Human
gcuggaaaagggucuugggaaau

SEQ ID NO: 2378497 - RNA, 15 nt, Human
gcuggaaaagggucu

SEQ ID NO: 2378498 - RNA, 22 nt, Human
gcuggaaaagggucuugggaaa

SEQ ID NO: 2378499 - RNA, 23 nt, Human
gcuggaaaaguauguuagugcaa

SEQ ID NO: 2378500 - RNA, 23 nt, Human
gcugcuuuuccuuggggcaggca

SEQ ID NO: 2378501 - RNA, 22 nt, Human
gcugcuuuuccuuggggcaggc

SEQ ID NO: 2378502 - RNA, 12 nt, Human
gcugcuuuuccu

SEQ ID NO: 2378503 - RNA, 18 nt, Human
gcugcuuuuugagguggc

SEQ ID NO: 2378504 - RNA, 19 nt, Human
gcugcuuuuugagguggca

SEQ ID NO: 2378505 - RNA, 21 nt, Human
gcuggaaaaguauguuagugc

SEQ ID NO: 2378506 - RNA, 13 nt, Human
gcuggaaggguca

SEQ ID NO: 2378507 - RNA, 21 nt, Human
gcuggaaucuggagagcuaga

SEQ ID NO: 2378508 - RNA, 16 nt, Human
gcuggaaucuggagag

SEQ ID NO: 2378509 - RNA, 19 nt, Human
gcuggaaucuggagagcua

SEQ ID NO: 2378510 - RNA, 23 nt, Human
gcuggaaugauuucagcucacug

SEQ ID NO: 2378511 - RNA, 16 nt, Human
gcuggaacagauucac

SEQ ID NO: 2378512 - RNA, 21 nt, Human
gcuggaacagauucacacugu

SEQ ID NO: 2378513 - RNA, 14 nt, Human
gcuggaagauccug

SEQ ID NO: 2378514 - RNA, 15 nt, Human
gcuggaagauccugc

SEQ ID NO: 2378515 - RNA, 17 nt, Human
gcuggaagauccugcgg

SEQ ID NO: 2378516 - RNA, 18 nt, Human
gcuggaagauccugcggg

SEQ ID NO: 2378517 - RNA, 14 nt, Human
gcugcuuuccccug

SEQ ID NO: 2378518 - RNA, 22 nt, Human
gcugcuugugucccuccuggga

SEQ ID NO: 2378519 - RNA, 23 nt, Human
gcugcuacuuaauuccuuucuca

SEQ ID NO: 2378520 - RNA, 19 nt, Human
gcugcuugugucccuccug

SEQ ID NO: 2378521 - RNA, 15 nt, Human
gcugcuuuccccugu

SEQ ID NO: 2378522 - RNA, 16 nt, Human
gcugcuuuccccugug

SEQ ID NO: 2378523 - RNA, 17 nt, Human
gcugcuuuccccugugg

SEQ ID NO: 2378524 - RNA, 18 nt, Human
gcugcuuuccccuguggg

SEQ ID NO: 2378525 - RNA, 20 nt, Human
gcugcuacccucccugcugu

SEQ ID NO: 2378526 - RNA, 21 nt, Human
gcugcuacccucccugcuguc

SEQ ID NO: 2378527 - RNA, 22 nt, Human
gcugcuacccucccugcugucc

SEQ ID NO: 2378528 - RNA, 23 nt, Human
gcugcuacccucccugcuguccc

SEQ ID NO: 2378529 - RNA, 22 nt, Human
gcugcuuuugucuaugggacuc

SEQ ID NO: 2378530 - RNA, 22 nt, Human
gcugcuuuucccuaagccaagg

SEQ ID NO: 2378531 - RNA, 19 nt, Human
gcugcuuuccccugugggg

SEQ ID NO: 2378532 - RNA, 20 nt, Human
gcugcuuuccccugugggga

SEQ ID NO: 2378533 - RNA, 21 nt, Human
gcugcuuuccccuguggggau

SEQ ID NO: 2378534 - RNA, 19 nt, Human
gcugcuuucuguugucauu

SEQ ID NO: 2378535 - RNA, 14 nt, Human
gcugcuacccagaa

SEQ ID NO: 2378536 - RNA, 23 nt, Human
gcugcuacaaagaagacauguuu

SEQ ID NO: 2378537 - RNA, 14 nt, Human
gcugcuacccuccc

SEQ ID NO: 2378538 - RNA, 16 nt, Human
gcugcuacccucccug

SEQ ID NO: 2378539 - RNA, 17 nt, Human
gcugcuacccucccugc

SEQ ID NO: 2378540 - RNA, 18 nt, Human
gcugcuacccucccugcu

SEQ ID NO: 2378541 - RNA, 19 nt, Human
gcugcuacccucccugcug

SEQ ID NO: 2378542 - RNA, 12 nt, Human
gcugcuacccag

SEQ ID NO: 2378543 - RNA, 20 nt, Human
gcugcuacaaagaagacaug

SEQ ID NO: 2378544 - RNA, 21 nt, Human
gcugcuacaaagaagacaugu

SEQ ID NO: 2378545 - RNA, 16 nt, Human
gcugcuacaaagaaga

SEQ ID NO: 2378546 - RNA, 17 nt, Human
gcugcuacaaagaagac

SEQ ID NO: 2378547 - RNA, 18 nt, Human
gcugcuacaaagaagaca

SEQ ID NO: 2378548 - RNA, 19 nt, Human
gcugcuacaaagaagacau

SEQ ID NO: 2378549 - RNA, 16 nt, Human
gcugcgucuggagggg

SEQ ID NO: 2378550 - RNA, 14 nt, Human
gcugcgugccugug

SEQ ID NO: 2378551 - RNA, 22 nt, Human
gcugcgucuggaggggccccug

SEQ ID NO: 2378552 - RNA, 18 nt, Human
gcugcuaaucuucagggc

SEQ ID NO: 2378553 - RNA, 15 nt, Human
gcugcuaaucuucag

SEQ ID NO: 2378554 - RNA, 20 nt, Human
gcugcuaaucuucagggcac

SEQ ID NO: 2378555 - RNA, 15 nt, Human
gcugcuacaaagaag

SEQ ID NO: 2378556 - RNA, 17 nt, Human
gcugcgcuugcuuuucu

SEQ ID NO: 2378557 - RNA, 16 nt, Human
gcugccuucuggauuc

SEQ ID NO: 2378558 - RNA, 17 nt, Human
gcugccuucuggauucu

SEQ ID NO: 2378559 - RNA, 19 nt, Human
gcugccuucuggauucuug

SEQ ID NO: 2378560 - RNA, 16 nt, Human
gcugccuucccuagcu

SEQ ID NO: 2378561 - RNA, 12 nt, Human
gcugccuucccu

SEQ ID NO: 2378562 - RNA, 13 nt, Human
gcugccuucccua

SEQ ID NO: 2378563 - RNA, 15 nt, Human
gcugccuucccuagc

SEQ ID NO: 2378564 - RNA, 14 nt, Human
gcugcgguccaccc

SEQ ID NO: 2378565 - RNA, 15 nt, Human
gcugcgguccaccca

SEQ ID NO: 2378566 - RNA, 14 nt, Human
gcugcggcacccuu

SEQ ID NO: 2378567 - RNA, 15 nt, Human
gcugcggcacccuug

SEQ ID NO: 2378568 - RNA, 22 nt, Human
gcugcgguccacccaggagccc

SEQ ID NO: 2378569 - RNA, 21 nt, Human
gcugcgguccacccaggagcc

SEQ ID NO: 2378570 - RNA, 20 nt, Human
gcugccuguucagcuccagc

SEQ ID NO: 2378571 - RNA, 22 nt, Human
gcugccuguucagcuccagcuc

SEQ ID NO: 2378572 - RNA, 20 nt, Human
gcugccuuagaaccuuucuu

SEQ ID NO: 2378573 - RNA, 19 nt, Human
gcugcccuggcccugaggu

SEQ ID NO: 2378574 - RNA, 23 nt, Human
gcugcccuggcccugaggugugg

SEQ ID NO: 2378575 - RNA, 17 nt, Human
gcugcccuggugcugcc

SEQ ID NO: 2378576 - RNA, 15 nt, Human
gcugccuuagaaccu

SEQ ID NO: 2378577 - RNA, 18 nt, Human
gcugccuguucagcucca

SEQ ID NO: 2378578 - RNA, 19 nt, Human
gcugccuguucagcuccag

SEQ ID NO: 2378579 - RNA, 12 nt, Human
gcugcccuggug

SEQ ID NO: 2378580 - RNA, 13 nt, Human
gcugcccuggugc

SEQ ID NO: 2378581 - RNA, 14 nt, Human
gcugcccuggugcu

SEQ ID NO: 2378582 - RNA, 15 nt, Human
gcugcccuggugcug

SEQ ID NO: 2378583 - RNA, 13 nt, Human
gcugcccuggccc

SEQ ID NO: 2378584 - RNA, 15 nt, Human
gcugcccugcggccc

SEQ ID NO: 2378585 - RNA, 15 nt, Human
gcugcccugccacuu

SEQ ID NO: 2378586 - RNA, 14 nt, Human
gcugcccuggcccu

SEQ ID NO: 2378587 - RNA, 15 nt, Human
gcugcccuggcccug

SEQ ID NO: 2378588 - RNA, 16 nt, Human
gcugcccuggcccuga

SEQ ID NO: 2378589 - RNA, 17 nt, Human
gcugcccuggcccugag

SEQ ID NO: 2378590 - RNA, 24 nt, Human
gcugcccugcccaccuggccucug

SEQ ID NO: 2378591 - RNA, 22 nt, Human
gcugcccugcccaccuggccuc

SEQ ID NO: 2378592 - RNA, 23 nt, Human
gcugcccugcccaccuggccucu

SEQ ID NO: 2378593 - RNA, 16 nt, Human
gcugcccugcccaccu

SEQ ID NO: 2378594 - RNA, 18 nt, Human
gcugcccugcccaccugg

SEQ ID NO: 2378595 - RNA, 20 nt, Human
gcugcccugcccaccuggcc

SEQ ID NO: 2378596 - RNA, 21 nt, Human
gcugcccugcccaccuggccu

SEQ ID NO: 2378597 - RNA, 13 nt, Human
gcugcccugccca

SEQ ID NO: 2378598 - RNA, 14 nt, Human
gcugcccugcccac

SEQ ID NO: 2378599 - RNA, 12 nt, Human
gcugcccugccc

SEQ ID NO: 2378600 - RNA, 13 nt, Human
gcuguccucaggu

SEQ ID NO: 2378601 - RNA, 18 nt, Human
gcuguccucagguggcca

SEQ ID NO: 2378602 - RNA, 19 nt, Human
gcuguccucagguggccau

SEQ ID NO: 2378603 - RNA, 14 nt, Human
gcuguggccagggu

SEQ ID NO: 2378604 - RNA, 16 nt, Human
gcuguggccaggguga

SEQ ID NO: 2378605 - RNA, 17 nt, Human
gcuguggccagggugag

SEQ ID NO: 2378606 - RNA, 13 nt, Human
gcuguggccaggg

SEQ ID NO: 2378607 - RNA, 14 nt, Human
gcuguggccugggc

SEQ ID NO: 2378608 - RNA, 19 nt, Human
gcuguggccagggugagag

SEQ ID NO: 2378609 - RNA, 21 nt, Human
gcuguggccagggugagagcu

SEQ ID NO: 2378610 - RNA, 15 nt, Human
gcuguggccugggca

SEQ ID NO: 2378611 - RNA, 14 nt, Human
gcugugggaacgag

SEQ ID NO: 2378612 - RNA, 17 nt, Human
gcugugggcagguggga

SEQ ID NO: 2378613 - RNA, 14 nt, Human
gcugugucuaaacu

SEQ ID NO: 2378614 - RNA, 15 nt, Human
gcugugucuaaacug

SEQ ID NO: 2378615 - RNA, 16 nt, Human
gcugugucuaaacugc

SEQ ID NO: 2378616 - RNA, 14 nt, Human
gcugugggcaggug

SEQ ID NO: 2378617 - RNA, 22 nt, Human
gcuguggccagggugagagcug

SEQ ID NO: 2378618 - RNA, 13 nt, Human
gcugugggcaggu

SEQ ID NO: 2378619 - RNA, 15 nt, Human
gcugugucucccuuc

SEQ ID NO: 2378620 - RNA, 16 nt, Human
gcuguguggcagucug

SEQ ID NO: 2378621 - RNA, 16 nt, Human
gcugugugcucuccaa

SEQ ID NO: 2378622 - RNA, 13 nt, Human
gcuguuagagucc

SEQ ID NO: 2378623 - RNA, 22 nt, Human
gcuuacaagccagcuggagaaa

SEQ ID NO: 2378624 - RNA, 18 nt, Human
gcuguuauuucuauuuuu

SEQ ID NO: 2378625 - RNA, 14 nt, Human
gcuuacaauucccu

SEQ ID NO: 2378626 - RNA, 19 nt, Human
gcuuacaauucccugcugu

SEQ ID NO: 2378627 - RNA, 20 nt, Human
gcuuacaauucccugcuguc

SEQ ID NO: 2378628 - RNA, 18 nt, Human
gcuuacacaucucagacc

SEQ ID NO: 2378629 - RNA, 11 nt, Human
gcuuacauuuu

SEQ ID NO: 2378630 - RNA, 14 nt, Human
gcuuacauuuuuac

SEQ ID NO: 2378631 - RNA, 18 nt, Human
gcuuacauuuuuacaaua

SEQ ID NO: 2378632 - RNA, 22 nt, Human
gcuuacaauuuuuuuaauuuug

SEQ ID NO: 2378633 - RNA, 23 nt, Human
gcuuacaauuuuuuuaauuuugu

SEQ ID NO: 2378634 - RNA, 12 nt, Human
gcuuacaauuuu

SEQ ID NO: 2378635 - RNA, 14 nt, Human
gcuuacaauuuuuu

SEQ ID NO: 2378636 - RNA, 19 nt, Human
gcuuacaauuuuuuuaauu

SEQ ID NO: 2378637 - RNA, 21 nt, Human
gcuuacaauuuuuuuaauuuu

SEQ ID NO: 2378638 - RNA, 13 nt, Human
gcugugugguuug

SEQ ID NO: 2378639 - RNA, 22 nt, Human
gcugugugguuugguguguucc

SEQ ID NO: 2378640 - RNA, 18 nt, Human
gcuguguuaaauaaaccu

SEQ ID NO: 2378641 - RNA, 18 nt, Human
gcuguguguuaguuccca

SEQ ID NO: 2378642 - RNA, 22 nt, Human
gcuguguguuaguucccaacau

SEQ ID NO: 2378643 - RNA, 14 nt, Human
gcuguguuccccaa

SEQ ID NO: 2378644 - RNA, 17 nt, Human
gcuguguucuggugagg

SEQ ID NO: 2378645 - RNA, 17 nt, Human
gcuguguuugagcucug

SEQ ID NO: 2378646 - RNA, 16 nt, Human
gcuguccuaggccaca

SEQ ID NO: 2378647 - RNA, 14 nt, Human
gcuguccuaggcca

SEQ ID NO: 2378648 - RNA, 13 nt, Human
gcuguccuaggcc

SEQ ID NO: 2378649 - RNA, 20 nt, Human
gcuguccccucuugccccaa

SEQ ID NO: 2378650 - RNA, 23 nt, Human
gcuguccccucuugccccaaccc

SEQ ID NO: 2378651 - RNA, 16 nt, Human
gcugucccuuuuccuu

SEQ ID NO: 2378652 - RNA, 16 nt, Human
gcuguccccucuugcc

SEQ ID NO: 2378653 - RNA, 17 nt, Human
gcuguccccucuugccc

SEQ ID NO: 2378654 - RNA, 18 nt, Human
gcuguccccucuugcccc

SEQ ID NO: 2378655 - RNA, 19 nt, Human
gcuguccccucuugcccca

SEQ ID NO: 2378656 - RNA, 23 nt, Human
gcugucccuuacgugaguccugg

SEQ ID NO: 2378657 - RNA, 22 nt, Human
gcugucaucugugcacugccca

SEQ ID NO: 2378658 - RNA, 12 nt, Human
gcuguccagaca

SEQ ID NO: 2378659 - RNA, 13 nt, Human
gcuguccagacag

SEQ ID NO: 2378660 - RNA, 14 nt, Human
gcuguccagacagc

SEQ ID NO: 2378661 - RNA, 15 nt, Human
gcuguccagacagcc

SEQ ID NO: 2378662 - RNA, 16 nt, Human
gcuguccagacagccu

SEQ ID NO: 2378663 - RNA, 18 nt, Human
gcuguccagacagccugu

SEQ ID NO: 2378664 - RNA, 22 nt, Human
gcuguccagacagccuguaucu

SEQ ID NO: 2378665 - RNA, 18 nt, Human
gcuguccagugcccauuc

SEQ ID NO: 2378666 - RNA, 23 nt, Human
gcuguccagugcccauuccucac

SEQ ID NO: 2378667 - RNA, 12 nt, Human
gcuguccagugc

SEQ ID NO: 2378668 - RNA, 14 nt, Human
gcuguccagugccc

SEQ ID NO: 2378669 - RNA, 15 nt, Human
gcuguccagugccca

SEQ ID NO: 2378670 - RNA, 16 nt, Human
gcuguccagugcccau

SEQ ID NO: 2378671 - RNA, 22 nt, Human
gcugucccaucuccacuguuau

SEQ ID NO: 2378672 - RNA, 12 nt, Human
gcuguccccucu

SEQ ID NO: 2378673 - RNA, 15 nt, Human
gcuguccccucuugc

SEQ ID NO: 2378674 - RNA, 13 nt, Human
gcugucaucucag

SEQ ID NO: 2378675 - RNA, 18 nt, Human
gcugucauaagaaugaau

SEQ ID NO: 2378676 - RNA, 16 nt, Human
gcugucaucugugcac

SEQ ID NO: 2378677 - RNA, 15 nt, Human
gcugucaucugugca

SEQ ID NO: 2378678 - RNA, 14 nt, Human
gcugucaucugugc

SEQ ID NO: 2378679 - RNA, 23 nt, Human
gcugucaucaauugaauggucag

SEQ ID NO: 2378680 - RNA, 17 nt, Human
gcugucagccauuccug

SEQ ID NO: 2378681 - RNA, 14 nt, Human
gcuggugcccggag

SEQ ID NO: 2378682 - RNA, 23 nt, Human
gcuggugccagccuuccucugca

SEQ ID NO: 2378683 - RNA, 14 nt, Human
gcuggugucaccug

SEQ ID NO: 2378684 - RNA, 15 nt, Human
gcuggugucaccuga

SEQ ID NO: 2378685 - RNA, 22 nt, Human
gcuggucaaacaaacucucuga

SEQ ID NO: 2378686 - RNA, 13 nt, Human
gcuggucacagcc

SEQ ID NO: 2378687 - RNA, 15 nt, Human
gcuggucacagccuc

SEQ ID NO: 2378688 - RNA, 17 nt, Human
gcuggucacagccuccu

SEQ ID NO: 2378689 - RNA, 18 nt, Human
gcuggucacagccuccuc

SEQ ID NO: 2378690 - RNA, 13 nt, Human
gcuggucacugcc

SEQ ID NO: 2378691 - RNA, 20 nt, Human
gcuggucacagccuccucug

SEQ ID NO: 2378692 - RNA, 22 nt, Human
gcuggucacagccuccucuguc

SEQ ID NO: 2378693 - RNA, 15 nt, Human
gcuggucacugccau

SEQ ID NO: 2378694 - RNA, 18 nt, Human
gcuggucacugccaugga

SEQ ID NO: 2378695 - RNA, 18 nt, Human
gcugggggccucagugcc

SEQ ID NO: 2378696 - RNA, 17 nt, Human
gcuggggcaagucccug

SEQ ID NO: 2378697 - RNA, 14 nt, Human
gcugggggccucag

SEQ ID NO: 2378698 - RNA, 15 nt, Human
gcugggggccucagu

SEQ ID NO: 2378699 - RNA, 14 nt, Human
gcuggggaugucuc

SEQ ID NO: 2378700 - RNA, 23 nt, Human
gcuggggacggggggccccaguc

SEQ ID NO: 2378701 - RNA, 22 nt, Human
gcuggggacggggggccccagu

SEQ ID NO: 2378702 - RNA, 20 nt, Human
gcuggggaaguccucugggu

SEQ ID NO: 2378703 - RNA, 16 nt, Human
gcuggggaccugguac

SEQ ID NO: 2378704 - RNA, 23 nt, Human
gcuggggaccugguacccuccug

SEQ ID NO: 2378705 - RNA, 20 nt, Human
gcuggucucaaacuccugac

SEQ ID NO: 2378706 - RNA, 19 nt, Human
gcuggucucaaacuccuga

SEQ ID NO: 2378707 - RNA, 22 nt, Human
gcuggucauguguuugaacuuc

SEQ ID NO: 2378708 - RNA, 15 nt, Human
gcugguccgugggac

SEQ ID NO: 2378709 - RNA, 16 nt, Human
gcugguccgugggacg

SEQ ID NO: 2378710 - RNA, 14 nt, Human
gcuggucccacuca

SEQ ID NO: 2378711 - RNA, 14 nt, Human
gcugguccagggcu

SEQ ID NO: 2378712 - RNA, 19 nt, Human
gcugguccagggcuaguga

SEQ ID NO: 2378713 - RNA, 13 nt, Human
gcuggugcccgga

SEQ ID NO: 2378714 - RNA, 15 nt, Human
gcuggugccagccuu

SEQ ID NO: 2378715 - RNA, 22 nt, Human
gcuggugccagccuuccucugc

SEQ ID NO: 2378716 - RNA, 22 nt, Human
gcuggugcauuacagagaggag

SEQ ID NO: 2378717 - RNA, 20 nt, Human
gcuggugcauuacagagagg

SEQ ID NO: 2378718 - RNA, 13 nt, Human
gcuggugccagcc

SEQ ID NO: 2378719 - RNA, 14 nt, Human
gcuggugccagccu

SEQ ID NO: 2378720 - RNA, 18 nt, Human
gcuggugcauuacagaga

SEQ ID NO: 2378721 - RNA, 17 nt, Human
gcuggugcauuacagag

SEQ ID NO: 2378722 - RNA, 13 nt, Human
gcuggugcauuac

SEQ ID NO: 2378723 - RNA, 21 nt, Human
gcuggugauggagguuucaua

SEQ ID NO: 2378724 - RNA, 19 nt, Human
gcuggugauggagguuuca

SEQ ID NO: 2378725 - RNA, 20 nt, Human
gcuggugcagagcugaagau

SEQ ID NO: 2378726 - RNA, 18 nt, Human
gcuggugagugaugcggc

SEQ ID NO: 2378727 - RNA, 20 nt, Human
gcuggugagugaugcggcag

SEQ ID NO: 2378728 - RNA, 23 nt, Human
gcuggucucgaacuccugaccuu

SEQ ID NO: 2378729 - RNA, 22 nt, Human
gcuggucucgaacuccugaccu

SEQ ID NO: 2378730 - RNA, 19 nt, Human
gcuggucucgaacuccuga

SEQ ID NO: 2378731 - RNA, 19 nt, Human
gcugggagggauagagggg

SEQ ID NO: 2378732 - RNA, 20 nt, Human
gcugggaggcauggcccugg

SEQ ID NO: 2378733 - RNA, 18 nt, Human
gcugggaguaguugucuu

SEQ ID NO: 2378734 - RNA, 16 nt, Human
gcugggaggcaagagg

SEQ ID NO: 2378735 - RNA, 21 nt, Human
gcugggaggcaagaggggugg

SEQ ID NO: 2378736 - RNA, 14 nt, Human
gcugggaggcaugg

SEQ ID NO: 2378737 - RNA, 15 nt, Human
gcugggaggcauggc

SEQ ID NO: 2378738 - RNA, 12 nt, Human
gcugggaggcaa

SEQ ID NO: 2378739 - RNA, 19 nt, Human
gcugggaugauuggagggg

SEQ ID NO: 2378740 - RNA, 21 nt, Human
gcugggcucccuucccaccuc

SEQ ID NO: 2378741 - RNA, 13 nt, Human
gcuggccuggccc

SEQ ID NO: 2378742 - RNA, 12 nt, Human
gcuggccuggcc

SEQ ID NO: 2378743 - RNA, 14 nt, Human
gcuggccuggcccc

SEQ ID NO: 2378744 - RNA, 15 nt, Human
gcuggccuggccccu

SEQ ID NO: 2378745 - RNA, 14 nt, Human
gcugggcugggcgc

SEQ ID NO: 2378746 - RNA, 13 nt, Human
gcugggcuggcuc

SEQ ID NO: 2378747 - RNA, 22 nt, Human
gcugggcuuggcagcccggguc

SEQ ID NO: 2378748 - RNA, 12 nt, Human
gcugggcugggg

SEQ ID NO: 2378749 - RNA, 21 nt, Human
gcugggcuucaguggcagcug

SEQ ID NO: 2378750 - RNA, 22 nt, Human
gcugggcuucaguggcagcugc

SEQ ID NO: 2378751 - RNA, 22 nt, Human
gcugggcucuccaccucagccu

SEQ ID NO: 2378752 - RNA, 21 nt, Human
gcugggcucuccaccucagcc

SEQ ID NO: 2378753 - RNA, 20 nt, Human
gcugggcucuccaccucagc

SEQ ID NO: 2378754 - RNA, 19 nt, Human
gcugggcucuccaccucag

SEQ ID NO: 2378755 - RNA, 13 nt, Human
gcugggcucugca

SEQ ID NO: 2378756 - RNA, 14 nt, Human
gcugggcucugcca

SEQ ID NO: 2378757 - RNA, 15 nt, Human
gcugggcucugccac

SEQ ID NO: 2378758 - RNA, 15 nt, Human
gcugggcucuccacc

SEQ ID NO: 2378759 - RNA, 14 nt, Human
gcugggcucuccac

SEQ ID NO: 2378760 - RNA, 13 nt, Human
gcugggcucucca

SEQ ID NO: 2378761 - RNA, 21 nt, Human
gcugggagggauagagggggg

SEQ ID NO: 2378762 - RNA, 20 nt, Human
gcugggcuucaguggcagcu

SEQ ID NO: 2378763 - RNA, 21 nt, Human
gcugggcucugccacccuacc

SEQ ID NO: 2378764 - RNA, 12 nt, Human
gcugggcugagc

SEQ ID NO: 2378765 - RNA, 13 nt, Human
gcugggcugagcc

SEQ ID NO: 2378766 - RNA, 14 nt, Human
gcugggcugagccc

SEQ ID NO: 2378767 - RNA, 18 nt, Human
gcugggcugagccccuac

SEQ ID NO: 2378768 - RNA, 19 nt, Human
gcugggcugagccccuacc

SEQ ID NO: 2378769 - RNA, 20 nt, Human
gcugggcugagccccuaccc

SEQ ID NO: 2378770 - RNA, 22 nt, Human
gcugggcugagccccuacccca

SEQ ID NO: 2378771 - RNA, 16 nt, Human
gcuucucauccugcag

SEQ ID NO: 2378772 - RNA, 16 nt, Human
gcuucucauacgucca

SEQ ID NO: 2378773 - RNA, 22 nt, Human
gcuuccagauugacgacaagug

SEQ ID NO: 2378774 - RNA, 23 nt, Human
gcuuccagauugacgacaagugc

SEQ ID NO: 2378775 - RNA, 17 nt, Human
gcuucucacugccaugc

SEQ ID NO: 2378776 - RNA, 22 nt, Human
gcuucucacugccaugccagcu

SEQ ID NO: 2378777 - RNA, 17 nt, Human
gcuuccaccucacccca

SEQ ID NO: 2378778 - RNA, 19 nt, Human
gcuuccaccucaccccacu

SEQ ID NO: 2378779 - RNA, 20 nt, Human
gcuuccaccucaccccacuu

SEQ ID NO: 2378780 - RNA, 13 nt, Human
gcuuccagagagu

SEQ ID NO: 2378781 - RNA, 19 nt, Human
gcuuccagagaguccucug

SEQ ID NO: 2378782 - RNA, 20 nt, Human
gcuuccagagaguccucugg

SEQ ID NO: 2378783 - RNA, 21 nt, Human
gcuuccagagaguccucugga

SEQ ID NO: 2378784 - RNA, 22 nt, Human
gcuuccagagaguccucuggau

SEQ ID NO: 2378785 - RNA, 15 nt, Human
gcuucauuagagcag

SEQ ID NO: 2378786 - RNA, 16 nt, Human
gcuucauuagagcagg

SEQ ID NO: 2378787 - RNA, 17 nt, Human
gcuucauuagagcaggc

SEQ ID NO: 2378788 - RNA, 18 nt, Human
gcuucauuagagcaggcg

SEQ ID NO: 2378789 - RNA, 18 nt, Human
gcuucauuuccugugucu

SEQ ID NO: 2378790 - RNA, 19 nt, Human
gcuuccagaaaaccccagc

SEQ ID NO: 2378791 - RNA, 12 nt, Human
gcuuccaccuca

SEQ ID NO: 2378792 - RNA, 14 nt, Human
gcuuccaccucacc

SEQ ID NO: 2378793 - RNA, 15 nt, Human
gcuuccaccucaccc

SEQ ID NO: 2378794 - RNA, 16 nt, Human
gcuuccaccucacccc

SEQ ID NO: 2378795 - RNA, 18 nt, Human
gcuuccaagguggucugc

SEQ ID NO: 2378796 - RNA, 12 nt, Human
gcuuccaauuuu

SEQ ID NO: 2378797 - RNA, 21 nt, Human
gcuuccaaggcagaagcagca

SEQ ID NO: 2378798 - RNA, 15 nt, Human
gcuuccaaggugguc

SEQ ID NO: 2378799 - RNA, 16 nt, Human
gcuuccaagguggucu

SEQ ID NO: 2378800 - RNA, 19 nt, Human
gcuucuguugcugccucau

SEQ ID NO: 2378801 - RNA, 19 nt, Human
gcuucuguuuuauaauuuu

SEQ ID NO: 2378802 - RNA, 18 nt, Human
gcuucuggagcccuuggg

SEQ ID NO: 2378803 - RNA, 17 nt, Human
gcuucuggagcccuugg

SEQ ID NO: 2378804 - RNA, 14 nt, Human
gcuucuggagcccu

SEQ ID NO: 2378805 - RNA, 13 nt, Human
gcuucuggagccc

SEQ ID NO: 2378806 - RNA, 18 nt, Human
gcuucuguugcugccuca

SEQ ID NO: 2378807 - RNA, 17 nt, Human
gcuucuguugcugccuc

SEQ ID NO: 2378808 - RNA, 17 nt, Human
gcuucucauccugcagg

SEQ ID NO: 2378809 - RNA, 18 nt, Human
gcuucucauccugcaggc

SEQ ID NO: 2378810 - RNA, 12 nt, Human
gcuucugcuggg

SEQ ID NO: 2378811 - RNA, 14 nt, Human
gcuucugcugggcu

SEQ ID NO: 2378812 - RNA, 15 nt, Human
gcuucugcugggcug

SEQ ID NO: 2378813 - RNA, 22 nt, Human
gcuucugcugggcuggggccug

SEQ ID NO: 2378814 - RNA, 16 nt, Human
gcuucugcugggcugg

SEQ ID NO: 2378815 - RNA, 17 nt, Human
gcuucugcugggcuggg

SEQ ID NO: 2378816 - RNA, 12 nt, Human
gcuucuggagcc

SEQ ID NO: 2378817 - RNA, 23 nt, Human
gcuucugcuuuucugcccuggcu

SEQ ID NO: 2378818 - RNA, 16 nt, Human
gcuucugcuuuucugc

SEQ ID NO: 2378819 - RNA, 19 nt, Human
gcuucugcuuuucugcccu

SEQ ID NO: 2378820 - RNA, 20 nt, Human
gcuucugcuuuucugcccug

SEQ ID NO: 2378821 - RNA, 21 nt, Human
gcuucugcuuuucugcccugg

SEQ ID NO: 2378822 - RNA, 13 nt, Human
gcuucugcuuuuc

SEQ ID NO: 2378823 - RNA, 14 nt, Human
gcuucugcuuuucu

SEQ ID NO: 2378824 - RNA, 15 nt, Human
gcuucugcuuuucug

SEQ ID NO: 2378825 - RNA, 19 nt, Human
gcuuacauuuuuacaauaa

SEQ ID NO: 2378826 - RNA, 21 nt, Human
gcuuacuacaugugggagcuu

SEQ ID NO: 2378827 - RNA, 23 nt, Human
gcuuacuaagcuuugccagcugc

SEQ ID NO: 2378828 - RNA, 17 nt, Human
gcuuacuaagcuuugcc

SEQ ID NO: 2378829 - RNA, 20 nt, Human
gcuuacuuuggaauacauuu

SEQ ID NO: 2378830 - RNA, 21 nt, Human
gcuuacugauauauuuuacaa

SEQ ID NO: 2378831 - RNA, 17 nt, Human
gcuuacugauauauuuu

SEQ ID NO: 2378832 - RNA, 18 nt, Human
gcuuagaccucagccugu

SEQ ID NO: 2378833 - RNA, 15 nt, Human
gcuuagacauaacaa

SEQ ID NO: 2378834 - RNA, 17 nt, Human
gcuuagaccucagccug

SEQ ID NO: 2378835 - RNA, 20 nt, Human
gcuuauacacuuacacuuua

SEQ ID NO: 2378836 - RNA, 16 nt, Human
gcuuagaccucagccu

SEQ ID NO: 2378837 - RNA, 15 nt, Human
gcuuagaccucagcc

SEQ ID NO: 2378838 - RNA, 14 nt, Human
gcuuagaccucagc

SEQ ID NO: 2378839 - RNA, 13 nt, Human
gcuuagaccucag

SEQ ID NO: 2378840 - RNA, 15 nt, Human
gcuuauagguggccu

SEQ ID NO: 2378841 - RNA, 17 nt, Human
gcuuauagguggccucu

SEQ ID NO: 2378842 - RNA, 16 nt, Human
gcuucaugacauuccu

SEQ ID NO: 2378843 - RNA, 14 nt, Human
gcuucaugccagcu

SEQ ID NO: 2378844 - RNA, 14 nt, Human
gcuucaugcucagc

SEQ ID NO: 2378845 - RNA, 17 nt, Human
gcuucauggcagaaggc

SEQ ID NO: 2378846 - RNA, 18 nt, Human
gcuucaugcucagcccug

SEQ ID NO: 2378847 - RNA, 11 nt, Human
gcuucauacac

SEQ ID NO: 2378848 - RNA, 18 nt, Human
gcuucauaaaugaagcag

SEQ ID NO: 2378849 - RNA, 22 nt, Human
gcuucauaaaugaagcagcuuu

SEQ ID NO: 2378850 - RNA, 10 nt, Human
gcuucauaca

SEQ ID NO: 2378851 - RNA, 14 nt, Human
gcuucaucuggcaa

SEQ ID NO: 2378852 - RNA, 13 nt, Human
gcuucaucuguca

SEQ ID NO: 2378853 - RNA, 18 nt, Human
gcuucaucugucaagugg

SEQ ID NO: 2378854 - RNA, 21 nt, Human
gcuucauccuccucagaucuu

SEQ ID NO: 2378855 - RNA, 23 nt, Human
gcuuaucaugcugucuuuacaug

SEQ ID NO: 2378856 - RNA, 17 nt, Human
gcuuaucaauaaaccug

SEQ ID NO: 2378857 - RNA, 19 nt, Human
gcuucaguggcagcugcuu

SEQ ID NO: 2378858 - RNA, 15 nt, Human
gcuucaguuguuuuc

SEQ ID NO: 2378859 - RNA, 18 nt, Human
gcuucaguuguuuucccg

SEQ ID NO: 2378860 - RNA, 19 nt, Human
gcuucaguuuccuggucug

SEQ ID NO: 2378861 - RNA, 14 nt, Human
gcuucauaaaugaa

SEQ ID NO: 2378862 - RNA, 20 nt, Human
gcuucaguggcagcugcuuu

SEQ ID NO: 2378863 - RNA, 21 nt, Human
gcuuuccauguugcugccaac

SEQ ID NO: 2378864 - RNA, 18 nt, Human
gcuuugggcugcccuggu

SEQ ID NO: 2378865 - RNA, 19 nt, Human
gcuuugggcugcccuggug

SEQ ID NO: 2378866 - RNA, 14 nt, Human
gcuuuccagcucac

SEQ ID NO: 2378867 - RNA, 18 nt, Human
gcuuuccacaccuggcac

SEQ ID NO: 2378868 - RNA, 11 nt, Human
gcuuuccagcu

SEQ ID NO: 2378869 - RNA, 19 nt, Human
gcuuuccauguugcugcca

SEQ ID NO: 2378870 - RNA, 16 nt, Human
gcuuuccauguugcug

SEQ ID NO: 2378871 - RNA, 15 nt, Human
gcuuuguaggugucu

SEQ ID NO: 2378872 - RNA, 16 nt, Human
gcuuuuauagaggcua

SEQ ID NO: 2378873 - RNA, 16 nt, Human
gcuuuguaggugucuc

SEQ ID NO: 2378874 - RNA, 13 nt, Human
gcuuuuaugugaa

SEQ ID NO: 2378875 - RNA, 15 nt, Human
gcuuuuaugugaaac

SEQ ID NO: 2378876 - RNA, 12 nt, Human
gcuuucaugauu

SEQ ID NO: 2378877 - RNA, 12 nt, Human
gcuuucaguauu

SEQ ID NO: 2378878 - RNA, 18 nt, Human
gcuuucaugauuagcaag

SEQ ID NO: 2378879 - RNA, 12 nt, Human
gcuuucauguaa

SEQ ID NO: 2378880 - RNA, 19 nt, Human
gcuuuaaccauuaaaacug

SEQ ID NO: 2378881 - RNA, 18 nt, Human
gcuuuaaacucagggaca

SEQ ID NO: 2378882 - RNA, 21 nt, Human
gcuuuaaacucagggacagag

SEQ ID NO: 2378883 - RNA, 22 nt, Human
gcuuuaaacucagggacagagc

SEQ ID NO: 2378884 - RNA, 14 nt, Human
gcuuuccaaagcca

SEQ ID NO: 2378885 - RNA, 21 nt, Human
gcuuucauguaaacugugcac

SEQ ID NO: 2378886 - RNA, 20 nt, Human
gcuuucauguaaacugugca

SEQ ID NO: 2378887 - RNA, 15 nt, Human
gcuuucauguaaacu

SEQ ID NO: 2378888 - RNA, 19 nt, Human
gcuuguuugcucaccuggg

SEQ ID NO: 2378889 - RNA, 23 nt, Human
gcuuguuuccuagcacacacuuu

SEQ ID NO: 2378890 - RNA, 15 nt, Human
gcuuguuuccuagca

SEQ ID NO: 2378891 - RNA, 23 nt, Human
gcuuguugggauuccugacccag

SEQ ID NO: 2378892 - RNA, 24 nt, Human
gcuuguugggauuccugacccagg

SEQ ID NO: 2378893 - RNA, 13 nt, Human
gcuuguuuacagc

SEQ ID NO: 2378894 - RNA, 20 nt, Human
gcuuguuuacagcacuacuc

SEQ ID NO: 2378895 - RNA, 23 nt, Human
gcuuguuuucuugccaaugaggu

SEQ ID NO: 2378896 - RNA, 21 nt, Human
gcuuguuugcucaccuggggu

SEQ ID NO: 2378897 - RNA, 15 nt, Human
gcuuuaaaaacuauu

SEQ ID NO: 2378898 - RNA, 20 nt, Human
gcuuuaaaaacuauuuaacu

SEQ ID NO: 2378899 - RNA, 23 nt, Human
gcuuuaaaaacuauuuaacuuga

SEQ ID NO: 2378900 - RNA, 13 nt, Human
gcuuuaaacaaau

SEQ ID NO: 2378901 - RNA, 17 nt, Human
gcuuuaaacaaauucau

SEQ ID NO: 2378902 - RNA, 22 nt, Human
gcuuuaaacauugguucuugua

SEQ ID NO: 2378903 - RNA, 16 nt, Human
gcuuuaaacacccuuc

SEQ ID NO: 2378904 - RNA, 16 nt, Human
gcuuuaaacucaggga

SEQ ID NO: 2378905 - RNA, 14 nt, Human
gcuucuuaaaugag

SEQ ID NO: 2378906 - RNA, 15 nt, Human
gcuucuuaaagaguu

SEQ ID NO: 2378907 - RNA, 22 nt, Human
gcuugccuagggccugguccau

SEQ ID NO: 2378908 - RNA, 14 nt, Human
gcuugccucggcuc

SEQ ID NO: 2378909 - RNA, 21 nt, Human
gcuugccuagggccuggucca

SEQ ID NO: 2378910 - RNA, 17 nt, Human
gcuugccuagggccugg

SEQ ID NO: 2378911 - RNA, 13 nt, Human
gcuugccuagggc

SEQ ID NO: 2378912 - RNA, 13 nt, Human
gcuugccugcagg

SEQ ID NO: 2378913 - RNA, 14 nt, Human
gcuugccugcaggc

SEQ ID NO: 2378914 - RNA, 15 nt, Human
gcuugccucggcucc

SEQ ID NO: 2378915 - RNA, 16 nt, Human
gcuugccucggcuccu

SEQ ID NO: 2378916 - RNA, 18 nt, Human
gcuugccucggcuccugc

SEQ ID NO: 2378917 - RNA, 19 nt, Human
gcuugccucggcuccugcu

SEQ ID NO: 2378918 - RNA, 20 nt, Human
gcuugccucggcuccugcug

SEQ ID NO: 2378919 - RNA, 21 nt, Human
gcuugccucggcuccugcugc

SEQ ID NO: 2378920 - RNA, 22 nt, Human
gcuugccucggcuccugcugca

SEQ ID NO: 2378921 - RNA, 23 nt, Human
gcuugccucggcuccugcugcac

SEQ ID NO: 2378922 - RNA, 18 nt, Human
gcuuggaaacuggaugag

SEQ ID NO: 2378923 - RNA, 12 nt, Human
gcuugcuuuucu

SEQ ID NO: 2378924 - RNA, 12 nt, Human
gcuugcugagag

SEQ ID NO: 2378925 - RNA, 13 nt, Human
gcuugcugagagg

SEQ ID NO: 2378926 - RNA, 21 nt, Human
gcuuggaaagcaucaccucag

SEQ ID NO: 2378927 - RNA, 19 nt, Human
gcuuggaaagcaucaccuc

SEQ ID NO: 2378928 - RNA, 15 nt, Human
gcuuggaagagccug

SEQ ID NO: 2378929 - RNA, 18 nt, Human
gcuuggaagagccugcag

SEQ ID NO: 2378930 - RNA, 23 nt, Human
gcuuggaagagccugcaggugcu

SEQ ID NO: 2378931 - RNA, 22 nt, Human
gcuugcguuagaaugaggagga

SEQ ID NO: 2378932 - RNA, 16 nt, Human
gcuugcguaugucugu

SEQ ID NO: 2378933 - RNA, 15 nt, Human
gcuugccucucuguu

SEQ ID NO: 2378934 - RNA, 19 nt, Human
gcuugccugauauaaaugc

SEQ ID NO: 2378935 - RNA, 23 nt, Human
gcuugcucuucagugggagaaaa

SEQ ID NO: 2378936 - RNA, 14 nt, Human
gcuugcucauuuuu

SEQ ID NO: 2378937 - RNA, 16 nt, Human
gcuuggacggcugggc

SEQ ID NO: 2378938 - RNA, 12 nt, Human
gcuuggacugga

SEQ ID NO: 2378939 - RNA, 14 nt, Human
gcuuggagcagagg

SEQ ID NO: 2378940 - RNA, 15 nt, Human
gcuugugcaacaaua

SEQ ID NO: 2378941 - RNA, 14 nt, Human
gcuugugcacaauu

SEQ ID NO: 2378942 - RNA, 18 nt, Human
gcuugugcagaaaacauu

SEQ ID NO: 2378943 - RNA, 21 nt, Human
gcuugugcagaaaacauuguu

SEQ ID NO: 2378944 - RNA, 22 nt, Human
gcuugugcagaaaacauuguuc

SEQ ID NO: 2378945 - RNA, 14 nt, Human
gcuuguggagcccc

SEQ ID NO: 2378946 - RNA, 19 nt, Human
gcuuguggagccccacacu

SEQ ID NO: 2378947 - RNA, 20 nt, Human
gcuuguggagccccacacug

SEQ ID NO: 2378948 - RNA, 23 nt, Human
gcuuguggauugaggguaggagg

SEQ ID NO: 2378949 - RNA, 11 nt, Human
gcuuguguauc

SEQ ID NO: 2378950 - RNA, 18 nt, Human
gcuuguguauccauuauc

SEQ ID NO: 2378951 - RNA, 19 nt, Human
gcuuguguauccauuauca

SEQ ID NO: 2378952 - RNA, 12 nt, Human
gcuuguguuaag

SEQ ID NO: 2378953 - RNA, 20 nt, Human
gcuuguguauccauuaucau

SEQ ID NO: 2378954 - RNA, 22 nt, Human
gcuuguguauccauuaucaugu

SEQ ID NO: 2378955 - RNA, 14 nt, Human
gcuuguguguuuca

SEQ ID NO: 2378956 - RNA, 15 nt, Human
gcuuguguguuucac

SEQ ID NO: 2378957 - RNA, 16 nt, Human
gcuuguguguuucacu

SEQ ID NO: 2378958 - RNA, 19 nt, Human
gcuuguguguuucacuuuu

SEQ ID NO: 2378959 - RNA, 20 nt, Human
gcuuguguguuucacuuuua

SEQ ID NO: 2378960 - RNA, 21 nt, Human
gcuuguguguuucacuuuuag

SEQ ID NO: 2378961 - RNA, 18 nt, Human
gcuuguucccucucccug

SEQ ID NO: 2378962 - RNA, 15 nt, Human
gcuuguuauuuauaa

SEQ ID NO: 2378963 - RNA, 14 nt, Human
gcuuguuggauuuu

SEQ ID NO: 2378964 - RNA, 18 nt, Human
gcuuguugggauuccuga

SEQ ID NO: 2378965 - RNA, 20 nt, Human
gcuuguugggauuccugacc

SEQ ID NO: 2378966 - RNA, 21 nt, Human
gcuuguugggauuccugaccc

SEQ ID NO: 2378967 - RNA, 22 nt, Human
gcuuguugggauuccugaccca

SEQ ID NO: 2378968 - RNA, 16 nt, Human
gcaggccaggccagcu

SEQ ID NO: 2378969 - RNA, 15 nt, Human
gcaggccaggccagc

SEQ ID NO: 2378970 - RNA, 17 nt, Human
gcaggccaggccagcug

SEQ ID NO: 2378971 - RNA, 12 nt, Human
gcaggcccugca

SEQ ID NO: 2378972 - RNA, 14 nt, Human
gcaggcccugcacu

SEQ ID NO: 2378973 - RNA, 15 nt, Human
gcaggcccugcacug

SEQ ID NO: 2378974 - RNA, 18 nt, Human
gcaggcccugcacugucc

SEQ ID NO: 2378975 - RNA, 20 nt, Human
gcaggcccugcacuguccug

SEQ ID NO: 2378976 - RNA, 23 nt, Human
gcaggcccugcacuguccugcuc

SEQ ID NO: 2378977 - RNA, 12 nt, Human
gcaggcccuggc

SEQ ID NO: 2378978 - RNA, 14 nt, Human
gcaggcccuggccu

SEQ ID NO: 2378979 - RNA, 15 nt, Human
gcaggcccuggccuc

SEQ ID NO: 2378980 - RNA, 16 nt, Human
gcaggcccuggccucc

SEQ ID NO: 2378981 - RNA, 20 nt, Human
gcaggccaagucaggcccuu

SEQ ID NO: 2378982 - RNA, 23 nt, Human
gcaggccaaggccuucuccuccc

SEQ ID NO: 2378983 - RNA, 14 nt, Human
gcaggagauugaga

SEQ ID NO: 2378984 - RNA, 19 nt, Human
gcaggccaaggccuucucc

SEQ ID NO: 2378985 - RNA, 20 nt, Human
gcaggccaaggccuucuccu

SEQ ID NO: 2378986 - RNA, 21 nt, Human
gcaggccaaggccuucuccuc

SEQ ID NO: 2378987 - RNA, 24 nt, Human
gcaggccaagagcagaggcagcga

SEQ ID NO: 2378988 - RNA, 22 nt, Human
gcaggccaagagcagaggcagc

SEQ ID NO: 2378989 - RNA, 20 nt, Human
gcaggccaagagcagaggca

SEQ ID NO: 2378990 - RNA, 16 nt, Human
gcaggcauguccugga

SEQ ID NO: 2378991 - RNA, 17 nt, Human
gcaggcauagaggcuuc

SEQ ID NO: 2378992 - RNA, 20 nt, Human
gcaggcaugcaugugcuugu

SEQ ID NO: 2378993 - RNA, 22 nt, Human
gcaggagaaucacuugcacucc

SEQ ID NO: 2378994 - RNA, 13 nt, Human
gcaggagaggaga

SEQ ID NO: 2378995 - RNA, 16 nt, Human
gcaggagaggagagcc

SEQ ID NO: 2378996 - RNA, 17 nt, Human
gcaggagaggagagcca

SEQ ID NO: 2378997 - RNA, 18 nt, Human
gcaggagaggagagccag

SEQ ID NO: 2378998 - RNA, 19 nt, Human
gcaggagaggagagccaga

SEQ ID NO: 2378999 - RNA, 20 nt, Human
gcaggagaggagagccagag

SEQ ID NO: 2379000 - RNA, 22 nt, Human
gcaggagaggagagccagagaa

SEQ ID NO: 2379001 - RNA, 19 nt, Human
gcaggacugcacagcgucc

SEQ ID NO: 2379002 - RNA, 18 nt, Human
gcaggcagccaggccaca

SEQ ID NO: 2379003 - RNA, 17 nt, Human
gcaggcagccaggccac

SEQ ID NO: 2379004 - RNA, 13 nt, Human
gcaggcagggcug

SEQ ID NO: 2379005 - RNA, 9 nt, Human
gcaggcagu

SEQ ID NO: 2379006 - RNA, 23 nt, Human
gcaggagaggagagccagagaag

SEQ ID NO: 2379007 - RNA, 13 nt, Human
gcaggcagcgcca

SEQ ID NO: 2379008 - RNA, 16 nt, Human
gcaggcagcgccaagc

SEQ ID NO: 2379009 - RNA, 22 nt, Human
gcaggcagcgccaagcaaccug

SEQ ID NO: 2379010 - RNA, 18 nt, Human
gcaggcagcgccaagcaa

SEQ ID NO: 2379011 - RNA, 21 nt, Human
gcaggcagcgccaagcaaccu

SEQ ID NO: 2379012 - RNA, 14 nt, Human
gcaggcggugggca

SEQ ID NO: 2379013 - RNA, 15 nt, Human
gcaggcggugggcac

SEQ ID NO: 2379014 - RNA, 16 nt, Human
gcaggcggugggcacc

SEQ ID NO: 2379015 - RNA, 23 nt, Human
gcaggcggugggcacccacccug

SEQ ID NO: 2379016 - RNA, 23 nt, Human
gcaggccucgaaaaccaucacau

SEQ ID NO: 2379017 - RNA, 21 nt, Human
gcaggcccugcacuguccugc

SEQ ID NO: 2379018 - RNA, 15 nt, Human
gcagggaggggacua

SEQ ID NO: 2379019 - RNA, 14 nt, Human
gcagggaggggacu

SEQ ID NO: 2379020 - RNA, 23 nt, Human
gcagggaugcccuggagguggcu

SEQ ID NO: 2379021 - RNA, 21 nt, Human
gcagggaugcccuggaggugg

SEQ ID NO: 2379022 - RNA, 13 nt, Human
gcagggaugcccu

SEQ ID NO: 2379023 - RNA, 14 nt, Human
gcagggauccuggu

SEQ ID NO: 2379024 - RNA, 19 nt, Human
gcagggauuaaccucugca

SEQ ID NO: 2379025 - RNA, 22 nt, Human
gcagggauuaaccucugcacua

SEQ ID NO: 2379026 - RNA, 15 nt, Human
gcagggauugcugcc

SEQ ID NO: 2379027 - RNA, 14 nt, Human
gcagggauuugagg

SEQ ID NO: 2379028 - RNA, 19 nt, Human
gcagggauugcugccacuu

SEQ ID NO: 2379029 - RNA, 22 nt, Human
gcagggauugcugccacuuuuu

SEQ ID NO: 2379030 - RNA, 15 nt, Human
gcagggauuugagga

SEQ ID NO: 2379031 - RNA, 12 nt, Human
gcagggcucagg

SEQ ID NO: 2379032 - RNA, 21 nt, Human
gcagggcucaggauuucgugg

SEQ ID NO: 2379033 - RNA, 13 nt, Human
gcagggcucagga

SEQ ID NO: 2379034 - RNA, 14 nt, Human
gcagggcucaggau

SEQ ID NO: 2379035 - RNA, 19 nt, Human
gcaggguccuagaaauucc

SEQ ID NO: 2379036 - RNA, 16 nt, Human
gcagggucucacucug

SEQ ID NO: 2379037 - RNA, 14 nt, Human
gcaggucccuaaua

SEQ ID NO: 2379038 - RNA, 15 nt, Human
gcaggucccuaauaa

SEQ ID NO: 2379039 - RNA, 16 nt, Human
gcagggucaggagagg

SEQ ID NO: 2379040 - RNA, 15 nt, Human
gcagggucaggagag

SEQ ID NO: 2379041 - RNA, 14 nt, Human
gcagggucaggaga

SEQ ID NO: 2379042 - RNA, 22 nt, Human
gcaggggaggguagagcggaga

SEQ ID NO: 2379043 - RNA, 12 nt, Human
gcagggcucuga

SEQ ID NO: 2379044 - RNA, 16 nt, Human
gcagggcucugcccca

SEQ ID NO: 2379045 - RNA, 23 nt, Human
gcagggcucucuuuccuucuugc

SEQ ID NO: 2379046 - RNA, 21 nt, Human
gcagggcucugccccagaggc

SEQ ID NO: 2379047 - RNA, 19 nt, Human
gcagggcucugccccagag

SEQ ID NO: 2379048 - RNA, 17 nt, Human
gcagggucaggagaggg

SEQ ID NO: 2379049 - RNA, 21 nt, Human
gcagggucccauuucucacug

SEQ ID NO: 2379050 - RNA, 16 nt, Human
gcaguggcucacgccu

SEQ ID NO: 2379051 - RNA, 23 nt, Human
gcaggucccuaauaaagcugugu

SEQ ID NO: 2379052 - RNA, 20 nt, Human
gcaggucccuaauaaagcug

SEQ ID NO: 2379053 - RNA, 21 nt, Human
gcaggucccuaauaaagcugu

SEQ ID NO: 2379054 - RNA, 16 nt, Human
gcaggucccuaauaaa

SEQ ID NO: 2379055 - RNA, 17 nt, Human
gcaggucccuaauaaag

SEQ ID NO: 2379056 - RNA, 18 nt, Human
gcaggucccuaauaaagc

SEQ ID NO: 2379057 - RNA, 19 nt, Human
gcaggucccuaauaaagcu

SEQ ID NO: 2379058 - RNA, 11 nt, Human
gcagugggagc

SEQ ID NO: 2379059 - RNA, 16 nt, Human
gcagugggccuggcca

SEQ ID NO: 2379060 - RNA, 21 nt, Human
gcagugggacagggcauggcc

SEQ ID NO: 2379061 - RNA, 20 nt, Human
gcaguggcugguccagggcu

SEQ ID NO: 2379062 - RNA, 14 nt, Human
gcaguggcuggucc

SEQ ID NO: 2379063 - RNA, 15 nt, Human
gcaguggcuggucca

SEQ ID NO: 2379064 - RNA, 18 nt, Human
gcaguggcugguccaggg

SEQ ID NO: 2379065 - RNA, 19 nt, Human
gcaguggcugguccagggc

SEQ ID NO: 2379066 - RNA, 18 nt, Human
gcagugguaagcucuggc

SEQ ID NO: 2379067 - RNA, 22 nt, Human
gcagugggucccacuuccccuc

SEQ ID NO: 2379068 - RNA, 23 nt, Human
gcagugggucccacuuccccucc

SEQ ID NO: 2379069 - RNA, 11 nt, Human
gcagugggucc

SEQ ID NO: 2379070 - RNA, 18 nt, Human
gcagugggucccacuucc

SEQ ID NO: 2379071 - RNA, 19 nt, Human
gcagugggucccacuuccc

SEQ ID NO: 2379072 - RNA, 21 nt, Human
gcagugggucccacuuccccu

SEQ ID NO: 2379073 - RNA, 17 nt, Human
gcagugggccuggccag

SEQ ID NO: 2379074 - RNA, 18 nt, Human
gcaguggugcgaucuggg

SEQ ID NO: 2379075 - RNA, 19 nt, Human
gcaguggugcgaucugggu

SEQ ID NO: 2379076 - RNA, 19 nt, Human
gcaguucagcaccacccua

SEQ ID NO: 2379077 - RNA, 17 nt, Human
gcaguucagcaccaccc

SEQ ID NO: 2379078 - RNA, 23 nt, Human
gcaguucccccaaccucagacuu

SEQ ID NO: 2379079 - RNA, 19 nt, Human
gcaguugaaaagacuccaa

SEQ ID NO: 2379080 - RNA, 16 nt, Human
gcaguugaaaagacuc

SEQ ID NO: 2379081 - RNA, 19 nt, Human
gcauacguacacauuuuau

SEQ ID NO: 2379082 - RNA, 21 nt, Human
gcaguugaaaagacuccaaag

SEQ ID NO: 2379083 - RNA, 16 nt, Human
gcauacuaauaaagua

SEQ ID NO: 2379084 - RNA, 20 nt, Human
gcaguucccccaaccucaga

SEQ ID NO: 2379085 - RNA, 22 nt, Human
gcaguggugcgaucuggguuca

SEQ ID NO: 2379086 - RNA, 19 nt, Human
gcaguggugguuuucuguu

SEQ ID NO: 2379087 - RNA, 20 nt, Human
gcaguggugcgaucuggguu

SEQ ID NO: 2379088 - RNA, 21 nt, Human
gcaguggugcgaucuggguuc

SEQ ID NO: 2379089 - RNA, 21 nt, Human
gcaguggugguuuucuguucu

SEQ ID NO: 2379090 - RNA, 20 nt, Human
gcaguggugguuuucuguuc

SEQ ID NO: 2379091 - RNA, 15 nt, Human
gcauccaccuccuuc

SEQ ID NO: 2379092 - RNA, 16 nt, Human
gcauccaccuccuucu

SEQ ID NO: 2379093 - RNA, 15 nt, Human
gcauccaaaggugcu

SEQ ID NO: 2379094 - RNA, 12 nt, Human
gcauccaccucc

SEQ ID NO: 2379095 - RNA, 14 nt, Human
gcaucuaucucauc

SEQ ID NO: 2379096 - RNA, 13 nt, Human
gcaucucagccca

SEQ ID NO: 2379097 - RNA, 14 nt, Human
gcaucucagcccac

SEQ ID NO: 2379098 - RNA, 17 nt, Human
gcauccaccuccuucuc

SEQ ID NO: 2379099 - RNA, 12 nt, Human
gcaucucagccc

SEQ ID NO: 2379100 - RNA, 23 nt, Human
gcaucagugcccuccaggauaga

SEQ ID NO: 2379101 - RNA, 19 nt, Human
gcaucagucccuauguauu

SEQ ID NO: 2379102 - RNA, 22 nt, Human
gcaucauuauuugcagagacag

SEQ ID NO: 2379103 - RNA, 20 nt, Human
gcaucauuuugcauucaaau

SEQ ID NO: 2379104 - RNA, 20 nt, Human
gcaucauucuuguuaauuau

SEQ ID NO: 2379105 - RNA, 13 nt, Human
gcaucauggcuau

SEQ ID NO: 2379106 - RNA, 15 nt, Human
gcaucagugcccucc

SEQ ID NO: 2379107 - RNA, 12 nt, Human
gcaucaggguua

SEQ ID NO: 2379108 - RNA, 23 nt, Human
gcaucaggccaggcccucugccc

SEQ ID NO: 2379109 - RNA, 18 nt, Human
gcauacuucaaaaguauu

SEQ ID NO: 2379110 - RNA, 21 nt, Human
gcauacuucaaaaguauuuuc

SEQ ID NO: 2379111 - RNA, 17 nt, Human
gcaucagcuggcgucau

SEQ ID NO: 2379112 - RNA, 21 nt, Human
gcaucagcuggcgucaugcaa

SEQ ID NO: 2379113 - RNA, 18 nt, Human
gcaucaggccaggcccuc

SEQ ID NO: 2379114 - RNA, 13 nt, Human
gcauacuucaaaa

SEQ ID NO: 2379115 - RNA, 14 nt, Human
gcauacuucaaaag

SEQ ID NO: 2379116 - RNA, 16 nt, Human
gcauacuucaaaagua

SEQ ID NO: 2379117 - RNA, 17 nt, Human
gcauacuucaaaaguau

SEQ ID NO: 2379118 - RNA, 22 nt, Human
gcaucagcugcugaaacaacaa

SEQ ID NO: 2379119 - RNA, 12 nt, Human
gcaucaggccag

SEQ ID NO: 2379120 - RNA, 23 nt, Human
gcaucagcugcugaaacaacaaa

SEQ ID NO: 2379121 - RNA, 15 nt, Human
gcaucuccugugcau

SEQ ID NO: 2379122 - RNA, 16 nt, Human
gcaucuccaggaaggc

SEQ ID NO: 2379123 - RNA, 17 nt, Human
gcaucucccucacugaa

SEQ ID NO: 2379124 - RNA, 16 nt, Human
gcaucuccugugcaug

SEQ ID NO: 2379125 - RNA, 20 nt, Human
gcaucucccucacugaaacc

SEQ ID NO: 2379126 - RNA, 21 nt, Human
gcaucucccagauaaugugaa

SEQ ID NO: 2379127 - RNA, 13 nt, Human
gcaucucccagau

SEQ ID NO: 2379128 - RNA, 12 nt, Human
gcaucucccaga

SEQ ID NO: 2379129 - RNA, 13 nt, Human
gcaucuccaggaa

SEQ ID NO: 2379130 - RNA, 14 nt, Human
gcaucuccaggaag

SEQ ID NO: 2379131 - RNA, 15 nt, Human
gcaucucagcccaca

SEQ ID NO: 2379132 - RNA, 15 nt, Human
gcaucuccaccugcu

SEQ ID NO: 2379133 - RNA, 17 nt, Human
gcaucuccaccugcucc

SEQ ID NO: 2379134 - RNA, 18 nt, Human
gcaucuccaccugcuccc

SEQ ID NO: 2379135 - RNA, 20 nt, Human
gcaucuccaccugcucccag

SEQ ID NO: 2379136 - RNA, 12 nt, Human
gcaucuccagga

SEQ ID NO: 2379137 - RNA, 17 nt, Human
gcaucugccccuccccc

SEQ ID NO: 2379138 - RNA, 15 nt, Human
gcaucugccccuccc

SEQ ID NO: 2379139 - RNA, 14 nt, Human
gcaucugccccucc

SEQ ID NO: 2379140 - RNA, 12 nt, Human
gcaucugccccu

SEQ ID NO: 2379141 - RNA, 16 nt, Human
gcaucugggauuccca

SEQ ID NO: 2379142 - RNA, 20 nt, Human
gcaucugggauucccaccaa

SEQ ID NO: 2379143 - RNA, 23 nt, Human
gcaucugggauucccaccaaggu

SEQ ID NO: 2379144 - RNA, 18 nt, Human
gcaucugccccuccccca

SEQ ID NO: 2379145 - RNA, 18 nt, Human
gcaucugcuaauaaaacc

SEQ ID NO: 2379146 - RNA, 17 nt, Human
gcaucuggguagcugua

SEQ ID NO: 2379147 - RNA, 11 nt, Human
gcaucuguaua

SEQ ID NO: 2379148 - RNA, 13 nt, Human
gcaucuguauaag

SEQ ID NO: 2379149 - RNA, 20 nt, Human
gcaugaaguaauaugcacac

SEQ ID NO: 2379150 - RNA, 22 nt, Human
gcaugaaguaauaugcacacau

SEQ ID NO: 2379151 - RNA, 21 nt, Human
gcaugaaguaauaugcacaca

SEQ ID NO: 2379152 - RNA, 20 nt, Human
gcaugacacgaauauugcug

SEQ ID NO: 2379153 - RNA, 21 nt, Human
gcaugacacgaauauugcuga

SEQ ID NO: 2379154 - RNA, 23 nt, Human
gcaucuguauaaguaagaaaaua

SEQ ID NO: 2379155 - RNA, 21 nt, Human
gcaucuguauaaguaagaaaa

SEQ ID NO: 2379156 - RNA, 22 nt, Human
gcaucuguauaaguaagaaaau

SEQ ID NO: 2379157 - RNA, 13 nt, Human
gcaucuguccuca

SEQ ID NO: 2379158 - RNA, 22 nt, Human
gcaugacacgaauauugcugau

SEQ ID NO: 2379159 - RNA, 19 nt, Human
gcauuccuacaaagauguu

SEQ ID NO: 2379160 - RNA, 16 nt, Human
gcauuccuacaaagau

SEQ ID NO: 2379161 - RNA, 22 nt, Human
gcauucccugagucaccaggaa

SEQ ID NO: 2379162 - RNA, 21 nt, Human
gcauucccugagucaccagga

SEQ ID NO: 2379163 - RNA, 14 nt, Human
gcauucccugaguc

SEQ ID NO: 2379164 - RNA, 13 nt, Human
gcauucccugagu

SEQ ID NO: 2379165 - RNA, 21 nt, Human
gcauuauguccacuguguaua

SEQ ID NO: 2379166 - RNA, 22 nt, Human
gcauuauguccacuguguauag

SEQ ID NO: 2379167 - RNA, 22 nt, Human
gcauuccccaggaggccagccu

SEQ ID NO: 2379168 - RNA, 21 nt, Human
gcauugaacacaaacuguaaa

SEQ ID NO: 2379169 - RNA, 14 nt, Human
gcauuccuucuuug

SEQ ID NO: 2379170 - RNA, 15 nt, Human
gcauuccuucuuuga

SEQ ID NO: 2379171 - RNA, 19 nt, Human
gcauuccugauaugauuua

SEQ ID NO: 2379172 - RNA, 21 nt, Human
gcauuccugauaugauuuaaa

SEQ ID NO: 2379173 - RNA, 22 nt, Human
gcauuccugauaugauuuaaaa

SEQ ID NO: 2379174 - RNA, 13 nt, Human
gcauuccuucuuu

SEQ ID NO: 2379175 - RNA, 23 nt, Human
gcauugaacacaaacuguaaaua

SEQ ID NO: 2379176 - RNA, 22 nt, Human
gcauugaacacaaacuguaaau

SEQ ID NO: 2379177 - RNA, 21 nt, Human
gcauugagaacugcauauguu

SEQ ID NO: 2379178 - RNA, 12 nt, Human
gcauugagaacu

SEQ ID NO: 2379179 - RNA, 16 nt, Human
gcauugaauauauuau

SEQ ID NO: 2379180 - RNA, 19 nt, Human
gcauuccuucuuugauaau

SEQ ID NO: 2379181 - RNA, 22 nt, Human
gcauugaccgcgacuaauuuca

SEQ ID NO: 2379182 - RNA, 23 nt, Human
gcauugaccgcgacuaauuucaa

SEQ ID NO: 2379183 - RNA, 22 nt, Human
gcauugagaacugcauauguuu

SEQ ID NO: 2379184 - RNA, 14 nt, Human
gcauuugagaaaug

SEQ ID NO: 2379185 - RNA, 18 nt, Human
gcauuugaggucuguucu

SEQ ID NO: 2379186 - RNA, 14 nt, Human
gcauuccccaggag

SEQ ID NO: 2379187 - RNA, 15 nt, Human
gcauuccccaggagg

SEQ ID NO: 2379188 - RNA, 16 nt, Human
gcauuccccaggaggc

SEQ ID NO: 2379189 - RNA, 17 nt, Human
gcauuccccaggaggcc

SEQ ID NO: 2379190 - RNA, 18 nt, Human
gcauuccccaggaggcca

SEQ ID NO: 2379191 - RNA, 19 nt, Human
gcauuccccaggaggccag

SEQ ID NO: 2379192 - RNA, 20 nt, Human
gcauuccccaggaggccagc

SEQ ID NO: 2379193 - RNA, 21 nt, Human
gcauuccccaggaggccagcc

SEQ ID NO: 2379194 - RNA, 22 nt, Human
gcauguguuugguucuggggcc

SEQ ID NO: 2379195 - RNA, 20 nt, Human
gcauguguuugguucugggg

SEQ ID NO: 2379196 - RNA, 19 nt, Human
gcauuaaauauaauaugca

SEQ ID NO: 2379197 - RNA, 16 nt, Human
gcauguuccacuaacc

SEQ ID NO: 2379198 - RNA, 22 nt, Human
gcauuaaauucacaaacuuuua

SEQ ID NO: 2379199 - RNA, 18 nt, Human
gcauuaaauucacaaacu

SEQ ID NO: 2379200 - RNA, 23 nt, Human
gcauuaaauuuuagcaaagauau

SEQ ID NO: 2379201 - RNA, 14 nt, Human
gcauuacagagagg

SEQ ID NO: 2379202 - RNA, 14 nt, Human
gcauuaacuucucu

SEQ ID NO: 2379203 - RNA, 16 nt, Human
gcauuaacuucucugg

SEQ ID NO: 2379204 - RNA, 22 nt, Human
gcauuaacuaaucuauuggguu

SEQ ID NO: 2379205 - RNA, 18 nt, Human
gcauuaacuaaucuauug

SEQ ID NO: 2379206 - RNA, 14 nt, Human
gcauuaacuaaucu

SEQ ID NO: 2379207 - RNA, 16 nt, Human
gcauuacauuuccaaa

SEQ ID NO: 2379208 - RNA, 19 nt, Human
gcauuacagagaggagaaa

SEQ ID NO: 2379209 - RNA, 18 nt, Human
gcauuaccgcguuguaaa

SEQ ID NO: 2379210 - RNA, 19 nt, Human
gcauuaccgcguuguaaaa

SEQ ID NO: 2379211 - RNA, 20 nt, Human
gcauuaccgcguuguaaaau

SEQ ID NO: 2379212 - RNA, 23 nt, Human
gcauuaccgcguuguaaaauaua

SEQ ID NO: 2379213 - RNA, 24 nt, Human
gcauuaucuagauacuguaucaug

SEQ ID NO: 2379214 - RNA, 22 nt, Human
gcauuaucuagauacuguauca

SEQ ID NO: 2379215 - RNA, 15 nt, Human
gcauuacgugagcca

SEQ ID NO: 2379216 - RNA, 19 nt, Human
gcauuaucuagauacugua

SEQ ID NO: 2379217 - RNA, 19 nt, Human
gcauuauguccacugugua

SEQ ID NO: 2379218 - RNA, 23 nt, Human
gcauuauguccacuguguauaga

SEQ ID NO: 2379219 - RNA, 19 nt, Human
gcauguguuugguucuggg

SEQ ID NO: 2379220 - RNA, 14 nt, Human
gcaugugugugcuc

SEQ ID NO: 2379221 - RNA, 16 nt, Human
gcaugugugugcucag

SEQ ID NO: 2379222 - RNA, 11 nt, Human
gcaugugugug

SEQ ID NO: 2379223 - RNA, 19 nt, Human
gcaugugugcgagugugug

SEQ ID NO: 2379224 - RNA, 21 nt, Human
gcauguguauuuccagugcaa

SEQ ID NO: 2379225 - RNA, 15 nt, Human
gcaugccuggauggg

SEQ ID NO: 2379226 - RNA, 13 nt, Human
gcauguuacauaa

SEQ ID NO: 2379227 - RNA, 18 nt, Human
gcauguuaccuccuauaa

SEQ ID NO: 2379228 - RNA, 14 nt, Human
gcauguucucugag

SEQ ID NO: 2379229 - RNA, 16 nt, Human
gcaugaccugugacca

SEQ ID NO: 2379230 - RNA, 18 nt, Human
gcaugcccccucgugcca

SEQ ID NO: 2379231 - RNA, 19 nt, Human
gcaugcccccucgugccag

SEQ ID NO: 2379232 - RNA, 20 nt, Human
gcaugcccccucgugccagu

SEQ ID NO: 2379233 - RNA, 14 nt, Human
gcaugccccggcca

SEQ ID NO: 2379234 - RNA, 16 nt, Human
gcaugccccggccacc

SEQ ID NO: 2379235 - RNA, 17 nt, Human
gcaugccccggccaccu

SEQ ID NO: 2379236 - RNA, 14 nt, Human
gcaugacauuucuu

SEQ ID NO: 2379237 - RNA, 14 nt, Human
gcaugccuggaugg

SEQ ID NO: 2379238 - RNA, 22 nt, Human
gcaugccccggccaccucugcg

SEQ ID NO: 2379239 - RNA, 23 nt, Human
gcaugccccggccaccucugcgg

SEQ ID NO: 2379240 - RNA, 18 nt, Human
gcaugccccggccaccuc

SEQ ID NO: 2379241 - RNA, 19 nt, Human
gcaugccccggccaccucu

SEQ ID NO: 2379242 - RNA, 20 nt, Human
gcaugccccggccaccucug

SEQ ID NO: 2379243 - RNA, 21 nt, Human
gcaugccccggccaccucugc

SEQ ID NO: 2379244 - RNA, 17 nt, Human
gcacagcccaaagaagg

SEQ ID NO: 2379245 - RNA, 21 nt, Human
gcacagccauacggcacugaa

SEQ ID NO: 2379246 - RNA, 11 nt, Human
gcacagcccuc

SEQ ID NO: 2379247 - RNA, 12 nt, Human
gcacagcccucc

SEQ ID NO: 2379248 - RNA, 13 nt, Human
gcacagcccuccc

SEQ ID NO: 2379249 - RNA, 16 nt, Human
gcacagcccucccgcc

SEQ ID NO: 2379250 - RNA, 17 nt, Human
gcacagcccucccgccc

SEQ ID NO: 2379251 - RNA, 15 nt, Human
gcacagccucuuaga

SEQ ID NO: 2379252 - RNA, 15 nt, Human
gcacagcagccuggg

SEQ ID NO: 2379253 - RNA, 23 nt, Human
gcacagcaaggaggcuggcuggg

SEQ ID NO: 2379254 - RNA, 13 nt, Human
gcacagcaguucc

SEQ ID NO: 2379255 - RNA, 22 nt, Human
gcacagccaacacgcaccugcc

SEQ ID NO: 2379256 - RNA, 15 nt, Human
gcacagccaaggacu

SEQ ID NO: 2379257 - RNA, 22 nt, Human
gcacagcaugagaggcucugug

SEQ ID NO: 2379258 - RNA, 16 nt, Human
gcacagcaguuccgga

SEQ ID NO: 2379259 - RNA, 14 nt, Human
gauuguuaaaauaa

SEQ ID NO: 2379260 - RNA, 20 nt, Human
gauugugucucuugguccug

SEQ ID NO: 2379261 - RNA, 22 nt, Human
gcacagcagccuggggcuggcc

SEQ ID NO: 2379262 - RNA, 13 nt, Human
gcacagcagcauc

SEQ ID NO: 2379263 - RNA, 14 nt, Human
gcacagcaaggagg

SEQ ID NO: 2379264 - RNA, 17 nt, Human
gcacagcaaggaggcug

SEQ ID NO: 2379265 - RNA, 19 nt, Human
gcacagcaaggaggcuggc

SEQ ID NO: 2379266 - RNA, 22 nt, Human
gcacagcaaggaggcuggcugg

SEQ ID NO: 2379267 - RNA, 22 nt, Human
gcacagcuugaccugaggcugu

SEQ ID NO: 2379268 - RNA, 18 nt, Human
gcacagcuugaccugagg

SEQ ID NO: 2379269 - RNA, 19 nt, Human
gcacagcuugaccugaggc

SEQ ID NO: 2379270 - RNA, 20 nt, Human
gcacagcuugaccugaggcu

SEQ ID NO: 2379271 - RNA, 21 nt, Human
gcacagcuugaccugaggcug

SEQ ID NO: 2379272 - RNA, 16 nt, Human
gcacagggcaguggga

SEQ ID NO: 2379273 - RNA, 15 nt, Human
gcacagggcagcugg

SEQ ID NO: 2379274 - RNA, 16 nt, Human
gcacagggcagcuggg

SEQ ID NO: 2379275 - RNA, 17 nt, Human
gcacagggcagcugggc

SEQ ID NO: 2379276 - RNA, 20 nt, Human
gcacagggcagcugggccca

SEQ ID NO: 2379277 - RNA, 18 nt, Human
gcacagggcagcugggcc

SEQ ID NO: 2379278 - RNA, 19 nt, Human
gcacagggcagcugggccc

SEQ ID NO: 2379279 - RNA, 23 nt, Human
gcacagcuucauuuccugugucu

SEQ ID NO: 2379280 - RNA, 14 nt, Human
gcacagcuugaccu

SEQ ID NO: 2379281 - RNA, 18 nt, Human
gcacagcccucccgcccc

SEQ ID NO: 2379282 - RNA, 19 nt, Human
gcacagcccucccgccccu

SEQ ID NO: 2379283 - RNA, 21 nt, Human
gcacagcccucccgccccuuc

SEQ ID NO: 2379284 - RNA, 22 nt, Human
gcacagcccucccgccccuucc

SEQ ID NO: 2379285 - RNA, 21 nt, Human
gcacagcuucauuuccugugu

SEQ ID NO: 2379286 - RNA, 18 nt, Human
gcacagccucuuagaugc

SEQ ID NO: 2379287 - RNA, 15 nt, Human
gcaccaagcaggaaa

SEQ ID NO: 2379288 - RNA, 15 nt, Human
gcaccacacucagcc

SEQ ID NO: 2379289 - RNA, 17 nt, Human
gcaccacacucagcccu

SEQ ID NO: 2379290 - RNA, 13 nt, Human
gcaccaccaagcc

SEQ ID NO: 2379291 - RNA, 20 nt, Human
gcaccagacacccaggacuu

SEQ ID NO: 2379292 - RNA, 19 nt, Human
gcaccagacacccaggacu

SEQ ID NO: 2379293 - RNA, 18 nt, Human
gcaccagacacccaggac

SEQ ID NO: 2379294 - RNA, 17 nt, Human
gcaccagacacccagga

SEQ ID NO: 2379295 - RNA, 16 nt, Human
gcaccagacacccagg

SEQ ID NO: 2379296 - RNA, 15 nt, Human
gcaccagacacccag

SEQ ID NO: 2379297 - RNA, 14 nt, Human
gcaccaccaagcca

SEQ ID NO: 2379298 - RNA, 17 nt, Human
gcaccaccaagccaagg

SEQ ID NO: 2379299 - RNA, 20 nt, Human
gcaccaaaauaagaaaagau

SEQ ID NO: 2379300 - RNA, 19 nt, Human
gcaccaaaauaagaaaaga

SEQ ID NO: 2379301 - RNA, 14 nt, Human
gcaccaacccagcc

SEQ ID NO: 2379302 - RNA, 15 nt, Human
gcaccaacccagccg

SEQ ID NO: 2379303 - RNA, 16 nt, Human
gcaccaacccagccgc

SEQ ID NO: 2379304 - RNA, 17 nt, Human
gcaccaacccagccgcu

SEQ ID NO: 2379305 - RNA, 18 nt, Human
gcaccaacccagccgcug

SEQ ID NO: 2379306 - RNA, 20 nt, Human
gcaccaacccagccgcugcc

SEQ ID NO: 2379307 - RNA, 22 nt, Human
gcaccaacccagccgcugcccg

SEQ ID NO: 2379308 - RNA, 18 nt, Human
gcacagggucugcucuuu

SEQ ID NO: 2379309 - RNA, 23 nt, Human
gcacagggucugcucuuucucug

SEQ ID NO: 2379310 - RNA, 12 nt, Human
gcacagggucug

SEQ ID NO: 2379311 - RNA, 17 nt, Human
gcacagggucugcucuu

SEQ ID NO: 2379312 - RNA, 13 nt, Human
gcaccagcagccu

SEQ ID NO: 2379313 - RNA, 15 nt, Human
gcaccagaggcugca

SEQ ID NO: 2379314 - RNA, 21 nt, Human
gcaccagacacccaggacuua

SEQ ID NO: 2379315 - RNA, 14 nt, Human
gcaccagcagccug

SEQ ID NO: 2379316 - RNA, 14 nt, Human
gcaccaucucuccu

SEQ ID NO: 2379317 - RNA, 15 nt, Human
gcaccaucucuccuc

SEQ ID NO: 2379318 - RNA, 17 nt, Human
gcaccaucucuccuccu

SEQ ID NO: 2379319 - RNA, 20 nt, Human
gcaccaucucugauuuucaa

SEQ ID NO: 2379320 - RNA, 17 nt, Human
gcaccauccgccagggc

SEQ ID NO: 2379321 - RNA, 18 nt, Human
gcaccauccgccagggcc

SEQ ID NO: 2379322 - RNA, 21 nt, Human
gcaccagaggcugcagaaggc

SEQ ID NO: 2379323 - RNA, 21 nt, Human
gcaccaucccuuuuugaagug

SEQ ID NO: 2379324 - RNA, 22 nt, Human
gcaccaucccuuuuugaagugu

SEQ ID NO: 2379325 - RNA, 13 nt, Human
gcaccauccgcca

SEQ ID NO: 2379326 - RNA, 13 nt, Human
gcaccccucccau

SEQ ID NO: 2379327 - RNA, 13 nt, Human
gcaccccugucuc

SEQ ID NO: 2379328 - RNA, 14 nt, Human
gcacccccuggaga

SEQ ID NO: 2379329 - RNA, 12 nt, Human
gcacccccuccu

SEQ ID NO: 2379330 - RNA, 19 nt, Human
gcaccauccgccagggccc

SEQ ID NO: 2379331 - RNA, 15 nt, Human
gcacccccuccugcu

SEQ ID NO: 2379332 - RNA, 16 nt, Human
gcacccccuccugcug

SEQ ID NO: 2379333 - RNA, 19 nt, Human
gcacccccuccugcugcag

SEQ ID NO: 2379334 - RNA, 17 nt, Human
gcacccccuccugcugc

SEQ ID NO: 2379335 - RNA, 18 nt, Human
gcacccccuccugcugca

SEQ ID NO: 2379336 - RNA, 13 nt, Human
gcacccuccaccc

SEQ ID NO: 2379337 - RNA, 14 nt, Human
gcacccuccacccu

SEQ ID NO: 2379338 - RNA, 15 nt, Human
gcacccuccacccug

SEQ ID NO: 2379339 - RNA, 16 nt, Human
gcacccuccacccugu

SEQ ID NO: 2379340 - RNA, 17 nt, Human
gcacccuccacccuguc

SEQ ID NO: 2379341 - RNA, 18 nt, Human
gcacccuccacccugucc

SEQ ID NO: 2379342 - RNA, 19 nt, Human
gcacccuccacccuguccc

SEQ ID NO: 2379343 - RNA, 22 nt, Human
gcacccuccacccuguccccca

SEQ ID NO: 2379344 - RNA, 13 nt, Human
gcacccuccccuc

SEQ ID NO: 2379345 - RNA, 14 nt, Human
gcacccuccccucc

SEQ ID NO: 2379346 - RNA, 15 nt, Human
gcacccuccccuccc

SEQ ID NO: 2379347 - RNA, 17 nt, Human
gcacccuccccucccgu

SEQ ID NO: 2379348 - RNA, 13 nt, Human
gcacccucccucc

SEQ ID NO: 2379349 - RNA, 18 nt, Human
gcacgcccaugugugagu

SEQ ID NO: 2379350 - RNA, 17 nt, Human
gcacgcccaugugugag

SEQ ID NO: 2379351 - RNA, 15 nt, Human
gcacgcccaugugug

SEQ ID NO: 2379352 - RNA, 12 nt, Human
gcacgcaguggc

SEQ ID NO: 2379353 - RNA, 22 nt, Human
gcacgcccaugugugagugugu

SEQ ID NO: 2379354 - RNA, 19 nt, Human
gcacccucaggcagguggg

SEQ ID NO: 2379355 - RNA, 16 nt, Human
gcacccucaggcaggu

SEQ ID NO: 2379356 - RNA, 12 nt, Human
gcaccccuucuc

SEQ ID NO: 2379357 - RNA, 13 nt, Human
gcaccccuucucu

SEQ ID NO: 2379358 - RNA, 17 nt, Human
gcaccccuucucuccuc

SEQ ID NO: 2379359 - RNA, 13 nt, Human
gcaccccuuccau

SEQ ID NO: 2379360 - RNA, 16 nt, Human
gcaccccuuccaugug

SEQ ID NO: 2379361 - RNA, 18 nt, Human
gcaccccuucucuccucc

SEQ ID NO: 2379362 - RNA, 19 nt, Human
gcaccccuucucuccuccc

SEQ ID NO: 2379363 - RNA, 20 nt, Human
gcaccccuucucuccucccc

SEQ ID NO: 2379364 - RNA, 21 nt, Human
gcaccccuucucuccucccca

SEQ ID NO: 2379365 - RNA, 22 nt, Human
gcaccccuucucuccuccccaa

SEQ ID NO: 2379366 - RNA, 13 nt, Human
gcacccgccucuc

SEQ ID NO: 2379367 - RNA, 15 nt, Human
gcacccgccucuccc

SEQ ID NO: 2379368 - RNA, 16 nt, Human
gcacccgccucucccg

SEQ ID NO: 2379369 - RNA, 20 nt, Human
gcacuaaagcaguggacacc

SEQ ID NO: 2379370 - RNA, 14 nt, Human
gcacuaaagcagug

SEQ ID NO: 2379371 - RNA, 22 nt, Human
gcacguuaugguguuucucccu

SEQ ID NO: 2379372 - RNA, 20 nt, Human
gcacgcugugggcagguggg

SEQ ID NO: 2379373 - RNA, 16 nt, Human
gcacgcugugggcagg

SEQ ID NO: 2379374 - RNA, 12 nt, Human
gcacgcuguggg

SEQ ID NO: 2379375 - RNA, 19 nt, Human
gcacgcuugcguaugucug

SEQ ID NO: 2379376 - RNA, 20 nt, Human
gcacgcuugcguaugucugu

SEQ ID NO: 2379377 - RNA, 21 nt, Human
gcacgcuugcguaugucuguu

SEQ ID NO: 2379378 - RNA, 14 nt, Human
gcacgugugugcac

SEQ ID NO: 2379379 - RNA, 20 nt, Human
gcacuaaggugugcucugau

SEQ ID NO: 2379380 - RNA, 19 nt, Human
gcacuaaaguauguaaagu

SEQ ID NO: 2379381 - RNA, 20 nt, Human
gcacuaaaguauguaaagua

SEQ ID NO: 2379382 - RNA, 22 nt, Human
gcacuaaaguauguaaaguaug

SEQ ID NO: 2379383 - RNA, 19 nt, Human
gcacuaauuugauguuuac

SEQ ID NO: 2379384 - RNA, 14 nt, Human
gcacuacauaaacu

SEQ ID NO: 2379385 - RNA, 15 nt, Human
gcacuacauaaacug

SEQ ID NO: 2379386 - RNA, 16 nt, Human
gcacuacauaaacuga

SEQ ID NO: 2379387 - RNA, 13 nt, Human
gcacuacaugugg

SEQ ID NO: 2379388 - RNA, 19 nt, Human
gcacuaaggugugcucuga

SEQ ID NO: 2379389 - RNA, 15 nt, Human
gcacuauaauguaag

SEQ ID NO: 2379390 - RNA, 14 nt, Human
gcacuauaauguaa

SEQ ID NO: 2379391 - RNA, 20 nt, Human
gcacuauaauguaagcucua

SEQ ID NO: 2379392 - RNA, 22 nt, Human
gcacuauaauguaagcucuacu

SEQ ID NO: 2379393 - RNA, 16 nt, Human
gcacuacauucauuua

SEQ ID NO: 2379394 - RNA, 12 nt, Human
gcacuacauuca

SEQ ID NO: 2379395 - RNA, 12 nt, Human
gcacugcuucca

SEQ ID NO: 2379396 - RNA, 13 nt, Human
gcacugcuuccag

SEQ ID NO: 2379397 - RNA, 14 nt, Human
gcacugcuuccagu

SEQ ID NO: 2379398 - RNA, 15 nt, Human
gcacugcuuccagug

SEQ ID NO: 2379399 - RNA, 19 nt, Human
gcacuguuuuauuuuaauu

SEQ ID NO: 2379400 - RNA, 20 nt, Human
gcacuguucccccugugcag

SEQ ID NO: 2379401 - RNA, 19 nt, Human
gcacuguucccccugugca

SEQ ID NO: 2379402 - RNA, 18 nt, Human
gcacuguucccccugugc

SEQ ID NO: 2379403 - RNA, 15 nt, Human
gcacuguucccccug

SEQ ID NO: 2379404 - RNA, 16 nt, Human
gcacuguuccagccug

SEQ ID NO: 2379405 - RNA, 21 nt, Human
gcacuguuccagccugcccuc

SEQ ID NO: 2379406 - RNA, 12 nt, Human
gcacugggcuug

SEQ ID NO: 2379407 - RNA, 19 nt, Human
gcacuggcucucuccagga

SEQ ID NO: 2379408 - RNA, 23 nt, Human
gcacugggaugagccgcugugag

SEQ ID NO: 2379409 - RNA, 20 nt, Human
gcacuaccacuccugccaag

SEQ ID NO: 2379410 - RNA, 21 nt, Human
gcacuacaugugguuuauaga

SEQ ID NO: 2379411 - RNA, 22 nt, Human
gcacugcugugcugugcccaag

SEQ ID NO: 2379412 - RNA, 11 nt, Human
gcacuggccug

SEQ ID NO: 2379413 - RNA, 15 nt, Human
gcacuggccugcacg

SEQ ID NO: 2379414 - RNA, 15 nt, Human
gcacuggcucucucc

SEQ ID NO: 2379415 - RNA, 16 nt, Human
gcacuggcucucucca

SEQ ID NO: 2379416 - RNA, 17 nt, Human
gcacuggcucucuccag

SEQ ID NO: 2379417 - RNA, 18 nt, Human
gcacuggcucucuccagg

SEQ ID NO: 2379418 - RNA, 15 nt, Human
gcaggaaggagagcc

SEQ ID NO: 2379419 - RNA, 21 nt, Human
gcaggaccuucgggcugugcc

SEQ ID NO: 2379420 - RNA, 19 nt, Human
gcaggacucagcuccccag

SEQ ID NO: 2379421 - RNA, 16 nt, Human
gcaggaagcugcuccg

SEQ ID NO: 2379422 - RNA, 15 nt, Human
gcaggaagcugcucc

SEQ ID NO: 2379423 - RNA, 13 nt, Human
gcaggaagcugcu

SEQ ID NO: 2379424 - RNA, 18 nt, Human
gcaggaagcucagacugg

SEQ ID NO: 2379425 - RNA, 17 nt, Human
gcaggaagcucagacug

SEQ ID NO: 2379426 - RNA, 14 nt, Human
gcaggaagcucaga

SEQ ID NO: 2379427 - RNA, 20 nt, Human
gcaggaagcauucagagagc

SEQ ID NO: 2379428 - RNA, 21 nt, Human
gcaggaagcauucagagagca

SEQ ID NO: 2379429 - RNA, 13 nt, Human
gcaggaaggagag

SEQ ID NO: 2379430 - RNA, 12 nt, Human
gcaggaaggaga

SEQ ID NO: 2379431 - RNA, 16 nt, Human
gcagcucacuacccua

SEQ ID NO: 2379432 - RNA, 18 nt, Human
gcaggaaauggcugugga

SEQ ID NO: 2379433 - RNA, 18 nt, Human
gcaggaagcaacgaaggg

SEQ ID NO: 2379434 - RNA, 16 nt, Human
gcaggaacucccagca

SEQ ID NO: 2379435 - RNA, 14 nt, Human
gcaggaacucccag

SEQ ID NO: 2379436 - RNA, 15 nt, Human
gcaggaacucccagc

SEQ ID NO: 2379437 - RNA, 18 nt, Human
gcagcucagagagggugg

SEQ ID NO: 2379438 - RNA, 19 nt, Human
gcagcucagagaggguggg

SEQ ID NO: 2379439 - RNA, 20 nt, Human
gcagccucuccccaggucca

SEQ ID NO: 2379440 - RNA, 16 nt, Human
gcagcucaccucuccc

SEQ ID NO: 2379441 - RNA, 18 nt, Human
gcagccuccuccugacca

SEQ ID NO: 2379442 - RNA, 14 nt, Human
gcagccuccuccug

SEQ ID NO: 2379443 - RNA, 15 nt, Human
gcagccuccuccuga

SEQ ID NO: 2379444 - RNA, 23 nt, Human
gcagccucccucugaccugcagg

SEQ ID NO: 2379445 - RNA, 12 nt, Human
gcagccucuccc

SEQ ID NO: 2379446 - RNA, 16 nt, Human
gcagccucuccccagg

SEQ ID NO: 2379447 - RNA, 17 nt, Human
gcagcucaccucucccu

SEQ ID NO: 2379448 - RNA, 20 nt, Human
gcagcucaccucucccuugg

SEQ ID NO: 2379449 - RNA, 21 nt, Human
gcagcucaccucucccuugga

SEQ ID NO: 2379450 - RNA, 14 nt, Human
gcagcucagagagg

SEQ ID NO: 2379451 - RNA, 23 nt, Human
gcagcagcuuuuaauacagggua

SEQ ID NO: 2379452 - RNA, 12 nt, Human
gcagagagaagc

SEQ ID NO: 2379453 - RNA, 16 nt, Human
gcagcaggaggccagg

SEQ ID NO: 2379454 - RNA, 14 nt, Human
gcagcagccaucau

SEQ ID NO: 2379455 - RNA, 22 nt, Human
gcagcagccaucauaggaaggg

SEQ ID NO: 2379456 - RNA, 19 nt, Human
gcagcagggagggcuucug

SEQ ID NO: 2379457 - RNA, 18 nt, Human
gcagcagggagggcuucu

SEQ ID NO: 2379458 - RNA, 20 nt, Human
gcagcagggagggcuucugc

SEQ ID NO: 2379459 - RNA, 14 nt, Human
gcagcccugcuuug

SEQ ID NO: 2379460 - RNA, 14 nt, Human
gcagcccuggaguc

SEQ ID NO: 2379461 - RNA, 16 nt, Human
gcagcccuggagucau

SEQ ID NO: 2379462 - RNA, 24 nt, Human
gcagcccugcuuugggcugcccug

SEQ ID NO: 2379463 - RNA, 22 nt, Human
gcagccucccucugaccugcag

SEQ ID NO: 2379464 - RNA, 16 nt, Human
gcagccucccucugac

SEQ ID NO: 2379465 - RNA, 14 nt, Human
gcagccucccucug

SEQ ID NO: 2379466 - RNA, 21 nt, Human
gcagccucccauccagggccc

SEQ ID NO: 2379467 - RNA, 20 nt, Human
gcagccucccauccagggcc

SEQ ID NO: 2379468 - RNA, 18 nt, Human
gcagccucccauccaggg

SEQ ID NO: 2379469 - RNA, 19 nt, Human
gcagccucacaguccuuac

SEQ ID NO: 2379470 - RNA, 18 nt, Human
gcagccggcacagggucu

SEQ ID NO: 2379471 - RNA, 19 nt, Human
gcagccggcacagggucug

SEQ ID NO: 2379472 - RNA, 15 nt, Human
gcagccgugaucaag

SEQ ID NO: 2379473 - RNA, 15 nt, Human
gcagcccuuggccag

SEQ ID NO: 2379474 - RNA, 14 nt, Human
gcagccgagcucgu

SEQ ID NO: 2379475 - RNA, 12 nt, Human
gcagcccuugcu

SEQ ID NO: 2379476 - RNA, 18 nt, Human
gcagcccuggagucaugc

SEQ ID NO: 2379477 - RNA, 17 nt, Human
gcagccgcugagcgagg

SEQ ID NO: 2379478 - RNA, 16 nt, Human
gcagccgcugagcgag

SEQ ID NO: 2379479 - RNA, 15 nt, Human
gcagccucacagucc

SEQ ID NO: 2379480 - RNA, 17 nt, Human
gcagccucacaguccuu

SEQ ID NO: 2379481 - RNA, 13 nt, Human
gcagaggggcagg

SEQ ID NO: 2379482 - RNA, 12 nt, Human
gcagagacuugg

SEQ ID NO: 2379483 - RNA, 17 nt, Human
gcagaggggcaggcccu

SEQ ID NO: 2379484 - RNA, 18 nt, Human
gcagaggggcaggcccug

SEQ ID NO: 2379485 - RNA, 19 nt, Human
gcagaggggcaggcccugc

SEQ ID NO: 2379486 - RNA, 22 nt, Human
gcagagaccaucccugaaggcc

SEQ ID NO: 2379487 - RNA, 20 nt, Human
gcagagaccaucccugaagg

SEQ ID NO: 2379488 - RNA, 21 nt, Human
gcagagaccaucccugaaggc

SEQ ID NO: 2379489 - RNA, 21 nt, Human
gcagacugcugcuagagccag

SEQ ID NO: 2379490 - RNA, 15 nt, Human
gcagacuggagggga

SEQ ID NO: 2379491 - RNA, 14 nt, Human
gcagacuggagggg

SEQ ID NO: 2379492 - RNA, 13 nt, Human
gcagacuggaggg

SEQ ID NO: 2379493 - RNA, 12 nt, Human
gcagacuggagg

SEQ ID NO: 2379494 - RNA, 13 nt, Human
gcagacugguggg

SEQ ID NO: 2379495 - RNA, 17 nt, Human
gcagacuggugagcaga

SEQ ID NO: 2379496 - RNA, 19 nt, Human
gcagagaccaucccugaag

SEQ ID NO: 2379497 - RNA, 15 nt, Human
gcagagaaagaagag

SEQ ID NO: 2379498 - RNA, 16 nt, Human
gcagagaaagaagaga

SEQ ID NO: 2379499 - RNA, 18 nt, Human
gcagagaaagaagagaca

SEQ ID NO: 2379500 - RNA, 22 nt, Human
gcagagaaagaagagacaggag

SEQ ID NO: 2379501 - RNA, 23 nt, Human
gcagagaaagaagagacaggagg

SEQ ID NO: 2379502 - RNA, 17 nt, Human
gcagacucuacagaggc

SEQ ID NO: 2379503 - RNA, 18 nt, Human
gcagacucuacagaggcc

SEQ ID NO: 2379504 - RNA, 19 nt, Human
gcagacucuacagaggcca

SEQ ID NO: 2379505 - RNA, 22 nt, Human
gcagacucuacagaggccaugg

SEQ ID NO: 2379506 - RNA, 22 nt, Human
gcacuucgggaggucgaggcag

SEQ ID NO: 2379507 - RNA, 21 nt, Human
gcacuugcacgcccaugugug

SEQ ID NO: 2379508 - RNA, 22 nt, Human
gcacuugcacgcccauguguga

SEQ ID NO: 2379509 - RNA, 14 nt, Human
gcacuugcagacuc

SEQ ID NO: 2379510 - RNA, 16 nt, Human
gcacuugcagacucua

SEQ ID NO: 2379511 - RNA, 17 nt, Human
gcagaugcaaagaggca

SEQ ID NO: 2379512 - RNA, 18 nt, Human
gcagauggagaccccuug

SEQ ID NO: 2379513 - RNA, 16 nt, Human
gcagaugaccccuccc

SEQ ID NO: 2379514 - RNA, 15 nt, Human
gcagaugaccccucc

SEQ ID NO: 2379515 - RNA, 13 nt, Human
gcagaugacaaaa

SEQ ID NO: 2379516 - RNA, 16 nt, Human
gcagaugcaaagaggc

SEQ ID NO: 2379517 - RNA, 15 nt, Human
gcagaugcaaagagg

SEQ ID NO: 2379518 - RNA, 14 nt, Human
gcagaugauccaug

SEQ ID NO: 2379519 - RNA, 13 nt, Human
gcagaugauccau

SEQ ID NO: 2379520 - RNA, 14 nt, Human
gcagaugagguugc

SEQ ID NO: 2379521 - RNA, 19 nt, Human
gcagaugagguugcuagag

SEQ ID NO: 2379522 - RNA, 12 nt, Human
gcagcagaggca

SEQ ID NO: 2379523 - RNA, 15 nt, Human
gcagcagaggcacug

SEQ ID NO: 2379524 - RNA, 13 nt, Human
gcagcagauuuua

SEQ ID NO: 2379525 - RNA, 20 nt, Human
gcagcagauuuuaggaaaug

SEQ ID NO: 2379526 - RNA, 15 nt, Human
gcagcagaagggggu

SEQ ID NO: 2379527 - RNA, 22 nt, Human
gcagcagaaggggguggugucu

SEQ ID NO: 2379528 - RNA, 13 nt, Human
gcagcagaagggg

SEQ ID NO: 2379529 - RNA, 18 nt, Human
gcagauguccuugaugcu

SEQ ID NO: 2379530 - RNA, 22 nt, Human
gcagaucugugccccaugccug

SEQ ID NO: 2379531 - RNA, 20 nt, Human
gcagaucugugccccaugcc

SEQ ID NO: 2379532 - RNA, 14 nt, Human
gcagaucugugccc

SEQ ID NO: 2379533 - RNA, 13 nt, Human
gcagaucugugcc

SEQ ID NO: 2379534 - RNA, 14 nt, Human
gcagaucccagcuc

SEQ ID NO: 2379535 - RNA, 12 nt, Human
gcagaucccagc

SEQ ID NO: 2379536 - RNA, 15 nt, Human
gcagaucccagcuca

SEQ ID NO: 2379537 - RNA, 14 nt, Human
gcagauccaggacu

SEQ ID NO: 2379538 - RNA, 23 nt, Human
gcagagguggccagagcugggag

SEQ ID NO: 2379539 - RNA, 15 nt, Human
gcagauccaggacua

SEQ ID NO: 2379540 - RNA, 14 nt, Human
gcagagguggccag

SEQ ID NO: 2379541 - RNA, 15 nt, Human
gcagagguggccaga

SEQ ID NO: 2379542 - RNA, 21 nt, Human
gcagagguaaaagugugagca

SEQ ID NO: 2379543 - RNA, 15 nt, Human
gcagaggucugugcu

SEQ ID NO: 2379544 - RNA, 16 nt, Human
gcagaggucugugcug

SEQ ID NO: 2379545 - RNA, 18 nt, Human
gcagaggucugugcugag

SEQ ID NO: 2379546 - RNA, 23 nt, Human
gcagagguugcagugagccgaga

SEQ ID NO: 2379547 - RNA, 21 nt, Human
gcagaggggcuuucuggagag

SEQ ID NO: 2379548 - RNA, 20 nt, Human
gcagaggggcuuucuggaga

SEQ ID NO: 2379549 - RNA, 20 nt, Human
gcagaggggcaggcccugca

SEQ ID NO: 2379550 - RNA, 19 nt, Human
gcagagggguaggcagagc

SEQ ID NO: 2379551 - RNA, 13 nt, Human
gcagagguaaaag

SEQ ID NO: 2379552 - RNA, 20 nt, Human
gcagagguaaaagugugagc

SEQ ID NO: 2379553 - RNA, 19 nt, Human
gcagaggggcuuucuggag

SEQ ID NO: 2379554 - RNA, 18 nt, Human
gcagaggggcuuucugga

SEQ ID NO: 2379555 - RNA, 16 nt, Human
gcagaggggcuuucug

SEQ ID NO: 2379556 - RNA, 12 nt, Human
gcagaggggcuu

SEQ ID NO: 2379557 - RNA, 21 nt, Human
gcagagguccacaacacacag

SEQ ID NO: 2379558 - RNA, 23 nt, Human
gcagagguaaaagugugagcagu

SEQ ID NO: 2379559 - RNA, 18 nt, Human
gcagagguugcagugagc

SEQ ID NO: 2379560 - RNA, 22 nt, Human
gcccaauucuuacaaacaugug

SEQ ID NO: 2379561 - RNA, 14 nt, Human
gcccaaugaaauga

SEQ ID NO: 2379562 - RNA, 14 nt, Human
gcccaauuggagga

SEQ ID NO: 2379563 - RNA, 15 nt, Human
gcccaauuggaggaa

SEQ ID NO: 2379564 - RNA, 20 nt, Human
gcccaauuggaggaaagcaa

SEQ ID NO: 2379565 - RNA, 21 nt, Human
gcccagaccccucuggccagg

SEQ ID NO: 2379566 - RNA, 20 nt, Human
gcccagaccccucuggccag

SEQ ID NO: 2379567 - RNA, 19 nt, Human
gcccagaccccucuggcca

SEQ ID NO: 2379568 - RNA, 16 nt, Human
gcccagaccccucugg

SEQ ID NO: 2379569 - RNA, 12 nt, Human
gcccaauauuau

SEQ ID NO: 2379570 - RNA, 18 nt, Human
gcccaauauuauaauuuu

SEQ ID NO: 2379571 - RNA, 20 nt, Human
gcccaaguggcagagcuugg

SEQ ID NO: 2379572 - RNA, 18 nt, Human
gcccaaguuguggugcug

SEQ ID NO: 2379573 - RNA, 21 nt, Human
gcccaaguuguggugcugaca

SEQ ID NO: 2379574 - RNA, 19 nt, Human
gcccaauaugcaguucugc

SEQ ID NO: 2379575 - RNA, 21 nt, Human
gcccaaugcacuuuguucugg

SEQ ID NO: 2379576 - RNA, 13 nt, Human
gcccagagaagcc

SEQ ID NO: 2379577 - RNA, 15 nt, Human
gcccagagaagccaa

SEQ ID NO: 2379578 - RNA, 20 nt, Human
gcccagagacauacuugaag

SEQ ID NO: 2379579 - RNA, 10 nt, Human
gcccagagac

SEQ ID NO: 2379580 - RNA, 19 nt, Human
gcccagagacccaagcugc

SEQ ID NO: 2379581 - RNA, 23 nt, Human
gcccagagacauacuugaagggc

SEQ ID NO: 2379582 - RNA, 13 nt, Human
gcccagagcccag

SEQ ID NO: 2379583 - RNA, 14 nt, Human
gcccagagcccagc

SEQ ID NO: 2379584 - RNA, 16 nt, Human
gcccagagcccagcuc

SEQ ID NO: 2379585 - RNA, 15 nt, Human
gcccagagcccagcu

SEQ ID NO: 2379586 - RNA, 20 nt, Human
gcccagagggcccaggcagg

SEQ ID NO: 2379587 - RNA, 16 nt, Human
gcccagagggcccagg

SEQ ID NO: 2379588 - RNA, 15 nt, Human
gcccagagggcccag

SEQ ID NO: 2379589 - RNA, 13 nt, Human
gcccagagggccc

SEQ ID NO: 2379590 - RNA, 12 nt, Human
gcccagagggcc

SEQ ID NO: 2379591 - RNA, 18 nt, Human
gcccagagcccagcucca

SEQ ID NO: 2379592 - RNA, 17 nt, Human
gcccagagcccagcucc

SEQ ID NO: 2379593 - RNA, 23 nt, Human
gcccagaggagggcagcagaagg

SEQ ID NO: 2379594 - RNA, 16 nt, Human
gcccagaggagggcag

SEQ ID NO: 2379595 - RNA, 14 nt, Human
gcccagagggccug

SEQ ID NO: 2379596 - RNA, 15 nt, Human
gcccagagggccugc

SEQ ID NO: 2379597 - RNA, 18 nt, Human
gcccagagggccugcaag

SEQ ID NO: 2379598 - RNA, 19 nt, Human
gcccagagggccugcaagg

SEQ ID NO: 2379599 - RNA, 14 nt, Human
gcccagccaggccc

SEQ ID NO: 2379600 - RNA, 15 nt, Human
gcccagccaggcccc

SEQ ID NO: 2379601 - RNA, 16 nt, Human
gcccagccaggcccca

SEQ ID NO: 2379602 - RNA, 17 nt, Human
gcccagccaggccccag

SEQ ID NO: 2379603 - RNA, 21 nt, Human
gcccagccaaacccugucuga

SEQ ID NO: 2379604 - RNA, 20 nt, Human
gcccagccaaacccugucug

SEQ ID NO: 2379605 - RNA, 23 nt, Human
gcccagccauuaccauggagaca

SEQ ID NO: 2379606 - RNA, 22 nt, Human
gcccagccauuaccauggagac

SEQ ID NO: 2379607 - RNA, 21 nt, Human
gcccagccauuaccauggaga

SEQ ID NO: 2379608 - RNA, 20 nt, Human
gcccagccauuaccauggag

SEQ ID NO: 2379609 - RNA, 9 nt, Human
gcccagccc

SEQ ID NO: 2379610 - RNA, 15 nt, Human
gcccagcccagcugg

SEQ ID NO: 2379611 - RNA, 14 nt, Human
gcccagcccagcug

SEQ ID NO: 2379612 - RNA, 16 nt, Human
gcccagcccagcuggu

SEQ ID NO: 2379613 - RNA, 11 nt, Human
gcccagccccu

SEQ ID NO: 2379614 - RNA, 12 nt, Human
gcccagccccuu

SEQ ID NO: 2379615 - RNA, 23 nt, Human
gcccagcccccacagugcugucu

SEQ ID NO: 2379616 - RNA, 15 nt, Human
gcccagcccccacag

SEQ ID NO: 2379617 - RNA, 21 nt, Human
gcccagcccccacagugcugu

SEQ ID NO: 2379618 - RNA, 20 nt, Human
gcccagcacugcuugaggaa

SEQ ID NO: 2379619 - RNA, 17 nt, Human
gcccagccaaacccugu

SEQ ID NO: 2379620 - RNA, 18 nt, Human
gcccagcauugcugguuc

SEQ ID NO: 2379621 - RNA, 19 nt, Human
gcccagcauugcugguucu

SEQ ID NO: 2379622 - RNA, 21 nt, Human
gcccagcacugcuugaggaaa

SEQ ID NO: 2379623 - RNA, 14 nt, Human
gcccagcauugcug

SEQ ID NO: 2379624 - RNA, 16 nt, Human
gcccagcauugcuggu

SEQ ID NO: 2379625 - RNA, 15 nt, Human
gcccagaucccagaa

SEQ ID NO: 2379626 - RNA, 21 nt, Human
gcccagauguuuuacgucugg

SEQ ID NO: 2379627 - RNA, 16 nt, Human
gcccagaucagcuccu

SEQ ID NO: 2379628 - RNA, 17 nt, Human
gcccagaucagcuccua

SEQ ID NO: 2379629 - RNA, 14 nt, Human
gcccagaguugcug

SEQ ID NO: 2379630 - RNA, 23 nt, Human
gcccagaguugcugggagcugaa

SEQ ID NO: 2379631 - RNA, 22 nt, Human
gcccagagguaacagaacagcu

SEQ ID NO: 2379632 - RNA, 18 nt, Human
gcccagagguaacagaac

SEQ ID NO: 2379633 - RNA, 20 nt, Human
gcccagagguaacagaacag

SEQ ID NO: 2379634 - RNA, 21 nt, Human
gcccagagggcccaggcaggc

SEQ ID NO: 2379635 - RNA, 12 nt, Human
gcccagagguaa

SEQ ID NO: 2379636 - RNA, 16 nt, Human
gcccagagguaacaga

SEQ ID NO: 2379637 - RNA, 22 nt, Human
gcccagagggccugcaagggag

SEQ ID NO: 2379638 - RNA, 20 nt, Human
gcccagagggccugcaaggg

SEQ ID NO: 2379639 - RNA, 21 nt, Human
gcccagagggccugcaaggga

SEQ ID NO: 2379640 - RNA, 18 nt, Human
gcccaguccuuccaccuc

SEQ ID NO: 2379641 - RNA, 19 nt, Human
gcccaguccuuccaccucg

SEQ ID NO: 2379642 - RNA, 20 nt, Human
gcccagucuggaaugcagug

SEQ ID NO: 2379643 - RNA, 15 nt, Human
gcccaguugggugga

SEQ ID NO: 2379644 - RNA, 14 nt, Human
gcccaguccuucca

SEQ ID NO: 2379645 - RNA, 17 nt, Human
gcccaguccuggccugg

SEQ ID NO: 2379646 - RNA, 18 nt, Human
gcccaguccuggccuggc

SEQ ID NO: 2379647 - RNA, 15 nt, Human
gcccaguccuuccac

SEQ ID NO: 2379648 - RNA, 17 nt, Human
gcccaguccuuccaccu

SEQ ID NO: 2379649 - RNA, 19 nt, Human
gcccagucuggaaugcagu

SEQ ID NO: 2379650 - RNA, 23 nt, Human
gcccaggcuuagucacugagaca

SEQ ID NO: 2379651 - RNA, 17 nt, Human
gcccagggacaccagcc

SEQ ID NO: 2379652 - RNA, 18 nt, Human
gcccagggacaccagcca

SEQ ID NO: 2379653 - RNA, 19 nt, Human
gcccagggacaccagccag

SEQ ID NO: 2379654 - RNA, 20 nt, Human
gcccagggacaccagccagg

SEQ ID NO: 2379655 - RNA, 13 nt, Human
gcccaguccuggc

SEQ ID NO: 2379656 - RNA, 15 nt, Human
gcccaguccuggccu

SEQ ID NO: 2379657 - RNA, 16 nt, Human
gcccaguccuggccug

SEQ ID NO: 2379658 - RNA, 19 nt, Human
gcccaggcuuagucacuga

SEQ ID NO: 2379659 - RNA, 21 nt, Human
gcccaggcuuagucacugaga

SEQ ID NO: 2379660 - RNA, 17 nt, Human
gcccagcuggugggaag

SEQ ID NO: 2379661 - RNA, 13 nt, Human
gcccagcuugggc

SEQ ID NO: 2379662 - RNA, 14 nt, Human
gcccagcuugggcc

SEQ ID NO: 2379663 - RNA, 15 nt, Human
gcccagcuugggccc

SEQ ID NO: 2379664 - RNA, 16 nt, Human
gcccaggcugguuucg

SEQ ID NO: 2379665 - RNA, 22 nt, Human
gcccaggcuggcgugcaguggu

SEQ ID NO: 2379666 - RNA, 19 nt, Human
gcccaggcuggcgugcagu

SEQ ID NO: 2379667 - RNA, 20 nt, Human
gcccaggcuggcgugcagug

SEQ ID NO: 2379668 - RNA, 18 nt, Human
gcccaggaaaggcuccag

SEQ ID NO: 2379669 - RNA, 19 nt, Human
gcccaggaaaggcuccagg

SEQ ID NO: 2379670 - RNA, 20 nt, Human
gcccaggaaaggcuccagga

SEQ ID NO: 2379671 - RNA, 21 nt, Human
gcccaggaaaggcuccaggag

SEQ ID NO: 2379672 - RNA, 16 nt, Human
gcccagcggccccucc

SEQ ID NO: 2379673 - RNA, 17 nt, Human
gcccagcggccccuccc

SEQ ID NO: 2379674 - RNA, 18 nt, Human
gcccagcggccccuccca

SEQ ID NO: 2379675 - RNA, 19 nt, Human
gcccagcggccccucccac

SEQ ID NO: 2379676 - RNA, 20 nt, Human
gcccagcggccccucccaca

SEQ ID NO: 2379677 - RNA, 13 nt, Human
gcccagccggccu

SEQ ID NO: 2379678 - RNA, 15 nt, Human
gcccagccggccucu

SEQ ID NO: 2379679 - RNA, 16 nt, Human
gcccagccggccucuc

SEQ ID NO: 2379680 - RNA, 18 nt, Human
gcccagccggccucucug

SEQ ID NO: 2379681 - RNA, 23 nt, Human
gcccagccggccucucuggccuc

SEQ ID NO: 2379682 - RNA, 24 nt, Human
gcccagccggccucucuggccucc

SEQ ID NO: 2379683 - RNA, 19 nt, Human
gcccagccggccucucugg

SEQ ID NO: 2379684 - RNA, 20 nt, Human
gcccagccggccucucuggc

SEQ ID NO: 2379685 - RNA, 21 nt, Human
gcccagccggccucucuggcc

SEQ ID NO: 2379686 - RNA, 22 nt, Human
gcccagccggccucucuggccu

SEQ ID NO: 2379687 - RNA, 13 nt, Human
gcccagcugggcu

SEQ ID NO: 2379688 - RNA, 18 nt, Human
gcccagcuauaccugugc

SEQ ID NO: 2379689 - RNA, 15 nt, Human
gcccagcuagcugca

SEQ ID NO: 2379690 - RNA, 23 nt, Human
gcccagcggccccucccacacac

SEQ ID NO: 2379691 - RNA, 14 nt, Human
gcccagcugggcuc

SEQ ID NO: 2379692 - RNA, 15 nt, Human
gcccagcugggcucu

SEQ ID NO: 2379693 - RNA, 16 nt, Human
gcccagcugggcucug

SEQ ID NO: 2379694 - RNA, 18 nt, Human
gcccagcugggcucugcc

SEQ ID NO: 2379695 - RNA, 19 nt, Human
gcccagcugggcucugcca

SEQ ID NO: 2379696 - RNA, 21 nt, Human
gcccagcugggcucugccacc

SEQ ID NO: 2379697 - RNA, 23 nt, Human
gcccagcugggcucugccacccu

SEQ ID NO: 2379698 - RNA, 21 nt, Human
gcccagcuugaaaccuucacu

SEQ ID NO: 2379699 - RNA, 20 nt, Human
gcccagcugggucaggcagg

SEQ ID NO: 2379700 - RNA, 19 nt, Human
gcccagcugggucaggcag

SEQ ID NO: 2379701 - RNA, 18 nt, Human
gcccagcugggucaggca

SEQ ID NO: 2379702 - RNA, 15 nt, Human
gcccagcugggucag

SEQ ID NO: 2379703 - RNA, 14 nt, Human
gcccagcuggguca

SEQ ID NO: 2379704 - RNA, 13 nt, Human
gcccagcuggguc

SEQ ID NO: 2379705 - RNA, 20 nt, Human
gcccagccccuucugaccca

SEQ ID NO: 2379706 - RNA, 24 nt, Human
gcccagccccuucugacccaugcu

SEQ ID NO: 2379707 - RNA, 16 nt, Human
gcccagcccuccccau

SEQ ID NO: 2379708 - RNA, 18 nt, Human
gcccagcccggaccuugg

SEQ ID NO: 2379709 - RNA, 13 nt, Human
gcccagcccggcu

SEQ ID NO: 2379710 - RNA, 12 nt, Human
gcccagcccucc

SEQ ID NO: 2379711 - RNA, 14 nt, Human
gcccagcccggcuc

SEQ ID NO: 2379712 - RNA, 11 nt, Human
gcccagcccug

SEQ ID NO: 2379713 - RNA, 12 nt, Human
gcccagcccugc

SEQ ID NO: 2379714 - RNA, 13 nt, Human
gcccagcccugcu

SEQ ID NO: 2379715 - RNA, 15 nt, Human
gcccagcccugcugg

SEQ ID NO: 2379716 - RNA, 16 nt, Human
gcccagcccugcuggc

SEQ ID NO: 2379717 - RNA, 17 nt, Human
gcccagcccugcuggcc

SEQ ID NO: 2379718 - RNA, 21 nt, Human
gcccagcccugcuggccgccu

SEQ ID NO: 2379719 - RNA, 13 nt, Human
gcccagccccuuc

SEQ ID NO: 2379720 - RNA, 14 nt, Human
gcccagccccuucu

SEQ ID NO: 2379721 - RNA, 16 nt, Human
gcccagccccuucuga

SEQ ID NO: 2379722 - RNA, 17 nt, Human
gcccagccccuucugac

SEQ ID NO: 2379723 - RNA, 11 nt, Human
gccagggagcu

SEQ ID NO: 2379724 - RNA, 20 nt, Human
gccagggcaaugaugaauga

SEQ ID NO: 2379725 - RNA, 16 nt, Human
gccagggcagagugag

SEQ ID NO: 2379726 - RNA, 15 nt, Human
gccagggcagaguga

SEQ ID NO: 2379727 - RNA, 19 nt, Human
gccagggcagggccccagg

SEQ ID NO: 2379728 - RNA, 14 nt, Human
gccagggcagggcc

SEQ ID NO: 2379729 - RNA, 21 nt, Human
gccagggcagagugagaccca

SEQ ID NO: 2379730 - RNA, 19 nt, Human
gccagggggacuagccccu

SEQ ID NO: 2379731 - RNA, 20 nt, Human
gccagggggacuagccccug

SEQ ID NO: 2379732 - RNA, 13 nt, Human
gccagggccaggg

SEQ ID NO: 2379733 - RNA, 22 nt, Human
gccagggccccucacccugccu

SEQ ID NO: 2379734 - RNA, 22 nt, Human
gccaggggggugaggagcuggg

SEQ ID NO: 2379735 - RNA, 18 nt, Human
gccaggggucucccugga

SEQ ID NO: 2379736 - RNA, 21 nt, Human
gccaggggggugaggagcugg

SEQ ID NO: 2379737 - RNA, 20 nt, Human
gccaggggggugaggagcug

SEQ ID NO: 2379738 - RNA, 19 nt, Human
gccaggggggugaggagcu

SEQ ID NO: 2379739 - RNA, 21 nt, Human
gccagggggacuagccccugu

SEQ ID NO: 2379740 - RNA, 13 nt, Human
gccagguuuucug

SEQ ID NO: 2379741 - RNA, 19 nt, Human
gccagguuuucuggguguc

SEQ ID NO: 2379742 - RNA, 14 nt, Human
gccaguauuuuuua

SEQ ID NO: 2379743 - RNA, 20 nt, Human
gccagucaccccggccaccu

SEQ ID NO: 2379744 - RNA, 17 nt, Human
gccagucaccccggcca

SEQ ID NO: 2379745 - RNA, 18 nt, Human
gccagucaccccggccac

SEQ ID NO: 2379746 - RNA, 22 nt, Human
gccagguuucugcccacauugg

SEQ ID NO: 2379747 - RNA, 12 nt, Human
gccaguaaaugg

SEQ ID NO: 2379748 - RNA, 17 nt, Human
gccagguuuuuggucug

SEQ ID NO: 2379749 - RNA, 18 nt, Human
gccagguggccacuccag

SEQ ID NO: 2379750 - RNA, 17 nt, Human
gccagggugagagcugc

SEQ ID NO: 2379751 - RNA, 23 nt, Human
gccagggugagagcugcucugga

SEQ ID NO: 2379752 - RNA, 21 nt, Human
gccaggggucucccuggagug

SEQ ID NO: 2379753 - RNA, 15 nt, Human
gccagggugagagcu

SEQ ID NO: 2379754 - RNA, 16 nt, Human
gccagggugagagcug

SEQ ID NO: 2379755 - RNA, 23 nt, Human
gccagguucuccguuagcuccug

SEQ ID NO: 2379756 - RNA, 20 nt, Human
gccagguucuauuuggaauu

SEQ ID NO: 2379757 - RNA, 23 nt, Human
gccagguucuauuuggaauuuau

SEQ ID NO: 2379758 - RNA, 18 nt, Human
gccaggugggcgggcagc

SEQ ID NO: 2379759 - RNA, 19 nt, Human
gccaggugggcgggcagca

SEQ ID NO: 2379760 - RNA, 18 nt, Human
gccagguucuauuuggaa

SEQ ID NO: 2379761 - RNA, 19 nt, Human
gccagguucuauuuggaau

SEQ ID NO: 2379762 - RNA, 16 nt, Human
gccagggagacagagc

SEQ ID NO: 2379763 - RNA, 21 nt, Human
gccagggagacagagcucaca

SEQ ID NO: 2379764 - RNA, 20 nt, Human
gccagggagaagcuccucuc

SEQ ID NO: 2379765 - RNA, 16 nt, Human
gccagggagaagcucc

SEQ ID NO: 2379766 - RNA, 15 nt, Human
gccagggagaagcuc

SEQ ID NO: 2379767 - RNA, 14 nt, Human
gccagggagaagcu

SEQ ID NO: 2379768 - RNA, 18 nt, Human
gccagggaaguccccgag

SEQ ID NO: 2379769 - RNA, 23 nt, Human
gccagggacagaggggguggccu

SEQ ID NO: 2379770 - RNA, 22 nt, Human
gccaggcuggucucgaacuccu

SEQ ID NO: 2379771 - RNA, 13 nt, Human
gccagggacagag

SEQ ID NO: 2379772 - RNA, 16 nt, Human
gccagggacagagggg

SEQ ID NO: 2379773 - RNA, 18 nt, Human
gccagggacagagggggu

SEQ ID NO: 2379774 - RNA, 14 nt, Human
gccaggcugccaag

SEQ ID NO: 2379775 - RNA, 22 nt, Human
gccaggcugcucuugaacuccu

SEQ ID NO: 2379776 - RNA, 13 nt, Human
gccaggcuggguc

SEQ ID NO: 2379777 - RNA, 14 nt, Human
gccaggcugcucuu

SEQ ID NO: 2379778 - RNA, 13 nt, Human
gccaggcugcucu

SEQ ID NO: 2379779 - RNA, 22 nt, Human
gccaggcugaccacagcacagc

SEQ ID NO: 2379780 - RNA, 19 nt, Human
gccagauuuuccugaaaac

SEQ ID NO: 2379781 - RNA, 16 nt, Human
gccagauuucacucuc

SEQ ID NO: 2379782 - RNA, 11 nt, Human
gccagauccag

SEQ ID NO: 2379783 - RNA, 11 nt, Human
gccagaugcug

SEQ ID NO: 2379784 - RNA, 12 nt, Human
gccagaugcuga

SEQ ID NO: 2379785 - RNA, 14 nt, Human
gccagauccagccu

SEQ ID NO: 2379786 - RNA, 18 nt, Human
gccagauuucacucuccu

SEQ ID NO: 2379787 - RNA, 21 nt, Human
gccagauuucacucuccuugg

SEQ ID NO: 2379788 - RNA, 17 nt, Human
gccagugacuccaggag

SEQ ID NO: 2379789 - RNA, 18 nt, Human
gccagugacuccaggaga

SEQ ID NO: 2379790 - RNA, 19 nt, Human
gccagugaugcuaaagguu

SEQ ID NO: 2379791 - RNA, 20 nt, Human
gccagugaugcuaaagguug

SEQ ID NO: 2379792 - RNA, 20 nt, Human
gccagugaccugaggaagcg

SEQ ID NO: 2379793 - RNA, 13 nt, Human
gccagugacucca

SEQ ID NO: 2379794 - RNA, 15 nt, Human
gccagugacuccagg

SEQ ID NO: 2379795 - RNA, 16 nt, Human
gccagugacuccagga

SEQ ID NO: 2379796 - RNA, 18 nt, Human
gccagugaccugaggaag

SEQ ID NO: 2379797 - RNA, 17 nt, Human
gccagugaccugaggaa

SEQ ID NO: 2379798 - RNA, 17 nt, Human
gccagugccuuaccucc

SEQ ID NO: 2379799 - RNA, 15 nt, Human
gccagugccuuaccu

SEQ ID NO: 2379800 - RNA, 11 nt, Human
gccagugccuu

SEQ ID NO: 2379801 - RNA, 10 nt, Human
gccagugccu

SEQ ID NO: 2379802 - RNA, 21 nt, Human
gccagugacuccaggagagga

SEQ ID NO: 2379803 - RNA, 19 nt, Human
gccaucgccgggacuccag

SEQ ID NO: 2379804 - RNA, 23 nt, Human
gccaucgccgggacuccagaacc

SEQ ID NO: 2379805 - RNA, 19 nt, Human
gccagugccuuaccuccug

SEQ ID NO: 2379806 - RNA, 12 nt, Human
gccauccugucc

SEQ ID NO: 2379807 - RNA, 18 nt, Human
gccaucgccgggacucca

SEQ ID NO: 2379808 - RNA, 22 nt, Human
gccaucuccacccccagcugcu

SEQ ID NO: 2379809 - RNA, 12 nt, Human
gccaucucugga

SEQ ID NO: 2379810 - RNA, 15 nt, Human
gccaucucuggaugc

SEQ ID NO: 2379811 - RNA, 16 nt, Human
gccaucucuggaugcc

SEQ ID NO: 2379812 - RNA, 19 nt, Human
gccaucucuggaugccuga

SEQ ID NO: 2379813 - RNA, 21 nt, Human
gccaucugcgugacaauaaaa

SEQ ID NO: 2379814 - RNA, 17 nt, Human
gccaucugcccaggggu

SEQ ID NO: 2379815 - RNA, 19 nt, Human
gccaucugcccaggggugc

SEQ ID NO: 2379816 - RNA, 12 nt, Human
gccaucugccca

SEQ ID NO: 2379817 - RNA, 13 nt, Human
gccaucugcccag

SEQ ID NO: 2379818 - RNA, 14 nt, Human
gccaucugcccagg

SEQ ID NO: 2379819 - RNA, 15 nt, Human
gccaucugcccaggg

SEQ ID NO: 2379820 - RNA, 17 nt, Human
gccaugagcuccagacc

SEQ ID NO: 2379821 - RNA, 16 nt, Human
gccaugagcuccagac

SEQ ID NO: 2379822 - RNA, 15 nt, Human
gccaugagcuccaga

SEQ ID NO: 2379823 - RNA, 14 nt, Human
gccaugagcuccag

SEQ ID NO: 2379824 - RNA, 23 nt, Human
gccaugagaugauacauccaaag

SEQ ID NO: 2379825 - RNA, 20 nt, Human
gccaucugcccaggggugcc

SEQ ID NO: 2379826 - RNA, 18 nt, Human
gccaugaccuuacauuuc

SEQ ID NO: 2379827 - RNA, 23 nt, Human
gccaugagcuccagacccccagc

SEQ ID NO: 2379828 - RNA, 22 nt, Human
gccaugagcuccagacccccag

SEQ ID NO: 2379829 - RNA, 19 nt, Human
gccaugagcuccagacccc

SEQ ID NO: 2379830 - RNA, 18 nt, Human
gccaugagcuccagaccc

SEQ ID NO: 2379831 - RNA, 18 nt, Human
gccaugaggaacaaggca

SEQ ID NO: 2379832 - RNA, 18 nt, Human
gccaugccagcuuaucuc

SEQ ID NO: 2379833 - RNA, 13 nt, Human
gccaugccagcuu

SEQ ID NO: 2379834 - RNA, 19 nt, Human
gccaugccagcuuaucuca

SEQ ID NO: 2379835 - RNA, 14 nt, Human
gccaugccacccug

SEQ ID NO: 2379836 - RNA, 18 nt, Human
gccauuuugugaauggau

SEQ ID NO: 2379837 - RNA, 19 nt, Human
gccauuuugugaauggauu

SEQ ID NO: 2379838 - RNA, 18 nt, Human
gcccaaaaauaugguuga

SEQ ID NO: 2379839 - RNA, 22 nt, Human
gcccaaaccaccagaagcccag

SEQ ID NO: 2379840 - RNA, 21 nt, Human
gcccaaaccaccagaagccca

SEQ ID NO: 2379841 - RNA, 13 nt, Human
gcccaacaccagc

SEQ ID NO: 2379842 - RNA, 14 nt, Human
gcccaacaccagcc

SEQ ID NO: 2379843 - RNA, 17 nt, Human
gcccaacaccagccccu

SEQ ID NO: 2379844 - RNA, 18 nt, Human
gcccaacaccagccccug

SEQ ID NO: 2379845 - RNA, 23 nt, Human
gcccaaaccaccagaagcccaga

SEQ ID NO: 2379846 - RNA, 23 nt, Human
gcccaaccggggagcccccgccc

SEQ ID NO: 2379847 - RNA, 16 nt, Human
gcccaacccuucccuc

SEQ ID NO: 2379848 - RNA, 15 nt, Human
gcccaacccugucug

SEQ ID NO: 2379849 - RNA, 16 nt, Human
gcccaacccugucugu

SEQ ID NO: 2379850 - RNA, 15 nt, Human
gcccaacccuucccc

SEQ ID NO: 2379851 - RNA, 16 nt, Human
gcccaacccuucccca

SEQ ID NO: 2379852 - RNA, 13 nt, Human
gcccaacccuguc

SEQ ID NO: 2379853 - RNA, 14 nt, Human
gcccaacccugucu

SEQ ID NO: 2379854 - RNA, 22 nt, Human
gcccaacaccagccccugcccc

SEQ ID NO: 2379855 - RNA, 23 nt, Human
gcccaacagacaccaucuuuugu

SEQ ID NO: 2379856 - RNA, 14 nt, Human
gcccaaccugcucu

SEQ ID NO: 2379857 - RNA, 13 nt, Human
gcccaaccuccug

SEQ ID NO: 2379858 - RNA, 14 nt, Human
gcccaaccuccuga

SEQ ID NO: 2379859 - RNA, 15 nt, Human
gcccaagucccuguu

SEQ ID NO: 2379860 - RNA, 17 nt, Human
gcccaagucccuguuuu

SEQ ID NO: 2379861 - RNA, 20 nt, Human
gccaggguggucuugaucuc

SEQ ID NO: 2379862 - RNA, 13 nt, Human
gccauuuugugaa

SEQ ID NO: 2379863 - RNA, 14 nt, Human
gccauuuugugaau

SEQ ID NO: 2379864 - RNA, 23 nt, Human
gccaugggacagggaggacgcuc

SEQ ID NO: 2379865 - RNA, 21 nt, Human
gccaugggaccaaaccuagcc

SEQ ID NO: 2379866 - RNA, 13 nt, Human
gccaugggaccaa

SEQ ID NO: 2379867 - RNA, 17 nt, Human
gccaugggaccaaaccu

SEQ ID NO: 2379868 - RNA, 12 nt, Human
gccaugggacca

SEQ ID NO: 2379869 - RNA, 18 nt, Human
gccauggacagaagaagg

SEQ ID NO: 2379870 - RNA, 16 nt, Human
gccaugcugggaagac

SEQ ID NO: 2379871 - RNA, 23 nt, Human
gccauggacucuacacugugaac

SEQ ID NO: 2379872 - RNA, 22 nt, Human
gccauggacucuacacugugaa

SEQ ID NO: 2379873 - RNA, 20 nt, Human
gccauggacucuacacugug

SEQ ID NO: 2379874 - RNA, 18 nt, Human
gccauggacucuacacug

SEQ ID NO: 2379875 - RNA, 22 nt, Human
gccaugggacagggaggacgcu

SEQ ID NO: 2379876 - RNA, 13 nt, Human
gccaugcugaggc

SEQ ID NO: 2379877 - RNA, 14 nt, Human
gccaugcugaaggg

SEQ ID NO: 2379878 - RNA, 15 nt, Human
gccaugcugaaggga

SEQ ID NO: 2379879 - RNA, 14 nt, Human
gccaugcugaggcc

SEQ ID NO: 2379880 - RNA, 17 nt, Human
gccaugcugaggccugg

SEQ ID NO: 2379881 - RNA, 18 nt, Human
gccaugcugaggccuggg

SEQ ID NO: 2379882 - RNA, 19 nt, Human
gccaugcugaggccugggc

SEQ ID NO: 2379883 - RNA, 20 nt, Human
gccaugcugaggccugggcc

SEQ ID NO: 2379884 - RNA, 21 nt, Human
gccaugcugaggccugggccg

SEQ ID NO: 2379885 - RNA, 22 nt, Human
gccacacucugggcuccagagu

SEQ ID NO: 2379886 - RNA, 19 nt, Human
gccacacucagcacaaggc

SEQ ID NO: 2379887 - RNA, 21 nt, Human
gccacacuauuaccaugagaa

SEQ ID NO: 2379888 - RNA, 20 nt, Human
gccacacuucaggcucuucu

SEQ ID NO: 2379889 - RNA, 22 nt, Human
gccacacuucaggcucuucucc

SEQ ID NO: 2379890 - RNA, 21 nt, Human
gccacacgucugacccucucc

SEQ ID NO: 2379891 - RNA, 22 nt, Human
gccacacccucccccgccacuc

SEQ ID NO: 2379892 - RNA, 13 nt, Human
gccacacccuccc

SEQ ID NO: 2379893 - RNA, 16 nt, Human
gccacacccucccccg

SEQ ID NO: 2379894 - RNA, 17 nt, Human
gccacacucagcacaag

SEQ ID NO: 2379895 - RNA, 16 nt, Human
gccacacucagcacaa

SEQ ID NO: 2379896 - RNA, 13 nt, Human
gccacacucagca

SEQ ID NO: 2379897 - RNA, 14 nt, Human
gccacaccugagcc

SEQ ID NO: 2379898 - RNA, 18 nt, Human
gccacacuauuaccauga

SEQ ID NO: 2379899 - RNA, 13 nt, Human
gccacagagaaag

SEQ ID NO: 2379900 - RNA, 23 nt, Human
gccacacuucaggcucuucuccu

SEQ ID NO: 2379901 - RNA, 14 nt, Human
gccacagagaaagu

SEQ ID NO: 2379902 - RNA, 20 nt, Human
gccacagagaaaguacuucu

SEQ ID NO: 2379903 - RNA, 11 nt, Human
gccacagcucu

SEQ ID NO: 2379904 - RNA, 16 nt, Human
gccacagccuccccug

SEQ ID NO: 2379905 - RNA, 18 nt, Human
gccacaggacacagucag

SEQ ID NO: 2379906 - RNA, 12 nt, Human
gccacaggacac

SEQ ID NO: 2379907 - RNA, 12 nt, Human
gccacaggccuc

SEQ ID NO: 2379908 - RNA, 13 nt, Human
gccacaggccucc

SEQ ID NO: 2379909 - RNA, 12 nt, Human
gccacaggccug

SEQ ID NO: 2379910 - RNA, 13 nt, Human
gccacaggccuga

SEQ ID NO: 2379911 - RNA, 14 nt, Human
gccacaggccuccc

SEQ ID NO: 2379912 - RNA, 16 nt, Human
gccacaggccucccug

SEQ ID NO: 2379913 - RNA, 17 nt, Human
gccacaggccucccugu

SEQ ID NO: 2379914 - RNA, 21 nt, Human
gccacaggccucccuguuuga

SEQ ID NO: 2379915 - RNA, 15 nt, Human
gccacaggccugaga

SEQ ID NO: 2379916 - RNA, 20 nt, Human
gccacaggccugagauuuca

SEQ ID NO: 2379917 - RNA, 22 nt, Human
gccacaggccugagauuucauc

SEQ ID NO: 2379918 - RNA, 23 nt, Human
gccacaggccugagauuucaucu

SEQ ID NO: 2379919 - RNA, 19 nt, Human
gccacagaagccaggagca

SEQ ID NO: 2379920 - RNA, 21 nt, Human
gccacagccuccccugccagg

SEQ ID NO: 2379921 - RNA, 23 nt, Human
gccacagagaaaguacuucucca

SEQ ID NO: 2379922 - RNA, 14 nt, Human
gccacagaagccag

SEQ ID NO: 2379923 - RNA, 18 nt, Human
gccacagaagccaggagc

SEQ ID NO: 2379924 - RNA, 23 nt, Human
gccacagaggacucacuugccca

SEQ ID NO: 2379925 - RNA, 19 nt, Human
gccacaccaucuccuuuca

SEQ ID NO: 2379926 - RNA, 20 nt, Human
gccacaccaagcugugccac

SEQ ID NO: 2379927 - RNA, 21 nt, Human
gccacaccaagcugugccacc

SEQ ID NO: 2379928 - RNA, 22 nt, Human
gccacaccaagcugugccaccc

SEQ ID NO: 2379929 - RNA, 23 nt, Human
gccacaccaagcugugccacccu

SEQ ID NO: 2379930 - RNA, 13 nt, Human
gccacaccaagcu

SEQ ID NO: 2379931 - RNA, 14 nt, Human
gccacaccaagcug

SEQ ID NO: 2379932 - RNA, 15 nt, Human
gccacaccaagcugu

SEQ ID NO: 2379933 - RNA, 16 nt, Human
gccacaccaagcugug

SEQ ID NO: 2379934 - RNA, 17 nt, Human
gccacaccaagcugugc

SEQ ID NO: 2379935 - RNA, 18 nt, Human
gccacaccaagcugugcc

SEQ ID NO: 2379936 - RNA, 19 nt, Human
gccacaccaagcugugcca

SEQ ID NO: 2379937 - RNA, 23 nt, Human
gccacacaucacccuuaccaugu

SEQ ID NO: 2379938 - RNA, 23 nt, Human
gccacacacacagaaaauauacu

SEQ ID NO: 2379939 - RNA, 13 nt, Human
gccacacagaaac

SEQ ID NO: 2379940 - RNA, 22 nt, Human
gccacacacacagaaaauauac

SEQ ID NO: 2379941 - RNA, 21 nt, Human
gccacacacacagaaaauaua

SEQ ID NO: 2379942 - RNA, 20 nt, Human
gccacacacacagaaaauau

SEQ ID NO: 2379943 - RNA, 19 nt, Human
gccacacacacagaaaaua

SEQ ID NO: 2379944 - RNA, 19 nt, Human
gccacacaaacguuuacuu

SEQ ID NO: 2379945 - RNA, 10 nt, Human
gccacacaca

SEQ ID NO: 2379946 - RNA, 21 nt, Human
gccacaaggacuuccugucca

SEQ ID NO: 2379947 - RNA, 18 nt, Human
gccacacaaacguuuacu

SEQ ID NO: 2379948 - RNA, 19 nt, Human
gccacaaggacuuccuguc

SEQ ID NO: 2379949 - RNA, 18 nt, Human
gccacaaggacuuccugu

SEQ ID NO: 2379950 - RNA, 17 nt, Human
gccacaaggacuuccug

SEQ ID NO: 2379951 - RNA, 14 nt, Human
gccacaaggacuuc

SEQ ID NO: 2379952 - RNA, 18 nt, Human
gccacacacacagaaaau

SEQ ID NO: 2379953 - RNA, 17 nt, Human
gccacacacacagaaaa

SEQ ID NO: 2379954 - RNA, 16 nt, Human
gccacacacacagaaa

SEQ ID NO: 2379955 - RNA, 15 nt, Human
gccacacacacagaa

SEQ ID NO: 2379956 - RNA, 14 nt, Human
gccacacacacaga

SEQ ID NO: 2379957 - RNA, 13 nt, Human
gccacacacacag

SEQ ID NO: 2379958 - RNA, 12 nt, Human
gccacacacaca

SEQ ID NO: 2379959 - RNA, 11 nt, Human
gccacacacac

SEQ ID NO: 2379960 - RNA, 13 nt, Human
gccaauuccuaua

SEQ ID NO: 2379961 - RNA, 20 nt, Human
gccaauuucaaguuccaagu

SEQ ID NO: 2379962 - RNA, 18 nt, Human
gccaauucagacaggcaa

SEQ ID NO: 2379963 - RNA, 17 nt, Human
gccaauucagacaggca

SEQ ID NO: 2379964 - RNA, 15 nt, Human
gccaauucagacagg

SEQ ID NO: 2379965 - RNA, 20 nt, Human
gccaauuauguuaaacuagc

SEQ ID NO: 2379966 - RNA, 20 nt, Human
gccaaugugaacagcggcug

SEQ ID NO: 2379967 - RNA, 14 nt, Human
gccaauuauguuaa

SEQ ID NO: 2379968 - RNA, 15 nt, Human
gccaauuauguuaaa

SEQ ID NO: 2379969 - RNA, 16 nt, Human
gccaauuauguuaaac

SEQ ID NO: 2379970 - RNA, 17 nt, Human
gccaauuauguuaaacu

SEQ ID NO: 2379971 - RNA, 19 nt, Human
gccaauuauguuaaacuag

SEQ ID NO: 2379972 - RNA, 21 nt, Human
gccacaacccuguuuuauacu

SEQ ID NO: 2379973 - RNA, 14 nt, Human
gccacaagaaauuu

SEQ ID NO: 2379974 - RNA, 16 nt, Human
gccacaagaaauuuga

SEQ ID NO: 2379975 - RNA, 23 nt, Human
gccacaagaaauuugauuucuau

SEQ ID NO: 2379976 - RNA, 22 nt, Human
gccacaagacccuugugguccc

SEQ ID NO: 2379977 - RNA, 16 nt, Human
gccacaagacccuugu

SEQ ID NO: 2379978 - RNA, 15 nt, Human
gccacaaauaaaaug

SEQ ID NO: 2379979 - RNA, 22 nt, Human
gccaauuuuucugcacugagca

SEQ ID NO: 2379980 - RNA, 23 nt, Human
gccaauuuuugccuucauuaccu

SEQ ID NO: 2379981 - RNA, 11 nt, Human
gccaauuuuuc

SEQ ID NO: 2379982 - RNA, 13 nt, Human
gccaauuuuucug

SEQ ID NO: 2379983 - RNA, 15 nt, Human
gccaauuuuucugca

SEQ ID NO: 2379984 - RNA, 16 nt, Human
gccaauuuuucugcac

SEQ ID NO: 2379985 - RNA, 12 nt, Human
gccaaguucuua

SEQ ID NO: 2379986 - RNA, 21 nt, Human
gccaaguuccucuagugcccu

SEQ ID NO: 2379987 - RNA, 15 nt, Human
gccaaguuccucuag

SEQ ID NO: 2379988 - RNA, 16 nt, Human
gccaagugcaggcugg

SEQ ID NO: 2379989 - RNA, 15 nt, Human
gccaagugcaggcug

SEQ ID NO: 2379990 - RNA, 13 nt, Human
gccaaguggggug

SEQ ID NO: 2379991 - RNA, 18 nt, Human
gccaaguggggugcuggg

SEQ ID NO: 2379992 - RNA, 23 nt, Human
gccaaguggggugcugggaggag

SEQ ID NO: 2379993 - RNA, 19 nt, Human
gccaaguggggugcuggga

SEQ ID NO: 2379994 - RNA, 20 nt, Human
gccaaguggggugcugggag

SEQ ID NO: 2379995 - RNA, 22 nt, Human
gccaagucagcuuugccuucca

SEQ ID NO: 2379996 - RNA, 12 nt, Human
gccaaguccaga

SEQ ID NO: 2379997 - RNA, 14 nt, Human
gccaaguccagauu

SEQ ID NO: 2379998 - RNA, 20 nt, Human
gccaagugcaggcuggcacc

SEQ ID NO: 2379999 - RNA, 17 nt, Human
gccaaguuuauauacaa

SEQ ID NO: 2380000 - RNA, 15 nt, Human
gccaaguuuauauac

SEQ ID NO: 2380001 - RNA, 20 nt, Human
gccaauaauaauaccucccu

SEQ ID NO: 2380002 - RNA, 20 nt, Human
gccaaguuuauauacaauua

SEQ ID NO: 2380003 - RNA, 13 nt, Human
gccaauauguauu

SEQ ID NO: 2380004 - RNA, 17 nt, Human
gccaauauguauuguaa

SEQ ID NO: 2380005 - RNA, 23 nt, Human
gccaauauguauuguaaacaugu

SEQ ID NO: 2380006 - RNA, 13 nt, Human
gccaauccccucc

SEQ ID NO: 2380007 - RNA, 18 nt, Human
gccaauccccuccuuggg

SEQ ID NO: 2380008 - RNA, 18 nt, Human
gccaauauuaaaucugcu

SEQ ID NO: 2380009 - RNA, 15 nt, Human
gccaaucaagggcaa

SEQ ID NO: 2380010 - RNA, 18 nt, Human
gccaaugccccacuggca

SEQ ID NO: 2380011 - RNA, 13 nt, Human
gccaauggaaccu

SEQ ID NO: 2380012 - RNA, 17 nt, Human
gccaauggaaccuccuu

SEQ ID NO: 2380013 - RNA, 22 nt, Human
gccaaugaggucugaaauggag

SEQ ID NO: 2380014 - RNA, 19 nt, Human
gccaaugaggucugaaaug

SEQ ID NO: 2380015 - RNA, 12 nt, Human
gccaaugagguc

SEQ ID NO: 2380016 - RNA, 19 nt, Human
gccaauccccuccuugggc

SEQ ID NO: 2380017 - RNA, 21 nt, Human
gccaauccccuccuugggcac

SEQ ID NO: 2380018 - RNA, 16 nt, Human
gccaauggagacuguc

SEQ ID NO: 2380019 - RNA, 19 nt, Human
gccaauggagacugucuca

SEQ ID NO: 2380020 - RNA, 21 nt, Human
gccaauggagacugucucaag

SEQ ID NO: 2380021 - RNA, 18 nt, Human
gccaauggaaccuccuuu

SEQ ID NO: 2380022 - RNA, 19 nt, Human
gccaauggaaccuccuuuc

SEQ ID NO: 2380023 - RNA, 20 nt, Human
gccaauggaaccuccuuucu

SEQ ID NO: 2380024 - RNA, 22 nt, Human
gccaauguauugauaagagggc

SEQ ID NO: 2380025 - RNA, 18 nt, Human
gcauuugucaaugacagu

SEQ ID NO: 2380026 - RNA, 11 nt, Human
gcauuugucua

SEQ ID NO: 2380027 - RNA, 12 nt, Human
gcauuugucuau

SEQ ID NO: 2380028 - RNA, 13 nt, Human
gcauuugucaaug

SEQ ID NO: 2380029 - RNA, 15 nt, Human
gcauuugagaaaugc

SEQ ID NO: 2380030 - RNA, 16 nt, Human
gcauuugagaaaugca

SEQ ID NO: 2380031 - RNA, 21 nt, Human
gccaaggcugggggaagaagc

SEQ ID NO: 2380032 - RNA, 12 nt, Human
gcauuugugaaa

SEQ ID NO: 2380033 - RNA, 23 nt, Human
gcauuugucuauucuccagcuga

SEQ ID NO: 2380034 - RNA, 19 nt, Human
gccaaggcuggagugcagu

SEQ ID NO: 2380035 - RNA, 12 nt, Human
gccaagggaaag

SEQ ID NO: 2380036 - RNA, 18 nt, Human
gccaagggaaaggggugc

SEQ ID NO: 2380037 - RNA, 23 nt, Human
gcauuuggugguuucagaaaugu

SEQ ID NO: 2380038 - RNA, 22 nt, Human
gcauuuggugguuucagaaaug

SEQ ID NO: 2380039 - RNA, 20 nt, Human
gcauuugaggucuguucuuu

SEQ ID NO: 2380040 - RNA, 19 nt, Human
gcauuugaggucuguucuu

SEQ ID NO: 2380041 - RNA, 16 nt, Human
gccaaguaagaaagug

SEQ ID NO: 2380042 - RNA, 20 nt, Human
gccaagguuuuauaaggcug

SEQ ID NO: 2380043 - RNA, 23 nt, Human
gccaaggugggcugagcccuggc

SEQ ID NO: 2380044 - RNA, 22 nt, Human
gccaaggugggcugagcccugg

SEQ ID NO: 2380045 - RNA, 21 nt, Human
gccaaggugggcugagcccug

SEQ ID NO: 2380046 - RNA, 19 nt, Human
gccaaggugggcugagccc

SEQ ID NO: 2380047 - RNA, 18 nt, Human
gccaaggugggcugagcc

SEQ ID NO: 2380048 - RNA, 16 nt, Human
gccaaggugggcugag

SEQ ID NO: 2380049 - RNA, 23 nt, Human
gccaaggugggaggauugcuuga

SEQ ID NO: 2380050 - RNA, 15 nt, Human
gccaaggugggagga

SEQ ID NO: 2380051 - RNA, 14 nt, Human
gccaaggugggagg

SEQ ID NO: 2380052 - RNA, 16 nt, Human
gccaagggcuuuguuu

SEQ ID NO: 2380053 - RNA, 22 nt, Human
gccaagguagccaucccaugaa

SEQ ID NO: 2380054 - RNA, 18 nt, Human
gccaagggaaccuguguc

SEQ ID NO: 2380055 - RNA, 19 nt, Human
gccaagggaaccugugucc

SEQ ID NO: 2380056 - RNA, 22 nt, Human
gccaagggaaaggggugcuuuu

SEQ ID NO: 2380057 - RNA, 21 nt, Human
gccaagggaugaaagagaagg

SEQ ID NO: 2380058 - RNA, 22 nt, Human
gccacaggccucccuguuugaa

SEQ ID NO: 2380059 - RNA, 18 nt, Human
gccacaguagucuugaug

SEQ ID NO: 2380060 - RNA, 12 nt, Human
gccacaguuguu

SEQ ID NO: 2380061 - RNA, 15 nt, Human
gccacaucaaagagg

SEQ ID NO: 2380062 - RNA, 17 nt, Human
gccaccgcgcccagccu

SEQ ID NO: 2380063 - RNA, 14 nt, Human
gccacaugaguccc

SEQ ID NO: 2380064 - RNA, 16 nt, Human
gccacaugagucccag

SEQ ID NO: 2380065 - RNA, 18 nt, Human
gccacaugagucccagug

SEQ ID NO: 2380066 - RNA, 23 nt, Human
gccacaucuugaucugcucagcc

SEQ ID NO: 2380067 - RNA, 19 nt, Human
gccaccgccuccuacagcc

SEQ ID NO: 2380068 - RNA, 15 nt, Human
gccaccuccccaggc

SEQ ID NO: 2380069 - RNA, 11 nt, Human
gccaccucccc

SEQ ID NO: 2380070 - RNA, 15 nt, Human
gccaccuccagaaac

SEQ ID NO: 2380071 - RNA, 13 nt, Human
gccaccuccagaa

SEQ ID NO: 2380072 - RNA, 21 nt, Human
gccaccuaucucgugggagag

SEQ ID NO: 2380073 - RNA, 22 nt, Human
gccaccuaucucgugggagagc

SEQ ID NO: 2380074 - RNA, 17 nt, Human
gccaccuccccaggccg

SEQ ID NO: 2380075 - RNA, 13 nt, Human
gccaccuccccua

SEQ ID NO: 2380076 - RNA, 12 nt, Human
gccaccuccccu

SEQ ID NO: 2380077 - RNA, 21 nt, Human
gccaccuccccuauccaccca

SEQ ID NO: 2380078 - RNA, 20 nt, Human
gccaccuccccuauccaccc

SEQ ID NO: 2380079 - RNA, 17 nt, Human
gccaccuccccuaucca

SEQ ID NO: 2380080 - RNA, 15 nt, Human
gccaccuccccuauc

SEQ ID NO: 2380081 - RNA, 22 nt, Human
gccaccgugccuggccacgccc

SEQ ID NO: 2380082 - RNA, 23 nt, Human
gccaccgcuuccggcuccugugc

SEQ ID NO: 2380083 - RNA, 15 nt, Human
gccaccuaucucgug

SEQ ID NO: 2380084 - RNA, 19 nt, Human
gccaccuaucucgugggag

SEQ ID NO: 2380085 - RNA, 20 nt, Human
gccaccuaucucgugggaga

SEQ ID NO: 2380086 - RNA, 17 nt, Human
gccaccgugccuggcca

SEQ ID NO: 2380087 - RNA, 17 nt, Human
gccaccgcgccuggccg

SEQ ID NO: 2380088 - RNA, 20 nt, Human
gccaccgcuuccggcuccug

SEQ ID NO: 2380089 - RNA, 17 nt, Human
gccaccugcccccuucu

SEQ ID NO: 2380090 - RNA, 16 nt, Human
gccaccugcccccuuc

SEQ ID NO: 2380091 - RNA, 14 nt, Human
gccaccugcccccu

SEQ ID NO: 2380092 - RNA, 13 nt, Human
gccaccugccccc

SEQ ID NO: 2380093 - RNA, 17 nt, Human
gccaccugccuguuggg

SEQ ID NO: 2380094 - RNA, 23 nt, Human
gccaccugaggugggcccaggac

SEQ ID NO: 2380095 - RNA, 21 nt, Human
gccaccugaggugggcccagg

SEQ ID NO: 2380096 - RNA, 22 nt, Human
gccaccugaggugggcccagga

SEQ ID NO: 2380097 - RNA, 15 nt, Human
gccaccugagguggg

SEQ ID NO: 2380098 - RNA, 18 nt, Human
gccaccugaggugggccc

SEQ ID NO: 2380099 - RNA, 19 nt, Human
gccaccugaggugggccca

SEQ ID NO: 2380100 - RNA, 20 nt, Human
gccaccugaggugggcccag

SEQ ID NO: 2380101 - RNA, 22 nt, Human
gccaccucugcggaccccagcu

SEQ ID NO: 2380102 - RNA, 22 nt, Human
gccaccuccccuauccacccag

SEQ ID NO: 2380103 - RNA, 20 nt, Human
gccaccucccugacccgucu

SEQ ID NO: 2380104 - RNA, 12 nt, Human
gccaccucucca

SEQ ID NO: 2380105 - RNA, 13 nt, Human
gccaccucuccaa

SEQ ID NO: 2380106 - RNA, 14 nt, Human
gccaccucuccaag

SEQ ID NO: 2380107 - RNA, 15 nt, Human
gccaccucuccaagg

SEQ ID NO: 2380108 - RNA, 17 nt, Human
gccaccucuccaagggc

SEQ ID NO: 2380109 - RNA, 18 nt, Human
gccaccucuccaagggcu

SEQ ID NO: 2380110 - RNA, 22 nt, Human
gccaccucuccaagggcuucug

SEQ ID NO: 2380111 - RNA, 23 nt, Human
gccaccucuccaagggcuucugc

SEQ ID NO: 2380112 - RNA, 15 nt, Human
gccaccucucccuca

SEQ ID NO: 2380113 - RNA, 13 nt, Human
gccaccucucucc

SEQ ID NO: 2380114 - RNA, 16 nt, Human
gccaccucucuccuuu

SEQ ID NO: 2380115 - RNA, 11 nt, Human
gccaccucugc

SEQ ID NO: 2380116 - RNA, 14 nt, Human
gccaccucugcgga

SEQ ID NO: 2380117 - RNA, 20 nt, Human
gccaccucugcggaccccag

SEQ ID NO: 2380118 - RNA, 21 nt, Human
gccaccucugcggaccccagc

SEQ ID NO: 2380119 - RNA, 23 nt, Human
gccaccucugcggaccccagcug

SEQ ID NO: 2380120 - RNA, 13 nt, Human
gccacggcagccu

SEQ ID NO: 2380121 - RNA, 22 nt, Human
gccacgggucuguguucgacuc

SEQ ID NO: 2380122 - RNA, 14 nt, Human
gccacgugccaggc

SEQ ID NO: 2380123 - RNA, 13 nt, Human
gccacgugccagg

SEQ ID NO: 2380124 - RNA, 19 nt, Human
gccacggccaggccagagg

SEQ ID NO: 2380125 - RNA, 19 nt, Human
gccacuacacuccagccug

SEQ ID NO: 2380126 - RNA, 18 nt, Human
gccacuacacuccagccu

SEQ ID NO: 2380127 - RNA, 17 nt, Human
gccacuacacuccagcc

SEQ ID NO: 2380128 - RNA, 23 nt, Human
gccacuaagcagaggaggggccg

SEQ ID NO: 2380129 - RNA, 20 nt, Human
gccacuaagcagaggagggg

SEQ ID NO: 2380130 - RNA, 19 nt, Human
gccacuaagcagaggaggg

SEQ ID NO: 2380131 - RNA, 17 nt, Human
gccacuaagcagaggag

SEQ ID NO: 2380132 - RNA, 16 nt, Human
gccacuaagcagagga

SEQ ID NO: 2380133 - RNA, 15 nt, Human
gccacuaagcagagg

SEQ ID NO: 2380134 - RNA, 14 nt, Human
gccacuaagcagag

SEQ ID NO: 2380135 - RNA, 13 nt, Human
gccacuaagcaga

SEQ ID NO: 2380136 - RNA, 18 nt, Human
gccacggccaggccagag

SEQ ID NO: 2380137 - RNA, 17 nt, Human
gccacggccaggccaga

SEQ ID NO: 2380138 - RNA, 20 nt, Human
gccacgcccaacuaauuuuu

SEQ ID NO: 2380139 - RNA, 23 nt, Human
gccaccugcccccuucucccaca

SEQ ID NO: 2380140 - RNA, 20 nt, Human
gccaccugcccccuucuccc

SEQ ID NO: 2380141 - RNA, 18 nt, Human
gccaccugcccccuucuc

SEQ ID NO: 2380142 - RNA, 21 nt, Human
gccaccugcccccuucuccca

SEQ ID NO: 2380143 - RNA, 22 nt, Human
gccaccugcggugcuaucuccc

SEQ ID NO: 2380144 - RNA, 14 nt, Human
gccaccugcggugc

SEQ ID NO: 2380145 - RNA, 20 nt, Human
gccaccugcggugcuaucuc

SEQ ID NO: 2380146 - RNA, 15 nt, Human
gccacgauugcagga

SEQ ID NO: 2380147 - RNA, 12 nt, Human
gccaccuggggc

SEQ ID NO: 2380148 - RNA, 20 nt, Human
gccaccuggcauuccuucug

SEQ ID NO: 2380149 - RNA, 17 nt, Human
gccaccuggggcaguca

SEQ ID NO: 2380150 - RNA, 16 nt, Human
gccaccuggggcaguc

SEQ ID NO: 2380151 - RNA, 14 nt, Human
gccaccuggggcag

SEQ ID NO: 2380152 - RNA, 11 nt, Human
gccaccugggu

SEQ ID NO: 2380153 - RNA, 21 nt, Human
gccagagggagugacagaggc

SEQ ID NO: 2380154 - RNA, 22 nt, Human
gccagagggagugacagaggca

SEQ ID NO: 2380155 - RNA, 19 nt, Human
gccagaggagagaggaccc

SEQ ID NO: 2380156 - RNA, 22 nt, Human
gccagaggagagaggacccccu

SEQ ID NO: 2380157 - RNA, 12 nt, Human
gccagaggagag

SEQ ID NO: 2380158 - RNA, 13 nt, Human
gccagaggagaga

SEQ ID NO: 2380159 - RNA, 15 nt, Human
gccagaggagagagg

SEQ ID NO: 2380160 - RNA, 17 nt, Human
gccagaggagagaggac

SEQ ID NO: 2380161 - RNA, 22 nt, Human
gccagaguggccuggccaggag

SEQ ID NO: 2380162 - RNA, 19 nt, Human
gccagaguggccuggccag

SEQ ID NO: 2380163 - RNA, 18 nt, Human
gccagaguggccuggcca

SEQ ID NO: 2380164 - RNA, 17 nt, Human
gccagaguggccuggcc

SEQ ID NO: 2380165 - RNA, 15 nt, Human
gccagaguggccugg

SEQ ID NO: 2380166 - RNA, 14 nt, Human
gccagaguggccug

SEQ ID NO: 2380167 - RNA, 13 nt, Human
gccagaguggccu

SEQ ID NO: 2380168 - RNA, 22 nt, Human
gccagaggugggcagguggugg

SEQ ID NO: 2380169 - RNA, 17 nt, Human
gccagaguccuuuccaa

SEQ ID NO: 2380170 - RNA, 23 nt, Human
gccagagggagugacagaggcag

SEQ ID NO: 2380171 - RNA, 12 nt, Human
gccagagguggg

SEQ ID NO: 2380172 - RNA, 15 nt, Human
gccagaggugggcag

SEQ ID NO: 2380173 - RNA, 16 nt, Human
gccagaggugggcagg

SEQ ID NO: 2380174 - RNA, 17 nt, Human
gccagaggugggcaggu

SEQ ID NO: 2380175 - RNA, 19 nt, Human
gccagaggugggcaggugg

SEQ ID NO: 2380176 - RNA, 20 nt, Human
gccagaggugggcagguggu

SEQ ID NO: 2380177 - RNA, 24 nt, Human
gccagaguggccuggccaggagcu

SEQ ID NO: 2380178 - RNA, 23 nt, Human
gccagaguggccuggccaggagc

SEQ ID NO: 2380179 - RNA, 13 nt, Human
gccagaguuccug

SEQ ID NO: 2380180 - RNA, 18 nt, Human
gccagaguuccugcggag

SEQ ID NO: 2380181 - RNA, 22 nt, Human
gccagaguuccugcggagugaa

SEQ ID NO: 2380182 - RNA, 24 nt, Human
gccagaguuccugcggagugaaga

SEQ ID NO: 2380183 - RNA, 16 nt, Human
gccagaugcaccagcc

SEQ ID NO: 2380184 - RNA, 17 nt, Human
gccagaugcaccagccc

SEQ ID NO: 2380185 - RNA, 18 nt, Human
gccagaugcaccagcccu

SEQ ID NO: 2380186 - RNA, 17 nt, Human
gccacugaagcugggau

SEQ ID NO: 2380187 - RNA, 15 nt, Human
gccacugaagcuggg

SEQ ID NO: 2380188 - RNA, 14 nt, Human
gccacugaagcugg

SEQ ID NO: 2380189 - RNA, 21 nt, Human
gccacucugccucugccugca

SEQ ID NO: 2380190 - RNA, 19 nt, Human
gccacucugccucugccug

SEQ ID NO: 2380191 - RNA, 13 nt, Human
gccacucuuccaa

SEQ ID NO: 2380192 - RNA, 17 nt, Human
gccacucugccucugcc

SEQ ID NO: 2380193 - RNA, 15 nt, Human
gccacucugccucug

SEQ ID NO: 2380194 - RNA, 14 nt, Human
gccacucugccucu

SEQ ID NO: 2380195 - RNA, 13 nt, Human
gccacucugccuc

SEQ ID NO: 2380196 - RNA, 18 nt, Human
gccagacuggcacaguuu

SEQ ID NO: 2380197 - RNA, 15 nt, Human
gccagacuggcacag

SEQ ID NO: 2380198 - RNA, 12 nt, Human
gccacucugccu

SEQ ID NO: 2380199 - RNA, 20 nt, Human
gccacucgggaggcugagac

SEQ ID NO: 2380200 - RNA, 23 nt, Human
gccacucgggaggcugagacagg

SEQ ID NO: 2380201 - RNA, 18 nt, Human
gccacucgcuucccccau

SEQ ID NO: 2380202 - RNA, 14 nt, Human
gccacucgcuuccc

SEQ ID NO: 2380203 - RNA, 15 nt, Human
gccacuccugaaccc

SEQ ID NO: 2380204 - RNA, 23 nt, Human
gccacuccucugacucagggcuc

SEQ ID NO: 2380205 - RNA, 23 nt, Human
gccacuacacuccagccugagca

SEQ ID NO: 2380206 - RNA, 22 nt, Human
gccacuacacuccagccugagc

SEQ ID NO: 2380207 - RNA, 21 nt, Human
gccacuacacuccagccugag

SEQ ID NO: 2380208 - RNA, 20 nt, Human
gccacuacacuccagccuga

SEQ ID NO: 2380209 - RNA, 22 nt, Human
gccacucugccucugccugcau

SEQ ID NO: 2380210 - RNA, 13 nt, Human
gccagacucuggu

SEQ ID NO: 2380211 - RNA, 15 nt, Human
gccagacucuggucu

SEQ ID NO: 2380212 - RNA, 20 nt, Human
gccagagacacaagccuucg

SEQ ID NO: 2380213 - RNA, 10 nt, Human
gccagaggag

SEQ ID NO: 2380214 - RNA, 17 nt, Human
gccagagacacaagccu

SEQ ID NO: 2380215 - RNA, 19 nt, Human
gccagagacacaagccuuc

SEQ ID NO: 2380216 - RNA, 16 nt, Human
gccagagacacaagcc

SEQ ID NO: 2380217 - RNA, 19 nt, Human
gccagacuggcacaguuuu

SEQ ID NO: 2380218 - RNA, 12 nt, Human
gauucagaaauu

SEQ ID NO: 2380219 - RNA, 14 nt, Human
gauucagaagggga

SEQ ID NO: 2380220 - RNA, 22 nt, Human
gauucccaagcucugcuccucu

SEQ ID NO: 2380221 - RNA, 21 nt, Human
gauucacccuguccaaacugc

SEQ ID NO: 2380222 - RNA, 14 nt, Human
gauucaccugagca

SEQ ID NO: 2380223 - RNA, 12 nt, Human
gauucagacagc

SEQ ID NO: 2380224 - RNA, 14 nt, Human
gauucacaucugca

SEQ ID NO: 2380225 - RNA, 23 nt, Human
gauucaacuaaaaaaaaaaaagu

SEQ ID NO: 2380226 - RNA, 21 nt, Human
gauucacaccugacucugaaa

SEQ ID NO: 2380227 - RNA, 12 nt, Human
gauucacacugu

SEQ ID NO: 2380228 - RNA, 18 nt, Human
gauucaaucgacuggguu

SEQ ID NO: 2380229 - RNA, 21 nt, Human
gauucaaaauugacauugcuu

SEQ ID NO: 2380230 - RNA, 19 nt, Human
gauucaaucuguaaacugu

SEQ ID NO: 2380231 - RNA, 18 nt, Human
gauucaaucuguaaacug

SEQ ID NO: 2380232 - RNA, 16 nt, Human
gauucaaucuguaaac

SEQ ID NO: 2380233 - RNA, 14 nt, Human
gauucaaucuguaa

SEQ ID NO: 2380234 - RNA, 17 nt, Human
gauuccccauugccucc

SEQ ID NO: 2380235 - RNA, 21 nt, Human
gauucccuccugcuacucugu

SEQ ID NO: 2380236 - RNA, 21 nt, Human
gauuccccuaaccucauuccc

SEQ ID NO: 2380237 - RNA, 22 nt, Human
gauuccccauugccuccuccuu

SEQ ID NO: 2380238 - RNA, 19 nt, Human
gauucccagagcaaaauaa

SEQ ID NO: 2380239 - RNA, 17 nt, Human
gauucccaggaugagca

SEQ ID NO: 2380240 - RNA, 14 nt, Human
gauucccagagaca

SEQ ID NO: 2380241 - RNA, 13 nt, Human
gauucccagagac

SEQ ID NO: 2380242 - RNA, 16 nt, Human
gauucccaccaagguc

SEQ ID NO: 2380243 - RNA, 22 nt, Human
gauucccaccaaggucuucagc

SEQ ID NO: 2380244 - RNA, 21 nt, Human
gauucccagagacaggaaaau

SEQ ID NO: 2380245 - RNA, 19 nt, Human
gauucccagagacaggaaa

SEQ ID NO: 2380246 - RNA, 13 nt, Human
gauucccagagca

SEQ ID NO: 2380247 - RNA, 15 nt, Human
gauuccugagccagu

SEQ ID NO: 2380248 - RNA, 23 nt, Human
gauucuaccacacagcagcaguu

SEQ ID NO: 2380249 - RNA, 19 nt, Human
gauucuaauuuuuaagcaa

SEQ ID NO: 2380250 - RNA, 12 nt, Human
gauuccugaccc

SEQ ID NO: 2380251 - RNA, 13 nt, Human
gauuccugaccca

SEQ ID NO: 2380252 - RNA, 15 nt, Human
gauuccugacccagg

SEQ ID NO: 2380253 - RNA, 16 nt, Human
gauuccugacccaggc

SEQ ID NO: 2380254 - RNA, 17 nt, Human
gauuccugacccaggcc

SEQ ID NO: 2380255 - RNA, 18 nt, Human
gauuccugacccaggccg

SEQ ID NO: 2380256 - RNA, 19 nt, Human
gauuccugacccaggccgc

SEQ ID NO: 2380257 - RNA, 19 nt, Human
gauugacagcuuugcugcu

SEQ ID NO: 2380258 - RNA, 17 nt, Human
gauugacagcuuugcug

SEQ ID NO: 2380259 - RNA, 23 nt, Human
gauugacgggacuguugguauug

SEQ ID NO: 2380260 - RNA, 18 nt, Human
gauugcuugagcucagga

SEQ ID NO: 2380261 - RNA, 14 nt, Human
gauuggacauuuuc

SEQ ID NO: 2380262 - RNA, 23 nt, Human
gauucuacuuuaagcacuacaua

SEQ ID NO: 2380263 - RNA, 15 nt, Human
gauucuaaugucuuc

SEQ ID NO: 2380264 - RNA, 14 nt, Human
gauucuacuuuaag

SEQ ID NO: 2380265 - RNA, 18 nt, Human
gauucuacuuuaagcacu

SEQ ID NO: 2380266 - RNA, 22 nt, Human
gauucuacuuuaagcacuacau

SEQ ID NO: 2380267 - RNA, 20 nt, Human
gauugaaaacuuuucucaga

SEQ ID NO: 2380268 - RNA, 21 nt, Human
gauugaaaacuuuucucagau

SEQ ID NO: 2380269 - RNA, 16 nt, Human
gauugacagcuuugcu

SEQ ID NO: 2380270 - RNA, 23 nt, Human
gauugaaguauuuugcuggaaua

SEQ ID NO: 2380271 - RNA, 21 nt, Human
gauugaaguauuuugcuggaa

SEQ ID NO: 2380272 - RNA, 23 nt, Human
gauuggacggccugaugcucccu

SEQ ID NO: 2380273 - RNA, 16 nt, Human
gauuggacggccugau

SEQ ID NO: 2380274 - RNA, 22 nt, Human
gauuggauacgcaucagacaga

SEQ ID NO: 2380275 - RNA, 22 nt, Human
gauuggagauagggaaagaaag

SEQ ID NO: 2380276 - RNA, 11 nt, Human
gauuggauuau

SEQ ID NO: 2380277 - RNA, 14 nt, Human
gauuggauuauuca

SEQ ID NO: 2380278 - RNA, 15 nt, Human
gauuggauuauucau

SEQ ID NO: 2380279 - RNA, 17 nt, Human
gauuggauuauucauuu

SEQ ID NO: 2380280 - RNA, 20 nt, Human
gauuggauuauucauuuaaa

SEQ ID NO: 2380281 - RNA, 13 nt, Human
gauuggauuauuu

SEQ ID NO: 2380282 - RNA, 20 nt, Human
gauuggauuauuuaauaaca

SEQ ID NO: 2380283 - RNA, 21 nt, Human
gauuggauuauuuaauaacau

SEQ ID NO: 2380284 - RNA, 22 nt, Human
gauuggauuauuuaauaacauu

SEQ ID NO: 2380285 - RNA, 22 nt, Human
gauuguaacguugcugugggaa

SEQ ID NO: 2380286 - RNA, 23 nt, Human
gauuguaacguugcugugggaac

SEQ ID NO: 2380287 - RNA, 15 nt, Human
gauuguccccgaccc

SEQ ID NO: 2380288 - RNA, 23 nt, Human
gauugugggaauuaaggaaguga

SEQ ID NO: 2380289 - RNA, 21 nt, Human
gauugugaauauuuccauaug

SEQ ID NO: 2380290 - RNA, 13 nt, Human
gauugugccccug

SEQ ID NO: 2380291 - RNA, 20 nt, Human
gauuguccccgacccuugcc

SEQ ID NO: 2380292 - RNA, 16 nt, Human
gaugggcccaauucuu

SEQ ID NO: 2380293 - RNA, 14 nt, Human
gaugggccaccgcc

SEQ ID NO: 2380294 - RNA, 13 nt, Human
gaugggccaccgc

SEQ ID NO: 2380295 - RNA, 15 nt, Human
gaugggccaccgccg

SEQ ID NO: 2380296 - RNA, 22 nt, Human
gaugggcauggggugggccucu

SEQ ID NO: 2380297 - RNA, 20 nt, Human
gaugggcauggggugggccu

SEQ ID NO: 2380298 - RNA, 21 nt, Human
gaugggcauggggugggccuc

SEQ ID NO: 2380299 - RNA, 22 nt, Human
gaugggagcuccucuccuggag

SEQ ID NO: 2380300 - RNA, 23 nt, Human
gaugggagcuccucuccuggagg

SEQ ID NO: 2380301 - RNA, 17 nt, Human
gaugggcaugggguggg

SEQ ID NO: 2380302 - RNA, 13 nt, Human
gauggggaaggag

SEQ ID NO: 2380303 - RNA, 18 nt, Human
gaugggcuuguuuucuug

SEQ ID NO: 2380304 - RNA, 20 nt, Human
gaugggccugcuuccugucu

SEQ ID NO: 2380305 - RNA, 20 nt, Human
gauggugcaaugaccuuuca

SEQ ID NO: 2380306 - RNA, 14 nt, Human
gauggggaaggagg

SEQ ID NO: 2380307 - RNA, 14 nt, Human
gauggugcugagaa

SEQ ID NO: 2380308 - RNA, 12 nt, Human
gauggugcugag

SEQ ID NO: 2380309 - RNA, 17 nt, Human
gauggugcugagaagcu

SEQ ID NO: 2380310 - RNA, 16 nt, Human
gauggugcugagaagc

SEQ ID NO: 2380311 - RNA, 14 nt, Human
gaugguggagggcc

SEQ ID NO: 2380312 - RNA, 23 nt, Human
gauggugcaaugaccuuucaaua

SEQ ID NO: 2380313 - RNA, 13 nt, Human
gaugugccugggu

SEQ ID NO: 2380314 - RNA, 20 nt, Human
gaugugccauuuuaaaaaaa

SEQ ID NO: 2380315 - RNA, 15 nt, Human
gaugguggagggcca

SEQ ID NO: 2380316 - RNA, 15 nt, Human
gaugugccugggugg

SEQ ID NO: 2380317 - RNA, 19 nt, Human
gaugugcuuguuaacugag

SEQ ID NO: 2380318 - RNA, 21 nt, Human
gaugugcuuugcauuccuaca

SEQ ID NO: 2380319 - RNA, 11 nt, Human
gaugugcuuuu

SEQ ID NO: 2380320 - RNA, 20 nt, Human
gaugugcuuguuaacugagu

SEQ ID NO: 2380321 - RNA, 23 nt, Human
gauguggaaaagccaagaggcug

SEQ ID NO: 2380322 - RNA, 21 nt, Human
gauguggaaaagccaagaggc

SEQ ID NO: 2380323 - RNA, 16 nt, Human
gaugugcuuuucucca

SEQ ID NO: 2380324 - RNA, 22 nt, Human
gauguguacaucccauguaaca

SEQ ID NO: 2380325 - RNA, 12 nt, Human
gauguguacauc

SEQ ID NO: 2380326 - RNA, 13 nt, Human
gaugugugcaugu

SEQ ID NO: 2380327 - RNA, 21 nt, Human
gauguguccugauaagcugag

SEQ ID NO: 2380328 - RNA, 14 nt, Human
gauguucugggaca

SEQ ID NO: 2380329 - RNA, 12 nt, Human
gauguguuguga

SEQ ID NO: 2380330 - RNA, 14 nt, Human
gauguguugugaua

SEQ ID NO: 2380331 - RNA, 16 nt, Human
gauguucugggacaca

SEQ ID NO: 2380332 - RNA, 21 nt, Human
gauuaaccacuucagcugacu

SEQ ID NO: 2380333 - RNA, 19 nt, Human
gauuaaccacuucagcuga

SEQ ID NO: 2380334 - RNA, 18 nt, Human
gauuaaccacuucagcug

SEQ ID NO: 2380335 - RNA, 23 nt, Human
gauguuuuagccauuguuggcuu

SEQ ID NO: 2380336 - RNA, 18 nt, Human
gauguuuuaauuccauga

SEQ ID NO: 2380337 - RNA, 21 nt, Human
gauguuuuacgucugggagaa

SEQ ID NO: 2380338 - RNA, 22 nt, Human
gauuaagagauggguuugacaa

SEQ ID NO: 2380339 - RNA, 22 nt, Human
gauuaagaucucagugguuaag

SEQ ID NO: 2380340 - RNA, 17 nt, Human
gauuaaccucugcacua

SEQ ID NO: 2380341 - RNA, 14 nt, Human
gauuaaccucugca

SEQ ID NO: 2380342 - RNA, 19 nt, Human
gauucaacagguuuuccug

SEQ ID NO: 2380343 - RNA, 13 nt, Human
gauuaagagccau

SEQ ID NO: 2380344 - RNA, 11 nt, Human
gauguuaacac

SEQ ID NO: 2380345 - RNA, 17 nt, Human
gauuauuuuuucagacc

SEQ ID NO: 2380346 - RNA, 18 nt, Human
gauuauuuuuucagaccg

SEQ ID NO: 2380347 - RNA, 21 nt, Human
gauuauuuuuucagaccgaaa

SEQ ID NO: 2380348 - RNA, 19 nt, Human
gauuaaauucuugcaaagu

SEQ ID NO: 2380349 - RNA, 12 nt, Human
gauuaaauucuu

SEQ ID NO: 2380350 - RNA, 15 nt, Human
gauguuuuccaugag

SEQ ID NO: 2380351 - RNA, 23 nt, Human
gauguuuuccaugaguccccugu

SEQ ID NO: 2380352 - RNA, 14 nt, Human
gauguuuuccauga

SEQ ID NO: 2380353 - RNA, 13 nt, Human
gauguuuuaauuc

SEQ ID NO: 2380354 - RNA, 21 nt, Human
gauguucuuucacccuuuucu

SEQ ID NO: 2380355 - RNA, 19 nt, Human
gauguugaaaaaguucugc

SEQ ID NO: 2380356 - RNA, 18 nt, Human
gaucuuucuuuccuuucu

SEQ ID NO: 2380357 - RNA, 16 nt, Human
gaucuuuucaaguuaa

SEQ ID NO: 2380358 - RNA, 15 nt, Human
gaugaaaaaauaaca

SEQ ID NO: 2380359 - RNA, 14 nt, Human
gaugaaaaauagca

SEQ ID NO: 2380360 - RNA, 15 nt, Human
gaugaaaaagcaugu

SEQ ID NO: 2380361 - RNA, 16 nt, Human
gaugaaaaagcaugua

SEQ ID NO: 2380362 - RNA, 17 nt, Human
gaugaaaaagcauguac

SEQ ID NO: 2380363 - RNA, 18 nt, Human
gaugaaaaagcauguaca

SEQ ID NO: 2380364 - RNA, 19 nt, Human
gaugaaaaagcauguacag

SEQ ID NO: 2380365 - RNA, 20 nt, Human
gaugaaaaagcauguacagu

SEQ ID NO: 2380366 - RNA, 22 nt, Human
gaugaaaaagcauguacagugu

SEQ ID NO: 2380367 - RNA, 15 nt, Human
gaucuuucaggaaag

SEQ ID NO: 2380368 - RNA, 12 nt, Human
gaucuuucagga

SEQ ID NO: 2380369 - RNA, 11 nt, Human
gaucuuucagg

SEQ ID NO: 2380370 - RNA, 16 nt, Human
gaucuuugcagacagg

SEQ ID NO: 2380371 - RNA, 14 nt, Human
gaucuuuaaaauac

SEQ ID NO: 2380372 - RNA, 15 nt, Human
gaucuucaauggcuu

SEQ ID NO: 2380373 - RNA, 16 nt, Human
gaucuucaauggcuuu

SEQ ID NO: 2380374 - RNA, 14 nt, Human
gaucuucagagcag

SEQ ID NO: 2380375 - RNA, 14 nt, Human
gaucuucaauggcu

SEQ ID NO: 2380376 - RNA, 23 nt, Human
gaucuguuuuuaaaaaucauaaa

SEQ ID NO: 2380377 - RNA, 21 nt, Human
gaucuguuuuuaaaaaucaua

SEQ ID NO: 2380378 - RNA, 19 nt, Human
gaucuguuuuuaaaaauca

SEQ ID NO: 2380379 - RNA, 14 nt, Human
gaucgcccccaccu

SEQ ID NO: 2380380 - RNA, 19 nt, Human
gaucuuaaauuuugugaua

SEQ ID NO: 2380381 - RNA, 12 nt, Human
gaucuuaaauuu

SEQ ID NO: 2380382 - RNA, 13 nt, Human
gaucuuaaauuuu

SEQ ID NO: 2380383 - RNA, 18 nt, Human
gaucgcaguuugccuggu

SEQ ID NO: 2380384 - RNA, 15 nt, Human
gaucgcaucauugca

SEQ ID NO: 2380385 - RNA, 23 nt, Human
gaucgcaucauugcacucuagcc

SEQ ID NO: 2380386 - RNA, 20 nt, Human
gaucuguuuugaaggcaaaa

SEQ ID NO: 2380387 - RNA, 19 nt, Human
gaucuguuuugaaggcaaa

SEQ ID NO: 2380388 - RNA, 13 nt, Human
gaucgcaguuugc

SEQ ID NO: 2380389 - RNA, 20 nt, Human
gaucgcaagagccauguaga

SEQ ID NO: 2380390 - RNA, 17 nt, Human
gaucgaaccguuuugaa

SEQ ID NO: 2380391 - RNA, 17 nt, Human
gauccuuuuggagucag

SEQ ID NO: 2380392 - RNA, 15 nt, Human
gauccuuuuggaguc

SEQ ID NO: 2380393 - RNA, 18 nt, Human
gauccucccaccucagcc

SEQ ID NO: 2380394 - RNA, 23 nt, Human
gauccucauauggcccaguguca

SEQ ID NO: 2380395 - RNA, 20 nt, Human
gauccuauucucaccaggaa

SEQ ID NO: 2380396 - RNA, 19 nt, Human
gauccucacaaccaccuaa

SEQ ID NO: 2380397 - RNA, 14 nt, Human
gauccuuuuauguu

SEQ ID NO: 2380398 - RNA, 12 nt, Human
gauccuuccucc

SEQ ID NO: 2380399 - RNA, 15 nt, Human
gaucacgccacugca

SEQ ID NO: 2380400 - RNA, 18 nt, Human
gauccuaguuccaccauc

SEQ ID NO: 2380401 - RNA, 11 nt, Human
gauccuccagg

SEQ ID NO: 2380402 - RNA, 19 nt, Human
gauccuauucucaccagga

SEQ ID NO: 2380403 - RNA, 18 nt, Human
gauccuauucucaccagg

SEQ ID NO: 2380404 - RNA, 14 nt, Human
gaucaagcugugag

SEQ ID NO: 2380405 - RNA, 16 nt, Human
gaucaaggagaggagg

SEQ ID NO: 2380406 - RNA, 14 nt, Human
gaucaagaaagugu

SEQ ID NO: 2380407 - RNA, 16 nt, Human
gauauauuuuuaagau

SEQ ID NO: 2380408 - RNA, 23 nt, Human
gaucaaccccuucgcuccugugu

SEQ ID NO: 2380409 - RNA, 13 nt, Human
gaucacgccacug

SEQ ID NO: 2380410 - RNA, 14 nt, Human
gaucacgccacugc

SEQ ID NO: 2380411 - RNA, 19 nt, Human
gauccucccaccucagccu

SEQ ID NO: 2380412 - RNA, 12 nt, Human
gauccuccaggu

SEQ ID NO: 2380413 - RNA, 20 nt, Human
gauccucccaccucagccuc

SEQ ID NO: 2380414 - RNA, 21 nt, Human
gauccucccaccucagccucc

SEQ ID NO: 2380415 - RNA, 13 nt, Human
gauccugagccag

SEQ ID NO: 2380416 - RNA, 14 nt, Human
gauccugagccaga

SEQ ID NO: 2380417 - RNA, 15 nt, Human
gauccugagccagau

SEQ ID NO: 2380418 - RNA, 19 nt, Human
gauccugagccagauuuca

SEQ ID NO: 2380419 - RNA, 18 nt, Human
gaugacucccuuaaaaua

SEQ ID NO: 2380420 - RNA, 16 nt, Human
gaugacuagaggcagg

SEQ ID NO: 2380421 - RNA, 14 nt, Human
gaugacuauggaaa

SEQ ID NO: 2380422 - RNA, 19 nt, Human
gaugacgguauuaugcuuc

SEQ ID NO: 2380423 - RNA, 20 nt, Human
gaugacgguauuaugcuucu

SEQ ID NO: 2380424 - RNA, 21 nt, Human
gaugacgguauuaugcuucuu

SEQ ID NO: 2380425 - RNA, 15 nt, Human
gaugacuagaggcag

SEQ ID NO: 2380426 - RNA, 18 nt, Human
gaugacuaaaauauuuau

SEQ ID NO: 2380427 - RNA, 15 nt, Human
gaugacuaaaauauu

SEQ ID NO: 2380428 - RNA, 12 nt, Human
gaugacuaaaau

SEQ ID NO: 2380429 - RNA, 14 nt, Human
gaugacugaguccu

SEQ ID NO: 2380430 - RNA, 12 nt, Human
gaugacugaguc

SEQ ID NO: 2380431 - RNA, 11 nt, Human
gaugagaaagg

SEQ ID NO: 2380432 - RNA, 17 nt, Human
gaugacugaguccucgu

SEQ ID NO: 2380433 - RNA, 22 nt, Human
gaugagaaagguugaagcacca

SEQ ID NO: 2380434 - RNA, 17 nt, Human
gaugcaaggaccaggac

SEQ ID NO: 2380435 - RNA, 14 nt, Human
gaugcaaggaccag

SEQ ID NO: 2380436 - RNA, 16 nt, Human
gaugcaaagaggcaag

SEQ ID NO: 2380437 - RNA, 17 nt, Human
gaugcaagauauuuaua

SEQ ID NO: 2380438 - RNA, 15 nt, Human
gaugcaaagaggcaa

SEQ ID NO: 2380439 - RNA, 14 nt, Human
gaugcaaagaggca

SEQ ID NO: 2380440 - RNA, 17 nt, Human
gaugcaaagaggcaaga

SEQ ID NO: 2380441 - RNA, 21 nt, Human
gaugacucccuuaaaauagaa

SEQ ID NO: 2380442 - RNA, 14 nt, Human
gaugcaaagaaaau

SEQ ID NO: 2380443 - RNA, 18 nt, Human
gaugcaaugugcuacuga

SEQ ID NO: 2380444 - RNA, 17 nt, Human
gaugcaauguagagggg

SEQ ID NO: 2380445 - RNA, 19 nt, Human
gaugcaaggaccaggacuc

SEQ ID NO: 2380446 - RNA, 18 nt, Human
gaugcaaggaccaggacu

SEQ ID NO: 2380447 - RNA, 21 nt, Human
gaugcaaucgguuuaaacaug

SEQ ID NO: 2380448 - RNA, 13 nt, Human
gaugcauggagau

SEQ ID NO: 2380449 - RNA, 13 nt, Human
gaugcaaugaaca

SEQ ID NO: 2380450 - RNA, 18 nt, Human
gaugcaguucugaagaag

SEQ ID NO: 2380451 - RNA, 17 nt, Human
gaugcauuaaaagaaaa

SEQ ID NO: 2380452 - RNA, 16 nt, Human
gaugcauuaaaagaaa

SEQ ID NO: 2380453 - RNA, 15 nt, Human
gaugcauuaaaagaa

SEQ ID NO: 2380454 - RNA, 20 nt, Human
gaugcauguuuuccagcucc

SEQ ID NO: 2380455 - RNA, 21 nt, Human
gaugcauguuuuccagcuccu

SEQ ID NO: 2380456 - RNA, 20 nt, Human
gaugcauggagauagcccca

SEQ ID NO: 2380457 - RNA, 22 nt, Human
gaugcaucuaccgcucuuggga

SEQ ID NO: 2380458 - RNA, 15 nt, Human
gaugcccuggaggug

SEQ ID NO: 2380459 - RNA, 12 nt, Human
gaugcccuggag

SEQ ID NO: 2380460 - RNA, 18 nt, Human
gaugcauuaaaagaaaau

SEQ ID NO: 2380461 - RNA, 21 nt, Human
gaugcauucuugguuggcugg

SEQ ID NO: 2380462 - RNA, 17 nt, Human
gaugccuccaccgcugc

SEQ ID NO: 2380463 - RNA, 16 nt, Human
gaugccuccaccgcug

SEQ ID NO: 2380464 - RNA, 13 nt, Human
gaugccuccaccg

SEQ ID NO: 2380465 - RNA, 12 nt, Human
gaugccuccacc

SEQ ID NO: 2380466 - RNA, 23 nt, Human
gaugccucaugauaugucagggc

SEQ ID NO: 2380467 - RNA, 19 nt, Human
gaugcccuggagguggcug

SEQ ID NO: 2380468 - RNA, 18 nt, Human
gaugcccuggagguggcu

SEQ ID NO: 2380469 - RNA, 20 nt, Human
gaugccuccaccgcugccua

SEQ ID NO: 2380470 - RNA, 15 nt, Human
gaugccugauugcca

SEQ ID NO: 2380471 - RNA, 21 nt, Human
gaugccuggcgggguggggug

SEQ ID NO: 2380472 - RNA, 14 nt, Human
gaugcucaggcuug

SEQ ID NO: 2380473 - RNA, 14 nt, Human
gaugcucacagggc

SEQ ID NO: 2380474 - RNA, 22 nt, Human
gaugccugauugccaagcucag

SEQ ID NO: 2380475 - RNA, 21 nt, Human
gaugcucaggcuugaaaugca

SEQ ID NO: 2380476 - RNA, 23 nt, Human
gaugcucccuccccugcccuggu

SEQ ID NO: 2380477 - RNA, 21 nt, Human
gaugcucccuccccugcccug

SEQ ID NO: 2380478 - RNA, 20 nt, Human
gaugcucccuccccugcccu

SEQ ID NO: 2380479 - RNA, 15 nt, Human
gaugcucccuccccu

SEQ ID NO: 2380480 - RNA, 13 nt, Human
gaugcucccuccc

SEQ ID NO: 2380481 - RNA, 23 nt, Human
gaugcuccagccaaccccugugg

SEQ ID NO: 2380482 - RNA, 22 nt, Human
gaugcuccagccaaccccugug

SEQ ID NO: 2380483 - RNA, 17 nt, Human
gaugcuccagccaaccc

SEQ ID NO: 2380484 - RNA, 16 nt, Human
gaugcuccagccaacc

SEQ ID NO: 2380485 - RNA, 13 nt, Human
gaugcuccagcca

SEQ ID NO: 2380486 - RNA, 12 nt, Human
gaugcuccagcc

SEQ ID NO: 2380487 - RNA, 14 nt, Human
gaugggacugggag

SEQ ID NO: 2380488 - RNA, 17 nt, Human
gaugggacugggagggc

SEQ ID NO: 2380489 - RNA, 15 nt, Human
gaugggacugggagg

SEQ ID NO: 2380490 - RNA, 20 nt, Human
gaugggagcuccucuccugg

SEQ ID NO: 2380491 - RNA, 21 nt, Human
gaugggagcuccucuccugga

SEQ ID NO: 2380492 - RNA, 22 nt, Human
gaugggcaacccccagccugcu

SEQ ID NO: 2380493 - RNA, 18 nt, Human
gaugggaaggagggaggu

SEQ ID NO: 2380494 - RNA, 21 nt, Human
gauggcuuugaaugcggccca

SEQ ID NO: 2380495 - RNA, 13 nt, Human
gaugggaaugaag

SEQ ID NO: 2380496 - RNA, 14 nt, Human
gaugggaaugaagc

SEQ ID NO: 2380497 - RNA, 16 nt, Human
gaugggaaugaagcuu

SEQ ID NO: 2380498 - RNA, 18 nt, Human
gaugggaaugaagcuugu

SEQ ID NO: 2380499 - RNA, 22 nt, Human
gaugggaaugaagcuuguguau

SEQ ID NO: 2380500 - RNA, 23 nt, Human
gaugggaaugaggugggaggugg

SEQ ID NO: 2380501 - RNA, 21 nt, Human
gaugggaacgcagaugaucca

SEQ ID NO: 2380502 - RNA, 21 nt, Human
gauggcaggauggccuggcca

SEQ ID NO: 2380503 - RNA, 18 nt, Human
gauggcaggauggccugg

SEQ ID NO: 2380504 - RNA, 15 nt, Human
gauggcagcuguuua

SEQ ID NO: 2380505 - RNA, 15 nt, Human
gauggcaggauggcc

SEQ ID NO: 2380506 - RNA, 17 nt, Human
gauggcaggauggccug

SEQ ID NO: 2380507 - RNA, 13 nt, Human
gauggcaggaugg

SEQ ID NO: 2380508 - RNA, 21 nt, Human
gauggcacuuauaaccaaagc

SEQ ID NO: 2380509 - RNA, 16 nt, Human
gaugggaaagcauugu

SEQ ID NO: 2380510 - RNA, 22 nt, Human
gauggcaacagaucuggaaccu

SEQ ID NO: 2380511 - RNA, 14 nt, Human
gauggcaccagagg

SEQ ID NO: 2380512 - RNA, 15 nt, Human
gauggcaccagaggc

SEQ ID NO: 2380513 - RNA, 21 nt, Human
gauggcacuuagcuaucagaa

SEQ ID NO: 2380514 - RNA, 21 nt, Human
gauggcaacagaucuggaacc

SEQ ID NO: 2380515 - RNA, 17 nt, Human
gauggcaacagaucugg

SEQ ID NO: 2380516 - RNA, 16 nt, Human
gauggcaacagaucug

SEQ ID NO: 2380517 - RNA, 15 nt, Human
gauggcaacagaucu

SEQ ID NO: 2380518 - RNA, 17 nt, Human
gaguuacauuaauguua

SEQ ID NO: 2380519 - RNA, 12 nt, Human
gaguuagacugu

SEQ ID NO: 2380520 - RNA, 16 nt, Human
gaguuagaggccagcc

SEQ ID NO: 2380521 - RNA, 14 nt, Human
gaguuagaggccag

SEQ ID NO: 2380522 - RNA, 14 nt, Human
gaguuagacuguug

SEQ ID NO: 2380523 - RNA, 17 nt, Human
gagugugccugaagucc

SEQ ID NO: 2380524 - RNA, 22 nt, Human
gagugucuuuccacggagccac

SEQ ID NO: 2380525 - RNA, 22 nt, Human
gagugggggagagcaggcuggc

SEQ ID NO: 2380526 - RNA, 18 nt, Human
gaguuaguuucuuuggga

SEQ ID NO: 2380527 - RNA, 14 nt, Human
gaguuauauguuca

SEQ ID NO: 2380528 - RNA, 18 nt, Human
gaguuauauguucacugu

SEQ ID NO: 2380529 - RNA, 18 nt, Human
gaguuaggcuauucacaa

SEQ ID NO: 2380530 - RNA, 17 nt, Human
gaguuaggcuauucaca

SEQ ID NO: 2380531 - RNA, 20 nt, Human
gaguuagaggccagccuggc

SEQ ID NO: 2380532 - RNA, 18 nt, Human
gaguuagaggccagccug

SEQ ID NO: 2380533 - RNA, 23 nt, Human
gaguucaucuugaauuguaagga

SEQ ID NO: 2380534 - RNA, 16 nt, Human
gaguuaucuaaaagaa

SEQ ID NO: 2380535 - RNA, 18 nt, Human
gaguuaucuaaaagaaau

SEQ ID NO: 2380536 - RNA, 16 nt, Human
gaguuuuggaugcagu

SEQ ID NO: 2380537 - RNA, 13 nt, Human
gaguuuuccccac

SEQ ID NO: 2380538 - RNA, 14 nt, Human
gaguugaagacaga

SEQ ID NO: 2380539 - RNA, 21 nt, Human
gaguugaaaaucuuauaauuu

SEQ ID NO: 2380540 - RNA, 17 nt, Human
gaguucgagaccagccu

SEQ ID NO: 2380541 - RNA, 21 nt, Human
gaguuccuugaucuguauaua

SEQ ID NO: 2380542 - RNA, 14 nt, Human
gaguuccugcaugc

SEQ ID NO: 2380543 - RNA, 21 nt, Human
gaguucuuaaggauugugaua

SEQ ID NO: 2380544 - RNA, 15 nt, Human
gaguucuugugccau

SEQ ID NO: 2380545 - RNA, 23 nt, Human
gaguuccugcggagugaagaggg

SEQ ID NO: 2380546 - RNA, 15 nt, Human
gaguuccaugaagac

SEQ ID NO: 2380547 - RNA, 17 nt, Human
gaguuccaugaagacca

SEQ ID NO: 2380548 - RNA, 18 nt, Human
gaguuccccaugcagaca

SEQ ID NO: 2380549 - RNA, 12 nt, Human
gaguuccugcau

SEQ ID NO: 2380550 - RNA, 13 nt, Human
gaguuccuagcca

SEQ ID NO: 2380551 - RNA, 15 nt, Human
gaguggcuccucccg

SEQ ID NO: 2380552 - RNA, 17 nt, Human
gagugggacagagucug

SEQ ID NO: 2380553 - RNA, 18 nt, Human
gaguggccuggccaggag

SEQ ID NO: 2380554 - RNA, 15 nt, Human
gaguggccuggccag

SEQ ID NO: 2380555 - RNA, 14 nt, Human
gaguggccuggcca

SEQ ID NO: 2380556 - RNA, 13 nt, Human
gaguggccuggcc

SEQ ID NO: 2380557 - RNA, 20 nt, Human
gaguggccuggccaggagcu

SEQ ID NO: 2380558 - RNA, 19 nt, Human
gaguggccuggccaggagc

SEQ ID NO: 2380559 - RNA, 13 nt, Human
gaguggcuccucc

SEQ ID NO: 2380560 - RNA, 14 nt, Human
gaguggggcaguag

SEQ ID NO: 2380561 - RNA, 19 nt, Human
gagugggggagagcaggcu

SEQ ID NO: 2380562 - RNA, 18 nt, Human
gagugggacagagucugg

SEQ ID NO: 2380563 - RNA, 21 nt, Human
gagugucuuuccacggagcca

SEQ ID NO: 2380564 - RNA, 19 nt, Human
gagugucuuuccacggagc

SEQ ID NO: 2380565 - RNA, 15 nt, Human
gagugucuuuccacg

SEQ ID NO: 2380566 - RNA, 13 nt, Human
gagugucuuucca

SEQ ID NO: 2380567 - RNA, 23 nt, Human
gagugggggaucacagccucuga

SEQ ID NO: 2380568 - RNA, 12 nt, Human
gagugggcccaa

SEQ ID NO: 2380569 - RNA, 12 nt, Human
gagucugaugau

SEQ ID NO: 2380570 - RNA, 19 nt, Human
gagugaacaaauuuacaga

SEQ ID NO: 2380571 - RNA, 11 nt, Human
gagucugcaca

SEQ ID NO: 2380572 - RNA, 18 nt, Human
gagucugcuauauuuuca

SEQ ID NO: 2380573 - RNA, 21 nt, Human
gagucugcuauauuuucauga

SEQ ID NO: 2380574 - RNA, 11 nt, Human
gaguggccacu

SEQ ID NO: 2380575 - RNA, 23 nt, Human
gaguggcauuggcagcaggugcu

SEQ ID NO: 2380576 - RNA, 20 nt, Human
gaguggcauggccaccacca

SEQ ID NO: 2380577 - RNA, 18 nt, Human
gaguggcauuggcagcag

SEQ ID NO: 2380578 - RNA, 12 nt, Human
gaguggccuggc

SEQ ID NO: 2380579 - RNA, 10 nt, Human
gaguggccug

SEQ ID NO: 2380580 - RNA, 23 nt, Human
gagugaacaaauuuacagagaca

SEQ ID NO: 2380581 - RNA, 22 nt, Human
gagugaacaaauuuacagagac

SEQ ID NO: 2380582 - RNA, 22 nt, Human
gaguuuuucccagcuacaccuu

SEQ ID NO: 2380583 - RNA, 19 nt, Human
gaguuuuuauggggcugaa

SEQ ID NO: 2380584 - RNA, 18 nt, Human
gaguuuuuauggggcuga

SEQ ID NO: 2380585 - RNA, 19 nt, Human
gaguuuuguuuuaaaauua

SEQ ID NO: 2380586 - RNA, 13 nt, Human
gaguuuuguuuua

SEQ ID NO: 2380587 - RNA, 16 nt, Human
gauaaucagccucuua

SEQ ID NO: 2380588 - RNA, 15 nt, Human
gauaaucagccucuu

SEQ ID NO: 2380589 - RNA, 14 nt, Human
gauaaucagccucu

SEQ ID NO: 2380590 - RNA, 13 nt, Human
gauaaucagccuc

SEQ ID NO: 2380591 - RNA, 21 nt, Human
gauaaucaacugggcugaaca

SEQ ID NO: 2380592 - RNA, 19 nt, Human
gaguuuuuguuuggagagc

SEQ ID NO: 2380593 - RNA, 21 nt, Human
gauaaaaagauguucagucau

SEQ ID NO: 2380594 - RNA, 19 nt, Human
gauaaugcuguugccucau

SEQ ID NO: 2380595 - RNA, 20 nt, Human
gauaaugccggugagaauaa

SEQ ID NO: 2380596 - RNA, 15 nt, Human
gauaaugcuguugcc

SEQ ID NO: 2380597 - RNA, 11 nt, Human
gauaauguuaa

SEQ ID NO: 2380598 - RNA, 21 nt, Human
gauaaugugauauuauacaua

SEQ ID NO: 2380599 - RNA, 21 nt, Human
gauaaucagugugucuaaauu

SEQ ID NO: 2380600 - RNA, 21 nt, Human
gauaauguuaaauuuguaagu

SEQ ID NO: 2380601 - RNA, 20 nt, Human
gauacaacuucaagugcaug

SEQ ID NO: 2380602 - RNA, 17 nt, Human
gauacaaaagcauguga

SEQ ID NO: 2380603 - RNA, 12 nt, Human
gauaauguuaaa

SEQ ID NO: 2380604 - RNA, 13 nt, Human
gauaauguuaaau

SEQ ID NO: 2380605 - RNA, 14 nt, Human
gauaauguuaaauu

SEQ ID NO: 2380606 - RNA, 19 nt, Human
gauaauguuaaauuuguaa

SEQ ID NO: 2380607 - RNA, 19 nt, Human
gauacacccaaaguaucag

SEQ ID NO: 2380608 - RNA, 22 nt, Human
gauacaauguauuuauuuaaaa

SEQ ID NO: 2380609 - RNA, 16 nt, Human
gauacaagauuagaag

SEQ ID NO: 2380610 - RNA, 20 nt, Human
gauagacacauaugaggggg

SEQ ID NO: 2380611 - RNA, 21 nt, Human
gauagacacauaugaggggga

SEQ ID NO: 2380612 - RNA, 18 nt, Human
gauacaaugcugugcccu

SEQ ID NO: 2380613 - RNA, 13 nt, Human
gauacaaugcugu

SEQ ID NO: 2380614 - RNA, 12 nt, Human
gauagagggggg

SEQ ID NO: 2380615 - RNA, 17 nt, Human
gauagcacagacccugc

SEQ ID NO: 2380616 - RNA, 18 nt, Human
gauagcacagacccugcc

SEQ ID NO: 2380617 - RNA, 12 nt, Human
gauagccaaggc

SEQ ID NO: 2380618 - RNA, 19 nt, Human
gauagcacagacccugccc

SEQ ID NO: 2380619 - RNA, 15 nt, Human
gauagcauugugaac

SEQ ID NO: 2380620 - RNA, 17 nt, Human
gauagcauugugaacug

SEQ ID NO: 2380621 - RNA, 13 nt, Human
gauagccaaggcc

SEQ ID NO: 2380622 - RNA, 17 nt, Human
gauauaaguguguguuu

SEQ ID NO: 2380623 - RNA, 17 nt, Human
gauagcauuuuugauuu

SEQ ID NO: 2380624 - RNA, 22 nt, Human
gauagcauuuuugauuuaugca

SEQ ID NO: 2380625 - RNA, 21 nt, Human
gauauaaguguguguuuuuca

SEQ ID NO: 2380626 - RNA, 18 nt, Human
gauauacacggaugacuu

SEQ ID NO: 2380627 - RNA, 23 nt, Human
gauagcauuuuugauuuaugcau

SEQ ID NO: 2380628 - RNA, 17 nt, Human
gauauacucuagaugaa

SEQ ID NO: 2380629 - RNA, 18 nt, Human
gauauacuuuuuucuuau

SEQ ID NO: 2380630 - RNA, 12 nt, Human
gauauagaacag

SEQ ID NO: 2380631 - RNA, 23 nt, Human
gauauaugcucugcauguuacau

SEQ ID NO: 2380632 - RNA, 20 nt, Human
gauauauguguuuuucacau

SEQ ID NO: 2380633 - RNA, 16 nt, Human
gauauagaacagugcu

SEQ ID NO: 2380634 - RNA, 22 nt, Human
gauauauguguuuuucacauuu

SEQ ID NO: 2380635 - RNA, 19 nt, Human
gauauauguuuuugaaggc

SEQ ID NO: 2380636 - RNA, 21 nt, Human
gaucaaccccuucgcuccugu

SEQ ID NO: 2380637 - RNA, 22 nt, Human
gaucaaccccuucgcuccugug

SEQ ID NO: 2380638 - RNA, 19 nt, Human
gauauauuuaaaaauauuu

SEQ ID NO: 2380639 - RNA, 23 nt, Human
gauauauuuuacaauuuuuuauc

SEQ ID NO: 2380640 - RNA, 15 nt, Human
gauauauuuaaaaau

SEQ ID NO: 2380641 - RNA, 14 nt, Human
gauauauuuuacaa

SEQ ID NO: 2380642 - RNA, 16 nt, Human
gauauauggauaaugc

SEQ ID NO: 2380643 - RNA, 13 nt, Human
gauauauuaaaaa

SEQ ID NO: 2380644 - RNA, 14 nt, Human
gauauauuaaaaau

SEQ ID NO: 2380645 - RNA, 17 nt, Human
gauauauuaaaaauaua

SEQ ID NO: 2380646 - RNA, 18 nt, Human
gauauauuaaaaauauaa

SEQ ID NO: 2380647 - RNA, 20 nt, Human
gauauauuaaaaauauaaaa

SEQ ID NO: 2380648 - RNA, 21 nt, Human
gauauauuaaaaauauaaaac

SEQ ID NO: 2380649 - RNA, 22 nt, Human
gauauauuaaaaauauaaaacu

SEQ ID NO: 2380650 - RNA, 12 nt, Human
gaguaaaggaaa

SEQ ID NO: 2380651 - RNA, 16 nt, Human
gaguacguugugcauu

SEQ ID NO: 2380652 - RNA, 19 nt, Human
gagguuuuaaaaaaauccc

SEQ ID NO: 2380653 - RNA, 15 nt, Human
gagguuuuaaaguga

SEQ ID NO: 2380654 - RNA, 22 nt, Human
gagguuauaggucacuccuggg

SEQ ID NO: 2380655 - RNA, 19 nt, Human
gagguuauaggucacuccu

SEQ ID NO: 2380656 - RNA, 17 nt, Human
gagguucauuucaaaua

SEQ ID NO: 2380657 - RNA, 22 nt, Human
gagguuuguuuagaagaagugu

SEQ ID NO: 2380658 - RNA, 14 nt, Human
gagguucccuuuga

SEQ ID NO: 2380659 - RNA, 19 nt, Human
gagguuaaggcugaggaaa

SEQ ID NO: 2380660 - RNA, 15 nt, Human
gagguuaaggcugag

SEQ ID NO: 2380661 - RNA, 21 nt, Human
gagguguuuaaagagagguua

SEQ ID NO: 2380662 - RNA, 22 nt, Human
gagguuaggaguucgagaccag

SEQ ID NO: 2380663 - RNA, 13 nt, Human
gagguuauagguc

SEQ ID NO: 2380664 - RNA, 19 nt, Human
gagguucaaagauauuuug

SEQ ID NO: 2380665 - RNA, 16 nt, Human
gaguacaggugaagca

SEQ ID NO: 2380666 - RNA, 12 nt, Human
gaguagcuggau

SEQ ID NO: 2380667 - RNA, 21 nt, Human
gaguagccgagagccugcucc

SEQ ID NO: 2380668 - RNA, 19 nt, Human
gaguagccgagagccugcu

SEQ ID NO: 2380669 - RNA, 15 nt, Human
gaguagcgguccaag

SEQ ID NO: 2380670 - RNA, 20 nt, Human
gaguagcgguccaagccugc

SEQ ID NO: 2380671 - RNA, 18 nt, Human
gaguacuacaguccuccc

SEQ ID NO: 2380672 - RNA, 19 nt, Human
gaguacuacaguccuccca

SEQ ID NO: 2380673 - RNA, 20 nt, Human
gaguacguugugcauuuggu

SEQ ID NO: 2380674 - RNA, 15 nt, Human
gaguacuacaguccu

SEQ ID NO: 2380675 - RNA, 18 nt, Human
gaguacguugugcauuug

SEQ ID NO: 2380676 - RNA, 17 nt, Human
gaguacguugugcauuu

SEQ ID NO: 2380677 - RNA, 14 nt, Human
gaggucccaggcag

SEQ ID NO: 2380678 - RNA, 12 nt, Human
gaggucccaggc

SEQ ID NO: 2380679 - RNA, 13 nt, Human
gaggggguggagg

SEQ ID NO: 2380680 - RNA, 14 nt, Human
gaggggguggaggg

SEQ ID NO: 2380681 - RNA, 17 nt, Human
gagguccagcccuggcu

SEQ ID NO: 2380682 - RNA, 19 nt, Human
gagguccagcccuggcuga

SEQ ID NO: 2380683 - RNA, 20 nt, Human
gagguccagcccuggcugaa

SEQ ID NO: 2380684 - RNA, 22 nt, Human
gagguccagcccuggcugaagg

SEQ ID NO: 2380685 - RNA, 23 nt, Human
gagguccagcccuggcugaagga

SEQ ID NO: 2380686 - RNA, 18 nt, Human
gaggugggauccuccagg

SEQ ID NO: 2380687 - RNA, 11 nt, Human
gaggugggcag

SEQ ID NO: 2380688 - RNA, 12 nt, Human
gaggugggcagg

SEQ ID NO: 2380689 - RNA, 14 nt, Human
gaggugggcaggug

SEQ ID NO: 2380690 - RNA, 17 nt, Human
gaggugggccagucugu

SEQ ID NO: 2380691 - RNA, 21 nt, Human
gaggugggcaggugguggcac

SEQ ID NO: 2380692 - RNA, 23 nt, Human
gaggugggcaggugguggcacug

SEQ ID NO: 2380693 - RNA, 16 nt, Human
gaggugugggggcugc

SEQ ID NO: 2380694 - RNA, 17 nt, Human
gaggugugggggcugca

SEQ ID NO: 2380695 - RNA, 14 nt, Human
gagguguuuaaaga

SEQ ID NO: 2380696 - RNA, 19 nt, Human
gagguguuuaaagagaggu

SEQ ID NO: 2380697 - RNA, 21 nt, Human
gaggugggauccuccaggugc

SEQ ID NO: 2380698 - RNA, 22 nt, Human
gaggugggauccuccaggugca

SEQ ID NO: 2380699 - RNA, 13 nt, Human
gaggggcuccugg

SEQ ID NO: 2380700 - RNA, 12 nt, Human
gaggggcuccug

SEQ ID NO: 2380701 - RNA, 16 nt, Human
gaggggcgggacccag

SEQ ID NO: 2380702 - RNA, 15 nt, Human
gaggggcucaggaaa

SEQ ID NO: 2380703 - RNA, 20 nt, Human
gaggggcgcuggcccagccg

SEQ ID NO: 2380704 - RNA, 22 nt, Human
gaggggcgcuggcccagccggc

SEQ ID NO: 2380705 - RNA, 16 nt, Human
gaggggcgcccaccuc

SEQ ID NO: 2380706 - RNA, 13 nt, Human
gaggggcgcuggc

SEQ ID NO: 2380707 - RNA, 14 nt, Human
gaggggcgcuggcc

SEQ ID NO: 2380708 - RNA, 15 nt, Human
gaggggcgcuggccc

SEQ ID NO: 2380709 - RNA, 16 nt, Human
gaggggcgcuggccca

SEQ ID NO: 2380710 - RNA, 17 nt, Human
gaggggcgcuggcccag

SEQ ID NO: 2380711 - RNA, 18 nt, Human
gaggggcgcuggcccagc

SEQ ID NO: 2380712 - RNA, 19 nt, Human
gaggggcgcuggcccagcc

SEQ ID NO: 2380713 - RNA, 15 nt, Human
gaggggcuccuggaa

SEQ ID NO: 2380714 - RNA, 14 nt, Human
gaggggcuccugga

SEQ ID NO: 2380715 - RNA, 16 nt, Human
gaggggcucaggaaaa

SEQ ID NO: 2380716 - RNA, 11 nt, Human
gaggggcucuc

SEQ ID NO: 2380717 - RNA, 12 nt, Human
gaggggcucuca

SEQ ID NO: 2380718 - RNA, 16 nt, Human
gaggggcucucagcuc

SEQ ID NO: 2380719 - RNA, 15 nt, Human
gaggggggagguggg

SEQ ID NO: 2380720 - RNA, 22 nt, Human
gaggucaggaguuagaggccag

SEQ ID NO: 2380721 - RNA, 18 nt, Human
gagguccacaacacacag

SEQ ID NO: 2380722 - RNA, 15 nt, Human
gaggggguggccucc

SEQ ID NO: 2380723 - RNA, 22 nt, Human
gaggggggaggugggauccucc

SEQ ID NO: 2380724 - RNA, 19 nt, Human
gaggggcucucagcucagc

SEQ ID NO: 2380725 - RNA, 23 nt, Human
gaggggcucucagcucagcgcca

SEQ ID NO: 2380726 - RNA, 19 nt, Human
gaggggggauuuccagcca

SEQ ID NO: 2380727 - RNA, 15 nt, Human
gaggggggcacaugc

SEQ ID NO: 2380728 - RNA, 14 nt, Human
gagucugaagcaga

SEQ ID NO: 2380729 - RNA, 18 nt, Human
gagucucuucuccacugg

SEQ ID NO: 2380730 - RNA, 21 nt, Human
gagucugaaggcuggguucug

SEQ ID NO: 2380731 - RNA, 14 nt, Human
gagucucuucucca

SEQ ID NO: 2380732 - RNA, 15 nt, Human
gagucucuucuccac

SEQ ID NO: 2380733 - RNA, 16 nt, Human
gagucucuucuccacu

SEQ ID NO: 2380734 - RNA, 17 nt, Human
gagucucuucuccacug

SEQ ID NO: 2380735 - RNA, 22 nt, Human
gagucucacuguugcccaggcu

SEQ ID NO: 2380736 - RNA, 23 nt, Human
gagucucacuguugcccaggcug

SEQ ID NO: 2380737 - RNA, 12 nt, Human
gagucucuucuc

SEQ ID NO: 2380738 - RNA, 12 nt, Human
gagucuccugug

SEQ ID NO: 2380739 - RNA, 23 nt, Human
gagucucgcuauugucaccaggg

SEQ ID NO: 2380740 - RNA, 23 nt, Human
gagucgucaucacuuuucaguga

SEQ ID NO: 2380741 - RNA, 20 nt, Human
gagucuccagugguugcugu

SEQ ID NO: 2380742 - RNA, 13 nt, Human
gagucucccaagg

SEQ ID NO: 2380743 - RNA, 14 nt, Human
gagucucccaaggc

SEQ ID NO: 2380744 - RNA, 19 nt, Human
gagucucacuguugcccag

SEQ ID NO: 2380745 - RNA, 18 nt, Human
gagucguggggugugcug

SEQ ID NO: 2380746 - RNA, 19 nt, Human
gagucguggggugugcugg

SEQ ID NO: 2380747 - RNA, 20 nt, Human
gagucguggggugugcuggg

SEQ ID NO: 2380748 - RNA, 21 nt, Human
gagucguggggugugcuggga

SEQ ID NO: 2380749 - RNA, 20 nt, Human
gagucucacuguugcccagg

SEQ ID NO: 2380750 - RNA, 21 nt, Human
gagucucacuguugcccaggc

SEQ ID NO: 2380751 - RNA, 14 nt, Human
gagucccgucagga

SEQ ID NO: 2380752 - RNA, 19 nt, Human
gagucgucaucacuuuuca

SEQ ID NO: 2380753 - RNA, 17 nt, Human
gagucguggggugugcu

SEQ ID NO: 2380754 - RNA, 22 nt, Human
gagucguacagaaagcugccug

SEQ ID NO: 2380755 - RNA, 17 nt, Human
gagucguacagaaagcu

SEQ ID NO: 2380756 - RNA, 13 nt, Human
gagucggaagggc

SEQ ID NO: 2380757 - RNA, 18 nt, Human
gaguccccuccccggccc

SEQ ID NO: 2380758 - RNA, 17 nt, Human
gagucgaggacagggag

SEQ ID NO: 2380759 - RNA, 19 nt, Human
gagucaaaugguaggcauu

SEQ ID NO: 2380760 - RNA, 19 nt, Human
gagucaaaacuacaaauca

SEQ ID NO: 2380761 - RNA, 20 nt, Human
gaguauuuaggcagauugaa

SEQ ID NO: 2380762 - RNA, 19 nt, Human
gagucaaaacucaaaugcu

SEQ ID NO: 2380763 - RNA, 13 nt, Human
gagucccacugcc

SEQ ID NO: 2380764 - RNA, 14 nt, Human
gagucccacugccu

SEQ ID NO: 2380765 - RNA, 17 nt, Human
gagucccacugccucag

SEQ ID NO: 2380766 - RNA, 19 nt, Human
gagucccacugccucaggu

SEQ ID NO: 2380767 - RNA, 20 nt, Human
gagucccacugccucagguu

SEQ ID NO: 2380768 - RNA, 22 nt, Human
gagucccacugccucagguucc

SEQ ID NO: 2380769 - RNA, 23 nt, Human
gagucccacugccucagguuccu

SEQ ID NO: 2380770 - RNA, 18 nt, Human
gagucccagagcaggagg

SEQ ID NO: 2380771 - RNA, 19 nt, Human
gagucccagagcaggaggc

SEQ ID NO: 2380772 - RNA, 21 nt, Human
gagucccagagcaggaggccc

SEQ ID NO: 2380773 - RNA, 23 nt, Human
gagucccagagcaggaggccccu

SEQ ID NO: 2380774 - RNA, 12 nt, Human
gaguagcuggga

SEQ ID NO: 2380775 - RNA, 14 nt, Human
gaguagcugggacu

SEQ ID NO: 2380776 - RNA, 14 nt, Human
gaguccccuguuug

SEQ ID NO: 2380777 - RNA, 23 nt, Human
gaguccccuguuuguuucugaaa

SEQ ID NO: 2380778 - RNA, 14 nt, Human
gagucccugccauc

SEQ ID NO: 2380779 - RNA, 18 nt, Human
gaguccccucaccuccuc

SEQ ID NO: 2380780 - RNA, 19 nt, Human
gaguccccucaccuccucu

SEQ ID NO: 2380781 - RNA, 19 nt, Human
gagucccaggcugagccuc

SEQ ID NO: 2380782 - RNA, 18 nt, Human
gagucccaggcugagccu

SEQ ID NO: 2380783 - RNA, 19 nt, Human
gagucccaggagcugccca

SEQ ID NO: 2380784 - RNA, 20 nt, Human
gagucccaggagcugcccag

SEQ ID NO: 2380785 - RNA, 14 nt, Human
gagucccaguggga

SEQ ID NO: 2380786 - RNA, 16 nt, Human
gagucccagugggagg

SEQ ID NO: 2380787 - RNA, 18 nt, Human
gagucccagugggaggcg

SEQ ID NO: 2380788 - RNA, 11 nt, Human
gaguccccuca

SEQ ID NO: 2380789 - RNA, 16 nt, Human
gaguccccucaccucc

SEQ ID NO: 2380790 - RNA, 17 nt, Human
gaguccccucaccuccu

SEQ ID NO: 2380791 - RNA, 12 nt, Human
gaguccccuguu

SEQ ID NO: 2380792 - RNA, 19 nt, Human
gagcggugcuguccucagg

SEQ ID NO: 2380793 - RNA, 22 nt, Human
gagcggucucaggcugguggga

SEQ ID NO: 2380794 - RNA, 23 nt, Human
gagcggucucaggcuggugggag

SEQ ID NO: 2380795 - RNA, 14 nt, Human
gagcgguggcccug

SEQ ID NO: 2380796 - RNA, 23 nt, Human
gagcgguggcccugucccuccca

SEQ ID NO: 2380797 - RNA, 17 nt, Human
gagcgguggcccugucc

SEQ ID NO: 2380798 - RNA, 20 nt, Human
gagcgugcuccagccuggcu

SEQ ID NO: 2380799 - RNA, 21 nt, Human
gagcgugcuccagccuggcuc

SEQ ID NO: 2380800 - RNA, 22 nt, Human
gagcgugggaggcgggagugga

SEQ ID NO: 2380801 - RNA, 14 nt, Human
gagccuggugcccu

SEQ ID NO: 2380802 - RNA, 13 nt, Human
gagcuacaaaugc

SEQ ID NO: 2380803 - RNA, 12 nt, Human
gagcuacaaaug

SEQ ID NO: 2380804 - RNA, 10 nt, Human
gagccuggca

SEQ ID NO: 2380805 - RNA, 15 nt, Human
gagccugcuggcacc

SEQ ID NO: 2380806 - RNA, 12 nt, Human
gagccugcuggu

SEQ ID NO: 2380807 - RNA, 21 nt, Human
gagccugcuggucacagccuc

SEQ ID NO: 2380808 - RNA, 23 nt, Human
gagccugcuggucacagccuccu

SEQ ID NO: 2380809 - RNA, 12 nt, Human
gagccuggagaa

SEQ ID NO: 2380810 - RNA, 13 nt, Human
gagccuggagaag

SEQ ID NO: 2380811 - RNA, 14 nt, Human
gagccuggagaagc

SEQ ID NO: 2380812 - RNA, 15 nt, Human
gagccuggagaagcu

SEQ ID NO: 2380813 - RNA, 15 nt, Human
gagccuggcaagaau

SEQ ID NO: 2380814 - RNA, 15 nt, Human
gagccuggccagccu

SEQ ID NO: 2380815 - RNA, 23 nt, Human
gagccuggcuccguccaggagcc

SEQ ID NO: 2380816 - RNA, 12 nt, Human
gagccuggcucu

SEQ ID NO: 2380817 - RNA, 21 nt, Human
gagccuggcucuugugcugga

SEQ ID NO: 2380818 - RNA, 23 nt, Human
gagccuggcucuugugcuggaug

SEQ ID NO: 2380819 - RNA, 17 nt, Human
gagccuggugcugcugc

SEQ ID NO: 2380820 - RNA, 16 nt, Human
gagccuggugcugcug

SEQ ID NO: 2380821 - RNA, 12 nt, Human
gagccuggugcc

SEQ ID NO: 2380822 - RNA, 21 nt, Human
gagccugggaggucaaggcug

SEQ ID NO: 2380823 - RNA, 13 nt, Human
gagccugggaggu

SEQ ID NO: 2380824 - RNA, 20 nt, Human
gagccucagcauccuggcac

SEQ ID NO: 2380825 - RNA, 21 nt, Human
gagccucagcauccuggcacc

SEQ ID NO: 2380826 - RNA, 14 nt, Human
gagccuccugcccu

SEQ ID NO: 2380827 - RNA, 14 nt, Human
gagccuccugccca

SEQ ID NO: 2380828 - RNA, 15 nt, Human
gagccuccugcccag

SEQ ID NO: 2380829 - RNA, 15 nt, Human
gagcccugguggcag

SEQ ID NO: 2380830 - RNA, 16 nt, Human
gagcccugguggcagu

SEQ ID NO: 2380831 - RNA, 19 nt, Human
gagccucagcauccuggca

SEQ ID NO: 2380832 - RNA, 17 nt, Human
gagcccugguggcagug

SEQ ID NO: 2380833 - RNA, 13 nt, Human
gagccugcucccc

SEQ ID NO: 2380834 - RNA, 19 nt, Human
gagccugcggccugcugga

SEQ ID NO: 2380835 - RNA, 18 nt, Human
gagccugcaggugcugcu

SEQ ID NO: 2380836 - RNA, 16 nt, Human
gagccugccuggagcg

SEQ ID NO: 2380837 - RNA, 16 nt, Human
gagccugcaggguggu

SEQ ID NO: 2380838 - RNA, 20 nt, Human
gagccugcaggguggugcug

SEQ ID NO: 2380839 - RNA, 22 nt, Human
gagccugcaggguggugcuggg

SEQ ID NO: 2380840 - RNA, 23 nt, Human
gagccugcaggguggugcuggga

SEQ ID NO: 2380841 - RNA, 19 nt, Human
gagccugcucccccacccc

SEQ ID NO: 2380842 - RNA, 10 nt, Human
gagccugcug

SEQ ID NO: 2380843 - RNA, 18 nt, Human
gagccugcucccccaccc

SEQ ID NO: 2380844 - RNA, 17 nt, Human
gagccugcucccccacc

SEQ ID NO: 2380845 - RNA, 12 nt, Human
gagccugcuggc

SEQ ID NO: 2380846 - RNA, 11 nt, Human
gagccugcugg

SEQ ID NO: 2380847 - RNA, 13 nt, Human
gagccugcuggca

SEQ ID NO: 2380848 - RNA, 12 nt, Human
gagccugcagag

SEQ ID NO: 2380849 - RNA, 15 nt, Human
gagccugcagagcug

SEQ ID NO: 2380850 - RNA, 15 nt, Human
gagccugcagggugg

SEQ ID NO: 2380851 - RNA, 20 nt, Human
gagccuccugcccuuaccug

SEQ ID NO: 2380852 - RNA, 22 nt, Human
gagccuccugcccuuaccugcc

SEQ ID NO: 2380853 - RNA, 17 nt, Human
gagccuccugcccaguc

SEQ ID NO: 2380854 - RNA, 18 nt, Human
gagccuccugcccagucc

SEQ ID NO: 2380855 - RNA, 19 nt, Human
gagccuccugcccaguccc

SEQ ID NO: 2380856 - RNA, 21 nt, Human
gagccugcaaacucacugcuc

SEQ ID NO: 2380857 - RNA, 17 nt, Human
gagcuucccugacucau

SEQ ID NO: 2380858 - RNA, 13 nt, Human
gagcuucccugac

SEQ ID NO: 2380859 - RNA, 19 nt, Human
gagcuucauggcagaaggc

SEQ ID NO: 2380860 - RNA, 18 nt, Human
gagcuuagugaaauuacu

SEQ ID NO: 2380861 - RNA, 16 nt, Human
gagcuucauggcagaa

SEQ ID NO: 2380862 - RNA, 17 nt, Human
gagcuuagccaaugugg

SEQ ID NO: 2380863 - RNA, 10 nt, Human
gagcuucucu

SEQ ID NO: 2380864 - RNA, 14 nt, Human
gagcuucucuguga

SEQ ID NO: 2380865 - RNA, 16 nt, Human
gagcuucucugugaac

SEQ ID NO: 2380866 - RNA, 14 nt, Human
gagcuucuggcacu

SEQ ID NO: 2380867 - RNA, 18 nt, Human
gagcuucuguugcugccu

SEQ ID NO: 2380868 - RNA, 22 nt, Human
gagcuguuuauggccucagcug

SEQ ID NO: 2380869 - RNA, 20 nt, Human
gagcuguuuauggccucagc

SEQ ID NO: 2380870 - RNA, 15 nt, Human
gagcuuaacagugug

SEQ ID NO: 2380871 - RNA, 15 nt, Human
gagcugcccuccuug

SEQ ID NO: 2380872 - RNA, 21 nt, Human
gagcugcccuccuuguccacc

SEQ ID NO: 2380873 - RNA, 23 nt, Human
gagcugcccuccuuguccaccca

SEQ ID NO: 2380874 - RNA, 19 nt, Human
gagcuguuuauggccucag

SEQ ID NO: 2380875 - RNA, 21 nt, Human
gagcugcccagaguugcuggg

SEQ ID NO: 2380876 - RNA, 20 nt, Human
gagcugccauccagggaugc

SEQ ID NO: 2380877 - RNA, 11 nt, Human
gagcugcccuc

SEQ ID NO: 2380878 - RNA, 15 nt, Human
gagcugccaccugcc

SEQ ID NO: 2380879 - RNA, 16 nt, Human
gagcugccaccugccu

SEQ ID NO: 2380880 - RNA, 22 nt, Human
gagcucuucaggccucccucuc

SEQ ID NO: 2380881 - RNA, 17 nt, Human
gagcucuucauguuuca

SEQ ID NO: 2380882 - RNA, 13 nt, Human
gagcugccaccug

SEQ ID NO: 2380883 - RNA, 19 nt, Human
gagcucuucaggccucccu

SEQ ID NO: 2380884 - RNA, 17 nt, Human
gagcucuucaggccucc

SEQ ID NO: 2380885 - RNA, 16 nt, Human
gagcucuucaggccuc

SEQ ID NO: 2380886 - RNA, 16 nt, Human
gagcucugcagagcag

SEQ ID NO: 2380887 - RNA, 15 nt, Human
gagcucugcagccca

SEQ ID NO: 2380888 - RNA, 19 nt, Human
gagcuccccaccaccccag

SEQ ID NO: 2380889 - RNA, 21 nt, Human
gagcuccacucugcuucucug

SEQ ID NO: 2380890 - RNA, 22 nt, Human
gagcuccccaccaccccagcug

SEQ ID NO: 2380891 - RNA, 20 nt, Human
gagcuccccaccaccccagc

SEQ ID NO: 2380892 - RNA, 15 nt, Human
gagcuccucuccugg

SEQ ID NO: 2380893 - RNA, 19 nt, Human
gagcucccggcguggugga

SEQ ID NO: 2380894 - RNA, 12 nt, Human
gagcuccacucu

SEQ ID NO: 2380895 - RNA, 13 nt, Human
gagcuccacucug

SEQ ID NO: 2380896 - RNA, 16 nt, Human
gagcuccacucugcuu

SEQ ID NO: 2380897 - RNA, 18 nt, Human
gagcuccacucugcuucu

SEQ ID NO: 2380898 - RNA, 18 nt, Human
gagcuccucugggcagga

SEQ ID NO: 2380899 - RNA, 16 nt, Human
gagcuccucugggcag

SEQ ID NO: 2380900 - RNA, 15 nt, Human
gagcuccucugggca

SEQ ID NO: 2380901 - RNA, 14 nt, Human
gagcuccucugggc

SEQ ID NO: 2380902 - RNA, 16 nt, Human
gagcuccucuccugga

SEQ ID NO: 2380903 - RNA, 17 nt, Human
gagcuccucuccuggag

SEQ ID NO: 2380904 - RNA, 18 nt, Human
gagcuccucuccuggagg

SEQ ID NO: 2380905 - RNA, 19 nt, Human
gagcuccucuccuggagga

SEQ ID NO: 2380906 - RNA, 22 nt, Human
gagcuccucugggcaggaccuc

SEQ ID NO: 2380907 - RNA, 19 nt, Human
gagcucuaugggcagaucu

SEQ ID NO: 2380908 - RNA, 13 nt, Human
gagcucuccagcu

SEQ ID NO: 2380909 - RNA, 18 nt, Human
gagcuacccgcagaguuc

SEQ ID NO: 2380910 - RNA, 23 nt, Human
gagcuacgccugccuccccugug

SEQ ID NO: 2380911 - RNA, 17 nt, Human
gagcuacgccugccucc

SEQ ID NO: 2380912 - RNA, 17 nt, Human
gagcucaggacacuaau

SEQ ID NO: 2380913 - RNA, 14 nt, Human
gagcucaggacacu

SEQ ID NO: 2380914 - RNA, 20 nt, Human
gagcuacuugggccauagcu

SEQ ID NO: 2380915 - RNA, 15 nt, Human
gagcuaacacuggcc

SEQ ID NO: 2380916 - RNA, 14 nt, Human
gagcuaacacuggc

SEQ ID NO: 2380917 - RNA, 19 nt, Human
gagcuaacacuggccccua

SEQ ID NO: 2380918 - RNA, 21 nt, Human
gagcuaaauuacaauugucau

SEQ ID NO: 2380919 - RNA, 19 nt, Human
gagcuaaauuacaauuguc

SEQ ID NO: 2380920 - RNA, 23 nt, Human
gagcuacacaggggaaaagagga

SEQ ID NO: 2380921 - RNA, 14 nt, Human
gagcuacaaaugca

SEQ ID NO: 2380922 - RNA, 13 nt, Human
gagcacacuguag

SEQ ID NO: 2380923 - RNA, 15 nt, Human
gagcacacuguagca

SEQ ID NO: 2380924 - RNA, 18 nt, Human
gagcacacuuggcccaag

SEQ ID NO: 2380925 - RNA, 20 nt, Human
gagcacacuuuaguggccga

SEQ ID NO: 2380926 - RNA, 23 nt, Human
gagcaccaggcacgaacccaccu

SEQ ID NO: 2380927 - RNA, 15 nt, Human
gagcaccaggcacga

SEQ ID NO: 2380928 - RNA, 13 nt, Human
gagcaccaggcac

SEQ ID NO: 2380929 - RNA, 14 nt, Human
gagcacaggcagcu

SEQ ID NO: 2380930 - RNA, 15 nt, Human
gagcacaggcagcug

SEQ ID NO: 2380931 - RNA, 17 nt, Human
gagcacagaucuguuuc

SEQ ID NO: 2380932 - RNA, 12 nt, Human
gagcacagcccu

SEQ ID NO: 2380933 - RNA, 13 nt, Human
gagcacagcccuc

SEQ ID NO: 2380934 - RNA, 14 nt, Human
gagcacagcccucc

SEQ ID NO: 2380935 - RNA, 15 nt, Human
gagcacagcccuccc

SEQ ID NO: 2380936 - RNA, 18 nt, Human
gagcacagcccucccgcc

SEQ ID NO: 2380937 - RNA, 20 nt, Human
gagcacagcccucccgcccc

SEQ ID NO: 2380938 - RNA, 13 nt, Human
gagcacaggcagc

SEQ ID NO: 2380939 - RNA, 13 nt, Human
gagcaccagggga

SEQ ID NO: 2380940 - RNA, 16 nt, Human
gagcaccccucucugc

SEQ ID NO: 2380941 - RNA, 17 nt, Human
gagcaccccucucugca

SEQ ID NO: 2380942 - RNA, 19 nt, Human
gagcaccuccacauccucc

SEQ ID NO: 2380943 - RNA, 14 nt, Human
gagcaccuccacau

SEQ ID NO: 2380944 - RNA, 19 nt, Human
gagcaccuuagacaguccc

SEQ ID NO: 2380945 - RNA, 21 nt, Human
gagcaccccucucugcaucug

SEQ ID NO: 2380946 - RNA, 17 nt, Human
gagcaccuuagacaguc

SEQ ID NO: 2380947 - RNA, 19 nt, Human
gagcaaaaucgaugcagug

SEQ ID NO: 2380948 - RNA, 21 nt, Human
gagaugaagagugagagggca

SEQ ID NO: 2380949 - RNA, 16 nt, Human
gagaucugguuuugcu

SEQ ID NO: 2380950 - RNA, 21 nt, Human
gagaugaaaucuuacagcugg

SEQ ID NO: 2380951 - RNA, 12 nt, Human
gagcaaaauaau

SEQ ID NO: 2380952 - RNA, 15 nt, Human
gagcaaacucugcug

SEQ ID NO: 2380953 - RNA, 13 nt, Human
gagcaaagaucaa

SEQ ID NO: 2380954 - RNA, 13 nt, Human
gagcaaagcugau

SEQ ID NO: 2380955 - RNA, 22 nt, Human
gagcaaagaucaaaauaaaaag

SEQ ID NO: 2380956 - RNA, 14 nt, Human
gagcaaagaucaaa

SEQ ID NO: 2380957 - RNA, 18 nt, Human
gagcaaagaucaaaauaa

SEQ ID NO: 2380958 - RNA, 21 nt, Human
gagcaagacgcugugcugccc

SEQ ID NO: 2380959 - RNA, 18 nt, Human
gagcaagacgcugugcug

SEQ ID NO: 2380960 - RNA, 22 nt, Human
gagcaagacgcugugcugcccu

SEQ ID NO: 2380961 - RNA, 23 nt, Human
gagcaagacgcugugcugcccug

SEQ ID NO: 2380962 - RNA, 16 nt, Human
gagaucagccugggca

SEQ ID NO: 2380963 - RNA, 14 nt, Human
gagaucagccuggg

SEQ ID NO: 2380964 - RNA, 23 nt, Human
gagaucaaauggaaaggagagga

SEQ ID NO: 2380965 - RNA, 17 nt, Human
gagaucaaauggaaagg

SEQ ID NO: 2380966 - RNA, 18 nt, Human
gagaucaaauggaaagga

SEQ ID NO: 2380967 - RNA, 13 nt, Human
gagaucagccugg

SEQ ID NO: 2380968 - RNA, 17 nt, Human
gagauccuccugcagac

SEQ ID NO: 2380969 - RNA, 23 nt, Human
gagauccuccugcagaccacgcc

SEQ ID NO: 2380970 - RNA, 13 nt, Human
gagaucaggcucu

SEQ ID NO: 2380971 - RNA, 13 nt, Human
gagauccuccugc

SEQ ID NO: 2380972 - RNA, 14 nt, Human
gagauccuccugca

SEQ ID NO: 2380973 - RNA, 20 nt, Human
gagaucgcgccacugcacuc

SEQ ID NO: 2380974 - RNA, 21 nt, Human
gagaucuaagccuuuccauaa

SEQ ID NO: 2380975 - RNA, 23 nt, Human
gagaucuaaggaugucacagggc

SEQ ID NO: 2380976 - RNA, 20 nt, Human
gagaucuaagccuuuccaua

SEQ ID NO: 2380977 - RNA, 19 nt, Human
gagaucuaagccuuuccau

SEQ ID NO: 2380978 - RNA, 22 nt, Human
gagaucgugccguuacucucca

SEQ ID NO: 2380979 - RNA, 21 nt, Human
gagaucgugccguuacucucc

SEQ ID NO: 2380980 - RNA, 18 nt, Human
gaaugcugguuuuccuaa

SEQ ID NO: 2380981 - RNA, 17 nt, Human
gaaugcugguuuuccua

SEQ ID NO: 2380982 - RNA, 13 nt, Human
gaaugcuguacau

SEQ ID NO: 2380983 - RNA, 18 nt, Human
gaaugcugggacucagcc

SEQ ID NO: 2380984 - RNA, 19 nt, Human
gaaugcugggacucagccu

SEQ ID NO: 2380985 - RNA, 13 nt, Human
gaaugcugggacu

SEQ ID NO: 2380986 - RNA, 14 nt, Human
gaaugcugggacuc

SEQ ID NO: 2380987 - RNA, 16 nt, Human
gaaugcugggacucag

SEQ ID NO: 2380988 - RNA, 17 nt, Human
gaaugcugggacucagc

SEQ ID NO: 2380989 - RNA, 23 nt, Human
gaaugcucccccauccuccccuu

SEQ ID NO: 2380990 - RNA, 22 nt, Human
gaaugcucccccauccuccccu

SEQ ID NO: 2380991 - RNA, 21 nt, Human
gaaugcucccccauccucccc

SEQ ID NO: 2380992 - RNA, 20 nt, Human
gaaugcucccccauccuccc

SEQ ID NO: 2380993 - RNA, 19 nt, Human
gaaugcucccccauccucc

SEQ ID NO: 2380994 - RNA, 13 nt, Human
gaaugcuccccca

SEQ ID NO: 2380995 - RNA, 11 nt, Human
gaaugcucccc

SEQ ID NO: 2380996 - RNA, 21 nt, Human
gaaugcggccgcauucccuga

SEQ ID NO: 2380997 - RNA, 21 nt, Human
gaaugcugcaggacuugagaa

SEQ ID NO: 2380998 - RNA, 13 nt, Human
gaaugcugaaacc

SEQ ID NO: 2380999 - RNA, 15 nt, Human
gaaugcugaaaccaa

SEQ ID NO: 2381000 - RNA, 21 nt, Human
gaaugcugcccgcucugcaga

SEQ ID NO: 2381001 - RNA, 22 nt, Human
gaaugcugguuuuccuaaaugc

SEQ ID NO: 2381002 - RNA, 21 nt, Human
gagauaucugagggaggaggc

SEQ ID NO: 2381003 - RNA, 22 nt, Human
gagauaucugagggaggaggcc

SEQ ID NO: 2381004 - RNA, 16 nt, Human
gagauaugcagaagga

SEQ ID NO: 2381005 - RNA, 17 nt, Human
gagauauggcagcgaaa

SEQ ID NO: 2381006 - RNA, 16 nt, Human
gagauauggcagcgaa

SEQ ID NO: 2381007 - RNA, 20 nt, Human
gaaugcuguacaucuauuuu

SEQ ID NO: 2381008 - RNA, 17 nt, Human
gaaugcuguacaucuau

SEQ ID NO: 2381009 - RNA, 15 nt, Human
gaaugcuguacaucu

SEQ ID NO: 2381010 - RNA, 14 nt, Human
gaaugcuguacauc

SEQ ID NO: 2381011 - RNA, 22 nt, Human
gagauauuuauggggggagaac

SEQ ID NO: 2381012 - RNA, 22 nt, Human
gagauauuuacaugaauugcau

SEQ ID NO: 2381013 - RNA, 11 nt, Human
gagauauuuac

SEQ ID NO: 2381014 - RNA, 17 nt, Human
gagauauuuuaaaauga

SEQ ID NO: 2381015 - RNA, 20 nt, Human
gagaucaaccccuucgcucc

SEQ ID NO: 2381016 - RNA, 22 nt, Human
gagccauggaccacgcaggaag

SEQ ID NO: 2381017 - RNA, 17 nt, Human
gagccaugcgcccccuc

SEQ ID NO: 2381018 - RNA, 22 nt, Human
gagccaugauguggaguggggc

SEQ ID NO: 2381019 - RNA, 14 nt, Human
gagccaugcuggga

SEQ ID NO: 2381020 - RNA, 21 nt, Human
gagccauguagaagcugcauc

SEQ ID NO: 2381021 - RNA, 11 nt, Human
gagcccacgcc

SEQ ID NO: 2381022 - RNA, 21 nt, Human
gagccauuuuggggggccccc

SEQ ID NO: 2381023 - RNA, 23 nt, Human
gagccauuuuggggggccccccu

SEQ ID NO: 2381024 - RNA, 14 nt, Human
gagccauuuuguga

SEQ ID NO: 2381025 - RNA, 22 nt, Human
gagccaucggugaaacuaacag

SEQ ID NO: 2381026 - RNA, 22 nt, Human
gagccagagaagugacagggaa

SEQ ID NO: 2381027 - RNA, 19 nt, Human
gagccagagaagugacagg

SEQ ID NO: 2381028 - RNA, 20 nt, Human
gagccagagaagugacaggg

SEQ ID NO: 2381029 - RNA, 23 nt, Human
gagccauauaaguuugaaggaaa

SEQ ID NO: 2381030 - RNA, 23 nt, Human
gagccagacucuggucuucuuug

SEQ ID NO: 2381031 - RNA, 12 nt, Human
gagccagagaag

SEQ ID NO: 2381032 - RNA, 13 nt, Human
gagccagagaagu

SEQ ID NO: 2381033 - RNA, 14 nt, Human
gagccagagaagug

SEQ ID NO: 2381034 - RNA, 15 nt, Human
gagccagagaaguga

SEQ ID NO: 2381035 - RNA, 16 nt, Human
gagccagagaagugac

SEQ ID NO: 2381036 - RNA, 17 nt, Human
gagccagagaagugaca

SEQ ID NO: 2381037 - RNA, 18 nt, Human
gagccagagaagugacag

SEQ ID NO: 2381038 - RNA, 19 nt, Human
gagccaccaugcccagcuc

SEQ ID NO: 2381039 - RNA, 16 nt, Human
gagccagaaccuggag

SEQ ID NO: 2381040 - RNA, 21 nt, Human
gagccagaaccuggagggcua

SEQ ID NO: 2381041 - RNA, 15 nt, Human
gagccacuccucuga

SEQ ID NO: 2381042 - RNA, 14 nt, Human
gagccacuccucug

SEQ ID NO: 2381043 - RNA, 22 nt, Human
gagccacugcaccgggccacag

SEQ ID NO: 2381044 - RNA, 13 nt, Human
gagcccaggccuc

SEQ ID NO: 2381045 - RNA, 14 nt, Human
gagcccaggccucc

SEQ ID NO: 2381046 - RNA, 14 nt, Human
gagcccaagggaau

SEQ ID NO: 2381047 - RNA, 16 nt, Human
gagccauuuugugaau

SEQ ID NO: 2381048 - RNA, 21 nt, Human
gagccauuuugugaauggauu

SEQ ID NO: 2381049 - RNA, 13 nt, Human
gagcccaggcggg

SEQ ID NO: 2381050 - RNA, 15 nt, Human
gagcccaggcgggag

SEQ ID NO: 2381051 - RNA, 12 nt, Human
gagcccacgccc

SEQ ID NO: 2381052 - RNA, 15 nt, Human
gagcccacgccccca

SEQ ID NO: 2381053 - RNA, 16 nt, Human
gagcccacgcccccac

SEQ ID NO: 2381054 - RNA, 12 nt, Human
gagcccaggccu

SEQ ID NO: 2381055 - RNA, 14 nt, Human
gagccacuaacuag

SEQ ID NO: 2381056 - RNA, 20 nt, Human
gagccaccgugccuggccac

SEQ ID NO: 2381057 - RNA, 18 nt, Human
gagcaggcggugggcacc

SEQ ID NO: 2381058 - RNA, 22 nt, Human
gagcaggcggugggcacccacc

SEQ ID NO: 2381059 - RNA, 14 nt, Human
gagccaccaugccc

SEQ ID NO: 2381060 - RNA, 18 nt, Human
gagccaccgcgcccagcc

SEQ ID NO: 2381061 - RNA, 14 nt, Human
gagccaccgugccu

SEQ ID NO: 2381062 - RNA, 19 nt, Human
gagcaggcacauggaggag

SEQ ID NO: 2381063 - RNA, 19 nt, Human
gagcaggccuugcgcuguu

SEQ ID NO: 2381064 - RNA, 21 nt, Human
gagcaggcuacugucagcucc

SEQ ID NO: 2381065 - RNA, 15 nt, Human
gagcaggcacaugga

SEQ ID NO: 2381066 - RNA, 17 nt, Human
gagcaggaggccccugg

SEQ ID NO: 2381067 - RNA, 21 nt, Human
gagcaggaggccccuggccca

SEQ ID NO: 2381068 - RNA, 20 nt, Human
gagcaggagauugagaagga

SEQ ID NO: 2381069 - RNA, 22 nt, Human
gagcaggagauugagaaggaga

SEQ ID NO: 2381070 - RNA, 23 nt, Human
gagcaggagauugagaaggagag

SEQ ID NO: 2381071 - RNA, 16 nt, Human
gagcaggaggccccug

SEQ ID NO: 2381072 - RNA, 16 nt, Human
gagcagcagugaaaac

SEQ ID NO: 2381073 - RNA, 17 nt, Human
gagcagcagugaaaaca

SEQ ID NO: 2381074 - RNA, 19 nt, Human
gagcaggacucuauuuuaa

SEQ ID NO: 2381075 - RNA, 18 nt, Human
gagcaggagauugagaag

SEQ ID NO: 2381076 - RNA, 13 nt, Human
gagcacuggguug

SEQ ID NO: 2381077 - RNA, 23 nt, Human
gagcaccugcuucaugcucagcc

SEQ ID NO: 2381078 - RNA, 20 nt, Human
gagcacuggagugcagggag

SEQ ID NO: 2381079 - RNA, 14 nt, Human
gagcacuggagugc

SEQ ID NO: 2381080 - RNA, 12 nt, Human
gagcaccugcuu

SEQ ID NO: 2381081 - RNA, 17 nt, Human
gagcacuggguugacuu

SEQ ID NO: 2381082 - RNA, 16 nt, Human
gagcacuuaagagaau

SEQ ID NO: 2381083 - RNA, 15 nt, Human
gagcacuuaagagaa

SEQ ID NO: 2381084 - RNA, 14 nt, Human
gagcagacaggagg

SEQ ID NO: 2381085 - RNA, 17 nt, Human
gagcagaaguggagcug

SEQ ID NO: 2381086 - RNA, 23 nt, Human
gagcagaacggagccccaggccu

SEQ ID NO: 2381087 - RNA, 14 nt, Human
gagcacuugcugua

SEQ ID NO: 2381088 - RNA, 18 nt, Human
gagcacuuaagagaauau

SEQ ID NO: 2381089 - RNA, 19 nt, Human
gagcacuuaagagaauauu

SEQ ID NO: 2381090 - RNA, 19 nt, Human
gagcagaugcagagagcca

SEQ ID NO: 2381091 - RNA, 21 nt, Human
gagcagaugcagagagccauu

SEQ ID NO: 2381092 - RNA, 14 nt, Human
gagcagaugcagag

SEQ ID NO: 2381093 - RNA, 16 nt, Human
gagcagaugcagagag

SEQ ID NO: 2381094 - RNA, 18 nt, Human
gagcagaugcagagagcc

SEQ ID NO: 2381095 - RNA, 16 nt, Human
gagcagaggggcugaa

SEQ ID NO: 2381096 - RNA, 20 nt, Human
gagcagagucuugcuaccuc

SEQ ID NO: 2381097 - RNA, 11 nt, Human
gagcagagucu

SEQ ID NO: 2381098 - RNA, 22 nt, Human
gagcagaccaccccgccugccc

SEQ ID NO: 2381099 - RNA, 15 nt, Human
gagcagacaggagga

SEQ ID NO: 2381100 - RNA, 21 nt, Human
gagcagacaggaggaaucaug

SEQ ID NO: 2381101 - RNA, 18 nt, Human
gagcagccacauuccuga

SEQ ID NO: 2381102 - RNA, 18 nt, Human
gaggagcucaggacacua

SEQ ID NO: 2381103 - RNA, 15 nt, Human
gaggagcugcuggcu

SEQ ID NO: 2381104 - RNA, 13 nt, Human
gaggagcugcugg

SEQ ID NO: 2381105 - RNA, 12 nt, Human
gaggagcugcug

SEQ ID NO: 2381106 - RNA, 11 nt, Human
gaggagcugcu

SEQ ID NO: 2381107 - RNA, 18 nt, Human
gaggaggcaauugggaug

SEQ ID NO: 2381108 - RNA, 16 nt, Human
gaggaggaaggcaaga

SEQ ID NO: 2381109 - RNA, 14 nt, Human
gaggaggaggaggu

SEQ ID NO: 2381110 - RNA, 19 nt, Human
gaggaggaaggagagaagg

SEQ ID NO: 2381111 - RNA, 13 nt, Human
gaggaggaaggca

SEQ ID NO: 2381112 - RNA, 21 nt, Human
gaggagcuugggggaugacua

SEQ ID NO: 2381113 - RNA, 15 nt, Human
gaggagcuuggggga

SEQ ID NO: 2381114 - RNA, 20 nt, Human
gaggagggcgugacucaccc

SEQ ID NO: 2381115 - RNA, 19 nt, Human
gaggagggaugcugccuga

SEQ ID NO: 2381116 - RNA, 13 nt, Human
gaggaggccucca

SEQ ID NO: 2381117 - RNA, 21 nt, Human
gaggaggccugggggcaggga

SEQ ID NO: 2381118 - RNA, 18 nt, Human
gaggaggcuccagagggc

SEQ ID NO: 2381119 - RNA, 11 nt, Human
gaggagggaga

SEQ ID NO: 2381120 - RNA, 17 nt, Human
gaggagggagagggagg

SEQ ID NO: 2381121 - RNA, 12 nt, Human
gaggaggccacc

SEQ ID NO: 2381122 - RNA, 14 nt, Human
gaggaggccaccuc

SEQ ID NO: 2381123 - RNA, 15 nt, Human
gaggaggccaccucu

SEQ ID NO: 2381124 - RNA, 16 nt, Human
gaggaggccaccucuc

SEQ ID NO: 2381125 - RNA, 18 nt, Human
gaggaggccaccucucca

SEQ ID NO: 2381126 - RNA, 19 nt, Human
gaggaggccaccucuccaa

SEQ ID NO: 2381127 - RNA, 20 nt, Human
gaggaggccaccucuccaag

SEQ ID NO: 2381128 - RNA, 13 nt, Human
gaggacagggagg

SEQ ID NO: 2381129 - RNA, 21 nt, Human
gaggacaauucaugaacuucg

SEQ ID NO: 2381130 - RNA, 13 nt, Human
gaggacagcuguc

SEQ ID NO: 2381131 - RNA, 22 nt, Human
gaggacagggaggugaccccag

SEQ ID NO: 2381132 - RNA, 23 nt, Human
gaggacagggaggugaccccagg

SEQ ID NO: 2381133 - RNA, 17 nt, Human
gaggagcagugcaggca

SEQ ID NO: 2381134 - RNA, 14 nt, Human
gaggacagcugucc

SEQ ID NO: 2381135 - RNA, 15 nt, Human
gaggacagcuugagc

SEQ ID NO: 2381136 - RNA, 18 nt, Human
gaggacagcuugagccgg

SEQ ID NO: 2381137 - RNA, 14 nt, Human
gaggagccccagcu

SEQ ID NO: 2381138 - RNA, 15 nt, Human
gaggagccccagcua

SEQ ID NO: 2381139 - RNA, 22 nt, Human
gagcuucuuccaggugcccagc

SEQ ID NO: 2381140 - RNA, 21 nt, Human
gagcuucuguugcugccucau

SEQ ID NO: 2381141 - RNA, 22 nt, Human
gaggaaggaaacccagcucugg

SEQ ID NO: 2381142 - RNA, 14 nt, Human
gaggaaggagagaa

SEQ ID NO: 2381143 - RNA, 16 nt, Human
gaggaaggagagaagg

SEQ ID NO: 2381144 - RNA, 18 nt, Human
gaggaauaauuauuuauu

SEQ ID NO: 2381145 - RNA, 19 nt, Human
gaggaauaguugagcccca

SEQ ID NO: 2381146 - RNA, 17 nt, Human
gaggaauaauuauuuau

SEQ ID NO: 2381147 - RNA, 19 nt, Human
gaggaaggggccagaggcu

SEQ ID NO: 2381148 - RNA, 21 nt, Human
gaggaaggcaagagggggugg

SEQ ID NO: 2381149 - RNA, 16 nt, Human
gaggaaggcaggaaga

SEQ ID NO: 2381150 - RNA, 14 nt, Human
gaggaaggauugua

SEQ ID NO: 2381151 - RNA, 15 nt, Human
gaggaaggauuguaa

SEQ ID NO: 2381152 - RNA, 16 nt, Human
gaggaaggauuguaaa

SEQ ID NO: 2381153 - RNA, 13 nt, Human
gaggaaggcaaga

SEQ ID NO: 2381154 - RNA, 19 nt, Human
gaggaaucacucuugugga

SEQ ID NO: 2381155 - RNA, 23 nt, Human
gaggaauaugacggaagaacaua

SEQ ID NO: 2381156 - RNA, 21 nt, Human
gaggaauaauuauuuauuuaa

SEQ ID NO: 2381157 - RNA, 13 nt, Human
gaggaauaucaau

SEQ ID NO: 2381158 - RNA, 22 nt, Human
gaggaaucacucuuguggaugu

SEQ ID NO: 2381159 - RNA, 20 nt, Human
gaggaaucaugucaggccug

SEQ ID NO: 2381160 - RNA, 21 nt, Human
gaggaaucaugucaggccugu

SEQ ID NO: 2381161 - RNA, 22 nt, Human
gaggaaucaugucaggccugug

SEQ ID NO: 2381162 - RNA, 14 nt, Human
gaggaauccagacc

SEQ ID NO: 2381163 - RNA, 20 nt, Human
gaggaaucgaggaaccagag

SEQ ID NO: 2381164 - RNA, 15 nt, Human
gaggaauccagaccc

SEQ ID NO: 2381165 - RNA, 13 nt, Human
gaggaaugcuccc

SEQ ID NO: 2381166 - RNA, 17 nt, Human
gaggaaugaugaagcuu

SEQ ID NO: 2381167 - RNA, 21 nt, Human
gaggaaugcucccccauccuc

SEQ ID NO: 2381168 - RNA, 14 nt, Human
gaggaauggacaga

SEQ ID NO: 2381169 - RNA, 15 nt, Human
gaggaaugcuccccc

SEQ ID NO: 2381170 - RNA, 13 nt, Human
gaggaauguauau

SEQ ID NO: 2381171 - RNA, 14 nt, Human
gaggaauguauaug

SEQ ID NO: 2381172 - RNA, 12 nt, Human
gaggacaauuca

SEQ ID NO: 2381173 - RNA, 19 nt, Human
gaggacaauucaugaacuu

SEQ ID NO: 2381174 - RNA, 20 nt, Human
gaggacaauucaugaacuuc

SEQ ID NO: 2381175 - RNA, 15 nt, Human
gaggacaaccauucc

SEQ ID NO: 2381176 - RNA, 14 nt, Human
gaggaauuucaccu

SEQ ID NO: 2381177 - RNA, 22 nt, Human
gaggaauuuucuuuguguagcu

SEQ ID NO: 2381178 - RNA, 19 nt, Human
gaggagguaaugaauuaaa

SEQ ID NO: 2381179 - RNA, 18 nt, Human
gaggagguggcagcccug

SEQ ID NO: 2381180 - RNA, 15 nt, Human
gaggagguggcagcc

SEQ ID NO: 2381181 - RNA, 17 nt, Human
gaggagggcggggggca

SEQ ID NO: 2381182 - RNA, 17 nt, Human
gaggaggggccgcugcc

SEQ ID NO: 2381183 - RNA, 16 nt, Human
gaggaggggccgcugc

SEQ ID NO: 2381184 - RNA, 18 nt, Human
gaggaggggccgcugcca

SEQ ID NO: 2381185 - RNA, 17 nt, Human
gaggagguuuaggucaa

SEQ ID NO: 2381186 - RNA, 20 nt, Human
gaggagguuuggggucugcc

SEQ ID NO: 2381187 - RNA, 22 nt, Human
gaggagguggcagcccuguagg

SEQ ID NO: 2381188 - RNA, 20 nt, Human
gaggagguggcagcccugua

SEQ ID NO: 2381189 - RNA, 16 nt, Human
gaggaguuucgaggua

SEQ ID NO: 2381190 - RNA, 18 nt, Human
gaggaguucaaugaucua

SEQ ID NO: 2381191 - RNA, 19 nt, Human
gaggaguucaaugaucuag

SEQ ID NO: 2381192 - RNA, 14 nt, Human
gaggaguucaauga

SEQ ID NO: 2381193 - RNA, 15 nt, Human
gaggaguucaaugau

SEQ ID NO: 2381194 - RNA, 16 nt, Human
gaggaguucaaugauc

SEQ ID NO: 2381195 - RNA, 17 nt, Human
gaggaguucaaugaucu

SEQ ID NO: 2381196 - RNA, 23 nt, Human
gaggaguuugggguaugggagag

SEQ ID NO: 2381197 - RNA, 13 nt, Human
gaggagugaggaa

SEQ ID NO: 2381198 - RNA, 11 nt, Human
gaggaguucaa

SEQ ID NO: 2381199 - RNA, 12 nt, Human
gaggaguucaau

SEQ ID NO: 2381200 - RNA, 14 nt, Human
gaggagucuugugu

SEQ ID NO: 2381201 - RNA, 15 nt, Human
gaggaguacagguga

SEQ ID NO: 2381202 - RNA, 20 nt, Human
gaggaugucacucagaugga

SEQ ID NO: 2381203 - RNA, 15 nt, Human
gaggaugucugggcc

SEQ ID NO: 2381204 - RNA, 12 nt, Human
gaggauguucug

SEQ ID NO: 2381205 - RNA, 16 nt, Human
gaggaucacuggagcc

SEQ ID NO: 2381206 - RNA, 18 nt, Human
gaggaucacagugcugag

SEQ ID NO: 2381207 - RNA, 19 nt, Human
gaggaucacagugcugaga

SEQ ID NO: 2381208 - RNA, 23 nt, Human
gaggauaggaguucacuucaucu

SEQ ID NO: 2381209 - RNA, 20 nt, Human
gaggaguuucgagguagagu

SEQ ID NO: 2381210 - RNA, 18 nt, Human
gaggauauauuuucacuu

SEQ ID NO: 2381211 - RNA, 19 nt, Human
gaggaucacuggagcccag

SEQ ID NO: 2381212 - RNA, 20 nt, Human
gaggauggccagugucuguc

SEQ ID NO: 2381213 - RNA, 17 nt, Human
gaggaucacuggagccc

SEQ ID NO: 2381214 - RNA, 19 nt, Human
gaggaugggaaggagggag

SEQ ID NO: 2381215 - RNA, 15 nt, Human
gaggaugggaaggag

SEQ ID NO: 2381216 - RNA, 20 nt, Human
gaggauggccucugcuaagc

SEQ ID NO: 2381217 - RNA, 17 nt, Human
gaggauguucugggaca

SEQ ID NO: 2381218 - RNA, 20 nt, Human
gaggauguucugggacacag

SEQ ID NO: 2381219 - RNA, 16 nt, Human
gaggauugcuugagcu

SEQ ID NO: 2381220 - RNA, 17 nt, Human
gaggauucuaugaggca

SEQ ID NO: 2381221 - RNA, 16 nt, Human
gaggauucuaugaggc

SEQ ID NO: 2381222 - RNA, 13 nt, Human
gaggaugggcucg

SEQ ID NO: 2381223 - RNA, 14 nt, Human
gaggaugggcucgc

SEQ ID NO: 2381224 - RNA, 20 nt, Human
gaggcacacagcugcagaga

SEQ ID NO: 2381225 - RNA, 24 nt, Human
gaggcacacagcugcagagacaga

SEQ ID NO: 2381226 - RNA, 23 nt, Human
gaggcaaugucaggaacagaagg

SEQ ID NO: 2381227 - RNA, 21 nt, Human
gaggcaaugucaggaacagaa

SEQ ID NO: 2381228 - RNA, 22 nt, Human
gaggauugcuugagcccaggag

SEQ ID NO: 2381229 - RNA, 19 nt, Human
gaggauugcuugagcccag

SEQ ID NO: 2381230 - RNA, 18 nt, Human
gaggauugcuugagccca

SEQ ID NO: 2381231 - RNA, 23 nt, Human
gaggcagaagaauugaacccagg

SEQ ID NO: 2381232 - RNA, 18 nt, Human
gaggcacugaagugcuua

SEQ ID NO: 2381233 - RNA, 16 nt, Human
gaggcagaaaauugca

SEQ ID NO: 2381234 - RNA, 20 nt, Human
gaggcagaaaauugcacaau

SEQ ID NO: 2381235 - RNA, 16 nt, Human
gaggcagacagcagcu

SEQ ID NO: 2381236 - RNA, 15 nt, Human
gaggcagacagcagc

SEQ ID NO: 2381237 - RNA, 12 nt, Human
gaggcagacagc

SEQ ID NO: 2381238 - RNA, 13 nt, Human
gaggcagccccau

SEQ ID NO: 2381239 - RNA, 22 nt, Human
gaggcagcagugugaggccagg

SEQ ID NO: 2381240 - RNA, 21 nt, Human
gaggcagcagugugaggccag

SEQ ID NO: 2381241 - RNA, 20 nt, Human
gaggcagcagugugaggcca

SEQ ID NO: 2381242 - RNA, 13 nt, Human
gaggcagcagugu

SEQ ID NO: 2381243 - RNA, 23 nt, Human
gaggcagccccauucugccugcc

SEQ ID NO: 2381244 - RNA, 21 nt, Human
gaggcagcgugaaagcagaug

SEQ ID NO: 2381245 - RNA, 23 nt, Human
gaggcagcgugaaagcagaugag

SEQ ID NO: 2381246 - RNA, 22 nt, Human
gaggcagccccauucugccugc

SEQ ID NO: 2381247 - RNA, 23 nt, Human
gaggcaggaggauugcuugagcc

SEQ ID NO: 2381248 - RNA, 12 nt, Human
gaggccagccuu

SEQ ID NO: 2381249 - RNA, 22 nt, Human
gaggccaggaguuugagaccag

SEQ ID NO: 2381250 - RNA, 12 nt, Human
gaggccaggagu

SEQ ID NO: 2381251 - RNA, 15 nt, Human
gaggccagggcagag

SEQ ID NO: 2381252 - RNA, 13 nt, Human
gaggccagggcag

SEQ ID NO: 2381253 - RNA, 13 nt, Human
gaggccagccuug

SEQ ID NO: 2381254 - RNA, 18 nt, Human
gagggaccucucccaggg

SEQ ID NO: 2381255 - RNA, 17 nt, Human
gagggaccucucccagg

SEQ ID NO: 2381256 - RNA, 15 nt, Human
gagggacgccugggg

SEQ ID NO: 2381257 - RNA, 14 nt, Human
gagggacgccuggg

SEQ ID NO: 2381258 - RNA, 15 nt, Human
gagggaccucuccca

SEQ ID NO: 2381259 - RNA, 14 nt, Human
gagggaccucuccc

SEQ ID NO: 2381260 - RNA, 13 nt, Human
gagggaccucucc

SEQ ID NO: 2381261 - RNA, 16 nt, Human
gagggaccagccaaga

SEQ ID NO: 2381262 - RNA, 12 nt, Human
gagggaccagcc

SEQ ID NO: 2381263 - RNA, 14 nt, Human
gagggacucugaag

SEQ ID NO: 2381264 - RNA, 23 nt, Human
gagggacgccugggggugccagg

SEQ ID NO: 2381265 - RNA, 16 nt, Human
gagggacgccuggggg

SEQ ID NO: 2381266 - RNA, 22 nt, Human
gagggacucugaagccucuggg

SEQ ID NO: 2381267 - RNA, 23 nt, Human
gagggacucugaagccucuggga

SEQ ID NO: 2381268 - RNA, 18 nt, Human
gagggacucugaagccuc

SEQ ID NO: 2381269 - RNA, 19 nt, Human
gagggacucugaagccucu

SEQ ID NO: 2381270 - RNA, 20 nt, Human
gagggacucugaagccucug

SEQ ID NO: 2381271 - RNA, 21 nt, Human
gagggacucugaagccucugg

SEQ ID NO: 2381272 - RNA, 14 nt, Human
gagggagggagggc

SEQ ID NO: 2381273 - RNA, 17 nt, Human
gagggaggcaagcccug

SEQ ID NO: 2381274 - RNA, 13 nt, Human
gagggagaagaag

SEQ ID NO: 2381275 - RNA, 15 nt, Human
gagggagggagggcu

SEQ ID NO: 2381276 - RNA, 15 nt, Human
gagggagggcuccag

SEQ ID NO: 2381277 - RNA, 18 nt, Human
gagggaacagacaggaga

SEQ ID NO: 2381278 - RNA, 15 nt, Human
gagggaacagacagg

SEQ ID NO: 2381279 - RNA, 19 nt, Human
gagggaacagacaggagaa

SEQ ID NO: 2381280 - RNA, 18 nt, Human
gagggaauugaggucugc

SEQ ID NO: 2381281 - RNA, 21 nt, Human
gagggaauccccgaaggugcu

SEQ ID NO: 2381282 - RNA, 16 nt, Human
gagggaaugaaccugg

SEQ ID NO: 2381283 - RNA, 19 nt, Human
gagggaccaacugggccca

SEQ ID NO: 2381284 - RNA, 18 nt, Human
gagggaccaacugggccc

SEQ ID NO: 2381285 - RNA, 17 nt, Human
gagggaccaacugggcc

SEQ ID NO: 2381286 - RNA, 22 nt, Human
gaggcuucuucagaucagugcu

SEQ ID NO: 2381287 - RNA, 15 nt, Human
gaggcuugcugagag

SEQ ID NO: 2381288 - RNA, 16 nt, Human
gaggcuucuucagauc

SEQ ID NO: 2381289 - RNA, 23 nt, Human
gaggcuucuccgccagccuccuc

SEQ ID NO: 2381290 - RNA, 19 nt, Human
gaggcuucuccgccagccu

SEQ ID NO: 2381291 - RNA, 20 nt, Human
gaggcuucuccgccagccuc

SEQ ID NO: 2381292 - RNA, 21 nt, Human
gaggcuucuccgccagccucc

SEQ ID NO: 2381293 - RNA, 22 nt, Human
gaggcuucuccgccagccuccu

SEQ ID NO: 2381294 - RNA, 15 nt, Human
gaggcuuggaaagca

SEQ ID NO: 2381295 - RNA, 20 nt, Human
gaggcuugcugagaggggcu

SEQ ID NO: 2381296 - RNA, 18 nt, Human
gaggcuugggaccgccag

SEQ ID NO: 2381297 - RNA, 18 nt, Human
gaggcuugucagagcugg

SEQ ID NO: 2381298 - RNA, 22 nt, Human
gaggcuugggaccgccagaugg

SEQ ID NO: 2381299 - RNA, 17 nt, Human
gaggcuugucagagcug

SEQ ID NO: 2381300 - RNA, 21 nt, Human
gaggcuugucagagcugggag

SEQ ID NO: 2381301 - RNA, 19 nt, Human
gaggcuugucagagcuggg

SEQ ID NO: 2381302 - RNA, 16 nt, Human
gaggcuuuggauuuga

SEQ ID NO: 2381303 - RNA, 14 nt, Human
gaggcuuuggauuu

SEQ ID NO: 2381304 - RNA, 21 nt, Human
gagggaaagcccagaaaagga

SEQ ID NO: 2381305 - RNA, 20 nt, Human
gaggcuuuggauuugacauu

SEQ ID NO: 2381306 - RNA, 14 nt, Human
gagggcagaggcug

SEQ ID NO: 2381307 - RNA, 23 nt, Human
gagggcagaaagguucugcccgg

SEQ ID NO: 2381308 - RNA, 15 nt, Human
gagggcagaggcugg

SEQ ID NO: 2381309 - RNA, 19 nt, Human
gagggcagcagaagggggu

SEQ ID NO: 2381310 - RNA, 21 nt, Human
gagggcagcagaagggggugg

SEQ ID NO: 2381311 - RNA, 22 nt, Human
gagggcagcagaaggggguggu

SEQ ID NO: 2381312 - RNA, 16 nt, Human
gagggcacugguggcc

SEQ ID NO: 2381313 - RNA, 18 nt, Human
gagggcacugguggcccg

SEQ ID NO: 2381314 - RNA, 23 nt, Human
gagggcacauuccuugccugcac

SEQ ID NO: 2381315 - RNA, 15 nt, Human
gagggcacuggagcu

SEQ ID NO: 2381316 - RNA, 17 nt, Human
gagggcagaaagguucu

SEQ ID NO: 2381317 - RNA, 20 nt, Human
gagggcagaaagguucugcc

SEQ ID NO: 2381318 - RNA, 21 nt, Human
gagggcagaaagguucugccc

SEQ ID NO: 2381319 - RNA, 22 nt, Human
gagggcagaaagguucugcccg

SEQ ID NO: 2381320 - RNA, 16 nt, Human
gagggcagaggcugga

SEQ ID NO: 2381321 - RNA, 22 nt, Human
gaggggccucuuaugggcuggg

SEQ ID NO: 2381322 - RNA, 13 nt, Human
gaggggccuggca

SEQ ID NO: 2381323 - RNA, 14 nt, Human
gaggggccuggcag

SEQ ID NO: 2381324 - RNA, 18 nt, Human
gaggggccuggcagccgu

SEQ ID NO: 2381325 - RNA, 20 nt, Human
gaggggccuggcagccgugc

SEQ ID NO: 2381326 - RNA, 12 nt, Human
gagggcacuggu

SEQ ID NO: 2381327 - RNA, 15 nt, Human
gagggagguguuuaa

SEQ ID NO: 2381328 - RNA, 18 nt, Human
gagggagguguuuaaaga

SEQ ID NO: 2381329 - RNA, 23 nt, Human
gagggagguguuuaaagagaggu

SEQ ID NO: 2381330 - RNA, 20 nt, Human
gagggcacauuccuugccug

SEQ ID NO: 2381331 - RNA, 23 nt, Human
gagggcacagaaaauggaagaca

SEQ ID NO: 2381332 - RNA, 14 nt, Human
gagggcacagaaaa

SEQ ID NO: 2381333 - RNA, 22 nt, Human
gagggcacagaaaauggaagac

SEQ ID NO: 2381334 - RNA, 13 nt, Human
gagggagugacag

SEQ ID NO: 2381335 - RNA, 14 nt, Human
gagggagguaagga

SEQ ID NO: 2381336 - RNA, 14 nt, Human
gagggagugacaga

SEQ ID NO: 2381337 - RNA, 16 nt, Human
gagggagggcuccaga

SEQ ID NO: 2381338 - RNA, 15 nt, Human
gaggcccccagccca

SEQ ID NO: 2381339 - RNA, 19 nt, Human
gaggccagggcagagugag

SEQ ID NO: 2381340 - RNA, 14 nt, Human
gaggccaggugcag

SEQ ID NO: 2381341 - RNA, 16 nt, Human
gaggcccccagcccag

SEQ ID NO: 2381342 - RNA, 17 nt, Human
gaggcccccagcccagg

SEQ ID NO: 2381343 - RNA, 19 nt, Human
gaggcccccagcccagggc

SEQ ID NO: 2381344 - RNA, 20 nt, Human
gaggcccccagcccagggcu

SEQ ID NO: 2381345 - RNA, 20 nt, Human
gaggccccugucucagggug

SEQ ID NO: 2381346 - RNA, 13 nt, Human
gaggccccuggac

SEQ ID NO: 2381347 - RNA, 15 nt, Human
gaggccccuggccca

SEQ ID NO: 2381348 - RNA, 19 nt, Human
gaggccccuucuagguggc

SEQ ID NO: 2381349 - RNA, 20 nt, Human
gaggccccuucuagguggca

SEQ ID NO: 2381350 - RNA, 24 nt, Human
gaggccccuauguaguccgugcug

SEQ ID NO: 2381351 - RNA, 17 nt, Human
gaggccaguaccuuucc

SEQ ID NO: 2381352 - RNA, 21 nt, Human
gaggcccccagcccagggcuc

SEQ ID NO: 2381353 - RNA, 22 nt, Human
gaggccccuauguaguccgugc

SEQ ID NO: 2381354 - RNA, 20 nt, Human
gaggcccgcaugcggcccag

SEQ ID NO: 2381355 - RNA, 13 nt, Human
gaggcccggccuc

SEQ ID NO: 2381356 - RNA, 17 nt, Human
gaggcccucgcugccag

SEQ ID NO: 2381357 - RNA, 16 nt, Human
gaggcccucgggccca

SEQ ID NO: 2381358 - RNA, 17 nt, Human
gaggcccucuggagugg

SEQ ID NO: 2381359 - RNA, 21 nt, Human
gaggcccucgggcccagcccc

SEQ ID NO: 2381360 - RNA, 19 nt, Human
gaggcccucuggaguggcc

SEQ ID NO: 2381361 - RNA, 17 nt, Human
gaggcccucgggcccag

SEQ ID NO: 2381362 - RNA, 18 nt, Human
gaggcccucgggcccagc

SEQ ID NO: 2381363 - RNA, 19 nt, Human
gaggcccucgggcccagcc

SEQ ID NO: 2381364 - RNA, 20 nt, Human
gaggcccucgggcccagccc

SEQ ID NO: 2381365 - RNA, 19 nt, Human
gaggccgggugcucagggc

SEQ ID NO: 2381366 - RNA, 16 nt, Human
gaggccggggccgggu

SEQ ID NO: 2381367 - RNA, 15 nt, Human
gaggccgcuagaggc

SEQ ID NO: 2381368 - RNA, 20 nt, Human
gaggccgcuagaggccugag

SEQ ID NO: 2381369 - RNA, 22 nt, Human
gaggccgcuagaggccugagga

SEQ ID NO: 2381370 - RNA, 20 nt, Human
gaggccugagcgcuccugcc

SEQ ID NO: 2381371 - RNA, 13 nt, Human
gaggccugaggau

SEQ ID NO: 2381372 - RNA, 20 nt, Human
gaggccugaggaugagcugg

SEQ ID NO: 2381373 - RNA, 21 nt, Human
gaggccugaggaugagcugga

SEQ ID NO: 2381374 - RNA, 22 nt, Human
gaggccugaggaugagcuggaa

SEQ ID NO: 2381375 - RNA, 21 nt, Human
gaggccugccuccagggcugg

SEQ ID NO: 2381376 - RNA, 22 nt, Human
gaggccugccuccagggcugga

SEQ ID NO: 2381377 - RNA, 13 nt, Human
gaggccuggacuu

SEQ ID NO: 2381378 - RNA, 18 nt, Human
gaggccuggacuuuccug

SEQ ID NO: 2381379 - RNA, 19 nt, Human
gaggccugccuccagggcu

SEQ ID NO: 2381380 - RNA, 20 nt, Human
gaggccugccuccagggcug

SEQ ID NO: 2381381 - RNA, 12 nt, Human
gaggccugcccg

SEQ ID NO: 2381382 - RNA, 13 nt, Human
gaggccugcccgg

SEQ ID NO: 2381383 - RNA, 16 nt, Human
gaggccugcccgggcg

SEQ ID NO: 2381384 - RNA, 20 nt, Human
gaggccugcccucagggauc

SEQ ID NO: 2381385 - RNA, 24 nt, Human
gaggcccuucucuccagccccugg

SEQ ID NO: 2381386 - RNA, 14 nt, Human
gaggcccuucucuc

SEQ ID NO: 2381387 - RNA, 23 nt, Human
gaggcccuucucuccagccccug

SEQ ID NO: 2381388 - RNA, 18 nt, Human
gaggccuuaucauucauu

SEQ ID NO: 2381389 - RNA, 21 nt, Human
gaggccugggccgcugccacg

SEQ ID NO: 2381390 - RNA, 22 nt, Human
gaggccugggccgcugccacgu

SEQ ID NO: 2381391 - RNA, 17 nt, Human
gaggccuggccaggcac

SEQ ID NO: 2381392 - RNA, 19 nt, Human
gaggccuggacuuuccugc

SEQ ID NO: 2381393 - RNA, 20 nt, Human
gaggccuggacuuuccugca

SEQ ID NO: 2381394 - RNA, 23 nt, Human
gaggccugcccucagggaucuug

SEQ ID NO: 2381395 - RNA, 18 nt, Human
gaggccuggaguaacaca

SEQ ID NO: 2381396 - RNA, 13 nt, Human
gaggccuggccag

SEQ ID NO: 2381397 - RNA, 14 nt, Human
gaggccuggccagg

SEQ ID NO: 2381398 - RNA, 14 nt, Human
gaggccugggccgc

SEQ ID NO: 2381399 - RNA, 15 nt, Human
gaggccuggccaggc

SEQ ID NO: 2381400 - RNA, 16 nt, Human
gaggccuggccaggca

SEQ ID NO: 2381401 - RNA, 16 nt, Human
gaggccugggccgcug

SEQ ID NO: 2381402 - RNA, 20 nt, Human
gaggccugggccgcugccac

SEQ ID NO: 2381403 - RNA, 15 nt, Human
gaggcgggagaauca

SEQ ID NO: 2381404 - RNA, 20 nt, Human
gaggcgggagaaucauguga

SEQ ID NO: 2381405 - RNA, 13 nt, Human
gaggcgggccagc

SEQ ID NO: 2381406 - RNA, 14 nt, Human
gaggcgggccagcc

SEQ ID NO: 2381407 - RNA, 19 nt, Human
gaggcggguggaucaccug

SEQ ID NO: 2381408 - RNA, 12 nt, Human
gaggcgggugga

SEQ ID NO: 2381409 - RNA, 15 nt, Human
gaggcgggccagcca

SEQ ID NO: 2381410 - RNA, 16 nt, Human
gaggcgggccagccag

SEQ ID NO: 2381411 - RNA, 17 nt, Human
gaggcgggccagccagg

SEQ ID NO: 2381412 - RNA, 19 nt, Human
gaggcgggccagccaggcg

SEQ ID NO: 2381413 - RNA, 20 nt, Human
gaggcggagcuugcagugag

SEQ ID NO: 2381414 - RNA, 20 nt, Human
gaggccuuaucauucauucu

SEQ ID NO: 2381415 - RNA, 19 nt, Human
gaggcggagaguacaguga

SEQ ID NO: 2381416 - RNA, 19 nt, Human
gaggcggaucuuuggacag

SEQ ID NO: 2381417 - RNA, 14 nt, Human
gaggccuucucuga

SEQ ID NO: 2381418 - RNA, 17 nt, Human
gaggcuguucccaccag

SEQ ID NO: 2381419 - RNA, 15 nt, Human
gaggcugggcucccu

SEQ ID NO: 2381420 - RNA, 22 nt, Human
gaggcuuagcuuugcucugcca

SEQ ID NO: 2381421 - RNA, 16 nt, Human
gaggcuuccagagagu

SEQ ID NO: 2381422 - RNA, 20 nt, Human
gaggcuuccagagaguccuc

SEQ ID NO: 2381423 - RNA, 21 nt, Human
gaggcuuccagagaguccucu

SEQ ID NO: 2381424 - RNA, 22 nt, Human
gaggcuuccagagaguccucug

SEQ ID NO: 2381425 - RNA, 14 nt, Human
gaggcuuccuucau

SEQ ID NO: 2381426 - RNA, 15 nt, Human
gaggcuucuccgcca

SEQ ID NO: 2381427 - RNA, 18 nt, Human
gaggcuucuccgccagcc

SEQ ID NO: 2381428 - RNA, 23 nt, Human
gaggcuuccagagaguccucugg

SEQ ID NO: 2381429 - RNA, 13 nt, Human
gaggcuuccugcg

SEQ ID NO: 2381430 - RNA, 15 nt, Human
gaggcuuccugcguc

SEQ ID NO: 2381431 - RNA, 21 nt, Human
gaggcuuccugcguccuccuc

SEQ ID NO: 2381432 - RNA, 19 nt, Human
gaggcggguggaucacuug

SEQ ID NO: 2381433 - RNA, 20 nt, Human
gaggcgggccagccaggcgg

SEQ ID NO: 2381434 - RNA, 23 nt, Human
gaggcuaaauuacucaggaagaa

SEQ ID NO: 2381435 - RNA, 13 nt, Human
gaggcugggcucc

SEQ ID NO: 2381436 - RNA, 14 nt, Human
gaggcugggcuccc

SEQ ID NO: 2381437 - RNA, 22 nt, Human
cuaugaggaauaauuauuuauu

SEQ ID NO: 2381438 - RNA, 23 nt, Human
cuaugaggaauaauuauuuauuu

SEQ ID NO: 2381439 - RNA, 13 nt, Human
cuaugagggccuu

SEQ ID NO: 2381440 - RNA, 16 nt, Human
cuaucuguuuacagug

SEQ ID NO: 2381441 - RNA, 20 nt, Human
cuaugauaugguaaaaguua

SEQ ID NO: 2381442 - RNA, 17 nt, Human
cuaugagggccuugagu

SEQ ID NO: 2381443 - RNA, 15 nt, Human
cuaugagggccuuga

SEQ ID NO: 2381444 - RNA, 20 nt, Human
cuaugcauaucaguugagcu

SEQ ID NO: 2381445 - RNA, 22 nt, Human
cuaugcacauauggacucugca

SEQ ID NO: 2381446 - RNA, 19 nt, Human
cuaugcauggugccccagg

SEQ ID NO: 2381447 - RNA, 13 nt, Human
cuaugcauggugc

SEQ ID NO: 2381448 - RNA, 23 nt, Human
cuaugcauggugccccaggacca

SEQ ID NO: 2381449 - RNA, 22 nt, Human
cuaugcauggugccccaggacc

SEQ ID NO: 2381450 - RNA, 21 nt, Human
cuaugcauggugccccaggac

SEQ ID NO: 2381451 - RNA, 20 nt, Human
cuaugcauggugccccagga

SEQ ID NO: 2381452 - RNA, 21 nt, Human
cuaugaucccagcacuuuggg

SEQ ID NO: 2381453 - RNA, 23 nt, Human
cuaugauauuuucugugccugaa

SEQ ID NO: 2381454 - RNA, 13 nt, Human
cuaugcacauaug

SEQ ID NO: 2381455 - RNA, 18 nt, Human
cuaugcacauauggacuc

SEQ ID NO: 2381456 - RNA, 20 nt, Human
cuaugcagagguccacaaca

SEQ ID NO: 2381457 - RNA, 20 nt, Human
cuaugcacauauggacucug

SEQ ID NO: 2381458 - RNA, 21 nt, Human
cuaugcacauauggacucugc

SEQ ID NO: 2381459 - RNA, 24 nt, Human
cuauggaugugggguccccaucau

SEQ ID NO: 2381460 - RNA, 11 nt, Human
cuauggaugug

SEQ ID NO: 2381461 - RNA, 18 nt, Human
cuauggaugugggguccc

SEQ ID NO: 2381462 - RNA, 16 nt, Human
cuauggauggcuucua

SEQ ID NO: 2381463 - RNA, 10 nt, Human
cuauggaugu

SEQ ID NO: 2381464 - RNA, 15 nt, Human
cuauggauggcuucu

SEQ ID NO: 2381465 - RNA, 14 nt, Human
cuauggauggcuuc

SEQ ID NO: 2381466 - RNA, 23 nt, Human
cuauggcuggccacugcacagag

SEQ ID NO: 2381467 - RNA, 17 nt, Human
cuauggcuggccacugc

SEQ ID NO: 2381468 - RNA, 13 nt, Human
cuauggccugugg

SEQ ID NO: 2381469 - RNA, 14 nt, Human
cuaugcugccuagg

SEQ ID NO: 2381470 - RNA, 22 nt, Human
cuaugaucccagcacuuuggga

SEQ ID NO: 2381471 - RNA, 21 nt, Human
cuaugcugguaggcuccugcc

SEQ ID NO: 2381472 - RNA, 19 nt, Human
cuaugcugccuaggcugac

SEQ ID NO: 2381473 - RNA, 17 nt, Human
cuauggaagcauauugu

SEQ ID NO: 2381474 - RNA, 19 nt, Human
cuauggacggugcuccagg

SEQ ID NO: 2381475 - RNA, 22 nt, Human
cuauggacggugcuccaggcag

SEQ ID NO: 2381476 - RNA, 23 nt, Human
cuauggacggugcuccaggcagg

SEQ ID NO: 2381477 - RNA, 18 nt, Human
cuaugggacucaaugcac

SEQ ID NO: 2381478 - RNA, 22 nt, Human
cuaugggacucaaugcacugac

SEQ ID NO: 2381479 - RNA, 15 nt, Human
cuaugggagccccag

SEQ ID NO: 2381480 - RNA, 14 nt, Human
cuaugggagcccca

SEQ ID NO: 2381481 - RNA, 13 nt, Human
cuaugggagcccc

SEQ ID NO: 2381482 - RNA, 23 nt, Human
cuaugggacucaaugcacugaca

SEQ ID NO: 2381483 - RNA, 17 nt, Human
cuaugggagccccaggg

SEQ ID NO: 2381484 - RNA, 19 nt, Human
cuaugggggcacugaggac

SEQ ID NO: 2381485 - RNA, 16 nt, Human
cuaugggagccccagg

SEQ ID NO: 2381486 - RNA, 12 nt, Human
cuauggucaucu

SEQ ID NO: 2381487 - RNA, 17 nt, Human
cuauggucgggagacag

SEQ ID NO: 2381488 - RNA, 21 nt, Human
cuauggucgggagacagcauc

SEQ ID NO: 2381489 - RNA, 19 nt, Human
cuauggugagaugcagcug

SEQ ID NO: 2381490 - RNA, 20 nt, Human
cuauggugagaugcagcugg

SEQ ID NO: 2381491 - RNA, 21 nt, Human
cuauggugagaugcagcugga

SEQ ID NO: 2381492 - RNA, 14 nt, Human
cuauggugccaaug

SEQ ID NO: 2381493 - RNA, 15 nt, Human
cuauggugccaaugg

SEQ ID NO: 2381494 - RNA, 21 nt, Human
cuauggugccaauggaaccuc

SEQ ID NO: 2381495 - RNA, 11 nt, Human
cuauucacaac

SEQ ID NO: 2381496 - RNA, 22 nt, Human
cuauucaagguggccaaauuau

SEQ ID NO: 2381497 - RNA, 13 nt, Human
cuauucagacaag

SEQ ID NO: 2381498 - RNA, 23 nt, Human
cuauucaagguggccaaauuauu

SEQ ID NO: 2381499 - RNA, 17 nt, Human
cuauucaguucccagaa

SEQ ID NO: 2381500 - RNA, 23 nt, Human
cuauucaaacagucucaggaaau

SEQ ID NO: 2381501 - RNA, 16 nt, Human
cuauucaaacagucuc

SEQ ID NO: 2381502 - RNA, 18 nt, Human
cuauucaaacagucucag

SEQ ID NO: 2381503 - RNA, 15 nt, Human
cuauuagagaagaga

SEQ ID NO: 2381504 - RNA, 17 nt, Human
cuauuaccaugagaaga

SEQ ID NO: 2381505 - RNA, 22 nt, Human
cuauguaaaugcaucuguccuc

SEQ ID NO: 2381506 - RNA, 18 nt, Human
cuauguaacaaaccugca

SEQ ID NO: 2381507 - RNA, 16 nt, Human
cuauuagccacaaaau

SEQ ID NO: 2381508 - RNA, 23 nt, Human
cuauuacugucugguuuuaacaa

SEQ ID NO: 2381509 - RNA, 14 nt, Human
cuauuagacuguag

SEQ ID NO: 2381510 - RNA, 13 nt, Human
cuauuagccaguc

SEQ ID NO: 2381511 - RNA, 16 nt, Human
cuauuagccaggauca

SEQ ID NO: 2381512 - RNA, 22 nt, Human
cuauuagccaggaucauggugu

SEQ ID NO: 2381513 - RNA, 13 nt, Human
cuauauuguacac

SEQ ID NO: 2381514 - RNA, 19 nt, Human
cuauauguuuguauaauga

SEQ ID NO: 2381515 - RNA, 21 nt, Human
cuauauguacuugucaaagaa

SEQ ID NO: 2381516 - RNA, 18 nt, Human
cuauaugugaauccucuu

SEQ ID NO: 2381517 - RNA, 18 nt, Human
cuauauuguuugcuaagc

SEQ ID NO: 2381518 - RNA, 13 nt, Human
cuauauggcaaga

SEQ ID NO: 2381519 - RNA, 19 nt, Human
cuauauggcaagaaagcug

SEQ ID NO: 2381520 - RNA, 14 nt, Human
cuauauguacuugu

SEQ ID NO: 2381521 - RNA, 21 nt, Human
cuauauguaguauaaagaaaa

SEQ ID NO: 2381522 - RNA, 12 nt, Human
cuauaugugaau

SEQ ID NO: 2381523 - RNA, 15 nt, Human
cuauagcccaggucc

SEQ ID NO: 2381524 - RNA, 17 nt, Human
cuauagccuaggugaca

SEQ ID NO: 2381525 - RNA, 20 nt, Human
cuauaggugcuacaaaaaca

SEQ ID NO: 2381526 - RNA, 22 nt, Human
cuauaggugcuacaaaaacaca

SEQ ID NO: 2381527 - RNA, 21 nt, Human
cuauaggugcuacaaaaacac

SEQ ID NO: 2381528 - RNA, 14 nt, Human
cuauauuguacaca

SEQ ID NO: 2381529 - RNA, 15 nt, Human
cuauauuguacacac

SEQ ID NO: 2381530 - RNA, 16 nt, Human
cuauauuuaacaagau

SEQ ID NO: 2381531 - RNA, 13 nt, Human
cuauauuuagauu

SEQ ID NO: 2381532 - RNA, 15 nt, Human
cuauauuuacaguga

SEQ ID NO: 2381533 - RNA, 16 nt, Human
cuauauuuacagugaa

SEQ ID NO: 2381534 - RNA, 12 nt, Human
cuauauuuacag

SEQ ID NO: 2381535 - RNA, 23 nt, Human
cuauauuuagauuguuaaaauaa

SEQ ID NO: 2381536 - RNA, 22 nt, Human
cuauauuuagauuguuaaaaua

SEQ ID NO: 2381537 - RNA, 22 nt, Human
cuauauuugggccugcuccaga

SEQ ID NO: 2381538 - RNA, 12 nt, Human
cuauauuugggc

SEQ ID NO: 2381539 - RNA, 22 nt, Human
cuaucuggucaaccuccuggac

SEQ ID NO: 2381540 - RNA, 21 nt, Human
cuaucuggucaaccuccugga

SEQ ID NO: 2381541 - RNA, 11 nt, Human
cuaucugucug

SEQ ID NO: 2381542 - RNA, 14 nt, Human
cuaucugucuggug

SEQ ID NO: 2381543 - RNA, 16 nt, Human
cuaucugucugguggc

SEQ ID NO: 2381544 - RNA, 17 nt, Human
cuaucugucugguggcc

SEQ ID NO: 2381545 - RNA, 18 nt, Human
cuaucugucugguggccc

SEQ ID NO: 2381546 - RNA, 21 nt, Human
cuaucugucugguggccccgu

SEQ ID NO: 2381547 - RNA, 14 nt, Human
cuaucuguguuuug

SEQ ID NO: 2381548 - RNA, 15 nt, Human
cuauacaacuggaca

SEQ ID NO: 2381549 - RNA, 15 nt, Human
cuauacauaucuuua

SEQ ID NO: 2381550 - RNA, 14 nt, Human
cuauacauaucuuu

SEQ ID NO: 2381551 - RNA, 22 nt, Human
cuauacauaucuuuauuaauca

SEQ ID NO: 2381552 - RNA, 20 nt, Human
cuauacauaucuuuauuaau

SEQ ID NO: 2381553 - RNA, 17 nt, Human
cuauacauaucuuuauu

SEQ ID NO: 2381554 - RNA, 12 nt, Human
cuauagacucua

SEQ ID NO: 2381555 - RNA, 19 nt, Human
cuauagacccgaggaaacu

SEQ ID NO: 2381556 - RNA, 10 nt, Human
cuauagcacc

SEQ ID NO: 2381557 - RNA, 21 nt, Human
cuauaauguaagcucuacuga

SEQ ID NO: 2381558 - RNA, 15 nt, Human
cuauaaugaagcuuu

SEQ ID NO: 2381559 - RNA, 19 nt, Human
cuauaaugaagcuuuauac

SEQ ID NO: 2381560 - RNA, 22 nt, Human
cuauaauuuaccugaagucuuu

SEQ ID NO: 2381561 - RNA, 16 nt, Human
cuauaauguaagcucu

SEQ ID NO: 2381562 - RNA, 12 nt, Human
cuauaaugaagc

SEQ ID NO: 2381563 - RNA, 22 nt, Human
cuaguggggucucccucuccug

SEQ ID NO: 2381564 - RNA, 21 nt, Human
cuaguggggucucccucuccu

SEQ ID NO: 2381565 - RNA, 20 nt, Human
cuaguggggucucccucucc

SEQ ID NO: 2381566 - RNA, 19 nt, Human
cuaguggggucucccucuc

SEQ ID NO: 2381567 - RNA, 18 nt, Human
cuaguggggucucccucu

SEQ ID NO: 2381568 - RNA, 17 nt, Human
cuaguggggucucccuc

SEQ ID NO: 2381569 - RNA, 15 nt, Human
cuaguggcuucaaaa

SEQ ID NO: 2381570 - RNA, 19 nt, Human
cuauaaucccagcacuuug

SEQ ID NO: 2381571 - RNA, 13 nt, Human
cuagugcagcuga

SEQ ID NO: 2381572 - RNA, 13 nt, Human
cuagugcuuuccu

SEQ ID NO: 2381573 - RNA, 22 nt, Human
cuagugcugugaaaaaaaaaau

SEQ ID NO: 2381574 - RNA, 22 nt, Human
cuagugcuuuccuuuuuuaaaa

SEQ ID NO: 2381575 - RNA, 21 nt, Human
cuagugcuuuccuuuuuuaaa

SEQ ID NO: 2381576 - RNA, 23 nt, Human
cuagugcuuuccuuuuuuaaaaa

SEQ ID NO: 2381577 - RNA, 14 nt, Human
cuaguggcugucca

SEQ ID NO: 2381578 - RNA, 15 nt, Human
cuaguggcuguccag

SEQ ID NO: 2381579 - RNA, 16 nt, Human
cuaguggcuguccagu

SEQ ID NO: 2381580 - RNA, 17 nt, Human
cuaguggcuguccagug

SEQ ID NO: 2381581 - RNA, 18 nt, Human
cuaguggcuguccagugc

SEQ ID NO: 2381582 - RNA, 19 nt, Human
cuaguggcuguccagugcc

SEQ ID NO: 2381583 - RNA, 20 nt, Human
cuaguggcuguccagugccc

SEQ ID NO: 2381584 - RNA, 22 nt, Human
cuaguggcuguccagugcccau

SEQ ID NO: 2381585 - RNA, 13 nt, Human
cuagugcaaauca

SEQ ID NO: 2381586 - RNA, 19 nt, Human
cuagugacuugugucccau

SEQ ID NO: 2381587 - RNA, 20 nt, Human
cuagugacuugugucccaug

SEQ ID NO: 2381588 - RNA, 16 nt, Human
cuagugcaaaucauag

SEQ ID NO: 2381589 - RNA, 13 nt, Human
cuagugcugugaa

SEQ ID NO: 2381590 - RNA, 17 nt, Human
cuagugcugugaaaaaa

SEQ ID NO: 2381591 - RNA, 14 nt, Human
cuagugcugugaaa

SEQ ID NO: 2381592 - RNA, 16 nt, Human
cuaguaaaaauacaaa

SEQ ID NO: 2381593 - RNA, 20 nt, Human
cuagguuuaacucagaucac

SEQ ID NO: 2381594 - RNA, 22 nt, Human
cuagguuuaacucagaucacua

SEQ ID NO: 2381595 - RNA, 17 nt, Human
cuaguaagugccuucca

SEQ ID NO: 2381596 - RNA, 18 nt, Human
cuaguaagugccuuccau

SEQ ID NO: 2381597 - RNA, 15 nt, Human
cuaguaagugccuuc

SEQ ID NO: 2381598 - RNA, 16 nt, Human
cuaguaagugccuucc

SEQ ID NO: 2381599 - RNA, 13 nt, Human
cuagguucuaaaa

SEQ ID NO: 2381600 - RNA, 12 nt, Human
cuagguuuaacu

SEQ ID NO: 2381601 - RNA, 14 nt, Human
cuagguuuaacuca

SEQ ID NO: 2381602 - RNA, 15 nt, Human
cuagguuuaacucag

SEQ ID NO: 2381603 - RNA, 16 nt, Human
cuagguuuaacucaga

SEQ ID NO: 2381604 - RNA, 18 nt, Human
cuagguuuaacucagauc

SEQ ID NO: 2381605 - RNA, 19 nt, Human
cuagguuuaacucagauca

SEQ ID NO: 2381606 - RNA, 16 nt, Human
cuagucagagagagug

SEQ ID NO: 2381607 - RNA, 13 nt, Human
cuagucagagaga

SEQ ID NO: 2381608 - RNA, 23 nt, Human
cuagucaagcuccuccucccugc

SEQ ID NO: 2381609 - RNA, 22 nt, Human
cuagucaagcuccuccucccug

SEQ ID NO: 2381610 - RNA, 19 nt, Human
cuagucaagcuccuccucc

SEQ ID NO: 2381611 - RNA, 16 nt, Human
cuagucaagcuccucc

SEQ ID NO: 2381612 - RNA, 15 nt, Human
cuagucaagcuccuc

SEQ ID NO: 2381613 - RNA, 16 nt, Human
cuaguacuaacuccua

SEQ ID NO: 2381614 - RNA, 16 nt, Human
cuaguaauuggaaagg

SEQ ID NO: 2381615 - RNA, 14 nt, Human
cuagucccuucccc

SEQ ID NO: 2381616 - RNA, 14 nt, Human
cuaguccagugacc

SEQ ID NO: 2381617 - RNA, 15 nt, Human
cuagucccuuccaca

SEQ ID NO: 2381618 - RNA, 18 nt, Human
cuagucagagagaguguu

SEQ ID NO: 2381619 - RNA, 13 nt, Human
cuagucauaaccu

SEQ ID NO: 2381620 - RNA, 20 nt, Human
cuagugaaacucguuaauuu

SEQ ID NO: 2381621 - RNA, 19 nt, Human
cuagugaaagaggcagcuu

SEQ ID NO: 2381622 - RNA, 18 nt, Human
cuagugaaagaggcagcu

SEQ ID NO: 2381623 - RNA, 17 nt, Human
cuagucccuuccccucc

SEQ ID NO: 2381624 - RNA, 15 nt, Human
cuagucccuuccccu

SEQ ID NO: 2381625 - RNA, 17 nt, Human
cuagugaaggcuucucu

SEQ ID NO: 2381626 - RNA, 20 nt, Human
cuagucccuuccacaccccc

SEQ ID NO: 2381627 - RNA, 21 nt, Human
cuagugaaggcuucucucugu

SEQ ID NO: 2381628 - RNA, 14 nt, Human
cuagugaaugaauc

SEQ ID NO: 2381629 - RNA, 21 nt, Human
cuagugagcagucaggaaaga

SEQ ID NO: 2381630 - RNA, 18 nt, Human
cuagugacuuguguccca

SEQ ID NO: 2381631 - RNA, 14 nt, Human
cuagugacccggag

SEQ ID NO: 2381632 - RNA, 18 nt, Human
cuagugacccggaggcca

SEQ ID NO: 2381633 - RNA, 11 nt, Human
cgccagggccc

SEQ ID NO: 2381634 - RNA, 17 nt, Human
cgccaucccagccccaa

SEQ ID NO: 2381635 - RNA, 22 nt, Human
cgcccaguuggguggaugccug

SEQ ID NO: 2381636 - RNA, 15 nt, Human
cgccaugcuccuggc

SEQ ID NO: 2381637 - RNA, 20 nt, Human
cgccaucccagccccaauga

SEQ ID NO: 2381638 - RNA, 13 nt, Human
cgccccacccaga

SEQ ID NO: 2381639 - RNA, 19 nt, Human
cgccccagauaccagcccc

SEQ ID NO: 2381640 - RNA, 20 nt, Human
cgccccagauaccagccccu

SEQ ID NO: 2381641 - RNA, 21 nt, Human
cgccccagaucaccagcccgg

SEQ ID NO: 2381642 - RNA, 22 nt, Human
cuagguaaauuacaguuccuag

SEQ ID NO: 2381643 - RNA, 13 nt, Human
cgcccauguguga

SEQ ID NO: 2381644 - RNA, 12 nt, Human
cgccccacccag

SEQ ID NO: 2381645 - RNA, 23 nt, Human
cgcccaguuggguggaugccugg

SEQ ID NO: 2381646 - RNA, 14 nt, Human
cuaggugacagagu

SEQ ID NO: 2381647 - RNA, 18 nt, Human
cuaggugacagagugaga

SEQ ID NO: 2381648 - RNA, 17 nt, Human
cuaggucagcuugcugc

SEQ ID NO: 2381649 - RNA, 15 nt, Human
cuagguaggguuuaa

SEQ ID NO: 2381650 - RNA, 14 nt, Human
cuagguacuucagg

SEQ ID NO: 2381651 - RNA, 23 nt, Human
cuaggugggccagccccucccac

SEQ ID NO: 2381652 - RNA, 21 nt, Human
cuaggugggccagccccuccc

SEQ ID NO: 2381653 - RNA, 19 nt, Human
cuaggugggccagccccuc

SEQ ID NO: 2381654 - RNA, 18 nt, Human
cuaggugggccagccccu

SEQ ID NO: 2381655 - RNA, 17 nt, Human
cuaggugggccagcccc

SEQ ID NO: 2381656 - RNA, 15 nt, Human
cuaggugggccagcc

SEQ ID NO: 2381657 - RNA, 13 nt, Human
cuaggugggccag

SEQ ID NO: 2381658 - RNA, 23 nt, Human
cuagguggcaaggcugugcuccc

SEQ ID NO: 2381659 - RNA, 18 nt, Human
cuaggugcccuuggaggc

SEQ ID NO: 2381660 - RNA, 22 nt, Human
cuaggugcccuuggaggccagc

SEQ ID NO: 2381661 - RNA, 17 nt, Human
cuagguggcaaggcugu

SEQ ID NO: 2381662 - RNA, 19 nt, Human
cuagguggcaaggcugugc

SEQ ID NO: 2381663 - RNA, 24 nt, Human
cuaggugacagagugagacucugu

SEQ ID NO: 2381664 - RNA, 12 nt, Human
cuaggucugaua

SEQ ID NO: 2381665 - RNA, 23 nt, Human
cuaggucucggacuaagccuacc

SEQ ID NO: 2381666 - RNA, 19 nt, Human
cucacccccagcuuugcua

SEQ ID NO: 2381667 - RNA, 23 nt, Human
cucacuauguugcccaggcaggu

SEQ ID NO: 2381668 - RNA, 21 nt, Human
cucacuauguugcccaggcag

SEQ ID NO: 2381669 - RNA, 22 nt, Human
cucacuauguugcccaggcagg

SEQ ID NO: 2381670 - RNA, 21 nt, Human
cucacucccuucccauaagcu

SEQ ID NO: 2381671 - RNA, 15 nt, Human
cucacucccuuccca

SEQ ID NO: 2381672 - RNA, 15 nt, Human
cucacucccagucca

SEQ ID NO: 2381673 - RNA, 13 nt, Human
cucacuccuaccu

SEQ ID NO: 2381674 - RNA, 15 nt, Human
cucacuccuaccugg

SEQ ID NO: 2381675 - RNA, 20 nt, Human
cucacuccaccacccaaaag

SEQ ID NO: 2381676 - RNA, 17 nt, Human
cucacuccaccacccaa

SEQ ID NO: 2381677 - RNA, 16 nt, Human
cucacuccaccaccca

SEQ ID NO: 2381678 - RNA, 14 nt, Human
cucacuccaccacc

SEQ ID NO: 2381679 - RNA, 12 nt, Human
cucacuccacca

SEQ ID NO: 2381680 - RNA, 13 nt, Human
cucaccccauccc

SEQ ID NO: 2381681 - RNA, 12 nt, Human
cucaccccaucc

SEQ ID NO: 2381682 - RNA, 22 nt, Human
cucacccacuuuggccuccguu

SEQ ID NO: 2381683 - RNA, 15 nt, Human
cucaccccagcccca

SEQ ID NO: 2381684 - RNA, 14 nt, Human
cucaccauguaaaa

SEQ ID NO: 2381685 - RNA, 14 nt, Human
cucaccaucugugc

SEQ ID NO: 2381686 - RNA, 23 nt, Human
cucaccaggggcaggcacagcac

SEQ ID NO: 2381687 - RNA, 20 nt, Human
cucaccaguguccccuccac

SEQ ID NO: 2381688 - RNA, 23 nt, Human
cucaccaguguccccuccacugu

SEQ ID NO: 2381689 - RNA, 24 nt, Human
cucaccaguguccccuccacuguc

SEQ ID NO: 2381690 - RNA, 17 nt, Human
cucacccccaaggggca

SEQ ID NO: 2381691 - RNA, 22 nt, Human
cucaccccaucccacacccugg

SEQ ID NO: 2381692 - RNA, 21 nt, Human
cucaccccaucccacacccug

SEQ ID NO: 2381693 - RNA, 19 nt, Human
cucaccccaucccacaccc

SEQ ID NO: 2381694 - RNA, 22 nt, Human
cucacccccaaggggcagucug

SEQ ID NO: 2381695 - RNA, 21 nt, Human
cucacccccaaggggcagucu

SEQ ID NO: 2381696 - RNA, 14 nt, Human
cucacccccagcuu

SEQ ID NO: 2381697 - RNA, 18 nt, Human
cucacccccagcuuugcu

SEQ ID NO: 2381698 - RNA, 17 nt, Human
cucacccccagcuuugc

SEQ ID NO: 2381699 - RNA, 19 nt, Human
cucacuauguugcccaggc

SEQ ID NO: 2381700 - RNA, 20 nt, Human
cucacuauguugcccaggca

SEQ ID NO: 2381701 - RNA, 16 nt, Human
cucacuccuaccuggu

SEQ ID NO: 2381702 - RNA, 17 nt, Human
cucacuccuaccuggua

SEQ ID NO: 2381703 - RNA, 12 nt, Human
cucacuccugag

SEQ ID NO: 2381704 - RNA, 22 nt, Human
cucacucccuucuaccugccac

SEQ ID NO: 2381705 - RNA, 23 nt, Human
cucacucccuucuaccugccacu

SEQ ID NO: 2381706 - RNA, 19 nt, Human
cucacuccuaccugguaau

SEQ ID NO: 2381707 - RNA, 13 nt, Human
cucacuccuugaa

SEQ ID NO: 2381708 - RNA, 12 nt, Human
cucacuccuguu

SEQ ID NO: 2381709 - RNA, 20 nt, Human
cucacuccuguuacuuaccu

SEQ ID NO: 2381710 - RNA, 14 nt, Human
cucacuccugagac

SEQ ID NO: 2381711 - RNA, 20 nt, Human
cucacuccugagaccccugg

SEQ ID NO: 2381712 - RNA, 22 nt, Human
cucacuccugagaccccuggcc

SEQ ID NO: 2381713 - RNA, 11 nt, Human
cucacuccugu

SEQ ID NO: 2381714 - RNA, 11 nt, Human
cucacucuguc

SEQ ID NO: 2381715 - RNA, 12 nt, Human
cucacucugucg

SEQ ID NO: 2381716 - RNA, 14 nt, Human
cucacucuggccuc

SEQ ID NO: 2381717 - RNA, 22 nt, Human
cucacucugucgcccagucugg

SEQ ID NO: 2381718 - RNA, 14 nt, Human
cucacucuugccaa

SEQ ID NO: 2381719 - RNA, 15 nt, Human
cucacucuggccuca

SEQ ID NO: 2381720 - RNA, 16 nt, Human
cucacucuugccaacc

SEQ ID NO: 2381721 - RNA, 13 nt, Human
cucacugaaaaca

SEQ ID NO: 2381722 - RNA, 17 nt, Human
cucacugaaaacaucug

SEQ ID NO: 2381723 - RNA, 18 nt, Human
cucacugaaaacaucugg

SEQ ID NO: 2381724 - RNA, 19 nt, Human
cucacugaaaacaucugga

SEQ ID NO: 2381725 - RNA, 13 nt, Human
cucacucugucgc

SEQ ID NO: 2381726 - RNA, 21 nt, Human
cucacucugucgcccagucug

SEQ ID NO: 2381727 - RNA, 12 nt, Human
cucacugcagcc

SEQ ID NO: 2381728 - RNA, 14 nt, Human
cucacugaaaccag

SEQ ID NO: 2381729 - RNA, 21 nt, Human
cucacugaaaacaucuggaag

SEQ ID NO: 2381730 - RNA, 22 nt, Human
cucacugagaagauugugaaua

SEQ ID NO: 2381731 - RNA, 13 nt, Human
cucacugcagccu

SEQ ID NO: 2381732 - RNA, 17 nt, Human
cucacugcaaccuccgc

SEQ ID NO: 2381733 - RNA, 13 nt, Human
cucacugccaggc

SEQ ID NO: 2381734 - RNA, 13 nt, Human
cucagagugcaag

SEQ ID NO: 2381735 - RNA, 17 nt, Human
cucagagucggaacgga

SEQ ID NO: 2381736 - RNA, 18 nt, Human
cucagaguccaggcccca

SEQ ID NO: 2381737 - RNA, 15 nt, Human
cucagaguccaggcc

SEQ ID NO: 2381738 - RNA, 18 nt, Human
cucagagucggaacggag

SEQ ID NO: 2381739 - RNA, 14 nt, Human
cucagauauuuaua

SEQ ID NO: 2381740 - RNA, 14 nt, Human
cucagagagggugg

SEQ ID NO: 2381741 - RNA, 15 nt, Human
cucagagagcaccau

SEQ ID NO: 2381742 - RNA, 13 nt, Human
cucagagagggca

SEQ ID NO: 2381743 - RNA, 15 nt, Human
cucagagagggcagg

SEQ ID NO: 2381744 - RNA, 23 nt, Human
cucagagagggcaggcaugaagu

SEQ ID NO: 2381745 - RNA, 17 nt, Human
cucagauauuuauauuu

SEQ ID NO: 2381746 - RNA, 17 nt, Human
cucagaucacuacugca

SEQ ID NO: 2381747 - RNA, 18 nt, Human
cucagaucacuacugcag

SEQ ID NO: 2381748 - RNA, 17 nt, Human
cucagaucaguguacca

SEQ ID NO: 2381749 - RNA, 20 nt, Human
cucagaucacuacugcaguc

SEQ ID NO: 2381750 - RNA, 14 nt, Human
cucagauccaggga

SEQ ID NO: 2381751 - RNA, 13 nt, Human
cucagauccaggg

SEQ ID NO: 2381752 - RNA, 10 nt, Human
cucagaucca

SEQ ID NO: 2381753 - RNA, 21 nt, Human
cucagaucaguguaccauuug

SEQ ID NO: 2381754 - RNA, 15 nt, Human
cucagauccuuguuu

SEQ ID NO: 2381755 - RNA, 22 nt, Human
cucagauccagggacagaggcc

SEQ ID NO: 2381756 - RNA, 20 nt, Human
cucagauccagggacagagg

SEQ ID NO: 2381757 - RNA, 18 nt, Human
cucagauccagggacaga

SEQ ID NO: 2381758 - RNA, 17 nt, Human
cucagauccagggacag

SEQ ID NO: 2381759 - RNA, 16 nt, Human
cucagauccagggaca

SEQ ID NO: 2381760 - RNA, 15 nt, Human
cucagauccagggac

SEQ ID NO: 2381761 - RNA, 21 nt, Human
cucacuguugcccaggcuggc

SEQ ID NO: 2381762 - RNA, 22 nt, Human
cucacuguugcccaggcuggcg

SEQ ID NO: 2381763 - RNA, 17 nt, Human
cucagacuuuggaaaau

SEQ ID NO: 2381764 - RNA, 23 nt, Human
cucagagaauuucuaccauuuca

SEQ ID NO: 2381765 - RNA, 22 nt, Human
cucacugccaggccagccuccg

SEQ ID NO: 2381766 - RNA, 22 nt, Human
cucagacuuuggaaaaugcauu

SEQ ID NO: 2381767 - RNA, 22 nt, Human
cucacugccaugccagcuuauc

SEQ ID NO: 2381768 - RNA, 19 nt, Human
cucacugccaugccagcuu

SEQ ID NO: 2381769 - RNA, 20 nt, Human
cucacuguugcccaggcugg

SEQ ID NO: 2381770 - RNA, 14 nt, Human
cucacugccaggcc

SEQ ID NO: 2381771 - RNA, 15 nt, Human
cucacugccaggcca

SEQ ID NO: 2381772 - RNA, 18 nt, Human
cucacugccaggccagcc

SEQ ID NO: 2381773 - RNA, 19 nt, Human
cucacugccaggccagccu

SEQ ID NO: 2381774 - RNA, 20 nt, Human
cucacugccaggccagccuc

SEQ ID NO: 2381775 - RNA, 21 nt, Human
cucacugccaggccagccucc

SEQ ID NO: 2381776 - RNA, 20 nt, Human
cucagcacaaggccaucugg

SEQ ID NO: 2381777 - RNA, 14 nt, Human
cucagcacaaggcc

SEQ ID NO: 2381778 - RNA, 15 nt, Human
cucagaucuucugug

SEQ ID NO: 2381779 - RNA, 17 nt, Human
cucagauccuuguuuca

SEQ ID NO: 2381780 - RNA, 19 nt, Human
cucagauccuuguuucaaa

SEQ ID NO: 2381781 - RNA, 15 nt, Human
cucagaucugucuga

SEQ ID NO: 2381782 - RNA, 17 nt, Human
cucagauuauuuuuccu

SEQ ID NO: 2381783 - RNA, 18 nt, Human
cucagaucugucugauag

SEQ ID NO: 2381784 - RNA, 19 nt, Human
cucagcagcccuccucacc

SEQ ID NO: 2381785 - RNA, 18 nt, Human
cucagcagcgaccacccc

SEQ ID NO: 2381786 - RNA, 19 nt, Human
cucagcagcgaccaccccu

SEQ ID NO: 2381787 - RNA, 20 nt, Human
cucagcagcgaccaccccug

SEQ ID NO: 2381788 - RNA, 21 nt, Human
cucagcagcccuccucacccc

SEQ ID NO: 2381789 - RNA, 18 nt, Human
cucagcagcccuccucac

SEQ ID NO: 2381790 - RNA, 17 nt, Human
cucagcagcccuccuca

SEQ ID NO: 2381791 - RNA, 16 nt, Human
cucagcagcccuccuc

SEQ ID NO: 2381792 - RNA, 15 nt, Human
cucagcagcccuccu

SEQ ID NO: 2381793 - RNA, 14 nt, Human
cucagcagcccucc

SEQ ID NO: 2381794 - RNA, 13 nt, Human
cucagcagcccuc

SEQ ID NO: 2381795 - RNA, 12 nt, Human
cucagcagcccu

SEQ ID NO: 2381796 - RNA, 16 nt, Human
cucagcauccuggcac

SEQ ID NO: 2381797 - RNA, 17 nt, Human
cucagcauccuggcacc

SEQ ID NO: 2381798 - RNA, 12 nt, Human
cucagcacuugg

SEQ ID NO: 2381799 - RNA, 12 nt, Human
cucagcaccccu

SEQ ID NO: 2381800 - RNA, 13 nt, Human
cucagcaccccuu

SEQ ID NO: 2381801 - RNA, 15 nt, Human
cucagcaccccuucc

SEQ ID NO: 2381802 - RNA, 16 nt, Human
cucagcaccccuucca

SEQ ID NO: 2381803 - RNA, 17 nt, Human
cucagcaccccuuccau

SEQ ID NO: 2381804 - RNA, 20 nt, Human
cucagcaccccuuccaugug

SEQ ID NO: 2381805 - RNA, 21 nt, Human
cucagcaccccuuccaugugg

SEQ ID NO: 2381806 - RNA, 19 nt, Human
cucaaaugcucagaccagc

SEQ ID NO: 2381807 - RNA, 15 nt, Human
cucaacaaagcacag

SEQ ID NO: 2381808 - RNA, 19 nt, Human
cucaacaaagcacaguguu

SEQ ID NO: 2381809 - RNA, 15 nt, Human
cucaacaagggagag

SEQ ID NO: 2381810 - RNA, 19 nt, Human
cucaacaagggagagaccu

SEQ ID NO: 2381811 - RNA, 22 nt, Human
cucaacaagggagagaccucau

SEQ ID NO: 2381812 - RNA, 21 nt, Human
cucaacaccucugcacaagcu

SEQ ID NO: 2381813 - RNA, 23 nt, Human
cucaacaagggagagaccucauc

SEQ ID NO: 2381814 - RNA, 20 nt, Human
cucaacacccaacugucucg

SEQ ID NO: 2381815 - RNA, 13 nt, Human
cucaaccuccugg

SEQ ID NO: 2381816 - RNA, 22 nt, Human
cucaaccuaccaccccuuccug

SEQ ID NO: 2381817 - RNA, 15 nt, Human
cucaaccuccugggc

SEQ ID NO: 2381818 - RNA, 17 nt, Human
cucaaccuccugggcua

SEQ ID NO: 2381819 - RNA, 16 nt, Human
cucaaaugcucagacc

SEQ ID NO: 2381820 - RNA, 21 nt, Human
cucaaaucuuuuagucauuau

SEQ ID NO: 2381821 - RNA, 17 nt, Human
cucaaaugacccaaaga

SEQ ID NO: 2381822 - RNA, 22 nt, Human
cucaaaucuauucagacaagca

SEQ ID NO: 2381823 - RNA, 15 nt, Human
cucaaaucuauucag

SEQ ID NO: 2381824 - RNA, 16 nt, Human
cucaaaucuauucaga

SEQ ID NO: 2381825 - RNA, 13 nt, Human
cucaaaucuauuc

SEQ ID NO: 2381826 - RNA, 19 nt, Human
cucaaaucguccagcgacc

SEQ ID NO: 2381827 - RNA, 12 nt, Human
cuauuucuaguu

SEQ ID NO: 2381828 - RNA, 21 nt, Human
cuauuuccccaggggaaaaug

SEQ ID NO: 2381829 - RNA, 22 nt, Human
cuauuuccccaggggaaaauga

SEQ ID NO: 2381830 - RNA, 23 nt, Human
cuauuuccccaggggaaaaugaa

SEQ ID NO: 2381831 - RNA, 14 nt, Human
cuauuuccauucca

SEQ ID NO: 2381832 - RNA, 17 nt, Human
cuauuuccauuccagaa

SEQ ID NO: 2381833 - RNA, 16 nt, Human
cuauuucagugccaau

SEQ ID NO: 2381834 - RNA, 15 nt, Human
cuauucucaccagga

SEQ ID NO: 2381835 - RNA, 14 nt, Human
cuauucuauugcag

SEQ ID NO: 2381836 - RNA, 17 nt, Human
cuauuccccagcagggu

SEQ ID NO: 2381837 - RNA, 14 nt, Human
cuauuccuccuggg

SEQ ID NO: 2381838 - RNA, 19 nt, Human
cuauucccacaccuccaca

SEQ ID NO: 2381839 - RNA, 20 nt, Human
cuauucccacaccuccacag

SEQ ID NO: 2381840 - RNA, 22 nt, Human
cuauucccacaccuccacaguu

SEQ ID NO: 2381841 - RNA, 18 nt, Human
cuauucaguucccagaau

SEQ ID NO: 2381842 - RNA, 21 nt, Human
cuauucaguucccagaaucaa

SEQ ID NO: 2381843 - RNA, 14 nt, Human
cuauucuccagcug

SEQ ID NO: 2381844 - RNA, 22 nt, Human
cuauuuaucuguguuuuugaaa

SEQ ID NO: 2381845 - RNA, 19 nt, Human
cuauuuaucuguguuuuug

SEQ ID NO: 2381846 - RNA, 16 nt, Human
cuauuuaucuguguuu

SEQ ID NO: 2381847 - RNA, 21 nt, Human
cuauuuaucuguaguaaacua

SEQ ID NO: 2381848 - RNA, 23 nt, Human
cuauuuagcaugacaagccccag

SEQ ID NO: 2381849 - RNA, 17 nt, Human
cuauuuauauguacaug

SEQ ID NO: 2381850 - RNA, 11 nt, Human
cuauuuaugaa

SEQ ID NO: 2381851 - RNA, 23 nt, Human
cuauuuaguuuuuguaauuuauu

SEQ ID NO: 2381852 - RNA, 22 nt, Human
cuauuuaguuuuuguaauuuau

SEQ ID NO: 2381853 - RNA, 20 nt, Human
cuauuuaguuuuuguaauuu

SEQ ID NO: 2381854 - RNA, 17 nt, Human
cuauuuaguuuuuguaa

SEQ ID NO: 2381855 - RNA, 18 nt, Human
cuauuuagcaugacaagc

SEQ ID NO: 2381856 - RNA, 13 nt, Human
cuauuuagcauga

SEQ ID NO: 2381857 - RNA, 16 nt, Human
cuauuguuacucuggu

SEQ ID NO: 2381858 - RNA, 20 nt, Human
cuauuguuacucugguucuu

SEQ ID NO: 2381859 - RNA, 12 nt, Human
cuauuuaaugga

SEQ ID NO: 2381860 - RNA, 22 nt, Human
cuauuguccccuagcaaggcau

SEQ ID NO: 2381861 - RNA, 13 nt, Human
cuauugugauuug

SEQ ID NO: 2381862 - RNA, 14 nt, Human
cuauugucauuaaa

SEQ ID NO: 2381863 - RNA, 15 nt, Human
cuauugucauuaaag

SEQ ID NO: 2381864 - RNA, 14 nt, Human
cuauugugauuuga

SEQ ID NO: 2381865 - RNA, 17 nt, Human
cuauugugauuugacug

SEQ ID NO: 2381866 - RNA, 18 nt, Human
cuauugugauuugacugu

SEQ ID NO: 2381867 - RNA, 19 nt, Human
cuauugugauuugacuguu

SEQ ID NO: 2381868 - RNA, 11 nt, Human
cuauuuaaugg

SEQ ID NO: 2381869 - RNA, 20 nt, Human
cuauugugauuugacuguuu

SEQ ID NO: 2381870 - RNA, 23 nt, Human
cuauugugauuugacuguuuuua

SEQ ID NO: 2381871 - RNA, 14 nt, Human
cuauuguagagcca

SEQ ID NO: 2381872 - RNA, 16 nt, Human
cuauucucaccaggaa

SEQ ID NO: 2381873 - RNA, 12 nt, Human
cuauuguacaga

SEQ ID NO: 2381874 - RNA, 16 nt, Human
cuauuguagcauuucu

SEQ ID NO: 2381875 - RNA, 19 nt, Human
cuauugucaccagggcugg

SEQ ID NO: 2381876 - RNA, 23 nt, Human
cucacaccaggcuugccugcagg

SEQ ID NO: 2381877 - RNA, 12 nt, Human
cucacacccacc

SEQ ID NO: 2381878 - RNA, 13 nt, Human
cucacacccaccg

SEQ ID NO: 2381879 - RNA, 15 nt, Human
cucacacccaccguc

SEQ ID NO: 2381880 - RNA, 22 nt, Human
cucacacccaccguccgcccug

SEQ ID NO: 2381881 - RNA, 23 nt, Human
cucacacccaccguccgcccugc

SEQ ID NO: 2381882 - RNA, 22 nt, Human
cucacacaugagcaucaggcca

SEQ ID NO: 2381883 - RNA, 24 nt, Human
cucacacaugagcaucaggccagg

SEQ ID NO: 2381884 - RNA, 15 nt, Human
cucacaguccuuacc

SEQ ID NO: 2381885 - RNA, 16 nt, Human
cucacagccucugacc

SEQ ID NO: 2381886 - RNA, 19 nt, Human
cucacagccucugaccccu

SEQ ID NO: 2381887 - RNA, 21 nt, Human
cucacagccucugaccccucc

SEQ ID NO: 2381888 - RNA, 22 nt, Human
cucacagccucugaccccuccu

SEQ ID NO: 2381889 - RNA, 19 nt, Human
cucacaccgcgucugguga

SEQ ID NO: 2381890 - RNA, 11 nt, Human
cucacagccuc

SEQ ID NO: 2381891 - RNA, 12 nt, Human
cucacagccucu

SEQ ID NO: 2381892 - RNA, 13 nt, Human
cucacagccucug

SEQ ID NO: 2381893 - RNA, 14 nt, Human
cucacagccucuga

SEQ ID NO: 2381894 - RNA, 15 nt, Human
cucacagccucugac

SEQ ID NO: 2381895 - RNA, 19 nt, Human
cucaagaagacauggagac

SEQ ID NO: 2381896 - RNA, 23 nt, Human
cucaagaaauaaaaggaagccaa

SEQ ID NO: 2381897 - RNA, 22 nt, Human
cucaagaaauaaaaggaagcca

SEQ ID NO: 2381898 - RNA, 21 nt, Human
cucaagaaauaaaaggaagcc

SEQ ID NO: 2381899 - RNA, 23 nt, Human
cucaaccuaccaccccuuccugu

SEQ ID NO: 2381900 - RNA, 15 nt, Human
cucaagaagcaggcu

SEQ ID NO: 2381901 - RNA, 20 nt, Human
cucaagaagacauggagacu

SEQ ID NO: 2381902 - RNA, 21 nt, Human
cucaagaagacauggagacuc

SEQ ID NO: 2381903 - RNA, 22 nt, Human
cucaagaagacauggagacucc

SEQ ID NO: 2381904 - RNA, 13 nt, Human
cucaagaagcagg

SEQ ID NO: 2381905 - RNA, 14 nt, Human
cucaagaagcaggc

SEQ ID NO: 2381906 - RNA, 23 nt, Human
cucaagaagcaggcuacacugac

SEQ ID NO: 2381907 - RNA, 21 nt, Human
cucaaguccucuuuucugaga

SEQ ID NO: 2381908 - RNA, 18 nt, Human
cucaagucuucccugauc

SEQ ID NO: 2381909 - RNA, 17 nt, Human
cucaagucuucccugau

SEQ ID NO: 2381910 - RNA, 16 nt, Human
cucaagucuucccuga

SEQ ID NO: 2381911 - RNA, 17 nt, Human
cucaagugauucuccug

SEQ ID NO: 2381912 - RNA, 17 nt, Human
cucaccagccccagugc

SEQ ID NO: 2381913 - RNA, 18 nt, Human
cucaccagccccagugcc

SEQ ID NO: 2381914 - RNA, 13 nt, Human
cucaccaggaagg

SEQ ID NO: 2381915 - RNA, 14 nt, Human
cucaccaggggcag

SEQ ID NO: 2381916 - RNA, 13 nt, Human
cucaccaggggca

SEQ ID NO: 2381917 - RNA, 15 nt, Human
cucaccaggggcagg

SEQ ID NO: 2381918 - RNA, 20 nt, Human
cucaccaggggcaggcacag

SEQ ID NO: 2381919 - RNA, 21 nt, Human
cucaccaggggcaggcacagc

SEQ ID NO: 2381920 - RNA, 22 nt, Human
cucaccaggggcaggcacagca

SEQ ID NO: 2381921 - RNA, 13 nt, Human
cucaccagcccca

SEQ ID NO: 2381922 - RNA, 14 nt, Human
cucaccagccccag

SEQ ID NO: 2381923 - RNA, 15 nt, Human
cucaccagccccagu

SEQ ID NO: 2381924 - RNA, 15 nt, Human
cucacauuuauucug

SEQ ID NO: 2381925 - RNA, 19 nt, Human
cucacauuuauucugcuca

SEQ ID NO: 2381926 - RNA, 22 nt, Human
cucacauuuauucugcucacau

SEQ ID NO: 2381927 - RNA, 20 nt, Human
cucaccacuacaucacuuga

SEQ ID NO: 2381928 - RNA, 12 nt, Human
cucacauuuaug

SEQ ID NO: 2381929 - RNA, 17 nt, Human
cucacaguccuuaccag

SEQ ID NO: 2381930 - RNA, 19 nt, Human
cucacaguccuuaccagca

SEQ ID NO: 2381931 - RNA, 22 nt, Human
cucacaguccuuaccagcagag

SEQ ID NO: 2381932 - RNA, 22 nt, Human
cuccaauuaaggauuuuaugcu

SEQ ID NO: 2381933 - RNA, 20 nt, Human
cuccaauuaaggauuuuaug

SEQ ID NO: 2381934 - RNA, 17 nt, Human
cuccaauuaaggauuuu

SEQ ID NO: 2381935 - RNA, 18 nt, Human
cuccacaccauucagguc

SEQ ID NO: 2381936 - RNA, 21 nt, Human
cuccacacacagcugggcugu

SEQ ID NO: 2381937 - RNA, 20 nt, Human
cuccacaccauucaggucuu

SEQ ID NO: 2381938 - RNA, 23 nt, Human
cuccacacacagcugggcugugg

SEQ ID NO: 2381939 - RNA, 17 nt, Human
cuccacacccucuccca

SEQ ID NO: 2381940 - RNA, 13 nt, Human
cuccacauccucc

SEQ ID NO: 2381941 - RNA, 15 nt, Human
cuccaagucucagug

SEQ ID NO: 2381942 - RNA, 22 nt, Human
cuccaaaggaagucuaggagcu

SEQ ID NO: 2381943 - RNA, 14 nt, Human
cuccaaaggccccc

SEQ ID NO: 2381944 - RNA, 16 nt, Human
cuccaagucucagugg

SEQ ID NO: 2381945 - RNA, 17 nt, Human
cuccaagucucaguggc

SEQ ID NO: 2381946 - RNA, 21 nt, Human
cuccaagucucaguggcuuca

SEQ ID NO: 2381947 - RNA, 14 nt, Human
cuccaagugccaga

SEQ ID NO: 2381948 - RNA, 15 nt, Human
cuccaagugccagag

SEQ ID NO: 2381949 - RNA, 16 nt, Human
cuccaagugccagagg

SEQ ID NO: 2381950 - RNA, 18 nt, Human
cuccaagugccagaggug

SEQ ID NO: 2381951 - RNA, 19 nt, Human
cuccaagugccagaggugg

SEQ ID NO: 2381952 - RNA, 20 nt, Human
cuccaagugccagagguggg

SEQ ID NO: 2381953 - RNA, 22 nt, Human
cuccaaucccaccaacccucag

SEQ ID NO: 2381954 - RNA, 21 nt, Human
cuccaagugccagaggugggc

SEQ ID NO: 2381955 - RNA, 22 nt, Human
cuccaagugccagaggugggca

SEQ ID NO: 2381956 - RNA, 16 nt, Human
cuccaauaucagugcu

SEQ ID NO: 2381957 - RNA, 17 nt, Human
cuccaauaucagugcuc

SEQ ID NO: 2381958 - RNA, 21 nt, Human
cuccaaugcuguuaucccugc

SEQ ID NO: 2381959 - RNA, 19 nt, Human
cuccaauaucagugcucga

SEQ ID NO: 2381960 - RNA, 14 nt, Human
cuccaauccugccc

SEQ ID NO: 2381961 - RNA, 15 nt, Human
cuccaauccugcccc

SEQ ID NO: 2381962 - RNA, 16 nt, Human
cuccaauccugccccc

SEQ ID NO: 2381963 - RNA, 13 nt, Human
cuccacccuuggc

SEQ ID NO: 2381964 - RNA, 12 nt, Human
cuccacccuugg

SEQ ID NO: 2381965 - RNA, 20 nt, Human
cuccacccugucccccagcu

SEQ ID NO: 2381966 - RNA, 22 nt, Human
cuccacccugucccccagcucu

SEQ ID NO: 2381967 - RNA, 15 nt, Human
cuccacccuggccga

SEQ ID NO: 2381968 - RNA, 15 nt, Human
cuccaaaggcccccu

SEQ ID NO: 2381969 - RNA, 17 nt, Human
cuccaccaccacuggcc

SEQ ID NO: 2381970 - RNA, 13 nt, Human
cuccacccugucc

SEQ ID NO: 2381971 - RNA, 14 nt, Human
cuccacccuguccc

SEQ ID NO: 2381972 - RNA, 15 nt, Human
cuccacccugucccc

SEQ ID NO: 2381973 - RNA, 17 nt, Human
cuccacccuguccccca

SEQ ID NO: 2381974 - RNA, 18 nt, Human
cuccacccugucccccag

SEQ ID NO: 2381975 - RNA, 13 nt, Human
cuccaccacaucc

SEQ ID NO: 2381976 - RNA, 20 nt, Human
cuccaccaacccaucagaag

SEQ ID NO: 2381977 - RNA, 13 nt, Human
cuccaccaaccca

SEQ ID NO: 2381978 - RNA, 14 nt, Human
cuccacccuggccg

SEQ ID NO: 2381979 - RNA, 12 nt, Human
cuccaccaccac

SEQ ID NO: 2381980 - RNA, 15 nt, Human
cuccaccaccacugg

SEQ ID NO: 2381981 - RNA, 15 nt, Human
cuccacccugcucuc

SEQ ID NO: 2381982 - RNA, 20 nt, Human
cuccacacccucucccagga

SEQ ID NO: 2381983 - RNA, 14 nt, Human
cuccacauccuuuc

SEQ ID NO: 2381984 - RNA, 17 nt, Human
cuccacauccuccacgu

SEQ ID NO: 2381985 - RNA, 15 nt, Human
cuccacauccuccac

SEQ ID NO: 2381986 - RNA, 14 nt, Human
cuccacauccucca

SEQ ID NO: 2381987 - RNA, 22 nt, Human
cuccacauccuuucuaaacaag

SEQ ID NO: 2381988 - RNA, 13 nt, Human
cuccacaucugcc

SEQ ID NO: 2381989 - RNA, 14 nt, Human
cuccacaucugccu

SEQ ID NO: 2381990 - RNA, 15 nt, Human
cuccacaucugccuu

SEQ ID NO: 2381991 - RNA, 17 nt, Human
cuccacaucugccuuaa

SEQ ID NO: 2381992 - RNA, 12 nt, Human
cuccaccaaccc

SEQ ID NO: 2381993 - RNA, 16 nt, Human
cuccacaucugccuua

SEQ ID NO: 2381994 - RNA, 23 nt, Human
cuccaccaagccuggucagccca

SEQ ID NO: 2381995 - RNA, 13 nt, Human
cuccacccugcuc

SEQ ID NO: 2381996 - RNA, 13 nt, Human
cucauuaaaaaaa

SEQ ID NO: 2381997 - RNA, 20 nt, Human
cucauguuuucaacugccaa

SEQ ID NO: 2381998 - RNA, 18 nt, Human
cucauguuuucaacugcc

SEQ ID NO: 2381999 - RNA, 13 nt, Human
cucauguuuucca

SEQ ID NO: 2382000 - RNA, 17 nt, Human
cucauguuuuccauugu

SEQ ID NO: 2382001 - RNA, 13 nt, Human
cucaucugcuggu

SEQ ID NO: 2382002 - RNA, 17 nt, Human
cucaucugcucagcagc

SEQ ID NO: 2382003 - RNA, 17 nt, Human
cucauguuuucaacugc

SEQ ID NO: 2382004 - RNA, 16 nt, Human
cucauguuuucaacug

SEQ ID NO: 2382005 - RNA, 20 nt, Human
cucaucucuuagcuccccuc

SEQ ID NO: 2382006 - RNA, 22 nt, Human
cucaucucuuagcuccccucca

SEQ ID NO: 2382007 - RNA, 15 nt, Human
cucaucucuucuuuu

SEQ ID NO: 2382008 - RNA, 12 nt, Human
cucaucucuucu

SEQ ID NO: 2382009 - RNA, 12 nt, Human
cucaucugcugg

SEQ ID NO: 2382010 - RNA, 15 nt, Human
cucaucucuguccca

SEQ ID NO: 2382011 - RNA, 12 nt, Human
cucaucugcuca

SEQ ID NO: 2382012 - RNA, 16 nt, Human
cucauuaaugacacuu

SEQ ID NO: 2382013 - RNA, 15 nt, Human
cucauuaaugacacu

SEQ ID NO: 2382014 - RNA, 18 nt, Human
cucauguuuuccauuguu

SEQ ID NO: 2382015 - RNA, 21 nt, Human
cucauguuuuccauuguuuga

SEQ ID NO: 2382016 - RNA, 21 nt, Human
cucauuuccaagcaaguauua

SEQ ID NO: 2382017 - RNA, 17 nt, Human
cucauuugucacacacu

SEQ ID NO: 2382018 - RNA, 23 nt, Human
cucauuacuuuaccacccccaca

SEQ ID NO: 2382019 - RNA, 17 nt, Human
cucauuacuuuugaagu

SEQ ID NO: 2382020 - RNA, 20 nt, Human
cucauuugggguagcuagag

SEQ ID NO: 2382021 - RNA, 17 nt, Human
cucauuugggguagcua

SEQ ID NO: 2382022 - RNA, 18 nt, Human
cucauuugucacacacuu

SEQ ID NO: 2382023 - RNA, 20 nt, Human
cucauuuuuuuaauuuauua

SEQ ID NO: 2382024 - RNA, 16 nt, Human
cuccaaaacuccugcc

SEQ ID NO: 2382025 - RNA, 16 nt, Human
cuccaaaauaaaacuu

SEQ ID NO: 2382026 - RNA, 15 nt, Human
cuccaaaauaaaacu

SEQ ID NO: 2382027 - RNA, 15 nt, Human
cuccaaaagcacuua

SEQ ID NO: 2382028 - RNA, 16 nt, Human
cuccaaaagcacuuac

SEQ ID NO: 2382029 - RNA, 23 nt, Human
cuccaaagaggugacugggcccu

SEQ ID NO: 2382030 - RNA, 13 nt, Human
cuccaaagaaaug

SEQ ID NO: 2382031 - RNA, 21 nt, Human
cuccaaacugacucuuaagaa

SEQ ID NO: 2382032 - RNA, 12 nt, Human
cuccaaagaaau

SEQ ID NO: 2382033 - RNA, 20 nt, Human
cuccacguucaccccuccac

SEQ ID NO: 2382034 - RNA, 15 nt, Human
cuccacguucugcuc

SEQ ID NO: 2382035 - RNA, 17 nt, Human
cuccacguucugcucau

SEQ ID NO: 2382036 - RNA, 16 nt, Human
cuccacguucugcuca

SEQ ID NO: 2382037 - RNA, 15 nt, Human
cuccagccccuggau

SEQ ID NO: 2382038 - RNA, 16 nt, Human
cuccacguucaccccu

SEQ ID NO: 2382039 - RNA, 18 nt, Human
cuccacguucaccccucc

SEQ ID NO: 2382040 - RNA, 15 nt, Human
cuccaccuugcgggg

SEQ ID NO: 2382041 - RNA, 13 nt, Human
cuccaccugcucu

SEQ ID NO: 2382042 - RNA, 14 nt, Human
cuccaccugccagg

SEQ ID NO: 2382043 - RNA, 18 nt, Human
cuccaccugcucccaggc

SEQ ID NO: 2382044 - RNA, 22 nt, Human
cuccaccucuucaccccccacu

SEQ ID NO: 2382045 - RNA, 23 nt, Human
cuccacccugucccccagcucug

SEQ ID NO: 2382046 - RNA, 22 nt, Human
cuccaccugcucccaggccagu

SEQ ID NO: 2382047 - RNA, 12 nt, Human
cuccaccugcca

SEQ ID NO: 2382048 - RNA, 13 nt, Human
cuccaccugccag

SEQ ID NO: 2382049 - RNA, 20 nt, Human
cuccagccugggcaacacag

SEQ ID NO: 2382050 - RNA, 14 nt, Human
cuccagccugggca

SEQ ID NO: 2382051 - RNA, 13 nt, Human
cuccagccugggc

SEQ ID NO: 2382052 - RNA, 12 nt, Human
cuccagccuggg

SEQ ID NO: 2382053 - RNA, 14 nt, Human
cuccagcucaccag

SEQ ID NO: 2382054 - RNA, 13 nt, Human
cuccagcuucugg

SEQ ID NO: 2382055 - RNA, 19 nt, Human
cuccagcuucugguacucu

SEQ ID NO: 2382056 - RNA, 20 nt, Human
cuccagcuucugguacucuc

SEQ ID NO: 2382057 - RNA, 21 nt, Human
cuccagcuucugguacucucc

SEQ ID NO: 2382058 - RNA, 22 nt, Human
cuccagcuucugguacucuccu

SEQ ID NO: 2382059 - RNA, 12 nt, Human
cuccagcuugug

SEQ ID NO: 2382060 - RNA, 18 nt, Human
cuccagcuuguggagccc

SEQ ID NO: 2382061 - RNA, 20 nt, Human
cuccagccccuggaugcagc

SEQ ID NO: 2382062 - RNA, 18 nt, Human
cuccacguucugcucauc

SEQ ID NO: 2382063 - RNA, 20 nt, Human
cuccagccuggacccccagc

SEQ ID NO: 2382064 - RNA, 21 nt, Human
cuccagccuggacccccagcu

SEQ ID NO: 2382065 - RNA, 22 nt, Human
cuccagccuggacccccagcuu

SEQ ID NO: 2382066 - RNA, 12 nt, Human
cuccagccuggc

SEQ ID NO: 2382067 - RNA, 13 nt, Human
cuccagccuggcu

SEQ ID NO: 2382068 - RNA, 14 nt, Human
cuccagccuggcuc

SEQ ID NO: 2382069 - RNA, 16 nt, Human
cuccagccccuggaug

SEQ ID NO: 2382070 - RNA, 17 nt, Human
cuccagccccuggaugc

SEQ ID NO: 2382071 - RNA, 20 nt, Human
cuccaggaaugccuccuccc

SEQ ID NO: 2382072 - RNA, 13 nt, Human
cuccaggagagga

SEQ ID NO: 2382073 - RNA, 14 nt, Human
cuccaggagaggag

SEQ ID NO: 2382074 - RNA, 22 nt, Human
cuccaggagaggagcgggaccu

SEQ ID NO: 2382075 - RNA, 18 nt, Human
cuccaggaaccacaccac

SEQ ID NO: 2382076 - RNA, 12 nt, Human
cuccaggaacca

SEQ ID NO: 2382077 - RNA, 21 nt, Human
cuccagcuuguggagccccac

SEQ ID NO: 2382078 - RNA, 19 nt, Human
cuccagcuuguggagcccc

SEQ ID NO: 2382079 - RNA, 20 nt, Human
cuccagcuuguggagcccca

SEQ ID NO: 2382080 - RNA, 11 nt, Human
cuccaggagca

SEQ ID NO: 2382081 - RNA, 13 nt, Human
cuccaggagcagc

SEQ ID NO: 2382082 - RNA, 14 nt, Human
cuccaggagcagcc

SEQ ID NO: 2382083 - RNA, 15 nt, Human
cuccaggagcagcca

SEQ ID NO: 2382084 - RNA, 16 nt, Human
cuccaggagcagccac

SEQ ID NO: 2382085 - RNA, 17 nt, Human
cuccaggagcagccaca

SEQ ID NO: 2382086 - RNA, 15 nt, Human
cuccaucagcuguaa

SEQ ID NO: 2382087 - RNA, 18 nt, Human
cuccaucaguuagagcug

SEQ ID NO: 2382088 - RNA, 19 nt, Human
cuccaucaguuagagcuga

SEQ ID NO: 2382089 - RNA, 11 nt, Human
cuccaggcagg

SEQ ID NO: 2382090 - RNA, 21 nt, Human
cuccaggcacccuucuuuccu

SEQ ID NO: 2382091 - RNA, 19 nt, Human
cuccaggauugaagagcau

SEQ ID NO: 2382092 - RNA, 16 nt, Human
cuccaggcacccuucu

SEQ ID NO: 2382093 - RNA, 20 nt, Human
cuccaggcacccuucuuucc

SEQ ID NO: 2382094 - RNA, 18 nt, Human
cuccaggagcagccacau

SEQ ID NO: 2382095 - RNA, 23 nt, Human
cuccaggagcagccacauuccug

SEQ ID NO: 2382096 - RNA, 12 nt, Human
cuccauccugag

SEQ ID NO: 2382097 - RNA, 20 nt, Human
cuccauccacaugggagccg

SEQ ID NO: 2382098 - RNA, 12 nt, Human
cuccauccaagg

SEQ ID NO: 2382099 - RNA, 13 nt, Human
cuccauccaaggc

SEQ ID NO: 2382100 - RNA, 14 nt, Human
cuccauccaaggcc

SEQ ID NO: 2382101 - RNA, 18 nt, Human
cuccauccaaggccaggu

SEQ ID NO: 2382102 - RNA, 14 nt, Human
cucauacucaccuc

SEQ ID NO: 2382103 - RNA, 15 nt, Human
cucauacccaccccc

SEQ ID NO: 2382104 - RNA, 22 nt, Human
cucauacucaccucaccccacu

SEQ ID NO: 2382105 - RNA, 16 nt, Human
cucauaccuuuaaagg

SEQ ID NO: 2382106 - RNA, 18 nt, Human
cucauaccuuuaaaggaa

SEQ ID NO: 2382107 - RNA, 14 nt, Human
cucauacguccacc

SEQ ID NO: 2382108 - RNA, 15 nt, Human
cucauacguccacca

SEQ ID NO: 2382109 - RNA, 17 nt, Human
cucauacguccaccaug

SEQ ID NO: 2382110 - RNA, 13 nt, Human
cucauacugugcu

SEQ ID NO: 2382111 - RNA, 21 nt, Human
cucauaguaugguggcugggu

SEQ ID NO: 2382112 - RNA, 21 nt, Human
cucauagcccucacccugggg

SEQ ID NO: 2382113 - RNA, 20 nt, Human
cucauagcccucacccuggg

SEQ ID NO: 2382114 - RNA, 18 nt, Human
cucauagcauuaacuaau

SEQ ID NO: 2382115 - RNA, 16 nt, Human
cucauagcauuaacua

SEQ ID NO: 2382116 - RNA, 14 nt, Human
cucauagcauuaac

SEQ ID NO: 2382117 - RNA, 12 nt, Human
cucauagcauua

SEQ ID NO: 2382118 - RNA, 15 nt, Human
cucauagcacuuccc

SEQ ID NO: 2382119 - RNA, 17 nt, Human
cucauagcccucacccu

SEQ ID NO: 2382120 - RNA, 13 nt, Human
cucauagcccuca

SEQ ID NO: 2382121 - RNA, 20 nt, Human
cucaggugauccacccaccu

SEQ ID NO: 2382122 - RNA, 18 nt, Human
cucaggugauccacccac

SEQ ID NO: 2382123 - RNA, 19 nt, Human
cucaggugauccacccacc

SEQ ID NO: 2382124 - RNA, 16 nt, Human
cucauacccaccccca

SEQ ID NO: 2382125 - RNA, 18 nt, Human
cucauacccacccccacc

SEQ ID NO: 2382126 - RNA, 19 nt, Human
cucauacccacccccaccc

SEQ ID NO: 2382127 - RNA, 21 nt, Human
cucauacccacccccacccaa

SEQ ID NO: 2382128 - RNA, 15 nt, Human
cucaucauaaaauaa

SEQ ID NO: 2382129 - RNA, 14 nt, Human
cucaucauaaaaua

SEQ ID NO: 2382130 - RNA, 12 nt, Human
cucaucauaaaa

SEQ ID NO: 2382131 - RNA, 24 nt, Human
cucaucaguguccucuugcucaaa

SEQ ID NO: 2382132 - RNA, 17 nt, Human
cucaucacuccccucca

SEQ ID NO: 2382133 - RNA, 15 nt, Human
cucaucacuggauga

SEQ ID NO: 2382134 - RNA, 12 nt, Human
cucaucaggaug

SEQ ID NO: 2382135 - RNA, 13 nt, Human
cucaucaggauga

SEQ ID NO: 2382136 - RNA, 16 nt, Human
cucaucaggaugaacc

SEQ ID NO: 2382137 - RNA, 20 nt, Human
cucaucaggaugaacccagg

SEQ ID NO: 2382138 - RNA, 22 nt, Human
cucaucaccaacgucugugcca

SEQ ID NO: 2382139 - RNA, 14 nt, Human
cucaucaacugaau

SEQ ID NO: 2382140 - RNA, 14 nt, Human
cucaucacuccccu

SEQ ID NO: 2382141 - RNA, 15 nt, Human
cucaucacuccccuc

SEQ ID NO: 2382142 - RNA, 16 nt, Human
cucaucacuccccucc

SEQ ID NO: 2382143 - RNA, 19 nt, Human
cucauauauaucuaucuua

SEQ ID NO: 2382144 - RNA, 15 nt, Human
cucauaucaguuugc

SEQ ID NO: 2382145 - RNA, 21 nt, Human
cucauauccaguauuguuccu

SEQ ID NO: 2382146 - RNA, 23 nt, Human
cucauaguaugguggcuggguug

SEQ ID NO: 2382147 - RNA, 20 nt, Human
cucauauccccuauuuaaca

SEQ ID NO: 2382148 - RNA, 13 nt, Human
cucaucaacugaa

SEQ ID NO: 2382149 - RNA, 16 nt, Human
cucaucaacugaauga

SEQ ID NO: 2382150 - RNA, 21 nt, Human
cucaucaccaacgucugugcc

SEQ ID NO: 2382151 - RNA, 16 nt, Human
cucaucauaaaauaaa

SEQ ID NO: 2382152 - RNA, 13 nt, Human
cucaucauucucu

SEQ ID NO: 2382153 - RNA, 15 nt, Human
cucaucauucucugu

SEQ ID NO: 2382154 - RNA, 14 nt, Human
cucaucauucucug

SEQ ID NO: 2382155 - RNA, 20 nt, Human
cucaucauucucugucucau

SEQ ID NO: 2382156 - RNA, 19 nt, Human
cucaucauucucugucuca

SEQ ID NO: 2382157 - RNA, 18 nt, Human
cucaucauucucugucuc

SEQ ID NO: 2382158 - RNA, 17 nt, Human
cucaucauucucugucu

SEQ ID NO: 2382159 - RNA, 15 nt, Human
cucauccgaggcagg

SEQ ID NO: 2382160 - RNA, 14 nt, Human
cucauccgaggcag

SEQ ID NO: 2382161 - RNA, 19 nt, Human
cucaucccguguucuccuu

SEQ ID NO: 2382162 - RNA, 22 nt, Human
cucaucaggaugaacccaggac

SEQ ID NO: 2382163 - RNA, 18 nt, Human
cucaucccuaaugcugca

SEQ ID NO: 2382164 - RNA, 22 nt, Human
cucaucccgagcaccuccacau

SEQ ID NO: 2382165 - RNA, 16 nt, Human
cucaucccguguucuc

SEQ ID NO: 2382166 - RNA, 22 nt, Human
cucaucauucucugucucaucc

SEQ ID NO: 2382167 - RNA, 17 nt, Human
cucauccgaggcagggu

SEQ ID NO: 2382168 - RNA, 21 nt, Human
cucaucccuaaugcugcagau

SEQ ID NO: 2382169 - RNA, 15 nt, Human
cucauccucauaccc

SEQ ID NO: 2382170 - RNA, 24 nt, Human
cucaucucuaacagcucaggaucu

SEQ ID NO: 2382171 - RNA, 23 nt, Human
cucaucucuaacagcucaggauc

SEQ ID NO: 2382172 - RNA, 22 nt, Human
cucaucucuaacagcucaggau

SEQ ID NO: 2382173 - RNA, 20 nt, Human
cucaucucuaacagcucagg

SEQ ID NO: 2382174 - RNA, 18 nt, Human
cucaucucuaacagcuca

SEQ ID NO: 2382175 - RNA, 17 nt, Human
cucaucucucugcccaa

SEQ ID NO: 2382176 - RNA, 16 nt, Human
cucaucucucugccca

SEQ ID NO: 2382177 - RNA, 17 nt, Human
cucaucucuuagcuccc

SEQ ID NO: 2382178 - RNA, 19 nt, Human
cucaucucuuagcuccccu

SEQ ID NO: 2382179 - RNA, 22 nt, Human
cucaggaugcccagggccacuc

SEQ ID NO: 2382180 - RNA, 19 nt, Human
cucaggaugcccagggcca

SEQ ID NO: 2382181 - RNA, 16 nt, Human
cucaggaugcccaggg

SEQ ID NO: 2382182 - RNA, 19 nt, Human
cucaggauuucgugggucu

SEQ ID NO: 2382183 - RNA, 21 nt, Human
cucaggcaaggucuggccuca

SEQ ID NO: 2382184 - RNA, 14 nt, Human
cucaggcacuagcc

SEQ ID NO: 2382185 - RNA, 15 nt, Human
cucaggcacuagccu

SEQ ID NO: 2382186 - RNA, 18 nt, Human
cucaggcacuagccuuug

SEQ ID NO: 2382187 - RNA, 19 nt, Human
cucaggcacuagccuuugg

SEQ ID NO: 2382188 - RNA, 16 nt, Human
cucaggaggcugaggg

SEQ ID NO: 2382189 - RNA, 23 nt, Human
cucaggaggcugaggcaggagga

SEQ ID NO: 2382190 - RNA, 23 nt, Human
cucaggaggcugaggcagaagaa

SEQ ID NO: 2382191 - RNA, 14 nt, Human
cucaggaugcccag

SEQ ID NO: 2382192 - RNA, 15 nt, Human
cucaggaugcccagg

SEQ ID NO: 2382193 - RNA, 13 nt, Human
cucaggaucucuu

SEQ ID NO: 2382194 - RNA, 23 nt, Human
cucagggacagagacaccugcac

SEQ ID NO: 2382195 - RNA, 22 nt, Human
cucagggacagagacaccugca

SEQ ID NO: 2382196 - RNA, 14 nt, Human
cucagggacagagc

SEQ ID NO: 2382197 - RNA, 15 nt, Human
cucagggacagagcc

SEQ ID NO: 2382198 - RNA, 16 nt, Human
cucagggacagagcca

SEQ ID NO: 2382199 - RNA, 18 nt, Human
cucagggacagagccaug

SEQ ID NO: 2382200 - RNA, 19 nt, Human
cucagggacagagccaugc

SEQ ID NO: 2382201 - RNA, 12 nt, Human
cucagggaccac

SEQ ID NO: 2382202 - RNA, 21 nt, Human
cucagggacagagacaccugc

SEQ ID NO: 2382203 - RNA, 23 nt, Human
cucaggcacuagccuuuggcucu

SEQ ID NO: 2382204 - RNA, 14 nt, Human
cucaggcagcucaa

SEQ ID NO: 2382205 - RNA, 15 nt, Human
cucaggcagcucaag

SEQ ID NO: 2382206 - RNA, 22 nt, Human
cucagggauggccguuggccac

SEQ ID NO: 2382207 - RNA, 19 nt, Human
cucagggaccacagcaagg

SEQ ID NO: 2382208 - RNA, 15 nt, Human
cucagggaccacagc

SEQ ID NO: 2382209 - RNA, 16 nt, Human
cucagggaccacagca

SEQ ID NO: 2382210 - RNA, 17 nt, Human
cucagggaccacagcaa

SEQ ID NO: 2382211 - RNA, 18 nt, Human
cucagggaccacagcaag

SEQ ID NO: 2382212 - RNA, 23 nt, Human
cucaggaguuugagaccaaccug

SEQ ID NO: 2382213 - RNA, 18 nt, Human
cucaggaguuugagacca

SEQ ID NO: 2382214 - RNA, 22 nt, Human
cucaggaggcugaggcaggagg

SEQ ID NO: 2382215 - RNA, 20 nt, Human
cucaggaggcugaggcagga

SEQ ID NO: 2382216 - RNA, 20 nt, Human
cucaggaggcugaggcagaa

SEQ ID NO: 2382217 - RNA, 21 nt, Human
cucagccaugaggaguugcug

SEQ ID NO: 2382218 - RNA, 15 nt, Human
cucagccaugaggag

SEQ ID NO: 2382219 - RNA, 19 nt, Human
cucagcccacauagugaug

SEQ ID NO: 2382220 - RNA, 21 nt, Human
cucagcccacauagugauggu

SEQ ID NO: 2382221 - RNA, 18 nt, Human
cucagcauccuggcaccc

SEQ ID NO: 2382222 - RNA, 23 nt, Human
cucagcagcgaccaccccugccu

SEQ ID NO: 2382223 - RNA, 21 nt, Human
cucagcagcgaccaccccugc

SEQ ID NO: 2382224 - RNA, 18 nt, Human
cucagccaagcacagugg

SEQ ID NO: 2382225 - RNA, 20 nt, Human
cucagccaagcacaguggug

SEQ ID NO: 2382226 - RNA, 23 nt, Human
cucagccaagcacagugguggca

SEQ ID NO: 2382227 - RNA, 14 nt, Human
cucagccagagaag

SEQ ID NO: 2382228 - RNA, 16 nt, Human
cucagccagccccauc

SEQ ID NO: 2382229 - RNA, 13 nt, Human
cucagccagcacu

SEQ ID NO: 2382230 - RNA, 11 nt, Human
cucagccagca

SEQ ID NO: 2382231 - RNA, 12 nt, Human
cucagccagaga

SEQ ID NO: 2382232 - RNA, 15 nt, Human
cucagggccuggucg

SEQ ID NO: 2382233 - RNA, 16 nt, Human
cucagggccuggcuca

SEQ ID NO: 2382234 - RNA, 14 nt, Human
cucagggcuccugg

SEQ ID NO: 2382235 - RNA, 22 nt, Human
cucagggcuccugccuucuguc

SEQ ID NO: 2382236 - RNA, 23 nt, Human
cucagggcuccugccuucugucc

SEQ ID NO: 2382237 - RNA, 22 nt, Human
cucagggcuaaacgggcauugc

SEQ ID NO: 2382238 - RNA, 14 nt, Human
cucagggcuccugc

SEQ ID NO: 2382239 - RNA, 15 nt, Human
cucagggcuccugcc

SEQ ID NO: 2382240 - RNA, 16 nt, Human
cucagggcuccugccu

SEQ ID NO: 2382241 - RNA, 13 nt, Human
cucagggcuccug

SEQ ID NO: 2382242 - RNA, 14 nt, Human
cucagggccuggcu

SEQ ID NO: 2382243 - RNA, 15 nt, Human
cucagggccuggcuc

SEQ ID NO: 2382244 - RNA, 13 nt, Human
cucagggccuggc

SEQ ID NO: 2382245 - RNA, 10 nt, Human
cucagggcag

SEQ ID NO: 2382246 - RNA, 20 nt, Human
cucaggugagaagcagagga

SEQ ID NO: 2382247 - RNA, 19 nt, Human
cucaggugagaagcagagg

SEQ ID NO: 2382248 - RNA, 16 nt, Human
cucaggugagaagcag

SEQ ID NO: 2382249 - RNA, 18 nt, Human
cucagggucccugguggc

SEQ ID NO: 2382250 - RNA, 16 nt, Human
cucagggcugacacgu

SEQ ID NO: 2382251 - RNA, 17 nt, Human
cucagggcuccuggguu

SEQ ID NO: 2382252 - RNA, 15 nt, Human
cucagggcuccuggg

SEQ ID NO: 2382253 - RNA, 15 nt, Human
cucagggucccuggu

SEQ ID NO: 2382254 - RNA, 16 nt, Human
cucagggucccuggug

SEQ ID NO: 2382255 - RNA, 17 nt, Human
cucagggucccuggugg

SEQ ID NO: 2382256 - RNA, 14 nt, Human
cucccugccuccag

SEQ ID NO: 2382257 - RNA, 19 nt, Human
cucccugccgccucaaugu

SEQ ID NO: 2382258 - RNA, 18 nt, Human
cucccugccgccucaaug

SEQ ID NO: 2382259 - RNA, 16 nt, Human
cucccugccgccucaa

SEQ ID NO: 2382260 - RNA, 15 nt, Human
cucccugccgccuca

SEQ ID NO: 2382261 - RNA, 10 nt, Human
cucccugccg

SEQ ID NO: 2382262 - RNA, 16 nt, Human
cucccugccuccagga

SEQ ID NO: 2382263 - RNA, 15 nt, Human
cucccugccuccagg

SEQ ID NO: 2382264 - RNA, 17 nt, Human
cucccugccccucccuu

SEQ ID NO: 2382265 - RNA, 18 nt, Human
cucccugccccucccuuc

SEQ ID NO: 2382266 - RNA, 20 nt, Human
cucccugccccucccuucaa

SEQ ID NO: 2382267 - RNA, 21 nt, Human
cucccugccccucccuucaac

SEQ ID NO: 2382268 - RNA, 23 nt, Human
cucccugcaucugaccagcagcg

SEQ ID NO: 2382269 - RNA, 22 nt, Human
cucccugcaucugaccagcagc

SEQ ID NO: 2382270 - RNA, 14 nt, Human
cucccuaaacugua

SEQ ID NO: 2382271 - RNA, 15 nt, Human
cucccgucagggccc

SEQ ID NO: 2382272 - RNA, 16 nt, Human
cucccgucagggccca

SEQ ID NO: 2382273 - RNA, 19 nt, Human
cucccgucagggcccaagu

SEQ ID NO: 2382274 - RNA, 21 nt, Human
cucccgucagggcccaagucc

SEQ ID NO: 2382275 - RNA, 13 nt, Human
cucccugccccuc

SEQ ID NO: 2382276 - RNA, 14 nt, Human
cucccugccccucc

SEQ ID NO: 2382277 - RNA, 23 nt, Human
cucccugccccccagcccuccuu

SEQ ID NO: 2382278 - RNA, 17 nt, Human
cucccugccccccagcc

SEQ ID NO: 2382279 - RNA, 19 nt, Human
cucccgaguagcugggacu

SEQ ID NO: 2382280 - RNA, 20 nt, Human
cucccgaguagcugggacua

SEQ ID NO: 2382281 - RNA, 12 nt, Human
cuccccuugggc

SEQ ID NO: 2382282 - RNA, 13 nt, Human
cuccccuugggcg

SEQ ID NO: 2382283 - RNA, 15 nt, Human
cuccccuugggcggc

SEQ ID NO: 2382284 - RNA, 15 nt, Human
cucccggugcccaag

SEQ ID NO: 2382285 - RNA, 21 nt, Human
cucccggugcccaagaauaga

SEQ ID NO: 2382286 - RNA, 15 nt, Human
cucccgguucuucca

SEQ ID NO: 2382287 - RNA, 16 nt, Human
cucccgguucuuccag

SEQ ID NO: 2382288 - RNA, 21 nt, Human
cucccgguucuuccagugguu

SEQ ID NO: 2382289 - RNA, 14 nt, Human
cucccgucagggcc

SEQ ID NO: 2382290 - RNA, 16 nt, Human
cucccgccccuuccca

SEQ ID NO: 2382291 - RNA, 21 nt, Human
cucccgccagacuguuagaaa

SEQ ID NO: 2382292 - RNA, 18 nt, Human
cuccccuugggcggcuga

SEQ ID NO: 2382293 - RNA, 21 nt, Human
cucccgccccuuccccgaggg

SEQ ID NO: 2382294 - RNA, 15 nt, Human
cucccgggcccuccc

SEQ ID NO: 2382295 - RNA, 16 nt, Human
cucccgggcccucccu

SEQ ID NO: 2382296 - RNA, 22 nt, Human
cucccgggcccucccuuggaaa

SEQ ID NO: 2382297 - RNA, 19 nt, Human
cucccgggcccucccuugg

SEQ ID NO: 2382298 - RNA, 20 nt, Human
cucccgggcccucccuugga

SEQ ID NO: 2382299 - RNA, 15 nt, Human
cuccccuccuugccu

SEQ ID NO: 2382300 - RNA, 16 nt, Human
cuccccuccucucccc

SEQ ID NO: 2382301 - RNA, 17 nt, Human
cuccccuccucuccccu

SEQ ID NO: 2382302 - RNA, 14 nt, Human
cuccccugccauuu

SEQ ID NO: 2382303 - RNA, 13 nt, Human
cuccccugccccc

SEQ ID NO: 2382304 - RNA, 14 nt, Human
cuccccugccccca

SEQ ID NO: 2382305 - RNA, 15 nt, Human
cuccccugcccccag

SEQ ID NO: 2382306 - RNA, 16 nt, Human
cuccccugcccccagg

SEQ ID NO: 2382307 - RNA, 17 nt, Human
cuccccugcccccagga

SEQ ID NO: 2382308 - RNA, 18 nt, Human
cuccccugcccccaggac

SEQ ID NO: 2382309 - RNA, 19 nt, Human
cuccccugcccccaggacu

SEQ ID NO: 2382310 - RNA, 20 nt, Human
cuccccugcccccaggacug

SEQ ID NO: 2382311 - RNA, 21 nt, Human
cuccccugcccccaggacugg

SEQ ID NO: 2382312 - RNA, 22 nt, Human
cuccccugcccccaggacuggg

SEQ ID NO: 2382313 - RNA, 23 nt, Human
cuccccugcccccaggacugggc

SEQ ID NO: 2382314 - RNA, 13 nt, Human
cuccccugcccug

SEQ ID NO: 2382315 - RNA, 12 nt, Human
cuccccugcccu

SEQ ID NO: 2382316 - RNA, 14 nt, Human
cuccccugcccugc

SEQ ID NO: 2382317 - RNA, 19 nt, Human
cuccccuuccucacugccc

SEQ ID NO: 2382318 - RNA, 16 nt, Human
cuccccuucccugcaa

SEQ ID NO: 2382319 - RNA, 15 nt, Human
cuccccuucccugca

SEQ ID NO: 2382320 - RNA, 16 nt, Human
cuccccuugagcugag

SEQ ID NO: 2382321 - RNA, 14 nt, Human
cuccccuugagcug

SEQ ID NO: 2382322 - RNA, 11 nt, Human
cuccccuuccc

SEQ ID NO: 2382323 - RNA, 22 nt, Human
cuccccagcaagugagagcugg

SEQ ID NO: 2382324 - RNA, 23 nt, Human
cuccccagcaagugagagcuggg

SEQ ID NO: 2382325 - RNA, 13 nt, Human
cuccauccugagg

SEQ ID NO: 2382326 - RNA, 14 nt, Human
cuccauccugaggc

SEQ ID NO: 2382327 - RNA, 19 nt, Human
cuccccagcagguggggag

SEQ ID NO: 2382328 - RNA, 12 nt, Human
cuccccuccucu

SEQ ID NO: 2382329 - RNA, 19 nt, Human
cuccccagcauuccagccc

SEQ ID NO: 2382330 - RNA, 20 nt, Human
cuccccuccuccuggacucc

SEQ ID NO: 2382331 - RNA, 12 nt, Human
cuccccuccucc

SEQ ID NO: 2382332 - RNA, 16 nt, Human
cuccccagcagguggg

SEQ ID NO: 2382333 - RNA, 15 nt, Human
cuccccagcaggugg

SEQ ID NO: 2382334 - RNA, 21 nt, Human
cuccccagcaagugagagcug

SEQ ID NO: 2382335 - RNA, 16 nt, Human
cuccucauccagggcu

SEQ ID NO: 2382336 - RNA, 23 nt, Human
cuccucaggguugagguccagcc

SEQ ID NO: 2382337 - RNA, 20 nt, Human
cuccucauccagggcucuga

SEQ ID NO: 2382338 - RNA, 18 nt, Human
cuccucaggguugagguc

SEQ ID NO: 2382339 - RNA, 22 nt, Human
cuccucagggauggccguuggc

SEQ ID NO: 2382340 - RNA, 14 nt, Human
cuccucagggaugg

SEQ ID NO: 2382341 - RNA, 14 nt, Human
cuccucacccccag

SEQ ID NO: 2382342 - RNA, 21 nt, Human
cuccucacaacauggugucug

SEQ ID NO: 2382343 - RNA, 15 nt, Human
cuccuccagccgcca

SEQ ID NO: 2382344 - RNA, 17 nt, Human
cuccuccacucuccccc

SEQ ID NO: 2382345 - RNA, 15 nt, Human
cuccucccacccggc

SEQ ID NO: 2382346 - RNA, 13 nt, Human
cuccuccagaguc

SEQ ID NO: 2382347 - RNA, 15 nt, Human
cuccuccagagucag

SEQ ID NO: 2382348 - RNA, 15 nt, Human
cuccuccucccccag

SEQ ID NO: 2382349 - RNA, 14 nt, Human
cuccuccuccccca

SEQ ID NO: 2382350 - RNA, 15 nt, Human
cuccuccucccugca

SEQ ID NO: 2382351 - RNA, 15 nt, Human
cuccuccuggacucc

SEQ ID NO: 2382352 - RNA, 14 nt, Human
cuccuccuggacuc

SEQ ID NO: 2382353 - RNA, 19 nt, Human
cuccuccuggacuccugca

SEQ ID NO: 2382354 - RNA, 14 nt, Human
cuccuccucccugc

SEQ ID NO: 2382355 - RNA, 12 nt, Human
cuccuccuuccc

SEQ ID NO: 2382356 - RNA, 12 nt, Human
cuccucuccagg

SEQ ID NO: 2382357 - RNA, 13 nt, Human
cuccuccucccug

SEQ ID NO: 2382358 - RNA, 20 nt, Human
cuccuccgugcuuccucagu

SEQ ID NO: 2382359 - RNA, 21 nt, Human
cuccucucccauugucccucu

SEQ ID NO: 2382360 - RNA, 23 nt, Human
cuccucucccaucccccugcccu

SEQ ID NO: 2382361 - RNA, 15 nt, Human
cuccucucccauccc

SEQ ID NO: 2382362 - RNA, 21 nt, Human
cuccucucccaucccccugcc

SEQ ID NO: 2382363 - RNA, 13 nt, Human
cuccucuccaggc

SEQ ID NO: 2382364 - RNA, 15 nt, Human
cuccucuccaggcac

SEQ ID NO: 2382365 - RNA, 12 nt, Human
cuccucucccau

SEQ ID NO: 2382366 - RNA, 13 nt, Human
cuccucucccauc

SEQ ID NO: 2382367 - RNA, 22 nt, Human
cuccucccaggcgccccuuccc

SEQ ID NO: 2382368 - RNA, 23 nt, Human
cuccucccaggcgccccuucccc

SEQ ID NO: 2382369 - RNA, 12 nt, Human
cuccuccuagcc

SEQ ID NO: 2382370 - RNA, 12 nt, Human
cuccucccagga

SEQ ID NO: 2382371 - RNA, 19 nt, Human
cuccucccuuuuuccuugu

SEQ ID NO: 2382372 - RNA, 17 nt, Human
cuccucccaggcgcccc

SEQ ID NO: 2382373 - RNA, 20 nt, Human
cuccucccacccggcugcag

SEQ ID NO: 2382374 - RNA, 22 nt, Human
cuccucccacccggcugcagag

SEQ ID NO: 2382375 - RNA, 22 nt, Human
cuccuauucucuuaauuuuucu

SEQ ID NO: 2382376 - RNA, 14 nt, Human
cuccucaacucacc

SEQ ID NO: 2382377 - RNA, 18 nt, Human
cuccucagaucuucugug

SEQ ID NO: 2382378 - RNA, 17 nt, Human
cuccuaugaucucaggu

SEQ ID NO: 2382379 - RNA, 13 nt, Human
cuccuaucugugu

SEQ ID NO: 2382380 - RNA, 14 nt, Human
cuccuaucuguguu

SEQ ID NO: 2382381 - RNA, 15 nt, Human
cuccuaucuguguuu

SEQ ID NO: 2382382 - RNA, 18 nt, Human
cuccuaucuguguuuuga

SEQ ID NO: 2382383 - RNA, 13 nt, Human
cuccuauguguaa

SEQ ID NO: 2382384 - RNA, 22 nt, Human
cuccuauucaguucccagaauc

SEQ ID NO: 2382385 - RNA, 12 nt, Human
cuccuaugugua

SEQ ID NO: 2382386 - RNA, 15 nt, Human
cuccgcaguuccugu

SEQ ID NO: 2382387 - RNA, 12 nt, Human
cuccgccagccu

SEQ ID NO: 2382388 - RNA, 13 nt, Human
cuccgccagccuc

SEQ ID NO: 2382389 - RNA, 22 nt, Human
cuccuaucagaaguuucucagc

SEQ ID NO: 2382390 - RNA, 14 nt, Human
cuccgccagccucc

SEQ ID NO: 2382391 - RNA, 14 nt, Human
cuccuauccugguu

SEQ ID NO: 2382392 - RNA, 16 nt, Human
cuccgauccuuccucc

SEQ ID NO: 2382393 - RNA, 15 nt, Human
cuccgauccuuccuc

SEQ ID NO: 2382394 - RNA, 13 nt, Human
cuccgaggccagu

SEQ ID NO: 2382395 - RNA, 14 nt, Human
cuccgagagggaga

SEQ ID NO: 2382396 - RNA, 13 nt, Human
cuccgagaggugg

SEQ ID NO: 2382397 - RNA, 14 nt, Human
cuccgagagguggg

SEQ ID NO: 2382398 - RNA, 15 nt, Human
cuccgagaggugggc

SEQ ID NO: 2382399 - RNA, 17 nt, Human
cuccgagaggugggcca

SEQ ID NO: 2382400 - RNA, 18 nt, Human
cuccgagaggugggccag

SEQ ID NO: 2382401 - RNA, 22 nt, Human
cuccgagaggugggccagucug

SEQ ID NO: 2382402 - RNA, 16 nt, Human
cuccgagagggagaga

SEQ ID NO: 2382403 - RNA, 16 nt, Human
cucccuguccuccucg

SEQ ID NO: 2382404 - RNA, 15 nt, Human
cucccuguccuccuc

SEQ ID NO: 2382405 - RNA, 14 nt, Human
cucccuguccuccu

SEQ ID NO: 2382406 - RNA, 13 nt, Human
cucccuguccucc

SEQ ID NO: 2382407 - RNA, 11 nt, Human
cucccuguccu

SEQ ID NO: 2382408 - RNA, 21 nt, Human
cucccuguaggaagucauccu

SEQ ID NO: 2382409 - RNA, 19 nt, Human
cucccuguaaccucuucag

SEQ ID NO: 2382410 - RNA, 18 nt, Human
cucccugguucugaugau

SEQ ID NO: 2382411 - RNA, 18 nt, Human
cucccuguccuccucgga

SEQ ID NO: 2382412 - RNA, 17 nt, Human
cucccugucggccuggu

SEQ ID NO: 2382413 - RNA, 16 nt, Human
cucccuguuccccaga

SEQ ID NO: 2382414 - RNA, 19 nt, Human
cucccuguuccccagagaa

SEQ ID NO: 2382415 - RNA, 20 nt, Human
cucccuuggauuguccccga

SEQ ID NO: 2382416 - RNA, 18 nt, Human
cucccuguuccccagaga

SEQ ID NO: 2382417 - RNA, 17 nt, Human
cucccuguuccccagag

SEQ ID NO: 2382418 - RNA, 19 nt, Human
cucccuuggggccuaugca

SEQ ID NO: 2382419 - RNA, 18 nt, Human
cucccuugggcucccugu

SEQ ID NO: 2382420 - RNA, 14 nt, Human
cucccuugggcucc

SEQ ID NO: 2382421 - RNA, 13 nt, Human
cucccuugggcuc

SEQ ID NO: 2382422 - RNA, 17 nt, Human
cucccuuggguucugau

SEQ ID NO: 2382423 - RNA, 18 nt, Human
cucccuuggguucugaua

SEQ ID NO: 2382424 - RNA, 20 nt, Human
cucccuugguggcaagagcc

SEQ ID NO: 2382425 - RNA, 21 nt, Human
cucccuugguggcaagagccc

SEQ ID NO: 2382426 - RNA, 14 nt, Human
cucccuuguucucu

SEQ ID NO: 2382427 - RNA, 17 nt, Human
cucccuuguucucuaag

SEQ ID NO: 2382428 - RNA, 16 nt, Human
cuccgacugcuaggga

SEQ ID NO: 2382429 - RNA, 18 nt, Human
cucgcauaggaccuuucc

SEQ ID NO: 2382430 - RNA, 19 nt, Human
cucgcauaggaccuuucca

SEQ ID NO: 2382431 - RNA, 22 nt, Human
cucgcccgcccacuguccuggg

SEQ ID NO: 2382432 - RNA, 23 nt, Human
cucgcccgcccacuguccugggc

SEQ ID NO: 2382433 - RNA, 15 nt, Human
cucgcccugggucua

SEQ ID NO: 2382434 - RNA, 13 nt, Human
cucgcccuggguc

SEQ ID NO: 2382435 - RNA, 12 nt, Human
cucgcccugggu

SEQ ID NO: 2382436 - RNA, 20 nt, Human
cucgcccugcgguagauggg

SEQ ID NO: 2382437 - RNA, 15 nt, Human
cucgccgucugugaa

SEQ ID NO: 2382438 - RNA, 16 nt, Human
cucgccgucugugaau

SEQ ID NO: 2382439 - RNA, 15 nt, Human
cucgccuucaucucc

SEQ ID NO: 2382440 - RNA, 23 nt, Human
cucgccugacaaccacuggucug

SEQ ID NO: 2382441 - RNA, 16 nt, Human
cucgccuggccugagg

SEQ ID NO: 2382442 - RNA, 17 nt, Human
cucgccuggccugaggu

SEQ ID NO: 2382443 - RNA, 16 nt, Human
cucgcugaugcugggc

SEQ ID NO: 2382444 - RNA, 17 nt, Human
cucgcugaugcugggcu

SEQ ID NO: 2382445 - RNA, 18 nt, Human
cucgcugaugcugggcug

SEQ ID NO: 2382446 - RNA, 19 nt, Human
cucgcugaugcugggcugg

SEQ ID NO: 2382447 - RNA, 23 nt, Human
cucgcucugucgcccaggcugga

SEQ ID NO: 2382448 - RNA, 12 nt, Human
cucgcucuguca

SEQ ID NO: 2382449 - RNA, 13 nt, Human
cucgcucugucac

SEQ ID NO: 2382450 - RNA, 15 nt, Human
cucgcucugucaccc

SEQ ID NO: 2382451 - RNA, 20 nt, Human
cucgccuggccugaggucuc

SEQ ID NO: 2382452 - RNA, 22 nt, Human
cucgcuauugucaccagggcug

SEQ ID NO: 2382453 - RNA, 17 nt, Human
cucgauucauauugaau

SEQ ID NO: 2382454 - RNA, 23 nt, Human
cucgaggguuggguucaucugag

SEQ ID NO: 2382455 - RNA, 14 nt, Human
cucgauuucuccag

SEQ ID NO: 2382456 - RNA, 22 nt, Human
cucgauuuuaucuuucgcacag

SEQ ID NO: 2382457 - RNA, 20 nt, Human
cucgauuuuguaucugcagg

SEQ ID NO: 2382458 - RNA, 18 nt, Human
cucgauuuuguaucugca

SEQ ID NO: 2382459 - RNA, 19 nt, Human
cucgauuuuguaucugcag

SEQ ID NO: 2382460 - RNA, 13 nt, Human
cucgauuuuguau

SEQ ID NO: 2382461 - RNA, 14 nt, Human
cucgauuuuguauc

SEQ ID NO: 2382462 - RNA, 15 nt, Human
cucgauuuuguaucu

SEQ ID NO: 2382463 - RNA, 16 nt, Human
cucgauuuuguaucug

SEQ ID NO: 2382464 - RNA, 14 nt, Human
cucgcagagaggcc

SEQ ID NO: 2382465 - RNA, 20 nt, Human
cucgcagagaggccaggugc

SEQ ID NO: 2382466 - RNA, 14 nt, Human
cucgcaccuuucca

SEQ ID NO: 2382467 - RNA, 15 nt, Human
cucgcaccuuuccaa

SEQ ID NO: 2382468 - RNA, 14 nt, Human
cucgcaagcugggu

SEQ ID NO: 2382469 - RNA, 13 nt, Human
cucgcaagcuggg

SEQ ID NO: 2382470 - RNA, 23 nt, Human
cucgagcaguccugccucagccu

SEQ ID NO: 2382471 - RNA, 22 nt, Human
cucgagcaugccuggauggggc

SEQ ID NO: 2382472 - RNA, 16 nt, Human
cucgaggacuguauuu

SEQ ID NO: 2382473 - RNA, 17 nt, Human
cucgaggacuguauuug

SEQ ID NO: 2382474 - RNA, 20 nt, Human
cucgaggacuguauuuguga

SEQ ID NO: 2382475 - RNA, 22 nt, Human
cucgaggacuguauuugugacu

SEQ ID NO: 2382476 - RNA, 23 nt, Human
cucgaggacuguauuugugacua

SEQ ID NO: 2382477 - RNA, 18 nt, Human
cucgagggcagggaccac

SEQ ID NO: 2382478 - RNA, 23 nt, Human
cucgagggcagggaccacacccu

SEQ ID NO: 2382479 - RNA, 13 nt, Human
cucgagggcaggg

SEQ ID NO: 2382480 - RNA, 12 nt, Human
cuccuuccuguc

SEQ ID NO: 2382481 - RNA, 13 nt, Human
cuccuuccugucu

SEQ ID NO: 2382482 - RNA, 23 nt, Human
cuccuuccuggagcccagaggag

SEQ ID NO: 2382483 - RNA, 17 nt, Human
cuccuuccugucuuccu

SEQ ID NO: 2382484 - RNA, 16 nt, Human
cuccuuccugucuucc

SEQ ID NO: 2382485 - RNA, 15 nt, Human
cuccuuccugucuuc

SEQ ID NO: 2382486 - RNA, 14 nt, Human
cuccuuccugucuu

SEQ ID NO: 2382487 - RNA, 13 nt, Human
cuccuuccugugu

SEQ ID NO: 2382488 - RNA, 16 nt, Human
cuccuuccugccaccu

SEQ ID NO: 2382489 - RNA, 21 nt, Human
cuccuuccugccaccugcugc

SEQ ID NO: 2382490 - RNA, 20 nt, Human
cuccuuccuggagcccagag

SEQ ID NO: 2382491 - RNA, 14 nt, Human
cuccuuccuggaga

SEQ ID NO: 2382492 - RNA, 13 nt, Human
cuccuuccuggag

SEQ ID NO: 2382493 - RNA, 22 nt, Human
cuccuuccuugcuguccuaggc

SEQ ID NO: 2382494 - RNA, 12 nt, Human
cuccuugggccc

SEQ ID NO: 2382495 - RNA, 16 nt, Human
cuccuugggcccuuug

SEQ ID NO: 2382496 - RNA, 13 nt, Human
cuccuugggcccu

SEQ ID NO: 2382497 - RNA, 18 nt, Human
cuccuuccuugaccagca

SEQ ID NO: 2382498 - RNA, 17 nt, Human
cuccuuccuugaccagc

SEQ ID NO: 2382499 - RNA, 14 nt, Human
cuccuuccuugacc

SEQ ID NO: 2382500 - RNA, 18 nt, Human
cuccuuccuucaccucug

SEQ ID NO: 2382501 - RNA, 15 nt, Human
cuccuuccugugugu

SEQ ID NO: 2382502 - RNA, 23 nt, Human
cuccuuggugucgggcaugacac

SEQ ID NO: 2382503 - RNA, 14 nt, Human
cuccuuggugccug

SEQ ID NO: 2382504 - RNA, 19 nt, Human
cuccuugggcccuuugagu

SEQ ID NO: 2382505 - RNA, 18 nt, Human
cuccuugggcccuuugag

SEQ ID NO: 2382506 - RNA, 17 nt, Human
cuccuugggcccuuuga

SEQ ID NO: 2382507 - RNA, 17 nt, Human
cucgagcaguccugccu

SEQ ID NO: 2382508 - RNA, 21 nt, Human
cucgagacacagugaagcaaa

SEQ ID NO: 2382509 - RNA, 15 nt, Human
cucgagcaacugcug

SEQ ID NO: 2382510 - RNA, 19 nt, Human
cucgagaacuuucauuuuu

SEQ ID NO: 2382511 - RNA, 15 nt, Human
cuccuuggugccugg

SEQ ID NO: 2382512 - RNA, 19 nt, Human
cuccuuggugccuggccug

SEQ ID NO: 2382513 - RNA, 22 nt, Human
cuccuuggugccuggccuggca

SEQ ID NO: 2382514 - RNA, 19 nt, Human
cuccuucgcaggcaugucc

SEQ ID NO: 2382515 - RNA, 13 nt, Human
cucgagcaugccu

SEQ ID NO: 2382516 - RNA, 15 nt, Human
cucgagcaugccugg

SEQ ID NO: 2382517 - RNA, 16 nt, Human
cucgagcaugccugga

SEQ ID NO: 2382518 - RNA, 19 nt, Human
cucgagcaugccuggaugg

SEQ ID NO: 2382519 - RNA, 11 nt, Human
cuccuggaaau

SEQ ID NO: 2382520 - RNA, 17 nt, Human
cuccuggaagcuguguc

SEQ ID NO: 2382521 - RNA, 15 nt, Human
cuccuggaagcugug

SEQ ID NO: 2382522 - RNA, 14 nt, Human
cuccuggaaauauu

SEQ ID NO: 2382523 - RNA, 17 nt, Human
cuccuggaaaggcucag

SEQ ID NO: 2382524 - RNA, 19 nt, Human
cuccuggaaaggcucaguc

SEQ ID NO: 2382525 - RNA, 18 nt, Human
cuccuggaaaggcucagu

SEQ ID NO: 2382526 - RNA, 24 nt, Human
cuccuggaaaggcucagucucagg

SEQ ID NO: 2382527 - RNA, 23 nt, Human
cuccuggaaaggcucagucucag

SEQ ID NO: 2382528 - RNA, 22 nt, Human
cuccuggaaaggcucagucuca

SEQ ID NO: 2382529 - RNA, 20 nt, Human
cuccuggaaaggcucagucu

SEQ ID NO: 2382530 - RNA, 21 nt, Human
cuccugugugugcgccuacag

SEQ ID NO: 2382531 - RNA, 23 nt, Human
cuccuggaagcuguguccuugca

SEQ ID NO: 2382532 - RNA, 20 nt, Human
cuccuggaagcuguguccuu

SEQ ID NO: 2382533 - RNA, 18 nt, Human
cuccuggacauuuuuuca

SEQ ID NO: 2382534 - RNA, 11 nt, Human
cuccuggacuc

SEQ ID NO: 2382535 - RNA, 23 nt, Human
cuccugugugugcgccuacagga

SEQ ID NO: 2382536 - RNA, 24 nt, Human
cuccugugugugcgccuacaggag

SEQ ID NO: 2382537 - RNA, 16 nt, Human
cuccuucccaucgcug

SEQ ID NO: 2382538 - RNA, 17 nt, Human
cuccuucccaucgcugu

SEQ ID NO: 2382539 - RNA, 19 nt, Human
cuccuuagucuucucauag

SEQ ID NO: 2382540 - RNA, 17 nt, Human
cuccuuagucuucucau

SEQ ID NO: 2382541 - RNA, 14 nt, Human
cuccuuccaguguc

SEQ ID NO: 2382542 - RNA, 13 nt, Human
cuccuucccaaag

SEQ ID NO: 2382543 - RNA, 22 nt, Human
cuccuucccaaaggacuccacc

SEQ ID NO: 2382544 - RNA, 23 nt, Human
cuccuucccaaaggacuccaccc

SEQ ID NO: 2382545 - RNA, 12 nt, Human
cuccuggacucc

SEQ ID NO: 2382546 - RNA, 21 nt, Human
cuccuuagagacaucaaaauc

SEQ ID NO: 2382547 - RNA, 20 nt, Human
cuccuuagagacaucaaaau

SEQ ID NO: 2382548 - RNA, 16 nt, Human
cuccuuagucuucuca

SEQ ID NO: 2382549 - RNA, 22 nt, Human
cuccuuaucaaaggacaccauu

SEQ ID NO: 2382550 - RNA, 17 nt, Human
cuccuuaucaaaggaca

SEQ ID NO: 2382551 - RNA, 21 nt, Human
cuccugccucagccuccugag

SEQ ID NO: 2382552 - RNA, 19 nt, Human
cuccugccucagccucccg

SEQ ID NO: 2382553 - RNA, 18 nt, Human
cuccugccucgaacuggc

SEQ ID NO: 2382554 - RNA, 20 nt, Human
cuccugccucgaacuggcug

SEQ ID NO: 2382555 - RNA, 21 nt, Human
cuccugccucgaacuggcugc

SEQ ID NO: 2382556 - RNA, 22 nt, Human
cuccugccucgaacuggcugca

SEQ ID NO: 2382557 - RNA, 13 nt, Human
cuccugcugcacc

SEQ ID NO: 2382558 - RNA, 18 nt, Human
cuccugcuacucuguucc

SEQ ID NO: 2382559 - RNA, 14 nt, Human
cuccugcugcacca

SEQ ID NO: 2382560 - RNA, 18 nt, Human
cuccugcugcaccaaccc

SEQ ID NO: 2382561 - RNA, 19 nt, Human
cuccugcugcaccaaccca

SEQ ID NO: 2382562 - RNA, 21 nt, Human
cuccugcugcaccaacccagc

SEQ ID NO: 2382563 - RNA, 16 nt, Human
cuccugcugcagaggg

SEQ ID NO: 2382564 - RNA, 22 nt, Human
cuccugcugcaccaacccagcc

SEQ ID NO: 2382565 - RNA, 12 nt, Human
cuccugcugcag

SEQ ID NO: 2382566 - RNA, 17 nt, Human
cuccugccucagccucc

SEQ ID NO: 2382567 - RNA, 16 nt, Human
cuccugccucagccuc

SEQ ID NO: 2382568 - RNA, 12 nt, Human
cuccugccucag

SEQ ID NO: 2382569 - RNA, 11 nt, Human
cuccugccuca

SEQ ID NO: 2382570 - RNA, 13 nt, Human
cuccugccuacuc

SEQ ID NO: 2382571 - RNA, 18 nt, Human
cuccugccgcagagcugg

SEQ ID NO: 2382572 - RNA, 16 nt, Human
cuccugccuacucacg

SEQ ID NO: 2382573 - RNA, 14 nt, Human
cuccugccuacuca

SEQ ID NO: 2382574 - RNA, 23 nt, Human
cuccucucccauugucccucugc

SEQ ID NO: 2382575 - RNA, 14 nt, Human
cuccucuccccagc

SEQ ID NO: 2382576 - RNA, 14 nt, Human
cuccugccgcagag

SEQ ID NO: 2382577 - RNA, 16 nt, Human
cuccugccgcagagcu

SEQ ID NO: 2382578 - RNA, 17 nt, Human
cuccugccgcagagcug

SEQ ID NO: 2382579 - RNA, 13 nt, Human
cuccucuccccag

SEQ ID NO: 2382580 - RNA, 15 nt, Human
cuccucuccccagca

SEQ ID NO: 2382581 - RNA, 17 nt, Human
cugagggagccuggccc

SEQ ID NO: 2382582 - RNA, 13 nt, Human
cugagggagccug

SEQ ID NO: 2382583 - RNA, 18 nt, Human
cugagggaccagccaaga

SEQ ID NO: 2382584 - RNA, 14 nt, Human
cugagggacucuga

SEQ ID NO: 2382585 - RNA, 16 nt, Human
cugagggacucugaag

SEQ ID NO: 2382586 - RNA, 20 nt, Human
cugagggacucugaagccuc

SEQ ID NO: 2382587 - RNA, 12 nt, Human
cugagggagccu

SEQ ID NO: 2382588 - RNA, 21 nt, Human
cugagggacucugaagccucu

SEQ ID NO: 2382589 - RNA, 22 nt, Human
cugagggacucugaagccucug

SEQ ID NO: 2382590 - RNA, 11 nt, Human
cugaggcugua

SEQ ID NO: 2382591 - RNA, 21 nt, Human
cugaggcuggauccuagccuu

SEQ ID NO: 2382592 - RNA, 13 nt, Human
cugaggcuguggu

SEQ ID NO: 2382593 - RNA, 14 nt, Human
cugaggcugugguc

SEQ ID NO: 2382594 - RNA, 17 nt, Human
cugaggcuguggucaca

SEQ ID NO: 2382595 - RNA, 19 nt, Human
cugaggcuguggucacagc

SEQ ID NO: 2382596 - RNA, 20 nt, Human
cugaggcuguggucacagcg

SEQ ID NO: 2382597 - RNA, 18 nt, Human
cugaggcuuccagagagu

SEQ ID NO: 2382598 - RNA, 14 nt, Human
cugaggcuguagga

SEQ ID NO: 2382599 - RNA, 14 nt, Human
cugaggcuuccaga

SEQ ID NO: 2382600 - RNA, 19 nt, Human
cugagucaugaucucccug

SEQ ID NO: 2382601 - RNA, 18 nt, Human
cugagucaugaucucccu

SEQ ID NO: 2382602 - RNA, 23 nt, Human
cugagucacccuaccugugccug

SEQ ID NO: 2382603 - RNA, 22 nt, Human
cugagucacccuaccugugccu

SEQ ID NO: 2382604 - RNA, 20 nt, Human
cugagggauggacugaugcu

SEQ ID NO: 2382605 - RNA, 22 nt, Human
cugagucacccaugaagacagg

SEQ ID NO: 2382606 - RNA, 23 nt, Human
cugagggaggaggccaccucucc

SEQ ID NO: 2382607 - RNA, 16 nt, Human
cugagggauggacuga

SEQ ID NO: 2382608 - RNA, 15 nt, Human
cugagggaucuuuac

SEQ ID NO: 2382609 - RNA, 21 nt, Human
cugagggaggaggccaccucu

SEQ ID NO: 2382610 - RNA, 22 nt, Human
cugagggaggaggccaccucuc

SEQ ID NO: 2382611 - RNA, 23 nt, Human
cugagggacucugaagccucugg

SEQ ID NO: 2382612 - RNA, 13 nt, Human
cugagggaggagg

SEQ ID NO: 2382613 - RNA, 15 nt, Human
cugagggaggaggcc

SEQ ID NO: 2382614 - RNA, 16 nt, Human
cugagggaggaggcca

SEQ ID NO: 2382615 - RNA, 17 nt, Human
cugagggaggaggccac

SEQ ID NO: 2382616 - RNA, 18 nt, Human
cugagggaggaggccacc

SEQ ID NO: 2382617 - RNA, 19 nt, Human
cugagggaggaggccaccu

SEQ ID NO: 2382618 - RNA, 20 nt, Human
cugagggaggaggccaccuc

SEQ ID NO: 2382619 - RNA, 20 nt, Human
cugaggcucuuucugggcca

SEQ ID NO: 2382620 - RNA, 18 nt, Human
cugaggcucuuucugggc

SEQ ID NO: 2382621 - RNA, 15 nt, Human
cugaggcugagacug

SEQ ID NO: 2382622 - RNA, 15 nt, Human
cugaggcuggauccu

SEQ ID NO: 2382623 - RNA, 13 nt, Human
cugaggcuggcac

SEQ ID NO: 2382624 - RNA, 11 nt, Human
cugaggcuggc

SEQ ID NO: 2382625 - RNA, 13 nt, Human
cugaggcugggcu

SEQ ID NO: 2382626 - RNA, 20 nt, Human
cugaggcuggcacaggacau

SEQ ID NO: 2382627 - RNA, 19 nt, Human
cugaggcuggcacaggaca

SEQ ID NO: 2382628 - RNA, 18 nt, Human
cugaggcuggcacaggac

SEQ ID NO: 2382629 - RNA, 17 nt, Human
cugaggcuggcacagga

SEQ ID NO: 2382630 - RNA, 15 nt, Human
cugaggcugggcucc

SEQ ID NO: 2382631 - RNA, 16 nt, Human
cugaggcugggcuccc

SEQ ID NO: 2382632 - RNA, 17 nt, Human
cugaggcugggcucccu

SEQ ID NO: 2382633 - RNA, 22 nt, Human
cugaggcugggcucccuuccca

SEQ ID NO: 2382634 - RNA, 18 nt, Human
cugaggcggguggaucac

SEQ ID NO: 2382635 - RNA, 16 nt, Human
cugaggcucagggaaa

SEQ ID NO: 2382636 - RNA, 18 nt, Human
cugaggccuuaucauuca

SEQ ID NO: 2382637 - RNA, 17 nt, Human
cugaggcgggagaauca

SEQ ID NO: 2382638 - RNA, 15 nt, Human
cugaggcuccacuug

SEQ ID NO: 2382639 - RNA, 16 nt, Human
cugaggcucuuucugg

SEQ ID NO: 2382640 - RNA, 15 nt, Human
cugaggcucuuucug

SEQ ID NO: 2382641 - RNA, 17 nt, Human
cugaggcuccugugcua

SEQ ID NO: 2382642 - RNA, 20 nt, Human
cugaggcuccugugcuacuu

SEQ ID NO: 2382643 - RNA, 22 nt, Human
cugaggcucugacccagugaga

SEQ ID NO: 2382644 - RNA, 23 nt, Human
cugaggcucugacccagugagau

SEQ ID NO: 2382645 - RNA, 21 nt, Human
cugaggcuccacuuggucugu

SEQ ID NO: 2382646 - RNA, 17 nt, Human
cugaggccugagcgcuc

SEQ ID NO: 2382647 - RNA, 23 nt, Human
cugaggccuaaaaguaaacauua

SEQ ID NO: 2382648 - RNA, 15 nt, Human
cugaggccuccagcu

SEQ ID NO: 2382649 - RNA, 18 nt, Human
cugaggccugagcgcucc

SEQ ID NO: 2382650 - RNA, 22 nt, Human
cugaggccugagcgcuccugcc

SEQ ID NO: 2382651 - RNA, 12 nt, Human
cugaggccugga

SEQ ID NO: 2382652 - RNA, 15 nt, Human
cugaggccuggacuu

SEQ ID NO: 2382653 - RNA, 19 nt, Human
cugaggccuggacuuuccu

SEQ ID NO: 2382654 - RNA, 20 nt, Human
cugaggccuggacuuuccug

SEQ ID NO: 2382655 - RNA, 22 nt, Human
cugaggccuggacuuuccugca

SEQ ID NO: 2382656 - RNA, 14 nt, Human
cugaggccugggcc

SEQ ID NO: 2382657 - RNA, 15 nt, Human
cugaggccugggccg

SEQ ID NO: 2382658 - RNA, 19 nt, Human
cugaggccugggccgcugc

SEQ ID NO: 2382659 - RNA, 22 nt, Human
cugaggccugggccgcugccac

SEQ ID NO: 2382660 - RNA, 23 nt, Human
cugaggccugggccgcugccacg

SEQ ID NO: 2382661 - RNA, 19 nt, Human
cugagccccugggacugcu

SEQ ID NO: 2382662 - RNA, 16 nt, Human
cugagccccugggacu

SEQ ID NO: 2382663 - RNA, 22 nt, Human
cugagccccugggacugcugcu

SEQ ID NO: 2382664 - RNA, 12 nt, Human
cugagccccugu

SEQ ID NO: 2382665 - RNA, 15 nt, Human
cugagccccuacccc

SEQ ID NO: 2382666 - RNA, 17 nt, Human
cugagccccuaccccac

SEQ ID NO: 2382667 - RNA, 19 nt, Human
cugagccccuaccccacac

SEQ ID NO: 2382668 - RNA, 22 nt, Human
cugagccccuaccccacaccag

SEQ ID NO: 2382669 - RNA, 23 nt, Human
cugagccccgcagaccuccccag

SEQ ID NO: 2382670 - RNA, 21 nt, Human
cugagccccgcagaccucccc

SEQ ID NO: 2382671 - RNA, 22 nt, Human
cugagccccgcagaccucccca

SEQ ID NO: 2382672 - RNA, 13 nt, Human
cugagccccuacc

SEQ ID NO: 2382673 - RNA, 14 nt, Human
cugagccccuaccc

SEQ ID NO: 2382674 - RNA, 21 nt, Human
cugagcccccccaacacugug

SEQ ID NO: 2382675 - RNA, 22 nt, Human
cugagcccccccaacacugugc

SEQ ID NO: 2382676 - RNA, 17 nt, Human
cugagccccgcagaccu

SEQ ID NO: 2382677 - RNA, 18 nt, Human
cugagccccgcagaccuc

SEQ ID NO: 2382678 - RNA, 19 nt, Human
cugaggccuaaaaguaaac

SEQ ID NO: 2382679 - RNA, 21 nt, Human
cugaggccuaaaaguaaacau

SEQ ID NO: 2382680 - RNA, 20 nt, Human
cugagcccgggcugccuggg

SEQ ID NO: 2382681 - RNA, 21 nt, Human
cugagcccgggcugccugggc

SEQ ID NO: 2382682 - RNA, 22 nt, Human
cugagcccgggcugccugggcu

SEQ ID NO: 2382683 - RNA, 23 nt, Human
cugagcccgggcugccugggcug

SEQ ID NO: 2382684 - RNA, 24 nt, Human
cugaggcccuucucuccagccccu

SEQ ID NO: 2382685 - RNA, 23 nt, Human
cugagccccugucuagagaggga

SEQ ID NO: 2382686 - RNA, 13 nt, Human
cugagccccuucc

SEQ ID NO: 2382687 - RNA, 14 nt, Human
cugagccccuuccu

SEQ ID NO: 2382688 - RNA, 16 nt, Human
cugagccccuuccuug

SEQ ID NO: 2382689 - RNA, 22 nt, Human
cugagccccugucuagagaggg

SEQ ID NO: 2382690 - RNA, 16 nt, Human
cugagccccugucuag

SEQ ID NO: 2382691 - RNA, 15 nt, Human
cugagccccugucua

SEQ ID NO: 2382692 - RNA, 13 nt, Human
cugagccccuguc

SEQ ID NO: 2382693 - RNA, 19 nt, Human
cugagccccuuccuugcuc

SEQ ID NO: 2382694 - RNA, 20 nt, Human
cugagccccuuccuugcucu

SEQ ID NO: 2382695 - RNA, 14 nt, Human
cugagcccgggcug

SEQ ID NO: 2382696 - RNA, 15 nt, Human
cugagcccgggcugc

SEQ ID NO: 2382697 - RNA, 16 nt, Human
cugagcccgggcugcc

SEQ ID NO: 2382698 - RNA, 17 nt, Human
cugagcccgggcugccu

SEQ ID NO: 2382699 - RNA, 18 nt, Human
cugagcccgggcugccug

SEQ ID NO: 2382700 - RNA, 19 nt, Human
cugagcccgggcugccugg

SEQ ID NO: 2382701 - RNA, 20 nt, Human
cugaucagagccgugguccu

SEQ ID NO: 2382702 - RNA, 17 nt, Human
cugaucagaccacggcu

SEQ ID NO: 2382703 - RNA, 14 nt, Human
cugaucagagccgu

SEQ ID NO: 2382704 - RNA, 13 nt, Human
cugaucagucuaa

SEQ ID NO: 2382705 - RNA, 15 nt, Human
cugaucccucuacag

SEQ ID NO: 2382706 - RNA, 20 nt, Human
cugauccuaguuccaccauc

SEQ ID NO: 2382707 - RNA, 21 nt, Human
cugauccuaguuccaccauca

SEQ ID NO: 2382708 - RNA, 12 nt, Human
cugauccuggag

SEQ ID NO: 2382709 - RNA, 17 nt, Human
cugauccuggaggccca

SEQ ID NO: 2382710 - RNA, 15 nt, Human
cugauccuggaggcc

SEQ ID NO: 2382711 - RNA, 14 nt, Human
cugauggugcaaug

SEQ ID NO: 2382712 - RNA, 15 nt, Human
cugauggugcaauga

SEQ ID NO: 2382713 - RNA, 16 nt, Human
cugauggugcaaugac

SEQ ID NO: 2382714 - RNA, 14 nt, Human
cugauaauaauuga

SEQ ID NO: 2382715 - RNA, 15 nt, Human
cugauaauuccagug

SEQ ID NO: 2382716 - RNA, 21 nt, Human
cugauauauguguuuuucaca

SEQ ID NO: 2382717 - RNA, 15 nt, Human
cugauauauguguuu

SEQ ID NO: 2382718 - RNA, 22 nt, Human
cugauauauguguuuuucacau

SEQ ID NO: 2382719 - RNA, 14 nt, Human
cugauacccagagc

SEQ ID NO: 2382720 - RNA, 18 nt, Human
cugauauauuuuacaauu

SEQ ID NO: 2382721 - RNA, 16 nt, Human
cugauauauuuuacaa

SEQ ID NO: 2382722 - RNA, 16 nt, Human
cugauaugauuuaaaa

SEQ ID NO: 2382723 - RNA, 18 nt, Human
cugauaugauuuaaaaca

SEQ ID NO: 2382724 - RNA, 19 nt, Human
cugauaugauuuaaaacau

SEQ ID NO: 2382725 - RNA, 21 nt, Human
cugauaugauuuaaaacaugu

SEQ ID NO: 2382726 - RNA, 23 nt, Human
cugauaugauuuaaaacauguaa

SEQ ID NO: 2382727 - RNA, 22 nt, Human
cugauaugauuuaaaacaugua

SEQ ID NO: 2382728 - RNA, 22 nt, Human
cugaucaagucaccggagcuuu

SEQ ID NO: 2382729 - RNA, 14 nt, Human
cugaucaaugacag

SEQ ID NO: 2382730 - RNA, 18 nt, Human
cugaucaagucaccggag

SEQ ID NO: 2382731 - RNA, 15 nt, Human
cugaucaaugacaga

SEQ ID NO: 2382732 - RNA, 17 nt, Human
cugaucaaugacagagc

SEQ ID NO: 2382733 - RNA, 15 nt, Human
cugaucaccugcccu

SEQ ID NO: 2382734 - RNA, 18 nt, Human
cugauauuccaugaaugu

SEQ ID NO: 2382735 - RNA, 19 nt, Human
cugauauuccaugaaugua

SEQ ID NO: 2382736 - RNA, 20 nt, Human
cugauauucaaauggacaaa

SEQ ID NO: 2382737 - RNA, 19 nt, Human
cugauauugccgcacuagg

SEQ ID NO: 2382738 - RNA, 22 nt, Human
cugauauugccgcacuagggga

SEQ ID NO: 2382739 - RNA, 22 nt, Human
cugauauuucccuccccugggg

SEQ ID NO: 2382740 - RNA, 17 nt, Human
cugauauuuuaccucuu

SEQ ID NO: 2382741 - RNA, 23 nt, Human
cugauauuuuaccucuuauugca

SEQ ID NO: 2382742 - RNA, 13 nt, Human
cugagugaaccug

SEQ ID NO: 2382743 - RNA, 15 nt, Human
cugagugaaccugua

SEQ ID NO: 2382744 - RNA, 17 nt, Human
cugaguuacauugucau

SEQ ID NO: 2382745 - RNA, 21 nt, Human
cugagucugcuauauuuucau

SEQ ID NO: 2382746 - RNA, 22 nt, Human
cugagucccaggagcugcccag

SEQ ID NO: 2382747 - RNA, 17 nt, Human
cugagucugcuauauuu

SEQ ID NO: 2382748 - RNA, 22 nt, Human
cugagucugcuauauuuucaug

SEQ ID NO: 2382749 - RNA, 18 nt, Human
cugaguuccuagccaccg

SEQ ID NO: 2382750 - RNA, 17 nt, Human
cugaguuccuagccacc

SEQ ID NO: 2382751 - RNA, 16 nt, Human
cugaguuccuagccac

SEQ ID NO: 2382752 - RNA, 15 nt, Human
cugaguuccuagcca

SEQ ID NO: 2382753 - RNA, 22 nt, Human
cugagucaugaucucccugccg

SEQ ID NO: 2382754 - RNA, 18 nt, Human
cugagucauggccgggug

SEQ ID NO: 2382755 - RNA, 21 nt, Human
cugagucaugaucucccugcc

SEQ ID NO: 2382756 - RNA, 20 nt, Human
cugagucaugaucucccugc

SEQ ID NO: 2382757 - RNA, 21 nt, Human
cugaguccaagaggguccuuu

SEQ ID NO: 2382758 - RNA, 16 nt, Human
cugagucccaggagcu

SEQ ID NO: 2382759 - RNA, 17 nt, Human
cugagucccaggagcug

SEQ ID NO: 2382760 - RNA, 21 nt, Human
cugagucccaggagcugccca

SEQ ID NO: 2382761 - RNA, 17 nt, Human
cugagucugaaggcugg

SEQ ID NO: 2382762 - RNA, 20 nt, Human
cugagucccaggcugagccu

SEQ ID NO: 2382763 - RNA, 18 nt, Human
cugagucugaaggcuggg

SEQ ID NO: 2382764 - RNA, 19 nt, Human
cugagucugaaggcugggu

SEQ ID NO: 2382765 - RNA, 18 nt, Human
cugaguuucauucuccug

SEQ ID NO: 2382766 - RNA, 21 nt, Human
cugaguuucauucuccugccu

SEQ ID NO: 2382767 - RNA, 19 nt, Human
cugaguuucauucuccugc

SEQ ID NO: 2382768 - RNA, 20 nt, Human
cugaguuucauucuccugcc

SEQ ID NO: 2382769 - RNA, 21 nt, Human
cugaguugguguugacaugug

SEQ ID NO: 2382770 - RNA, 17 nt, Human
cugaguuucauucuccu

SEQ ID NO: 2382771 - RNA, 20 nt, Human
cugaguugacuugacagaac

SEQ ID NO: 2382772 - RNA, 16 nt, Human
cugaguuccugcaugc

SEQ ID NO: 2382773 - RNA, 14 nt, Human
cugaguuccugcau

SEQ ID NO: 2382774 - RNA, 16 nt, Human
cugauaacaaccugga

SEQ ID NO: 2382775 - RNA, 17 nt, Human
cugauaacaaccuggag

SEQ ID NO: 2382776 - RNA, 18 nt, Human
cugauaacaaccuggaga

SEQ ID NO: 2382777 - RNA, 22 nt, Human
cugauaacaaccuggagaccag

SEQ ID NO: 2382778 - RNA, 21 nt, Human
cugauaacuagauggugcuga

SEQ ID NO: 2382779 - RNA, 20 nt, Human
cugauaacuagauggugcug

SEQ ID NO: 2382780 - RNA, 19 nt, Human
cugauaacuagauggugcu

SEQ ID NO: 2382781 - RNA, 18 nt, Human
cugauaacuagauggugc

SEQ ID NO: 2382782 - RNA, 24 nt, Human
cugauaacuagauggugcugagaa

SEQ ID NO: 2382783 - RNA, 23 nt, Human
cugauaacuagauggugcugaga

SEQ ID NO: 2382784 - RNA, 19 nt, Human
cugauaagagaaucaacau

SEQ ID NO: 2382785 - RNA, 23 nt, Human
cugcacucuaacccuaggcauca

SEQ ID NO: 2382786 - RNA, 13 nt, Human
cugcacucugugc

SEQ ID NO: 2382787 - RNA, 14 nt, Human
cugcacucugugcc

SEQ ID NO: 2382788 - RNA, 15 nt, Human
cugcacucugugccc

SEQ ID NO: 2382789 - RNA, 16 nt, Human
cugcacucugugccca

SEQ ID NO: 2382790 - RNA, 19 nt, Human
cugcaccccuucucuccuc

SEQ ID NO: 2382791 - RNA, 20 nt, Human
cugcaccccuucucuccucc

SEQ ID NO: 2382792 - RNA, 21 nt, Human
cugcaccccuucucuccuccc

SEQ ID NO: 2382793 - RNA, 16 nt, Human
cugcacuccccugcug

SEQ ID NO: 2382794 - RNA, 17 nt, Human
cugcacuccccugcugg

SEQ ID NO: 2382795 - RNA, 18 nt, Human
cugcacuugcagacucua

SEQ ID NO: 2382796 - RNA, 19 nt, Human
cugcacugaugcugccccu

SEQ ID NO: 2382797 - RNA, 18 nt, Human
cugcacugaugcugcccc

SEQ ID NO: 2382798 - RNA, 17 nt, Human
cugcacugaugcugccc

SEQ ID NO: 2382799 - RNA, 15 nt, Human
cugcacugaugcugc

SEQ ID NO: 2382800 - RNA, 19 nt, Human
cugcacucuuaagcuuccg

SEQ ID NO: 2382801 - RNA, 17 nt, Human
cugcacucugugcccau

SEQ ID NO: 2382802 - RNA, 18 nt, Human
cugcacucugugcccaug

SEQ ID NO: 2382803 - RNA, 20 nt, Human
cugcacucugugcccauggg

SEQ ID NO: 2382804 - RNA, 21 nt, Human
cugcacucugugcccaugggc

SEQ ID NO: 2382805 - RNA, 22 nt, Human
cugcacucugugcccaugggca

SEQ ID NO: 2382806 - RNA, 14 nt, Human
cugcacugagcaga

SEQ ID NO: 2382807 - RNA, 18 nt, Human
cugcacugagcagagucu

SEQ ID NO: 2382808 - RNA, 22 nt, Human
cugcaccggcuggccuggcccc

SEQ ID NO: 2382809 - RNA, 14 nt, Human
cugcacccucaggc

SEQ ID NO: 2382810 - RNA, 13 nt, Human
cugcacccucagg

SEQ ID NO: 2382811 - RNA, 12 nt, Human
cugcaccgggcc

SEQ ID NO: 2382812 - RNA, 23 nt, Human
cugcaccggcuggccuggccccu

SEQ ID NO: 2382813 - RNA, 15 nt, Human
cugcacuccccugcu

SEQ ID NO: 2382814 - RNA, 18 nt, Human
cugcacaauaaaaauguu

SEQ ID NO: 2382815 - RNA, 15 nt, Human
cugcacaauaaaaau

SEQ ID NO: 2382816 - RNA, 22 nt, Human
cugcacaagcugcacccucagg

SEQ ID NO: 2382817 - RNA, 13 nt, Human
cugcacacagcac

SEQ ID NO: 2382818 - RNA, 15 nt, Human
cugcacacaccucag

SEQ ID NO: 2382819 - RNA, 19 nt, Human
cugcacacaccucagaggc

SEQ ID NO: 2382820 - RNA, 22 nt, Human
cugcacaauaaaaauguuuaac

SEQ ID NO: 2382821 - RNA, 19 nt, Human
cugcaagugacaucucuuu

SEQ ID NO: 2382822 - RNA, 18 nt, Human
cugcaauaaggggagagu

SEQ ID NO: 2382823 - RNA, 13 nt, Human
cugcacagaugga

SEQ ID NO: 2382824 - RNA, 12 nt, Human
cugcacagaugg

SEQ ID NO: 2382825 - RNA, 21 nt, Human
cugcacagagcucuccagcuc

SEQ ID NO: 2382826 - RNA, 23 nt, Human
cugcacagagcucuccagcucca

SEQ ID NO: 2382827 - RNA, 13 nt, Human
cugcacagagcuc

SEQ ID NO: 2382828 - RNA, 14 nt, Human
cugcacagagcucu

SEQ ID NO: 2382829 - RNA, 18 nt, Human
cugcacagagcucuccag

SEQ ID NO: 2382830 - RNA, 20 nt, Human
cugcacagagcucuccagcu

SEQ ID NO: 2382831 - RNA, 20 nt, Human
cugcacagauggauuugccu

SEQ ID NO: 2382832 - RNA, 23 nt, Human
cugcacagauggauuugccugug

SEQ ID NO: 2382833 - RNA, 22 nt, Human
cugcacagugcaucucagccca

SEQ ID NO: 2382834 - RNA, 18 nt, Human
cugcacaguuuucuggcu

SEQ ID NO: 2382835 - RNA, 22 nt, Human
cugcacacgcuccuuccucuga

SEQ ID NO: 2382836 - RNA, 20 nt, Human
cugcacacaccucagaggcu

SEQ ID NO: 2382837 - RNA, 11 nt, Human
cugcacagagc

SEQ ID NO: 2382838 - RNA, 20 nt, Human
cugcacacgcuccuuccucu

SEQ ID NO: 2382839 - RNA, 14 nt, Human
cugcacacagcacg

SEQ ID NO: 2382840 - RNA, 20 nt, Human
cugcacaugcagcugcaccc

SEQ ID NO: 2382841 - RNA, 21 nt, Human
cugcacaugcagcugcacccu

SEQ ID NO: 2382842 - RNA, 14 nt, Human
cugcacaugucuug

SEQ ID NO: 2382843 - RNA, 16 nt, Human
cugcacaugucuugua

SEQ ID NO: 2382844 - RNA, 20 nt, Human
cugcacccccuccugcugca

SEQ ID NO: 2382845 - RNA, 21 nt, Human
cugcacaugucuuguacaugu

SEQ ID NO: 2382846 - RNA, 23 nt, Human
cugcacaugucuuguacaugugu

SEQ ID NO: 2382847 - RNA, 22 nt, Human
cugcacaugacucggggguggg

SEQ ID NO: 2382848 - RNA, 23 nt, Human
cugcacaugacucgggggugggg

SEQ ID NO: 2382849 - RNA, 22 nt, Human
cugcacaugaaucccacccaca

SEQ ID NO: 2382850 - RNA, 23 nt, Human
cugcacaugaaucccacccacau

SEQ ID NO: 2382851 - RNA, 21 nt, Human
cugcacaguuuucuggcugga

SEQ ID NO: 2382852 - RNA, 13 nt, Human
cugauuucacaac

SEQ ID NO: 2382853 - RNA, 21 nt, Human
cugauuuaggagaagccagga

SEQ ID NO: 2382854 - RNA, 22 nt, Human
cugauuuaggagaagccaggaa

SEQ ID NO: 2382855 - RNA, 20 nt, Human
cugauuuaggagaagccagg

SEQ ID NO: 2382856 - RNA, 18 nt, Human
cugauuuaggagaagcca

SEQ ID NO: 2382857 - RNA, 17 nt, Human
cugauuuaggagaagcc

SEQ ID NO: 2382858 - RNA, 16 nt, Human
cugauuuaggagaagc

SEQ ID NO: 2382859 - RNA, 17 nt, Human
cugauuguuucauugcg

SEQ ID NO: 2382860 - RNA, 23 nt, Human
cugauuguaacguugcuguggga

SEQ ID NO: 2382861 - RNA, 12 nt, Human
cugauuuacagu

SEQ ID NO: 2382862 - RNA, 21 nt, Human
cugauugugucucuugguccu

SEQ ID NO: 2382863 - RNA, 14 nt, Human
cugauuuccuuugg

SEQ ID NO: 2382864 - RNA, 12 nt, Human
cugauuucagga

SEQ ID NO: 2382865 - RNA, 16 nt, Human
cugauuugcaaaaaaa

SEQ ID NO: 2382866 - RNA, 11 nt, Human
cugauuugcug

SEQ ID NO: 2382867 - RNA, 11 nt, Human
cugauuugcaa

SEQ ID NO: 2382868 - RNA, 21 nt, Human
cugauuugcugggcaguuuuu

SEQ ID NO: 2382869 - RNA, 15 nt, Human
cugauggucagcucc

SEQ ID NO: 2382870 - RNA, 16 nt, Human
cugauggucagcuccc

SEQ ID NO: 2382871 - RNA, 18 nt, Human
cugauccuggaggcccag

SEQ ID NO: 2382872 - RNA, 14 nt, Human
cugauggucagcuc

SEQ ID NO: 2382873 - RNA, 17 nt, Human
cugauuggugcaacccu

SEQ ID NO: 2382874 - RNA, 19 nt, Human
cugauggucagcucccuuc

SEQ ID NO: 2382875 - RNA, 17 nt, Human
cugauugugucucuugg

SEQ ID NO: 2382876 - RNA, 13 nt, Human
cugauuguauuua

SEQ ID NO: 2382877 - RNA, 14 nt, Human
cugauuguaacguu

SEQ ID NO: 2382878 - RNA, 18 nt, Human
cugauuguaacguugcug

SEQ ID NO: 2382879 - RNA, 20 nt, Human
cugauuguaacguugcugug

SEQ ID NO: 2382880 - RNA, 21 nt, Human
cugauuguaacguugcugugg

SEQ ID NO: 2382881 - RNA, 17 nt, Human
cugauggugcaaugacc

SEQ ID NO: 2382882 - RNA, 19 nt, Human
cugauggugcaaugaccuu

SEQ ID NO: 2382883 - RNA, 20 nt, Human
cugauggugcaaugaccuuu

SEQ ID NO: 2382884 - RNA, 21 nt, Human
cugauggugcaaugaccuuuc

SEQ ID NO: 2382885 - RNA, 22 nt, Human
cugauuuuaacaauaacuacug

SEQ ID NO: 2382886 - RNA, 17 nt, Human
cugauuuuaacaauaac

SEQ ID NO: 2382887 - RNA, 14 nt, Human
cugauuuuaacaau

SEQ ID NO: 2382888 - RNA, 13 nt, Human
cugauuuuaacaa

SEQ ID NO: 2382889 - RNA, 12 nt, Human
cugauuuuaaca

SEQ ID NO: 2382890 - RNA, 14 nt, Human
cugauuuggaaaaa

SEQ ID NO: 2382891 - RNA, 18 nt, Human
cugauuuucaaagcuuuu

SEQ ID NO: 2382892 - RNA, 20 nt, Human
cugauuuuuuuuccuuuuaa

SEQ ID NO: 2382893 - RNA, 19 nt, Human
cugauuuuuuuuccuuuua

SEQ ID NO: 2382894 - RNA, 15 nt, Human
cugauuuuuuuuccu

SEQ ID NO: 2382895 - RNA, 21 nt, Human
cugauuuucaaagcuuuuucc

SEQ ID NO: 2382896 - RNA, 16 nt, Human
cugauuuuuuuuuccu

SEQ ID NO: 2382897 - RNA, 18 nt, Human
cugauuuuuuuuuccuuc

SEQ ID NO: 2382898 - RNA, 19 nt, Human
cugauuuuuuuuuccuuca

SEQ ID NO: 2382899 - RNA, 20 nt, Human
cugauuuuuuuuuccuucag

SEQ ID NO: 2382900 - RNA, 18 nt, Human
cugcaaacgcugccugcc

SEQ ID NO: 2382901 - RNA, 20 nt, Human
cugcaaacgcugccugccca

SEQ ID NO: 2382902 - RNA, 19 nt, Human
cugcaaacgcugccugccc

SEQ ID NO: 2382903 - RNA, 19 nt, Human
cugcaaacgcugccugccg

SEQ ID NO: 2382904 - RNA, 16 nt, Human
cugcaaacucacugcu

SEQ ID NO: 2382905 - RNA, 20 nt, Human
cugcaaacucacugcucaag

SEQ ID NO: 2382906 - RNA, 15 nt, Human
cugcaaagcccagcu

SEQ ID NO: 2382907 - RNA, 13 nt, Human
cugcaaagcccag

SEQ ID NO: 2382908 - RNA, 23 nt, Human
cugcaaagaucuguccucagccu

SEQ ID NO: 2382909 - RNA, 22 nt, Human
cugcaaagaucuguccucagcc

SEQ ID NO: 2382910 - RNA, 23 nt, Human
cugauuuuuuuuuccuucagugc

SEQ ID NO: 2382911 - RNA, 15 nt, Human
cugcaaaaauauuua

SEQ ID NO: 2382912 - RNA, 21 nt, Human
cugcaaaaauauuuauaaaac

SEQ ID NO: 2382913 - RNA, 20 nt, Human
cugcaaaaauauuuauaaaa

SEQ ID NO: 2382914 - RNA, 17 nt, Human
cugcaaaaauauuuaua

SEQ ID NO: 2382915 - RNA, 21 nt, Human
cugauuuuuuuuuccuucagu

SEQ ID NO: 2382916 - RNA, 22 nt, Human
cugauuuuuuuuuccuucagug

SEQ ID NO: 2382917 - RNA, 13 nt, Human
cugcccagcuugg

SEQ ID NO: 2382918 - RNA, 18 nt, Human
cugcccagaucccagaag

SEQ ID NO: 2382919 - RNA, 14 nt, Human
cugcccagcuuggg

SEQ ID NO: 2382920 - RNA, 22 nt, Human
cugcccaucacaggguugggcc

SEQ ID NO: 2382921 - RNA, 18 nt, Human
cugcccaucacaggguug

SEQ ID NO: 2382922 - RNA, 15 nt, Human
cugcccaucacaggg

SEQ ID NO: 2382923 - RNA, 15 nt, Human
cugccccaaacaaau

SEQ ID NO: 2382924 - RNA, 20 nt, Human
cugcccauggacaggcuggc

SEQ ID NO: 2382925 - RNA, 21 nt, Human
cugcccaugucgcgcucagca

SEQ ID NO: 2382926 - RNA, 22 nt, Human
cugcccaugucgcgcucagcau

SEQ ID NO: 2382927 - RNA, 18 nt, Human
cugcccauggacaggcug

SEQ ID NO: 2382928 - RNA, 16 nt, Human
cugcccauggacaggc

SEQ ID NO: 2382929 - RNA, 18 nt, Human
cugcccaucugggaaaau

SEQ ID NO: 2382930 - RNA, 20 nt, Human
cugcccaucugggaaaauac

SEQ ID NO: 2382931 - RNA, 18 nt, Human
cugcccaugccaccgcuu

SEQ ID NO: 2382932 - RNA, 12 nt, Human
cugcccaccugu

SEQ ID NO: 2382933 - RNA, 17 nt, Human
cugccaugcagggccuc

SEQ ID NO: 2382934 - RNA, 18 nt, Human
cugcccacucccugcaac

SEQ ID NO: 2382935 - RNA, 18 nt, Human
cugcccagaguugcuggg

SEQ ID NO: 2382936 - RNA, 23 nt, Human
cugcccagaccccucuggccagg

SEQ ID NO: 2382937 - RNA, 22 nt, Human
cugcccagaccccucuggccag

SEQ ID NO: 2382938 - RNA, 21 nt, Human
cugcccagaccccucuggcca

SEQ ID NO: 2382939 - RNA, 18 nt, Human
cugcccagaccccucugg

SEQ ID NO: 2382940 - RNA, 17 nt, Human
cugcccagccuccaagc

SEQ ID NO: 2382941 - RNA, 22 nt, Human
cugcccagaguugcugggagcu

SEQ ID NO: 2382942 - RNA, 17 nt, Human
cugcccaccuggccucu

SEQ ID NO: 2382943 - RNA, 18 nt, Human
cugcccaccuggccucug

SEQ ID NO: 2382944 - RNA, 19 nt, Human
cugcccaccuggccucugc

SEQ ID NO: 2382945 - RNA, 20 nt, Human
cugcccaccuggccucugca

SEQ ID NO: 2382946 - RNA, 22 nt, Human
cugcccaccuggccucugcacu

SEQ ID NO: 2382947 - RNA, 14 nt, Human
cugcccacucccug

SEQ ID NO: 2382948 - RNA, 15 nt, Human
cugcccacucccugc

SEQ ID NO: 2382949 - RNA, 16 nt, Human
cugcccacucccugca

SEQ ID NO: 2382950 - RNA, 15 nt, Human
cugccaugcagggcc

SEQ ID NO: 2382951 - RNA, 18 nt, Human
cugccaucuucccagcag

SEQ ID NO: 2382952 - RNA, 16 nt, Human
cugccaugcagggccu

SEQ ID NO: 2382953 - RNA, 15 nt, Human
cugccaugccagcuu

SEQ ID NO: 2382954 - RNA, 13 nt, Human
cugcccaccuggc

SEQ ID NO: 2382955 - RNA, 14 nt, Human
cugcccaccuggcc

SEQ ID NO: 2382956 - RNA, 15 nt, Human
cugcccaccuggccu

SEQ ID NO: 2382957 - RNA, 23 nt, Human
cugccacuuugguacauggccag

SEQ ID NO: 2382958 - RNA, 17 nt, Human
cugccaggcaggggugg

SEQ ID NO: 2382959 - RNA, 20 nt, Human
cugccaggcagggguggggg

SEQ ID NO: 2382960 - RNA, 13 nt, Human
cugccaggccagc

SEQ ID NO: 2382961 - RNA, 15 nt, Human
cugccaggccagccu

SEQ ID NO: 2382962 - RNA, 16 nt, Human
cugccaggccagccuc

SEQ ID NO: 2382963 - RNA, 17 nt, Human
cugccaggccagccucc

SEQ ID NO: 2382964 - RNA, 18 nt, Human
cugccaggccagccuccg

SEQ ID NO: 2382965 - RNA, 19 nt, Human
cugccaucuuaguuuggau

SEQ ID NO: 2382966 - RNA, 19 nt, Human
cugccaggccagccuccga

SEQ ID NO: 2382967 - RNA, 20 nt, Human
cugccaggccagccuccgag

SEQ ID NO: 2382968 - RNA, 22 nt, Human
cugccaggccagccuccgagag

SEQ ID NO: 2382969 - RNA, 23 nt, Human
cugccaggccagccuccgagagg

SEQ ID NO: 2382970 - RNA, 14 nt, Human
cugccaugccagcu

SEQ ID NO: 2382971 - RNA, 22 nt, Human
cugccaucuuaguuuggauucu

SEQ ID NO: 2382972 - RNA, 23 nt, Human
cugccaucuuaguuuggauucuu

SEQ ID NO: 2382973 - RNA, 14 nt, Human
cugccaucuuccca

SEQ ID NO: 2382974 - RNA, 15 nt, Human
cugccaucuucccag

SEQ ID NO: 2382975 - RNA, 16 nt, Human
cugccaucuucccagc

SEQ ID NO: 2382976 - RNA, 17 nt, Human
cugccaucuucccagca

SEQ ID NO: 2382977 - RNA, 12 nt, Human
cugccacucaca

SEQ ID NO: 2382978 - RNA, 23 nt, Human
cugccacucaggcccaaagccuc

SEQ ID NO: 2382979 - RNA, 16 nt, Human
cugccacucaggccca

SEQ ID NO: 2382980 - RNA, 13 nt, Human
cugccacucacac

SEQ ID NO: 2382981 - RNA, 15 nt, Human
cugccacucacacag

SEQ ID NO: 2382982 - RNA, 16 nt, Human
cugccacucacuaggc

SEQ ID NO: 2382983 - RNA, 18 nt, Human
cugccacucacacagcca

SEQ ID NO: 2382984 - RNA, 20 nt, Human
cugccacucacacagccagg

SEQ ID NO: 2382985 - RNA, 19 nt, Human
cugccacuuugguacaugg

SEQ ID NO: 2382986 - RNA, 13 nt, Human
cugccacuuccca

SEQ ID NO: 2382987 - RNA, 16 nt, Human
cugccacuucccaggu

SEQ ID NO: 2382988 - RNA, 24 nt, Human
cugccacucacacagccaggugcc

SEQ ID NO: 2382989 - RNA, 19 nt, Human
cugccacucacuaggcccc

SEQ ID NO: 2382990 - RNA, 13 nt, Human
cugccaggcaugg

SEQ ID NO: 2382991 - RNA, 11 nt, Human
cugccaggcau

SEQ ID NO: 2382992 - RNA, 21 nt, Human
cugcauguaaacacgccugca

SEQ ID NO: 2382993 - RNA, 18 nt, Human
cugccaaugggagcucau

SEQ ID NO: 2382994 - RNA, 19 nt, Human
cugccaaugggagcucaug

SEQ ID NO: 2382995 - RNA, 18 nt, Human
cugccaccuggggcaguc

SEQ ID NO: 2382996 - RNA, 16 nt, Human
cugccaccuggggcag

SEQ ID NO: 2382997 - RNA, 15 nt, Human
cugccaccuggggca

SEQ ID NO: 2382998 - RNA, 14 nt, Human
cugccaccuggggc

SEQ ID NO: 2382999 - RNA, 15 nt, Human
cugccaccugcugcu

SEQ ID NO: 2383000 - RNA, 24 nt, Human
cugccacacgucugacccucucca

SEQ ID NO: 2383001 - RNA, 23 nt, Human
cugccacacgucugacccucucc

SEQ ID NO: 2383002 - RNA, 22 nt, Human
cugccacacgucugacccucuc

SEQ ID NO: 2383003 - RNA, 15 nt, Human
cugccacaccugagc

SEQ ID NO: 2383004 - RNA, 16 nt, Human
cugccacaccugagcc

SEQ ID NO: 2383005 - RNA, 13 nt, Human
cugccacacaaac

SEQ ID NO: 2383006 - RNA, 15 nt, Human
cugccacacaaacgu

SEQ ID NO: 2383007 - RNA, 12 nt, Human
cugccacacagg

SEQ ID NO: 2383008 - RNA, 22 nt, Human
cugccacacaaacguauguaaa

SEQ ID NO: 2383009 - RNA, 23 nt, Human
cugccacacaaacguauguaaau

SEQ ID NO: 2383010 - RNA, 21 nt, Human
cugcaucuuggggacaucucu

SEQ ID NO: 2383011 - RNA, 20 nt, Human
cugcaugccuggucuuuccu

SEQ ID NO: 2383012 - RNA, 22 nt, Human
cugcaugccuggucuuuccucu

SEQ ID NO: 2383013 - RNA, 23 nt, Human
cugcaugccuggucuuuccucug

SEQ ID NO: 2383014 - RNA, 23 nt, Human
cugcaugcgagugcucauuucag

SEQ ID NO: 2383015 - RNA, 14 nt, Human
cugcaugcggccca

SEQ ID NO: 2383016 - RNA, 15 nt, Human
cugcaugcggcccag

SEQ ID NO: 2383017 - RNA, 16 nt, Human
cugcaugcggcccagc

SEQ ID NO: 2383018 - RNA, 17 nt, Human
cugcaugcggcccagcc

SEQ ID NO: 2383019 - RNA, 18 nt, Human
cugcaugcggcccagccc

SEQ ID NO: 2383020 - RNA, 20 nt, Human
cugcaugcggcccagcccgg

SEQ ID NO: 2383021 - RNA, 22 nt, Human
cugcaugcugcuggacaguauc

SEQ ID NO: 2383022 - RNA, 18 nt, Human
cugcaugcugcuggacag

SEQ ID NO: 2383023 - RNA, 19 nt, Human
cugcaugcuggguucugca

SEQ ID NO: 2383024 - RNA, 21 nt, Human
cugcaugcuggguucugcaca

SEQ ID NO: 2383025 - RNA, 15 nt, Human
cugcaugcugcugga

SEQ ID NO: 2383026 - RNA, 13 nt, Human
cugcaugcugcug

SEQ ID NO: 2383027 - RNA, 12 nt, Human
cugcaugcugcu

SEQ ID NO: 2383028 - RNA, 21 nt, Human
cugcaugcggcccagcccggc

SEQ ID NO: 2383029 - RNA, 18 nt, Human
cugcaugcgggcuuccuc

SEQ ID NO: 2383030 - RNA, 22 nt, Human
cugcaugcgggcuuccuccugg

SEQ ID NO: 2383031 - RNA, 16 nt, Human
cugcaucguuucaucu

SEQ ID NO: 2383032 - RNA, 20 nt, Human
cugcauccuccgccucccgg

SEQ ID NO: 2383033 - RNA, 19 nt, Human
cugcauccguaguucccug

SEQ ID NO: 2383034 - RNA, 22 nt, Human
cugcauccccuuggcugugagg

SEQ ID NO: 2383035 - RNA, 15 nt, Human
cugcauccccuuggc

SEQ ID NO: 2383036 - RNA, 16 nt, Human
cugcauccccuuggcu

SEQ ID NO: 2383037 - RNA, 12 nt, Human
cugcauccccuu

SEQ ID NO: 2383038 - RNA, 21 nt, Human
cugcauccguaguucccugaa

SEQ ID NO: 2383039 - RNA, 20 nt, Human
cugcauccguaguucccuga

SEQ ID NO: 2383040 - RNA, 17 nt, Human
cugcauccuccaagaau

SEQ ID NO: 2383041 - RNA, 23 nt, Human
cugcauccuccaagaaucuaucu

SEQ ID NO: 2383042 - RNA, 19 nt, Human
cugcauccuccgccucccg

SEQ ID NO: 2383043 - RNA, 15 nt, Human
cugcaucuacuccca

SEQ ID NO: 2383044 - RNA, 20 nt, Human
cugcaucuagaggcuuccuu

SEQ ID NO: 2383045 - RNA, 17 nt, Human
cugcaucuacucccaag

SEQ ID NO: 2383046 - RNA, 18 nt, Human
cugcaucuacucccaagu

SEQ ID NO: 2383047 - RNA, 22 nt, Human
cugcaucguuucaucuuccaac

SEQ ID NO: 2383048 - RNA, 21 nt, Human
cugcaucugaccagcagcgcc

SEQ ID NO: 2383049 - RNA, 20 nt, Human
cugcaucugaccagcagcgc

SEQ ID NO: 2383050 - RNA, 19 nt, Human
cugcaucugaccagcagcg

SEQ ID NO: 2383051 - RNA, 18 nt, Human
cugcaucugaccagcagc

SEQ ID NO: 2383052 - RNA, 17 nt, Human
cugcaucugaccagcag

SEQ ID NO: 2383053 - RNA, 16 nt, Human
cugcaucugaccagca

SEQ ID NO: 2383054 - RNA, 21 nt, Human
cugcaucuagaggcuuccuuc

SEQ ID NO: 2383055 - RNA, 22 nt, Human
cugcaucugaccagcagcgccu

SEQ ID NO: 2383056 - RNA, 21 nt, Human
cugcaucugggauucccacca

SEQ ID NO: 2383057 - RNA, 13 nt, Human
cugcaucuugggg

SEQ ID NO: 2383058 - RNA, 14 nt, Human
cugcaucuugggga

SEQ ID NO: 2383059 - RNA, 16 nt, Human
cugcaucuuggggaca

SEQ ID NO: 2383060 - RNA, 19 nt, Human
cugcaucuuggggacaucu

SEQ ID NO: 2383061 - RNA, 17 nt, Human
cugcaguugccagucac

SEQ ID NO: 2383062 - RNA, 21 nt, Human
cugcaguugccagucaccccg

SEQ ID NO: 2383063 - RNA, 22 nt, Human
cugcaguugccagucaccccgg

SEQ ID NO: 2383064 - RNA, 23 nt, Human
cugcacuugcagacucuacagag

SEQ ID NO: 2383065 - RNA, 16 nt, Human
cugcacuggaguccag

SEQ ID NO: 2383066 - RNA, 19 nt, Human
cugcaguugccagucaccc

SEQ ID NO: 2383067 - RNA, 18 nt, Human
cugccuggacuagaggga

SEQ ID NO: 2383068 - RNA, 22 nt, Human
cugccuggagacuuagggcacc

SEQ ID NO: 2383069 - RNA, 11 nt, Human
cugccuggagc

SEQ ID NO: 2383070 - RNA, 12 nt, Human
cugccuggcagg

SEQ ID NO: 2383071 - RNA, 21 nt, Human
cugccuugaagccacugaagc

SEQ ID NO: 2383072 - RNA, 20 nt, Human
cugccuugaagccacugaag

SEQ ID NO: 2383073 - RNA, 16 nt, Human
cugccuugaagccacu

SEQ ID NO: 2383074 - RNA, 24 nt, Human
cugccuucuucggggaacuccugg

SEQ ID NO: 2383075 - RNA, 15 nt, Human
cugccuucuucuuuu

SEQ ID NO: 2383076 - RNA, 21 nt, Human
cugccuucuucuuuuugcugu

SEQ ID NO: 2383077 - RNA, 15 nt, Human
cugccuucuguccug

SEQ ID NO: 2383078 - RNA, 16 nt, Human
cugccuucuguccugg

SEQ ID NO: 2383079 - RNA, 17 nt, Human
cugccuucuguccuggu

SEQ ID NO: 2383080 - RNA, 21 nt, Human
cugccuucuguccugguguca

SEQ ID NO: 2383081 - RNA, 21 nt, Human
cugccuucgcuucuugccucu

SEQ ID NO: 2383082 - RNA, 23 nt, Human
cugccuucgcuucuugccucugu

SEQ ID NO: 2383083 - RNA, 20 nt, Human
cugccuucuggauucuuggc

SEQ ID NO: 2383084 - RNA, 12 nt, Human
cugccuucuguc

SEQ ID NO: 2383085 - RNA, 13 nt, Human
cugccuucugucc

SEQ ID NO: 2383086 - RNA, 17 nt, Human
cugccucugacacacag

SEQ ID NO: 2383087 - RNA, 18 nt, Human
cugccucugacacacagc

SEQ ID NO: 2383088 - RNA, 21 nt, Human
cugccucugacacacagcucu

SEQ ID NO: 2383089 - RNA, 19 nt, Human
cugccugccccgcccccag

SEQ ID NO: 2383090 - RNA, 21 nt, Human
cugccugccccgcccccaguc

SEQ ID NO: 2383091 - RNA, 13 nt, Human
cugccuccaggaa

SEQ ID NO: 2383092 - RNA, 14 nt, Human
cugccugccccgcc

SEQ ID NO: 2383093 - RNA, 15 nt, Human
cugccugccccgccc

SEQ ID NO: 2383094 - RNA, 18 nt, Human
cugccugccccgccccca

SEQ ID NO: 2383095 - RNA, 22 nt, Human
cugccugccccgcccccagucc

SEQ ID NO: 2383096 - RNA, 21 nt, Human
cugccugcccaggccccugcc

SEQ ID NO: 2383097 - RNA, 22 nt, Human
cugccugcccaggccccugcca

SEQ ID NO: 2383098 - RNA, 23 nt, Human
cugcgucuggaggggccccugcu

SEQ ID NO: 2383099 - RNA, 15 nt, Human
cugcgugccugugga

SEQ ID NO: 2383100 - RNA, 15 nt, Human
cugcguggggacagg

SEQ ID NO: 2383101 - RNA, 13 nt, Human
cugcgucuguguu

SEQ ID NO: 2383102 - RNA, 19 nt, Human
cugcgugacaauaaaacau

SEQ ID NO: 2383103 - RNA, 15 nt, Human
cugcgucuggagggg

SEQ ID NO: 2383104 - RNA, 16 nt, Human
cugcgucuggaggggc

SEQ ID NO: 2383105 - RNA, 18 nt, Human
cugcgucuggaggggccc

SEQ ID NO: 2383106 - RNA, 22 nt, Human
cugcgucuggaggggccccugc

SEQ ID NO: 2383107 - RNA, 24 nt, Human
cugcguccuccucaccucaugccc

SEQ ID NO: 2383108 - RNA, 14 nt, Human
cugcgucuggaggg

SEQ ID NO: 2383109 - RNA, 19 nt, Human
cugcggcugcugugugccu

SEQ ID NO: 2383110 - RNA, 19 nt, Human
cugcgucaugcuuguguua

SEQ ID NO: 2383111 - RNA, 13 nt, Human
cugcguccuccuc

SEQ ID NO: 2383112 - RNA, 14 nt, Human
cugcguccuccuca

SEQ ID NO: 2383113 - RNA, 15 nt, Human
cugcguccuccucac

SEQ ID NO: 2383114 - RNA, 17 nt, Human
cugcguccuccucaccu

SEQ ID NO: 2383115 - RNA, 18 nt, Human
cugcguccuccucaccuc

SEQ ID NO: 2383116 - RNA, 19 nt, Human
cugcguccuccucaccuca

SEQ ID NO: 2383117 - RNA, 19 nt, Human
cugcgguccacccaggagc

SEQ ID NO: 2383118 - RNA, 20 nt, Human
cugcgguccacccaggagcc

SEQ ID NO: 2383119 - RNA, 22 nt, Human
cugcgggaugguccuggggcuc

SEQ ID NO: 2383120 - RNA, 20 nt, Human
cugcgggaugguccuggggc

SEQ ID NO: 2383121 - RNA, 18 nt, Human
cugcgguccacccaggag

SEQ ID NO: 2383122 - RNA, 18 nt, Human
cugccuuuggcagaguuc

SEQ ID NO: 2383123 - RNA, 21 nt, Human
cugccuuugcuccucccaugu

SEQ ID NO: 2383124 - RNA, 17 nt, Human
cugcgaaggggcccugg

SEQ ID NO: 2383125 - RNA, 22 nt, Human
cugccuugaagccacugaagcu

SEQ ID NO: 2383126 - RNA, 22 nt, Human
cugccuucuucuuuuugcuguu

SEQ ID NO: 2383127 - RNA, 22 nt, Human
cugccuuuauuguguuugucau

SEQ ID NO: 2383128 - RNA, 24 nt, Human
cugccuuuauuguguuugucauua

SEQ ID NO: 2383129 - RNA, 19 nt, Human
cugcgaaggggcccugguc

SEQ ID NO: 2383130 - RNA, 18 nt, Human
cugcgaaggggcccuggu

SEQ ID NO: 2383131 - RNA, 18 nt, Human
cugcggagugaagagggg

SEQ ID NO: 2383132 - RNA, 19 nt, Human
cugcggagugaagaggggc

SEQ ID NO: 2383133 - RNA, 20 nt, Human
cugcggagugaagaggggca

SEQ ID NO: 2383134 - RNA, 21 nt, Human
cugcggagugaagaggggcag

SEQ ID NO: 2383135 - RNA, 23 nt, Human
cugcggagugaagaggggcagcc

SEQ ID NO: 2383136 - RNA, 21 nt, Human
cugcggcacccuugcgcuuuu

SEQ ID NO: 2383137 - RNA, 14 nt, Human
cugcggcaucagau

SEQ ID NO: 2383138 - RNA, 22 nt, Human
cugcggagugaagaggggcagc

SEQ ID NO: 2383139 - RNA, 15 nt, Human
cugcggccugcugga

SEQ ID NO: 2383140 - RNA, 19 nt, Human
cugcgggaugguccugggg

SEQ ID NO: 2383141 - RNA, 18 nt, Human
cugcgggaugguccuggg

SEQ ID NO: 2383142 - RNA, 17 nt, Human
cugcgggaugguccugg

SEQ ID NO: 2383143 - RNA, 16 nt, Human
cugcggcugcugugug

SEQ ID NO: 2383144 - RNA, 17 nt, Human
cugcggcugcugugugc

SEQ ID NO: 2383145 - RNA, 22 nt, Human
cugccuccagaauggucuuucu

SEQ ID NO: 2383146 - RNA, 14 nt, Human
cugccuccagggcu

SEQ ID NO: 2383147 - RNA, 18 nt, Human
cugccuccacucccacuu

SEQ ID NO: 2383148 - RNA, 19 nt, Human
cugccuccacucccacuuc

SEQ ID NO: 2383149 - RNA, 17 nt, Human
cugccuccacucccacu

SEQ ID NO: 2383150 - RNA, 16 nt, Human
cugccuccacucccac

SEQ ID NO: 2383151 - RNA, 14 nt, Human
cugccuccagaaug

SEQ ID NO: 2383152 - RNA, 15 nt, Human
cugccuccagggcug

SEQ ID NO: 2383153 - RNA, 16 nt, Human
cugccuccagggcugg

SEQ ID NO: 2383154 - RNA, 17 nt, Human
cugccuccagggcugga

SEQ ID NO: 2383155 - RNA, 18 nt, Human
cugccuccagggcuggac

SEQ ID NO: 2383156 - RNA, 19 nt, Human
cugccuccagggcuggacu

SEQ ID NO: 2383157 - RNA, 20 nt, Human
cugccuccagggcuggacug

SEQ ID NO: 2383158 - RNA, 22 nt, Human
cugccuccagggcuggacugag

SEQ ID NO: 2383159 - RNA, 23 nt, Human
cugccuccagggcuggacugagg

SEQ ID NO: 2383160 - RNA, 15 nt, Human
cugccucucugcagg

SEQ ID NO: 2383161 - RNA, 16 nt, Human
cugccucucugcaggu

SEQ ID NO: 2383162 - RNA, 17 nt, Human
cugccucucugcagguc

SEQ ID NO: 2383163 - RNA, 18 nt, Human
cugccucucugcaggucc

SEQ ID NO: 2383164 - RNA, 16 nt, Human
cugccuaggcugaccu

SEQ ID NO: 2383165 - RNA, 15 nt, Human
cugccucagccuccc

SEQ ID NO: 2383166 - RNA, 19 nt, Human
cugccucagccucccaaag

SEQ ID NO: 2383167 - RNA, 17 nt, Human
cugccucagccucccga

SEQ ID NO: 2383168 - RNA, 10 nt, Human
cugccucagg

SEQ ID NO: 2383169 - RNA, 18 nt, Human
cugccucagccucccaag

SEQ ID NO: 2383170 - RNA, 14 nt, Human
cugccuacucacga

SEQ ID NO: 2383171 - RNA, 14 nt, Human
cugccuacugcauc

SEQ ID NO: 2383172 - RNA, 13 nt, Human
cugccuacucacg

SEQ ID NO: 2383173 - RNA, 15 nt, Human
cugccuacugcaucg

SEQ ID NO: 2383174 - RNA, 20 nt, Human
cugccuaaguggcugcugac

SEQ ID NO: 2383175 - RNA, 21 nt, Human
cugccggcccuggggcuaggc

SEQ ID NO: 2383176 - RNA, 16 nt, Human
cugccggcccuggggc

SEQ ID NO: 2383177 - RNA, 15 nt, Human
cugccggcccugggg

SEQ ID NO: 2383178 - RNA, 19 nt, Human
cugccuaaguggcugcuga

SEQ ID NO: 2383179 - RNA, 19 nt, Human
cugccuaggaauucccagc

SEQ ID NO: 2383180 - RNA, 19 nt, Human
cugccgccucccagccugg

SEQ ID NO: 2383181 - RNA, 18 nt, Human
cugccgccucccagccug

SEQ ID NO: 2383182 - RNA, 16 nt, Human
cugccgccucccagcc

SEQ ID NO: 2383183 - RNA, 15 nt, Human
cugccgccucccagc

SEQ ID NO: 2383184 - RNA, 14 nt, Human
cugccgccucccag

SEQ ID NO: 2383185 - RNA, 23 nt, Human
cugccgcagcccugcagagggca

SEQ ID NO: 2383186 - RNA, 16 nt, Human
cugccgcagagcuggc

SEQ ID NO: 2383187 - RNA, 18 nt, Human
cugccgcagagcuggccg

SEQ ID NO: 2383188 - RNA, 16 nt, Human
cugccgccccacccag

SEQ ID NO: 2383189 - RNA, 19 nt, Human
cugccgcagcccugcagag

SEQ ID NO: 2383190 - RNA, 20 nt, Human
cugccgcagcccugcagagg

SEQ ID NO: 2383191 - RNA, 21 nt, Human
cugccgcagcccugcagaggg

SEQ ID NO: 2383192 - RNA, 22 nt, Human
cugccgcagcccugcagagggc

SEQ ID NO: 2383193 - RNA, 17 nt, Human
cugccgcaccccagagu

SEQ ID NO: 2383194 - RNA, 16 nt, Human
cugccgcaccccagag

SEQ ID NO: 2383195 - RNA, 13 nt, Human
cugccgcagagcu

SEQ ID NO: 2383196 - RNA, 14 nt, Human
cugccgcagagcug

SEQ ID NO: 2383197 - RNA, 15 nt, Human
cugccgcagagcugg

SEQ ID NO: 2383198 - RNA, 17 nt, Human
cugccccugccccguca

SEQ ID NO: 2383199 - RNA, 16 nt, Human
cugccccugccccguc

SEQ ID NO: 2383200 - RNA, 14 nt, Human
cugccgcaccccag

SEQ ID NO: 2383201 - RNA, 15 nt, Human
cugccgcaccccaga

SEQ ID NO: 2383202 - RNA, 12 nt, Human
cugccgcagccc

SEQ ID NO: 2383203 - RNA, 13 nt, Human
cugccgcagcccu

SEQ ID NO: 2383204 - RNA, 21 nt, Human
cugccccaaacaaauaugcaa

SEQ ID NO: 2383205 - RNA, 20 nt, Human
cugccccuccucucugcccu

SEQ ID NO: 2383206 - RNA, 21 nt, Human
cugccccuccucucugcccua

SEQ ID NO: 2383207 - RNA, 17 nt, Human
cugccccaaccugcuga

SEQ ID NO: 2383208 - RNA, 10 nt, Human
cugccccugc

SEQ ID NO: 2383209 - RNA, 14 nt, Human
cugccccugccccg

SEQ ID NO: 2383210 - RNA, 11 nt, Human
cugccccugcc

SEQ ID NO: 2383211 - RNA, 13 nt, Human
cugccccugcccc

SEQ ID NO: 2383212 - RNA, 22 nt, Human
cugaaguuggagugaguguggc

SEQ ID NO: 2383213 - RNA, 13 nt, Human
cugaaguuucaca

SEQ ID NO: 2383214 - RNA, 16 nt, Human
cugaaguuaacagaga

SEQ ID NO: 2383215 - RNA, 21 nt, Human
cugaaguguuucacgagagcc

SEQ ID NO: 2383216 - RNA, 14 nt, Human
cugaaguucaccau

SEQ ID NO: 2383217 - RNA, 17 nt, Human
cugaaguucagcugcau

SEQ ID NO: 2383218 - RNA, 22 nt, Human
cugaagucccagauacuugggg

SEQ ID NO: 2383219 - RNA, 15 nt, Human
cugaacccugugcug

SEQ ID NO: 2383220 - RNA, 14 nt, Human
cugaagucugaaau

SEQ ID NO: 2383221 - RNA, 15 nt, Human
cugaagucugaaauu

SEQ ID NO: 2383222 - RNA, 13 nt, Human
cugaagucugaaa

SEQ ID NO: 2383223 - RNA, 17 nt, Human
cugaagucuuuguacag

SEQ ID NO: 2383224 - RNA, 20 nt, Human
cugaagucuuuguacagaca

SEQ ID NO: 2383225 - RNA, 19 nt, Human
cugaagucacaucacagga

SEQ ID NO: 2383226 - RNA, 21 nt, Human
cugaagucacacagugagucg

SEQ ID NO: 2383227 - RNA, 22 nt, Human
cugaagucacaucacaggacac

SEQ ID NO: 2383228 - RNA, 21 nt, Human
cugaagucacaucacaggaca

SEQ ID NO: 2383229 - RNA, 13 nt, Human
cugaagucacugc

SEQ ID NO: 2383230 - RNA, 14 nt, Human
cugaagucacugca

SEQ ID NO: 2383231 - RNA, 15 nt, Human
cugaagucacugcac

SEQ ID NO: 2383232 - RNA, 18 nt, Human
cugaagucacacagugag

SEQ ID NO: 2383233 - RNA, 19 nt, Human
cugaagucacacagugagu

SEQ ID NO: 2383234 - RNA, 17 nt, Human
cugaagucacacaguga

SEQ ID NO: 2383235 - RNA, 14 nt, Human
cugaagaagauggu

SEQ ID NO: 2383236 - RNA, 21 nt, Human
cugaauuaaugacagagccag

SEQ ID NO: 2383237 - RNA, 17 nt, Human
cugaauuaguccuugcu

SEQ ID NO: 2383238 - RNA, 22 nt, Human
cugaauuaaugacagagccagu

SEQ ID NO: 2383239 - RNA, 18 nt, Human
cugaauuaguccuugcuu

SEQ ID NO: 2383240 - RNA, 19 nt, Human
cugaauuaguccuugcuug

SEQ ID NO: 2383241 - RNA, 20 nt, Human
cugaauuaguccuugcuugg

SEQ ID NO: 2383242 - RNA, 22 nt, Human
cugaauuaguccuugcuuggcu

SEQ ID NO: 2383243 - RNA, 20 nt, Human
cugaauuaaugacagagcca

SEQ ID NO: 2383244 - RNA, 17 nt, Human
cugaauuaaucaucuau

SEQ ID NO: 2383245 - RNA, 20 nt, Human
cugaauguucugacauuaac

SEQ ID NO: 2383246 - RNA, 19 nt, Human
cugaauguucugacauuaa

SEQ ID NO: 2383247 - RNA, 18 nt, Human
cugaauguucugacauua

SEQ ID NO: 2383248 - RNA, 17 nt, Human
cugaauguucugacauu

SEQ ID NO: 2383249 - RNA, 23 nt, Human
cugaauguucugacauuaacagu

SEQ ID NO: 2383250 - RNA, 22 nt, Human
cugaauguucugacauuaacag

SEQ ID NO: 2383251 - RNA, 15 nt, Human
cugaauguugggacu

SEQ ID NO: 2383252 - RNA, 16 nt, Human
cugaauguugggacug

SEQ ID NO: 2383253 - RNA, 19 nt, Human
cugaauguugggacugcua

SEQ ID NO: 2383254 - RNA, 19 nt, Human
cugaauguuuauuccuuga

SEQ ID NO: 2383255 - RNA, 16 nt, Human
cugaauguuuauuccu

SEQ ID NO: 2383256 - RNA, 18 nt, Human
cugaauguuuauuccuug

SEQ ID NO: 2383257 - RNA, 12 nt, Human
cugaauuauuuu

SEQ ID NO: 2383258 - RNA, 12 nt, Human
cugaauuucuuu

SEQ ID NO: 2383259 - RNA, 23 nt, Human
cugaauuaucuauacauaucuuu

SEQ ID NO: 2383260 - RNA, 14 nt, Human
cugaauuauaagag

SEQ ID NO: 2383261 - RNA, 24 nt, Human
cugaauuauaagaggcugauaauu

SEQ ID NO: 2383262 - RNA, 11 nt, Human
cugaauguauu

SEQ ID NO: 2383263 - RNA, 18 nt, Human
cugaaugguccaggguug

SEQ ID NO: 2383264 - RNA, 18 nt, Human
cugaaugguuccaugccu

SEQ ID NO: 2383265 - RNA, 16 nt, Human
cugaauguucugacau

SEQ ID NO: 2383266 - RNA, 14 nt, Human
cugaauguucugac

SEQ ID NO: 2383267 - RNA, 13 nt, Human
cugaauguucuga

SEQ ID NO: 2383268 - RNA, 12 nt, Human
cugaauguucug

SEQ ID NO: 2383269 - RNA, 11 nt, Human
cugaauguucu

SEQ ID NO: 2383270 - RNA, 22 nt, Human
cugaaugguuccaugccugagg

SEQ ID NO: 2383271 - RNA, 20 nt, Human
cugaaugguuuucaaaauaa

SEQ ID NO: 2383272 - RNA, 19 nt, Human
cugaaugguuuucaaaaua

SEQ ID NO: 2383273 - RNA, 12 nt, Human
cugaaugcucug

SEQ ID NO: 2383274 - RNA, 17 nt, Human
cugaaugcucugugcga

SEQ ID NO: 2383275 - RNA, 22 nt, Human
cugaaugccucaaugugaccag

SEQ ID NO: 2383276 - RNA, 23 nt, Human
cugaaugccucaaugugaccagg

SEQ ID NO: 2383277 - RNA, 15 nt, Human
cugaauaaauaccuc

SEQ ID NO: 2383278 - RNA, 20 nt, Human
cugaaugaggucagcauguc

SEQ ID NO: 2383279 - RNA, 21 nt, Human
cugaauaaauaccucuuagcu

SEQ ID NO: 2383280 - RNA, 22 nt, Human
cugaauggaagguuuguauauu

SEQ ID NO: 2383281 - RNA, 14 nt, Human
cugaaugguccagg

SEQ ID NO: 2383282 - RNA, 15 nt, Human
cugaaugguccaggg

SEQ ID NO: 2383283 - RNA, 16 nt, Human
cugaaugguccagggu

SEQ ID NO: 2383284 - RNA, 16 nt, Human
cugaaugcugcuacuu

SEQ ID NO: 2383285 - RNA, 19 nt, Human
cugaaugcuuauagguggc

SEQ ID NO: 2383286 - RNA, 21 nt, Human
cugaaugcuuauagguggccu

SEQ ID NO: 2383287 - RNA, 22 nt, Human
cugaaugcuuauagguggccuc

SEQ ID NO: 2383288 - RNA, 16 nt, Human
cugaaccccucccucc

SEQ ID NO: 2383289 - RNA, 21 nt, Human
cugaaccccgucgaggggcuc

SEQ ID NO: 2383290 - RNA, 12 nt, Human
cugaacuuugcu

SEQ ID NO: 2383291 - RNA, 13 nt, Human
cugaacccugugc

SEQ ID NO: 2383292 - RNA, 14 nt, Human
cugaacccugugcu

SEQ ID NO: 2383293 - RNA, 16 nt, Human
cugaaccaucccugau

SEQ ID NO: 2383294 - RNA, 14 nt, Human
cugaaccaucccug

SEQ ID NO: 2383295 - RNA, 13 nt, Human
cugaagaacagua

SEQ ID NO: 2383296 - RNA, 14 nt, Human
cugaagaaccaguc

SEQ ID NO: 2383297 - RNA, 22 nt, Human
cugaagaaccaguccccccacc

SEQ ID NO: 2383298 - RNA, 15 nt, Human
cugaagaaccagucc

SEQ ID NO: 2383299 - RNA, 21 nt, Human
cugaacuuugcugagccugua

SEQ ID NO: 2383300 - RNA, 14 nt, Human
cugaacuuugcuga

SEQ ID NO: 2383301 - RNA, 13 nt, Human
cugaacuuugcug

SEQ ID NO: 2383302 - RNA, 15 nt, Human
cugaacauuccagag

SEQ ID NO: 2383303 - RNA, 17 nt, Human
cugaacauccuuccuuc

SEQ ID NO: 2383304 - RNA, 20 nt, Human
cugaacauccuuccuuccca

SEQ ID NO: 2383305 - RNA, 14 nt, Human
cugaacauugcaua

SEQ ID NO: 2383306 - RNA, 21 nt, Human
cugaacaauaggcuguuccca

SEQ ID NO: 2383307 - RNA, 19 nt, Human
cugaacaauaggcuguucc

SEQ ID NO: 2383308 - RNA, 16 nt, Human
cugaacaauucucucu

SEQ ID NO: 2383309 - RNA, 16 nt, Human
cugaacaaaaaauaaa

SEQ ID NO: 2383310 - RNA, 21 nt, Human
cugaacaaacuaucagaggaa

SEQ ID NO: 2383311 - RNA, 16 nt, Human
cugaacaagaauugga

SEQ ID NO: 2383312 - RNA, 14 nt, Human
cugaacaagaauug

SEQ ID NO: 2383313 - RNA, 13 nt, Human
cugaacaagaauu

SEQ ID NO: 2383314 - RNA, 12 nt, Human
cugaacaagaau

SEQ ID NO: 2383315 - RNA, 22 nt, Human
cugaaauuuuauaugcuuacug

SEQ ID NO: 2383316 - RNA, 19 nt, Human
cugaaauuuuauaugcuua

SEQ ID NO: 2383317 - RNA, 18 nt, Human
cugaaauucuccuggagg

SEQ ID NO: 2383318 - RNA, 19 nt, Human
cugaaauucuccuggaggu

SEQ ID NO: 2383319 - RNA, 14 nt, Human
cugaaauucuccug

SEQ ID NO: 2383320 - RNA, 15 nt, Human
cugaaauucuccugg

SEQ ID NO: 2383321 - RNA, 16 nt, Human
cugaaauucuccugga

SEQ ID NO: 2383322 - RNA, 17 nt, Human
cugaaauucuccuggag

SEQ ID NO: 2383323 - RNA, 20 nt, Human
cugaaaugcugcauuuuaau

SEQ ID NO: 2383324 - RNA, 19 nt, Human
cugaaagugaaaguccaga

SEQ ID NO: 2383325 - RNA, 23 nt, Human
cugaaagugaaaguccagaaacu

SEQ ID NO: 2383326 - RNA, 14 nt, Human
cucuuuucaaaaca

SEQ ID NO: 2383327 - RNA, 23 nt, Human
cugaaagggacgcuacccgggaa

SEQ ID NO: 2383328 - RNA, 20 nt, Human
cucuuuguucuaaagaugga

SEQ ID NO: 2383329 - RNA, 21 nt, Human
cucuucugccggcccuggggc

SEQ ID NO: 2383330 - RNA, 14 nt, Human
cucuuugucuaaaa

SEQ ID NO: 2383331 - RNA, 12 nt, Human
cucuuuguaaga

SEQ ID NO: 2383332 - RNA, 21 nt, Human
cucuuugucuaaaacaauaaa

SEQ ID NO: 2383333 - RNA, 18 nt, Human
cucuuugucuaaaacaau

SEQ ID NO: 2383334 - RNA, 17 nt, Human
cucuuugucuaaaacaa

SEQ ID NO: 2383335 - RNA, 16 nt, Human
cucuuugucuaaaaca

SEQ ID NO: 2383336 - RNA, 22 nt, Human
cucuuugucuaaaacaauaaaa

SEQ ID NO: 2383337 - RNA, 17 nt, Human
cucuuuguucucagcuc

SEQ ID NO: 2383338 - RNA, 19 nt, Human
cucuuuguucucagcuccc

SEQ ID NO: 2383339 - RNA, 13 nt, Human
cucuucugcucca

SEQ ID NO: 2383340 - RNA, 12 nt, Human
cucuucugcucc

SEQ ID NO: 2383341 - RNA, 20 nt, Human
cucuucugccggcccugggg

SEQ ID NO: 2383342 - RNA, 16 nt, Human
cucuucugcaucuugg

SEQ ID NO: 2383343 - RNA, 23 nt, Human
cucuucugagcuauuucaucuau

SEQ ID NO: 2383344 - RNA, 22 nt, Human
cucuucugagcuauuucaucua

SEQ ID NO: 2383345 - RNA, 21 nt, Human
cucuucugagcuauuucaucu

SEQ ID NO: 2383346 - RNA, 18 nt, Human
cucuucugagcuauuuca

SEQ ID NO: 2383347 - RNA, 15 nt, Human
cucuucugagcuauu

SEQ ID NO: 2383348 - RNA, 22 nt, Human
cucuuuggucuacacugugcug

SEQ ID NO: 2383349 - RNA, 23 nt, Human
cucuuuggucuacacugugcuga

SEQ ID NO: 2383350 - RNA, 16 nt, Human
cucuucuccaggcugu

SEQ ID NO: 2383351 - RNA, 13 nt, Human
cucuucuccccag

SEQ ID NO: 2383352 - RNA, 14 nt, Human
cucuucuccccaga

SEQ ID NO: 2383353 - RNA, 16 nt, Human
cucuucugacgugccu

SEQ ID NO: 2383354 - RNA, 16 nt, Human
cucuucucuuccugua

SEQ ID NO: 2383355 - RNA, 17 nt, Human
cucuucugacgugccuu

SEQ ID NO: 2383356 - RNA, 12 nt, Human
cucuucugagcu

SEQ ID NO: 2383357 - RNA, 20 nt, Human
cucuucugacgugccuuuug

SEQ ID NO: 2383358 - RNA, 22 nt, Human
cucuucugacgugccuuuugca

SEQ ID NO: 2383359 - RNA, 14 nt, Human
cucuucucuuccug

SEQ ID NO: 2383360 - RNA, 15 nt, Human
cucuucucuuccugu

SEQ ID NO: 2383361 - RNA, 21 nt, Human
cugacggggaggaaccacugc

SEQ ID NO: 2383362 - RNA, 16 nt, Human
cugacggugcagucug

SEQ ID NO: 2383363 - RNA, 23 nt, Human
cugacguagcugcaaaggacaga

SEQ ID NO: 2383364 - RNA, 18 nt, Human
cugacguagcugcaaagg

SEQ ID NO: 2383365 - RNA, 18 nt, Human
cugacggugcagucuggg

SEQ ID NO: 2383366 - RNA, 22 nt, Human
cugacguagcugcaaaggacag

SEQ ID NO: 2383367 - RNA, 14 nt, Human
cugacgugccuuuu

SEQ ID NO: 2383368 - RNA, 17 nt, Human
cugacgugccuuuugca

SEQ ID NO: 2383369 - RNA, 18 nt, Human
cugacgugccuuuugcac

SEQ ID NO: 2383370 - RNA, 20 nt, Human
cugacgugccuuuugcaccc

SEQ ID NO: 2383371 - RNA, 22 nt, Human
cugacgugccuuuugcaccccu

SEQ ID NO: 2383372 - RNA, 23 nt, Human
cugacgugccuuuugcaccccuc

SEQ ID NO: 2383373 - RNA, 21 nt, Human
cugacggccagggagaagcuc

SEQ ID NO: 2383374 - RNA, 20 nt, Human
cugacggccagggagaagcu

SEQ ID NO: 2383375 - RNA, 19 nt, Human
cugacggccagggagaagc

SEQ ID NO: 2383376 - RNA, 15 nt, Human
cugacggccagggag

SEQ ID NO: 2383377 - RNA, 23 nt, Human
cugacggaagccaacuuggcuuu

SEQ ID NO: 2383378 - RNA, 16 nt, Human
cugacgcaacccacgu

SEQ ID NO: 2383379 - RNA, 16 nt, Human
cugacggaagccaacu

SEQ ID NO: 2383380 - RNA, 21 nt, Human
cugacggaagccaacuuggcu

SEQ ID NO: 2383381 - RNA, 22 nt, Human
cugacggaagccaacuuggcuu

SEQ ID NO: 2383382 - RNA, 21 nt, Human
cugaccuuugucaucuuucuu

SEQ ID NO: 2383383 - RNA, 23 nt, Human
cugaccuuugucaucuuucuucu

SEQ ID NO: 2383384 - RNA, 21 nt, Human
cugacgaacuuccauggcccu

SEQ ID NO: 2383385 - RNA, 23 nt, Human
cugaccaguuuaaccugaugcag

SEQ ID NO: 2383386 - RNA, 21 nt, Human
cugaccagccuccaugcugcc

SEQ ID NO: 2383387 - RNA, 23 nt, Human
cugaccagccuccaugcugccuc

SEQ ID NO: 2383388 - RNA, 21 nt, Human
cugaauuuggccugcacuaau

SEQ ID NO: 2383389 - RNA, 20 nt, Human
cugaauuuucacaugaacau

SEQ ID NO: 2383390 - RNA, 13 nt, Human
cugaauuuucaca

SEQ ID NO: 2383391 - RNA, 14 nt, Human
cugaauuuucacau

SEQ ID NO: 2383392 - RNA, 16 nt, Human
cugacagacacaggcc

SEQ ID NO: 2383393 - RNA, 14 nt, Human
cugaauuucuuuug

SEQ ID NO: 2383394 - RNA, 17 nt, Human
cugaccagccuccaugc

SEQ ID NO: 2383395 - RNA, 22 nt, Human
cugaccagcagcgccuuuccca

SEQ ID NO: 2383396 - RNA, 21 nt, Human
cugaccagcagcgccuuuccc

SEQ ID NO: 2383397 - RNA, 20 nt, Human
cugaccagcagcgccuuucc

SEQ ID NO: 2383398 - RNA, 16 nt, Human
cugaccagcagcgccu

SEQ ID NO: 2383399 - RNA, 17 nt, Human
cugacagacacaggccc

SEQ ID NO: 2383400 - RNA, 18 nt, Human
cugacagacacaggcccg

SEQ ID NO: 2383401 - RNA, 21 nt, Human
cugagaaaagcuuugaacccu

SEQ ID NO: 2383402 - RNA, 18 nt, Human
cugacuuugcucuuucuu

SEQ ID NO: 2383403 - RNA, 17 nt, Human
cugacuguacuccuccc

SEQ ID NO: 2383404 - RNA, 22 nt, Human
cugacuggugcuauaggcugga

SEQ ID NO: 2383405 - RNA, 18 nt, Human
cugagaaagacuauucaa

SEQ ID NO: 2383406 - RNA, 15 nt, Human
cugagaaagacuauu

SEQ ID NO: 2383407 - RNA, 13 nt, Human
cugagaaagacua

SEQ ID NO: 2383408 - RNA, 12 nt, Human
cugagaaagacu

SEQ ID NO: 2383409 - RNA, 15 nt, Human
cugacucagggcucc

SEQ ID NO: 2383410 - RNA, 13 nt, Human
cugacuccagugg

SEQ ID NO: 2383411 - RNA, 16 nt, Human
cugacucauucugaag

SEQ ID NO: 2383412 - RNA, 21 nt, Human
cugacucagggcuccuggguu

SEQ ID NO: 2383413 - RNA, 19 nt, Human
cugacucagggcuccuggg

SEQ ID NO: 2383414 - RNA, 18 nt, Human
cugacucagggcuccugg

SEQ ID NO: 2383415 - RNA, 16 nt, Human
cugacucagggcuccu

SEQ ID NO: 2383416 - RNA, 17 nt, Human
cugacuacuggcucuca

SEQ ID NO: 2383417 - RNA, 15 nt, Human
cugacuacugggcaa

SEQ ID NO: 2383418 - RNA, 16 nt, Human
cugacuacugggcaaa

SEQ ID NO: 2383419 - RNA, 22 nt, Human
cugacuacugggcaaagagugu

SEQ ID NO: 2383420 - RNA, 19 nt, Human
cugacugauguugagggaa

SEQ ID NO: 2383421 - RNA, 16 nt, Human
cugacugaugcuuuca

SEQ ID NO: 2383422 - RNA, 12 nt, Human
cugacugggagu

SEQ ID NO: 2383423 - RNA, 15 nt, Human
cugacuccuuagaga

SEQ ID NO: 2383424 - RNA, 13 nt, Human
cugacuccuuaga

SEQ ID NO: 2383425 - RNA, 15 nt, Human
cugacucgguuucuc

SEQ ID NO: 2383426 - RNA, 17 nt, Human
cugacuccucuaagcca

SEQ ID NO: 2383427 - RNA, 19 nt, Human
cugacuccucuaagccacu

SEQ ID NO: 2383428 - RNA, 16 nt, Human
cugacucgguuucucc

SEQ ID NO: 2383429 - RNA, 17 nt, Human
cugacucgguuucucca

SEQ ID NO: 2383430 - RNA, 18 nt, Human
cugacucgguuucuccaa

SEQ ID NO: 2383431 - RNA, 20 nt, Human
cugacucgucugacugugug

SEQ ID NO: 2383432 - RNA, 24 nt, Human
cugagcaacagagugagacccugu

SEQ ID NO: 2383433 - RNA, 23 nt, Human
cugagcaacagagugagacccug

SEQ ID NO: 2383434 - RNA, 16 nt, Human
cugagcaacagaguga

SEQ ID NO: 2383435 - RNA, 22 nt, Human
cugagauuucaucugcucuccu

SEQ ID NO: 2383436 - RNA, 12 nt, Human
cugagcaaagca

SEQ ID NO: 2383437 - RNA, 12 nt, Human
cugagcaagagc

SEQ ID NO: 2383438 - RNA, 20 nt, Human
cugagcaacucuugauuauc

SEQ ID NO: 2383439 - RNA, 15 nt, Human
cugagcaaauguggc

SEQ ID NO: 2383440 - RNA, 17 nt, Human
cugagcaaauguggcuc

SEQ ID NO: 2383441 - RNA, 20 nt, Human
cugagcaaauguggcuccug

SEQ ID NO: 2383442 - RNA, 21 nt, Human
cugagcaaauguggcuccugg

SEQ ID NO: 2383443 - RNA, 19 nt, Human
cugagauuauuuuaaucua

SEQ ID NO: 2383444 - RNA, 23 nt, Human
cugagauuauaggcaccuaccac

SEQ ID NO: 2383445 - RNA, 21 nt, Human
cugagaugugaacacaucagc

SEQ ID NO: 2383446 - RNA, 14 nt, Human
cugagauuucaucu

SEQ ID NO: 2383447 - RNA, 15 nt, Human
cugagauuucaucug

SEQ ID NO: 2383448 - RNA, 16 nt, Human
cugagauuucaucugc

SEQ ID NO: 2383449 - RNA, 18 nt, Human
cugagauuucaucugcuc

SEQ ID NO: 2383450 - RNA, 19 nt, Human
cugagauuucaucugcucu

SEQ ID NO: 2383451 - RNA, 20 nt, Human
cugagauuucaucugcucuc

SEQ ID NO: 2383452 - RNA, 21 nt, Human
cugagauuucaucugcucucc

SEQ ID NO: 2383453 - RNA, 20 nt, Human
cugagacagcccgggcucug

SEQ ID NO: 2383454 - RNA, 19 nt, Human
cugagacagcccgggcucu

SEQ ID NO: 2383455 - RNA, 20 nt, Human
cugagaaagacuauucaaac

SEQ ID NO: 2383456 - RNA, 19 nt, Human
cugagaaagacuauucaaa

SEQ ID NO: 2383457 - RNA, 21 nt, Human
cugagacagcccgggcucugc

SEQ ID NO: 2383458 - RNA, 22 nt, Human
cugagacagcccgggcucugcc

SEQ ID NO: 2383459 - RNA, 20 nt, Human
cugagaugugaacacaucag

SEQ ID NO: 2383460 - RNA, 16 nt, Human
cugagaugugaacaca

SEQ ID NO: 2383461 - RNA, 17 nt, Human
cugagcagacuggugag

SEQ ID NO: 2383462 - RNA, 16 nt, Human
cugagcagacugguga

SEQ ID NO: 2383463 - RNA, 22 nt, Human
cugagcagacuggugagcagac

SEQ ID NO: 2383464 - RNA, 21 nt, Human
cugagcagacuggugagcaga

SEQ ID NO: 2383465 - RNA, 22 nt, Human
cugagcagagucuugcuaccuc

SEQ ID NO: 2383466 - RNA, 23 nt, Human
cugagcagagucuugcuaccuca

SEQ ID NO: 2383467 - RNA, 16 nt, Human
cugagcaggaccucug

SEQ ID NO: 2383468 - RNA, 16 nt, Human
cugagcaggauuuuaa

SEQ ID NO: 2383469 - RNA, 13 nt, Human
cugagcaccaggg

SEQ ID NO: 2383470 - RNA, 17 nt, Human
cugagcaaugucugugc

SEQ ID NO: 2383471 - RNA, 18 nt, Human
cugagcaaugucugugcu

SEQ ID NO: 2383472 - RNA, 19 nt, Human
cugagcaaugucugugcua

SEQ ID NO: 2383473 - RNA, 17 nt, Human
cugagcacacuuuagug

SEQ ID NO: 2383474 - RNA, 15 nt, Human
cugagcaaugucugu

SEQ ID NO: 2383475 - RNA, 20 nt, Human
cugagcaagagcuggcaaag

SEQ ID NO: 2383476 - RNA, 16 nt, Human
cugagcaaugucugug

SEQ ID NO: 2383477 - RNA, 14 nt, Human
cugagcaagagcug

SEQ ID NO: 2383478 - RNA, 15 nt, Human
cugagcaagagcugg

SEQ ID NO: 2383479 - RNA, 16 nt, Human
cugagcaagagcuggc

SEQ ID NO: 2383480 - RNA, 17 nt, Human
cugagcaagagcuggca

SEQ ID NO: 2383481 - RNA, 13 nt, Human
cugagcaccugcu

SEQ ID NO: 2383482 - RNA, 19 nt, Human
cugagcacauucuggcuca

SEQ ID NO: 2383483 - RNA, 16 nt, Human
cugagcaccugcuuca

SEQ ID NO: 2383484 - RNA, 17 nt, Human
cugagcaccugcuucau

SEQ ID NO: 2383485 - RNA, 23 nt, Human
cugagcaccugcuucaugcucag

SEQ ID NO: 2383486 - RNA, 13 nt, Human
cugagcagggaga

SEQ ID NO: 2383487 - RNA, 18 nt, Human
cugagcaggaccucugaa

SEQ ID NO: 2383488 - RNA, 12 nt, Human
cugagcaggugu

SEQ ID NO: 2383489 - RNA, 22 nt, Human
cugagccaagcuagaauucccu

SEQ ID NO: 2383490 - RNA, 20 nt, Human
cugagcagugaaugauucag

SEQ ID NO: 2383491 - RNA, 23 nt, Human
cugagccaguucaguaccuggag

SEQ ID NO: 2383492 - RNA, 13 nt, Human
cugagccagauuu

SEQ ID NO: 2383493 - RNA, 14 nt, Human
cugagccagauuuc

SEQ ID NO: 2383494 - RNA, 19 nt, Human
cucugaauuugagauacaa

SEQ ID NO: 2383495 - RNA, 16 nt, Human
cucugacaacagacuu

SEQ ID NO: 2383496 - RNA, 20 nt, Human
cucugaauuaguccuugcuu

SEQ ID NO: 2383497 - RNA, 21 nt, Human
cucugaauuaguccuugcuug

SEQ ID NO: 2383498 - RNA, 17 nt, Human
cucugaaugguccaggg

SEQ ID NO: 2383499 - RNA, 18 nt, Human
cucugaaugguccagggu

SEQ ID NO: 2383500 - RNA, 13 nt, Human
cucugaagucaca

SEQ ID NO: 2383501 - RNA, 23 nt, Human
cucugaagggcaucaugcaucuu

SEQ ID NO: 2383502 - RNA, 23 nt, Human
cucugaagucacaucacaggaca

SEQ ID NO: 2383503 - RNA, 19 nt, Human
cucugaagugaaacugcuu

SEQ ID NO: 2383504 - RNA, 23 nt, Human
cucugaagugaaacugcuuguuu

SEQ ID NO: 2383505 - RNA, 18 nt, Human
cucgcugcacaaauacuc

SEQ ID NO: 2383506 - RNA, 12 nt, Human
cucgcugccagc

SEQ ID NO: 2383507 - RNA, 20 nt, Human
cucgcugaugcugggcuggg

SEQ ID NO: 2383508 - RNA, 21 nt, Human
cucgcugaugcugggcugggu

SEQ ID NO: 2383509 - RNA, 22 nt, Human
cucgcugaugcugggcugggug

SEQ ID NO: 2383510 - RNA, 23 nt, Human
cucgcugaugcugggcugggugc

SEQ ID NO: 2383511 - RNA, 22 nt, Human
cucugaaggacauugcggacag

SEQ ID NO: 2383512 - RNA, 22 nt, Human
cucugaagggcaucaugcaucu

SEQ ID NO: 2383513 - RNA, 19 nt, Human
cucugaagggcaucaugca

SEQ ID NO: 2383514 - RNA, 17 nt, Human
cucugaagggcaucaug

SEQ ID NO: 2383515 - RNA, 13 nt, Human
cucugaagggagg

SEQ ID NO: 2383516 - RNA, 14 nt, Human
cucugaagggaggu

SEQ ID NO: 2383517 - RNA, 14 nt, Human
cucugacacacagc

SEQ ID NO: 2383518 - RNA, 22 nt, Human
cucugacaacagacuucugaaa

SEQ ID NO: 2383519 - RNA, 21 nt, Human
cucugacaacagacuucugaa

SEQ ID NO: 2383520 - RNA, 15 nt, Human
cucugacacacagcu

SEQ ID NO: 2383521 - RNA, 16 nt, Human
cucugacacacagcuc

SEQ ID NO: 2383522 - RNA, 17 nt, Human
cucugacacacagcucu

SEQ ID NO: 2383523 - RNA, 18 nt, Human
cucugacacacagcucug

SEQ ID NO: 2383524 - RNA, 23 nt, Human
cucugacagaagaaccccagggu

SEQ ID NO: 2383525 - RNA, 19 nt, Human
cucugacacacagcucugu

SEQ ID NO: 2383526 - RNA, 17 nt, Human
cucugagcuuugcaugu

SEQ ID NO: 2383527 - RNA, 16 nt, Human
cucugagcugugcagg

SEQ ID NO: 2383528 - RNA, 13 nt, Human
cucugagcuuugc

SEQ ID NO: 2383529 - RNA, 18 nt, Human
cucugacuggcacagucu

SEQ ID NO: 2383530 - RNA, 20 nt, Human
cucugagacucgcgacaaug

SEQ ID NO: 2383531 - RNA, 16 nt, Human
cucugacucucaaauc

SEQ ID NO: 2383532 - RNA, 18 nt, Human
cucugacucucaaaucuu

SEQ ID NO: 2383533 - RNA, 23 nt, Human
cucugagacucgcgacaaugcaa

SEQ ID NO: 2383534 - RNA, 16 nt, Human
cucugaggacacuaac

SEQ ID NO: 2383535 - RNA, 16 nt, Human
cucugaguaucuccuc

SEQ ID NO: 2383536 - RNA, 22 nt, Human
cucugaggugccugucccaccc

SEQ ID NO: 2383537 - RNA, 15 nt, Human
cucugaggugccugu

SEQ ID NO: 2383538 - RNA, 19 nt, Human
cucugaggugccuguccca

SEQ ID NO: 2383539 - RNA, 12 nt, Human
cucugaggacac

SEQ ID NO: 2383540 - RNA, 14 nt, Human
cucugaggacacua

SEQ ID NO: 2383541 - RNA, 15 nt, Human
cucugaccugcaggc

SEQ ID NO: 2383542 - RNA, 14 nt, Human
cucugaccugcagg

SEQ ID NO: 2383543 - RNA, 13 nt, Human
cucugaccugcag

SEQ ID NO: 2383544 - RNA, 15 nt, Human
cucugaccugcacug

SEQ ID NO: 2383545 - RNA, 16 nt, Human
cucugaccugcaggcc

SEQ ID NO: 2383546 - RNA, 14 nt, Human
cucugacucagggc

SEQ ID NO: 2383547 - RNA, 16 nt, Human
cucugacucagggcuc

SEQ ID NO: 2383548 - RNA, 15 nt, Human
cucugacucagggcu

SEQ ID NO: 2383549 - RNA, 15 nt, Human
cucugacucucaaau

SEQ ID NO: 2383550 - RNA, 21 nt, Human
cucugacucagggcuccuggg

SEQ ID NO: 2383551 - RNA, 20 nt, Human
cucugacucagggcuccugg

SEQ ID NO: 2383552 - RNA, 17 nt, Human
cucugacucagggcucc

SEQ ID NO: 2383553 - RNA, 21 nt, Human
cucugagacucgcgacaaugc

SEQ ID NO: 2383554 - RNA, 23 nt, Human
cucugaccgaaacagcgcugggu

SEQ ID NO: 2383555 - RNA, 22 nt, Human
cucugaccgaaacagcgcuggg

SEQ ID NO: 2383556 - RNA, 23 nt, Human
cucugaccuacucgagggacuua

SEQ ID NO: 2383557 - RNA, 17 nt, Human
cucugaccucuuggcca

SEQ ID NO: 2383558 - RNA, 12 nt, Human
cucugaccugca

SEQ ID NO: 2383559 - RNA, 14 nt, Human
cucugaccugcacu

SEQ ID NO: 2383560 - RNA, 19 nt, Human
cucugaccgaaacagcgcu

SEQ ID NO: 2383561 - RNA, 17 nt, Human
cucugaccgaaacagcg

SEQ ID NO: 2383562 - RNA, 21 nt, Human
cucugaccccuccucacuggc

SEQ ID NO: 2383563 - RNA, 13 nt, Human
cucugaccccucc

SEQ ID NO: 2383564 - RNA, 14 nt, Human
cucugaccccuccu

SEQ ID NO: 2383565 - RNA, 16 nt, Human
cucugaccccuccuca

SEQ ID NO: 2383566 - RNA, 18 nt, Human
cucugaccccuccucacu

SEQ ID NO: 2383567 - RNA, 12 nt, Human
cucugaccccuc

SEQ ID NO: 2383568 - RNA, 16 nt, Human
cucugacccagugaga

SEQ ID NO: 2383569 - RNA, 13 nt, Human
cucugccggcucu

SEQ ID NO: 2383570 - RNA, 20 nt, Human
cucugccgcaauacaggaac

SEQ ID NO: 2383571 - RNA, 14 nt, Human
cucugccggcucuu

SEQ ID NO: 2383572 - RNA, 15 nt, Human
cucugccggcucuuu

SEQ ID NO: 2383573 - RNA, 18 nt, Human
cucugccggcucuuuccu

SEQ ID NO: 2383574 - RNA, 20 nt, Human
cucugccggcucuuuccuug

SEQ ID NO: 2383575 - RNA, 23 nt, Human
cucugccggcucuuuccuugcuc

SEQ ID NO: 2383576 - RNA, 12 nt, Human
cucugcccccug

SEQ ID NO: 2383577 - RNA, 17 nt, Human
cucugcccccugcuggc

SEQ ID NO: 2383578 - RNA, 19 nt, Human
cucugcccuuguucccuag

SEQ ID NO: 2383579 - RNA, 21 nt, Human
cucugcccuuguucccuaggg

SEQ ID NO: 2383580 - RNA, 18 nt, Human
cucugccgcaauacagga

SEQ ID NO: 2383581 - RNA, 21 nt, Human
cucugccgcaauacaggaacc

SEQ ID NO: 2383582 - RNA, 20 nt, Human
cucugcccuaaugcgcaggc

SEQ ID NO: 2383583 - RNA, 22 nt, Human
cucugcccuaaugcgcaggcug

SEQ ID NO: 2383584 - RNA, 12 nt, Human
cucugcccuugg

SEQ ID NO: 2383585 - RNA, 13 nt, Human
cucugccucccau

SEQ ID NO: 2383586 - RNA, 14 nt, Human
cucugccucccauc

SEQ ID NO: 2383587 - RNA, 16 nt, Human
cucugccucccaucac

SEQ ID NO: 2383588 - RNA, 17 nt, Human
cucugccucccaucacc

SEQ ID NO: 2383589 - RNA, 14 nt, Human
cucugcccaacccu

SEQ ID NO: 2383590 - RNA, 15 nt, Human
cucugccccauccuc

SEQ ID NO: 2383591 - RNA, 20 nt, Human
cucugcccaacccuucccuc

SEQ ID NO: 2383592 - RNA, 24 nt, Human
cucugccccauccuccagcaggga

SEQ ID NO: 2383593 - RNA, 22 nt, Human
cucugccccauccuccagcagg

SEQ ID NO: 2383594 - RNA, 21 nt, Human
cucugccccauccuccagcag

SEQ ID NO: 2383595 - RNA, 17 nt, Human
cucugccccauccucca

SEQ ID NO: 2383596 - RNA, 18 nt, Human
cucugcccacucccugca

SEQ ID NO: 2383597 - RNA, 20 nt, Human
cucugcccacucccugcaac

SEQ ID NO: 2383598 - RNA, 13 nt, Human
cucugcccacucc

SEQ ID NO: 2383599 - RNA, 15 nt, Human
cucugcccacucccu

SEQ ID NO: 2383600 - RNA, 16 nt, Human
cucugcccacucccug

SEQ ID NO: 2383601 - RNA, 17 nt, Human
cucugcccacucccugc

SEQ ID NO: 2383602 - RNA, 15 nt, Human
cucugcacaagcugc

SEQ ID NO: 2383603 - RNA, 14 nt, Human
cucugcacaagcug

SEQ ID NO: 2383604 - RNA, 19 nt, Human
cucugcaggucccuaauaa

SEQ ID NO: 2383605 - RNA, 20 nt, Human
cucugcaggucccuaauaaa

SEQ ID NO: 2383606 - RNA, 13 nt, Human
cucugcacaagcu

SEQ ID NO: 2383607 - RNA, 17 nt, Human
cucugauacccagagca

SEQ ID NO: 2383608 - RNA, 14 nt, Human
cucugauaagagaa

SEQ ID NO: 2383609 - RNA, 10 nt, Human
cucugcacaa

SEQ ID NO: 2383610 - RNA, 17 nt, Human
cucugaguaucuccucg

SEQ ID NO: 2383611 - RNA, 12 nt, Human
cucugaguguga

SEQ ID NO: 2383612 - RNA, 21 nt, Human
cucugcaggucccuaauaaag

SEQ ID NO: 2383613 - RNA, 22 nt, Human
cucugcaggucccuaauaaagc

SEQ ID NO: 2383614 - RNA, 18 nt, Human
cucugcaggucccuaaua

SEQ ID NO: 2383615 - RNA, 17 nt, Human
cucugcaucuacuccca

SEQ ID NO: 2383616 - RNA, 19 nt, Human
cucugcaucuacucccaag

SEQ ID NO: 2383617 - RNA, 20 nt, Human
cucugcaucuacucccaagu

SEQ ID NO: 2383618 - RNA, 22 nt, Human
cucugcaucuacucccaaguau

SEQ ID NO: 2383619 - RNA, 13 nt, Human
cucugcaucugac

SEQ ID NO: 2383620 - RNA, 14 nt, Human
cucugcaucugacc

SEQ ID NO: 2383621 - RNA, 16 nt, Human
cucugcaugcggccca

SEQ ID NO: 2383622 - RNA, 14 nt, Human
cucugcauucuagu

SEQ ID NO: 2383623 - RNA, 21 nt, Human
cucugcaugcggcccagcccg

SEQ ID NO: 2383624 - RNA, 22 nt, Human
cucugcaugcggcccagcccgg

SEQ ID NO: 2383625 - RNA, 17 nt, Human
cucugcaugcggcccag

SEQ ID NO: 2383626 - RNA, 18 nt, Human
cucugcaugcggcccagc

SEQ ID NO: 2383627 - RNA, 19 nt, Human
cucugcaugcggcccagcc

SEQ ID NO: 2383628 - RNA, 20 nt, Human
cucugcaugcggcccagccc

SEQ ID NO: 2383629 - RNA, 15 nt, Human
cucugcauucuagua

SEQ ID NO: 2383630 - RNA, 23 nt, Human
cucugcaugcggcccagcccggc

SEQ ID NO: 2383631 - RNA, 14 nt, Human
cucugcauuugucu

SEQ ID NO: 2383632 - RNA, 19 nt, Human
cucugcauuugucuauucu

SEQ ID NO: 2383633 - RNA, 22 nt, Human
cucugcauuugucuauucucca

SEQ ID NO: 2383634 - RNA, 23 nt, Human
cucugcauuugucuauucuccag

SEQ ID NO: 2383635 - RNA, 14 nt, Human
cucugccaaaggau

SEQ ID NO: 2383636 - RNA, 19 nt, Human
cucugccaaaggaugugau

SEQ ID NO: 2383637 - RNA, 21 nt, Human
cucugccaaaggaugugauau

SEQ ID NO: 2383638 - RNA, 13 nt, Human
cucugccagugac

SEQ ID NO: 2383639 - RNA, 14 nt, Human
cucugccagugaca

SEQ ID NO: 2383640 - RNA, 15 nt, Human
cucugccagugacag

SEQ ID NO: 2383641 - RNA, 20 nt, Human
cucugccagugacagacagg

SEQ ID NO: 2383642 - RNA, 14 nt, Human
cucuucucaagugc

SEQ ID NO: 2383643 - RNA, 15 nt, Human
cucuucucaagugcc

SEQ ID NO: 2383644 - RNA, 19 nt, Human
cucuucuauuuuguaaacu

SEQ ID NO: 2383645 - RNA, 17 nt, Human
cucuucuauuuuguaaa

SEQ ID NO: 2383646 - RNA, 15 nt, Human
cucuucuagagccgu

SEQ ID NO: 2383647 - RNA, 18 nt, Human
cucuuccuugcuguguca

SEQ ID NO: 2383648 - RNA, 20 nt, Human
cucuucguuucagugucaaa

SEQ ID NO: 2383649 - RNA, 10 nt, Human
cucuuccugu

SEQ ID NO: 2383650 - RNA, 23 nt, Human
cucuuccuugaagaacugcaggc

SEQ ID NO: 2383651 - RNA, 16 nt, Human
cucuuccuuuuaucag

SEQ ID NO: 2383652 - RNA, 12 nt, Human
cucuucuccacu

SEQ ID NO: 2383653 - RNA, 13 nt, Human
cucuucuccacug

SEQ ID NO: 2383654 - RNA, 11 nt, Human
cucuucucauu

SEQ ID NO: 2383655 - RNA, 12 nt, Human
cucuucucauuu

SEQ ID NO: 2383656 - RNA, 15 nt, Human
cucuucucauuucac

SEQ ID NO: 2383657 - RNA, 19 nt, Human
cucuucucauuucaccccu

SEQ ID NO: 2383658 - RNA, 15 nt, Human
cucuucuccaggcug

SEQ ID NO: 2383659 - RNA, 13 nt, Human
cucuucuccaggc

SEQ ID NO: 2383660 - RNA, 22 nt, Human
cucuuaagcuuccgccgucuca

SEQ ID NO: 2383661 - RNA, 22 nt, Human
cucuuaagccaucuugguaaau

SEQ ID NO: 2383662 - RNA, 12 nt, Human
cucuuaaguuuc

SEQ ID NO: 2383663 - RNA, 14 nt, Human
cucuuaaguuucuc

SEQ ID NO: 2383664 - RNA, 18 nt, Human
cucuuaaguuucucagcu

SEQ ID NO: 2383665 - RNA, 19 nt, Human
cucuuaaguuucucagcuc

SEQ ID NO: 2383666 - RNA, 22 nt, Human
cucuuaaguuucucagcuccca

SEQ ID NO: 2383667 - RNA, 17 nt, Human
cucuuaauuguucauuu

SEQ ID NO: 2383668 - RNA, 16 nt, Human
cucuuccaucaugucc

SEQ ID NO: 2383669 - RNA, 21 nt, Human
cucuuccccagaaaggagacu

SEQ ID NO: 2383670 - RNA, 12 nt, Human
cucuuccccaga

SEQ ID NO: 2383671 - RNA, 14 nt, Human
cucuuccccucuca

SEQ ID NO: 2383672 - RNA, 16 nt, Human
cucuuccccucucaga

SEQ ID NO: 2383673 - RNA, 12 nt, Human
cucuuccccucu

SEQ ID NO: 2383674 - RNA, 23 nt, Human
cucuuccccuugcccuugcccug

SEQ ID NO: 2383675 - RNA, 15 nt, Human
cucuuccccuugccc

SEQ ID NO: 2383676 - RNA, 16 nt, Human
cucuuccccuugcccu

SEQ ID NO: 2383677 - RNA, 18 nt, Human
cucuuccccuugcccuug

SEQ ID NO: 2383678 - RNA, 19 nt, Human
cucuuccccuugcccuugc

SEQ ID NO: 2383679 - RNA, 11 nt, Human
cucuuccucug

SEQ ID NO: 2383680 - RNA, 12 nt, Human
cucuuccucuga

SEQ ID NO: 2383681 - RNA, 13 nt, Human
cucuuccucugag

SEQ ID NO: 2383682 - RNA, 16 nt, Human
cucuuccucugaggcu

SEQ ID NO: 2383683 - RNA, 17 nt, Human
cucuuccucugaggcug

SEQ ID NO: 2383684 - RNA, 22 nt, Human
cucuuccucugaggcuggaucc

SEQ ID NO: 2383685 - RNA, 14 nt, Human
cucuuccugcaagg

SEQ ID NO: 2383686 - RNA, 14 nt, Human
cucuguuucucuuu

SEQ ID NO: 2383687 - RNA, 16 nt, Human
cucuguuucuccuucu

SEQ ID NO: 2383688 - RNA, 22 nt, Human
cucuguuguccuccccuugggc

SEQ ID NO: 2383689 - RNA, 16 nt, Human
cucuuaaaaaauaaaa

SEQ ID NO: 2383690 - RNA, 19 nt, Human
cucuuaaaaaauaaaaacu

SEQ ID NO: 2383691 - RNA, 12 nt, Human
cucuuaagccau

SEQ ID NO: 2383692 - RNA, 18 nt, Human
cucuuaaaaaauaaaaac

SEQ ID NO: 2383693 - RNA, 17 nt, Human
cucuuaaaaaauaaaaa

SEQ ID NO: 2383694 - RNA, 13 nt, Human
cucuuaagccauc

SEQ ID NO: 2383695 - RNA, 14 nt, Human
cucuuaagccaucu

SEQ ID NO: 2383696 - RNA, 20 nt, Human
cucuuaagccaucuugguaa

SEQ ID NO: 2383697 - RNA, 21 nt, Human
cucuuaagccaucuugguaaa

SEQ ID NO: 2383698 - RNA, 19 nt, Human
cucuuaagaagacugcauu

SEQ ID NO: 2383699 - RNA, 17 nt, Human
cucugugugcacaaaua

SEQ ID NO: 2383700 - RNA, 15 nt, Human
cucugugugcacaaa

SEQ ID NO: 2383701 - RNA, 17 nt, Human
cucuguguccuucccug

SEQ ID NO: 2383702 - RNA, 14 nt, Human
cucuguguccuucc

SEQ ID NO: 2383703 - RNA, 16 nt, Human
cucuguguccuucccu

SEQ ID NO: 2383704 - RNA, 20 nt, Human
cucuguugcccaggcuggag

SEQ ID NO: 2383705 - RNA, 22 nt, Human
cucuguugcccaggcuggagug

SEQ ID NO: 2383706 - RNA, 12 nt, Human
cucuguuguccu

SEQ ID NO: 2383707 - RNA, 17 nt, Human
cucuguuguccuccccu

SEQ ID NO: 2383708 - RNA, 20 nt, Human
cucuguuguccuccccuugg

SEQ ID NO: 2383709 - RNA, 21 nt, Human
cucuguuguccuccccuuggg

SEQ ID NO: 2383710 - RNA, 23 nt, Human
cucugugaccugccccgcccagc

SEQ ID NO: 2383711 - RNA, 15 nt, Human
cucugugaccugccc

SEQ ID NO: 2383712 - RNA, 19 nt, Human
cucugugucagguggggca

SEQ ID NO: 2383713 - RNA, 19 nt, Human
cucugugaccaaugucuug

SEQ ID NO: 2383714 - RNA, 14 nt, Human
cucugugaccucag

SEQ ID NO: 2383715 - RNA, 16 nt, Human
cucugugaccucaggc

SEQ ID NO: 2383716 - RNA, 19 nt, Human
cucugugaccucaggcacu

SEQ ID NO: 2383717 - RNA, 24 nt, Human
cucugugaccucaggcacuagccu

SEQ ID NO: 2383718 - RNA, 23 nt, Human
cucugugaacgauuuagaaagaa

SEQ ID NO: 2383719 - RNA, 18 nt, Human
cucugugaagcauucgag

SEQ ID NO: 2383720 - RNA, 18 nt, Human
cucugugaacccuaugag

SEQ ID NO: 2383721 - RNA, 18 nt, Human
cucugugaacgauuuaga

SEQ ID NO: 2383722 - RNA, 21 nt, Human
cucugugaacgauuuagaaag

SEQ ID NO: 2383723 - RNA, 18 nt, Human
cucugugaccaaugucuu

SEQ ID NO: 2383724 - RNA, 17 nt, Human
cucugugaccaaugucu

SEQ ID NO: 2383725 - RNA, 15 nt, Human
cucugugaccaaugu

SEQ ID NO: 2383726 - RNA, 14 nt, Human
cucugugaccaaug

SEQ ID NO: 2383727 - RNA, 20 nt, Human
cucugugucagguggggcag

SEQ ID NO: 2383728 - RNA, 21 nt, Human
cucugugucagguggggcagc

SEQ ID NO: 2383729 - RNA, 22 nt, Human
cucugugucagguggggcagcu

SEQ ID NO: 2383730 - RNA, 23 nt, Human
cucugugucagguggggcagcuu

SEQ ID NO: 2383731 - RNA, 18 nt, Human
cucugucgcccagucugg

SEQ ID NO: 2383732 - RNA, 19 nt, Human
cucugucgcccagucugga

SEQ ID NO: 2383733 - RNA, 23 nt, Human
cucugucuucuuugcccacaaug

SEQ ID NO: 2383734 - RNA, 15 nt, Human
cucugucuuguguuu

SEQ ID NO: 2383735 - RNA, 16 nt, Human
cucugucuuguguuuc

SEQ ID NO: 2383736 - RNA, 17 nt, Human
cucugucgcccagucug

SEQ ID NO: 2383737 - RNA, 22 nt, Human
cucugucgcccaggcuggagug

SEQ ID NO: 2383738 - RNA, 18 nt, Human
cucugucgcccaggcugg

SEQ ID NO: 2383739 - RNA, 13 nt, Human
cucugucgcccag

SEQ ID NO: 2383740 - RNA, 15 nt, Human
cucugucgcccaggc

SEQ ID NO: 2383741 - RNA, 17 nt, Human
cucuggggccacacaga

SEQ ID NO: 2383742 - RNA, 20 nt, Human
cucuggggccacacagaaac

SEQ ID NO: 2383743 - RNA, 14 nt, Human
cucuggggacuccg

SEQ ID NO: 2383744 - RNA, 17 nt, Human
cucugggcugccaugug

SEQ ID NO: 2383745 - RNA, 23 nt, Human
cucugggccaagucaaagacauu

SEQ ID NO: 2383746 - RNA, 23 nt, Human
cucugggcaggaccucagagucc

SEQ ID NO: 2383747 - RNA, 14 nt, Human
cucuggcuagaggc

SEQ ID NO: 2383748 - RNA, 16 nt, Human
cucuggcgacaguuuu

SEQ ID NO: 2383749 - RNA, 17 nt, Human
cucugggagaggauuuu

SEQ ID NO: 2383750 - RNA, 14 nt, Human
cucuggcguguggg

SEQ ID NO: 2383751 - RNA, 15 nt, Human
cucugggcaggaccu

SEQ ID NO: 2383752 - RNA, 20 nt, Human
cucugggccauucuccacag

SEQ ID NO: 2383753 - RNA, 14 nt, Human
cucuguccugggag

SEQ ID NO: 2383754 - RNA, 13 nt, Human
cucuguccuggga

SEQ ID NO: 2383755 - RNA, 15 nt, Human
cucuguccugggagu

SEQ ID NO: 2383756 - RNA, 22 nt, Human
cucuguccugggagugagcugg

SEQ ID NO: 2383757 - RNA, 19 nt, Human
cucuggccaggauggaggg

SEQ ID NO: 2383758 - RNA, 13 nt, Human
cucuggccccaag

SEQ ID NO: 2383759 - RNA, 15 nt, Human
cucuggccaggaugg

SEQ ID NO: 2383760 - RNA, 10 nt, Human
cucuggccag

SEQ ID NO: 2383761 - RNA, 20 nt, Human
cucuggcauuagaauuauuu

SEQ ID NO: 2383762 - RNA, 23 nt, Human
cucuggcauuagaauuauuuaaa

SEQ ID NO: 2383763 - RNA, 21 nt, Human
cucuggccuucggccuccauc

SEQ ID NO: 2383764 - RNA, 14 nt, Human
cucuggcccugccu

SEQ ID NO: 2383765 - RNA, 15 nt, Human
cucuggccuuuuccu

SEQ ID NO: 2383766 - RNA, 16 nt, Human
cucuggccuuuuccua

SEQ ID NO: 2383767 - RNA, 13 nt, Human
cucuggcccugcc

SEQ ID NO: 2383768 - RNA, 24 nt, Human
cucuggcccucuaccccugaucug

SEQ ID NO: 2383769 - RNA, 14 nt, Human
cucuggccccaagg

SEQ ID NO: 2383770 - RNA, 15 nt, Human
cucuggccccaaggg

SEQ ID NO: 2383771 - RNA, 22 nt, Human
cucuggccuucggccuccaucc

SEQ ID NO: 2383772 - RNA, 18 nt, Human
cucuggauugugggaauu

SEQ ID NO: 2383773 - RNA, 22 nt, Human
cucuggauuggagauagggaaa

SEQ ID NO: 2383774 - RNA, 23 nt, Human
cucuggcagcucagagagggugg

SEQ ID NO: 2383775 - RNA, 19 nt, Human
cucuggcaguucuggaaug

SEQ ID NO: 2383776 - RNA, 18 nt, Human
cucuggcauuagaauuau

SEQ ID NO: 2383777 - RNA, 19 nt, Human
cucuggcauuagaauuauu

SEQ ID NO: 2383778 - RNA, 17 nt, Human
cucugccucugccugca

SEQ ID NO: 2383779 - RNA, 13 nt, Human
cucuggauggcac

SEQ ID NO: 2383780 - RNA, 14 nt, Human
cucugccucccuca

SEQ ID NO: 2383781 - RNA, 15 nt, Human
cucuggauggcacca

SEQ ID NO: 2383782 - RNA, 16 nt, Human
cucuggauggcaccag

SEQ ID NO: 2383783 - RNA, 19 nt, Human
cucuggauggcaccagagg

SEQ ID NO: 2383784 - RNA, 20 nt, Human
cucuggauggcaccagaggc

SEQ ID NO: 2383785 - RNA, 10 nt, Human
cucugccuga

SEQ ID NO: 2383786 - RNA, 19 nt, Human
cucuggauuauauuaugaa

SEQ ID NO: 2383787 - RNA, 20 nt, Human
cucuggauuauauuaugaag

SEQ ID NO: 2383788 - RNA, 16 nt, Human
cucugccucugacaca

SEQ ID NO: 2383789 - RNA, 22 nt, Human
cucugccggcucuuuccuugcu

SEQ ID NO: 2383790 - RNA, 21 nt, Human
cucugccucccaucacccgcu

SEQ ID NO: 2383791 - RNA, 19 nt, Human
cucugccucugacacacag

SEQ ID NO: 2383792 - RNA, 20 nt, Human
cucugccucugacacacagc

SEQ ID NO: 2383793 - RNA, 16 nt, Human
gaaccgcaggaagcug

SEQ ID NO: 2383794 - RNA, 15 nt, Human
gaaccgcugaauaug

SEQ ID NO: 2383795 - RNA, 15 nt, Human
gaaccgcaggaagcu

SEQ ID NO: 2383796 - RNA, 14 nt, Human
gaaccgcaggaagc

SEQ ID NO: 2383797 - RNA, 20 nt, Human
gaaccgcaggaagcugcucc

SEQ ID NO: 2383798 - RNA, 13 nt, Human
gaaccgcaggaag

SEQ ID NO: 2383799 - RNA, 17 nt, Human
gaacagacaggagaaau

SEQ ID NO: 2383800 - RNA, 18 nt, Human
gaacagacaggagaaaug

SEQ ID NO: 2383801 - RNA, 16 nt, Human
gaaccaccacacccag

SEQ ID NO: 2383802 - RNA, 17 nt, Human
gaaccaccacacccagc

SEQ ID NO: 2383803 - RNA, 11 nt, Human
gaaccugaccc

SEQ ID NO: 2383804 - RNA, 14 nt, Human
gaaccuagaagggc

SEQ ID NO: 2383805 - RNA, 12 nt, Human
gaaccugacccc

SEQ ID NO: 2383806 - RNA, 17 nt, Human
gaaccugacguagcugc

SEQ ID NO: 2383807 - RNA, 18 nt, Human
gaaccguuuugaagcuac

SEQ ID NO: 2383808 - RNA, 17 nt, Human
gaaccguuuugaagcua

SEQ ID NO: 2383809 - RNA, 20 nt, Human
gaaccuaacuccccacccca

SEQ ID NO: 2383810 - RNA, 19 nt, Human
gaaccguuuugaagcuacu

SEQ ID NO: 2383811 - RNA, 15 nt, Human
gaaccuaccuucauu

SEQ ID NO: 2383812 - RNA, 12 nt, Human
gaacagaaggau

SEQ ID NO: 2383813 - RNA, 15 nt, Human
gaacacuuuuaauaa

SEQ ID NO: 2383814 - RNA, 13 nt, Human
gaacagaaauacc

SEQ ID NO: 2383815 - RNA, 20 nt, Human
gaacacugggggaggggaca

SEQ ID NO: 2383816 - RNA, 18 nt, Human
gaacacugggggagggga

SEQ ID NO: 2383817 - RNA, 12 nt, Human
gaacagaauguu

SEQ ID NO: 2383818 - RNA, 14 nt, Human
gaacagaauguuuu

SEQ ID NO: 2383819 - RNA, 15 nt, Human
gaacagaauguuuua

SEQ ID NO: 2383820 - RNA, 19 nt, Human
gaacagaaggaugaaugag

SEQ ID NO: 2383821 - RNA, 14 nt, Human
gaacagaaggauga

SEQ ID NO: 2383822 - RNA, 16 nt, Human
gaacagacaggagaaa

SEQ ID NO: 2383823 - RNA, 15 nt, Human
gaacagacaggagaa

SEQ ID NO: 2383824 - RNA, 19 nt, Human
gaacagacaacagaaguca

SEQ ID NO: 2383825 - RNA, 18 nt, Human
gaacagacaacagaaguc

SEQ ID NO: 2383826 - RNA, 17 nt, Human
gaacagacaacagaagu

SEQ ID NO: 2383827 - RNA, 15 nt, Human
gaacagacuggaagc

SEQ ID NO: 2383828 - RNA, 16 nt, Human
gaacagacuggaagca

SEQ ID NO: 2383829 - RNA, 21 nt, Human
gaaccacaucuugcucugcug

SEQ ID NO: 2383830 - RNA, 21 nt, Human
gaaccuucuggccucccacag

SEQ ID NO: 2383831 - RNA, 18 nt, Human
gaaccuucuggccuccca

SEQ ID NO: 2383832 - RNA, 14 nt, Human
gaaccuugugccug

SEQ ID NO: 2383833 - RNA, 16 nt, Human
gaaccuugugccuggc

SEQ ID NO: 2383834 - RNA, 17 nt, Human
gaaccuugugccuggcu

SEQ ID NO: 2383835 - RNA, 18 nt, Human
gaaccuugugccuggcuc

SEQ ID NO: 2383836 - RNA, 19 nt, Human
gaaccuugugccuggcuca

SEQ ID NO: 2383837 - RNA, 14 nt, Human
gaacggggagaaaa

SEQ ID NO: 2383838 - RNA, 23 nt, Human
gaacggagccccaggccucugug

SEQ ID NO: 2383839 - RNA, 22 nt, Human
gaacggagccccaggccucugu

SEQ ID NO: 2383840 - RNA, 19 nt, Human
gaacggggcucuucucauu

SEQ ID NO: 2383841 - RNA, 22 nt, Human
gaacggggcucuucucauuuca

SEQ ID NO: 2383842 - RNA, 18 nt, Human
gaaccuuguuauuucuca

SEQ ID NO: 2383843 - RNA, 13 nt, Human
gaaccuuguuauu

SEQ ID NO: 2383844 - RNA, 12 nt, Human
gaaccuggagag

SEQ ID NO: 2383845 - RNA, 12 nt, Human
gaaccuggaacu

SEQ ID NO: 2383846 - RNA, 15 nt, Human
gaaccuggagagcua

SEQ ID NO: 2383847 - RNA, 16 nt, Human
gaaccuggaacuuggg

SEQ ID NO: 2383848 - RNA, 15 nt, Human
gaaccuggaguuccu

SEQ ID NO: 2383849 - RNA, 16 nt, Human
gaaccuggaggggcua

SEQ ID NO: 2383850 - RNA, 17 nt, Human
gaaccuggaggggcuag

SEQ ID NO: 2383851 - RNA, 15 nt, Human
gaaccuggagggcua

SEQ ID NO: 2383852 - RNA, 16 nt, Human
gaaccuggagggcuag

SEQ ID NO: 2383853 - RNA, 21 nt, Human
gaaccuggagggcuggaaucu

SEQ ID NO: 2383854 - RNA, 13 nt, Human
gaaccuggagggg

SEQ ID NO: 2383855 - RNA, 12 nt, Human
gaaccuguccuu

SEQ ID NO: 2383856 - RNA, 20 nt, Human
gaaccuguccuugcacacuc

SEQ ID NO: 2383857 - RNA, 12 nt, Human
gaaccugugucc

SEQ ID NO: 2383858 - RNA, 15 nt, Human
gaaccuguagagcua

SEQ ID NO: 2383859 - RNA, 23 nt, Human
gaacuagccaccaacucuugcag

SEQ ID NO: 2383860 - RNA, 22 nt, Human
gaacuagccaccaacucuugca

SEQ ID NO: 2383861 - RNA, 15 nt, Human
gaacuauaaagaagu

SEQ ID NO: 2383862 - RNA, 22 nt, Human
gaacuauuggagggugggagag

SEQ ID NO: 2383863 - RNA, 20 nt, Human
gaacuauuccccagcagggu

SEQ ID NO: 2383864 - RNA, 15 nt, Human
gaacuauuggagggu

SEQ ID NO: 2383865 - RNA, 21 nt, Human
gaacuauggacggugcuccag

SEQ ID NO: 2383866 - RNA, 18 nt, Human
gaacuauuccccagcagg

SEQ ID NO: 2383867 - RNA, 15 nt, Human
gaacuaugaacuaca

SEQ ID NO: 2383868 - RNA, 17 nt, Human
gaacuauggacggugcu

SEQ ID NO: 2383869 - RNA, 13 nt, Human
gaacuauuagagc

SEQ ID NO: 2383870 - RNA, 15 nt, Human
gaacggggagaaaag

SEQ ID NO: 2383871 - RNA, 17 nt, Human
gaacgguaaauuucugu

SEQ ID NO: 2383872 - RNA, 15 nt, Human
gaacgguaaauuucu

SEQ ID NO: 2383873 - RNA, 16 nt, Human
gaacgggguccuucaa

SEQ ID NO: 2383874 - RNA, 17 nt, Human
gaacguggcucugcugg

SEQ ID NO: 2383875 - RNA, 16 nt, Human
gaacguggcucugcug

SEQ ID NO: 2383876 - RNA, 14 nt, Human
gaacgugacugccc

SEQ ID NO: 2383877 - RNA, 22 nt, Human
gaacgugacugccccaacuccu

SEQ ID NO: 2383878 - RNA, 21 nt, Human
gaacuagaguuuagcuggaaa

SEQ ID NO: 2383879 - RNA, 22 nt, Human
gaacuagaguuuagcuggaaaa

SEQ ID NO: 2383880 - RNA, 17 nt, Human
gaagaaaauugcugugc

SEQ ID NO: 2383881 - RNA, 20 nt, Human
gaagaaaagugggccagugu

SEQ ID NO: 2383882 - RNA, 22 nt, Human
gaagaaaacaucuauucucucc

SEQ ID NO: 2383883 - RNA, 15 nt, Human
gaacuuggaggcacc

SEQ ID NO: 2383884 - RNA, 17 nt, Human
gaacuuggaggcaccau

SEQ ID NO: 2383885 - RNA, 14 nt, Human
gaagaaaacaucua

SEQ ID NO: 2383886 - RNA, 22 nt, Human
gaagaaaacuccuuuagcaggu

SEQ ID NO: 2383887 - RNA, 22 nt, Human
gaagaacuguguuucaaguuca

SEQ ID NO: 2383888 - RNA, 16 nt, Human
gaagaacuugcaugga

SEQ ID NO: 2383889 - RNA, 14 nt, Human
gaagaagagggaga

SEQ ID NO: 2383890 - RNA, 22 nt, Human
gaagaagagggagagguggagc

SEQ ID NO: 2383891 - RNA, 21 nt, Human
gaagaagcaccaaucaugaau

SEQ ID NO: 2383892 - RNA, 18 nt, Human
gaagaaaauugcugugcc

SEQ ID NO: 2383893 - RNA, 15 nt, Human
gaagaaacagaucuc

SEQ ID NO: 2383894 - RNA, 19 nt, Human
gaacuuggaaagaaaugcc

SEQ ID NO: 2383895 - RNA, 22 nt, Human
gaacuugcugcugagugcacca

SEQ ID NO: 2383896 - RNA, 13 nt, Human
gaacuuggcgcug

SEQ ID NO: 2383897 - RNA, 15 nt, Human
gaacuuggcgcugcc

SEQ ID NO: 2383898 - RNA, 16 nt, Human
gaacuuggcgcugccc

SEQ ID NO: 2383899 - RNA, 21 nt, Human
gaacuuguaaaggaauuuaaa

SEQ ID NO: 2383900 - RNA, 23 nt, Human
gaacuugguucccauuugcuccu

SEQ ID NO: 2383901 - RNA, 12 nt, Human
gaacuugguucc

SEQ ID NO: 2383902 - RNA, 20 nt, Human
gaacuuauccuaaaacaaau

SEQ ID NO: 2383903 - RNA, 22 nt, Human
gaacugugaggguaaaggcuau

SEQ ID NO: 2383904 - RNA, 21 nt, Human
gaacugucucucaugaaccuc

SEQ ID NO: 2383905 - RNA, 17 nt, Human
gaacuuacauuguucaa

SEQ ID NO: 2383906 - RNA, 18 nt, Human
gaacuguccagagagcaa

SEQ ID NO: 2383907 - RNA, 15 nt, Human
gaacuuauucuguag

SEQ ID NO: 2383908 - RNA, 22 nt, Human
gaacuuccagauccuggaaauc

SEQ ID NO: 2383909 - RNA, 23 nt, Human
gaacuuccagguguuacuguaau

SEQ ID NO: 2383910 - RNA, 18 nt, Human
gaacuucgcaucaaaaga

SEQ ID NO: 2383911 - RNA, 12 nt, Human
gaacuugacaau

SEQ ID NO: 2383912 - RNA, 12 nt, Human
gaacuugcaugg

SEQ ID NO: 2383913 - RNA, 21 nt, Human
gaacuugcagcugauguugga

SEQ ID NO: 2383914 - RNA, 16 nt, Human
gaacucauuccugccu

SEQ ID NO: 2383915 - RNA, 17 nt, Human
gaacucccagcaacaca

SEQ ID NO: 2383916 - RNA, 11 nt, Human
gaacucccagc

SEQ ID NO: 2383917 - RNA, 13 nt, Human
gaacuguccagag

SEQ ID NO: 2383918 - RNA, 19 nt, Human
gaacucccagcaacacaag

SEQ ID NO: 2383919 - RNA, 20 nt, Human
gaacuggucaccaugaaacu

SEQ ID NO: 2383920 - RNA, 17 nt, Human
gaacugucucucaugaa

SEQ ID NO: 2383921 - RNA, 22 nt, Human
gaacuguccagagagcaacucu

SEQ ID NO: 2383922 - RNA, 14 nt, Human
gaacuguccagaga

SEQ ID NO: 2383923 - RNA, 15 nt, Human
gaacuguccagagag

SEQ ID NO: 2383924 - RNA, 16 nt, Human
gaacuguccagagagc

SEQ ID NO: 2383925 - RNA, 17 nt, Human
gaacuguccagagagca

SEQ ID NO: 2383926 - RNA, 22 nt, Human
gaacuggguacuuguggacaca

SEQ ID NO: 2383927 - RNA, 15 nt, Human
gaacucccuuucaac

SEQ ID NO: 2383928 - RNA, 22 nt, Human
gaacucauuccugccugucucc

SEQ ID NO: 2383929 - RNA, 14 nt, Human
gaacucauuccugc

SEQ ID NO: 2383930 - RNA, 13 nt, Human
gaacucauuccug

SEQ ID NO: 2383931 - RNA, 15 nt, Human
gaacucaacuuugac

SEQ ID NO: 2383932 - RNA, 14 nt, Human
gaacucccuuucaa

SEQ ID NO: 2383933 - RNA, 22 nt, Human
gaacucaucuagguaaauuaca

SEQ ID NO: 2383934 - RNA, 23 nt, Human
gaacucaaauggggccagaucca

SEQ ID NO: 2383935 - RNA, 22 nt, Human
gaacucaaauggggccagaucc

SEQ ID NO: 2383936 - RNA, 20 nt, Human
gaacucaaauggggccagau

SEQ ID NO: 2383937 - RNA, 19 nt, Human
gaacucaaauggggccaga

SEQ ID NO: 2383938 - RNA, 16 nt, Human
gaacucaaauggggcc

SEQ ID NO: 2383939 - RNA, 17 nt, Human
gaaauauacacacagca

SEQ ID NO: 2383940 - RNA, 15 nt, Human
gaaauauacacacag

SEQ ID NO: 2383941 - RNA, 18 nt, Human
gaaauaguucaaagccaa

SEQ ID NO: 2383942 - RNA, 13 nt, Human
gaaauauaauuga

SEQ ID NO: 2383943 - RNA, 15 nt, Human
gaaauagucugugug

SEQ ID NO: 2383944 - RNA, 17 nt, Human
gaaauagucugugugaa

SEQ ID NO: 2383945 - RNA, 22 nt, Human
gaaauaguguggaaauuaagaa

SEQ ID NO: 2383946 - RNA, 21 nt, Human
gaaauaucugaaaauguaugu

SEQ ID NO: 2383947 - RNA, 20 nt, Human
gaaauaugaagaacugagga

SEQ ID NO: 2383948 - RNA, 14 nt, Human
gaaauaugaaugcc

SEQ ID NO: 2383949 - RNA, 14 nt, Human
gaaauaugauuuua

SEQ ID NO: 2383950 - RNA, 14 nt, Human
gaaauaucuguauu

SEQ ID NO: 2383951 - RNA, 13 nt, Human
gaaauaugcaucu

SEQ ID NO: 2383952 - RNA, 18 nt, Human
gaaauaugcacaauagca

SEQ ID NO: 2383953 - RNA, 17 nt, Human
gaaauaugcacaauagc

SEQ ID NO: 2383954 - RNA, 15 nt, Human
gaaauaugauuuuau

SEQ ID NO: 2383955 - RNA, 22 nt, Human
gaaauaugauuuuauuugacaa

SEQ ID NO: 2383956 - RNA, 19 nt, Human
gaaauagacaguauauuua

SEQ ID NO: 2383957 - RNA, 20 nt, Human
gaaauagcuccguggagcag

SEQ ID NO: 2383958 - RNA, 18 nt, Human
gaaauagacaguauauuu

SEQ ID NO: 2383959 - RNA, 20 nt, Human
gaaauagaaauuuccagaga

SEQ ID NO: 2383960 - RNA, 18 nt, Human
gaaauacugcaagaaaau

SEQ ID NO: 2383961 - RNA, 19 nt, Human
gaaauacuguuugagguuu

SEQ ID NO: 2383962 - RNA, 19 nt, Human
gaaauagaaaaacccugcc

SEQ ID NO: 2383963 - RNA, 20 nt, Human
gaaauagaaaaacccugccc

SEQ ID NO: 2383964 - RNA, 21 nt, Human
gaaauagaaaaacccugcccc

SEQ ID NO: 2383965 - RNA, 23 nt, Human
gaaauagaaaaacccugccccca

SEQ ID NO: 2383966 - RNA, 15 nt, Human
gaaauacuguuugag

SEQ ID NO: 2383967 - RNA, 14 nt, Human
gaaauacuauuuaa

SEQ ID NO: 2383968 - RNA, 15 nt, Human
gaaauacuauuuaaa

SEQ ID NO: 2383969 - RNA, 21 nt, Human
gaaauacaauucuacauuguc

SEQ ID NO: 2383970 - RNA, 18 nt, Human
gaaauacacaaguaaaca

SEQ ID NO: 2383971 - RNA, 19 nt, Human
gaaauacacaaguaaacau

SEQ ID NO: 2383972 - RNA, 17 nt, Human
gaaauacagauuuugau

SEQ ID NO: 2383973 - RNA, 22 nt, Human
gaaauacagauuuugauagcaa

SEQ ID NO: 2383974 - RNA, 16 nt, Human
gaaauacuacuccugu

SEQ ID NO: 2383975 - RNA, 17 nt, Human
gaaauacauauuuccaa

SEQ ID NO: 2383976 - RNA, 21 nt, Human
gaaauacauauuuccaagaag

SEQ ID NO: 2383977 - RNA, 21 nt, Human
gaaauacuacuuaccauaugu

SEQ ID NO: 2383978 - RNA, 19 nt, Human
gaaauacuacuccuguaau

SEQ ID NO: 2383979 - RNA, 16 nt, Human
gaaauacuacuuacca

SEQ ID NO: 2383980 - RNA, 12 nt, Human
gaaauacauauu

SEQ ID NO: 2383981 - RNA, 17 nt, Human
gaaauacauggacaaua

SEQ ID NO: 2383982 - RNA, 18 nt, Human
gaaauaaaguuggugaca

SEQ ID NO: 2383983 - RNA, 17 nt, Human
gaaauaaaguuugcuua

SEQ ID NO: 2383984 - RNA, 20 nt, Human
gaaacaugacucguauaugu

SEQ ID NO: 2383985 - RNA, 15 nt, Human
gaaacaugguuuuga

SEQ ID NO: 2383986 - RNA, 17 nt, Human
gaaacaggagagaaagg

SEQ ID NO: 2383987 - RNA, 13 nt, Human
gaaacaggagaga

SEQ ID NO: 2383988 - RNA, 22 nt, Human
gaaacaggaccacaaaaaugaa

SEQ ID NO: 2383989 - RNA, 20 nt, Human
gaaacaucaguuacucugaa

SEQ ID NO: 2383990 - RNA, 19 nt, Human
gaaacaucaguuacucuga

SEQ ID NO: 2383991 - RNA, 23 nt, Human
gaaacaucaguuacucugaaggg

SEQ ID NO: 2383992 - RNA, 22 nt, Human
gaaacauaaauaaaaugaccag

SEQ ID NO: 2383993 - RNA, 13 nt, Human
gaaacauaaauaa

SEQ ID NO: 2383994 - RNA, 15 nt, Human
gaaacauaaauaaaa

SEQ ID NO: 2383995 - RNA, 17 nt, Human
gaaacauaaauaaaaug

SEQ ID NO: 2383996 - RNA, 18 nt, Human
gaaacauaaauaaaauga

SEQ ID NO: 2383997 - RNA, 19 nt, Human
gaaauaauguacaucuggc

SEQ ID NO: 2383998 - RNA, 15 nt, Human
gaaauaauaugcauu

SEQ ID NO: 2383999 - RNA, 17 nt, Human
gaaauaauaaaucuggu

SEQ ID NO: 2384000 - RNA, 14 nt, Human
gaaauaauaaaucu

SEQ ID NO: 2384001 - RNA, 13 nt, Human
gaaauaauaaauc

SEQ ID NO: 2384002 - RNA, 13 nt, Human
gaaauaauaugca

SEQ ID NO: 2384003 - RNA, 14 nt, Human
gaaauaauaugcau

SEQ ID NO: 2384004 - RNA, 11 nt, Human
gaaauaauaaa

SEQ ID NO: 2384005 - RNA, 23 nt, Human
gaaauaaauagcuauauccaugu

SEQ ID NO: 2384006 - RNA, 18 nt, Human
gaaauaacaagucgauga

SEQ ID NO: 2384007 - RNA, 15 nt, Human
gaaauaacaauguua

SEQ ID NO: 2384008 - RNA, 16 nt, Human
gaaauaacaauguuaa

SEQ ID NO: 2384009 - RNA, 17 nt, Human
gaaauaacaauguuaag

SEQ ID NO: 2384010 - RNA, 18 nt, Human
gaaauaacaauguuaagg

SEQ ID NO: 2384011 - RNA, 20 nt, Human
gaaauaacaauguuaaggaa

SEQ ID NO: 2384012 - RNA, 21 nt, Human
gaaauaaauagcuauauccau

SEQ ID NO: 2384013 - RNA, 17 nt, Human
gaaauaaauagcuauau

SEQ ID NO: 2384014 - RNA, 15 nt, Human
gaaauaaauagcuau

SEQ ID NO: 2384015 - RNA, 14 nt, Human
gaaauaaauagcua

SEQ ID NO: 2384016 - RNA, 21 nt, Human
gaaauaaauguaucauagaaa

SEQ ID NO: 2384017 - RNA, 22 nt, Human
gaaauaacuccuucuuguagua

SEQ ID NO: 2384018 - RNA, 14 nt, Human
gaaauaagaaaaau

SEQ ID NO: 2384019 - RNA, 21 nt, Human
gaaauaagaaaaaucauguuu

SEQ ID NO: 2384020 - RNA, 16 nt, Human
gaaauaagaaaaauca

SEQ ID NO: 2384021 - RNA, 18 nt, Human
gaaauaagaaaaaucaug

SEQ ID NO: 2384022 - RNA, 23 nt, Human
gaaaugcugguuuuucaguuuuc

SEQ ID NO: 2384023 - RNA, 15 nt, Human
gaaaugcugggcuga

SEQ ID NO: 2384024 - RNA, 17 nt, Human
gaaaugcugccugccug

SEQ ID NO: 2384025 - RNA, 19 nt, Human
gaaaugcugggcugacggu

SEQ ID NO: 2384026 - RNA, 19 nt, Human
gaaauauuaaacccuggau

SEQ ID NO: 2384027 - RNA, 15 nt, Human
gaaauauucccuaga

SEQ ID NO: 2384028 - RNA, 16 nt, Human
gaaauauugcuggggu

SEQ ID NO: 2384029 - RNA, 15 nt, Human
gaaauauuuagcaaa

SEQ ID NO: 2384030 - RNA, 15 nt, Human
gaaaugcugccugcc

SEQ ID NO: 2384031 - RNA, 16 nt, Human
gaaaugcugccugccu

SEQ ID NO: 2384032 - RNA, 13 nt, Human
gaaauauuauguu

SEQ ID NO: 2384033 - RNA, 16 nt, Human
gaaauauuauguuaaa

SEQ ID NO: 2384034 - RNA, 18 nt, Human
gaaauggcuugaagccaa

SEQ ID NO: 2384035 - RNA, 17 nt, Human
gaaaugggacuuaacuc

SEQ ID NO: 2384036 - RNA, 19 nt, Human
gaaaugggacuuaacuccu

SEQ ID NO: 2384037 - RNA, 16 nt, Human
gaaaugguaugagcug

SEQ ID NO: 2384038 - RNA, 20 nt, Human
gaaaugggcagagcagagac

SEQ ID NO: 2384039 - RNA, 17 nt, Human
gaaauggcuugaagcca

SEQ ID NO: 2384040 - RNA, 17 nt, Human
gaaauggaauacugaag

SEQ ID NO: 2384041 - RNA, 16 nt, Human
gaaauggcuuugugau

SEQ ID NO: 2384042 - RNA, 22 nt, Human
gaaaugcuuguggauugagggu

SEQ ID NO: 2384043 - RNA, 14 nt, Human
gaaaugggcagagc

SEQ ID NO: 2384044 - RNA, 21 nt, Human
gaaauguuauuuuuuaauuau

SEQ ID NO: 2384045 - RNA, 22 nt, Human
gaaauguaagggaaacugccag

SEQ ID NO: 2384046 - RNA, 22 nt, Human
gaaauguuauuuuuuaauuauu

SEQ ID NO: 2384047 - RNA, 13 nt, Human
gaaaugguuguau

SEQ ID NO: 2384048 - RNA, 17 nt, Human
gaaaugguaugagcuga

SEQ ID NO: 2384049 - RNA, 21 nt, Human
gaaaugguaugagcugagggg

SEQ ID NO: 2384050 - RNA, 14 nt, Human
gaaaugguuguauu

SEQ ID NO: 2384051 - RNA, 15 nt, Human
gaaaugguuguauua

SEQ ID NO: 2384052 - RNA, 17 nt, Human
gaaaugguuguauuaga

SEQ ID NO: 2384053 - RNA, 18 nt, Human
gaaaugguuguauuagau

SEQ ID NO: 2384054 - RNA, 19 nt, Human
gaaaugguuguauuagaug

SEQ ID NO: 2384055 - RNA, 20 nt, Human
gaaaugguuguauuagaugu

SEQ ID NO: 2384056 - RNA, 16 nt, Human
gaaauuaagaagaaac

SEQ ID NO: 2384057 - RNA, 15 nt, Human
gaaauuaagaagaaa

SEQ ID NO: 2384058 - RNA, 13 nt, Human
gaaauuaagaaga

SEQ ID NO: 2384059 - RNA, 22 nt, Human
gaaauuaagaaggcaaaaaugu

SEQ ID NO: 2384060 - RNA, 18 nt, Human
gaaauuaagaaggcaaaa

SEQ ID NO: 2384061 - RNA, 17 nt, Human
gaaauuaagaaggcaaa

SEQ ID NO: 2384062 - RNA, 17 nt, Human
gaaauuacacccaaaga

SEQ ID NO: 2384063 - RNA, 20 nt, Human
gaaauuaccagaguuguucu

SEQ ID NO: 2384064 - RNA, 19 nt, Human
gaaauuccuguagcaucuu

SEQ ID NO: 2384065 - RNA, 16 nt, Human
gaaauuccuguagcau

SEQ ID NO: 2384066 - RNA, 14 nt, Human
gaaauucuccugga

SEQ ID NO: 2384067 - RNA, 15 nt, Human
gaaauucuccuggag

SEQ ID NO: 2384068 - RNA, 16 nt, Human
gaaauucuccuggagg

SEQ ID NO: 2384069 - RNA, 17 nt, Human
gaacacugggggagggg

SEQ ID NO: 2384070 - RNA, 16 nt, Human
gaacacugggggaggg

SEQ ID NO: 2384071 - RNA, 18 nt, Human
gaaauuuucuagacuuuc

SEQ ID NO: 2384072 - RNA, 20 nt, Human
gaaauuuucuagacuuucug

SEQ ID NO: 2384073 - RNA, 22 nt, Human
gaaauuuuauaugcuuacugau

SEQ ID NO: 2384074 - RNA, 21 nt, Human
gaaauuugauuucuauucaag

SEQ ID NO: 2384075 - RNA, 14 nt, Human
gaaauuuuccaaug

SEQ ID NO: 2384076 - RNA, 21 nt, Human
gaaauuuucuagacuuucugu

SEQ ID NO: 2384077 - RNA, 22 nt, Human
gaaauuuuaaccuaugauauuu

SEQ ID NO: 2384078 - RNA, 19 nt, Human
gaaauuuuauaugcuuacu

SEQ ID NO: 2384079 - RNA, 15 nt, Human
gaaauuuuauaugcu

SEQ ID NO: 2384080 - RNA, 17 nt, Human
gaaauuuguuauaauga

SEQ ID NO: 2384081 - RNA, 23 nt, Human
gaaauuuaauucauguuucuuaa

SEQ ID NO: 2384082 - RNA, 15 nt, Human
gaaauuugauuucua

SEQ ID NO: 2384083 - RNA, 21 nt, Human
gaaauuuaauucauguuucuu

SEQ ID NO: 2384084 - RNA, 20 nt, Human
gaaauuuaauucauguuucu

SEQ ID NO: 2384085 - RNA, 16 nt, Human
gaaauuuaauucaugu

SEQ ID NO: 2384086 - RNA, 22 nt, Human
gaaauuuaauauagcuauuuuu

SEQ ID NO: 2384087 - RNA, 13 nt, Human
gaaauuuaaaaga

SEQ ID NO: 2384088 - RNA, 21 nt, Human
gaaauugucuagcagagcagg

SEQ ID NO: 2384089 - RNA, 20 nt, Human
gaaauugucuagcagagcag

SEQ ID NO: 2384090 - RNA, 19 nt, Human
gaaauuuaaaagacacugu

SEQ ID NO: 2384091 - RNA, 22 nt, Human
gaaauuguuuaaguguuguaaa

SEQ ID NO: 2384092 - RNA, 19 nt, Human
gaaauugcauuuccugaca

SEQ ID NO: 2384093 - RNA, 13 nt, Human
gaaauugacagau

SEQ ID NO: 2384094 - RNA, 17 nt, Human
gaaauugccugacgaac

SEQ ID NO: 2384095 - RNA, 17 nt, Human
gaaauuggaacagaaug

SEQ ID NO: 2384096 - RNA, 22 nt, Human
gaaauuggaacagaauguuuua

SEQ ID NO: 2384097 - RNA, 14 nt, Human
gaaauuggcuggau

SEQ ID NO: 2384098 - RNA, 15 nt, Human
gaaauuggcuggaug

SEQ ID NO: 2384099 - RNA, 17 nt, Human
gaaauucuccuggaggu

SEQ ID NO: 2384100 - RNA, 21 nt, Human
gaaauugacacaaguggaccu

SEQ ID NO: 2384101 - RNA, 12 nt, Human
gaaauugacaga

SEQ ID NO: 2384102 - RNA, 17 nt, Human
gaaggcagcagguggca

SEQ ID NO: 2384103 - RNA, 13 nt, Human
gaaggcaaugcca

SEQ ID NO: 2384104 - RNA, 16 nt, Human
gaaggcagccaccagc

SEQ ID NO: 2384105 - RNA, 13 nt, Human
gaaggcaggaaga

SEQ ID NO: 2384106 - RNA, 18 nt, Human
gaaggcagaaagcaaaau

SEQ ID NO: 2384107 - RNA, 15 nt, Human
gaaggcagaaagcaa

SEQ ID NO: 2384108 - RNA, 24 nt, Human
gaaggcacuaaaaagagcuguccu

SEQ ID NO: 2384109 - RNA, 22 nt, Human
gaaggcaagaggggguggaggg

SEQ ID NO: 2384110 - RNA, 23 nt, Human
gaaggcaagaggggguggagggg

SEQ ID NO: 2384111 - RNA, 16 nt, Human
gaaggcaaaugacuuu

SEQ ID NO: 2384112 - RNA, 15 nt, Human
gaaggcaaaugacuu

SEQ ID NO: 2384113 - RNA, 12 nt, Human
gaaggcaaaaaa

SEQ ID NO: 2384114 - RNA, 14 nt, Human
gaaggcaagagggg

SEQ ID NO: 2384115 - RNA, 16 nt, Human
gaaggcaagagggggu

SEQ ID NO: 2384116 - RNA, 17 nt, Human
gaaggcaagagggggug

SEQ ID NO: 2384117 - RNA, 13 nt, Human
gaaggcagggaaa

SEQ ID NO: 2384118 - RNA, 13 nt, Human
gaaggcagggagg

SEQ ID NO: 2384119 - RNA, 22 nt, Human
gaaggccagcugccccagccag

SEQ ID NO: 2384120 - RNA, 13 nt, Human
gaaggccacaugu

SEQ ID NO: 2384121 - RNA, 14 nt, Human
gaaggcagggaggg

SEQ ID NO: 2384122 - RNA, 21 nt, Human
gaaggguuuguggcugggggc

SEQ ID NO: 2384123 - RNA, 15 nt, Human
gaaggguuuguggcu

SEQ ID NO: 2384124 - RNA, 21 nt, Human
gaaggguccuucccucucccc

SEQ ID NO: 2384125 - RNA, 17 nt, Human
gaagggugguggagcca

SEQ ID NO: 2384126 - RNA, 14 nt, Human
gaaggguccuuccc

SEQ ID NO: 2384127 - RNA, 13 nt, Human
gaagguaaaauug

SEQ ID NO: 2384128 - RNA, 20 nt, Human
gaaggguuuuccacccugga

SEQ ID NO: 2384129 - RNA, 20 nt, Human
gaagguucuggugugaacua

SEQ ID NO: 2384130 - RNA, 16 nt, Human
gaagguucugguguga

SEQ ID NO: 2384131 - RNA, 13 nt, Human
gaaggguaaagaa

SEQ ID NO: 2384132 - RNA, 16 nt, Human
gaaggccccgcccagg

SEQ ID NO: 2384133 - RNA, 14 nt, Human
gaaggccccgccca

SEQ ID NO: 2384134 - RNA, 15 nt, Human
gaaggccccgcccag

SEQ ID NO: 2384135 - RNA, 20 nt, Human
gaaggaaaaggcagggagcg

SEQ ID NO: 2384136 - RNA, 15 nt, Human
gaaggaccuccugag

SEQ ID NO: 2384137 - RNA, 16 nt, Human
gaaggagaaggaagga

SEQ ID NO: 2384138 - RNA, 23 nt, Human
gaaggacugugacaggcagcaga

SEQ ID NO: 2384139 - RNA, 21 nt, Human
gaaggacugugacaggcagca

SEQ ID NO: 2384140 - RNA, 22 nt, Human
gaaggacugugacaggcagcag

SEQ ID NO: 2384141 - RNA, 18 nt, Human
gaaggacugugacaggca

SEQ ID NO: 2384142 - RNA, 19 nt, Human
gaaggacugugacaggcag

SEQ ID NO: 2384143 - RNA, 22 nt, Human
gaaggagacucaccucugccuc

SEQ ID NO: 2384144 - RNA, 20 nt, Human
gaaggagacucaccucugcc

SEQ ID NO: 2384145 - RNA, 17 nt, Human
gaaggagacucaccucu

SEQ ID NO: 2384146 - RNA, 15 nt, Human
gaaggagacucaccu

SEQ ID NO: 2384147 - RNA, 18 nt, Human
gaaggagacagagcuggu

SEQ ID NO: 2384148 - RNA, 15 nt, Human
gaaggagacagagcu

SEQ ID NO: 2384149 - RNA, 17 nt, Human
gaaggagaaggaaggag

SEQ ID NO: 2384150 - RNA, 23 nt, Human
gaaggacccggaggggccuggca

SEQ ID NO: 2384151 - RNA, 14 nt, Human
gaaggaaaaugaua

SEQ ID NO: 2384152 - RNA, 18 nt, Human
gaaggaaacccagcucug

SEQ ID NO: 2384153 - RNA, 14 nt, Human
gaaggaaacccagc

SEQ ID NO: 2384154 - RNA, 17 nt, Human
gaaggaaacccagcucu

SEQ ID NO: 2384155 - RNA, 16 nt, Human
gaaggagagccugcug

SEQ ID NO: 2384156 - RNA, 15 nt, Human
gaaggagagccugcu

SEQ ID NO: 2384157 - RNA, 13 nt, Human
gaaggagagccug

SEQ ID NO: 2384158 - RNA, 20 nt, Human
gaaggagagaaggggaggag

SEQ ID NO: 2384159 - RNA, 18 nt, Human
gaaggagagaaggggagg

SEQ ID NO: 2384160 - RNA, 16 nt, Human
gaaggagagaagggga

SEQ ID NO: 2384161 - RNA, 15 nt, Human
gaaggagagaagggg

SEQ ID NO: 2384162 - RNA, 20 nt, Human
gaaggagagaaaguggguga

SEQ ID NO: 2384163 - RNA, 21 nt, Human
gaaggagagaaagugggugag

SEQ ID NO: 2384164 - RNA, 23 nt, Human
gaaggagacucaccucugccuca

SEQ ID NO: 2384165 - RNA, 12 nt, Human
gaaggagagaaa

SEQ ID NO: 2384166 - RNA, 13 nt, Human
gaaggagagaaag

SEQ ID NO: 2384167 - RNA, 16 nt, Human
gaaggagagaaagugg

SEQ ID NO: 2384168 - RNA, 22 nt, Human
gaaggagccccauuccugggaa

SEQ ID NO: 2384169 - RNA, 21 nt, Human
gaaggagccccauuccuggga

SEQ ID NO: 2384170 - RNA, 20 nt, Human
gaaggagccccauuccuggg

SEQ ID NO: 2384171 - RNA, 13 nt, Human
gaaggaguuuuau

SEQ ID NO: 2384172 - RNA, 21 nt, Human
gaaggauacaaaagcauguga

SEQ ID NO: 2384173 - RNA, 15 nt, Human
gaaggcaaagcacga

SEQ ID NO: 2384174 - RNA, 14 nt, Human
gaaggcaaaugacu

SEQ ID NO: 2384175 - RNA, 19 nt, Human
gaaggauacaaaagcaugu

SEQ ID NO: 2384176 - RNA, 12 nt, Human
gaaggauacaaa

SEQ ID NO: 2384177 - RNA, 12 nt, Human
gaagccauuguc

SEQ ID NO: 2384178 - RNA, 18 nt, Human
gaagccagugcggcaggu

SEQ ID NO: 2384179 - RNA, 22 nt, Human
gaagccaggagcaaauguuucu

SEQ ID NO: 2384180 - RNA, 15 nt, Human
gaagccaggagcaaa

SEQ ID NO: 2384181 - RNA, 18 nt, Human
gaagccaggagcaaaugu

SEQ ID NO: 2384182 - RNA, 12 nt, Human
gaagccaggagc

SEQ ID NO: 2384183 - RNA, 13 nt, Human
gaagccaggagca

SEQ ID NO: 2384184 - RNA, 14 nt, Human
gaagccaggagcaa

SEQ ID NO: 2384185 - RNA, 14 nt, Human
gaagcccaauaaac

SEQ ID NO: 2384186 - RNA, 16 nt, Human
gaagccauugucuucg

SEQ ID NO: 2384187 - RNA, 16 nt, Human
gaagcccaagugaaau

SEQ ID NO: 2384188 - RNA, 15 nt, Human
gaagcccaagugaaa

SEQ ID NO: 2384189 - RNA, 13 nt, Human
gaagccauugucu

SEQ ID NO: 2384190 - RNA, 14 nt, Human
gaagccauugucuu

SEQ ID NO: 2384191 - RNA, 12 nt, Human
gaagcccagaau

SEQ ID NO: 2384192 - RNA, 10 nt, Human
gaagcccaga

SEQ ID NO: 2384193 - RNA, 23 nt, Human
gaagccagcaggcucucaggcca

SEQ ID NO: 2384194 - RNA, 22 nt, Human
gaagccacuuucuacaggccag

SEQ ID NO: 2384195 - RNA, 20 nt, Human
gaagccagccuucuuccauc

SEQ ID NO: 2384196 - RNA, 12 nt, Human
gaagccagccuu

SEQ ID NO: 2384197 - RNA, 22 nt, Human
gaagccagcuuucccugccucu

SEQ ID NO: 2384198 - RNA, 24 nt, Human
gaagccaggaauuucccaggaccc

SEQ ID NO: 2384199 - RNA, 23 nt, Human
gaagccaggaauuucccaggacc

SEQ ID NO: 2384200 - RNA, 21 nt, Human
gaagccaggaauuucccagga

SEQ ID NO: 2384201 - RNA, 19 nt, Human
gaagccaggaauuucccag

SEQ ID NO: 2384202 - RNA, 18 nt, Human
gaagccacugaagcuggg

SEQ ID NO: 2384203 - RNA, 15 nt, Human
gaagccacugaagcu

SEQ ID NO: 2384204 - RNA, 13 nt, Human
gaagacucuacca

SEQ ID NO: 2384205 - RNA, 15 nt, Human
gaagacucuaccaga

SEQ ID NO: 2384206 - RNA, 23 nt, Human
gaagacucuaccagacuguguau

SEQ ID NO: 2384207 - RNA, 22 nt, Human
gaagccacgguguucugugaua

SEQ ID NO: 2384208 - RNA, 15 nt, Human
gaagccagcaggcuc

SEQ ID NO: 2384209 - RNA, 16 nt, Human
gaagccagcaggcucu

SEQ ID NO: 2384210 - RNA, 19 nt, Human
gaagacucauucuucugua

SEQ ID NO: 2384211 - RNA, 21 nt, Human
gaagacucauucuucuguacg

SEQ ID NO: 2384212 - RNA, 15 nt, Human
gaagaagagggagag

SEQ ID NO: 2384213 - RNA, 17 nt, Human
gaagacugcauuauauu

SEQ ID NO: 2384214 - RNA, 18 nt, Human
gaaggaaaaggcagggag

SEQ ID NO: 2384215 - RNA, 15 nt, Human
gaaggaaaaaugugu

SEQ ID NO: 2384216 - RNA, 18 nt, Human
gaagcuuuuaugugaaac

SEQ ID NO: 2384217 - RNA, 23 nt, Human
gaagcuuguguauccauuaucau

SEQ ID NO: 2384218 - RNA, 14 nt, Human
gaagcuuucaguau

SEQ ID NO: 2384219 - RNA, 14 nt, Human
gaagcuuucugucu

SEQ ID NO: 2384220 - RNA, 15 nt, Human
gaagcuuugaaggcc

SEQ ID NO: 2384221 - RNA, 22 nt, Human
gaagcgcgccacucgcuucccc

SEQ ID NO: 2384222 - RNA, 23 nt, Human
gaagcuucuuaaaugagaaggaa

SEQ ID NO: 2384223 - RNA, 22 nt, Human
gaagcuuguguauccauuauca

SEQ ID NO: 2384224 - RNA, 14 nt, Human
gaagccucuggcua

SEQ ID NO: 2384225 - RNA, 13 nt, Human
gaagccucuggcu

SEQ ID NO: 2384226 - RNA, 17 nt, Human
gaagccucuggcuagag

SEQ ID NO: 2384227 - RNA, 16 nt, Human
gaagccuccccagcuc

SEQ ID NO: 2384228 - RNA, 21 nt, Human
gaagccuuggggcugaugcag

SEQ ID NO: 2384229 - RNA, 16 nt, Human
gaagcgagcacugacc

SEQ ID NO: 2384230 - RNA, 18 nt, Human
gaagccuuugggaagggg

SEQ ID NO: 2384231 - RNA, 15 nt, Human
gaagccuuuccugua

SEQ ID NO: 2384232 - RNA, 13 nt, Human
gaagccuuuggga

SEQ ID NO: 2384233 - RNA, 11 nt, Human
gaagccuuugu

SEQ ID NO: 2384234 - RNA, 10 nt, Human
gaagccuuug

SEQ ID NO: 2384235 - RNA, 12 nt, Human
gaagccucuggc

SEQ ID NO: 2384236 - RNA, 19 nt, Human
gaagccgugcccugccccc

SEQ ID NO: 2384237 - RNA, 17 nt, Human
gaagccgugcccugccc

SEQ ID NO: 2384238 - RNA, 16 nt, Human
gaagccgugcccugcc

SEQ ID NO: 2384239 - RNA, 20 nt, Human
gaagccgugcucgccccagc

SEQ ID NO: 2384240 - RNA, 16 nt, Human
gaagccgggaacagac

SEQ ID NO: 2384241 - RNA, 20 nt, Human
gaagccggcggcccaagccc

SEQ ID NO: 2384242 - RNA, 16 nt, Human
gaagccggaggguguu

SEQ ID NO: 2384243 - RNA, 15 nt, Human
gaagccggcggccca

SEQ ID NO: 2384244 - RNA, 18 nt, Human
gaagccggcggcccaagc

SEQ ID NO: 2384245 - RNA, 23 nt, Human
gaagcccaggaaaggcuccagga

SEQ ID NO: 2384246 - RNA, 21 nt, Human
gaagccgcuggggccaguugg

SEQ ID NO: 2384247 - RNA, 19 nt, Human
gaagcccaauaaaccucuu

SEQ ID NO: 2384248 - RNA, 18 nt, Human
gaagcccaauaaaccucu

SEQ ID NO: 2384249 - RNA, 20 nt, Human
gaagcccaggaaaggcucca

SEQ ID NO: 2384250 - RNA, 21 nt, Human
gaagcccaggaaaggcuccag

SEQ ID NO: 2384251 - RNA, 22 nt, Human
gaagcccaggaaaggcuccagg

SEQ ID NO: 2384252 - RNA, 21 nt, Human
gaaucuauuauacuguauuaa

SEQ ID NO: 2384253 - RNA, 16 nt, Human
gaaucucaaauaacua

SEQ ID NO: 2384254 - RNA, 18 nt, Human
gaaucuggagaccaggga

SEQ ID NO: 2384255 - RNA, 16 nt, Human
gaaucuggagaccagg

SEQ ID NO: 2384256 - RNA, 22 nt, Human
gaaucuggagaccagggagccu

SEQ ID NO: 2384257 - RNA, 13 nt, Human
gaaucuauuuaag

SEQ ID NO: 2384258 - RNA, 22 nt, Human
gaaucuaugccaaagaucacuu

SEQ ID NO: 2384259 - RNA, 15 nt, Human
gaaucuauuauacug

SEQ ID NO: 2384260 - RNA, 21 nt, Human
gaaucuaucugcuuaugcagu

SEQ ID NO: 2384261 - RNA, 12 nt, Human
gaaucuaugcca

SEQ ID NO: 2384262 - RNA, 15 nt, Human
gaaucuaugccaaag

SEQ ID NO: 2384263 - RNA, 19 nt, Human
gaaucuaugccaaagauca

SEQ ID NO: 2384264 - RNA, 15 nt, Human
gaaucuauuuaagua

SEQ ID NO: 2384265 - RNA, 16 nt, Human
gaaucuauuuaaguaa

SEQ ID NO: 2384266 - RNA, 22 nt, Human
gaauccuguccucagcuucuua

SEQ ID NO: 2384267 - RNA, 23 nt, Human
gaauccuacacaccuaagggaca

SEQ ID NO: 2384268 - RNA, 15 nt, Human
gaauccuagggccug

SEQ ID NO: 2384269 - RNA, 20 nt, Human
gaauccuaggcuccacccca

SEQ ID NO: 2384270 - RNA, 14 nt, Human
gaaugaaagggccc

SEQ ID NO: 2384271 - RNA, 21 nt, Human
gaaucuugucucaaugcucau

SEQ ID NO: 2384272 - RNA, 16 nt, Human
gaaugaaacccccaca

SEQ ID NO: 2384273 - RNA, 20 nt, Human
gaaugaaacccccacacaca

SEQ ID NO: 2384274 - RNA, 19 nt, Human
gaaugaaacccccacacac

SEQ ID NO: 2384275 - RNA, 15 nt, Human
gaaucuugucucaau

SEQ ID NO: 2384276 - RNA, 16 nt, Human
gaaucuugucucaaug

SEQ ID NO: 2384277 - RNA, 18 nt, Human
gaaucuugucucaaugcu

SEQ ID NO: 2384278 - RNA, 20 nt, Human
gaaucuugucucaaugcuca

SEQ ID NO: 2384279 - RNA, 13 nt, Human
gaaucuugucuca

SEQ ID NO: 2384280 - RNA, 14 nt, Human
gaaucuugucucaa

SEQ ID NO: 2384281 - RNA, 22 nt, Human
gaaugcucaaguuuuucagaaa

SEQ ID NO: 2384282 - RNA, 23 nt, Human
gaaugcggcaagaaggaauugac

SEQ ID NO: 2384283 - RNA, 19 nt, Human
gaaugccugagugccuggc

SEQ ID NO: 2384284 - RNA, 16 nt, Human
gaaugccugagugccu

SEQ ID NO: 2384285 - RNA, 18 nt, Human
gaaugccugagugccugg

SEQ ID NO: 2384286 - RNA, 13 nt, Human
gaaugccuccucc

SEQ ID NO: 2384287 - RNA, 22 nt, Human
gaaugccucaaugugaccaggg

SEQ ID NO: 2384288 - RNA, 22 nt, Human
gaaugaaagaguaaaggaaaug

SEQ ID NO: 2384289 - RNA, 14 nt, Human
gaaugaaagcuccu

SEQ ID NO: 2384290 - RNA, 14 nt, Human
gaaugccuccugca

SEQ ID NO: 2384291 - RNA, 19 nt, Human
gaaugaaagggcccagaga

SEQ ID NO: 2384292 - RNA, 21 nt, Human
gaaugccucaaugugaccagg

SEQ ID NO: 2384293 - RNA, 21 nt, Human
gaaugaaacccccacacacac

SEQ ID NO: 2384294 - RNA, 12 nt, Human
gaaugaaagagu

SEQ ID NO: 2384295 - RNA, 14 nt, Human
gaaugaaagaguaa

SEQ ID NO: 2384296 - RNA, 19 nt, Human
gaaucagacuucacacugc

SEQ ID NO: 2384297 - RNA, 23 nt, Human
gaaucagacccuaccccaccacg

SEQ ID NO: 2384298 - RNA, 22 nt, Human
gaaucagacccuaccccaccac

SEQ ID NO: 2384299 - RNA, 18 nt, Human
gaaucagacccuacccca

SEQ ID NO: 2384300 - RNA, 13 nt, Human
gaaucagaacuca

SEQ ID NO: 2384301 - RNA, 19 nt, Human
gaaucagaucauuucaaaa

SEQ ID NO: 2384302 - RNA, 12 nt, Human
gaaucagcuucu

SEQ ID NO: 2384303 - RNA, 23 nt, Human
gaaucauuuguucaaagcuguug

SEQ ID NO: 2384304 - RNA, 14 nt, Human
gaaucauuuguuca

SEQ ID NO: 2384305 - RNA, 22 nt, Human
gaaucauuucuauuucuccucc

SEQ ID NO: 2384306 - RNA, 12 nt, Human
gaauccaaacuu

SEQ ID NO: 2384307 - RNA, 13 nt, Human
gaauccaaacuug

SEQ ID NO: 2384308 - RNA, 16 nt, Human
gaauccaagcgagguc

SEQ ID NO: 2384309 - RNA, 17 nt, Human
gaauccaagugaacacu

SEQ ID NO: 2384310 - RNA, 15 nt, Human
gaauccacccauccu

SEQ ID NO: 2384311 - RNA, 24 nt, Human
gaauccacccauccuaccaaugca

SEQ ID NO: 2384312 - RNA, 16 nt, Human
gaauccccucccuguc

SEQ ID NO: 2384313 - RNA, 23 nt, Human
gaaucccccuugccaccccaccc

SEQ ID NO: 2384314 - RNA, 16 nt, Human
gaauccccgaaggugc

SEQ ID NO: 2384315 - RNA, 17 nt, Human
gaauccccucccuguca

SEQ ID NO: 2384316 - RNA, 14 nt, Human
gaaucccccuugcc

SEQ ID NO: 2384317 - RNA, 17 nt, Human
gaaucccccuugccacc

SEQ ID NO: 2384318 - RNA, 18 nt, Human
gaaucccccuugccaccc

SEQ ID NO: 2384319 - RNA, 17 nt, Human
gaauccacucccaggca

SEQ ID NO: 2384320 - RNA, 15 nt, Human
gaauagcugggacua

SEQ ID NO: 2384321 - RNA, 21 nt, Human
gaaucaauaauauauuuucug

SEQ ID NO: 2384322 - RNA, 13 nt, Human
gaaucagaaacag

SEQ ID NO: 2384323 - RNA, 19 nt, Human
gaaucacucuuguggaugu

SEQ ID NO: 2384324 - RNA, 18 nt, Human
gaaucacucuuguggaug

SEQ ID NO: 2384325 - RNA, 14 nt, Human
gaauagcugggacu

SEQ ID NO: 2384326 - RNA, 23 nt, Human
gaauagccacauuuggaauacuu

SEQ ID NO: 2384327 - RNA, 18 nt, Human
gaauagccacauuuggaa

SEQ ID NO: 2384328 - RNA, 15 nt, Human
gaauagccacauuug

SEQ ID NO: 2384329 - RNA, 19 nt, Human
gaauagcaaggugcucaca

SEQ ID NO: 2384330 - RNA, 15 nt, Human
gaauagaugcugacu

SEQ ID NO: 2384331 - RNA, 18 nt, Human
gaaguuuaauugacuuau

SEQ ID NO: 2384332 - RNA, 14 nt, Human
gaaguuucacauga

SEQ ID NO: 2384333 - RNA, 12 nt, Human
gaaguuucugcc

SEQ ID NO: 2384334 - RNA, 21 nt, Human
gaaguuuccuuggcuggugca

SEQ ID NO: 2384335 - RNA, 15 nt, Human
gaauaaaauguugaa

SEQ ID NO: 2384336 - RNA, 17 nt, Human
gaauaaaauguugaaaa

SEQ ID NO: 2384337 - RNA, 21 nt, Human
gaauaaaauguugaaaaguca

SEQ ID NO: 2384338 - RNA, 12 nt, Human
gaauaaaauuuu

SEQ ID NO: 2384339 - RNA, 15 nt, Human
gaagguuuguauauu

SEQ ID NO: 2384340 - RNA, 16 nt, Human
gaagguuuguguuuuu

SEQ ID NO: 2384341 - RNA, 16 nt, Human
gaagguuuguauauug

SEQ ID NO: 2384342 - RNA, 20 nt, Human
gaagguuuacucuguggcca

SEQ ID NO: 2384343 - RNA, 20 nt, Human
gaagguuuacaauuuacaaa

SEQ ID NO: 2384344 - RNA, 20 nt, Human
gaagguuugguguguggaga

SEQ ID NO: 2384345 - RNA, 15 nt, Human
gaagguugugaugaa

SEQ ID NO: 2384346 - RNA, 13 nt, Human
gaagguugaagag

SEQ ID NO: 2384347 - RNA, 12 nt, Human
gaagguuguaag

SEQ ID NO: 2384348 - RNA, 20 nt, Human
gaagguuuguguuuuucugc

SEQ ID NO: 2384349 - RNA, 16 nt, Human
gaaguuuacauuguaa

SEQ ID NO: 2384350 - RNA, 17 nt, Human
gaaguuuacauuguaaa

SEQ ID NO: 2384351 - RNA, 16 nt, Human
gaauaaaguugaagcu

SEQ ID NO: 2384352 - RNA, 14 nt, Human
gaauaaaguugaag

SEQ ID NO: 2384353 - RNA, 22 nt, Human
gaauaaauaaauguaucuuauu

SEQ ID NO: 2384354 - RNA, 11 nt, Human
gaauaaauaug

SEQ ID NO: 2384355 - RNA, 12 nt, Human
gaauaaauaugc

SEQ ID NO: 2384356 - RNA, 16 nt, Human
gaauaaauaugccucu

SEQ ID NO: 2384357 - RNA, 19 nt, Human
gaauaaauaugccucuccu

SEQ ID NO: 2384358 - RNA, 20 nt, Human
gaauaaaguucugaguguuu

SEQ ID NO: 2384359 - RNA, 14 nt, Human
gaauaaaguucuga

SEQ ID NO: 2384360 - RNA, 13 nt, Human
gaauaaaguucug

SEQ ID NO: 2384361 - RNA, 17 nt, Human
gaauaaagccugcuuuu

SEQ ID NO: 2384362 - RNA, 20 nt, Human
gaauaaagcaauuuuccuug

SEQ ID NO: 2384363 - RNA, 21 nt, Human
gaauaaagcaauuuuccuuga

SEQ ID NO: 2384364 - RNA, 16 nt, Human
gaauaaagcaauuuuc

SEQ ID NO: 2384365 - RNA, 17 nt, Human
gaauaaagcaauuuucc

SEQ ID NO: 2384366 - RNA, 18 nt, Human
gaauaaagcaauuuuccu

SEQ ID NO: 2384367 - RNA, 19 nt, Human
gaauaaagcaauuuuccuu

SEQ ID NO: 2384368 - RNA, 22 nt, Human
gaauaaagcaauuuuccuugaa

SEQ ID NO: 2384369 - RNA, 14 nt, Human
gaauaaagacaccu

SEQ ID NO: 2384370 - RNA, 12 nt, Human
gaauaaagcaau

SEQ ID NO: 2384371 - RNA, 13 nt, Human
gaauaaagcaauu

SEQ ID NO: 2384372 - RNA, 14 nt, Human
gaauaaagcaauuu

SEQ ID NO: 2384373 - RNA, 15 nt, Human
gaauaaagcaauuuu

SEQ ID NO: 2384374 - RNA, 19 nt, Human
gaauaaacuagauuacauu

SEQ ID NO: 2384375 - RNA, 16 nt, Human
gaauaaacuagauuac

SEQ ID NO: 2384376 - RNA, 22 nt, Human
gaauaaaauuguaaaauuguau

SEQ ID NO: 2384377 - RNA, 12 nt, Human
gaauaaacuaga

SEQ ID NO: 2384378 - RNA, 23 nt, Human
gaauaaaauguugaaaagucaaa

SEQ ID NO: 2384379 - RNA, 17 nt, Human
gaauaaaauuauuuugg

SEQ ID NO: 2384380 - RNA, 21 nt, Human
gaauaaaauuauuuuggauuu

SEQ ID NO: 2384381 - RNA, 13 nt, Human
gaauaaaauugua

SEQ ID NO: 2384382 - RNA, 14 nt, Human
gaauaacauguaau

SEQ ID NO: 2384383 - RNA, 12 nt, Human
gaauaaggccuu

SEQ ID NO: 2384384 - RNA, 22 nt, Human
gaauaagccauucugacucaua

SEQ ID NO: 2384385 - RNA, 21 nt, Human
gaauaagccauucugacucau

SEQ ID NO: 2384386 - RNA, 20 nt, Human
gaauaagccauucugacuca

SEQ ID NO: 2384387 - RNA, 15 nt, Human
gaauaaauugcuccu

SEQ ID NO: 2384388 - RNA, 21 nt, Human
gaauaaauaugccucuccuuu

SEQ ID NO: 2384389 - RNA, 11 nt, Human
gaauaaauguc

SEQ ID NO: 2384390 - RNA, 14 nt, Human
gaauaaaugucuuu

SEQ ID NO: 2384391 - RNA, 15 nt, Human
gaauaaucuuugggu

SEQ ID NO: 2384392 - RNA, 19 nt, Human
gaauaauaaaaguauauau

SEQ ID NO: 2384393 - RNA, 21 nt, Human
gaauaauaaaaguauauauau

SEQ ID NO: 2384394 - RNA, 18 nt, Human
gaauaaguuauugcaguu

SEQ ID NO: 2384395 - RNA, 19 nt, Human
gaauaaguuauugcaguuu

SEQ ID NO: 2384396 - RNA, 20 nt, Human
gaauaauccuaaacauauga

SEQ ID NO: 2384397 - RNA, 20 nt, Human
gaauaagugccaggauggaa

SEQ ID NO: 2384398 - RNA, 12 nt, Human
gaauaaguuauu

SEQ ID NO: 2384399 - RNA, 13 nt, Human
gaauaaguuauug

SEQ ID NO: 2384400 - RNA, 14 nt, Human
gaauaaguuauugc

SEQ ID NO: 2384401 - RNA, 16 nt, Human
gaauaaguuauugcag

SEQ ID NO: 2384402 - RNA, 14 nt, Human
gaauaaugaaugga

SEQ ID NO: 2384403 - RNA, 22 nt, Human
gaauaaucuuuggguaacuuca

SEQ ID NO: 2384404 - RNA, 13 nt, Human
gaauaaugggcuu

SEQ ID NO: 2384405 - RNA, 20 nt, Human
gaauaaugguaccagauaaa

SEQ ID NO: 2384406 - RNA, 21 nt, Human
gaauaaugguaccagauaaaa

SEQ ID NO: 2384407 - RNA, 20 nt, Human
gaauaauuauuuauuuaaua

SEQ ID NO: 2384408 - RNA, 13 nt, Human
gaauaauuauuua

SEQ ID NO: 2384409 - RNA, 18 nt, Human
gaauaauuauuuauuuaa

SEQ ID NO: 2384410 - RNA, 14 nt, Human
gaauaauguaaaau

SEQ ID NO: 2384411 - RNA, 22 nt, Human
gaauaauguaaaauguugaaua

SEQ ID NO: 2384412 - RNA, 14 nt, Human
gaauacuuuauaaa

SEQ ID NO: 2384413 - RNA, 23 nt, Human
gaauagaaauaaaggaugugauu

SEQ ID NO: 2384414 - RNA, 20 nt, Human
gaauacuuuuuacaauuaaa

SEQ ID NO: 2384415 - RNA, 14 nt, Human
gaauacuuuuuaca

SEQ ID NO: 2384416 - RNA, 19 nt, Human
gaauacuuuugcccuuuga

SEQ ID NO: 2384417 - RNA, 20 nt, Human
gaauacuguuaaaggaaaaa

SEQ ID NO: 2384418 - RNA, 18 nt, Human
gaauacuguuaaaggaaa

SEQ ID NO: 2384419 - RNA, 12 nt, Human
gaaacagaggcu

SEQ ID NO: 2384420 - RNA, 19 nt, Human
gaaacagagacaggcccaa

SEQ ID NO: 2384421 - RNA, 19 nt, Human
gaaacagaggagaguccca

SEQ ID NO: 2384422 - RNA, 17 nt, Human
gaaacagagacaggccc

SEQ ID NO: 2384423 - RNA, 16 nt, Human
gaaacagagacaggcc

SEQ ID NO: 2384424 - RNA, 14 nt, Human
gaaacagagacagg

SEQ ID NO: 2384425 - RNA, 22 nt, Human
gaaacagaaacaaaaacacuaa

SEQ ID NO: 2384426 - RNA, 14 nt, Human
gaaacagaaacaaa

SEQ ID NO: 2384427 - RNA, 15 nt, Human
gaaacacuggggcug

SEQ ID NO: 2384428 - RNA, 16 nt, Human
gaaacacuuugcauaa

SEQ ID NO: 2384429 - RNA, 20 nt, Human
gaaacagaggagagucccag

SEQ ID NO: 2384430 - RNA, 20 nt, Human
gaaacagaucuccuggcaaa

SEQ ID NO: 2384431 - RNA, 18 nt, Human
gaaacagcuaaugggaca

SEQ ID NO: 2384432 - RNA, 20 nt, Human
gaaacagcucgacuuuaaaa

SEQ ID NO: 2384433 - RNA, 15 nt, Human
gaaacagcucgacuu

SEQ ID NO: 2384434 - RNA, 22 nt, Human
gaaacacugggcuucuagaacc

SEQ ID NO: 2384435 - RNA, 18 nt, Human
gaaacacuggggcuggca

SEQ ID NO: 2384436 - RNA, 14 nt, Human
gaaacaccuucucu

SEQ ID NO: 2384437 - RNA, 22 nt, Human
gaaacacccucacacugggacu

SEQ ID NO: 2384438 - RNA, 19 nt, Human
gaaacacccucacacuggg

SEQ ID NO: 2384439 - RNA, 18 nt, Human
gaaacacccucacacugg

SEQ ID NO: 2384440 - RNA, 21 nt, Human
gaaacaccuucucuggagcca

SEQ ID NO: 2384441 - RNA, 20 nt, Human
gaaaaucuuauaauuuaaaa

SEQ ID NO: 2384442 - RNA, 19 nt, Human
gaaaaucaaauacauacuu

SEQ ID NO: 2384443 - RNA, 14 nt, Human
gaaaaucaaauaca

SEQ ID NO: 2384444 - RNA, 15 nt, Human
gaaaaucaaauacau

SEQ ID NO: 2384445 - RNA, 14 nt, Human
gaaacacagaaacc

SEQ ID NO: 2384446 - RNA, 15 nt, Human
gaaaauaugcaucua

SEQ ID NO: 2384447 - RNA, 12 nt, Human
gaaaauaugcau

SEQ ID NO: 2384448 - RNA, 23 nt, Human
gaaaauauacuguaaagaaagag

SEQ ID NO: 2384449 - RNA, 21 nt, Human
gaaaauauacuguaaagaaag

SEQ ID NO: 2384450 - RNA, 12 nt, Human
gaaaauaucacu

SEQ ID NO: 2384451 - RNA, 14 nt, Human
gaaaaucagccugc

SEQ ID NO: 2384452 - RNA, 17 nt, Human
gaaaauauuauguguuu

SEQ ID NO: 2384453 - RNA, 18 nt, Human
gaaaaucagccugcucca

SEQ ID NO: 2384454 - RNA, 16 nt, Human
gaaaaucagccugcuc

SEQ ID NO: 2384455 - RNA, 19 nt, Human
gaaaaucuuauaauuuaaa

SEQ ID NO: 2384456 - RNA, 13 nt, Human
gaaaagcugcuga

SEQ ID NO: 2384457 - RNA, 17 nt, Human
gaaaagcugcugacagu

SEQ ID NO: 2384458 - RNA, 19 nt, Human
gaaaauaacgauaaaagac

SEQ ID NO: 2384459 - RNA, 13 nt, Human
gaaaauaauuguu

SEQ ID NO: 2384460 - RNA, 17 nt, Human
gaaaauaauuguuccaa

SEQ ID NO: 2384461 - RNA, 18 nt, Human
gaaaauauacuguaaaga

SEQ ID NO: 2384462 - RNA, 20 nt, Human
gaaaauauacuguaaagaaa

SEQ ID NO: 2384463 - RNA, 19 nt, Human
gaaaauauacuguaaagaa

SEQ ID NO: 2384464 - RNA, 18 nt, Human
gaaaauaaucauucuuau

SEQ ID NO: 2384465 - RNA, 18 nt, Human
gaaaauaagaauagaaau

SEQ ID NO: 2384466 - RNA, 14 nt, Human
gaaaagcugaaucc

SEQ ID NO: 2384467 - RNA, 20 nt, Human
gaaaagcuauuagccaggau

SEQ ID NO: 2384468 - RNA, 22 nt, Human
gaaaagcuauuagccaggauca

SEQ ID NO: 2384469 - RNA, 11 nt, Human
gaaaagcuauu

SEQ ID NO: 2384470 - RNA, 14 nt, Human
gaaaagcuauuagc

SEQ ID NO: 2384471 - RNA, 17 nt, Human
gaaaagcuauuagccag

SEQ ID NO: 2384472 - RNA, 19 nt, Human
gaaaagcuauuagccagga

SEQ ID NO: 2384473 - RNA, 22 nt, Human
cuuuuuucauggacacuuugaa

SEQ ID NO: 2384474 - RNA, 15 nt, Human
cuuuuuucacuacau

SEQ ID NO: 2384475 - RNA, 14 nt, Human
cuuuuuucuaaagu

SEQ ID NO: 2384476 - RNA, 18 nt, Human
cuuuuuuccuuaauccag

SEQ ID NO: 2384477 - RNA, 18 nt, Human
cuuuugacuuaaagcaga

SEQ ID NO: 2384478 - RNA, 14 nt, Human
cuuuugacaugugg

SEQ ID NO: 2384479 - RNA, 10 nt, Human
cuuuugaccu

SEQ ID NO: 2384480 - RNA, 13 nt, Human
cuuuugacaugug

SEQ ID NO: 2384481 - RNA, 22 nt, Human
cuuuucuuuagagcauugccau

SEQ ID NO: 2384482 - RNA, 16 nt, Human
cuuuugagcauuuaga

SEQ ID NO: 2384483 - RNA, 21 nt, Human
cuuuugagugccuuacacaau

SEQ ID NO: 2384484 - RNA, 20 nt, Human
cuuuuuugaaauaauaaauc

SEQ ID NO: 2384485 - RNA, 13 nt, Human
cuuuuuuccuccu

SEQ ID NO: 2384486 - RNA, 16 nt, Human
cuuuuuucuuuaagau

SEQ ID NO: 2384487 - RNA, 17 nt, Human
cuuuuuugauaaaguuu

SEQ ID NO: 2384488 - RNA, 18 nt, Human
cuuuuuugauaaaguuuc

SEQ ID NO: 2384489 - RNA, 19 nt, Human
cuuuuuugauaaaguuucu

SEQ ID NO: 2384490 - RNA, 16 nt, Human
cuuuuuucuuauuuaa

SEQ ID NO: 2384491 - RNA, 14 nt, Human
cuuuuuuggcugcu

SEQ ID NO: 2384492 - RNA, 15 nt, Human
cuuuuuuggcugcug

SEQ ID NO: 2384493 - RNA, 18 nt, Human
gaaaaagucauccaaucu

SEQ ID NO: 2384494 - RNA, 21 nt, Human
cuuuuuugauaaaguuucuca

SEQ ID NO: 2384495 - RNA, 19 nt, Human
gaaaaaguuaaacauugaa

SEQ ID NO: 2384496 - RNA, 19 nt, Human
gaaaaagucauccaaucua

SEQ ID NO: 2384497 - RNA, 21 nt, Human
gaaaaagucauccaaucuaac

SEQ ID NO: 2384498 - RNA, 12 nt, Human
gaaaaagugaug

SEQ ID NO: 2384499 - RNA, 23 nt, Human
gaaaaagugauggagcagagcaa

SEQ ID NO: 2384500 - RNA, 17 nt, Human
gaaaaaggaugcacaga

SEQ ID NO: 2384501 - RNA, 23 nt, Human
gaaaaaggaugcacagaguuguu

SEQ ID NO: 2384502 - RNA, 12 nt, Human
gaaaacccagag

SEQ ID NO: 2384503 - RNA, 11 nt, Human
gaaaacccacc

SEQ ID NO: 2384504 - RNA, 18 nt, Human
gaaaacguggcugcuuca

SEQ ID NO: 2384505 - RNA, 15 nt, Human
gaaaacguggcugcu

SEQ ID NO: 2384506 - RNA, 16 nt, Human
gaaaacguggcugcuu

SEQ ID NO: 2384507 - RNA, 13 nt, Human
gaaaacccagaga

SEQ ID NO: 2384508 - RNA, 16 nt, Human
gaaaaccaucacauga

SEQ ID NO: 2384509 - RNA, 21 nt, Human
gaaaaccaagccguggcuucc

SEQ ID NO: 2384510 - RNA, 12 nt, Human
gaaaacauuguu

SEQ ID NO: 2384511 - RNA, 18 nt, Human
gaaaaccaagccguggcu

SEQ ID NO: 2384512 - RNA, 19 nt, Human
gaaaaccaagccguggcuu

SEQ ID NO: 2384513 - RNA, 12 nt, Human
gaaaacaucugg

SEQ ID NO: 2384514 - RNA, 20 nt, Human
gaaaacauucugauuuggaa

SEQ ID NO: 2384515 - RNA, 11 nt, Human
gaaaacauugu

SEQ ID NO: 2384516 - RNA, 18 nt, Human
gaaaacauuguuccagau

SEQ ID NO: 2384517 - RNA, 19 nt, Human
gaaaaauaacuucaagcaa

SEQ ID NO: 2384518 - RNA, 15 nt, Human
gaaaacaagugcugg

SEQ ID NO: 2384519 - RNA, 13 nt, Human
gaaaacacauuuu

SEQ ID NO: 2384520 - RNA, 22 nt, Human
gaaaacaauaacgauaaaagac

SEQ ID NO: 2384521 - RNA, 19 nt, Human
gaaaacaucacugaaaugc

SEQ ID NO: 2384522 - RNA, 12 nt, Human
gaaaacaugcua

SEQ ID NO: 2384523 - RNA, 15 nt, Human
gaaaacaugcuacac

SEQ ID NO: 2384524 - RNA, 14 nt, Human
gaaaacaugcuaca

SEQ ID NO: 2384525 - RNA, 13 nt, Human
cuuuucucuuucu

SEQ ID NO: 2384526 - RNA, 14 nt, Human
cuuuucucuuucuc

SEQ ID NO: 2384527 - RNA, 15 nt, Human
cuuuucuccaugagu

SEQ ID NO: 2384528 - RNA, 21 nt, Human
cuuuucuccaauaucagugcu

SEQ ID NO: 2384529 - RNA, 17 nt, Human
cuuuucucugguaauau

SEQ ID NO: 2384530 - RNA, 13 nt, Human
cuuuucucagcug

SEQ ID NO: 2384531 - RNA, 17 nt, Human
cuuuucuccaauaucag

SEQ ID NO: 2384532 - RNA, 21 nt, Human
cuuuucuagcccgaauacaaa

SEQ ID NO: 2384533 - RNA, 13 nt, Human
cuuuucuauuuuc

SEQ ID NO: 2384534 - RNA, 14 nt, Human
cuuuucuauuuucc

SEQ ID NO: 2384535 - RNA, 20 nt, Human
cuuuucuauuuucccucgcu

SEQ ID NO: 2384536 - RNA, 20 nt, Human
cuuuucccugcuuccaggaa

SEQ ID NO: 2384537 - RNA, 18 nt, Human
cuuuucccugcuuccagg

SEQ ID NO: 2384538 - RNA, 17 nt, Human
cuuuucuacccuagcca

SEQ ID NO: 2384539 - RNA, 18 nt, Human
cuuuucuacccuagccau

SEQ ID NO: 2384540 - RNA, 22 nt, Human
cuuuucuacccuagccauuccu

SEQ ID NO: 2384541 - RNA, 18 nt, Human
cuuuucuaggcuacaauu

SEQ ID NO: 2384542 - RNA, 16 nt, Human
cuuuucuacccuagcc

SEQ ID NO: 2384543 - RNA, 13 nt, Human
cuuuucccugcuu

SEQ ID NO: 2384544 - RNA, 14 nt, Human
cuuuucccugcuuc

SEQ ID NO: 2384545 - RNA, 15 nt, Human
cuuuucccugcuucc

SEQ ID NO: 2384546 - RNA, 14 nt, Human
cuuuuccccugucc

SEQ ID NO: 2384547 - RNA, 20 nt, Human
cuuuucccucuuuggcuccc

SEQ ID NO: 2384548 - RNA, 22 nt, Human
cuuuucccucuuuggcuccccu

SEQ ID NO: 2384549 - RNA, 18 nt, Human
cuuuucccacuguuuaag

SEQ ID NO: 2384550 - RNA, 14 nt, Human
cuuuuccccggucc

SEQ ID NO: 2384551 - RNA, 23 nt, Human
cuuuucuguccgagcuuugaaaa

SEQ ID NO: 2384552 - RNA, 18 nt, Human
cuuuucuguccgagcuuu

SEQ ID NO: 2384553 - RNA, 18 nt, Human
cuuuucuggaauguaauc

SEQ ID NO: 2384554 - RNA, 19 nt, Human
cuuuucugcccuggcugcu

SEQ ID NO: 2384555 - RNA, 19 nt, Human
cuuuucuggaauguaauca

SEQ ID NO: 2384556 - RNA, 16 nt, Human
cuuuucuuucagccaa

SEQ ID NO: 2384557 - RNA, 13 nt, Human
cuuuucuguauuu

SEQ ID NO: 2384558 - RNA, 18 nt, Human
cuuuucuugcaugaggcu

SEQ ID NO: 2384559 - RNA, 23 nt, Human
cuuuucuugcaugaggcuagugu

SEQ ID NO: 2384560 - RNA, 13 nt, Human
cuuuucaucuggg

SEQ ID NO: 2384561 - RNA, 16 nt, Human
cuuuucaucugggaaa

SEQ ID NO: 2384562 - RNA, 17 nt, Human
cuuuucaucugggaaag

SEQ ID NO: 2384563 - RNA, 22 nt, Human
cuuuucauaaccuagccuuaga

SEQ ID NO: 2384564 - RNA, 19 nt, Human
cuuuucagcuucugcuggg

SEQ ID NO: 2384565 - RNA, 23 nt, Human
cuuuucagcuucugcugggcugg

SEQ ID NO: 2384566 - RNA, 23 nt, Human
cuuuuacucaugaucuugugaca

SEQ ID NO: 2384567 - RNA, 17 nt, Human
cuuuucacugcuggcug

SEQ ID NO: 2384568 - RNA, 18 nt, Human
cuuuucacugcuggcugc

SEQ ID NO: 2384569 - RNA, 20 nt, Human
cuuuucacugcuggcugccu

SEQ ID NO: 2384570 - RNA, 20 nt, Human
cuuuucauaaccuagccuua

SEQ ID NO: 2384571 - RNA, 23 nt, Human
cuuuucagcgauguaugcagcua

SEQ ID NO: 2384572 - RNA, 21 nt, Human
cuuuucagaagugagcuuugc

SEQ ID NO: 2384573 - RNA, 19 nt, Human
cuuuucagaagugagcuuu

SEQ ID NO: 2384574 - RNA, 14 nt, Human
cuuuucagcuucug

SEQ ID NO: 2384575 - RNA, 16 nt, Human
cuuuucagcuucugcu

SEQ ID NO: 2384576 - RNA, 17 nt, Human
cuuuucagcuucugcug

SEQ ID NO: 2384577 - RNA, 18 nt, Human
cuuuucagcuucugcugg

SEQ ID NO: 2384578 - RNA, 17 nt, Human
cuuuguuucaaccaagu

SEQ ID NO: 2384579 - RNA, 17 nt, Human
cuuuguuucguggggag

SEQ ID NO: 2384580 - RNA, 18 nt, Human
cuuuguuucguggggagg

SEQ ID NO: 2384581 - RNA, 20 nt, Human
cuuuguuuguugucagcuga

SEQ ID NO: 2384582 - RNA, 18 nt, Human
cuuuguuuguugucagcu

SEQ ID NO: 2384583 - RNA, 17 nt, Human
cuuuuacauacugcugu

SEQ ID NO: 2384584 - RNA, 14 nt, Human
cuuuuacauacugc

SEQ ID NO: 2384585 - RNA, 16 nt, Human
cuuuuaccaugccccu

SEQ ID NO: 2384586 - RNA, 14 nt, Human
cuuuuaccaugccc

SEQ ID NO: 2384587 - RNA, 13 nt, Human
cuuuuacauacug

SEQ ID NO: 2384588 - RNA, 14 nt, Human
cuuuuaauuuuccu

SEQ ID NO: 2384589 - RNA, 20 nt, Human
cuuuuacguccaucucuugu

SEQ ID NO: 2384590 - RNA, 15 nt, Human
cuuugggaaaggaga

SEQ ID NO: 2384591 - RNA, 22 nt, Human
cuuugggaaaggagaaguuaag

SEQ ID NO: 2384592 - RNA, 13 nt, Human
cuuugggaagggg

SEQ ID NO: 2384593 - RNA, 17 nt, Human
cuuugggaauauuugaa

SEQ ID NO: 2384594 - RNA, 18 nt, Human
cuuugggaauauuugaau

SEQ ID NO: 2384595 - RNA, 19 nt, Human
cuuugggaauauuugaauc

SEQ ID NO: 2384596 - RNA, 20 nt, Human
cuuugggaauauuugaaucu

SEQ ID NO: 2384597 - RNA, 13 nt, Human
cuuugggaggcca

SEQ ID NO: 2384598 - RNA, 18 nt, Human
cuuuguccccaccgcaga

SEQ ID NO: 2384599 - RNA, 17 nt, Human
cuuuguccuuuuuguua

SEQ ID NO: 2384600 - RNA, 14 nt, Human
cuuugugauuuuug

SEQ ID NO: 2384601 - RNA, 15 nt, Human
cuuugucccggggcu

SEQ ID NO: 2384602 - RNA, 23 nt, Human
cuuugggaauauuugaaucuugu

SEQ ID NO: 2384603 - RNA, 13 nt, Human
cuuugggaauguu

SEQ ID NO: 2384604 - RNA, 22 nt, Human
cuuugggagaaaacgucuugcu

SEQ ID NO: 2384605 - RNA, 22 nt, Human
cuuuguccccaccgcagacagg

SEQ ID NO: 2384606 - RNA, 18 nt, Human
cuuuguucuaaagaugga

SEQ ID NO: 2384607 - RNA, 14 nt, Human
cuuuguucucagcu

SEQ ID NO: 2384608 - RNA, 17 nt, Human
cuuuguucucagcuccc

SEQ ID NO: 2384609 - RNA, 20 nt, Human
cuuuguucucagcucccccu

SEQ ID NO: 2384610 - RNA, 23 nt, Human
cuuuguucucagcucccccuguc

SEQ ID NO: 2384611 - RNA, 18 nt, Human
cuuuguucauagcccagu

SEQ ID NO: 2384612 - RNA, 14 nt, Human
cuuuguucuggcuc

SEQ ID NO: 2384613 - RNA, 15 nt, Human
cuuuguucuggcucu

SEQ ID NO: 2384614 - RNA, 15 nt, Human
cuuugucuaaaacaa

SEQ ID NO: 2384615 - RNA, 19 nt, Human
cuuugucuaaaacaauaaa

SEQ ID NO: 2384616 - RNA, 19 nt, Human
cuuugugauuuuuguaauu

SEQ ID NO: 2384617 - RNA, 18 nt, Human
cuuugugauuuuuguaau

SEQ ID NO: 2384618 - RNA, 17 nt, Human
cuuugugauuuuuguaa

SEQ ID NO: 2384619 - RNA, 17 nt, Human
cuuuggaaggagugaga

SEQ ID NO: 2384620 - RNA, 22 nt, Human
cuuugcugugaggcuguccugu

SEQ ID NO: 2384621 - RNA, 11 nt, Human
cuuugcugcug

SEQ ID NO: 2384622 - RNA, 17 nt, Human
cuuugcugugaggcugu

SEQ ID NO: 2384623 - RNA, 21 nt, Human
cuuugcugugaggcuguccug

SEQ ID NO: 2384624 - RNA, 11 nt, Human
cuuugcugcca

SEQ ID NO: 2384625 - RNA, 18 nt, Human
cuuugcugagccuguaaa

SEQ ID NO: 2384626 - RNA, 19 nt, Human
cuuugcugcugaaggcuca

SEQ ID NO: 2384627 - RNA, 10 nt, Human
cuuugcugcu

SEQ ID NO: 2384628 - RNA, 11 nt, Human
cuuugcugcua

SEQ ID NO: 2384629 - RNA, 13 nt, Human
cuuugcugcuaca

SEQ ID NO: 2384630 - RNA, 16 nt, Human
cuuucccaucuuccaa

SEQ ID NO: 2384631 - RNA, 13 nt, Human
cuuugcuccuccc

SEQ ID NO: 2384632 - RNA, 16 nt, Human
cuuucccauggggagg

SEQ ID NO: 2384633 - RNA, 14 nt, Human
cuuugcucuuucuu

SEQ ID NO: 2384634 - RNA, 13 nt, Human
cuuugcucugggu

SEQ ID NO: 2384635 - RNA, 17 nt, Human
cuuugcucuucaagaaa

SEQ ID NO: 2384636 - RNA, 16 nt, Human
cuuuggcugcaugcga

SEQ ID NO: 2384637 - RNA, 20 nt, Human
cuuuggaccuaaauggccuc

SEQ ID NO: 2384638 - RNA, 19 nt, Human
cuuuggacccugaggccca

SEQ ID NO: 2384639 - RNA, 17 nt, Human
cuuuggacccugaggcc

SEQ ID NO: 2384640 - RNA, 18 nt, Human
cuuuggacccugaggccc

SEQ ID NO: 2384641 - RNA, 15 nt, Human
cuuuggacccugagg

SEQ ID NO: 2384642 - RNA, 16 nt, Human
cuuuggacccugaggc

SEQ ID NO: 2384643 - RNA, 21 nt, Human
cuuuggacagaagcagcucuu

SEQ ID NO: 2384644 - RNA, 20 nt, Human
cuuuggacagaagcagcucu

SEQ ID NO: 2384645 - RNA, 19 nt, Human
cuuuggacagaagcagcuc

SEQ ID NO: 2384646 - RNA, 18 nt, Human
cuuuggacagaagcagcu

SEQ ID NO: 2384647 - RNA, 13 nt, Human
cuuggaagcuccg

SEQ ID NO: 2384648 - RNA, 13 nt, Human
cuuggaggaagga

SEQ ID NO: 2384649 - RNA, 19 nt, Human
cuuggaagagccugcaggu

SEQ ID NO: 2384650 - RNA, 13 nt, Human
cuuggagcugagc

SEQ ID NO: 2384651 - RNA, 15 nt, Human
cuuggaagagccugc

SEQ ID NO: 2384652 - RNA, 21 nt, Human
cuuggaaacuggaugagguca

SEQ ID NO: 2384653 - RNA, 20 nt, Human
cuuggaaagcaucaccucag

SEQ ID NO: 2384654 - RNA, 22 nt, Human
cuuggaaagcaucaccucaggc

SEQ ID NO: 2384655 - RNA, 21 nt, Human
cuuggaaagcaucaccucagg

SEQ ID NO: 2384656 - RNA, 15 nt, Human
cuuggaaaccugccc

SEQ ID NO: 2384657 - RNA, 16 nt, Human
cuuggaaaccugcccu

SEQ ID NO: 2384658 - RNA, 17 nt, Human
cuuggaaaccugcccug

SEQ ID NO: 2384659 - RNA, 18 nt, Human
cuuggaaaccugcccugc

SEQ ID NO: 2384660 - RNA, 20 nt, Human
cuuggaaaccugcccugccu

SEQ ID NO: 2384661 - RNA, 21 nt, Human
cuuggaaaccugcccugccug

SEQ ID NO: 2384662 - RNA, 22 nt, Human
cuuggaaaccugcccugccuga

SEQ ID NO: 2384663 - RNA, 23 nt, Human
cuuggaaaccugcccugccugag

SEQ ID NO: 2384664 - RNA, 15 nt, Human
cuuggaaaggaccag

SEQ ID NO: 2384665 - RNA, 23 nt, Human
cuuggaaagcaucaccucaggcc

SEQ ID NO: 2384666 - RNA, 21 nt, Human
cuuggaaagaaacaaccguug

SEQ ID NO: 2384667 - RNA, 16 nt, Human
cuuggaaaugggagac

SEQ ID NO: 2384668 - RNA, 14 nt, Human
cuuggaaaccugcc

SEQ ID NO: 2384669 - RNA, 22 nt, Human
cuuggaaaaauccagaaagaaa

SEQ ID NO: 2384670 - RNA, 20 nt, Human
cuuggaaaaauccagaaaga

SEQ ID NO: 2384671 - RNA, 16 nt, Human
cuuggaaaaagugaug

SEQ ID NO: 2384672 - RNA, 15 nt, Human
cuugcuuauuugaca

SEQ ID NO: 2384673 - RNA, 17 nt, Human
cuugcuuuucuguauuu

SEQ ID NO: 2384674 - RNA, 14 nt, Human
cuuggaaaaaguga

SEQ ID NO: 2384675 - RNA, 20 nt, Human
cuugcuucaaccccaugaga

SEQ ID NO: 2384676 - RNA, 18 nt, Human
cuugcuguuuuguucugu

SEQ ID NO: 2384677 - RNA, 16 nt, Human
cuugcucugcugacag

SEQ ID NO: 2384678 - RNA, 17 nt, Human
cuugcucugcugacaga

SEQ ID NO: 2384679 - RNA, 16 nt, Human
cuugcuguccuaggcc

SEQ ID NO: 2384680 - RNA, 19 nt, Human
cuugcccugaccucccagc

SEQ ID NO: 2384681 - RNA, 14 nt, Human
cuugcccugaccuc

SEQ ID NO: 2384682 - RNA, 15 nt, Human
cuugcccugaccucc

SEQ ID NO: 2384683 - RNA, 17 nt, Human
cuugcccugaccuccca

SEQ ID NO: 2384684 - RNA, 18 nt, Human
cuugcccugaccucccag

SEQ ID NO: 2384685 - RNA, 20 nt, Human
cuugcuguccuaggccacac

SEQ ID NO: 2384686 - RNA, 17 nt, Human
cuugcuguccuaggcca

SEQ ID NO: 2384687 - RNA, 12 nt, Human
cuugcccugacc

SEQ ID NO: 2384688 - RNA, 13 nt, Human
cuugcccugaccu

SEQ ID NO: 2384689 - RNA, 20 nt, Human
cuugcccggauucugggagg

SEQ ID NO: 2384690 - RNA, 18 nt, Human
cuugcccggauucuggga

SEQ ID NO: 2384691 - RNA, 18 nt, Human
cuugccccggccccggcc

SEQ ID NO: 2384692 - RNA, 21 nt, Human
cuugccccggccccggcccca

SEQ ID NO: 2384693 - RNA, 17 nt, Human
cuugcccggauucuggg

SEQ ID NO: 2384694 - RNA, 13 nt, Human
cuugcucugcuga

SEQ ID NO: 2384695 - RNA, 14 nt, Human
cuugcucugcugac

SEQ ID NO: 2384696 - RNA, 22 nt, Human
cuugcccagagaugccuccacc

SEQ ID NO: 2384697 - RNA, 23 nt, Human
cuugcccagagaugccuccaccg

SEQ ID NO: 2384698 - RNA, 16 nt, Human
cuugccccccacccca

SEQ ID NO: 2384699 - RNA, 15 nt, Human
cuugccccccacccc

SEQ ID NO: 2384700 - RNA, 14 nt, Human
cuugccccccaccc

SEQ ID NO: 2384701 - RNA, 13 nt, Human
cuugccccccacc

SEQ ID NO: 2384702 - RNA, 19 nt, Human
cuugccccccaccccagcc

SEQ ID NO: 2384703 - RNA, 21 nt, Human
cuugcccagagaugccuccac

SEQ ID NO: 2384704 - RNA, 19 nt, Human
cuugcccagagaugccucc

SEQ ID NO: 2384705 - RNA, 13 nt, Human
cuugcccagagau

SEQ ID NO: 2384706 - RNA, 22 nt, Human
cuugcccaccccacccccaccc

SEQ ID NO: 2384707 - RNA, 14 nt, Human
cuugcccacaccga

SEQ ID NO: 2384708 - RNA, 14 nt, Human
cuugcccaccccac

SEQ ID NO: 2384709 - RNA, 15 nt, Human
cuugcccaccccacc

SEQ ID NO: 2384710 - RNA, 17 nt, Human
cuucuccacccugcucu

SEQ ID NO: 2384711 - RNA, 18 nt, Human
cuucuccacccugcucuc

SEQ ID NO: 2384712 - RNA, 21 nt, Human
cuucuccacccugcucuccga

SEQ ID NO: 2384713 - RNA, 13 nt, Human
cuugccacugccu

SEQ ID NO: 2384714 - RNA, 18 nt, Human
cuucucauuucaccccuc

SEQ ID NO: 2384715 - RNA, 16 nt, Human
cuugccagacaugugg

SEQ ID NO: 2384716 - RNA, 12 nt, Human
cuugccagagau

SEQ ID NO: 2384717 - RNA, 11 nt, Human
cuugccagaga

SEQ ID NO: 2384718 - RNA, 14 nt, Human
cuugccacugccuc

SEQ ID NO: 2384719 - RNA, 15 nt, Human
cuugccacugccucu

SEQ ID NO: 2384720 - RNA, 23 nt, Human
cuugccagagauccaaaagaagc

SEQ ID NO: 2384721 - RNA, 16 nt, Human
cuugccagagauccaa

SEQ ID NO: 2384722 - RNA, 20 nt, Human
cuuggcuuuuacugaagccu

SEQ ID NO: 2384723 - RNA, 22 nt, Human
cuuggcuuucauuauuaguacu

SEQ ID NO: 2384724 - RNA, 11 nt, Human
cuugggaaaua

SEQ ID NO: 2384725 - RNA, 12 nt, Human
cuugggaaauau

SEQ ID NO: 2384726 - RNA, 19 nt, Human
cuugggaaauaugaaugcc

SEQ ID NO: 2384727 - RNA, 13 nt, Human
cuuggcuggugca

SEQ ID NO: 2384728 - RNA, 15 nt, Human
cuuggcuuucauguu

SEQ ID NO: 2384729 - RNA, 14 nt, Human
cuuggcugcaggga

SEQ ID NO: 2384730 - RNA, 22 nt, Human
cuuggaguauuggggucugacc

SEQ ID NO: 2384731 - RNA, 14 nt, Human
cuuggcugcuuggc

SEQ ID NO: 2384732 - RNA, 17 nt, Human
cuuggcugcuuggccuu

SEQ ID NO: 2384733 - RNA, 17 nt, Human
cuuggcugcagggaguc

SEQ ID NO: 2384734 - RNA, 14 nt, Human
cuugggaggaagca

SEQ ID NO: 2384735 - RNA, 15 nt, Human
cuugggaggaagcag

SEQ ID NO: 2384736 - RNA, 16 nt, Human
cuugggaggaagcaga

SEQ ID NO: 2384737 - RNA, 14 nt, Human
cuugggcagagcug

SEQ ID NO: 2384738 - RNA, 17 nt, Human
cuugggaggaagcagaa

SEQ ID NO: 2384739 - RNA, 18 nt, Human
cuugggaggaagcagaau

SEQ ID NO: 2384740 - RNA, 15 nt, Human
cuugggcagagcugg

SEQ ID NO: 2384741 - RNA, 18 nt, Human
cuugggcagagcuggcuc

SEQ ID NO: 2384742 - RNA, 19 nt, Human
cuugggcagagcuggcucu

SEQ ID NO: 2384743 - RNA, 20 nt, Human
cuugggcagagcuggcucug

SEQ ID NO: 2384744 - RNA, 15 nt, Human
cuugggacuggguuu

SEQ ID NO: 2384745 - RNA, 17 nt, Human
cuugggacuggguuugg

SEQ ID NO: 2384746 - RNA, 23 nt, Human
cuugggaccgccagauggggccu

SEQ ID NO: 2384747 - RNA, 18 nt, Human
cuugggaauggauccugg

SEQ ID NO: 2384748 - RNA, 10 nt, Human
cuugggaaug

SEQ ID NO: 2384749 - RNA, 22 nt, Human
cuugggaagcugaggcgggaga

SEQ ID NO: 2384750 - RNA, 24 nt, Human
cuuggaggguugguccucuugccu

SEQ ID NO: 2384751 - RNA, 18 nt, Human
cuuggaguauuggggucu

SEQ ID NO: 2384752 - RNA, 17 nt, Human
cuuggagguagcuuuga

SEQ ID NO: 2384753 - RNA, 16 nt, Human
cuuggcugcagggagu

SEQ ID NO: 2384754 - RNA, 15 nt, Human
cuuggagggucccaa

SEQ ID NO: 2384755 - RNA, 15 nt, Human
cuuggaggcugucuu

SEQ ID NO: 2384756 - RNA, 14 nt, Human
cuuggagggaccaa

SEQ ID NO: 2384757 - RNA, 17 nt, Human
cuuggagggucccaagc

SEQ ID NO: 2384758 - RNA, 18 nt, Human
cuuggagggucccaagcu

SEQ ID NO: 2384759 - RNA, 19 nt, Human
cuuggagggucccaagcug

SEQ ID NO: 2384760 - RNA, 21 nt, Human
cuuggagggucccaagcuggg

SEQ ID NO: 2384761 - RNA, 22 nt, Human
cuuggagggucccaagcugggc

SEQ ID NO: 2384762 - RNA, 23 nt, Human
cuuggagggucccaagcugggcc

SEQ ID NO: 2384763 - RNA, 18 nt, Human
cuuggaggguugguccuc

SEQ ID NO: 2384764 - RNA, 19 nt, Human
cuuggaggguugguccucu

SEQ ID NO: 2384765 - RNA, 15 nt, Human
cuuggaggccagcca

SEQ ID NO: 2384766 - RNA, 21 nt, Human
cuuggagcugagccucucacc

SEQ ID NO: 2384767 - RNA, 18 nt, Human
cuuggagcugagccucuc

SEQ ID NO: 2384768 - RNA, 15 nt, Human
cuuggagcugagccu

SEQ ID NO: 2384769 - RNA, 22 nt, Human
cuuggaggaaggaaacccagcu

SEQ ID NO: 2384770 - RNA, 23 nt, Human
cuuggagggcaugaagacagaua

SEQ ID NO: 2384771 - RNA, 12 nt, Human
cuuggagggcau

SEQ ID NO: 2384772 - RNA, 18 nt, Human
cuuggggaacaagggugg

SEQ ID NO: 2384773 - RNA, 16 nt, Human
cuuggggaauuuccuc

SEQ ID NO: 2384774 - RNA, 23 nt, Human
cuugggcuuccauuugugugugu

SEQ ID NO: 2384775 - RNA, 19 nt, Human
cuugggcuuccauuugugu

SEQ ID NO: 2384776 - RNA, 20 nt, Human
cuuggggacaggggcaggag

SEQ ID NO: 2384777 - RNA, 22 nt, Human
cuugggcuucauccuccucaga

SEQ ID NO: 2384778 - RNA, 20 nt, Human
cuuggggaccagagcugcca

SEQ ID NO: 2384779 - RNA, 21 nt, Human
cuuggggaccagagcugccac

SEQ ID NO: 2384780 - RNA, 14 nt, Human
cuugggccacugug

SEQ ID NO: 2384781 - RNA, 19 nt, Human
cuugggaggaagcagaaua

SEQ ID NO: 2384782 - RNA, 22 nt, Human
cuugggcagagcuggcucugag

SEQ ID NO: 2384783 - RNA, 23 nt, Human
cuugggcagagcuggcucugagc

SEQ ID NO: 2384784 - RNA, 13 nt, Human
cuugggcuucauc

SEQ ID NO: 2384785 - RNA, 15 nt, Human
cuuggggggcugagg

SEQ ID NO: 2384786 - RNA, 18 nt, Human
cuugggggacagggcugg

SEQ ID NO: 2384787 - RNA, 21 nt, Human
cuugggggacagggcuggccc

SEQ ID NO: 2384788 - RNA, 22 nt, Human
cuugggggacagggcuggccca

SEQ ID NO: 2384789 - RNA, 20 nt, Human
cuuggggaguuaagaccugg

SEQ ID NO: 2384790 - RNA, 19 nt, Human
cuuggggaguuaagaccug

SEQ ID NO: 2384791 - RNA, 15 nt, Human
cuuggggacaucucu

SEQ ID NO: 2384792 - RNA, 17 nt, Human
cuuggggaauuuccucu

SEQ ID NO: 2384793 - RNA, 18 nt, Human
cuuggggaauuuccucua

SEQ ID NO: 2384794 - RNA, 22 nt, Human
cuuggggaccagagcugccacc

SEQ ID NO: 2384795 - RNA, 22 nt, Human
cuuggggggcugaggugggagg

SEQ ID NO: 2384796 - RNA, 16 nt, Human
cuuggggggcugaggu

SEQ ID NO: 2384797 - RNA, 19 nt, Human
cuuguaaaggaauuuaaaa

SEQ ID NO: 2384798 - RNA, 14 nt, Human
cuuuacuuuuaaac

SEQ ID NO: 2384799 - RNA, 14 nt, Human
cuuuagucugcaaa

SEQ ID NO: 2384800 - RNA, 15 nt, Human
cuuuagucugcaaaa

SEQ ID NO: 2384801 - RNA, 20 nt, Human
cuuuagugaacguggacucc

SEQ ID NO: 2384802 - RNA, 20 nt, Human
cuuuagugaucacagcagcu

SEQ ID NO: 2384803 - RNA, 14 nt, Human
cuuuaguggcuuca

SEQ ID NO: 2384804 - RNA, 17 nt, Human
cuuuagugguggccauu

SEQ ID NO: 2384805 - RNA, 15 nt, Human
cuuuacuguuuguua

SEQ ID NO: 2384806 - RNA, 14 nt, Human
cuuuacuguuuguu

SEQ ID NO: 2384807 - RNA, 20 nt, Human
cuuuaaagggauggcaagau

SEQ ID NO: 2384808 - RNA, 14 nt, Human
cuuuaaaggaaaaa

SEQ ID NO: 2384809 - RNA, 18 nt, Human
cuuuaaaggaaaaaaugu

SEQ ID NO: 2384810 - RNA, 19 nt, Human
cuuuaaaggaaaaaauguu

SEQ ID NO: 2384811 - RNA, 13 nt, Human
cuuuaaaggaaaa

SEQ ID NO: 2384812 - RNA, 21 nt, Human
cuuuaaaggaaaaaauguugg

SEQ ID NO: 2384813 - RNA, 18 nt, Human
cuuuaaagggauggcaag

SEQ ID NO: 2384814 - RNA, 18 nt, Human
cuuguuuucuugccaaug

SEQ ID NO: 2384815 - RNA, 17 nt, Human
cuuguuuucuugccaau

SEQ ID NO: 2384816 - RNA, 14 nt, Human
cuuguuuucuugcc

SEQ ID NO: 2384817 - RNA, 14 nt, Human
cuuguuuucuggga

SEQ ID NO: 2384818 - RNA, 18 nt, Human
cuuguuuuuccacuacug

SEQ ID NO: 2384819 - RNA, 12 nt, Human
cuuguuuuugca

SEQ ID NO: 2384820 - RNA, 16 nt, Human
cuuguuuuugcacaug

SEQ ID NO: 2384821 - RNA, 19 nt, Human
cuuguuuuuuuuuuccacu

SEQ ID NO: 2384822 - RNA, 20 nt, Human
cuuguuuuuuuuuuccacuu

SEQ ID NO: 2384823 - RNA, 21 nt, Human
cuuguuuuuuuuuuccacuua

SEQ ID NO: 2384824 - RNA, 13 nt, Human
cuuuaaacucagg

SEQ ID NO: 2384825 - RNA, 15 nt, Human
cuuuaaacucaggga

SEQ ID NO: 2384826 - RNA, 16 nt, Human
cuuuaaacucagggac

SEQ ID NO: 2384827 - RNA, 19 nt, Human
cuuuaaacucagggacaga

SEQ ID NO: 2384828 - RNA, 22 nt, Human
cuuuaaacucagggacagagcc

SEQ ID NO: 2384829 - RNA, 14 nt, Human
cuuguggccuggga

SEQ ID NO: 2384830 - RNA, 22 nt, Human
cuuguggauguuuuaauuccau

SEQ ID NO: 2384831 - RNA, 13 nt, Human
cuuguaaauacac

SEQ ID NO: 2384832 - RNA, 12 nt, Human
cuuguggagccc

SEQ ID NO: 2384833 - RNA, 13 nt, Human
cuuguggagcccc

SEQ ID NO: 2384834 - RNA, 14 nt, Human
cuuguggagcccca

SEQ ID NO: 2384835 - RNA, 16 nt, Human
cuuguggagccccaca

SEQ ID NO: 2384836 - RNA, 19 nt, Human
cuuguggagccccacacug

SEQ ID NO: 2384837 - RNA, 15 nt, Human
cuuguggauguuuua

SEQ ID NO: 2384838 - RNA, 16 nt, Human
cuuguggauguuuuaa

SEQ ID NO: 2384839 - RNA, 20 nt, Human
cuuguguguuuauugucaaa

SEQ ID NO: 2384840 - RNA, 15 nt, Human
cuuguaaauaaagcc

SEQ ID NO: 2384841 - RNA, 16 nt, Human
cuuguaaauaaagccc

SEQ ID NO: 2384842 - RNA, 17 nt, Human
cuuguaaauaaagcccu

SEQ ID NO: 2384843 - RNA, 19 nt, Human
cuuguaaauaaagcccugg

SEQ ID NO: 2384844 - RNA, 12 nt, Human
cuuguaaauaaa

SEQ ID NO: 2384845 - RNA, 24 nt, Human
cuugggggaugacuagaggcaggg

SEQ ID NO: 2384846 - RNA, 23 nt, Human
cuugggggacagggcuggcccag

SEQ ID NO: 2384847 - RNA, 16 nt, Human
cuuguggacuaaaaga

SEQ ID NO: 2384848 - RNA, 17 nt, Human
cuuguggacuaaaagau

SEQ ID NO: 2384849 - RNA, 18 nt, Human
cuuguggacuaaaagaua

SEQ ID NO: 2384850 - RNA, 19 nt, Human
cuuguggacuaaaagauau

SEQ ID NO: 2384851 - RNA, 12 nt, Human
cuuguaaauaca

SEQ ID NO: 2384852 - RNA, 15 nt, Human
cuuguaaauacacca

SEQ ID NO: 2384853 - RNA, 15 nt, Human
cuuguggacuaaaag

SEQ ID NO: 2384854 - RNA, 23 nt, Human
cuuguuggauuuuugucuugugu

SEQ ID NO: 2384855 - RNA, 18 nt, Human
cuuguugggauuccugac

SEQ ID NO: 2384856 - RNA, 20 nt, Human
cuuguugggauuccugaccc

SEQ ID NO: 2384857 - RNA, 21 nt, Human
cuuguugggauuccugaccca

SEQ ID NO: 2384858 - RNA, 22 nt, Human
cuuguugggauuccugacccag

SEQ ID NO: 2384859 - RNA, 13 nt, Human
cuuguuguuguua

SEQ ID NO: 2384860 - RNA, 14 nt, Human
cuuguuuucaguuu

SEQ ID NO: 2384861 - RNA, 19 nt, Human
cuuguuuacagcacuacuc

SEQ ID NO: 2384862 - RNA, 22 nt, Human
cuuguuuacagcacuacucugu

SEQ ID NO: 2384863 - RNA, 19 nt, Human
cuuguuguuuuacuaaaga

SEQ ID NO: 2384864 - RNA, 21 nt, Human
cuuguuguuuuacuaaagaaa

SEQ ID NO: 2384865 - RNA, 16 nt, Human
cuuguuguuuuacuaa

SEQ ID NO: 2384866 - RNA, 19 nt, Human
cuuguguguuucacuuuua

SEQ ID NO: 2384867 - RNA, 19 nt, Human
cuuguguguuuugagagua

SEQ ID NO: 2384868 - RNA, 21 nt, Human
cuuguuggauuuuugucuugu

SEQ ID NO: 2384869 - RNA, 18 nt, Human
cuuguuggagccugcagg

SEQ ID NO: 2384870 - RNA, 19 nt, Human
cuuguuggagccugcaggg

SEQ ID NO: 2384871 - RNA, 21 nt, Human
cuuguguguuuauugucaaag

SEQ ID NO: 2384872 - RNA, 19 nt, Human
cuuguguuaaguaugugua

SEQ ID NO: 2384873 - RNA, 13 nt, Human
cuuguguguuuca

SEQ ID NO: 2384874 - RNA, 17 nt, Human
cuuguguguuucacuuu

SEQ ID NO: 2384875 - RNA, 18 nt, Human
cuuguguguuucacuuuu

SEQ ID NO: 2384876 - RNA, 17 nt, Human
cuuucauaaucuuugcu

SEQ ID NO: 2384877 - RNA, 18 nt, Human
cuuucauaaucuuugcuu

SEQ ID NO: 2384878 - RNA, 15 nt, Human
cuuucagugaaagca

SEQ ID NO: 2384879 - RNA, 17 nt, Human
cuuucagugaaagcauc

SEQ ID NO: 2384880 - RNA, 17 nt, Human
cuuucauacugaagaug

SEQ ID NO: 2384881 - RNA, 18 nt, Human
cuuucauuucuugaggua

SEQ ID NO: 2384882 - RNA, 18 nt, Human
cuuucauuuacuguggcu

SEQ ID NO: 2384883 - RNA, 17 nt, Human
cuuucauccacuagugc

SEQ ID NO: 2384884 - RNA, 14 nt, Human
cuuucauauuuuag

SEQ ID NO: 2384885 - RNA, 18 nt, Human
cuuucaucaaucauugua

SEQ ID NO: 2384886 - RNA, 22 nt, Human
cuuucaucaaucauuguacagu

SEQ ID NO: 2384887 - RNA, 20 nt, Human
cuuucaucaaucauuguaca

SEQ ID NO: 2384888 - RNA, 21 nt, Human
cuuucaucaaucauuguacag

SEQ ID NO: 2384889 - RNA, 17 nt, Human
cuuucauuuucuguuug

SEQ ID NO: 2384890 - RNA, 14 nt, Human
cuuucauuuucugu

SEQ ID NO: 2384891 - RNA, 13 nt, Human
cuuucauuuucug

SEQ ID NO: 2384892 - RNA, 20 nt, Human
cuuucauuuuuuuccaggcu

SEQ ID NO: 2384893 - RNA, 22 nt, Human
cuuucauuuuuuuccaggcugg

SEQ ID NO: 2384894 - RNA, 15 nt, Human
cuuucauuuuuuucc

SEQ ID NO: 2384895 - RNA, 16 nt, Human
cuuucauuuuuuucca

SEQ ID NO: 2384896 - RNA, 19 nt, Human
cuuucauuuuuuuccaggc

SEQ ID NO: 2384897 - RNA, 21 nt, Human
cuuuccacccccucccuggcc

SEQ ID NO: 2384898 - RNA, 16 nt, Human
cuuuccacccccuccc

SEQ ID NO: 2384899 - RNA, 15 nt, Human
cuuuccacccccucc

SEQ ID NO: 2384900 - RNA, 14 nt, Human
cuuuccacccccuc

SEQ ID NO: 2384901 - RNA, 21 nt, Human
cuuuccacaccuggcacugcu

SEQ ID NO: 2384902 - RNA, 20 nt, Human
cuuuccacccccucccuggc

SEQ ID NO: 2384903 - RNA, 17 nt, Human
cuuuccacccccucccu

SEQ ID NO: 2384904 - RNA, 16 nt, Human
cuuucccaacucuagc

SEQ ID NO: 2384905 - RNA, 15 nt, Human
cuuuccaaggcuucu

SEQ ID NO: 2384906 - RNA, 15 nt, Human
cuuuccaccacagcc

SEQ ID NO: 2384907 - RNA, 17 nt, Human
cuuuccaccacagccag

SEQ ID NO: 2384908 - RNA, 21 nt, Human
cuuuccaccacagccagcacc

SEQ ID NO: 2384909 - RNA, 22 nt, Human
cuuuccaccacagccagcaccu

SEQ ID NO: 2384910 - RNA, 23 nt, Human
cuuuccaccacagccagcaccug

SEQ ID NO: 2384911 - RNA, 22 nt, Human
cuuuccaaaugcccagcuuaaa

SEQ ID NO: 2384912 - RNA, 13 nt, Human
cuuuccacagaag

SEQ ID NO: 2384913 - RNA, 19 nt, Human
cuuuccaaaugcccagcuu

SEQ ID NO: 2384914 - RNA, 18 nt, Human
cuuuccaaaugcccagcu

SEQ ID NO: 2384915 - RNA, 14 nt, Human
cuuuauugugaucu

SEQ ID NO: 2384916 - RNA, 23 nt, Human
cuuuauuguguuugucauuagcc

SEQ ID NO: 2384917 - RNA, 19 nt, Human
cuuuauuguguuugucauu

SEQ ID NO: 2384918 - RNA, 20 nt, Human
cuuuauuguguuugucauua

SEQ ID NO: 2384919 - RNA, 16 nt, Human
cuuuauuguguuuguc

SEQ ID NO: 2384920 - RNA, 18 nt, Human
cuuuauuguguuugucau

SEQ ID NO: 2384921 - RNA, 18 nt, Human
cuuuauuggcugagauau

SEQ ID NO: 2384922 - RNA, 13 nt, Human
cuuuauugagaaa

SEQ ID NO: 2384923 - RNA, 15 nt, Human
cuuuauugagaaaga

SEQ ID NO: 2384924 - RNA, 16 nt, Human
cuuuauugagaaagag

SEQ ID NO: 2384925 - RNA, 23 nt, Human
cuuuauuccagaaugcuguacau

SEQ ID NO: 2384926 - RNA, 16 nt, Human
cuuuauuggcugagau

SEQ ID NO: 2384927 - RNA, 12 nt, Human
cuuucagguacu

SEQ ID NO: 2384928 - RNA, 21 nt, Human
cuuucagggggguugugaggc

SEQ ID NO: 2384929 - RNA, 11 nt, Human
cuuuauuuucu

SEQ ID NO: 2384930 - RNA, 21 nt, Human
cuuuauuuucuauaauuuaaa

SEQ ID NO: 2384931 - RNA, 16 nt, Human
cuuuauucaaguaaaa

SEQ ID NO: 2384932 - RNA, 20 nt, Human
cuuuauuccagaaugcugua

SEQ ID NO: 2384933 - RNA, 20 nt, Human
cuuuauucuggcagaggagg

SEQ ID NO: 2384934 - RNA, 15 nt, Human
cuuuauuaaucacua

SEQ ID NO: 2384935 - RNA, 22 nt, Human
cuuuauuacccccuccuucaga

SEQ ID NO: 2384936 - RNA, 20 nt, Human
cuuuauuacccccuccuuca

SEQ ID NO: 2384937 - RNA, 14 nt, Human
cuuuauuacccccu

SEQ ID NO: 2384938 - RNA, 20 nt, Human
cuuuauuaaucacuauuguu

SEQ ID NO: 2384939 - RNA, 13 nt, Human
cuuuauuaaaauc

SEQ ID NO: 2384940 - RNA, 18 nt, Human
cuuuauuaaaaucuuaaa

SEQ ID NO: 2384941 - RNA, 21 nt, Human
cuuuauuaaauacaaaacuuc

SEQ ID NO: 2384942 - RNA, 22 nt, Human
cuuuauguugcggugagaacuc

SEQ ID NO: 2384943 - RNA, 20 nt, Human
cuuuauguuacuacaugcac

SEQ ID NO: 2384944 - RNA, 13 nt, Human
cuuuaguuuuugu

SEQ ID NO: 2384945 - RNA, 15 nt, Human
cuuuaguuuuuguga

SEQ ID NO: 2384946 - RNA, 13 nt, Human
cuuuauaaacuuu

SEQ ID NO: 2384947 - RNA, 11 nt, Human
cuuuauaaaua

SEQ ID NO: 2384948 - RNA, 13 nt, Human
cuuuauaaauaaa

SEQ ID NO: 2384949 - RNA, 12 nt, Human
cuuuauaaacuu

SEQ ID NO: 2384950 - RNA, 18 nt, Human
cuuuauguggaaaacaga

SEQ ID NO: 2384951 - RNA, 23 nt, Human
cuuuauguggaaaacagaacauc

SEQ ID NO: 2384952 - RNA, 12 nt, Human
cuuuauguguaa

SEQ ID NO: 2384953 - RNA, 14 nt, Human
cuuuauguguaaau

SEQ ID NO: 2384954 - RNA, 20 nt, Human
cuguauuuuguauuguuuca

SEQ ID NO: 2384955 - RNA, 21 nt, Human
cuguauuuuuaccuuuuuccu

SEQ ID NO: 2384956 - RNA, 20 nt, Human
cuguauuuuguuuuugucuu

SEQ ID NO: 2384957 - RNA, 17 nt, Human
cuguauuuaugugugag

SEQ ID NO: 2384958 - RNA, 14 nt, Human
cuguauuuaauuuu

SEQ ID NO: 2384959 - RNA, 15 nt, Human
cuguauuuaauuuug

SEQ ID NO: 2384960 - RNA, 21 nt, Human
cuguauugaaucauguaguau

SEQ ID NO: 2384961 - RNA, 15 nt, Human
cuguauugaugacag

SEQ ID NO: 2384962 - RNA, 13 nt, Human
cuguauugaauca

SEQ ID NO: 2384963 - RNA, 14 nt, Human
cuguauugaaucau

SEQ ID NO: 2384964 - RNA, 17 nt, Human
cuguauugaaucaugua

SEQ ID NO: 2384965 - RNA, 20 nt, Human
cuguauugaaucauguagua

SEQ ID NO: 2384966 - RNA, 17 nt, Human
cugucaaacaaagccag

SEQ ID NO: 2384967 - RNA, 14 nt, Human
cugucaaacaaagc

SEQ ID NO: 2384968 - RNA, 16 nt, Human
cugucaaaauaauuuu

SEQ ID NO: 2384969 - RNA, 17 nt, Human
cugucaaaauaauuuua

SEQ ID NO: 2384970 - RNA, 13 nt, Human
cugucaauuacag

SEQ ID NO: 2384971 - RNA, 18 nt, Human
cuguauuuuuuuuucuaa

SEQ ID NO: 2384972 - RNA, 21 nt, Human
cuguauuuuuuuuucuaagag

SEQ ID NO: 2384973 - RNA, 22 nt, Human
cuguauuuuuuuuucuaagaga

SEQ ID NO: 2384974 - RNA, 19 nt, Human
cugucaaaacaaguuuuuc

SEQ ID NO: 2384975 - RNA, 21 nt, Human
cugucaaaacaaguuuuucug

SEQ ID NO: 2384976 - RNA, 15 nt, Human
cugucaauuacagga

SEQ ID NO: 2384977 - RNA, 16 nt, Human
cugucaauuacaggaa

SEQ ID NO: 2384978 - RNA, 21 nt, Human
cuguaucccaugagccucagc

SEQ ID NO: 2384979 - RNA, 22 nt, Human
cuguaucccaugagccucagca

SEQ ID NO: 2384980 - RNA, 17 nt, Human
cuguauuagucacagag

SEQ ID NO: 2384981 - RNA, 19 nt, Human
cuguauuagucacagagau

SEQ ID NO: 2384982 - RNA, 13 nt, Human
cuguauucucaaa

SEQ ID NO: 2384983 - RNA, 18 nt, Human
cuguauucucaaacacag

SEQ ID NO: 2384984 - RNA, 21 nt, Human
cuguauucucaaacacaguua

SEQ ID NO: 2384985 - RNA, 12 nt, Human
cuguauugaauc

SEQ ID NO: 2384986 - RNA, 20 nt, Human
cuguaucccaugagccucag

SEQ ID NO: 2384987 - RNA, 14 nt, Human
cuguauaaauagga

SEQ ID NO: 2384988 - RNA, 15 nt, Human
cuguauaaauaggag

SEQ ID NO: 2384989 - RNA, 16 nt, Human
cuguauaaauaggaga

SEQ ID NO: 2384990 - RNA, 19 nt, Human
cuguauaaauaggagagga

SEQ ID NO: 2384991 - RNA, 20 nt, Human
cuguauaaauaggagaggau

SEQ ID NO: 2384992 - RNA, 13 nt, Human
cuguauaaauagg

SEQ ID NO: 2384993 - RNA, 19 nt, Human
cuguauaaaaucagccaau

SEQ ID NO: 2384994 - RNA, 11 nt, Human
cuguauaaaau

SEQ ID NO: 2384995 - RNA, 17 nt, Human
cuguauaaaaucagcca

SEQ ID NO: 2384996 - RNA, 21 nt, Human
cuguaguuuuaucacauguau

SEQ ID NO: 2384997 - RNA, 22 nt, Human
cuguaguuuuaucacauguaug

SEQ ID NO: 2384998 - RNA, 23 nt, Human
cuguaguuuuaucacauguaugu

SEQ ID NO: 2384999 - RNA, 14 nt, Human
cuguacgucugaca

SEQ ID NO: 2385000 - RNA, 15 nt, Human
cuguacgucugacag

SEQ ID NO: 2385001 - RNA, 16 nt, Human
cuguacgucugacagg

SEQ ID NO: 2385002 - RNA, 18 nt, Human
cuguacgucugacaggca

SEQ ID NO: 2385003 - RNA, 21 nt, Human
cuguacaugaaaacacauuuu

SEQ ID NO: 2385004 - RNA, 20 nt, Human
cuguacaugaaaacacauuu

SEQ ID NO: 2385005 - RNA, 17 nt, Human
cuguacaugaaaacaca

SEQ ID NO: 2385006 - RNA, 16 nt, Human
cuguaauuguguguga

SEQ ID NO: 2385007 - RNA, 13 nt, Human
cuguaauuuaguu

SEQ ID NO: 2385008 - RNA, 16 nt, Human
cuguaauuuaguuauu

SEQ ID NO: 2385009 - RNA, 19 nt, Human
cuguaauuuaguuauugau

SEQ ID NO: 2385010 - RNA, 19 nt, Human
cuguacauagccuauauuu

SEQ ID NO: 2385011 - RNA, 20 nt, Human
cuguacauauuugagacuag

SEQ ID NO: 2385012 - RNA, 14 nt, Human
cuguacaucuauuu

SEQ ID NO: 2385013 - RNA, 23 nt, Human
cuguaccuuuugaggagccccag

SEQ ID NO: 2385014 - RNA, 13 nt, Human
cuguacucaggag

SEQ ID NO: 2385015 - RNA, 13 nt, Human
cuguacuagagau

SEQ ID NO: 2385016 - RNA, 17 nt, Human
cuguacuagagaucugg

SEQ ID NO: 2385017 - RNA, 14 nt, Human
cuguacuccuccca

SEQ ID NO: 2385018 - RNA, 19 nt, Human
cuguacgucugacaggcaa

SEQ ID NO: 2385019 - RNA, 20 nt, Human
cuguacgucugacaggcaau

SEQ ID NO: 2385020 - RNA, 22 nt, Human
cuguaguuaggaaauaaaaccu

SEQ ID NO: 2385021 - RNA, 21 nt, Human
cuguaguuaggaaauaaaacc

SEQ ID NO: 2385022 - RNA, 20 nt, Human
cuguacucaggaggcugagg

SEQ ID NO: 2385023 - RNA, 21 nt, Human
cuguacuagagaucugguuuu

SEQ ID NO: 2385024 - RNA, 17 nt, Human
cuguacucgcuugugca

SEQ ID NO: 2385025 - RNA, 20 nt, Human
cuguaguugcguggacucug

SEQ ID NO: 2385026 - RNA, 12 nt, Human
cuguaguuuuau

SEQ ID NO: 2385027 - RNA, 18 nt, Human
cuguacucgcuugugcag

SEQ ID NO: 2385028 - RNA, 15 nt, Human
cuguacuccucccag

SEQ ID NO: 2385029 - RNA, 16 nt, Human
cuguacuccucccagg

SEQ ID NO: 2385030 - RNA, 19 nt, Human
cuguacuccucccaggcgc

SEQ ID NO: 2385031 - RNA, 21 nt, Human
cuguacuccucccaggcgccc

SEQ ID NO: 2385032 - RNA, 15 nt, Human
cuguaaucccagcac

SEQ ID NO: 2385033 - RNA, 17 nt, Human
cuguaaucccagcacuu

SEQ ID NO: 2385034 - RNA, 14 nt, Human
cuguaaucccagca

SEQ ID NO: 2385035 - RNA, 13 nt, Human
cuguaaucccagc

SEQ ID NO: 2385036 - RNA, 14 nt, Human
cuguaaucccagcu

SEQ ID NO: 2385037 - RNA, 20 nt, Human
cuguaaucccagcaugcuga

SEQ ID NO: 2385038 - RNA, 16 nt, Human
cuguaaucccagcacu

SEQ ID NO: 2385039 - RNA, 19 nt, Human
cuguaaucccagcacuugg

SEQ ID NO: 2385040 - RNA, 20 nt, Human
cuguaaucccagcacuuugg

SEQ ID NO: 2385041 - RNA, 19 nt, Human
cuguaauccuagcacuuug

SEQ ID NO: 2385042 - RNA, 23 nt, Human
cuggugucugcuuucuccauugu

SEQ ID NO: 2385043 - RNA, 23 nt, Human
cugguuagaaaugcagaauccua

SEQ ID NO: 2385044 - RNA, 16 nt, Human
cuggugugaacuaaac

SEQ ID NO: 2385045 - RNA, 14 nt, Human
cugguuagaaaugc

SEQ ID NO: 2385046 - RNA, 22 nt, Human
cugguuagagguucccuuugac

SEQ ID NO: 2385047 - RNA, 21 nt, Human
cugguuagagguucccuuuga

SEQ ID NO: 2385048 - RNA, 20 nt, Human
cugguguccugaccacccuc

SEQ ID NO: 2385049 - RNA, 21 nt, Human
cugguguccugaccacccucc

SEQ ID NO: 2385050 - RNA, 22 nt, Human
cugguguccugaccacccuccc

SEQ ID NO: 2385051 - RNA, 17 nt, Human
cuggugucugcuuucuc

SEQ ID NO: 2385052 - RNA, 19 nt, Human
cuguaaucccagcuacucg

SEQ ID NO: 2385053 - RNA, 19 nt, Human
cuguaaucccagcuacuca

SEQ ID NO: 2385054 - RNA, 15 nt, Human
cuguaaucccagcag

SEQ ID NO: 2385055 - RNA, 22 nt, Human
cuguaaucccagcuacucggga

SEQ ID NO: 2385056 - RNA, 18 nt, Human
cuguaaucccagcuacuu

SEQ ID NO: 2385057 - RNA, 16 nt, Human
cuguaauuccuaccuc

SEQ ID NO: 2385058 - RNA, 22 nt, Human
cuguaauuccuaccucccugca

SEQ ID NO: 2385059 - RNA, 15 nt, Human
cuguaauuugugaua

SEQ ID NO: 2385060 - RNA, 14 nt, Human
cuguaauuugugau

SEQ ID NO: 2385061 - RNA, 14 nt, Human
cuguacagagccca

SEQ ID NO: 2385062 - RNA, 15 nt, Human
cuguacagagcccac

SEQ ID NO: 2385063 - RNA, 18 nt, Human
cuguacagagcccacgcc

SEQ ID NO: 2385064 - RNA, 22 nt, Human
cuguacagagcccacgccccca

SEQ ID NO: 2385065 - RNA, 12 nt, Human
cugguguccuga

SEQ ID NO: 2385066 - RNA, 15 nt, Human
cuggugucacuuacu

SEQ ID NO: 2385067 - RNA, 18 nt, Human
cuggugucacuuacuguu

SEQ ID NO: 2385068 - RNA, 13 nt, Human
cugguguccugac

SEQ ID NO: 2385069 - RNA, 14 nt, Human
cugguguccugacc

SEQ ID NO: 2385070 - RNA, 15 nt, Human
cugguguccugacca

SEQ ID NO: 2385071 - RNA, 16 nt, Human
cugguguccugaccac

SEQ ID NO: 2385072 - RNA, 17 nt, Human
cugguguccugaccacc

SEQ ID NO: 2385073 - RNA, 18 nt, Human
cugguguccugaccaccc

SEQ ID NO: 2385074 - RNA, 19 nt, Human
cugguguccugaccacccu

SEQ ID NO: 2385075 - RNA, 20 nt, Human
cuggugguugcuguuuuccu

SEQ ID NO: 2385076 - RNA, 16 nt, Human
cuggugguuucacggu

SEQ ID NO: 2385077 - RNA, 15 nt, Human
cuggugguugcuguu

SEQ ID NO: 2385078 - RNA, 21 nt, Human
cuggugguuucacggugccag

SEQ ID NO: 2385079 - RNA, 18 nt, Human
cuggugguuucacggugc

SEQ ID NO: 2385080 - RNA, 20 nt, Human
cuggugguuucacggugcca

SEQ ID NO: 2385081 - RNA, 23 nt, Human
cuggugguucacucuuggagccu

SEQ ID NO: 2385082 - RNA, 21 nt, Human
cuggugguucacucuuggagc

SEQ ID NO: 2385083 - RNA, 20 nt, Human
cuggugguucacucuuggag

SEQ ID NO: 2385084 - RNA, 12 nt, Human
cuggugguucac

SEQ ID NO: 2385085 - RNA, 14 nt, Human
cugguauuccugcc

SEQ ID NO: 2385086 - RNA, 15 nt, Human
cugguauuccugccu

SEQ ID NO: 2385087 - RNA, 17 nt, Human
cugguauuccugccucc

SEQ ID NO: 2385088 - RNA, 17 nt, Human
cugguggcagcucaccu

SEQ ID NO: 2385089 - RNA, 18 nt, Human
cugguggcagcucaccuc

SEQ ID NO: 2385090 - RNA, 15 nt, Human
cugguggcagcugcg

SEQ ID NO: 2385091 - RNA, 20 nt, Human
cugguggcagcucaccucuc

SEQ ID NO: 2385092 - RNA, 14 nt, Human
cugguggcaguggg

SEQ ID NO: 2385093 - RNA, 18 nt, Human
cugguggcagugggagcu

SEQ ID NO: 2385094 - RNA, 22 nt, Human
cugggcccugacauuggagccu

SEQ ID NO: 2385095 - RNA, 13 nt, Human
cugggccugcaga

SEQ ID NO: 2385096 - RNA, 15 nt, Human
cugggcuccuccagg

SEQ ID NO: 2385097 - RNA, 14 nt, Human
cugggcuccuccag

SEQ ID NO: 2385098 - RNA, 14 nt, Human
cugggcucuccacc

SEQ ID NO: 2385099 - RNA, 13 nt, Human
cugggcucuccac

SEQ ID NO: 2385100 - RNA, 12 nt, Human
cugggcucucca

SEQ ID NO: 2385101 - RNA, 17 nt, Human
cugggcucgucuuugca

SEQ ID NO: 2385102 - RNA, 16 nt, Human
cugggcucggaggcug

SEQ ID NO: 2385103 - RNA, 17 nt, Human
cugggcucggaggcugc

SEQ ID NO: 2385104 - RNA, 18 nt, Human
cugggcucggaggcugcc

SEQ ID NO: 2385105 - RNA, 21 nt, Human
cugggcucggaggcugccccc

SEQ ID NO: 2385106 - RNA, 17 nt, Human
cugggcuccuccagggu

SEQ ID NO: 2385107 - RNA, 13 nt, Human
cugggcucggagg

SEQ ID NO: 2385108 - RNA, 15 nt, Human
cugggcucggaggcu

SEQ ID NO: 2385109 - RNA, 23 nt, Human
cugggcucugccccagcucuggc

SEQ ID NO: 2385110 - RNA, 21 nt, Human
cugggcucugccacccuaccu

SEQ ID NO: 2385111 - RNA, 15 nt, Human
cugggcucugggagc

SEQ ID NO: 2385112 - RNA, 18 nt, Human
cugggcucugggagcagc

SEQ ID NO: 2385113 - RNA, 16 nt, Human
cugggcucugggagca

SEQ ID NO: 2385114 - RNA, 13 nt, Human
cugggcucugugg

SEQ ID NO: 2385115 - RNA, 18 nt, Human
cugggcucugccccagcu

SEQ ID NO: 2385116 - RNA, 17 nt, Human
cugggcucugccccagc

SEQ ID NO: 2385117 - RNA, 13 nt, Human
cugggcucugccc

SEQ ID NO: 2385118 - RNA, 17 nt, Human
cugggcucugccacccu

SEQ ID NO: 2385119 - RNA, 20 nt, Human
cugggcucugccacccuacc

SEQ ID NO: 2385120 - RNA, 21 nt, Human
cugggcucuccaccucagccu

SEQ ID NO: 2385121 - RNA, 20 nt, Human
cugggcucuccaccucagcc

SEQ ID NO: 2385122 - RNA, 19 nt, Human
cugggcucuccaccucagc

SEQ ID NO: 2385123 - RNA, 18 nt, Human
cugggcucuccaccucag

SEQ ID NO: 2385124 - RNA, 17 nt, Human
cugggcucuccaccuca

SEQ ID NO: 2385125 - RNA, 16 nt, Human
cugggcucuccaccuc

SEQ ID NO: 2385126 - RNA, 15 nt, Human
cugggcucuccaccu

SEQ ID NO: 2385127 - RNA, 22 nt, Human
cugggcucugcaauuccccucu

SEQ ID NO: 2385128 - RNA, 23 nt, Human
cugggcucugcaauuccccucug

SEQ ID NO: 2385129 - RNA, 13 nt, Human
cugggcucugcca

SEQ ID NO: 2385130 - RNA, 14 nt, Human
cugggcucugccac

SEQ ID NO: 2385131 - RNA, 15 nt, Human
cugggcucugccacc

SEQ ID NO: 2385132 - RNA, 13 nt, Human
cugggcugagaga

SEQ ID NO: 2385133 - RNA, 12 nt, Human
cugggcugagcc

SEQ ID NO: 2385134 - RNA, 13 nt, Human
cugggcugagccc

SEQ ID NO: 2385135 - RNA, 14 nt, Human
cugggcugagcccc

SEQ ID NO: 2385136 - RNA, 15 nt, Human
cugggcugacuggga

SEQ ID NO: 2385137 - RNA, 22 nt, Human
cugggcucugugggcugcacuc

SEQ ID NO: 2385138 - RNA, 12 nt, Human
cugggcugacug

SEQ ID NO: 2385139 - RNA, 18 nt, Human
cugggcugaacacuccaa

SEQ ID NO: 2385140 - RNA, 20 nt, Human
cugggcucugugggcugcac

SEQ ID NO: 2385141 - RNA, 21 nt, Human
cugggcucugugggcugcacu

SEQ ID NO: 2385142 - RNA, 14 nt, Human
cugggcucuguggg

SEQ ID NO: 2385143 - RNA, 15 nt, Human
cugggcucugugggc

SEQ ID NO: 2385144 - RNA, 16 nt, Human
cugggcucugugggcu

SEQ ID NO: 2385145 - RNA, 18 nt, Human
cugggcucugugggcugc

SEQ ID NO: 2385146 - RNA, 23 nt, Human
cugggcugagggagccuggcccc

SEQ ID NO: 2385147 - RNA, 19 nt, Human
cugggcugagggagccugg

SEQ ID NO: 2385148 - RNA, 18 nt, Human
cugggcugagggagccug

SEQ ID NO: 2385149 - RNA, 16 nt, Human
cugggcugagggagcc

SEQ ID NO: 2385150 - RNA, 13 nt, Human
cugggcugaggga

SEQ ID NO: 2385151 - RNA, 12 nt, Human
cugggcugaggg

SEQ ID NO: 2385152 - RNA, 15 nt, Human
cugggcugagccccu

SEQ ID NO: 2385153 - RNA, 17 nt, Human
cugggcugagccccuac

SEQ ID NO: 2385154 - RNA, 18 nt, Human
cugggcugagccccuacc

SEQ ID NO: 2385155 - RNA, 19 nt, Human
cugggcugagccccuaccc

SEQ ID NO: 2385156 - RNA, 19 nt, Human
cugggauguuucugucaca

SEQ ID NO: 2385157 - RNA, 22 nt, Human
cugggauguggcugcagcagcg

SEQ ID NO: 2385158 - RNA, 20 nt, Human
cugggauuacaggcaugagc

SEQ ID NO: 2385159 - RNA, 18 nt, Human
cugggauuacaggcguga

SEQ ID NO: 2385160 - RNA, 21 nt, Human
cugggauuacaagcgugagcc

SEQ ID NO: 2385161 - RNA, 14 nt, Human
cugggauguuucug

SEQ ID NO: 2385162 - RNA, 15 nt, Human
cugggauguggcugc

SEQ ID NO: 2385163 - RNA, 20 nt, Human
cugggauguggcugcagcag

SEQ ID NO: 2385164 - RNA, 21 nt, Human
cugggauguccacagaugccu

SEQ ID NO: 2385165 - RNA, 14 nt, Human
cugggauguccaca

SEQ ID NO: 2385166 - RNA, 21 nt, Human
cugcuccacaguguuggcgag

SEQ ID NO: 2385167 - RNA, 16 nt, Human
cugggaugggccugcu

SEQ ID NO: 2385168 - RNA, 21 nt, Human
cugcuccacccuuggccuguc

SEQ ID NO: 2385169 - RNA, 20 nt, Human
cugcuccacccuuggccugu

SEQ ID NO: 2385170 - RNA, 22 nt, Human
cugggaugggccugcuuccugu

SEQ ID NO: 2385171 - RNA, 18 nt, Human
cugcguggggacagggcu

SEQ ID NO: 2385172 - RNA, 19 nt, Human
cugcuccacagccauccca

SEQ ID NO: 2385173 - RNA, 12 nt, Human
cugcuccacagu

SEQ ID NO: 2385174 - RNA, 13 nt, Human
cugcuccacagug

SEQ ID NO: 2385175 - RNA, 14 nt, Human
cugcuccacagugu

SEQ ID NO: 2385176 - RNA, 16 nt, Human
cugcuccacaguguug

SEQ ID NO: 2385177 - RNA, 11 nt, Human
cugcuccaccc

SEQ ID NO: 2385178 - RNA, 16 nt, Human
cugcuccaccacaucc

SEQ ID NO: 2385179 - RNA, 13 nt, Human
cugcuccaccaca

SEQ ID NO: 2385180 - RNA, 11 nt, Human
cugcuccacca

SEQ ID NO: 2385181 - RNA, 19 nt, Human
cugcuccacccuuggccug

SEQ ID NO: 2385182 - RNA, 18 nt, Human
cugcuccacccuuggccu

SEQ ID NO: 2385183 - RNA, 17 nt, Human
cugcuccacccuuggcc

SEQ ID NO: 2385184 - RNA, 16 nt, Human
cugcuccacccuuggc

SEQ ID NO: 2385185 - RNA, 15 nt, Human
cugcuccacccuugg

SEQ ID NO: 2385186 - RNA, 14 nt, Human
cugcuccacccuug

SEQ ID NO: 2385187 - RNA, 13 nt, Human
cugcuccacccuu

SEQ ID NO: 2385188 - RNA, 12 nt, Human
cugcuccacccu

SEQ ID NO: 2385189 - RNA, 14 nt, Human
cugggauuccuccc

SEQ ID NO: 2385190 - RNA, 17 nt, Human
cugggauucccaccaag

SEQ ID NO: 2385191 - RNA, 15 nt, Human
cugggauucccacca

SEQ ID NO: 2385192 - RNA, 17 nt, Human
cugggauucuacuuuaa

SEQ ID NO: 2385193 - RNA, 20 nt, Human
cugggauucccaccaagguc

SEQ ID NO: 2385194 - RNA, 18 nt, Human
cugggauucuacuuuaag

SEQ ID NO: 2385195 - RNA, 21 nt, Human
cugggauucuacuuuaagcac

SEQ ID NO: 2385196 - RNA, 22 nt, Human
cugggauucuacuuuaagcacu

SEQ ID NO: 2385197 - RNA, 23 nt, Human
cugggauucuacuuuaagcacua

SEQ ID NO: 2385198 - RNA, 18 nt, Human
cugggcaacagagcaaga

SEQ ID NO: 2385199 - RNA, 15 nt, Human
cugggcaacagagca

SEQ ID NO: 2385200 - RNA, 15 nt, Human
cugggcaaagccuag

SEQ ID NO: 2385201 - RNA, 17 nt, Human
cugggauuuacacuuga

SEQ ID NO: 2385202 - RNA, 19 nt, Human
cugggccccugccucucug

SEQ ID NO: 2385203 - RNA, 15 nt, Human
cugggcaaggaggcc

SEQ ID NO: 2385204 - RNA, 21 nt, Human
cugggcaaggaggccacguga

SEQ ID NO: 2385205 - RNA, 18 nt, Human
cugggcccucucugcucu

SEQ ID NO: 2385206 - RNA, 15 nt, Human
cugggcccucucugc

SEQ ID NO: 2385207 - RNA, 14 nt, Human
cugggcccucucug

SEQ ID NO: 2385208 - RNA, 13 nt, Human
cugggcccucucu

SEQ ID NO: 2385209 - RNA, 20 nt, Human
cugggccccugccucucugc

SEQ ID NO: 2385210 - RNA, 23 nt, Human
cugggccccugccucucugcagg

SEQ ID NO: 2385211 - RNA, 20 nt, Human
cugggguggggauagggagc

SEQ ID NO: 2385212 - RNA, 16 nt, Human
cuggggguugcggggg

SEQ ID NO: 2385213 - RNA, 21 nt, Human
cugggguaccaagagacuccu

SEQ ID NO: 2385214 - RNA, 17 nt, Human
cugggggugggccaggc

SEQ ID NO: 2385215 - RNA, 16 nt, Human
cugggguaccaagaga

SEQ ID NO: 2385216 - RNA, 20 nt, Human
cuggggguucuuucuuccuc

SEQ ID NO: 2385217 - RNA, 23 nt, Human
cuggggguucuuucuuccucugc

SEQ ID NO: 2385218 - RNA, 15 nt, Human
cugggguucagcccc

SEQ ID NO: 2385219 - RNA, 13 nt, Human
cugggguucagcc

SEQ ID NO: 2385220 - RNA, 19 nt, Human
cuggggugugggaggcccg

SEQ ID NO: 2385221 - RNA, 16 nt, Human
cuggggugugggaggc

SEQ ID NO: 2385222 - RNA, 14 nt, Human
cuggggugggguca

SEQ ID NO: 2385223 - RNA, 13 nt, Human
cuggggugggguc

SEQ ID NO: 2385224 - RNA, 20 nt, Human
cugggguggggucaugcccu

SEQ ID NO: 2385225 - RNA, 22 nt, Human
cugggguucagccccuccucug

SEQ ID NO: 2385226 - RNA, 16 nt, Human
cuggguaaaugcagcg

SEQ ID NO: 2385227 - RNA, 23 nt, Human
cugggguucagccccuccucugc

SEQ ID NO: 2385228 - RNA, 21 nt, Human
cugggguucagccccuccucu

SEQ ID NO: 2385229 - RNA, 20 nt, Human
cugggguucagccccuccuc

SEQ ID NO: 2385230 - RNA, 19 nt, Human
cugggguucagccccuccu

SEQ ID NO: 2385231 - RNA, 17 nt, Human
cugggguucagccccuc

SEQ ID NO: 2385232 - RNA, 22 nt, Human
cuggguccaggggaugggaggu

SEQ ID NO: 2385233 - RNA, 21 nt, Human
cuggguccaggggaugggagg

SEQ ID NO: 2385234 - RNA, 18 nt, Human
cuggguccuugcaccccu

SEQ ID NO: 2385235 - RNA, 23 nt, Human
cuggguccuugcaccccucacuc

SEQ ID NO: 2385236 - RNA, 13 nt, Human
cugggucgcccug

SEQ ID NO: 2385237 - RNA, 17 nt, Human
cugguaauuuguaucug

SEQ ID NO: 2385238 - RNA, 15 nt, Human
cugguaauauugacu

SEQ ID NO: 2385239 - RNA, 19 nt, Human
cugguaauauugacuugua

SEQ ID NO: 2385240 - RNA, 15 nt, Human
cugguaaucuugcuc

SEQ ID NO: 2385241 - RNA, 18 nt, Human
cugguauauccaaaagcu

SEQ ID NO: 2385242 - RNA, 20 nt, Human
cugguauauccaaaagcuuu

SEQ ID NO: 2385243 - RNA, 19 nt, Human
cugguauauccaaaagcuu

SEQ ID NO: 2385244 - RNA, 18 nt, Human
cugguaacaguucauguu

SEQ ID NO: 2385245 - RNA, 16 nt, Human
cugguaaacuauuugu

SEQ ID NO: 2385246 - RNA, 19 nt, Human
cugguaaacuauuugucuu

SEQ ID NO: 2385247 - RNA, 20 nt, Human
cuggguuuucuuaaccaucu

SEQ ID NO: 2385248 - RNA, 23 nt, Human
cuggguuuggaccccagcuggga

SEQ ID NO: 2385249 - RNA, 20 nt, Human
cuggguuuuguauucucuga

SEQ ID NO: 2385250 - RNA, 22 nt, Human
cuggguuuuguauucucugagc

SEQ ID NO: 2385251 - RNA, 15 nt, Human
cugggucgcccugga

SEQ ID NO: 2385252 - RNA, 19 nt, Human
cuggguuuggaccccagcu

SEQ ID NO: 2385253 - RNA, 19 nt, Human
cuggguccuuuucagaagu

SEQ ID NO: 2385254 - RNA, 20 nt, Human
cuggguuuggaccccagcug

SEQ ID NO: 2385255 - RNA, 21 nt, Human
cuggguuuggaccccagcugg

SEQ ID NO: 2385256 - RNA, 22 nt, Human
cuggguuuggaccccagcuggg

SEQ ID NO: 2385257 - RNA, 19 nt, Human
cugggcuuggggcuuccua

SEQ ID NO: 2385258 - RNA, 20 nt, Human
cugggcuuggggcuuccuaa

SEQ ID NO: 2385259 - RNA, 23 nt, Human
cugggcuuuuuuuuucucuuucu

SEQ ID NO: 2385260 - RNA, 16 nt, Human
cugggggccucuucug

SEQ ID NO: 2385261 - RNA, 14 nt, Human
cugggggugccagg

SEQ ID NO: 2385262 - RNA, 16 nt, Human
cugggggugggccagg

SEQ ID NO: 2385263 - RNA, 15 nt, Human
cugggggugggccag

SEQ ID NO: 2385264 - RNA, 14 nt, Human
cugggggugggcca

SEQ ID NO: 2385265 - RNA, 19 nt, Human
cugggggugccaggaccag

SEQ ID NO: 2385266 - RNA, 15 nt, Human
cugggggugccagga

SEQ ID NO: 2385267 - RNA, 18 nt, Human
cugggggcugggcagagg

SEQ ID NO: 2385268 - RNA, 14 nt, Human
cugggggcugggca

SEQ ID NO: 2385269 - RNA, 18 nt, Human
cugggcuugucuguagau

SEQ ID NO: 2385270 - RNA, 22 nt, Human
cugggcuuggggaccagagcug

SEQ ID NO: 2385271 - RNA, 15 nt, Human
cugggcuucaguggc

SEQ ID NO: 2385272 - RNA, 14 nt, Human
cugggcuguuggca

SEQ ID NO: 2385273 - RNA, 15 nt, Human
cugggcuguuggcac

SEQ ID NO: 2385274 - RNA, 13 nt, Human
cugggcugugcua

SEQ ID NO: 2385275 - RNA, 13 nt, Human
cugggcuguuggc

SEQ ID NO: 2385276 - RNA, 21 nt, Human
cugggcugguggcucccggag

SEQ ID NO: 2385277 - RNA, 22 nt, Human
cugggcugggugcgaccccauc

SEQ ID NO: 2385278 - RNA, 12 nt, Human
cugggcugugcu

SEQ ID NO: 2385279 - RNA, 15 nt, Human
cugggcuggggccug

SEQ ID NO: 2385280 - RNA, 18 nt, Human
cugggcuggggccugaug

SEQ ID NO: 2385281 - RNA, 20 nt, Human
cugggcuggggccugauggg

SEQ ID NO: 2385282 - RNA, 12 nt, Human
cugggcugggug

SEQ ID NO: 2385283 - RNA, 18 nt, Human
cugggcugggugcgaccc

SEQ ID NO: 2385284 - RNA, 19 nt, Human
cugggcugcuacccagaaa

SEQ ID NO: 2385285 - RNA, 20 nt, Human
cugggcugccaugugaagag

SEQ ID NO: 2385286 - RNA, 17 nt, Human
cugggcugccaugugaa

SEQ ID NO: 2385287 - RNA, 12 nt, Human
cugggcuggcuc

SEQ ID NO: 2385288 - RNA, 16 nt, Human
cugggcuggcucccuc

SEQ ID NO: 2385289 - RNA, 18 nt, Human
cugggcuggcucccucuu

SEQ ID NO: 2385290 - RNA, 20 nt, Human
cugugggaacgagaggggaa

SEQ ID NO: 2385291 - RNA, 21 nt, Human
cugugggaacgagaggggaag

SEQ ID NO: 2385292 - RNA, 23 nt, Human
cugugggaacgagaggggaagag

SEQ ID NO: 2385293 - RNA, 20 nt, Human
cugugggaaggccagcugcc

SEQ ID NO: 2385294 - RNA, 18 nt, Human
cugugggaaggccagcug

SEQ ID NO: 2385295 - RNA, 15 nt, Human
cugugggaaggccag

SEQ ID NO: 2385296 - RNA, 16 nt, Human
cugugggaaggccagc

SEQ ID NO: 2385297 - RNA, 14 nt, Human
cugugggagccugc

SEQ ID NO: 2385298 - RNA, 18 nt, Human
cuguggcuuucagccucu

SEQ ID NO: 2385299 - RNA, 19 nt, Human
cuguggcuuucagccucug

SEQ ID NO: 2385300 - RNA, 22 nt, Human
cuguggcuucuuaaucuuuuca

SEQ ID NO: 2385301 - RNA, 11 nt, Human
cuguggccugg

SEQ ID NO: 2385302 - RNA, 21 nt, Human
cuguggccguuaucuggaagu

SEQ ID NO: 2385303 - RNA, 19 nt, Human
cuguggccguuaucuggaa

SEQ ID NO: 2385304 - RNA, 20 nt, Human
cuguggccguuaucuggaag

SEQ ID NO: 2385305 - RNA, 22 nt, Human
cugugggugaagacagagggaa

SEQ ID NO: 2385306 - RNA, 23 nt, Human
cuguggggugugcacaucucugc

SEQ ID NO: 2385307 - RNA, 15 nt, Human
cuguggguaguauga

SEQ ID NO: 2385308 - RNA, 21 nt, Human
cuguggguuucuaaagcugcc

SEQ ID NO: 2385309 - RNA, 20 nt, Human
cugugggcaggugggagcuu

SEQ ID NO: 2385310 - RNA, 22 nt, Human
cugugggcacgcugugggcagg

SEQ ID NO: 2385311 - RNA, 23 nt, Human
cugugggggugagggucccaugu

SEQ ID NO: 2385312 - RNA, 24 nt, Human
cugugggggugagggucccaugug

SEQ ID NO: 2385313 - RNA, 14 nt, Human
cugugggaugggau

SEQ ID NO: 2385314 - RNA, 22 nt, Human
cugugggaucccucugggcacu

SEQ ID NO: 2385315 - RNA, 22 nt, Human
cuguggugcaaaagcagaaaau

SEQ ID NO: 2385316 - RNA, 23 nt, Human
cuguggugcaaaagcagaaaaua

SEQ ID NO: 2385317 - RNA, 14 nt, Human
cugugguguguccc

SEQ ID NO: 2385318 - RNA, 22 nt, Human
cuguggugugucccccucuguc

SEQ ID NO: 2385319 - RNA, 15 nt, Human
cuguggugugucccc

SEQ ID NO: 2385320 - RNA, 23 nt, Human
cugugguaguacuccugcaaaau

SEQ ID NO: 2385321 - RNA, 15 nt, Human
cugugggugacccag

SEQ ID NO: 2385322 - RNA, 22 nt, Human
cuguggguuucuaaagcugcca

SEQ ID NO: 2385323 - RNA, 22 nt, Human
cugugguccugaauucuuuccc

SEQ ID NO: 2385324 - RNA, 16 nt, Human
cuguggucacagcgga

SEQ ID NO: 2385325 - RNA, 22 nt, Human
cuguggagguacacucuuauag

SEQ ID NO: 2385326 - RNA, 15 nt, Human
cuguggaucagagau

SEQ ID NO: 2385327 - RNA, 17 nt, Human
cuguggaugagcccuca

SEQ ID NO: 2385328 - RNA, 15 nt, Human
cuguggaugagcccu

SEQ ID NO: 2385329 - RNA, 21 nt, Human
cuguggccccacccugggccc

SEQ ID NO: 2385330 - RNA, 16 nt, Human
cuguggccccacccug

SEQ ID NO: 2385331 - RNA, 17 nt, Human
cuguggccccacccugg

SEQ ID NO: 2385332 - RNA, 18 nt, Human
cuguggccccacccuggg

SEQ ID NO: 2385333 - RNA, 20 nt, Human
cuguggccccacccugggcc

SEQ ID NO: 2385334 - RNA, 23 nt, Human
cuguggagcccgcacccccaccc

SEQ ID NO: 2385335 - RNA, 14 nt, Human
cuguggaggaagga

SEQ ID NO: 2385336 - RNA, 15 nt, Human
cuguggaggaaggau

SEQ ID NO: 2385337 - RNA, 22 nt, Human
cuguggagcccgcacccccacc

SEQ ID NO: 2385338 - RNA, 15 nt, Human
cuguggagcccgcac

SEQ ID NO: 2385339 - RNA, 14 nt, Human
cuguggagacuggg

SEQ ID NO: 2385340 - RNA, 16 nt, Human
cuguggaggaaggauu

SEQ ID NO: 2385341 - RNA, 17 nt, Human
cuguggaggaaggauug

SEQ ID NO: 2385342 - RNA, 19 nt, Human
cuguggaggaaggauugua

SEQ ID NO: 2385343 - RNA, 20 nt, Human
cuguggaggaaggauuguaa

SEQ ID NO: 2385344 - RNA, 21 nt, Human
cuguggaggaaggauuguaaa

SEQ ID NO: 2385345 - RNA, 22 nt, Human
cuguggaggaaggauuguaaaa

SEQ ID NO: 2385346 - RNA, 23 nt, Human
cuguggaggaaggauuguaaaaa

SEQ ID NO: 2385347 - RNA, 14 nt, Human
cuguggaucaaauc

SEQ ID NO: 2385348 - RNA, 24 nt, Human
cuguggaucaaauccagccugcug

SEQ ID NO: 2385349 - RNA, 12 nt, Human
cugugccucugc

SEQ ID NO: 2385350 - RNA, 13 nt, Human
cugugccucugcc

SEQ ID NO: 2385351 - RNA, 14 nt, Human
cugugccucugccu

SEQ ID NO: 2385352 - RNA, 15 nt, Human
cugugccucugccug

SEQ ID NO: 2385353 - RNA, 15 nt, Human
cugugcccucuugau

SEQ ID NO: 2385354 - RNA, 11 nt, Human
cugugcccugg

SEQ ID NO: 2385355 - RNA, 18 nt, Human
cugugccuaacaccagcg

SEQ ID NO: 2385356 - RNA, 17 nt, Human
cugugcccugguggaga

SEQ ID NO: 2385357 - RNA, 17 nt, Human
cugugcccuuauucagg

SEQ ID NO: 2385358 - RNA, 12 nt, Human
cugugcccuggu

SEQ ID NO: 2385359 - RNA, 13 nt, Human
cugugcccuggug

SEQ ID NO: 2385360 - RNA, 15 nt, Human
cugugcccuggugga

SEQ ID NO: 2385361 - RNA, 16 nt, Human
cugugcccugguggag

SEQ ID NO: 2385362 - RNA, 16 nt, Human
cugugccucugccugu

SEQ ID NO: 2385363 - RNA, 17 nt, Human
cugugccucugccuguc

SEQ ID NO: 2385364 - RNA, 16 nt, Human
cuguggaagggacuag

SEQ ID NO: 2385365 - RNA, 14 nt, Human
cuguggaagggacu

SEQ ID NO: 2385366 - RNA, 18 nt, Human
cuguggaaucuggaguga

SEQ ID NO: 2385367 - RNA, 13 nt, Human
cuguggaagggac

SEQ ID NO: 2385368 - RNA, 23 nt, Human
cuguggaaaguguaaagcauucc

SEQ ID NO: 2385369 - RNA, 12 nt, Human
cuguggaagcaa

SEQ ID NO: 2385370 - RNA, 13 nt, Human
cuguggagaaaua

SEQ ID NO: 2385371 - RNA, 13 nt, Human
cugugugaaaaug

SEQ ID NO: 2385372 - RNA, 20 nt, Human
cugugucuuucacagcuccu

SEQ ID NO: 2385373 - RNA, 21 nt, Human
cugugugaaauaccagugugg

SEQ ID NO: 2385374 - RNA, 19 nt, Human
cugugugaaauaccagugu

SEQ ID NO: 2385375 - RNA, 12 nt, Human
cugugugaaaua

SEQ ID NO: 2385376 - RNA, 20 nt, Human
cugugucuuuuuucacuaca

SEQ ID NO: 2385377 - RNA, 13 nt, Human
cuguguaacagcu

SEQ ID NO: 2385378 - RNA, 14 nt, Human
cuguguaacagcuc

SEQ ID NO: 2385379 - RNA, 15 nt, Human
cuguguaaaguuagu

SEQ ID NO: 2385380 - RNA, 18 nt, Human
cuguguaaaguuagucua

SEQ ID NO: 2385381 - RNA, 17 nt, Human
cuguguaacagcuccuu

SEQ ID NO: 2385382 - RNA, 15 nt, Human
cuguguaacagcucc

SEQ ID NO: 2385383 - RNA, 16 nt, Human
cuguguaacagcuccu

SEQ ID NO: 2385384 - RNA, 17 nt, Human
cuguguaaaaagagagc

SEQ ID NO: 2385385 - RNA, 11 nt, Human
cuguguaaagu

SEQ ID NO: 2385386 - RNA, 12 nt, Human
cuguguaaaguu

SEQ ID NO: 2385387 - RNA, 13 nt, Human
cuguguaaaguua

SEQ ID NO: 2385388 - RNA, 14 nt, Human
cuguguaaaguuag

SEQ ID NO: 2385389 - RNA, 16 nt, Human
cuguguaaaaagagag

SEQ ID NO: 2385390 - RNA, 22 nt, Human
cugugguuuuccccucccuggg

SEQ ID NO: 2385391 - RNA, 23 nt, Human
cugugguuuuccccucccugggu

SEQ ID NO: 2385392 - RNA, 18 nt, Human
cugugguuuuccccuccc

SEQ ID NO: 2385393 - RNA, 19 nt, Human
cugugguuuuccccucccu

SEQ ID NO: 2385394 - RNA, 20 nt, Human
cugugguuuuccccucccug

SEQ ID NO: 2385395 - RNA, 21 nt, Human
cugugguuuuccccucccugg

SEQ ID NO: 2385396 - RNA, 21 nt, Human
cugugguuguuuuagcuccuu

SEQ ID NO: 2385397 - RNA, 16 nt, Human
cugugguuuuccccuc

SEQ ID NO: 2385398 - RNA, 19 nt, Human
cugugugacaucaguggca

SEQ ID NO: 2385399 - RNA, 18 nt, Human
cugugugacucaaaccaa

SEQ ID NO: 2385400 - RNA, 15 nt, Human
cugugugaugaacuu

SEQ ID NO: 2385401 - RNA, 16 nt, Human
cugugugaugaacuuu

SEQ ID NO: 2385402 - RNA, 18 nt, Human
cugugugcaagugugugc

SEQ ID NO: 2385403 - RNA, 22 nt, Human
cugugugauugacagcuuugcu

SEQ ID NO: 2385404 - RNA, 23 nt, Human
cugugugauugacagcuuugcug

SEQ ID NO: 2385405 - RNA, 21 nt, Human
cugugugauugacagcuuugc

SEQ ID NO: 2385406 - RNA, 18 nt, Human
cugugugaugaacuuucu

SEQ ID NO: 2385407 - RNA, 19 nt, Human
cugugugaugaacuuucuc

SEQ ID NO: 2385408 - RNA, 15 nt, Human
cugugugcagugaag

SEQ ID NO: 2385409 - RNA, 17 nt, Human
cugugugcagugaaggu

SEQ ID NO: 2385410 - RNA, 16 nt, Human
cugugugcacaaauau

SEQ ID NO: 2385411 - RNA, 21 nt, Human
cugugugcaccuuaccaacuu

SEQ ID NO: 2385412 - RNA, 14 nt, Human
cugugugcucagga

SEQ ID NO: 2385413 - RNA, 22 nt, Human
cuguguguccaaaacugccuca

SEQ ID NO: 2385414 - RNA, 17 nt, Human
cugugugugaugugcau

SEQ ID NO: 2385415 - RNA, 21 nt, Human
cuguguguccaaaacugccuc

SEQ ID NO: 2385416 - RNA, 19 nt, Human
cuguguguccaaaacugcc

SEQ ID NO: 2385417 - RNA, 15 nt, Human
cuguguguccaaaac

SEQ ID NO: 2385418 - RNA, 14 nt, Human
cugugugccuucgc

SEQ ID NO: 2385419 - RNA, 15 nt, Human
cuguguuuuugaaau

SEQ ID NO: 2385420 - RNA, 22 nt, Human
cuguguuuugaaugguguugua

SEQ ID NO: 2385421 - RNA, 19 nt, Human
cuguguugucucuagagca

SEQ ID NO: 2385422 - RNA, 20 nt, Human
cuguguugcgugucgugggu

SEQ ID NO: 2385423 - RNA, 14 nt, Human
cuguguugucucua

SEQ ID NO: 2385424 - RNA, 18 nt, Human
cuguguugcgugucgugg

SEQ ID NO: 2385425 - RNA, 14 nt, Human
cuguguugccaugu

SEQ ID NO: 2385426 - RNA, 21 nt, Human
cuguguugccaagcuccaagc

SEQ ID NO: 2385427 - RNA, 14 nt, Human
cuguguugccaagc

SEQ ID NO: 2385428 - RNA, 16 nt, Human
cuguguugccaagcuc

SEQ ID NO: 2385429 - RNA, 17 nt, Human
cuguguugccaagcucc

SEQ ID NO: 2385430 - RNA, 19 nt, Human
cuguguugccaagcuccaa

SEQ ID NO: 2385431 - RNA, 16 nt, Human
cuguuaaaagaugaaa

SEQ ID NO: 2385432 - RNA, 15 nt, Human
cuguuaaaagaugaa

SEQ ID NO: 2385433 - RNA, 19 nt, Human
cuguuaaaagaugaaaaua

SEQ ID NO: 2385434 - RNA, 23 nt, Human
cuguguuuuugcuaucacacagu

SEQ ID NO: 2385435 - RNA, 19 nt, Human
cuguguguuuucauaauaa

SEQ ID NO: 2385436 - RNA, 18 nt, Human
cuguguguuuucauaaua

SEQ ID NO: 2385437 - RNA, 16 nt, Human
cuguguguuuucauaa

SEQ ID NO: 2385438 - RNA, 21 nt, Human
cuguguguguguauguggggg

SEQ ID NO: 2385439 - RNA, 20 nt, Human
cuguguucuggugaggccuu

SEQ ID NO: 2385440 - RNA, 13 nt, Human
cuguguugccaag

SEQ ID NO: 2385441 - RNA, 20 nt, Human
cuguguucgacucagccuca

SEQ ID NO: 2385442 - RNA, 21 nt, Human
cuguguucgacucagccucag

SEQ ID NO: 2385443 - RNA, 22 nt, Human
cuguguucgacucagccucagg

SEQ ID NO: 2385444 - RNA, 12 nt, Human
cuguguuccugg

SEQ ID NO: 2385445 - RNA, 13 nt, Human
cuguguuccuggc

SEQ ID NO: 2385446 - RNA, 18 nt, Human
cuguguucgacucagccu

SEQ ID NO: 2385447 - RNA, 14 nt, Human
cuguguguguguau

SEQ ID NO: 2385448 - RNA, 16 nt, Human
cuguguguguguaugu

SEQ ID NO: 2385449 - RNA, 15 nt, Human
cuguguguguguaug

SEQ ID NO: 2385450 - RNA, 20 nt, Human
cuguguguuuaugugugugu

SEQ ID NO: 2385451 - RNA, 18 nt, Human
cuguguguuuaugugugu

SEQ ID NO: 2385452 - RNA, 20 nt, Human
cuguguguguguaugugggg

SEQ ID NO: 2385453 - RNA, 18 nt, Human
cuguguguguguaugugg

SEQ ID NO: 2385454 - RNA, 17 nt, Human
cugugaugccacacaga

SEQ ID NO: 2385455 - RNA, 18 nt, Human
cugugaugcuuugaagua

SEQ ID NO: 2385456 - RNA, 16 nt, Human
cugugaugccacacag

SEQ ID NO: 2385457 - RNA, 14 nt, Human
cugugaugccacac

SEQ ID NO: 2385458 - RNA, 22 nt, Human
cugugaugaggggaggggggca

SEQ ID NO: 2385459 - RNA, 17 nt, Human
cugugaugauccucaua

SEQ ID NO: 2385460 - RNA, 15 nt, Human
cugugauggggcccu

SEQ ID NO: 2385461 - RNA, 12 nt, Human
cugugaggcugu

SEQ ID NO: 2385462 - RNA, 17 nt, Human
cugugaggccccuggac

SEQ ID NO: 2385463 - RNA, 18 nt, Human
cugugaggccccuggaca

SEQ ID NO: 2385464 - RNA, 15 nt, Human
cugugaggcuguccu

SEQ ID NO: 2385465 - RNA, 16 nt, Human
cugugaggcuguccug

SEQ ID NO: 2385466 - RNA, 17 nt, Human
cugugaggcuguccugu

SEQ ID NO: 2385467 - RNA, 16 nt, Human
cugugauugugccuac

SEQ ID NO: 2385468 - RNA, 23 nt, Human
cugugauggggcccugccuccuu

SEQ ID NO: 2385469 - RNA, 16 nt, Human
cugugauggggcccug

SEQ ID NO: 2385470 - RNA, 21 nt, Human
cugugauggggcccugccucc

SEQ ID NO: 2385471 - RNA, 12 nt, Human
cugugagccuug

SEQ ID NO: 2385472 - RNA, 15 nt, Human
cugugagccuuggcu

SEQ ID NO: 2385473 - RNA, 14 nt, Human
cugugagccccugg

SEQ ID NO: 2385474 - RNA, 15 nt, Human
cugugagccccuggu

SEQ ID NO: 2385475 - RNA, 16 nt, Human
cugugagccccugguc

SEQ ID NO: 2385476 - RNA, 21 nt, Human
cugugagccccugguccugag

SEQ ID NO: 2385477 - RNA, 18 nt, Human
cugugaggcaggggcgga

SEQ ID NO: 2385478 - RNA, 15 nt, Human
cugugaggccccugg

SEQ ID NO: 2385479 - RNA, 14 nt, Human
cugugaggcagggg

SEQ ID NO: 2385480 - RNA, 13 nt, Human
cugugaggcaggg

SEQ ID NO: 2385481 - RNA, 17 nt, Human
cugugagccuuggcugu

SEQ ID NO: 2385482 - RNA, 18 nt, Human
cugugaacauggacucuu

SEQ ID NO: 2385483 - RNA, 16 nt, Human
cugugaacgauuuaga

SEQ ID NO: 2385484 - RNA, 15 nt, Human
cugugagcccagcug

SEQ ID NO: 2385485 - RNA, 13 nt, Human
cugugagccccug

SEQ ID NO: 2385486 - RNA, 17 nt, Human
cugugagcccagcuggg

SEQ ID NO: 2385487 - RNA, 23 nt, Human
cugugaaacuggcacugaauuaa

SEQ ID NO: 2385488 - RNA, 16 nt, Human
cugugaaaugcuggca

SEQ ID NO: 2385489 - RNA, 12 nt, Human
cugugaaauagu

SEQ ID NO: 2385490 - RNA, 15 nt, Human
cugugaaacuggcac

SEQ ID NO: 2385491 - RNA, 19 nt, Human
cugugaaaaaaaaaaugcu

SEQ ID NO: 2385492 - RNA, 18 nt, Human
cugugaaaguacauuugg

SEQ ID NO: 2385493 - RNA, 16 nt, Human
cugugaaaggaaagag

SEQ ID NO: 2385494 - RNA, 22 nt, Human
cugugaaaggaaagagggaggu

SEQ ID NO: 2385495 - RNA, 14 nt, Human
cugugcagccccgc

SEQ ID NO: 2385496 - RNA, 22 nt, Human
cugugcagccccgccuccaggc

SEQ ID NO: 2385497 - RNA, 17 nt, Human
cugugcagccgcugagc

SEQ ID NO: 2385498 - RNA, 16 nt, Human
cugugcagccgcugag

SEQ ID NO: 2385499 - RNA, 13 nt, Human
cugugcagggagg

SEQ ID NO: 2385500 - RNA, 23 nt, Human
cugugcagccuguccugggcugg

SEQ ID NO: 2385501 - RNA, 21 nt, Human
cugugcagccgcugagcgagg

SEQ ID NO: 2385502 - RNA, 19 nt, Human
cugugcagccgcugagcga

SEQ ID NO: 2385503 - RNA, 22 nt, Human
cugugauuccacuacaccuggc

SEQ ID NO: 2385504 - RNA, 16 nt, Human
cugugcaaauccuuga

SEQ ID NO: 2385505 - RNA, 21 nt, Human
cugugcacaucugugucuugu

SEQ ID NO: 2385506 - RNA, 18 nt, Human
cugugcacgcaguggccu

SEQ ID NO: 2385507 - RNA, 14 nt, Human
cugugcacugccca

SEQ ID NO: 2385508 - RNA, 14 nt, Human
cugugcaccaagca

SEQ ID NO: 2385509 - RNA, 12 nt, Human
cugugcacgcag

SEQ ID NO: 2385510 - RNA, 17 nt, Human
cugugcacgcaguggcc

SEQ ID NO: 2385511 - RNA, 22 nt, Human
cugugcagggaggagguggcag

SEQ ID NO: 2385512 - RNA, 15 nt, Human
cugugcagggaggag

SEQ ID NO: 2385513 - RNA, 16 nt, Human
cugugcagucacugga

SEQ ID NO: 2385514 - RNA, 18 nt, Human
cugugcagucacuggagg

SEQ ID NO: 2385515 - RNA, 23 nt, Human
cugugccacccugggcucugugg

SEQ ID NO: 2385516 - RNA, 21 nt, Human
cugugccacucaccgaagcca

SEQ ID NO: 2385517 - RNA, 14 nt, Human
cugugccaugugcc

SEQ ID NO: 2385518 - RNA, 17 nt, Human
cugugccccaugccugu

SEQ ID NO: 2385519 - RNA, 20 nt, Human
cugugcccaugggcacugcu

SEQ ID NO: 2385520 - RNA, 21 nt, Human
cugugcccaugggcacugcug

SEQ ID NO: 2385521 - RNA, 17 nt, Human
cugugcccagagauggg

SEQ ID NO: 2385522 - RNA, 13 nt, Human
cugugcccauggg

SEQ ID NO: 2385523 - RNA, 15 nt, Human
cugugcccaugggca

SEQ ID NO: 2385524 - RNA, 18 nt, Human
cugugcccaugggcacug

SEQ ID NO: 2385525 - RNA, 21 nt, Human
cugugccccaugccuguccag

SEQ ID NO: 2385526 - RNA, 19 nt, Human
cugugcccuaaaguguauu

SEQ ID NO: 2385527 - RNA, 12 nt, Human
cugugcccaugg

SEQ ID NO: 2385528 - RNA, 23 nt, Human
cugugcccacaucccaggcuuca

SEQ ID NO: 2385529 - RNA, 19 nt, Human
cugugcccacaucccaggc

SEQ ID NO: 2385530 - RNA, 22 nt, Human
cugugcccacaucccaggcuuc

SEQ ID NO: 2385531 - RNA, 23 nt, Human
cugugcccacccuccacucuccu

SEQ ID NO: 2385532 - RNA, 17 nt, Human
cugugcccacccuccac

SEQ ID NO: 2385533 - RNA, 15 nt, Human
cugugccaugugcca

SEQ ID NO: 2385534 - RNA, 22 nt, Human
cugugccauuuuguauuuuacu

SEQ ID NO: 2385535 - RNA, 14 nt, Human
cugugcccaaguug

SEQ ID NO: 2385536 - RNA, 18 nt, Human
cugugcccacaucccagg

SEQ ID NO: 2385537 - RNA, 14 nt, Human
cugucugccagggc

SEQ ID NO: 2385538 - RNA, 21 nt, Human
cugucugccagccagcagcca

SEQ ID NO: 2385539 - RNA, 20 nt, Human
cugucugccagccagcagcc

SEQ ID NO: 2385540 - RNA, 17 nt, Human
cugucugccagccagca

SEQ ID NO: 2385541 - RNA, 16 nt, Human
cugucugccagccagc

SEQ ID NO: 2385542 - RNA, 15 nt, Human
cugucugccagccag

SEQ ID NO: 2385543 - RNA, 23 nt, Human
cugucauuugagcagggcucagc

SEQ ID NO: 2385544 - RNA, 14 nt, Human
cugucugccagcca

SEQ ID NO: 2385545 - RNA, 17 nt, Human
cugucugaucugugcuu

SEQ ID NO: 2385546 - RNA, 16 nt, Human
cugucugaucugugcu

SEQ ID NO: 2385547 - RNA, 21 nt, Human
cugucugaucugugcuuucca

SEQ ID NO: 2385548 - RNA, 21 nt, Human
cugucauuugagcagggcuca

SEQ ID NO: 2385549 - RNA, 22 nt, Human
cugucauuugagcagggcucag

SEQ ID NO: 2385550 - RNA, 18 nt, Human
cugucaauuacaggaagu

SEQ ID NO: 2385551 - RNA, 20 nt, Human
cugucauuugagcagggcuc

SEQ ID NO: 2385552 - RNA, 15 nt, Human
cugucuguuacacug

SEQ ID NO: 2385553 - RNA, 20 nt, Human
cugucugucucuccaucugu

SEQ ID NO: 2385554 - RNA, 16 nt, Human
cugucugucucuccau

SEQ ID NO: 2385555 - RNA, 16 nt, Human
cugucuguagagggcc

SEQ ID NO: 2385556 - RNA, 19 nt, Human
cugucuguagagggcccug

SEQ ID NO: 2385557 - RNA, 20 nt, Human
cugucuguagagggcccugg

SEQ ID NO: 2385558 - RNA, 22 nt, Human
cugucuguagagggcccuggug

SEQ ID NO: 2385559 - RNA, 23 nt, Human
cugucugguggccccguuucugg

SEQ ID NO: 2385560 - RNA, 23 nt, Human
cugucugguuucaccgaggacau

SEQ ID NO: 2385561 - RNA, 16 nt, Human
cugucugguuuuaaca

SEQ ID NO: 2385562 - RNA, 17 nt, Human
cugucugguuuuaacaa

SEQ ID NO: 2385563 - RNA, 18 nt, Human
cugucugguuuuaacaau

SEQ ID NO: 2385564 - RNA, 14 nt, Human
cugucuguaccuaa

SEQ ID NO: 2385565 - RNA, 15 nt, Human
cugucugcucagaca

SEQ ID NO: 2385566 - RNA, 20 nt, Human
cugucuggcugaggauuuca

SEQ ID NO: 2385567 - RNA, 15 nt, Human
cugucuggccaggcc

SEQ ID NO: 2385568 - RNA, 13 nt, Human
cugucugguggcc

SEQ ID NO: 2385569 - RNA, 15 nt, Human
cugucugguggcccc

SEQ ID NO: 2385570 - RNA, 16 nt, Human
cugucuuuaaggaaaa

SEQ ID NO: 2385571 - RNA, 15 nt, Human
cugucuuucagauac

SEQ ID NO: 2385572 - RNA, 20 nt, Human
cugucuuucagauacauggu

SEQ ID NO: 2385573 - RNA, 16 nt, Human
cugucuuucagauaca

SEQ ID NO: 2385574 - RNA, 14 nt, Human
cugucuuuccuaga

SEQ ID NO: 2385575 - RNA, 13 nt, Human
cugucuuuccuag

SEQ ID NO: 2385576 - RNA, 11 nt, Human
cugucuuuccu

SEQ ID NO: 2385577 - RNA, 21 nt, Human
cugucuucuucaggguccuga

SEQ ID NO: 2385578 - RNA, 21 nt, Human
cugucuuuuuucuaaaguaaa

SEQ ID NO: 2385579 - RNA, 15 nt, Human
cugugaaaggaaaga

SEQ ID NO: 2385580 - RNA, 23 nt, Human
cugucuuucugagcacacuuuag

SEQ ID NO: 2385581 - RNA, 20 nt, Human
cugucuuuccuagauggcag

SEQ ID NO: 2385582 - RNA, 18 nt, Human
cugucuucaguaagccgu

SEQ ID NO: 2385583 - RNA, 19 nt, Human
cugucuucacagcucugug

SEQ ID NO: 2385584 - RNA, 14 nt, Human
cugucuucaagggc

SEQ ID NO: 2385585 - RNA, 17 nt, Human
cugucuucaacagcucc

SEQ ID NO: 2385586 - RNA, 16 nt, Human
cugucuguuacacugg

SEQ ID NO: 2385587 - RNA, 18 nt, Human
cugucuguuacacuggag

SEQ ID NO: 2385588 - RNA, 18 nt, Human
cugucuucacaacagauu

SEQ ID NO: 2385589 - RNA, 23 nt, Human
cugucuucacagcucuguguugc

SEQ ID NO: 2385590 - RNA, 15 nt, Human
cugucuucaagggcu

SEQ ID NO: 2385591 - RNA, 17 nt, Human
cugucuucaccugauuc

SEQ ID NO: 2385592 - RNA, 19 nt, Human
cugucuucauagcagauuu

SEQ ID NO: 2385593 - RNA, 22 nt, Human
cugucuucaccugauucaacua

SEQ ID NO: 2385594 - RNA, 18 nt, Human
cugucuucaccugauuca

SEQ ID NO: 2385595 - RNA, 22 nt, Human
cugucuucauagcagauuuuaa

SEQ ID NO: 2385596 - RNA, 11 nt, Human
cugucuuccca

SEQ ID NO: 2385597 - RNA, 12 nt, Human
cugucuucccag

SEQ ID NO: 2385598 - RNA, 13 nt, Human
cugucuucccagg

SEQ ID NO: 2385599 - RNA, 14 nt, Human
cugucuucccaggg

SEQ ID NO: 2385600 - RNA, 18 nt, Human
cugucuuccugcauucac

SEQ ID NO: 2385601 - RNA, 15 nt, Human
cugucuucccagggu

SEQ ID NO: 2385602 - RNA, 16 nt, Human
cugucuucccagggua

SEQ ID NO: 2385603 - RNA, 23 nt, Human
cugucuucccaggguagcccgcc

SEQ ID NO: 2385604 - RNA, 17 nt, Human
cugucuucucaggcucu

SEQ ID NO: 2385605 - RNA, 16 nt, Human
cugucuuccugcauuc

SEQ ID NO: 2385606 - RNA, 14 nt, Human
cugucuuccugcau

SEQ ID NO: 2385607 - RNA, 18 nt, Human
cugucuucccaggguagc

SEQ ID NO: 2385608 - RNA, 13 nt, Human
cuucacaguguuu

SEQ ID NO: 2385609 - RNA, 12 nt, Human
cuucacaguguu

SEQ ID NO: 2385610 - RNA, 17 nt, Human
cuucacacacaggcaac

SEQ ID NO: 2385611 - RNA, 16 nt, Human
cuucacacacaggcaa

SEQ ID NO: 2385612 - RNA, 23 nt, Human
cuucacaaagcccaagggaucug

SEQ ID NO: 2385613 - RNA, 15 nt, Human
cuucacaaauucuca

SEQ ID NO: 2385614 - RNA, 14 nt, Human
cuucacaacagauu

SEQ ID NO: 2385615 - RNA, 12 nt, Human
cuucacaacaga

SEQ ID NO: 2385616 - RNA, 17 nt, Human
cuucacaaagcccaagg

SEQ ID NO: 2385617 - RNA, 15 nt, Human
cuucacaaagcccaa

SEQ ID NO: 2385618 - RNA, 14 nt, Human
cuucacaaagccca

SEQ ID NO: 2385619 - RNA, 23 nt, Human
cuucaaggauccugagccagauu

SEQ ID NO: 2385620 - RNA, 21 nt, Human
cuucaaggauccugagccaga

SEQ ID NO: 2385621 - RNA, 22 nt, Human
cuucaaggauccugagccagau

SEQ ID NO: 2385622 - RNA, 17 nt, Human
cuucagaucagugcuug

SEQ ID NO: 2385623 - RNA, 15 nt, Human
cuucagaucagugcu

SEQ ID NO: 2385624 - RNA, 18 nt, Human
cuucagauggaaacucuu

SEQ ID NO: 2385625 - RNA, 20 nt, Human
cuucagaucagugcuugagu

SEQ ID NO: 2385626 - RNA, 18 nt, Human
cuucagauuuguguuaua

SEQ ID NO: 2385627 - RNA, 12 nt, Human
cuucagagcagg

SEQ ID NO: 2385628 - RNA, 22 nt, Human
cuucagagagcugguaguuagu

SEQ ID NO: 2385629 - RNA, 16 nt, Human
cuucagagagcuggua

SEQ ID NO: 2385630 - RNA, 15 nt, Human
cuucagagagcuggu

SEQ ID NO: 2385631 - RNA, 14 nt, Human
cuucagagagcugg

SEQ ID NO: 2385632 - RNA, 23 nt, Human
cuucagaggcccucgcugccagc

SEQ ID NO: 2385633 - RNA, 21 nt, Human
cuucagaggcccucgcugcca

SEQ ID NO: 2385634 - RNA, 12 nt, Human
cuucagagcuga

SEQ ID NO: 2385635 - RNA, 14 nt, Human
cuucagagcugaca

SEQ ID NO: 2385636 - RNA, 18 nt, Human
cuucagagcugacacagg

SEQ ID NO: 2385637 - RNA, 20 nt, Human
cuucagagcugacacaggau

SEQ ID NO: 2385638 - RNA, 20 nt, Human
cuucacauccuguguuucua

SEQ ID NO: 2385639 - RNA, 13 nt, Human
cuucacauaguuu

SEQ ID NO: 2385640 - RNA, 14 nt, Human
cuucacauaguuuu

SEQ ID NO: 2385641 - RNA, 14 nt, Human
cuucacaguguuuc

SEQ ID NO: 2385642 - RNA, 20 nt, Human
cuucacauaagcucagaauc

SEQ ID NO: 2385643 - RNA, 22 nt, Human
cuucacauaagcucagaaucca

SEQ ID NO: 2385644 - RNA, 17 nt, Human
cuucacauacccucccc

SEQ ID NO: 2385645 - RNA, 21 nt, Human
cuucacauccuguguuucuag

SEQ ID NO: 2385646 - RNA, 11 nt, Human
cuucagagagc

SEQ ID NO: 2385647 - RNA, 23 nt, Human
cuucacauauugauuuccguuaa

SEQ ID NO: 2385648 - RNA, 14 nt, Human
cuucacauauugau

SEQ ID NO: 2385649 - RNA, 20 nt, Human
cuucaacugaccagccucca

SEQ ID NO: 2385650 - RNA, 23 nt, Human
cuucaacugaccagccuccaugc

SEQ ID NO: 2385651 - RNA, 17 nt, Human
cuucaacugaccagccu

SEQ ID NO: 2385652 - RNA, 23 nt, Human
cuucaacagacccccucuagaaa

SEQ ID NO: 2385653 - RNA, 16 nt, Human
cuucaacucccugccc

SEQ ID NO: 2385654 - RNA, 18 nt, Human
cuucaagaacucugggcu

SEQ ID NO: 2385655 - RNA, 17 nt, Human
cuucaagaccuucacca

SEQ ID NO: 2385656 - RNA, 18 nt, Human
cuucaagaucauguaccc

SEQ ID NO: 2385657 - RNA, 17 nt, Human
cuucaaggauccugagc

SEQ ID NO: 2385658 - RNA, 18 nt, Human
cuucaaggauccugagcc

SEQ ID NO: 2385659 - RNA, 19 nt, Human
cuucaaggauccugagcca

SEQ ID NO: 2385660 - RNA, 20 nt, Human
cuucaaggauccugagccag

SEQ ID NO: 2385661 - RNA, 15 nt, Human
cuucaaauauuuccc

SEQ ID NO: 2385662 - RNA, 17 nt, Human
cuucaaauccuugaaga

SEQ ID NO: 2385663 - RNA, 13 nt, Human
cuucaaauuagaa

SEQ ID NO: 2385664 - RNA, 19 nt, Human
cuucaaauuagaagacauu

SEQ ID NO: 2385665 - RNA, 17 nt, Human
cuucaaauccauccaga

SEQ ID NO: 2385666 - RNA, 23 nt, Human
cuuagucacugccugcagagguc

SEQ ID NO: 2385667 - RNA, 14 nt, Human
cuucaaauccaucc

SEQ ID NO: 2385668 - RNA, 16 nt, Human
cuucaaauccauccag

SEQ ID NO: 2385669 - RNA, 21 nt, Human
cuuagucacugagacagcccg

SEQ ID NO: 2385670 - RNA, 20 nt, Human
cuuagucacugagacagccc

SEQ ID NO: 2385671 - RNA, 23 nt, Human
cuuaguaaugcuacgugugauuu

SEQ ID NO: 2385672 - RNA, 13 nt, Human
cuuagucacugcc

SEQ ID NO: 2385673 - RNA, 14 nt, Human
cuuagucacugccu

SEQ ID NO: 2385674 - RNA, 15 nt, Human
cuuagucacugccug

SEQ ID NO: 2385675 - RNA, 16 nt, Human
cuuagucacugccugc

SEQ ID NO: 2385676 - RNA, 17 nt, Human
cuuagucacugccugca

SEQ ID NO: 2385677 - RNA, 22 nt, Human
cuuagucacugagacagcccgg

SEQ ID NO: 2385678 - RNA, 18 nt, Human
cuucaggucaggaguucg

SEQ ID NO: 2385679 - RNA, 16 nt, Human
cuucaggagggagcau

SEQ ID NO: 2385680 - RNA, 13 nt, Human
cuucagcuucuuc

SEQ ID NO: 2385681 - RNA, 19 nt, Human
cuucagcuguacuucgucu

SEQ ID NO: 2385682 - RNA, 18 nt, Human
cuucagcuucuucaucuu

SEQ ID NO: 2385683 - RNA, 16 nt, Human
cuucagguggaaaaac

SEQ ID NO: 2385684 - RNA, 20 nt, Human
cuucagguuaucgaaauaac

SEQ ID NO: 2385685 - RNA, 21 nt, Human
cuucagguuaucgaaauaaca

SEQ ID NO: 2385686 - RNA, 22 nt, Human
cuucagguuaucgaaauaacaa

SEQ ID NO: 2385687 - RNA, 14 nt, Human
cuucaguaagccgu

SEQ ID NO: 2385688 - RNA, 22 nt, Human
cuucagccugaggcugagacug

SEQ ID NO: 2385689 - RNA, 20 nt, Human
cuucagccugaggcugagac

SEQ ID NO: 2385690 - RNA, 16 nt, Human
cuucagccugaggcug

SEQ ID NO: 2385691 - RNA, 15 nt, Human
cuucagccugaggcu

SEQ ID NO: 2385692 - RNA, 16 nt, Human
cuucagcgguuuauau

SEQ ID NO: 2385693 - RNA, 19 nt, Human
cuucagcugacuuuucugu

SEQ ID NO: 2385694 - RNA, 15 nt, Human
cuucagcugacuuuu

SEQ ID NO: 2385695 - RNA, 16 nt, Human
cuucagccucccgagu

SEQ ID NO: 2385696 - RNA, 20 nt, Human
cuucagccucccgaguagcu

SEQ ID NO: 2385697 - RNA, 14 nt, Human
cuucagccugaggc

SEQ ID NO: 2385698 - RNA, 20 nt, Human
cuucagccucuuucuguccc

SEQ ID NO: 2385699 - RNA, 20 nt, Human
cuucagccuccccaccuucu

SEQ ID NO: 2385700 - RNA, 15 nt, Human
cuucagccugaaaga

SEQ ID NO: 2385701 - RNA, 14 nt, Human
cuucagccucccga

SEQ ID NO: 2385702 - RNA, 18 nt, Human
cuucagcauauuuauagc

SEQ ID NO: 2385703 - RNA, 21 nt, Human
cuucagcaguaccuauaaagu

SEQ ID NO: 2385704 - RNA, 22 nt, Human
cuucaguauguugucaaagaga

SEQ ID NO: 2385705 - RNA, 19 nt, Human
cuucagguucuuaguguca

SEQ ID NO: 2385706 - RNA, 15 nt, Human
cuucagguucuuagu

SEQ ID NO: 2385707 - RNA, 15 nt, Human
cuucaguaagccgug

SEQ ID NO: 2385708 - RNA, 14 nt, Human
cuucagugccaaaa

SEQ ID NO: 2385709 - RNA, 23 nt, Human
cuucaguauguugucaaagagag

SEQ ID NO: 2385710 - RNA, 19 nt, Human
cuucagugcaucugggaag

SEQ ID NO: 2385711 - RNA, 13 nt, Human
cuucagugcccac

SEQ ID NO: 2385712 - RNA, 11 nt, Human
cuucagugccc

SEQ ID NO: 2385713 - RNA, 15 nt, Human
cuucagugcccacca

SEQ ID NO: 2385714 - RNA, 23 nt, Human
cuucauggaugggggaacucaga

SEQ ID NO: 2385715 - RNA, 21 nt, Human
cuucauggcagaaggcaaacc

SEQ ID NO: 2385716 - RNA, 15 nt, Human
cuucauggcagaagg

SEQ ID NO: 2385717 - RNA, 20 nt, Human
cuucauuaagcccucuucca

SEQ ID NO: 2385718 - RNA, 16 nt, Human
cuucauuaauaauaaa

SEQ ID NO: 2385719 - RNA, 20 nt, Human
cuucaugucaacuucuggcu

SEQ ID NO: 2385720 - RNA, 23 nt, Human
cuucaugucaacuucuggcuccu

SEQ ID NO: 2385721 - RNA, 13 nt, Human
cuucauuuuuccu

SEQ ID NO: 2385722 - RNA, 14 nt, Human
cuucauuuuuccua

SEQ ID NO: 2385723 - RNA, 16 nt, Human
cuucauuuuuccuaac

SEQ ID NO: 2385724 - RNA, 17 nt, Human
cuucauuuuuccuaaca

SEQ ID NO: 2385725 - RNA, 17 nt, Human
cuucauuaauaauaaau

SEQ ID NO: 2385726 - RNA, 20 nt, Human
cuucauuaccuuuuuugaua

SEQ ID NO: 2385727 - RNA, 15 nt, Human
cuucauuagagcagg

SEQ ID NO: 2385728 - RNA, 24 nt, Human
cuucauuugggaugcuacucuagu

SEQ ID NO: 2385729 - RNA, 16 nt, Human
cuucauuagagcaggc

SEQ ID NO: 2385730 - RNA, 11 nt, Human
cuucauuugug

SEQ ID NO: 2385731 - RNA, 13 nt, Human
cuucauuuguguc

SEQ ID NO: 2385732 - RNA, 14 nt, Human
cuucauuuguguca

SEQ ID NO: 2385733 - RNA, 18 nt, Human
cuucauuugugucaaugg

SEQ ID NO: 2385734 - RNA, 13 nt, Human
cuuccaaagcaca

SEQ ID NO: 2385735 - RNA, 13 nt, Human
cuuccacaagagc

SEQ ID NO: 2385736 - RNA, 14 nt, Human
cuuccacaagagcc

SEQ ID NO: 2385737 - RNA, 15 nt, Human
cuuccacaagagccc

SEQ ID NO: 2385738 - RNA, 15 nt, Human
cuucucauccugcag

SEQ ID NO: 2385739 - RNA, 16 nt, Human
cuucucauccugcagg

SEQ ID NO: 2385740 - RNA, 17 nt, Human
cuucucauccugcaggc

SEQ ID NO: 2385741 - RNA, 12 nt, Human
cuucucaucugu

SEQ ID NO: 2385742 - RNA, 13 nt, Human
cuucucaucacuc

SEQ ID NO: 2385743 - RNA, 18 nt, Human
cuucucaucacuccccuc

SEQ ID NO: 2385744 - RNA, 14 nt, Human
cuucucaugaucca

SEQ ID NO: 2385745 - RNA, 14 nt, Human
cuucucauuucacc

SEQ ID NO: 2385746 - RNA, 20 nt, Human
cuucucauuccaacagugag

SEQ ID NO: 2385747 - RNA, 21 nt, Human
cuucucauuccaacagugagu

SEQ ID NO: 2385748 - RNA, 15 nt, Human
cuucucauuucaccc

SEQ ID NO: 2385749 - RNA, 17 nt, Human
cuucucauuucaccccu

SEQ ID NO: 2385750 - RNA, 21 nt, Human
cuucucacugccaugccagcu

SEQ ID NO: 2385751 - RNA, 22 nt, Human
cuucucagaaggcaaaugacuu

SEQ ID NO: 2385752 - RNA, 13 nt, Human
cuucucagaaucu

SEQ ID NO: 2385753 - RNA, 16 nt, Human
cuucucagaaggcaaa

SEQ ID NO: 2385754 - RNA, 23 nt, Human
cuucgugggaucugccccucccu

SEQ ID NO: 2385755 - RNA, 16 nt, Human
cuucucacugccaugc

SEQ ID NO: 2385756 - RNA, 18 nt, Human
cuucggggaacuccugga

SEQ ID NO: 2385757 - RNA, 16 nt, Human
cuucgggcugugcccg

SEQ ID NO: 2385758 - RNA, 19 nt, Human
cuucggggaacuccuggaa

SEQ ID NO: 2385759 - RNA, 12 nt, Human
cuucguacaguu

SEQ ID NO: 2385760 - RNA, 13 nt, Human
cuucguacaguuc

SEQ ID NO: 2385761 - RNA, 22 nt, Human
cuucgucuuucccauggggagg

SEQ ID NO: 2385762 - RNA, 21 nt, Human
cuucgugcggaaucagcuucu

SEQ ID NO: 2385763 - RNA, 21 nt, Human
cuucgugggaucugccccucc

SEQ ID NO: 2385764 - RNA, 22 nt, Human
cuucgugggaucugccccuccc

SEQ ID NO: 2385765 - RNA, 14 nt, Human
cuucgucuuuccca

SEQ ID NO: 2385766 - RNA, 21 nt, Human
cuucgucuuucccauggggag

SEQ ID NO: 2385767 - RNA, 14 nt, Human
cuucguacaguucu

SEQ ID NO: 2385768 - RNA, 16 nt, Human
cuucguacaguucuuc

SEQ ID NO: 2385769 - RNA, 23 nt, Human
cuucguacaguucuucgggaaga

SEQ ID NO: 2385770 - RNA, 19 nt, Human
cuucggaaaccuuggugua

SEQ ID NO: 2385771 - RNA, 22 nt, Human
cuucgcgguggaaggcccgagg

SEQ ID NO: 2385772 - RNA, 20 nt, Human
cuucggccuccauccugagg

SEQ ID NO: 2385773 - RNA, 19 nt, Human
cuucgggaggucgaggcag

SEQ ID NO: 2385774 - RNA, 15 nt, Human
cuucgggaagagagg

SEQ ID NO: 2385775 - RNA, 17 nt, Human
cuucgggaagagaggag

SEQ ID NO: 2385776 - RNA, 18 nt, Human
cuucgggaagagaggagu

SEQ ID NO: 2385777 - RNA, 21 nt, Human
cuucgggaagagaggaguuca

SEQ ID NO: 2385778 - RNA, 22 nt, Human
cuucgggaagagaggaguucaa

SEQ ID NO: 2385779 - RNA, 23 nt, Human
cuucgggaagagaggaguucaau

SEQ ID NO: 2385780 - RNA, 15 nt, Human
cuuccuucaccucug

SEQ ID NO: 2385781 - RNA, 21 nt, Human
cuuccuuaauucacucccaca

SEQ ID NO: 2385782 - RNA, 14 nt, Human
cuuccuguucugaa

SEQ ID NO: 2385783 - RNA, 19 nt, Human
cuuccuuaauucacuccca

SEQ ID NO: 2385784 - RNA, 23 nt, Human
cuuccuguuuuucacauuuuccu

SEQ ID NO: 2385785 - RNA, 23 nt, Human
cuuccuguguguccaaaacugcc

SEQ ID NO: 2385786 - RNA, 15 nt, Human
cuuccugugugucca

SEQ ID NO: 2385787 - RNA, 18 nt, Human
cuuccuguuuuucacauu

SEQ ID NO: 2385788 - RNA, 17 nt, Human
cuuccuguuuuucacau

SEQ ID NO: 2385789 - RNA, 16 nt, Human
cuuccuguuuuucaca

SEQ ID NO: 2385790 - RNA, 16 nt, Human
cuuccuguuugggccc

SEQ ID NO: 2385791 - RNA, 13 nt, Human
cuuccuuggcuuu

SEQ ID NO: 2385792 - RNA, 19 nt, Human
cuuccuuggcaucacaggg

SEQ ID NO: 2385793 - RNA, 12 nt, Human
cuuccuucccac

SEQ ID NO: 2385794 - RNA, 13 nt, Human
cuuccuucccacc

SEQ ID NO: 2385795 - RNA, 16 nt, Human
cuuccuucauuuccuc

SEQ ID NO: 2385796 - RNA, 15 nt, Human
cuuccuucauuuccu

SEQ ID NO: 2385797 - RNA, 13 nt, Human
cuuccuucauuuc

SEQ ID NO: 2385798 - RNA, 22 nt, Human
cuuccuuuguuuuuuuuuccug

SEQ ID NO: 2385799 - RNA, 18 nt, Human
cuuccuuucuuucucucu

SEQ ID NO: 2385800 - RNA, 21 nt, Human
cuuccuuuuagccuaguucau

SEQ ID NO: 2385801 - RNA, 17 nt, Human
cuuccuuuuaucaguag

SEQ ID NO: 2385802 - RNA, 21 nt, Human
cuucgauacaccgggccugga

SEQ ID NO: 2385803 - RNA, 16 nt, Human
cuucgauacaccgggc

SEQ ID NO: 2385804 - RNA, 14 nt, Human
cuucgccaccuggg

SEQ ID NO: 2385805 - RNA, 20 nt, Human
cuucgcaucaaaagacaauu

SEQ ID NO: 2385806 - RNA, 21 nt, Human
cuucgcaucaaaagacaauuc

SEQ ID NO: 2385807 - RNA, 22 nt, Human
cuucgcaucaaaagacaauucu

SEQ ID NO: 2385808 - RNA, 23 nt, Human
cuucgcaucaaaagacaauucuu

SEQ ID NO: 2385809 - RNA, 14 nt, Human
cuuccuuuucccug

SEQ ID NO: 2385810 - RNA, 16 nt, Human
cuucgcaggcaugucc

SEQ ID NO: 2385811 - RNA, 15 nt, Human
cuucgcaucaaaaga

SEQ ID NO: 2385812 - RNA, 16 nt, Human
cuucgcaucaaaagac

SEQ ID NO: 2385813 - RNA, 17 nt, Human
cuucgcaucaaaagaca

SEQ ID NO: 2385814 - RNA, 19 nt, Human
cuucgcaucaaaagacaau

SEQ ID NO: 2385815 - RNA, 16 nt, Human
cuucgcuccugugucu

SEQ ID NO: 2385816 - RNA, 15 nt, Human
cuucgcuucuugccu

SEQ ID NO: 2385817 - RNA, 16 nt, Human
cuucgcuucuugccuc

SEQ ID NO: 2385818 - RNA, 17 nt, Human
cuucgcuucuugccucu

SEQ ID NO: 2385819 - RNA, 18 nt, Human
cuucgcuucuugccucug

SEQ ID NO: 2385820 - RNA, 20 nt, Human
cuucgcuucuugccucugug

SEQ ID NO: 2385821 - RNA, 21 nt, Human
cuucgcuucuugccucugugc

SEQ ID NO: 2385822 - RNA, 17 nt, Human
cuucgcuccugugucuu

SEQ ID NO: 2385823 - RNA, 19 nt, Human
cuucgcgugcccucgcugc

SEQ ID NO: 2385824 - RNA, 15 nt, Human
cuucgccaccugggu

SEQ ID NO: 2385825 - RNA, 15 nt, Human
cuucccauuguggcu

SEQ ID NO: 2385826 - RNA, 18 nt, Human
cuucccauuguggcuccu

SEQ ID NO: 2385827 - RNA, 23 nt, Human
cuucccaugacccaggcugggca

SEQ ID NO: 2385828 - RNA, 16 nt, Human
cuuccccaaauaauau

SEQ ID NO: 2385829 - RNA, 15 nt, Human
cuuccccacccucag

SEQ ID NO: 2385830 - RNA, 11 nt, Human
cuuccccacug

SEQ ID NO: 2385831 - RNA, 18 nt, Human
cuuccccacugcacacac

SEQ ID NO: 2385832 - RNA, 19 nt, Human
cuuccccagaaaggagacu

SEQ ID NO: 2385833 - RNA, 22 nt, Human
cuuccccacugccugcccaccc

SEQ ID NO: 2385834 - RNA, 20 nt, Human
cuuccccacugccugcccac

SEQ ID NO: 2385835 - RNA, 19 nt, Human
cuuccccacugccugccca

SEQ ID NO: 2385836 - RNA, 16 nt, Human
cuuccccacugccugc

SEQ ID NO: 2385837 - RNA, 14 nt, Human
cuuccccacugccu

SEQ ID NO: 2385838 - RNA, 23 nt, Human
cuuccccacugcacacaccucag

SEQ ID NO: 2385839 - RNA, 21 nt, Human
cuuccacuuuuuuuuguaugu

SEQ ID NO: 2385840 - RNA, 15 nt, Human
cuuccagaaguguga

SEQ ID NO: 2385841 - RNA, 16 nt, Human
cuuccagaagugugau

SEQ ID NO: 2385842 - RNA, 17 nt, Human
cuuccagaagugugauu

SEQ ID NO: 2385843 - RNA, 16 nt, Human
cuuccagaaucccaag

SEQ ID NO: 2385844 - RNA, 17 nt, Human
cuuccagaaucccaaga

SEQ ID NO: 2385845 - RNA, 18 nt, Human
cuuccagagaguccucug

SEQ ID NO: 2385846 - RNA, 21 nt, Human
cuuccagagaguccucuggau

SEQ ID NO: 2385847 - RNA, 20 nt, Human
cuuccagagaguccucugga

SEQ ID NO: 2385848 - RNA, 20 nt, Human
cuuccacuuuuuuuuguaug

SEQ ID NO: 2385849 - RNA, 18 nt, Human
cuuccacugagggcaguc

SEQ ID NO: 2385850 - RNA, 15 nt, Human
cuuccacugagggca

SEQ ID NO: 2385851 - RNA, 20 nt, Human
cuucccccgcaaugugcccc

SEQ ID NO: 2385852 - RNA, 13 nt, Human
cuucccuaccuca

SEQ ID NO: 2385853 - RNA, 16 nt, Human
cuucccuaccucaggc

SEQ ID NO: 2385854 - RNA, 15 nt, Human
cuucccuaccucagg

SEQ ID NO: 2385855 - RNA, 16 nt, Human
cuucccccucccaggg

SEQ ID NO: 2385856 - RNA, 15 nt, Human
cuucccccuccaauc

SEQ ID NO: 2385857 - RNA, 23 nt, Human
cuucccuagaggguuccuguaga

SEQ ID NO: 2385858 - RNA, 20 nt, Human
cuucccuagaggguuccugu

SEQ ID NO: 2385859 - RNA, 21 nt, Human
cuucccuagcuuuagacccug

SEQ ID NO: 2385860 - RNA, 22 nt, Human
cuucccuagcuuuagacccugg

SEQ ID NO: 2385861 - RNA, 20 nt, Human
cuucccuaccucaggcagga

SEQ ID NO: 2385862 - RNA, 17 nt, Human
cuucccuaccucaggca

SEQ ID NO: 2385863 - RNA, 16 nt, Human
cuucccuaucuuugcc

SEQ ID NO: 2385864 - RNA, 18 nt, Human
cuucccuaucuuugccac

SEQ ID NO: 2385865 - RNA, 17 nt, Human
cuucccuaucuuugcca

SEQ ID NO: 2385866 - RNA, 12 nt, Human
cuuccccauggg

SEQ ID NO: 2385867 - RNA, 13 nt, Human
cuuccccauggga

SEQ ID NO: 2385868 - RNA, 14 nt, Human
cuuccccaugggaa

SEQ ID NO: 2385869 - RNA, 14 nt, Human
cuuccccagccucu

SEQ ID NO: 2385870 - RNA, 13 nt, Human
cuuccccagccuc

SEQ ID NO: 2385871 - RNA, 14 nt, Human
cuuccccagcgucc

SEQ ID NO: 2385872 - RNA, 18 nt, Human
cuuccccaucuucuaaac

SEQ ID NO: 2385873 - RNA, 16 nt, Human
cuucccccauagccac

SEQ ID NO: 2385874 - RNA, 15 nt, Human
cuucccccauagcca

SEQ ID NO: 2385875 - RNA, 14 nt, Human
cuucccccauagcc

SEQ ID NO: 2385876 - RNA, 18 nt, Human
cuucccccauagccaccc

SEQ ID NO: 2385877 - RNA, 12 nt, Human
cuucccccucca

SEQ ID NO: 2385878 - RNA, 16 nt, Human
cuuccugugacuucag

SEQ ID NO: 2385879 - RNA, 20 nt, Human
cuuccugucuuccugcauuc

SEQ ID NO: 2385880 - RNA, 21 nt, Human
cuuccugucccaccucuucuc

SEQ ID NO: 2385881 - RNA, 13 nt, Human
cuuccugugacuu

SEQ ID NO: 2385882 - RNA, 18 nt, Human
cuuccuguccagcuccaa

SEQ ID NO: 2385883 - RNA, 17 nt, Human
cuuccugucccaccucu

SEQ ID NO: 2385884 - RNA, 22 nt, Human
cuuccugucccaccucuucucu

SEQ ID NO: 2385885 - RNA, 22 nt, Human
cuuccuggagacugcccagcua

SEQ ID NO: 2385886 - RNA, 14 nt, Human
cuuccuggagacug

SEQ ID NO: 2385887 - RNA, 15 nt, Human
cuuccugcguccucc

SEQ ID NO: 2385888 - RNA, 19 nt, Human
cuuccugcccuacagaggu

SEQ ID NO: 2385889 - RNA, 16 nt, Human
cuuccugcguccuccu

SEQ ID NO: 2385890 - RNA, 17 nt, Human
cuuccugcccuacagag

SEQ ID NO: 2385891 - RNA, 14 nt, Human
cuuccucacuucca

SEQ ID NO: 2385892 - RNA, 16 nt, Human
cuuccucacugcccaa

SEQ ID NO: 2385893 - RNA, 13 nt, Human
cuuccucacuucc

SEQ ID NO: 2385894 - RNA, 21 nt, Human
cuuccugcguccuccucaccu

SEQ ID NO: 2385895 - RNA, 18 nt, Human
cuuccugcguccuccuca

SEQ ID NO: 2385896 - RNA, 20 nt, Human
cuuccugcguccuccucacc

SEQ ID NO: 2385897 - RNA, 18 nt, Human
cuuccuauaugcacuuau

SEQ ID NO: 2385898 - RNA, 22 nt, Human
cuuccuaguuuucuccucccag

SEQ ID NO: 2385899 - RNA, 13 nt, Human
cuuccucacugcc

SEQ ID NO: 2385900 - RNA, 18 nt, Human
cuucccugggcugugcua

SEQ ID NO: 2385901 - RNA, 23 nt, Human
cuuccuaguuuucuccucccagg

SEQ ID NO: 2385902 - RNA, 17 nt, Human
cuuccuaguuuucuccu

SEQ ID NO: 2385903 - RNA, 15 nt, Human
cuuccuaguuuucuc

SEQ ID NO: 2385904 - RNA, 12 nt, Human
cuucccuggcuu

SEQ ID NO: 2385905 - RNA, 12 nt, Human
cuucccugggcu

SEQ ID NO: 2385906 - RNA, 13 nt, Human
cuucccugggcug

SEQ ID NO: 2385907 - RNA, 17 nt, Human
cuucccugggcugugcu

SEQ ID NO: 2385908 - RNA, 11 nt, Human
cuucccuggcu

SEQ ID NO: 2385909 - RNA, 10 nt, Human
cuucccuggc

SEQ ID NO: 2385910 - RNA, 14 nt, Human
cuucccugacucau

SEQ ID NO: 2385911 - RNA, 23 nt, Human
cuucccuagcuuuagacccuggg

SEQ ID NO: 2385912 - RNA, 23 nt, Human
cuucccuaucuuugccacccuca

SEQ ID NO: 2385913 - RNA, 22 nt, Human
cuucccuaucuuugccacccuc

SEQ ID NO: 2385914 - RNA, 20 nt, Human
cuucccugacucauucugaa

SEQ ID NO: 2385915 - RNA, 13 nt, Human
cuucccugacuca

SEQ ID NO: 2385916 - RNA, 18 nt, Human
cuguuugucuucucccca

SEQ ID NO: 2385917 - RNA, 22 nt, Human
cuguuuuacaaaaaagaaaaga

SEQ ID NO: 2385918 - RNA, 14 nt, Human
cuguuuuauaauuu

SEQ ID NO: 2385919 - RNA, 12 nt, Human
cuguuuguuaug

SEQ ID NO: 2385920 - RNA, 16 nt, Human
cuguuugucuucuccc

SEQ ID NO: 2385921 - RNA, 17 nt, Human
cuguuugucuucucccc

SEQ ID NO: 2385922 - RNA, 11 nt, Human
cuguuugucau

SEQ ID NO: 2385923 - RNA, 20 nt, Human
cuguuugggccccucuccca

SEQ ID NO: 2385924 - RNA, 16 nt, Human
cuguuugggccccucu

SEQ ID NO: 2385925 - RNA, 18 nt, Human
cuguuuuagguuaaaaaa

SEQ ID NO: 2385926 - RNA, 15 nt, Human
cuguuuuauaauuuu

SEQ ID NO: 2385927 - RNA, 13 nt, Human
cuguuuucccuga

SEQ ID NO: 2385928 - RNA, 16 nt, Human
cuguuuuccucccuuc

SEQ ID NO: 2385929 - RNA, 15 nt, Human
cuguuuuccucccuu

SEQ ID NO: 2385930 - RNA, 14 nt, Human
cuguuuuccucccu

SEQ ID NO: 2385931 - RNA, 12 nt, Human
cuguuuuccucc

SEQ ID NO: 2385932 - RNA, 23 nt, Human
cuguuuuccucccuucugcuacu

SEQ ID NO: 2385933 - RNA, 14 nt, Human
cuguuuuccuuucu

SEQ ID NO: 2385934 - RNA, 16 nt, Human
cuguuuuccuuucuca

SEQ ID NO: 2385935 - RNA, 18 nt, Human
cuguuuuccuuucucacc

SEQ ID NO: 2385936 - RNA, 21 nt, Human
cuguuuuccucccuucugcua

SEQ ID NO: 2385937 - RNA, 20 nt, Human
cuguuuuccucccuucugcu

SEQ ID NO: 2385938 - RNA, 19 nt, Human
cuguuuuccucccuucugc

SEQ ID NO: 2385939 - RNA, 17 nt, Human
cuguuuuccucccuucu

SEQ ID NO: 2385940 - RNA, 16 nt, Human
cuguuuuuaagcuguu

SEQ ID NO: 2385941 - RNA, 17 nt, Human
cuguuuuuaagcuguuu

SEQ ID NO: 2385942 - RNA, 18 nt, Human
cuguuuuuaagcuguuuc

SEQ ID NO: 2385943 - RNA, 19 nt, Human
cuguuuuuaagcuguuucc

SEQ ID NO: 2385944 - RNA, 23 nt, Human
cuguuuuuaagcuguuuccauag

SEQ ID NO: 2385945 - RNA, 13 nt, Human
cuguuuuuaccca

SEQ ID NO: 2385946 - RNA, 22 nt, Human
cuguuuuuacccauauccccuc

SEQ ID NO: 2385947 - RNA, 15 nt, Human
cuguuuuuaagcugu

SEQ ID NO: 2385948 - RNA, 17 nt, Human
cuguuuuuaaaaaucau

SEQ ID NO: 2385949 - RNA, 23 nt, Human
cuguuuuccuuucucaccgcagu

SEQ ID NO: 2385950 - RNA, 21 nt, Human
cuguuuucucucggcucccca

SEQ ID NO: 2385951 - RNA, 17 nt, Human
cuuaaaaaguggaaaaa

SEQ ID NO: 2385952 - RNA, 16 nt, Human
cuuaaaaaguggaaaa

SEQ ID NO: 2385953 - RNA, 17 nt, Human
cuguuuuucagggaggu

SEQ ID NO: 2385954 - RNA, 15 nt, Human
cuguuuuucacauuu

SEQ ID NO: 2385955 - RNA, 13 nt, Human
cuguuuuucacau

SEQ ID NO: 2385956 - RNA, 12 nt, Human
cuguuuuucaca

SEQ ID NO: 2385957 - RNA, 15 nt, Human
cuguuuuuacccaua

SEQ ID NO: 2385958 - RNA, 20 nt, Human
cuguuuuuacccauaucccc

SEQ ID NO: 2385959 - RNA, 17 nt, Human
cuguugccagagaugga

SEQ ID NO: 2385960 - RNA, 13 nt, Human
cuguugccagaga

SEQ ID NO: 2385961 - RNA, 17 nt, Human
cuguugcccaggcuggc

SEQ ID NO: 2385962 - RNA, 17 nt, Human
cuguuuagauaauacac

SEQ ID NO: 2385963 - RNA, 14 nt, Human
cuguuuagauaaua

SEQ ID NO: 2385964 - RNA, 18 nt, Human
cuguuuagauaauacacc

SEQ ID NO: 2385965 - RNA, 15 nt, Human
cuguugcccacguuu

SEQ ID NO: 2385966 - RNA, 20 nt, Human
cuguuuagcagcagccuuua

SEQ ID NO: 2385967 - RNA, 17 nt, Human
cuguuuagcagcagccu

SEQ ID NO: 2385968 - RNA, 17 nt, Human
cuguuucaaacuuuacu

SEQ ID NO: 2385969 - RNA, 15 nt, Human
cuguuucaaacuuua

SEQ ID NO: 2385970 - RNA, 17 nt, Human
cuguuucaacacagacc

SEQ ID NO: 2385971 - RNA, 16 nt, Human
cuguuuauuuuauauu

SEQ ID NO: 2385972 - RNA, 12 nt, Human
cuguuucccagc

SEQ ID NO: 2385973 - RNA, 12 nt, Human
cuguuugacaaa

SEQ ID NO: 2385974 - RNA, 16 nt, Human
cuguuucugucaggag

SEQ ID NO: 2385975 - RNA, 22 nt, Human
cuguuugaggauauauuuucac

SEQ ID NO: 2385976 - RNA, 15 nt, Human
cuguuugacaaaccu

SEQ ID NO: 2385977 - RNA, 23 nt, Human
cuguuugaggauauauuuucacu

SEQ ID NO: 2385978 - RNA, 23 nt, Human
cuguuuggaggagcaaaggcuga

SEQ ID NO: 2385979 - RNA, 17 nt, Human
cuguuugcuaagugagg

SEQ ID NO: 2385980 - RNA, 19 nt, Human
cuguuugcuaagugaggau

SEQ ID NO: 2385981 - RNA, 18 nt, Human
cuguucuuaagacgugau

SEQ ID NO: 2385982 - RNA, 17 nt, Human
cuguucuguuuugccug

SEQ ID NO: 2385983 - RNA, 13 nt, Human
cuguucugugucu

SEQ ID NO: 2385984 - RNA, 14 nt, Human
cuguucugugucuu

SEQ ID NO: 2385985 - RNA, 11 nt, Human
cuguucugugu

SEQ ID NO: 2385986 - RNA, 23 nt, Human
cuguucuguggaaaguguaaagc

SEQ ID NO: 2385987 - RNA, 15 nt, Human
cuguucuguggaaag

SEQ ID NO: 2385988 - RNA, 20 nt, Human
cuguucuguggaaaguguaa

SEQ ID NO: 2385989 - RNA, 21 nt, Human
cuguucuguggaaaguguaaa

SEQ ID NO: 2385990 - RNA, 22 nt, Human
cuguucuguggaaaguguaaag

SEQ ID NO: 2385991 - RNA, 16 nt, Human
cuguuaaauugcugug

SEQ ID NO: 2385992 - RNA, 18 nt, Human
cuguuaaauugcugugua

SEQ ID NO: 2385993 - RNA, 19 nt, Human
cuguuaaauugcuguguau

SEQ ID NO: 2385994 - RNA, 20 nt, Human
cuguuaaauugcuguguauc

SEQ ID NO: 2385995 - RNA, 22 nt, Human
cuguuaaauugcuguguaucug

SEQ ID NO: 2385996 - RNA, 16 nt, Human
cuguuaauaguucagg

SEQ ID NO: 2385997 - RNA, 21 nt, Human
cuguucuuucuggcuaugcau

SEQ ID NO: 2385998 - RNA, 14 nt, Human
cuguucuuucuggc

SEQ ID NO: 2385999 - RNA, 13 nt, Human
cuguucuuucugg

SEQ ID NO: 2386000 - RNA, 21 nt, Human
cuguucuuuccaaaguacacu

SEQ ID NO: 2386001 - RNA, 19 nt, Human
cuguucuuuccaaaguaca

SEQ ID NO: 2386002 - RNA, 16 nt, Human
cuguucuuuccaaagu

SEQ ID NO: 2386003 - RNA, 15 nt, Human
cuguucuuuccaaag

SEQ ID NO: 2386004 - RNA, 12 nt, Human
cuguucuugaag

SEQ ID NO: 2386005 - RNA, 20 nt, Human
cuguugacauccaagcuucc

SEQ ID NO: 2386006 - RNA, 17 nt, Human
cuguugacacaggucuu

SEQ ID NO: 2386007 - RNA, 22 nt, Human
cuguugacacaggucuuuccua

SEQ ID NO: 2386008 - RNA, 14 nt, Human
cuguugaaaauuau

SEQ ID NO: 2386009 - RNA, 21 nt, Human
cuguugaaaauuauuuuaaac

SEQ ID NO: 2386010 - RNA, 22 nt, Human
cuguugaaaauuauuuuaaaca

SEQ ID NO: 2386011 - RNA, 12 nt, Human
cuguugaaaauu

SEQ ID NO: 2386012 - RNA, 13 nt, Human
cuguucuuuaauu

SEQ ID NO: 2386013 - RNA, 16 nt, Human
cuguucuuuaauuuau

SEQ ID NO: 2386014 - RNA, 13 nt, Human
cuguucuuggggc

SEQ ID NO: 2386015 - RNA, 15 nt, Human
cuguucuuggggccc

SEQ ID NO: 2386016 - RNA, 23 nt, Human
cuguucuuucuggcuaugcauuu

SEQ ID NO: 2386017 - RNA, 23 nt, Human
cuguugacauccaagcuuccuuu

SEQ ID NO: 2386018 - RNA, 21 nt, Human
cuguugacacaggucuuuccu

SEQ ID NO: 2386019 - RNA, 17 nt, Human
cuguugacgaagucucu

SEQ ID NO: 2386020 - RNA, 20 nt, Human
cuguugagcuguuuucccug

SEQ ID NO: 2386021 - RNA, 15 nt, Human
cuguugagcuguuuu

SEQ ID NO: 2386022 - RNA, 15 nt, Human
cuguugauugcagga

SEQ ID NO: 2386023 - RNA, 14 nt, Human
cuguugauugcuaa

SEQ ID NO: 2386024 - RNA, 15 nt, Human
cuguugauugcuaaa

SEQ ID NO: 2386025 - RNA, 17 nt, Human
cuguugauugcuaaaug

SEQ ID NO: 2386026 - RNA, 18 nt, Human
cuguugauugcuaaaugu

SEQ ID NO: 2386027 - RNA, 19 nt, Human
cuguugauugcuaaaugua

SEQ ID NO: 2386028 - RNA, 20 nt, Human
cuguugauugcuaaauguaa

SEQ ID NO: 2386029 - RNA, 17 nt, Human
cuguugaugaggccucu

SEQ ID NO: 2386030 - RNA, 20 nt, Human
cuguugaugaggccucuugg

SEQ ID NO: 2386031 - RNA, 21 nt, Human
cuguugaugaggccucuugga

SEQ ID NO: 2386032 - RNA, 13 nt, Human
cuguugccacaac

SEQ ID NO: 2386033 - RNA, 12 nt, Human
cuguugcauggg

SEQ ID NO: 2386034 - RNA, 12 nt, Human
cuguugcaguga

SEQ ID NO: 2386035 - RNA, 12 nt, Human
cuguugcccagg

SEQ ID NO: 2386036 - RNA, 19 nt, Human
cuguugcaaacucagccuc

SEQ ID NO: 2386037 - RNA, 13 nt, Human
cuguugcacccag

SEQ ID NO: 2386038 - RNA, 22 nt, Human
cuguugauugcuaaauguaaca

SEQ ID NO: 2386039 - RNA, 23 nt, Human
cuguugauugcuaaauguaacag

SEQ ID NO: 2386040 - RNA, 17 nt, Human
cuguugauuucuuucca

SEQ ID NO: 2386041 - RNA, 20 nt, Human
cuguugauuucuuuccagag

SEQ ID NO: 2386042 - RNA, 23 nt, Human
cuguugcacccagcccuggucuc

SEQ ID NO: 2386043 - RNA, 20 nt, Human
cuguugcacccagcccuggu

SEQ ID NO: 2386044 - RNA, 21 nt, Human
cuguugcacccagcccugguc

SEQ ID NO: 2386045 - RNA, 14 nt, Human
cuguugcacccagc

SEQ ID NO: 2386046 - RNA, 17 nt, Human
cuguugcacccagcccu

SEQ ID NO: 2386047 - RNA, 18 nt, Human
cuguugcacccagcccug

SEQ ID NO: 2386048 - RNA, 19 nt, Human
cuguugcacccagcccugg

SEQ ID NO: 2386049 - RNA, 13 nt, Human
cuguugcccaggc

SEQ ID NO: 2386050 - RNA, 14 nt, Human
cuguugcccaggcu

SEQ ID NO: 2386051 - RNA, 15 nt, Human
cuguugcccaggcug

SEQ ID NO: 2386052 - RNA, 16 nt, Human
cuguugcccaggcugg

SEQ ID NO: 2386053 - RNA, 16 nt, Human
cuuagaaauugcauuu

SEQ ID NO: 2386054 - RNA, 23 nt, Human
cuuagaaguggaccaggacagga

SEQ ID NO: 2386055 - RNA, 22 nt, Human
cuuagaaguggaccaggacagg

SEQ ID NO: 2386056 - RNA, 21 nt, Human
cuuagaaguggaccaggacag

SEQ ID NO: 2386057 - RNA, 20 nt, Human
cuuagaaguggaccaggaca

SEQ ID NO: 2386058 - RNA, 18 nt, Human
cuuagaaguggaccagga

SEQ ID NO: 2386059 - RNA, 17 nt, Human
cuuagaaguggaccagg

SEQ ID NO: 2386060 - RNA, 17 nt, Human
cuuagaagucacacagu

SEQ ID NO: 2386061 - RNA, 20 nt, Human
cuuagaagucacacaguauu

SEQ ID NO: 2386062 - RNA, 20 nt, Human
cuuagaaaaaccaccaccau

SEQ ID NO: 2386063 - RNA, 19 nt, Human
cuuagaaaauucacuauug

SEQ ID NO: 2386064 - RNA, 14 nt, Human
cuuagaaagcaggg

SEQ ID NO: 2386065 - RNA, 16 nt, Human
cuuagaaagcaggggc

SEQ ID NO: 2386066 - RNA, 18 nt, Human
cuuagaaagcaggggcua

SEQ ID NO: 2386067 - RNA, 17 nt, Human
cuuagaaagcaggggcu

SEQ ID NO: 2386068 - RNA, 21 nt, Human
cuuaccuucaauaaaguaucu

SEQ ID NO: 2386069 - RNA, 18 nt, Human
cuuaccuucaauaaagua

SEQ ID NO: 2386070 - RNA, 17 nt, Human
cuuaccuucaauaaagu

SEQ ID NO: 2386071 - RNA, 16 nt, Human
cuuaccuucaauaaag

SEQ ID NO: 2386072 - RNA, 15 nt, Human
cuuaccuucaauaaa

SEQ ID NO: 2386073 - RNA, 20 nt, Human
cuuaccuguaugucuccagu

SEQ ID NO: 2386074 - RNA, 19 nt, Human
cuuaccugggcauucuugu

SEQ ID NO: 2386075 - RNA, 16 nt, Human
cuuaauuuugguugua

SEQ ID NO: 2386076 - RNA, 18 nt, Human
cuuaauuuucaguauaau

SEQ ID NO: 2386077 - RNA, 11 nt, Human
cuuaauuuugg

SEQ ID NO: 2386078 - RNA, 14 nt, Human
cuuaauuuucagua

SEQ ID NO: 2386079 - RNA, 19 nt, Human
cuuaauuuugguuguauuc

SEQ ID NO: 2386080 - RNA, 20 nt, Human
cuuaccugccaggaagccag

SEQ ID NO: 2386081 - RNA, 12 nt, Human
cuuacugaaggu

SEQ ID NO: 2386082 - RNA, 15 nt, Human
cuuacucuucuugaa

SEQ ID NO: 2386083 - RNA, 22 nt, Human
cuuaccuucaauaaaguaucua

SEQ ID NO: 2386084 - RNA, 13 nt, Human
cuuaccuuuuuau

SEQ ID NO: 2386085 - RNA, 13 nt, Human
cuuacugcagaau

SEQ ID NO: 2386086 - RNA, 12 nt, Human
cuuacugcaaau

SEQ ID NO: 2386087 - RNA, 21 nt, Human
cuuacugauuuuuaaguuauu

SEQ ID NO: 2386088 - RNA, 21 nt, Human
cuuacugauauauuuuacaau

SEQ ID NO: 2386089 - RNA, 19 nt, Human
cuuacugauauauuuuaca

SEQ ID NO: 2386090 - RNA, 15 nt, Human
cuuacugauauauuu

SEQ ID NO: 2386091 - RNA, 12 nt, Human
cuuacugauaua

SEQ ID NO: 2386092 - RNA, 19 nt, Human
cuuacucuucuugaaauuu

SEQ ID NO: 2386093 - RNA, 16 nt, Human
cuuagaccucagccug

SEQ ID NO: 2386094 - RNA, 15 nt, Human
cuuagaccucagccu

SEQ ID NO: 2386095 - RNA, 14 nt, Human
cuuagaccucagcc

SEQ ID NO: 2386096 - RNA, 13 nt, Human
cuuagaccucagc

SEQ ID NO: 2386097 - RNA, 12 nt, Human
cuuagaccucag

SEQ ID NO: 2386098 - RNA, 18 nt, Human
cuuagaaguuuguuguga

SEQ ID NO: 2386099 - RNA, 11 nt, Human
cuuagaauaaa

SEQ ID NO: 2386100 - RNA, 15 nt, Human
cuuagaauaaaauug

SEQ ID NO: 2386101 - RNA, 16 nt, Human
cuuagaauaaaauugu

SEQ ID NO: 2386102 - RNA, 17 nt, Human
cuuagaauaaaauugua

SEQ ID NO: 2386103 - RNA, 17 nt, Human
cuuagaauccaaacuug

SEQ ID NO: 2386104 - RNA, 16 nt, Human
cuuagaauccaaacuu

SEQ ID NO: 2386105 - RNA, 12 nt, Human
cuuagaauccaa

SEQ ID NO: 2386106 - RNA, 20 nt, Human
cuuagaauaaaauuguaaaa

SEQ ID NO: 2386107 - RNA, 19 nt, Human
cuuagaauuaguggcacuu

SEQ ID NO: 2386108 - RNA, 16 nt, Human
cuuagacuugaaauac

SEQ ID NO: 2386109 - RNA, 16 nt, Human
cuuagacuucugcuuu

SEQ ID NO: 2386110 - RNA, 20 nt, Human
cuuagacuucgacucaggau

SEQ ID NO: 2386111 - RNA, 14 nt, Human
cuuagacuucugcu

SEQ ID NO: 2386112 - RNA, 19 nt, Human
cuuagacuucgacucagga

SEQ ID NO: 2386113 - RNA, 18 nt, Human
cuuagaccuuccauaaug

SEQ ID NO: 2386114 - RNA, 18 nt, Human
cuuagaccucagccugug

SEQ ID NO: 2386115 - RNA, 17 nt, Human
cuuagaccucagccugu

SEQ ID NO: 2386116 - RNA, 20 nt, Human
cuuagaccucagccugugcu

SEQ ID NO: 2386117 - RNA, 16 nt, Human
cuuagaccuuccauaa

SEQ ID NO: 2386118 - RNA, 17 nt, Human
cuuagacuugaaauacu

SEQ ID NO: 2386119 - RNA, 20 nt, Human
cuuagagaauguucuccuaa

SEQ ID NO: 2386120 - RNA, 22 nt, Human
cuuagagacaguugggugagaa

SEQ ID NO: 2386121 - RNA, 11 nt, Human
cuuagagcagu

SEQ ID NO: 2386122 - RNA, 19 nt, Human
cuuagagcaguuucugucc

SEQ ID NO: 2386123 - RNA, 22 nt, Human
cuuagagcaguuucuguccugc

SEQ ID NO: 2386124 - RNA, 12 nt, Human
cuuagagccagg

SEQ ID NO: 2386125 - RNA, 14 nt, Human
cuuagagccaggca

SEQ ID NO: 2386126 - RNA, 15 nt, Human
cuuagagccaggcac

SEQ ID NO: 2386127 - RNA, 16 nt, Human
cuuagagccaggcaca

SEQ ID NO: 2386128 - RNA, 17 nt, Human
cuuagagccaggcacac

SEQ ID NO: 2386129 - RNA, 23 nt, Human
cuuagagccaggcacacacugug

SEQ ID NO: 2386130 - RNA, 16 nt, Human
cuuagagccucccuca

SEQ ID NO: 2386131 - RNA, 17 nt, Human
cuuagagccucccucaa

SEQ ID NO: 2386132 - RNA, 21 nt, Human
cuuagguuggcaaaaaggcag

SEQ ID NO: 2386133 - RNA, 23 nt, Human
cuuagguuggcaaaaaggcagga

SEQ ID NO: 2386134 - RNA, 20 nt, Human
cuuaguaaugcuacguguga

SEQ ID NO: 2386135 - RNA, 21 nt, Human
cuuaguaaugcuacgugugau

SEQ ID NO: 2386136 - RNA, 22 nt, Human
cuuaguaaugcuacgugugauu

SEQ ID NO: 2386137 - RNA, 23 nt, Human
cuuagagccucccucaauucccc

SEQ ID NO: 2386138 - RNA, 14 nt, Human
cuuaguacugaguu

SEQ ID NO: 2386139 - RNA, 17 nt, Human
cuuaauaguauuuauga

SEQ ID NO: 2386140 - RNA, 16 nt, Human
cuuaauaguauuuaug

SEQ ID NO: 2386141 - RNA, 20 nt, Human
cuuaauagaaacauugaaga

SEQ ID NO: 2386142 - RNA, 21 nt, Human
cuuaauaccugggugauuaca

SEQ ID NO: 2386143 - RNA, 17 nt, Human
cuuaauacacacaguua

SEQ ID NO: 2386144 - RNA, 18 nt, Human
cuuaauacuaccuugaaa

SEQ ID NO: 2386145 - RNA, 16 nt, Human
cuuaauacuaccuuga

SEQ ID NO: 2386146 - RNA, 22 nt, Human
cuuaaguaagcaacagcauaac

SEQ ID NO: 2386147 - RNA, 14 nt, Human
cuuaaggggcagcu

SEQ ID NO: 2386148 - RNA, 15 nt, Human
cuuaaggggcagcuu

SEQ ID NO: 2386149 - RNA, 12 nt, Human
cuuaaggggcag

SEQ ID NO: 2386150 - RNA, 20 nt, Human
cuuaaggauugugauauuuu

SEQ ID NO: 2386151 - RNA, 16 nt, Human
cuuaaggcacucuguu

SEQ ID NO: 2386152 - RNA, 18 nt, Human
cuuaaggggcagcuucua

SEQ ID NO: 2386153 - RNA, 21 nt, Human
cuuaaggauggagccagcucu

SEQ ID NO: 2386154 - RNA, 20 nt, Human
cuuaaggacaaaaaugaacu

SEQ ID NO: 2386155 - RNA, 12 nt, Human
cuuaagcuuccg

SEQ ID NO: 2386156 - RNA, 18 nt, Human
cuuaaauuuuaauuuauu

SEQ ID NO: 2386157 - RNA, 17 nt, Human
cuuaaauuuuaauuuau

SEQ ID NO: 2386158 - RNA, 20 nt, Human
cuuaaaaaucauugauuguc

SEQ ID NO: 2386159 - RNA, 23 nt, Human
cuuaacaauuucuguccuucaga

SEQ ID NO: 2386160 - RNA, 13 nt, Human
cuuaacauauuua

SEQ ID NO: 2386161 - RNA, 15 nt, Human
cuuaacauauuuacu

SEQ ID NO: 2386162 - RNA, 17 nt, Human
cuuaacauauuuacuaa

SEQ ID NO: 2386163 - RNA, 17 nt, Human
cuuaacauucuguaaaa

SEQ ID NO: 2386164 - RNA, 14 nt, Human
cuuaacauucugua

SEQ ID NO: 2386165 - RNA, 17 nt, Human
cuuaaccagaucauugu

SEQ ID NO: 2386166 - RNA, 18 nt, Human
cuuaagaauuuugagcag

SEQ ID NO: 2386167 - RNA, 23 nt, Human
cuuaagaagacugcauuauauuu

SEQ ID NO: 2386168 - RNA, 15 nt, Human
cuuaauguuuauucc

SEQ ID NO: 2386169 - RNA, 16 nt, Human
cuuaauguuuauuccu

SEQ ID NO: 2386170 - RNA, 11 nt, Human
cuuaauuauua

SEQ ID NO: 2386171 - RNA, 15 nt, Human
cuuaauuauuauuug

SEQ ID NO: 2386172 - RNA, 18 nt, Human
cuuaauuauuauuugugu

SEQ ID NO: 2386173 - RNA, 20 nt, Human
cuuaauuaaaagaauauuuu

SEQ ID NO: 2386174 - RNA, 19 nt, Human
cuuaauuaaaagaauauuu

SEQ ID NO: 2386175 - RNA, 19 nt, Human
cuuaauuauuauuuguguu

SEQ ID NO: 2386176 - RNA, 23 nt, Human
cuuaauguuuauuccugauaaua

SEQ ID NO: 2386177 - RNA, 17 nt, Human
cuuaauuccuuucucau

SEQ ID NO: 2386178 - RNA, 20 nt, Human
cuuaauucuuagcucauucu

SEQ ID NO: 2386179 - RNA, 15 nt, Human
cuuaauugcacucua

SEQ ID NO: 2386180 - RNA, 19 nt, Human
cuuaauuccuuucucaucc

SEQ ID NO: 2386181 - RNA, 16 nt, Human
cuuaauuguucauuuu

SEQ ID NO: 2386182 - RNA, 19 nt, Human
cuuaauuguucauuuugag

SEQ ID NO: 2386183 - RNA, 23 nt, Human
cuuaauuguucauuuugagcuga

SEQ ID NO: 2386184 - RNA, 14 nt, Human
cuuaauauguuaac

SEQ ID NO: 2386185 - RNA, 19 nt, Human
cuuaauauauauauccaga

SEQ ID NO: 2386186 - RNA, 17 nt, Human
cuuaaucuuuucacaaa

SEQ ID NO: 2386187 - RNA, 18 nt, Human
cuuaaucuuuucacaaau

SEQ ID NO: 2386188 - RNA, 19 nt, Human
cuuaaucuuuucacaaaua

SEQ ID NO: 2386189 - RNA, 20 nt, Human
cuuaaucuuuucacaaauaa

SEQ ID NO: 2386190 - RNA, 21 nt, Human
cuuaaucuuuucacaaauaaa

SEQ ID NO: 2386191 - RNA, 12 nt, Human
cuuaaugaaguu

SEQ ID NO: 2386192 - RNA, 14 nt, Human
cuuaaugaaguuug

SEQ ID NO: 2386193 - RNA, 15 nt, Human
cuuaaugaaguuuga

SEQ ID NO: 2386194 - RNA, 17 nt, Human
cuuaaugaaguuugaau

SEQ ID NO: 2386195 - RNA, 18 nt, Human
cuuaaugaaguuugaaug

SEQ ID NO: 2386196 - RNA, 19 nt, Human
cuuaaugaaguuugaaugu

SEQ ID NO: 2386197 - RNA, 20 nt, Human
cuuaaugaaguuugaauguu

SEQ ID NO: 2386198 - RNA, 21 nt, Human
cuuaaugaaguuugaauguua

SEQ ID NO: 2386199 - RNA, 23 nt, Human
cuuaaugaaguuugaauguuaaa

SEQ ID NO: 2386200 - RNA, 22 nt, Human
cuuaaugaaguuugaauguuaa

SEQ ID NO: 2386201 - RNA, 20 nt, Human
cuuaauguucugaauaauuu

SEQ ID NO: 2386202 - RNA, 22 nt, Human
cuuaauguucugaauaauuucu

SEQ ID NO: 2386203 - RNA, 12 nt, Human
cuuaauguuuau

SEQ ID NO: 2386204 - RNA, 14 nt, Human
cuuaauguuuauuc

SEQ ID NO: 2386205 - RNA, 17 nt, Human
cuuaauuaaaagaauau

SEQ ID NO: 2386206 - RNA, 16 nt, Human
cuuaauuaaaagaaua

SEQ ID NO: 2386207 - RNA, 17 nt, Human
ccuaaaagcacacucau

SEQ ID NO: 2386208 - RNA, 16 nt, Human
ccguguggccccuuca

SEQ ID NO: 2386209 - RNA, 18 nt, Human
ccuaaaagcacacucauc

SEQ ID NO: 2386210 - RNA, 22 nt, Human
ccuaaaaggaaaucucacccca

SEQ ID NO: 2386211 - RNA, 15 nt, Human
ccguguggccccuuc

SEQ ID NO: 2386212 - RNA, 14 nt, Human
ccguguggccccuu

SEQ ID NO: 2386213 - RNA, 13 nt, Human
ccguguggccccu

SEQ ID NO: 2386214 - RNA, 16 nt, Human
ccgugugcccucgggc

SEQ ID NO: 2386215 - RNA, 22 nt, Human
ccuaaaagugggcuugauucug

SEQ ID NO: 2386216 - RNA, 15 nt, Human
ccuaaaaguaaacau

SEQ ID NO: 2386217 - RNA, 18 nt, Human
ccuaaaauaauugguucu

SEQ ID NO: 2386218 - RNA, 23 nt, Human
ccuaaaaggaaaucucaccccau

SEQ ID NO: 2386219 - RNA, 14 nt, Human
ccuaaaaguaaaca

SEQ ID NO: 2386220 - RNA, 13 nt, Human
ccgugugcccucg

SEQ ID NO: 2386221 - RNA, 22 nt, Human
ccgugugagaagugaaugcugg

SEQ ID NO: 2386222 - RNA, 23 nt, Human
ccgugugagaagugaaugcuggg

SEQ ID NO: 2386223 - RNA, 23 nt, Human
ccgugcuuguuugcucaccuggg

SEQ ID NO: 2386224 - RNA, 20 nt, Human
ccgugcuuguuugcucaccu

SEQ ID NO: 2386225 - RNA, 15 nt, Human
ccgugcuuccucagu

SEQ ID NO: 2386226 - RNA, 22 nt, Human
ccgugcuuguuugcucaccugg

SEQ ID NO: 2386227 - RNA, 20 nt, Human
ccgugguguuauuuaaagaa

SEQ ID NO: 2386228 - RNA, 14 nt, Human
ccgugguccuuugg

SEQ ID NO: 2386229 - RNA, 16 nt, Human
ccguguaaaccaaagc

SEQ ID NO: 2386230 - RNA, 15 nt, Human
ccuaaaauucagugg

SEQ ID NO: 2386231 - RNA, 16 nt, Human
ccuaaauauauuuuaa

SEQ ID NO: 2386232 - RNA, 14 nt, Human
ccuaaaguguauuu

SEQ ID NO: 2386233 - RNA, 18 nt, Human
ccuaaauauauuuuaaga

SEQ ID NO: 2386234 - RNA, 21 nt, Human
ccuacaagagcagccuguggc

SEQ ID NO: 2386235 - RNA, 18 nt, Human
ccuacaagagcagccugu

SEQ ID NO: 2386236 - RNA, 17 nt, Human
ccuacaagagcagccug

SEQ ID NO: 2386237 - RNA, 19 nt, Human
ccuacaagagcagccugug

SEQ ID NO: 2386238 - RNA, 21 nt, Human
ccuacaccauuaucuuggaaa

SEQ ID NO: 2386239 - RNA, 15 nt, Human
ccuacaagacacagu

SEQ ID NO: 2386240 - RNA, 23 nt, Human
ccuaauuucuccucccuuccuuu

SEQ ID NO: 2386241 - RNA, 20 nt, Human
ccuaauuucuccucccuucc

SEQ ID NO: 2386242 - RNA, 12 nt, Human
ccuauaaugaag

SEQ ID NO: 2386243 - RNA, 12 nt, Human
ccuauaaaacag

SEQ ID NO: 2386244 - RNA, 20 nt, Human
ccuaguuuucuccucccagg

SEQ ID NO: 2386245 - RNA, 23 nt, Human
ccuauaaaacaggucaauacagu

SEQ ID NO: 2386246 - RNA, 17 nt, Human
ccuauaaaguaaagcua

SEQ ID NO: 2386247 - RNA, 20 nt, Human
ccuauaaaacaggucaauac

SEQ ID NO: 2386248 - RNA, 18 nt, Human
ccuauagucccagcuacu

SEQ ID NO: 2386249 - RNA, 13 nt, Human
ccuauagucccag

SEQ ID NO: 2386250 - RNA, 22 nt, Human
ccuauacgcagcgugcuuuaaa

SEQ ID NO: 2386251 - RNA, 22 nt, Human
ccuauauuguuuucaguguaca

SEQ ID NO: 2386252 - RNA, 24 nt, Human
ccuauauuuacagugaaaauguaa

SEQ ID NO: 2386253 - RNA, 14 nt, Human
ccuaugcaauauau

SEQ ID NO: 2386254 - RNA, 18 nt, Human
ccuauaugauuuauaguu

SEQ ID NO: 2386255 - RNA, 15 nt, Human
ccuauauuggcuaaa

SEQ ID NO: 2386256 - RNA, 13 nt, Human
ccuauauuuacag

SEQ ID NO: 2386257 - RNA, 15 nt, Human
ccuauauuuacagug

SEQ ID NO: 2386258 - RNA, 14 nt, Human
ccuauauguaguau

SEQ ID NO: 2386259 - RNA, 16 nt, Human
ccuauauaguuuauug

SEQ ID NO: 2386260 - RNA, 18 nt, Human
ccuauauaauaaagcuac

SEQ ID NO: 2386261 - RNA, 18 nt, Human
ccuauauuguuuucagug

SEQ ID NO: 2386262 - RNA, 23 nt, Human
ccuaguggggucucccucuccug

SEQ ID NO: 2386263 - RNA, 15 nt, Human
ccuaggggucaggga

SEQ ID NO: 2386264 - RNA, 18 nt, Human
ccuaggggucagggacca

SEQ ID NO: 2386265 - RNA, 24 nt, Human
ccuaguggggucucccucuccugc

SEQ ID NO: 2386266 - RNA, 21 nt, Human
ccuaguucauccaauccucac

SEQ ID NO: 2386267 - RNA, 13 nt, Human
ccuaguuccacca

SEQ ID NO: 2386268 - RNA, 21 nt, Human
ccuaguuccaccaucaagcca

SEQ ID NO: 2386269 - RNA, 23 nt, Human
ccuaguuccaccaucaagccacc

SEQ ID NO: 2386270 - RNA, 19 nt, Human
ccuaguucuguagaaaugg

SEQ ID NO: 2386271 - RNA, 14 nt, Human
ccuaguuucccuga

SEQ ID NO: 2386272 - RNA, 18 nt, Human
ccuaguucuguagaaaug

SEQ ID NO: 2386273 - RNA, 19 nt, Human
ccuaguuuucuccucccag

SEQ ID NO: 2386274 - RNA, 18 nt, Human
ccuaguuuucuccuccca

SEQ ID NO: 2386275 - RNA, 16 nt, Human
ccuaguuuucuccucc

SEQ ID NO: 2386276 - RNA, 15 nt, Human
ccuaguuuucuccuc

SEQ ID NO: 2386277 - RNA, 15 nt, Human
ccuaguuuuccaugc

SEQ ID NO: 2386278 - RNA, 13 nt, Human
ccuaguuuuccau

SEQ ID NO: 2386279 - RNA, 12 nt, Human
ccuaguuuucca

SEQ ID NO: 2386280 - RNA, 20 nt, Human
ccuaccggcaauuuccggcc

SEQ ID NO: 2386281 - RNA, 13 nt, Human
ccuacccacaccu

SEQ ID NO: 2386282 - RNA, 16 nt, Human
ccuacccacaccucug

SEQ ID NO: 2386283 - RNA, 12 nt, Human
ccuaccucagcc

SEQ ID NO: 2386284 - RNA, 21 nt, Human
ccuaccggcaauuuccggcca

SEQ ID NO: 2386285 - RNA, 13 nt, Human
ccuaccucagccu

SEQ ID NO: 2386286 - RNA, 16 nt, Human
ccuaccucagccuaga

SEQ ID NO: 2386287 - RNA, 14 nt, Human
ccuaccucagccua

SEQ ID NO: 2386288 - RNA, 22 nt, Human
ccuaccgagucucuucuccacu

SEQ ID NO: 2386289 - RNA, 23 nt, Human
ccuaccgagucucuucuccacug

SEQ ID NO: 2386290 - RNA, 19 nt, Human
ccuaccagcgcccgcuggg

SEQ ID NO: 2386291 - RNA, 20 nt, Human
ccuaccagcgcccgcugggc

SEQ ID NO: 2386292 - RNA, 21 nt, Human
ccuaccagcgcccgcugggcu

SEQ ID NO: 2386293 - RNA, 22 nt, Human
ccuaccagcgcccgcugggcug

SEQ ID NO: 2386294 - RNA, 23 nt, Human
ccuaccagcgcccgcugggcuga

SEQ ID NO: 2386295 - RNA, 16 nt, Human
ccuaccaucagggaca

SEQ ID NO: 2386296 - RNA, 22 nt, Human
ccuaccaucagggacaggauga

SEQ ID NO: 2386297 - RNA, 15 nt, Human
ccuacccaaccacuc

SEQ ID NO: 2386298 - RNA, 16 nt, Human
ccuaccacagugucug

SEQ ID NO: 2386299 - RNA, 15 nt, Human
ccuaccacagugucu

SEQ ID NO: 2386300 - RNA, 14 nt, Human
ccuaccacaugcca

SEQ ID NO: 2386301 - RNA, 13 nt, Human
ccuaccaccccuu

SEQ ID NO: 2386302 - RNA, 14 nt, Human
ccuaccacaguguc

SEQ ID NO: 2386303 - RNA, 13 nt, Human
ccuaccacagugu

SEQ ID NO: 2386304 - RNA, 16 nt, Human
ccuaccaaugcaugca

SEQ ID NO: 2386305 - RNA, 22 nt, Human
ccuaccaaugcaugcagccacu

SEQ ID NO: 2386306 - RNA, 18 nt, Human
ccuaccaccuccccagcc

SEQ ID NO: 2386307 - RNA, 13 nt, Human
ccuaccacugucu

SEQ ID NO: 2386308 - RNA, 16 nt, Human
ccuaccagcgcccgcu

SEQ ID NO: 2386309 - RNA, 17 nt, Human
ccuaccagcgcccgcug

SEQ ID NO: 2386310 - RNA, 13 nt, Human
ccuaccaccuccc

SEQ ID NO: 2386311 - RNA, 17 nt, Human
ccuaccaccccuuccug

SEQ ID NO: 2386312 - RNA, 18 nt, Human
ccuaccaccccuuccugu

SEQ ID NO: 2386313 - RNA, 20 nt, Human
ccuacacccuuggacuugag

SEQ ID NO: 2386314 - RNA, 13 nt, Human
ccuacaccauucc

SEQ ID NO: 2386315 - RNA, 17 nt, Human
ccuacacccuuggacuu

SEQ ID NO: 2386316 - RNA, 19 nt, Human
ccuaccaauagauucccca

SEQ ID NO: 2386317 - RNA, 23 nt, Human
ccuaccaauagauuccccauugc

SEQ ID NO: 2386318 - RNA, 12 nt, Human
ccuaccaaugca

SEQ ID NO: 2386319 - RNA, 13 nt, Human
ccuaccaaugcau

SEQ ID NO: 2386320 - RNA, 15 nt, Human
ccuaccaaugcaugc

SEQ ID NO: 2386321 - RNA, 13 nt, Human
ccuacuuccugug

SEQ ID NO: 2386322 - RNA, 21 nt, Human
ccuacuuccccuuccuaauuc

SEQ ID NO: 2386323 - RNA, 21 nt, Human
ccuaccucagccuagacccuc

SEQ ID NO: 2386324 - RNA, 18 nt, Human
ccuaccucagccuagacc

SEQ ID NO: 2386325 - RNA, 15 nt, Human
ccuaccucaggcagg

SEQ ID NO: 2386326 - RNA, 12 nt, Human
ccuaccucaggu

SEQ ID NO: 2386327 - RNA, 15 nt, Human
ccuacuuccugugac

SEQ ID NO: 2386328 - RNA, 13 nt, Human
ccuaccucagguu

SEQ ID NO: 2386329 - RNA, 12 nt, Human
ccuacuucucca

SEQ ID NO: 2386330 - RNA, 14 nt, Human
ccuacuucuccagc

SEQ ID NO: 2386331 - RNA, 19 nt, Human
ccuacuucuccagccuaga

SEQ ID NO: 2386332 - RNA, 15 nt, Human
ccuacuuugacuuuu

SEQ ID NO: 2386333 - RNA, 14 nt, Human
ccuacuuugacuuu

SEQ ID NO: 2386334 - RNA, 22 nt, Human
ccuacuucuuuugcucuuagcu

SEQ ID NO: 2386335 - RNA, 16 nt, Human
ccuacuucuuuugcuc

SEQ ID NO: 2386336 - RNA, 17 nt, Human
ccuaggggacacuuccc

SEQ ID NO: 2386337 - RNA, 18 nt, Human
ccuaggggacacuucccu

SEQ ID NO: 2386338 - RNA, 16 nt, Human
ccuagggccuggucca

SEQ ID NO: 2386339 - RNA, 14 nt, Human
ccuagggccugguc

SEQ ID NO: 2386340 - RNA, 14 nt, Human
ccuagggaaaaguu

SEQ ID NO: 2386341 - RNA, 23 nt, Human
ccuagggaagggugguggagcca

SEQ ID NO: 2386342 - RNA, 22 nt, Human
ccuagggaagggugguggagcc

SEQ ID NO: 2386343 - RNA, 20 nt, Human
ccuagggauguucuggcccu

SEQ ID NO: 2386344 - RNA, 17 nt, Human
ccuagggccacugaaga

SEQ ID NO: 2386345 - RNA, 17 nt, Human
ccuaggcugaccuugaa

SEQ ID NO: 2386346 - RNA, 18 nt, Human
ccuaggcuccaccccauc

SEQ ID NO: 2386347 - RNA, 17 nt, Human
ccuaggcuccaccccau

SEQ ID NO: 2386348 - RNA, 23 nt, Human
ccuacuucuuugcuuugcccagc

SEQ ID NO: 2386349 - RNA, 21 nt, Human
ccuacuuugacuuuuugcauu

SEQ ID NO: 2386350 - RNA, 15 nt, Human
ccuaggcuccacccc

SEQ ID NO: 2386351 - RNA, 14 nt, Human
ccuauagucccagc

SEQ ID NO: 2386352 - RNA, 21 nt, Human
ccgcaaaccacacuggacucc

SEQ ID NO: 2386353 - RNA, 21 nt, Human
ccgcaaacccccuuugugcug

SEQ ID NO: 2386354 - RNA, 15 nt, Human
ccgcaaaccacacug

SEQ ID NO: 2386355 - RNA, 16 nt, Human
ccgcaaaccacacugg

SEQ ID NO: 2386356 - RNA, 14 nt, Human
ccgauuucccaggc

SEQ ID NO: 2386357 - RNA, 13 nt, Human
ccgauucacccug

SEQ ID NO: 2386358 - RNA, 22 nt, Human
ccgaugcugcuuuccccugugg

SEQ ID NO: 2386359 - RNA, 21 nt, Human
ccgauucaucucucagaaggg

SEQ ID NO: 2386360 - RNA, 16 nt, Human
ccgauucaccugagca

SEQ ID NO: 2386361 - RNA, 13 nt, Human
ccgaguccaagcu

SEQ ID NO: 2386362 - RNA, 20 nt, Human
ccgaugcugcuuuccccugu

SEQ ID NO: 2386363 - RNA, 21 nt, Human
ccgaugcugcuuuccccugug

SEQ ID NO: 2386364 - RNA, 23 nt, Human
ccgaugcugcuuuccccuguggg

SEQ ID NO: 2386365 - RNA, 20 nt, Human
ccgaguagcugggacuacag

SEQ ID NO: 2386366 - RNA, 12 nt, Human
ccgaguccaagc

SEQ ID NO: 2386367 - RNA, 20 nt, Human
ccgagucauucguucugugg

SEQ ID NO: 2386368 - RNA, 19 nt, Human
ccgagucauucguucugug

SEQ ID NO: 2386369 - RNA, 22 nt, Human
ccgaggccuaccccgcagacac

SEQ ID NO: 2386370 - RNA, 17 nt, Human
ccgaguagcugggacua

SEQ ID NO: 2386371 - RNA, 20 nt, Human
cccugguuucacuggcccaa

SEQ ID NO: 2386372 - RNA, 15 nt, Human
cccugguuucacugg

SEQ ID NO: 2386373 - RNA, 17 nt, Human
cccugguucucaucuuu

SEQ ID NO: 2386374 - RNA, 23 nt, Human
cccugguucugaugaugugccug

SEQ ID NO: 2386375 - RNA, 17 nt, Human
cccugguuuccugcccu

SEQ ID NO: 2386376 - RNA, 16 nt, Human
cccugguuuccugccc

SEQ ID NO: 2386377 - RNA, 20 nt, Human
cccugguggcagcucaccuc

SEQ ID NO: 2386378 - RNA, 15 nt, Human
cccugguucucaucu

SEQ ID NO: 2386379 - RNA, 16 nt, Human
cccugguucucaucuu

SEQ ID NO: 2386380 - RNA, 15 nt, Human
cccuggucucugguc

SEQ ID NO: 2386381 - RNA, 13 nt, Human
cccuggucucugg

SEQ ID NO: 2386382 - RNA, 14 nt, Human
cccuggucucuggu

SEQ ID NO: 2386383 - RNA, 20 nt, Human
ccgaggcagggucaggagag

SEQ ID NO: 2386384 - RNA, 11 nt, Human
ccgaggccagu

SEQ ID NO: 2386385 - RNA, 14 nt, Human
ccgaggcaggguca

SEQ ID NO: 2386386 - RNA, 14 nt, Human
ccgaggccuucucu

SEQ ID NO: 2386387 - RNA, 19 nt, Human
cccugguuuccugcccugg

SEQ ID NO: 2386388 - RNA, 18 nt, Human
cccugguuuccugcccug

SEQ ID NO: 2386389 - RNA, 22 nt, Human
cccugguucugaugaugugccu

SEQ ID NO: 2386390 - RNA, 20 nt, Human
ccgcggggacauugggaagg

SEQ ID NO: 2386391 - RNA, 17 nt, Human
ccgcgucgcccucccag

SEQ ID NO: 2386392 - RNA, 19 nt, Human
ccgcgucgcccucccaggc

SEQ ID NO: 2386393 - RNA, 22 nt, Human
ccgcgugaucaaagccacacuc

SEQ ID NO: 2386394 - RNA, 17 nt, Human
ccgcgucuggugacaac

SEQ ID NO: 2386395 - RNA, 21 nt, Human
ccgcuaagagggagggagggc

SEQ ID NO: 2386396 - RNA, 17 nt, Human
ccgcguuguaaaauaua

SEQ ID NO: 2386397 - RNA, 13 nt, Human
ccgcguuguaaaa

SEQ ID NO: 2386398 - RNA, 11 nt, Human
ccgcucagccc

SEQ ID NO: 2386399 - RNA, 17 nt, Human
ccgcuagaggccugagg

SEQ ID NO: 2386400 - RNA, 18 nt, Human
ccgcuagaggccugagga

SEQ ID NO: 2386401 - RNA, 19 nt, Human
ccgcuagaggccugaggau

SEQ ID NO: 2386402 - RNA, 12 nt, Human
ccgcucagcccu

SEQ ID NO: 2386403 - RNA, 13 nt, Human
ccgcucagcccuc

SEQ ID NO: 2386404 - RNA, 23 nt, Human
ccgcuaagagggagggagggcuc

SEQ ID NO: 2386405 - RNA, 15 nt, Human
ccgcuagaggccuga

SEQ ID NO: 2386406 - RNA, 16 nt, Human
ccgcuagaggccugag

SEQ ID NO: 2386407 - RNA, 22 nt, Human
ccgccugguacucaagcccgcg

SEQ ID NO: 2386408 - RNA, 14 nt, Human
ccgcacuaggggau

SEQ ID NO: 2386409 - RNA, 14 nt, Human
ccgcacucacccau

SEQ ID NO: 2386410 - RNA, 17 nt, Human
ccgccuguucccccgcc

SEQ ID NO: 2386411 - RNA, 20 nt, Human
ccgccuguucccccgccgcu

SEQ ID NO: 2386412 - RNA, 23 nt, Human
ccgccuucacuccggugugccug

SEQ ID NO: 2386413 - RNA, 22 nt, Human
ccgcgccaaauaaugucucugu

SEQ ID NO: 2386414 - RNA, 16 nt, Human
ccgcgccuccuuccuu

SEQ ID NO: 2386415 - RNA, 16 nt, Human
ccgcgcccgcgcccuc

SEQ ID NO: 2386416 - RNA, 18 nt, Human
ccgcgcgcgucccccugc

SEQ ID NO: 2386417 - RNA, 21 nt, Human
ccgcaaugugcccccagacgc

SEQ ID NO: 2386418 - RNA, 15 nt, Human
ccgcaauacaggaac

SEQ ID NO: 2386419 - RNA, 15 nt, Human
ccgcacccccacccu

SEQ ID NO: 2386420 - RNA, 17 nt, Human
ccgcaccccagagugug

SEQ ID NO: 2386421 - RNA, 13 nt, Human
ccgcaccccagag

SEQ ID NO: 2386422 - RNA, 11 nt, Human
ccgcaccccag

SEQ ID NO: 2386423 - RNA, 13 nt, Human
ccgcaccccccaa

SEQ ID NO: 2386424 - RNA, 16 nt, Human
ccgcacccccacccuu

SEQ ID NO: 2386425 - RNA, 19 nt, Human
ccgcacugggcuuggggac

SEQ ID NO: 2386426 - RNA, 14 nt, Human
ccgcacugggcuug

SEQ ID NO: 2386427 - RNA, 19 nt, Human
ccgcuuguccagcgccuag

SEQ ID NO: 2386428 - RNA, 18 nt, Human
ccgcuuguccagcgccua

SEQ ID NO: 2386429 - RNA, 23 nt, Human
ccggcugguuuuguaagaugcug

SEQ ID NO: 2386430 - RNA, 20 nt, Human
ccgggaagggggcugggaca

SEQ ID NO: 2386431 - RNA, 17 nt, Human
ccgggaccccgagccug

SEQ ID NO: 2386432 - RNA, 19 nt, Human
ccgcuuucuacccagcgag

SEQ ID NO: 2386433 - RNA, 15 nt, Human
ccggcuggccuggcc

SEQ ID NO: 2386434 - RNA, 17 nt, Human
ccggcuggccuggcccc

SEQ ID NO: 2386435 - RNA, 18 nt, Human
ccggcuggccuggccccu

SEQ ID NO: 2386436 - RNA, 17 nt, Human
ccgcuuguccagcgccu

SEQ ID NO: 2386437 - RNA, 16 nt, Human
ccgcuuguccagcgcc

SEQ ID NO: 2386438 - RNA, 22 nt, Human
ccgcugcccggcgcccucuguc

SEQ ID NO: 2386439 - RNA, 19 nt, Human
ccgcugcccggcgcccucu

SEQ ID NO: 2386440 - RNA, 20 nt, Human
ccgcugcccggcgcccucug

SEQ ID NO: 2386441 - RNA, 12 nt, Human
ccgcuuucuacc

SEQ ID NO: 2386442 - RNA, 14 nt, Human
ccgcugccacccac

SEQ ID NO: 2386443 - RNA, 12 nt, Human
ccgcugccaccc

SEQ ID NO: 2386444 - RNA, 11 nt, Human
ccgcugccacc

SEQ ID NO: 2386445 - RNA, 22 nt, Human
ccgcugauucucagggucucug

SEQ ID NO: 2386446 - RNA, 17 nt, Human
ccgcugaguggacugga

SEQ ID NO: 2386447 - RNA, 19 nt, Human
ccgcugaguggacuggagu

SEQ ID NO: 2386448 - RNA, 13 nt, Human
ccgcugauucuca

SEQ ID NO: 2386449 - RNA, 15 nt, Human
ccgcugauucucagg

SEQ ID NO: 2386450 - RNA, 20 nt, Human
ccgcugccacccaccucccu

SEQ ID NO: 2386451 - RNA, 17 nt, Human
ccgcugccacccaccuc

SEQ ID NO: 2386452 - RNA, 16 nt, Human
ccgcugccacccaccu

SEQ ID NO: 2386453 - RNA, 15 nt, Human
ccgcugccacccacc

SEQ ID NO: 2386454 - RNA, 24 nt, Human
ccgcugccacccaccucccugccu

SEQ ID NO: 2386455 - RNA, 23 nt, Human
ccgcugccacccaccucccugcc

SEQ ID NO: 2386456 - RNA, 20 nt, Human
ccgcugccacguuggagaag

SEQ ID NO: 2386457 - RNA, 15 nt, Human
ccgcucagcccuccc

SEQ ID NO: 2386458 - RNA, 19 nt, Human
ccgcucagcccucccugcc

SEQ ID NO: 2386459 - RNA, 21 nt, Human
ccgcucagcccucccugcccc

SEQ ID NO: 2386460 - RNA, 22 nt, Human
ccgcucagcccucccugccccu

SEQ ID NO: 2386461 - RNA, 23 nt, Human
ccgcugagcgaggagaugcuccu

SEQ ID NO: 2386462 - RNA, 14 nt, Human
ccgcucuggaccaa

SEQ ID NO: 2386463 - RNA, 13 nt, Human
ccgcugaguggac

SEQ ID NO: 2386464 - RNA, 20 nt, Human
ccgcucugcaugcggcccag

SEQ ID NO: 2386465 - RNA, 21 nt, Human
ccgcucugcaugcggcccagc

SEQ ID NO: 2386466 - RNA, 22 nt, Human
ccgcucugcaugcggcccagcc

SEQ ID NO: 2386467 - RNA, 20 nt, Human
ccggguuuggcgggccaagg

SEQ ID NO: 2386468 - RNA, 19 nt, Human
ccggguuuggcgggccaag

SEQ ID NO: 2386469 - RNA, 17 nt, Human
ccggguucuagucuccu

SEQ ID NO: 2386470 - RNA, 20 nt, Human
ccggguucuagucuccuuug

SEQ ID NO: 2386471 - RNA, 22 nt, Human
ccggguuuggcgggccaaggac

SEQ ID NO: 2386472 - RNA, 21 nt, Human
ccggguuuggcgggccaagga

SEQ ID NO: 2386473 - RNA, 22 nt, Human
ccgguaaacacgccugcaaacg

SEQ ID NO: 2386474 - RNA, 15 nt, Human
ccggguuccagcacc

SEQ ID NO: 2386475 - RNA, 12 nt, Human
ccggguuccagc

SEQ ID NO: 2386476 - RNA, 14 nt, Human
ccgggucugccucu

SEQ ID NO: 2386477 - RNA, 14 nt, Human
ccgggugggcggca

SEQ ID NO: 2386478 - RNA, 20 nt, Human
ccgggugggcggcacagccu

SEQ ID NO: 2386479 - RNA, 15 nt, Human
ccggggaaaggcaag

SEQ ID NO: 2386480 - RNA, 17 nt, Human
ccgggcugccugggcug

SEQ ID NO: 2386481 - RNA, 18 nt, Human
ccgggcugccugggcugu

SEQ ID NO: 2386482 - RNA, 21 nt, Human
ccgggcugccugggcuguugg

SEQ ID NO: 2386483 - RNA, 20 nt, Human
ccgugcugacagcugcuccu

SEQ ID NO: 2386484 - RNA, 14 nt, Human
ccgugcuuccucag

SEQ ID NO: 2386485 - RNA, 21 nt, Human
ccgugcugacagcugcuccua

SEQ ID NO: 2386486 - RNA, 19 nt, Human
ccgugcugacagcugcucc

SEQ ID NO: 2386487 - RNA, 18 nt, Human
ccgugcugacagcugcuc

SEQ ID NO: 2386488 - RNA, 17 nt, Human
ccgugcugacagcugcu

SEQ ID NO: 2386489 - RNA, 16 nt, Human
ccgugcugacagcugc

SEQ ID NO: 2386490 - RNA, 14 nt, Human
ccgugcugacagcu

SEQ ID NO: 2386491 - RNA, 17 nt, Human
ccgugcucgccccagca

SEQ ID NO: 2386492 - RNA, 16 nt, Human
ccgugcucgccccagc

SEQ ID NO: 2386493 - RNA, 16 nt, Human
ccgggcucucugcugu

SEQ ID NO: 2386494 - RNA, 14 nt, Human
ccgggcucucugcu

SEQ ID NO: 2386495 - RNA, 22 nt, Human
ccgggcucugccucccaucacc

SEQ ID NO: 2386496 - RNA, 13 nt, Human
ccgggcugggagc

SEQ ID NO: 2386497 - RNA, 12 nt, Human
ccgggcugccug

SEQ ID NO: 2386498 - RNA, 15 nt, Human
ccgggcugccugggc

SEQ ID NO: 2386499 - RNA, 16 nt, Human
ccgggcugccugggcu

SEQ ID NO: 2386500 - RNA, 18 nt, Human
ccgggcugggagcucugc

SEQ ID NO: 2386501 - RNA, 19 nt, Human
ccgggcugggagcucugca

SEQ ID NO: 2386502 - RNA, 13 nt, Human
ccgggcucucugc

SEQ ID NO: 2386503 - RNA, 21 nt, Human
ccgggcucagggaccacagca

SEQ ID NO: 2386504 - RNA, 22 nt, Human
ccgggcucagggaccacagcaa

SEQ ID NO: 2386505 - RNA, 20 nt, Human
ccgggcucagggaccacagc

SEQ ID NO: 2386506 - RNA, 16 nt, Human
ccgggcguggugguga

SEQ ID NO: 2386507 - RNA, 20 nt, Human
ccgggcgcgguggcucacgc

SEQ ID NO: 2386508 - RNA, 18 nt, Human
ccgggaccccgagccugg

SEQ ID NO: 2386509 - RNA, 17 nt, Human
ccgggaccuggugcugc

SEQ ID NO: 2386510 - RNA, 12 nt, Human
ccgcucccagug

SEQ ID NO: 2386511 - RNA, 12 nt, Human
ccucccugccuc

SEQ ID NO: 2386512 - RNA, 13 nt, Human
ccucccugccccu

SEQ ID NO: 2386513 - RNA, 12 nt, Human
ccucccugcugu

SEQ ID NO: 2386514 - RNA, 15 nt, Human
ccucccugccuccag

SEQ ID NO: 2386515 - RNA, 14 nt, Human
ccucccugccucca

SEQ ID NO: 2386516 - RNA, 22 nt, Human
ccucccugccccucccuucaac

SEQ ID NO: 2386517 - RNA, 24 nt, Human
ccucccugccccucccuucaacca

SEQ ID NO: 2386518 - RNA, 14 nt, Human
ccuccucagaucuu

SEQ ID NO: 2386519 - RNA, 20 nt, Human
ccucccucagccccucuugc

SEQ ID NO: 2386520 - RNA, 10 nt, Human
ccucccuccc

SEQ ID NO: 2386521 - RNA, 16 nt, Human
ccucccucagccccuc

SEQ ID NO: 2386522 - RNA, 15 nt, Human
ccucccucagccccu

SEQ ID NO: 2386523 - RNA, 14 nt, Human
ccucccucagcccc

SEQ ID NO: 2386524 - RNA, 18 nt, Human
ccucccugccccucccuu

SEQ ID NO: 2386525 - RNA, 21 nt, Human
ccucccugccccucccuucaa

SEQ ID NO: 2386526 - RNA, 19 nt, Human
ccucccgaguagcugggac

SEQ ID NO: 2386527 - RNA, 16 nt, Human
ccuccccuugggcggc

SEQ ID NO: 2386528 - RNA, 23 nt, Human
ccuccccuugggcggcugagagc

SEQ ID NO: 2386529 - RNA, 11 nt, Human
ccucccgcccc

SEQ ID NO: 2386530 - RNA, 12 nt, Human
ccucccucagcc

SEQ ID NO: 2386531 - RNA, 11 nt, Human
ccucccucagc

SEQ ID NO: 2386532 - RNA, 16 nt, Human
ccucccgccccuuccc

SEQ ID NO: 2386533 - RNA, 18 nt, Human
ccucccgccccuucccac

SEQ ID NO: 2386534 - RNA, 15 nt, Human
ccucccggcauggga

SEQ ID NO: 2386535 - RNA, 19 nt, Human
ccucccggcaugggaaagc

SEQ ID NO: 2386536 - RNA, 20 nt, Human
ccucccgaguagcugggacu

SEQ ID NO: 2386537 - RNA, 21 nt, Human
ccucccgaguagcugggacua

SEQ ID NO: 2386538 - RNA, 15 nt, Human
ccuccccccacugca

SEQ ID NO: 2386539 - RNA, 20 nt, Human
ccuccccugcugcaggggcu

SEQ ID NO: 2386540 - RNA, 16 nt, Human
ccuccccccacugcag

SEQ ID NO: 2386541 - RNA, 16 nt, Human
ccuccccugcugcagg

SEQ ID NO: 2386542 - RNA, 13 nt, Human
ccuccccugggga

SEQ ID NO: 2386543 - RNA, 15 nt, Human
ccucccccagagggg

SEQ ID NO: 2386544 - RNA, 23 nt, Human
ccuccccauuucccaucugcacc

SEQ ID NO: 2386545 - RNA, 15 nt, Human
ccucccccacugcca

SEQ ID NO: 2386546 - RNA, 14 nt, Human
ccuccccccacugc

SEQ ID NO: 2386547 - RNA, 13 nt, Human
ccuccccccacug

SEQ ID NO: 2386548 - RNA, 17 nt, Human
ccuccccuucccugcaa

SEQ ID NO: 2386549 - RNA, 23 nt, Human
ccuccccuggggacagcaagggc

SEQ ID NO: 2386550 - RNA, 14 nt, Human
ccuccccuggggac

SEQ ID NO: 2386551 - RNA, 20 nt, Human
ccuccccuggggacagcaag

SEQ ID NO: 2386552 - RNA, 12 nt, Human
ccuccccuuggg

SEQ ID NO: 2386553 - RNA, 13 nt, Human
ccuccccuugggc

SEQ ID NO: 2386554 - RNA, 14 nt, Human
ccuccccuugggcg

SEQ ID NO: 2386555 - RNA, 15 nt, Human
ccuccugcuacucug

SEQ ID NO: 2386556 - RNA, 11 nt, Human
ccuccugcuca

SEQ ID NO: 2386557 - RNA, 18 nt, Human
ccuccugcgcgcaugugc

SEQ ID NO: 2386558 - RNA, 20 nt, Human
ccuccugcgcgcaugugcgc

SEQ ID NO: 2386559 - RNA, 23 nt, Human
ccuccugcgcgcaugugcgcaca

SEQ ID NO: 2386560 - RNA, 15 nt, Human
ccuccugaccuguca

SEQ ID NO: 2386561 - RNA, 18 nt, Human
ccuccugaccugaggcuc

SEQ ID NO: 2386562 - RNA, 12 nt, Human
ccuccugagaaa

SEQ ID NO: 2386563 - RNA, 23 nt, Human
ccuccugccucgaacuggcugca

SEQ ID NO: 2386564 - RNA, 16 nt, Human
ccuccugaccugaggc

SEQ ID NO: 2386565 - RNA, 14 nt, Human
ccuccugggcuaag

SEQ ID NO: 2386566 - RNA, 20 nt, Human
ccuccugcugcagaggggca

SEQ ID NO: 2386567 - RNA, 21 nt, Human
ccuccugcugcagaggggcag

SEQ ID NO: 2386568 - RNA, 11 nt, Human
ccuccugcugc

SEQ ID NO: 2386569 - RNA, 12 nt, Human
ccuccugcugca

SEQ ID NO: 2386570 - RNA, 17 nt, Human
ccuccugcugcagaggg

SEQ ID NO: 2386571 - RNA, 18 nt, Human
ccuccugcugcagagggg

SEQ ID NO: 2386572 - RNA, 19 nt, Human
ccuccugguggguccaggg

SEQ ID NO: 2386573 - RNA, 20 nt, Human
ccuccugguggguccagggg

SEQ ID NO: 2386574 - RNA, 21 nt, Human
ccuccugguggguccaggggc

SEQ ID NO: 2386575 - RNA, 22 nt, Human
ccuccuguaaaugguguacaua

SEQ ID NO: 2386576 - RNA, 15 nt, Human
ccuccugucucuggc

SEQ ID NO: 2386577 - RNA, 16 nt, Human
ccuccugucuucccag

SEQ ID NO: 2386578 - RNA, 17 nt, Human
ccuccugucuucccagg

SEQ ID NO: 2386579 - RNA, 15 nt, Human
ccuccuccacaccag

SEQ ID NO: 2386580 - RNA, 19 nt, Human
ccuccuccaaaggcccccu

SEQ ID NO: 2386581 - RNA, 20 nt, Human
ccuccucuggacggcaggcu

SEQ ID NO: 2386582 - RNA, 12 nt, Human
ccuccucaggga

SEQ ID NO: 2386583 - RNA, 13 nt, Human
ccuccucaucccg

SEQ ID NO: 2386584 - RNA, 20 nt, Human
ccuccucaucccguguucuc

SEQ ID NO: 2386585 - RNA, 23 nt, Human
ccuccucaucccguguucuccuu

SEQ ID NO: 2386586 - RNA, 12 nt, Human
ccuccucaugua

SEQ ID NO: 2386587 - RNA, 13 nt, Human
ccuccucagggau

SEQ ID NO: 2386588 - RNA, 23 nt, Human
ccuccucaucugggggaguggaa

SEQ ID NO: 2386589 - RNA, 20 nt, Human
ccuccucauguacauacccu

SEQ ID NO: 2386590 - RNA, 21 nt, Human
ccuccucauguacauacccug

SEQ ID NO: 2386591 - RNA, 16 nt, Human
ccuccucuguccaggg

SEQ ID NO: 2386592 - RNA, 15 nt, Human
ccuccucuguccagg

SEQ ID NO: 2386593 - RNA, 12 nt, Human
ccuccucugucc

SEQ ID NO: 2386594 - RNA, 21 nt, Human
ccuccucuggacggcaggcuc

SEQ ID NO: 2386595 - RNA, 22 nt, Human
ccuccucuggacggcaggcuca

SEQ ID NO: 2386596 - RNA, 14 nt, Human
ccuccucugucccu

SEQ ID NO: 2386597 - RNA, 13 nt, Human
ccuccucugucug

SEQ ID NO: 2386598 - RNA, 18 nt, Human
ccuccucuguccagggcc

SEQ ID NO: 2386599 - RNA, 11 nt, Human
ccuccucugug

SEQ ID NO: 2386600 - RNA, 17 nt, Human
ccuccucugucugcccu

SEQ ID NO: 2386601 - RNA, 14 nt, Human
ccuccucugucugc

SEQ ID NO: 2386602 - RNA, 16 nt, Human
ccuccucugucugccc

SEQ ID NO: 2386603 - RNA, 21 nt, Human
ccuccugaaacuuacacacaa

SEQ ID NO: 2386604 - RNA, 17 nt, Human
ccuccucuucugacgug

SEQ ID NO: 2386605 - RNA, 20 nt, Human
ccuccugaaacuuacacaca

SEQ ID NO: 2386606 - RNA, 13 nt, Human
ccuccucugugaa

SEQ ID NO: 2386607 - RNA, 14 nt, Human
ccuccucuucugac

SEQ ID NO: 2386608 - RNA, 12 nt, Human
ccuccucuguga

SEQ ID NO: 2386609 - RNA, 22 nt, Human
ccuccucugugaccaaugucuu

SEQ ID NO: 2386610 - RNA, 19 nt, Human
ccucgugguccccaacagc

SEQ ID NO: 2386611 - RNA, 15 nt, Human
ccucgugguccccaa

SEQ ID NO: 2386612 - RNA, 18 nt, Human
ccucgugguccccaacag

SEQ ID NO: 2386613 - RNA, 23 nt, Human
ccucguggccuuccccagccucu

SEQ ID NO: 2386614 - RNA, 22 nt, Human
ccucguggccuuccccagccuc

SEQ ID NO: 2386615 - RNA, 19 nt, Human
ccucguggccuuccccagc

SEQ ID NO: 2386616 - RNA, 18 nt, Human
ccucguggccuuccccag

SEQ ID NO: 2386617 - RNA, 18 nt, Human
ccucgguguggagaagcg

SEQ ID NO: 2386618 - RNA, 14 nt, Human
ccucgggucuccuc

SEQ ID NO: 2386619 - RNA, 15 nt, Human
ccucgggucuccuca

SEQ ID NO: 2386620 - RNA, 17 nt, Human
ccucgggucuccucacu

SEQ ID NO: 2386621 - RNA, 18 nt, Human
ccucgggucuccucacuc

SEQ ID NO: 2386622 - RNA, 15 nt, Human
ccucgguacucccau

SEQ ID NO: 2386623 - RNA, 18 nt, Human
ccucguggccagcccggc

SEQ ID NO: 2386624 - RNA, 22 nt, Human
ccucguggccagcccggcuggu

SEQ ID NO: 2386625 - RNA, 13 nt, Human
ccucuaaccccag

SEQ ID NO: 2386626 - RNA, 23 nt, Human
ccucuaaagcaauaaugguccca

SEQ ID NO: 2386627 - RNA, 15 nt, Human
ccucuaaccccaggc

SEQ ID NO: 2386628 - RNA, 16 nt, Human
ccucuaaccccaggcc

SEQ ID NO: 2386629 - RNA, 17 nt, Human
ccucuaaccccaggccc

SEQ ID NO: 2386630 - RNA, 18 nt, Human
ccucuaaccccaggcccc

SEQ ID NO: 2386631 - RNA, 19 nt, Human
ccucuaaccccaggccccg

SEQ ID NO: 2386632 - RNA, 21 nt, Human
ccucuaaccccaggccccgag

SEQ ID NO: 2386633 - RNA, 14 nt, Human
ccucuagaggcaag

SEQ ID NO: 2386634 - RNA, 19 nt, Human
ccucuagaaauuuuucaga

SEQ ID NO: 2386635 - RNA, 15 nt, Human
ccucuagaagccaag

SEQ ID NO: 2386636 - RNA, 16 nt, Human
ccucuagaagccaagg

SEQ ID NO: 2386637 - RNA, 18 nt, Human
ccucuagaagccaaggga

SEQ ID NO: 2386638 - RNA, 14 nt, Human
ccuccuucccaaag

SEQ ID NO: 2386639 - RNA, 22 nt, Human
ccuccuucagacacccucaacc

SEQ ID NO: 2386640 - RNA, 15 nt, Human
ccuccuucagacacc

SEQ ID NO: 2386641 - RNA, 16 nt, Human
ccuccuuccaccuccc

SEQ ID NO: 2386642 - RNA, 17 nt, Human
ccuccuuccaccucccu

SEQ ID NO: 2386643 - RNA, 18 nt, Human
ccuccuuccaccucccuc

SEQ ID NO: 2386644 - RNA, 19 nt, Human
ccuccuuccaccucccucc

SEQ ID NO: 2386645 - RNA, 14 nt, Human
ccuccuucagacac

SEQ ID NO: 2386646 - RNA, 13 nt, Human
ccuccuucagaca

SEQ ID NO: 2386647 - RNA, 18 nt, Human
ccuccugucuucccaggg

SEQ ID NO: 2386648 - RNA, 19 nt, Human
ccuccugucuucccagggu

SEQ ID NO: 2386649 - RNA, 22 nt, Human
ccucgggcgagucacugccucu

SEQ ID NO: 2386650 - RNA, 14 nt, Human
ccuccuucucuguc

SEQ ID NO: 2386651 - RNA, 19 nt, Human
ccucgggcgagucacugcc

SEQ ID NO: 2386652 - RNA, 17 nt, Human
ccuccuucucccuuuuu

SEQ ID NO: 2386653 - RNA, 16 nt, Human
ccuccuucucccuuuu

SEQ ID NO: 2386654 - RNA, 15 nt, Human
ccuccuucucccuuu

SEQ ID NO: 2386655 - RNA, 20 nt, Human
ccuccuuccuugcuguccua

SEQ ID NO: 2386656 - RNA, 20 nt, Human
ccuccuuccuugaccagcag

SEQ ID NO: 2386657 - RNA, 18 nt, Human
ccuccuuccuugaccagc

SEQ ID NO: 2386658 - RNA, 15 nt, Human
ccuccuuccuugacc

SEQ ID NO: 2386659 - RNA, 14 nt, Human
ccuccuuccuugac

SEQ ID NO: 2386660 - RNA, 14 nt, Human
ccucgguguggaga

SEQ ID NO: 2386661 - RNA, 16 nt, Human
ccucggugccuuccuc

SEQ ID NO: 2386662 - RNA, 16 nt, Human
ccucuauuuagcauga

SEQ ID NO: 2386663 - RNA, 21 nt, Human
ccucuauuuauguuugcacuu

SEQ ID NO: 2386664 - RNA, 17 nt, Human
ccucuauuuauguuugc

SEQ ID NO: 2386665 - RNA, 20 nt, Human
ccucuauugauguacagucu

SEQ ID NO: 2386666 - RNA, 23 nt, Human
ccucuauugauguacagucuguc

SEQ ID NO: 2386667 - RNA, 13 nt, Human
ccucuaucccaau

SEQ ID NO: 2386668 - RNA, 19 nt, Human
ccucuaugaacuauggacg

SEQ ID NO: 2386669 - RNA, 14 nt, Human
ccucuauugaugua

SEQ ID NO: 2386670 - RNA, 18 nt, Human
ccucucauuccagaggaa

SEQ ID NO: 2386671 - RNA, 12 nt, Human
ccucuccaaggg

SEQ ID NO: 2386672 - RNA, 23 nt, Human
ccucucaucaguguccucuugcu

SEQ ID NO: 2386673 - RNA, 15 nt, Human
ccucuagugcccucc

SEQ ID NO: 2386674 - RNA, 14 nt, Human
ccucuagugcccuc

SEQ ID NO: 2386675 - RNA, 13 nt, Human
ccucuagugcccu

SEQ ID NO: 2386676 - RNA, 20 nt, Human
ccucuagggaccccuccucc

SEQ ID NO: 2386677 - RNA, 18 nt, Human
ccucuagggaccccuccu

SEQ ID NO: 2386678 - RNA, 19 nt, Human
ccucuagggaccccuccuc

SEQ ID NO: 2386679 - RNA, 12 nt, Human
ccucuagggacc

SEQ ID NO: 2386680 - RNA, 22 nt, Human
ccucuagcugugggggugaggg

SEQ ID NO: 2386681 - RNA, 16 nt, Human
ccucuaggaggucucu

SEQ ID NO: 2386682 - RNA, 17 nt, Human
ccucccgaauagcuggg

SEQ ID NO: 2386683 - RNA, 17 nt, Human
ccuccacguucaccccu

SEQ ID NO: 2386684 - RNA, 18 nt, Human
ccuccacguucaccccuc

SEQ ID NO: 2386685 - RNA, 14 nt, Human
ccuccaccucuuca

SEQ ID NO: 2386686 - RNA, 15 nt, Human
ccuccaccugccgug

SEQ ID NO: 2386687 - RNA, 17 nt, Human
ccuccaccccccagaac

SEQ ID NO: 2386688 - RNA, 13 nt, Human
ccuccacccucug

SEQ ID NO: 2386689 - RNA, 14 nt, Human
ccuccacccucuga

SEQ ID NO: 2386690 - RNA, 15 nt, Human
ccuccacccucugag

SEQ ID NO: 2386691 - RNA, 16 nt, Human
ccuccacccucugagc

SEQ ID NO: 2386692 - RNA, 20 nt, Human
ccuccacccucugagcuuug

SEQ ID NO: 2386693 - RNA, 22 nt, Human
ccuccacccucugagcuuugca

SEQ ID NO: 2386694 - RNA, 15 nt, Human
ccuccaccaccacug

SEQ ID NO: 2386695 - RNA, 17 nt, Human
ccuccaccaccacuggc

SEQ ID NO: 2386696 - RNA, 18 nt, Human
ccuccaccaccacuggcc

SEQ ID NO: 2386697 - RNA, 19 nt, Human
ccuccaccaccacuggcca

SEQ ID NO: 2386698 - RNA, 20 nt, Human
ccuccaccaccacuggccac

SEQ ID NO: 2386699 - RNA, 21 nt, Human
ccuccaccaccacuggccacc

SEQ ID NO: 2386700 - RNA, 23 nt, Human
ccuccaccaccacuggccaccag

SEQ ID NO: 2386701 - RNA, 15 nt, Human
ccuccaccgcugccu

SEQ ID NO: 2386702 - RNA, 14 nt, Human
ccuccaccgcugcc

SEQ ID NO: 2386703 - RNA, 13 nt, Human
ccuccaccgcugc

SEQ ID NO: 2386704 - RNA, 17 nt, Human
ccuccaccgccauggcu

SEQ ID NO: 2386705 - RNA, 19 nt, Human
ccuccaccgccauggcuuc

SEQ ID NO: 2386706 - RNA, 21 nt, Human
ccuccaccgccauggcuucca

SEQ ID NO: 2386707 - RNA, 11 nt, Human
ccuccacccug

SEQ ID NO: 2386708 - RNA, 14 nt, Human
ccuccacccugucc

SEQ ID NO: 2386709 - RNA, 15 nt, Human
ccuccacccuguccc

SEQ ID NO: 2386710 - RNA, 16 nt, Human
ccuccacccugucccc

SEQ ID NO: 2386711 - RNA, 19 nt, Human
ccuccacccugucccccag

SEQ ID NO: 2386712 - RNA, 20 nt, Human
ccuccacccugucccccagc

SEQ ID NO: 2386713 - RNA, 21 nt, Human
ccuccacccugucccccagcu

SEQ ID NO: 2386714 - RNA, 24 nt, Human
ccuccacccugucccccagcucug

SEQ ID NO: 2386715 - RNA, 22 nt, Human
ccuccagaagccucuggcuaga

SEQ ID NO: 2386716 - RNA, 21 nt, Human
ccuccagaagccucuggcuag

SEQ ID NO: 2386717 - RNA, 20 nt, Human
ccuccagaagccucuggcua

SEQ ID NO: 2386718 - RNA, 19 nt, Human
ccuccagaagccucuggcu

SEQ ID NO: 2386719 - RNA, 18 nt, Human
ccuccagaagccucuggc

SEQ ID NO: 2386720 - RNA, 11 nt, Human
ccuccacuccu

SEQ ID NO: 2386721 - RNA, 20 nt, Human
ccuccacucccacuucccug

SEQ ID NO: 2386722 - RNA, 13 nt, Human
ccuccacucccac

SEQ ID NO: 2386723 - RNA, 14 nt, Human
ccuccacucccacu

SEQ ID NO: 2386724 - RNA, 15 nt, Human
ccuccacucccacuu

SEQ ID NO: 2386725 - RNA, 18 nt, Human
ccuccacucccacuuccc

SEQ ID NO: 2386726 - RNA, 21 nt, Human
ccuccacguucugcucaucau

SEQ ID NO: 2386727 - RNA, 23 nt, Human
ccuccaccucuucaccccccacu

SEQ ID NO: 2386728 - RNA, 12 nt, Human
ccuccacuccca

SEQ ID NO: 2386729 - RNA, 18 nt, Human
ccuccacguucugcucau

SEQ ID NO: 2386730 - RNA, 17 nt, Human
ccuccacguucugcuca

SEQ ID NO: 2386731 - RNA, 20 nt, Human
ccuccagggccacgugccag

SEQ ID NO: 2386732 - RNA, 19 nt, Human
ccuccagggccacgugcca

SEQ ID NO: 2386733 - RNA, 18 nt, Human
ccuccagggccacgugcc

SEQ ID NO: 2386734 - RNA, 17 nt, Human
ccuccagggccacgugc

SEQ ID NO: 2386735 - RNA, 16 nt, Human
ccuccagggccacgug

SEQ ID NO: 2386736 - RNA, 14 nt, Human
ccuccagggccacg

SEQ ID NO: 2386737 - RNA, 12 nt, Human
ccuccagggcca

SEQ ID NO: 2386738 - RNA, 14 nt, Human
ccuccagccucugu

SEQ ID NO: 2386739 - RNA, 15 nt, Human
ccuccagccucuguu

SEQ ID NO: 2386740 - RNA, 11 nt, Human
ccuccagccuc

SEQ ID NO: 2386741 - RNA, 12 nt, Human
ccuccagccucu

SEQ ID NO: 2386742 - RNA, 13 nt, Human
ccuccagccucug

SEQ ID NO: 2386743 - RNA, 13 nt, Human
ccuccagcaggga

SEQ ID NO: 2386744 - RNA, 22 nt, Human
ccuccagggccacgugccaggc

SEQ ID NO: 2386745 - RNA, 21 nt, Human
ccuccagggccacgugccagg

SEQ ID NO: 2386746 - RNA, 12 nt, Human
ccuccagggcug

SEQ ID NO: 2386747 - RNA, 13 nt, Human
ccuccagggcugg

SEQ ID NO: 2386748 - RNA, 16 nt, Human
ccuccagggcuggacu

SEQ ID NO: 2386749 - RNA, 17 nt, Human
ccuccagggcuggacug

SEQ ID NO: 2386750 - RNA, 18 nt, Human
ccuccagggcuggacuga

SEQ ID NO: 2386751 - RNA, 20 nt, Human
ccuccagggcuggacugagg

SEQ ID NO: 2386752 - RNA, 21 nt, Human
ccuccagggcuggacugaggc

SEQ ID NO: 2386753 - RNA, 19 nt, Human
ccuccaggugcacaagcuc

SEQ ID NO: 2386754 - RNA, 21 nt, Human
ccuccaggugcacaagcucca

SEQ ID NO: 2386755 - RNA, 18 nt, Human
ccuccaucuaaacugccc

SEQ ID NO: 2386756 - RNA, 12 nt, Human
ccuccagguuuu

SEQ ID NO: 2386757 - RNA, 24 nt, Human
ccuccaucucauguaucaucugga

SEQ ID NO: 2386758 - RNA, 19 nt, Human
ccuccaucuccaagaaugc

SEQ ID NO: 2386759 - RNA, 21 nt, Human
ccuccaucuccaagaaugcug

SEQ ID NO: 2386760 - RNA, 14 nt, Human
ccuccauccugagg

SEQ ID NO: 2386761 - RNA, 22 nt, Human
ccuccaggugcacaagcuccaa

SEQ ID NO: 2386762 - RNA, 14 nt, Human
ccuccaggugugca

SEQ ID NO: 2386763 - RNA, 19 nt, Human
ccuccaggugugcacgugg

SEQ ID NO: 2386764 - RNA, 11 nt, Human
ccuccagguuu

SEQ ID NO: 2386765 - RNA, 22 nt, Human
ccuccagggcuggacugaggcc

SEQ ID NO: 2386766 - RNA, 23 nt, Human
ccuccaugugggcuaguugggcu

SEQ ID NO: 2386767 - RNA, 14 nt, Human
ccuccaugcugccu

SEQ ID NO: 2386768 - RNA, 19 nt, Human
ccuccaugacugcacagua

SEQ ID NO: 2386769 - RNA, 23 nt, Human
ccuccaucuccaagaaugcugaa

SEQ ID NO: 2386770 - RNA, 18 nt, Human
ccuccaucuucuuugcag

SEQ ID NO: 2386771 - RNA, 15 nt, Human
ccucccaaagugcug

SEQ ID NO: 2386772 - RNA, 16 nt, Human
ccuccagguuuuucaa

SEQ ID NO: 2386773 - RNA, 15 nt, Human
ccuccaugcugccuc

SEQ ID NO: 2386774 - RNA, 22 nt, Human
ccucccccaacccccaccccac

SEQ ID NO: 2386775 - RNA, 19 nt, Human
ccucccccaacccccaccc

SEQ ID NO: 2386776 - RNA, 18 nt, Human
ccucccccaacccccacc

SEQ ID NO: 2386777 - RNA, 13 nt, Human
ccucccccaaccc

SEQ ID NO: 2386778 - RNA, 21 nt, Human
ccuccccauuagagucagccu

SEQ ID NO: 2386779 - RNA, 14 nt, Human
ccuccccauuuccc

SEQ ID NO: 2386780 - RNA, 15 nt, Human
ccuccccauuuccca

SEQ ID NO: 2386781 - RNA, 20 nt, Human
ccuccccauuucccaucugc

SEQ ID NO: 2386782 - RNA, 21 nt, Human
ccuccccauuucccaucugca

SEQ ID NO: 2386783 - RNA, 22 nt, Human
ccuccccauuucccaucugcac

SEQ ID NO: 2386784 - RNA, 15 nt, Human
ccuccauucugacca

SEQ ID NO: 2386785 - RNA, 22 nt, Human
ccuccccaggggagagggucug

SEQ ID NO: 2386786 - RNA, 20 nt, Human
ccuccccauuagagucagcc

SEQ ID NO: 2386787 - RNA, 16 nt, Human
ccuccccauggagcca

SEQ ID NO: 2386788 - RNA, 16 nt, Human
ccucccaaagugcugg

SEQ ID NO: 2386789 - RNA, 12 nt, Human
ccuccacagcuu

SEQ ID NO: 2386790 - RNA, 11 nt, Human
ccuccacagcu

SEQ ID NO: 2386791 - RNA, 17 nt, Human
ccuccacagccgcagcc

SEQ ID NO: 2386792 - RNA, 16 nt, Human
ccuccacagccgcagc

SEQ ID NO: 2386793 - RNA, 15 nt, Human
ccuccacagccgcag

SEQ ID NO: 2386794 - RNA, 20 nt, Human
ccuccacauccuccacguuc

SEQ ID NO: 2386795 - RNA, 12 nt, Human
ccuccacauccu

SEQ ID NO: 2386796 - RNA, 14 nt, Human
ccuccaccaccacu

SEQ ID NO: 2386797 - RNA, 16 nt, Human
ccuccacauccuuucu

SEQ ID NO: 2386798 - RNA, 16 nt, Human
ccuccacauccuccac

SEQ ID NO: 2386799 - RNA, 15 nt, Human
ccuccacauccucca

SEQ ID NO: 2386800 - RNA, 14 nt, Human
ccuccacauccucc

SEQ ID NO: 2386801 - RNA, 17 nt, Human
ccuccacaguucagugg

SEQ ID NO: 2386802 - RNA, 23 nt, Human
ccuccacaguucgaccugcggcu

SEQ ID NO: 2386803 - RNA, 20 nt, Human
ccucaucugggggaguggaa

SEQ ID NO: 2386804 - RNA, 15 nt, Human
ccucaucuucuucac

SEQ ID NO: 2386805 - RNA, 18 nt, Human
ccucaucuucuucaccau

SEQ ID NO: 2386806 - RNA, 20 nt, Human
ccucaucucucugcccaacc

SEQ ID NO: 2386807 - RNA, 13 nt, Human
ccucaucugcuca

SEQ ID NO: 2386808 - RNA, 19 nt, Human
ccucaucugcucagcagcu

SEQ ID NO: 2386809 - RNA, 17 nt, Human
ccucaucugucccuccg

SEQ ID NO: 2386810 - RNA, 15 nt, Human
ccucaucugucccuc

SEQ ID NO: 2386811 - RNA, 23 nt, Human
ccuccaaucccaccaacccucag

SEQ ID NO: 2386812 - RNA, 17 nt, Human
ccucaucuucuucacca

SEQ ID NO: 2386813 - RNA, 17 nt, Human
ccucaucuuucaucaau

SEQ ID NO: 2386814 - RNA, 15 nt, Human
ccuccaauccugccc

SEQ ID NO: 2386815 - RNA, 16 nt, Human
ccuccaauccugcccc

SEQ ID NO: 2386816 - RNA, 20 nt, Human
ccucaguggacuuuccaccc

SEQ ID NO: 2386817 - RNA, 12 nt, Human
ccucauauuuaa

SEQ ID NO: 2386818 - RNA, 18 nt, Human
ccucaguggacuuuccac

SEQ ID NO: 2386819 - RNA, 16 nt, Human
ccucaguggacuuucc

SEQ ID NO: 2386820 - RNA, 13 nt, Human
ccucauauuuaaa

SEQ ID NO: 2386821 - RNA, 13 nt, Human
ccucaucaggaug

SEQ ID NO: 2386822 - RNA, 14 nt, Human
ccucaucaggauga

SEQ ID NO: 2386823 - RNA, 22 nt, Human
ccucauccaccccaucccuccc

SEQ ID NO: 2386824 - RNA, 14 nt, Human
ccucauccagggcu

SEQ ID NO: 2386825 - RNA, 15 nt, Human
ccucauccagggcuc

SEQ ID NO: 2386826 - RNA, 15 nt, Human
ccucaucaggaugaa

SEQ ID NO: 2386827 - RNA, 19 nt, Human
ccucaucaggaugaaccca

SEQ ID NO: 2386828 - RNA, 21 nt, Human
ccucaucaggaugaacccagg

SEQ ID NO: 2386829 - RNA, 23 nt, Human
ccucaucaggaugaacccaggac

SEQ ID NO: 2386830 - RNA, 20 nt, Human
ccucauccgaggcaggguca

SEQ ID NO: 2386831 - RNA, 17 nt, Human
ccucauccgaggcaggg

SEQ ID NO: 2386832 - RNA, 15 nt, Human
ccucauccgaggcag

SEQ ID NO: 2386833 - RNA, 14 nt, Human
ccucauccgaggca

SEQ ID NO: 2386834 - RNA, 20 nt, Human
ccucaucccgagcaccucca

SEQ ID NO: 2386835 - RNA, 20 nt, Human
ccucaucccguguucuccuu

SEQ ID NO: 2386836 - RNA, 14 nt, Human
ccucaucccgagca

SEQ ID NO: 2386837 - RNA, 23 nt, Human
ccucauccagggcucugaccagu

SEQ ID NO: 2386838 - RNA, 21 nt, Human
ccucaucuccccaucauuggu

SEQ ID NO: 2386839 - RNA, 19 nt, Human
ccucaucucucugcccaac

SEQ ID NO: 2386840 - RNA, 17 nt, Human
ccucaucucucugccca

SEQ ID NO: 2386841 - RNA, 21 nt, Human
ccucaucgcguccuccuaccg

SEQ ID NO: 2386842 - RNA, 13 nt, Human
ccucaucucauuc

SEQ ID NO: 2386843 - RNA, 13 nt, Human
ccucauccucaua

SEQ ID NO: 2386844 - RNA, 20 nt, Human
ccucauccucauacccaccc

SEQ ID NO: 2386845 - RNA, 20 nt, Human
ccucauaguaugguggcugg

SEQ ID NO: 2386846 - RNA, 22 nt, Human
ccucauagcccucacccugggg

SEQ ID NO: 2386847 - RNA, 21 nt, Human
ccucauagcccucacccuggg

SEQ ID NO: 2386848 - RNA, 18 nt, Human
ccucauagcccucacccu

SEQ ID NO: 2386849 - RNA, 17 nt, Human
ccucauagcccucaccc

SEQ ID NO: 2386850 - RNA, 13 nt, Human
ccucauacccacc

SEQ ID NO: 2386851 - RNA, 21 nt, Human
ccucauaguaugguggcuggg

SEQ ID NO: 2386852 - RNA, 22 nt, Human
ccucauaguaugguggcugggu

SEQ ID NO: 2386853 - RNA, 13 nt, Human
ccucaucaccaac

SEQ ID NO: 2386854 - RNA, 14 nt, Human
ccucaucaccaacg

SEQ ID NO: 2386855 - RNA, 20 nt, Human
ccucagucuggcccuuccuu

SEQ ID NO: 2386856 - RNA, 11 nt, Human
ccucagugcca

SEQ ID NO: 2386857 - RNA, 12 nt, Human
ccucauacccac

SEQ ID NO: 2386858 - RNA, 20 nt, Human
ccuaugcugccuaggcugac

SEQ ID NO: 2386859 - RNA, 19 nt, Human
ccucagucuggcccuuccu

SEQ ID NO: 2386860 - RNA, 19 nt, Human
ccuaugcagagguccacaa

SEQ ID NO: 2386861 - RNA, 14 nt, Human
ccuaugcacauaug

SEQ ID NO: 2386862 - RNA, 20 nt, Human
ccuaugcacauauggacucu

SEQ ID NO: 2386863 - RNA, 21 nt, Human
ccuaugcacauauggacucug

SEQ ID NO: 2386864 - RNA, 21 nt, Human
ccuaugcaugguguagaugcc

SEQ ID NO: 2386865 - RNA, 22 nt, Human
ccuaugcaauauaucuaaauug

SEQ ID NO: 2386866 - RNA, 17 nt, Human
cccacaacuccugucua

SEQ ID NO: 2386867 - RNA, 13 nt, Human
cccacaaguggug

SEQ ID NO: 2386868 - RNA, 20 nt, Human
cccacaagaaaugaaagcag

SEQ ID NO: 2386869 - RNA, 23 nt, Human
cccacaaguggugguaacccugg

SEQ ID NO: 2386870 - RNA, 22 nt, Human
cccacaaguggugguaacccug

SEQ ID NO: 2386871 - RNA, 22 nt, Human
cccacaauauaaaacuguacuu

SEQ ID NO: 2386872 - RNA, 22 nt, Human
cccacaaucuuaaggggcagcu

SEQ ID NO: 2386873 - RNA, 20 nt, Human
cccacaaguggugguaaccc

SEQ ID NO: 2386874 - RNA, 16 nt, Human
cccacaagugguggua

SEQ ID NO: 2386875 - RNA, 14 nt, Human
cccacaaguggugg

SEQ ID NO: 2386876 - RNA, 14 nt, Human
cccacacacacaca

SEQ ID NO: 2386877 - RNA, 13 nt, Human
cccacacacacac

SEQ ID NO: 2386878 - RNA, 11 nt, Human
cccacacacac

SEQ ID NO: 2386879 - RNA, 10 nt, Human
cccacacaca

SEQ ID NO: 2386880 - RNA, 16 nt, Human
cccaaugcacuuuguu

SEQ ID NO: 2386881 - RNA, 20 nt, Human
cccaaugcacuuuguucugg

SEQ ID NO: 2386882 - RNA, 13 nt, Human
cccacaagaaaug

SEQ ID NO: 2386883 - RNA, 13 nt, Human
cccacacacagau

SEQ ID NO: 2386884 - RNA, 19 nt, Human
cccacagcgcuggccggga

SEQ ID NO: 2386885 - RNA, 20 nt, Human
cccacacacacacacaugca

SEQ ID NO: 2386886 - RNA, 19 nt, Human
cccacacacacacacaugc

SEQ ID NO: 2386887 - RNA, 18 nt, Human
cccacacacacacacaug

SEQ ID NO: 2386888 - RNA, 17 nt, Human
cccacacacacacacau

SEQ ID NO: 2386889 - RNA, 13 nt, Human
cccacacacccca

SEQ ID NO: 2386890 - RNA, 23 nt, Human
cccacaaucuuaaggggcagcuu

SEQ ID NO: 2386891 - RNA, 17 nt, Human
cccacagcucccacccc

SEQ ID NO: 2386892 - RNA, 15 nt, Human
cccacagcucccacc

SEQ ID NO: 2386893 - RNA, 14 nt, Human
cccacagcucccac

SEQ ID NO: 2386894 - RNA, 12 nt, Human
cccacagcuccc

SEQ ID NO: 2386895 - RNA, 20 nt, Human
cccacagcucccaccccacc

SEQ ID NO: 2386896 - RNA, 19 nt, Human
cccacagcucccaccccac

SEQ ID NO: 2386897 - RNA, 20 nt, Human
cccacaggaagccugcaguc

SEQ ID NO: 2386898 - RNA, 22 nt, Human
cccacaggaagccugcaguccu

SEQ ID NO: 2386899 - RNA, 23 nt, Human
cccacaggaagccugcaguccug

SEQ ID NO: 2386900 - RNA, 14 nt, Human
cccacauuggaccc

SEQ ID NO: 2386901 - RNA, 14 nt, Human
cccacauuccgaca

SEQ ID NO: 2386902 - RNA, 21 nt, Human
cccaccaacaucccauugccc

SEQ ID NO: 2386903 - RNA, 21 nt, Human
cccacaggagguggucuggga

SEQ ID NO: 2386904 - RNA, 19 nt, Human
cccacaugugacacauaug

SEQ ID NO: 2386905 - RNA, 16 nt, Human
cccacaugugacacau

SEQ ID NO: 2386906 - RNA, 16 nt, Human
cccacaggaggugguc

SEQ ID NO: 2386907 - RNA, 20 nt, Human
cccacaggacauuucucuaa

SEQ ID NO: 2386908 - RNA, 19 nt, Human
cccacaggacauuucucua

SEQ ID NO: 2386909 - RNA, 17 nt, Human
cccaccucccugccucc

SEQ ID NO: 2386910 - RNA, 15 nt, Human
cccaccucugugacc

SEQ ID NO: 2386911 - RNA, 17 nt, Human
cccaccucugugaccuc

SEQ ID NO: 2386912 - RNA, 18 nt, Human
cccaccucugugaccuca

SEQ ID NO: 2386913 - RNA, 12 nt, Human
cccaccucuucu

SEQ ID NO: 2386914 - RNA, 20 nt, Human
cccaccucugugaccucagg

SEQ ID NO: 2386915 - RNA, 21 nt, Human
cccaccucugugaccucaggc

SEQ ID NO: 2386916 - RNA, 22 nt, Human
cccaccucucucacuccuugaa

SEQ ID NO: 2386917 - RNA, 16 nt, Human
cccaccucccugccuc

SEQ ID NO: 2386918 - RNA, 15 nt, Human
cccaccucccugccu

SEQ ID NO: 2386919 - RNA, 14 nt, Human
cccaccucccugcc

SEQ ID NO: 2386920 - RNA, 17 nt, Human
cccaccucagccuccug

SEQ ID NO: 2386921 - RNA, 11 nt, Human
cccaccuccac

SEQ ID NO: 2386922 - RNA, 10 nt, Human
cccaccuccc

SEQ ID NO: 2386923 - RNA, 13 nt, Human
cccaccuccccac

SEQ ID NO: 2386924 - RNA, 12 nt, Human
cccaccucccug

SEQ ID NO: 2386925 - RNA, 14 nt, Human
cccaccuccccacg

SEQ ID NO: 2386926 - RNA, 15 nt, Human
cccaccuccccacgc

SEQ ID NO: 2386927 - RNA, 16 nt, Human
cccaccuccccacgcc

SEQ ID NO: 2386928 - RNA, 17 nt, Human
cccaccuccccacgccc

SEQ ID NO: 2386929 - RNA, 17 nt, Human
cccaccucagccucccg

SEQ ID NO: 2386930 - RNA, 23 nt, Human
cccaccgggcugggagcucugca

SEQ ID NO: 2386931 - RNA, 23 nt, Human
cccaccacuaggacucugaggcu

SEQ ID NO: 2386932 - RNA, 20 nt, Human
cccaccacggccacuggcca

SEQ ID NO: 2386933 - RNA, 21 nt, Human
cccaccacggccacuggccau

SEQ ID NO: 2386934 - RNA, 24 nt, Human
cccaccacgauguggcccuggccu

SEQ ID NO: 2386935 - RNA, 14 nt, Human
cccaccacggccac

SEQ ID NO: 2386936 - RNA, 20 nt, Human
cccaccacgauguggcccug

SEQ ID NO: 2386937 - RNA, 19 nt, Human
cccaccacgauguggcccu

SEQ ID NO: 2386938 - RNA, 13 nt, Human
cccaccaggcugc

SEQ ID NO: 2386939 - RNA, 16 nt, Human
cccaccaggcugcuca

SEQ ID NO: 2386940 - RNA, 17 nt, Human
cccaccaggcugcucag

SEQ ID NO: 2386941 - RNA, 22 nt, Human
cccaccaggcugcucagggcug

SEQ ID NO: 2386942 - RNA, 22 nt, Human
cccaccaccuaggccacuccuc

SEQ ID NO: 2386943 - RNA, 21 nt, Human
cccaccaccuaggccacuccu

SEQ ID NO: 2386944 - RNA, 20 nt, Human
cccaccaccuaggccacucc

SEQ ID NO: 2386945 - RNA, 19 nt, Human
cccaccaccuaggccacuc

SEQ ID NO: 2386946 - RNA, 16 nt, Human
cccaccaccuaggcca

SEQ ID NO: 2386947 - RNA, 13 nt, Human
cccaccaccuagg

SEQ ID NO: 2386948 - RNA, 18 nt, Human
cccaccaccccagcugcu

SEQ ID NO: 2386949 - RNA, 15 nt, Human
cccaccaccccagcu

SEQ ID NO: 2386950 - RNA, 13 nt, Human
cccaccacagcag

SEQ ID NO: 2386951 - RNA, 12 nt, Human
cccaccacagca

SEQ ID NO: 2386952 - RNA, 17 nt, Human
cccaccacacccucccu

SEQ ID NO: 2386953 - RNA, 19 nt, Human
cccaccgcagacaggacca

SEQ ID NO: 2386954 - RNA, 20 nt, Human
cccaccgcagacaggaccag

SEQ ID NO: 2386955 - RNA, 22 nt, Human
cccaccgcaugcccccucgugc

SEQ ID NO: 2386956 - RNA, 18 nt, Human
cccaccgcaugcccccuc

SEQ ID NO: 2386957 - RNA, 20 nt, Human
cccaccgcaugcccccucgu

SEQ ID NO: 2386958 - RNA, 14 nt, Human
cccaccgcaugccc

SEQ ID NO: 2386959 - RNA, 19 nt, Human
cccacgcuggagugcagug

SEQ ID NO: 2386960 - RNA, 14 nt, Human
cccacgcuggagug

SEQ ID NO: 2386961 - RNA, 20 nt, Human
cccacgcuggagugcaguga

SEQ ID NO: 2386962 - RNA, 21 nt, Human
cccacgcuggagugcagugag

SEQ ID NO: 2386963 - RNA, 23 nt, Human
cccacuugagaauuacccuuuug

SEQ ID NO: 2386964 - RNA, 12 nt, Human
cccacuucugcc

SEQ ID NO: 2386965 - RNA, 15 nt, Human
cccacuuuggccucc

SEQ ID NO: 2386966 - RNA, 20 nt, Human
cccagaaaaaaaaaaacuua

SEQ ID NO: 2386967 - RNA, 13 nt, Human
cccacuugccucu

SEQ ID NO: 2386968 - RNA, 14 nt, Human
cccacuugccucuu

SEQ ID NO: 2386969 - RNA, 15 nt, Human
cccacuugccucuuc

SEQ ID NO: 2386970 - RNA, 21 nt, Human
cccacuugccucuuccuugaa

SEQ ID NO: 2386971 - RNA, 21 nt, Human
cccaccuuuauuaaaaucuua

SEQ ID NO: 2386972 - RNA, 20 nt, Human
cccaccuuguuggagccugc

SEQ ID NO: 2386973 - RNA, 21 nt, Human
cccaccuuguuggagccugca

SEQ ID NO: 2386974 - RNA, 17 nt, Human
cccaccuuguuggagcc

SEQ ID NO: 2386975 - RNA, 18 nt, Human
cccaccuuguuggagccu

SEQ ID NO: 2386976 - RNA, 19 nt, Human
cccaccuuguuggagccug

SEQ ID NO: 2386977 - RNA, 16 nt, Human
cccaccuggccucugc

SEQ ID NO: 2386978 - RNA, 21 nt, Human
cccacgacugcccggcagggu

SEQ ID NO: 2386979 - RNA, 20 nt, Human
cccacgacugcccggcaggg

SEQ ID NO: 2386980 - RNA, 23 nt, Human
cccaccugcccaucacaggguug

SEQ ID NO: 2386981 - RNA, 20 nt, Human
cccaccugcccaucacaggg

SEQ ID NO: 2386982 - RNA, 13 nt, Human
cccaccugcccau

SEQ ID NO: 2386983 - RNA, 17 nt, Human
cccaccuggccucugca

SEQ ID NO: 2386984 - RNA, 19 nt, Human
cccaccuggccucugcacu

SEQ ID NO: 2386985 - RNA, 21 nt, Human
cccaccuggccucugcacucc

SEQ ID NO: 2386986 - RNA, 16 nt, Human
cccugggccccaccac

SEQ ID NO: 2386987 - RNA, 20 nt, Human
cccugggccccaccaccuag

SEQ ID NO: 2386988 - RNA, 18 nt, Human
cccugggccccaccaccu

SEQ ID NO: 2386989 - RNA, 13 nt, Human
cccugggcccugg

SEQ ID NO: 2386990 - RNA, 16 nt, Human
cccugggcccugggcu

SEQ ID NO: 2386991 - RNA, 18 nt, Human
cccugggcccugggcugg

SEQ ID NO: 2386992 - RNA, 22 nt, Human
cccugggccccaccaccuaggc

SEQ ID NO: 2386993 - RNA, 19 nt, Human
cccugggcccugggcugga

SEQ ID NO: 2386994 - RNA, 17 nt, Human
cccugggcucggaggcu

SEQ ID NO: 2386995 - RNA, 18 nt, Human
cccuggcuuuucacugcu

SEQ ID NO: 2386996 - RNA, 17 nt, Human
cccuggcuuuucacugc

SEQ ID NO: 2386997 - RNA, 15 nt, Human
cccuggacugugugc

SEQ ID NO: 2386998 - RNA, 19 nt, Human
cccuggcuuuucacugcug

SEQ ID NO: 2386999 - RNA, 22 nt, Human
cccuggcuuuucacugcuggcu

SEQ ID NO: 2387000 - RNA, 13 nt, Human
cccuggacuggga

SEQ ID NO: 2387001 - RNA, 14 nt, Human
cccuggacugggag

SEQ ID NO: 2387002 - RNA, 18 nt, Human
cccugggaggcagugaug

SEQ ID NO: 2387003 - RNA, 17 nt, Human
cccugguccuuccaggc

SEQ ID NO: 2387004 - RNA, 16 nt, Human
cccugguccuuccagg

SEQ ID NO: 2387005 - RNA, 13 nt, Human
cccuggucucagc

SEQ ID NO: 2387006 - RNA, 17 nt, Human
cccuggucucagcagcg

SEQ ID NO: 2387007 - RNA, 20 nt, Human
cccuggucucagcagcgacc

SEQ ID NO: 2387008 - RNA, 15 nt, Human
cccugguggcagcuc

SEQ ID NO: 2387009 - RNA, 16 nt, Human
cccugguggcagcuca

SEQ ID NO: 2387010 - RNA, 17 nt, Human
cccugguggcagcucac

SEQ ID NO: 2387011 - RNA, 13 nt, Human
cccugguccuucc

SEQ ID NO: 2387012 - RNA, 15 nt, Human
cccugguccugaggg

SEQ ID NO: 2387013 - RNA, 18 nt, Human
cccugguccagggaagcu

SEQ ID NO: 2387014 - RNA, 16 nt, Human
cccugguccagggaag

SEQ ID NO: 2387015 - RNA, 15 nt, Human
cccugguagggcagu

SEQ ID NO: 2387016 - RNA, 15 nt, Human
cccugggcucugccc

SEQ ID NO: 2387017 - RNA, 13 nt, Human
cccugggcucugc

SEQ ID NO: 2387018 - RNA, 16 nt, Human
cccugggcucugcccc

SEQ ID NO: 2387019 - RNA, 14 nt, Human
cccugggcucugug

SEQ ID NO: 2387020 - RNA, 23 nt, Human
cccugguaauaaguacuguguac

SEQ ID NO: 2387021 - RNA, 23 nt, Human
cccuggguucagaaaugcugccu

SEQ ID NO: 2387022 - RNA, 22 nt, Human
cccuggguucagaaaugcugcc

SEQ ID NO: 2387023 - RNA, 17 nt, Human
cccugggcucugugggc

SEQ ID NO: 2387024 - RNA, 20 nt, Human
cccugggcucugugggcugc

SEQ ID NO: 2387025 - RNA, 12 nt, Human
cccugccagcuc

SEQ ID NO: 2387026 - RNA, 20 nt, Human
cccugccacucacuaggccc

SEQ ID NO: 2387027 - RNA, 13 nt, Human
cccugccagcucu

SEQ ID NO: 2387028 - RNA, 18 nt, Human
cccugcuggccgccucac

SEQ ID NO: 2387029 - RNA, 18 nt, Human
cccugcccaccuggccuc

SEQ ID NO: 2387030 - RNA, 16 nt, Human
cccugcuggguguggc

SEQ ID NO: 2387031 - RNA, 21 nt, Human
cccugcuggguguggcgcagc

SEQ ID NO: 2387032 - RNA, 13 nt, Human
cccugcccaccug

SEQ ID NO: 2387033 - RNA, 21 nt, Human
cccugccagacccccuggaga

SEQ ID NO: 2387034 - RNA, 13 nt, Human
cccugccagaccc

SEQ ID NO: 2387035 - RNA, 14 nt, Human
cccugcccaccugg

SEQ ID NO: 2387036 - RNA, 17 nt, Human
cccugcccaccuggccu

SEQ ID NO: 2387037 - RNA, 18 nt, Human
cccugcuuugggcugccc

SEQ ID NO: 2387038 - RNA, 19 nt, Human
cccugcuuugggcugcccu

SEQ ID NO: 2387039 - RNA, 17 nt, Human
cccugcuuugggcugcc

SEQ ID NO: 2387040 - RNA, 13 nt, Human
cccugcuggcucu

SEQ ID NO: 2387041 - RNA, 14 nt, Human
cccugcuggcucuu

SEQ ID NO: 2387042 - RNA, 15 nt, Human
cccugcuggcucuuc

SEQ ID NO: 2387043 - RNA, 22 nt, Human
cccugcuggguguggcgcagca

SEQ ID NO: 2387044 - RNA, 17 nt, Human
cccuggacaagcagagg

SEQ ID NO: 2387045 - RNA, 20 nt, Human
cccugcuggcucuucugccc

SEQ ID NO: 2387046 - RNA, 21 nt, Human
cccugcuggcucuucugccca

SEQ ID NO: 2387047 - RNA, 18 nt, Human
cccuggaagccggcggcc

SEQ ID NO: 2387048 - RNA, 22 nt, Human
cccuggaagccggcggcccaag

SEQ ID NO: 2387049 - RNA, 20 nt, Human
cccugcuuugggcugcccug

SEQ ID NO: 2387050 - RNA, 23 nt, Human
cccuggaccaguggucucacaug

SEQ ID NO: 2387051 - RNA, 21 nt, Human
cccuggaccaguggucucaca

SEQ ID NO: 2387052 - RNA, 17 nt, Human
cccuggaccaguggucu

SEQ ID NO: 2387053 - RNA, 16 nt, Human
cccuggaccagugguc

SEQ ID NO: 2387054 - RNA, 20 nt, Human
cccucuguccaggcacugag

SEQ ID NO: 2387055 - RNA, 13 nt, Human
cccucuguccuga

SEQ ID NO: 2387056 - RNA, 24 nt, Human
cccucuguccaggcacugagauac

SEQ ID NO: 2387057 - RNA, 18 nt, Human
cccugaaaacccagagag

SEQ ID NO: 2387058 - RNA, 17 nt, Human
cccugaaaacccagaga

SEQ ID NO: 2387059 - RNA, 16 nt, Human
cccugaaaacccagag

SEQ ID NO: 2387060 - RNA, 15 nt, Human
cccugaaaacccaga

SEQ ID NO: 2387061 - RNA, 18 nt, Human
cccucuguguauuugcuu

SEQ ID NO: 2387062 - RNA, 14 nt, Human
cccucuguccugac

SEQ ID NO: 2387063 - RNA, 15 nt, Human
cccucuguccugacu

SEQ ID NO: 2387064 - RNA, 16 nt, Human
cccucuggggcuguuc

SEQ ID NO: 2387065 - RNA, 18 nt, Human
cccucuggucgcuccugc

SEQ ID NO: 2387066 - RNA, 19 nt, Human
cccucuggucgcuccugcc

SEQ ID NO: 2387067 - RNA, 20 nt, Human
cccucuggucgcuccugccc

SEQ ID NO: 2387068 - RNA, 22 nt, Human
cccucuggucgcuccugcccac

SEQ ID NO: 2387069 - RNA, 16 nt, Human
cccugaaagcccugag

SEQ ID NO: 2387070 - RNA, 14 nt, Human
cccugaaacuuauu

SEQ ID NO: 2387071 - RNA, 15 nt, Human
cccugaaacuuauuu

SEQ ID NO: 2387072 - RNA, 17 nt, Human
cccugaaacuuauuuuu

SEQ ID NO: 2387073 - RNA, 13 nt, Human
cccugaggcccag

SEQ ID NO: 2387074 - RNA, 24 nt, Human
cccugaaaauguuuuucugccagg

SEQ ID NO: 2387075 - RNA, 23 nt, Human
cccugaaaauguuuuucugccag

SEQ ID NO: 2387076 - RNA, 22 nt, Human
cccugaaaauguuuuucugcca

SEQ ID NO: 2387077 - RNA, 15 nt, Human
cccugaaagcccuga

SEQ ID NO: 2387078 - RNA, 14 nt, Human
cccugaggcccaga

SEQ ID NO: 2387079 - RNA, 15 nt, Human
cccugaggcccagag

SEQ ID NO: 2387080 - RNA, 16 nt, Human
cccugaggcccagagg

SEQ ID NO: 2387081 - RNA, 17 nt, Human
cccugaggcccagaggg

SEQ ID NO: 2387082 - RNA, 18 nt, Human
cccugaggcccagagggc

SEQ ID NO: 2387083 - RNA, 19 nt, Human
cccugaggcccagagggcc

SEQ ID NO: 2387084 - RNA, 20 nt, Human
cccugaggcccagagggccu

SEQ ID NO: 2387085 - RNA, 23 nt, Human
cccugaggcccagagggccugca

SEQ ID NO: 2387086 - RNA, 19 nt, Human
cccugcacuugcagacucu

SEQ ID NO: 2387087 - RNA, 13 nt, Human
cccugccacucac

SEQ ID NO: 2387088 - RNA, 18 nt, Human
cccugccacucacuaggc

SEQ ID NO: 2387089 - RNA, 19 nt, Human
cccugccacucacuaggcc

SEQ ID NO: 2387090 - RNA, 12 nt, Human
cccugcacuugc

SEQ ID NO: 2387091 - RNA, 16 nt, Human
cccugcacuguccugc

SEQ ID NO: 2387092 - RNA, 17 nt, Human
cccugcacuguccugcu

SEQ ID NO: 2387093 - RNA, 18 nt, Human
cccugcacuguccugcuc

SEQ ID NO: 2387094 - RNA, 19 nt, Human
cccugcacuguccugcucc

SEQ ID NO: 2387095 - RNA, 20 nt, Human
cccugcacuguccugcucca

SEQ ID NO: 2387096 - RNA, 21 nt, Human
cccugcacuguccugcuccac

SEQ ID NO: 2387097 - RNA, 22 nt, Human
cccugcacuguccugcuccaca

SEQ ID NO: 2387098 - RNA, 23 nt, Human
cccugcacuguccugcuccacag

SEQ ID NO: 2387099 - RNA, 22 nt, Human
cccugcacuggaguccagucuc

SEQ ID NO: 2387100 - RNA, 13 nt, Human
cccugcacuggag

SEQ ID NO: 2387101 - RNA, 23 nt, Human
cccugcacuggaguccagucucu

SEQ ID NO: 2387102 - RNA, 15 nt, Human
cccugcacuguccug

SEQ ID NO: 2387103 - RNA, 13 nt, Human
cccugcacugucc

SEQ ID NO: 2387104 - RNA, 13 nt, Human
cccugcacgucau

SEQ ID NO: 2387105 - RNA, 15 nt, Human
cccugcacgucaugg

SEQ ID NO: 2387106 - RNA, 14 nt, Human
cccugcacgucaug

SEQ ID NO: 2387107 - RNA, 10 nt, Human
cccugcacug

SEQ ID NO: 2387108 - RNA, 16 nt, Human
cccugcaaaggacugu

SEQ ID NO: 2387109 - RNA, 15 nt, Human
cccugcaaaggacug

SEQ ID NO: 2387110 - RNA, 23 nt, Human
cccugcacaaagcccuuccaugu

SEQ ID NO: 2387111 - RNA, 20 nt, Human
cccugcaaagcccagcuuga

SEQ ID NO: 2387112 - RNA, 19 nt, Human
cccugcaaagcccagcuug

SEQ ID NO: 2387113 - RNA, 17 nt, Human
cccugcaaagcccagcu

SEQ ID NO: 2387114 - RNA, 16 nt, Human
cccugcaaagcccagc

SEQ ID NO: 2387115 - RNA, 20 nt, Human
cccugaggugaaagggagcu

SEQ ID NO: 2387116 - RNA, 15 nt, Human
cccugaggugugggg

SEQ ID NO: 2387117 - RNA, 19 nt, Human
cccugaggugugggggcug

SEQ ID NO: 2387118 - RNA, 18 nt, Human
cccugaggugaaagggag

SEQ ID NO: 2387119 - RNA, 17 nt, Human
cccugaggggucccuga

SEQ ID NO: 2387120 - RNA, 18 nt, Human
cccugaggcucagggaaa

SEQ ID NO: 2387121 - RNA, 12 nt, Human
cccugaggcuca

SEQ ID NO: 2387122 - RNA, 22 nt, Human
cccugaaacuuauuuuuuucug

SEQ ID NO: 2387123 - RNA, 23 nt, Human
cccugaaacuuauuuuuuucuga

SEQ ID NO: 2387124 - RNA, 17 nt, Human
cccugagucaccaggaa

SEQ ID NO: 2387125 - RNA, 16 nt, Human
cccugagucaccagga

SEQ ID NO: 2387126 - RNA, 22 nt, Human
cccugaguaaucgcuuaaagau

SEQ ID NO: 2387127 - RNA, 20 nt, Human
cccugaggugugggggcugc

SEQ ID NO: 2387128 - RNA, 21 nt, Human
cccugaggugugggggcugca

SEQ ID NO: 2387129 - RNA, 22 nt, Human
cccugaggugugggggcugcag

SEQ ID NO: 2387130 - RNA, 23 nt, Human
cccugaggugugggggcugcagc

SEQ ID NO: 2387131 - RNA, 15 nt, Human
cccugcaaagcccag

SEQ ID NO: 2387132 - RNA, 19 nt, Human
cccugaguggaucuccaag

SEQ ID NO: 2387133 - RNA, 20 nt, Human
cccugaguggaucuccaagg

SEQ ID NO: 2387134 - RNA, 23 nt, Human
cccugcaaaauuugaugccagga

SEQ ID NO: 2387135 - RNA, 15 nt, Human
cccuaguaaaaauac

SEQ ID NO: 2387136 - RNA, 17 nt, Human
cccuaguaagugccuuc

SEQ ID NO: 2387137 - RNA, 18 nt, Human
cccuaguaagugccuucc

SEQ ID NO: 2387138 - RNA, 16 nt, Human
cccuagucccuucccc

SEQ ID NO: 2387139 - RNA, 20 nt, Human
cccuaguaagugccuuccau

SEQ ID NO: 2387140 - RNA, 23 nt, Human
cccuaguaagugccuuccauguc

SEQ ID NO: 2387141 - RNA, 22 nt, Human
cccuaggucagcuugcugcccu

SEQ ID NO: 2387142 - RNA, 22 nt, Human
cccuagucccuuccccucccug

SEQ ID NO: 2387143 - RNA, 17 nt, Human
cccuagucccuuccccu

SEQ ID NO: 2387144 - RNA, 19 nt, Human
cccuaguucuaccucaggc

SEQ ID NO: 2387145 - RNA, 21 nt, Human
cccuagugacccggaggccac

SEQ ID NO: 2387146 - RNA, 19 nt, Human
cccuagugacccggaggcc

SEQ ID NO: 2387147 - RNA, 23 nt, Human
cccuauauguaguauaaagaaaa

SEQ ID NO: 2387148 - RNA, 15 nt, Human
cccuccacaucccug

SEQ ID NO: 2387149 - RNA, 19 nt, Human
cccuauccacccagcccau

SEQ ID NO: 2387150 - RNA, 12 nt, Human
cccuccacccug

SEQ ID NO: 2387151 - RNA, 14 nt, Human
cccuccacccuguc

SEQ ID NO: 2387152 - RNA, 18 nt, Human
cccuauccacccagccca

SEQ ID NO: 2387153 - RNA, 16 nt, Human
cccuauccacccagcc

SEQ ID NO: 2387154 - RNA, 14 nt, Human
cccuauccacccag

SEQ ID NO: 2387155 - RNA, 14 nt, Human
cccuccacaucccu

SEQ ID NO: 2387156 - RNA, 16 nt, Human
cccuccacccuguccc

SEQ ID NO: 2387157 - RNA, 22 nt, Human
cccuccacccugucccccagcu

SEQ ID NO: 2387158 - RNA, 18 nt, Human
cccuccacguucaccccu

SEQ ID NO: 2387159 - RNA, 17 nt, Human
cccuccacuccuuccug

SEQ ID NO: 2387160 - RNA, 12 nt, Human
cccuccacuccu

SEQ ID NO: 2387161 - RNA, 12 nt, Human
cccuccacuguc

SEQ ID NO: 2387162 - RNA, 23 nt, Human
cccuccacucuccucuuccaggc

SEQ ID NO: 2387163 - RNA, 13 nt, Human
cccuccaccugcu

SEQ ID NO: 2387164 - RNA, 13 nt, Human
cccuccccagggg

SEQ ID NO: 2387165 - RNA, 12 nt, Human
cccuccccaggg

SEQ ID NO: 2387166 - RNA, 16 nt, Human
cccuccccaucccaug

SEQ ID NO: 2387167 - RNA, 16 nt, Human
cccucccccaaccccc

SEQ ID NO: 2387168 - RNA, 14 nt, Human
cccuccccauggag

SEQ ID NO: 2387169 - RNA, 14 nt, Human
cccuccccagggga

SEQ ID NO: 2387170 - RNA, 14 nt, Human
cccucccccacugc

SEQ ID NO: 2387171 - RNA, 18 nt, Human
cccucccccccaugcacu

SEQ ID NO: 2387172 - RNA, 15 nt, Human
cccucccccccaugc

SEQ ID NO: 2387173 - RNA, 22 nt, Human
cccucccagggccagggcccug

SEQ ID NO: 2387174 - RNA, 13 nt, Human
cccucccaucugg

SEQ ID NO: 2387175 - RNA, 15 nt, Human
cccuccccagagcac

SEQ ID NO: 2387176 - RNA, 15 nt, Human
cccucccauuaggac

SEQ ID NO: 2387177 - RNA, 16 nt, Human
cccuccccagagcacu

SEQ ID NO: 2387178 - RNA, 14 nt, Human
cccucccaucuggg

SEQ ID NO: 2387179 - RNA, 16 nt, Human
cccucccaucugggag

SEQ ID NO: 2387180 - RNA, 17 nt, Human
cccucccaucugggagu

SEQ ID NO: 2387181 - RNA, 13 nt, Human
cccucccauuagg

SEQ ID NO: 2387182 - RNA, 13 nt, Human
cccucuccugccu

SEQ ID NO: 2387183 - RNA, 12 nt, Human
cccucuccugcc

SEQ ID NO: 2387184 - RNA, 17 nt, Human
cccucuccugccuacuc

SEQ ID NO: 2387185 - RNA, 20 nt, Human
cccucccccccaugcacugu

SEQ ID NO: 2387186 - RNA, 21 nt, Human
cccucccccgccacuccugaa

SEQ ID NO: 2387187 - RNA, 17 nt, Human
cccucucucuucugcuc

SEQ ID NO: 2387188 - RNA, 15 nt, Human
cccucucucuucugc

SEQ ID NO: 2387189 - RNA, 14 nt, Human
cccucucucuucug

SEQ ID NO: 2387190 - RNA, 13 nt, Human
cccucucucuucu

SEQ ID NO: 2387191 - RNA, 12 nt, Human
cccucucucuga

SEQ ID NO: 2387192 - RNA, 13 nt, Human
cccucucucugac

SEQ ID NO: 2387193 - RNA, 15 nt, Human
cccucucucugacuc

SEQ ID NO: 2387194 - RNA, 18 nt, Human
cccucucucugacucuca

SEQ ID NO: 2387195 - RNA, 13 nt, Human
cccucucuccucc

SEQ ID NO: 2387196 - RNA, 23 nt, Human
cccucucucuucugcuccacccu

SEQ ID NO: 2387197 - RNA, 22 nt, Human
cccucucucuucugcuccaccc

SEQ ID NO: 2387198 - RNA, 19 nt, Human
cccucucucuucugcucca

SEQ ID NO: 2387199 - RNA, 18 nt, Human
cccucucucuucugcucc

SEQ ID NO: 2387200 - RNA, 12 nt, Human
cccucucugcau

SEQ ID NO: 2387201 - RNA, 14 nt, Human
cccucucugcucug

SEQ ID NO: 2387202 - RNA, 18 nt, Human
cccucucugcaucugacc

SEQ ID NO: 2387203 - RNA, 20 nt, Human
cccucucugcaucugaccac

SEQ ID NO: 2387204 - RNA, 14 nt, Human
cccucugccugucc

SEQ ID NO: 2387205 - RNA, 14 nt, Human
cccucugccaccag

SEQ ID NO: 2387206 - RNA, 12 nt, Human
cccucugccacc

SEQ ID NO: 2387207 - RNA, 13 nt, Human
cccucugccacca

SEQ ID NO: 2387208 - RNA, 22 nt, Human
cccucugaaugguccaggguug

SEQ ID NO: 2387209 - RNA, 20 nt, Human
cccucugagaauuccaagga

SEQ ID NO: 2387210 - RNA, 21 nt, Human
cccucugagaauuccaaggag

SEQ ID NO: 2387211 - RNA, 9 nt, Human
cccucugcc

SEQ ID NO: 2387212 - RNA, 15 nt, Human
cccucugaccugcac

SEQ ID NO: 2387213 - RNA, 16 nt, Human
cccucugaccugcacu

SEQ ID NO: 2387214 - RNA, 17 nt, Human
cccucugaccugcacug

SEQ ID NO: 2387215 - RNA, 19 nt, Human
cccucugaccugcacuggg

SEQ ID NO: 2387216 - RNA, 11 nt, Human
cccucucugga

SEQ ID NO: 2387217 - RNA, 16 nt, Human
cccucucugcucugcg

SEQ ID NO: 2387218 - RNA, 15 nt, Human
cccucucugcucugc

SEQ ID NO: 2387219 - RNA, 23 nt, Human
cccucucuugcacccgccucucc

SEQ ID NO: 2387220 - RNA, 13 nt, Human
cccucucuugcac

SEQ ID NO: 2387221 - RNA, 18 nt, Human
cccucucuugcacccgcc

SEQ ID NO: 2387222 - RNA, 19 nt, Human
cccucugaaugguccaggg

SEQ ID NO: 2387223 - RNA, 14 nt, Human
cccucugaccugca

SEQ ID NO: 2387224 - RNA, 23 nt, Human
cccucugccugucccucucaggc

SEQ ID NO: 2387225 - RNA, 16 nt, Human
cccucugccugucccu

SEQ ID NO: 2387226 - RNA, 15 nt, Human
cccucugccuguccc

SEQ ID NO: 2387227 - RNA, 14 nt, Human
cccucugcugcugu

SEQ ID NO: 2387228 - RNA, 15 nt, Human
cccucugcugcuguc

SEQ ID NO: 2387229 - RNA, 12 nt, Human
cccucuggaggg

SEQ ID NO: 2387230 - RNA, 21 nt, Human
cccucuggagggguguggcuc

SEQ ID NO: 2387231 - RNA, 22 nt, Human
cccucuggagggguguggcucc

SEQ ID NO: 2387232 - RNA, 13 nt, Human
cccucuggccagg

SEQ ID NO: 2387233 - RNA, 13 nt, Human
cccucuggaucaa

SEQ ID NO: 2387234 - RNA, 12 nt, Human
cccucuggccag

SEQ ID NO: 2387235 - RNA, 18 nt, Human
cccucuggaguggccacu

SEQ ID NO: 2387236 - RNA, 22 nt, Human
cccucuggaguggccacuaagc

SEQ ID NO: 2387237 - RNA, 21 nt, Human
cccucuggaguggccacuaag

SEQ ID NO: 2387238 - RNA, 14 nt, Human
cccucuggcccugc

SEQ ID NO: 2387239 - RNA, 13 nt, Human
cccucuggcccug

SEQ ID NO: 2387240 - RNA, 22 nt, Human
cccucuggccaggauggagggg

SEQ ID NO: 2387241 - RNA, 18 nt, Human
cccucuggccaggaugga

SEQ ID NO: 2387242 - RNA, 12 nt, Human
cccucuggggcu

SEQ ID NO: 2387243 - RNA, 18 nt, Human
cccgccgccugguacuca

SEQ ID NO: 2387244 - RNA, 19 nt, Human
cccgccgcuuuucuccucu

SEQ ID NO: 2387245 - RNA, 20 nt, Human
cccgccgcuuuucuccucuu

SEQ ID NO: 2387246 - RNA, 15 nt, Human
cccgccccacauucc

SEQ ID NO: 2387247 - RNA, 20 nt, Human
cccgccccuuccccgaggga

SEQ ID NO: 2387248 - RNA, 17 nt, Human
cccgcccccugcccucc

SEQ ID NO: 2387249 - RNA, 16 nt, Human
cccgcccccugcccuc

SEQ ID NO: 2387250 - RNA, 19 nt, Human
cccgccccacauuccgaca

SEQ ID NO: 2387251 - RNA, 21 nt, Human
cccgagucauucguucugugg

SEQ ID NO: 2387252 - RNA, 22 nt, Human
cccgaguagcugggacuacagg

SEQ ID NO: 2387253 - RNA, 12 nt, Human
cccgccucuccc

SEQ ID NO: 2387254 - RNA, 13 nt, Human
cccgccucucccg

SEQ ID NO: 2387255 - RNA, 21 nt, Human
cccgccucucccgucagggcc

SEQ ID NO: 2387256 - RNA, 11 nt, Human
cccgccugcca

SEQ ID NO: 2387257 - RNA, 12 nt, Human
cccgccugccag

SEQ ID NO: 2387258 - RNA, 12 nt, Human
cccgccugcccu

SEQ ID NO: 2387259 - RNA, 13 nt, Human
cccgccugccagu

SEQ ID NO: 2387260 - RNA, 14 nt, Human
cccgccugccaguc

SEQ ID NO: 2387261 - RNA, 16 nt, Human
cccgccugccaguccu

SEQ ID NO: 2387262 - RNA, 19 nt, Human
cccgcugucagccauuccu

SEQ ID NO: 2387263 - RNA, 20 nt, Human
cccgcugucagccauuccug

SEQ ID NO: 2387264 - RNA, 12 nt, Human
cccgcugggcug

SEQ ID NO: 2387265 - RNA, 15 nt, Human
cccgcugggcugagc

SEQ ID NO: 2387266 - RNA, 21 nt, Human
cccgcugggcugagccccuac

SEQ ID NO: 2387267 - RNA, 11 nt, Human
cccgcuugccu

SEQ ID NO: 2387268 - RNA, 12 nt, Human
cccgcuugccuc

SEQ ID NO: 2387269 - RNA, 15 nt, Human
cccgcuugccucggc

SEQ ID NO: 2387270 - RNA, 17 nt, Human
cccgcuugccucggcuc

SEQ ID NO: 2387271 - RNA, 19 nt, Human
cccgcuugccucggcuccu

SEQ ID NO: 2387272 - RNA, 20 nt, Human
cccgcuugccucggcuccug

SEQ ID NO: 2387273 - RNA, 21 nt, Human
cccgcuugccucggcuccugc

SEQ ID NO: 2387274 - RNA, 22 nt, Human
cccgcuugccucggcuccugcu

SEQ ID NO: 2387275 - RNA, 23 nt, Human
cccgcuugccucggcuccugcug

SEQ ID NO: 2387276 - RNA, 13 nt, Human
cccgggaggggcc

SEQ ID NO: 2387277 - RNA, 23 nt, Human
cccgggaggggcccgcuugccuc

SEQ ID NO: 2387278 - RNA, 15 nt, Human
cccgggaggggcccg

SEQ ID NO: 2387279 - RNA, 17 nt, Human
cccgggaggggcccgcu

SEQ ID NO: 2387280 - RNA, 18 nt, Human
cccgggaggggcccgcuu

SEQ ID NO: 2387281 - RNA, 22 nt, Human
cccgggaggggcccgcuugccu

SEQ ID NO: 2387282 - RNA, 12 nt, Human
cccgggcucugc

SEQ ID NO: 2387283 - RNA, 20 nt, Human
cccgggcccguugaggauga

SEQ ID NO: 2387284 - RNA, 22 nt, Human
cccgggcccguugaggaugagg

SEQ ID NO: 2387285 - RNA, 17 nt, Human
cccgggcccucccuugg

SEQ ID NO: 2387286 - RNA, 18 nt, Human
cccgggcccucccuugga

SEQ ID NO: 2387287 - RNA, 19 nt, Human
cccgggcgcggccagcccc

SEQ ID NO: 2387288 - RNA, 21 nt, Human
cccgggcgcggccagccccgg

SEQ ID NO: 2387289 - RNA, 20 nt, Human
cccgggcucagggaccacag

SEQ ID NO: 2387290 - RNA, 21 nt, Human
cccgggcucagggaccacagc

SEQ ID NO: 2387291 - RNA, 14 nt, Human
cccgggcucugccu

SEQ ID NO: 2387292 - RNA, 15 nt, Human
cccgggcucugccuc

SEQ ID NO: 2387293 - RNA, 18 nt, Human
cccagagggcccaggcag

SEQ ID NO: 2387294 - RNA, 16 nt, Human
cccagagggcccaggc

SEQ ID NO: 2387295 - RNA, 15 nt, Human
cccagagggcccagg

SEQ ID NO: 2387296 - RNA, 14 nt, Human
cccagagggcccag

SEQ ID NO: 2387297 - RNA, 14 nt, Human
cccagagggccugc

SEQ ID NO: 2387298 - RNA, 21 nt, Human
cccgaggccuucucugaagga

SEQ ID NO: 2387299 - RNA, 15 nt, Human
cccagagggccugca

SEQ ID NO: 2387300 - RNA, 14 nt, Human
cccagaaccugucc

SEQ ID NO: 2387301 - RNA, 22 nt, Human
cccagaacacacuccaucagcu

SEQ ID NO: 2387302 - RNA, 18 nt, Human
cccagaacacacuccauc

SEQ ID NO: 2387303 - RNA, 14 nt, Human
cccagaacacacuc

SEQ ID NO: 2387304 - RNA, 17 nt, Human
cccagaaaggagacuag

SEQ ID NO: 2387305 - RNA, 15 nt, Human
cccagaaaggagacu

SEQ ID NO: 2387306 - RNA, 14 nt, Human
cccagaaaggagac

SEQ ID NO: 2387307 - RNA, 16 nt, Human
cccagaaaaggacaga

SEQ ID NO: 2387308 - RNA, 17 nt, Human
cccagaaaaggacagaa

SEQ ID NO: 2387309 - RNA, 15 nt, Human
cccagaaaaggacag

SEQ ID NO: 2387310 - RNA, 13 nt, Human
cccagagggccca

SEQ ID NO: 2387311 - RNA, 16 nt, Human
cccagaggcuggguga

SEQ ID NO: 2387312 - RNA, 23 nt, Human
cccagaaggcagggaaaggcucu

SEQ ID NO: 2387313 - RNA, 13 nt, Human
cccagaaggcagg

SEQ ID NO: 2387314 - RNA, 19 nt, Human
cccagaaggaccuccugag

SEQ ID NO: 2387315 - RNA, 19 nt, Human
cccagaacuggacucagga

SEQ ID NO: 2387316 - RNA, 17 nt, Human
cccagaaccuguccuug

SEQ ID NO: 2387317 - RNA, 15 nt, Human
cccagaaccuguccu

SEQ ID NO: 2387318 - RNA, 19 nt, Human
cccagaaccuguccuugca

SEQ ID NO: 2387319 - RNA, 20 nt, Human
cccagaacuggacucaggau

SEQ ID NO: 2387320 - RNA, 23 nt, Human
cccagagggcccaggcaggccac

SEQ ID NO: 2387321 - RNA, 22 nt, Human
cccagagggcccaggcaggcca

SEQ ID NO: 2387322 - RNA, 19 nt, Human
cccgaggcugcccacuaug

SEQ ID NO: 2387323 - RNA, 14 nt, Human
cccgaggcugccca

SEQ ID NO: 2387324 - RNA, 20 nt, Human
cccgagggaugaugccacac

SEQ ID NO: 2387325 - RNA, 22 nt, Human
cccgagggaugaugccacacca

SEQ ID NO: 2387326 - RNA, 13 nt, Human
cccgaguagcugg

SEQ ID NO: 2387327 - RNA, 14 nt, Human
cccgaguagcuggg

SEQ ID NO: 2387328 - RNA, 15 nt, Human
cccgaguagcuggga

SEQ ID NO: 2387329 - RNA, 16 nt, Human
cccgaguagcugggac

SEQ ID NO: 2387330 - RNA, 17 nt, Human
cccgaguagcugggacu

SEQ ID NO: 2387331 - RNA, 18 nt, Human
cccgaguagcugggacua

SEQ ID NO: 2387332 - RNA, 21 nt, Human
cccgaguagcugggacuacag

SEQ ID NO: 2387333 - RNA, 20 nt, Human
cccgucgaggggcucucagc

SEQ ID NO: 2387334 - RNA, 19 nt, Human
cccgucccauauccugccu

SEQ ID NO: 2387335 - RNA, 12 nt, Human
cccgucucagug

SEQ ID NO: 2387336 - RNA, 13 nt, Human
cccgucucagugu

SEQ ID NO: 2387337 - RNA, 12 nt, Human
cccgucucucuc

SEQ ID NO: 2387338 - RNA, 15 nt, Human
cccgucucucuccca

SEQ ID NO: 2387339 - RNA, 18 nt, Human
cccgucauguuccucaaa

SEQ ID NO: 2387340 - RNA, 22 nt, Human
cccgucagggcccaagucccug

SEQ ID NO: 2387341 - RNA, 19 nt, Human
cccgucaggacguugagga

SEQ ID NO: 2387342 - RNA, 17 nt, Human
cccgucagggcccaagu

SEQ ID NO: 2387343 - RNA, 13 nt, Human
cccguccugccug

SEQ ID NO: 2387344 - RNA, 18 nt, Human
cccguccacggcucuagg

SEQ ID NO: 2387345 - RNA, 16 nt, Human
cccgucccauauccug

SEQ ID NO: 2387346 - RNA, 14 nt, Human
cccguccugccugu

SEQ ID NO: 2387347 - RNA, 15 nt, Human
cccguccugccugug

SEQ ID NO: 2387348 - RNA, 16 nt, Human
cccguccugccugugg

SEQ ID NO: 2387349 - RNA, 17 nt, Human
cccguccugccuguggc

SEQ ID NO: 2387350 - RNA, 12 nt, Human
cccgucuucagc

SEQ ID NO: 2387351 - RNA, 17 nt, Human
cccguggccccagccug

SEQ ID NO: 2387352 - RNA, 21 nt, Human
cccgucugggguucagccccu

SEQ ID NO: 2387353 - RNA, 20 nt, Human
cccgucugggguucagcccc

SEQ ID NO: 2387354 - RNA, 23 nt, Human
cccgucugggguucagccccucc

SEQ ID NO: 2387355 - RNA, 22 nt, Human
cccgucucugguuccuccccuc

SEQ ID NO: 2387356 - RNA, 16 nt, Human
cccgucucucucccau

SEQ ID NO: 2387357 - RNA, 19 nt, Human
cccgucucucucccaugga

SEQ ID NO: 2387358 - RNA, 15 nt, Human
cccgugggguuccuc

SEQ ID NO: 2387359 - RNA, 18 nt, Human
cccguggccccagccugg

SEQ ID NO: 2387360 - RNA, 20 nt, Human
cccguggccccagccuggcc

SEQ ID NO: 2387361 - RNA, 21 nt, Human
cccguggccccagccuggccc

SEQ ID NO: 2387362 - RNA, 22 nt, Human
cccguggccccagccuggccca

SEQ ID NO: 2387363 - RNA, 23 nt, Human
cccguggccccagccuggcccag

SEQ ID NO: 2387364 - RNA, 20 nt, Human
cccggggcagcugccagaga

SEQ ID NO: 2387365 - RNA, 19 nt, Human
cccggggcagcugccagag

SEQ ID NO: 2387366 - RNA, 14 nt, Human
cccggggcagcugc

SEQ ID NO: 2387367 - RNA, 12 nt, Human
cccggggcagcu

SEQ ID NO: 2387368 - RNA, 17 nt, Human
cccggggacccugugac

SEQ ID NO: 2387369 - RNA, 18 nt, Human
cccggggacccugugaca

SEQ ID NO: 2387370 - RNA, 21 nt, Human
cccggggacccugugacaugg

SEQ ID NO: 2387371 - RNA, 22 nt, Human
cccggggaaaggcaagguccgg

SEQ ID NO: 2387372 - RNA, 17 nt, Human
cccgggcugccugggcu

SEQ ID NO: 2387373 - RNA, 23 nt, Human
cccgggcugccugggcuguuggc

SEQ ID NO: 2387374 - RNA, 15 nt, Human
cccggggacccugug

SEQ ID NO: 2387375 - RNA, 16 nt, Human
cccggggacccuguga

SEQ ID NO: 2387376 - RNA, 17 nt, Human
cccgggcucucugcugu

SEQ ID NO: 2387377 - RNA, 16 nt, Human
cccgggcucucugcug

SEQ ID NO: 2387378 - RNA, 12 nt, Human
cccgggcugccu

SEQ ID NO: 2387379 - RNA, 13 nt, Human
cccgggcugccug

SEQ ID NO: 2387380 - RNA, 15 nt, Human
cccgggcugccuggg

SEQ ID NO: 2387381 - RNA, 16 nt, Human
cccgggcugccugggc

SEQ ID NO: 2387382 - RNA, 16 nt, Human
cccgggcucugccucc

SEQ ID NO: 2387383 - RNA, 20 nt, Human
cccggguuuggcgggccaag

SEQ ID NO: 2387384 - RNA, 18 nt, Human
cccgggguccuguggcag

SEQ ID NO: 2387385 - RNA, 22 nt, Human
cccgggguccuguggcaggcag

SEQ ID NO: 2387386 - RNA, 21 nt, Human
cccggggcagcugccagagaa

SEQ ID NO: 2387387 - RNA, 17 nt, Human
cccgggguccuguggca

SEQ ID NO: 2387388 - RNA, 18 nt, Human
cccgucaccaucucaggc

SEQ ID NO: 2387389 - RNA, 17 nt, Human
cccgucaccaucucagg

SEQ ID NO: 2387390 - RNA, 14 nt, Human
cccguaaugcuuag

SEQ ID NO: 2387391 - RNA, 15 nt, Human
cccgucacagccuca

SEQ ID NO: 2387392 - RNA, 22 nt, Human
cccggucccuugagaccucagc

SEQ ID NO: 2387393 - RNA, 15 nt, Human
cccgguucuuccagu

SEQ ID NO: 2387394 - RNA, 22 nt, Human
cccggguuuggcgggccaagga

SEQ ID NO: 2387395 - RNA, 21 nt, Human
cccggggugcccacaggccgc

SEQ ID NO: 2387396 - RNA, 18 nt, Human
cccggugcccaagaauag

SEQ ID NO: 2387397 - RNA, 12 nt, Human
cccuaaugccug

SEQ ID NO: 2387398 - RNA, 15 nt, Human
cccuaaucuaugguc

SEQ ID NO: 2387399 - RNA, 17 nt, Human
cccuaaugcgcaggcug

SEQ ID NO: 2387400 - RNA, 22 nt, Human
cccuaaugcgcaggcuggcccu

SEQ ID NO: 2387401 - RNA, 21 nt, Human
cccuaaugcgcaggcuggccc

SEQ ID NO: 2387402 - RNA, 18 nt, Human
cccguguggccccuucac

SEQ ID NO: 2387403 - RNA, 17 nt, Human
cccguucugcuggccug

SEQ ID NO: 2387404 - RNA, 19 nt, Human
cccguucugcuggccugga

SEQ ID NO: 2387405 - RNA, 22 nt, Human
cccuaaucuauggucgggagac

SEQ ID NO: 2387406 - RNA, 22 nt, Human
cccguguggccccuucacuucu

SEQ ID NO: 2387407 - RNA, 17 nt, Human
cccguguggccccuuca

SEQ ID NO: 2387408 - RNA, 14 nt, Human
cccguguggccccu

SEQ ID NO: 2387409 - RNA, 12 nt, Human
cccguggucucu

SEQ ID NO: 2387410 - RNA, 19 nt, Human
cccguguccccggccucag

SEQ ID NO: 2387411 - RNA, 15 nt, Human
cccguguccugccug

SEQ ID NO: 2387412 - RNA, 20 nt, Human
cccuaccaccuccccagccu

SEQ ID NO: 2387413 - RNA, 19 nt, Human
cccuaccaccuccccagcc

SEQ ID NO: 2387414 - RNA, 17 nt, Human
cccuaccaccuccccag

SEQ ID NO: 2387415 - RNA, 14 nt, Human
cccuacauguauug

SEQ ID NO: 2387416 - RNA, 13 nt, Human
cccuacaccuuga

SEQ ID NO: 2387417 - RNA, 17 nt, Human
cccuaccacugucuucu

SEQ ID NO: 2387418 - RNA, 20 nt, Human
cccuaccacugucuucuuca

SEQ ID NO: 2387419 - RNA, 20 nt, Human
cccuaccagcgcccgcuggg

SEQ ID NO: 2387420 - RNA, 21 nt, Human
cccuaccagcgcccgcugggc

SEQ ID NO: 2387421 - RNA, 22 nt, Human
cccuaccagcgcccgcugggcu

SEQ ID NO: 2387422 - RNA, 23 nt, Human
cccuaccagcgcccgcugggcug

SEQ ID NO: 2387423 - RNA, 19 nt, Human
cccuaccccacaccaggcc

SEQ ID NO: 2387424 - RNA, 21 nt, Human
cccuaccccacaccaggccgu

SEQ ID NO: 2387425 - RNA, 20 nt, Human
cccuacaguugaaaaacagc

SEQ ID NO: 2387426 - RNA, 18 nt, Human
cccuacaccccuccccug

SEQ ID NO: 2387427 - RNA, 16 nt, Human
cccguugucucccugg

SEQ ID NO: 2387428 - RNA, 23 nt, Human
cccuaaugcgcaggcuggcccug

SEQ ID NO: 2387429 - RNA, 21 nt, Human
cccuaggucagcuugcugccc

SEQ ID NO: 2387430 - RNA, 19 nt, Human
cccuaggggacacuucccu

SEQ ID NO: 2387431 - RNA, 17 nt, Human
cccuaggggacacuucc

SEQ ID NO: 2387432 - RNA, 18 nt, Human
cccuaggggacacuuccc

SEQ ID NO: 2387433 - RNA, 14 nt, Human
cccuaggggacacu

SEQ ID NO: 2387434 - RNA, 21 nt, Human
cccuagcuuuagacccugggu

SEQ ID NO: 2387435 - RNA, 14 nt, Human
cccuaggagaccaa

SEQ ID NO: 2387436 - RNA, 22 nt, Human
cccuagcuuagagccucccuca

SEQ ID NO: 2387437 - RNA, 17 nt, Human
cccuagcuuuagacccu

SEQ ID NO: 2387438 - RNA, 18 nt, Human
cccuagcuuuagacccug

SEQ ID NO: 2387439 - RNA, 19 nt, Human
cccuagcuuuagacccugg

SEQ ID NO: 2387440 - RNA, 20 nt, Human
cccuagcuccacacccucuc

SEQ ID NO: 2387441 - RNA, 18 nt, Human
cccuagcccaggagagag

SEQ ID NO: 2387442 - RNA, 23 nt, Human
cccuaccugauuggugcaacccu

SEQ ID NO: 2387443 - RNA, 22 nt, Human
cccuaccugauuggugcaaccc

SEQ ID NO: 2387444 - RNA, 16 nt, Human
cccuaccucaggcagg

SEQ ID NO: 2387445 - RNA, 23 nt, Human
cccuacuauucaguggcgagaaa

SEQ ID NO: 2387446 - RNA, 19 nt, Human
cccuaccuguucagugucc

SEQ ID NO: 2387447 - RNA, 14 nt, Human
cccuaccugugccu

SEQ ID NO: 2387448 - RNA, 13 nt, Human
cccuaccucaggc

SEQ ID NO: 2387449 - RNA, 21 nt, Human
cccuaccgagucucuucucca

SEQ ID NO: 2387450 - RNA, 14 nt, Human
cccuaccccaccac

SEQ ID NO: 2387451 - RNA, 18 nt, Human
cccuaccgagucucuucu

SEQ ID NO: 2387452 - RNA, 14 nt, Human
cccugcacuguccu

SEQ ID NO: 2387453 - RNA, 13 nt, Human
ccuggaagggcua

SEQ ID NO: 2387454 - RNA, 24 nt, Human
ccuggaagggcuagaaccuguaga

SEQ ID NO: 2387455 - RNA, 16 nt, Human
ccuggacacucagacc

SEQ ID NO: 2387456 - RNA, 17 nt, Human
ccuggacacucagaccu

SEQ ID NO: 2387457 - RNA, 21 nt, Human
ccuggaagcuguguccuugca

SEQ ID NO: 2387458 - RNA, 12 nt, Human
ccuggaagggcu

SEQ ID NO: 2387459 - RNA, 11 nt, Human
ccuggaagggc

SEQ ID NO: 2387460 - RNA, 18 nt, Human
ccuggaauauauaaccag

SEQ ID NO: 2387461 - RNA, 22 nt, Human
ccuggagaguucaauggcugcu

SEQ ID NO: 2387462 - RNA, 23 nt, Human
ccuggagaguucaauggcugcug

SEQ ID NO: 2387463 - RNA, 21 nt, Human
ccuggagagcuagaaccugga

SEQ ID NO: 2387464 - RNA, 22 nt, Human
ccuggagagcuagaaccuggag

SEQ ID NO: 2387465 - RNA, 13 nt, Human
ccuggagauccuc

SEQ ID NO: 2387466 - RNA, 15 nt, Human
ccuggagauccuccu

SEQ ID NO: 2387467 - RNA, 14 nt, Human
ccuggagagccaga

SEQ ID NO: 2387468 - RNA, 21 nt, Human
ccuggagagccagaaccugga

SEQ ID NO: 2387469 - RNA, 22 nt, Human
ccuggagagccagaaccuggag

SEQ ID NO: 2387470 - RNA, 23 nt, Human
ccuggagagccagaaccuggagg

SEQ ID NO: 2387471 - RNA, 13 nt, Human
ccuggagagcuag

SEQ ID NO: 2387472 - RNA, 14 nt, Human
ccuggagagcuaga

SEQ ID NO: 2387473 - RNA, 19 nt, Human
ccuggagagcuagaaccua

SEQ ID NO: 2387474 - RNA, 21 nt, Human
ccuggagagcuagaaccuaga

SEQ ID NO: 2387475 - RNA, 19 nt, Human
ccuggagacuaaccccacc

SEQ ID NO: 2387476 - RNA, 18 nt, Human
ccuggagacugcccagcu

SEQ ID NO: 2387477 - RNA, 19 nt, Human
ccuggagacuuagggcacc

SEQ ID NO: 2387478 - RNA, 23 nt, Human
ccuggagacuuagggcaccaggg

SEQ ID NO: 2387479 - RNA, 23 nt, Human
ccuggcagaacugagcuccucug

SEQ ID NO: 2387480 - RNA, 20 nt, Human
ccuggcagaacugagcuccu

SEQ ID NO: 2387481 - RNA, 13 nt, Human
ccuggcagaaugc

SEQ ID NO: 2387482 - RNA, 18 nt, Human
ccuggcagaacugagcuc

SEQ ID NO: 2387483 - RNA, 17 nt, Human
ccuggcagaacugagcu

SEQ ID NO: 2387484 - RNA, 23 nt, Human
ccuggcacuaacguugagccccu

SEQ ID NO: 2387485 - RNA, 12 nt, Human
ccuggcagcccc

SEQ ID NO: 2387486 - RNA, 13 nt, Human
ccuggcagccccu

SEQ ID NO: 2387487 - RNA, 22 nt, Human
ccuggcacccggccccugcugg

SEQ ID NO: 2387488 - RNA, 16 nt, Human
ccuggagauccuccug

SEQ ID NO: 2387489 - RNA, 17 nt, Human
ccuggagauccuccugc

SEQ ID NO: 2387490 - RNA, 18 nt, Human
ccuggagauccuccugca

SEQ ID NO: 2387491 - RNA, 19 nt, Human
ccuggagauccuccugcag

SEQ ID NO: 2387492 - RNA, 22 nt, Human
ccuggcacgguggcucaggccu

SEQ ID NO: 2387493 - RNA, 18 nt, Human
ccuggcacgguggcucag

SEQ ID NO: 2387494 - RNA, 14 nt, Human
ccuggcagaacuga

SEQ ID NO: 2387495 - RNA, 23 nt, Human
ccuggcacccggccccugcuggu

SEQ ID NO: 2387496 - RNA, 13 nt, Human
ccuggcagcucug

SEQ ID NO: 2387497 - RNA, 12 nt, Human
ccuggcagcucu

SEQ ID NO: 2387498 - RNA, 21 nt, Human
ccuggcagccgugccuucagc

SEQ ID NO: 2387499 - RNA, 22 nt, Human
ccuggcagccgugccuucagcu

SEQ ID NO: 2387500 - RNA, 17 nt, Human
ccuggcaggaugacccu

SEQ ID NO: 2387501 - RNA, 23 nt, Human
ccuggcagcucuggacagcccca

SEQ ID NO: 2387502 - RNA, 21 nt, Human
ccuggcagcucuggacagccc

SEQ ID NO: 2387503 - RNA, 20 nt, Human
ccuggcagcucuggacagcc

SEQ ID NO: 2387504 - RNA, 19 nt, Human
ccuggcagcucuggacagc

SEQ ID NO: 2387505 - RNA, 17 nt, Human
ccuggcagcucuggaca

SEQ ID NO: 2387506 - RNA, 15 nt, Human
ccuggcagcucugga

SEQ ID NO: 2387507 - RNA, 14 nt, Human
ccuggcagcucugg

SEQ ID NO: 2387508 - RNA, 14 nt, Human
ccuggccagaggcu

SEQ ID NO: 2387509 - RNA, 13 nt, Human
ccuggccagaggc

SEQ ID NO: 2387510 - RNA, 12 nt, Human
ccuggccagagg

SEQ ID NO: 2387511 - RNA, 20 nt, Human
ccuggcuccaaacccucgag

SEQ ID NO: 2387512 - RNA, 15 nt, Human
ccuggccagaugcac

SEQ ID NO: 2387513 - RNA, 23 nt, Human
ccuggccagacacaggcccuccc

SEQ ID NO: 2387514 - RNA, 19 nt, Human
ccuggccagacacaggccc

SEQ ID NO: 2387515 - RNA, 18 nt, Human
ccuggccagacacaggcc

SEQ ID NO: 2387516 - RNA, 16 nt, Human
ccuggccagacacagg

SEQ ID NO: 2387517 - RNA, 15 nt, Human
ccuggccagacacag

SEQ ID NO: 2387518 - RNA, 14 nt, Human
ccuggccagacaca

SEQ ID NO: 2387519 - RNA, 13 nt, Human
ccuggccagacac

SEQ ID NO: 2387520 - RNA, 12 nt, Human
ccuggccagaca

SEQ ID NO: 2387521 - RNA, 23 nt, Human
ccuggcucccacaggcccuuccu

SEQ ID NO: 2387522 - RNA, 18 nt, Human
ccuggcugcagccugcgc

SEQ ID NO: 2387523 - RNA, 17 nt, Human
ccuggcucccacaggcc

SEQ ID NO: 2387524 - RNA, 16 nt, Human
ccuggcucccacaggc

SEQ ID NO: 2387525 - RNA, 18 nt, Human
ccuggcucccacaggcag

SEQ ID NO: 2387526 - RNA, 19 nt, Human
ccuggcucccacaggcagc

SEQ ID NO: 2387527 - RNA, 20 nt, Human
ccuggcucccacaggcagcu

SEQ ID NO: 2387528 - RNA, 15 nt, Human
ccuggcuccaggcca

SEQ ID NO: 2387529 - RNA, 22 nt, Human
ccuggcuccaaacccucgaggc

SEQ ID NO: 2387530 - RNA, 17 nt, Human
ccuggcuccaggccagg

SEQ ID NO: 2387531 - RNA, 16 nt, Human
ccuggcuccaggccag

SEQ ID NO: 2387532 - RNA, 19 nt, Human
ccuggcugcccuggcccug

SEQ ID NO: 2387533 - RNA, 17 nt, Human
ccuggcugcccuggccc

SEQ ID NO: 2387534 - RNA, 18 nt, Human
ccuggcugcccuggcccu

SEQ ID NO: 2387535 - RNA, 20 nt, Human
ccuggcugcccuggcccuga

SEQ ID NO: 2387536 - RNA, 21 nt, Human
ccuggcucccacaggcagcuu

SEQ ID NO: 2387537 - RNA, 24 nt, Human
ccuggcugagguuccucugccugc

SEQ ID NO: 2387538 - RNA, 12 nt, Human
ccuggcugcccu

SEQ ID NO: 2387539 - RNA, 13 nt, Human
ccuggcugcccug

SEQ ID NO: 2387540 - RNA, 14 nt, Human
ccuggcugcccugg

SEQ ID NO: 2387541 - RNA, 15 nt, Human
ccuggcugcccuggc

SEQ ID NO: 2387542 - RNA, 16 nt, Human
ccuggcugcccuggcc

SEQ ID NO: 2387543 - RNA, 13 nt, Human
ccuggcugcugcc

SEQ ID NO: 2387544 - RNA, 14 nt, Human
ccuggcugcugccc

SEQ ID NO: 2387545 - RNA, 15 nt, Human
ccuggcugcugcccc

SEQ ID NO: 2387546 - RNA, 16 nt, Human
ccuggcugcugccccc

SEQ ID NO: 2387547 - RNA, 17 nt, Human
ccuggcugcugccccca

SEQ ID NO: 2387548 - RNA, 18 nt, Human
ccuggcugcugcccccac

SEQ ID NO: 2387549 - RNA, 20 nt, Human
ccuggcugcugcccccaccc

SEQ ID NO: 2387550 - RNA, 21 nt, Human
ccuggcugcugcccccacccc

SEQ ID NO: 2387551 - RNA, 22 nt, Human
ccuggcugcugcccccaccccg

SEQ ID NO: 2387552 - RNA, 14 nt, Human
ccuggucagcccaa

SEQ ID NO: 2387553 - RNA, 12 nt, Human
ccuggucagccc

SEQ ID NO: 2387554 - RNA, 20 nt, Human
ccuggucacagggcaugccc

SEQ ID NO: 2387555 - RNA, 22 nt, Human
ccuggucacaggacucugccuc

SEQ ID NO: 2387556 - RNA, 23 nt, Human
ccuggucacaggacucugccucc

SEQ ID NO: 2387557 - RNA, 21 nt, Human
ccuggucacaggacucugccu

SEQ ID NO: 2387558 - RNA, 20 nt, Human
ccugguauauccaaaagcuu

SEQ ID NO: 2387559 - RNA, 18 nt, Human
ccugguauauccaaaagc

SEQ ID NO: 2387560 - RNA, 17 nt, Human
ccuggugaccccuuuuc

SEQ ID NO: 2387561 - RNA, 14 nt, Human
ccuggugaccccuu

SEQ ID NO: 2387562 - RNA, 21 nt, Human
ccugguccagggaagcuggcc

SEQ ID NO: 2387563 - RNA, 14 nt, Human
ccugguccagggaa

SEQ ID NO: 2387564 - RNA, 22 nt, Human
ccugguccagggaagcuggccg

SEQ ID NO: 2387565 - RNA, 10 nt, Human
ccuggugccc

SEQ ID NO: 2387566 - RNA, 15 nt, Human
ccugguacucaagcc

SEQ ID NO: 2387567 - RNA, 17 nt, Human
ccugguacccuccuggc

SEQ ID NO: 2387568 - RNA, 16 nt, Human
ccugguacucaagccc

SEQ ID NO: 2387569 - RNA, 19 nt, Human
ccugguacucaagcccgcg

SEQ ID NO: 2387570 - RNA, 19 nt, Human
ccugguaggagugugugau

SEQ ID NO: 2387571 - RNA, 13 nt, Human
ccugguagggcag

SEQ ID NO: 2387572 - RNA, 17 nt, Human
ccugguagaauagauau

SEQ ID NO: 2387573 - RNA, 14 nt, Human
ccugguacccagcc

SEQ ID NO: 2387574 - RNA, 15 nt, Human
ccugguacccagcca

SEQ ID NO: 2387575 - RNA, 17 nt, Human
ccugguacccagccauc

SEQ ID NO: 2387576 - RNA, 13 nt, Human
ccugguacccagc

SEQ ID NO: 2387577 - RNA, 14 nt, Human
ccugguacccuccu

SEQ ID NO: 2387578 - RNA, 15 nt, Human
ccugguacccuccug

SEQ ID NO: 2387579 - RNA, 18 nt, Human
ccugguacccagccaucu

SEQ ID NO: 2387580 - RNA, 19 nt, Human
ccugguacccagccaucug

SEQ ID NO: 2387581 - RNA, 20 nt, Human
ccugguacccagccaucugc

SEQ ID NO: 2387582 - RNA, 22 nt, Human
ccugguacccagccaucugccc

SEQ ID NO: 2387583 - RNA, 17 nt, Human
ccuggguggggcugcuc

SEQ ID NO: 2387584 - RNA, 16 nt, Human
ccuggguggggcugcu

SEQ ID NO: 2387585 - RNA, 15 nt, Human
ccuggguggggcugc

SEQ ID NO: 2387586 - RNA, 15 nt, Human
ccugggugggcucug

SEQ ID NO: 2387587 - RNA, 16 nt, Human
ccugggugggcucugu

SEQ ID NO: 2387588 - RNA, 17 nt, Human
ccugggugggcucugug

SEQ ID NO: 2387589 - RNA, 16 nt, Human
ccugggugcuggcugc

SEQ ID NO: 2387590 - RNA, 17 nt, Human
ccuggguucccuuuccu

SEQ ID NO: 2387591 - RNA, 16 nt, Human
ccuggguuuaagggga

SEQ ID NO: 2387592 - RNA, 19 nt, Human
ccuggguuuuguauucucu

SEQ ID NO: 2387593 - RNA, 23 nt, Human
ccuggguuuuguauucucugagc

SEQ ID NO: 2387594 - RNA, 22 nt, Human
ccuggguuuuguauucucugag

SEQ ID NO: 2387595 - RNA, 21 nt, Human
ccuggguuuuguauucucuga

SEQ ID NO: 2387596 - RNA, 20 nt, Human
ccuggguuuuguauucucug

SEQ ID NO: 2387597 - RNA, 24 nt, Human
ccuggcugggacguggcucagcca

SEQ ID NO: 2387598 - RNA, 22 nt, Human
ccuggcugggacguggcucagc

SEQ ID NO: 2387599 - RNA, 21 nt, Human
ccuggcugggacguggcucag

SEQ ID NO: 2387600 - RNA, 20 nt, Human
ccuggcugggacguggcuca

SEQ ID NO: 2387601 - RNA, 16 nt, Human
ccuggcuucuggagcc

SEQ ID NO: 2387602 - RNA, 15 nt, Human
ccuggcuucuggagc

SEQ ID NO: 2387603 - RNA, 14 nt, Human
ccuggcuucuggag

SEQ ID NO: 2387604 - RNA, 13 nt, Human
ccuggcuucugga

SEQ ID NO: 2387605 - RNA, 13 nt, Human
ccuggcuucuccu

SEQ ID NO: 2387606 - RNA, 20 nt, Human
ccuggcuuuucacugcuggc

SEQ ID NO: 2387607 - RNA, 18 nt, Human
ccuggcuuuucacugcug

SEQ ID NO: 2387608 - RNA, 21 nt, Human
ccuggcuuuucacugcuggcu

SEQ ID NO: 2387609 - RNA, 22 nt, Human
ccuggcuuuucacugcuggcug

SEQ ID NO: 2387610 - RNA, 23 nt, Human
ccuggcuuuucacugcuggcugc

SEQ ID NO: 2387611 - RNA, 24 nt, Human
ccuggcuuuucacugcuggcugcc

SEQ ID NO: 2387612 - RNA, 15 nt, Human
ccugggcauugcuuu

SEQ ID NO: 2387613 - RNA, 14 nt, Human
ccugggcauugcuu

SEQ ID NO: 2387614 - RNA, 23 nt, Human
ccugggcauauccaccaccuccc

SEQ ID NO: 2387615 - RNA, 16 nt, Human
ccugggcauccuucuu

SEQ ID NO: 2387616 - RNA, 23 nt, Human
ccugggccacagggcgagacucc

SEQ ID NO: 2387617 - RNA, 17 nt, Human
ccuggcuucuggagccc

SEQ ID NO: 2387618 - RNA, 17 nt, Human
ccugggcauacuaauaa

SEQ ID NO: 2387619 - RNA, 22 nt, Human
ccugggcauauccaccaccucc

SEQ ID NO: 2387620 - RNA, 14 nt, Human
ccugggccccacca

SEQ ID NO: 2387621 - RNA, 13 nt, Human
ccugggccccacc

SEQ ID NO: 2387622 - RNA, 17 nt, Human
ccugggcauugcuuucc

SEQ ID NO: 2387623 - RNA, 16 nt, Human
ccugggcauugcuuuc

SEQ ID NO: 2387624 - RNA, 15 nt, Human
ccugggccccaccac

SEQ ID NO: 2387625 - RNA, 14 nt, Human
ccugggggugccag

SEQ ID NO: 2387626 - RNA, 18 nt, Human
ccuggggguucuuucuuc

SEQ ID NO: 2387627 - RNA, 16 nt, Human
ccugggggugccagga

SEQ ID NO: 2387628 - RNA, 15 nt, Human
ccugggggugccagg

SEQ ID NO: 2387629 - RNA, 23 nt, Human
ccugggugcuggcugcccagacc

SEQ ID NO: 2387630 - RNA, 15 nt, Human
ccugggugacauuug

SEQ ID NO: 2387631 - RNA, 13 nt, Human
ccugggugacauu

SEQ ID NO: 2387632 - RNA, 14 nt, Human
ccugggugacauuu

SEQ ID NO: 2387633 - RNA, 21 nt, Human
ccugggucugugucucuuuuc

SEQ ID NO: 2387634 - RNA, 17 nt, Human
ccugggucugugucucu

SEQ ID NO: 2387635 - RNA, 16 nt, Human
ccugggucugugucuc

SEQ ID NO: 2387636 - RNA, 15 nt, Human
ccugggucugugucu

SEQ ID NO: 2387637 - RNA, 14 nt, Human
ccugggucuguguc

SEQ ID NO: 2387638 - RNA, 18 nt, Human
ccugggucuaagggguug

SEQ ID NO: 2387639 - RNA, 14 nt, Human
ccuggguccuuuuc

SEQ ID NO: 2387640 - RNA, 21 nt, Human
ccuggggguucuuucuuccuc

SEQ ID NO: 2387641 - RNA, 22 nt, Human
ccuggggguucuuucuuccucu

SEQ ID NO: 2387642 - RNA, 23 nt, Human
ccuggggguucuuucuuccucug

SEQ ID NO: 2387643 - RNA, 21 nt, Human
ccugggguauaaaacuuuccu

SEQ ID NO: 2387644 - RNA, 22 nt, Human
ccugggguaccaagagacuccu

SEQ ID NO: 2387645 - RNA, 22 nt, Human
ccugcgcccaguccuuccaccu

SEQ ID NO: 2387646 - RNA, 14 nt, Human
ccugcgcgcaugug

SEQ ID NO: 2387647 - RNA, 20 nt, Human
ccugcgcgcaugugcgcaca

SEQ ID NO: 2387648 - RNA, 16 nt, Human
ccugcggagugaagag

SEQ ID NO: 2387649 - RNA, 17 nt, Human
ccugcggagugaagagg

SEQ ID NO: 2387650 - RNA, 18 nt, Human
ccugcggagugaagaggg

SEQ ID NO: 2387651 - RNA, 19 nt, Human
ccugcggagugaagagggg

SEQ ID NO: 2387652 - RNA, 20 nt, Human
ccugcggagugaagaggggc

SEQ ID NO: 2387653 - RNA, 22 nt, Human
ccugcggagugaagaggggcag

SEQ ID NO: 2387654 - RNA, 19 nt, Human
ccugcgggcuuuuccccgg

SEQ ID NO: 2387655 - RNA, 16 nt, Human
ccugcggcugcugugu

SEQ ID NO: 2387656 - RNA, 20 nt, Human
ccugcggcugcugugugccu

SEQ ID NO: 2387657 - RNA, 17 nt, Human
ccugcggccugcuggag

SEQ ID NO: 2387658 - RNA, 23 nt, Human
ccugcggagugaagaggggcagc

SEQ ID NO: 2387659 - RNA, 16 nt, Human
ccugcggccugcugga

SEQ ID NO: 2387660 - RNA, 22 nt, Human
ccugcgggucacaggagggagg

SEQ ID NO: 2387661 - RNA, 18 nt, Human
ccugcgggucacaggagg

SEQ ID NO: 2387662 - RNA, 21 nt, Human
ccugcgggcuuuuccccgguc

SEQ ID NO: 2387663 - RNA, 21 nt, Human
ccugcggcugcugugugccuu

SEQ ID NO: 2387664 - RNA, 23 nt, Human
ccugcgggugaacaaagcagcca

SEQ ID NO: 2387665 - RNA, 24 nt, Human
ccugcgggugaacaaagcagccac

SEQ ID NO: 2387666 - RNA, 20 nt, Human
ccugcggguggggcuugggg

SEQ ID NO: 2387667 - RNA, 23 nt, Human
ccugcgguagaugggagggaggc

SEQ ID NO: 2387668 - RNA, 21 nt, Human
ccugcggguggggcuuggggc

SEQ ID NO: 2387669 - RNA, 24 nt, Human
ccugcggguggggcuuggggcuca

SEQ ID NO: 2387670 - RNA, 16 nt, Human
ccugcggugcuaucuc

SEQ ID NO: 2387671 - RNA, 17 nt, Human
ccugcggugcuaucucc

SEQ ID NO: 2387672 - RNA, 20 nt, Human
ccugcgcccaccccgcucug

SEQ ID NO: 2387673 - RNA, 21 nt, Human
ccugcgcccaccccgcucugc

SEQ ID NO: 2387674 - RNA, 22 nt, Human
ccugcgcccaccccgcucugca

SEQ ID NO: 2387675 - RNA, 18 nt, Human
ccugcgcccaguccuucc

SEQ ID NO: 2387676 - RNA, 20 nt, Human
ccugcgcccaguccuuccac

SEQ ID NO: 2387677 - RNA, 18 nt, Human
ccugcgauuuugccugug

SEQ ID NO: 2387678 - RNA, 19 nt, Human
ccugcgcccaccccgcucu

SEQ ID NO: 2387679 - RNA, 20 nt, Human
ccugcgccaccgcccagaga

SEQ ID NO: 2387680 - RNA, 17 nt, Human
ccugcgaaggggcccug

SEQ ID NO: 2387681 - RNA, 15 nt, Human
ccugcgaaggggccc

SEQ ID NO: 2387682 - RNA, 20 nt, Human
ccugcgaaggggcccugguc

SEQ ID NO: 2387683 - RNA, 19 nt, Human
ccugcgaaggggcccuggu

SEQ ID NO: 2387684 - RNA, 15 nt, Human
ccugccuucuguccu

SEQ ID NO: 2387685 - RNA, 16 nt, Human
ccugccuucuguccug

SEQ ID NO: 2387686 - RNA, 19 nt, Human
ccugccuucuguccuggug

SEQ ID NO: 2387687 - RNA, 21 nt, Human
ccugccuucuguccugguguc

SEQ ID NO: 2387688 - RNA, 18 nt, Human
ccugccuucuucggggaa

SEQ ID NO: 2387689 - RNA, 22 nt, Human
ccugccuucuucuuuuugcugu

SEQ ID NO: 2387690 - RNA, 13 nt, Human
ccugccuugaagc

SEQ ID NO: 2387691 - RNA, 22 nt, Human
ccugccuuccuccugggcccuc

SEQ ID NO: 2387692 - RNA, 17 nt, Human
ccugccuuccuccuggg

SEQ ID NO: 2387693 - RNA, 16 nt, Human
ccugccuuccuccugg

SEQ ID NO: 2387694 - RNA, 14 nt, Human
ccugccuuccuccu

SEQ ID NO: 2387695 - RNA, 21 nt, Human
ccugccuugaagccacugaag

SEQ ID NO: 2387696 - RNA, 19 nt, Human
ccugccuugaagccacuga

SEQ ID NO: 2387697 - RNA, 17 nt, Human
ccugccuugaagccacu

SEQ ID NO: 2387698 - RNA, 16 nt, Human
ccugccuugaagccac

SEQ ID NO: 2387699 - RNA, 23 nt, Human
ccugccuugaagccacugaagcu

SEQ ID NO: 2387700 - RNA, 22 nt, Human
ccugccuugaagccacugaagc

SEQ ID NO: 2387701 - RNA, 23 nt, Human
ccugccuucuucuuuuugcuguu

SEQ ID NO: 2387702 - RNA, 22 nt, Human
ccugccuggccaggcagaucug

SEQ ID NO: 2387703 - RNA, 18 nt, Human
ccugccuggccaggcaga

SEQ ID NO: 2387704 - RNA, 23 nt, Human
ccugccuggccaggcagaucugu

SEQ ID NO: 2387705 - RNA, 18 nt, Human
ccugccugguccucacac

SEQ ID NO: 2387706 - RNA, 17 nt, Human
ccugccuggcccccugu

SEQ ID NO: 2387707 - RNA, 23 nt, Human
ccugccuggggcgggccccucau

SEQ ID NO: 2387708 - RNA, 19 nt, Human
ccugccuuagagccaggca

SEQ ID NO: 2387709 - RNA, 16 nt, Human
ccugccuuaucuugca

SEQ ID NO: 2387710 - RNA, 20 nt, Human
ccugccuuagagccaggcac

SEQ ID NO: 2387711 - RNA, 21 nt, Human
ccugccuuagagccaggcaca

SEQ ID NO: 2387712 - RNA, 23 nt, Human
ccugccuguugggccaggagccu

SEQ ID NO: 2387713 - RNA, 14 nt, Human
ccugccuggccagg

SEQ ID NO: 2387714 - RNA, 13 nt, Human
ccugccuggccag

SEQ ID NO: 2387715 - RNA, 12 nt, Human
ccugccuggcca

SEQ ID NO: 2387716 - RNA, 11 nt, Human
ccugccuggcc

SEQ ID NO: 2387717 - RNA, 14 nt, Human
ccugccuggcaggc

SEQ ID NO: 2387718 - RNA, 11 nt, Human
ccugccucagc

SEQ ID NO: 2387719 - RNA, 21 nt, Human
ccugccucacagcuggccguc

SEQ ID NO: 2387720 - RNA, 23 nt, Human
ccugccccgucaccaucucaggc

SEQ ID NO: 2387721 - RNA, 22 nt, Human
ccugccccgucaccaucucagg

SEQ ID NO: 2387722 - RNA, 20 nt, Human
ccugccccgcccccaguccc

SEQ ID NO: 2387723 - RNA, 22 nt, Human
ccugccccgcccagcugcaccu

SEQ ID NO: 2387724 - RNA, 13 nt, Human
ccugccccgcccc

SEQ ID NO: 2387725 - RNA, 18 nt, Human
ccugccccgcccccaguc

SEQ ID NO: 2387726 - RNA, 16 nt, Human
ccugccccgcccagcu

SEQ ID NO: 2387727 - RNA, 23 nt, Human
ccugcccccuucucccacacugc

SEQ ID NO: 2387728 - RNA, 22 nt, Human
ccugcccccuucucccacacug

SEQ ID NO: 2387729 - RNA, 21 nt, Human
ccugcccccuucucccacacu

SEQ ID NO: 2387730 - RNA, 20 nt, Human
ccugcccccuucucccacac

SEQ ID NO: 2387731 - RNA, 19 nt, Human
ccugcccccuucucccaca

SEQ ID NO: 2387732 - RNA, 18 nt, Human
ccugcccccuucucccac

SEQ ID NO: 2387733 - RNA, 17 nt, Human
ccugcccccuucuccca

SEQ ID NO: 2387734 - RNA, 18 nt, Human
ccugcccccagccccggg

SEQ ID NO: 2387735 - RNA, 20 nt, Human
ccugcccccaggacugggcc

SEQ ID NO: 2387736 - RNA, 22 nt, Human
ccugcccccaggacugggccac

SEQ ID NO: 2387737 - RNA, 16 nt, Human
ccugcccccaggacug

SEQ ID NO: 2387738 - RNA, 17 nt, Human
ccugcccccaggacugg

SEQ ID NO: 2387739 - RNA, 18 nt, Human
ccugcccccaggacuggg

SEQ ID NO: 2387740 - RNA, 19 nt, Human
ccugcccccaggacugggc

SEQ ID NO: 2387741 - RNA, 21 nt, Human
ccugccuaggaauucccagcc

SEQ ID NO: 2387742 - RNA, 23 nt, Human
ccugccguggacuuggggucaga

SEQ ID NO: 2387743 - RNA, 20 nt, Human
ccugccuaagggagaguggu

SEQ ID NO: 2387744 - RNA, 23 nt, Human
ccugccgguaaacacgccugcaa

SEQ ID NO: 2387745 - RNA, 22 nt, Human
ccugccgguaaacacgccugca

SEQ ID NO: 2387746 - RNA, 21 nt, Human
ccugccgguaaacacgccugc

SEQ ID NO: 2387747 - RNA, 20 nt, Human
ccugccgguaaacacgccug

SEQ ID NO: 2387748 - RNA, 15 nt, Human
ccugccggccggggc

SEQ ID NO: 2387749 - RNA, 15 nt, Human
ccugccccucccaga

SEQ ID NO: 2387750 - RNA, 14 nt, Human
ccugccccucccag

SEQ ID NO: 2387751 - RNA, 15 nt, Human
ccugccgguaaacac

SEQ ID NO: 2387752 - RNA, 22 nt, Human
ccugccccucaacucuccucca

SEQ ID NO: 2387753 - RNA, 20 nt, Human
ccugcguccuccucaccuca

SEQ ID NO: 2387754 - RNA, 22 nt, Human
ccugcuauuacuaaggaguaau

SEQ ID NO: 2387755 - RNA, 22 nt, Human
ccugcggugcuaucucccccag

SEQ ID NO: 2387756 - RNA, 18 nt, Human
ccugcguccuccucaccu

SEQ ID NO: 2387757 - RNA, 19 nt, Human
ccugcguccuccucaccuc

SEQ ID NO: 2387758 - RNA, 13 nt, Human
ccugcguccuccu

SEQ ID NO: 2387759 - RNA, 15 nt, Human
ccugcguccuccuca

SEQ ID NO: 2387760 - RNA, 16 nt, Human
ccugcguccuccucac

SEQ ID NO: 2387761 - RNA, 17 nt, Human
ccugcguccuccucacc

SEQ ID NO: 2387762 - RNA, 21 nt, Human
ccugcucuccgaccagacacc

SEQ ID NO: 2387763 - RNA, 21 nt, Human
ccugcucgaugcucacagggc

SEQ ID NO: 2387764 - RNA, 18 nt, Human
ccugcuccuucccaggag

SEQ ID NO: 2387765 - RNA, 22 nt, Human
ccugcuccucccuggcugcccu

SEQ ID NO: 2387766 - RNA, 15 nt, Human
ccugcuccagaccug

SEQ ID NO: 2387767 - RNA, 14 nt, Human
ccugcuccagaccu

SEQ ID NO: 2387768 - RNA, 13 nt, Human
ccugcuccagacc

SEQ ID NO: 2387769 - RNA, 12 nt, Human
ccugcuccagac

SEQ ID NO: 2387770 - RNA, 11 nt, Human
ccugcuccaga

SEQ ID NO: 2387771 - RNA, 14 nt, Human
ccugcuccacagug

SEQ ID NO: 2387772 - RNA, 15 nt, Human
ccugcuccacagugu

SEQ ID NO: 2387773 - RNA, 12 nt, Human
ccugcuccacag

SEQ ID NO: 2387774 - RNA, 19 nt, Human
ccugcuccacagccauccc

SEQ ID NO: 2387775 - RNA, 20 nt, Human
ccugcuccacagccauccca

SEQ ID NO: 2387776 - RNA, 13 nt, Human
ccugcuccacagu

SEQ ID NO: 2387777 - RNA, 22 nt, Human
ccugcucuccgaccagacaccu

SEQ ID NO: 2387778 - RNA, 22 nt, Human
ccugcucuccaagucucagugg

SEQ ID NO: 2387779 - RNA, 23 nt, Human
ccugcucuccaagucucaguggc

SEQ ID NO: 2387780 - RNA, 16 nt, Human
ccugcucuccucuugc

SEQ ID NO: 2387781 - RNA, 18 nt, Human
ccugcucuccucuugcca

SEQ ID NO: 2387782 - RNA, 19 nt, Human
ccugcucuccucuugccac

SEQ ID NO: 2387783 - RNA, 21 nt, Human
ccugcucuccucuugccacug

SEQ ID NO: 2387784 - RNA, 20 nt, Human
ccugcugagagacccaagga

SEQ ID NO: 2387785 - RNA, 21 nt, Human
ccugcugagagacccaaggag

SEQ ID NO: 2387786 - RNA, 17 nt, Human
ccugcugagagacccaa

SEQ ID NO: 2387787 - RNA, 22 nt, Human
ccugcucuccucuugccacugc

SEQ ID NO: 2387788 - RNA, 23 nt, Human
ccugcugaaugauuuccaaagag

SEQ ID NO: 2387789 - RNA, 21 nt, Human
ccugcugaagguggggauugc

SEQ ID NO: 2387790 - RNA, 22 nt, Human
ccuggaaauaucaguuacucag

SEQ ID NO: 2387791 - RNA, 21 nt, Human
ccugcuuuucacugcugcaag

SEQ ID NO: 2387792 - RNA, 15 nt, Human
ccugcuuuucacugc

SEQ ID NO: 2387793 - RNA, 21 nt, Human
ccugcuuccaggaaacuccac

SEQ ID NO: 2387794 - RNA, 19 nt, Human
ccugcuuuucacugcugca

SEQ ID NO: 2387795 - RNA, 23 nt, Human
ccuggaaaucaggguuaguauug

SEQ ID NO: 2387796 - RNA, 17 nt, Human
ccuggaacuuggggagu

SEQ ID NO: 2387797 - RNA, 16 nt, Human
ccuggaacuuggggag

SEQ ID NO: 2387798 - RNA, 13 nt, Human
ccuggaacuuggg

SEQ ID NO: 2387799 - RNA, 20 nt, Human
ccuggaacugucucucauga

SEQ ID NO: 2387800 - RNA, 18 nt, Human
ccuggaacugucucucau

SEQ ID NO: 2387801 - RNA, 22 nt, Human
ccuggaacaucaucaaggcacu

SEQ ID NO: 2387802 - RNA, 15 nt, Human
ccuggaagacagaga

SEQ ID NO: 2387803 - RNA, 22 nt, Human
ccuggaagacagagaccuccug

SEQ ID NO: 2387804 - RNA, 12 nt, Human
ccuggaagacag

SEQ ID NO: 2387805 - RNA, 13 nt, Human
ccuggaagacaga

SEQ ID NO: 2387806 - RNA, 14 nt, Human
ccuggaagacagag

SEQ ID NO: 2387807 - RNA, 20 nt, Human
ccuggaagcuguguccuugc

SEQ ID NO: 2387808 - RNA, 18 nt, Human
ccuggaagcuguguccuu

SEQ ID NO: 2387809 - RNA, 17 nt, Human
ccuggaagcuguguccu

SEQ ID NO: 2387810 - RNA, 23 nt, Human
ccuggaagcuguguccuugcacc

SEQ ID NO: 2387811 - RNA, 13 nt, Human
ccuggaagcugug

SEQ ID NO: 2387812 - RNA, 17 nt, Human
ccuggaagccagcuuuc

SEQ ID NO: 2387813 - RNA, 15 nt, Human
ccuggaagccagcuu

SEQ ID NO: 2387814 - RNA, 14 nt, Human
ccugcuucaaauau

SEQ ID NO: 2387815 - RNA, 23 nt, Human
ccugcugugauuccacuacaccu

SEQ ID NO: 2387816 - RNA, 14 nt, Human
ccugcuguguuccc

SEQ ID NO: 2387817 - RNA, 21 nt, Human
ccugcugagggaccagccaag

SEQ ID NO: 2387818 - RNA, 15 nt, Human
ccugcuguccccucu

SEQ ID NO: 2387819 - RNA, 19 nt, Human
ccugcuguccccucuugcc

SEQ ID NO: 2387820 - RNA, 22 nt, Human
ccugcuguccccucuugcccca

SEQ ID NO: 2387821 - RNA, 20 nt, Human
ccugcugugauuccacuaca

SEQ ID NO: 2387822 - RNA, 19 nt, Human
ccugcugagggaccagcca

SEQ ID NO: 2387823 - RNA, 17 nt, Human
ccugcugagggaccagc

SEQ ID NO: 2387824 - RNA, 15 nt, Human
ccugcugagucccag

SEQ ID NO: 2387825 - RNA, 20 nt, Human
ccugcuuugggcugcccugg

SEQ ID NO: 2387826 - RNA, 19 nt, Human
ccugcuuugggcugcccug

SEQ ID NO: 2387827 - RNA, 14 nt, Human
ccugcuucaugcuc

SEQ ID NO: 2387828 - RNA, 16 nt, Human
ccugcuucaugcucag

SEQ ID NO: 2387829 - RNA, 17 nt, Human
ccugcuucaugcucagc

SEQ ID NO: 2387830 - RNA, 18 nt, Human
ccugcuuccaccucaccc

SEQ ID NO: 2387831 - RNA, 19 nt, Human
ccugcuuccaccucacccc

SEQ ID NO: 2387832 - RNA, 20 nt, Human
ccugcuuccaccucacccca

SEQ ID NO: 2387833 - RNA, 21 nt, Human
ccugcuuugggcugcccuggu

SEQ ID NO: 2387834 - RNA, 22 nt, Human
ccugcuuugggcugcccuggug

SEQ ID NO: 2387835 - RNA, 23 nt, Human
ccugcuuugggcugcccuggugc

SEQ ID NO: 2387836 - RNA, 21 nt, Human
ccugcuuccaccucaccccac

SEQ ID NO: 2387837 - RNA, 14 nt, Human
ccugcuuccaggaa

SEQ ID NO: 2387838 - RNA, 16 nt, Human
ccugcaggccaggcca

SEQ ID NO: 2387839 - RNA, 15 nt, Human
ccugcagggccaagc

SEQ ID NO: 2387840 - RNA, 19 nt, Human
ccugcaggguggugcuggg

SEQ ID NO: 2387841 - RNA, 20 nt, Human
ccugcaggguggugcuggga

SEQ ID NO: 2387842 - RNA, 21 nt, Human
ccugcaggguggugcugggac

SEQ ID NO: 2387843 - RNA, 22 nt, Human
ccugcaggguggugcugggacu

SEQ ID NO: 2387844 - RNA, 23 nt, Human
ccugcaggguggugcugggacug

SEQ ID NO: 2387845 - RNA, 15 nt, Human
ccugcaggugcugcu

SEQ ID NO: 2387846 - RNA, 17 nt, Human
ccugcaggugcugcugc

SEQ ID NO: 2387847 - RNA, 18 nt, Human
ccugcaggugcugcugcg

SEQ ID NO: 2387848 - RNA, 18 nt, Human
ccugcaguacuuuaccuc

SEQ ID NO: 2387849 - RNA, 20 nt, Human
ccugcaggugcugcugcgug

SEQ ID NO: 2387850 - RNA, 16 nt, Human
ccugcagguugggcca

SEQ ID NO: 2387851 - RNA, 17 nt, Human
ccugcagguugggccau

SEQ ID NO: 2387852 - RNA, 21 nt, Human
ccugcagguugggccauacug

SEQ ID NO: 2387853 - RNA, 15 nt, Human
ccugcagucaucuug

SEQ ID NO: 2387854 - RNA, 16 nt, Human
ccugcagucuggcuga

SEQ ID NO: 2387855 - RNA, 15 nt, Human
ccugcagucacagcu

SEQ ID NO: 2387856 - RNA, 20 nt, Human
ccugcaguacuuuaccuccu

SEQ ID NO: 2387857 - RNA, 18 nt, Human
ccugcaggccaggccagc

SEQ ID NO: 2387858 - RNA, 12 nt, Human
ccugcaggccag

SEQ ID NO: 2387859 - RNA, 22 nt, Human
ccugcaggccaagagcagaggc

SEQ ID NO: 2387860 - RNA, 21 nt, Human
ccugcaggccaagagcagagg

SEQ ID NO: 2387861 - RNA, 16 nt, Human
ccugcaggccaagagc

SEQ ID NO: 2387862 - RNA, 21 nt, Human
ccugcacuaauuugauguuua

SEQ ID NO: 2387863 - RNA, 19 nt, Human
ccugcacgucaugggaggg

SEQ ID NO: 2387864 - RNA, 23 nt, Human
ccugcacgucaugggagggggcu

SEQ ID NO: 2387865 - RNA, 17 nt, Human
ccugcacggugggccuu

SEQ ID NO: 2387866 - RNA, 18 nt, Human
ccugcacggugggccuug

SEQ ID NO: 2387867 - RNA, 19 nt, Human
ccugcacggugggccuugc

SEQ ID NO: 2387868 - RNA, 20 nt, Human
ccugcacggugggccuugcu

SEQ ID NO: 2387869 - RNA, 21 nt, Human
ccugcacggugggccuugcug

SEQ ID NO: 2387870 - RNA, 22 nt, Human
ccugcacggugggccuugcugg

SEQ ID NO: 2387871 - RNA, 23 nt, Human
ccugcacggugggccuugcuggg

SEQ ID NO: 2387872 - RNA, 18 nt, Human
ccugcacgucaugggagg

SEQ ID NO: 2387873 - RNA, 21 nt, Human
ccugcaccuccccccacugca

SEQ ID NO: 2387874 - RNA, 20 nt, Human
ccugcaaugaagucucugaa

SEQ ID NO: 2387875 - RNA, 22 nt, Human
ccugcaccuccccccacugcag

SEQ ID NO: 2387876 - RNA, 14 nt, Human
ccugcaccugugca

SEQ ID NO: 2387877 - RNA, 15 nt, Human
ccugcaccugugcag

SEQ ID NO: 2387878 - RNA, 16 nt, Human
ccugcacggugggccu

SEQ ID NO: 2387879 - RNA, 19 nt, Human
ccugcaaugaagucucuga

SEQ ID NO: 2387880 - RNA, 17 nt, Human
ccugcaagucaguccag

SEQ ID NO: 2387881 - RNA, 20 nt, Human
ccugcaagggcuccccacug

SEQ ID NO: 2387882 - RNA, 21 nt, Human
ccugcaaugaagucucugaag

SEQ ID NO: 2387883 - RNA, 19 nt, Human
ccugcaauuucauaugcug

SEQ ID NO: 2387884 - RNA, 14 nt, Human
ccugcaagaacaag

SEQ ID NO: 2387885 - RNA, 17 nt, Human
ccugcaacucaaggacu

SEQ ID NO: 2387886 - RNA, 17 nt, Human
ccugcaaacucacugcu

SEQ ID NO: 2387887 - RNA, 20 nt, Human
ccugcaaacucacugcucaa

SEQ ID NO: 2387888 - RNA, 22 nt, Human
ccugcaaaauuugaugccagga

SEQ ID NO: 2387889 - RNA, 14 nt, Human
ccugcaaacucacu

SEQ ID NO: 2387890 - RNA, 15 nt, Human
ccugcaaacucacug

SEQ ID NO: 2387891 - RNA, 16 nt, Human
ccugcaaacucacugc

SEQ ID NO: 2387892 - RNA, 12 nt, Human
ccugcaacucau

SEQ ID NO: 2387893 - RNA, 12 nt, Human
ccugcaaggacu

SEQ ID NO: 2387894 - RNA, 17 nt, Human
ccugcaagggcucccca

SEQ ID NO: 2387895 - RNA, 18 nt, Human
ccugcaacucaaggacuu

SEQ ID NO: 2387896 - RNA, 20 nt, Human
ccugcaacucaaggacuuug

SEQ ID NO: 2387897 - RNA, 13 nt, Human
ccugcaaggacua

SEQ ID NO: 2387898 - RNA, 14 nt, Human
ccugcaaaauuuua

SEQ ID NO: 2387899 - RNA, 18 nt, Human
ccugcaaaaugagacccu

SEQ ID NO: 2387900 - RNA, 19 nt, Human
ccugcaaaaggacucucag

SEQ ID NO: 2387901 - RNA, 20 nt, Human
ccugauuguguauauucaua

SEQ ID NO: 2387902 - RNA, 17 nt, Human
ccugcaaaaggacucuc

SEQ ID NO: 2387903 - RNA, 22 nt, Human
ccugauuuuuuuuccuuuuaau

SEQ ID NO: 2387904 - RNA, 17 nt, Human
ccugauugugucucuug

SEQ ID NO: 2387905 - RNA, 19 nt, Human
ccugauugugucucuuggu

SEQ ID NO: 2387906 - RNA, 22 nt, Human
ccugcaaccugauugugucucu

SEQ ID NO: 2387907 - RNA, 21 nt, Human
ccugcaaccugauugugucuc

SEQ ID NO: 2387908 - RNA, 22 nt, Human
ccugcaaacgcugccugcccgu

SEQ ID NO: 2387909 - RNA, 21 nt, Human
ccugcaaacgcugccugcccg

SEQ ID NO: 2387910 - RNA, 22 nt, Human
ccugcaaacgcugccugcccac

SEQ ID NO: 2387911 - RNA, 19 nt, Human
ccugcaaacgcugccugcc

SEQ ID NO: 2387912 - RNA, 18 nt, Human
ccugcaaacgcugccugc

SEQ ID NO: 2387913 - RNA, 17 nt, Human
ccugcaaacgcugccug

SEQ ID NO: 2387914 - RNA, 16 nt, Human
ccugcaaacgcugccu

SEQ ID NO: 2387915 - RNA, 15 nt, Human
ccugcaaacgcugcc

SEQ ID NO: 2387916 - RNA, 11 nt, Human
ccugaggcccu

SEQ ID NO: 2387917 - RNA, 12 nt, Human
ccugaggcccuu

SEQ ID NO: 2387918 - RNA, 19 nt, Human
ccugaugcuucuucagaga

SEQ ID NO: 2387919 - RNA, 20 nt, Human
ccugaugcuucuucagagac

SEQ ID NO: 2387920 - RNA, 21 nt, Human
ccugaugcuucuucagagacu

SEQ ID NO: 2387921 - RNA, 22 nt, Human
ccugaugcuucuucagagacuc

SEQ ID NO: 2387922 - RNA, 14 nt, Human
ccugaggcccuucu

SEQ ID NO: 2387923 - RNA, 19 nt, Human
ccugauucggcugucucag

SEQ ID NO: 2387924 - RNA, 17 nt, Human
ccugauugccaagcuca

SEQ ID NO: 2387925 - RNA, 15 nt, Human
ccugauugugucucu

SEQ ID NO: 2387926 - RNA, 16 nt, Human
ccugccaggcauggug

SEQ ID NO: 2387927 - RNA, 11 nt, Human
ccugccaggga

SEQ ID NO: 2387928 - RNA, 23 nt, Human
ccugccaggaagccagcaggcuc

SEQ ID NO: 2387929 - RNA, 21 nt, Human
ccugccaggagcuuuggaccu

SEQ ID NO: 2387930 - RNA, 18 nt, Human
ccugccaggaagccagca

SEQ ID NO: 2387931 - RNA, 19 nt, Human
ccugccaggaagccagcag

SEQ ID NO: 2387932 - RNA, 21 nt, Human
ccugccaggaagccagcaggc

SEQ ID NO: 2387933 - RNA, 22 nt, Human
ccugccaggaagccagcaggcu

SEQ ID NO: 2387934 - RNA, 22 nt, Human
ccugcccccagaccuuuuaucc

SEQ ID NO: 2387935 - RNA, 13 nt, Human
ccugcccccagcc

SEQ ID NO: 2387936 - RNA, 14 nt, Human
ccugcccccagccc

SEQ ID NO: 2387937 - RNA, 14 nt, Human
ccugcccccacuuc

SEQ ID NO: 2387938 - RNA, 15 nt, Human
ccugcccccacuucc

SEQ ID NO: 2387939 - RNA, 17 nt, Human
ccugcccccacuuccug

SEQ ID NO: 2387940 - RNA, 12 nt, Human
ccugcccccagg

SEQ ID NO: 2387941 - RNA, 15 nt, Human
ccugcccccagcccc

SEQ ID NO: 2387942 - RNA, 17 nt, Human
ccugcccccagccccgg

SEQ ID NO: 2387943 - RNA, 14 nt, Human
ccugcccccaggac

SEQ ID NO: 2387944 - RNA, 15 nt, Human
ccugcccccaggacu

SEQ ID NO: 2387945 - RNA, 16 nt, Human
ccugccagggacagag

SEQ ID NO: 2387946 - RNA, 23 nt, Human
ccugcccccaccacggccacugg

SEQ ID NO: 2387947 - RNA, 12 nt, Human
ccugccagggac

SEQ ID NO: 2387948 - RNA, 13 nt, Human
ccugccagggaca

SEQ ID NO: 2387949 - RNA, 14 nt, Human
ccugccagggacag

SEQ ID NO: 2387950 - RNA, 15 nt, Human
ccugccagggacaga

SEQ ID NO: 2387951 - RNA, 19 nt, Human
ccugcaucugaccagcagc

SEQ ID NO: 2387952 - RNA, 22 nt, Human
ccugcauccguaguucccugaa

SEQ ID NO: 2387953 - RNA, 19 nt, Human
ccugcauccguaguucccu

SEQ ID NO: 2387954 - RNA, 18 nt, Human
ccugcaucugaccagcag

SEQ ID NO: 2387955 - RNA, 21 nt, Human
ccugcagucuggcugagcccu

SEQ ID NO: 2387956 - RNA, 22 nt, Human
ccugcagucuggcugagcccug

SEQ ID NO: 2387957 - RNA, 18 nt, Human
ccugcauccccuuggcug

SEQ ID NO: 2387958 - RNA, 21 nt, Human
ccugcauccccuuggcuguga

SEQ ID NO: 2387959 - RNA, 23 nt, Human
ccugcauccccuuggcugugagg

SEQ ID NO: 2387960 - RNA, 24 nt, Human
ccugcauccccuuggcugugaggc

SEQ ID NO: 2387961 - RNA, 23 nt, Human
ccugccacuuugguacauggcca

SEQ ID NO: 2387962 - RNA, 22 nt, Human
ccugcauucugccgugugcccu

SEQ ID NO: 2387963 - RNA, 19 nt, Human
ccugcauucacccagacag

SEQ ID NO: 2387964 - RNA, 14 nt, Human
ccugccagaccccc

SEQ ID NO: 2387965 - RNA, 23 nt, Human
ccugccacucaggcccaaagccu

SEQ ID NO: 2387966 - RNA, 22 nt, Human
ccugccacucaggcccaaagcc

SEQ ID NO: 2387967 - RNA, 17 nt, Human
ccugcauucacccagac

SEQ ID NO: 2387968 - RNA, 16 nt, Human
ccugcauucacccaga

SEQ ID NO: 2387969 - RNA, 15 nt, Human
ccugcauucacccag

SEQ ID NO: 2387970 - RNA, 14 nt, Human
ccugccacucaggc

SEQ ID NO: 2387971 - RNA, 23 nt, Human
ccugcauguaaacacgccugcaa

SEQ ID NO: 2387972 - RNA, 22 nt, Human
ccugcauguaaacacgccugca

SEQ ID NO: 2387973 - RNA, 21 nt, Human
ccugcauguaaacacgccugc

SEQ ID NO: 2387974 - RNA, 20 nt, Human
ccugcauguaaacacgccug

SEQ ID NO: 2387975 - RNA, 17 nt, Human
ccugccagccuggcuuc

SEQ ID NO: 2387976 - RNA, 16 nt, Human
ccugccagccuggcuu

SEQ ID NO: 2387977 - RNA, 15 nt, Human
ccugccagccuggcu

SEQ ID NO: 2387978 - RNA, 14 nt, Human
ccugccagccuggc

SEQ ID NO: 2387979 - RNA, 19 nt, Human
ccugccagacggcacccac

SEQ ID NO: 2387980 - RNA, 13 nt, Human
ccugccagccugg

SEQ ID NO: 2387981 - RNA, 12 nt, Human
ccugcauucuuu

SEQ ID NO: 2387982 - RNA, 21 nt, Human
ccugccagccuggcuucugga

SEQ ID NO: 2387983 - RNA, 12 nt, Human
ccugccagcugc

SEQ ID NO: 2387984 - RNA, 14 nt, Human
ccugccagcugcac

SEQ ID NO: 2387985 - RNA, 13 nt, Human
ccugccagcugca

SEQ ID NO: 2387986 - RNA, 23 nt, Human
ccugccagcugcacugaugcugc

SEQ ID NO: 2387987 - RNA, 18 nt, Human
ccugccagcugcacugau

SEQ ID NO: 2387988 - RNA, 17 nt, Human
ccugccagcugcacuga

SEQ ID NO: 2387989 - RNA, 16 nt, Human
ccugccagcugcacug

SEQ ID NO: 2387990 - RNA, 13 nt, Human
ccugccaggaagc

SEQ ID NO: 2387991 - RNA, 14 nt, Human
ccugccaggaagcc

SEQ ID NO: 2387992 - RNA, 15 nt, Human
ccugccaggaagcca

SEQ ID NO: 2387993 - RNA, 17 nt, Human
ccugccaggaagccagc

SEQ ID NO: 2387994 - RNA, 16 nt, Human
ccugagcuuggccaga

SEQ ID NO: 2387995 - RNA, 14 nt, Human
ccugagcuuucugc

SEQ ID NO: 2387996 - RNA, 11 nt, Human
ccugagcccca

SEQ ID NO: 2387997 - RNA, 20 nt, Human
ccugagcaaugucugugcua

SEQ ID NO: 2387998 - RNA, 13 nt, Human
ccugagccaagcu

SEQ ID NO: 2387999 - RNA, 23 nt, Human
ccugagccaagcuagaauucccu

SEQ ID NO: 2388000 - RNA, 20 nt, Human
ccugagccagauuucacucu

SEQ ID NO: 2388001 - RNA, 12 nt, Human
ccugagccagau

SEQ ID NO: 2388002 - RNA, 13 nt, Human
ccugaggaugagc

SEQ ID NO: 2388003 - RNA, 20 nt, Human
ccugaggacagcuguccucu

SEQ ID NO: 2388004 - RNA, 21 nt, Human
ccugaggcccagagggccugc

SEQ ID NO: 2388005 - RNA, 20 nt, Human
ccugaggaugagcuggaagg

SEQ ID NO: 2388006 - RNA, 15 nt, Human
ccugaggaugagcug

SEQ ID NO: 2388007 - RNA, 16 nt, Human
ccugaggaugagcugg

SEQ ID NO: 2388008 - RNA, 17 nt, Human
ccugaggaugagcugga

SEQ ID NO: 2388009 - RNA, 23 nt, Human
ccugaggaagcgugaaggccgag

SEQ ID NO: 2388010 - RNA, 12 nt, Human
ccugaggaagcg

SEQ ID NO: 2388011 - RNA, 18 nt, Human
ccugaggaagaugggggc

SEQ ID NO: 2388012 - RNA, 15 nt, Human
ccugaggacagcugu

SEQ ID NO: 2388013 - RNA, 16 nt, Human
ccugaggacagcuguc

SEQ ID NO: 2388014 - RNA, 17 nt, Human
ccugaggacagcugucc

SEQ ID NO: 2388015 - RNA, 18 nt, Human
ccugagcuuggccagaag

SEQ ID NO: 2388016 - RNA, 18 nt, Human
ccugaggaacccuuacag

SEQ ID NO: 2388017 - RNA, 19 nt, Human
ccugaggaagagggacugu

SEQ ID NO: 2388018 - RNA, 21 nt, Human
ccugagcuuggccagaagggg

SEQ ID NO: 2388019 - RNA, 17 nt, Human
ccugagcuuggccagaa

SEQ ID NO: 2388020 - RNA, 16 nt, Human
ccugagcuuucugcua

SEQ ID NO: 2388021 - RNA, 19 nt, Human
ccugagcaaugucugugcu

SEQ ID NO: 2388022 - RNA, 23 nt, Human
ccugagcaacucuugauuaucca

SEQ ID NO: 2388023 - RNA, 18 nt, Human
ccugagcaacucuugauu

SEQ ID NO: 2388024 - RNA, 15 nt, Human
ccugagcaacucuug

SEQ ID NO: 2388025 - RNA, 14 nt, Human
ccugagcaacucuu

SEQ ID NO: 2388026 - RNA, 13 nt, Human
ccugagcaacucu

SEQ ID NO: 2388027 - RNA, 16 nt, Human
ccugacauuggagccu

SEQ ID NO: 2388028 - RNA, 21 nt, Human
ccugacagaugucagccgagc

SEQ ID NO: 2388029 - RNA, 20 nt, Human
ccugacagaugucagccgag

SEQ ID NO: 2388030 - RNA, 18 nt, Human
ccugacagucuugugcuu

SEQ ID NO: 2388031 - RNA, 16 nt, Human
ccugacagaaggacuc

SEQ ID NO: 2388032 - RNA, 15 nt, Human
ccugacacuuuaauu

SEQ ID NO: 2388033 - RNA, 14 nt, Human
ccugacacuuuaau

SEQ ID NO: 2388034 - RNA, 13 nt, Human
ccugacacuuuaa

SEQ ID NO: 2388035 - RNA, 20 nt, Human
ccugacaagcacugcuaggc

SEQ ID NO: 2388036 - RNA, 13 nt, Human
ccugacacucccu

SEQ ID NO: 2388037 - RNA, 22 nt, Human
ccugacacugcggggcuuggcu

SEQ ID NO: 2388038 - RNA, 23 nt, Human
ccugacaacacucauugaccuga

SEQ ID NO: 2388039 - RNA, 18 nt, Human
ccugacaaccacuggucu

SEQ ID NO: 2388040 - RNA, 19 nt, Human
ccugacaaccacuggucug

SEQ ID NO: 2388041 - RNA, 14 nt, Human
ccugacaagcacug

SEQ ID NO: 2388042 - RNA, 19 nt, Human
ccugacaagcacugcuagg

SEQ ID NO: 2388043 - RNA, 15 nt, Human
ccucuccacccuccc

SEQ ID NO: 2388044 - RNA, 17 nt, Human
ccucuccacccucccag

SEQ ID NO: 2388045 - RNA, 22 nt, Human
ccucuccacccucccagaccug

SEQ ID NO: 2388046 - RNA, 17 nt, Human
ccucuccaccuaguggc

SEQ ID NO: 2388047 - RNA, 23 nt, Human
ccucuccaccuaguggcugucca

SEQ ID NO: 2388048 - RNA, 22 nt, Human
ccucuccaagggcuucugcacc

SEQ ID NO: 2388049 - RNA, 23 nt, Human
ccucuccaagggcuucugcaccc

SEQ ID NO: 2388050 - RNA, 13 nt, Human
ccucuccaagggc

SEQ ID NO: 2388051 - RNA, 18 nt, Human
ccucuccaagggcuucug

SEQ ID NO: 2388052 - RNA, 19 nt, Human
ccucuccaagggcuucugc

SEQ ID NO: 2388053 - RNA, 21 nt, Human
ccucuccaagggcuucugcac

SEQ ID NO: 2388054 - RNA, 15 nt, Human
ccugaggcagguccc

SEQ ID NO: 2388055 - RNA, 16 nt, Human
ccugcauucuuucugu

SEQ ID NO: 2388056 - RNA, 23 nt, Human
cgccaggcugaccacagcacagc

SEQ ID NO: 2388057 - RNA, 21 nt, Human
cgccaggcugaccacagcaca

SEQ ID NO: 2388058 - RNA, 22 nt, Human
cgccaggggaaaaucagccugc

SEQ ID NO: 2388059 - RNA, 20 nt, Human
cgccaggcugaccacagcac

SEQ ID NO: 2388060 - RNA, 17 nt, Human
cgccaggcugaccacag

SEQ ID NO: 2388061 - RNA, 16 nt, Human
cgccaggcugaccaca

SEQ ID NO: 2388062 - RNA, 23 nt, Human
cgccaggauggaacacggccaca

SEQ ID NO: 2388063 - RNA, 22 nt, Human
cgcagcccuagagccugccugg

SEQ ID NO: 2388064 - RNA, 21 nt, Human
cgccaggauggaacacggcca

SEQ ID NO: 2388065 - RNA, 19 nt, Human
cgcagcccuagagccugcc

SEQ ID NO: 2388066 - RNA, 20 nt, Human
cgcagcccuagagccugccu

SEQ ID NO: 2388067 - RNA, 17 nt, Human
cgccagauucuuuccug

SEQ ID NO: 2388068 - RNA, 19 nt, Human
cgccagauucuuuccugag

SEQ ID NO: 2388069 - RNA, 20 nt, Human
cgccagauucuuuccugagg

SEQ ID NO: 2388070 - RNA, 21 nt, Human
cgccagauucuuuccugaggc

SEQ ID NO: 2388071 - RNA, 19 nt, Human
cgcacccccacccuuuggg

SEQ ID NO: 2388072 - RNA, 15 nt, Human
cgcacccccacccuu

SEQ ID NO: 2388073 - RNA, 16 nt, Human
cgcacccuccccuccc

SEQ ID NO: 2388074 - RNA, 12 nt, Human
cgcagaccuccc

SEQ ID NO: 2388075 - RNA, 17 nt, Human
cgcaccccccaagcugu

SEQ ID NO: 2388076 - RNA, 19 nt, Human
cgcagaccuccccagcccc

SEQ ID NO: 2388077 - RNA, 20 nt, Human
cgcagaccuccccagccccu

SEQ ID NO: 2388078 - RNA, 15 nt, Human
cgcagaccuccccag

SEQ ID NO: 2388079 - RNA, 16 nt, Human
cgcagaccuccccagc

SEQ ID NO: 2388080 - RNA, 17 nt, Human
cgcagaccuccccagcc

SEQ ID NO: 2388081 - RNA, 18 nt, Human
cgcagaccuccccagccc

SEQ ID NO: 2388082 - RNA, 15 nt, Human
cgcagacaggaccag

SEQ ID NO: 2388083 - RNA, 16 nt, Human
cgcagacaggaccagg

SEQ ID NO: 2388084 - RNA, 10 nt, Human
cgcagcccug

SEQ ID NO: 2388085 - RNA, 17 nt, Human
cgcagcccuagagccug

SEQ ID NO: 2388086 - RNA, 18 nt, Human
cgcagcccuagagccugc

SEQ ID NO: 2388087 - RNA, 14 nt, Human
cgcagcccugcaga

SEQ ID NO: 2388088 - RNA, 12 nt, Human
cgcagagaggcc

SEQ ID NO: 2388089 - RNA, 14 nt, Human
cgcagagaggccag

SEQ ID NO: 2388090 - RNA, 18 nt, Human
cgcaaaccacacuggacu

SEQ ID NO: 2388091 - RNA, 19 nt, Human
cgcaaagggcugaaagcca

SEQ ID NO: 2388092 - RNA, 15 nt, Human
cgcaaaccacacugg

SEQ ID NO: 2388093 - RNA, 16 nt, Human
cgcaaaccacacugga

SEQ ID NO: 2388094 - RNA, 23 nt, Human
cgauucaucucucagaagggagg

SEQ ID NO: 2388095 - RNA, 13 nt, Human
cgauuuugccugu

SEQ ID NO: 2388096 - RNA, 13 nt, Human
cgauuuuguaucu

SEQ ID NO: 2388097 - RNA, 17 nt, Human
cgauuuuguaucugcag

SEQ ID NO: 2388098 - RNA, 18 nt, Human
cgauuuuguaucugcagg

SEQ ID NO: 2388099 - RNA, 23 nt, Human
cgauuuuguaucugcaggcagac

SEQ ID NO: 2388100 - RNA, 15 nt, Human
cgauucauauugaau

SEQ ID NO: 2388101 - RNA, 22 nt, Human
cgauucaccugagcaggaccuc

SEQ ID NO: 2388102 - RNA, 14 nt, Human
cgauuugucccagg

SEQ ID NO: 2388103 - RNA, 20 nt, Human
cgauuucuguuuagauaaua

SEQ ID NO: 2388104 - RNA, 12 nt, Human
cgcacagagcug

SEQ ID NO: 2388105 - RNA, 13 nt, Human
cgcacagagcugg

SEQ ID NO: 2388106 - RNA, 20 nt, Human
cgcacacacacacacaggag

SEQ ID NO: 2388107 - RNA, 15 nt, Human
cgcacacacacacac

SEQ ID NO: 2388108 - RNA, 22 nt, Human
cgcaagagccauguagaagcug

SEQ ID NO: 2388109 - RNA, 20 nt, Human
cgcaaacccccuuugugcug

SEQ ID NO: 2388110 - RNA, 14 nt, Human
cgcacccccacccu

SEQ ID NO: 2388111 - RNA, 13 nt, Human
cgcacccccaccc

SEQ ID NO: 2388112 - RNA, 14 nt, Human
cgcaccccagagug

SEQ ID NO: 2388113 - RNA, 14 nt, Human
cgcaccauucugac

SEQ ID NO: 2388114 - RNA, 15 nt, Human
cgcaccauucugacu

SEQ ID NO: 2388115 - RNA, 13 nt, Human
cgcacagucucuc

SEQ ID NO: 2388116 - RNA, 15 nt, Human
cgcacagucucucuc

SEQ ID NO: 2388117 - RNA, 17 nt, Human
cgcacagagcuggggcu

SEQ ID NO: 2388118 - RNA, 13 nt, Human
cgcacagcaguuc

SEQ ID NO: 2388119 - RNA, 19 nt, Human
cgcacagcaugagaggcuc

SEQ ID NO: 2388120 - RNA, 16 nt, Human
cgauguggcccuggcc

SEQ ID NO: 2388121 - RNA, 15 nt, Human
cgauguggcccuggc

SEQ ID NO: 2388122 - RNA, 13 nt, Human
cgauguggcccug

SEQ ID NO: 2388123 - RNA, 11 nt, Human
cgauguggccc

SEQ ID NO: 2388124 - RNA, 18 nt, Human
cgauguggcccuggccug

SEQ ID NO: 2388125 - RNA, 17 nt, Human
cgauguggcccuggccu

SEQ ID NO: 2388126 - RNA, 22 nt, Human
cgauguggcccuggccugcugg

SEQ ID NO: 2388127 - RNA, 16 nt, Human
cgauucacccugucca

SEQ ID NO: 2388128 - RNA, 21 nt, Human
cgauucacccuguccaaacug

SEQ ID NO: 2388129 - RNA, 17 nt, Human
cgauuauuaucuaaagu

SEQ ID NO: 2388130 - RNA, 18 nt, Human
cgauguaggcauucugga

SEQ ID NO: 2388131 - RNA, 19 nt, Human
cgauguaugcagcuaucug

SEQ ID NO: 2388132 - RNA, 20 nt, Human
cgauguaugcagcuaucugg

SEQ ID NO: 2388133 - RNA, 23 nt, Human
cgauguggaaaaaugagagaagg

SEQ ID NO: 2388134 - RNA, 15 nt, Human
cgagcccugguggca

SEQ ID NO: 2388135 - RNA, 16 nt, Human
cgagcccugguggcag

SEQ ID NO: 2388136 - RNA, 18 nt, Human
cgagcaugccuggauggg

SEQ ID NO: 2388137 - RNA, 15 nt, Human
cgagcauccuggcca

SEQ ID NO: 2388138 - RNA, 19 nt, Human
cgagccaugauguggagug

SEQ ID NO: 2388139 - RNA, 18 nt, Human
cgagccaugauguggagu

SEQ ID NO: 2388140 - RNA, 17 nt, Human
cgccaugcuccuggccc

SEQ ID NO: 2388141 - RNA, 14 nt, Human
cgaauacaaaauug

SEQ ID NO: 2388142 - RNA, 14 nt, Human
cgaaguugaugcaa

SEQ ID NO: 2388143 - RNA, 13 nt, Human
cgaaguguugcau

SEQ ID NO: 2388144 - RNA, 13 nt, Human
cgaagacacagac

SEQ ID NO: 2388145 - RNA, 18 nt, Human
cgaagaaggguccuuccc

SEQ ID NO: 2388146 - RNA, 15 nt, Human
cgaacuccuugauuu

SEQ ID NO: 2388147 - RNA, 16 nt, Human
cgaacuguuguauaaa

SEQ ID NO: 2388148 - RNA, 12 nt, Human
cgaacuggcugc

SEQ ID NO: 2388149 - RNA, 14 nt, Human
cgaacuggcugcaa

SEQ ID NO: 2388150 - RNA, 13 nt, Human
cgaaccccaagga

SEQ ID NO: 2388151 - RNA, 16 nt, Human
cgaacccaccugcuga

SEQ ID NO: 2388152 - RNA, 15 nt, Human
cgaaccaggagcugc

SEQ ID NO: 2388153 - RNA, 23 nt, Human
cgaacccaccugcugagagaccc

SEQ ID NO: 2388154 - RNA, 15 nt, Human
cgaaccuccucugug

SEQ ID NO: 2388155 - RNA, 16 nt, Human
cgaaccuccucuguga

SEQ ID NO: 2388156 - RNA, 16 nt, Human
cgaacgacaauagcuu

SEQ ID NO: 2388157 - RNA, 14 nt, Human
cgaacuccugaccu

SEQ ID NO: 2388158 - RNA, 14 nt, Human
cgaacccaccugcu

SEQ ID NO: 2388159 - RNA, 14 nt, Human
cgaaccaauauuug

SEQ ID NO: 2388160 - RNA, 12 nt, Human
cgaaccaggagc

SEQ ID NO: 2388161 - RNA, 23 nt, Human
cgaaaggauguaaacagugccug

SEQ ID NO: 2388162 - RNA, 22 nt, Human
cgaaaggauguaaacagugccu

SEQ ID NO: 2388163 - RNA, 22 nt, Human
cgaaagggacuuggaagcuccg

SEQ ID NO: 2388164 - RNA, 20 nt, Human
cgaaaggaugaaagugacca

SEQ ID NO: 2388165 - RNA, 19 nt, Human
cgaaagggacuuggaagcu

SEQ ID NO: 2388166 - RNA, 21 nt, Human
cgaaagaacaguccauugaaa

SEQ ID NO: 2388167 - RNA, 12 nt, Human
cgaaagaacagu

SEQ ID NO: 2388168 - RNA, 15 nt, Human
ccuuuuauguuauuu

SEQ ID NO: 2388169 - RNA, 15 nt, Human
ccuuuuauugacaca

SEQ ID NO: 2388170 - RNA, 15 nt, Human
ccuuuucacuacacc

SEQ ID NO: 2388171 - RNA, 18 nt, Human
ccuuuuuuuccaucuuua

SEQ ID NO: 2388172 - RNA, 23 nt, Human
ccuuuucagcgauguaugcagcu

SEQ ID NO: 2388173 - RNA, 17 nt, Human
ccuuuucagcuucugcu

SEQ ID NO: 2388174 - RNA, 20 nt, Human
ccuuuucagcuucugcuggg

SEQ ID NO: 2388175 - RNA, 21 nt, Human
ccuuuucagcuucugcugggc

SEQ ID NO: 2388176 - RNA, 18 nt, Human
ccuuuuacauacugcugu

SEQ ID NO: 2388177 - RNA, 21 nt, Human
ccuuuuagccuaguucaucca

SEQ ID NO: 2388178 - RNA, 21 nt, Human
ccuuuuauaaaccucuaauuu

SEQ ID NO: 2388179 - RNA, 22 nt, Human
ccuuuuauguaguaauugacau

SEQ ID NO: 2388180 - RNA, 11 nt, Human
ccuuuuauagc

SEQ ID NO: 2388181 - RNA, 16 nt, Human
ccuuuuauagcuauua

SEQ ID NO: 2388182 - RNA, 17 nt, Human
ccuuuuacauacugcug

SEQ ID NO: 2388183 - RNA, 22 nt, Human
ccuuugaccugccucccuucau

SEQ ID NO: 2388184 - RNA, 21 nt, Human
ccuuugaccugccucccuuca

SEQ ID NO: 2388185 - RNA, 22 nt, Human
ccuuugacgccaucccagcccc

SEQ ID NO: 2388186 - RNA, 20 nt, Human
ccuuugacgccaucccagcc

SEQ ID NO: 2388187 - RNA, 21 nt, Human
ccuuugacgccaucccagccc

SEQ ID NO: 2388188 - RNA, 22 nt, Human
cgaaaaccaggccuuaucucca

SEQ ID NO: 2388189 - RNA, 13 nt, Human
cgaaaaccaggcc

SEQ ID NO: 2388190 - RNA, 19 nt, Human
cgaaaaauccucuuccucu

SEQ ID NO: 2388191 - RNA, 15 nt, Human
cgaaaacguggcugc

SEQ ID NO: 2388192 - RNA, 18 nt, Human
cgaaaacguggcugcuuc

SEQ ID NO: 2388193 - RNA, 19 nt, Human
cgaaaacguggcugcuuca

SEQ ID NO: 2388194 - RNA, 18 nt, Human
cgaaaccuugccuuucuc

SEQ ID NO: 2388195 - RNA, 18 nt, Human
cgaaaccugggauucagg

SEQ ID NO: 2388196 - RNA, 13 nt, Human
cgaaacagcgcug

SEQ ID NO: 2388197 - RNA, 17 nt, Human
cgaaacacagaaaccuu

SEQ ID NO: 2388198 - RNA, 14 nt, Human
cgaaaccccaucuc

SEQ ID NO: 2388199 - RNA, 22 nt, Human
cgaaacaggcuacucuccucgg

SEQ ID NO: 2388200 - RNA, 16 nt, Human
cgaaaccaaagaagaa

SEQ ID NO: 2388201 - RNA, 21 nt, Human
cgaaaaauccucuuccucuga

SEQ ID NO: 2388202 - RNA, 22 nt, Human
cgaaaaguuggugucaaugaau

SEQ ID NO: 2388203 - RNA, 20 nt, Human
cgaaaacguggcugcuucaa

SEQ ID NO: 2388204 - RNA, 16 nt, Human
cgagaccagccuggcc

SEQ ID NO: 2388205 - RNA, 15 nt, Human
cgagaccagccuggc

SEQ ID NO: 2388206 - RNA, 14 nt, Human
cgagaccagccugg

SEQ ID NO: 2388207 - RNA, 13 nt, Human
cgagaccagccug

SEQ ID NO: 2388208 - RNA, 15 nt, Human
cgagaagcaagaaag

SEQ ID NO: 2388209 - RNA, 13 nt, Human
cgagaagcaagaa

SEQ ID NO: 2388210 - RNA, 16 nt, Human
cgagaagcugcucugg

SEQ ID NO: 2388211 - RNA, 18 nt, Human
cgagaagcugcucuggaa

SEQ ID NO: 2388212 - RNA, 17 nt, Human
cgagaccaaccugacca

SEQ ID NO: 2388213 - RNA, 20 nt, Human
cgagaagcugcucuggaauu

SEQ ID NO: 2388214 - RNA, 14 nt, Human
cgagacacuugccu

SEQ ID NO: 2388215 - RNA, 17 nt, Human
cgagaccagccuggcca

SEQ ID NO: 2388216 - RNA, 13 nt, Human
cgagaccagucug

SEQ ID NO: 2388217 - RNA, 22 nt, Human
cgagaggggaagaguguacugg

SEQ ID NO: 2388218 - RNA, 18 nt, Human
cgagagguaugccuguac

SEQ ID NO: 2388219 - RNA, 14 nt, Human
cgagaggugggcca

SEQ ID NO: 2388220 - RNA, 15 nt, Human
cgagaggugggccag

SEQ ID NO: 2388221 - RNA, 19 nt, Human
cgagaggugggccagucug

SEQ ID NO: 2388222 - RNA, 20 nt, Human
cgagaggugggccagucugu

SEQ ID NO: 2388223 - RNA, 15 nt, Human
cgagagucugucuca

SEQ ID NO: 2388224 - RNA, 14 nt, Human
cgagagucugucuc

SEQ ID NO: 2388225 - RNA, 20 nt, Human
cgagaguagccgagagccug

SEQ ID NO: 2388226 - RNA, 19 nt, Human
cgagaguagccgagagccu

SEQ ID NO: 2388227 - RNA, 22 nt, Human
cgagaggugggccagucugugg

SEQ ID NO: 2388228 - RNA, 23 nt, Human
cgagaggugggccagucugugga

SEQ ID NO: 2388229 - RNA, 17 nt, Human
cgagaucacgccacugc

SEQ ID NO: 2388230 - RNA, 18 nt, Human
cgagauagccaaggccaa

SEQ ID NO: 2388231 - RNA, 19 nt, Human
cgacugugaccugugggga

SEQ ID NO: 2388232 - RNA, 17 nt, Human
cgacugugaccuguggg

SEQ ID NO: 2388233 - RNA, 18 nt, Human
cgacuugaauuuucccac

SEQ ID NO: 2388234 - RNA, 19 nt, Human
cgacuugaauuuucccacu

SEQ ID NO: 2388235 - RNA, 20 nt, Human
cgacuugaauuuucccacug

SEQ ID NO: 2388236 - RNA, 21 nt, Human
cgacuugaauuuucccacugc

SEQ ID NO: 2388237 - RNA, 19 nt, Human
cgaauacuuuugcccuuug

SEQ ID NO: 2388238 - RNA, 11 nt, Human
cgacugucucc

SEQ ID NO: 2388239 - RNA, 13 nt, Human
cgaauagcuggga

SEQ ID NO: 2388240 - RNA, 14 nt, Human
cgaauagcugggac

SEQ ID NO: 2388241 - RNA, 13 nt, Human
cgacuuuauuuuc

SEQ ID NO: 2388242 - RNA, 17 nt, Human
cgacuuuguacccccca

SEQ ID NO: 2388243 - RNA, 16 nt, Human
cgacuuucugccugga

SEQ ID NO: 2388244 - RNA, 23 nt, Human
cgacuuuguaccccccaaccccu

SEQ ID NO: 2388245 - RNA, 20 nt, Human
cgagaaauaaaguuugcuua

SEQ ID NO: 2388246 - RNA, 16 nt, Human
cgagaacuuucauuuu

SEQ ID NO: 2388247 - RNA, 17 nt, Human
cgagaacuuucauuuuu

SEQ ID NO: 2388248 - RNA, 16 nt, Human
cgacuugcauuuuugc

SEQ ID NO: 2388249 - RNA, 22 nt, Human
cgacuugaauuuucccacugca

SEQ ID NO: 2388250 - RNA, 21 nt, Human
cgacuugcuguuuuguucugu

SEQ ID NO: 2388251 - RNA, 19 nt, Human
cgacuuguuuuugcacaug

SEQ ID NO: 2388252 - RNA, 13 nt, Human
cgacuuucugccu

SEQ ID NO: 2388253 - RNA, 14 nt, Human
cgacuuucugccug

SEQ ID NO: 2388254 - RNA, 15 nt, Human
cgacuuucugccugg

SEQ ID NO: 2388255 - RNA, 23 nt, Human
cgagcaguccugccucagccucc

SEQ ID NO: 2388256 - RNA, 21 nt, Human
cgagcaguccugccucagccu

SEQ ID NO: 2388257 - RNA, 17 nt, Human
cgagcaguccugccuca

SEQ ID NO: 2388258 - RNA, 15 nt, Human
cgagcaguccugccu

SEQ ID NO: 2388259 - RNA, 18 nt, Human
cgagcagggugcuguggg

SEQ ID NO: 2388260 - RNA, 20 nt, Human
cgagcaggcuucuucccccc

SEQ ID NO: 2388261 - RNA, 18 nt, Human
cgagcaggcuacugucag

SEQ ID NO: 2388262 - RNA, 14 nt, Human
cgagcaugccugga

SEQ ID NO: 2388263 - RNA, 13 nt, Human
cgagcaugccugg

SEQ ID NO: 2388264 - RNA, 16 nt, Human
cgagcaugccuggaug

SEQ ID NO: 2388265 - RNA, 17 nt, Human
cgagcaugccuggaugg

SEQ ID NO: 2388266 - RNA, 16 nt, Human
cgagaucacgccacug

SEQ ID NO: 2388267 - RNA, 18 nt, Human
cgagaucacgccacugca

SEQ ID NO: 2388268 - RNA, 20 nt, Human
cgagaucacgccacugcacu

SEQ ID NO: 2388269 - RNA, 20 nt, Human
cgagauugcaccacugcacu

SEQ ID NO: 2388270 - RNA, 13 nt, Human
cgagcaccuccac

SEQ ID NO: 2388271 - RNA, 14 nt, Human
cgagcaaagaucaa

SEQ ID NO: 2388272 - RNA, 15 nt, Human
cgagcaaagaucaaa

SEQ ID NO: 2388273 - RNA, 20 nt, Human
cgagcaaagaucaaaauaaa

SEQ ID NO: 2388274 - RNA, 20 nt, Human
cgagcaaagucuaaaguuua

SEQ ID NO: 2388275 - RNA, 23 nt, Human
cgagcaaagaucaaaauaaaaag

SEQ ID NO: 2388276 - RNA, 19 nt, Human
cgagcaaagucuaaaguuu

SEQ ID NO: 2388277 - RNA, 23 nt, Human
ccuuccuuuucccugcuuccagg

SEQ ID NO: 2388278 - RNA, 20 nt, Human
ccuuccuuuucccugcuucc

SEQ ID NO: 2388279 - RNA, 21 nt, Human
ccuuccuuuucccugcuucca

SEQ ID NO: 2388280 - RNA, 16 nt, Human
ccuuccuuuucccugc

SEQ ID NO: 2388281 - RNA, 17 nt, Human
ccuuccuuuucccugcu

SEQ ID NO: 2388282 - RNA, 18 nt, Human
ccuuccuuuucccugcuu

SEQ ID NO: 2388283 - RNA, 19 nt, Human
ccuuccuuuucccugcuuc

SEQ ID NO: 2388284 - RNA, 16 nt, Human
ccuucgcuucuugccu

SEQ ID NO: 2388285 - RNA, 17 nt, Human
ccuucgcuucuugccuc

SEQ ID NO: 2388286 - RNA, 18 nt, Human
ccuucgcuucuugccucu

SEQ ID NO: 2388287 - RNA, 15 nt, Human
ccuuccuuuucccug

SEQ ID NO: 2388288 - RNA, 13 nt, Human
ccuuccuuuuccc

SEQ ID NO: 2388289 - RNA, 20 nt, Human
ccuuccuugcuguccuaggc

SEQ ID NO: 2388290 - RNA, 18 nt, Human
ccuuccuugcucugcacc

SEQ ID NO: 2388291 - RNA, 19 nt, Human
ccuuccuugcucugcaccc

SEQ ID NO: 2388292 - RNA, 23 nt, Human
ccuuccuugaccagcagauccca

SEQ ID NO: 2388293 - RNA, 15 nt, Human
ccuuccuucccuggg

SEQ ID NO: 2388294 - RNA, 14 nt, Human
ccuuccuugcuaau

SEQ ID NO: 2388295 - RNA, 20 nt, Human
ccuucggccuccauccugag

SEQ ID NO: 2388296 - RNA, 19 nt, Human
ccuucggccuccauccuga

SEQ ID NO: 2388297 - RNA, 14 nt, Human
ccuucggccuccau

SEQ ID NO: 2388298 - RNA, 19 nt, Human
ccuucgcuucuugccucug

SEQ ID NO: 2388299 - RNA, 20 nt, Human
ccuucgcuucuugccucugu

SEQ ID NO: 2388300 - RNA, 21 nt, Human
ccuucgcuucuugccucugug

SEQ ID NO: 2388301 - RNA, 23 nt, Human
ccuucgcuucuugccucugugcu

SEQ ID NO: 2388302 - RNA, 19 nt, Human
ccuuccaacaggagcuggg

SEQ ID NO: 2388303 - RNA, 16 nt, Human
ccuuccaacaggagcu

SEQ ID NO: 2388304 - RNA, 18 nt, Human
ccuucagugcccaccaac

SEQ ID NO: 2388305 - RNA, 15 nt, Human
ccuuccaagagccug

SEQ ID NO: 2388306 - RNA, 17 nt, Human
ccuuccaagagccugag

SEQ ID NO: 2388307 - RNA, 16 nt, Human
ccuuccaagagccuga

SEQ ID NO: 2388308 - RNA, 16 nt, Human
ccuucagugcccacca

SEQ ID NO: 2388309 - RNA, 15 nt, Human
ccuucagugcccacc

SEQ ID NO: 2388310 - RNA, 14 nt, Human
ccuucagugcccac

SEQ ID NO: 2388311 - RNA, 12 nt, Human
ccuucagugccc

SEQ ID NO: 2388312 - RNA, 18 nt, Human
ccuucagcccucaccccu

SEQ ID NO: 2388313 - RNA, 22 nt, Human
ccuucauuuggcauuccccacu

SEQ ID NO: 2388314 - RNA, 21 nt, Human
ccuuccucuccacugccuucg

SEQ ID NO: 2388315 - RNA, 17 nt, Human
ccuuccucucuccagau

SEQ ID NO: 2388316 - RNA, 15 nt, Human
ccuuccucucuccag

SEQ ID NO: 2388317 - RNA, 16 nt, Human
ccuuccucugagccuu

SEQ ID NO: 2388318 - RNA, 15 nt, Human
ccuuccucugagccu

SEQ ID NO: 2388319 - RNA, 16 nt, Human
ccuuccuugaccagca

SEQ ID NO: 2388320 - RNA, 16 nt, Human
ccuuccuucccuggcu

SEQ ID NO: 2388321 - RNA, 15 nt, Human
ccuuccuucccuggc

SEQ ID NO: 2388322 - RNA, 13 nt, Human
ccuuccucugagg

SEQ ID NO: 2388323 - RNA, 20 nt, Human
ccuuccucugagccuuggga

SEQ ID NO: 2388324 - RNA, 16 nt, Human
ccuucagauggaaacu

SEQ ID NO: 2388325 - RNA, 20 nt, Human
ccuucagacacccucaaccu

SEQ ID NO: 2388326 - RNA, 17 nt, Human
ccuucagacacccucaa

SEQ ID NO: 2388327 - RNA, 18 nt, Human
ccuucagacuuugcuucc

SEQ ID NO: 2388328 - RNA, 21 nt, Human
ccuucagacuuugcuucccau

SEQ ID NO: 2388329 - RNA, 13 nt, Human
ccuucagcccuca

SEQ ID NO: 2388330 - RNA, 22 nt, Human
ccuucagauguucucucccagg

SEQ ID NO: 2388331 - RNA, 23 nt, Human
ccuucagauguucucucccaggg

SEQ ID NO: 2388332 - RNA, 12 nt, Human
ccuucagccuga

SEQ ID NO: 2388333 - RNA, 19 nt, Human
ccuucauuuggcauucccc

SEQ ID NO: 2388334 - RNA, 14 nt, Human
ccuucagugccaaa

SEQ ID NO: 2388335 - RNA, 11 nt, Human
ccuucagugcc

SEQ ID NO: 2388336 - RNA, 10 nt, Human
ccuucagugc

SEQ ID NO: 2388337 - RNA, 14 nt, Human
ccuucagcccucac

SEQ ID NO: 2388338 - RNA, 15 nt, Human
ccuucagcccucacc

SEQ ID NO: 2388339 - RNA, 20 nt, Human
ccuucacauccuguguuucu

SEQ ID NO: 2388340 - RNA, 12 nt, Human
ccuucacagugu

SEQ ID NO: 2388341 - RNA, 14 nt, Human
ccuuagacaguccc

SEQ ID NO: 2388342 - RNA, 17 nt, Human
ccuucacagaugggugc

SEQ ID NO: 2388343 - RNA, 19 nt, Human
ccuucaccuuuguccccac

SEQ ID NO: 2388344 - RNA, 20 nt, Human
ccuucaccuuuguccccacc

SEQ ID NO: 2388345 - RNA, 20 nt, Human
ccuucacuccggugugccug

SEQ ID NO: 2388346 - RNA, 14 nt, Human
ccuucacuccggug

SEQ ID NO: 2388347 - RNA, 17 nt, Human
ccuucacauacccuccc

SEQ ID NO: 2388348 - RNA, 17 nt, Human
ccuucaccccaguggcc

SEQ ID NO: 2388349 - RNA, 14 nt, Human
ccuucaccucugaa

SEQ ID NO: 2388350 - RNA, 21 nt, Human
ccuucaccuuuguccccaccg

SEQ ID NO: 2388351 - RNA, 22 nt, Human
ccuucacuucugaccacacuuc

SEQ ID NO: 2388352 - RNA, 18 nt, Human
ccuucagaaccauccaua

SEQ ID NO: 2388353 - RNA, 20 nt, Human
ccuucacuucugaccacacu

SEQ ID NO: 2388354 - RNA, 11 nt, Human
ccuucagacac

SEQ ID NO: 2388355 - RNA, 10 nt, Human
ccuucagaca

SEQ ID NO: 2388356 - RNA, 23 nt, Human
ccuucacuccggugugccugcag

SEQ ID NO: 2388357 - RNA, 14 nt, Human
ccuucacugccuuu

SEQ ID NO: 2388358 - RNA, 18 nt, Human
ccuucacugccuuugcuc

SEQ ID NO: 2388359 - RNA, 14 nt, Human
ccuucacuuaggaa

SEQ ID NO: 2388360 - RNA, 21 nt, Human
ccuuggcuuuuacugaagccu

SEQ ID NO: 2388361 - RNA, 12 nt, Human
ccuugggacccc

SEQ ID NO: 2388362 - RNA, 17 nt, Human
ccuugcaacacacagac

SEQ ID NO: 2388363 - RNA, 16 nt, Human
ccuugcaacacacaga

SEQ ID NO: 2388364 - RNA, 14 nt, Human
ccuugauugggacu

SEQ ID NO: 2388365 - RNA, 23 nt, Human
ccuugcaaagaccauaaagucca

SEQ ID NO: 2388366 - RNA, 22 nt, Human
ccuugcaacacacagacacacg

SEQ ID NO: 2388367 - RNA, 18 nt, Human
ccuugcaacacacagaca

SEQ ID NO: 2388368 - RNA, 17 nt, Human
ccuugcaacuucauguc

SEQ ID NO: 2388369 - RNA, 15 nt, Human
ccuugggaggcccca

SEQ ID NO: 2388370 - RNA, 23 nt, Human
ccuugggaggaagcagaauaaag

SEQ ID NO: 2388371 - RNA, 21 nt, Human
ccuugggaggaagcagaauaa

SEQ ID NO: 2388372 - RNA, 22 nt, Human
ccuugggaggaagcagaauaaa

SEQ ID NO: 2388373 - RNA, 20 nt, Human
ccuugggaggccccacuggg

SEQ ID NO: 2388374 - RNA, 19 nt, Human
ccuugggaggccccacugg

SEQ ID NO: 2388375 - RNA, 14 nt, Human
ccuugggaggaagc

SEQ ID NO: 2388376 - RNA, 15 nt, Human
ccuugggaggaagca

SEQ ID NO: 2388377 - RNA, 16 nt, Human
ccuugggaggaagcag

SEQ ID NO: 2388378 - RNA, 17 nt, Human
ccuugggaggaagcaga

SEQ ID NO: 2388379 - RNA, 18 nt, Human
ccuugggaggaagcagaa

SEQ ID NO: 2388380 - RNA, 19 nt, Human
ccuugggaggaagcagaau

SEQ ID NO: 2388381 - RNA, 20 nt, Human
ccuugggaggaagcagaaua

SEQ ID NO: 2388382 - RNA, 20 nt, Human
ccuugauuuuagccuucucu

SEQ ID NO: 2388383 - RNA, 22 nt, Human
ccuugauuuuagccuucucugu

SEQ ID NO: 2388384 - RNA, 21 nt, Human
ccuugauuuuagccuucucug

SEQ ID NO: 2388385 - RNA, 14 nt, Human
ccuugaugugccug

SEQ ID NO: 2388386 - RNA, 19 nt, Human
ccuugauggagauauuuac

SEQ ID NO: 2388387 - RNA, 23 nt, Human
ccuugauuguucgggugugcaau

SEQ ID NO: 2388388 - RNA, 14 nt, Human
ccuugaugaagaag

SEQ ID NO: 2388389 - RNA, 14 nt, Human
ccuugagugggguu

SEQ ID NO: 2388390 - RNA, 22 nt, Human
ccuugagugggguuaucucugu

SEQ ID NO: 2388391 - RNA, 23 nt, Human
ccuugagugggguuaucucugug

SEQ ID NO: 2388392 - RNA, 12 nt, Human
ccuugggcccuu

SEQ ID NO: 2388393 - RNA, 17 nt, Human
ccuugggcccuuugagu

SEQ ID NO: 2388394 - RNA, 14 nt, Human
ccuugggcccuuug

SEQ ID NO: 2388395 - RNA, 16 nt, Human
ccuuggggcaggcagu

SEQ ID NO: 2388396 - RNA, 15 nt, Human
ccuuggggcaggcag

SEQ ID NO: 2388397 - RNA, 14 nt, Human
ccuuggggcaggca

SEQ ID NO: 2388398 - RNA, 22 nt, Human
ccuuggggauucuuccaucuga

SEQ ID NO: 2388399 - RNA, 18 nt, Human
ccuuggggauucuuccau

SEQ ID NO: 2388400 - RNA, 19 nt, Human
ccuuggggcugaugcaguu

SEQ ID NO: 2388401 - RNA, 21 nt, Human
ccuuggugucgggcaugacac

SEQ ID NO: 2388402 - RNA, 22 nt, Human
ccuuggugucgggcaugacacg

SEQ ID NO: 2388403 - RNA, 21 nt, Human
ccuugguuaggcauuguggga

SEQ ID NO: 2388404 - RNA, 22 nt, Human
ccuugguuaggcauugugggaa

SEQ ID NO: 2388405 - RNA, 22 nt, Human
ccuuguuugauuuuagcugcag

SEQ ID NO: 2388406 - RNA, 19 nt, Human
ccuuguuggagccugcagg

SEQ ID NO: 2388407 - RNA, 14 nt, Human
ccuuguuucaaaca

SEQ ID NO: 2388408 - RNA, 20 nt, Human
ccuuguuucaaacacaaaug

SEQ ID NO: 2388409 - RNA, 22 nt, Human
ccuuguuucaaacacaaaugca

SEQ ID NO: 2388410 - RNA, 19 nt, Human
ccuuguuuacacauacccu

SEQ ID NO: 2388411 - RNA, 17 nt, Human
ccuuguuggagccugca

SEQ ID NO: 2388412 - RNA, 18 nt, Human
ccuuguuggagccugcag

SEQ ID NO: 2388413 - RNA, 15 nt, Human
ccuuguucacacucu

SEQ ID NO: 2388414 - RNA, 21 nt, Human
ccuuguucugauaaugaaaau

SEQ ID NO: 2388415 - RNA, 21 nt, Human
ccuuguuccuagaguagagug

SEQ ID NO: 2388416 - RNA, 16 nt, Human
ccuuguuggagccugc

SEQ ID NO: 2388417 - RNA, 13 nt, Human
ccuuguugcauga

SEQ ID NO: 2388418 - RNA, 21 nt, Human
ccuuguuauuucucagacuuu

SEQ ID NO: 2388419 - RNA, 19 nt, Human
ccuuguuacuucugaggua

SEQ ID NO: 2388420 - RNA, 16 nt, Human
ccuuguuacuucugag

SEQ ID NO: 2388421 - RNA, 18 nt, Human
ccuuguuacuucugaggu

SEQ ID NO: 2388422 - RNA, 19 nt, Human
ccuuggugugacccucuga

SEQ ID NO: 2388423 - RNA, 15 nt, Human
ccuugguggcaagag

SEQ ID NO: 2388424 - RNA, 17 nt, Human
ccuugguggcaagagcc

SEQ ID NO: 2388425 - RNA, 14 nt, Human
ccuuguccacccac

SEQ ID NO: 2388426 - RNA, 16 nt, Human
ccuugucacugguaga

SEQ ID NO: 2388427 - RNA, 14 nt, Human
ccuuguccccugcc

SEQ ID NO: 2388428 - RNA, 21 nt, Human
ccuuguccccacacuccuaca

SEQ ID NO: 2388429 - RNA, 15 nt, Human
ccuuguccccugccu

SEQ ID NO: 2388430 - RNA, 14 nt, Human
ccuuguccuuuccc

SEQ ID NO: 2388431 - RNA, 16 nt, Human
ccuuguccacccaccu

SEQ ID NO: 2388432 - RNA, 13 nt, Human
ccuuguccccaca

SEQ ID NO: 2388433 - RNA, 14 nt, Human
ccuuguccccacac

SEQ ID NO: 2388434 - RNA, 15 nt, Human
ccuuguccccacacu

SEQ ID NO: 2388435 - RNA, 16 nt, Human
ccuuguccccacacuc

SEQ ID NO: 2388436 - RNA, 17 nt, Human
ccuuguccccacacucc

SEQ ID NO: 2388437 - RNA, 18 nt, Human
ccuuguccccacacuccu

SEQ ID NO: 2388438 - RNA, 19 nt, Human
ccuuguccccacacuccua

SEQ ID NO: 2388439 - RNA, 14 nt, Human
ccuuucucccaggc

SEQ ID NO: 2388440 - RNA, 22 nt, Human
ccuuucuccagccagcaaugau

SEQ ID NO: 2388441 - RNA, 18 nt, Human
ccuuucuccagccagcaa

SEQ ID NO: 2388442 - RNA, 20 nt, Human
ccuuucuccagccagcaaug

SEQ ID NO: 2388443 - RNA, 15 nt, Human
ccuuucuccccugcc

SEQ ID NO: 2388444 - RNA, 18 nt, Human
ccuuucuccccugccccc

SEQ ID NO: 2388445 - RNA, 10 nt, Human
ccuuucucac

SEQ ID NO: 2388446 - RNA, 18 nt, Human
ccuuucuaucauuuuugu

SEQ ID NO: 2388447 - RNA, 13 nt, Human
ccuuucuccagcc

SEQ ID NO: 2388448 - RNA, 14 nt, Human
ccuuucuccagcca

SEQ ID NO: 2388449 - RNA, 15 nt, Human
ccuuucuccagccag

SEQ ID NO: 2388450 - RNA, 16 nt, Human
ccuuucuccagccagc

SEQ ID NO: 2388451 - RNA, 17 nt, Human
ccuuucuccagccagca

SEQ ID NO: 2388452 - RNA, 23 nt, Human
ccuuucuaaacaagauuuuaaag

SEQ ID NO: 2388453 - RNA, 15 nt, Human
ccuuucuaaacaaga

SEQ ID NO: 2388454 - RNA, 22 nt, Human
ccuuucuaguccuauucuauug

SEQ ID NO: 2388455 - RNA, 17 nt, Human
ccuuucucccaggccag

SEQ ID NO: 2388456 - RNA, 19 nt, Human
ccuuucuccccugccccca

SEQ ID NO: 2388457 - RNA, 16 nt, Human
ccuuugaccugccucc

SEQ ID NO: 2388458 - RNA, 15 nt, Human
ccuuugaccugccuc

SEQ ID NO: 2388459 - RNA, 16 nt, Human
ccuuugacgccauccc

SEQ ID NO: 2388460 - RNA, 17 nt, Human
ccuuugacgccauccca

SEQ ID NO: 2388461 - RNA, 18 nt, Human
ccuuugacgccaucccag

SEQ ID NO: 2388462 - RNA, 20 nt, Human
ccuucggacaacucaguccc

SEQ ID NO: 2388463 - RNA, 13 nt, Human
ccuucuaccugcc

SEQ ID NO: 2388464 - RNA, 14 nt, Human
ccuucuaccugcca

SEQ ID NO: 2388465 - RNA, 15 nt, Human
ccuucuaccugccac

SEQ ID NO: 2388466 - RNA, 16 nt, Human
ccuucuaccugccacu

SEQ ID NO: 2388467 - RNA, 17 nt, Human
ccuucuaccugccacuc

SEQ ID NO: 2388468 - RNA, 14 nt, Human
ccuucuaggaagcu

SEQ ID NO: 2388469 - RNA, 15 nt, Human
ccuucuacugagccu

SEQ ID NO: 2388470 - RNA, 14 nt, Human
ccuucuacugagcc

SEQ ID NO: 2388471 - RNA, 18 nt, Human
ccuucuaccugccacuca

SEQ ID NO: 2388472 - RNA, 20 nt, Human
ccuucuaccugccacucaca

SEQ ID NO: 2388473 - RNA, 12 nt, Human
ccuucuaccugc

SEQ ID NO: 2388474 - RNA, 15 nt, Human
ccuucggcgccuuaa

SEQ ID NO: 2388475 - RNA, 15 nt, Human
ccuucuaguuuccca

SEQ ID NO: 2388476 - RNA, 20 nt, Human
ccuucuaggguuauugcauu

SEQ ID NO: 2388477 - RNA, 16 nt, Human
ccuucuaguuucccac

SEQ ID NO: 2388478 - RNA, 17 nt, Human
ccuucuaguuucccaca

SEQ ID NO: 2388479 - RNA, 18 nt, Human
ccuucuaguuucccacaa

SEQ ID NO: 2388480 - RNA, 15 nt, Human
ccuucuccuucaccu

SEQ ID NO: 2388481 - RNA, 19 nt, Human
ccuucuccuucaccuuugu

SEQ ID NO: 2388482 - RNA, 19 nt, Human
ccuucucucaccuccuaaa

SEQ ID NO: 2388483 - RNA, 14 nt, Human
ccuucucucaucuc

SEQ ID NO: 2388484 - RNA, 17 nt, Human
ccuucucucaccuccua

SEQ ID NO: 2388485 - RNA, 18 nt, Human
ccuucucucaccuccuaa

SEQ ID NO: 2388486 - RNA, 16 nt, Human
ccuucucucaccuccu

SEQ ID NO: 2388487 - RNA, 17 nt, Human
ccuucuccucuuguaaa

SEQ ID NO: 2388488 - RNA, 14 nt, Human
ccuucuguggcuca

SEQ ID NO: 2388489 - RNA, 15 nt, Human
ccuucugugaaagua

SEQ ID NO: 2388490 - RNA, 18 nt, Human
ccuucuguccugguguca

SEQ ID NO: 2388491 - RNA, 19 nt, Human
ccuucuguccuggugucac

SEQ ID NO: 2388492 - RNA, 21 nt, Human
ccuucuguccuggugucacuu

SEQ ID NO: 2388493 - RNA, 22 nt, Human
ccuucuguccuggugucacuua

SEQ ID NO: 2388494 - RNA, 22 nt, Human
ccuucuucggggaacuccugga

SEQ ID NO: 2388495 - RNA, 21 nt, Human
ccuucuucggggaacuccugg

SEQ ID NO: 2388496 - RNA, 18 nt, Human
ccuucuucuuuuugcugu

SEQ ID NO: 2388497 - RNA, 19 nt, Human
ccuucuucuuuuugcuguu

SEQ ID NO: 2388498 - RNA, 16 nt, Human
ccuucuuccaucccag

SEQ ID NO: 2388499 - RNA, 18 nt, Human
ccuucuuccaucccagga

SEQ ID NO: 2388500 - RNA, 19 nt, Human
ccuucuuccaucccaggac

SEQ ID NO: 2388501 - RNA, 15 nt, Human
ccuucuucacccagc

SEQ ID NO: 2388502 - RNA, 17 nt, Human
ccuucuucacccagcua

SEQ ID NO: 2388503 - RNA, 19 nt, Human
ccuucuucacccagcuaau

SEQ ID NO: 2388504 - RNA, 14 nt, Human
ccuucuuccauccc

SEQ ID NO: 2388505 - RNA, 22 nt, Human
ccuucuuccaucccaggacacc

SEQ ID NO: 2388506 - RNA, 22 nt, Human
ccuucuuauucucacuccacca

SEQ ID NO: 2388507 - RNA, 14 nt, Human
ccuucuucacccag

SEQ ID NO: 2388508 - RNA, 20 nt, Human
ccuucuuauucucacuccac

SEQ ID NO: 2388509 - RNA, 19 nt, Human
ccuucuuauucucacucca

SEQ ID NO: 2388510 - RNA, 23 nt, Human
ccuucuucacccagcuaaucugu

SEQ ID NO: 2388511 - RNA, 21 nt, Human
ccuucuguggcucacagaacc

SEQ ID NO: 2388512 - RNA, 18 nt, Human
ccuucuuauucucacucc

SEQ ID NO: 2388513 - RNA, 17 nt, Human
ccuucuuauucucacuc

SEQ ID NO: 2388514 - RNA, 21 nt, Human
ccuugagggugcuuguucccu

SEQ ID NO: 2388515 - RNA, 12 nt, Human
ccuugaggucuu

SEQ ID NO: 2388516 - RNA, 13 nt, Human
ccuugaggucuuu

SEQ ID NO: 2388517 - RNA, 23 nt, Human
ccuugaggucuuuugacaugugg

SEQ ID NO: 2388518 - RNA, 20 nt, Human
ccuugaguugauucagcucu

SEQ ID NO: 2388519 - RNA, 20 nt, Human
ccuugacgucaagucuccuu

SEQ ID NO: 2388520 - RNA, 16 nt, Human
ccuugacuuagauucu

SEQ ID NO: 2388521 - RNA, 21 nt, Human
ccuugaggaaacaacagcuuu

SEQ ID NO: 2388522 - RNA, 22 nt, Human
ccuugaggaggggcagguaaac

SEQ ID NO: 2388523 - RNA, 16 nt, Human
ccuugaggagucuugu

SEQ ID NO: 2388524 - RNA, 18 nt, Human
ccuugaggagucuugugu

SEQ ID NO: 2388525 - RNA, 23 nt, Human
ccuugaagauaucuugaaaugaa

SEQ ID NO: 2388526 - RNA, 11 nt, Human
ccuugaagccg

SEQ ID NO: 2388527 - RNA, 21 nt, Human
ccuugaaggguaaagaaguuu

SEQ ID NO: 2388528 - RNA, 21 nt, Human
ccuugaauauccccucccagu

SEQ ID NO: 2388529 - RNA, 23 nt, Human
ccuugaccauucuccaccugcca

SEQ ID NO: 2388530 - RNA, 13 nt, Human
ccuugacucuuuc

SEQ ID NO: 2388531 - RNA, 22 nt, Human
ccuugaccauucuccaccugcc

SEQ ID NO: 2388532 - RNA, 22 nt, Human
ccuugaagccacugaagcuggg

SEQ ID NO: 2388533 - RNA, 19 nt, Human
ccuugaagccacugaagcu

SEQ ID NO: 2388534 - RNA, 14 nt, Human
ccuugaagccacug

SEQ ID NO: 2388535 - RNA, 13 nt, Human
ccuugaagauauc

SEQ ID NO: 2388536 - RNA, 18 nt, Human
ccuugaaccacuucccuc

SEQ ID NO: 2388537 - RNA, 18 nt, Human
ccuugaagaacugcaggc

SEQ ID NO: 2388538 - RNA, 21 nt, Human
ccuugaagaacugcaggcccu

SEQ ID NO: 2388539 - RNA, 22 nt, Human
ccuugaagaacugcaggcccug

SEQ ID NO: 2388540 - RNA, 23 nt, Human
ccuugaagaacugcaggcccugg

SEQ ID NO: 2388541 - RNA, 14 nt, Human
ccuugaacuccugg

SEQ ID NO: 2388542 - RNA, 19 nt, Human
ccuugaaccacuucccuca

SEQ ID NO: 2388543 - RNA, 20 nt, Human
ccuugaacacugggggaggg

SEQ ID NO: 2388544 - RNA, 15 nt, Human
ccuugaaccacuucc

SEQ ID NO: 2388545 - RNA, 16 nt, Human
ccuugaaccacuuccc

SEQ ID NO: 2388546 - RNA, 18 nt, Human
ccuugaagaaccucucac

SEQ ID NO: 2388547 - RNA, 17 nt, Human
ccuugaagaaccucuca

SEQ ID NO: 2388548 - RNA, 13 nt, Human
ccuucuuuccucu

SEQ ID NO: 2388549 - RNA, 12 nt, Human
ccuucuuguagu

SEQ ID NO: 2388550 - RNA, 22 nt, Human
ccuucuucuuuuugcuguuguu

SEQ ID NO: 2388551 - RNA, 13 nt, Human
ccuucuuggugcu

SEQ ID NO: 2388552 - RNA, 20 nt, Human
ccuucuucuuuuugcuguug

SEQ ID NO: 2388553 - RNA, 21 nt, Human
ccuucuucuuuuugcuguugu

SEQ ID NO: 2388554 - RNA, 16 nt, Human
ccuucuugccuucaga

SEQ ID NO: 2388555 - RNA, 20 nt, Human
ccuugaaaacuuuaugcuaa

SEQ ID NO: 2388556 - RNA, 13 nt, Human
ccuugaacacugg

SEQ ID NO: 2388557 - RNA, 15 nt, Human
ccuugaaaauauuuu

SEQ ID NO: 2388558 - RNA, 21 nt, Human
ccuugaaaauaagaauagaaa

SEQ ID NO: 2388559 - RNA, 16 nt, Human
ccuucuuuccucuucc

SEQ ID NO: 2388560 - RNA, 17 nt, Human
ccuucuuuccucuuccc

SEQ ID NO: 2388561 - RNA, 13 nt, Human
ccuugaacuagga

SEQ ID NO: 2388562 - RNA, 15 nt, Human
ccuuaaaaccaaaga

SEQ ID NO: 2388563 - RNA, 16 nt, Human
ccuuaaaaccaaagag

SEQ ID NO: 2388564 - RNA, 17 nt, Human
ccuguuuuucugggugg

SEQ ID NO: 2388565 - RNA, 20 nt, Human
ccuguuuuucacauuuuccu

SEQ ID NO: 2388566 - RNA, 15 nt, Human
ccuguuuuucugggu

SEQ ID NO: 2388567 - RNA, 16 nt, Human
ccuguuuuucugggug

SEQ ID NO: 2388568 - RNA, 16 nt, Human
ccuguuuuucacauuu

SEQ ID NO: 2388569 - RNA, 13 nt, Human
ccuguuuuucaca

SEQ ID NO: 2388570 - RNA, 19 nt, Human
ccuguuuuuaagcuguuuc

SEQ ID NO: 2388571 - RNA, 18 nt, Human
ccuguuuuuaagcuguuu

SEQ ID NO: 2388572 - RNA, 17 nt, Human
ccuguuuuuaagcuguu

SEQ ID NO: 2388573 - RNA, 17 nt, Human
ccuguuuuguuggaagg

SEQ ID NO: 2388574 - RNA, 18 nt, Human
ccuguuuuguuggaaggu

SEQ ID NO: 2388575 - RNA, 17 nt, Human
ccuguuuucugagcccg

SEQ ID NO: 2388576 - RNA, 15 nt, Human
ccuguuuucugagcc

SEQ ID NO: 2388577 - RNA, 16 nt, Human
ccuguuuucugagccc

SEQ ID NO: 2388578 - RNA, 23 nt, Human
ccuuaaaacuuuaaucccacuug

SEQ ID NO: 2388579 - RNA, 17 nt, Human
ccuuaaaaccaaagagg

SEQ ID NO: 2388580 - RNA, 15 nt, Human
ccuuaaacugugugg

SEQ ID NO: 2388581 - RNA, 23 nt, Human
ccuuaaacagggcaucuccagga

SEQ ID NO: 2388582 - RNA, 20 nt, Human
ccuuaaacaaaaauuaaaau

SEQ ID NO: 2388583 - RNA, 12 nt, Human
ccuuaacacuga

SEQ ID NO: 2388584 - RNA, 12 nt, Human
ccuuaaaggaag

SEQ ID NO: 2388585 - RNA, 22 nt, Human
ccuuaaagucaguaacuuaccc

SEQ ID NO: 2388586 - RNA, 23 nt, Human
ccuuaaagaaagucgaauuaaua

SEQ ID NO: 2388587 - RNA, 22 nt, Human
ccuuaaaggcaccaucuaauag

SEQ ID NO: 2388588 - RNA, 14 nt, Human
ccuuaaguaagcaa

SEQ ID NO: 2388589 - RNA, 23 nt, Human
ccuuaaucagguccucagagaau

SEQ ID NO: 2388590 - RNA, 17 nt, Human
ccuuaauucacucccac

SEQ ID NO: 2388591 - RNA, 14 nt, Human
ccuuacacaauggu

SEQ ID NO: 2388592 - RNA, 20 nt, Human
ccuuacacaaugguuuucuu

SEQ ID NO: 2388593 - RNA, 17 nt, Human
ccuuaacuggagcccca

SEQ ID NO: 2388594 - RNA, 23 nt, Human
ccuuaacuggagccccaucagcu

SEQ ID NO: 2388595 - RNA, 14 nt, Human
ccuuaacuggagcc

SEQ ID NO: 2388596 - RNA, 20 nt, Human
ccuuaaggacaaaaaugaac

SEQ ID NO: 2388597 - RNA, 18 nt, Human
ccuuagaagucacacagu

SEQ ID NO: 2388598 - RNA, 17 nt, Human
ccuuagaagucacacag

SEQ ID NO: 2388599 - RNA, 12 nt, Human
ccuuacugcaga

SEQ ID NO: 2388600 - RNA, 22 nt, Human
ccuuacucuucuugaaauuuua

SEQ ID NO: 2388601 - RNA, 19 nt, Human
ccuuacccucauguucuua

SEQ ID NO: 2388602 - RNA, 19 nt, Human
ccuuaccugccaggaagcc

SEQ ID NO: 2388603 - RNA, 17 nt, Human
ccuuacucuucuugaaa

SEQ ID NO: 2388604 - RNA, 16 nt, Human
ccuuacucuucuugaa

SEQ ID NO: 2388605 - RNA, 14 nt, Human
ccuuaccuuuuuau

SEQ ID NO: 2388606 - RNA, 16 nt, Human
ccuuaccccuuagccu

SEQ ID NO: 2388607 - RNA, 15 nt, Human
ccuuaccccuuagcc

SEQ ID NO: 2388608 - RNA, 14 nt, Human
ccuuacccaucugc

SEQ ID NO: 2388609 - RNA, 15 nt, Human
ccuuaccaugugccu

SEQ ID NO: 2388610 - RNA, 21 nt, Human
ccuuaccaugugccugaucca

SEQ ID NO: 2388611 - RNA, 15 nt, Human
ccuuacccucauguu

SEQ ID NO: 2388612 - RNA, 20 nt, Human
ccuuaccacugcucugauga

SEQ ID NO: 2388613 - RNA, 18 nt, Human
ccuuaccaacuuucugua

SEQ ID NO: 2388614 - RNA, 19 nt, Human
ccuuaccaacuuucuguaa

SEQ ID NO: 2388615 - RNA, 20 nt, Human
ccuuaccagcagagcaccuu

SEQ ID NO: 2388616 - RNA, 22 nt, Human
ccuuacacguaccucucaucag

SEQ ID NO: 2388617 - RNA, 13 nt, Human
ccuuacacuuacu

SEQ ID NO: 2388618 - RNA, 22 nt, Human
ccuuacaaguuagaaaacauaa

SEQ ID NO: 2388619 - RNA, 21 nt, Human
ccuuacaguaggagcccagcu

SEQ ID NO: 2388620 - RNA, 17 nt, Human
ccuuacaguaggagccc

SEQ ID NO: 2388621 - RNA, 15 nt, Human
ccuuacacuuacugu

SEQ ID NO: 2388622 - RNA, 16 nt, Human
ccuuacacuuacuguu

SEQ ID NO: 2388623 - RNA, 14 nt, Human
ccuuacagccucug

SEQ ID NO: 2388624 - RNA, 18 nt, Human
ccuuacagccucugacuu

SEQ ID NO: 2388625 - RNA, 17 nt, Human
ccuuaccacugcucuga

SEQ ID NO: 2388626 - RNA, 15 nt, Human
ccuuacauuuccugg

SEQ ID NO: 2388627 - RNA, 15 nt, Human
ccuuaccaacuuucu

SEQ ID NO: 2388628 - RNA, 17 nt, Human
ccuuaccaacuuucugu

SEQ ID NO: 2388629 - RNA, 13 nt, Human
ccuuaccagcaga

SEQ ID NO: 2388630 - RNA, 21 nt, Human
ccuguguguccaaaacugccu

SEQ ID NO: 2388631 - RNA, 20 nt, Human
ccuguguguccaaaacugcc

SEQ ID NO: 2388632 - RNA, 20 nt, Human
ccugugugugcgccuacagg

SEQ ID NO: 2388633 - RNA, 21 nt, Human
ccugugugugcgccuacagga

SEQ ID NO: 2388634 - RNA, 22 nt, Human
ccugugucuugcaauggcagcc

SEQ ID NO: 2388635 - RNA, 14 nt, Human
ccugugugauugac

SEQ ID NO: 2388636 - RNA, 20 nt, Human
ccugugucccaugacccacc

SEQ ID NO: 2388637 - RNA, 21 nt, Human
ccugugucccaugacccaccc

SEQ ID NO: 2388638 - RNA, 22 nt, Human
ccugugucccaugacccacccc

SEQ ID NO: 2388639 - RNA, 23 nt, Human
ccugugucccaugacccaccccu

SEQ ID NO: 2388640 - RNA, 22 nt, Human
ccugugugauugacagcuuugc

SEQ ID NO: 2388641 - RNA, 19 nt, Human
ccugugugauugacagcuu

SEQ ID NO: 2388642 - RNA, 18 nt, Human
ccugugugauugacagcu

SEQ ID NO: 2388643 - RNA, 23 nt, Human
ccugugucuucuccaccacgcug

SEQ ID NO: 2388644 - RNA, 17 nt, Human
ccugugucuugcaaugg

SEQ ID NO: 2388645 - RNA, 11 nt, Human
ccuguguccca

SEQ ID NO: 2388646 - RNA, 19 nt, Human
ccuguguccaugcgcucag

SEQ ID NO: 2388647 - RNA, 13 nt, Human
ccugugucccaug

SEQ ID NO: 2388648 - RNA, 14 nt, Human
ccugugucccauga

SEQ ID NO: 2388649 - RNA, 18 nt, Human
ccugugucccaugaccca

SEQ ID NO: 2388650 - RNA, 19 nt, Human
ccugugucccaugacccac

SEQ ID NO: 2388651 - RNA, 19 nt, Human
ccugugucuugcaauggca

SEQ ID NO: 2388652 - RNA, 21 nt, Human
ccugugucuugcaauggcagc

SEQ ID NO: 2388653 - RNA, 13 nt, Human
ccuguguagcugg

SEQ ID NO: 2388654 - RNA, 19 nt, Human
ccuggugcucucugccacu

SEQ ID NO: 2388655 - RNA, 12 nt, Human
ccuguguacagg

SEQ ID NO: 2388656 - RNA, 13 nt, Human
ccuggugcucucu

SEQ ID NO: 2388657 - RNA, 15 nt, Human
ccuggugcucucugc

SEQ ID NO: 2388658 - RNA, 16 nt, Human
ccuggugcucucugcc

SEQ ID NO: 2388659 - RNA, 17 nt, Human
ccuggugcucucugcca

SEQ ID NO: 2388660 - RNA, 9 nt, Human
ccuggugcu

SEQ ID NO: 2388661 - RNA, 12 nt, Human
ccuggugcucuc

SEQ ID NO: 2388662 - RNA, 13 nt, Human
ccuguguccaugc

SEQ ID NO: 2388663 - RNA, 12 nt, Human
ccuguuuccuga

SEQ ID NO: 2388664 - RNA, 16 nt, Human
ccuguuucugcagcca

SEQ ID NO: 2388665 - RNA, 16 nt, Human
ccuguuuaauauuuaa

SEQ ID NO: 2388666 - RNA, 21 nt, Human
ccuguuuaauauuuaaacagc

SEQ ID NO: 2388667 - RNA, 21 nt, Human
ccuguugguuccaagcccugg

SEQ ID NO: 2388668 - RNA, 22 nt, Human
ccuguugguuccaagcccugga

SEQ ID NO: 2388669 - RNA, 14 nt, Human
ccuguuuaaauauu

SEQ ID NO: 2388670 - RNA, 14 nt, Human
ccuguuuaauauuu

SEQ ID NO: 2388671 - RNA, 15 nt, Human
ccuguuuaauauuua

SEQ ID NO: 2388672 - RNA, 19 nt, Human
ccuguuuuauacuguacuu

SEQ ID NO: 2388673 - RNA, 13 nt, Human
ccuguuuucugag

SEQ ID NO: 2388674 - RNA, 21 nt, Human
ccuguuugggccccucuccca

SEQ ID NO: 2388675 - RNA, 20 nt, Human
ccuguuuuagaagguucucu

SEQ ID NO: 2388676 - RNA, 18 nt, Human
ccuguuuguuucugaaag

SEQ ID NO: 2388677 - RNA, 18 nt, Human
ccuguuugaagccugccc

SEQ ID NO: 2388678 - RNA, 23 nt, Human
ccuguuugaagccugcccuuguc

SEQ ID NO: 2388679 - RNA, 14 nt, Human
ccuguuuguuucug

SEQ ID NO: 2388680 - RNA, 13 nt, Human
ccuguguuucuag

SEQ ID NO: 2388681 - RNA, 15 nt, Human
ccuguuacccagaga

SEQ ID NO: 2388682 - RNA, 13 nt, Human
ccuguugguucca

SEQ ID NO: 2388683 - RNA, 17 nt, Human
ccuguugguuccaagcc

SEQ ID NO: 2388684 - RNA, 23 nt, Human
ccuguugggccaggagccuccug

SEQ ID NO: 2388685 - RNA, 12 nt, Human
ccuguuuaagag

SEQ ID NO: 2388686 - RNA, 15 nt, Human
ccuguuuaagagaca

SEQ ID NO: 2388687 - RNA, 21 nt, Human
ccugugugugaaaggaagcuc

SEQ ID NO: 2388688 - RNA, 16 nt, Human
ccuguguugucucuag

SEQ ID NO: 2388689 - RNA, 20 nt, Human
ccuguguugucucuagagca

SEQ ID NO: 2388690 - RNA, 22 nt, Human
ccuguguugucucuagagcagg

SEQ ID NO: 2388691 - RNA, 21 nt, Human
ccuguuaaaagaugaaaauau

SEQ ID NO: 2388692 - RNA, 20 nt, Human
ccuguuaaaagaugaaaaua

SEQ ID NO: 2388693 - RNA, 12 nt, Human
ccuucagugccu

SEQ ID NO: 2388694 - RNA, 16 nt, Human
ccacuggacuugagcu

SEQ ID NO: 2388695 - RNA, 13 nt, Human
ccacugcguuguc

SEQ ID NO: 2388696 - RNA, 21 nt, Human
ccacuggacuugagcuuggca

SEQ ID NO: 2388697 - RNA, 20 nt, Human
ccacuggacuugagcuuggc

SEQ ID NO: 2388698 - RNA, 22 nt, Human
ccacuggacuugagcuuggcag

SEQ ID NO: 2388699 - RNA, 11 nt, Human
ccacuggccac

SEQ ID NO: 2388700 - RNA, 12 nt, Human
ccacuggccacc

SEQ ID NO: 2388701 - RNA, 11 nt, Human
ccacuggaggu

SEQ ID NO: 2388702 - RNA, 13 nt, Human
ccacuggccacca

SEQ ID NO: 2388703 - RNA, 14 nt, Human
ccacuggccaccag

SEQ ID NO: 2388704 - RNA, 16 nt, Human
ccacuggccaccaggc

SEQ ID NO: 2388705 - RNA, 17 nt, Human
ccacuggccaccaggcu

SEQ ID NO: 2388706 - RNA, 18 nt, Human
ccacuggccaccaggcug

SEQ ID NO: 2388707 - RNA, 19 nt, Human
ccacuggccaccaggcugg

SEQ ID NO: 2388708 - RNA, 20 nt, Human
ccacuggccaccaggcuggc

SEQ ID NO: 2388709 - RNA, 11 nt, Human
ccacuggccau

SEQ ID NO: 2388710 - RNA, 11 nt, Human
ccacugccucu

SEQ ID NO: 2388711 - RNA, 16 nt, Human
ccacugccucagguuc

SEQ ID NO: 2388712 - RNA, 19 nt, Human
ccacugccucagguuccua

SEQ ID NO: 2388713 - RNA, 14 nt, Human
ccacugccuucgcu

SEQ ID NO: 2388714 - RNA, 15 nt, Human
ccacugccuucgcuu

SEQ ID NO: 2388715 - RNA, 16 nt, Human
ccacugccuucgcuuc

SEQ ID NO: 2388716 - RNA, 18 nt, Human
ccacugccuucgcuucuu

SEQ ID NO: 2388717 - RNA, 16 nt, Human
ccacugcgaccacaag

SEQ ID NO: 2388718 - RNA, 22 nt, Human
ccacugccuuugaccugccucc

SEQ ID NO: 2388719 - RNA, 14 nt, Human
ccacugccuuugac

SEQ ID NO: 2388720 - RNA, 22 nt, Human
ccacugccuucgcuucuugccu

SEQ ID NO: 2388721 - RNA, 23 nt, Human
ccacugccuucgcuucuugccuc

SEQ ID NO: 2388722 - RNA, 20 nt, Human
ccacugcacuccagccuggg

SEQ ID NO: 2388723 - RNA, 19 nt, Human
ccacugcacuccagccugg

SEQ ID NO: 2388724 - RNA, 18 nt, Human
ccacugcacuccagccug

SEQ ID NO: 2388725 - RNA, 15 nt, Human
ccacucccugcaacc

SEQ ID NO: 2388726 - RNA, 14 nt, Human
ccacugccuacugc

SEQ ID NO: 2388727 - RNA, 23 nt, Human
ccacugcccgagcuggugcauua

SEQ ID NO: 2388728 - RNA, 22 nt, Human
ccacugcccgagcuggugcauu

SEQ ID NO: 2388729 - RNA, 16 nt, Human
ccacugccuacugcau

SEQ ID NO: 2388730 - RNA, 13 nt, Human
ccacugccucagg

SEQ ID NO: 2388731 - RNA, 14 nt, Human
ccacugccucaggu

SEQ ID NO: 2388732 - RNA, 15 nt, Human
ccacugccucagguu

SEQ ID NO: 2388733 - RNA, 20 nt, Human
ccacugcccgagcuggugca

SEQ ID NO: 2388734 - RNA, 18 nt, Human
ccacugcccgagcuggug

SEQ ID NO: 2388735 - RNA, 17 nt, Human
ccacugcccgagcuggu

SEQ ID NO: 2388736 - RNA, 16 nt, Human
ccacugcccgagcugg

SEQ ID NO: 2388737 - RNA, 15 nt, Human
ccacugcccgagcug

SEQ ID NO: 2388738 - RNA, 21 nt, Human
ccacugcacuccagccugggc

SEQ ID NO: 2388739 - RNA, 15 nt, Human
ccacugcccaccccc

SEQ ID NO: 2388740 - RNA, 16 nt, Human
ccacugcccacccccu

SEQ ID NO: 2388741 - RNA, 19 nt, Human
ccacugcccacccccucaa

SEQ ID NO: 2388742 - RNA, 16 nt, Human
ccacugccauaaaaca

SEQ ID NO: 2388743 - RNA, 20 nt, Human
ccacucaaauuaaucuuucu

SEQ ID NO: 2388744 - RNA, 13 nt, Human
ccacucacacagc

SEQ ID NO: 2388745 - RNA, 17 nt, Human
ccacucaagccaagcag

SEQ ID NO: 2388746 - RNA, 16 nt, Human
ccacucaagccaagca

SEQ ID NO: 2388747 - RNA, 12 nt, Human
ccacucaagcca

SEQ ID NO: 2388748 - RNA, 23 nt, Human
ccacuacggaauaguuggcuagg

SEQ ID NO: 2388749 - RNA, 16 nt, Human
ccacuaagcagaggag

SEQ ID NO: 2388750 - RNA, 14 nt, Human
ccacuaagcagagg

SEQ ID NO: 2388751 - RNA, 16 nt, Human
ccacuacucaaaaauu

SEQ ID NO: 2388752 - RNA, 13 nt, Human
ccacuaagcagag

SEQ ID NO: 2388753 - RNA, 22 nt, Human
ccacuaacuagagcagcccugg

SEQ ID NO: 2388754 - RNA, 21 nt, Human
ccacuaagaauucaaacuggg

SEQ ID NO: 2388755 - RNA, 22 nt, Human
ccacuacggaauaguuggcuag

SEQ ID NO: 2388756 - RNA, 18 nt, Human
ccacuacauucuguuaau

SEQ ID NO: 2388757 - RNA, 17 nt, Human
ccacuccagaccccugg

SEQ ID NO: 2388758 - RNA, 19 nt, Human
ccacuccagaccccuggcu

SEQ ID NO: 2388759 - RNA, 16 nt, Human
ccacuccccaccuuca

SEQ ID NO: 2388760 - RNA, 12 nt, Human
ccacucccugca

SEQ ID NO: 2388761 - RNA, 13 nt, Human
ccacucccugcaa

SEQ ID NO: 2388762 - RNA, 18 nt, Human
ccacucaagccaagcagc

SEQ ID NO: 2388763 - RNA, 14 nt, Human
ccacucacacagcc

SEQ ID NO: 2388764 - RNA, 15 nt, Human
ccacucacacagcca

SEQ ID NO: 2388765 - RNA, 16 nt, Human
ccacucacacagccag

SEQ ID NO: 2388766 - RNA, 17 nt, Human
ccacucacacagccagg

SEQ ID NO: 2388767 - RNA, 18 nt, Human
ccacucacacagccaggu

SEQ ID NO: 2388768 - RNA, 21 nt, Human
ccacucacacagccaggugcc

SEQ ID NO: 2388769 - RNA, 22 nt, Human
ccacucacacagccaggugccu

SEQ ID NO: 2388770 - RNA, 18 nt, Human
ccacucacuaggccccca

SEQ ID NO: 2388771 - RNA, 13 nt, Human
ccacucaccccgg

SEQ ID NO: 2388772 - RNA, 22 nt, Human
ccacucacgaauauuaugccca

SEQ ID NO: 2388773 - RNA, 23 nt, Human
ccacucacacagccaggugccuu

SEQ ID NO: 2388774 - RNA, 16 nt, Human
ccacucaccagugucc

SEQ ID NO: 2388775 - RNA, 11 nt, Human
ccacucacccc

SEQ ID NO: 2388776 - RNA, 12 nt, Human
ccacucaccccg

SEQ ID NO: 2388777 - RNA, 22 nt, Human
ccacucacuaggcccccacuug

SEQ ID NO: 2388778 - RNA, 18 nt, Human
ccacucaguccauagcag

SEQ ID NO: 2388779 - RNA, 21 nt, Human
ccacguuccuuacugcagaau

SEQ ID NO: 2388780 - RNA, 16 nt, Human
ccacguucucacaccc

SEQ ID NO: 2388781 - RNA, 17 nt, Human
ccacguucucacaccca

SEQ ID NO: 2388782 - RNA, 19 nt, Human
ccacguucucacacccacc

SEQ ID NO: 2388783 - RNA, 20 nt, Human
ccacguuccuuacugcagaa

SEQ ID NO: 2388784 - RNA, 15 nt, Human
ccacguuccuuacug

SEQ ID NO: 2388785 - RNA, 13 nt, Human
ccacguuucuaaa

SEQ ID NO: 2388786 - RNA, 22 nt, Human
ccacuaaaagaucgcaguuugc

SEQ ID NO: 2388787 - RNA, 11 nt, Human
ccacuaacuag

SEQ ID NO: 2388788 - RNA, 20 nt, Human
ccacuaacuagagcagcccu

SEQ ID NO: 2388789 - RNA, 21 nt, Human
ccacguuggagaagcccgugu

SEQ ID NO: 2388790 - RNA, 23 nt, Human
ccacguucugcucaucauucucu

SEQ ID NO: 2388791 - RNA, 20 nt, Human
ccacguuggagaagcccgug

SEQ ID NO: 2388792 - RNA, 18 nt, Human
ccacuaagcagaggaggg

SEQ ID NO: 2388793 - RNA, 14 nt, Human
ccacguucaccccu

SEQ ID NO: 2388794 - RNA, 22 nt, Human
ccacguguaacugucagccggg

SEQ ID NO: 2388795 - RNA, 15 nt, Human
ccacguucaccccuc

SEQ ID NO: 2388796 - RNA, 17 nt, Human
ccacguucaccccucca

SEQ ID NO: 2388797 - RNA, 23 nt, Human
ccacgugccaggcccggggcugg

SEQ ID NO: 2388798 - RNA, 16 nt, Human
ccacgugccaggcccg

SEQ ID NO: 2388799 - RNA, 15 nt, Human
ccacgugcuaccccc

SEQ ID NO: 2388800 - RNA, 15 nt, Human
ccacgugccaggccc

SEQ ID NO: 2388801 - RNA, 14 nt, Human
ccacgugccaggcc

SEQ ID NO: 2388802 - RNA, 17 nt, Human
ccacgugacagugccug

SEQ ID NO: 2388803 - RNA, 20 nt, Human
ccacgucugcuaacuuggag

SEQ ID NO: 2388804 - RNA, 15 nt, Human
ccacggccaggccag

SEQ ID NO: 2388805 - RNA, 17 nt, Human
ccacgucugucuucaca

SEQ ID NO: 2388806 - RNA, 22 nt, Human
ccacgucugcgccgccgccgga

SEQ ID NO: 2388807 - RNA, 16 nt, Human
ccacggccacuggcca

SEQ ID NO: 2388808 - RNA, 19 nt, Human
ccacguccugucagugccg

SEQ ID NO: 2388809 - RNA, 12 nt, Human
ccacggccaggc

SEQ ID NO: 2388810 - RNA, 21 nt, Human
ccacggagccacuccucugac

SEQ ID NO: 2388811 - RNA, 20 nt, Human
ccacggagccacuccucuga

SEQ ID NO: 2388812 - RNA, 17 nt, Human
ccacggacuccagucug

SEQ ID NO: 2388813 - RNA, 13 nt, Human
ccacggccacugg

SEQ ID NO: 2388814 - RNA, 13 nt, Human
ccacggccaggcc

SEQ ID NO: 2388815 - RNA, 14 nt, Human
ccacggccaggcca

SEQ ID NO: 2388816 - RNA, 22 nt, Human
ccaccugcccccuucucccaca

SEQ ID NO: 2388817 - RNA, 21 nt, Human
ccaccugcccccuucucccac

SEQ ID NO: 2388818 - RNA, 23 nt, Human
ccaccugcccccuucucccacac

SEQ ID NO: 2388819 - RNA, 15 nt, Human
ccaccugcucccagg

SEQ ID NO: 2388820 - RNA, 14 nt, Human
ccaccugcucccag

SEQ ID NO: 2388821 - RNA, 22 nt, Human
ccaccugcggugcuaucucccc

SEQ ID NO: 2388822 - RNA, 15 nt, Human
ccaccuggccucugc

SEQ ID NO: 2388823 - RNA, 16 nt, Human
ccaccuggccucugca

SEQ ID NO: 2388824 - RNA, 20 nt, Human
ccacgcugucuccagacccc

SEQ ID NO: 2388825 - RNA, 13 nt, Human
ccacgcuucucuu

SEQ ID NO: 2388826 - RNA, 21 nt, Human
ccacgcugucuccagaccccc

SEQ ID NO: 2388827 - RNA, 19 nt, Human
ccacgcugucuccagaccc

SEQ ID NO: 2388828 - RNA, 18 nt, Human
ccacgcugucuccagacc

SEQ ID NO: 2388829 - RNA, 15 nt, Human
ccacgcugucuccag

SEQ ID NO: 2388830 - RNA, 14 nt, Human
ccacgcugucucca

SEQ ID NO: 2388831 - RNA, 15 nt, Human
ccacgcuucucuuug

SEQ ID NO: 2388832 - RNA, 18 nt, Human
ccacggacguuuccauca

SEQ ID NO: 2388833 - RNA, 12 nt, Human
ccacggagccac

SEQ ID NO: 2388834 - RNA, 19 nt, Human
ccacggacguuuccaucag

SEQ ID NO: 2388835 - RNA, 20 nt, Human
ccacggacguuuccaucagg

SEQ ID NO: 2388836 - RNA, 17 nt, Human
ccaccuggccucugcac

SEQ ID NO: 2388837 - RNA, 14 nt, Human
ccaccuggccucug

SEQ ID NO: 2388838 - RNA, 13 nt, Human
ccaccuccccagg

SEQ ID NO: 2388839 - RNA, 15 nt, Human
ccaccuccccagccu

SEQ ID NO: 2388840 - RNA, 23 nt, Human
ccaccuccccacgcccuccccuc

SEQ ID NO: 2388841 - RNA, 16 nt, Human
ccaccuccccaggccg

SEQ ID NO: 2388842 - RNA, 23 nt, Human
ccaccuccccaggccguggcugc

SEQ ID NO: 2388843 - RNA, 17 nt, Human
ccaccuccccuauccac

SEQ ID NO: 2388844 - RNA, 20 nt, Human
ccaccucccccucccccuuc

SEQ ID NO: 2388845 - RNA, 22 nt, Human
ccaccuccccuauccacccagc

SEQ ID NO: 2388846 - RNA, 19 nt, Human
ccaccuccccuauccaccc

SEQ ID NO: 2388847 - RNA, 16 nt, Human
ccaccucagccuugga

SEQ ID NO: 2388848 - RNA, 13 nt, Human
ccaccuccagaaa

SEQ ID NO: 2388849 - RNA, 20 nt, Human
ccaccuccaucuucuuugca

SEQ ID NO: 2388850 - RNA, 12 nt, Human
ccaccuccccac

SEQ ID NO: 2388851 - RNA, 13 nt, Human
ccaccuccccacg

SEQ ID NO: 2388852 - RNA, 17 nt, Human
ccaccuccccacgcccu

SEQ ID NO: 2388853 - RNA, 18 nt, Human
ccaccuccccacgcccuc

SEQ ID NO: 2388854 - RNA, 17 nt, Human
ccaccucccacaaagga

SEQ ID NO: 2388855 - RNA, 14 nt, Human
ccaccugagguggg

SEQ ID NO: 2388856 - RNA, 13 nt, Human
ccaccucccucac

SEQ ID NO: 2388857 - RNA, 16 nt, Human
ccaccugcccaucaca

SEQ ID NO: 2388858 - RNA, 15 nt, Human
ccaccugcccaucac

SEQ ID NO: 2388859 - RNA, 14 nt, Human
ccaccugcccauca

SEQ ID NO: 2388860 - RNA, 14 nt, Human
ccaccugcccaacc

SEQ ID NO: 2388861 - RNA, 21 nt, Human
ccaccugaggugggcccagga

SEQ ID NO: 2388862 - RNA, 22 nt, Human
ccaccugaggugggcccaggac

SEQ ID NO: 2388863 - RNA, 15 nt, Human
ccaccucccucacca

SEQ ID NO: 2388864 - RNA, 15 nt, Human
ccaccugaggugggc

SEQ ID NO: 2388865 - RNA, 16 nt, Human
ccaccugaggugggcc

SEQ ID NO: 2388866 - RNA, 20 nt, Human
ccaccugaggugggcccagg

SEQ ID NO: 2388867 - RNA, 16 nt, Human
ccaccugccagggaca

SEQ ID NO: 2388868 - RNA, 20 nt, Human
ccaccugcccccuucuccca

SEQ ID NO: 2388869 - RNA, 18 nt, Human
ccaccugcccccuucucc

SEQ ID NO: 2388870 - RNA, 12 nt, Human
ccaccugccccc

SEQ ID NO: 2388871 - RNA, 23 nt, Human
ccaccugcccaucacaggguugg

SEQ ID NO: 2388872 - RNA, 20 nt, Human
ccaccugcccaucacagggu

SEQ ID NO: 2388873 - RNA, 17 nt, Human
ccaccugccuguugggc

SEQ ID NO: 2388874 - RNA, 20 nt, Human
ccaccugccuguugggccag

SEQ ID NO: 2388875 - RNA, 15 nt, Human
ccacccuccccucuc

SEQ ID NO: 2388876 - RNA, 21 nt, Human
ccacccuccccucucuugcac

SEQ ID NO: 2388877 - RNA, 17 nt, Human
ccacccucagcaccccu

SEQ ID NO: 2388878 - RNA, 22 nt, Human
ccacccucccagaccugccucu

SEQ ID NO: 2388879 - RNA, 15 nt, Human
ccacccuccacucuc

SEQ ID NO: 2388880 - RNA, 23 nt, Human
ccacccucugagcuuugcauguu

SEQ ID NO: 2388881 - RNA, 20 nt, Human
ccacccucugagcuuugcau

SEQ ID NO: 2388882 - RNA, 13 nt, Human
ccacccucccugg

SEQ ID NO: 2388883 - RNA, 15 nt, Human
ccacccucccuggag

SEQ ID NO: 2388884 - RNA, 19 nt, Human
ccacccguucugcuggccu

SEQ ID NO: 2388885 - RNA, 21 nt, Human
ccacccguucugcuggccugg

SEQ ID NO: 2388886 - RNA, 22 nt, Human
ccacccguucugcuggccugga

SEQ ID NO: 2388887 - RNA, 22 nt, Human
ccacccuaccuguucagugucc

SEQ ID NO: 2388888 - RNA, 12 nt, Human
ccacccuaccug

SEQ ID NO: 2388889 - RNA, 13 nt, Human
ccacccucagcac

SEQ ID NO: 2388890 - RNA, 19 nt, Human
ccacccucagcaccccuuc

SEQ ID NO: 2388891 - RNA, 20 nt, Human
ccaccccgggcucucugcug

SEQ ID NO: 2388892 - RNA, 18 nt, Human
ccaccccgggcucucugc

SEQ ID NO: 2388893 - RNA, 18 nt, Human
ccaccccggggacccugu

SEQ ID NO: 2388894 - RNA, 19 nt, Human
ccaccccggggacccugug

SEQ ID NO: 2388895 - RNA, 20 nt, Human
ccaccccggggacccuguga

SEQ ID NO: 2388896 - RNA, 21 nt, Human
ccaccccggggacccugugac

SEQ ID NO: 2388897 - RNA, 17 nt, Human
ccaccccgggcucucug

SEQ ID NO: 2388898 - RNA, 14 nt, Human
ccaccccgggcucu

SEQ ID NO: 2388899 - RNA, 16 nt, Human
ccaccccgcucugcau

SEQ ID NO: 2388900 - RNA, 15 nt, Human
ccaccccgcucugca

SEQ ID NO: 2388901 - RNA, 19 nt, Human
ccaccccucaacaccucug

SEQ ID NO: 2388902 - RNA, 13 nt, Human
ccacccgaugcug

SEQ ID NO: 2388903 - RNA, 20 nt, Human
ccaccccguagauucccauc

SEQ ID NO: 2388904 - RNA, 15 nt, Human
ccacccguggagaug

SEQ ID NO: 2388905 - RNA, 20 nt, Human
ccaccccuugcucucaaccc

SEQ ID NO: 2388906 - RNA, 14 nt, Human
ccacccgaugcugc

SEQ ID NO: 2388907 - RNA, 16 nt, Human
ccacccgaugcugcuu

SEQ ID NO: 2388908 - RNA, 17 nt, Human
ccacccgaugcugcuuu

SEQ ID NO: 2388909 - RNA, 17 nt, Human
ccacccugaaagcccug

SEQ ID NO: 2388910 - RNA, 16 nt, Human
ccacccugaaagcccu

SEQ ID NO: 2388911 - RNA, 18 nt, Human
ccacccugaaagcccuga

SEQ ID NO: 2388912 - RNA, 12 nt, Human
ccaccucagccu

SEQ ID NO: 2388913 - RNA, 13 nt, Human
ccaccucagccuc

SEQ ID NO: 2388914 - RNA, 14 nt, Human
ccaccucagccucc

SEQ ID NO: 2388915 - RNA, 15 nt, Human
ccaccucagccuugg

SEQ ID NO: 2388916 - RNA, 14 nt, Human
ccaccucagccuug

SEQ ID NO: 2388917 - RNA, 16 nt, Human
ccaccucagccuccug

SEQ ID NO: 2388918 - RNA, 14 nt, Human
ccaccuccagaaac

SEQ ID NO: 2388919 - RNA, 15 nt, Human
ccaccucagccuccc

SEQ ID NO: 2388920 - RNA, 22 nt, Human
ccacccagcccauucucucucc

SEQ ID NO: 2388921 - RNA, 13 nt, Human
ccacccagcccau

SEQ ID NO: 2388922 - RNA, 12 nt, Human
ccacccagccca

SEQ ID NO: 2388923 - RNA, 11 nt, Human
ccacccagccc

SEQ ID NO: 2388924 - RNA, 12 nt, Human
ccacccaggagc

SEQ ID NO: 2388925 - RNA, 23 nt, Human
ccacccccuucucugcuccacca

SEQ ID NO: 2388926 - RNA, 20 nt, Human
ccacccccuucucugcucca

SEQ ID NO: 2388927 - RNA, 16 nt, Human
ccaccccgccugcccu

SEQ ID NO: 2388928 - RNA, 14 nt, Human
ccacccaggagccc

SEQ ID NO: 2388929 - RNA, 14 nt, Human
ccacaucaaagagg

SEQ ID NO: 2388930 - RNA, 23 nt, Human
ccacauagugaugguuccccugu

SEQ ID NO: 2388931 - RNA, 22 nt, Human
ccacaucaauauugucauuccu

SEQ ID NO: 2388932 - RNA, 15 nt, Human
ccacauccacacacg

SEQ ID NO: 2388933 - RNA, 20 nt, Human
ccacauccacacacgcagga

SEQ ID NO: 2388934 - RNA, 19 nt, Human
ccacaucuacguuuuuggu

SEQ ID NO: 2388935 - RNA, 12 nt, Human
ccacaucugccu

SEQ ID NO: 2388936 - RNA, 14 nt, Human
ccacaucuugcucu

SEQ ID NO: 2388937 - RNA, 20 nt, Human
ccacaucuugaucugcucag

SEQ ID NO: 2388938 - RNA, 22 nt, Human
ccacaucuugaucugcucagcc

SEQ ID NO: 2388939 - RNA, 23 nt, Human
ccacaucuugaucugcucagccc

SEQ ID NO: 2388940 - RNA, 13 nt, Human
ccacaucugccuu

SEQ ID NO: 2388941 - RNA, 14 nt, Human
ccacaucugccuua

SEQ ID NO: 2388942 - RNA, 22 nt, Human
ccacaucugccuuaaaaccaaa

SEQ ID NO: 2388943 - RNA, 23 nt, Human
ccacaucugccuuaaaaccaaag

SEQ ID NO: 2388944 - RNA, 13 nt, Human
ccacacuggacuc

SEQ ID NO: 2388945 - RNA, 14 nt, Human
ccacacuggacucc

SEQ ID NO: 2388946 - RNA, 19 nt, Human
ccacauagugaugguuccc

SEQ ID NO: 2388947 - RNA, 21 nt, Human
ccacauagugaugguuccccu

SEQ ID NO: 2388948 - RNA, 22 nt, Human
ccacauagugaugguuccccug

SEQ ID NO: 2388949 - RNA, 23 nt, Human
ccacacugcuaggugggccagcc

SEQ ID NO: 2388950 - RNA, 22 nt, Human
ccacacugauccagcccugagu

SEQ ID NO: 2388951 - RNA, 19 nt, Human
ccacacugauccagcccug

SEQ ID NO: 2388952 - RNA, 14 nt, Human
ccacaccuggcacu

SEQ ID NO: 2388953 - RNA, 16 nt, Human
ccacaucuugcucugc

SEQ ID NO: 2388954 - RNA, 20 nt, Human
ccacaucuugcucugcugac

SEQ ID NO: 2388955 - RNA, 22 nt, Human
ccacaucuugcucugcugacag

SEQ ID NO: 2388956 - RNA, 23 nt, Human
ccacaucuugcucugcugacaga

SEQ ID NO: 2388957 - RNA, 20 nt, Human
ccaccaaaggccagggucac

SEQ ID NO: 2388958 - RNA, 19 nt, Human
ccacaugccaagcacugug

SEQ ID NO: 2388959 - RNA, 22 nt, Human
ccacaugagucccagugggagg

SEQ ID NO: 2388960 - RNA, 23 nt, Human
ccacaugagucccagugggaggc

SEQ ID NO: 2388961 - RNA, 13 nt, Human
ccacaugaguccc

SEQ ID NO: 2388962 - RNA, 17 nt, Human
ccacaugagucccagug

SEQ ID NO: 2388963 - RNA, 19 nt, Human
ccacaugagucccaguggg

SEQ ID NO: 2388964 - RNA, 14 nt, Human
ccaccaacauacuc

SEQ ID NO: 2388965 - RNA, 18 nt, Human
ccaccaacauacucccau

SEQ ID NO: 2388966 - RNA, 14 nt, Human
ccaccacacccagc

SEQ ID NO: 2388967 - RNA, 16 nt, Human
ccaccacacccagccc

SEQ ID NO: 2388968 - RNA, 20 nt, Human
ccaccaacauacucccaucu

SEQ ID NO: 2388969 - RNA, 22 nt, Human
ccaccaagccuggucagcccaa

SEQ ID NO: 2388970 - RNA, 16 nt, Human
ccacccaagggccugg

SEQ ID NO: 2388971 - RNA, 11 nt, Human
ccaccaagguc

SEQ ID NO: 2388972 - RNA, 21 nt, Human
ccacccaagcuuggcagccga

SEQ ID NO: 2388973 - RNA, 11 nt, Human
ccaccaagggc

SEQ ID NO: 2388974 - RNA, 17 nt, Human
ccaccaaggucuucagc

SEQ ID NO: 2388975 - RNA, 17 nt, Human
ccacccaagggccuggc

SEQ ID NO: 2388976 - RNA, 19 nt, Human
ccacccaagggccuggccu

SEQ ID NO: 2388977 - RNA, 15 nt, Human
ccacccaccagggcg

SEQ ID NO: 2388978 - RNA, 17 nt, Human
ccacccaccucccugcc

SEQ ID NO: 2388979 - RNA, 15 nt, Human
ccacccaaugcugau

SEQ ID NO: 2388980 - RNA, 19 nt, Human
ccacccaccucccugccuc

SEQ ID NO: 2388981 - RNA, 15 nt, Human
ccacccacuucccug

SEQ ID NO: 2388982 - RNA, 16 nt, Human
ccacccaccucagccu

SEQ ID NO: 2388983 - RNA, 14 nt, Human
ccacccaccucagc

SEQ ID NO: 2388984 - RNA, 15 nt, Human
ccacccaccucagcc

SEQ ID NO: 2388985 - RNA, 13 nt, Human
ccacccaccucag

SEQ ID NO: 2388986 - RNA, 22 nt, Human
ccacccaagggccuggccugag

SEQ ID NO: 2388987 - RNA, 20 nt, Human
ccacccaagggccuggccug

SEQ ID NO: 2388988 - RNA, 21 nt, Human
ccacccaagggccuggccuga

SEQ ID NO: 2388989 - RNA, 13 nt, Human
ccacacaccccaa

SEQ ID NO: 2388990 - RNA, 15 nt, Human
ccacacacgcaggaa

SEQ ID NO: 2388991 - RNA, 18 nt, Human
ccacacacgcaggaacuc

SEQ ID NO: 2388992 - RNA, 22 nt, Human
ccacacacgcaggaacucccag

SEQ ID NO: 2388993 - RNA, 23 nt, Human
ccacacacgcaggaacucccagc

SEQ ID NO: 2388994 - RNA, 15 nt, Human
ccacacacucgcccg

SEQ ID NO: 2388995 - RNA, 12 nt, Human
ccacacccagcc

SEQ ID NO: 2388996 - RNA, 12 nt, Human
ccacacacccca

SEQ ID NO: 2388997 - RNA, 20 nt, Human
ccacacacagcugggcugug

SEQ ID NO: 2388998 - RNA, 22 nt, Human
ccacacacagaggaagagcagg

SEQ ID NO: 2388999 - RNA, 19 nt, Human
ccacacacagcugggcugu

SEQ ID NO: 2389000 - RNA, 18 nt, Human
ccacacacagaggaagag

SEQ ID NO: 2389001 - RNA, 17 nt, Human
ccacacacagaggaaga

SEQ ID NO: 2389002 - RNA, 16 nt, Human
ccacacacagaggaag

SEQ ID NO: 2389003 - RNA, 12 nt, Human
ccacacacagag

SEQ ID NO: 2389004 - RNA, 16 nt, Human
ccacacacacccacac

SEQ ID NO: 2389005 - RNA, 23 nt, Human
ccacacacacccacacacucgcc

SEQ ID NO: 2389006 - RNA, 23 nt, Human
ccacacacacagaaaauauacug

SEQ ID NO: 2389007 - RNA, 22 nt, Human
ccacacacacagaaaauauacu

SEQ ID NO: 2389008 - RNA, 16 nt, Human
ccaaacccaugaggca

SEQ ID NO: 2389009 - RNA, 20 nt, Human
ccaaaccaccagaagcccag

SEQ ID NO: 2389010 - RNA, 14 nt, Human
ccaaaccaccuucc

SEQ ID NO: 2389011 - RNA, 16 nt, Human
ccaaaccaccuucccu

SEQ ID NO: 2389012 - RNA, 14 nt, Human
ccaaacccugucug

SEQ ID NO: 2389013 - RNA, 17 nt, Human
ccacacacacagaaaau

SEQ ID NO: 2389014 - RNA, 21 nt, Human
ccacacacacagaaaauauac

SEQ ID NO: 2389015 - RNA, 20 nt, Human
ccacacacacagaaaauaua

SEQ ID NO: 2389016 - RNA, 19 nt, Human
ccacacacacagaaaauau

SEQ ID NO: 2389017 - RNA, 18 nt, Human
ccacacacacagaaaaua

SEQ ID NO: 2389018 - RNA, 19 nt, Human
ccacaccucaguucccuug

SEQ ID NO: 2389019 - RNA, 18 nt, Human
ccacaccucaguucccuu

SEQ ID NO: 2389020 - RNA, 15 nt, Human
ccacaccgcagaagc

SEQ ID NO: 2389021 - RNA, 16 nt, Human
ccacaccguguaaacc

SEQ ID NO: 2389022 - RNA, 18 nt, Human
ccacaccguguaaaccaa

SEQ ID NO: 2389023 - RNA, 20 nt, Human
ccacaccguguaaaccaaag

SEQ ID NO: 2389024 - RNA, 14 nt, Human
ccacaccgcagaag

SEQ ID NO: 2389025 - RNA, 23 nt, Human
ccacacccuguacuguucugugu

SEQ ID NO: 2389026 - RNA, 14 nt, Human
ccacacacucgccc

SEQ ID NO: 2389027 - RNA, 13 nt, Human
ccacacccagccc

SEQ ID NO: 2389028 - RNA, 14 nt, Human
ccacacccagccca

SEQ ID NO: 2389029 - RNA, 14 nt, Human
ccacaccucccuga

SEQ ID NO: 2389030 - RNA, 23 nt, Human
ccacaccuccacaguucaguggc

SEQ ID NO: 2389031 - RNA, 15 nt, Human
ccacaccuccacagu

SEQ ID NO: 2389032 - RNA, 17 nt, Human
ccacaccuccacaguuc

SEQ ID NO: 2389033 - RNA, 22 nt, Human
ccacaccucaguucccuuggcc

SEQ ID NO: 2389034 - RNA, 13 nt, Human
ccacaccuccaca

SEQ ID NO: 2389035 - RNA, 14 nt, Human
ccacaccuccacag

SEQ ID NO: 2389036 - RNA, 17 nt, Human
ccacaccucccugaacc

SEQ ID NO: 2389037 - RNA, 16 nt, Human
ccacaccucccugaac

SEQ ID NO: 2389038 - RNA, 14 nt, Human
ccacaccucugcca

SEQ ID NO: 2389039 - RNA, 17 nt, Human
ccacacuccagcuggga

SEQ ID NO: 2389040 - RNA, 14 nt, Human
ccacacuccagcug

SEQ ID NO: 2389041 - RNA, 13 nt, Human
ccacacuccagcu

SEQ ID NO: 2389042 - RNA, 12 nt, Human
ccacaccugagc

SEQ ID NO: 2389043 - RNA, 15 nt, Human
ccacaccucugccag

SEQ ID NO: 2389044 - RNA, 16 nt, Human
ccacaccucugccaga

SEQ ID NO: 2389045 - RNA, 13 nt, Human
ccagaggagacau

SEQ ID NO: 2389046 - RNA, 22 nt, Human
ccagaggagagaggacccccug

SEQ ID NO: 2389047 - RNA, 21 nt, Human
ccagaggagagaggacccccu

SEQ ID NO: 2389048 - RNA, 22 nt, Human
ccagaggaaggggccagaggcu

SEQ ID NO: 2389049 - RNA, 14 nt, Human
ccagaggcccccag

SEQ ID NO: 2389050 - RNA, 15 nt, Human
ccagaggcccccagc

SEQ ID NO: 2389051 - RNA, 18 nt, Human
ccagaggcccccagccca

SEQ ID NO: 2389052 - RNA, 21 nt, Human
ccagaggauugcugccccauc

SEQ ID NO: 2389053 - RNA, 12 nt, Human
ccagaggagggc

SEQ ID NO: 2389054 - RNA, 22 nt, Human
ccagaggagggcagcagaaggg

SEQ ID NO: 2389055 - RNA, 16 nt, Human
ccagagggagugacag

SEQ ID NO: 2389056 - RNA, 17 nt, Human
ccagagggagugacaga

SEQ ID NO: 2389057 - RNA, 11 nt, Human
ccagaggcucg

SEQ ID NO: 2389058 - RNA, 14 nt, Human
ccagaggcugcaga

SEQ ID NO: 2389059 - RNA, 12 nt, Human
ccagaggcuggg

SEQ ID NO: 2389060 - RNA, 15 nt, Human
ccagaggcuggguuc

SEQ ID NO: 2389061 - RNA, 19 nt, Human
ccagaggcuauuauuuuca

SEQ ID NO: 2389062 - RNA, 22 nt, Human
ccagaggcccccagcccagggc

SEQ ID NO: 2389063 - RNA, 19 nt, Human
ccagaggcccccagcccag

SEQ ID NO: 2389064 - RNA, 21 nt, Human
ccagaggcccccagcccaggg

SEQ ID NO: 2389065 - RNA, 18 nt, Human
ccagagggagugacagag

SEQ ID NO: 2389066 - RNA, 19 nt, Human
ccagagggagugacagagg

SEQ ID NO: 2389067 - RNA, 20 nt, Human
ccagagggagugacagaggc

SEQ ID NO: 2389068 - RNA, 21 nt, Human
ccagagggagugacagaggca

SEQ ID NO: 2389069 - RNA, 20 nt, Human
ccagagcuacccgcagaguu

SEQ ID NO: 2389070 - RNA, 21 nt, Human
ccagagcuacccgcagaguuc

SEQ ID NO: 2389071 - RNA, 11 nt, Human
ccagagcugcc

SEQ ID NO: 2389072 - RNA, 12 nt, Human
ccagagcugcca

SEQ ID NO: 2389073 - RNA, 13 nt, Human
ccagagcugccac

SEQ ID NO: 2389074 - RNA, 19 nt, Human
ccagagcacagaucuguuu

SEQ ID NO: 2389075 - RNA, 23 nt, Human
ccagagaugggacugggagggcc

SEQ ID NO: 2389076 - RNA, 13 nt, Human
ccagagcaaaaua

SEQ ID NO: 2389077 - RNA, 22 nt, Human
ccagagcacuggguugcagggg

SEQ ID NO: 2389078 - RNA, 12 nt, Human
ccagagcacugg

SEQ ID NO: 2389079 - RNA, 22 nt, Human
ccagagaugggacugggagggc

SEQ ID NO: 2389080 - RNA, 21 nt, Human
ccagagaugggacugggaggg

SEQ ID NO: 2389081 - RNA, 16 nt, Human
ccagagaugggacugg

SEQ ID NO: 2389082 - RNA, 22 nt, Human
ccagagauggagguucucucgg

SEQ ID NO: 2389083 - RNA, 23 nt, Human
ccagagaugccuccaccgcugcc

SEQ ID NO: 2389084 - RNA, 20 nt, Human
ccagagaugccuccaccgcu

SEQ ID NO: 2389085 - RNA, 18 nt, Human
ccagagaugccuccaccg

SEQ ID NO: 2389086 - RNA, 17 nt, Human
ccagagaugccuccacc

SEQ ID NO: 2389087 - RNA, 16 nt, Human
ccagagaugccuccac

SEQ ID NO: 2389088 - RNA, 15 nt, Human
ccagagaugccucca

SEQ ID NO: 2389089 - RNA, 14 nt, Human
ccagagaugccucc

SEQ ID NO: 2389090 - RNA, 14 nt, Human
ccagagaguccucu

SEQ ID NO: 2389091 - RNA, 17 nt, Human
ccagaccccucuggcca

SEQ ID NO: 2389092 - RNA, 22 nt, Human
ccagacccccagcaacccuccu

SEQ ID NO: 2389093 - RNA, 20 nt, Human
ccagagauccaaaagaagcc

SEQ ID NO: 2389094 - RNA, 24 nt, Human
ccagagcuguuuauggccucagcu

SEQ ID NO: 2389095 - RNA, 14 nt, Human
ccagaggaacuguc

SEQ ID NO: 2389096 - RNA, 19 nt, Human
ccagaggaacuguccagag

SEQ ID NO: 2389097 - RNA, 23 nt, Human
ccagagcuguuuauggccucagc

SEQ ID NO: 2389098 - RNA, 22 nt, Human
ccagagcuguuuauggccucag

SEQ ID NO: 2389099 - RNA, 19 nt, Human
ccagaggaaggggccagag

SEQ ID NO: 2389100 - RNA, 17 nt, Human
ccagaggaaggggccag

SEQ ID NO: 2389101 - RNA, 20 nt, Human
ccagaggaacuguccagaga

SEQ ID NO: 2389102 - RNA, 21 nt, Human
ccagaggaacuguccagagag

SEQ ID NO: 2389103 - RNA, 22 nt, Human
ccagaggaacuguccagagagc

SEQ ID NO: 2389104 - RNA, 23 nt, Human
ccagaggaacuguccagagagca

SEQ ID NO: 2389105 - RNA, 21 nt, Human
ccagagcuguuuauggccuca

SEQ ID NO: 2389106 - RNA, 20 nt, Human
ccagagcuguuuauggccuc

SEQ ID NO: 2389107 - RNA, 19 nt, Human
ccagagcuguuuauggccu

SEQ ID NO: 2389108 - RNA, 21 nt, Human
ccagagcugggaggcauggcc

SEQ ID NO: 2389109 - RNA, 14 nt, Human
ccagagcugggagg

SEQ ID NO: 2389110 - RNA, 14 nt, Human
ccagagcugccacc

SEQ ID NO: 2389111 - RNA, 15 nt, Human
ccagagcugccaccu

SEQ ID NO: 2389112 - RNA, 16 nt, Human
ccagagcugccaccug

SEQ ID NO: 2389113 - RNA, 19 nt, Human
ccagagcugccaccugccu

SEQ ID NO: 2389114 - RNA, 19 nt, Human
ccagacccccagcaacccu

SEQ ID NO: 2389115 - RNA, 14 nt, Human
ccagacccccagca

SEQ ID NO: 2389116 - RNA, 22 nt, Human
ccagacccccaccccuucccca

SEQ ID NO: 2389117 - RNA, 21 nt, Human
ccagacccccaccccuucccc

SEQ ID NO: 2389118 - RNA, 19 nt, Human
ccagacccccaccccuucc

SEQ ID NO: 2389119 - RNA, 16 nt, Human
ccagacccccaccccu

SEQ ID NO: 2389120 - RNA, 15 nt, Human
ccagacccccacccc

SEQ ID NO: 2389121 - RNA, 14 nt, Human
ccagacccccaccc

SEQ ID NO: 2389122 - RNA, 16 nt, Human
ccagacccccuggaga

SEQ ID NO: 2389123 - RNA, 12 nt, Human
ccagacccccug

SEQ ID NO: 2389124 - RNA, 14 nt, Human
ccagacccaguggg

SEQ ID NO: 2389125 - RNA, 12 nt, Human
ccagacccccac

SEQ ID NO: 2389126 - RNA, 20 nt, Human
ccagacaccuugacagggca

SEQ ID NO: 2389127 - RNA, 21 nt, Human
ccagagaggguggugaccucu

SEQ ID NO: 2389128 - RNA, 23 nt, Human
ccagagaggguggugaccucugc

SEQ ID NO: 2389129 - RNA, 18 nt, Human
ccagaccccucuggccag

SEQ ID NO: 2389130 - RNA, 18 nt, Human
ccagacccccuggagacu

SEQ ID NO: 2389131 - RNA, 14 nt, Human
ccagagaggguggu

SEQ ID NO: 2389132 - RNA, 18 nt, Human
ccacuguaaaaugaaauu

SEQ ID NO: 2389133 - RNA, 12 nt, Human
ccacuggggaaa

SEQ ID NO: 2389134 - RNA, 14 nt, Human
ccagacacccagga

SEQ ID NO: 2389135 - RNA, 16 nt, Human
ccagacacccaggacu

SEQ ID NO: 2389136 - RNA, 15 nt, Human
ccagacacccaggac

SEQ ID NO: 2389137 - RNA, 20 nt, Human
ccacuguacuugcucuugau

SEQ ID NO: 2389138 - RNA, 17 nt, Human
ccagacaccuugacagg

SEQ ID NO: 2389139 - RNA, 19 nt, Human
ccagacaccuugacagggc

SEQ ID NO: 2389140 - RNA, 22 nt, Human
ccacuggggaaauaacagcugu

SEQ ID NO: 2389141 - RNA, 11 nt, Human
ccacuggggaa

SEQ ID NO: 2389142 - RNA, 17 nt, Human
ccacuguacuugcucuu

SEQ ID NO: 2389143 - RNA, 18 nt, Human
ccacuguacuugcucuug

SEQ ID NO: 2389144 - RNA, 19 nt, Human
ccacuguacuugcucuuga

SEQ ID NO: 2389145 - RNA, 14 nt, Human
ccacugucacccuc

SEQ ID NO: 2389146 - RNA, 21 nt, Human
ccagauugcaacaggcugggc

SEQ ID NO: 2389147 - RNA, 13 nt, Human
ccagauuuaugca

SEQ ID NO: 2389148 - RNA, 22 nt, Human
ccagauuuaugcauauuauuuu

SEQ ID NO: 2389149 - RNA, 12 nt, Human
ccagauuucacu

SEQ ID NO: 2389150 - RNA, 19 nt, Human
ccagauugcaacaggcugg

SEQ ID NO: 2389151 - RNA, 20 nt, Human
ccagauugcaacaggcuggg

SEQ ID NO: 2389152 - RNA, 23 nt, Human
ccagauucuuuccugaggcuggg

SEQ ID NO: 2389153 - RNA, 19 nt, Human
ccagauguuuuacgucugg

SEQ ID NO: 2389154 - RNA, 21 nt, Human
ccagauguuuuacgucuggga

SEQ ID NO: 2389155 - RNA, 18 nt, Human
ccagaugccuucuccaga

SEQ ID NO: 2389156 - RNA, 18 nt, Human
ccagaugcagggcaguca

SEQ ID NO: 2389157 - RNA, 15 nt, Human
ccagaugcagggcag

SEQ ID NO: 2389158 - RNA, 14 nt, Human
ccagaugcagggca

SEQ ID NO: 2389159 - RNA, 18 nt, Human
ccagagggcccaggcagg

SEQ ID NO: 2389160 - RNA, 15 nt, Human
ccagaggcugcccca

SEQ ID NO: 2389161 - RNA, 23 nt, Human
ccagaugcaccagcccuuagcag

SEQ ID NO: 2389162 - RNA, 15 nt, Human
ccagagggccugcaa

SEQ ID NO: 2389163 - RNA, 16 nt, Human
ccagagggccugcaag

SEQ ID NO: 2389164 - RNA, 17 nt, Human
ccagagggcccaggcag

SEQ ID NO: 2389165 - RNA, 15 nt, Human
ccagagggcccaggc

SEQ ID NO: 2389166 - RNA, 13 nt, Human
ccagagggcccag

SEQ ID NO: 2389167 - RNA, 16 nt, Human
ccagaggcuggguuca

SEQ ID NO: 2389168 - RNA, 13 nt, Human
ccagagggccugc

SEQ ID NO: 2389169 - RNA, 22 nt, Human
ccagagggagugacagaggcag

SEQ ID NO: 2389170 - RNA, 23 nt, Human
ccagagggagugacagaggcagc

SEQ ID NO: 2389171 - RNA, 14 nt, Human
ccagauggggccuc

SEQ ID NO: 2389172 - RNA, 16 nt, Human
ccagaugggggaaagc

SEQ ID NO: 2389173 - RNA, 20 nt, Human
ccagaugggggaaagcacag

SEQ ID NO: 2389174 - RNA, 16 nt, Human
ccagauggacuccagc

SEQ ID NO: 2389175 - RNA, 22 nt, Human
ccagaugcugauguucagugua

SEQ ID NO: 2389176 - RNA, 17 nt, Human
ccagauggacuccagcc

SEQ ID NO: 2389177 - RNA, 15 nt, Human
ccagaugcugauguu

SEQ ID NO: 2389178 - RNA, 19 nt, Human
ccagaugcugauguucagu

SEQ ID NO: 2389179 - RNA, 21 nt, Human
ccagaugcugauguucagugu

SEQ ID NO: 2389180 - RNA, 23 nt, Human
ccagaugcugauguucaguguaa

SEQ ID NO: 2389181 - RNA, 18 nt, Human
ccagauucuuuccugagg

SEQ ID NO: 2389182 - RNA, 23 nt, Human
ccagauguuuccagacuuccuug

SEQ ID NO: 2389183 - RNA, 17 nt, Human
ccagauguuuccagacu

SEQ ID NO: 2389184 - RNA, 19 nt, Human
ccagauucuuuccugaggc

SEQ ID NO: 2389185 - RNA, 20 nt, Human
ccagauucuuuccugaggcu

SEQ ID NO: 2389186 - RNA, 21 nt, Human
ccagauucuuuccugaggcug

SEQ ID NO: 2389187 - RNA, 22 nt, Human
ccagauucuuuccugaggcugg

SEQ ID NO: 2389188 - RNA, 17 nt, Human
ccagccaggccccaggc

SEQ ID NO: 2389189 - RNA, 12 nt, Human
ccagccaggcgg

SEQ ID NO: 2389190 - RNA, 17 nt, Human
ccagccaggcgggcuca

SEQ ID NO: 2389191 - RNA, 21 nt, Human
ccagccaggcgggcucaagga

SEQ ID NO: 2389192 - RNA, 14 nt, Human
ccagccaggcucug

SEQ ID NO: 2389193 - RNA, 15 nt, Human
ccagccaggcucugu

SEQ ID NO: 2389194 - RNA, 17 nt, Human
ccagccaggcucugugc

SEQ ID NO: 2389195 - RNA, 18 nt, Human
ccagccaggcucugugcu

SEQ ID NO: 2389196 - RNA, 19 nt, Human
ccagccaggcucugugcug

SEQ ID NO: 2389197 - RNA, 20 nt, Human
ccagccaggcucugugcuga

SEQ ID NO: 2389198 - RNA, 10 nt, Human
ccagccaggc

SEQ ID NO: 2389199 - RNA, 23 nt, Human
ccagccagcagccagcucucagc

SEQ ID NO: 2389200 - RNA, 19 nt, Human
ccagccagcagccagcucu

SEQ ID NO: 2389201 - RNA, 16 nt, Human
ccagccagcagccagc

SEQ ID NO: 2389202 - RNA, 15 nt, Human
ccagccagcagccag

SEQ ID NO: 2389203 - RNA, 13 nt, Human
ccagccagcagcc

SEQ ID NO: 2389204 - RNA, 18 nt, Human
ccagccagauccucuugg

SEQ ID NO: 2389205 - RNA, 19 nt, Human
ccagccagauccucuuggu

SEQ ID NO: 2389206 - RNA, 21 nt, Human
ccagccagauggacuccagcc

SEQ ID NO: 2389207 - RNA, 22 nt, Human
ccagccagcaaugauguccaga

SEQ ID NO: 2389208 - RNA, 22 nt, Human
ccagccaccccgggcucucugc

SEQ ID NO: 2389209 - RNA, 21 nt, Human
ccagccaccccgggcucucug

SEQ ID NO: 2389210 - RNA, 14 nt, Human
ccagccacguggag

SEQ ID NO: 2389211 - RNA, 20 nt, Human
ccagccacucgggaggcuga

SEQ ID NO: 2389212 - RNA, 21 nt, Human
ccagccacucgggaggcugag

SEQ ID NO: 2389213 - RNA, 22 nt, Human
ccagccacucgggaggcugaga

SEQ ID NO: 2389214 - RNA, 22 nt, Human
ccagccagaacguggcucugcu

SEQ ID NO: 2389215 - RNA, 23 nt, Human
ccagccagaacguggcucugcug

SEQ ID NO: 2389216 - RNA, 19 nt, Human
ccagccagaguuccugcgg

SEQ ID NO: 2389217 - RNA, 13 nt, Human
ccagccagauccu

SEQ ID NO: 2389218 - RNA, 18 nt, Human
ccagccaaccccugugga

SEQ ID NO: 2389219 - RNA, 13 nt, Human
ccagccaaccccu

SEQ ID NO: 2389220 - RNA, 19 nt, Human
ccagccaaacccugucuga

SEQ ID NO: 2389221 - RNA, 18 nt, Human
ccagccaaacccugucug

SEQ ID NO: 2389222 - RNA, 17 nt, Human
ccagccaaacccugucu

SEQ ID NO: 2389223 - RNA, 22 nt, Human
ccagccaacuuuugcauguuuu

SEQ ID NO: 2389224 - RNA, 19 nt, Human
ccagccaaccccuguggag

SEQ ID NO: 2389225 - RNA, 13 nt, Human
ccagccaccccgg

SEQ ID NO: 2389226 - RNA, 19 nt, Human
ccagccaaagccuccucca

SEQ ID NO: 2389227 - RNA, 18 nt, Human
ccagccaaagccuccucc

SEQ ID NO: 2389228 - RNA, 15 nt, Human
ccagccaaagccucc

SEQ ID NO: 2389229 - RNA, 17 nt, Human
ccagcauugcugguucu

SEQ ID NO: 2389230 - RNA, 13 nt, Human
ccagcauugcugg

SEQ ID NO: 2389231 - RNA, 18 nt, Human
ccagcauuuuacugauuc

SEQ ID NO: 2389232 - RNA, 13 nt, Human
ccagcauuccuuu

SEQ ID NO: 2389233 - RNA, 14 nt, Human
ccagcauuccuuuu

SEQ ID NO: 2389234 - RNA, 15 nt, Human
ccagcagguggggag

SEQ ID NO: 2389235 - RNA, 18 nt, Human
ccagcaggugcugacuuc

SEQ ID NO: 2389236 - RNA, 15 nt, Human
ccagcacugucucag

SEQ ID NO: 2389237 - RNA, 14 nt, Human
ccagcacugcccaa

SEQ ID NO: 2389238 - RNA, 15 nt, Human
ccagcaggugcugac

SEQ ID NO: 2389239 - RNA, 22 nt, Human
ccagcacugcuugaggaaaaca

SEQ ID NO: 2389240 - RNA, 19 nt, Human
ccagcacugcuugaggaaa

SEQ ID NO: 2389241 - RNA, 18 nt, Human
ccagcacugcuugaggaa

SEQ ID NO: 2389242 - RNA, 15 nt, Human
ccagcacugcuugag

SEQ ID NO: 2389243 - RNA, 13 nt, Human
ccagcacugccca

SEQ ID NO: 2389244 - RNA, 12 nt, Human
ccagcacugcuu

SEQ ID NO: 2389245 - RNA, 12 nt, Human
ccagcacuaacg

SEQ ID NO: 2389246 - RNA, 24 nt, Human
ccagcacuaaagcaguggacacca

SEQ ID NO: 2389247 - RNA, 12 nt, Human
ccagcacugagg

SEQ ID NO: 2389248 - RNA, 13 nt, Human
ccagcacugagga

SEQ ID NO: 2389249 - RNA, 14 nt, Human
ccagcacugaggaa

SEQ ID NO: 2389250 - RNA, 15 nt, Human
ccagcacugaggaag

SEQ ID NO: 2389251 - RNA, 17 nt, Human
ccagcacugaggaagaa

SEQ ID NO: 2389252 - RNA, 22 nt, Human
ccagcacugaggaagaacgggg

SEQ ID NO: 2389253 - RNA, 19 nt, Human
ccagcauccuuuucugcag

SEQ ID NO: 2389254 - RNA, 15 nt, Human
ccagcaucccuugac

SEQ ID NO: 2389255 - RNA, 18 nt, Human
ccagcaucccuugaccag

SEQ ID NO: 2389256 - RNA, 21 nt, Human
ccagcauccuuuucugcagag

SEQ ID NO: 2389257 - RNA, 21 nt, Human
ccagcaucccuugaccaggcc

SEQ ID NO: 2389258 - RNA, 22 nt, Human
ccagcaguuuucaagucaaauu

SEQ ID NO: 2389259 - RNA, 15 nt, Human
ccagcaguuuucaag

SEQ ID NO: 2389260 - RNA, 15 nt, Human
ccagcaguuugggag

SEQ ID NO: 2389261 - RNA, 22 nt, Human
ccagcaguugaaugacaacaga

SEQ ID NO: 2389262 - RNA, 23 nt, Human
ccagcauaauacuugcuuuggaa

SEQ ID NO: 2389263 - RNA, 14 nt, Human
ccagcauuccagcc

SEQ ID NO: 2389264 - RNA, 15 nt, Human
ccagcauuccagccc

SEQ ID NO: 2389265 - RNA, 16 nt, Human
ccagcauuccagcccc

SEQ ID NO: 2389266 - RNA, 17 nt, Human
ccagcauuccagccccu

SEQ ID NO: 2389267 - RNA, 18 nt, Human
ccagcauuccagccccuc

SEQ ID NO: 2389268 - RNA, 19 nt, Human
ccagcauuccagccccucu

SEQ ID NO: 2389269 - RNA, 20 nt, Human
ccagcauuccagccccucug

SEQ ID NO: 2389270 - RNA, 21 nt, Human
ccagcauuccagccccucugg

SEQ ID NO: 2389271 - RNA, 22 nt, Human
ccagcauuccagccccucuggu

SEQ ID NO: 2389272 - RNA, 19 nt, Human
ccagccucaucucuuuguu

SEQ ID NO: 2389273 - RNA, 21 nt, Human
ccagccuccaagcuccaucuc

SEQ ID NO: 2389274 - RNA, 12 nt, Human
ccagccucaguc

SEQ ID NO: 2389275 - RNA, 15 nt, Human
ccagccucaguccuc

SEQ ID NO: 2389276 - RNA, 19 nt, Human
ccagccucaguccuccccu

SEQ ID NO: 2389277 - RNA, 20 nt, Human
ccagccucaguccuccccuc

SEQ ID NO: 2389278 - RNA, 21 nt, Human
ccagccucaguccuccccuca

SEQ ID NO: 2389279 - RNA, 10 nt, Human
ccagccucag

SEQ ID NO: 2389280 - RNA, 11 nt, Human
ccagccucagu

SEQ ID NO: 2389281 - RNA, 19 nt, Human
ccagccgccaugcuccugg

SEQ ID NO: 2389282 - RNA, 18 nt, Human
ccagccgccaugcuccug

SEQ ID NO: 2389283 - RNA, 20 nt, Human
ccagcccuuugggaggcuga

SEQ ID NO: 2389284 - RNA, 23 nt, Human
ccagccgagauagccaaggccaa

SEQ ID NO: 2389285 - RNA, 14 nt, Human
ccagccgccaugcu

SEQ ID NO: 2389286 - RNA, 16 nt, Human
ccagccuccucuggac

SEQ ID NO: 2389287 - RNA, 20 nt, Human
ccagcccucccuguccuccu

SEQ ID NO: 2389288 - RNA, 19 nt, Human
ccagcccucccuguccucc

SEQ ID NO: 2389289 - RNA, 18 nt, Human
ccagcccucccuguccuc

SEQ ID NO: 2389290 - RNA, 17 nt, Human
ccagcccucccuguccu

SEQ ID NO: 2389291 - RNA, 16 nt, Human
ccagcccucccugucc

SEQ ID NO: 2389292 - RNA, 15 nt, Human
ccagcccucccuguc

SEQ ID NO: 2389293 - RNA, 14 nt, Human
ccagcccucccugu

SEQ ID NO: 2389294 - RNA, 13 nt, Human
ccagcccucccug

SEQ ID NO: 2389295 - RNA, 21 nt, Human
ccagcccuccccauggagcca

SEQ ID NO: 2389296 - RNA, 20 nt, Human
ccagcccuccccauggagcc

SEQ ID NO: 2389297 - RNA, 14 nt, Human
ccagcccuccccau

SEQ ID NO: 2389298 - RNA, 14 nt, Human
ccagcccucauccc

SEQ ID NO: 2389299 - RNA, 16 nt, Human
ccagccccagugccca

SEQ ID NO: 2389300 - RNA, 13 nt, Human
ccagcccucaucc

SEQ ID NO: 2389301 - RNA, 15 nt, Human
ccagcccuauggaug

SEQ ID NO: 2389302 - RNA, 16 nt, Human
ccagcccuauggaugu

SEQ ID NO: 2389303 - RNA, 16 nt, Human
ccagcccuuagcaggg

SEQ ID NO: 2389304 - RNA, 14 nt, Human
ccagcccuguggaa

SEQ ID NO: 2389305 - RNA, 22 nt, Human
ccagcccucccuguccuccucg

SEQ ID NO: 2389306 - RNA, 21 nt, Human
ccagcccucccuguccuccuc

SEQ ID NO: 2389307 - RNA, 21 nt, Human
ccagcccuccuuaucaaagga

SEQ ID NO: 2389308 - RNA, 17 nt, Human
ccagcccuuagcaggga

SEQ ID NO: 2389309 - RNA, 18 nt, Human
ccagcccuguggaaggga

SEQ ID NO: 2389310 - RNA, 15 nt, Human
ccagcccuguggaag

SEQ ID NO: 2389311 - RNA, 20 nt, Human
ccagcccuugagcuccccaa

SEQ ID NO: 2389312 - RNA, 16 nt, Human
ccagccccacccagga

SEQ ID NO: 2389313 - RNA, 15 nt, Human
ccagccccacccagg

SEQ ID NO: 2389314 - RNA, 14 nt, Human
ccagccccacccag

SEQ ID NO: 2389315 - RNA, 19 nt, Human
ccagccccacagcccacgu

SEQ ID NO: 2389316 - RNA, 21 nt, Human
ccagccccacagcccacgucc

SEQ ID NO: 2389317 - RNA, 23 nt, Human
ccagccagugaccugaggaagcg

SEQ ID NO: 2389318 - RNA, 13 nt, Human
ccagccccacagc

SEQ ID NO: 2389319 - RNA, 14 nt, Human
ccagccccacagcc

SEQ ID NO: 2389320 - RNA, 15 nt, Human
ccagccccacagccc

SEQ ID NO: 2389321 - RNA, 21 nt, Human
ccagccauacuuaucucucug

SEQ ID NO: 2389322 - RNA, 22 nt, Human
ccagccagugaccugaggaagc

SEQ ID NO: 2389323 - RNA, 20 nt, Human
ccagccagugaccugaggaa

SEQ ID NO: 2389324 - RNA, 19 nt, Human
ccagccagugaccugagga

SEQ ID NO: 2389325 - RNA, 15 nt, Human
ccagccagggcugcu

SEQ ID NO: 2389326 - RNA, 13 nt, Human
ccagccagggcug

SEQ ID NO: 2389327 - RNA, 14 nt, Human
ccagccagggcugc

SEQ ID NO: 2389328 - RNA, 23 nt, Human
ccagccccaaaacucuccucugc

SEQ ID NO: 2389329 - RNA, 13 nt, Human
ccagccccagugc

SEQ ID NO: 2389330 - RNA, 15 nt, Human
ccagccccagugccc

SEQ ID NO: 2389331 - RNA, 18 nt, Human
ccagccccacccaggagg

SEQ ID NO: 2389332 - RNA, 17 nt, Human
ccagccccacccaggag

SEQ ID NO: 2389333 - RNA, 22 nt, Human
ccagccccacagcccacguccu

SEQ ID NO: 2389334 - RNA, 16 nt, Human
ccagcaagugagagcu

SEQ ID NO: 2389335 - RNA, 20 nt, Human
ccagcaagugagagcugggu

SEQ ID NO: 2389336 - RNA, 21 nt, Human
ccagcaagugagagcugggug

SEQ ID NO: 2389337 - RNA, 22 nt, Human
ccagcaagugagagcugggugu

SEQ ID NO: 2389338 - RNA, 18 nt, Human
ccagcacuaaagcagugg

SEQ ID NO: 2389339 - RNA, 18 nt, Human
ccagcaaugauguccaga

SEQ ID NO: 2389340 - RNA, 21 nt, Human
ccagcaauucuccugccucag

SEQ ID NO: 2389341 - RNA, 20 nt, Human
ccagcaauucuccugccuca

SEQ ID NO: 2389342 - RNA, 19 nt, Human
ccagcaauucuccugccuc

SEQ ID NO: 2389343 - RNA, 18 nt, Human
ccagcaauucuccugccu

SEQ ID NO: 2389344 - RNA, 16 nt, Human
ccagcaauucuccugc

SEQ ID NO: 2389345 - RNA, 23 nt, Human
ccagcaaugacaucucaggggcc

SEQ ID NO: 2389346 - RNA, 17 nt, Human
ccagcaaugauguccag

SEQ ID NO: 2389347 - RNA, 17 nt, Human
ccagcaauauguaaaua

SEQ ID NO: 2389348 - RNA, 12 nt, Human
ccagcaaugaca

SEQ ID NO: 2389349 - RNA, 21 nt, Human
ccagcaaugacaucucagggg

SEQ ID NO: 2389350 - RNA, 22 nt, Human
ccagcaaugacaucucaggggc

SEQ ID NO: 2389351 - RNA, 15 nt, Human
ccagcaacuccaacu

SEQ ID NO: 2389352 - RNA, 11 nt, Human
ccagcaacuga

SEQ ID NO: 2389353 - RNA, 18 nt, Human
ccagcaacccuccuauca

SEQ ID NO: 2389354 - RNA, 13 nt, Human
ccagcaacugaau

SEQ ID NO: 2389355 - RNA, 15 nt, Human
ccagcaacugaauaa

SEQ ID NO: 2389356 - RNA, 17 nt, Human
ccagcaacugaauaaau

SEQ ID NO: 2389357 - RNA, 14 nt, Human
ccagauuucacucu

SEQ ID NO: 2389358 - RNA, 21 nt, Human
ccagcaacuugucuuuuucug

SEQ ID NO: 2389359 - RNA, 16 nt, Human
ccagcaacugaauaaa

SEQ ID NO: 2389360 - RNA, 18 nt, Human
ccagcaacuugucuuuuu

SEQ ID NO: 2389361 - RNA, 15 nt, Human
ccagcaagugagagc

SEQ ID NO: 2389362 - RNA, 19 nt, Human
ccagggagcauuuuccucc

SEQ ID NO: 2389363 - RNA, 20 nt, Human
ccagggagcauuuuccucca

SEQ ID NO: 2389364 - RNA, 21 nt, Human
ccagggagcauuuuccuccau

SEQ ID NO: 2389365 - RNA, 17 nt, Human
ccagggagaggccauga

SEQ ID NO: 2389366 - RNA, 14 nt, Human
ccagggagaggcca

SEQ ID NO: 2389367 - RNA, 22 nt, Human
ccaggcugugggccucaaggac

SEQ ID NO: 2389368 - RNA, 21 nt, Human
ccaggcugugggccucaagga

SEQ ID NO: 2389369 - RNA, 17 nt, Human
ccaggcugugggccuca

SEQ ID NO: 2389370 - RNA, 18 nt, Human
ccaggcgggcucaaggaa

SEQ ID NO: 2389371 - RNA, 22 nt, Human
ccaggcgggcucaaggaaaggg

SEQ ID NO: 2389372 - RNA, 20 nt, Human
ccaggcuuagucacugagac

SEQ ID NO: 2389373 - RNA, 14 nt, Human
ccagggacagaggg

SEQ ID NO: 2389374 - RNA, 15 nt, Human
ccagggacagagggg

SEQ ID NO: 2389375 - RNA, 21 nt, Human
ccagggacagaggggguggcc

SEQ ID NO: 2389376 - RNA, 22 nt, Human
ccagggacagaggggguggccu

SEQ ID NO: 2389377 - RNA, 23 nt, Human
ccagguuuuucaauuaaacggau

SEQ ID NO: 2389378 - RNA, 11 nt, Human
ccaguaaaauu

SEQ ID NO: 2389379 - RNA, 13 nt, Human
ccaguaaaauugc

SEQ ID NO: 2389380 - RNA, 15 nt, Human
ccaguaaaauugcca

SEQ ID NO: 2389381 - RNA, 17 nt, Human
ccagguuuuuggucuga

SEQ ID NO: 2389382 - RNA, 16 nt, Human
ccagguugaaagaccu

SEQ ID NO: 2389383 - RNA, 14 nt, Human
ccagguuuuucaau

SEQ ID NO: 2389384 - RNA, 15 nt, Human
ccagguuuuucaauu

SEQ ID NO: 2389385 - RNA, 16 nt, Human
ccagguuuuucaauua

SEQ ID NO: 2389386 - RNA, 17 nt, Human
ccagguuuuucaauuaa

SEQ ID NO: 2389387 - RNA, 18 nt, Human
ccagguuuuucaauuaaa

SEQ ID NO: 2389388 - RNA, 19 nt, Human
ccagguuuuucaauuaaac

SEQ ID NO: 2389389 - RNA, 20 nt, Human
ccagguuuuucaauuaaacg

SEQ ID NO: 2389390 - RNA, 21 nt, Human
ccagguuuuucaauuaaacgg

SEQ ID NO: 2389391 - RNA, 22 nt, Human
ccagguuuuucaauuaaacgga

SEQ ID NO: 2389392 - RNA, 13 nt, Human
ccagguugaaaga

SEQ ID NO: 2389393 - RNA, 24 nt, Human
ccagguucuccguuagcuccugug

SEQ ID NO: 2389394 - RNA, 22 nt, Human
ccagguucuccguuagcuccug

SEQ ID NO: 2389395 - RNA, 23 nt, Human
ccagguucuccguuagcuccugu

SEQ ID NO: 2389396 - RNA, 19 nt, Human
ccagguaccagcugcgcuu

SEQ ID NO: 2389397 - RNA, 15 nt, Human
ccagguucuauuugg

SEQ ID NO: 2389398 - RNA, 21 nt, Human
ccagguucuccguuagcuccu

SEQ ID NO: 2389399 - RNA, 16 nt, Human
ccagguucuauuugga

SEQ ID NO: 2389400 - RNA, 22 nt, Human
ccagguucuauuuggaauuuau

SEQ ID NO: 2389401 - RNA, 15 nt, Human
ccagguucagcuugu

SEQ ID NO: 2389402 - RNA, 24 nt, Human
ccaggugcacaagcuccaagcucc

SEQ ID NO: 2389403 - RNA, 12 nt, Human
ccagucucuucu

SEQ ID NO: 2389404 - RNA, 13 nt, Human
ccagucugacccu

SEQ ID NO: 2389405 - RNA, 12 nt, Human
ccagucugaccc

SEQ ID NO: 2389406 - RNA, 23 nt, Human
ccagucuccaccaggaaccucuu

SEQ ID NO: 2389407 - RNA, 21 nt, Human
ccagucuccaccaggaaccuc

SEQ ID NO: 2389408 - RNA, 20 nt, Human
ccagucuccaccaggaaccu

SEQ ID NO: 2389409 - RNA, 18 nt, Human
ccagucuggaaugcagug

SEQ ID NO: 2389410 - RNA, 19 nt, Human
ccagucuccaccaggaacc

SEQ ID NO: 2389411 - RNA, 18 nt, Human
ccagucuccaccaggaac

SEQ ID NO: 2389412 - RNA, 16 nt, Human
ccagucuccaccagga

SEQ ID NO: 2389413 - RNA, 16 nt, Human
ccagucuacccagaga

SEQ ID NO: 2389414 - RNA, 20 nt, Human
ccagucgcgcugccugugug

SEQ ID NO: 2389415 - RNA, 21 nt, Human
ccagucgcgcugccugugugg

SEQ ID NO: 2389416 - RNA, 14 nt, Human
ccagucuaaaaaua

SEQ ID NO: 2389417 - RNA, 17 nt, Human
ccaguaaaauugccaua

SEQ ID NO: 2389418 - RNA, 19 nt, Human
ccaguaaaauugccauauu

SEQ ID NO: 2389419 - RNA, 23 nt, Human
ccaguaaaauugccauauugcac

SEQ ID NO: 2389420 - RNA, 12 nt, Human
ccaguaaacaga

SEQ ID NO: 2389421 - RNA, 17 nt, Human
ccaguaaacagaggagu

SEQ ID NO: 2389422 - RNA, 23 nt, Human
ccagucugcugcccuccaucccg

SEQ ID NO: 2389423 - RNA, 16 nt, Human
ccagucugggcugccg

SEQ ID NO: 2389424 - RNA, 18 nt, Human
ccagucugggcugccggg

SEQ ID NO: 2389425 - RNA, 19 nt, Human
ccagucugggcugccgggu

SEQ ID NO: 2389426 - RNA, 22 nt, Human
ccagucugcugcccuccauccc

SEQ ID NO: 2389427 - RNA, 18 nt, Human
ccagucugcugcccucca

SEQ ID NO: 2389428 - RNA, 17 nt, Human
ccagucugcugcccucc

SEQ ID NO: 2389429 - RNA, 16 nt, Human
ccagucugcugcccuc

SEQ ID NO: 2389430 - RNA, 12 nt, Human
ccagucugugga

SEQ ID NO: 2389431 - RNA, 13 nt, Human
ccagucuguggau

SEQ ID NO: 2389432 - RNA, 13 nt, Human
ccagugaggcucu

SEQ ID NO: 2389433 - RNA, 19 nt, Human
ccagucuggaaugcagugg

SEQ ID NO: 2389434 - RNA, 20 nt, Human
ccagucuggaaugcaguggu

SEQ ID NO: 2389435 - RNA, 17 nt, Human
ccagggccagggcccug

SEQ ID NO: 2389436 - RNA, 15 nt, Human
ccagggccagggguc

SEQ ID NO: 2389437 - RNA, 14 nt, Human
ccagggcccagagc

SEQ ID NO: 2389438 - RNA, 13 nt, Human
ccagggcccagag

SEQ ID NO: 2389439 - RNA, 18 nt, Human
ccagggcccagagcccag

SEQ ID NO: 2389440 - RNA, 17 nt, Human
ccagggcccagagccca

SEQ ID NO: 2389441 - RNA, 16 nt, Human
ccagggcccagagccc

SEQ ID NO: 2389442 - RNA, 15 nt, Human
ccagggcccagagcc

SEQ ID NO: 2389443 - RNA, 16 nt, Human
ccagggccagggcccu

SEQ ID NO: 2389444 - RNA, 14 nt, Human
ccagggccagggcc

SEQ ID NO: 2389445 - RNA, 21 nt, Human
ccagggccacucugccucugc

SEQ ID NO: 2389446 - RNA, 12 nt, Human
ccagggccaggg

SEQ ID NO: 2389447 - RNA, 13 nt, Human
ccagggagccuuu

SEQ ID NO: 2389448 - RNA, 12 nt, Human
ccagggagccuu

SEQ ID NO: 2389449 - RNA, 14 nt, Human
ccagggagccuuug

SEQ ID NO: 2389450 - RNA, 18 nt, Human
ccagggagccuuugguuc

SEQ ID NO: 2389451 - RNA, 12 nt, Human
ccagggcuccug

SEQ ID NO: 2389452 - RNA, 13 nt, Human
ccagggcuccugc

SEQ ID NO: 2389453 - RNA, 14 nt, Human
ccagggcuccugca

SEQ ID NO: 2389454 - RNA, 23 nt, Human
ccagggcccagagcccagcucca

SEQ ID NO: 2389455 - RNA, 22 nt, Human
ccagggcccagagcccagcucc

SEQ ID NO: 2389456 - RNA, 21 nt, Human
ccagggcccagagcccagcuc

SEQ ID NO: 2389457 - RNA, 19 nt, Human
ccagggcccagagcccagc

SEQ ID NO: 2389458 - RNA, 21 nt, Human
ccagggcuggaaugauuucag

SEQ ID NO: 2389459 - RNA, 20 nt, Human
ccagggcuccugcacuuacu

SEQ ID NO: 2389460 - RNA, 20 nt, Human
ccagggcugcuagacggagg

SEQ ID NO: 2389461 - RNA, 16 nt, Human
ccagggcucugaccag

SEQ ID NO: 2389462 - RNA, 22 nt, Human
ccaggguucccccagcccugug

SEQ ID NO: 2389463 - RNA, 21 nt, Human
ccaggguucccccagcccugu

SEQ ID NO: 2389464 - RNA, 20 nt, Human
ccaggguucccccagcccug

SEQ ID NO: 2389465 - RNA, 15 nt, Human
ccaggguucccccag

SEQ ID NO: 2389466 - RNA, 14 nt, Human
ccaggguuccccca

SEQ ID NO: 2389467 - RNA, 19 nt, Human
ccagggcuggacugaggcc

SEQ ID NO: 2389468 - RNA, 13 nt, Human
ccagggcuggacu

SEQ ID NO: 2389469 - RNA, 16 nt, Human
ccagggcuggacugag

SEQ ID NO: 2389470 - RNA, 17 nt, Human
ccagggcuggacugagg

SEQ ID NO: 2389471 - RNA, 18 nt, Human
ccagggcuggacugaggc

SEQ ID NO: 2389472 - RNA, 17 nt, Human
ccaggguuucgagaagc

SEQ ID NO: 2389473 - RNA, 23 nt, Human
ccagguaagcaggaggaggugcc

SEQ ID NO: 2389474 - RNA, 16 nt, Human
ccagguaaugagggac

SEQ ID NO: 2389475 - RNA, 18 nt, Human
ccagguaaugagggacug

SEQ ID NO: 2389476 - RNA, 21 nt, Human
ccaggguugaccccagaggau

SEQ ID NO: 2389477 - RNA, 16 nt, Human
ccaggguugaucacac

SEQ ID NO: 2389478 - RNA, 22 nt, Human
ccaggguugaucacacucuggg

SEQ ID NO: 2389479 - RNA, 18 nt, Human
ccaggguugaccccagag

SEQ ID NO: 2389480 - RNA, 16 nt, Human
ccaggguugaccccag

SEQ ID NO: 2389481 - RNA, 19 nt, Human
ccaggugcacaagcuccaa

SEQ ID NO: 2389482 - RNA, 20 nt, Human
ccaggugcacaagcuccaag

SEQ ID NO: 2389483 - RNA, 18 nt, Human
ccaggugcacaagcucca

SEQ ID NO: 2389484 - RNA, 23 nt, Human
ccagguaaugagggacuggaacc

SEQ ID NO: 2389485 - RNA, 15 nt, Human
ccagguaccagcugc

SEQ ID NO: 2389486 - RNA, 17 nt, Human
ccagguaccagcugcgc

SEQ ID NO: 2389487 - RNA, 18 nt, Human
ccagguaccagcugcgcu

SEQ ID NO: 2389488 - RNA, 23 nt, Human
ccagguaccagcugcgcuugcuu

SEQ ID NO: 2389489 - RNA, 15 nt, Human
ccaggccagcugccu

SEQ ID NO: 2389490 - RNA, 23 nt, Human
ccaggagcugggcagaaggccaa

SEQ ID NO: 2389491 - RNA, 12 nt, Human
ccaggccaggcc

SEQ ID NO: 2389492 - RNA, 18 nt, Human
ccaggccaggccaccagg

SEQ ID NO: 2389493 - RNA, 19 nt, Human
ccaggcauuccccaggagg

SEQ ID NO: 2389494 - RNA, 21 nt, Human
ccaggcauuccccaggaggcc

SEQ ID NO: 2389495 - RNA, 23 nt, Human
ccaggagcucuucaggccucccu

SEQ ID NO: 2389496 - RNA, 16 nt, Human
ccaggagcugcccaga

SEQ ID NO: 2389497 - RNA, 17 nt, Human
ccaggagcugcucacua

SEQ ID NO: 2389498 - RNA, 21 nt, Human
ccaggagcucuucaggccucc

SEQ ID NO: 2389499 - RNA, 18 nt, Human
ccaggagcucuucaggcc

SEQ ID NO: 2389500 - RNA, 13 nt, Human
ccaggagcucuuc

SEQ ID NO: 2389501 - RNA, 16 nt, Human
ccaggagcugggcaga

SEQ ID NO: 2389502 - RNA, 21 nt, Human
ccaggagcugggcagaaggcc

SEQ ID NO: 2389503 - RNA, 17 nt, Human
ccaggcauuccccagga

SEQ ID NO: 2389504 - RNA, 18 nt, Human
ccaggcauuccccaggag

SEQ ID NO: 2389505 - RNA, 19 nt, Human
ccaggagagccagcccucc

SEQ ID NO: 2389506 - RNA, 18 nt, Human
ccaggagagccagcccuc

SEQ ID NO: 2389507 - RNA, 17 nt, Human
ccaggagagccagcccu

SEQ ID NO: 2389508 - RNA, 16 nt, Human
ccaggagagccagccc

SEQ ID NO: 2389509 - RNA, 13 nt, Human
ccaggagagccag

SEQ ID NO: 2389510 - RNA, 21 nt, Human
ccaggagagagaaagccaggc

SEQ ID NO: 2389511 - RNA, 16 nt, Human
ccaggagagagaaagc

SEQ ID NO: 2389512 - RNA, 17 nt, Human
ccaggagagagaaagcc

SEQ ID NO: 2389513 - RNA, 12 nt, Human
ccaggagagaga

SEQ ID NO: 2389514 - RNA, 14 nt, Human
ccaggagagagaaa

SEQ ID NO: 2389515 - RNA, 15 nt, Human
ccaggagagagaaag

SEQ ID NO: 2389516 - RNA, 16 nt, Human
ccaggagccccgaggc

SEQ ID NO: 2389517 - RNA, 19 nt, Human
ccaggagccccgaggccuu

SEQ ID NO: 2389518 - RNA, 20 nt, Human
ccaggagagccagcccuccc

SEQ ID NO: 2389519 - RNA, 21 nt, Human
ccaggagaggagcgggaccug

SEQ ID NO: 2389520 - RNA, 23 nt, Human
ccaggagagccagcccucccugu

SEQ ID NO: 2389521 - RNA, 12 nt, Human
ccaggagccucc

SEQ ID NO: 2389522 - RNA, 20 nt, Human
ccaggagccccgaggccuuc

SEQ ID NO: 2389523 - RNA, 12 nt, Human
ccaggagcaaau

SEQ ID NO: 2389524 - RNA, 15 nt, Human
ccaggagcaaauguu

SEQ ID NO: 2389525 - RNA, 17 nt, Human
ccaggagccugugccuc

SEQ ID NO: 2389526 - RNA, 16 nt, Human
ccaggagccugugccu

SEQ ID NO: 2389527 - RNA, 18 nt, Human
ccaggcgcaggggcucac

SEQ ID NO: 2389528 - RNA, 19 nt, Human
ccaggcgccccuucccccu

SEQ ID NO: 2389529 - RNA, 18 nt, Human
ccaggccguggcugccca

SEQ ID NO: 2389530 - RNA, 22 nt, Human
ccaggccguccucccgggcccu

SEQ ID NO: 2389531 - RNA, 18 nt, Human
ccaggcgccccuuccccc

SEQ ID NO: 2389532 - RNA, 14 nt, Human
ccaggccguggcug

SEQ ID NO: 2389533 - RNA, 16 nt, Human
ccaggccguggcugcc

SEQ ID NO: 2389534 - RNA, 22 nt, Human
ccaggccggugugggcuguguc

SEQ ID NO: 2389535 - RNA, 15 nt, Human
ccaggccguccuccc

SEQ ID NO: 2389536 - RNA, 19 nt, Human
ccaggccguccucccgggc

SEQ ID NO: 2389537 - RNA, 18 nt, Human
ccaggccgccccagccuc

SEQ ID NO: 2389538 - RNA, 21 nt, Human
ccaggccgggguggagcaugg

SEQ ID NO: 2389539 - RNA, 16 nt, Human
ccaggccgccccagcc

SEQ ID NO: 2389540 - RNA, 15 nt, Human
ccaggccgccccagc

SEQ ID NO: 2389541 - RNA, 18 nt, Human
ccaggccggcgagcccug

SEQ ID NO: 2389542 - RNA, 24 nt, Human
ccaggcuguaucccaugagccuca

SEQ ID NO: 2389543 - RNA, 17 nt, Human
ccaggcuuagucacuga

SEQ ID NO: 2389544 - RNA, 21 nt, Human
ccaggcgggagcgguggcccu

SEQ ID NO: 2389545 - RNA, 18 nt, Human
ccaggcgaugugcaagug

SEQ ID NO: 2389546 - RNA, 22 nt, Human
ccaggcgggagcgguggcccug

SEQ ID NO: 2389547 - RNA, 14 nt, Human
ccaggcgggcucaa

SEQ ID NO: 2389548 - RNA, 16 nt, Human
ccaggcgggcucaagg

SEQ ID NO: 2389549 - RNA, 17 nt, Human
ccaggcgggcucaagga

SEQ ID NO: 2389550 - RNA, 21 nt, Human
ccaggccauccggcccccaga

SEQ ID NO: 2389551 - RNA, 22 nt, Human
ccaggccauccggcccccagag

SEQ ID NO: 2389552 - RNA, 16 nt, Human
ccaggccaucuuccag

SEQ ID NO: 2389553 - RNA, 18 nt, Human
ccaggccaucuuccaggu

SEQ ID NO: 2389554 - RNA, 19 nt, Human
ccaggccagggggccaguc

SEQ ID NO: 2389555 - RNA, 16 nt, Human
ccaggccauggaggca

SEQ ID NO: 2389556 - RNA, 20 nt, Human
ccaggcccucugcccacucc

SEQ ID NO: 2389557 - RNA, 21 nt, Human
ccaggcccucugcccacuccc

SEQ ID NO: 2389558 - RNA, 21 nt, Human
ccaggccgccccagccucuga

SEQ ID NO: 2389559 - RNA, 16 nt, Human
ccaggccgcagcucuu

SEQ ID NO: 2389560 - RNA, 17 nt, Human
ccaggccgcagcucuug

SEQ ID NO: 2389561 - RNA, 19 nt, Human
ccaggccgcagcucuugcc

SEQ ID NO: 2389562 - RNA, 21 nt, Human
ccaggccgcagcucuugcccu

SEQ ID NO: 2389563 - RNA, 21 nt, Human
ccaggccccaaaaccacagcc

SEQ ID NO: 2389564 - RNA, 18 nt, Human
ccaggccgagaagccagu

SEQ ID NO: 2389565 - RNA, 14 nt, Human
ccaggccgcagcuc

SEQ ID NO: 2389566 - RNA, 20 nt, Human
ccaggccccaaaaccacagc

SEQ ID NO: 2389567 - RNA, 22 nt, Human
ccaggcccucugcccacucccu

SEQ ID NO: 2389568 - RNA, 23 nt, Human
ccaggcccucugcccacucccug

SEQ ID NO: 2389569 - RNA, 19 nt, Human
ccagccuccguauuucaga

SEQ ID NO: 2389570 - RNA, 11 nt, Human
ccagccuccuc

SEQ ID NO: 2389571 - RNA, 12 nt, Human
ccagccuccucu

SEQ ID NO: 2389572 - RNA, 13 nt, Human
ccagccuccucug

SEQ ID NO: 2389573 - RNA, 22 nt, Human
ccagccucaguccuccccucac

SEQ ID NO: 2389574 - RNA, 18 nt, Human
ccagccuccgagagggag

SEQ ID NO: 2389575 - RNA, 19 nt, Human
ccagccuccgagagggaga

SEQ ID NO: 2389576 - RNA, 21 nt, Human
ccagccuccgagagggagaga

SEQ ID NO: 2389577 - RNA, 20 nt, Human
ccaggagaaggccaauuccu

SEQ ID NO: 2389578 - RNA, 14 nt, Human
ccagccuccucugg

SEQ ID NO: 2389579 - RNA, 15 nt, Human
ccagccuccucugga

SEQ ID NO: 2389580 - RNA, 15 nt, Human
ccagccuccaugcug

SEQ ID NO: 2389581 - RNA, 16 nt, Human
ccagccuccaugcugc

SEQ ID NO: 2389582 - RNA, 21 nt, Human
ccagccucccugaagccuuug

SEQ ID NO: 2389583 - RNA, 17 nt, Human
ccagccucccugaagcc

SEQ ID NO: 2389584 - RNA, 15 nt, Human
ccagccucccugaag

SEQ ID NO: 2389585 - RNA, 13 nt, Human
ccagccucccuga

SEQ ID NO: 2389586 - RNA, 13 nt, Human
ccaucuacccucc

SEQ ID NO: 2389587 - RNA, 20 nt, Human
ccagugccgagaaggaagcc

SEQ ID NO: 2389588 - RNA, 22 nt, Human
ccagugguuccuaauccucuag

SEQ ID NO: 2389589 - RNA, 18 nt, Human
ccagugcccccacugacc

SEQ ID NO: 2389590 - RNA, 16 nt, Human
ccagugcccccacuga

SEQ ID NO: 2389591 - RNA, 14 nt, Human
ccagugcccccacu

SEQ ID NO: 2389592 - RNA, 16 nt, Human
ccagugaggcucugcc

SEQ ID NO: 2389593 - RNA, 16 nt, Human
ccagucuguggaucag

SEQ ID NO: 2389594 - RNA, 13 nt, Human
ccagugcccauuc

SEQ ID NO: 2389595 - RNA, 18 nt, Human
ccagugcccauuccucac

SEQ ID NO: 2389596 - RNA, 23 nt, Human
ccagugcccacaggaucagucug

SEQ ID NO: 2389597 - RNA, 14 nt, Human
ccagugaggcucug

SEQ ID NO: 2389598 - RNA, 15 nt, Human
ccagugaggcucugc

SEQ ID NO: 2389599 - RNA, 15 nt, Human
ccagugucugucccg

SEQ ID NO: 2389600 - RNA, 21 nt, Human
ccagugucugucccggggucc

SEQ ID NO: 2389601 - RNA, 16 nt, Human
ccaguguccuuagaac

SEQ ID NO: 2389602 - RNA, 15 nt, Human
ccaguguagccuugc

SEQ ID NO: 2389603 - RNA, 14 nt, Human
ccaguguagccuug

SEQ ID NO: 2389604 - RNA, 14 nt, Human
ccagugguugcugu

SEQ ID NO: 2389605 - RNA, 19 nt, Human
ccagugucaaguugugcuu

SEQ ID NO: 2389606 - RNA, 22 nt, Human
ccagugucaaguugugcuuguu

SEQ ID NO: 2389607 - RNA, 14 nt, Human
ccaguguccccucc

SEQ ID NO: 2389608 - RNA, 16 nt, Human
ccaguguccccuccac

SEQ ID NO: 2389609 - RNA, 22 nt, Human
ccaguguccccuccacugucac

SEQ ID NO: 2389610 - RNA, 18 nt, Human
ccagugucugucccgggg

SEQ ID NO: 2389611 - RNA, 20 nt, Human
ccaguguuagggaagggccu

SEQ ID NO: 2389612 - RNA, 17 nt, Human
ccaguuaaaaaaaauuu

SEQ ID NO: 2389613 - RNA, 17 nt, Human
ccaguguuagggaaggg

SEQ ID NO: 2389614 - RNA, 22 nt, Human
ccaguguuguggauuuaacaga

SEQ ID NO: 2389615 - RNA, 15 nt, Human
ccauagcuuccauga

SEQ ID NO: 2389616 - RNA, 13 nt, Human
ccauaggcccagu

SEQ ID NO: 2389617 - RNA, 12 nt, Human
ccauaggucacc

SEQ ID NO: 2389618 - RNA, 19 nt, Human
ccauaguaccauuuauaca

SEQ ID NO: 2389619 - RNA, 15 nt, Human
ccauaguaccauuua

SEQ ID NO: 2389620 - RNA, 23 nt, Human
ccauauucuguuggccaguguga

SEQ ID NO: 2389621 - RNA, 15 nt, Human
ccauagucacauggc

SEQ ID NO: 2389622 - RNA, 21 nt, Human
ccauaguaugggacuggccuc

SEQ ID NO: 2389623 - RNA, 19 nt, Human
ccauagcuccugcuccaca

SEQ ID NO: 2389624 - RNA, 21 nt, Human
ccaguuauggcuauaggugcu

SEQ ID NO: 2389625 - RNA, 14 nt, Human
ccaguuauggcuau

SEQ ID NO: 2389626 - RNA, 17 nt, Human
ccauucacucuuccaga

SEQ ID NO: 2389627 - RNA, 20 nt, Human
ccauucacuucauaauccag

SEQ ID NO: 2389628 - RNA, 20 nt, Human
ccauucagugauuacuguca

SEQ ID NO: 2389629 - RNA, 19 nt, Human
ccauucacucuuccagaau

SEQ ID NO: 2389630 - RNA, 18 nt, Human
ccauucuccaccugccag

SEQ ID NO: 2389631 - RNA, 14 nt, Human
ccauguuuguaaaa

SEQ ID NO: 2389632 - RNA, 15 nt, Human
ccauguuuguaaaac

SEQ ID NO: 2389633 - RNA, 21 nt, Human
ccauguuugagcucagacccc

SEQ ID NO: 2389634 - RNA, 13 nt, Human
ccauguuuguaaa

SEQ ID NO: 2389635 - RNA, 17 nt, Human
ccauguuugagcucaga

SEQ ID NO: 2389636 - RNA, 16 nt, Human
ccauguuugagcucag

SEQ ID NO: 2389637 - RNA, 14 nt, Human
ccauguuucucugg

SEQ ID NO: 2389638 - RNA, 21 nt, Human
ccauguuucucuggccccaag

SEQ ID NO: 2389639 - RNA, 15 nt, Human
ccauguuucucuggc

SEQ ID NO: 2389640 - RNA, 16 nt, Human
ccauguuucucuggcc

SEQ ID NO: 2389641 - RNA, 17 nt, Human
ccauguuggccaggcug

SEQ ID NO: 2389642 - RNA, 16 nt, Human
ccauguuggccaggcu

SEQ ID NO: 2389643 - RNA, 21 nt, Human
ccauguuggccaggcugcucu

SEQ ID NO: 2389644 - RNA, 18 nt, Human
ccauguuggccaggcugc

SEQ ID NO: 2389645 - RNA, 22 nt, Human
ccaugggagcugguuagaaaug

SEQ ID NO: 2389646 - RNA, 21 nt, Human
ccaugggaagacgaggcccuc

SEQ ID NO: 2389647 - RNA, 21 nt, Human
ccaugggaccaaaccuagccc

SEQ ID NO: 2389648 - RNA, 15 nt, Human
ccaugggaccaaacc

SEQ ID NO: 2389649 - RNA, 20 nt, Human
ccauggcuuccaaggugguc

SEQ ID NO: 2389650 - RNA, 14 nt, Human
ccauggcuuccucc

SEQ ID NO: 2389651 - RNA, 19 nt, Human
ccaugggacagggaggacg

SEQ ID NO: 2389652 - RNA, 16 nt, Human
ccaugggacagggagg

SEQ ID NO: 2389653 - RNA, 12 nt, Human
ccauccuacccu

SEQ ID NO: 2389654 - RNA, 19 nt, Human
ccauauucuguuggccagu

SEQ ID NO: 2389655 - RNA, 14 nt, Human
ccauaguaguauga

SEQ ID NO: 2389656 - RNA, 13 nt, Human
ccauauugcacau

SEQ ID NO: 2389657 - RNA, 18 nt, Human
ccauauugcacaugucuu

SEQ ID NO: 2389658 - RNA, 21 nt, Human
ccauauugcacaugucuuaau

SEQ ID NO: 2389659 - RNA, 23 nt, Human
ccauauugcacaugucuuaauga

SEQ ID NO: 2389660 - RNA, 13 nt, Human
ccauccuccccuu

SEQ ID NO: 2389661 - RNA, 20 nt, Human
ccaucgcuguguguuaguuc

SEQ ID NO: 2389662 - RNA, 14 nt, Human
ccauccuccccuuc

SEQ ID NO: 2389663 - RNA, 14 nt, Human
ccauccuccagcuu

SEQ ID NO: 2389664 - RNA, 15 nt, Human
ccauccuccagcuuc

SEQ ID NO: 2389665 - RNA, 16 nt, Human
ccauccuccagcuucu

SEQ ID NO: 2389666 - RNA, 17 nt, Human
ccauccuccagcuucug

SEQ ID NO: 2389667 - RNA, 14 nt, Human
ccaucuaaacugcc

SEQ ID NO: 2389668 - RNA, 17 nt, Human
ccauccuccagcaggga

SEQ ID NO: 2389669 - RNA, 13 nt, Human
ccauccuccagcu

SEQ ID NO: 2389670 - RNA, 16 nt, Human
ccauccuccagcaggg

SEQ ID NO: 2389671 - RNA, 15 nt, Human
ccauccuccagcagg

SEQ ID NO: 2389672 - RNA, 14 nt, Human
ccauccuccagcag

SEQ ID NO: 2389673 - RNA, 13 nt, Human
ccauccuccagca

SEQ ID NO: 2389674 - RNA, 18 nt, Human
ccauccucaaacacugca

SEQ ID NO: 2389675 - RNA, 23 nt, Human
ccauccuacccucgggcccaccu

SEQ ID NO: 2389676 - RNA, 13 nt, Human
ccauccucaaaca

SEQ ID NO: 2389677 - RNA, 16 nt, Human
ccauccuacccucggg

SEQ ID NO: 2389678 - RNA, 17 nt, Human
ccauccuacccucgggc

SEQ ID NO: 2389679 - RNA, 18 nt, Human
ccauccuacccucgggcc

SEQ ID NO: 2389680 - RNA, 22 nt, Human
ccauccuacccucgggcccacc

SEQ ID NO: 2389681 - RNA, 18 nt, Human
ccauggcuuaaugcuucu

SEQ ID NO: 2389682 - RNA, 21 nt, Human
ccaugggaaaugucaacaagu

SEQ ID NO: 2389683 - RNA, 21 nt, Human
ccauggcgugucccucucgga

SEQ ID NO: 2389684 - RNA, 19 nt, Human
ccauggcgugucccucucg

SEQ ID NO: 2389685 - RNA, 22 nt, Human
ccaucugcgugacaauaaaaca

SEQ ID NO: 2389686 - RNA, 15 nt, Human
ccauggcccucccag

SEQ ID NO: 2389687 - RNA, 20 nt, Human
ccaucugcgugacaauaaaa

SEQ ID NO: 2389688 - RNA, 22 nt, Human
ccaucugcccaggggugccccc

SEQ ID NO: 2389689 - RNA, 23 nt, Human
ccaucugcccaggggugcccccu

SEQ ID NO: 2389690 - RNA, 20 nt, Human
ccaucugcaccccccugggc

SEQ ID NO: 2389691 - RNA, 14 nt, Human
ccaucugcaccccu

SEQ ID NO: 2389692 - RNA, 19 nt, Human
ccaucugcaccccccuggg

SEQ ID NO: 2389693 - RNA, 12 nt, Human
ccaucugcaccc

SEQ ID NO: 2389694 - RNA, 17 nt, Human
ccaucugcaccccuucu

SEQ ID NO: 2389695 - RNA, 20 nt, Human
ccaucugcaccccuucucuc

SEQ ID NO: 2389696 - RNA, 22 nt, Human
ccaucugcaccccuucucuccu

SEQ ID NO: 2389697 - RNA, 23 nt, Human
ccaucugcaccccuucucuccuc

SEQ ID NO: 2389698 - RNA, 12 nt, Human
ccaucugcccag

SEQ ID NO: 2389699 - RNA, 13 nt, Human
ccaucugcccagg

SEQ ID NO: 2389700 - RNA, 15 nt, Human
ccaucugcccaggac

SEQ ID NO: 2389701 - RNA, 16 nt, Human
ccaucugcccaggacg

SEQ ID NO: 2389702 - RNA, 17 nt, Human
ccaucugcccaggggug

SEQ ID NO: 2389703 - RNA, 20 nt, Human
ccaucugcccaggggugccc

SEQ ID NO: 2389704 - RNA, 21 nt, Human
ccaucugcccaggggugcccc

SEQ ID NO: 2389705 - RNA, 23 nt, Human
ccaucgcuguguguuaguuccca

SEQ ID NO: 2389706 - RNA, 20 nt, Human
ccaucuaaauaccugcccug

SEQ ID NO: 2389707 - RNA, 16 nt, Human
ccaucuaaacugcccc

SEQ ID NO: 2389708 - RNA, 15 nt, Human
ccaucuaaacugccc

SEQ ID NO: 2389709 - RNA, 11 nt, Human
ccauucuccca

SEQ ID NO: 2389710 - RNA, 14 nt, Human
ccauucauuccauu

SEQ ID NO: 2389711 - RNA, 13 nt, Human
ccauucauuccau

SEQ ID NO: 2389712 - RNA, 19 nt, Human
ccauuuggcagagcuucuu

SEQ ID NO: 2389713 - RNA, 22 nt, Human
ccauucucccagguaccagcug

SEQ ID NO: 2389714 - RNA, 12 nt, Human
ccauucucccag

SEQ ID NO: 2389715 - RNA, 13 nt, Human
ccauucucccagg

SEQ ID NO: 2389716 - RNA, 14 nt, Human
ccauucucccaggu

SEQ ID NO: 2389717 - RNA, 15 nt, Human
ccauucucccaggua

SEQ ID NO: 2389718 - RNA, 19 nt, Human
ccauucuccaccugccagg

SEQ ID NO: 2389719 - RNA, 20 nt, Human
ccauucuccaccugccaggg

SEQ ID NO: 2389720 - RNA, 14 nt, Human
ccauuugugugugu

SEQ ID NO: 2389721 - RNA, 19 nt, Human
cccaaaacaccggguucca

SEQ ID NO: 2389722 - RNA, 14 nt, Human
ccauuuguguuuau

SEQ ID NO: 2389723 - RNA, 14 nt, Human
cccaaagccagaca

SEQ ID NO: 2389724 - RNA, 15 nt, Human
cccaaaaccacagcc

SEQ ID NO: 2389725 - RNA, 14 nt, Human
cccaaaaccacagc

SEQ ID NO: 2389726 - RNA, 14 nt, Human
cccaaagcuuuccu

SEQ ID NO: 2389727 - RNA, 15 nt, Human
cccaaagcuuuccug

SEQ ID NO: 2389728 - RNA, 20 nt, Human
cccaaaacucuccucugcug

SEQ ID NO: 2389729 - RNA, 21 nt, Human
cccaaaacaccggguuccagc

SEQ ID NO: 2389730 - RNA, 16 nt, Human
cccaaaacucuccucu

SEQ ID NO: 2389731 - RNA, 18 nt, Human
cccaaaacucuccucugc

SEQ ID NO: 2389732 - RNA, 21 nt, Human
cccaaaaccacagcccuguca

SEQ ID NO: 2389733 - RNA, 17 nt, Human
cccaaaggaaaaagcac

SEQ ID NO: 2389734 - RNA, 20 nt, Human
cccaaagcuuuccugcccca

SEQ ID NO: 2389735 - RNA, 16 nt, Human
cccaaagcuuuccugc

SEQ ID NO: 2389736 - RNA, 17 nt, Human
cccaaagcuuuccugcc

SEQ ID NO: 2389737 - RNA, 14 nt, Human
cccaaaggacucca

SEQ ID NO: 2389738 - RNA, 18 nt, Human
cccaaaggacuccaccca

SEQ ID NO: 2389739 - RNA, 13 nt, Human
cccaaagugcugg

SEQ ID NO: 2389740 - RNA, 15 nt, Human
cccaaagugcuggga

SEQ ID NO: 2389741 - RNA, 23 nt, Human
cccaaucccagcuaccucaacca

SEQ ID NO: 2389742 - RNA, 13 nt, Human
cccaagggaucug

SEQ ID NO: 2389743 - RNA, 22 nt, Human
cccaaggcugcgucuggagggg

SEQ ID NO: 2389744 - RNA, 17 nt, Human
cccaagggaaagaaaag

SEQ ID NO: 2389745 - RNA, 21 nt, Human
cccaaucccuuuauuaccccc

SEQ ID NO: 2389746 - RNA, 17 nt, Human
cccaaucccuuuauuac

SEQ ID NO: 2389747 - RNA, 17 nt, Human
cccaaggcucugagcaa

SEQ ID NO: 2389748 - RNA, 15 nt, Human
cccaaggcugcgucu

SEQ ID NO: 2389749 - RNA, 19 nt, Human
cccaaggcugcgucuggag

SEQ ID NO: 2389750 - RNA, 20 nt, Human
cccaaggcugcgucuggagg

SEQ ID NO: 2389751 - RNA, 21 nt, Human
cccaaggcugcgucuggaggg

SEQ ID NO: 2389752 - RNA, 22 nt, Human
cccaaggaggaaaaacagacaa

SEQ ID NO: 2389753 - RNA, 22 nt, Human
cccaaggcguccgcgcgccagc

SEQ ID NO: 2389754 - RNA, 15 nt, Human
cccaaggcggccccu

SEQ ID NO: 2389755 - RNA, 22 nt, Human
cccaaccggggagcccccgccc

SEQ ID NO: 2389756 - RNA, 12 nt, Human
cccaaccucaga

SEQ ID NO: 2389757 - RNA, 17 nt, Human
cccaacccuucccucac

SEQ ID NO: 2389758 - RNA, 16 nt, Human
cccaacccugccccug

SEQ ID NO: 2389759 - RNA, 14 nt, Human
cccaacccugucug

SEQ ID NO: 2389760 - RNA, 15 nt, Human
cccaacccuucccca

SEQ ID NO: 2389761 - RNA, 15 nt, Human
cccaacccuggcacc

SEQ ID NO: 2389762 - RNA, 15 nt, Human
cccaaggaggaaaaa

SEQ ID NO: 2389763 - RNA, 14 nt, Human
cccaaggaggaaaa

SEQ ID NO: 2389764 - RNA, 15 nt, Human
cccaaggacugaggg

SEQ ID NO: 2389765 - RNA, 16 nt, Human
cccaaggacugaggga

SEQ ID NO: 2389766 - RNA, 21 nt, Human
cccaaggacugagggacucug

SEQ ID NO: 2389767 - RNA, 16 nt, Human
cccaaccuccugaccu

SEQ ID NO: 2389768 - RNA, 22 nt, Human
cccaaggaaagccccagcacua

SEQ ID NO: 2389769 - RNA, 20 nt, Human
cccaaagugguauagaaaug

SEQ ID NO: 2389770 - RNA, 16 nt, Human
cccaaagucuguguga

SEQ ID NO: 2389771 - RNA, 23 nt, Human
cccaaaggauacuguaacacuuu

SEQ ID NO: 2389772 - RNA, 16 nt, Human
cccaaagugcugggau

SEQ ID NO: 2389773 - RNA, 21 nt, Human
cccaaagugguauagaaaugc

SEQ ID NO: 2389774 - RNA, 21 nt, Human
cccaaagugcuuccaaggcag

SEQ ID NO: 2389775 - RNA, 17 nt, Human
cccaaauaagaagggau

SEQ ID NO: 2389776 - RNA, 14 nt, Human
cccaaaucaauaca

SEQ ID NO: 2389777 - RNA, 16 nt, Human
cccaaaucaauacacu

SEQ ID NO: 2389778 - RNA, 23 nt, Human
cccaaauccgaaccuccucugug

SEQ ID NO: 2389779 - RNA, 18 nt, Human
cccaaauccgaaccuccu

SEQ ID NO: 2389780 - RNA, 15 nt, Human
cccaaauccgaaccu

SEQ ID NO: 2389781 - RNA, 15 nt, Human
cccaacccugccccu

SEQ ID NO: 2389782 - RNA, 14 nt, Human
cccaacccugcccc

SEQ ID NO: 2389783 - RNA, 13 nt, Human
cccaacccugccc

SEQ ID NO: 2389784 - RNA, 14 nt, Human
cccaaaugagccau

SEQ ID NO: 2389785 - RNA, 18 nt, Human
cccaaauggaaaugggca

SEQ ID NO: 2389786 - RNA, 22 nt, Human
cccaaauggaaaugggcagagc

SEQ ID NO: 2389787 - RNA, 22 nt, Human
cccagaaggcauaucagucucu

SEQ ID NO: 2389788 - RNA, 14 nt, Human
caucucucuuuaau

SEQ ID NO: 2389789 - RNA, 14 nt, Human
caucucucuggccc

SEQ ID NO: 2389790 - RNA, 15 nt, Human
caucucucuggcccu

SEQ ID NO: 2389791 - RNA, 18 nt, Human
caucucucugcccaaccc

SEQ ID NO: 2389792 - RNA, 16 nt, Human
caucucucugcccaac

SEQ ID NO: 2389793 - RNA, 23 nt, Human
caucucucuacuccuaccucagc

SEQ ID NO: 2389794 - RNA, 11 nt, Human
caucucucucc

SEQ ID NO: 2389795 - RNA, 15 nt, Human
caucucucugcccaa

SEQ ID NO: 2389796 - RNA, 13 nt, Human
caucucucugccc

SEQ ID NO: 2389797 - RNA, 21 nt, Human
caucucucuggcccucuaccc

SEQ ID NO: 2389798 - RNA, 15 nt, Human
caucucugcaaucuu

SEQ ID NO: 2389799 - RNA, 11 nt, Human
caucucugcac

SEQ ID NO: 2389800 - RNA, 22 nt, Human
caucucugcaaucuucucagaa

SEQ ID NO: 2389801 - RNA, 12 nt, Human
caucucugcuug

SEQ ID NO: 2389802 - RNA, 20 nt, Human
caucucugcuugagucaggu

SEQ ID NO: 2389803 - RNA, 13 nt, Human
caucucugcuuga

SEQ ID NO: 2389804 - RNA, 21 nt, Human
caucucugcuugagucagguu

SEQ ID NO: 2389805 - RNA, 13 nt, Human
caucucugcuugg

SEQ ID NO: 2389806 - RNA, 14 nt, Human
caucucuggaugcc

SEQ ID NO: 2389807 - RNA, 16 nt, Human
caucucuggaugccug

SEQ ID NO: 2389808 - RNA, 16 nt, Human
caucucucccuccccu

SEQ ID NO: 2389809 - RNA, 15 nt, Human
caucucucccucccc

SEQ ID NO: 2389810 - RNA, 12 nt, Human
caucucucccuc

SEQ ID NO: 2389811 - RNA, 18 nt, Human
caucucucagaagggagg

SEQ ID NO: 2389812 - RNA, 15 nt, Human
caucucucagaaggg

SEQ ID NO: 2389813 - RNA, 23 nt, Human
caucucuaacagcucaggaucuc

SEQ ID NO: 2389814 - RNA, 22 nt, Human
caucucuaacagcucaggaucu

SEQ ID NO: 2389815 - RNA, 19 nt, Human
caucucuaauuggaagaaa

SEQ ID NO: 2389816 - RNA, 22 nt, Human
caucucucuacuccuaccucag

SEQ ID NO: 2389817 - RNA, 21 nt, Human
caucucucuacuccuaccuca

SEQ ID NO: 2389818 - RNA, 23 nt, Human
caucucucccuccccugccauuu

SEQ ID NO: 2389819 - RNA, 20 nt, Human
caucucucccuccccugcca

SEQ ID NO: 2389820 - RNA, 15 nt, Human
caucucuccuccuuu

SEQ ID NO: 2389821 - RNA, 17 nt, Human
caucugccccuccccca

SEQ ID NO: 2389822 - RNA, 16 nt, Human
caucugccccuccccc

SEQ ID NO: 2389823 - RNA, 15 nt, Human
caucugccccucccc

SEQ ID NO: 2389824 - RNA, 14 nt, Human
caucugccccuccc

SEQ ID NO: 2389825 - RNA, 13 nt, Human
caucugccccucc

SEQ ID NO: 2389826 - RNA, 11 nt, Human
caucugccccu

SEQ ID NO: 2389827 - RNA, 13 nt, Human
caucugcccaggg

SEQ ID NO: 2389828 - RNA, 15 nt, Human
caucugcccaggggu

SEQ ID NO: 2389829 - RNA, 16 nt, Human
caucugcccaggggug

SEQ ID NO: 2389830 - RNA, 21 nt, Human
caucugcccaggggugccccc

SEQ ID NO: 2389831 - RNA, 20 nt, Human
caucugcauuuucaccccac

SEQ ID NO: 2389832 - RNA, 16 nt, Human
caucugcacccucgau

SEQ ID NO: 2389833 - RNA, 11 nt, Human
caucugcccag

SEQ ID NO: 2389834 - RNA, 12 nt, Human
caucugcccagg

SEQ ID NO: 2389835 - RNA, 13 nt, Human
caucugcccagga

SEQ ID NO: 2389836 - RNA, 14 nt, Human
caucugcccaggac

SEQ ID NO: 2389837 - RNA, 22 nt, Human
caucugcccaggacggggccgg

SEQ ID NO: 2389838 - RNA, 19 nt, Human
caucugcauuuucacccca

SEQ ID NO: 2389839 - RNA, 12 nt, Human
caucugacucac

SEQ ID NO: 2389840 - RNA, 18 nt, Human
caucugacucacaagaag

SEQ ID NO: 2389841 - RNA, 23 nt, Human
caucugcacccucgaugaagccc

SEQ ID NO: 2389842 - RNA, 14 nt, Human
caucugaaagccac

SEQ ID NO: 2389843 - RNA, 16 nt, Human
caucugaaagccacgu

SEQ ID NO: 2389844 - RNA, 13 nt, Human
caucugaaagcca

SEQ ID NO: 2389845 - RNA, 12 nt, Human
caucugaaagcc

SEQ ID NO: 2389846 - RNA, 19 nt, Human
caucucuuugaauuuucug

SEQ ID NO: 2389847 - RNA, 22 nt, Human
caucucuuugaauuuucugugu

SEQ ID NO: 2389848 - RNA, 13 nt, Human
caucucuuugaau

SEQ ID NO: 2389849 - RNA, 15 nt, Human
caucucuuugaauuu

SEQ ID NO: 2389850 - RNA, 15 nt, Human
caucugaagagcaga

SEQ ID NO: 2389851 - RNA, 15 nt, Human
caucugaccacgugc

SEQ ID NO: 2389852 - RNA, 15 nt, Human
caucugaccagcagc

SEQ ID NO: 2389853 - RNA, 14 nt, Human
caucugaccagcag

SEQ ID NO: 2389854 - RNA, 21 nt, Human
caucugaccagcagcgccuuu

SEQ ID NO: 2389855 - RNA, 19 nt, Human
caucugaccagcagcgccu

SEQ ID NO: 2389856 - RNA, 17 nt, Human
caucugaccagcagcgc

SEQ ID NO: 2389857 - RNA, 16 nt, Human
caucucuacaaaaagc

SEQ ID NO: 2389858 - RNA, 21 nt, Human
caucucuaacagcucaggauc

SEQ ID NO: 2389859 - RNA, 20 nt, Human
caucucuaacagcucaggau

SEQ ID NO: 2389860 - RNA, 19 nt, Human
caucucuaacagcucagga

SEQ ID NO: 2389861 - RNA, 18 nt, Human
caucucuaacagcucagg

SEQ ID NO: 2389862 - RNA, 16 nt, Human
caucucuaacagcuca

SEQ ID NO: 2389863 - RNA, 19 nt, Human
caucuccugugcaugggug

SEQ ID NO: 2389864 - RNA, 15 nt, Human
caucuccugugcaug

SEQ ID NO: 2389865 - RNA, 13 nt, Human
caucuccugugca

SEQ ID NO: 2389866 - RNA, 22 nt, Human
caucuccugccuuccuccuggg

SEQ ID NO: 2389867 - RNA, 19 nt, Human
caucuccugccuuccuccu

SEQ ID NO: 2389868 - RNA, 22 nt, Human
caucucgccaccccuccuuccu

SEQ ID NO: 2389869 - RNA, 21 nt, Human
caucucgccaccccuccuucc

SEQ ID NO: 2389870 - RNA, 20 nt, Human
caucuccugugcauggguga

SEQ ID NO: 2389871 - RNA, 15 nt, Human
caucucccucccaca

SEQ ID NO: 2389872 - RNA, 20 nt, Human
caucuccuccauacucagga

SEQ ID NO: 2389873 - RNA, 16 nt, Human
caucuccugccuuccu

SEQ ID NO: 2389874 - RNA, 16 nt, Human
cauccggcagccugga

SEQ ID NO: 2389875 - RNA, 15 nt, Human
cauccggcagccugg

SEQ ID NO: 2389876 - RNA, 14 nt, Human
cauccgccagggcc

SEQ ID NO: 2389877 - RNA, 15 nt, Human
cauccgccagggccc

SEQ ID NO: 2389878 - RNA, 18 nt, Human
cauccuacaagacacagu

SEQ ID NO: 2389879 - RNA, 18 nt, Human
cauccuaccaaugcaugc

SEQ ID NO: 2389880 - RNA, 19 nt, Human
cauccuaccaaugcaugca

SEQ ID NO: 2389881 - RNA, 19 nt, Human
cauccuacaagacacagug

SEQ ID NO: 2389882 - RNA, 17 nt, Human
cauccuacaagacacag

SEQ ID NO: 2389883 - RNA, 14 nt, Human
cauccuaccaaugc

SEQ ID NO: 2389884 - RNA, 15 nt, Human
cauccuaccaaugca

SEQ ID NO: 2389885 - RNA, 23 nt, Human
caucuuucuucuauuuuauuccc

SEQ ID NO: 2389886 - RNA, 19 nt, Human
caucuugcucugcugacag

SEQ ID NO: 2389887 - RNA, 15 nt, Human
caucuugcucugcug

SEQ ID NO: 2389888 - RNA, 16 nt, Human
caucuugcucugcuga

SEQ ID NO: 2389889 - RNA, 17 nt, Human
caucuugcucugcugac

SEQ ID NO: 2389890 - RNA, 18 nt, Human
caucugccccucccccaa

SEQ ID NO: 2389891 - RNA, 23 nt, Human
caucugcccaggggugcccccuc

SEQ ID NO: 2389892 - RNA, 17 nt, Human
caucuucugccuuaguc

SEQ ID NO: 2389893 - RNA, 14 nt, Human
caucuucuucacca

SEQ ID NO: 2389894 - RNA, 13 nt, Human
caucuucuggagu

SEQ ID NO: 2389895 - RNA, 19 nt, Human
caucuucuggagucuccag

SEQ ID NO: 2389896 - RNA, 22 nt, Human
caucuucuuuuugaaaucagca

SEQ ID NO: 2389897 - RNA, 19 nt, Human
caucuucuucaccauuugg

SEQ ID NO: 2389898 - RNA, 22 nt, Human
caucuucuggagucuccagugg

SEQ ID NO: 2389899 - RNA, 21 nt, Human
caucuucuuugcagccugggu

SEQ ID NO: 2389900 - RNA, 16 nt, Human
caucuugaauuguaag

SEQ ID NO: 2389901 - RNA, 21 nt, Human
caucuugaauuguaaggaaug

SEQ ID NO: 2389902 - RNA, 14 nt, Human
caugauaugucagg

SEQ ID NO: 2389903 - RNA, 22 nt, Human
caugaguuuuuucucuugggcu

SEQ ID NO: 2389904 - RNA, 19 nt, Human
caugaguuuuuucucuugg

SEQ ID NO: 2389905 - RNA, 22 nt, Human
caugaguuugcccugguuucac

SEQ ID NO: 2389906 - RNA, 16 nt, Human
caugaguuugcccugg

SEQ ID NO: 2389907 - RNA, 15 nt, Human
caugaguuugcccug

SEQ ID NO: 2389908 - RNA, 19 nt, Human
caugaguuggcugggaaua

SEQ ID NO: 2389909 - RNA, 23 nt, Human
caugaguuggggucuggcagccu

SEQ ID NO: 2389910 - RNA, 21 nt, Human
caugaguuggggucuggcagc

SEQ ID NO: 2389911 - RNA, 18 nt, Human
caugagugcgugcucagu

SEQ ID NO: 2389912 - RNA, 16 nt, Human
caugcacucagcucuu

SEQ ID NO: 2389913 - RNA, 15 nt, Human
caugcacucagcucu

SEQ ID NO: 2389914 - RNA, 21 nt, Human
caugaucuugugacauauuau

SEQ ID NO: 2389915 - RNA, 15 nt, Human
caugaugagcuccuc

SEQ ID NO: 2389916 - RNA, 19 nt, Human
caugaugagcuccucuucc

SEQ ID NO: 2389917 - RNA, 18 nt, Human
caugaugagcuccucuuc

SEQ ID NO: 2389918 - RNA, 21 nt, Human
caugaucucccugccgccuca

SEQ ID NO: 2389919 - RNA, 20 nt, Human
caugaucucccugccgccuc

SEQ ID NO: 2389920 - RNA, 15 nt, Human
caugaucucggcuua

SEQ ID NO: 2389921 - RNA, 15 nt, Human
caugaucuugagcaa

SEQ ID NO: 2389922 - RNA, 19 nt, Human
caugaucucccugccgccu

SEQ ID NO: 2389923 - RNA, 18 nt, Human
caugaucucccugccgcc

SEQ ID NO: 2389924 - RNA, 17 nt, Human
caugaucucccugccgc

SEQ ID NO: 2389925 - RNA, 16 nt, Human
caugaucucccugccg

SEQ ID NO: 2389926 - RNA, 13 nt, Human
caugaucucccug

SEQ ID NO: 2389927 - RNA, 15 nt, Human
caugaucucccugcc

SEQ ID NO: 2389928 - RNA, 21 nt, Human
caugaucccuguguugucucu

SEQ ID NO: 2389929 - RNA, 22 nt, Human
caugaucccuguguugucucua

SEQ ID NO: 2389930 - RNA, 20 nt, Human
caugaggggcccgagcagaa

SEQ ID NO: 2389931 - RNA, 19 nt, Human
caugagguacugagaguga

SEQ ID NO: 2389932 - RNA, 13 nt, Human
caugaguccccug

SEQ ID NO: 2389933 - RNA, 12 nt, Human
caugagucccag

SEQ ID NO: 2389934 - RNA, 14 nt, Human
caugagucccagug

SEQ ID NO: 2389935 - RNA, 15 nt, Human
caugagucccagugg

SEQ ID NO: 2389936 - RNA, 16 nt, Human
caugagucccaguggg

SEQ ID NO: 2389937 - RNA, 17 nt, Human
caugagucccaguggga

SEQ ID NO: 2389938 - RNA, 18 nt, Human
caugagucccagugggag

SEQ ID NO: 2389939 - RNA, 19 nt, Human
caugagucccagugggagg

SEQ ID NO: 2389940 - RNA, 23 nt, Human
caugaguccccuguuuguuucug

SEQ ID NO: 2389941 - RNA, 14 nt, Human
caugagugaauaaa

SEQ ID NO: 2389942 - RNA, 21 nt, Human
caugaguccuugaaaauauuu

SEQ ID NO: 2389943 - RNA, 14 nt, Human
caugagugcgugcu

SEQ ID NO: 2389944 - RNA, 17 nt, Human
caugaguccuugaaaau

SEQ ID NO: 2389945 - RNA, 18 nt, Human
caugaguccuugaaaaua

SEQ ID NO: 2389946 - RNA, 19 nt, Human
caugaguccuugaaaauau

SEQ ID NO: 2389947 - RNA, 20 nt, Human
caugaguccuugaaaauauu

SEQ ID NO: 2389948 - RNA, 14 nt, Human
caugaguccccugu

SEQ ID NO: 2389949 - RNA, 15 nt, Human
caugaguccccuguu

SEQ ID NO: 2389950 - RNA, 23 nt, Human
caugagcuccagacccccagcaa

SEQ ID NO: 2389951 - RNA, 21 nt, Human
caugagcuccagacccccagc

SEQ ID NO: 2389952 - RNA, 19 nt, Human
caugagcuccagaccccca

SEQ ID NO: 2389953 - RNA, 17 nt, Human
caugagcuccagacccc

SEQ ID NO: 2389954 - RNA, 16 nt, Human
caugagcuccagaccc

SEQ ID NO: 2389955 - RNA, 15 nt, Human
caugagcuccagacc

SEQ ID NO: 2389956 - RNA, 14 nt, Human
caugagcuccagac

SEQ ID NO: 2389957 - RNA, 13 nt, Human
caugagcuccaga

SEQ ID NO: 2389958 - RNA, 19 nt, Human
caugagcuacgccugccuc

SEQ ID NO: 2389959 - RNA, 20 nt, Human
caugagcuacgccugccucc

SEQ ID NO: 2389960 - RNA, 16 nt, Human
caugagcuauuuccau

SEQ ID NO: 2389961 - RNA, 22 nt, Human
caugagcuauuuccauuccaga

SEQ ID NO: 2389962 - RNA, 23 nt, Human
caugagcuauuuccauuccagaa

SEQ ID NO: 2389963 - RNA, 22 nt, Human
caugagccucagcauccuggca

SEQ ID NO: 2389964 - RNA, 23 nt, Human
caugagccucagcauccuggcac

SEQ ID NO: 2389965 - RNA, 16 nt, Human
caugaggaacaaggca

SEQ ID NO: 2389966 - RNA, 17 nt, Human
caugaggaacaaggcaa

SEQ ID NO: 2389967 - RNA, 20 nt, Human
caugaggaacaaggcaaggc

SEQ ID NO: 2389968 - RNA, 21 nt, Human
caugaggaacaaggcaaggcu

SEQ ID NO: 2389969 - RNA, 22 nt, Human
caugaggacaugauggagcgca

SEQ ID NO: 2389970 - RNA, 21 nt, Human
caugaggacaugauggagcgc

SEQ ID NO: 2389971 - RNA, 20 nt, Human
caugaggacaugauggagcg

SEQ ID NO: 2389972 - RNA, 23 nt, Human
caugaggaacaaggcaaggcugu

SEQ ID NO: 2389973 - RNA, 14 nt, Human
caugagcuuuuaua

SEQ ID NO: 2389974 - RNA, 12 nt, Human
caugaggaacua

SEQ ID NO: 2389975 - RNA, 20 nt, Human
caugagggaucacagggccc

SEQ ID NO: 2389976 - RNA, 19 nt, Human
caugagggaucacagggcc

SEQ ID NO: 2389977 - RNA, 16 nt, Human
caugaggggcccgagc

SEQ ID NO: 2389978 - RNA, 18 nt, Human
caugagggaucacagggc

SEQ ID NO: 2389979 - RNA, 17 nt, Human
caugagggaucacaggg

SEQ ID NO: 2389980 - RNA, 16 nt, Human
caugagguacugagag

SEQ ID NO: 2389981 - RNA, 23 nt, Human
caugaggcaaugucaggaacaga

SEQ ID NO: 2389982 - RNA, 22 nt, Human
caugaggcaaugucaggaacag

SEQ ID NO: 2389983 - RNA, 15 nt, Human
caugaggaguugcug

SEQ ID NO: 2389984 - RNA, 16 nt, Human
caugaggaguugcugu

SEQ ID NO: 2389985 - RNA, 16 nt, Human
caugaggccacugcug

SEQ ID NO: 2389986 - RNA, 24 nt, Human
caugaggcaaugucaggaacagaa

SEQ ID NO: 2389987 - RNA, 21 nt, Human
caugaggccucaguggacuuu

SEQ ID NO: 2389988 - RNA, 22 nt, Human
caugaggccacugcugcuucuc

SEQ ID NO: 2389989 - RNA, 18 nt, Human
caugaagagauuuuucau

SEQ ID NO: 2389990 - RNA, 18 nt, Human
caugaagauguagaggag

SEQ ID NO: 2389991 - RNA, 18 nt, Human
caugaagauucuuuccca

SEQ ID NO: 2389992 - RNA, 17 nt, Human
caugaagauauuuuucc

SEQ ID NO: 2389993 - RNA, 19 nt, Human
caugaagauguagaggaga

SEQ ID NO: 2389994 - RNA, 18 nt, Human
caugaccugugaccagca

SEQ ID NO: 2389995 - RNA, 17 nt, Human
caugaccugugaccagc

SEQ ID NO: 2389996 - RNA, 21 nt, Human
caugaccuuacauuuccuggg

SEQ ID NO: 2389997 - RNA, 16 nt, Human
caugaccugugaccag

SEQ ID NO: 2389998 - RNA, 14 nt, Human
caugaccugugacc

SEQ ID NO: 2389999 - RNA, 19 nt, Human
caugaccuaguuuuccaug

SEQ ID NO: 2390000 - RNA, 23 nt, Human
caugacucguauaugucucaggu

SEQ ID NO: 2390001 - RNA, 20 nt, Human
caugacucguauaugucuca

SEQ ID NO: 2390002 - RNA, 17 nt, Human
caugacucggggguggg

SEQ ID NO: 2390003 - RNA, 22 nt, Human
caugacuugagaaacaaauaau

SEQ ID NO: 2390004 - RNA, 15 nt, Human
caugacuuuuccaug

SEQ ID NO: 2390005 - RNA, 14 nt, Human
caugagaagagggc

SEQ ID NO: 2390006 - RNA, 16 nt, Human
caugagaacaaacaga

SEQ ID NO: 2390007 - RNA, 21 nt, Human
caugacuuuuccauguaucua

SEQ ID NO: 2390008 - RNA, 19 nt, Human
caugagacacaucuccucc

SEQ ID NO: 2390009 - RNA, 14 nt, Human
caugagacacaucu

SEQ ID NO: 2390010 - RNA, 20 nt, Human
caugagaauaagagaaagaa

SEQ ID NO: 2390011 - RNA, 19 nt, Human
caugagaaucuauauuuaa

SEQ ID NO: 2390012 - RNA, 12 nt, Human
caugagaaucua

SEQ ID NO: 2390013 - RNA, 22 nt, Human
caugagaagagggccuguggga

SEQ ID NO: 2390014 - RNA, 22 nt, Human
caugagaaguugauauagaaca

SEQ ID NO: 2390015 - RNA, 15 nt, Human
caugagaagagggcc

SEQ ID NO: 2390016 - RNA, 16 nt, Human
caugagaagagggccu

SEQ ID NO: 2390017 - RNA, 17 nt, Human
caugagaagagggccug

SEQ ID NO: 2390018 - RNA, 18 nt, Human
caugagaagagggccugu

SEQ ID NO: 2390019 - RNA, 20 nt, Human
caugagaucuaggugaggau

SEQ ID NO: 2390020 - RNA, 22 nt, Human
caugagaugauacauccaaagc

SEQ ID NO: 2390021 - RNA, 16 nt, Human
caugagcaauucuccu

SEQ ID NO: 2390022 - RNA, 13 nt, Human
caugagcaucagg

SEQ ID NO: 2390023 - RNA, 23 nt, Human
caugagagaauuguaucauuuga

SEQ ID NO: 2390024 - RNA, 17 nt, Human
caugagaggcucugugc

SEQ ID NO: 2390025 - RNA, 18 nt, Human
caugagauaauaugcaga

SEQ ID NO: 2390026 - RNA, 17 nt, Human
caugagaccacuguuau

SEQ ID NO: 2390027 - RNA, 19 nt, Human
caugagaccacuguuauca

SEQ ID NO: 2390028 - RNA, 12 nt, Human
caugagccucag

SEQ ID NO: 2390029 - RNA, 16 nt, Human
caugagcaccccaagg

SEQ ID NO: 2390030 - RNA, 21 nt, Human
caugagcaccccaaggcugcg

SEQ ID NO: 2390031 - RNA, 15 nt, Human
caugagccucagcau

SEQ ID NO: 2390032 - RNA, 17 nt, Human
caugagccucagcaucc

SEQ ID NO: 2390033 - RNA, 18 nt, Human
caugagccucagcauccu

SEQ ID NO: 2390034 - RNA, 19 nt, Human
caugagccucagcauccug

SEQ ID NO: 2390035 - RNA, 20 nt, Human
caugagccucagcauccugg

SEQ ID NO: 2390036 - RNA, 21 nt, Human
caugagccucagcauccuggc

SEQ ID NO: 2390037 - RNA, 15 nt, Human
caugagcaucaggcc

SEQ ID NO: 2390038 - RNA, 16 nt, Human
caugagcaucaggcca

SEQ ID NO: 2390039 - RNA, 17 nt, Human
caugagcaucaggccag

SEQ ID NO: 2390040 - RNA, 18 nt, Human
caugagcaucaggccagg

SEQ ID NO: 2390041 - RNA, 20 nt, Human
caugagcaucaggccaggcc

SEQ ID NO: 2390042 - RNA, 21 nt, Human
caugagcaucaggccaggccc

SEQ ID NO: 2390043 - RNA, 22 nt, Human
caugagcaucaggccaggcccu

SEQ ID NO: 2390044 - RNA, 23 nt, Human
caugagcaucaggccaggcccuc

SEQ ID NO: 2390045 - RNA, 13 nt, Human
caugaaaaugcaa

SEQ ID NO: 2390046 - RNA, 15 nt, Human
caugaaaaugcaaca

SEQ ID NO: 2390047 - RNA, 22 nt, Human
caugaaaaugcaacaacaugua

SEQ ID NO: 2390048 - RNA, 13 nt, Human
caugaaacaaagc

SEQ ID NO: 2390049 - RNA, 15 nt, Human
caugaaacagaaaca

SEQ ID NO: 2390050 - RNA, 13 nt, Human
caugaaacagaaa

SEQ ID NO: 2390051 - RNA, 22 nt, Human
caugaaaccuuauuuuuuccca

SEQ ID NO: 2390052 - RNA, 19 nt, Human
caugaaacagaaacaaaaa

SEQ ID NO: 2390053 - RNA, 14 nt, Human
caugaaacuccacc

SEQ ID NO: 2390054 - RNA, 15 nt, Human
caugaaacuccaccu

SEQ ID NO: 2390055 - RNA, 22 nt, Human
caugaaauauagaucaguuaua

SEQ ID NO: 2390056 - RNA, 13 nt, Human
caugaaaacguuu

SEQ ID NO: 2390057 - RNA, 19 nt, Human
caugaaaaagcagcuacca

SEQ ID NO: 2390058 - RNA, 18 nt, Human
caugaaaaagcagcuacc

SEQ ID NO: 2390059 - RNA, 15 nt, Human
caugaaaaagcagcu

SEQ ID NO: 2390060 - RNA, 13 nt, Human
caugaaaaagcag

SEQ ID NO: 2390061 - RNA, 12 nt, Human
caugaaaaagca

SEQ ID NO: 2390062 - RNA, 18 nt, Human
caugaaaaaaggacaauu

SEQ ID NO: 2390063 - RNA, 19 nt, Human
caugaaaacguuuuauugu

SEQ ID NO: 2390064 - RNA, 17 nt, Human
caugaaaacguuuuauu

SEQ ID NO: 2390065 - RNA, 16 nt, Human
caugaaaacguuuuau

SEQ ID NO: 2390066 - RNA, 23 nt, Human
caugaaaaagcagcuaccaggug

SEQ ID NO: 2390067 - RNA, 22 nt, Human
caugaaaacguuuuauuguguu

SEQ ID NO: 2390068 - RNA, 21 nt, Human
caugaaaacguuuuauugugu

SEQ ID NO: 2390069 - RNA, 21 nt, Human
caugaaaacacauuuuucuua

SEQ ID NO: 2390070 - RNA, 19 nt, Human
caugaaaacacauuuuucu

SEQ ID NO: 2390071 - RNA, 17 nt, Human
caugaagacaggacagu

SEQ ID NO: 2390072 - RNA, 16 nt, Human
caugaagacaggacag

SEQ ID NO: 2390073 - RNA, 15 nt, Human
caugaagacaggaca

SEQ ID NO: 2390074 - RNA, 14 nt, Human
caugaagacaggac

SEQ ID NO: 2390075 - RNA, 17 nt, Human
caugaagaccacaucca

SEQ ID NO: 2390076 - RNA, 14 nt, Human
caugaagacaggau

SEQ ID NO: 2390077 - RNA, 13 nt, Human
caugaagaccaca

SEQ ID NO: 2390078 - RNA, 12 nt, Human
caugaagacaga

SEQ ID NO: 2390079 - RNA, 20 nt, Human
caugaaccucaagcugcauc

SEQ ID NO: 2390080 - RNA, 16 nt, Human
caugaacauguuccug

SEQ ID NO: 2390081 - RNA, 21 nt, Human
caugaacuucgcaucaaaaga

SEQ ID NO: 2390082 - RNA, 23 nt, Human
caugaacuucgcaucaaaagaca

SEQ ID NO: 2390083 - RNA, 24 nt, Human
caugaaauugucuagcagagcagg

SEQ ID NO: 2390084 - RNA, 14 nt, Human
caugaaauuacuua

SEQ ID NO: 2390085 - RNA, 16 nt, Human
caugaacacacugugu

SEQ ID NO: 2390086 - RNA, 17 nt, Human
caugaacacacuguguc

SEQ ID NO: 2390087 - RNA, 18 nt, Human
caugaacacacugugucc

SEQ ID NO: 2390088 - RNA, 20 nt, Human
caugaacacacuguguccug

SEQ ID NO: 2390089 - RNA, 22 nt, Human
caugaacagaaaacauucugau

SEQ ID NO: 2390090 - RNA, 23 nt, Human
caugaacagaaaacauucugauu

SEQ ID NO: 2390091 - RNA, 19 nt, Human
caugaaccucaagcugcau

SEQ ID NO: 2390092 - RNA, 13 nt, Human
caugaacauguac

SEQ ID NO: 2390093 - RNA, 15 nt, Human
caugaacauguacug

SEQ ID NO: 2390094 - RNA, 13 nt, Human
caugaaauaugca

SEQ ID NO: 2390095 - RNA, 14 nt, Human
caugaaauaugcau

SEQ ID NO: 2390096 - RNA, 15 nt, Human
caugaaauaugcauc

SEQ ID NO: 2390097 - RNA, 13 nt, Human
caucuuuuacauu

SEQ ID NO: 2390098 - RNA, 14 nt, Human
caucuuuucuugcc

SEQ ID NO: 2390099 - RNA, 16 nt, Human
caucuuuucuugccuc

SEQ ID NO: 2390100 - RNA, 21 nt, Human
caucuuuucuugccucugucc

SEQ ID NO: 2390101 - RNA, 14 nt, Human
caucuuuugugaga

SEQ ID NO: 2390102 - RNA, 21 nt, Human
caucuuuugugagauguaauu

SEQ ID NO: 2390103 - RNA, 16 nt, Human
caucuuuugugagaug

SEQ ID NO: 2390104 - RNA, 13 nt, Human
caugaaaacacau

SEQ ID NO: 2390105 - RNA, 17 nt, Human
caugaaaacacauuuuu

SEQ ID NO: 2390106 - RNA, 16 nt, Human
caugaaaacacauuuu

SEQ ID NO: 2390107 - RNA, 15 nt, Human
caugaaaacacauuu

SEQ ID NO: 2390108 - RNA, 14 nt, Human
caugaaaacacauu

SEQ ID NO: 2390109 - RNA, 21 nt, Human
caucuuuccugauggcaggau

SEQ ID NO: 2390110 - RNA, 21 nt, Human
caucuuucuucuauuuuauuc

SEQ ID NO: 2390111 - RNA, 16 nt, Human
caucuuucuucuauuu

SEQ ID NO: 2390112 - RNA, 22 nt, Human
caucuuugccuugggcugcucc

SEQ ID NO: 2390113 - RNA, 23 nt, Human
caucuuugccuugggcugcuccu

SEQ ID NO: 2390114 - RNA, 17 nt, Human
caucuuugccuugggcu

SEQ ID NO: 2390115 - RNA, 15 nt, Human
caucuuugccuuggg

SEQ ID NO: 2390116 - RNA, 17 nt, Human
caucuuugcagguugcu

SEQ ID NO: 2390117 - RNA, 14 nt, Human
caucuuucacacuu

SEQ ID NO: 2390118 - RNA, 17 nt, Human
caucuuucaucaaucau

SEQ ID NO: 2390119 - RNA, 13 nt, Human
caucuuucacauu

SEQ ID NO: 2390120 - RNA, 21 nt, Human
caucuuucaucaaucauugua

SEQ ID NO: 2390121 - RNA, 22 nt, Human
caucuuucaucaaucauuguac

SEQ ID NO: 2390122 - RNA, 12 nt, Human
caucuuucacau

SEQ ID NO: 2390123 - RNA, 17 nt, Human
caucuuuaucuguucuu

SEQ ID NO: 2390124 - RNA, 22 nt, Human
caucuuuacaaaacuacaugag

SEQ ID NO: 2390125 - RNA, 22 nt, Human
caucuucuuugcagccugggug

SEQ ID NO: 2390126 - RNA, 16 nt, Human
caucuuuaucuguucu

SEQ ID NO: 2390127 - RNA, 19 nt, Human
caucuuuccugauggcagg

SEQ ID NO: 2390128 - RNA, 13 nt, Human
caucuuuccuguc

SEQ ID NO: 2390129 - RNA, 19 nt, Human
cagugcuugauugcgugga

SEQ ID NO: 2390130 - RNA, 20 nt, Human
cagugcuugaguuuggggaa

SEQ ID NO: 2390131 - RNA, 14 nt, Human
cagugcuugccaca

SEQ ID NO: 2390132 - RNA, 17 nt, Human
cagugcuucucuacaga

SEQ ID NO: 2390133 - RNA, 12 nt, Human
cagugcuucuca

SEQ ID NO: 2390134 - RNA, 15 nt, Human
cagugcuugccacag

SEQ ID NO: 2390135 - RNA, 17 nt, Human
cagugcuugccacagag

SEQ ID NO: 2390136 - RNA, 18 nt, Human
cagugcuugccacagagc

SEQ ID NO: 2390137 - RNA, 20 nt, Human
cagugcuucagccugaggcu

SEQ ID NO: 2390138 - RNA, 19 nt, Human
cagugcuucagccugaggc

SEQ ID NO: 2390139 - RNA, 18 nt, Human
cagugcuucagccugagg

SEQ ID NO: 2390140 - RNA, 17 nt, Human
cagugcuucagccugag

SEQ ID NO: 2390141 - RNA, 16 nt, Human
cagugcuucagccuga

SEQ ID NO: 2390142 - RNA, 15 nt, Human
cagugcuucagccug

SEQ ID NO: 2390143 - RNA, 14 nt, Human
cagugcuucagccu

SEQ ID NO: 2390144 - RNA, 19 nt, Human
cagugcuguggccugggca

SEQ ID NO: 2390145 - RNA, 20 nt, Human
cagugcuguggccugggcaa

SEQ ID NO: 2390146 - RNA, 18 nt, Human
cagugcuguggccugggc

SEQ ID NO: 2390147 - RNA, 15 nt, Human
cagugcuguggccug

SEQ ID NO: 2390148 - RNA, 13 nt, Human
cagugcuguggcc

SEQ ID NO: 2390149 - RNA, 12 nt, Human
cagugcuguggc

SEQ ID NO: 2390150 - RNA, 22 nt, Human
cagugcugucugaucugugcuu

SEQ ID NO: 2390151 - RNA, 15 nt, Human
cagugcuguacuuga

SEQ ID NO: 2390152 - RNA, 19 nt, Human
cagugcugucugaucugug

SEQ ID NO: 2390153 - RNA, 21 nt, Human
cauaguacucuuuguagcaaa

SEQ ID NO: 2390154 - RNA, 20 nt, Human
cauaguaccauuuauacaaa

SEQ ID NO: 2390155 - RNA, 19 nt, Human
cauaguaccauuuauacaa

SEQ ID NO: 2390156 - RNA, 16 nt, Human
cauaguaccauuuaua

SEQ ID NO: 2390157 - RNA, 22 nt, Human
cauaguaccaaucauuuuaauu

SEQ ID NO: 2390158 - RNA, 15 nt, Human
cauaguaugguggcu

SEQ ID NO: 2390159 - RNA, 22 nt, Human
cauaguaacuucuuauggaauu

SEQ ID NO: 2390160 - RNA, 21 nt, Human
cauaguaacuucuuauggaau

SEQ ID NO: 2390161 - RNA, 24 nt, Human
cauaguaacuucuuauggaauuga

SEQ ID NO: 2390162 - RNA, 23 nt, Human
cauaguaacuucuuauggaauug

SEQ ID NO: 2390163 - RNA, 16 nt, Human
cauaguaccaaucauu

SEQ ID NO: 2390164 - RNA, 18 nt, Human
cauaguaccaaucauuuu

SEQ ID NO: 2390165 - RNA, 16 nt, Human
cauaguaugguggcug

SEQ ID NO: 2390166 - RNA, 17 nt, Human
cauaguaugguggcugg

SEQ ID NO: 2390167 - RNA, 23 nt, Human
cauagucauguaagcugaaaaua

SEQ ID NO: 2390168 - RNA, 21 nt, Human
cauaguauuccauugugugag

SEQ ID NO: 2390169 - RNA, 22 nt, Human
cauaguaccauuuauacaaauu

SEQ ID NO: 2390170 - RNA, 13 nt, Human
cauagucacaugg

SEQ ID NO: 2390171 - RNA, 18 nt, Human
cauaguauuccauugugu

SEQ ID NO: 2390172 - RNA, 20 nt, Human
cauaguaguaugaugauaca

SEQ ID NO: 2390173 - RNA, 11 nt, Human
cauauccugcc

SEQ ID NO: 2390174 - RNA, 12 nt, Human
cauauccugccu

SEQ ID NO: 2390175 - RNA, 13 nt, Human
cauauccugccuc

SEQ ID NO: 2390176 - RNA, 14 nt, Human
cauauccugccuca

SEQ ID NO: 2390177 - RNA, 15 nt, Human
cauauccugccucag

SEQ ID NO: 2390178 - RNA, 23 nt, Human
cauauauauguuuuaagaggcag

SEQ ID NO: 2390179 - RNA, 20 nt, Human
cauauauaacaaugcuguau

SEQ ID NO: 2390180 - RNA, 15 nt, Human
cauauauaacaaugc

SEQ ID NO: 2390181 - RNA, 21 nt, Human
cauauauggggggccaacacc

SEQ ID NO: 2390182 - RNA, 22 nt, Human
cauauauggggggccaacacca

SEQ ID NO: 2390183 - RNA, 17 nt, Human
cauauaugaggacuugu

SEQ ID NO: 2390184 - RNA, 23 nt, Human
cauauaagauucauauuuacuuc

SEQ ID NO: 2390185 - RNA, 16 nt, Human
cauauaagugauugcu

SEQ ID NO: 2390186 - RNA, 14 nt, Human
cauauaaguuugaa

SEQ ID NO: 2390187 - RNA, 13 nt, Human
cauauauaacaau

SEQ ID NO: 2390188 - RNA, 18 nt, Human
cauagugaugguuccccu

SEQ ID NO: 2390189 - RNA, 19 nt, Human
cauagugaugguuccccug

SEQ ID NO: 2390190 - RNA, 18 nt, Human
cauagugaccggcugcuu

SEQ ID NO: 2390191 - RNA, 22 nt, Human
cauagugaccggcugcuuuucc

SEQ ID NO: 2390192 - RNA, 23 nt, Human
cauauaacuuauauuguaagaaa

SEQ ID NO: 2390193 - RNA, 22 nt, Human
cauauaacuuauauuguaagaa

SEQ ID NO: 2390194 - RNA, 20 nt, Human
cauauaacuuauauuguaag

SEQ ID NO: 2390195 - RNA, 11 nt, Human
cauauuguaca

SEQ ID NO: 2390196 - RNA, 12 nt, Human
cauauuguacac

SEQ ID NO: 2390197 - RNA, 13 nt, Human
cauauuguacacu

SEQ ID NO: 2390198 - RNA, 14 nt, Human
cauauuguacacuu

SEQ ID NO: 2390199 - RNA, 15 nt, Human
cauauuguacacuuu

SEQ ID NO: 2390200 - RNA, 20 nt, Human
cauauugugauucugccuuu

SEQ ID NO: 2390201 - RNA, 13 nt, Human
cauauugugccaa

SEQ ID NO: 2390202 - RNA, 20 nt, Human
cauauugugccaauauguau

SEQ ID NO: 2390203 - RNA, 18 nt, Human
cauauugugauucugccu

SEQ ID NO: 2390204 - RNA, 20 nt, Human
cauauuguacacuuuuuugg

SEQ ID NO: 2390205 - RNA, 23 nt, Human
cauauuguacacuuuuuugggga

SEQ ID NO: 2390206 - RNA, 23 nt, Human
cauauugcugagagaaauaugga

SEQ ID NO: 2390207 - RNA, 14 nt, Human
cauauugguauuca

SEQ ID NO: 2390208 - RNA, 16 nt, Human
cauauugguauucacu

SEQ ID NO: 2390209 - RNA, 21 nt, Human
cauauugcugagagaaauaug

SEQ ID NO: 2390210 - RNA, 17 nt, Human
cauauugcugagagaaa

SEQ ID NO: 2390211 - RNA, 19 nt, Human
cauauugcuuuuucuaaug

SEQ ID NO: 2390212 - RNA, 16 nt, Human
cauauugcugagagaa

SEQ ID NO: 2390213 - RNA, 21 nt, Human
cauauugauuuccguuaaaau

SEQ ID NO: 2390214 - RNA, 14 nt, Human
cauauugcacaugu

SEQ ID NO: 2390215 - RNA, 15 nt, Human
cauauugcacauguc

SEQ ID NO: 2390216 - RNA, 16 nt, Human
cauauugcacaugucu

SEQ ID NO: 2390217 - RNA, 17 nt, Human
cauauugcacaugucuu

SEQ ID NO: 2390218 - RNA, 18 nt, Human
cauauugcacaugucuua

SEQ ID NO: 2390219 - RNA, 19 nt, Human
cauauugcacaugucuuaa

SEQ ID NO: 2390220 - RNA, 20 nt, Human
cauauugcacaugucuuaau

SEQ ID NO: 2390221 - RNA, 21 nt, Human
cauauugcacaugucuuaaug

SEQ ID NO: 2390222 - RNA, 23 nt, Human
cauauugcacaugucuuaaugaa

SEQ ID NO: 2390223 - RNA, 22 nt, Human
cauauugcacaugucuuaauga

SEQ ID NO: 2390224 - RNA, 11 nt, Human
cauaucugccu

SEQ ID NO: 2390225 - RNA, 12 nt, Human
cauaucugccuu

SEQ ID NO: 2390226 - RNA, 13 nt, Human
cauaucugccuuu

SEQ ID NO: 2390227 - RNA, 15 nt, Human
cauaucugccuuuau

SEQ ID NO: 2390228 - RNA, 18 nt, Human
cauaucugccuuuauugu

SEQ ID NO: 2390229 - RNA, 18 nt, Human
cauaugaaaauacaacuu

SEQ ID NO: 2390230 - RNA, 17 nt, Human
cauaucuuuauuaauca

SEQ ID NO: 2390231 - RNA, 11 nt, Human
cauaugaaaaa

SEQ ID NO: 2390232 - RNA, 22 nt, Human
cauaugaaaaaaaugcauuuua

SEQ ID NO: 2390233 - RNA, 16 nt, Human
cauaucuuuauuaauc

SEQ ID NO: 2390234 - RNA, 15 nt, Human
cauaucuuuauuaau

SEQ ID NO: 2390235 - RNA, 14 nt, Human
cauaucuuuauuaa

SEQ ID NO: 2390236 - RNA, 20 nt, Human
cauaucugccuuuauugugu

SEQ ID NO: 2390237 - RNA, 22 nt, Human
cauauucuguuggccaguguga

SEQ ID NO: 2390238 - RNA, 17 nt, Human
cauaugaaauuuaauau

SEQ ID NO: 2390239 - RNA, 19 nt, Human
cauaugacauucaugccug

SEQ ID NO: 2390240 - RNA, 21 nt, Human
cauaugacauucaugccuggc

SEQ ID NO: 2390241 - RNA, 17 nt, Human
cauauugauuuccguua

SEQ ID NO: 2390242 - RNA, 22 nt, Human
cauaugacauucaugccuggcu

SEQ ID NO: 2390243 - RNA, 16 nt, Human
cauaugaccucaugca

SEQ ID NO: 2390244 - RNA, 18 nt, Human
cauaugaccucaugcauc

SEQ ID NO: 2390245 - RNA, 16 nt, Human
cauauugaauguuucc

SEQ ID NO: 2390246 - RNA, 21 nt, Human
cauauugagcacuugcuguau

SEQ ID NO: 2390247 - RNA, 14 nt, Human
cauauuguuauuau

SEQ ID NO: 2390248 - RNA, 16 nt, Human
cauauuguugaaaggu

SEQ ID NO: 2390249 - RNA, 13 nt, Human
cauauuguugaaa

SEQ ID NO: 2390250 - RNA, 17 nt, Human
cauauuugcauauguau

SEQ ID NO: 2390251 - RNA, 15 nt, Human
cauauuugcauaugu

SEQ ID NO: 2390252 - RNA, 19 nt, Human
cauauuugcauauguauga

SEQ ID NO: 2390253 - RNA, 20 nt, Human
cauauuuguuaaauauuuac

SEQ ID NO: 2390254 - RNA, 19 nt, Human
cauauuuguuaaauauuua

SEQ ID NO: 2390255 - RNA, 14 nt, Human
cauauuuguuaaau

SEQ ID NO: 2390256 - RNA, 14 nt, Human
cauauuuguggaau

SEQ ID NO: 2390257 - RNA, 18 nt, Human
cauauuuguauaguugcu

SEQ ID NO: 2390258 - RNA, 22 nt, Human
cauauuuguauaguugcuugcc

SEQ ID NO: 2390259 - RNA, 13 nt, Human
cauauuguuacug

SEQ ID NO: 2390260 - RNA, 14 nt, Human
cauauuguguguaa

SEQ ID NO: 2390261 - RNA, 17 nt, Human
cauauuguggcacaagc

SEQ ID NO: 2390262 - RNA, 18 nt, Human
cauauuguggcacaagca

SEQ ID NO: 2390263 - RNA, 21 nt, Human
cauauugugccaauauguauu

SEQ ID NO: 2390264 - RNA, 22 nt, Human
cauauugugccaauauguauug

SEQ ID NO: 2390265 - RNA, 19 nt, Human
cauauuguuacugguacca

SEQ ID NO: 2390266 - RNA, 14 nt, Human
cauauuuaaagaca

SEQ ID NO: 2390267 - RNA, 14 nt, Human
caucaacaucuugg

SEQ ID NO: 2390268 - RNA, 12 nt, Human
caucaacugaau

SEQ ID NO: 2390269 - RNA, 10 nt, Human
caucaacuga

SEQ ID NO: 2390270 - RNA, 21 nt, Human
cauauuuguuaaauauuuaca

SEQ ID NO: 2390271 - RNA, 15 nt, Human
caucaacaaaaauug

SEQ ID NO: 2390272 - RNA, 13 nt, Human
caucaacaaaaau

SEQ ID NO: 2390273 - RNA, 15 nt, Human
caucaaauggaagac

SEQ ID NO: 2390274 - RNA, 16 nt, Human
caucaaauggaagaca

SEQ ID NO: 2390275 - RNA, 17 nt, Human
caucaaauggaagacac

SEQ ID NO: 2390276 - RNA, 19 nt, Human
caucaaauggaagacacau

SEQ ID NO: 2390277 - RNA, 14 nt, Human
caucauucucuguc

SEQ ID NO: 2390278 - RNA, 12 nt, Human
caucauucucug

SEQ ID NO: 2390279 - RNA, 22 nt, Human
caucauuccuugagaaaaacaa

SEQ ID NO: 2390280 - RNA, 17 nt, Human
caucauuccuugagaaa

SEQ ID NO: 2390281 - RNA, 10 nt, Human
caucauuaga

SEQ ID NO: 2390282 - RNA, 13 nt, Human
caucauuagaaca

SEQ ID NO: 2390283 - RNA, 17 nt, Human
caucauuauaaacguga

SEQ ID NO: 2390284 - RNA, 14 nt, Human
caucauuagaacaa

SEQ ID NO: 2390285 - RNA, 21 nt, Human
caucauuauuugcagagacag

SEQ ID NO: 2390286 - RNA, 18 nt, Human
caucauucaugcuacugc

SEQ ID NO: 2390287 - RNA, 17 nt, Human
cauccacucuacccucc

SEQ ID NO: 2390288 - RNA, 17 nt, Human
caucauucucugucuca

SEQ ID NO: 2390289 - RNA, 16 nt, Human
caucauucucugucuc

SEQ ID NO: 2390290 - RNA, 15 nt, Human
caucauucucugucu

SEQ ID NO: 2390291 - RNA, 14 nt, Human
cauccacugugcca

SEQ ID NO: 2390292 - RNA, 17 nt, Human
cauccacugugccaugu

SEQ ID NO: 2390293 - RNA, 23 nt, Human
cauccacugugccaugugccagg

SEQ ID NO: 2390294 - RNA, 17 nt, Human
cauccagguucagcuug

SEQ ID NO: 2390295 - RNA, 19 nt, Human
cauccacucuacccuccca

SEQ ID NO: 2390296 - RNA, 18 nt, Human
cauccacucuacccuccc

SEQ ID NO: 2390297 - RNA, 22 nt, Human
cauccacucuacccucccaccc

SEQ ID NO: 2390298 - RNA, 23 nt, Human
cauccagucucccaacuuguauu

SEQ ID NO: 2390299 - RNA, 13 nt, Human
cauccaguucaug

SEQ ID NO: 2390300 - RNA, 22 nt, Human
cauccagugucucacagcccug

SEQ ID NO: 2390301 - RNA, 14 nt, Human
cauccauaaagaag

SEQ ID NO: 2390302 - RNA, 17 nt, Human
cauccauaaagaagcaa

SEQ ID NO: 2390303 - RNA, 12 nt, Human
cauccauccagg

SEQ ID NO: 2390304 - RNA, 13 nt, Human
cauccaucaucau

SEQ ID NO: 2390305 - RNA, 16 nt, Human
cauccauaaagaagca

SEQ ID NO: 2390306 - RNA, 16 nt, Human
cauccauaguaguaug

SEQ ID NO: 2390307 - RNA, 14 nt, Human
cauccaucaucaug

SEQ ID NO: 2390308 - RNA, 18 nt, Human
cauccauaguaguaugau

SEQ ID NO: 2390309 - RNA, 21 nt, Human
caucccugccagcucuucugc

SEQ ID NO: 2390310 - RNA, 13 nt, Human
caucccugccugg

SEQ ID NO: 2390311 - RNA, 14 nt, Human
caucccugccuggu

SEQ ID NO: 2390312 - RNA, 15 nt, Human
caucccugccugguc

SEQ ID NO: 2390313 - RNA, 15 nt, Human
caucccugccagcuc

SEQ ID NO: 2390314 - RNA, 18 nt, Human
caucccugaggagccagg

SEQ ID NO: 2390315 - RNA, 19 nt, Human
caucccugauuccuguugu

SEQ ID NO: 2390316 - RNA, 15 nt, Human
caucccuggaaggug

SEQ ID NO: 2390317 - RNA, 16 nt, Human
caucccugccugguca

SEQ ID NO: 2390318 - RNA, 14 nt, Human
caucccuggaaggu

SEQ ID NO: 2390319 - RNA, 15 nt, Human
caucccucuggggcu

SEQ ID NO: 2390320 - RNA, 17 nt, Human
caucccugaggagccag

SEQ ID NO: 2390321 - RNA, 13 nt, Human
caucccuccuggg

SEQ ID NO: 2390322 - RNA, 22 nt, Human
cauccgaggcagggucaggaga

SEQ ID NO: 2390323 - RNA, 16 nt, Human
cauccgaggcaggguc

SEQ ID NO: 2390324 - RNA, 23 nt, Human
cauccgaggcagggucaggagag

SEQ ID NO: 2390325 - RNA, 15 nt, Human
cauccgaggcagggu

SEQ ID NO: 2390326 - RNA, 14 nt, Human
cauccgaggcaggg

SEQ ID NO: 2390327 - RNA, 13 nt, Human
cauccgaggcagg

SEQ ID NO: 2390328 - RNA, 16 nt, Human
cauccggcccccagag

SEQ ID NO: 2390329 - RNA, 19 nt, Human
caucccuugaccaggccug

SEQ ID NO: 2390330 - RNA, 18 nt, Human
caucccuuaccugggaaa

SEQ ID NO: 2390331 - RNA, 16 nt, Human
caucccuuugcccaga

SEQ ID NO: 2390332 - RNA, 13 nt, Human
caucccuuuuuga

SEQ ID NO: 2390333 - RNA, 16 nt, Human
caucccuuuuugaagu

SEQ ID NO: 2390334 - RNA, 17 nt, Human
caucccuuuuugaagug

SEQ ID NO: 2390335 - RNA, 18 nt, Human
caucccuuuuugaagugu

SEQ ID NO: 2390336 - RNA, 20 nt, Human
caucccuuuuugaaguguag

SEQ ID NO: 2390337 - RNA, 23 nt, Human
caucccuugaccaggccugggcc

SEQ ID NO: 2390338 - RNA, 20 nt, Human
caucccuugaccaggccugg

SEQ ID NO: 2390339 - RNA, 19 nt, Human
caucccuuugaaacaagau

SEQ ID NO: 2390340 - RNA, 21 nt, Human
caucaucuccugccuuccucc

SEQ ID NO: 2390341 - RNA, 20 nt, Human
caucaucuccugccuuccuc

SEQ ID NO: 2390342 - RNA, 13 nt, Human
caucaucuccugc

SEQ ID NO: 2390343 - RNA, 16 nt, Human
caucauccuaagcuau

SEQ ID NO: 2390344 - RNA, 13 nt, Human
caucaucccagcu

SEQ ID NO: 2390345 - RNA, 15 nt, Human
caucaucccagcugc

SEQ ID NO: 2390346 - RNA, 20 nt, Human
caucauaaaauaaaguauau

SEQ ID NO: 2390347 - RNA, 18 nt, Human
caucauaaaauaaaguau

SEQ ID NO: 2390348 - RNA, 14 nt, Human
caucauaaaauaaa

SEQ ID NO: 2390349 - RNA, 13 nt, Human
caucauaaaauaa

SEQ ID NO: 2390350 - RNA, 23 nt, Human
caucauaaaauaaaguauauaua

SEQ ID NO: 2390351 - RNA, 22 nt, Human
caucauaaaauaaaguauauau

SEQ ID NO: 2390352 - RNA, 15 nt, Human
caucauacacuuccu

SEQ ID NO: 2390353 - RNA, 17 nt, Human
caucauaggaagggacc

SEQ ID NO: 2390354 - RNA, 22 nt, Human
caucauaggaagggaccaaggc

SEQ ID NO: 2390355 - RNA, 16 nt, Human
caucauauuauacaga

SEQ ID NO: 2390356 - RNA, 14 nt, Human
caucauauuauaca

SEQ ID NO: 2390357 - RNA, 23 nt, Human
caucauaggaagggaccaaggca

SEQ ID NO: 2390358 - RNA, 13 nt, Human
caucaucaaggca

SEQ ID NO: 2390359 - RNA, 19 nt, Human
caucaucaaggcacugccu

SEQ ID NO: 2390360 - RNA, 20 nt, Human
caucaucaaggcacugccug

SEQ ID NO: 2390361 - RNA, 21 nt, Human
caucaucaaggcacugccuga

SEQ ID NO: 2390362 - RNA, 17 nt, Human
caucaucaguggagcca

SEQ ID NO: 2390363 - RNA, 16 nt, Human
caucaugcaucuuacu

SEQ ID NO: 2390364 - RNA, 13 nt, Human
caucaugucuggc

SEQ ID NO: 2390365 - RNA, 15 nt, Human
caucauggcuaucug

SEQ ID NO: 2390366 - RNA, 21 nt, Human
caucaugcuuacaaaaaagaa

SEQ ID NO: 2390367 - RNA, 21 nt, Human
caucauggauucauuacagcu

SEQ ID NO: 2390368 - RNA, 21 nt, Human
caucauguccccaaaccugca

SEQ ID NO: 2390369 - RNA, 22 nt, Human
caucauguccccaaaccugcaa

SEQ ID NO: 2390370 - RNA, 13 nt, Human
caucauguuuaca

SEQ ID NO: 2390371 - RNA, 21 nt, Human
caucauguuuacagaggacag

SEQ ID NO: 2390372 - RNA, 19 nt, Human
caucauguuuacagaggac

SEQ ID NO: 2390373 - RNA, 14 nt, Human
caucaugucuggcu

SEQ ID NO: 2390374 - RNA, 15 nt, Human
caucaugucuggcua

SEQ ID NO: 2390375 - RNA, 18 nt, Human
caucaccucaggccaggu

SEQ ID NO: 2390376 - RNA, 15 nt, Human
caucaccucaggcca

SEQ ID NO: 2390377 - RNA, 13 nt, Human
caucaccuccacc

SEQ ID NO: 2390378 - RNA, 14 nt, Human
caucaccuccacca

SEQ ID NO: 2390379 - RNA, 13 nt, Human
caucaccucaggc

SEQ ID NO: 2390380 - RNA, 12 nt, Human
caucaccucagg

SEQ ID NO: 2390381 - RNA, 15 nt, Human
caucacgccugugca

SEQ ID NO: 2390382 - RNA, 14 nt, Human
caucacgccugugc

SEQ ID NO: 2390383 - RNA, 23 nt, Human
caucaccuuaggcagggaagugu

SEQ ID NO: 2390384 - RNA, 22 nt, Human
caucaccuuaggcagggaagug

SEQ ID NO: 2390385 - RNA, 20 nt, Human
caucaccuuaggcagggaag

SEQ ID NO: 2390386 - RNA, 19 nt, Human
caucaccuuaggcagggaa

SEQ ID NO: 2390387 - RNA, 18 nt, Human
caucaccuuaggcaggga

SEQ ID NO: 2390388 - RNA, 17 nt, Human
caucaccuuaggcaggg

SEQ ID NO: 2390389 - RNA, 16 nt, Human
caucaccuuaggcagg

SEQ ID NO: 2390390 - RNA, 20 nt, Human
caucaccaacgucugugcca

SEQ ID NO: 2390391 - RNA, 19 nt, Human
caucaagaagguagcuuga

SEQ ID NO: 2390392 - RNA, 14 nt, Human
caucaacugaauga

SEQ ID NO: 2390393 - RNA, 22 nt, Human
caucaagaauggggaucacaga

SEQ ID NO: 2390394 - RNA, 13 nt, Human
caucaagacugga

SEQ ID NO: 2390395 - RNA, 12 nt, Human
caucacccgcua

SEQ ID NO: 2390396 - RNA, 13 nt, Human
caucaccacaguu

SEQ ID NO: 2390397 - RNA, 22 nt, Human
caucaccgacgcgucuccuguu

SEQ ID NO: 2390398 - RNA, 20 nt, Human
caucacccuuaccaugugcc

SEQ ID NO: 2390399 - RNA, 19 nt, Human
caucaccgacgcgucuccu

SEQ ID NO: 2390400 - RNA, 12 nt, Human
caucauaaaaua

SEQ ID NO: 2390401 - RNA, 20 nt, Human
caucaguuagagcugacaca

SEQ ID NO: 2390402 - RNA, 24 nt, Human
caucaguguacccccgcccaggcu

SEQ ID NO: 2390403 - RNA, 15 nt, Human
caucaguuagagcug

SEQ ID NO: 2390404 - RNA, 16 nt, Human
caucaguuagagcuga

SEQ ID NO: 2390405 - RNA, 18 nt, Human
caucaguuagagcugaca

SEQ ID NO: 2390406 - RNA, 22 nt, Human
caucaguuacucugaagggcau

SEQ ID NO: 2390407 - RNA, 22 nt, Human
caucaguggcauggcuccaguc

SEQ ID NO: 2390408 - RNA, 21 nt, Human
caucaguguacccccgcccag

SEQ ID NO: 2390409 - RNA, 22 nt, Human
caucaguguacccccgcccagg

SEQ ID NO: 2390410 - RNA, 23 nt, Human
caucaguguacccccgcccaggc

SEQ ID NO: 2390411 - RNA, 18 nt, Human
caucaguggcauggcucc

SEQ ID NO: 2390412 - RNA, 16 nt, Human
caucaguggcauggcu

SEQ ID NO: 2390413 - RNA, 14 nt, Human
caucaguggagcca

SEQ ID NO: 2390414 - RNA, 24 nt, Human
caucagugcucccucacaugucag

SEQ ID NO: 2390415 - RNA, 16 nt, Human
caucagugcucccuca

SEQ ID NO: 2390416 - RNA, 15 nt, Human
caucagugcucccuc

SEQ ID NO: 2390417 - RNA, 15 nt, Human
caucagucccuaugu

SEQ ID NO: 2390418 - RNA, 17 nt, Human
caucagucccuauguau

SEQ ID NO: 2390419 - RNA, 22 nt, Human
caucaguauugaagcauuuuau

SEQ ID NO: 2390420 - RNA, 20 nt, Human
caucaguauugaagcauuuu

SEQ ID NO: 2390421 - RNA, 16 nt, Human
caucagguuccauccc

SEQ ID NO: 2390422 - RNA, 17 nt, Human
caucagguuccaucccg

SEQ ID NO: 2390423 - RNA, 16 nt, Human
caucaguauugaagca

SEQ ID NO: 2390424 - RNA, 18 nt, Human
caucagggacaggaugac

SEQ ID NO: 2390425 - RNA, 14 nt, Human
caucagggacagga

SEQ ID NO: 2390426 - RNA, 12 nt, Human
caucagggacag

SEQ ID NO: 2390427 - RNA, 15 nt, Human
caucacuccccucca

SEQ ID NO: 2390428 - RNA, 16 nt, Human
caucacucugcugcuu

SEQ ID NO: 2390429 - RNA, 13 nt, Human
caucacuccccuc

SEQ ID NO: 2390430 - RNA, 14 nt, Human
caucacuccccucc

SEQ ID NO: 2390431 - RNA, 19 nt, Human
cauucagugauuacuguca

SEQ ID NO: 2390432 - RNA, 21 nt, Human
cauucagugauuacugucaag

SEQ ID NO: 2390433 - RNA, 20 nt, Human
cauucagugauuacugucaa

SEQ ID NO: 2390434 - RNA, 15 nt, Human
cauucauaacuuuca

SEQ ID NO: 2390435 - RNA, 13 nt, Human
cauucaucucauu

SEQ ID NO: 2390436 - RNA, 17 nt, Human
cauucaggaagaugaaa

SEQ ID NO: 2390437 - RNA, 23 nt, Human
cauucaggaaaacugacagagga

SEQ ID NO: 2390438 - RNA, 20 nt, Human
cauucaggaaaacugacaga

SEQ ID NO: 2390439 - RNA, 13 nt, Human
cauucaggaaaac

SEQ ID NO: 2390440 - RNA, 15 nt, Human
cauucagcaagacaa

SEQ ID NO: 2390441 - RNA, 15 nt, Human
cauucagagagcagc

SEQ ID NO: 2390442 - RNA, 15 nt, Human
cauucacuugcauuu

SEQ ID NO: 2390443 - RNA, 15 nt, Human
cauucacuucauaau

SEQ ID NO: 2390444 - RNA, 14 nt, Human
cauucacuucauaa

SEQ ID NO: 2390445 - RNA, 12 nt, Human
cauucagagagc

SEQ ID NO: 2390446 - RNA, 18 nt, Human
cauucacuugcauuucuu

SEQ ID NO: 2390447 - RNA, 13 nt, Human
cauucagaaaaaa

SEQ ID NO: 2390448 - RNA, 20 nt, Human
cauucacccagacagcuccc

SEQ ID NO: 2390449 - RNA, 13 nt, Human
cauucacucuucc

SEQ ID NO: 2390450 - RNA, 19 nt, Human
cauucaccugccccaacuc

SEQ ID NO: 2390451 - RNA, 16 nt, Human
cauucaccugccccaa

SEQ ID NO: 2390452 - RNA, 15 nt, Human
cauucaccugcccca

SEQ ID NO: 2390453 - RNA, 20 nt, Human
cauucacucuuccagaaucc

SEQ ID NO: 2390454 - RNA, 11 nt, Human
cauucacuuca

SEQ ID NO: 2390455 - RNA, 14 nt, Human
cauucacucuucca

SEQ ID NO: 2390456 - RNA, 16 nt, Human
cauucacucuuccaga

SEQ ID NO: 2390457 - RNA, 23 nt, Human
cauuccaacagcucaagucuucc

SEQ ID NO: 2390458 - RNA, 16 nt, Human
cauuccaacagugagu

SEQ ID NO: 2390459 - RNA, 14 nt, Human
cauuccaacaaagg

SEQ ID NO: 2390460 - RNA, 18 nt, Human
cauuccaacaaaggguuu

SEQ ID NO: 2390461 - RNA, 13 nt, Human
cauuccaagacag

SEQ ID NO: 2390462 - RNA, 14 nt, Human
cauuccaagacagu

SEQ ID NO: 2390463 - RNA, 22 nt, Human
cauuccaacuaucucauuucca

SEQ ID NO: 2390464 - RNA, 22 nt, Human
cauuccaccuucccaugcccug

SEQ ID NO: 2390465 - RNA, 13 nt, Human
cauuccagaggaa

SEQ ID NO: 2390466 - RNA, 17 nt, Human
cauuccaccuucccaug

SEQ ID NO: 2390467 - RNA, 15 nt, Human
cauuccaagacagua

SEQ ID NO: 2390468 - RNA, 23 nt, Human
cauuccaagacaguauacagucc

SEQ ID NO: 2390469 - RNA, 15 nt, Human
cauucauucuuagcu

SEQ ID NO: 2390470 - RNA, 12 nt, Human
cauuccaacaaa

SEQ ID NO: 2390471 - RNA, 19 nt, Human
cauucauuuucuggguguu

SEQ ID NO: 2390472 - RNA, 18 nt, Human
cauucaucuuguguuuua

SEQ ID NO: 2390473 - RNA, 16 nt, Human
cauucaugccuggcuu

SEQ ID NO: 2390474 - RNA, 15 nt, Human
cauucauuccauucu

SEQ ID NO: 2390475 - RNA, 14 nt, Human
cauucaugccuggc

SEQ ID NO: 2390476 - RNA, 20 nt, Human
cauucauuuagcuaaacgga

SEQ ID NO: 2390477 - RNA, 17 nt, Human
cauucauuccauucugg

SEQ ID NO: 2390478 - RNA, 16 nt, Human
cauucauuccauucug

SEQ ID NO: 2390479 - RNA, 22 nt, Human
cauuccgacaaccgaugcucca

SEQ ID NO: 2390480 - RNA, 21 nt, Human
cauucccugagucaccaggaa

SEQ ID NO: 2390481 - RNA, 20 nt, Human
cauucccugagucaccagga

SEQ ID NO: 2390482 - RNA, 18 nt, Human
cauucccugagucaccag

SEQ ID NO: 2390483 - RNA, 23 nt, Human
cauuccuaacacagcauguguau

SEQ ID NO: 2390484 - RNA, 13 nt, Human
cauuccucaccuu

SEQ ID NO: 2390485 - RNA, 13 nt, Human
cauuccuauuucu

SEQ ID NO: 2390486 - RNA, 21 nt, Human
cauuccuaacacagcaugugu

SEQ ID NO: 2390487 - RNA, 20 nt, Human
cauuccuaacacagcaugug

SEQ ID NO: 2390488 - RNA, 18 nt, Human
cauuccuaaacuaucuuu

SEQ ID NO: 2390489 - RNA, 17 nt, Human
cauucccugagucacca

SEQ ID NO: 2390490 - RNA, 11 nt, Human
cauucccugag

SEQ ID NO: 2390491 - RNA, 17 nt, Human
cauuccccgucucuggu

SEQ ID NO: 2390492 - RNA, 23 nt, Human
cauuccccagguggcugacccag

SEQ ID NO: 2390493 - RNA, 17 nt, Human
cauuccccagguggcug

SEQ ID NO: 2390494 - RNA, 13 nt, Human
cauuccccaggug

SEQ ID NO: 2390495 - RNA, 13 nt, Human
cauuccccauggg

SEQ ID NO: 2390496 - RNA, 20 nt, Human
cauuccccaggaggccagcc

SEQ ID NO: 2390497 - RNA, 18 nt, Human
cauuccccaggaggccag

SEQ ID NO: 2390498 - RNA, 19 nt, Human
cauuccccaggaggccagc

SEQ ID NO: 2390499 - RNA, 14 nt, Human
cauuccaagccuga

SEQ ID NO: 2390500 - RNA, 14 nt, Human
cauuccagaggaag

SEQ ID NO: 2390501 - RNA, 13 nt, Human
cauuccagccccu

SEQ ID NO: 2390502 - RNA, 15 nt, Human
cauuccagccccucu

SEQ ID NO: 2390503 - RNA, 18 nt, Human
cauuccagccccucuggu

SEQ ID NO: 2390504 - RNA, 19 nt, Human
cauuccagccccucugguc

SEQ ID NO: 2390505 - RNA, 14 nt, Human
cauuccauccuuga

SEQ ID NO: 2390506 - RNA, 12 nt, Human
cauuccauccuu

SEQ ID NO: 2390507 - RNA, 22 nt, Human
cauuccagccccucuggucgcu

SEQ ID NO: 2390508 - RNA, 14 nt, Human
cauuccauucugga

SEQ ID NO: 2390509 - RNA, 15 nt, Human
cauuccauucuggaa

SEQ ID NO: 2390510 - RNA, 13 nt, Human
cauuccccaggag

SEQ ID NO: 2390511 - RNA, 15 nt, Human
cauuccccaggaggc

SEQ ID NO: 2390512 - RNA, 17 nt, Human
cauuccccaggaggcca

SEQ ID NO: 2390513 - RNA, 16 nt, Human
cauuaagccuuccaca

SEQ ID NO: 2390514 - RNA, 20 nt, Human
cauuaagcccucuuccauca

SEQ ID NO: 2390515 - RNA, 16 nt, Human
cauuaagcccucuucc

SEQ ID NO: 2390516 - RNA, 15 nt, Human
cauuaagaaaaucau

SEQ ID NO: 2390517 - RNA, 17 nt, Human
cauuaagcccucuucca

SEQ ID NO: 2390518 - RNA, 17 nt, Human
cauuaacuuagcaugug

SEQ ID NO: 2390519 - RNA, 16 nt, Human
cauuaacuucucugga

SEQ ID NO: 2390520 - RNA, 11 nt, Human
cauuaagaaaa

SEQ ID NO: 2390521 - RNA, 12 nt, Human
cauuaagaaaau

SEQ ID NO: 2390522 - RNA, 13 nt, Human
cauuaagaaaauc

SEQ ID NO: 2390523 - RNA, 14 nt, Human
cauuaagaaaauca

SEQ ID NO: 2390524 - RNA, 17 nt, Human
cauuaagaaaaucauau

SEQ ID NO: 2390525 - RNA, 23 nt, Human
cauuaacaguuuuccaugaaaac

SEQ ID NO: 2390526 - RNA, 18 nt, Human
cauuaacuaaucuauugg

SEQ ID NO: 2390527 - RNA, 16 nt, Human
cauuaacuaaucuauu

SEQ ID NO: 2390528 - RNA, 22 nt, Human
cauuaacaguuuuccaugaaaa

SEQ ID NO: 2390529 - RNA, 21 nt, Human
cauuaacaguuuuccaugaaa

SEQ ID NO: 2390530 - RNA, 16 nt, Human
cauuacagcuuaauca

SEQ ID NO: 2390531 - RNA, 24 nt, Human
cauuacagggaaugccugagugcc

SEQ ID NO: 2390532 - RNA, 21 nt, Human
cauuacagagaggagaaacac

SEQ ID NO: 2390533 - RNA, 14 nt, Human
cauuacagcuuaau

SEQ ID NO: 2390534 - RNA, 22 nt, Human
cauuacagagaggagaaacaca

SEQ ID NO: 2390535 - RNA, 21 nt, Human
cauuacagugggugccccccu

SEQ ID NO: 2390536 - RNA, 12 nt, Human
cauuaccacuca

SEQ ID NO: 2390537 - RNA, 13 nt, Human
cauuaccacucag

SEQ ID NO: 2390538 - RNA, 14 nt, Human
cauuaccacucagg

SEQ ID NO: 2390539 - RNA, 15 nt, Human
cauuaccacucaggc

SEQ ID NO: 2390540 - RNA, 16 nt, Human
cauuacaaauugcuua

SEQ ID NO: 2390541 - RNA, 12 nt, Human
cauuaauucuau

SEQ ID NO: 2390542 - RNA, 20 nt, Human
cauuacagagaggagaaaca

SEQ ID NO: 2390543 - RNA, 18 nt, Human
cauuacagagaggagaaa

SEQ ID NO: 2390544 - RNA, 15 nt, Human
cauuacagagaggag

SEQ ID NO: 2390545 - RNA, 13 nt, Human
cauuacagagagg

SEQ ID NO: 2390546 - RNA, 16 nt, Human
cauucaauacaagugu

SEQ ID NO: 2390547 - RNA, 21 nt, Human
cauucaauaagcaucaaacuc

SEQ ID NO: 2390548 - RNA, 22 nt, Human
cauucaaguguaaaauauuuug

SEQ ID NO: 2390549 - RNA, 23 nt, Human
cauucaaguguaaaauauuuuga

SEQ ID NO: 2390550 - RNA, 18 nt, Human
cauucaaguguaaaauau

SEQ ID NO: 2390551 - RNA, 19 nt, Human
cauucaaguguaaaauauu

SEQ ID NO: 2390552 - RNA, 20 nt, Human
cauucaaguguaaaauauuu

SEQ ID NO: 2390553 - RNA, 21 nt, Human
cauucaaguguaaaauauuuu

SEQ ID NO: 2390554 - RNA, 14 nt, Human
cauucacccagaca

SEQ ID NO: 2390555 - RNA, 13 nt, Human
cauucacccagac

SEQ ID NO: 2390556 - RNA, 13 nt, Human
cauucaccugccc

SEQ ID NO: 2390557 - RNA, 23 nt, Human
cauucacaguucuuugggccaga

SEQ ID NO: 2390558 - RNA, 20 nt, Human
cauucaauuuauucaagaaa

SEQ ID NO: 2390559 - RNA, 22 nt, Human
cauucaauaagcaucaaacucu

SEQ ID NO: 2390560 - RNA, 13 nt, Human
cauucaauguuua

SEQ ID NO: 2390561 - RNA, 21 nt, Human
cauucaauuuauucaagaaaa

SEQ ID NO: 2390562 - RNA, 22 nt, Human
cauucacaguucuuugggccag

SEQ ID NO: 2390563 - RNA, 17 nt, Human
cauucaacccuggagag

SEQ ID NO: 2390564 - RNA, 17 nt, Human
cauucaaguguaaaaua

SEQ ID NO: 2390565 - RNA, 18 nt, Human
cauucaaaaguugaaauu

SEQ ID NO: 2390566 - RNA, 12 nt, Human
cauucaaauuaa

SEQ ID NO: 2390567 - RNA, 12 nt, Human
cauucaacaaga

SEQ ID NO: 2390568 - RNA, 23 nt, Human
cauucaaauuaaggguuaagaaa

SEQ ID NO: 2390569 - RNA, 23 nt, Human
cauuauuggaauuaaccuggugc

SEQ ID NO: 2390570 - RNA, 20 nt, Human
cauuauuuuuccacuuuguu

SEQ ID NO: 2390571 - RNA, 22 nt, Human
cauuauuuuuccacuuuguucu

SEQ ID NO: 2390572 - RNA, 17 nt, Human
cauucaaaaguugaaau

SEQ ID NO: 2390573 - RNA, 16 nt, Human
cauucaaaaguugaaa

SEQ ID NO: 2390574 - RNA, 12 nt, Human
cauuauuggaau

SEQ ID NO: 2390575 - RNA, 14 nt, Human
cauuauuggaauua

SEQ ID NO: 2390576 - RNA, 22 nt, Human
cauuauuggaauuaaccuggug

SEQ ID NO: 2390577 - RNA, 20 nt, Human
cauuauuggaauuaaccugg

SEQ ID NO: 2390578 - RNA, 18 nt, Human
cauuauuggaauuaaccu

SEQ ID NO: 2390579 - RNA, 17 nt, Human
cauuauuggaauuaacc

SEQ ID NO: 2390580 - RNA, 18 nt, Human
cauuagaaauuagcugug

SEQ ID NO: 2390581 - RNA, 22 nt, Human
cauuagaagauauuagucuugg

SEQ ID NO: 2390582 - RNA, 14 nt, Human
cauuagaauuauuu

SEQ ID NO: 2390583 - RNA, 19 nt, Human
cauuagaauuauuuaaaca

SEQ ID NO: 2390584 - RNA, 17 nt, Human
cauuagaaauagacagu

SEQ ID NO: 2390585 - RNA, 23 nt, Human
cauuacuuuaccacccccacacc

SEQ ID NO: 2390586 - RNA, 21 nt, Human
cauuacuuuaccacccccaca

SEQ ID NO: 2390587 - RNA, 18 nt, Human
cauuaccagacgguucac

SEQ ID NO: 2390588 - RNA, 16 nt, Human
cauuaccacucaggca

SEQ ID NO: 2390589 - RNA, 23 nt, Human
cauuacucaauugauaaacauuu

SEQ ID NO: 2390590 - RNA, 23 nt, Human
cauuacugcaugcacuucuuaca

SEQ ID NO: 2390591 - RNA, 16 nt, Human
cauuacugcaugcacu

SEQ ID NO: 2390592 - RNA, 13 nt, Human
cauuacugcaugc

SEQ ID NO: 2390593 - RNA, 15 nt, Human
cauucugucuugaag

SEQ ID NO: 2390594 - RNA, 22 nt, Human
cauucugucgccuuagcauguu

SEQ ID NO: 2390595 - RNA, 17 nt, Human
cauucuguuaaucauua

SEQ ID NO: 2390596 - RNA, 14 nt, Human
cauucuuagcucuu

SEQ ID NO: 2390597 - RNA, 17 nt, Human
cauucuuagcucuuaau

SEQ ID NO: 2390598 - RNA, 14 nt, Human
cauucuuauaaaua

SEQ ID NO: 2390599 - RNA, 15 nt, Human
cauucuuauaaauau

SEQ ID NO: 2390600 - RNA, 16 nt, Human
cauucuuauaaauaug

SEQ ID NO: 2390601 - RNA, 21 nt, Human
cauucuuauuucaugaaaauu

SEQ ID NO: 2390602 - RNA, 17 nt, Human
cauucuuauaaauauga

SEQ ID NO: 2390603 - RNA, 22 nt, Human
cauucuuauaaauaugaagcuc

SEQ ID NO: 2390604 - RNA, 20 nt, Human
cauucugcuuucaucuuggu

SEQ ID NO: 2390605 - RNA, 12 nt, Human
cauucuggaagu

SEQ ID NO: 2390606 - RNA, 16 nt, Human
cauucuggaagugacu

SEQ ID NO: 2390607 - RNA, 21 nt, Human
cauucugucgccuuagcaugu

SEQ ID NO: 2390608 - RNA, 13 nt, Human
cauucuggaauaa

SEQ ID NO: 2390609 - RNA, 12 nt, Human
cauucugccugc

SEQ ID NO: 2390610 - RNA, 13 nt, Human
cauucugccugcc

SEQ ID NO: 2390611 - RNA, 15 nt, Human
cauucugccugccca

SEQ ID NO: 2390612 - RNA, 16 nt, Human
cauucugccugcccag

SEQ ID NO: 2390613 - RNA, 17 nt, Human
cauucugccugcccagg

SEQ ID NO: 2390614 - RNA, 18 nt, Human
cauucugccugcccaggc

SEQ ID NO: 2390615 - RNA, 19 nt, Human
cauucugccugcccaggcc

SEQ ID NO: 2390616 - RNA, 20 nt, Human
cauucugccugcccaggccc

SEQ ID NO: 2390617 - RNA, 23 nt, Human
cauuccucagggacagagacacc

SEQ ID NO: 2390618 - RNA, 16 nt, Human
cauuccucagggacag

SEQ ID NO: 2390619 - RNA, 13 nt, Human
cauuccucaggga

SEQ ID NO: 2390620 - RNA, 23 nt, Human
cauuccucaccuuuucccgggga

SEQ ID NO: 2390621 - RNA, 13 nt, Human
cauuccugaaaga

SEQ ID NO: 2390622 - RNA, 19 nt, Human
cauuccugaaagaaacagu

SEQ ID NO: 2390623 - RNA, 21 nt, Human
cauuccugauaugauuuaaaa

SEQ ID NO: 2390624 - RNA, 21 nt, Human
cauuccugaagaaccaguccc

SEQ ID NO: 2390625 - RNA, 20 nt, Human
cauuccugaagaaccagucc

SEQ ID NO: 2390626 - RNA, 17 nt, Human
cauuccugaagaaccag

SEQ ID NO: 2390627 - RNA, 16 nt, Human
cauuccugaagaacca

SEQ ID NO: 2390628 - RNA, 13 nt, Human
cauuccugaagaa

SEQ ID NO: 2390629 - RNA, 14 nt, Human
cauuccugaugcuu

SEQ ID NO: 2390630 - RNA, 16 nt, Human
cauuccugaugcuucu

SEQ ID NO: 2390631 - RNA, 19 nt, Human
cauuccugaugcuucuuca

SEQ ID NO: 2390632 - RNA, 22 nt, Human
cauuccugaugcuucuucagag

SEQ ID NO: 2390633 - RNA, 17 nt, Human
cauuccuggaaaccaca

SEQ ID NO: 2390634 - RNA, 19 nt, Human
cauuccuggaaaccacagu

SEQ ID NO: 2390635 - RNA, 16 nt, Human
cauuccugccugucuc

SEQ ID NO: 2390636 - RNA, 15 nt, Human
cauuccugccugucu

SEQ ID NO: 2390637 - RNA, 14 nt, Human
cauuccugccuguc

SEQ ID NO: 2390638 - RNA, 13 nt, Human
cauuccugccugu

SEQ ID NO: 2390639 - RNA, 23 nt, Human
cauuccugaugcuucuucagaga

SEQ ID NO: 2390640 - RNA, 21 nt, Human
cauuccugggaaauauucccu

SEQ ID NO: 2390641 - RNA, 21 nt, Human
cauuccuggaaaccacagucc

SEQ ID NO: 2390642 - RNA, 14 nt, Human
cauuccugggcaca

SEQ ID NO: 2390643 - RNA, 16 nt, Human
cauuccugggcacagu

SEQ ID NO: 2390644 - RNA, 15 nt, Human
cauuccugguaccca

SEQ ID NO: 2390645 - RNA, 17 nt, Human
cauuccugguacccagc

SEQ ID NO: 2390646 - RNA, 18 nt, Human
cauuccugguacccagcc

SEQ ID NO: 2390647 - RNA, 18 nt, Human
cauuccuguauucacccg

SEQ ID NO: 2390648 - RNA, 24 nt, Human
cauuccugguacccagccaucugc

SEQ ID NO: 2390649 - RNA, 13 nt, Human
cauuccuguauuc

SEQ ID NO: 2390650 - RNA, 19 nt, Human
cauuccugguacccagcca

SEQ ID NO: 2390651 - RNA, 20 nt, Human
cauuccugguacccagccau

SEQ ID NO: 2390652 - RNA, 21 nt, Human
cauuccugguacccagccauc

SEQ ID NO: 2390653 - RNA, 23 nt, Human
cauuccugguacccagccaucug

SEQ ID NO: 2390654 - RNA, 22 nt, Human
cauucugccaggcccccaagcc

SEQ ID NO: 2390655 - RNA, 20 nt, Human
cauucugauuuggaaaaaga

SEQ ID NO: 2390656 - RNA, 23 nt, Human
cauucugacucgguuucuccaaa

SEQ ID NO: 2390657 - RNA, 17 nt, Human
cauucugaccauuucag

SEQ ID NO: 2390658 - RNA, 16 nt, Human
cauucugaccauuuca

SEQ ID NO: 2390659 - RNA, 15 nt, Human
cauucugacucauau

SEQ ID NO: 2390660 - RNA, 12 nt, Human
cauucugacucg

SEQ ID NO: 2390661 - RNA, 16 nt, Human
cauucugacucgguuu

SEQ ID NO: 2390662 - RNA, 19 nt, Human
cauucugacucgguuucuc

SEQ ID NO: 2390663 - RNA, 21 nt, Human
cauucugacucgguuucucca

SEQ ID NO: 2390664 - RNA, 14 nt, Human
cauucuuuuguaau

SEQ ID NO: 2390665 - RNA, 15 nt, Human
cauucuuuuguaauu

SEQ ID NO: 2390666 - RNA, 16 nt, Human
cauucuuuuguaauuu

SEQ ID NO: 2390667 - RNA, 18 nt, Human
cauucuuuuguaauuuaa

SEQ ID NO: 2390668 - RNA, 12 nt, Human
cauucuuuugua

SEQ ID NO: 2390669 - RNA, 19 nt, Human
cauucuuuuaaaagacaag

SEQ ID NO: 2390670 - RNA, 16 nt, Human
cauucuuuuaaaagac

SEQ ID NO: 2390671 - RNA, 18 nt, Human
cauucuuuaucuugacau

SEQ ID NO: 2390672 - RNA, 17 nt, Human
cauucuuucugauaacu

SEQ ID NO: 2390673 - RNA, 16 nt, Human
cauucuugguuggcug

SEQ ID NO: 2390674 - RNA, 17 nt, Human
cauucuugguuggcugg

SEQ ID NO: 2390675 - RNA, 21 nt, Human
cauucuugguuggcuggccuu

SEQ ID NO: 2390676 - RNA, 17 nt, Human
cauucuugaaagcugug

SEQ ID NO: 2390677 - RNA, 23 nt, Human
cauucuucuguacgucugacagg

SEQ ID NO: 2390678 - RNA, 20 nt, Human
cauucuucucuagcuggugg

SEQ ID NO: 2390679 - RNA, 21 nt, Human
cauucuuccuaguuuucuccu

SEQ ID NO: 2390680 - RNA, 18 nt, Human
cauucuucucuagcuggu

SEQ ID NO: 2390681 - RNA, 19 nt, Human
cauucuucucuagcuggug

SEQ ID NO: 2390682 - RNA, 18 nt, Human
cauucuuccuaguuuucu

SEQ ID NO: 2390683 - RNA, 13 nt, Human
cauucuuccuagu

SEQ ID NO: 2390684 - RNA, 20 nt, Human
cauuuuagaagacucuacca

SEQ ID NO: 2390685 - RNA, 17 nt, Human
cauuuucaccccacccu

SEQ ID NO: 2390686 - RNA, 15 nt, Human
cauuuuccccccacu

SEQ ID NO: 2390687 - RNA, 14 nt, Human
cauuuuccccccac

SEQ ID NO: 2390688 - RNA, 12 nt, Human
cauuuucccaga

SEQ ID NO: 2390689 - RNA, 22 nt, Human
cauuuuccccccacucucccca

SEQ ID NO: 2390690 - RNA, 21 nt, Human
cauuuuccccccacucucccc

SEQ ID NO: 2390691 - RNA, 20 nt, Human
cauuuuccccccacucuccc

SEQ ID NO: 2390692 - RNA, 17 nt, Human
cauuuuccccccacucu

SEQ ID NO: 2390693 - RNA, 11 nt, Human
cauuuucugca

SEQ ID NO: 2390694 - RNA, 12 nt, Human
cauuuucugcaa

SEQ ID NO: 2390695 - RNA, 14 nt, Human
cauuuucugcaagc

SEQ ID NO: 2390696 - RNA, 21 nt, Human
cauuuuuaagugcugcauuua

SEQ ID NO: 2390697 - RNA, 19 nt, Human
cauuuuuaaucaugaaauu

SEQ ID NO: 2390698 - RNA, 18 nt, Human
cauuuucugcaagccugc

SEQ ID NO: 2390699 - RNA, 15 nt, Human
cauuuucugcaagcc

SEQ ID NO: 2390700 - RNA, 17 nt, Human
cauuuucugcaagccug

SEQ ID NO: 2390701 - RNA, 22 nt, Human
ccaaaaugcucuagugccuucu

SEQ ID NO: 2390702 - RNA, 23 nt, Human
ccaaaauguaggcuuaguuugug

SEQ ID NO: 2390703 - RNA, 17 nt, Human
cauuuuuaguagagaca

SEQ ID NO: 2390704 - RNA, 17 nt, Human
cauuuuuacaauaaaua

SEQ ID NO: 2390705 - RNA, 15 nt, Human
cauuuuuaaucauga

SEQ ID NO: 2390706 - RNA, 15 nt, Human
cauuuuuacaauaaa

SEQ ID NO: 2390707 - RNA, 16 nt, Human
ccaaacaaauaugcaa

SEQ ID NO: 2390708 - RNA, 20 nt, Human
ccaaaauuguuuugagcuuu

SEQ ID NO: 2390709 - RNA, 16 nt, Human
ccaaaauuauuucaga

SEQ ID NO: 2390710 - RNA, 21 nt, Human
ccaaaauguuggucauuuuau

SEQ ID NO: 2390711 - RNA, 20 nt, Human
ccaaaauguuggucauuuua

SEQ ID NO: 2390712 - RNA, 19 nt, Human
ccaaacaccuuccagcucc

SEQ ID NO: 2390713 - RNA, 15 nt, Human
ccaaacaccuuccag

SEQ ID NO: 2390714 - RNA, 17 nt, Human
ccaaaccaccagaagcc

SEQ ID NO: 2390715 - RNA, 16 nt, Human
ccaaacccuucagugc

SEQ ID NO: 2390716 - RNA, 20 nt, Human
cauuuuacccacacacagau

SEQ ID NO: 2390717 - RNA, 17 nt, Human
cauuuuacuuuuuccug

SEQ ID NO: 2390718 - RNA, 20 nt, Human
cauuuuacuuuuuccuggcu

SEQ ID NO: 2390719 - RNA, 22 nt, Human
cauuuuacuuuuuccuggcuca

SEQ ID NO: 2390720 - RNA, 16 nt, Human
cauuuucaccccaccc

SEQ ID NO: 2390721 - RNA, 22 nt, Human
cauuuuauuuuauuaugcauga

SEQ ID NO: 2390722 - RNA, 23 nt, Human
cauuuuauuuuauuaugcaugaa

SEQ ID NO: 2390723 - RNA, 23 nt, Human
cauuuuaccuuugacaaagguaa

SEQ ID NO: 2390724 - RNA, 16 nt, Human
cauuugcuuuuucacc

SEQ ID NO: 2390725 - RNA, 13 nt, Human
cauuugcuuuuug

SEQ ID NO: 2390726 - RNA, 17 nt, Human
cauuugcacccuccgcc

SEQ ID NO: 2390727 - RNA, 15 nt, Human
cauuugcacccuccg

SEQ ID NO: 2390728 - RNA, 20 nt, Human
cauuugcacuggaguucuau

SEQ ID NO: 2390729 - RNA, 21 nt, Human
cauuugcacuggaguucuaug

SEQ ID NO: 2390730 - RNA, 18 nt, Human
cauuugcagaguccugca

SEQ ID NO: 2390731 - RNA, 19 nt, Human
cauuugcagaguccugcac

SEQ ID NO: 2390732 - RNA, 15 nt, Human
cauuugauucugugu

SEQ ID NO: 2390733 - RNA, 16 nt, Human
cauuugaugcuaaaua

SEQ ID NO: 2390734 - RNA, 22 nt, Human
cauuugcaagggaaaagucucu

SEQ ID NO: 2390735 - RNA, 13 nt, Human
cauuugcugaaua

SEQ ID NO: 2390736 - RNA, 15 nt, Human
cauuugaugcuaaau

SEQ ID NO: 2390737 - RNA, 14 nt, Human
cauuugaugcuaaa

SEQ ID NO: 2390738 - RNA, 22 nt, Human
cauuugaguuauuuuaauuauc

SEQ ID NO: 2390739 - RNA, 18 nt, Human
cauuucuugggcccuccu

SEQ ID NO: 2390740 - RNA, 17 nt, Human
cauuucuugggcccucc

SEQ ID NO: 2390741 - RNA, 14 nt, Human
cauugauggggaag

SEQ ID NO: 2390742 - RNA, 22 nt, Human
cauugauaugaaaaauaugaua

SEQ ID NO: 2390743 - RNA, 19 nt, Human
cauugauaugaaaaauaug

SEQ ID NO: 2390744 - RNA, 18 nt, Human
cauugauaugaaaaauau

SEQ ID NO: 2390745 - RNA, 17 nt, Human
cauugauaugaaaaaua

SEQ ID NO: 2390746 - RNA, 18 nt, Human
cauugaccugaggcccuu

SEQ ID NO: 2390747 - RNA, 15 nt, Human
cauugaguaauauag

SEQ ID NO: 2390748 - RNA, 16 nt, Human
cauugacaagaacuga

SEQ ID NO: 2390749 - RNA, 14 nt, Human
cauugaccugaggc

SEQ ID NO: 2390750 - RNA, 23 nt, Human
cauugaauucuugguugaggaaa

SEQ ID NO: 2390751 - RNA, 22 nt, Human
cauugaauucuugguugaggaa

SEQ ID NO: 2390752 - RNA, 21 nt, Human
cauugaauucuugguugagga

SEQ ID NO: 2390753 - RNA, 15 nt, Human
cauugaccugaggcc

SEQ ID NO: 2390754 - RNA, 17 nt, Human
cauugaccugaggcccu

SEQ ID NO: 2390755 - RNA, 19 nt, Human
cauucuuuuguaauuuaaa

SEQ ID NO: 2390756 - RNA, 18 nt, Human
cauucuuuuaaaagacaa

SEQ ID NO: 2390757 - RNA, 18 nt, Human
cauugaaguaaugaauuu

SEQ ID NO: 2390758 - RNA, 19 nt, Human
cauugaaucuguauggcua

SEQ ID NO: 2390759 - RNA, 14 nt, Human
cauugaauuagaaa

SEQ ID NO: 2390760 - RNA, 19 nt, Human
cauugaaguaaugaauuuu

SEQ ID NO: 2390761 - RNA, 16 nt, Human
cauugaagucagaugu

SEQ ID NO: 2390762 - RNA, 15 nt, Human
cauugaaucuguaug

SEQ ID NO: 2390763 - RNA, 22 nt, Human
cauugaacacaaacuguaaaua

SEQ ID NO: 2390764 - RNA, 22 nt, Human
cauugugggauguucagcacug

SEQ ID NO: 2390765 - RNA, 21 nt, Human
cauugugggauguucagcacu

SEQ ID NO: 2390766 - RNA, 22 nt, Human
cauuguacaguuuguuuacaca

SEQ ID NO: 2390767 - RNA, 15 nt, Human
cauugugggaagggg

SEQ ID NO: 2390768 - RNA, 13 nt, Human
cauugugggaagg

SEQ ID NO: 2390769 - RNA, 18 nt, Human
cauugauugucagcuacu

SEQ ID NO: 2390770 - RNA, 17 nt, Human
cauugauugucagcuac

SEQ ID NO: 2390771 - RNA, 16 nt, Human
cauugauggggaagga

SEQ ID NO: 2390772 - RNA, 16 nt, Human
cauugauugucagcua

SEQ ID NO: 2390773 - RNA, 19 nt, Human
cauugauggggaaggaggc

SEQ ID NO: 2390774 - RNA, 21 nt, Human
cauuguaaaugugcuuuuaaa

SEQ ID NO: 2390775 - RNA, 16 nt, Human
cauuguaauguuacug

SEQ ID NO: 2390776 - RNA, 15 nt, Human
cauuguaauguuacu

SEQ ID NO: 2390777 - RNA, 15 nt, Human
cauuguaacuuggau

SEQ ID NO: 2390778 - RNA, 18 nt, Human
cauuguaauguuacugau

SEQ ID NO: 2390779 - RNA, 17 nt, Human
cauuguaauguuacuga

SEQ ID NO: 2390780 - RNA, 21 nt, Human
cauuguaauguuacugaucau

SEQ ID NO: 2390781 - RNA, 13 nt, Human
cauuguacaguuu

SEQ ID NO: 2390782 - RNA, 14 nt, Human
cauuguacaguuug

SEQ ID NO: 2390783 - RNA, 19 nt, Human
cauuguacaguuuguuuac

SEQ ID NO: 2390784 - RNA, 20 nt, Human
cauuguacaguuuguuuaca

SEQ ID NO: 2390785 - RNA, 21 nt, Human
cauuguacaguuuguuuacac

SEQ ID NO: 2390786 - RNA, 15 nt, Human
cauuuaaaaaaaauc

SEQ ID NO: 2390787 - RNA, 23 nt, Human
cauuuaaaacagacacuggcaug

SEQ ID NO: 2390788 - RNA, 18 nt, Human
cauuuaaaacagacacug

SEQ ID NO: 2390789 - RNA, 17 nt, Human
cauuuaaaacagacacu

SEQ ID NO: 2390790 - RNA, 13 nt, Human
cauuuaaaacaga

SEQ ID NO: 2390791 - RNA, 21 nt, Human
cauuuaaaaaaaaaauuuguu

SEQ ID NO: 2390792 - RNA, 12 nt, Human
cauuuaaaaaaa

SEQ ID NO: 2390793 - RNA, 14 nt, Human
cauuguuuugccaa

SEQ ID NO: 2390794 - RNA, 16 nt, Human
cauuguuuugccaaca

SEQ ID NO: 2390795 - RNA, 20 nt, Human
cauuguuuugccaacauugc

SEQ ID NO: 2390796 - RNA, 16 nt, Human
cauuguucaauuagaa

SEQ ID NO: 2390797 - RNA, 23 nt, Human
cauuguuuuaaaaagaaacaaga

SEQ ID NO: 2390798 - RNA, 17 nt, Human
cauuuaaauacagucuu

SEQ ID NO: 2390799 - RNA, 18 nt, Human
cauuuaaauacagucuuc

SEQ ID NO: 2390800 - RNA, 20 nt, Human
cauuuaaauacagucuucca

SEQ ID NO: 2390801 - RNA, 18 nt, Human
cauuuaaauuuuuuuccu

SEQ ID NO: 2390802 - RNA, 23 nt, Human
cauuuaaauuuuacccuuuagac

SEQ ID NO: 2390803 - RNA, 12 nt, Human
cauuuaauaaua

SEQ ID NO: 2390804 - RNA, 19 nt, Human
cauuuaagagacagucacc

SEQ ID NO: 2390805 - RNA, 23 nt, Human
cauuuaagagacagucaccccag

SEQ ID NO: 2390806 - RNA, 13 nt, Human
cauuuaauaauau

SEQ ID NO: 2390807 - RNA, 14 nt, Human
cauuuaauaauaua

SEQ ID NO: 2390808 - RNA, 17 nt, Human
cauuuaagagacaguca

SEQ ID NO: 2390809 - RNA, 24 nt, Human
cauuuaauguagccaugggaccaa

SEQ ID NO: 2390810 - RNA, 21 nt, Human
cauuuaauguagccaugggac

SEQ ID NO: 2390811 - RNA, 22 nt, Human
cauuuaauguagccaugggacc

SEQ ID NO: 2390812 - RNA, 20 nt, Human
cauuuaauguagccauggga

SEQ ID NO: 2390813 - RNA, 22 nt, Human
cauuuaauaauauacuugugga

SEQ ID NO: 2390814 - RNA, 17 nt, Human
cauuuaauaauauacuu

SEQ ID NO: 2390815 - RNA, 20 nt, Human
cauuuaauaauauacuugug

SEQ ID NO: 2390816 - RNA, 12 nt, Human
cauuuacaugua

SEQ ID NO: 2390817 - RNA, 20 nt, Human
cauuuacauguauuauuuca

SEQ ID NO: 2390818 - RNA, 22 nt, Human
cauuuacccuucuuuucugacu

SEQ ID NO: 2390819 - RNA, 16 nt, Human
cauuucuugggcccuc

SEQ ID NO: 2390820 - RNA, 15 nt, Human
cauuucuugggcccu

SEQ ID NO: 2390821 - RNA, 14 nt, Human
cauuucuugggccc

SEQ ID NO: 2390822 - RNA, 12 nt, Human
cauuucuugggc

SEQ ID NO: 2390823 - RNA, 18 nt, Human
cauuucuuugugcuuugg

SEQ ID NO: 2390824 - RNA, 12 nt, Human
cauuuacugugg

SEQ ID NO: 2390825 - RNA, 13 nt, Human
cauuuacuguggc

SEQ ID NO: 2390826 - RNA, 14 nt, Human
cauuuacuguggcu

SEQ ID NO: 2390827 - RNA, 15 nt, Human
cauuuacuguggcuu

SEQ ID NO: 2390828 - RNA, 19 nt, Human
cauuugaaaauuuugaugu

SEQ ID NO: 2390829 - RNA, 17 nt, Human
cauuugaaaauuuugau

SEQ ID NO: 2390830 - RNA, 13 nt, Human
caugggcacugcu

SEQ ID NO: 2390831 - RNA, 14 nt, Human
caugggcacugcug

SEQ ID NO: 2390832 - RNA, 15 nt, Human
caugggcacugcugg

SEQ ID NO: 2390833 - RNA, 14 nt, Human
caugggaggcucac

SEQ ID NO: 2390834 - RNA, 14 nt, Human
caugggagggggcu

SEQ ID NO: 2390835 - RNA, 22 nt, Human
caugggagggggcuugaagcca

SEQ ID NO: 2390836 - RNA, 18 nt, Human
caugggccuccugugugu

SEQ ID NO: 2390837 - RNA, 17 nt, Human
caugggcagagcccaag

SEQ ID NO: 2390838 - RNA, 15 nt, Human
caugggcagagccca

SEQ ID NO: 2390839 - RNA, 16 nt, Human
caugggcacugcuggg

SEQ ID NO: 2390840 - RNA, 17 nt, Human
caugggcacugcugggu

SEQ ID NO: 2390841 - RNA, 18 nt, Human
caugggcacugcugggug

SEQ ID NO: 2390842 - RNA, 19 nt, Human
caugggcacugcugggugg

SEQ ID NO: 2390843 - RNA, 23 nt, Human
caugggcacugcuggguggccca

SEQ ID NO: 2390844 - RNA, 13 nt, Human
caugggccuggcc

SEQ ID NO: 2390845 - RNA, 23 nt, Human
caugggccuggccaccucucucc

SEQ ID NO: 2390846 - RNA, 13 nt, Human
caugggcucugac

SEQ ID NO: 2390847 - RNA, 24 nt, Human
caugggccuggccaccucucuccu

SEQ ID NO: 2390848 - RNA, 12 nt, Human
caugggcuucac

SEQ ID NO: 2390849 - RNA, 13 nt, Human
caugggcuucacu

SEQ ID NO: 2390850 - RNA, 14 nt, Human
caugggcuucacug

SEQ ID NO: 2390851 - RNA, 15 nt, Human
caugggcuucacugu

SEQ ID NO: 2390852 - RNA, 16 nt, Human
caugggcuucacugua

SEQ ID NO: 2390853 - RNA, 22 nt, Human
caugggagccgggucugccucu

SEQ ID NO: 2390854 - RNA, 13 nt, Human
caugggagccggg

SEQ ID NO: 2390855 - RNA, 18 nt, Human
cauggcaucaccuccacc

SEQ ID NO: 2390856 - RNA, 21 nt, Human
caugggagcugguuagaaaug

SEQ ID NO: 2390857 - RNA, 23 nt, Human
caugggacagggaggacgcucuc

SEQ ID NO: 2390858 - RNA, 16 nt, Human
cauggaggcacacagc

SEQ ID NO: 2390859 - RNA, 19 nt, Human
cauggaggcacacagcugc

SEQ ID NO: 2390860 - RNA, 20 nt, Human
cauggaggcacacagcugca

SEQ ID NO: 2390861 - RNA, 22 nt, Human
cauggaggagcuugggggauga

SEQ ID NO: 2390862 - RNA, 17 nt, Human
cauggcagaguuugugu

SEQ ID NO: 2390863 - RNA, 18 nt, Human
cauggcagaguuugugug

SEQ ID NO: 2390864 - RNA, 19 nt, Human
caugggguuggcugggccc

SEQ ID NO: 2390865 - RNA, 21 nt, Human
cauggggugggguagggcuga

SEQ ID NO: 2390866 - RNA, 22 nt, Human
caugggguuggcugggcccaga

SEQ ID NO: 2390867 - RNA, 20 nt, Human
caugggguuggcugggccca

SEQ ID NO: 2390868 - RNA, 21 nt, Human
caugggcuucacuguauaaau

SEQ ID NO: 2390869 - RNA, 16 nt, Human
cauggggaagggauau

SEQ ID NO: 2390870 - RNA, 17 nt, Human
caugggcuucacuguau

SEQ ID NO: 2390871 - RNA, 20 nt, Human
caugggcuucacuguauaaa

SEQ ID NO: 2390872 - RNA, 23 nt, Human
caugggcuucacuguauaaauag

SEQ ID NO: 2390873 - RNA, 18 nt, Human
caugguacccccuucugg

SEQ ID NO: 2390874 - RNA, 19 nt, Human
caugguacccccuucuggg

SEQ ID NO: 2390875 - RNA, 23 nt, Human
caugggugaagggagagccagcu

SEQ ID NO: 2390876 - RNA, 22 nt, Human
caugggugaagggagagccagc

SEQ ID NO: 2390877 - RNA, 19 nt, Human
caugggugaagggagagcc

SEQ ID NO: 2390878 - RNA, 16 nt, Human
cauggucacacacuga

SEQ ID NO: 2390879 - RNA, 21 nt, Human
caugcgggcugggcagcuguu

SEQ ID NO: 2390880 - RNA, 17 nt, Human
caugcgggcuuccuccu

SEQ ID NO: 2390881 - RNA, 19 nt, Human
caugcuggguucugcacag

SEQ ID NO: 2390882 - RNA, 15 nt, Human
caugcgggcugggca

SEQ ID NO: 2390883 - RNA, 18 nt, Human
caugcgggcugggcagcu

SEQ ID NO: 2390884 - RNA, 19 nt, Human
caugcgggcugggcagcug

SEQ ID NO: 2390885 - RNA, 20 nt, Human
caugcgggcugggcagcugu

SEQ ID NO: 2390886 - RNA, 16 nt, Human
caugcggcccaggaug

SEQ ID NO: 2390887 - RNA, 21 nt, Human
caugcggcccagcccggcucc

SEQ ID NO: 2390888 - RNA, 22 nt, Human
caugcggcccagcccggcuccc

SEQ ID NO: 2390889 - RNA, 15 nt, Human
caugcggcccagccc

SEQ ID NO: 2390890 - RNA, 16 nt, Human
caugcggcccagcccg

SEQ ID NO: 2390891 - RNA, 18 nt, Human
caugcggcccagcccggc

SEQ ID NO: 2390892 - RNA, 19 nt, Human
caugcggcccagcccggcu

SEQ ID NO: 2390893 - RNA, 17 nt, Human
caugcugucccuuacgu

SEQ ID NO: 2390894 - RNA, 14 nt, Human
caugcugugugacu

SEQ ID NO: 2390895 - RNA, 21 nt, Human
caugcugugugacucaaacca

SEQ ID NO: 2390896 - RNA, 17 nt, Human
caugcugugugacucaa

SEQ ID NO: 2390897 - RNA, 13 nt, Human
caugcugucccuu

SEQ ID NO: 2390898 - RNA, 15 nt, Human
caugcugucccuuac

SEQ ID NO: 2390899 - RNA, 17 nt, Human
caugcacuuggcugcau
